United States Patent Application Publication US 2021/0382068 A1 - sequence listing, part 2

SEQ ID NO: 40859 - protein, 9 aa, Homo Sapiens
SQHAVQPKY

SEQ ID NO: 40860 - protein, 9 aa, Homo Sapiens
SQHYHQGYY

SEQ ID NO: 40861 - protein, 9 aa, Homo Sapiens
SQIGNCALY

SEQ ID NO: 40862 - protein, 9 aa, Homo Sapiens
SQVPVKHVY

SEQ ID NO: 40863 - protein, 9 aa, Homo Sapiens
SSIALHHQY

SEQ ID NO: 40864 - protein, 9 aa, Homo Sapiens
SSPAPRTAL

SEQ ID NO: 40865 - protein, 9 aa, Homo Sapiens
SSVSVEHSY

SEQ ID NO: 40866 - protein, 9 aa, Homo Sapiens
STEKIKAKY

SEQ ID NO: 40867 - protein, 9 aa, Homo Sapiens
STFFPFHEY

SEQ ID NO: 40868 - protein, 9 aa, Homo Sapiens
STKNIFGRY

SEQ ID NO: 40869 - protein, 9 aa, Homo Sapiens
STMLVTHDY

SEQ ID NO: 40870 - protein, 9 aa, Homo Sapiens
STQPEMHKY

SEQ ID NO: 40871 - protein, 9 aa, Homo Sapiens
STQSKWLKY

SEQ ID NO: 40872 - protein, 9 aa, Homo Sapiens
STQTIREMY

SEQ ID NO: 40873 - protein, 9 aa, Homo Sapiens
STSDVVRQY

SEQ ID NO: 40874 - protein, 9 aa, Homo Sapiens
STTAVSARY

SEQ ID NO: 40875 - protein, 9 aa, Homo Sapiens
STTEELHKY

SEQ ID NO: 40876 - protein, 9 aa, Homo Sapiens
STYQGERAY

SEQ ID NO: 40877 - protein, 9 aa, Homo Sapiens
SVGRPPGPY

SEQ ID NO: 40878 - protein, 9 aa, Homo Sapiens
SVHGFQMLY

SEQ ID NO: 40879 - protein, 9 aa, Homo Sapiens
SVHLVRHFY

SEQ ID NO: 40880 - protein, 9 aa, Homo Sapiens
SVHNLLPNY

SEQ ID NO: 40881 - protein, 9 aa, Homo Sapiens
SVHVIMYLY

SEQ ID NO: 40882 - protein, 9 aa, Homo Sapiens
SVKIWTAHY

SEQ ID NO: 40883 - protein, 9 aa, Homo Sapiens
SVKSMYLKY

SEQ ID NO: 40884 - protein, 9 aa, Homo Sapiens
SVLKTRFSY

SEQ ID NO: 40885 - protein, 9 aa, Homo Sapiens
SVLPFQIYY

SEQ ID NO: 40886 - protein, 9 aa, Homo Sapiens
SVQSIRPPY

SEQ ID NO: 40887 - protein, 9 aa, Homo Sapiens
SVSPLQRIY

SEQ ID NO: 40888 - protein, 9 aa, Homo Sapiens
SVTFLVHHY

SEQ ID NO: 40889 - protein, 9 aa, Homo Sapiens
SVWFLDHDY

SEQ ID NO: 40890 - protein, 9 aa, Homo Sapiens
SWTPYPPLY

SEQ ID NO: 40891 - protein, 9 aa, Homo Sapiens
SYIPYMHGY

SEQ ID NO: 40892 - protein, 9 aa, Homo Sapiens
SYLDQISRY

SEQ ID NO: 40893 - protein, 9 aa, Homo Sapiens
SYLPEAGQY

SEQ ID NO: 40894 - protein, 9 aa, Homo Sapiens
SYQKLLKYY

SEQ ID NO: 40895 - protein, 9 aa, Homo Sapiens
SYQRFTDCY

SEQ ID NO: 40896 - protein, 9 aa, Homo Sapiens
SYQRSMHAY

SEQ ID NO: 40897 - protein, 9 aa, Homo Sapiens
SYSPTSPSY

SEQ ID NO: 40898 - protein, 9 aa, Homo Sapiens
SYSRVLHGY

SEQ ID NO: 40899 - protein, 9 aa, Homo Sapiens
TAQYYQGLY

SEQ ID NO: 40900 - protein, 9 aa, Homo Sapiens
TASYVRAQY

SEQ ID NO: 40901 - protein, 9 aa, Homo Sapiens
TFHLPLHRY

SEQ ID NO: 40902 - protein, 9 aa, Homo Sapiens
TGWTHSAKY

SEQ ID NO: 40903 - protein, 9 aa, Homo Sapiens
TLARLPHLY

SEQ ID NO: 40904 - protein, 9 aa, Homo Sapiens
TLNKMPHDY

SEQ ID NO: 40905 - protein, 9 aa, Homo Sapiens
TLRDIETFY

SEQ ID NO: 40906 - protein, 9 aa, Homo Sapiens
TLSESTHKY

SEQ ID NO: 40907 - protein, 9 aa, Homo Sapiens
TLSSIRSKY

SEQ ID NO: 40908 - protein, 9 aa, Homo Sapiens
TLTDVAHEY

SEQ ID NO: 40909 - protein, 9 aa, Homo Sapiens
TLTIVPHGY

SEQ ID NO: 40910 - protein, 9 aa, Homo Sapiens
TMKDFNHSY

SEQ ID NO: 40911 - protein, 9 aa, Homo Sapiens
TQSGIAGGY

SEQ ID NO: 40912 - protein, 9 aa, Homo Sapiens
TQSGINGTY

SEQ ID NO: 40913 - protein, 9 aa, Homo Sapiens
TSLPTSHTY

SEQ ID NO: 40914 - protein, 9 aa, Homo Sapiens
TSQLYTVKY

SEQ ID NO: 40915 - protein, 9 aa, Homo Sapiens
TTNFIKAEY

SEQ ID NO: 40916 - protein, 9 aa, Homo Sapiens
TTQYIIHNY

SEQ ID NO: 40917 - protein, 9 aa, Homo Sapiens
TTSIVEHSY

SEQ ID NO: 40918 - protein, 9 aa, Homo Sapiens
TVHPVVHQY

SEQ ID NO: 40919 - protein, 9 aa, Homo Sapiens
TVIPNSHVY

SEQ ID NO: 40920 - protein, 9 aa, Homo Sapiens
TVKSILAEY

SEQ ID NO: 40921 - protein, 9 aa, Homo Sapiens
TVLYIEHRY

SEQ ID NO: 40922 - protein, 9 aa, Homo Sapiens
TVMKFVPRY

SEQ ID NO: 40923 - protein, 9 aa, Homo Sapiens
TVNPTFRGY

SEQ ID NO: 40924 - protein, 9 aa, Homo Sapiens
TVQTVRYKY

SEQ ID NO: 40925 - protein, 9 aa, Homo Sapiens
TVVKLAHTY

SEQ ID NO: 40926 - protein, 9 aa, Homo Sapiens
TVVSVSHIY

SEQ ID NO: 40927 - protein, 9 aa, Homo Sapiens
TYNILTHDY

SEQ ID NO: 40928 - protein, 9 aa, Homo Sapiens
TYQEFFSRY

SEQ ID NO: 40929 - protein, 9 aa, Homo Sapiens
TYQRLIASY

SEQ ID NO: 40930 - protein, 9 aa, Homo Sapiens
TYSTLLQRY

SEQ ID NO: 40931 - protein, 9 aa, Homo Sapiens
VANALAHRY

SEQ ID NO: 40932 - protein, 9 aa, Homo Sapiens
VAQSTRIIY

SEQ ID NO: 40933 - protein, 9 aa, Homo Sapiens
VASAIYAKY

SEQ ID NO: 40934 - protein, 9 aa, Homo Sapiens
VFYALSNKY

SEQ ID NO: 40935 - protein, 9 aa, Homo Sapiens
VGAGAPVYL

SEQ ID NO: 40936 - protein, 9 aa, Homo Sapiens
VGITIQHAY

SEQ ID NO: 40937 - protein, 9 aa, Homo Sapiens
VGSRVVAKY

SEQ ID NO: 40938 - protein, 9 aa, Homo Sapiens
VIGDVIRVY

SEQ ID NO: 40939 - protein, 9 aa, Homo Sapiens
VINPALDKY

SEQ ID NO: 40940 - protein, 9 aa, Homo Sapiens
VLAGHGHLY

SEQ ID NO: 40941 - protein, 9 aa, Homo Sapiens
VLHNLKERY

SEQ ID NO: 40942 - protein, 9 aa, Homo Sapiens
VLKAAAHHY

SEQ ID NO: 40943 - protein, 9 aa, Homo Sapiens
VLKEKIAKY

SEQ ID NO: 40944 - protein, 9 aa, Homo Sapiens
VLLVINHKY

SEQ ID NO: 40945 - protein, 9 aa, Homo Sapiens
VLSLYASGR

SEQ ID NO: 40946 - protein, 9 aa, Homo Sapiens
VMHQIISKY

SEQ ID NO: 40947 - protein, 9 aa, Homo Sapiens
VMQKIIPHY

SEQ ID NO: 40948 - protein, 9 aa, Homo Sapiens
VQKPDAANY

SEQ ID NO: 40949 - protein, 9 aa, Homo Sapiens
VQQVHVATY

SEQ ID NO: 40950 - protein, 9 aa, Homo Sapiens
VQSDLLHKY

SEQ ID NO: 40951 - protein, 9 aa, Homo Sapiens
VSFQHPHKY

SEQ ID NO: 40952 - protein, 9 aa, Homo Sapiens
VSTVLTSKY

SEQ ID NO: 40953 - protein, 9 aa, Homo Sapiens
VTKPVGGNY

SEQ ID NO: 40954 - protein, 9 aa, Homo Sapiens
VTSPAIGAY

SEQ ID NO: 40955 - protein, 9 aa, Homo Sapiens
VTSPIRASY

SEQ ID NO: 40956 - protein, 9 aa, Homo Sapiens
VVAVGRALY

SEQ ID NO: 40957 - protein, 9 aa, Homo Sapiens
VVGNVWRQY

SEQ ID NO: 40958 - protein, 9 aa, Homo Sapiens
VVHEIAYQY

SEQ ID NO: 40959 - protein, 9 aa, Homo Sapiens
VVKEIFFHY

SEQ ID NO: 40960 - protein, 9 aa, Homo Sapiens
VVKITGHFY

SEQ ID NO: 40961 - protein, 9 aa, Homo Sapiens
VVNIARYLY

SEQ ID NO: 40962 - protein, 9 aa, Homo Sapiens
VVNIGTHCY

SEQ ID NO: 40963 - protein, 9 aa, Homo Sapiens
VVQEELQCY

SEQ ID NO: 40964 - protein, 9 aa, Homo Sapiens
VVQKMIENY

SEQ ID NO: 40965 - protein, 9 aa, Homo Sapiens
VVQQVKGHY

SEQ ID NO: 40966 - protein, 9 aa, Homo Sapiens
VVQSVVHLY

SEQ ID NO: 40967 - protein, 9 aa, Homo Sapiens
VVQTVKASY

SEQ ID NO: 40968 - protein, 9 aa, Homo Sapiens
VVQVYRKKY

SEQ ID NO: 40969 - protein, 9 aa, Homo Sapiens
VVRNISYKY

SEQ ID NO: 40970 - protein, 9 aa, Homo Sapiens
VVSHLICQY

SEQ ID NO: 40971 - protein, 9 aa, Homo Sapiens
VVSPYLGTY

SEQ ID NO: 40972 - protein, 9 aa, Homo Sapiens
VYQDTWMKY

SEQ ID NO: 40973 - protein, 9 aa, Homo Sapiens
YLPDLHHLR

SEQ ID NO: 40974 - protein, 9 aa, Homo Sapiens
YQADIERMY

SEQ ID NO: 40975 - protein, 9 aa, Homo Sapiens
YQFTGIKKY

SEQ ID NO: 40976 - protein, 9 aa, Homo Sapiens
YQIKVHRKY

SEQ ID NO: 40977 - protein, 9 aa, Homo Sapiens
YQSNLPHNY

SEQ ID NO: 40978 - protein, 9 aa, Homo Sapiens
YSFGGCHRY

SEQ ID NO: 40979 - protein, 9 aa, Homo Sapiens
YVTTSTRTY

SEQ ID NO: 40980 - protein, 10 aa, Homo Sapiens
AASPRPNHSY

SEQ ID NO: 40981 - protein, 10 aa, Homo Sapiens
AAVGFPTHLY

SEQ ID NO: 40982 - protein, 10 aa, Homo Sapiens
AFHPFIAGPY

SEQ ID NO: 40983 - protein, 10 aa, Homo Sapiens
AFKALIAAQY

SEQ ID NO: 40984 - protein, 10 aa, Homo Sapiens
AFQRGYYRYY

SEQ ID NO: 40985 - protein, 10 aa, Homo Sapiens
AGFHLNEHLY

SEQ ID NO: 40986 - protein, 10 aa, Homo Sapiens
AGLPPVFGLY

SEQ ID NO: 40987 - protein, 10 aa, Homo Sapiens
AIGMPVEKRY

SEQ ID NO: 40988 - protein, 10 aa, Homo Sapiens
AIRNDEELNK

SEQ ID NO: 40989 - protein, 10 aa, Homo Sapiens
AIRTNYNDRY

SEQ ID NO: 40990 - protein, 10 aa, Homo Sapiens
ALIARSLGKY

SEQ ID NO: 40991 - protein, 10 aa, Homo Sapiens
ALKEKLEHQY

SEQ ID NO: 40992 - protein, 10 aa, Homo Sapiens
ALMGYATHKY

SEQ ID NO: 40993 - protein, 10 aa, Homo Sapiens
ALNPTGTFLY

SEQ ID NO: 40994 - protein, 10 aa, Homo Sapiens
ALRAYVKDHY

SEQ ID NO: 40995 - protein, 10 aa, Homo Sapiens
AMIENFNAKY

SEQ ID NO: 40996 - protein, 10 aa, Homo Sapiens
AMLAGATAVY

SEQ ID NO: 40997 - protein, 10 aa, Homo Sapiens
AMQSLKSRGY

SEQ ID NO: 40998 - protein, 10 aa, Homo Sapiens
AQAFIHNSLY

SEQ ID NO: 40999 - protein, 10 aa, Homo Sapiens
AQAGWLQHDY

SEQ ID NO: 41000 - protein, 10 aa, Homo Sapiens
AQAHFNNGEY

SEQ ID NO: 41001 - protein, 10 aa, Homo Sapiens
AQAPCGQAAY

SEQ ID NO: 41002 - protein, 10 aa, Homo Sapiens
AQFRDPCRSY

SEQ ID NO: 41003 - protein, 10 aa, Homo Sapiens
AQNPANMSKY

SEQ ID NO: 41004 - protein, 10 aa, Homo Sapiens
AQNQLVIWKY

SEQ ID NO: 41005 - protein, 10 aa, Homo Sapiens
AQNSPSTFHY

SEQ ID NO: 41006 - protein, 10 aa, Homo Sapiens
AQRAPGGLSY

SEQ ID NO: 41007 - protein, 10 aa, Homo Sapiens
AQRPGLALNY

SEQ ID NO: 41008 - protein, 10 aa, Homo Sapiens
AQYENPPHIY

SEQ ID NO: 41009 - protein, 10 aa, Homo Sapiens
ARYSGSYNDY

SEQ ID NO: 41010 - protein, 10 aa, Homo Sapiens
ASHPPVEGSY

SEQ ID NO: 41011 - protein, 10 aa, Homo Sapiens
ASINRIYGFY

SEQ ID NO: 41012 - protein, 10 aa, Homo Sapiens
ASKEPDNHVY

SEQ ID NO: 41013 - protein, 10 aa, Homo Sapiens
ASYLDQISRY

SEQ ID NO: 41014 - protein, 10 aa, Homo Sapiens
ATKDYKDHGY

SEQ ID NO: 41015 - protein, 10 aa, Homo Sapiens
ATKLIQNNHY

SEQ ID NO: 41016 - protein, 10 aa, Homo Sapiens
ATLKGPDSHY

SEQ ID NO: 41017 - protein, 10 aa, Homo Sapiens
ATLNVSTTRY

SEQ ID NO: 41018 - protein, 10 aa, Homo Sapiens
ATLTGGPARY

SEQ ID NO: 41019 - protein, 10 aa, Homo Sapiens
ATNPESKVFY

SEQ ID NO: 41020 - protein, 10 aa, Homo Sapiens
ATNPPYSLFY

SEQ ID NO: 41021 - protein, 10 aa, Homo Sapiens
ATTGHVIDIY

SEQ ID NO: 41022 - protein, 10 aa, Homo Sapiens
AVAALDGAKY

SEQ ID NO: 41023 - protein, 10 aa, Homo Sapiens
AVASKIGHSY

SEQ ID NO: 41024 - protein, 10 aa, Homo Sapiens
AVIGDVIRVY

SEQ ID NO: 41025 - protein, 10 aa, Homo Sapiens
AVLKAAAHHY

SEQ ID NO: 41026 - protein, 10 aa, Homo Sapiens
AVLKGVASDY

SEQ ID NO: 41027 - protein, 10 aa, Homo Sapiens
AVQKMDQAEY

SEQ ID NO: 41028 - protein, 10 aa, Homo Sapiens
AVRPHSAPEY

SEQ ID NO: 41029 - protein, 10 aa, Homo Sapiens
AVVRNVYHKY

SEQ ID NO: 41030 - protein, 10 aa, Homo Sapiens
AVVSVCGHLY

SEQ ID NO: 41031 - protein, 10 aa, Homo Sapiens
AVYNNIMRHY

SEQ ID NO: 41032 - protein, 10 aa, Homo Sapiens
AWLDKIDRRY

SEQ ID NO: 41033 - protein, 10 aa, Homo Sapiens
AYREHPYGRY

SEQ ID NO: 41034 - protein, 10 aa, Homo Sapiens
AYWRQAGLSY

SEQ ID NO: 41035 - protein, 10 aa, Homo Sapiens
AYYEIRYQFY

SEQ ID NO: 41036 - protein, 10 aa, Homo Sapiens
CFSGMSDHRY

SEQ ID NO: 41037 - protein, 10 aa, Homo Sapiens
ELYERPPHLY

SEQ ID NO: 41038 - protein, 10 aa, Homo Sapiens
FGAGHLICLY

SEQ ID NO: 41039 - protein, 10 aa, Homo Sapiens
FQFIPYMKKY

SEQ ID NO: 41040 - protein, 10 aa, Homo Sapiens
FQKEKIQGEY

SEQ ID NO: 41041 - protein, 10 aa, Homo Sapiens
FQRCLDDHKY

SEQ ID NO: 41042 - protein, 10 aa, Homo Sapiens
GANGLPKHSY

SEQ ID NO: 41043 - protein, 10 aa, Homo Sapiens
GFKEQIYDVY

SEQ ID NO: 41044 - protein, 10 aa, Homo Sapiens
GLTEKANHYY

SEQ ID NO: 41045 - protein, 10 aa, Homo Sapiens
GMRGLIPHKY

SEQ ID NO: 41046 - protein, 10 aa, Homo Sapiens
GQCGNQIGAK

SEQ ID NO: 41047 - protein, 10 aa, Homo Sapiens
GQFAEAAGKY

SEQ ID NO: 41048 - protein, 10 aa, Homo Sapiens
GQHDLVPHYY

SEQ ID NO: 41049 - protein, 10 aa, Homo Sapiens
GQIEEAGWSY

SEQ ID NO: 41050 - protein, 10 aa, Homo Sapiens
GQISDPSRSY

SEQ ID NO: 41051 - protein, 10 aa, Homo Sapiens
GQKCEFQDAY

SEQ ID NO: 41052 - protein, 10 aa, Homo Sapiens
GQKLIDVNHY

SEQ ID NO: 41053 - protein, 10 aa, Homo Sapiens
GQNVADYMRY

SEQ ID NO: 41054 - protein, 10 aa, Homo Sapiens
GQYGNPLNKY

SEQ ID NO: 41055 - protein, 10 aa, Homo Sapiens
GSNLTPAHHY

SEQ ID NO: 41056 - protein, 10 aa, Homo Sapiens
GSNPFTGFFY

SEQ ID NO: 41057 - protein, 10 aa, Homo Sapiens
GTIKDIVTRY

SEQ ID NO: 41058 - protein, 10 aa, Homo Sapiens
GTKKDFEDLY

SEQ ID NO: 41059 - protein, 10 aa, Homo Sapiens
GTKQWVHARY

SEQ ID NO: 41060 - protein, 10 aa, Homo Sapiens
GTLSESTHKY

SEQ ID NO: 41061 - protein, 10 aa, Homo Sapiens
GTQPPGKMEY

SEQ ID NO: 41062 - protein, 10 aa, Homo Sapiens
GTREHWDAVY

SEQ ID NO: 41063 - protein, 10 aa, Homo Sapiens
GVANALAHRY

SEQ ID NO: 41064 - protein, 10 aa, Homo Sapiens
GVHAVMYSYY

SEQ ID NO: 41065 - protein, 10 aa, Homo Sapiens
GVHSGLNHNY

SEQ ID NO: 41066 - protein, 10 aa, Homo Sapiens
GVNPHVNHLY

SEQ ID NO: 41067 - protein, 10 aa, Homo Sapiens
GVNPRVNHLY

SEQ ID NO: 41068 - protein, 10 aa, Homo Sapiens
GVNPYINHLY

SEQ ID NO: 41069 - protein, 10 aa, Homo Sapiens
GYFHDATRVY

SEQ ID NO: 41070 - protein, 10 aa, Homo Sapiens
GYYQGGGGRY

SEQ ID NO: 41071 - protein, 10 aa, Homo Sapiens
HGKDVFEAFY

SEQ ID NO: 41072 - protein, 10 aa, Homo Sapiens
HGRPPPQHFY

SEQ ID NO: 41073 - protein, 10 aa, Homo Sapiens
HISNTAKHFY

SEQ ID NO: 41074 - protein, 10 aa, Homo Sapiens
HLSERADWQY

SEQ ID NO: 41075 - protein, 10 aa, Homo Sapiens
HMADYPDYKY

SEQ ID NO: 41076 - protein, 10 aa, Homo Sapiens
HMQNTPGFMY

SEQ ID NO: 41077 - protein, 10 aa, Homo Sapiens
HQITVLHVYH

SEQ ID NO: 41078 - protein, 10 aa, Homo Sapiens
HQNGDYTHFY

SEQ ID NO: 41079 - protein, 10 aa, Homo Sapiens
HTFQNDIHVY

SEQ ID NO: 41080 - protein, 10 aa, Homo Sapiens
HTGLVDAHLY

SEQ ID NO: 41081 - protein, 10 aa, Homo Sapiens
HTVVKLAHTY

SEQ ID NO: 41082 - protein, 10 aa, Homo Sapiens
HVNTCYKHFY

SEQ ID NO: 41083 - protein, 10 aa, Homo Sapiens
IGLPYADHNY

SEQ ID NO: 41084 - protein, 10 aa, Homo Sapiens
IIVPPNFDKY

SEQ ID NO: 41085 - protein, 10 aa, Homo Sapiens
ILHEPGEDKY

SEQ ID NO: 41086 - protein, 10 aa, Homo Sapiens
ILNSPYAKLY

SEQ ID NO: 41087 - protein, 10 aa, Homo Sapiens
ILSNLTCNNY

SEQ ID NO: 41088 - protein, 10 aa, Homo Sapiens
IMNDYPKFKY

SEQ ID NO: 41089 - protein, 10 aa, Homo Sapiens
IQFEIAHAYY

SEQ ID NO: 41090 - protein, 10 aa, Homo Sapiens
IQNPDLWNSY

SEQ ID NO: 41091 - protein, 10 aa, Homo Sapiens
ITAVGPAHFY

SEQ ID NO: 41092 - protein, 10 aa, Homo Sapiens
IVKQLEEDLY

SEQ ID NO: 41093 - protein, 10 aa, Homo Sapiens
IVQEPKGQKY

SEQ ID NO: 41094 - protein, 10 aa, Homo Sapiens
IVQNITFGKY

SEQ ID NO: 41095 - protein, 10 aa, Homo Sapiens
IVQPIISKLY

SEQ ID NO: 41096 - protein, 10 aa, Homo Sapiens
IVQPVSGAVY

SEQ ID NO: 41097 - protein, 10 aa, Homo Sapiens
KAFSQSSHLY

SEQ ID NO: 41098 - protein, 10 aa, Homo Sapiens
KALEAVFGKY

SEQ ID NO: 41099 - protein, 10 aa, Homo Sapiens
KALELDSNLY

SEQ ID NO: 41100 - protein, 10 aa, Homo Sapiens
KALGKVLSKY

SEQ ID NO: 41101 - protein, 10 aa, Homo Sapiens
KAQAAFFGSY

SEQ ID NO: 41102 - protein, 10 aa, Homo Sapiens
KAQLGLGHSY

SEQ ID NO: 41103 - protein, 10 aa, Homo Sapiens
KAQTIDRAKY

SEQ ID NO: 41104 - protein, 10 aa, Homo Sapiens
KAYADFYRNY

SEQ ID NO: 41105 - protein, 10 aa, Homo Sapiens
KEKEPLESQY

SEQ ID NO: 41106 - protein, 10 aa, Homo Sapiens
KFADDMYSLY

SEQ ID NO: 41107 - protein, 10 aa, Homo Sapiens
KFASSEKHSY

SEQ ID NO: 41108 - protein, 10 aa, Homo Sapiens
KFLEETNCLY

SEQ ID NO: 41109 - protein, 10 aa, Homo Sapiens
KFRDLSPPRY

SEQ ID NO: 41110 - protein, 10 aa, Homo Sapiens
KFSPVATASY

SEQ ID NO: 41111 - protein, 10 aa, Homo Sapiens
KGISDLAQHY

SEQ ID NO: 41112 - protein, 10 aa, Homo Sapiens
KGKGLILHYY

SEQ ID NO: 41113 - protein, 10 aa, Homo Sapiens
KGLTDSIHRY

SEQ ID NO: 41114 - protein, 10 aa, Homo Sapiens
KIADFGFARY

SEQ ID NO: 41115 - protein, 10 aa, Homo Sapiens
KIADMGHLKY

SEQ ID NO: 41116 - protein, 10 aa, Homo Sapiens
KIIAPPERKY

SEQ ID NO: 41117 - protein, 10 aa, Homo Sapiens
KIIEARLKMY

SEQ ID NO: 41118 - protein, 10 aa, Homo Sapiens
KIISEPGSYY

SEQ ID NO: 41119 - protein, 10 aa, Homo Sapiens
KINREVLHSY

SEQ ID NO: 41120 - protein, 10 aa, Homo Sapiens
KIQDAQDKLY

SEQ ID NO: 41121 - protein, 10 aa, Homo Sapiens
KIQDFNDTFY

SEQ ID NO: 41122 - protein, 10 aa, Homo Sapiens
KIQEESLRTY

SEQ ID NO: 41123 - protein, 10 aa, Homo Sapiens
KIREDHKSYY

SEQ ID NO: 41124 - protein, 10 aa, Homo Sapiens
KIRSLDNGGY

SEQ ID NO: 41125 - protein, 10 aa, Homo Sapiens
KISPWTGRFY

SEQ ID NO: 41126 - protein, 10 aa, Homo Sapiens
KITIPYGRKY

SEQ ID NO: 41127 - protein, 10 aa, Homo Sapiens
KIYPGHGRRY

SEQ ID NO: 41128 - protein, 10 aa, Homo Sapiens
KLADQIFAYY

SEQ ID NO: 41129 - protein, 10 aa, Homo Sapiens
KLFDNTVGAY

SEQ ID NO: 41130 - protein, 10 aa, Homo Sapiens
KLFNAIIHKY

SEQ ID NO: 41131 - protein, 10 aa, Homo Sapiens
KLFPGSPAIY

SEQ ID NO: 41132 - protein, 10 aa, Homo Sapiens
KLGPYVDHYY

SEQ ID NO: 41133 - protein, 10 aa, Homo Sapiens
KLILLPSHMY

SEQ ID NO: 41134 - protein, 10 aa, Homo Sapiens
KLITAIYADY

SEQ ID NO: 41135 - protein, 10 aa, Homo Sapiens
KLKDPANFQY

SEQ ID NO: 41136 - protein, 10 aa, Homo Sapiens
KLKDWQEGGY

SEQ ID NO: 41137 - protein, 10 aa, Homo Sapiens
KLKEMGFDRY

SEQ ID NO: 41138 - protein, 10 aa, Homo Sapiens
KLKKVFQQHY

SEQ ID NO: 41139 - protein, 10 aa, Homo Sapiens
KLKPDFPDAY

SEQ ID NO: 41140 - protein, 10 aa, Homo Sapiens
KLLTKNGHVY

SEQ ID NO: 41141 - protein, 10 aa, Homo Sapiens
KLLTNTHHKY

SEQ ID NO: 41142 - protein, 10 aa, Homo Sapiens
KLMEEFVKQY

SEQ ID NO: 41143 - protein, 10 aa, Homo Sapiens
KLNPAANHRL

SEQ ID NO: 41144 - protein, 10 aa, Homo Sapiens
KLNPQQAPLY

SEQ ID NO: 41145 - protein, 10 aa, Homo Sapiens
KLNPRLAILY

SEQ ID NO: 41146 - protein, 10 aa, Homo Sapiens
KLNQENEHIY

SEQ ID NO: 41147 - protein, 10 aa, Homo Sapiens
KLPGSIQHVY

SEQ ID NO: 41148 - protein, 10 aa, Homo Sapiens
KLQDVFEFRY

SEQ ID NO: 41149 - protein, 10 aa, Homo Sapiens
KLQSKEYSQY

SEQ ID NO: 41150 - protein, 10 aa, Homo Sapiens
KLVEAIRTNY

SEQ ID NO: 41151 - protein, 10 aa, Homo Sapiens
KLVQLILHEY

SEQ ID NO: 41152 - protein, 10 aa, Homo Sapiens
KLWDGRTGKY

SEQ ID NO: 41153 - protein, 10 aa, Homo Sapiens
KLWKHIKHKY

SEQ ID NO: 41154 - protein, 10 aa, Homo Sapiens
KMFNALIHRY

SEQ ID NO: 41155 - protein, 10 aa, Homo Sapiens
KMIEDRSRDY

SEQ ID NO: 41156 - protein, 10 aa, Homo Sapiens
KMKGDYHRYL

SEQ ID NO: 41157 - protein, 10 aa, Homo Sapiens
KMLPDKDCRY

SEQ ID NO: 41158 - protein, 10 aa, Homo Sapiens
KMMNGGHYTY

SEQ ID NO: 41159 - protein, 10 aa, Homo Sapiens
KNIPEGSHQY

SEQ ID NO: 41160 - protein, 10 aa, Homo Sapiens
KNKPGEIAKY

SEQ ID NO: 41161 - protein, 10 aa, Homo Sapiens
KQFDRKHHTY

SEQ ID NO: 41162 - protein, 10 aa, Homo Sapiens
KQFRPPMGGY

SEQ ID NO: 41163 - protein, 10 aa, Homo Sapiens
KQFSKRYLKY

SEQ ID NO: 41164 - protein, 10 aa, Homo Sapiens
KQHGREDLLY

SEQ ID NO: 41165 - protein, 10 aa, Homo Sapiens
KQIANSQDGY

SEQ ID NO: 41166 - protein, 10 aa, Homo Sapiens
KQIEERASHY

SEQ ID NO: 41167 - protein, 10 aa, Homo Sapiens
KQISVGFIGY

SEQ ID NO: 41168 - protein, 10 aa, Homo Sapiens
KQKDIVSIHY

SEQ ID NO: 41169 - protein, 10 aa, Homo Sapiens
KQKDLSGFYR

SEQ ID NO: 41170 - protein, 10 aa, Homo Sapiens
KQKVDFIDAY

SEQ ID NO: 41171 - protein, 10 aa, Homo Sapiens
KQLAGLVANY

SEQ ID NO: 41172 - protein, 10 aa, Homo Sapiens
KQLSILVNCY

SEQ ID NO: 41173 - protein, 10 aa, Homo Sapiens
KQMEERYKKY

SEQ ID NO: 41174 - protein, 10 aa, Homo Sapiens
KQNELKNVKY

SEQ ID NO: 41175 - protein, 10 aa, Homo Sapiens
KQNQVKFGSY

SEQ ID NO: 41176 - protein, 10 aa, Homo Sapiens
KQNYKILHKY

SEQ ID NO: 41177 - protein, 10 aa, Homo Sapiens
KQQNQYQASY

SEQ ID NO: 41178 - protein, 10 aa, Homo Sapiens
KQVEMLERKY

SEQ ID NO: 41179 - protein, 10 aa, Homo Sapiens
KQYEEFAMSY

SEQ ID NO: 41180 - protein, 10 aa, Homo Sapiens
KQYEVEIQTY

SEQ ID NO: 41181 - protein, 10 aa, Homo Sapiens
KRFADSTHRY

SEQ ID NO: 41182 - protein, 10 aa, Homo Sapiens
KSFPARLRQY

SEQ ID NO: 41183 - protein, 10 aa, Homo Sapiens
KSFSDTLKTY

SEQ ID NO: 41184 - protein, 10 aa, Homo Sapiens
KSIGDIFLKY

SEQ ID NO: 41185 - protein, 10 aa, Homo Sapiens
KSKEDCIARY

SEQ ID NO: 41186 - protein, 10 aa, Homo Sapiens
KSKSFTGGGY

SEQ ID NO: 41187 - protein, 10 aa, Homo Sapiens
KSLEDLCSQY

SEQ ID NO: 41188 - protein, 10 aa, Homo Sapiens
KSLQNAQKHY

SEQ ID NO: 41189 - protein, 10 aa, Homo Sapiens
KSNFPARAAY

SEQ ID NO: 41190 - protein, 10 aa, Homo Sapiens
KSVGVFEAFY

SEQ ID NO: 41191 - protein, 10 aa, Homo Sapiens
KSYIGLGHIY

SEQ ID NO: 41192 - protein, 10 aa, Homo Sapiens
KTAVIDHHNY

SEQ ID NO: 41193 - protein, 10 aa, Homo Sapiens
KTFCPAHKSY

SEQ ID NO: 41194 - protein, 10 aa, Homo Sapiens
KTFEIIVHQY

SEQ ID NO: 41195 - protein, 10 aa, Homo Sapiens
KTIILPQHLY

SEQ ID NO: 41196 - protein, 10 aa, Homo Sapiens
KTKEVIGTGY

SEQ ID NO: 41197 - protein, 10 aa, Homo Sapiens
KTKFPAEQYY

SEQ ID NO: 41198 - protein, 10 aa, Homo Sapiens
KTKGYIFLEY

SEQ ID NO: 41199 - protein, 10 aa, Homo Sapiens
KTKQLVESKY

SEQ ID NO: 41200 - protein, 10 aa, Homo Sapiens
KTLDDMISYY

SEQ ID NO: 41201 - protein, 10 aa, Homo Sapiens
KTLDTKPGLY

SEQ ID NO: 41202 - protein, 10 aa, Homo Sapiens
KTLGDFAAEY

SEQ ID NO: 41203 - protein, 10 aa, Homo Sapiens
KTLPFSRSYY

SEQ ID NO: 41204 - protein, 10 aa, Homo Sapiens
KTLQETNMMY

SEQ ID NO: 41205 - protein, 10 aa, Homo Sapiens
KTLSNVKSFY

SEQ ID NO: 41206 - protein, 10 aa, Homo Sapiens
KTLTPIIQEY

SEQ ID NO: 41207 - protein, 10 aa, Homo Sapiens
KTLTPISAAY

SEQ ID NO: 41208 - protein, 10 aa, Homo Sapiens
KTNDQMVVVY

SEQ ID NO: 41209 - protein, 10 aa, Homo Sapiens
KTNHIGHTGY

SEQ ID NO: 41210 - protein, 10 aa, Homo Sapiens
KTPPGLQHEY

SEQ ID NO: 41211 - protein, 10 aa, Homo Sapiens
KTVAGGAWTY

SEQ ID NO: 41212 - protein, 10 aa, Homo Sapiens
KTVGEPGWLY

SEQ ID NO: 41213 - protein, 10 aa, Homo Sapiens
KTVHPVVHQY

SEQ ID NO: 41214 - protein, 10 aa, Homo Sapiens
KTWNAVLLRY

SEQ ID NO: 41215 - protein, 10 aa, Homo Sapiens
KTYNDALFRY

SEQ ID NO: 41216 - protein, 10 aa, Homo Sapiens
KVADWTGATY

SEQ ID NO: 41217 - protein, 10 aa, Homo Sapiens
KVAIKVGGRY

SEQ ID NO: 41218 - protein, 10 aa, Homo Sapiens
KVCPDLLNKY

SEQ ID NO: 41219 - protein, 10 aa, Homo Sapiens
KVFDGIPPPY

SEQ ID NO: 41220 - protein, 10 aa, Homo Sapiens
KVFPEDMAKY

SEQ ID NO: 41221 - protein, 10 aa, Homo Sapiens
KVIDQQNGLY

SEQ ID NO: 41222 - protein, 10 aa, Homo Sapiens
KVINDGLFYY

SEQ ID NO: 41223 - protein, 10 aa, Homo Sapiens
KVIPVLEDNY

SEQ ID NO: 41224 - protein, 10 aa, Homo Sapiens
KVKTSEFYRY

SEQ ID NO: 41225 - protein, 10 aa, Homo Sapiens
KVLDILLEQY

SEQ ID NO: 41226 - protein, 10 aa, Homo Sapiens
KVLRDGAGKY

SEQ ID NO: 41227 - protein, 10 aa, Homo Sapiens
KVMLPGQCQY

SEQ ID NO: 41228 - protein, 10 aa, Homo Sapiens
KVQAGNSSLY

SEQ ID NO: 41229 - protein, 10 aa, Homo Sapiens
KVQDITMQWY

SEQ ID NO: 41230 - protein, 10 aa, Homo Sapiens
KVQEKSTWKM

SEQ ID NO: 41231 - protein, 10 aa, Homo Sapiens
KVQEQIFNLY

SEQ ID NO: 41232 - protein, 10 aa, Homo Sapiens
KVQSKVNLKY

SEQ ID NO: 41233 - protein, 10 aa, Homo Sapiens
KVRAVIGSTY

SEQ ID NO: 41234 - protein, 10 aa, Homo Sapiens
KVRSPGQDKL

SEQ ID NO: 41235 - protein, 10 aa, Homo Sapiens
KVRVDLPDKY

SEQ ID NO: 41236 - protein, 10 aa, Homo Sapiens
KVVDRIFSLY

SEQ ID NO: 41237 - protein, 10 aa, Homo Sapiens
KVVDRIYSLY

SEQ ID NO: 41238 - protein, 10 aa, Homo Sapiens
KVVIVDESHY

SEQ ID NO: 41239 - protein, 10 aa, Homo Sapiens
KVVQVYRKKY

SEQ ID NO: 41240 - protein, 10 aa, Homo Sapiens
KVYDDMAFRY

SEQ ID NO: 41241 - protein, 10 aa, Homo Sapiens
KYAPAEGNRY

SEQ ID NO: 41242 - protein, 10 aa, Homo Sapiens
KYISLIYTNY

SEQ ID NO: 41243 - protein, 10 aa, Homo Sapiens
KYKPFKGVKY

SEQ ID NO: 41244 - protein, 10 aa, Homo Sapiens
KYLEPLYNDY

SEQ ID NO: 41245 - protein, 10 aa, Homo Sapiens
KYLGSVDSKY

SEQ ID NO: 41246 - protein, 10 aa, Homo Sapiens
KYLPHSAGRY

SEQ ID NO: 41247 - protein, 10 aa, Homo Sapiens
KYMPDLTPQY

SEQ ID NO: 41248 - protein, 10 aa, Homo Sapiens
KYNPWWTDKY

SEQ ID NO: 41249 - protein, 10 aa, Homo Sapiens
KYYTGNYDQY

SEQ ID NO: 41250 - protein, 10 aa, Homo Sapiens
LEPGTMDSVR

SEQ ID NO: 41251 - protein, 10 aa, Homo Sapiens
LFRDYVESHY

SEQ ID NO: 41252 - protein, 10 aa, Homo Sapiens
LQEFGVPHQY

SEQ ID NO: 41253 - protein, 10 aa, Homo Sapiens
LQFVGLSHQY

SEQ ID NO: 41254 - protein, 10 aa, Homo Sapiens
LQHDNIIAYY

SEQ ID NO: 41255 - protein, 10 aa, Homo Sapiens
LQHEPDRAFY

SEQ ID NO: 41256 - protein, 10 aa, Homo Sapiens
LQKGTFDSKY

SEQ ID NO: 41257 - protein, 10 aa, Homo Sapiens
LSLENGAHAY

SEQ ID NO: 41258 - protein, 10 aa, Homo Sapiens
LTKVVQNDAY

SEQ ID NO: 41259 - protein, 10 aa, Homo Sapiens
LTRELAEDGY

SEQ ID NO: 41260 - protein, 10 aa, Homo Sapiens
LVQALGAHLY

SEQ ID NO: 41261 - protein, 10 aa, Homo Sapiens
MIKKIADDKY

SEQ ID NO: 41262 - protein, 10 aa, Homo Sapiens
MLAKTGVHHY

SEQ ID NO: 41263 - protein, 10 aa, Homo Sapiens
MMKKLWGDRY

SEQ ID NO: 41264 - protein, 10 aa, Homo Sapiens
MPGFAPLTSR

SEQ ID NO: 41265 - protein, 10 aa, Homo Sapiens
MSKPQTSGAY

SEQ ID NO: 41266 - protein, 10 aa, Homo Sapiens
NILLPPIIFY

SEQ ID NO: 41267 - protein, 10 aa, Homo Sapiens
NLNPDASYVY

SEQ ID NO: 41268 - protein, 10 aa, Homo Sapiens
NVQSDLLHKY

SEQ ID NO: 41269 - protein, 10 aa, Homo Sapiens
NVSTVLTSKY

SEQ ID NO: 41270 - protein, 10 aa, Homo Sapiens
NYKPVANHQY

SEQ ID NO: 41271 - protein, 10 aa, Homo Sapiens
PIRDVLHHIY

SEQ ID NO: 41272 - protein, 10 aa, Homo Sapiens
PTMKDFNHSY

SEQ ID NO: 41273 - protein, 10 aa, Homo Sapiens
QAWPPMKSEY

SEQ ID NO: 41274 - protein, 10 aa, Homo Sapiens
QIYDRQGATY

SEQ ID NO: 41275 - protein, 10 aa, Homo Sapiens
QQMNSFLSRY

SEQ ID NO: 41276 - protein, 10 aa, Homo Sapiens
QQVQQVAAEY

SEQ ID NO: 41277 - protein, 10 aa, Homo Sapiens
QSLEQVFSKY

SEQ ID NO: 41278 - protein, 10 aa, Homo Sapiens
QSLYIANHAY

SEQ ID NO: 41279 - protein, 10 aa, Homo Sapiens
QVNDAFTHVY

SEQ ID NO: 41280 - protein, 10 aa, Homo Sapiens
RAADLVEALY

SEQ ID NO: 41281 - protein, 10 aa, Homo Sapiens
RAASTARHLY

SEQ ID NO: 41282 - protein, 10 aa, Homo Sapiens
RAFGVPVRTY

SEQ ID NO: 41283 - protein, 10 aa, Homo Sapiens
RAIQPDAGYY

SEQ ID NO: 41284 - protein, 10 aa, Homo Sapiens
RAITETHAFY

SEQ ID NO: 41285 - protein, 10 aa, Homo Sapiens
RAKIPLGFYY

SEQ ID NO: 41286 - protein, 10 aa, Homo Sapiens
RAKSVPSHTY

SEQ ID NO: 41287 - protein, 10 aa, Homo Sapiens
RAQPVPAHVY

SEQ ID NO: 41288 - protein, 10 aa, Homo Sapiens
RATGHPFVQY

SEQ ID NO: 41289 - protein, 10 aa, Homo Sapiens
RAVDLMTHNY

SEQ ID NO: 41290 - protein, 10 aa, Homo Sapiens
RAWKGIAHKY

SEQ ID NO: 41291 - protein, 10 aa, Homo Sapiens
REWAIKKHLY

SEQ ID NO: 41292 - protein, 10 aa, Homo Sapiens
RFIPSAYPYY

SEQ ID NO: 41293 - protein, 10 aa, Homo Sapiens
RFKEPHAVFY

SEQ ID NO: 41294 - protein, 10 aa, Homo Sapiens
RFMEQVIFKY

SEQ ID NO: 41295 - protein, 10 aa, Homo Sapiens
RFPHLLAHTY

SEQ ID NO: 41296 - protein, 10 aa, Homo Sapiens
RFQFLPHAYY

SEQ ID NO: 41297 - protein, 10 aa, Homo Sapiens
RFSEPHARFY

SEQ ID NO: 41298 - protein, 10 aa, Homo Sapiens
RFWDIKSKYF

SEQ ID NO: 41299 - protein, 10 aa, Homo Sapiens
RFYDLSSKYY

SEQ ID NO: 41300 - protein, 10 aa, Homo Sapiens
RGLSSLDRKY

SEQ ID NO: 41301 - protein, 10 aa, Homo Sapiens
RGWGEGDFVY

SEQ ID NO: 41302 - protein, 10 aa, Homo Sapiens
RGYDRGYDRY

SEQ ID NO: 41303 - protein, 10 aa, Homo Sapiens
RHKFPDEDSY

SEQ ID NO: 41304 - protein, 10 aa, Homo Sapiens
RIFDRAVAAY

SEQ ID NO: 41305 - protein, 10 aa, Homo Sapiens
RIIAEPGRYY

SEQ ID NO: 41306 - protein, 10 aa, Homo Sapiens
RIIETPPHRY

SEQ ID NO: 41307 - protein, 10 aa, Homo Sapiens
RIISDLCKLY

SEQ ID NO: 41308 - protein, 10 aa, Homo Sapiens
RIKGDWIGLY

SEQ ID NO: 41309 - protein, 10 aa, Homo Sapiens
RIKLGDYHFY

SEQ ID NO: 41310 - protein, 10 aa, Homo Sapiens
RIKNPEGGLY

SEQ ID NO: 41311 - protein, 10 aa, Homo Sapiens
RIKPVEEVKY

SEQ ID NO: 41312 - protein, 10 aa, Homo Sapiens
RIKQFLQSRY

SEQ ID NO: 41313 - protein, 10 aa, Homo Sapiens
RILGGLLSAY

SEQ ID NO: 41314 - protein, 10 aa, Homo Sapiens
RILPKCRTSY

SEQ ID NO: 41315 - protein, 10 aa, Homo Sapiens
RILPNFNASY

SEQ ID NO: 41316 - protein, 10 aa, Homo Sapiens
RILTVEDHYY

SEQ ID NO: 41317 - protein, 10 aa, Homo Sapiens
RIMDPYKASY

SEQ ID NO: 41318 - protein, 10 aa, Homo Sapiens
RIMDSSQNAY

SEQ ID NO: 41319 - protein, 10 aa, Homo Sapiens
RIRDLLYEQY

SEQ ID NO: 41320 - protein, 10 aa, Homo Sapiens
RISPTFADAY

SEQ ID NO: 41321 - protein, 10 aa, Homo Sapiens
RITEYMEHVY

SEQ ID NO: 41322 - protein, 10 aa, Homo Sapiens
RIVTYHRHLY

SEQ ID NO: 41323 - protein, 10 aa, Homo Sapiens
RLAAKLLAKY

SEQ ID NO: 41324 - protein, 10 aa, Homo Sapiens
RLAHEVGWKY

SEQ ID NO: 41325 - protein, 10 aa, Homo Sapiens
RLCDKTGWSY

SEQ ID NO: 41326 - protein, 10 aa, Homo Sapiens
RLCEPKEASY

SEQ ID NO: 41327 - protein, 10 aa, Homo Sapiens
RLHKATLRHY

SEQ ID NO: 41328 - protein, 10 aa, Homo Sapiens
RLKPDFIDGY

SEQ ID NO: 41329 - protein, 10 aa, Homo Sapiens
RLMKYGGHGY

SEQ ID NO: 41330 - protein, 10 aa, Homo Sapiens
RLPNVHGRSY

SEQ ID NO: 41331 - protein, 10 aa, Homo Sapiens
RLQDLVSPVY

SEQ ID NO: 41332 - protein, 10 aa, Homo Sapiens
RLQDQGLILY

SEQ ID NO: 41333 - protein, 10 aa, Homo Sapiens
RLQEGYDHSY

SEQ ID NO: 41334 - protein, 10 aa, Homo Sapiens
RLQETSSQSY

SEQ ID NO: 41335 - protein, 10 aa, Homo Sapiens
RLQEVLNDYY

SEQ ID NO: 41336 - protein, 10 aa, Homo Sapiens
RLQGISFGMY

SEQ ID NO: 41337 - protein, 10 aa, Homo Sapiens
RLQPLTQAAY

SEQ ID NO: 41338 - protein, 10 aa, Homo Sapiens
RLSDLLDWKY

SEQ ID NO: 41339 - protein, 10 aa, Homo Sapiens
RLVNEVYHMY

SEQ ID NO: 41340 - protein, 10 aa, Homo Sapiens
RLVPYGNHSY

SEQ ID NO: 41341 - protein, 10 aa, Homo Sapiens
RLYHEADKTY

SEQ ID NO: 41342 - protein, 10 aa, Homo Sapiens
RMADDLNAQY

SEQ ID NO: 41343 - protein, 10 aa, Homo Sapiens
RMHQAIERFY

SEQ ID NO: 41344 - protein, 10 aa, Homo Sapiens
RMKENQKHIY

SEQ ID NO: 41345 - protein, 10 aa, Homo Sapiens
RMKETQKSIY

SEQ ID NO: 41346 - protein, 10 aa, Homo Sapiens
RMKNIGVMNY

SEQ ID NO: 41347 - protein, 10 aa, Homo Sapiens
RMKTGNKIRY

SEQ ID NO: 41348 - protein, 10 aa, Homo Sapiens
RMMEAFAQRY

SEQ ID NO: 41349 - protein, 10 aa, Homo Sapiens
RMNSDCWYLY

SEQ ID NO: 41350 - protein, 10 aa, Homo Sapiens
RMPVSSQHRY

SEQ ID NO: 41351 - protein, 10 aa, Homo Sapiens
RMQGLEAHKY

SEQ ID NO: 41352 - protein, 10 aa, Homo Sapiens
RMSDVVKGVY

SEQ ID NO: 41353 - protein, 10 aa, Homo Sapiens
RNQDFMNVYY

SEQ ID NO: 41354 - protein, 10 aa, Homo Sapiens
RNQPMALSLY

SEQ ID NO: 41355 - protein, 10 aa, Homo Sapiens
RQALPQVRLY

SEQ ID NO: 41356 - protein, 10 aa, Homo Sapiens
RQAPVLLQTY

SEQ ID NO: 41357 - protein, 10 aa, Homo Sapiens
RQASRAFSLY

SEQ ID NO: 41358 - protein, 10 aa, Homo Sapiens
RQEEGVFGFY

SEQ ID NO: 41359 - protein, 10 aa, Homo Sapiens
RQFGPYRLNY

SEQ ID NO: 41360 - protein, 10 aa, Homo Sapiens
RQFWFQGNRY

SEQ ID NO: 41361 - protein, 10 aa, Homo Sapiens
RQHMDHRHWY

SEQ ID NO: 41362 - protein, 10 aa, Homo Sapiens
RQHSIYKNGY

SEQ ID NO: 41363 - protein, 10 aa, Homo Sapiens
RQHVFLVSEY

SEQ ID NO: 41364 - protein, 10 aa, Homo Sapiens
RQITQVYGFY

SEQ ID NO: 41365 - protein, 10 aa, Homo Sapiens
RQKHEIESLY

SEQ ID NO: 41366 - protein, 10 aa, Homo Sapiens
RQKPVDLLKY

SEQ ID NO: 41367 - protein, 10 aa, Homo Sapiens
RQKQGVVLKY

SEQ ID NO: 41368 - protein, 10 aa, Homo Sapiens
RQLAHIYHYY

SEQ ID NO: 41369 - protein, 10 aa, Homo Sapiens
RQLDIKKSSY

SEQ ID NO: 41370 - protein, 10 aa, Homo Sapiens
RQLEDILSTY

SEQ ID NO: 41371 - protein, 10 aa, Homo Sapiens
RQMKNIVHNY

SEQ ID NO: 41372 - protein, 10 aa, Homo Sapiens
RQMVEHGGFY

SEQ ID NO: 41373 - protein, 10 aa, Homo Sapiens
RQNALGHVRY

SEQ ID NO: 41374 - protein, 10 aa, Homo Sapiens
RQPDKGEHSY

SEQ ID NO: 41375 - protein, 10 aa, Homo Sapiens
RQPDNAKALY

SEQ ID NO: 41376 - protein, 10 aa, Homo Sapiens
RQPDSPTALY

SEQ ID NO: 41377 - protein, 10 aa, Homo Sapiens
RQQASILSQY

SEQ ID NO: 41378 - protein, 10 aa, Homo Sapiens
RQQEGFKPNY

SEQ ID NO: 41379 - protein, 10 aa, Homo Sapiens
RQQFPYGASY

SEQ ID NO: 41380 - protein, 10 aa, Homo Sapiens
RQQGRYAPSY

SEQ ID NO: 41381 - protein, 10 aa, Homo Sapiens
RQQVPTRKDY

SEQ ID NO: 41382 - protein, 10 aa, Homo Sapiens
RQRICEEAAY

SEQ ID NO: 41383 - protein, 10 aa, Homo Sapiens
RQYEGHVNEY

SEQ ID NO: 41384 - protein, 10 aa, Homo Sapiens
RQYEGPLHHY

SEQ ID NO: 41385 - protein, 10 aa, Homo Sapiens
RQYGQTVATY

SEQ ID NO: 41386 - protein, 10 aa, Homo Sapiens
RQYPDLETKY

SEQ ID NO: 41387 - protein, 10 aa, Homo Sapiens
RSARHFLHHY

SEQ ID NO: 41388 - protein, 10 aa, Homo Sapiens
RSFAGNLNTY

SEQ ID NO: 41389 - protein, 10 aa, Homo Sapiens
RSGDFTTSSY

SEQ ID NO: 41390 - protein, 10 aa, Homo Sapiens
RSIALTQARY

SEQ ID NO: 41391 - protein, 10 aa, Homo Sapiens
RSLSDLFRRY

SEQ ID NO: 41392 - protein, 10 aa, Homo Sapiens
RSMHPELMKY

SEQ ID NO: 41393 - protein, 10 aa, Homo Sapiens
RSNTQPGFSY

SEQ ID NO: 41394 - protein, 10 aa, Homo Sapiens
RSRPDLMDNY

SEQ ID NO: 41395 - protein, 10 aa, Homo Sapiens
RSWAIHTGRY

SEQ ID NO: 41396 - protein, 10 aa, Homo Sapiens
RTAQNLHNSY

SEQ ID NO: 41397 - protein, 10 aa, Homo Sapiens
RTFAADHNYL

SEQ ID NO: 41398 - protein, 10 aa, Homo Sapiens
RTGFFGNALY

SEQ ID NO: 41399 - protein, 10 aa, Homo Sapiens
RTGGMAFHSY

SEQ ID NO: 41400 - protein, 10 aa, Homo Sapiens
RTIQTAFRQY

SEQ ID NO: 41401 - protein, 10 aa, Homo Sapiens
RTKDAGLGVY

SEQ ID NO: 41402 - protein, 10 aa, Homo Sapiens
RTKDIEDVFY

SEQ ID NO: 41403 - protein, 10 aa, Homo Sapiens
RTKEVVFNCY

SEQ ID NO: 41404 - protein, 10 aa, Homo Sapiens
RTKQPIPAAY

SEQ ID NO: 41405 - protein, 10 aa, Homo Sapiens
RTKSAGLDLY

SEQ ID NO: 41406 - protein, 10 aa, Homo Sapiens
RTKYNLYLNY

SEQ ID NO: 41407 - protein, 10 aa, Homo Sapiens
RTLRDIETFY

SEQ ID NO: 41408 - protein, 10 aa, Homo Sapiens
RTRIPYKPNY

SEQ ID NO: 41409 - protein, 10 aa, Homo Sapiens
RTVGEIMWGY

SEQ ID NO: 41410 - protein, 10 aa, Homo Sapiens
RTWQALAHEY

SEQ ID NO: 41411 - protein, 10 aa, Homo Sapiens
RTYSQGDCSY

SEQ ID NO: 41412 - protein, 10 aa, Homo Sapiens
RVAAILQGVY

SEQ ID NO: 41413 - protein, 10 aa, Homo Sapiens
RVADRLYGVY

SEQ ID NO: 41414 - protein, 10 aa, Homo Sapiens
RVAEVWMDEY

SEQ ID NO: 41415 - protein, 10 aa, Homo Sapiens
RVANILINLY

SEQ ID NO: 41416 - protein, 10 aa, Homo Sapiens
RVEELERWVY

SEQ ID NO: 41417 - protein, 10 aa, Homo Sapiens
RVFDHKQGTY

SEQ ID NO: 41418 - protein, 10 aa, Homo Sapiens
RVFDKDGNGY

SEQ ID NO: 41419 - protein, 10 aa, Homo Sapiens
RVFEGPYKEY

SEQ ID NO: 41420 - protein, 10 aa, Homo Sapiens
RVFYALSNKY

SEQ ID NO: 41421 - protein, 10 aa, Homo Sapiens
RVIGAKKDQY

SEQ ID NO: 41422 - protein, 10 aa, Homo Sapiens
RVITISKSEY

SEQ ID NO: 41423 - protein, 10 aa, Homo Sapiens
RVIVGGSSEY

SEQ ID NO: 41424 - protein, 10 aa, Homo Sapiens
RVKELLVDCY

SEQ ID NO: 41425 - protein, 10 aa, Homo Sapiens
RVKEPSQDTV

SEQ ID NO: 41426 - protein, 10 aa, Homo Sapiens
RVKPAVFDLL

SEQ ID NO: 41427 - protein, 10 aa, Homo Sapiens
RVKTPTSQSY

SEQ ID NO: 41428 - protein, 10 aa, Homo Sapiens
RVLCYLIHHY

SEQ ID NO: 41429 - protein, 10 aa, Homo Sapiens
RVLDELKHYY

SEQ ID NO: 41430 - protein, 10 aa, Homo Sapiens
RVLKKQDAFY

SEQ ID NO: 41431 - protein, 10 aa, Homo Sapiens
RVLPRSNMVY

SEQ ID NO: 41432 - protein, 10 aa, Homo Sapiens
RVLYNLFTKY

SEQ ID NO: 41433 - protein, 10 aa, Homo Sapiens
RVMDVPGLYC

SEQ ID NO: 41434 - protein, 10 aa, Homo Sapiens
RVMEHFIKLY

SEQ ID NO: 41435 - protein, 10 aa, Homo Sapiens
RVMGDRSVLY

SEQ ID NO: 41436 - protein, 10 aa, Homo Sapiens
RVMHQIISKY

SEQ ID NO: 41437 - protein, 10 aa, Homo Sapiens
RVMTVSFHKY

SEQ ID NO: 41438 - protein, 10 aa, Homo Sapiens
RVNAAFAARY

SEQ ID NO: 41439 - protein, 10 aa, Homo Sapiens
RVNNSLDHEY

SEQ ID NO: 41440 - protein, 10 aa, Homo Sapiens
RVPFIYGHKY

SEQ ID NO: 41441 - protein, 10 aa, Homo Sapiens
RVQKSKLSLY

SEQ ID NO: 41442 - protein, 10 aa, Homo Sapiens
RVQNLLGHYL

SEQ ID NO: 41443 - protein, 10 aa, Homo Sapiens
RVRELYRAWY

SEQ ID NO: 41444 - protein, 10 aa, Homo Sapiens
RVRLKGFEKY

SEQ ID NO: 41445 - protein, 10 aa, Homo Sapiens
RVSNFKPGVY

SEQ ID NO: 41446 - protein, 10 aa, Homo Sapiens
RVVEDLINHY

SEQ ID NO: 41447 - protein, 10 aa, Homo Sapiens
RVVEGNHMVY

SEQ ID NO: 41448 - protein, 10 aa, Homo Sapiens
RVVEGNHTVY

SEQ ID NO: 41449 - protein, 10 aa, Homo Sapiens
RVWDYAGDNY

SEQ ID NO: 41450 - protein, 10 aa, Homo Sapiens
RVYIFDYGQY

SEQ ID NO: 41451 - protein, 10 aa, Homo Sapiens
RVYLATERRY

SEQ ID NO: 41452 - protein, 10 aa, Homo Sapiens
RVYNIYIRRY

SEQ ID NO: 41453 - protein, 10 aa, Homo Sapiens
RVYSDLHAFY

SEQ ID NO: 41454 - protein, 10 aa, Homo Sapiens
RWMEKELGLY

SEQ ID NO: 41455 - protein, 10 aa, Homo Sapiens
RWYPDLESKY

SEQ ID NO: 41456 - protein, 10 aa, Homo Sapiens
RYHRKENLEY

SEQ ID NO: 41457 - protein, 10 aa, Homo Sapiens
RYIDEYRNDY

SEQ ID NO: 41458 - protein, 10 aa, Homo Sapiens
RYIDISKCHY

SEQ ID NO: 41459 - protein, 10 aa, Homo Sapiens
RYISWTEQNY

SEQ ID NO: 41460 - protein, 10 aa, Homo Sapiens
RYKDILPYDY

SEQ ID NO: 41461 - protein, 10 aa, Homo Sapiens
RYLAVVHAVY

SEQ ID NO: 41462 - protein, 10 aa, Homo Sapiens
RYLEQLHQLY

SEQ ID NO: 41463 - protein, 10 aa, Homo Sapiens
RYMDDYIFTY

SEQ ID NO: 41464 - protein, 10 aa, Homo Sapiens
RYMELYTHVY

SEQ ID NO: 41465 - protein, 10 aa, Homo Sapiens
RYNVPNSAIY

SEQ ID NO: 41466 - protein, 10 aa, Homo Sapiens
RYPDNLKHLY

SEQ ID NO: 41467 - protein, 10 aa, Homo Sapiens
RYQTFVNFNY

SEQ ID NO: 41468 - protein, 10 aa, Homo Sapiens
RYRDGYRDGY

SEQ ID NO: 41469 - protein, 10 aa, Homo Sapiens
RYSDVHNCSY

SEQ ID NO: 41470 - protein, 10 aa, Homo Sapiens
RYTDVSTRYK

SEQ ID NO: 41471 - protein, 10 aa, Homo Sapiens
RYYDSRPGGY

SEQ ID NO: 41472 - protein, 10 aa, Homo Sapiens
SAAEAIQAVR

SEQ ID NO: 41473 - protein, 10 aa, Homo Sapiens
SARAAGYDLY

SEQ ID NO: 41474 - protein, 10 aa, Homo Sapiens
SASDHPIASY

SEQ ID NO: 41475 - protein, 10 aa, Homo Sapiens
SASPIFTHVY

SEQ ID NO: 41476 - protein, 10 aa, Homo Sapiens
SEDIPLNLSR

SEQ ID NO: 41477 - protein, 10 aa, Homo Sapiens
SFFGETSHNY

SEQ ID NO: 41478 - protein, 10 aa, Homo Sapiens
SFLPGNFHFY

SEQ ID NO: 41479 - protein, 10 aa, Homo Sapiens
SFQAILDHTY

SEQ ID NO: 41480 - protein, 10 aa, Homo Sapiens
SFRPLYTHEY

SEQ ID NO: 41481 - protein, 10 aa, Homo Sapiens
SGKNVGYAKY

SEQ ID NO: 41482 - protein, 10 aa, Homo Sapiens
SGQAHAGHYY

SEQ ID NO: 41483 - protein, 10 aa, Homo Sapiens
SGQASGGHYY

SEQ ID NO: 41484 - protein, 10 aa, Homo Sapiens
SHGGIPPHKY

SEQ ID NO: 41485 - protein, 10 aa, Homo Sapiens
SIERLPLHLY

SEQ ID NO: 41486 - protein, 10 aa, Homo Sapiens
SIFQSHCHYY

SEQ ID NO: 41487 - protein, 10 aa, Homo Sapiens
SIMTRGNAKY

SEQ ID NO: 41488 - protein, 10 aa, Homo Sapiens
SIRPDNMSEY

SEQ ID NO: 41489 - protein, 10 aa, Homo Sapiens
SIYRGPSHTY

SEQ ID NO: 41490 - protein, 10 aa, Homo Sapiens
SLSGKTPHLY

SEQ ID NO: 41491 - protein, 10 aa, Homo Sapiens
SMHALLVNHY

SEQ ID NO: 41492 - protein, 10 aa, Homo Sapiens
SQGGHILAFY

SEQ ID NO: 41493 - protein, 10 aa, Homo Sapiens
SQKLGLFHHY

SEQ ID NO: 41494 - protein, 10 aa, Homo Sapiens
SQKVIAHSEY

SEQ ID NO: 41495 - protein, 10 aa, Homo Sapiens
SQSPAYNSQY

SEQ ID NO: 41496 - protein, 10 aa, Homo Sapiens
SSIPVPTHYY

SEQ ID NO: 41497 - protein, 10 aa, Homo Sapiens
SSKSGERHLY

SEQ ID NO: 41498 - protein, 10 aa, Homo Sapiens
SSLENVDSRY

SEQ ID NO: 41499 - protein, 10 aa, Homo Sapiens
SSNPYPNFNF

SEQ ID NO: 41500 - protein, 10 aa, Homo Sapiens
SSNRQVLHFY

SEQ ID NO: 41501 - protein, 10 aa, Homo Sapiens
SSQGRPSSMY

SEQ ID NO: 41502 - protein, 10 aa, Homo Sapiens
SSSALCSHLY

SEQ ID NO: 41503 - protein, 10 aa, Homo Sapiens
SSSGYPEPKY

SEQ ID NO: 41504 - protein, 10 aa, Homo Sapiens
SSSGYSNSRY

SEQ ID NO: 41505 - protein, 10 aa, Homo Sapiens
SSSSLSSHRY

SEQ ID NO: 41506 - protein, 10 aa, Homo Sapiens
STAKSATWTY

SEQ ID NO: 41507 - protein, 10 aa, Homo Sapiens
STIDMSCAKY

SEQ ID NO: 41508 - protein, 10 aa, Homo Sapiens
STLARLPHLY

SEQ ID NO: 41509 - protein, 10 aa, Homo Sapiens
STMGKPQRLY

SEQ ID NO: 41510 - protein, 10 aa, Homo Sapiens
STVIPNSHVY

SEQ ID NO: 41511 - protein, 10 aa, Homo Sapiens
SVKAEMLHMY

SEQ ID NO: 41512 - protein, 10 aa, Homo Sapiens
SVNGERLGTY

SEQ ID NO: 41513 - protein, 10 aa, Homo Sapiens
SVRPCFMDEY

SEQ ID NO: 41514 - protein, 10 aa, Homo Sapiens
SVSTVLTSKY

SEQ ID NO: 41515 - protein, 10 aa, Homo Sapiens
SYIPFRDAAY

SEQ ID NO: 41516 - protein, 10 aa, Homo Sapiens
SYLQPGQDGY

SEQ ID NO: 41517 - protein, 10 aa, Homo Sapiens
SYVGDEAQSK

SEQ ID NO: 41518 - protein, 10 aa, Homo Sapiens
TAASSSSLEK

SEQ ID NO: 41519 - protein, 10 aa, Homo Sapiens
TFIAIKPDGV

SEQ ID NO: 41520 - protein, 10 aa, Homo Sapiens
TFKEQGNAYY

SEQ ID NO: 41521 - protein, 10 aa, Homo Sapiens
TGIESSSHKY

SEQ ID NO: 41522 - protein, 10 aa, Homo Sapiens
TIFSPEGRLY

SEQ ID NO: 41523 - protein, 10 aa, Homo Sapiens
TLNEAIMHQY

SEQ ID NO: 41524 - protein, 10 aa, Homo Sapiens
TLQVNGRHEY

SEQ ID NO: 41525 - protein, 10 aa, Homo Sapiens
TLRSEGFDTY

SEQ ID NO: 41526 - protein, 10 aa, Homo Sapiens
TMSGVTTSLR

SEQ ID NO: 41527 - protein, 10 aa, Homo Sapiens
TQKIPDQDFY

SEQ ID NO: 41528 - protein, 10 aa, Homo Sapiens
TQLLKLAHKY

SEQ ID NO: 41529 - protein, 10 aa, Homo Sapiens
TQQMAGMNFY

SEQ ID NO: 41530 - protein, 10 aa, Homo Sapiens
TQRVSCAHIY

SEQ ID NO: 41531 - protein, 10 aa, Homo Sapiens
TSKDYYFDSY

SEQ ID NO: 41532 - protein, 10 aa, Homo Sapiens
TSNPLASHDY

SEQ ID NO: 41533 - protein, 10 aa, Homo Sapiens
TTKVGPNATY

SEQ ID NO: 41534 - protein, 10 aa, Homo Sapiens
TVFDKLNHEY

SEQ ID NO: 41535 - protein, 10 aa, Homo Sapiens
TVKALISHLY

SEQ ID NO: 41536 - protein, 10 aa, Homo Sapiens
TVLKALKSGY

SEQ ID NO: 41537 - protein, 10 aa, Homo Sapiens
TVNDLSMMKY

SEQ ID NO: 41538 - protein, 10 aa, Homo Sapiens
TVWNVEEHRY

SEQ ID NO: 41539 - protein, 10 aa, Homo Sapiens
TYQGDKVAAY

SEQ ID NO: 41540 - protein, 10 aa, Homo Sapiens
VAPEEHPVLL

SEQ ID NO: 41541 - protein, 10 aa, Homo Sapiens
VFTEPNRHFY

SEQ ID NO: 41542 - protein, 10 aa, Homo Sapiens
VGLPFSSHTY

SEQ ID NO: 41543 - protein, 10 aa, Homo Sapiens
VIFAGGQDRY

SEQ ID NO: 41544 - protein, 10 aa, Homo Sapiens
VLIAQPDHSY

SEQ ID NO: 41545 - protein, 10 aa, Homo Sapiens
VLKPNIISYY

SEQ ID NO: 41546 - protein, 10 aa, Homo Sapiens
VLNKLGGVKY

SEQ ID NO: 41547 - protein, 10 aa, Homo Sapiens
VMADPKGKAY

SEQ ID NO: 41548 - protein, 10 aa, Homo Sapiens
VNDPRPQHKY

SEQ ID NO: 41549 - protein, 10 aa, Homo Sapiens
VQFIGRESKY

SEQ ID NO: 41550 - protein, 10 aa, Homo Sapiens
VQFQDVSFAY

SEQ ID NO: 41551 - protein, 10 aa, Homo Sapiens
VQFVGREAKY

SEQ ID NO: 41552 - protein, 10 aa, Homo Sapiens
VQHGVEGLTY

SEQ ID NO: 41553 - protein, 10 aa, Homo Sapiens
VQITEARCFY

SEQ ID NO: 41554 - protein, 10 aa, Homo Sapiens
VQKKDTGHIY

SEQ ID NO: 41555 - protein, 10 aa, Homo Sapiens
VQKKDTGHVY

SEQ ID NO: 41556 - protein, 10 aa, Homo Sapiens
VQKPDAANYY

SEQ ID NO: 41557 - protein, 10 aa, Homo Sapiens
VQQPGQTNFY

SEQ ID NO: 41558 - protein, 10 aa, Homo Sapiens
VQVTPLSSGY

SEQ ID NO: 41559 - protein, 10 aa, Homo Sapiens
VTRPDSGHLY

SEQ ID NO: 41560 - protein, 10 aa, Homo Sapiens
VTYNKVLHFY

SEQ ID NO: 41561 - protein, 10 aa, Homo Sapiens
VVHDIPSGSY

SEQ ID NO: 41562 - protein, 10 aa, Homo Sapiens
VVIKDIFRKY

SEQ ID NO: 41563 - protein, 10 aa, Homo Sapiens
VVLLVINHKY

SEQ ID NO: 41564 - protein, 10 aa, Homo Sapiens
VVNILAQALY

SEQ ID NO: 41565 - protein, 10 aa, Homo Sapiens
VVVAVGRALY

SEQ ID NO: 41566 - protein, 10 aa, Homo Sapiens
VVVGGLNTHY

SEQ ID NO: 41567 - protein, 10 aa, Homo Sapiens
VVVKITGHFY

SEQ ID NO: 41568 - protein, 10 aa, Homo Sapiens
VYKSPASDTY

SEQ ID NO: 41569 - protein, 10 aa, Homo Sapiens
YQFYGPSGQY

SEQ ID NO: 41570 - protein, 10 aa, Homo Sapiens
YQKPIIQSEY

SEQ ID NO: 41571 - protein, 10 aa, Homo Sapiens
YYYDPTTGLY

SEQ ID NO: 41572 - protein, 11 aa, Homo Sapiens
AAKPWTKDHHY

SEQ ID NO: 41573 - protein, 11 aa, Homo Sapiens
AAQLHTLLGLY

SEQ ID NO: 41574 - protein, 11 aa, Homo Sapiens
AGFGESRCEAY

SEQ ID NO: 41575 - protein, 11 aa, Homo Sapiens
AIKGPELMNKY

SEQ ID NO: 41576 - protein, 11 aa, Homo Sapiens
AIKKPSGDDRY

SEQ ID NO: 41577 - protein, 11 aa, Homo Sapiens
ALDPKSTGRKY

SEQ ID NO: 41578 - protein, 11 aa, Homo Sapiens
ALKVPVPEDKY

SEQ ID NO: 41579 - protein, 11 aa, Homo Sapiens
ALLDPSQKNLY

SEQ ID NO: 41580 - protein, 11 aa, Homo Sapiens
ALNPHCKFHIY

SEQ ID NO: 41581 - protein, 11 aa, Homo Sapiens
ALRPSTSRSLY

SEQ ID NO: 41582 - protein, 11 aa, Homo Sapiens
ALRSDDSEHKY

SEQ ID NO: 41583 - protein, 11 aa, Homo Sapiens
AMIIPQCSHNY

SEQ ID NO: 41584 - protein, 11 aa, Homo Sapiens
AMLAKTGVHHY

SEQ ID NO: 41585 - protein, 11 aa, Homo Sapiens
AMRAADQFDIY

SEQ ID NO: 41586 - protein, 11 aa, Homo Sapiens
AQCPGFGAARY

SEQ ID NO: 41587 - protein, 11 aa, Homo Sapiens
AQFPGACGLRY

SEQ ID NO: 41588 - protein, 11 aa, Homo Sapiens
AQKTPSRLENY

SEQ ID NO: 41589 - protein, 11 aa, Homo Sapiens
AQQISDEASRY

SEQ ID NO: 41590 - protein, 11 aa, Homo Sapiens
AQQVQQVAAEY

SEQ ID NO: 41591 - protein, 11 aa, Homo Sapiens
AQYPPATYDQY

SEQ ID NO: 41592 - protein, 11 aa, Homo Sapiens
AQYQFTGIKKY

SEQ ID NO: 41593 - protein, 11 aa, Homo Sapiens
ASCSAALRAVY

SEQ ID NO: 41594 - protein, 11 aa, Homo Sapiens
ASISSGTHGQY

SEQ ID NO: 41595 - protein, 11 aa, Homo Sapiens
ASKYGRDWERY

SEQ ID NO: 41596 - protein, 11 aa, Homo Sapiens
ASLTVRNLPQY

SEQ ID NO: 41597 - protein, 11 aa, Homo Sapiens
ASMPRDIYQDY

SEQ ID NO: 41598 - protein, 11 aa, Homo Sapiens
ASQGGHILAFY

SEQ ID NO: 41599 - protein, 11 aa, Homo Sapiens
ASVPHSIINGY

SEQ ID NO: 41600 - protein, 11 aa, Homo Sapiens
ASYPGASVDNY

SEQ ID NO: 41601 - protein, 11 aa, Homo Sapiens
ATAAALTYGLY

SEQ ID NO: 41602 - protein, 11 aa, Homo Sapiens
ATKGPSYEDLY

SEQ ID NO: 41603 - protein, 11 aa, Homo Sapiens
ATLDAVKFSQY

SEQ ID NO: 41604 - protein, 11 aa, Homo Sapiens
ATQAQIKAAYY

SEQ ID NO: 41605 - protein, 11 aa, Homo Sapiens
ATQLLKLAHKY

SEQ ID NO: 41606 - protein, 11 aa, Homo Sapiens
ATQPGTTILQY

SEQ ID NO: 41607 - protein, 11 aa, Homo Sapiens
AVALPQLLAKY

SEQ ID NO: 41608 - protein, 11 aa, Homo Sapiens
AVIAKENYPLY

SEQ ID NO: 41609 - protein, 11 aa, Homo Sapiens
AVKDLDIIDNY

SEQ ID NO: 41610 - protein, 11 aa, Homo Sapiens
AVKELELAHRY

SEQ ID NO: 41611 - protein, 11 aa, Homo Sapiens
AVKIVKNVDRY

SEQ ID NO: 41612 - protein, 11 aa, Homo Sapiens
AVLGETLIPHY

SEQ ID NO: 41613 - protein, 11 aa, Homo Sapiens
AVMESINPHKY

SEQ ID NO: 41614 - protein, 11 aa, Homo Sapiens
AVPDRMCRHNY

SEQ ID NO: 41615 - protein, 11 aa, Homo Sapiens
AVTPAGVVNKY

SEQ ID NO: 41616 - protein, 11 aa, Homo Sapiens
AWLPAYATPHF

SEQ ID NO: 41617 - protein, 11 aa, Homo Sapiens
AYGRDIVEAHY

SEQ ID NO: 41618 - protein, 11 aa, Homo Sapiens
CPEAIFQPSFL

SEQ ID NO: 41619 - protein, 11 aa, Homo Sapiens
DDDRRWKAGLY

SEQ ID NO: 41620 - protein, 11 aa, Homo Sapiens
DLEPGTMDSVR

SEQ ID NO: 41621 - protein, 11 aa, Homo Sapiens
DLEPTVIDEVR

SEQ ID NO: 41622 - protein, 11 aa, Homo Sapiens
EGYPRSDVDLY

SEQ ID NO: 41623 - protein, 11 aa, Homo Sapiens
EMNPHFGSHRY

SEQ ID NO: 41624 - protein, 11 aa, Homo Sapiens
ESWFLVEKHWY

SEQ ID NO: 41625 - protein, 11 aa, Homo Sapiens
FQAPYLLHGKY

SEQ ID NO: 41626 - protein, 11 aa, Homo Sapiens
FQHPPWGSSRY

SEQ ID NO: 41627 - protein, 11 aa, Homo Sapiens
FSKPSDLVGVF

SEQ ID NO: 41628 - protein, 11 aa, Homo Sapiens
GAKPDSTLHTY

SEQ ID NO: 41629 - protein, 11 aa, Homo Sapiens
GFKPEEIQTVY

SEQ ID NO: 41630 - protein, 11 aa, Homo Sapiens
GGYFRDQKDGY

SEQ ID NO: 41631 - protein, 11 aa, Homo Sapiens
GHYTEGAELVD

SEQ ID NO: 41632 - protein, 11 aa, Homo Sapiens
GLKHPGLILKY

SEQ ID NO: 41633 - protein, 11 aa, Homo Sapiens
GLLKPSCLPVY

SEQ ID NO: 41634 - protein, 11 aa, Homo Sapiens
GMYDSSLAAKY

SEQ ID NO: 41635 - protein, 11 aa, Homo Sapiens
GQHSQGLGGHY

SEQ ID NO: 41636 - protein, 11 aa, Homo Sapiens
GQSPLHILGQY

SEQ ID NO: 41637 - protein, 11 aa, Homo Sapiens
GSRGSSLNDTY

SEQ ID NO: 41638 - protein, 11 aa, Homo Sapiens
GTAPKENRHLY

SEQ ID NO: 41639 - protein, 11 aa, Homo Sapiens
GTGIESSSHKY

SEQ ID NO: 41640 - protein, 11 aa, Homo Sapiens
GTITPDGADVY

SEQ ID NO: 41641 - protein, 11 aa, Homo Sapiens
GTKGLSVNDFY

SEQ ID NO: 41642 - protein, 11 aa, Homo Sapiens
GTQDQIQNAQY

SEQ ID NO: 41643 - protein, 11 aa, Homo Sapiens
GTSPLHLAAQY

SEQ ID NO: 41644 - protein, 11 aa, Homo Sapiens
GTYTFPNGAKY

SEQ ID NO: 41645 - protein, 11 aa, Homo Sapiens
GVAFPHIKHNY

SEQ ID NO: 41646 - protein, 11 aa, Homo Sapiens
GVKDPDQAASY

SEQ ID NO: 41647 - protein, 11 aa, Homo Sapiens
GVKPPQNLWEY

SEQ ID NO: 41648 - protein, 11 aa, Homo Sapiens
GVNPAYPESRY

SEQ ID NO: 41649 - protein, 11 aa, Homo Sapiens
GVNPHVNHLYA

SEQ ID NO: 41650 - protein, 11 aa, Homo Sapiens
GYRHIDCAHVY

SEQ ID NO: 41651 - protein, 11 aa, Homo Sapiens
HFKEMESIDQY

SEQ ID NO: 41652 - protein, 11 aa, Homo Sapiens
HGADELLKRVY

SEQ ID NO: 41653 - protein, 11 aa, Homo Sapiens
HLFPTMPRHNY

SEQ ID NO: 41654 - protein, 11 aa, Homo Sapiens
HLNPDTELKRY

SEQ ID NO: 41655 - protein, 11 aa, Homo Sapiens
HLRQLLQEDRY

SEQ ID NO: 41656 - protein, 11 aa, Homo Sapiens
HQINPCVKKEY

SEQ ID NO: 41657 - protein, 11 aa, Homo Sapiens
HQYSSQLLPFY

SEQ ID NO: 41658 - protein, 11 aa, Homo Sapiens
HSLDDFYIGKY

SEQ ID NO: 41659 - protein, 11 aa, Homo Sapiens
HSLPGHFSSHY

SEQ ID NO: 41660 - protein, 11 aa, Homo Sapiens
HSQLEHLQSKY

SEQ ID NO: 41661 - protein, 11 aa, Homo Sapiens
HSRAPSLSASY

SEQ ID NO: 41662 - protein, 11 aa, Homo Sapiens
HSRFYDLSSKY

SEQ ID NO: 41663 - protein, 11 aa, Homo Sapiens
HTWTKESAHNY

SEQ ID NO: 41664 - protein, 11 aa, Homo Sapiens
HVRPVTQGDVY

SEQ ID NO: 41665 - protein, 11 aa, Homo Sapiens
HYFEDWGVVTY

SEQ ID NO: 41666 - protein, 11 aa, Homo Sapiens
IFKSDGLRGLY

SEQ ID NO: 41667 - protein, 11 aa, Homo Sapiens
IGYGDMVPHTY

SEQ ID NO: 41668 - protein, 11 aa, Homo Sapiens
IIRPSETAGRY

SEQ ID NO: 41669 - protein, 11 aa, Homo Sapiens
ILNVDPVQHTY

SEQ ID NO: 41670 - protein, 11 aa, Homo Sapiens
ILQADGLRGFY

SEQ ID NO: 41671 - protein, 11 aa, Homo Sapiens
IQKTEELKAKY

SEQ ID NO: 41672 - protein, 11 aa, Homo Sapiens
IQNPDITSSRY

SEQ ID NO: 41673 - protein, 11 aa, Homo Sapiens
IQQRGGEERLY

SEQ ID NO: 41674 - protein, 11 aa, Homo Sapiens
ITKPQNLNDAY

SEQ ID NO: 41675 - protein, 11 aa, Homo Sapiens
ITKSDGIRGLY

SEQ ID NO: 41676 - protein, 11 aa, Homo Sapiens
IVKNPQAYLNY

SEQ ID NO: 41677 - protein, 11 aa, Homo Sapiens
IWKLDGLRGLY

SEQ ID NO: 41678 - protein, 11 aa, Homo Sapiens
IYKSDGIKGLY

SEQ ID NO: 41679 - protein, 11 aa, Homo Sapiens
IYKYEGVRGLY

SEQ ID NO: 41680 - protein, 11 aa, Homo Sapiens
KAAEAAASAYY

SEQ ID NO: 41681 - protein, 11 aa, Homo Sapiens
KALTEPEARYY

SEQ ID NO: 41682 - protein, 11 aa, Homo Sapiens
KFKDDVMPATY

SEQ ID NO: 41683 - protein, 11 aa, Homo Sapiens
KFNPDFAEAHY

SEQ ID NO: 41684 - protein, 11 aa, Homo Sapiens
KFWVVDQTHFY

SEQ ID NO: 41685 - protein, 11 aa, Homo Sapiens
KFYGPRIGALY

SEQ ID NO: 41686 - protein, 11 aa, Homo Sapiens
KFYHLAKETGY

SEQ ID NO: 41687 - protein, 11 aa, Homo Sapiens
KFYVEDLKARY

SEQ ID NO: 41688 - protein, 11 aa, Homo Sapiens
KGIPEHLMGKL

SEQ ID NO: 41689 - protein, 11 aa, Homo Sapiens
KGKEPYSSSKY

SEQ ID NO: 41690 - protein, 11 aa, Homo Sapiens
KGKIPTLIDRM

SEQ ID NO: 41691 - protein, 11 aa, Homo Sapiens
KGNPEIDNKKY

SEQ ID NO: 41692 - protein, 11 aa, Homo Sapiens
KGWGGEDVHLY

SEQ ID NO: 41693 - protein, 11 aa, Homo Sapiens
KIADMGHLKYY

SEQ ID NO: 41694 - protein, 11 aa, Homo Sapiens
KIIDGICGRAY

SEQ ID NO: 41695 - protein, 11 aa, Homo Sapiens
KIKEAGGIDLF

SEQ ID NO: 41696 - protein, 11 aa, Homo Sapiens
KIKSELGLNFY

SEQ ID NO: 41697 - protein, 11 aa, Homo Sapiens
KIMDSGELDFY

SEQ ID NO: 41698 - protein, 11 aa, Homo Sapiens
KIRADIEVACY

SEQ ID NO: 41699 - protein, 11 aa, Homo Sapiens
KIVADQLCAKY

SEQ ID NO: 41700 - protein, 11 aa, Homo Sapiens
KLCEWMGNMNY

SEQ ID NO: 41701 - protein, 11 aa, Homo Sapiens
KLFEDGEMAKY

SEQ ID NO: 41702 - protein, 11 aa, Homo Sapiens
KLFESIQEGKY

SEQ ID NO: 41703 - protein, 11 aa, Homo Sapiens
KLKDDQTLDFY

SEQ ID NO: 41704 - protein, 11 aa, Homo Sapiens
KLLSAGATRVY

SEQ ID NO: 41705 - protein, 11 aa, Homo Sapiens
KLLSEDVKSYY

SEQ ID NO: 41706 - protein, 11 aa, Homo Sapiens
KLPDKTLIDLY

SEQ ID NO: 41707 - protein, 11 aa, Homo Sapiens
KLPGPTLWASY

SEQ ID NO: 41708 - protein, 11 aa, Homo Sapiens
KLRIQTDGDKY

SEQ ID NO: 41709 - protein, 11 aa, Homo Sapiens
KLWDGRTGKYL

SEQ ID NO: 41710 - protein, 11 aa, Homo Sapiens
KLYTKHGTLKY

SEQ ID NO: 41711 - protein, 11 aa, Homo Sapiens
KMAANIPAKRY

SEQ ID NO: 41712 - protein, 11 aa, Homo Sapiens
KMKQDAQVVLY

SEQ ID NO: 41713 - protein, 11 aa, Homo Sapiens
KMMDSGQIDFY

SEQ ID NO: 41714 - protein, 11 aa, Homo Sapiens
KMNGYISNANY

SEQ ID NO: 41715 - protein, 11 aa, Homo Sapiens
KQAEFFEPWVY

SEQ ID NO: 41716 - protein, 11 aa, Homo Sapiens
KQAEWSSKTSY

SEQ ID NO: 41717 - protein, 11 aa, Homo Sapiens
KQALQDTLALY

SEQ ID NO: 41718 - protein, 11 aa, Homo Sapiens
KQFAEMYVAKF

SEQ ID NO: 41719 - protein, 11 aa, Homo Sapiens
KQFFQDKARFY

SEQ ID NO: 41720 - protein, 11 aa, Homo Sapiens
KQIDNTGSSTY

SEQ ID NO: 41721 - protein, 11 aa, Homo Sapiens
KQKYPEQQGRF

SEQ ID NO: 41722 - protein, 11 aa, Homo Sapiens
KQLDMQSSWVY

SEQ ID NO: 41723 - protein, 11 aa, Homo Sapiens
KQNHESVQWCY

SEQ ID NO: 41724 - protein, 11 aa, Homo Sapiens
KQRESAATDVL

SEQ ID NO: 41725 - protein, 11 aa, Homo Sapiens
KQRETHSVDRL

SEQ ID NO: 41726 - protein, 11 aa, Homo Sapiens
KQRPIFIITEY

SEQ ID NO: 41727 - protein, 11 aa, Homo Sapiens
KQSANDFFSYY

SEQ ID NO: 41728 - protein, 11 aa, Homo Sapiens
KQVEELFERKY

SEQ ID NO: 41729 - protein, 11 aa, Homo Sapiens
KQYPPNTSKVY

SEQ ID NO: 41730 - protein, 11 aa, Homo Sapiens
KSFEGNVFMYY

SEQ ID NO: 41731 - protein, 11 aa, Homo Sapiens
KSHGLVEVASY

SEQ ID NO: 41732 - protein, 11 aa, Homo Sapiens
KSIGPPEMHKY

SEQ ID NO: 41733 - protein, 11 aa, Homo Sapiens
KSLEELQIGTY

SEQ ID NO: 41734 - protein, 11 aa, Homo Sapiens
KSLSPQDRAAY

SEQ ID NO: 41735 - protein, 11 aa, Homo Sapiens
KSLYRGDIARY

SEQ ID NO: 41736 - protein, 11 aa, Homo Sapiens
KSQDTVLMNLY

SEQ ID NO: 41737 - protein, 11 aa, Homo Sapiens
KSQICDNAALY

SEQ ID NO: 41738 - protein, 11 aa, Homo Sapiens
KSQTEKLAKVY

SEQ ID NO: 41739 - protein, 11 aa, Homo Sapiens
KSQVFSYPHRY

SEQ ID NO: 41740 - protein, 11 aa, Homo Sapiens
KSYSPEALWRY

SEQ ID NO: 41741 - protein, 11 aa, Homo Sapiens
KTEDPDLPAFY

SEQ ID NO: 41742 - protein, 11 aa, Homo Sapiens
KTFEFNKELRY

SEQ ID NO: 41743 - protein, 11 aa, Homo Sapiens
KTIDPELLGKM

SEQ ID NO: 41744 - protein, 11 aa, Homo Sapiens
KTKAADLRAAY

SEQ ID NO: 41745 - protein, 11 aa, Homo Sapiens
KTKPEVLEAHY

SEQ ID NO: 41746 - protein, 11 aa, Homo Sapiens
KTKPTHGIGKY

SEQ ID NO: 41747 - protein, 11 aa, Homo Sapiens
KTLLRTWSELY

SEQ ID NO: 41748 - protein, 11 aa, Homo Sapiens
KTLPADVQNYY

SEQ ID NO: 41749 - protein, 11 aa, Homo Sapiens
KTLPETSLPNY

SEQ ID NO: 41750 - protein, 11 aa, Homo Sapiens
KTLQKPVLPLY

SEQ ID NO: 41751 - protein, 11 aa, Homo Sapiens
KTMSAKEKGKF

SEQ ID NO: 41752 - protein, 11 aa, Homo Sapiens
KTPDFESTGLY

SEQ ID NO: 41753 - protein, 11 aa, Homo Sapiens
KTPGAEIDFKY

SEQ ID NO: 41754 - protein, 11 aa, Homo Sapiens
KTQDQISNIKY

SEQ ID NO: 41755 - protein, 11 aa, Homo Sapiens
KTQEPDNLLFY

SEQ ID NO: 41756 - protein, 11 aa, Homo Sapiens
KTRIISDGLKY

SEQ ID NO: 41757 - protein, 11 aa, Homo Sapiens
KTRPGLLNSKL

SEQ ID NO: 41758 - protein, 11 aa, Homo Sapiens
KTRTLMEKDSY

SEQ ID NO: 41759 - protein, 11 aa, Homo Sapiens
KTSQVPVKHVY

SEQ ID NO: 41760 - protein, 11 aa, Homo Sapiens
KTSSWNLDCRY

SEQ ID NO: 41761 - protein, 11 aa, Homo Sapiens
KVADYWLDVLY

SEQ ID NO: 41762 - protein, 11 aa, Homo Sapiens
KVANVSLLALY

SEQ ID NO: 41763 - protein, 11 aa, Homo Sapiens
KVEPCSLTPGY

SEQ ID NO: 41764 - protein, 11 aa, Homo Sapiens
KVFPGSTTEDY

SEQ ID NO: 41765 - protein, 11 aa, Homo Sapiens
KVHDLALRADY

SEQ ID NO: 41766 - protein, 11 aa, Homo Sapiens
KVIKAVVPAKY

SEQ ID NO: 41767 - protein, 11 aa, Homo Sapiens
KVKDSIAVEVY

SEQ ID NO: 41768 - protein, 11 aa, Homo Sapiens
KVKEAGRDFTY

SEQ ID NO: 41769 - protein, 11 aa, Homo Sapiens
KVKKFENRDQY

SEQ ID NO: 41770 - protein, 11 aa, Homo Sapiens
KVLECDIIKNY

SEQ ID NO: 41771 - protein, 11 aa, Homo Sapiens
KVLTMPETCRY

SEQ ID NO: 41772 - protein, 11 aa, Homo Sapiens
KVNEMIVTGQY

SEQ ID NO: 41773 - protein, 11 aa, Homo Sapiens
KVQSVSQNKSY

SEQ ID NO: 41774 - protein, 11 aa, Homo Sapiens
KVRELISDNQY

SEQ ID NO: 41775 - protein, 11 aa, Homo Sapiens
KVSDPLIGGTY

SEQ ID NO: 41776 - protein, 11 aa, Homo Sapiens
KVTRPDSGHLY

SEQ ID NO: 41777 - protein, 11 aa, Homo Sapiens
KVVSSSIVDKY

SEQ ID NO: 41778 - protein, 11 aa, Homo Sapiens
KVWDDISPQFY

SEQ ID NO: 41779 - protein, 11 aa, Homo Sapiens
KVYSSVLRQCY

SEQ ID NO: 41780 - protein, 11 aa, Homo Sapiens
KWFESKVGNKY

SEQ ID NO: 41781 - protein, 11 aa, Homo Sapiens
KWKDQNIKDHY

SEQ ID NO: 41782 - protein, 11 aa, Homo Sapiens
KWYEDLIPSAY

SEQ ID NO: 41783 - protein, 11 aa, Homo Sapiens
KYFDKASYRVY

SEQ ID NO: 41784 - protein, 11 aa, Homo Sapiens
KYFGSNIAHMY

SEQ ID NO: 41785 - protein, 11 aa, Homo Sapiens
KYHGFGNVHAY

SEQ ID NO: 41786 - protein, 11 aa, Homo Sapiens
KYKDGNQVWLY

SEQ ID NO: 41787 - protein, 11 aa, Homo Sapiens
KYLDKELAGRV

SEQ ID NO: 41788 - protein, 11 aa, Homo Sapiens
KYLPYNHQHEY

SEQ ID NO: 41789 - protein, 11 aa, Homo Sapiens
KYMNSLLIGEL

SEQ ID NO: 41790 - protein, 11 aa, Homo Sapiens
KYMPYNHQHKY

SEQ ID NO: 41791 - protein, 11 aa, Homo Sapiens
KYSPSDVFIGY

SEQ ID NO: 41792 - protein, 11 aa, Homo Sapiens
KYTDRALRASY

SEQ ID NO: 41793 - protein, 11 aa, Homo Sapiens
KYVERKFVDKY

SEQ ID NO: 41794 - protein, 11 aa, Homo Sapiens
KYWGEIISQQY

SEQ ID NO: 41795 - protein, 11 aa, Homo Sapiens
LFWDQTQQHSY

SEQ ID NO: 41796 - protein, 11 aa, Homo Sapiens
LIKPPDNNEFY

SEQ ID NO: 41797 - protein, 11 aa, Homo Sapiens
LINYIEMHGLY

SEQ ID NO: 41798 - protein, 11 aa, Homo Sapiens
LLKSSDLVGSY

SEQ ID NO: 41799 - protein, 11 aa, Homo Sapiens
LLRGVSGVDLY

SEQ ID NO: 41800 - protein, 11 aa, Homo Sapiens
LMAEALGIPVT

SEQ ID NO: 41801 - protein, 11 aa, Homo Sapiens
LMLPEKLRPLY

SEQ ID NO: 41802 - protein, 11 aa, Homo Sapiens
LQPGNTEEAAK

SEQ ID NO: 41803 - protein, 11 aa, Homo Sapiens
LSTVIPNSHVY

SEQ ID NO: 41804 - protein, 11 aa, Homo Sapiens
MLLPEKLISKY

SEQ ID NO: 41805 - protein, 11 aa, Homo Sapiens
MQKLPDIFSVY

SEQ ID NO: 41806 - protein, 11 aa, Homo Sapiens
MVKPDGPYDFY

SEQ ID NO: 41807 - protein, 11 aa, Homo Sapiens
MVQPINLIFRY

SEQ ID NO: 41808 - protein, 11 aa, Homo Sapiens
NTKSFEDIHHY

SEQ ID NO: 41809 - protein, 11 aa, Homo Sapiens
NTPAMYVAIQA

SEQ ID NO: 41810 - protein, 11 aa, Homo Sapiens
PGTTILQYAQT

SEQ ID NO: 41811 - protein, 11 aa, Homo Sapiens
PMFIVNTNVPR

SEQ ID NO: 41812 - protein, 11 aa, Homo Sapiens
PYYDSRVVGKY

SEQ ID NO: 41813 - protein, 11 aa, Homo Sapiens
QAQAGWLQHDY

SEQ ID NO: 41814 - protein, 11 aa, Homo Sapiens
QFKEMSDLNKY

SEQ ID NO: 41815 - protein, 11 aa, Homo Sapiens
QGRPREIINTY

SEQ ID NO: 41816 - protein, 11 aa, Homo Sapiens
QLLPVEKLPKY

SEQ ID NO: 41817 - protein, 11 aa, Homo Sapiens
QLQNIAEKGSY

SEQ ID NO: 41818 - protein, 11 aa, Homo Sapiens
QQIEPGEDDKY

SEQ ID NO: 41819 - protein, 11 aa, Homo Sapiens
QQKGEFAIDGY

SEQ ID NO: 41820 - protein, 11 aa, Homo Sapiens
QSAEEALRGLY

SEQ ID NO: 41821 - protein, 11 aa, Homo Sapiens
QSASPIFTHVY

SEQ ID NO: 41822 - protein, 11 aa, Homo Sapiens
QSISKALVAYY

SEQ ID NO: 41823 - protein, 11 aa, Homo Sapiens
QSKDKVIYSKY

SEQ ID NO: 41824 - protein, 11 aa, Homo Sapiens
QSMDSKLSGRY

SEQ ID NO: 41825 - protein, 11 aa, Homo Sapiens
QTAGKVLAHFY

SEQ ID NO: 41826 - protein, 11 aa, Homo Sapiens
QTLNEAIMHQY

SEQ ID NO: 41827 - protein, 11 aa, Homo Sapiens
QVIEPDKNRKY

SEQ ID NO: 41828 - protein, 11 aa, Homo Sapiens
QVLNAVNKGLY

SEQ ID NO: 41829 - protein, 11 aa, Homo Sapiens
QVQQPGQTNFY

SEQ ID NO: 41830 - protein, 11 aa, Homo Sapiens
QVTPGDIVSTY

SEQ ID NO: 41831 - protein, 11 aa, Homo Sapiens
QVYEQVLRSAY

SEQ ID NO: 41832 - protein, 11 aa, Homo Sapiens
QYYDISAKSNY

SEQ ID NO: 41833 - protein, 11 aa, Homo Sapiens
RAFDQGADAIY

SEQ ID NO: 41834 - protein, 11 aa, Homo Sapiens
RAFKALIAAQY

SEQ ID NO: 41835 - protein, 11 aa, Homo Sapiens
RAIFVTDRHLY

SEQ ID NO: 41836 - protein, 11 aa, Homo Sapiens
RAKDKITCDLY

SEQ ID NO: 41837 - protein, 11 aa, Homo Sapiens
RALLLTDQHLY

SEQ ID NO: 41838 - protein, 11 aa, Homo Sapiens
RAMESTESRHY

SEQ ID NO: 41839 - protein, 11 aa, Homo Sapiens
RAREGSFESRY

SEQ ID NO: 41840 - protein, 11 aa, Homo Sapiens
RASGEMASAQY

SEQ ID NO: 41841 - protein, 11 aa, Homo Sapiens
RAVDFAERHGY

SEQ ID NO: 41842 - protein, 11 aa, Homo Sapiens
RAYPAQITPKM

SEQ ID NO: 41843 - protein, 11 aa, Homo Sapiens
RELYERPPHLY

SEQ ID NO: 41844 - protein, 11 aa, Homo Sapiens
RFFDKVIEKRY

SEQ ID NO: 41845 - protein, 11 aa, Homo Sapiens
RFFFDVGCNKY

SEQ ID NO: 41846 - protein, 11 aa, Homo Sapiens
RFIDSKLIYTY

SEQ ID NO: 41847 - protein, 11 aa, Homo Sapiens
RFKAFVAIGDY

SEQ ID NO: 41848 - protein, 11 aa, Homo Sapiens
RFMDPEMETRY

SEQ ID NO: 41849 - protein, 11 aa, Homo Sapiens
RFQVKNPPHTY

SEQ ID NO: 41850 - protein, 11 aa, Homo Sapiens
RFYPWTIDNKY

SEQ ID NO: 41851 - protein, 11 aa, Homo Sapiens
RGASQAGMTGY

SEQ ID NO: 41852 - protein, 11 aa, Homo Sapiens
RGFGGGGYGGF

SEQ ID NO: 41853 - protein, 11 aa, Homo Sapiens
RGKEAGPAHSY

SEQ ID NO: 41854 - protein, 11 aa, Homo Sapiens
RGYSSLLKRDF

SEQ ID NO: 41855 - protein, 11 aa, Homo Sapiens
RIADQFLGAMY

SEQ ID NO: 41856 - protein, 11 aa, Homo Sapiens
RIFPSHISSRY

SEQ ID NO: 41857 - protein, 11 aa, Homo Sapiens
RIFTYTDSDRY

SEQ ID NO: 41858 - protein, 11 aa, Homo Sapiens
RIHQESELHSY

SEQ ID NO: 41859 - protein, 11 aa, Homo Sapiens
RIIDAGPKGNY

SEQ ID NO: 41860 - protein, 11 aa, Homo Sapiens
RIKGEKDWQKY

SEQ ID NO: 41861 - protein, 11 aa, Homo Sapiens
RIKLGDSSNYY

SEQ ID NO: 41862 - protein, 11 aa, Homo Sapiens
RIKNPEGGLYL

SEQ ID NO: 41863 - protein, 11 aa, Homo Sapiens
RIKTGSPLDHL

SEQ ID NO: 41864 - protein, 11 aa, Homo Sapiens
RILDYTLTGCY

SEQ ID NO: 41865 - protein, 11 aa, Homo Sapiens
RILGLGDLGVY

SEQ ID NO: 41866 - protein, 11 aa, Homo Sapiens
RILPSDACKIY

SEQ ID NO: 41867 - protein, 11 aa, Homo Sapiens
RIMDPDVITGY

SEQ ID NO: 41868 - protein, 11 aa, Homo Sapiens
RINNPELLGQY

SEQ ID NO: 41869 - protein, 11 aa, Homo Sapiens
RINSSLAVAAY

SEQ ID NO: 41870 - protein, 11 aa, Homo Sapiens
RIPAIFSPAFY

SEQ ID NO: 41871 - protein, 11 aa, Homo Sapiens
RIQAGDPVARY

SEQ ID NO: 41872 - protein, 11 aa, Homo Sapiens
RIQEFVRGHFY

SEQ ID NO: 41873 - protein, 11 aa, Homo Sapiens
RIQNPDLWNSY

SEQ ID NO: 41874 - protein, 11 aa, Homo Sapiens
RIQSKTERGSY

SEQ ID NO: 41875 - protein, 11 aa, Homo Sapiens
RIVEPYIAWGY

SEQ ID NO: 41876 - protein, 11 aa, Homo Sapiens
RLFSTAEAAVY

SEQ ID NO: 41877 - protein, 11 aa, Homo Sapiens
RLGNLGEAKKY

SEQ ID NO: 41878 - protein, 11 aa, Homo Sapiens
RLIAQRYLLQY

SEQ ID NO: 41879 - protein, 11 aa, Homo Sapiens
RLIHPKSGRSY

SEQ ID NO: 41880 - protein, 11 aa, Homo Sapiens
RLKEYEKALKY

SEQ ID NO: 41881 - protein, 11 aa, Homo Sapiens
RLKPQLLQGVY

SEQ ID NO: 41882 - protein, 11 aa, Homo Sapiens
RLLDMADVAVY

SEQ ID NO: 41883 - protein, 11 aa, Homo Sapiens
RLLEDSALSKY

SEQ ID NO: 41884 - protein, 11 aa, Homo Sapiens
RLMGDYLLRGY

SEQ ID NO: 41885 - protein, 11 aa, Homo Sapiens
RLNFSHGTHEY

SEQ ID NO: 41886 - protein, 11 aa, Homo Sapiens
RLPAFLDNHNY

SEQ ID NO: 41887 - protein, 11 aa, Homo Sapiens
RLPLRVVKHFY

SEQ ID NO: 41888 - protein, 11 aa, Homo Sapiens
RLQEESLRQDY

SEQ ID NO: 41889 - protein, 11 aa, Homo Sapiens
RLQEGRGEAVY

SEQ ID NO: 41890 - protein, 11 aa, Homo Sapiens
RLQELGARHFY

SEQ ID NO: 41891 - protein, 11 aa, Homo Sapiens
RLQNIIDNQKY

SEQ ID NO: 41892 - protein, 11 aa, Homo Sapiens
RLQPPKQGMQY

SEQ ID NO: 41893 - protein, 11 aa, Homo Sapiens
RLQSKTIKVSY

SEQ ID NO: 41894 - protein, 11 aa, Homo Sapiens
RLYEFDLIDGY

SEQ ID NO: 41895 - protein, 11 aa, Homo Sapiens
RLYHKKVVDHY

SEQ ID NO: 41896 - protein, 11 aa, Homo Sapiens
RLYIWSGRDGY

SEQ ID NO: 41897 - protein, 11 aa, Homo Sapiens
RMIDIEGKGHL

SEQ ID NO: 41898 - protein, 11 aa, Homo Sapiens
RMIGDDLVNSY

SEQ ID NO: 41899 - protein, 11 aa, Homo Sapiens
RMLDPSIKGTF

SEQ ID NO: 41900 - protein, 11 aa, Homo Sapiens
RMNPNSPSITY

SEQ ID NO: 41901 - protein, 11 aa, Homo Sapiens
RMQDTSVSFGY

SEQ ID NO: 41902 - protein, 11 aa, Homo Sapiens
RMQEESLRQEY

SEQ ID NO: 41903 - protein, 11 aa, Homo Sapiens
RMQTNQTPPTY

SEQ ID NO: 41904 - protein, 11 aa, Homo Sapiens
RMRPGAYSTGY

SEQ ID NO: 41905 - protein, 11 aa, Homo Sapiens
RNLNGHSIGQY

SEQ ID NO: 41906 - protein, 11 aa, Homo Sapiens
RNQPQANSHVY

SEQ ID NO: 41907 - protein, 11 aa, Homo Sapiens
RQADCHINNLY

SEQ ID NO: 41908 - protein, 11 aa, Homo Sapiens
RQAGDDFSRRY

SEQ ID NO: 41909 - protein, 11 aa, Homo Sapiens
RQDLPSPSDFY

SEQ ID NO: 41910 - protein, 11 aa, Homo Sapiens
RQHMENEMAHY

SEQ ID NO: 41911 - protein, 11 aa, Homo Sapiens
RQIEDTVLYGY

SEQ ID NO: 41912 - protein, 11 aa, Homo Sapiens
RQIPQNFIADY

SEQ ID NO: 41913 - protein, 11 aa, Homo Sapiens
RQIQFEIAHAY

SEQ ID NO: 41914 - protein, 11 aa, Homo Sapiens
RQISREVTYKY

SEQ ID NO: 41915 - protein, 11 aa, Homo Sapiens
RQITPILPHDY

SEQ ID NO: 41916 - protein, 11 aa, Homo Sapiens
RQKAVSLFLCY

SEQ ID NO: 41917 - protein, 11 aa, Homo Sapiens
RQKDEEDKARF

SEQ ID NO: 41918 - protein, 11 aa, Homo Sapiens
RQKKQDGALYL

SEQ ID NO: 41919 - protein, 11 aa, Homo Sapiens
RQKTPYEGNYY

SEQ ID NO: 41920 - protein, 11 aa, Homo Sapiens
RQLDLAKNRLY

SEQ ID NO: 41921 - protein, 11 aa, Homo Sapiens
RQLEVVKSSSY

SEQ ID NO: 41922 - protein, 11 aa, Homo Sapiens
RQLGQDLLNSY

SEQ ID NO: 41923 - protein, 11 aa, Homo Sapiens
RQLSEEERGRL

SEQ ID NO: 41924 - protein, 11 aa, Homo Sapiens
RQMDESEQYLY

SEQ ID NO: 41925 - protein, 11 aa, Homo Sapiens
RQNLLSQSHAY

SEQ ID NO: 41926 - protein, 11 aa, Homo Sapiens
RQQDGLLRGGY

SEQ ID NO: 41927 - protein, 11 aa, Homo Sapiens
RQRQKELESNY

SEQ ID NO: 41928 - protein, 11 aa, Homo Sapiens
RQYEHDQWRRY

SEQ ID NO: 41929 - protein, 11 aa, Homo Sapiens
RQYNRDWQSYY

SEQ ID NO: 41930 - protein, 11 aa, Homo Sapiens
RSARHFLHHYY

SEQ ID NO: 41931 - protein, 11 aa, Homo Sapiens
RSIGMDPSDIY

SEQ ID NO: 41932 - protein, 11 aa, Homo Sapiens
RSISQSSTDSY

SEQ ID NO: 41933 - protein, 11 aa, Homo Sapiens
RSKLAQIRHIY

SEQ ID NO: 41934 - protein, 11 aa, Homo Sapiens
RSKPSDLASTY

SEQ ID NO: 41935 - protein, 11 aa, Homo Sapiens
RSLDPSQTDFY

SEQ ID NO: 41936 - protein, 11 aa, Homo Sapiens
RSLEVLIGSGY

SEQ ID NO: 41937 - protein, 11 aa, Homo Sapiens
RSLSEDVRFYY

SEQ ID NO: 41938 - protein, 11 aa, Homo Sapiens
RSLVAHKTDRY

SEQ ID NO: 41939 - protein, 11 aa, Homo Sapiens
RSMDSYLNQSY

SEQ ID NO: 41940 - protein, 11 aa, Homo Sapiens
RSQDVNKQGLY

SEQ ID NO: 41941 - protein, 11 aa, Homo Sapiens
RSSQGTSYDSY

SEQ ID NO: 41942 - protein, 11 aa, Homo Sapiens
RSSSNLALALY

SEQ ID NO: 41943 - protein, 11 aa, Homo Sapiens
RSVSIPAPAYY

SEQ ID NO: 41944 - protein, 11 aa, Homo Sapiens
RSYGNSSDSRY

SEQ ID NO: 41945 - protein, 11 aa, Homo Sapiens
RTFRADGAATY

SEQ ID NO: 41946 - protein, 11 aa, Homo Sapiens
RTFSESGRCRY

SEQ ID NO: 41947 - protein, 11 aa, Homo Sapiens
RTFVWPAHFKY

SEQ ID NO: 41948 - protein, 11 aa, Homo Sapiens
RTIDGKVLHKY

SEQ ID NO: 41949 - protein, 11 aa, Homo Sapiens
RTKAATIIQKY

SEQ ID NO: 41950 - protein, 11 aa, Homo Sapiens
RTKADSVPGTY

SEQ ID NO: 41951 - protein, 11 aa, Homo Sapiens
RTKKVGIVGKY

SEQ ID NO: 41952 - protein, 11 aa, Homo Sapiens
RTLMEALVASY

SEQ ID NO: 41953 - protein, 11 aa, Homo Sapiens
RTLPHFIKDDY

SEQ ID NO: 41954 - protein, 11 aa, Homo Sapiens
RTLSFGSDLNY

SEQ ID NO: 41955 - protein, 11 aa, Homo Sapiens
RTNPNSGDFRF

SEQ ID NO: 41956 - protein, 11 aa, Homo Sapiens
RTQTEELHYKY

SEQ ID NO: 41957 - protein, 11 aa, Homo Sapiens
RTRVNKEMARY

SEQ ID NO: 41958 - protein, 11 aa, Homo Sapiens
RTVSLFSPAFY

SEQ ID NO: 41959 - protein, 11 aa, Homo Sapiens
RTYAGLAFHAY

SEQ ID NO: 41960 - protein, 11 aa, Homo Sapiens
RTYPSLLQGEY

SEQ ID NO: 41961 - protein, 11 aa, Homo Sapiens
RTYTETVNHHY

SEQ ID NO: 41962 - protein, 11 aa, Homo Sapiens
RVAGCSVHKGY

SEQ ID NO: 41963 - protein, 11 aa, Homo Sapiens
RVFLKNEKGQY

SEQ ID NO: 41964 - protein, 11 aa, Homo Sapiens
RVHVGSGDHDY

SEQ ID NO: 41965 - protein, 11 aa, Homo Sapiens
RVIGEDGQSVY

SEQ ID NO: 41966 - protein, 11 aa, Homo Sapiens
RVIGSELVQKY

SEQ ID NO: 41967 - protein, 11 aa, Homo Sapiens
RVILPVSVDEY

SEQ ID NO: 41968 - protein, 11 aa, Homo Sapiens
RVISKHDLGHF

SEQ ID NO: 41969 - protein, 11 aa, Homo Sapiens
RVIVLSSSHSY

SEQ ID NO: 41970 - protein, 11 aa, Homo Sapiens
RVKGGDGIRIY

SEQ ID NO: 41971 - protein, 11 aa, Homo Sapiens
RVKGWFLLDNY

SEQ ID NO: 41972 - protein, 11 aa, Homo Sapiens
RVLAPHLTRAY

SEQ ID NO: 41973 - protein, 11 aa, Homo Sapiens
RVLDFDVKRKY

SEQ ID NO: 41974 - protein, 11 aa, Homo Sapiens
RVLEAGKIGIF

SEQ ID NO: 41975 - protein, 11 aa, Homo Sapiens
RVLESTPNNGY

SEQ ID NO: 41976 - protein, 11 aa, Homo Sapiens
RVLHAISRYWY

SEQ ID NO: 41977 - protein, 11 aa, Homo Sapiens
RVLPLSVTHFY

SEQ ID NO: 41978 - protein, 11 aa, Homo Sapiens
RVLPPSALQSV

SEQ ID NO: 41979 - protein, 11 aa, Homo Sapiens
RVLPSWLTAQV

SEQ ID NO: 41980 - protein, 11 aa, Homo Sapiens
RVMPEEIARYY

SEQ ID NO: 41981 - protein, 11 aa, Homo Sapiens
RVNAQAAAYEY

SEQ ID NO: 41982 - protein, 11 aa, Homo Sapiens
RVNDVPEEFLY

SEQ ID NO: 41983 - protein, 11 aa, Homo Sapiens
RVNDVPEEFMY

SEQ ID NO: 41984 - protein, 11 aa, Homo Sapiens
RVNLDMGKAVY

SEQ ID NO: 41985 - protein, 11 aa, Homo Sapiens
RVNLFTDFDKY

SEQ ID NO: 41986 - protein, 11 aa, Homo Sapiens
RVQFGANKSQY

SEQ ID NO: 41987 - protein, 11 aa, Homo Sapiens
RVQPGHCYHLY

SEQ ID NO: 41988 - protein, 11 aa, Homo Sapiens
RVQPGLLQWVK

SEQ ID NO: 41989 - protein, 11 aa, Homo Sapiens
RVQQVELICEY

SEQ ID NO: 41990 - protein, 11 aa, Homo Sapiens
RVRKPAEAERY

SEQ ID NO: 41991 - protein, 11 aa, Homo Sapiens
RVTNGELLAQY

SEQ ID NO: 41992 - protein, 11 aa, Homo Sapiens
RVVGSEFVQKY

SEQ ID NO: 41993 - protein, 11 aa, Homo Sapiens
RVVGSELIQKY

SEQ ID NO: 41994 - protein, 11 aa, Homo Sapiens
RVVGSELVDTY

SEQ ID NO: 41995 - protein, 11 aa, Homo Sapiens
RVYDIPPKFFY

SEQ ID NO: 41996 - protein, 11 aa, Homo Sapiens
RVYGQPSTKHY

SEQ ID NO: 41997 - protein, 11 aa, Homo Sapiens
RVYPANERFWY

SEQ ID NO: 41998 - protein, 11 aa, Homo Sapiens
RVYPESIPRKF

SEQ ID NO: 41999 - protein, 11 aa, Homo Sapiens
RVYSDLHAFYY

SEQ ID NO: 42000 - protein, 11 aa, Homo Sapiens
RVYSLDDIRRY

SEQ ID NO: 42001 - protein, 11 aa, Homo Sapiens
RVYWNDGLDQY

SEQ ID NO: 42002 - protein, 11 aa, Homo Sapiens
RWAPGSVKPIY

SEQ ID NO: 42003 - protein, 11 aa, Homo Sapiens
RWLDRLGESKY

SEQ ID NO: 42004 - protein, 11 aa, Homo Sapiens
RWQDIQNDPRY

SEQ ID NO: 42005 - protein, 11 aa, Homo Sapiens
RWTDILSHGRY

SEQ ID NO: 42006 - protein, 11 aa, Homo Sapiens
RYAPLGWSKKY

SEQ ID NO: 42007 - protein, 11 aa, Homo Sapiens
RYCPEGVHKEY

SEQ ID NO: 42008 - protein, 11 aa, Homo Sapiens
RYCPNGNHKQY

SEQ ID NO: 42009 - protein, 11 aa, Homo Sapiens
RYFGVLQRSLY

SEQ ID NO: 42010 - protein, 11 aa, Homo Sapiens
RYGSDFYSMHY

SEQ ID NO: 42011 - protein, 11 aa, Homo Sapiens
RYIDQQIQGGL

SEQ ID NO: 42012 - protein, 11 aa, Homo Sapiens
RYLDVSILGKF

SEQ ID NO: 42013 - protein, 11 aa, Homo Sapiens
RYLKIIEKSGY

SEQ ID NO: 42014 - protein, 11 aa, Homo Sapiens
RYLNSGGFIGY

SEQ ID NO: 42015 - protein, 11 aa, Homo Sapiens
RYLQAHTQSVY

SEQ ID NO: 42016 - protein, 11 aa, Homo Sapiens
RYQNNIKNDKY

SEQ ID NO: 42017 - protein, 11 aa, Homo Sapiens
RYSALFLGVAY

SEQ ID NO: 42018 - protein, 11 aa, Homo Sapiens
RYTDHGSDHHY

SEQ ID NO: 42019 - protein, 11 aa, Homo Sapiens
RYVASYLLAAL

SEQ ID NO: 42020 - protein, 11 aa, Homo Sapiens
RYVQEGIGSSY

SEQ ID NO: 42021 - protein, 11 aa, Homo Sapiens
SAKEALETDLY

SEQ ID NO: 42022 - protein, 11 aa, Homo Sapiens
SFKGTSPSSKY

SEQ ID NO: 42023 - protein, 11 aa, Homo Sapiens
SFYTPEIPGRY

SEQ ID NO: 42024 - protein, 11 aa, Homo Sapiens
SGISSESGHYY

SEQ ID NO: 42025 - protein, 11 aa, Homo Sapiens
SGKPDVPCSLY

SEQ ID NO: 42026 - protein, 11 aa, Homo Sapiens
SGSHKDLAGKY

SEQ ID NO: 42027 - protein, 11 aa, Homo Sapiens
SLQPAFDFDRY

SEQ ID NO: 42028 - protein, 11 aa, Homo Sapiens
SMFPFFDIAHY

SEQ ID NO: 42029 - protein, 11 aa, Homo Sapiens
SMIGQFGVGFY

SEQ ID NO: 42030 - protein, 11 aa, Homo Sapiens
SMRGGYIGSTY

SEQ ID NO: 42031 - protein, 11 aa, Homo Sapiens
SMVQENGQRKY

SEQ ID NO: 42032 - protein, 11 aa, Homo Sapiens
SQDPSGDSKLY

SEQ ID NO: 42033 - protein, 11 aa, Homo Sapiens
SQHSPSKKALY

SEQ ID NO: 42034 - protein, 11 aa, Homo Sapiens
SQIPAAVKLTY

SEQ ID NO: 42035 - protein, 11 aa, Homo Sapiens
SQQADVRLMLY

SEQ ID NO: 42036 - protein, 11 aa, Homo Sapiens
SQRPGFVIDIY

SEQ ID NO: 42037 - protein, 11 aa, Homo Sapiens
SQTNCPLYVTK

SEQ ID NO: 42038 - protein, 11 aa, Homo Sapiens
SQYPELLVASY

SEQ ID NO: 42039 - protein, 11 aa, Homo Sapiens
SSKGLQIIGTY

SEQ ID NO: 42040 - protein, 11 aa, Homo Sapiens
SSKSPELLARY

SEQ ID NO: 42041 - protein, 11 aa, Homo Sapiens
SSKTFSDEDYY

SEQ ID NO: 42042 - protein, 11 aa, Homo Sapiens
SSLPPGVHISY

SEQ ID NO: 42043 - protein, 11 aa, Homo Sapiens
SSQNGSLSPHY

SEQ ID NO: 42044 - protein, 11 aa, Homo Sapiens
SSQSAALTAQY

SEQ ID NO: 42045 - protein, 11 aa, Homo Sapiens
STKGATSIEKY

SEQ ID NO: 42046 - protein, 11 aa, Homo Sapiens
STNSGIQNGQY

SEQ ID NO: 42047 - protein, 11 aa, Homo Sapiens
STYRDFQQALY

SEQ ID NO: 42048 - protein, 11 aa, Homo Sapiens
SVFSDQGGRKY

SEQ ID NO: 42049 - protein, 11 aa, Homo Sapiens
SVFTEPNRHFY

SEQ ID NO: 42050 - protein, 11 aa, Homo Sapiens
SVIPVLNSSSY

SEQ ID NO: 42051 - protein, 11 aa, Homo Sapiens
SVISKIDLHKY

SEQ ID NO: 42052 - protein, 11 aa, Homo Sapiens
SVKGPELINMY

SEQ ID NO: 42053 - protein, 11 aa, Homo Sapiens
SVKGPELLSKY

SEQ ID NO: 42054 - protein, 11 aa, Homo Sapiens
SVKQPDLVSYY

SEQ ID NO: 42055 - protein, 11 aa, Homo Sapiens
SVKSAAKESLY

SEQ ID NO: 42056 - protein, 11 aa, Homo Sapiens
SVLPGELMRGY

SEQ ID NO: 42057 - protein, 11 aa, Homo Sapiens
SVMPLAAVGYL

SEQ ID NO: 42058 - protein, 11 aa, Homo Sapiens
SVNQQWTTAHY

SEQ ID NO: 42059 - protein, 11 aa, Homo Sapiens
SVRIPQIGDKF

SEQ ID NO: 42060 - protein, 11 aa, Homo Sapiens
SVSSPRSVDSY

SEQ ID NO: 42061 - protein, 11 aa, Homo Sapiens
SVYGGGGIHEY

SEQ ID NO: 42062 - protein, 11 aa, Homo Sapiens
SVYPKALRDEY

SEQ ID NO: 42063 - protein, 11 aa, Homo Sapiens
SYFRASSTMRY

SEQ ID NO: 42064 - protein, 11 aa, Homo Sapiens
SYLDKEDTFFY

SEQ ID NO: 42065 - protein, 11 aa, Homo Sapiens
SYLPCPLLPSY

SEQ ID NO: 42066 - protein, 11 aa, Homo Sapiens
SYMGHFDLLNY

SEQ ID NO: 42067 - protein, 11 aa, Homo Sapiens
TFLPSSKSDQY

SEQ ID NO: 42068 - protein, 11 aa, Homo Sapiens
TGKSVKDVDRY

SEQ ID NO: 42069 - protein, 11 aa, Homo Sapiens
TGVANALAHRY

SEQ ID NO: 42070 - protein, 11 aa, Homo Sapiens
TLGPAVVPHQY

SEQ ID NO: 42071 - protein, 11 aa, Homo Sapiens
TLISEDIKSYY

SEQ ID NO: 42072 - protein, 11 aa, Homo Sapiens
TLQQEGLLSRY

SEQ ID NO: 42073 - protein, 11 aa, Homo Sapiens
TQKEIFQCDKY

SEQ ID NO: 42074 - protein, 11 aa, Homo Sapiens
TQRKIFQCDEY

SEQ ID NO: 42075 - protein, 11 aa, Homo Sapiens
TQYKKGKDSLY

SEQ ID NO: 42076 - protein, 11 aa, Homo Sapiens
TSKDPDIKAQY

SEQ ID NO: 42077 - protein, 11 aa, Homo Sapiens
TTNRDIAFGLY

SEQ ID NO: 42078 - protein, 11 aa, Homo Sapiens
TTQRVSCAHIY

SEQ ID NO: 42079 - protein, 11 aa, Homo Sapiens
TVIPEPATGFY

SEQ ID NO: 42080 - protein, 11 aa, Homo Sapiens
TVKGLKHPHRY

SEQ ID NO: 42081 - protein, 11 aa, Homo Sapiens
TVNTFDEKSYY

SEQ ID NO: 42082 - protein, 11 aa, Homo Sapiens
TVPSVDLAARY

SEQ ID NO: 42083 - protein, 11 aa, Homo Sapiens
TVQDMLSSHHY

SEQ ID NO: 42084 - protein, 11 aa, Homo Sapiens
TVQKPDAANYY

SEQ ID NO: 42085 - protein, 11 aa, Homo Sapiens
TVRKPAVIDAY

SEQ ID NO: 42086 - protein, 11 aa, Homo Sapiens
TVRSHGVLGLY

SEQ ID NO: 42087 - protein, 11 aa, Homo Sapiens
VCLSPRRIKLY

SEQ ID NO: 42088 - protein, 11 aa, Homo Sapiens
VGAGAPVYLAA

SEQ ID NO: 42089 - protein, 11 aa, Homo Sapiens
VGKPPFEANTY

SEQ ID NO: 42090 - protein, 11 aa, Homo Sapiens
VLVPVWIIHYY

SEQ ID NO: 42091 - protein, 11 aa, Homo Sapiens
VMKSGKYVLGY

SEQ ID NO: 42092 - protein, 11 aa, Homo Sapiens
VMNWVPCGHSY

SEQ ID NO: 42093 - protein, 11 aa, Homo Sapiens
VMYNSSDHDVY

SEQ ID NO: 42094 - protein, 11 aa, Homo Sapiens
VQKPDAANYYY

SEQ ID NO: 42095 - protein, 11 aa, Homo Sapiens
VSKPAEVQGKY

SEQ ID NO: 42096 - protein, 11 aa, Homo Sapiens
VTEKIPVRHLY

SEQ ID NO: 42097 - protein, 11 aa, Homo Sapiens
VTISNPTRHVY

SEQ ID NO: 42098 - protein, 11 aa, Homo Sapiens
VTRVEGGFDQY

SEQ ID NO: 42099 - protein, 11 aa, Homo Sapiens
VVFDKSDLAKY

SEQ ID NO: 42100 - protein, 11 aa, Homo Sapiens
VVHDDMECSHY

SEQ ID NO: 42101 - protein, 11 aa, Homo Sapiens
VVLERGPGAAY

SEQ ID NO: 42102 - protein, 11 aa, Homo Sapiens
VVLPHQPLATY

SEQ ID NO: 42103 - protein, 11 aa, Homo Sapiens
VVLRIGSAHSY

SEQ ID NO: 42104 - protein, 11 aa, Homo Sapiens
VVMADPKGKAY

SEQ ID NO: 42105 - protein, 11 aa, Homo Sapiens
VVMDPALAAQY

SEQ ID NO: 42106 - protein, 11 aa, Homo Sapiens
VVNNHLEVARY

SEQ ID NO: 42107 - protein, 11 aa, Homo Sapiens
VVNSELSCQLY

SEQ ID NO: 42108 - protein, 11 aa, Homo Sapiens
VVQDPNSFAEY

SEQ ID NO: 42109 - protein, 11 aa, Homo Sapiens
VVRNVFDFDSY

SEQ ID NO: 42110 - protein, 11 aa, Homo Sapiens
VVRTEPFQDGY

SEQ ID NO: 42111 - protein, 11 aa, Homo Sapiens
VVSGSEMSGKY

SEQ ID NO: 42112 - protein, 11 aa, Homo Sapiens
VVYKNPSEYHY

SEQ ID NO: 42113 - protein, 11 aa, Homo Sapiens
VWDAAIVLSTY

SEQ ID NO: 42114 - protein, 11 aa, Homo Sapiens
YGLPDDISHGY

SEQ ID NO: 42115 - protein, 8 aa, Homo Sapiens
ATLLIVNR

SEQ ID NO: 42116 - protein, 8 aa, Homo Sapiens
ATWLPQRR

SEQ ID NO: 42117 - protein, 8 aa, Homo Sapiens
FPVGRIHR

SEQ ID NO: 42118 - protein, 8 aa, Homo Sapiens
FPVGRVHR

SEQ ID NO: 42119 - protein, 8 aa, Homo Sapiens
HSFRPAYR

SEQ ID NO: 42120 - protein, 8 aa, Homo Sapiens
KAWSPVFR

SEQ ID NO: 42121 - protein, 8 aa, Homo Sapiens
KIRVPFLR

SEQ ID NO: 42122 - protein, 8 aa, Homo Sapiens
KVWVPKQK

SEQ ID NO: 42123 - protein, 8 aa, Homo Sapiens
LSRTARAW

SEQ ID NO: 42124 - protein, 8 aa, Homo Sapiens
LVFVPSLR

SEQ ID NO: 42125 - protein, 8 aa, Homo Sapiens
MVNVPKTR

SEQ ID NO: 42126 - protein, 8 aa, Homo Sapiens
PSIVGRPR

SEQ ID NO: 42127 - protein, 8 aa, Homo Sapiens
RLLLPHNR

SEQ ID NO: 42128 - protein, 8 aa, Homo Sapiens
RNLIPVSR

SEQ ID NO: 42129 - protein, 8 aa, Homo Sapiens
RNLVPVQR

SEQ ID NO: 42130 - protein, 8 aa, Homo Sapiens
SAWYPFFR

SEQ ID NO: 42131 - protein, 8 aa, Homo Sapiens
SLGLKFNK

SEQ ID NO: 42132 - protein, 8 aa, Homo Sapiens
TVKWFNVR

SEQ ID NO: 42133 - protein, 9 aa, Homo Sapiens
AAEYLYFFR

SEQ ID NO: 42134 - protein, 9 aa, Homo Sapiens
AALPGIVHR

SEQ ID NO: 42135 - protein, 9 aa, Homo Sapiens
AFHPQPVSR

SEQ ID NO: 42136 - protein, 9 aa, Homo Sapiens
AFKDIPVQR

SEQ ID NO: 42137 - protein, 9 aa, Homo Sapiens
AFKPILSTR

SEQ ID NO: 42138 - protein, 9 aa, Homo Sapiens
AFWIPFIYR

SEQ ID NO: 42139 - protein, 9 aa, Homo Sapiens
AGALFLHQR

SEQ ID NO: 42140 - protein, 9 aa, Homo Sapiens
AGGDWFTSR

SEQ ID NO: 42141 - protein, 9 aa, Homo Sapiens
AGKPAFMGR

SEQ ID NO: 42142 - protein, 9 aa, Homo Sapiens
AGNYAWVNR

SEQ ID NO: 42143 - protein, 9 aa, Homo Sapiens
AIFLWLITR

SEQ ID NO: 42144 - protein, 9 aa, Homo Sapiens
AIKIQSVYR

SEQ ID NO: 42145 - protein, 9 aa, Homo Sapiens
AIKSVKIYR

SEQ ID NO: 42146 - protein, 9 aa, Homo Sapiens
ALAALIFRR

SEQ ID NO: 42147 - protein, 9 aa, Homo Sapiens
ALDPAKMNR

SEQ ID NO: 42148 - protein, 9 aa, Homo Sapiens
ALFNTRIPR

SEQ ID NO: 42149 - protein, 9 aa, Homo Sapiens
ALGAFLNHR

SEQ ID NO: 42150 - protein, 9 aa, Homo Sapiens
ALNGKIYFR

SEQ ID NO: 42151 - protein, 9 aa, Homo Sapiens
ALNRITVWR

SEQ ID NO: 42152 - protein, 9 aa, Homo Sapiens
ALNVLLFYR

SEQ ID NO: 42153 - protein, 9 aa, Homo Sapiens
AQIFRVNLR

SEQ ID NO: 42154 - protein, 9 aa, Homo Sapiens
AQNPSLFVK

SEQ ID NO: 42155 - protein, 9 aa, Homo Sapiens
AQQLITICR

SEQ ID NO: 42156 - protein, 9 aa, Homo Sapiens
AQWQKVLPR

SEQ ID NO: 42157 - protein, 9 aa, Homo Sapiens
ASGDWFTSR

SEQ ID NO: 42158 - protein, 9 aa, Homo Sapiens
ASIDWLAQR

SEQ ID NO: 42159 - protein, 9 aa, Homo Sapiens
ASKEPFYVR

SEQ ID NO: 42160 - protein, 9 aa, Homo Sapiens
ASQGFRFLR

SEQ ID NO: 42161 - protein, 9 aa, Homo Sapiens
ASRPPVTLR

SEQ ID NO: 42162 - protein, 9 aa, Homo Sapiens
ASSYIAHLR

SEQ ID NO: 42163 - protein, 9 aa, Homo Sapiens
ATATVYFKR

SEQ ID NO: 42164 - protein, 9 aa, Homo Sapiens
ATFARIWYL

SEQ ID NO: 42165 - protein, 9 aa, Homo Sapiens
ATFKDLLTR

SEQ ID NO: 42166 - protein, 9 aa, Homo Sapiens
ATFQFTVER

SEQ ID NO: 42167 - protein, 9 aa, Homo Sapiens
ATIALMIQR

SEQ ID NO: 42168 - protein, 9 aa, Homo Sapiens
ATIVDLVER

SEQ ID NO: 42169 - protein, 9 aa, Homo Sapiens
ATKPLYVAL

SEQ ID NO: 42170 - protein, 9 aa, Homo Sapiens
ATLGAILNR

SEQ ID NO: 42171 - protein, 9 aa, Homo Sapiens
ATLYLGWNR

SEQ ID NO: 42172 - protein, 9 aa, Homo Sapiens
ATNILTATR

SEQ ID NO: 42173 - protein, 9 aa, Homo Sapiens
ATNWDLIGR

SEQ ID NO: 42174 - protein, 9 aa, Homo Sapiens
ATQTQFFHV

SEQ ID NO: 42175 - protein, 9 aa, Homo Sapiens
ATRLGYFGR

SEQ ID NO: 42176 - protein, 9 aa, Homo Sapiens
ATRWPLAVR

SEQ ID NO: 42177 - protein, 9 aa, Homo Sapiens
ATSPALFNR

SEQ ID NO: 42178 - protein, 9 aa, Homo Sapiens
ATSPIIIHR

SEQ ID NO: 42179 - protein, 9 aa, Homo Sapiens
ATYPYQVVR

SEQ ID NO: 42180 - protein, 9 aa, Homo Sapiens
AVANFIRQR

SEQ ID NO: 42181 - protein, 9 aa, Homo Sapiens
AVEDLRWFR

SEQ ID NO: 42182 - protein, 9 aa, Homo Sapiens
AVFAGFEGR

SEQ ID NO: 42183 - protein, 9 aa, Homo Sapiens
AVFYTFVFR

SEQ ID NO: 42184 - protein, 9 aa, Homo Sapiens
AVIDVGINR

SEQ ID NO: 42185 - protein, 9 aa, Homo Sapiens
AVTAFVTFR

SEQ ID NO: 42186 - protein, 9 aa, Homo Sapiens
AVYDFFIGR

SEQ ID NO: 42187 - protein, 9 aa, Homo Sapiens
AWKSWTALR

SEQ ID NO: 42188 - protein, 9 aa, Homo Sapiens
AYAEYVIYR

SEQ ID NO: 42189 - protein, 9 aa, Homo Sapiens
AYFVPLVKR

SEQ ID NO: 42190 - protein, 9 aa, Homo Sapiens
AYKSILQER

SEQ ID NO: 42191 - protein, 9 aa, Homo Sapiens
AYLAWRLAR

SEQ ID NO: 42192 - protein, 9 aa, Homo Sapiens
AYLTLPSYR

SEQ ID NO: 42193 - protein, 9 aa, Homo Sapiens
CVNQFIISR

SEQ ID NO: 42194 - protein, 9 aa, Homo Sapiens
EVVQITWNR

SEQ ID NO: 42195 - protein, 9 aa, Homo Sapiens
FDAKRLIGR

SEQ ID NO: 42196 - protein, 9 aa, Homo Sapiens
FLFVPPQFR

SEQ ID NO: 42197 - protein, 9 aa, Homo Sapiens
FPSIVGRPR

SEQ ID NO: 42198 - protein, 9 aa, Homo Sapiens
FSSVFQFLR

SEQ ID NO: 42199 - protein, 9 aa, Homo Sapiens
GINSILYQR

SEQ ID NO: 42200 - protein, 9 aa, Homo Sapiens
GIWLRYDSR

SEQ ID NO: 42201 - protein, 9 aa, Homo Sapiens
GLFSGLIPR

SEQ ID NO: 42202 - protein, 9 aa, Homo Sapiens
GLKQVIIPR

SEQ ID NO: 42203 - protein, 9 aa, Homo Sapiens
GLQLRIATR

SEQ ID NO: 42204 - protein, 9 aa, Homo Sapiens
GSHIPGWFR

SEQ ID NO: 42205 - protein, 9 aa, Homo Sapiens
GSRSFIINR

SEQ ID NO: 42206 - protein, 9 aa, Homo Sapiens
GSYHPGVFR

SEQ ID NO: 42207 - protein, 9 aa, Homo Sapiens
GSYVPPRRL

SEQ ID NO: 42208 - protein, 9 aa, Homo Sapiens
GTIHIFRVR

SEQ ID NO: 42209 - protein, 9 aa, Homo Sapiens
GTLDFYMAR

SEQ ID NO: 42210 - protein, 9 aa, Homo Sapiens
GTLDYILQR

SEQ ID NO: 42211 - protein, 9 aa, Homo Sapiens
GTLGGMLTR

SEQ ID NO: 42212 - protein, 9 aa, Homo Sapiens
GTQSFVFQR

SEQ ID NO: 42213 - protein, 9 aa, Homo Sapiens
GTRLPLVLR

SEQ ID NO: 42214 - protein, 9 aa, Homo Sapiens
GTSQLYVYR

SEQ ID NO: 42215 - protein, 9 aa, Homo Sapiens
GTVKWFNVR

SEQ ID NO: 42216 - protein, 9 aa, Homo Sapiens
GTWNWIWRR

SEQ ID NO: 42217 - protein, 9 aa, Homo Sapiens
GTYVSSVPR

SEQ ID NO: 42218 - protein, 9 aa, Homo Sapiens
GVFTKLINR

SEQ ID NO: 42219 - protein, 9 aa, Homo Sapiens
GVLGSFIHR

SEQ ID NO: 42220 - protein, 9 aa, Homo Sapiens
GVMPSHFSR

SEQ ID NO: 42221 - protein, 9 aa, Homo Sapiens
GVMTVLIKR

SEQ ID NO: 42222 - protein, 9 aa, Homo Sapiens
GVNQLKFAR

SEQ ID NO: 42223 - protein, 9 aa, Homo Sapiens
GVYTDFAFR

SEQ ID NO: 42224 - protein, 9 aa, Homo Sapiens
HANPRLWLR

SEQ ID NO: 42225 - protein, 9 aa, Homo Sapiens
HINTVFVLR

SEQ ID NO: 42226 - protein, 9 aa, Homo Sapiens
HSMALIHNR

SEQ ID NO: 42227 - protein, 9 aa, Homo Sapiens
HSMDFVAYR

SEQ ID NO: 42228 - protein, 9 aa, Homo Sapiens
HTLEPLIPR

SEQ ID NO: 42229 - protein, 9 aa, Homo Sapiens
IFYTAIVNR

SEQ ID NO: 42230 - protein, 9 aa, Homo Sapiens
IGLGIYIGR

SEQ ID NO: 42231 - protein, 9 aa, Homo Sapiens
ILKEILQKR

SEQ ID NO: 42232 - protein, 9 aa, Homo Sapiens
ILNLIPSTR

SEQ ID NO: 42233 - protein, 9 aa, Homo Sapiens
ILQILSLNR

SEQ ID NO: 42234 - protein, 9 aa, Homo Sapiens
ILRDFFELR

SEQ ID NO: 42235 - protein, 9 aa, Homo Sapiens
ILRTEQWPR

SEQ ID NO: 42236 - protein, 9 aa, Homo Sapiens
ISDPYKVYR

SEQ ID NO: 42237 - protein, 9 aa, Homo Sapiens
ISSIPINLR

SEQ ID NO: 42238 - protein, 9 aa, Homo Sapiens
ITFPAMVHR

SEQ ID NO: 42239 - protein, 9 aa, Homo Sapiens
ITTVPPNLR

SEQ ID NO: 42240 - protein, 9 aa, Homo Sapiens
IVEEFNFPR

SEQ ID NO: 42241 - protein, 9 aa, Homo Sapiens
IVIAFYEER

SEQ ID NO: 42242 - protein, 9 aa, Homo Sapiens
IVNENLVER

SEQ ID NO: 42243 - protein, 9 aa, Homo Sapiens
IYNFRIFER

SEQ ID NO: 42244 - protein, 9 aa, Homo Sapiens
IYSGYIRNR

SEQ ID NO: 42245 - protein, 9 aa, Homo Sapiens
KAFDRITTR

SEQ ID NO: 42246 - protein, 9 aa, Homo Sapiens
KFKFPGRQK

SEQ ID NO: 42247 - protein, 9 aa, Homo Sapiens
KGLDSFLNR

SEQ ID NO: 42248 - protein, 9 aa, Homo Sapiens
KGVDPKFLR

SEQ ID NO: 42249 - protein, 9 aa, Homo Sapiens
KIMLPPRNR

SEQ ID NO: 42250 - protein, 9 aa, Homo Sapiens
KINLIIHQR

SEQ ID NO: 42251 - protein, 9 aa, Homo Sapiens
KIPDWFLNR

SEQ ID NO: 42252 - protein, 9 aa, Homo Sapiens
KISGFPKNR

SEQ ID NO: 42253 - protein, 9 aa, Homo Sapiens
KISLIQIFR

SEQ ID NO: 42254 - protein, 9 aa, Homo Sapiens
KLFSVTRNR

SEQ ID NO: 42255 - protein, 9 aa, Homo Sapiens
KLFVGFLNR

SEQ ID NO: 42256 - protein, 9 aa, Homo Sapiens
KLHLRTNYL

SEQ ID NO: 42257 - protein, 9 aa, Homo Sapiens
KLKWIVSGR

SEQ ID NO: 42258 - protein, 9 aa, Homo Sapiens
KLLESIFHR

SEQ ID NO: 42259 - protein, 9 aa, Homo Sapiens
KLLEVWFSR

SEQ ID NO: 42260 - protein, 9 aa, Homo Sapiens
KLLGGLAVR

SEQ ID NO: 42261 - protein, 9 aa, Homo Sapiens
KLNIRPLLR

SEQ ID NO: 42262 - protein, 9 aa, Homo Sapiens
KLQPPPLGR

SEQ ID NO: 42263 - protein, 9 aa, Homo Sapiens
KLWEISTGR

SEQ ID NO: 42264 - protein, 9 aa, Homo Sapiens
KLYPLPSAR

SEQ ID NO: 42265 - protein, 9 aa, Homo Sapiens
KLYSLLFRR

SEQ ID NO: 42266 - protein, 9 aa, Homo Sapiens
KQFLPFLQR

SEQ ID NO: 42267 - protein, 9 aa, Homo Sapiens
KQQGVLALR

SEQ ID NO: 42268 - protein, 9 aa, Homo Sapiens
KSFLPLIRR

SEQ ID NO: 42269 - protein, 9 aa, Homo Sapiens
KSFQKIQVR

SEQ ID NO: 42270 - protein, 9 aa, Homo Sapiens
KSIANLIER

SEQ ID NO: 42271 - protein, 9 aa, Homo Sapiens
KSKVPAFVR

SEQ ID NO: 42272 - protein, 9 aa, Homo Sapiens
KSLPGVVTR

SEQ ID NO: 42273 - protein, 9 aa, Homo Sapiens
KTFSEILNR

SEQ ID NO: 42274 - protein, 9 aa, Homo Sapiens
KTILKRLFR

SEQ ID NO: 42275 - protein, 9 aa, Homo Sapiens
KTLEGVITR

SEQ ID NO: 42276 - protein, 9 aa, Homo Sapiens
KTLPKIVGR

SEQ ID NO: 42277 - protein, 9 aa, Homo Sapiens
KTNGKFLIR

SEQ ID NO: 42278 - protein, 9 aa, Homo Sapiens
KVIPPIRSR

SEQ ID NO: 42279 - protein, 9 aa, Homo Sapiens
KVLRPFLLR

SEQ ID NO: 42280 - protein, 9 aa, Homo Sapiens
KVMGILINR

SEQ ID NO: 42281 - protein, 9 aa, Homo Sapiens
KVWVKLIGR

SEQ ID NO: 42282 - protein, 9 aa, Homo Sapiens
KWYEKFFGR

SEQ ID NO: 42283 - protein, 9 aa, Homo Sapiens
KYIDYIFNV

SEQ ID NO: 42284 - protein, 9 aa, Homo Sapiens
KYIERIITR

SEQ ID NO: 42285 - protein, 9 aa, Homo Sapiens
KYLAFLRKR

SEQ ID NO: 42286 - protein, 9 aa, Homo Sapiens
KYLNPFFTR

SEQ ID NO: 42287 - protein, 9 aa, Homo Sapiens
KYPVWLWKR

SEQ ID NO: 42288 - protein, 9 aa, Homo Sapiens
LALNIIQNR

SEQ ID NO: 42289 - protein, 9 aa, Homo Sapiens
LAQFHFTNR

SEQ ID NO: 42290 - protein, 9 aa, Homo Sapiens
LIKPPTILR

SEQ ID NO: 42291 - protein, 9 aa, Homo Sapiens
LINNKIANR

SEQ ID NO: 42292 - protein, 9 aa, Homo Sapiens
LIRKLPFQR

SEQ ID NO: 42293 - protein, 9 aa, Homo Sapiens
LLNAVIVQR

SEQ ID NO: 42294 - protein, 9 aa, Homo Sapiens
LMLKLKWKS

SEQ ID NO: 42295 - protein, 9 aa, Homo Sapiens
LQNPDLALR

SEQ ID NO: 42296 - protein, 9 aa, Homo Sapiens
LQNVNITLR

SEQ ID NO: 42297 - protein, 9 aa, Homo Sapiens
LRIASRLAR

SEQ ID NO: 42298 - protein, 9 aa, Homo Sapiens
LSLGMVYLR

SEQ ID NO: 42299 - protein, 9 aa, Homo Sapiens
LSLPGITNR

SEQ ID NO: 42300 - protein, 9 aa, Homo Sapiens
LSRLPGEVR

SEQ ID NO: 42301 - protein, 9 aa, Homo Sapiens
LTGPVMPVR

SEQ ID NO: 42302 - protein, 9 aa, Homo Sapiens
LYFPDFIVR

SEQ ID NO: 42303 - protein, 9 aa, Homo Sapiens
LYRKMEIYR

SEQ ID NO: 42304 - protein, 9 aa, Homo Sapiens
MGLFNFRPS

SEQ ID NO: 42305 - protein, 9 aa, Homo Sapiens
MGLSSFISR

SEQ ID NO: 42306 - protein, 9 aa, Homo Sapiens
MLRLPTVFR

SEQ ID NO: 42307 - protein, 9 aa, Homo Sapiens
MLYGLIHAR

SEQ ID NO: 42308 - protein, 9 aa, Homo Sapiens
MPKDIQLAR

SEQ ID NO: 42309 - protein, 9 aa, Homo Sapiens
PIRLLAAAA

SEQ ID NO: 42310 - protein, 9 aa, Homo Sapiens
QAWSLPTQR

SEQ ID NO: 42311 - protein, 9 aa, Homo Sapiens
QEFGLARFK

SEQ ID NO: 42312 - protein, 9 aa, Homo Sapiens
QFFQRILER

SEQ ID NO: 42313 - protein, 9 aa, Homo Sapiens
QFFYVPVKR

SEQ ID NO: 42314 - protein, 9 aa, Homo Sapiens
QGYSDFINR

SEQ ID NO: 42315 - protein, 9 aa, Homo Sapiens
QLGQFLQHR

SEQ ID NO: 42316 - protein, 9 aa, Homo Sapiens
QLMPALVQR

SEQ ID NO: 42317 - protein, 9 aa, Homo Sapiens
QLYPRNFLR

SEQ ID NO: 42318 - protein, 9 aa, Homo Sapiens
QQLYWSHPR

SEQ ID NO: 42319 - protein, 9 aa, Homo Sapiens
QSWVPLLSR

SEQ ID NO: 42320 - protein, 9 aa, Homo Sapiens
QTQSIYIPR

SEQ ID NO: 42321 - protein, 9 aa, Homo Sapiens
QVAIKVIPR

SEQ ID NO: 42322 - protein, 9 aa, Homo Sapiens
QVKTWFQNR

SEQ ID NO: 42323 - protein, 9 aa, Homo Sapiens
QVLPRFQPR

SEQ ID NO: 42324 - protein, 9 aa, Homo Sapiens
RFLDRFVYR

SEQ ID NO: 42325 - protein, 9 aa, Homo Sapiens
RFVDFQKVR

SEQ ID NO: 42326 - protein, 9 aa, Homo Sapiens
RFVNLISER

SEQ ID NO: 42327 - protein, 9 aa, Homo Sapiens
RGLSYIHQR

SEQ ID NO: 42328 - protein, 9 aa, Homo Sapiens
RGMNVPFKR

SEQ ID NO: 42329 - protein, 9 aa, Homo Sapiens
RIFTSVPKR

SEQ ID NO: 42330 - protein, 9 aa, Homo Sapiens
RIIVPLNNR

SEQ ID NO: 42331 - protein, 9 aa, Homo Sapiens
RIWSPTIGR

SEQ ID NO: 42332 - protein, 9 aa, Homo Sapiens
RLAPIPRAR

SEQ ID NO: 42333 - protein, 9 aa, Homo Sapiens
RLAVRTVIR

SEQ ID NO: 42334 - protein, 9 aa, Homo Sapiens
RLFEWVVNR

SEQ ID NO: 42335 - protein, 9 aa, Homo Sapiens
RLFGALLER

SEQ ID NO: 42336 - protein, 9 aa, Homo Sapiens
RLFNAIIHR

SEQ ID NO: 42337 - protein, 9 aa, Homo Sapiens
RLFPPLRQR

SEQ ID NO: 42338 - protein, 9 aa, Homo Sapiens
RLFSIVRPR

SEQ ID NO: 42339 - protein, 9 aa, Homo Sapiens
RLIDVLENR

SEQ ID NO: 42340 - protein, 9 aa, Homo Sapiens
RLKDSWVER

SEQ ID NO: 42341 - protein, 9 aa, Homo Sapiens
RLKIGFILR

SEQ ID NO: 42342 - protein, 9 aa, Homo Sapiens
RLLDFLQKR

SEQ ID NO: 42343 - protein, 9 aa, Homo Sapiens
RLMKVFVTR

SEQ ID NO: 42344 - protein, 9 aa, Homo Sapiens
RLQQLRELR

SEQ ID NO: 42345 - protein, 9 aa, Homo Sapiens
RLWDFIENR

SEQ ID NO: 42346 - protein, 9 aa, Homo Sapiens
RLWDLQQLR

SEQ ID NO: 42347 - protein, 9 aa, Homo Sapiens
RLYTKFSAR

SEQ ID NO: 42348 - protein, 9 aa, Homo Sapiens
RMLERVIGR

SEQ ID NO: 42349 - protein, 9 aa, Homo Sapiens
RNTLFQLQR

SEQ ID NO: 42350 - protein, 9 aa, Homo Sapiens
RQAGLSYIR

SEQ ID NO: 42351 - protein, 9 aa, Homo Sapiens
RQKFQILGR

SEQ ID NO: 42352 - protein, 9 aa, Homo Sapiens
RQLFRILFR

SEQ ID NO: 42353 - protein, 9 aa, Homo Sapiens
RQLWRVIER

SEQ ID NO: 42354 - protein, 9 aa, Homo Sapiens
RQTGIVLNR

SEQ ID NO: 42355 - protein, 9 aa, Homo Sapiens
RSAALSWLR

SEQ ID NO: 42356 - protein, 9 aa, Homo Sapiens
RSFSLGVPR

SEQ ID NO: 42357 - protein, 9 aa, Homo Sapiens
RSHSIFSIR

SEQ ID NO: 42358 - protein, 9 aa, Homo Sapiens
RSLPFFSAR

SEQ ID NO: 42359 - protein, 9 aa, Homo Sapiens
RSMVQFIGR

SEQ ID NO: 42360 - protein, 9 aa, Homo Sapiens
RSNPKIWNV

SEQ ID NO: 42361 - protein, 9 aa, Homo Sapiens
RSQVFNILR

SEQ ID NO: 42362 - protein, 9 aa, Homo Sapiens
RSVAGLLPR

SEQ ID NO: 42363 - protein, 9 aa, Homo Sapiens
RSWKVFNER

SEQ ID NO: 42364 - protein, 9 aa, Homo Sapiens
RTAALPTFR

SEQ ID NO: 42365 - protein, 9 aa, Homo Sapiens
RTALILAVR

SEQ ID NO: 42366 - protein, 9 aa, Homo Sapiens
RTIALLIGR

SEQ ID NO: 42367 - protein, 9 aa, Homo Sapiens
RTIAPIIGR

SEQ ID NO: 42368 - protein, 9 aa, Homo Sapiens
RTKLSLIMR

SEQ ID NO: 42369 - protein, 9 aa, Homo Sapiens
RTLDPSWLR

SEQ ID NO: 42370 - protein, 9 aa, Homo Sapiens
RTLGLLVKR

SEQ ID NO: 42371 - protein, 9 aa, Homo Sapiens
RTLIPRYFR

SEQ ID NO: 42372 - protein, 9 aa, Homo Sapiens
RTLKLSVQR

SEQ ID NO: 42373 - protein, 9 aa, Homo Sapiens
RTLLVADPR

SEQ ID NO: 42374 - protein, 9 aa, Homo Sapiens
RTMALPVGR

SEQ ID NO: 42375 - protein, 9 aa, Homo Sapiens
RVGDVYIPR

SEQ ID NO: 42376 - protein, 9 aa, Homo Sapiens
RVHSIFVLR

SEQ ID NO: 42377 - protein, 9 aa, Homo Sapiens
RVITALVER

SEQ ID NO: 42378 - protein, 9 aa, Homo Sapiens
RVIWGKVTR

SEQ ID NO: 42379 - protein, 9 aa, Homo Sapiens
RVKEYFVFR

SEQ ID NO: 42380 - protein, 9 aa, Homo Sapiens
RVKVFGWVH

SEQ ID NO: 42381 - protein, 9 aa, Homo Sapiens
RVLDALVAR

SEQ ID NO: 42382 - protein, 9 aa, Homo Sapiens
RVLTAPTLR

SEQ ID NO: 42383 - protein, 9 aa, Homo Sapiens
RVMGIRVLR

SEQ ID NO: 42384 - protein, 9 aa, Homo Sapiens
RVNIPKVLR

SEQ ID NO: 42385 - protein, 9 aa, Homo Sapiens
RVNLKFLTR

SEQ ID NO: 42386 - protein, 9 aa, Homo Sapiens
RVNVTGIYR

SEQ ID NO: 42387 - protein, 9 aa, Homo Sapiens
RVPELFANR

SEQ ID NO: 42388 - protein, 9 aa, Homo Sapiens
RVQPIKLAR

SEQ ID NO: 42389 - protein, 9 aa, Homo Sapiens
RVQVVGTYR

SEQ ID NO: 42390 - protein, 9 aa, Homo Sapiens
RVSVVWVER

SEQ ID NO: 42391 - protein, 9 aa, Homo Sapiens
RVTVPLVRR

SEQ ID NO: 42392 - protein, 9 aa, Homo Sapiens
RVYHYFQWR

SEQ ID NO: 42393 - protein, 9 aa, Homo Sapiens
RVYNIYIRR

SEQ ID NO: 42394 - protein, 9 aa, Homo Sapiens
RVYNWDVKR

SEQ ID NO: 42395 - protein, 9 aa, Homo Sapiens
RYIEIFPSR

SEQ ID NO: 42396 - protein, 9 aa, Homo Sapiens
RYISKMFLR

SEQ ID NO: 42397 - protein, 9 aa, Homo Sapiens
RYMFSRPFR

SEQ ID NO: 42398 - protein, 9 aa, Homo Sapiens
RYQDILVFR

SEQ ID NO: 42399 - protein, 9 aa, Homo Sapiens
RYRLPVATR

SEQ ID NO: 42400 - protein, 9 aa, Homo Sapiens
RYYDILKKR

SEQ ID NO: 42401 - protein, 9 aa, Homo Sapiens
RYYTPTISR

SEQ ID NO: 42402 - protein, 9 aa, Homo Sapiens
SAFSILFNR

SEQ ID NO: 42403 - protein, 9 aa, Homo Sapiens
SAIHIRVFR

SEQ ID NO: 42404 - protein, 9 aa, Homo Sapiens
SFISFANSR

SEQ ID NO: 42405 - protein, 9 aa, Homo Sapiens
SFKDYIQER

SEQ ID NO: 42406 - protein, 9 aa, Homo Sapiens
SFMPYHIQR

SEQ ID NO: 42407 - protein, 9 aa, Homo Sapiens
SGKIIFVGR

SEQ ID NO: 42408 - protein, 9 aa, Homo Sapiens
SGLSIFIYR

SEQ ID NO: 42409 - protein, 9 aa, Homo Sapiens
SGYPPFVGR

SEQ ID NO: 42410 - protein, 9 aa, Homo Sapiens
SIMKWNRER

SEQ ID NO: 42411 - protein, 9 aa, Homo Sapiens
SINLLLAQR

SEQ ID NO: 42412 - protein, 9 aa, Homo Sapiens
SIPTFYFPR

SEQ ID NO: 42413 - protein, 9 aa, Homo Sapiens
SLKALIQSR

SEQ ID NO: 42414 - protein, 9 aa, Homo Sapiens
SLKIPNVER

SEQ ID NO: 42415 - protein, 9 aa, Homo Sapiens
SLMSALAAR

SEQ ID NO: 42416 - protein, 9 aa, Homo Sapiens
SLNLRTFLR

SEQ ID NO: 42417 - protein, 9 aa, Homo Sapiens
SLNPKTWGR

SEQ ID NO: 42418 - protein, 9 aa, Homo Sapiens
SLQQLVSQR

SEQ ID NO: 42419 - protein, 9 aa, Homo Sapiens
SLRLLTHQR

SEQ ID NO: 42420 - protein, 9 aa, Homo Sapiens
SLWHIQISR

SEQ ID NO: 42421 - protein, 9 aa, Homo Sapiens
SMFDVHVKR

SEQ ID NO: 42422 - protein, 9 aa, Homo Sapiens
SMLEYFINR

SEQ ID NO: 42423 - protein, 9 aa, Homo Sapiens
SMSSTFFSR

SEQ ID NO: 42424 - protein, 9 aa, Homo Sapiens
SQNSLFTFR

SEQ ID NO: 42425 - protein, 9 aa, Homo Sapiens
SSFRFWQAR

SEQ ID NO: 42426 - protein, 9 aa, Homo Sapiens
SSKPLYLAR

SEQ ID NO: 42427 - protein, 9 aa, Homo Sapiens
SSLLRTSIM

SEQ ID NO: 42428 - protein, 9 aa, Homo Sapiens
STARHLYLR

SEQ ID NO: 42429 - protein, 9 aa, Homo Sapiens
STFLFGSIR

SEQ ID NO: 42430 - protein, 9 aa, Homo Sapiens
STLNKLIKR

SEQ ID NO: 42431 - protein, 9 aa, Homo Sapiens
STNFKLIYR

SEQ ID NO: 42432 - protein, 9 aa, Homo Sapiens
STVPSILNR

SEQ ID NO: 42433 - protein, 9 aa, Homo Sapiens
STYIRLYGR

SEQ ID NO: 42434 - protein, 9 aa, Homo Sapiens
SVGQRIWQR

SEQ ID NO: 42435 - protein, 9 aa, Homo Sapiens
SVHLQPITR

SEQ ID NO: 42436 - protein, 9 aa, Homo Sapiens
SVITQVFHV

SEQ ID NO: 42437 - protein, 9 aa, Homo Sapiens
SVKFGATLR

SEQ ID NO: 42438 - protein, 9 aa, Homo Sapiens
SVLDYFSER

SEQ ID NO: 42439 - protein, 9 aa, Homo Sapiens
SVLENFVGR

SEQ ID NO: 42440 - protein, 9 aa, Homo Sapiens
SVLKELQNR

SEQ ID NO: 42441 - protein, 9 aa, Homo Sapiens
SVLNFATNR

SEQ ID NO: 42442 - protein, 9 aa, Homo Sapiens
SVLNMVVRR

SEQ ID NO: 42443 - protein, 9 aa, Homo Sapiens
SVLSRINQR

SEQ ID NO: 42444 - protein, 9 aa, Homo Sapiens
SVLTPLLLR

SEQ ID NO: 42445 - protein, 9 aa, Homo Sapiens
SVLWPWINR

SEQ ID NO: 42446 - protein, 9 aa, Homo Sapiens
SVQGIIIYR

SEQ ID NO: 42447 - protein, 9 aa, Homo Sapiens
SVSDIIRLR

SEQ ID NO: 42448 - protein, 9 aa, Homo Sapiens
SVSPFLLGR

SEQ ID NO: 42449 - protein, 9 aa, Homo Sapiens
SVVGFYSLR

SEQ ID NO: 42450 - protein, 9 aa, Homo Sapiens
SVVLLPAGR

SEQ ID NO: 42451 - protein, 9 aa, Homo Sapiens
SVVSVGWLR

SEQ ID NO: 42452 - protein, 9 aa, Homo Sapiens
SVWPFLVQR

SEQ ID NO: 42453 - protein, 9 aa, Homo Sapiens
SVYIPAHGR

SEQ ID NO: 42454 - protein, 9 aa, Homo Sapiens
SVYQIKVHR

SEQ ID NO: 42455 - protein, 9 aa, Homo Sapiens
SYFSFSRNR

SEQ ID NO: 42456 - protein, 9 aa, Homo Sapiens
SYLDKFFSR

SEQ ID NO: 42457 - protein, 9 aa, Homo Sapiens
SYNYEIVNR

SEQ ID NO: 42458 - protein, 9 aa, Homo Sapiens
SYPSLFIFR

SEQ ID NO: 42459 - protein, 9 aa, Homo Sapiens
SYRKFLNLR

SEQ ID NO: 42460 - protein, 9 aa, Homo Sapiens
SYSLFTALR

SEQ ID NO: 42461 - protein, 9 aa, Homo Sapiens
SYVELSQYR

SEQ ID NO: 42462 - protein, 9 aa, Homo Sapiens
TALVIMWQK

SEQ ID NO: 42463 - protein, 9 aa, Homo Sapiens
TAYRPPALR

SEQ ID NO: 42464 - protein, 9 aa, Homo Sapiens
TFYSISQER

SEQ ID NO: 42465 - protein, 9 aa, Homo Sapiens
TILIILTGR

SEQ ID NO: 42466 - protein, 9 aa, Homo Sapiens
TIRLLTSLR

SEQ ID NO: 42467 - protein, 9 aa, Homo Sapiens
TLNDLPVGR

SEQ ID NO: 42468 - protein, 9 aa, Homo Sapiens
TSISSLFER

SEQ ID NO: 42469 - protein, 9 aa, Homo Sapiens
TSNIIAWLR

SEQ ID NO: 42470 - protein, 9 aa, Homo Sapiens
TSWVPLVSR

SEQ ID NO: 42471 - protein, 9 aa, Homo Sapiens
TSYPFDTVR

SEQ ID NO: 42472 - protein, 9 aa, Homo Sapiens
TTFVPMLHR

SEQ ID NO: 42473 - protein, 9 aa, Homo Sapiens
TTKPAIIFR

SEQ ID NO: 42474 - protein, 9 aa, Homo Sapiens
TTLTKIALR

SEQ ID NO: 42475 - protein, 9 aa, Homo Sapiens
TVLGYFIGR

SEQ ID NO: 42476 - protein, 9 aa, Homo Sapiens
TVLIIKSLR

SEQ ID NO: 42477 - protein, 9 aa, Homo Sapiens
TVLQYVVGR

SEQ ID NO: 42478 - protein, 9 aa, Homo Sapiens
TVSRFFLYR

SEQ ID NO: 42479 - protein, 9 aa, Homo Sapiens
TYFPSFLSR

SEQ ID NO: 42480 - protein, 9 aa, Homo Sapiens
TYLTKFIAR

SEQ ID NO: 42481 - protein, 9 aa, Homo Sapiens
TYYGSFVTR

SEQ ID NO: 42482 - protein, 9 aa, Homo Sapiens
TYYPPPRLR

SEQ ID NO: 42483 - protein, 9 aa, Homo Sapiens
VFKEEGVLR

SEQ ID NO: 42484 - protein, 9 aa, Homo Sapiens
VFLLWKNWR

SEQ ID NO: 42485 - protein, 9 aa, Homo Sapiens
VGMNFKTPR

SEQ ID NO: 42486 - protein, 9 aa, Homo Sapiens
VGQYPRFLR

SEQ ID NO: 42487 - protein, 9 aa, Homo Sapiens
VIFVKSVQR

SEQ ID NO: 42488 - protein, 9 aa, Homo Sapiens
VLNPTPIKR

SEQ ID NO: 42489 - protein, 9 aa, Homo Sapiens
VLSPPRWPR

SEQ ID NO: 42490 - protein, 9 aa, Homo Sapiens
VMKDFEEMR

SEQ ID NO: 42491 - protein, 9 aa, Homo Sapiens
VMKPPQVVR

SEQ ID NO: 42492 - protein, 9 aa, Homo Sapiens
VMLPTPVLR

SEQ ID NO: 42493 - protein, 9 aa, Homo Sapiens
VQKLPMIGR

SEQ ID NO: 42494 - protein, 9 aa, Homo Sapiens
VQKPSYYVR

SEQ ID NO: 42495 - protein, 9 aa, Homo Sapiens
VSLPSFFER

SEQ ID NO: 42496 - protein, 9 aa, Homo Sapiens
VSNKWLHER

SEQ ID NO: 42497 - protein, 9 aa, Homo Sapiens
VSWKTGVFR

SEQ ID NO: 42498 - protein, 9 aa, Homo Sapiens
VSYPFDTVR

SEQ ID NO: 42499 - protein, 9 aa, Homo Sapiens
VTIQVSWER

SEQ ID NO: 42500 - protein, 9 aa, Homo Sapiens
VVIIVRAPR

SEQ ID NO: 42501 - protein, 9 aa, Homo Sapiens
VVYPKVIER

SEQ ID NO: 42502 - protein, 9 aa, Homo Sapiens
VYIAEIYFR

SEQ ID NO: 42503 - protein, 9 aa, Homo Sapiens
VYIEKFVRR

SEQ ID NO: 42504 - protein, 9 aa, Homo Sapiens
VYITNFHVR

SEQ ID NO: 42505 - protein, 9 aa, Homo Sapiens
WVSVVTPAR

SEQ ID NO: 42506 - protein, 9 aa, Homo Sapiens
YGIPQRALR

SEQ ID NO: 42507 - protein, 9 aa, Homo Sapiens
YSNKEIFLR

SEQ ID NO: 42508 - protein, 9 aa, Homo Sapiens
YVFPKPFNR

SEQ ID NO: 42509 - protein, 9 aa, Homo Sapiens
YVKEQFAWR

SEQ ID NO: 42510 - protein, 10 aa, Homo Sapiens
AARDFLQTFR

SEQ ID NO: 42511 - protein, 10 aa, Homo Sapiens
AFRNLVPVTR

SEQ ID NO: 42512 - protein, 10 aa, Homo Sapiens
ALAPKFPEYR

SEQ ID NO: 42513 - protein, 10 aa, Homo Sapiens
ALLEVMRMNR

SEQ ID NO: 42514 - protein, 10 aa, Homo Sapiens
ALMDRDLVHR

SEQ ID NO: 42515 - protein, 10 aa, Homo Sapiens
ALMDRGAIVR

SEQ ID NO: 42516 - protein, 10 aa, Homo Sapiens
ALRDFTRLFR

SEQ ID NO: 42517 - protein, 10 aa, Homo Sapiens
ATAGIIGVNR

SEQ ID NO: 42518 - protein, 10 aa, Homo Sapiens
ATATVYFKRF

SEQ ID NO: 42519 - protein, 10 aa, Homo Sapiens
ATCDFPLLNR

SEQ ID NO: 42520 - protein, 10 aa, Homo Sapiens
ATFQFTVERF

SEQ ID NO: 42521 - protein, 10 aa, Homo Sapiens
ATGSIPITVR

SEQ ID NO: 42522 - protein, 10 aa, Homo Sapiens
ATLGAILNRL

SEQ ID NO: 42523 - protein, 10 aa, Homo Sapiens
ATLKDITRRL

SEQ ID NO: 42524 - protein, 10 aa, Homo Sapiens
ATNAAVTVLR

SEQ ID NO: 42525 - protein, 10 aa, Homo Sapiens
ATQPWNRIQR

SEQ ID NO: 42526 - protein, 10 aa, Homo Sapiens
ATSPIIIHRL

SEQ ID NO: 42527 - protein, 10 aa, Homo Sapiens
AVFPFKPPQR

SEQ ID NO: 42528 - protein, 10 aa, Homo Sapiens
AVLKWNREMR

SEQ ID NO: 42529 - protein, 10 aa, Homo Sapiens
FQLYPRNFLR

SEQ ID NO: 42530 - protein, 10 aa, Homo Sapiens
GILGLGRIGR

SEQ ID NO: 42531 - protein, 10 aa, Homo Sapiens
GSRYFALVER

SEQ ID NO: 42532 - protein, 10 aa, Homo Sapiens
GTKQLQVLRF

SEQ ID NO: 42533 - protein, 10 aa, Homo Sapiens
GTLDFYMARL

SEQ ID NO: 42534 - protein, 10 aa, Homo Sapiens
GTLNLDRVTR

SEQ ID NO: 42535 - protein, 10 aa, Homo Sapiens
GTLQPPFTAR

SEQ ID NO: 42536 - protein, 10 aa, Homo Sapiens
GTLSPAFSTR

SEQ ID NO: 42537 - protein, 10 aa, Homo Sapiens
GTYYPPPRLR

SEQ ID NO: 42538 - protein, 10 aa, Homo Sapiens
GVNGFGRIGR

SEQ ID NO: 42539 - protein, 10 aa, Homo Sapiens
HQQLYWSHPR

SEQ ID NO: 42540 - protein, 10 aa, Homo Sapiens
HSQDLSGRLR

SEQ ID NO: 42541 - protein, 10 aa, Homo Sapiens
HTKAVNVVRF

SEQ ID NO: 42542 - protein, 10 aa, Homo Sapiens
HTRTPPIIHR

SEQ ID NO: 42543 - protein, 10 aa, Homo Sapiens
HVYDGKFLAR

SEQ ID NO: 42544 - protein, 10 aa, Homo Sapiens
IANPNVPAYR

SEQ ID NO: 42545 - protein, 10 aa, Homo Sapiens
IIKALKEPPR

SEQ ID NO: 42546 - protein, 10 aa, Homo Sapiens
IVKGPRGTLR

SEQ ID NO: 42547 - protein, 10 aa, Homo Sapiens
IVNENLVERF

SEQ ID NO: 42548 - protein, 10 aa, Homo Sapiens
IVRPFSIETK

SEQ ID NO: 42549 - protein, 10 aa, Homo Sapiens
KAKQGYVIYR

SEQ ID NO: 42550 - protein, 10 aa, Homo Sapiens
KAMENLFINR

SEQ ID NO: 42551 - protein, 10 aa, Homo Sapiens
KIRDLIAIER

SEQ ID NO: 42552 - protein, 10 aa, Homo Sapiens
KLNIDSIIQR

SEQ ID NO: 42553 - protein, 10 aa, Homo Sapiens
KLNPYAKTMR

SEQ ID NO: 42554 - protein, 10 aa, Homo Sapiens
KQRDDILINR

SEQ ID NO: 42555 - protein, 10 aa, Homo Sapiens
KSKDFVQVMR

SEQ ID NO: 42556 - protein, 10 aa, Homo Sapiens
KSLDQAISRF

SEQ ID NO: 42557 - protein, 10 aa, Homo Sapiens
KTIDMELVKR

SEQ ID NO: 42558 - protein, 10 aa, Homo Sapiens
KTKADGSFRL

SEQ ID NO: 42559 - protein, 10 aa, Homo Sapiens
KTKEYIFLRL

SEQ ID NO: 42560 - protein, 10 aa, Homo Sapiens
KTRDAILQLR

SEQ ID NO: 42561 - protein, 10 aa, Homo Sapiens
KVKAPPSVPR

SEQ ID NO: 42562 - protein, 10 aa, Homo Sapiens
KVQTFPFLGR

SEQ ID NO: 42563 - protein, 10 aa, Homo Sapiens
KYFDEHYEYR

SEQ ID NO: 42564 - protein, 10 aa, Homo Sapiens
KYFIRDEFLR

SEQ ID NO: 42565 - protein, 10 aa, Homo Sapiens
KYFLGQSVLR

SEQ ID NO: 42566 - protein, 10 aa, Homo Sapiens
KYIERIITRF

SEQ ID NO: 42567 - protein, 10 aa, Homo Sapiens
KYLDKELAGR

SEQ ID NO: 42568 - protein, 10 aa, Homo Sapiens
KYLNWDAVFR

SEQ ID NO: 42569 - protein, 10 aa, Homo Sapiens
LINPQGKAFR

SEQ ID NO: 42570 - protein, 10 aa, Homo Sapiens
LQFPDRSVQR

SEQ ID NO: 42571 - protein, 10 aa, Homo Sapiens
LQFPVGRIHR

SEQ ID NO: 42572 - protein, 10 aa, Homo Sapiens
LQFPVGRVHR

SEQ ID NO: 42573 - protein, 10 aa, Homo Sapiens
LQKPVLPLYR

SEQ ID NO: 42574 - protein, 10 aa, Homo Sapiens
LQNEPLPERL

SEQ ID NO: 42575 - protein, 10 aa, Homo Sapiens
LYISEGLHPR

SEQ ID NO: 42576 - protein, 10 aa, Homo Sapiens
LYQEVFGRLR

SEQ ID NO: 42577 - protein, 10 aa, Homo Sapiens
QYIRPVFVSR

SEQ ID NO: 42578 - protein, 10 aa, Homo Sapiens
QYKFPVVITR

SEQ ID NO: 42579 - protein, 10 aa, Homo Sapiens
RAGLQFPVGR

SEQ ID NO: 42580 - protein, 10 aa, Homo Sapiens
RAKVEVNIPR

SEQ ID NO: 42581 - protein, 10 aa, Homo Sapiens
RALAMLQRFS

SEQ ID NO: 42582 - protein, 10 aa, Homo Sapiens
RALPGLLEAR

SEQ ID NO: 42583 - protein, 10 aa, Homo Sapiens
RAVFPSIVGR

SEQ ID NO: 42584 - protein, 10 aa, Homo Sapiens
RFIKIDGKVR

SEQ ID NO: 42585 - protein, 10 aa, Homo Sapiens
RFINPLKNLR

SEQ ID NO: 42586 - protein, 10 aa, Homo Sapiens
RFKIDLGIFR

SEQ ID NO: 42587 - protein, 10 aa, Homo Sapiens
RFNDLRFVGR

SEQ ID NO: 42588 - protein, 10 aa, Homo Sapiens
RFTGSIFIGR

SEQ ID NO: 42589 - protein, 10 aa, Homo Sapiens
RIGVITNRER

SEQ ID NO: 42590 - protein, 10 aa, Homo Sapiens
RILKSPEIQR

SEQ ID NO: 42591 - protein, 10 aa, Homo Sapiens
RIMDRFNLPR

SEQ ID NO: 42592 - protein, 10 aa, Homo Sapiens
RLFEWVVNRI

SEQ ID NO: 42593 - protein, 10 aa, Homo Sapiens
RLIPDFPVAR

SEQ ID NO: 42594 - protein, 10 aa, Homo Sapiens
RLKFGFGFHR

SEQ ID NO: 42595 - protein, 10 aa, Homo Sapiens
RLKPFGVQRF

SEQ ID NO: 42596 - protein, 10 aa, Homo Sapiens
RLRAVDFAER

SEQ ID NO: 42597 - protein, 10 aa, Homo Sapiens
RMFAPTKTWR

SEQ ID NO: 42598 - protein, 10 aa, Homo Sapiens
RSFSLGVPRL

SEQ ID NO: 42599 - protein, 10 aa, Homo Sapiens
RSGPFGQIFR

SEQ ID NO: 42600 - protein, 10 aa, Homo Sapiens
RSIPPLFSGR

SEQ ID NO: 42601 - protein, 10 aa, Homo Sapiens
RSLDNFFAKR

SEQ ID NO: 42602 - protein, 10 aa, Homo Sapiens
RSLQLQEHRL

SEQ ID NO: 42603 - protein, 10 aa, Homo Sapiens
RSSYIRILPR

SEQ ID NO: 42604 - protein, 10 aa, Homo Sapiens
RSWQGLEPRL

SEQ ID NO: 42605 - protein, 10 aa, Homo Sapiens
RTHSLRYFRL

SEQ ID NO: 42606 - protein, 10 aa, Homo Sapiens
RTVLVIAHRL

SEQ ID NO: 42607 - protein, 10 aa, Homo Sapiens
RVFQGFFTGR

SEQ ID NO: 42608 - protein, 10 aa, Homo Sapiens
RVHLPSSIYR

SEQ ID NO: 42609 - protein, 10 aa, Homo Sapiens
RVHSIFVLRL

SEQ ID NO: 42610 - protein, 10 aa, Homo Sapiens
RVIIEKYYTR

SEQ ID NO: 42611 - protein, 10 aa, Homo Sapiens
RVKGPGISKF

SEQ ID NO: 42612 - protein, 10 aa, Homo Sapiens
RVKQLQENRL

SEQ ID NO: 42613 - protein, 10 aa, Homo Sapiens
RVKTVWLVGR

SEQ ID NO: 42614 - protein, 10 aa, Homo Sapiens
RVLDLGPITR

SEQ ID NO: 42615 - protein, 10 aa, Homo Sapiens
RVLDVGFVGR

SEQ ID NO: 42616 - protein, 10 aa, Homo Sapiens
RVLSKAFSRL

SEQ ID NO: 42617 - protein, 10 aa, Homo Sapiens
RVNKPPYPKL

SEQ ID NO: 42618 - protein, 10 aa, Homo Sapiens
RYFALVERRL

SEQ ID NO: 42619 - protein, 10 aa, Homo Sapiens
RYFYLFPNRL

SEQ ID NO: 42620 - protein, 10 aa, Homo Sapiens
RYIEIFKSSR

SEQ ID NO: 42621 - protein, 10 aa, Homo Sapiens
RYIEIFPSRR

SEQ ID NO: 42622 - protein, 10 aa, Homo Sapiens
RYIPPHLRNR

SEQ ID NO: 42623 - protein, 10 aa, Homo Sapiens
RYIPPIPVHR

SEQ ID NO: 42624 - protein, 10 aa, Homo Sapiens
RYLEVEPVSR

SEQ ID NO: 42625 - protein, 10 aa, Homo Sapiens
RYLTVAAVFR

SEQ ID NO: 42626 - protein, 10 aa, Homo Sapiens
RYQQFKDFQR

SEQ ID NO: 42627 - protein, 10 aa, Homo Sapiens
RYRPGTVALR

SEQ ID NO: 42628 - protein, 10 aa, Homo Sapiens
RYYPQILTNK

SEQ ID NO: 42629 - protein, 10 aa, Homo Sapiens
SFFGERRIPR

SEQ ID NO: 42630 - protein, 10 aa, Homo Sapiens
SFITKVFRSR

SEQ ID NO: 42631 - protein, 10 aa, Homo Sapiens
SFLNFGFANR

SEQ ID NO: 42632 - protein, 10 aa, Homo Sapiens
SFRYNGLIHR

SEQ ID NO: 42633 - protein, 10 aa, Homo Sapiens
SFSDYPPLGR

SEQ ID NO: 42634 - protein, 10 aa, Homo Sapiens
SIADRPLYLR

SEQ ID NO: 42635 - protein, 10 aa, Homo Sapiens
STYYGSFVTR

SEQ ID NO: 42636 - protein, 10 aa, Homo Sapiens
SVFDFQKAYK

SEQ ID NO: 42637 - protein, 10 aa, Homo Sapiens
SVINPGAIYR

SEQ ID NO: 42638 - protein, 10 aa, Homo Sapiens
SVNSLLKELR

SEQ ID NO: 42639 - protein, 10 aa, Homo Sapiens
SVQTALLNRL

SEQ ID NO: 42640 - protein, 10 aa, Homo Sapiens
SVSTITRIYR

SEQ ID NO: 42641 - protein, 10 aa, Homo Sapiens
SYVRWEGVFR

SEQ ID NO: 42642 - protein, 10 aa, Homo Sapiens
TMYPGLPSRL

SEQ ID NO: 42643 - protein, 10 aa, Homo Sapiens
TSYLDKFFSR

SEQ ID NO: 42644 - protein, 10 aa, Homo Sapiens
TVNTSLNVYR

SEQ ID NO: 42645 - protein, 10 aa, Homo Sapiens
TVQQLEGRWR

SEQ ID NO: 42646 - protein, 10 aa, Homo Sapiens
TYLNILLQTR

SEQ ID NO: 42647 - protein, 10 aa, Homo Sapiens
TYYGSFVTRA

SEQ ID NO: 42648 - protein, 10 aa, Homo Sapiens
VFDAKRLIGR

SEQ ID NO: 42649 - protein, 10 aa, Homo Sapiens
VFPSIVGRPR

SEQ ID NO: 42650 - protein, 10 aa, Homo Sapiens
VGRPPGPYTR

SEQ ID NO: 42651 - protein, 10 aa, Homo Sapiens
VLNEGMPIYR

SEQ ID NO: 42652 - protein, 10 aa, Homo Sapiens
VLYDRQGIGR

SEQ ID NO: 42653 - protein, 10 aa, Homo Sapiens
VQKDIQPYMR

SEQ ID NO: 42654 - protein, 10 aa, Homo Sapiens
VQKPGFGVGR

SEQ ID NO: 42655 - protein, 10 aa, Homo Sapiens
VQKPPLNIQR

SEQ ID NO: 42656 - protein, 10 aa, Homo Sapiens
VQKPSYYVRL

SEQ ID NO: 42657 - protein, 10 aa, Homo Sapiens
VTIVNILTNR

SEQ ID NO: 42658 - protein, 10 aa, Homo Sapiens
VTLPVYFRER

SEQ ID NO: 42659 - protein, 10 aa, Homo Sapiens
VVKPDQLIKR

SEQ ID NO: 42660 - protein, 10 aa, Homo Sapiens
VVYALKRQGR

SEQ ID NO: 42661 - protein, 10 aa, Homo Sapiens
WHHTFYNELR

SEQ ID NO: 42662 - protein, 10 aa, Homo Sapiens
YYLPYYKRER

SEQ ID NO: 42663 - protein, 11 aa, Homo Sapiens
AGFQRDLGSLR

SEQ ID NO: 42664 - protein, 11 aa, Homo Sapiens
AGMDASFKAFR

SEQ ID NO: 42665 - protein, 11 aa, Homo Sapiens
AIRDIDLKNRR

SEQ ID NO: 42666 - protein, 11 aa, Homo Sapiens
AIVPIGYHVPR

SEQ ID NO: 42667 - protein, 11 aa, Homo Sapiens
ALLGGRWLQPR

SEQ ID NO: 42668 - protein, 11 aa, Homo Sapiens
ALRALEGLVYR

SEQ ID NO: 42669 - protein, 11 aa, Homo Sapiens
ALVAGIDRYPR

SEQ ID NO: 42670 - protein, 11 aa, Homo Sapiens
ALWDRYMGTLR

SEQ ID NO: 42671 - protein, 11 aa, Homo Sapiens
AMFPKLNNQER

SEQ ID NO: 42672 - protein, 11 aa, Homo Sapiens
AMYPNIILTNR

SEQ ID NO: 42673 - protein, 11 aa, Homo Sapiens
AQKALDDIIYR

SEQ ID NO: 42674 - protein, 11 aa, Homo Sapiens
ASLDISRKWEK

SEQ ID NO: 42675 - protein, 11 aa, Homo Sapiens
ASMPVDIAKTR

SEQ ID NO: 42676 - protein, 11 aa, Homo Sapiens
ASMPWGDPNYR

SEQ ID NO: 42677 - protein, 11 aa, Homo Sapiens
ATIGHVEKFLR

SEQ ID NO: 42678 - protein, 11 aa, Homo Sapiens
ATLKDITRRLK

SEQ ID NO: 42679 - protein, 11 aa, Homo Sapiens
ATLTVEQLSSR

SEQ ID NO: 42680 - protein, 11 aa, Homo Sapiens
ATMVPSVLWPR

SEQ ID NO: 42681 - protein, 11 aa, Homo Sapiens
ATRPFQLVTGR

SEQ ID NO: 42682 - protein, 11 aa, Homo Sapiens
ATVQQLEGRWR

SEQ ID NO: 42683 - protein, 11 aa, Homo Sapiens
ATYPYQVVRAR

SEQ ID NO: 42684 - protein, 11 aa, Homo Sapiens
AVIPRPEPMLR

SEQ ID NO: 42685 - protein, 11 aa, Homo Sapiens
AVKLERMLTER

SEQ ID NO: 42686 - protein, 11 aa, Homo Sapiens
AVKVHSFPTLK

SEQ ID NO: 42687 - protein, 11 aa, Homo Sapiens
AVLSSGLTAAR

SEQ ID NO: 42688 - protein, 11 aa, Homo Sapiens
AVMAESAFSFK

SEQ ID NO: 42689 - protein, 11 aa, Homo Sapiens
AVMGAYVLLKR

SEQ ID NO: 42690 - protein, 11 aa, Homo Sapiens
AVRDILEGIQR

SEQ ID NO: 42691 - protein, 11 aa, Homo Sapiens
AVVDVRIGMTR

SEQ ID NO: 42692 - protein, 11 aa, Homo Sapiens
AVVGAVVFQKR

SEQ ID NO: 42693 - protein, 11 aa, Homo Sapiens
AVVPGTLLLFR

SEQ ID NO: 42694 - protein, 11 aa, Homo Sapiens
AVYPIDLVKTR

SEQ ID NO: 42695 - protein, 11 aa, Homo Sapiens
AYIAGFVLQER

SEQ ID NO: 42696 - protein, 11 aa, Homo Sapiens
AYRDAVFLAER

SEQ ID NO: 42697 - protein, 11 aa, Homo Sapiens
AYVPFGAGRHR

SEQ ID NO: 42698 - protein, 11 aa, Homo Sapiens
AYVPGFAHIPR

SEQ ID NO: 42699 - protein, 11 aa, Homo Sapiens
FSMGNEVLQNR

SEQ ID NO: 42700 - protein, 11 aa, Homo Sapiens
GAIRDIDLKNR

SEQ ID NO: 42701 - protein, 11 aa, Homo Sapiens
GALPGFLLKGR

SEQ ID NO: 42702 - protein, 11 aa, Homo Sapiens
GGYPYSFWIGR

SEQ ID NO: 42703 - protein, 11 aa, Homo Sapiens
GIKPEWMMIHR

SEQ ID NO: 42704 - protein, 11 aa, Homo Sapiens
GILVVGGVVWK

SEQ ID NO: 42705 - protein, 11 aa, Homo Sapiens
GLANGEVRIYR

SEQ ID NO: 42706 - protein, 11 aa, Homo Sapiens
GQKPGGSDFLR

SEQ ID NO: 42707 - protein, 11 aa, Homo Sapiens
GSLTRLLDSVR

SEQ ID NO: 42708 - protein, 11 aa, Homo Sapiens
GTATRWPLAVR

SEQ ID NO: 42709 - protein, 11 aa, Homo Sapiens
GTGWGENGYFR

SEQ ID NO: 42710 - protein, 11 aa, Homo Sapiens
GTLAAQALRAR

SEQ ID NO: 42711 - protein, 11 aa, Homo Sapiens
GTLGFGDKFKR

SEQ ID NO: 42712 - protein, 11 aa, Homo Sapiens
GTMNLGGSLTR

SEQ ID NO: 42713 - protein, 11 aa, Homo Sapiens
GTMSDVLRAER

SEQ ID NO: 42714 - protein, 11 aa, Homo Sapiens
GTQPTVLRTFR

SEQ ID NO: 42715 - protein, 11 aa, Homo Sapiens
GVVPAGVILER

SEQ ID NO: 42716 - protein, 11 aa, Homo Sapiens
HAMQFPAELTR

SEQ ID NO: 42717 - protein, 11 aa, Homo Sapiens
HYLPAEILQKK

SEQ ID NO: 42718 - protein, 11 aa, Homo Sapiens
ILIDPFHKAIR

SEQ ID NO: 42719 - protein, 11 aa, Homo Sapiens
ILKSPGSVVFR

SEQ ID NO: 42720 - protein, 11 aa, Homo Sapiens
ILRPEELGFLR

SEQ ID NO: 42721 - protein, 11 aa, Homo Sapiens
IQPGSTVHVLR

SEQ ID NO: 42722 - protein, 11 aa, Homo Sapiens
IQQEMDLLRFR

SEQ ID NO: 42723 - protein, 11 aa, Homo Sapiens
IYLPEVVKPPR

SEQ ID NO: 42724 - protein, 11 aa, Homo Sapiens
IYMDTLNIFMR

SEQ ID NO: 42725 - protein, 11 aa, Homo Sapiens
KAFPYSSHLIR

SEQ ID NO: 42726 - protein, 11 aa, Homo Sapiens
KAIDYYLKALR

SEQ ID NO: 42727 - protein, 11 aa, Homo Sapiens
KFFTESRLLQR

SEQ ID NO: 42728 - protein, 11 aa, Homo Sapiens
KFKESFAEMNR

SEQ ID NO: 42729 - protein, 11 aa, Homo Sapiens
KFLDPITGTFR

SEQ ID NO: 42730 - protein, 11 aa, Homo Sapiens
KGLEFVLIHQR

SEQ ID NO: 42731 - protein, 11 aa, Homo Sapiens
KGLEISGTFTR

SEQ ID NO: 42732 - protein, 11 aa, Homo Sapiens
KIWDPVHRVAL

SEQ ID NO: 42733 - protein, 11 aa, Homo Sapiens
KLIKEGDIVKR

SEQ ID NO: 42734 - protein, 11 aa, Homo Sapiens
KLKDIVSLVPR

SEQ ID NO: 42735 - protein, 11 aa, Homo Sapiens
KLKDLGNLVLR

SEQ ID NO: 42736 - protein, 11 aa, Homo Sapiens
KLKDQNIFVSR

SEQ ID NO: 42737 - protein, 11 aa, Homo Sapiens
KLMDVGLIAIR

SEQ ID NO: 42738 - protein, 11 aa, Homo Sapiens
KLQYELQYRNR

SEQ ID NO: 42739 - protein, 11 aa, Homo Sapiens
KLWDVREGMCR

SEQ ID NO: 42740 - protein, 11 aa, Homo Sapiens
KQPFKDLGNLR

SEQ ID NO: 42741 - protein, 11 aa, Homo Sapiens
KQRPYTFLLPR

SEQ ID NO: 42742 - protein, 11 aa, Homo Sapiens
KSLPSEVERLR

SEQ ID NO: 42743 - protein, 11 aa, Homo Sapiens
KTFTIKRFLAK

SEQ ID NO: 42744 - protein, 11 aa, Homo Sapiens
KTIDPKVAFPR

SEQ ID NO: 42745 - protein, 11 aa, Homo Sapiens
KTLAGDVHIVR

SEQ ID NO: 42746 - protein, 11 aa, Homo Sapiens
KTLLDKALTQR

SEQ ID NO: 42747 - protein, 11 aa, Homo Sapiens
KTRVIWGKVTR

SEQ ID NO: 42748 - protein, 11 aa, Homo Sapiens
KTSDFLKVLNR

SEQ ID NO: 42749 - protein, 11 aa, Homo Sapiens
KVDENGKISRL

SEQ ID NO: 42750 - protein, 11 aa, Homo Sapiens
KVFLKYPESLR

SEQ ID NO: 42751 - protein, 11 aa, Homo Sapiens
KVFPEDMAKYR

SEQ ID NO: 42752 - protein, 11 aa, Homo Sapiens
KVLSDDMKKLK

SEQ ID NO: 42753 - protein, 11 aa, Homo Sapiens
KVRGISEVLAR

SEQ ID NO: 42754 - protein, 11 aa, Homo Sapiens
KVVEDGILKLR

SEQ ID NO: 42755 - protein, 11 aa, Homo Sapiens
KVVEIVDEKVR

SEQ ID NO: 42756 - protein, 11 aa, Homo Sapiens
KVVNPYYLRVR

SEQ ID NO: 42757 - protein, 11 aa, Homo Sapiens
KYIHSADIIHR

SEQ ID NO: 42758 - protein, 11 aa, Homo Sapiens
KYITDWQNVFR

SEQ ID NO: 42759 - protein, 11 aa, Homo Sapiens
KYLDEDTIYHL

SEQ ID NO: 42760 - protein, 11 aa, Homo Sapiens
KYLEESNFVHR

SEQ ID NO: 42761 - protein, 11 aa, Homo Sapiens
KYLQEEVNINR

SEQ ID NO: 42762 - protein, 11 aa, Homo Sapiens
KYLSVQGQLFR

SEQ ID NO: 42763 - protein, 11 aa, Homo Sapiens
KYVDLGLGTHR

SEQ ID NO: 42764 - protein, 11 aa, Homo Sapiens
KYVDTNLQKQR

SEQ ID NO: 42765 - protein, 11 aa, Homo Sapiens
KYVTDVGVLQR

SEQ ID NO: 42766 - protein, 11 aa, Homo Sapiens
LALDESLFRGR

SEQ ID NO: 42767 - protein, 11 aa, Homo Sapiens
LFRPVASQLPR

SEQ ID NO: 42768 - protein, 11 aa, Homo Sapiens
LGLPSTLFTPR

SEQ ID NO: 42769 - protein, 11 aa, Homo Sapiens
LLLPAASRPPR

SEQ ID NO: 42770 - protein, 11 aa, Homo Sapiens
LVAVVRRLGSG

SEQ ID NO: 42771 - protein, 11 aa, Homo Sapiens
LVFPSEIVGKR

SEQ ID NO: 42772 - protein, 11 aa, Homo Sapiens
LVKPVTINVGR

SEQ ID NO: 42773 - protein, 11 aa, Homo Sapiens
LVKSTSQLLSR

SEQ ID NO: 42774 - protein, 11 aa, Homo Sapiens
MDAKSLTAWSR

SEQ ID NO: 42775 - protein, 11 aa, Homo Sapiens
MGLTISSLFSR

SEQ ID NO: 42776 - protein, 11 aa, Homo Sapiens
MQIAWSREFLK

SEQ ID NO: 42777 - protein, 11 aa, Homo Sapiens
MSIPVTMRAIR

SEQ ID NO: 42778 - protein, 11 aa, Homo Sapiens
MTIMEDYFAYR

SEQ ID NO: 42779 - protein, 11 aa, Homo Sapiens
MVKPTPGLTPR

SEQ ID NO: 42780 - protein, 11 aa, Homo Sapiens
MYRNEFTAWYR

SEQ ID NO: 42781 - protein, 11 aa, Homo Sapiens
NGRPLEMIEPR

SEQ ID NO: 42782 - protein, 11 aa, Homo Sapiens
NVGDWLRGVYR

SEQ ID NO: 42783 - protein, 11 aa, Homo Sapiens
NVRETHSLFFR

SEQ ID NO: 42784 - protein, 11 aa, Homo Sapiens
NYKPLDTIWNR

SEQ ID NO: 42785 - protein, 11 aa, Homo Sapiens
QALPSQAFIYR

SEQ ID NO: 42786 - protein, 11 aa, Homo Sapiens
QFLERFKSSAR

SEQ ID NO: 42787 - protein, 11 aa, Homo Sapiens
QIVSVAARMLK

SEQ ID NO: 42788 - protein, 11 aa, Homo Sapiens
QVIPRTPSSFR

SEQ ID NO: 42789 - protein, 11 aa, Homo Sapiens
QVRSIQQTMAR

SEQ ID NO: 42790 - protein, 11 aa, Homo Sapiens
QVVGEATFIAR

SEQ ID NO: 42791 - protein, 11 aa, Homo Sapiens
QYIQVNEPWKR

SEQ ID NO: 42792 - protein, 11 aa, Homo Sapiens
RALESELQQLR

SEQ ID NO: 42793 - protein, 11 aa, Homo Sapiens
RALGVRDLSYR

SEQ ID NO: 42794 - protein, 11 aa, Homo Sapiens
RARPSLTVTPR

SEQ ID NO: 42795 - protein, 11 aa, Homo Sapiens
RFKEPLPEYVR

SEQ ID NO: 42796 - protein, 11 aa, Homo Sapiens
RFWNKNIGSNR

SEQ ID NO: 42797 - protein, 11 aa, Homo Sapiens
RGFQRDLSSLR

SEQ ID NO: 42798 - protein, 11 aa, Homo Sapiens
RGQVVSLIRMR

SEQ ID NO: 42799 - protein, 11 aa, Homo Sapiens
RHSASFGRWGR

SEQ ID NO: 42800 - protein, 11 aa, Homo Sapiens
RIAPPDRRFSR

SEQ ID NO: 42801 - protein, 11 aa, Homo Sapiens
RIFPVDKSRSR

SEQ ID NO: 42802 - protein, 11 aa, Homo Sapiens
RINELPSTMQR

SEQ ID NO: 42803 - protein, 11 aa, Homo Sapiens
RIREDIAKYLR

SEQ ID NO: 42804 - protein, 11 aa, Homo Sapiens
RITVKLTIQNR

SEQ ID NO: 42805 - protein, 11 aa, Homo Sapiens
RLFDIKPEQQR

SEQ ID NO: 42806 - protein, 11 aa, Homo Sapiens
RLIGLPEGRAR

SEQ ID NO: 42807 - protein, 11 aa, Homo Sapiens
RLLPLAPGRLR

SEQ ID NO: 42808 - protein, 11 aa, Homo Sapiens
RLNDTIQLLVR

SEQ ID NO: 42809 - protein, 11 aa, Homo Sapiens
RLRELTSIVNR

SEQ ID NO: 42810 - protein, 11 aa, Homo Sapiens
RLYDVPANSMR

SEQ ID NO: 42811 - protein, 11 aa, Homo Sapiens
RMFAPTKTWRR

SEQ ID NO: 42812 - protein, 11 aa, Homo Sapiens
RMFHIRAVILR

SEQ ID NO: 42813 - protein, 11 aa, Homo Sapiens
RMLPPLTKNQR

SEQ ID NO: 42814 - protein, 11 aa, Homo Sapiens
RNKDPILHVLR

SEQ ID NO: 42815 - protein, 11 aa, Homo Sapiens
RNMEIPKGLIR

SEQ ID NO: 42816 - protein, 11 aa, Homo Sapiens
RQIDQFLVVAR

SEQ ID NO: 42817 - protein, 11 aa, Homo Sapiens
RQINWTVLYRR

SEQ ID NO: 42818 - protein, 11 aa, Homo Sapiens
RQYAKDIGFIK

SEQ ID NO: 42819 - protein, 11 aa, Homo Sapiens
RSINQGLDRLR

SEQ ID NO: 42820 - protein, 11 aa, Homo Sapiens
RSKYDYLMILR

SEQ ID NO: 42821 - protein, 11 aa, Homo Sapiens
RSLGELYFLPR

SEQ ID NO: 42822 - protein, 11 aa, Homo Sapiens
RSLNPPLTIVR

SEQ ID NO: 42823 - protein, 11 aa, Homo Sapiens
RTLKPEGNILR

SEQ ID NO: 42824 - protein, 11 aa, Homo Sapiens
RTLPAWIREGL

SEQ ID NO: 42825 - protein, 11 aa, Homo Sapiens
RTLTPISGGQR

SEQ ID NO: 42826 - protein, 11 aa, Homo Sapiens
RTMPLLSLHSR

SEQ ID NO: 42827 - protein, 11 aa, Homo Sapiens
RTMVDKLLSSR

SEQ ID NO: 42828 - protein, 11 aa, Homo Sapiens
RTMWFAGGFHR

SEQ ID NO: 42829 - protein, 11 aa, Homo Sapiens
RTPELTWERVR

SEQ ID NO: 42830 - protein, 11 aa, Homo Sapiens
RTQLYEYLQNR

SEQ ID NO: 42831 - protein, 11 aa, Homo Sapiens
RTVLKNLSLLK

SEQ ID NO: 42832 - protein, 11 aa, Homo Sapiens
RVFAAESIIKR

SEQ ID NO: 42833 - protein, 11 aa, Homo Sapiens
RVFEHHGQVRL

SEQ ID NO: 42834 - protein, 11 aa, Homo Sapiens
RVFNETPINPR

SEQ ID NO: 42835 - protein, 11 aa, Homo Sapiens
RVFSVAELQSR

SEQ ID NO: 42836 - protein, 11 aa, Homo Sapiens
RVKEPVKELLR

SEQ ID NO: 42837 - protein, 11 aa, Homo Sapiens
RVLDALVAREK

SEQ ID NO: 42838 - protein, 11 aa, Homo Sapiens
RVLDTNDRFLR

SEQ ID NO: 42839 - protein, 11 aa, Homo Sapiens
RVLEKLGVTVR

SEQ ID NO: 42840 - protein, 11 aa, Homo Sapiens
RVLIGVGKLLR

SEQ ID NO: 42841 - protein, 11 aa, Homo Sapiens
RVLPPSALQSV

SEQ ID NO: 42842 - protein, 11 aa, Homo Sapiens
RVLSIGLPVAR

SEQ ID NO: 42843 - protein, 11 aa, Homo Sapiens
RVMEVFLAQLR

SEQ ID NO: 42844 - protein, 11 aa, Homo Sapiens
RVQEAVESMVK

SEQ ID NO: 42845 - protein, 11 aa, Homo Sapiens
RVRPGETLLIH

SEQ ID NO: 42846 - protein, 11 aa, Homo Sapiens
RVVIKQIITSR

SEQ ID NO: 42847 - protein, 11 aa, Homo Sapiens
RVVQQEEGWFR

SEQ ID NO: 42848 - protein, 11 aa, Homo Sapiens
RVWDISGLRKK

SEQ ID NO: 42849 - protein, 11 aa, Homo Sapiens
RVYSPPEWISR

SEQ ID NO: 42850 - protein, 11 aa, Homo Sapiens
RYFNSKVPITR

SEQ ID NO: 42851 - protein, 11 aa, Homo Sapiens
RYIHLENLLAR

SEQ ID NO: 42852 - protein, 11 aa, Homo Sapiens
RYKLLGGLAVR

SEQ ID NO: 42853 - protein, 11 aa, Homo Sapiens
RYMDAWNTVSR

SEQ ID NO: 42854 - protein, 11 aa, Homo Sapiens
RYMTPEDFVQR

SEQ ID NO: 42855 - protein, 11 aa, Homo Sapiens
RYQQFKDFQRR

SEQ ID NO: 42856 - protein, 11 aa, Homo Sapiens
RYREDLDFVLR

SEQ ID NO: 42857 - protein, 11 aa, Homo Sapiens
RYVASYLLAAL

SEQ ID NO: 42858 - protein, 11 aa, Homo Sapiens
SFFSPSPARKR

SEQ ID NO: 42859 - protein, 11 aa, Homo Sapiens
SFLPRKFPSLR

SEQ ID NO: 42860 - protein, 11 aa, Homo Sapiens
SFMDPASALYR

SEQ ID NO: 42861 - protein, 11 aa, Homo Sapiens
SGAAEYLYFFR

SEQ ID NO: 42862 - protein, 11 aa, Homo Sapiens
SIIGGGVKAPR

SEQ ID NO: 42863 - protein, 11 aa, Homo Sapiens
SLKGIPTLVYR

SEQ ID NO: 42864 - protein, 11 aa, Homo Sapiens
SLKGVDPKFLR

SEQ ID NO: 42865 - protein, 11 aa, Homo Sapiens
SLLKKNWQNVR

SEQ ID NO: 42866 - protein, 11 aa, Homo Sapiens
SLLPLTEANLR

SEQ ID NO: 42867 - protein, 11 aa, Homo Sapiens
SLLPVDIRQYL

SEQ ID NO: 42868 - protein, 11 aa, Homo Sapiens
SLLQPLNVEID

SEQ ID NO: 42869 - protein, 11 aa, Homo Sapiens
SLMHSFILKAR

SEQ ID NO: 42870 - protein, 11 aa, Homo Sapiens
SLQNAESWINR

SEQ ID NO: 42871 - protein, 11 aa, Homo Sapiens
SMIRLSEAMAR

SEQ ID NO: 42872 - protein, 11 aa, Homo Sapiens
SMKSPLYLVSR

SEQ ID NO: 42873 - protein, 11 aa, Homo Sapiens
SSLLRTSIMSK

SEQ ID NO: 42874 - protein, 11 aa, Homo Sapiens
SSLPALLFKAR

SEQ ID NO: 42875 - protein, 11 aa, Homo Sapiens
STFIHAEDFAR

SEQ ID NO: 42876 - protein, 11 aa, Homo Sapiens
STFSGIKELAR

SEQ ID NO: 42877 - protein, 11 aa, Homo Sapiens
STKPGSYIFRL

SEQ ID NO: 42878 - protein, 11 aa, Homo Sapiens
STKPPGTFLLR

SEQ ID NO: 42879 - protein, 11 aa, Homo Sapiens
STLRSSHLPSR

SEQ ID NO: 42880 - protein, 11 aa, Homo Sapiens
STMYPGLPSRL

SEQ ID NO: 42881 - protein, 11 aa, Homo Sapiens
SVARLSQKFPK

SEQ ID NO: 42882 - protein, 11 aa, Homo Sapiens
SVIPHQKLFTR

SEQ ID NO: 42883 - protein, 11 aa, Homo Sapiens
SVKEISDIVQR

SEQ ID NO: 42884 - protein, 11 aa, Homo Sapiens
SVLGSLLYYSR

SEQ ID NO: 42885 - protein, 11 aa, Homo Sapiens
SVLPFDGDFAR

SEQ ID NO: 42886 - protein, 11 aa, Homo Sapiens
SVLRGAALVPR

SEQ ID NO: 42887 - protein, 11 aa, Homo Sapiens
SVPGGELFNPR

SEQ ID NO: 42888 - protein, 11 aa, Homo Sapiens
SVREGQGFAFR

SEQ ID NO: 42889 - protein, 11 aa, Homo Sapiens
SVREVRQLTLR

SEQ ID NO: 42890 - protein, 11 aa, Homo Sapiens
SVSVQGIIIYR

SEQ ID NO: 42891 - protein, 11 aa, Homo Sapiens
SVTPEGVIKQR

SEQ ID NO: 42892 - protein, 11 aa, Homo Sapiens
SYLHENQIIHR

SEQ ID NO: 42893 - protein, 11 aa, Homo Sapiens
TIMPKDIQLAR

SEQ ID NO: 42894 - protein, 11 aa, Homo Sapiens
TQQEMMDAQLR

SEQ ID NO: 42895 - protein, 11 aa, Homo Sapiens
TSKLYSLLFRR

SEQ ID NO: 42896 - protein, 11 aa, Homo Sapiens
TTFTWNINHAR

SEQ ID NO: 42897 - protein, 11 aa, Homo Sapiens
TTLPDDMITQR

SEQ ID NO: 42898 - protein, 11 aa, Homo Sapiens
TVFDAKRLIGR

SEQ ID NO: 42899 - protein, 11 aa, Homo Sapiens
TVIPATVVTSR

SEQ ID NO: 42900 - protein, 11 aa, Homo Sapiens
TVLDPDLRMTF

SEQ ID NO: 42901 - protein, 11 aa, Homo Sapiens
TVLPKDILQER

SEQ ID NO: 42902 - protein, 11 aa, Homo Sapiens
TVLPVPPLSVR

SEQ ID NO: 42903 - protein, 11 aa, Homo Sapiens
TVMGAEIRHVL

SEQ ID NO: 42904 - protein, 11 aa, Homo Sapiens
TVRTAMSLIER

SEQ ID NO: 42905 - protein, 11 aa, Homo Sapiens
TVRVWDISGLR

SEQ ID NO: 42906 - protein, 11 aa, Homo Sapiens
VAIPPDVLKSR

SEQ ID NO: 42907 - protein, 11 aa, Homo Sapiens
VFLPQAIRHLK

SEQ ID NO: 42908 - protein, 11 aa, Homo Sapiens
VLSAPGLRGFR

SEQ ID NO: 42909 - protein, 11 aa, Homo Sapiens
VQKDIQPYMRR

SEQ ID NO: 42910 - protein, 11 aa, Homo Sapiens
VQNPALRLVTR

SEQ ID NO: 42911 - protein, 11 aa, Homo Sapiens
VQVGPLPSRLR

SEQ ID NO: 42912 - protein, 11 aa, Homo Sapiens
VQVSPLIKLGR

SEQ ID NO: 42913 - protein, 11 aa, Homo Sapiens
VVAPPGVVVSR

SEQ ID NO: 42914 - protein, 11 aa, Homo Sapiens
VVINYTEQLLR

SEQ ID NO: 42915 - protein, 11 aa, Homo Sapiens
VVKLGDLGLGR

SEQ ID NO: 42916 - protein, 11 aa, Homo Sapiens
VVKPDQLIKRR

SEQ ID NO: 42917 - protein, 11 aa, Homo Sapiens
VVTDPAFLVTR

SEQ ID NO: 42918 - protein, 11 aa, Homo Sapiens
VYRNPESFKEK

SEQ ID NO: 42919 - protein, 11 aa, Homo Sapiens
VYVNYTILKPR

SEQ ID NO: 42920 - protein, 8 aa, Homo Sapiens
AIGPREQW

SEQ ID NO: 42921 - protein, 8 aa, Homo Sapiens
ATNIRYCY

SEQ ID NO: 42922 - protein, 8 aa, Homo Sapiens
FESWMHHW

SEQ ID NO: 42923 - protein, 8 aa, Homo Sapiens
FEVDTVAP

SEQ ID NO: 42924 - protein, 8 aa, Homo Sapiens
FNEKSKEL

SEQ ID NO: 42925 - protein, 8 aa, Homo Sapiens
KLGLRARW

SEQ ID NO: 42926 - protein, 8 aa, Homo Sapiens
KLLEKERL

SEQ ID NO: 42927 - protein, 8 aa, Homo Sapiens
KVWMRHRY

SEQ ID NO: 42928 - protein, 8 aa, Homo Sapiens
LAKIRWKY

SEQ ID NO: 42929 - protein, 8 aa, Homo Sapiens
LAQIRHIY

SEQ ID NO: 42930 - protein, 8 aa, Homo Sapiens
LLAQRWGW

SEQ ID NO: 42931 - protein, 8 aa, Homo Sapiens
MSLTACKV

SEQ ID NO: 42932 - protein, 8 aa, Homo Sapiens
QNAVRLHY

SEQ ID NO: 42933 - protein, 8 aa, Homo Sapiens
RLAPNFRW

SEQ ID NO: 42934 - protein, 8 aa, Homo Sapiens
RLAPRSQY

SEQ ID NO: 42935 - protein, 8 aa, Homo Sapiens
RLGPRAGF

SEQ ID NO: 42936 - protein, 8 aa, Homo Sapiens
RMFWREMY

SEQ ID NO: 42937 - protein, 8 aa, Homo Sapiens
SAGPRYEY

SEQ ID NO: 42938 - protein, 8 aa, Homo Sapiens
SLFQRTAW

SEQ ID NO: 42939 - protein, 8 aa, Homo Sapiens
SVFKKFNW

SEQ ID NO: 42940 - protein, 8 aa, Homo Sapiens
TFTGHREW

SEQ ID NO: 42941 - protein, 8 aa, Homo Sapiens
TRLGRNVY

SEQ ID NO: 42942 - protein, 8 aa, Homo Sapiens
TVYPDPRG

SEQ ID NO: 42943 - protein, 8 aa, Homo Sapiens
VLFQRFFY

SEQ ID NO: 42944 - protein, 8 aa, Homo Sapiens
VSLTACKV

SEQ ID NO: 42945 - protein, 9 aa, Homo Sapiens
AAWHYLVSW

SEQ ID NO: 42946 - protein, 9 aa, Homo Sapiens
AILKKVIQW

SEQ ID NO: 42947 - protein, 9 aa, Homo Sapiens
AIMISRPAW

SEQ ID NO: 42948 - protein, 9 aa, Homo Sapiens
AINSCRSEY

SEQ ID NO: 42949 - protein, 9 aa, Homo Sapiens
ALAGTRLVW

SEQ ID NO: 42950 - protein, 9 aa, Homo Sapiens
ALASWAYRW

SEQ ID NO: 42951 - protein, 9 aa, Homo Sapiens
ALFNGISKW

SEQ ID NO: 42952 - protein, 9 aa, Homo Sapiens
ALFRELISW

SEQ ID NO: 42953 - protein, 9 aa, Homo Sapiens
ALFRHEVGY

SEQ ID NO: 42954 - protein, 9 aa, Homo Sapiens
ALHLWTAVY

SEQ ID NO: 42955 - protein, 9 aa, Homo Sapiens
ALKSARDMW

SEQ ID NO: 42956 - protein, 9 aa, Homo Sapiens
ALLHWGALW

SEQ ID NO: 42957 - protein, 9 aa, Homo Sapiens
ALMPWRYAL

SEQ ID NO: 42958 - protein, 9 aa, Homo Sapiens
ALMSLHHCW

SEQ ID NO: 42959 - protein, 9 aa, Homo Sapiens
ALNANFVSW

SEQ ID NO: 42960 - protein, 9 aa, Homo Sapiens
ALNHLREIW

SEQ ID NO: 42961 - protein, 9 aa, Homo Sapiens
ALNPLRAVW

SEQ ID NO: 42962 - protein, 9 aa, Homo Sapiens
ALQKQYYKW

SEQ ID NO: 42963 - protein, 9 aa, Homo Sapiens
ALRDVRQQY

SEQ ID NO: 42964 - protein, 9 aa, Homo Sapiens
ALSGMRHVW

SEQ ID NO: 42965 - protein, 9 aa, Homo Sapiens
ALSPVRGCY

SEQ ID NO: 42966 - protein, 9 aa, Homo Sapiens
ALWKFIQQW

SEQ ID NO: 42967 - protein, 9 aa, Homo Sapiens
ALWKHQFAW

SEQ ID NO: 42968 - protein, 9 aa, Homo Sapiens
ALYARRRSY

SEQ ID NO: 42969 - protein, 9 aa, Homo Sapiens
ALYKYFISF

SEQ ID NO: 42970 - protein, 9 aa, Homo Sapiens
ALYYWNNEY

SEQ ID NO: 42971 - protein, 9 aa, Homo Sapiens
AMAPERTGW

SEQ ID NO: 42972 - protein, 9 aa, Homo Sapiens
AMHTLREKY

SEQ ID NO: 42973 - protein, 9 aa, Homo Sapiens
AMLKKGWKW

SEQ ID NO: 42974 - protein, 9 aa, Homo Sapiens
AMWKKLAEW

SEQ ID NO: 42975 - protein, 9 aa, Homo Sapiens
AMYPIRSAY

SEQ ID NO: 42976 - protein, 9 aa, Homo Sapiens
APKTTRVTY

SEQ ID NO: 42977 - protein, 9 aa, Homo Sapiens
AQAQIVQSW

SEQ ID NO: 42978 - protein, 9 aa, Homo Sapiens
AQARWWATF

SEQ ID NO: 42979 - protein, 9 aa, Homo Sapiens
AQGVPRYSY

SEQ ID NO: 42980 - protein, 9 aa, Homo Sapiens
AQKSFVDSW

SEQ ID NO: 42981 - protein, 9 aa, Homo Sapiens
AQLRFIQAW

SEQ ID NO: 42982 - protein, 9 aa, Homo Sapiens
AQNAVRLHY

SEQ ID NO: 42983 - protein, 9 aa, Homo Sapiens
AQWAIHPTF

SEQ ID NO: 42984 - protein, 9 aa, Homo Sapiens
ASLLHQVSW

SEQ ID NO: 42985 - protein, 9 aa, Homo Sapiens
ASNGDVYAW

SEQ ID NO: 42986 - protein, 9 aa, Homo Sapiens
ASNPQRPGY

SEQ ID NO: 42987 - protein, 9 aa, Homo Sapiens
ASNYFRAMF

SEQ ID NO: 42988 - protein, 9 aa, Homo Sapiens
ATADVEWRW

SEQ ID NO: 42989 - protein, 9 aa, Homo Sapiens
ATALHRASY

SEQ ID NO: 42990 - protein, 9 aa, Homo Sapiens
ATAQRVAAW

SEQ ID NO: 42991 - protein, 9 aa, Homo Sapiens
ATFGRPAEW

SEQ ID NO: 42992 - protein, 9 aa, Homo Sapiens
ATFSSIHSF

SEQ ID NO: 42993 - protein, 9 aa, Homo Sapiens
ATHHLYQAW

SEQ ID NO: 42994 - protein, 9 aa, Homo Sapiens
ATHSSSTSW

SEQ ID NO: 42995 - protein, 9 aa, Homo Sapiens
ATHVYMYVF

SEQ ID NO: 42996 - protein, 9 aa, Homo Sapiens
ATILWDNAF

SEQ ID NO: 42997 - protein, 9 aa, Homo Sapiens
ATKDAVAVW

SEQ ID NO: 42998 - protein, 9 aa, Homo Sapiens
ATLELTHNW

SEQ ID NO: 42999 - protein, 9 aa, Homo Sapiens
ATLKWKESL

SEQ ID NO: 43000 - protein, 9 aa, Homo Sapiens
ATMFPRREF

SEQ ID NO: 43001 - protein, 9 aa, Homo Sapiens
ATNAFIVAF

SEQ ID NO: 43002 - protein, 9 aa, Homo Sapiens
ATNGVVVTW

SEQ ID NO: 43003 - protein, 9 aa, Homo Sapiens
ATNLQRVSY

SEQ ID NO: 43004 - protein, 9 aa, Homo Sapiens
ATNRITVTW

SEQ ID NO: 43005 - protein, 9 aa, Homo Sapiens
ATNVNNWHW

SEQ ID NO: 43006 - protein, 9 aa, Homo Sapiens
ATQIKTYSW

SEQ ID NO: 43007 - protein, 9 aa, Homo Sapiens
ATRPDYISW

SEQ ID NO: 43008 - protein, 9 aa, Homo Sapiens
ATVLWDNAF

SEQ ID NO: 43009 - protein, 9 aa, Homo Sapiens
ATYMKPEMW

SEQ ID NO: 43010 - protein, 9 aa, Homo Sapiens
AVCRLRHWW

SEQ ID NO: 43011 - protein, 9 aa, Homo Sapiens
AVLAGRWNY

SEQ ID NO: 43012 - protein, 9 aa, Homo Sapiens
AVLKWLYHL

SEQ ID NO: 43013 - protein, 9 aa, Homo Sapiens
AVLMHRERY

SEQ ID NO: 43014 - protein, 9 aa, Homo Sapiens
AVNCHVITW

SEQ ID NO: 43015 - protein, 9 aa, Homo Sapiens
AVNFTREEW

SEQ ID NO: 43016 - protein, 9 aa, Homo Sapiens
AVNGHTNSF

SEQ ID NO: 43017 - protein, 9 aa, Homo Sapiens
AVNPIIYSF

SEQ ID NO: 43018 - protein, 9 aa, Homo Sapiens
AVQNVHSVW

SEQ ID NO: 43019 - protein, 9 aa, Homo Sapiens
AVQSEPRSW

SEQ ID NO: 43020 - protein, 9 aa, Homo Sapiens
AVSLIREEW

SEQ ID NO: 43021 - protein, 9 aa, Homo Sapiens
AVWTRAYGW

SEQ ID NO: 43022 - protein, 9 aa, Homo Sapiens
AVYSRTFTW

SEQ ID NO: 43023 - protein, 9 aa, Homo Sapiens
DFLTEGGGV

SEQ ID NO: 43024 - protein, 9 aa, Homo Sapiens
FDHPELVKL

SEQ ID NO: 43025 - protein, 9 aa, Homo Sapiens
FDRPQELKL

SEQ ID NO: 43026 - protein, 9 aa, Homo Sapiens
FQRPPISSW

SEQ ID NO: 43027 - protein, 9 aa, Homo Sapiens
GLNWLRFSW

SEQ ID NO: 43028 - protein, 9 aa, Homo Sapiens
GLRNKREVW

SEQ ID NO: 43029 - protein, 9 aa, Homo Sapiens
GMWKTTFAW

SEQ ID NO: 43030 - protein, 9 aa, Homo Sapiens
GQLPHTVSW

SEQ ID NO: 43031 - protein, 9 aa, Homo Sapiens
GSFHIRASY

SEQ ID NO: 43032 - protein, 9 aa, Homo Sapiens
GSHHWNWTF

SEQ ID NO: 43033 - protein, 9 aa, Homo Sapiens
GTDRNAYVW

SEQ ID NO: 43034 - protein, 9 aa, Homo Sapiens
GTIPERPGW

SEQ ID NO: 43035 - protein, 9 aa, Homo Sapiens
GTLKERVQW

SEQ ID NO: 43036 - protein, 9 aa, Homo Sapiens
GTLKKSTSW

SEQ ID NO: 43037 - protein, 9 aa, Homo Sapiens
GTLSGHASW

SEQ ID NO: 43038 - protein, 9 aa, Homo Sapiens
GTMDVHHHW

SEQ ID NO: 43039 - protein, 9 aa, Homo Sapiens
GTNAKVRTW

SEQ ID NO: 43040 - protein, 9 aa, Homo Sapiens
GTSGIRFIY

SEQ ID NO: 43041 - protein, 9 aa, Homo Sapiens
GTVLKTSSW

SEQ ID NO: 43042 - protein, 9 aa, Homo Sapiens
GTYGVRAAW

SEQ ID NO: 43043 - protein, 9 aa, Homo Sapiens
GVKPNPASW

SEQ ID NO: 43044 - protein, 9 aa, Homo Sapiens
GVSSVREKY

SEQ ID NO: 43045 - protein, 9 aa, Homo Sapiens
HIQESRFLY

SEQ ID NO: 43046 - protein, 9 aa, Homo Sapiens
HIWEYTYVL

SEQ ID NO: 43047 - protein, 9 aa, Homo Sapiens
HLLDHRSKW

SEQ ID NO: 43048 - protein, 9 aa, Homo Sapiens
HLMDVVYTW

SEQ ID NO: 43049 - protein, 9 aa, Homo Sapiens
HLWERTWGW

SEQ ID NO: 43050 - protein, 9 aa, Homo Sapiens
HMALERNSW

SEQ ID NO: 43051 - protein, 9 aa, Homo Sapiens
HQDPNSYSW

SEQ ID NO: 43052 - protein, 9 aa, Homo Sapiens
HQNWARFSY

SEQ ID NO: 43053 - protein, 9 aa, Homo Sapiens
HSCLFRHSW

SEQ ID NO: 43054 - protein, 9 aa, Homo Sapiens
HTSSTTSAW

SEQ ID NO: 43055 - protein, 9 aa, Homo Sapiens
HTVKWEGVW

SEQ ID NO: 43056 - protein, 9 aa, Homo Sapiens
HTYFGLPRW

SEQ ID NO: 43057 - protein, 9 aa, Homo Sapiens
HTYRGRLSY

SEQ ID NO: 43058 - protein, 9 aa, Homo Sapiens
IIFAVRQEY

SEQ ID NO: 43059 - protein, 9 aa, Homo Sapiens
IIFVPVPQL

SEQ ID NO: 43060 - protein, 9 aa, Homo Sapiens
IIHEISHSW

SEQ ID NO: 43061 - protein, 9 aa, Homo Sapiens
IILEHVSTW

SEQ ID NO: 43062 - protein, 9 aa, Homo Sapiens
IIMKDVPDW

SEQ ID NO: 43063 - protein, 9 aa, Homo Sapiens
IIRDFVLSW

SEQ ID NO: 43064 - protein, 9 aa, Homo Sapiens
IIRPQNVSW

SEQ ID NO: 43065 - protein, 9 aa, Homo Sapiens
IISEKRQKW

SEQ ID NO: 43066 - protein, 9 aa, Homo Sapiens
IISHQYRMQ

SEQ ID NO: 43067 - protein, 9 aa, Homo Sapiens
IIWDKKPRW

SEQ ID NO: 43068 - protein, 9 aa, Homo Sapiens
ILAKIRWKY

SEQ ID NO: 43069 - protein, 9 aa, Homo Sapiens
ILGEFRDTY

SEQ ID NO: 43070 - protein, 9 aa, Homo Sapiens
ILGPPPPSF

SEQ ID NO: 43071 - protein, 9 aa, Homo Sapiens
ILHKARFSY

SEQ ID NO: 43072 - protein, 9 aa, Homo Sapiens
ILKEMTHSW

SEQ ID NO: 43073 - protein, 9 aa, Homo Sapiens
ILKSMVVGW

SEQ ID NO: 43074 - protein, 9 aa, Homo Sapiens
ILLKWTKGF

SEQ ID NO: 43075 - protein, 9 aa, Homo Sapiens
ILNENSHSF

SEQ ID NO: 43076 - protein, 9 aa, Homo Sapiens
ILREPTFRW

SEQ ID NO: 43077 - protein, 9 aa, Homo Sapiens
IMFDGPEAW

SEQ ID NO: 43078 - protein, 9 aa, Homo Sapiens
IMKKIRESY

SEQ ID NO: 43079 - protein, 9 aa, Homo Sapiens
IMKSQQESW

SEQ ID NO: 43080 - protein, 9 aa, Homo Sapiens
IMLPFRFTY

SEQ ID NO: 43081 - protein, 9 aa, Homo Sapiens
IMWQKHYVY

SEQ ID NO: 43082 - protein, 9 aa, Homo Sapiens
IQFNLRNLY

SEQ ID NO: 43083 - protein, 9 aa, Homo Sapiens
IQYGKIVSW

SEQ ID NO: 43084 - protein, 9 aa, Homo Sapiens
ISNPTRHVY

SEQ ID NO: 43085 - protein, 9 aa, Homo Sapiens
ITNRNTVSW

SEQ ID NO: 43086 - protein, 9 aa, Homo Sapiens
ITTKAISRW

SEQ ID NO: 43087 - protein, 9 aa, Homo Sapiens
ITYTFHSTW

SEQ ID NO: 43088 - protein, 9 aa, Homo Sapiens
IVHSVRAKW

SEQ ID NO: 43089 - protein, 9 aa, Homo Sapiens
IVLKKWYTI

SEQ ID NO: 43090 - protein, 9 aa, Homo Sapiens
IVMRYSAEW

SEQ ID NO: 43091 - protein, 9 aa, Homo Sapiens
IVQSKINSF

SEQ ID NO: 43092 - protein, 9 aa, Homo Sapiens
IVSTTRELY

SEQ ID NO: 43093 - protein, 9 aa, Homo Sapiens
KAADLRAAY

SEQ ID NO: 43094 - protein, 9 aa, Homo Sapiens
KAFDQRLTF

SEQ ID NO: 43095 - protein, 9 aa, Homo Sapiens
KAFKWFSTL

SEQ ID NO: 43096 - protein, 9 aa, Homo Sapiens
KAFLKRFPW

SEQ ID NO: 43097 - protein, 9 aa, Homo Sapiens
KAFNLRISF

SEQ ID NO: 43098 - protein, 9 aa, Homo Sapiens
KAFNWFSTL

SEQ ID NO: 43099 - protein, 9 aa, Homo Sapiens
KAFNWSSTL

SEQ ID NO: 43100 - protein, 9 aa, Homo Sapiens
KAFRWKSNF

SEQ ID NO: 43101 - protein, 9 aa, Homo Sapiens
KAFSTRWNW

SEQ ID NO: 43102 - protein, 9 aa, Homo Sapiens
KAFSYHHSF

SEQ ID NO: 43103 - protein, 9 aa, Homo Sapiens
KAFTHRSTF

SEQ ID NO: 43104 - protein, 9 aa, Homo Sapiens
KAFTWSSTF

SEQ ID NO: 43105 - protein, 9 aa, Homo Sapiens
KALMIREKY

SEQ ID NO: 43106 - protein, 9 aa, Homo Sapiens
KALRWKDSW

SEQ ID NO: 43107 - protein, 9 aa, Homo Sapiens
KAWEAVPSL

SEQ ID NO: 43108 - protein, 9 aa, Homo Sapiens
KFNPVSFTW

SEQ ID NO: 43109 - protein, 9 aa, Homo Sapiens
KGFDERHAY

SEQ ID NO: 43110 - protein, 9 aa, Homo Sapiens
KIADFLNSF

SEQ ID NO: 43111 - protein, 9 aa, Homo Sapiens
KIADLCHTF

SEQ ID NO: 43112 - protein, 9 aa, Homo Sapiens
KIAEQVASF

SEQ ID NO: 43113 - protein, 9 aa, Homo Sapiens
KICASHIGW

SEQ ID NO: 43114 - protein, 9 aa, Homo Sapiens
KICDIAINW

SEQ ID NO: 43115 - protein, 9 aa, Homo Sapiens
KIFALRHGY

SEQ ID NO: 43116 - protein, 9 aa, Homo Sapiens
KIFDLRGTY

SEQ ID NO: 43117 - protein, 9 aa, Homo Sapiens
KIFEDIPTL

SEQ ID NO: 43118 - protein, 9 aa, Homo Sapiens
KIFEFKETL

SEQ ID NO: 43119 - protein, 9 aa, Homo Sapiens
KIFRYFATL

SEQ ID NO: 43120 - protein, 9 aa, Homo Sapiens
KIFSQKLGY

SEQ ID NO: 43121 - protein, 9 aa, Homo Sapiens
KIFYDRAEY

SEQ ID NO: 43122 - protein, 9 aa, Homo Sapiens
KIFYKTVSF

SEQ ID NO: 43123 - protein, 9 aa, Homo Sapiens
KIGSKYYNW

SEQ ID NO: 43124 - protein, 9 aa, Homo Sapiens
KIGTERACY

SEQ ID NO: 43125 - protein, 9 aa, Homo Sapiens
KIHNHTHIW

SEQ ID NO: 43126 - protein, 9 aa, Homo Sapiens
KIHWWENVY

SEQ ID NO: 43127 - protein, 9 aa, Homo Sapiens
KIIFIDSTW

SEQ ID NO: 43128 - protein, 9 aa, Homo Sapiens
KIIPKTLTW

SEQ ID NO: 43129 - protein, 9 aa, Homo Sapiens
KIISTLPSW

SEQ ID NO: 43130 - protein, 9 aa, Homo Sapiens
KIKDFANTI

SEQ ID NO: 43131 - protein, 9 aa, Homo Sapiens
KIKVWNYKL

SEQ ID NO: 43132 - protein, 9 aa, Homo Sapiens
KILAIEMRF

SEQ ID NO: 43133 - protein, 9 aa, Homo Sapiens
KILGKFYSW

SEQ ID NO: 43134 - protein, 9 aa, Homo Sapiens
KILIWSGRF

SEQ ID NO: 43135 - protein, 9 aa, Homo Sapiens
KILSKVEKF

SEQ ID NO: 43136 - protein, 9 aa, Homo Sapiens
KIMADNPSW

SEQ ID NO: 43137 - protein, 9 aa, Homo Sapiens
KIMDVVFQW

SEQ ID NO: 43138 - protein, 9 aa, Homo Sapiens
KIMSVIREW

SEQ ID NO: 43139 - protein, 9 aa, Homo Sapiens
KINEARENY

SEQ ID NO: 43140 - protein, 9 aa, Homo Sapiens
KINEKPQVI

SEQ ID NO: 43141 - protein, 9 aa, Homo Sapiens
KINKNCWRI

SEQ ID NO: 43142 - protein, 9 aa, Homo Sapiens
KIQAKIPGL

SEQ ID NO: 43143 - protein, 9 aa, Homo Sapiens
KIQDKSVSF

SEQ ID NO: 43144 - protein, 9 aa, Homo Sapiens
KIQSEKFRW

SEQ ID NO: 43145 - protein, 9 aa, Homo Sapiens
KIRDTFCSY

SEQ ID NO: 43146 - protein, 9 aa, Homo Sapiens
KIRGTLKSW

SEQ ID NO: 43147 - protein, 9 aa, Homo Sapiens
KIRQWEESW

SEQ ID NO: 43148 - protein, 9 aa, Homo Sapiens
KITDVIIGF

SEQ ID NO: 43149 - protein, 9 aa, Homo Sapiens
KITNFTTSW

SEQ ID NO: 43150 - protein, 9 aa, Homo Sapiens
KIWEDRNVY

SEQ ID NO: 43151 - protein, 9 aa, Homo Sapiens
KIWKKNTPF

SEQ ID NO: 43152 - protein, 9 aa, Homo Sapiens
KIWPLFPVF

SEQ ID NO: 43153 - protein, 9 aa, Homo Sapiens
KIWPYVYAF

SEQ ID NO: 43154 - protein, 9 aa, Homo Sapiens
KIWPYVYTL

SEQ ID NO: 43155 - protein, 9 aa, Homo Sapiens
KIWRPNRVF

SEQ ID NO: 43156 - protein, 9 aa, Homo Sapiens
KIWTSEHVF

SEQ ID NO: 43157 - protein, 9 aa, Homo Sapiens
KIWTSVPYL

SEQ ID NO: 43158 - protein, 9 aa, Homo Sapiens
KIYEISNRW

SEQ ID NO: 43159 - protein, 9 aa, Homo Sapiens
KIYEKTFTL

SEQ ID NO: 43160 - protein, 9 aa, Homo Sapiens
KIYGEKLQF

SEQ ID NO: 43161 - protein, 9 aa, Homo Sapiens
KIYPSRDEY

SEQ ID NO: 43162 - protein, 9 aa, Homo Sapiens
KIYPSREEY

SEQ ID NO: 43163 - protein, 9 aa, Homo Sapiens
KIYQWINEL

SEQ ID NO: 43164 - protein, 9 aa, Homo Sapiens
KLAEQYESF

SEQ ID NO: 43165 - protein, 9 aa, Homo Sapiens
KLAPFNEHW

SEQ ID NO: 43166 - protein, 9 aa, Homo Sapiens
KLAQIRHIY

SEQ ID NO: 43167 - protein, 9 aa, Homo Sapiens
KLASPQPSY

SEQ ID NO: 43168 - protein, 9 aa, Homo Sapiens
KLAVERYEW

SEQ ID NO: 43169 - protein, 9 aa, Homo Sapiens
KLAVGRHSF

SEQ ID NO: 43170 - protein, 9 aa, Homo Sapiens
KLAVIKNAW

SEQ ID NO: 43171 - protein, 9 aa, Homo Sapiens
KLAYMPHTF

SEQ ID NO: 43172 - protein, 9 aa, Homo Sapiens
KLCGKTFSF

SEQ ID NO: 43173 - protein, 9 aa, Homo Sapiens
KLDGGRQQW

SEQ ID NO: 43174 - protein, 9 aa, Homo Sapiens
KLDTITWTW

SEQ ID NO: 43175 - protein, 9 aa, Homo Sapiens
KLEDRQTSW

SEQ ID NO: 43176 - protein, 9 aa, Homo Sapiens
KLFDAPLSI

SEQ ID NO: 43177 - protein, 9 aa, Homo Sapiens
KLFDIRPIW

SEQ ID NO: 43178 - protein, 9 aa, Homo Sapiens
KLFDKLLEY

SEQ ID NO: 43179 - protein, 9 aa, Homo Sapiens
KLFDRPQEL

SEQ ID NO: 43180 - protein, 9 aa, Homo Sapiens
KLFGFTERY

SEQ ID NO: 43181 - protein, 9 aa, Homo Sapiens
KLFGMIITI

SEQ ID NO: 43182 - protein, 9 aa, Homo Sapiens
KLFGSTSSF

SEQ ID NO: 43183 - protein, 9 aa, Homo Sapiens
KLFIGGLSF

SEQ ID NO: 43184 - protein, 9 aa, Homo Sapiens
KLFKEVASL

SEQ ID NO: 43185 - protein, 9 aa, Homo Sapiens
KLFLFHTSL

SEQ ID NO: 43186 - protein, 9 aa, Homo Sapiens
KLFNVTSTL

SEQ ID NO: 43187 - protein, 9 aa, Homo Sapiens
KLFPFYFHI

SEQ ID NO: 43188 - protein, 9 aa, Homo Sapiens
KLFPYALAF

SEQ ID NO: 43189 - protein, 9 aa, Homo Sapiens
KLFQGQLVL

SEQ ID NO: 43190 - protein, 9 aa, Homo Sapiens
KLFRGPLVI

SEQ ID NO: 43191 - protein, 9 aa, Homo Sapiens
KLFSFTPAW

SEQ ID NO: 43192 - protein, 9 aa, Homo Sapiens
KLFVGGLDW

SEQ ID NO: 43193 - protein, 9 aa, Homo Sapiens
KLFVGGLNF

SEQ ID NO: 43194 - protein, 9 aa, Homo Sapiens
KLFVGGLSF

SEQ ID NO: 43195 - protein, 9 aa, Homo Sapiens
KLFWIRVKY

SEQ ID NO: 43196 - protein, 9 aa, Homo Sapiens
KLFWYQVHF

SEQ ID NO: 43197 - protein, 9 aa, Homo Sapiens
KLFYDVITW

SEQ ID NO: 43198 - protein, 9 aa, Homo Sapiens
KLGCVLMAW

SEQ ID NO: 43199 - protein, 9 aa, Homo Sapiens
KLHAVVETL

SEQ ID NO: 43200 - protein, 9 aa, Homo Sapiens
KLHDAFFKW

SEQ ID NO: 43201 - protein, 9 aa, Homo Sapiens
KLHLGFIEI

SEQ ID NO: 43202 - protein, 9 aa, Homo Sapiens
KLHRKIHLW

SEQ ID NO: 43203 - protein, 9 aa, Homo Sapiens
KLHSNPSAF

SEQ ID NO: 43204 - protein, 9 aa, Homo Sapiens
KLHYKHESW

SEQ ID NO: 43205 - protein, 9 aa, Homo Sapiens
KLIAWKVCL

SEQ ID NO: 43206 - protein, 9 aa, Homo Sapiens
KLIDFGLSF

SEQ ID NO: 43207 - protein, 9 aa, Homo Sapiens
KLIDRTESL

SEQ ID NO: 43208 - protein, 9 aa, Homo Sapiens
KLIEFMDTF

SEQ ID NO: 43209 - protein, 9 aa, Homo Sapiens
KLISEMHSF

SEQ ID NO: 43210 - protein, 9 aa, Homo Sapiens
KLKDFSGGW

SEQ ID NO: 43211 - protein, 9 aa, Homo Sapiens
KLKDIRNAW

SEQ ID NO: 43212 - protein, 9 aa, Homo Sapiens
KLKKIYFYW

SEQ ID NO: 43213 - protein, 9 aa, Homo Sapiens
KLKPLLEKW

SEQ ID NO: 43214 - protein, 9 aa, Homo Sapiens
KLKSFFKEY

SEQ ID NO: 43215 - protein, 9 aa, Homo Sapiens
KLKSFTYEY

SEQ ID NO: 43216 - protein, 9 aa, Homo Sapiens
KLKSLMVEW

SEQ ID NO: 43217 - protein, 9 aa, Homo Sapiens
KLKTVKENW

SEQ ID NO: 43218 - protein, 9 aa, Homo Sapiens
KLLAEMSSF

SEQ ID NO: 43219 - protein, 9 aa, Homo Sapiens
KLLAVIHEL

SEQ ID NO: 43220 - protein, 9 aa, Homo Sapiens
KLLAYVEGF

SEQ ID NO: 43221 - protein, 9 aa, Homo Sapiens
KLLDGWWVI

SEQ ID NO: 43222 - protein, 9 aa, Homo Sapiens
KLLEKAFSI

SEQ ID NO: 43223 - protein, 9 aa, Homo Sapiens
KLLEQRAQY

SEQ ID NO: 43224 - protein, 9 aa, Homo Sapiens
KLLERVSAI

SEQ ID NO: 43225 - protein, 9 aa, Homo Sapiens
KLLEYIEEI

SEQ ID NO: 43226 - protein, 9 aa, Homo Sapiens
KLLKLPTCW

SEQ ID NO: 43227 - protein, 9 aa, Homo Sapiens
KLLSHRSSF

SEQ ID NO: 43228 - protein, 9 aa, Homo Sapiens
KLLSRPEMW

SEQ ID NO: 43229 - protein, 9 aa, Homo Sapiens
KLMAIPLVF

SEQ ID NO: 43230 - protein, 9 aa, Homo Sapiens
KLMDHIYAV

SEQ ID NO: 43231 - protein, 9 aa, Homo Sapiens
KLMDLRNEY

SEQ ID NO: 43232 - protein, 9 aa, Homo Sapiens
KLMETSMGF

SEQ ID NO: 43233 - protein, 9 aa, Homo Sapiens
KLMHFVNSL

SEQ ID NO: 43234 - protein, 9 aa, Homo Sapiens
KLMKVHLKF

SEQ ID NO: 43235 - protein, 9 aa, Homo Sapiens
KLMSELESF

SEQ ID NO: 43236 - protein, 9 aa, Homo Sapiens
KLMSTSNTW

SEQ ID NO: 43237 - protein, 9 aa, Homo Sapiens
KLMVPLLKF

SEQ ID NO: 43238 - protein, 9 aa, Homo Sapiens
KLNEGVVEF

SEQ ID NO: 43239 - protein, 9 aa, Homo Sapiens
KLNEMSYEL

SEQ ID NO: 43240 - protein, 9 aa, Homo Sapiens
KLNESVMVF

SEQ ID NO: 43241 - protein, 9 aa, Homo Sapiens
KLNLQTFQW

SEQ ID NO: 43242 - protein, 9 aa, Homo Sapiens
KLNNLVKEW

SEQ ID NO: 43243 - protein, 9 aa, Homo Sapiens
KLNPKSHIL

SEQ ID NO: 43244 - protein, 9 aa, Homo Sapiens
KLNSKRVSF

SEQ ID NO: 43245 - protein, 9 aa, Homo Sapiens
KLNVRTTHY

SEQ ID NO: 43246 - protein, 9 aa, Homo Sapiens
KLPDFSYCI

SEQ ID NO: 43247 - protein, 9 aa, Homo Sapiens
KLQASVRCL

SEQ ID NO: 43248 - protein, 9 aa, Homo Sapiens
KLQDGVHII

SEQ ID NO: 43249 - protein, 9 aa, Homo Sapiens
KLQEDRFLY

SEQ ID NO: 43250 - protein, 9 aa, Homo Sapiens
KLQEEIPVL

SEQ ID NO: 43251 - protein, 9 aa, Homo Sapiens
KLQEKARKW

SEQ ID NO: 43252 - protein, 9 aa, Homo Sapiens
KLQEKIQEL

SEQ ID NO: 43253 - protein, 9 aa, Homo Sapiens
KLQEQIFHL

SEQ ID NO: 43254 - protein, 9 aa, Homo Sapiens
KLQKAVESF

SEQ ID NO: 43255 - protein, 9 aa, Homo Sapiens
KLQTDSNSW

SEQ ID NO: 43256 - protein, 9 aa, Homo Sapiens
KLQWAKQSW

SEQ ID NO: 43257 - protein, 9 aa, Homo Sapiens
KLRHFRECF

SEQ ID NO: 43258 - protein, 9 aa, Homo Sapiens
KLRQETQEW

SEQ ID NO: 43259 - protein, 9 aa, Homo Sapiens
KLRVDTEEW

SEQ ID NO: 43260 - protein, 9 aa, Homo Sapiens
KLSCVQLLL

SEQ ID NO: 43261 - protein, 9 aa, Homo Sapiens
KLSEIVREF

SEQ ID NO: 43262 - protein, 9 aa, Homo Sapiens
KLSEKIMHF

SEQ ID NO: 43263 - protein, 9 aa, Homo Sapiens
KLSKAVATW

SEQ ID NO: 43264 - protein, 9 aa, Homo Sapiens
KLSQAFNHW

SEQ ID NO: 43265 - protein, 9 aa, Homo Sapiens
KLSQIRQIY

SEQ ID NO: 43266 - protein, 9 aa, Homo Sapiens
KLSQKGYSW

SEQ ID NO: 43267 - protein, 9 aa, Homo Sapiens
KLSQRGYEW

SEQ ID NO: 43268 - protein, 9 aa, Homo Sapiens
KLSSALQKW

SEQ ID NO: 43269 - protein, 9 aa, Homo Sapiens
KLSTFRESF

SEQ ID NO: 43270 - protein, 9 aa, Homo Sapiens
KLTQIRQIY

SEQ ID NO: 43271 - protein, 9 aa, Homo Sapiens
KLVERLVEW

SEQ ID NO: 43272 - protein, 9 aa, Homo Sapiens
KLVPWSQCL

SEQ ID NO: 43273 - protein, 9 aa, Homo Sapiens
KLWACNFCF

SEQ ID NO: 43274 - protein, 9 aa, Homo Sapiens
KLWADRISL

SEQ ID NO: 43275 - protein, 9 aa, Homo Sapiens
KLWESPNVL

SEQ ID NO: 43276 - protein, 9 aa, Homo Sapiens
KLWGVCVSI

SEQ ID NO: 43277 - protein, 9 aa, Homo Sapiens
KLWKVALHF

SEQ ID NO: 43278 - protein, 9 aa, Homo Sapiens
KLWNKIWCI

SEQ ID NO: 43279 - protein, 9 aa, Homo Sapiens
KLWSRSLKL

SEQ ID NO: 43280 - protein, 9 aa, Homo Sapiens
KLYAWELAF

SEQ ID NO: 43281 - protein, 9 aa, Homo Sapiens
KLYDMVLQF

SEQ ID NO: 43282 - protein, 9 aa, Homo Sapiens
KLYEAVPQL

SEQ ID NO: 43283 - protein, 9 aa, Homo Sapiens
KLYEKFLEF

SEQ ID NO: 43284 - protein, 9 aa, Homo Sapiens
KLYGRPIKI

SEQ ID NO: 43285 - protein, 9 aa, Homo Sapiens
KLYGYYVSI

SEQ ID NO: 43286 - protein, 9 aa, Homo Sapiens
KLYKNRVEF

SEQ ID NO: 43287 - protein, 9 aa, Homo Sapiens
KLYLEREEY

SEQ ID NO: 43288 - protein, 9 aa, Homo Sapiens
KLYLKEYHY

SEQ ID NO: 43289 - protein, 9 aa, Homo Sapiens
KLYLSWVEW

SEQ ID NO: 43290 - protein, 9 aa, Homo Sapiens
KLYPWIHQF

SEQ ID NO: 43291 - protein, 9 aa, Homo Sapiens
KLYQEMFAW

SEQ ID NO: 43292 - protein, 9 aa, Homo Sapiens
KLYSKHFTL

SEQ ID NO: 43293 - protein, 9 aa, Homo Sapiens
KLYTKVINW

SEQ ID NO: 43294 - protein, 9 aa, Homo Sapiens
KMCSMVKKW

SEQ ID NO: 43295 - protein, 9 aa, Homo Sapiens
KMDINRRRY

SEQ ID NO: 43296 - protein, 9 aa, Homo Sapiens
KMFAKELKL

SEQ ID NO: 43297 - protein, 9 aa, Homo Sapiens
KMFDRHSSL

SEQ ID NO: 43298 - protein, 9 aa, Homo Sapiens
KMFIGGLSW

SEQ ID NO: 43299 - protein, 9 aa, Homo Sapiens
KMFPIILAI

SEQ ID NO: 43300 - protein, 9 aa, Homo Sapiens
KMFTDFLSF

SEQ ID NO: 43301 - protein, 9 aa, Homo Sapiens
KMFVGGLSW

SEQ ID NO: 43302 - protein, 9 aa, Homo Sapiens
KMHDKVFAY

SEQ ID NO: 43303 - protein, 9 aa, Homo Sapiens
KMHQSRISY

SEQ ID NO: 43304 - protein, 9 aa, Homo Sapiens
KMKEIAEAY

SEQ ID NO: 43305 - protein, 9 aa, Homo Sapiens
KMKEREEAW

SEQ ID NO: 43306 - protein, 9 aa, Homo Sapiens
KMKGDYYRY

SEQ ID NO: 43307 - protein, 9 aa, Homo Sapiens
KMLDESFQW

SEQ ID NO: 43308 - protein, 9 aa, Homo Sapiens
KMLDKIISI

SEQ ID NO: 43309 - protein, 9 aa, Homo Sapiens
KMLDNFYNF

SEQ ID NO: 43310 - protein, 9 aa, Homo Sapiens
KMLEVFHAI

SEQ ID NO: 43311 - protein, 9 aa, Homo Sapiens
KMMDVTVTI

SEQ ID NO: 43312 - protein, 9 aa, Homo Sapiens
KMNEKIASL

SEQ ID NO: 43313 - protein, 9 aa, Homo Sapiens
KMNNVNVVY

SEQ ID NO: 43314 - protein, 9 aa, Homo Sapiens
KMNTERILY

SEQ ID NO: 43315 - protein, 9 aa, Homo Sapiens
KMRSIQETL

SEQ ID NO: 43316 - protein, 9 aa, Homo Sapiens
KMSEIHTVL

SEQ ID NO: 43317 - protein, 9 aa, Homo Sapiens
KMSSVKLRL

SEQ ID NO: 43318 - protein, 9 aa, Homo Sapiens
KMSSVQMMF

SEQ ID NO: 43319 - protein, 9 aa, Homo Sapiens
KMVAWMIAL

SEQ ID NO: 43320 - protein, 9 aa, Homo Sapiens
KMWEEAISL

SEQ ID NO: 43321 - protein, 9 aa, Homo Sapiens
KMWENRQNL

SEQ ID NO: 43322 - protein, 9 aa, Homo Sapiens
KMWEVQTGY

SEQ ID NO: 43323 - protein, 9 aa, Homo Sapiens
KMYAWEKSF

SEQ ID NO: 43324 - protein, 9 aa, Homo Sapiens
KMYFGHSSF

SEQ ID NO: 43325 - protein, 9 aa, Homo Sapiens
KMYGYVDTL

SEQ ID NO: 43326 - protein, 9 aa, Homo Sapiens
KQALVNCNW

SEQ ID NO: 43327 - protein, 9 aa, Homo Sapiens
KQCGKSFTY

SEQ ID NO: 43328 - protein, 9 aa, Homo Sapiens
KQCGKTFSF

SEQ ID NO: 43329 - protein, 9 aa, Homo Sapiens
KQCGKTFSY

SEQ ID NO: 43330 - protein, 9 aa, Homo Sapiens
KQCGKVFTF

SEQ ID NO: 43331 - protein, 9 aa, Homo Sapiens
KQFAEILHF

SEQ ID NO: 43332 - protein, 9 aa, Homo Sapiens
KQFEGSTSF

SEQ ID NO: 43333 - protein, 9 aa, Homo Sapiens
KQFEGTVEI

SEQ ID NO: 43334 - protein, 9 aa, Homo Sapiens
KQFELALQL

SEQ ID NO: 43335 - protein, 9 aa, Homo Sapiens
KQFFGIVGF

SEQ ID NO: 43336 - protein, 9 aa, Homo Sapiens
KQFFGRHRW

SEQ ID NO: 43337 - protein, 9 aa, Homo Sapiens
KQFFLQFHF

SEQ ID NO: 43338 - protein, 9 aa, Homo Sapiens
KQFGPLVRW

SEQ ID NO: 43339 - protein, 9 aa, Homo Sapiens
KQFGVRQKW

SEQ ID NO: 43340 - protein, 9 aa, Homo Sapiens
KQFPCLFEF

SEQ ID NO: 43341 - protein, 9 aa, Homo Sapiens
KQFPTAFEF

SEQ ID NO: 43342 - protein, 9 aa, Homo Sapiens
KQFYYRDEF

SEQ ID NO: 43343 - protein, 9 aa, Homo Sapiens
KQGPKIYSF

SEQ ID NO: 43344 - protein, 9 aa, Homo Sapiens
KQHEGLATF

SEQ ID NO: 43345 - protein, 9 aa, Homo Sapiens
KQHGVNVSV

SEQ ID NO: 43346 - protein, 9 aa, Homo Sapiens
KQHYPCTTW

SEQ ID NO: 43347 - protein, 9 aa, Homo Sapiens
KQIMWFWQF

SEQ ID NO: 43348 - protein, 9 aa, Homo Sapiens
KQIRDTVSW

SEQ ID NO: 43349 - protein, 9 aa, Homo Sapiens
KQKSAFIRW

SEQ ID NO: 43350 - protein, 9 aa, Homo Sapiens
KQKVEHIEW

SEQ ID NO: 43351 - protein, 9 aa, Homo Sapiens
KQLDMQSSW

SEQ ID NO: 43352 - protein, 9 aa, Homo Sapiens
KQLEHVMHF

SEQ ID NO: 43353 - protein, 9 aa, Homo Sapiens
KQLEVVHTL

SEQ ID NO: 43354 - protein, 9 aa, Homo Sapiens
KQLTWFYTF

SEQ ID NO: 43355 - protein, 9 aa, Homo Sapiens
KQMEQISQF

SEQ ID NO: 43356 - protein, 9 aa, Homo Sapiens
KQNDVRVKF

SEQ ID NO: 43357 - protein, 9 aa, Homo Sapiens
KQNHESVQW

SEQ ID NO: 43358 - protein, 9 aa, Homo Sapiens
KQNKNRISW

SEQ ID NO: 43359 - protein, 9 aa, Homo Sapiens
KQNRPIPQW

SEQ ID NO: 43360 - protein, 9 aa, Homo Sapiens
KQQDTLIVW

SEQ ID NO: 43361 - protein, 9 aa, Homo Sapiens
KQRTVIEMF

SEQ ID NO: 43362 - protein, 9 aa, Homo Sapiens
KQVAVRYTF

SEQ ID NO: 43363 - protein, 9 aa, Homo Sapiens
KQVLWDRTF

SEQ ID NO: 43364 - protein, 9 aa, Homo Sapiens
KQWETQPGF

SEQ ID NO: 43365 - protein, 9 aa, Homo Sapiens
KQYADVEGF

SEQ ID NO: 43366 - protein, 9 aa, Homo Sapiens
KQYNYLHEF

SEQ ID NO: 43367 - protein, 9 aa, Homo Sapiens
KRISELEAL

SEQ ID NO: 43368 - protein, 9 aa, Homo Sapiens
KSAFVRTQW

SEQ ID NO: 43369 - protein, 9 aa, Homo Sapiens
KSASFREEY

SEQ ID NO: 43370 - protein, 9 aa, Homo Sapiens
KSAYNSYSW

SEQ ID NO: 43371 - protein, 9 aa, Homo Sapiens
KSCQSFISW

SEQ ID NO: 43372 - protein, 9 aa, Homo Sapiens
KSFDFHFGF

SEQ ID NO: 43373 - protein, 9 aa, Homo Sapiens
KSFDNIRNW

SEQ ID NO: 43374 - protein, 9 aa, Homo Sapiens
KSFEGLFYF

SEQ ID NO: 43375 - protein, 9 aa, Homo Sapiens
KSFENISKW

SEQ ID NO: 43376 - protein, 9 aa, Homo Sapiens
KSFFRRLSF

SEQ ID NO: 43377 - protein, 9 aa, Homo Sapiens
KSFKKKFFY

SEQ ID NO: 43378 - protein, 9 aa, Homo Sapiens
KSFKKRYTF

SEQ ID NO: 43379 - protein, 9 aa, Homo Sapiens
KSFQAIHQF

SEQ ID NO: 43380 - protein, 9 aa, Homo Sapiens
KSFTFSSSL

SEQ ID NO: 43381 - protein, 9 aa, Homo Sapiens
KSFVKVYNY

SEQ ID NO: 43382 - protein, 9 aa, Homo Sapiens
KSHTVVIGF

SEQ ID NO: 43383 - protein, 9 aa, Homo Sapiens
KSLAWHTAL

SEQ ID NO: 43384 - protein, 9 aa, Homo Sapiens
KSLGVHYVF

SEQ ID NO: 43385 - protein, 9 aa, Homo Sapiens
KSLLFVNTL

SEQ ID NO: 43386 - protein, 9 aa, Homo Sapiens
KSLLKIFAW

SEQ ID NO: 43387 - protein, 9 aa, Homo Sapiens
KSLLVVHFW

SEQ ID NO: 43388 - protein, 9 aa, Homo Sapiens
KSLLWTETF

SEQ ID NO: 43389 - protein, 9 aa, Homo Sapiens
KSQSQRFTY

SEQ ID NO: 43390 - protein, 9 aa, Homo Sapiens
KSRLSISGW

SEQ ID NO: 43391 - protein, 9 aa, Homo Sapiens
KSSLTQHSW

SEQ ID NO: 43392 - protein, 9 aa, Homo Sapiens
KSSTVLHTF

SEQ ID NO: 43393 - protein, 9 aa, Homo Sapiens
KSTQFEYAW

SEQ ID NO: 43394 - protein, 9 aa, Homo Sapiens
KSTSLTFHW

SEQ ID NO: 43395 - protein, 9 aa, Homo Sapiens
KSVYWENTL

SEQ ID NO: 43396 - protein, 9 aa, Homo Sapiens
KSWVFGVHF

SEQ ID NO: 43397 - protein, 9 aa, Homo Sapiens
KSYSKAFTL

SEQ ID NO: 43398 - protein, 9 aa, Homo Sapiens
KSYVQGVTW

SEQ ID NO: 43399 - protein, 9 aa, Homo Sapiens
KTADVTKVW

SEQ ID NO: 43400 - protein, 9 aa, Homo Sapiens
KTANITFSL

SEQ ID NO: 43401 - protein, 9 aa, Homo Sapiens
KTAPFDSRF

SEQ ID NO: 43402 - protein, 9 aa, Homo Sapiens
KTATFAISI

SEQ ID NO: 43403 - protein, 9 aa, Homo Sapiens
KTCKFVSSF

SEQ ID NO: 43404 - protein, 9 aa, Homo Sapiens
KTCSMKVHW

SEQ ID NO: 43405 - protein, 9 aa, Homo Sapiens
KTEDEHFEF

SEQ ID NO: 43406 - protein, 9 aa, Homo Sapiens
KTFARYLSF

SEQ ID NO: 43407 - protein, 9 aa, Homo Sapiens
KTFDAPPAL

SEQ ID NO: 43408 - protein, 9 aa, Homo Sapiens
KTFDHYCEY

SEQ ID NO: 43409 - protein, 9 aa, Homo Sapiens
KTFDYKIPY

SEQ ID NO: 43410 - protein, 9 aa, Homo Sapiens
KTFEFNKEL

SEQ ID NO: 43411 - protein, 9 aa, Homo Sapiens
KTFEGFCAL

SEQ ID NO: 43412 - protein, 9 aa, Homo Sapiens
KTFFSRENY

SEQ ID NO: 43413 - protein, 9 aa, Homo Sapiens
KTFGETHPF

SEQ ID NO: 43414 - protein, 9 aa, Homo Sapiens
KTFHPVPNL

SEQ ID NO: 43415 - protein, 9 aa, Homo Sapiens
KTFIFHSSI

SEQ ID NO: 43416 - protein, 9 aa, Homo Sapiens
KTFIYYQSF

SEQ ID NO: 43417 - protein, 9 aa, Homo Sapiens
KTFLFSATM

SEQ ID NO: 43418 - protein, 9 aa, Homo Sapiens
KTFNWSTNL

SEQ ID NO: 43419 - protein, 9 aa, Homo Sapiens
KTFNYPSCF

SEQ ID NO: 43420 - protein, 9 aa, Homo Sapiens
KTFNYSSNF

SEQ ID NO: 43421 - protein, 9 aa, Homo Sapiens
KTFPFHFMF

SEQ ID NO: 43422 - protein, 9 aa, Homo Sapiens
KTFPNHYSI

SEQ ID NO: 43423 - protein, 9 aa, Homo Sapiens
KTFPNRTGF

SEQ ID NO: 43424 - protein, 9 aa, Homo Sapiens
KTFPSIHLW

SEQ ID NO: 43425 - protein, 9 aa, Homo Sapiens
KTFPYQHRY

SEQ ID NO: 43426 - protein, 9 aa, Homo Sapiens
KTFQFLHQF

SEQ ID NO: 43427 - protein, 9 aa, Homo Sapiens
KTFRWRSNF

SEQ ID NO: 43428 - protein, 9 aa, Homo Sapiens
KTFSHPSSF

SEQ ID NO: 43429 - protein, 9 aa, Homo Sapiens
KTFSWSSTL

SEQ ID NO: 43430 - protein, 9 aa, Homo Sapiens
KTFSYHHCF

SEQ ID NO: 43431 - protein, 9 aa, Homo Sapiens
KTFSYSSSF

SEQ ID NO: 43432 - protein, 9 aa, Homo Sapiens
KTFTFDTVF

SEQ ID NO: 43433 - protein, 9 aa, Homo Sapiens
KTFTGHREW

SEQ ID NO: 43434 - protein, 9 aa, Homo Sapiens
KTFTVQTTW

SEQ ID NO: 43435 - protein, 9 aa, Homo Sapiens
KTFTWNSSF

SEQ ID NO: 43436 - protein, 9 aa, Homo Sapiens
KTFTWSSTF

SEQ ID NO: 43437 - protein, 9 aa, Homo Sapiens
KTFTWYSSL

SEQ ID NO: 43438 - protein, 9 aa, Homo Sapiens
KTFVGRAKL

SEQ ID NO: 43439 - protein, 9 aa, Homo Sapiens
KTFVGTPCW

SEQ ID NO: 43440 - protein, 9 aa, Homo Sapiens
KTFVQRNMF

SEQ ID NO: 43441 - protein, 9 aa, Homo Sapiens
KTFYHHTSF

SEQ ID NO: 43442 - protein, 9 aa, Homo Sapiens
KTFYWREHL

SEQ ID NO: 43443 - protein, 9 aa, Homo Sapiens
KTGLVSSTW

SEQ ID NO: 43444 - protein, 9 aa, Homo Sapiens
KTIGLREVW

SEQ ID NO: 43445 - protein, 9 aa, Homo Sapiens
KTIIITCSF

SEQ ID NO: 43446 - protein, 9 aa, Homo Sapiens
KTKEIEQVY

SEQ ID NO: 43447 - protein, 9 aa, Homo Sapiens
KTKETSVNW

SEQ ID NO: 43448 - protein, 9 aa, Homo Sapiens
KTKEVIQEW

SEQ ID NO: 43449 - protein, 9 aa, Homo Sapiens
KTKGFHTTI

SEQ ID NO: 43450 - protein, 9 aa, Homo Sapiens
KTKSVEFTF

SEQ ID NO: 43451 - protein, 9 aa, Homo Sapiens
KTLEEHSHW

SEQ ID NO: 43452 - protein, 9 aa, Homo Sapiens
KTLERSYLL

SEQ ID NO: 43453 - protein, 9 aa, Homo Sapiens
KTLLIIYSF

SEQ ID NO: 43454 - protein, 9 aa, Homo Sapiens
KTLNYTARF

SEQ ID NO: 43455 - protein, 9 aa, Homo Sapiens
KTLPSKPSW

SEQ ID NO: 43456 - protein, 9 aa, Homo Sapiens
KTLRQVEVI

SEQ ID NO: 43457 - protein, 9 aa, Homo Sapiens
KTLSPRELW

SEQ ID NO: 43458 - protein, 9 aa, Homo Sapiens
KTLTKIPSL

SEQ ID NO: 43459 - protein, 9 aa, Homo Sapiens
KTMKQQLQF

SEQ ID NO: 43460 - protein, 9 aa, Homo Sapiens
KTMTDTYLL

SEQ ID NO: 43461 - protein, 9 aa, Homo Sapiens
KTNKFIYAI

SEQ ID NO: 43462 - protein, 9 aa, Homo Sapiens
KTNPKIQSI

SEQ ID NO: 43463 - protein, 9 aa, Homo Sapiens
KTNPSVSSL

SEQ ID NO: 43464 - protein, 9 aa, Homo Sapiens
KTPPPVLIF

SEQ ID NO: 43465 - protein, 9 aa, Homo Sapiens
KTQDYVVGF

SEQ ID NO: 43466 - protein, 9 aa, Homo Sapiens
KTQEKIWEF

SEQ ID NO: 43467 - protein, 9 aa, Homo Sapiens
KTQGPRALW

SEQ ID NO: 43468 - protein, 9 aa, Homo Sapiens
KTQREKFAW

SEQ ID NO: 43469 - protein, 9 aa, Homo Sapiens
KTQSKISSF

SEQ ID NO: 43470 - protein, 9 aa, Homo Sapiens
KTRAMREMY

SEQ ID NO: 43471 - protein, 9 aa, Homo Sapiens
KTRLGRNVY

SEQ ID NO: 43472 - protein, 9 aa, Homo Sapiens
KTRLVREGF

SEQ ID NO: 43473 - protein, 9 aa, Homo Sapiens
KTRTNVPTF

SEQ ID NO: 43474 - protein, 9 aa, Homo Sapiens
KTSDRCLAW

SEQ ID NO: 43475 - protein, 9 aa, Homo Sapiens
KTSGIINKF

SEQ ID NO: 43476 - protein, 9 aa, Homo Sapiens
KTSKIELKF

SEQ ID NO: 43477 - protein, 9 aa, Homo Sapiens
KTSNIRANF

SEQ ID NO: 43478 - protein, 9 aa, Homo Sapiens
KTTECSNTF

SEQ ID NO: 43479 - protein, 9 aa, Homo Sapiens
KTTKFIKSF

SEQ ID NO: 43480 - protein, 9 aa, Homo Sapiens
KTTNVRQTY

SEQ ID NO: 43481 - protein, 9 aa, Homo Sapiens
KTVAIHTLW

SEQ ID NO: 43482 - protein, 9 aa, Homo Sapiens
KTVDKFNEW

SEQ ID NO: 43483 - protein, 9 aa, Homo Sapiens
KTVEWDWKL

SEQ ID NO: 43484 - protein, 9 aa, Homo Sapiens
KTVGLREVW

SEQ ID NO: 43485 - protein, 9 aa, Homo Sapiens
KTVPWGVAF

SEQ ID NO: 43486 - protein, 9 aa, Homo Sapiens
KTWDKVAVL

SEQ ID NO: 43487 - protein, 9 aa, Homo Sapiens
KTWKGSIGL

SEQ ID NO: 43488 - protein, 9 aa, Homo Sapiens
KTWKPFIGY

SEQ ID NO: 43489 - protein, 9 aa, Homo Sapiens
KTWNGGESL

SEQ ID NO: 43490 - protein, 9 aa, Homo Sapiens
KTYDKTVAL

SEQ ID NO: 43491 - protein, 9 aa, Homo Sapiens
KTYIPILAF

SEQ ID NO: 43492 - protein, 9 aa, Homo Sapiens
KTYKWQGLW

SEQ ID NO: 43493 - protein, 9 aa, Homo Sapiens
KTYPCKISY

SEQ ID NO: 43494 - protein, 9 aa, Homo Sapiens
KTYSLLHQW

SEQ ID NO: 43495 - protein, 9 aa, Homo Sapiens
KVADLVLML

SEQ ID NO: 43496 - protein, 9 aa, Homo Sapiens
KVAGERYVY

SEQ ID NO: 43497 - protein, 9 aa, Homo Sapiens
KVAQLRSLY

SEQ ID NO: 43498 - protein, 9 aa, Homo Sapiens
KVASALEKW

SEQ ID NO: 43499 - protein, 9 aa, Homo Sapiens
KVAVFRYLF

SEQ ID NO: 43500 - protein, 9 aa, Homo Sapiens
KVCDKAFAW

SEQ ID NO: 43501 - protein, 9 aa, Homo Sapiens
KVCDKAFVW

SEQ ID NO: 43502 - protein, 9 aa, Homo Sapiens
KVCGKAFKW

SEQ ID NO: 43503 - protein, 9 aa, Homo Sapiens
KVDQNRVRY

SEQ ID NO: 43504 - protein, 9 aa, Homo Sapiens
KVFDAIMNF

SEQ ID NO: 43505 - protein, 9 aa, Homo Sapiens
KVFELMTSL

SEQ ID NO: 43506 - protein, 9 aa, Homo Sapiens
KVFEYHNVL

SEQ ID NO: 43507 - protein, 9 aa, Homo Sapiens
KVFFPLEVF

SEQ ID NO: 43508 - protein, 9 aa, Homo Sapiens
KVFGWVHRL

SEQ ID NO: 43509 - protein, 9 aa, Homo Sapiens
KVFIFPSAL

SEQ ID NO: 43510 - protein, 9 aa, Homo Sapiens
KVFKFKHSL

SEQ ID NO: 43511 - protein, 9 aa, Homo Sapiens
KVFKLQTSL

SEQ ID NO: 43512 - protein, 9 aa, Homo Sapiens
KVFKLQTTL

SEQ ID NO: 43513 - protein, 9 aa, Homo Sapiens
KVFKNITVI

SEQ ID NO: 43514 - protein, 9 aa, Homo Sapiens
KVFKYFSSF

SEQ ID NO: 43515 - protein, 9 aa, Homo Sapiens
KVFLGRDTY

SEQ ID NO: 43516 - protein, 9 aa, Homo Sapiens
KVFNSSHSF

SEQ ID NO: 43517 - protein, 9 aa, Homo Sapiens
KVFNWFSTL

SEQ ID NO: 43518 - protein, 9 aa, Homo Sapiens
KVFPQSSSW

SEQ ID NO: 43519 - protein, 9 aa, Homo Sapiens
KVFRVENPF

SEQ ID NO: 43520 - protein, 9 aa, Homo Sapiens
KVFSDRSAF

SEQ ID NO: 43521 - protein, 9 aa, Homo Sapiens
KVFVVGESY

SEQ ID NO: 43522 - protein, 9 aa, Homo Sapiens
KVGEARALY

SEQ ID NO: 43523 - protein, 9 aa, Homo Sapiens
KVGNFKFIY

SEQ ID NO: 43524 - protein, 9 aa, Homo Sapiens
KVHNVSFAF

SEQ ID NO: 43525 - protein, 9 aa, Homo Sapiens
KVINAAHSF

SEQ ID NO: 43526 - protein, 9 aa, Homo Sapiens
KVINETWAW

SEQ ID NO: 43527 - protein, 9 aa, Homo Sapiens
KVINWQTSL

SEQ ID NO: 43528 - protein, 9 aa, Homo Sapiens
KVISNLSVW

SEQ ID NO: 43529 - protein, 9 aa, Homo Sapiens
KVKKTIPSW

SEQ ID NO: 43530 - protein, 9 aa, Homo Sapiens
KVKWFYNEY

SEQ ID NO: 43531 - protein, 9 aa, Homo Sapiens
KVLALVFGF

SEQ ID NO: 43532 - protein, 9 aa, Homo Sapiens
KVLDKMKSF

SEQ ID NO: 43533 - protein, 9 aa, Homo Sapiens
KVLDVSNSF

SEQ ID NO: 43534 - protein, 9 aa, Homo Sapiens
KVLGRSFFW

SEQ ID NO: 43535 - protein, 9 aa, Homo Sapiens
KVLNLIQSW

SEQ ID NO: 43536 - protein, 9 aa, Homo Sapiens
KVLPIIQRW

SEQ ID NO: 43537 - protein, 9 aa, Homo Sapiens
KVLQERENY

SEQ ID NO: 43538 - protein, 9 aa, Homo Sapiens
KVMNWKETL

SEQ ID NO: 43539 - protein, 9 aa, Homo Sapiens
KVMPQNHSF

SEQ ID NO: 43540 - protein, 9 aa, Homo Sapiens
KVMRWFQAM

SEQ ID NO: 43541 - protein, 9 aa, Homo Sapiens
KVMSQRHMI

SEQ ID NO: 43542 - protein, 9 aa, Homo Sapiens
KVMYYTEVI

SEQ ID NO: 43543 - protein, 9 aa, Homo Sapiens
KVNAMTFTF

SEQ ID NO: 43544 - protein, 9 aa, Homo Sapiens
KVNESSLNW

SEQ ID NO: 43545 - protein, 9 aa, Homo Sapiens
KVNKYGDTW

SEQ ID NO: 43546 - protein, 9 aa, Homo Sapiens
KVNLKYDSW

SEQ ID NO: 43547 - protein, 9 aa, Homo Sapiens
KVNQFRQLY

SEQ ID NO: 43548 - protein, 9 aa, Homo Sapiens
KVNTKPCSL

SEQ ID NO: 43549 - protein, 9 aa, Homo Sapiens
KVNVIDNTW

SEQ ID NO: 43550 - protein, 9 aa, Homo Sapiens
KVPPAINQF

SEQ ID NO: 43551 - protein, 9 aa, Homo Sapiens
KVQDITMQW

SEQ ID NO: 43552 - protein, 9 aa, Homo Sapiens
KVQEAINSL

SEQ ID NO: 43553 - protein, 9 aa, Homo Sapiens
KVQEAYNTW

SEQ ID NO: 43554 - protein, 9 aa, Homo Sapiens
KVQGKRFVY

SEQ ID NO: 43555 - protein, 9 aa, Homo Sapiens
KVQGTVHCF

SEQ ID NO: 43556 - protein, 9 aa, Homo Sapiens
KVQVLSFLW

SEQ ID NO: 43557 - protein, 9 aa, Homo Sapiens
KVRALREAF

SEQ ID NO: 43558 - protein, 9 aa, Homo Sapiens
KVSEARECF

SEQ ID NO: 43559 - protein, 9 aa, Homo Sapiens
KVSGVCKRW

SEQ ID NO: 43560 - protein, 9 aa, Homo Sapiens
KVSTSRQTW

SEQ ID NO: 43561 - protein, 9 aa, Homo Sapiens
KVVDRIYSL

SEQ ID NO: 43562 - protein, 9 aa, Homo Sapiens
KVVKFSYMW

SEQ ID NO: 43563 - protein, 9 aa, Homo Sapiens
KVWAPVQGL

SEQ ID NO: 43564 - protein, 9 aa, Homo Sapiens
KVWDDQAVW

SEQ ID NO: 43565 - protein, 9 aa, Homo Sapiens
KVWDLRKNY

SEQ ID NO: 43566 - protein, 9 aa, Homo Sapiens
KVWGEVGRW

SEQ ID NO: 43567 - protein, 9 aa, Homo Sapiens
KVWKAPSSW

SEQ ID NO: 43568 - protein, 9 aa, Homo Sapiens
KVWMSKYGW

SEQ ID NO: 43569 - protein, 9 aa, Homo Sapiens
KVWNNLIGF

SEQ ID NO: 43570 - protein, 9 aa, Homo Sapiens
KVWYNVENW

SEQ ID NO: 43571 - protein, 9 aa, Homo Sapiens
KVWYPMTGW

SEQ ID NO: 43572 - protein, 9 aa, Homo Sapiens
KVYEHTSRF

SEQ ID NO: 43573 - protein, 9 aa, Homo Sapiens
KVYEYDTVI

SEQ ID NO: 43574 - protein, 9 aa, Homo Sapiens
KVYMFKCVW

SEQ ID NO: 43575 - protein, 9 aa, Homo Sapiens
LEREKLLEF

SEQ ID NO: 43576 - protein, 9 aa, Homo Sapiens
LERLSKIAI

SEQ ID NO: 43577 - protein, 9 aa, Homo Sapiens
LISKIREEY

SEQ ID NO: 43578 - protein, 9 aa, Homo Sapiens
LIWKNQNSW

SEQ ID NO: 43579 - protein, 9 aa, Homo Sapiens
LKERQRSSL

SEQ ID NO: 43580 - protein, 9 aa, Homo Sapiens
LLAPERTRD

SEQ ID NO: 43581 - protein, 9 aa, Homo Sapiens
LLFPLRYSF

SEQ ID NO: 43582 - protein, 9 aa, Homo Sapiens
LLGPRVLSW

SEQ ID NO: 43583 - protein, 9 aa, Homo Sapiens
LLNKYRNQY

SEQ ID NO: 43584 - protein, 9 aa, Homo Sapiens
LLNPVIYTW

SEQ ID NO: 43585 - protein, 9 aa, Homo Sapiens
LMSCTRSVY

SEQ ID NO: 43586 - protein, 9 aa, Homo Sapiens
LPSLFLNSL

SEQ ID NO: 43587 - protein, 9 aa, Homo Sapiens
LQAKVRESY

SEQ ID NO: 43588 - protein, 9 aa, Homo Sapiens
LQHPYINVW

SEQ ID NO: 43589 - protein, 9 aa, Homo Sapiens
LQIDNARLA

SEQ ID NO: 43590 - protein, 9 aa, Homo Sapiens
LQNTHVYSW

SEQ ID NO: 43591 - protein, 9 aa, Homo Sapiens
LTLLWTHTL

SEQ ID NO: 43592 - protein, 9 aa, Homo Sapiens
LTNSIRKQW

SEQ ID NO: 43593 - protein, 9 aa, Homo Sapiens
LTYRRRLSY

SEQ ID NO: 43594 - protein, 9 aa, Homo Sapiens
LVNQHRDSY

SEQ ID NO: 43595 - protein, 9 aa, Homo Sapiens
MLFNNREKY

SEQ ID NO: 43596 - protein, 9 aa, Homo Sapiens
MLFPSRTTW

SEQ ID NO: 43597 - protein, 9 aa, Homo Sapiens
MLYPLSHGF

SEQ ID NO: 43598 - protein, 9 aa, Homo Sapiens
MMFAVHCTW

SEQ ID NO: 43599 - protein, 9 aa, Homo Sapiens
MMNGGHYTY

SEQ ID NO: 43600 - protein, 9 aa, Homo Sapiens
MMWNNHYIL

SEQ ID NO: 43601 - protein, 9 aa, Homo Sapiens
MMYEKPERW

SEQ ID NO: 43602 - protein, 9 aa, Homo Sapiens
MMYSGELKF

SEQ ID NO: 43603 - protein, 9 aa, Homo Sapiens
MQAPSIWQW

SEQ ID NO: 43604 - protein, 9 aa, Homo Sapiens
MQTPVRMEW

SEQ ID NO: 43605 - protein, 9 aa, Homo Sapiens
MQYDRTCEW

SEQ ID NO: 43606 - protein, 9 aa, Homo Sapiens
MSLKWMSVF

SEQ ID NO: 43607 - protein, 9 aa, Homo Sapiens
MSNKHGWTW

SEQ ID NO: 43608 - protein, 9 aa, Homo Sapiens
MTLKDIYTW

SEQ ID NO: 43609 - protein, 9 aa, Homo Sapiens
MTNGFHMTW

SEQ ID NO: 43610 - protein, 9 aa, Homo Sapiens
NICAKRFMW

SEQ ID NO: 43611 - protein, 9 aa, Homo Sapiens
NIFRWETTI

SEQ ID NO: 43612 - protein, 9 aa, Homo Sapiens
QIAEFKEAF

SEQ ID NO: 43613 - protein, 9 aa, Homo Sapiens
QIFHGLFAW

SEQ ID NO: 43614 - protein, 9 aa, Homo Sapiens
QIFTHRSNY

SEQ ID NO: 43615 - protein, 9 aa, Homo Sapiens
QIHKWSHTY

SEQ ID NO: 43616 - protein, 9 aa, Homo Sapiens
QILKWIEQW

SEQ ID NO: 43617 - protein, 9 aa, Homo Sapiens
QINAKVAEW

SEQ ID NO: 43618 - protein, 9 aa, Homo Sapiens
QIRKDINSW

SEQ ID NO: 43619 - protein, 9 aa, Homo Sapiens
QLFCWIDKW

SEQ ID NO: 43620 - protein, 9 aa, Homo Sapiens
QLFGGRFNF

SEQ ID NO: 43621 - protein, 9 aa, Homo Sapiens
QLFSPRCAY

SEQ ID NO: 43622 - protein, 9 aa, Homo Sapiens
QLMPWKSMF

SEQ ID NO: 43623 - protein, 9 aa, Homo Sapiens
QLNCERGTW

SEQ ID NO: 43624 - protein, 9 aa, Homo Sapiens
QLNKIRDSY

SEQ ID NO: 43625 - protein, 9 aa, Homo Sapiens
QLNSRIESW

SEQ ID NO: 43626 - protein, 9 aa, Homo Sapiens
QLQSHIEGW

SEQ ID NO: 43627 - protein, 9 aa, Homo Sapiens
QLYKMRNGY

SEQ ID NO: 43628 - protein, 9 aa, Homo Sapiens
QMAGLRDTY

SEQ ID NO: 43629 - protein, 9 aa, Homo Sapiens
QMNEKKPTW

SEQ ID NO: 43630 - protein, 9 aa, Homo Sapiens
QQFSSHYSF

SEQ ID NO: 43631 - protein, 9 aa, Homo Sapiens
QSIVWVHAF

SEQ ID NO: 43632 - protein, 9 aa, Homo Sapiens
QTYYRIFTW

SEQ ID NO: 43633 - protein, 9 aa, Homo Sapiens
QVAPKTLPW

SEQ ID NO: 43634 - protein, 9 aa, Homo Sapiens
QVLKKCWAF

SEQ ID NO: 43635 - protein, 9 aa, Homo Sapiens
QVNHARNIW

SEQ ID NO: 43636 - protein, 9 aa, Homo Sapiens
RAAFWNHVL

SEQ ID NO: 43637 - protein, 9 aa, Homo Sapiens
RAFNWSSTL

SEQ ID NO: 43638 - protein, 9 aa, Homo Sapiens
RAGAPRCTY

SEQ ID NO: 43639 - protein, 9 aa, Homo Sapiens
RALFIREKY

SEQ ID NO: 43640 - protein, 9 aa, Homo Sapiens
RALKFPWVW

SEQ ID NO: 43641 - protein, 9 aa, Homo Sapiens
RALVKRVTW

SEQ ID NO: 43642 - protein, 9 aa, Homo Sapiens
RAWDGMKEW

SEQ ID NO: 43643 - protein, 9 aa, Homo Sapiens
RAYPFHWAW

SEQ ID NO: 43644 - protein, 9 aa, Homo Sapiens
RAYPFYWAW

SEQ ID NO: 43645 - protein, 9 aa, Homo Sapiens
RGNIKRYGW

SEQ ID NO: 43646 - protein, 9 aa, Homo Sapiens
RGVPWNFTF

SEQ ID NO: 43647 - protein, 9 aa, Homo Sapiens
RGWDGFVEF

SEQ ID NO: 43648 - protein, 9 aa, Homo Sapiens
RIAAWMATY

SEQ ID NO: 43649 - protein, 9 aa, Homo Sapiens
RIADLISSF

SEQ ID NO: 43650 - protein, 9 aa, Homo Sapiens
RIAEFAFEY

SEQ ID NO: 43651 - protein, 9 aa, Homo Sapiens
RIAEYAFKL

SEQ ID NO: 43652 - protein, 9 aa, Homo Sapiens
RIAHIPLYF

SEQ ID NO: 43653 - protein, 9 aa, Homo Sapiens
RIAQLRFLL

SEQ ID NO: 43654 - protein, 9 aa, Homo Sapiens
RIASWLPSF

SEQ ID NO: 43655 - protein, 9 aa, Homo Sapiens
RICSKAHSW

SEQ ID NO: 43656 - protein, 9 aa, Homo Sapiens
RIDRKVNSW

SEQ ID NO: 43657 - protein, 9 aa, Homo Sapiens
RIFAHKQNY

SEQ ID NO: 43658 - protein, 9 aa, Homo Sapiens
RIFANTESY

SEQ ID NO: 43659 - protein, 9 aa, Homo Sapiens
RIFEKMFAM

SEQ ID NO: 43660 - protein, 9 aa, Homo Sapiens
RIGEGRACW

SEQ ID NO: 43661 - protein, 9 aa, Homo Sapiens
RIHCVAFVF

SEQ ID NO: 43662 - protein, 9 aa, Homo Sapiens
RIHCVAYVL

SEQ ID NO: 43663 - protein, 9 aa, Homo Sapiens
RIHENGYNF

SEQ ID NO: 43664 - protein, 9 aa, Homo Sapiens
RIHHKNWTL

SEQ ID NO: 43665 - protein, 9 aa, Homo Sapiens
RIHIRENSY

SEQ ID NO: 43666 - protein, 9 aa, Homo Sapiens
RIHKGWKEW

SEQ ID NO: 43667 - protein, 9 aa, Homo Sapiens
RIIAKLAAW

SEQ ID NO: 43668 - protein, 9 aa, Homo Sapiens
RIIPWIQQL

SEQ ID NO: 43669 - protein, 9 aa, Homo Sapiens
RIIYIREQW

SEQ ID NO: 43670 - protein, 9 aa, Homo Sapiens
RIKDIRMMY

SEQ ID NO: 43671 - protein, 9 aa, Homo Sapiens
RIKGKLFTW

SEQ ID NO: 43672 - protein, 9 aa, Homo Sapiens
RILAVREIY

SEQ ID NO: 43673 - protein, 9 aa, Homo Sapiens
RILEVRNVF

SEQ ID NO: 43674 - protein, 9 aa, Homo Sapiens
RILKARLEY

SEQ ID NO: 43675 - protein, 9 aa, Homo Sapiens
RILKFGYQF

SEQ ID NO: 43676 - protein, 9 aa, Homo Sapiens
RILKIVTGF

SEQ ID NO: 43677 - protein, 9 aa, Homo Sapiens
RILKVLWCF

SEQ ID NO: 43678 - protein, 9 aa, Homo Sapiens
RILNKLTKW

SEQ ID NO: 43679 - protein, 9 aa, Homo Sapiens
RILVEKRCW

SEQ ID NO: 43680 - protein, 9 aa, Homo Sapiens
RIMQFCHTL

SEQ ID NO: 43681 - protein, 9 aa, Homo Sapiens
RIMSETYML

SEQ ID NO: 43682 - protein, 9 aa, Homo Sapiens
RINPQTTEF

SEQ ID NO: 43683 - protein, 9 aa, Homo Sapiens
RIQEKVDSI

SEQ ID NO: 43684 - protein, 9 aa, Homo Sapiens
RISDFHETY

SEQ ID NO: 43685 - protein, 9 aa, Homo Sapiens
RISLPLPNF

SEQ ID NO: 43686 - protein, 9 aa, Homo Sapiens
RISRVCHRW

SEQ ID NO: 43687 - protein, 9 aa, Homo Sapiens
RITAVRRVY

SEQ ID NO: 43688 - protein, 9 aa, Homo Sapiens
RITEFCHRF

SEQ ID NO: 43689 - protein, 9 aa, Homo Sapiens
RITNFTTSW

SEQ ID NO: 43690 - protein, 9 aa, Homo Sapiens
RITVFLSTW

SEQ ID NO: 43691 - protein, 9 aa, Homo Sapiens
RIVEPYIAW

SEQ ID NO: 43692 - protein, 9 aa, Homo Sapiens
RIWNNVTRW

SEQ ID NO: 43693 - protein, 9 aa, Homo Sapiens
RIWRYNQEL

SEQ ID NO: 43694 - protein, 9 aa, Homo Sapiens
RIWTKKRSF

SEQ ID NO: 43695 - protein, 9 aa, Homo Sapiens
RIYKYIHKV

SEQ ID NO: 43696 - protein, 9 aa, Homo Sapiens
RIYNFAHRF

SEQ ID NO: 43697 - protein, 9 aa, Homo Sapiens
RLAEISDVW

SEQ ID NO: 43698 - protein, 9 aa, Homo Sapiens
RLAKKLLGW

SEQ ID NO: 43699 - protein, 9 aa, Homo Sapiens
RLAKWYMQF

SEQ ID NO: 43700 - protein, 9 aa, Homo Sapiens
RLALYQTAI

SEQ ID NO: 43701 - protein, 9 aa, Homo Sapiens
RLANTAPAW

SEQ ID NO: 43702 - protein, 9 aa, Homo Sapiens
RLAQERKAW

SEQ ID NO: 43703 - protein, 9 aa, Homo Sapiens
RLAQFVEHW

SEQ ID NO: 43704 - protein, 9 aa, Homo Sapiens
RLAQICSSI

SEQ ID NO: 43705 - protein, 9 aa, Homo Sapiens
RLASFHRVW

SEQ ID NO: 43706 - protein, 9 aa, Homo Sapiens
RLASLGLKF

SEQ ID NO: 43707 - protein, 9 aa, Homo Sapiens
RLAVVKFTM

SEQ ID NO: 43708 - protein, 9 aa, Homo Sapiens
RLCPIPISW

SEQ ID NO: 43709 - protein, 9 aa, Homo Sapiens
RLDVGNFSW

SEQ ID NO: 43710 - protein, 9 aa, Homo Sapiens
RLFAKLNAF

SEQ ID NO: 43711 - protein, 9 aa, Homo Sapiens
RLFATRHKF

SEQ ID NO: 43712 - protein, 9 aa, Homo Sapiens
RLFEKGMKF

SEQ ID NO: 43713 - protein, 9 aa, Homo Sapiens
RLFEKMQAY

SEQ ID NO: 43714 - protein, 9 aa, Homo Sapiens
RLFEVPHEL

SEQ ID NO: 43715 - protein, 9 aa, Homo Sapiens
RLFFHCSQY

SEQ ID NO: 43716 - protein, 9 aa, Homo Sapiens
RLFGATRTW

SEQ ID NO: 43717 - protein, 9 aa, Homo Sapiens
RLFGAVVRW

SEQ ID NO: 43718 - protein, 9 aa, Homo Sapiens
RLFHRIPSF

SEQ ID NO: 43719 - protein, 9 aa, Homo Sapiens
RLFKFPFLW

SEQ ID NO: 43720 - protein, 9 aa, Homo Sapiens
RLFLWNAVL

SEQ ID NO: 43721 - protein, 9 aa, Homo Sapiens
RLFLYYHTL

SEQ ID NO: 43722 - protein, 9 aa, Homo Sapiens
RLFMHHVSL

SEQ ID NO: 43723 - protein, 9 aa, Homo Sapiens
RLFNAVVRW

SEQ ID NO: 43724 - protein, 9 aa, Homo Sapiens
RLFNHTACL

SEQ ID NO: 43725 - protein, 9 aa, Homo Sapiens
RLFPNTMLF

SEQ ID NO: 43726 - protein, 9 aa, Homo Sapiens
RLFPWGNKL

SEQ ID NO: 43727 - protein, 9 aa, Homo Sapiens
RLFPWKLHI

SEQ ID NO: 43728 - protein, 9 aa, Homo Sapiens
RLFRFSSVI

SEQ ID NO: 43729 - protein, 9 aa, Homo Sapiens
RLFRGLDSW

SEQ ID NO: 43730 - protein, 9 aa, Homo Sapiens
RLFSRLYTY

SEQ ID NO: 43731 - protein, 9 aa, Homo Sapiens
RLFVGEPVW

SEQ ID NO: 43732 - protein, 9 aa, Homo Sapiens
RLGAVRSHY

SEQ ID NO: 43733 - protein, 9 aa, Homo Sapiens
RLGCFNLTI

SEQ ID NO: 43734 - protein, 9 aa, Homo Sapiens
RLGCNRQSW

SEQ ID NO: 43735 - protein, 9 aa, Homo Sapiens
RLGLRNTEW

SEQ ID NO: 43736 - protein, 9 aa, Homo Sapiens
RLGQIYQSW

SEQ ID NO: 43737 - protein, 9 aa, Homo Sapiens
RLHADVYTF

SEQ ID NO: 43738 - protein, 9 aa, Homo Sapiens
RLHCESESF

SEQ ID NO: 43739 - protein, 9 aa, Homo Sapiens
RLHDVLMEL

SEQ ID NO: 43740 - protein, 9 aa, Homo Sapiens
RLHEKVNII

SEQ ID NO: 43741 - protein, 9 aa, Homo Sapiens
RLHKPHHIW

SEQ ID NO: 43742 - protein, 9 aa, Homo Sapiens
RLHNDRVYY

SEQ ID NO: 43743 - protein, 9 aa, Homo Sapiens
RLHNTIVEI

SEQ ID NO: 43744 - protein, 9 aa, Homo Sapiens
RLHSPQTHW

SEQ ID NO: 43745 - protein, 9 aa, Homo Sapiens
RLIDKSFSI

SEQ ID NO: 43746 - protein, 9 aa, Homo Sapiens
RLIEETISI

SEQ ID NO: 43747 - protein, 9 aa, Homo Sapiens
RLIKFIYNI

SEQ ID NO: 43748 - protein, 9 aa, Homo Sapiens
RLIPERTVW

SEQ ID NO: 43749 - protein, 9 aa, Homo Sapiens
RLIRNIYIF

SEQ ID NO: 43750 - protein, 9 aa, Homo Sapiens
RLKAKEEEW

SEQ ID NO: 43751 - protein, 9 aa, Homo Sapiens
RLKALNATF

SEQ ID NO: 43752 - protein, 9 aa, Homo Sapiens
RLKDFRDAY

SEQ ID NO: 43753 - protein, 9 aa, Homo Sapiens
RLKDIKAQW

SEQ ID NO: 43754 - protein, 9 aa, Homo Sapiens
RLKEHIDSF

SEQ ID NO: 43755 - protein, 9 aa, Homo Sapiens
RLKELCHQW

SEQ ID NO: 43756 - protein, 9 aa, Homo Sapiens
RLKELLAEW

SEQ ID NO: 43757 - protein, 9 aa, Homo Sapiens
RLKENTFTI

SEQ ID NO: 43758 - protein, 9 aa, Homo Sapiens
RLKEQQFVI

SEQ ID NO: 43759 - protein, 9 aa, Homo Sapiens
RLKIYEEAW

SEQ ID NO: 43760 - protein, 9 aa, Homo Sapiens
RLKMKEEEW

SEQ ID NO: 43761 - protein, 9 aa, Homo Sapiens
RLKSEKPTW

SEQ ID NO: 43762 - protein, 9 aa, Homo Sapiens
RLKTMTDTY

SEQ ID NO: 43763 - protein, 9 aa, Homo Sapiens
RLKWFAICF

SEQ ID NO: 43764 - protein, 9 aa, Homo Sapiens
RLLDCVVRW

SEQ ID NO: 43765 - protein, 9 aa, Homo Sapiens
RLLDLHQSW

SEQ ID NO: 43766 - protein, 9 aa, Homo Sapiens
RLLDRLPSF

SEQ ID NO: 43767 - protein, 9 aa, Homo Sapiens
RLLDSVRAI

SEQ ID NO: 43768 - protein, 9 aa, Homo Sapiens
RLLDTTITF

SEQ ID NO: 43769 - protein, 9 aa, Homo Sapiens
RLLDWFRSL

SEQ ID NO: 43770 - protein, 9 aa, Homo Sapiens
RLLDYVVNI

SEQ ID NO: 43771 - protein, 9 aa, Homo Sapiens
RLLEFCSVF

SEQ ID NO: 43772 - protein, 9 aa, Homo Sapiens
RLLELIEGF

SEQ ID NO: 43773 - protein, 9 aa, Homo Sapiens
RLLEVTNTI

SEQ ID NO: 43774 - protein, 9 aa, Homo Sapiens
RLLGVVSSW

SEQ ID NO: 43775 - protein, 9 aa, Homo Sapiens
RLLGWWQVL

SEQ ID NO: 43776 - protein, 9 aa, Homo Sapiens
RLLGYVATL

SEQ ID NO: 43777 - protein, 9 aa, Homo Sapiens
RLLKSLPNW

SEQ ID NO: 43778 - protein, 9 aa, Homo Sapiens
RLLKYLFTL

SEQ ID NO: 43779 - protein, 9 aa, Homo Sapiens
RLLPESWGF

SEQ ID NO: 43780 - protein, 9 aa, Homo Sapiens
RLLSIKEAF

SEQ ID NO: 43781 - protein, 9 aa, Homo Sapiens
RLLSWSDNW

SEQ ID NO: 43782 - protein, 9 aa, Homo Sapiens
RLLTDRASY

SEQ ID NO: 43783 - protein, 9 aa, Homo Sapiens
RLMEICESL

SEQ ID NO: 43784 - protein, 9 aa, Homo Sapiens
RLMEQASCW

SEQ ID NO: 43785 - protein, 9 aa, Homo Sapiens
RLMGQHRAW

SEQ ID NO: 43786 - protein, 9 aa, Homo Sapiens
RLMKQISSF

SEQ ID NO: 43787 - protein, 9 aa, Homo Sapiens
RLMQCVSSF

SEQ ID NO: 43788 - protein, 9 aa, Homo Sapiens
RLMRAIFEI

SEQ ID NO: 43789 - protein, 9 aa, Homo Sapiens
RLMSARARY

SEQ ID NO: 43790 - protein, 9 aa, Homo Sapiens
RLMYPPHKF

SEQ ID NO: 43791 - protein, 9 aa, Homo Sapiens
RLNDRIEMW

SEQ ID NO: 43792 - protein, 9 aa, Homo Sapiens
RLNDYIFSF

SEQ ID NO: 43793 - protein, 9 aa, Homo Sapiens
RLNEFMAGF

SEQ ID NO: 43794 - protein, 9 aa, Homo Sapiens
RLNEKNYEL

SEQ ID NO: 43795 - protein, 9 aa, Homo Sapiens
RLNKVISEL

SEQ ID NO: 43796 - protein, 9 aa, Homo Sapiens
RLNNKINSY

SEQ ID NO: 43797 - protein, 9 aa, Homo Sapiens
RLNTQITQW

SEQ ID NO: 43798 - protein, 9 aa, Homo Sapiens
RLPEEWSQW

SEQ ID NO: 43799 - protein, 9 aa, Homo Sapiens
RLPEPLPSW

SEQ ID NO: 43800 - protein, 9 aa, Homo Sapiens
RLQDTTFSF

SEQ ID NO: 43801 - protein, 9 aa, Homo Sapiens
RLQDWKCLW

SEQ ID NO: 43802 - protein, 9 aa, Homo Sapiens
RLQEASQTI

SEQ ID NO: 43803 - protein, 9 aa, Homo Sapiens
RLQELCHGW

SEQ ID NO: 43804 - protein, 9 aa, Homo Sapiens
RLQELCYQW

SEQ ID NO: 43805 - protein, 9 aa, Homo Sapiens
RLQHLAESW

SEQ ID NO: 43806 - protein, 9 aa, Homo Sapiens
RLQKDISEW

SEQ ID NO: 43807 - protein, 9 aa, Homo Sapiens
RLQLEKAAW

SEQ ID NO: 43808 - protein, 9 aa, Homo Sapiens
RLQNNRKEW

SEQ ID NO: 43809 - protein, 9 aa, Homo Sapiens
RLQSWEETW

SEQ ID NO: 43810 - protein, 9 aa, Homo Sapiens
RLRDQIKTW

SEQ ID NO: 43811 - protein, 9 aa, Homo Sapiens
RLREESAEW

SEQ ID NO: 43812 - protein, 9 aa, Homo Sapiens
RLREFQESF

SEQ ID NO: 43813 - protein, 9 aa, Homo Sapiens
RLREFWMRY

SEQ ID NO: 43814 - protein, 9 aa, Homo Sapiens
RLRQERESL

SEQ ID NO: 43815 - protein, 9 aa, Homo Sapiens
RLSEVQASL

SEQ ID NO: 43816 - protein, 9 aa, Homo Sapiens
RLSIHVVTW

SEQ ID NO: 43817 - protein, 9 aa, Homo Sapiens
RLSSQHRQW

SEQ ID NO: 43818 - protein, 9 aa, Homo Sapiens
RLSSVSVTY

SEQ ID NO: 43819 - protein, 9 aa, Homo Sapiens
RLTATSASW

SEQ ID NO: 43820 - protein, 9 aa, Homo Sapiens
RLTATSTSW

SEQ ID NO: 43821 - protein, 9 aa, Homo Sapiens
RLTKPIVCW

SEQ ID NO: 43822 - protein, 9 aa, Homo Sapiens
RLTTSTSTF

SEQ ID NO: 43823 - protein, 9 aa, Homo Sapiens
RLVAIRTEY

SEQ ID NO: 43824 - protein, 9 aa, Homo Sapiens
RLVDDRWLW

SEQ ID NO: 43825 - protein, 9 aa, Homo Sapiens
RLVEERYSW

SEQ ID NO: 43826 - protein, 9 aa, Homo Sapiens
RLVNRIESW

SEQ ID NO: 43827 - protein, 9 aa, Homo Sapiens
RLVNWSCTL

SEQ ID NO: 43828 - protein, 9 aa, Homo Sapiens
RLVSWVNLI

SEQ ID NO: 43829 - protein, 9 aa, Homo Sapiens
RLWAGAGRW

SEQ ID NO: 43830 - protein, 9 aa, Homo Sapiens
RLWAVAASY

SEQ ID NO: 43831 - protein, 9 aa, Homo Sapiens
RLWEGAISI

SEQ ID NO: 43832 - protein, 9 aa, Homo Sapiens
RLWEQLVHF

SEQ ID NO: 43833 - protein, 9 aa, Homo Sapiens
RLWGEPVNL

SEQ ID NO: 43834 - protein, 9 aa, Homo Sapiens
RLWKFFWEM

SEQ ID NO: 43835 - protein, 9 aa, Homo Sapiens
RLYDVVAVF

SEQ ID NO: 43836 - protein, 9 aa, Homo Sapiens
RLYEAMCEF

SEQ ID NO: 43837 - protein, 9 aa, Homo Sapiens
RLYECVLEF

SEQ ID NO: 43838 - protein, 9 aa, Homo Sapiens
RLYGNPNTL

SEQ ID NO: 43839 - protein, 9 aa, Homo Sapiens
RLYKQTSLW

SEQ ID NO: 43840 - protein, 9 aa, Homo Sapiens
RLYKYDHNF

SEQ ID NO: 43841 - protein, 9 aa, Homo Sapiens
RLYPSREEF

SEQ ID NO: 43842 - protein, 9 aa, Homo Sapiens
RLYQVEYAF

SEQ ID NO: 43843 - protein, 9 aa, Homo Sapiens
RLYSKQITI

SEQ ID NO: 43844 - protein, 9 aa, Homo Sapiens
RLYSSRFWW

SEQ ID NO: 43845 - protein, 9 aa, Homo Sapiens
RMAFLRKVY

SEQ ID NO: 43846 - protein, 9 aa, Homo Sapiens
RMALDRRNY

SEQ ID NO: 43847 - protein, 9 aa, Homo Sapiens
RMAPPQNQW

SEQ ID NO: 43848 - protein, 9 aa, Homo Sapiens
RMEEEQHHW

SEQ ID NO: 43849 - protein, 9 aa, Homo Sapiens
RMFAPTKTW

SEQ ID NO: 43850 - protein, 9 aa, Homo Sapiens
RMFDMGFEY

SEQ ID NO: 43851 - protein, 9 aa, Homo Sapiens
RMFHIRAVI

SEQ ID NO: 43852 - protein, 9 aa, Homo Sapiens
RMFLENETW

SEQ ID NO: 43853 - protein, 9 aa, Homo Sapiens
RMFLVYVSY

SEQ ID NO: 43854 - protein, 9 aa, Homo Sapiens
RMFNRTYKL

SEQ ID NO: 43855 - protein, 9 aa, Homo Sapiens
RMFSDPSSF

SEQ ID NO: 43856 - protein, 9 aa, Homo Sapiens
RMHQAIERF

SEQ ID NO: 43857 - protein, 9 aa, Homo Sapiens
RMHQAIMRW

SEQ ID NO: 43858 - protein, 9 aa, Homo Sapiens
RMILSTISW

SEQ ID NO: 43859 - protein, 9 aa, Homo Sapiens
RMKVAWWRW

SEQ ID NO: 43860 - protein, 9 aa, Homo Sapiens
RMLEPLPCW

SEQ ID NO: 43861 - protein, 9 aa, Homo Sapiens
RMMQTILHF

SEQ ID NO: 43862 - protein, 9 aa, Homo Sapiens
RMNALFVQF

SEQ ID NO: 43863 - protein, 9 aa, Homo Sapiens
RMNCVLATY

SEQ ID NO: 43864 - protein, 9 aa, Homo Sapiens
RMNEVISLW

SEQ ID NO: 43865 - protein, 9 aa, Homo Sapiens
RMNPNSPSI

SEQ ID NO: 43866 - protein, 9 aa, Homo Sapiens
RMNSKIMSL

SEQ ID NO: 43867 - protein, 9 aa, Homo Sapiens
RMSMKTSSW

SEQ ID NO: 43868 - protein, 9 aa, Homo Sapiens
RMWAAIQSW

SEQ ID NO: 43869 - protein, 9 aa, Homo Sapiens
RMWKTLTFF

SEQ ID NO: 43870 - protein, 9 aa, Homo Sapiens
RMWSYKEQM

SEQ ID NO: 43871 - protein, 9 aa, Homo Sapiens
RMYEKALQI

SEQ ID NO: 43872 - protein, 9 aa, Homo Sapiens
RMYPLKPTW

SEQ ID NO: 43873 - protein, 9 aa, Homo Sapiens
RNLPWLFTF

SEQ ID NO: 43874 - protein, 9 aa, Homo Sapiens
RQADKVWRL

SEQ ID NO: 43875 - protein, 9 aa, Homo Sapiens
RQALASVSW

SEQ ID NO: 43876 - protein, 9 aa, Homo Sapiens
RQFEGLMRF

SEQ ID NO: 43877 - protein, 9 aa, Homo Sapiens
RQFLWSFRL

SEQ ID NO: 43878 - protein, 9 aa, Homo Sapiens
RQFPTAFEF

SEQ ID NO: 43879 - protein, 9 aa, Homo Sapiens
RQFPVTVHF

SEQ ID NO: 43880 - protein, 9 aa, Homo Sapiens
RQFQEHFQF

SEQ ID NO: 43881 - protein, 9 aa, Homo Sapiens
RQFVKRIGY

SEQ ID NO: 43882 - protein, 9 aa, Homo Sapiens
RQITQVYGF

SEQ ID NO: 43883 - protein, 9 aa, Homo Sapiens
RQKLVRNIY

SEQ ID NO: 43884 - protein, 9 aa, Homo Sapiens
RQLAKIHAI

SEQ ID NO: 43885 - protein, 9 aa, Homo Sapiens
RQLEKLFSF

SEQ ID NO: 43886 - protein, 9 aa, Homo Sapiens
RQLLYITAF

SEQ ID NO: 43887 - protein, 9 aa, Homo Sapiens
RQMAMQIAW

SEQ ID NO: 43888 - protein, 9 aa, Homo Sapiens
RQNPTMFAW

SEQ ID NO: 43889 - protein, 9 aa, Homo Sapiens
RQPSVIYSW

SEQ ID NO: 43890 - protein, 9 aa, Homo Sapiens
RQQKEVLSW

SEQ ID NO: 43891 - protein, 9 aa, Homo Sapiens
RQSTCHEAW

SEQ ID NO: 43892 - protein, 9 aa, Homo Sapiens
RQSTILKRW

SEQ ID NO: 43893 - protein, 9 aa, Homo Sapiens
RQWDYTEKL

SEQ ID NO: 43894 - protein, 9 aa, Homo Sapiens
RQWLLQTHW

SEQ ID NO: 43895 - protein, 9 aa, Homo Sapiens
RSAPRAFAW

SEQ ID NO: 43896 - protein, 9 aa, Homo Sapiens
RSEKWNHTL

SEQ ID NO: 43897 - protein, 9 aa, Homo Sapiens
RSFPGFQAF

SEQ ID NO: 43898 - protein, 9 aa, Homo Sapiens
RSFQNVHEW

SEQ ID NO: 43899 - protein, 9 aa, Homo Sapiens
RSHGFRTEY

SEQ ID NO: 43900 - protein, 9 aa, Homo Sapiens
RSILWLNQF

SEQ ID NO: 43901 - protein, 9 aa, Homo Sapiens
RSKAIRYTW

SEQ ID NO: 43902 - protein, 9 aa, Homo Sapiens
RSKEESAHW

SEQ ID NO: 43903 - protein, 9 aa, Homo Sapiens
RSLAYIHSF

SEQ ID NO: 43904 - protein, 9 aa, Homo Sapiens
RSLDTRQVY

SEQ ID NO: 43905 - protein, 9 aa, Homo Sapiens
RSLFKFYTY

SEQ ID NO: 43906 - protein, 9 aa, Homo Sapiens
RSLGVHLSF

SEQ ID NO: 43907 - protein, 9 aa, Homo Sapiens
RSLHFFVEW

SEQ ID NO: 43908 - protein, 9 aa, Homo Sapiens
RSLQTICSW

SEQ ID NO: 43909 - protein, 9 aa, Homo Sapiens
RSQLISQAW

SEQ ID NO: 43910 - protein, 9 aa, Homo Sapiens
RSWAYRDSL

SEQ ID NO: 43911 - protein, 9 aa, Homo Sapiens
RSWRHLVCY

SEQ ID NO: 43912 - protein, 9 aa, Homo Sapiens
RTAAVSCLW

SEQ ID NO: 43913 - protein, 9 aa, Homo Sapiens
RTADFVFMF

SEQ ID NO: 43914 - protein, 9 aa, Homo Sapiens
RTAHTFESW

SEQ ID NO: 43915 - protein, 9 aa, Homo Sapiens
RTAHVILRY

SEQ ID NO: 43916 - protein, 9 aa, Homo Sapiens
RTALHVSCW

SEQ ID NO: 43917 - protein, 9 aa, Homo Sapiens
RTAMGLRSW

SEQ ID NO: 43918 - protein, 9 aa, Homo Sapiens
RTASGTRPW

SEQ ID NO: 43919 - protein, 9 aa, Homo Sapiens
RTATRVASY

SEQ ID NO: 43920 - protein, 9 aa, Homo Sapiens
RTAVYNWAL

SEQ ID NO: 43921 - protein, 9 aa, Homo Sapiens
RTCDYKHHW

SEQ ID NO: 43922 - protein, 9 aa, Homo Sapiens
RTEGIRAAY

SEQ ID NO: 43923 - protein, 9 aa, Homo Sapiens
RTFAPLPEF

SEQ ID NO: 43924 - protein, 9 aa, Homo Sapiens
RTFKVEHEF

SEQ ID NO: 43925 - protein, 9 aa, Homo Sapiens
RTFLHTVCF

SEQ ID NO: 43926 - protein, 9 aa, Homo Sapiens
RTFLKENCF

SEQ ID NO: 43927 - protein, 9 aa, Homo Sapiens
RTFLKRTKY

SEQ ID NO: 43928 - protein, 9 aa, Homo Sapiens
RTFLLTYVL

SEQ ID NO: 43929 - protein, 9 aa, Homo Sapiens
RTFNNIMNF

SEQ ID NO: 43930 - protein, 9 aa, Homo Sapiens
RTFPDPTSW

SEQ ID NO: 43931 - protein, 9 aa, Homo Sapiens
RTFPWIIEV

SEQ ID NO: 43932 - protein, 9 aa, Homo Sapiens
RTFQYQDSL

SEQ ID NO: 43933 - protein, 9 aa, Homo Sapiens
RTFSESSVW

SEQ ID NO: 43934 - protein, 9 aa, Homo Sapiens
RTFTWDKKL

SEQ ID NO: 43935 - protein, 9 aa, Homo Sapiens
RTFVPIPVW

SEQ ID NO: 43936 - protein, 9 aa, Homo Sapiens
RTFVWPAHF

SEQ ID NO: 43937 - protein, 9 aa, Homo Sapiens
RTFWHKISY

SEQ ID NO: 43938 - protein, 9 aa, Homo Sapiens
RTHPVATSF

SEQ ID NO: 43939 - protein, 9 aa, Homo Sapiens
RTHSLAVSL

SEQ ID NO: 43940 - protein, 9 aa, Homo Sapiens
RTKEEVNEW

SEQ ID NO: 43941 - protein, 9 aa, Homo Sapiens
RTKQVLHTF

SEQ ID NO: 43942 - protein, 9 aa, Homo Sapiens
RTKSGFWGW

SEQ ID NO: 43943 - protein, 9 aa, Homo Sapiens
RTLDCIHVL

SEQ ID NO: 43944 - protein, 9 aa, Homo Sapiens
RTLDSVSQI

SEQ ID NO: 43945 - protein, 9 aa, Homo Sapiens
RTLGEIPTY

SEQ ID NO: 43946 - protein, 9 aa, Homo Sapiens
RTLGLRETW

SEQ ID NO: 43947 - protein, 9 aa, Homo Sapiens
RTLLWTELF

SEQ ID NO: 43948 - protein, 9 aa, Homo Sapiens
RTLPKLYSL

SEQ ID NO: 43949 - protein, 9 aa, Homo Sapiens
RTLPVDFHI

SEQ ID NO: 43950 - protein, 9 aa, Homo Sapiens
RTLPWASVL

SEQ ID NO: 43951 - protein, 9 aa, Homo Sapiens
RTLPWSSVL

SEQ ID NO: 43952 - protein, 9 aa, Homo Sapiens
RTLRDIETF

SEQ ID NO: 43953 - protein, 9 aa, Homo Sapiens
RTLSWKHTL

SEQ ID NO: 43954 - protein, 9 aa, Homo Sapiens
RTMEIESTF

SEQ ID NO: 43955 - protein, 9 aa, Homo Sapiens
RTMESTKEF

SEQ ID NO: 43956 - protein, 9 aa, Homo Sapiens
RTMEWVQTI

SEQ ID NO: 43957 - protein, 9 aa, Homo Sapiens
RTMPRIPTL

SEQ ID NO: 43958 - protein, 9 aa, Homo Sapiens
RTMQVALGL

SEQ ID NO: 43959 - protein, 9 aa, Homo Sapiens
RTNAIKQTF

SEQ ID NO: 43960 - protein, 9 aa, Homo Sapiens
RTNLYRKEY

SEQ ID NO: 43961 - protein, 9 aa, Homo Sapiens
RTNRPPLSL

SEQ ID NO: 43962 - protein, 9 aa, Homo Sapiens
RTNTAYQCF

SEQ ID NO: 43963 - protein, 9 aa, Homo Sapiens
RTQLWALTF

SEQ ID NO: 43964 - protein, 9 aa, Homo Sapiens
RTQSHISQW

SEQ ID NO: 43965 - protein, 9 aa, Homo Sapiens
RTQVITQTL

SEQ ID NO: 43966 - protein, 9 aa, Homo Sapiens
RTQVVTNCW

SEQ ID NO: 43967 - protein, 9 aa, Homo Sapiens
RTSSISFEI

SEQ ID NO: 43968 - protein, 9 aa, Homo Sapiens
RTTDIVIRI

SEQ ID NO: 43969 - protein, 9 aa, Homo Sapiens
RTTEILHHL

SEQ ID NO: 43970 - protein, 9 aa, Homo Sapiens
RTTPIAMSF

SEQ ID NO: 43971 - protein, 9 aa, Homo Sapiens
RTVAALASW

SEQ ID NO: 43972 - protein, 9 aa, Homo Sapiens
RTVEKTWKL

SEQ ID NO: 43973 - protein, 9 aa, Homo Sapiens
RTVIIEQSW

SEQ ID NO: 43974 - protein, 9 aa, Homo Sapiens
RTVLWRAGF

SEQ ID NO: 43975 - protein, 9 aa, Homo Sapiens
RTVYFSEQW

SEQ ID NO: 43976 - protein, 9 aa, Homo Sapiens
RTWLLKTHW

SEQ ID NO: 43977 - protein, 9 aa, Homo Sapiens
RTYEHEAMW

SEQ ID NO: 43978 - protein, 9 aa, Homo Sapiens
RTYFVANEW

SEQ ID NO: 43979 - protein, 9 aa, Homo Sapiens
RTYGGRGGW

SEQ ID NO: 43980 - protein, 9 aa, Homo Sapiens
RTYHYHCAL

SEQ ID NO: 43981 - protein, 9 aa, Homo Sapiens
RTYLWRCQF

SEQ ID NO: 43982 - protein, 9 aa, Homo Sapiens
RTYNNIFQF

SEQ ID NO: 43983 - protein, 9 aa, Homo Sapiens
RTYSSHVSW

SEQ ID NO: 43984 - protein, 9 aa, Homo Sapiens
RVAAVLLQF

SEQ ID NO: 43985 - protein, 9 aa, Homo Sapiens
RVAEFHTEL

SEQ ID NO: 43986 - protein, 9 aa, Homo Sapiens
RVAHFGYHW

SEQ ID NO: 43987 - protein, 9 aa, Homo Sapiens
RVAKNQYGW

SEQ ID NO: 43988 - protein, 9 aa, Homo Sapiens
RVAMYVHAY

SEQ ID NO: 43989 - protein, 9 aa, Homo Sapiens
RVAPYRILY

SEQ ID NO: 43990 - protein, 9 aa, Homo Sapiens
RVAQMKRTW

SEQ ID NO: 43991 - protein, 9 aa, Homo Sapiens
RVASVMQEY

SEQ ID NO: 43992 - protein, 9 aa, Homo Sapiens
RVATVTLML

SEQ ID NO: 43993 - protein, 9 aa, Homo Sapiens
RVAVILNEF

SEQ ID NO: 43994 - protein, 9 aa, Homo Sapiens
RVAVMGHSF

SEQ ID NO: 43995 - protein, 9 aa, Homo Sapiens
RVCGKAFRW

SEQ ID NO: 43996 - protein, 9 aa, Homo Sapiens
RVCKTWYKW

SEQ ID NO: 43997 - protein, 9 aa, Homo Sapiens
RVFDLPLTW

SEQ ID NO: 43998 - protein, 9 aa, Homo Sapiens
RVFENIVAV

SEQ ID NO: 43999 - protein, 9 aa, Homo Sapiens
RVFFVHEGY

SEQ ID NO: 44000 - protein, 9 aa, Homo Sapiens
RVFKNVAVI

SEQ ID NO: 44001 - protein, 9 aa, Homo Sapiens
RVFPHEVNW

SEQ ID NO: 44002 - protein, 9 aa, Homo Sapiens
RVFPSPMRI

SEQ ID NO: 44003 - protein, 9 aa, Homo Sapiens
RVFPWASSL

SEQ ID NO: 44004 - protein, 9 aa, Homo Sapiens
RVFRHLENY

SEQ ID NO: 44005 - protein, 9 aa, Homo Sapiens
RVFSLSSEF

SEQ ID NO: 44006 - protein, 9 aa, Homo Sapiens
RVFVHVYIH

SEQ ID NO: 44007 - protein, 9 aa, Homo Sapiens
RVFVHYTGW

SEQ ID NO: 44008 - protein, 9 aa, Homo Sapiens
RVHAFLEQW

SEQ ID NO: 44009 - protein, 9 aa, Homo Sapiens
RVHPETYEW

SEQ ID NO: 44010 - protein, 9 aa, Homo Sapiens
RVIDVGSEW

SEQ ID NO: 44011 - protein, 9 aa, Homo Sapiens
RVIEFAAKF

SEQ ID NO: 44012 - protein, 9 aa, Homo Sapiens
RVIKWLYGL

SEQ ID NO: 44013 - protein, 9 aa, Homo Sapiens
RVKEIYNTY

SEQ ID NO: 44014 - protein, 9 aa, Homo Sapiens
RVKVHFDGW

SEQ ID NO: 44015 - protein, 9 aa, Homo Sapiens
RVLKIPASW

SEQ ID NO: 44016 - protein, 9 aa, Homo Sapiens
RVLKVRPVY

SEQ ID NO: 44017 - protein, 9 aa, Homo Sapiens
RVLNVCRHW

SEQ ID NO: 44018 - protein, 9 aa, Homo Sapiens
RVLRFQVSF

SEQ ID NO: 44019 - protein, 9 aa, Homo Sapiens
RVMEYINRL

SEQ ID NO: 44020 - protein, 9 aa, Homo Sapiens
RVMSRVHSL

SEQ ID NO: 44021 - protein, 9 aa, Homo Sapiens
RVNEYRFAW

SEQ ID NO: 44022 - protein, 9 aa, Homo Sapiens
RVNLARAVY

SEQ ID NO: 44023 - protein, 9 aa, Homo Sapiens
RVNSFQVAF

SEQ ID NO: 44024 - protein, 9 aa, Homo Sapiens
RVQEAIIHF

SEQ ID NO: 44025 - protein, 9 aa, Homo Sapiens
RVQGYFASF

SEQ ID NO: 44026 - protein, 9 aa, Homo Sapiens
RVQKEVAGF

SEQ ID NO: 44027 - protein, 9 aa, Homo Sapiens
RVRELYRAW

SEQ ID NO: 44028 - protein, 9 aa, Homo Sapiens
RVRGDGRPW

SEQ ID NO: 44029 - protein, 9 aa, Homo Sapiens
RVRVKVETY

SEQ ID NO: 44030 - protein, 9 aa, Homo Sapiens
RVSDHRIAY

SEQ ID NO: 44031 - protein, 9 aa, Homo Sapiens
RVSDINFTL

SEQ ID NO: 44032 - protein, 9 aa, Homo Sapiens
RVSDYKHHW

SEQ ID NO: 44033 - protein, 9 aa, Homo Sapiens
RVSEIRDAF

SEQ ID NO: 44034 - protein, 9 aa, Homo Sapiens
RVSLARAVY

SEQ ID NO: 44035 - protein, 9 aa, Homo Sapiens
RVSNIRQVF

SEQ ID NO: 44036 - protein, 9 aa, Homo Sapiens
RVSNVKSVY

SEQ ID NO: 44037 - protein, 9 aa, Homo Sapiens
RVWDIRNTY

SEQ ID NO: 44038 - protein, 9 aa, Homo Sapiens
RVWDIVRHY

SEQ ID NO: 44039 - protein, 9 aa, Homo Sapiens
RVWNLNHLW

SEQ ID NO: 44040 - protein, 9 aa, Homo Sapiens
RVWQWDEKW

SEQ ID NO: 44041 - protein, 9 aa, Homo Sapiens
RVYIGRLSY

SEQ ID NO: 44042 - protein, 9 aa, Homo Sapiens
RVYKKMPSI

SEQ ID NO: 44043 - protein, 9 aa, Homo Sapiens
RVYKSLKVW

SEQ ID NO: 44044 - protein, 9 aa, Homo Sapiens
RVYNEVPTF

SEQ ID NO: 44045 - protein, 9 aa, Homo Sapiens
SAKVHSVAW

SEQ ID NO: 44046 - protein, 9 aa, Homo Sapiens
SAPSSSTPF

SEQ ID NO: 44047 - protein, 9 aa, Homo Sapiens
SIFTGIKEF

SEQ ID NO: 44048 - protein, 9 aa, Homo Sapiens
SINPNNHSW

SEQ ID NO: 44049 - protein, 9 aa, Homo Sapiens
SLFDNPRTF

SEQ ID NO: 44050 - protein, 9 aa, Homo Sapiens
SLFSLREKW

SEQ ID NO: 44051 - protein, 9 aa, Homo Sapiens
SLHGQRCLY

SEQ ID NO: 44052 - protein, 9 aa, Homo Sapiens
SLHSHQYSW

SEQ ID NO: 44053 - protein, 9 aa, Homo Sapiens
SLLGYRAVY

SEQ ID NO: 44054 - protein, 9 aa, Homo Sapiens
SLNCKSFKW

SEQ ID NO: 44055 - protein, 9 aa, Homo Sapiens
SLQKKLETW

SEQ ID NO: 44056 - protein, 9 aa, Homo Sapiens
SLRDITSSW

SEQ ID NO: 44057 - protein, 9 aa, Homo Sapiens
SLREHFEKW

SEQ ID NO: 44058 - protein, 9 aa, Homo Sapiens
SLRNRAEEW

SEQ ID NO: 44059 - protein, 9 aa, Homo Sapiens
SLRNYYEQW

SEQ ID NO: 44060 - protein, 9 aa, Homo Sapiens
SLRSHFEQW

SEQ ID NO: 44061 - protein, 9 aa, Homo Sapiens
SLYGGFVEW

SEQ ID NO: 44062 - protein, 9 aa, Homo Sapiens
SLYSIRKQY

SEQ ID NO: 44063 - protein, 9 aa, Homo Sapiens
SMADIPLGF

SEQ ID NO: 44064 - protein, 9 aa, Homo Sapiens
SMADVKFSF

SEQ ID NO: 44065 - protein, 9 aa, Homo Sapiens
SMFHNRHLF

SEQ ID NO: 44066 - protein, 9 aa, Homo Sapiens
SMFNGQLLF

SEQ ID NO: 44067 - protein, 9 aa, Homo Sapiens
SMSGNIYSW

SEQ ID NO: 44068 - protein, 9 aa, Homo Sapiens
SQCGKAFIW

SEQ ID NO: 44069 - protein, 9 aa, Homo Sapiens
SQCGKTFTW

SEQ ID NO: 44070 - protein, 9 aa, Homo Sapiens
SQFGHCFSW

SEQ ID NO: 44071 - protein, 9 aa, Homo Sapiens
SQFSIRYQY

SEQ ID NO: 44072 - protein, 9 aa, Homo Sapiens
SQNFITWAW

SEQ ID NO: 44073 - protein, 9 aa, Homo Sapiens
SQNPRVAAW

SEQ ID NO: 44074 - protein, 9 aa, Homo Sapiens
SQVEWKYIW

SEQ ID NO: 44075 - protein, 9 aa, Homo Sapiens
SSPAPRTAL

SEQ ID NO: 44076 - protein, 9 aa, Homo Sapiens
SSSRIRAAW

SEQ ID NO: 44077 - protein, 9 aa, Homo Sapiens
STAPGYYSW

SEQ ID NO: 44078 - protein, 9 aa, Homo Sapiens
STFPGFVSW

SEQ ID NO: 44079 - protein, 9 aa, Homo Sapiens
STGQIRFTY

SEQ ID NO: 44080 - protein, 9 aa, Homo Sapiens
STLRWMQNF

SEQ ID NO: 44081 - protein, 9 aa, Homo Sapiens
STNPNSHGF

SEQ ID NO: 44082 - protein, 9 aa, Homo Sapiens
STQIKTYSW

SEQ ID NO: 44083 - protein, 9 aa, Homo Sapiens
STRPQVSSW

SEQ ID NO: 44084 - protein, 9 aa, Homo Sapiens
STSQVRQNY

SEQ ID NO: 44085 - protein, 9 aa, Homo Sapiens
STWHVARTF

SEQ ID NO: 44086 - protein, 9 aa, Homo Sapiens
STYIKKIGY

SEQ ID NO: 44087 - protein, 9 aa, Homo Sapiens
STYNHLSSW

SEQ ID NO: 44088 - protein, 9 aa, Homo Sapiens
SVAALRFEW

SEQ ID NO: 44089 - protein, 9 aa, Homo Sapiens
SVADIRNAY

SEQ ID NO: 44090 - protein, 9 aa, Homo Sapiens
SVFVKNVGW

SEQ ID NO: 44091 - protein, 9 aa, Homo Sapiens
SVIRTMWAW

SEQ ID NO: 44092 - protein, 9 aa, Homo Sapiens
SVKRNQAVW

SEQ ID NO: 44093 - protein, 9 aa, Homo Sapiens
SVKTTTHSW

SEQ ID NO: 44094 - protein, 9 aa, Homo Sapiens
SVLKTRFSY

SEQ ID NO: 44095 - protein, 9 aa, Homo Sapiens
SVMRCIAVF

SEQ ID NO: 44096 - protein, 9 aa, Homo Sapiens
SVQGFSTVW

SEQ ID NO: 44097 - protein, 9 aa, Homo Sapiens
SVRANTENW

SEQ ID NO: 44098 - protein, 9 aa, Homo Sapiens
SVSSHFVGF

SEQ ID NO: 44099 - protein, 9 aa, Homo Sapiens
SVWFPTAGW

SEQ ID NO: 44100 - protein, 9 aa, Homo Sapiens
TLALSRCSL

SEQ ID NO: 44101 - protein, 9 aa, Homo Sapiens
TLFTHQSSW

SEQ ID NO: 44102 - protein, 9 aa, Homo Sapiens
TLKPSPQAW

SEQ ID NO: 44103 - protein, 9 aa, Homo Sapiens
TLSSIRSKY

SEQ ID NO: 44104 - protein, 9 aa, Homo Sapiens
TLVREYFSW

SEQ ID NO: 44105 - protein, 9 aa, Homo Sapiens
TLWKHQFAW

SEQ ID NO: 44106 - protein, 9 aa, Homo Sapiens
TMNIKSATW

SEQ ID NO: 44107 - protein, 9 aa, Homo Sapiens
TMRKNIDVW

SEQ ID NO: 44108 - protein, 9 aa, Homo Sapiens
TMRRHEETW

SEQ ID NO: 44109 - protein, 9 aa, Homo Sapiens
TQFTGRYHY

SEQ ID NO: 44110 - protein, 9 aa, Homo Sapiens
TSFQWVTKW

SEQ ID NO: 44111 - protein, 9 aa, Homo Sapiens
TSFRWVESL

SEQ ID NO: 44112 - protein, 9 aa, Homo Sapiens
TTNPCRIQY

SEQ ID NO: 44113 - protein, 9 aa, Homo Sapiens
TTVQWENSF

SEQ ID NO: 44114 - protein, 9 aa, Homo Sapiens
TVGPKTFSW

SEQ ID NO: 44115 - protein, 9 aa, Homo Sapiens
TVIEKTESW

SEQ ID NO: 44116 - protein, 9 aa, Homo Sapiens
TVLTTHHHW

SEQ ID NO: 44117 - protein, 9 aa, Homo Sapiens
TVNDVRNTY

SEQ ID NO: 44118 - protein, 9 aa, Homo Sapiens
TVQTVRYKY

SEQ ID NO: 44119 - protein, 9 aa, Homo Sapiens
TVSRAREVY

SEQ ID NO: 44120 - protein, 9 aa, Homo Sapiens
TVYDKPASF

SEQ ID NO: 44121 - protein, 9 aa, Homo Sapiens
TVYPKPEEW

SEQ ID NO: 44122 - protein, 9 aa, Homo Sapiens
VAWEYKWEL

SEQ ID NO: 44123 - protein, 9 aa, Homo Sapiens
VIFQKVKEW

SEQ ID NO: 44124 - protein, 9 aa, Homo Sapiens
VIQRKRELW

SEQ ID NO: 44125 - protein, 9 aa, Homo Sapiens
VIWPNPIVW

SEQ ID NO: 44126 - protein, 9 aa, Homo Sapiens
VIWPNPVIW

SEQ ID NO: 44127 - protein, 9 aa, Homo Sapiens
VIYKWLCVW

SEQ ID NO: 44128 - protein, 9 aa, Homo Sapiens
VLFPWQARL

SEQ ID NO: 44129 - protein, 9 aa, Homo Sapiens
VLHTLRQRY

SEQ ID NO: 44130 - protein, 9 aa, Homo Sapiens
VLLKKTFSW

SEQ ID NO: 44131 - protein, 9 aa, Homo Sapiens
VLMPWIHEL

SEQ ID NO: 44132 - protein, 9 aa, Homo Sapiens
VLMSAQESW

SEQ ID NO: 44133 - protein, 9 aa, Homo Sapiens
VLNAYRQLY

SEQ ID NO: 44134 - protein, 9 aa, Homo Sapiens
VLNNSKASW

SEQ ID NO: 44135 - protein, 9 aa, Homo Sapiens
VLNNVAHTF

SEQ ID NO: 44136 - protein, 9 aa, Homo Sapiens
VLNPETRTW

SEQ ID NO: 44137 - protein, 9 aa, Homo Sapiens
VLRDEIIAW

SEQ ID NO: 44138 - protein, 9 aa, Homo Sapiens
VLSSFRTTW

SEQ ID NO: 44139 - protein, 9 aa, Homo Sapiens
VLWDRTFSL

SEQ ID NO: 44140 - protein, 9 aa, Homo Sapiens
VLYKWTNYL

SEQ ID NO: 44141 - protein, 9 aa, Homo Sapiens
VMFKKIKSF

SEQ ID NO: 44142 - protein, 9 aa, Homo Sapiens
VMHDLRKMY

SEQ ID NO: 44143 - protein, 9 aa, Homo Sapiens
VMNPKPSSW

SEQ ID NO: 44144 - protein, 9 aa, Homo Sapiens
VMRSARELY

SEQ ID NO: 44145 - protein, 9 aa, Homo Sapiens
VQFPSHYTL

SEQ ID NO: 44146 - protein, 9 aa, Homo Sapiens
VQKKTFTKW

SEQ ID NO: 44147 - protein, 9 aa, Homo Sapiens
VTFLLPAGW

SEQ ID NO: 44148 - protein, 9 aa, Homo Sapiens
VTHSVRIGF

SEQ ID NO: 44149 - protein, 9 aa, Homo Sapiens
VTKKTYEIW

SEQ ID NO: 44150 - protein, 9 aa, Homo Sapiens
VTNKSVSVW

SEQ ID NO: 44151 - protein, 9 aa, Homo Sapiens
VTNPHSSQW

SEQ ID NO: 44152 - protein, 9 aa, Homo Sapiens
VTNPHTDAW

SEQ ID NO: 44153 - protein, 9 aa, Homo Sapiens
VTQNFKFVW

SEQ ID NO: 44154 - protein, 9 aa, Homo Sapiens
VTSPIRASY

SEQ ID NO: 44155 - protein, 9 aa, Homo Sapiens
VTWTGRFKY

SEQ ID NO: 44156 - protein, 9 aa, Homo Sapiens
VTYKNVPNW

SEQ ID NO: 44157 - protein, 9 aa, Homo Sapiens
VTYSFRQSF

SEQ ID NO: 44158 - protein, 9 aa, Homo Sapiens
VVAALRASY

SEQ ID NO: 44159 - protein, 9 aa, Homo Sapiens
VVAKSRFWY

SEQ ID NO: 44160 - protein, 9 aa, Homo Sapiens
VVAVGRALY

SEQ ID NO: 44161 - protein, 9 aa, Homo Sapiens
VVHKWHYKL

SEQ ID NO: 44162 - protein, 9 aa, Homo Sapiens
VVKNSVHSW

SEQ ID NO: 44163 - protein, 9 aa, Homo Sapiens
VVNIARYLY

SEQ ID NO: 44164 - protein, 9 aa, Homo Sapiens
VVRKPSSSW

SEQ ID NO: 44165 - protein, 9 aa, Homo Sapiens
VVRLHINSW

SEQ ID NO: 44166 - protein, 9 aa, Homo Sapiens
VVSSIHSSW

SEQ ID NO: 44167 - protein, 9 aa, Homo Sapiens
VVWPNPLAW

SEQ ID NO: 44168 - protein, 9 aa, Homo Sapiens
VVYPWTQRF

SEQ ID NO: 44169 - protein, 9 aa, Homo Sapiens
YLFPNRLEW

SEQ ID NO: 44170 - protein, 9 aa, Homo Sapiens
YLMHWPYAF

SEQ ID NO: 44171 - protein, 9 aa, Homo Sapiens
YLNRHLHTW

SEQ ID NO: 44172 - protein, 10 aa, Homo Sapiens
AHQKYVRQAW

SEQ ID NO: 44173 - protein, 10 aa, Homo Sapiens
ALAAIRHARW

SEQ ID NO: 44174 - protein, 10 aa, Homo Sapiens
ALAALRHAKW

SEQ ID NO: 44175 - protein, 10 aa, Homo Sapiens
ALAKIERFEF

SEQ ID NO: 44176 - protein, 10 aa, Homo Sapiens
ALNEQRLVSW

SEQ ID NO: 44177 - protein, 10 aa, Homo Sapiens
AMFNDYNFVF

SEQ ID NO: 44178 - protein, 10 aa, Homo Sapiens
ASYQDRRQSW

SEQ ID NO: 44179 - protein, 10 aa, Homo Sapiens
ATAGIIGWVY

SEQ ID NO: 44180 - protein, 10 aa, Homo Sapiens
ATAGLQRMGW

SEQ ID NO: 44181 - protein, 10 aa, Homo Sapiens
ATAPDVRISW

SEQ ID NO: 44182 - protein, 10 aa, Homo Sapiens
ATASGIVFQW

SEQ ID NO: 44183 - protein, 10 aa, Homo Sapiens
ATQQNWDYRW

SEQ ID NO: 44184 - protein, 10 aa, Homo Sapiens
ATRGAALLSW

SEQ ID NO: 44185 - protein, 10 aa, Homo Sapiens
ATRGFIRYGW

SEQ ID NO: 44186 - protein, 10 aa, Homo Sapiens
AVFNRAFYSW

SEQ ID NO: 44187 - protein, 10 aa, Homo Sapiens
AVNPRDPPSW

SEQ ID NO: 44188 - protein, 10 aa, Homo Sapiens
AVWDRMKVAW

SEQ ID NO: 44189 - protein, 10 aa, Homo Sapiens
GDFLTEGGGV

SEQ ID NO: 44190 - protein, 10 aa, Homo Sapiens
GTWLPSRAEW

SEQ ID NO: 44191 - protein, 10 aa, Homo Sapiens
HILPFTMPAF

SEQ ID NO: 44192 - protein, 10 aa, Homo Sapiens
HLAKIYAMHW

SEQ ID NO: 44193 - protein, 10 aa, Homo Sapiens
HLLSGQLPTI

SEQ ID NO: 44194 - protein, 10 aa, Homo Sapiens
HMKPLPYYSY

SEQ ID NO: 44195 - protein, 10 aa, Homo Sapiens
HQKEGYGLSW

SEQ ID NO: 44196 - protein, 10 aa, Homo Sapiens
HQVDYILETW

SEQ ID NO: 44197 - protein, 10 aa, Homo Sapiens
HTADVQLHAW

SEQ ID NO: 44198 - protein, 10 aa, Homo Sapiens
HTAEVNCLSF

SEQ ID NO: 44199 - protein, 10 aa, Homo Sapiens
HTAKISDFSW

SEQ ID NO: 44200 - protein, 10 aa, Homo Sapiens
HTKRVGIVAW

SEQ ID NO: 44201 - protein, 10 aa, Homo Sapiens
ILFDKEFCEW

SEQ ID NO: 44202 - protein, 10 aa, Homo Sapiens
ILQEKNRYSW

SEQ ID NO: 44203 - protein, 10 aa, Homo Sapiens
ILYPHEAPSW

SEQ ID NO: 44204 - protein, 10 aa, Homo Sapiens
ILYPKPKACW

SEQ ID NO: 44205 - protein, 10 aa, Homo Sapiens
IVSILNYVIY

SEQ ID NO: 44206 - protein, 10 aa, Homo Sapiens
KAFEEERASW

SEQ ID NO: 44207 - protein, 10 aa, Homo Sapiens
KAWAEYVVEW

SEQ ID NO: 44208 - protein, 10 aa, Homo Sapiens
KFIDPIYQVW

SEQ ID NO: 44209 - protein, 10 aa, Homo Sapiens
KIADLGNACW

SEQ ID NO: 44210 - protein, 10 aa, Homo Sapiens
KIADTSNMLL

SEQ ID NO: 44211 - protein, 10 aa, Homo Sapiens
KIFEGMPVTF

SEQ ID NO: 44212 - protein, 10 aa, Homo Sapiens
KIFFPGVSEF

SEQ ID NO: 44213 - protein, 10 aa, Homo Sapiens
KIFLETRKSW

SEQ ID NO: 44214 - protein, 10 aa, Homo Sapiens
KIFQGNVHNF

SEQ ID NO: 44215 - protein, 10 aa, Homo Sapiens
KIIAPPERKY

SEQ ID NO: 44216 - protein, 10 aa, Homo Sapiens
KIQKDKPETW

SEQ ID NO: 44217 - protein, 10 aa, Homo Sapiens
KISGIKDFSW

SEQ ID NO: 44218 - protein, 10 aa, Homo Sapiens
KIYVVGGYSW

SEQ ID NO: 44219 - protein, 10 aa, Homo Sapiens
KLADKVNSSW

SEQ ID NO: 44220 - protein, 10 aa, Homo Sapiens
KLAELHGNMF

SEQ ID NO: 44221 - protein, 10 aa, Homo Sapiens
KLATTILQHW

SEQ ID NO: 44222 - protein, 10 aa, Homo Sapiens
KLFDKHKTKF

SEQ ID NO: 44223 - protein, 10 aa, Homo Sapiens
KLFEDKELQW

SEQ ID NO: 44224 - protein, 10 aa, Homo Sapiens
KLFGEKSASF

SEQ ID NO: 44225 - protein, 10 aa, Homo Sapiens
KLFGQPPCAF

SEQ ID NO: 44226 - protein, 10 aa, Homo Sapiens
KLFKPPVLVF

SEQ ID NO: 44227 - protein, 10 aa, Homo Sapiens
KLFNGCPLRI

SEQ ID NO: 44228 - protein, 10 aa, Homo Sapiens
KLFPGSPAIY

SEQ ID NO: 44229 - protein, 10 aa, Homo Sapiens
KLFPKHFVEY

SEQ ID NO: 44230 - protein, 10 aa, Homo Sapiens
KLFSGKGLHF

SEQ ID NO: 44231 - protein, 10 aa, Homo Sapiens
KLFSQNTVHW

SEQ ID NO: 44232 - protein, 10 aa, Homo Sapiens
KLHNKKLAAF

SEQ ID NO: 44233 - protein, 10 aa, Homo Sapiens
KLISDINKAW

SEQ ID NO: 44234 - protein, 10 aa, Homo Sapiens
KLKKPEAVRW

SEQ ID NO: 44235 - protein, 10 aa, Homo Sapiens
KLKPGTMIEW

SEQ ID NO: 44236 - protein, 10 aa, Homo Sapiens
KLKSVGICTI

SEQ ID NO: 44237 - protein, 10 aa, Homo Sapiens
KLLANMVYQY

SEQ ID NO: 44238 - protein, 10 aa, Homo Sapiens
KLLDKMTTSF

SEQ ID NO: 44239 - protein, 10 aa, Homo Sapiens
KLLEDRIAEF

SEQ ID NO: 44240 - protein, 10 aa, Homo Sapiens
KLLFSFCLTI

SEQ ID NO: 44241 - protein, 10 aa, Homo Sapiens
KLLKCSRLVL

SEQ ID NO: 44242 - protein, 10 aa, Homo Sapiens
KLLSPVVPQI

SEQ ID NO: 44243 - protein, 10 aa, Homo Sapiens
KLMDVGLIAI

SEQ ID NO: 44244 - protein, 10 aa, Homo Sapiens
KLMKRLNTEW

SEQ ID NO: 44245 - protein, 10 aa, Homo Sapiens
KLMPGRIQLW

SEQ ID NO: 44246 - protein, 10 aa, Homo Sapiens
KLMPNFSDSF

SEQ ID NO: 44247 - protein, 10 aa, Homo Sapiens
KLMSPKLYVW

SEQ ID NO: 44248 - protein, 10 aa, Homo Sapiens
KLNPAANHRL

SEQ ID NO: 44249 - protein, 10 aa, Homo Sapiens
KLNPRYLGAW

SEQ ID NO: 44250 - protein, 10 aa, Homo Sapiens
KLPDDYRCSY

SEQ ID NO: 44251 - protein, 10 aa, Homo Sapiens
KLPNFGFVVF

SEQ ID NO: 44252 - protein, 10 aa, Homo Sapiens
KLQEALRRKY

SEQ ID NO: 44253 - protein, 10 aa, Homo Sapiens
KLQHPLGVTW

SEQ ID NO: 44254 - protein, 10 aa, Homo Sapiens
KLTDSVLRSF

SEQ ID NO: 44255 - protein, 10 aa, Homo Sapiens
KLVDGLATSW

SEQ ID NO: 44256 - protein, 10 aa, Homo Sapiens
KLWKGARSVY

SEQ ID NO: 44257 - protein, 10 aa, Homo Sapiens
KLWNEVTTSF

SEQ ID NO: 44258 - protein, 10 aa, Homo Sapiens
KLYEGVPLPF

SEQ ID NO: 44259 - protein, 10 aa, Homo Sapiens
KLYELHVFTF

SEQ ID NO: 44260 - protein, 10 aa, Homo Sapiens
KLYGADGLVF

SEQ ID NO: 44261 - protein, 10 aa, Homo Sapiens
KLYTGPGLAI

SEQ ID NO: 44262 - protein, 10 aa, Homo Sapiens
KMAGKNLVAV

SEQ ID NO: 44263 - protein, 10 aa, Homo Sapiens
KMAIKLRNEY

SEQ ID NO: 44264 - protein, 10 aa, Homo Sapiens
KMAPALRKVY

SEQ ID NO: 44265 - protein, 10 aa, Homo Sapiens
KMAPPDLPHW

SEQ ID NO: 44266 - protein, 10 aa, Homo Sapiens
KMATNTVYVF

SEQ ID NO: 44267 - protein, 10 aa, Homo Sapiens
KMAVLLGKVY

SEQ ID NO: 44268 - protein, 10 aa, Homo Sapiens
KMLEKARMSW

SEQ ID NO: 44269 - protein, 10 aa, Homo Sapiens
KMMNDSILRL

SEQ ID NO: 44270 - protein, 10 aa, Homo Sapiens
KMMNGGHYTY

SEQ ID NO: 44271 - protein, 10 aa, Homo Sapiens
KMPKFSMPGF

SEQ ID NO: 44272 - protein, 10 aa, Homo Sapiens
KMPKFSMPSL

SEQ ID NO: 44273 - protein, 10 aa, Homo Sapiens
KMPKMKMPTF

SEQ ID NO: 44274 - protein, 10 aa, Homo Sapiens
KMQEPSAHTF

SEQ ID NO: 44275 - protein, 10 aa, Homo Sapiens
KMRPTIKDHW

SEQ ID NO: 44276 - protein, 10 aa, Homo Sapiens
KMTQIMFETF

SEQ ID NO: 44277 - protein, 10 aa, Homo Sapiens
KMWSIENIAF

SEQ ID NO: 44278 - protein, 10 aa, Homo Sapiens
KMYDAAKLLY

SEQ ID NO: 44279 - protein, 10 aa, Homo Sapiens
KMYEHLFPEL

SEQ ID NO: 44280 - protein, 10 aa, Homo Sapiens
KQAPPQKVSF

SEQ ID NO: 44281 - protein, 10 aa, Homo Sapiens
KQKDYEESSW

SEQ ID NO: 44282 - protein, 10 aa, Homo Sapiens
KQLPSPGWSW

SEQ ID NO: 44283 - protein, 10 aa, Homo Sapiens
KQMPDVNVSW

SEQ ID NO: 44284 - protein, 10 aa, Homo Sapiens
KQTDVGITHF

SEQ ID NO: 44285 - protein, 10 aa, Homo Sapiens
KQVDDLASVW

SEQ ID NO: 44286 - protein, 10 aa, Homo Sapiens
KQVDSIVWTF

SEQ ID NO: 44287 - protein, 10 aa, Homo Sapiens
KQYEAARLEY

SEQ ID NO: 44288 - protein, 10 aa, Homo Sapiens
KQYQIKGLEW

SEQ ID NO: 44289 - protein, 10 aa, Homo Sapiens
KQYVFGGWAW

SEQ ID NO: 44290 - protein, 10 aa, Homo Sapiens
KSARVKGLSF

SEQ ID NO: 44291 - protein, 10 aa, Homo Sapiens
KSFEGNVFMY

SEQ ID NO: 44292 - protein, 10 aa, Homo Sapiens
KSFEKAKESW

SEQ ID NO: 44293 - protein, 10 aa, Homo Sapiens
KSVEFTWPEF

SEQ ID NO: 44294 - protein, 10 aa, Homo Sapiens
KSVLIMGRGY

SEQ ID NO: 44295 - protein, 10 aa, Homo Sapiens
KTAVIDHHNY

SEQ ID NO: 44296 - protein, 10 aa, Homo Sapiens
KTAWEVRAVY

SEQ ID NO: 44297 - protein, 10 aa, Homo Sapiens
KTFKGKYFNF

SEQ ID NO: 44298 - protein, 10 aa, Homo Sapiens
KTFQENLSAF

SEQ ID NO: 44299 - protein, 10 aa, Homo Sapiens
KTFREWDFDL

SEQ ID NO: 44300 - protein, 10 aa, Homo Sapiens
KTFSEHLTSY

SEQ ID NO: 44301 - protein, 10 aa, Homo Sapiens
KTFSFVMPSL

SEQ ID NO: 44302 - protein, 10 aa, Homo Sapiens
KTFTKWVNSH

SEQ ID NO: 44303 - protein, 10 aa, Homo Sapiens
KTGENFRLIY

SEQ ID NO: 44304 - protein, 10 aa, Homo Sapiens
KTKDGVREVF

SEQ ID NO: 44305 - protein, 10 aa, Homo Sapiens
KTKDWWTYEF

SEQ ID NO: 44306 - protein, 10 aa, Homo Sapiens
KTLAEINQKW

SEQ ID NO: 44307 - protein, 10 aa, Homo Sapiens
KTLDFELDTF

SEQ ID NO: 44308 - protein, 10 aa, Homo Sapiens
KTLDQAIMKF

SEQ ID NO: 44309 - protein, 10 aa, Homo Sapiens
KTLDSWRDEF

SEQ ID NO: 44310 - protein, 10 aa, Homo Sapiens
KTLEDALHCF

SEQ ID NO: 44311 - protein, 10 aa, Homo Sapiens
KTLQEVHFLL

SEQ ID NO: 44312 - protein, 10 aa, Homo Sapiens
KTLSDIFLLF

SEQ ID NO: 44313 - protein, 10 aa, Homo Sapiens
KTLSTFKESW

SEQ ID NO: 44314 - protein, 10 aa, Homo Sapiens
KTMDPSCLKW

SEQ ID NO: 44315 - protein, 10 aa, Homo Sapiens
KTMKMRGQAF

SEQ ID NO: 44316 - protein, 10 aa, Homo Sapiens
KTNEHGMKTF

SEQ ID NO: 44317 - protein, 10 aa, Homo Sapiens
KTQSFEKQGF

SEQ ID NO: 44318 - protein, 10 aa, Homo Sapiens
KTRDDWLVSW

SEQ ID NO: 44319 - protein, 10 aa, Homo Sapiens
KTVFIRNLSF

SEQ ID NO: 44320 - protein, 10 aa, Homo Sapiens
KTWGLRAAGW

SEQ ID NO: 44321 - protein, 10 aa, Homo Sapiens
KTYDSKRVCF

SEQ ID NO: 44322 - protein, 10 aa, Homo Sapiens
KTYEAALETI

SEQ ID NO: 44323 - protein, 10 aa, Homo Sapiens
KTYGIKHMKF

SEQ ID NO: 44324 - protein, 10 aa, Homo Sapiens
KVAAEWRSTF

SEQ ID NO: 44325 - protein, 10 aa, Homo Sapiens
KVADIGLAAW

SEQ ID NO: 44326 - protein, 10 aa, Homo Sapiens
KVADWTGATY

SEQ ID NO: 44327 - protein, 10 aa, Homo Sapiens
KVAELENSEF

SEQ ID NO: 44328 - protein, 10 aa, Homo Sapiens
KVAKLDTSQW

SEQ ID NO: 44329 - protein, 10 aa, Homo Sapiens
KVASLRGMEL

SEQ ID NO: 44330 - protein, 10 aa, Homo Sapiens
KVFDGCPLKI

SEQ ID NO: 44331 - protein, 10 aa, Homo Sapiens
KVFDGIPPPY

SEQ ID NO: 44332 - protein, 10 aa, Homo Sapiens
KVFDPKVFTF

SEQ ID NO: 44333 - protein, 10 aa, Homo Sapiens
KVFESWMHHW

SEQ ID NO: 44334 - protein, 10 aa, Homo Sapiens
KVFGRPISSW

SEQ ID NO: 44335 - protein, 10 aa, Homo Sapiens
KVFKPISSTW

SEQ ID NO: 44336 - protein, 10 aa, Homo Sapiens
KVFNGCPLRI

SEQ ID NO: 44337 - protein, 10 aa, Homo Sapiens
KVGDKCMAVW

SEQ ID NO: 44338 - protein, 10 aa, Homo Sapiens
KVIDKRLWGW

SEQ ID NO: 44339 - protein, 10 aa, Homo Sapiens
KVIHALGQSW

SEQ ID NO: 44340 - protein, 10 aa, Homo Sapiens
KVINTGIKVW

SEQ ID NO: 44341 - protein, 10 aa, Homo Sapiens
KVKEEIGSSW

SEQ ID NO: 44342 - protein, 10 aa, Homo Sapiens
KVLDAMPHHW

SEQ ID NO: 44343 - protein, 10 aa, Homo Sapiens
KVLGAPVPAF

SEQ ID NO: 44344 - protein, 10 aa, Homo Sapiens
KVLPPLEQVW

SEQ ID NO: 44345 - protein, 10 aa, Homo Sapiens
KVLRWERAWF

SEQ ID NO: 44346 - protein, 10 aa, Homo Sapiens
KVRAESFDTW

SEQ ID NO: 44347 - protein, 10 aa, Homo Sapiens
KVSSVRWISY

SEQ ID NO: 44348 - protein, 10 aa, Homo Sapiens
KVWPGGSRTW

SEQ ID NO: 44349 - protein, 10 aa, Homo Sapiens
LFDRPQELKL

SEQ ID NO: 44350 - protein, 10 aa, Homo Sapiens
LLFPGKAFSW

SEQ ID NO: 44351 - protein, 10 aa, Homo Sapiens
LRQQAKQICY

SEQ ID NO: 44352 - protein, 10 aa, Homo Sapiens
QIFRPDNFVF

SEQ ID NO: 44353 - protein, 10 aa, Homo Sapiens
QLAEGGRMVY

SEQ ID NO: 44354 - protein, 10 aa, Homo Sapiens
RIACIFGMQL

SEQ ID NO: 44355 - protein, 10 aa, Homo Sapiens
RIALLEGFNF

SEQ ID NO: 44356 - protein, 10 aa, Homo Sapiens
RIASCLLESW

SEQ ID NO: 44357 - protein, 10 aa, Homo Sapiens
RIFEDYTVSW

SEQ ID NO: 44358 - protein, 10 aa, Homo Sapiens
RIFIGTFKAF

SEQ ID NO: 44359 - protein, 10 aa, Homo Sapiens
RIFKGVGCVW

SEQ ID NO: 44360 - protein, 10 aa, Homo Sapiens
RIGKLLGFEW

SEQ ID NO: 44361 - protein, 10 aa, Homo Sapiens
RIIKDVVLQW

SEQ ID NO: 44362 - protein, 10 aa, Homo Sapiens
RILDGKRIQY

SEQ ID NO: 44363 - protein, 10 aa, Homo Sapiens
RILDIVPPTF

SEQ ID NO: 44364 - protein, 10 aa, Homo Sapiens
RILPKCRTSY

SEQ ID NO: 44365 - protein, 10 aa, Homo Sapiens
RIMGTGPPAF

SEQ ID NO: 44366 - protein, 10 aa, Homo Sapiens
RLADPVFIGF

SEQ ID NO: 44367 - protein, 10 aa, Homo Sapiens
RLAEAQSNSF

SEQ ID NO: 44368 - protein, 10 aa, Homo Sapiens
RLAEDLGNLW

SEQ ID NO: 44369 - protein, 10 aa, Homo Sapiens
RLAHSFRPAY

SEQ ID NO: 44370 - protein, 10 aa, Homo Sapiens
RLAPNFRWAI

SEQ ID NO: 44371 - protein, 10 aa, Homo Sapiens
RLAQEGIYTL

SEQ ID NO: 44372 - protein, 10 aa, Homo Sapiens
RLCAVPPPNF

SEQ ID NO: 44373 - protein, 10 aa, Homo Sapiens
RLCENYIKSW

SEQ ID NO: 44374 - protein, 10 aa, Homo Sapiens
RLCPAQRGLY

SEQ ID NO: 44375 - protein, 10 aa, Homo Sapiens
RLFDIHKQVL

SEQ ID NO: 44376 - protein, 10 aa, Homo Sapiens
RLFDPINLVF

SEQ ID NO: 44377 - protein, 10 aa, Homo Sapiens
RLFEDTFVNF

SEQ ID NO: 44378 - protein, 10 aa, Homo Sapiens
RLFHQAFISF

SEQ ID NO: 44379 - protein, 10 aa, Homo Sapiens
RLFPRPVVAF

SEQ ID NO: 44380 - protein, 10 aa, Homo Sapiens
RLFSWKGINF

SEQ ID NO: 44381 - protein, 10 aa, Homo Sapiens
RLFTRLRHEF

SEQ ID NO: 44382 - protein, 10 aa, Homo Sapiens
RLGLEIRKIY

SEQ ID NO: 44383 - protein, 10 aa, Homo Sapiens
RLIDWGLAEF

SEQ ID NO: 44384 - protein, 10 aa, Homo Sapiens
RLINPENMGF

SEQ ID NO: 44385 - protein, 10 aa, Homo Sapiens
RLIPQPAFQW

SEQ ID NO: 44386 - protein, 10 aa, Homo Sapiens
RLKVPVHHTW

SEQ ID NO: 44387 - protein, 10 aa, Homo Sapiens
RLLGDSTFEW

SEQ ID NO: 44388 - protein, 10 aa, Homo Sapiens
RLLHGRHFTY

SEQ ID NO: 44389 - protein, 10 aa, Homo Sapiens
RLLPQVLNSW

SEQ ID NO: 44390 - protein, 10 aa, Homo Sapiens
RLLPYALHKW

SEQ ID NO: 44391 - protein, 10 aa, Homo Sapiens
RLLSQGVIAF

SEQ ID NO: 44392 - protein, 10 aa, Homo Sapiens
RLLTEISSSW

SEQ ID NO: 44393 - protein, 10 aa, Homo Sapiens
RLLTTALTSF

SEQ ID NO: 44394 - protein, 10 aa, Homo Sapiens
RLMSGKVKVW

SEQ ID NO: 44395 - protein, 10 aa, Homo Sapiens
RLNQVELPHW

SEQ ID NO: 44396 - protein, 10 aa, Homo Sapiens
RLNWGEPMHW

SEQ ID NO: 44397 - protein, 10 aa, Homo Sapiens
RLSEFIPAVF

SEQ ID NO: 44398 - protein, 10 aa, Homo Sapiens
RLSYPACWEW

SEQ ID NO: 44399 - protein, 10 aa, Homo Sapiens
RLVERILTSW

SEQ ID NO: 44400 - protein, 10 aa, Homo Sapiens
RLYGKSLYSF

SEQ ID NO: 44401 - protein, 10 aa, Homo Sapiens
RLYGPSSVSF

SEQ ID NO: 44402 - protein, 10 aa, Homo Sapiens
RLYSGVLITL

SEQ ID NO: 44403 - protein, 10 aa, Homo Sapiens
RMAGIKVWVL

SEQ ID NO: 44404 - protein, 10 aa, Homo Sapiens
RMANLMGIEF

SEQ ID NO: 44405 - protein, 10 aa, Homo Sapiens
RMFHSVKSTW

SEQ ID NO: 44406 - protein, 10 aa, Homo Sapiens
RMFNSIAETW

SEQ ID NO: 44407 - protein, 10 aa, Homo Sapiens
RMIDFAHSTF

SEQ ID NO: 44408 - protein, 10 aa, Homo Sapiens
RMIDSMHQSW

SEQ ID NO: 44409 - protein, 10 aa, Homo Sapiens
RMIKEFRATL

SEQ ID NO: 44410 - protein, 10 aa, Homo Sapiens
RMKNTGNVKW

SEQ ID NO: 44411 - protein, 10 aa, Homo Sapiens
RMLEESNLSF

SEQ ID NO: 44412 - protein, 10 aa, Homo Sapiens
RMLGQCTQTW

SEQ ID NO: 44413 - protein, 10 aa, Homo Sapiens
RMLSFQQMTW

SEQ ID NO: 44414 - protein, 10 aa, Homo Sapiens
RMMNAIKESY

SEQ ID NO: 44415 - protein, 10 aa, Homo Sapiens
RMNQAPTVGF

SEQ ID NO: 44416 - protein, 10 aa, Homo Sapiens
RMSGLTRHQW

SEQ ID NO: 44417 - protein, 10 aa, Homo Sapiens
RMYFGEHLSF

SEQ ID NO: 44418 - protein, 10 aa, Homo Sapiens
RMYPFQIHSI

SEQ ID NO: 44419 - protein, 10 aa, Homo Sapiens
RMYPLKPTWW

SEQ ID NO: 44420 - protein, 10 aa, Homo Sapiens
RQADLKNWSL

SEQ ID NO: 44421 - protein, 10 aa, Homo Sapiens
RQKASIHEAW

SEQ ID NO: 44422 - protein, 10 aa, Homo Sapiens
RQLDDLNMRW

SEQ ID NO: 44423 - protein, 10 aa, Homo Sapiens
RQLEGILKSF

SEQ ID NO: 44424 - protein, 10 aa, Homo Sapiens
RQLPEPLISF

SEQ ID NO: 44425 - protein, 10 aa, Homo Sapiens
RQMDFEFAAW

SEQ ID NO: 44426 - protein, 10 aa, Homo Sapiens
RQMEHFLDSW

SEQ ID NO: 44427 - protein, 10 aa, Homo Sapiens
RQNPRIVNHW

SEQ ID NO: 44428 - protein, 10 aa, Homo Sapiens
RQRLPKYYSW

SEQ ID NO: 44429 - protein, 10 aa, Homo Sapiens
RQYDGIFYEF

SEQ ID NO: 44430 - protein, 10 aa, Homo Sapiens
RQYEGPLHHY

SEQ ID NO: 44431 - protein, 10 aa, Homo Sapiens
RQYKDYKIHW

SEQ ID NO: 44432 - protein, 10 aa, Homo Sapiens
RSGPRIFAVW

SEQ ID NO: 44433 - protein, 10 aa, Homo Sapiens
RSKPHIHPCW

SEQ ID NO: 44434 - protein, 10 aa, Homo Sapiens
RSMYPVWKSF

SEQ ID NO: 44435 - protein, 10 aa, Homo Sapiens
RSYLVQYMQF

SEQ ID NO: 44436 - protein, 10 aa, Homo Sapiens
RTAKALQAHW

SEQ ID NO: 44437 - protein, 10 aa, Homo Sapiens
RTATGCYIGW

SEQ ID NO: 44438 - protein, 10 aa, Homo Sapiens
RTCEWTGLKF

SEQ ID NO: 44439 - protein, 10 aa, Homo Sapiens
RTFGGNKLYW

SEQ ID NO: 44440 - protein, 10 aa, Homo Sapiens
RTFRNWMNSL

SEQ ID NO: 44441 - protein, 10 aa, Homo Sapiens
RTFSNTTLLF

SEQ ID NO: 44442 - protein, 10 aa, Homo Sapiens
RTGEGFLCVF

SEQ ID NO: 44443 - protein, 10 aa, Homo Sapiens
RTILVDNNTW

SEQ ID NO: 44444 - protein, 10 aa, Homo Sapiens
RTLDNQLFFF

SEQ ID NO: 44445 - protein, 10 aa, Homo Sapiens
RTLDTIQLAF

SEQ ID NO: 44446 - protein, 10 aa, Homo Sapiens
RTMNIKSATW

SEQ ID NO: 44447 - protein, 10 aa, Homo Sapiens
RTMTDGLVTF

SEQ ID NO: 44448 - protein, 10 aa, Homo Sapiens
RTNHQGTYVL

SEQ ID NO: 44449 - protein, 10 aa, Homo Sapiens
RTNPICSMTW

SEQ ID NO: 44450 - protein, 10 aa, Homo Sapiens
RTTLVDNNTW

SEQ ID NO: 44451 - protein, 10 aa, Homo Sapiens
RTTPYSRTAW

SEQ ID NO: 44452 - protein, 10 aa, Homo Sapiens
RTYEAKLLAF

SEQ ID NO: 44453 - protein, 10 aa, Homo Sapiens
RTYINPFVSF

SEQ ID NO: 44454 - protein, 10 aa, Homo Sapiens
RTYSLVGQAW

SEQ ID NO: 44455 - protein, 10 aa, Homo Sapiens
RTYSVPRLCW

SEQ ID NO: 44456 - protein, 10 aa, Homo Sapiens
RVAAVRAAAW

SEQ ID NO: 44457 - protein, 10 aa, Homo Sapiens
RVADFGSATF

SEQ ID NO: 44458 - protein, 10 aa, Homo Sapiens
RVAELINASY

SEQ ID NO: 44459 - protein, 10 aa, Homo Sapiens
RVANPPFSTW

SEQ ID NO: 44460 - protein, 10 aa, Homo Sapiens
RVFDTRTEAW

SEQ ID NO: 44461 - protein, 10 aa, Homo Sapiens
RVFEGPYKEY

SEQ ID NO: 44462 - protein, 10 aa, Homo Sapiens
RVFFGKNLAF

SEQ ID NO: 44463 - protein, 10 aa, Homo Sapiens
RVFIGNLNTL

SEQ ID NO: 44464 - protein, 10 aa, Homo Sapiens
RVFPDKGYSF

SEQ ID NO: 44465 - protein, 10 aa, Homo Sapiens
RVFPEKGYSF

SEQ ID NO: 44466 - protein, 10 aa, Homo Sapiens
RVFSQGSHAW

SEQ ID NO: 44467 - protein, 10 aa, Homo Sapiens
RVFTNSRERW

SEQ ID NO: 44468 - protein, 10 aa, Homo Sapiens
RVGAFLKNAW

SEQ ID NO: 44469 - protein, 10 aa, Homo Sapiens
RVGRHVVSVW

SEQ ID NO: 44470 - protein, 10 aa, Homo Sapiens
RVGVGIRSSY

SEQ ID NO: 44471 - protein, 10 aa, Homo Sapiens
RVIQISQFEW

SEQ ID NO: 44472 - protein, 10 aa, Homo Sapiens
RVIQKALESI

SEQ ID NO: 44473 - protein, 10 aa, Homo Sapiens
RVIQVSPFLL

SEQ ID NO: 44474 - protein, 10 aa, Homo Sapiens
RVKAEPFIKW

SEQ ID NO: 44475 - protein, 10 aa, Homo Sapiens
RVKPLHYISW

SEQ ID NO: 44476 - protein, 10 aa, Homo Sapiens
RVLDSRLVTF

SEQ ID NO: 44477 - protein, 10 aa, Homo Sapiens
RVLEGTLLEF

SEQ ID NO: 44478 - protein, 10 aa, Homo Sapiens
RVLGGVMSAF

SEQ ID NO: 44479 - protein, 10 aa, Homo Sapiens
RVNPRHYNAW

SEQ ID NO: 44480 - protein, 10 aa, Homo Sapiens
RVQAELQHCW

SEQ ID NO: 44481 - protein, 10 aa, Homo Sapiens
RVSPALGITW

SEQ ID NO: 44482 - protein, 10 aa, Homo Sapiens
RVYLHLRQTW

SEQ ID NO: 44483 - protein, 10 aa, Homo Sapiens
RVYPERSTSY

SEQ ID NO: 44484 - protein, 10 aa, Homo Sapiens
SFPALSLSSF

SEQ ID NO: 44485 - protein, 10 aa, Homo Sapiens
SFSFGSPNPW

SEQ ID NO: 44486 - protein, 10 aa, Homo Sapiens
SISGHHPETW

SEQ ID NO: 44487 - protein, 10 aa, Homo Sapiens
SLSPFRRHSW

SEQ ID NO: 44488 - protein, 10 aa, Homo Sapiens
SLWGPYKDIW

SEQ ID NO: 44489 - protein, 10 aa, Homo Sapiens
SSIRGKKWSW

SEQ ID NO: 44490 - protein, 10 aa, Homo Sapiens
STIGFKLPSY

SEQ ID NO: 44491 - protein, 10 aa, Homo Sapiens
STLGHSRSHW

SEQ ID NO: 44492 - protein, 10 aa, Homo Sapiens
STLPNWMAEF

SEQ ID NO: 44493 - protein, 10 aa, Homo Sapiens
STLVDGRYTY

SEQ ID NO: 44494 - protein, 10 aa, Homo Sapiens
STYQRWQFTL

SEQ ID NO: 44495 - protein, 10 aa, Homo Sapiens
SVAEITNACF

SEQ ID NO: 44496 - protein, 10 aa, Homo Sapiens
SVFRDHRATW

SEQ ID NO: 44497 - protein, 10 aa, Homo Sapiens
TLQVNGRHEY

SEQ ID NO: 44498 - protein, 10 aa, Homo Sapiens
TLWDGHAAVW

SEQ ID NO: 44499 - protein, 10 aa, Homo Sapiens
TMGRALRYYY

SEQ ID NO: 44500 - protein, 10 aa, Homo Sapiens
VDGAYMTKVD

SEQ ID NO: 44501 - protein, 10 aa, Homo Sapiens
VLFPFSLPHW

SEQ ID NO: 44502 - protein, 10 aa, Homo Sapiens
VLYQKHVHTY

SEQ ID NO: 44503 - protein, 10 aa, Homo Sapiens
VQFVPPLPEW

SEQ ID NO: 44504 - protein, 10 aa, Homo Sapiens
VQRPFIQMSW

SEQ ID NO: 44505 - protein, 10 aa, Homo Sapiens
VTAEAVRSVW

SEQ ID NO: 44506 - protein, 10 aa, Homo Sapiens
VTARLVGVLW

SEQ ID NO: 44507 - protein, 10 aa, Homo Sapiens
VTFPFKPESW

SEQ ID NO: 44508 - protein, 10 aa, Homo Sapiens
VVKEDAFYSW

SEQ ID NO: 44509 - protein, 10 aa, Homo Sapiens
VVWENKHITW

SEQ ID NO: 44510 - protein, 10 aa, Homo Sapiens
VVWGECNHSF

SEQ ID NO: 44511 - protein, 10 aa, Homo Sapiens
YIYNQPRQSW

SEQ ID NO: 44512 - protein, 11 aa, Homo Sapiens
AIFEAKKSFYW

SEQ ID NO: 44513 - protein, 11 aa, Homo Sapiens
AIWDNATSKTW

SEQ ID NO: 44514 - protein, 11 aa, Homo Sapiens
ALFARPDLLLL

SEQ ID NO: 44515 - protein, 11 aa, Homo Sapiens
ALLDGRVQLRF

SEQ ID NO: 44516 - protein, 11 aa, Homo Sapiens
ALLKNPKILLL

SEQ ID NO: 44517 - protein, 11 aa, Homo Sapiens
ALWNEGYIMGF

SEQ ID NO: 44518 - protein, 11 aa, Homo Sapiens
ALWRGSAYAGF

SEQ ID NO: 44519 - protein, 11 aa, Homo Sapiens
AMAPAAGYHVW

SEQ ID NO: 44520 - protein, 11 aa, Homo Sapiens
AMFDQSQIQEF

SEQ ID NO: 44521 - protein, 11 aa, Homo Sapiens
AQFPGACGLRY

SEQ ID NO: 44522 - protein, 11 aa, Homo Sapiens
ASFPNVSSFEW

SEQ ID NO: 44523 - protein, 11 aa, Homo Sapiens
ATAAAATAMLW

SEQ ID NO: 44524 - protein, 11 aa, Homo Sapiens
AVFGHPFSLGW

SEQ ID NO: 44525 - protein, 11 aa, Homo Sapiens
AVIENPEMLKY

SEQ ID NO: 44526 - protein, 11 aa, Homo Sapiens
AVQDKGSIHKF

SEQ ID NO: 44527 - protein, 11 aa, Homo Sapiens
FLTAAKKARAG

SEQ ID NO: 44528 - protein, 11 aa, Homo Sapiens
GLFAHPSLWQL

SEQ ID NO: 44529 - protein, 11 aa, Homo Sapiens
GLIENPALLRW

SEQ ID NO: 44530 - protein, 11 aa, Homo Sapiens
GSFGKGNLFVL

SEQ ID NO: 44531 - protein, 11 aa, Homo Sapiens
GTFKKSTVLQL

SEQ ID NO: 44532 - protein, 11 aa, Homo Sapiens
GVAYGATRYNY

SEQ ID NO: 44533 - protein, 11 aa, Homo Sapiens
HQFEKIEQFVY

SEQ ID NO: 44534 - protein, 11 aa, Homo Sapiens
HTWNGIRHLMW

SEQ ID NO: 44535 - protein, 11 aa, Homo Sapiens
ILLVNDHLLNF

SEQ ID NO: 44536 - protein, 11 aa, Homo Sapiens
ILRSMGMEDAF

SEQ ID NO: 44537 - protein, 11 aa, Homo Sapiens
IPLDPVAGYKE

SEQ ID NO: 44538 - protein, 11 aa, Homo Sapiens
IQFRLPDGSSF

SEQ ID NO: 44539 - protein, 11 aa, Homo Sapiens
ISERYGPVFTI

SEQ ID NO: 44540 - protein, 11 aa, Homo Sapiens
IVRPSIVGASW

SEQ ID NO: 44541 - protein, 11 aa, Homo Sapiens
KAFDRPSLFQI

SEQ ID NO: 44542 - protein, 11 aa, Homo Sapiens
KAFDRPSLFRI

SEQ ID NO: 44543 - protein, 11 aa, Homo Sapiens
KAFDYPSLFRI

SEQ ID NO: 44544 - protein, 11 aa, Homo Sapiens
KAFNSPNLFQI

SEQ ID NO: 44545 - protein, 11 aa, Homo Sapiens
KAFPHSSSLRY

SEQ ID NO: 44546 - protein, 11 aa, Homo Sapiens
KIFGQNSALVI

SEQ ID NO: 44547 - protein, 11 aa, Homo Sapiens
KIFKEEGLLGF

SEQ ID NO: 44548 - protein, 11 aa, Homo Sapiens
KIFSENDIFEI

SEQ ID NO: 44549 - protein, 11 aa, Homo Sapiens
KIFSESHKTVF

SEQ ID NO: 44550 - protein, 11 aa, Homo Sapiens
KIKSQDLFQSW

SEQ ID NO: 44551 - protein, 11 aa, Homo Sapiens
KILEEPHPLMF

SEQ ID NO: 44552 - protein, 11 aa, Homo Sapiens
KILGKEVKVNW

SEQ ID NO: 44553 - protein, 11 aa, Homo Sapiens
KILYPSTLFLL

SEQ ID NO: 44554 - protein, 11 aa, Homo Sapiens
KIMDYSLLMSI

SEQ ID NO: 44555 - protein, 11 aa, Homo Sapiens
KIMGKEVKVNW

SEQ ID NO: 44556 - protein, 11 aa, Homo Sapiens
KIQPDTIIQVW

SEQ ID NO: 44557 - protein, 11 aa, Homo Sapiens
KISEAGKDLLY

SEQ ID NO: 44558 - protein, 11 aa, Homo Sapiens
KIVDGACLNHF

SEQ ID NO: 44559 - protein, 11 aa, Homo Sapiens
KIWQCGGKLLF

SEQ ID NO: 44560 - protein, 11 aa, Homo Sapiens
KIYENEDQLLW

SEQ ID NO: 44561 - protein, 11 aa, Homo Sapiens
KKDVDNAYMIK

SEQ ID NO: 44562 - protein, 11 aa, Homo Sapiens
KLAAKGLRDPW

SEQ ID NO: 44563 - protein, 11 aa, Homo Sapiens
KLAALGSLLVL

SEQ ID NO: 44564 - protein, 11 aa, Homo Sapiens
KLADFGLARIY

SEQ ID NO: 44565 - protein, 11 aa, Homo Sapiens
KLCEYITQTTL

SEQ ID NO: 44566 - protein, 11 aa, Homo Sapiens
KLFADAGLVCI

SEQ ID NO: 44567 - protein, 11 aa, Homo Sapiens
KLFANERCLQL

SEQ ID NO: 44568 - protein, 11 aa, Homo Sapiens
KLFDRPQELKL

SEQ ID NO: 44569 - protein, 11 aa, Homo Sapiens
KLFDSICNNKW

SEQ ID NO: 44570 - protein, 11 aa, Homo Sapiens
KLFGAAEVQRF

SEQ ID NO: 44571 - protein, 11 aa, Homo Sapiens
KLFGPFTRNYY

SEQ ID NO: 44572 - protein, 11 aa, Homo Sapiens
KLFKNSSGLGF

SEQ ID NO: 44573 - protein, 11 aa, Homo Sapiens
KLFKSTSQLVL

SEQ ID NO: 44574 - protein, 11 aa, Homo Sapiens
KLFPKGTIFTA

SEQ ID NO: 44575 - protein, 11 aa, Homo Sapiens
KLFRHPHIIKL

SEQ ID NO: 44576 - protein, 11 aa, Homo Sapiens
KLFSYRDVNSW

SEQ ID NO: 44577 - protein, 11 aa, Homo Sapiens
KLFTEKQRMKY

SEQ ID NO: 44578 - protein, 11 aa, Homo Sapiens
KLGEFAKVLEL

SEQ ID NO: 44579 - protein, 11 aa, Homo Sapiens
KLIAGKIIPAI

SEQ ID NO: 44580 - protein, 11 aa, Homo Sapiens
KLIEPGFLTAF

SEQ ID NO: 44581 - protein, 11 aa, Homo Sapiens
KLISGDVLYIW

SEQ ID NO: 44582 - protein, 11 aa, Homo Sapiens
KLKEAETRAEF

SEQ ID NO: 44583 - protein, 11 aa, Homo Sapiens
KLKMKEREEAW

SEQ ID NO: 44584 - protein, 11 aa, Homo Sapiens
KLKPFIDREWW

SEQ ID NO: 44585 - protein, 11 aa, Homo Sapiens
KLLANKTPHTW

SEQ ID NO: 44586 - protein, 11 aa, Homo Sapiens
KLLAWSGVLEW

SEQ ID NO: 44587 - protein, 11 aa, Homo Sapiens
KLLDGFFIRPF

SEQ ID NO: 44588 - protein, 11 aa, Homo Sapiens
KLLDNGALTSF

SEQ ID NO: 44589 - protein, 11 aa, Homo Sapiens
KLLDRKSLQAI

SEQ ID NO: 44590 - protein, 11 aa, Homo Sapiens
KLLKPGGMLLF

SEQ ID NO: 44591 - protein, 11 aa, Homo Sapiens
KLLKQVDFLNW

SEQ ID NO: 44592 - protein, 11 aa, Homo Sapiens
KLLPGSAIQAL

SEQ ID NO: 44593 - protein, 11 aa, Homo Sapiens
KLPEILGKMSF

SEQ ID NO: 44594 - protein, 11 aa, Homo Sapiens
KLRFLQTEDSW

SEQ ID NO: 44595 - protein, 11 aa, Homo Sapiens
KLRSIGWGEEF

SEQ ID NO: 44596 - protein, 11 aa, Homo Sapiens
KLSDGRLRVGY

SEQ ID NO: 44597 - protein, 11 aa, Homo Sapiens
KLSLVAAMLLL

SEQ ID NO: 44598 - protein, 11 aa, Homo Sapiens
KLVQPIPFFTW

SEQ ID NO: 44599 - protein, 11 aa, Homo Sapiens
KLVTGTVLAVF

SEQ ID NO: 44600 - protein, 11 aa, Homo Sapiens
KLWEAESKLSF

SEQ ID NO: 44601 - protein, 11 aa, Homo Sapiens
KLYEEKTGNAW

SEQ ID NO: 44602 - protein, 11 aa, Homo Sapiens
KLYPEGKLPHW

SEQ ID NO: 44603 - protein, 11 aa, Homo Sapiens
KLYTKHGTLKY

SEQ ID NO: 44604 - protein, 11 aa, Homo Sapiens
KMEEGIDRHVW

SEQ ID NO: 44605 - protein, 11 aa, Homo Sapiens
KMFSNAGILKM

SEQ ID NO: 44606 - protein, 11 aa, Homo Sapiens
KMGDWKTCHSF

SEQ ID NO: 44607 - protein, 11 aa, Homo Sapiens
KMHDYDGNNLL

SEQ ID NO: 44608 - protein, 11 aa, Homo Sapiens
KMKPSDLSQVW

SEQ ID NO: 44609 - protein, 11 aa, Homo Sapiens
KMLDHPHIIKL

SEQ ID NO: 44610 - protein, 11 aa, Homo Sapiens
KMLNHENVVKF

SEQ ID NO: 44611 - protein, 11 aa, Homo Sapiens
KMLSGVGGFVL

SEQ ID NO: 44612 - protein, 11 aa, Homo Sapiens
KMNPLWNTMVI

SEQ ID NO: 44613 - protein, 11 aa, Homo Sapiens
KQAEKDNFLEW

SEQ ID NO: 44614 - protein, 11 aa, Homo Sapiens
KQASVVIQQQY

SEQ ID NO: 44615 - protein, 11 aa, Homo Sapiens
KQFAEGSTLKL

SEQ ID NO: 44616 - protein, 11 aa, Homo Sapiens
KQFAEMYVAKF

SEQ ID NO: 44617 - protein, 11 aa, Homo Sapiens
KQFSDASQLDF

SEQ ID NO: 44618 - protein, 11 aa, Homo Sapiens
KQIDPEMLNSF

SEQ ID NO: 44619 - protein, 11 aa, Homo Sapiens
KQIKNSSLLSF

SEQ ID NO: 44620 - protein, 11 aa, Homo Sapiens
KQLSKDSILSL

SEQ ID NO: 44621 - protein, 11 aa, Homo Sapiens
KQMGYQCFVSF

SEQ ID NO: 44622 - protein, 11 aa, Homo Sapiens
KQMVHEGNQRW

SEQ ID NO: 44623 - protein, 11 aa, Homo Sapiens
KQQEAPDLFQW

SEQ ID NO: 44624 - protein, 11 aa, Homo Sapiens
KQSPSAGVHTF

SEQ ID NO: 44625 - protein, 11 aa, Homo Sapiens
KQVQSYIIQNF

SEQ ID NO: 44626 - protein, 11 aa, Homo Sapiens
KQWNGKERSIY

SEQ ID NO: 44627 - protein, 11 aa, Homo Sapiens
KSFDASDTLAL

SEQ ID NO: 44628 - protein, 11 aa, Homo Sapiens
KSFEAPIKLVF

SEQ ID NO: 44629 - protein, 11 aa, Homo Sapiens
KSFEWLSQMRF

SEQ ID NO: 44630 - protein, 11 aa, Homo Sapiens
KSFGSAQEFAW

SEQ ID NO: 44631 - protein, 11 aa, Homo Sapiens
KSFGWPSFITY

SEQ ID NO: 44632 - protein, 11 aa, Homo Sapiens
KSFKGSSGLRY

SEQ ID NO: 44633 - protein, 11 aa, Homo Sapiens
KSFLGVKELSF

SEQ ID NO: 44634 - protein, 11 aa, Homo Sapiens
KSFSRGSILVM

SEQ ID NO: 44635 - protein, 11 aa, Homo Sapiens
KSKAMTGVEQW

SEQ ID NO: 44636 - protein, 11 aa, Homo Sapiens
KSNNVEMDWVL

SEQ ID NO: 44637 - protein, 11 aa, Homo Sapiens
KTAGYQAVKRW

SEQ ID NO: 44638 - protein, 11 aa, Homo Sapiens
KTASQVHLMKF

SEQ ID NO: 44639 - protein, 11 aa, Homo Sapiens
KTCEGEGRIEW

SEQ ID NO: 44640 - protein, 11 aa, Homo Sapiens
KTFEDSDLFHL

SEQ ID NO: 44641 - protein, 11 aa, Homo Sapiens
KTFEFNKELRY

SEQ ID NO: 44642 - protein, 11 aa, Homo Sapiens
KTFGRSSNLIL

SEQ ID NO: 44643 - protein, 11 aa, Homo Sapiens
KTFIVGDQISF

SEQ ID NO: 44644 - protein, 11 aa, Homo Sapiens
KTFQMAEYLKL

SEQ ID NO: 44645 - protein, 11 aa, Homo Sapiens
KTFSQTSHLVY

SEQ ID NO: 44646 - protein, 11 aa, Homo Sapiens
KTFSQTSSLVY

SEQ ID NO: 44647 - protein, 11 aa, Homo Sapiens
KTFSQTSYLVY

SEQ ID NO: 44648 - protein, 11 aa, Homo Sapiens
KTFSYKSSLVW

SEQ ID NO: 44649 - protein, 11 aa, Homo Sapiens
KTFSYPLDLLL

SEQ ID NO: 44650 - protein, 11 aa, Homo Sapiens
KTFVQRNMFEF

SEQ ID NO: 44651 - protein, 11 aa, Homo Sapiens
KTKQDEVNAAW

SEQ ID NO: 44652 - protein, 11 aa, Homo Sapiens
KTKRSIQFVDW

SEQ ID NO: 44653 - protein, 11 aa, Homo Sapiens
KTLDPTYILSY

SEQ ID NO: 44654 - protein, 11 aa, Homo Sapiens
KTLERSYLLKI

SEQ ID NO: 44655 - protein, 11 aa, Homo Sapiens
KTLSDIKLLQF

SEQ ID NO: 44656 - protein, 11 aa, Homo Sapiens
KTMSGTFLLRF

SEQ ID NO: 44657 - protein, 11 aa, Homo Sapiens
KTNGLSEDLIW

SEQ ID NO: 44658 - protein, 11 aa, Homo Sapiens
KTPLGGQKRSF

SEQ ID NO: 44659 - protein, 11 aa, Homo Sapiens
KTQVAGGQLSF

SEQ ID NO: 44660 - protein, 11 aa, Homo Sapiens
KTRDGSDYEGW

SEQ ID NO: 44661 - protein, 11 aa, Homo Sapiens
KTSHLRAHLRW

SEQ ID NO: 44662 - protein, 11 aa, Homo Sapiens
KTSNIGLSMEF

SEQ ID NO: 44663 - protein, 11 aa, Homo Sapiens
KTSVSVHLMEW

SEQ ID NO: 44664 - protein, 11 aa, Homo Sapiens
KTWAEIRQQRW

SEQ ID NO: 44665 - protein, 11 aa, Homo Sapiens
KTWKGSIGLLL

SEQ ID NO: 44666 - protein, 11 aa, Homo Sapiens
KTYAEVDRQVI

SEQ ID NO: 44667 - protein, 11 aa, Homo Sapiens
KTYNEPGSQVF

SEQ ID NO: 44668 - protein, 11 aa, Homo Sapiens
KVFPSPHILQI

SEQ ID NO: 44669 - protein, 11 aa, Homo Sapiens
KVFSSERLFSW

SEQ ID NO: 44670 - protein, 11 aa, Homo Sapiens
KVFTKHGLLKL

SEQ ID NO: 44671 - protein, 11 aa, Homo Sapiens
KVGDFGDAINW

SEQ ID NO: 44672 - protein, 11 aa, Homo Sapiens
KVHAIPLRSSW

SEQ ID NO: 44673 - protein, 11 aa, Homo Sapiens
KVHEKNRSYTW

SEQ ID NO: 44674 - protein, 11 aa, Homo Sapiens
KVIHEQVNHRW

SEQ ID NO: 44675 - protein, 11 aa, Homo Sapiens
KVKDEKIRQAF

SEQ ID NO: 44676 - protein, 11 aa, Homo Sapiens
KVKIPEELKPW

SEQ ID NO: 44677 - protein, 11 aa, Homo Sapiens
KVLADSERYTW

SEQ ID NO: 44678 - protein, 11 aa, Homo Sapiens
KVLDRGCLRTW

SEQ ID NO: 44679 - protein, 11 aa, Homo Sapiens
KVLPPNHRVVW

SEQ ID NO: 44680 - protein, 11 aa, Homo Sapiens
KVLPTNHRVTW

SEQ ID NO: 44681 - protein, 11 aa, Homo Sapiens
KVMELLPTHAF

SEQ ID NO: 44682 - protein, 11 aa, Homo Sapiens
KVMKIKVLRSW

SEQ ID NO: 44683 - protein, 11 aa, Homo Sapiens
KVMNWKETLVF

SEQ ID NO: 44684 - protein, 11 aa, Homo Sapiens
KVMPKELKLSY

SEQ ID NO: 44685 - protein, 11 aa, Homo Sapiens
KVMPQGLVISF

SEQ ID NO: 44686 - protein, 11 aa, Homo Sapiens
KVVDVVRNLVF

SEQ ID NO: 44687 - protein, 11 aa, Homo Sapiens
KVVLAEVIQAF

SEQ ID NO: 44688 - protein, 11 aa, Homo Sapiens
KVVSDDALMHW

SEQ ID NO: 44689 - protein, 11 aa, Homo Sapiens
KVWSEVNQAVL

SEQ ID NO: 44690 - protein, 11 aa, Homo Sapiens
KVYDSQGLLIF

SEQ ID NO: 44691 - protein, 11 aa, Homo Sapiens
KVYENDDQLLW

SEQ ID NO: 44692 - protein, 11 aa, Homo Sapiens
KVYSSVLRQCY

SEQ ID NO: 44693 - protein, 11 aa, Homo Sapiens
LLFHHPNILEL

SEQ ID NO: 44694 - protein, 11 aa, Homo Sapiens
LSFDAPGRLLW

SEQ ID NO: 44695 - protein, 11 aa, Homo Sapiens
MMFSGPQILKL

SEQ ID NO: 44696 - protein, 11 aa, Homo Sapiens
QIFGLSNHLVW

SEQ ID NO: 44697 - protein, 11 aa, Homo Sapiens
QILQEKNRYSW

SEQ ID NO: 44698 - protein, 11 aa, Homo Sapiens
QISDPDVRHTW

SEQ ID NO: 44699 - protein, 11 aa, Homo Sapiens
QLEPEELYQTF

SEQ ID NO: 44700 - protein, 11 aa, Homo Sapiens
QLFAPGGRLSW

SEQ ID NO: 44701 - protein, 11 aa, Homo Sapiens
QMLSSTEILKW

SEQ ID NO: 44702 - protein, 11 aa, Homo Sapiens
QQFAHPPLLVL

SEQ ID NO: 44703 - protein, 11 aa, Homo Sapiens
QTWAGSHSLKY

SEQ ID NO: 44704 - protein, 11 aa, Homo Sapiens
QVLPESCLLVW

SEQ ID NO: 44705 - protein, 11 aa, Homo Sapiens
RAFDCPSSFQI

SEQ ID NO: 44706 - protein, 11 aa, Homo Sapiens
RAFTCDDLFRF

SEQ ID NO: 44707 - protein, 11 aa, Homo Sapiens
RALEAEKRALW

SEQ ID NO: 44708 - protein, 11 aa, Homo Sapiens
RALQASALNAW

SEQ ID NO: 44709 - protein, 11 aa, Homo Sapiens
RALRGEARSSW

SEQ ID NO: 44710 - protein, 11 aa, Homo Sapiens
RIAFWDDVYGF

SEQ ID NO: 44711 - protein, 11 aa, Homo Sapiens
RIATPFQVYSW

SEQ ID NO: 44712 - protein, 11 aa, Homo Sapiens
RICEVINEAVW

SEQ ID NO: 44713 - protein, 11 aa, Homo Sapiens
RIFEKMFAMTL

SEQ ID NO: 44714 - protein, 11 aa, Homo Sapiens
RIIEETLALKF

SEQ ID NO: 44715 - protein, 11 aa, Homo Sapiens
RIKEGSSRPVW

SEQ ID NO: 44716 - protein, 11 aa, Homo Sapiens
RILHRTDRWTY

SEQ ID NO: 44717 - protein, 11 aa, Homo Sapiens
RILNGEVLESF

SEQ ID NO: 44718 - protein, 11 aa, Homo Sapiens
RILPQDVILKF

SEQ ID NO: 44719 - protein, 11 aa, Homo Sapiens
RIRPPPSSSSW

SEQ ID NO: 44720 - protein, 11 aa, Homo Sapiens
RIWEETGNYTF

SEQ ID NO: 44721 - protein, 11 aa, Homo Sapiens
RLAAASAFTSL

SEQ ID NO: 44722 - protein, 11 aa, Homo Sapiens
RLAAFADALEF

SEQ ID NO: 44723 - protein, 11 aa, Homo Sapiens
RLAAIVAKQVL

SEQ ID NO: 44724 - protein, 11 aa, Homo Sapiens
RLAGVGWRVDY

SEQ ID NO: 44725 - protein, 11 aa, Homo Sapiens
RLALFNPDVCW

SEQ ID NO: 44726 - protein, 11 aa, Homo Sapiens
RLAQQNAVTSL

SEQ ID NO: 44727 - protein, 11 aa, Homo Sapiens
RLAVREAIHAL

SEQ ID NO: 44728 - protein, 11 aa, Homo Sapiens
RLEEASLLHQF

SEQ ID NO: 44729 - protein, 11 aa, Homo Sapiens
RLFDEGTISKW

SEQ ID NO: 44730 - protein, 11 aa, Homo Sapiens
RLFKIDKEYLL

SEQ ID NO: 44731 - protein, 11 aa, Homo Sapiens
RLFNDPVAMVL

SEQ ID NO: 44732 - protein, 11 aa, Homo Sapiens
RLFNHPNILRL

SEQ ID NO: 44733 - protein, 11 aa, Homo Sapiens
RLFNHTACLVL

SEQ ID NO: 44734 - protein, 11 aa, Homo Sapiens
RLFPASGLRGF

SEQ ID NO: 44735 - protein, 11 aa, Homo Sapiens
RLFPLSGHLLL

SEQ ID NO: 44736 - protein, 11 aa, Homo Sapiens
RLFPNAKFLLM

SEQ ID NO: 44737 - protein, 11 aa, Homo Sapiens
RLFPNSKFLLM

SEQ ID NO: 44738 - protein, 11 aa, Homo Sapiens
RLFPSAAQVTF

SEQ ID NO: 44739 - protein, 11 aa, Homo Sapiens
RLFPYSQYYRW

SEQ ID NO: 44740 - protein, 11 aa, Homo Sapiens
RLGMAARGHSW

SEQ ID NO: 44741 - protein, 11 aa, Homo Sapiens
RLHGLPEQFLY

SEQ ID NO: 44742 - protein, 11 aa, Homo Sapiens
RLKEPGEKTGW

SEQ ID NO: 44743 - protein, 11 aa, Homo Sapiens
RLKPKVLLNHF

SEQ ID NO: 44744 - protein, 11 aa, Homo Sapiens
RLKSQDLELSW

SEQ ID NO: 44745 - protein, 11 aa, Homo Sapiens
RLLDDAQRLLY

SEQ ID NO: 44746 - protein, 11 aa, Homo Sapiens
RLLEEGVLRQI

SEQ ID NO: 44747 - protein, 11 aa, Homo Sapiens
RLLNEALILKF

SEQ ID NO: 44748 - protein, 11 aa, Homo Sapiens
RLLTKNNRWTW

SEQ ID NO: 44749 - protein, 11 aa, Homo Sapiens
RLMEEDELPSW

SEQ ID NO: 44750 - protein, 11 aa, Homo Sapiens
RLMTAQNLVSY

SEQ ID NO: 44751 - protein, 11 aa, Homo Sapiens
RLNCERGRQTW

SEQ ID NO: 44752 - protein, 11 aa, Homo Sapiens
RLQELGARHFY

SEQ ID NO: 44753 - protein, 11 aa, Homo Sapiens
RLQSKTIKVSY

SEQ ID NO: 44754 - protein, 11 aa, Homo Sapiens
RLRELDRNELF

SEQ ID NO: 44755 - protein, 11 aa, Homo Sapiens
RLRVRDINEAF

SEQ ID NO: 44756 - protein, 11 aa, Homo Sapiens
RLSPAGAALLW

SEQ ID NO: 44757 - protein, 11 aa, Homo Sapiens
RLSSESSCKSW

SEQ ID NO: 44758 - protein, 11 aa, Homo Sapiens
RLWLLDDSKSW

SEQ ID NO: 44759 - protein, 11 aa, Homo Sapiens
RLWTQARQMGW

SEQ ID NO: 44760 - protein, 11 aa, Homo Sapiens
RLYGNPNTLRL

SEQ ID NO: 44761 - protein, 11 aa, Homo Sapiens
RLYHDIAQQAF

SEQ ID NO: 44762 - protein, 11 aa, Homo Sapiens
RLYMGTATLVW

SEQ ID NO: 44763 - protein, 11 aa, Homo Sapiens
RLYSGISGLEL

SEQ ID NO: 44764 - protein, 11 aa, Homo Sapiens
RMGGFGSIIQL

SEQ ID NO: 44765 - protein, 11 aa, Homo Sapiens
RMGTYGVRAAW

SEQ ID NO: 44766 - protein, 11 aa, Homo Sapiens
RMLDPSIKGTF

SEQ ID NO: 44767 - protein, 11 aa, Homo Sapiens
RMLLADQGQSW

SEQ ID NO: 44768 - protein, 11 aa, Homo Sapiens
RMLPAGGILVF

SEQ ID NO: 44769 - protein, 11 aa, Homo Sapiens
RMNPNSPSITY

SEQ ID NO: 44770 - protein, 11 aa, Homo Sapiens
RMQEESLRQEY

SEQ ID NO: 44771 - protein, 11 aa, Homo Sapiens
RMYPGLQVYTF

SEQ ID NO: 44772 - protein, 11 aa, Homo Sapiens
RQADTKAIQHL

SEQ ID NO: 44773 - protein, 11 aa, Homo Sapiens
RQFDHPHIVKL

SEQ ID NO: 44774 - protein, 11 aa, Homo Sapiens
RQIKYSKDKMW

SEQ ID NO: 44775 - protein, 11 aa, Homo Sapiens
RQKKESEAVEW

SEQ ID NO: 44776 - protein, 11 aa, Homo Sapiens
RQLENSLRETW

SEQ ID NO: 44777 - protein, 11 aa, Homo Sapiens
RQLHLEGMLCW

SEQ ID NO: 44778 - protein, 11 aa, Homo Sapiens
RQQEVTSINSF

SEQ ID NO: 44779 - protein, 11 aa, Homo Sapiens
RQVDAEVAQQW

SEQ ID NO: 44780 - protein, 11 aa, Homo Sapiens
RQYGSEGRFTF

SEQ ID NO: 44781 - protein, 11 aa, Homo Sapiens
RSFDKGPFATF

SEQ ID NO: 44782 - protein, 11 aa, Homo Sapiens
RSFDLGRQFLF

SEQ ID NO: 44783 - protein, 11 aa, Homo Sapiens
RSFIPDQHMVF

SEQ ID NO: 44784 - protein, 11 aa, Homo Sapiens
RSFYAESCFLF

SEQ ID NO: 44785 - protein, 11 aa, Homo Sapiens
RSLDHPNVLKF

SEQ ID NO: 44786 - protein, 11 aa, Homo Sapiens
RSLEGGFKISY

SEQ ID NO: 44787 - protein, 11 aa, Homo Sapiens
RTAGTICLETF

SEQ ID NO: 44788 - protein, 11 aa, Homo Sapiens
RTFAVTDELVF

SEQ ID NO: 44789 - protein, 11 aa, Homo Sapiens
RTFCDSSSLLF

SEQ ID NO: 44790 - protein, 11 aa, Homo Sapiens
RTFSESGRCRY

SEQ ID NO: 44791 - protein, 11 aa, Homo Sapiens
RTFSHSSHLAY

SEQ ID NO: 44792 - protein, 11 aa, Homo Sapiens
RTFTHPSRLTY

SEQ ID NO: 44793 - protein, 11 aa, Homo Sapiens
RTFVWPAHFKY

SEQ ID NO: 44794 - protein, 11 aa, Homo Sapiens
RTIQTPIGSTW

SEQ ID NO: 44795 - protein, 11 aa, Homo Sapiens
RTLGEIPTLVF

SEQ ID NO: 44796 - protein, 11 aa, Homo Sapiens
RTLPATVPLLL

SEQ ID NO: 44797 - protein, 11 aa, Homo Sapiens
RTLPTNTLMGF

SEQ ID NO: 44798 - protein, 11 aa, Homo Sapiens
RTLPVDSSHGF

SEQ ID NO: 44799 - protein, 11 aa, Homo Sapiens
RTMQPLAVLAF

SEQ ID NO: 44800 - protein, 11 aa, Homo Sapiens
RTMVQLGICAF

SEQ ID NO: 44801 - protein, 11 aa, Homo Sapiens
RTNPNSGDFRF

SEQ ID NO: 44802 - protein, 11 aa, Homo Sapiens
RTRNEELAQTW

SEQ ID NO: 44803 - protein, 11 aa, Homo Sapiens
RTSAVASGLQF

SEQ ID NO: 44804 - protein, 11 aa, Homo Sapiens
RTTVVARKLGF

SEQ ID NO: 44805 - protein, 11 aa, Homo Sapiens
RTWAEAAKTVL

SEQ ID NO: 44806 - protein, 11 aa, Homo Sapiens
RTWAEAARLVL

SEQ ID NO: 44807 - protein, 11 aa, Homo Sapiens
RTWKGTAFGGW

SEQ ID NO: 44808 - protein, 11 aa, Homo Sapiens
RTYPSIQIMNY

SEQ ID NO: 44809 - protein, 11 aa, Homo Sapiens
RTYQEIQELQW

SEQ ID NO: 44810 - protein, 11 aa, Homo Sapiens
RVADEGSFTCF

SEQ ID NO: 44811 - protein, 11 aa, Homo Sapiens
RVAEITKEQRL

SEQ ID NO: 44812 - protein, 11 aa, Homo Sapiens
RVAFPDTRKTY

SEQ ID NO: 44813 - protein, 11 aa, Homo Sapiens
RVAGIFPRLSF

SEQ ID NO: 44814 - protein, 11 aa, Homo Sapiens
RVFPQPGSLYL

SEQ ID NO: 44815 - protein, 11 aa, Homo Sapiens
RVFPSKARFYY

SEQ ID NO: 44816 - protein, 11 aa, Homo Sapiens
RVFRLITSQVF

SEQ ID NO: 44817 - protein, 11 aa, Homo Sapiens
RVFSNVSIILF

SEQ ID NO: 44818 - protein, 11 aa, Homo Sapiens
RVHPGETNASW

SEQ ID NO: 44819 - protein, 11 aa, Homo Sapiens
RVIDREGVYEI

SEQ ID NO: 44820 - protein, 11 aa, Homo Sapiens
RVIEGDVVSAL

SEQ ID NO: 44821 - protein, 11 aa, Homo Sapiens
RVIPHDVLPDW

SEQ ID NO: 44822 - protein, 11 aa, Homo Sapiens
RVISELQEACW

SEQ ID NO: 44823 - protein, 11 aa, Homo Sapiens
RVKAVDGDEQW

SEQ ID NO: 44824 - protein, 11 aa, Homo Sapiens
RVLEAANLFQF

SEQ ID NO: 44825 - protein, 11 aa, Homo Sapiens
RVLEAGKIGIF

SEQ ID NO: 44826 - protein, 11 aa, Homo Sapiens
RVLEKPESLLL

SEQ ID NO: 44827 - protein, 11 aa, Homo Sapiens
RVLGEVYLHTW

SEQ ID NO: 44828 - protein, 11 aa, Homo Sapiens
RVLGVSDVITW

SEQ ID NO: 44829 - protein, 11 aa, Homo Sapiens
RVLPPSALQSV

SEQ ID NO: 44830 - protein, 11 aa, Homo Sapiens
RVLPPSHRVTW

SEQ ID NO: 44831 - protein, 11 aa, Homo Sapiens
RVLPYPFTHHW

SEQ ID NO: 44832 - protein, 11 aa, Homo Sapiens
RVLSTEERKVW

SEQ ID NO: 44833 - protein, 11 aa, Homo Sapiens
RVMAKIMRECW

SEQ ID NO: 44834 - protein, 11 aa, Homo Sapiens
RVMDASAFEIF

SEQ ID NO: 44835 - protein, 11 aa, Homo Sapiens
RVMEEFNLTTF

SEQ ID NO: 44836 - protein, 11 aa, Homo Sapiens
RVMPSLAYCTF

SEQ ID NO: 44837 - protein, 11 aa, Homo Sapiens
RVQDEYSRRSY

SEQ ID NO: 44838 - protein, 11 aa, Homo Sapiens
RVQDLIGLICW

SEQ ID NO: 44839 - protein, 11 aa, Homo Sapiens
RVRTLQEEERW

SEQ ID NO: 44840 - protein, 11 aa, Homo Sapiens
RVTNKSQIRTW

SEQ ID NO: 44841 - protein, 11 aa, Homo Sapiens
RVVGSELIQKY

SEQ ID NO: 44842 - protein, 11 aa, Homo Sapiens
RVYAHIYHQHF

SEQ ID NO: 44843 - protein, 11 aa, Homo Sapiens
RVYQSLCPTSW

SEQ ID NO: 44844 - protein, 11 aa, Homo Sapiens
SIAPKTTRVTY

SEQ ID NO: 44845 - protein, 11 aa, Homo Sapiens
SIFSFPHKFEI

SEQ ID NO: 44846 - protein, 11 aa, Homo Sapiens
SIFSGAASLGY

SEQ ID NO: 44847 - protein, 11 aa, Homo Sapiens
SIKGPELLTMW

SEQ ID NO: 44848 - protein, 11 aa, Homo Sapiens
SILKKNSDWIW

SEQ ID NO: 44849 - protein, 11 aa, Homo Sapiens
SILQQPEKLQW

SEQ ID NO: 44850 - protein, 11 aa, Homo Sapiens
SLFERTTNSSW

SEQ ID NO: 44851 - protein, 11 aa, Homo Sapiens
SLFQRPPISSW

SEQ ID NO: 44852 - protein, 11 aa, Homo Sapiens
SLFTRPEIVVF

SEQ ID NO: 44853 - protein, 11 aa, Homo Sapiens
SLIRAGSRVAY

SEQ ID NO: 44854 - protein, 11 aa, Homo Sapiens
SLQNWLNRHSW

SEQ ID NO: 44855 - protein, 11 aa, Homo Sapiens
SLVPSSARLHY

SEQ ID NO: 44856 - protein, 11 aa, Homo Sapiens
SMFDQSQIQEF

SEQ ID NO: 44857 - protein, 11 aa, Homo Sapiens
SQFNRENLPGW

SEQ ID NO: 44858 - protein, 11 aa, Homo Sapiens
STFDHPELVKL

SEQ ID NO: 44859 - protein, 11 aa, Homo Sapiens
STFEDVKILAF

SEQ ID NO: 44860 - protein, 11 aa, Homo Sapiens
SVFPGARLLTI

SEQ ID NO: 44861 - protein, 11 aa, Homo Sapiens
SVFPLSHLQYF

SEQ ID NO: 44862 - protein, 11 aa, Homo Sapiens
SVIRNPEILAI

SEQ ID NO: 44863 - protein, 11 aa, Homo Sapiens
SVKPSTVVKCW

SEQ ID NO: 44864 - protein, 11 aa, Homo Sapiens
TDYDEGQDDRP

SEQ ID NO: 44865 - protein, 11 aa, Homo Sapiens
TLFHDPWKLLI

SEQ ID NO: 44866 - protein, 11 aa, Homo Sapiens
TVFSRSQVFQL

SEQ ID NO: 44867 - protein, 11 aa, Homo Sapiens
TVLDPDLRMTF

SEQ ID NO: 44868 - protein, 11 aa, Homo Sapiens
TVRHEALLYTW

SEQ ID NO: 44869 - protein, 11 aa, Homo Sapiens
VAVYGHDAEWV

SEQ ID NO: 44870 - protein, 11 aa, Homo Sapiens
VIFHPTQPWVF

SEQ ID NO: 44871 - protein, 11 aa, Homo Sapiens
VIRERKEREEW

SEQ ID NO: 44872 - protein, 11 aa, Homo Sapiens
VSLPAPGVPAW

SEQ ID NO: 44873 - protein, 11 aa, Homo Sapiens
VVFHPSQDLVF

SEQ ID NO: 44874 - protein, 11 aa, Homo Sapiens
YQFDKVGILTL

SEQ ID NO: 44875 - protein, 8 aa, Homo Sapiens
AAEPKVNR

SEQ ID NO: 44876 - protein, 8 aa, Homo Sapiens
ATIHGMNR

SEQ ID NO: 44877 - protein, 8 aa, Homo Sapiens
DAFRPASR

SEQ ID NO: 44878 - protein, 8 aa, Homo Sapiens
DAIELFNR

SEQ ID NO: 44879 - protein, 8 aa, Homo Sapiens
DARIVINR

SEQ ID NO: 44880 - protein, 8 aa, Homo Sapiens
DARVPFTR

SEQ ID NO: 44881 - protein, 8 aa, Homo Sapiens
DAWNTVSR

SEQ ID NO: 44882 - protein, 8 aa, Homo Sapiens
DGIILPGK

SEQ ID NO: 44883 - protein, 8 aa, Homo Sapiens
DGKIPVSR

SEQ ID NO: 44884 - protein, 8 aa, Homo Sapiens
DILKIHSR

SEQ ID NO: 44885 - protein, 8 aa, Homo Sapiens
DLFVFPYR

SEQ ID NO: 44886 - protein, 8 aa, Homo Sapiens
DLFVNTNR

SEQ ID NO: 44887 - protein, 8 aa, Homo Sapiens
DLHFKISR

SEQ ID NO: 44888 - protein, 8 aa, Homo Sapiens
DLNIRDLR

SEQ ID NO: 44889 - protein, 8 aa, Homo Sapiens
DLNKTRLR

SEQ ID NO: 44890 - protein, 8 aa, Homo Sapiens
DMKPPISR

SEQ ID NO: 44891 - protein, 8 aa, Homo Sapiens
DMNYIIQR

SEQ ID NO: 44892 - protein, 8 aa, Homo Sapiens
DMQRIHLR

SEQ ID NO: 44893 - protein, 8 aa, Homo Sapiens
DNFCAIAR

SEQ ID NO: 44894 - protein, 8 aa, Homo Sapiens
DNFLAFER

SEQ ID NO: 44895 - protein, 8 aa, Homo Sapiens
DNHVHVAR

SEQ ID NO: 44896 - protein, 8 aa, Homo Sapiens
DNLEPKFR

SEQ ID NO: 44897 - protein, 8 aa, Homo Sapiens
DNSIITKR

SEQ ID NO: 44898 - protein, 8 aa, Homo Sapiens
DNVKVVVR

SEQ ID NO: 44899 - protein, 8 aa, Homo Sapiens
DNYRVFER

SEQ ID NO: 44900 - protein, 8 aa, Homo Sapiens
DRALESLR

SEQ ID NO: 44901 - protein, 8 aa, Homo Sapiens
DSFKPPQR

SEQ ID NO: 44902 - protein, 8 aa, Homo Sapiens
DSFLPICR

SEQ ID NO: 44903 - protein, 8 aa, Homo Sapiens
DSIKIWNR

SEQ ID NO: 44904 - protein, 8 aa, Homo Sapiens
DSLVPIGR

SEQ ID NO: 44905 - protein, 8 aa, Homo Sapiens
DSTLPMNR

SEQ ID NO: 44906 - protein, 8 aa, Homo Sapiens
DSWKITGR

SEQ ID NO: 44907 - protein, 8 aa, Homo Sapiens
DTFLPRHR

SEQ ID NO: 44908 - protein, 8 aa, Homo Sapiens
DTFRPTAR

SEQ ID NO: 44909 - protein, 8 aa, Homo Sapiens
DTISPYSR

SEQ ID NO: 44910 - protein, 8 aa, Homo Sapiens
DTNLPANR

SEQ ID NO: 44911 - protein, 8 aa, Homo Sapiens
DTVATLPR

SEQ ID NO: 44912 - protein, 8 aa, Homo Sapiens
DVLVPWHL

SEQ ID NO: 44913 - protein, 8 aa, Homo Sapiens
DVNIIVFR

SEQ ID NO: 44914 - protein, 8 aa, Homo Sapiens
DVRFPEKR

SEQ ID NO: 44915 - protein, 8 aa, Homo Sapiens
DVRIGMTR

SEQ ID NO: 44916 - protein, 8 aa, Homo Sapiens
DVSVISSR

SEQ ID NO: 44917 - protein, 8 aa, Homo Sapiens
DVTRPHFR

SEQ ID NO: 44918 - protein, 8 aa, Homo Sapiens
DVWTPPAR

SEQ ID NO: 44919 - protein, 8 aa, Homo Sapiens
DVWVPQER

SEQ ID NO: 44920 - protein, 8 aa, Homo Sapiens
DVYIPRDR

SEQ ID NO: 44921 - protein, 8 aa, Homo Sapiens
DVYLGRYR

SEQ ID NO: 44922 - protein, 8 aa, Homo Sapiens
DYKRNLPR

SEQ ID NO: 44923 - protein, 8 aa, Homo Sapiens
DYLHMVHR

SEQ ID NO: 44924 - protein, 8 aa, Homo Sapiens
DYRTPTLR

SEQ ID NO: 44925 - protein, 8 aa, Homo Sapiens
EAIKITNR

SEQ ID NO: 44926 - protein, 8 aa, Homo Sapiens
EANVPVYR

SEQ ID NO: 44927 - protein, 8 aa, Homo Sapiens
EIFRPFYR

SEQ ID NO: 44928 - protein, 8 aa, Homo Sapiens
ELMVPFTR

SEQ ID NO: 44929 - protein, 8 aa, Homo Sapiens
ENYSPVSR

SEQ ID NO: 44930 - protein, 8 aa, Homo Sapiens
EPLLPWNR

SEQ ID NO: 44931 - protein, 8 aa, Homo Sapiens
ESLVPTAR

SEQ ID NO: 44932 - protein, 8 aa, Homo Sapiens
ETVRIINR

SEQ ID NO: 44933 - protein, 8 aa, Homo Sapiens
EVAIPHNR

SEQ ID NO: 44934 - protein, 8 aa, Homo Sapiens
EVFRPYAK

SEQ ID NO: 44935 - protein, 8 aa, Homo Sapiens
EVKIPKPR

SEQ ID NO: 44936 - protein, 8 aa, Homo Sapiens
EVNIPNRR

SEQ ID NO: 44937 - protein, 8 aa, Homo Sapiens
EVNIPRKR

SEQ ID NO: 44938 - protein, 8 aa, Homo Sapiens
EVRVPVPK

SEQ ID NO: 44939 - protein, 8 aa, Homo Sapiens
FEVDTVAP

SEQ ID NO: 44940 - protein, 8 aa, Homo Sapiens
FHSTQWLR

SEQ ID NO: 44941 - protein, 8 aa, Homo Sapiens
FKEEGVLR

SEQ ID NO: 44942 - protein, 8 aa, Homo Sapiens
GEVPLTPT

SEQ ID NO: 44943 - protein, 8 aa, Homo Sapiens
GLGLVLER

SEQ ID NO: 44944 - protein, 8 aa, Homo Sapiens
HANCIVHR

SEQ ID NO: 44945 - protein, 8 aa, Homo Sapiens
HNTIICAR

SEQ ID NO: 44946 - protein, 8 aa, Homo Sapiens
HSFRPAYR

SEQ ID NO: 44947 - protein, 8 aa, Homo Sapiens
IAGRDITR

SEQ ID NO: 44948 - protein, 8 aa, Homo Sapiens
IYFHDRVG

SEQ ID NO: 44949 - protein, 8 aa, Homo Sapiens
LAWEHERF

SEQ ID NO: 44950 - protein, 8 aa, Homo Sapiens
LKKPIYQR

SEQ ID NO: 44951 - protein, 8 aa, Homo Sapiens
LNSHCFAR

SEQ ID NO: 44952 - protein, 8 aa, Homo Sapiens
LPISRENL

SEQ ID NO: 44953 - protein, 8 aa, Homo Sapiens
LPYTPNNR

SEQ ID NO: 44954 - protein, 8 aa, Homo Sapiens
LSNIPWRR

SEQ ID NO: 44955 - protein, 8 aa, Homo Sapiens
MAYVPVSR

SEQ ID NO: 44956 - protein, 8 aa, Homo Sapiens
MVNVPKTR

SEQ ID NO: 44957 - protein, 8 aa, Homo Sapiens
NAESRVNR

SEQ ID NO: 44958 - protein, 8 aa, Homo Sapiens
NAFKTWNR

SEQ ID NO: 44959 - protein, 8 aa, Homo Sapiens
NANVPQIR

SEQ ID NO: 44960 - protein, 8 aa, Homo Sapiens
NARITDLR

SEQ ID NO: 44961 - protein, 8 aa, Homo Sapiens
NLWVPSRR

SEQ ID NO: 44962 - protein, 8 aa, Homo Sapiens
NPNVPAYR

SEQ ID NO: 44963 - protein, 8 aa, Homo Sapiens
PKDIQLAR

SEQ ID NO: 44964 - protein, 8 aa, Homo Sapiens
PQGHFQER

SEQ ID NO: 44965 - protein, 8 aa, Homo Sapiens
PRIRIETR

SEQ ID NO: 44966 - protein, 8 aa, Homo Sapiens
PTSPLTPT

SEQ ID NO: 44967 - protein, 8 aa, Homo Sapiens
PVGIFQKR

SEQ ID NO: 44968 - protein, 8 aa, Homo Sapiens
QTLQPQNR

SEQ ID NO: 44969 - protein, 8 aa, Homo Sapiens
SAWVPSHR

SEQ ID NO: 44970 - protein, 8 aa, Homo Sapiens
SAWYPFFR

SEQ ID NO: 44971 - protein, 8 aa, Homo Sapiens
SMALIHNR

SEQ ID NO: 44972 - protein, 8 aa, Homo Sapiens
TGNPTVVR

SEQ ID NO: 44973 - protein, 8 aa, Homo Sapiens
TNLVPYPR

SEQ ID NO: 44974 - protein, 8 aa, Homo Sapiens
TRAEFAER

SEQ ID NO: 44975 - protein, 8 aa, Homo Sapiens
TVRIPSQR

SEQ ID NO: 44976 - protein, 8 aa, Homo Sapiens
VANIPVAR

SEQ ID NO: 44977 - protein, 8 aa, Homo Sapiens
VATLPRGR

SEQ ID NO: 44978 - protein, 8 aa, Homo Sapiens
VNMVPFPR

SEQ ID NO: 44979 - protein, 8 aa, Homo Sapiens
WNLSPVGR

SEQ ID NO: 44980 - protein, 8 aa, Homo Sapiens
YCAHHLIR

SEQ ID NO: 44981 - protein, 8 aa, Homo Sapiens
YDRQGIGR

SEQ ID NO: 44982 - protein, 8 aa, Homo Sapiens
YFKEPSLR

SEQ ID NO: 44983 - protein, 8 aa, Homo Sapiens
YLEKIKQR

SEQ ID NO: 44984 - protein, 8 aa, Homo Sapiens
YNFTPLAR

SEQ ID NO: 44985 - protein, 8 aa, Homo Sapiens
YTINIHKR

SEQ ID NO: 44986 - protein, 8 aa, Homo Sapiens
YYGSFVTR

SEQ ID NO: 44987 - protein, 9 aa, Homo Sapiens
AANGKLFSR

SEQ ID NO: 44988 - protein, 9 aa, Homo Sapiens
ADRLIDTCR

SEQ ID NO: 44989 - protein, 9 aa, Homo Sapiens
ADRQVLAQR

SEQ ID NO: 44990 - protein, 9 aa, Homo Sapiens
AYKSILQER

SEQ ID NO: 44991 - protein, 9 aa, Homo Sapiens
AYMQYIHHR

SEQ ID NO: 44992 - protein, 9 aa, Homo Sapiens
CVKSFVTKR

SEQ ID NO: 44993 - protein, 9 aa, Homo Sapiens
CVNGHFFHR

SEQ ID NO: 44994 - protein, 9 aa, Homo Sapiens
CVNPYHYER

SEQ ID NO: 44995 - protein, 9 aa, Homo Sapiens
CVNQFIISR

SEQ ID NO: 44996 - protein, 9 aa, Homo Sapiens
DAAALVAGR

SEQ ID NO: 44997 - protein, 9 aa, Homo Sapiens
DAACRVIAR

SEQ ID NO: 44998 - protein, 9 aa, Homo Sapiens
DAAGVFCIR

SEQ ID NO: 44999 - protein, 9 aa, Homo Sapiens
DAAMFYTNR

SEQ ID NO: 45000 - protein, 9 aa, Homo Sapiens
DAAMYYCVR

SEQ ID NO: 45001 - protein, 9 aa, Homo Sapiens
DACRIIRER

SEQ ID NO: 45002 - protein, 9 aa, Homo Sapiens
DADEFGYSR

SEQ ID NO: 45003 - protein, 9 aa, Homo Sapiens
DADKPQWLR

SEQ ID NO: 45004 - protein, 9 aa, Homo Sapiens
DAEAIYVTR

SEQ ID NO: 45005 - protein, 9 aa, Homo Sapiens
DAFAPVAYL

SEQ ID NO: 45006 - protein, 9 aa, Homo Sapiens
DAFDGHAAR

SEQ ID NO: 45007 - protein, 9 aa, Homo Sapiens
DAFGHRKLR

SEQ ID NO: 45008 - protein, 9 aa, Homo Sapiens
DAFPKRILR

SEQ ID NO: 45009 - protein, 9 aa, Homo Sapiens
DAFSYGYVR

SEQ ID NO: 45010 - protein, 9 aa, Homo Sapiens
DAFTAPFHR

SEQ ID NO: 45011 - protein, 9 aa, Homo Sapiens
DAGFPFVSR

SEQ ID NO: 45012 - protein, 9 aa, Homo Sapiens
DAHDPKYWR

SEQ ID NO: 45013 - protein, 9 aa, Homo Sapiens
DAHDWNQNR

SEQ ID NO: 45014 - protein, 9 aa, Homo Sapiens
DAHQYLRLR

SEQ ID NO: 45015 - protein, 9 aa, Homo Sapiens
DAIAVHVVR

SEQ ID NO: 45016 - protein, 9 aa, Homo Sapiens
DAICKVWDR

SEQ ID NO: 45017 - protein, 9 aa, Homo Sapiens
DAIEKAVSR

SEQ ID NO: 45018 - protein, 9 aa, Homo Sapiens
DAISYRFPR

SEQ ID NO: 45019 - protein, 9 aa, Homo Sapiens
DAKAIFTGH

SEQ ID NO: 45020 - protein, 9 aa, Homo Sapiens
DAKDDFPLR

SEQ ID NO: 45021 - protein, 9 aa, Homo Sapiens
DAKDFFKRK

SEQ ID NO: 45022 - protein, 9 aa, Homo Sapiens
DAKGGSFYR

SEQ ID NO: 45023 - protein, 9 aa, Homo Sapiens
DAKMRVFER

SEQ ID NO: 45024 - protein, 9 aa, Homo Sapiens
DAKTIFTGH

SEQ ID NO: 45025 - protein, 9 aa, Homo Sapiens
DALDLFRGR

SEQ ID NO: 45026 - protein, 9 aa, Homo Sapiens
DALESLVAR

SEQ ID NO: 45027 - protein, 9 aa, Homo Sapiens
DALGGLLNR

SEQ ID NO: 45028 - protein, 9 aa, Homo Sapiens
DALLKNQRR

SEQ ID NO: 45029 - protein, 9 aa, Homo Sapiens
DALNLSVPR

SEQ ID NO: 45030 - protein, 9 aa, Homo Sapiens
DALSSIISR

SEQ ID NO: 45031 - protein, 9 aa, Homo Sapiens
DALVTIRNR

SEQ ID NO: 45032 - protein, 9 aa, Homo Sapiens
DAMEEFLNR

SEQ ID NO: 45033 - protein, 9 aa, Homo Sapiens
DAMKRIVGM

SEQ ID NO: 45034 - protein, 9 aa, Homo Sapiens
DAMQFSKKR

SEQ ID NO: 45035 - protein, 9 aa, Homo Sapiens
DANAKFYCR

SEQ ID NO: 45036 - protein, 9 aa, Homo Sapiens
DANDVILER

SEQ ID NO: 45037 - protein, 9 aa, Homo Sapiens
DANPFLSKR

SEQ ID NO: 45038 - protein, 9 aa, Homo Sapiens
DANPVRYGR

SEQ ID NO: 45039 - protein, 9 aa, Homo Sapiens
DAQEIIRPR

SEQ ID NO: 45040 - protein, 9 aa, Homo Sapiens
DAQEILHSR

SEQ ID NO: 45041 - protein, 9 aa, Homo Sapiens
DAQEILQAR

SEQ ID NO: 45042 - protein, 9 aa, Homo Sapiens
DAQKPSLTR

SEQ ID NO: 45043 - protein, 9 aa, Homo Sapiens
DAQLRLQLR

SEQ ID NO: 45044 - protein, 9 aa, Homo Sapiens
DAQNPQIKR

SEQ ID NO: 45045 - protein, 9 aa, Homo Sapiens
DAQRLHYYR

SEQ ID NO: 45046 - protein, 9 aa, Homo Sapiens
DAQRLISER

SEQ ID NO: 45047 - protein, 9 aa, Homo Sapiens
DAQVALTLR

SEQ ID NO: 45048 - protein, 9 aa, Homo Sapiens
DARARFLER

SEQ ID NO: 45049 - protein, 9 aa, Homo Sapiens
DARAYCAWR

SEQ ID NO: 45050 - protein, 9 aa, Homo Sapiens
DARDPLGCR

SEQ ID NO: 45051 - protein, 9 aa, Homo Sapiens
DAREMLNSR

SEQ ID NO: 45052 - protein, 9 aa, Homo Sapiens
DARGTVVLR

SEQ ID NO: 45053 - protein, 9 aa, Homo Sapiens
DARIPLSGR

SEQ ID NO: 45054 - protein, 9 aa, Homo Sapiens
DASLGVINR

SEQ ID NO: 45055 - protein, 9 aa, Homo Sapiens
DASLLIVNR

SEQ ID NO: 45056 - protein, 9 aa, Homo Sapiens
DASLQRIER

SEQ ID NO: 45057 - protein, 9 aa, Homo Sapiens
DASRNVFSR

SEQ ID NO: 45058 - protein, 9 aa, Homo Sapiens
DATLLIVNR

SEQ ID NO: 45059 - protein, 9 aa, Homo Sapiens
DATPLHVAR

SEQ ID NO: 45060 - protein, 9 aa, Homo Sapiens
DATVTISHR

SEQ ID NO: 45061 - protein, 9 aa, Homo Sapiens
DAVARLVAR

SEQ ID NO: 45062 - protein, 9 aa, Homo Sapiens
DAVDVFETR

SEQ ID NO: 45063 - protein, 9 aa, Homo Sapiens
DAVNLAFGR

SEQ ID NO: 45064 - protein, 9 aa, Homo Sapiens
DAVRRYLTR

SEQ ID NO: 45065 - protein, 9 aa, Homo Sapiens
DAVSKEVTR

SEQ ID NO: 45066 - protein, 9 aa, Homo Sapiens
DAWEPKVLR

SEQ ID NO: 45067 - protein, 9 aa, Homo Sapiens
DAWESLFSR

SEQ ID NO: 45068 - protein, 9 aa, Homo Sapiens
DAWGIKVER

SEQ ID NO: 45069 - protein, 9 aa, Homo Sapiens
DAWPGQRER

SEQ ID NO: 45070 - protein, 9 aa, Homo Sapiens
DAWRFWHKR

SEQ ID NO: 45071 - protein, 9 aa, Homo Sapiens
DAYEPEISR

SEQ ID NO: 45072 - protein, 9 aa, Homo Sapiens
DAYGIGTYR

SEQ ID NO: 45073 - protein, 9 aa, Homo Sapiens
DAYWPEAKR

SEQ ID NO: 45074 - protein, 9 aa, Homo Sapiens
DDRSPEVFR

SEQ ID NO: 45075 - protein, 9 aa, Homo Sapiens
DFALIHKER

SEQ ID NO: 45076 - protein, 9 aa, Homo Sapiens
DFANFGVLR

SEQ ID NO: 45077 - protein, 9 aa, Homo Sapiens
DFARRLGLR

SEQ ID NO: 45078 - protein, 9 aa, Homo Sapiens
DFEAHNILR

SEQ ID NO: 45079 - protein, 9 aa, Homo Sapiens
DFETVRMIK

SEQ ID NO: 45080 - protein, 9 aa, Homo Sapiens
DFHFRTDER

SEQ ID NO: 45081 - protein, 9 aa, Homo Sapiens
DFHSVSKLR

SEQ ID NO: 45082 - protein, 9 aa, Homo Sapiens
DFIAHLLGR

SEQ ID NO: 45083 - protein, 9 aa, Homo Sapiens
DFIAKVVQR

SEQ ID NO: 45084 - protein, 9 aa, Homo Sapiens
DFKDPPTAK

SEQ ID NO: 45085 - protein, 9 aa, Homo Sapiens
DFKEISSVK

SEQ ID NO: 45086 - protein, 9 aa, Homo Sapiens
DFKGRFKAR

SEQ ID NO: 45087 - protein, 9 aa, Homo Sapiens
DFKKYVENR

SEQ ID NO: 45088 - protein, 9 aa, Homo Sapiens
DFKNVLSNR

SEQ ID NO: 45089 - protein, 9 aa, Homo Sapiens
DFKRVVGKK

SEQ ID NO: 45090 - protein, 9 aa, Homo Sapiens
DFKRYVTDR

SEQ ID NO: 45091 - protein, 9 aa, Homo Sapiens
DFKTGQIDR

SEQ ID NO: 45092 - protein, 9 aa, Homo Sapiens
DFLAFILHR

SEQ ID NO: 45093 - protein, 9 aa, Homo Sapiens
DFLDKQMSR

SEQ ID NO: 45094 - protein, 9 aa, Homo Sapiens
DFLDLGYNR

SEQ ID NO: 45095 - protein, 9 aa, Homo Sapiens
DFLEKLAFR

SEQ ID NO: 45096 - protein, 9 aa, Homo Sapiens
DFLKQIIGR

SEQ ID NO: 45097 - protein, 9 aa, Homo Sapiens
DFLLHIIQR

SEQ ID NO: 45098 - protein, 9 aa, Homo Sapiens
DFLQKRKER

SEQ ID NO: 45099 - protein, 9 aa, Homo Sapiens
DFLRDRHVR

SEQ ID NO: 45100 - protein, 9 aa, Homo Sapiens
DFNGVAAVR

SEQ ID NO: 45101 - protein, 9 aa, Homo Sapiens
DFNLRTHVR

SEQ ID NO: 45102 - protein, 9 aa, Homo Sapiens
DFNRGVNYR

SEQ ID NO: 45103 - protein, 9 aa, Homo Sapiens
DFPEKFFPK

SEQ ID NO: 45104 - protein, 9 aa, Homo Sapiens
DFRARFWYR

SEQ ID NO: 45105 - protein, 9 aa, Homo Sapiens
DFRDKMMGR

SEQ ID NO: 45106 - protein, 9 aa, Homo Sapiens
DFSAGVANR

SEQ ID NO: 45107 - protein, 9 aa, Homo Sapiens
DFSCNRVSR

SEQ ID NO: 45108 - protein, 9 aa, Homo Sapiens
DFSGNPLSR

SEQ ID NO: 45109 - protein, 9 aa, Homo Sapiens
DFSGVTPQR

SEQ ID NO: 45110 - protein, 9 aa, Homo Sapiens
DFSKISIVR

SEQ ID NO: 45111 - protein, 9 aa, Homo Sapiens
DFSTRFITR

SEQ ID NO: 45112 - protein, 9 aa, Homo Sapiens
DFSVPDVPK

SEQ ID NO: 45113 - protein, 9 aa, Homo Sapiens
DFVGVHQER

SEQ ID NO: 45114 - protein, 9 aa, Homo Sapiens
DFYALVAQR

SEQ ID NO: 45115 - protein, 9 aa, Homo Sapiens
DFYDCRVEH

SEQ ID NO: 45116 - protein, 9 aa, Homo Sapiens
DFYGEVRTR

SEQ ID NO: 45117 - protein, 9 aa, Homo Sapiens
DFYHNVAER

SEQ ID NO: 45118 - protein, 9 aa, Homo Sapiens
DFYLQSVER

SEQ ID NO: 45119 - protein, 9 aa, Homo Sapiens
DFYVRVFVR

SEQ ID NO: 45120 - protein, 9 aa, Homo Sapiens
DGFLFVVNR

SEQ ID NO: 45121 - protein, 9 aa, Homo Sapiens
DGHEFIVKR

SEQ ID NO: 45122 - protein, 9 aa, Homo Sapiens
DGIRKVWQR

SEQ ID NO: 45123 - protein, 9 aa, Homo Sapiens
DGKWHLVYR

SEQ ID NO: 45124 - protein, 9 aa, Homo Sapiens
DGLDRIVER

SEQ ID NO: 45125 - protein, 9 aa, Homo Sapiens
DGNPFRVPR

SEQ ID NO: 45126 - protein, 9 aa, Homo Sapiens
DGQKRYTFR

SEQ ID NO: 45127 - protein, 9 aa, Homo Sapiens
DGQTPISQR

SEQ ID NO: 45128 - protein, 9 aa, Homo Sapiens
DGRGHLLGR

SEQ ID NO: 45129 - protein, 9 aa, Homo Sapiens
DGYEFFAKR

SEQ ID NO: 45130 - protein, 9 aa, Homo Sapiens
DGYWVVSNR

SEQ ID NO: 45131 - protein, 9 aa, Homo Sapiens
DIAFKIVNR

SEQ ID NO: 45132 - protein, 9 aa, Homo Sapiens
DIAGRDITR

SEQ ID NO: 45133 - protein, 9 aa, Homo Sapiens
DIAGRDVSR

SEQ ID NO: 45134 - protein, 9 aa, Homo Sapiens
DICGKAFKR

SEQ ID NO: 45135 - protein, 9 aa, Homo Sapiens
DICGKLFTR

SEQ ID NO: 45136 - protein, 9 aa, Homo Sapiens
DICPFEVNR

SEQ ID NO: 45137 - protein, 9 aa, Homo Sapiens
DICVREIAR

SEQ ID NO: 45138 - protein, 9 aa, Homo Sapiens
DIEQLPSYR

SEQ ID NO: 45139 - protein, 9 aa, Homo Sapiens
DIERINHER

SEQ ID NO: 45140 - protein, 9 aa, Homo Sapiens
DIFKDKPIK

SEQ ID NO: 45141 - protein, 9 aa, Homo Sapiens
DIFKKSKPR

SEQ ID NO: 45142 - protein, 9 aa, Homo Sapiens
DIFNQVVPR

SEQ ID NO: 45143 - protein, 9 aa, Homo Sapiens
DIFPKVTCR

SEQ ID NO: 45144 - protein, 9 aa, Homo Sapiens
DIFSEVVGR

SEQ ID NO: 45145 - protein, 9 aa, Homo Sapiens
DIGAYGEPR

SEQ ID NO: 45146 - protein, 9 aa, Homo Sapiens
DIGCPQTYR

SEQ ID NO: 45147 - protein, 9 aa, Homo Sapiens
DIHNIHVMR

SEQ ID NO: 45148 - protein, 9 aa, Homo Sapiens
DIIPNPQER

SEQ ID NO: 45149 - protein, 9 aa, Homo Sapiens
DIIQPSSTR

SEQ ID NO: 45150 - protein, 9 aa, Homo Sapiens
DIKHFVSER

SEQ ID NO: 45151 - protein, 9 aa, Homo Sapiens
DIKLNTAVR

SEQ ID NO: 45152 - protein, 9 aa, Homo Sapiens
DIKNLVVKR

SEQ ID NO: 45153 - protein, 9 aa, Homo Sapiens
DIKPLTSFR

SEQ ID NO: 45154 - protein, 9 aa, Homo Sapiens
DIKRIIKAR

SEQ ID NO: 45155 - protein, 9 aa, Homo Sapiens
DIKSHYAFR

SEQ ID NO: 45156 - protein, 9 aa, Homo Sapiens
DIKSYYTVR

SEQ ID NO: 45157 - protein, 9 aa, Homo Sapiens
DILARAFSR

SEQ ID NO: 45158 - protein, 9 aa, Homo Sapiens
DILCPKAKR

SEQ ID NO: 45159 - protein, 9 aa, Homo Sapiens
DILDHERKR

SEQ ID NO: 45160 - protein, 9 aa, Homo Sapiens
DILDKVIER

SEQ ID NO: 45161 - protein, 9 aa, Homo Sapiens
DILEKTWNM

SEQ ID NO: 45162 - protein, 9 aa, Homo Sapiens
DILELLEKR

SEQ ID NO: 45163 - protein, 9 aa, Homo Sapiens
DILESITNR

SEQ ID NO: 45164 - protein, 9 aa, Homo Sapiens
DILFPKMPK

SEQ ID NO: 45165 - protein, 9 aa, Homo Sapiens
DILHSIVKR

SEQ ID NO: 45166 - protein, 9 aa, Homo Sapiens
DILKVVEKR

SEQ ID NO: 45167 - protein, 9 aa, Homo Sapiens
DILSALVTR

SEQ ID NO: 45168 - protein, 9 aa, Homo Sapiens
DILSVASVR

SEQ ID NO: 45169 - protein, 9 aa, Homo Sapiens
DIMAAVSGR

SEQ ID NO: 45170 - protein, 9 aa, Homo Sapiens
DIMNKVWNK

SEQ ID NO: 45171 - protein, 9 aa, Homo Sapiens
DINAHITCR

SEQ ID NO: 45172 - protein, 9 aa, Homo Sapiens
DINDVKRLK

SEQ ID NO: 45173 - protein, 9 aa, Homo Sapiens
DINGFTTGR

SEQ ID NO: 45174 - protein, 9 aa, Homo Sapiens
DINGKMWLR

SEQ ID NO: 45175 - protein, 9 aa, Homo Sapiens
DINKEIEQR

SEQ ID NO: 45176 - protein, 9 aa, Homo Sapiens
DINSRNMIR

SEQ ID NO: 45177 - protein, 9 aa, Homo Sapiens
DIQDIWVVR

SEQ ID NO: 45178 - protein, 9 aa, Homo Sapiens
DIQDPGVPR

SEQ ID NO: 45179 - protein, 9 aa, Homo Sapiens
DIQFRLVTR

SEQ ID NO: 45180 - protein, 9 aa, Homo Sapiens
DIQGHPFFR

SEQ ID NO: 45181 - protein, 9 aa, Homo Sapiens
DIQIVSTTR

SEQ ID NO: 45182 - protein, 9 aa, Homo Sapiens
DIQLLKRTV

SEQ ID NO: 45183 - protein, 9 aa, Homo Sapiens
DIQQVGVIR

SEQ ID NO: 45184 - protein, 9 aa, Homo Sapiens
DIQRGLVLR

SEQ ID NO: 45185 - protein, 9 aa, Homo Sapiens
DIQTRMAGR

SEQ ID NO: 45186 - protein, 9 aa, Homo Sapiens
DIRCPFEKR

SEQ ID NO: 45187 - protein, 9 aa, Homo Sapiens
DIRDFIHQR

SEQ ID NO: 45188 - protein, 9 aa, Homo Sapiens
DIRKGFQLR

SEQ ID NO: 45189 - protein, 9 aa, Homo Sapiens
DISDTIYPR

SEQ ID NO: 45190 - protein, 9 aa, Homo Sapiens
DISKRYSGR

SEQ ID NO: 45191 - protein, 9 aa, Homo Sapiens
DISNVKIPK

SEQ ID NO: 45192 - protein, 9 aa, Homo Sapiens
DITTPKAAR

SEQ ID NO: 45193 - protein, 9 aa, Homo Sapiens
DIWHKVGNA

SEQ ID NO: 45194 - protein, 9 aa, Homo Sapiens
DIWTTTANR

SEQ ID NO: 45195 - protein, 9 aa, Homo Sapiens
DIYDHCQSR

SEQ ID NO: 45196 - protein, 9 aa, Homo Sapiens
DIYFNPKTR

SEQ ID NO: 45197 - protein, 9 aa, Homo Sapiens
DIYKKFLTR

SEQ ID NO: 45198 - protein, 9 aa, Homo Sapiens
DIYLPTHVR

SEQ ID NO: 45199 - protein, 9 aa, Homo Sapiens
DIYLRMTGR

SEQ ID NO: 45200 - protein, 9 aa, Homo Sapiens
DIYNHRFHR

SEQ ID NO: 45201 - protein, 9 aa, Homo Sapiens
DIYRPTIHK

SEQ ID NO: 45202 - protein, 9 aa, Homo Sapiens
DIYSKTWTK

SEQ ID NO: 45203 - protein, 9 aa, Homo Sapiens
DLAKIIFKR

SEQ ID NO: 45204 - protein, 9 aa, Homo Sapiens
DLANVRVGR

SEQ ID NO: 45205 - protein, 9 aa, Homo Sapiens
DLARSIVTR

SEQ ID NO: 45206 - protein, 9 aa, Homo Sapiens
DLASRLVTR

SEQ ID NO: 45207 - protein, 9 aa, Homo Sapiens
DLCGPSIPR

SEQ ID NO: 45208 - protein, 9 aa, Homo Sapiens
DLCKIGSER

SEQ ID NO: 45209 - protein, 9 aa, Homo Sapiens
DLFDFITER

SEQ ID NO: 45210 - protein, 9 aa, Homo Sapiens
DLFEKRTNR

SEQ ID NO: 45211 - protein, 9 aa, Homo Sapiens
DLFNKLVMR

SEQ ID NO: 45212 - protein, 9 aa, Homo Sapiens
DLFRYFVHR

SEQ ID NO: 45213 - protein, 9 aa, Homo Sapiens
DLFSFMQKR

SEQ ID NO: 45214 - protein, 9 aa, Homo Sapiens
DLFVNTNRR

SEQ ID NO: 45215 - protein, 9 aa, Homo Sapiens
DLFYNIATR

SEQ ID NO: 45216 - protein, 9 aa, Homo Sapiens
DLFYSFWER

SEQ ID NO: 45217 - protein, 9 aa, Homo Sapiens
DLHFHFTAR

SEQ ID NO: 45218 - protein, 9 aa, Homo Sapiens
DLHKFCLGR

SEQ ID NO: 45219 - protein, 9 aa, Homo Sapiens
DLIAIVSNR

SEQ ID NO: 45220 - protein, 9 aa, Homo Sapiens
DLIDRGWRR

SEQ ID NO: 45221 - protein, 9 aa, Homo Sapiens
DLIGCIIGR

SEQ ID NO: 45222 - protein, 9 aa, Homo Sapiens
DLIKQIGKK

SEQ ID NO: 45223 - protein, 9 aa, Homo Sapiens
DLIKVTQVR

SEQ ID NO: 45224 - protein, 9 aa, Homo Sapiens
DLINIHFQR

SEQ ID NO: 45225 - protein, 9 aa, Homo Sapiens
DLKDRTIKR

SEQ ID NO: 45226 - protein, 9 aa, Homo Sapiens
DLKDVSSQR

SEQ ID NO: 45227 - protein, 9 aa, Homo Sapiens
DLKEVTDLR

SEQ ID NO: 45228 - protein, 9 aa, Homo Sapiens
DLKGSLRNR

SEQ ID NO: 45229 - protein, 9 aa, Homo Sapiens
DLKGSLVSR

SEQ ID NO: 45230 - protein, 9 aa, Homo Sapiens
DLKKEINER

SEQ ID NO: 45231 - protein, 9 aa, Homo Sapiens
DLKKIQFPK

SEQ ID NO: 45232 - protein, 9 aa, Homo Sapiens
DLKKPIYQR

SEQ ID NO: 45233 - protein, 9 aa, Homo Sapiens
DLKKQIMGR

SEQ ID NO: 45234 - protein, 9 aa, Homo Sapiens
DLKPLPTAR

SEQ ID NO: 45235 - protein, 9 aa, Homo Sapiens
DLKRPFLSR

SEQ ID NO: 45236 - protein, 9 aa, Homo Sapiens
DLKSRLDSR

SEQ ID NO: 45237 - protein, 9 aa, Homo Sapiens
DLKSTVISR

SEQ ID NO: 45238 - protein, 9 aa, Homo Sapiens
DLLELIDTR

SEQ ID NO: 45239 - protein, 9 aa, Homo Sapiens
DLLGTLHNL

SEQ ID NO: 45240 - protein, 9 aa, Homo Sapiens
DLLIPLTNR

SEQ ID NO: 45241 - protein, 9 aa, Homo Sapiens
DLLKRAFVR

SEQ ID NO: 45242 - protein, 9 aa, Homo Sapiens
DLLKSIVSR

SEQ ID NO: 45243 - protein, 9 aa, Homo Sapiens
DLLLIRKNR

SEQ ID NO: 45244 - protein, 9 aa, Homo Sapiens
DLLNIIREK

SEQ ID NO: 45245 - protein, 9 aa, Homo Sapiens
DLLRRPGAR

SEQ ID NO: 45246 - protein, 9 aa, Homo Sapiens
DLLVPTKAR

SEQ ID NO: 45247 - protein, 9 aa, Homo Sapiens
DLLVVPMQR

SEQ ID NO: 45248 - protein, 9 aa, Homo Sapiens
DLLWRRIAR

SEQ ID NO: 45249 - protein, 9 aa, Homo Sapiens
DLMNCLHER

SEQ ID NO: 45250 - protein, 9 aa, Homo Sapiens
DLNAQYERR

SEQ ID NO: 45251 - protein, 9 aa, Homo Sapiens
DLNDNICKR

SEQ ID NO: 45252 - protein, 9 aa, Homo Sapiens
DLNEKIAQR

SEQ ID NO: 45253 - protein, 9 aa, Homo Sapiens
DLNHKYWER

SEQ ID NO: 45254 - protein, 9 aa, Homo Sapiens
DLNIKVDGR

SEQ ID NO: 45255 - protein, 9 aa, Homo Sapiens
DLNLIQQER

SEQ ID NO: 45256 - protein, 9 aa, Homo Sapiens
DLNRLITQR

SEQ ID NO: 45257 - protein, 9 aa, Homo Sapiens
DLNSGPLHR

SEQ ID NO: 45258 - protein, 9 aa, Homo Sapiens
DLQAKIFQK

SEQ ID NO: 45259 - protein, 9 aa, Homo Sapiens
DLQKNHIFR

SEQ ID NO: 45260 - protein, 9 aa, Homo Sapiens
DLQKWREER

SEQ ID NO: 45261 - protein, 9 aa, Homo Sapiens
DLQLIKVTR

SEQ ID NO: 45262 - protein, 9 aa, Homo Sapiens
DLQLKNARL

SEQ ID NO: 45263 - protein, 9 aa, Homo Sapiens
DLQLPPSQR

SEQ ID NO: 45264 - protein, 9 aa, Homo Sapiens
DLQNLKRVR

SEQ ID NO: 45265 - protein, 9 aa, Homo Sapiens
DLQRNLPER

SEQ ID NO: 45266 - protein, 9 aa, Homo Sapiens
DLQSMEQIR

SEQ ID NO: 45267 - protein, 9 aa, Homo Sapiens
DLQSRILKR

SEQ ID NO: 45268 - protein, 9 aa, Homo Sapiens
DLQVRQDVR

SEQ ID NO: 45269 - protein, 9 aa, Homo Sapiens
DLQYIKITR

SEQ ID NO: 45270 - protein, 9 aa, Homo Sapiens
DLRAKFKER

SEQ ID NO: 45271 - protein, 9 aa, Homo Sapiens
DLRELFARR

SEQ ID NO: 45272 - protein, 9 aa, Homo Sapiens
DLREQTHSR

SEQ ID NO: 45273 - protein, 9 aa, Homo Sapiens
DLREQTHTR

SEQ ID NO: 45274 - protein, 9 aa, Homo Sapiens
DLRHDIDRR

SEQ ID NO: 45275 - protein, 9 aa, Homo Sapiens
DLRHKLNLR

SEQ ID NO: 45276 - protein, 9 aa, Homo Sapiens
DLRHLIVSR

SEQ ID NO: 45277 - protein, 9 aa, Homo Sapiens
DLRPGVIVR

SEQ ID NO: 45278 - protein, 9 aa, Homo Sapiens
DLRTRVVLR

SEQ ID NO: 45279 - protein, 9 aa, Homo Sapiens
DLSEKVVYR

SEQ ID NO: 45280 - protein, 9 aa, Homo Sapiens
DLSPWAVSR

SEQ ID NO: 45281 - protein, 9 aa, Homo Sapiens
DLSRFIHTR

SEQ ID NO: 45282 - protein, 9 aa, Homo Sapiens
DLYKFLTKR

SEQ ID NO: 45283 - protein, 9 aa, Homo Sapiens
DLYLCPRQR

SEQ ID NO: 45284 - protein, 9 aa, Homo Sapiens
DLYLKPIQR

SEQ ID NO: 45285 - protein, 9 aa, Homo Sapiens
DLYPFGTMR

SEQ ID NO: 45286 - protein, 9 aa, Homo Sapiens
DLYYHVFRR

SEQ ID NO: 45287 - protein, 9 aa, Homo Sapiens
DMAAQITQR

SEQ ID NO: 45288 - protein, 9 aa, Homo Sapiens
DMAHHPTFR

SEQ ID NO: 45289 - protein, 9 aa, Homo Sapiens
DMFATPQYR

SEQ ID NO: 45290 - protein, 9 aa, Homo Sapiens
DMFIYWIHR

SEQ ID NO: 45291 - protein, 9 aa, Homo Sapiens
DMFKDFAAR

SEQ ID NO: 45292 - protein, 9 aa, Homo Sapiens
DMFNIYIKR

SEQ ID NO: 45293 - protein, 9 aa, Homo Sapiens
DMFYRNWAL

SEQ ID NO: 45294 - protein, 9 aa, Homo Sapiens
DMHSLVRSR

SEQ ID NO: 45295 - protein, 9 aa, Homo Sapiens
DMIGVKELR

SEQ ID NO: 45296 - protein, 9 aa, Homo Sapiens
DMILKNIEK

SEQ ID NO: 45297 - protein, 9 aa, Homo Sapiens
DMISAVKSR

SEQ ID NO: 45298 - protein, 9 aa, Homo Sapiens
DMKEFTKRR

SEQ ID NO: 45299 - protein, 9 aa, Homo Sapiens
DMLFPKFLK

SEQ ID NO: 45300 - protein, 9 aa, Homo Sapiens
DMLHRFYGK

SEQ ID NO: 45301 - protein, 9 aa, Homo Sapiens
DMLPNSTER

SEQ ID NO: 45302 - protein, 9 aa, Homo Sapiens
DMMDLPRSR

SEQ ID NO: 45303 - protein, 9 aa, Homo Sapiens
DMMEGRVGR

SEQ ID NO: 45304 - protein, 9 aa, Homo Sapiens
DMNRLLKQR

SEQ ID NO: 45305 - protein, 9 aa, Homo Sapiens
DMQHQVLER

SEQ ID NO: 45306 - protein, 9 aa, Homo Sapiens
DMQTEIKLR

SEQ ID NO: 45307 - protein, 9 aa, Homo Sapiens
DMRKIGQAR

SEQ ID NO: 45308 - protein, 9 aa, Homo Sapiens
DMRKIGSSR

SEQ ID NO: 45309 - protein, 9 aa, Homo Sapiens
DMRRSLCYR

SEQ ID NO: 45310 - protein, 9 aa, Homo Sapiens
DMRVHPYQR

SEQ ID NO: 45311 - protein, 9 aa, Homo Sapiens
DMYLAPHVR

SEQ ID NO: 45312 - protein, 9 aa, Homo Sapiens
DMYSSPYLR

SEQ ID NO: 45313 - protein, 9 aa, Homo Sapiens
DNAEKLVLR

SEQ ID NO: 45314 - protein, 9 aa, Homo Sapiens
DNAPEHALR

SEQ ID NO: 45315 - protein, 9 aa, Homo Sapiens
DNCDSIIRR

SEQ ID NO: 45316 - protein, 9 aa, Homo Sapiens
DNFLMGIGR

SEQ ID NO: 45317 - protein, 9 aa, Homo Sapiens
DNFNWGVRR

SEQ ID NO: 45318 - protein, 9 aa, Homo Sapiens
DNHVVPVLR

SEQ ID NO: 45319 - protein, 9 aa, Homo Sapiens
DNIRKYWSR

SEQ ID NO: 45320 - protein, 9 aa, Homo Sapiens
DNKDFAILR

SEQ ID NO: 45321 - protein, 9 aa, Homo Sapiens
DNKIIIIHR

SEQ ID NO: 45322 - protein, 9 aa, Homo Sapiens
DNLRPFHDR

SEQ ID NO: 45323 - protein, 9 aa, Homo Sapiens
DNLTLTVAR

SEQ ID NO: 45324 - protein, 9 aa, Homo Sapiens
DNNPLAVNR

SEQ ID NO: 45325 - protein, 9 aa, Homo Sapiens
DNQASWIHR

SEQ ID NO: 45326 - protein, 9 aa, Homo Sapiens
DNQGVKFLR

SEQ ID NO: 45327 - protein, 9 aa, Homo Sapiens
DNRGFMVTR

SEQ ID NO: 45328 - protein, 9 aa, Homo Sapiens
DNRTLYHLR

SEQ ID NO: 45329 - protein, 9 aa, Homo Sapiens
DNTVPLASR

SEQ ID NO: 45330 - protein, 9 aa, Homo Sapiens
DNVKAYFKR

SEQ ID NO: 45331 - protein, 9 aa, Homo Sapiens
DNWMNINLR

SEQ ID NO: 45332 - protein, 9 aa, Homo Sapiens
DNYANIRFR

SEQ ID NO: 45333 - protein, 9 aa, Homo Sapiens
DNYRGPAVR

SEQ ID NO: 45334 - protein, 9 aa, Homo Sapiens
DPLGAIHLR

SEQ ID NO: 45335 - protein, 9 aa, Homo Sapiens
DPMFRGIYR

SEQ ID NO: 45336 - protein, 9 aa, Homo Sapiens
DPNNIFGNR

SEQ ID NO: 45337 - protein, 9 aa, Homo Sapiens
DPQFHLEHR

SEQ ID NO: 45338 - protein, 9 aa, Homo Sapiens
DSAEFHYTR

SEQ ID NO: 45339 - protein, 9 aa, Homo Sapiens
DSALLPAVR

SEQ ID NO: 45340 - protein, 9 aa, Homo Sapiens
DSAMHLALR

SEQ ID NO: 45341 - protein, 9 aa, Homo Sapiens
DSCGFFKKR

SEQ ID NO: 45342 - protein, 9 aa, Homo Sapiens
DSFNVVSTR

SEQ ID NO: 45343 - protein, 9 aa, Homo Sapiens
DSFQKVILR

SEQ ID NO: 45344 - protein, 9 aa, Homo Sapiens
DSFSAGEPR

SEQ ID NO: 45345 - protein, 9 aa, Homo Sapiens
DSFTGPRRR

SEQ ID NO: 45346 - protein, 9 aa, Homo Sapiens
DSHQPLWSR

SEQ ID NO: 45347 - protein, 9 aa, Homo Sapiens
DSIDQKWTR

SEQ ID NO: 45348 - protein, 9 aa, Homo Sapiens
DSITVPVAR

SEQ ID NO: 45349 - protein, 9 aa, Homo Sapiens
DSIVIQQGR

SEQ ID NO: 45350 - protein, 9 aa, Homo Sapiens
DSKLSGRYR

SEQ ID NO: 45351 - protein, 9 aa, Homo Sapiens
DSKPIDVSR

SEQ ID NO: 45352 - protein, 9 aa, Homo Sapiens
DSKQFNILR

SEQ ID NO: 45353 - protein, 9 aa, Homo Sapiens
DSKRVFGER

SEQ ID NO: 45354 - protein, 9 aa, Homo Sapiens
DSKVVFIER

SEQ ID NO: 45355 - protein, 9 aa, Homo Sapiens
DSLAKIPKR

SEQ ID NO: 45356 - protein, 9 aa, Homo Sapiens
DSLASKVTR

SEQ ID NO: 45357 - protein, 9 aa, Homo Sapiens
DSLDELVAR

SEQ ID NO: 45358 - protein, 9 aa, Homo Sapiens
DSLEKHIVR

SEQ ID NO: 45359 - protein, 9 aa, Homo Sapiens
DSLGVYQGR

SEQ ID NO: 45360 - protein, 9 aa, Homo Sapiens
DSLLFAHKR

SEQ ID NO: 45361 - protein, 9 aa, Homo Sapiens
DSLQRAWTV

SEQ ID NO: 45362 - protein, 9 aa, Homo Sapiens
DSLRYIYPK

SEQ ID NO: 45363 - protein, 9 aa, Homo Sapiens
DSLSRHRPR

SEQ ID NO: 45364 - protein, 9 aa, Homo Sapiens
DSLWPYKGR

SEQ ID NO: 45365 - protein, 9 aa, Homo Sapiens
DSMKSFFRR

SEQ ID NO: 45366 - protein, 9 aa, Homo Sapiens
DSMPEPASR

SEQ ID NO: 45367 - protein, 9 aa, Homo Sapiens
DSQICTVGR

SEQ ID NO: 45368 - protein, 9 aa, Homo Sapiens
DSQKDIMQR

SEQ ID NO: 45369 - protein, 9 aa, Homo Sapiens
DSQNVEALR

SEQ ID NO: 45370 - protein, 9 aa, Homo Sapiens
DSQYPPVQR

SEQ ID NO: 45371 - protein, 9 aa, Homo Sapiens
DSRPPFLSR

SEQ ID NO: 45372 - protein, 9 aa, Homo Sapiens
DSRRLSIQR

SEQ ID NO: 45373 - protein, 9 aa, Homo Sapiens
DSSGLTVHR

SEQ ID NO: 45374 - protein, 9 aa, Homo Sapiens
DSSQLIHCR

SEQ ID NO: 45375 - protein, 9 aa, Homo Sapiens
DSWTPFYQR

SEQ ID NO: 45376 - protein, 9 aa, Homo Sapiens
DSYGGLRNV

SEQ ID NO: 45377 - protein, 9 aa, Homo Sapiens
DSYIPCSER

SEQ ID NO: 45378 - protein, 9 aa, Homo Sapiens
DSYKKIFYR

SEQ ID NO: 45379 - protein, 9 aa, Homo Sapiens
DSYSPPHVR

SEQ ID NO: 45380 - protein, 9 aa, Homo Sapiens
DTAAQITQR

SEQ ID NO: 45381 - protein, 9 aa, Homo Sapiens
DTAHTFSLR

SEQ ID NO: 45382 - protein, 9 aa, Homo Sapiens
DTAQQIVYR

SEQ ID NO: 45383 - protein, 9 aa, Homo Sapiens
DTAQRALYR

SEQ ID NO: 45384 - protein, 9 aa, Homo Sapiens
DTASRFLHR

SEQ ID NO: 45385 - protein, 9 aa, Homo Sapiens
DTCRRFFDR

SEQ ID NO: 45386 - protein, 9 aa, Homo Sapiens
DTCTHAYWR

SEQ ID NO: 45387 - protein, 9 aa, Homo Sapiens
DTEEEFYLR

SEQ ID NO: 45388 - protein, 9 aa, Homo Sapiens
DTFDVFRQR

SEQ ID NO: 45389 - protein, 9 aa, Homo Sapiens
DTFIKIAQK

SEQ ID NO: 45390 - protein, 9 aa, Homo Sapiens
DTHGSFVVR

SEQ ID NO: 45391 - protein, 9 aa, Homo Sapiens
DTHKQLLER

SEQ ID NO: 45392 - protein, 9 aa, Homo Sapiens
DTIDSLRSR

SEQ ID NO: 45393 - protein, 9 aa, Homo Sapiens
DTIEIITDR

SEQ ID NO: 45394 - protein, 9 aa, Homo Sapiens
DTIGYLLTR

SEQ ID NO: 45395 - protein, 9 aa, Homo Sapiens
DTISDWNLR

SEQ ID NO: 45396 - protein, 9 aa, Homo Sapiens
DTISKIRLR

SEQ ID NO: 45397 - protein, 9 aa, Homo Sapiens
DTITLPQNR

SEQ ID NO: 45398 - protein, 9 aa, Homo Sapiens
DTKALYATK

SEQ ID NO: 45399 - protein, 9 aa, Homo Sapiens
DTKEDVFVH

SEQ ID NO: 45400 - protein, 9 aa, Homo Sapiens
DTKELVVAK

SEQ ID NO: 45401 - protein, 9 aa, Homo Sapiens
DTKEVFAGK

SEQ ID NO: 45402 - protein, 9 aa, Homo Sapiens
DTKIRVCTR

SEQ ID NO: 45403 - protein, 9 aa, Homo Sapiens
DTKNIAFER

SEQ ID NO: 45404 - protein, 9 aa, Homo Sapiens
DTKPTRIIR

SEQ ID NO: 45405 - protein, 9 aa, Homo Sapiens
DTKSPQFNR

SEQ ID NO: 45406 - protein, 9 aa, Homo Sapiens
DTLHNFVSR

SEQ ID NO: 45407 - protein, 9 aa, Homo Sapiens
DTLVPYGNR

SEQ ID NO: 45408 - protein, 9 aa, Homo Sapiens
DTMPPKGVR

SEQ ID NO: 45409 - protein, 9 aa, Homo Sapiens
DTNALRVPR

SEQ ID NO: 45410 - protein, 9 aa, Homo Sapiens
DTNTFFLCR

SEQ ID NO: 45411 - protein, 9 aa, Homo Sapiens
DTQKFSVMR

SEQ ID NO: 45412 - protein, 9 aa, Homo Sapiens
DTQLVLGNR

SEQ ID NO: 45413 - protein, 9 aa, Homo Sapiens
DTRPHYITR

SEQ ID NO: 45414 - protein, 9 aa, Homo Sapiens
DTRPQLLMR

SEQ ID NO: 45415 - protein, 9 aa, Homo Sapiens
DTRSEFYKH

SEQ ID NO: 45416 - protein, 9 aa, Homo Sapiens
DTRTGLVLR

SEQ ID NO: 45417 - protein, 9 aa, Homo Sapiens
DTSGICNLR

SEQ ID NO: 45418 - protein, 9 aa, Homo Sapiens
DTSLIRKTR

SEQ ID NO: 45419 - protein, 9 aa, Homo Sapiens
DTSQFILNR

SEQ ID NO: 45420 - protein, 9 aa, Homo Sapiens
DTSTWKILR

SEQ ID NO: 45421 - protein, 9 aa, Homo Sapiens
DTVATLSER

SEQ ID NO: 45422 - protein, 9 aa, Homo Sapiens
DTVSTLYNR

SEQ ID NO: 45423 - protein, 9 aa, Homo Sapiens
DTVTGLLER

SEQ ID NO: 45424 - protein, 9 aa, Homo Sapiens
DTWHYFLHR

SEQ ID NO: 45425 - protein, 9 aa, Homo Sapiens
DTWVLLNQR

SEQ ID NO: 45426 - protein, 9 aa, Homo Sapiens
DTYIKAYLR

SEQ ID NO: 45427 - protein, 9 aa, Homo Sapiens
DTYLHRVAR

SEQ ID NO: 45428 - protein, 9 aa, Homo Sapiens
DTYPRKWGL

SEQ ID NO: 45429 - protein, 9 aa, Homo Sapiens
DTYVEFPLR

SEQ ID NO: 45430 - protein, 9 aa, Homo Sapiens
DVAAQQSLR

SEQ ID NO: 45431 - protein, 9 aa, Homo Sapiens
DVAGIGWER

SEQ ID NO: 45432 - protein, 9 aa, Homo Sapiens
DVARISWYL

SEQ ID NO: 45433 - protein, 9 aa, Homo Sapiens
DVARLVVER

SEQ ID NO: 45434 - protein, 9 aa, Homo Sapiens
DVCDKVFIR

SEQ ID NO: 45435 - protein, 9 aa, Homo Sapiens
DVCGKIFRK

SEQ ID NO: 45436 - protein, 9 aa, Homo Sapiens
DVCGKVFSR

SEQ ID NO: 45437 - protein, 9 aa, Homo Sapiens
DVELREAQR

SEQ ID NO: 45438 - protein, 9 aa, Homo Sapiens
DVEPIHAFR

SEQ ID NO: 45439 - protein, 9 aa, Homo Sapiens
DVEVLKVGR

SEQ ID NO: 45440 - protein, 9 aa, Homo Sapiens
DVFIPKPFR

SEQ ID NO: 45441 - protein, 9 aa, Homo Sapiens
DVFMFLTNR

SEQ ID NO: 45442 - protein, 9 aa, Homo Sapiens
DVFNITIAR

SEQ ID NO: 45443 - protein, 9 aa, Homo Sapiens
DVFPGPSFR

SEQ ID NO: 45444 - protein, 9 aa, Homo Sapiens
DVFSHRFYK

SEQ ID NO: 45445 - protein, 9 aa, Homo Sapiens
DVFVVGTER

SEQ ID NO: 45446 - protein, 9 aa, Homo Sapiens
DVHRHLDVR

SEQ ID NO: 45447 - protein, 9 aa, Homo Sapiens
DVINPMALR

SEQ ID NO: 45448 - protein, 9 aa, Homo Sapiens
DVINVFHHL

SEQ ID NO: 45449 - protein, 9 aa, Homo Sapiens
DVKDAVVQH

SEQ ID NO: 45450 - protein, 9 aa, Homo Sapiens
DVKFSHSGR

SEQ ID NO: 45451 - protein, 9 aa, Homo Sapiens
DVKLPQGQR

SEQ ID NO: 45452 - protein, 9 aa, Homo Sapiens
DVKPSWTTR

SEQ ID NO: 45453 - protein, 9 aa, Homo Sapiens
DVLFVYAVR

SEQ ID NO: 45454 - protein, 9 aa, Homo Sapiens
DVLLEPFRR

SEQ ID NO: 45455 - protein, 9 aa, Homo Sapiens
DVLPTRPKK

SEQ ID NO: 45456 - protein, 9 aa, Homo Sapiens
DVLQTGTQR

SEQ ID NO: 45457 - protein, 9 aa, Homo Sapiens
DVLQWIVQR

SEQ ID NO: 45458 - protein, 9 aa, Homo Sapiens
DVLSHFAQR

SEQ ID NO: 45459 - protein, 9 aa, Homo Sapiens
DVNEELPAR

SEQ ID NO: 45460 - protein, 9 aa, Homo Sapiens
DVNIKSTER

SEQ ID NO: 45461 - protein, 9 aa, Homo Sapiens
DVNNIGKYR

SEQ ID NO: 45462 - protein, 9 aa, Homo Sapiens
DVNSFVRSR

SEQ ID NO: 45463 - protein, 9 aa, Homo Sapiens
DVNSGFAKR

SEQ ID NO: 45464 - protein, 9 aa, Homo Sapiens
DVNYKMHFR

SEQ ID NO: 45465 - protein, 9 aa, Homo Sapiens
DVQEMNAVR

SEQ ID NO: 45466 - protein, 9 aa, Homo Sapiens
DVQERLVYR

SEQ ID NO: 45467 - protein, 9 aa, Homo Sapiens
DVQHFKVLR

SEQ ID NO: 45468 - protein, 9 aa, Homo Sapiens
DVQPKLWAR

SEQ ID NO: 45469 - protein, 9 aa, Homo Sapiens
DVQRHPFFR

SEQ ID NO: 45470 - protein, 9 aa, Homo Sapiens
DVQRKVTYR

SEQ ID NO: 45471 - protein, 9 aa, Homo Sapiens
DVQSVQEKR

SEQ ID NO: 45472 - protein, 9 aa, Homo Sapiens
DVRDRMIHR

SEQ ID NO: 45473 - protein, 9 aa, Homo Sapiens
DVRERIIKR

SEQ ID NO: 45474 - protein, 9 aa, Homo Sapiens
DVRFPEKRR

SEQ ID NO: 45475 - protein, 9 aa, Homo Sapiens
DVRHYLQGR

SEQ ID NO: 45476 - protein, 9 aa, Homo Sapiens
DVRMGGSFR

SEQ ID NO: 45477 - protein, 9 aa, Homo Sapiens
DVRQKVLER

SEQ ID NO: 45478 - protein, 9 aa, Homo Sapiens
DVRQYVVRK

SEQ ID NO: 45479 - protein, 9 aa, Homo Sapiens
DVRSVTSVR

SEQ ID NO: 45480 - protein, 9 aa, Homo Sapiens
DVRVQEVPK

SEQ ID NO: 45481 - protein, 9 aa, Homo Sapiens
DVSHPIIYR

SEQ ID NO: 45482 - protein, 9 aa, Homo Sapiens
DVSHTFYPR

SEQ ID NO: 45483 - protein, 9 aa, Homo Sapiens
DVSLPFVSR

SEQ ID NO: 45484 - protein, 9 aa, Homo Sapiens
DVSTIKAPR

SEQ ID NO: 45485 - protein, 9 aa, Homo Sapiens
DVSTTIYNR

SEQ ID NO: 45486 - protein, 9 aa, Homo Sapiens
DVTDFISHL

SEQ ID NO: 45487 - protein, 9 aa, Homo Sapiens
DVTIRQSYR

SEQ ID NO: 45488 - protein, 9 aa, Homo Sapiens
DVTSCISYR

SEQ ID NO: 45489 - protein, 9 aa, Homo Sapiens
DVVGRFNER

SEQ ID NO: 45490 - protein, 9 aa, Homo Sapiens
DVVIVKNGR

SEQ ID NO: 45491 - protein, 9 aa, Homo Sapiens
DVVSKFLNR

SEQ ID NO: 45492 - protein, 9 aa, Homo Sapiens
DVVVSRWLR

SEQ ID NO: 45493 - protein, 9 aa, Homo Sapiens
DVVYNAVHR

SEQ ID NO: 45494 - protein, 9 aa, Homo Sapiens
DVWRKKYMR

SEQ ID NO: 45495 - protein, 9 aa, Homo Sapiens
DVWVNESER

SEQ ID NO: 45496 - protein, 9 aa, Homo Sapiens
DVYAKYVLR

SEQ ID NO: 45497 - protein, 9 aa, Homo Sapiens
DVYDYKIAR

SEQ ID NO: 45498 - protein, 9 aa, Homo Sapiens
DVYFPKDLR

SEQ ID NO: 45499 - protein, 9 aa, Homo Sapiens
DVYPEIIER

SEQ ID NO: 45500 - protein, 9 aa, Homo Sapiens
DVYRGLQER

SEQ ID NO: 45501 - protein, 9 aa, Homo Sapiens
DVYTPKSSR

SEQ ID NO: 45502 - protein, 9 aa, Homo Sapiens
DWDLITRQK

SEQ ID NO: 45503 - protein, 9 aa, Homo Sapiens
DWKEKYINR

SEQ ID NO: 45504 - protein, 9 aa, Homo Sapiens
DWKTISKER

SEQ ID NO: 45505 - protein, 9 aa, Homo Sapiens
DWQRHAIYR

SEQ ID NO: 45506 - protein, 9 aa, Homo Sapiens
DYERIINLR

SEQ ID NO: 45507 - protein, 9 aa, Homo Sapiens
DYFDALYKR

SEQ ID NO: 45508 - protein, 9 aa, Homo Sapiens
DYFKKPQSR

SEQ ID NO: 45509 - protein, 9 aa, Homo Sapiens
DYGHLSVYR

SEQ ID NO: 45510 - protein, 9 aa, Homo Sapiens
DYHTLPRAR

SEQ ID NO: 45511 - protein, 9 aa, Homo Sapiens
DYIIRNTDR

SEQ ID NO: 45512 - protein, 9 aa, Homo Sapiens
DYIKLYVRR

SEQ ID NO: 45513 - protein, 9 aa, Homo Sapiens
DYIKVFKPK

SEQ ID NO: 45514 - protein, 9 aa, Homo Sapiens
DYIVKIFDR

SEQ ID NO: 45515 - protein, 9 aa, Homo Sapiens
DYKGCLIRR

SEQ ID NO: 45516 - protein, 9 aa, Homo Sapiens
DYKGEEELR

SEQ ID NO: 45517 - protein, 9 aa, Homo Sapiens
DYKLHFIFR

SEQ ID NO: 45518 - protein, 9 aa, Homo Sapiens
DYKTIAKER

SEQ ID NO: 45519 - protein, 9 aa, Homo Sapiens
DYLEFQKNR

SEQ ID NO: 45520 - protein, 9 aa, Homo Sapiens
DYLENIFVK

SEQ ID NO: 45521 - protein, 9 aa, Homo Sapiens
DYLEQQVAR

SEQ ID NO: 45522 - protein, 9 aa, Homo Sapiens
DYLGTVAAR

SEQ ID NO: 45523 - protein, 9 aa, Homo Sapiens
DYLRFLQKR

SEQ ID NO: 45524 - protein, 9 aa, Homo Sapiens
DYLVFANNR

SEQ ID NO: 45525 - protein, 9 aa, Homo Sapiens
DYLVPPALR

SEQ ID NO: 45526 - protein, 9 aa, Homo Sapiens
DYNLIVIER

SEQ ID NO: 45527 - protein, 9 aa, Homo Sapiens
DYNPLYKER

SEQ ID NO: 45528 - protein, 9 aa, Homo Sapiens
DYNPSFAIR

SEQ ID NO: 45529 - protein, 9 aa, Homo Sapiens
DYQFCYSFR

SEQ ID NO: 45530 - protein, 9 aa, Homo Sapiens
DYQTHFRLR

SEQ ID NO: 45531 - protein, 9 aa, Homo Sapiens
DYRALVHER

SEQ ID NO: 45532 - protein, 9 aa, Homo Sapiens
DYRDTVVKR

SEQ ID NO: 45533 - protein, 9 aa, Homo Sapiens
DYRMKEWSR

SEQ ID NO: 45534 - protein, 9 aa, Homo Sapiens
DYSKFIQTR

SEQ ID NO: 45535 - protein, 9 aa, Homo Sapiens
DYSQSLHAR

SEQ ID NO: 45536 - protein, 9 aa, Homo Sapiens
DYTSHITCR

SEQ ID NO: 45537 - protein, 9 aa, Homo Sapiens
DYVDIVQGR

SEQ ID NO: 45538 - protein, 9 aa, Homo Sapiens
DYVPETVYR

SEQ ID NO: 45539 - protein, 9 aa, Homo Sapiens
DYVPYVPLR

SEQ ID NO: 45540 - protein, 9 aa, Homo Sapiens
DYYARVEGR

SEQ ID NO: 45541 - protein, 9 aa, Homo Sapiens
DYYSLLNVR

SEQ ID NO: 45542 - protein, 9 aa, Homo Sapiens
DYYSRLRGR

SEQ ID NO: 45543 - protein, 9 aa, Homo Sapiens
EAAAIIAQR

SEQ ID NO: 45544 - protein, 9 aa, Homo Sapiens
EAHARIHLR

SEQ ID NO: 45545 - protein, 9 aa, Homo Sapiens
EAKAPILKR

SEQ ID NO: 45546 - protein, 9 aa, Homo Sapiens
EAKFPTMNR

SEQ ID NO: 45547 - protein, 9 aa, Homo Sapiens
EAKLREELR

SEQ ID NO: 45548 - protein, 9 aa, Homo Sapiens
EALGALVCR

SEQ ID NO: 45549 - protein, 9 aa, Homo Sapiens
EALLPYTER

SEQ ID NO: 45550 - protein, 9 aa, Homo Sapiens
EALNQVTQR

SEQ ID NO: 45551 - protein, 9 aa, Homo Sapiens
EALNVLVNR

SEQ ID NO: 45552 - protein, 9 aa, Homo Sapiens
EALPGLQRR

SEQ ID NO: 45553 - protein, 9 aa, Homo Sapiens
EALRRLEER

SEQ ID NO: 45554 - protein, 9 aa, Homo Sapiens
EALTALMSR

SEQ ID NO: 45555 - protein, 9 aa, Homo Sapiens
EALVPVIHR

SEQ ID NO: 45556 - protein, 9 aa, Homo Sapiens
EALYDICFR

SEQ ID NO: 45557 - protein, 9 aa, Homo Sapiens
EAMALPLYR

SEQ ID NO: 45558 - protein, 9 aa, Homo Sapiens
EAMKHVYFR

SEQ ID NO: 45559 - protein, 9 aa, Homo Sapiens
EAMLWERHR

SEQ ID NO: 45560 - protein, 9 aa, Homo Sapiens
EAMRRLQER

SEQ ID NO: 45561 - protein, 9 aa, Homo Sapiens
EAMTIFQNR

SEQ ID NO: 45562 - protein, 9 aa, Homo Sapiens
EAQAWEQAR

SEQ ID NO: 45563 - protein, 9 aa, Homo Sapiens
EAQLPYVCR

SEQ ID NO: 45564 - protein, 9 aa, Homo Sapiens
EAQRITGLR

SEQ ID NO: 45565 - protein, 9 aa, Homo Sapiens
EAQVKIWRR

SEQ ID NO: 45566 - protein, 9 aa, Homo Sapiens
EARAFGVTR

SEQ ID NO: 45567 - protein, 9 aa, Homo Sapiens
EARAPHVCR

SEQ ID NO: 45568 - protein, 9 aa, Homo Sapiens
EARLLEEQR

SEQ ID NO: 45569 - protein, 9 aa, Homo Sapiens
EAVKLIIGR

SEQ ID NO: 45570 - protein, 9 aa, Homo Sapiens
EAVLWEALR

SEQ ID NO: 45571 - protein, 9 aa, Homo Sapiens
EAYLPETFR

SEQ ID NO: 45572 - protein, 9 aa, Homo Sapiens
EAYSVGTGR

SEQ ID NO: 45573 - protein, 9 aa, Homo Sapiens
EDTQIPTSR

SEQ ID NO: 45574 - protein, 9 aa, Homo Sapiens
EFFIPRVGR

SEQ ID NO: 45575 - protein, 9 aa, Homo Sapiens
EFFSINAQR

SEQ ID NO: 45576 - protein, 9 aa, Homo Sapiens
EFIEITTER

SEQ ID NO: 45577 - protein, 9 aa, Homo Sapiens
EFKDKTWTR

SEQ ID NO: 45578 - protein, 9 aa, Homo Sapiens
EFKEDIHNR

SEQ ID NO: 45579 - protein, 9 aa, Homo Sapiens
EFLKLDRER

SEQ ID NO: 45580 - protein, 9 aa, Homo Sapiens
EFNPNFVAR

SEQ ID NO: 45581 - protein, 9 aa, Homo Sapiens
EFQDFTVPR

SEQ ID NO: 45582 - protein, 9 aa, Homo Sapiens
EFQQLPYHR

SEQ ID NO: 45583 - protein, 9 aa, Homo Sapiens
EFRAGMSNR

SEQ ID NO: 45584 - protein, 9 aa, Homo Sapiens
EFRDCISSR

SEQ ID NO: 45585 - protein, 9 aa, Homo Sapiens
EFREPRPPR

SEQ ID NO: 45586 - protein, 9 aa, Homo Sapiens
EFRQRIILR

SEQ ID NO: 45587 - protein, 9 aa, Homo Sapiens
EFVDLYVPR

SEQ ID NO: 45588 - protein, 9 aa, Homo Sapiens
EFYNLVRFR

SEQ ID NO: 45589 - protein, 9 aa, Homo Sapiens
EFYSPEACR

SEQ ID NO: 45590 - protein, 9 aa, Homo Sapiens
EICGNYTYR

SEQ ID NO: 45591 - protein, 9 aa, Homo Sapiens
EIGHFLRER

SEQ ID NO: 45592 - protein, 9 aa, Homo Sapiens
EIKERIAKR

SEQ ID NO: 45593 - protein, 9 aa, Homo Sapiens
EIKHFVSER

SEQ ID NO: 45594 - protein, 9 aa, Homo Sapiens
EILEVATAR

SEQ ID NO: 45595 - protein, 9 aa, Homo Sapiens
EILHHLSER

SEQ ID NO: 45596 - protein, 9 aa, Homo Sapiens
EILKRNIQR

SEQ ID NO: 45597 - protein, 9 aa, Homo Sapiens
EILRGLTPR

SEQ ID NO: 45598 - protein, 9 aa, Homo Sapiens
EILRRLTGR

SEQ ID NO: 45599 - protein, 9 aa, Homo Sapiens
EILSVLSHR

SEQ ID NO: 45600 - protein, 9 aa, Homo Sapiens
EINKLLAHR

SEQ ID NO: 45601 - protein, 9 aa, Homo Sapiens
EINMWVSQR

SEQ ID NO: 45602 - protein, 9 aa, Homo Sapiens
EIRKPEVLR

SEQ ID NO: 45603 - protein, 9 aa, Homo Sapiens
EISGTFTHR

SEQ ID NO: 45604 - protein, 9 aa, Homo Sapiens
EIYEYIIFR

SEQ ID NO: 45605 - protein, 9 aa, Homo Sapiens
EIYGVTHTR

SEQ ID NO: 45606 - protein, 9 aa, Homo Sapiens
EIYRPPASR

SEQ ID NO: 45607 - protein, 9 aa, Homo Sapiens
ELFADKVPK

SEQ ID NO: 45608 - protein, 9 aa, Homo Sapiens
ELFGRVTSR

SEQ ID NO: 45609 - protein, 9 aa, Homo Sapiens
ELFNRIEKR

SEQ ID NO: 45610 - protein, 9 aa, Homo Sapiens
ELKGIYKDR

SEQ ID NO: 45611 - protein, 9 aa, Homo Sapiens
ELKRLYVER

SEQ ID NO: 45612 - protein, 9 aa, Homo Sapiens
ELNKIFALR

SEQ ID NO: 45613 - protein, 9 aa, Homo Sapiens
ELQREISNR

SEQ ID NO: 45614 - protein, 9 aa, Homo Sapiens
ELRGKLVAR

SEQ ID NO: 45615 - protein, 9 aa, Homo Sapiens
EMFTPILGR

SEQ ID NO: 45616 - protein, 9 aa, Homo Sapiens
EMKLQVTQR

SEQ ID NO: 45617 - protein, 9 aa, Homo Sapiens
EMLEILINR

SEQ ID NO: 45618 - protein, 9 aa, Homo Sapiens
EMLQQIANR

SEQ ID NO: 45619 - protein, 9 aa, Homo Sapiens
EMLRAAVKR

SEQ ID NO: 45620 - protein, 9 aa, Homo Sapiens
EMMADMYNR

SEQ ID NO: 45621 - protein, 9 aa, Homo Sapiens
EMQAKVAVR

SEQ ID NO: 45622 - protein, 9 aa, Homo Sapiens
EMQNLVHRR

SEQ ID NO: 45623 - protein, 9 aa, Homo Sapiens
EMREMLTHR

SEQ ID NO: 45624 - protein, 9 aa, Homo Sapiens
EMRQMFVQR

SEQ ID NO: 45625 - protein, 9 aa, Homo Sapiens
ENFAPGTTR

SEQ ID NO: 45626 - protein, 9 aa, Homo Sapiens
ENFGNTTPR

SEQ ID NO: 45627 - protein, 9 aa, Homo Sapiens
ENKPLYQMR

SEQ ID NO: 45628 - protein, 9 aa, Homo Sapiens
ENLPRTVIR

SEQ ID NO: 45629 - protein, 9 aa, Homo Sapiens
ENRKPVSFR

SEQ ID NO: 45630 - protein, 9 aa, Homo Sapiens
EPLLRENPR

SEQ ID NO: 45631 - protein, 9 aa, Homo Sapiens
ESKILHLQR

SEQ ID NO: 45632 - protein, 9 aa, Homo Sapiens
ESLEWLASR

SEQ ID NO: 45633 - protein, 9 aa, Homo Sapiens
ESLIPSANR

SEQ ID NO: 45634 - protein, 9 aa, Homo Sapiens
ESLNFLIGR

SEQ ID NO: 45635 - protein, 9 aa, Homo Sapiens
ESLPRVVKR

SEQ ID NO: 45636 - protein, 9 aa, Homo Sapiens
ESMEPKVFR

SEQ ID NO: 45637 - protein, 9 aa, Homo Sapiens
ESMQRFHNR

SEQ ID NO: 45638 - protein, 9 aa, Homo Sapiens
ESYRPPKSR

SEQ ID NO: 45639 - protein, 9 aa, Homo Sapiens
ETAFLSWFR

SEQ ID NO: 45640 - protein, 9 aa, Homo Sapiens
ETCDKVFSR

SEQ ID NO: 45641 - protein, 9 aa, Homo Sapiens
ETDLKTICR

SEQ ID NO: 45642 - protein, 9 aa, Homo Sapiens
ETEREYFNR

SEQ ID NO: 45643 - protein, 9 aa, Homo Sapiens
ETFNSITKR

SEQ ID NO: 45644 - protein, 9 aa, Homo Sapiens
ETIAPKIAR

SEQ ID NO: 45645 - protein, 9 aa, Homo Sapiens
ETIGKKFEK

SEQ ID NO: 45646 - protein, 9 aa, Homo Sapiens
ETILRTNKR

SEQ ID NO: 45647 - protein, 9 aa, Homo Sapiens
ETIPSFTGR

SEQ ID NO: 45648 - protein, 9 aa, Homo Sapiens
ETKRIFLDR

SEQ ID NO: 45649 - protein, 9 aa, Homo Sapiens
ETLETIINR

SEQ ID NO: 45650 - protein, 9 aa, Homo Sapiens
ETLLLQAER

SEQ ID NO: 45651 - protein, 9 aa, Homo Sapiens
ETLMETHER

SEQ ID NO: 45652 - protein, 9 aa, Homo Sapiens
ETLNQMIAR

SEQ ID NO: 45653 - protein, 9 aa, Homo Sapiens
ETMPSPYGR

SEQ ID NO: 45654 - protein, 9 aa, Homo Sapiens
ETNYGIPQR

SEQ ID NO: 45655 - protein, 9 aa, Homo Sapiens
ETQLPVSFR

SEQ ID NO: 45656 - protein, 9 aa, Homo Sapiens
ETRAEFAER

SEQ ID NO: 45657 - protein, 9 aa, Homo Sapiens
ETREVQNLR

SEQ ID NO: 45658 - protein, 9 aa, Homo Sapiens
ETRQITWSR

SEQ ID NO: 45659 - protein, 9 aa, Homo Sapiens
ETYKYLYGR

SEQ ID NO: 45660 - protein, 9 aa, Homo Sapiens
ETYLHRIGR

SEQ ID NO: 45661 - protein, 9 aa, Homo Sapiens
ETYLMKHMR

SEQ ID NO: 45662 - protein, 9 aa, Homo Sapiens
ETYLNENLR

SEQ ID NO: 45663 - protein, 9 aa, Homo Sapiens
EVAFPHHPR

SEQ ID NO: 45664 - protein, 9 aa, Homo Sapiens
EVAGIVAAR

SEQ ID NO: 45665 - protein, 9 aa, Homo Sapiens
EVAPPEYHR

SEQ ID NO: 45666 - protein, 9 aa, Homo Sapiens
EVAQFLTGR

SEQ ID NO: 45667 - protein, 9 aa, Homo Sapiens
EVASVWVER

SEQ ID NO: 45668 - protein, 9 aa, Homo Sapiens
EVFDHMMKR

SEQ ID NO: 45669 - protein, 9 aa, Homo Sapiens
EVFDKFSNK

SEQ ID NO: 45670 - protein, 9 aa, Homo Sapiens
EVFEYIIFR

SEQ ID NO: 45671 - protein, 9 aa, Homo Sapiens
EVFGQITER

SEQ ID NO: 45672 - protein, 9 aa, Homo Sapiens
EVFLHVVKR

SEQ ID NO: 45673 - protein, 9 aa, Homo Sapiens
EVFQNANFR

SEQ ID NO: 45674 - protein, 9 aa, Homo Sapiens
EVFSHILKR

SEQ ID NO: 45675 - protein, 9 aa, Homo Sapiens
EVFTPVFER

SEQ ID NO: 45676 - protein, 9 aa, Homo Sapiens
EVFTPVVQR

SEQ ID NO: 45677 - protein, 9 aa, Homo Sapiens
EVFVGKIPR

SEQ ID NO: 45678 - protein, 9 aa, Homo Sapiens
EVFYFEVTR

SEQ ID NO: 45679 - protein, 9 aa, Homo Sapiens
EVHAVVTVR

SEQ ID NO: 45680 - protein, 9 aa, Homo Sapiens
EVHMLLEHR

SEQ ID NO: 45681 - protein, 9 aa, Homo Sapiens
EVINDYHFR

SEQ ID NO: 45682 - protein, 9 aa, Homo Sapiens
EVISLINTR

SEQ ID NO: 45683 - protein, 9 aa, Homo Sapiens
EVKKICMQR

SEQ ID NO: 45684 - protein, 9 aa, Homo Sapiens
EVKPSIRAR

SEQ ID NO: 45685 - protein, 9 aa, Homo Sapiens
EVKSITKER

SEQ ID NO: 45686 - protein, 9 aa, Homo Sapiens
EVLAEFERR

SEQ ID NO: 45687 - protein, 9 aa, Homo Sapiens
EVLDHKEFK

SEQ ID NO: 45688 - protein, 9 aa, Homo Sapiens
EVLDRVFER

SEQ ID NO: 45689 - protein, 9 aa, Homo Sapiens
EVLGPHLER

SEQ ID NO: 45690 - protein, 9 aa, Homo Sapiens
EVLHGLIGR

SEQ ID NO: 45691 - protein, 9 aa, Homo Sapiens
EVLKHLKER

SEQ ID NO: 45692 - protein, 9 aa, Homo Sapiens
EVLKLLVAR

SEQ ID NO: 45693 - protein, 9 aa, Homo Sapiens
EVLLVSSSR

SEQ ID NO: 45694 - protein, 9 aa, Homo Sapiens
EVLNEVNRR

SEQ ID NO: 45695 - protein, 9 aa, Homo Sapiens
EVLPKPRMR

SEQ ID NO: 45696 - protein, 9 aa, Homo Sapiens
EVLQPLQQR

SEQ ID NO: 45697 - protein, 9 aa, Homo Sapiens
EVLSCLYNR

SEQ ID NO: 45698 - protein, 9 aa, Homo Sapiens
EVMRILISR

SEQ ID NO: 45699 - protein, 9 aa, Homo Sapiens
EVNAWLVHR

SEQ ID NO: 45700 - protein, 9 aa, Homo Sapiens
EVNCPFQKR

SEQ ID NO: 45701 - protein, 9 aa, Homo Sapiens
EVNDKRYLR

SEQ ID NO: 45702 - protein, 9 aa, Homo Sapiens
EVNDRPVRR

SEQ ID NO: 45703 - protein, 9 aa, Homo Sapiens
EVNNELANR

SEQ ID NO: 45704 - protein, 9 aa, Homo Sapiens
EVPELYHQR

SEQ ID NO: 45705 - protein, 9 aa, Homo Sapiens
EVPKHLVGR

SEQ ID NO: 45706 - protein, 9 aa, Homo Sapiens
EVQAHPFFR

SEQ ID NO: 45707 - protein, 9 aa, Homo Sapiens
EVQGEIHLR

SEQ ID NO: 45708 - protein, 9 aa, Homo Sapiens
EVQPPRVDR

SEQ ID NO: 45709 - protein, 9 aa, Homo Sapiens
EVQRILHQR

SEQ ID NO: 45710 - protein, 9 aa, Homo Sapiens
EVQVVNTER

SEQ ID NO: 45711 - protein, 9 aa, Homo Sapiens
EVRGGGLTR

SEQ ID NO: 45712 - protein, 9 aa, Homo Sapiens
EVRKLIIRR

SEQ ID NO: 45713 - protein, 9 aa, Homo Sapiens
EVRKLMHVR

SEQ ID NO: 45714 - protein, 9 aa, Homo Sapiens
EVRLGGSLR

SEQ ID NO: 45715 - protein, 9 aa, Homo Sapiens
EVRPVETLR

SEQ ID NO: 45716 - protein, 9 aa, Homo Sapiens
EVRRLVIGR

SEQ ID NO: 45717 - protein, 9 aa, Homo Sapiens
EVRSQLKLR

SEQ ID NO: 45718 - protein, 9 aa, Homo Sapiens
EVSTVNVRR

SEQ ID NO: 45719 - protein, 9 aa, Homo Sapiens
EVTAALRER

SEQ ID NO: 45720 - protein, 9 aa, Homo Sapiens
EVVNKRFVR

SEQ ID NO: 45721 - protein, 9 aa, Homo Sapiens
EVVPEPVAR

SEQ ID NO: 45722 - protein, 9 aa, Homo Sapiens
EVVQITWNR

SEQ ID NO: 45723 - protein, 9 aa, Homo Sapiens
EVVYRFTAR

SEQ ID NO: 45724 - protein, 9 aa, Homo Sapiens
EVWKGIKKR

SEQ ID NO: 45725 - protein, 9 aa, Homo Sapiens
EVWPHSTER

SEQ ID NO: 45726 - protein, 9 aa, Homo Sapiens
EVYKELRLR

SEQ ID NO: 45727 - protein, 9 aa, Homo Sapiens
EVYTRLKSR

SEQ ID NO: 45728 - protein, 9 aa, Homo Sapiens
EYAEFQYRR

SEQ ID NO: 45729 - protein, 9 aa, Homo Sapiens
EYAEYIYQR

SEQ ID NO: 45730 - protein, 9 aa, Homo Sapiens
EYAGLKVAR

SEQ ID NO: 45731 - protein, 9 aa, Homo Sapiens
EYAHTRYFR

SEQ ID NO: 45732 - protein, 9 aa, Homo Sapiens
EYAKLLAKR

SEQ ID NO: 45733 - protein, 9 aa, Homo Sapiens
EYFSDLPPR

SEQ ID NO: 45734 - protein, 9 aa, Homo Sapiens
EYHKFLIGK

SEQ ID NO: 45735 - protein, 9 aa, Homo Sapiens
EYHWRKHLR

SEQ ID NO: 45736 - protein, 9 aa, Homo Sapiens
EYIEARVTK

SEQ ID NO: 45737 - protein, 9 aa, Homo Sapiens
EYIELHRKR

SEQ ID NO: 45738 - protein, 9 aa, Homo Sapiens
EYIFLAVGR

SEQ ID NO: 45739 - protein, 9 aa, Homo Sapiens
EYIHDFNRR

SEQ ID NO: 45740 - protein, 9 aa, Homo Sapiens
EYIKNWRPR

SEQ ID NO: 45741 - protein, 9 aa, Homo Sapiens
EYIKTWRPR

SEQ ID NO: 45742 - protein, 9 aa, Homo Sapiens
EYISTEFNR

SEQ ID NO: 45743 - protein, 9 aa, Homo Sapiens
EYKDIFIRH

SEQ ID NO: 45744 - protein, 9 aa, Homo Sapiens
EYKMILVVR

SEQ ID NO: 45745 - protein, 9 aa, Homo Sapiens
EYLDMKNTR

SEQ ID NO: 45746 - protein, 9 aa, Homo Sapiens
EYLDTYNNR

SEQ ID NO: 45747 - protein, 9 aa, Homo Sapiens
EYLEKIKQR

SEQ ID NO: 45748 - protein, 9 aa, Homo Sapiens
EYLHKAVFR

SEQ ID NO: 45749 - protein, 9 aa, Homo Sapiens
EYLHRFYGR

SEQ ID NO: 45750 - protein, 9 aa, Homo Sapiens
EYLKNIIYR

SEQ ID NO: 45751 - protein, 9 aa, Homo Sapiens
EYLQKMVQR

SEQ ID NO: 45752 - protein, 9 aa, Homo Sapiens
EYLRWKQER

SEQ ID NO: 45753 - protein, 9 aa, Homo Sapiens
EYLSLETTR

SEQ ID NO: 45754 - protein, 9 aa, Homo Sapiens
EYLTSTACR

SEQ ID NO: 45755 - protein, 9 aa, Homo Sapiens
EYMEKIKQR

SEQ ID NO: 45756 - protein, 9 aa, Homo Sapiens
EYMRVISQR

SEQ ID NO: 45757 - protein, 9 aa, Homo Sapiens
EYNVRVASR

SEQ ID NO: 45758 - protein, 9 aa, Homo Sapiens
EYQILVVTR

SEQ ID NO: 45759 - protein, 9 aa, Homo Sapiens
EYRASLQQR

SEQ ID NO: 45760 - protein, 9 aa, Homo Sapiens
EYRKYIHSR

SEQ ID NO: 45761 - protein, 9 aa, Homo Sapiens
EYSHRMWGR

SEQ ID NO: 45762 - protein, 9 aa, Homo Sapiens
EYTEGISQR

SEQ ID NO: 45763 - protein, 9 aa, Homo Sapiens
EYVDRLSKR

SEQ ID NO: 45764 - protein, 9 aa, Homo Sapiens
EYVETVTSR

SEQ ID NO: 45765 - protein, 9 aa, Homo Sapiens
EYVGPRLSR

SEQ ID NO: 45766 - protein, 9 aa, Homo Sapiens
EYVPETVYR

SEQ ID NO: 45767 - protein, 9 aa, Homo Sapiens
EYWDRQRNR

SEQ ID NO: 45768 - protein, 9 aa, Homo Sapiens
EYYKHPISR

SEQ ID NO: 45769 - protein, 9 aa, Homo Sapiens
FAFGGLCER

SEQ ID NO: 45770 - protein, 9 aa, Homo Sapiens
FFGERRIPR

SEQ ID NO: 45771 - protein, 9 aa, Homo Sapiens
FFNDRPWRR

SEQ ID NO: 45772 - protein, 9 aa, Homo Sapiens
FLFVPPQFR

SEQ ID NO: 45773 - protein, 9 aa, Homo Sapiens
FTNKPTTFR

SEQ ID NO: 45774 - protein, 9 aa, Homo Sapiens
FVVGTERGR

SEQ ID NO: 45775 - protein, 9 aa, Homo Sapiens
FYKAIQKRR

SEQ ID NO: 45776 - protein, 9 aa, Homo Sapiens
GVMSPPLSR

SEQ ID NO: 45777 - protein, 9 aa, Homo Sapiens
HAKAVVSLR

SEQ ID NO: 45778 - protein, 9 aa, Homo Sapiens
HALELVVSR

SEQ ID NO: 45779 - protein, 9 aa, Homo Sapiens
HANPRLWLR

SEQ ID NO: 45780 - protein, 9 aa, Homo Sapiens
HAQLLEQHR

SEQ ID NO: 45781 - protein, 9 aa, Homo Sapiens
HAQSIGMNR

SEQ ID NO: 45782 - protein, 9 aa, Homo Sapiens
HAREIFDSR

SEQ ID NO: 45783 - protein, 9 aa, Homo Sapiens
HARYILTNR

SEQ ID NO: 45784 - protein, 9 aa, Homo Sapiens
HAWEPTGTR

SEQ ID NO: 45785 - protein, 9 aa, Homo Sapiens
HIFRPQIER

SEQ ID NO: 45786 - protein, 9 aa, Homo Sapiens
HINTVFVLR

SEQ ID NO: 45787 - protein, 9 aa, Homo Sapiens
HIQEIRTLR

SEQ ID NO: 45788 - protein, 9 aa, Homo Sapiens
HLFDHVVNR

SEQ ID NO: 45789 - protein, 9 aa, Homo Sapiens
HLRDFNFSR

SEQ ID NO: 45790 - protein, 9 aa, Homo Sapiens
HMINNHVPR

SEQ ID NO: 45791 - protein, 9 aa, Homo Sapiens
HNQGPVIKR

SEQ ID NO: 45792 - protein, 9 aa, Homo Sapiens
HNTMPSQFR

SEQ ID NO: 45793 - protein, 9 aa, Homo Sapiens
HNYQPCVQR

SEQ ID NO: 45794 - protein, 9 aa, Homo Sapiens
HSKGFGFVR

SEQ ID NO: 45795 - protein, 9 aa, Homo Sapiens
HSLAPMYYR

SEQ ID NO: 45796 - protein, 9 aa, Homo Sapiens
HSLAVFIKR

SEQ ID NO: 45797 - protein, 9 aa, Homo Sapiens
HSLPPIARR

SEQ ID NO: 45798 - protein, 9 aa, Homo Sapiens
HSMALIHNR

SEQ ID NO: 45799 - protein, 9 aa, Homo Sapiens
HSMDFVAYR

SEQ ID NO: 45800 - protein, 9 aa, Homo Sapiens
HSRVILQGR

SEQ ID NO: 45801 - protein, 9 aa, Homo Sapiens
HTFDHINKR

SEQ ID NO: 45802 - protein, 9 aa, Homo Sapiens
HTLEPLIPR

SEQ ID NO: 45803 - protein, 9 aa, Homo Sapiens
HTLKRDVLR

SEQ ID NO: 45804 - protein, 9 aa, Homo Sapiens
HVFLRTTGR

SEQ ID NO: 45805 - protein, 9 aa, Homo Sapiens
HVHEPNPLR

SEQ ID NO: 45806 - protein, 9 aa, Homo Sapiens
HYVPKIYCR

SEQ ID NO: 45807 - protein, 9 aa, Homo Sapiens
IAAVPPQYR

SEQ ID NO: 45808 - protein, 9 aa, Homo Sapiens
IAFAPNLGR

SEQ ID NO: 45809 - protein, 9 aa, Homo Sapiens
IAQARIFPR

SEQ ID NO: 45810 - protein, 9 aa, Homo Sapiens
IFETIVNNR

SEQ ID NO: 45811 - protein, 9 aa, Homo Sapiens
IFKGVFVHR

SEQ ID NO: 45812 - protein, 9 aa, Homo Sapiens
IFKPRFAMR

SEQ ID NO: 45813 - protein, 9 aa, Homo Sapiens
IFQSISFNR

SEQ ID NO: 45814 - protein, 9 aa, Homo Sapiens
IFYTAIVNR

SEQ ID NO: 45815 - protein, 9 aa, Homo Sapiens
IIRDRQEVR

SEQ ID NO: 45816 - protein, 9 aa, Homo Sapiens
ILQILSLNR

SEQ ID NO: 45817 - protein, 9 aa, Homo Sapiens
IMAELLTGR

SEQ ID NO: 45818 - protein, 9 aa, Homo Sapiens
INKDVTHPR

SEQ ID NO: 45819 - protein, 9 aa, Homo Sapiens
INRPIIVFR

SEQ ID NO: 45820 - protein, 9 aa, Homo Sapiens
INYDLPTNR

SEQ ID NO: 45821 - protein, 9 aa, Homo Sapiens
IPLAPNTGR

SEQ ID NO: 45822 - protein, 9 aa, Homo Sapiens
IPRTPSSFR

SEQ ID NO: 45823 - protein, 9 aa, Homo Sapiens
IPYTPAMQR

SEQ ID NO: 45824 - protein, 9 aa, Homo Sapiens
ITYLMEHKR

SEQ ID NO: 45825 - protein, 9 aa, Homo Sapiens
IVKPPASAR

SEQ ID NO: 45826 - protein, 9 aa, Homo Sapiens
IVNENLVER

SEQ ID NO: 45827 - protein, 9 aa, Homo Sapiens
IVNHPKVGR

SEQ ID NO: 45828 - protein, 9 aa, Homo Sapiens
IYKAISSNR

SEQ ID NO: 45829 - protein, 9 aa, Homo Sapiens
IYQDSFEQR

SEQ ID NO: 45830 - protein, 9 aa, Homo Sapiens
IYSGYIRNR

SEQ ID NO: 45831 - protein, 9 aa, Homo Sapiens
KPSNIFISR

SEQ ID NO: 45832 - protein, 9 aa, Homo Sapiens
LAAEPKVNR

SEQ ID NO: 45833 - protein, 9 aa, Homo Sapiens
LAAVREAER

SEQ ID NO: 45834 - protein, 9 aa, Homo Sapiens
LALLGNHLK

SEQ ID NO: 45835 - protein, 9 aa, Homo Sapiens
LALNIIQNR

SEQ ID NO: 45836 - protein, 9 aa, Homo Sapiens
LAQAWIAQR

SEQ ID NO: 45837 - protein, 9 aa, Homo Sapiens
LAQFHFTNR

SEQ ID NO: 45838 - protein, 9 aa, Homo Sapiens
LARDVYVGR

SEQ ID NO: 45839 - protein, 9 aa, Homo Sapiens
LAWHPTCGR

SEQ ID NO: 45840 - protein, 9 aa, Homo Sapiens
LDTNLPANR

SEQ ID NO: 45841 - protein, 9 aa, Homo Sapiens
LFKSKAYER

SEQ ID NO: 45842 - protein, 9 aa, Homo Sapiens
LFRGRISER

SEQ ID NO: 45843 - protein, 9 aa, Homo Sapiens
LHIGSAHNR

SEQ ID NO: 45844 - protein, 9 aa, Homo Sapiens
LINNKIANR

SEQ ID NO: 45845 - protein, 9 aa, Homo Sapiens
LLQEKRFLR

SEQ ID NO: 45846 - protein, 9 aa, Homo Sapiens
LMFDKTTNR

SEQ ID NO: 45847 - protein, 9 aa, Homo Sapiens
LMNIHVTPR

SEQ ID NO: 45848 - protein, 9 aa, Homo Sapiens
LNAESRVNR

SEQ ID NO: 45849 - protein, 9 aa, Homo Sapiens
LNYVPFAER

SEQ ID NO: 45850 - protein, 9 aa, Homo Sapiens
LPLSPASTR

SEQ ID NO: 45851 - protein, 9 aa, Homo Sapiens
LPQGHFQER

SEQ ID NO: 45852 - protein, 9 aa, Homo Sapiens
LPWVPPHLR

SEQ ID NO: 45853 - protein, 9 aa, Homo Sapiens
LSNRPIMFR

SEQ ID NO: 45854 - protein, 9 aa, Homo Sapiens
LSYQPVAQR

SEQ ID NO: 45855 - protein, 9 aa, Homo Sapiens
LTQYRVSLR

SEQ ID NO: 45856 - protein, 9 aa, Homo Sapiens
LVATHDYYR

SEQ ID NO: 45857 - protein, 9 aa, Homo Sapiens
LVREIRQYR

SEQ ID NO: 45858 - protein, 9 aa, Homo Sapiens
LVVTKIFQK

SEQ ID NO: 45859 - protein, 9 aa, Homo Sapiens
LYQIITVER

SEQ ID NO: 45860 - protein, 9 aa, Homo Sapiens
LYRKMEIYR

SEQ ID NO: 45861 - protein, 9 aa, Homo Sapiens
MALLLSVLR

SEQ ID NO: 45862 - protein, 9 aa, Homo Sapiens
MFAERLAKR

SEQ ID NO: 45863 - protein, 9 aa, Homo Sapiens
MFEYLAPPR

SEQ ID NO: 45864 - protein, 9 aa, Homo Sapiens
MLKPALEPR

SEQ ID NO: 45865 - protein, 9 aa, Homo Sapiens
MLRLPTVFR

SEQ ID NO: 45866 - protein, 9 aa, Homo Sapiens
MLYGLIHAR

SEQ ID NO: 45867 - protein, 9 aa, Homo Sapiens
MNFNPIISR

SEQ ID NO: 45868 - protein, 9 aa, Homo Sapiens
MPKDIQLAR

SEQ ID NO: 45869 - protein, 9 aa, Homo Sapiens
MTNLPAVGR

SEQ ID NO: 45870 - protein, 9 aa, Homo Sapiens
MTNTPVVVR

SEQ ID NO: 45871 - protein, 9 aa, Homo Sapiens
MTSVPVKER

SEQ ID NO: 45872 - protein, 9 aa, Homo Sapiens
MVLAHVTNR

SEQ ID NO: 45873 - protein, 9 aa, Homo Sapiens
MVMDKKHFK

SEQ ID NO: 45874 - protein, 9 aa, Homo Sapiens
MVNVPKTRR

SEQ ID NO: 45875 - protein, 9 aa, Homo Sapiens
MVQNRVFLR

SEQ ID NO: 45876 - protein, 9 aa, Homo Sapiens
MYCDKMFHR

SEQ ID NO: 45877 - protein, 9 aa, Homo Sapiens
MYPDYFAKR

SEQ ID NO: 45878 - protein, 9 aa, Homo Sapiens
MYREYIRNR

SEQ ID NO: 45879 - protein, 9 aa, Homo Sapiens
NAGRLFHYR

SEQ ID NO: 45880 - protein, 9 aa, Homo Sapiens
NAIKWNFTK

SEQ ID NO: 45881 - protein, 9 aa, Homo Sapiens
NAIVWKIKR

SEQ ID NO: 45882 - protein, 9 aa, Homo Sapiens
NAKALSTLR

SEQ ID NO: 45883 - protein, 9 aa, Homo Sapiens
NALLVVKHR

SEQ ID NO: 45884 - protein, 9 aa, Homo Sapiens
NALQQVVAR

SEQ ID NO: 45885 - protein, 9 aa, Homo Sapiens
NAMLPFHHR

SEQ ID NO: 45886 - protein, 9 aa, Homo Sapiens
NANLPSSLR

SEQ ID NO: 45887 - protein, 9 aa, Homo Sapiens
NANPLIYQR

SEQ ID NO: 45888 - protein, 9 aa, Homo Sapiens
NAQAPCWGR

SEQ ID NO: 45889 - protein, 9 aa, Homo Sapiens
NAQNWGMQR

SEQ ID NO: 45890 - protein, 9 aa, Homo Sapiens
NARDTVFYR

SEQ ID NO: 45891 - protein, 9 aa, Homo Sapiens
NATVPLLGR

SEQ ID NO: 45892 - protein, 9 aa, Homo Sapiens
NDFVPPAPR

SEQ ID NO: 45893 - protein, 9 aa, Homo Sapiens
NFIDVIITR

SEQ ID NO: 45894 - protein, 9 aa, Homo Sapiens
NFMLIITHR

SEQ ID NO: 45895 - protein, 9 aa, Homo Sapiens
NFNYIEFTR

SEQ ID NO: 45896 - protein, 9 aa, Homo Sapiens
NFRGMYNQR

SEQ ID NO: 45897 - protein, 9 aa, Homo Sapiens
NGKQIYVGR

SEQ ID NO: 45898 - protein, 9 aa, Homo Sapiens
NIKNSSVPR

SEQ ID NO: 45899 - protein, 9 aa, Homo Sapiens
NILKLVVSR

SEQ ID NO: 45900 - protein, 9 aa, Homo Sapiens
NILNKVVTR

SEQ ID NO: 45901 - protein, 9 aa, Homo Sapiens
NLCAIHAKR

SEQ ID NO: 45902 - protein, 9 aa, Homo Sapiens
NLKEIISQR

SEQ ID NO: 45903 - protein, 9 aa, Homo Sapiens
NLKPKSWVR

SEQ ID NO: 45904 - protein, 9 aa, Homo Sapiens
NLKPPQAKR

SEQ ID NO: 45905 - protein, 9 aa, Homo Sapiens
NLKPVWASR

SEQ ID NO: 45906 - protein, 9 aa, Homo Sapiens
NLKSPAVKR

SEQ ID NO: 45907 - protein, 9 aa, Homo Sapiens
NLRRLENNR

SEQ ID NO: 45908 - protein, 9 aa, Homo Sapiens
NLSAPIMSR

SEQ ID NO: 45909 - protein, 9 aa, Homo Sapiens
NLYELKEGR

SEQ ID NO: 45910 - protein, 9 aa, Homo Sapiens
NLYFHDVGR

SEQ ID NO: 45911 - protein, 9 aa, Homo Sapiens
NMFDHPIPR

SEQ ID NO: 45912 - protein, 9 aa, Homo Sapiens
NMLNLLIHR

SEQ ID NO: 45913 - protein, 9 aa, Homo Sapiens
NMNVIDVGR

SEQ ID NO: 45914 - protein, 9 aa, Homo Sapiens
NNANVTWWR

SEQ ID NO: 45915 - protein, 9 aa, Homo Sapiens
NNIGKFLNR

SEQ ID NO: 45916 - protein, 9 aa, Homo Sapiens
NNKDLYVLR

SEQ ID NO: 45917 - protein, 9 aa, Homo Sapiens
NNKRWYFTR

SEQ ID NO: 45918 - protein, 9 aa, Homo Sapiens
NNLGNFINR

SEQ ID NO: 45919 - protein, 9 aa, Homo Sapiens
NNLNTLIQR

SEQ ID NO: 45920 - protein, 9 aa, Homo Sapiens
NNQSFYSNR

SEQ ID NO: 45921 - protein, 9 aa, Homo Sapiens
NNRELYIHR

SEQ ID NO: 45922 - protein, 9 aa, Homo Sapiens
NPFEVKVNR

SEQ ID NO: 45923 - protein, 9 aa, Homo Sapiens
NPWQRLVKR

SEQ ID NO: 45924 - protein, 9 aa, Homo Sapiens
NSFTPPCQR

SEQ ID NO: 45925 - protein, 9 aa, Homo Sapiens
NSKESYELR

SEQ ID NO: 45926 - protein, 9 aa, Homo Sapiens
NSLDSLCNR

SEQ ID NO: 45927 - protein, 9 aa, Homo Sapiens
NSLDTVLNR

SEQ ID NO: 45928 - protein, 9 aa, Homo Sapiens
NSNLITWNR

SEQ ID NO: 45929 - protein, 9 aa, Homo Sapiens
NSNLIVHQR

SEQ ID NO: 45930 - protein, 9 aa, Homo Sapiens
NSNLVIHQR

SEQ ID NO: 45931 - protein, 9 aa, Homo Sapiens
NSQKKYFGR

SEQ ID NO: 45932 - protein, 9 aa, Homo Sapiens
NSQLIVHQR

SEQ ID NO: 45933 - protein, 9 aa, Homo Sapiens
NSREKIYNR

SEQ ID NO: 45934 - protein, 9 aa, Homo Sapiens
NTFGSFQCR

SEQ ID NO: 45935 - protein, 9 aa, Homo Sapiens
NTGNWMHIR

SEQ ID NO: 45936 - protein, 9 aa, Homo Sapiens
NTIKHYVHR

SEQ ID NO: 45937 - protein, 9 aa, Homo Sapiens
NTIKLIVGR

SEQ ID NO: 45938 - protein, 9 aa, Homo Sapiens
NTILRHLGR

SEQ ID NO: 45939 - protein, 9 aa, Homo Sapiens
NTNDFVTLR

SEQ ID NO: 45940 - protein, 9 aa, Homo Sapiens
NTQVLINCR

SEQ ID NO: 45941 - protein, 9 aa, Homo Sapiens
NTREPKLFR

SEQ ID NO: 45942 - protein, 9 aa, Homo Sapiens
NTRIPEQRF

SEQ ID NO: 45943 - protein, 9 aa, Homo Sapiens
NTSTSIVNR

SEQ ID NO: 45944 - protein, 9 aa, Homo Sapiens
NTVHDIVNR

SEQ ID NO: 45945 - protein, 9 aa, Homo Sapiens
NVARRIEFR

SEQ ID NO: 45946 - protein, 9 aa, Homo Sapiens
NVKELFSVR

SEQ ID NO: 45947 - protein, 9 aa, Homo Sapiens
NVKGPGLQR

SEQ ID NO: 45948 - protein, 9 aa, Homo Sapiens
NVKVVVRCR

SEQ ID NO: 45949 - protein, 9 aa, Homo Sapiens
NVLEKTEQR

SEQ ID NO: 45950 - protein, 9 aa, Homo Sapiens
NVLGRVKGR

SEQ ID NO: 45951 - protein, 9 aa, Homo Sapiens
NVNEVISNR

SEQ ID NO: 45952 - protein, 9 aa, Homo Sapiens
NVQVHFTER

SEQ ID NO: 45953 - protein, 9 aa, Homo Sapiens
NVRLIEVER

SEQ ID NO: 45954 - protein, 9 aa, Homo Sapiens
NYAAPPSTR

SEQ ID NO: 45955 - protein, 9 aa, Homo Sapiens
NYCEKMFHR

SEQ ID NO: 45956 - protein, 9 aa, Homo Sapiens
NYFEPPIPR

SEQ ID NO: 45957 - protein, 9 aa, Homo Sapiens
NYGPGPSLR

SEQ ID NO: 45958 - protein, 9 aa, Homo Sapiens
NYIGSFLAR

SEQ ID NO: 45959 - protein, 9 aa, Homo Sapiens
NYVNKIKNR

SEQ ID NO: 45960 - protein, 9 aa, Homo Sapiens
PEEAVGHAR

SEQ ID NO: 45961 - protein, 9 aa, Homo Sapiens
PFDITVMIR

SEQ ID NO: 45962 - protein, 9 aa, Homo Sapiens
QAFEREVGR

SEQ ID NO: 45963 - protein, 9 aa, Homo Sapiens
QAQKPSVPR

SEQ ID NO: 45964 - protein, 9 aa, Homo Sapiens
QEQNQEQPI

SEQ ID NO: 45965 - protein, 9 aa, Homo Sapiens
QIPEIKQTL

SEQ ID NO: 45966 - protein, 9 aa, Homo Sapiens
QNLQLENLR

SEQ ID NO: 45967 - protein, 9 aa, Homo Sapiens
QPFLKKWYR

SEQ ID NO: 45968 - protein, 9 aa, Homo Sapiens
QQKPPPPPK

SEQ ID NO: 45969 - protein, 9 aa, Homo Sapiens
QQLYWSHPR

SEQ ID NO: 45970 - protein, 9 aa, Homo Sapiens
QSNLIVHQR

SEQ ID NO: 45971 - protein, 9 aa, Homo Sapiens
QSYDNFSYR

SEQ ID NO: 45972 - protein, 9 aa, Homo Sapiens
QTKPVVVYR

SEQ ID NO: 45973 - protein, 9 aa, Homo Sapiens
QTKPVYVYR

SEQ ID NO: 45974 - protein, 9 aa, Homo Sapiens
QTKTVRVFR

SEQ ID NO: 45975 - protein, 9 aa, Homo Sapiens
QTQSIYIPR

SEQ ID NO: 45976 - protein, 9 aa, Homo Sapiens
QVMFRNYQR

SEQ ID NO: 45977 - protein, 9 aa, Homo Sapiens
QVQVWFKNR

SEQ ID NO: 45978 - protein, 9 aa, Homo Sapiens
QVREICISR

SEQ ID NO: 45979 - protein, 9 aa, Homo Sapiens
QYMEEIYHR

SEQ ID NO: 45980 - protein, 9 aa, Homo Sapiens
RMLERVIGR

SEQ ID NO: 45981 - protein, 9 aa, Homo Sapiens
RNLDHVYNR

SEQ ID NO: 45982 - protein, 9 aa, Homo Sapiens
SAALRAVYR

SEQ ID NO: 45983 - protein, 9 aa, Homo Sapiens
SAGGSFTVR

SEQ ID NO: 45984 - protein, 9 aa, Homo Sapiens
SAIHIRVFR

SEQ ID NO: 45985 - protein, 9 aa, Homo Sapiens
SAKEVLSAR

SEQ ID NO: 45986 - protein, 9 aa, Homo Sapiens
SALRPSTSR

SEQ ID NO: 45987 - protein, 9 aa, Homo Sapiens
SANDYFSER

SEQ ID NO: 45988 - protein, 9 aa, Homo Sapiens
SANLIVHQR

SEQ ID NO: 45989 - protein, 9 aa, Homo Sapiens
SFFRREIKR

SEQ ID NO: 45990 - protein, 9 aa, Homo Sapiens
SFLKRLICR

SEQ ID NO: 45991 - protein, 9 aa, Homo Sapiens
SFQRRWITR

SEQ ID NO: 45992 - protein, 9 aa, Homo Sapiens
SFRKKYELR

SEQ ID NO: 45993 - protein, 9 aa, Homo Sapiens
SGYPPFVGR

SEQ ID NO: 45994 - protein, 9 aa, Homo Sapiens
SILLWATQR

SEQ ID NO: 45995 - protein, 9 aa, Homo Sapiens
SILSHIHKR

SEQ ID NO: 45996 - protein, 9 aa, Homo Sapiens
SIMKWNRER

SEQ ID NO: 45997 - protein, 9 aa, Homo Sapiens
SIRDPVHNR

SEQ ID NO: 45998 - protein, 9 aa, Homo Sapiens
SIREPIANR

SEQ ID NO: 45999 - protein, 9 aa, Homo Sapiens
SLWKKTVYR

SEQ ID NO: 46000 - protein, 9 aa, Homo Sapiens
SMLEYFINR

SEQ ID NO: 46001 - protein, 9 aa, Homo Sapiens
SMRDHIDYR

SEQ ID NO: 46002 - protein, 9 aa, Homo Sapiens
SNDIPHVVR

SEQ ID NO: 46003 - protein, 9 aa, Homo Sapiens
SNKELAIER

SEQ ID NO: 46004 - protein, 9 aa, Homo Sapiens
SNNTPQLNR

SEQ ID NO: 46005 - protein, 9 aa, Homo Sapiens
SSYFRIHER

SEQ ID NO: 46006 - protein, 9 aa, Homo Sapiens
STARHLYLR

SEQ ID NO: 46007 - protein, 9 aa, Homo Sapiens
STFDTPYCR

SEQ ID NO: 46008 - protein, 9 aa, Homo Sapiens
STKGLNLPR

SEQ ID NO: 46009 - protein, 9 aa, Homo Sapiens
STLSPIAPR

SEQ ID NO: 46010 - protein, 9 aa, Homo Sapiens
STQLTIHQR

SEQ ID NO: 46011 - protein, 9 aa, Homo Sapiens
STRPPSVTR

SEQ ID NO: 46012 - protein, 9 aa, Homo Sapiens
STYIRLYGR

SEQ ID NO: 46013 - protein, 9 aa, Homo Sapiens
SVDRPIIDR

SEQ ID NO: 46014 - protein, 9 aa, Homo Sapiens
SVKDYCFAR

SEQ ID NO: 46015 - protein, 9 aa, Homo Sapiens
SVKEIYNEK

SEQ ID NO: 46016 - protein, 9 aa, Homo Sapiens
SVKEVALGR

SEQ ID NO: 46017 - protein, 9 aa, Homo Sapiens
SVKSITNPR

SEQ ID NO: 46018 - protein, 9 aa, Homo Sapiens
SVLDYFSER

SEQ ID NO: 46019 - protein, 9 aa, Homo Sapiens
SVLENFVGR

SEQ ID NO: 46020 - protein, 9 aa, Homo Sapiens
SVLNFATNR

SEQ ID NO: 46021 - protein, 9 aa, Homo Sapiens
SVQGIIIYR

SEQ ID NO: 46022 - protein, 9 aa, Homo Sapiens
SVYIPAHGR

SEQ ID NO: 46023 - protein, 9 aa, Homo Sapiens
SYFSFSRNR

SEQ ID NO: 46024 - protein, 9 aa, Homo Sapiens
SYGPGPSLR

SEQ ID NO: 46025 - protein, 9 aa, Homo Sapiens
SYIDRLAPR

SEQ ID NO: 46026 - protein, 9 aa, Homo Sapiens
SYKDFSESR

SEQ ID NO: 46027 - protein, 9 aa, Homo Sapiens
SYKGSISYR

SEQ ID NO: 46028 - protein, 9 aa, Homo Sapiens
SYKGTPAMR

SEQ ID NO: 46029 - protein, 9 aa, Homo Sapiens
SYLDKFFSR

SEQ ID NO: 46030 - protein, 9 aa, Homo Sapiens
SYQEVTVQR

SEQ ID NO: 46031 - protein, 9 aa, Homo Sapiens
SYREQWSQR

SEQ ID NO: 46032 - protein, 9 aa, Homo Sapiens
SYRKFLNLR

SEQ ID NO: 46033 - protein, 9 aa, Homo Sapiens
SYVELSQYR

SEQ ID NO: 46034 - protein, 9 aa, Homo Sapiens
TAIRPIALR

SEQ ID NO: 46035 - protein, 9 aa, Homo Sapiens
TALKVASTR

SEQ ID NO: 46036 - protein, 9 aa, Homo Sapiens
TAYRPDWNR

SEQ ID NO: 46037 - protein, 9 aa, Homo Sapiens
TAYRPPALR

SEQ ID NO: 46038 - protein, 9 aa, Homo Sapiens
TFEHPNVVR

SEQ ID NO: 46039 - protein, 9 aa, Homo Sapiens
TFVAILIAR

SEQ ID NO: 46040 - protein, 9 aa, Homo Sapiens
TFYSISQER

SEQ ID NO: 46041 - protein, 9 aa, Homo Sapiens
TIDQKIVER

SEQ ID NO: 46042 - protein, 9 aa, Homo Sapiens
TILIILTGR

SEQ ID NO: 46043 - protein, 9 aa, Homo Sapiens
TILIPPHAR

SEQ ID NO: 46044 - protein, 9 aa, Homo Sapiens
TLLDKYWTK

SEQ ID NO: 46045 - protein, 9 aa, Homo Sapiens
TNTVPKLYR

SEQ ID NO: 46046 - protein, 9 aa, Homo Sapiens
TSNMPVAAR

SEQ ID NO: 46047 - protein, 9 aa, Homo Sapiens
TSRNITEAR

SEQ ID NO: 46048 - protein, 9 aa, Homo Sapiens
TSWVPLVSR

SEQ ID NO: 46049 - protein, 9 aa, Homo Sapiens
TTKPAIIFR

SEQ ID NO: 46050 - protein, 9 aa, Homo Sapiens
TTSIPKCYR

SEQ ID NO: 46051 - protein, 9 aa, Homo Sapiens
TVATLPRGR

SEQ ID NO: 46052 - protein, 9 aa, Homo Sapiens
TVRDHLVGR

SEQ ID NO: 46053 - protein, 9 aa, Homo Sapiens
TYKFCFSNR

SEQ ID NO: 46054 - protein, 9 aa, Homo Sapiens
TYLATFHQR

SEQ ID NO: 46055 - protein, 9 aa, Homo Sapiens
TYLGEFSLR

SEQ ID NO: 46056 - protein, 9 aa, Homo Sapiens
TYLTKFIAR

SEQ ID NO: 46057 - protein, 9 aa, Homo Sapiens
TYNEHITKR

SEQ ID NO: 46058 - protein, 9 aa, Homo Sapiens
TYYDAWSLR

SEQ ID NO: 46059 - protein, 9 aa, Homo Sapiens
TYYESISNR

SEQ ID NO: 46060 - protein, 9 aa, Homo Sapiens
TYYGSFVTR

SEQ ID NO: 46061 - protein, 9 aa, Homo Sapiens
TYYPPPRLR

SEQ ID NO: 46062 - protein, 9 aa, Homo Sapiens
VAFKPTSNR

SEQ ID NO: 46063 - protein, 9 aa, Homo Sapiens
VAMEPVSTR

SEQ ID NO: 46064 - protein, 9 aa, Homo Sapiens
VANSAFVER

SEQ ID NO: 46065 - protein, 9 aa, Homo Sapiens
VASTPISQR

SEQ ID NO: 46066 - protein, 9 aa, Homo Sapiens
VAVTPFSLR

SEQ ID NO: 46067 - protein, 9 aa, Homo Sapiens
VAWLVAHVR

SEQ ID NO: 46068 - protein, 9 aa, Homo Sapiens
VEELKPTPE

SEQ ID NO: 46069 - protein, 9 aa, Homo Sapiens
VEKSKIPGR

SEQ ID NO: 46070 - protein, 9 aa, Homo Sapiens
VFKDEATVR

SEQ ID NO: 46071 - protein, 9 aa, Homo Sapiens
VFKEEGVLR

SEQ ID NO: 46072 - protein, 9 aa, Homo Sapiens
VFLLWKNWR

SEQ ID NO: 46073 - protein, 9 aa, Homo Sapiens
VFQERNYPR

SEQ ID NO: 46074 - protein, 9 aa, Homo Sapiens
VMIHPVTNR

SEQ ID NO: 46075 - protein, 9 aa, Homo Sapiens
VMKDFEEMR

SEQ ID NO: 46076 - protein, 9 aa, Homo Sapiens
VMKPPQVVR

SEQ ID NO: 46077 - protein, 9 aa, Homo Sapiens
VMQKRISFR

SEQ ID NO: 46078 - protein, 9 aa, Homo Sapiens
VNMVPFPRL

SEQ ID NO: 46079 - protein, 9 aa, Homo Sapiens
VNTSLNVYR

SEQ ID NO: 46080 - protein, 9 aa, Homo Sapiens
VPFGAGRHR

SEQ ID NO: 46081 - protein, 9 aa, Homo Sapiens
VPIGYHVPR

SEQ ID NO: 46082 - protein, 9 aa, Homo Sapiens
VPSTPIAHR

SEQ ID NO: 46083 - protein, 9 aa, Homo Sapiens
VPYVPLRQR

SEQ ID NO: 46084 - protein, 9 aa, Homo Sapiens
VSNKWLHER

SEQ ID NO: 46085 - protein, 9 aa, Homo Sapiens
VSYVPITGR

SEQ ID NO: 46086 - protein, 9 aa, Homo Sapiens
VTQAPISAR

SEQ ID NO: 46087 - protein, 9 aa, Homo Sapiens
VVAPRLNSR

SEQ ID NO: 46088 - protein, 9 aa, Homo Sapiens
VVMTPPRNR

SEQ ID NO: 46089 - protein, 9 aa, Homo Sapiens
VYFKRFYAR

SEQ ID NO: 46090 - protein, 9 aa, Homo Sapiens
VYIERLRHR

SEQ ID NO: 46091 - protein, 9 aa, Homo Sapiens
VYNEFVRKR

SEQ ID NO: 46092 - protein, 9 aa, Homo Sapiens
VYNEYISHR

SEQ ID NO: 46093 - protein, 9 aa, Homo Sapiens
VYTDTIQQR

SEQ ID NO: 46094 - protein, 9 aa, Homo Sapiens
VYYRVYYTR

SEQ ID NO: 46095 - protein, 9 aa, Homo Sapiens
WFKGWKVTR

SEQ ID NO: 46096 - protein, 9 aa, Homo Sapiens
WVKPIIIGR

SEQ ID NO: 46097 - protein, 9 aa, Homo Sapiens
WYLGTIKKR

SEQ ID NO: 46098 - protein, 9 aa, Homo Sapiens
YDENWFYTR

SEQ ID NO: 46099 - protein, 9 aa, Homo Sapiens
YIRPVFVSR

SEQ ID NO: 46100 - protein, 9 aa, Homo Sapiens
YLKEREEFR

SEQ ID NO: 46101 - protein, 9 aa, Homo Sapiens
YMLDKINRR

SEQ ID NO: 46102 - protein, 9 aa, Homo Sapiens
YPDYKYRPR

SEQ ID NO: 46103 - protein, 9 aa, Homo Sapiens
YPNKPPTVR

SEQ ID NO: 46104 - protein, 9 aa, Homo Sapiens
YPYSFWIGR

SEQ ID NO: 46105 - protein, 9 aa, Homo Sapiens
YPYSPPAFR

SEQ ID NO: 46106 - protein, 9 aa, Homo Sapiens
YPYSPPTFR

SEQ ID NO: 46107 - protein, 9 aa, Homo Sapiens
YSNKEIFLR

SEQ ID NO: 46108 - protein, 9 aa, Homo Sapiens
YSWDIVVQR

SEQ ID NO: 46109 - protein, 9 aa, Homo Sapiens
YTQPGPGYR

SEQ ID NO: 46110 - protein, 9 aa, Homo Sapiens
YVAYIKWHR

SEQ ID NO: 46111 - protein, 9 aa, Homo Sapiens
YVKDLVVQR

SEQ ID NO: 46112 - protein, 9 aa, Homo Sapiens
YVKEQFAWR

SEQ ID NO: 46113 - protein, 9 aa, Homo Sapiens
YVQRFHYSR

SEQ ID NO: 46114 - protein, 9 aa, Homo Sapiens
YWKEVAEKR

SEQ ID NO: 46115 - protein, 9 aa, Homo Sapiens
YYIVLITKR

SEQ ID NO: 46116 - protein, 9 aa, Homo Sapiens
YYNGCIFHR

SEQ ID NO: 46117 - protein, 10 aa, Homo Sapiens
ADFKNVLSNR

SEQ ID NO: 46118 - protein, 10 aa, Homo Sapiens
ADTLAVRQKR

SEQ ID NO: 46119 - protein, 10 aa, Homo Sapiens
ADYLEFQKNR

SEQ ID NO: 46120 - protein, 10 aa, Homo Sapiens
CAAPGPASYR

SEQ ID NO: 46121 - protein, 10 aa, Homo Sapiens
DAACRVIARL

SEQ ID NO: 46122 - protein, 10 aa, Homo Sapiens
DAADFIRAGR

SEQ ID NO: 46123 - protein, 10 aa, Homo Sapiens
DAAELPGVSR

SEQ ID NO: 46124 - protein, 10 aa, Homo Sapiens
DAAFIIGSGR

SEQ ID NO: 46125 - protein, 10 aa, Homo Sapiens
DAAGTSLYVR

SEQ ID NO: 46126 - protein, 10 aa, Homo Sapiens
DAAKDSILRR

SEQ ID NO: 46127 - protein, 10 aa, Homo Sapiens
DAAKPLPIYR

SEQ ID NO: 46128 - protein, 10 aa, Homo Sapiens
DAFGLLESRL

SEQ ID NO: 46129 - protein, 10 aa, Homo Sapiens
DAFNMQMRQR

SEQ ID NO: 46130 - protein, 10 aa, Homo Sapiens
DAGSVPHVNR

SEQ ID NO: 46131 - protein, 10 aa, Homo Sapiens
DALGAAFATR

SEQ ID NO: 46132 - protein, 10 aa, Homo Sapiens
DALGSLTHSR

SEQ ID NO: 46133 - protein, 10 aa, Homo Sapiens
DANAKFYCRL

SEQ ID NO: 46134 - protein, 10 aa, Homo Sapiens
DAQEILHSRF

SEQ ID NO: 46135 - protein, 10 aa, Homo Sapiens
DARRQQLVYR

SEQ ID NO: 46136 - protein, 10 aa, Homo Sapiens
DASLGNLFAR

SEQ ID NO: 46137 - protein, 10 aa, Homo Sapiens
DASSGPIQVR

SEQ ID NO: 46138 - protein, 10 aa, Homo Sapiens
DAVGFTFPNR

SEQ ID NO: 46139 - protein, 10 aa, Homo Sapiens
DAVKPGVRYR

SEQ ID NO: 46140 - protein, 10 aa, Homo Sapiens
DAWEPKVLRA

SEQ ID NO: 46141 - protein, 10 aa, Homo Sapiens
DAWLPGEATR

SEQ ID NO: 46142 - protein, 10 aa, Homo Sapiens
DAYEPEISRL

SEQ ID NO: 46143 - protein, 10 aa, Homo Sapiens
DAYGSELVER

SEQ ID NO: 46144 - protein, 10 aa, Homo Sapiens
DDFLRRSSSR

SEQ ID NO: 46145 - protein, 10 aa, Homo Sapiens
DDFRARFWYR

SEQ ID NO: 46146 - protein, 10 aa, Homo Sapiens
DESGPSIVHR

SEQ ID NO: 46147 - protein, 10 aa, Homo Sapiens
DFCHWGQRFR

SEQ ID NO: 46148 - protein, 10 aa, Homo Sapiens
DFFNGKELNK

SEQ ID NO: 46149 - protein, 10 aa, Homo Sapiens
DFFNYAGLQR

SEQ ID NO: 46150 - protein, 10 aa, Homo Sapiens
DFHLLDHRGR

SEQ ID NO: 46151 - protein, 10 aa, Homo Sapiens
DFHVINGVLR

SEQ ID NO: 46152 - protein, 10 aa, Homo Sapiens
DFISCDRTGR

SEQ ID NO: 46153 - protein, 10 aa, Homo Sapiens
DFLELQRRYR

SEQ ID NO: 46154 - protein, 10 aa, Homo Sapiens
DFLKVLNRAR

SEQ ID NO: 46155 - protein, 10 aa, Homo Sapiens
DFLSLEHIGR

SEQ ID NO: 46156 - protein, 10 aa, Homo Sapiens
DFQIEKKIGR

SEQ ID NO: 46157 - protein, 10 aa, Homo Sapiens
DFREPTEEER

SEQ ID NO: 46158 - protein, 10 aa, Homo Sapiens
DFRRAPFAGR

SEQ ID NO: 46159 - protein, 10 aa, Homo Sapiens
DGKNVKAFYR

SEQ ID NO: 46160 - protein, 10 aa, Homo Sapiens
DIEFPPPFGR

SEQ ID NO: 46161 - protein, 10 aa, Homo Sapiens
DIFQQTPLGR

SEQ ID NO: 46162 - protein, 10 aa, Homo Sapiens
DIHLGPTVGR

SEQ ID NO: 46163 - protein, 10 aa, Homo Sapiens
DILNGGPSKR

SEQ ID NO: 46164 - protein, 10 aa, Homo Sapiens
DIRPGLPMLR

SEQ ID NO: 46165 - protein, 10 aa, Homo Sapiens
DISDPYKVYR

SEQ ID NO: 46166 - protein, 10 aa, Homo Sapiens
DISIIKGRYR

SEQ ID NO: 46167 - protein, 10 aa, Homo Sapiens
DISSFKNIYR

SEQ ID NO: 46168 - protein, 10 aa, Homo Sapiens
DIYDRKNMPR

SEQ ID NO: 46169 - protein, 10 aa, Homo Sapiens
DIYRPTIHKL

SEQ ID NO: 46170 - protein, 10 aa, Homo Sapiens
DLATIHGMNR

SEQ ID NO: 46171 - protein, 10 aa, Homo Sapiens
DLGPMRKSYR

SEQ ID NO: 46172 - protein, 10 aa, Homo Sapiens
DLMRRQEELR

SEQ ID NO: 46173 - protein, 10 aa, Homo Sapiens
DLQHGSLFLR

SEQ ID NO: 46174 - protein, 10 aa, Homo Sapiens
DLQLIKVTRL

SEQ ID NO: 46175 - protein, 10 aa, Homo Sapiens
DLQSMEQIRR

SEQ ID NO: 46176 - protein, 10 aa, Homo Sapiens
DLRGSNWVPR

SEQ ID NO: 46177 - protein, 10 aa, Homo Sapiens
DMADHSNLIR

SEQ ID NO: 46178 - protein, 10 aa, Homo Sapiens
DMAEIEKFDK

SEQ ID NO: 46179 - protein, 10 aa, Homo Sapiens
DMKFITPVRR

SEQ ID NO: 46180 - protein, 10 aa, Homo Sapiens
DMLDIREIFR

SEQ ID NO: 46181 - protein, 10 aa, Homo Sapiens
DMNHCYSRLR

SEQ ID NO: 46182 - protein, 10 aa, Homo Sapiens
DMRRPSSVLR

SEQ ID NO: 46183 - protein, 10 aa, Homo Sapiens
DMWAGLWQKR

SEQ ID NO: 46184 - protein, 10 aa, Homo Sapiens
DNFFDGQRKR

SEQ ID NO: 46185 - protein, 10 aa, Homo Sapiens
DNGGYYITTR

SEQ ID NO: 46186 - protein, 10 aa, Homo Sapiens
DNSMGFGAER

SEQ ID NO: 46187 - protein, 10 aa, Homo Sapiens
DNSPGTLTLR

SEQ ID NO: 46188 - protein, 10 aa, Homo Sapiens
DSFPERRAPR

SEQ ID NO: 46189 - protein, 10 aa, Homo Sapiens
DSKGQHLIYR

SEQ ID NO: 46190 - protein, 10 aa, Homo Sapiens
DSLQAFLQDR

SEQ ID NO: 46191 - protein, 10 aa, Homo Sapiens
DSMKSFFRRL

SEQ ID NO: 46192 - protein, 10 aa, Homo Sapiens
DSQDIQGRNR

SEQ ID NO: 46193 - protein, 10 aa, Homo Sapiens
DSQGLNLGCR

SEQ ID NO: 46194 - protein, 10 aa, Homo Sapiens
DSRDGKFIHR

SEQ ID NO: 46195 - protein, 10 aa, Homo Sapiens
DTIDVSNLNR

SEQ ID NO: 46196 - protein, 10 aa, Homo Sapiens
DTIIDIITHR

SEQ ID NO: 46197 - protein, 10 aa, Homo Sapiens
DTKGRFAVHR

SEQ ID NO: 46198 - protein, 10 aa, Homo Sapiens
DTKNYVEVTR

SEQ ID NO: 46199 - protein, 10 aa, Homo Sapiens
DTKRVEAPRL

SEQ ID NO: 46200 - protein, 10 aa, Homo Sapiens
DTLEKLISHR

SEQ ID NO: 46201 - protein, 10 aa, Homo Sapiens
DTLTLKERER

SEQ ID NO: 46202 - protein, 10 aa, Homo Sapiens
DTMKVLGVQR

SEQ ID NO: 46203 - protein, 10 aa, Homo Sapiens
DTQERIKAER

SEQ ID NO: 46204 - protein, 10 aa, Homo Sapiens
DTQNALKNYR

SEQ ID NO: 46205 - protein, 10 aa, Homo Sapiens
DTRDKGLVNR

SEQ ID NO: 46206 - protein, 10 aa, Homo Sapiens
DTRMGPLINR

SEQ ID NO: 46207 - protein, 10 aa, Homo Sapiens
DTRSVHETRF

SEQ ID NO: 46208 - protein, 10 aa, Homo Sapiens
DTSSRSHIFR

SEQ ID NO: 46209 - protein, 10 aa, Homo Sapiens
DTVATLPRGR

SEQ ID NO: 46210 - protein, 10 aa, Homo Sapiens
DVASVIVTKL

SEQ ID NO: 46211 - protein, 10 aa, Homo Sapiens
DVGRRFLVNR

SEQ ID NO: 46212 - protein, 10 aa, Homo Sapiens
DVIGSRRQPR

SEQ ID NO: 46213 - protein, 10 aa, Homo Sapiens
DVINFKKIYK

SEQ ID NO: 46214 - protein, 10 aa, Homo Sapiens
DVISNINITR

SEQ ID NO: 46215 - protein, 10 aa, Homo Sapiens
DVLAWEHERF

SEQ ID NO: 46216 - protein, 10 aa, Homo Sapiens
DVLNIQGVQR

SEQ ID NO: 46217 - protein, 10 aa, Homo Sapiens
DVLNPSGTQR

SEQ ID NO: 46218 - protein, 10 aa, Homo Sapiens
DVLPLAFTRL

SEQ ID NO: 46219 - protein, 10 aa, Homo Sapiens
DVLSHFAQRL

SEQ ID NO: 46220 - protein, 10 aa, Homo Sapiens
DVLTLLESER

SEQ ID NO: 46221 - protein, 10 aa, Homo Sapiens
DVNNPGLRVR

SEQ ID NO: 46222 - protein, 10 aa, Homo Sapiens
DVQPFLPVLR

SEQ ID NO: 46223 - protein, 10 aa, Homo Sapiens
DVQSIIGLQR

SEQ ID NO: 46224 - protein, 10 aa, Homo Sapiens
DVRNFDYTAR

SEQ ID NO: 46225 - protein, 10 aa, Homo Sapiens
DVRPFAPKER

SEQ ID NO: 46226 - protein, 10 aa, Homo Sapiens
DVRSVTSVRR

SEQ ID NO: 46227 - protein, 10 aa, Homo Sapiens
DVSEGPLIPR

SEQ ID NO: 46228 - protein, 10 aa, Homo Sapiens
DVVRRPPIHR

SEQ ID NO: 46229 - protein, 10 aa, Homo Sapiens
DVYDRKNIPR

SEQ ID NO: 46230 - protein, 10 aa, Homo Sapiens
DYFTPQGEFR

SEQ ID NO: 46231 - protein, 10 aa, Homo Sapiens
DYGFPERKER

SEQ ID NO: 46232 - protein, 10 aa, Homo Sapiens
DYIHIRIQQR

SEQ ID NO: 46233 - protein, 10 aa, Homo Sapiens
DYKALGILKR

SEQ ID NO: 46234 - protein, 10 aa, Homo Sapiens
DYKVVSPALR

SEQ ID NO: 46235 - protein, 10 aa, Homo Sapiens
DYLIKTGSER

SEQ ID NO: 46236 - protein, 10 aa, Homo Sapiens
DYLMKILTER

SEQ ID NO: 46237 - protein, 10 aa, Homo Sapiens
DYLVPILAPR

SEQ ID NO: 46238 - protein, 10 aa, Homo Sapiens
DYPDYKYRPR

SEQ ID NO: 46239 - protein, 10 aa, Homo Sapiens
DYQLVRKLGR

SEQ ID NO: 46240 - protein, 10 aa, Homo Sapiens
DYQQTIKKYR

SEQ ID NO: 46241 - protein, 10 aa, Homo Sapiens
DYYDDFLQRL

SEQ ID NO: 46242 - protein, 10 aa, Homo Sapiens
DYYEVLGVQR

SEQ ID NO: 46243 - protein, 10 aa, Homo Sapiens
DYYTPTGEFR

SEQ ID NO: 46244 - protein, 10 aa, Homo Sapiens
EALGEVMVSR

SEQ ID NO: 46245 - protein, 10 aa, Homo Sapiens
EALGSGLVSR

SEQ ID NO: 46246 - protein, 10 aa, Homo Sapiens
EALHLAGMDR

SEQ ID NO: 46247 - protein, 10 aa, Homo Sapiens
EAWLLPAVGR

SEQ ID NO: 46248 - protein, 10 aa, Homo Sapiens
EDYKLHFIFR

SEQ ID NO: 46249 - protein, 10 aa, Homo Sapiens
EDYNLIVIER

SEQ ID NO: 46250 - protein, 10 aa, Homo Sapiens
EDYRDTVVKR

SEQ ID NO: 46251 - protein, 10 aa, Homo Sapiens
EDYYARVEGR

SEQ ID NO: 46252 - protein, 10 aa, Homo Sapiens
EEIGSHIKHR

SEQ ID NO: 46253 - protein, 10 aa, Homo Sapiens
EFDDRRGVLR

SEQ ID NO: 46254 - protein, 10 aa, Homo Sapiens
EFKAVQQVQR

SEQ ID NO: 46255 - protein, 10 aa, Homo Sapiens
EFLDIMKRNR

SEQ ID NO: 46256 - protein, 10 aa, Homo Sapiens
EFQVIMGRKR

SEQ ID NO: 46257 - protein, 10 aa, Homo Sapiens
EFRNFKIIYR

SEQ ID NO: 46258 - protein, 10 aa, Homo Sapiens
EIASVAYRYR

SEQ ID NO: 46259 - protein, 10 aa, Homo Sapiens
EIKDFLLTAR

SEQ ID NO: 46260 - protein, 10 aa, Homo Sapiens
EIKKPPVSER

SEQ ID NO: 46261 - protein, 10 aa, Homo Sapiens
EIRQQIPVFR

SEQ ID NO: 46262 - protein, 10 aa, Homo Sapiens
EIYDRREYSR

SEQ ID NO: 46263 - protein, 10 aa, Homo Sapiens
EKGVYVHTVR

SEQ ID NO: 46264 - protein, 10 aa, Homo Sapiens
ETLETIINRL

SEQ ID NO: 46265 - protein, 10 aa, Homo Sapiens
ETLKHSGIGR

SEQ ID NO: 46266 - protein, 10 aa, Homo Sapiens
ETLPPFPTRL

SEQ ID NO: 46267 - protein, 10 aa, Homo Sapiens
ETLPPVGVNR

SEQ ID NO: 46268 - protein, 10 aa, Homo Sapiens
EVAERLGVTR

SEQ ID NO: 46269 - protein, 10 aa, Homo Sapiens
EVFNKFFKER

SEQ ID NO: 46270 - protein, 10 aa, Homo Sapiens
EVKRPGESLR

SEQ ID NO: 46271 - protein, 10 aa, Homo Sapiens
EVKTPEFVSR

SEQ ID NO: 46272 - protein, 10 aa, Homo Sapiens
EVLLRAGVSR

SEQ ID NO: 46273 - protein, 10 aa, Homo Sapiens
EVLSKALSQR

SEQ ID NO: 46274 - protein, 10 aa, Homo Sapiens
EVLYAPRRLR

SEQ ID NO: 46275 - protein, 10 aa, Homo Sapiens
EVNPQTRIPR

SEQ ID NO: 46276 - protein, 10 aa, Homo Sapiens
EVQEQYTERL

SEQ ID NO: 46277 - protein, 10 aa, Homo Sapiens
EVQGDRMHLR

SEQ ID NO: 46278 - protein, 10 aa, Homo Sapiens
EVYDGPKNVR

SEQ ID NO: 46279 - protein, 10 aa, Homo Sapiens
EYAADIFYSR

SEQ ID NO: 46280 - protein, 10 aa, Homo Sapiens
EYAERPEVAR

SEQ ID NO: 46281 - protein, 10 aa, Homo Sapiens
EYFPTKNRQR

SEQ ID NO: 46282 - protein, 10 aa, Homo Sapiens
EYFSPVGYNR

SEQ ID NO: 46283 - protein, 10 aa, Homo Sapiens
EYILPGSRER

SEQ ID NO: 46284 - protein, 10 aa, Homo Sapiens
EYKDPGKMIR

SEQ ID NO: 46285 - protein, 10 aa, Homo Sapiens
EYKEPESTLR

SEQ ID NO: 46286 - protein, 10 aa, Homo Sapiens
EYLKLGYVSR

SEQ ID NO: 46287 - protein, 10 aa, Homo Sapiens
EYLQIPPVSR

SEQ ID NO: 46288 - protein, 10 aa, Homo Sapiens
EYRDMRDGFR

SEQ ID NO: 46289 - protein, 10 aa, Homo Sapiens
EYVDVVFANR

SEQ ID NO: 46290 - protein, 10 aa, Homo Sapiens
FDFSTRFITR

SEQ ID NO: 46291 - protein, 10 aa, Homo Sapiens
FERIAGEASR

SEQ ID NO: 46292 - protein, 10 aa, Homo Sapiens
GASLLSNMSR

SEQ ID NO: 46293 - protein, 10 aa, Homo Sapiens
GDAKSVFHTR

SEQ ID NO: 46294 - protein, 10 aa, Homo Sapiens
GDYKTIAKER

SEQ ID NO: 46295 - protein, 10 aa, Homo Sapiens
HAKGLHIPRL

SEQ ID NO: 46296 - protein, 10 aa, Homo Sapiens
HFKKPGLTGR

SEQ ID NO: 46297 - protein, 10 aa, Homo Sapiens
HSQDLSGRLR

SEQ ID NO: 46298 - protein, 10 aa, Homo Sapiens
HTKAVNVVRF

SEQ ID NO: 46299 - protein, 10 aa, Homo Sapiens
HTRTPPIIHR

SEQ ID NO: 46300 - protein, 10 aa, Homo Sapiens
HVYDGKFLAR

SEQ ID NO: 46301 - protein, 10 aa, Homo Sapiens
HYIQLGTVYR

SEQ ID NO: 46302 - protein, 10 aa, Homo Sapiens
IARDRALEGR

SEQ ID NO: 46303 - protein, 10 aa, Homo Sapiens
IDEVRTGTYR

SEQ ID NO: 46304 - protein, 10 aa, Homo Sapiens
IDRTIDQIRG

SEQ ID NO: 46305 - protein, 10 aa, Homo Sapiens
IFKEREEDLR

SEQ ID NO: 46306 - protein, 10 aa, Homo Sapiens
ILKTGGGFQR

SEQ ID NO: 46307 - protein, 10 aa, Homo Sapiens
IPYDQSPGPK

SEQ ID NO: 46308 - protein, 10 aa, Homo Sapiens
IVKGPRGTLR

SEQ ID NO: 46309 - protein, 10 aa, Homo Sapiens
IVNENLVERF

SEQ ID NO: 46310 - protein, 10 aa, Homo Sapiens
LAQGDSLAAR

SEQ ID NO: 46311 - protein, 10 aa, Homo Sapiens
LFKEPNAEGR

SEQ ID NO: 46312 - protein, 10 aa, Homo Sapiens
LPEEAVGHAR

SEQ ID NO: 46313 - protein, 10 aa, Homo Sapiens
LPWVPPDTKL

SEQ ID NO: 46314 - protein, 10 aa, Homo Sapiens
MTKSGYQPPR

SEQ ID NO: 46315 - protein, 10 aa, Homo Sapiens
NAQGPLYEQR

SEQ ID NO: 46316 - protein, 10 aa, Homo Sapiens
NFKSPVKTIR

SEQ ID NO: 46317 - protein, 10 aa, Homo Sapiens
NFMLRIGMNK

SEQ ID NO: 46318 - protein, 10 aa, Homo Sapiens
NFRGSLNTYR

SEQ ID NO: 46319 - protein, 10 aa, Homo Sapiens
NLESGWGSGR

SEQ ID NO: 46320 - protein, 10 aa, Homo Sapiens
NLKPKSWVRL

SEQ ID NO: 46321 - protein, 10 aa, Homo Sapiens
NSAGPYFNPR

SEQ ID NO: 46322 - protein, 10 aa, Homo Sapiens
NSLLRENSFR

SEQ ID NO: 46323 - protein, 10 aa, Homo Sapiens
NTQEMPWNVR

SEQ ID NO: 46324 - protein, 10 aa, Homo Sapiens
NVKDKPTVER

SEQ ID NO: 46325 - protein, 10 aa, Homo Sapiens
PDYLVPPALR

SEQ ID NO: 46326 - protein, 10 aa, Homo Sapiens
QDTLVPYGNR

SEQ ID NO: 46327 - protein, 10 aa, Homo Sapiens
QEFKEDIHNR

SEQ ID NO: 46328 - protein, 10 aa, Homo Sapiens
QYIRPVFVSR

SEQ ID NO: 46329 - protein, 10 aa, Homo Sapiens
RFYYTTPNSY

SEQ ID NO: 46330 - protein, 10 aa, Homo Sapiens
RYRPGTVALR

SEQ ID NO: 46331 - protein, 10 aa, Homo Sapiens
SDNKIIIIHR

SEQ ID NO: 46332 - protein, 10 aa, Homo Sapiens
SDTYLHRVAR

SEQ ID NO: 46333 - protein, 10 aa, Homo Sapiens
SFFGERRIPR

SEQ ID NO: 46334 - protein, 10 aa, Homo Sapiens
SFRYNGLIHR

SEQ ID NO: 46335 - protein, 10 aa, Homo Sapiens
SGYKQVQVPR

SEQ ID NO: 46336 - protein, 10 aa, Homo Sapiens
SSQQFSGIGR

SEQ ID NO: 46337 - protein, 10 aa, Homo Sapiens
STKNIHFSRL

SEQ ID NO: 46338 - protein, 10 aa, Homo Sapiens
STKPGSYIFR

SEQ ID NO: 46339 - protein, 10 aa, Homo Sapiens
SVLKMLQAAR

SEQ ID NO: 46340 - protein, 10 aa, Homo Sapiens
TAYGEFLSRL

SEQ ID NO: 46341 - protein, 10 aa, Homo Sapiens
TFEVLRKVGK

SEQ ID NO: 46342 - protein, 10 aa, Homo Sapiens
TFTVGLVFLK

SEQ ID NO: 46343 - protein, 10 aa, Homo Sapiens
TLRKPPAVGR

SEQ ID NO: 46344 - protein, 10 aa, Homo Sapiens
TMYPGLPSRL

SEQ ID NO: 46345 - protein, 10 aa, Homo Sapiens
TTLDESLTNR

SEQ ID NO: 46346 - protein, 10 aa, Homo Sapiens
TVQKETIHPR

SEQ ID NO: 46347 - protein, 10 aa, Homo Sapiens
TVQQLEGRWR

SEQ ID NO: 46348 - protein, 10 aa, Homo Sapiens
TYRNSMFHNR

SEQ ID NO: 46349 - protein, 10 aa, Homo Sapiens
TYYGSFVTRA

SEQ ID NO: 46350 - protein, 10 aa, Homo Sapiens
VAIKPSKGQR

SEQ ID NO: 46351 - protein, 10 aa, Homo Sapiens
VETDIPLKTR

SEQ ID NO: 46352 - protein, 10 aa, Homo Sapiens
VFDAKRLIGR

SEQ ID NO: 46353 - protein, 10 aa, Homo Sapiens
VFGKWHSVPR

SEQ ID NO: 46354 - protein, 10 aa, Homo Sapiens
VGKDPGLAGR

SEQ ID NO: 46355 - protein, 10 aa, Homo Sapiens
VIIGGDGRRN

SEQ ID NO: 46356 - protein, 10 aa, Homo Sapiens
VKPDQLIKRR

SEQ ID NO: 46357 - protein, 10 aa, Homo Sapiens
VLYDRQGIGR

SEQ ID NO: 46358 - protein, 10 aa, Homo Sapiens
YLNAESRVNR

SEQ ID NO: 46359 - protein, 10 aa, Homo Sapiens
YYLPYYKRER

SEQ ID NO: 46360 - protein, 11 aa, Homo Sapiens
ADFQIEKKIGR

SEQ ID NO: 46361 - protein, 11 aa, Homo Sapiens
AYKDPEKNWNR

SEQ ID NO: 46362 - protein, 11 aa, Homo Sapiens
AYKQVDPSITR

SEQ ID NO: 46363 - protein, 11 aa, Homo Sapiens
AYVPFGAGRHR

SEQ ID NO: 46364 - protein, 11 aa, Homo Sapiens
CPKGAETLVTR

SEQ ID NO: 46365 - protein, 11 aa, Homo Sapiens
CVETDIPLKTR

SEQ ID NO: 46366 - protein, 11 aa, Homo Sapiens
CVKDNALLTRR

SEQ ID NO: 46367 - protein, 11 aa, Homo Sapiens
CVVMRDPASKR

SEQ ID NO: 46368 - protein, 11 aa, Homo Sapiens
DAAHPTNVQRL

SEQ ID NO: 46369 - protein, 11 aa, Homo Sapiens
DAFNLPSSHLR

SEQ ID NO: 46370 - protein, 11 aa, Homo Sapiens
DAGLLDESFLR

SEQ ID NO: 46371 - protein, 11 aa, Homo Sapiens
DAHARPFGTIR

SEQ ID NO: 46372 - protein, 11 aa, Homo Sapiens
DAIHSMGLIHR

SEQ ID NO: 46373 - protein, 11 aa, Homo Sapiens
DAILHSEDSLR

SEQ ID NO: 46374 - protein, 11 aa, Homo Sapiens
DAKEKKLLEMR

SEQ ID NO: 46375 - protein, 11 aa, Homo Sapiens
DAKKRDIYDKY

SEQ ID NO: 46376 - protein, 11 aa, Homo Sapiens
DAKLDKTCISR

SEQ ID NO: 46377 - protein, 11 aa, Homo Sapiens
DALAKWEECQR

SEQ ID NO: 46378 - protein, 11 aa, Homo Sapiens
DALEKNQQWLV

SEQ ID NO: 46379 - protein, 11 aa, Homo Sapiens
DALGAGILHHL

SEQ ID NO: 46380 - protein, 11 aa, Homo Sapiens
DALMDRDLVHR

SEQ ID NO: 46381 - protein, 11 aa, Homo Sapiens
DALRVEDMMKR

SEQ ID NO: 46382 - protein, 11 aa, Homo Sapiens
DAMEYDEKLAR

SEQ ID NO: 46383 - protein, 11 aa, Homo Sapiens
DAMNREVSSLK

SEQ ID NO: 46384 - protein, 11 aa, Homo Sapiens
DANGNSFATRI

SEQ ID NO: 46385 - protein, 11 aa, Homo Sapiens
DANLHKDRFLR

SEQ ID NO: 46386 - protein, 11 aa, Homo Sapiens
DAQAFEREVGR

SEQ ID NO: 46387 - protein, 11 aa, Homo Sapiens
DAQTLDAIRHR

SEQ ID NO: 46388 - protein, 11 aa, Homo Sapiens
DARGRSIAIAR

SEQ ID NO: 46389 - protein, 11 aa, Homo Sapiens
DARGTVVLRVR

SEQ ID NO: 46390 - protein, 11 aa, Homo Sapiens
DARLFTEKILR

SEQ ID NO: 46391 - protein, 11 aa, Homo Sapiens
DATSRNITEAR

SEQ ID NO: 46392 - protein, 11 aa, Homo Sapiens
DAVGFTFPNRL

SEQ ID NO: 46393 - protein, 11 aa, Homo Sapiens
DAWSTTAARKR

SEQ ID NO: 46394 - protein, 11 aa, Homo Sapiens
DAYDMRKALSR

SEQ ID NO: 46395 - protein, 11 aa, Homo Sapiens
DFAGEEVRVTK

SEQ ID NO: 46396 - protein, 11 aa, Homo Sapiens
DFAPEVAWVTR

SEQ ID NO: 46397 - protein, 11 aa, Homo Sapiens
DFASIDWLAQR

SEQ ID NO: 46398 - protein, 11 aa, Homo Sapiens
DFDYLRFLQKR

SEQ ID NO: 46399 - protein, 11 aa, Homo Sapiens
DFFPGSDRFAR

SEQ ID NO: 46400 - protein, 11 aa, Homo Sapiens
DFIDPQEGWKK

SEQ ID NO: 46401 - protein, 11 aa, Homo Sapiens
DFIQEEFQHLK

SEQ ID NO: 46402 - protein, 11 aa, Homo Sapiens
DFKEIEHLVER

SEQ ID NO: 46403 - protein, 11 aa, Homo Sapiens
DFLHNKGIAHR

SEQ ID NO: 46404 - protein, 11 aa, Homo Sapiens
DFLTSREIVNR

SEQ ID NO: 46405 - protein, 11 aa, Homo Sapiens
DFLVVPPSRYR

SEQ ID NO: 46406 - protein, 11 aa, Homo Sapiens
DFNKPGANCQR

SEQ ID NO: 46407 - protein, 11 aa, Homo Sapiens
DFQAPYLLHGK

SEQ ID NO: 46408 - protein, 11 aa, Homo Sapiens
DFRDISKWNNR

SEQ ID NO: 46409 - protein, 11 aa, Homo Sapiens
DFRLPTEEEIR

SEQ ID NO: 46410 - protein, 11 aa, Homo Sapiens
DFRNPGPGRHR

SEQ ID NO: 46411 - protein, 11 aa, Homo Sapiens
DFRQPPEEDLR

SEQ ID NO: 46412 - protein, 11 aa, Homo Sapiens
DFRRPPEEDFR

SEQ ID NO: 46413 - protein, 11 aa, Homo Sapiens
DFSDRIGKTKR

SEQ ID NO: 46414 - protein, 11 aa, Homo Sapiens
DGKGVVVVIKR

SEQ ID NO: 46415 - protein, 11 aa, Homo Sapiens
DGLGPAQIVGR

SEQ ID NO: 46416 - protein, 11 aa, Homo Sapiens
DGLSAAARKQR

SEQ ID NO: 46417 - protein, 11 aa, Homo Sapiens
DGRKRSLEELR

SEQ ID NO: 46418 - protein, 11 aa, Homo Sapiens
DIAKVSIGRLR

SEQ ID NO: 46419 - protein, 11 aa, Homo Sapiens
DIEERPKELVR

SEQ ID NO: 46420 - protein, 11 aa, Homo Sapiens
DIESLRGALGR

SEQ ID NO: 46421 - protein, 11 aa, Homo Sapiens
DIFNQPPNRER

SEQ ID NO: 46422 - protein, 11 aa, Homo Sapiens
DIGAKSLTQVR

SEQ ID NO: 46423 - protein, 11 aa, Homo Sapiens
DIIQPSSTRAR

SEQ ID NO: 46424 - protein, 11 aa, Homo Sapiens
DIKASQILASR

SEQ ID NO: 46425 - protein, 11 aa, Homo Sapiens
DIKASTEMRLR

SEQ ID NO: 46426 - protein, 11 aa, Homo Sapiens
DIKDTDVIMKR

SEQ ID NO: 46427 - protein, 11 aa, Homo Sapiens
DIKPLTSFRQR

SEQ ID NO: 46428 - protein, 11 aa, Homo Sapiens
DIKPSNIFISR

SEQ ID NO: 46429 - protein, 11 aa, Homo Sapiens
DIKSSETGAFR

SEQ ID NO: 46430 - protein, 11 aa, Homo Sapiens
DILHKDGIINR

SEQ ID NO: 46431 - protein, 11 aa, Homo Sapiens
DIMHLTDSVVR

SEQ ID NO: 46432 - protein, 11 aa, Homo Sapiens
DINSRRNINYR

SEQ ID NO: 46433 - protein, 11 aa, Homo Sapiens
DIQNPDITSSR

SEQ ID NO: 46434 - protein, 11 aa, Homo Sapiens
DIREDARLFYR

SEQ ID NO: 46435 - protein, 11 aa, Homo Sapiens
DIRGPLESCLR

SEQ ID NO: 46436 - protein, 11 aa, Homo Sapiens
DIRPEIHENYR

SEQ ID NO: 46437 - protein, 11 aa, Homo Sapiens
DIRRMEEETKR

SEQ ID NO: 46438 - protein, 11 aa, Homo Sapiens
DIWAKTPPITR

SEQ ID NO: 46439 - protein, 11 aa, Homo Sapiens
DIWEKKLAQTK

SEQ ID NO: 46440 - protein, 11 aa, Homo Sapiens
DLADLSCLVYR

SEQ ID NO: 46441 - protein, 11 aa, Homo Sapiens
DLFHRDFQFGH

SEQ ID NO: 46442 - protein, 11 aa, Homo Sapiens
DLFKLGEPHHR

SEQ ID NO: 46443 - protein, 11 aa, Homo Sapiens
DLFRYNPYLKR

SEQ ID NO: 46444 - protein, 11 aa, Homo Sapiens
DLFYKRKAISR

SEQ ID NO: 46445 - protein, 11 aa, Homo Sapiens
DLGGPLPADPM

SEQ ID NO: 46446 - protein, 11 aa, Homo Sapiens
DLIEITDAKKR

SEQ ID NO: 46447 - protein, 11 aa, Homo Sapiens
DLKAQAQLQKR

SEQ ID NO: 46448 - protein, 11 aa, Homo Sapiens
DLKDSSLLKTK

SEQ ID NO: 46449 - protein, 11 aa, Homo Sapiens
DLKEVAIKQFR

SEQ ID NO: 46450 - protein, 11 aa, Homo Sapiens
DLKKPDPASLR

SEQ ID NO: 46451 - protein, 11 aa, Homo Sapiens
DLKPENILCEH

SEQ ID NO: 46452 - protein, 11 aa, Homo Sapiens
DLKSESENIQR

SEQ ID NO: 46453 - protein, 11 aa, Homo Sapiens
DLLAASQVVNR

SEQ ID NO: 46454 - protein, 11 aa, Homo Sapiens
DLLAKEKDNSR

SEQ ID NO: 46455 - protein, 11 aa, Homo Sapiens
DLLEGQKKSSR

SEQ ID NO: 46456 - protein, 11 aa, Homo Sapiens
DLLPKEKRHVL

SEQ ID NO: 46457 - protein, 11 aa, Homo Sapiens
DLLVVTKIFQK

SEQ ID NO: 46458 - protein, 11 aa, Homo Sapiens
DLMKKYDKSLR

SEQ ID NO: 46459 - protein, 11 aa, Homo Sapiens
DLMQKISTQNR

SEQ ID NO: 46460 - protein, 11 aa, Homo Sapiens
DLQPPEALVER

SEQ ID NO: 46461 - protein, 11 aa, Homo Sapiens
DLQQVGGASAR

SEQ ID NO: 46462 - protein, 11 aa, Homo Sapiens
DLQYREKEVKR

SEQ ID NO: 46463 - protein, 11 aa, Homo Sapiens
DLRILPEAHQR

SEQ ID NO: 46464 - protein, 11 aa, Homo Sapiens
DLWKRWKTSEV

SEQ ID NO: 46465 - protein, 11 aa, Homo Sapiens
DLYTVEPNNAR

SEQ ID NO: 46466 - protein, 11 aa, Homo Sapiens
DMKLRGMYIAR

SEQ ID NO: 46467 - protein, 11 aa, Homo Sapiens
DMKPKHLLSGK

SEQ ID NO: 46468 - protein, 11 aa, Homo Sapiens
DMKRRIHLELR

SEQ ID NO: 46469 - protein, 11 aa, Homo Sapiens
DMKSVTDRAAR

SEQ ID NO: 46470 - protein, 11 aa, Homo Sapiens
DMLKIRSEFKR

SEQ ID NO: 46471 - protein, 11 aa, Homo Sapiens
DMMLRNACERL

SEQ ID NO: 46472 - protein, 11 aa, Homo Sapiens
DMMPEGIKQNK

SEQ ID NO: 46473 - protein, 11 aa, Homo Sapiens
DMTARDLLQQR

SEQ ID NO: 46474 - protein, 11 aa, Homo Sapiens
DNFDNISLAQR

SEQ ID NO: 46475 - protein, 11 aa, Homo Sapiens
DNFNGIKIKGR

SEQ ID NO: 46476 - protein, 11 aa, Homo Sapiens
DNFRFTPRIQR

SEQ ID NO: 46477 - protein, 11 aa, Homo Sapiens
DNIDWVKIRER

SEQ ID NO: 46478 - protein, 11 aa, Homo Sapiens
DNISKENCVFR

SEQ ID NO: 46479 - protein, 11 aa, Homo Sapiens
DNKGTAVAICR

SEQ ID NO: 46480 - protein, 11 aa, Homo Sapiens
DNLERDFFLRR

SEQ ID NO: 46481 - protein, 11 aa, Homo Sapiens
DNLLHEKRYLR

SEQ ID NO: 46482 - protein, 11 aa, Homo Sapiens
DNLPSASMYER

SEQ ID NO: 46483 - protein, 11 aa, Homo Sapiens
DNLSSEEIQQR

SEQ ID NO: 46484 - protein, 11 aa, Homo Sapiens
DNLYPESITSR

SEQ ID NO: 46485 - protein, 11 aa, Homo Sapiens
DNMNESELFGR

SEQ ID NO: 46486 - protein, 11 aa, Homo Sapiens
DNMPLRGKQLR

SEQ ID NO: 46487 - protein, 11 aa, Homo Sapiens
DNQLLEERNRR

SEQ ID NO: 46488 - protein, 11 aa, Homo Sapiens
DNRPSVEFHER

SEQ ID NO: 46489 - protein, 11 aa, Homo Sapiens
DNSSTVSIVGR

SEQ ID NO: 46490 - protein, 11 aa, Homo Sapiens
DPWARGSYSYV

SEQ ID NO: 46491 - protein, 11 aa, Homo Sapiens
DSIDPASIEAR

SEQ ID NO: 46492 - protein, 11 aa, Homo Sapiens
DSKTEELRFLR

SEQ ID NO: 46493 - protein, 11 aa, Homo Sapiens
DSLGQDLRRLR

SEQ ID NO: 46494 - protein, 11 aa, Homo Sapiens
DSLMPEEEFLR

SEQ ID NO: 46495 - protein, 11 aa, Homo Sapiens
DSMASGTLHLR

SEQ ID NO: 46496 - protein, 11 aa, Homo Sapiens
DSMLVDPKHHR

SEQ ID NO: 46497 - protein, 11 aa, Homo Sapiens
DSNNEKGLFRR

SEQ ID NO: 46498 - protein, 11 aa, Homo Sapiens
DSQAYDQKNIR

SEQ ID NO: 46499 - protein, 11 aa, Homo Sapiens
DSRFPNQNQTR

SEQ ID NO: 46500 - protein, 11 aa, Homo Sapiens
DSRGQEAISKR

SEQ ID NO: 46501 - protein, 11 aa, Homo Sapiens
DSRSECITATR

SEQ ID NO: 46502 - protein, 11 aa, Homo Sapiens
DSSNPSWWTGR

SEQ ID NO: 46503 - protein, 11 aa, Homo Sapiens
DSVVIVDERRR

SEQ ID NO: 46504 - protein, 11 aa, Homo Sapiens
DTAALSHARLR

SEQ ID NO: 46505 - protein, 11 aa, Homo Sapiens
DTANKKVFLGR

SEQ ID NO: 46506 - protein, 11 aa, Homo Sapiens
DTFLKGKSGLR

SEQ ID NO: 46507 - protein, 11 aa, Homo Sapiens
DTIDERTINKK

SEQ ID NO: 46508 - protein, 11 aa, Homo Sapiens
DTIVSGTLPQR

SEQ ID NO: 46509 - protein, 11 aa, Homo Sapiens
DTKELEKMTNR

SEQ ID NO: 46510 - protein, 11 aa, Homo Sapiens
DTKENLEGTLR

SEQ ID NO: 46511 - protein, 11 aa, Homo Sapiens
DTKGHSLSVQR

SEQ ID NO: 46512 - protein, 11 aa, Homo Sapiens
DTKLSKLDTLR

SEQ ID NO: 46513 - protein, 11 aa, Homo Sapiens
DTKRSQIYGSR

SEQ ID NO: 46514 - protein, 11 aa, Homo Sapiens
DTLLYDSLYTR

SEQ ID NO: 46515 - protein, 11 aa, Homo Sapiens
DTQDSMSLLFR

SEQ ID NO: 46516 - protein, 11 aa, Homo Sapiens
DTQSIGPKVQR

SEQ ID NO: 46517 - protein, 11 aa, Homo Sapiens
DTRARELKEQL

SEQ ID NO: 46518 - protein, 11 aa, Homo Sapiens
DTRKEQETALR

SEQ ID NO: 46519 - protein, 11 aa, Homo Sapiens
DTRQLGLVVCR

SEQ ID NO: 46520 - protein, 11 aa, Homo Sapiens
DTRRESLFSAR

SEQ ID NO: 46521 - protein, 11 aa, Homo Sapiens
DTVTYSALHKR

SEQ ID NO: 46522 - protein, 11 aa, Homo Sapiens
DVAQWNIGSLR

SEQ ID NO: 46523 - protein, 11 aa, Homo Sapiens
DVCDIPESFQR

SEQ ID NO: 46524 - protein, 11 aa, Homo Sapiens
DVFGEGLPTRL

SEQ ID NO: 46525 - protein, 11 aa, Homo Sapiens
DVFPDRDHFGR

SEQ ID NO: 46526 - protein, 11 aa, Homo Sapiens
DVFVVGTERGR

SEQ ID NO: 46527 - protein, 11 aa, Homo Sapiens
DVGGKQFPVTR

SEQ ID NO: 46528 - protein, 11 aa, Homo Sapiens
DVIKEQNRELR

SEQ ID NO: 46529 - protein, 11 aa, Homo Sapiens
DVISRNEIQGR

SEQ ID NO: 46530 - protein, 11 aa, Homo Sapiens
DVKAPAMFNIR

SEQ ID NO: 46531 - protein, 11 aa, Homo Sapiens
DVKDPVSIEER

SEQ ID NO: 46532 - protein, 11 aa, Homo Sapiens
DVKLEDTYFDR

SEQ ID NO: 46533 - protein, 11 aa, Homo Sapiens
DVKLQDAGVYR

SEQ ID NO: 46534 - protein, 11 aa, Homo Sapiens
DVKPSNILVNS

SEQ ID NO: 46535 - protein, 11 aa, Homo Sapiens
DVKQLSEIVVR

SEQ ID NO: 46536 - protein, 11 aa, Homo Sapiens
DVKSMEMLVEH

SEQ ID NO: 46537 - protein, 11 aa, Homo Sapiens
DVKTTDGYLLR

SEQ ID NO: 46538 - protein, 11 aa, Homo Sapiens
DVLEVTKKFMR

SEQ ID NO: 46539 - protein, 11 aa, Homo Sapiens
DVLLFPDKKQR

SEQ ID NO: 46540 - protein, 11 aa, Homo Sapiens
DVLRSAAKFYR

SEQ ID NO: 46541 - protein, 11 aa, Homo Sapiens
DVNSNNNMSYR

SEQ ID NO: 46542 - protein, 11 aa, Homo Sapiens
DVQGDDKRYFR

SEQ ID NO: 46543 - protein, 11 aa, Homo Sapiens
DVRKEEVLILR

SEQ ID NO: 46544 - protein, 11 aa, Homo Sapiens
DVRPTLVLVEK

SEQ ID NO: 46545 - protein, 11 aa, Homo Sapiens
DVSARDWLTRR

SEQ ID NO: 46546 - protein, 11 aa, Homo Sapiens
DVVPKTAENFR

SEQ ID NO: 46547 - protein, 11 aa, Homo Sapiens
DVVPVDSKRYR

SEQ ID NO: 46548 - protein, 11 aa, Homo Sapiens
DVVYALKRQGR

SEQ ID NO: 46549 - protein, 11 aa, Homo Sapiens
DVYNMQSGIHR

SEQ ID NO: 46550 - protein, 11 aa, Homo Sapiens
DVYSLYEPRYR

SEQ ID NO: 46551 - protein, 11 aa, Homo Sapiens
DWDEKRPEFVR

SEQ ID NO: 46552 - protein, 11 aa, Homo Sapiens
DWVPYINGKFK

SEQ ID NO: 46553 - protein, 11 aa, Homo Sapiens
DYCHSMGIMHR

SEQ ID NO: 46554 - protein, 11 aa, Homo Sapiens
DYFAKREQWKK

SEQ ID NO: 46555 - protein, 11 aa, Homo Sapiens
DYFKQWINLKK

SEQ ID NO: 46556 - protein, 11 aa, Homo Sapiens
DYFSPDNLKER

SEQ ID NO: 46557 - protein, 11 aa, Homo Sapiens
DYIHHMGYVHR

SEQ ID NO: 46558 - protein, 11 aa, Homo Sapiens
DYIHRIGRTAR

SEQ ID NO: 46559 - protein, 11 aa, Homo Sapiens
DYIHSKKLIHR

SEQ ID NO: 46560 - protein, 11 aa, Homo Sapiens
DYILLSLVRTR

SEQ ID NO: 46561 - protein, 11 aa, Homo Sapiens
DYINGDSKYMR

SEQ ID NO: 46562 - protein, 11 aa, Homo Sapiens
DYISRAESQSR

SEQ ID NO: 46563 - protein, 11 aa, Homo Sapiens
DYIYHGTVKLR

SEQ ID NO: 46564 - protein, 11 aa, Homo Sapiens
DYKDQLKTGER

SEQ ID NO: 46565 - protein, 11 aa, Homo Sapiens
DYLEFTDARGR

SEQ ID NO: 46566 - protein, 11 aa, Homo Sapiens
DYLHAKNIIHR

SEQ ID NO: 46567 - protein, 11 aa, Homo Sapiens
DYLHAKSIIHR

SEQ ID NO: 46568 - protein, 11 aa, Homo Sapiens
DYLHRHGIIHR

SEQ ID NO: 46569 - protein, 11 aa, Homo Sapiens
DYLHSGKIVYR

SEQ ID NO: 46570 - protein, 11 aa, Homo Sapiens
DYLNAESRVNR

SEQ ID NO: 46571 - protein, 11 aa, Homo Sapiens
DYLPPEMIEGR

SEQ ID NO: 46572 - protein, 11 aa, Homo Sapiens
DYMTPEQRRSR

SEQ ID NO: 46573 - protein, 11 aa, Homo Sapiens
DYQRYREERFR

SEQ ID NO: 46574 - protein, 11 aa, Homo Sapiens
DYRGFLAEMKR

SEQ ID NO: 46575 - protein, 11 aa, Homo Sapiens
DYRYFDPKMLR

SEQ ID NO: 46576 - protein, 11 aa, Homo Sapiens
DYVPSTTKTPR

SEQ ID NO: 46577 - protein, 11 aa, Homo Sapiens
DYVPYVPLRQR

SEQ ID NO: 46578 - protein, 11 aa, Homo Sapiens
DYYDSHNVNTR

SEQ ID NO: 46579 - protein, 11 aa, Homo Sapiens
DYYEESYFTTR

SEQ ID NO: 46580 - protein, 11 aa, Homo Sapiens
DYYGYDYHNYR

SEQ ID NO: 46581 - protein, 11 aa, Homo Sapiens
EAAFATKDRLR

SEQ ID NO: 46582 - protein, 11 aa, Homo Sapiens
EAKPPTVTMPR

SEQ ID NO: 46583 - protein, 11 aa, Homo Sapiens
EALAMGSRALR

SEQ ID NO: 46584 - protein, 11 aa, Homo Sapiens
EALHQKNIVHR

SEQ ID NO: 46585 - protein, 11 aa, Homo Sapiens
EALPEKSLAGR

SEQ ID NO: 46586 - protein, 11 aa, Homo Sapiens
EARPFRGSVGR

SEQ ID NO: 46587 - protein, 11 aa, Homo Sapiens
EDTRDKGLVNR

SEQ ID NO: 46588 - protein, 11 aa, Homo Sapiens
EFKTLEGVITR

SEQ ID NO: 46589 - protein, 11 aa, Homo Sapiens
EFLHANQVIHR

SEQ ID NO: 46590 - protein, 11 aa, Homo Sapiens
EFMQRALQDLR

SEQ ID NO: 46591 - protein, 11 aa, Homo Sapiens
EGDYKTIAKER

SEQ ID NO: 46592 - protein, 11 aa, Homo Sapiens
EIASFDKAKLK

SEQ ID NO: 46593 - protein, 11 aa, Homo Sapiens
EIEKFDKSKLK

SEQ ID NO: 46594 - protein, 11 aa, Homo Sapiens
EIIEKNFDYLR

SEQ ID NO: 46595 - protein, 11 aa, Homo Sapiens
EIKDKDQLVLR

SEQ ID NO: 46596 - protein, 11 aa, Homo Sapiens
EIMEVAKERSR

SEQ ID NO: 46597 - protein, 11 aa, Homo Sapiens
EIMSMGYERER

SEQ ID NO: 46598 - protein, 11 aa, Homo Sapiens
EIRNLTVKDFR

SEQ ID NO: 46599 - protein, 11 aa, Homo Sapiens
ELLIRKLPFQR

SEQ ID NO: 46600 - protein, 11 aa, Homo Sapiens
ELLPKEKFVSR

SEQ ID NO: 46601 - protein, 11 aa, Homo Sapiens
ELREYNLEQQR

SEQ ID NO: 46602 - protein, 11 aa, Homo Sapiens
EMATRAALQAR

SEQ ID NO: 46603 - protein, 11 aa, Homo Sapiens
EMLSSVALINR

SEQ ID NO: 46604 - protein, 11 aa, Homo Sapiens
EMTSLSEYVSR

SEQ ID NO: 46605 - protein, 11 aa, Homo Sapiens
ESLGQSELASR

SEQ ID NO: 46606 - protein, 11 aa, Homo Sapiens
ESLQGQDLFNR

SEQ ID NO: 46607 - protein, 11 aa, Homo Sapiens
ESSGGKLLPCT

SEQ ID NO: 46608 - protein, 11 aa, Homo Sapiens
ETISSKNIISR

SEQ ID NO: 46609 - protein, 11 aa, Homo Sapiens
ETKDSGSFLLR

SEQ ID NO: 46610 - protein, 11 aa, Homo Sapiens
ETLTRPFSGRR

SEQ ID NO: 46611 - protein, 11 aa, Homo Sapiens
ETRPEGSYFSK

SEQ ID NO: 46612 - protein, 11 aa, Homo Sapiens
ETVPKDLRHLR

SEQ ID NO: 46613 - protein, 11 aa, Homo Sapiens
ETVQKETIHPR

SEQ ID NO: 46614 - protein, 11 aa, Homo Sapiens
ETVSEEKRIYR

SEQ ID NO: 46615 - protein, 11 aa, Homo Sapiens
EVAPPKAHEVR

SEQ ID NO: 46616 - protein, 11 aa, Homo Sapiens
EVAQREAETLR

SEQ ID NO: 46617 - protein, 11 aa, Homo Sapiens
EVEPQGVIVTR

SEQ ID NO: 46618 - protein, 11 aa, Homo Sapiens
EVIDQRLIEAR

SEQ ID NO: 46619 - protein, 11 aa, Homo Sapiens
EVIEGYEIACR

SEQ ID NO: 46620 - protein, 11 aa, Homo Sapiens
EVIPYTPAMQR

SEQ ID NO: 46621 - protein, 11 aa, Homo Sapiens
EVKQVESGTLR

SEQ ID NO: 46622 - protein, 11 aa, Homo Sapiens
EVKRLKVTELR

SEQ ID NO: 46623 - protein, 11 aa, Homo Sapiens
EVLAEFERRKR

SEQ ID NO: 46624 - protein, 11 aa, Homo Sapiens
EVLHIGSAHNR

SEQ ID NO: 46625 - protein, 11 aa, Homo Sapiens
EVLREGELEKR

SEQ ID NO: 46626 - protein, 11 aa, Homo Sapiens
EVLRHPRDWVR

SEQ ID NO: 46627 - protein, 11 aa, Homo Sapiens
EVNRLTESTYR

SEQ ID NO: 46628 - protein, 11 aa, Homo Sapiens
EVQDRVMLTGR

SEQ ID NO: 46629 - protein, 11 aa, Homo Sapiens
EVQQARDLQNR

SEQ ID NO: 46630 - protein, 11 aa, Homo Sapiens
EVQVLDDKNVR

SEQ ID NO: 46631 - protein, 11 aa, Homo Sapiens
EVRAVGQGVLR

SEQ ID NO: 46632 - protein, 11 aa, Homo Sapiens
EVRQIASIVQR

SEQ ID NO: 46633 - protein, 11 aa, Homo Sapiens
EVRVANELNAR

SEQ ID NO: 46634 - protein, 11 aa, Homo Sapiens
EVTDHNLHELR

SEQ ID NO: 46635 - protein, 11 aa, Homo Sapiens
EYAERPEVARR

SEQ ID NO: 46636 - protein, 11 aa, Homo Sapiens
EYIHSKNFIHR

SEQ ID NO: 46637 - protein, 11 aa, Homo Sapiens
EYIQMSGRAGR

SEQ ID NO: 46638 - protein, 11 aa, Homo Sapiens
EYISSDGSYAR

SEQ ID NO: 46639 - protein, 11 aa, Homo Sapiens
EYKDPENILHR

SEQ ID NO: 46640 - protein, 11 aa, Homo Sapiens
EYLCHLEEAKR

SEQ ID NO: 46641 - protein, 11 aa, Homo Sapiens
EYLEGNNFVHR

SEQ ID NO: 46642 - protein, 11 aa, Homo Sapiens
EYLEKKNFIHR

SEQ ID NO: 46643 - protein, 11 aa, Homo Sapiens
EYLESKQFLHR

SEQ ID NO: 46644 - protein, 11 aa, Homo Sapiens
EYLHGKGIIHR

SEQ ID NO: 46645 - protein, 11 aa, Homo Sapiens
EYLHNYGIVHR

SEQ ID NO: 46646 - protein, 11 aa, Homo Sapiens
EYLHSQGVVHR

SEQ ID NO: 46647 - protein, 11 aa, Homo Sapiens
EYLHSRDVVYR

SEQ ID NO: 46648 - protein, 11 aa, Homo Sapiens
EYLQRYHIIHR

SEQ ID NO: 46649 - protein, 11 aa, Homo Sapiens
EYLQSSGLAQR

SEQ ID NO: 46650 - protein, 11 aa, Homo Sapiens
EYMEHVYLIHR

SEQ ID NO: 46651 - protein, 11 aa, Homo Sapiens
EYMEVRERIHR

SEQ ID NO: 46652 - protein, 11 aa, Homo Sapiens
EYMGNAGRKER

SEQ ID NO: 46653 - protein, 11 aa, Homo Sapiens
EYNAIGGKYNR

SEQ ID NO: 46654 - protein, 11 aa, Homo Sapiens
EYRQSLHTYLR

SEQ ID NO: 46655 - protein, 11 aa, Homo Sapiens
EYRSEQSVKLR

SEQ ID NO: 46656 - protein, 11 aa, Homo Sapiens
EYVDATNLTPR

SEQ ID NO: 46657 - protein, 11 aa, Homo Sapiens
EYVDNTNLVPR

SEQ ID NO: 46658 - protein, 11 aa, Homo Sapiens
FELDLVTLRSE

SEQ ID NO: 46659 - protein, 11 aa, Homo Sapiens
FSMGNEVLQNR

SEQ ID NO: 46660 - protein, 11 aa, Homo Sapiens
FTLDINTAYAR

SEQ ID NO: 46661 - protein, 11 aa, Homo Sapiens
FYKDGRIVQSR

SEQ ID NO: 46662 - protein, 11 aa, Homo Sapiens
GDDFLRRSSSR

SEQ ID NO: 46663 - protein, 11 aa, Homo Sapiens
GFLYRKTDFYR

SEQ ID NO: 46664 - protein, 11 aa, Homo Sapiens
HFIELDENRQR

SEQ ID NO: 46665 - protein, 11 aa, Homo Sapiens
HIIEKDKITTR

SEQ ID NO: 46666 - protein, 11 aa, Homo Sapiens
HLLDPSSFTGR

SEQ ID NO: 46667 - protein, 11 aa, Homo Sapiens
HLLEKSNIYSK

SEQ ID NO: 46668 - protein, 11 aa, Homo Sapiens
HNLDRKWICGR

SEQ ID NO: 46669 - protein, 11 aa, Homo Sapiens
HVKDAGFYVCR

SEQ ID NO: 46670 - protein, 11 aa, Homo Sapiens
IAKFVDGEWYR

SEQ ID NO: 46671 - protein, 11 aa, Homo Sapiens
IAKPGWKNSIR

SEQ ID NO: 46672 - protein, 11 aa, Homo Sapiens
ILAFREKEWQR

SEQ ID NO: 46673 - protein, 11 aa, Homo Sapiens
INKPDGTFLLR

SEQ ID NO: 46674 - protein, 11 aa, Homo Sapiens
INRPADVIQAR

SEQ ID NO: 46675 - protein, 11 aa, Homo Sapiens
IVNDRQLACAR

SEQ ID NO: 46676 - protein, 11 aa, Homo Sapiens
IVRPPESGLGR

SEQ ID NO: 46677 - protein, 11 aa, Homo Sapiens
IYQYMEEIYHR

SEQ ID NO: 46678 - protein, 11 aa, Homo Sapiens
KSDFKKYVENR

SEQ ID NO: 46679 - protein, 11 aa, Homo Sapiens
LFRPVASQLPR

SEQ ID NO: 46680 - protein, 11 aa, Homo Sapiens
LNQGEGTIRSR

SEQ ID NO: 46681 - protein, 11 aa, Homo Sapiens
LPKAVDDKQLR

SEQ ID NO: 46682 - protein, 11 aa, Homo Sapiens
LTKEEDLAALR

SEQ ID NO: 46683 - protein, 11 aa, Homo Sapiens
LVKPVTINVGR

SEQ ID NO: 46684 - protein, 11 aa, Homo Sapiens
LYRHFDETVNR

SEQ ID NO: 46685 - protein, 11 aa, Homo Sapiens
MDAKSLTAWSR

SEQ ID NO: 46686 - protein, 11 aa, Homo Sapiens
MFRAAAPGQLR

SEQ ID NO: 46687 - protein, 11 aa, Homo Sapiens
MIKGKTPEEIR

SEQ ID NO: 46688 - protein, 11 aa, Homo Sapiens
MLWERLSSTKR

SEQ ID NO: 46689 - protein, 11 aa, Homo Sapiens
MTIMEDYFAYR

SEQ ID NO: 46690 - protein, 11 aa, Homo Sapiens
MVKPTPGLTPR

SEQ ID NO: 46691 - protein, 11 aa, Homo Sapiens
MVLPSRLHWIR

SEQ ID NO: 46692 - protein, 11 aa, Homo Sapiens
MYKDGDSVLQR

SEQ ID NO: 46693 - protein, 11 aa, Homo Sapiens
MYRNEFTAWYR

SEQ ID NO: 46694 - protein, 11 aa, Homo Sapiens
NALEGSTFVSR

SEQ ID NO: 46695 - protein, 11 aa, Homo Sapiens
NALQPSIKFVR

SEQ ID NO: 46696 - protein, 11 aa, Homo Sapiens
NFLKRMSGMIR

SEQ ID NO: 46697 - protein, 11 aa, Homo Sapiens
NFYNRPILSRR

SEQ ID NO: 46698 - protein, 11 aa, Homo Sapiens
NGRPLEMIEPR

SEQ ID NO: 46699 - protein, 11 aa, Homo Sapiens
NGWNRDAYSLR

SEQ ID NO: 46700 - protein, 11 aa, Homo Sapiens
NIHLRSTLCSR

SEQ ID NO: 46701 - protein, 11 aa, Homo Sapiens
NINDRSMLGKR

SEQ ID NO: 46702 - protein, 11 aa, Homo Sapiens
NIRDIDKIYVR

SEQ ID NO: 46703 - protein, 11 aa, Homo Sapiens
NLAEKSTVHMR

SEQ ID NO: 46704 - protein, 11 aa, Homo Sapiens
NLAGAEELFAR

SEQ ID NO: 46705 - protein, 11 aa, Homo Sapiens
NLKDRDFLVQR

SEQ ID NO: 46706 - protein, 11 aa, Homo Sapiens
NLKPGECLRVR

SEQ ID NO: 46707 - protein, 11 aa, Homo Sapiens
NLLDLKNPFFR

SEQ ID NO: 46708 - protein, 11 aa, Homo Sapiens
NLMELTQIYQR

SEQ ID NO: 46709 - protein, 11 aa, Homo Sapiens
NLQELKDLNQR

SEQ ID NO: 46710 - protein, 11 aa, Homo Sapiens
NNIDYTVHSVR

SEQ ID NO: 46711 - protein, 11 aa, Homo Sapiens
NPTLSSLDVKR

SEQ ID NO: 46712 - protein, 11 aa, Homo Sapiens
NQDTLVPYGNR

SEQ ID NO: 46713 - protein, 11 aa, Homo Sapiens
NTIGKEEIQQR

SEQ ID NO: 46714 - protein, 11 aa, Homo Sapiens
NTMDADSLVSR

SEQ ID NO: 46715 - protein, 11 aa, Homo Sapiens
NVKNVSVKDVR

SEQ ID NO: 46716 - protein, 11 aa, Homo Sapiens
NVLEFTSARKR

SEQ ID NO: 46717 - protein, 11 aa, Homo Sapiens
NVLQAPLPPMR

SEQ ID NO: 46718 - protein, 11 aa, Homo Sapiens
NVRETHSLFFR

SEQ ID NO: 46719 - protein, 11 aa, Homo Sapiens
NVRNGYGFINR

SEQ ID NO: 46720 - protein, 11 aa, Homo Sapiens
NWINVDPSRAR

SEQ ID NO: 46721 - protein, 11 aa, Homo Sapiens
NYFFYNKRLKR

SEQ ID NO: 46722 - protein, 11 aa, Homo Sapiens
QAQLRGQDAAR

SEQ ID NO: 46723 - protein, 11 aa, Homo Sapiens
QARLRDDTELR

SEQ ID NO: 46724 - protein, 11 aa, Homo Sapiens
QFLERFKSSAR

SEQ ID NO: 46725 - protein, 11 aa, Homo Sapiens
QPLSPIRNRTP

SEQ ID NO: 46726 - protein, 11 aa, Homo Sapiens
SFFSPSPARKR

SEQ ID NO: 46727 - protein, 11 aa, Homo Sapiens
SFKDVDQMFQR

SEQ ID NO: 46728 - protein, 11 aa, Homo Sapiens
SLDFNLRTHVR

SEQ ID NO: 46729 - protein, 11 aa, Homo Sapiens
SLKGVDPKFLR

SEQ ID NO: 46730 - protein, 11 aa, Homo Sapiens
SLQNAESWINR

SEQ ID NO: 46731 - protein, 11 aa, Homo Sapiens
SMASEEVLKNR

SEQ ID NO: 46732 - protein, 11 aa, Homo Sapiens
STIDWNKLYRR

SEQ ID NO: 46733 - protein, 11 aa, Homo Sapiens
STKDILSQHER

SEQ ID NO: 46734 - protein, 11 aa, Homo Sapiens
STKPPGTFLLR

SEQ ID NO: 46735 - protein, 11 aa, Homo Sapiens
SVKEISDIVQR

SEQ ID NO: 46736 - protein, 11 aa, Homo Sapiens
SVMDQEMRVKR

SEQ ID NO: 46737 - protein, 11 aa, Homo Sapiens
SVQPSSSLSAR

SEQ ID NO: 46738 - protein, 11 aa, Homo Sapiens
SVREGQGFAFR

SEQ ID NO: 46739 - protein, 11 aa, Homo Sapiens
SVREVRQLTLR

SEQ ID NO: 46740 - protein, 11 aa, Homo Sapiens
SVTPEGVIKQR

SEQ ID NO: 46741 - protein, 11 aa, Homo Sapiens
SYRDVNSWCRR

SEQ ID NO: 46742 - protein, 11 aa, Homo Sapiens
TAASRPPVTLR

SEQ ID NO: 46743 - protein, 11 aa, Homo Sapiens
TAFDRDRAMQR

SEQ ID NO: 46744 - protein, 11 aa, Homo Sapiens
TELSVRAKPSA

SEQ ID NO: 46745 - protein, 11 aa, Homo Sapiens
TIIEVNGKRVR

SEQ ID NO: 46746 - protein, 11 aa, Homo Sapiens
TIMPKDIQLAR

SEQ ID NO: 46747 - protein, 11 aa, Homo Sapiens
TMKSANICIGR

SEQ ID NO: 46748 - protein, 11 aa, Homo Sapiens
TTFTWNINHAR

SEQ ID NO: 46749 - protein, 11 aa, Homo Sapiens
TTLGATQLSER

SEQ ID NO: 46750 - protein, 11 aa, Homo Sapiens
TVFDAKRLIGR

SEQ ID NO: 46751 - protein, 11 aa, Homo Sapiens
TVIEKTESWPR

SEQ ID NO: 46752 - protein, 11 aa, Homo Sapiens
TVKDLRLVTNR

SEQ ID NO: 46753 - protein, 11 aa, Homo Sapiens
TYKRFEGLTQR

SEQ ID NO: 46754 - protein, 11 aa, Homo Sapiens
TYLSESQIQSR

SEQ ID NO: 46755 - protein, 11 aa, Homo Sapiens
VMADPKGKAYR

SEQ ID NO: 46756 - protein, 11 aa, Homo Sapiens
VNLPPELRRQR

SEQ ID NO: 46757 - protein, 11 aa, Homo Sapiens
VPMRPGILVQR

SEQ ID NO: 46758 - protein, 11 aa, Homo Sapiens
VTNTRTPSSVR

SEQ ID NO: 46759 - protein, 11 aa, Homo Sapiens
VVKPDQLIKRR

SEQ ID NO: 46760 - protein, 11 aa, Homo Sapiens
VYRNPESFKEK

SEQ ID NO: 46761 - protein, 11 aa, Homo Sapiens
YFLHRLLHHKR

SEQ ID NO: 46762 - protein, 8 aa, Homo Sapiens
AHARIHLR

SEQ ID NO: 46763 - protein, 8 aa, Homo Sapiens
DLFVFPYR

SEQ ID NO: 46764 - protein, 8 aa, Homo Sapiens
DMQRIHLR

SEQ ID NO: 46765 - protein, 8 aa, Homo Sapiens
DTFRPTAR

SEQ ID NO: 46766 - protein, 8 aa, Homo Sapiens
DTNLPANR

SEQ ID NO: 46767 - protein, 8 aa, Homo Sapiens
DTQIPTSR

SEQ ID NO: 46768 - protein, 8 aa, Homo Sapiens
DYRTPTLR

SEQ ID NO: 46769 - protein, 8 aa, Homo Sapiens
EAIKITNR

SEQ ID NO: 46770 - protein, 8 aa, Homo Sapiens
EALLPQNR

SEQ ID NO: 46771 - protein, 8 aa, Homo Sapiens
EALLPTRR

SEQ ID NO: 46772 - protein, 8 aa, Homo Sapiens
EANVPVYR

SEQ ID NO: 46773 - protein, 8 aa, Homo Sapiens
EAQIIQRR

SEQ ID NO: 46774 - protein, 8 aa, Homo Sapiens
EAYKVFSR

SEQ ID NO: 46775 - protein, 8 aa, Homo Sapiens
EEQLQQIR

SEQ ID NO: 46776 - protein, 8 aa, Homo Sapiens
EIFRPFYR

SEQ ID NO: 46777 - protein, 8 aa, Homo Sapiens
ELMVPFTR

SEQ ID NO: 46778 - protein, 8 aa, Homo Sapiens
ENYSPVSR

SEQ ID NO: 46779 - protein, 8 aa, Homo Sapiens
ESLVPTAR

SEQ ID NO: 46780 - protein, 8 aa, Homo Sapiens
ETLVIQQR

SEQ ID NO: 46781 - protein, 8 aa, Homo Sapiens
ETMEPALR

SEQ ID NO: 46782 - protein, 8 aa, Homo Sapiens
ETVRIINR

SEQ ID NO: 46783 - protein, 8 aa, Homo Sapiens
ETYSPFFR

SEQ ID NO: 46784 - protein, 8 aa, Homo Sapiens
EVAIPHNR

SEQ ID NO: 46785 - protein, 8 aa, Homo Sapiens
EVKIPKPR

SEQ ID NO: 46786 - protein, 8 aa, Homo Sapiens
EVNIPNRR

SEQ ID NO: 46787 - protein, 8 aa, Homo Sapiens
EVNIPRKR

SEQ ID NO: 46788 - protein, 8 aa, Homo Sapiens
EYMTPSSR

SEQ ID NO: 46789 - protein, 8 aa, Homo Sapiens
FTLKPKKR

SEQ ID NO: 46790 - protein, 8 aa, Homo Sapiens
HANCIVHR

SEQ ID NO: 46791 - protein, 8 aa, Homo Sapiens
HNMGIVHR

SEQ ID NO: 46792 - protein, 8 aa, Homo Sapiens
HNTIICAR

SEQ ID NO: 46793 - protein, 8 aa, Homo Sapiens
HSFRPAYR

SEQ ID NO: 46794 - protein, 8 aa, Homo Sapiens
HTTKPILR

SEQ ID NO: 46795 - protein, 8 aa, Homo Sapiens
MAHHPTFR

SEQ ID NO: 46796 - protein, 8 aa, Homo Sapiens
MAYEPVQR

SEQ ID NO: 46797 - protein, 8 aa, Homo Sapiens
MAYVPVSR

SEQ ID NO: 46798 - protein, 8 aa, Homo Sapiens
MSLTACKV

SEQ ID NO: 46799 - protein, 8 aa, Homo Sapiens
MTGLPHNR

SEQ ID NO: 46800 - protein, 8 aa, Homo Sapiens
MVNVPKTR

SEQ ID NO: 46801 - protein, 8 aa, Homo Sapiens
NLWVPSRR

SEQ ID NO: 46802 - protein, 8 aa, Homo Sapiens
NPNVPAYR

SEQ ID NO: 46803 - protein, 8 aa, Homo Sapiens
PKDIQLAR

SEQ ID NO: 46804 - protein, 8 aa, Homo Sapiens
QNYLPRHR

SEQ ID NO: 46805 - protein, 8 aa, Homo Sapiens
SGPSIVHR

SEQ ID NO: 46806 - protein, 8 aa, Homo Sapiens
TEELAYLK

SEQ ID NO: 46807 - protein, 8 aa, Homo Sapiens
TGNPTVVR

SEQ ID NO: 46808 - protein, 8 aa, Homo Sapiens
VNMVPFPR

SEQ ID NO: 46809 - protein, 8 aa, Homo Sapiens
YAYIPLNR

SEQ ID NO: 46810 - protein, 8 aa, Homo Sapiens
YEDIAQKS

SEQ ID NO: 46811 - protein, 8 aa, Homo Sapiens
YEEIAQRS

SEQ ID NO: 46812 - protein, 8 aa, Homo Sapiens
YFKEPSLR

SEQ ID NO: 46813 - protein, 8 aa, Homo Sapiens
YTKVPIKR

SEQ ID NO: 46814 - protein, 8 aa, Homo Sapiens
YYGSFVTR

SEQ ID NO: 46815 - protein, 9 aa, Homo Sapiens
AANGKLFSR

SEQ ID NO: 46816 - protein, 9 aa, Homo Sapiens
ADRQVLAQR

SEQ ID NO: 46817 - protein, 9 aa, Homo Sapiens
AEAALGLAR

SEQ ID NO: 46818 - protein, 9 aa, Homo Sapiens
AGKSVHVLR

SEQ ID NO: 46819 - protein, 9 aa, Homo Sapiens
ALNGKIYFR

SEQ ID NO: 46820 - protein, 9 aa, Homo Sapiens
ATLNVSTTR

SEQ ID NO: 46821 - protein, 9 aa, Homo Sapiens
ATLYLGWNR

SEQ ID NO: 46822 - protein, 9 aa, Homo Sapiens
ATNILTATR

SEQ ID NO: 46823 - protein, 9 aa, Homo Sapiens
ATQSFSTFR

SEQ ID NO: 46824 - protein, 9 aa, Homo Sapiens
ATSPALFNR

SEQ ID NO: 46825 - protein, 9 aa, Homo Sapiens
AYKNVIGAR

SEQ ID NO: 46826 - protein, 9 aa, Homo Sapiens
AYKNVVGAR

SEQ ID NO: 46827 - protein, 9 aa, Homo Sapiens
AYKSILQER

SEQ ID NO: 46828 - protein, 9 aa, Homo Sapiens
AYMQYIHHR

SEQ ID NO: 46829 - protein, 9 aa, Homo Sapiens
AYNETFSNR

SEQ ID NO: 46830 - protein, 9 aa, Homo Sapiens
CTKEFQARR

SEQ ID NO: 46831 - protein, 9 aa, Homo Sapiens
CVKSFVTKR

SEQ ID NO: 46832 - protein, 9 aa, Homo Sapiens
CVNGHFFHR

SEQ ID NO: 46833 - protein, 9 aa, Homo Sapiens
CVNPYHYER

SEQ ID NO: 46834 - protein, 9 aa, Homo Sapiens
CVNPYHYQR

SEQ ID NO: 46835 - protein, 9 aa, Homo Sapiens
CVNQFIISR

SEQ ID NO: 46836 - protein, 9 aa, Homo Sapiens
DAACRVIAR

SEQ ID NO: 46837 - protein, 9 aa, Homo Sapiens
DAISYRFPR

SEQ ID NO: 46838 - protein, 9 aa, Homo Sapiens
DAKGGSFYR

SEQ ID NO: 46839 - protein, 9 aa, Homo Sapiens
DAKSVFHTR

SEQ ID NO: 46840 - protein, 9 aa, Homo Sapiens
DALGGLLNR

SEQ ID NO: 46841 - protein, 9 aa, Homo Sapiens
DANAKFYCR

SEQ ID NO: 46842 - protein, 9 aa, Homo Sapiens
DANPFLSKR

SEQ ID NO: 46843 - protein, 9 aa, Homo Sapiens
DANPVRYGR

SEQ ID NO: 46844 - protein, 9 aa, Homo Sapiens
DAQEIIRPR

SEQ ID NO: 46845 - protein, 9 aa, Homo Sapiens
DAQEILHSR

SEQ ID NO: 46846 - protein, 9 aa, Homo Sapiens
DAQKPSLTR

SEQ ID NO: 46847 - protein, 9 aa, Homo Sapiens
DAQRLHYYR

SEQ ID NO: 46848 - protein, 9 aa, Homo Sapiens
DAQRLISER

SEQ ID NO: 46849 - protein, 9 aa, Homo Sapiens
DARGTVVLR

SEQ ID NO: 46850 - protein, 9 aa, Homo Sapiens
DARIPLSGR

SEQ ID NO: 46851 - protein, 9 aa, Homo Sapiens
DASLLIVNR

SEQ ID NO: 46852 - protein, 9 aa, Homo Sapiens
DAVARLVAR

SEQ ID NO: 46853 - protein, 9 aa, Homo Sapiens
DAWEPKVLR

SEQ ID NO: 46854 - protein, 9 aa, Homo Sapiens
DAWRFWHKR

SEQ ID NO: 46855 - protein, 9 aa, Homo Sapiens
DFALIHKER

SEQ ID NO: 46856 - protein, 9 aa, Homo Sapiens
DFARRLGLR

SEQ ID NO: 46857 - protein, 9 aa, Homo Sapiens
DFDDRRVGR

SEQ ID NO: 46858 - protein, 9 aa, Homo Sapiens
DFHFRTDER

SEQ ID NO: 46859 - protein, 9 aa, Homo Sapiens
DFHSVSKLR

SEQ ID NO: 46860 - protein, 9 aa, Homo Sapiens
DFIAKVVQR

SEQ ID NO: 46861 - protein, 9 aa, Homo Sapiens
DFKDPPTAK

SEQ ID NO: 46862 - protein, 9 aa, Homo Sapiens
DFKKYVENR

SEQ ID NO: 46863 - protein, 9 aa, Homo Sapiens
DFKNVLSNR

SEQ ID NO: 46864 - protein, 9 aa, Homo Sapiens
DFKRVVGKK

SEQ ID NO: 46865 - protein, 9 aa, Homo Sapiens
DFKRYVTDR

SEQ ID NO: 46866 - protein, 9 aa, Homo Sapiens
DFLQKRKER

SEQ ID NO: 46867 - protein, 9 aa, Homo Sapiens
DFLRRSSSR

SEQ ID NO: 46868 - protein, 9 aa, Homo Sapiens
DFNNRLNNR

SEQ ID NO: 46869 - protein, 9 aa, Homo Sapiens
DFPRPVHHR

SEQ ID NO: 46870 - protein, 9 aa, Homo Sapiens
DFREKGGYR

SEQ ID NO: 46871 - protein, 9 aa, Homo Sapiens
DFSAGVANR

SEQ ID NO: 46872 - protein, 9 aa, Homo Sapiens
DFSTRFITR

SEQ ID NO: 46873 - protein, 9 aa, Homo Sapiens
DFVGVHQER

SEQ ID NO: 46874 - protein, 9 aa, Homo Sapiens
DFYHNVAER

SEQ ID NO: 46875 - protein, 9 aa, Homo Sapiens
DFYLQSVER

SEQ ID NO: 46876 - protein, 9 aa, Homo Sapiens
DFYVRVFVR

SEQ ID NO: 46877 - protein, 9 aa, Homo Sapiens
DIAGRDITR

SEQ ID NO: 46878 - protein, 9 aa, Homo Sapiens
DICPFEVNR

SEQ ID NO: 46879 - protein, 9 aa, Homo Sapiens
DIHNIHVMR

SEQ ID NO: 46880 - protein, 9 aa, Homo Sapiens
DIKHFVSER

SEQ ID NO: 46881 - protein, 9 aa, Homo Sapiens
DIKNLVVKR

SEQ ID NO: 46882 - protein, 9 aa, Homo Sapiens
DIKSHYAFR

SEQ ID NO: 46883 - protein, 9 aa, Homo Sapiens
DIKSYYTVR

SEQ ID NO: 46884 - protein, 9 aa, Homo Sapiens
DILARAFSR

SEQ ID NO: 46885 - protein, 9 aa, Homo Sapiens
DISNVKIPK

SEQ ID NO: 46886 - protein, 9 aa, Homo Sapiens
DIYLRMTGR

SEQ ID NO: 46887 - protein, 9 aa, Homo Sapiens
DIYNHRFHR

SEQ ID NO: 46888 - protein, 9 aa, Homo Sapiens
DLFEKRTNR

SEQ ID NO: 46889 - protein, 9 aa, Homo Sapiens
DLIDRGWRR

SEQ ID NO: 46890 - protein, 9 aa, Homo Sapiens
DLKGPCSER

SEQ ID NO: 46891 - protein, 9 aa, Homo Sapiens
DLKKPIYQR

SEQ ID NO: 46892 - protein, 9 aa, Homo Sapiens
DLKRPFLSR

SEQ ID NO: 46893 - protein, 9 aa, Homo Sapiens
DLNEKIAQR

SEQ ID NO: 46894 - protein, 9 aa, Homo Sapiens
DLNHKYWER

SEQ ID NO: 46895 - protein, 9 aa, Homo Sapiens
DLNRLITQR

SEQ ID NO: 46896 - protein, 9 aa, Homo Sapiens
DLREQTHTR

SEQ ID NO: 46897 - protein, 9 aa, Homo Sapiens
DMFATPQYR

SEQ ID NO: 46898 - protein, 9 aa, Homo Sapiens
DMHSLVRSR

SEQ ID NO: 46899 - protein, 9 aa, Homo Sapiens
DMNEPSVFR

SEQ ID NO: 46900 - protein, 9 aa, Homo Sapiens
DMRKIGSSR

SEQ ID NO: 46901 - protein, 9 aa, Homo Sapiens
DMRVHPYQR

SEQ ID NO: 46902 - protein, 9 aa, Homo Sapiens
DMYSSPYLR

SEQ ID NO: 46903 - protein, 9 aa, Homo Sapiens
DNRTLYHLR

SEQ ID NO: 46904 - protein, 9 aa, Homo Sapiens
DSFTGPRRR

SEQ ID NO: 46905 - protein, 9 aa, Homo Sapiens
DSMPEPASR

SEQ ID NO: 46906 - protein, 9 aa, Homo Sapiens
DSRPPFLSR

SEQ ID NO: 46907 - protein, 9 aa, Homo Sapiens
DSYSPPHVR

SEQ ID NO: 46908 - protein, 9 aa, Homo Sapiens
DTHGSFVVR

SEQ ID NO: 46909 - protein, 9 aa, Homo Sapiens
DTKNIAFER

SEQ ID NO: 46910 - protein, 9 aa, Homo Sapiens
DTKSPQFNR

SEQ ID NO: 46911 - protein, 9 aa, Homo Sapiens
DTLVPYGNR

SEQ ID NO: 46912 - protein, 9 aa, Homo Sapiens
DTRPHYITR

SEQ ID NO: 46913 - protein, 9 aa, Homo Sapiens
DTRSEFYKH

SEQ ID NO: 46914 - protein, 9 aa, Homo Sapiens
DTYLHRVAR

SEQ ID NO: 46915 - protein, 9 aa, Homo Sapiens
DVFPGPSFR

SEQ ID NO: 46916 - protein, 9 aa, Homo Sapiens
DVFVVGTER

SEQ ID NO: 46917 - protein, 9 aa, Homo Sapiens
DVKPSWTTR

SEQ ID NO: 46918 - protein, 9 aa, Homo Sapiens
DVLQWIVQR

SEQ ID NO: 46919 - protein, 9 aa, Homo Sapiens
DVLSHFAQR

SEQ ID NO: 46920 - protein, 9 aa, Homo Sapiens
DVNIRHSGR

SEQ ID NO: 46921 - protein, 9 aa, Homo Sapiens
DVNNIGKYR

SEQ ID NO: 46922 - protein, 9 aa, Homo Sapiens
DVNSFVRSR

SEQ ID NO: 46923 - protein, 9 aa, Homo Sapiens
DVNSGFAKR

SEQ ID NO: 46924 - protein, 9 aa, Homo Sapiens
DVNVISWSR

SEQ ID NO: 46925 - protein, 9 aa, Homo Sapiens
DVNYKMHFR

SEQ ID NO: 46926 - protein, 9 aa, Homo Sapiens
DVQERLVYR

SEQ ID NO: 46927 - protein, 9 aa, Homo Sapiens
DVQHFKVLR

SEQ ID NO: 46928 - protein, 9 aa, Homo Sapiens
DVQPKLWAR

SEQ ID NO: 46929 - protein, 9 aa, Homo Sapiens
DVRMGGSFR

SEQ ID NO: 46930 - protein, 9 aa, Homo Sapiens
DVRSDFQRR

SEQ ID NO: 46931 - protein, 9 aa, Homo Sapiens
DVRSVTSVR

SEQ ID NO: 46932 - protein, 9 aa, Homo Sapiens
DVSHPIIYR

SEQ ID NO: 46933 - protein, 9 aa, Homo Sapiens
DVYTPKSSR

SEQ ID NO: 46934 - protein, 9 aa, Homo Sapiens
DWKTISKER

SEQ ID NO: 46935 - protein, 9 aa, Homo Sapiens
DYARLVKGR

SEQ ID NO: 46936 - protein, 9 aa, Homo Sapiens
DYFDALYKR

SEQ ID NO: 46937 - protein, 9 aa, Homo Sapiens
DYFHNGNPR

SEQ ID NO: 46938 - protein, 9 aa, Homo Sapiens
DYFKKPQSR

SEQ ID NO: 46939 - protein, 9 aa, Homo Sapiens
DYGHLSVYR

SEQ ID NO: 46940 - protein, 9 aa, Homo Sapiens
DYIKLYVRR

SEQ ID NO: 46941 - protein, 9 aa, Homo Sapiens
DYIKVFKPK

SEQ ID NO: 46942 - protein, 9 aa, Homo Sapiens
DYISLAKTR

SEQ ID NO: 46943 - protein, 9 aa, Homo Sapiens
DYIVKHTKR

SEQ ID NO: 46944 - protein, 9 aa, Homo Sapiens
DYIVKIFDR

SEQ ID NO: 46945 - protein, 9 aa, Homo Sapiens
DYKDIEHLK

SEQ ID NO: 46946 - protein, 9 aa, Homo Sapiens
DYKRNLPRR

SEQ ID NO: 46947 - protein, 9 aa, Homo Sapiens
DYKTIAKER

SEQ ID NO: 46948 - protein, 9 aa, Homo Sapiens
DYLAHESRR

SEQ ID NO: 46949 - protein, 9 aa, Homo Sapiens
DYLEFQKNR

SEQ ID NO: 46950 - protein, 9 aa, Homo Sapiens
DYLENIFVK

SEQ ID NO: 46951 - protein, 9 aa, Homo Sapiens
DYLEQQVAR

SEQ ID NO: 46952 - protein, 9 aa, Homo Sapiens
DYLQFAYYR

SEQ ID NO: 46953 - protein, 9 aa, Homo Sapiens
DYLVFANNR

SEQ ID NO: 46954 - protein, 9 aa, Homo Sapiens
DYLVPPALR

SEQ ID NO: 46955 - protein, 9 aa, Homo Sapiens
DYMASTIGR

SEQ ID NO: 46956 - protein, 9 aa, Homo Sapiens
DYNLIVIER

SEQ ID NO: 46957 - protein, 9 aa, Homo Sapiens
DYNPLYKER

SEQ ID NO: 46958 - protein, 9 aa, Homo Sapiens
DYNPSFAIR

SEQ ID NO: 46959 - protein, 9 aa, Homo Sapiens
DYPPEFHQR

SEQ ID NO: 46960 - protein, 9 aa, Homo Sapiens
DYQTHFRLR

SEQ ID NO: 46961 - protein, 9 aa, Homo Sapiens
DYRALVHER

SEQ ID NO: 46962 - protein, 9 aa, Homo Sapiens
DYRDTVVKR

SEQ ID NO: 46963 - protein, 9 aa, Homo Sapiens
DYRGSGFDR

SEQ ID NO: 46964 - protein, 9 aa, Homo Sapiens
DYRMKEWSR

SEQ ID NO: 46965 - protein, 9 aa, Homo Sapiens
DYSKPSAKR

SEQ ID NO: 46966 - protein, 9 aa, Homo Sapiens
DYSQNVAVR

SEQ ID NO: 46967 - protein, 9 aa, Homo Sapiens
DYSQSLHAR

SEQ ID NO: 46968 - protein, 9 aa, Homo Sapiens
DYTDFYSSR

SEQ ID NO: 46969 - protein, 9 aa, Homo Sapiens
DYTNERALR

SEQ ID NO: 46970 - protein, 9 aa, Homo Sapiens
DYTSHITCR

SEQ ID NO: 46971 - protein, 9 aa, Homo Sapiens
DYTTCFSSR

SEQ ID NO: 46972 - protein, 9 aa, Homo Sapiens
DYVDIVQGR

SEQ ID NO: 46973 - protein, 9 aa, Homo Sapiens
DYVPETVYR

SEQ ID NO: 46974 - protein, 9 aa, Homo Sapiens
DYVPYVPLR

SEQ ID NO: 46975 - protein, 9 aa, Homo Sapiens
DYYARVEGR

SEQ ID NO: 46976 - protein, 9 aa, Homo Sapiens
DYYSLLNVR

SEQ ID NO: 46977 - protein, 9 aa, Homo Sapiens
EAAAIIAQR

SEQ ID NO: 46978 - protein, 9 aa, Homo Sapiens
EAAAPLRVR

SEQ ID NO: 46979 - protein, 9 aa, Homo Sapiens
EAAAVLMAR

SEQ ID NO: 46980 - protein, 9 aa, Homo Sapiens
EAAESIAFR

SEQ ID NO: 46981 - protein, 9 aa, Homo Sapiens
EAAKDLLYR

SEQ ID NO: 46982 - protein, 9 aa, Homo Sapiens
EAAQKFLER

SEQ ID NO: 46983 - protein, 9 aa, Homo Sapiens
EAAYIGSMR

SEQ ID NO: 46984 - protein, 9 aa, Homo Sapiens
EACDIMVKR

SEQ ID NO: 46985 - protein, 9 aa, Homo Sapiens
EACIVLSER

SEQ ID NO: 46986 - protein, 9 aa, Homo Sapiens
EAECYFHSR

SEQ ID NO: 46987 - protein, 9 aa, Homo Sapiens
EAFEFVKQR

SEQ ID NO: 46988 - protein, 9 aa, Homo Sapiens
EAFKPKIGK

SEQ ID NO: 46989 - protein, 9 aa, Homo Sapiens
EAFLHQQKR

SEQ ID NO: 46990 - protein, 9 aa, Homo Sapiens
EAFSRPLSR

SEQ ID NO: 46991 - protein, 9 aa, Homo Sapiens
EAFVIDAVR

SEQ ID NO: 46992 - protein, 9 aa, Homo Sapiens
EAGGPLTPR

SEQ ID NO: 46993 - protein, 9 aa, Homo Sapiens
EAGPSIVHR

SEQ ID NO: 46994 - protein, 9 aa, Homo Sapiens
EAHARIHLR

SEQ ID NO: 46995 - protein, 9 aa, Homo Sapiens
EAHNILSKR

SEQ ID NO: 46996 - protein, 9 aa, Homo Sapiens
EAIARYQGR

SEQ ID NO: 46997 - protein, 9 aa, Homo Sapiens
EAIGIDKDR

SEQ ID NO: 46998 - protein, 9 aa, Homo Sapiens
EAIPGLAAR

SEQ ID NO: 46999 - protein, 9 aa, Homo Sapiens
EAKAPILKR

SEQ ID NO: 47000 - protein, 9 aa, Homo Sapiens
EAKFFTESR

SEQ ID NO: 47001 - protein, 9 aa, Homo Sapiens
EAKFPTMNR

SEQ ID NO: 47002 - protein, 9 aa, Homo Sapiens
EAKLREELR

SEQ ID NO: 47003 - protein, 9 aa, Homo Sapiens
EALDGVVKR

SEQ ID NO: 47004 - protein, 9 aa, Homo Sapiens
EALEMSRNR

SEQ ID NO: 47005 - protein, 9 aa, Homo Sapiens
EALESLVNR

SEQ ID NO: 47006 - protein, 9 aa, Homo Sapiens
EALGALVCR

SEQ ID NO: 47007 - protein, 9 aa, Homo Sapiens
EALGLRKKR

SEQ ID NO: 47008 - protein, 9 aa, Homo Sapiens
EALKDFEKR

SEQ ID NO: 47009 - protein, 9 aa, Homo Sapiens
EALKLARQI

SEQ ID NO: 47010 - protein, 9 aa, Homo Sapiens
EALLPYTER

SEQ ID NO: 47011 - protein, 9 aa, Homo Sapiens
EALNQVTQR

SEQ ID NO: 47012 - protein, 9 aa, Homo Sapiens
EALNVLVNR

SEQ ID NO: 47013 - protein, 9 aa, Homo Sapiens
EALPGLQRR

SEQ ID NO: 47014 - protein, 9 aa, Homo Sapiens
EALQKKFNK

SEQ ID NO: 47015 - protein, 9 aa, Homo Sapiens
EALREISGR

SEQ ID NO: 47016 - protein, 9 aa, Homo Sapiens
EALRGLYGR

SEQ ID NO: 47017 - protein, 9 aa, Homo Sapiens
EALSALTAR

SEQ ID NO: 47018 - protein, 9 aa, Homo Sapiens
EALTALMSR

SEQ ID NO: 47019 - protein, 9 aa, Homo Sapiens
EALTQAFRR

SEQ ID NO: 47020 - protein, 9 aa, Homo Sapiens
EALVMPTLR

SEQ ID NO: 47021 - protein, 9 aa, Homo Sapiens
EALVPVIHR

SEQ ID NO: 47022 - protein, 9 aa, Homo Sapiens
EALYDICFR

SEQ ID NO: 47023 - protein, 9 aa, Homo Sapiens
EAMALPLYR

SEQ ID NO: 47024 - protein, 9 aa, Homo Sapiens
EAMASIINR

SEQ ID NO: 47025 - protein, 9 aa, Homo Sapiens
EAMEILTAR

SEQ ID NO: 47026 - protein, 9 aa, Homo Sapiens
EAMKHVYFR

SEQ ID NO: 47027 - protein, 9 aa, Homo Sapiens
EAMRRLQER

SEQ ID NO: 47028 - protein, 9 aa, Homo Sapiens
EAMRWFQQK

SEQ ID NO: 47029 - protein, 9 aa, Homo Sapiens
EAMTIFQNR

SEQ ID NO: 47030 - protein, 9 aa, Homo Sapiens
EAMTVAIRR

SEQ ID NO: 47031 - protein, 9 aa, Homo Sapiens
EANEEFALR

SEQ ID NO: 47032 - protein, 9 aa, Homo Sapiens
EANIFTKQR

SEQ ID NO: 47033 - protein, 9 aa, Homo Sapiens
EANSQYFHL

SEQ ID NO: 47034 - protein, 9 aa, Homo Sapiens
EAQAIETAR

SEQ ID NO: 47035 - protein, 9 aa, Homo Sapiens
EAQEVTIAR

SEQ ID NO: 47036 - protein, 9 aa, Homo Sapiens
EAQFQKNVR

SEQ ID NO: 47037 - protein, 9 aa, Homo Sapiens
EAQGIHISR

SEQ ID NO: 47038 - protein, 9 aa, Homo Sapiens
EAQLPYVCR

SEQ ID NO: 47039 - protein, 9 aa, Homo Sapiens
EAQRITGLR

SEQ ID NO: 47040 - protein, 9 aa, Homo Sapiens
EAQVKIWRR

SEQ ID NO: 47041 - protein, 9 aa, Homo Sapiens
EAQVVRVTR

SEQ ID NO: 47042 - protein, 9 aa, Homo Sapiens
EARAFGVTR

SEQ ID NO: 47043 - protein, 9 aa, Homo Sapiens
EARGRLLER

SEQ ID NO: 47044 - protein, 9 aa, Homo Sapiens
EARLLEEQR

SEQ ID NO: 47045 - protein, 9 aa, Homo Sapiens
EARLNAALR

SEQ ID NO: 47046 - protein, 9 aa, Homo Sapiens
EARPSIMKR

SEQ ID NO: 47047 - protein, 9 aa, Homo Sapiens
EATAMAMGR

SEQ ID NO: 47048 - protein, 9 aa, Homo Sapiens
EATKYFRER

SEQ ID NO: 47049 - protein, 9 aa, Homo Sapiens
EAVFIAHKR

SEQ ID NO: 47050 - protein, 9 aa, Homo Sapiens
EAVKLIIGR

SEQ ID NO: 47051 - protein, 9 aa, Homo Sapiens
EAVLWEALR

SEQ ID NO: 47052 - protein, 9 aa, Homo Sapiens
EAVQALRER

SEQ ID NO: 47053 - protein, 9 aa, Homo Sapiens
EAWEKKVER

SEQ ID NO: 47054 - protein, 9 aa, Homo Sapiens
EAWRRVWSR

SEQ ID NO: 47055 - protein, 9 aa, Homo Sapiens
EAYLPETFR

SEQ ID NO: 47056 - protein, 9 aa, Homo Sapiens
EAYNPKIKR

SEQ ID NO: 47057 - protein, 9 aa, Homo Sapiens
EAYSVGTGR

SEQ ID NO: 47058 - protein, 9 aa, Homo Sapiens
EDKGINVFR

SEQ ID NO: 47059 - protein, 9 aa, Homo Sapiens
EFALIHKER

SEQ ID NO: 47060 - protein, 9 aa, Homo Sapiens
EFDPWFNYR

SEQ ID NO: 47061 - protein, 9 aa, Homo Sapiens
EFDPYFNYR

SEQ ID NO: 47062 - protein, 9 aa, Homo Sapiens
EFFGEGKTR

SEQ ID NO: 47063 - protein, 9 aa, Homo Sapiens
EFFIPRVGR

SEQ ID NO: 47064 - protein, 9 aa, Homo Sapiens
EFFSINAQR

SEQ ID NO: 47065 - protein, 9 aa, Homo Sapiens
EFFTVLAQR

SEQ ID NO: 47066 - protein, 9 aa, Homo Sapiens
EFGEPLPKR

SEQ ID NO: 47067 - protein, 9 aa, Homo Sapiens
EFISGTRMR

SEQ ID NO: 47068 - protein, 9 aa, Homo Sapiens
EFISSTTVR

SEQ ID NO: 47069 - protein, 9 aa, Homo Sapiens
EFKDKTWTR

SEQ ID NO: 47070 - protein, 9 aa, Homo Sapiens
EFKEDIHNR

SEQ ID NO: 47071 - protein, 9 aa, Homo Sapiens
EFKELTRKR

SEQ ID NO: 47072 - protein, 9 aa, Homo Sapiens
EFKERLRKR

SEQ ID NO: 47073 - protein, 9 aa, Homo Sapiens
EFKPTYQDR

SEQ ID NO: 47074 - protein, 9 aa, Homo Sapiens
EFLAHARGR

SEQ ID NO: 47075 - protein, 9 aa, Homo Sapiens
EFLDPLCQR

SEQ ID NO: 47076 - protein, 9 aa, Homo Sapiens
EFLEQHYDR

SEQ ID NO: 47077 - protein, 9 aa, Homo Sapiens
EFLIKKKAN

SEQ ID NO: 47078 - protein, 9 aa, Homo Sapiens
EFLKLDRER

SEQ ID NO: 47079 - protein, 9 aa, Homo Sapiens
EFLVKSKHR

SEQ ID NO: 47080 - protein, 9 aa, Homo Sapiens
EFNPNFVAR

SEQ ID NO: 47081 - protein, 9 aa, Homo Sapiens
EFQDFTVPR

SEQ ID NO: 47082 - protein, 9 aa, Homo Sapiens
EFQIPGRTR

SEQ ID NO: 47083 - protein, 9 aa, Homo Sapiens
EFQQLPYHR

SEQ ID NO: 47084 - protein, 9 aa, Homo Sapiens
EFQQVLSNR

SEQ ID NO: 47085 - protein, 9 aa, Homo Sapiens
EFRAGMSNR

SEQ ID NO: 47086 - protein, 9 aa, Homo Sapiens
EFREKHNIR

SEQ ID NO: 47087 - protein, 9 aa, Homo Sapiens
EFREPRPPR

SEQ ID NO: 47088 - protein, 9 aa, Homo Sapiens
EFRKDFISR

SEQ ID NO: 47089 - protein, 9 aa, Homo Sapiens
EFRKIKCVR

SEQ ID NO: 47090 - protein, 9 aa, Homo Sapiens
EFRPDGKLR

SEQ ID NO: 47091 - protein, 9 aa, Homo Sapiens
EFRQRIILR

SEQ ID NO: 47092 - protein, 9 aa, Homo Sapiens
EFSALKTQR

SEQ ID NO: 47093 - protein, 9 aa, Homo Sapiens
EFSPTFSER

SEQ ID NO: 47094 - protein, 9 aa, Homo Sapiens
EFSTLIVQR

SEQ ID NO: 47095 - protein, 9 aa, Homo Sapiens
EFSVILNQR

SEQ ID NO: 47096 - protein, 9 aa, Homo Sapiens
EFVCNLSAR

SEQ ID NO: 47097 - protein, 9 aa, Homo Sapiens
EFVDLYVPR

SEQ ID NO: 47098 - protein, 9 aa, Homo Sapiens
EFVEHLISR

SEQ ID NO: 47099 - protein, 9 aa, Homo Sapiens
EFVTTVQQR

SEQ ID NO: 47100 - protein, 9 aa, Homo Sapiens
EFWQGQTNR

SEQ ID NO: 47101 - protein, 9 aa, Homo Sapiens
EFYINYVTR

SEQ ID NO: 47102 - protein, 9 aa, Homo Sapiens
EFYNLVRFR

SEQ ID NO: 47103 - protein, 9 aa, Homo Sapiens
EFYSPEACR

SEQ ID NO: 47104 - protein, 9 aa, Homo Sapiens
EGIGQFHCR

SEQ ID NO: 47105 - protein, 9 aa, Homo Sapiens
EGKDFSIHR

SEQ ID NO: 47106 - protein, 9 aa, Homo Sapiens
EGKDLFTQR

SEQ ID NO: 47107 - protein, 9 aa, Homo Sapiens
EGKGVFDCR

SEQ ID NO: 47108 - protein, 9 aa, Homo Sapiens
EGKYIFKER

SEQ ID NO: 47109 - protein, 9 aa, Homo Sapiens
EGLNILLNR

SEQ ID NO: 47110 - protein, 9 aa, Homo Sapiens
EGLSGRVLR

SEQ ID NO: 47111 - protein, 9 aa, Homo Sapiens
EGNQIFNNR

SEQ ID NO: 47112 - protein, 9 aa, Homo Sapiens
EGNSFNSPR

SEQ ID NO: 47113 - protein, 9 aa, Homo Sapiens
EIAPSPCFR

SEQ ID NO: 47114 - protein, 9 aa, Homo Sapiens
EICGNYTYR

SEQ ID NO: 47115 - protein, 9 aa, Homo Sapiens
EIFDGIQPK

SEQ ID NO: 47116 - protein, 9 aa, Homo Sapiens
EIFGTIGMR

SEQ ID NO: 47117 - protein, 9 aa, Homo Sapiens
EIFRHILQR

SEQ ID NO: 47118 - protein, 9 aa, Homo Sapiens
EIGHFLRER

SEQ ID NO: 47119 - protein, 9 aa, Homo Sapiens
EIGNRVTTR

SEQ ID NO: 47120 - protein, 9 aa, Homo Sapiens
EIGWFPCNR

SEQ ID NO: 47121 - protein, 9 aa, Homo Sapiens
EIIDKRRER

SEQ ID NO: 47122 - protein, 9 aa, Homo Sapiens
EIKERIAKR

SEQ ID NO: 47123 - protein, 9 aa, Homo Sapiens
EIKEVHIEK

SEQ ID NO: 47124 - protein, 9 aa, Homo Sapiens
EIKHFVSER

SEQ ID NO: 47125 - protein, 9 aa, Homo Sapiens
EIKSLLEER

SEQ ID NO: 47126 - protein, 9 aa, Homo Sapiens
EIKSLTKER

SEQ ID NO: 47127 - protein, 9 aa, Homo Sapiens
EIKSQFRTR

SEQ ID NO: 47128 - protein, 9 aa, Homo Sapiens
EILELLNQR

SEQ ID NO: 47129 - protein, 9 aa, Homo Sapiens
EILEVATAR

SEQ ID NO: 47130 - protein, 9 aa, Homo Sapiens
EILGIANNR

SEQ ID NO: 47131 - protein, 9 aa, Homo Sapiens
EILGVLVPR

SEQ ID NO: 47132 - protein, 9 aa, Homo Sapiens
EILHHLSER

SEQ ID NO: 47133 - protein, 9 aa, Homo Sapiens
EILKRNIQR

SEQ ID NO: 47134 - protein, 9 aa, Homo Sapiens
EILRDIICR

SEQ ID NO: 47135 - protein, 9 aa, Homo Sapiens
EILRRLTGR

SEQ ID NO: 47136 - protein, 9 aa, Homo Sapiens
EILRVPFRR

SEQ ID NO: 47137 - protein, 9 aa, Homo Sapiens
EILSDVASR

SEQ ID NO: 47138 - protein, 9 aa, Homo Sapiens
EILSVLSHR

SEQ ID NO: 47139 - protein, 9 aa, Homo Sapiens
EIMEVAKER

SEQ ID NO: 47140 - protein, 9 aa, Homo Sapiens
EIMPPPPKP

SEQ ID NO: 47141 - protein, 9 aa, Homo Sapiens
EINAILQKR

SEQ ID NO: 47142 - protein, 9 aa, Homo Sapiens
EINKLLAHR

SEQ ID NO: 47143 - protein, 9 aa, Homo Sapiens
EINQITRSR

SEQ ID NO: 47144 - protein, 9 aa, Homo Sapiens
EIPKRFGQR

SEQ ID NO: 47145 - protein, 9 aa, Homo Sapiens
EIQHTTALR

SEQ ID NO: 47146 - protein, 9 aa, Homo Sapiens
EIRKPEVLR

SEQ ID NO: 47147 - protein, 9 aa, Homo Sapiens
EISAPSQQR

SEQ ID NO: 47148 - protein, 9 aa, Homo Sapiens
EISAPVSER

SEQ ID NO: 47149 - protein, 9 aa, Homo Sapiens
EISGTFTHR

SEQ ID NO: 47150 - protein, 9 aa, Homo Sapiens
EISSPAVER

SEQ ID NO: 47151 - protein, 9 aa, Homo Sapiens
EIVSRVSKR

SEQ ID NO: 47152 - protein, 9 aa, Homo Sapiens
EIYEYIIFR

SEQ ID NO: 47153 - protein, 9 aa, Homo Sapiens
EIYFRAWKK

SEQ ID NO: 47154 - protein, 9 aa, Homo Sapiens
EIYGVTHTR

SEQ ID NO: 47155 - protein, 9 aa, Homo Sapiens
EIYKPGLSR

SEQ ID NO: 47156 - protein, 9 aa, Homo Sapiens
EIYRPPASR

SEQ ID NO: 47157 - protein, 9 aa, Homo Sapiens
EIYVHRSGR

SEQ ID NO: 47158 - protein, 9 aa, Homo Sapiens
ELADHLVKR

SEQ ID NO: 47159 - protein, 9 aa, Homo Sapiens
ELAERLGLR

SEQ ID NO: 47160 - protein, 9 aa, Homo Sapiens
ELAKIMRTR

SEQ ID NO: 47161 - protein, 9 aa, Homo Sapiens
ELAQVIVSR

SEQ ID NO: 47162 - protein, 9 aa, Homo Sapiens
ELAQWLIQR

SEQ ID NO: 47163 - protein, 9 aa, Homo Sapiens
ELARLKVHR

SEQ ID NO: 47164 - protein, 9 aa, Homo Sapiens
ELARSLFNR

SEQ ID NO: 47165 - protein, 9 aa, Homo Sapiens
ELAVVREQR

SEQ ID NO: 47166 - protein, 9 aa, Homo Sapiens
ELFADKVPK

SEQ ID NO: 47167 - protein, 9 aa, Homo Sapiens
ELFGRVTSR

SEQ ID NO: 47168 - protein, 9 aa, Homo Sapiens
ELFNRIEKR

SEQ ID NO: 47169 - protein, 9 aa, Homo Sapiens
ELFRRKHVR

SEQ ID NO: 47170 - protein, 9 aa, Homo Sapiens
ELFSNIVPR

SEQ ID NO: 47171 - protein, 9 aa, Homo Sapiens
ELFSRIQER

SEQ ID NO: 47172 - protein, 9 aa, Homo Sapiens
ELHKMWENR

SEQ ID NO: 47173 - protein, 9 aa, Homo Sapiens
ELKGIYKDR

SEQ ID NO: 47174 - protein, 9 aa, Homo Sapiens
ELKKVVTGR

SEQ ID NO: 47175 - protein, 9 aa, Homo Sapiens
ELKQEGSLR

SEQ ID NO: 47176 - protein, 9 aa, Homo Sapiens
ELKRLYVER

SEQ ID NO: 47177 - protein, 9 aa, Homo Sapiens
ELLEKIASR

SEQ ID NO: 47178 - protein, 9 aa, Homo Sapiens
ELLEPLNER

SEQ ID NO: 47179 - protein, 9 aa, Homo Sapiens
ELLIRPVQR

SEQ ID NO: 47180 - protein, 9 aa, Homo Sapiens
ELLPRLQAR

SEQ ID NO: 47181 - protein, 9 aa, Homo Sapiens
ELMPPPPPK

SEQ ID NO: 47182 - protein, 9 aa, Homo Sapiens
ELNKIFALR

SEQ ID NO: 47183 - protein, 9 aa, Homo Sapiens
ELNKIPTVR

SEQ ID NO: 47184 - protein, 9 aa, Homo Sapiens
ELNPEIVAR

SEQ ID NO: 47185 - protein, 9 aa, Homo Sapiens
ELNRIPSSR

SEQ ID NO: 47186 - protein, 9 aa, Homo Sapiens
ELNSPLVRR

SEQ ID NO: 47187 - protein, 9 aa, Homo Sapiens
ELQALTTSR

SEQ ID NO: 47188 - protein, 9 aa, Homo Sapiens
ELQEIMRRR

SEQ ID NO: 47189 - protein, 9 aa, Homo Sapiens
ELQLIIAQR

SEQ ID NO: 47190 - protein, 9 aa, Homo Sapiens
ELQREISNR

SEQ ID NO: 47191 - protein, 9 aa, Homo Sapiens
ELQRIKWHR

SEQ ID NO: 47192 - protein, 9 aa, Homo Sapiens
ELQTFVANR

SEQ ID NO: 47193 - protein, 9 aa, Homo Sapiens
ELRGKLVAR

SEQ ID NO: 47194 - protein, 9 aa, Homo Sapiens
ELRRLEELR

SEQ ID NO: 47195 - protein, 9 aa, Homo Sapiens
ELSAVLIHR

SEQ ID NO: 47196 - protein, 9 aa, Homo Sapiens
ELSCQLYQR

SEQ ID NO: 47197 - protein, 9 aa, Homo Sapiens
ELSQSLPPR

SEQ ID NO: 47198 - protein, 9 aa, Homo Sapiens
ELYEKVFSR

SEQ ID NO: 47199 - protein, 9 aa, Homo Sapiens
ELYRRLEAR

SEQ ID NO: 47200 - protein, 9 aa, Homo Sapiens
ELYSKVTPR

SEQ ID NO: 47201 - protein, 9 aa, Homo Sapiens
EMFTPILGR

SEQ ID NO: 47202 - protein, 9 aa, Homo Sapiens
EMGLRPLPR

SEQ ID NO: 47203 - protein, 9 aa, Homo Sapiens
EMKLQVTQR

SEQ ID NO: 47204 - protein, 9 aa, Homo Sapiens
EMKPVLKQR

SEQ ID NO: 47205 - protein, 9 aa, Homo Sapiens
EMLQQIANR

SEQ ID NO: 47206 - protein, 9 aa, Homo Sapiens
EMMADMYNR

SEQ ID NO: 47207 - protein, 9 aa, Homo Sapiens
EMNRYLKNR

SEQ ID NO: 47208 - protein, 9 aa, Homo Sapiens
EMQAKVAVR

SEQ ID NO: 47209 - protein, 9 aa, Homo Sapiens
EMQNLVHRR

SEQ ID NO: 47210 - protein, 9 aa, Homo Sapiens
EMREMLTHR

SEQ ID NO: 47211 - protein, 9 aa, Homo Sapiens
EMRQMFVQR

SEQ ID NO: 47212 - protein, 9 aa, Homo Sapiens
EMVDKHIRR

SEQ ID NO: 47213 - protein, 9 aa, Homo Sapiens
ENDRPYNLR

SEQ ID NO: 47214 - protein, 9 aa, Homo Sapiens
ENFAPGTTR

SEQ ID NO: 47215 - protein, 9 aa, Homo Sapiens
ENFDRFFTR

SEQ ID NO: 47216 - protein, 9 aa, Homo Sapiens
ENFFRIYKR

SEQ ID NO: 47217 - protein, 9 aa, Homo Sapiens
ENFGNTTPR

SEQ ID NO: 47218 - protein, 9 aa, Homo Sapiens
ENKISPYYR

SEQ ID NO: 47219 - protein, 9 aa, Homo Sapiens
ENLPRTVIR

SEQ ID NO: 47220 - protein, 9 aa, Homo Sapiens
ENNRPLLTR

SEQ ID NO: 47221 - protein, 9 aa, Homo Sapiens
ENQRITAVR

SEQ ID NO: 47222 - protein, 9 aa, Homo Sapiens
ENRKPVSFR

SEQ ID NO: 47223 - protein, 9 aa, Homo Sapiens
ENSAYICSR

SEQ ID NO: 47224 - protein, 9 aa, Homo Sapiens
ENTAITIGR

SEQ ID NO: 47225 - protein, 9 aa, Homo Sapiens
ENTTPITSR

SEQ ID NO: 47226 - protein, 9 aa, Homo Sapiens
ENYAGIAAR

SEQ ID NO: 47227 - protein, 9 aa, Homo Sapiens
EQFDRKYTR

SEQ ID NO: 47228 - protein, 9 aa, Homo Sapiens
EQNHLVVAR

SEQ ID NO: 47229 - protein, 9 aa, Homo Sapiens
ESAQDFASR

SEQ ID NO: 47230 - protein, 9 aa, Homo Sapiens
ESAYNAFNR

SEQ ID NO: 47231 - protein, 9 aa, Homo Sapiens
ESCMVGVAR

SEQ ID NO: 47232 - protein, 9 aa, Homo Sapiens
ESEEVRQFR

SEQ ID NO: 47233 - protein, 9 aa, Homo Sapiens
ESFEGFIAR

SEQ ID NO: 47234 - protein, 9 aa, Homo Sapiens
ESFLPPEFR

SEQ ID NO: 47235 - protein, 9 aa, Homo Sapiens
ESFPRGGTR

SEQ ID NO: 47236 - protein, 9 aa, Homo Sapiens
ESFPSVNSR

SEQ ID NO: 47237 - protein, 9 aa, Homo Sapiens
ESFSNLRNR

SEQ ID NO: 47238 - protein, 9 aa, Homo Sapiens
ESIAAFIQR

SEQ ID NO: 47239 - protein, 9 aa, Homo Sapiens
ESIDQYIER

SEQ ID NO: 47240 - protein, 9 aa, Homo Sapiens
ESIRAAVNR

SEQ ID NO: 47241 - protein, 9 aa, Homo Sapiens
ESKGLGYVR

SEQ ID NO: 47242 - protein, 9 aa, Homo Sapiens
ESKLVLFGR

SEQ ID NO: 47243 - protein, 9 aa, Homo Sapiens
ESKMAFLTR

SEQ ID NO: 47244 - protein, 9 aa, Homo Sapiens
ESLAPLQER

SEQ ID NO: 47245 - protein, 9 aa, Homo Sapiens
ESLEWLASR

SEQ ID NO: 47246 - protein, 9 aa, Homo Sapiens
ESLGCIRKR

SEQ ID NO: 47247 - protein, 9 aa, Homo Sapiens
ESLIKQIPR

SEQ ID NO: 47248 - protein, 9 aa, Homo Sapiens
ESLIPSANR

SEQ ID NO: 47249 - protein, 9 aa, Homo Sapiens
ESLNFLIGR

SEQ ID NO: 47250 - protein, 9 aa, Homo Sapiens
ESLPATHIR

SEQ ID NO: 47251 - protein, 9 aa, Homo Sapiens
ESLPGATTR

SEQ ID NO: 47252 - protein, 9 aa, Homo Sapiens
ESLPPPTLR

SEQ ID NO: 47253 - protein, 9 aa, Homo Sapiens
ESLPRVVKR

SEQ ID NO: 47254 - protein, 9 aa, Homo Sapiens
ESLQAILNR

SEQ ID NO: 47255 - protein, 9 aa, Homo Sapiens
ESLTKVFER

SEQ ID NO: 47256 - protein, 9 aa, Homo Sapiens
ESLVIPSTR

SEQ ID NO: 47257 - protein, 9 aa, Homo Sapiens
ESMEKWQTR

SEQ ID NO: 47258 - protein, 9 aa, Homo Sapiens
ESMEPKVFR

SEQ ID NO: 47259 - protein, 9 aa, Homo Sapiens
ESMMPNKVR

SEQ ID NO: 47260 - protein, 9 aa, Homo Sapiens
ESMQRFHNR

SEQ ID NO: 47261 - protein, 9 aa, Homo Sapiens
ESNLNMYTR

SEQ ID NO: 47262 - protein, 9 aa, Homo Sapiens
ESNPPSLMR

SEQ ID NO: 47263 - protein, 9 aa, Homo Sapiens
ESQKEFVRR

SEQ ID NO: 47264 - protein, 9 aa, Homo Sapiens
ESQSNPVFR

SEQ ID NO: 47265 - protein, 9 aa, Homo Sapiens
ESRAPQILR

SEQ ID NO: 47266 - protein, 9 aa, Homo Sapiens
ESRAVFLQR

SEQ ID NO: 47267 - protein, 9 aa, Homo Sapiens
ESRLNLVQR

SEQ ID NO: 47268 - protein, 9 aa, Homo Sapiens
ESRTLAIAR

SEQ ID NO: 47269 - protein, 9 aa, Homo Sapiens
ESSKPPILR

SEQ ID NO: 47270 - protein, 9 aa, Homo Sapiens
ESSPSIVHR

SEQ ID NO: 47271 - protein, 9 aa, Homo Sapiens
ESVLRTQIR

SEQ ID NO: 47272 - protein, 9 aa, Homo Sapiens
ESWPRIIMR

SEQ ID NO: 47273 - protein, 9 aa, Homo Sapiens
ESWPVLVGR

SEQ ID NO: 47274 - protein, 9 aa, Homo Sapiens
ESYRPPKSR

SEQ ID NO: 47275 - protein, 9 aa, Homo Sapiens
ETAAYKIMR

SEQ ID NO: 47276 - protein, 9 aa, Homo Sapiens
ETAFAFHLR

SEQ ID NO: 47277 - protein, 9 aa, Homo Sapiens
ETAFLSWFR

SEQ ID NO: 47278 - protein, 9 aa, Homo Sapiens
ETAIPFRSR

SEQ ID NO: 47279 - protein, 9 aa, Homo Sapiens
ETAIPSSTR

SEQ ID NO: 47280 - protein, 9 aa, Homo Sapiens
ETAKPIPAR

SEQ ID NO: 47281 - protein, 9 aa, Homo Sapiens
ETARMLAQR

SEQ ID NO: 47282 - protein, 9 aa, Homo Sapiens
ETDLKTICR

SEQ ID NO: 47283 - protein, 9 aa, Homo Sapiens
ETEAYIAQR

SEQ ID NO: 47284 - protein, 9 aa, Homo Sapiens
ETEDYRQFR

SEQ ID NO: 47285 - protein, 9 aa, Homo Sapiens
ETEPTIIER

SEQ ID NO: 47286 - protein, 9 aa, Homo Sapiens
ETEREYFNR

SEQ ID NO: 47287 - protein, 9 aa, Homo Sapiens
ETESLLVGR

SEQ ID NO: 47288 - protein, 9 aa, Homo Sapiens
ETFADGVPR

SEQ ID NO: 47289 - protein, 9 aa, Homo Sapiens
ETFLAQRQR

SEQ ID NO: 47290 - protein, 9 aa, Homo Sapiens
ETFNREKFR

SEQ ID NO: 47291 - protein, 9 aa, Homo Sapiens
ETFNSITKR

SEQ ID NO: 47292 - protein, 9 aa, Homo Sapiens
ETFQQKMLR

SEQ ID NO: 47293 - protein, 9 aa, Homo Sapiens
ETFSGVYKK

SEQ ID NO: 47294 - protein, 9 aa, Homo Sapiens
ETHLPAQAR

SEQ ID NO: 47295 - protein, 9 aa, Homo Sapiens
ETIAPKIAR

SEQ ID NO: 47296 - protein, 9 aa, Homo Sapiens
ETIGKKFEK

SEQ ID NO: 47297 - protein, 9 aa, Homo Sapiens
ETIIRIFKR

SEQ ID NO: 47298 - protein, 9 aa, Homo Sapiens
ETIKLLKGR

SEQ ID NO: 47299 - protein, 9 aa, Homo Sapiens
ETIKQLQER

SEQ ID NO: 47300 - protein, 9 aa, Homo Sapiens
ETIKVWKQR

SEQ ID NO: 47301 - protein, 9 aa, Homo Sapiens
ETILKHWTR

SEQ ID NO: 47302 - protein, 9 aa, Homo Sapiens
ETILRTNKR

SEQ ID NO: 47303 - protein, 9 aa, Homo Sapiens
ETIPSFTGR

SEQ ID NO: 47304 - protein, 9 aa, Homo Sapiens
ETIYQNYQR

SEQ ID NO: 47305 - protein, 9 aa, Homo Sapiens
ETKEWLKNR

SEQ ID NO: 47306 - protein, 9 aa, Homo Sapiens
ETKRIFLDR

SEQ ID NO: 47307 - protein, 9 aa, Homo Sapiens
ETLCPPKGR

SEQ ID NO: 47308 - protein, 9 aa, Homo Sapiens
ETLETIINR

SEQ ID NO: 47309 - protein, 9 aa, Homo Sapiens
ETLGQVVRR

SEQ ID NO: 47310 - protein, 9 aa, Homo Sapiens
ETLKDRLSR

SEQ ID NO: 47311 - protein, 9 aa, Homo Sapiens
ETLLLQAER

SEQ ID NO: 47312 - protein, 9 aa, Homo Sapiens
ETLMETHER

SEQ ID NO: 47313 - protein, 9 aa, Homo Sapiens
ETLNQMIAR

SEQ ID NO: 47314 - protein, 9 aa, Homo Sapiens
ETLPKAVKR

SEQ ID NO: 47315 - protein, 9 aa, Homo Sapiens
ETLPPGKVR

SEQ ID NO: 47316 - protein, 9 aa, Homo Sapiens
ETLQNVKER

SEQ ID NO: 47317 - protein, 9 aa, Homo Sapiens
ETLVMPTLR

SEQ ID NO: 47318 - protein, 9 aa, Homo Sapiens
ETMEKGFSK

SEQ ID NO: 47319 - protein, 9 aa, Homo Sapiens
ETMNYAQIR

SEQ ID NO: 47320 - protein, 9 aa, Homo Sapiens
ETMPCVKKK

SEQ ID NO: 47321 - protein, 9 aa, Homo Sapiens
ETMPSPYGR

SEQ ID NO: 47322 - protein, 9 aa, Homo Sapiens
ETMVIGNYR

SEQ ID NO: 47323 - protein, 9 aa, Homo Sapiens
ETNGFISAH

SEQ ID NO: 47324 - protein, 9 aa, Homo Sapiens
ETNIVAVER

SEQ ID NO: 47325 - protein, 9 aa, Homo Sapiens
ETNTGEVYR

SEQ ID NO: 47326 - protein, 9 aa, Homo Sapiens
ETNVFFYPR

SEQ ID NO: 47327 - protein, 9 aa, Homo Sapiens
ETNYGIPQR

SEQ ID NO: 47328 - protein, 9 aa, Homo Sapiens
ETQHEKILR

SEQ ID NO: 47329 - protein, 9 aa, Homo Sapiens
ETQIATILR

SEQ ID NO: 47330 - protein, 9 aa, Homo Sapiens
ETQLPVSFR

SEQ ID NO: 47331 - protein, 9 aa, Homo Sapiens
ETQLVQEVR

SEQ ID NO: 47332 - protein, 9 aa, Homo Sapiens
ETQPPVALK

SEQ ID NO: 47333 - protein, 9 aa, Homo Sapiens
ETRAEFAER

SEQ ID NO: 47334 - protein, 9 aa, Homo Sapiens
ETREVQNLR

SEQ ID NO: 47335 - protein, 9 aa, Homo Sapiens
ETRLHITGR

SEQ ID NO: 47336 - protein, 9 aa, Homo Sapiens
ETRQITWSR

SEQ ID NO: 47337 - protein, 9 aa, Homo Sapiens
ETRSSFMSR

SEQ ID NO: 47338 - protein, 9 aa, Homo Sapiens
ETSALPRPR

SEQ ID NO: 47339 - protein, 9 aa, Homo Sapiens
ETSAPFKER

SEQ ID NO: 47340 - protein, 9 aa, Homo Sapiens
ETSNLIIMR

SEQ ID NO: 47341 - protein, 9 aa, Homo Sapiens
ETSPFGAPR

SEQ ID NO: 47342 - protein, 9 aa, Homo Sapiens
ETSSMASFR

SEQ ID NO: 47343 - protein, 9 aa, Homo Sapiens
ETTSIATAR

SEQ ID NO: 47344 - protein, 9 aa, Homo Sapiens
ETVGSIFSR

SEQ ID NO: 47345 - protein, 9 aa, Homo Sapiens
ETVKDFVAR

SEQ ID NO: 47346 - protein, 9 aa, Homo Sapiens
ETVPAFSER

SEQ ID NO: 47347 - protein, 9 aa, Homo Sapiens
ETVQDIVYR

SEQ ID NO: 47348 - protein, 9 aa, Homo Sapiens
ETYGPFQIR

SEQ ID NO: 47349 - protein, 9 aa, Homo Sapiens
ETYKYLYGR

SEQ ID NO: 47350 - protein, 9 aa, Homo Sapiens
ETYLHRIGR

SEQ ID NO: 47351 - protein, 9 aa, Homo Sapiens
ETYLLEKSR

SEQ ID NO: 47352 - protein, 9 aa, Homo Sapiens
ETYLNENLR

SEQ ID NO: 47353 - protein, 9 aa, Homo Sapiens
ETYMHRIGR

SEQ ID NO: 47354 - protein, 9 aa, Homo Sapiens
EVADLKIKR

SEQ ID NO: 47355 - protein, 9 aa, Homo Sapiens
EVAFPHHPR

SEQ ID NO: 47356 - protein, 9 aa, Homo Sapiens
EVAGIVAAR

SEQ ID NO: 47357 - protein, 9 aa, Homo Sapiens
EVAGLQVGR

SEQ ID NO: 47358 - protein, 9 aa, Homo Sapiens
EVAIPHNRR

SEQ ID NO: 47359 - protein, 9 aa, Homo Sapiens
EVAIPLPAR

SEQ ID NO: 47360 - protein, 9 aa, Homo Sapiens
EVANIPVAR

SEQ ID NO: 47361 - protein, 9 aa, Homo Sapiens
EVAPAKPPR

SEQ ID NO: 47362 - protein, 9 aa, Homo Sapiens
EVAPPEYHR

SEQ ID NO: 47363 - protein, 9 aa, Homo Sapiens
EVAQFLTGR

SEQ ID NO: 47364 - protein, 9 aa, Homo Sapiens
EVARELVGR

SEQ ID NO: 47365 - protein, 9 aa, Homo Sapiens
EVARYMVQR

SEQ ID NO: 47366 - protein, 9 aa, Homo Sapiens
EVASAVCLR

SEQ ID NO: 47367 - protein, 9 aa, Homo Sapiens
EVASVWVER

SEQ ID NO: 47368 - protein, 9 aa, Homo Sapiens
EVCRIYLLR

SEQ ID NO: 47369 - protein, 9 aa, Homo Sapiens
EVDAAMAAR

SEQ ID NO: 47370 - protein, 9 aa, Homo Sapiens
EVDYKKKYR

SEQ ID NO: 47371 - protein, 9 aa, Homo Sapiens
EVEGKMVSR

SEQ ID NO: 47372 - protein, 9 aa, Homo Sapiens
EVEKRFEGR

SEQ ID NO: 47373 - protein, 9 aa, Homo Sapiens
EVESLTAAR

SEQ ID NO: 47374 - protein, 9 aa, Homo Sapiens
EVFEYIIFR

SEQ ID NO: 47375 - protein, 9 aa, Homo Sapiens
EVFGQITER

SEQ ID NO: 47376 - protein, 9 aa, Homo Sapiens
EVFHVPEGR

SEQ ID NO: 47377 - protein, 9 aa, Homo Sapiens
EVFKGIDNR

SEQ ID NO: 47378 - protein, 9 aa, Homo Sapiens
EVFLHVVKR

SEQ ID NO: 47379 - protein, 9 aa, Homo Sapiens
EVFQNANFR

SEQ ID NO: 47380 - protein, 9 aa, Homo Sapiens
EVFSHILKR

SEQ ID NO: 47381 - protein, 9 aa, Homo Sapiens
EVFTPVVQR

SEQ ID NO: 47382 - protein, 9 aa, Homo Sapiens
EVFVGKIPR

SEQ ID NO: 47383 - protein, 9 aa, Homo Sapiens
EVFYFEVTR

SEQ ID NO: 47384 - protein, 9 aa, Homo Sapiens
EVGDIVVGR

SEQ ID NO: 47385 - protein, 9 aa, Homo Sapiens
EVGLLFTNR

SEQ ID NO: 47386 - protein, 9 aa, Homo Sapiens
EVGVIPSKR

SEQ ID NO: 47387 - protein, 9 aa, Homo Sapiens
EVHAVVTVR

SEQ ID NO: 47388 - protein, 9 aa, Homo Sapiens
EVHMLLEHR

SEQ ID NO: 47389 - protein, 9 aa, Homo Sapiens
EVHPSPVSR

SEQ ID NO: 47390 - protein, 9 aa, Homo Sapiens
EVHTKINTR

SEQ ID NO: 47391 - protein, 9 aa, Homo Sapiens
EVIKNRFHR

SEQ ID NO: 47392 - protein, 9 aa, Homo Sapiens
EVIKSMKPK

SEQ ID NO: 47393 - protein, 9 aa, Homo Sapiens
EVINDYHFR

SEQ ID NO: 47394 - protein, 9 aa, Homo Sapiens
EVINKLGPR

SEQ ID NO: 47395 - protein, 9 aa, Homo Sapiens
EVINVLINK

SEQ ID NO: 47396 - protein, 9 aa, Homo Sapiens
EVISKLYAV

SEQ ID NO: 47397 - protein, 9 aa, Homo Sapiens
EVISLINTR

SEQ ID NO: 47398 - protein, 9 aa, Homo Sapiens
EVKESPFFR

SEQ ID NO: 47399 - protein, 9 aa, Homo Sapiens
EVKKICMQR

SEQ ID NO: 47400 - protein, 9 aa, Homo Sapiens
EVKPNLTER

SEQ ID NO: 47401 - protein, 9 aa, Homo Sapiens
EVKPSIRAR

SEQ ID NO: 47402 - protein, 9 aa, Homo Sapiens
EVKRHPFFR

SEQ ID NO: 47403 - protein, 9 aa, Homo Sapiens
EVKSITKER

SEQ ID NO: 47404 - protein, 9 aa, Homo Sapiens
EVKYALGER

SEQ ID NO: 47405 - protein, 9 aa, Homo Sapiens
EVLAELRKR

SEQ ID NO: 47406 - protein, 9 aa, Homo Sapiens
EVLAEPSSR

SEQ ID NO: 47407 - protein, 9 aa, Homo Sapiens
EVLALPFKR

SEQ ID NO: 47408 - protein, 9 aa, Homo Sapiens
EVLDHKEFK

SEQ ID NO: 47409 - protein, 9 aa, Homo Sapiens
EVLDKRYNV

SEQ ID NO: 47410 - protein, 9 aa, Homo Sapiens
EVLDRVFER

SEQ ID NO: 47411 - protein, 9 aa, Homo Sapiens
EVLDVQKRR

SEQ ID NO: 47412 - protein, 9 aa, Homo Sapiens
EVLDYFLRR

SEQ ID NO: 47413 - protein, 9 aa, Homo Sapiens
EVLGPHLER

SEQ ID NO: 47414 - protein, 9 aa, Homo Sapiens
EVLHGLIGR

SEQ ID NO: 47415 - protein, 9 aa, Homo Sapiens
EVLKHLKER

SEQ ID NO: 47416 - protein, 9 aa, Homo Sapiens
EVLKLLVAR

SEQ ID NO: 47417 - protein, 9 aa, Homo Sapiens
EVLKQLSSR

SEQ ID NO: 47418 - protein, 9 aa, Homo Sapiens
EVLLPSGQR

SEQ ID NO: 47419 - protein, 9 aa, Homo Sapiens
EVLLVSSSR

SEQ ID NO: 47420 - protein, 9 aa, Homo Sapiens
EVLNEVNRR

SEQ ID NO: 47421 - protein, 9 aa, Homo Sapiens
EVLNRIQFR

SEQ ID NO: 47422 - protein, 9 aa, Homo Sapiens
EVLPKNIQR

SEQ ID NO: 47423 - protein, 9 aa, Homo Sapiens
EVLPKPRMR

SEQ ID NO: 47424 - protein, 9 aa, Homo Sapiens
EVLPQVYNV

SEQ ID NO: 47425 - protein, 9 aa, Homo Sapiens
EVLQGGSQR

SEQ ID NO: 47426 - protein, 9 aa, Homo Sapiens
EVLQPLQQR

SEQ ID NO: 47427 - protein, 9 aa, Homo Sapiens
EVLSCLYNR

SEQ ID NO: 47428 - protein, 9 aa, Homo Sapiens
EVLVAGFGR

SEQ ID NO: 47429 - protein, 9 aa, Homo Sapiens
EVLVDPRSR

SEQ ID NO: 47430 - protein, 9 aa, Homo Sapiens
EVMFPKNVR

SEQ ID NO: 47431 - protein, 9 aa, Homo Sapiens
EVMGTGAVR

SEQ ID NO: 47432 - protein, 9 aa, Homo Sapiens
EVMRILISR

SEQ ID NO: 47433 - protein, 9 aa, Homo Sapiens
EVNAWLVHR

SEQ ID NO: 47434 - protein, 9 aa, Homo Sapiens
EVNDKRYLR

SEQ ID NO: 47435 - protein, 9 aa, Homo Sapiens
EVNDRPVRR

SEQ ID NO: 47436 - protein, 9 aa, Homo Sapiens
EVNGLKASR

SEQ ID NO: 47437 - protein, 9 aa, Homo Sapiens
EVNLWGTVR

SEQ ID NO: 47438 - protein, 9 aa, Homo Sapiens
EVNNELANR

SEQ ID NO: 47439 - protein, 9 aa, Homo Sapiens
EVNQETIQR

SEQ ID NO: 47440 - protein, 9 aa, Homo Sapiens
EVNSGFFYK

SEQ ID NO: 47441 - protein, 9 aa, Homo Sapiens
EVNSRPTYR

SEQ ID NO: 47442 - protein, 9 aa, Homo Sapiens
EVPELYHQR

SEQ ID NO: 47443 - protein, 9 aa, Homo Sapiens
EVPKHLVGR

SEQ ID NO: 47444 - protein, 9 aa, Homo Sapiens
EVPNKIINR

SEQ ID NO: 47445 - protein, 9 aa, Homo Sapiens
EVPPPPNLR

SEQ ID NO: 47446 - protein, 9 aa, Homo Sapiens
EVPSFLVER

SEQ ID NO: 47447 - protein, 9 aa, Homo Sapiens
EVQEDFSVR

SEQ ID NO: 47448 - protein, 9 aa, Homo Sapiens
EVQFLGRYK

SEQ ID NO: 47449 - protein, 9 aa, Homo Sapiens
EVQGEIHLR

SEQ ID NO: 47450 - protein, 9 aa, Homo Sapiens
EVQKLKRYK

SEQ ID NO: 47451 - protein, 9 aa, Homo Sapiens
EVQPAYATR

SEQ ID NO: 47452 - protein, 9 aa, Homo Sapiens
EVQPPRVDR

SEQ ID NO: 47453 - protein, 9 aa, Homo Sapiens
EVQRILHQR

SEQ ID NO: 47454 - protein, 9 aa, Homo Sapiens
EVQSYIRKR

SEQ ID NO: 47455 - protein, 9 aa, Homo Sapiens
EVQVPPGTR

SEQ ID NO: 47456 - protein, 9 aa, Homo Sapiens
EVQVVNTER

SEQ ID NO: 47457 - protein, 9 aa, Homo Sapiens
EVQYYNIKR

SEQ ID NO: 47458 - protein, 9 aa, Homo Sapiens
EVRDQGYLR

SEQ ID NO: 47459 - protein, 9 aa, Homo Sapiens
EVRGGGLTR

SEQ ID NO: 47460 - protein, 9 aa, Homo Sapiens
EVRKLIIRR

SEQ ID NO: 47461 - protein, 9 aa, Homo Sapiens
EVRKLMHVR

SEQ ID NO: 47462 - protein, 9 aa, Homo Sapiens
EVRLGGSLR

SEQ ID NO: 47463 - protein, 9 aa, Homo Sapiens
EVRPGIVSK

SEQ ID NO: 47464 - protein, 9 aa, Homo Sapiens
EVRPTYFEM

SEQ ID NO: 47465 - protein, 9 aa, Homo Sapiens
EVRPVETLR

SEQ ID NO: 47466 - protein, 9 aa, Homo Sapiens
EVRPVVVPK

SEQ ID NO: 47467 - protein, 9 aa, Homo Sapiens
EVRRLVIGR

SEQ ID NO: 47468 - protein, 9 aa, Homo Sapiens
EVRSQLKLR

SEQ ID NO: 47469 - protein, 9 aa, Homo Sapiens
EVSAAIIQR

SEQ ID NO: 47470 - protein, 9 aa, Homo Sapiens
EVSAALQSR

SEQ ID NO: 47471 - protein, 9 aa, Homo Sapiens
EVSAEVRER

SEQ ID NO: 47472 - protein, 9 aa, Homo Sapiens
EVSGCGSLR

SEQ ID NO: 47473 - protein, 9 aa, Homo Sapiens
EVSLPKRGR

SEQ ID NO: 47474 - protein, 9 aa, Homo Sapiens
EVSTVNVRR

SEQ ID NO: 47475 - protein, 9 aa, Homo Sapiens
EVTDYAIAR

SEQ ID NO: 47476 - protein, 9 aa, Homo Sapiens
EVTETICKR

SEQ ID NO: 47477 - protein, 9 aa, Homo Sapiens
EVTGFGVTR

SEQ ID NO: 47478 - protein, 9 aa, Homo Sapiens
EVTKLVHGR

SEQ ID NO: 47479 - protein, 9 aa, Homo Sapiens
EVTRVKAVR

SEQ ID NO: 47480 - protein, 9 aa, Homo Sapiens
EVVCGLIFR

SEQ ID NO: 47481 - protein, 9 aa, Homo Sapiens
EVVGIIESR

SEQ ID NO: 47482 - protein, 9 aa, Homo Sapiens
EVVNKRFVR

SEQ ID NO: 47483 - protein, 9 aa, Homo Sapiens
EVVPEPVAR

SEQ ID NO: 47484 - protein, 9 aa, Homo Sapiens
EVVQITWNR

SEQ ID NO: 47485 - protein, 9 aa, Homo Sapiens
EVVRLLVTR

SEQ ID NO: 47486 - protein, 9 aa, Homo Sapiens
EVVRTIKER

SEQ ID NO: 47487 - protein, 9 aa, Homo Sapiens
EVVYRFTAR

SEQ ID NO: 47488 - protein, 9 aa, Homo Sapiens
EVWKGIKKR

SEQ ID NO: 47489 - protein, 9 aa, Homo Sapiens
EVWPHSTER

SEQ ID NO: 47490 - protein, 9 aa, Homo Sapiens
EVYIIAVQR

SEQ ID NO: 47491 - protein, 9 aa, Homo Sapiens
EVYKELRLR

SEQ ID NO: 47492 - protein, 9 aa, Homo Sapiens
EVYRHFTGH

SEQ ID NO: 47493 - protein, 9 aa, Homo Sapiens
EVYTLAEHR

SEQ ID NO: 47494 - protein, 9 aa, Homo Sapiens
EVYTRLKSR

SEQ ID NO: 47495 - protein, 9 aa, Homo Sapiens
EWQKRYASR

SEQ ID NO: 47496 - protein, 9 aa, Homo Sapiens
EYAEFQYRR

SEQ ID NO: 47497 - protein, 9 aa, Homo Sapiens
EYAEYIYQR

SEQ ID NO: 47498 - protein, 9 aa, Homo Sapiens
EYAGLKVAR

SEQ ID NO: 47499 - protein, 9 aa, Homo Sapiens
EYAHTRYFR

SEQ ID NO: 47500 - protein, 9 aa, Homo Sapiens
EYAKLLAKR

SEQ ID NO: 47501 - protein, 9 aa, Homo Sapiens
EYAPVFKEK

SEQ ID NO: 47502 - protein, 9 aa, Homo Sapiens
EYAQVFREH

SEQ ID NO: 47503 - protein, 9 aa, Homo Sapiens
EYCPVLRSL

SEQ ID NO: 47504 - protein, 9 aa, Homo Sapiens
EYEEIPKRR

SEQ ID NO: 47505 - protein, 9 aa, Homo Sapiens
EYENIKLER

SEQ ID NO: 47506 - protein, 9 aa, Homo Sapiens
EYEQIQAKR

SEQ ID NO: 47507 - protein, 9 aa, Homo Sapiens
EYEQRVVKR

SEQ ID NO: 47508 - protein, 9 aa, Homo Sapiens
EYGAEALER

SEQ ID NO: 47509 - protein, 9 aa, Homo Sapiens
EYHKFLIGK

SEQ ID NO: 47510 - protein, 9 aa, Homo Sapiens
EYHWRKHLR

SEQ ID NO: 47511 - protein, 9 aa, Homo Sapiens
EYIDFEKIR

SEQ ID NO: 47512 - protein, 9 aa, Homo Sapiens
EYIEEVRAK

SEQ ID NO: 47513 - protein, 9 aa, Homo Sapiens
EYIELHRKR

SEQ ID NO: 47514 - protein, 9 aa, Homo Sapiens
EYIFLAVGR

SEQ ID NO: 47515 - protein, 9 aa, Homo Sapiens
EYIHDFNRR

SEQ ID NO: 47516 - protein, 9 aa, Homo Sapiens
EYIKGGTLR

SEQ ID NO: 47517 - protein, 9 aa, Homo Sapiens
EYIKNWRPR

SEQ ID NO: 47518 - protein, 9 aa, Homo Sapiens
EYIKTWRPR

SEQ ID NO: 47519 - protein, 9 aa, Homo Sapiens
EYIPDLYNH

SEQ ID NO: 47520 - protein, 9 aa, Homo Sapiens
EYIPLRHYY

SEQ ID NO: 47521 - protein, 9 aa, Homo Sapiens
EYIQFVPLL

SEQ ID NO: 47522 - protein, 9 aa, Homo Sapiens
EYISTEFNR

SEQ ID NO: 47523 - protein, 9 aa, Homo Sapiens
EYITLNEPK

SEQ ID NO: 47524 - protein, 9 aa, Homo Sapiens
EYKDIFIRH

SEQ ID NO: 47525 - protein, 9 aa, Homo Sapiens
EYKTVHEEL

SEQ ID NO: 47526 - protein, 9 aa, Homo Sapiens
EYLDMKNTR

SEQ ID NO: 47527 - protein, 9 aa, Homo Sapiens
EYLEKIKQR

SEQ ID NO: 47528 - protein, 9 aa, Homo Sapiens
EYLEKQRNR

SEQ ID NO: 47529 - protein, 9 aa, Homo Sapiens
EYLHHVNKR

SEQ ID NO: 47530 - protein, 9 aa, Homo Sapiens
EYLHKAVFR

SEQ ID NO: 47531 - protein, 9 aa, Homo Sapiens
EYLHRFYGR

SEQ ID NO: 47532 - protein, 9 aa, Homo Sapiens
EYLIKPLNK

SEQ ID NO: 47533 - protein, 9 aa, Homo Sapiens
EYLKALRKK

SEQ ID NO: 47534 - protein, 9 aa, Homo Sapiens
EYLKKVRGK

SEQ ID NO: 47535 - protein, 9 aa, Homo Sapiens
EYLKNIIYR

SEQ ID NO: 47536 - protein, 9 aa, Homo Sapiens
EYLNFIRGV

SEQ ID NO: 47537 - protein, 9 aa, Homo Sapiens
EYLNHVSKR

SEQ ID NO: 47538 - protein, 9 aa, Homo Sapiens
EYLNSILQH

SEQ ID NO: 47539 - protein, 9 aa, Homo Sapiens
EYLPSGCLR

SEQ ID NO: 47540 - protein, 9 aa, Homo Sapiens
EYLPTLWVK

SEQ ID NO: 47541 - protein, 9 aa, Homo Sapiens
EYLQKMVQR

SEQ ID NO: 47542 - protein, 9 aa, Homo Sapiens
EYLQNVEQK

SEQ ID NO: 47543 - protein, 9 aa, Homo Sapiens
EYLREKLQR

SEQ ID NO: 47544 - protein, 9 aa, Homo Sapiens
EYLRLSRVK

SEQ ID NO: 47545 - protein, 9 aa, Homo Sapiens
EYLSLETTR

SEQ ID NO: 47546 - protein, 9 aa, Homo Sapiens
EYLTSTACR

SEQ ID NO: 47547 - protein, 9 aa, Homo Sapiens
EYMDKNNVR

SEQ ID NO: 47548 - protein, 9 aa, Homo Sapiens
EYMEKIKQR

SEQ ID NO: 47549 - protein, 9 aa, Homo Sapiens
EYMRVISQR

SEQ ID NO: 47550 - protein, 9 aa, Homo Sapiens
EYNAPWKER

SEQ ID NO: 47551 - protein, 9 aa, Homo Sapiens
EYNARLFGL

SEQ ID NO: 47552 - protein, 9 aa, Homo Sapiens
EYNEGLVKR

SEQ ID NO: 47553 - protein, 9 aa, Homo Sapiens
EYNISPETR

SEQ ID NO: 47554 - protein, 9 aa, Homo Sapiens
EYNPEHVSR

SEQ ID NO: 47555 - protein, 9 aa, Homo Sapiens
EYNTQFQEK

SEQ ID NO: 47556 - protein, 9 aa, Homo Sapiens
EYNVRVASR

SEQ ID NO: 47557 - protein, 9 aa, Homo Sapiens
EYPAVKFCK

SEQ ID NO: 47558 - protein, 9 aa, Homo Sapiens
EYQEKPLLR

SEQ ID NO: 47559 - protein, 9 aa, Homo Sapiens
EYQILVVTR

SEQ ID NO: 47560 - protein, 9 aa, Homo Sapiens
EYQPSNIKR

SEQ ID NO: 47561 - protein, 9 aa, Homo Sapiens
EYRASLQQR

SEQ ID NO: 47562 - protein, 9 aa, Homo Sapiens
EYRKYIHSR

SEQ ID NO: 47563 - protein, 9 aa, Homo Sapiens
EYSEYMNNK

SEQ ID NO: 47564 - protein, 9 aa, Homo Sapiens
EYSHRMWGR

SEQ ID NO: 47565 - protein, 9 aa, Homo Sapiens
EYSPQLTRR

SEQ ID NO: 47566 - protein, 9 aa, Homo Sapiens
EYSRYQRWR

SEQ ID NO: 47567 - protein, 9 aa, Homo Sapiens
EYSYVKSTK

SEQ ID NO: 47568 - protein, 9 aa, Homo Sapiens
EYTEGISQR

SEQ ID NO: 47569 - protein, 9 aa, Homo Sapiens
EYTKRTLMR

SEQ ID NO: 47570 - protein, 9 aa, Homo Sapiens
EYTTKEIFR

SEQ ID NO: 47571 - protein, 9 aa, Homo Sapiens
EYVADPVYR

SEQ ID NO: 47572 - protein, 9 aa, Homo Sapiens
EYVAEILPK

SEQ ID NO: 47573 - protein, 9 aa, Homo Sapiens
EYVANLTNL

SEQ ID NO: 47574 - protein, 9 aa, Homo Sapiens
EYVDRLSKR

SEQ ID NO: 47575 - protein, 9 aa, Homo Sapiens
EYVEFEVKR

SEQ ID NO: 47576 - protein, 9 aa, Homo Sapiens
EYVETIIAK

SEQ ID NO: 47577 - protein, 9 aa, Homo Sapiens
EYVETVTSR

SEQ ID NO: 47578 - protein, 9 aa, Homo Sapiens
EYVFKFIVR

SEQ ID NO: 47579 - protein, 9 aa, Homo Sapiens
EYVGPRLSR

SEQ ID NO: 47580 - protein, 9 aa, Homo Sapiens
EYVPEKVKK

SEQ ID NO: 47581 - protein, 9 aa, Homo Sapiens
EYVPETVYR

SEQ ID NO: 47582 - protein, 9 aa, Homo Sapiens
EYVSSLSKK

SEQ ID NO: 47583 - protein, 9 aa, Homo Sapiens
EYWDRQRNR

SEQ ID NO: 47584 - protein, 9 aa, Homo Sapiens
EYWMALRNR

SEQ ID NO: 47585 - protein, 9 aa, Homo Sapiens
EYYDKAFDR

SEQ ID NO: 47586 - protein, 9 aa, Homo Sapiens
EYYENVPCK

SEQ ID NO: 47587 - protein, 9 aa, Homo Sapiens
EYYKHPISR

SEQ ID NO: 47588 - protein, 9 aa, Homo Sapiens
FAFGGLCER

SEQ ID NO: 47589 - protein, 9 aa, Homo Sapiens
FAMNVGKAR

SEQ ID NO: 47590 - protein, 9 aa, Homo Sapiens
FATPFLVVR

SEQ ID NO: 47591 - protein, 9 aa, Homo Sapiens
FFGERRIPR

SEQ ID NO: 47592 - protein, 9 aa, Homo Sapiens
FFLTPPCAR

SEQ ID NO: 47593 - protein, 9 aa, Homo Sapiens
FFNDRPWRR

SEQ ID NO: 47594 - protein, 9 aa, Homo Sapiens
FLFVPPQFR

SEQ ID NO: 47595 - protein, 9 aa, Homo Sapiens
FLNAPEANR

SEQ ID NO: 47596 - protein, 9 aa, Homo Sapiens
FLQEYIVNR

SEQ ID NO: 47597 - protein, 9 aa, Homo Sapiens
FMNDPAMNR

SEQ ID NO: 47598 - protein, 9 aa, Homo Sapiens
FPLMPVVGR

SEQ ID NO: 47599 - protein, 9 aa, Homo Sapiens
FSAPNYCYR

SEQ ID NO: 47600 - protein, 9 aa, Homo Sapiens
FSDYPPLGR

SEQ ID NO: 47601 - protein, 9 aa, Homo Sapiens
FSKARYTVR

SEQ ID NO: 47602 - protein, 9 aa, Homo Sapiens
FSKLPEAER

SEQ ID NO: 47603 - protein, 9 aa, Homo Sapiens
FSKNVHSTR

SEQ ID NO: 47604 - protein, 9 aa, Homo Sapiens
FSKVTLIGR

SEQ ID NO: 47605 - protein, 9 aa, Homo Sapiens
FSNDVIRKR

SEQ ID NO: 47606 - protein, 9 aa, Homo Sapiens
FSNLPPEQR

SEQ ID NO: 47607 - protein, 9 aa, Homo Sapiens
FSQGIFSSR

SEQ ID NO: 47608 - protein, 9 aa, Homo Sapiens
FSVHRIIGR

SEQ ID NO: 47609 - protein, 9 aa, Homo Sapiens
FSYTHMVCR

SEQ ID NO: 47610 - protein, 9 aa, Homo Sapiens
FTDLKHAAR

SEQ ID NO: 47611 - protein, 9 aa, Homo Sapiens
FTLSALYAR

SEQ ID NO: 47612 - protein, 9 aa, Homo Sapiens
FTNERFPLR

SEQ ID NO: 47613 - protein, 9 aa, Homo Sapiens
FTNKPTTFR

SEQ ID NO: 47614 - protein, 9 aa, Homo Sapiens
FTQQGPRLR

SEQ ID NO: 47615 - protein, 9 aa, Homo Sapiens
FTSGYIPAR

SEQ ID NO: 47616 - protein, 9 aa, Homo Sapiens
FTWNINHAR

SEQ ID NO: 47617 - protein, 9 aa, Homo Sapiens
FTYMNPAQR

SEQ ID NO: 47618 - protein, 9 aa, Homo Sapiens
FVFDRPVHR

SEQ ID NO: 47619 - protein, 9 aa, Homo Sapiens
FVKDNVTKR

SEQ ID NO: 47620 - protein, 9 aa, Homo Sapiens
FVQATPHNR

SEQ ID NO: 47621 - protein, 9 aa, Homo Sapiens
FVQNPNNNR

SEQ ID NO: 47622 - protein, 9 aa, Homo Sapiens
FVRDKFTRR

SEQ ID NO: 47623 - protein, 9 aa, Homo Sapiens
FVRLKSETR

SEQ ID NO: 47624 - protein, 9 aa, Homo Sapiens
FVYGSGVYR

SEQ ID NO: 47625 - protein, 9 aa, Homo Sapiens
FWRSFHTER

SEQ ID NO: 47626 - protein, 9 aa, Homo Sapiens
FYETGEIPR

SEQ ID NO: 47627 - protein, 9 aa, Homo Sapiens
FYFKEPSLR

SEQ ID NO: 47628 - protein, 9 aa, Homo Sapiens
FYFKIGACR

SEQ ID NO: 47629 - protein, 9 aa, Homo Sapiens
FYKAIQKRR

SEQ ID NO: 47630 - protein, 9 aa, Homo Sapiens
FYNAIKSYK

SEQ ID NO: 47631 - protein, 9 aa, Homo Sapiens
FYNLMPLSR

SEQ ID NO: 47632 - protein, 9 aa, Homo Sapiens
FYNRPILSR

SEQ ID NO: 47633 - protein, 9 aa, Homo Sapiens
FYQEEFYIR

SEQ ID NO: 47634 - protein, 9 aa, Homo Sapiens
FYRPETQHR

SEQ ID NO: 47635 - protein, 9 aa, Homo Sapiens
FYRYYQVAR

SEQ ID NO: 47636 - protein, 9 aa, Homo Sapiens
FYSQEWYAR

SEQ ID NO: 47637 - protein, 9 aa, Homo Sapiens
FYSQHFSGR

SEQ ID NO: 47638 - protein, 9 aa, Homo Sapiens
GGPGGVGGL

SEQ ID NO: 47639 - protein, 9 aa, Homo Sapiens
GNYCPPVKR

SEQ ID NO: 47640 - protein, 9 aa, Homo Sapiens
GYKPKAYLR

SEQ ID NO: 47641 - protein, 9 aa, Homo Sapiens
GYKQVQVPR

SEQ ID NO: 47642 - protein, 9 aa, Homo Sapiens
HAADPIITR

SEQ ID NO: 47643 - protein, 9 aa, Homo Sapiens
HAHGKLFTR

SEQ ID NO: 47644 - protein, 9 aa, Homo Sapiens
HAKAVVSLR

SEQ ID NO: 47645 - protein, 9 aa, Homo Sapiens
HAKDGIFRR

SEQ ID NO: 47646 - protein, 9 aa, Homo Sapiens
HANPRLWLR

SEQ ID NO: 47647 - protein, 9 aa, Homo Sapiens
HAQLLEQHR

SEQ ID NO: 47648 - protein, 9 aa, Homo Sapiens
HAQSIGMNR

SEQ ID NO: 47649 - protein, 9 aa, Homo Sapiens
HAREIFDSR

SEQ ID NO: 47650 - protein, 9 aa, Homo Sapiens
HARYILTNR

SEQ ID NO: 47651 - protein, 9 aa, Homo Sapiens
HAVVVGVYR

SEQ ID NO: 47652 - protein, 9 aa, Homo Sapiens
HAWEPTGTR

SEQ ID NO: 47653 - protein, 9 aa, Homo Sapiens
HLKEIISYR

SEQ ID NO: 47654 - protein, 9 aa, Homo Sapiens
HNKYMVTER

SEQ ID NO: 47655 - protein, 9 aa, Homo Sapiens
HNMNKNVFR

SEQ ID NO: 47656 - protein, 9 aa, Homo Sapiens
HNQGPVIKR

SEQ ID NO: 47657 - protein, 9 aa, Homo Sapiens
HNRSPVSFR

SEQ ID NO: 47658 - protein, 9 aa, Homo Sapiens
HNTMPSQFR

SEQ ID NO: 47659 - protein, 9 aa, Homo Sapiens
HNYQPCVQR

SEQ ID NO: 47660 - protein, 9 aa, Homo Sapiens
HSLPPIARR

SEQ ID NO: 47661 - protein, 9 aa, Homo Sapiens
HSMALIHNR

SEQ ID NO: 47662 - protein, 9 aa, Homo Sapiens
HSMDFVAYR

SEQ ID NO: 47663 - protein, 9 aa, Homo Sapiens
HSQLVIHQR

SEQ ID NO: 47664 - protein, 9 aa, Homo Sapiens
HSRVILQGR

SEQ ID NO: 47665 - protein, 9 aa, Homo Sapiens
HSTPYYYAR

SEQ ID NO: 47666 - protein, 9 aa, Homo Sapiens
HTGRLPAGR

SEQ ID NO: 47667 - protein, 9 aa, Homo Sapiens
HTGYPGGFR

SEQ ID NO: 47668 - protein, 9 aa, Homo Sapiens
HTIAPMGTR

SEQ ID NO: 47669 - protein, 9 aa, Homo Sapiens
HTLEPLIPR

SEQ ID NO: 47670 - protein, 9 aa, Homo Sapiens
HTNSYGIIR

SEQ ID NO: 47671 - protein, 9 aa, Homo Sapiens
HVFLRTTGR

SEQ ID NO: 47672 - protein, 9 aa, Homo Sapiens
HVHEPNPLR

SEQ ID NO: 47673 - protein, 9 aa, Homo Sapiens
HVKPLLQKR

SEQ ID NO: 47674 - protein, 9 aa, Homo Sapiens
HVKPSIMKR

SEQ ID NO: 47675 - protein, 9 aa, Homo Sapiens
HYMKFTKGR

SEQ ID NO: 47676 - protein, 9 aa, Homo Sapiens
HYVKDRFLR

SEQ ID NO: 47677 - protein, 9 aa, Homo Sapiens
HYVPKIYCR

SEQ ID NO: 47678 - protein, 9 aa, Homo Sapiens
HYYSYIIQR

SEQ ID NO: 47679 - protein, 9 aa, Homo Sapiens
IAFCGPHSR

SEQ ID NO: 47680 - protein, 9 aa, Homo Sapiens
IFETIVNNR

SEQ ID NO: 47681 - protein, 9 aa, Homo Sapiens
IFKGVFVHR

SEQ ID NO: 47682 - protein, 9 aa, Homo Sapiens
IFPSRICHR

SEQ ID NO: 47683 - protein, 9 aa, Homo Sapiens
IFYTAIVNR

SEQ ID NO: 47684 - protein, 9 aa, Homo Sapiens
IGYAPYVNR

SEQ ID NO: 47685 - protein, 9 aa, Homo Sapiens
IPRTPSSFR

SEQ ID NO: 47686 - protein, 9 aa, Homo Sapiens
ISRDNWHKR

SEQ ID NO: 47687 - protein, 9 aa, Homo Sapiens
ISSGAVVHR

SEQ ID NO: 47688 - protein, 9 aa, Homo Sapiens
ITQIEHEVS

SEQ ID NO: 47689 - protein, 9 aa, Homo Sapiens
ITQRELVSR

SEQ ID NO: 47690 - protein, 9 aa, Homo Sapiens
ITTVPPNLR

SEQ ID NO: 47691 - protein, 9 aa, Homo Sapiens
ITYLMEHKR

SEQ ID NO: 47692 - protein, 9 aa, Homo Sapiens
IVKPPASAR

SEQ ID NO: 47693 - protein, 9 aa, Homo Sapiens
IVNENLVER

SEQ ID NO: 47694 - protein, 9 aa, Homo Sapiens
IVNHPKVGR

SEQ ID NO: 47695 - protein, 9 aa, Homo Sapiens
IVQAVSAHR

SEQ ID NO: 47696 - protein, 9 aa, Homo Sapiens
IYKAISSNR

SEQ ID NO: 47697 - protein, 9 aa, Homo Sapiens
IYQDSFEQR

SEQ ID NO: 47698 - protein, 9 aa, Homo Sapiens
IYQLIEISR

SEQ ID NO: 47699 - protein, 9 aa, Homo Sapiens
IYSGYIRNR

SEQ ID NO: 47700 - protein, 9 aa, Homo Sapiens
KADPPLPAR

SEQ ID NO: 47701 - protein, 9 aa, Homo Sapiens
KTKEGYYYR

SEQ ID NO: 47702 - protein, 9 aa, Homo Sapiens
LAAEPKVNR

SEQ ID NO: 47703 - protein, 9 aa, Homo Sapiens
LAKLNQVAR

SEQ ID NO: 47704 - protein, 9 aa, Homo Sapiens
LAQFHFTNR

SEQ ID NO: 47705 - protein, 9 aa, Homo Sapiens
LARDVYVGR

SEQ ID NO: 47706 - protein, 9 aa, Homo Sapiens
LAWHPTCGR

SEQ ID NO: 47707 - protein, 9 aa, Homo Sapiens
LFKELHTGR

SEQ ID NO: 47708 - protein, 9 aa, Homo Sapiens
LINNKIANR

SEQ ID NO: 47709 - protein, 9 aa, Homo Sapiens
LLSQLKGPR

SEQ ID NO: 47710 - protein, 9 aa, Homo Sapiens
LMQQQKSFR

SEQ ID NO: 47711 - protein, 9 aa, Homo Sapiens
LNAESRVNR

SEQ ID NO: 47712 - protein, 9 aa, Homo Sapiens
LNYVPFAER

SEQ ID NO: 47713 - protein, 9 aa, Homo Sapiens
LPQGHFQER

SEQ ID NO: 47714 - protein, 9 aa, Homo Sapiens
LQIDNARLA

SEQ ID NO: 47715 - protein, 9 aa, Homo Sapiens
LSNRPIMFR

SEQ ID NO: 47716 - protein, 9 aa, Homo Sapiens
LVATHDYYR

SEQ ID NO: 47717 - protein, 9 aa, Homo Sapiens
LVQEKIQKR

SEQ ID NO: 47718 - protein, 9 aa, Homo Sapiens
LVREIRQYR

SEQ ID NO: 47719 - protein, 9 aa, Homo Sapiens
LYKTPCTKR

SEQ ID NO: 47720 - protein, 9 aa, Homo Sapiens
LYQIITVER

SEQ ID NO: 47721 - protein, 9 aa, Homo Sapiens
LYRKMEIYR

SEQ ID NO: 47722 - protein, 9 aa, Homo Sapiens
MAFQGISER

SEQ ID NO: 47723 - protein, 9 aa, Homo Sapiens
MALGFAWKR

SEQ ID NO: 47724 - protein, 9 aa, Homo Sapiens
MAMLVTQAR

SEQ ID NO: 47725 - protein, 9 aa, Homo Sapiens
MANSFVGTR

SEQ ID NO: 47726 - protein, 9 aa, Homo Sapiens
MASKPLHVR

SEQ ID NO: 47727 - protein, 9 aa, Homo Sapiens
MASNSIFDS

SEQ ID NO: 47728 - protein, 9 aa, Homo Sapiens
MATFPVAPR

SEQ ID NO: 47729 - protein, 9 aa, Homo Sapiens
MATGFIWSR

SEQ ID NO: 47730 - protein, 9 aa, Homo Sapiens
MATKPLHVR

SEQ ID NO: 47731 - protein, 9 aa, Homo Sapiens
MFEYLAPPR

SEQ ID NO: 47732 - protein, 9 aa, Homo Sapiens
MFSGTHVER

SEQ ID NO: 47733 - protein, 9 aa, Homo Sapiens
MMMSYAAER

SEQ ID NO: 47734 - protein, 9 aa, Homo Sapiens
MNFNPIISR

SEQ ID NO: 47735 - protein, 9 aa, Homo Sapiens
MPKDIQLAR

SEQ ID NO: 47736 - protein, 9 aa, Homo Sapiens
MPWGDPNYR

SEQ ID NO: 47737 - protein, 9 aa, Homo Sapiens
MSASKIVCR

SEQ ID NO: 47738 - protein, 9 aa, Homo Sapiens
MSKPSIAKR

SEQ ID NO: 47739 - protein, 9 aa, Homo Sapiens
MSQPIMVQR

SEQ ID NO: 47740 - protein, 9 aa, Homo Sapiens
MSQPQLHRR

SEQ ID NO: 47741 - protein, 9 aa, Homo Sapiens
MTHEVPVYR

SEQ ID NO: 47742 - protein, 9 aa, Homo Sapiens
MTLNPSTKR

SEQ ID NO: 47743 - protein, 9 aa, Homo Sapiens
MTNLPAVGR

SEQ ID NO: 47744 - protein, 9 aa, Homo Sapiens
MTNPPVEVR

SEQ ID NO: 47745 - protein, 9 aa, Homo Sapiens
MTNTPVVVR

SEQ ID NO: 47746 - protein, 9 aa, Homo Sapiens
MTSVPVKER

SEQ ID NO: 47747 - protein, 9 aa, Homo Sapiens
MVADVFSHR

SEQ ID NO: 47748 - protein, 9 aa, Homo Sapiens
MVEYITHNR

SEQ ID NO: 47749 - protein, 9 aa, Homo Sapiens
MVKFGGSGR

SEQ ID NO: 47750 - protein, 9 aa, Homo Sapiens
MVLAHVTNR

SEQ ID NO: 47751 - protein, 9 aa, Homo Sapiens
MVMDKKHFK

SEQ ID NO: 47752 - protein, 9 aa, Homo Sapiens
MVNLLQIVR

SEQ ID NO: 47753 - protein, 9 aa, Homo Sapiens
MVNVPKTRR

SEQ ID NO: 47754 - protein, 9 aa, Homo Sapiens
MVQNRVFLR

SEQ ID NO: 47755 - protein, 9 aa, Homo Sapiens
MYCDKMFHR

SEQ ID NO: 47756 - protein, 9 aa, Homo Sapiens
MYCGKRFTR

SEQ ID NO: 47757 - protein, 9 aa, Homo Sapiens
MYFSAVMVR

SEQ ID NO: 47758 - protein, 9 aa, Homo Sapiens
MYKALLKQR

SEQ ID NO: 47759 - protein, 9 aa, Homo Sapiens
MYPDYFAKR

SEQ ID NO: 47760 - protein, 9 aa, Homo Sapiens
MYREVITQR

SEQ ID NO: 47761 - protein, 9 aa, Homo Sapiens
MYTCTLISR

SEQ ID NO: 47762 - protein, 9 aa, Homo Sapiens
NAKALSTLR

SEQ ID NO: 47763 - protein, 9 aa, Homo Sapiens
NAKDTIFHR

SEQ ID NO: 47764 - protein, 9 aa, Homo Sapiens
NAKDVLRKR

SEQ ID NO: 47765 - protein, 9 aa, Homo Sapiens
NANPLIYQR

SEQ ID NO: 47766 - protein, 9 aa, Homo Sapiens
NAQAPCWGR

SEQ ID NO: 47767 - protein, 9 aa, Homo Sapiens
NFMLIITHR

SEQ ID NO: 47768 - protein, 9 aa, Homo Sapiens
NFVGRLIGK

SEQ ID NO: 47769 - protein, 9 aa, Homo Sapiens
NGKQIYVGR

SEQ ID NO: 47770 - protein, 9 aa, Homo Sapiens
NIKNSSVPR

SEQ ID NO: 47771 - protein, 9 aa, Homo Sapiens
NLERDFFLR

SEQ ID NO: 47772 - protein, 9 aa, Homo Sapiens
NLHELRVLR

SEQ ID NO: 47773 - protein, 9 aa, Homo Sapiens
NLKPKSWVR

SEQ ID NO: 47774 - protein, 9 aa, Homo Sapiens
NLKPPQAKR

SEQ ID NO: 47775 - protein, 9 aa, Homo Sapiens
NLYFHDVGR

SEQ ID NO: 47776 - protein, 9 aa, Homo Sapiens
NMFDHPIPR

SEQ ID NO: 47777 - protein, 9 aa, Homo Sapiens
NMKHIQIHR

SEQ ID NO: 47778 - protein, 9 aa, Homo Sapiens
NMKSPPVER

SEQ ID NO: 47779 - protein, 9 aa, Homo Sapiens
NNKDLYVLR

SEQ ID NO: 47780 - protein, 9 aa, Homo Sapiens
NNKRWYFTR

SEQ ID NO: 47781 - protein, 9 aa, Homo Sapiens
NNLGNFINR

SEQ ID NO: 47782 - protein, 9 aa, Homo Sapiens
NNQSFYSNR

SEQ ID NO: 47783 - protein, 9 aa, Homo Sapiens
NNRELYIHR

SEQ ID NO: 47784 - protein, 9 aa, Homo Sapiens
NSFTPPCQR

SEQ ID NO: 47785 - protein, 9 aa, Homo Sapiens
NSKESYELR

SEQ ID NO: 47786 - protein, 9 aa, Homo Sapiens
NSNLIVHQR

SEQ ID NO: 47787 - protein, 9 aa, Homo Sapiens
NSNLVIHQR

SEQ ID NO: 47788 - protein, 9 aa, Homo Sapiens
NSQKKYFGR

SEQ ID NO: 47789 - protein, 9 aa, Homo Sapiens
NSQLIVHQR

SEQ ID NO: 47790 - protein, 9 aa, Homo Sapiens
NSREKIYNR

SEQ ID NO: 47791 - protein, 9 aa, Homo Sapiens
NTFGSFQCR

SEQ ID NO: 47792 - protein, 9 aa, Homo Sapiens
NTGNWMHIR

SEQ ID NO: 47793 - protein, 9 aa, Homo Sapiens
NTIKLIVGR

SEQ ID NO: 47794 - protein, 9 aa, Homo Sapiens
NTILRHLGR

SEQ ID NO: 47795 - protein, 9 aa, Homo Sapiens
NTNDFVTLR

SEQ ID NO: 47796 - protein, 9 aa, Homo Sapiens
NTQRSFFLR

SEQ ID NO: 47797 - protein, 9 aa, Homo Sapiens
NTQVLINCR

SEQ ID NO: 47798 - protein, 9 aa, Homo Sapiens
NTREPKLFR

SEQ ID NO: 47799 - protein, 9 aa, Homo Sapiens
NTSTSIVNR

SEQ ID NO: 47800 - protein, 9 aa, Homo Sapiens
NVARRIEFR

SEQ ID NO: 47801 - protein, 9 aa, Homo Sapiens
NVKELFSVR

SEQ ID NO: 47802 - protein, 9 aa, Homo Sapiens
NVKGPGLQR

SEQ ID NO: 47803 - protein, 9 aa, Homo Sapiens
NVKPLVTHR

SEQ ID NO: 47804 - protein, 9 aa, Homo Sapiens
NVNEVISNR

SEQ ID NO: 47805 - protein, 9 aa, Homo Sapiens
NVQRLKEYR

SEQ ID NO: 47806 - protein, 9 aa, Homo Sapiens
NVQVHFTER

SEQ ID NO: 47807 - protein, 9 aa, Homo Sapiens
NYAAPPSTR

SEQ ID NO: 47808 - protein, 9 aa, Homo Sapiens
NYGIPPVNR

SEQ ID NO: 47809 - protein, 9 aa, Homo Sapiens
NYGPGPSLR

SEQ ID NO: 47810 - protein, 9 aa, Homo Sapiens
NYIASVYVR

SEQ ID NO: 47811 - protein, 9 aa, Homo Sapiens
NYIGSFLAR

SEQ ID NO: 47812 - protein, 9 aa, Homo Sapiens
NYLNQHVNR

SEQ ID NO: 47813 - protein, 9 aa, Homo Sapiens
NYNQNFRGR

SEQ ID NO: 47814 - protein, 9 aa, Homo Sapiens
NYSQHVYYR

SEQ ID NO: 47815 - protein, 9 aa, Homo Sapiens
NYTEYVATR

SEQ ID NO: 47816 - protein, 9 aa, Homo Sapiens
NYTFTVQAR

SEQ ID NO: 47817 - protein, 9 aa, Homo Sapiens
NYVNKIKNR

SEQ ID NO: 47818 - protein, 9 aa, Homo Sapiens
QAFEREVGR

SEQ ID NO: 47819 - protein, 9 aa, Homo Sapiens
QAHAITVTR

SEQ ID NO: 47820 - protein, 9 aa, Homo Sapiens
QALERVFER

SEQ ID NO: 47821 - protein, 9 aa, Homo Sapiens
QAQKPSVPR

SEQ ID NO: 47822 - protein, 9 aa, Homo Sapiens
QAQLLFENR

SEQ ID NO: 47823 - protein, 9 aa, Homo Sapiens
QAWSLPTQR

SEQ ID NO: 47824 - protein, 9 aa, Homo Sapiens
QGYSDFINR

SEQ ID NO: 47825 - protein, 9 aa, Homo Sapiens
QLKAPHANR

SEQ ID NO: 47826 - protein, 9 aa, Homo Sapiens
QLYPRNFLR

SEQ ID NO: 47827 - protein, 9 aa, Homo Sapiens
QNFGPEVTR

SEQ ID NO: 47828 - protein, 9 aa, Homo Sapiens
QNIVPASQR

SEQ ID NO: 47829 - protein, 9 aa, Homo Sapiens
QNMGLPQNR

SEQ ID NO: 47830 - protein, 9 aa, Homo Sapiens
QNSPIYISR

SEQ ID NO: 47831 - protein, 9 aa, Homo Sapiens
QNSSIRVPR

SEQ ID NO: 47832 - protein, 9 aa, Homo Sapiens
QNTIPCLGR

SEQ ID NO: 47833 - protein, 9 aa, Homo Sapiens
QPFLKKWYR

SEQ ID NO: 47834 - protein, 9 aa, Homo Sapiens
QQLYWSHPR

SEQ ID NO: 47835 - protein, 9 aa, Homo Sapiens
QSLQSFWPR

SEQ ID NO: 47836 - protein, 9 aa, Homo Sapiens
QSNLIVHQR

SEQ ID NO: 47837 - protein, 9 aa, Homo Sapiens
QSNSLFNNR

SEQ ID NO: 47838 - protein, 9 aa, Homo Sapiens
QSSNLIQHR

SEQ ID NO: 47839 - protein, 9 aa, Homo Sapiens
QSYDNFSYR

SEQ ID NO: 47840 - protein, 9 aa, Homo Sapiens
QTADHRFLR

SEQ ID NO: 47841 - protein, 9 aa, Homo Sapiens
QTCGKQFLR

SEQ ID NO: 47842 - protein, 9 aa, Homo Sapiens
QTKFAATVR

SEQ ID NO: 47843 - protein, 9 aa, Homo Sapiens
QTKPVVVYR

SEQ ID NO: 47844 - protein, 9 aa, Homo Sapiens
QTKPVYVYR

SEQ ID NO: 47845 - protein, 9 aa, Homo Sapiens
QTLDAIRHR

SEQ ID NO: 47846 - protein, 9 aa, Homo Sapiens
QTMFHHFQR

SEQ ID NO: 47847 - protein, 9 aa, Homo Sapiens
QTNLVPYPR

SEQ ID NO: 47848 - protein, 9 aa, Homo Sapiens
QTQDNITVR

SEQ ID NO: 47849 - protein, 9 aa, Homo Sapiens
QTQSIYIPR

SEQ ID NO: 47850 - protein, 9 aa, Homo Sapiens
QTQSLHSLR

SEQ ID NO: 47851 - protein, 9 aa, Homo Sapiens
QVADVVVSR

SEQ ID NO: 47852 - protein, 9 aa, Homo Sapiens
QVKALGTER

SEQ ID NO: 47853 - protein, 9 aa, Homo Sapiens
QVKDVQKLR

SEQ ID NO: 47854 - protein, 9 aa, Homo Sapiens
QVKTWFQNR

SEQ ID NO: 47855 - protein, 9 aa, Homo Sapiens
QVLNRVVTR

SEQ ID NO: 47856 - protein, 9 aa, Homo Sapiens
QVMFRNYQR

SEQ ID NO: 47857 - protein, 9 aa, Homo Sapiens
QVNKAPKMR

SEQ ID NO: 47858 - protein, 9 aa, Homo Sapiens
QVQEWNRQR

SEQ ID NO: 47859 - protein, 9 aa, Homo Sapiens
QVQQILTSR

SEQ ID NO: 47860 - protein, 9 aa, Homo Sapiens
QYQNITVHR

SEQ ID NO: 47861 - protein, 9 aa, Homo Sapiens
RNLDHVYNR

SEQ ID NO: 47862 - protein, 9 aa, Homo Sapiens
RYSSAFTNR

SEQ ID NO: 47863 - protein, 9 aa, Homo Sapiens
SAALRAVYR

SEQ ID NO: 47864 - protein, 9 aa, Homo Sapiens
SADKIHITR

SEQ ID NO: 47865 - protein, 9 aa, Homo Sapiens
SAFVPSSGR

SEQ ID NO: 47866 - protein, 9 aa, Homo Sapiens
SAGGSFTVR

SEQ ID NO: 47867 - protein, 9 aa, Homo Sapiens
SAIHIRVFR

SEQ ID NO: 47868 - protein, 9 aa, Homo Sapiens
SAKEVLSAR

SEQ ID NO: 47869 - protein, 9 aa, Homo Sapiens
SALRPSTSR

SEQ ID NO: 47870 - protein, 9 aa, Homo Sapiens
SANDYFSER

SEQ ID NO: 47871 - protein, 9 aa, Homo Sapiens
SANLIVHQR

SEQ ID NO: 47872 - protein, 9 aa, Homo Sapiens
SANLVVHQR

SEQ ID NO: 47873 - protein, 9 aa, Homo Sapiens
SARELFAAR

SEQ ID NO: 47874 - protein, 9 aa, Homo Sapiens
SATLPVTFR

SEQ ID NO: 47875 - protein, 9 aa, Homo Sapiens
SFDIPKEKR

SEQ ID NO: 47876 - protein, 9 aa, Homo Sapiens
SFEKVPVGR

SEQ ID NO: 47877 - protein, 9 aa, Homo Sapiens
SFELKIVRR

SEQ ID NO: 47878 - protein, 9 aa, Homo Sapiens
SFETFINKR

SEQ ID NO: 47879 - protein, 9 aa, Homo Sapiens
SFFRREIKR

SEQ ID NO: 47880 - protein, 9 aa, Homo Sapiens
SFKDFAKSK

SEQ ID NO: 47881 - protein, 9 aa, Homo Sapiens
SFKDYIQER

SEQ ID NO: 47882 - protein, 9 aa, Homo Sapiens
SFKKPPLRR

SEQ ID NO: 47883 - protein, 9 aa, Homo Sapiens
SFQKVISRR

SEQ ID NO: 47884 - protein, 9 aa, Homo Sapiens
SFRKKYELR

SEQ ID NO: 47885 - protein, 9 aa, Homo Sapiens
SFTLKPRTI

SEQ ID NO: 47886 - protein, 9 aa, Homo Sapiens
SGYPPFVGR

SEQ ID NO: 47887 - protein, 9 aa, Homo Sapiens
SIMKWNRER

SEQ ID NO: 47888 - protein, 9 aa, Homo Sapiens
SINKPTSER

SEQ ID NO: 47889 - protein, 9 aa, Homo Sapiens
SIRDPVHNR

SEQ ID NO: 47890 - protein, 9 aa, Homo Sapiens
SIREPIANR

SEQ ID NO: 47891 - protein, 9 aa, Homo Sapiens
SLWKKTVYR

SEQ ID NO: 47892 - protein, 9 aa, Homo Sapiens
SMLEYFINR

SEQ ID NO: 47893 - protein, 9 aa, Homo Sapiens
SMRDHIDYR

SEQ ID NO: 47894 - protein, 9 aa, Homo Sapiens
SNDIPHVVR

SEQ ID NO: 47895 - protein, 9 aa, Homo Sapiens
SNFGPEVTR

SEQ ID NO: 47896 - protein, 9 aa, Homo Sapiens
SNFKRFHGR

SEQ ID NO: 47897 - protein, 9 aa, Homo Sapiens
SNKELAIER

SEQ ID NO: 47898 - protein, 9 aa, Homo Sapiens
SNNTPQLNR

SEQ ID NO: 47899 - protein, 9 aa, Homo Sapiens
SNTIPVKTR

SEQ ID NO: 47900 - protein, 9 aa, Homo Sapiens
SSGPGPSLR

SEQ ID NO: 47901 - protein, 9 aa, Homo Sapiens
SSIRPISER

SEQ ID NO: 47902 - protein, 9 aa, Homo Sapiens
SSKNIFTER

SEQ ID NO: 47903 - protein, 9 aa, Homo Sapiens
SSKPLYLAR

SEQ ID NO: 47904 - protein, 9 aa, Homo Sapiens
SSLDRLYSR

SEQ ID NO: 47905 - protein, 9 aa, Homo Sapiens
SSLRIAATR

SEQ ID NO: 47906 - protein, 9 aa, Homo Sapiens
SSYFRIHER

SEQ ID NO: 47907 - protein, 9 aa, Homo Sapiens
STARHLYLR

SEQ ID NO: 47908 - protein, 9 aa, Homo Sapiens
STFLPQCNR

SEQ ID NO: 47909 - protein, 9 aa, Homo Sapiens
STHFRIHER

SEQ ID NO: 47910 - protein, 9 aa, Homo Sapiens
STIPFHYKR

SEQ ID NO: 47911 - protein, 9 aa, Homo Sapiens
STKFPAYER

SEQ ID NO: 47912 - protein, 9 aa, Homo Sapiens
STKGLNLPR

SEQ ID NO: 47913 - protein, 9 aa, Homo Sapiens
STKSISFTR

SEQ ID NO: 47914 - protein, 9 aa, Homo Sapiens
STLAQLKQR

SEQ ID NO: 47915 - protein, 9 aa, Homo Sapiens
STLESIYQR

SEQ ID NO: 47916 - protein, 9 aa, Homo Sapiens
STLSPIAPR

SEQ ID NO: 47917 - protein, 9 aa, Homo Sapiens
STNPFRPQK

SEQ ID NO: 47918 - protein, 9 aa, Homo Sapiens
STQLFCSTR

SEQ ID NO: 47919 - protein, 9 aa, Homo Sapiens
STQLTIHQR

SEQ ID NO: 47920 - protein, 9 aa, Homo Sapiens
STRPPSVTR

SEQ ID NO: 47921 - protein, 9 aa, Homo Sapiens
STSKRHWLR

SEQ ID NO: 47922 - protein, 9 aa, Homo Sapiens
STWQRNAMR

SEQ ID NO: 47923 - protein, 9 aa, Homo Sapiens
STYIRLYGR

SEQ ID NO: 47924 - protein, 9 aa, Homo Sapiens
STYLLSVYR

SEQ ID NO: 47925 - protein, 9 aa, Homo Sapiens
SVDRPIIDR

SEQ ID NO: 47926 - protein, 9 aa, Homo Sapiens
SVKDYCFAR

SEQ ID NO: 47927 - protein, 9 aa, Homo Sapiens
SVKEIYNEK

SEQ ID NO: 47928 - protein, 9 aa, Homo Sapiens
SVKEVALGR

SEQ ID NO: 47929 - protein, 9 aa, Homo Sapiens
SVKFGATLR

SEQ ID NO: 47930 - protein, 9 aa, Homo Sapiens
SVKSITNPR

SEQ ID NO: 47931 - protein, 9 aa, Homo Sapiens
SVLDYFSER

SEQ ID NO: 47932 - protein, 9 aa, Homo Sapiens
SVLENFVGR

SEQ ID NO: 47933 - protein, 9 aa, Homo Sapiens
SVLNFATNR

SEQ ID NO: 47934 - protein, 9 aa, Homo Sapiens
SVNSHIYQR

SEQ ID NO: 47935 - protein, 9 aa, Homo Sapiens
SVQGIIIYR

SEQ ID NO: 47936 - protein, 9 aa, Homo Sapiens
SVYQIKVHR

SEQ ID NO: 47937 - protein, 9 aa, Homo Sapiens
SYAELLTHR

SEQ ID NO: 47938 - protein, 9 aa, Homo Sapiens
SYAEYIASR

SEQ ID NO: 47939 - protein, 9 aa, Homo Sapiens
SYAEYLAHR

SEQ ID NO: 47940 - protein, 9 aa, Homo Sapiens
SYCEPPSYR

SEQ ID NO: 47941 - protein, 9 aa, Homo Sapiens
SYDLVIHQR

SEQ ID NO: 47942 - protein, 9 aa, Homo Sapiens
SYFGGVCSR

SEQ ID NO: 47943 - protein, 9 aa, Homo Sapiens
SYFSFSRNR

SEQ ID NO: 47944 - protein, 9 aa, Homo Sapiens
SYGEVFKVR

SEQ ID NO: 47945 - protein, 9 aa, Homo Sapiens
SYGPGPSLR

SEQ ID NO: 47946 - protein, 9 aa, Homo Sapiens
SYGSLARFR

SEQ ID NO: 47947 - protein, 9 aa, Homo Sapiens
SYIDEQFER

SEQ ID NO: 47948 - protein, 9 aa, Homo Sapiens
SYIDRLAPR

SEQ ID NO: 47949 - protein, 9 aa, Homo Sapiens
SYIKLQTNR

SEQ ID NO: 47950 - protein, 9 aa, Homo Sapiens
SYKDFSESR

SEQ ID NO: 47951 - protein, 9 aa, Homo Sapiens
SYKGSISYR

SEQ ID NO: 47952 - protein, 9 aa, Homo Sapiens
SYKGTPAMR

SEQ ID NO: 47953 - protein, 9 aa, Homo Sapiens
SYLDKFFSR

SEQ ID NO: 47954 - protein, 9 aa, Homo Sapiens
SYLGVAHQR

SEQ ID NO: 47955 - protein, 9 aa, Homo Sapiens
SYNYEIVNR

SEQ ID NO: 47956 - protein, 9 aa, Homo Sapiens
SYNYLGFAR

SEQ ID NO: 47957 - protein, 9 aa, Homo Sapiens
SYREQWSQR

SEQ ID NO: 47958 - protein, 9 aa, Homo Sapiens
SYRKFLNLR

SEQ ID NO: 47959 - protein, 9 aa, Homo Sapiens
SYSLFTALR

SEQ ID NO: 47960 - protein, 9 aa, Homo Sapiens
SYSPTICTR

SEQ ID NO: 47961 - protein, 9 aa, Homo Sapiens
SYVELSQYR

SEQ ID NO: 47962 - protein, 9 aa, Homo Sapiens
TAAQFIYSR

SEQ ID NO: 47963 - protein, 9 aa, Homo Sapiens
TAICPLKER

SEQ ID NO: 47964 - protein, 9 aa, Homo Sapiens
TALKVASTR

SEQ ID NO: 47965 - protein, 9 aa, Homo Sapiens
TAMLPSSQR

SEQ ID NO: 47966 - protein, 9 aa, Homo Sapiens
TAMPPGTAR

SEQ ID NO: 47967 - protein, 9 aa, Homo Sapiens
TAYRPDWNR

SEQ ID NO: 47968 - protein, 9 aa, Homo Sapiens
TAYRPPALR

SEQ ID NO: 47969 - protein, 9 aa, Homo Sapiens
TFEALKRNR

SEQ ID NO: 47970 - protein, 9 aa, Homo Sapiens
TFEHPNVVR

SEQ ID NO: 47971 - protein, 9 aa, Homo Sapiens
TFGKVKVGK

SEQ ID NO: 47972 - protein, 9 aa, Homo Sapiens
TFKDYVRDR

SEQ ID NO: 47973 - protein, 9 aa, Homo Sapiens
TFVAPMKHR

SEQ ID NO: 47974 - protein, 9 aa, Homo Sapiens
TFYSISQER

SEQ ID NO: 47975 - protein, 9 aa, Homo Sapiens
TIFKPQSKR

SEQ ID NO: 47976 - protein, 9 aa, Homo Sapiens
TLCKPLVPR

SEQ ID NO: 47977 - protein, 9 aa, Homo Sapiens
TLRDLIFKR

SEQ ID NO: 47978 - protein, 9 aa, Homo Sapiens
TNRTPEFLR

SEQ ID NO: 47979 - protein, 9 aa, Homo Sapiens
TNTVPKLYR

SEQ ID NO: 47980 - protein, 9 aa, Homo Sapiens
TSIRWSLGR

SEQ ID NO: 47981 - protein, 9 aa, Homo Sapiens
TSKPPVQYR

SEQ ID NO: 47982 - protein, 9 aa, Homo Sapiens
TSKPPVTLR

SEQ ID NO: 47983 - protein, 9 aa, Homo Sapiens
TSKTYVISR

SEQ ID NO: 47984 - protein, 9 aa, Homo Sapiens
TSNMPVAAR

SEQ ID NO: 47985 - protein, 9 aa, Homo Sapiens
TSRNITEAR

SEQ ID NO: 47986 - protein, 9 aa, Homo Sapiens
TSTVPLVGR

SEQ ID NO: 47987 - protein, 9 aa, Homo Sapiens
TSWVPLVSR

SEQ ID NO: 47988 - protein, 9 aa, Homo Sapiens
TTEVPPPPR

SEQ ID NO: 47989 - protein, 9 aa, Homo Sapiens
TTFGPKSQR

SEQ ID NO: 47990 - protein, 9 aa, Homo Sapiens
TTITAPPSR

SEQ ID NO: 47991 - protein, 9 aa, Homo Sapiens
TTKMSLNER

SEQ ID NO: 47992 - protein, 9 aa, Homo Sapiens
TTKPAIIFR

SEQ ID NO: 47993 - protein, 9 aa, Homo Sapiens
TTKPVNWLK

SEQ ID NO: 47994 - protein, 9 aa, Homo Sapiens
TTKSLFVGH

SEQ ID NO: 47995 - protein, 9 aa, Homo Sapiens
TTLTKIALR

SEQ ID NO: 47996 - protein, 9 aa, Homo Sapiens
TTRDSPVLR

SEQ ID NO: 47997 - protein, 9 aa, Homo Sapiens
TTRPTWMPR

SEQ ID NO: 47998 - protein, 9 aa, Homo Sapiens
TTSIPKCYR

SEQ ID NO: 47999 - protein, 9 aa, Homo Sapiens
TTTEHRFFR

SEQ ID NO: 48000 - protein, 9 aa, Homo Sapiens
TTVEGLITR

SEQ ID NO: 48001 - protein, 9 aa, Homo Sapiens
TVAAVFRGR

SEQ ID NO: 48002 - protein, 9 aa, Homo Sapiens
TVATLPRGR

SEQ ID NO: 48003 - protein, 9 aa, Homo Sapiens
TVGGWVSTR

SEQ ID NO: 48004 - protein, 9 aa, Homo Sapiens
TVISRVIGR

SEQ ID NO: 48005 - protein, 9 aa, Homo Sapiens
TVKVQIHSR

SEQ ID NO: 48006 - protein, 9 aa, Homo Sapiens
TVLGYFIGR

SEQ ID NO: 48007 - protein, 9 aa, Homo Sapiens
TVLIIKSLR

SEQ ID NO: 48008 - protein, 9 aa, Homo Sapiens
TVLQQQYNR

SEQ ID NO: 48009 - protein, 9 aa, Homo Sapiens
TVLQYVVGR

SEQ ID NO: 48010 - protein, 9 aa, Homo Sapiens
TVMRLIEKR

SEQ ID NO: 48011 - protein, 9 aa, Homo Sapiens
TVRDAVVGR

SEQ ID NO: 48012 - protein, 9 aa, Homo Sapiens
TVRDHLVGR

SEQ ID NO: 48013 - protein, 9 aa, Homo Sapiens
TYANIAMVR

SEQ ID NO: 48014 - protein, 9 aa, Homo Sapiens
TYCGKAFTR

SEQ ID NO: 48015 - protein, 9 aa, Homo Sapiens
TYFPSFLSR

SEQ ID NO: 48016 - protein, 9 aa, Homo Sapiens
TYGEVFKAR

SEQ ID NO: 48017 - protein, 9 aa, Homo Sapiens
TYISAIRER

SEQ ID NO: 48018 - protein, 9 aa, Homo Sapiens
TYIYFKRLK

SEQ ID NO: 48019 - protein, 9 aa, Homo Sapiens
TYKFCFSNR

SEQ ID NO: 48020 - protein, 9 aa, Homo Sapiens
TYKQGILAR

SEQ ID NO: 48021 - protein, 9 aa, Homo Sapiens
TYLATFHQR

SEQ ID NO: 48022 - protein, 9 aa, Homo Sapiens
TYLEPGIGR

SEQ ID NO: 48023 - protein, 9 aa, Homo Sapiens
TYLGEFSLR

SEQ ID NO: 48024 - protein, 9 aa, Homo Sapiens
TYLTKFIAR

SEQ ID NO: 48025 - protein, 9 aa, Homo Sapiens
TYNEHITKR

SEQ ID NO: 48026 - protein, 9 aa, Homo Sapiens
TYRLGMAAR

SEQ ID NO: 48027 - protein, 9 aa, Homo Sapiens
TYSGHFTMR

SEQ ID NO: 48028 - protein, 9 aa, Homo Sapiens
TYYGSFVTR

SEQ ID NO: 48029 - protein, 9 aa, Homo Sapiens
TYYPPPRLR

SEQ ID NO: 48030 - protein, 9 aa, Homo Sapiens
VAFKPTSNR

SEQ ID NO: 48031 - protein, 9 aa, Homo Sapiens
VAMEPVSTR

SEQ ID NO: 48032 - protein, 9 aa, Homo Sapiens
VANSAFVER

SEQ ID NO: 48033 - protein, 9 aa, Homo Sapiens
VASTPISQR

SEQ ID NO: 48034 - protein, 9 aa, Homo Sapiens
VFKEEGVLR

SEQ ID NO: 48035 - protein, 9 aa, Homo Sapiens
VPFGAGRHR

SEQ ID NO: 48036 - protein, 9 aa, Homo Sapiens
VPIGYHVPR

SEQ ID NO: 48037 - protein, 9 aa, Homo Sapiens
VSNKWLHER

SEQ ID NO: 48038 - protein, 9 aa, Homo Sapiens
VTQAPISAR

SEQ ID NO: 48039 - protein, 9 aa, Homo Sapiens
VVAPRLNSR

SEQ ID NO: 48040 - protein, 9 aa, Homo Sapiens
VVMTPPRNR

SEQ ID NO: 48041 - protein, 9 aa, Homo Sapiens
VYIEKFVRR

SEQ ID NO: 48042 - protein, 9 aa, Homo Sapiens
VYIERLRHR

SEQ ID NO: 48043 - protein, 9 aa, Homo Sapiens
VYNEYISHR

SEQ ID NO: 48044 - protein, 9 aa, Homo Sapiens
WAQTVVVGR

SEQ ID NO: 48045 - protein, 9 aa, Homo Sapiens
WYLGTIKKR

SEQ ID NO: 48046 - protein, 9 aa, Homo Sapiens
WYSGVNRPR

SEQ ID NO: 48047 - protein, 9 aa, Homo Sapiens
YAAFVQTHR

SEQ ID NO: 48048 - protein, 9 aa, Homo Sapiens
YAKDIGFIK

SEQ ID NO: 48049 - protein, 9 aa, Homo Sapiens
YALAVSKQR

SEQ ID NO: 48050 - protein, 9 aa, Homo Sapiens
YALDPSFPR

SEQ ID NO: 48051 - protein, 9 aa, Homo Sapiens
YALPHAILR

SEQ ID NO: 48052 - protein, 9 aa, Homo Sapiens
YARLIDYAR

SEQ ID NO: 48053 - protein, 9 aa, Homo Sapiens
YFDNLLSQR

SEQ ID NO: 48054 - protein, 9 aa, Homo Sapiens
YFFYNKRLK

SEQ ID NO: 48055 - protein, 9 aa, Homo Sapiens
YFIDKLALR

SEQ ID NO: 48056 - protein, 9 aa, Homo Sapiens
YFKKKFAER

SEQ ID NO: 48057 - protein, 9 aa, Homo Sapiens
YFKPPDKKR

SEQ ID NO: 48058 - protein, 9 aa, Homo Sapiens
YFLGYMVHR

SEQ ID NO: 48059 - protein, 9 aa, Homo Sapiens
YIHIRIQQR

SEQ ID NO: 48060 - protein, 9 aa, Homo Sapiens
YIRAKYVER

SEQ ID NO: 48061 - protein, 9 aa, Homo Sapiens
YLKEREEFR

SEQ ID NO: 48062 - protein, 9 aa, Homo Sapiens
YMLDKINRR

SEQ ID NO: 48063 - protein, 9 aa, Homo Sapiens
YNKYINVKK

SEQ ID NO: 48064 - protein, 9 aa, Homo Sapiens
YPNKPPTVR

SEQ ID NO: 48065 - protein, 9 aa, Homo Sapiens
YPYSPPAFR

SEQ ID NO: 48066 - protein, 9 aa, Homo Sapiens
YPYSPPTFR

SEQ ID NO: 48067 - protein, 9 aa, Homo Sapiens
YSHESLYHR

SEQ ID NO: 48068 - protein, 9 aa, Homo Sapiens
YSLGSIYTR

SEQ ID NO: 48069 - protein, 9 aa, Homo Sapiens
YSLSPFEQR

SEQ ID NO: 48070 - protein, 9 aa, Homo Sapiens
YSNKEIFLR

SEQ ID NO: 48071 - protein, 9 aa, Homo Sapiens
YSNSPEALR

SEQ ID NO: 48072 - protein, 9 aa, Homo Sapiens
YSSDVIQHR

SEQ ID NO: 48073 - protein, 9 aa, Homo Sapiens
YSTYVLHER

SEQ ID NO: 48074 - protein, 9 aa, Homo Sapiens
YSWDIVVQR

SEQ ID NO: 48075 - protein, 9 aa, Homo Sapiens
YTDKIKYPR

SEQ ID NO: 48076 - protein, 9 aa, Homo Sapiens
YTLDFPESR

SEQ ID NO: 48077 - protein, 9 aa, Homo Sapiens
YTMKVFAKR

SEQ ID NO: 48078 - protein, 9 aa, Homo Sapiens
YTQPGPGYR

SEQ ID NO: 48079 - protein, 9 aa, Homo Sapiens
YVANVGTNR

SEQ ID NO: 48080 - protein, 9 aa, Homo Sapiens
YVFPKPFNR

SEQ ID NO: 48081 - protein, 9 aa, Homo Sapiens
YVKDLVVQR

SEQ ID NO: 48082 - protein, 9 aa, Homo Sapiens
YVKEQFAWR

SEQ ID NO: 48083 - protein, 9 aa, Homo Sapiens
YVKLSVGKK

SEQ ID NO: 48084 - protein, 9 aa, Homo Sapiens
YVQRFHYSR

SEQ ID NO: 48085 - protein, 9 aa, Homo Sapiens
YVQRYRYFR

SEQ ID NO: 48086 - protein, 9 aa, Homo Sapiens
YVRPSPAKR

SEQ ID NO: 48087 - protein, 9 aa, Homo Sapiens
YYALVVRGR

SEQ ID NO: 48088 - protein, 9 aa, Homo Sapiens
YYFLPLKKR

SEQ ID NO: 48089 - protein, 9 aa, Homo Sapiens
YYIVLITKR

SEQ ID NO: 48090 - protein, 9 aa, Homo Sapiens
YYIYELQKR

SEQ ID NO: 48091 - protein, 9 aa, Homo Sapiens
YYKPWFFKH

SEQ ID NO: 48092 - protein, 9 aa, Homo Sapiens
YYMRRPYGR

SEQ ID NO: 48093 - protein, 9 aa, Homo Sapiens
YYNGCIFHR

SEQ ID NO: 48094 - protein, 9 aa, Homo Sapiens
YYNGIGVKR

SEQ ID NO: 48095 - protein, 9 aa, Homo Sapiens
YYPSIVANR

SEQ ID NO: 48096 - protein, 9 aa, Homo Sapiens
YYRPPRPPK

SEQ ID NO: 48097 - protein, 9 aa, Homo Sapiens
YYSLLTAPR

SEQ ID NO: 48098 - protein, 9 aa, Homo Sapiens
YYTDYVATR

SEQ ID NO: 48099 - protein, 9 aa, Homo Sapiens
YYYHNVKCR

SEQ ID NO: 48100 - protein, 10 aa, Homo Sapiens
ATCDFPLLNR

SEQ ID NO: 48101 - protein, 10 aa, Homo Sapiens
AVLDLQLRSA

SEQ ID NO: 48102 - protein, 10 aa, Homo Sapiens
CAAPGPASYR

SEQ ID NO: 48103 - protein, 10 aa, Homo Sapiens
CTADWLPAGR

SEQ ID NO: 48104 - protein, 10 aa, Homo Sapiens
DAGSVPHVNR

SEQ ID NO: 48105 - protein, 10 aa, Homo Sapiens
DAVKPGVRYR

SEQ ID NO: 48106 - protein, 10 aa, Homo Sapiens
DFIASGRTGR

SEQ ID NO: 48107 - protein, 10 aa, Homo Sapiens
DFISCDRTGR

SEQ ID NO: 48108 - protein, 10 aa, Homo Sapiens
DFLELQRRYR

SEQ ID NO: 48109 - protein, 10 aa, Homo Sapiens
DFLKVLNRAR

SEQ ID NO: 48110 - protein, 10 aa, Homo Sapiens
DFQIEKKIGR

SEQ ID NO: 48111 - protein, 10 aa, Homo Sapiens
DFRRAPFAGR

SEQ ID NO: 48112 - protein, 10 aa, Homo Sapiens
DFSCGGRVNR

SEQ ID NO: 48113 - protein, 10 aa, Homo Sapiens
DFSQNTRVPR

SEQ ID NO: 48114 - protein, 10 aa, Homo Sapiens
DIYDRKNMPR

SEQ ID NO: 48115 - protein, 10 aa, Homo Sapiens
DSFPERRAPR

SEQ ID NO: 48116 - protein, 10 aa, Homo Sapiens
DSRDGKFIHR

SEQ ID NO: 48117 - protein, 10 aa, Homo Sapiens
DTMRLQPIGR

SEQ ID NO: 48118 - protein, 10 aa, Homo Sapiens
DTRDKGLVNR

SEQ ID NO: 48119 - protein, 10 aa, Homo Sapiens
DVRPFAPKER

SEQ ID NO: 48120 - protein, 10 aa, Homo Sapiens
DYFEGATSQR

SEQ ID NO: 48121 - protein, 10 aa, Homo Sapiens
DYFTPQGEFR

SEQ ID NO: 48122 - protein, 10 aa, Homo Sapiens
DYGFPERKER

SEQ ID NO: 48123 - protein, 10 aa, Homo Sapiens
DYIHIRIQQR

SEQ ID NO: 48124 - protein, 10 aa, Homo Sapiens
DYKVASPALR

SEQ ID NO: 48125 - protein, 10 aa, Homo Sapiens
DYKVVSPALR

SEQ ID NO: 48126 - protein, 10 aa, Homo Sapiens
DYLMKILTER

SEQ ID NO: 48127 - protein, 10 aa, Homo Sapiens
DYLVPILAPR

SEQ ID NO: 48128 - protein, 10 aa, Homo Sapiens
DYPDYKYRPR

SEQ ID NO: 48129 - protein, 10 aa, Homo Sapiens
DYQLVRKLGR

SEQ ID NO: 48130 - protein, 10 aa, Homo Sapiens
DYQQTIKKYR

SEQ ID NO: 48131 - protein, 10 aa, Homo Sapiens
DYVVGARTFR

SEQ ID NO: 48132 - protein, 10 aa, Homo Sapiens
DYYEVLGVQR

SEQ ID NO: 48133 - protein, 10 aa, Homo Sapiens
DYYTPTGEFR

SEQ ID NO: 48134 - protein, 10 aa, Homo Sapiens
EAAAPGKRIR

SEQ ID NO: 48135 - protein, 10 aa, Homo Sapiens
EACDRLLAHR

SEQ ID NO: 48136 - protein, 10 aa, Homo Sapiens
EAFAIGARAR

SEQ ID NO: 48137 - protein, 10 aa, Homo Sapiens
EAFEHPNVVR

SEQ ID NO: 48138 - protein, 10 aa, Homo Sapiens
EAFPSQGTKR

SEQ ID NO: 48139 - protein, 10 aa, Homo Sapiens
EAIGPVHQNR

SEQ ID NO: 48140 - protein, 10 aa, Homo Sapiens
EAISLLNSER

SEQ ID NO: 48141 - protein, 10 aa, Homo Sapiens
EAKRPPGFDR

SEQ ID NO: 48142 - protein, 10 aa, Homo Sapiens
EALDSSWVSR

SEQ ID NO: 48143 - protein, 10 aa, Homo Sapiens
EALGEVMVSR

SEQ ID NO: 48144 - protein, 10 aa, Homo Sapiens
EALGSGLVSR

SEQ ID NO: 48145 - protein, 10 aa, Homo Sapiens
EALNFLHSKR

SEQ ID NO: 48146 - protein, 10 aa, Homo Sapiens
EALPENRLSR

SEQ ID NO: 48147 - protein, 10 aa, Homo Sapiens
EALSALTARL

SEQ ID NO: 48148 - protein, 10 aa, Homo Sapiens
EAMASIINRL

SEQ ID NO: 48149 - protein, 10 aa, Homo Sapiens
EAMCFDGVKR

SEQ ID NO: 48150 - protein, 10 aa, Homo Sapiens
EAMKLGAVKR

SEQ ID NO: 48151 - protein, 10 aa, Homo Sapiens
EANSNAVRFR

SEQ ID NO: 48152 - protein, 10 aa, Homo Sapiens
EAQAKVDVFR

SEQ ID NO: 48153 - protein, 10 aa, Homo Sapiens
EAQAWEQARL

SEQ ID NO: 48154 - protein, 10 aa, Homo Sapiens
EAQKPYLVQR

SEQ ID NO: 48155 - protein, 10 aa, Homo Sapiens
EAQQRRLLGR

SEQ ID NO: 48156 - protein, 10 aa, Homo Sapiens
EARAGVLAER

SEQ ID NO: 48157 - protein, 10 aa, Homo Sapiens
EARKQVEVFR

SEQ ID NO: 48158 - protein, 10 aa, Homo Sapiens
EATAGFTIGR

SEQ ID NO: 48159 - protein, 10 aa, Homo Sapiens
EATGGKYVPR

SEQ ID NO: 48160 - protein, 10 aa, Homo Sapiens
EATLGSGNLR

SEQ ID NO: 48161 - protein, 10 aa, Homo Sapiens
EAVHDLLRPR

SEQ ID NO: 48162 - protein, 10 aa, Homo Sapiens
EAWKLLKVGR

SEQ ID NO: 48163 - protein, 10 aa, Homo Sapiens
EAWLLPAVGR

SEQ ID NO: 48164 - protein, 10 aa, Homo Sapiens
EAYNETFSNR

SEQ ID NO: 48165 - protein, 10 aa, Homo Sapiens
EEQLQQIRAE

SEQ ID NO: 48166 - protein, 10 aa, Homo Sapiens
EFDDRRGVLR

SEQ ID NO: 48167 - protein, 10 aa, Homo Sapiens
EFEEIMNRNR

SEQ ID NO: 48168 - protein, 10 aa, Homo Sapiens
EFFDEERRAR

SEQ ID NO: 48169 - protein, 10 aa, Homo Sapiens
EFGEPLPKRL

SEQ ID NO: 48170 - protein, 10 aa, Homo Sapiens
EFIDVIVGNR

SEQ ID NO: 48171 - protein, 10 aa, Homo Sapiens
EFIHINNKLR

SEQ ID NO: 48172 - protein, 10 aa, Homo Sapiens
EFINEKGVKR

SEQ ID NO: 48173 - protein, 10 aa, Homo Sapiens
EFKAVQQVQR

SEQ ID NO: 48174 - protein, 10 aa, Homo Sapiens
EFKEVPERGR

SEQ ID NO: 48175 - protein, 10 aa, Homo Sapiens
EFLAKGKRFR

SEQ ID NO: 48176 - protein, 10 aa, Homo Sapiens
EFLDIMKRNR

SEQ ID NO: 48177 - protein, 10 aa, Homo Sapiens
EFLQVPAVTR

SEQ ID NO: 48178 - protein, 10 aa, Homo Sapiens
EFLTKPEVAR

SEQ ID NO: 48179 - protein, 10 aa, Homo Sapiens
EFPHPPKRLR

SEQ ID NO: 48180 - protein, 10 aa, Homo Sapiens
EFPQPPGAAR

SEQ ID NO: 48181 - protein, 10 aa, Homo Sapiens
EFQFRGGFGR

SEQ ID NO: 48182 - protein, 10 aa, Homo Sapiens
EFQVIMGRKR

SEQ ID NO: 48183 - protein, 10 aa, Homo Sapiens
EFRDKRIAKR

SEQ ID NO: 48184 - protein, 10 aa, Homo Sapiens
EFRDYPPVLR

SEQ ID NO: 48185 - protein, 10 aa, Homo Sapiens
EFREEAYHSR

SEQ ID NO: 48186 - protein, 10 aa, Homo Sapiens
EFREGIVVDR

SEQ ID NO: 48187 - protein, 10 aa, Homo Sapiens
EFRKLCDNLR

SEQ ID NO: 48188 - protein, 10 aa, Homo Sapiens
EFRNFKIIYR

SEQ ID NO: 48189 - protein, 10 aa, Homo Sapiens
EFRSGKVAFR

SEQ ID NO: 48190 - protein, 10 aa, Homo Sapiens
EFTNAIRREK

SEQ ID NO: 48191 - protein, 10 aa, Homo Sapiens
EGGGRLQALR

SEQ ID NO: 48192 - protein, 10 aa, Homo Sapiens
EGRDIPIVHR

SEQ ID NO: 48193 - protein, 10 aa, Homo Sapiens
EGRPTIEVRR

SEQ ID NO: 48194 - protein, 10 aa, Homo Sapiens
EIASVAYRYR

SEQ ID NO: 48195 - protein, 10 aa, Homo Sapiens
EIKDFLLTAR

SEQ ID NO: 48196 - protein, 10 aa, Homo Sapiens
EIKDIHVPPR

SEQ ID NO: 48197 - protein, 10 aa, Homo Sapiens
EIKGFYDPPR

SEQ ID NO: 48198 - protein, 10 aa, Homo Sapiens
EIKKPPVSER

SEQ ID NO: 48199 - protein, 10 aa, Homo Sapiens
EILEVLRHPR

SEQ ID NO: 48200 - protein, 10 aa, Homo Sapiens
EILHKIVKYR

SEQ ID NO: 48201 - protein, 10 aa, Homo Sapiens
EILSRSIVKR

SEQ ID NO: 48202 - protein, 10 aa, Homo Sapiens
EINDVPLTCR

SEQ ID NO: 48203 - protein, 10 aa, Homo Sapiens
EIQQAGERLR

SEQ ID NO: 48204 - protein, 10 aa, Homo Sapiens
EIRQQIPVFR

SEQ ID NO: 48205 - protein, 10 aa, Homo Sapiens
EIRTITVVQR

SEQ ID NO: 48206 - protein, 10 aa, Homo Sapiens
EIYDRREYSR

SEQ ID NO: 48207 - protein, 10 aa, Homo Sapiens
ELADPTERFR

SEQ ID NO: 48208 - protein, 10 aa, Homo Sapiens
ELASIKNRQR

SEQ ID NO: 48209 - protein, 10 aa, Homo Sapiens
ELAYLERRER

SEQ ID NO: 48210 - protein, 10 aa, Homo Sapiens
ELISKAQSNR

SEQ ID NO: 48211 - protein, 10 aa, Homo Sapiens
ELMAGHLRNR

SEQ ID NO: 48212 - protein, 10 aa, Homo Sapiens
ELMDKPLTFR

SEQ ID NO: 48213 - protein, 10 aa, Homo Sapiens
ELMDLGKVRR

SEQ ID NO: 48214 - protein, 10 aa, Homo Sapiens
ELNVDSLITR

SEQ ID NO: 48215 - protein, 10 aa, Homo Sapiens
ELQAFAHHGR

SEQ ID NO: 48216 - protein, 10 aa, Homo Sapiens
ELQPGYIRSR

SEQ ID NO: 48217 - protein, 10 aa, Homo Sapiens
ELRERPFYGR

SEQ ID NO: 48218 - protein, 10 aa, Homo Sapiens
EMAIPFFTGR

SEQ ID NO: 48219 - protein, 10 aa, Homo Sapiens
EMFVGVGASR

SEQ ID NO: 48220 - protein, 10 aa, Homo Sapiens
EMRGPVPSSR

SEQ ID NO: 48221 - protein, 10 aa, Homo Sapiens
EMRNAQSIGR

SEQ ID NO: 48222 - protein, 10 aa, Homo Sapiens
ENNRPLLTRF

SEQ ID NO: 48223 - protein, 10 aa, Homo Sapiens
ENTRPKFLSR

SEQ ID NO: 48224 - protein, 10 aa, Homo Sapiens
ESFGPQPISR

SEQ ID NO: 48225 - protein, 10 aa, Homo Sapiens
ESFPGSFRGR

SEQ ID NO: 48226 - protein, 10 aa, Homo Sapiens
ESIGRVLAQR

SEQ ID NO: 48227 - protein, 10 aa, Homo Sapiens
ESLDPVIQCR

SEQ ID NO: 48228 - protein, 10 aa, Homo Sapiens
ESLKEIQRAR

SEQ ID NO: 48229 - protein, 10 aa, Homo Sapiens
ESLNFLIGRL

SEQ ID NO: 48230 - protein, 10 aa, Homo Sapiens
ESLPANQQPR

SEQ ID NO: 48231 - protein, 10 aa, Homo Sapiens
ESLPDQLVNR

SEQ ID NO: 48232 - protein, 10 aa, Homo Sapiens
ESLQQPLINR

SEQ ID NO: 48233 - protein, 10 aa, Homo Sapiens
ESLTALLKNR

SEQ ID NO: 48234 - protein, 10 aa, Homo Sapiens
ESMKRQIVSR

SEQ ID NO: 48235 - protein, 10 aa, Homo Sapiens
ESQERIKAER

SEQ ID NO: 48236 - protein, 10 aa, Homo Sapiens
ESRDMDLNYR

SEQ ID NO: 48237 - protein, 10 aa, Homo Sapiens
ESRPGEWLVR

SEQ ID NO: 48238 - protein, 10 aa, Homo Sapiens
ETAGRYITYR

SEQ ID NO: 48239 - protein, 10 aa, Homo Sapiens
ETALIDRTGR

SEQ ID NO: 48240 - protein, 10 aa, Homo Sapiens
ETASNEVVYR

SEQ ID NO: 48241 - protein, 10 aa, Homo Sapiens
ETFDFQAMGR

SEQ ID NO: 48242 - protein, 10 aa, Homo Sapiens
ETFEHPNVVR

SEQ ID NO: 48243 - protein, 10 aa, Homo Sapiens
ETHGNLMTER

SEQ ID NO: 48244 - protein, 10 aa, Homo Sapiens
ETHSHFLARL

SEQ ID NO: 48245 - protein, 10 aa, Homo Sapiens
ETIGKKFEKR

SEQ ID NO: 48246 - protein, 10 aa, Homo Sapiens
ETIHHLKNLR

SEQ ID NO: 48247 - protein, 10 aa, Homo Sapiens
ETIKQENTRL

SEQ ID NO: 48248 - protein, 10 aa, Homo Sapiens
ETIKSLLIRR

SEQ ID NO: 48249 - protein, 10 aa, Homo Sapiens
ETKGQDIFQR

SEQ ID NO: 48250 - protein, 10 aa, Homo Sapiens
ETLETIINRL

SEQ ID NO: 48251 - protein, 10 aa, Homo Sapiens
ETLFRMGVAR

SEQ ID NO: 48252 - protein, 10 aa, Homo Sapiens
ETLGPKPAAR

SEQ ID NO: 48253 - protein, 10 aa, Homo Sapiens
ETLIPHYSGR

SEQ ID NO: 48254 - protein, 10 aa, Homo Sapiens
ETLKHSGIGR

SEQ ID NO: 48255 - protein, 10 aa, Homo Sapiens
ETLPPFPTRL

SEQ ID NO: 48256 - protein, 10 aa, Homo Sapiens
ETLPPVGVNR

SEQ ID NO: 48257 - protein, 10 aa, Homo Sapiens
ETLTRPFSGR

SEQ ID NO: 48258 - protein, 10 aa, Homo Sapiens
ETNMYEGVGR

SEQ ID NO: 48259 - protein, 10 aa, Homo Sapiens
ETPGHTPSLR

SEQ ID NO: 48260 - protein, 10 aa, Homo Sapiens
ETPTFAKVQR

SEQ ID NO: 48261 - protein, 10 aa, Homo Sapiens
ETQANNLICR

SEQ ID NO: 48262 - protein, 10 aa, Homo Sapiens
ETQPGRLLGR

SEQ ID NO: 48263 - protein, 10 aa, Homo Sapiens
ETRDGQVLGR

SEQ ID NO: 48264 - protein, 10 aa, Homo Sapiens
ETRPDYCMKR

SEQ ID NO: 48265 - protein, 10 aa, Homo Sapiens
ETVGTGIMGR

SEQ ID NO: 48266 - protein, 10 aa, Homo Sapiens
EVAAMENVHR

SEQ ID NO: 48267 - protein, 10 aa, Homo Sapiens
EVAERLGVTR

SEQ ID NO: 48268 - protein, 10 aa, Homo Sapiens
EVAPPASGTR

SEQ ID NO: 48269 - protein, 10 aa, Homo Sapiens
EVAPPEYHRK

SEQ ID NO: 48270 - protein, 10 aa, Homo Sapiens
EVAQLIQGGR

SEQ ID NO: 48271 - protein, 10 aa, Homo Sapiens
EVEPGVHLGR

SEQ ID NO: 48272 - protein, 10 aa, Homo Sapiens
EVFNKFFKER

SEQ ID NO: 48273 - protein, 10 aa, Homo Sapiens
EVGEKLFHAR

SEQ ID NO: 48274 - protein, 10 aa, Homo Sapiens
EVGKVIQQGR

SEQ ID NO: 48275 - protein, 10 aa, Homo Sapiens
EVIKPWITKR

SEQ ID NO: 48276 - protein, 10 aa, Homo Sapiens
EVKDHKFIAR

SEQ ID NO: 48277 - protein, 10 aa, Homo Sapiens
EVKETWHERL

SEQ ID NO: 48278 - protein, 10 aa, Homo Sapiens
EVKKFVKIGR

SEQ ID NO: 48279 - protein, 10 aa, Homo Sapiens
EVKNYDAALR

SEQ ID NO: 48280 - protein, 10 aa, Homo Sapiens
EVKPFITNPR

SEQ ID NO: 48281 - protein, 10 aa, Homo Sapiens
EVKQELAASR

SEQ ID NO: 48282 - protein, 10 aa, Homo Sapiens
EVKRPGESLR

SEQ ID NO: 48283 - protein, 10 aa, Homo Sapiens
EVLAEFERRK

SEQ ID NO: 48284 - protein, 10 aa, Homo Sapiens
EVLAGPLAQR

SEQ ID NO: 48285 - protein, 10 aa, Homo Sapiens
EVLDPTAANR

SEQ ID NO: 48286 - protein, 10 aa, Homo Sapiens
EVLLRAGVSR

SEQ ID NO: 48287 - protein, 10 aa, Homo Sapiens
EVLPSPRGQR

SEQ ID NO: 48288 - protein, 10 aa, Homo Sapiens
EVLSKALSQR

SEQ ID NO: 48289 - protein, 10 aa, Homo Sapiens
EVLSQKKMHR

SEQ ID NO: 48290 - protein, 10 aa, Homo Sapiens
EVLSQKRMYR

SEQ ID NO: 48291 - protein, 10 aa, Homo Sapiens
EVLYAPRRLR

SEQ ID NO: 48292 - protein, 10 aa, Homo Sapiens
EVLYNGFTGR

SEQ ID NO: 48293 - protein, 10 aa, Homo Sapiens
EVMQRMEVQR

SEQ ID NO: 48294 - protein, 10 aa, Homo Sapiens
EVNERHQILR

SEQ ID NO: 48295 - protein, 10 aa, Homo Sapiens
EVNQPKFNQR

SEQ ID NO: 48296 - protein, 10 aa, Homo Sapiens
EVQDLHLAQR

SEQ ID NO: 48297 - protein, 10 aa, Homo Sapiens
EVQEQYTERL

SEQ ID NO: 48298 - protein, 10 aa, Homo Sapiens
EVQGDRMHLR

SEQ ID NO: 48299 - protein, 10 aa, Homo Sapiens
EVQRKLGHVR

SEQ ID NO: 48300 - protein, 10 aa, Homo Sapiens
EVQRQLAIQR

SEQ ID NO: 48301 - protein, 10 aa, Homo Sapiens
EVQSQPPRVR

SEQ ID NO: 48302 - protein, 10 aa, Homo Sapiens
EVREIPPQSR

SEQ ID NO: 48303 - protein, 10 aa, Homo Sapiens
EVRGLCIKSR

SEQ ID NO: 48304 - protein, 10 aa, Homo Sapiens
EVRNLRKINR

SEQ ID NO: 48305 - protein, 10 aa, Homo Sapiens
EVRQPPPRVR

SEQ ID NO: 48306 - protein, 10 aa, Homo Sapiens
EVRTGGMAFH

SEQ ID NO: 48307 - protein, 10 aa, Homo Sapiens
EVRTHYDPPR

SEQ ID NO: 48308 - protein, 10 aa, Homo Sapiens
EVTPAMQIPR

SEQ ID NO: 48309 - protein, 10 aa, Homo Sapiens
EVVTGVIGQR

SEQ ID NO: 48310 - protein, 10 aa, Homo Sapiens
EVYDGPKNVR

SEQ ID NO: 48311 - protein, 10 aa, Homo Sapiens
EVYDQLFKSR

SEQ ID NO: 48312 - protein, 10 aa, Homo Sapiens
EWIEPPKRER

SEQ ID NO: 48313 - protein, 10 aa, Homo Sapiens
EYAADIFYSR

SEQ ID NO: 48314 - protein, 10 aa, Homo Sapiens
EYAEFQYRRR

SEQ ID NO: 48315 - protein, 10 aa, Homo Sapiens
EYAERPEVAR

SEQ ID NO: 48316 - protein, 10 aa, Homo Sapiens
EYAKLLAKRM

SEQ ID NO: 48317 - protein, 10 aa, Homo Sapiens
EYAKVDLAKR

SEQ ID NO: 48318 - protein, 10 aa, Homo Sapiens
EYAPLGTVYR

SEQ ID NO: 48319 - protein, 10 aa, Homo Sapiens
EYDEKLARFR

SEQ ID NO: 48320 - protein, 10 aa, Homo Sapiens
EYDPALSQPR

SEQ ID NO: 48321 - protein, 10 aa, Homo Sapiens
EYEDKQKVLR

SEQ ID NO: 48322 - protein, 10 aa, Homo Sapiens
EYEEFKELTR

SEQ ID NO: 48323 - protein, 10 aa, Homo Sapiens
EYFPTKNRQR

SEQ ID NO: 48324 - protein, 10 aa, Homo Sapiens
EYFSDLPPRL

SEQ ID NO: 48325 - protein, 10 aa, Homo Sapiens
EYFSPVGYNR

SEQ ID NO: 48326 - protein, 10 aa, Homo Sapiens
EYFTLQIRGR

SEQ ID NO: 48327 - protein, 10 aa, Homo Sapiens
EYIDFEKIRK

SEQ ID NO: 48328 - protein, 10 aa, Homo Sapiens
EYIDGALSGH

SEQ ID NO: 48329 - protein, 10 aa, Homo Sapiens
EYIDNRSSQR

SEQ ID NO: 48330 - protein, 10 aa, Homo Sapiens
EYIEENKYSR

SEQ ID NO: 48331 - protein, 10 aa, Homo Sapiens
EYIEEVRAKK

SEQ ID NO: 48332 - protein, 10 aa, Homo Sapiens
EYIHDFNRRH

SEQ ID NO: 48333 - protein, 10 aa, Homo Sapiens
EYIIGLLQQR

SEQ ID NO: 48334 - protein, 10 aa, Homo Sapiens
EYIKPRLRFK

SEQ ID NO: 48335 - protein, 10 aa, Homo Sapiens
EYILPGSRER

SEQ ID NO: 48336 - protein, 10 aa, Homo Sapiens
EYINQIAASR

SEQ ID NO: 48337 - protein, 10 aa, Homo Sapiens
EYITKLQQER

SEQ ID NO: 48338 - protein, 10 aa, Homo Sapiens
EYKDPGKMIR

SEQ ID NO: 48339 - protein, 10 aa, Homo Sapiens
EYKEPESTLR

SEQ ID NO: 48340 - protein, 10 aa, Homo Sapiens
EYKKEQAINR

SEQ ID NO: 48341 - protein, 10 aa, Homo Sapiens
EYLDSMKKNK

SEQ ID NO: 48342 - protein, 10 aa, Homo Sapiens
EYLEKIKQRL

SEQ ID NO: 48343 - protein, 10 aa, Homo Sapiens
EYLIKTGSER

SEQ ID NO: 48344 - protein, 10 aa, Homo Sapiens
EYLILSDVQR

SEQ ID NO: 48345 - protein, 10 aa, Homo Sapiens
EYLKLGYVSR

SEQ ID NO: 48346 - protein, 10 aa, Homo Sapiens
EYLLTHPKNR

SEQ ID NO: 48347 - protein, 10 aa, Homo Sapiens
EYLNHVSKRL

SEQ ID NO: 48348 - protein, 10 aa, Homo Sapiens
EYLQGLEARL

SEQ ID NO: 48349 - protein, 10 aa, Homo Sapiens
EYLQIPPVSR

SEQ ID NO: 48350 - protein, 10 aa, Homo Sapiens
EYLQPNPASR

SEQ ID NO: 48351 - protein, 10 aa, Homo Sapiens
EYLSSLQPRL

SEQ ID NO: 48352 - protein, 10 aa, Homo Sapiens
EYLTSTACRR

SEQ ID NO: 48353 - protein, 10 aa, Homo Sapiens
EYMAPEVVNR

SEQ ID NO: 48354 - protein, 10 aa, Homo Sapiens
EYMDKNNVRR

SEQ ID NO: 48355 - protein, 10 aa, Homo Sapiens
EYMEKIKQRL

SEQ ID NO: 48356 - protein, 10 aa, Homo Sapiens
EYNEGLVKRL

SEQ ID NO: 48357 - protein, 10 aa, Homo Sapiens
EYNGKIPRFR

SEQ ID NO: 48358 - protein, 10 aa, Homo Sapiens
EYNNFIDVHR

SEQ ID NO: 48359 - protein, 10 aa, Homo Sapiens
EYNWATVGGR

SEQ ID NO: 48360 - protein, 10 aa, Homo Sapiens
EYQDLTFLTK

SEQ ID NO: 48361 - protein, 10 aa, Homo Sapiens
EYRDMRDGFR

SEQ ID NO: 48362 - protein, 10 aa, Homo Sapiens
EYRGEWKEGR

SEQ ID NO: 48363 - protein, 10 aa, Homo Sapiens
EYSEAIPILR

SEQ ID NO: 48364 - protein, 10 aa, Homo Sapiens
EYTGYAETYR

SEQ ID NO: 48365 - protein, 10 aa, Homo Sapiens
EYVDVVFANR

SEQ ID NO: 48366 - protein, 10 aa, Homo Sapiens
EYVEILGEQR

SEQ ID NO: 48367 - protein, 10 aa, Homo Sapiens
EYVGPRLSRR

SEQ ID NO: 48368 - protein, 10 aa, Homo Sapiens
EYVIESARQR

SEQ ID NO: 48369 - protein, 10 aa, Homo Sapiens
EYVPVKKDLR

SEQ ID NO: 48370 - protein, 10 aa, Homo Sapiens
FANLPNQVYR

SEQ ID NO: 48371 - protein, 10 aa, Homo Sapiens
FEINPLDETV

SEQ ID NO: 48372 - protein, 10 aa, Homo Sapiens
FPQGKPRQCG

SEQ ID NO: 48373 - protein, 10 aa, Homo Sapiens
FSKNVHSTRF

SEQ ID NO: 48374 - protein, 10 aa, Homo Sapiens
FTKFPTKTGR

SEQ ID NO: 48375 - protein, 10 aa, Homo Sapiens
FTSQRDNIFR

SEQ ID NO: 48376 - protein, 10 aa, Homo Sapiens
FYVGEIIGKR

SEQ ID NO: 48377 - protein, 10 aa, Homo Sapiens
HANGLTLVSR

SEQ ID NO: 48378 - protein, 10 aa, Homo Sapiens
HFKKPGLTGR

SEQ ID NO: 48379 - protein, 10 aa, Homo Sapiens
HNADQPLRVR

SEQ ID NO: 48380 - protein, 10 aa, Homo Sapiens
HNMDVPNIKR

SEQ ID NO: 48381 - protein, 10 aa, Homo Sapiens
HNYAAPPSTR

SEQ ID NO: 48382 - protein, 10 aa, Homo Sapiens
HSQDLSGRLR

SEQ ID NO: 48383 - protein, 10 aa, Homo Sapiens
HTFIITGRKR

SEQ ID NO: 48384 - protein, 10 aa, Homo Sapiens
HTIAPMGTRR

SEQ ID NO: 48385 - protein, 10 aa, Homo Sapiens
HTKAVNVVRF

SEQ ID NO: 48386 - protein, 10 aa, Homo Sapiens
HTKPSMLTQR

SEQ ID NO: 48387 - protein, 10 aa, Homo Sapiens
HTNDTIGSVR

SEQ ID NO: 48388 - protein, 10 aa, Homo Sapiens
HTRTPPIIHR

SEQ ID NO: 48389 - protein, 10 aa, Homo Sapiens
HVKDVATVCR

SEQ ID NO: 48390 - protein, 10 aa, Homo Sapiens
HVKEQLETLR

SEQ ID NO: 48391 - protein, 10 aa, Homo Sapiens
HVYDGKFLAR

SEQ ID NO: 48392 - protein, 10 aa, Homo Sapiens
HYIQLGTVYR

SEQ ID NO: 48393 - protein, 10 aa, Homo Sapiens
IARDRALEGR

SEQ ID NO: 48394 - protein, 10 aa, Homo Sapiens
IDISDIAEKR

SEQ ID NO: 48395 - protein, 10 aa, Homo Sapiens
IFKKHSGTLR

SEQ ID NO: 48396 - protein, 10 aa, Homo Sapiens
ITNNIDPVGR

SEQ ID NO: 48397 - protein, 10 aa, Homo Sapiens
LAQGDSLAAR

SEQ ID NO: 48398 - protein, 10 aa, Homo Sapiens
LDLLSQSQRR

SEQ ID NO: 48399 - protein, 10 aa, Homo Sapiens
LYISEGLHPR

SEQ ID NO: 48400 - protein, 10 aa, Homo Sapiens
LYQEVFGRLR

SEQ ID NO: 48401 - protein, 10 aa, Homo Sapiens
MAAAVPKRMR

SEQ ID NO: 48402 - protein, 10 aa, Homo Sapiens
MFKGKGIEER

SEQ ID NO: 48403 - protein, 10 aa, Homo Sapiens
MFKTANKVTR

SEQ ID NO: 48404 - protein, 10 aa, Homo Sapiens
MFMEPAKRMK

SEQ ID NO: 48405 - protein, 10 aa, Homo Sapiens
MFRIEGLAPK

SEQ ID NO: 48406 - protein, 10 aa, Homo Sapiens
MNYEGPGMAR

SEQ ID NO: 48407 - protein, 10 aa, Homo Sapiens
MPLTPNPVGR

SEQ ID NO: 48408 - protein, 10 aa, Homo Sapiens
MTFTRPANHR

SEQ ID NO: 48409 - protein, 10 aa, Homo Sapiens
MTHATKAIYR

SEQ ID NO: 48410 - protein, 10 aa, Homo Sapiens
MTKDNNLLGR

SEQ ID NO: 48411 - protein, 10 aa, Homo Sapiens
MTKSGYQPPR

SEQ ID NO: 48412 - protein, 10 aa, Homo Sapiens
MTQDAQNALR

SEQ ID NO: 48413 - protein, 10 aa, Homo Sapiens
MVQGPVITTR

SEQ ID NO: 48414 - protein, 10 aa, Homo Sapiens
MVQPINLIFR

SEQ ID NO: 48415 - protein, 10 aa, Homo Sapiens
MYRLPNVHGR

SEQ ID NO: 48416 - protein, 10 aa, Homo Sapiens
MYYNGIGVKR

SEQ ID NO: 48417 - protein, 10 aa, Homo Sapiens
NALNVPLHNR

SEQ ID NO: 48418 - protein, 10 aa, Homo Sapiens
NFKSPVKTIR

SEQ ID NO: 48419 - protein, 10 aa, Homo Sapiens
NFRGSLNTYR

SEQ ID NO: 48420 - protein, 10 aa, Homo Sapiens
NSADKIHITR

SEQ ID NO: 48421 - protein, 10 aa, Homo Sapiens
NSLLRENSFR

SEQ ID NO: 48422 - protein, 10 aa, Homo Sapiens
NTQEMPWNVR

SEQ ID NO: 48423 - protein, 10 aa, Homo Sapiens
NTSNMPVAAR

SEQ ID NO: 48424 - protein, 10 aa, Homo Sapiens
NVKDKPTVER

SEQ ID NO: 48425 - protein, 10 aa, Homo Sapiens
NVKEKIYAVR

SEQ ID NO: 48426 - protein, 10 aa, Homo Sapiens
NYIEFTRILK

SEQ ID NO: 48427 - protein, 10 aa, Homo Sapiens
NYIEREGKCR

SEQ ID NO: 48428 - protein, 10 aa, Homo Sapiens
NYLDFHRCQK

SEQ ID NO: 48429 - protein, 10 aa, Homo Sapiens
NYTDRIQVLR

SEQ ID NO: 48430 - protein, 10 aa, Homo Sapiens
NYYNGCIFHR

SEQ ID NO: 48431 - protein, 10 aa, Homo Sapiens
QLQEKNHTLQ

SEQ ID NO: 48432 - protein, 10 aa, Homo Sapiens
QYGPQGNYSR

SEQ ID NO: 48433 - protein, 10 aa, Homo Sapiens
QYIRPVFVSR

SEQ ID NO: 48434 - protein, 10 aa, Homo Sapiens
QYKFPVVITR

SEQ ID NO: 48435 - protein, 10 aa, Homo Sapiens
QYNPEPPPPR

SEQ ID NO: 48436 - protein, 10 aa, Homo Sapiens
RYRPGTVALR

SEQ ID NO: 48437 - protein, 10 aa, Homo Sapiens
SAASGWPSAR

SEQ ID NO: 48438 - protein, 10 aa, Homo Sapiens
SFFGERRIPR

SEQ ID NO: 48439 - protein, 10 aa, Homo Sapiens
SFRYNGLIHR

SEQ ID NO: 48440 - protein, 10 aa, Homo Sapiens
SSQQFSGIGR

SEQ ID NO: 48441 - protein, 10 aa, Homo Sapiens
STGDVNVEMN

SEQ ID NO: 48442 - protein, 10 aa, Homo Sapiens
STKNIHFSRL

SEQ ID NO: 48443 - protein, 10 aa, Homo Sapiens
STKPGSYIFR

SEQ ID NO: 48444 - protein, 10 aa, Homo Sapiens
STTGHCVHMR

SEQ ID NO: 48445 - protein, 10 aa, Homo Sapiens
STYYGSFVTR

SEQ ID NO: 48446 - protein, 10 aa, Homo Sapiens
SVEYIHRIGR

SEQ ID NO: 48447 - protein, 10 aa, Homo Sapiens
SVLEATRVNR

SEQ ID NO: 48448 - protein, 10 aa, Homo Sapiens
SVSNGWTVYR

SEQ ID NO: 48449 - protein, 10 aa, Homo Sapiens
SYIDIEARTR

SEQ ID NO: 48450 - protein, 10 aa, Homo Sapiens
SYQEQIIVGR

SEQ ID NO: 48451 - protein, 10 aa, Homo Sapiens
SYSSDVIQHR

SEQ ID NO: 48452 - protein, 10 aa, Homo Sapiens
TAYGEFLSRL

SEQ ID NO: 48453 - protein, 10 aa, Homo Sapiens
TFEVLRKVGK

SEQ ID NO: 48454 - protein, 10 aa, Homo Sapiens
TFKRPEGMHR

SEQ ID NO: 48455 - protein, 10 aa, Homo Sapiens
TFRNPDDVFR

SEQ ID NO: 48456 - protein, 10 aa, Homo Sapiens
TFRSPHGQTR

SEQ ID NO: 48457 - protein, 10 aa, Homo Sapiens
TFTVGLVFLK

SEQ ID NO: 48458 - protein, 10 aa, Homo Sapiens
TLLESEREAR

SEQ ID NO: 48459 - protein, 10 aa, Homo Sapiens
TLREYKVVGR

SEQ ID NO: 48460 - protein, 10 aa, Homo Sapiens
TLRKPPAVGR

SEQ ID NO: 48461 - protein, 10 aa, Homo Sapiens
TMLAYSLTYR

SEQ ID NO: 48462 - protein, 10 aa, Homo Sapiens
TTLDESLTNR

SEQ ID NO: 48463 - protein, 10 aa, Homo Sapiens
TTLEHQKTFR

SEQ ID NO: 48464 - protein, 10 aa, Homo Sapiens
TVKATGPALR

SEQ ID NO: 48465 - protein, 10 aa, Homo Sapiens
TVNTSLNVYR

SEQ ID NO: 48466 - protein, 10 aa, Homo Sapiens
TVQKETIHPR

SEQ ID NO: 48467 - protein, 10 aa, Homo Sapiens
TVQQLEGRWR

SEQ ID NO: 48468 - protein, 10 aa, Homo Sapiens
TYAAFVQTHR

SEQ ID NO: 48469 - protein, 10 aa, Homo Sapiens
TYFDLPQSSR

SEQ ID NO: 48470 - protein, 10 aa, Homo Sapiens
TYFDSEVVPR

SEQ ID NO: 48471 - protein, 10 aa, Homo Sapiens
TYLDIPLVIR

SEQ ID NO: 48472 - protein, 10 aa, Homo Sapiens
TYLRPPHTSR

SEQ ID NO: 48473 - protein, 10 aa, Homo Sapiens
TYMDPTGKTR

SEQ ID NO: 48474 - protein, 10 aa, Homo Sapiens
TYRNSMFHNR

SEQ ID NO: 48475 - protein, 10 aa, Homo Sapiens
TYRVFKTVNR

SEQ ID NO: 48476 - protein, 10 aa, Homo Sapiens
TYYGSFVTRA

SEQ ID NO: 48477 - protein, 10 aa, Homo Sapiens
VFGKWHSVPR

SEQ ID NO: 48478 - protein, 10 aa, Homo Sapiens
VGKDPGLAGR

SEQ ID NO: 48479 - protein, 10 aa, Homo Sapiens
VLYDRQGIGR

SEQ ID NO: 48480 - protein, 10 aa, Homo Sapiens
YAQPPLGRLR

SEQ ID NO: 48481 - protein, 10 aa, Homo Sapiens
YNHSGFGQGR

SEQ ID NO: 48482 - protein, 10 aa, Homo Sapiens
YSFHRGNSQR

SEQ ID NO: 48483 - protein, 10 aa, Homo Sapiens
YTAMPLPIGR

SEQ ID NO: 48484 - protein, 10 aa, Homo Sapiens
YTLLITGLCR

SEQ ID NO: 48485 - protein, 10 aa, Homo Sapiens
YVSPRAPFYR

SEQ ID NO: 48486 - protein, 10 aa, Homo Sapiens
YYKFSGFTQK

SEQ ID NO: 48487 - protein, 10 aa, Homo Sapiens
YYLDPSSQKR

SEQ ID NO: 48488 - protein, 10 aa, Homo Sapiens
YYLPYYKRER

SEQ ID NO: 48489 - protein, 10 aa, Homo Sapiens
YYMGDLIQHR

SEQ ID NO: 48490 - protein, 10 aa, Homo Sapiens
YYQDTPKQIR

SEQ ID NO: 48491 - protein, 10 aa, Homo Sapiens
YYTPITPHLR

SEQ ID NO: 48492 - protein, 11 aa, Homo Sapiens
AFFVRKKSSLR

SEQ ID NO: 48493 - protein, 11 aa, Homo Sapiens
AVREVLHGNQR

SEQ ID NO: 48494 - protein, 11 aa, Homo Sapiens
AVVPGTLLLFR

SEQ ID NO: 48495 - protein, 11 aa, Homo Sapiens
AYIERKNYIHR

SEQ ID NO: 48496 - protein, 11 aa, Homo Sapiens
AYIHEKGMIHR

SEQ ID NO: 48497 - protein, 11 aa, Homo Sapiens
AYKDPEKNWNR

SEQ ID NO: 48498 - protein, 11 aa, Homo Sapiens
AYKQVDPSITR

SEQ ID NO: 48499 - protein, 11 aa, Homo Sapiens
AYVPFGAGRHR

SEQ ID NO: 48500 - protein, 11 aa, Homo Sapiens
AYVSFKPCMTR

SEQ ID NO: 48501 - protein, 11 aa, Homo Sapiens
CPKGAETLVTR

SEQ ID NO: 48502 - protein, 11 aa, Homo Sapiens
CTKAGKAIVSR

SEQ ID NO: 48503 - protein, 11 aa, Homo Sapiens
CVKSGLIFHER

SEQ ID NO: 48504 - protein, 11 aa, Homo Sapiens
CVVMRDPASKR

SEQ ID NO: 48505 - protein, 11 aa, Homo Sapiens
DALRVEDMMKR

SEQ ID NO: 48506 - protein, 11 aa, Homo Sapiens
DANGNSFATRI

SEQ ID NO: 48507 - protein, 11 aa, Homo Sapiens
DAQTLDAIRHR

SEQ ID NO: 48508 - protein, 11 aa, Homo Sapiens
DATSRNITEAR

SEQ ID NO: 48509 - protein, 11 aa, Homo Sapiens
DFAGEEVRVTK

SEQ ID NO: 48510 - protein, 11 aa, Homo Sapiens
DFAPEVAWVTR

SEQ ID NO: 48511 - protein, 11 aa, Homo Sapiens
DFFPGSDRFAR

SEQ ID NO: 48512 - protein, 11 aa, Homo Sapiens
DFIQEEFQHLK

SEQ ID NO: 48513 - protein, 11 aa, Homo Sapiens
DFKDPPTAKYR

SEQ ID NO: 48514 - protein, 11 aa, Homo Sapiens
DFLDRNTPVFR

SEQ ID NO: 48515 - protein, 11 aa, Homo Sapiens
DFLHNKGIAHR

SEQ ID NO: 48516 - protein, 11 aa, Homo Sapiens
DFRNPGPGRHR

SEQ ID NO: 48517 - protein, 11 aa, Homo Sapiens
DFTVADTRRYR

SEQ ID NO: 48518 - protein, 11 aa, Homo Sapiens
DIEERPKELVR

SEQ ID NO: 48519 - protein, 11 aa, Homo Sapiens
DIFQNLSKRQR

SEQ ID NO: 48520 - protein, 11 aa, Homo Sapiens
DIKASQILASR

SEQ ID NO: 48521 - protein, 11 aa, Homo Sapiens
DIKPLTSFRQR

SEQ ID NO: 48522 - protein, 11 aa, Homo Sapiens
DIKPSNIFISR

SEQ ID NO: 48523 - protein, 11 aa, Homo Sapiens
DIKSSETGAFR

SEQ ID NO: 48524 - protein, 11 aa, Homo Sapiens
DIRPEIHENYR

SEQ ID NO: 48525 - protein, 11 aa, Homo Sapiens
DLKPENILCEH

SEQ ID NO: 48526 - protein, 11 aa, Homo Sapiens
DMKPKHLLSGK

SEQ ID NO: 48527 - protein, 11 aa, Homo Sapiens
DMKRRIHLELR

SEQ ID NO: 48528 - protein, 11 aa, Homo Sapiens
DSKPQDRHFVR

SEQ ID NO: 48529 - protein, 11 aa, Homo Sapiens
DSLGQDLRRLR

SEQ ID NO: 48530 - protein, 11 aa, Homo Sapiens
DSMASGTLHLR

SEQ ID NO: 48531 - protein, 11 aa, Homo Sapiens
DSMLVDPKHHR

SEQ ID NO: 48532 - protein, 11 aa, Homo Sapiens
DSRFPNQNQTR

SEQ ID NO: 48533 - protein, 11 aa, Homo Sapiens
DSRGQEAISKR

SEQ ID NO: 48534 - protein, 11 aa, Homo Sapiens
DTKELEKMTNR

SEQ ID NO: 48535 - protein, 11 aa, Homo Sapiens
DTKGHSLSVQR

SEQ ID NO: 48536 - protein, 11 aa, Homo Sapiens
DTRRESLFSAR

SEQ ID NO: 48537 - protein, 11 aa, Homo Sapiens
DVKDPVSIEER

SEQ ID NO: 48538 - protein, 11 aa, Homo Sapiens
DVKTTDGYLLR

SEQ ID NO: 48539 - protein, 11 aa, Homo Sapiens
DVQGDDKRYFR

SEQ ID NO: 48540 - protein, 11 aa, Homo Sapiens
DWVPYINGKFK

SEQ ID NO: 48541 - protein, 11 aa, Homo Sapiens
DYCEHRDYVMR

SEQ ID NO: 48542 - protein, 11 aa, Homo Sapiens
DYCHSKGIMHR

SEQ ID NO: 48543 - protein, 11 aa, Homo Sapiens
DYCHSMGIMHR

SEQ ID NO: 48544 - protein, 11 aa, Homo Sapiens
DYFAKREQWKK

SEQ ID NO: 48545 - protein, 11 aa, Homo Sapiens
DYFSPDNLKER

SEQ ID NO: 48546 - protein, 11 aa, Homo Sapiens
DYIDSPSLKDR

SEQ ID NO: 48547 - protein, 11 aa, Homo Sapiens
DYIHHMGYVHR

SEQ ID NO: 48548 - protein, 11 aa, Homo Sapiens
DYIHSKKLIHR

SEQ ID NO: 48549 - protein, 11 aa, Homo Sapiens
DYINGDSKYMR

SEQ ID NO: 48550 - protein, 11 aa, Homo Sapiens
DYISRAESQSR

SEQ ID NO: 48551 - protein, 11 aa, Homo Sapiens
DYIYHGTVKLR

SEQ ID NO: 48552 - protein, 11 aa, Homo Sapiens
DYKDQLKTGER

SEQ ID NO: 48553 - protein, 11 aa, Homo Sapiens
DYKSALRFHKR

SEQ ID NO: 48554 - protein, 11 aa, Homo Sapiens
DYKVASAEYHR

SEQ ID NO: 48555 - protein, 11 aa, Homo Sapiens
DYLEFTDARGR

SEQ ID NO: 48556 - protein, 11 aa, Homo Sapiens
DYLHAKNIIHR

SEQ ID NO: 48557 - protein, 11 aa, Homo Sapiens
DYLHAKSIIHR

SEQ ID NO: 48558 - protein, 11 aa, Homo Sapiens
DYLHRHGIIHR

SEQ ID NO: 48559 - protein, 11 aa, Homo Sapiens
DYLHSEKKIHR

SEQ ID NO: 48560 - protein, 11 aa, Homo Sapiens
DYLHSGKIVYR

SEQ ID NO: 48561 - protein, 11 aa, Homo Sapiens
DYLNAESRVNR

SEQ ID NO: 48562 - protein, 11 aa, Homo Sapiens
DYLPPEMIEGR

SEQ ID NO: 48563 - protein, 11 aa, Homo Sapiens
DYMTPEQRRSR

SEQ ID NO: 48564 - protein, 11 aa, Homo Sapiens
DYRDPPDGSGR

SEQ ID NO: 48565 - protein, 11 aa, Homo Sapiens
DYRYFDPKMLR

SEQ ID NO: 48566 - protein, 11 aa, Homo Sapiens
DYVPSKSKIGK

SEQ ID NO: 48567 - protein, 11 aa, Homo Sapiens
DYVPSTTKTPR

SEQ ID NO: 48568 - protein, 11 aa, Homo Sapiens
DYVPYVPLRQR

SEQ ID NO: 48569 - protein, 11 aa, Homo Sapiens
DYYDSHNVNTR

SEQ ID NO: 48570 - protein, 11 aa, Homo Sapiens
DYYEESYFTTR

SEQ ID NO: 48571 - protein, 11 aa, Homo Sapiens
EAAAQNVYCLR

SEQ ID NO: 48572 - protein, 11 aa, Homo Sapiens
EAAFATKDRLR

SEQ ID NO: 48573 - protein, 11 aa, Homo Sapiens
EAANRNNDALR

SEQ ID NO: 48574 - protein, 11 aa, Homo Sapiens
EAASYLDQISR

SEQ ID NO: 48575 - protein, 11 aa, Homo Sapiens
EACGARVFVQR

SEQ ID NO: 48576 - protein, 11 aa, Homo Sapiens
EAFPRARLSER

SEQ ID NO: 48577 - protein, 11 aa, Homo Sapiens
EAIKKPLTQKR

SEQ ID NO: 48578 - protein, 11 aa, Homo Sapiens
EAIPILPAQQR

SEQ ID NO: 48579 - protein, 11 aa, Homo Sapiens
EAISSLDGKNR

SEQ ID NO: 48580 - protein, 11 aa, Homo Sapiens
EAKARAEIRAR

SEQ ID NO: 48581 - protein, 11 aa, Homo Sapiens
EAKGLDRINER

SEQ ID NO: 48582 - protein, 11 aa, Homo Sapiens
EAKPPTVTMPR

SEQ ID NO: 48583 - protein, 11 aa, Homo Sapiens
EAKQAFKELLK

SEQ ID NO: 48584 - protein, 11 aa, Homo Sapiens
EALAMGSRALR

SEQ ID NO: 48585 - protein, 11 aa, Homo Sapiens
EALGEQALRRR

SEQ ID NO: 48586 - protein, 11 aa, Homo Sapiens
EALHQKNIVHR

SEQ ID NO: 48587 - protein, 11 aa, Homo Sapiens
EALKLDGKNVK

SEQ ID NO: 48588 - protein, 11 aa, Homo Sapiens
EALPHVVPTLR

SEQ ID NO: 48589 - protein, 11 aa, Homo Sapiens
EALQKTRIELR

SEQ ID NO: 48590 - protein, 11 aa, Homo Sapiens
EALSSVIKELR

SEQ ID NO: 48591 - protein, 11 aa, Homo Sapiens
EALVGTLKAAK

SEQ ID NO: 48592 - protein, 11 aa, Homo Sapiens
EALYIADRKAR

SEQ ID NO: 48593 - protein, 11 aa, Homo Sapiens
EAMDQYSIALR

SEQ ID NO: 48594 - protein, 11 aa, Homo Sapiens
EAQDAGYRMYR

SEQ ID NO: 48595 - protein, 11 aa, Homo Sapiens
EAQGGDSILQR

SEQ ID NO: 48596 - protein, 11 aa, Homo Sapiens
EAQNLGNFIVR

SEQ ID NO: 48597 - protein, 11 aa, Homo Sapiens
EAQRLPGVSGR

SEQ ID NO: 48598 - protein, 11 aa, Homo Sapiens
EARDIPVLRPR

SEQ ID NO: 48599 - protein, 11 aa, Homo Sapiens
EARGLDRINER

SEQ ID NO: 48600 - protein, 11 aa, Homo Sapiens
EARPFRGSVGR

SEQ ID NO: 48601 - protein, 11 aa, Homo Sapiens
EARRTMTNALR

SEQ ID NO: 48602 - protein, 11 aa, Homo Sapiens
EAVAEKMLQYR

SEQ ID NO: 48603 - protein, 11 aa, Homo Sapiens
EAVKPTVGMKR

SEQ ID NO: 48604 - protein, 11 aa, Homo Sapiens
EAVLKEKRSLR

SEQ ID NO: 48605 - protein, 11 aa, Homo Sapiens
EAVTQSLLSSR

SEQ ID NO: 48606 - protein, 11 aa, Homo Sapiens
EFAKKQPWWRK

SEQ ID NO: 48607 - protein, 11 aa, Homo Sapiens
EFAPETGKREK

SEQ ID NO: 48608 - protein, 11 aa, Homo Sapiens
EFASIPANSSR

SEQ ID NO: 48609 - protein, 11 aa, Homo Sapiens
EFIIFNREKLR

SEQ ID NO: 48610 - protein, 11 aa, Homo Sapiens
EFKQKEECTIR

SEQ ID NO: 48611 - protein, 11 aa, Homo Sapiens
EFKTLEGVITR

SEQ ID NO: 48612 - protein, 11 aa, Homo Sapiens
EFLHANQVIHR

SEQ ID NO: 48613 - protein, 11 aa, Homo Sapiens
EFLHSNQVIHR

SEQ ID NO: 48614 - protein, 11 aa, Homo Sapiens
EFLKLDRERAK

SEQ ID NO: 48615 - protein, 11 aa, Homo Sapiens
EFLNRFEEAKR

SEQ ID NO: 48616 - protein, 11 aa, Homo Sapiens
EFLSTAPRSLR

SEQ ID NO: 48617 - protein, 11 aa, Homo Sapiens
EFMQRALQDLR

SEQ ID NO: 48618 - protein, 11 aa, Homo Sapiens
EFQDFTVPRKR

SEQ ID NO: 48619 - protein, 11 aa, Homo Sapiens
EFRDHKLIRTK

SEQ ID NO: 48620 - protein, 11 aa, Homo Sapiens
EFRDSSLPRSR

SEQ ID NO: 48621 - protein, 11 aa, Homo Sapiens
EFSEDKVRIPR

SEQ ID NO: 48622 - protein, 11 aa, Homo Sapiens
EFVDPSSLTAR

SEQ ID NO: 48623 - protein, 11 aa, Homo Sapiens
EFVGKLDERCR

SEQ ID NO: 48624 - protein, 11 aa, Homo Sapiens
EGAPPGSLALR

SEQ ID NO: 48625 - protein, 11 aa, Homo Sapiens
EGINISGNFYR

SEQ ID NO: 48626 - protein, 11 aa, Homo Sapiens
EGLPEGIPFRR

SEQ ID NO: 48627 - protein, 11 aa, Homo Sapiens
EGLPEGVPFRR

SEQ ID NO: 48628 - protein, 11 aa, Homo Sapiens
EIAIIPSKKLR

SEQ ID NO: 48629 - protein, 11 aa, Homo Sapiens
EIAPGIIRKYR

SEQ ID NO: 48630 - protein, 11 aa, Homo Sapiens
EIASFDKAKLK

SEQ ID NO: 48631 - protein, 11 aa, Homo Sapiens
EIEKFDKSKLK

SEQ ID NO: 48632 - protein, 11 aa, Homo Sapiens
EIIAPSPQRSR

SEQ ID NO: 48633 - protein, 11 aa, Homo Sapiens
EIIDKDSKTRR

SEQ ID NO: 48634 - protein, 11 aa, Homo Sapiens
EIIEKNFDYLR

SEQ ID NO: 48635 - protein, 11 aa, Homo Sapiens
EIKDFLLTARR

SEQ ID NO: 48636 - protein, 11 aa, Homo Sapiens
EIKDKDQLVLR

SEQ ID NO: 48637 - protein, 11 aa, Homo Sapiens
EIKEKFKVETR

SEQ ID NO: 48638 - protein, 11 aa, Homo Sapiens
EIKEKTGLSIR

SEQ ID NO: 48639 - protein, 11 aa, Homo Sapiens
EIKGTNGQVTR

SEQ ID NO: 48640 - protein, 11 aa, Homo Sapiens
EIKPDELAKKR

SEQ ID NO: 48641 - protein, 11 aa, Homo Sapiens
EILDLSNDYAR

SEQ ID NO: 48642 - protein, 11 aa, Homo Sapiens
EILDSQNLNSR

SEQ ID NO: 48643 - protein, 11 aa, Homo Sapiens
EILELAGNAAR

SEQ ID NO: 48644 - protein, 11 aa, Homo Sapiens
EILPDGLPSAR

SEQ ID NO: 48645 - protein, 11 aa, Homo Sapiens
EIMERDAERKR

SEQ ID NO: 48646 - protein, 11 aa, Homo Sapiens
EIMEVAKERSR

SEQ ID NO: 48647 - protein, 11 aa, Homo Sapiens
EIMNRKEPVKR

SEQ ID NO: 48648 - protein, 11 aa, Homo Sapiens
EIMRKDLNDAR

SEQ ID NO: 48649 - protein, 11 aa, Homo Sapiens
EIMSMGYERER

SEQ ID NO: 48650 - protein, 11 aa, Homo Sapiens
EINNRSAANIR

SEQ ID NO: 48651 - protein, 11 aa, Homo Sapiens
EIRDDHTLKIR

SEQ ID NO: 48652 - protein, 11 aa, Homo Sapiens
EIRDKKTGLGR

SEQ ID NO: 48653 - protein, 11 aa, Homo Sapiens
EIRNLTVKDFR

SEQ ID NO: 48654 - protein, 11 aa, Homo Sapiens
EIYEKDEKIQK

SEQ ID NO: 48655 - protein, 11 aa, Homo Sapiens
EIYSESHRVHR

SEQ ID NO: 48656 - protein, 11 aa, Homo Sapiens
ELGTACGKYYR

SEQ ID NO: 48657 - protein, 11 aa, Homo Sapiens
ELIDYKQKATR

SEQ ID NO: 48658 - protein, 11 aa, Homo Sapiens
ELKAPGISYQR

SEQ ID NO: 48659 - protein, 11 aa, Homo Sapiens
ELLHFLFGPLQ

SEQ ID NO: 48660 - protein, 11 aa, Homo Sapiens
ELLIRKLPFQR

SEQ ID NO: 48661 - protein, 11 aa, Homo Sapiens
ELLKKEKINIR

SEQ ID NO: 48662 - protein, 11 aa, Homo Sapiens
ELLLKSESQCR

SEQ ID NO: 48663 - protein, 11 aa, Homo Sapiens
ELLPKEKFVSR

SEQ ID NO: 48664 - protein, 11 aa, Homo Sapiens
ELNDKMKGFYR

SEQ ID NO: 48665 - protein, 11 aa, Homo Sapiens
ELQLLNTDYLR

SEQ ID NO: 48666 - protein, 11 aa, Homo Sapiens
ELREYNLEQQR

SEQ ID NO: 48667 - protein, 11 aa, Homo Sapiens
ELSSADEKRYR

SEQ ID NO: 48668 - protein, 11 aa, Homo Sapiens
ELYKRLKEFLK

SEQ ID NO: 48669 - protein, 11 aa, Homo Sapiens
EMATRAALQAR

SEQ ID NO: 48670 - protein, 11 aa, Homo Sapiens
EMIREGKIAGR

SEQ ID NO: 48671 - protein, 11 aa, Homo Sapiens
EMKKKINLELR

SEQ ID NO: 48672 - protein, 11 aa, Homo Sapiens
EMKRDLDSIFR

SEQ ID NO: 48673 - protein, 11 aa, Homo Sapiens
EMKTSQESLLR

SEQ ID NO: 48674 - protein, 11 aa, Homo Sapiens
EMLSSVALINR

SEQ ID NO: 48675 - protein, 11 aa, Homo Sapiens
EMQRVKGMTER

SEQ ID NO: 48676 - protein, 11 aa, Homo Sapiens
ENISDDVIVGR

SEQ ID NO: 48677 - protein, 11 aa, Homo Sapiens
ENKEESLLEKR

SEQ ID NO: 48678 - protein, 11 aa, Homo Sapiens
ENREAVTHIGR

SEQ ID NO: 48679 - protein, 11 aa, Homo Sapiens
ENRKPVSFRQR

SEQ ID NO: 48680 - protein, 11 aa, Homo Sapiens
ESDEGKLHVLR

SEQ ID NO: 48681 - protein, 11 aa, Homo Sapiens
ESFFGERRIPR

SEQ ID NO: 48682 - protein, 11 aa, Homo Sapiens
ESIPGGYNALR

SEQ ID NO: 48683 - protein, 11 aa, Homo Sapiens
ESISLAAIKNR

SEQ ID NO: 48684 - protein, 11 aa, Homo Sapiens
ESKAQECFQER

SEQ ID NO: 48685 - protein, 11 aa, Homo Sapiens
ESKDTSLETRR

SEQ ID NO: 48686 - protein, 11 aa, Homo Sapiens
ESKEFNAEVHR

SEQ ID NO: 48687 - protein, 11 aa, Homo Sapiens
ESKKFGGPGAR

SEQ ID NO: 48688 - protein, 11 aa, Homo Sapiens
ESKQAGQSVFR

SEQ ID NO: 48689 - protein, 11 aa, Homo Sapiens
ESLDFTDYASR

SEQ ID NO: 48690 - protein, 11 aa, Homo Sapiens
ESLGQSELASR

SEQ ID NO: 48691 - protein, 11 aa, Homo Sapiens
ESLPATHIRGK

SEQ ID NO: 48692 - protein, 11 aa, Homo Sapiens
ESLVAEGLATR

SEQ ID NO: 48693 - protein, 11 aa, Homo Sapiens
ESMKETLRIRR

SEQ ID NO: 48694 - protein, 11 aa, Homo Sapiens
ESMQRFHNRVR

SEQ ID NO: 48695 - protein, 11 aa, Homo Sapiens
ESQDLHGLVSR

SEQ ID NO: 48696 - protein, 11 aa, Homo Sapiens
ESRFQLGGSAR

SEQ ID NO: 48697 - protein, 11 aa, Homo Sapiens
ESRSSFSQHAR

SEQ ID NO: 48698 - protein, 11 aa, Homo Sapiens
ESSAGGSFTVR

SEQ ID NO: 48699 - protein, 11 aa, Homo Sapiens
ESVPPGTTISR

SEQ ID NO: 48700 - protein, 11 aa, Homo Sapiens
ETAGRTPKLAR

SEQ ID NO: 48701 - protein, 11 aa, Homo Sapiens
ETALPGAFKTR

SEQ ID NO: 48702 - protein, 11 aa, Homo Sapiens
ETATTPIFANR

SEQ ID NO: 48703 - protein, 11 aa, Homo Sapiens
ETDRRTLQMLR

SEQ ID NO: 48704 - protein, 11 aa, Homo Sapiens
ETEARPSIMKR

SEQ ID NO: 48705 - protein, 11 aa, Homo Sapiens
ETFGHFGSLGR

SEQ ID NO: 48706 - protein, 11 aa, Homo Sapiens
ETFQRPYQYLR

SEQ ID NO: 48707 - protein, 11 aa, Homo Sapiens
ETIGNELFNCR

SEQ ID NO: 48708 - protein, 11 aa, Homo Sapiens
ETIHADSVAKR

SEQ ID NO: 48709 - protein, 11 aa, Homo Sapiens
ETILGDIDRAR

SEQ ID NO: 48710 - protein, 11 aa, Homo Sapiens
ETIPLGDLQAR

SEQ ID NO: 48711 - protein, 11 aa, Homo Sapiens
ETISKAQAFER

SEQ ID NO: 48712 - protein, 11 aa, Homo Sapiens
ETISSKNIISR

SEQ ID NO: 48713 - protein, 11 aa, Homo Sapiens
ETKADSIIRQK

SEQ ID NO: 48714 - protein, 11 aa, Homo Sapiens
ETKDIKEIAKK

SEQ ID NO: 48715 - protein, 11 aa, Homo Sapiens
ETKDSGSFLLR

SEQ ID NO: 48716 - protein, 11 aa, Homo Sapiens
ETKKLLDIVAR

SEQ ID NO: 48717 - protein, 11 aa, Homo Sapiens
ETKSQFEKFVR

SEQ ID NO: 48718 - protein, 11 aa, Homo Sapiens
ETLAKEKGMNR

SEQ ID NO: 48719 - protein, 11 aa, Homo Sapiens
ETLEEAAMRSR

SEQ ID NO: 48720 - protein, 11 aa, Homo Sapiens
ETLGDKDHSIR

SEQ ID NO: 48721 - protein, 11 aa, Homo Sapiens
ETLLEISKRFR

SEQ ID NO: 48722 - protein, 11 aa, Homo Sapiens
ETLNSSVQSIR

SEQ ID NO: 48723 - protein, 11 aa, Homo Sapiens
ETLPDGTKRSR

SEQ ID NO: 48724 - protein, 11 aa, Homo Sapiens
ETLPEQLLAEK

SEQ ID NO: 48725 - protein, 11 aa, Homo Sapiens
ETLQKTSVLQR

SEQ ID NO: 48726 - protein, 11 aa, Homo Sapiens
ETLSRHIGVTR

SEQ ID NO: 48727 - protein, 11 aa, Homo Sapiens
ETNEIANANSR

SEQ ID NO: 48728 - protein, 11 aa, Homo Sapiens
ETPEMMEARCR

SEQ ID NO: 48729 - protein, 11 aa, Homo Sapiens
ETQSRTITVTR

SEQ ID NO: 48730 - protein, 11 aa, Homo Sapiens
ETQVKTWFQNR

SEQ ID NO: 48731 - protein, 11 aa, Homo Sapiens
ETRPEGSYFSK

SEQ ID NO: 48732 - protein, 11 aa, Homo Sapiens
ETVPKDLRHLR

SEQ ID NO: 48733 - protein, 11 aa, Homo Sapiens
ETVQKETIHPR

SEQ ID NO: 48734 - protein, 11 aa, Homo Sapiens
ETVSEEKRIYR

SEQ ID NO: 48735 - protein, 11 aa, Homo Sapiens
ETYLHRIGRSG

SEQ ID NO: 48736 - protein, 11 aa, Homo Sapiens
EVAKQALNRLR

SEQ ID NO: 48737 - protein, 11 aa, Homo Sapiens
EVAPPKAHEVR

SEQ ID NO: 48738 - protein, 11 aa, Homo Sapiens
EVAQREAETLR

SEQ ID NO: 48739 - protein, 11 aa, Homo Sapiens
EVAQVESLRYR

SEQ ID NO: 48740 - protein, 11 aa, Homo Sapiens
EVEPQGVIVTR

SEQ ID NO: 48741 - protein, 11 aa, Homo Sapiens
EVGPGPGGITR

SEQ ID NO: 48742 - protein, 11 aa, Homo Sapiens
EVGPRKGDFTR

SEQ ID NO: 48743 - protein, 11 aa, Homo Sapiens
EVHGEAQRVLR

SEQ ID NO: 48744 - protein, 11 aa, Homo Sapiens
EVIDQRLIEAR

SEQ ID NO: 48745 - protein, 11 aa, Homo Sapiens
EVIEGYEIACR

SEQ ID NO: 48746 - protein, 11 aa, Homo Sapiens
EVINFGDCLVR

SEQ ID NO: 48747 - protein, 11 aa, Homo Sapiens
EVIPYTPAMQR

SEQ ID NO: 48748 - protein, 11 aa, Homo Sapiens
EVISTPGVVAR

SEQ ID NO: 48749 - protein, 11 aa, Homo Sapiens
EVITEAEKIAK

SEQ ID NO: 48750 - protein, 11 aa, Homo Sapiens
EVKDRHLVAKR

SEQ ID NO: 48751 - protein, 11 aa, Homo Sapiens
EVKNIIDKASR

SEQ ID NO: 48752 - protein, 11 aa, Homo Sapiens
EVKPEVKISEK

SEQ ID NO: 48753 - protein, 11 aa, Homo Sapiens
EVKQVESGTLR

SEQ ID NO: 48754 - protein, 11 aa, Homo Sapiens
EVKRLKVTELR

SEQ ID NO: 48755 - protein, 11 aa, Homo Sapiens
EVLAEFERRKR

SEQ ID NO: 48756 - protein, 11 aa, Homo Sapiens
EVLDHKEFKAR

SEQ ID NO: 48757 - protein, 11 aa, Homo Sapiens
EVLEQSAQTLR

SEQ ID NO: 48758 - protein, 11 aa, Homo Sapiens
EVLERGGRFTR

SEQ ID NO: 48759 - protein, 11 aa, Homo Sapiens
EVLGRGGLAER

SEQ ID NO: 48760 - protein, 11 aa, Homo Sapiens
EVLHIGSAHNR

SEQ ID NO: 48761 - protein, 11 aa, Homo Sapiens
EVLNKHSLSGR

SEQ ID NO: 48762 - protein, 11 aa, Homo Sapiens
EVLPDRVATSR

SEQ ID NO: 48763 - protein, 11 aa, Homo Sapiens
EVLREGELEKR

SEQ ID NO: 48764 - protein, 11 aa, Homo Sapiens
EVLRHPRDWVR

SEQ ID NO: 48765 - protein, 11 aa, Homo Sapiens
EVLRLPKQQLR

SEQ ID NO: 48766 - protein, 11 aa, Homo Sapiens
EVLTDTRGLYR

SEQ ID NO: 48767 - protein, 11 aa, Homo Sapiens
EVLTPEYMGQR

SEQ ID NO: 48768 - protein, 11 aa, Homo Sapiens
EVMPGPIGLPR

SEQ ID NO: 48769 - protein, 11 aa, Homo Sapiens
EVMQWSQSLEK

SEQ ID NO: 48770 - protein, 11 aa, Homo Sapiens
EVMRQRGINMR

SEQ ID NO: 48771 - protein, 11 aa, Homo Sapiens
EVNGKLRMLMR

SEQ ID NO: 48772 - protein, 11 aa, Homo Sapiens
EVNLLVEEIHR

SEQ ID NO: 48773 - protein, 11 aa, Homo Sapiens
EVNRLTESTYR

SEQ ID NO: 48774 - protein, 11 aa, Homo Sapiens
EVPGSPIFVMR

SEQ ID NO: 48775 - protein, 11 aa, Homo Sapiens
EVQDRVMLTGR

SEQ ID NO: 48776 - protein, 11 aa, Homo Sapiens
EVQGSLALVSR

SEQ ID NO: 48777 - protein, 11 aa, Homo Sapiens
EVQKRKQLELR

SEQ ID NO: 48778 - protein, 11 aa, Homo Sapiens
EVQLKQHISSR

SEQ ID NO: 48779 - protein, 11 aa, Homo Sapiens
EVQQARDLQNR

SEQ ID NO: 48780 - protein, 11 aa, Homo Sapiens
EVQVLDDKNVR

SEQ ID NO: 48781 - protein, 11 aa, Homo Sapiens
EVRADTGGLGR

SEQ ID NO: 48782 - protein, 11 aa, Homo Sapiens
EVRAVGQGVLR

SEQ ID NO: 48783 - protein, 11 aa, Homo Sapiens
EVREPPFHLTR

SEQ ID NO: 48784 - protein, 11 aa, Homo Sapiens
EVRFGGKKTQR

SEQ ID NO: 48785 - protein, 11 aa, Homo Sapiens
EVRGSNGAFYK

SEQ ID NO: 48786 - protein, 11 aa, Homo Sapiens
EVRQIASIVQR

SEQ ID NO: 48787 - protein, 11 aa, Homo Sapiens
EVRVANELNAR

SEQ ID NO: 48788 - protein, 11 aa, Homo Sapiens
EVTDHNLHELR

SEQ ID NO: 48789 - protein, 11 aa, Homo Sapiens
EVTPVTGASLR

SEQ ID NO: 48790 - protein, 11 aa, Homo Sapiens
EVVDMQKRLHR

SEQ ID NO: 48791 - protein, 11 aa, Homo Sapiens
EVVGIIESRAR

SEQ ID NO: 48792 - protein, 11 aa, Homo Sapiens
EVVPEENWHTR

SEQ ID NO: 48793 - protein, 11 aa, Homo Sapiens
EVVTPNIFNSR

SEQ ID NO: 48794 - protein, 11 aa, Homo Sapiens
EYAAAQKTSLR

SEQ ID NO: 48795 - protein, 11 aa, Homo Sapiens
EYAALLTKHTR

SEQ ID NO: 48796 - protein, 11 aa, Homo Sapiens
EYAAQDQKFQR

SEQ ID NO: 48797 - protein, 11 aa, Homo Sapiens
EYAERPEVARR

SEQ ID NO: 48798 - protein, 11 aa, Homo Sapiens
EYAKLLAKRMK

SEQ ID NO: 48799 - protein, 11 aa, Homo Sapiens
EYFELPELVRR

SEQ ID NO: 48800 - protein, 11 aa, Homo Sapiens
EYIEEVRAKKK

SEQ ID NO: 48801 - protein, 11 aa, Homo Sapiens
EYIGLDSGRIR

SEQ ID NO: 48802 - protein, 11 aa, Homo Sapiens
EYIHSKNFIHR

SEQ ID NO: 48803 - protein, 11 aa, Homo Sapiens
EYIIKTDENVR

SEQ ID NO: 48804 - protein, 11 aa, Homo Sapiens
EYIKDEQKNLK

SEQ ID NO: 48805 - protein, 11 aa, Homo Sapiens
EYIPEDILKNL

SEQ ID NO: 48806 - protein, 11 aa, Homo Sapiens
EYIQKNVQLYK

SEQ ID NO: 48807 - protein, 11 aa, Homo Sapiens
EYIQMSGRAGR

SEQ ID NO: 48808 - protein, 11 aa, Homo Sapiens
EYISSDGSYAR

SEQ ID NO: 48809 - protein, 11 aa, Homo Sapiens
EYITKQGFTIR

SEQ ID NO: 48810 - protein, 11 aa, Homo Sapiens
EYIWENSSSER

SEQ ID NO: 48811 - protein, 11 aa, Homo Sapiens
EYKDPENILHR

SEQ ID NO: 48812 - protein, 11 aa, Homo Sapiens
EYKIADMGHLK

SEQ ID NO: 48813 - protein, 11 aa, Homo Sapiens
EYLCHLEEAKR

SEQ ID NO: 48814 - protein, 11 aa, Homo Sapiens
EYLDYDDTRYH

SEQ ID NO: 48815 - protein, 11 aa, Homo Sapiens
EYLEGNNFVHR

SEQ ID NO: 48816 - protein, 11 aa, Homo Sapiens
EYLEKKNFIHR

SEQ ID NO: 48817 - protein, 11 aa, Homo Sapiens
EYLESKQFLHR

SEQ ID NO: 48818 - protein, 11 aa, Homo Sapiens
EYLHAQGVVHR

SEQ ID NO: 48819 - protein, 11 aa, Homo Sapiens
EYLHGKGIIHR

SEQ ID NO: 48820 - protein, 11 aa, Homo Sapiens
EYLHNYGIVHR

SEQ ID NO: 48821 - protein, 11 aa, Homo Sapiens
EYLHSQGVVHR

SEQ ID NO: 48822 - protein, 11 aa, Homo Sapiens
EYLHSRDVVYR

SEQ ID NO: 48823 - protein, 11 aa, Homo Sapiens
EYLIYQESQCR

SEQ ID NO: 48824 - protein, 11 aa, Homo Sapiens
EYLQADEANKR

SEQ ID NO: 48825 - protein, 11 aa, Homo Sapiens
EYLQNVEQKKR

SEQ ID NO: 48826 - protein, 11 aa, Homo Sapiens
EYLQRYHIIHR

SEQ ID NO: 48827 - protein, 11 aa, Homo Sapiens
EYLQSSGLAQR

SEQ ID NO: 48828 - protein, 11 aa, Homo Sapiens
EYLSNADERLR

SEQ ID NO: 48829 - protein, 11 aa, Homo Sapiens
EYMEHVYLIHR

SEQ ID NO: 48830 - protein, 11 aa, Homo Sapiens
EYMEVRERIHR

SEQ ID NO: 48831 - protein, 11 aa, Homo Sapiens
EYMGNAGRKER

SEQ ID NO: 48832 - protein, 11 aa, Homo Sapiens
EYMNNKEALPK

SEQ ID NO: 48833 - protein, 11 aa, Homo Sapiens
EYNAIGGKYNR

SEQ ID NO: 48834 - protein, 11 aa, Homo Sapiens
EYNDRNKLNTR

SEQ ID NO: 48835 - protein, 11 aa, Homo Sapiens
EYNRYTWVTGR

SEQ ID NO: 48836 - protein, 11 aa, Homo Sapiens
EYQAREQLRAR

SEQ ID NO: 48837 - protein, 11 aa, Homo Sapiens
EYQESNALLLR

SEQ ID NO: 48838 - protein, 11 aa, Homo Sapiens
EYQNQISRQNK

SEQ ID NO: 48839 - protein, 11 aa, Homo Sapiens
EYQPSKNMFEK

SEQ ID NO: 48840 - protein, 11 aa, Homo Sapiens
EYRIQGEVETR

SEQ ID NO: 48841 - protein, 11 aa, Homo Sapiens
EYRQSLHTYLR

SEQ ID NO: 48842 - protein, 11 aa, Homo Sapiens
EYRSEQSVKLR

SEQ ID NO: 48843 - protein, 11 aa, Homo Sapiens
EYSEYLKHNVR

SEQ ID NO: 48844 - protein, 11 aa, Homo Sapiens
EYSSEEIMRER

SEQ ID NO: 48845 - protein, 11 aa, Homo Sapiens
EYVDATNLTPR

SEQ ID NO: 48846 - protein, 11 aa, Homo Sapiens
EYVDNTNLVPR

SEQ ID NO: 48847 - protein, 11 aa, Homo Sapiens
EYVHQIGRVGR

SEQ ID NO: 48848 - protein, 11 aa, Homo Sapiens
EYVHRIGRTGR

SEQ ID NO: 48849 - protein, 11 aa, Homo Sapiens
EYVHSKNLIYR

SEQ ID NO: 48850 - protein, 11 aa, Homo Sapiens
EYVHTKNFIHR

SEQ ID NO: 48851 - protein, 11 aa, Homo Sapiens
EYVHTKSLIYR

SEQ ID NO: 48852 - protein, 11 aa, Homo Sapiens
EYVKAGKRIPR

SEQ ID NO: 48853 - protein, 11 aa, Homo Sapiens
EYVSRMKETQK

SEQ ID NO: 48854 - protein, 11 aa, Homo Sapiens
EYWDRNTRNVK

SEQ ID NO: 48855 - protein, 11 aa, Homo Sapiens
EYWDRQRNRHR

SEQ ID NO: 48856 - protein, 11 aa, Homo Sapiens
EYWRRREEEER

SEQ ID NO: 48857 - protein, 11 aa, Homo Sapiens
EYYSFYDDRQK

SEQ ID NO: 48858 - protein, 11 aa, Homo Sapiens
FELDLVTLRSE

SEQ ID NO: 48859 - protein, 11 aa, Homo Sapiens
FFFDGTKLSGR

SEQ ID NO: 48860 - protein, 11 aa, Homo Sapiens
FSKDNESLISR

SEQ ID NO: 48861 - protein, 11 aa, Homo Sapiens
FSKDNNSIITR

SEQ ID NO: 48862 - protein, 11 aa, Homo Sapiens
FSKMHTSQDFR

SEQ ID NO: 48863 - protein, 11 aa, Homo Sapiens
FSMGNEVLQNR

SEQ ID NO: 48864 - protein, 11 aa, Homo Sapiens
FTARRLLSQVR

SEQ ID NO: 48865 - protein, 11 aa, Homo Sapiens
FTLDINTAYAR

SEQ ID NO: 48866 - protein, 11 aa, Homo Sapiens
FTNEVLTKTYR

SEQ ID NO: 48867 - protein, 11 aa, Homo Sapiens
FTNKITSVHSR

SEQ ID NO: 48868 - protein, 11 aa, Homo Sapiens
FTNSKKSVTLR

SEQ ID NO: 48869 - protein, 11 aa, Homo Sapiens
FTRPFYKALLR

SEQ ID NO: 48870 - protein, 11 aa, Homo Sapiens
FVATKDTRALR

SEQ ID NO: 48871 - protein, 11 aa, Homo Sapiens
FVIDSDHLGHR

SEQ ID NO: 48872 - protein, 11 aa, Homo Sapiens
FVKDSIRLVKR

SEQ ID NO: 48873 - protein, 11 aa, Homo Sapiens
FVQYVNERNAR

SEQ ID NO: 48874 - protein, 11 aa, Homo Sapiens
FYDTISKIRLR

SEQ ID NO: 48875 - protein, 11 aa, Homo Sapiens
FYKDGRIVQSR

SEQ ID NO: 48876 - protein, 11 aa, Homo Sapiens
FYQEHPDLARR

SEQ ID NO: 48877 - protein, 11 aa, Homo Sapiens
HAMQFPAELTR

SEQ ID NO: 48878 - protein, 11 aa, Homo Sapiens
HFIELDENRQR

SEQ ID NO: 48879 - protein, 11 aa, Homo Sapiens
HIIEKDKITTR

SEQ ID NO: 48880 - protein, 11 aa, Homo Sapiens
HIKSFDKNLYR

SEQ ID NO: 48881 - protein, 11 aa, Homo Sapiens
HLVSRPSTSSR

SEQ ID NO: 48882 - protein, 11 aa, Homo Sapiens
HNLDRKWICGR

SEQ ID NO: 48883 - protein, 11 aa, Homo Sapiens
HNLHPDYIHGR

SEQ ID NO: 48884 - protein, 11 aa, Homo Sapiens
HSKESKPTFSR

SEQ ID NO: 48885 - protein, 11 aa, Homo Sapiens
HSKIFTDASSR

SEQ ID NO: 48886 - protein, 11 aa, Homo Sapiens
HSMQPKALIHR

SEQ ID NO: 48887 - protein, 11 aa, Homo Sapiens
HTAPQVLFSHR

SEQ ID NO: 48888 - protein, 11 aa, Homo Sapiens
HTKDNLQSVTR

SEQ ID NO: 48889 - protein, 11 aa, Homo Sapiens
HTLEDQALYNR

SEQ ID NO: 48890 - protein, 11 aa, Homo Sapiens
HTNDTIGSVRR

SEQ ID NO: 48891 - protein, 11 aa, Homo Sapiens
HTQDFLEWRRR

SEQ ID NO: 48892 - protein, 11 aa, Homo Sapiens
HTRQWLKGLVR

SEQ ID NO: 48893 - protein, 11 aa, Homo Sapiens
HVAESSLSRLR

SEQ ID NO: 48894 - protein, 11 aa, Homo Sapiens
HVKFKSKADLR

SEQ ID NO: 48895 - protein, 11 aa, Homo Sapiens
HVKTGGKISLR

SEQ ID NO: 48896 - protein, 11 aa, Homo Sapiens
HVRDADLLKKR

SEQ ID NO: 48897 - protein, 11 aa, Homo Sapiens
HYLGEFSITYK

SEQ ID NO: 48898 - protein, 11 aa, Homo Sapiens
HYLPAEILQKK

SEQ ID NO: 48899 - protein, 11 aa, Homo Sapiens
ITKEPSFISKR

SEQ ID NO: 48900 - protein, 11 aa, Homo Sapiens
ITKNNDLVRKR

SEQ ID NO: 48901 - protein, 11 aa, Homo Sapiens
IVKEVCTVVAR

SEQ ID NO: 48902 - protein, 11 aa, Homo Sapiens
IVQAVSAHRHR

SEQ ID NO: 48903 - protein, 11 aa, Homo Sapiens
IVRPPESGLGR

SEQ ID NO: 48904 - protein, 11 aa, Homo Sapiens
IYQYMEEIYHR

SEQ ID NO: 48905 - protein, 11 aa, Homo Sapiens
LFRPVASQLPR

SEQ ID NO: 48906 - protein, 11 aa, Homo Sapiens
LTKEEDLAALR

SEQ ID NO: 48907 - protein, 11 aa, Homo Sapiens
LTMNEELKRAR

SEQ ID NO: 48908 - protein, 11 aa, Homo Sapiens
LTREHGRAYLR

SEQ ID NO: 48909 - protein, 11 aa, Homo Sapiens
LVKDSTGMLGR

SEQ ID NO: 48910 - protein, 11 aa, Homo Sapiens
LVKPVTINVGR

SEQ ID NO: 48911 - protein, 11 aa, Homo Sapiens
LVRKIQEESLR

SEQ ID NO: 48912 - protein, 11 aa, Homo Sapiens
LYKESVDTHQR

SEQ ID NO: 48913 - protein, 11 aa, Homo Sapiens
LYRHFDETVNR

SEQ ID NO: 48914 - protein, 11 aa, Homo Sapiens
LYYHRRQEELK

SEQ ID NO: 48915 - protein, 11 aa, Homo Sapiens
MAISSGAVVHR

SEQ ID NO: 48916 - protein, 11 aa, Homo Sapiens
MDAKSLTAWSR

SEQ ID NO: 48917 - protein, 11 aa, Homo Sapiens
MFRAAAPGQLR

SEQ ID NO: 48918 - protein, 11 aa, Homo Sapiens
MIKGKTPEEIR

SEQ ID NO: 48919 - protein, 11 aa, Homo Sapiens
MIRHREQEELR

SEQ ID NO: 48920 - protein, 11 aa, Homo Sapiens
MLWERLSSTKR

SEQ ID NO: 48921 - protein, 11 aa, Homo Sapiens
MSKDPTTQKLR

SEQ ID NO: 48922 - protein, 11 aa, Homo Sapiens
MTIMEDYFAYR

SEQ ID NO: 48923 - protein, 11 aa, Homo Sapiens
MTKSGYQPPRL

SEQ ID NO: 48924 - protein, 11 aa, Homo Sapiens
MTLEKNVSVQR

SEQ ID NO: 48925 - protein, 11 aa, Homo Sapiens
MTMDEDYQQKR

SEQ ID NO: 48926 - protein, 11 aa, Homo Sapiens
MTMDKSELVQK

SEQ ID NO: 48927 - protein, 11 aa, Homo Sapiens
MTPPERLFLPR

SEQ ID NO: 48928 - protein, 11 aa, Homo Sapiens
MTRGNQRELAR

SEQ ID NO: 48929 - protein, 11 aa, Homo Sapiens
MVKPTPGLTPR

SEQ ID NO: 48930 - protein, 11 aa, Homo Sapiens
MVLPSRLHWIR

SEQ ID NO: 48931 - protein, 11 aa, Homo Sapiens
MVQKPGFGVGR

SEQ ID NO: 48932 - protein, 11 aa, Homo Sapiens
MYKDGDSVLQR

SEQ ID NO: 48933 - protein, 11 aa, Homo Sapiens
MYKSLDQAISR

SEQ ID NO: 48934 - protein, 11 aa, Homo Sapiens
MYQDECDRRLR

SEQ ID NO: 48935 - protein, 11 aa, Homo Sapiens
MYRNEFTAWYR

SEQ ID NO: 48936 - protein, 11 aa, Homo Sapiens
MYYKFSGFTQK

SEQ ID NO: 48937 - protein, 11 aa, Homo Sapiens
NALEGSTFVSR

SEQ ID NO: 48938 - protein, 11 aa, Homo Sapiens
NFKEENMDTSR

SEQ ID NO: 48939 - protein, 11 aa, Homo Sapiens
NGRPLEMIEPR

SEQ ID NO: 48940 - protein, 11 aa, Homo Sapiens
NIMDPQHRAKL

SEQ ID NO: 48941 - protein, 11 aa, Homo Sapiens
NLAEKSTVHMR

SEQ ID NO: 48942 - protein, 11 aa, Homo Sapiens
NLKDRDFLVQR

SEQ ID NO: 48943 - protein, 11 aa, Homo Sapiens
NLKPGECLRVR

SEQ ID NO: 48944 - protein, 11 aa, Homo Sapiens
NSKSHLLVHQR

SEQ ID NO: 48945 - protein, 11 aa, Homo Sapiens
NTMDADSLVSR

SEQ ID NO: 48946 - protein, 11 aa, Homo Sapiens
NVIESKAYVGR

SEQ ID NO: 48947 - protein, 11 aa, Homo Sapiens
NVKNVSVKDVR

SEQ ID NO: 48948 - protein, 11 aa, Homo Sapiens
NVLEFTSARKR

SEQ ID NO: 48949 - protein, 11 aa, Homo Sapiens
NVRETHSLFFR

SEQ ID NO: 48950 - protein, 11 aa, Homo Sapiens
NVRNGYGFINR

SEQ ID NO: 48951 - protein, 11 aa, Homo Sapiens
NWINVDPSRAR

SEQ ID NO: 48952 - protein, 11 aa, Homo Sapiens
NYFFYNKRLKR

SEQ ID NO: 48953 - protein, 11 aa, Homo Sapiens
NYIVPDKQIFR

SEQ ID NO: 48954 - protein, 11 aa, Homo Sapiens
NYKSEVNSKPR

SEQ ID NO: 48955 - protein, 11 aa, Homo Sapiens
NYLHERGIIYR

SEQ ID NO: 48956 - protein, 11 aa, Homo Sapiens
NYLPYPIHQVR

SEQ ID NO: 48957 - protein, 11 aa, Homo Sapiens
NYNFRGMYNQR

SEQ ID NO: 48958 - protein, 11 aa, Homo Sapiens
NYRDDEKSFSR

SEQ ID NO: 48959 - protein, 11 aa, Homo Sapiens
PMKVVTPGASR

SEQ ID NO: 48960 - protein, 11 aa, Homo Sapiens
QALPSQAFIYR

SEQ ID NO: 48961 - protein, 11 aa, Homo Sapiens
QARLRDDTELR

SEQ ID NO: 48962 - protein, 11 aa, Homo Sapiens
QAYPEELIRQR

SEQ ID NO: 48963 - protein, 11 aa, Homo Sapiens
QFLERFKSSAR

SEQ ID NO: 48964 - protein, 11 aa, Homo Sapiens
QNPDITSSRYR

SEQ ID NO: 48965 - protein, 11 aa, Homo Sapiens
QPLSPIRNRTP

SEQ ID NO: 48966 - protein, 11 aa, Homo Sapiens
QTALRNFQHRR

SEQ ID NO: 48967 - protein, 11 aa, Homo Sapiens
QTKEMDLSVVR

SEQ ID NO: 48968 - protein, 11 aa, Homo Sapiens
QTLTKQDTMLK

SEQ ID NO: 48969 - protein, 11 aa, Homo Sapiens
QVRSIQQTMAR

SEQ ID NO: 48970 - protein, 11 aa, Homo Sapiens
QYKGQAGALER

SEQ ID NO: 48971 - protein, 11 aa, Homo Sapiens
QYLGLDGFVER

SEQ ID NO: 48972 - protein, 11 aa, Homo Sapiens
QYLHENGIIHR

SEQ ID NO: 48973 - protein, 11 aa, Homo Sapiens
QYLVGDKRQPR

SEQ ID NO: 48974 - protein, 11 aa, Homo Sapiens
SFASKNKKDLR

SEQ ID NO: 48975 - protein, 11 aa, Homo Sapiens
SFFSPSPARKR

SEQ ID NO: 48976 - protein, 11 aa, Homo Sapiens
SLKGVDPKFLR

SEQ ID NO: 48977 - protein, 11 aa, Homo Sapiens
SLRELGETQRR

SEQ ID NO: 48978 - protein, 11 aa, Homo Sapiens
STIDWNKLYRR

SEQ ID NO: 48979 - protein, 11 aa, Homo Sapiens
STKGHLLIHSR

SEQ ID NO: 48980 - protein, 11 aa, Homo Sapiens
STKPPGTFLLR

SEQ ID NO: 48981 - protein, 11 aa, Homo Sapiens
STLTASEIRQR

SEQ ID NO: 48982 - protein, 11 aa, Homo Sapiens
STYLRPPHTSR

SEQ ID NO: 48983 - protein, 11 aa, Homo Sapiens
SVIPHQKLFTR

SEQ ID NO: 48984 - protein, 11 aa, Homo Sapiens
SVKEISDIVQR

SEQ ID NO: 48985 - protein, 11 aa, Homo Sapiens
SVKELDSKTIR

SEQ ID NO: 48986 - protein, 11 aa, Homo Sapiens
SVMDQEMRVKR

SEQ ID NO: 48987 - protein, 11 aa, Homo Sapiens
SVQPSSSLSAR

SEQ ID NO: 48988 - protein, 11 aa, Homo Sapiens
SVREGQGFAFR

SEQ ID NO: 48989 - protein, 11 aa, Homo Sapiens
SVREVRQLTLR

SEQ ID NO: 48990 - protein, 11 aa, Homo Sapiens
SVRSGYSHLPR

SEQ ID NO: 48991 - protein, 11 aa, Homo Sapiens
SVTPEGVIKQR

SEQ ID NO: 48992 - protein, 11 aa, Homo Sapiens
SYLHENQIIHR

SEQ ID NO: 48993 - protein, 11 aa, Homo Sapiens
SYQDFYCKKER

SEQ ID NO: 48994 - protein, 11 aa, Homo Sapiens
TAASEEARSLR

SEQ ID NO: 48995 - protein, 11 aa, Homo Sapiens
TAASRPPVTLR

SEQ ID NO: 48996 - protein, 11 aa, Homo Sapiens
TAFDRDRAMQR

SEQ ID NO: 48997 - protein, 11 aa, Homo Sapiens
TAISKKFGDMR

SEQ ID NO: 48998 - protein, 11 aa, Homo Sapiens
TELSVRAKPSA

SEQ ID NO: 48999 - protein, 11 aa, Homo Sapiens
TFKDPRTAEER

SEQ ID NO: 49000 - protein, 11 aa, Homo Sapiens
TIIEVNGKRVR

SEQ ID NO: 49001 - protein, 11 aa, Homo Sapiens
TIMPKDIQLAR

SEQ ID NO: 49002 - protein, 11 aa, Homo Sapiens
TLQEYPAIRYR

SEQ ID NO: 49003 - protein, 11 aa, Homo Sapiens
TMKSANICIGR

SEQ ID NO: 49004 - protein, 11 aa, Homo Sapiens
TNYGIPQRALR

SEQ ID NO: 49005 - protein, 11 aa, Homo Sapiens
TSKLYSLLFRR

SEQ ID NO: 49006 - protein, 11 aa, Homo Sapiens
TSKSYLTVHER

SEQ ID NO: 49007 - protein, 11 aa, Homo Sapiens
TSRQFREDDFR

SEQ ID NO: 49008 - protein, 11 aa, Homo Sapiens
TTFTWNINHAR

SEQ ID NO: 49009 - protein, 11 aa, Homo Sapiens
TTKSYPSKLAR

SEQ ID NO: 49010 - protein, 11 aa, Homo Sapiens
TTLGATQLSER

SEQ ID NO: 49011 - protein, 11 aa, Homo Sapiens
TTLGERAFMNR

SEQ ID NO: 49012 - protein, 11 aa, Homo Sapiens
TTLPDDMITQR

SEQ ID NO: 49013 - protein, 11 aa, Homo Sapiens
TVFDAKRLIGR

SEQ ID NO: 49014 - protein, 11 aa, Homo Sapiens
TVIEKTESWPR

SEQ ID NO: 49015 - protein, 11 aa, Homo Sapiens
TVIPATVVTSR

SEQ ID NO: 49016 - protein, 11 aa, Homo Sapiens
TVKDLRLVTNR

SEQ ID NO: 49017 - protein, 11 aa, Homo Sapiens
TVMSVKIIRNR

SEQ ID NO: 49018 - protein, 11 aa, Homo Sapiens
TVNGCPEFRAR

SEQ ID NO: 49019 - protein, 11 aa, Homo Sapiens
TVREGQTICVR

SEQ ID NO: 49020 - protein, 11 aa, Homo Sapiens
TYFQAKIRALK

SEQ ID NO: 49021 - protein, 11 aa, Homo Sapiens
TYIAEEYSRLR

SEQ ID NO: 49022 - protein, 11 aa, Homo Sapiens
TYICPFTGAVR

SEQ ID NO: 49023 - protein, 11 aa, Homo Sapiens
TYILRPVFQQR

SEQ ID NO: 49024 - protein, 11 aa, Homo Sapiens
TYKGEVLGITR

SEQ ID NO: 49025 - protein, 11 aa, Homo Sapiens
TYKRFEGLTAR

SEQ ID NO: 49026 - protein, 11 aa, Homo Sapiens
TYKRFEGLTQR

SEQ ID NO: 49027 - protein, 11 aa, Homo Sapiens
TYLSESQIQSR

SEQ ID NO: 49028 - protein, 11 aa, Homo Sapiens
TYMPSSSGSAR

SEQ ID NO: 49029 - protein, 11 aa, Homo Sapiens
TYQNYKNFNSR

SEQ ID NO: 49030 - protein, 11 aa, Homo Sapiens
TYRDPLYEIVR

SEQ ID NO: 49031 - protein, 11 aa, Homo Sapiens
TYTDLESLRNR

SEQ ID NO: 49032 - protein, 11 aa, Homo Sapiens
TYYDNFCAIAR

SEQ ID NO: 49033 - protein, 11 aa, Homo Sapiens
TYYEGGYFKAR

SEQ ID NO: 49034 - protein, 11 aa, Homo Sapiens
TYYGSFVTRAL

SEQ ID NO: 49035 - protein, 11 aa, Homo Sapiens
VPMRPGILVQR

SEQ ID NO: 49036 - protein, 11 aa, Homo Sapiens
VVAPPGVVVSR

SEQ ID NO: 49037 - protein, 11 aa, Homo Sapiens
VVKPDQLIKRR

SEQ ID NO: 49038 - protein, 11 aa, Homo Sapiens
VYKNVRPAEVR

SEQ ID NO: 49039 - protein, 11 aa, Homo Sapiens
VYRNPESFKEK

SEQ ID NO: 49040 - protein, 11 aa, Homo Sapiens
WTLDPTSLSTR

SEQ ID NO: 49041 - protein, 11 aa, Homo Sapiens
YAKSEEFAVCR

SEQ ID NO: 49042 - protein, 11 aa, Homo Sapiens
YFIPATGHSLR

SEQ ID NO: 49043 - protein, 11 aa, Homo Sapiens
YTKIVVKGMTR

SEQ ID NO: 49044 - protein, 11 aa, Homo Sapiens
YTLQLDGHRTR

SEQ ID NO: 49045 - protein, 11 aa, Homo Sapiens
YTRQTGIVLNR

SEQ ID NO: 49046 - protein, 11 aa, Homo Sapiens
YVKEISEKTER

SEQ ID NO: 49047 - protein, 11 aa, Homo Sapiens
YVRNQQTIGAR

SEQ ID NO: 49048 - protein, 11 aa, Homo Sapiens
YYADNWKDHLR

SEQ ID NO: 49049 - protein, 11 aa, Homo Sapiens
YYFEGGLRKVR

SEQ ID NO: 49050 - protein, 11 aa, Homo Sapiens
YYIEDHNGRQR

SEQ ID NO: 49051 - protein, 11 aa, Homo Sapiens
YYIHRNKILHR

SEQ ID NO: 49052 - protein, 11 aa, Homo Sapiens
YYIIKTERDRK

SEQ ID NO: 49053 - protein, 11 aa, Homo Sapiens
YYKFDYKAHQR

SEQ ID NO: 49054 - protein, 8 aa, Homo Sapiens
AEGPEIPR

SEQ ID NO: 49055 - protein, 8 aa, Homo Sapiens
AGPSIVHR

SEQ ID NO: 49056 - protein, 8 aa, Homo Sapiens
AIKGMHIR

SEQ ID NO: 49057 - protein, 8 aa, Homo Sapiens
DIAVGTKR

SEQ ID NO: 49058 - protein, 8 aa, Homo Sapiens
DLAHITAR

SEQ ID NO: 49059 - protein, 8 aa, Homo Sapiens
DLFVFPYR

SEQ ID NO: 49060 - protein, 8 aa, Homo Sapiens
DLNTGRMR

SEQ ID NO: 49061 - protein, 8 aa, Homo Sapiens
DLREGIER

SEQ ID NO: 49062 - protein, 8 aa, Homo Sapiens
DLYNGATR

SEQ ID NO: 49063 - protein, 8 aa, Homo Sapiens
DMFTGRLR

SEQ ID NO: 49064 - protein, 8 aa, Homo Sapiens
DPFTGAGR

SEQ ID NO: 49065 - protein, 8 aa, Homo Sapiens
DSYSGLGR

SEQ ID NO: 49066 - protein, 8 aa, Homo Sapiens
DVKEGLQR

SEQ ID NO: 49067 - protein, 8 aa, Homo Sapiens
DVRIGMTR

SEQ ID NO: 49068 - protein, 8 aa, Homo Sapiens
DVYLGRYR

SEQ ID NO: 49069 - protein, 8 aa, Homo Sapiens
EAALGLER

SEQ ID NO: 49070 - protein, 8 aa, Homo Sapiens
EAAYGELR

SEQ ID NO: 49071 - protein, 8 aa, Homo Sapiens
EAFEAIPR

SEQ ID NO: 49072 - protein, 8 aa, Homo Sapiens
EAFLAQAR

SEQ ID NO: 49073 - protein, 8 aa, Homo Sapiens
EAFRELGR

SEQ ID NO: 49074 - protein, 8 aa, Homo Sapiens
EAFVGAER

SEQ ID NO: 49075 - protein, 8 aa, Homo Sapiens
EAFVSHYR

SEQ ID NO: 49076 - protein, 8 aa, Homo Sapiens
EATISVCR

SEQ ID NO: 49077 - protein, 8 aa, Homo Sapiens
EAVFGTPR

SEQ ID NO: 49078 - protein, 8 aa, Homo Sapiens
EAWVGRDR

SEQ ID NO: 49079 - protein, 8 aa, Homo Sapiens
EAYIGKMR

SEQ ID NO: 49080 - protein, 8 aa, Homo Sapiens
EAYLASLR

SEQ ID NO: 49081 - protein, 8 aa, Homo Sapiens
EGFFGLYR

SEQ ID NO: 49082 - protein, 8 aa, Homo Sapiens
EIFFGKTR

SEQ ID NO: 49083 - protein, 8 aa, Homo Sapiens
EIFRPFYR

SEQ ID NO: 49084 - protein, 8 aa, Homo Sapiens
EIYKALSR

SEQ ID NO: 49085 - protein, 8 aa, Homo Sapiens
ELFLAGRR

SEQ ID NO: 49086 - protein, 8 aa, Homo Sapiens
ELFQSSFR

SEQ ID NO: 49087 - protein, 8 aa, Homo Sapiens
ELGPASPR

SEQ ID NO: 49088 - protein, 8 aa, Homo Sapiens
ELHLSTER

SEQ ID NO: 49089 - protein, 8 aa, Homo Sapiens
ELSTGMPR

SEQ ID NO: 49090 - protein, 8 aa, Homo Sapiens
ENFLSRKR

SEQ ID NO: 49091 - protein, 8 aa, Homo Sapiens
EQFTAMFR

SEQ ID NO: 49092 - protein, 8 aa, Homo Sapiens
ESHTGILR

SEQ ID NO: 49093 - protein, 8 aa, Homo Sapiens
ESYVGKLR

SEQ ID NO: 49094 - protein, 8 aa, Homo Sapiens
ETFLAKSR

SEQ ID NO: 49095 - protein, 8 aa, Homo Sapiens
ETFVSLHR

SEQ ID NO: 49096 - protein, 8 aa, Homo Sapiens
ETGQVLGR

SEQ ID NO: 49097 - protein, 8 aa, Homo Sapiens
ETMEPALR

SEQ ID NO: 49098 - protein, 8 aa, Homo Sapiens
ETVVGLAR

SEQ ID NO: 49099 - protein, 8 aa, Homo Sapiens
EVAEFLAR

SEQ ID NO: 49100 - protein, 8 aa, Homo Sapiens
EVAVGVCR

SEQ ID NO: 49101 - protein, 8 aa, Homo Sapiens
EVFPGRNR

SEQ ID NO: 49102 - protein, 8 aa, Homo Sapiens
EVFRFAYY

SEQ ID NO: 49103 - protein, 8 aa, Homo Sapiens
EVGPVLSK

SEQ ID NO: 49104 - protein, 8 aa, Homo Sapiens
EVGPVVSF

SEQ ID NO: 49105 - protein, 8 aa, Homo Sapiens
EVIAVNTR

SEQ ID NO: 49106 - protein, 8 aa, Homo Sapiens
EVKVTIKR

SEQ ID NO: 49107 - protein, 8 aa, Homo Sapiens
EVLLGSAR

SEQ ID NO: 49108 - protein, 8 aa, Homo Sapiens
EVLVTASR

SEQ ID NO: 49109 - protein, 8 aa, Homo Sapiens
EVMQAVAR

SEQ ID NO: 49110 - protein, 8 aa, Homo Sapiens
EVMQAVQR

SEQ ID NO: 49111 - protein, 8 aa, Homo Sapiens
EVMQSVCR

SEQ ID NO: 49112 - protein, 8 aa, Homo Sapiens
EVSPITGR

SEQ ID NO: 49113 - protein, 8 aa, Homo Sapiens
EVSTGINR

SEQ ID NO: 49114 - protein, 8 aa, Homo Sapiens
EVVVGTTR

SEQ ID NO: 49115 - protein, 8 aa, Homo Sapiens
FTYVGGPR

SEQ ID NO: 49116 - protein, 8 aa, Homo Sapiens
GPREAGLR

SEQ ID NO: 49117 - protein, 8 aa, Homo Sapiens
LADPTERF

SEQ ID NO: 49118 - protein, 8 aa, Homo Sapiens
LQQAKDEI

SEQ ID NO: 49119 - protein, 8 aa, Homo Sapiens
LQQAKEDL

SEQ ID NO: 49120 - protein, 8 aa, Homo Sapiens
LTAVVQKR

SEQ ID NO: 49121 - protein, 8 aa, Homo Sapiens
MSLTACKV

SEQ ID NO: 49122 - protein, 8 aa, Homo Sapiens
MVQQLGKA

SEQ ID NO: 49123 - protein, 8 aa, Homo Sapiens
NVFVSANR

SEQ ID NO: 49124 - protein, 8 aa, Homo Sapiens
NVYCGVHR

SEQ ID NO: 49125 - protein, 8 aa, Homo Sapiens
PDAVGKCR

SEQ ID NO: 49126 - protein, 8 aa, Homo Sapiens
PFGAGRHR

SEQ ID NO: 49127 - protein, 8 aa, Homo Sapiens
PFHKAIRR

SEQ ID NO: 49128 - protein, 8 aa, Homo Sapiens
PGPRPLAR

SEQ ID NO: 49129 - protein, 8 aa, Homo Sapiens
PRRASVTR

SEQ ID NO: 49130 - protein, 8 aa, Homo Sapiens
QAPKPRKQ

SEQ ID NO: 49131 - protein, 8 aa, Homo Sapiens
QLYWSHPR

SEQ ID NO: 49132 - protein, 8 aa, Homo Sapiens
SGPSIVHR

SEQ ID NO: 49133 - protein, 8 aa, Homo Sapiens
SPFAGALR

SEQ ID NO: 49134 - protein, 8 aa, Homo Sapiens
SVLGPNAR

SEQ ID NO: 49135 - protein, 8 aa, Homo Sapiens
SVVERNAR

SEQ ID NO: 49136 - protein, 8 aa, Homo Sapiens
TGNPTVVR

SEQ ID NO: 49137 - protein, 8 aa, Homo Sapiens
VAAVAARR

SEQ ID NO: 49138 - protein, 8 aa, Homo Sapiens
VEADPGLR

SEQ ID NO: 49139 - protein, 8 aa, Homo Sapiens
VHAPSLRR

SEQ ID NO: 49140 - protein, 8 aa, Homo Sapiens
VKGPGLQR

SEQ ID NO: 49141 - protein, 8 aa, Homo Sapiens
VVVSGKLR

SEQ ID NO: 49142 - protein, 9 aa, Homo Sapiens
AAADVGLTR

SEQ ID NO: 49143 - protein, 9 aa, Homo Sapiens
AAAEGTVGR

SEQ ID NO: 49144 - protein, 9 aa, Homo Sapiens
AAAGAFAGR

SEQ ID NO: 49145 - protein, 9 aa, Homo Sapiens
AAAGLAGPR

SEQ ID NO: 49146 - protein, 9 aa, Homo Sapiens
AAAGPARPR

SEQ ID NO: 49147 - protein, 9 aa, Homo Sapiens
AAANPTLAF

SEQ ID NO: 49148 - protein, 9 aa, Homo Sapiens
AAAPGAHYR

SEQ ID NO: 49149 - protein, 9 aa, Homo Sapiens
AAAPGLGPR

SEQ ID NO: 49150 - protein, 9 aa, Homo Sapiens
AAGPVAAPR

SEQ ID NO: 49151 - protein, 9 aa, Homo Sapiens
AAIGPTTAR

SEQ ID NO: 49152 - protein, 9 aa, Homo Sapiens
AAVAAVAAR

SEQ ID NO: 49153 - protein, 9 aa, Homo Sapiens
AAVDSSVPR

SEQ ID NO: 49154 - protein, 9 aa, Homo Sapiens
AEAALGLAR

SEQ ID NO: 49155 - protein, 9 aa, Homo Sapiens
AEVLGLILR

SEQ ID NO: 49156 - protein, 9 aa, Homo Sapiens
APAAPAAPR

SEQ ID NO: 49157 - protein, 9 aa, Homo Sapiens
APRAPGLAR

SEQ ID NO: 49158 - protein, 9 aa, Homo Sapiens
AVAAVAARR

SEQ ID NO: 49159 - protein, 9 aa, Homo Sapiens
AVAFSASAR

SEQ ID NO: 49160 - protein, 9 aa, Homo Sapiens
AVAPPAGPR

SEQ ID NO: 49161 - protein, 9 aa, Homo Sapiens
AVIDAGVCR

SEQ ID NO: 49162 - protein, 9 aa, Homo Sapiens
AVIDVGINR

SEQ ID NO: 49163 - protein, 9 aa, Homo Sapiens
AVIFINTRR

SEQ ID NO: 49164 - protein, 9 aa, Homo Sapiens
AVIGIATKR

SEQ ID NO: 49165 - protein, 9 aa, Homo Sapiens
AVIGYLSTR

SEQ ID NO: 49166 - protein, 9 aa, Homo Sapiens
AVISGVGTR

SEQ ID NO: 49167 - protein, 9 aa, Homo Sapiens
AVTPPGLAR

SEQ ID NO: 49168 - protein, 9 aa, Homo Sapiens
AVVAGGLGR

SEQ ID NO: 49169 - protein, 9 aa, Homo Sapiens
AVVPNTSSR

SEQ ID NO: 49170 - protein, 9 aa, Homo Sapiens
CIISLVTQR

SEQ ID NO: 49171 - protein, 9 aa, Homo Sapiens
CPAPPGYLR

SEQ ID NO: 49172 - protein, 9 aa, Homo Sapiens
CVNKSTHEF

SEQ ID NO: 49173 - protein, 9 aa, Homo Sapiens
CVSPTVNQR

SEQ ID NO: 49174 - protein, 9 aa, Homo Sapiens
DAAGVFCIR

SEQ ID NO: 49175 - protein, 9 aa, Homo Sapiens
DAAIPSKSR

SEQ ID NO: 49176 - protein, 9 aa, Homo Sapiens
DAAIVGAVR

SEQ ID NO: 49177 - protein, 9 aa, Homo Sapiens
DAAKDSILR

SEQ ID NO: 49178 - protein, 9 aa, Homo Sapiens
DAAPQLGKR

SEQ ID NO: 49179 - protein, 9 aa, Homo Sapiens
DAGPPTHAF

SEQ ID NO: 49180 - protein, 9 aa, Homo Sapiens
DAILASSAR

SEQ ID NO: 49181 - protein, 9 aa, Homo Sapiens
DAIRGGLPK

SEQ ID NO: 49182 - protein, 9 aa, Homo Sapiens
DAISYRFPR

SEQ ID NO: 49183 - protein, 9 aa, Homo Sapiens
DALGGLLNR

SEQ ID NO: 49184 - protein, 9 aa, Homo Sapiens
DAQKPSLTR

SEQ ID NO: 49185 - protein, 9 aa, Homo Sapiens
DAVDVFETR

SEQ ID NO: 49186 - protein, 9 aa, Homo Sapiens
DAVEDRLDR

SEQ ID NO: 49187 - protein, 9 aa, Homo Sapiens
DAYWPEAKR

SEQ ID NO: 49188 - protein, 9 aa, Homo Sapiens
DIFKKSKPR

SEQ ID NO: 49189 - protein, 9 aa, Homo Sapiens
DIFNQVVPR

SEQ ID NO: 49190 - protein, 9 aa, Homo Sapiens
DIFSEVVGR

SEQ ID NO: 49191 - protein, 9 aa, Homo Sapiens
DIIAKVTRR

SEQ ID NO: 49192 - protein, 9 aa, Homo Sapiens
DIIDPAILR

SEQ ID NO: 49193 - protein, 9 aa, Homo Sapiens
DIIEKVMAR

SEQ ID NO: 49194 - protein, 9 aa, Homo Sapiens
DIIPNPQER

SEQ ID NO: 49195 - protein, 9 aa, Homo Sapiens
DIIQPSSTR

SEQ ID NO: 49196 - protein, 9 aa, Homo Sapiens
DIITNLRCR

SEQ ID NO: 49197 - protein, 9 aa, Homo Sapiens
DIKEKSKFR

SEQ ID NO: 49198 - protein, 9 aa, Homo Sapiens
DILFTEQER

SEQ ID NO: 49199 - protein, 9 aa, Homo Sapiens
DIMAAVSGR

SEQ ID NO: 49200 - protein, 9 aa, Homo Sapiens
DIMDSSLTR

SEQ ID NO: 49201 - protein, 9 aa, Homo Sapiens
DIQDPGVPR

SEQ ID NO: 49202 - protein, 9 aa, Homo Sapiens
DITEPSIGR

SEQ ID NO: 49203 - protein, 9 aa, Homo Sapiens
DITTPKAAR

SEQ ID NO: 49204 - protein, 9 aa, Homo Sapiens
DIVKPGMRR

SEQ ID NO: 49205 - protein, 9 aa, Homo Sapiens
DIVTVGECR

SEQ ID NO: 49206 - protein, 9 aa, Homo Sapiens
DIWTTTANR

SEQ ID NO: 49207 - protein, 9 aa, Homo Sapiens
DIYFNPKTR

SEQ ID NO: 49208 - protein, 9 aa, Homo Sapiens
DIYLTQILR

SEQ ID NO: 49209 - protein, 9 aa, Homo Sapiens
DLANVRVGR

SEQ ID NO: 49210 - protein, 9 aa, Homo Sapiens
DLFYNIATR

SEQ ID NO: 49211 - protein, 9 aa, Homo Sapiens
DLHEHPLYR

SEQ ID NO: 49212 - protein, 9 aa, Homo Sapiens
DLIAAVSTR

SEQ ID NO: 49213 - protein, 9 aa, Homo Sapiens
DLIAIVSNR

SEQ ID NO: 49214 - protein, 9 aa, Homo Sapiens
DLIFKTGGR

SEQ ID NO: 49215 - protein, 9 aa, Homo Sapiens
DLIGCIIGR

SEQ ID NO: 49216 - protein, 9 aa, Homo Sapiens
DLKGSTVAR

SEQ ID NO: 49217 - protein, 9 aa, Homo Sapiens
DLREQTHSR

SEQ ID NO: 49218 - protein, 9 aa, Homo Sapiens
DLREQTHTR

SEQ ID NO: 49219 - protein, 9 aa, Homo Sapiens
DLSSSSSLR

SEQ ID NO: 49220 - protein, 9 aa, Homo Sapiens
DLYLCPRQR

SEQ ID NO: 49221 - protein, 9 aa, Homo Sapiens
DLYLKPIQR

SEQ ID NO: 49222 - protein, 9 aa, Homo Sapiens
DMAAQITQR

SEQ ID NO: 49223 - protein, 9 aa, Homo Sapiens
DMFATPQYR

SEQ ID NO: 49224 - protein, 9 aa, Homo Sapiens
DMNEPSVFR

SEQ ID NO: 49225 - protein, 9 aa, Homo Sapiens
DNFFTGRKR

SEQ ID NO: 49226 - protein, 9 aa, Homo Sapiens
DPAFGSSGR

SEQ ID NO: 49227 - protein, 9 aa, Homo Sapiens
DPAGVHPPR

SEQ ID NO: 49228 - protein, 9 aa, Homo Sapiens
DPFHKAIRR

SEQ ID NO: 49229 - protein, 9 aa, Homo Sapiens
DPGGGGLFR

SEQ ID NO: 49230 - protein, 9 aa, Homo Sapiens
DPHSPSRFR

SEQ ID NO: 49231 - protein, 9 aa, Homo Sapiens
DPIEVVGQR

SEQ ID NO: 49232 - protein, 9 aa, Homo Sapiens
DPLGAAANR

SEQ ID NO: 49233 - protein, 9 aa, Homo Sapiens
DPNKPSGFR

SEQ ID NO: 49234 - protein, 9 aa, Homo Sapiens
DPQGNTIYR

SEQ ID NO: 49235 - protein, 9 aa, Homo Sapiens
DPSGWWTGR

SEQ ID NO: 49236 - protein, 9 aa, Homo Sapiens
DPVTSVGKR

SEQ ID NO: 49237 - protein, 9 aa, Homo Sapiens
DQGPTTKNL

SEQ ID NO: 49238 - protein, 9 aa, Homo Sapiens
DQNPDAALR

SEQ ID NO: 49239 - protein, 9 aa, Homo Sapiens
DSAPVETPR

SEQ ID NO: 49240 - protein, 9 aa, Homo Sapiens
DSAQQGLYR

SEQ ID NO: 49241 - protein, 9 aa, Homo Sapiens
DSFSAGEPR

SEQ ID NO: 49242 - protein, 9 aa, Homo Sapiens
DSIDPALRR

SEQ ID NO: 49243 - protein, 9 aa, Homo Sapiens
DSIEDRYPR

SEQ ID NO: 49244 - protein, 9 aa, Homo Sapiens
DTAAQITQR

SEQ ID NO: 49245 - protein, 9 aa, Homo Sapiens
DTAGNDAFR

SEQ ID NO: 49246 - protein, 9 aa, Homo Sapiens
DTAHTFSLR

SEQ ID NO: 49247 - protein, 9 aa, Homo Sapiens
DTANDGFVR

SEQ ID NO: 49248 - protein, 9 aa, Homo Sapiens
DTHGSFVVR

SEQ ID NO: 49249 - protein, 9 aa, Homo Sapiens
DTIDSLRSR

SEQ ID NO: 49250 - protein, 9 aa, Homo Sapiens
DTIEIITDR

SEQ ID NO: 49251 - protein, 9 aa, Homo Sapiens
DTIGYLLTR

SEQ ID NO: 49252 - protein, 9 aa, Homo Sapiens
DTITETDLR

SEQ ID NO: 49253 - protein, 9 aa, Homo Sapiens
DTMPPKGVR

SEQ ID NO: 49254 - protein, 9 aa, Homo Sapiens
DTSGICNLR

SEQ ID NO: 49255 - protein, 9 aa, Homo Sapiens
DTVAQITQR

SEQ ID NO: 49256 - protein, 9 aa, Homo Sapiens
DTVATLSER

SEQ ID NO: 49257 - protein, 9 aa, Homo Sapiens
DVAAQQSLR

SEQ ID NO: 49258 - protein, 9 aa, Homo Sapiens
DVAGIGWER

SEQ ID NO: 49259 - protein, 9 aa, Homo Sapiens
DVAHVNTVM

SEQ ID NO: 49260 - protein, 9 aa, Homo Sapiens
DVAQSTHVL

SEQ ID NO: 49261 - protein, 9 aa, Homo Sapiens
DVFEGSIIR

SEQ ID NO: 49262 - protein, 9 aa, Homo Sapiens
DVFGTGASK

SEQ ID NO: 49263 - protein, 9 aa, Homo Sapiens
DVFPGPSFR

SEQ ID NO: 49264 - protein, 9 aa, Homo Sapiens
DVFVVGTER

SEQ ID NO: 49265 - protein, 9 aa, Homo Sapiens
DVGKSTFNR

SEQ ID NO: 49266 - protein, 9 aa, Homo Sapiens
DVGPTSHNR

SEQ ID NO: 49267 - protein, 9 aa, Homo Sapiens
DVHVAVVVR

SEQ ID NO: 49268 - protein, 9 aa, Homo Sapiens
DVIDDASSR

SEQ ID NO: 49269 - protein, 9 aa, Homo Sapiens
DVIGVTKGK

SEQ ID NO: 49270 - protein, 9 aa, Homo Sapiens
DVIKPGTVK

SEQ ID NO: 49271 - protein, 9 aa, Homo Sapiens
DVINPMALR

SEQ ID NO: 49272 - protein, 9 aa, Homo Sapiens
DVINSARTR

SEQ ID NO: 49273 - protein, 9 aa, Homo Sapiens
DVLQTGTQR

SEQ ID NO: 49274 - protein, 9 aa, Homo Sapiens
DVMPSGRSR

SEQ ID NO: 49275 - protein, 9 aa, Homo Sapiens
DVNIKSTER

SEQ ID NO: 49276 - protein, 9 aa, Homo Sapiens
DVNLSHSER

SEQ ID NO: 49277 - protein, 9 aa, Homo Sapiens
DVNNIGKYR

SEQ ID NO: 49278 - protein, 9 aa, Homo Sapiens
DVNSGFAKR

SEQ ID NO: 49279 - protein, 9 aa, Homo Sapiens
DVPSPFNHR

SEQ ID NO: 49280 - protein, 9 aa, Homo Sapiens
DVQPSGAQR

SEQ ID NO: 49281 - protein, 9 aa, Homo Sapiens
DVRMGGSFR

SEQ ID NO: 49282 - protein, 9 aa, Homo Sapiens
DVRQKVLER

SEQ ID NO: 49283 - protein, 9 aa, Homo Sapiens
DVRSVTSVR

SEQ ID NO: 49284 - protein, 9 aa, Homo Sapiens
DVSHPIIYR

SEQ ID NO: 49285 - protein, 9 aa, Homo Sapiens
DVVGRFNER

SEQ ID NO: 49286 - protein, 9 aa, Homo Sapiens
DVVSKFLNR

SEQ ID NO: 49287 - protein, 9 aa, Homo Sapiens
DVVWETKPK

SEQ ID NO: 49288 - protein, 9 aa, Homo Sapiens
DVYGGTNRY

SEQ ID NO: 49289 - protein, 9 aa, Homo Sapiens
DVYPEIIER

SEQ ID NO: 49290 - protein, 9 aa, Homo Sapiens
DVYQAVSKR

SEQ ID NO: 49291 - protein, 9 aa, Homo Sapiens
DVYRGLQER

SEQ ID NO: 49292 - protein, 9 aa, Homo Sapiens
DVYSGTPTK

SEQ ID NO: 49293 - protein, 9 aa, Homo Sapiens
DVYTPKSSR

SEQ ID NO: 49294 - protein, 9 aa, Homo Sapiens
EAAAALTRM

SEQ ID NO: 49295 - protein, 9 aa, Homo Sapiens
EAAAASAFL

SEQ ID NO: 49296 - protein, 9 aa, Homo Sapiens
EAAAIGALR

SEQ ID NO: 49297 - protein, 9 aa, Homo Sapiens
EAAAIIAQR

SEQ ID NO: 49298 - protein, 9 aa, Homo Sapiens
EAAAPLRVR

SEQ ID NO: 49299 - protein, 9 aa, Homo Sapiens
EAAAVLMAR

SEQ ID NO: 49300 - protein, 9 aa, Homo Sapiens
EAADAMSRL

SEQ ID NO: 49301 - protein, 9 aa, Homo Sapiens
EAADIIQKL

SEQ ID NO: 49302 - protein, 9 aa, Homo Sapiens
EAAEKLKNR

SEQ ID NO: 49303 - protein, 9 aa, Homo Sapiens
EAAESIAFR

SEQ ID NO: 49304 - protein, 9 aa, Homo Sapiens
EAAFANGKL

SEQ ID NO: 49305 - protein, 9 aa, Homo Sapiens
EAAFATKDR

SEQ ID NO: 49306 - protein, 9 aa, Homo Sapiens
EAAGASKAL

SEQ ID NO: 49307 - protein, 9 aa, Homo Sapiens
EAAIGVTKR

SEQ ID NO: 49308 - protein, 9 aa, Homo Sapiens
EAAKDLLYR

SEQ ID NO: 49309 - protein, 9 aa, Homo Sapiens
EAAKVFGLR

SEQ ID NO: 49310 - protein, 9 aa, Homo Sapiens
EAALCALRR

SEQ ID NO: 49311 - protein, 9 aa, Homo Sapiens
EAALGVAMR

SEQ ID NO: 49312 - protein, 9 aa, Homo Sapiens
EAALSPTFR

SEQ ID NO: 49313 - protein, 9 aa, Homo Sapiens
EAAMAFAYL

SEQ ID NO: 49314 - protein, 9 aa, Homo Sapiens
EAAPEYFRR

SEQ ID NO: 49315 - protein, 9 aa, Homo Sapiens
EAAPGKSEL

SEQ ID NO: 49316 - protein, 9 aa, Homo Sapiens
EAAPPGELY

SEQ ID NO: 49317 - protein, 9 aa, Homo Sapiens
EAAPVSGYR

SEQ ID NO: 49318 - protein, 9 aa, Homo Sapiens
EAAPVVVGH

SEQ ID NO: 49319 - protein, 9 aa, Homo Sapiens
EAAQKFLER

SEQ ID NO: 49320 - protein, 9 aa, Homo Sapiens
EAASPPALF

SEQ ID NO: 49321 - protein, 9 aa, Homo Sapiens
EAATVTSYL

SEQ ID NO: 49322 - protein, 9 aa, Homo Sapiens
EAAVAFLFR

SEQ ID NO: 49323 - protein, 9 aa, Homo Sapiens
EAAVAIKAM

SEQ ID NO: 49324 - protein, 9 aa, Homo Sapiens
EAAWAISNL

SEQ ID NO: 49325 - protein, 9 aa, Homo Sapiens
EAAWPHLQL

SEQ ID NO: 49326 - protein, 9 aa, Homo Sapiens
EAAYIGSMR

SEQ ID NO: 49327 - protein, 9 aa, Homo Sapiens
EAELGTFPR

SEQ ID NO: 49328 - protein, 9 aa, Homo Sapiens
EAEVASLNR

SEQ ID NO: 49329 - protein, 9 aa, Homo Sapiens
EAFDFVKQR

SEQ ID NO: 49330 - protein, 9 aa, Homo Sapiens
EAFDSTSRF

SEQ ID NO: 49331 - protein, 9 aa, Homo Sapiens
EAFEFVKQR

SEQ ID NO: 49332 - protein, 9 aa, Homo Sapiens
EAFENLGKR

SEQ ID NO: 49333 - protein, 9 aa, Homo Sapiens
EAFLHQQKR

SEQ ID NO: 49334 - protein, 9 aa, Homo Sapiens
EAFLTAQTK

SEQ ID NO: 49335 - protein, 9 aa, Homo Sapiens
EAFQTTISK

SEQ ID NO: 49336 - protein, 9 aa, Homo Sapiens
EAFSELSKR

SEQ ID NO: 49337 - protein, 9 aa, Homo Sapiens
EAFSRPLSR

SEQ ID NO: 49338 - protein, 9 aa, Homo Sapiens
EAFVIDAVR

SEQ ID NO: 49339 - protein, 9 aa, Homo Sapiens
EAGAIISTR

SEQ ID NO: 49340 - protein, 9 aa, Homo Sapiens
EAGCGGLLR

SEQ ID NO: 49341 - protein, 9 aa, Homo Sapiens
EAGEPTTLL

SEQ ID NO: 49342 - protein, 9 aa, Homo Sapiens
EAGGPLTPR

SEQ ID NO: 49343 - protein, 9 aa, Homo Sapiens
EAGGRTLFR

SEQ ID NO: 49344 - protein, 9 aa, Homo Sapiens
EAGGSEIQR

SEQ ID NO: 49345 - protein, 9 aa, Homo Sapiens
EAGPGTCTF

SEQ ID NO: 49346 - protein, 9 aa, Homo Sapiens
EAGPSIVHR

SEQ ID NO: 49347 - protein, 9 aa, Homo Sapiens
EAGPYGANM

SEQ ID NO: 49348 - protein, 9 aa, Homo Sapiens
EAGVGGRFR

SEQ ID NO: 49349 - protein, 9 aa, Homo Sapiens
EAHAQSIGM

SEQ ID NO: 49350 - protein, 9 aa, Homo Sapiens
EAHARIHLR

SEQ ID NO: 49351 - protein, 9 aa, Homo Sapiens
EAHESTGIF

SEQ ID NO: 49352 - protein, 9 aa, Homo Sapiens
EAHFVPLVK

SEQ ID NO: 49353 - protein, 9 aa, Homo Sapiens
EAHNILSKR

SEQ ID NO: 49354 - protein, 9 aa, Homo Sapiens
EAHQNVAQM

SEQ ID NO: 49355 - protein, 9 aa, Homo Sapiens
EAIAKGIRR

SEQ ID NO: 49356 - protein, 9 aa, Homo Sapiens
EAIEKLSKR

SEQ ID NO: 49357 - protein, 9 aa, Homo Sapiens
EAIESYYQR

SEQ ID NO: 49358 - protein, 9 aa, Homo Sapiens
EAIGNEVTR

SEQ ID NO: 49359 - protein, 9 aa, Homo Sapiens
EAIGPSTIR

SEQ ID NO: 49360 - protein, 9 aa, Homo Sapiens
EAIGTLTAR

SEQ ID NO: 49361 - protein, 9 aa, Homo Sapiens
EAIISGKQR

SEQ ID NO: 49362 - protein, 9 aa, Homo Sapiens
EAIKALEVR

SEQ ID NO: 49363 - protein, 9 aa, Homo Sapiens
EAIKITNRR

SEQ ID NO: 49364 - protein, 9 aa, Homo Sapiens
EAIPGLAAR

SEQ ID NO: 49365 - protein, 9 aa, Homo Sapiens
EAIQKKLSR

SEQ ID NO: 49366 - protein, 9 aa, Homo Sapiens
EAIRAMKVR

SEQ ID NO: 49367 - protein, 9 aa, Homo Sapiens
EAIYDICRR

SEQ ID NO: 49368 - protein, 9 aa, Homo Sapiens
EAKAPILKR

SEQ ID NO: 49369 - protein, 9 aa, Homo Sapiens
EAKAPSRGF

SEQ ID NO: 49370 - protein, 9 aa, Homo Sapiens
EAKFPTMNR

SEQ ID NO: 49371 - protein, 9 aa, Homo Sapiens
EALKLARQI

SEQ ID NO: 49372 - protein, 9 aa, Homo Sapiens
EALNQVTQR

SEQ ID NO: 49373 - protein, 9 aa, Homo Sapiens
EALNVLVNR

SEQ ID NO: 49374 - protein, 9 aa, Homo Sapiens
EALRKMGLR

SEQ ID NO: 49375 - protein, 9 aa, Homo Sapiens
EALTALMSR

SEQ ID NO: 49376 - protein, 9 aa, Homo Sapiens
EALYDICFR

SEQ ID NO: 49377 - protein, 9 aa, Homo Sapiens
EAMALPLYR

SEQ ID NO: 49378 - protein, 9 aa, Homo Sapiens
EAMASIINR

SEQ ID NO: 49379 - protein, 9 aa, Homo Sapiens
EAMDDFMKR

SEQ ID NO: 49380 - protein, 9 aa, Homo Sapiens
EAMDVKLKR

SEQ ID NO: 49381 - protein, 9 aa, Homo Sapiens
EAMGQLGSR

SEQ ID NO: 49382 - protein, 9 aa, Homo Sapiens
EAMKHVYFR

SEQ ID NO: 49383 - protein, 9 aa, Homo Sapiens
EAMTIFQNR

SEQ ID NO: 49384 - protein, 9 aa, Homo Sapiens
EAMTVAIRR

SEQ ID NO: 49385 - protein, 9 aa, Homo Sapiens
EANATQLLR

SEQ ID NO: 49386 - protein, 9 aa, Homo Sapiens
EANEEFALR

SEQ ID NO: 49387 - protein, 9 aa, Homo Sapiens
EANFPANVM

SEQ ID NO: 49388 - protein, 9 aa, Homo Sapiens
EANFTVSSM

SEQ ID NO: 49389 - protein, 9 aa, Homo Sapiens
EANIFTKQR

SEQ ID NO: 49390 - protein, 9 aa, Homo Sapiens
EAPKGMLAR

SEQ ID NO: 49391 - protein, 9 aa, Homo Sapiens
EAPPATQNF

SEQ ID NO: 49392 - protein, 9 aa, Homo Sapiens
EAQELFSVR

SEQ ID NO: 49393 - protein, 9 aa, Homo Sapiens
EAQEVTIAR

SEQ ID NO: 49394 - protein, 9 aa, Homo Sapiens
EAQGIHISR

SEQ ID NO: 49395 - protein, 9 aa, Homo Sapiens
EAQIAAVCR

SEQ ID NO: 49396 - protein, 9 aa, Homo Sapiens
EAQNLTRGR

SEQ ID NO: 49397 - protein, 9 aa, Homo Sapiens
EAQRITGLR

SEQ ID NO: 49398 - protein, 9 aa, Homo Sapiens
EAQVVRVTR

SEQ ID NO: 49399 - protein, 9 aa, Homo Sapiens
EARAFGVTR

SEQ ID NO: 49400 - protein, 9 aa, Homo Sapiens
EASAAGLIR

SEQ ID NO: 49401 - protein, 9 aa, Homo Sapiens
EASDPRIIR

SEQ ID NO: 49402 - protein, 9 aa, Homo Sapiens
EASEATLFY

SEQ ID NO: 49403 - protein, 9 aa, Homo Sapiens
EASGPGNFF

SEQ ID NO: 49404 - protein, 9 aa, Homo Sapiens
EASKDGLFR

SEQ ID NO: 49405 - protein, 9 aa, Homo Sapiens
EASNASSYL

SEQ ID NO: 49406 - protein, 9 aa, Homo Sapiens
EASPGGLDR

SEQ ID NO: 49407 - protein, 9 aa, Homo Sapiens
EASPRILKK

SEQ ID NO: 49408 - protein, 9 aa, Homo Sapiens
EASPSSLHF

SEQ ID NO: 49409 - protein, 9 aa, Homo Sapiens
EASPVKASR

SEQ ID NO: 49410 - protein, 9 aa, Homo Sapiens
EASQGFRFL

SEQ ID NO: 49411 - protein, 9 aa, Homo Sapiens
EASRAILQR

SEQ ID NO: 49412 - protein, 9 aa, Homo Sapiens
EASWPHIQL

SEQ ID NO: 49413 - protein, 9 aa, Homo Sapiens
EATAAILSR

SEQ ID NO: 49414 - protein, 9 aa, Homo Sapiens
EATAMAMGR

SEQ ID NO: 49415 - protein, 9 aa, Homo Sapiens
EATFCVVLR

SEQ ID NO: 49416 - protein, 9 aa, Homo Sapiens
EATGEKVLR

SEQ ID NO: 49417 - protein, 9 aa, Homo Sapiens
EATLSVARR

SEQ ID NO: 49418 - protein, 9 aa, Homo Sapiens
EATSCSLHR

SEQ ID NO: 49419 - protein, 9 aa, Homo Sapiens
EATVLGQRR

SEQ ID NO: 49420 - protein, 9 aa, Homo Sapiens
EAVAALGNK

SEQ ID NO: 49421 - protein, 9 aa, Homo Sapiens
EAVAGIVGR

SEQ ID NO: 49422 - protein, 9 aa, Homo Sapiens
EAVDISSKR

SEQ ID NO: 49423 - protein, 9 aa, Homo Sapiens
EAVEAAINR

SEQ ID NO: 49424 - protein, 9 aa, Homo Sapiens
EAVFASEVK

SEQ ID NO: 49425 - protein, 9 aa, Homo Sapiens
EAVFIAHKR

SEQ ID NO: 49426 - protein, 9 aa, Homo Sapiens
EAVFNPQSR

SEQ ID NO: 49427 - protein, 9 aa, Homo Sapiens
EAVGVTSQR

SEQ ID NO: 49428 - protein, 9 aa, Homo Sapiens
EAVKLIIGR

SEQ ID NO: 49429 - protein, 9 aa, Homo Sapiens
EAVKPFGLK

SEQ ID NO: 49430 - protein, 9 aa, Homo Sapiens
EAVKPTVGM

SEQ ID NO: 49431 - protein, 9 aa, Homo Sapiens
EAVKSGIHR

SEQ ID NO: 49432 - protein, 9 aa, Homo Sapiens
EAVLAAYWR

SEQ ID NO: 49433 - protein, 9 aa, Homo Sapiens
EAVLAMSSR

SEQ ID NO: 49434 - protein, 9 aa, Homo Sapiens
EAVLLLMQR

SEQ ID NO: 49435 - protein, 9 aa, Homo Sapiens
EAVLNVALR

SEQ ID NO: 49436 - protein, 9 aa, Homo Sapiens
EAVLWEALR

SEQ ID NO: 49437 - protein, 9 aa, Homo Sapiens
EAVMILRSR

SEQ ID NO: 49438 - protein, 9 aa, Homo Sapiens
EAVNPTRFR

SEQ ID NO: 49439 - protein, 9 aa, Homo Sapiens
EAVPKFEEM

SEQ ID NO: 49440 - protein, 9 aa, Homo Sapiens
EAVQAKVLR

SEQ ID NO: 49441 - protein, 9 aa, Homo Sapiens
EAVQALRER

SEQ ID NO: 49442 - protein, 9 aa, Homo Sapiens
EAVRKLTAR

SEQ ID NO: 49443 - protein, 9 aa, Homo Sapiens
EAVTGVVGR

SEQ ID NO: 49444 - protein, 9 aa, Homo Sapiens
EAVVGTACR

SEQ ID NO: 49445 - protein, 9 aa, Homo Sapiens
EAYLPETFR

SEQ ID NO: 49446 - protein, 9 aa, Homo Sapiens
EAYSVGTGR

SEQ ID NO: 49447 - protein, 9 aa, Homo Sapiens
EDFYTATER

SEQ ID NO: 49448 - protein, 9 aa, Homo Sapiens
EEIGPSICR

SEQ ID NO: 49449 - protein, 9 aa, Homo Sapiens
EFFGEGKTR

SEQ ID NO: 49450 - protein, 9 aa, Homo Sapiens
EFFLAGIGR

SEQ ID NO: 49451 - protein, 9 aa, Homo Sapiens
EFIEITTER

SEQ ID NO: 49452 - protein, 9 aa, Homo Sapiens
EFSPTFSER

SEQ ID NO: 49453 - protein, 9 aa, Homo Sapiens
EFVDLYVPR

SEQ ID NO: 49454 - protein, 9 aa, Homo Sapiens
EGAFPNLAR

SEQ ID NO: 49455 - protein, 9 aa, Homo Sapiens
EGAGILLTR

SEQ ID NO: 49456 - protein, 9 aa, Homo Sapiens
EGASPLSER

SEQ ID NO: 49457 - protein, 9 aa, Homo Sapiens
EGGPTSVGR

SEQ ID NO: 49458 - protein, 9 aa, Homo Sapiens
EGIGSTVFR

SEQ ID NO: 49459 - protein, 9 aa, Homo Sapiens
EGIKVGHER

SEQ ID NO: 49460 - protein, 9 aa, Homo Sapiens
EGTVVVTER

SEQ ID NO: 49461 - protein, 9 aa, Homo Sapiens
EGVAGGLNR

SEQ ID NO: 49462 - protein, 9 aa, Homo Sapiens
EGVGILLTR

SEQ ID NO: 49463 - protein, 9 aa, Homo Sapiens
EGVNPSVGR

SEQ ID NO: 49464 - protein, 9 aa, Homo Sapiens
EGVPVRGAR

SEQ ID NO: 49465 - protein, 9 aa, Homo Sapiens
EIADPTRFF

SEQ ID NO: 49466 - protein, 9 aa, Homo Sapiens
EIADSSMTR

SEQ ID NO: 49467 - protein, 9 aa, Homo Sapiens
EIADVSTGL

SEQ ID NO: 49468 - protein, 9 aa, Homo Sapiens
EIAGVKLLY

SEQ ID NO: 49469 - protein, 9 aa, Homo Sapiens
EIAVTGAGR

SEQ ID NO: 49470 - protein, 9 aa, Homo Sapiens
EICGNYTYR

SEQ ID NO: 49471 - protein, 9 aa, Homo Sapiens
EIDVVSVEK

SEQ ID NO: 49472 - protein, 9 aa, Homo Sapiens
EIFGTELTR

SEQ ID NO: 49473 - protein, 9 aa, Homo Sapiens
EIFGTIGMR

SEQ ID NO: 49474 - protein, 9 aa, Homo Sapiens
EIFHETGKR

SEQ ID NO: 49475 - protein, 9 aa, Homo Sapiens
EIFQNEVAR

SEQ ID NO: 49476 - protein, 9 aa, Homo Sapiens
EIFSSLLQR

SEQ ID NO: 49477 - protein, 9 aa, Homo Sapiens
EIFVGKIPR

SEQ ID NO: 49478 - protein, 9 aa, Homo Sapiens
EIFYFEVTR

SEQ ID NO: 49479 - protein, 9 aa, Homo Sapiens
EIGDASRVR

SEQ ID NO: 49480 - protein, 9 aa, Homo Sapiens
EIGHIFGLR

SEQ ID NO: 49481 - protein, 9 aa, Homo Sapiens
EIGNMITSR

SEQ ID NO: 49482 - protein, 9 aa, Homo Sapiens
EIGPVSSSR

SEQ ID NO: 49483 - protein, 9 aa, Homo Sapiens
EIGQAGSQR

SEQ ID NO: 49484 - protein, 9 aa, Homo Sapiens
EIGWFPCNR

SEQ ID NO: 49485 - protein, 9 aa, Homo Sapiens
EIIDGTSEM

SEQ ID NO: 49486 - protein, 9 aa, Homo Sapiens
EIIDKRRER

SEQ ID NO: 49487 - protein, 9 aa, Homo Sapiens
EIIEQPKQR

SEQ ID NO: 49488 - protein, 9 aa, Homo Sapiens
EIIEQPRQR

SEQ ID NO: 49489 - protein, 9 aa, Homo Sapiens
EIINATTGR

SEQ ID NO: 49490 - protein, 9 aa, Homo Sapiens
EIINIMQDR

SEQ ID NO: 49491 - protein, 9 aa, Homo Sapiens
EIISKLQGR

SEQ ID NO: 49492 - protein, 9 aa, Homo Sapiens
EIIYAINQR

SEQ ID NO: 49493 - protein, 9 aa, Homo Sapiens
EIKERIAKR

SEQ ID NO: 49494 - protein, 9 aa, Homo Sapiens
EIKHFVSER

SEQ ID NO: 49495 - protein, 9 aa, Homo Sapiens
EIKPPSCLF

SEQ ID NO: 49496 - protein, 9 aa, Homo Sapiens
EIKSLTKER

SEQ ID NO: 49497 - protein, 9 aa, Homo Sapiens
EILEVATAR

SEQ ID NO: 49498 - protein, 9 aa, Homo Sapiens
EILGIANNR

SEQ ID NO: 49499 - protein, 9 aa, Homo Sapiens
EILHHLSER

SEQ ID NO: 49500 - protein, 9 aa, Homo Sapiens
EILSDVASR

SEQ ID NO: 49501 - protein, 9 aa, Homo Sapiens
EIMELWSTR

SEQ ID NO: 49502 - protein, 9 aa, Homo Sapiens
EIMEVAKER

SEQ ID NO: 49503 - protein, 9 aa, Homo Sapiens
EIMPPPPKP

SEQ ID NO: 49504 - protein, 9 aa, Homo Sapiens
EIMQETGTR

SEQ ID NO: 49505 - protein, 9 aa, Homo Sapiens
EINEISYPK

SEQ ID NO: 49506 - protein, 9 aa, Homo Sapiens
EINKLLAHR

SEQ ID NO: 49507 - protein, 9 aa, Homo Sapiens
EIPENFTTR

SEQ ID NO: 49508 - protein, 9 aa, Homo Sapiens
EIPKRFGQR

SEQ ID NO: 49509 - protein, 9 aa, Homo Sapiens
EIQAPTSSK

SEQ ID NO: 49510 - protein, 9 aa, Homo Sapiens
EIQHTTALR

SEQ ID NO: 49511 - protein, 9 aa, Homo Sapiens
EIRSQPVPR

SEQ ID NO: 49512 - protein, 9 aa, Homo Sapiens
EISAPSQQR

SEQ ID NO: 49513 - protein, 9 aa, Homo Sapiens
EISAPVSER

SEQ ID NO: 49514 - protein, 9 aa, Homo Sapiens
EISGTFTHR

SEQ ID NO: 49515 - protein, 9 aa, Homo Sapiens
EISHPDVGR

SEQ ID NO: 49516 - protein, 9 aa, Homo Sapiens
EISKVAAER

SEQ ID NO: 49517 - protein, 9 aa, Homo Sapiens
EISQVCATK

SEQ ID NO: 49518 - protein, 9 aa, Homo Sapiens
EISRAAAER

SEQ ID NO: 49519 - protein, 9 aa, Homo Sapiens
EISSATKLR

SEQ ID NO: 49520 - protein, 9 aa, Homo Sapiens
EISSNSLER

SEQ ID NO: 49521 - protein, 9 aa, Homo Sapiens
EISSPAVER

SEQ ID NO: 49522 - protein, 9 aa, Homo Sapiens
EITIPMRSR

SEQ ID NO: 49523 - protein, 9 aa, Homo Sapiens
EITKAFHVR

SEQ ID NO: 49524 - protein, 9 aa, Homo Sapiens
EIVANVGKR

SEQ ID NO: 49525 - protein, 9 aa, Homo Sapiens
EIVDEKVRR

SEQ ID NO: 49526 - protein, 9 aa, Homo Sapiens
EIVDQIKTR

SEQ ID NO: 49527 - protein, 9 aa, Homo Sapiens
EIVECILKR

SEQ ID NO: 49528 - protein, 9 aa, Homo Sapiens
EIVGSIKMR

SEQ ID NO: 49529 - protein, 9 aa, Homo Sapiens
EIVITGQHR

SEQ ID NO: 49530 - protein, 9 aa, Homo Sapiens
EIVKAIKER

SEQ ID NO: 49531 - protein, 9 aa, Homo Sapiens
EIVMETRQR

SEQ ID NO: 49532 - protein, 9 aa, Homo Sapiens
EIVSRVSKR

SEQ ID NO: 49533 - protein, 9 aa, Homo Sapiens
EIYEYIIFR

SEQ ID NO: 49534 - protein, 9 aa, Homo Sapiens
EIYGVTHTR

SEQ ID NO: 49535 - protein, 9 aa, Homo Sapiens
EIYKPGLSR

SEQ ID NO: 49536 - protein, 9 aa, Homo Sapiens
EIYRPPASR

SEQ ID NO: 49537 - protein, 9 aa, Homo Sapiens
ELAAVINGR

SEQ ID NO: 49538 - protein, 9 aa, Homo Sapiens
ELADHLVKR

SEQ ID NO: 49539 - protein, 9 aa, Homo Sapiens
ELADPTERF

SEQ ID NO: 49540 - protein, 9 aa, Homo Sapiens
ELADVTAKY

SEQ ID NO: 49541 - protein, 9 aa, Homo Sapiens
ELAEKALGK

SEQ ID NO: 49542 - protein, 9 aa, Homo Sapiens
ELAERLGLR

SEQ ID NO: 49543 - protein, 9 aa, Homo Sapiens
ELAGHTGYL

SEQ ID NO: 49544 - protein, 9 aa, Homo Sapiens
ELAIGGVLR

SEQ ID NO: 49545 - protein, 9 aa, Homo Sapiens
ELAKIMRTR

SEQ ID NO: 49546 - protein, 9 aa, Homo Sapiens
ELAMVCSQR

SEQ ID NO: 49547 - protein, 9 aa, Homo Sapiens
ELAPVFLLR

SEQ ID NO: 49548 - protein, 9 aa, Homo Sapiens
ELAQIYAQR

SEQ ID NO: 49549 - protein, 9 aa, Homo Sapiens
ELAQRLSNR

SEQ ID NO: 49550 - protein, 9 aa, Homo Sapiens
ELAQVIVSR

SEQ ID NO: 49551 - protein, 9 aa, Homo Sapiens
ELAQWLIQR

SEQ ID NO: 49552 - protein, 9 aa, Homo Sapiens
ELARLKVHR

SEQ ID NO: 49553 - protein, 9 aa, Homo Sapiens
ELATAVKAR

SEQ ID NO: 49554 - protein, 9 aa, Homo Sapiens
ELAVASFPK

SEQ ID NO: 49555 - protein, 9 aa, Homo Sapiens
ELAVTFIER

SEQ ID NO: 49556 - protein, 9 aa, Homo Sapiens
ELAVVREQR

SEQ ID NO: 49557 - protein, 9 aa, Homo Sapiens
ELCDFVRSR

SEQ ID NO: 49558 - protein, 9 aa, Homo Sapiens
ELEHSGIGR

SEQ ID NO: 49559 - protein, 9 aa, Homo Sapiens
ELFDICLAR

SEQ ID NO: 49560 - protein, 9 aa, Homo Sapiens
ELFGRVTSR

SEQ ID NO: 49561 - protein, 9 aa, Homo Sapiens
ELFKNVCER

SEQ ID NO: 49562 - protein, 9 aa, Homo Sapiens
ELFPAPILR

SEQ ID NO: 49563 - protein, 9 aa, Homo Sapiens
ELFPGLIYR

SEQ ID NO: 49564 - protein, 9 aa, Homo Sapiens
ELFSHPVER

SEQ ID NO: 49565 - protein, 9 aa, Homo Sapiens
ELFSNIVPR

SEQ ID NO: 49566 - protein, 9 aa, Homo Sapiens
ELFSYSCPK

SEQ ID NO: 49567 - protein, 9 aa, Homo Sapiens
ELGFSKVFR

SEQ ID NO: 49568 - protein, 9 aa, Homo Sapiens
ELIAASTQK

SEQ ID NO: 49569 - protein, 9 aa, Homo Sapiens
ELIAKIPNF

SEQ ID NO: 49570 - protein, 9 aa, Homo Sapiens
ELIDFKTRR

SEQ ID NO: 49571 - protein, 9 aa, Homo Sapiens
ELIKESEVK

SEQ ID NO: 49572 - protein, 9 aa, Homo Sapiens
ELIKNPAFK

SEQ ID NO: 49573 - protein, 9 aa, Homo Sapiens
ELIKTVASR

SEQ ID NO: 49574 - protein, 9 aa, Homo Sapiens
ELINFKRKR

SEQ ID NO: 49575 - protein, 9 aa, Homo Sapiens
ELIPGAEFR

SEQ ID NO: 49576 - protein, 9 aa, Homo Sapiens
ELIQDAAAR

SEQ ID NO: 49577 - protein, 9 aa, Homo Sapiens
ELIQDITQR

SEQ ID NO: 49578 - protein, 9 aa, Homo Sapiens
ELIQEITQR

SEQ ID NO: 49579 - protein, 9 aa, Homo Sapiens
ELIRDPKGR

SEQ ID NO: 49580 - protein, 9 aa, Homo Sapiens
ELIRKLQQR

SEQ ID NO: 49581 - protein, 9 aa, Homo Sapiens
ELKAPGISY

SEQ ID NO: 49582 - protein, 9 aa, Homo Sapiens
ELKDPTDHY

SEQ ID NO: 49583 - protein, 9 aa, Homo Sapiens
ELKFKTGLR

SEQ ID NO: 49584 - protein, 9 aa, Homo Sapiens
ELKLGSGNR

SEQ ID NO: 49585 - protein, 9 aa, Homo Sapiens
ELKQEGSLR

SEQ ID NO: 49586 - protein, 9 aa, Homo Sapiens
ELLEPLNER

SEQ ID NO: 49587 - protein, 9 aa, Homo Sapiens
ELLQGGTSR

SEQ ID NO: 49588 - protein, 9 aa, Homo Sapiens
ELLTSSKDR

SEQ ID NO: 49589 - protein, 9 aa, Homo Sapiens
ELMGYIMGK

SEQ ID NO: 49590 - protein, 9 aa, Homo Sapiens
ELMPPPPPK

SEQ ID NO: 49591 - protein, 9 aa, Homo Sapiens
ELNDPMRQR

SEQ ID NO: 49592 - protein, 9 aa, Homo Sapiens
ELNKIFALR

SEQ ID NO: 49593 - protein, 9 aa, Homo Sapiens
ELNPSTGNR

SEQ ID NO: 49594 - protein, 9 aa, Homo Sapiens
ELNVQISER

SEQ ID NO: 49595 - protein, 9 aa, Homo Sapiens
ELPEASAPK

SEQ ID NO: 49596 - protein, 9 aa, Homo Sapiens
ELPGSSAVR

SEQ ID NO: 49597 - protein, 9 aa, Homo Sapiens
ELPPGSTKR

SEQ ID NO: 49598 - protein, 9 aa, Homo Sapiens
ELPPSSCQR

SEQ ID NO: 49599 - protein, 9 aa, Homo Sapiens
ELPRGSIPR

SEQ ID NO: 49600 - protein, 9 aa, Homo Sapiens
ELPSWILMR

SEQ ID NO: 49601 - protein, 9 aa, Homo Sapiens
ELPVPTHRR

SEQ ID NO: 49602 - protein, 9 aa, Homo Sapiens
ELQGHLGRR

SEQ ID NO: 49603 - protein, 9 aa, Homo Sapiens
ELQSALLLR

SEQ ID NO: 49604 - protein, 9 aa, Homo Sapiens
ELRELGAAR

SEQ ID NO: 49605 - protein, 9 aa, Homo Sapiens
ELRELSGHR

SEQ ID NO: 49606 - protein, 9 aa, Homo Sapiens
ELRNASAVM

SEQ ID NO: 49607 - protein, 9 aa, Homo Sapiens
ELRNATAAM

SEQ ID NO: 49608 - protein, 9 aa, Homo Sapiens
ELRPPSRSR

SEQ ID NO: 49609 - protein, 9 aa, Homo Sapiens
ELRQATVAM

SEQ ID NO: 49610 - protein, 9 aa, Homo Sapiens
ELRQPPVKR

SEQ ID NO: 49611 - protein, 9 aa, Homo Sapiens
ELSAGLSKR

SEQ ID NO: 49612 - protein, 9 aa, Homo Sapiens
ELSDLHAHK

SEQ ID NO: 49613 - protein, 9 aa, Homo Sapiens
ELSESLRNR

SEQ ID NO: 49614 - protein, 9 aa, Homo Sapiens
ELSEVLKAR

SEQ ID NO: 49615 - protein, 9 aa, Homo Sapiens
ELSFHSKGR

SEQ ID NO: 49616 - protein, 9 aa, Homo Sapiens
ELSNGSMVR

SEQ ID NO: 49617 - protein, 9 aa, Homo Sapiens
ELSPGGQPR

SEQ ID NO: 49618 - protein, 9 aa, Homo Sapiens
ELSPKVSER

SEQ ID NO: 49619 - protein, 9 aa, Homo Sapiens
ELSPTGRPK

SEQ ID NO: 49620 - protein, 9 aa, Homo Sapiens
ELSQNISAR

SEQ ID NO: 49621 - protein, 9 aa, Homo Sapiens
ELSRLVSER

SEQ ID NO: 49622 - protein, 9 aa, Homo Sapiens
ELSVVTSER

SEQ ID NO: 49623 - protein, 9 aa, Homo Sapiens
ELTDLHGLR

SEQ ID NO: 49624 - protein, 9 aa, Homo Sapiens
ELTKMCTIR

SEQ ID NO: 49625 - protein, 9 aa, Homo Sapiens
ELVDRVFNR

SEQ ID NO: 49626 - protein, 9 aa, Homo Sapiens
ELVDRVLER

SEQ ID NO: 49627 - protein, 9 aa, Homo Sapiens
ELVGPLYAR

SEQ ID NO: 49628 - protein, 9 aa, Homo Sapiens
ELVNAARLR

SEQ ID NO: 49629 - protein, 9 aa, Homo Sapiens
ELVNPHRAR

SEQ ID NO: 49630 - protein, 9 aa, Homo Sapiens
ELVNSGRLR

SEQ ID NO: 49631 - protein, 9 aa, Homo Sapiens
ELVNVLQER

SEQ ID NO: 49632 - protein, 9 aa, Homo Sapiens
ELVPFESPR

SEQ ID NO: 49633 - protein, 9 aa, Homo Sapiens
ELVQTLLER

SEQ ID NO: 49634 - protein, 9 aa, Homo Sapiens
ELVSPKLNR

SEQ ID NO: 49635 - protein, 9 aa, Homo Sapiens
ELVTKAGFR

SEQ ID NO: 49636 - protein, 9 aa, Homo Sapiens
ELYEKVFSR

SEQ ID NO: 49637 - protein, 9 aa, Homo Sapiens
ELYNAPEGR

SEQ ID NO: 49638 - protein, 9 aa, Homo Sapiens
ELYNRMLKR

SEQ ID NO: 49639 - protein, 9 aa, Homo Sapiens
ELYRATREF

SEQ ID NO: 49640 - protein, 9 aa, Homo Sapiens
ELYRVTREY

SEQ ID NO: 49641 - protein, 9 aa, Homo Sapiens
EMFTPILGR

SEQ ID NO: 49642 - protein, 9 aa, Homo Sapiens
EMIGALKER

SEQ ID NO: 49643 - protein, 9 aa, Homo Sapiens
EMIITKQGR

SEQ ID NO: 49644 - protein, 9 aa, Homo Sapiens
EMKGKVLTR

SEQ ID NO: 49645 - protein, 9 aa, Homo Sapiens
EMKLQVTQR

SEQ ID NO: 49646 - protein, 9 aa, Homo Sapiens
EMRDPALGR

SEQ ID NO: 49647 - protein, 9 aa, Homo Sapiens
EMREMLTHR

SEQ ID NO: 49648 - protein, 9 aa, Homo Sapiens
EMSGLPAAR

SEQ ID NO: 49649 - protein, 9 aa, Homo Sapiens
EMTGYVATR

SEQ ID NO: 49650 - protein, 9 aa, Homo Sapiens
EMTPAVRQR

SEQ ID NO: 49651 - protein, 9 aa, Homo Sapiens
EMVEFLCER

SEQ ID NO: 49652 - protein, 9 aa, Homo Sapiens
ENFGNTTPR

SEQ ID NO: 49653 - protein, 9 aa, Homo Sapiens
EPADSHFVR

SEQ ID NO: 49654 - protein, 9 aa, Homo Sapiens
EPAEPLLVR

SEQ ID NO: 49655 - protein, 9 aa, Homo Sapiens
EPAPALSSR

SEQ ID NO: 49656 - protein, 9 aa, Homo Sapiens
EPASPISQR

SEQ ID NO: 49657 - protein, 9 aa, Homo Sapiens
EPFKGEMNR

SEQ ID NO: 49658 - protein, 9 aa, Homo Sapiens
EPFNDPALR

SEQ ID NO: 49659 - protein, 9 aa, Homo Sapiens
EPFSATDPK

SEQ ID NO: 49660 - protein, 9 aa, Homo Sapiens
EPHVSGVKR

SEQ ID NO: 49661 - protein, 9 aa, Homo Sapiens
EPIAEPMRR

SEQ ID NO: 49662 - protein, 9 aa, Homo Sapiens
EPIAMTVPR

SEQ ID NO: 49663 - protein, 9 aa, Homo Sapiens
EPISPPRDR

SEQ ID NO: 49664 - protein, 9 aa, Homo Sapiens
EPLPPTIGR

SEQ ID NO: 49665 - protein, 9 aa, Homo Sapiens
EPSDPMLWR

SEQ ID NO: 49666 - protein, 9 aa, Homo Sapiens
EPSEVFINR

SEQ ID NO: 49667 - protein, 9 aa, Homo Sapiens
EPVEVVAPR

SEQ ID NO: 49668 - protein, 9 aa, Homo Sapiens
EPVSLGSLR

SEQ ID NO: 49669 - protein, 9 aa, Homo Sapiens
EPVSPSRER

SEQ ID NO: 49670 - protein, 9 aa, Homo Sapiens
EPWDGAVFR

SEQ ID NO: 49671 - protein, 9 aa, Homo Sapiens
EPYANPTKR

SEQ ID NO: 49672 - protein, 9 aa, Homo Sapiens
EQAAPSGLR

SEQ ID NO: 49673 - protein, 9 aa, Homo Sapiens
EQAFEVAER

SEQ ID NO: 49674 - protein, 9 aa, Homo Sapiens
EQAFQTIAR

SEQ ID NO: 49675 - protein, 9 aa, Homo Sapiens
EQIDFSAAR

SEQ ID NO: 49676 - protein, 9 aa, Homo Sapiens
EQILPTLVR

SEQ ID NO: 49677 - protein, 9 aa, Homo Sapiens
EQISNLISR

SEQ ID NO: 49678 - protein, 9 aa, Homo Sapiens
EQLSGAGYR

SEQ ID NO: 49679 - protein, 9 aa, Homo Sapiens
EQPEIHTGR

SEQ ID NO: 49680 - protein, 9 aa, Homo Sapiens
EQPYKMAGR

SEQ ID NO: 49681 - protein, 9 aa, Homo Sapiens
EQSPCVLSR

SEQ ID NO: 49682 - protein, 9 aa, Homo Sapiens
EQVDGVSYR

SEQ ID NO: 49683 - protein, 9 aa, Homo Sapiens
EQVLPRDER

SEQ ID NO: 49684 - protein, 9 aa, Homo Sapiens
EQVPQALRR

SEQ ID NO: 49685 - protein, 9 aa, Homo Sapiens
EQYDLATKR

SEQ ID NO: 49686 - protein, 9 aa, Homo Sapiens
ESAAELARR

SEQ ID NO: 49687 - protein, 9 aa, Homo Sapiens
ESAEVPVAR

SEQ ID NO: 49688 - protein, 9 aa, Homo Sapiens
ESAGAYAYK

SEQ ID NO: 49689 - protein, 9 aa, Homo Sapiens
ESAPAWRLR

SEQ ID NO: 49690 - protein, 9 aa, Homo Sapiens
ESAPKASLR

SEQ ID NO: 49691 - protein, 9 aa, Homo Sapiens
ESAPMFSAK

SEQ ID NO: 49692 - protein, 9 aa, Homo Sapiens
ESAPSALEK

SEQ ID NO: 49693 - protein, 9 aa, Homo Sapiens
ESAQDFASR

SEQ ID NO: 49694 - protein, 9 aa, Homo Sapiens
ESAWNLENR

SEQ ID NO: 49695 - protein, 9 aa, Homo Sapiens
ESAYNAFNR

SEQ ID NO: 49696 - protein, 9 aa, Homo Sapiens
ESDFASTFR

SEQ ID NO: 49697 - protein, 9 aa, Homo Sapiens
ESEEVRQFR

SEQ ID NO: 49698 - protein, 9 aa, Homo Sapiens
ESFEGFIAR

SEQ ID NO: 49699 - protein, 9 aa, Homo Sapiens
ESFGVPKGR

SEQ ID NO: 49700 - protein, 9 aa, Homo Sapiens
ESFLAWKKR

SEQ ID NO: 49701 - protein, 9 aa, Homo Sapiens
ESFPRGGTR

SEQ ID NO: 49702 - protein, 9 aa, Homo Sapiens
ESFPSVNSR

SEQ ID NO: 49703 - protein, 9 aa, Homo Sapiens
ESGWRSALR

SEQ ID NO: 49704 - protein, 9 aa, Homo Sapiens
ESHPGTLLR

SEQ ID NO: 49705 - protein, 9 aa, Homo Sapiens
ESHVSGISR

SEQ ID NO: 49706 - protein, 9 aa, Homo Sapiens
ESIAAFIQR

SEQ ID NO: 49707 - protein, 9 aa, Homo Sapiens
ESIDALSNK

SEQ ID NO: 49708 - protein, 9 aa, Homo Sapiens
ESIDKKISR

SEQ ID NO: 49709 - protein, 9 aa, Homo Sapiens
ESIDQYIER

SEQ ID NO: 49710 - protein, 9 aa, Homo Sapiens
ESIEHPLAR

SEQ ID NO: 49711 - protein, 9 aa, Homo Sapiens
ESIKGLCER

SEQ ID NO: 49712 - protein, 9 aa, Homo Sapiens
ESIRAAVNR

SEQ ID NO: 49713 - protein, 9 aa, Homo Sapiens
ESLPATHIR

SEQ ID NO: 49714 - protein, 9 aa, Homo Sapiens
ESMEPKVFR

SEQ ID NO: 49715 - protein, 9 aa, Homo Sapiens
ESNPPSLMR

SEQ ID NO: 49716 - protein, 9 aa, Homo Sapiens
ESSDALLKR

SEQ ID NO: 49717 - protein, 9 aa, Homo Sapiens
ESSFCKRQR

SEQ ID NO: 49718 - protein, 9 aa, Homo Sapiens
ESSLPTGDR

SEQ ID NO: 49719 - protein, 9 aa, Homo Sapiens
ESSPQYRLR

SEQ ID NO: 49720 - protein, 9 aa, Homo Sapiens
ESTNFATLR

SEQ ID NO: 49721 - protein, 9 aa, Homo Sapiens
ESTPITAVK

SEQ ID NO: 49722 - protein, 9 aa, Homo Sapiens
ESTWPSRSR

SEQ ID NO: 49723 - protein, 9 aa, Homo Sapiens
ESVGDRELR

SEQ ID NO: 49724 - protein, 9 aa, Homo Sapiens
ESYYQEIGR

SEQ ID NO: 49725 - protein, 9 aa, Homo Sapiens
ETADITHAL

SEQ ID NO: 49726 - protein, 9 aa, Homo Sapiens
ETAFAFHLR

SEQ ID NO: 49727 - protein, 9 aa, Homo Sapiens
ETAFLSWFR

SEQ ID NO: 49728 - protein, 9 aa, Homo Sapiens
ETAFQGMLR

SEQ ID NO: 49729 - protein, 9 aa, Homo Sapiens
ETAFVSRNR

SEQ ID NO: 49730 - protein, 9 aa, Homo Sapiens
ETAIPFRSR

SEQ ID NO: 49731 - protein, 9 aa, Homo Sapiens
ETAIPSSTR

SEQ ID NO: 49732 - protein, 9 aa, Homo Sapiens
ETAKATPRL

SEQ ID NO: 49733 - protein, 9 aa, Homo Sapiens
ETALNSKAY

SEQ ID NO: 49734 - protein, 9 aa, Homo Sapiens
ETALPSTKA

SEQ ID NO: 49735 - protein, 9 aa, Homo Sapiens
ETAPKSEEF

SEQ ID NO: 49736 - protein, 9 aa, Homo Sapiens
ETAPVGTVL

SEQ ID NO: 49737 - protein, 9 aa, Homo Sapiens
ETAQAIKGM

SEQ ID NO: 49738 - protein, 9 aa, Homo Sapiens
ETAQAMAQL

SEQ ID NO: 49739 - protein, 9 aa, Homo Sapiens
ETASAVATR

SEQ ID NO: 49740 - protein, 9 aa, Homo Sapiens
ETCDKVFSR

SEQ ID NO: 49741 - protein, 9 aa, Homo Sapiens
ETFIKGKER

SEQ ID NO: 49742 - protein, 9 aa, Homo Sapiens
ETFLAQRQR

SEQ ID NO: 49743 - protein, 9 aa, Homo Sapiens
ETFNSITKR

SEQ ID NO: 49744 - protein, 9 aa, Homo Sapiens
ETFQFILGK

SEQ ID NO: 49745 - protein, 9 aa, Homo Sapiens
ETGDSSIFR

SEQ ID NO: 49746 - protein, 9 aa, Homo Sapiens
ETGKITDFI

SEQ ID NO: 49747 - protein, 9 aa, Homo Sapiens
ETGLVTDAF

SEQ ID NO: 49748 - protein, 9 aa, Homo Sapiens
ETHAWFTSR

SEQ ID NO: 49749 - protein, 9 aa, Homo Sapiens
ETHFTGNEV

SEQ ID NO: 49750 - protein, 9 aa, Homo Sapiens
ETHLPAQAR

SEQ ID NO: 49751 - protein, 9 aa, Homo Sapiens
ETIAPKIAR

SEQ ID NO: 49752 - protein, 9 aa, Homo Sapiens
ETIDVHSGY

SEQ ID NO: 49753 - protein, 9 aa, Homo Sapiens
ETIEGALCK

SEQ ID NO: 49754 - protein, 9 aa, Homo Sapiens
ETIEGMLLR

SEQ ID NO: 49755 - protein, 9 aa, Homo Sapiens
ETIEVMEDR

SEQ ID NO: 49756 - protein, 9 aa, Homo Sapiens
ETIGEILKK

SEQ ID NO: 49757 - protein, 9 aa, Homo Sapiens
ETIGKKFEK

SEQ ID NO: 49758 - protein, 9 aa, Homo Sapiens
ETIIITGKR

SEQ ID NO: 49759 - protein, 9 aa, Homo Sapiens
ETIKGHSVR

SEQ ID NO: 49760 - protein, 9 aa, Homo Sapiens
ETIKQLQER

SEQ ID NO: 49761 - protein, 9 aa, Homo Sapiens
ETIKSLLIR

SEQ ID NO: 49762 - protein, 9 aa, Homo Sapiens
ETILRTNKR

SEQ ID NO: 49763 - protein, 9 aa, Homo Sapiens
ETIPSFTGR

SEQ ID NO: 49764 - protein, 9 aa, Homo Sapiens
ETISTATGR

SEQ ID NO: 49765 - protein, 9 aa, Homo Sapiens
ETIYQNYQR

SEQ ID NO: 49766 - protein, 9 aa, Homo Sapiens
ETLMETHER

SEQ ID NO: 49767 - protein, 9 aa, Homo Sapiens
ETMDPFVDR

SEQ ID NO: 49768 - protein, 9 aa, Homo Sapiens
ETNGEFGKR

SEQ ID NO: 49769 - protein, 9 aa, Homo Sapiens
ETNTGEVYR

SEQ ID NO: 49770 - protein, 9 aa, Homo Sapiens
ETNYGIPQR

SEQ ID NO: 49771 - protein, 9 aa, Homo Sapiens
ETQIATILR

SEQ ID NO: 49772 - protein, 9 aa, Homo Sapiens
ETQLPVSFR

SEQ ID NO: 49773 - protein, 9 aa, Homo Sapiens
ETREPPPAY

SEQ ID NO: 49774 - protein, 9 aa, Homo Sapiens
ETRLHITGR

SEQ ID NO: 49775 - protein, 9 aa, Homo Sapiens
ETSALPRPR

SEQ ID NO: 49776 - protein, 9 aa, Homo Sapiens
ETSAPFKER

SEQ ID NO: 49777 - protein, 9 aa, Homo Sapiens
ETSEPLSCR

SEQ ID NO: 49778 - protein, 9 aa, Homo Sapiens
ETSFVPTNM

SEQ ID NO: 49779 - protein, 9 aa, Homo Sapiens
ETSGFPSQR

SEQ ID NO: 49780 - protein, 9 aa, Homo Sapiens
ETSGPTYIK

SEQ ID NO: 49781 - protein, 9 aa, Homo Sapiens
ETSHVTMVV

SEQ ID NO: 49782 - protein, 9 aa, Homo Sapiens
ETSNLIIMR

SEQ ID NO: 49783 - protein, 9 aa, Homo Sapiens
ETSPFGAPR

SEQ ID NO: 49784 - protein, 9 aa, Homo Sapiens
ETSQAGLFR

SEQ ID NO: 49785 - protein, 9 aa, Homo Sapiens
ETSSMASFR

SEQ ID NO: 49786 - protein, 9 aa, Homo Sapiens
ETTGTVTFR

SEQ ID NO: 49787 - protein, 9 aa, Homo Sapiens
ETTSIATAR

SEQ ID NO: 49788 - protein, 9 aa, Homo Sapiens
ETTSNITSR

SEQ ID NO: 49789 - protein, 9 aa, Homo Sapiens
ETTVGNMVR

SEQ ID NO: 49790 - protein, 9 aa, Homo Sapiens
ETVAIGGKR

SEQ ID NO: 49791 - protein, 9 aa, Homo Sapiens
ETVALDAKR

SEQ ID NO: 49792 - protein, 9 aa, Homo Sapiens
ETVDALRSR

SEQ ID NO: 49793 - protein, 9 aa, Homo Sapiens
ETVDMTLRR

SEQ ID NO: 49794 - protein, 9 aa, Homo Sapiens
ETVEDIAAR

SEQ ID NO: 49795 - protein, 9 aa, Homo Sapiens
ETVEGLRKR

SEQ ID NO: 49796 - protein, 9 aa, Homo Sapiens
ETVEKFRQR

SEQ ID NO: 49797 - protein, 9 aa, Homo Sapiens
ETVEKWLKR

SEQ ID NO: 49798 - protein, 9 aa, Homo Sapiens
ETVGSIFSR

SEQ ID NO: 49799 - protein, 9 aa, Homo Sapiens
ETVNQMIAR

SEQ ID NO: 49800 - protein, 9 aa, Homo Sapiens
ETVPAFSER

SEQ ID NO: 49801 - protein, 9 aa, Homo Sapiens
ETVSPTRAR

SEQ ID NO: 49802 - protein, 9 aa, Homo Sapiens
ETVTSFRKR

SEQ ID NO: 49803 - protein, 9 aa, Homo Sapiens
ETYKPHLER

SEQ ID NO: 49804 - protein, 9 aa, Homo Sapiens
ETYLHRIGR

SEQ ID NO: 49805 - protein, 9 aa, Homo Sapiens
ETYLMKHMR

SEQ ID NO: 49806 - protein, 9 aa, Homo Sapiens
ETYLNENLR

SEQ ID NO: 49807 - protein, 9 aa, Homo Sapiens
ETYPVSSPK

SEQ ID NO: 49808 - protein, 9 aa, Homo Sapiens
EVAAAVIQR

SEQ ID NO: 49809 - protein, 9 aa, Homo Sapiens
EVAASGSHL

SEQ ID NO: 49810 - protein, 9 aa, Homo Sapiens
EVAASVIMR

SEQ ID NO: 49811 - protein, 9 aa, Homo Sapiens
EVAAVLLHF

SEQ ID NO: 49812 - protein, 9 aa, Homo Sapiens
EVADLKIKR

SEQ ID NO: 49813 - protein, 9 aa, Homo Sapiens
EVAEESGRL

SEQ ID NO: 49814 - protein, 9 aa, Homo Sapiens
EVAEHVQYM

SEQ ID NO: 49815 - protein, 9 aa, Homo Sapiens
EVAELGRGR

SEQ ID NO: 49816 - protein, 9 aa, Homo Sapiens
EVAELLLER

SEQ ID NO: 49817 - protein, 9 aa, Homo Sapiens
EVAEPSVLF

SEQ ID NO: 49818 - protein, 9 aa, Homo Sapiens
EVAFPHHPR

SEQ ID NO: 49819 - protein, 9 aa, Homo Sapiens
EVAGFGESR

SEQ ID NO: 49820 - protein, 9 aa, Homo Sapiens
EVAGIVAAR

SEQ ID NO: 49821 - protein, 9 aa, Homo Sapiens
EVAGLQVGR

SEQ ID NO: 49822 - protein, 9 aa, Homo Sapiens
EVAGQFVIK

SEQ ID NO: 49823 - protein, 9 aa, Homo Sapiens
EVAIPHNRR

SEQ ID NO: 49824 - protein, 9 aa, Homo Sapiens
EVAIPLPAR

SEQ ID NO: 49825 - protein, 9 aa, Homo Sapiens
EVAKATSHI

SEQ ID NO: 49826 - protein, 9 aa, Homo Sapiens
EVALATGQF

SEQ ID NO: 49827 - protein, 9 aa, Homo Sapiens
EVANIPVAR

SEQ ID NO: 49828 - protein, 9 aa, Homo Sapiens
EVANSTANL

SEQ ID NO: 49829 - protein, 9 aa, Homo Sapiens
EVAPAGASY

SEQ ID NO: 49830 - protein, 9 aa, Homo Sapiens
EVAPCMGDR

SEQ ID NO: 49831 - protein, 9 aa, Homo Sapiens
EVAPDVRLR

SEQ ID NO: 49832 - protein, 9 aa, Homo Sapiens
EVAPPEYHR

SEQ ID NO: 49833 - protein, 9 aa, Homo Sapiens
EVAPPRLVM

SEQ ID NO: 49834 - protein, 9 aa, Homo Sapiens
EVAPTSTAV

SEQ ID NO: 49835 - protein, 9 aa, Homo Sapiens
EVAQAGKAV

SEQ ID NO: 49836 - protein, 9 aa, Homo Sapiens
EVAQETDGF

SEQ ID NO: 49837 - protein, 9 aa, Homo Sapiens
EVAQFLTGR

SEQ ID NO: 49838 - protein, 9 aa, Homo Sapiens
EVAQPSEVL

SEQ ID NO: 49839 - protein, 9 aa, Homo Sapiens
EVAQPSREF

SEQ ID NO: 49840 - protein, 9 aa, Homo Sapiens
EVAQVESLR

SEQ ID NO: 49841 - protein, 9 aa, Homo Sapiens
EVARAQAAL

SEQ ID NO: 49842 - protein, 9 aa, Homo Sapiens
EVARLWGVR

SEQ ID NO: 49843 - protein, 9 aa, Homo Sapiens
EVARYMVQR

SEQ ID NO: 49844 - protein, 9 aa, Homo Sapiens
EVASAVCLR

SEQ ID NO: 49845 - protein, 9 aa, Homo Sapiens
EVASFVTKR

SEQ ID NO: 49846 - protein, 9 aa, Homo Sapiens
EVASGAVLR

SEQ ID NO: 49847 - protein, 9 aa, Homo Sapiens
EVASVWVER

SEQ ID NO: 49848 - protein, 9 aa, Homo Sapiens
EVAVAGTEL

SEQ ID NO: 49849 - protein, 9 aa, Homo Sapiens
EVAVVTTER

SEQ ID NO: 49850 - protein, 9 aa, Homo Sapiens
EVAYDWSER

SEQ ID NO: 49851 - protein, 9 aa, Homo Sapiens
EVDAAMAAR

SEQ ID NO: 49852 - protein, 9 aa, Homo Sapiens
EVECATQLR

SEQ ID NO: 49853 - protein, 9 aa, Homo Sapiens
EVEDTTLNR

SEQ ID NO: 49854 - protein, 9 aa, Homo Sapiens
EVENFSCSR

SEQ ID NO: 49855 - protein, 9 aa, Homo Sapiens
EVFAGVTTH

SEQ ID NO: 49856 - protein, 9 aa, Homo Sapiens
EVFCSVQRL

SEQ ID NO: 49857 - protein, 9 aa, Homo Sapiens
EVFDHMMKR

SEQ ID NO: 49858 - protein, 9 aa, Homo Sapiens
EVFDKTYQF

SEQ ID NO: 49859 - protein, 9 aa, Homo Sapiens
EVFDNSMKR

SEQ ID NO: 49860 - protein, 9 aa, Homo Sapiens
EVFEYIIFR

SEQ ID NO: 49861 - protein, 9 aa, Homo Sapiens
EVFFLKATR

SEQ ID NO: 49862 - protein, 9 aa, Homo Sapiens
EVFFSEKIY

SEQ ID NO: 49863 - protein, 9 aa, Homo Sapiens
EVFGQITER

SEQ ID NO: 49864 - protein, 9 aa, Homo Sapiens
EVFHSGHSR

SEQ ID NO: 49865 - protein, 9 aa, Homo Sapiens
EVFPPTPVR

SEQ ID NO: 49866 - protein, 9 aa, Homo Sapiens
EVFQNANFR

SEQ ID NO: 49867 - protein, 9 aa, Homo Sapiens
EVFRDTVHM

SEQ ID NO: 49868 - protein, 9 aa, Homo Sapiens
EVFRSYVFY

SEQ ID NO: 49869 - protein, 9 aa, Homo Sapiens
EVFSHILKR

SEQ ID NO: 49870 - protein, 9 aa, Homo Sapiens
EVFTPVFER

SEQ ID NO: 49871 - protein, 9 aa, Homo Sapiens
EVFTPVVQR

SEQ ID NO: 49872 - protein, 9 aa, Homo Sapiens
EVFVGKIPR

SEQ ID NO: 49873 - protein, 9 aa, Homo Sapiens
EVFYFEVTR

SEQ ID NO: 49874 - protein, 9 aa, Homo Sapiens
EVGDIVVGR

SEQ ID NO: 49875 - protein, 9 aa, Homo Sapiens
EVGGEALGR

SEQ ID NO: 49876 - protein, 9 aa, Homo Sapiens
EVGGNTLGF

SEQ ID NO: 49877 - protein, 9 aa, Homo Sapiens
EVGKAGHIM

SEQ ID NO: 49878 - protein, 9 aa, Homo Sapiens
EVGKKFSAR

SEQ ID NO: 49879 - protein, 9 aa, Homo Sapiens
EVGLLFTNR

SEQ ID NO: 49880 - protein, 9 aa, Homo Sapiens
EVGNSGVFR

SEQ ID NO: 49881 - protein, 9 aa, Homo Sapiens
EVGPAGSQF

SEQ ID NO: 49882 - protein, 9 aa, Homo Sapiens
EVGPKFRGV

SEQ ID NO: 49883 - protein, 9 aa, Homo Sapiens
EVGPKSTMV

SEQ ID NO: 49884 - protein, 9 aa, Homo Sapiens
EVGPKTYIR

SEQ ID NO: 49885 - protein, 9 aa, Homo Sapiens
EVGPPAFRI

SEQ ID NO: 49886 - protein, 9 aa, Homo Sapiens
EVGPVLSKS

SEQ ID NO: 49887 - protein, 9 aa, Homo Sapiens
EVGSVVSFR

SEQ ID NO: 49888 - protein, 9 aa, Homo Sapiens
EVGVIPSKR

SEQ ID NO: 49889 - protein, 9 aa, Homo Sapiens
EVHAVVTVR

SEQ ID NO: 49890 - protein, 9 aa, Homo Sapiens
EVHGFSMGK

SEQ ID NO: 49891 - protein, 9 aa, Homo Sapiens
EVHRPSHFL

SEQ ID NO: 49892 - protein, 9 aa, Homo Sapiens
EVHTGTTIM

SEQ ID NO: 49893 - protein, 9 aa, Homo Sapiens
EVHWATHQL

SEQ ID NO: 49894 - protein, 9 aa, Homo Sapiens
EVIEALLKK

SEQ ID NO: 49895 - protein, 9 aa, Homo Sapiens
EVIEIMTDR

SEQ ID NO: 49896 - protein, 9 aa, Homo Sapiens
EVIESTNLK

SEQ ID NO: 49897 - protein, 9 aa, Homo Sapiens
EVIFHVSTR

SEQ ID NO: 49898 - protein, 9 aa, Homo Sapiens
EVIGLLGGR

SEQ ID NO: 49899 - protein, 9 aa, Homo Sapiens
EVIKPWITK

SEQ ID NO: 49900 - protein, 9 aa, Homo Sapiens
EVIKQLKEK

SEQ ID NO: 49901 - protein, 9 aa, Homo Sapiens
EVIKSMKPK

SEQ ID NO: 49902 - protein, 9 aa, Homo Sapiens
EVIKVIHGK

SEQ ID NO: 49903 - protein, 9 aa, Homo Sapiens
EVINDYHFR

SEQ ID NO: 49904 - protein, 9 aa, Homo Sapiens
EVIPPMKEF

SEQ ID NO: 49905 - protein, 9 aa, Homo Sapiens
EVIQGLLKK

SEQ ID NO: 49906 - protein, 9 aa, Homo Sapiens
EVIRVTKKK

SEQ ID NO: 49907 - protein, 9 aa, Homo Sapiens
EVISKEILE

SEQ ID NO: 49908 - protein, 9 aa, Homo Sapiens
EVISLINTR

SEQ ID NO: 49909 - protein, 9 aa, Homo Sapiens
EVISRGGPR

SEQ ID NO: 49910 - protein, 9 aa, Homo Sapiens
EVIYNYVQR

SEQ ID NO: 49911 - protein, 9 aa, Homo Sapiens
EVKESPFFR

SEQ ID NO: 49912 - protein, 9 aa, Homo Sapiens
EVKEVAGIK

SEQ ID NO: 49913 - protein, 9 aa, Homo Sapiens
EVKGPGVGL

SEQ ID NO: 49914 - protein, 9 aa, Homo Sapiens
EVKGYWAGL

SEQ ID NO: 49915 - protein, 9 aa, Homo Sapiens
EVKILGKER

SEQ ID NO: 49916 - protein, 9 aa, Homo Sapiens
EVKKICMQR

SEQ ID NO: 49917 - protein, 9 aa, Homo Sapiens
EVKPSIRAR

SEQ ID NO: 49918 - protein, 9 aa, Homo Sapiens
EVKRPGESL

SEQ ID NO: 49919 - protein, 9 aa, Homo Sapiens
EVKSITKER

SEQ ID NO: 49920 - protein, 9 aa, Homo Sapiens
EVLDRVFER

SEQ ID NO: 49921 - protein, 9 aa, Homo Sapiens
EVLGPHLER

SEQ ID NO: 49922 - protein, 9 aa, Homo Sapiens
EVLHGLIGR

SEQ ID NO: 49923 - protein, 9 aa, Homo Sapiens
EVLKHLKER

SEQ ID NO: 49924 - protein, 9 aa, Homo Sapiens
EVLLAEIGR

SEQ ID NO: 49925 - protein, 9 aa, Homo Sapiens
EVLLPSGQR

SEQ ID NO: 49926 - protein, 9 aa, Homo Sapiens
EVLLVSSSR

SEQ ID NO: 49927 - protein, 9 aa, Homo Sapiens
EVLPKPRMR

SEQ ID NO: 49928 - protein, 9 aa, Homo Sapiens
EVLQGGSQR

SEQ ID NO: 49929 - protein, 9 aa, Homo Sapiens
EVLQPLQQR

SEQ ID NO: 49930 - protein, 9 aa, Homo Sapiens
EVLSDPQTR

SEQ ID NO: 49931 - protein, 9 aa, Homo Sapiens
EVLTDAAAR

SEQ ID NO: 49932 - protein, 9 aa, Homo Sapiens
EVLVAGFGR

SEQ ID NO: 49933 - protein, 9 aa, Homo Sapiens
EVLVTGAGR

SEQ ID NO: 49934 - protein, 9 aa, Homo Sapiens
EVLWNVWLE

SEQ ID NO: 49935 - protein, 9 aa, Homo Sapiens
EVMENPSCR

SEQ ID NO: 49936 - protein, 9 aa, Homo Sapiens
EVMFPKNVR

SEQ ID NO: 49937 - protein, 9 aa, Homo Sapiens
EVMGTGAVR

SEQ ID NO: 49938 - protein, 9 aa, Homo Sapiens
EVMQAVARL

SEQ ID NO: 49939 - protein, 9 aa, Homo Sapiens
EVNAATLLL

SEQ ID NO: 49940 - protein, 9 aa, Homo Sapiens
EVNATGVAM

SEQ ID NO: 49941 - protein, 9 aa, Homo Sapiens
EVNAWLVHR

SEQ ID NO: 49942 - protein, 9 aa, Homo Sapiens
EVNCPFQKR

SEQ ID NO: 49943 - protein, 9 aa, Homo Sapiens
EVNDDILAR

SEQ ID NO: 49944 - protein, 9 aa, Homo Sapiens
EVNDKRYLR

SEQ ID NO: 49945 - protein, 9 aa, Homo Sapiens
EVNDRPVRR

SEQ ID NO: 49946 - protein, 9 aa, Homo Sapiens
EVNEQTHFA

SEQ ID NO: 49947 - protein, 9 aa, Homo Sapiens
EVNEVSQNF

SEQ ID NO: 49948 - protein, 9 aa, Homo Sapiens
EVNEWFTKY

SEQ ID NO: 49949 - protein, 9 aa, Homo Sapiens
EVNIPTDLR

SEQ ID NO: 49950 - protein, 9 aa, Homo Sapiens
EVNNELANR

SEQ ID NO: 49951 - protein, 9 aa, Homo Sapiens
EVNQETIQR

SEQ ID NO: 49952 - protein, 9 aa, Homo Sapiens
EVNRVSQSM

SEQ ID NO: 49953 - protein, 9 aa, Homo Sapiens
EVNYINTFR

SEQ ID NO: 49954 - protein, 9 aa, Homo Sapiens
EVPELYHQR

SEQ ID NO: 49955 - protein, 9 aa, Homo Sapiens
EVPEVTRSR

SEQ ID NO: 49956 - protein, 9 aa, Homo Sapiens
EVPPPGPAR

SEQ ID NO: 49957 - protein, 9 aa, Homo Sapiens
EVPPPPNLR

SEQ ID NO: 49958 - protein, 9 aa, Homo Sapiens
EVPSFLVER

SEQ ID NO: 49959 - protein, 9 aa, Homo Sapiens
EVPSFTMGR

SEQ ID NO: 49960 - protein, 9 aa, Homo Sapiens
EVQGPPAKK

SEQ ID NO: 49961 - protein, 9 aa, Homo Sapiens
EVQLESKVR

SEQ ID NO: 49962 - protein, 9 aa, Homo Sapiens
EVQRILHQR

SEQ ID NO: 49963 - protein, 9 aa, Homo Sapiens
EVQVVNTER

SEQ ID NO: 49964 - protein, 9 aa, Homo Sapiens
EVQWHCRAR

SEQ ID NO: 49965 - protein, 9 aa, Homo Sapiens
EVRDPLVTY

SEQ ID NO: 49966 - protein, 9 aa, Homo Sapiens
EVRGGGLTR

SEQ ID NO: 49967 - protein, 9 aa, Homo Sapiens
EVRKLIIRR

SEQ ID NO: 49968 - protein, 9 aa, Homo Sapiens
EVRLGGSLR

SEQ ID NO: 49969 - protein, 9 aa, Homo Sapiens
EVRYQTEGF

SEQ ID NO: 49970 - protein, 9 aa, Homo Sapiens
EVSAATGRF

SEQ ID NO: 49971 - protein, 9 aa, Homo Sapiens
EVSAEVRER

SEQ ID NO: 49972 - protein, 9 aa, Homo Sapiens
EVSCETVKM

SEQ ID NO: 49973 - protein, 9 aa, Homo Sapiens
EVSFSVGGR

SEQ ID NO: 49974 - protein, 9 aa, Homo Sapiens
EVSFVIHNL

SEQ ID NO: 49975 - protein, 9 aa, Homo Sapiens
EVSGCGSLR

SEQ ID NO: 49976 - protein, 9 aa, Homo Sapiens
EVSGIKAAY

SEQ ID NO: 49977 - protein, 9 aa, Homo Sapiens
EVSKDTVMK

SEQ ID NO: 49978 - protein, 9 aa, Homo Sapiens
EVSLPKRGR

SEQ ID NO: 49979 - protein, 9 aa, Homo Sapiens
EVSLPKTSR

SEQ ID NO: 49980 - protein, 9 aa, Homo Sapiens
EVSPIFTQF

SEQ ID NO: 49981 - protein, 9 aa, Homo Sapiens
EVSPPVTVR

SEQ ID NO: 49982 - protein, 9 aa, Homo Sapiens
EVSSIIKKK

SEQ ID NO: 49983 - protein, 9 aa, Homo Sapiens
EVSSLISEK

SEQ ID NO: 49984 - protein, 9 aa, Homo Sapiens
EVSSMVLTK

SEQ ID NO: 49985 - protein, 9 aa, Homo Sapiens
EVSSSLILR

SEQ ID NO: 49986 - protein, 9 aa, Homo Sapiens
EVSSVSPLK

SEQ ID NO: 49987 - protein, 9 aa, Homo Sapiens
EVSTVNVRR

SEQ ID NO: 49988 - protein, 9 aa, Homo Sapiens
EVTAALRER

SEQ ID NO: 49989 - protein, 9 aa, Homo Sapiens
EVTDLLASF

SEQ ID NO: 49990 - protein, 9 aa, Homo Sapiens
EVTDYAIAR

SEQ ID NO: 49991 - protein, 9 aa, Homo Sapiens
EVTDYTTGR

SEQ ID NO: 49992 - protein, 9 aa, Homo Sapiens
EVTEIISQF

SEQ ID NO: 49993 - protein, 9 aa, Homo Sapiens
EVTGEAALR

SEQ ID NO: 49994 - protein, 9 aa, Homo Sapiens
EVTGFGVTR

SEQ ID NO: 49995 - protein, 9 aa, Homo Sapiens
EVTGTGLGR

SEQ ID NO: 49996 - protein, 9 aa, Homo Sapiens
EVTGVLEGR

SEQ ID NO: 49997 - protein, 9 aa, Homo Sapiens
EVTKLVHGR

SEQ ID NO: 49998 - protein, 9 aa, Homo Sapiens
EVTNIITSK

SEQ ID NO: 49999 - protein, 9 aa, Homo Sapiens
EVTQIACGR

SEQ ID NO: 50000 - protein, 9 aa, Homo Sapiens
EVTRVKAVR

SEQ ID NO: 50001 - protein, 9 aa, Homo Sapiens
EVTTTVLVR

SEQ ID NO: 50002 - protein, 9 aa, Homo Sapiens
EVVASAALR

SEQ ID NO: 50003 - protein, 9 aa, Homo Sapiens
EVVCGLIFR

SEQ ID NO: 50004 - protein, 9 aa, Homo Sapiens
EVVDFSSHY

SEQ ID NO: 50005 - protein, 9 aa, Homo Sapiens
EVVDKDSIR

SEQ ID NO: 50006 - protein, 9 aa, Homo Sapiens
EVVDKRNPM

SEQ ID NO: 50007 - protein, 9 aa, Homo Sapiens
EVVDLLLAR

SEQ ID NO: 50008 - protein, 9 aa, Homo Sapiens
EVVDPLGKR

SEQ ID NO: 50009 - protein, 9 aa, Homo Sapiens
EVVDRGAIR

SEQ ID NO: 50010 - protein, 9 aa, Homo Sapiens
EVVDSLVGK

SEQ ID NO: 50011 - protein, 9 aa, Homo Sapiens
EVVEIQIDR

SEQ ID NO: 50012 - protein, 9 aa, Homo Sapiens
EVVELLLAR

SEQ ID NO: 50013 - protein, 9 aa, Homo Sapiens
EVVELSSTR

SEQ ID NO: 50014 - protein, 9 aa, Homo Sapiens
EVVEQGITR

SEQ ID NO: 50015 - protein, 9 aa, Homo Sapiens
EVVGIIESR

SEQ ID NO: 50016 - protein, 9 aa, Homo Sapiens
EVVGSVQGK

SEQ ID NO: 50017 - protein, 9 aa, Homo Sapiens
EVVHINRER

SEQ ID NO: 50018 - protein, 9 aa, Homo Sapiens
EVVKAHPRF

SEQ ID NO: 50019 - protein, 9 aa, Homo Sapiens
EVVLYSGAR

SEQ ID NO: 50020 - protein, 9 aa, Homo Sapiens
EVVNKRFVR

SEQ ID NO: 50021 - protein, 9 aa, Homo Sapiens
EVVPEPVAR

SEQ ID NO: 50022 - protein, 9 aa, Homo Sapiens
EVVPRVTKK

SEQ ID NO: 50023 - protein, 9 aa, Homo Sapiens
EVVQITWNR

SEQ ID NO: 50024 - protein, 9 aa, Homo Sapiens
EVVRTIKER

SEQ ID NO: 50025 - protein, 9 aa, Homo Sapiens
EVVSGVVSK

SEQ ID NO: 50026 - protein, 9 aa, Homo Sapiens
EVVSLLLDR

SEQ ID NO: 50027 - protein, 9 aa, Homo Sapiens
EVVVSGKLR

SEQ ID NO: 50028 - protein, 9 aa, Homo Sapiens
EVVYDLSIR

SEQ ID NO: 50029 - protein, 9 aa, Homo Sapiens
EVVYRFTAR

SEQ ID NO: 50030 - protein, 9 aa, Homo Sapiens
EVWPHSTER

SEQ ID NO: 50031 - protein, 9 aa, Homo Sapiens
EVYAGSHQY

SEQ ID NO: 50032 - protein, 9 aa, Homo Sapiens
EVYDPLSKR

SEQ ID NO: 50033 - protein, 9 aa, Homo Sapiens
EVYKATCLL

SEQ ID NO: 50034 - protein, 9 aa, Homo Sapiens
EVYKELRLR

SEQ ID NO: 50035 - protein, 9 aa, Homo Sapiens
EVYRSTKRL

SEQ ID NO: 50036 - protein, 9 aa, Homo Sapiens
EVYTLAEHR

SEQ ID NO: 50037 - protein, 9 aa, Homo Sapiens
EVYVGAVNR

SEQ ID NO: 50038 - protein, 9 aa, Homo Sapiens
EYVGPRLSR

SEQ ID NO: 50039 - protein, 9 aa, Homo Sapiens
FAMNVGKAR

SEQ ID NO: 50040 - protein, 9 aa, Homo Sapiens
FASQGGLAR

SEQ ID NO: 50041 - protein, 9 aa, Homo Sapiens
FIFEHIIKR

SEQ ID NO: 50042 - protein, 9 aa, Homo Sapiens
FIRDPSTSR

SEQ ID NO: 50043 - protein, 9 aa, Homo Sapiens
FPRKPSAPK

SEQ ID NO: 50044 - protein, 9 aa, Homo Sapiens
FPVRPGSGR

SEQ ID NO: 50045 - protein, 9 aa, Homo Sapiens
FTNKPTTFR

SEQ ID NO: 50046 - protein, 9 aa, Homo Sapiens
FVAELAAER

SEQ ID NO: 50047 - protein, 9 aa, Homo Sapiens
FVAGLGKVR

SEQ ID NO: 50048 - protein, 9 aa, Homo Sapiens
FVAPPTAAV

SEQ ID NO: 50049 - protein, 9 aa, Homo Sapiens
FVAQPGLSR

SEQ ID NO: 50050 - protein, 9 aa, Homo Sapiens
FVFGLPLER

SEQ ID NO: 50051 - protein, 9 aa, Homo Sapiens
FVHVAITNR

SEQ ID NO: 50052 - protein, 9 aa, Homo Sapiens
FVIGCYLDR

SEQ ID NO: 50053 - protein, 9 aa, Homo Sapiens
FVIKPKIQR

SEQ ID NO: 50054 - protein, 9 aa, Homo Sapiens
FVISPPALR

SEQ ID NO: 50055 - protein, 9 aa, Homo Sapiens
FVNQSSKCR

SEQ ID NO: 50056 - protein, 9 aa, Homo Sapiens
FVSPPTHGR

SEQ ID NO: 50057 - protein, 9 aa, Homo Sapiens
FVTPVTNQR

SEQ ID NO: 50058 - protein, 9 aa, Homo Sapiens
FVTSMMTGR

SEQ ID NO: 50059 - protein, 9 aa, Homo Sapiens
FVVGTERGR

SEQ ID NO: 50060 - protein, 9 aa, Homo Sapiens
FVYGEPVTR

SEQ ID NO: 50061 - protein, 9 aa, Homo Sapiens
FVYGSGVYR

SEQ ID NO: 50062 - protein, 9 aa, Homo Sapiens
GAVDPSVQR

SEQ ID NO: 50063 - protein, 9 aa, Homo Sapiens
GGPGGVGGL

SEQ ID NO: 50064 - protein, 9 aa, Homo Sapiens
GPGPRPLAR

SEQ ID NO: 50065 - protein, 9 aa, Homo Sapiens
GPIGPAGAR

SEQ ID NO: 50066 - protein, 9 aa, Homo Sapiens
GTYVSSVPR

SEQ ID NO: 50067 - protein, 9 aa, Homo Sapiens
GVADALLYR

SEQ ID NO: 50068 - protein, 9 aa, Homo Sapiens
GVAPVFKKR

SEQ ID NO: 50069 - protein, 9 aa, Homo Sapiens
GVIGQRMPR

SEQ ID NO: 50070 - protein, 9 aa, Homo Sapiens
GVKVPGEYR

SEQ ID NO: 50071 - protein, 9 aa, Homo Sapiens
GVSPVITVR

SEQ ID NO: 50072 - protein, 9 aa, Homo Sapiens
HAGPPSTSR

SEQ ID NO: 50073 - protein, 9 aa, Homo Sapiens
HIDVITAEM

SEQ ID NO: 50074 - protein, 9 aa, Homo Sapiens
HIGKPSTIR

SEQ ID NO: 50075 - protein, 9 aa, Homo Sapiens
HIMGEAMER

SEQ ID NO: 50076 - protein, 9 aa, Homo Sapiens
HISCVIKER

SEQ ID NO: 50077 - protein, 9 aa, Homo Sapiens
HLPSGVKSL

SEQ ID NO: 50078 - protein, 9 aa, Homo Sapiens
HSPGAVSSL

SEQ ID NO: 50079 - protein, 9 aa, Homo Sapiens
HTIAPMGTR

SEQ ID NO: 50080 - protein, 9 aa, Homo Sapiens
HVAKIVTQR

SEQ ID NO: 50081 - protein, 9 aa, Homo Sapiens
HVAQIYAIR

SEQ ID NO: 50082 - protein, 9 aa, Homo Sapiens
HVASVLCQR

SEQ ID NO: 50083 - protein, 9 aa, Homo Sapiens
HVAVPTHFF

SEQ ID NO: 50084 - protein, 9 aa, Homo Sapiens
HVFGRSLLR

SEQ ID NO: 50085 - protein, 9 aa, Homo Sapiens
HVFLRTTGR

SEQ ID NO: 50086 - protein, 9 aa, Homo Sapiens
HVIQPRADR

SEQ ID NO: 50087 - protein, 9 aa, Homo Sapiens
HVRDGSVVR

SEQ ID NO: 50088 - protein, 9 aa, Homo Sapiens
HVSGIGTRR

SEQ ID NO: 50089 - protein, 9 aa, Homo Sapiens
HVVDIVALK

SEQ ID NO: 50090 - protein, 9 aa, Homo Sapiens
HVVSEGVPR

SEQ ID NO: 50091 - protein, 9 aa, Homo Sapiens
IAGDGSVFR

SEQ ID NO: 50092 - protein, 9 aa, Homo Sapiens
IIADSSTFR

SEQ ID NO: 50093 - protein, 9 aa, Homo Sapiens
IILGPTKDR

SEQ ID NO: 50094 - protein, 9 aa, Homo Sapiens
IIVDIATKR

SEQ ID NO: 50095 - protein, 9 aa, Homo Sapiens
ILADATAKM

SEQ ID NO: 50096 - protein, 9 aa, Homo Sapiens
IPGEESSLR

SEQ ID NO: 50097 - protein, 9 aa, Homo Sapiens
IPRTPSSFR

SEQ ID NO: 50098 - protein, 9 aa, Homo Sapiens
IPSGVSGRR

SEQ ID NO: 50099 - protein, 9 aa, Homo Sapiens
ITQIEHEVS

SEQ ID NO: 50100 - protein, 9 aa, Homo Sapiens
IVAPGGALR

SEQ ID NO: 50101 - protein, 9 aa, Homo Sapiens
IVGDPSTAK

SEQ ID NO: 50102 - protein, 9 aa, Homo Sapiens
IVIKGTSER

SEQ ID NO: 50103 - protein, 9 aa, Homo Sapiens
IVKPPASAR

SEQ ID NO: 50104 - protein, 9 aa, Homo Sapiens
IVKQAGLER

SEQ ID NO: 50105 - protein, 9 aa, Homo Sapiens
IVNRTIANM

SEQ ID NO: 50106 - protein, 9 aa, Homo Sapiens
IVQAPSGNR

SEQ ID NO: 50107 - protein, 9 aa, Homo Sapiens
IVQAVSAHR

SEQ ID NO: 50108 - protein, 9 aa, Homo Sapiens
IVRDQTELR

SEQ ID NO: 50109 - protein, 9 aa, Homo Sapiens
IVVDPFDPR

SEQ ID NO: 50110 - protein, 9 aa, Homo Sapiens
IVVPRTMVR

SEQ ID NO: 50111 - protein, 9 aa, Homo Sapiens
IVYGQPRTR

SEQ ID NO: 50112 - protein, 9 aa, Homo Sapiens
KAPVTKVAA

SEQ ID NO: 50113 - protein, 9 aa, Homo Sapiens
LAAPASLRP

SEQ ID NO: 50114 - protein, 9 aa, Homo Sapiens
LAAPSGLER

SEQ ID NO: 50115 - protein, 9 aa, Homo Sapiens
LAINGSANR

SEQ ID NO: 50116 - protein, 9 aa, Homo Sapiens
LANDPTSLR

SEQ ID NO: 50117 - protein, 9 aa, Homo Sapiens
LASQPSIPR

SEQ ID NO: 50118 - protein, 9 aa, Homo Sapiens
LIIGPSKER

SEQ ID NO: 50119 - protein, 9 aa, Homo Sapiens
LPAEQGSPR

SEQ ID NO: 50120 - protein, 9 aa, Homo Sapiens
LPFGSSPHR

SEQ ID NO: 50121 - protein, 9 aa, Homo Sapiens
LPHGNVSAR

SEQ ID NO: 50122 - protein, 9 aa, Homo Sapiens
LPSPISTNR

SEQ ID NO: 50123 - protein, 9 aa, Homo Sapiens
LPTAPRAAR

SEQ ID NO: 50124 - protein, 9 aa, Homo Sapiens
LSDPSIPGR

SEQ ID NO: 50125 - protein, 9 aa, Homo Sapiens
LSSKSGLSR

SEQ ID NO: 50126 - protein, 9 aa, Homo Sapiens
LTAPSTSAR

SEQ ID NO: 50127 - protein, 9 aa, Homo Sapiens
LVAQATATR

SEQ ID NO: 50128 - protein, 9 aa, Homo Sapiens
LVGPVPAGR

SEQ ID NO: 50129 - protein, 9 aa, Homo Sapiens
LVHKPSEER

SEQ ID NO: 50130 - protein, 9 aa, Homo Sapiens
LVIGGSSER

SEQ ID NO: 50131 - protein, 9 aa, Homo Sapiens
LVIKNSTSR

SEQ ID NO: 50132 - protein, 9 aa, Homo Sapiens
LVSQPGLNR

SEQ ID NO: 50133 - protein, 9 aa, Homo Sapiens
LVVENSAQR

SEQ ID NO: 50134 - protein, 9 aa, Homo Sapiens
LVVHPGTAR

SEQ ID NO: 50135 - protein, 9 aa, Homo Sapiens
LVVPPSRYR

SEQ ID NO: 50136 - protein, 9 aa, Homo Sapiens
MAAAAFAEK

SEQ ID NO: 50137 - protein, 9 aa, Homo Sapiens
MAAPSWRGA

SEQ ID NO: 50138 - protein, 9 aa, Homo Sapiens
MAGPGGLAR

SEQ ID NO: 50139 - protein, 9 aa, Homo Sapiens
MAIDGVAPR

SEQ ID NO: 50140 - protein, 9 aa, Homo Sapiens
MAVEAGQSR

SEQ ID NO: 50141 - protein, 9 aa, Homo Sapiens
MAVSSDTCR

SEQ ID NO: 50142 - protein, 9 aa, Homo Sapiens
MAVTALAAR

SEQ ID NO: 50143 - protein, 9 aa, Homo Sapiens
MIVRPSQPR

SEQ ID NO: 50144 - protein, 9 aa, Homo Sapiens
MLHPSSRPR

SEQ ID NO: 50145 - protein, 9 aa, Homo Sapiens
MLVDPKHHR

SEQ ID NO: 50146 - protein, 9 aa, Homo Sapiens
MPHTSGMNR

SEQ ID NO: 50147 - protein, 9 aa, Homo Sapiens
MSISGSSAR

SEQ ID NO: 50148 - protein, 9 aa, Homo Sapiens
MSSPPSAAR

SEQ ID NO: 50149 - protein, 9 aa, Homo Sapiens
MVADVFSHR

SEQ ID NO: 50150 - protein, 9 aa, Homo Sapiens
MVAHELSNR

SEQ ID NO: 50151 - protein, 9 aa, Homo Sapiens
MVGPPGTGK

SEQ ID NO: 50152 - protein, 9 aa, Homo Sapiens
MVKFGGSGR

SEQ ID NO: 50153 - protein, 9 aa, Homo Sapiens
MVLAHVTNR

SEQ ID NO: 50154 - protein, 9 aa, Homo Sapiens
MVTGQTVCK

SEQ ID NO: 50155 - protein, 9 aa, Homo Sapiens
MVYDSPLCR

SEQ ID NO: 50156 - protein, 9 aa, Homo Sapiens
MVYQKAAMR

SEQ ID NO: 50157 - protein, 9 aa, Homo Sapiens
NAIGGKYNR

SEQ ID NO: 50158 - protein, 9 aa, Homo Sapiens
NIINETTTR

SEQ ID NO: 50159 - protein, 9 aa, Homo Sapiens
NIKNSSVPR

SEQ ID NO: 50160 - protein, 9 aa, Homo Sapiens
NIQKITKSM

SEQ ID NO: 50161 - protein, 9 aa, Homo Sapiens
NLCAIHAKR

SEQ ID NO: 50162 - protein, 9 aa, Homo Sapiens
NLMGKTSER

SEQ ID NO: 50163 - protein, 9 aa, Homo Sapiens
NPIGQGAGR

SEQ ID NO: 50164 - protein, 9 aa, Homo Sapiens
NVADLTSLR

SEQ ID NO: 50165 - protein, 9 aa, Homo Sapiens
NVAGSTLSR

SEQ ID NO: 50166 - protein, 9 aa, Homo Sapiens
NVHGGTILK

SEQ ID NO: 50167 - protein, 9 aa, Homo Sapiens
NVKGPGLQR

SEQ ID NO: 50168 - protein, 9 aa, Homo Sapiens
NVNEVISNR

SEQ ID NO: 50169 - protein, 9 aa, Homo Sapiens
NVTGIAHRR

SEQ ID NO: 50170 - protein, 9 aa, Homo Sapiens
NVVSVDTAR

SEQ ID NO: 50171 - protein, 9 aa, Homo Sapiens
NVYGQITVR

SEQ ID NO: 50172 - protein, 9 aa, Homo Sapiens
PFDITVMIR

SEQ ID NO: 50173 - protein, 9 aa, Homo Sapiens
QAAFFGSYR

SEQ ID NO: 50174 - protein, 9 aa, Homo Sapiens
QAAQPTRWV

SEQ ID NO: 50175 - protein, 9 aa, Homo Sapiens
QAGPSGLQR

SEQ ID NO: 50176 - protein, 9 aa, Homo Sapiens
QAIKGMHIR

SEQ ID NO: 50177 - protein, 9 aa, Homo Sapiens
QAISPGMKR

SEQ ID NO: 50178 - protein, 9 aa, Homo Sapiens
QAKIPGLKR

SEQ ID NO: 50179 - protein, 9 aa, Homo Sapiens
QAPQPQSSL

SEQ ID NO: 50180 - protein, 9 aa, Homo Sapiens
QAQKPSVPR

SEQ ID NO: 50181 - protein, 9 aa, Homo Sapiens
QDVDLSPIT

SEQ ID NO: 50182 - protein, 9 aa, Homo Sapiens
QGFFTGRGR

SEQ ID NO: 50183 - protein, 9 aa, Homo Sapiens
QIAEPSTSR

SEQ ID NO: 50184 - protein, 9 aa, Homo Sapiens
QIFSGTSKR

SEQ ID NO: 50185 - protein, 9 aa, Homo Sapiens
QIGPVSSSR

SEQ ID NO: 50186 - protein, 9 aa, Homo Sapiens
QILEQPKQR

SEQ ID NO: 50187 - protein, 9 aa, Homo Sapiens
QIVPPGRQR

SEQ ID NO: 50188 - protein, 9 aa, Homo Sapiens
QPAAPSLTR

SEQ ID NO: 50189 - protein, 9 aa, Homo Sapiens
QPAPPGSER

SEQ ID NO: 50190 - protein, 9 aa, Homo Sapiens
QPAPRSIFR

SEQ ID NO: 50191 - protein, 9 aa, Homo Sapiens
QPFGRGAMR

SEQ ID NO: 50192 - protein, 9 aa, Homo Sapiens
QPSDPSLGR

SEQ ID NO: 50193 - protein, 9 aa, Homo Sapiens
QPSQPLGCR

SEQ ID NO: 50194 - protein, 9 aa, Homo Sapiens
QSLQSFWPR

SEQ ID NO: 50195 - protein, 9 aa, Homo Sapiens
QTHFQLAYR

SEQ ID NO: 50196 - protein, 9 aa, Homo Sapiens
QTVGPSHAR

SEQ ID NO: 50197 - protein, 9 aa, Homo Sapiens
QVADVVVSR

SEQ ID NO: 50198 - protein, 9 aa, Homo Sapiens
QVAGITGAR

SEQ ID NO: 50199 - protein, 9 aa, Homo Sapiens
QVAPEATVR

SEQ ID NO: 50200 - protein, 9 aa, Homo Sapiens
QVAPPVLKR

SEQ ID NO: 50201 - protein, 9 aa, Homo Sapiens
QVAQFSTVR

SEQ ID NO: 50202 - protein, 9 aa, Homo Sapiens
QVATVIQSR

SEQ ID NO: 50203 - protein, 9 aa, Homo Sapiens
QVFEKSPLR

SEQ ID NO: 50204 - protein, 9 aa, Homo Sapiens
QVFLGGRNR

SEQ ID NO: 50205 - protein, 9 aa, Homo Sapiens
QVFPGLLER

SEQ ID NO: 50206 - protein, 9 aa, Homo Sapiens
QVGGVTAYF

SEQ ID NO: 50207 - protein, 9 aa, Homo Sapiens
QVIKGVLFR

SEQ ID NO: 50208 - protein, 9 aa, Homo Sapiens
QVSESGVHR

SEQ ID NO: 50209 - protein, 9 aa, Homo Sapiens
QVSTHKQSE

SEQ ID NO: 50210 - protein, 9 aa, Homo Sapiens
QVVDKVTQR

SEQ ID NO: 50211 - protein, 9 aa, Homo Sapiens
QVVKPTAER

SEQ ID NO: 50212 - protein, 9 aa, Homo Sapiens
QVYPIIAER

SEQ ID NO: 50213 - protein, 9 aa, Homo Sapiens
RPFRGSVGR

SEQ ID NO: 50214 - protein, 9 aa, Homo Sapiens
SAAEVGFVR

SEQ ID NO: 50215 - protein, 9 aa, Homo Sapiens
SAAPAITCR

SEQ ID NO: 50216 - protein, 9 aa, Homo Sapiens
SAAPPTVGR

SEQ ID NO: 50217 - protein, 9 aa, Homo Sapiens
SAGGSFTVR

SEQ ID NO: 50218 - protein, 9 aa, Homo Sapiens
SAGPSTAKL

SEQ ID NO: 50219 - protein, 9 aa, Homo Sapiens
SAHFSPVLR

SEQ ID NO: 50220 - protein, 9 aa, Homo Sapiens
SAPTETHSL

SEQ ID NO: 50221 - protein, 9 aa, Homo Sapiens
SASHVSSFR

SEQ ID NO: 50222 - protein, 9 aa, Homo Sapiens
SASLPSSGR

SEQ ID NO: 50223 - protein, 9 aa, Homo Sapiens
SAVAGRLER

SEQ ID NO: 50224 - protein, 9 aa, Homo Sapiens
SAVGKLSSR

SEQ ID NO: 50225 - protein, 9 aa, Homo Sapiens
SIIEHTRER

SEQ ID NO: 50226 - protein, 9 aa, Homo Sapiens
SIIGKGGQR

SEQ ID NO: 50227 - protein, 9 aa, Homo Sapiens
SIIGVTEPR

SEQ ID NO: 50228 - protein, 9 aa, Homo Sapiens
SINKPTSER

SEQ ID NO: 50229 - protein, 9 aa, Homo Sapiens
SISGPFGSR

SEQ ID NO: 50230 - protein, 9 aa, Homo Sapiens
SLADIMAKR

SEQ ID NO: 50231 - protein, 9 aa, Homo Sapiens
SLNTPGSFR

SEQ ID NO: 50232 - protein, 9 aa, Homo Sapiens
SLRFSPTGR

SEQ ID NO: 50233 - protein, 9 aa, Homo Sapiens
SLVSPLSPR

SEQ ID NO: 50234 - protein, 9 aa, Homo Sapiens
SLYGPGTNR

SEQ ID NO: 50235 - protein, 9 aa, Homo Sapiens
SPASIGQPR

SEQ ID NO: 50236 - protein, 9 aa, Homo Sapiens
SPIDMTSKR

SEQ ID NO: 50237 - protein, 9 aa, Homo Sapiens
SPIVSGARR

SEQ ID NO: 50238 - protein, 9 aa, Homo Sapiens
SSALPTTGR

SEQ ID NO: 50239 - protein, 9 aa, Homo Sapiens
SSMFGTLPR

SEQ ID NO: 50240 - protein, 9 aa, Homo Sapiens
SSPAPRTAL

SEQ ID NO: 50241 - protein, 9 aa, Homo Sapiens
SVAALTSKR

SEQ ID NO: 50242 - protein, 9 aa, Homo Sapiens
SVAEERAGR

SEQ ID NO: 50243 - protein, 9 aa, Homo Sapiens
SVAEISSHM

SEQ ID NO: 50244 - protein, 9 aa, Homo Sapiens
SVAFSSDNR

SEQ ID NO: 50245 - protein, 9 aa, Homo Sapiens
SVAKTILKR

SEQ ID NO: 50246 - protein, 9 aa, Homo Sapiens
SVAPPGGSR

SEQ ID NO: 50247 - protein, 9 aa, Homo Sapiens
SVARITCVR

SEQ ID NO: 50248 - protein, 9 aa, Homo Sapiens
SVASASTTR

SEQ ID NO: 50249 - protein, 9 aa, Homo Sapiens
SVELVTQQM

SEQ ID NO: 50250 - protein, 9 aa, Homo Sapiens
SVFLYQSLR

SEQ ID NO: 50251 - protein, 9 aa, Homo Sapiens
SVHAPSLRR

SEQ ID NO: 50252 - protein, 9 aa, Homo Sapiens
SVHLSPCFR

SEQ ID NO: 50253 - protein, 9 aa, Homo Sapiens
SVHSPSTSM

SEQ ID NO: 50254 - protein, 9 aa, Homo Sapiens
SVHVPGMNR

SEQ ID NO: 50255 - protein, 9 aa, Homo Sapiens
SVIGAREER

SEQ ID NO: 50256 - protein, 9 aa, Homo Sapiens
SVIPNCQFR

SEQ ID NO: 50257 - protein, 9 aa, Homo Sapiens
SVIQDMAVR

SEQ ID NO: 50258 - protein, 9 aa, Homo Sapiens
SVIQTAGYR

SEQ ID NO: 50259 - protein, 9 aa, Homo Sapiens
SVISGISSR

SEQ ID NO: 50260 - protein, 9 aa, Homo Sapiens
SVISPVGNR

SEQ ID NO: 50261 - protein, 9 aa, Homo Sapiens
SVKEVALGR

SEQ ID NO: 50262 - protein, 9 aa, Homo Sapiens
SVLEGMGFR

SEQ ID NO: 50263 - protein, 9 aa, Homo Sapiens
SVLNFATNR

SEQ ID NO: 50264 - protein, 9 aa, Homo Sapiens
SVMGVTVSR

SEQ ID NO: 50265 - protein, 9 aa, Homo Sapiens
SVQRPGLAR

SEQ ID NO: 50266 - protein, 9 aa, Homo Sapiens
SVSDIIRLR

SEQ ID NO: 50267 - protein, 9 aa, Homo Sapiens
SVSEVVVNR

SEQ ID NO: 50268 - protein, 9 aa, Homo Sapiens
SVSPSASFR

SEQ ID NO: 50269 - protein, 9 aa, Homo Sapiens
SVSPVVHVR

SEQ ID NO: 50270 - protein, 9 aa, Homo Sapiens
SVTDAVALR

SEQ ID NO: 50271 - protein, 9 aa, Homo Sapiens
SVVEIASLR

SEQ ID NO: 50272 - protein, 9 aa, Homo Sapiens
SVVEPGRRR

SEQ ID NO: 50273 - protein, 9 aa, Homo Sapiens
SVVEVICER

SEQ ID NO: 50274 - protein, 9 aa, Homo Sapiens
TAAAPTLRR

SEQ ID NO: 50275 - protein, 9 aa, Homo Sapiens
TAAFGHVQR

SEQ ID NO: 50276 - protein, 9 aa, Homo Sapiens
TAAGGFQQR

SEQ ID NO: 50277 - protein, 9 aa, Homo Sapiens
TAAPPSVCR

SEQ ID NO: 50278 - protein, 9 aa, Homo Sapiens
TAGIIGVNR

SEQ ID NO: 50279 - protein, 9 aa, Homo Sapiens
TAGPHTQFV

SEQ ID NO: 50280 - protein, 9 aa, Homo Sapiens
TAIKGVGRR

SEQ ID NO: 50281 - protein, 9 aa, Homo Sapiens
TAMLPSSQR

SEQ ID NO: 50282 - protein, 9 aa, Homo Sapiens
TAMPPGTAR

SEQ ID NO: 50283 - protein, 9 aa, Homo Sapiens
TASGIANLR

SEQ ID NO: 50284 - protein, 9 aa, Homo Sapiens
TAVAALSGR

SEQ ID NO: 50285 - protein, 9 aa, Homo Sapiens
TIFEEPRER

SEQ ID NO: 50286 - protein, 9 aa, Homo Sapiens
TIIDAPGHR

SEQ ID NO: 50287 - protein, 9 aa, Homo Sapiens
TIIDIITHR

SEQ ID NO: 50288 - protein, 9 aa, Homo Sapiens
TIIEVNGKR

SEQ ID NO: 50289 - protein, 9 aa, Homo Sapiens
TIVNILTNR

SEQ ID NO: 50290 - protein, 9 aa, Homo Sapiens
TLAEVMRQR

SEQ ID NO: 50291 - protein, 9 aa, Homo Sapiens
TLSPAFSTR

SEQ ID NO: 50292 - protein, 9 aa, Homo Sapiens
TLSSVTSAR

SEQ ID NO: 50293 - protein, 9 aa, Homo Sapiens
TPAGGGFPR

SEQ ID NO: 50294 - protein, 9 aa, Homo Sapiens
TPASATLGR

SEQ ID NO: 50295 - protein, 9 aa, Homo Sapiens
TPFHGHVGR

SEQ ID NO: 50296 - protein, 9 aa, Homo Sapiens
TPKKPGLRR

SEQ ID NO: 50297 - protein, 9 aa, Homo Sapiens
TPMSVTSQR

SEQ ID NO: 50298 - protein, 9 aa, Homo Sapiens
TPSDINSPR

SEQ ID NO: 50299 - protein, 9 aa, Homo Sapiens
TPYAGGLFR

SEQ ID NO: 50300 - protein, 9 aa, Homo Sapiens
TSGLPSSVR

SEQ ID NO: 50301 - protein, 9 aa, Homo Sapiens
TSGPIGGLR

SEQ ID NO: 50302 - protein, 9 aa, Homo Sapiens
TSSPSSIPR

SEQ ID NO: 50303 - protein, 9 aa, Homo Sapiens
TTAPVVSTR

SEQ ID NO: 50304 - protein, 9 aa, Homo Sapiens
TTVGTLSQR

SEQ ID NO: 50305 - protein, 9 aa, Homo Sapiens
TVAAVCATR

SEQ ID NO: 50306 - protein, 9 aa, Homo Sapiens
TVAAVFRGR

SEQ ID NO: 50307 - protein, 9 aa, Homo Sapiens
TVAHAISER

SEQ ID NO: 50308 - protein, 9 aa, Homo Sapiens
TVAQITQRF

SEQ ID NO: 50309 - protein, 9 aa, Homo Sapiens
TVASKTQYF

SEQ ID NO: 50310 - protein, 9 aa, Homo Sapiens
TVASSTQKF

SEQ ID NO: 50311 - protein, 9 aa, Homo Sapiens
TVATQTQFF

SEQ ID NO: 50312 - protein, 9 aa, Homo Sapiens
TVFESRNLR

SEQ ID NO: 50313 - protein, 9 aa, Homo Sapiens
TVFGPTLLR

SEQ ID NO: 50314 - protein, 9 aa, Homo Sapiens
TVFHSLASR

SEQ ID NO: 50315 - protein, 9 aa, Homo Sapiens
TVFITGASR

SEQ ID NO: 50316 - protein, 9 aa, Homo Sapiens
TVFRSTDFF

SEQ ID NO: 50317 - protein, 9 aa, Homo Sapiens
TVGGGEMAR

SEQ ID NO: 50318 - protein, 9 aa, Homo Sapiens
TVGGWVSTR

SEQ ID NO: 50319 - protein, 9 aa, Homo Sapiens
TVGKATGFL

SEQ ID NO: 50320 - protein, 9 aa, Homo Sapiens
TVIADICRR

SEQ ID NO: 50321 - protein, 9 aa, Homo Sapiens
TVIDIHTLR

SEQ ID NO: 50322 - protein, 9 aa, Homo Sapiens
TVIKQTMER

SEQ ID NO: 50323 - protein, 9 aa, Homo Sapiens
TVIKVMTTR

SEQ ID NO: 50324 - protein, 9 aa, Homo Sapiens
TVIPPGLTR

SEQ ID NO: 50325 - protein, 9 aa, Homo Sapiens
TVISRVIGR

SEQ ID NO: 50326 - protein, 9 aa, Homo Sapiens
TVLFTGVRR

SEQ ID NO: 50327 - protein, 9 aa, Homo Sapiens
TVRDAVVGR

SEQ ID NO: 50328 - protein, 9 aa, Homo Sapiens
TVSAAVAER

SEQ ID NO: 50329 - protein, 9 aa, Homo Sapiens
TVSGPGVAR

SEQ ID NO: 50330 - protein, 9 aa, Homo Sapiens
TVSSATHYV

SEQ ID NO: 50331 - protein, 9 aa, Homo Sapiens
TVTMQVTAR

SEQ ID NO: 50332 - protein, 9 aa, Homo Sapiens
TVVDAASLR

SEQ ID NO: 50333 - protein, 9 aa, Homo Sapiens
TVVGDVGGR

SEQ ID NO: 50334 - protein, 9 aa, Homo Sapiens
TVVGSSKFR

SEQ ID NO: 50335 - protein, 9 aa, Homo Sapiens
TVVGTSRLR

SEQ ID NO: 50336 - protein, 9 aa, Homo Sapiens
TVVQNLMER

SEQ ID NO: 50337 - protein, 9 aa, Homo Sapiens
TVVTGTLER

SEQ ID NO: 50338 - protein, 9 aa, Homo Sapiens
TVYHSPVSR

SEQ ID NO: 50339 - protein, 9 aa, Homo Sapiens
VAPPGCSHL

SEQ ID NO: 50340 - protein, 9 aa, Homo Sapiens
VAQHPPARR

SEQ ID NO: 50341 - protein, 9 aa, Homo Sapiens
VATDITSTR

SEQ ID NO: 50342 - protein, 9 aa, Homo Sapiens
VAVTPFSLR

SEQ ID NO: 50343 - protein, 9 aa, Homo Sapiens
VEHGPAAIR

SEQ ID NO: 50344 - protein, 9 aa, Homo Sapiens
VPAQPLGPR

SEQ ID NO: 50345 - protein, 9 aa, Homo Sapiens
VPDTIATLR

SEQ ID NO: 50346 - protein, 9 aa, Homo Sapiens
VPFGAGRHR

SEQ ID NO: 50347 - protein, 9 aa, Homo Sapiens
VPGPPGSSR

SEQ ID NO: 50348 - protein, 9 aa, Homo Sapiens
VPTSLELQR

SEQ ID NO: 50349 - protein, 9 aa, Homo Sapiens
VVAPPGAPK

SEQ ID NO: 50350 - protein, 9 aa, Homo Sapiens
VVAPRLNSR

SEQ ID NO: 50351 - protein, 9 aa, Homo Sapiens
VVFGGGEAR

SEQ ID NO: 50352 - protein, 9 aa, Homo Sapiens
VVGPPGATR

SEQ ID NO: 50353 - protein, 9 aa, Homo Sapiens
VVGPVSLPR

SEQ ID NO: 50354 - protein, 9 aa, Homo Sapiens
VVIQASKSR

SEQ ID NO: 50355 - protein, 9 aa, Homo Sapiens
VVMPPTRAR

SEQ ID NO: 50356 - protein, 9 aa, Homo Sapiens
VVMTPPRNR

SEQ ID NO: 50357 - protein, 9 aa, Homo Sapiens
WVIGSVVAR

SEQ ID NO: 50358 - protein, 9 aa, Homo Sapiens
WVSADGFLR

SEQ ID NO: 50359 - protein, 9 aa, Homo Sapiens
WVSENFQER

SEQ ID NO: 50360 - protein, 9 aa, Homo Sapiens
YAAFVQTHR

SEQ ID NO: 50361 - protein, 9 aa, Homo Sapiens
YIMPKPARR

SEQ ID NO: 50362 - protein, 9 aa, Homo Sapiens
YLADPMKAR

SEQ ID NO: 50363 - protein, 9 aa, Homo Sapiens
YPYSPPAFR

SEQ ID NO: 50364 - protein, 9 aa, Homo Sapiens
YPYSPPTFR

SEQ ID NO: 50365 - protein, 9 aa, Homo Sapiens
YSGPTSVSR

SEQ ID NO: 50366 - protein, 9 aa, Homo Sapiens
YVANVGTNR

SEQ ID NO: 50367 - protein, 9 aa, Homo Sapiens
YVAPELLKR

SEQ ID NO: 50368 - protein, 9 aa, Homo Sapiens
YVFGGVRSR

SEQ ID NO: 50369 - protein, 9 aa, Homo Sapiens
YVFPVSQKR

SEQ ID NO: 50370 - protein, 9 aa, Homo Sapiens
YVGEIIGKR

SEQ ID NO: 50371 - protein, 9 aa, Homo Sapiens
YVGRPSLNR

SEQ ID NO: 50372 - protein, 9 aa, Homo Sapiens
YVHTTVNEM

SEQ ID NO: 50373 - protein, 9 aa, Homo Sapiens
YVIESARQR

SEQ ID NO: 50374 - protein, 9 aa, Homo Sapiens
YVIKPGNTK

SEQ ID NO: 50375 - protein, 9 aa, Homo Sapiens
YVMPSSSAR

SEQ ID NO: 50376 - protein, 9 aa, Homo Sapiens
YVTTSTRTY

SEQ ID NO: 50377 - protein, 9 aa, Homo Sapiens
YVVGGSIPR

SEQ ID NO: 50378 - protein, 10 aa, Homo Sapiens
AAGPPISEGK

SEQ ID NO: 50379 - protein, 10 aa, Homo Sapiens
ADAPVTQIGF

SEQ ID NO: 50380 - protein, 10 aa, Homo Sapiens
AGSLLGSGQM

SEQ ID NO: 50381 - protein, 10 aa, Homo Sapiens
AIIMFDVTSR

SEQ ID NO: 50382 - protein, 10 aa, Homo Sapiens
AVAPGGATRL

SEQ ID NO: 50383 - protein, 10 aa, Homo Sapiens
AVFDRDINCR

SEQ ID NO: 50384 - protein, 10 aa, Homo Sapiens
AVIDVDVMAR

SEQ ID NO: 50385 - protein, 10 aa, Homo Sapiens
AVPDAVGKCR

SEQ ID NO: 50386 - protein, 10 aa, Homo Sapiens
AVPEAIPTPR

SEQ ID NO: 50387 - protein, 10 aa, Homo Sapiens
AVVPFLPLQR

SEQ ID NO: 50388 - protein, 10 aa, Homo Sapiens
CVIDDRAARL

SEQ ID NO: 50389 - protein, 10 aa, Homo Sapiens
DAAFIIGSGR

SEQ ID NO: 50390 - protein, 10 aa, Homo Sapiens
DAYGSELVER

SEQ ID NO: 50391 - protein, 10 aa, Homo Sapiens
DIFKSIDGNR

SEQ ID NO: 50392 - protein, 10 aa, Homo Sapiens
DIFLVRGGMR

SEQ ID NO: 50393 - protein, 10 aa, Homo Sapiens
DIMDSSLTRR

SEQ ID NO: 50394 - protein, 10 aa, Homo Sapiens
DIVLVGGSTR

SEQ ID NO: 50395 - protein, 10 aa, Homo Sapiens
DIYDRKNMPR

SEQ ID NO: 50396 - protein, 10 aa, Homo Sapiens
DIYEFLPSKR

SEQ ID NO: 50397 - protein, 10 aa, Homo Sapiens
DLFTSKGLFR

SEQ ID NO: 50398 - protein, 10 aa, Homo Sapiens
DLISPRQPRL

SEQ ID NO: 50399 - protein, 10 aa, Homo Sapiens
DLYKTPCTKR

SEQ ID NO: 50400 - protein, 10 aa, Homo Sapiens
DSAPPSSVAR

SEQ ID NO: 50401 - protein, 10 aa, Homo Sapiens
DTCHTPFGKR

SEQ ID NO: 50402 - protein, 10 aa, Homo Sapiens
DTIDVSNLNR

SEQ ID NO: 50403 - protein, 10 aa, Homo Sapiens
DVAQSTHVLL

SEQ ID NO: 50404 - protein, 10 aa, Homo Sapiens
DVFWLRFSNR

SEQ ID NO: 50405 - protein, 10 aa, Homo Sapiens
DVIDGPISQR

SEQ ID NO: 50406 - protein, 10 aa, Homo Sapiens
DVIKPGTVKR

SEQ ID NO: 50407 - protein, 10 aa, Homo Sapiens
DVISDLLCNR

SEQ ID NO: 50408 - protein, 10 aa, Homo Sapiens
DVISNINITR

SEQ ID NO: 50409 - protein, 10 aa, Homo Sapiens
DVLGEGAHAR

SEQ ID NO: 50410 - protein, 10 aa, Homo Sapiens
DVLNPSGTQR

SEQ ID NO: 50411 - protein, 10 aa, Homo Sapiens
DVMASGTVKR

SEQ ID NO: 50412 - protein, 10 aa, Homo Sapiens
DVQGALVNLR

SEQ ID NO: 50413 - protein, 10 aa, Homo Sapiens
DVYENLYAGR

SEQ ID NO: 50414 - protein, 10 aa, Homo Sapiens
DVYTSLGQLR

SEQ ID NO: 50415 - protein, 10 aa, Homo Sapiens
EAAAAALSVR

SEQ ID NO: 50416 - protein, 10 aa, Homo Sapiens
EAAACITGLR

SEQ ID NO: 50417 - protein, 10 aa, Homo Sapiens
EAAAILMARL

SEQ ID NO: 50418 - protein, 10 aa, Homo Sapiens
EAAAPPPGPR

SEQ ID NO: 50419 - protein, 10 aa, Homo Sapiens
EAAAVHGARF

SEQ ID NO: 50420 - protein, 10 aa, Homo Sapiens
EAAAVLMARL

SEQ ID NO: 50421 - protein, 10 aa, Homo Sapiens
EAADTIGQMR

SEQ ID NO: 50422 - protein, 10 aa, Homo Sapiens
EAAERAIEKM

SEQ ID NO: 50423 - protein, 10 aa, Homo Sapiens
EAAFATKDRL

SEQ ID NO: 50424 - protein, 10 aa, Homo Sapiens
EAAFFEGHFL

SEQ ID NO: 50425 - protein, 10 aa, Homo Sapiens
EAAFIENLRR

SEQ ID NO: 50426 - protein, 10 aa, Homo Sapiens
EAAFSVAVCR

SEQ ID NO: 50427 - protein, 10 aa, Homo Sapiens
EAAGAAPCRL

SEQ ID NO: 50428 - protein, 10 aa, Homo Sapiens
EAAGPQEALR

SEQ ID NO: 50429 - protein, 10 aa, Homo Sapiens
EAALRSHRRL

SEQ ID NO: 50430 - protein, 10 aa, Homo Sapiens
EAAPEYFRRK

SEQ ID NO: 50431 - protein, 10 aa, Homo Sapiens
EAAPPAEVHR

SEQ ID NO: 50432 - protein, 10 aa, Homo Sapiens
EAAPPGELYR

SEQ ID NO: 50433 - protein, 10 aa, Homo Sapiens
EAAPVSGYRA

SEQ ID NO: 50434 - protein, 10 aa, Homo Sapiens
EAARQKLALR

SEQ ID NO: 50435 - protein, 10 aa, Homo Sapiens
EAASDSMKRL

SEQ ID NO: 50436 - protein, 10 aa, Homo Sapiens
EAASLRVLER

SEQ ID NO: 50437 - protein, 10 aa, Homo Sapiens
EAASMSQKRL

SEQ ID NO: 50438 - protein, 10 aa, Homo Sapiens
EAFAIGARAR

SEQ ID NO: 50439 - protein, 10 aa, Homo Sapiens
EAFEHPNVVR

SEQ ID NO: 50440 - protein, 10 aa, Homo Sapiens
EAFENRLKGR

SEQ ID NO: 50441 - protein, 10 aa, Homo Sapiens
EAFFSKTKRF

SEQ ID NO: 50442 - protein, 10 aa, Homo Sapiens
EAFGKIVAER

SEQ ID NO: 50443 - protein, 10 aa, Homo Sapiens
EAFGLEGVFR

SEQ ID NO: 50444 - protein, 10 aa, Homo Sapiens
EAFKERVRGR

SEQ ID NO: 50445 - protein, 10 aa, Homo Sapiens
EAFKPILSTR

SEQ ID NO: 50446 - protein, 10 aa, Homo Sapiens
EAFLASLSNR

SEQ ID NO: 50447 - protein, 10 aa, Homo Sapiens
EAFPSQGTKR

SEQ ID NO: 50448 - protein, 10 aa, Homo Sapiens
EAFSLDSSLR

SEQ ID NO: 50449 - protein, 10 aa, Homo Sapiens
EAGLMALRER

SEQ ID NO: 50450 - protein, 10 aa, Homo Sapiens
EAGLPQGEAR

SEQ ID NO: 50451 - protein, 10 aa, Homo Sapiens
EAGPDAVLGR

SEQ ID NO: 50452 - protein, 10 aa, Homo Sapiens
EAGPGGALHR

SEQ ID NO: 50453 - protein, 10 aa, Homo Sapiens
EAHFVPLVKR

SEQ ID NO: 50454 - protein, 10 aa, Homo Sapiens
EAHYSTKNPR

SEQ ID NO: 50455 - protein, 10 aa, Homo Sapiens
EAIDSAENRF

SEQ ID NO: 50456 - protein, 10 aa, Homo Sapiens
EAIGADSARF

SEQ ID NO: 50457 - protein, 10 aa, Homo Sapiens
EAIGLLGGQK

SEQ ID NO: 50458 - protein, 10 aa, Homo Sapiens
EAIGPVHQNR

SEQ ID NO: 50459 - protein, 10 aa, Homo Sapiens
EAIHQSQLRL

SEQ ID NO: 50460 - protein, 10 aa, Homo Sapiens
EAILPKGSAR

SEQ ID NO: 50461 - protein, 10 aa, Homo Sapiens
EAINITNNER

SEQ ID NO: 50462 - protein, 10 aa, Homo Sapiens
EAIQTRSRTR

SEQ ID NO: 50463 - protein, 10 aa, Homo Sapiens
EAIRTNYNDR

SEQ ID NO: 50464 - protein, 10 aa, Homo Sapiens
EAISLLNSER

SEQ ID NO: 50465 - protein, 10 aa, Homo Sapiens
EAISVVAQRL

SEQ ID NO: 50466 - protein, 10 aa, Homo Sapiens
EALGSGLVSR

SEQ ID NO: 50467 - protein, 10 aa, Homo Sapiens
EAMASIINRL

SEQ ID NO: 50468 - protein, 10 aa, Homo Sapiens
EANQQGTYRL

SEQ ID NO: 50469 - protein, 10 aa, Homo Sapiens
EANSNAVRFR

SEQ ID NO: 50470 - protein, 10 aa, Homo Sapiens
EANYPETLGR

SEQ ID NO: 50471 - protein, 10 aa, Homo Sapiens
EAQINTAKRL

SEQ ID NO: 50472 - protein, 10 aa, Homo Sapiens
EAQKAQALRL

SEQ ID NO: 50473 - protein, 10 aa, Homo Sapiens
EAQNPRPTRL

SEQ ID NO: 50474 - protein, 10 aa, Homo Sapiens
EASPVKRPRL

SEQ ID NO: 50475 - protein, 10 aa, Homo Sapiens
EATAGFTIGR

SEQ ID NO: 50476 - protein, 10 aa, Homo Sapiens
EATGGKYVPR

SEQ ID NO: 50477 - protein, 10 aa, Homo Sapiens
EATLGSGNLR

SEQ ID NO: 50478 - protein, 10 aa, Homo Sapiens
EAVAPEFTNR

SEQ ID NO: 50479 - protein, 10 aa, Homo Sapiens
EAVASLATRI

SEQ ID NO: 50480 - protein, 10 aa, Homo Sapiens
EAVDISSKRM

SEQ ID NO: 50481 - protein, 10 aa, Homo Sapiens
EAVDLMEPRL

SEQ ID NO: 50482 - protein, 10 aa, Homo Sapiens
EAVEQNNPRL

SEQ ID NO: 50483 - protein, 10 aa, Homo Sapiens
EAVGVDISGR

SEQ ID NO: 50484 - protein, 10 aa, Homo Sapiens
EAVHDLLRPR

SEQ ID NO: 50485 - protein, 10 aa, Homo Sapiens
EAVQALRERL

SEQ ID NO: 50486 - protein, 10 aa, Homo Sapiens
EAVRTTLGPR

SEQ ID NO: 50487 - protein, 10 aa, Homo Sapiens
EAYNETFSNR

SEQ ID NO: 50488 - protein, 10 aa, Homo Sapiens
EGAGAGSGFR

SEQ ID NO: 50489 - protein, 10 aa, Homo Sapiens
EGRDIPIVHR

SEQ ID NO: 50490 - protein, 10 aa, Homo Sapiens
EIAPMMERRM

SEQ ID NO: 50491 - protein, 10 aa, Homo Sapiens
EIASVAYRYR

SEQ ID NO: 50492 - protein, 10 aa, Homo Sapiens
EIFYTAIVNR

SEQ ID NO: 50493 - protein, 10 aa, Homo Sapiens
EIGPVSSSRF

SEQ ID NO: 50494 - protein, 10 aa, Homo Sapiens
EIIAWHKKTQ

SEQ ID NO: 50495 - protein, 10 aa, Homo Sapiens
EIIEAPMAWR

SEQ ID NO: 50496 - protein, 10 aa, Homo Sapiens
EIIEEHLANR

SEQ ID NO: 50497 - protein, 10 aa, Homo Sapiens
EIIIVDTSGR

SEQ ID NO: 50498 - protein, 10 aa, Homo Sapiens
EIINEDIAKR

SEQ ID NO: 50499 - protein, 10 aa, Homo Sapiens
EIIPFPSTKM

SEQ ID NO: 50500 - protein, 10 aa, Homo Sapiens
EIIQAQLVNR

SEQ ID NO: 50501 - protein, 10 aa, Homo Sapiens
EIIQSTPYGR

SEQ ID NO: 50502 - protein, 10 aa, Homo Sapiens
EIISERTKPR

SEQ ID NO: 50503 - protein, 10 aa, Homo Sapiens
EIKDPSGLFY

SEQ ID NO: 50504 - protein, 10 aa, Homo Sapiens
EIKKPPVSER

SEQ ID NO: 50505 - protein, 10 aa, Homo Sapiens
EILKAKPGLR

SEQ ID NO: 50506 - protein, 10 aa, Homo Sapiens
EILNIRTKGR

SEQ ID NO: 50507 - protein, 10 aa, Homo Sapiens
EIMQETGTRI

SEQ ID NO: 50508 - protein, 10 aa, Homo Sapiens
EIPEHFGAVR

SEQ ID NO: 50509 - protein, 10 aa, Homo Sapiens
EIQTPENTPR

SEQ ID NO: 50510 - protein, 10 aa, Homo Sapiens
EISESGMTVR

SEQ ID NO: 50511 - protein, 10 aa, Homo Sapiens
EIVDKSGVVR

SEQ ID NO: 50512 - protein, 10 aa, Homo Sapiens
EIVHGDLSPR

SEQ ID NO: 50513 - protein, 10 aa, Homo Sapiens
EIVLVGGSTR

SEQ ID NO: 50514 - protein, 10 aa, Homo Sapiens
EIYDRREYSR

SEQ ID NO: 50515 - protein, 10 aa, Homo Sapiens
EIYEFAATQR

SEQ ID NO: 50516 - protein, 10 aa, Homo Sapiens
EIYGGSDSRF

SEQ ID NO: 50517 - protein, 10 aa, Homo Sapiens
EIYSFSESLR

SEQ ID NO: 50518 - protein, 10 aa, Homo Sapiens
EIYTGTSVAR

SEQ ID NO: 50519 - protein, 10 aa, Homo Sapiens
ELADPTERFR

SEQ ID NO: 50520 - protein, 10 aa, Homo Sapiens
ELAFYTPKLR

SEQ ID NO: 50521 - protein, 10 aa, Homo Sapiens
ELALIYGTPR

SEQ ID NO: 50522 - protein, 10 aa, Homo Sapiens
ELASGAPRPR

SEQ ID NO: 50523 - protein, 10 aa, Homo Sapiens
ELCDERVSSR

SEQ ID NO: 50524 - protein, 10 aa, Homo Sapiens
ELFHQQGTPR

SEQ ID NO: 50525 - protein, 10 aa, Homo Sapiens
ELFKELHTGR

SEQ ID NO: 50526 - protein, 10 aa, Homo Sapiens
ELGLLDPAQR

SEQ ID NO: 50527 - protein, 10 aa, Homo Sapiens
ELHFGEGVHR

SEQ ID NO: 50528 - protein, 10 aa, Homo Sapiens
ELIAIATGGR

SEQ ID NO: 50529 - protein, 10 aa, Homo Sapiens
ELISTTANYR

SEQ ID NO: 50530 - protein, 10 aa, Homo Sapiens
ELLDRPGAER

SEQ ID NO: 50531 - protein, 10 aa, Homo Sapiens
ELLNPTGTVR

SEQ ID NO: 50532 - protein, 10 aa, Homo Sapiens
ELMAGHLRNR

SEQ ID NO: 50533 - protein, 10 aa, Homo Sapiens
ELMDKPLTFR

SEQ ID NO: 50534 - protein, 10 aa, Homo Sapiens
ELPIVTPALR

SEQ ID NO: 50535 - protein, 10 aa, Homo Sapiens
ELPTHPSKKR

SEQ ID NO: 50536 - protein, 10 aa, Homo Sapiens
ELSNVLAAMR

SEQ ID NO: 50537 - protein, 10 aa, Homo Sapiens
ELVDPLTTVR

SEQ ID NO: 50538 - protein, 10 aa, Homo Sapiens
ELYAEKVATR

SEQ ID NO: 50539 - protein, 10 aa, Homo Sapiens
EMFVGVGASR

SEQ ID NO: 50540 - protein, 10 aa, Homo Sapiens
EMIITKQGRR

SEQ ID NO: 50541 - protein, 10 aa, Homo Sapiens
EMLTFNPHKR

SEQ ID NO: 50542 - protein, 10 aa, Homo Sapiens
EMRDGQVLGR

SEQ ID NO: 50543 - protein, 10 aa, Homo Sapiens
EPADSGLERL

SEQ ID NO: 50544 - protein, 10 aa, Homo Sapiens
EPAGGLVGER

SEQ ID NO: 50545 - protein, 10 aa, Homo Sapiens
EPALTRKGAR

SEQ ID NO: 50546 - protein, 10 aa, Homo Sapiens
EPGPIRPSHR

SEQ ID NO: 50547 - protein, 10 aa, Homo Sapiens
EPIASRASRL

SEQ ID NO: 50548 - protein, 10 aa, Homo Sapiens
EPIATFYGLR

SEQ ID NO: 50549 - protein, 10 aa, Homo Sapiens
EPPPAPGAQR

SEQ ID NO: 50550 - protein, 10 aa, Homo Sapiens
EPVQLTFALR

SEQ ID NO: 50551 - protein, 10 aa, Homo Sapiens
EPVSDVVSTR

SEQ ID NO: 50552 - protein, 10 aa, Homo Sapiens
EPYPVSGAKR

SEQ ID NO: 50553 - protein, 10 aa, Homo Sapiens
EQALIQYALR

SEQ ID NO: 50554 - protein, 10 aa, Homo Sapiens
EQAPIQSEPR

SEQ ID NO: 50555 - protein, 10 aa, Homo Sapiens
EQFLTELTRL

SEQ ID NO: 50556 - protein, 10 aa, Homo Sapiens
EQIELHNSIR

SEQ ID NO: 50557 - protein, 10 aa, Homo Sapiens
EQIRTLAAER

SEQ ID NO: 50558 - protein, 10 aa, Homo Sapiens
EQSGPPHEPR

SEQ ID NO: 50559 - protein, 10 aa, Homo Sapiens
ESALPRAGPR

SEQ ID NO: 50560 - protein, 10 aa, Homo Sapiens
ESFGPQPISR

SEQ ID NO: 50561 - protein, 10 aa, Homo Sapiens
ESFPGSFRGR

SEQ ID NO: 50562 - protein, 10 aa, Homo Sapiens
ESIDDALNCR

SEQ ID NO: 50563 - protein, 10 aa, Homo Sapiens
ESIGRVLAQR

SEQ ID NO: 50564 - protein, 10 aa, Homo Sapiens
ESTTVATRRL

SEQ ID NO: 50565 - protein, 10 aa, Homo Sapiens
ESVGGRVAER

SEQ ID NO: 50566 - protein, 10 aa, Homo Sapiens
ESVGSMAKRL

SEQ ID NO: 50567 - protein, 10 aa, Homo Sapiens
ETAEEGSARL

SEQ ID NO: 50568 - protein, 10 aa, Homo Sapiens
ETAEQGLLNR

SEQ ID NO: 50569 - protein, 10 aa, Homo Sapiens
ETAGSTKYRL

SEQ ID NO: 50570 - protein, 10 aa, Homo Sapiens
ETAGSTSIPK

SEQ ID NO: 50571 - protein, 10 aa, Homo Sapiens
ETALIDRTGR

SEQ ID NO: 50572 - protein, 10 aa, Homo Sapiens
ETALNSKAYK

SEQ ID NO: 50573 - protein, 10 aa, Homo Sapiens
ETASKTLSRF

SEQ ID NO: 50574 - protein, 10 aa, Homo Sapiens
ETASNEVVYR

SEQ ID NO: 50575 - protein, 10 aa, Homo Sapiens
ETFDFQAMGR

SEQ ID NO: 50576 - protein, 10 aa, Homo Sapiens
ETFDYIGSSR

SEQ ID NO: 50577 - protein, 10 aa, Homo Sapiens
ETFEHPNVVR

SEQ ID NO: 50578 - protein, 10 aa, Homo Sapiens
ETFISLVSIR

SEQ ID NO: 50579 - protein, 10 aa, Homo Sapiens
ETFSSATKRL

SEQ ID NO: 50580 - protein, 10 aa, Homo Sapiens
ETHEALARRL

SEQ ID NO: 50581 - protein, 10 aa, Homo Sapiens
ETHGNLMTER

SEQ ID NO: 50582 - protein, 10 aa, Homo Sapiens
ETIEGMLLRL

SEQ ID NO: 50583 - protein, 10 aa, Homo Sapiens
ETIGKKFEKR

SEQ ID NO: 50584 - protein, 10 aa, Homo Sapiens
ETIVTKNGQK

SEQ ID NO: 50585 - protein, 10 aa, Homo Sapiens
ETLKHSGIGR

SEQ ID NO: 50586 - protein, 10 aa, Homo Sapiens
ETMGHSADRL

SEQ ID NO: 50587 - protein, 10 aa, Homo Sapiens
ETNHTSRPRL

SEQ ID NO: 50588 - protein, 10 aa, Homo Sapiens
ETNMYEGVGR

SEQ ID NO: 50589 - protein, 10 aa, Homo Sapiens
ETPGHTPSLR

SEQ ID NO: 50590 - protein, 10 aa, Homo Sapiens
ETQYSVDTRR

SEQ ID NO: 50591 - protein, 10 aa, Homo Sapiens
ETRDGQVLGR

SEQ ID NO: 50592 - protein, 10 aa, Homo Sapiens
ETSDFLGGLR

SEQ ID NO: 50593 - protein, 10 aa, Homo Sapiens
ETSGISIYRL

SEQ ID NO: 50594 - protein, 10 aa, Homo Sapiens
ETSPLTAEKL

SEQ ID NO: 50595 - protein, 10 aa, Homo Sapiens
ETSQAGLFRL

SEQ ID NO: 50596 - protein, 10 aa, Homo Sapiens
ETVGTGIMGR

SEQ ID NO: 50597 - protein, 10 aa, Homo Sapiens
ETVNFSGVKR

SEQ ID NO: 50598 - protein, 10 aa, Homo Sapiens
ETVPAPSANK

SEQ ID NO: 50599 - protein, 10 aa, Homo Sapiens
ETVQLRNPPR

SEQ ID NO: 50600 - protein, 10 aa, Homo Sapiens
EVAAMENVHR

SEQ ID NO: 50601 - protein, 10 aa, Homo Sapiens
EVAAPDVGRM

SEQ ID NO: 50602 - protein, 10 aa, Homo Sapiens
EVAEGGLPRA

SEQ ID NO: 50603 - protein, 10 aa, Homo Sapiens
EVAELTVLER

SEQ ID NO: 50604 - protein, 10 aa, Homo Sapiens
EVAERLGVTR

SEQ ID NO: 50605 - protein, 10 aa, Homo Sapiens
EVAETVFRDR

SEQ ID NO: 50606 - protein, 10 aa, Homo Sapiens
EVAGFGESRC

SEQ ID NO: 50607 - protein, 10 aa, Homo Sapiens
EVAGFVLNRL

SEQ ID NO: 50608 - protein, 10 aa, Homo Sapiens
EVAGIINDAK

SEQ ID NO: 50609 - protein, 10 aa, Homo Sapiens
EVAKQALNRL

SEQ ID NO: 50610 - protein, 10 aa, Homo Sapiens
EVAPCMGDRF

SEQ ID NO: 50611 - protein, 10 aa, Homo Sapiens
EVAPPEYHRK

SEQ ID NO: 50612 - protein, 10 aa, Homo Sapiens
EVAPVISSAY

SEQ ID NO: 50613 - protein, 10 aa, Homo Sapiens
EVAPVVTTEH

SEQ ID NO: 50614 - protein, 10 aa, Homo Sapiens
EVAQLIQGGR

SEQ ID NO: 50615 - protein, 10 aa, Homo Sapiens
EVAQPSEVLR

SEQ ID NO: 50616 - protein, 10 aa, Homo Sapiens
EVAQTADARL

SEQ ID NO: 50617 - protein, 10 aa, Homo Sapiens
EVASAVCLRL

SEQ ID NO: 50618 - protein, 10 aa, Homo Sapiens
EVASDLASSR

SEQ ID NO: 50619 - protein, 10 aa, Homo Sapiens
EVAVESQRRL

SEQ ID NO: 50620 - protein, 10 aa, Homo Sapiens
EVAVETTTPK

SEQ ID NO: 50621 - protein, 10 aa, Homo Sapiens
EVCPLSESRF

SEQ ID NO: 50622 - protein, 10 aa, Homo Sapiens
EVEPGVHLGR

SEQ ID NO: 50623 - protein, 10 aa, Homo Sapiens
EVFESSVPQR

SEQ ID NO: 50624 - protein, 10 aa, Homo Sapiens
EVFEYSSSTR

SEQ ID NO: 50625 - protein, 10 aa, Homo Sapiens
EVFFSEKIYK

SEQ ID NO: 50626 - protein, 10 aa, Homo Sapiens
EVFGTADLYR

SEQ ID NO: 50627 - protein, 10 aa, Homo Sapiens
EVFGVTDNPR

SEQ ID NO: 50628 - protein, 10 aa, Homo Sapiens
EVFLAQGTLR

SEQ ID NO: 50629 - protein, 10 aa, Homo Sapiens
EVFNKFFKER

SEQ ID NO: 50630 - protein, 10 aa, Homo Sapiens
EVFPLAMNYL

SEQ ID NO: 50631 - protein, 10 aa, Homo Sapiens
EVGDIVKVTR

SEQ ID NO: 50632 - protein, 10 aa, Homo Sapiens
EVGGEALGRL

SEQ ID NO: 50633 - protein, 10 aa, Homo Sapiens
EVGGGSGHRL

SEQ ID NO: 50634 - protein, 10 aa, Homo Sapiens
EVGPDAASLR

SEQ ID NO: 50635 - protein, 10 aa, Homo Sapiens
EVGPEGALGK

SEQ ID NO: 50636 - protein, 10 aa, Homo Sapiens
EVGPGAVGER

SEQ ID NO: 50637 - protein, 10 aa, Homo Sapiens
EVGPPLPPLL

SEQ ID NO: 50638 - protein, 10 aa, Homo Sapiens
EVGPREAGLR

SEQ ID NO: 50639 - protein, 10 aa, Homo Sapiens
EVGTASPMAR

SEQ ID NO: 50640 - protein, 10 aa, Homo Sapiens
EVHYHLPVAR

SEQ ID NO: 50641 - protein, 10 aa, Homo Sapiens
EVHYINDVER

SEQ ID NO: 50642 - protein, 10 aa, Homo Sapiens
EVIALFDQTR

SEQ ID NO: 50643 - protein, 10 aa, Homo Sapiens
EVIDDFMTRL

SEQ ID NO: 50644 - protein, 10 aa, Homo Sapiens
EVIEGPQNAR

SEQ ID NO: 50645 - protein, 10 aa, Homo Sapiens
EVIGLLGGRY

SEQ ID NO: 50646 - protein, 10 aa, Homo Sapiens
EVIKPWITKR

SEQ ID NO: 50647 - protein, 10 aa, Homo Sapiens
EVIKQRLTAR

SEQ ID NO: 50648 - protein, 10 aa, Homo Sapiens
EVILATPYGR

SEQ ID NO: 50649 - protein, 10 aa, Homo Sapiens
EVIQESGTKL

SEQ ID NO: 50650 - protein, 10 aa, Homo Sapiens
EVIQLQGDQR

SEQ ID NO: 50651 - protein, 10 aa, Homo Sapiens
EVKRPGESLR

SEQ ID NO: 50652 - protein, 10 aa, Homo Sapiens
EVKTPEFVSR

SEQ ID NO: 50653 - protein, 10 aa, Homo Sapiens
EVLDPTAANR

SEQ ID NO: 50654 - protein, 10 aa, Homo Sapiens
EVLKETVSQR

SEQ ID NO: 50655 - protein, 10 aa, Homo Sapiens
EVLKTRMALR

SEQ ID NO: 50656 - protein, 10 aa, Homo Sapiens
EVLPSPRGQR

SEQ ID NO: 50657 - protein, 10 aa, Homo Sapiens
EVMEYTTILR

SEQ ID NO: 50658 - protein, 10 aa, Homo Sapiens
EVMGNPGTFK

SEQ ID NO: 50659 - protein, 10 aa, Homo Sapiens
EVMIAEPSCR

SEQ ID NO: 50660 - protein, 10 aa, Homo Sapiens
EVNERHQILR

SEQ ID NO: 50661 - protein, 10 aa, Homo Sapiens
EVNQETIQRL

SEQ ID NO: 50662 - protein, 10 aa, Homo Sapiens
EVNQPKFNQR

SEQ ID NO: 50663 - protein, 10 aa, Homo Sapiens
EVNTASLCRI

SEQ ID NO: 50664 - protein, 10 aa, Homo Sapiens
EVPETFLNRL

SEQ ID NO: 50665 - protein, 10 aa, Homo Sapiens
EVPREKLASR

SEQ ID NO: 50666 - protein, 10 aa, Homo Sapiens
EVPSFLVERM

SEQ ID NO: 50667 - protein, 10 aa, Homo Sapiens
EVQDLHLAQR

SEQ ID NO: 50668 - protein, 10 aa, Homo Sapiens
EVQGDRMHLR

SEQ ID NO: 50669 - protein, 10 aa, Homo Sapiens
EVQGLGDGKR

SEQ ID NO: 50670 - protein, 10 aa, Homo Sapiens
EVSDVEIITR

SEQ ID NO: 50671 - protein, 10 aa, Homo Sapiens
EVSFYNVTER

SEQ ID NO: 50672 - protein, 10 aa, Homo Sapiens
EVSNGSVVHR

SEQ ID NO: 50673 - protein, 10 aa, Homo Sapiens
EVSPPNLRGR

SEQ ID NO: 50674 - protein, 10 aa, Homo Sapiens
EVSPVALQRL

SEQ ID NO: 50675 - protein, 10 aa, Homo Sapiens
EVTEEGVRFR

SEQ ID NO: 50676 - protein, 10 aa, Homo Sapiens
EVTETICKRL

SEQ ID NO: 50677 - protein, 10 aa, Homo Sapiens
EVTGRSSVLR

SEQ ID NO: 50678 - protein, 10 aa, Homo Sapiens
EVTPAMQIPR

SEQ ID NO: 50679 - protein, 10 aa, Homo Sapiens
EVVAGEFGSR

SEQ ID NO: 50680 - protein, 10 aa, Homo Sapiens
EVVDFIQSKI

SEQ ID NO: 50681 - protein, 10 aa, Homo Sapiens
EVVDKSQVSR

SEQ ID NO: 50682 - protein, 10 aa, Homo Sapiens
EVVDSNPYSR

SEQ ID NO: 50683 - protein, 10 aa, Homo Sapiens
EVVDVMVIGR

SEQ ID NO: 50684 - protein, 10 aa, Homo Sapiens
EVVEDSLRQR

SEQ ID NO: 50685 - protein, 10 aa, Homo Sapiens
EVVEKKRARL

SEQ ID NO: 50686 - protein, 10 aa, Homo Sapiens
EVVELPVTER

SEQ ID NO: 50687 - protein, 10 aa, Homo Sapiens
EVVGNMAVSR

SEQ ID NO: 50688 - protein, 10 aa, Homo Sapiens
EVVQSSPVER

SEQ ID NO: 50689 - protein, 10 aa, Homo Sapiens
EVVSGSGLTR

SEQ ID NO: 50690 - protein, 10 aa, Homo Sapiens
EVVTGVIGQR

SEQ ID NO: 50691 - protein, 10 aa, Homo Sapiens
EVVTSMGTQR

SEQ ID NO: 50692 - protein, 10 aa, Homo Sapiens
EVWIPKNGTR

SEQ ID NO: 50693 - protein, 10 aa, Homo Sapiens
EVYDGPKNVR

SEQ ID NO: 50694 - protein, 10 aa, Homo Sapiens
EVYNEFVRKR

SEQ ID NO: 50695 - protein, 10 aa, Homo Sapiens
EVYPFGIVGM

SEQ ID NO: 50696 - protein, 10 aa, Homo Sapiens
EVYVEVAYPR

SEQ ID NO: 50697 - protein, 10 aa, Homo Sapiens
EVYVWDVNSR

SEQ ID NO: 50698 - protein, 10 aa, Homo Sapiens
FVFDRPVHRR

SEQ ID NO: 50699 - protein, 10 aa, Homo Sapiens
FVGTAGTVGR

SEQ ID NO: 50700 - protein, 10 aa, Homo Sapiens
FVQEAESRPR

SEQ ID NO: 50701 - protein, 10 aa, Homo Sapiens
FVSLSTSGGK

SEQ ID NO: 50702 - protein, 10 aa, Homo Sapiens
FVSSILPGNR

SEQ ID NO: 50703 - protein, 10 aa, Homo Sapiens
GVFEGIPTYR

SEQ ID NO: 50704 - protein, 10 aa, Homo Sapiens
HVAESSLSRL

SEQ ID NO: 50705 - protein, 10 aa, Homo Sapiens
HVHTMDFSPR

SEQ ID NO: 50706 - protein, 10 aa, Homo Sapiens
HVIRGYVGNR

SEQ ID NO: 50707 - protein, 10 aa, Homo Sapiens
HVIVDEIHER

SEQ ID NO: 50708 - protein, 10 aa, Homo Sapiens
HVIVDEVHER

SEQ ID NO: 50709 - protein, 10 aa, Homo Sapiens
HVKEQLETLR

SEQ ID NO: 50710 - protein, 10 aa, Homo Sapiens
HVLDLVSHPR

SEQ ID NO: 50711 - protein, 10 aa, Homo Sapiens
HVMGFSVTGR

SEQ ID NO: 50712 - protein, 10 aa, Homo Sapiens
HVPCADSLPR

SEQ ID NO: 50713 - protein, 10 aa, Homo Sapiens
HVPGSPFTAR

SEQ ID NO: 50714 - protein, 10 aa, Homo Sapiens
HVPVKEFNFR

SEQ ID NO: 50715 - protein, 10 aa, Homo Sapiens
HVSLITPTKR

SEQ ID NO: 50716 - protein, 10 aa, Homo Sapiens
HVYDGKFLAR

SEQ ID NO: 50717 - protein, 10 aa, Homo Sapiens
HVYPQPGMQR

SEQ ID NO: 50718 - protein, 10 aa, Homo Sapiens
IDISDIAEKR

SEQ ID NO: 50719 - protein, 10 aa, Homo Sapiens
IVFPETSQPR

SEQ ID NO: 50720 - protein, 10 aa, Homo Sapiens
IVKGPRGTLR

SEQ ID NO: 50721 - protein, 10 aa, Homo Sapiens
LEAGGTGPVR

SEQ ID NO: 50722 - protein, 10 aa, Homo Sapiens
LVAQHPPARR

SEQ ID NO: 50723 - protein, 10 aa, Homo Sapiens
LVFCYTIIER

SEQ ID NO: 50724 - protein, 10 aa, Homo Sapiens
LVVPVLGRMS

SEQ ID NO: 50725 - protein, 10 aa, Homo Sapiens
MPHTSGMNRL

SEQ ID NO: 50726 - protein, 10 aa, Homo Sapiens
MPIKLKIGLR

SEQ ID NO: 50727 - protein, 10 aa, Homo Sapiens
MVADVFSHRF

SEQ ID NO: 50728 - protein, 10 aa, Homo Sapiens
MVAPGSVTSR

SEQ ID NO: 50729 - protein, 10 aa, Homo Sapiens
MVLQVSAAPR

SEQ ID NO: 50730 - protein, 10 aa, Homo Sapiens
MVSSQTKTVR

SEQ ID NO: 50731 - protein, 10 aa, Homo Sapiens
NTFFAKNGYR

SEQ ID NO: 50732 - protein, 10 aa, Homo Sapiens
NVIEKMLTDR

SEQ ID NO: 50733 - protein, 10 aa, Homo Sapiens
NVKGPGLQRM

SEQ ID NO: 50734 - protein, 10 aa, Homo Sapiens
NVVTTPSTNR

SEQ ID NO: 50735 - protein, 10 aa, Homo Sapiens
NVYPAECRGR

SEQ ID NO: 50736 - protein, 10 aa, Homo Sapiens
QALKLVEGPD

SEQ ID NO: 50737 - protein, 10 aa, Homo Sapiens
QLAQFHFTNR

SEQ ID NO: 50738 - protein, 10 aa, Homo Sapiens
QVEPGVHLGR

SEQ ID NO: 50739 - protein, 10 aa, Homo Sapiens
QVHLGAAAQR

SEQ ID NO: 50740 - protein, 10 aa, Homo Sapiens
QVYFGTSHPR

SEQ ID NO: 50741 - protein, 10 aa, Homo Sapiens
QVYTQNAEMR

SEQ ID NO: 50742 - protein, 10 aa, Homo Sapiens
SAFLSKRNPR

SEQ ID NO: 50743 - protein, 10 aa, Homo Sapiens
SIENTSTLQR

SEQ ID NO: 50744 - protein, 10 aa, Homo Sapiens
SIVEFQPTLR

SEQ ID NO: 50745 - protein, 10 aa, Homo Sapiens
SIWDGSEVLR

SEQ ID NO: 50746 - protein, 10 aa, Homo Sapiens
SLHNTPMGAR

SEQ ID NO: 50747 - protein, 10 aa, Homo Sapiens
SLSDFSWSQR

SEQ ID NO: 50748 - protein, 10 aa, Homo Sapiens
SLVNFEPAAR

SEQ ID NO: 50749 - protein, 10 aa, Homo Sapiens
STWGSPGWVR

SEQ ID NO: 50750 - protein, 10 aa, Homo Sapiens
SVASTPISQR

SEQ ID NO: 50751 - protein, 10 aa, Homo Sapiens
SVFGSGNTGR

SEQ ID NO: 50752 - protein, 10 aa, Homo Sapiens
SVFPQNGAAR

SEQ ID NO: 50753 - protein, 10 aa, Homo Sapiens
SVFTVEGGHR

SEQ ID NO: 50754 - protein, 10 aa, Homo Sapiens
SVGGTSVTPR

SEQ ID NO: 50755 - protein, 10 aa, Homo Sapiens
SVGRQSSAPA

SEQ ID NO: 50756 - protein, 10 aa, Homo Sapiens
SVIAKHLKGR

SEQ ID NO: 50757 - protein, 10 aa, Homo Sapiens
SVIKEMLNRL

SEQ ID NO: 50758 - protein, 10 aa, Homo Sapiens
SVINSVSTSR

SEQ ID NO: 50759 - protein, 10 aa, Homo Sapiens
SVMGVTVSRL

SEQ ID NO: 50760 - protein, 10 aa, Homo Sapiens
SVNASKPSER

SEQ ID NO: 50761 - protein, 10 aa, Homo Sapiens
SVQGAGTSYR

SEQ ID NO: 50762 - protein, 10 aa, Homo Sapiens
SVVEHRLRAR

SEQ ID NO: 50763 - protein, 10 aa, Homo Sapiens
SVVEIASLRF

SEQ ID NO: 50764 - protein, 10 aa, Homo Sapiens
TADGVPVSSR

SEQ ID NO: 50765 - protein, 10 aa, Homo Sapiens
TAFASHIRAR

SEQ ID NO: 50766 - protein, 10 aa, Homo Sapiens
TIIEKPPAER

SEQ ID NO: 50767 - protein, 10 aa, Homo Sapiens
TIIFITGTTR

SEQ ID NO: 50768 - protein, 10 aa, Homo Sapiens
TLWNSPSRNR

SEQ ID NO: 50769 - protein, 10 aa, Homo Sapiens
TVALTAARGR

SEQ ID NO: 50770 - protein, 10 aa, Homo Sapiens
TVCLTLTAKR

SEQ ID NO: 50771 - protein, 10 aa, Homo Sapiens
TVFFPLDTAR

SEQ ID NO: 50772 - protein, 10 aa, Homo Sapiens
TVIDVSTADR

SEQ ID NO: 50773 - protein, 10 aa, Homo Sapiens
TVKATGPALR

SEQ ID NO: 50774 - protein, 10 aa, Homo Sapiens
TVLTHTPAPR

SEQ ID NO: 50775 - protein, 10 aa, Homo Sapiens
TVTPFTAQQR

SEQ ID NO: 50776 - protein, 10 aa, Homo Sapiens
TVVEDVTVGR

SEQ ID NO: 50777 - protein, 10 aa, Homo Sapiens
TVVYFPVRGR

SEQ ID NO: 50778 - protein, 10 aa, Homo Sapiens
VELGSVWQRL

SEQ ID NO: 50779 - protein, 10 aa, Homo Sapiens
VFDAKRLIGR

SEQ ID NO: 50780 - protein, 10 aa, Homo Sapiens
VGKDPGLAGR

SEQ ID NO: 50781 - protein, 10 aa, Homo Sapiens
YDAEISQIHQ

SEQ ID NO: 50782 - protein, 10 aa, Homo Sapiens
YLITFNPVGR

SEQ ID NO: 50783 - protein, 10 aa, Homo Sapiens
YSFFSPSPAR

SEQ ID NO: 50784 - protein, 10 aa, Homo Sapiens
YTFYSISQER

SEQ ID NO: 50785 - protein, 10 aa, Homo Sapiens
YVFSADPIAR

SEQ ID NO: 50786 - protein, 10 aa, Homo Sapiens
YVISQMLSAR

SEQ ID NO: 50787 - protein, 10 aa, Homo Sapiens
YVYDKNVLQR

SEQ ID NO: 50788 - protein, 10 aa, Homo Sapiens
YVYPDKTRPR

SEQ ID NO: 50789 - protein, 11 aa, Homo Sapiens
AEQRGEHALKD

SEQ ID NO: 50790 - protein, 11 aa, Homo Sapiens
DAAHPTNVQRL

SEQ ID NO: 50791 - protein, 11 aa, Homo Sapiens
DIKSSETGAFR

SEQ ID NO: 50792 - protein, 11 aa, Homo Sapiens
DIQNPDITSSR

SEQ ID NO: 50793 - protein, 11 aa, Homo Sapiens
DIYNSDPLICR

SEQ ID NO: 50794 - protein, 11 aa, Homo Sapiens
DLFFPGYSKGR

SEQ ID NO: 50795 - protein, 11 aa, Homo Sapiens
DLGAGSKKSPR

SEQ ID NO: 50796 - protein, 11 aa, Homo Sapiens
DPKAPGLGAFR

SEQ ID NO: 50797 - protein, 11 aa, Homo Sapiens
DVAQWNIGSLR

SEQ ID NO: 50798 - protein, 11 aa, Homo Sapiens
DVFGQATAVLR

SEQ ID NO: 50799 - protein, 11 aa, Homo Sapiens
DVFKSNKEVGR

SEQ ID NO: 50800 - protein, 11 aa, Homo Sapiens
DVFVVGTERGR

SEQ ID NO: 50801 - protein, 11 aa, Homo Sapiens
DVSDVGLGKGR

SEQ ID NO: 50802 - protein, 11 aa, Homo Sapiens
DVVDSEALQVY

SEQ ID NO: 50803 - protein, 11 aa, Homo Sapiens
DVVKLTKNSKR

SEQ ID NO: 50804 - protein, 11 aa, Homo Sapiens
DVYFPQISSVK

SEQ ID NO: 50805 - protein, 11 aa, Homo Sapiens
EAAEAGAEARL

SEQ ID NO: 50806 - protein, 11 aa, Homo Sapiens
EAAFATKDRLR

SEQ ID NO: 50807 - protein, 11 aa, Homo Sapiens
EAALTYEASKR

SEQ ID NO: 50808 - protein, 11 aa, Homo Sapiens
EAAPEKDTVVR

SEQ ID NO: 50809 - protein, 11 aa, Homo Sapiens
EAAPLDGVLAN

SEQ ID NO: 50810 - protein, 11 aa, Homo Sapiens
EAARMAKLIAQ

SEQ ID NO: 50811 - protein, 11 aa, Homo Sapiens
EAARSLPLGAR

SEQ ID NO: 50812 - protein, 11 aa, Homo Sapiens
EAASDSMKRLQ

SEQ ID NO: 50813 - protein, 11 aa, Homo Sapiens
EAFFHTQSSVR

SEQ ID NO: 50814 - protein, 11 aa, Homo Sapiens
EAFSVFGQVER

SEQ ID NO: 50815 - protein, 11 aa, Homo Sapiens
EAFYKKDLAKR

SEQ ID NO: 50816 - protein, 11 aa, Homo Sapiens
EAGPGPRPLAR

SEQ ID NO: 50817 - protein, 11 aa, Homo Sapiens
EAHAPHYIAHR

SEQ ID NO: 50818 - protein, 11 aa, Homo Sapiens
EAIDSEGHSYM

SEQ ID NO: 50819 - protein, 11 aa, Homo Sapiens
EAIDSLRKSKR

SEQ ID NO: 50820 - protein, 11 aa, Homo Sapiens
EAIPILPAQQR

SEQ ID NO: 50821 - protein, 11 aa, Homo Sapiens
EAIQTSHFQGR

SEQ ID NO: 50822 - protein, 11 aa, Homo Sapiens
EAKGLDRINER

SEQ ID NO: 50823 - protein, 11 aa, Homo Sapiens
EAKPPTVTMPR

SEQ ID NO: 50824 - protein, 11 aa, Homo Sapiens
EAMDQYSIALR

SEQ ID NO: 50825 - protein, 11 aa, Homo Sapiens
EAMDVTTTSTR

SEQ ID NO: 50826 - protein, 11 aa, Homo Sapiens
EAMQSLVTSSR

SEQ ID NO: 50827 - protein, 11 aa, Homo Sapiens
EASPSPCITER

SEQ ID NO: 50828 - protein, 11 aa, Homo Sapiens
EAVEAAINRHR

SEQ ID NO: 50829 - protein, 11 aa, Homo Sapiens
EAVKPTVGMKR

SEQ ID NO: 50830 - protein, 11 aa, Homo Sapiens
EAVTQSLLSSR

SEQ ID NO: 50831 - protein, 11 aa, Homo Sapiens
EAWFPGSGAFR

SEQ ID NO: 50832 - protein, 11 aa, Homo Sapiens
EAYETLSDANR

SEQ ID NO: 50833 - protein, 11 aa, Homo Sapiens
EAYNIDETCGR

SEQ ID NO: 50834 - protein, 11 aa, Homo Sapiens
EFVDPSSLTAR

SEQ ID NO: 50835 - protein, 11 aa, Homo Sapiens
EGAPATMTPKL

SEQ ID NO: 50836 - protein, 11 aa, Homo Sapiens
EGIDPKKTTMR

SEQ ID NO: 50837 - protein, 11 aa, Homo Sapiens
EIASSLPAAQR

SEQ ID NO: 50838 - protein, 11 aa, Homo Sapiens
EIFDHLVAHGR

SEQ ID NO: 50839 - protein, 11 aa, Homo Sapiens
EIIAPSPQRSR

SEQ ID NO: 50840 - protein, 11 aa, Homo Sapiens
EIKGTNGQVTR

SEQ ID NO: 50841 - protein, 11 aa, Homo Sapiens
EILDSQNLNSR

SEQ ID NO: 50842 - protein, 11 aa, Homo Sapiens
EILELAGNAAR

SEQ ID NO: 50843 - protein, 11 aa, Homo Sapiens
EIMEVAKERSR

SEQ ID NO: 50844 - protein, 11 aa, Homo Sapiens
EIPDNVGDWLR

SEQ ID NO: 50845 - protein, 11 aa, Homo Sapiens
EIVGNLPSAMR

SEQ ID NO: 50846 - protein, 11 aa, Homo Sapiens
ELFHVEPGLQR

SEQ ID NO: 50847 - protein, 11 aa, Homo Sapiens
ELFRPKDPQGR

SEQ ID NO: 50848 - protein, 11 aa, Homo Sapiens
ELFYSQHFSGR

SEQ ID NO: 50849 - protein, 11 aa, Homo Sapiens
ELHGNLSQTQR

SEQ ID NO: 50850 - protein, 11 aa, Homo Sapiens
ELKLIGEYGLR

SEQ ID NO: 50851 - protein, 11 aa, Homo Sapiens
ELPDVSEFMTR

SEQ ID NO: 50852 - protein, 11 aa, Homo Sapiens
ELQGGFNGVSR

SEQ ID NO: 50853 - protein, 11 aa, Homo Sapiens
ELQGNLIVVGR

SEQ ID NO: 50854 - protein, 11 aa, Homo Sapiens
ELVEPSSVALR

SEQ ID NO: 50855 - protein, 11 aa, Homo Sapiens
EMVTISDASQR

SEQ ID NO: 50856 - protein, 11 aa, Homo Sapiens
EPHLPHGVSQR

SEQ ID NO: 50857 - protein, 11 aa, Homo Sapiens
EQAELEKLKQR

SEQ ID NO: 50858 - protein, 11 aa, Homo Sapiens
EQIGCVELHQR

SEQ ID NO: 50859 - protein, 11 aa, Homo Sapiens
EQMVLAHVTNR

SEQ ID NO: 50860 - protein, 11 aa, Homo Sapiens
EQVDTSVVSQR

SEQ ID NO: 50861 - protein, 11 aa, Homo Sapiens
EQYGALGGTAR

SEQ ID NO: 50862 - protein, 11 aa, Homo Sapiens
ESAACGFLVGR

SEQ ID NO: 50863 - protein, 11 aa, Homo Sapiens
ESAGGLIQTAR

SEQ ID NO: 50864 - protein, 11 aa, Homo Sapiens
ESFASDPILYR

SEQ ID NO: 50865 - protein, 11 aa, Homo Sapiens
ESFFPYQVTER

SEQ ID NO: 50866 - protein, 11 aa, Homo Sapiens
ESIDPQFTIRR

SEQ ID NO: 50867 - protein, 11 aa, Homo Sapiens
ESIGNCPFSQR

SEQ ID NO: 50868 - protein, 11 aa, Homo Sapiens
ESSAGGSFTVR

SEQ ID NO: 50869 - protein, 11 aa, Homo Sapiens
ESYTPSKISVR

SEQ ID NO: 50870 - protein, 11 aa, Homo Sapiens
ETAIPSSTRQA

SEQ ID NO: 50871 - protein, 11 aa, Homo Sapiens
ETFRSSDPATR

SEQ ID NO: 50872 - protein, 11 aa, Homo Sapiens
ETIDNGFGHSR

SEQ ID NO: 50873 - protein, 11 aa, Homo Sapiens
ETIDTSRVSLR

SEQ ID NO: 50874 - protein, 11 aa, Homo Sapiens
ETIHADSVAKR

SEQ ID NO: 50875 - protein, 11 aa, Homo Sapiens
ETIMSSSMGKR

SEQ ID NO: 50876 - protein, 11 aa, Homo Sapiens
ETQGQQPPQRR

SEQ ID NO: 50877 - protein, 11 aa, Homo Sapiens
ETQVSDFLSGR

SEQ ID NO: 50878 - protein, 11 aa, Homo Sapiens
ETSQAGLFRLW

SEQ ID NO: 50879 - protein, 11 aa, Homo Sapiens
EVAGTVTGQKR

SEQ ID NO: 50880 - protein, 11 aa, Homo Sapiens
EVANPDGDFRL

SEQ ID NO: 50881 - protein, 11 aa, Homo Sapiens
EVAPEIKASER

SEQ ID NO: 50882 - protein, 11 aa, Homo Sapiens
EVAPHHLFLSH

SEQ ID NO: 50883 - protein, 11 aa, Homo Sapiens
EVAVAGTELFR

SEQ ID NO: 50884 - protein, 11 aa, Homo Sapiens
EVFEVGVTSHR

SEQ ID NO: 50885 - protein, 11 aa, Homo Sapiens
EVFFSEKIYKL

SEQ ID NO: 50886 - protein, 11 aa, Homo Sapiens
EVFIGESLSSR

SEQ ID NO: 50887 - protein, 11 aa, Homo Sapiens
EVFTTLSVTKR

SEQ ID NO: 50888 - protein, 11 aa, Homo Sapiens
EVFTTTEGRTR

SEQ ID NO: 50889 - protein, 11 aa, Homo Sapiens
EVGGGVGGSSR

SEQ ID NO: 50890 - protein, 11 aa, Homo Sapiens
EVGICNEAGFR

SEQ ID NO: 50891 - protein, 11 aa, Homo Sapiens
EVGPGPGGITR

SEQ ID NO: 50892 - protein, 11 aa, Homo Sapiens
EVGPREAGLRR

SEQ ID NO: 50893 - protein, 11 aa, Homo Sapiens
EVHAVGLYGAR

SEQ ID NO: 50894 - protein, 11 aa, Homo Sapiens
EVHSPPNVGLR

SEQ ID NO: 50895 - protein, 11 aa, Homo Sapiens
EVIAVKSAQNR

SEQ ID NO: 50896 - protein, 11 aa, Homo Sapiens
EVIDQRLIEAR

SEQ ID NO: 50897 - protein, 11 aa, Homo Sapiens
EVIEGYEIACR

SEQ ID NO: 50898 - protein, 11 aa, Homo Sapiens
EVIGSKLNISR

SEQ ID NO: 50899 - protein, 11 aa, Homo Sapiens
EVIKTRLQSSR

SEQ ID NO: 50900 - protein, 11 aa, Homo Sapiens
EVIPYTPAMQR

SEQ ID NO: 50901 - protein, 11 aa, Homo Sapiens
EVISLSQVTPK

SEQ ID NO: 50902 - protein, 11 aa, Homo Sapiens
EVISTPGVVAR

SEQ ID NO: 50903 - protein, 11 aa, Homo Sapiens
EVIVVVGGCER

SEQ ID NO: 50904 - protein, 11 aa, Homo Sapiens
EVKQVESGTLR

SEQ ID NO: 50905 - protein, 11 aa, Homo Sapiens
EVLDHKEFKAR

SEQ ID NO: 50906 - protein, 11 aa, Homo Sapiens
EVQDRVMLTGR

SEQ ID NO: 50907 - protein, 11 aa, Homo Sapiens
EVQQARDLQNR

SEQ ID NO: 50908 - protein, 11 aa, Homo Sapiens
EVQVASQSSQR

SEQ ID NO: 50909 - protein, 11 aa, Homo Sapiens
EVRADTGGLGR

SEQ ID NO: 50910 - protein, 11 aa, Homo Sapiens
EVRAVGQGVLR

SEQ ID NO: 50911 - protein, 11 aa, Homo Sapiens
EVRFGGKKTQR

SEQ ID NO: 50912 - protein, 11 aa, Homo Sapiens
EVTDHNLHELR

SEQ ID NO: 50913 - protein, 11 aa, Homo Sapiens
EVTPVTGASLR

SEQ ID NO: 50914 - protein, 11 aa, Homo Sapiens
EVVDTTASTKR

SEQ ID NO: 50915 - protein, 11 aa, Homo Sapiens
EVVEGMDISTR

SEQ ID NO: 50916 - protein, 11 aa, Homo Sapiens
EVVTGVIGQRM

SEQ ID NO: 50917 - protein, 11 aa, Homo Sapiens
EVVTPNIFNSR

SEQ ID NO: 50918 - protein, 11 aa, Homo Sapiens
EVWIPKNGTRR

SEQ ID NO: 50919 - protein, 11 aa, Homo Sapiens
EVYQGCGTELR

SEQ ID NO: 50920 - protein, 11 aa, Homo Sapiens
FVIDSDHLGHR

SEQ ID NO: 50921 - protein, 11 aa, Homo Sapiens
HIYAITDTAYR

SEQ ID NO: 50922 - protein, 11 aa, Homo Sapiens
HVAESSLSRLR

SEQ ID NO: 50923 - protein, 11 aa, Homo Sapiens
HVKTGGKISLR

SEQ ID NO: 50924 - protein, 11 aa, Homo Sapiens
IDAKLEKTSLN

SEQ ID NO: 50925 - protein, 11 aa, Homo Sapiens
LPYHTTDASLR

SEQ ID NO: 50926 - protein, 11 aa, Homo Sapiens
LVFPSEIVGKR

SEQ ID NO: 50927 - protein, 11 aa, Homo Sapiens
LVGPDGVPLRR

SEQ ID NO: 50928 - protein, 11 aa, Homo Sapiens
LVWKPRPASAR

SEQ ID NO: 50929 - protein, 11 aa, Homo Sapiens
MAAAGAAVARS

SEQ ID NO: 50930 - protein, 11 aa, Homo Sapiens
MVVDSSNTALR

SEQ ID NO: 50931 - protein, 11 aa, Homo Sapiens
QGYTQPGPGYR

SEQ ID NO: 50932 - protein, 11 aa, Homo Sapiens
QVIGPLTEGQR

SEQ ID NO: 50933 - protein, 11 aa, Homo Sapiens
QVPLVAGTVNR

SEQ ID NO: 50934 - protein, 11 aa, Homo Sapiens
SPISAQDLLSR

SEQ ID NO: 50935 - protein, 11 aa, Homo Sapiens
SVAGLTAAAYR

SEQ ID NO: 50936 - protein, 11 aa, Homo Sapiens
SVAPHETQTQR

SEQ ID NO: 50937 - protein, 11 aa, Homo Sapiens
SVISSRNTGQR

SEQ ID NO: 50938 - protein, 11 aa, Homo Sapiens
SVYYNEATGGK

SEQ ID NO: 50939 - protein, 11 aa, Homo Sapiens
TAFYASRHSGR

SEQ ID NO: 50940 - protein, 11 aa, Homo Sapiens
TAIEAQHLLKR

SEQ ID NO: 50941 - protein, 11 aa, Homo Sapiens
TLIDPETLLPR

SEQ ID NO: 50942 - protein, 11 aa, Homo Sapiens
TRLAAGSAVQR

SEQ ID NO: 50943 - protein, 11 aa, Homo Sapiens
TSFFPTAGGFR

SEQ ID NO: 50944 - protein, 11 aa, Homo Sapiens
TVFDAKRLIGR

SEQ ID NO: 50945 - protein, 11 aa, Homo Sapiens
TVFGATGFLGR

SEQ ID NO: 50946 - protein, 11 aa, Homo Sapiens
TVYGGYLCSVR

SEQ ID NO: 50947 - protein, 11 aa, Homo Sapiens
VPADAEALSER

SEQ ID NO: 50948 - protein, 11 aa, Homo Sapiens
VPADYPAQSPL

SEQ ID NO: 50949 - protein, 8 aa, Homo Sapiens
AAAAFAEK

SEQ ID NO: 50950 - protein, 8 aa, Homo Sapiens
AAQKFLER

SEQ ID NO: 50951 - protein, 8 aa, Homo Sapiens
AGGAWTYK

SEQ ID NO: 50952 - protein, 8 aa, Homo Sapiens
AKDIGFIK

SEQ ID NO: 50953 - protein, 8 aa, Homo Sapiens
APPEYHRK

SEQ ID NO: 50954 - protein, 8 aa, Homo Sapiens
AVKPFGLK

SEQ ID NO: 50955 - protein, 8 aa, Homo Sapiens
CGQDITTK

SEQ ID NO: 50956 - protein, 8 aa, Homo Sapiens
DELRDEGK

SEQ ID NO: 50957 - protein, 8 aa, Homo Sapiens
DERAINKK

SEQ ID NO: 50958 - protein, 8 aa, Homo Sapiens
DERTINKK

SEQ ID NO: 50959 - protein, 8 aa, Homo Sapiens
DPRNPVNK

SEQ ID NO: 50960 - protein, 8 aa, Homo Sapiens
DTNADKQL

SEQ ID NO: 50961 - protein, 8 aa, Homo Sapiens
DVYLGRYR

SEQ ID NO: 50962 - protein, 8 aa, Homo Sapiens
EAVAFRKS

SEQ ID NO: 50963 - protein, 8 aa, Homo Sapiens
EAYRPIRK

SEQ ID NO: 50964 - protein, 8 aa, Homo Sapiens
EIAKPLKH

SEQ ID NO: 50965 - protein, 8 aa, Homo Sapiens
ESTSFLEK

SEQ ID NO: 50966 - protein, 8 aa, Homo Sapiens
ESYAFNMK

SEQ ID NO: 50967 - protein, 8 aa, Homo Sapiens
ETFISSPK

SEQ ID NO: 50968 - protein, 8 aa, Homo Sapiens
ETTVTSLK

SEQ ID NO: 50969 - protein, 8 aa, Homo Sapiens
ETYKFCER

SEQ ID NO: 50970 - protein, 8 aa, Homo Sapiens
EVFTVGPK

SEQ ID NO: 50971 - protein, 8 aa, Homo Sapiens
EVGPVLSK

SEQ ID NO: 50972 - protein, 8 aa, Homo Sapiens
FDGRVVAK

SEQ ID NO: 50973 - protein, 8 aa, Homo Sapiens
FSGVYKKL

SEQ ID NO: 50974 - protein, 8 aa, Homo Sapiens
IDWSDVRK

SEQ ID NO: 50975 - protein, 8 aa, Homo Sapiens
LLFMSLIK

SEQ ID NO: 50976 - protein, 8 aa, Homo Sapiens
LVNEVTEF

SEQ ID NO: 50977 - protein, 8 aa, Homo Sapiens
MAVSMEKK

SEQ ID NO: 50978 - protein, 8 aa, Homo Sapiens
MSLTACKV

SEQ ID NO: 50979 - protein, 8 aa, Homo Sapiens
MTALTWNK

SEQ ID NO: 50980 - protein, 8 aa, Homo Sapiens
MVGPVIAK

SEQ ID NO: 50981 - protein, 8 aa, Homo Sapiens
MVQQLGKA

SEQ ID NO: 50982 - protein, 8 aa, Homo Sapiens
MVYVGIPK

SEQ ID NO: 50983 - protein, 8 aa, Homo Sapiens
PANTPLRK

SEQ ID NO: 50984 - protein, 8 aa, Homo Sapiens
PASPFRVK

SEQ ID NO: 50985 - protein, 8 aa, Homo Sapiens
PATHIRGK

SEQ ID NO: 50986 - protein, 8 aa, Homo Sapiens
PDIAVGTK

SEQ ID NO: 50987 - protein, 8 aa, Homo Sapiens
PGHTPSLR

SEQ ID NO: 50988 - protein, 8 aa, Homo Sapiens
PPPSVVTR

SEQ ID NO: 50989 - protein, 8 aa, Homo Sapiens
PTLVEVSR

SEQ ID NO: 50990 - protein, 8 aa, Homo Sapiens
QEAFDISK

SEQ ID NO: 50991 - protein, 8 aa, Homo Sapiens
QILVGVNK

SEQ ID NO: 50992 - protein, 8 aa, Homo Sapiens
QLYWSHPR

SEQ ID NO: 50993 - protein, 8 aa, Homo Sapiens
RAKFKQLL

SEQ ID NO: 50994 - protein, 8 aa, Homo Sapiens
SGPSIVHR

SEQ ID NO: 50995 - protein, 8 aa, Homo Sapiens
SIRGIGPK

SEQ ID NO: 50996 - protein, 8 aa, Homo Sapiens
SLGLVLVH

SEQ ID NO: 50997 - protein, 8 aa, Homo Sapiens
SPLTAEKL

SEQ ID NO: 50998 - protein, 8 aa, Homo Sapiens
TAFAFHLR

SEQ ID NO: 50999 - protein, 8 aa, Homo Sapiens
TEAPLNPK

SEQ ID NO: 51000 - protein, 8 aa, Homo Sapiens
TFSGVYKK

SEQ ID NO: 51001 - protein, 8 aa, Homo Sapiens
TIGEILKK

SEQ ID NO: 51002 - protein, 8 aa, Homo Sapiens
TIGKKFEK

SEQ ID NO: 51003 - protein, 8 aa, Homo Sapiens
TKSWIREK

SEQ ID NO: 51004 - protein, 8 aa, Homo Sapiens
TMPCVKKK

SEQ ID NO: 51005 - protein, 8 aa, Homo Sapiens
TRAEFAER

SEQ ID NO: 51006 - protein, 8 aa, Homo Sapiens
TRPTPVQK

SEQ ID NO: 51007 - protein, 8 aa, Homo Sapiens
TVAPTECS

SEQ ID NO: 51008 - protein, 8 aa, Homo Sapiens
TVDIFHKK

SEQ ID NO: 51009 - protein, 8 aa, Homo Sapiens
VAGTLTNK

SEQ ID NO: 51010 - protein, 8 aa, Homo Sapiens
VAPPEYHR

SEQ ID NO: 51011 - protein, 8 aa, Homo Sapiens
VFRDPALK

SEQ ID NO: 51012 - protein, 8 aa, Homo Sapiens
VFSHILKR

SEQ ID NO: 51013 - protein, 8 aa, Homo Sapiens
VTAPPARN

SEQ ID NO: 51014 - protein, 8 aa, Homo Sapiens
YDHQGIFK

SEQ ID NO: 51015 - protein, 9 aa, Homo Sapiens
AAAKVILKK

SEQ ID NO: 51016 - protein, 9 aa, Homo Sapiens
AAAPGLGPR

SEQ ID NO: 51017 - protein, 9 aa, Homo Sapiens
AAFGGTFKK

SEQ ID NO: 51018 - protein, 9 aa, Homo Sapiens
AFPSQGTKR

SEQ ID NO: 51019 - protein, 9 aa, Homo Sapiens
AFRQTYEKF

SEQ ID NO: 51020 - protein, 9 aa, Homo Sapiens
AGKTTILYK

SEQ ID NO: 51021 - protein, 9 aa, Homo Sapiens
AIYEPKTFK

SEQ ID NO: 51022 - protein, 9 aa, Homo Sapiens
APARPLIFK

SEQ ID NO: 51023 - protein, 9 aa, Homo Sapiens
ASSPPAIPK

SEQ ID NO: 51024 - protein, 9 aa, Homo Sapiens
ATAAPLTPR

SEQ ID NO: 51025 - protein, 9 aa, Homo Sapiens
ATEQPLTAK

SEQ ID NO: 51026 - protein, 9 aa, Homo Sapiens
ATFTVMGLK

SEQ ID NO: 51027 - protein, 9 aa, Homo Sapiens
ATKVEGPGW

SEQ ID NO: 51028 - protein, 9 aa, Homo Sapiens
ATLSICSPK

SEQ ID NO: 51029 - protein, 9 aa, Homo Sapiens
ATTLPIRNK

SEQ ID NO: 51030 - protein, 9 aa, Homo Sapiens
ATYSVGMQK

SEQ ID NO: 51031 - protein, 9 aa, Homo Sapiens
ATYTPQAPK

SEQ ID NO: 51032 - protein, 9 aa, Homo Sapiens
AVAAFVLYK

SEQ ID NO: 51033 - protein, 9 aa, Homo Sapiens
AVALPLQTK

SEQ ID NO: 51034 - protein, 9 aa, Homo Sapiens
AVKDPLVKK

SEQ ID NO: 51035 - protein, 9 aa, Homo Sapiens
AVLLVFANK

SEQ ID NO: 51036 - protein, 9 aa, Homo Sapiens
AVLSWKLAK

SEQ ID NO: 51037 - protein, 9 aa, Homo Sapiens
AVRKPIVLK

SEQ ID NO: 51038 - protein, 9 aa, Homo Sapiens
AVSTPNTPR

SEQ ID NO: 51039 - protein, 9 aa, Homo Sapiens
CTIIPLMKK

SEQ ID NO: 51040 - protein, 9 aa, Homo Sapiens
CTYDKVQSY

SEQ ID NO: 51041 - protein, 9 aa, Homo Sapiens
CVKEIGLLK

SEQ ID NO: 51042 - protein, 9 aa, Homo Sapiens
DAAFLAREK

SEQ ID NO: 51043 - protein, 9 aa, Homo Sapiens
DAAGVFCIR

SEQ ID NO: 51044 - protein, 9 aa, Homo Sapiens
DAAIFEAKK

SEQ ID NO: 51045 - protein, 9 aa, Homo Sapiens
DAAKDSILR

SEQ ID NO: 51046 - protein, 9 aa, Homo Sapiens
DAAKPLLRK

SEQ ID NO: 51047 - protein, 9 aa, Homo Sapiens
DAARFQIGK

SEQ ID NO: 51048 - protein, 9 aa, Homo Sapiens
DAFEAQFQK

SEQ ID NO: 51049 - protein, 9 aa, Homo Sapiens
DAFTIKTVK

SEQ ID NO: 51050 - protein, 9 aa, Homo Sapiens
DAIPVFLEK

SEQ ID NO: 51051 - protein, 9 aa, Homo Sapiens
DAIRGGLPK

SEQ ID NO: 51052 - protein, 9 aa, Homo Sapiens
DAIRTATEK

SEQ ID NO: 51053 - protein, 9 aa, Homo Sapiens
DAKGGSFYR

SEQ ID NO: 51054 - protein, 9 aa, Homo Sapiens
DALAKVIQH

SEQ ID NO: 51055 - protein, 9 aa, Homo Sapiens
DALDALGLK

SEQ ID NO: 51056 - protein, 9 aa, Homo Sapiens
DALEKCLKK

SEQ ID NO: 51057 - protein, 9 aa, Homo Sapiens
DALGHFFQY

SEQ ID NO: 51058 - protein, 9 aa, Homo Sapiens
DALKIQLKY

SEQ ID NO: 51059 - protein, 9 aa, Homo Sapiens
DALNAITKK

SEQ ID NO: 51060 - protein, 9 aa, Homo Sapiens
DAMAKVLNK

SEQ ID NO: 51061 - protein, 9 aa, Homo Sapiens
DANLPSLQK

SEQ ID NO: 51062 - protein, 9 aa, Homo Sapiens
DASESALLK

SEQ ID NO: 51063 - protein, 9 aa, Homo Sapiens
DASLSTYFK

SEQ ID NO: 51064 - protein, 9 aa, Homo Sapiens
DASNPLLLK

SEQ ID NO: 51065 - protein, 9 aa, Homo Sapiens
DAWMGTHPK

SEQ ID NO: 51066 - protein, 9 aa, Homo Sapiens
DIAIPCNNK

SEQ ID NO: 51067 - protein, 9 aa, Homo Sapiens
DIASHFSNK

SEQ ID NO: 51068 - protein, 9 aa, Homo Sapiens
DICSLLLQH

SEQ ID NO: 51069 - protein, 9 aa, Homo Sapiens
DIFKGVVTK

SEQ ID NO: 51070 - protein, 9 aa, Homo Sapiens
DIFPPKSEK

SEQ ID NO: 51071 - protein, 9 aa, Homo Sapiens
DIFQASGAK

SEQ ID NO: 51072 - protein, 9 aa, Homo Sapiens
DIHNKTLYH

SEQ ID NO: 51073 - protein, 9 aa, Homo Sapiens
DIHVTVQPK

SEQ ID NO: 51074 - protein, 9 aa, Homo Sapiens
DIIGPMPAK

SEQ ID NO: 51075 - protein, 9 aa, Homo Sapiens
DIMWPIIAK

SEQ ID NO: 51076 - protein, 9 aa, Homo Sapiens
DINQESAPK

SEQ ID NO: 51077 - protein, 9 aa, Homo Sapiens
DIPHALREK

SEQ ID NO: 51078 - protein, 9 aa, Homo Sapiens
DIQKPPLSH

SEQ ID NO: 51079 - protein, 9 aa, Homo Sapiens
DISHLVRKK

SEQ ID NO: 51080 - protein, 9 aa, Homo Sapiens
DIVTTTTHK

SEQ ID NO: 51081 - protein, 9 aa, Homo Sapiens
DIYAMKVMK

SEQ ID NO: 51082 - protein, 9 aa, Homo Sapiens
DIYRPTIHK

SEQ ID NO: 51083 - protein, 9 aa, Homo Sapiens
DIYSKTWTK

SEQ ID NO: 51084 - protein, 9 aa, Homo Sapiens
DIYSNSNLK

SEQ ID NO: 51085 - protein, 9 aa, Homo Sapiens
DLAKVIQTK

SEQ ID NO: 51086 - protein, 9 aa, Homo Sapiens
DLCDKIFQK

SEQ ID NO: 51087 - protein, 9 aa, Homo Sapiens
DLDGHPVPK

SEQ ID NO: 51088 - protein, 9 aa, Homo Sapiens
DLGQPVKNK

SEQ ID NO: 51089 - protein, 9 aa, Homo Sapiens
DLKESLRTK

SEQ ID NO: 51090 - protein, 9 aa, Homo Sapiens
DLLDKLLRY

SEQ ID NO: 51091 - protein, 9 aa, Homo Sapiens
DLLIPLTNR

SEQ ID NO: 51092 - protein, 9 aa, Homo Sapiens
DLLNIIREK

SEQ ID NO: 51093 - protein, 9 aa, Homo Sapiens
DLPDIQIKH

SEQ ID NO: 51094 - protein, 9 aa, Homo Sapiens
DLPPPSALK

SEQ ID NO: 51095 - protein, 9 aa, Homo Sapiens
DLVRPLLPK

SEQ ID NO: 51096 - protein, 9 aa, Homo Sapiens
DLYDNQIKK

SEQ ID NO: 51097 - protein, 9 aa, Homo Sapiens
DLYKTPCTK

SEQ ID NO: 51098 - protein, 9 aa, Homo Sapiens
DLYNGATRK

SEQ ID NO: 51099 - protein, 9 aa, Homo Sapiens
DLYNGKTTK

SEQ ID NO: 51100 - protein, 9 aa, Homo Sapiens
DMSVPAVAK

SEQ ID NO: 51101 - protein, 9 aa, Homo Sapiens
DPYNPLNFK

SEQ ID NO: 51102 - protein, 9 aa, Homo Sapiens
DQNSPVLPK

SEQ ID NO: 51103 - protein, 9 aa, Homo Sapiens
DSACVIGLK

SEQ ID NO: 51104 - protein, 9 aa, Homo Sapiens
DSAPLALLH

SEQ ID NO: 51105 - protein, 9 aa, Homo Sapiens
DSCPNPIQR

SEQ ID NO: 51106 - protein, 9 aa, Homo Sapiens
DSCTKLLQK

SEQ ID NO: 51107 - protein, 9 aa, Homo Sapiens
DSFGKSFKH

SEQ ID NO: 51108 - protein, 9 aa, Homo Sapiens
DSLRYIYPK

SEQ ID NO: 51109 - protein, 9 aa, Homo Sapiens
DSMGIQIVK

SEQ ID NO: 51110 - protein, 9 aa, Homo Sapiens
DSSPWSAGK

SEQ ID NO: 51111 - protein, 9 aa, Homo Sapiens
DSSRPVWLK

SEQ ID NO: 51112 - protein, 9 aa, Homo Sapiens
DSSYFKIFK

SEQ ID NO: 51113 - protein, 9 aa, Homo Sapiens
DSYFGGRLR

SEQ ID NO: 51114 - protein, 9 aa, Homo Sapiens
DSYKVTHYK

SEQ ID NO: 51115 - protein, 9 aa, Homo Sapiens
DTAEKFYQK

SEQ ID NO: 51116 - protein, 9 aa, Homo Sapiens
DTCRLALVY

SEQ ID NO: 51117 - protein, 9 aa, Homo Sapiens
DTCRVKLKY

SEQ ID NO: 51118 - protein, 9 aa, Homo Sapiens
DTCVIPLRH

SEQ ID NO: 51119 - protein, 9 aa, Homo Sapiens
DTFFFILRK

SEQ ID NO: 51120 - protein, 9 aa, Homo Sapiens
DTFFGVKNK

SEQ ID NO: 51121 - protein, 9 aa, Homo Sapiens
DTFNKSPPK

SEQ ID NO: 51122 - protein, 9 aa, Homo Sapiens
DTFPQVLKK

SEQ ID NO: 51123 - protein, 9 aa, Homo Sapiens
DTFSVAFIK

SEQ ID NO: 51124 - protein, 9 aa, Homo Sapiens
DTHSLDSLK

SEQ ID NO: 51125 - protein, 9 aa, Homo Sapiens
DTIEEMALK

SEQ ID NO: 51126 - protein, 9 aa, Homo Sapiens
DTIEIITDR

SEQ ID NO: 51127 - protein, 9 aa, Homo Sapiens
DTIENVKAK

SEQ ID NO: 51128 - protein, 9 aa, Homo Sapiens
DTIFIILRK

SEQ ID NO: 51129 - protein, 9 aa, Homo Sapiens
DTIGYLLTR

SEQ ID NO: 51130 - protein, 9 aa, Homo Sapiens
DTIKPDVQK

SEQ ID NO: 51131 - protein, 9 aa, Homo Sapiens
DTLAHVLYY

SEQ ID NO: 51132 - protein, 9 aa, Homo Sapiens
DTLDKVFTY

SEQ ID NO: 51133 - protein, 9 aa, Homo Sapiens
DTLDRVVKP

SEQ ID NO: 51134 - protein, 9 aa, Homo Sapiens
DTLFPSSKK

SEQ ID NO: 51135 - protein, 9 aa, Homo Sapiens
DTLGIPKST

SEQ ID NO: 51136 - protein, 9 aa, Homo Sapiens
DTLPRTPSY

SEQ ID NO: 51137 - protein, 9 aa, Homo Sapiens
DTLQGIALK

SEQ ID NO: 51138 - protein, 9 aa, Homo Sapiens
DTLTPLIKK

SEQ ID NO: 51139 - protein, 9 aa, Homo Sapiens
DTLVMQLEK

SEQ ID NO: 51140 - protein, 9 aa, Homo Sapiens
DTNDRFLRK

SEQ ID NO: 51141 - protein, 9 aa, Homo Sapiens
DTPRPLVGR

SEQ ID NO: 51142 - protein, 9 aa, Homo Sapiens
DTSHYILIK

SEQ ID NO: 51143 - protein, 9 aa, Homo Sapiens
DTVIVGTVK

SEQ ID NO: 51144 - protein, 9 aa, Homo Sapiens
DTVLLKGKK

SEQ ID NO: 51145 - protein, 9 aa, Homo Sapiens
DTVTGLLER

SEQ ID NO: 51146 - protein, 9 aa, Homo Sapiens
DTWHYFLHR

SEQ ID NO: 51147 - protein, 9 aa, Homo Sapiens
DTYAPFPGK

SEQ ID NO: 51148 - protein, 9 aa, Homo Sapiens
DTYVEFPLR

SEQ ID NO: 51149 - protein, 9 aa, Homo Sapiens
DVAIPLHLK

SEQ ID NO: 51150 - protein, 9 aa, Homo Sapiens
DVAPPGVRK

SEQ ID NO: 51151 - protein, 9 aa, Homo Sapiens
DVAPTHILY

SEQ ID NO: 51152 - protein, 9 aa, Homo Sapiens
DVARAINQK

SEQ ID NO: 51153 - protein, 9 aa, Homo Sapiens
DVASVIVTK

SEQ ID NO: 51154 - protein, 9 aa, Homo Sapiens
DVCDKPLLY

SEQ ID NO: 51155 - protein, 9 aa, Homo Sapiens
DVCDVPTAK

SEQ ID NO: 51156 - protein, 9 aa, Homo Sapiens
DVCGKIFRK

SEQ ID NO: 51157 - protein, 9 aa, Homo Sapiens
DVCKTILNH

SEQ ID NO: 51158 - protein, 9 aa, Homo Sapiens
DVDAPRLLK

SEQ ID NO: 51159 - protein, 9 aa, Homo Sapiens
DVEKSLPPK

SEQ ID NO: 51160 - protein, 9 aa, Homo Sapiens
DVFIPLYPK

SEQ ID NO: 51161 - protein, 9 aa, Homo Sapiens
DVFKNMPSK

SEQ ID NO: 51162 - protein, 9 aa, Homo Sapiens
DVFQITLKK

SEQ ID NO: 51163 - protein, 9 aa, Homo Sapiens
DVFVVGTER

SEQ ID NO: 51164 - protein, 9 aa, Homo Sapiens
DVFYANMKK

SEQ ID NO: 51165 - protein, 9 aa, Homo Sapiens
DVIAKVAFK

SEQ ID NO: 51166 - protein, 9 aa, Homo Sapiens
DVIAQGIGK

SEQ ID NO: 51167 - protein, 9 aa, Homo Sapiens
DVIKPGTVK

SEQ ID NO: 51168 - protein, 9 aa, Homo Sapiens
DVIYPTRTK

SEQ ID NO: 51169 - protein, 9 aa, Homo Sapiens
DVKTGTCLK

SEQ ID NO: 51170 - protein, 9 aa, Homo Sapiens
DVLDVYIEH

SEQ ID NO: 51171 - protein, 9 aa, Homo Sapiens
DVLEQFLTY

SEQ ID NO: 51172 - protein, 9 aa, Homo Sapiens
DVLKKMQSK

SEQ ID NO: 51173 - protein, 9 aa, Homo Sapiens
DVLKPLGHK

SEQ ID NO: 51174 - protein, 9 aa, Homo Sapiens
DVLPTRPKK

SEQ ID NO: 51175 - protein, 9 aa, Homo Sapiens
DVLQWIVQR

SEQ ID NO: 51176 - protein, 9 aa, Homo Sapiens
DVLRLLLQH

SEQ ID NO: 51177 - protein, 9 aa, Homo Sapiens
DVLSHFAQR

SEQ ID NO: 51178 - protein, 9 aa, Homo Sapiens
DVMDVNTQK

SEQ ID NO: 51179 - protein, 9 aa, Homo Sapiens
DVMPSGRSR

SEQ ID NO: 51180 - protein, 9 aa, Homo Sapiens
DVPKPQKPK

SEQ ID NO: 51181 - protein, 9 aa, Homo Sapiens
DVRMGGSFR

SEQ ID NO: 51182 - protein, 9 aa, Homo Sapiens
DVRVQEVPK

SEQ ID NO: 51183 - protein, 9 aa, Homo Sapiens
DVSDSSFPK

SEQ ID NO: 51184 - protein, 9 aa, Homo Sapiens
DVSVALPNK

SEQ ID NO: 51185 - protein, 9 aa, Homo Sapiens
DVTAPNTFK

SEQ ID NO: 51186 - protein, 9 aa, Homo Sapiens
DVTDVTFGK

SEQ ID NO: 51187 - protein, 9 aa, Homo Sapiens
DVVSKFLNR

SEQ ID NO: 51188 - protein, 9 aa, Homo Sapiens
DVYENLHTK

SEQ ID NO: 51189 - protein, 9 aa, Homo Sapiens
DVYNHFLLY

SEQ ID NO: 51190 - protein, 9 aa, Homo Sapiens
DVYPEIIER

SEQ ID NO: 51191 - protein, 9 aa, Homo Sapiens
DVYSGTPTK

SEQ ID NO: 51192 - protein, 9 aa, Homo Sapiens
DVYSQILRK

SEQ ID NO: 51193 - protein, 9 aa, Homo Sapiens
DVYTPKSSR

SEQ ID NO: 51194 - protein, 9 aa, Homo Sapiens
EAAAFGSEK

SEQ ID NO: 51195 - protein, 9 aa, Homo Sapiens
EAAAIGALR

SEQ ID NO: 51196 - protein, 9 aa, Homo Sapiens
EAAAIIAQR

SEQ ID NO: 51197 - protein, 9 aa, Homo Sapiens
EAAAMGAVY

SEQ ID NO: 51198 - protein, 9 aa, Homo Sapiens
EAAAPLRVR

SEQ ID NO: 51199 - protein, 9 aa, Homo Sapiens
EAAAVLMAR

SEQ ID NO: 51200 - protein, 9 aa, Homo Sapiens
EAAESIAFR

SEQ ID NO: 51201 - protein, 9 aa, Homo Sapiens
EAAEVILRV

SEQ ID NO: 51202 - protein, 9 aa, Homo Sapiens
EAAFATKDR

SEQ ID NO: 51203 - protein, 9 aa, Homo Sapiens
EAAGQVMSH

SEQ ID NO: 51204 - protein, 9 aa, Homo Sapiens
EAAILSGWK

SEQ ID NO: 51205 - protein, 9 aa, Homo Sapiens
EAAKALVLK

SEQ ID NO: 51206 - protein, 9 aa, Homo Sapiens
EAAKDLLYR

SEQ ID NO: 51207 - protein, 9 aa, Homo Sapiens
EAAKEVFVK

SEQ ID NO: 51208 - protein, 9 aa, Homo Sapiens
EAAKILAEK

SEQ ID NO: 51209 - protein, 9 aa, Homo Sapiens
EAAKVFGLR

SEQ ID NO: 51210 - protein, 9 aa, Homo Sapiens
EAANFKLKY

SEQ ID NO: 51211 - protein, 9 aa, Homo Sapiens
EAAPPGELY

SEQ ID NO: 51212 - protein, 9 aa, Homo Sapiens
EAAPVVVGH

SEQ ID NO: 51213 - protein, 9 aa, Homo Sapiens
EAAQKFLER

SEQ ID NO: 51214 - protein, 9 aa, Homo Sapiens
EAASSFRTH

SEQ ID NO: 51215 - protein, 9 aa, Homo Sapiens
EAAVAFLFR

SEQ ID NO: 51216 - protein, 9 aa, Homo Sapiens
EAAVHFYGK

SEQ ID NO: 51217 - protein, 9 aa, Homo Sapiens
EAAYIGSMR

SEQ ID NO: 51218 - protein, 9 aa, Homo Sapiens
EAAYTLLLH

SEQ ID NO: 51219 - protein, 9 aa, Homo Sapiens
EACDIMVKR

SEQ ID NO: 51220 - protein, 9 aa, Homo Sapiens
EACDKVFSR

SEQ ID NO: 51221 - protein, 9 aa, Homo Sapiens
EACDRLLAH

SEQ ID NO: 51222 - protein, 9 aa, Homo Sapiens
EACGKSFKY

SEQ ID NO: 51223 - protein, 9 aa, Homo Sapiens
EACIYRLLK

SEQ ID NO: 51224 - protein, 9 aa, Homo Sapiens
EACRILLQY

SEQ ID NO: 51225 - protein, 9 aa, Homo Sapiens
EADGAWVVK

SEQ ID NO: 51226 - protein, 9 aa, Homo Sapiens
EADMNRLLK

SEQ ID NO: 51227 - protein, 9 aa, Homo Sapiens
EAFLTAQTK

SEQ ID NO: 51228 - protein, 9 aa, Homo Sapiens
EAFQTTISK

SEQ ID NO: 51229 - protein, 9 aa, Homo Sapiens
EAFSRPLSR

SEQ ID NO: 51230 - protein, 9 aa, Homo Sapiens
EAFVRAFLK

SEQ ID NO: 51231 - protein, 9 aa, Homo Sapiens
EAFWTPLKK

SEQ ID NO: 51232 - protein, 9 aa, Homo Sapiens
EAGGPLTPR

SEQ ID NO: 51233 - protein, 9 aa, Homo Sapiens
EAGPSIVHR

SEQ ID NO: 51234 - protein, 9 aa, Homo Sapiens
EAHFVPLVK

SEQ ID NO: 51235 - protein, 9 aa, Homo Sapiens
EAHLNTSFK

SEQ ID NO: 51236 - protein, 9 aa, Homo Sapiens
EAHNPLTDK

SEQ ID NO: 51237 - protein, 9 aa, Homo Sapiens
EAIAVFMEH

SEQ ID NO: 51238 - protein, 9 aa, Homo Sapiens
EAIEKLSKR

SEQ ID NO: 51239 - protein, 9 aa, Homo Sapiens
EAIEQILKY

SEQ ID NO: 51240 - protein, 9 aa, Homo Sapiens
EAIGAVIHY

SEQ ID NO: 51241 - protein, 9 aa, Homo Sapiens
EAIGPSTIR

SEQ ID NO: 51242 - protein, 9 aa, Homo Sapiens
EAIGVIFTH

SEQ ID NO: 51243 - protein, 9 aa, Homo Sapiens
EAIKEITEK

SEQ ID NO: 51244 - protein, 9 aa, Homo Sapiens
EAIKIGLTK

SEQ ID NO: 51245 - protein, 9 aa, Homo Sapiens
EAIPFVIEK

SEQ ID NO: 51246 - protein, 9 aa, Homo Sapiens
EAIPGLAAR

SEQ ID NO: 51247 - protein, 9 aa, Homo Sapiens
EAITQSVLK

SEQ ID NO: 51248 - protein, 9 aa, Homo Sapiens
EAIYPSVDK

SEQ ID NO: 51249 - protein, 9 aa, Homo Sapiens
EAKFPTMNR

SEQ ID NO: 51250 - protein, 9 aa, Homo Sapiens
EAKGLVTLK

SEQ ID NO: 51251 - protein, 9 aa, Homo Sapiens
EAKKIGLVK

SEQ ID NO: 51252 - protein, 9 aa, Homo Sapiens
EALAAARLK

SEQ ID NO: 51253 - protein, 9 aa, Homo Sapiens
EALAAVLTY

SEQ ID NO: 51254 - protein, 9 aa, Homo Sapiens
EALDHMVEY

SEQ ID NO: 51255 - protein, 9 aa, Homo Sapiens
EALDVIRGK

SEQ ID NO: 51256 - protein, 9 aa, Homo Sapiens
EALEEAAAK

SEQ ID NO: 51257 - protein, 9 aa, Homo Sapiens
EALESIKQK

SEQ ID NO: 51258 - protein, 9 aa, Homo Sapiens
EALGIAQPK

SEQ ID NO: 51259 - protein, 9 aa, Homo Sapiens
EALGLPTVK

SEQ ID NO: 51260 - protein, 9 aa, Homo Sapiens
EALGQFVMK

SEQ ID NO: 51261 - protein, 9 aa, Homo Sapiens
EALGSFIYH

SEQ ID NO: 51262 - protein, 9 aa, Homo Sapiens
EALIHAAGK

SEQ ID NO: 51263 - protein, 9 aa, Homo Sapiens
EALKHFRVK

SEQ ID NO: 51264 - protein, 9 aa, Homo Sapiens
EALKKYLFY

SEQ ID NO: 51265 - protein, 9 aa, Homo Sapiens
EALKLARQI

SEQ ID NO: 51266 - protein, 9 aa, Homo Sapiens
EALNQVTQR

SEQ ID NO: 51267 - protein, 9 aa, Homo Sapiens
EALNVLVNR

SEQ ID NO: 51268 - protein, 9 aa, Homo Sapiens
EALPACLLR

SEQ ID NO: 51269 - protein, 9 aa, Homo Sapiens
EALPQIAAK

SEQ ID NO: 51270 - protein, 9 aa, Homo Sapiens
EALPSAPER

SEQ ID NO: 51271 - protein, 9 aa, Homo Sapiens
EALPWASTH

SEQ ID NO: 51272 - protein, 9 aa, Homo Sapiens
EALQFALTR

SEQ ID NO: 51273 - protein, 9 aa, Homo Sapiens
EALQKIRQK

SEQ ID NO: 51274 - protein, 9 aa, Homo Sapiens
EALSEPLTK

SEQ ID NO: 51275 - protein, 9 aa, Homo Sapiens
EALSKFTLK

SEQ ID NO: 51276 - protein, 9 aa, Homo Sapiens
EALSLLLKR

SEQ ID NO: 51277 - protein, 9 aa, Homo Sapiens
EALSQAVAR

SEQ ID NO: 51278 - protein, 9 aa, Homo Sapiens
EALTALMSR

SEQ ID NO: 51279 - protein, 9 aa, Homo Sapiens
EALTILSKK

SEQ ID NO: 51280 - protein, 9 aa, Homo Sapiens
EALYDICFR

SEQ ID NO: 51281 - protein, 9 aa, Homo Sapiens
EALYIADRK

SEQ ID NO: 51282 - protein, 9 aa, Homo Sapiens
EAMALPLYR

SEQ ID NO: 51283 - protein, 9 aa, Homo Sapiens
EAMASIINR

SEQ ID NO: 51284 - protein, 9 aa, Homo Sapiens
EAMDVKLKR

SEQ ID NO: 51285 - protein, 9 aa, Homo Sapiens
EAMELIIAH

SEQ ID NO: 51286 - protein, 9 aa, Homo Sapiens
EAMERFGSR

SEQ ID NO: 51287 - protein, 9 aa, Homo Sapiens
EAMETTPAK

SEQ ID NO: 51288 - protein, 9 aa, Homo Sapiens
EAMKHVYFR

SEQ ID NO: 51289 - protein, 9 aa, Homo Sapiens
EAMLPTLGK

SEQ ID NO: 51290 - protein, 9 aa, Homo Sapiens
EAMPPPLLK

SEQ ID NO: 51291 - protein, 9 aa, Homo Sapiens
EAMPSLRSK

SEQ ID NO: 51292 - protein, 9 aa, Homo Sapiens
EAMRWFQQK

SEQ ID NO: 51293 - protein, 9 aa, Homo Sapiens
EAMTIFQNR

SEQ ID NO: 51294 - protein, 9 aa, Homo Sapiens
EAMTVAIRR

SEQ ID NO: 51295 - protein, 9 aa, Homo Sapiens
EANAIALKY

SEQ ID NO: 51296 - protein, 9 aa, Homo Sapiens
EANATQLLR

SEQ ID NO: 51297 - protein, 9 aa, Homo Sapiens
EANFGGSPR

SEQ ID NO: 51298 - protein, 9 aa, Homo Sapiens
EASCAALVK

SEQ ID NO: 51299 - protein, 9 aa, Homo Sapiens
EASDLLLNK

SEQ ID NO: 51300 - protein, 9 aa, Homo Sapiens
EASEATLFY

SEQ ID NO: 51301 - protein, 9 aa, Homo Sapiens
EASNQLINH

SEQ ID NO: 51302 - protein, 9 aa, Homo Sapiens
EASPGGLDR

SEQ ID NO: 51303 - protein, 9 aa, Homo Sapiens
EASPRILKK

SEQ ID NO: 51304 - protein, 9 aa, Homo Sapiens
EASRAILQR

SEQ ID NO: 51305 - protein, 9 aa, Homo Sapiens
EATAAILSR

SEQ ID NO: 51306 - protein, 9 aa, Homo Sapiens
EATASNLVK

SEQ ID NO: 51307 - protein, 9 aa, Homo Sapiens
EATESFLSK

SEQ ID NO: 51308 - protein, 9 aa, Homo Sapiens
EAVEAAINR

SEQ ID NO: 51309 - protein, 9 aa, Homo Sapiens
EAVFASEVK

SEQ ID NO: 51310 - protein, 9 aa, Homo Sapiens
EAVGVTSQR

SEQ ID NO: 51311 - protein, 9 aa, Homo Sapiens
EAVKPFGLK

SEQ ID NO: 51312 - protein, 9 aa, Homo Sapiens
EAVLWEALR

SEQ ID NO: 51313 - protein, 9 aa, Homo Sapiens
EAVQALRER

SEQ ID NO: 51314 - protein, 9 aa, Homo Sapiens
EAVRKLTAR

SEQ ID NO: 51315 - protein, 9 aa, Homo Sapiens
EAVSRVLNK

SEQ ID NO: 51316 - protein, 9 aa, Homo Sapiens
EAVSVYPEK

SEQ ID NO: 51317 - protein, 9 aa, Homo Sapiens
EAYDRRLAH

SEQ ID NO: 51318 - protein, 9 aa, Homo Sapiens
EAYEVLSDK

SEQ ID NO: 51319 - protein, 9 aa, Homo Sapiens
EAYFVPLVK

SEQ ID NO: 51320 - protein, 9 aa, Homo Sapiens
EAYIGADIK

SEQ ID NO: 51321 - protein, 9 aa, Homo Sapiens
EAYRFVKEK

SEQ ID NO: 51322 - protein, 9 aa, Homo Sapiens
EAYSGLTKK

SEQ ID NO: 51323 - protein, 9 aa, Homo Sapiens
EAYSKLLSH

SEQ ID NO: 51324 - protein, 9 aa, Homo Sapiens
EAYSVGTGR

SEQ ID NO: 51325 - protein, 9 aa, Homo Sapiens
EFCSYILSH

SEQ ID NO: 51326 - protein, 9 aa, Homo Sapiens
EGAGGFTAK

SEQ ID NO: 51327 - protein, 9 aa, Homo Sapiens
EGASPLSER

SEQ ID NO: 51328 - protein, 9 aa, Homo Sapiens
EGGPILPKK

SEQ ID NO: 51329 - protein, 9 aa, Homo Sapiens
EIAEKALKK

SEQ ID NO: 51330 - protein, 9 aa, Homo Sapiens
EIAGVKLLY

SEQ ID NO: 51331 - protein, 9 aa, Homo Sapiens
EIAPGIIRK

SEQ ID NO: 51332 - protein, 9 aa, Homo Sapiens
EIASFDKAK

SEQ ID NO: 51333 - protein, 9 aa, Homo Sapiens
EIASFPIYK

SEQ ID NO: 51334 - protein, 9 aa, Homo Sapiens
EICDAYTKK

SEQ ID NO: 51335 - protein, 9 aa, Homo Sapiens
EICEFSQQK

SEQ ID NO: 51336 - protein, 9 aa, Homo Sapiens
EICKQILTK

SEQ ID NO: 51337 - protein, 9 aa, Homo Sapiens
EIDEEPVSK

SEQ ID NO: 51338 - protein, 9 aa, Homo Sapiens
EIDVVSVEK

SEQ ID NO: 51339 - protein, 9 aa, Homo Sapiens
EIFASINQK

SEQ ID NO: 51340 - protein, 9 aa, Homo Sapiens
EIFDGIQPK

SEQ ID NO: 51341 - protein, 9 aa, Homo Sapiens
EIFDHLVAH

SEQ ID NO: 51342 - protein, 9 aa, Homo Sapiens
EIFERDLKK

SEQ ID NO: 51343 - protein, 9 aa, Homo Sapiens
EIFGTIGMR

SEQ ID NO: 51344 - protein, 9 aa, Homo Sapiens
EIFHDVAYK

SEQ ID NO: 51345 - protein, 9 aa, Homo Sapiens
EIFKKIGSK

SEQ ID NO: 51346 - protein, 9 aa, Homo Sapiens
EIFKQATMK

SEQ ID NO: 51347 - protein, 9 aa, Homo Sapiens
EIFQHLMAY

SEQ ID NO: 51348 - protein, 9 aa, Homo Sapiens
EIGKTLAEK

SEQ ID NO: 51349 - protein, 9 aa, Homo Sapiens
EIGPVSSSR

SEQ ID NO: 51350 - protein, 9 aa, Homo Sapiens
EIIKNVPLK

SEQ ID NO: 51351 - protein, 9 aa, Homo Sapiens
EIIKRFEQK

SEQ ID NO: 51352 - protein, 9 aa, Homo Sapiens
EIIKTLPQK

SEQ ID NO: 51353 - protein, 9 aa, Homo Sapiens
EIISKLQGR

SEQ ID NO: 51354 - protein, 9 aa, Homo Sapiens
EIITNQIPK

SEQ ID NO: 51355 - protein, 9 aa, Homo Sapiens
EIITSSIKK

SEQ ID NO: 51356 - protein, 9 aa, Homo Sapiens
EILDEMSHK

SEQ ID NO: 51357 - protein, 9 aa, Homo Sapiens
EILDFALSK

SEQ ID NO: 51358 - protein, 9 aa, Homo Sapiens
EILESIRAK

SEQ ID NO: 51359 - protein, 9 aa, Homo Sapiens
EILEVATAR

SEQ ID NO: 51360 - protein, 9 aa, Homo Sapiens
EILGIANNR

SEQ ID NO: 51361 - protein, 9 aa, Homo Sapiens
EILGKFVGK

SEQ ID NO: 51362 - protein, 9 aa, Homo Sapiens
EILHHLSER

SEQ ID NO: 51363 - protein, 9 aa, Homo Sapiens
EILKSQTPK

SEQ ID NO: 51364 - protein, 9 aa, Homo Sapiens
EILKWYLNK

SEQ ID NO: 51365 - protein, 9 aa, Homo Sapiens
EILKYMQKK

SEQ ID NO: 51366 - protein, 9 aa, Homo Sapiens
EILNDVITK

SEQ ID NO: 51367 - protein, 9 aa, Homo Sapiens
EILNYVLVR

SEQ ID NO: 51368 - protein, 9 aa, Homo Sapiens
EILPKYFKH

SEQ ID NO: 51369 - protein, 9 aa, Homo Sapiens
EILSRSIVK

SEQ ID NO: 51370 - protein, 9 aa, Homo Sapiens
EILSVLSHR

SEQ ID NO: 51371 - protein, 9 aa, Homo Sapiens
EILTPEVNK

SEQ ID NO: 51372 - protein, 9 aa, Homo Sapiens
EIMKAHGVK

SEQ ID NO: 51373 - protein, 9 aa, Homo Sapiens
EIMPPPPKP

SEQ ID NO: 51374 - protein, 9 aa, Homo Sapiens
EIMVEIPAK

SEQ ID NO: 51375 - protein, 9 aa, Homo Sapiens
EINEISYPK

SEQ ID NO: 51376 - protein, 9 aa, Homo Sapiens
EINERVVQH

SEQ ID NO: 51377 - protein, 9 aa, Homo Sapiens
EINPLVVTK

SEQ ID NO: 51378 - protein, 9 aa, Homo Sapiens
EIPEVAFMK

SEQ ID NO: 51379 - protein, 9 aa, Homo Sapiens
EIPLPIRNK

SEQ ID NO: 51380 - protein, 9 aa, Homo Sapiens
EIPRPLKRR

SEQ ID NO: 51381 - protein, 9 aa, Homo Sapiens
EIQAPTSSK

SEQ ID NO: 51382 - protein, 9 aa, Homo Sapiens
EIQKVLKEK

SEQ ID NO: 51383 - protein, 9 aa, Homo Sapiens
EIRSSLSEK

SEQ ID NO: 51384 - protein, 9 aa, Homo Sapiens
EISAPSQQR

SEQ ID NO: 51385 - protein, 9 aa, Homo Sapiens
EISAPVSER

SEQ ID NO: 51386 - protein, 9 aa, Homo Sapiens
EISGTFTHR

SEQ ID NO: 51387 - protein, 9 aa, Homo Sapiens
EISQVCATK

SEQ ID NO: 51388 - protein, 9 aa, Homo Sapiens
EISSKLSEK

SEQ ID NO: 51389 - protein, 9 aa, Homo Sapiens
EITDVKPLK

SEQ ID NO: 51390 - protein, 9 aa, Homo Sapiens
EITPPSSEK

SEQ ID NO: 51391 - protein, 9 aa, Homo Sapiens
EIVAIKILK

SEQ ID NO: 51392 - protein, 9 aa, Homo Sapiens
EIVDKIMGK

SEQ ID NO: 51393 - protein, 9 aa, Homo Sapiens
EIVDQFVCK

SEQ ID NO: 51394 - protein, 9 aa, Homo Sapiens
EIVIHIRNK

SEQ ID NO: 51395 - protein, 9 aa, Homo Sapiens
EIVKPSPKR

SEQ ID NO: 51396 - protein, 9 aa, Homo Sapiens
EIVQPIISK

SEQ ID NO: 51397 - protein, 9 aa, Homo Sapiens
EIVREIGQK

SEQ ID NO: 51398 - protein, 9 aa, Homo Sapiens
EIWHRFLSK

SEQ ID NO: 51399 - protein, 9 aa, Homo Sapiens
EIYEYIIFR

SEQ ID NO: 51400 - protein, 9 aa, Homo Sapiens
EIYFRAWKK

SEQ ID NO: 51401 - protein, 9 aa, Homo Sapiens
EIYGSYLEH

SEQ ID NO: 51402 - protein, 9 aa, Homo Sapiens
EIYGVTHTR

SEQ ID NO: 51403 - protein, 9 aa, Homo Sapiens
EIYLPEVVK

SEQ ID NO: 51404 - protein, 9 aa, Homo Sapiens
EIYNIKVEK

SEQ ID NO: 51405 - protein, 9 aa, Homo Sapiens
EIYPQTIQH

SEQ ID NO: 51406 - protein, 9 aa, Homo Sapiens
EIYRIVSQK

SEQ ID NO: 51407 - protein, 9 aa, Homo Sapiens
EIYRPPASR

SEQ ID NO: 51408 - protein, 9 aa, Homo Sapiens
EIYSDFALK

SEQ ID NO: 51409 - protein, 9 aa, Homo Sapiens
EIYSGCTKK

SEQ ID NO: 51410 - protein, 9 aa, Homo Sapiens
EIYSGCTKR

SEQ ID NO: 51411 - protein, 9 aa, Homo Sapiens
EIYSKTTRF

SEQ ID NO: 51412 - protein, 9 aa, Homo Sapiens
ELAEKALGK

SEQ ID NO: 51413 - protein, 9 aa, Homo Sapiens
ELAHTCISK

SEQ ID NO: 51414 - protein, 9 aa, Homo Sapiens
ELAKTPVNK

SEQ ID NO: 51415 - protein, 9 aa, Homo Sapiens
ELAPVFLLR

SEQ ID NO: 51416 - protein, 9 aa, Homo Sapiens
ELAVASFPK

SEQ ID NO: 51417 - protein, 9 aa, Homo Sapiens
ELAVILKAK

SEQ ID NO: 51418 - protein, 9 aa, Homo Sapiens
ELCDIILRV

SEQ ID NO: 51419 - protein, 9 aa, Homo Sapiens
ELCEEFLAH

SEQ ID NO: 51420 - protein, 9 aa, Homo Sapiens
ELCETFLEK

SEQ ID NO: 51421 - protein, 9 aa, Homo Sapiens
ELCSFSGYK

SEQ ID NO: 51422 - protein, 9 aa, Homo Sapiens
ELCYTLINH

SEQ ID NO: 51423 - protein, 9 aa, Homo Sapiens
ELEAAVRKK

SEQ ID NO: 51424 - protein, 9 aa, Homo Sapiens
ELFADKVPK

SEQ ID NO: 51425 - protein, 9 aa, Homo Sapiens
ELFADVVPK

SEQ ID NO: 51426 - protein, 9 aa, Homo Sapiens
ELFDRIVEK

SEQ ID NO: 51427 - protein, 9 aa, Homo Sapiens
ELFERFLLY

SEQ ID NO: 51428 - protein, 9 aa, Homo Sapiens
ELFKGATLK

SEQ ID NO: 51429 - protein, 9 aa, Homo Sapiens
ELFNFFLKK

SEQ ID NO: 51430 - protein, 9 aa, Homo Sapiens
ELFPAPILR

SEQ ID NO: 51431 - protein, 9 aa, Homo Sapiens
ELFQATIVK

SEQ ID NO: 51432 - protein, 9 aa, Homo Sapiens
ELFSDFCSK

SEQ ID NO: 51433 - protein, 9 aa, Homo Sapiens
ELFSYSCPK

SEQ ID NO: 51434 - protein, 9 aa, Homo Sapiens
ELFVETIAK

SEQ ID NO: 51435 - protein, 9 aa, Homo Sapiens
ELGIPLKEK

SEQ ID NO: 51436 - protein, 9 aa, Homo Sapiens
ELGPGVKAK

SEQ ID NO: 51437 - protein, 9 aa, Homo Sapiens
ELGPLLEEK

SEQ ID NO: 51438 - protein, 9 aa, Homo Sapiens
ELHGHFMLH

SEQ ID NO: 51439 - protein, 9 aa, Homo Sapiens
ELIERVSGK

SEQ ID NO: 51440 - protein, 9 aa, Homo Sapiens
ELIGRLAPR

SEQ ID NO: 51441 - protein, 9 aa, Homo Sapiens
ELIKVVSPK

SEQ ID NO: 51442 - protein, 9 aa, Homo Sapiens
ELKAPGISY

SEQ ID NO: 51443 - protein, 9 aa, Homo Sapiens
ELLDRPLLR

SEQ ID NO: 51444 - protein, 9 aa, Homo Sapiens
ELLEHIRKK

SEQ ID NO: 51445 - protein, 9 aa, Homo Sapiens
ELLEKASNP

SEQ ID NO: 51446 - protein, 9 aa, Homo Sapiens
ELLEPLNER

SEQ ID NO: 51447 - protein, 9 aa, Homo Sapiens
ELLGKAYGK

SEQ ID NO: 51448 - protein, 9 aa, Homo Sapiens
ELLGPYGMK

SEQ ID NO: 51449 - protein, 9 aa, Homo Sapiens
ELLHTQLKY

SEQ ID NO: 51450 - protein, 9 aa, Homo Sapiens
ELLIPVKKK

SEQ ID NO: 51451 - protein, 9 aa, Homo Sapiens
ELLKTAIGK

SEQ ID NO: 51452 - protein, 9 aa, Homo Sapiens
ELLQGGTSR

SEQ ID NO: 51453 - protein, 9 aa, Homo Sapiens
ELLQRMTDK

SEQ ID NO: 51454 - protein, 9 aa, Homo Sapiens
ELLRDILQK

SEQ ID NO: 51455 - protein, 9 aa, Homo Sapiens
ELLSFILDH

SEQ ID NO: 51456 - protein, 9 aa, Homo Sapiens
ELLSKGLIK

SEQ ID NO: 51457 - protein, 9 aa, Homo Sapiens
ELMGYIMGK

SEQ ID NO: 51458 - protein, 9 aa, Homo Sapiens
ELMPPPPPK

SEQ ID NO: 51459 - protein, 9 aa, Homo Sapiens
ELNAPFILK

SEQ ID NO: 51460 - protein, 9 aa, Homo Sapiens
ELPEASAPK

SEQ ID NO: 51461 - protein, 9 aa, Homo Sapiens
ELPEFNLIH

SEQ ID NO: 51462 - protein, 9 aa, Homo Sapiens
ELSDLHAHK

SEQ ID NO: 51463 - protein, 9 aa, Homo Sapiens
ELSPTGRPK

SEQ ID NO: 51464 - protein, 9 aa, Homo Sapiens
ELSSVKLEY

SEQ ID NO: 51465 - protein, 9 aa, Homo Sapiens
ELTVLRLSH

SEQ ID NO: 51466 - protein, 9 aa, Homo Sapiens
ELYDRDLKH

SEQ ID NO: 51467 - protein, 9 aa, Homo Sapiens
ELYGETKAK

SEQ ID NO: 51468 - protein, 9 aa, Homo Sapiens
ELYNRMLKR

SEQ ID NO: 51469 - protein, 9 aa, Homo Sapiens
ELYPPQLKK

SEQ ID NO: 51470 - protein, 9 aa, Homo Sapiens
ELYWKHAPK

SEQ ID NO: 51471 - protein, 9 aa, Homo Sapiens
EMFDGSLYH

SEQ ID NO: 51472 - protein, 9 aa, Homo Sapiens
EMFDPLTNK

SEQ ID NO: 51473 - protein, 9 aa, Homo Sapiens
EMYQPLLEK

SEQ ID NO: 51474 - protein, 9 aa, Homo Sapiens
ENIFLPLFK

SEQ ID NO: 51475 - protein, 9 aa, Homo Sapiens
ENLGIQPPK

SEQ ID NO: 51476 - protein, 9 aa, Homo Sapiens
EQSAVSMLK

SEQ ID NO: 51477 - protein, 9 aa, Homo Sapiens
ESAGAYAYK

SEQ ID NO: 51478 - protein, 9 aa, Homo Sapiens
ESAPAWRLR

SEQ ID NO: 51479 - protein, 9 aa, Homo Sapiens
ESAPKASLR

SEQ ID NO: 51480 - protein, 9 aa, Homo Sapiens
ESAPMFSAK

SEQ ID NO: 51481 - protein, 9 aa, Homo Sapiens
ESAPPSPQY

SEQ ID NO: 51482 - protein, 9 aa, Homo Sapiens
ESAPSALEK

SEQ ID NO: 51483 - protein, 9 aa, Homo Sapiens
ESAQDFASR

SEQ ID NO: 51484 - protein, 9 aa, Homo Sapiens
ESASFLIRK

SEQ ID NO: 51485 - protein, 9 aa, Homo Sapiens
ESCDVQLYI

SEQ ID NO: 51486 - protein, 9 aa, Homo Sapiens
ESCNEFRLK

SEQ ID NO: 51487 - protein, 9 aa, Homo Sapiens
ESFEGFIAR

SEQ ID NO: 51488 - protein, 9 aa, Homo Sapiens
ESFFKPLTH

SEQ ID NO: 51489 - protein, 9 aa, Homo Sapiens
ESFGAVKKK

SEQ ID NO: 51490 - protein, 9 aa, Homo Sapiens
ESFGTLSDK

SEQ ID NO: 51491 - protein, 9 aa, Homo Sapiens
ESFLYKREK

SEQ ID NO: 51492 - protein, 9 aa, Homo Sapiens
ESFLYRREK

SEQ ID NO: 51493 - protein, 9 aa, Homo Sapiens
ESFQKALEK

SEQ ID NO: 51494 - protein, 9 aa, Homo Sapiens
ESFSRIALK

SEQ ID NO: 51495 - protein, 9 aa, Homo Sapiens
ESGITTPPK

SEQ ID NO: 51496 - protein, 9 aa, Homo Sapiens
ESGKSTFIK

SEQ ID NO: 51497 - protein, 9 aa, Homo Sapiens
ESIAAFIQR

SEQ ID NO: 51498 - protein, 9 aa, Homo Sapiens
ESIDALSNK

SEQ ID NO: 51499 - protein, 9 aa, Homo Sapiens
ESIEHPLAR

SEQ ID NO: 51500 - protein, 9 aa, Homo Sapiens
ESIGVPLEK

SEQ ID NO: 51501 - protein, 9 aa, Homo Sapiens
ESIKGLCER

SEQ ID NO: 51502 - protein, 9 aa, Homo Sapiens
ESIRAAVNR

SEQ ID NO: 51503 - protein, 9 aa, Homo Sapiens
ESIRGIGPK

SEQ ID NO: 51504 - protein, 9 aa, Homo Sapiens
ESISLKNLK

SEQ ID NO: 51505 - protein, 9 aa, Homo Sapiens
ESITHALKH

SEQ ID NO: 51506 - protein, 9 aa, Homo Sapiens
ESLAKIKSK

SEQ ID NO: 51507 - protein, 9 aa, Homo Sapiens
ESLAPLQER

SEQ ID NO: 51508 - protein, 9 aa, Homo Sapiens
ESLDITIVR

SEQ ID NO: 51509 - protein, 9 aa, Homo Sapiens
ESLEAALTH

SEQ ID NO: 51510 - protein, 9 aa, Homo Sapiens
ESLEKALKY

SEQ ID NO: 51511 - protein, 9 aa, Homo Sapiens
ESLEKLLVH

SEQ ID NO: 51512 - protein, 9 aa, Homo Sapiens
ESLESWLNK

SEQ ID NO: 51513 - protein, 9 aa, Homo Sapiens
ESLEWLASR

SEQ ID NO: 51514 - protein, 9 aa, Homo Sapiens
ESLGYHCEY

SEQ ID NO: 51515 - protein, 9 aa, Homo Sapiens
ESLGYVLMY

SEQ ID NO: 51516 - protein, 9 aa, Homo Sapiens
ESLHKTIVK

SEQ ID NO: 51517 - protein, 9 aa, Homo Sapiens
ESLIPSANR

SEQ ID NO: 51518 - protein, 9 aa, Homo Sapiens
ESLKERLIK

SEQ ID NO: 51519 - protein, 9 aa, Homo Sapiens
ESLKGVDPK

SEQ ID NO: 51520 - protein, 9 aa, Homo Sapiens
ESLLTSPPK

SEQ ID NO: 51521 - protein, 9 aa, Homo Sapiens
ESLMTSAPK

SEQ ID NO: 51522 - protein, 9 aa, Homo Sapiens
ESLNRSIEK

SEQ ID NO: 51523 - protein, 9 aa, Homo Sapiens
ESLPATHIR

SEQ ID NO: 51524 - protein, 9 aa, Homo Sapiens
ESLPFQFAH

SEQ ID NO: 51525 - protein, 9 aa, Homo Sapiens
ESLPGATTR

SEQ ID NO: 51526 - protein, 9 aa, Homo Sapiens
ESLPKPKEK

SEQ ID NO: 51527 - protein, 9 aa, Homo Sapiens
ESLPNLLQY

SEQ ID NO: 51528 - protein, 9 aa, Homo Sapiens
ESLPRVVKR

SEQ ID NO: 51529 - protein, 9 aa, Homo Sapiens
ESLPTTPFY

SEQ ID NO: 51530 - protein, 9 aa, Homo Sapiens
ESLQFNLEK

SEQ ID NO: 51531 - protein, 9 aa, Homo Sapiens
ESLQLNLTK

SEQ ID NO: 51532 - protein, 9 aa, Homo Sapiens
ESLSSGLCK

SEQ ID NO: 51533 - protein, 9 aa, Homo Sapiens
ESLSSMPGK

SEQ ID NO: 51534 - protein, 9 aa, Homo Sapiens
ESLTLQLVK

SEQ ID NO: 51535 - protein, 9 aa, Homo Sapiens
ESMDQLLNK

SEQ ID NO: 51536 - protein, 9 aa, Homo Sapiens
ESMKVAIVK

SEQ ID NO: 51537 - protein, 9 aa, Homo Sapiens
ESMNIVLQH

SEQ ID NO: 51538 - protein, 9 aa, Homo Sapiens
ESNFPRGFK

SEQ ID NO: 51539 - protein, 9 aa, Homo Sapiens
ESNSGPLMK

SEQ ID NO: 51540 - protein, 9 aa, Homo Sapiens
ESSDALLKR

SEQ ID NO: 51541 - protein, 9 aa, Homo Sapiens
ESSGINITK

SEQ ID NO: 51542 - protein, 9 aa, Homo Sapiens
ESSLPAVEK

SEQ ID NO: 51543 - protein, 9 aa, Homo Sapiens
ESSLPTGDR

SEQ ID NO: 51544 - protein, 9 aa, Homo Sapiens
ESSQNVLLK

SEQ ID NO: 51545 - protein, 9 aa, Homo Sapiens
ESSSVVLRY

SEQ ID NO: 51546 - protein, 9 aa, Homo Sapiens
ESSSWDGRY

SEQ ID NO: 51547 - protein, 9 aa, Homo Sapiens
ESTGESTFK

SEQ ID NO: 51548 - protein, 9 aa, Homo Sapiens
ESTGVSFEK

SEQ ID NO: 51549 - protein, 9 aa, Homo Sapiens
ESTIPFSNK

SEQ ID NO: 51550 - protein, 9 aa, Homo Sapiens
ESTPITAVK

SEQ ID NO: 51551 - protein, 9 aa, Homo Sapiens
ESTPPSIKK

SEQ ID NO: 51552 - protein, 9 aa, Homo Sapiens
ESVKEFLAK

SEQ ID NO: 51553 - protein, 9 aa, Homo Sapiens
ESVSIFSLK

SEQ ID NO: 51554 - protein, 9 aa, Homo Sapiens
ESYLGSPQH

SEQ ID NO: 51555 - protein, 9 aa, Homo Sapiens
ESYSSPFVK

SEQ ID NO: 51556 - protein, 9 aa, Homo Sapiens
ESYYQEIGR

SEQ ID NO: 51557 - protein, 9 aa, Homo Sapiens
ETAAAMLRK

SEQ ID NO: 51558 - protein, 9 aa, Homo Sapiens
ETAAPFVSH

SEQ ID NO: 51559 - protein, 9 aa, Homo Sapiens
ETAATLTTK

SEQ ID NO: 51560 - protein, 9 aa, Homo Sapiens
ETAFAFHLR

SEQ ID NO: 51561 - protein, 9 aa, Homo Sapiens
ETAFLSWFR

SEQ ID NO: 51562 - protein, 9 aa, Homo Sapiens
ETAFQGMLR

SEQ ID NO: 51563 - protein, 9 aa, Homo Sapiens
ETAFVSRNR

SEQ ID NO: 51564 - protein, 9 aa, Homo Sapiens
ETAIPFRSR

SEQ ID NO: 51565 - protein, 9 aa, Homo Sapiens
ETAIPSSTR

SEQ ID NO: 51566 - protein, 9 aa, Homo Sapiens
ETAKDLVSK

SEQ ID NO: 51567 - protein, 9 aa, Homo Sapiens
ETAKPIPAR

SEQ ID NO: 51568 - protein, 9 aa, Homo Sapiens
ETALPGAFK

SEQ ID NO: 51569 - protein, 9 aa, Homo Sapiens
ETAPRHMMR

SEQ ID NO: 51570 - protein, 9 aa, Homo Sapiens
ETAPVGTVL

SEQ ID NO: 51571 - protein, 9 aa, Homo Sapiens
ETARKFLYY

SEQ ID NO: 51572 - protein, 9 aa, Homo Sapiens
ETATPMLKK

SEQ ID NO: 51573 - protein, 9 aa, Homo Sapiens
ETAVPSVLK

SEQ ID NO: 51574 - protein, 9 aa, Homo Sapiens
ETCDKVFSR

SEQ ID NO: 51575 - protein, 9 aa, Homo Sapiens
ETCGRFLFR

SEQ ID NO: 51576 - protein, 9 aa, Homo Sapiens
ETCPGLEQY

SEQ ID NO: 51577 - protein, 9 aa, Homo Sapiens
ETCPYDIAV

SEQ ID NO: 51578 - protein, 9 aa, Homo Sapiens
ETCQLAVRR

SEQ ID NO: 51579 - protein, 9 aa, Homo Sapiens
ETCVATVGR

SEQ ID NO: 51580 - protein, 9 aa, Homo Sapiens
ETDESVLMR

SEQ ID NO: 51581 - protein, 9 aa, Homo Sapiens
ETDIPKITK

SEQ ID NO: 51582 - protein, 9 aa, Homo Sapiens
ETDLYKLLK

SEQ ID NO: 51583 - protein, 9 aa, Homo Sapiens
ETDSSLVVK

SEQ ID NO: 51584 - protein, 9 aa, Homo Sapiens
ETDVPLVMK

SEQ ID NO: 51585 - protein, 9 aa, Homo Sapiens
ETFDKTILR

SEQ ID NO: 51586 - protein, 9 aa, Homo Sapiens
ETFGSNIPK

SEQ ID NO: 51587 - protein, 9 aa, Homo Sapiens
ETFKSIMKK

SEQ ID NO: 51588 - protein, 9 aa, Homo Sapiens
ETFLEPWFK

SEQ ID NO: 51589 - protein, 9 aa, Homo Sapiens
ETFLTERDK

SEQ ID NO: 51590 - protein, 9 aa, Homo Sapiens
ETFNEWFKH

SEQ ID NO: 51591 - protein, 9 aa, Homo Sapiens
ETFNIIMRR

SEQ ID NO: 51592 - protein, 9 aa, Homo Sapiens
ETFNSFLRR

SEQ ID NO: 51593 - protein, 9 aa, Homo Sapiens
ETFNSITKR

SEQ ID NO: 51594 - protein, 9 aa, Homo Sapiens
ETFNTPAMY

SEQ ID NO: 51595 - protein, 9 aa, Homo Sapiens
ETFPAVAEK

SEQ ID NO: 51596 - protein, 9 aa, Homo Sapiens
ETFQFILGK

SEQ ID NO: 51597 - protein, 9 aa, Homo Sapiens
ETFQQKMLR

SEQ ID NO: 51598 - protein, 9 aa, Homo Sapiens
ETFSGVYKK

SEQ ID NO: 51599 - protein, 9 aa, Homo Sapiens
ETGLRLCEK

SEQ ID NO: 51600 - protein, 9 aa, Homo Sapiens
ETGTLMVLK

SEQ ID NO: 51601 - protein, 9 aa, Homo Sapiens
ETHAWFTSR

SEQ ID NO: 51602 - protein, 9 aa, Homo Sapiens
ETHSHFLAR

SEQ ID NO: 51603 - protein, 9 aa, Homo Sapiens
ETHYEKVLK

SEQ ID NO: 51604 - protein, 9 aa, Homo Sapiens
ETIAVWRQK

SEQ ID NO: 51605 - protein, 9 aa, Homo Sapiens
ETIDVHSGY

SEQ ID NO: 51606 - protein, 9 aa, Homo Sapiens
ETIGEILKK

SEQ ID NO: 51607 - protein, 9 aa, Homo Sapiens
ETIGKKFEK

SEQ ID NO: 51608 - protein, 9 aa, Homo Sapiens
ETIGSVRWK

SEQ ID NO: 51609 - protein, 9 aa, Homo Sapiens
ETIKEHLCK

SEQ ID NO: 51610 - protein, 9 aa, Homo Sapiens
ETIKIGLTK

SEQ ID NO: 51611 - protein, 9 aa, Homo Sapiens
ETIKQLQER

SEQ ID NO: 51612 - protein, 9 aa, Homo Sapiens
ETIKVWKQR

SEQ ID NO: 51613 - protein, 9 aa, Homo Sapiens
ETILRTNKR

SEQ ID NO: 51614 - protein, 9 aa, Homo Sapiens
ETIMKYAEK

SEQ ID NO: 51615 - protein, 9 aa, Homo Sapiens
ETINRCLTK

SEQ ID NO: 51616 - protein, 9 aa, Homo Sapiens
ETIPSFTGR

SEQ ID NO: 51617 - protein, 9 aa, Homo Sapiens
ETIREVCTK

SEQ ID NO: 51618 - protein, 9 aa, Homo Sapiens
ETISTATGR

SEQ ID NO: 51619 - protein, 9 aa, Homo Sapiens
ETITNIREK

SEQ ID NO: 51620 - protein, 9 aa, Homo Sapiens
ETIYDLGTK

SEQ ID NO: 51621 - protein, 9 aa, Homo Sapiens
ETIYQNYQR

SEQ ID NO: 51622 - protein, 9 aa, Homo Sapiens
ETKDVFQLK

SEQ ID NO: 51623 - protein, 9 aa, Homo Sapiens
ETKEKVSFK

SEQ ID NO: 51624 - protein, 9 aa, Homo Sapiens
ETKGTVLIK

SEQ ID NO: 51625 - protein, 9 aa, Homo Sapiens
ETKSWIREK

SEQ ID NO: 51626 - protein, 9 aa, Homo Sapiens
ETLDRYMVK

SEQ ID NO: 51627 - protein, 9 aa, Homo Sapiens
ETLETIINR

SEQ ID NO: 51628 - protein, 9 aa, Homo Sapiens
ETLGQVVRR

SEQ ID NO: 51629 - protein, 9 aa, Homo Sapiens
ETLHLAVNY

SEQ ID NO: 51630 - protein, 9 aa, Homo Sapiens
ETLIKPLEK

SEQ ID NO: 51631 - protein, 9 aa, Homo Sapiens
ETLKDRLSR

SEQ ID NO: 51632 - protein, 9 aa, Homo Sapiens
ETLKRFAGK

SEQ ID NO: 51633 - protein, 9 aa, Homo Sapiens
ETLLDQSFK

SEQ ID NO: 51634 - protein, 9 aa, Homo Sapiens
ETLLGISKK

SEQ ID NO: 51635 - protein, 9 aa, Homo Sapiens
ETLLLQAER

SEQ ID NO: 51636 - protein, 9 aa, Homo Sapiens
ETLMETHER

SEQ ID NO: 51637 - protein, 9 aa, Homo Sapiens
ETLNIPITY

SEQ ID NO: 51638 - protein, 9 aa, Homo Sapiens
ETLNIVEEK

SEQ ID NO: 51639 - protein, 9 aa, Homo Sapiens
ETLNQMIAR

SEQ ID NO: 51640 - protein, 9 aa, Homo Sapiens
ETLPAEMRK

SEQ ID NO: 51641 - protein, 9 aa, Homo Sapiens
ETLPDGTKR

SEQ ID NO: 51642 - protein, 9 aa, Homo Sapiens
ETLPEGPSH

SEQ ID NO: 51643 - protein, 9 aa, Homo Sapiens
ETLPKAVKR

SEQ ID NO: 51644 - protein, 9 aa, Homo Sapiens
ETLPPGKVR

SEQ ID NO: 51645 - protein, 9 aa, Homo Sapiens
ETLPTILQV

SEQ ID NO: 51646 - protein, 9 aa, Homo Sapiens
ETLQEVFEK

SEQ ID NO: 51647 - protein, 9 aa, Homo Sapiens
ETLQNVKER

SEQ ID NO: 51648 - protein, 9 aa, Homo Sapiens
ETLQSINKK

SEQ ID NO: 51649 - protein, 9 aa, Homo Sapiens
ETLSEVLTK

SEQ ID NO: 51650 - protein, 9 aa, Homo Sapiens
ETLSQSPPK

SEQ ID NO: 51651 - protein, 9 aa, Homo Sapiens
ETLTPLIHR

SEQ ID NO: 51652 - protein, 9 aa, Homo Sapiens
ETMADYLLY

SEQ ID NO: 51653 - protein, 9 aa, Homo Sapiens
ETMDPFVDR

SEQ ID NO: 51654 - protein, 9 aa, Homo Sapiens
ETMEKGFSK

SEQ ID NO: 51655 - protein, 9 aa, Homo Sapiens
ETMGRALRY

SEQ ID NO: 51656 - protein, 9 aa, Homo Sapiens
ETMHTLLDY

SEQ ID NO: 51657 - protein, 9 aa, Homo Sapiens
ETMNIFLEK

SEQ ID NO: 51658 - protein, 9 aa, Homo Sapiens
ETMNYAQIR

SEQ ID NO: 51659 - protein, 9 aa, Homo Sapiens
ETMPCVKKK

SEQ ID NO: 51660 - protein, 9 aa, Homo Sapiens
ETMPSPYGR

SEQ ID NO: 51661 - protein, 9 aa, Homo Sapiens
ETMPYVKKK

SEQ ID NO: 51662 - protein, 9 aa, Homo Sapiens
ETMVIGNYR

SEQ ID NO: 51663 - protein, 9 aa, Homo Sapiens
ETNADVYYY

SEQ ID NO: 51664 - protein, 9 aa, Homo Sapiens
ETNDFELLK

SEQ ID NO: 51665 - protein, 9 aa, Homo Sapiens
ETNFKSLVH

SEQ ID NO: 51666 - protein, 9 aa, Homo Sapiens
ETNGFISAH

SEQ ID NO: 51667 - protein, 9 aa, Homo Sapiens
ETNTGEVYR

SEQ ID NO: 51668 - protein, 9 aa, Homo Sapiens
ETNYGIPQR

SEQ ID NO: 51669 - protein, 9 aa, Homo Sapiens
ETPAISPSK

SEQ ID NO: 51670 - protein, 9 aa, Homo Sapiens
ETPAVFIRK

SEQ ID NO: 51671 - protein, 9 aa, Homo Sapiens
ETPDYLLKY

SEQ ID NO: 51672 - protein, 9 aa, Homo Sapiens
ETQFTSGEK

SEQ ID NO: 51673 - protein, 9 aa, Homo Sapiens
ETQLLVSRK

SEQ ID NO: 51674 - protein, 9 aa, Homo Sapiens
ETQLPVSFR

SEQ ID NO: 51675 - protein, 9 aa, Homo Sapiens
ETQPPVALK

SEQ ID NO: 51676 - protein, 9 aa, Homo Sapiens
ETRAEFAER

SEQ ID NO: 51677 - protein, 9 aa, Homo Sapiens
ETRAGLTLK

SEQ ID NO: 51678 - protein, 9 aa, Homo Sapiens
ETREVQNLR

SEQ ID NO: 51679 - protein, 9 aa, Homo Sapiens
ETSAPFKER

SEQ ID NO: 51680 - protein, 9 aa, Homo Sapiens
ETSEPLSCR

SEQ ID NO: 51681 - protein, 9 aa, Homo Sapiens
ETSGPTYIK

SEQ ID NO: 51682 - protein, 9 aa, Homo Sapiens
ETSLNLTTK

SEQ ID NO: 51683 - protein, 9 aa, Homo Sapiens
ETSNLIIMR

SEQ ID NO: 51684 - protein, 9 aa, Homo Sapiens
ETSPELPRR

SEQ ID NO: 51685 - protein, 9 aa, Homo Sapiens
ETSPFGAPR

SEQ ID NO: 51686 - protein, 9 aa, Homo Sapiens
ETSPIVLRY

SEQ ID NO: 51687 - protein, 9 aa, Homo Sapiens
ETSQAGLFR

SEQ ID NO: 51688 - protein, 9 aa, Homo Sapiens
ETSRLFVKK

SEQ ID NO: 51689 - protein, 9 aa, Homo Sapiens
ETSSMASFR

SEQ ID NO: 51690 - protein, 9 aa, Homo Sapiens
ETSTSVMQK

SEQ ID NO: 51691 - protein, 9 aa, Homo Sapiens
ETTAQILVR

SEQ ID NO: 51692 - protein, 9 aa, Homo Sapiens
ETTAVALAY

SEQ ID NO: 51693 - protein, 9 aa, Homo Sapiens
ETTEHLVTK

SEQ ID NO: 51694 - protein, 9 aa, Homo Sapiens
ETTFNSIMK

SEQ ID NO: 51695 - protein, 9 aa, Homo Sapiens
ETTGQIMHR

SEQ ID NO: 51696 - protein, 9 aa, Homo Sapiens
ETTGVDITK

SEQ ID NO: 51697 - protein, 9 aa, Homo Sapiens
ETTPSVIQH

SEQ ID NO: 51698 - protein, 9 aa, Homo Sapiens
ETTQEMLNY

SEQ ID NO: 51699 - protein, 9 aa, Homo Sapiens
ETTSIATAR

SEQ ID NO: 51700 - protein, 9 aa, Homo Sapiens
ETTSNITSR

SEQ ID NO: 51701 - protein, 9 aa, Homo Sapiens
ETTWTILRR

SEQ ID NO: 51702 - protein, 9 aa, Homo Sapiens
ETVADFTPK

SEQ ID NO: 51703 - protein, 9 aa, Homo Sapiens
ETVAEFIKR

SEQ ID NO: 51704 - protein, 9 aa, Homo Sapiens
ETVALFKNK

SEQ ID NO: 51705 - protein, 9 aa, Homo Sapiens
ETVEGLRKR

SEQ ID NO: 51706 - protein, 9 aa, Homo Sapiens
ETVEKFRQR

SEQ ID NO: 51707 - protein, 9 aa, Homo Sapiens
ETVELFRAK

SEQ ID NO: 51708 - protein, 9 aa, Homo Sapiens
ETVEVPVLK

SEQ ID NO: 51709 - protein, 9 aa, Homo Sapiens
ETVGKFIQY

SEQ ID NO: 51710 - protein, 9 aa, Homo Sapiens
ETVGSIFSR

SEQ ID NO: 51711 - protein, 9 aa, Homo Sapiens
ETVKDFVAK

SEQ ID NO: 51712 - protein, 9 aa, Homo Sapiens
ETVPAFSER

SEQ ID NO: 51713 - protein, 9 aa, Homo Sapiens
ETVPKDLRH

SEQ ID NO: 51714 - protein, 9 aa, Homo Sapiens
ETVPLERKK

SEQ ID NO: 51715 - protein, 9 aa, Homo Sapiens
ETVQTVRYK

SEQ ID NO: 51716 - protein, 9 aa, Homo Sapiens
ETVQVPLSK

SEQ ID NO: 51717 - protein, 9 aa, Homo Sapiens
ETVRMIKEK

SEQ ID NO: 51718 - protein, 9 aa, Homo Sapiens
ETVSGLKGY

SEQ ID NO: 51719 - protein, 9 aa, Homo Sapiens
ETVTSFRKR

SEQ ID NO: 51720 - protein, 9 aa, Homo Sapiens
ETVYTLCEK

SEQ ID NO: 51721 - protein, 9 aa, Homo Sapiens
ETWAESLRY

SEQ ID NO: 51722 - protein, 9 aa, Homo Sapiens
ETWHGSCFR

SEQ ID NO: 51723 - protein, 9 aa, Homo Sapiens
ETWQEGSLK

SEQ ID NO: 51724 - protein, 9 aa, Homo Sapiens
ETYALPATK

SEQ ID NO: 51725 - protein, 9 aa, Homo Sapiens
ETYANFIKH

SEQ ID NO: 51726 - protein, 9 aa, Homo Sapiens
ETYERLREK

SEQ ID NO: 51727 - protein, 9 aa, Homo Sapiens
ETYGHKTPY

SEQ ID NO: 51728 - protein, 9 aa, Homo Sapiens
ETYGKIMNH

SEQ ID NO: 51729 - protein, 9 aa, Homo Sapiens
ETYGPFQIR

SEQ ID NO: 51730 - protein, 9 aa, Homo Sapiens
ETYIATILR

SEQ ID NO: 51731 - protein, 9 aa, Homo Sapiens
ETYIKPISK

SEQ ID NO: 51732 - protein, 9 aa, Homo Sapiens
ETYKPHLER

SEQ ID NO: 51733 - protein, 9 aa, Homo Sapiens
ETYKSLMQK

SEQ ID NO: 51734 - protein, 9 aa, Homo Sapiens
ETYLHRIGR

SEQ ID NO: 51735 - protein, 9 aa, Homo Sapiens
ETYLNENLR

SEQ ID NO: 51736 - protein, 9 aa, Homo Sapiens
ETYMHRIGR

SEQ ID NO: 51737 - protein, 9 aa, Homo Sapiens
ETYNIVWGH

SEQ ID NO: 51738 - protein, 9 aa, Homo Sapiens
ETYNQLLDK

SEQ ID NO: 51739 - protein, 9 aa, Homo Sapiens
ETYNYLLAK

SEQ ID NO: 51740 - protein, 9 aa, Homo Sapiens
ETYPFNPPK

SEQ ID NO: 51741 - protein, 9 aa, Homo Sapiens
ETYPHPLVR

SEQ ID NO: 51742 - protein, 9 aa, Homo Sapiens
ETYPVSSPK

SEQ ID NO: 51743 - protein, 9 aa, Homo Sapiens
ETYSRMRLK

SEQ ID NO: 51744 - protein, 9 aa, Homo Sapiens
ETYTPEVTK

SEQ ID NO: 51745 - protein, 9 aa, Homo Sapiens
ETYVRWSPK

SEQ ID NO: 51746 - protein, 9 aa, Homo Sapiens
ETYYHHIYH

SEQ ID NO: 51747 - protein, 9 aa, Homo Sapiens
EVADGFKSK

SEQ ID NO: 51748 - protein, 9 aa, Homo Sapiens
EVADLKIKR

SEQ ID NO: 51749 - protein, 9 aa, Homo Sapiens
EVAEFLARH

SEQ ID NO: 51750 - protein, 9 aa, Homo Sapiens
EVAELGRGR

SEQ ID NO: 51751 - protein, 9 aa, Homo Sapiens
EVAEYLLEH

SEQ ID NO: 51752 - protein, 9 aa, Homo Sapiens
EVAEYLLQH

SEQ ID NO: 51753 - protein, 9 aa, Homo Sapiens
EVAFKMAVK

SEQ ID NO: 51754 - protein, 9 aa, Homo Sapiens
EVAFPHHPR

SEQ ID NO: 51755 - protein, 9 aa, Homo Sapiens
EVAGIVAAR

SEQ ID NO: 51756 - protein, 9 aa, Homo Sapiens
EVAGQFVIK

SEQ ID NO: 51757 - protein, 9 aa, Homo Sapiens
EVAGQLIHK

SEQ ID NO: 51758 - protein, 9 aa, Homo Sapiens
EVAIPHNRR

SEQ ID NO: 51759 - protein, 9 aa, Homo Sapiens
EVAIPLPAR

SEQ ID NO: 51760 - protein, 9 aa, Homo Sapiens
EVAKLLKLK

SEQ ID NO: 51761 - protein, 9 aa, Homo Sapiens
EVANSILQK

SEQ ID NO: 51762 - protein, 9 aa, Homo Sapiens
EVAPAGASY

SEQ ID NO: 51763 - protein, 9 aa, Homo Sapiens
EVAPAGPLL

SEQ ID NO: 51764 - protein, 9 aa, Homo Sapiens
EVAPHPVYY

SEQ ID NO: 51765 - protein, 9 aa, Homo Sapiens
EVAPPEYHR

SEQ ID NO: 51766 - protein, 9 aa, Homo Sapiens
EVAQFLTGR

SEQ ID NO: 51767 - protein, 9 aa, Homo Sapiens
EVARELVGR

SEQ ID NO: 51768 - protein, 9 aa, Homo Sapiens
EVASAVCLR

SEQ ID NO: 51769 - protein, 9 aa, Homo Sapiens
EVASFLLSK

SEQ ID NO: 51770 - protein, 9 aa, Homo Sapiens
EVASVWVER

SEQ ID NO: 51771 - protein, 9 aa, Homo Sapiens
EVASYGLQH

SEQ ID NO: 51772 - protein, 9 aa, Homo Sapiens
EVAVKCINK

SEQ ID NO: 51773 - protein, 9 aa, Homo Sapiens
EVCDDFLVY

SEQ ID NO: 51774 - protein, 9 aa, Homo Sapiens
EVCDELMSR

SEQ ID NO: 51775 - protein, 9 aa, Homo Sapiens
EVCEVTRVK

SEQ ID NO: 51776 - protein, 9 aa, Homo Sapiens
EVCGNALMK

SEQ ID NO: 51777 - protein, 9 aa, Homo Sapiens
EVCPLSESR

SEQ ID NO: 51778 - protein, 9 aa, Homo Sapiens
EVCQKFFRH

SEQ ID NO: 51779 - protein, 9 aa, Homo Sapiens
EVCRIYLLR

SEQ ID NO: 51780 - protein, 9 aa, Homo Sapiens
EVCSAIFSK

SEQ ID NO: 51781 - protein, 9 aa, Homo Sapiens
EVCSLLLSY

SEQ ID NO: 51782 - protein, 9 aa, Homo Sapiens
EVDAAMAAR

SEQ ID NO: 51783 - protein, 9 aa, Homo Sapiens
EVDDRGLYK

SEQ ID NO: 51784 - protein, 9 aa, Homo Sapiens
EVDPDTILK

SEQ ID NO: 51785 - protein, 9 aa, Homo Sapiens
EVDPTHFEK

SEQ ID NO: 51786 - protein, 9 aa, Homo Sapiens
EVDPTQVHK

SEQ ID NO: 51787 - protein, 9 aa, Homo Sapiens
EVDSRLIAK

SEQ ID NO: 51788 - protein, 9 aa, Homo Sapiens
EVEAAISRK

SEQ ID NO: 51789 - protein, 9 aa, Homo Sapiens
EVEDSIFKK

SEQ ID NO: 51790 - protein, 9 aa, Homo Sapiens
EVFAGVTTH

SEQ ID NO: 51791 - protein, 9 aa, Homo Sapiens
EVFALPLAH

SEQ ID NO: 51792 - protein, 9 aa, Homo Sapiens
EVFDHMMKR

SEQ ID NO: 51793 - protein, 9 aa, Homo Sapiens
EVFDKFSNK

SEQ ID NO: 51794 - protein, 9 aa, Homo Sapiens
EVFEHTVLY

SEQ ID NO: 51795 - protein, 9 aa, Homo Sapiens
EVFEYIIFR

SEQ ID NO: 51796 - protein, 9 aa, Homo Sapiens
EVFFHRYYK

SEQ ID NO: 51797 - protein, 9 aa, Homo Sapiens
EVFFLKATR

SEQ ID NO: 51798 - protein, 9 aa, Homo Sapiens
EVFGQITER

SEQ ID NO: 51799 - protein, 9 aa, Homo Sapiens
EVFKYVISH

SEQ ID NO: 51800 - protein, 9 aa, Homo Sapiens
EVFMKTLNY

SEQ ID NO: 51801 - protein, 9 aa, Homo Sapiens
EVFNELVGK

SEQ ID NO: 51802 - protein, 9 aa, Homo Sapiens
EVFPLAMNY

SEQ ID NO: 51803 - protein, 9 aa, Homo Sapiens
EVFQNANFR

SEQ ID NO: 51804 - protein, 9 aa, Homo Sapiens
EVFSHILKR

SEQ ID NO: 51805 - protein, 9 aa, Homo Sapiens
EVFTGHMGK

SEQ ID NO: 51806 - protein, 9 aa, Homo Sapiens
EVFVGKIPR

SEQ ID NO: 51807 - protein, 9 aa, Homo Sapiens
EVFWRGQKK

SEQ ID NO: 51808 - protein, 9 aa, Homo Sapiens
EVFYFEVTR

SEQ ID NO: 51809 - protein, 9 aa, Homo Sapiens
EVGAGWIGK

SEQ ID NO: 51810 - protein, 9 aa, Homo Sapiens
EVGETLLYY

SEQ ID NO: 51811 - protein, 9 aa, Homo Sapiens
EVGGEALGR

SEQ ID NO: 51812 - protein, 9 aa, Homo Sapiens
EVGKLRIAK

SEQ ID NO: 51813 - protein, 9 aa, Homo Sapiens
EVGPTMTEK

SEQ ID NO: 51814 - protein, 9 aa, Homo Sapiens
EVGPVVSFR

SEQ ID NO: 51815 - protein, 9 aa, Homo Sapiens
EVGQKLINK

SEQ ID NO: 51816 - protein, 9 aa, Homo Sapiens
EVHAVVTVR

SEQ ID NO: 51817 - protein, 9 aa, Homo Sapiens
EVHGFSMGK

SEQ ID NO: 51818 - protein, 9 aa, Homo Sapiens
EVIEALLKK

SEQ ID NO: 51819 - protein, 9 aa, Homo Sapiens
EVIEIMTDR

SEQ ID NO: 51820 - protein, 9 aa, Homo Sapiens
EVIISWSEK

SEQ ID NO: 51821 - protein, 9 aa, Homo Sapiens
EVIKLLQSK

SEQ ID NO: 51822 - protein, 9 aa, Homo Sapiens
EVIKNRFHR

SEQ ID NO: 51823 - protein, 9 aa, Homo Sapiens
EVIKPWITK

SEQ ID NO: 51824 - protein, 9 aa, Homo Sapiens
EVIKQLKEK

SEQ ID NO: 51825 - protein, 9 aa, Homo Sapiens
EVIKSMKPK

SEQ ID NO: 51826 - protein, 9 aa, Homo Sapiens
EVIKVIHGK

SEQ ID NO: 51827 - protein, 9 aa, Homo Sapiens
EVINKLGPR

SEQ ID NO: 51828 - protein, 9 aa, Homo Sapiens
EVINVLINK

SEQ ID NO: 51829 - protein, 9 aa, Homo Sapiens
EVIQGLLKK

SEQ ID NO: 51830 - protein, 9 aa, Homo Sapiens
EVISDLQSK

SEQ ID NO: 51831 - protein, 9 aa, Homo Sapiens
EVISLINTR

SEQ ID NO: 51832 - protein, 9 aa, Homo Sapiens
EVISRGGPR

SEQ ID NO: 51833 - protein, 9 aa, Homo Sapiens
EVKEFLSTK

SEQ ID NO: 51834 - protein, 9 aa, Homo Sapiens
EVKEVAGIK

SEQ ID NO: 51835 - protein, 9 aa, Homo Sapiens
EVKQIGINK

SEQ ID NO: 51836 - protein, 9 aa, Homo Sapiens
EVLAHYSHR

SEQ ID NO: 51837 - protein, 9 aa, Homo Sapiens
EVLAKVREK

SEQ ID NO: 51838 - protein, 9 aa, Homo Sapiens
EVLALILTH

SEQ ID NO: 51839 - protein, 9 aa, Homo Sapiens
EVLALPFKR

SEQ ID NO: 51840 - protein, 9 aa, Homo Sapiens
EVLAWMILH

SEQ ID NO: 51841 - protein, 9 aa, Homo Sapiens
EVLCHIFRY

SEQ ID NO: 51842 - protein, 9 aa, Homo Sapiens
EVLCVLTQK

SEQ ID NO: 51843 - protein, 9 aa, Homo Sapiens
EVLDHKEFK

SEQ ID NO: 51844 - protein, 9 aa, Homo Sapiens
EVLDHVLRI

SEQ ID NO: 51845 - protein, 9 aa, Homo Sapiens
EVLDMLFPK

SEQ ID NO: 51846 - protein, 9 aa, Homo Sapiens
EVLDRVFER

SEQ ID NO: 51847 - protein, 9 aa, Homo Sapiens
EVLDSLQSK

SEQ ID NO: 51848 - protein, 9 aa, Homo Sapiens
EVLDVVITK

SEQ ID NO: 51849 - protein, 9 aa, Homo Sapiens
EVLDYFLRR

SEQ ID NO: 51850 - protein, 9 aa, Homo Sapiens
EVLEEIVTK

SEQ ID NO: 51851 - protein, 9 aa, Homo Sapiens
EVLEPEVTK

SEQ ID NO: 51852 - protein, 9 aa, Homo Sapiens
EVLERVNSK

SEQ ID NO: 51853 - protein, 9 aa, Homo Sapiens
EVLFNLGSK

SEQ ID NO: 51854 - protein, 9 aa, Homo Sapiens
EVLGILRYI

SEQ ID NO: 51855 - protein, 9 aa, Homo Sapiens
EVLGLILRY

SEQ ID NO: 51856 - protein, 9 aa, Homo Sapiens
EVLGPHLER

SEQ ID NO: 51857 - protein, 9 aa, Homo Sapiens
EVLISRVYR

SEQ ID NO: 51858 - protein, 9 aa, Homo Sapiens
EVLKAAENK

SEQ ID NO: 51859 - protein, 9 aa, Homo Sapiens
EVLKKYLQK

SEQ ID NO: 51860 - protein, 9 aa, Homo Sapiens
EVLKNRAIK

SEQ ID NO: 51861 - protein, 9 aa, Homo Sapiens
EVLKQLAEK

SEQ ID NO: 51862 - protein, 9 aa, Homo Sapiens
EVLKSVVAK

SEQ ID NO: 51863 - protein, 9 aa, Homo Sapiens
EVLKYLRSK

SEQ ID NO: 51864 - protein, 9 aa, Homo Sapiens
EVLNFLLRY

SEQ ID NO: 51865 - protein, 9 aa, Homo Sapiens
EVLNLLTNK

SEQ ID NO: 51866 - protein, 9 aa, Homo Sapiens
EVLNRIQFR

SEQ ID NO: 51867 - protein, 9 aa, Homo Sapiens
EVLNTLIHH

SEQ ID NO: 51868 - protein, 9 aa, Homo Sapiens
EVLPKPRMR

SEQ ID NO: 51869 - protein, 9 aa, Homo Sapiens
EVLPKYFKH

SEQ ID NO: 51870 - protein, 9 aa, Homo Sapiens
EVLPPIHAY

SEQ ID NO: 51871 - protein, 9 aa, Homo Sapiens
EVLPTKMSY

SEQ ID NO: 51872 - protein, 9 aa, Homo Sapiens
EVLQDPVLK

SEQ ID NO: 51873 - protein, 9 aa, Homo Sapiens
EVLQGGSQR

SEQ ID NO: 51874 - protein, 9 aa, Homo Sapiens
EVLQPLQQR

SEQ ID NO: 51875 - protein, 9 aa, Homo Sapiens
EVLQYQLQH

SEQ ID NO: 51876 - protein, 9 aa, Homo Sapiens
EVLRLILTH

SEQ ID NO: 51877 - protein, 9 aa, Homo Sapiens
EVLSDPQTR

SEQ ID NO: 51878 - protein, 9 aa, Homo Sapiens
EVLTQLPPK

SEQ ID NO: 51879 - protein, 9 aa, Homo Sapiens
EVLVAILRH

SEQ ID NO: 51880 - protein, 9 aa, Homo Sapiens
EVLVSKVSK

SEQ ID NO: 51881 - protein, 9 aa, Homo Sapiens
EVLYSIAEK

SEQ ID NO: 51882 - protein, 9 aa, Homo Sapiens
EVLYYTVEK

SEQ ID NO: 51883 - protein, 9 aa, Homo Sapiens
EVMARFAAR

SEQ ID NO: 51884 - protein, 9 aa, Homo Sapiens
EVMEAMGIK

SEQ ID NO: 51885 - protein, 9 aa, Homo Sapiens
EVMENPSCR

SEQ ID NO: 51886 - protein, 9 aa, Homo Sapiens
EVMGTGAVR

SEQ ID NO: 51887 - protein, 9 aa, Homo Sapiens
EVMNQNLAY

SEQ ID NO: 51888 - protein, 9 aa, Homo Sapiens
EVMPLLLAY

SEQ ID NO: 51889 - protein, 9 aa, Homo Sapiens
EVMPVLEEK

SEQ ID NO: 51890 - protein, 9 aa, Homo Sapiens
EVMQAVARL

SEQ ID NO: 51891 - protein, 9 aa, Homo Sapiens
EVNASPLKH

SEQ ID NO: 51892 - protein, 9 aa, Homo Sapiens
EVNAWLVHR

SEQ ID NO: 51893 - protein, 9 aa, Homo Sapiens
EVNENILHK

SEQ ID NO: 51894 - protein, 9 aa, Homo Sapiens
EVNIPTDLR

SEQ ID NO: 51895 - protein, 9 aa, Homo Sapiens
EVNKFQMAY

SEQ ID NO: 51896 - protein, 9 aa, Homo Sapiens
EVNQETIQR

SEQ ID NO: 51897 - protein, 9 aa, Homo Sapiens
EVNRPQIHK

SEQ ID NO: 51898 - protein, 9 aa, Homo Sapiens
EVNSGFFYK

SEQ ID NO: 51899 - protein, 9 aa, Homo Sapiens
EVNSHLLDK

SEQ ID NO: 51900 - protein, 9 aa, Homo Sapiens
EVNTETLNK

SEQ ID NO: 51901 - protein, 9 aa, Homo Sapiens
EVPGLFIEK

SEQ ID NO: 51902 - protein, 9 aa, Homo Sapiens
EVPSFTMGR

SEQ ID NO: 51903 - protein, 9 aa, Homo Sapiens
EVQALFLRH

SEQ ID NO: 51904 - protein, 9 aa, Homo Sapiens
EVRDLFQMK

SEQ ID NO: 51905 - protein, 9 aa, Homo Sapiens
EVRGGGLTR

SEQ ID NO: 51906 - protein, 9 aa, Homo Sapiens
EVRLGGSLR

SEQ ID NO: 51907 - protein, 9 aa, Homo Sapiens
EVRPGIVSK

SEQ ID NO: 51908 - protein, 9 aa, Homo Sapiens
EVRPVVVPK

SEQ ID NO: 51909 - protein, 9 aa, Homo Sapiens
EVSAAIIQR

SEQ ID NO: 51910 - protein, 9 aa, Homo Sapiens
EVSAEVRER

SEQ ID NO: 51911 - protein, 9 aa, Homo Sapiens
EVSEMLLQH

SEQ ID NO: 51912 - protein, 9 aa, Homo Sapiens
EVSGCGSLR

SEQ ID NO: 51913 - protein, 9 aa, Homo Sapiens
EVSKDTVMK

SEQ ID NO: 51914 - protein, 9 aa, Homo Sapiens
EVSLTLTNK

SEQ ID NO: 51915 - protein, 9 aa, Homo Sapiens
EVSPETMVK

SEQ ID NO: 51916 - protein, 9 aa, Homo Sapiens
EVSPMQLIK

SEQ ID NO: 51917 - protein, 9 aa, Homo Sapiens
EVSSIIKKK

SEQ ID NO: 51918 - protein, 9 aa, Homo Sapiens
EVSSLISEK

SEQ ID NO: 51919 - protein, 9 aa, Homo Sapiens
EVSSMPACK

SEQ ID NO: 51920 - protein, 9 aa, Homo Sapiens
EVSSMVLTK

SEQ ID NO: 51921 - protein, 9 aa, Homo Sapiens
EVSSVSPLK

SEQ ID NO: 51922 - protein, 9 aa, Homo Sapiens
EVSTVIFKK

SEQ ID NO: 51923 - protein, 9 aa, Homo Sapiens
EVSTVNVRR

SEQ ID NO: 51924 - protein, 9 aa, Homo Sapiens
EVSWKVLER

SEQ ID NO: 51925 - protein, 9 aa, Homo Sapiens
EVTDYAIAR

SEQ ID NO: 51926 - protein, 9 aa, Homo Sapiens
EVTDYTTGR

SEQ ID NO: 51927 - protein, 9 aa, Homo Sapiens
EVTELLLKH

SEQ ID NO: 51928 - protein, 9 aa, Homo Sapiens
EVTESPLVK

SEQ ID NO: 51929 - protein, 9 aa, Homo Sapiens
EVTNIITSK

SEQ ID NO: 51930 - protein, 9 aa, Homo Sapiens
EVTTAVTEK

SEQ ID NO: 51931 - protein, 9 aa, Homo Sapiens
EVTTTVLVR

SEQ ID NO: 51932 - protein, 9 aa, Homo Sapiens
EVVAKFLHK

SEQ ID NO: 51933 - protein, 9 aa, Homo Sapiens
EVVASAALR

SEQ ID NO: 51934 - protein, 9 aa, Homo Sapiens
EVVDLLLAR

SEQ ID NO: 51935 - protein, 9 aa, Homo Sapiens
EVVDSLVGK

SEQ ID NO: 51936 - protein, 9 aa, Homo Sapiens
EVVDVTWRY

SEQ ID NO: 51937 - protein, 9 aa, Homo Sapiens
EVVETPLLH

SEQ ID NO: 51938 - protein, 9 aa, Homo Sapiens
EVVGRVTAK

SEQ ID NO: 51939 - protein, 9 aa, Homo Sapiens
EVVGSVQGK

SEQ ID NO: 51940 - protein, 9 aa, Homo Sapiens
EVVHLILFY

SEQ ID NO: 51941 - protein, 9 aa, Homo Sapiens
EVVHPGDLK

SEQ ID NO: 51942 - protein, 9 aa, Homo Sapiens
EVVNKIRLK

SEQ ID NO: 51943 - protein, 9 aa, Homo Sapiens
EVVNLLLRH

SEQ ID NO: 51944 - protein, 9 aa, Homo Sapiens
EVVPRVTKK

SEQ ID NO: 51945 - protein, 9 aa, Homo Sapiens
EVVPVLSEK

SEQ ID NO: 51946 - protein, 9 aa, Homo Sapiens
EVVQITWNR

SEQ ID NO: 51947 - protein, 9 aa, Homo Sapiens
EVVSGVVSK

SEQ ID NO: 51948 - protein, 9 aa, Homo Sapiens
EVVVSGKLR

SEQ ID NO: 51949 - protein, 9 aa, Homo Sapiens
EVVYRFTAR

SEQ ID NO: 51950 - protein, 9 aa, Homo Sapiens
EVWDVKNYK

SEQ ID NO: 51951 - protein, 9 aa, Homo Sapiens
EVWNFTTGK

SEQ ID NO: 51952 - protein, 9 aa, Homo Sapiens
EVWPHSTER

SEQ ID NO: 51953 - protein, 9 aa, Homo Sapiens
EVYAGSHQY

SEQ ID NO: 51954 - protein, 9 aa, Homo Sapiens
EVYCDVAPK

SEQ ID NO: 51955 - protein, 9 aa, Homo Sapiens
EVYDDFLHY

SEQ ID NO: 51956 - protein, 9 aa, Homo Sapiens
EVYEGALLY

SEQ ID NO: 51957 - protein, 9 aa, Homo Sapiens
EVYEKPVQV

SEQ ID NO: 51958 - protein, 9 aa, Homo Sapiens
EVYKMLQEK

SEQ ID NO: 51959 - protein, 9 aa, Homo Sapiens
EVYLASLEK

SEQ ID NO: 51960 - protein, 9 aa, Homo Sapiens
EVYNEFVRK

SEQ ID NO: 51961 - protein, 9 aa, Homo Sapiens
EVYPTSLTK

SEQ ID NO: 51962 - protein, 9 aa, Homo Sapiens
EVYRHFTGH

SEQ ID NO: 51963 - protein, 9 aa, Homo Sapiens
EVYSTEIKK

SEQ ID NO: 51964 - protein, 9 aa, Homo Sapiens
EVYVGAVNR

SEQ ID NO: 51965 - protein, 9 aa, Homo Sapiens
EVYVPHTVY

SEQ ID NO: 51966 - protein, 9 aa, Homo Sapiens
EVYYGHTNY

SEQ ID NO: 51967 - protein, 9 aa, Homo Sapiens
FAAGVWLAR

SEQ ID NO: 51968 - protein, 9 aa, Homo Sapiens
FAFEGILIK

SEQ ID NO: 51969 - protein, 9 aa, Homo Sapiens
FAFGGLCER

SEQ ID NO: 51970 - protein, 9 aa, Homo Sapiens
FAGKLSYVK

SEQ ID NO: 51971 - protein, 9 aa, Homo Sapiens
FAIGSQTTK

SEQ ID NO: 51972 - protein, 9 aa, Homo Sapiens
FALWPMLQK

SEQ ID NO: 51973 - protein, 9 aa, Homo Sapiens
FALYAVIEK

SEQ ID NO: 51974 - protein, 9 aa, Homo Sapiens
FASDPILYR

SEQ ID NO: 51975 - protein, 9 aa, Homo Sapiens
FASQEIAEK

SEQ ID NO: 51976 - protein, 9 aa, Homo Sapiens
FASQGGLAR

SEQ ID NO: 51977 - protein, 9 aa, Homo Sapiens
FATPVFITK

SEQ ID NO: 51978 - protein, 9 aa, Homo Sapiens
FAVGPIIEK

SEQ ID NO: 51979 - protein, 9 aa, Homo Sapiens
FAWHPHTNK

SEQ ID NO: 51980 - protein, 9 aa, Homo Sapiens
FAYTVSTQR

SEQ ID NO: 51981 - protein, 9 aa, Homo Sapiens
FDAPPALPK

SEQ ID NO: 51982 - protein, 9 aa, Homo Sapiens
FIASVFMLH

SEQ ID NO: 51983 - protein, 9 aa, Homo Sapiens
FICPALIYK

SEQ ID NO: 51984 - protein, 9 aa, Homo Sapiens
FILPTGANK

SEQ ID NO: 51985 - protein, 9 aa, Homo Sapiens
FINMPSVAK

SEQ ID NO: 51986 - protein, 9 aa, Homo Sapiens
FISKVSTHK

SEQ ID NO: 51987 - protein, 9 aa, Homo Sapiens
FIYLGEVFK

SEQ ID NO: 51988 - protein, 9 aa, Homo Sapiens
FIYRPIRQR

SEQ ID NO: 51989 - protein, 9 aa, Homo Sapiens
FNYKPILTK

SEQ ID NO: 51990 - protein, 9 aa, Homo Sapiens
FPRKPSAPK

SEQ ID NO: 51991 - protein, 9 aa, Homo Sapiens
FSAPLFLSH

SEQ ID NO: 51992 - protein, 9 aa, Homo Sapiens
FSAPNYCYR

SEQ ID NO: 51993 - protein, 9 aa, Homo Sapiens
FSATLAYKK

SEQ ID NO: 51994 - protein, 9 aa, Homo Sapiens
FSCDMAVPK

SEQ ID NO: 51995 - protein, 9 aa, Homo Sapiens
FSLGIGASK

SEQ ID NO: 51996 - protein, 9 aa, Homo Sapiens
FSTSVVHTK

SEQ ID NO: 51997 - protein, 9 aa, Homo Sapiens
FSVGETTAK

SEQ ID NO: 51998 - protein, 9 aa, Homo Sapiens
FSVKPLKQK

SEQ ID NO: 51999 - protein, 9 aa, Homo Sapiens
FTAKTSCVR

SEQ ID NO: 52000 - protein, 9 aa, Homo Sapiens
FTAPPVLGK

SEQ ID NO: 52001 - protein, 9 aa, Homo Sapiens
FTAPSTVGK

SEQ ID NO: 52002 - protein, 9 aa, Homo Sapiens
FTDPPVKTK

SEQ ID NO: 52003 - protein, 9 aa, Homo Sapiens
FTFFIHNPK

SEQ ID NO: 52004 - protein, 9 aa, Homo Sapiens
FTFLPGHQK

SEQ ID NO: 52005 - protein, 9 aa, Homo Sapiens
FTFNRQPLR

SEQ ID NO: 52006 - protein, 9 aa, Homo Sapiens
FTGPPTFPK

SEQ ID NO: 52007 - protein, 9 aa, Homo Sapiens
FTIDSRLQR

SEQ ID NO: 52008 - protein, 9 aa, Homo Sapiens
FTIKRFLAK

SEQ ID NO: 52009 - protein, 9 aa, Homo Sapiens
FTLDNILSH

SEQ ID NO: 52010 - protein, 9 aa, Homo Sapiens
FTMKTSCVR

SEQ ID NO: 52011 - protein, 9 aa, Homo Sapiens
FTMLSIRNK

SEQ ID NO: 52012 - protein, 9 aa, Homo Sapiens
FTMPNTIKH

SEQ ID NO: 52013 - protein, 9 aa, Homo Sapiens
FTNERFPLR

SEQ ID NO: 52014 - protein, 9 aa, Homo Sapiens
FTNKPTTFR

SEQ ID NO: 52015 - protein, 9 aa, Homo Sapiens
FTQKPGFPK

SEQ ID NO: 52016 - protein, 9 aa, Homo Sapiens
FTRGKGPLK

SEQ ID NO: 52017 - protein, 9 aa, Homo Sapiens
FTSGYIPAR

SEQ ID NO: 52018 - protein, 9 aa, Homo Sapiens
FTSMTRLYY

SEQ ID NO: 52019 - protein, 9 aa, Homo Sapiens
FTSPISVTK

SEQ ID NO: 52020 - protein, 9 aa, Homo Sapiens
FTSPPSLFK

SEQ ID NO: 52021 - protein, 9 aa, Homo Sapiens
FTSSTTLTK

SEQ ID NO: 52022 - protein, 9 aa, Homo Sapiens
FTSVDLTNK

SEQ ID NO: 52023 - protein, 9 aa, Homo Sapiens
FTTGFHTKK

SEQ ID NO: 52024 - protein, 9 aa, Homo Sapiens
FTTGMAAVK

SEQ ID NO: 52025 - protein, 9 aa, Homo Sapiens
FTTVGSAEK

SEQ ID NO: 52026 - protein, 9 aa, Homo Sapiens
FTVGRYLAK

SEQ ID NO: 52027 - protein, 9 aa, Homo Sapiens
FTVTVGNNR

SEQ ID NO: 52028 - protein, 9 aa, Homo Sapiens
FTYDPWIGK

SEQ ID NO: 52029 - protein, 9 aa, Homo Sapiens
FTYMNPAQR

SEQ ID NO: 52030 - protein, 9 aa, Homo Sapiens
FVAQPGLSR

SEQ ID NO: 52031 - protein, 9 aa, Homo Sapiens
FVAQVLVGK

SEQ ID NO: 52032 - protein, 9 aa, Homo Sapiens
FVCERTLKY

SEQ ID NO: 52033 - protein, 9 aa, Homo Sapiens
FVDKIREYK

SEQ ID NO: 52034 - protein, 9 aa, Homo Sapiens
FVFDHALMK

SEQ ID NO: 52035 - protein, 9 aa, Homo Sapiens
FVFDRPVHR

SEQ ID NO: 52036 - protein, 9 aa, Homo Sapiens
FVFKITTTK

SEQ ID NO: 52037 - protein, 9 aa, Homo Sapiens
FVFKPNSKK

SEQ ID NO: 52038 - protein, 9 aa, Homo Sapiens
FVGPPGVGK

SEQ ID NO: 52039 - protein, 9 aa, Homo Sapiens
FVHGGVTMK

SEQ ID NO: 52040 - protein, 9 aa, Homo Sapiens
FVIDAVRTK

SEQ ID NO: 52041 - protein, 9 aa, Homo Sapiens
FVIDPGFAK

SEQ ID NO: 52042 - protein, 9 aa, Homo Sapiens
FVKRQFMNK

SEQ ID NO: 52043 - protein, 9 aa, Homo Sapiens
FVMGVNHEK

SEQ ID NO: 52044 - protein, 9 aa, Homo Sapiens
FVPKPGSLK

SEQ ID NO: 52045 - protein, 9 aa, Homo Sapiens
FVSAKITNK

SEQ ID NO: 52046 - protein, 9 aa, Homo Sapiens
FVYEPKEQK

SEQ ID NO: 52047 - protein, 9 aa, Homo Sapiens
FVYEVTSTK

SEQ ID NO: 52048 - protein, 9 aa, Homo Sapiens
FVYGSGVYR

SEQ ID NO: 52049 - protein, 9 aa, Homo Sapiens
GFQNALIVR

SEQ ID NO: 52050 - protein, 9 aa, Homo Sapiens
GKYLYEIAR

SEQ ID NO: 52051 - protein, 9 aa, Homo Sapiens
GTCGVLLRK

SEQ ID NO: 52052 - protein, 9 aa, Homo Sapiens
GTFPRAFKK

SEQ ID NO: 52053 - protein, 9 aa, Homo Sapiens
GTLDYILQR

SEQ ID NO: 52054 - protein, 9 aa, Homo Sapiens
GTMPVSLLK

SEQ ID NO: 52055 - protein, 9 aa, Homo Sapiens
GTMTGMLYK

SEQ ID NO: 52056 - protein, 9 aa, Homo Sapiens
GTYHGMTLK

SEQ ID NO: 52057 - protein, 9 aa, Homo Sapiens
GTYVSSVPR

SEQ ID NO: 52058 - protein, 9 aa, Homo Sapiens
GVADKILKK

SEQ ID NO: 52059 - protein, 9 aa, Homo Sapiens
GVLAWVKEK

SEQ ID NO: 52060 - protein, 9 aa, Homo Sapiens
GVMVGMGQK

SEQ ID NO: 52061 - protein, 9 aa, Homo Sapiens
GVSAAFAVK

SEQ ID NO: 52062 - protein, 9 aa, Homo Sapiens
HAADPIITR

SEQ ID NO: 52063 - protein, 9 aa, Homo Sapiens
HAKGIVLEK

SEQ ID NO: 52064 - protein, 9 aa, Homo Sapiens
HAVGIVVNK

SEQ ID NO: 52065 - protein, 9 aa, Homo Sapiens
HAVPPLVPK

SEQ ID NO: 52066 - protein, 9 aa, Homo Sapiens
HIAEPNYGK

SEQ ID NO: 52067 - protein, 9 aa, Homo Sapiens
HIFMKVFPK

SEQ ID NO: 52068 - protein, 9 aa, Homo Sapiens
HIHKSLIGK

SEQ ID NO: 52069 - protein, 9 aa, Homo Sapiens
HILDGSPEK

SEQ ID NO: 52070 - protein, 9 aa, Homo Sapiens
HILTALREK

SEQ ID NO: 52071 - protein, 9 aa, Homo Sapiens
HISGVFATK

SEQ ID NO: 52072 - protein, 9 aa, Homo Sapiens
HLISPLIQK

SEQ ID NO: 52073 - protein, 9 aa, Homo Sapiens
HNCDTILKH

SEQ ID NO: 52074 - protein, 9 aa, Homo Sapiens
HSAPGGPSY

SEQ ID NO: 52075 - protein, 9 aa, Homo Sapiens
HSLLPLAEK

SEQ ID NO: 52076 - protein, 9 aa, Homo Sapiens
HSLSPGPSK

SEQ ID NO: 52077 - protein, 9 aa, Homo Sapiens
HSMDFVAYR

SEQ ID NO: 52078 - protein, 9 aa, Homo Sapiens
HSNIASLVK

SEQ ID NO: 52079 - protein, 9 aa, Homo Sapiens
HSNIPCLSK

SEQ ID NO: 52080 - protein, 9 aa, Homo Sapiens
HSSRFIPLK

SEQ ID NO: 52081 - protein, 9 aa, Homo Sapiens
HTANIFSVK

SEQ ID NO: 52082 - protein, 9 aa, Homo Sapiens
HTAPNVPHY

SEQ ID NO: 52083 - protein, 9 aa, Homo Sapiens
HTASDFVAK

SEQ ID NO: 52084 - protein, 9 aa, Homo Sapiens
HTAVVYTEK

SEQ ID NO: 52085 - protein, 9 aa, Homo Sapiens
HTAWLVMEY

SEQ ID NO: 52086 - protein, 9 aa, Homo Sapiens
HTDKGSFLK

SEQ ID NO: 52087 - protein, 9 aa, Homo Sapiens
HTFGGPLLK

SEQ ID NO: 52088 - protein, 9 aa, Homo Sapiens
HTGYPGGFR

SEQ ID NO: 52089 - protein, 9 aa, Homo Sapiens
HTIAPMGTR

SEQ ID NO: 52090 - protein, 9 aa, Homo Sapiens
HTIDWVREK

SEQ ID NO: 52091 - protein, 9 aa, Homo Sapiens
HTIGKTVEY

SEQ ID NO: 52092 - protein, 9 aa, Homo Sapiens
HTISKVTVK

SEQ ID NO: 52093 - protein, 9 aa, Homo Sapiens
HTISPFMNK

SEQ ID NO: 52094 - protein, 9 aa, Homo Sapiens
HTLDVFKRK

SEQ ID NO: 52095 - protein, 9 aa, Homo Sapiens
HTLEPLIPR

SEQ ID NO: 52096 - protein, 9 aa, Homo Sapiens
HTLFEFVFK

SEQ ID NO: 52097 - protein, 9 aa, Homo Sapiens
HTMGFWLTK

SEQ ID NO: 52098 - protein, 9 aa, Homo Sapiens
HTNFHIPKK

SEQ ID NO: 52099 - protein, 9 aa, Homo Sapiens
HTNPGAFGK

SEQ ID NO: 52100 - protein, 9 aa, Homo Sapiens
HTPPPGFEK

SEQ ID NO: 52101 - protein, 9 aa, Homo Sapiens
HTSQVLVDK

SEQ ID NO: 52102 - protein, 9 aa, Homo Sapiens
HTSVPLLLR

SEQ ID NO: 52103 - protein, 9 aa, Homo Sapiens
HTTLVVTTK

SEQ ID NO: 52104 - protein, 9 aa, Homo Sapiens
HTTPVLLAH

SEQ ID NO: 52105 - protein, 9 aa, Homo Sapiens
HTVVPSISK

SEQ ID NO: 52106 - protein, 9 aa, Homo Sapiens
HTWSPHLNK

SEQ ID NO: 52107 - protein, 9 aa, Homo Sapiens
HTYQSPLLY

SEQ ID NO: 52108 - protein, 9 aa, Homo Sapiens
HTYYKFDYK

SEQ ID NO: 52109 - protein, 9 aa, Homo Sapiens
HVAAPYIAK

SEQ ID NO: 52110 - protein, 9 aa, Homo Sapiens
HVAYSWSEK

SEQ ID NO: 52111 - protein, 9 aa, Homo Sapiens
HVDDPMRFK

SEQ ID NO: 52112 - protein, 9 aa, Homo Sapiens
HVDFPVGNK

SEQ ID NO: 52113 - protein, 9 aa, Homo Sapiens
HVFGRSLLR

SEQ ID NO: 52114 - protein, 9 aa, Homo Sapiens
HVGISFVPK

SEQ ID NO: 52115 - protein, 9 aa, Homo Sapiens
HVGYTLSYK

SEQ ID NO: 52116 - protein, 9 aa, Homo Sapiens
HVHEPNPLR

SEQ ID NO: 52117 - protein, 9 aa, Homo Sapiens
HVIETLIGK

SEQ ID NO: 52118 - protein, 9 aa, Homo Sapiens
HVLPSTIKK

SEQ ID NO: 52119 - protein, 9 aa, Homo Sapiens
HVMEVYSWK

SEQ ID NO: 52120 - protein, 9 aa, Homo Sapiens
HVPGFCLPK

SEQ ID NO: 52121 - protein, 9 aa, Homo Sapiens
HVPSPAVPK

SEQ ID NO: 52122 - protein, 9 aa, Homo Sapiens
HVTDKIIMK

SEQ ID NO: 52123 - protein, 9 aa, Homo Sapiens
HVTDPFIRR

SEQ ID NO: 52124 - protein, 9 aa, Homo Sapiens
HVTKFFNYK

SEQ ID NO: 52125 - protein, 9 aa, Homo Sapiens
HVTPPPIPK

SEQ ID NO: 52126 - protein, 9 aa, Homo Sapiens
HVVDIVALK

SEQ ID NO: 52127 - protein, 9 aa, Homo Sapiens
HVVLPVKPK

SEQ ID NO: 52128 - protein, 9 aa, Homo Sapiens
HVVSEGVPR

SEQ ID NO: 52129 - protein, 9 aa, Homo Sapiens
HVYSWPKNK

SEQ ID NO: 52130 - protein, 9 aa, Homo Sapiens
HVYVGNISK

SEQ ID NO: 52131 - protein, 9 aa, Homo Sapiens
IAASSIAAK

SEQ ID NO: 52132 - protein, 9 aa, Homo Sapiens
IDERAINKK

SEQ ID NO: 52133 - protein, 9 aa, Homo Sapiens
IDERTINKK

SEQ ID NO: 52134 - protein, 9 aa, Homo Sapiens
IINRPNTPK

SEQ ID NO: 52135 - protein, 9 aa, Homo Sapiens
IIYRMTNQK

SEQ ID NO: 52136 - protein, 9 aa, Homo Sapiens
ILGPNLGDK

SEQ ID NO: 52137 - protein, 9 aa, Homo Sapiens
IPAQPSVAK

SEQ ID NO: 52138 - protein, 9 aa, Homo Sapiens
IPTSFSPLK

SEQ ID NO: 52139 - protein, 9 aa, Homo Sapiens
IPYAGETLK

SEQ ID NO: 52140 - protein, 9 aa, Homo Sapiens
ITAGDFQNK

SEQ ID NO: 52141 - protein, 9 aa, Homo Sapiens
ITGDFALVK

SEQ ID NO: 52142 - protein, 9 aa, Homo Sapiens
ITGPNMGGK

SEQ ID NO: 52143 - protein, 9 aa, Homo Sapiens
ITLPAGTEK

SEQ ID NO: 52144 - protein, 9 aa, Homo Sapiens
ITNEVLQTK

SEQ ID NO: 52145 - protein, 9 aa, Homo Sapiens
ITSPVVTQK

SEQ ID NO: 52146 - protein, 9 aa, Homo Sapiens
ITSSNFLHY

SEQ ID NO: 52147 - protein, 9 aa, Homo Sapiens
ITSTPGVPK

SEQ ID NO: 52148 - protein, 9 aa, Homo Sapiens
ITTGNSPPR

SEQ ID NO: 52149 - protein, 9 aa, Homo Sapiens
ITVGDIGPK

SEQ ID NO: 52150 - protein, 9 aa, Homo Sapiens
ITWERIISH

SEQ ID NO: 52151 - protein, 9 aa, Homo Sapiens
IVAGSLITK

SEQ ID NO: 52152 - protein, 9 aa, Homo Sapiens
IVAGTLTNK

SEQ ID NO: 52153 - protein, 9 aa, Homo Sapiens
IVGDPSTAK

SEQ ID NO: 52154 - protein, 9 aa, Homo Sapiens
IVIPPATEK

SEQ ID NO: 52155 - protein, 9 aa, Homo Sapiens
IVKPPASAR

SEQ ID NO: 52156 - protein, 9 aa, Homo Sapiens
IVMETGNTK

SEQ ID NO: 52157 - protein, 9 aa, Homo Sapiens
IVNRGITPK

SEQ ID NO: 52158 - protein, 9 aa, Homo Sapiens
IVPVPLAEK

SEQ ID NO: 52159 - protein, 9 aa, Homo Sapiens
IVSGPPSHK

SEQ ID NO: 52160 - protein, 9 aa, Homo Sapiens
IVSSGFSSK

SEQ ID NO: 52161 - protein, 9 aa, Homo Sapiens
IVTDFSVIK

SEQ ID NO: 52162 - protein, 9 aa, Homo Sapiens
IVYEKIMEH

SEQ ID NO: 52163 - protein, 9 aa, Homo Sapiens
IVYPPPPAK

SEQ ID NO: 52164 - protein, 9 aa, Homo Sapiens
KADPPLPAR

SEQ ID NO: 52165 - protein, 9 aa, Homo Sapiens
KTLYPIIGK

SEQ ID NO: 52166 - protein, 9 aa, Homo Sapiens
LAAEPVRAK

SEQ ID NO: 52167 - protein, 9 aa, Homo Sapiens
LAAPASLRP

SEQ ID NO: 52168 - protein, 9 aa, Homo Sapiens
LAAPPALEK

SEQ ID NO: 52169 - protein, 9 aa, Homo Sapiens
LALGVTLLK

SEQ ID NO: 52170 - protein, 9 aa, Homo Sapiens
LASQPSIPR

SEQ ID NO: 52171 - protein, 9 aa, Homo Sapiens
LAVRPFLPK

SEQ ID NO: 52172 - protein, 9 aa, Homo Sapiens
LAYRGFIFK

SEQ ID NO: 52173 - protein, 9 aa, Homo Sapiens
LDKLLLCLK

SEQ ID NO: 52174 - protein, 9 aa, Homo Sapiens
LDLLSRIPQ

SEQ ID NO: 52175 - protein, 9 aa, Homo Sapiens
LIPPPLSNR

SEQ ID NO: 52176 - protein, 9 aa, Homo Sapiens
LLAPRASVP

SEQ ID NO: 52177 - protein, 9 aa, Homo Sapiens
LPAKAIGHR

SEQ ID NO: 52178 - protein, 9 aa, Homo Sapiens
LPATHIRGK

SEQ ID NO: 52179 - protein, 9 aa, Homo Sapiens
LPPPGRSLK

SEQ ID NO: 52180 - protein, 9 aa, Homo Sapiens
LPSPVTAQK

SEQ ID NO: 52181 - protein, 9 aa, Homo Sapiens
LSRIKFTGK

SEQ ID NO: 52182 - protein, 9 aa, Homo Sapiens
LSSGAVLYK

SEQ ID NO: 52183 - protein, 9 aa, Homo Sapiens
LTAEAFGFK

SEQ ID NO: 52184 - protein, 9 aa, Homo Sapiens
LTAEQILQH

SEQ ID NO: 52185 - protein, 9 aa, Homo Sapiens
LTAPSTSAR

SEQ ID NO: 52186 - protein, 9 aa, Homo Sapiens
LTEAPLNPK

SEQ ID NO: 52187 - protein, 9 aa, Homo Sapiens
LTFMRFAYK

SEQ ID NO: 52188 - protein, 9 aa, Homo Sapiens
LTGKPVMVK

SEQ ID NO: 52189 - protein, 9 aa, Homo Sapiens
LTGPPGTGK

SEQ ID NO: 52190 - protein, 9 aa, Homo Sapiens
LTGPPGVGK

SEQ ID NO: 52191 - protein, 9 aa, Homo Sapiens
LTGPVMPVR

SEQ ID NO: 52192 - protein, 9 aa, Homo Sapiens
LTGTPLQNK

SEQ ID NO: 52193 - protein, 9 aa, Homo Sapiens
LTHSGFPAK

SEQ ID NO: 52194 - protein, 9 aa, Homo Sapiens
LTMDSSGPK

SEQ ID NO: 52195 - protein, 9 aa, Homo Sapiens
LTMPGGVAK

SEQ ID NO: 52196 - protein, 9 aa, Homo Sapiens
LTTAVITNK

SEQ ID NO: 52197 - protein, 9 aa, Homo Sapiens
LTTESIMKK

SEQ ID NO: 52198 - protein, 9 aa, Homo Sapiens
LTYEFVKQK

SEQ ID NO: 52199 - protein, 9 aa, Homo Sapiens
LTYNDFINK

SEQ ID NO: 52200 - protein, 9 aa, Homo Sapiens
LVAETFAQK

SEQ ID NO: 52201 - protein, 9 aa, Homo Sapiens
LVAGVAFKK

SEQ ID NO: 52202 - protein, 9 aa, Homo Sapiens
LVGPPGTGK

SEQ ID NO: 52203 - protein, 9 aa, Homo Sapiens
LVIPFTIKK

SEQ ID NO: 52204 - protein, 9 aa, Homo Sapiens
LVMEGHLFK

SEQ ID NO: 52205 - protein, 9 aa, Homo Sapiens
LVSPITGEK

SEQ ID NO: 52206 - protein, 9 aa, Homo Sapiens
LVSTPVRTK

SEQ ID NO: 52207 - protein, 9 aa, Homo Sapiens
MAAAAFAEK

SEQ ID NO: 52208 - protein, 9 aa, Homo Sapiens
MAAATLTSK

SEQ ID NO: 52209 - protein, 9 aa, Homo Sapiens
MAFNALIHK

SEQ ID NO: 52210 - protein, 9 aa, Homo Sapiens
MAFSQKNPK

SEQ ID NO: 52211 - protein, 9 aa, Homo Sapiens
MAGPAWISK

SEQ ID NO: 52212 - protein, 9 aa, Homo Sapiens
MAGPGGLAR

SEQ ID NO: 52213 - protein, 9 aa, Homo Sapiens
MASLMPLQK

SEQ ID NO: 52214 - protein, 9 aa, Homo Sapiens
MAYLGTITK

SEQ ID NO: 52215 - protein, 9 aa, Homo Sapiens
MGYYNNSTK

SEQ ID NO: 52216 - protein, 9 aa, Homo Sapiens
MNNKEALPK

SEQ ID NO: 52217 - protein, 9 aa, Homo Sapiens
MNYEGSPIK

SEQ ID NO: 52218 - protein, 9 aa, Homo Sapiens
MPASPVLTK

SEQ ID NO: 52219 - protein, 9 aa, Homo Sapiens
MPFGTGTSK

SEQ ID NO: 52220 - protein, 9 aa, Homo Sapiens
MPWNKRQPK

SEQ ID NO: 52221 - protein, 9 aa, Homo Sapiens
MSASKFTFK

SEQ ID NO: 52222 - protein, 9 aa, Homo Sapiens
MSASTTTLR

SEQ ID NO: 52223 - protein, 9 aa, Homo Sapiens
MSFPKAPLK

SEQ ID NO: 52224 - protein, 9 aa, Homo Sapiens
MSFWTGTAK

SEQ ID NO: 52225 - protein, 9 aa, Homo Sapiens
MSIDKAVTK

SEQ ID NO: 52226 - protein, 9 aa, Homo Sapiens
MSISGSSAR

SEQ ID NO: 52227 - protein, 9 aa, Homo Sapiens
MSLDIVLKK

SEQ ID NO: 52228 - protein, 9 aa, Homo Sapiens
MSLEHLTQK

SEQ ID NO: 52229 - protein, 9 aa, Homo Sapiens
MSLGLVLVH

SEQ ID NO: 52230 - protein, 9 aa, Homo Sapiens
MSLGTTREK

SEQ ID NO: 52231 - protein, 9 aa, Homo Sapiens
MSSPPSAAR

SEQ ID NO: 52232 - protein, 9 aa, Homo Sapiens
MSTATAFYR

SEQ ID NO: 52233 - protein, 9 aa, Homo Sapiens
MSVAKTILK

SEQ ID NO: 52234 - protein, 9 aa, Homo Sapiens
MSYKGSTLK

SEQ ID NO: 52235 - protein, 9 aa, Homo Sapiens
MSYVVTKTK

SEQ ID NO: 52236 - protein, 9 aa, Homo Sapiens
MTAENLAVK

SEQ ID NO: 52237 - protein, 9 aa, Homo Sapiens
MTCRGFREY

SEQ ID NO: 52238 - protein, 9 aa, Homo Sapiens
MTFDSAKSK

SEQ ID NO: 52239 - protein, 9 aa, Homo Sapiens
MTFGIEPFK

SEQ ID NO: 52240 - protein, 9 aa, Homo Sapiens
MTFLEVTGK

SEQ ID NO: 52241 - protein, 9 aa, Homo Sapiens
MTHNLLLNY

SEQ ID NO: 52242 - protein, 9 aa, Homo Sapiens
MTIAQSLEH

SEQ ID NO: 52243 - protein, 9 aa, Homo Sapiens
MTLCQTQMK

SEQ ID NO: 52244 - protein, 9 aa, Homo Sapiens
MTLHERFTK

SEQ ID NO: 52245 - protein, 9 aa, Homo Sapiens
MTLNPSTKR

SEQ ID NO: 52246 - protein, 9 aa, Homo Sapiens
MTLPLWIGK

SEQ ID NO: 52247 - protein, 9 aa, Homo Sapiens
MTMAAEIKK

SEQ ID NO: 52248 - protein, 9 aa, Homo Sapiens
MTNLPAVGR

SEQ ID NO: 52249 - protein, 9 aa, Homo Sapiens
MTNQNTPEY

SEQ ID NO: 52250 - protein, 9 aa, Homo Sapiens
MTNTPVVVR

SEQ ID NO: 52251 - protein, 9 aa, Homo Sapiens
MTPDQALKH

SEQ ID NO: 52252 - protein, 9 aa, Homo Sapiens
MTSLGSYNK

SEQ ID NO: 52253 - protein, 9 aa, Homo Sapiens
MTSVPVKER

SEQ ID NO: 52254 - protein, 9 aa, Homo Sapiens
MTTNSNISR

SEQ ID NO: 52255 - protein, 9 aa, Homo Sapiens
MTWEKRLAK

SEQ ID NO: 52256 - protein, 9 aa, Homo Sapiens
MVADVFSHR

SEQ ID NO: 52257 - protein, 9 aa, Homo Sapiens
MVAHELSNR

SEQ ID NO: 52258 - protein, 9 aa, Homo Sapiens
MVAPAVQEK

SEQ ID NO: 52259 - protein, 9 aa, Homo Sapiens
MVESPLICK

SEQ ID NO: 52260 - protein, 9 aa, Homo Sapiens
MVFGAPVPK

SEQ ID NO: 52261 - protein, 9 aa, Homo Sapiens
MVGPPGTGK

SEQ ID NO: 52262 - protein, 9 aa, Homo Sapiens
MVISIPIKK

SEQ ID NO: 52263 - protein, 9 aa, Homo Sapiens
MVLAHVTNR

SEQ ID NO: 52264 - protein, 9 aa, Homo Sapiens
MVLCPVIGK

SEQ ID NO: 52265 - protein, 9 aa, Homo Sapiens
MVLKPHFHK

SEQ ID NO: 52266 - protein, 9 aa, Homo Sapiens
MVMVKGVNK

SEQ ID NO: 52267 - protein, 9 aa, Homo Sapiens
MVSDKFQVR

SEQ ID NO: 52268 - protein, 9 aa, Homo Sapiens
MVSGPLALR

SEQ ID NO: 52269 - protein, 9 aa, Homo Sapiens
MVSKGFLGR

SEQ ID NO: 52270 - protein, 9 aa, Homo Sapiens
MVTEIRLKY

SEQ ID NO: 52271 - protein, 9 aa, Homo Sapiens
MVTGQTVCK

SEQ ID NO: 52272 - protein, 9 aa, Homo Sapiens
MVVAKLLEK

SEQ ID NO: 52273 - protein, 9 aa, Homo Sapiens
MVVNSPTNK

SEQ ID NO: 52274 - protein, 9 aa, Homo Sapiens
MVYQKAAMR

SEQ ID NO: 52275 - protein, 9 aa, Homo Sapiens
NAAGDFKLK

SEQ ID NO: 52276 - protein, 9 aa, Homo Sapiens
NAAKNFITK

SEQ ID NO: 52277 - protein, 9 aa, Homo Sapiens
NACHSLITK

SEQ ID NO: 52278 - protein, 9 aa, Homo Sapiens
NACKIQLIK

SEQ ID NO: 52279 - protein, 9 aa, Homo Sapiens
NAFEEQLLK

SEQ ID NO: 52280 - protein, 9 aa, Homo Sapiens
NAGAVLNFK

SEQ ID NO: 52281 - protein, 9 aa, Homo Sapiens
NAGKTTILK

SEQ ID NO: 52282 - protein, 9 aa, Homo Sapiens
NAGVPLAAK

SEQ ID NO: 52283 - protein, 9 aa, Homo Sapiens
NALDVAAEK

SEQ ID NO: 52284 - protein, 9 aa, Homo Sapiens
NAMDSPLLK

SEQ ID NO: 52285 - protein, 9 aa, Homo Sapiens
NGYENPTYK

SEQ ID NO: 52286 - protein, 9 aa, Homo Sapiens
NIAEALVSK

SEQ ID NO: 52287 - protein, 9 aa, Homo Sapiens
NIIKAAPRK

SEQ ID NO: 52288 - protein, 9 aa, Homo Sapiens
NIKNSSVPR

SEQ ID NO: 52289 - protein, 9 aa, Homo Sapiens
NINNPFVFK

SEQ ID NO: 52290 - protein, 9 aa, Homo Sapiens
NINRPLTMK

SEQ ID NO: 52291 - protein, 9 aa, Homo Sapiens
NLFGGTAAK

SEQ ID NO: 52292 - protein, 9 aa, Homo Sapiens
NLLDRFLSK

SEQ ID NO: 52293 - protein, 9 aa, Homo Sapiens
NLLGHYLIH

SEQ ID NO: 52294 - protein, 9 aa, Homo Sapiens
NLLKSLIGK

SEQ ID NO: 52295 - protein, 9 aa, Homo Sapiens
NLVPMVATV

SEQ ID NO: 52296 - protein, 9 aa, Homo Sapiens
NPLSPLSAK

SEQ ID NO: 52297 - protein, 9 aa, Homo Sapiens
NSDSPLLPK

SEQ ID NO: 52298 - protein, 9 aa, Homo Sapiens
NSHIALVGK

SEQ ID NO: 52299 - protein, 9 aa, Homo Sapiens
NSKFGSIPK

SEQ ID NO: 52300 - protein, 9 aa, Homo Sapiens
NSMGLFLQK

SEQ ID NO: 52301 - protein, 9 aa, Homo Sapiens
NSSNVKLFK

SEQ ID NO: 52302 - protein, 9 aa, Homo Sapiens
NSSSVALLH

SEQ ID NO: 52303 - protein, 9 aa, Homo Sapiens
NTALLLSKK

SEQ ID NO: 52304 - protein, 9 aa, Homo Sapiens
NTALPLALR

SEQ ID NO: 52305 - protein, 9 aa, Homo Sapiens
NTATPFCNR

SEQ ID NO: 52306 - protein, 9 aa, Homo Sapiens
NTAVSQLTK

SEQ ID NO: 52307 - protein, 9 aa, Homo Sapiens
NTCNIILIY

SEQ ID NO: 52308 - protein, 9 aa, Homo Sapiens
NTDDPLIFK

SEQ ID NO: 52309 - protein, 9 aa, Homo Sapiens
NTDLSRILK

SEQ ID NO: 52310 - protein, 9 aa, Homo Sapiens
NTFGSFQCR

SEQ ID NO: 52311 - protein, 9 aa, Homo Sapiens
NTIDWVREK

SEQ ID NO: 52312 - protein, 9 aa, Homo Sapiens
NTIEKPILR

SEQ ID NO: 52313 - protein, 9 aa, Homo Sapiens
NTIGGFTCK

SEQ ID NO: 52314 - protein, 9 aa, Homo Sapiens
NTITNFSEK

SEQ ID NO: 52315 - protein, 9 aa, Homo Sapiens
NTITPVVGK

SEQ ID NO: 52316 - protein, 9 aa, Homo Sapiens
NTLNKVLKH

SEQ ID NO: 52317 - protein, 9 aa, Homo Sapiens
NTLRDAAPK

SEQ ID NO: 52318 - protein, 9 aa, Homo Sapiens
NTLTSICEK

SEQ ID NO: 52319 - protein, 9 aa, Homo Sapiens
NTMNITISK

SEQ ID NO: 52320 - protein, 9 aa, Homo Sapiens
NTMNQFVNK

SEQ ID NO: 52321 - protein, 9 aa, Homo Sapiens
NTMQQFLQK

SEQ ID NO: 52322 - protein, 9 aa, Homo Sapiens
NTNGFIIAK

SEQ ID NO: 52323 - protein, 9 aa, Homo Sapiens
NTNIPIGNK

SEQ ID NO: 52324 - protein, 9 aa, Homo Sapiens
NTNTAIELK

SEQ ID NO: 52325 - protein, 9 aa, Homo Sapiens
NTTSAVTVK

SEQ ID NO: 52326 - protein, 9 aa, Homo Sapiens
NTVSNIHPK

SEQ ID NO: 52327 - protein, 9 aa, Homo Sapiens
NTYVYAVEK

SEQ ID NO: 52328 - protein, 9 aa, Homo Sapiens
NVAGSIITK

SEQ ID NO: 52329 - protein, 9 aa, Homo Sapiens
NVALTFLEK

SEQ ID NO: 52330 - protein, 9 aa, Homo Sapiens
NVARYFGKK

SEQ ID NO: 52331 - protein, 9 aa, Homo Sapiens
NVDFTRILK

SEQ ID NO: 52332 - protein, 9 aa, Homo Sapiens
NVGPLIIKK

SEQ ID NO: 52333 - protein, 9 aa, Homo Sapiens
NVHGGTILK

SEQ ID NO: 52334 - protein, 9 aa, Homo Sapiens
NVKGPGLQR

SEQ ID NO: 52335 - protein, 9 aa, Homo Sapiens
NVLDIMVTK

SEQ ID NO: 52336 - protein, 9 aa, Homo Sapiens
NVLEKGFLK

SEQ ID NO: 52337 - protein, 9 aa, Homo Sapiens
NVLELTRTK

SEQ ID NO: 52338 - protein, 9 aa, Homo Sapiens
NVLPAFPPK

SEQ ID NO: 52339 - protein, 9 aa, Homo Sapiens
NVNAAILKK

SEQ ID NO: 52340 - protein, 9 aa, Homo Sapiens
NVTDSVINK

SEQ ID NO: 52341 - protein, 9 aa, Homo Sapiens
NVVDIILAH

SEQ ID NO: 52342 - protein, 9 aa, Homo Sapiens
NVVPTFGKK

SEQ ID NO: 52343 - protein, 9 aa, Homo Sapiens
NVVRNISYK

SEQ ID NO: 52344 - protein, 9 aa, Homo Sapiens
NVYCGVHRY

SEQ ID NO: 52345 - protein, 9 aa, Homo Sapiens
NVYEVVNPK

SEQ ID NO: 52346 - protein, 9 aa, Homo Sapiens
NVYIHPTAK

SEQ ID NO: 52347 - protein, 9 aa, Homo Sapiens
NVYYHITSK

SEQ ID NO: 52348 - protein, 9 aa, Homo Sapiens
PDLTTPLKK

SEQ ID NO: 52349 - protein, 9 aa, Homo Sapiens
PDSPITLQS

SEQ ID NO: 52350 - protein, 9 aa, Homo Sapiens
PEFPLSPPK

SEQ ID NO: 52351 - protein, 9 aa, Homo Sapiens
PRSPGPVLR

SEQ ID NO: 52352 - protein, 9 aa, Homo Sapiens
PTEYDSRVK

SEQ ID NO: 52353 - protein, 9 aa, Homo Sapiens
QAADILLYK

SEQ ID NO: 52354 - protein, 9 aa, Homo Sapiens
QAALASQYR

SEQ ID NO: 52355 - protein, 9 aa, Homo Sapiens
QAKLPGIAK

SEQ ID NO: 52356 - protein, 9 aa, Homo Sapiens
QARPPGIYK

SEQ ID NO: 52357 - protein, 9 aa, Homo Sapiens
QILKPSEKK

SEQ ID NO: 52358 - protein, 9 aa, Homo Sapiens
QIYTYFVYK

SEQ ID NO: 52359 - protein, 9 aa, Homo Sapiens
QLGPVVMCK

SEQ ID NO: 52360 - protein, 9 aa, Homo Sapiens
QLYWSHPRK

SEQ ID NO: 52361 - protein, 9 aa, Homo Sapiens
QNAFSLTQK

SEQ ID NO: 52362 - protein, 9 aa, Homo Sapiens
QPTSLAPEK

SEQ ID NO: 52363 - protein, 9 aa, Homo Sapiens
QSIFPTIPK

SEQ ID NO: 52364 - protein, 9 aa, Homo Sapiens
QSSPSFAEK

SEQ ID NO: 52365 - protein, 9 aa, Homo Sapiens
QTAADAFYK

SEQ ID NO: 52366 - protein, 9 aa, Homo Sapiens
QTAGNVFLK

SEQ ID NO: 52367 - protein, 9 aa, Homo Sapiens
QTAGQFQTR

SEQ ID NO: 52368 - protein, 9 aa, Homo Sapiens
QTAQIFFTK

SEQ ID NO: 52369 - protein, 9 aa, Homo Sapiens
QTASFALKK

SEQ ID NO: 52370 - protein, 9 aa, Homo Sapiens
QTCRLLLSY

SEQ ID NO: 52371 - protein, 9 aa, Homo Sapiens
QTFKGLKTK

SEQ ID NO: 52372 - protein, 9 aa, Homo Sapiens
QTFQPLTQR

SEQ ID NO: 52373 - protein, 9 aa, Homo Sapiens
QTFYKFMKR

SEQ ID NO: 52374 - protein, 9 aa, Homo Sapiens
QTHFQLAYR

SEQ ID NO: 52375 - protein, 9 aa, Homo Sapiens
QTIGNVVYH

SEQ ID NO: 52376 - protein, 9 aa, Homo Sapiens
QTIQGILER

SEQ ID NO: 52377 - protein, 9 aa, Homo Sapiens
QTIQSFTLR

SEQ ID NO: 52378 - protein, 9 aa, Homo Sapiens
QTLDISTNR

SEQ ID NO: 52379 - protein, 9 aa, Homo Sapiens
QTLGSTIDK

SEQ ID NO: 52380 - protein, 9 aa, Homo Sapiens
QTLGVVLKH

SEQ ID NO: 52381 - protein, 9 aa, Homo Sapiens
QTLRPSYWK

SEQ ID NO: 52382 - protein, 9 aa, Homo Sapiens
QTLSPQMWK

SEQ ID NO: 52383 - protein, 9 aa, Homo Sapiens
QTLSTQLWK

SEQ ID NO: 52384 - protein, 9 aa, Homo Sapiens
QTLVRILSH

SEQ ID NO: 52385 - protein, 9 aa, Homo Sapiens
QTMSDTTFK

SEQ ID NO: 52386 - protein, 9 aa, Homo Sapiens
QTMSNSGIK

SEQ ID NO: 52387 - protein, 9 aa, Homo Sapiens
QTNPTYLAK

SEQ ID NO: 52388 - protein, 9 aa, Homo Sapiens
QTRPPASLK

SEQ ID NO: 52389 - protein, 9 aa, Homo Sapiens
QTSEKALLR

SEQ ID NO: 52390 - protein, 9 aa, Homo Sapiens
QTSGSLVSK

SEQ ID NO: 52391 - protein, 9 aa, Homo Sapiens
QTTDALIKK

SEQ ID NO: 52392 - protein, 9 aa, Homo Sapiens
QTYGQQLQK

SEQ ID NO: 52393 - protein, 9 aa, Homo Sapiens
QTYSSILKH

SEQ ID NO: 52394 - protein, 9 aa, Homo Sapiens
QTYVGITEK

SEQ ID NO: 52395 - protein, 9 aa, Homo Sapiens
QTYVSGTLR

SEQ ID NO: 52396 - protein, 9 aa, Homo Sapiens
QVADAFLSK

SEQ ID NO: 52397 - protein, 9 aa, Homo Sapiens
QVADVVVSR

SEQ ID NO: 52398 - protein, 9 aa, Homo Sapiens
QVAERALYY

SEQ ID NO: 52399 - protein, 9 aa, Homo Sapiens
QVAPPVLKR

SEQ ID NO: 52400 - protein, 9 aa, Homo Sapiens
QVFEFTEPK

SEQ ID NO: 52401 - protein, 9 aa, Homo Sapiens
QVFEKSPLR

SEQ ID NO: 52402 - protein, 9 aa, Homo Sapiens
QVFQKSLPK

SEQ ID NO: 52403 - protein, 9 aa, Homo Sapiens
QVFSHLKRL

SEQ ID NO: 52404 - protein, 9 aa, Homo Sapiens
QVIPASEPK

SEQ ID NO: 52405 - protein, 9 aa, Homo Sapiens
QVLEHQVKY

SEQ ID NO: 52406 - protein, 9 aa, Homo Sapiens
QVLKQLAEK

SEQ ID NO: 52407 - protein, 9 aa, Homo Sapiens
QVLQLCLRY

SEQ ID NO: 52408 - protein, 9 aa, Homo Sapiens
QVMFPVNSK

SEQ ID NO: 52409 - protein, 9 aa, Homo Sapiens
QVSNWFGNK

SEQ ID NO: 52410 - protein, 9 aa, Homo Sapiens
QVSNWFKNR

SEQ ID NO: 52411 - protein, 9 aa, Homo Sapiens
QVTSQILQK

SEQ ID NO: 52412 - protein, 9 aa, Homo Sapiens
QVVMPPIPK

SEQ ID NO: 52413 - protein, 9 aa, Homo Sapiens
RPPIFIRRL

SEQ ID NO: 52414 - protein, 9 aa, Homo Sapiens
RPSSAFAPK

SEQ ID NO: 52415 - protein, 9 aa, Homo Sapiens
RTLEPLAKK

SEQ ID NO: 52416 - protein, 9 aa, Homo Sapiens
RTYYSPVYR

SEQ ID NO: 52417 - protein, 9 aa, Homo Sapiens
RVKLPSGSK

SEQ ID NO: 52418 - protein, 9 aa, Homo Sapiens
SAAAALVLK

SEQ ID NO: 52419 - protein, 9 aa, Homo Sapiens
SAAGVSMAK

SEQ ID NO: 52420 - protein, 9 aa, Homo Sapiens
SAAKEFFTK

SEQ ID NO: 52421 - protein, 9 aa, Homo Sapiens
SAALPQSQR

SEQ ID NO: 52422 - protein, 9 aa, Homo Sapiens
SAAPAITCR

SEQ ID NO: 52423 - protein, 9 aa, Homo Sapiens
SAAPPTVGR

SEQ ID NO: 52424 - protein, 9 aa, Homo Sapiens
SAFGQAFSK

SEQ ID NO: 52425 - protein, 9 aa, Homo Sapiens
SAFGVIIEK

SEQ ID NO: 52426 - protein, 9 aa, Homo Sapiens
SAGPPSLRK

SEQ ID NO: 52427 - protein, 9 aa, Homo Sapiens
SALGSSSYK

SEQ ID NO: 52428 - protein, 9 aa, Homo Sapiens
SALHIAIEK

SEQ ID NO: 52429 - protein, 9 aa, Homo Sapiens
SALRPSTSR

SEQ ID NO: 52430 - protein, 9 aa, Homo Sapiens
SALSVAPSK

SEQ ID NO: 52431 - protein, 9 aa, Homo Sapiens
SAMERICEK

SEQ ID NO: 52432 - protein, 9 aa, Homo Sapiens
SANECISVK

SEQ ID NO: 52433 - protein, 9 aa, Homo Sapiens
SAPSSSTPF

SEQ ID NO: 52434 - protein, 9 aa, Homo Sapiens
SATDITLRR

SEQ ID NO: 52435 - protein, 9 aa, Homo Sapiens
SAVRPVIEK

SEQ ID NO: 52436 - protein, 9 aa, Homo Sapiens
SIAAAVAPK

SEQ ID NO: 52437 - protein, 9 aa, Homo Sapiens
SILNWVKFK

SEQ ID NO: 52438 - protein, 9 aa, Homo Sapiens
SILSGGTPK

SEQ ID NO: 52439 - protein, 9 aa, Homo Sapiens
SISGPFGSR

SEQ ID NO: 52440 - protein, 9 aa, Homo Sapiens
SLSPVIAPK

SEQ ID NO: 52441 - protein, 9 aa, Homo Sapiens
SLSSPLNPK

SEQ ID NO: 52442 - protein, 9 aa, Homo Sapiens
SPATPLKAK

SEQ ID NO: 52443 - protein, 9 aa, Homo Sapiens
SSALPTTGR

SEQ ID NO: 52444 - protein, 9 aa, Homo Sapiens
SSAPPLTGK

SEQ ID NO: 52445 - protein, 9 aa, Homo Sapiens
SSFLIKRNK

SEQ ID NO: 52446 - protein, 9 aa, Homo Sapiens
SSFSGLLRK

SEQ ID NO: 52447 - protein, 9 aa, Homo Sapiens
SSGPSTPLK

SEQ ID NO: 52448 - protein, 9 aa, Homo Sapiens
SSLPTQLFK

SEQ ID NO: 52449 - protein, 9 aa, Homo Sapiens
SSLSLFFRK

SEQ ID NO: 52450 - protein, 9 aa, Homo Sapiens
SSLYIILKK

SEQ ID NO: 52451 - protein, 9 aa, Homo Sapiens
SSSGLHPPK

SEQ ID NO: 52452 - protein, 9 aa, Homo Sapiens
SSSPRFLPR

SEQ ID NO: 52453 - protein, 9 aa, Homo Sapiens
SSSSPFKFK

SEQ ID NO: 52454 - protein, 9 aa, Homo Sapiens
SSSSPFSNR

SEQ ID NO: 52455 - protein, 9 aa, Homo Sapiens
SSSSPTFPK

SEQ ID NO: 52456 - protein, 9 aa, Homo Sapiens
SSYPVCVSK

SEQ ID NO: 52457 - protein, 9 aa, Homo Sapiens
STAANFLSR

SEQ ID NO: 52458 - protein, 9 aa, Homo Sapiens
STAAYQPIK

SEQ ID NO: 52459 - protein, 9 aa, Homo Sapiens
STASELSPK

SEQ ID NO: 52460 - protein, 9 aa, Homo Sapiens
STASFSAVK

SEQ ID NO: 52461 - protein, 9 aa, Homo Sapiens
STCLTSGLK

SEQ ID NO: 52462 - protein, 9 aa, Homo Sapiens
STCSPIISK

SEQ ID NO: 52463 - protein, 9 aa, Homo Sapiens
STEPPYSQK

SEQ ID NO: 52464 - protein, 9 aa, Homo Sapiens
STFDTQITK

SEQ ID NO: 52465 - protein, 9 aa, Homo Sapiens
STFFYPKLK

SEQ ID NO: 52466 - protein, 9 aa, Homo Sapiens
STFNQVVLK

SEQ ID NO: 52467 - protein, 9 aa, Homo Sapiens
STFRESFKK

SEQ ID NO: 52468 - protein, 9 aa, Homo Sapiens
STFSAPLNK

SEQ ID NO: 52469 - protein, 9 aa, Homo Sapiens
STFSEIFKK

SEQ ID NO: 52470 - protein, 9 aa, Homo Sapiens
STGPITKPK

SEQ ID NO: 52471 - protein, 9 aa, Homo Sapiens
STHGTFLNK

SEQ ID NO: 52472 - protein, 9 aa, Homo Sapiens
STIEYVIQR

SEQ ID NO: 52473 - protein, 9 aa, Homo Sapiens
STIHGKLQE

SEQ ID NO: 52474 - protein, 9 aa, Homo Sapiens
STLDGVSRK

SEQ ID NO: 52475 - protein, 9 aa, Homo Sapiens
STLGHCVLK

SEQ ID NO: 52476 - protein, 9 aa, Homo Sapiens
STLHHVLQR

SEQ ID NO: 52477 - protein, 9 aa, Homo Sapiens
STLNKLIKR

SEQ ID NO: 52478 - protein, 9 aa, Homo Sapiens
STLNVGVNK

SEQ ID NO: 52479 - protein, 9 aa, Homo Sapiens
STLNVMSGK

SEQ ID NO: 52480 - protein, 9 aa, Homo Sapiens
STLPKPVQK

SEQ ID NO: 52481 - protein, 9 aa, Homo Sapiens
STLPKSLLK

SEQ ID NO: 52482 - protein, 9 aa, Homo Sapiens
STLPPVKSK

SEQ ID NO: 52483 - protein, 9 aa, Homo Sapiens
STLPVTVKK

SEQ ID NO: 52484 - protein, 9 aa, Homo Sapiens
STLSPIAPR

SEQ ID NO: 52485 - protein, 9 aa, Homo Sapiens
STLSTVISK

SEQ ID NO: 52486 - protein, 9 aa, Homo Sapiens
STLTPKIQK

SEQ ID NO: 52487 - protein, 9 aa, Homo Sapiens
STMAIIVNK

SEQ ID NO: 52488 - protein, 9 aa, Homo Sapiens
STMGYMAAK

SEQ ID NO: 52489 - protein, 9 aa, Homo Sapiens
STMGYMMAK

SEQ ID NO: 52490 - protein, 9 aa, Homo Sapiens
STNPFRPQK

SEQ ID NO: 52491 - protein, 9 aa, Homo Sapiens
STRPPSVTR

SEQ ID NO: 52492 - protein, 9 aa, Homo Sapiens
STSCPVVQK

SEQ ID NO: 52493 - protein, 9 aa, Homo Sapiens
STSDSVRLK

SEQ ID NO: 52494 - protein, 9 aa, Homo Sapiens
STSERTLLK

SEQ ID NO: 52495 - protein, 9 aa, Homo Sapiens
STSNSFNLK

SEQ ID NO: 52496 - protein, 9 aa, Homo Sapiens
STSRVRLFY

SEQ ID NO: 52497 - protein, 9 aa, Homo Sapiens
STSVPLGDK

SEQ ID NO: 52498 - protein, 9 aa, Homo Sapiens
STTRLYLRK

SEQ ID NO: 52499 - protein, 9 aa, Homo Sapiens
STVEAFFKK

SEQ ID NO: 52500 - protein, 9 aa, Homo Sapiens
STVEKIAMK

SEQ ID NO: 52501 - protein, 9 aa, Homo Sapiens
STVFGSSGK

SEQ ID NO: 52502 - protein, 9 aa, Homo Sapiens
STVGWASQK

SEQ ID NO: 52503 - protein, 9 aa, Homo Sapiens
STVPPSLRK

SEQ ID NO: 52504 - protein, 9 aa, Homo Sapiens
STWGGALRY

SEQ ID NO: 52505 - protein, 9 aa, Homo Sapiens
STYEKALGY

SEQ ID NO: 52506 - protein, 9 aa, Homo Sapiens
STYFERCLK

SEQ ID NO: 52507 - protein, 9 aa, Homo Sapiens
STYFKKLFK

SEQ ID NO: 52508 - protein, 9 aa, Homo Sapiens
STYKEAFRK

SEQ ID NO: 52509 - protein, 9 aa, Homo Sapiens
SVAKTILKR

SEQ ID NO: 52510 - protein, 9 aa, Homo Sapiens
SVASPFTSK

SEQ ID NO: 52511 - protein, 9 aa, Homo Sapiens
SVDPNQYYK

SEQ ID NO: 52512 - protein, 9 aa, Homo Sapiens
SVDRPIIDR

SEQ ID NO: 52513 - protein, 9 aa, Homo Sapiens
SVEIVPICK

SEQ ID NO: 52514 - protein, 9 aa, Homo Sapiens
SVESIISPK

SEQ ID NO: 52515 - protein, 9 aa, Homo Sapiens
SVETGFAKK

SEQ ID NO: 52516 - protein, 9 aa, Homo Sapiens
SVFGTMPLK

SEQ ID NO: 52517 - protein, 9 aa, Homo Sapiens
SVFNHAIRH

SEQ ID NO: 52518 - protein, 9 aa, Homo Sapiens
SVFQTTDTK

SEQ ID NO: 52519 - protein, 9 aa, Homo Sapiens
SVHWFPVQK

SEQ ID NO: 52520 - protein, 9 aa, Homo Sapiens
SVIDSVTKK

SEQ ID NO: 52521 - protein, 9 aa, Homo Sapiens
SVIPEHPKK

SEQ ID NO: 52522 - protein, 9 aa, Homo Sapiens
SVLDKSLTK

SEQ ID NO: 52523 - protein, 9 aa, Homo Sapiens
SVLDSFLKY

SEQ ID NO: 52524 - protein, 9 aa, Homo Sapiens
SVLDYFSER

SEQ ID NO: 52525 - protein, 9 aa, Homo Sapiens
SVLEIHSQK

SEQ ID NO: 52526 - protein, 9 aa, Homo Sapiens
SVLEKLGER

SEQ ID NO: 52527 - protein, 9 aa, Homo Sapiens
SVLEPGTAK

SEQ ID NO: 52528 - protein, 9 aa, Homo Sapiens
SVLEVVSEK

SEQ ID NO: 52529 - protein, 9 aa, Homo Sapiens
SVLGISTPK

SEQ ID NO: 52530 - protein, 9 aa, Homo Sapiens
SVLGQAMEK

SEQ ID NO: 52531 - protein, 9 aa, Homo Sapiens
SVLLFVTKK

SEQ ID NO: 52532 - protein, 9 aa, Homo Sapiens
SVLNFATNR

SEQ ID NO: 52533 - protein, 9 aa, Homo Sapiens
SVLNLVIVK

SEQ ID NO: 52534 - protein, 9 aa, Homo Sapiens
SVLPFQIYY

SEQ ID NO: 52535 - protein, 9 aa, Homo Sapiens
SVLPWIILH

SEQ ID NO: 52536 - protein, 9 aa, Homo Sapiens
SVLSPLLNK

SEQ ID NO: 52537 - protein, 9 aa, Homo Sapiens
SVMELARLK

SEQ ID NO: 52538 - protein, 9 aa, Homo Sapiens
SVNGKVLSK

SEQ ID NO: 52539 - protein, 9 aa, Homo Sapiens
SVPLPISHK

SEQ ID NO: 52540 - protein, 9 aa, Homo Sapiens
SVSDLAPPR

SEQ ID NO: 52541 - protein, 9 aa, Homo Sapiens
SVSLPSVKK

SEQ ID NO: 52542 - protein, 9 aa, Homo Sapiens
SVSLPVRKK

SEQ ID NO: 52543 - protein, 9 aa, Homo Sapiens
SVSNVVITK

SEQ ID NO: 52544 - protein, 9 aa, Homo Sapiens
SVSTPLIIK

SEQ ID NO: 52545 - protein, 9 aa, Homo Sapiens
SVVGLFLRH

SEQ ID NO: 52546 - protein, 9 aa, Homo Sapiens
SVWDCVIFH

SEQ ID NO: 52547 - protein, 9 aa, Homo Sapiens
SVWHGTLSK

SEQ ID NO: 52548 - protein, 9 aa, Homo Sapiens
SVYGYGVQK

SEQ ID NO: 52549 - protein, 9 aa, Homo Sapiens
SVYSGIRHK

SEQ ID NO: 52550 - protein, 9 aa, Homo Sapiens
SVYVYKVLK

SEQ ID NO: 52551 - protein, 9 aa, Homo Sapiens
TAAADFTAK

SEQ ID NO: 52552 - protein, 9 aa, Homo Sapiens
TAADSFEFK

SEQ ID NO: 52553 - protein, 9 aa, Homo Sapiens
TAAGTLIAK

SEQ ID NO: 52554 - protein, 9 aa, Homo Sapiens
TAAGVGRFK

SEQ ID NO: 52555 - protein, 9 aa, Homo Sapiens
TAAPPSVCR

SEQ ID NO: 52556 - protein, 9 aa, Homo Sapiens
TAASLVCRK

SEQ ID NO: 52557 - protein, 9 aa, Homo Sapiens
TAFGGFLKY

SEQ ID NO: 52558 - protein, 9 aa, Homo Sapiens
TAGSTSIPK

SEQ ID NO: 52559 - protein, 9 aa, Homo Sapiens
TAHHLGLLK

SEQ ID NO: 52560 - protein, 9 aa, Homo Sapiens
TALAPSTMK

SEQ ID NO: 52561 - protein, 9 aa, Homo Sapiens
TAMLPSSQR

SEQ ID NO: 52562 - protein, 9 aa, Homo Sapiens
TAMPPGTAR

SEQ ID NO: 52563 - protein, 9 aa, Homo Sapiens
TASSSILAK

SEQ ID NO: 52564 - protein, 9 aa, Homo Sapiens
TIFGKIIRK

SEQ ID NO: 52565 - protein, 9 aa, Homo Sapiens
TIKEGSQLK

SEQ ID NO: 52566 - protein, 9 aa, Homo Sapiens
TIPKSLSEK

SEQ ID NO: 52567 - protein, 9 aa, Homo Sapiens
TISPPLQPK

SEQ ID NO: 52568 - protein, 9 aa, Homo Sapiens
TIVDPFSSK

SEQ ID NO: 52569 - protein, 9 aa, Homo Sapiens
TLCKPLVPR

SEQ ID NO: 52570 - protein, 9 aa, Homo Sapiens
TLSPSEGVR

SEQ ID NO: 52571 - protein, 9 aa, Homo Sapiens
TMCPHILRY

SEQ ID NO: 52572 - protein, 9 aa, Homo Sapiens
TNFEGFLAK

SEQ ID NO: 52573 - protein, 9 aa, Homo Sapiens
TNFYGDLRK

SEQ ID NO: 52574 - protein, 9 aa, Homo Sapiens
TPLATLKST

SEQ ID NO: 52575 - protein, 9 aa, Homo Sapiens
TPLTTTAKV

SEQ ID NO: 52576 - protein, 9 aa, Homo Sapiens
TQYEKSLYY

SEQ ID NO: 52577 - protein, 9 aa, Homo Sapiens
TSAIAFLHK

SEQ ID NO: 52578 - protein, 9 aa, Homo Sapiens
TSALPIIQK

SEQ ID NO: 52579 - protein, 9 aa, Homo Sapiens
TSCNVVLNH

SEQ ID NO: 52580 - protein, 9 aa, Homo Sapiens
TSCPVVQKR

SEQ ID NO: 52581 - protein, 9 aa, Homo Sapiens
TSFLTISPK

SEQ ID NO: 52582 - protein, 9 aa, Homo Sapiens
TSFSGITKK

SEQ ID NO: 52583 - protein, 9 aa, Homo Sapiens
TSGLPSSVR

SEQ ID NO: 52584 - protein, 9 aa, Homo Sapiens
TSIQPGAPK

SEQ ID NO: 52585 - protein, 9 aa, Homo Sapiens
TSLPPLPFK

SEQ ID NO: 52586 - protein, 9 aa, Homo Sapiens
TSLPSAICK

SEQ ID NO: 52587 - protein, 9 aa, Homo Sapiens
TSSDILLCY

SEQ ID NO: 52588 - protein, 9 aa, Homo Sapiens
TSSPSSIPR

SEQ ID NO: 52589 - protein, 9 aa, Homo Sapiens
TSSQPVIAK

SEQ ID NO: 52590 - protein, 9 aa, Homo Sapiens
TSTASTFVK

SEQ ID NO: 52591 - protein, 9 aa, Homo Sapiens
TSTIPFHYK

SEQ ID NO: 52592 - protein, 9 aa, Homo Sapiens
TSYDNVLIK

SEQ ID NO: 52593 - protein, 9 aa, Homo Sapiens
TSYGGTLRR

SEQ ID NO: 52594 - protein, 9 aa, Homo Sapiens
TTAEQQLRH

SEQ ID NO: 52595 - protein, 9 aa, Homo Sapiens
TTAERVLMK

SEQ ID NO: 52596 - protein, 9 aa, Homo Sapiens
TTAPSLSGK

SEQ ID NO: 52597 - protein, 9 aa, Homo Sapiens
TTAPVVSTR

SEQ ID NO: 52598 - protein, 9 aa, Homo Sapiens
TTASVVIIR

SEQ ID NO: 52599 - protein, 9 aa, Homo Sapiens
TTATEFHQR

SEQ ID NO: 52600 - protein, 9 aa, Homo Sapiens
TTCDDILIK

SEQ ID NO: 52601 - protein, 9 aa, Homo Sapiens
TTCPVCLQY

SEQ ID NO: 52602 - protein, 9 aa, Homo Sapiens
TTDCPVPPK

SEQ ID NO: 52603 - protein, 9 aa, Homo Sapiens
TTDDPVIRK

SEQ ID NO: 52604 - protein, 9 aa, Homo Sapiens
TTDKETVLK

SEQ ID NO: 52605 - protein, 9 aa, Homo Sapiens
TTFELSSRK

SEQ ID NO: 52606 - protein, 9 aa, Homo Sapiens
TTFSPNTGK

SEQ ID NO: 52607 - protein, 9 aa, Homo Sapiens
TTFSPSISK

SEQ ID NO: 52608 - protein, 9 aa, Homo Sapiens
TTFTKIVNK

SEQ ID NO: 52609 - protein, 9 aa, Homo Sapiens
TTFVGKAAK

SEQ ID NO: 52610 - protein, 9 aa, Homo Sapiens
TTGEPATPK

SEQ ID NO: 52611 - protein, 9 aa, Homo Sapiens
TTGFALNLK

SEQ ID NO: 52612 - protein, 9 aa, Homo Sapiens
TTHEIMGPK

SEQ ID NO: 52613 - protein, 9 aa, Homo Sapiens
TTISSLSEK

SEQ ID NO: 52614 - protein, 9 aa, Homo Sapiens
TTLDEVELH

SEQ ID NO: 52615 - protein, 9 aa, Homo Sapiens
TTLGHAVLK

SEQ ID NO: 52616 - protein, 9 aa, Homo Sapiens
TTLSSIRSK

SEQ ID NO: 52617 - protein, 9 aa, Homo Sapiens
TTLTKIALR

SEQ ID NO: 52618 - protein, 9 aa, Homo Sapiens
TTLTKLASR

SEQ ID NO: 52619 - protein, 9 aa, Homo Sapiens
TTLVNTNSK

SEQ ID NO: 52620 - protein, 9 aa, Homo Sapiens
TTMQALAEK

SEQ ID NO: 52621 - protein, 9 aa, Homo Sapiens
TTNDIVISK

SEQ ID NO: 52622 - protein, 9 aa, Homo Sapiens
TTPKCFLEK

SEQ ID NO: 52623 - protein, 9 aa, Homo Sapiens
TTQDPLSNK

SEQ ID NO: 52624 - protein, 9 aa, Homo Sapiens
TTSGTVLER

SEQ ID NO: 52625 - protein, 9 aa, Homo Sapiens
TTSNFTFSK

SEQ ID NO: 52626 - protein, 9 aa, Homo Sapiens
TTSNGILSH

SEQ ID NO: 52627 - protein, 9 aa, Homo Sapiens
TTSPMFMEK

SEQ ID NO: 52628 - protein, 9 aa, Homo Sapiens
TTSRRILYK

SEQ ID NO: 52629 - protein, 9 aa, Homo Sapiens
TTSTSFKPR

SEQ ID NO: 52630 - protein, 9 aa, Homo Sapiens
TTSVITIVK

SEQ ID NO: 52631 - protein, 9 aa, Homo Sapiens
TTTATVLAR

SEQ ID NO: 52632 - protein, 9 aa, Homo Sapiens
TTTEHRFFR

SEQ ID NO: 52633 - protein, 9 aa, Homo Sapiens
TTTERILYY

SEQ ID NO: 52634 - protein, 9 aa, Homo Sapiens
TTTEVNMAR

SEQ ID NO: 52635 - protein, 9 aa, Homo Sapiens
TTTGHLIYK

SEQ ID NO: 52636 - protein, 9 aa, Homo Sapiens
TTTGKILLH

SEQ ID NO: 52637 - protein, 9 aa, Homo Sapiens
TTTSLVLER

SEQ ID NO: 52638 - protein, 9 aa, Homo Sapiens
TTVDIFHKK

SEQ ID NO: 52639 - protein, 9 aa, Homo Sapiens
TTVEDLGSK

SEQ ID NO: 52640 - protein, 9 aa, Homo Sapiens
TTVGTLSQR

SEQ ID NO: 52641 - protein, 9 aa, Homo Sapiens
TTVLIKTAK

SEQ ID NO: 52642 - protein, 9 aa, Homo Sapiens
TTVPHVFSK

SEQ ID NO: 52643 - protein, 9 aa, Homo Sapiens
TTVPLVCNK

SEQ ID NO: 52644 - protein, 9 aa, Homo Sapiens
TVAAVFRGR

SEQ ID NO: 52645 - protein, 9 aa, Homo Sapiens
TVAECVLYY

SEQ ID NO: 52646 - protein, 9 aa, Homo Sapiens
TVAHAISER

SEQ ID NO: 52647 - protein, 9 aa, Homo Sapiens
TVAKSIDLK

SEQ ID NO: 52648 - protein, 9 aa, Homo Sapiens
TVAVPLVGK

SEQ ID NO: 52649 - protein, 9 aa, Homo Sapiens
TVCDFRLSY

SEQ ID NO: 52650 - protein, 9 aa, Homo Sapiens
TVCLTLTAK

SEQ ID NO: 52651 - protein, 9 aa, Homo Sapiens
TVCNVKLLH

SEQ ID NO: 52652 - protein, 9 aa, Homo Sapiens
TVDGPREPR

SEQ ID NO: 52653 - protein, 9 aa, Homo Sapiens
TVDLVIGPK

SEQ ID NO: 52654 - protein, 9 aa, Homo Sapiens
TVEEGQRLK

SEQ ID NO: 52655 - protein, 9 aa, Homo Sapiens
TVFENLINK

SEQ ID NO: 52656 - protein, 9 aa, Homo Sapiens
TVHPKFHYK

SEQ ID NO: 52657 - protein, 9 aa, Homo Sapiens
TVIEKLRER

SEQ ID NO: 52658 - protein, 9 aa, Homo Sapiens
TVIFVASQK

SEQ ID NO: 52659 - protein, 9 aa, Homo Sapiens
TVIHFNNPK

SEQ ID NO: 52660 - protein, 9 aa, Homo Sapiens
TVILPIKKK

SEQ ID NO: 52661 - protein, 9 aa, Homo Sapiens
TVISRVIGR

SEQ ID NO: 52662 - protein, 9 aa, Homo Sapiens
TVKEVGLLK

SEQ ID NO: 52663 - protein, 9 aa, Homo Sapiens
TVLAAVLRH

SEQ ID NO: 52664 - protein, 9 aa, Homo Sapiens
TVLEMCMNH

SEQ ID NO: 52665 - protein, 9 aa, Homo Sapiens
TVLPGSPSK

SEQ ID NO: 52666 - protein, 9 aa, Homo Sapiens
TVLRPSLGK

SEQ ID NO: 52667 - protein, 9 aa, Homo Sapiens
TVLSKLTRK

SEQ ID NO: 52668 - protein, 9 aa, Homo Sapiens
TVNSPAIYK

SEQ ID NO: 52669 - protein, 9 aa, Homo Sapiens
TVPRRLGPK

SEQ ID NO: 52670 - protein, 9 aa, Homo Sapiens
TVSDAILRY

SEQ ID NO: 52671 - protein, 9 aa, Homo Sapiens
TVSEPAVIK

SEQ ID NO: 52672 - protein, 9 aa, Homo Sapiens
TVSETFMSK

SEQ ID NO: 52673 - protein, 9 aa, Homo Sapiens
TVSEVKMVK

SEQ ID NO: 52674 - protein, 9 aa, Homo Sapiens
TVTAQILLK

SEQ ID NO: 52675 - protein, 9 aa, Homo Sapiens
TVTELILQH

SEQ ID NO: 52676 - protein, 9 aa, Homo Sapiens
TVTEVLLKY

SEQ ID NO: 52677 - protein, 9 aa, Homo Sapiens
TVTGGFGAK

SEQ ID NO: 52678 - protein, 9 aa, Homo Sapiens
TVVYPATEK

SEQ ID NO: 52679 - protein, 9 aa, Homo Sapiens
TVYECVVEK

SEQ ID NO: 52680 - protein, 9 aa, Homo Sapiens
TVYEEMMAK

SEQ ID NO: 52681 - protein, 9 aa, Homo Sapiens
VAAPSWLHR

SEQ ID NO: 52682 - protein, 9 aa, Homo Sapiens
VISPPTVPK

SEQ ID NO: 52683 - protein, 9 aa, Homo Sapiens
VLGAPVKGK

SEQ ID NO: 52684 - protein, 9 aa, Homo Sapiens
VLSLYASGR

SEQ ID NO: 52685 - protein, 9 aa, Homo Sapiens
VPAQPLGPR

SEQ ID NO: 52686 - protein, 9 aa, Homo Sapiens
VTAPPARNR

SEQ ID NO: 52687 - protein, 9 aa, Homo Sapiens
VTDSPRILK

SEQ ID NO: 52688 - protein, 9 aa, Homo Sapiens
VTLQRAALK

SEQ ID NO: 52689 - protein, 9 aa, Homo Sapiens
VTNQPVTPK

SEQ ID NO: 52690 - protein, 9 aa, Homo Sapiens
VTVSGGTPK

SEQ ID NO: 52691 - protein, 9 aa, Homo Sapiens
VVAPPGAPK

SEQ ID NO: 52692 - protein, 9 aa, Homo Sapiens
VVCEYIVKK

SEQ ID NO: 52693 - protein, 9 aa, Homo Sapiens
VVDYPNSAK

SEQ ID NO: 52694 - protein, 9 aa, Homo Sapiens
VVLYPLVAK

SEQ ID NO: 52695 - protein, 9 aa, Homo Sapiens
VVYAPLSKK

SEQ ID NO: 52696 - protein, 9 aa, Homo Sapiens
WATTPSSQK

SEQ ID NO: 52697 - protein, 9 aa, Homo Sapiens
WIAEPVRQK

SEQ ID NO: 52698 - protein, 9 aa, Homo Sapiens
WPDQPRITK

SEQ ID NO: 52699 - protein, 9 aa, Homo Sapiens
WSDQPRITK

SEQ ID NO: 52700 - protein, 9 aa, Homo Sapiens
WTAEALPAK

SEQ ID NO: 52701 - protein, 9 aa, Homo Sapiens
WTAPPVPPR

SEQ ID NO: 52702 - protein, 9 aa, Homo Sapiens
WTLPGGRQR

SEQ ID NO: 52703 - protein, 9 aa, Homo Sapiens
WTMSSWTMK

SEQ ID NO: 52704 - protein, 9 aa, Homo Sapiens
WTQGRWPKK

SEQ ID NO: 52705 - protein, 9 aa, Homo Sapiens
WVLEKTSKK

SEQ ID NO: 52706 - protein, 9 aa, Homo Sapiens
WVSSQFYNK

SEQ ID NO: 52707 - protein, 9 aa, Homo Sapiens
WVYDEPLLK

SEQ ID NO: 52708 - protein, 9 aa, Homo Sapiens
YAAPPSTRK

SEQ ID NO: 52709 - protein, 9 aa, Homo Sapiens
YAFDEAFVR

SEQ ID NO: 52710 - protein, 9 aa, Homo Sapiens
YAFVTFCTK

SEQ ID NO: 52711 - protein, 9 aa, Homo Sapiens
YAKDIGFIK

SEQ ID NO: 52712 - protein, 9 aa, Homo Sapiens
YALDPSFPR

SEQ ID NO: 52713 - protein, 9 aa, Homo Sapiens
YALETVLNK

SEQ ID NO: 52714 - protein, 9 aa, Homo Sapiens
YALGLVPTR

SEQ ID NO: 52715 - protein, 9 aa, Homo Sapiens
YALPHAILR

SEQ ID NO: 52716 - protein, 9 aa, Homo Sapiens
YALPVGKQK

SEQ ID NO: 52717 - protein, 9 aa, Homo Sapiens
YAYVTERQK

SEQ ID NO: 52718 - protein, 9 aa, Homo Sapiens
YDPRNPVNK

SEQ ID NO: 52719 - protein, 9 aa, Homo Sapiens
YIADPNIAK

SEQ ID NO: 52720 - protein, 9 aa, Homo Sapiens
YIATPRVWK

SEQ ID NO: 52721 - protein, 9 aa, Homo Sapiens
YILSPLSYK

SEQ ID NO: 52722 - protein, 9 aa, Homo Sapiens
YIVPPAPEK

SEQ ID NO: 52723 - protein, 9 aa, Homo Sapiens
YIYEGRLEK

SEQ ID NO: 52724 - protein, 9 aa, Homo Sapiens
YLYITKVLK

SEQ ID NO: 52725 - protein, 9 aa, Homo Sapiens
YNYGFVVEK

SEQ ID NO: 52726 - protein, 9 aa, Homo Sapiens
YNYKTIVKK

SEQ ID NO: 52727 - protein, 9 aa, Homo Sapiens
YPNFRPTPK

SEQ ID NO: 52728 - protein, 9 aa, Homo Sapiens
YPYEQAQYK

SEQ ID NO: 52729 - protein, 9 aa, Homo Sapiens
YSAYLVAEK

SEQ ID NO: 52730 - protein, 9 aa, Homo Sapiens
YSCEFGSAK

SEQ ID NO: 52731 - protein, 9 aa, Homo Sapiens
YSDAPMTPK

SEQ ID NO: 52732 - protein, 9 aa, Homo Sapiens
YSFTTTAER

SEQ ID NO: 52733 - protein, 9 aa, Homo Sapiens
YSLPITVKK

SEQ ID NO: 52734 - protein, 9 aa, Homo Sapiens
YSTEPNNLK

SEQ ID NO: 52735 - protein, 9 aa, Homo Sapiens
YSVFGFSFK

SEQ ID NO: 52736 - protein, 9 aa, Homo Sapiens
YTAEQILKH

SEQ ID NO: 52737 - protein, 9 aa, Homo Sapiens
YTAPPLQSK

SEQ ID NO: 52738 - protein, 9 aa, Homo Sapiens
YTAQPTQGY

SEQ ID NO: 52739 - protein, 9 aa, Homo Sapiens
YTFDWTMLK

SEQ ID NO: 52740 - protein, 9 aa, Homo Sapiens
YTIFIVATK

SEQ ID NO: 52741 - protein, 9 aa, Homo Sapiens
YTITKGPSK

SEQ ID NO: 52742 - protein, 9 aa, Homo Sapiens
YTMKEVLFY

SEQ ID NO: 52743 - protein, 9 aa, Homo Sapiens
YTMKVFAKR

SEQ ID NO: 52744 - protein, 9 aa, Homo Sapiens
YTMPEYLSK

SEQ ID NO: 52745 - protein, 9 aa, Homo Sapiens
YTQPGPGYR

SEQ ID NO: 52746 - protein, 9 aa, Homo Sapiens
YTSDYFISY

SEQ ID NO: 52747 - protein, 9 aa, Homo Sapiens
YTSETYLMK

SEQ ID NO: 52748 - protein, 9 aa, Homo Sapiens
YTSGSFQTR

SEQ ID NO: 52749 - protein, 9 aa, Homo Sapiens
YTSKALITK

SEQ ID NO: 52750 - protein, 9 aa, Homo Sapiens
YTSQIEITK

SEQ ID NO: 52751 - protein, 9 aa, Homo Sapiens
YTTKEIFRK

SEQ ID NO: 52752 - protein, 9 aa, Homo Sapiens
YTTKQVITK

SEQ ID NO: 52753 - protein, 9 aa, Homo Sapiens
YTVEKCIQH

SEQ ID NO: 52754 - protein, 9 aa, Homo Sapiens
YTYDKMKLK

SEQ ID NO: 52755 - protein, 9 aa, Homo Sapiens
YVANVGTNR

SEQ ID NO: 52756 - protein, 9 aa, Homo Sapiens
YVDVVFANR

SEQ ID NO: 52757 - protein, 9 aa, Homo Sapiens
YVFGGQRSK

SEQ ID NO: 52758 - protein, 9 aa, Homo Sapiens
YVIGSCIKH

SEQ ID NO: 52759 - protein, 9 aa, Homo Sapiens
YVIKPGNTK

SEQ ID NO: 52760 - protein, 9 aa, Homo Sapiens
YVIQHVLEH

SEQ ID NO: 52761 - protein, 9 aa, Homo Sapiens
YVKLSVGKK

SEQ ID NO: 52762 - protein, 9 aa, Homo Sapiens
YVMPSSSAR

SEQ ID NO: 52763 - protein, 9 aa, Homo Sapiens
YVNSSDMLK

SEQ ID NO: 52764 - protein, 9 aa, Homo Sapiens
YVPPHALLH

SEQ ID NO: 52765 - protein, 9 aa, Homo Sapiens
YVSPCTHLR

SEQ ID NO: 52766 - protein, 9 aa, Homo Sapiens
YVSVPGSKK

SEQ ID NO: 52767 - protein, 9 aa, Homo Sapiens
YVYCKTHPR

SEQ ID NO: 52768 - protein, 9 aa, Homo Sapiens
YVYFTNELK

SEQ ID NO: 52769 - protein, 10 aa, Homo Sapiens
AIIDHIFASK

SEQ ID NO: 52770 - protein, 10 aa, Homo Sapiens
APAGITLKEA

SEQ ID NO: 52771 - protein, 10 aa, Homo Sapiens
ATALPTGTSK

SEQ ID NO: 52772 - protein, 10 aa, Homo Sapiens
ATGDMSGLLK

SEQ ID NO: 52773 - protein, 10 aa, Homo Sapiens
ATIDGSVNPK

SEQ ID NO: 52774 - protein, 10 aa, Homo Sapiens
AVFPKPFVEK

SEQ ID NO: 52775 - protein, 10 aa, Homo Sapiens
AVISPPTVPK

SEQ ID NO: 52776 - protein, 10 aa, Homo Sapiens
CSAPATLTPR

SEQ ID NO: 52777 - protein, 10 aa, Homo Sapiens
CTADWLPIGR

SEQ ID NO: 52778 - protein, 10 aa, Homo Sapiens
DAAPGGSEKL

SEQ ID NO: 52779 - protein, 10 aa, Homo Sapiens
DAFFTRPFYK

SEQ ID NO: 52780 - protein, 10 aa, Homo Sapiens
DAGDLSQMIK

SEQ ID NO: 52781 - protein, 10 aa, Homo Sapiens
DAITPLISTK

SEQ ID NO: 52782 - protein, 10 aa, Homo Sapiens
DAMEVTSTFK

SEQ ID NO: 52783 - protein, 10 aa, Homo Sapiens
DAVAVTMGPK

SEQ ID NO: 52784 - protein, 10 aa, Homo Sapiens
DIYRPTIHKL

SEQ ID NO: 52785 - protein, 10 aa, Homo Sapiens
DSLPDQLVNK

SEQ ID NO: 52786 - protein, 10 aa, Homo Sapiens
DSTEPPYSQK

SEQ ID NO: 52787 - protein, 10 aa, Homo Sapiens
DSYRSPWSNK

SEQ ID NO: 52788 - protein, 10 aa, Homo Sapiens
DTAGMILGWK

SEQ ID NO: 52789 - protein, 10 aa, Homo Sapiens
DTFFGVKNKK

SEQ ID NO: 52790 - protein, 10 aa, Homo Sapiens
DTFRSTFHSK

SEQ ID NO: 52791 - protein, 10 aa, Homo Sapiens
DTFSGIGKKF

SEQ ID NO: 52792 - protein, 10 aa, Homo Sapiens
DTFSVAFIKK

SEQ ID NO: 52793 - protein, 10 aa, Homo Sapiens
DTFWKNFKSK

SEQ ID NO: 52794 - protein, 10 aa, Homo Sapiens
DTIDERTINK

SEQ ID NO: 52795 - protein, 10 aa, Homo Sapiens
DTIFVPNTGK

SEQ ID NO: 52796 - protein, 10 aa, Homo Sapiens
DTLGQVGAVK

SEQ ID NO: 52797 - protein, 10 aa, Homo Sapiens
DTMRPDSLLK

SEQ ID NO: 52798 - protein, 10 aa, Homo Sapiens
DTNADKQLSF

SEQ ID NO: 52799 - protein, 10 aa, Homo Sapiens
DTNAVIFSQK

SEQ ID NO: 52800 - protein, 10 aa, Homo Sapiens
DTTPFASLLK

SEQ ID NO: 52801 - protein, 10 aa, Homo Sapiens
DTVAQITQRF

SEQ ID NO: 52802 - protein, 10 aa, Homo Sapiens
DTVATLPRGR

SEQ ID NO: 52803 - protein, 10 aa, Homo Sapiens
DTWAGSHSLR

SEQ ID NO: 52804 - protein, 10 aa, Homo Sapiens
DVAEMHNILK

SEQ ID NO: 52805 - protein, 10 aa, Homo Sapiens
DVASVIVTKL

SEQ ID NO: 52806 - protein, 10 aa, Homo Sapiens
DVCGKTFTQK

SEQ ID NO: 52807 - protein, 10 aa, Homo Sapiens
DVFIGGTTGK

SEQ ID NO: 52808 - protein, 10 aa, Homo Sapiens
DVGTLQRLPK

SEQ ID NO: 52809 - protein, 10 aa, Homo Sapiens
DVHNCSYNYK

SEQ ID NO: 52810 - protein, 10 aa, Homo Sapiens
DVIQHETIGK

SEQ ID NO: 52811 - protein, 10 aa, Homo Sapiens
DVLHQIFSKF

SEQ ID NO: 52812 - protein, 10 aa, Homo Sapiens
DVLNPSGTQR

SEQ ID NO: 52813 - protein, 10 aa, Homo Sapiens
DVLSHFAQRL

SEQ ID NO: 52814 - protein, 10 aa, Homo Sapiens
DVMNPSEILK

SEQ ID NO: 52815 - protein, 10 aa, Homo Sapiens
DVMRRLLQPK

SEQ ID NO: 52816 - protein, 10 aa, Homo Sapiens
DVSKPVLTTK

SEQ ID NO: 52817 - protein, 10 aa, Homo Sapiens
DVYPLFLLAP

SEQ ID NO: 52818 - protein, 10 aa, Homo Sapiens
DVYTGMCLQK

SEQ ID NO: 52819 - protein, 10 aa, Homo Sapiens
EAAAALTRMK

SEQ ID NO: 52820 - protein, 10 aa, Homo Sapiens
EAAAISGLQK

SEQ ID NO: 52821 - protein, 10 aa, Homo Sapiens
EAAAVHGARF

SEQ ID NO: 52822 - protein, 10 aa, Homo Sapiens
EAAAVLMARL

SEQ ID NO: 52823 - protein, 10 aa, Homo Sapiens
EAACPGITDK

SEQ ID NO: 52824 - protein, 10 aa, Homo Sapiens
EAADPLASKL

SEQ ID NO: 52825 - protein, 10 aa, Homo Sapiens
EAAERAIEKM

SEQ ID NO: 52826 - protein, 10 aa, Homo Sapiens
EAAGAAPCRL

SEQ ID NO: 52827 - protein, 10 aa, Homo Sapiens
EAAGLIGWLK

SEQ ID NO: 52828 - protein, 10 aa, Homo Sapiens
EAAPPAEVHR

SEQ ID NO: 52829 - protein, 10 aa, Homo Sapiens
EAAVVAVAEK

SEQ ID NO: 52830 - protein, 10 aa, Homo Sapiens
EACGQEITTK

SEQ ID NO: 52831 - protein, 10 aa, Homo Sapiens
EACSIPGIGK

SEQ ID NO: 52832 - protein, 10 aa, Homo Sapiens
EAFKPILSTR

SEQ ID NO: 52833 - protein, 10 aa, Homo Sapiens
EAFPSQGTKR

SEQ ID NO: 52834 - protein, 10 aa, Homo Sapiens
EAFYKKDLAK

SEQ ID NO: 52835 - protein, 10 aa, Homo Sapiens
EAIEGGALQK

SEQ ID NO: 52836 - protein, 10 aa, Homo Sapiens
EAIKKPLTQK

SEQ ID NO: 52837 - protein, 10 aa, Homo Sapiens
EAINITNNEK

SEQ ID NO: 52838 - protein, 10 aa, Homo Sapiens
EALEKLFLQK

SEQ ID NO: 52839 - protein, 10 aa, Homo Sapiens
EALGIVPLQY

SEQ ID NO: 52840 - protein, 10 aa, Homo Sapiens
EALGSCLNNK

SEQ ID NO: 52841 - protein, 10 aa, Homo Sapiens
EALGSGLVSR

SEQ ID NO: 52842 - protein, 10 aa, Homo Sapiens
EALKGGPLMK

SEQ ID NO: 52843 - protein, 10 aa, Homo Sapiens
EALNFLHSKR

SEQ ID NO: 52844 - protein, 10 aa, Homo Sapiens
EALPSAPERL

SEQ ID NO: 52845 - protein, 10 aa, Homo Sapiens
EALRKPFGSK

SEQ ID NO: 52846 - protein, 10 aa, Homo Sapiens
EALSHLMRRF

SEQ ID NO: 52847 - protein, 10 aa, Homo Sapiens
EALYGYCNLK

SEQ ID NO: 52848 - protein, 10 aa, Homo Sapiens
EAMASIINRL

SEQ ID NO: 52849 - protein, 10 aa, Homo Sapiens
EAMEWMNNKL

SEQ ID NO: 52850 - protein, 10 aa, Homo Sapiens
EAMGIKETRK

SEQ ID NO: 52851 - protein, 10 aa, Homo Sapiens
EAMNEIRAKK

SEQ ID NO: 52852 - protein, 10 aa, Homo Sapiens
EAMPPPLLKK

SEQ ID NO: 52853 - protein, 10 aa, Homo Sapiens
EANQAINPKL

SEQ ID NO: 52854 - protein, 10 aa, Homo Sapiens
EAPPPSVVTR

SEQ ID NO: 52855 - protein, 10 aa, Homo Sapiens
EASLPLAVTK

SEQ ID NO: 52856 - protein, 10 aa, Homo Sapiens
EASSVTSMTH

SEQ ID NO: 52857 - protein, 10 aa, Homo Sapiens
EAVFASEVKK

SEQ ID NO: 52858 - protein, 10 aa, Homo Sapiens
EAVKPTVGMK

SEQ ID NO: 52859 - protein, 10 aa, Homo Sapiens
EAYNETFSNR

SEQ ID NO: 52860 - protein, 10 aa, Homo Sapiens
EENLLDFVRF

SEQ ID NO: 52861 - protein, 10 aa, Homo Sapiens
EFNAETFTFH

SEQ ID NO: 52862 - protein, 10 aa, Homo Sapiens
EGCPATLPSK

SEQ ID NO: 52863 - protein, 10 aa, Homo Sapiens
EIAGGTITSK

SEQ ID NO: 52864 - protein, 10 aa, Homo Sapiens
EICGAPGVGK

SEQ ID NO: 52865 - protein, 10 aa, Homo Sapiens
EICGKSFTAK

SEQ ID NO: 52866 - protein, 10 aa, Homo Sapiens
EIEEFKERLR

SEQ ID NO: 52867 - protein, 10 aa, Homo Sapiens
EIFASRQTGK

SEQ ID NO: 52868 - protein, 10 aa, Homo Sapiens
EIFPVSFHVK

SEQ ID NO: 52869 - protein, 10 aa, Homo Sapiens
EIGRPLGKGK

SEQ ID NO: 52870 - protein, 10 aa, Homo Sapiens
EIINRPNTPK

SEQ ID NO: 52871 - protein, 10 aa, Homo Sapiens
EIKKPPVSER

SEQ ID NO: 52872 - protein, 10 aa, Homo Sapiens
EILDYCPSTR

SEQ ID NO: 52873 - protein, 10 aa, Homo Sapiens
EILFSEGLIK

SEQ ID NO: 52874 - protein, 10 aa, Homo Sapiens
EILQKGQIGK

SEQ ID NO: 52875 - protein, 10 aa, Homo Sapiens
EILTRIGSGK

SEQ ID NO: 52876 - protein, 10 aa, Homo Sapiens
EINHRPLLEK

SEQ ID NO: 52877 - protein, 10 aa, Homo Sapiens
EIPASPFRVK

SEQ ID NO: 52878 - protein, 10 aa, Homo Sapiens
EIPQLVPIGK

SEQ ID NO: 52879 - protein, 10 aa, Homo Sapiens
EIPTFQPLLK

SEQ ID NO: 52880 - protein, 10 aa, Homo Sapiens
EISDLNELLK

SEQ ID NO: 52881 - protein, 10 aa, Homo Sapiens
EITSILLKQK

SEQ ID NO: 52882 - protein, 10 aa, Homo Sapiens
EIWKGMSKEK

SEQ ID NO: 52883 - protein, 10 aa, Homo Sapiens
EIYDRREYSR

SEQ ID NO: 52884 - protein, 10 aa, Homo Sapiens
EIYEFHKTLK

SEQ ID NO: 52885 - protein, 10 aa, Homo Sapiens
EIYGGSDSRF

SEQ ID NO: 52886 - protein, 10 aa, Homo Sapiens
EIYNDLPALK

SEQ ID NO: 52887 - protein, 10 aa, Homo Sapiens
EIYSGCTKKM

SEQ ID NO: 52888 - protein, 10 aa, Homo Sapiens
EIYTVGKRFK

SEQ ID NO: 52889 - protein, 10 aa, Homo Sapiens
ELFDKVVGNK

SEQ ID NO: 52890 - protein, 10 aa, Homo Sapiens
ELFQKTGSFK

SEQ ID NO: 52891 - protein, 10 aa, Homo Sapiens
ELFSKLLKTG

SEQ ID NO: 52892 - protein, 10 aa, Homo Sapiens
ELIDYTGGLK

SEQ ID NO: 52893 - protein, 10 aa, Homo Sapiens
ELLDKILRQK

SEQ ID NO: 52894 - protein, 10 aa, Homo Sapiens
ELLDRPLLRK

SEQ ID NO: 52895 - protein, 10 aa, Homo Sapiens
ELLETTETPK

SEQ ID NO: 52896 - protein, 10 aa, Homo Sapiens
ELMDKPLTFR

SEQ ID NO: 52897 - protein, 10 aa, Homo Sapiens
ELMRHQPTLK

SEQ ID NO: 52898 - protein, 10 aa, Homo Sapiens
ELVLPVVLQL

SEQ ID NO: 52899 - protein, 10 aa, Homo Sapiens
EMYVAKFAAK

SEQ ID NO: 52900 - protein, 10 aa, Homo Sapiens
ENWDPTGTKK

SEQ ID NO: 52901 - protein, 10 aa, Homo Sapiens
ESAIAIATGK

SEQ ID NO: 52902 - protein, 10 aa, Homo Sapiens
ESAKRFLEKF

SEQ ID NO: 52903 - protein, 10 aa, Homo Sapiens
ESAQNTKFFK

SEQ ID NO: 52904 - protein, 10 aa, Homo Sapiens
ESARIEDMRK

SEQ ID NO: 52905 - protein, 10 aa, Homo Sapiens
ESCNLPSTTK

SEQ ID NO: 52906 - protein, 10 aa, Homo Sapiens
ESFGPQPISR

SEQ ID NO: 52907 - protein, 10 aa, Homo Sapiens
ESFPGSFRGR

SEQ ID NO: 52908 - protein, 10 aa, Homo Sapiens
ESFSSKYVPK

SEQ ID NO: 52909 - protein, 10 aa, Homo Sapiens
ESIYQRDPLK

SEQ ID NO: 52910 - protein, 10 aa, Homo Sapiens
ESLDLAEFAK

SEQ ID NO: 52911 - protein, 10 aa, Homo Sapiens
ESLENISSVK

SEQ ID NO: 52912 - protein, 10 aa, Homo Sapiens
ESLGTFQSTK

SEQ ID NO: 52913 - protein, 10 aa, Homo Sapiens
ESLMPSQVVK

SEQ ID NO: 52914 - protein, 10 aa, Homo Sapiens
ESLPANQQPR

SEQ ID NO: 52915 - protein, 10 aa, Homo Sapiens
ESLRKLCVFK

SEQ ID NO: 52916 - protein, 10 aa, Homo Sapiens
ESSEQTFMYY

SEQ ID NO: 52917 - protein, 10 aa, Homo Sapiens
ESTPFTAVLK

SEQ ID NO: 52918 - protein, 10 aa, Homo Sapiens
ESYDRTALKL

SEQ ID NO: 52919 - protein, 10 aa, Homo Sapiens
ESYRGTSDWK

SEQ ID NO: 52920 - protein, 10 aa, Homo Sapiens
ESYTQSFQSR

SEQ ID NO: 52921 - protein, 10 aa, Homo Sapiens
ETAAAMLRKH

SEQ ID NO: 52922 - protein, 10 aa, Homo Sapiens
ETAATLTTKH

SEQ ID NO: 52923 - protein, 10 aa, Homo Sapiens
ETADKVLQNK

SEQ ID NO: 52924 - protein, 10 aa, Homo Sapiens
ETADLKSLAK

SEQ ID NO: 52925 - protein, 10 aa, Homo Sapiens
ETAFGYKGLK

SEQ ID NO: 52926 - protein, 10 aa, Homo Sapiens
ETAGSTKYRL

SEQ ID NO: 52927 - protein, 10 aa, Homo Sapiens
ETAGSTSIPK

SEQ ID NO: 52928 - protein, 10 aa, Homo Sapiens
ETAKKLGLRC

SEQ ID NO: 52929 - protein, 10 aa, Homo Sapiens
ETAKSATVKL

SEQ ID NO: 52930 - protein, 10 aa, Homo Sapiens
ETAKTGKFLK

SEQ ID NO: 52931 - protein, 10 aa, Homo Sapiens
ETALNAKAYK

SEQ ID NO: 52932 - protein, 10 aa, Homo Sapiens
ETALNSKAYK

SEQ ID NO: 52933 - protein, 10 aa, Homo Sapiens
ETASKTLSRF

SEQ ID NO: 52934 - protein, 10 aa, Homo Sapiens
ETATPAPVEK

SEQ ID NO: 52935 - protein, 10 aa, Homo Sapiens
ETAWNTGTLR

SEQ ID NO: 52936 - protein, 10 aa, Homo Sapiens
ETCDVHIRKQ

SEQ ID NO: 52937 - protein, 10 aa, Homo Sapiens
ETCLKTQQIK

SEQ ID NO: 52938 - protein, 10 aa, Homo Sapiens
ETCQLAVRRL

SEQ ID NO: 52939 - protein, 10 aa, Homo Sapiens
ETCVPLPWFR

SEQ ID NO: 52940 - protein, 10 aa, Homo Sapiens
ETDDAGNRLR

SEQ ID NO: 52941 - protein, 10 aa, Homo Sapiens
ETDFSTPTPR

SEQ ID NO: 52942 - protein, 10 aa, Homo Sapiens
ETDPAIVINR

SEQ ID NO: 52943 - protein, 10 aa, Homo Sapiens
ETENAGLRLR

SEQ ID NO: 52944 - protein, 10 aa, Homo Sapiens
ETFDFQAMGR

SEQ ID NO: 52945 - protein, 10 aa, Homo Sapiens
ETFDKTILRA

SEQ ID NO: 52946 - protein, 10 aa, Homo Sapiens
ETFDLQLGRF

SEQ ID NO: 52947 - protein, 10 aa, Homo Sapiens
ETFHLATRKF

SEQ ID NO: 52948 - protein, 10 aa, Homo Sapiens
ETFQQKMLRF

SEQ ID NO: 52949 - protein, 10 aa, Homo Sapiens
ETFSGVYKKL

SEQ ID NO: 52950 - protein, 10 aa, Homo Sapiens
ETFSSATKRL

SEQ ID NO: 52951 - protein, 10 aa, Homo Sapiens
ETFSYPDFLR

SEQ ID NO: 52952 - protein, 10 aa, Homo Sapiens
ETFTHHLQRL

SEQ ID NO: 52953 - protein, 10 aa, Homo Sapiens
ETFTPNRVEK

SEQ ID NO: 52954 - protein, 10 aa, Homo Sapiens
ETGDFERTLK

SEQ ID NO: 52955 - protein, 10 aa, Homo Sapiens
ETGYPLAVKL

SEQ ID NO: 52956 - protein, 10 aa, Homo Sapiens
ETHYEKVLKK

SEQ ID NO: 52957 - protein, 10 aa, Homo Sapiens
ETHYQLGLAY

SEQ ID NO: 52958 - protein, 10 aa, Homo Sapiens
ETIAAKQIEK

SEQ ID NO: 52959 - protein, 10 aa, Homo Sapiens
ETIEGMLLRL

SEQ ID NO: 52960 - protein, 10 aa, Homo Sapiens
ETIFTPSSVK

SEQ ID NO: 52961 - protein, 10 aa, Homo Sapiens
ETIGKKFEKR

SEQ ID NO: 52962 - protein, 10 aa, Homo Sapiens
ETIGTGGFAK

SEQ ID NO: 52963 - protein, 10 aa, Homo Sapiens
ETIIPSERKK

SEQ ID NO: 52964 - protein, 10 aa, Homo Sapiens
ETIKDGVSRF

SEQ ID NO: 52965 - protein, 10 aa, Homo Sapiens
ETIMSSSMGK

SEQ ID NO: 52966 - protein, 10 aa, Homo Sapiens
ETIPLTAEKL

SEQ ID NO: 52967 - protein, 10 aa, Homo Sapiens
ETLDHLIKGR

SEQ ID NO: 52968 - protein, 10 aa, Homo Sapiens
ETLDSIALQK

SEQ ID NO: 52969 - protein, 10 aa, Homo Sapiens
ETLEKHLRPK

SEQ ID NO: 52970 - protein, 10 aa, Homo Sapiens
ETLELMLQRW

SEQ ID NO: 52971 - protein, 10 aa, Homo Sapiens
ETLETIINRL

SEQ ID NO: 52972 - protein, 10 aa, Homo Sapiens
ETLFPGINSK

SEQ ID NO: 52973 - protein, 10 aa, Homo Sapiens
ETLFPSKIGV

SEQ ID NO: 52974 - protein, 10 aa, Homo Sapiens
ETLGHCLAHL

SEQ ID NO: 52975 - protein, 10 aa, Homo Sapiens
ETLGPKPAAR

SEQ ID NO: 52976 - protein, 10 aa, Homo Sapiens
ETLGQVVRRL

SEQ ID NO: 52977 - protein, 10 aa, Homo Sapiens
ETLKHSGIGR

SEQ ID NO: 52978 - protein, 10 aa, Homo Sapiens
ETLKRLQSQK

SEQ ID NO: 52979 - protein, 10 aa, Homo Sapiens
ETLLEISKRF

SEQ ID NO: 52980 - protein, 10 aa, Homo Sapiens
ETLNGTMILK

SEQ ID NO: 52981 - protein, 10 aa, Homo Sapiens
ETLPPFPTRL

SEQ ID NO: 52982 - protein, 10 aa, Homo Sapiens
ETLPPVGVNR

SEQ ID NO: 52983 - protein, 10 aa, Homo Sapiens
ETLQEEFSRF

SEQ ID NO: 52984 - protein, 10 aa, Homo Sapiens
ETLQESLARL

SEQ ID NO: 52985 - protein, 10 aa, Homo Sapiens
ETLSSVASKL

SEQ ID NO: 52986 - protein, 10 aa, Homo Sapiens
ETLTRPFSGR

SEQ ID NO: 52987 - protein, 10 aa, Homo Sapiens
ETMASLQSRL

SEQ ID NO: 52988 - protein, 10 aa, Homo Sapiens
ETMGPMGWMK

SEQ ID NO: 52989 - protein, 10 aa, Homo Sapiens
ETNGGQVTYR

SEQ ID NO: 52990 - protein, 10 aa, Homo Sapiens
ETNHTSRPRL

SEQ ID NO: 52991 - protein, 10 aa, Homo Sapiens
ETNPSILEVK

SEQ ID NO: 52992 - protein, 10 aa, Homo Sapiens
ETPDIKLFGK

SEQ ID NO: 52993 - protein, 10 aa, Homo Sapiens
ETPGHTPSLR

SEQ ID NO: 52994 - protein, 10 aa, Homo Sapiens
ETQPGRLLGR

SEQ ID NO: 52995 - protein, 10 aa, Homo Sapiens
ETRGVKDVLK

SEQ ID NO: 52996 - protein, 10 aa, Homo Sapiens
ETSDFLGGLR

SEQ ID NO: 52997 - protein, 10 aa, Homo Sapiens
ETSESLKTKM

SEQ ID NO: 52998 - protein, 10 aa, Homo Sapiens
ETSGISIYRL

SEQ ID NO: 52999 - protein, 10 aa, Homo Sapiens
ETSKMKVLRF

SEQ ID NO: 53000 - protein, 10 aa, Homo Sapiens
ETSLPSFVTK

SEQ ID NO: 53001 - protein, 10 aa, Homo Sapiens
ETSPLTAEKL

SEQ ID NO: 53002 - protein, 10 aa, Homo Sapiens
ETSQAGLFRL

SEQ ID NO: 53003 - protein, 10 aa, Homo Sapiens
ETSQGLVPEK

SEQ ID NO: 53004 - protein, 10 aa, Homo Sapiens
ETSVGYAIFK

SEQ ID NO: 53005 - protein, 10 aa, Homo Sapiens
ETTDSILSHF

SEQ ID NO: 53006 - protein, 10 aa, Homo Sapiens
ETTNLSIQQK

SEQ ID NO: 53007 - protein, 10 aa, Homo Sapiens
ETTPLTIEKL

SEQ ID NO: 53008 - protein, 10 aa, Homo Sapiens
ETTPPLSTER

SEQ ID NO: 53009 - protein, 10 aa, Homo Sapiens
ETTYVSNLTR

SEQ ID NO: 53010 - protein, 10 aa, Homo Sapiens
ETVGILHKVK

SEQ ID NO: 53011 - protein, 10 aa, Homo Sapiens
ETVGSIFSRT

SEQ ID NO: 53012 - protein, 10 aa, Homo Sapiens
ETVGTGIMGK

SEQ ID NO: 53013 - protein, 10 aa, Homo Sapiens
ETVGTGIMGR

SEQ ID NO: 53014 - protein, 10 aa, Homo Sapiens
ETVGVFEVPK

SEQ ID NO: 53015 - protein, 10 aa, Homo Sapiens
ETVGVKINEK

SEQ ID NO: 53016 - protein, 10 aa, Homo Sapiens
ETVKDLAPKC

SEQ ID NO: 53017 - protein, 10 aa, Homo Sapiens
ETVMLHARKL

SEQ ID NO: 53018 - protein, 10 aa, Homo Sapiens
ETVNFSGVKR

SEQ ID NO: 53019 - protein, 10 aa, Homo Sapiens
ETVNVEPLTK

SEQ ID NO: 53020 - protein, 10 aa, Homo Sapiens
ETVPAPSANK

SEQ ID NO: 53021 - protein, 10 aa, Homo Sapiens
ETVQELAIYK

SEQ ID NO: 53022 - protein, 10 aa, Homo Sapiens
ETVRTSEVLR

SEQ ID NO: 53023 - protein, 10 aa, Homo Sapiens
ETVSEASQRL

SEQ ID NO: 53024 - protein, 10 aa, Homo Sapiens
ETVTGGFGAK

SEQ ID NO: 53025 - protein, 10 aa, Homo Sapiens
ETWEERLLRF

SEQ ID NO: 53026 - protein, 10 aa, Homo Sapiens
ETWLSENQRL

SEQ ID NO: 53027 - protein, 10 aa, Homo Sapiens
ETYEALLARF

SEQ ID NO: 53028 - protein, 10 aa, Homo Sapiens
ETYEGSPVSK

SEQ ID NO: 53029 - protein, 10 aa, Homo Sapiens
ETYGAFLQKF

SEQ ID NO: 53030 - protein, 10 aa, Homo Sapiens
ETYHPGAVIR

SEQ ID NO: 53031 - protein, 10 aa, Homo Sapiens
ETYLNENLRK

SEQ ID NO: 53032 - protein, 10 aa, Homo Sapiens
ETYPFNPPKV

SEQ ID NO: 53033 - protein, 10 aa, Homo Sapiens
ETYSQTKPKM

SEQ ID NO: 53034 - protein, 10 aa, Homo Sapiens
EVAAMENVHR

SEQ ID NO: 53035 - protein, 10 aa, Homo Sapiens
EVAASLQQKL

SEQ ID NO: 53036 - protein, 10 aa, Homo Sapiens
EVAEAIQTVK

SEQ ID NO: 53037 - protein, 10 aa, Homo Sapiens
EVAEVVRITK

SEQ ID NO: 53038 - protein, 10 aa, Homo Sapiens
EVAGFVLNRL

SEQ ID NO: 53039 - protein, 10 aa, Homo Sapiens
EVAGIINDAK

SEQ ID NO: 53040 - protein, 10 aa, Homo Sapiens
EVAGRMLGGK

SEQ ID NO: 53041 - protein, 10 aa, Homo Sapiens
EVAGTVTGQK

SEQ ID NO: 53042 - protein, 10 aa, Homo Sapiens
EVAPCMGDRF

SEQ ID NO: 53043 - protein, 10 aa, Homo Sapiens
EVAPPEYHRK

SEQ ID NO: 53044 - protein, 10 aa, Homo Sapiens
EVAPVISSAY

SEQ ID NO: 53045 - protein, 10 aa, Homo Sapiens
EVAQPALEGK

SEQ ID NO: 53046 - protein, 10 aa, Homo Sapiens
EVAQPSEVLR

SEQ ID NO: 53047 - protein, 10 aa, Homo Sapiens
EVAQVESLRY

SEQ ID NO: 53048 - protein, 10 aa, Homo Sapiens
EVARLWGIRK

SEQ ID NO: 53049 - protein, 10 aa, Homo Sapiens
EVAVETTTPK

SEQ ID NO: 53050 - protein, 10 aa, Homo Sapiens
EVAVKLESQK

SEQ ID NO: 53051 - protein, 10 aa, Homo Sapiens
EVCGKGFTQR

SEQ ID NO: 53052 - protein, 10 aa, Homo Sapiens
EVCGQDITTK

SEQ ID NO: 53053 - protein, 10 aa, Homo Sapiens
EVCPLSESRF

SEQ ID NO: 53054 - protein, 10 aa, Homo Sapiens
EVDGASFLLK

SEQ ID NO: 53055 - protein, 10 aa, Homo Sapiens
EVDLNVAAPK

SEQ ID NO: 53056 - protein, 10 aa, Homo Sapiens
EVDNRSPQKF

SEQ ID NO: 53057 - protein, 10 aa, Homo Sapiens
EVDPNTQNPK

SEQ ID NO: 53058 - protein, 10 aa, Homo Sapiens
EVEERFGRFK

SEQ ID NO: 53059 - protein, 10 aa, Homo Sapiens
EVELSARRLR

SEQ ID NO: 53060 - protein, 10 aa, Homo Sapiens
EVEPGVHLGR

SEQ ID NO: 53061 - protein, 10 aa, Homo Sapiens
EVFFGPFGHK

SEQ ID NO: 53062 - protein, 10 aa, Homo Sapiens
EVFFSEKIYK

SEQ ID NO: 53063 - protein, 10 aa, Homo Sapiens
EVFGTADLYR

SEQ ID NO: 53064 - protein, 10 aa, Homo Sapiens
EVFKAFYLGK

SEQ ID NO: 53065 - protein, 10 aa, Homo Sapiens
EVFLAQGTLR

SEQ ID NO: 53066 - protein, 10 aa, Homo Sapiens
EVFNDPKVLK

SEQ ID NO: 53067 - protein, 10 aa, Homo Sapiens
EVFNKFFKER

SEQ ID NO: 53068 - protein, 10 aa, Homo Sapiens
EVFQKPFVEK

SEQ ID NO: 53069 - protein, 10 aa, Homo Sapiens
EVFRTKIVEK

SEQ ID NO: 53070 - protein, 10 aa, Homo Sapiens
EVFSYHQGLK

SEQ ID NO: 53071 - protein, 10 aa, Homo Sapiens
EVFTTLSVTK

SEQ ID NO: 53072 - protein, 10 aa, Homo Sapiens
EVGPEGALGK

SEQ ID NO: 53073 - protein, 10 aa, Homo Sapiens
EVIAEAVGVK

SEQ ID NO: 53074 - protein, 10 aa, Homo Sapiens
EVIEGPQNAR

SEQ ID NO: 53075 - protein, 10 aa, Homo Sapiens
EVIKPWITKR

SEQ ID NO: 53076 - protein, 10 aa, Homo Sapiens
EVILIDPFHK

SEQ ID NO: 53077 - protein, 10 aa, Homo Sapiens
EVININLKNK

SEQ ID NO: 53078 - protein, 10 aa, Homo Sapiens
EVINKLGPRY

SEQ ID NO: 53079 - protein, 10 aa, Homo Sapiens
EVINKNVTEK

SEQ ID NO: 53080 - protein, 10 aa, Homo Sapiens
EVIPKRLQEK

SEQ ID NO: 53081 - protein, 10 aa, Homo Sapiens
EVIQGLLKKF

SEQ ID NO: 53082 - protein, 10 aa, Homo Sapiens
EVIRAYDTTK

SEQ ID NO: 53083 - protein, 10 aa, Homo Sapiens
EVISDLQSKL

SEQ ID NO: 53084 - protein, 10 aa, Homo Sapiens
EVKISSAVLK

SEQ ID NO: 53085 - protein, 10 aa, Homo Sapiens
EVKNAEILRM

SEQ ID NO: 53086 - protein, 10 aa, Homo Sapiens
EVKRPGESLR

SEQ ID NO: 53087 - protein, 10 aa, Homo Sapiens
EVLAEFERRK

SEQ ID NO: 53088 - protein, 10 aa, Homo Sapiens
EVLAGPLAQR

SEQ ID NO: 53089 - protein, 10 aa, Homo Sapiens
EVLDKAQAKF

SEQ ID NO: 53090 - protein, 10 aa, Homo Sapiens
EVLDLKPNGK

SEQ ID NO: 53091 - protein, 10 aa, Homo Sapiens
EVLDPTAANR

SEQ ID NO: 53092 - protein, 10 aa, Homo Sapiens
EVLDYFLRRL

SEQ ID NO: 53093 - protein, 10 aa, Homo Sapiens
EVLEFPMVVK

SEQ ID NO: 53094 - protein, 10 aa, Homo Sapiens
EVLEGFNMAK

SEQ ID NO: 53095 - protein, 10 aa, Homo Sapiens
EVLENLTQGK

SEQ ID NO: 53096 - protein, 10 aa, Homo Sapiens
EVLESFFVQK

SEQ ID NO: 53097 - protein, 10 aa, Homo Sapiens
EVLESTTQTK

SEQ ID NO: 53098 - protein, 10 aa, Homo Sapiens
EVLGAPVKGK

SEQ ID NO: 53099 - protein, 10 aa, Homo Sapiens
EVLGGEFLKY

SEQ ID NO: 53100 - protein, 10 aa, Homo Sapiens
EVLGGINCVK

SEQ ID NO: 53101 - protein, 10 aa, Homo Sapiens
EVLHGPSIMK

SEQ ID NO: 53102 - protein, 10 aa, Homo Sapiens
EVLIDTHLFK

SEQ ID NO: 53103 - protein, 10 aa, Homo Sapiens
EVLKAVDIVK

SEQ ID NO: 53104 - protein, 10 aa, Homo Sapiens
EVLKHLKERF

SEQ ID NO: 53105 - protein, 10 aa, Homo Sapiens
EVLKIMPVQK

SEQ ID NO: 53106 - protein, 10 aa, Homo Sapiens
EVLKNRAIKK

SEQ ID NO: 53107 - protein, 10 aa, Homo Sapiens
EVLKVIRTGK

SEQ ID NO: 53108 - protein, 10 aa, Homo Sapiens
EVLKVLGNPK

SEQ ID NO: 53109 - protein, 10 aa, Homo Sapiens
EVLLKVMDAK

SEQ ID NO: 53110 - protein, 10 aa, Homo Sapiens
EVLNVMDKNK

SEQ ID NO: 53111 - protein, 10 aa, Homo Sapiens
EVLPDHMTMK

SEQ ID NO: 53112 - protein, 10 aa, Homo Sapiens
EVLPSPRGQR

SEQ ID NO: 53113 - protein, 10 aa, Homo Sapiens
EVLQYQLQHL

SEQ ID NO: 53114 - protein, 10 aa, Homo Sapiens
EVLRYVDSSK

SEQ ID NO: 53115 - protein, 10 aa, Homo Sapiens
EVLSEEPILK

SEQ ID NO: 53116 - protein, 10 aa, Homo Sapiens
EVLSKALSQR

SEQ ID NO: 53117 - protein, 10 aa, Homo Sapiens
EVLSQKRMYR

SEQ ID NO: 53118 - protein, 10 aa, Homo Sapiens
EVMGNPGTFK

SEQ ID NO: 53119 - protein, 10 aa, Homo Sapiens
EVNGVCMEGK

SEQ ID NO: 53120 - protein, 10 aa, Homo Sapiens
EVNQETIQRL

SEQ ID NO: 53121 - protein, 10 aa, Homo Sapiens
EVNRPQIHKL

SEQ ID NO: 53122 - protein, 10 aa, Homo Sapiens
EVPAAYQTPK

SEQ ID NO: 53123 - protein, 10 aa, Homo Sapiens
EVPDFLGAPK

SEQ ID NO: 53124 - protein, 10 aa, Homo Sapiens
EVPDHDNWPK

SEQ ID NO: 53125 - protein, 10 aa, Homo Sapiens
EVPEGGLVPK

SEQ ID NO: 53126 - protein, 10 aa, Homo Sapiens
EVPPNQIVGR

SEQ ID NO: 53127 - protein, 10 aa, Homo Sapiens
EVPRSPFKVK

SEQ ID NO: 53128 - protein, 10 aa, Homo Sapiens
EVPTSVFGEK

SEQ ID NO: 53129 - protein, 10 aa, Homo Sapiens
EVRDQKQLLK

SEQ ID NO: 53130 - protein, 10 aa, Homo Sapiens
EVSPITGRSK

SEQ ID NO: 53131 - protein, 10 aa, Homo Sapiens
EVSPMYGVQK

SEQ ID NO: 53132 - protein, 10 aa, Homo Sapiens
EVSPPNLRGR

SEQ ID NO: 53133 - protein, 10 aa, Homo Sapiens
EVSSMVLTKM

SEQ ID NO: 53134 - protein, 10 aa, Homo Sapiens
EVTAGNRLFY

SEQ ID NO: 53135 - protein, 10 aa, Homo Sapiens
EVTGQAFLYH

SEQ ID NO: 53136 - protein, 10 aa, Homo Sapiens
EVTSTFKLMK

SEQ ID NO: 53137 - protein, 10 aa, Homo Sapiens
EVVDVSTMHR

SEQ ID NO: 53138 - protein, 10 aa, Homo Sapiens
EVVGPEGMEK

SEQ ID NO: 53139 - protein, 10 aa, Homo Sapiens
EVVIPQKKGK

SEQ ID NO: 53140 - protein, 10 aa, Homo Sapiens
EVVPSKFKEK

SEQ ID NO: 53141 - protein, 10 aa, Homo Sapiens
EVVSGSGLTR

SEQ ID NO: 53142 - protein, 10 aa, Homo Sapiens
EVVTSMGTQR

SEQ ID NO: 53143 - protein, 10 aa, Homo Sapiens
EVWEGHYTAK

SEQ ID NO: 53144 - protein, 10 aa, Homo Sapiens
EVWERSLKEK

SEQ ID NO: 53145 - protein, 10 aa, Homo Sapiens
EVWNNLGTTK

SEQ ID NO: 53146 - protein, 10 aa, Homo Sapiens
EVWNSEACNK

SEQ ID NO: 53147 - protein, 10 aa, Homo Sapiens
EVWPHSTERK

SEQ ID NO: 53148 - protein, 10 aa, Homo Sapiens
EVYDDFLHYK

SEQ ID NO: 53149 - protein, 10 aa, Homo Sapiens
EVYDGPKNVR

SEQ ID NO: 53150 - protein, 10 aa, Homo Sapiens
EVYDQLFKSR

SEQ ID NO: 53151 - protein, 10 aa, Homo Sapiens
EVYEGVYTNH

SEQ ID NO: 53152 - protein, 10 aa, Homo Sapiens
EVYELRSRGK

SEQ ID NO: 53153 - protein, 10 aa, Homo Sapiens
EVYGARLAAK

SEQ ID NO: 53154 - protein, 10 aa, Homo Sapiens
EVYPGAKLFY

SEQ ID NO: 53155 - protein, 10 aa, Homo Sapiens
EVYRQSLEKL

SEQ ID NO: 53156 - protein, 10 aa, Homo Sapiens
EVYRTQVVEK

SEQ ID NO: 53157 - protein, 10 aa, Homo Sapiens
EVYTCGLNTK

SEQ ID NO: 53158 - protein, 10 aa, Homo Sapiens
FAIQPNTTGK

SEQ ID NO: 53159 - protein, 10 aa, Homo Sapiens
FALGPTISFK

SEQ ID NO: 53160 - protein, 10 aa, Homo Sapiens
FAYGQTASGK

SEQ ID NO: 53161 - protein, 10 aa, Homo Sapiens
FAYGQTGSGK

SEQ ID NO: 53162 - protein, 10 aa, Homo Sapiens
FAYGQTGTGK

SEQ ID NO: 53163 - protein, 10 aa, Homo Sapiens
FIILRASLAQ

SEQ ID NO: 53164 - protein, 10 aa, Homo Sapiens
FSCDGEGVLK

SEQ ID NO: 53165 - protein, 10 aa, Homo Sapiens
FSNVGTAISK

SEQ ID NO: 53166 - protein, 10 aa, Homo Sapiens
FTCGKIVGNK

SEQ ID NO: 53167 - protein, 10 aa, Homo Sapiens
FTETPSPVLK

SEQ ID NO: 53168 - protein, 10 aa, Homo Sapiens
FTFDNVLPGK

SEQ ID NO: 53169 - protein, 10 aa, Homo Sapiens
FTFTAGNALK

SEQ ID NO: 53170 - protein, 10 aa, Homo Sapiens
FTHDQSISQK

SEQ ID NO: 53171 - protein, 10 aa, Homo Sapiens
FTKFPTKTGR

SEQ ID NO: 53172 - protein, 10 aa, Homo Sapiens
FTRNGKIIGK

SEQ ID NO: 53173 - protein, 10 aa, Homo Sapiens
FTSFLDGLKK

SEQ ID NO: 53174 - protein, 10 aa, Homo Sapiens
FTSPFCLQVK

SEQ ID NO: 53175 - protein, 10 aa, Homo Sapiens
FVAPPPKTQR

SEQ ID NO: 53176 - protein, 10 aa, Homo Sapiens
FVDWCPTGFK

SEQ ID NO: 53177 - protein, 10 aa, Homo Sapiens
FVKPPAGVTK

SEQ ID NO: 53178 - protein, 10 aa, Homo Sapiens
FVQENPLSQK

SEQ ID NO: 53179 - protein, 10 aa, Homo Sapiens
FVSPPVLSPK

SEQ ID NO: 53180 - protein, 10 aa, Homo Sapiens
FVYDHVFAEK

SEQ ID NO: 53181 - protein, 10 aa, Homo Sapiens
FVYEPKEQKK

SEQ ID NO: 53182 - protein, 10 aa, Homo Sapiens
FVYKGGKIYK

SEQ ID NO: 53183 - protein, 10 aa, Homo Sapiens
FVYPGNPLRH

SEQ ID NO: 53184 - protein, 10 aa, Homo Sapiens
GPAAAFAGTV

SEQ ID NO: 53185 - protein, 10 aa, Homo Sapiens
GSYNKVFLAK

SEQ ID NO: 53186 - protein, 10 aa, Homo Sapiens
GTYVKPLSNK

SEQ ID NO: 53187 - protein, 10 aa, Homo Sapiens
HAAKTLGIGK

SEQ ID NO: 53188 - protein, 10 aa, Homo Sapiens
HADICTLSEK

SEQ ID NO: 53189 - protein, 10 aa, Homo Sapiens
HILDFSPSLK

SEQ ID NO: 53190 - protein, 10 aa, Homo Sapiens
HIRGPPYAHK

SEQ ID NO: 53191 - protein, 10 aa, Homo Sapiens
HSLQPSISQK

SEQ ID NO: 53192 - protein, 10 aa, Homo Sapiens
HTASPTGMMK

SEQ ID NO: 53193 - protein, 10 aa, Homo Sapiens
HTCSPTNQKL

SEQ ID NO: 53194 - protein, 10 aa, Homo Sapiens
HTDSPCLRVK

SEQ ID NO: 53195 - protein, 10 aa, Homo Sapiens
HTGESLTTKL

SEQ ID NO: 53196 - protein, 10 aa, Homo Sapiens
HTGQFVYCGK

SEQ ID NO: 53197 - protein, 10 aa, Homo Sapiens
HTIAPMGTRR

SEQ ID NO: 53198 - protein, 10 aa, Homo Sapiens
HTISPFMNKF

SEQ ID NO: 53199 - protein, 10 aa, Homo Sapiens
HTISPLDLAK

SEQ ID NO: 53200 - protein, 10 aa, Homo Sapiens
HTKDLPFRCK

SEQ ID NO: 53201 - protein, 10 aa, Homo Sapiens
HTLEPLIPRH

SEQ ID NO: 53202 - protein, 10 aa, Homo Sapiens
HTMGGDFSGK

SEQ ID NO: 53203 - protein, 10 aa, Homo Sapiens
HTMGGDLSGK

SEQ ID NO: 53204 - protein, 10 aa, Homo Sapiens
HTMSSSHLFY

SEQ ID NO: 53205 - protein, 10 aa, Homo Sapiens
HTNVVVPRSK

SEQ ID NO: 53206 - protein, 10 aa, Homo Sapiens
HTRTPPIIHR

SEQ ID NO: 53207 - protein, 10 aa, Homo Sapiens
HTSGSLSSRF

SEQ ID NO: 53208 - protein, 10 aa, Homo Sapiens
HTSSAIPVPK

SEQ ID NO: 53209 - protein, 10 aa, Homo Sapiens
HTVLSKLTRK

SEQ ID NO: 53210 - protein, 10 aa, Homo Sapiens
HTVVPSISKL

SEQ ID NO: 53211 - protein, 10 aa, Homo Sapiens
HTWCSWRSLK

SEQ ID NO: 53212 - protein, 10 aa, Homo Sapiens
HVAESSLSRL

SEQ ID NO: 53213 - protein, 10 aa, Homo Sapiens
HVAHVTITTK

SEQ ID NO: 53214 - protein, 10 aa, Homo Sapiens
HVAQAFPTKL

SEQ ID NO: 53215 - protein, 10 aa, Homo Sapiens
HVCGVHLNRL

SEQ ID NO: 53216 - protein, 10 aa, Homo Sapiens
HVIETLIGKK

SEQ ID NO: 53217 - protein, 10 aa, Homo Sapiens
HVIIGLKTAK

SEQ ID NO: 53218 - protein, 10 aa, Homo Sapiens
HVKEGMDVVK

SEQ ID NO: 53219 - protein, 10 aa, Homo Sapiens
HVLDLVSHPR

SEQ ID NO: 53220 - protein, 10 aa, Homo Sapiens
HVLGTITTDK

SEQ ID NO: 53221 - protein, 10 aa, Homo Sapiens
HVMGFSVTGR

SEQ ID NO: 53222 - protein, 10 aa, Homo Sapiens
HVPGSPFSVK

SEQ ID NO: 53223 - protein, 10 aa, Homo Sapiens
HVTVSGGTPK

SEQ ID NO: 53224 - protein, 10 aa, Homo Sapiens
HVVPGSGVVK

SEQ ID NO: 53225 - protein, 10 aa, Homo Sapiens
HVVTFTFTQK

SEQ ID NO: 53226 - protein, 10 aa, Homo Sapiens
HVYDGKFLAR

SEQ ID NO: 53227 - protein, 10 aa, Homo Sapiens
HVYVGNISKK

SEQ ID NO: 53228 - protein, 10 aa, Homo Sapiens
IAIDTIINQK

SEQ ID NO: 53229 - protein, 10 aa, Homo Sapiens
IALWPPVREK

SEQ ID NO: 53230 - protein, 10 aa, Homo Sapiens
IDISDIAEKR

SEQ ID NO: 53231 - protein, 10 aa, Homo Sapiens
ILYGPPGTGK

SEQ ID NO: 53232 - protein, 10 aa, Homo Sapiens
IPLDPVAGYK

SEQ ID NO: 53233 - protein, 10 aa, Homo Sapiens
IPYDQSPGPK

SEQ ID NO: 53234 - protein, 10 aa, Homo Sapiens
ISFPATGCQK

SEQ ID NO: 53235 - protein, 10 aa, Homo Sapiens
ITALAPSTMK

SEQ ID NO: 53236 - protein, 10 aa, Homo Sapiens
ITFDVAPSRL

SEQ ID NO: 53237 - protein, 10 aa, Homo Sapiens
ITWERIISHF

SEQ ID NO: 53238 - protein, 10 aa, Homo Sapiens
ITYDDRFNLK

SEQ ID NO: 53239 - protein, 10 aa, Homo Sapiens
IVPDIAVGTK

SEQ ID NO: 53240 - protein, 10 aa, Homo Sapiens
LAYGPTGAGK

SEQ ID NO: 53241 - protein, 10 aa, Homo Sapiens
LLYYSRTMAK

SEQ ID NO: 53242 - protein, 10 aa, Homo Sapiens
LPYVAPELLK

SEQ ID NO: 53243 - protein, 10 aa, Homo Sapiens
LSLGVAALYK

SEQ ID NO: 53244 - protein, 10 aa, Homo Sapiens
LTAPSTSARL

SEQ ID NO: 53245 - protein, 10 aa, Homo Sapiens
LTLTPSAVNK

SEQ ID NO: 53246 - protein, 10 aa, Homo Sapiens
LTSSVPTTKK

SEQ ID NO: 53247 - protein, 10 aa, Homo Sapiens
LVAASQAALG

SEQ ID NO: 53248 - protein, 10 aa, Homo Sapiens
LVAEPQKVNK

SEQ ID NO: 53249 - protein, 10 aa, Homo Sapiens
LVIEHIQVNK

SEQ ID NO: 53250 - protein, 10 aa, Homo Sapiens
LVYEYVVERF

SEQ ID NO: 53251 - protein, 10 aa, Homo Sapiens
MAAAAVSSAK

SEQ ID NO: 53252 - protein, 10 aa, Homo Sapiens
MIFDPTMSKK

SEQ ID NO: 53253 - protein, 10 aa, Homo Sapiens
MILTNPVAAK

SEQ ID NO: 53254 - protein, 10 aa, Homo Sapiens
MTAEKFLNRL

SEQ ID NO: 53255 - protein, 10 aa, Homo Sapiens
MTAPSNFLHR

SEQ ID NO: 53256 - protein, 10 aa, Homo Sapiens
MTCGNTKVLR

SEQ ID NO: 53257 - protein, 10 aa, Homo Sapiens
MTDGAQQALR

SEQ ID NO: 53258 - protein, 10 aa, Homo Sapiens
MTEEAAVAIK

SEQ ID NO: 53259 - protein, 10 aa, Homo Sapiens
MTEEAQRLCK

SEQ ID NO: 53260 - protein, 10 aa, Homo Sapiens
MTFGSGGHTK

SEQ ID NO: 53261 - protein, 10 aa, Homo Sapiens
MTGSWDKTLK

SEQ ID NO: 53262 - protein, 10 aa, Homo Sapiens
MTHATKAIYR

SEQ ID NO: 53263 - protein, 10 aa, Homo Sapiens
MTHKAMSIGR

SEQ ID NO: 53264 - protein, 10 aa, Homo Sapiens
MTIEELLTRY

SEQ ID NO: 53265 - protein, 10 aa, Homo Sapiens
MTKDNNLLGK

SEQ ID NO: 53266 - protein, 10 aa, Homo Sapiens
MTKGTSSFGK

SEQ ID NO: 53267 - protein, 10 aa, Homo Sapiens
MTKSGYQPPR

SEQ ID NO: 53268 - protein, 10 aa, Homo Sapiens
MTLNPSTKRK

SEQ ID NO: 53269 - protein, 10 aa, Homo Sapiens
MTMQPYLTTK

SEQ ID NO: 53270 - protein, 10 aa, Homo Sapiens
MTQDAQNALR

SEQ ID NO: 53271 - protein, 10 aa, Homo Sapiens
MTSALPIIQK

SEQ ID NO: 53272 - protein, 10 aa, Homo Sapiens
MTWEKRLAKK

SEQ ID NO: 53273 - protein, 10 aa, Homo Sapiens
MVADVFSHRF

SEQ ID NO: 53274 - protein, 10 aa, Homo Sapiens
MVIKEKSVFK

SEQ ID NO: 53275 - protein, 10 aa, Homo Sapiens
MVVDYPNSAK

SEQ ID NO: 53276 - protein, 10 aa, Homo Sapiens
MVWEGLNVVK

SEQ ID NO: 53277 - protein, 10 aa, Homo Sapiens
NAAIATIKTK

SEQ ID NO: 53278 - protein, 10 aa, Homo Sapiens
NAGEDPGLAR

SEQ ID NO: 53279 - protein, 10 aa, Homo Sapiens
NALWGRTTLK

SEQ ID NO: 53280 - protein, 10 aa, Homo Sapiens
NQMEKIIKEK

SEQ ID NO: 53281 - protein, 10 aa, Homo Sapiens
NSMPHPATGK

SEQ ID NO: 53282 - protein, 10 aa, Homo Sapiens
NSYENVLICK

SEQ ID NO: 53283 - protein, 10 aa, Homo Sapiens
NTADWVLPGK

SEQ ID NO: 53284 - protein, 10 aa, Homo Sapiens
NTFLGTPVQK

SEQ ID NO: 53285 - protein, 10 aa, Homo Sapiens
NTFSVVPSPK

SEQ ID NO: 53286 - protein, 10 aa, Homo Sapiens
NTLQGPVSFK

SEQ ID NO: 53287 - protein, 10 aa, Homo Sapiens
NTVTQVLSRF

SEQ ID NO: 53288 - protein, 10 aa, Homo Sapiens
NVAEFVCKYK

SEQ ID NO: 53289 - protein, 10 aa, Homo Sapiens
NVDDPTGNFR

SEQ ID NO: 53290 - protein, 10 aa, Homo Sapiens
NVGKPLIAKL

SEQ ID NO: 53291 - protein, 10 aa, Homo Sapiens
NVIDWSDVRK

SEQ ID NO: 53292 - protein, 10 aa, Homo Sapiens
NVINYSFPAK

SEQ ID NO: 53293 - protein, 10 aa, Homo Sapiens
NVYPSKPLTK

SEQ ID NO: 53294 - protein, 10 aa, Homo Sapiens
QAAELGGLLK

SEQ ID NO: 53295 - protein, 10 aa, Homo Sapiens
QALEGKYTDL

SEQ ID NO: 53296 - protein, 10 aa, Homo Sapiens
QIFVKTLTGK

SEQ ID NO: 53297 - protein, 10 aa, Homo Sapiens
QIPQLPAPPK

SEQ ID NO: 53298 - protein, 10 aa, Homo Sapiens
QTAAPSPLRL

SEQ ID NO: 53299 - protein, 10 aa, Homo Sapiens
QTCSAHPARF

SEQ ID NO: 53300 - protein, 10 aa, Homo Sapiens
QTFLLQTTKL

SEQ ID NO: 53301 - protein, 10 aa, Homo Sapiens
QTIESINLLK

SEQ ID NO: 53302 - protein, 10 aa, Homo Sapiens
QTINLSFNRF

SEQ ID NO: 53303 - protein, 10 aa, Homo Sapiens
QTISGTGALR

SEQ ID NO: 53304 - protein, 10 aa, Homo Sapiens
QTKPAEAPRL

SEQ ID NO: 53305 - protein, 10 aa, Homo Sapiens
QTLDISTNRL

SEQ ID NO: 53306 - protein, 10 aa, Homo Sapiens
QTLSGAGLLK

SEQ ID NO: 53307 - protein, 10 aa, Homo Sapiens
QTMDMIISKK

SEQ ID NO: 53308 - protein, 10 aa, Homo Sapiens
QTPHRPLILK

SEQ ID NO: 53309 - protein, 10 aa, Homo Sapiens
QTSQPFQVLK

SEQ ID NO: 53310 - protein, 10 aa, Homo Sapiens
QTWAGSHSLK

SEQ ID NO: 53311 - protein, 10 aa, Homo Sapiens
QTWAGSHSMR

SEQ ID NO: 53312 - protein, 10 aa, Homo Sapiens
QTYVGITEKK

SEQ ID NO: 53313 - protein, 10 aa, Homo Sapiens
QVADAFLSKF

SEQ ID NO: 53314 - protein, 10 aa, Homo Sapiens
QVLEGFITRK

SEQ ID NO: 53315 - protein, 10 aa, Homo Sapiens
QVLEHQVKYK

SEQ ID NO: 53316 - protein, 10 aa, Homo Sapiens
QVQEGTKVLK

SEQ ID NO: 53317 - protein, 10 aa, Homo Sapiens
RDLAEQNSGK

SEQ ID NO: 53318 - protein, 10 aa, Homo Sapiens
SAAEEVKTYK

SEQ ID NO: 53319 - protein, 10 aa, Homo Sapiens
SAFDRILSSK

SEQ ID NO: 53320 - protein, 10 aa, Homo Sapiens
SAFGNILSCK

SEQ ID NO: 53321 - protein, 10 aa, Homo Sapiens
SAVGGGYTAK

SEQ ID NO: 53322 - protein, 10 aa, Homo Sapiens
SAVGWAPQRL

SEQ ID NO: 53323 - protein, 10 aa, Homo Sapiens
SIFDGRVVAK

SEQ ID NO: 53324 - protein, 10 aa, Homo Sapiens
SIFGGTDMKK

SEQ ID NO: 53325 - protein, 10 aa, Homo Sapiens
SISGPISTSK

SEQ ID NO: 53326 - protein, 10 aa, Homo Sapiens
SLIFVQCVGF

SEQ ID NO: 53327 - protein, 10 aa, Homo Sapiens
SLPATHIRGK

SEQ ID NO: 53328 - protein, 10 aa, Homo Sapiens
SLPDFPAAAK

SEQ ID NO: 53329 - protein, 10 aa, Homo Sapiens
SSLECIAIPK

SEQ ID NO: 53330 - protein, 10 aa, Homo Sapiens
SSVESIISPK

SEQ ID NO: 53331 - protein, 10 aa, Homo Sapiens
STCDHGIVAK

SEQ ID NO: 53332 - protein, 10 aa, Homo Sapiens
STFDTQITKK

SEQ ID NO: 53333 - protein, 10 aa, Homo Sapiens
STFQQMWISK

SEQ ID NO: 53334 - protein, 10 aa, Homo Sapiens
STFSGGRIPK

SEQ ID NO: 53335 - protein, 10 aa, Homo Sapiens
STGEKGFGYK

SEQ ID NO: 53336 - protein, 10 aa, Homo Sapiens
STIDDTISKF

SEQ ID NO: 53337 - protein, 10 aa, Homo Sapiens
STIEKLAKNK

SEQ ID NO: 53338 - protein, 10 aa, Homo Sapiens
STINTIMGNK

SEQ ID NO: 53339 - protein, 10 aa, Homo Sapiens
STLEHGTSLK

SEQ ID NO: 53340 - protein, 10 aa, Homo Sapiens
STLEVTSLKY

SEQ ID NO: 53341 - protein, 10 aa, Homo Sapiens
STLGLKGSLK

SEQ ID NO: 53342 - protein, 10 aa, Homo Sapiens
STLTKNTPRF

SEQ ID NO: 53343 - protein, 10 aa, Homo Sapiens
STMEGGTLKY

SEQ ID NO: 53344 - protein, 10 aa, Homo Sapiens
STMGYMMAKK

SEQ ID NO: 53345 - protein, 10 aa, Homo Sapiens
STMRPLATAY

SEQ ID NO: 53346 - protein, 10 aa, Homo Sapiens
STNTSLLTSK

SEQ ID NO: 53347 - protein, 10 aa, Homo Sapiens
STWEGIQAGK

SEQ ID NO: 53348 - protein, 10 aa, Homo Sapiens
STWTGPPAMK

SEQ ID NO: 53349 - protein, 10 aa, Homo Sapiens
STYEKALGYF

SEQ ID NO: 53350 - protein, 10 aa, Homo Sapiens
STYISILNQK

SEQ ID NO: 53351 - protein, 10 aa, Homo Sapiens
STYYGSFVTR

SEQ ID NO: 53352 - protein, 10 aa, Homo Sapiens
SVCGKRFSLK

SEQ ID NO: 53353 - protein, 10 aa, Homo Sapiens
SVFDFQKAYK

SEQ ID NO: 53354 - protein, 10 aa, Homo Sapiens
SVHWFPVQKL

SEQ ID NO: 53355 - protein, 10 aa, Homo Sapiens
SVLEATRVNR

SEQ ID NO: 53356 - protein, 10 aa, Homo Sapiens
SVTDVKFAPK

SEQ ID NO: 53357 - protein, 10 aa, Homo Sapiens
SVYDHQGIFK

SEQ ID NO: 53358 - protein, 10 aa, Homo Sapiens
TAAPAYGLPK

SEQ ID NO: 53359 - protein, 10 aa, Homo Sapiens
TAMDVVYALK

SEQ ID NO: 53360 - protein, 10 aa, Homo Sapiens
TATEWSQPRF

SEQ ID NO: 53361 - protein, 10 aa, Homo Sapiens
TAYGGKYSVK

SEQ ID NO: 53362 - protein, 10 aa, Homo Sapiens
TFGIEPFKTK

SEQ ID NO: 53363 - protein, 10 aa, Homo Sapiens
TSFDGSLIQK

SEQ ID NO: 53364 - protein, 10 aa, Homo Sapiens
TSLDSILGSK

SEQ ID NO: 53365 - protein, 10 aa, Homo Sapiens
TSLTASVTNK

SEQ ID NO: 53366 - protein, 10 aa, Homo Sapiens
TSVATYLSSK

SEQ ID NO: 53367 - protein, 10 aa, Homo Sapiens
TTASFAATKF

SEQ ID NO: 53368 - protein, 10 aa, Homo Sapiens
TTISSFPQLK

SEQ ID NO: 53369 - protein, 10 aa, Homo Sapiens
TTKAVVSPPK

SEQ ID NO: 53370 - protein, 10 aa, Homo Sapiens
TTLAFKPIKK

SEQ ID NO: 53371 - protein, 10 aa, Homo Sapiens
TTLCKPLVPR

SEQ ID NO: 53372 - protein, 10 aa, Homo Sapiens
TTLEHQKTFR

SEQ ID NO: 53373 - protein, 10 aa, Homo Sapiens
TTLETALNSK

SEQ ID NO: 53374 - protein, 10 aa, Homo Sapiens
TTNDIVISKL

SEQ ID NO: 53375 - protein, 10 aa, Homo Sapiens
TTSDPPNICK

SEQ ID NO: 53376 - protein, 10 aa, Homo Sapiens
TTTEMMMGRF

SEQ ID NO: 53377 - protein, 10 aa, Homo Sapiens
TTTEVNMARV

SEQ ID NO: 53378 - protein, 10 aa, Homo Sapiens
TTTQITKTVK

SEQ ID NO: 53379 - protein, 10 aa, Homo Sapiens
TTVAVSAVSK

SEQ ID NO: 53380 - protein, 10 aa, Homo Sapiens
TTVGTLSQRI

SEQ ID NO: 53381 - protein, 10 aa, Homo Sapiens
TTVPRRLGPK

SEQ ID NO: 53382 - protein, 10 aa, Homo Sapiens
TTYEYIIKDK

SEQ ID NO: 53383 - protein, 10 aa, Homo Sapiens
TVAEISQFLK

SEQ ID NO: 53384 - protein, 10 aa, Homo Sapiens
TVATPSSGLK

SEQ ID NO: 53385 - protein, 10 aa, Homo Sapiens
TVAVPLVGKL

SEQ ID NO: 53386 - protein, 10 aa, Homo Sapiens
TVFEHTFHVR

SEQ ID NO: 53387 - protein, 10 aa, Homo Sapiens
TVISGPGTGK

SEQ ID NO: 53388 - protein, 10 aa, Homo Sapiens
TVLCQPTGGK

SEQ ID NO: 53389 - protein, 10 aa, Homo Sapiens
TVLGGVLGQK

SEQ ID NO: 53390 - protein, 10 aa, Homo Sapiens
TVLTHTPAPR

SEQ ID NO: 53391 - protein, 10 aa, Homo Sapiens
TVSAPTTTLK

SEQ ID NO: 53392 - protein, 10 aa, Homo Sapiens
TVSPALISRF

SEQ ID NO: 53393 - protein, 10 aa, Homo Sapiens
TVYRNPESFK

SEQ ID NO: 53394 - protein, 10 aa, Homo Sapiens
VEDNEKDLVK

SEQ ID NO: 53395 - protein, 10 aa, Homo Sapiens
VGKDPGLAGR

SEQ ID NO: 53396 - protein, 10 aa, Homo Sapiens
VTFGSIFGYK

SEQ ID NO: 53397 - protein, 10 aa, Homo Sapiens
VTHRPPLSPK

SEQ ID NO: 53398 - protein, 10 aa, Homo Sapiens
VTYNGVDNNK

SEQ ID NO: 53399 - protein, 10 aa, Homo Sapiens
VYPNFRPTPK

SEQ ID NO: 53400 - protein, 10 aa, Homo Sapiens
WTANMERIMK

SEQ ID NO: 53401 - protein, 10 aa, Homo Sapiens
WTHDGKGMFY

SEQ ID NO: 53402 - protein, 10 aa, Homo Sapiens
WTLSNLCRNK

SEQ ID NO: 53403 - protein, 10 aa, Homo Sapiens
WTYDPKIRLK

SEQ ID NO: 53404 - protein, 10 aa, Homo Sapiens
YAFGSVGKEK

SEQ ID NO: 53405 - protein, 10 aa, Homo Sapiens
YAFMGTPVQK

SEQ ID NO: 53406 - protein, 10 aa, Homo Sapiens
YALPHAILRL

SEQ ID NO: 53407 - protein, 10 aa, Homo Sapiens
YIYDGELVSK

SEQ ID NO: 53408 - protein, 10 aa, Homo Sapiens
YSAPRTETAK

SEQ ID NO: 53409 - protein, 10 aa, Homo Sapiens
YSCNISGSLK

SEQ ID NO: 53410 - protein, 10 aa, Homo Sapiens
YSHAGLSNRL

SEQ ID NO: 53411 - protein, 10 aa, Homo Sapiens
YTAATNNPRF

SEQ ID NO: 53412 - protein, 10 aa, Homo Sapiens
YTAEGKYIFK

SEQ ID NO: 53413 - protein, 10 aa, Homo Sapiens
YTAEQVAAVK

SEQ ID NO: 53414 - protein, 10 aa, Homo Sapiens
YTFYSISQER

SEQ ID NO: 53415 - protein, 10 aa, Homo Sapiens
YTKDAMPINK

SEQ ID NO: 53416 - protein, 10 aa, Homo Sapiens
YTLDPDTLRK

SEQ ID NO: 53417 - protein, 10 aa, Homo Sapiens
YTLDVTTGQR

SEQ ID NO: 53418 - protein, 10 aa, Homo Sapiens
YTPDVAFGSK

SEQ ID NO: 53419 - protein, 10 aa, Homo Sapiens
YVADLGDILK

SEQ ID NO: 53420 - protein, 10 aa, Homo Sapiens
YVCSHPPSLK

SEQ ID NO: 53421 - protein, 10 aa, Homo Sapiens
YVKSTKLVLK

SEQ ID NO: 53422 - protein, 10 aa, Homo Sapiens
YVYPDKTRPR

SEQ ID NO: 53423 - protein, 11 aa, Homo Sapiens
AVADKVHLMYK

SEQ ID NO: 53424 - protein, 11 aa, Homo Sapiens
AVFPSLLTNPK

SEQ ID NO: 53425 - protein, 11 aa, Homo Sapiens
AVVDVRIGMTR

SEQ ID NO: 53426 - protein, 11 aa, Homo Sapiens
AVYGQKEIHRK

SEQ ID NO: 53427 - protein, 11 aa, Homo Sapiens
CVYEPDRNALR

SEQ ID NO: 53428 - protein, 11 aa, Homo Sapiens
DAAGKTTILYK

SEQ ID NO: 53429 - protein, 11 aa, Homo Sapiens
DAAHPTNVQRL

SEQ ID NO: 53430 - protein, 11 aa, Homo Sapiens
DAIRGGLPKLK

SEQ ID NO: 53431 - protein, 11 aa, Homo Sapiens
DANGNSFATRI

SEQ ID NO: 53432 - protein, 11 aa, Homo Sapiens
DAYRQGHFTYK

SEQ ID NO: 53433 - protein, 11 aa, Homo Sapiens
DIFDPSRNMAK

SEQ ID NO: 53434 - protein, 11 aa, Homo Sapiens
DSYASGEGLKR

SEQ ID NO: 53435 - protein, 11 aa, Homo Sapiens
DTAGKTTILYK

SEQ ID NO: 53436 - protein, 11 aa, Homo Sapiens
DTIDERAINKK

SEQ ID NO: 53437 - protein, 11 aa, Homo Sapiens
DTIDERTINKK

SEQ ID NO: 53438 - protein, 11 aa, Homo Sapiens
DTISNKKVLPK

SEQ ID NO: 53439 - protein, 11 aa, Homo Sapiens
DTWAGSHSLRY

SEQ ID NO: 53440 - protein, 11 aa, Homo Sapiens
DTYEPNYGTVK

SEQ ID NO: 53441 - protein, 11 aa, Homo Sapiens
DVYFPQISSVK

SEQ ID NO: 53442 - protein, 11 aa, Homo Sapiens
DVYIPREPHTK

SEQ ID NO: 53443 - protein, 11 aa, Homo Sapiens
EAAFFEGHFLK

SEQ ID NO: 53444 - protein, 11 aa, Homo Sapiens
EAAGEAVKTLK

SEQ ID NO: 53445 - protein, 11 aa, Homo Sapiens
EAAPGALGQVK

SEQ ID NO: 53446 - protein, 11 aa, Homo Sapiens
EAAPHDIGYVK

SEQ ID NO: 53447 - protein, 11 aa, Homo Sapiens
EAAVAIKAMAK

SEQ ID NO: 53448 - protein, 11 aa, Homo Sapiens
EACWGTSSQKL

SEQ ID NO: 53449 - protein, 11 aa, Homo Sapiens
EAFENIYPILK

SEQ ID NO: 53450 - protein, 11 aa, Homo Sapiens
EAFNQKHALQK

SEQ ID NO: 53451 - protein, 11 aa, Homo Sapiens
EAFSTPQQLEK

SEQ ID NO: 53452 - protein, 11 aa, Homo Sapiens
EAICSSTKLLK

SEQ ID NO: 53453 - protein, 11 aa, Homo Sapiens
EALCKKIIKEK

SEQ ID NO: 53454 - protein, 11 aa, Homo Sapiens
EALHQKNIVHR

SEQ ID NO: 53455 - protein, 11 aa, Homo Sapiens
EALPNSQKAVK

SEQ ID NO: 53456 - protein, 11 aa, Homo Sapiens
EALQPALQCLK

SEQ ID NO: 53457 - protein, 11 aa, Homo Sapiens
EALSELATAVK

SEQ ID NO: 53458 - protein, 11 aa, Homo Sapiens
EALSNERICQK

SEQ ID NO: 53459 - protein, 11 aa, Homo Sapiens
EAMDQYSIALR

SEQ ID NO: 53460 - protein, 11 aa, Homo Sapiens
EAMYNQGFIRK

SEQ ID NO: 53461 - protein, 11 aa, Homo Sapiens
EASPALPGLKL

SEQ ID NO: 53462 - protein, 11 aa, Homo Sapiens
EAVKPTVGMKR

SEQ ID NO: 53463 - protein, 11 aa, Homo Sapiens
EAWRYMGGFAK

SEQ ID NO: 53464 - protein, 11 aa, Homo Sapiens
EAYEVLSDAKK

SEQ ID NO: 53465 - protein, 11 aa, Homo Sapiens
EAYEVLSDKHK

SEQ ID NO: 53466 - protein, 11 aa, Homo Sapiens
EAYRAIISDLK

SEQ ID NO: 53467 - protein, 11 aa, Homo Sapiens
EGAPATMTPKL

SEQ ID NO: 53468 - protein, 11 aa, Homo Sapiens
EIAAAVSFISK

SEQ ID NO: 53469 - protein, 11 aa, Homo Sapiens
EIADTMVQIFK

SEQ ID NO: 53470 - protein, 11 aa, Homo Sapiens
EIASFDKAKLK

SEQ ID NO: 53471 - protein, 11 aa, Homo Sapiens
EIFEVDVEIAK

SEQ ID NO: 53472 - protein, 11 aa, Homo Sapiens
EILSASKMLSK

SEQ ID NO: 53473 - protein, 11 aa, Homo Sapiens
EIMRAGMSSLK

SEQ ID NO: 53474 - protein, 11 aa, Homo Sapiens
EISAAVERARK

SEQ ID NO: 53475 - protein, 11 aa, Homo Sapiens
EISDRLIGIYK

SEQ ID NO: 53476 - protein, 11 aa, Homo Sapiens
EIYADLKKKYK

SEQ ID NO: 53477 - protein, 11 aa, Homo Sapiens
EIYDPRNPVNK

SEQ ID NO: 53478 - protein, 11 aa, Homo Sapiens
EIYEKDEKIQK

SEQ ID NO: 53479 - protein, 11 aa, Homo Sapiens
EIYFVGPNAKK

SEQ ID NO: 53480 - protein, 11 aa, Homo Sapiens
EIYSFSESLRK

SEQ ID NO: 53481 - protein, 11 aa, Homo Sapiens
EIYSGDGSVFK

SEQ ID NO: 53482 - protein, 11 aa, Homo Sapiens
ELDPDAPIRQK

SEQ ID NO: 53483 - protein, 11 aa, Homo Sapiens
ELFPAEAQRQK

SEQ ID NO: 53484 - protein, 11 aa, Homo Sapiens
ELINEKLIRTK

SEQ ID NO: 53485 - protein, 11 aa, Homo Sapiens
ELLPTDGMIRK

SEQ ID NO: 53486 - protein, 11 aa, Homo Sapiens
ELYSVDQELLK

SEQ ID NO: 53487 - protein, 11 aa, Homo Sapiens
ESFASDPILYR

SEQ ID NO: 53488 - protein, 11 aa, Homo Sapiens
ESFPELMTAAK

SEQ ID NO: 53489 - protein, 11 aa, Homo Sapiens
ESIESGKTVNK

SEQ ID NO: 53490 - protein, 11 aa, Homo Sapiens
ESLDFTDYASR

SEQ ID NO: 53491 - protein, 11 aa, Homo Sapiens
ESLIADKSGSK

SEQ ID NO: 53492 - protein, 11 aa, Homo Sapiens
ESLPANTPLRK

SEQ ID NO: 53493 - protein, 11 aa, Homo Sapiens
ESLPATHIRGK

SEQ ID NO: 53494 - protein, 11 aa, Homo Sapiens
ESLQQVRQQLK

SEQ ID NO: 53495 - protein, 11 aa, Homo Sapiens
ESQPGNAVIDK

SEQ ID NO: 53496 - protein, 11 aa, Homo Sapiens
ESRPGEWLVRK

SEQ ID NO: 53497 - protein, 11 aa, Homo Sapiens
ESYGEGCIALR

SEQ ID NO: 53498 - protein, 11 aa, Homo Sapiens
ESYTPSKISVR

SEQ ID NO: 53499 - protein, 11 aa, Homo Sapiens
ETADKVLQNKL

SEQ ID NO: 53500 - protein, 11 aa, Homo Sapiens
ETDAHGSFCFK

SEQ ID NO: 53501 - protein, 11 aa, Homo Sapiens
ETDASSAVKVK

SEQ ID NO: 53502 - protein, 11 aa, Homo Sapiens
ETDPSLVFSRK

SEQ ID NO: 53503 - protein, 11 aa, Homo Sapiens
ETFGSSQLPDK

SEQ ID NO: 53504 - protein, 11 aa, Homo Sapiens
ETFGVSGRFLR

SEQ ID NO: 53505 - protein, 11 aa, Homo Sapiens
ETFLPNDCLLY

SEQ ID NO: 53506 - protein, 11 aa, Homo Sapiens
ETFMSKPSIAK

SEQ ID NO: 53507 - protein, 11 aa, Homo Sapiens
ETFRSSDPATR

SEQ ID NO: 53508 - protein, 11 aa, Homo Sapiens
ETIFTPSSVKK

SEQ ID NO: 53509 - protein, 11 aa, Homo Sapiens
ETIHADSVAKR

SEQ ID NO: 53510 - protein, 11 aa, Homo Sapiens
ETIHLENEGLK

SEQ ID NO: 53511 - protein, 11 aa, Homo Sapiens
ETILIIRRLHK

SEQ ID NO: 53512 - protein, 11 aa, Homo Sapiens
ETIPDGIGKLK

SEQ ID NO: 53513 - protein, 11 aa, Homo Sapiens
ETISSKNIISR

SEQ ID NO: 53514 - protein, 11 aa, Homo Sapiens
ETKSGVAPQKM

SEQ ID NO: 53515 - protein, 11 aa, Homo Sapiens
ETLGERLAKQK

SEQ ID NO: 53516 - protein, 11 aa, Homo Sapiens
ETLKSLGALKK

SEQ ID NO: 53517 - protein, 11 aa, Homo Sapiens
ETLLEISKRFR

SEQ ID NO: 53518 - protein, 11 aa, Homo Sapiens
ETLNSKMLKEK

SEQ ID NO: 53519 - protein, 11 aa, Homo Sapiens
ETLNSSVQSIR

SEQ ID NO: 53520 - protein, 11 aa, Homo Sapiens
ETLPEQLLAEK

SEQ ID NO: 53521 - protein, 11 aa, Homo Sapiens
ETLSRIVNQPS

SEQ ID NO: 53522 - protein, 11 aa, Homo Sapiens
ETLSTLEYAHR

SEQ ID NO: 53523 - protein, 11 aa, Homo Sapiens
ETMLGGPQYVK

SEQ ID NO: 53524 - protein, 11 aa, Homo Sapiens
ETMPTKETTKL

SEQ ID NO: 53525 - protein, 11 aa, Homo Sapiens
ETNDSYHIILK

SEQ ID NO: 53526 - protein, 11 aa, Homo Sapiens
ETPSSSSVVKK

SEQ ID NO: 53527 - protein, 11 aa, Homo Sapiens
ETQGSSSPVLK

SEQ ID NO: 53528 - protein, 11 aa, Homo Sapiens
ETRGVKDVLKK

SEQ ID NO: 53529 - protein, 11 aa, Homo Sapiens
ETSYENSLLVK

SEQ ID NO: 53530 - protein, 11 aa, Homo Sapiens
ETTPSLACANK

SEQ ID NO: 53531 - protein, 11 aa, Homo Sapiens
ETVATVMPMKI

SEQ ID NO: 53532 - protein, 11 aa, Homo Sapiens
ETVAVSPTICR

SEQ ID NO: 53533 - protein, 11 aa, Homo Sapiens
ETVESKEKTLK

SEQ ID NO: 53534 - protein, 11 aa, Homo Sapiens
ETVFPKAKQVK

SEQ ID NO: 53535 - protein, 11 aa, Homo Sapiens
ETVQKETIHPR

SEQ ID NO: 53536 - protein, 11 aa, Homo Sapiens
ETVRYSICTSK

SEQ ID NO: 53537 - protein, 11 aa, Homo Sapiens
ETVTGGFGAKK

SEQ ID NO: 53538 - protein, 11 aa, Homo Sapiens
ETYEEIYKSTK

SEQ ID NO: 53539 - protein, 11 aa, Homo Sapiens
ETYLEAHRIVK

SEQ ID NO: 53540 - protein, 11 aa, Homo Sapiens
ETYRGGMAINR

SEQ ID NO: 53541 - protein, 11 aa, Homo Sapiens
ETYSQAKDLAK

SEQ ID NO: 53542 - protein, 11 aa, Homo Sapiens
EVAKAFMPRGL

SEQ ID NO: 53543 - protein, 11 aa, Homo Sapiens
EVCDASAIVAK

SEQ ID NO: 53544 - protein, 11 aa, Homo Sapiens
EVCSENISTLK

SEQ ID NO: 53545 - protein, 11 aa, Homo Sapiens
EVDDGTSVLLK

SEQ ID NO: 53546 - protein, 11 aa, Homo Sapiens
EVDPGSAELQK

SEQ ID NO: 53547 - protein, 11 aa, Homo Sapiens
EVFFSEKIYKL

SEQ ID NO: 53548 - protein, 11 aa, Homo Sapiens
EVFGAEGFHEK

SEQ ID NO: 53549 - protein, 11 aa, Homo Sapiens
EVGPVLSKSSP

SEQ ID NO: 53550 - protein, 11 aa, Homo Sapiens
EVIAEAVGVKK

SEQ ID NO: 53551 - protein, 11 aa, Homo Sapiens
EVIALDKIFNK

SEQ ID NO: 53552 - protein, 11 aa, Homo Sapiens
EVIAQLENAAK

SEQ ID NO: 53553 - protein, 11 aa, Homo Sapiens
EVIDQRLIEAR

SEQ ID NO: 53554 - protein, 11 aa, Homo Sapiens
EVIGILKAEKM

SEQ ID NO: 53555 - protein, 11 aa, Homo Sapiens
EVIPPYYSYLK

SEQ ID NO: 53556 - protein, 11 aa, Homo Sapiens
EVIPVTSTTNK

SEQ ID NO: 53557 - protein, 11 aa, Homo Sapiens
EVIQESGTKLK

SEQ ID NO: 53558 - protein, 11 aa, Homo Sapiens
EVIQLQGDQRK

SEQ ID NO: 53559 - protein, 11 aa, Homo Sapiens
EVISLSQVTPK

SEQ ID NO: 53560 - protein, 11 aa, Homo Sapiens
EVISTPGVVAR

SEQ ID NO: 53561 - protein, 11 aa, Homo Sapiens
EVKPPDRPSSK

SEQ ID NO: 53562 - protein, 11 aa, Homo Sapiens
EVLEQSAQTLR

SEQ ID NO: 53563 - protein, 11 aa, Homo Sapiens
EVLESFFVQKL

SEQ ID NO: 53564 - protein, 11 aa, Homo Sapiens
EVLHGPSIMKK

SEQ ID NO: 53565 - protein, 11 aa, Homo Sapiens
EVLHIGSAHNR

SEQ ID NO: 53566 - protein, 11 aa, Homo Sapiens
EVLNDPENMEK

SEQ ID NO: 53567 - protein, 11 aa, Homo Sapiens
EVLTAEQILQH

SEQ ID NO: 53568 - protein, 11 aa, Homo Sapiens
EVLTSKCLHGK

SEQ ID NO: 53569 - protein, 11 aa, Homo Sapiens
EVMNLDDILKK

SEQ ID NO: 53570 - protein, 11 aa, Homo Sapiens
EVMPGPIGLPR

SEQ ID NO: 53571 - protein, 11 aa, Homo Sapiens
EVMQWSQSLEK

SEQ ID NO: 53572 - protein, 11 aa, Homo Sapiens
EVPAKTTHVLK

SEQ ID NO: 53573 - protein, 11 aa, Homo Sapiens
EVPHISQPCQK

SEQ ID NO: 53574 - protein, 11 aa, Homo Sapiens
EVPTAYMISPK

SEQ ID NO: 53575 - protein, 11 aa, Homo Sapiens
EVQDSGQTIPK

SEQ ID NO: 53576 - protein, 11 aa, Homo Sapiens
EVQPNGKIFKK

SEQ ID NO: 53577 - protein, 11 aa, Homo Sapiens
EVRSYSDPPLK

SEQ ID NO: 53578 - protein, 11 aa, Homo Sapiens
EVVDHVFPLLK

SEQ ID NO: 53579 - protein, 11 aa, Homo Sapiens
EVVEFLKNPQK

SEQ ID NO: 53580 - protein, 11 aa, Homo Sapiens
EVVKNTENFLK

SEQ ID NO: 53581 - protein, 11 aa, Homo Sapiens
EVWTDWNNMSK

SEQ ID NO: 53582 - protein, 11 aa, Homo Sapiens
EVYDPTTNAWR

SEQ ID NO: 53583 - protein, 11 aa, Homo Sapiens
EVYHNLKNVIK

SEQ ID NO: 53584 - protein, 11 aa, Homo Sapiens
EVYNDSGYLSK

SEQ ID NO: 53585 - protein, 11 aa, Homo Sapiens
FSFSPGAGAFR

SEQ ID NO: 53586 - protein, 11 aa, Homo Sapiens
FSYSFSYKHLK

SEQ ID NO: 53587 - protein, 11 aa, Homo Sapiens
FTLEASEGCYR

SEQ ID NO: 53588 - protein, 11 aa, Homo Sapiens
FVIDSDHLGHR

SEQ ID NO: 53589 - protein, 11 aa, Homo Sapiens
FVIDSGKVKEK

SEQ ID NO: 53590 - protein, 11 aa, Homo Sapiens
GLDENQAKGSL

SEQ ID NO: 53591 - protein, 11 aa, Homo Sapiens
GTPGPSITGVP

SEQ ID NO: 53592 - protein, 11 aa, Homo Sapiens
HSIDGRVVEPK

SEQ ID NO: 53593 - protein, 11 aa, Homo Sapiens
HSMDTLLATLK

SEQ ID NO: 53594 - protein, 11 aa, Homo Sapiens
HTAVVPLDLVK

SEQ ID NO: 53595 - protein, 11 aa, Homo Sapiens
HTEEDFKGRFK

SEQ ID NO: 53596 - protein, 11 aa, Homo Sapiens
HTFSHPPSSTK

SEQ ID NO: 53597 - protein, 11 aa, Homo Sapiens
HTLDSYRILQK

SEQ ID NO: 53598 - protein, 11 aa, Homo Sapiens
HTVDSLSRLTK

SEQ ID NO: 53599 - protein, 11 aa, Homo Sapiens
HVDSHGHNVFK

SEQ ID NO: 53600 - protein, 11 aa, Homo Sapiens
HVYDGKFLARV

SEQ ID NO: 53601 - protein, 11 aa, Homo Sapiens
IIYDPKLQTPK

SEQ ID NO: 53602 - protein, 11 aa, Homo Sapiens
IPYGDQRLKPK

SEQ ID NO: 53603 - protein, 11 aa, Homo Sapiens
ITDGPRKDLVK

SEQ ID NO: 53604 - protein, 11 aa, Homo Sapiens
ITVDGNICTGK

SEQ ID NO: 53605 - protein, 11 aa, Homo Sapiens
ITYDTPFKREK

SEQ ID NO: 53606 - protein, 11 aa, Homo Sapiens
KLVAASQAALG

SEQ ID NO: 53607 - protein, 11 aa, Homo Sapiens
LAYEQVAKALK

SEQ ID NO: 53608 - protein, 11 aa, Homo Sapiens
LAYFPYFITYK

SEQ ID NO: 53609 - protein, 11 aa, Homo Sapiens
LQQCPFEDHVK

SEQ ID NO: 53610 - protein, 11 aa, Homo Sapiens
LSESSVTLSPV

SEQ ID NO: 53611 - protein, 11 aa, Homo Sapiens
LTIQSGEQPYK

SEQ ID NO: 53612 - protein, 11 aa, Homo Sapiens
MAAAGAAVARS

SEQ ID NO: 53613 - protein, 11 aa, Homo Sapiens
MALTGGIGFIH

SEQ ID NO: 53614 - protein, 11 aa, Homo Sapiens
MPVGPDAILRY

SEQ ID NO: 53615 - protein, 11 aa, Homo Sapiens
MSGAQIKIANP

SEQ ID NO: 53616 - protein, 11 aa, Homo Sapiens
MTAAATATVLK

SEQ ID NO: 53617 - protein, 11 aa, Homo Sapiens
MTADSRSQVQR

SEQ ID NO: 53618 - protein, 11 aa, Homo Sapiens
MTFGIEPFKTK

SEQ ID NO: 53619 - protein, 11 aa, Homo Sapiens
MTIGTDSALHR

SEQ ID NO: 53620 - protein, 11 aa, Homo Sapiens
MTINDDSATCK

SEQ ID NO: 53621 - protein, 11 aa, Homo Sapiens
MTMDKSELVQK

SEQ ID NO: 53622 - protein, 11 aa, Homo Sapiens
MTMSGERECLK

SEQ ID NO: 53623 - protein, 11 aa, Homo Sapiens
MTRFSAENIFK

SEQ ID NO: 53624 - protein, 11 aa, Homo Sapiens
MTVEPGFGGQK

SEQ ID NO: 53625 - protein, 11 aa, Homo Sapiens
MTYGGLASPKL

SEQ ID NO: 53626 - protein, 11 aa, Homo Sapiens
MVADVFSHRFY

SEQ ID NO: 53627 - protein, 11 aa, Homo Sapiens
MVASGSELGKK

SEQ ID NO: 53628 - protein, 11 aa, Homo Sapiens
MVTGDHPITAK

SEQ ID NO: 53629 - protein, 11 aa, Homo Sapiens
NSFDPSKITRK

SEQ ID NO: 53630 - protein, 11 aa, Homo Sapiens
NTFFSETGAGK

SEQ ID NO: 53631 - protein, 11 aa, Homo Sapiens
NVIESKAYVGR

SEQ ID NO: 53632 - protein, 11 aa, Homo Sapiens
NVLPGEFYITR

SEQ ID NO: 53633 - protein, 11 aa, Homo Sapiens
NVYPNFRPTPK

SEQ ID NO: 53634 - protein, 11 aa, Homo Sapiens
QAYEVLSDAKK

SEQ ID NO: 53635 - protein, 11 aa, Homo Sapiens
QTIAEDLVVTK

SEQ ID NO: 53636 - protein, 11 aa, Homo Sapiens
QVLNADAIVVK

SEQ ID NO: 53637 - protein, 11 aa, Homo Sapiens
QVPSVEKLSMN

SEQ ID NO: 53638 - protein, 11 aa, Homo Sapiens
RWAAAAAAFEK

SEQ ID NO: 53639 - protein, 11 aa, Homo Sapiens
SAIDSVNATSK

SEQ ID NO: 53640 - protein, 11 aa, Homo Sapiens
SALTDKAIVKK

SEQ ID NO: 53641 - protein, 11 aa, Homo Sapiens
SSADAILGNPK

SEQ ID NO: 53642 - protein, 11 aa, Homo Sapiens
SSLPKKLALLK

SEQ ID NO: 53643 - protein, 11 aa, Homo Sapiens
SSVSFADDFVR

SEQ ID NO: 53644 - protein, 11 aa, Homo Sapiens
STDISAVLGTK

SEQ ID NO: 53645 - protein, 11 aa, Homo Sapiens
STIAILNSVKK

SEQ ID NO: 53646 - protein, 11 aa, Homo Sapiens
STIPPELVKQK

SEQ ID NO: 53647 - protein, 11 aa, Homo Sapiens
STLESVSTSKK

SEQ ID NO: 53648 - protein, 11 aa, Homo Sapiens
STSEPLSSKMY

SEQ ID NO: 53649 - protein, 11 aa, Homo Sapiens
STVGAGAYAYK

SEQ ID NO: 53650 - protein, 11 aa, Homo Sapiens
STYPPEIVVPK

SEQ ID NO: 53651 - protein, 11 aa, Homo Sapiens
STYRKGEGVFK

SEQ ID NO: 53652 - protein, 11 aa, Homo Sapiens
SVMPKKSILKK

SEQ ID NO: 53653 - protein, 11 aa, Homo Sapiens
SVPEFPLSPPK

SEQ ID NO: 53654 - protein, 11 aa, Homo Sapiens
SVREPMQTGIK

SEQ ID NO: 53655 - protein, 11 aa, Homo Sapiens
SVYSPESNVRK

SEQ ID NO: 53656 - protein, 11 aa, Homo Sapiens
SVYSPESSVRK

SEQ ID NO: 53657 - protein, 11 aa, Homo Sapiens
SVYYNEATGGK

SEQ ID NO: 53658 - protein, 11 aa, Homo Sapiens
TELSVRAKPSA

SEQ ID NO: 53659 - protein, 11 aa, Homo Sapiens
TTAASELMSQK

SEQ ID NO: 53660 - protein, 11 aa, Homo Sapiens
TTAGAVTQCYR

SEQ ID NO: 53661 - protein, 11 aa, Homo Sapiens
TTTEVNMARVY

SEQ ID NO: 53662 - protein, 11 aa, Homo Sapiens
TTYDHVTREKL

SEQ ID NO: 53663 - protein, 11 aa, Homo Sapiens
TVFDAKRLIGR

SEQ ID NO: 53664 - protein, 11 aa, Homo Sapiens
TVKDELTESPK

SEQ ID NO: 53665 - protein, 11 aa, Homo Sapiens
TVMELVKIIYK

SEQ ID NO: 53666 - protein, 11 aa, Homo Sapiens
TVYGDVDLSNK

SEQ ID NO: 53667 - protein, 11 aa, Homo Sapiens
VAVAGVVLAKG

SEQ ID NO: 53668 - protein, 11 aa, Homo Sapiens
VAVSSLSAVIK

SEQ ID NO: 53669 - protein, 11 aa, Homo Sapiens
WTLDPTSLSTR

SEQ ID NO: 53670 - protein, 11 aa, Homo Sapiens
YASVEVSKLKR

SEQ ID NO: 53671 - protein, 11 aa, Homo Sapiens
YTINLDLPPYK

SEQ ID NO: 53672 - protein, 11 aa, Homo Sapiens
YTLDPDTLRKK

SEQ ID NO: 53673 - protein, 11 aa, Homo Sapiens
YTLDVTTGQRK

SEQ ID NO: 53674 - protein, 11 aa, Homo Sapiens
YTLGVHVNQAK

SEQ ID NO: 53675 - protein, 11 aa, Homo Sapiens
YTYDHLGDSPK

SEQ ID NO: 53676 - protein, 11 aa, Homo Sapiens
YTYTSKALITK

SEQ ID NO: 53677 - protein, 11 aa, Homo Sapiens
YVIDSGKMKEK

SEQ ID NO: 53678 - protein, 8 aa, Homo Sapiens
ADKVHLMY

SEQ ID NO: 53679 - protein, 8 aa, Homo Sapiens
ADMGHLKY

SEQ ID NO: 53680 - protein, 8 aa, Homo Sapiens
AIDNPLHY

SEQ ID NO: 53681 - protein, 8 aa, Homo Sapiens
AIYGVDTR

SEQ ID NO: 53682 - protein, 8 aa, Homo Sapiens
ASDAAMYY

SEQ ID NO: 53683 - protein, 8 aa, Homo Sapiens
ASLHVEEK

SEQ ID NO: 53684 - protein, 8 aa, Homo Sapiens
ATGYPLAF

SEQ ID NO: 53685 - protein, 8 aa, Homo Sapiens
ATQEAFMK

SEQ ID NO: 53686 - protein, 8 aa, Homo Sapiens
AVVTADLR

SEQ ID NO: 53687 - protein, 8 aa, Homo Sapiens
DGIVSHLK

SEQ ID NO: 53688 - protein, 8 aa, Homo Sapiens
DHGSVPII

SEQ ID NO: 53689 - protein, 8 aa, Homo Sapiens
DHNIIPGL

SEQ ID NO: 53690 - protein, 8 aa, Homo Sapiens
DPHGFISY

SEQ ID NO: 53691 - protein, 8 aa, Homo Sapiens
DPSVLGKY

SEQ ID NO: 53692 - protein, 8 aa, Homo Sapiens
DPTSGQLY

SEQ ID NO: 53693 - protein, 8 aa, Homo Sapiens
DTNADKQL

SEQ ID NO: 53694 - protein, 8 aa, Homo Sapiens
EGSISSHL

SEQ ID NO: 53695 - protein, 8 aa, Homo Sapiens
FNEKSKEL

SEQ ID NO: 53696 - protein, 8 aa, Homo Sapiens
FQIGSPWR

SEQ ID NO: 53697 - protein, 8 aa, Homo Sapiens
GLDQPLLK

SEQ ID NO: 53698 - protein, 8 aa, Homo Sapiens
HSDIAQRY

SEQ ID NO: 53699 - protein, 8 aa, Homo Sapiens
HTDLAIEY

SEQ ID NO: 53700 - protein, 8 aa, Homo Sapiens
IAVEQLAY

SEQ ID NO: 53701 - protein, 8 aa, Homo Sapiens
IDGKTLKY

SEQ ID NO: 53702 - protein, 8 aa, Homo Sapiens
IDRHVSRY

SEQ ID NO: 53703 - protein, 8 aa, Homo Sapiens
IINTFHQY

SEQ ID NO: 53704 - protein, 8 aa, Homo Sapiens
ISDEASRY

SEQ ID NO: 53705 - protein, 8 aa, Homo Sapiens
ISDLAQHY

SEQ ID NO: 53706 - protein, 8 aa, Homo Sapiens
ITDIHIKY

SEQ ID NO: 53707 - protein, 8 aa, Homo Sapiens
ITDIVNKY

SEQ ID NO: 53708 - protein, 8 aa, Homo Sapiens
ITDKELLK

SEQ ID NO: 53709 - protein, 8 aa, Homo Sapiens
IVDEAIYY

SEQ ID NO: 53710 - protein, 8 aa, Homo Sapiens
IVLEDGTK

SEQ ID NO: 53711 - protein, 8 aa, Homo Sapiens
KADIPAKY

SEQ ID NO: 53712 - protein, 8 aa, Homo Sapiens
KADKSLSY

SEQ ID NO: 53713 - protein, 8 aa, Homo Sapiens
KADVILKY

SEQ ID NO: 53714 - protein, 8 aa, Homo Sapiens
KMDIAVSY

SEQ ID NO: 53715 - protein, 8 aa, Homo Sapiens
KMDVPSKY

SEQ ID NO: 53716 - protein, 8 aa, Homo Sapiens
KSDVEINY

SEQ ID NO: 53717 - protein, 8 aa, Homo Sapiens
KSDVMMKY

SEQ ID NO: 53718 - protein, 8 aa, Homo Sapiens
KTDDPQLK

SEQ ID NO: 53719 - protein, 8 aa, Homo Sapiens
KTDEGIAY

SEQ ID NO: 53720 - protein, 8 aa, Homo Sapiens
KVDLSEKY

SEQ ID NO: 53721 - protein, 8 aa, Homo Sapiens
LLDEPFLQ

SEQ ID NO: 53722 - protein, 8 aa, Homo Sapiens
LNNMRSQY

SEQ ID NO: 53723 - protein, 8 aa, Homo Sapiens
LSDIGLEY

SEQ ID NO: 53724 - protein, 8 aa, Homo Sapiens
LTDEGLLY

SEQ ID NO: 53725 - protein, 8 aa, Homo Sapiens
LTDEQLLY

SEQ ID NO: 53726 - protein, 8 aa, Homo Sapiens
LTDFIQKY

SEQ ID NO: 53727 - protein, 8 aa, Homo Sapiens
LTDQAIFY

SEQ ID NO: 53728 - protein, 8 aa, Homo Sapiens
LVDDPLEY

SEQ ID NO: 53729 - protein, 8 aa, Homo Sapiens
LVSLEMGK

SEQ ID NO: 53730 - protein, 8 aa, Homo Sapiens
MSDVNLKY

SEQ ID NO: 53731 - protein, 8 aa, Homo Sapiens
NTDSPLRY

SEQ ID NO: 53732 - protein, 8 aa, Homo Sapiens
PEAGLLLY

SEQ ID NO: 53733 - protein, 8 aa, Homo Sapiens
PEFAKLLY

SEQ ID NO: 53734 - protein, 8 aa, Homo Sapiens
PILTELKN

SEQ ID NO: 53735 - protein, 8 aa, Homo Sapiens
PLRQPLLK

SEQ ID NO: 53736 - protein, 8 aa, Homo Sapiens
QILVGVNK

SEQ ID NO: 53737 - protein, 8 aa, Homo Sapiens
QTDINLPY

SEQ ID NO: 53738 - protein, 8 aa, Homo Sapiens
RAKFKQLL

SEQ ID NO: 53739 - protein, 8 aa, Homo Sapiens
RIDGNLDY

SEQ ID NO: 53740 - protein, 8 aa, Homo Sapiens
RIDKPILK

SEQ ID NO: 53741 - protein, 8 aa, Homo Sapiens
RLDGSMSY

SEQ ID NO: 53742 - protein, 8 aa, Homo Sapiens
RLDQPQMY

SEQ ID NO: 53743 - protein, 8 aa, Homo Sapiens
RSDKPLLV

SEQ ID NO: 53744 - protein, 8 aa, Homo Sapiens
RSDTPLIY

SEQ ID NO: 53745 - protein, 8 aa, Homo Sapiens
RTDHPALY

SEQ ID NO: 53746 - protein, 8 aa, Homo Sapiens
RTDLCLLY

SEQ ID NO: 53747 - protein, 8 aa, Homo Sapiens
RTDTNVLY

SEQ ID NO: 53748 - protein, 8 aa, Homo Sapiens
RVDSPMAY

SEQ ID NO: 53749 - protein, 8 aa, Homo Sapiens
SAVLDELK

SEQ ID NO: 53750 - protein, 8 aa, Homo Sapiens
SDVVTAVR

SEQ ID NO: 53751 - protein, 8 aa, Homo Sapiens
SLDLDVNV

SEQ ID NO: 53752 - protein, 8 aa, Homo Sapiens
STDKQMGY

SEQ ID NO: 53753 - protein, 8 aa, Homo Sapiens
STGDVNVE

SEQ ID NO: 53754 - protein, 8 aa, Homo Sapiens
TDGHVHLY

SEQ ID NO: 53755 - protein, 8 aa, Homo Sapiens
TEVHPAKY

SEQ ID NO: 53756 - protein, 8 aa, Homo Sapiens
TIDIGVKY

SEQ ID NO: 53757 - protein, 8 aa, Homo Sapiens
TITLYGKS

SEQ ID NO: 53758 - protein, 8 aa, Homo Sapiens
TSDKPLMY

SEQ ID NO: 53759 - protein, 8 aa, Homo Sapiens
TTDNANIL

SEQ ID NO: 53760 - protein, 8 aa, Homo Sapiens
VADMALHY

SEQ ID NO: 53761 - protein, 8 aa, Homo Sapiens
VCDKPLLY

SEQ ID NO: 53762 - protein, 8 aa, Homo Sapiens
VDAGKLHY

SEQ ID NO: 53763 - protein, 8 aa, Homo Sapiens
VGPETLGR

SEQ ID NO: 53764 - protein, 8 aa, Homo Sapiens
VGVHFLPK

SEQ ID NO: 53765 - protein, 8 aa, Homo Sapiens
VIDTSLLY

SEQ ID NO: 53766 - protein, 8 aa, Homo Sapiens
VLDGTIEY

SEQ ID NO: 53767 - protein, 8 aa, Homo Sapiens
VLKDSLRY

SEQ ID NO: 53768 - protein, 8 aa, Homo Sapiens
VNMVPFPR

SEQ ID NO: 53769 - protein, 8 aa, Homo Sapiens
VSLTACKV

SEQ ID NO: 53770 - protein, 8 aa, Homo Sapiens
VTDEPLLK

SEQ ID NO: 53771 - protein, 8 aa, Homo Sapiens
VTDSSLEY

SEQ ID NO: 53772 - protein, 8 aa, Homo Sapiens
VTDTNVIL

SEQ ID NO: 53773 - protein, 8 aa, Homo Sapiens
VTLELGGK

SEQ ID NO: 53774 - protein, 8 aa, Homo Sapiens
VVDKIDYY

SEQ ID NO: 53775 - protein, 8 aa, Homo Sapiens
WEVDSGRR

SEQ ID NO: 53776 - protein, 8 aa, Homo Sapiens
YEDIAQKS

SEQ ID NO: 53777 - protein, 8 aa, Homo Sapiens
YQVAALPK

SEQ ID NO: 53778 - protein, 8 aa, Homo Sapiens
YTDKIDRY

SEQ ID NO: 53779 - protein, 8 aa, Homo Sapiens
YTDVSTRY

SEQ ID NO: 53780 - protein, 9 aa, Homo Sapiens
AADLVEALY

SEQ ID NO: 53781 - protein, 9 aa, Homo Sapiens
AADSYTDSY

SEQ ID NO: 53782 - protein, 9 aa, Homo Sapiens
AIDEDVLRY

SEQ ID NO: 53783 - protein, 9 aa, Homo Sapiens
AIDHEKKAY

SEQ ID NO: 53784 - protein, 9 aa, Homo Sapiens
AIDQLHLEY

SEQ ID NO: 53785 - protein, 9 aa, Homo Sapiens
AIDRLVNIY

SEQ ID NO: 53786 - protein, 9 aa, Homo Sapiens
AIINYVSKV

SEQ ID NO: 53787 - protein, 9 aa, Homo Sapiens
ALDAAVLAY

SEQ ID NO: 53788 - protein, 9 aa, Homo Sapiens
ALDQFQEKY

SEQ ID NO: 53789 - protein, 9 aa, Homo Sapiens
ALDSHILDY

SEQ ID NO: 53790 - protein, 9 aa, Homo Sapiens
ALDTKIGRY

SEQ ID NO: 53791 - protein, 9 aa, Homo Sapiens
ALDVVNLVY

SEQ ID NO: 53792 - protein, 9 aa, Homo Sapiens
ALEAQTSRY

SEQ ID NO: 53793 - protein, 9 aa, Homo Sapiens
AMDATKLEY

SEQ ID NO: 53794 - protein, 9 aa, Homo Sapiens
AMDVYKNLY

SEQ ID NO: 53795 - protein, 9 aa, Homo Sapiens
ARDFILKLY

SEQ ID NO: 53796 - protein, 9 aa, Homo Sapiens
ASCRIVHEY

SEQ ID NO: 53797 - protein, 9 aa, Homo Sapiens
ASDAAPLQY

SEQ ID NO: 53798 - protein, 9 aa, Homo Sapiens
ASDHPIASY

SEQ ID NO: 53799 - protein, 9 aa, Homo Sapiens
ASDIAKHVY

SEQ ID NO: 53800 - protein, 9 aa, Homo Sapiens
ASDMLQLEY

SEQ ID NO: 53801 - protein, 9 aa, Homo Sapiens
ASDPFFRHY

SEQ ID NO: 53802 - protein, 9 aa, Homo Sapiens
ASDPYQVHV

SEQ ID NO: 53803 - protein, 9 aa, Homo Sapiens
ASDRNIVLY

SEQ ID NO: 53804 - protein, 9 aa, Homo Sapiens
ASDSAEFHY

SEQ ID NO: 53805 - protein, 9 aa, Homo Sapiens
ASDSIVLFY

SEQ ID NO: 53806 - protein, 9 aa, Homo Sapiens
ASDSMDSLY

SEQ ID NO: 53807 - protein, 9 aa, Homo Sapiens
ASDYFDQLY

SEQ ID NO: 53808 - protein, 9 aa, Homo Sapiens
ASEDSVLLY

SEQ ID NO: 53809 - protein, 9 aa, Homo Sapiens
ASETGFLTY

SEQ ID NO: 53810 - protein, 9 aa, Homo Sapiens
ASNPAMLLY

SEQ ID NO: 53811 - protein, 9 aa, Homo Sapiens
ASQEHGLKY

SEQ ID NO: 53812 - protein, 9 aa, Homo Sapiens
ASSQDALMY

SEQ ID NO: 53813 - protein, 9 aa, Homo Sapiens
ATAAGDVIK

SEQ ID NO: 53814 - protein, 9 aa, Homo Sapiens
ATDDITELY

SEQ ID NO: 53815 - protein, 9 aa, Homo Sapiens
ATDFDVLSY

SEQ ID NO: 53816 - protein, 9 aa, Homo Sapiens
ATDFKFAMY

SEQ ID NO: 53817 - protein, 9 aa, Homo Sapiens
ATDGRVYVV

SEQ ID NO: 53818 - protein, 9 aa, Homo Sapiens
ATDIPCLLY

SEQ ID NO: 53819 - protein, 9 aa, Homo Sapiens
ATDLAQHLY

SEQ ID NO: 53820 - protein, 9 aa, Homo Sapiens
ATDLLKRLY

SEQ ID NO: 53821 - protein, 9 aa, Homo Sapiens
ATDLTREVY

SEQ ID NO: 53822 - protein, 9 aa, Homo Sapiens
ATDPRPCEV

SEQ ID NO: 53823 - protein, 9 aa, Homo Sapiens
ATDRFRSLY

SEQ ID NO: 53824 - protein, 9 aa, Homo Sapiens
ATDRWYDEY

SEQ ID NO: 53825 - protein, 9 aa, Homo Sapiens
ATDYHFHFY

SEQ ID NO: 53826 - protein, 9 aa, Homo Sapiens
ATDYHVRVY

SEQ ID NO: 53827 - protein, 9 aa, Homo Sapiens
ATDYTFAMY

SEQ ID NO: 53828 - protein, 9 aa, Homo Sapiens
ATEKEKVWY

SEQ ID NO: 53829 - protein, 9 aa, Homo Sapiens
ATELPCHHY

SEQ ID NO: 53830 - protein, 9 aa, Homo Sapiens
ATELQSMMY

SEQ ID NO: 53831 - protein, 9 aa, Homo Sapiens
ATEMTLQRY

SEQ ID NO: 53832 - protein, 9 aa, Homo Sapiens
ATETQPIVY

SEQ ID NO: 53833 - protein, 9 aa, Homo Sapiens
ATEVHPAKY

SEQ ID NO: 53834 - protein, 9 aa, Homo Sapiens
ATEYKNEEY

SEQ ID NO: 53835 - protein, 9 aa, Homo Sapiens
ATMYNLLAY

SEQ ID NO: 53836 - protein, 9 aa, Homo Sapiens
ATQAHSLSY

SEQ ID NO: 53837 - protein, 9 aa, Homo Sapiens
ATQERTDLY

SEQ ID NO: 53838 - protein, 9 aa, Homo Sapiens
ATSKVALVY

SEQ ID NO: 53839 - protein, 9 aa, Homo Sapiens
AVDAARLHY

SEQ ID NO: 53840 - protein, 9 aa, Homo Sapiens
AVDPGLLGY

SEQ ID NO: 53841 - protein, 9 aa, Homo Sapiens
AVDPQHNGY

SEQ ID NO: 53842 - protein, 9 aa, Homo Sapiens
AVDPRFLAY

SEQ ID NO: 53843 - protein, 9 aa, Homo Sapiens
AVDSKVASY

SEQ ID NO: 53844 - protein, 9 aa, Homo Sapiens
CLDAFPNLK

SEQ ID NO: 53845 - protein, 9 aa, Homo Sapiens
DKETYELRY

SEQ ID NO: 53846 - protein, 9 aa, Homo Sapiens
EDALKILQY

SEQ ID NO: 53847 - protein, 9 aa, Homo Sapiens
EEEVNNLVK

SEQ ID NO: 53848 - protein, 9 aa, Homo Sapiens
EFAEEQLRA

SEQ ID NO: 53849 - protein, 9 aa, Homo Sapiens
ETVWRLEEF

SEQ ID NO: 53850 - protein, 9 aa, Homo Sapiens
EVTELLARY

SEQ ID NO: 53851 - protein, 9 aa, Homo Sapiens
FGAYGGLLK

SEQ ID NO: 53852 - protein, 9 aa, Homo Sapiens
FSDGRVLCY

SEQ ID NO: 53853 - protein, 9 aa, Homo Sapiens
FSDIHDFEY

SEQ ID NO: 53854 - protein, 9 aa, Homo Sapiens
FSDKLHSKY

SEQ ID NO: 53855 - protein, 9 aa, Homo Sapiens
FSDVNMQEY

SEQ ID NO: 53856 - protein, 9 aa, Homo Sapiens
FSGRFEDVY

SEQ ID NO: 53857 - protein, 9 aa, Homo Sapiens
FTDKKTHLY

SEQ ID NO: 53858 - protein, 9 aa, Homo Sapiens
GADRFYLGY

SEQ ID NO: 53859 - protein, 9 aa, Homo Sapiens
GADVNRVTY

SEQ ID NO: 53860 - protein, 9 aa, Homo Sapiens
GCDFTNVVK

SEQ ID NO: 53861 - protein, 9 aa, Homo Sapiens
GIAPYSYAG

SEQ ID NO: 53862 - protein, 9 aa, Homo Sapiens
GIDDMCLKY

SEQ ID NO: 53863 - protein, 9 aa, Homo Sapiens
GIGTVPVGR

SEQ ID NO: 53864 - protein, 9 aa, Homo Sapiens
GLDQQDLRY

SEQ ID NO: 53865 - protein, 9 aa, Homo Sapiens
GMDNDFHHY

SEQ ID NO: 53866 - protein, 9 aa, Homo Sapiens
GSDCTTIHY

SEQ ID NO: 53867 - protein, 9 aa, Homo Sapiens
GSDDTELRY

SEQ ID NO: 53868 - protein, 9 aa, Homo Sapiens
GSDFCHTSY

SEQ ID NO: 53869 - protein, 9 aa, Homo Sapiens
GSDFYSMHY

SEQ ID NO: 53870 - protein, 9 aa, Homo Sapiens
GSDKINYTY

SEQ ID NO: 53871 - protein, 9 aa, Homo Sapiens
GSDPVFRFY

SEQ ID NO: 53872 - protein, 9 aa, Homo Sapiens
GSDPYVRMY

SEQ ID NO: 53873 - protein, 9 aa, Homo Sapiens
GSDRIKDGY

SEQ ID NO: 53874 - protein, 9 aa, Homo Sapiens
GSDSRFAGY

SEQ ID NO: 53875 - protein, 9 aa, Homo Sapiens
GSDVVDWLY

SEQ ID NO: 53876 - protein, 9 aa, Homo Sapiens
GSDYINANY

SEQ ID NO: 53877 - protein, 9 aa, Homo Sapiens
GSEPASLSY

SEQ ID NO: 53878 - protein, 9 aa, Homo Sapiens
GSEYLKLGY

SEQ ID NO: 53879 - protein, 9 aa, Homo Sapiens
GSSFIQHYY

SEQ ID NO: 53880 - protein, 9 aa, Homo Sapiens
GTATKHLTY

SEQ ID NO: 53881 - protein, 9 aa, Homo Sapiens
GTDCWTYHY

SEQ ID NO: 53882 - protein, 9 aa, Homo Sapiens
GTDELRLLY

SEQ ID NO: 53883 - protein, 9 aa, Homo Sapiens
GTDGHVHLY

SEQ ID NO: 53884 - protein, 9 aa, Homo Sapiens
GTDLSIFKY

SEQ ID NO: 53885 - protein, 9 aa, Homo Sapiens
GTDMEPSLY

SEQ ID NO: 53886 - protein, 9 aa, Homo Sapiens
GTDPTPQHY

SEQ ID NO: 53887 - protein, 9 aa, Homo Sapiens
GTDSQYNAY

SEQ ID NO: 53888 - protein, 9 aa, Homo Sapiens
GTEFGGSIY

SEQ ID NO: 53889 - protein, 9 aa, Homo Sapiens
GTEIANTLY

SEQ ID NO: 53890 - protein, 9 aa, Homo Sapiens
GTQVEQLLY

SEQ ID NO: 53891 - protein, 9 aa, Homo Sapiens
GTVYEDLRY

SEQ ID NO: 53892 - protein, 9 aa, Homo Sapiens
HADVSNQLY

SEQ ID NO: 53893 - protein, 9 aa, Homo Sapiens
HIDSANALY

SEQ ID NO: 53894 - protein, 9 aa, Homo Sapiens
HIDTCLHAY

SEQ ID NO: 53895 - protein, 9 aa, Homo Sapiens
HIDVGGHMY

SEQ ID NO: 53896 - protein, 9 aa, Homo Sapiens
HLDFHCNEY

SEQ ID NO: 53897 - protein, 9 aa, Homo Sapiens
HLDLGILYY

SEQ ID NO: 53898 - protein, 9 aa, Homo Sapiens
HLDTLTEHY

SEQ ID NO: 53899 - protein, 9 aa, Homo Sapiens
HSDPESDFY

SEQ ID NO: 53900 - protein, 9 aa, Homo Sapiens
HSDPMFSSY

SEQ ID NO: 53901 - protein, 9 aa, Homo Sapiens
HSDPSILGY

SEQ ID NO: 53902 - protein, 9 aa, Homo Sapiens
HSDQQVFEY

SEQ ID NO: 53903 - protein, 9 aa, Homo Sapiens
HSDTDALGY

SEQ ID NO: 53904 - protein, 9 aa, Homo Sapiens
HSDTIQWLY

SEQ ID NO: 53905 - protein, 9 aa, Homo Sapiens
HSEAHTLLY

SEQ ID NO: 53906 - protein, 9 aa, Homo Sapiens
HSEFTTLLY

SEQ ID NO: 53907 - protein, 9 aa, Homo Sapiens
HSELLEDYY

SEQ ID NO: 53908 - protein, 9 aa, Homo Sapiens
HSEYHTLLY

SEQ ID NO: 53909 - protein, 9 aa, Homo Sapiens
HTDCTFIRV

SEQ ID NO: 53910 - protein, 9 aa, Homo Sapiens
HTDILKEKY

SEQ ID NO: 53911 - protein, 9 aa, Homo Sapiens
HTDSLHLLI

SEQ ID NO: 53912 - protein, 9 aa, Homo Sapiens
HTDVGLLEY

SEQ ID NO: 53913 - protein, 9 aa, Homo Sapiens
HTDWLLDLY

SEQ ID NO: 53914 - protein, 9 aa, Homo Sapiens
HTEARELMY

SEQ ID NO: 53915 - protein, 9 aa, Homo Sapiens
HTEERLLRY

SEQ ID NO: 53916 - protein, 9 aa, Homo Sapiens
HTETKTITY

SEQ ID NO: 53917 - protein, 9 aa, Homo Sapiens
HVDEQVFLY

SEQ ID NO: 53918 - protein, 9 aa, Homo Sapiens
IADMGHLKY

SEQ ID NO: 53919 - protein, 9 aa, Homo Sapiens
IAEKETLEY

SEQ ID NO: 53920 - protein, 9 aa, Homo Sapiens
IAQAESLRY

SEQ ID NO: 53921 - protein, 9 aa, Homo Sapiens
IIDGKTLKY

SEQ ID NO: 53922 - protein, 9 aa, Homo Sapiens
IIDHHDNTY

SEQ ID NO: 53923 - protein, 9 aa, Homo Sapiens
IIDNSQGFY

SEQ ID NO: 53924 - protein, 9 aa, Homo Sapiens
IIDRHVSRY

SEQ ID NO: 53925 - protein, 9 aa, Homo Sapiens
IIDYLTDHY

SEQ ID NO: 53926 - protein, 9 aa, Homo Sapiens
IIEANSQHY

SEQ ID NO: 53927 - protein, 9 aa, Homo Sapiens
IIEAQYLRY

SEQ ID NO: 53928 - protein, 9 aa, Homo Sapiens
IIEKETKEY

SEQ ID NO: 53929 - protein, 9 aa, Homo Sapiens
ILDEVIMGY

SEQ ID NO: 53930 - protein, 9 aa, Homo Sapiens
ILDIPNQLY

SEQ ID NO: 53931 - protein, 9 aa, Homo Sapiens
ILDTYLGKY

SEQ ID NO: 53932 - protein, 9 aa, Homo Sapiens
IMDCKGNLY

SEQ ID NO: 53933 - protein, 9 aa, Homo Sapiens
IMDPYKASY

SEQ ID NO: 53934 - protein, 9 aa, Homo Sapiens
IMEKSTMLY

SEQ ID NO: 53935 - protein, 9 aa, Homo Sapiens
ISDAPAPAY

SEQ ID NO: 53936 - protein, 9 aa, Homo Sapiens
ISDGKMQLY

SEQ ID NO: 53937 - protein, 9 aa, Homo Sapiens
ISDHGTVTY

SEQ ID NO: 53938 - protein, 9 aa, Homo Sapiens
ISDLIRDSY

SEQ ID NO: 53939 - protein, 9 aa, Homo Sapiens
ISDRLIGIY

SEQ ID NO: 53940 - protein, 9 aa, Homo Sapiens
ISDSYFPRY

SEQ ID NO: 53941 - protein, 9 aa, Homo Sapiens
ISEELVQKY

SEQ ID NO: 53942 - protein, 9 aa, Homo Sapiens
ISENKFLKY

SEQ ID NO: 53943 - protein, 9 aa, Homo Sapiens
ITAADILDR

SEQ ID NO: 53944 - protein, 9 aa, Homo Sapiens
ITDAYLDQY

SEQ ID NO: 53945 - protein, 9 aa, Homo Sapiens
ITDDLHFYV

SEQ ID NO: 53946 - protein, 9 aa, Homo Sapiens
ITDEQRQYY

SEQ ID NO: 53947 - protein, 9 aa, Homo Sapiens
ITDHGSLIY

SEQ ID NO: 53948 - protein, 9 aa, Homo Sapiens
ITDHLDTQY

SEQ ID NO: 53949 - protein, 9 aa, Homo Sapiens
ITDKDDLVK

SEQ ID NO: 53950 - protein, 9 aa, Homo Sapiens
ITDKNSLAY

SEQ ID NO: 53951 - protein, 9 aa, Homo Sapiens
ITDQGIEFY

SEQ ID NO: 53952 - protein, 9 aa, Homo Sapiens
ITDTTRDVY

SEQ ID NO: 53953 - protein, 9 aa, Homo Sapiens
ITDVDNGYY

SEQ ID NO: 53954 - protein, 9 aa, Homo Sapiens
ITEDKTELY

SEQ ID NO: 53955 - protein, 9 aa, Homo Sapiens
ITNPKSLLY

SEQ ID NO: 53956 - protein, 9 aa, Homo Sapiens
ITQGTPLKY

SEQ ID NO: 53957 - protein, 9 aa, Homo Sapiens
ITQIEHEVS

SEQ ID NO: 53958 - protein, 9 aa, Homo Sapiens
IVDEFAMRY

SEQ ID NO: 53959 - protein, 9 aa, Homo Sapiens
IVDHIHFQY

SEQ ID NO: 53960 - protein, 9 aa, Homo Sapiens
IVDQSQQAY

SEQ ID NO: 53961 - protein, 9 aa, Homo Sapiens
IVDRFTSKY

SEQ ID NO: 53962 - protein, 9 aa, Homo Sapiens
IVDSATALY

SEQ ID NO: 53963 - protein, 9 aa, Homo Sapiens
IVDSLTEMY

SEQ ID NO: 53964 - protein, 9 aa, Homo Sapiens
IVEAEAMNY

SEQ ID NO: 53965 - protein, 9 aa, Homo Sapiens
KAAITTLKY

SEQ ID NO: 53966 - protein, 9 aa, Homo Sapiens
KADELFTEY

SEQ ID NO: 53967 - protein, 9 aa, Homo Sapiens
KADEPIADY

SEQ ID NO: 53968 - protein, 9 aa, Homo Sapiens
KADFCIIHY

SEQ ID NO: 53969 - protein, 9 aa, Homo Sapiens
KADKLDFEY

SEQ ID NO: 53970 - protein, 9 aa, Homo Sapiens
KADKVTQLY

SEQ ID NO: 53971 - protein, 9 aa, Homo Sapiens
KADTLKERY

SEQ ID NO: 53972 - protein, 9 aa, Homo Sapiens
KAEAVALKY

SEQ ID NO: 53973 - protein, 9 aa, Homo Sapiens
KDLVTILFY

SEQ ID NO: 53974 - protein, 9 aa, Homo Sapiens
KEADIHFLI

SEQ ID NO: 53975 - protein, 9 aa, Homo Sapiens
KGDFYVIEY

SEQ ID NO: 53976 - protein, 9 aa, Homo Sapiens
KIADRFLLY

SEQ ID NO: 53977 - protein, 9 aa, Homo Sapiens
KIAQDLEMY

SEQ ID NO: 53978 - protein, 9 aa, Homo Sapiens
KIDALQLEY

SEQ ID NO: 53979 - protein, 9 aa, Homo Sapiens
KIDELYEAY

SEQ ID NO: 53980 - protein, 9 aa, Homo Sapiens
KIDENQLMY

SEQ ID NO: 53981 - protein, 9 aa, Homo Sapiens
KIDEPSTPY

SEQ ID NO: 53982 - protein, 9 aa, Homo Sapiens
KIDHYVLEY

SEQ ID NO: 53983 - protein, 9 aa, Homo Sapiens
KIDPKILAY

SEQ ID NO: 53984 - protein, 9 aa, Homo Sapiens
KIDQWLEQY

SEQ ID NO: 53985 - protein, 9 aa, Homo Sapiens
KIDSFNSLY

SEQ ID NO: 53986 - protein, 9 aa, Homo Sapiens
KIDSIEDRY

SEQ ID NO: 53987 - protein, 9 aa, Homo Sapiens
KIDSLQARY

SEQ ID NO: 53988 - protein, 9 aa, Homo Sapiens
KIDVPANRY

SEQ ID NO: 53989 - protein, 9 aa, Homo Sapiens
KLAGDHIEY

SEQ ID NO: 53990 - protein, 9 aa, Homo Sapiens
KLDDLHTLY

SEQ ID NO: 53991 - protein, 9 aa, Homo Sapiens
KLDEALAQY

SEQ ID NO: 53992 - protein, 9 aa, Homo Sapiens
KLDELKLKY

SEQ ID NO: 53993 - protein, 9 aa, Homo Sapiens
KLDEMTASY

SEQ ID NO: 53994 - protein, 9 aa, Homo Sapiens
KLDEQGLNY

SEQ ID NO: 53995 - protein, 9 aa, Homo Sapiens
KLDEQYQKY

SEQ ID NO: 53996 - protein, 9 aa, Homo Sapiens
KLDIDGYEY

SEQ ID NO: 53997 - protein, 9 aa, Homo Sapiens
KLDIWNIKY

SEQ ID NO: 53998 - protein, 9 aa, Homo Sapiens
KLDKDNLSY

SEQ ID NO: 53999 - protein, 9 aa, Homo Sapiens
KLDLLEQEY

SEQ ID NO: 54000 - protein, 9 aa, Homo Sapiens
KLDPFLTPY

SEQ ID NO: 54001 - protein, 9 aa, Homo Sapiens
KLDPLRGHY

SEQ ID NO: 54002 - protein, 9 aa, Homo Sapiens
KLDQLIEFY

SEQ ID NO: 54003 - protein, 9 aa, Homo Sapiens
KLDSLLLFY

SEQ ID NO: 54004 - protein, 9 aa, Homo Sapiens
KLDTDLKNY

SEQ ID NO: 54005 - protein, 9 aa, Homo Sapiens
KLDTLCDLY

SEQ ID NO: 54006 - protein, 9 aa, Homo Sapiens
KLEKDLDRY

SEQ ID NO: 54007 - protein, 9 aa, Homo Sapiens
KLEKETTMY

SEQ ID NO: 54008 - protein, 9 aa, Homo Sapiens
KMDDKALLV

SEQ ID NO: 54009 - protein, 9 aa, Homo Sapiens
KMDDLNLHY

SEQ ID NO: 54010 - protein, 9 aa, Homo Sapiens
KMDEIGNHY

SEQ ID NO: 54011 - protein, 9 aa, Homo Sapiens
KMDLDNNFY

SEQ ID NO: 54012 - protein, 9 aa, Homo Sapiens
KMDPTDAKY

SEQ ID NO: 54013 - protein, 9 aa, Homo Sapiens
KMDPVAYRV

SEQ ID NO: 54014 - protein, 9 aa, Homo Sapiens
KMDQIISKY

SEQ ID NO: 54015 - protein, 9 aa, Homo Sapiens
KMEQAFARY

SEQ ID NO: 54016 - protein, 9 aa, Homo Sapiens
KQDSNPLYK

SEQ ID NO: 54017 - protein, 9 aa, Homo Sapiens
KQDVLLLYY

SEQ ID NO: 54018 - protein, 9 aa, Homo Sapiens
KSARLDLLY

SEQ ID NO: 54019 - protein, 9 aa, Homo Sapiens
KSDEMELLY

SEQ ID NO: 54020 - protein, 9 aa, Homo Sapiens
KSDESLEKY

SEQ ID NO: 54021 - protein, 9 aa, Homo Sapiens
KSDGIKGLY

SEQ ID NO: 54022 - protein, 9 aa, Homo Sapiens
KSDGSFIGY

SEQ ID NO: 54023 - protein, 9 aa, Homo Sapiens
KSDHSFFKI

SEQ ID NO: 54024 - protein, 9 aa, Homo Sapiens
KSDLFFHDY

SEQ ID NO: 54025 - protein, 9 aa, Homo Sapiens
KSDLRPMLY

SEQ ID NO: 54026 - protein, 9 aa, Homo Sapiens
KSDPFLEFF

SEQ ID NO: 54027 - protein, 9 aa, Homo Sapiens
KSDPFLELY

SEQ ID NO: 54028 - protein, 9 aa, Homo Sapiens
KSDPFLVFY

SEQ ID NO: 54029 - protein, 9 aa, Homo Sapiens
KSDPICVLY

SEQ ID NO: 54030 - protein, 9 aa, Homo Sapiens
KSDPIMLLK

SEQ ID NO: 54031 - protein, 9 aa, Homo Sapiens
KSDPSIVRL

SEQ ID NO: 54032 - protein, 9 aa, Homo Sapiens
KSDQGWRRY

SEQ ID NO: 54033 - protein, 9 aa, Homo Sapiens
KSDSGKPYY

SEQ ID NO: 54034 - protein, 9 aa, Homo Sapiens
KSDVHLNFY

SEQ ID NO: 54035 - protein, 9 aa, Homo Sapiens
KSDVNKEYY

SEQ ID NO: 54036 - protein, 9 aa, Homo Sapiens
KSDYIKLYV

SEQ ID NO: 54037 - protein, 9 aa, Homo Sapiens
KSEASGFCY

SEQ ID NO: 54038 - protein, 9 aa, Homo Sapiens
KSEATQEQY

SEQ ID NO: 54039 - protein, 9 aa, Homo Sapiens
KSEDGRLIY

SEQ ID NO: 54040 - protein, 9 aa, Homo Sapiens
KSEFLNFFY

SEQ ID NO: 54041 - protein, 9 aa, Homo Sapiens
KSELGLNFY

SEQ ID NO: 54042 - protein, 9 aa, Homo Sapiens
KSELLVEQY

SEQ ID NO: 54043 - protein, 9 aa, Homo Sapiens
KSESFMQKY

SEQ ID NO: 54044 - protein, 9 aa, Homo Sapiens
KSGAHVDFY

SEQ ID NO: 54045 - protein, 9 aa, Homo Sapiens
KSGYRIDFY

SEQ ID NO: 54046 - protein, 9 aa, Homo Sapiens
KSIDLKDKY

SEQ ID NO: 54047 - protein, 9 aa, Homo Sapiens
KSNPHRDFY

SEQ ID NO: 54048 - protein, 9 aa, Homo Sapiens
KSSAISLHY

SEQ ID NO: 54049 - protein, 9 aa, Homo Sapiens
KSSATRLLY

SEQ ID NO: 54050 - protein, 9 aa, Homo Sapiens
KSSDVYVSY

SEQ ID NO: 54051 - protein, 9 aa, Homo Sapiens
KSSEVTDAY

SEQ ID NO: 54052 - protein, 9 aa, Homo Sapiens
KSSIDLYFY

SEQ ID NO: 54053 - protein, 9 aa, Homo Sapiens
KSTAISLFY

SEQ ID NO: 54054 - protein, 9 aa, Homo Sapiens
KSVENQMRY

SEQ ID NO: 54055 - protein, 9 aa, Homo Sapiens
KSYCDNLGY

SEQ ID NO: 54056 - protein, 9 aa, Homo Sapiens
KTAEAQLAY

SEQ ID NO: 54057 - protein, 9 aa, Homo Sapiens
KTAGLSDLY

SEQ ID NO: 54058 - protein, 9 aa, Homo Sapiens
KTCATTIAY

SEQ ID NO: 54059 - protein, 9 aa, Homo Sapiens
KTCEEILNY

SEQ ID NO: 54060 - protein, 9 aa, Homo Sapiens
KTDAFICKY

SEQ ID NO: 54061 - protein, 9 aa, Homo Sapiens
KTDDLITRF

SEQ ID NO: 54062 - protein, 9 aa, Homo Sapiens
KTDDSLEKY

SEQ ID NO: 54063 - protein, 9 aa, Homo Sapiens
KTDEMHTAL

SEQ ID NO: 54064 - protein, 9 aa, Homo Sapiens
KTDESLTKY

SEQ ID NO: 54065 - protein, 9 aa, Homo Sapiens
KTDFEVLTK

SEQ ID NO: 54066 - protein, 9 aa, Homo Sapiens
KTDGKIVQY

SEQ ID NO: 54067 - protein, 9 aa, Homo Sapiens
KTDGSFIGY

SEQ ID NO: 54068 - protein, 9 aa, Homo Sapiens
KTDGSFLVH

SEQ ID NO: 54069 - protein, 9 aa, Homo Sapiens
KTDHFIFTY

SEQ ID NO: 54070 - protein, 9 aa, Homo Sapiens
KTDIIDHSF

SEQ ID NO: 54071 - protein, 9 aa, Homo Sapiens
KTDLDLDGY

SEQ ID NO: 54072 - protein, 9 aa, Homo Sapiens
KTDLDLQQY

SEQ ID NO: 54073 - protein, 9 aa, Homo Sapiens
KTDLHNEGY

SEQ ID NO: 54074 - protein, 9 aa, Homo Sapiens
KTDLLEEKV

SEQ ID NO: 54075 - protein, 9 aa, Homo Sapiens
KTDLLLEPY

SEQ ID NO: 54076 - protein, 9 aa, Homo Sapiens
KTDLNNLEM

SEQ ID NO: 54077 - protein, 9 aa, Homo Sapiens
KTDPCTLQF

SEQ ID NO: 54078 - protein, 9 aa, Homo Sapiens
KTDPENTDY

SEQ ID NO: 54079 - protein, 9 aa, Homo Sapiens
KTDPKMLSK

SEQ ID NO: 54080 - protein, 9 aa, Homo Sapiens
KTDQFPLFL

SEQ ID NO: 54081 - protein, 9 aa, Homo Sapiens
KTDREYQEY

SEQ ID NO: 54082 - protein, 9 aa, Homo Sapiens
KTDSPSCEY

SEQ ID NO: 54083 - protein, 9 aa, Homo Sapiens
KTDTHLKEY

SEQ ID NO: 54084 - protein, 9 aa, Homo Sapiens
KTDVTMLLY

SEQ ID NO: 54085 - protein, 9 aa, Homo Sapiens
KTDVVVNSV

SEQ ID NO: 54086 - protein, 9 aa, Homo Sapiens
KTDYDTREY

SEQ ID NO: 54087 - protein, 9 aa, Homo Sapiens
KTDYFFLEV

SEQ ID NO: 54088 - protein, 9 aa, Homo Sapiens
KTEALRLQY

SEQ ID NO: 54089 - protein, 9 aa, Homo Sapiens
KTEDLGCMY

SEQ ID NO: 54090 - protein, 9 aa, Homo Sapiens
KTEGGKVLY

SEQ ID NO: 54091 - protein, 9 aa, Homo Sapiens
KTEIMSPLY

SEQ ID NO: 54092 - protein, 9 aa, Homo Sapiens
KTELQFSDY

SEQ ID NO: 54093 - protein, 9 aa, Homo Sapiens
KTEPSIAEY

SEQ ID NO: 54094 - protein, 9 aa, Homo Sapiens
KTEQEALEY

SEQ ID NO: 54095 - protein, 9 aa, Homo Sapiens
KTERLEVSY

SEQ ID NO: 54096 - protein, 9 aa, Homo Sapiens
KTERSDLEY

SEQ ID NO: 54097 - protein, 9 aa, Homo Sapiens
KTFLEYLEY

SEQ ID NO: 54098 - protein, 9 aa, Homo Sapiens
KTFLYNELY

SEQ ID NO: 54099 - protein, 9 aa, Homo Sapiens
KTFPYQHRY

SEQ ID NO: 54100 - protein, 9 aa, Homo Sapiens
KTHIDVIHY

SEQ ID NO: 54101 - protein, 9 aa, Homo Sapiens
KTQEHGLFY

SEQ ID NO: 54102 - protein, 9 aa, Homo Sapiens
KTQQQHMLY

SEQ ID NO: 54103 - protein, 9 aa, Homo Sapiens
KTQSAMLRY

SEQ ID NO: 54104 - protein, 9 aa, Homo Sapiens
KTSDKPLMY

SEQ ID NO: 54105 - protein, 9 aa, Homo Sapiens
KTSHYNILY

SEQ ID NO: 54106 - protein, 9 aa, Homo Sapiens
KTSRDFDRY

SEQ ID NO: 54107 - protein, 9 aa, Homo Sapiens
KTWDQLEYY

SEQ ID NO: 54108 - protein, 9 aa, Homo Sapiens
KVADMALHY

SEQ ID NO: 54109 - protein, 9 aa, Homo Sapiens
KVASDTQFY

SEQ ID NO: 54110 - protein, 9 aa, Homo Sapiens
KVDAGKLHY

SEQ ID NO: 54111 - protein, 9 aa, Homo Sapiens
KVDDLLESY

SEQ ID NO: 54112 - protein, 9 aa, Homo Sapiens
KVDEEQMKY

SEQ ID NO: 54113 - protein, 9 aa, Homo Sapiens
KVDELYEAY

SEQ ID NO: 54114 - protein, 9 aa, Homo Sapiens
KVDGSVNAY

SEQ ID NO: 54115 - protein, 9 aa, Homo Sapiens
KVDKEKWLY

SEQ ID NO: 54116 - protein, 9 aa, Homo Sapiens
KVDLTNPQY

SEQ ID NO: 54117 - protein, 9 aa, Homo Sapiens
KVDNEILDY

SEQ ID NO: 54118 - protein, 9 aa, Homo Sapiens
KVDQNRVRY

SEQ ID NO: 54119 - protein, 9 aa, Homo Sapiens
KVDTDGNGY

SEQ ID NO: 54120 - protein, 9 aa, Homo Sapiens
KVDYNRLGY

SEQ ID NO: 54121 - protein, 9 aa, Homo Sapiens
KVEAKFINY

SEQ ID NO: 54122 - protein, 9 aa, Homo Sapiens
KVEKHYLFY

SEQ ID NO: 54123 - protein, 9 aa, Homo Sapiens
KVENFFTLY

SEQ ID NO: 54124 - protein, 9 aa, Homo Sapiens
KVEQHVELY

SEQ ID NO: 54125 - protein, 9 aa, Homo Sapiens
LADLSCLVY

SEQ ID NO: 54126 - protein, 9 aa, Homo Sapiens
LADSFRHLY

SEQ ID NO: 54127 - protein, 9 aa, Homo Sapiens
LAGQGELNR

SEQ ID NO: 54128 - protein, 9 aa, Homo Sapiens
LDQVLKEAK

SEQ ID NO: 54129 - protein, 9 aa, Homo Sapiens
LDTNADKQL

SEQ ID NO: 54130 - protein, 9 aa, Homo Sapiens
LGIPLPEIK

SEQ ID NO: 54131 - protein, 9 aa, Homo Sapiens
LGLTEAQTR

SEQ ID NO: 54132 - protein, 9 aa, Homo Sapiens
LIDVGTGYY

SEQ ID NO: 54133 - protein, 9 aa, Homo Sapiens
LIIYDDLSK

SEQ ID NO: 54134 - protein, 9 aa, Homo Sapiens
LLSYVLTVG

SEQ ID NO: 54135 - protein, 9 aa, Homo Sapiens
LNLQEYQSK

SEQ ID NO: 54136 - protein, 9 aa, Homo Sapiens
LSDKNIEQY

SEQ ID NO: 54137 - protein, 9 aa, Homo Sapiens
LSDLGKLSY

SEQ ID NO: 54138 - protein, 9 aa, Homo Sapiens
LSDLGLISY

SEQ ID NO: 54139 - protein, 9 aa, Homo Sapiens
LSDLGRLSY

SEQ ID NO: 54140 - protein, 9 aa, Homo Sapiens
LSDLKHMRY

SEQ ID NO: 54141 - protein, 9 aa, Homo Sapiens
LSDPCPGLY

SEQ ID NO: 54142 - protein, 9 aa, Homo Sapiens
LSDPGSGLY

SEQ ID NO: 54143 - protein, 9 aa, Homo Sapiens
LSDREHPLY

SEQ ID NO: 54144 - protein, 9 aa, Homo Sapiens
LSDSFSDLY

SEQ ID NO: 54145 - protein, 9 aa, Homo Sapiens
LSEAFHEEY

SEQ ID NO: 54146 - protein, 9 aa, Homo Sapiens
LSEPSSLQY

SEQ ID NO: 54147 - protein, 9 aa, Homo Sapiens
LTDADAMKY

SEQ ID NO: 54148 - protein, 9 aa, Homo Sapiens
LTDDDLLRY

SEQ ID NO: 54149 - protein, 9 aa, Homo Sapiens
LTDDKLSQY

SEQ ID NO: 54150 - protein, 9 aa, Homo Sapiens
LTDDLHKQY

SEQ ID NO: 54151 - protein, 9 aa, Homo Sapiens
LTDFIREEY

SEQ ID NO: 54152 - protein, 9 aa, Homo Sapiens
LTDPEAAKY

SEQ ID NO: 54153 - protein, 9 aa, Homo Sapiens
LTDRGVMSY

SEQ ID NO: 54154 - protein, 9 aa, Homo Sapiens
LTDRLASLY

SEQ ID NO: 54155 - protein, 9 aa, Homo Sapiens
LTDTFTAYY

SEQ ID NO: 54156 - protein, 9 aa, Homo Sapiens
LTDTFYYRL

SEQ ID NO: 54157 - protein, 9 aa, Homo Sapiens
LTEKANHYY

SEQ ID NO: 54158 - protein, 9 aa, Homo Sapiens
LTELPDWSY

SEQ ID NO: 54159 - protein, 9 aa, Homo Sapiens
LTEPTGLLY

SEQ ID NO: 54160 - protein, 9 aa, Homo Sapiens
LTEQRALLY

SEQ ID NO: 54161 - protein, 9 aa, Homo Sapiens
LTHSLVLHY

SEQ ID NO: 54162 - protein, 9 aa, Homo Sapiens
LTSRGSQQY

SEQ ID NO: 54163 - protein, 9 aa, Homo Sapiens
LVDGDTLSY

SEQ ID NO: 54164 - protein, 9 aa, Homo Sapiens
LVDGYNVHY

SEQ ID NO: 54165 - protein, 9 aa, Homo Sapiens
LVDPSVYGY

SEQ ID NO: 54166 - protein, 9 aa, Homo Sapiens
LVDRYNLYY

SEQ ID NO: 54167 - protein, 9 aa, Homo Sapiens
LVLEGAGLR

SEQ ID NO: 54168 - protein, 9 aa, Homo Sapiens
LVSDSALYF

SEQ ID NO: 54169 - protein, 9 aa, Homo Sapiens
LVVYPWTQR

SEQ ID NO: 54170 - protein, 9 aa, Homo Sapiens
MGDAPDYDR

SEQ ID NO: 54171 - protein, 9 aa, Homo Sapiens
MIEPRTLQY

SEQ ID NO: 54172 - protein, 9 aa, Homo Sapiens
MLDSHEELY

SEQ ID NO: 54173 - protein, 9 aa, Homo Sapiens
MSDSYLPSY

SEQ ID NO: 54174 - protein, 9 aa, Homo Sapiens
MSEDKPQDY

SEQ ID NO: 54175 - protein, 9 aa, Homo Sapiens
MSEGKAETY

SEQ ID NO: 54176 - protein, 9 aa, Homo Sapiens
MSEGLGMRY

SEQ ID NO: 54177 - protein, 9 aa, Homo Sapiens
MSMVANLLY

SEQ ID NO: 54178 - protein, 9 aa, Homo Sapiens
MSQNFHTSY

SEQ ID NO: 54179 - protein, 9 aa, Homo Sapiens
MSSRSWLSY

SEQ ID NO: 54180 - protein, 9 aa, Homo Sapiens
MTDPIRILV

SEQ ID NO: 54181 - protein, 9 aa, Homo Sapiens
MTEKQLNLY

SEQ ID NO: 54182 - protein, 9 aa, Homo Sapiens
MTERQALSY

SEQ ID NO: 54183 - protein, 9 aa, Homo Sapiens
MTERQDLVY

SEQ ID NO: 54184 - protein, 9 aa, Homo Sapiens
MTESKFSKY

SEQ ID NO: 54185 - protein, 9 aa, Homo Sapiens
MTHNLLLNY

SEQ ID NO: 54186 - protein, 9 aa, Homo Sapiens
MVDPLLTKY

SEQ ID NO: 54187 - protein, 9 aa, Homo Sapiens
NTDFYQTSY

SEQ ID NO: 54188 - protein, 9 aa, Homo Sapiens
NTDPHSQEY

SEQ ID NO: 54189 - protein, 9 aa, Homo Sapiens
NTDVGAKNY

SEQ ID NO: 54190 - protein, 9 aa, Homo Sapiens
PTDPKVVVY

SEQ ID NO: 54191 - protein, 9 aa, Homo Sapiens
QADIARMLY

SEQ ID NO: 54192 - protein, 9 aa, Homo Sapiens
QADNQRLKY

SEQ ID NO: 54193 - protein, 9 aa, Homo Sapiens
QAESTALKY

SEQ ID NO: 54194 - protein, 9 aa, Homo Sapiens
QEDPDYGIR

SEQ ID NO: 54195 - protein, 9 aa, Homo Sapiens
QGEYIAPEK

SEQ ID NO: 54196 - protein, 9 aa, Homo Sapiens
QLDRISVYY

SEQ ID NO: 54197 - protein, 9 aa, Homo Sapiens
QMETFMLHY

SEQ ID NO: 54198 - protein, 9 aa, Homo Sapiens
QSDPKTSLY

SEQ ID NO: 54199 - protein, 9 aa, Homo Sapiens
QSDYFRALY

SEQ ID NO: 54200 - protein, 9 aa, Homo Sapiens
QSDYYASYY

SEQ ID NO: 54201 - protein, 9 aa, Homo Sapiens
QSERNLCKY

SEQ ID NO: 54202 - protein, 9 aa, Homo Sapiens
QTCRLLLSY

SEQ ID NO: 54203 - protein, 9 aa, Homo Sapiens
QTDHLFFKY

SEQ ID NO: 54204 - protein, 9 aa, Homo Sapiens
QTDKLKELY

SEQ ID NO: 54205 - protein, 9 aa, Homo Sapiens
QTDNIIYVY

SEQ ID NO: 54206 - protein, 9 aa, Homo Sapiens
QTDPANCDY

SEQ ID NO: 54207 - protein, 9 aa, Homo Sapiens
QTDPVTLQY

SEQ ID NO: 54208 - protein, 9 aa, Homo Sapiens
QTEASALLY

SEQ ID NO: 54209 - protein, 9 aa, Homo Sapiens
QTEDNMLFY

SEQ ID NO: 54210 - protein, 9 aa, Homo Sapiens
QTESQQIRY

SEQ ID NO: 54211 - protein, 9 aa, Homo Sapiens
RAAASTDYY

SEQ ID NO: 54212 - protein, 9 aa, Homo Sapiens
RAAPFSLEY

SEQ ID NO: 54213 - protein, 9 aa, Homo Sapiens
RADENIDKY

SEQ ID NO: 54214 - protein, 9 aa, Homo Sapiens
RADFNAVEY

SEQ ID NO: 54215 - protein, 9 aa, Homo Sapiens
RADGITGLY

SEQ ID NO: 54216 - protein, 9 aa, Homo Sapiens
RADGNFLLY

SEQ ID NO: 54217 - protein, 9 aa, Homo Sapiens
RADPKTVGY

SEQ ID NO: 54218 - protein, 9 aa, Homo Sapiens
RADQELLMY

SEQ ID NO: 54219 - protein, 9 aa, Homo Sapiens
RADQELMTY

SEQ ID NO: 54220 - protein, 9 aa, Homo Sapiens
RADREVAIY

SEQ ID NO: 54221 - protein, 9 aa, Homo Sapiens
RGDKVDILY

SEQ ID NO: 54222 - protein, 9 aa, Homo Sapiens
RIAIQNLLY

SEQ ID NO: 54223 - protein, 9 aa, Homo Sapiens
RIDLDELMK

SEQ ID NO: 54224 - protein, 9 aa, Homo Sapiens
RIDLIPSLY

SEQ ID NO: 54225 - protein, 9 aa, Homo Sapiens
RIDQASLDY

SEQ ID NO: 54226 - protein, 9 aa, Homo Sapiens
RIEDNSLLY

SEQ ID NO: 54227 - protein, 9 aa, Homo Sapiens
RIEEDNLTY

SEQ ID NO: 54228 - protein, 9 aa, Homo Sapiens
RIEGATLLY

SEQ ID NO: 54229 - protein, 9 aa, Homo Sapiens
RIEKQFLLY

SEQ ID NO: 54230 - protein, 9 aa, Homo Sapiens
RLATHHYLY

SEQ ID NO: 54231 - protein, 9 aa, Homo Sapiens
RLDAVTLLY

SEQ ID NO: 54232 - protein, 9 aa, Homo Sapiens
RLDCLIEVY

SEQ ID NO: 54233 - protein, 9 aa, Homo Sapiens
RLDDECAFY

SEQ ID NO: 54234 - protein, 9 aa, Homo Sapiens
RLDDKKFLY

SEQ ID NO: 54235 - protein, 9 aa, Homo Sapiens
RLDEDLAAY

SEQ ID NO: 54236 - protein, 9 aa, Homo Sapiens
RLDEVISKY

SEQ ID NO: 54237 - protein, 9 aa, Homo Sapiens
RLDFNPDRY

SEQ ID NO: 54238 - protein, 9 aa, Homo Sapiens
RLDHKFDLM

SEQ ID NO: 54239 - protein, 9 aa, Homo Sapiens
RLDHWIHSY

SEQ ID NO: 54240 - protein, 9 aa, Homo Sapiens
RLDINTNTY

SEQ ID NO: 54241 - protein, 9 aa, Homo Sapiens
RLDIVRSLY

SEQ ID NO: 54242 - protein, 9 aa, Homo Sapiens
RLDKVLDEY

SEQ ID NO: 54243 - protein, 9 aa, Homo Sapiens
RLDLAVQAY

SEQ ID NO: 54244 - protein, 9 aa, Homo Sapiens
RLDLQPDLY

SEQ ID NO: 54245 - protein, 9 aa, Homo Sapiens
RLDMYGEKY

SEQ ID NO: 54246 - protein, 9 aa, Homo Sapiens
RLDPNFLLK

SEQ ID NO: 54247 - protein, 9 aa, Homo Sapiens
RLDSLTTLY

SEQ ID NO: 54248 - protein, 9 aa, Homo Sapiens
RLDSNNHLY

SEQ ID NO: 54249 - protein, 9 aa, Homo Sapiens
RLDTDHLRY

SEQ ID NO: 54250 - protein, 9 aa, Homo Sapiens
RLEGQVLRY

SEQ ID NO: 54251 - protein, 9 aa, Homo Sapiens
RLEKLQLEY

SEQ ID NO: 54252 - protein, 9 aa, Homo Sapiens
RLETCFLRY

SEQ ID NO: 54253 - protein, 9 aa, Homo Sapiens
RMDNIYFEY

SEQ ID NO: 54254 - protein, 9 aa, Homo Sapiens
RSAEEAPLY

SEQ ID NO: 54255 - protein, 9 aa, Homo Sapiens
RSAKASLVY

SEQ ID NO: 54256 - protein, 9 aa, Homo Sapiens
RSAVYPLLY

SEQ ID NO: 54257 - protein, 9 aa, Homo Sapiens
RSCATVDSY

SEQ ID NO: 54258 - protein, 9 aa, Homo Sapiens
RSDELARHY

SEQ ID NO: 54259 - protein, 9 aa, Homo Sapiens
RSDELTRHY

SEQ ID NO: 54260 - protein, 9 aa, Homo Sapiens
RSDFFTSFY

SEQ ID NO: 54261 - protein, 9 aa, Homo Sapiens
RSDFNEIVY

SEQ ID NO: 54262 - protein, 9 aa, Homo Sapiens
RSDGAGPLY

SEQ ID NO: 54263 - protein, 9 aa, Homo Sapiens
RSDIHTEAV

SEQ ID NO: 54264 - protein, 9 aa, Homo Sapiens
RSDLQSLGY

SEQ ID NO: 54265 - protein, 9 aa, Homo Sapiens
RSDPCYADY

SEQ ID NO: 54266 - protein, 9 aa, Homo Sapiens
RSDPGHYSF

SEQ ID NO: 54267 - protein, 9 aa, Homo Sapiens
RSDPSIMNW

SEQ ID NO: 54268 - protein, 9 aa, Homo Sapiens
RSDRREDYY

SEQ ID NO: 54269 - protein, 9 aa, Homo Sapiens
RSDSEIIGY

SEQ ID NO: 54270 - protein, 9 aa, Homo Sapiens
RSDSRAPVY

SEQ ID NO: 54271 - protein, 9 aa, Homo Sapiens
RSDVEILGY

SEQ ID NO: 54272 - protein, 9 aa, Homo Sapiens
RSEEGRLYY

SEQ ID NO: 54273 - protein, 9 aa, Homo Sapiens
RSEIQRLTY

SEQ ID NO: 54274 - protein, 9 aa, Homo Sapiens
RSEKMTLSY

SEQ ID NO: 54275 - protein, 9 aa, Homo Sapiens
RSEKPNWDY

SEQ ID NO: 54276 - protein, 9 aa, Homo Sapiens
RSENNCFLY

SEQ ID NO: 54277 - protein, 9 aa, Homo Sapiens
RSESSPEAY

SEQ ID NO: 54278 - protein, 9 aa, Homo Sapiens
RSHYLMHNY

SEQ ID NO: 54279 - protein, 9 aa, Homo Sapiens
RSMGFIGHY

SEQ ID NO: 54280 - protein, 9 aa, Homo Sapiens
RSNILTLMY

SEQ ID NO: 54281 - protein, 9 aa, Homo Sapiens
RSSNEFMRY

SEQ ID NO: 54282 - protein, 9 aa, Homo Sapiens
RSSNVSYKY

SEQ ID NO: 54283 - protein, 9 aa, Homo Sapiens
RSSPPGHYY

SEQ ID NO: 54284 - protein, 9 aa, Homo Sapiens
RTAHVILRY

SEQ ID NO: 54285 - protein, 9 aa, Homo Sapiens
RTAQEVETY

SEQ ID NO: 54286 - protein, 9 aa, Homo Sapiens
RTDACFIRV

SEQ ID NO: 54287 - protein, 9 aa, Homo Sapiens
RTDDITSGY

SEQ ID NO: 54288 - protein, 9 aa, Homo Sapiens
RTDELVREY

SEQ ID NO: 54289 - protein, 9 aa, Homo Sapiens
RTDFHGSGY

SEQ ID NO: 54290 - protein, 9 aa, Homo Sapiens
RTDGILALY

SEQ ID NO: 54291 - protein, 9 aa, Homo Sapiens
RTDGKVFQF

SEQ ID NO: 54292 - protein, 9 aa, Homo Sapiens
RTDGTVEIY

SEQ ID NO: 54293 - protein, 9 aa, Homo Sapiens
RTDHELGKY

SEQ ID NO: 54294 - protein, 9 aa, Homo Sapiens
RTDIARTEY

SEQ ID NO: 54295 - protein, 9 aa, Homo Sapiens
RTDPALLRH

SEQ ID NO: 54296 - protein, 9 aa, Homo Sapiens
RTDPLENNY

SEQ ID NO: 54297 - protein, 9 aa, Homo Sapiens
RTDRAHPYY

SEQ ID NO: 54298 - protein, 9 aa, Homo Sapiens
RTDVAVLRY

SEQ ID NO: 54299 - protein, 9 aa, Homo Sapiens
RTDVHNVLV

SEQ ID NO: 54300 - protein, 9 aa, Homo Sapiens
RTEAAFSYY

SEQ ID NO: 54301 - protein, 9 aa, Homo Sapiens
RTEDELSKY

SEQ ID NO: 54302 - protein, 9 aa, Homo Sapiens
RTEDNLQIY

SEQ ID NO: 54303 - protein, 9 aa, Homo Sapiens
RTEEALQLY

SEQ ID NO: 54304 - protein, 9 aa, Homo Sapiens
RTEELAQAY

SEQ ID NO: 54305 - protein, 9 aa, Homo Sapiens
RTEPFQDGY

SEQ ID NO: 54306 - protein, 9 aa, Homo Sapiens
RTEPINTTY

SEQ ID NO: 54307 - protein, 9 aa, Homo Sapiens
RTERNVAVY

SEQ ID NO: 54308 - protein, 9 aa, Homo Sapiens
RTEYTITMY

SEQ ID NO: 54309 - protein, 9 aa, Homo Sapiens
RTFGHLLRY

SEQ ID NO: 54310 - protein, 9 aa, Homo Sapiens
RTFGMAEEY

SEQ ID NO: 54311 - protein, 9 aa, Homo Sapiens
RTFPFSLQY

SEQ ID NO: 54312 - protein, 9 aa, Homo Sapiens
RTIATALEY

SEQ ID NO: 54313 - protein, 9 aa, Homo Sapiens
RTLKEILRY

SEQ ID NO: 54314 - protein, 9 aa, Homo Sapiens
RTMQEIERY

SEQ ID NO: 54315 - protein, 9 aa, Homo Sapiens
RTMVKTLEY

SEQ ID NO: 54316 - protein, 9 aa, Homo Sapiens
RTPDFHDKY

SEQ ID NO: 54317 - protein, 9 aa, Homo Sapiens
RTQTEELHY

SEQ ID NO: 54318 - protein, 9 aa, Homo Sapiens
RTSLDIEEY

SEQ ID NO: 54319 - protein, 9 aa, Homo Sapiens
RTTAHALKY

SEQ ID NO: 54320 - protein, 9 aa, Homo Sapiens
RTTFFHHEY

SEQ ID NO: 54321 - protein, 9 aa, Homo Sapiens
RTTSHLLRY

SEQ ID NO: 54322 - protein, 9 aa, Homo Sapiens
RVADFTEQY

SEQ ID NO: 54323 - protein, 9 aa, Homo Sapiens
RVADTFQDY

SEQ ID NO: 54324 - protein, 9 aa, Homo Sapiens
RVASVMQEY

SEQ ID NO: 54325 - protein, 9 aa, Homo Sapiens
RVDELLEKY

SEQ ID NO: 54326 - protein, 9 aa, Homo Sapiens
RVDENNPEY

SEQ ID NO: 54327 - protein, 9 aa, Homo Sapiens
RVDFQGMEY

SEQ ID NO: 54328 - protein, 9 aa, Homo Sapiens
RVDFTEALY

SEQ ID NO: 54329 - protein, 9 aa, Homo Sapiens
RVDGRMLHY

SEQ ID NO: 54330 - protein, 9 aa, Homo Sapiens
RVDGRMLQY

SEQ ID NO: 54331 - protein, 9 aa, Homo Sapiens
RVDPNGSRY

SEQ ID NO: 54332 - protein, 9 aa, Homo Sapiens
RVDQSLLLY

SEQ ID NO: 54333 - protein, 9 aa, Homo Sapiens
RVDSCASMY

SEQ ID NO: 54334 - protein, 9 aa, Homo Sapiens
RVDSWTPFY

SEQ ID NO: 54335 - protein, 9 aa, Homo Sapiens
RVEEINPEY

SEQ ID NO: 54336 - protein, 9 aa, Homo Sapiens
RVEGMTELY

SEQ ID NO: 54337 - protein, 9 aa, Homo Sapiens
RVEIQNLTY

SEQ ID NO: 54338 - protein, 9 aa, Homo Sapiens
RVEKHLLVY

SEQ ID NO: 54339 - protein, 9 aa, Homo Sapiens
RVEKNLLVY

SEQ ID NO: 54340 - protein, 9 aa, Homo Sapiens
RVEKSDLKY

SEQ ID NO: 54341 - protein, 9 aa, Homo Sapiens
RVEPKVTVY

SEQ ID NO: 54342 - protein, 9 aa, Homo Sapiens
RVQDSNLEY

SEQ ID NO: 54343 - protein, 9 aa, Homo Sapiens
SADPDNLKY

SEQ ID NO: 54344 - protein, 9 aa, Homo Sapiens
SADQVALVY

SEQ ID NO: 54345 - protein, 9 aa, Homo Sapiens
SADSFQSFY

SEQ ID NO: 54346 - protein, 9 aa, Homo Sapiens
SDRSSFSHY

SEQ ID NO: 54347 - protein, 9 aa, Homo Sapiens
SLDALQTHY

SEQ ID NO: 54348 - protein, 9 aa, Homo Sapiens
SLDAPHSTY

SEQ ID NO: 54349 - protein, 9 aa, Homo Sapiens
SLDCHISQY

SEQ ID NO: 54350 - protein, 9 aa, Homo Sapiens
SLDPENPTK

SEQ ID NO: 54351 - protein, 9 aa, Homo Sapiens
SLERLQLEY

SEQ ID NO: 54352 - protein, 9 aa, Homo Sapiens
SLPGHSKPL

SEQ ID NO: 54353 - protein, 9 aa, Homo Sapiens
SMDAHPNRY

SEQ ID NO: 54354 - protein, 9 aa, Homo Sapiens
SMDAHPSRY

SEQ ID NO: 54355 - protein, 9 aa, Homo Sapiens
SSAKTILKY

SEQ ID NO: 54356 - protein, 9 aa, Homo Sapiens
SSDAHTSYY

SEQ ID NO: 54357 - protein, 9 aa, Homo Sapiens
SSDANPVRY

SEQ ID NO: 54358 - protein, 9 aa, Homo Sapiens
SSDDSKLEY

SEQ ID NO: 54359 - protein, 9 aa, Homo Sapiens
SSDGKPFEY

SEQ ID NO: 54360 - protein, 9 aa, Homo Sapiens
SSDKGRLCY

SEQ ID NO: 54361 - protein, 9 aa, Homo Sapiens
SSDKITTGY

SEQ ID NO: 54362 - protein, 9 aa, Homo Sapiens
SSDNIMVQY

SEQ ID NO: 54363 - protein, 9 aa, Homo Sapiens
SSDPQAQKY

SEQ ID NO: 54364 - protein, 9 aa, Homo Sapiens
SSDPYHSGY

SEQ ID NO: 54365 - protein, 9 aa, Homo Sapiens
SSDRHLTQY

SEQ ID NO: 54366 - protein, 9 aa, Homo Sapiens
SSDRTITEY

SEQ ID NO: 54367 - protein, 9 aa, Homo Sapiens
SSDVGHDEY

SEQ ID NO: 54368 - protein, 9 aa, Homo Sapiens
SSDVSHQEY

SEQ ID NO: 54369 - protein, 9 aa, Homo Sapiens
SSEHQTQLY

SEQ ID NO: 54370 - protein, 9 aa, Homo Sapiens
SSELFTLTY

SEQ ID NO: 54371 - protein, 9 aa, Homo Sapiens
SSEQTFMYY

SEQ ID NO: 54372 - protein, 9 aa, Homo Sapiens
SSSPTHSLY

SEQ ID NO: 54373 - protein, 9 aa, Homo Sapiens
STCRVTQTY

SEQ ID NO: 54374 - protein, 9 aa, Homo Sapiens
STDHIPILY

SEQ ID NO: 54375 - protein, 9 aa, Homo Sapiens
STDNFNCKY

SEQ ID NO: 54376 - protein, 9 aa, Homo Sapiens
STDPRPASY

SEQ ID NO: 54377 - protein, 9 aa, Homo Sapiens
STDWHVVNY

SEQ ID NO: 54378 - protein, 9 aa, Homo Sapiens
STEAFCVFY

SEQ ID NO: 54379 - protein, 9 aa, Homo Sapiens
STELNHLGY

SEQ ID NO: 54380 - protein, 9 aa, Homo Sapiens
STEQFQEYY

SEQ ID NO: 54381 - protein, 9 aa, Homo Sapiens
STQKQVLNY

SEQ ID NO: 54382 - protein, 9 aa, Homo Sapiens
STTTGHLIY

SEQ ID NO: 54383 - protein, 9 aa, Homo Sapiens
SVDPTQTEY

SEQ ID NO: 54384 - protein, 9 aa, Homo Sapiens
SVDSQILYY

SEQ ID NO: 54385 - protein, 9 aa, Homo Sapiens
SVDSVFVLY

SEQ ID NO: 54386 - protein, 9 aa, Homo Sapiens
TADGKTYYY

SEQ ID NO: 54387 - protein, 9 aa, Homo Sapiens
TADHNLLLY

SEQ ID NO: 54388 - protein, 9 aa, Homo Sapiens
TAGAQVLLR

SEQ ID NO: 54389 - protein, 9 aa, Homo Sapiens
TDKSMVDKY

SEQ ID NO: 54390 - protein, 9 aa, Homo Sapiens
TLDTKPGLY

SEQ ID NO: 54391 - protein, 9 aa, Homo Sapiens
TMDPKPLAY

SEQ ID NO: 54392 - protein, 9 aa, Homo Sapiens
TMEGGTLKY

SEQ ID NO: 54393 - protein, 9 aa, Homo Sapiens
TSCADTLRY

SEQ ID NO: 54394 - protein, 9 aa, Homo Sapiens
TSDKFRETS

SEQ ID NO: 54395 - protein, 9 aa, Homo Sapiens
TSDKPGSPY

SEQ ID NO: 54396 - protein, 9 aa, Homo Sapiens
TSDQQRQLY

SEQ ID NO: 54397 - protein, 9 aa, Homo Sapiens
TSDSTVYDY

SEQ ID NO: 54398 - protein, 9 aa, Homo Sapiens
TSERTVLRY

SEQ ID NO: 54399 - protein, 9 aa, Homo Sapiens
TSSSHTLTY

SEQ ID NO: 54400 - protein, 9 aa, Homo Sapiens
TTDFIYQLY

SEQ ID NO: 54401 - protein, 9 aa, Homo Sapiens
TTDKKSLAY

SEQ ID NO: 54402 - protein, 9 aa, Homo Sapiens
TTDKRTSFY

SEQ ID NO: 54403 - protein, 9 aa, Homo Sapiens
TTDVDSLSY

SEQ ID NO: 54404 - protein, 9 aa, Homo Sapiens
TTEVHPELY

SEQ ID NO: 54405 - protein, 9 aa, Homo Sapiens
TVDARVYSY

SEQ ID NO: 54406 - protein, 9 aa, Homo Sapiens
TVDEHVWFY

SEQ ID NO: 54407 - protein, 9 aa, Homo Sapiens
TVDRVVLLY

SEQ ID NO: 54408 - protein, 9 aa, Homo Sapiens
TVGPPPDTY

SEQ ID NO: 54409 - protein, 9 aa, Homo Sapiens
VADHRFYRY

SEQ ID NO: 54410 - protein, 9 aa, Homo Sapiens
VADKVHLMY

SEQ ID NO: 54411 - protein, 9 aa, Homo Sapiens
VADLHLYLY

SEQ ID NO: 54412 - protein, 9 aa, Homo Sapiens
VADVHQYFY

SEQ ID NO: 54413 - protein, 9 aa, Homo Sapiens
VIDKESEVY

SEQ ID NO: 54414 - protein, 9 aa, Homo Sapiens
VIDPVAPRY

SEQ ID NO: 54415 - protein, 9 aa, Homo Sapiens
VIDQQNGLY

SEQ ID NO: 54416 - protein, 9 aa, Homo Sapiens
VIDWHNYGY

SEQ ID NO: 54417 - protein, 9 aa, Homo Sapiens
VLDEAFQRY

SEQ ID NO: 54418 - protein, 9 aa, Homo Sapiens
VLDIQNNLY

SEQ ID NO: 54419 - protein, 9 aa, Homo Sapiens
VLDNPSPFY

SEQ ID NO: 54420 - protein, 9 aa, Homo Sapiens
VLDPYLLKY

SEQ ID NO: 54421 - protein, 9 aa, Homo Sapiens
VMDKMQLTY

SEQ ID NO: 54422 - protein, 9 aa, Homo Sapiens
VMEKSFLEY

SEQ ID NO: 54423 - protein, 9 aa, Homo Sapiens
VSCRITDLY

SEQ ID NO: 54424 - protein, 9 aa, Homo Sapiens
VSDKGNLMY

SEQ ID NO: 54425 - protein, 9 aa, Homo Sapiens
VSDKTLSFY

SEQ ID NO: 54426 - protein, 9 aa, Homo Sapiens
VSDPSSPQY

SEQ ID NO: 54427 - protein, 9 aa, Homo Sapiens
VSDPVGVLY

SEQ ID NO: 54428 - protein, 9 aa, Homo Sapiens
VSDRVTVLY

SEQ ID NO: 54429 - protein, 9 aa, Homo Sapiens
VSDRYRFLY

SEQ ID NO: 54430 - protein, 9 aa, Homo Sapiens
VSDSKQFTY

SEQ ID NO: 54431 - protein, 9 aa, Homo Sapiens
VSDTVVEPY

SEQ ID NO: 54432 - protein, 9 aa, Homo Sapiens
VTDGAFFDY

SEQ ID NO: 54433 - protein, 9 aa, Homo Sapiens
VTDSIRDEY

SEQ ID NO: 54434 - protein, 9 aa, Homo Sapiens
VTDTNVILS

SEQ ID NO: 54435 - protein, 9 aa, Homo Sapiens
VTEIDQDKY

SEQ ID NO: 54436 - protein, 9 aa, Homo Sapiens
VTEKDLLLY

SEQ ID NO: 54437 - protein, 9 aa, Homo Sapiens
VTELHVISY

SEQ ID NO: 54438 - protein, 9 aa, Homo Sapiens
VVDEHTGQY

SEQ ID NO: 54439 - protein, 9 aa, Homo Sapiens
VVDEIFNEY

SEQ ID NO: 54440 - protein, 9 aa, Homo Sapiens
VVDGFNVLY

SEQ ID NO: 54441 - protein, 9 aa, Homo Sapiens
VVDNLQHLY

SEQ ID NO: 54442 - protein, 9 aa, Homo Sapiens
YFGIYDTAK

SEQ ID NO: 54443 - protein, 9 aa, Homo Sapiens
YSDVHNCSY

SEQ ID NO: 54444 - protein, 9 aa, Homo Sapiens
YTDENQHQY

SEQ ID NO: 54445 - protein, 9 aa, Homo Sapiens
YTDSYTDTY

SEQ ID NO: 54446 - protein, 9 aa, Homo Sapiens
YVDPQFLTY

SEQ ID NO: 54447 - protein, 10 aa, Homo Sapiens
AIDHNQMFQY

SEQ ID NO: 54448 - protein, 10 aa, Homo Sapiens
AIDIHNKTLY

SEQ ID NO: 54449 - protein, 10 aa, Homo Sapiens
AINVNDSVTK

SEQ ID NO: 54450 - protein, 10 aa, Homo Sapiens
ALDDRLYCVY

SEQ ID NO: 54451 - protein, 10 aa, Homo Sapiens
ALDENGNLWY

SEQ ID NO: 54452 - protein, 10 aa, Homo Sapiens
ALDGGFQMHY

SEQ ID NO: 54453 - protein, 10 aa, Homo Sapiens
ALDKDAPLRY

SEQ ID NO: 54454 - protein, 10 aa, Homo Sapiens
ALDSHILDYY

SEQ ID NO: 54455 - protein, 10 aa, Homo Sapiens
ASDALDKIRY

SEQ ID NO: 54456 - protein, 10 aa, Homo Sapiens
ASDKGNLPKY

SEQ ID NO: 54457 - protein, 10 aa, Homo Sapiens
ASDNTGRYAY

SEQ ID NO: 54458 - protein, 10 aa, Homo Sapiens
ASDSGKYLCY

SEQ ID NO: 54459 - protein, 10 aa, Homo Sapiens
ASEAEMRLFY

SEQ ID NO: 54460 - protein, 10 aa, Homo Sapiens
ASEASRLAHY

SEQ ID NO: 54461 - protein, 10 aa, Homo Sapiens
ASEFGNHYLY

SEQ ID NO: 54462 - protein, 10 aa, Homo Sapiens
ASEFPGAQHY

SEQ ID NO: 54463 - protein, 10 aa, Homo Sapiens
ASEPRPFWGY

SEQ ID NO: 54464 - protein, 10 aa, Homo Sapiens
ASEPSAQLSY

SEQ ID NO: 54465 - protein, 10 aa, Homo Sapiens
ASEVCPPPGY

SEQ ID NO: 54466 - protein, 10 aa, Homo Sapiens
ASMVRSGDYY

SEQ ID NO: 54467 - protein, 10 aa, Homo Sapiens
ASSPTPPHGY

SEQ ID NO: 54468 - protein, 10 aa, Homo Sapiens
ATCHFALGEY

SEQ ID NO: 54469 - protein, 10 aa, Homo Sapiens
ATDISRQNEY

SEQ ID NO: 54470 - protein, 10 aa, Homo Sapiens
ATDLDVANFY

SEQ ID NO: 54471 - protein, 10 aa, Homo Sapiens
ATDLVVLDRY

SEQ ID NO: 54472 - protein, 10 aa, Homo Sapiens
ATDMPVKNQY

SEQ ID NO: 54473 - protein, 10 aa, Homo Sapiens
ATDPVTGDLY

SEQ ID NO: 54474 - protein, 10 aa, Homo Sapiens
ATDRFLPEGY

SEQ ID NO: 54475 - protein, 10 aa, Homo Sapiens
ATDSYKVTHY

SEQ ID NO: 54476 - protein, 10 aa, Homo Sapiens
ATDVAKGMHY

SEQ ID NO: 54477 - protein, 10 aa, Homo Sapiens
ATDWGDTQAY

SEQ ID NO: 54478 - protein, 10 aa, Homo Sapiens
ATECLPLDKY

SEQ ID NO: 54479 - protein, 10 aa, Homo Sapiens
ATEDPVLERY

SEQ ID NO: 54480 - protein, 10 aa, Homo Sapiens
ATEDPWKTNY

SEQ ID NO: 54481 - protein, 10 aa, Homo Sapiens
ATEEAPYWTY

SEQ ID NO: 54482 - protein, 10 aa, Homo Sapiens
ATENKLRLHY

SEQ ID NO: 54483 - protein, 10 aa, Homo Sapiens
ATEQAPLWAY

SEQ ID NO: 54484 - protein, 10 aa, Homo Sapiens
ATEQVSWGHY

SEQ ID NO: 54485 - protein, 10 aa, Homo Sapiens
ATNPESKVFY

SEQ ID NO: 54486 - protein, 10 aa, Homo Sapiens
AVDFAERHGY

SEQ ID NO: 54487 - protein, 10 aa, Homo Sapiens
AVDPTSGQLY

SEQ ID NO: 54488 - protein, 10 aa, Homo Sapiens
AVDTYCRHNY

SEQ ID NO: 54489 - protein, 10 aa, Homo Sapiens
AVECLNYQHY

SEQ ID NO: 54490 - protein, 10 aa, Homo Sapiens
DTIGYPVMIR

SEQ ID NO: 54491 - protein, 10 aa, Homo Sapiens
DTNADKQLSF

SEQ ID NO: 54492 - protein, 10 aa, Homo Sapiens
EENLLDFVRF

SEQ ID NO: 54493 - protein, 10 aa, Homo Sapiens
EEQLQQIRAE

SEQ ID NO: 54494 - protein, 10 aa, Homo Sapiens
EVFPLKVFGY

SEQ ID NO: 54495 - protein, 10 aa, Homo Sapiens
EYVAELGTVP

SEQ ID NO: 54496 - protein, 10 aa, Homo Sapiens
FGGETDEATR

SEQ ID NO: 54497 - protein, 10 aa, Homo Sapiens
FSGGFGARDY

SEQ ID NO: 54498 - protein, 10 aa, Homo Sapiens
FTDPRAYLKY

SEQ ID NO: 54499 - protein, 10 aa, Homo Sapiens
FTDVNSILRY

SEQ ID NO: 54500 - protein, 10 aa, Homo Sapiens
GPPPPPGKPQ

SEQ ID NO: 54501 - protein, 10 aa, Homo Sapiens
GSDAGWTLGY

SEQ ID NO: 54502 - protein, 10 aa, Homo Sapiens
GSDEPAFMYY

SEQ ID NO: 54503 - protein, 10 aa, Homo Sapiens
GSDGKLVLHY

SEQ ID NO: 54504 - protein, 10 aa, Homo Sapiens
GSDKINYTYM

SEQ ID NO: 54505 - protein, 10 aa, Homo Sapiens
GSDRSSFSHY

SEQ ID NO: 54506 - protein, 10 aa, Homo Sapiens
GSEAHVNTCY

SEQ ID NO: 54507 - protein, 10 aa, Homo Sapiens
GSSSVRPGLY

SEQ ID NO: 54508 - protein, 10 aa, Homo Sapiens
GTDDGKVGLY

SEQ ID NO: 54509 - protein, 10 aa, Homo Sapiens
GTDDGRLLEY

SEQ ID NO: 54510 - protein, 10 aa, Homo Sapiens
GTDRTENVKY

SEQ ID NO: 54511 - protein, 10 aa, Homo Sapiens
GTDSASGMDY

SEQ ID NO: 54512 - protein, 10 aa, Homo Sapiens
GTELGNELFY

SEQ ID NO: 54513 - protein, 10 aa, Homo Sapiens
GVDLTGPQLY

SEQ ID NO: 54514 - protein, 10 aa, Homo Sapiens
GVDVTGPHLY

SEQ ID NO: 54515 - protein, 10 aa, Homo Sapiens
HADSPVLMVY

SEQ ID NO: 54516 - protein, 10 aa, Homo Sapiens
HLDEAQRLLY

SEQ ID NO: 54517 - protein, 10 aa, Homo Sapiens
HLDHAQKTLY

SEQ ID NO: 54518 - protein, 10 aa, Homo Sapiens
HLDQSQKSLY

SEQ ID NO: 54519 - protein, 10 aa, Homo Sapiens
HLDSDQKLLY

SEQ ID NO: 54520 - protein, 10 aa, Homo Sapiens
HLSERADWQY

SEQ ID NO: 54521 - protein, 10 aa, Homo Sapiens
HMDTCKYVHY

SEQ ID NO: 54522 - protein, 10 aa, Homo Sapiens
HSAVNMNLHY

SEQ ID NO: 54523 - protein, 10 aa, Homo Sapiens
HSDIFPARHY

SEQ ID NO: 54524 - protein, 10 aa, Homo Sapiens
HSDLLEDSKY

SEQ ID NO: 54525 - protein, 10 aa, Homo Sapiens
HSDPRQTFLY

SEQ ID NO: 54526 - protein, 10 aa, Homo Sapiens
HSDVTEAMLY

SEQ ID NO: 54527 - protein, 10 aa, Homo Sapiens
HTDAICSVNY

SEQ ID NO: 54528 - protein, 10 aa, Homo Sapiens
HTDAVWGLAY

SEQ ID NO: 54529 - protein, 10 aa, Homo Sapiens
HTDCPGHADY

SEQ ID NO: 54530 - protein, 10 aa, Homo Sapiens
HTDDPLTWDY

SEQ ID NO: 54531 - protein, 10 aa, Homo Sapiens
HTDHHMFFDY

SEQ ID NO: 54532 - protein, 10 aa, Homo Sapiens
HTDIDAAKVY

SEQ ID NO: 54533 - protein, 10 aa, Homo Sapiens
HTDIRSQLRY

SEQ ID NO: 54534 - protein, 10 aa, Homo Sapiens
HTDPDYSAAY

SEQ ID NO: 54535 - protein, 10 aa, Homo Sapiens
HTEENSHFEY

SEQ ID NO: 54536 - protein, 10 aa, Homo Sapiens
HTELPRGDHY

SEQ ID NO: 54537 - protein, 10 aa, Homo Sapiens
HTMSSSHLFY

SEQ ID NO: 54538 - protein, 10 aa, Homo Sapiens
IADSNYNWFY

SEQ ID NO: 54539 - protein, 10 aa, Homo Sapiens
IIDAGPKGNY

SEQ ID NO: 54540 - protein, 10 aa, Homo Sapiens
IIDNIKGTEY

SEQ ID NO: 54541 - protein, 10 aa, Homo Sapiens
IIDSAGPLYY

SEQ ID NO: 54542 - protein, 10 aa, Homo Sapiens
IISMFYGVMT

SEQ ID NO: 54543 - protein, 10 aa, Homo Sapiens
ILDIPNQLYY

SEQ ID NO: 54544 - protein, 10 aa, Homo Sapiens
ILQTDVPEEK

SEQ ID NO: 54545 - protein, 10 aa, Homo Sapiens
IMDDPAGNSY

SEQ ID NO: 54546 - protein, 10 aa, Homo Sapiens
IMDPDVITGY

SEQ ID NO: 54547 - protein, 10 aa, Homo Sapiens
ISDGKEYLFY

SEQ ID NO: 54548 - protein, 10 aa, Homo Sapiens
ISDHIYGGIS

SEQ ID NO: 54549 - protein, 10 aa, Homo Sapiens
ISDPSNCSQY

SEQ ID NO: 54550 - protein, 10 aa, Homo Sapiens
ISDRYYTALY

SEQ ID NO: 54551 - protein, 10 aa, Homo Sapiens
ISDSSGVMVY

SEQ ID NO: 54552 - protein, 10 aa, Homo Sapiens
ISEAGKDLLY

SEQ ID NO: 54553 - protein, 10 aa, Homo Sapiens
ISNAQDHLLY

SEQ ID NO: 54554 - protein, 10 aa, Homo Sapiens
ISSSPTHSLY

SEQ ID NO: 54555 - protein, 10 aa, Homo Sapiens
ITDIQIPLDY

SEQ ID NO: 54556 - protein, 10 aa, Homo Sapiens
ITDPDPDIRY

SEQ ID NO: 54557 - protein, 10 aa, Homo Sapiens
ITDSAGHILY

SEQ ID NO: 54558 - protein, 10 aa, Homo Sapiens
ITDTMKFFLY

SEQ ID NO: 54559 - protein, 10 aa, Homo Sapiens
ITDVSWRLEY

SEQ ID NO: 54560 - protein, 10 aa, Homo Sapiens
ITEKVKSMQY

SEQ ID NO: 54561 - protein, 10 aa, Homo Sapiens
ITERSVLNLY

SEQ ID NO: 54562 - protein, 10 aa, Homo Sapiens
ITESNMKSRY

SEQ ID NO: 54563 - protein, 10 aa, Homo Sapiens
ITSEAPFLHY

SEQ ID NO: 54564 - protein, 10 aa, Homo Sapiens
IVDGHLQLSY

SEQ ID NO: 54565 - protein, 10 aa, Homo Sapiens
IVDKNGRLVY

SEQ ID NO: 54566 - protein, 10 aa, Homo Sapiens
KADFSTKDIY

SEQ ID NO: 54567 - protein, 10 aa, Homo Sapiens
KADIPLVVLY

SEQ ID NO: 54568 - protein, 10 aa, Homo Sapiens
KADSAVSSFY

SEQ ID NO: 54569 - protein, 10 aa, Homo Sapiens
KADVDAIHEY

SEQ ID NO: 54570 - protein, 10 aa, Homo Sapiens
KAEDFQIEGY

SEQ ID NO: 54571 - protein, 10 aa, Homo Sapiens
KGDTPSLQEY

SEQ ID NO: 54572 - protein, 10 aa, Homo Sapiens
KIADMGHLKY

SEQ ID NO: 54573 - protein, 10 aa, Homo Sapiens
KIDVPWAGQY

SEQ ID NO: 54574 - protein, 10 aa, Homo Sapiens
KLADQIFAYY

SEQ ID NO: 54575 - protein, 10 aa, Homo Sapiens
KLDDIVQHIY

SEQ ID NO: 54576 - protein, 10 aa, Homo Sapiens
KLDEDLHVKY

SEQ ID NO: 54577 - protein, 10 aa, Homo Sapiens
KLDETGNSLK

SEQ ID NO: 54578 - protein, 10 aa, Homo Sapiens
KLDGTGYGDY

SEQ ID NO: 54579 - protein, 10 aa, Homo Sapiens
KLDGTTPVRY

SEQ ID NO: 54580 - protein, 10 aa, Homo Sapiens
KLDIPTAAKY

SEQ ID NO: 54581 - protein, 10 aa, Homo Sapiens
KLDKSRLERY

SEQ ID NO: 54582 - protein, 10 aa, Homo Sapiens
KLDPHNHVLY

SEQ ID NO: 54583 - protein, 10 aa, Homo Sapiens
KLDPPGGQFY

SEQ ID NO: 54584 - protein, 10 aa, Homo Sapiens
KLDPSPQTIY

SEQ ID NO: 54585 - protein, 10 aa, Homo Sapiens
KLDRSVFTAY

SEQ ID NO: 54586 - protein, 10 aa, Homo Sapiens
KLDRTFHLSY

SEQ ID NO: 54587 - protein, 10 aa, Homo Sapiens
KLDSKELGKY

SEQ ID NO: 54588 - protein, 10 aa, Homo Sapiens
KLDSSAQFGY

SEQ ID NO: 54589 - protein, 10 aa, Homo Sapiens
KLDVTSVEDY

SEQ ID NO: 54590 - protein, 10 aa, Homo Sapiens
KLEDTENWLY

SEQ ID NO: 54591 - protein, 10 aa, Homo Sapiens
KLPEFTKSEY

SEQ ID NO: 54592 - protein, 10 aa, Homo Sapiens
KMDVSKITRY

SEQ ID NO: 54593 - protein, 10 aa, Homo Sapiens
KMMNGGHYTY

SEQ ID NO: 54594 - protein, 10 aa, Homo Sapiens
KSAPSDSLTY

SEQ ID NO: 54595 - protein, 10 aa, Homo Sapiens
KSDDHPDVVY

SEQ ID NO: 54596 - protein, 10 aa, Homo Sapiens
KSDHTDVLYY

SEQ ID NO: 54597 - protein, 10 aa, Homo Sapiens
KSDKHLYEEY

SEQ ID NO: 54598 - protein, 10 aa, Homo Sapiens
KSDLFQDDLY

SEQ ID NO: 54599 - protein, 10 aa, Homo Sapiens
KSDLFQEDLY

SEQ ID NO: 54600 - protein, 10 aa, Homo Sapiens
KSDLLQCLQY

SEQ ID NO: 54601 - protein, 10 aa, Homo Sapiens
KSDPICVLYV

SEQ ID NO: 54602 - protein, 10 aa, Homo Sapiens
KSDSGKPYYY

SEQ ID NO: 54603 - protein, 10 aa, Homo Sapiens
KSDTGKPYYY

SEQ ID NO: 54604 - protein, 10 aa, Homo Sapiens
KSDVNAIIHY

SEQ ID NO: 54605 - protein, 10 aa, Homo Sapiens
KSEAQCKNFY

SEQ ID NO: 54606 - protein, 10 aa, Homo Sapiens
KSEDFSLPAY

SEQ ID NO: 54607 - protein, 10 aa, Homo Sapiens
KSEDKVIAVY

SEQ ID NO: 54608 - protein, 10 aa, Homo Sapiens
KSEFLGFTSY

SEQ ID NO: 54609 - protein, 10 aa, Homo Sapiens
KSELSHYTFY

SEQ ID NO: 54610 - protein, 10 aa, Homo Sapiens
KSEMEMAHLY

SEQ ID NO: 54611 - protein, 10 aa, Homo Sapiens
KSENPAKRLY

SEQ ID NO: 54612 - protein, 10 aa, Homo Sapiens
KSENQVLGQY

SEQ ID NO: 54613 - protein, 10 aa, Homo Sapiens
KSETEKLLEY

SEQ ID NO: 54614 - protein, 10 aa, Homo Sapiens
KSETELKDTY

SEQ ID NO: 54615 - protein, 10 aa, Homo Sapiens
KSSESEFTQY

SEQ ID NO: 54616 - protein, 10 aa, Homo Sapiens
KSSPDMLYQY

SEQ ID NO: 54617 - protein, 10 aa, Homo Sapiens
KSSQEEVRSY

SEQ ID NO: 54618 - protein, 10 aa, Homo Sapiens
KTADGKTYYY

SEQ ID NO: 54619 - protein, 10 aa, Homo Sapiens
KTAEGDVGDY

SEQ ID NO: 54620 - protein, 10 aa, Homo Sapiens
KTAVIDHHNY

SEQ ID NO: 54621 - protein, 10 aa, Homo Sapiens
KTDDLGSLRL

SEQ ID NO: 54622 - protein, 10 aa, Homo Sapiens
KTDDLTMVLY

SEQ ID NO: 54623 - protein, 10 aa, Homo Sapiens
KTDLHNEGYI

SEQ ID NO: 54624 - protein, 10 aa, Homo Sapiens
KTDLPQSVVY

SEQ ID NO: 54625 - protein, 10 aa, Homo Sapiens
KTDMEKLTFY

SEQ ID NO: 54626 - protein, 10 aa, Homo Sapiens
KTDPGTVFVM

SEQ ID NO: 54627 - protein, 10 aa, Homo Sapiens
KTDPKDPANY

SEQ ID NO: 54628 - protein, 10 aa, Homo Sapiens
KTDRLWHDKY

SEQ ID NO: 54629 - protein, 10 aa, Homo Sapiens
KTDSEATNIY

SEQ ID NO: 54630 - protein, 10 aa, Homo Sapiens
KTDVHSPLKY

SEQ ID NO: 54631 - protein, 10 aa, Homo Sapiens
KTDVLRLVLY

SEQ ID NO: 54632 - protein, 10 aa, Homo Sapiens
KTEDDKAYAY

SEQ ID NO: 54633 - protein, 10 aa, Homo Sapiens
KTEEAIIYSY

SEQ ID NO: 54634 - protein, 10 aa, Homo Sapiens
KTEEMPQLNF

SEQ ID NO: 54635 - protein, 10 aa, Homo Sapiens
KTEETLRFLY

SEQ ID NO: 54636 - protein, 10 aa, Homo Sapiens
KTEEYVLDFY

SEQ ID NO: 54637 - protein, 10 aa, Homo Sapiens
KTEIAHSVLY

SEQ ID NO: 54638 - protein, 10 aa, Homo Sapiens
KTELQFSDYY

SEQ ID NO: 54639 - protein, 10 aa, Homo Sapiens
KTEPDNAQEY

SEQ ID NO: 54640 - protein, 10 aa, Homo Sapiens
KTEQEALEYF

SEQ ID NO: 54641 - protein, 10 aa, Homo Sapiens
KTERGSYSSY

SEQ ID NO: 54642 - protein, 10 aa, Homo Sapiens
KTEVNSGFFY

SEQ ID NO: 54643 - protein, 10 aa, Homo Sapiens
KTGKPMINLY

SEQ ID NO: 54644 - protein, 10 aa, Homo Sapiens
KTGQPMINLY

SEQ ID NO: 54645 - protein, 10 aa, Homo Sapiens
KTLGDFAAEY

SEQ ID NO: 54646 - protein, 10 aa, Homo Sapiens
KTLLDQHGQY

SEQ ID NO: 54647 - protein, 10 aa, Homo Sapiens
KTSILEQLLY

SEQ ID NO: 54648 - protein, 10 aa, Homo Sapiens
KTSMFPSLKY

SEQ ID NO: 54649 - protein, 10 aa, Homo Sapiens
KTVGEPGWLY

SEQ ID NO: 54650 - protein, 10 aa, Homo Sapiens
KVDENQKAYY

SEQ ID NO: 54651 - protein, 10 aa, Homo Sapiens
KVDEYGAKDY

SEQ ID NO: 54652 - protein, 10 aa, Homo Sapiens
KVDNQAMLHY

SEQ ID NO: 54653 - protein, 10 aa, Homo Sapiens
KVDVEQVVMY

SEQ ID NO: 54654 - protein, 10 aa, Homo Sapiens
KVEKAPQETY

SEQ ID NO: 54655 - protein, 10 aa, Homo Sapiens
KVEPFLPGHY

SEQ ID NO: 54656 - protein, 10 aa, Homo Sapiens
LDTNADKQLS

SEQ ID NO: 54657 - protein, 10 aa, Homo Sapiens
LEGLKGGHTY

SEQ ID NO: 54658 - protein, 10 aa, Homo Sapiens
LGGVAHTLQK

SEQ ID NO: 54659 - protein, 10 aa, Homo Sapiens
LIDAANGAIR

SEQ ID NO: 54660 - protein, 10 aa, Homo Sapiens
LLCGMAVGLI

SEQ ID NO: 54661 - protein, 10 aa, Homo Sapiens
LLDDAQRLLY

SEQ ID NO: 54662 - protein, 10 aa, Homo Sapiens
LLDLDEELRY

SEQ ID NO: 54663 - protein, 10 aa, Homo Sapiens
LLDNVVNCLY

SEQ ID NO: 54664 - protein, 10 aa, Homo Sapiens
LLDPSQKNLY

SEQ ID NO: 54665 - protein, 10 aa, Homo Sapiens
LLDQGQLNKY

SEQ ID NO: 54666 - protein, 10 aa, Homo Sapiens
LLDSSQKNLY

SEQ ID NO: 54667 - protein, 10 aa, Homo Sapiens
LLDTPVKTQY

SEQ ID NO: 54668 - protein, 10 aa, Homo Sapiens
LSDAKKRELY

SEQ ID NO: 54669 - protein, 10 aa, Homo Sapiens
LSDFESGLKY

SEQ ID NO: 54670 - protein, 10 aa, Homo Sapiens
LSDHLINQGY

SEQ ID NO: 54671 - protein, 10 aa, Homo Sapiens
LSDIASALRY

SEQ ID NO: 54672 - protein, 10 aa, Homo Sapiens
LSDIGSGIRY

SEQ ID NO: 54673 - protein, 10 aa, Homo Sapiens
LSDMPLKSFY

SEQ ID NO: 54674 - protein, 10 aa, Homo Sapiens
LSDPAGAIIY

SEQ ID NO: 54675 - protein, 10 aa, Homo Sapiens
LSDPSGPKSY

SEQ ID NO: 54676 - protein, 10 aa, Homo Sapiens
LSDSGVTQRY

SEQ ID NO: 54677 - protein, 10 aa, Homo Sapiens
LTAHEPPLLY

SEQ ID NO: 54678 - protein, 10 aa, Homo Sapiens
LTDARRSEDY

SEQ ID NO: 54679 - protein, 10 aa, Homo Sapiens
LTDDGNKWLY

SEQ ID NO: 54680 - protein, 10 aa, Homo Sapiens
LTDEGYEHFY

SEQ ID NO: 54681 - protein, 10 aa, Homo Sapiens
LTDEQIRFLY

SEQ ID NO: 54682 - protein, 10 aa, Homo Sapiens
LTDITKGVQY

SEQ ID NO: 54683 - protein, 10 aa, Homo Sapiens
LTDNGRHITY

SEQ ID NO: 54684 - protein, 10 aa, Homo Sapiens
LTDPDGALAK

SEQ ID NO: 54685 - protein, 10 aa, Homo Sapiens
LTDPIQGTEY

SEQ ID NO: 54686 - protein, 10 aa, Homo Sapiens
LTDYFLKDEY

SEQ ID NO: 54687 - protein, 10 aa, Homo Sapiens
LTEITKGWLY

SEQ ID NO: 54688 - protein, 10 aa, Homo Sapiens
LTEVDNYHFY

SEQ ID NO: 54689 - protein, 10 aa, Homo Sapiens
LVCNNGTHYL

SEQ ID NO: 54690 - protein, 10 aa, Homo Sapiens
LVDAFVEHRY

SEQ ID NO: 54691 - protein, 10 aa, Homo Sapiens
LVDPWTPHLY

SEQ ID NO: 54692 - protein, 10 aa, Homo Sapiens
LVDSKGFDEY

SEQ ID NO: 54693 - protein, 10 aa, Homo Sapiens
MADPGNPDLY

SEQ ID NO: 54694 - protein, 10 aa, Homo Sapiens
MGTSPLQIDR

SEQ ID NO: 54695 - protein, 10 aa, Homo Sapiens
MMDPNSTQRY

SEQ ID NO: 54696 - protein, 10 aa, Homo Sapiens
MSDHRPAMGY

SEQ ID NO: 54697 - protein, 10 aa, Homo Sapiens
MSDLLSPILY

SEQ ID NO: 54698 - protein, 10 aa, Homo Sapiens
MSDPYMPSYY

SEQ ID NO: 54699 - protein, 10 aa, Homo Sapiens
MSDSYLPSYY

SEQ ID NO: 54700 - protein, 10 aa, Homo Sapiens
MSEKLGVMTY

SEQ ID NO: 54701 - protein, 10 aa, Homo Sapiens
MSGERECLKY

SEQ ID NO: 54702 - protein, 10 aa, Homo Sapiens
MTVSSDQMAK

SEQ ID NO: 54703 - protein, 10 aa, Homo Sapiens
NAVIIPHSGW

SEQ ID NO: 54704 - protein, 10 aa, Homo Sapiens
NEHEVGEAIR

SEQ ID NO: 54705 - protein, 10 aa, Homo Sapiens
PMTLGYWDIR

SEQ ID NO: 54706 - protein, 10 aa, Homo Sapiens
PTCFQLSLIY

SEQ ID NO: 54707 - protein, 10 aa, Homo Sapiens
QGTIVLATVK

SEQ ID NO: 54708 - protein, 10 aa, Homo Sapiens
QLDSAQKNLY

SEQ ID NO: 54709 - protein, 10 aa, Homo Sapiens
QLTSENLQSK

SEQ ID NO: 54710 - protein, 10 aa, Homo Sapiens
QSDPTQSGMY

SEQ ID NO: 54711 - protein, 10 aa, Homo Sapiens
QSDPWQQELY

SEQ ID NO: 54712 - protein, 10 aa, Homo Sapiens
QTALPGNDRY

SEQ ID NO: 54713 - protein, 10 aa, Homo Sapiens
QTDCAPNNGY

SEQ ID NO: 54714 - protein, 10 aa, Homo Sapiens
QTDGCNGLRY

SEQ ID NO: 54715 - protein, 10 aa, Homo Sapiens
QTDRANRFEY

SEQ ID NO: 54716 - protein, 10 aa, Homo Sapiens
QTEICSQNKY

SEQ ID NO: 54717 - protein, 10 aa, Homo Sapiens
QTEKPTHYRY

SEQ ID NO: 54718 - protein, 10 aa, Homo Sapiens
QTETAADCRY

SEQ ID NO: 54719 - protein, 10 aa, Homo Sapiens
QTMRCLFEAY

SEQ ID NO: 54720 - protein, 10 aa, Homo Sapiens
QTVAWFPLYY

SEQ ID NO: 54721 - protein, 10 aa, Homo Sapiens
QVDPLSALKY

SEQ ID NO: 54722 - protein, 10 aa, Homo Sapiens
RADAENAMRY

SEQ ID NO: 54723 - protein, 10 aa, Homo Sapiens
RADDADEFGY

SEQ ID NO: 54724 - protein, 10 aa, Homo Sapiens
RADGNFLLYA

SEQ ID NO: 54725 - protein, 10 aa, Homo Sapiens
RADKIPPSLY

SEQ ID NO: 54726 - protein, 10 aa, Homo Sapiens
RADKSTLSTY

SEQ ID NO: 54727 - protein, 10 aa, Homo Sapiens
RADNSVFGLY

SEQ ID NO: 54728 - protein, 10 aa, Homo Sapiens
RADTQTYQPY

SEQ ID NO: 54729 - protein, 10 aa, Homo Sapiens
RAEDAMRLYY

SEQ ID NO: 54730 - protein, 10 aa, Homo Sapiens
RIASPEGQDY

SEQ ID NO: 54731 - protein, 10 aa, Homo Sapiens
RIDVSINECY

SEQ ID NO: 54732 - protein, 10 aa, Homo Sapiens
RIEDDSRCLY

SEQ ID NO: 54733 - protein, 10 aa, Homo Sapiens
RLAHEVGWKY

SEQ ID NO: 54734 - protein, 10 aa, Homo Sapiens
RLDAPVDYFY

SEQ ID NO: 54735 - protein, 10 aa, Homo Sapiens
RLDASRLLLY

SEQ ID NO: 54736 - protein, 10 aa, Homo Sapiens
RLDDVAVHYY

SEQ ID NO: 54737 - protein, 10 aa, Homo Sapiens
RLDHKFDLMY

SEQ ID NO: 54738 - protein, 10 aa, Homo Sapiens
RLDNGQVGLY

SEQ ID NO: 54739 - protein, 10 aa, Homo Sapiens
RLDPFADGFY

SEQ ID NO: 54740 - protein, 10 aa, Homo Sapiens
RLDPGESKSY

SEQ ID NO: 54741 - protein, 10 aa, Homo Sapiens
RLDPQSGALY

SEQ ID NO: 54742 - protein, 10 aa, Homo Sapiens
RLDQLEADYY

SEQ ID NO: 54743 - protein, 10 aa, Homo Sapiens
RLDSPLSNRY

SEQ ID NO: 54744 - protein, 10 aa, Homo Sapiens
RLDTPLYFSY

SEQ ID NO: 54745 - protein, 10 aa, Homo Sapiens
RLDVLVNNAY

SEQ ID NO: 54746 - protein, 10 aa, Homo Sapiens
RLEERSSEFY

SEQ ID NO: 54747 - protein, 10 aa, Homo Sapiens
RLEETARALY

SEQ ID NO: 54748 - protein, 10 aa, Homo Sapiens
RLEIEPEWAY

SEQ ID NO: 54749 - protein, 10 aa, Homo Sapiens
RLEPPSSSHY

SEQ ID NO: 54750 - protein, 10 aa, Homo Sapiens
RMDENSPLMY

SEQ ID NO: 54751 - protein, 10 aa, Homo Sapiens
RMDGTYACSY

SEQ ID NO: 54752 - protein, 10 aa, Homo Sapiens
RMDTLAHVLY

SEQ ID NO: 54753 - protein, 10 aa, Homo Sapiens
RMDVTSCISY

SEQ ID NO: 54754 - protein, 10 aa, Homo Sapiens
RQDTDSCLVY

SEQ ID NO: 54755 - protein, 10 aa, Homo Sapiens
RSAGLAFSLY

SEQ ID NO: 54756 - protein, 10 aa, Homo Sapiens
RSAGVEQLMY

SEQ ID NO: 54757 - protein, 10 aa, Homo Sapiens
RSDAEKQLLY

SEQ ID NO: 54758 - protein, 10 aa, Homo Sapiens
RSDCLGEHLY

SEQ ID NO: 54759 - protein, 10 aa, Homo Sapiens
RSDEFRPQNY

SEQ ID NO: 54760 - protein, 10 aa, Homo Sapiens
RSDGCGGSFY

SEQ ID NO: 54761 - protein, 10 aa, Homo Sapiens
RSDHEFLFHY

SEQ ID NO: 54762 - protein, 10 aa, Homo Sapiens
RSDHVKFCKY

SEQ ID NO: 54763 - protein, 10 aa, Homo Sapiens
RSDPNSESLY

SEQ ID NO: 54764 - protein, 10 aa, Homo Sapiens
RSDPTSYAGY

SEQ ID NO: 54765 - protein, 10 aa, Homo Sapiens
RSDQLLFDQY

SEQ ID NO: 54766 - protein, 10 aa, Homo Sapiens
RSDYEDPAFY

SEQ ID NO: 54767 - protein, 10 aa, Homo Sapiens
RSEAVIAQFY

SEQ ID NO: 54768 - protein, 10 aa, Homo Sapiens
RSEFASGNTY

SEQ ID NO: 54769 - protein, 10 aa, Homo Sapiens
RSESTENQSY

SEQ ID NO: 54770 - protein, 10 aa, Homo Sapiens
RSFAGNLNTY

SEQ ID NO: 54771 - protein, 10 aa, Homo Sapiens
RSMGGTLDLY

SEQ ID NO: 54772 - protein, 10 aa, Homo Sapiens
RSNPEDQILY

SEQ ID NO: 54773 - protein, 10 aa, Homo Sapiens
RSSLGGRDLY

SEQ ID NO: 54774 - protein, 10 aa, Homo Sapiens
RSSVLKDSEY

SEQ ID NO: 54775 - protein, 10 aa, Homo Sapiens
RTAQNLHNSY

SEQ ID NO: 54776 - protein, 10 aa, Homo Sapiens
RTDAILLGHY

SEQ ID NO: 54777 - protein, 10 aa, Homo Sapiens
RTDGKVFQFL

SEQ ID NO: 54778 - protein, 10 aa, Homo Sapiens
RTDGLSSCSY

SEQ ID NO: 54779 - protein, 10 aa, Homo Sapiens
RTDKSFPNAY

SEQ ID NO: 54780 - protein, 10 aa, Homo Sapiens
RTDRSGFPRY

SEQ ID NO: 54781 - protein, 10 aa, Homo Sapiens
RTDSSHQAWY

SEQ ID NO: 54782 - protein, 10 aa, Homo Sapiens
RTDTGEITSY

SEQ ID NO: 54783 - protein, 10 aa, Homo Sapiens
RTDYNASVSV

SEQ ID NO: 54784 - protein, 10 aa, Homo Sapiens
RTECGLYYSY

SEQ ID NO: 54785 - protein, 10 aa, Homo Sapiens
RTEEGPTLSY

SEQ ID NO: 54786 - protein, 10 aa, Homo Sapiens
RTEELALSHY

SEQ ID NO: 54787 - protein, 10 aa, Homo Sapiens
RTEESSAVQY

SEQ ID NO: 54788 - protein, 10 aa, Homo Sapiens
RTEEWYGTQY

SEQ ID NO: 54789 - protein, 10 aa, Homo Sapiens
RTELPQFVSY

SEQ ID NO: 54790 - protein, 10 aa, Homo Sapiens
RTEMGLYYSY

SEQ ID NO: 54791 - protein, 10 aa, Homo Sapiens
RTENGGQVMY

SEQ ID NO: 54792 - protein, 10 aa, Homo Sapiens
RTEPEQGTLY

SEQ ID NO: 54793 - protein, 10 aa, Homo Sapiens
RTHGVDHLSY

SEQ ID NO: 54794 - protein, 10 aa, Homo Sapiens
RTHLASDDLY

SEQ ID NO: 54795 - protein, 10 aa, Homo Sapiens
RTHLYGSLLY

SEQ ID NO: 54796 - protein, 10 aa, Homo Sapiens
RTMNSLKQLY

SEQ ID NO: 54797 - protein, 10 aa, Homo Sapiens
RTMSVSDFNY

SEQ ID NO: 54798 - protein, 10 aa, Homo Sapiens
RTPDLPEEEY

SEQ ID NO: 54799 - protein, 10 aa, Homo Sapiens
RTSIWDETLY

SEQ ID NO: 54800 - protein, 10 aa, Homo Sapiens
RVAEVWMDEY

SEQ ID NO: 54801 - protein, 10 aa, Homo Sapiens
RVDASSMWLY

SEQ ID NO: 54802 - protein, 10 aa, Homo Sapiens
RVDDIFSDLY

SEQ ID NO: 54803 - protein, 10 aa, Homo Sapiens
RVDEPLSCSY

SEQ ID NO: 54804 - protein, 10 aa, Homo Sapiens
RVDGRGCEDY

SEQ ID NO: 54805 - protein, 10 aa, Homo Sapiens
RVDHGLMLTY

SEQ ID NO: 54806 - protein, 10 aa, Homo Sapiens
RVDHSMMLKY

SEQ ID NO: 54807 - protein, 10 aa, Homo Sapiens
RVDPAKGLFY

SEQ ID NO: 54808 - protein, 10 aa, Homo Sapiens
RVDPIGPLSY

SEQ ID NO: 54809 - protein, 10 aa, Homo Sapiens
RVDPNGFFLY

SEQ ID NO: 54810 - protein, 10 aa, Homo Sapiens
RVDPVGPLSF

SEQ ID NO: 54811 - protein, 10 aa, Homo Sapiens
RVDQHGRVYY

SEQ ID NO: 54812 - protein, 10 aa, Homo Sapiens
RVDSAATSGY

SEQ ID NO: 54813 - protein, 10 aa, Homo Sapiens
RVDSHSKILY

SEQ ID NO: 54814 - protein, 10 aa, Homo Sapiens
RVDTQDQGMY

SEQ ID NO: 54815 - protein, 10 aa, Homo Sapiens
RVDVFTNLGY

SEQ ID NO: 54816 - protein, 10 aa, Homo Sapiens
RVSNFKPGVY

SEQ ID NO: 54817 - protein, 10 aa, Homo Sapiens
SADVPLVVEY

SEQ ID NO: 54818 - protein, 10 aa, Homo Sapiens
SDKETYELRY

SEQ ID NO: 54819 - protein, 10 aa, Homo Sapiens
SFGGSYGGSF

SEQ ID NO: 54820 - protein, 10 aa, Homo Sapiens
SKDYTFSWYK

SEQ ID NO: 54821 - protein, 10 aa, Homo Sapiens
SLDNSYKMDY

SEQ ID NO: 54822 - protein, 10 aa, Homo Sapiens
SLDVGGPLRY

SEQ ID NO: 54823 - protein, 10 aa, Homo Sapiens
SLERSSKPLA

SEQ ID NO: 54824 - protein, 10 aa, Homo Sapiens
SMESFPPLAY

SEQ ID NO: 54825 - protein, 10 aa, Homo Sapiens
SQEHPVVLTK

SEQ ID NO: 54826 - protein, 10 aa, Homo Sapiens
SSDKGRLCYY

SEQ ID NO: 54827 - protein, 10 aa, Homo Sapiens
SSDKYGDTSY

SEQ ID NO: 54828 - protein, 10 aa, Homo Sapiens
SSDNATLTHY

SEQ ID NO: 54829 - protein, 10 aa, Homo Sapiens
SSDPASQLSY

SEQ ID NO: 54830 - protein, 10 aa, Homo Sapiens
SSDSVGGFRY

SEQ ID NO: 54831 - protein, 10 aa, Homo Sapiens
STDKAEYTFY

SEQ ID NO: 54832 - protein, 10 aa, Homo Sapiens
STDKFKTDFY

SEQ ID NO: 54833 - protein, 10 aa, Homo Sapiens
STDLQDYTYY

SEQ ID NO: 54834 - protein, 10 aa, Homo Sapiens
STDPREALQY

SEQ ID NO: 54835 - protein, 10 aa, Homo Sapiens
STDPSVLGKY

SEQ ID NO: 54836 - protein, 10 aa, Homo Sapiens
STDVKGCSMY

SEQ ID NO: 54837 - protein, 10 aa, Homo Sapiens
STESMDFLKY

SEQ ID NO: 54838 - protein, 10 aa, Homo Sapiens
STETHEELLY

SEQ ID NO: 54839 - protein, 10 aa, Homo Sapiens
STGDVNVEMN

SEQ ID NO: 54840 - protein, 10 aa, Homo Sapiens
SVDPHGFISY

SEQ ID NO: 54841 - protein, 10 aa, Homo Sapiens
SVDSNLLSDY

SEQ ID NO: 54842 - protein, 10 aa, Homo Sapiens
TDRSDARLQY

SEQ ID NO: 54843 - protein, 10 aa, Homo Sapiens
TEAELLQLEK

SEQ ID NO: 54844 - protein, 10 aa, Homo Sapiens
TISSNVASKA

SEQ ID NO: 54845 - protein, 10 aa, Homo Sapiens
TLDAGKFQIY

SEQ ID NO: 54846 - protein, 10 aa, Homo Sapiens
TLDPQTGLFY

SEQ ID NO: 54847 - protein, 10 aa, Homo Sapiens
TMDNPTTTQY

SEQ ID NO: 54848 - protein, 10 aa, Homo Sapiens
TSEPKPFLYY

SEQ ID NO: 54849 - protein, 10 aa, Homo Sapiens
TTDDWKDFLY

SEQ ID NO: 54850 - protein, 10 aa, Homo Sapiens
TTDRCLLNNY

SEQ ID NO: 54851 - protein, 10 aa, Homo Sapiens
TTDSSYGQNY

SEQ ID NO: 54852 - protein, 10 aa, Homo Sapiens
TTSHLMGMFY

SEQ ID NO: 54853 - protein, 10 aa, Homo Sapiens
TVDPASLWEY

SEQ ID NO: 54854 - protein, 10 aa, Homo Sapiens
VDLSCKIEQY

SEQ ID NO: 54855 - protein, 10 aa, Homo Sapiens
VIDEVRTGTY

SEQ ID NO: 54856 - protein, 10 aa, Homo Sapiens
VIDSAELQAY

SEQ ID NO: 54857 - protein, 10 aa, Homo Sapiens
VLDVETGNEY

SEQ ID NO: 54858 - protein, 10 aa, Homo Sapiens
VMEKSFLEYY

SEQ ID NO: 54859 - protein, 10 aa, Homo Sapiens
VMLGAETEEK

SEQ ID NO: 54860 - protein, 10 aa, Homo Sapiens
VNEAACDIAR

SEQ ID NO: 54861 - protein, 10 aa, Homo Sapiens
VSDNGPCLGY

SEQ ID NO: 54862 - protein, 10 aa, Homo Sapiens
VSDSKQFTYY

SEQ ID NO: 54863 - protein, 10 aa, Homo Sapiens
VSERDVYLTY

SEQ ID NO: 54864 - protein, 10 aa, Homo Sapiens
VSNPCRPLQY

SEQ ID NO: 54865 - protein, 10 aa, Homo Sapiens
VTDDLVCLVY

SEQ ID NO: 54866 - protein, 10 aa, Homo Sapiens
VTDDSPKYNY

SEQ ID NO: 54867 - protein, 10 aa, Homo Sapiens
VTDHLGVVYY

SEQ ID NO: 54868 - protein, 10 aa, Homo Sapiens
VTDKFTESVY

SEQ ID NO: 54869 - protein, 10 aa, Homo Sapiens
VTDKSMVDKY

SEQ ID NO: 54870 - protein, 10 aa, Homo Sapiens
VTDPEKLNNY

SEQ ID NO: 54871 - protein, 10 aa, Homo Sapiens
VTDPSTLEQY

SEQ ID NO: 54872 - protein, 10 aa, Homo Sapiens
VTDQNKIVTY

SEQ ID NO: 54873 - protein, 10 aa, Homo Sapiens
VTDTGALYLY

SEQ ID NO: 54874 - protein, 10 aa, Homo Sapiens
VTDTNVILSM

SEQ ID NO: 54875 - protein, 10 aa, Homo Sapiens
VTEDGNQHVY

SEQ ID NO: 54876 - protein, 10 aa, Homo Sapiens
VVAGYGDVGK

SEQ ID NO: 54877 - protein, 10 aa, Homo Sapiens
VVDEDHELIY

SEQ ID NO: 54878 - protein, 10 aa, Homo Sapiens
VVDVPFGGAK

SEQ ID NO: 54879 - protein, 10 aa, Homo Sapiens
VVEQLKDWLY

SEQ ID NO: 54880 - protein, 10 aa, Homo Sapiens
YADPYRQLQY

SEQ ID NO: 54881 - protein, 10 aa, Homo Sapiens
YGLAAAVFTK

SEQ ID NO: 54882 - protein, 11 aa, Homo Sapiens
AATGATPIAGR

SEQ ID NO: 54883 - protein, 11 aa, Homo Sapiens
AELHLVHWNPK

SEQ ID NO: 54884 - protein, 11 aa, Homo Sapiens
ALDRTSQNDAY

SEQ ID NO: 54885 - protein, 11 aa, Homo Sapiens
ALETLGFLNHY

SEQ ID NO: 54886 - protein, 11 aa, Homo Sapiens
ALNEANLSNLK

SEQ ID NO: 54887 - protein, 11 aa, Homo Sapiens
AMDCVRAEDAY

SEQ ID NO: 54888 - protein, 11 aa, Homo Sapiens
ASDASGFSPGY

SEQ ID NO: 54889 - protein, 11 aa, Homo Sapiens
ASDKETYELRY

SEQ ID NO: 54890 - protein, 11 aa, Homo Sapiens
ASDPYVKLSLY

SEQ ID NO: 54891 - protein, 11 aa, Homo Sapiens
ASDRNIVLYDM

SEQ ID NO: 54892 - protein, 11 aa, Homo Sapiens
ASETAGSGFLY

SEQ ID NO: 54893 - protein, 11 aa, Homo Sapiens
ASQQPGHQDFY

SEQ ID NO: 54894 - protein, 11 aa, Homo Sapiens
ASYPGASVDNY

SEQ ID NO: 54895 - protein, 11 aa, Homo Sapiens
ATDTASGTGLY

SEQ ID NO: 54896 - protein, 11 aa, Homo Sapiens
ATDVAKGMHYL

SEQ ID NO: 54897 - protein, 11 aa, Homo Sapiens
ATEESDLAQQY

SEQ ID NO: 54898 - protein, 11 aa, Homo Sapiens
ATEVDSRWQEY

SEQ ID NO: 54899 - protein, 11 aa, Homo Sapiens
ATTKVGPNATY

SEQ ID NO: 54900 - protein, 11 aa, Homo Sapiens
ATVFRTVLDYY

SEQ ID NO: 54901 - protein, 11 aa, Homo Sapiens
AVDVNNMLHLY

SEQ ID NO: 54902 - protein, 11 aa, Homo Sapiens
DGWLHTGDIGK

SEQ ID NO: 54903 - protein, 11 aa, Homo Sapiens
EIIGKRGIIGY

SEQ ID NO: 54904 - protein, 11 aa, Homo Sapiens
FTERSKLIDHY

SEQ ID NO: 54905 - protein, 11 aa, Homo Sapiens
FVAVTSTNAAK

SEQ ID NO: 54906 - protein, 11 aa, Homo Sapiens
GHQQLYWSHPR

SEQ ID NO: 54907 - protein, 11 aa, Homo Sapiens
GLDKAGSTALY

SEQ ID NO: 54908 - protein, 11 aa, Homo Sapiens
GLDSANEKGLY

SEQ ID NO: 54909 - protein, 11 aa, Homo Sapiens
GSDEQLGKLVY

SEQ ID NO: 54910 - protein, 11 aa, Homo Sapiens
GSDITSITERY

SEQ ID NO: 54911 - protein, 11 aa, Homo Sapiens
GSDRFGRDLNY

SEQ ID NO: 54912 - protein, 11 aa, Homo Sapiens
GSENNSLYLYY

SEQ ID NO: 54913 - protein, 11 aa, Homo Sapiens
GSLLLTAIDRY

SEQ ID NO: 54914 - protein, 11 aa, Homo Sapiens
GTDGQGGTFRY

SEQ ID NO: 54915 - protein, 11 aa, Homo Sapiens
GTDRTGFTFKY

SEQ ID NO: 54916 - protein, 11 aa, Homo Sapiens
GTEHPNTIQEY

SEQ ID NO: 54917 - protein, 11 aa, Homo Sapiens
HLDDQMTLLQY

SEQ ID NO: 54918 - protein, 11 aa, Homo Sapiens
HLDFNLDKTLY

SEQ ID NO: 54919 - protein, 11 aa, Homo Sapiens
HLDIEAFTMDR

SEQ ID NO: 54920 - protein, 11 aa, Homo Sapiens
HLDPNSGRCFY

SEQ ID NO: 54921 - protein, 11 aa, Homo Sapiens
HLQSGSESLLY

SEQ ID NO: 54922 - protein, 11 aa, Homo Sapiens
HSDELTSLLGY

SEQ ID NO: 54923 - protein, 11 aa, Homo Sapiens
HSDSCYKLGAY

SEQ ID NO: 54924 - protein, 11 aa, Homo Sapiens
HSDVAPTHILY

SEQ ID NO: 54925 - protein, 11 aa, Homo Sapiens
HSEDYSKVPKY

SEQ ID NO: 54926 - protein, 11 aa, Homo Sapiens
HTDFGNINGCY

SEQ ID NO: 54927 - protein, 11 aa, Homo Sapiens
HTDIDAAKVYM

SEQ ID NO: 54928 - protein, 11 aa, Homo Sapiens
HTDIQEYIGCY

SEQ ID NO: 54929 - protein, 11 aa, Homo Sapiens
HTDYYAKYDRY

SEQ ID NO: 54930 - protein, 11 aa, Homo Sapiens
HTGDGMGSLIY

SEQ ID NO: 54931 - protein, 11 aa, Homo Sapiens
HTMDIPGCLLY

SEQ ID NO: 54932 - protein, 11 aa, Homo Sapiens
IIDLAGDTVRY

SEQ ID NO: 54933 - protein, 11 aa, Homo Sapiens
ILDQKASGVKY

SEQ ID NO: 54934 - protein, 11 aa, Homo Sapiens
IMDSTEAQLRY

SEQ ID NO: 54935 - protein, 11 aa, Homo Sapiens
ISDAAQLPHDY

SEQ ID NO: 54936 - protein, 11 aa, Homo Sapiens
ISDHSSVKQEY

SEQ ID NO: 54937 - protein, 11 aa, Homo Sapiens
ISEKIKEPLYY

SEQ ID NO: 54938 - protein, 11 aa, Homo Sapiens
ISEQTGKELLY

SEQ ID NO: 54939 - protein, 11 aa, Homo Sapiens
ISERNQDATVY

SEQ ID NO: 54940 - protein, 11 aa, Homo Sapiens
ISESIKELQFY

SEQ ID NO: 54941 - protein, 11 aa, Homo Sapiens
ISESLLDKCLY

SEQ ID NO: 54942 - protein, 11 aa, Homo Sapiens
ISPRDFIDLVY

SEQ ID NO: 54943 - protein, 11 aa, Homo Sapiens
ISYGPDWKDFY

SEQ ID NO: 54944 - protein, 11 aa, Homo Sapiens
ITDEEATKSSY

SEQ ID NO: 54945 - protein, 11 aa, Homo Sapiens
ITDLPDHLLSY

SEQ ID NO: 54946 - protein, 11 aa, Homo Sapiens
ITDRGGGSQHY

SEQ ID NO: 54947 - protein, 11 aa, Homo Sapiens
ITDSAGHILYS

SEQ ID NO: 54948 - protein, 11 aa, Homo Sapiens
ITGKEDAANNY

SEQ ID NO: 54949 - protein, 11 aa, Homo Sapiens
ITQIEHEVSSS

SEQ ID NO: 54950 - protein, 11 aa, Homo Sapiens
ITSPTTLYDRY

SEQ ID NO: 54951 - protein, 11 aa, Homo Sapiens
IVDGDVVHGFY

SEQ ID NO: 54952 - protein, 11 aa, Homo Sapiens
KAEDSARTLLY

SEQ ID NO: 54953 - protein, 11 aa, Homo Sapiens
KIDDLFSGKLY

SEQ ID NO: 54954 - protein, 11 aa, Homo Sapiens
KIDRHMYHSLY

SEQ ID NO: 54955 - protein, 11 aa, Homo Sapiens
KIEEGHIGVYY

SEQ ID NO: 54956 - protein, 11 aa, Homo Sapiens
KIEFYQDPLLY

SEQ ID NO: 54957 - protein, 11 aa, Homo Sapiens
KIEPPDTGLYY

SEQ ID NO: 54958 - protein, 11 aa, Homo Sapiens
KIMDSGELDFY

SEQ ID NO: 54959 - protein, 11 aa, Homo Sapiens
KISEAGKDLLY

SEQ ID NO: 54960 - protein, 11 aa, Homo Sapiens
KLDEKEQALYY

SEQ ID NO: 54961 - protein, 11 aa, Homo Sapiens
KLDGKNVKAFY

SEQ ID NO: 54962 - protein, 11 aa, Homo Sapiens
KLDKLYEACRY

SEQ ID NO: 54963 - protein, 11 aa, Homo Sapiens
KLDSSAQFGYY

SEQ ID NO: 54964 - protein, 11 aa, Homo Sapiens
KLDVDAPRLLK

SEQ ID NO: 54965 - protein, 11 aa, Homo Sapiens
KLFDLIQSELY

SEQ ID NO: 54966 - protein, 11 aa, Homo Sapiens
KLPDKTLIDLY

SEQ ID NO: 54967 - protein, 11 aa, Homo Sapiens
KMDKTGASFKY

SEQ ID NO: 54968 - protein, 11 aa, Homo Sapiens
KMDPSCTIGFY

SEQ ID NO: 54969 - protein, 11 aa, Homo Sapiens
KMDPSCTVGFY

SEQ ID NO: 54970 - protein, 11 aa, Homo Sapiens
KMMDSGQIDFY

SEQ ID NO: 54971 - protein, 11 aa, Homo Sapiens
KSDALLSKDRY

SEQ ID NO: 54972 - protein, 11 aa, Homo Sapiens
KSDDNSYDEKY

SEQ ID NO: 54973 - protein, 11 aa, Homo Sapiens
KSDEGHPFRAY

SEQ ID NO: 54974 - protein, 11 aa, Homo Sapiens
KSDHSFFKISY

SEQ ID NO: 54975 - protein, 11 aa, Homo Sapiens
KSDLHEVKQEY

SEQ ID NO: 54976 - protein, 11 aa, Homo Sapiens
KSDNAVLNQRY

SEQ ID NO: 54977 - protein, 11 aa, Homo Sapiens
KSDVEAIFSKY

SEQ ID NO: 54978 - protein, 11 aa, Homo Sapiens
KSDVETIFSKY

SEQ ID NO: 54979 - protein, 11 aa, Homo Sapiens
KSEGYNDLSLY

SEQ ID NO: 54980 - protein, 11 aa, Homo Sapiens
KSEILDETDLY

SEQ ID NO: 54981 - protein, 11 aa, Homo Sapiens
KSELKDFFQSY

SEQ ID NO: 54982 - protein, 11 aa, Homo Sapiens
KSELRAAIDRY

SEQ ID NO: 54983 - protein, 11 aa, Homo Sapiens
KSELTNLAGLY

SEQ ID NO: 54984 - protein, 11 aa, Homo Sapiens
KSEMQRHYVMY

SEQ ID NO: 54985 - protein, 11 aa, Homo Sapiens
KSEPAVVSLEY

SEQ ID NO: 54986 - protein, 11 aa, Homo Sapiens
KSESSHKGFHY

SEQ ID NO: 54987 - protein, 11 aa, Homo Sapiens
KSETGALGENY

SEQ ID NO: 54988 - protein, 11 aa, Homo Sapiens
KSFEGNVFMYY

SEQ ID NO: 54989 - protein, 11 aa, Homo Sapiens
KSMGLDETQCY

SEQ ID NO: 54990 - protein, 11 aa, Homo Sapiens
KSQICDNAALY

SEQ ID NO: 54991 - protein, 11 aa, Homo Sapiens
KSSTIYGTESY

SEQ ID NO: 54992 - protein, 11 aa, Homo Sapiens
KSWKPNHKDYY

SEQ ID NO: 54993 - protein, 11 aa, Homo Sapiens
KTDDSLEKYLY

SEQ ID NO: 54994 - protein, 11 aa, Homo Sapiens
KTDIEGTLFVY

SEQ ID NO: 54995 - protein, 11 aa, Homo Sapiens
KTDMELEVLRY

SEQ ID NO: 54996 - protein, 11 aa, Homo Sapiens
KTDMVEKALLY

SEQ ID NO: 54997 - protein, 11 aa, Homo Sapiens
KTDNRVSGKYF

SEQ ID NO: 54998 - protein, 11 aa, Homo Sapiens
KTDPVRLTQLY

SEQ ID NO: 54999 - protein, 11 aa, Homo Sapiens
KTDRDDKYFSY

SEQ ID NO: 55000 - protein, 11 aa, Homo Sapiens
KTDRVARYFEY

SEQ ID NO: 55001 - protein, 11 aa, Homo Sapiens
KTDSDSDLQLY

SEQ ID NO: 55002 - protein, 11 aa, Homo Sapiens
KTDSEATNIYL

SEQ ID NO: 55003 - protein, 11 aa, Homo Sapiens
KTDSFVPRNSY

SEQ ID NO: 55004 - protein, 11 aa, Homo Sapiens
KTDSTGTHSLY

SEQ ID NO: 55005 - protein, 11 aa, Homo Sapiens
KTDVEGTLFVY

SEQ ID NO: 55006 - protein, 11 aa, Homo Sapiens
KTEAAKGTLTY

SEQ ID NO: 55007 - protein, 11 aa, Homo Sapiens
KTEDPDLPAFY

SEQ ID NO: 55008 - protein, 11 aa, Homo Sapiens
KTEESSELGNY

SEQ ID NO: 55009 - protein, 11 aa, Homo Sapiens
KTELERAFGYY

SEQ ID NO: 55010 - protein, 11 aa, Homo Sapiens
KTELGSFFTEY

SEQ ID NO: 55011 - protein, 11 aa, Homo Sapiens
KTEMAVPGTLY

SEQ ID NO: 55012 - protein, 11 aa, Homo Sapiens
KTENEKVLTGY

SEQ ID NO: 55013 - protein, 11 aa, Homo Sapiens
KTENTKFVLRY

SEQ ID NO: 55014 - protein, 11 aa, Homo Sapiens
KTETEPVFWYY

SEQ ID NO: 55015 - protein, 11 aa, Homo Sapiens
KTETPAQSFGY

SEQ ID NO: 55016 - protein, 11 aa, Homo Sapiens
KTEVPGSVTEY

SEQ ID NO: 55017 - protein, 11 aa, Homo Sapiens
KTLLRTWSELY

SEQ ID NO: 55018 - protein, 11 aa, Homo Sapiens
KTLPADVQNYY

SEQ ID NO: 55019 - protein, 11 aa, Homo Sapiens
KTQEPDNLLFY

SEQ ID NO: 55020 - protein, 11 aa, Homo Sapiens
KTSARDAALAY

SEQ ID NO: 55021 - protein, 11 aa, Homo Sapiens
KTSSWNLDCRY

SEQ ID NO: 55022 - protein, 11 aa, Homo Sapiens
KTTSAEIRSLY

SEQ ID NO: 55023 - protein, 11 aa, Homo Sapiens
KTWNIGKCELY

SEQ ID NO: 55024 - protein, 11 aa, Homo Sapiens
KVDDDFTAQDY

SEQ ID NO: 55025 - protein, 11 aa, Homo Sapiens
KVDDYEHAAKY

SEQ ID NO: 55026 - protein, 11 aa, Homo Sapiens
KVDGEIILHLY

SEQ ID NO: 55027 - protein, 11 aa, Homo Sapiens
KVDKATRDLLY

SEQ ID NO: 55028 - protein, 11 aa, Homo Sapiens
KVDSDDQWGEY

SEQ ID NO: 55029 - protein, 11 aa, Homo Sapiens
LEVDPNIQAVR

SEQ ID NO: 55030 - protein, 11 aa, Homo Sapiens
LIIFADCDLNK

SEQ ID NO: 55031 - protein, 11 aa, Homo Sapiens
LLDPKYGMFRY

SEQ ID NO: 55032 - protein, 11 aa, Homo Sapiens
LSDDHGASWRY

SEQ ID NO: 55033 - protein, 11 aa, Homo Sapiens
LSEPEEAAALY

SEQ ID NO: 55034 - protein, 11 aa, Homo Sapiens
LSEVNRTGTQY

SEQ ID NO: 55035 - protein, 11 aa, Homo Sapiens
LTDDHVQFLIY

SEQ ID NO: 55036 - protein, 11 aa, Homo Sapiens
LTDHTVTFLQY

SEQ ID NO: 55037 - protein, 11 aa, Homo Sapiens
LTDIHGNVLQY

SEQ ID NO: 55038 - protein, 11 aa, Homo Sapiens
LTDKDTGVTRY

SEQ ID NO: 55039 - protein, 11 aa, Homo Sapiens
LTDLVDDNYFY

SEQ ID NO: 55040 - protein, 11 aa, Homo Sapiens
LTDNLKVGSFY

SEQ ID NO: 55041 - protein, 11 aa, Homo Sapiens
LTGLTVAEYFR

SEQ ID NO: 55042 - protein, 11 aa, Homo Sapiens
LTSQGAGTYWY

SEQ ID NO: 55043 - protein, 11 aa, Homo Sapiens
MEAEATALLSD

SEQ ID NO: 55044 - protein, 11 aa, Homo Sapiens
MSDSDKVGVFY

SEQ ID NO: 55045 - protein, 11 aa, Homo Sapiens
MTDRVGKAFKY

SEQ ID NO: 55046 - protein, 11 aa, Homo Sapiens
NSGKEEGFELY

SEQ ID NO: 55047 - protein, 11 aa, Homo Sapiens
PMFIVNTNVPR

SEQ ID NO: 55048 - protein, 11 aa, Homo Sapiens
QLDVAGRVMQY

SEQ ID NO: 55049 - protein, 11 aa, Homo Sapiens
QLEDGRTLSDY

SEQ ID NO: 55050 - protein, 11 aa, Homo Sapiens
QTDIQGALSAY

SEQ ID NO: 55051 - protein, 11 aa, Homo Sapiens
QTETGTPYMLY

SEQ ID NO: 55052 - protein, 11 aa, Homo Sapiens
RADITDVMDAY

SEQ ID NO: 55053 - protein, 11 aa, Homo Sapiens
RADKSAVGFDY

SEQ ID NO: 55054 - protein, 11 aa, Homo Sapiens
RADPEAGLLLY

SEQ ID NO: 55055 - protein, 11 aa, Homo Sapiens
RAEGYPVDLYY

SEQ ID NO: 55056 - protein, 11 aa, Homo Sapiens
RAFDQGADAIY

SEQ ID NO: 55057 - protein, 11 aa, Homo Sapiens
RASAALLDKLY

SEQ ID NO: 55058 - protein, 11 aa, Homo Sapiens
RASLSDRTNLY

SEQ ID NO: 55059 - protein, 11 aa, Homo Sapiens
RIDDNGWGCAY

SEQ ID NO: 55060 - protein, 11 aa, Homo Sapiens
RIDPFVRTFLK

SEQ ID NO: 55061 - protein, 11 aa, Homo Sapiens
RIDTRNELESY

SEQ ID NO: 55062 - protein, 11 aa, Homo Sapiens
RIEEGTYGVVY

SEQ ID NO: 55063 - protein, 11 aa, Homo Sapiens
RIEPPDRRWQY

SEQ ID NO: 55064 - protein, 11 aa, Homo Sapiens
RLAQEGIYTLY

SEQ ID NO: 55065 - protein, 11 aa, Homo Sapiens
RLDHKFDLMYA

SEQ ID NO: 55066 - protein, 11 aa, Homo Sapiens
RLDLEDVKNMY

SEQ ID NO: 55067 - protein, 11 aa, Homo Sapiens
RLEDPDGKVLY

SEQ ID NO: 55068 - protein, 11 aa, Homo Sapiens
RLEPNAQAQMY

SEQ ID NO: 55069 - protein, 11 aa, Homo Sapiens
RLEPNLQAQMY

SEQ ID NO: 55070 - protein, 11 aa, Homo Sapiens
RLETELDGLRY

SEQ ID NO: 55071 - protein, 11 aa, Homo Sapiens
RLIAQRYLLQY

SEQ ID NO: 55072 - protein, 11 aa, Homo Sapiens
RLYEHIKNDKY

SEQ ID NO: 55073 - protein, 11 aa, Homo Sapiens
RMDKSAVGHEY

SEQ ID NO: 55074 - protein, 11 aa, Homo Sapiens
RMDPLTKPMQY

SEQ ID NO: 55075 - protein, 11 aa, Homo Sapiens
RMDSTNADALY

SEQ ID NO: 55076 - protein, 11 aa, Homo Sapiens
RMDTLAHVLYY

SEQ ID NO: 55077 - protein, 11 aa, Homo Sapiens
RMDYYNALNLY

SEQ ID NO: 55078 - protein, 11 aa, Homo Sapiens
RQDLPSPSDFY

SEQ ID NO: 55079 - protein, 11 aa, Homo Sapiens
RSADEGQTVFY

SEQ ID NO: 55080 - protein, 11 aa, Homo Sapiens
RSDDGQIFAKY

SEQ ID NO: 55081 - protein, 11 aa, Homo Sapiens
RSDGKSVDLKY

SEQ ID NO: 55082 - protein, 11 aa, Homo Sapiens
RSDIEDEQLAY

SEQ ID NO: 55083 - protein, 11 aa, Homo Sapiens
RSDPGGGGLAY

SEQ ID NO: 55084 - protein, 11 aa, Homo Sapiens
RSDPGTSGEAY

SEQ ID NO: 55085 - protein, 11 aa, Homo Sapiens
RSDPNSESLYF

SEQ ID NO: 55086 - protein, 11 aa, Homo Sapiens
RSDSLYPAPGY

SEQ ID NO: 55087 - protein, 11 aa, Homo Sapiens
RSDSTGSSSVY

SEQ ID NO: 55088 - protein, 11 aa, Homo Sapiens
RSDSYVELSQY

SEQ ID NO: 55089 - protein, 11 aa, Homo Sapiens
RSDTEQEGKYY

SEQ ID NO: 55090 - protein, 11 aa, Homo Sapiens
RSEDFDIYTLY

SEQ ID NO: 55091 - protein, 11 aa, Homo Sapiens
RSEDSPDILTY

SEQ ID NO: 55092 - protein, 11 aa, Homo Sapiens
RSEGTPEKPLY

SEQ ID NO: 55093 - protein, 11 aa, Homo Sapiens
RSESYIGGNCY

SEQ ID NO: 55094 - protein, 11 aa, Homo Sapiens
RSETPSRYYCY

SEQ ID NO: 55095 - protein, 11 aa, Homo Sapiens
RSEWTDELNTY

SEQ ID NO: 55096 - protein, 11 aa, Homo Sapiens
RSGGHLMNLKY

SEQ ID NO: 55097 - protein, 11 aa, Homo Sapiens
RSMDSYLNQSY

SEQ ID NO: 55098 - protein, 11 aa, Homo Sapiens
RTAADNFSTQY

SEQ ID NO: 55099 - protein, 11 aa, Homo Sapiens
RTAPRFGLYRY

SEQ ID NO: 55100 - protein, 11 aa, Homo Sapiens
RTDDYLDQPCY

SEQ ID NO: 55101 - protein, 11 aa, Homo Sapiens
RTDFQKDFAKY

SEQ ID NO: 55102 - protein, 11 aa, Homo Sapiens
RTDILCNLPSY

SEQ ID NO: 55103 - protein, 11 aa, Homo Sapiens
RTDKAEVVNGY

SEQ ID NO: 55104 - protein, 11 aa, Homo Sapiens
RTDRLEVCREY

SEQ ID NO: 55105 - protein, 11 aa, Homo Sapiens
RTDSREAFEAY

SEQ ID NO: 55106 - protein, 11 aa, Homo Sapiens
RTDYSFHKFHY

SEQ ID NO: 55107 - protein, 11 aa, Homo Sapiens
RTECGLYYSYY

SEQ ID NO: 55108 - protein, 11 aa, Homo Sapiens
RTEEVKHVDFY

SEQ ID NO: 55109 - protein, 11 aa, Homo Sapiens
RTEIIEDLAFY

SEQ ID NO: 55110 - protein, 11 aa, Homo Sapiens
RTELAIKLLEY

SEQ ID NO: 55111 - protein, 11 aa, Homo Sapiens
RTELFDLKTKY

SEQ ID NO: 55112 - protein, 11 aa, Homo Sapiens
RTEPGWSFCEY

SEQ ID NO: 55113 - protein, 11 aa, Homo Sapiens
RTEPINTTYSY

SEQ ID NO: 55114 - protein, 11 aa, Homo Sapiens
RTERQQRDLAY

SEQ ID NO: 55115 - protein, 11 aa, Homo Sapiens
RTESELNSYNY

SEQ ID NO: 55116 - protein, 11 aa, Homo Sapiens
RTETNGGQVTY

SEQ ID NO: 55117 - protein, 11 aa, Homo Sapiens
RTFGCDDELMY

SEQ ID NO: 55118 - protein, 11 aa, Homo Sapiens
RTSVDFKDTDY

SEQ ID NO: 55119 - protein, 11 aa, Homo Sapiens
RVDDIFSDLYY

SEQ ID NO: 55120 - protein, 11 aa, Homo Sapiens
RVDGNDVFAVY

SEQ ID NO: 55121 - protein, 11 aa, Homo Sapiens
RVDGSKPIWKY

SEQ ID NO: 55122 - protein, 11 aa, Homo Sapiens
RVDKSAVGFDY

SEQ ID NO: 55123 - protein, 11 aa, Homo Sapiens
RVDPAKGLFYF

SEQ ID NO: 55124 - protein, 11 aa, Homo Sapiens
RVDQSAVGFEY

SEQ ID NO: 55125 - protein, 11 aa, Homo Sapiens
RVESSEFGTYY

SEQ ID NO: 55126 - protein, 11 aa, Homo Sapiens
RVETEYSFLDY

SEQ ID NO: 55127 - protein, 11 aa, Homo Sapiens
RVETQNHWFTY

SEQ ID NO: 55128 - protein, 11 aa, Homo Sapiens
SAEKTDSSYFY

SEQ ID NO: 55129 - protein, 11 aa, Homo Sapiens
SAELNKEVSTN

SEQ ID NO: 55130 - protein, 11 aa, Homo Sapiens
SLDGDLAGRYY

SEQ ID NO: 55131 - protein, 11 aa, Homo Sapiens
SSDGAISLLTY

SEQ ID NO: 55132 - protein, 11 aa, Homo Sapiens
SSDPEEESVLY

SEQ ID NO: 55133 - protein, 11 aa, Homo Sapiens
SSDTADFRDLY

SEQ ID NO: 55134 - protein, 11 aa, Homo Sapiens
SSKASNSKQDY

SEQ ID NO: 55135 - protein, 11 aa, Homo Sapiens
STDVSDLLHQY

SEQ ID NO: 55136 - protein, 11 aa, Homo Sapiens
STDVSQPPHVY

SEQ ID NO: 55137 - protein, 11 aa, Homo Sapiens
SWGSGLDMHTK

SEQ ID NO: 55138 - protein, 11 aa, Homo Sapiens
TIDKATGILLY

SEQ ID NO: 55139 - protein, 11 aa, Homo Sapiens
TSDNGKDGLAY

SEQ ID NO: 55140 - protein, 11 aa, Homo Sapiens
TSETPDYLLKY

SEQ ID NO: 55141 - protein, 11 aa, Homo Sapiens
TSSEITTKDLK

SEQ ID NO: 55142 - protein, 11 aa, Homo Sapiens
TTDLFGRDLSY

SEQ ID NO: 55143 - protein, 11 aa, Homo Sapiens
TVERIHVGKKY

SEQ ID NO: 55144 - protein, 11 aa, Homo Sapiens
VADRLGSLMQY

SEQ ID NO: 55145 - protein, 11 aa, Homo Sapiens
VIDPESGNTLY

SEQ ID NO: 55146 - protein, 11 aa, Homo Sapiens
VLDLSENQLQK

SEQ ID NO: 55147 - protein, 11 aa, Homo Sapiens
VSDRDRNLMVY

SEQ ID NO: 55148 - protein, 11 aa, Homo Sapiens
VSEGTKAVTKY

SEQ ID NO: 55149 - protein, 11 aa, Homo Sapiens
VSSSDDKDAFY

SEQ ID NO: 55150 - protein, 11 aa, Homo Sapiens
VSSSDVGHDEY

SEQ ID NO: 55151 - protein, 11 aa, Homo Sapiens
VTAQVVGTERY

SEQ ID NO: 55152 - protein, 11 aa, Homo Sapiens
VTDGAILGKLY

SEQ ID NO: 55153 - protein, 11 aa, Homo Sapiens
VTDRKCSELLY

SEQ ID NO: 55154 - protein, 11 aa, Homo Sapiens
VTDRSDARLQY

SEQ ID NO: 55155 - protein, 11 aa, Homo Sapiens
VTDSGPTFNYL

SEQ ID NO: 55156 - protein, 11 aa, Homo Sapiens
VTECEKYAQLY

SEQ ID NO: 55157 - protein, 11 aa, Homo Sapiens
VTEFEDIKSGY

SEQ ID NO: 55158 - protein, 11 aa, Homo Sapiens
VTEITDDLHFY

SEQ ID NO: 55159 - protein, 11 aa, Homo Sapiens
VTEKIPVRHLY

SEQ ID NO: 55160 - protein, 11 aa, Homo Sapiens
VTESPAKFALY

SEQ ID NO: 55161 - protein, 11 aa, Homo Sapiens
VVDIQGVGDLY

SEQ ID NO: 55162 - protein, 11 aa, Homo Sapiens
VVDPFSKKDWY

SEQ ID NO: 55163 - protein, 11 aa, Homo Sapiens
YLLGTSLARPC

SEQ ID NO: 55164 - protein, 11 aa, Homo Sapiens
YSGLLLPDAQY

SEQ ID NO: 55165 - protein, 11 aa, Homo Sapiens
YTDHQNSSSYY

SEQ ID NO: 55166 - protein, 8 aa, Homo Sapiens
AAFVQTHR

SEQ ID NO: 55167 - protein, 8 aa, Homo Sapiens
AAKDLVTR

SEQ ID NO: 55168 - protein, 8 aa, Homo Sapiens
AFNSGKVD

SEQ ID NO: 55169 - protein, 8 aa, Homo Sapiens
AIKGMHIR

SEQ ID NO: 55170 - protein, 8 aa, Homo Sapiens
DAKRLIGR

SEQ ID NO: 55171 - protein, 8 aa, Homo Sapiens
DLKNELQR

SEQ ID NO: 55172 - protein, 8 aa, Homo Sapiens
DSYSGLGR

SEQ ID NO: 55173 - protein, 8 aa, Homo Sapiens
DTVATLPR

SEQ ID NO: 55174 - protein, 8 aa, Homo Sapiens
DVRIGMTR

SEQ ID NO: 55175 - protein, 8 aa, Homo Sapiens
DVYLGRYR

SEQ ID NO: 55176 - protein, 8 aa, Homo Sapiens
EAFVGAER

SEQ ID NO: 55177 - protein, 8 aa, Homo Sapiens
ELFLAGRR

SEQ ID NO: 55178 - protein, 8 aa, Homo Sapiens
EPGVHLGR

SEQ ID NO: 55179 - protein, 8 aa, Homo Sapiens
ETFVSLHR

SEQ ID NO: 55180 - protein, 8 aa, Homo Sapiens
ETVVGLAR

SEQ ID NO: 55181 - protein, 8 aa, Homo Sapiens
EVFPGRNR

SEQ ID NO: 55182 - protein, 8 aa, Homo Sapiens
FEVDTVAP

SEQ ID NO: 55183 - protein, 8 aa, Homo Sapiens
FNEKSKEL

SEQ ID NO: 55184 - protein, 8 aa, Homo Sapiens
FTYVGGPR

SEQ ID NO: 55185 - protein, 8 aa, Homo Sapiens
GPREAGLR

SEQ ID NO: 55186 - protein, 8 aa, Homo Sapiens
IEEHLANR

SEQ ID NO: 55187 - protein, 8 aa, Homo Sapiens
IEKPPAER

SEQ ID NO: 55188 - protein, 8 aa, Homo Sapiens
LNNMRSQY

SEQ ID NO: 55189 - protein, 8 aa, Homo Sapiens
MDSSLTRR

SEQ ID NO: 55190 - protein, 8 aa, Homo Sapiens
MSLTACKV

SEQ ID NO: 55191 - protein, 8 aa, Homo Sapiens
PAISPSKR

SEQ ID NO: 55192 - protein, 8 aa, Homo Sapiens
PDAVGKCR

SEQ ID NO: 55193 - protein, 8 aa, Homo Sapiens
PGPRPLAR

SEQ ID NO: 55194 - protein, 8 aa, Homo Sapiens
PINGNGKQ

SEQ ID NO: 55195 - protein, 8 aa, Homo Sapiens
PIVTPALR

SEQ ID NO: 55196 - protein, 8 aa, Homo Sapiens
PLFIGKVR

SEQ ID NO: 55197 - protein, 8 aa, Homo Sapiens
PQVGNGFR

SEQ ID NO: 55198 - protein, 8 aa, Homo Sapiens
PRRASVTR

SEQ ID NO: 55199 - protein, 8 aa, Homo Sapiens
QEKAIEAS

SEQ ID NO: 55200 - protein, 8 aa, Homo Sapiens
SAQTLTGR

SEQ ID NO: 55201 - protein, 8 aa, Homo Sapiens
SFSKAFGQ

SEQ ID NO: 55202 - protein, 8 aa, Homo Sapiens
SPLTAEKL

SEQ ID NO: 55203 - protein, 8 aa, Homo Sapiens
STFNGFQR

SEQ ID NO: 55204 - protein, 8 aa, Homo Sapiens
SVLGPNAR

SEQ ID NO: 55205 - protein, 8 aa, Homo Sapiens
TFSGVYKK

SEQ ID NO: 55206 - protein, 8 aa, Homo Sapiens
TLNQGEFK

SEQ ID NO: 55207 - protein, 8 aa, Homo Sapiens
TSLYRQPR

SEQ ID NO: 55208 - protein, 8 aa, Homo Sapiens
TVTGKLER

SEQ ID NO: 55209 - protein, 8 aa, Homo Sapiens
VAAVAARR

SEQ ID NO: 55210 - protein, 8 aa, Homo Sapiens
VATLPRGR

SEQ ID NO: 55211 - protein, 8 aa, Homo Sapiens
VFSHILKR

SEQ ID NO: 55212 - protein, 8 aa, Homo Sapiens
VHAVVTVR

SEQ ID NO: 55213 - protein, 8 aa, Homo Sapiens
VKGPGLQR

SEQ ID NO: 55214 - protein, 8 aa, Homo Sapiens
VLPKPRMR

SEQ ID NO: 55215 - protein, 8 aa, Homo Sapiens
VSHPIIYR

SEQ ID NO: 55216 - protein, 8 aa, Homo Sapiens
VTAPPARN

SEQ ID NO: 55217 - protein, 8 aa, Homo Sapiens
VVVSGKLR

SEQ ID NO: 55218 - protein, 9 aa, Homo Sapiens
AAAAPSLAR

SEQ ID NO: 55219 - protein, 9 aa, Homo Sapiens
AAADVGLTR

SEQ ID NO: 55220 - protein, 9 aa, Homo Sapiens
AAAGAFAGR

SEQ ID NO: 55221 - protein, 9 aa, Homo Sapiens
AAAGLAGPR

SEQ ID NO: 55222 - protein, 9 aa, Homo Sapiens
AAANPTLAF

SEQ ID NO: 55223 - protein, 9 aa, Homo Sapiens
AAAVPTTPR

SEQ ID NO: 55224 - protein, 9 aa, Homo Sapiens
AAIGPTTAR

SEQ ID NO: 55225 - protein, 9 aa, Homo Sapiens
AALTRPEEL

SEQ ID NO: 55226 - protein, 9 aa, Homo Sapiens
ACIGGTNVR

SEQ ID NO: 55227 - protein, 9 aa, Homo Sapiens
AEVLGLILR

SEQ ID NO: 55228 - protein, 9 aa, Homo Sapiens
AIIGPRSTR

SEQ ID NO: 55229 - protein, 9 aa, Homo Sapiens
ALYEYARRR

SEQ ID NO: 55230 - protein, 9 aa, Homo Sapiens
APAAPAAPR

SEQ ID NO: 55231 - protein, 9 aa, Homo Sapiens
ATAELIMSR

SEQ ID NO: 55232 - protein, 9 aa, Homo Sapiens
ATAEVGYNR

SEQ ID NO: 55233 - protein, 9 aa, Homo Sapiens
ATAGFTIGR

SEQ ID NO: 55234 - protein, 9 aa, Homo Sapiens
ATIDSLASR

SEQ ID NO: 55235 - protein, 9 aa, Homo Sapiens
ATIQGAYAR

SEQ ID NO: 55236 - protein, 9 aa, Homo Sapiens
ATIVPRTER

SEQ ID NO: 55237 - protein, 9 aa, Homo Sapiens
ATSGVVAVR

SEQ ID NO: 55238 - protein, 9 aa, Homo Sapiens
ATSPGRLFR

SEQ ID NO: 55239 - protein, 9 aa, Homo Sapiens
ATSPVVYTR

SEQ ID NO: 55240 - protein, 9 aa, Homo Sapiens
ATTPIFANR

SEQ ID NO: 55241 - protein, 9 aa, Homo Sapiens
AVAAVAARR

SEQ ID NO: 55242 - protein, 9 aa, Homo Sapiens
AVAGRWGCR

SEQ ID NO: 55243 - protein, 9 aa, Homo Sapiens
AVAPPAGPR

SEQ ID NO: 55244 - protein, 9 aa, Homo Sapiens
AVIDAGVCR

SEQ ID NO: 55245 - protein, 9 aa, Homo Sapiens
AVIDVGINR

SEQ ID NO: 55246 - protein, 9 aa, Homo Sapiens
AVIFINTRR

SEQ ID NO: 55247 - protein, 9 aa, Homo Sapiens
AVIGIATKR

SEQ ID NO: 55248 - protein, 9 aa, Homo Sapiens
AVIGYLSTR

SEQ ID NO: 55249 - protein, 9 aa, Homo Sapiens
AVISGVGTR

SEQ ID NO: 55250 - protein, 9 aa, Homo Sapiens
AVISQCIYR

SEQ ID NO: 55251 - protein, 9 aa, Homo Sapiens
AVKPGVRYR

SEQ ID NO: 55252 - protein, 9 aa, Homo Sapiens
AVPGTSSPR

SEQ ID NO: 55253 - protein, 9 aa, Homo Sapiens
AVRPGDRVL

SEQ ID NO: 55254 - protein, 9 aa, Homo Sapiens
AVTAFVTFR

SEQ ID NO: 55255 - protein, 9 aa, Homo Sapiens
AVTPPGLAR

SEQ ID NO: 55256 - protein, 9 aa, Homo Sapiens
AVVAGGLGR

SEQ ID NO: 55257 - protein, 9 aa, Homo Sapiens
AVVPNTSSR

SEQ ID NO: 55258 - protein, 9 aa, Homo Sapiens
AVYDFFIGR

SEQ ID NO: 55259 - protein, 9 aa, Homo Sapiens
CAISYTSYR

SEQ ID NO: 55260 - protein, 9 aa, Homo Sapiens
CPAPPGYLR

SEQ ID NO: 55261 - protein, 9 aa, Homo Sapiens
CTFGFSARR

SEQ ID NO: 55262 - protein, 9 aa, Homo Sapiens
CTTSAIQNR

SEQ ID NO: 55263 - protein, 9 aa, Homo Sapiens
CVNKSTHEF

SEQ ID NO: 55264 - protein, 9 aa, Homo Sapiens
CVSPTVNQR

SEQ ID NO: 55265 - protein, 9 aa, Homo Sapiens
DAAALVAGR

SEQ ID NO: 55266 - protein, 9 aa, Homo Sapiens
DAACRVIAR

SEQ ID NO: 55267 - protein, 9 aa, Homo Sapiens
DAAGVFCIR

SEQ ID NO: 55268 - protein, 9 aa, Homo Sapiens
DAAIVGAVR

SEQ ID NO: 55269 - protein, 9 aa, Homo Sapiens
DAAKDSILR

SEQ ID NO: 55270 - protein, 9 aa, Homo Sapiens
DAASPTLLL

SEQ ID NO: 55271 - protein, 9 aa, Homo Sapiens
DAGPPTHAF

SEQ ID NO: 55272 - protein, 9 aa, Homo Sapiens
DAIAVHVVR

SEQ ID NO: 55273 - protein, 9 aa, Homo Sapiens
DAIEKAVSR

SEQ ID NO: 55274 - protein, 9 aa, Homo Sapiens
DAIEQTFQR

SEQ ID NO: 55275 - protein, 9 aa, Homo Sapiens
DAILASSAR

SEQ ID NO: 55276 - protein, 9 aa, Homo Sapiens
DAIRGGLPK

SEQ ID NO: 55277 - protein, 9 aa, Homo Sapiens
DAISYRFPR

SEQ ID NO: 55278 - protein, 9 aa, Homo Sapiens
DAKGGSFYR

SEQ ID NO: 55279 - protein, 9 aa, Homo Sapiens
DALGGLLNR

SEQ ID NO: 55280 - protein, 9 aa, Homo Sapiens
DAQKPSLTR

SEQ ID NO: 55281 - protein, 9 aa, Homo Sapiens
DARGTVVLR

SEQ ID NO: 55282 - protein, 9 aa, Homo Sapiens
DATPLHVAR

SEQ ID NO: 55283 - protein, 9 aa, Homo Sapiens
DAVDVFETR

SEQ ID NO: 55284 - protein, 9 aa, Homo Sapiens
DAVEDRLDR

SEQ ID NO: 55285 - protein, 9 aa, Homo Sapiens
DAVNLAFGR

SEQ ID NO: 55286 - protein, 9 aa, Homo Sapiens
DAWPGQRER

SEQ ID NO: 55287 - protein, 9 aa, Homo Sapiens
DFGKVTMQF

SEQ ID NO: 55288 - protein, 9 aa, Homo Sapiens
DIFKKSKPR

SEQ ID NO: 55289 - protein, 9 aa, Homo Sapiens
DIFNQVVPR

SEQ ID NO: 55290 - protein, 9 aa, Homo Sapiens
DIFPKVTCR

SEQ ID NO: 55291 - protein, 9 aa, Homo Sapiens
DIIAKVTRR

SEQ ID NO: 55292 - protein, 9 aa, Homo Sapiens
DIIATPGPR

SEQ ID NO: 55293 - protein, 9 aa, Homo Sapiens
DIIEKVMAR

SEQ ID NO: 55294 - protein, 9 aa, Homo Sapiens
DIIPNPQER

SEQ ID NO: 55295 - protein, 9 aa, Homo Sapiens
DIIQPSSTR

SEQ ID NO: 55296 - protein, 9 aa, Homo Sapiens
DIMAAVSGR

SEQ ID NO: 55297 - protein, 9 aa, Homo Sapiens
DIMDSSLTR

SEQ ID NO: 55298 - protein, 9 aa, Homo Sapiens
DIMPSGRSR

SEQ ID NO: 55299 - protein, 9 aa, Homo Sapiens
DIPDALSER

SEQ ID NO: 55300 - protein, 9 aa, Homo Sapiens
DIQDPGVPR

SEQ ID NO: 55301 - protein, 9 aa, Homo Sapiens
DIQIVSTTR

SEQ ID NO: 55302 - protein, 9 aa, Homo Sapiens
DIQPPITPR

SEQ ID NO: 55303 - protein, 9 aa, Homo Sapiens
DISILTTGM

SEQ ID NO: 55304 - protein, 9 aa, Homo Sapiens
DISTAMSER

SEQ ID NO: 55305 - protein, 9 aa, Homo Sapiens
DITEPSIGR

SEQ ID NO: 55306 - protein, 9 aa, Homo Sapiens
DITTPKAAR

SEQ ID NO: 55307 - protein, 9 aa, Homo Sapiens
DIVKPGMRR

SEQ ID NO: 55308 - protein, 9 aa, Homo Sapiens
DIVTVGECR

SEQ ID NO: 55309 - protein, 9 aa, Homo Sapiens
DIYDHCQSR

SEQ ID NO: 55310 - protein, 9 aa, Homo Sapiens
DIYFNPKTR

SEQ ID NO: 55311 - protein, 9 aa, Homo Sapiens
DLIAIVSNR

SEQ ID NO: 55312 - protein, 9 aa, Homo Sapiens
DLIFKTGGR

SEQ ID NO: 55313 - protein, 9 aa, Homo Sapiens
DLIGCIIGR

SEQ ID NO: 55314 - protein, 9 aa, Homo Sapiens
DLIPPPVCR

SEQ ID NO: 55315 - protein, 9 aa, Homo Sapiens
DMFATPQYR

SEQ ID NO: 55316 - protein, 9 aa, Homo Sapiens
DPFHKAIRR

SEQ ID NO: 55317 - protein, 9 aa, Homo Sapiens
DPNKPSGFR

SEQ ID NO: 55318 - protein, 9 aa, Homo Sapiens
DSALHTSVM

SEQ ID NO: 55319 - protein, 9 aa, Homo Sapiens
DSANDGFVR

SEQ ID NO: 55320 - protein, 9 aa, Homo Sapiens
DSAPVETPR

SEQ ID NO: 55321 - protein, 9 aa, Homo Sapiens
DSAQQGLYR

SEQ ID NO: 55322 - protein, 9 aa, Homo Sapiens
DSCPNPIQR

SEQ ID NO: 55323 - protein, 9 aa, Homo Sapiens
DSFNVVSTR

SEQ ID NO: 55324 - protein, 9 aa, Homo Sapiens
DSFQKVILR

SEQ ID NO: 55325 - protein, 9 aa, Homo Sapiens
DSFSAGEPR

SEQ ID NO: 55326 - protein, 9 aa, Homo Sapiens
DSFSGSISR

SEQ ID NO: 55327 - protein, 9 aa, Homo Sapiens
DSFTGPRRR

SEQ ID NO: 55328 - protein, 9 aa, Homo Sapiens
DSIDPALRR

SEQ ID NO: 55329 - protein, 9 aa, Homo Sapiens
DSIEDRYPR

SEQ ID NO: 55330 - protein, 9 aa, Homo Sapiens
DSIPPGQYM

SEQ ID NO: 55331 - protein, 9 aa, Homo Sapiens
DSITVGMVR

SEQ ID NO: 55332 - protein, 9 aa, Homo Sapiens
DSMPEPASR

SEQ ID NO: 55333 - protein, 9 aa, Homo Sapiens
DSQICTVGR

SEQ ID NO: 55334 - protein, 9 aa, Homo Sapiens
DSRGKSSFF

SEQ ID NO: 55335 - protein, 9 aa, Homo Sapiens
DSSGLTVHR

SEQ ID NO: 55336 - protein, 9 aa, Homo Sapiens
DSSLGGLSR

SEQ ID NO: 55337 - protein, 9 aa, Homo Sapiens
DSSPPMTVR

SEQ ID NO: 55338 - protein, 9 aa, Homo Sapiens
DSSPVSTPF

SEQ ID NO: 55339 - protein, 9 aa, Homo Sapiens
DSSQLIHCR

SEQ ID NO: 55340 - protein, 9 aa, Homo Sapiens
DSSQPMLLR

SEQ ID NO: 55341 - protein, 9 aa, Homo Sapiens
DSSTVGLQR

SEQ ID NO: 55342 - protein, 9 aa, Homo Sapiens
DSVLTTHER

SEQ ID NO: 55343 - protein, 9 aa, Homo Sapiens
DSVNIGRKR

SEQ ID NO: 55344 - protein, 9 aa, Homo Sapiens
DSYFGGRLR

SEQ ID NO: 55345 - protein, 9 aa, Homo Sapiens
DTAAQITQR

SEQ ID NO: 55346 - protein, 9 aa, Homo Sapiens
DTAFETSKF

SEQ ID NO: 55347 - protein, 9 aa, Homo Sapiens
DTAGNDAFR

SEQ ID NO: 55348 - protein, 9 aa, Homo Sapiens
DTAHTFSLR

SEQ ID NO: 55349 - protein, 9 aa, Homo Sapiens
DTAIGMMTR

SEQ ID NO: 55350 - protein, 9 aa, Homo Sapiens
DTALDMRGR

SEQ ID NO: 55351 - protein, 9 aa, Homo Sapiens
DTAPPSSAL

SEQ ID NO: 55352 - protein, 9 aa, Homo Sapiens
DTAQRALYR

SEQ ID NO: 55353 - protein, 9 aa, Homo Sapiens
DTAQRNLYR

SEQ ID NO: 55354 - protein, 9 aa, Homo Sapiens
DTAWVEATR

SEQ ID NO: 55355 - protein, 9 aa, Homo Sapiens
DTCTHAYWR

SEQ ID NO: 55356 - protein, 9 aa, Homo Sapiens
DTFASGGER

SEQ ID NO: 55357 - protein, 9 aa, Homo Sapiens
DTFDVFRQR

SEQ ID NO: 55358 - protein, 9 aa, Homo Sapiens
DTHEQAILR

SEQ ID NO: 55359 - protein, 9 aa, Homo Sapiens
DTHGSFVVR

SEQ ID NO: 55360 - protein, 9 aa, Homo Sapiens
DTHIPGSPF

SEQ ID NO: 55361 - protein, 9 aa, Homo Sapiens
DTHKQLLER

SEQ ID NO: 55362 - protein, 9 aa, Homo Sapiens
DTHTNTYYL

SEQ ID NO: 55363 - protein, 9 aa, Homo Sapiens
DTIDSLRSR

SEQ ID NO: 55364 - protein, 9 aa, Homo Sapiens
DTIEIITDR

SEQ ID NO: 55365 - protein, 9 aa, Homo Sapiens
DTIENVKAK

SEQ ID NO: 55366 - protein, 9 aa, Homo Sapiens
DTIGYLLTR

SEQ ID NO: 55367 - protein, 9 aa, Homo Sapiens
DTISDWNLR

SEQ ID NO: 55368 - protein, 9 aa, Homo Sapiens
DTISKIRLR

SEQ ID NO: 55369 - protein, 9 aa, Homo Sapiens
DTISPTLGF

SEQ ID NO: 55370 - protein, 9 aa, Homo Sapiens
DTITETDLR

SEQ ID NO: 55371 - protein, 9 aa, Homo Sapiens
DTIYSGADR

SEQ ID NO: 55372 - protein, 9 aa, Homo Sapiens
DTKSPQFNR

SEQ ID NO: 55373 - protein, 9 aa, Homo Sapiens
DTLYVGTTR

SEQ ID NO: 55374 - protein, 9 aa, Homo Sapiens
DTMKTGLKR

SEQ ID NO: 55375 - protein, 9 aa, Homo Sapiens
DTMPPKGVR

SEQ ID NO: 55376 - protein, 9 aa, Homo Sapiens
DTMSSTTTL

SEQ ID NO: 55377 - protein, 9 aa, Homo Sapiens
DTQKDKEQR

SEQ ID NO: 55378 - protein, 9 aa, Homo Sapiens
DTQKFSVMR

SEQ ID NO: 55379 - protein, 9 aa, Homo Sapiens
DTQLVLGNR

SEQ ID NO: 55380 - protein, 9 aa, Homo Sapiens
DTRQEPMVR

SEQ ID NO: 55381 - protein, 9 aa, Homo Sapiens
DTSGICNLR

SEQ ID NO: 55382 - protein, 9 aa, Homo Sapiens
DTSLNNMQR

SEQ ID NO: 55383 - protein, 9 aa, Homo Sapiens
DTSPDLSSR

SEQ ID NO: 55384 - protein, 9 aa, Homo Sapiens
DTSSLAGTR

SEQ ID NO: 55385 - protein, 9 aa, Homo Sapiens
DTSYGGTLR

SEQ ID NO: 55386 - protein, 9 aa, Homo Sapiens
DTTHPISYY

SEQ ID NO: 55387 - protein, 9 aa, Homo Sapiens
DTTSLDRPR

SEQ ID NO: 55388 - protein, 9 aa, Homo Sapiens
DTVAQITQR

SEQ ID NO: 55389 - protein, 9 aa, Homo Sapiens
DTVATLSER

SEQ ID NO: 55390 - protein, 9 aa, Homo Sapiens
DTVGGKRFR

SEQ ID NO: 55391 - protein, 9 aa, Homo Sapiens
DTVIGGRLR

SEQ ID NO: 55392 - protein, 9 aa, Homo Sapiens
DTVRSFLKR

SEQ ID NO: 55393 - protein, 9 aa, Homo Sapiens
DTVTGLLER

SEQ ID NO: 55394 - protein, 9 aa, Homo Sapiens
DTYAVVQKR

SEQ ID NO: 55395 - protein, 9 aa, Homo Sapiens
DTYLHRVAR

SEQ ID NO: 55396 - protein, 9 aa, Homo Sapiens
DVAAQQSLR

SEQ ID NO: 55397 - protein, 9 aa, Homo Sapiens
DVAGIGWER

SEQ ID NO: 55398 - protein, 9 aa, Homo Sapiens
DVAISTSAL

SEQ ID NO: 55399 - protein, 9 aa, Homo Sapiens
DVAQSTHVL

SEQ ID NO: 55400 - protein, 9 aa, Homo Sapiens
DVASFFGKR

SEQ ID NO: 55401 - protein, 9 aa, Homo Sapiens
DVFEGSIIR

SEQ ID NO: 55402 - protein, 9 aa, Homo Sapiens
DVFNITIAR

SEQ ID NO: 55403 - protein, 9 aa, Homo Sapiens
DVFPGPSFR

SEQ ID NO: 55404 - protein, 9 aa, Homo Sapiens
DVFTEAELR

SEQ ID NO: 55405 - protein, 9 aa, Homo Sapiens
DVFVVGTER

SEQ ID NO: 55406 - protein, 9 aa, Homo Sapiens
DVGKSTFNR

SEQ ID NO: 55407 - protein, 9 aa, Homo Sapiens
DVGLPGVSR

SEQ ID NO: 55408 - protein, 9 aa, Homo Sapiens
DVIDDASSR

SEQ ID NO: 55409 - protein, 9 aa, Homo Sapiens
DVIGVTKGK

SEQ ID NO: 55410 - protein, 9 aa, Homo Sapiens
DVIKPGTVK

SEQ ID NO: 55411 - protein, 9 aa, Homo Sapiens
DVINPMALR

SEQ ID NO: 55412 - protein, 9 aa, Homo Sapiens
DVINSARTR

SEQ ID NO: 55413 - protein, 9 aa, Homo Sapiens
DVIQRFERR

SEQ ID NO: 55414 - protein, 9 aa, Homo Sapiens
DVIYPTRTK

SEQ ID NO: 55415 - protein, 9 aa, Homo Sapiens
DVKPSWTTR

SEQ ID NO: 55416 - protein, 9 aa, Homo Sapiens
DVLQTGTQR

SEQ ID NO: 55417 - protein, 9 aa, Homo Sapiens
DVLSHFAQR

SEQ ID NO: 55418 - protein, 9 aa, Homo Sapiens
DVMPSGRSR

SEQ ID NO: 55419 - protein, 9 aa, Homo Sapiens
DVNIKSTER

SEQ ID NO: 55420 - protein, 9 aa, Homo Sapiens
DVNNIGKYR

SEQ ID NO: 55421 - protein, 9 aa, Homo Sapiens
DVNSFVRSR

SEQ ID NO: 55422 - protein, 9 aa, Homo Sapiens
DVNSGFAKR

SEQ ID NO: 55423 - protein, 9 aa, Homo Sapiens
DVPSPFNHR

SEQ ID NO: 55424 - protein, 9 aa, Homo Sapiens
DVQVITHHM

SEQ ID NO: 55425 - protein, 9 aa, Homo Sapiens
DVRMGGSFR

SEQ ID NO: 55426 - protein, 9 aa, Homo Sapiens
DVRQKVLER

SEQ ID NO: 55427 - protein, 9 aa, Homo Sapiens
DVRSVTSVR

SEQ ID NO: 55428 - protein, 9 aa, Homo Sapiens
DVSASMNQR

SEQ ID NO: 55429 - protein, 9 aa, Homo Sapiens
DVSDSSFPK

SEQ ID NO: 55430 - protein, 9 aa, Homo Sapiens
DVSHPIIYR

SEQ ID NO: 55431 - protein, 9 aa, Homo Sapiens
DVSPVVSTY

SEQ ID NO: 55432 - protein, 9 aa, Homo Sapiens
DVTKITKLR

SEQ ID NO: 55433 - protein, 9 aa, Homo Sapiens
DVTSCISYR

SEQ ID NO: 55434 - protein, 9 aa, Homo Sapiens
DVVGRFNER

SEQ ID NO: 55435 - protein, 9 aa, Homo Sapiens
DVVPNATIR

SEQ ID NO: 55436 - protein, 9 aa, Homo Sapiens
DVVSKFLNR

SEQ ID NO: 55437 - protein, 9 aa, Homo Sapiens
DVVVSRWLR

SEQ ID NO: 55438 - protein, 9 aa, Homo Sapiens
DVVWETKPK

SEQ ID NO: 55439 - protein, 9 aa, Homo Sapiens
DVYLVTHLM

SEQ ID NO: 55440 - protein, 9 aa, Homo Sapiens
DVYPEIIER

SEQ ID NO: 55441 - protein, 9 aa, Homo Sapiens
DVYQAVSKR

SEQ ID NO: 55442 - protein, 9 aa, Homo Sapiens
DVYRGLQER

SEQ ID NO: 55443 - protein, 9 aa, Homo Sapiens
DVYSGTPTK

SEQ ID NO: 55444 - protein, 9 aa, Homo Sapiens
DVYTPKSSR

SEQ ID NO: 55445 - protein, 9 aa, Homo Sapiens
EAAAALTRM

SEQ ID NO: 55446 - protein, 9 aa, Homo Sapiens
EAAAFGSEK

SEQ ID NO: 55447 - protein, 9 aa, Homo Sapiens
EAAAIGALR

SEQ ID NO: 55448 - protein, 9 aa, Homo Sapiens
EAAAIIAQR

SEQ ID NO: 55449 - protein, 9 aa, Homo Sapiens
EAAAVLMAR

SEQ ID NO: 55450 - protein, 9 aa, Homo Sapiens
EAAESIAFR

SEQ ID NO: 55451 - protein, 9 aa, Homo Sapiens
EAAFATKDR

SEQ ID NO: 55452 - protein, 9 aa, Homo Sapiens
EAAIGVTKR

SEQ ID NO: 55453 - protein, 9 aa, Homo Sapiens
EAAKDLLYR

SEQ ID NO: 55454 - protein, 9 aa, Homo Sapiens
EAAKVFGLR

SEQ ID NO: 55455 - protein, 9 aa, Homo Sapiens
EAALGTHYR

SEQ ID NO: 55456 - protein, 9 aa, Homo Sapiens
EAAPRLRAL

SEQ ID NO: 55457 - protein, 9 aa, Homo Sapiens
EAAQKFLER

SEQ ID NO: 55458 - protein, 9 aa, Homo Sapiens
EAAVAFLFR

SEQ ID NO: 55459 - protein, 9 aa, Homo Sapiens
EAAYIGSMR

SEQ ID NO: 55460 - protein, 9 aa, Homo Sapiens
EACDIMVKR

SEQ ID NO: 55461 - protein, 9 aa, Homo Sapiens
EAEVASLNR

SEQ ID NO: 55462 - protein, 9 aa, Homo Sapiens
EAFDFVKQR

SEQ ID NO: 55463 - protein, 9 aa, Homo Sapiens
EAFEFVKQR

SEQ ID NO: 55464 - protein, 9 aa, Homo Sapiens
EAFQTTISK

SEQ ID NO: 55465 - protein, 9 aa, Homo Sapiens
EAFSRPLSR

SEQ ID NO: 55466 - protein, 9 aa, Homo Sapiens
EAGAIISTR

SEQ ID NO: 55467 - protein, 9 aa, Homo Sapiens
EAHARIHLR

SEQ ID NO: 55468 - protein, 9 aa, Homo Sapiens
EAHNILSKR

SEQ ID NO: 55469 - protein, 9 aa, Homo Sapiens
EAIAKGIRR

SEQ ID NO: 55470 - protein, 9 aa, Homo Sapiens
EAIGNEVTR

SEQ ID NO: 55471 - protein, 9 aa, Homo Sapiens
EAIGPSTIR

SEQ ID NO: 55472 - protein, 9 aa, Homo Sapiens
EAIGTLTAR

SEQ ID NO: 55473 - protein, 9 aa, Homo Sapiens
EAIISGKQR

SEQ ID NO: 55474 - protein, 9 aa, Homo Sapiens
EAIQKKLSR

SEQ ID NO: 55475 - protein, 9 aa, Homo Sapiens
EAIYDICRR

SEQ ID NO: 55476 - protein, 9 aa, Homo Sapiens
EAKFPTMNR

SEQ ID NO: 55477 - protein, 9 aa, Homo Sapiens
EALNQVTQR

SEQ ID NO: 55478 - protein, 9 aa, Homo Sapiens
EALTALMSR

SEQ ID NO: 55479 - protein, 9 aa, Homo Sapiens
EALYDICFR

SEQ ID NO: 55480 - protein, 9 aa, Homo Sapiens
EAMALPLYR

SEQ ID NO: 55481 - protein, 9 aa, Homo Sapiens
EAMGQLGSR

SEQ ID NO: 55482 - protein, 9 aa, Homo Sapiens
EAMKHVYFR

SEQ ID NO: 55483 - protein, 9 aa, Homo Sapiens
EAMLPTLGK

SEQ ID NO: 55484 - protein, 9 aa, Homo Sapiens
EAMTVAIRR

SEQ ID NO: 55485 - protein, 9 aa, Homo Sapiens
EANFTVSSM

SEQ ID NO: 55486 - protein, 9 aa, Homo Sapiens
EANISTLLR

SEQ ID NO: 55487 - protein, 9 aa, Homo Sapiens
EAPKGMLAR

SEQ ID NO: 55488 - protein, 9 aa, Homo Sapiens
EAQEVTIAR

SEQ ID NO: 55489 - protein, 9 aa, Homo Sapiens
EAQIAAVCR

SEQ ID NO: 55490 - protein, 9 aa, Homo Sapiens
EAQRITGLR

SEQ ID NO: 55491 - protein, 9 aa, Homo Sapiens
EASAAGLIR

SEQ ID NO: 55492 - protein, 9 aa, Homo Sapiens
EASAIAGVR

SEQ ID NO: 55493 - protein, 9 aa, Homo Sapiens
EASDPRIIR

SEQ ID NO: 55494 - protein, 9 aa, Homo Sapiens
EASKDGLFR

SEQ ID NO: 55495 - protein, 9 aa, Homo Sapiens
EASPGGLDR

SEQ ID NO: 55496 - protein, 9 aa, Homo Sapiens
EASPVVVEK

SEQ ID NO: 55497 - protein, 9 aa, Homo Sapiens
EATAMAMGR

SEQ ID NO: 55498 - protein, 9 aa, Homo Sapiens
EATFCVVLR

SEQ ID NO: 55499 - protein, 9 aa, Homo Sapiens
EAVDISSKR

SEQ ID NO: 55500 - protein, 9 aa, Homo Sapiens
EAVDRFMPR

SEQ ID NO: 55501 - protein, 9 aa, Homo Sapiens
EAVEAAINR

SEQ ID NO: 55502 - protein, 9 aa, Homo Sapiens
EAVGVTSQR

SEQ ID NO: 55503 - protein, 9 aa, Homo Sapiens
EAVKPFGLK

SEQ ID NO: 55504 - protein, 9 aa, Homo Sapiens
EAVKPTVGM

SEQ ID NO: 55505 - protein, 9 aa, Homo Sapiens
EAVLAMSSR

SEQ ID NO: 55506 - protein, 9 aa, Homo Sapiens
EAVLNVALR

SEQ ID NO: 55507 - protein, 9 aa, Homo Sapiens
EAVLWEALR

SEQ ID NO: 55508 - protein, 9 aa, Homo Sapiens
EAVQALRER

SEQ ID NO: 55509 - protein, 9 aa, Homo Sapiens
EAVVGTACR

SEQ ID NO: 55510 - protein, 9 aa, Homo Sapiens
EAYHLSFER

SEQ ID NO: 55511 - protein, 9 aa, Homo Sapiens
EAYLPETFR

SEQ ID NO: 55512 - protein, 9 aa, Homo Sapiens
EAYSVGTGR

SEQ ID NO: 55513 - protein, 9 aa, Homo Sapiens
EDFYTATER

SEQ ID NO: 55514 - protein, 9 aa, Homo Sapiens
EDIEPTSSR

SEQ ID NO: 55515 - protein, 9 aa, Homo Sapiens
EGIGSTVFR

SEQ ID NO: 55516 - protein, 9 aa, Homo Sapiens
EGIKVGHER

SEQ ID NO: 55517 - protein, 9 aa, Homo Sapiens
EIADPTRFF

SEQ ID NO: 55518 - protein, 9 aa, Homo Sapiens
EIADSSMTR

SEQ ID NO: 55519 - protein, 9 aa, Homo Sapiens
EICGNYTYR

SEQ ID NO: 55520 - protein, 9 aa, Homo Sapiens
EIFGTIGMR

SEQ ID NO: 55521 - protein, 9 aa, Homo Sapiens
EIFVGKIPR

SEQ ID NO: 55522 - protein, 9 aa, Homo Sapiens
EIGPVSSSR

SEQ ID NO: 55523 - protein, 9 aa, Homo Sapiens
EIIEQPKQR

SEQ ID NO: 55524 - protein, 9 aa, Homo Sapiens
EIIEQPRQR

SEQ ID NO: 55525 - protein, 9 aa, Homo Sapiens
EIINATTGR

SEQ ID NO: 55526 - protein, 9 aa, Homo Sapiens
EIISKLQGR

SEQ ID NO: 55527 - protein, 9 aa, Homo Sapiens
EIKHFVSER

SEQ ID NO: 55528 - protein, 9 aa, Homo Sapiens
EILEVATAR

SEQ ID NO: 55529 - protein, 9 aa, Homo Sapiens
EIMEVAKER

SEQ ID NO: 55530 - protein, 9 aa, Homo Sapiens
EIMQETGTR

SEQ ID NO: 55531 - protein, 9 aa, Homo Sapiens
EIPENFTTR

SEQ ID NO: 55532 - protein, 9 aa, Homo Sapiens
EIPKRFGQR

SEQ ID NO: 55533 - protein, 9 aa, Homo Sapiens
EIPTFVTGR

SEQ ID NO: 55534 - protein, 9 aa, Homo Sapiens
EIQHTTALR

SEQ ID NO: 55535 - protein, 9 aa, Homo Sapiens
EISAPSQQR

SEQ ID NO: 55536 - protein, 9 aa, Homo Sapiens
EISAPVSER

SEQ ID NO: 55537 - protein, 9 aa, Homo Sapiens
EISGTFTHR

SEQ ID NO: 55538 - protein, 9 aa, Homo Sapiens
EISSNSLER

SEQ ID NO: 55539 - protein, 9 aa, Homo Sapiens
EIVANVGKR

SEQ ID NO: 55540 - protein, 9 aa, Homo Sapiens
EIVEQTMRR

SEQ ID NO: 55541 - protein, 9 aa, Homo Sapiens
EIVSRVSKR

SEQ ID NO: 55542 - protein, 9 aa, Homo Sapiens
EIYEYIIFR

SEQ ID NO: 55543 - protein, 9 aa, Homo Sapiens
EIYGVTHTR

SEQ ID NO: 55544 - protein, 9 aa, Homo Sapiens
EIYRPPASR

SEQ ID NO: 55545 - protein, 9 aa, Homo Sapiens
ELAAVINGR

SEQ ID NO: 55546 - protein, 9 aa, Homo Sapiens
ELADPTERF

SEQ ID NO: 55547 - protein, 9 aa, Homo Sapiens
ELAMVCSQR

SEQ ID NO: 55548 - protein, 9 aa, Homo Sapiens
ELAQIYAQR

SEQ ID NO: 55549 - protein, 9 aa, Homo Sapiens
ELAQVIVSR

SEQ ID NO: 55550 - protein, 9 aa, Homo Sapiens
ELAVASFPK

SEQ ID NO: 55551 - protein, 9 aa, Homo Sapiens
ELFGRVTSR

SEQ ID NO: 55552 - protein, 9 aa, Homo Sapiens
ELFPAPILR

SEQ ID NO: 55553 - protein, 9 aa, Homo Sapiens
ELFSHPVER

SEQ ID NO: 55554 - protein, 9 aa, Homo Sapiens
ELFSNIVPR

SEQ ID NO: 55555 - protein, 9 aa, Homo Sapiens
ELIPGAEFR

SEQ ID NO: 55556 - protein, 9 aa, Homo Sapiens
ELIQDITQR

SEQ ID NO: 55557 - protein, 9 aa, Homo Sapiens
ELLEPLNER

SEQ ID NO: 55558 - protein, 9 aa, Homo Sapiens
ELNPSTGNR

SEQ ID NO: 55559 - protein, 9 aa, Homo Sapiens
ELRPPSRSR

SEQ ID NO: 55560 - protein, 9 aa, Homo Sapiens
ELSDLHAHK

SEQ ID NO: 55561 - protein, 9 aa, Homo Sapiens
ELSPGGQPR

SEQ ID NO: 55562 - protein, 9 aa, Homo Sapiens
ELTDLHGLR

SEQ ID NO: 55563 - protein, 9 aa, Homo Sapiens
ELVPFESPR

SEQ ID NO: 55564 - protein, 9 aa, Homo Sapiens
ELVSPKLNR

SEQ ID NO: 55565 - protein, 9 aa, Homo Sapiens
ELYEKVFSR

SEQ ID NO: 55566 - protein, 9 aa, Homo Sapiens
ELYNAPEGR

SEQ ID NO: 55567 - protein, 9 aa, Homo Sapiens
ELYNRMLKR

SEQ ID NO: 55568 - protein, 9 aa, Homo Sapiens
ENFGNTTPR

SEQ ID NO: 55569 - protein, 9 aa, Homo Sapiens
EPAPALSSR

SEQ ID NO: 55570 - protein, 9 aa, Homo Sapiens
EPIAMTVPR

SEQ ID NO: 55571 - protein, 9 aa, Homo Sapiens
EPVEVVAPR

SEQ ID NO: 55572 - protein, 9 aa, Homo Sapiens
EPYANPTKR

SEQ ID NO: 55573 - protein, 9 aa, Homo Sapiens
EQVGPRWSR

SEQ ID NO: 55574 - protein, 9 aa, Homo Sapiens
ESAPAWRLR

SEQ ID NO: 55575 - protein, 9 aa, Homo Sapiens
ESAPKASLR

SEQ ID NO: 55576 - protein, 9 aa, Homo Sapiens
ESAPSALEK

SEQ ID NO: 55577 - protein, 9 aa, Homo Sapiens
ESAQDFASR

SEQ ID NO: 55578 - protein, 9 aa, Homo Sapiens
ESAYNAFNR

SEQ ID NO: 55579 - protein, 9 aa, Homo Sapiens
ESDFASTFR

SEQ ID NO: 55580 - protein, 9 aa, Homo Sapiens
ESEEVRQFR

SEQ ID NO: 55581 - protein, 9 aa, Homo Sapiens
ESFEGFIAR

SEQ ID NO: 55582 - protein, 9 aa, Homo Sapiens
ESFGVPKGR

SEQ ID NO: 55583 - protein, 9 aa, Homo Sapiens
ESFPRGGTR

SEQ ID NO: 55584 - protein, 9 aa, Homo Sapiens
ESFPSVNSR

SEQ ID NO: 55585 - protein, 9 aa, Homo Sapiens
ESFQVGILR

SEQ ID NO: 55586 - protein, 9 aa, Homo Sapiens
ESHPGTLLR

SEQ ID NO: 55587 - protein, 9 aa, Homo Sapiens
ESHSTTLYV

SEQ ID NO: 55588 - protein, 9 aa, Homo Sapiens
ESHVSGISR

SEQ ID NO: 55589 - protein, 9 aa, Homo Sapiens
ESIAAFIQR

SEQ ID NO: 55590 - protein, 9 aa, Homo Sapiens
ESIDALSNK

SEQ ID NO: 55591 - protein, 9 aa, Homo Sapiens
ESIDKKISR

SEQ ID NO: 55592 - protein, 9 aa, Homo Sapiens
ESIDQYIER

SEQ ID NO: 55593 - protein, 9 aa, Homo Sapiens
ESIEHPLAR

SEQ ID NO: 55594 - protein, 9 aa, Homo Sapiens
ESIFKNAER

SEQ ID NO: 55595 - protein, 9 aa, Homo Sapiens
ESIKGLCER

SEQ ID NO: 55596 - protein, 9 aa, Homo Sapiens
ESIQGEARR

SEQ ID NO: 55597 - protein, 9 aa, Homo Sapiens
ESIRAAVNR

SEQ ID NO: 55598 - protein, 9 aa, Homo Sapiens
ESKGLGYVR

SEQ ID NO: 55599 - protein, 9 aa, Homo Sapiens
ESLPATHIR

SEQ ID NO: 55600 - protein, 9 aa, Homo Sapiens
ESNPPSLMR

SEQ ID NO: 55601 - protein, 9 aa, Homo Sapiens
ESQSNPVFR

SEQ ID NO: 55602 - protein, 9 aa, Homo Sapiens
ESSDFTSER

SEQ ID NO: 55603 - protein, 9 aa, Homo Sapiens
ESSLPTGDR

SEQ ID NO: 55604 - protein, 9 aa, Homo Sapiens
ESSPQYRLR

SEQ ID NO: 55605 - protein, 9 aa, Homo Sapiens
ESSPSIVHR

SEQ ID NO: 55606 - protein, 9 aa, Homo Sapiens
ESTGESTFK

SEQ ID NO: 55607 - protein, 9 aa, Homo Sapiens
ESTKLKMFR

SEQ ID NO: 55608 - protein, 9 aa, Homo Sapiens
ESTNFATLR

SEQ ID NO: 55609 - protein, 9 aa, Homo Sapiens
ESTNFATRR

SEQ ID NO: 55610 - protein, 9 aa, Homo Sapiens
ESTNFATVR

SEQ ID NO: 55611 - protein, 9 aa, Homo Sapiens
ESTPITAVK

SEQ ID NO: 55612 - protein, 9 aa, Homo Sapiens
ESTWPSRSR

SEQ ID NO: 55613 - protein, 9 aa, Homo Sapiens
ESVFNQAIR

SEQ ID NO: 55614 - protein, 9 aa, Homo Sapiens
ESYYQEIGR

SEQ ID NO: 55615 - protein, 9 aa, Homo Sapiens
ETADILCPK

SEQ ID NO: 55616 - protein, 9 aa, Homo Sapiens
ETADITHAL

SEQ ID NO: 55617 - protein, 9 aa, Homo Sapiens
ETADVIAKV

SEQ ID NO: 55618 - protein, 9 aa, Homo Sapiens
ETAFAFHLR

SEQ ID NO: 55619 - protein, 9 aa, Homo Sapiens
ETAFQGMLR

SEQ ID NO: 55620 - protein, 9 aa, Homo Sapiens
ETAFVSRNR

SEQ ID NO: 55621 - protein, 9 aa, Homo Sapiens
ETAIPFRSR

SEQ ID NO: 55622 - protein, 9 aa, Homo Sapiens
ETAIPSSTR

SEQ ID NO: 55623 - protein, 9 aa, Homo Sapiens
ETAKATPRL

SEQ ID NO: 55624 - protein, 9 aa, Homo Sapiens
ETALPGAFK

SEQ ID NO: 55625 - protein, 9 aa, Homo Sapiens
ETAPKSEEF

SEQ ID NO: 55626 - protein, 9 aa, Homo Sapiens
ETAPRHMMR

SEQ ID NO: 55627 - protein, 9 aa, Homo Sapiens
ETCDKVFSR

SEQ ID NO: 55628 - protein, 9 aa, Homo Sapiens
ETCQLAVRR

SEQ ID NO: 55629 - protein, 9 aa, Homo Sapiens
ETEGIRGLR

SEQ ID NO: 55630 - protein, 9 aa, Homo Sapiens
ETFIKGKER

SEQ ID NO: 55631 - protein, 9 aa, Homo Sapiens
ETFKSIMKK

SEQ ID NO: 55632 - protein, 9 aa, Homo Sapiens
ETFLAQRQR

SEQ ID NO: 55633 - protein, 9 aa, Homo Sapiens
ETFNREKFR

SEQ ID NO: 55634 - protein, 9 aa, Homo Sapiens
ETFNSFLRR

SEQ ID NO: 55635 - protein, 9 aa, Homo Sapiens
ETFNSITKR

SEQ ID NO: 55636 - protein, 9 aa, Homo Sapiens
ETFNTPAMY

SEQ ID NO: 55637 - protein, 9 aa, Homo Sapiens
ETFQQKMLR

SEQ ID NO: 55638 - protein, 9 aa, Homo Sapiens
ETFSGVYKK

SEQ ID NO: 55639 - protein, 9 aa, Homo Sapiens
ETFVSSTRF

SEQ ID NO: 55640 - protein, 9 aa, Homo Sapiens
ETGDSSIFR

SEQ ID NO: 55641 - protein, 9 aa, Homo Sapiens
ETHAWFTSR

SEQ ID NO: 55642 - protein, 9 aa, Homo Sapiens
ETHFTGNEV

SEQ ID NO: 55643 - protein, 9 aa, Homo Sapiens
ETHLETCRF

SEQ ID NO: 55644 - protein, 9 aa, Homo Sapiens
ETHLPAQAR

SEQ ID NO: 55645 - protein, 9 aa, Homo Sapiens
ETHSHFLAR

SEQ ID NO: 55646 - protein, 9 aa, Homo Sapiens
ETIAPKIAR

SEQ ID NO: 55647 - protein, 9 aa, Homo Sapiens
ETIDVHSGY

SEQ ID NO: 55648 - protein, 9 aa, Homo Sapiens
ETIELTEDR

SEQ ID NO: 55649 - protein, 9 aa, Homo Sapiens
ETIEVMEDR

SEQ ID NO: 55650 - protein, 9 aa, Homo Sapiens
ETIGEILKK

SEQ ID NO: 55651 - protein, 9 aa, Homo Sapiens
ETIGKKFEK

SEQ ID NO: 55652 - protein, 9 aa, Homo Sapiens
ETIIITGKR

SEQ ID NO: 55653 - protein, 9 aa, Homo Sapiens
ETIKQLQER

SEQ ID NO: 55654 - protein, 9 aa, Homo Sapiens
ETIKSLLIR

SEQ ID NO: 55655 - protein, 9 aa, Homo Sapiens
ETIKVWKQR

SEQ ID NO: 55656 - protein, 9 aa, Homo Sapiens
ETILRTNKR

SEQ ID NO: 55657 - protein, 9 aa, Homo Sapiens
ETIPSFTGR

SEQ ID NO: 55658 - protein, 9 aa, Homo Sapiens
ETISTATGR

SEQ ID NO: 55659 - protein, 9 aa, Homo Sapiens
ETIYDLGTK

SEQ ID NO: 55660 - protein, 9 aa, Homo Sapiens
ETIYQNYQR

SEQ ID NO: 55661 - protein, 9 aa, Homo Sapiens
ETLETIINR

SEQ ID NO: 55662 - protein, 9 aa, Homo Sapiens
ETLGQVVRR

SEQ ID NO: 55663 - protein, 9 aa, Homo Sapiens
ETLLLQAER

SEQ ID NO: 55664 - protein, 9 aa, Homo Sapiens
ETLMETHER

SEQ ID NO: 55665 - protein, 9 aa, Homo Sapiens
ETLPPGKVR

SEQ ID NO: 55666 - protein, 9 aa, Homo Sapiens
ETLQNVKER

SEQ ID NO: 55667 - protein, 9 aa, Homo Sapiens
ETMDPFVDR

SEQ ID NO: 55668 - protein, 9 aa, Homo Sapiens
ETMNYAQIR

SEQ ID NO: 55669 - protein, 9 aa, Homo Sapiens
ETMPCVKKK

SEQ ID NO: 55670 - protein, 9 aa, Homo Sapiens
ETMPSPYGR

SEQ ID NO: 55671 - protein, 9 aa, Homo Sapiens
ETMPYVKKK

SEQ ID NO: 55672 - protein, 9 aa, Homo Sapiens
ETNIVAVER

SEQ ID NO: 55673 - protein, 9 aa, Homo Sapiens
ETNTGEVYR

SEQ ID NO: 55674 - protein, 9 aa, Homo Sapiens
ETNYGIPQR

SEQ ID NO: 55675 - protein, 9 aa, Homo Sapiens
ETPITSVPR

SEQ ID NO: 55676 - protein, 9 aa, Homo Sapiens
ETQIATILR

SEQ ID NO: 55677 - protein, 9 aa, Homo Sapiens
ETQLPVSFR

SEQ ID NO: 55678 - protein, 9 aa, Homo Sapiens
ETQVPLLFR

SEQ ID NO: 55679 - protein, 9 aa, Homo Sapiens
ETRAEFAER

SEQ ID NO: 55680 - protein, 9 aa, Homo Sapiens
ETREPPPAY

SEQ ID NO: 55681 - protein, 9 aa, Homo Sapiens
ETRLHITGR

SEQ ID NO: 55682 - protein, 9 aa, Homo Sapiens
ETRQITWSR

SEQ ID NO: 55683 - protein, 9 aa, Homo Sapiens
ETSALPRPR

SEQ ID NO: 55684 - protein, 9 aa, Homo Sapiens
ETSAPFKER

SEQ ID NO: 55685 - protein, 9 aa, Homo Sapiens
ETSEPLSCR

SEQ ID NO: 55686 - protein, 9 aa, Homo Sapiens
ETSGFPSQR

SEQ ID NO: 55687 - protein, 9 aa, Homo Sapiens
ETSGPTYIK

SEQ ID NO: 55688 - protein, 9 aa, Homo Sapiens
ETSNLIIMR

SEQ ID NO: 55689 - protein, 9 aa, Homo Sapiens
ETSPFGAPR

SEQ ID NO: 55690 - protein, 9 aa, Homo Sapiens
ETSPHVIQA

SEQ ID NO: 55691 - protein, 9 aa, Homo Sapiens
ETSQAGLFR

SEQ ID NO: 55692 - protein, 9 aa, Homo Sapiens
ETSSMASFR

SEQ ID NO: 55693 - protein, 9 aa, Homo Sapiens
ETTIQKMER

SEQ ID NO: 55694 - protein, 9 aa, Homo Sapiens
ETTSIATAR

SEQ ID NO: 55695 - protein, 9 aa, Homo Sapiens
ETTSNITSR

SEQ ID NO: 55696 - protein, 9 aa, Homo Sapiens
ETTVGNMVR

SEQ ID NO: 55697 - protein, 9 aa, Homo Sapiens
ETTWTILRR

SEQ ID NO: 55698 - protein, 9 aa, Homo Sapiens
ETVAEFIKR

SEQ ID NO: 55699 - protein, 9 aa, Homo Sapiens
ETVALDAKR

SEQ ID NO: 55700 - protein, 9 aa, Homo Sapiens
ETVDAVQER

SEQ ID NO: 55701 - protein, 9 aa, Homo Sapiens
ETVEDIAAR

SEQ ID NO: 55702 - protein, 9 aa, Homo Sapiens
ETVEGLRKR

SEQ ID NO: 55703 - protein, 9 aa, Homo Sapiens
ETVEKFRQR

SEQ ID NO: 55704 - protein, 9 aa, Homo Sapiens
ETVEKWLKR

SEQ ID NO: 55705 - protein, 9 aa, Homo Sapiens
ETVELFRAK

SEQ ID NO: 55706 - protein, 9 aa, Homo Sapiens
ETVELHKLK

SEQ ID NO: 55707 - protein, 9 aa, Homo Sapiens
ETVGSIFSR

SEQ ID NO: 55708 - protein, 9 aa, Homo Sapiens
ETVMKGLDR

SEQ ID NO: 55709 - protein, 9 aa, Homo Sapiens
ETVNQMIAR

SEQ ID NO: 55710 - protein, 9 aa, Homo Sapiens
ETVPAFSER

SEQ ID NO: 55711 - protein, 9 aa, Homo Sapiens
ETVQDIVYR

SEQ ID NO: 55712 - protein, 9 aa, Homo Sapiens
ETVTSFRKR

SEQ ID NO: 55713 - protein, 9 aa, Homo Sapiens
ETVYTLCEK

SEQ ID NO: 55714 - protein, 9 aa, Homo Sapiens
ETYDITTVR

SEQ ID NO: 55715 - protein, 9 aa, Homo Sapiens
ETYLHRIGR

SEQ ID NO: 55716 - protein, 9 aa, Homo Sapiens
ETYLNENLR

SEQ ID NO: 55717 - protein, 9 aa, Homo Sapiens
ETYMHRIGR

SEQ ID NO: 55718 - protein, 9 aa, Homo Sapiens
ETYPFNPPK

SEQ ID NO: 55719 - protein, 9 aa, Homo Sapiens
ETYPHPLVR

SEQ ID NO: 55720 - protein, 9 aa, Homo Sapiens
ETYPVSSPK

SEQ ID NO: 55721 - protein, 9 aa, Homo Sapiens
ETYSNLIKL

SEQ ID NO: 55722 - protein, 9 aa, Homo Sapiens
EVADLKIKR

SEQ ID NO: 55723 - protein, 9 aa, Homo Sapiens
EVAEHVQYM

SEQ ID NO: 55724 - protein, 9 aa, Homo Sapiens
EVAFPHHPR

SEQ ID NO: 55725 - protein, 9 aa, Homo Sapiens
EVAGFGESR

SEQ ID NO: 55726 - protein, 9 aa, Homo Sapiens
EVAGIVAAR

SEQ ID NO: 55727 - protein, 9 aa, Homo Sapiens
EVAGLQVGR

SEQ ID NO: 55728 - protein, 9 aa, Homo Sapiens
EVAIPHNRR

SEQ ID NO: 55729 - protein, 9 aa, Homo Sapiens
EVALATGQF

SEQ ID NO: 55730 - protein, 9 aa, Homo Sapiens
EVANIPVAR

SEQ ID NO: 55731 - protein, 9 aa, Homo Sapiens
EVANSTANL

SEQ ID NO: 55732 - protein, 9 aa, Homo Sapiens
EVAPAGASY

SEQ ID NO: 55733 - protein, 9 aa, Homo Sapiens
EVAPDPSVR

SEQ ID NO: 55734 - protein, 9 aa, Homo Sapiens
EVAPDVRLR

SEQ ID NO: 55735 - protein, 9 aa, Homo Sapiens
EVAPPEYHR

SEQ ID NO: 55736 - protein, 9 aa, Homo Sapiens
EVAPTSTAV

SEQ ID NO: 55737 - protein, 9 aa, Homo Sapiens
EVAQFLTGR

SEQ ID NO: 55738 - protein, 9 aa, Homo Sapiens
EVAQPSREF

SEQ ID NO: 55739 - protein, 9 aa, Homo Sapiens
EVAQVESLR

SEQ ID NO: 55740 - protein, 9 aa, Homo Sapiens
EVARLWGVR

SEQ ID NO: 55741 - protein, 9 aa, Homo Sapiens
EVASAVCLR

SEQ ID NO: 55742 - protein, 9 aa, Homo Sapiens
EVASFVADR

SEQ ID NO: 55743 - protein, 9 aa, Homo Sapiens
EVASFVTKR

SEQ ID NO: 55744 - protein, 9 aa, Homo Sapiens
EVASGAVLR

SEQ ID NO: 55745 - protein, 9 aa, Homo Sapiens
EVASVWVER

SEQ ID NO: 55746 - protein, 9 aa, Homo Sapiens
EVDAAMAAR

SEQ ID NO: 55747 - protein, 9 aa, Homo Sapiens
EVECATQLR

SEQ ID NO: 55748 - protein, 9 aa, Homo Sapiens
EVENFSCSR

SEQ ID NO: 55749 - protein, 9 aa, Homo Sapiens
EVFDHMMKR

SEQ ID NO: 55750 - protein, 9 aa, Homo Sapiens
EVFDKFSNK

SEQ ID NO: 55751 - protein, 9 aa, Homo Sapiens
EVFECTHNM

SEQ ID NO: 55752 - protein, 9 aa, Homo Sapiens
EVFEYIIFR

SEQ ID NO: 55753 - protein, 9 aa, Homo Sapiens
EVFFLKATR

SEQ ID NO: 55754 - protein, 9 aa, Homo Sapiens
EVFGQITER

SEQ ID NO: 55755 - protein, 9 aa, Homo Sapiens
EVFLHVVKR

SEQ ID NO: 55756 - protein, 9 aa, Homo Sapiens
EVFQNANFR

SEQ ID NO: 55757 - protein, 9 aa, Homo Sapiens
EVFRDTVHM

SEQ ID NO: 55758 - protein, 9 aa, Homo Sapiens
EVFSHILKR

SEQ ID NO: 55759 - protein, 9 aa, Homo Sapiens
EVFTPVFER

SEQ ID NO: 55760 - protein, 9 aa, Homo Sapiens
EVFTPVVQR

SEQ ID NO: 55761 - protein, 9 aa, Homo Sapiens
EVFVGKIPR

SEQ ID NO: 55762 - protein, 9 aa, Homo Sapiens
EVFYFEVTR

SEQ ID NO: 55763 - protein, 9 aa, Homo Sapiens
EVGDIVVGR

SEQ ID NO: 55764 - protein, 9 aa, Homo Sapiens
EVGGEALGR

SEQ ID NO: 55765 - protein, 9 aa, Homo Sapiens
EVGPGTGNM

SEQ ID NO: 55766 - protein, 9 aa, Homo Sapiens
EVGSVVSFR

SEQ ID NO: 55767 - protein, 9 aa, Homo Sapiens
EVHAVVTVR

SEQ ID NO: 55768 - protein, 9 aa, Homo Sapiens
EVHNLIQLR

SEQ ID NO: 55769 - protein, 9 aa, Homo Sapiens
EVHPSPVSR

SEQ ID NO: 55770 - protein, 9 aa, Homo Sapiens
EVHTGTTIM

SEQ ID NO: 55771 - protein, 9 aa, Homo Sapiens
EVIEALLKK

SEQ ID NO: 55772 - protein, 9 aa, Homo Sapiens
EVIEIMTDR

SEQ ID NO: 55773 - protein, 9 aa, Homo Sapiens
EVIGLLGGR

SEQ ID NO: 55774 - protein, 9 aa, Homo Sapiens
EVIKNRFHR

SEQ ID NO: 55775 - protein, 9 aa, Homo Sapiens
EVIKSMKPK

SEQ ID NO: 55776 - protein, 9 aa, Homo Sapiens
EVINDYHFR

SEQ ID NO: 55777 - protein, 9 aa, Homo Sapiens
EVIPPMKEF

SEQ ID NO: 55778 - protein, 9 aa, Homo Sapiens
EVISLINTR

SEQ ID NO: 55779 - protein, 9 aa, Homo Sapiens
EVISRGGPR

SEQ ID NO: 55780 - protein, 9 aa, Homo Sapiens
EVKESPFFR

SEQ ID NO: 55781 - protein, 9 aa, Homo Sapiens
EVKKICMQR

SEQ ID NO: 55782 - protein, 9 aa, Homo Sapiens
EVKPSIRAR

SEQ ID NO: 55783 - protein, 9 aa, Homo Sapiens
EVKRHPFFR

SEQ ID NO: 55784 - protein, 9 aa, Homo Sapiens
EVLDRVFER

SEQ ID NO: 55785 - protein, 9 aa, Homo Sapiens
EVLPKPRMR

SEQ ID NO: 55786 - protein, 9 aa, Homo Sapiens
EVLQGGSQR

SEQ ID NO: 55787 - protein, 9 aa, Homo Sapiens
EVLQPLQQR

SEQ ID NO: 55788 - protein, 9 aa, Homo Sapiens
EVLSDPQTR

SEQ ID NO: 55789 - protein, 9 aa, Homo Sapiens
EVLTDAAAR

SEQ ID NO: 55790 - protein, 9 aa, Homo Sapiens
EVMGTGAVR

SEQ ID NO: 55791 - protein, 9 aa, Homo Sapiens
EVNAWLVHR

SEQ ID NO: 55792 - protein, 9 aa, Homo Sapiens
EVNDKRYLR

SEQ ID NO: 55793 - protein, 9 aa, Homo Sapiens
EVNIPTDLR

SEQ ID NO: 55794 - protein, 9 aa, Homo Sapiens
EVNKSTVYI

SEQ ID NO: 55795 - protein, 9 aa, Homo Sapiens
EVNNELANR

SEQ ID NO: 55796 - protein, 9 aa, Homo Sapiens
EVNQETIQR

SEQ ID NO: 55797 - protein, 9 aa, Homo Sapiens
EVNSRPTYR

SEQ ID NO: 55798 - protein, 9 aa, Homo Sapiens
EVPAVQSPR

SEQ ID NO: 55799 - protein, 9 aa, Homo Sapiens
EVPELYHQR

SEQ ID NO: 55800 - protein, 9 aa, Homo Sapiens
EVPEVTRSR

SEQ ID NO: 55801 - protein, 9 aa, Homo Sapiens
EVPPPPNLR

SEQ ID NO: 55802 - protein, 9 aa, Homo Sapiens
EVPSELSER

SEQ ID NO: 55803 - protein, 9 aa, Homo Sapiens
EVPSFTMGR

SEQ ID NO: 55804 - protein, 9 aa, Homo Sapiens
EVPTPKRPR

SEQ ID NO: 55805 - protein, 9 aa, Homo Sapiens
EVQRILHQR

SEQ ID NO: 55806 - protein, 9 aa, Homo Sapiens
EVQVVNTER

SEQ ID NO: 55807 - protein, 9 aa, Homo Sapiens
EVRGGGLTR

SEQ ID NO: 55808 - protein, 9 aa, Homo Sapiens
EVRLGGSLR

SEQ ID NO: 55809 - protein, 9 aa, Homo Sapiens
EVSAAIIQR

SEQ ID NO: 55810 - protein, 9 aa, Homo Sapiens
EVSAEVRER

SEQ ID NO: 55811 - protein, 9 aa, Homo Sapiens
EVSFSVGGR

SEQ ID NO: 55812 - protein, 9 aa, Homo Sapiens
EVSGCGSLR

SEQ ID NO: 55813 - protein, 9 aa, Homo Sapiens
EVSLPKRGR

SEQ ID NO: 55814 - protein, 9 aa, Homo Sapiens
EVSLPKTSR

SEQ ID NO: 55815 - protein, 9 aa, Homo Sapiens
EVSSVSPLK

SEQ ID NO: 55816 - protein, 9 aa, Homo Sapiens
EVSTVNVRR

SEQ ID NO: 55817 - protein, 9 aa, Homo Sapiens
EVTDYAIAR

SEQ ID NO: 55818 - protein, 9 aa, Homo Sapiens
EVTDYTTGR

SEQ ID NO: 55819 - protein, 9 aa, Homo Sapiens
EVTETICKR

SEQ ID NO: 55820 - protein, 9 aa, Homo Sapiens
EVTGEAALR

SEQ ID NO: 55821 - protein, 9 aa, Homo Sapiens
EVTGFGVTR

SEQ ID NO: 55822 - protein, 9 aa, Homo Sapiens
EVTGTGLGR

SEQ ID NO: 55823 - protein, 9 aa, Homo Sapiens
EVTNIITSK

SEQ ID NO: 55824 - protein, 9 aa, Homo Sapiens
EVTQIACGR

SEQ ID NO: 55825 - protein, 9 aa, Homo Sapiens
EVTTTVLVR

SEQ ID NO: 55826 - protein, 9 aa, Homo Sapiens
EVVDFSSHY

SEQ ID NO: 55827 - protein, 9 aa, Homo Sapiens
EVVDLLLAR

SEQ ID NO: 55828 - protein, 9 aa, Homo Sapiens
EVVEIQIDR

SEQ ID NO: 55829 - protein, 9 aa, Homo Sapiens
EVVEQGITR

SEQ ID NO: 55830 - protein, 9 aa, Homo Sapiens
EVVGIIESR

SEQ ID NO: 55831 - protein, 9 aa, Homo Sapiens
EVVLYSGAR

SEQ ID NO: 55832 - protein, 9 aa, Homo Sapiens
EVVNKRFVR

SEQ ID NO: 55833 - protein, 9 aa, Homo Sapiens
EVVPEPVAR

SEQ ID NO: 55834 - protein, 9 aa, Homo Sapiens
EVVQITWNR

SEQ ID NO: 55835 - protein, 9 aa, Homo Sapiens
EVVSGVVSK

SEQ ID NO: 55836 - protein, 9 aa, Homo Sapiens
EVVSLLLDR

SEQ ID NO: 55837 - protein, 9 aa, Homo Sapiens
EVVVSGKLR

SEQ ID NO: 55838 - protein, 9 aa, Homo Sapiens
EVVYDLSIR

SEQ ID NO: 55839 - protein, 9 aa, Homo Sapiens
EVVYRFTAR

SEQ ID NO: 55840 - protein, 9 aa, Homo Sapiens
EVWPHSTER

SEQ ID NO: 55841 - protein, 9 aa, Homo Sapiens
EVYDPLSKR

SEQ ID NO: 55842 - protein, 9 aa, Homo Sapiens
EVYKATCLL

SEQ ID NO: 55843 - protein, 9 aa, Homo Sapiens
EVYNEFVRK

SEQ ID NO: 55844 - protein, 9 aa, Homo Sapiens
EVYSPSQQR

SEQ ID NO: 55845 - protein, 9 aa, Homo Sapiens
EVYTLAEHR

SEQ ID NO: 55846 - protein, 9 aa, Homo Sapiens
FAAGVWLAR

SEQ ID NO: 55847 - protein, 9 aa, Homo Sapiens
FAFGGLCER

SEQ ID NO: 55848 - protein, 9 aa, Homo Sapiens
FAIFNTEQR

SEQ ID NO: 55849 - protein, 9 aa, Homo Sapiens
FAMNVGKAR

SEQ ID NO: 55850 - protein, 9 aa, Homo Sapiens
FASPLGAGR

SEQ ID NO: 55851 - protein, 9 aa, Homo Sapiens
FASQGGLAR

SEQ ID NO: 55852 - protein, 9 aa, Homo Sapiens
FDAKRLIGR

SEQ ID NO: 55853 - protein, 9 aa, Homo Sapiens
FIRDPSTSR

SEQ ID NO: 55854 - protein, 9 aa, Homo Sapiens
FLYPGSSTR

SEQ ID NO: 55855 - protein, 9 aa, Homo Sapiens
FPSEIVGKR

SEQ ID NO: 55856 - protein, 9 aa, Homo Sapiens
FPSIVGRPR

SEQ ID NO: 55857 - protein, 9 aa, Homo Sapiens
FPVRPGSGR

SEQ ID NO: 55858 - protein, 9 aa, Homo Sapiens
FSAPNYCYR

SEQ ID NO: 55859 - protein, 9 aa, Homo Sapiens
FSASGGWGR

SEQ ID NO: 55860 - protein, 9 aa, Homo Sapiens
FSASSTVEK

SEQ ID NO: 55861 - protein, 9 aa, Homo Sapiens
FSIAGTVKR

SEQ ID NO: 55862 - protein, 9 aa, Homo Sapiens
FSIDVGYER

SEQ ID NO: 55863 - protein, 9 aa, Homo Sapiens
FSIPGSSSR

SEQ ID NO: 55864 - protein, 9 aa, Homo Sapiens
FSQPGTISR

SEQ ID NO: 55865 - protein, 9 aa, Homo Sapiens
FSTPGGASR

SEQ ID NO: 55866 - protein, 9 aa, Homo Sapiens
FTAERSSYY

SEQ ID NO: 55867 - protein, 9 aa, Homo Sapiens
FTAPATVSL

SEQ ID NO: 55868 - protein, 9 aa, Homo Sapiens
FTAPSTVGK

SEQ ID NO: 55869 - protein, 9 aa, Homo Sapiens
FTDEEGYGR

SEQ ID NO: 55870 - protein, 9 aa, Homo Sapiens
FTELQQKFF

SEQ ID NO: 55871 - protein, 9 aa, Homo Sapiens
FTFTASFNR

SEQ ID NO: 55872 - protein, 9 aa, Homo Sapiens
FTHRSTFVL

SEQ ID NO: 55873 - protein, 9 aa, Homo Sapiens
FTIDSRLQR

SEQ ID NO: 55874 - protein, 9 aa, Homo Sapiens
FTIESTRVR

SEQ ID NO: 55875 - protein, 9 aa, Homo Sapiens
FTKIKTADR

SEQ ID NO: 55876 - protein, 9 aa, Homo Sapiens
FTMLSSLAR

SEQ ID NO: 55877 - protein, 9 aa, Homo Sapiens
FTNKSTSSL

SEQ ID NO: 55878 - protein, 9 aa, Homo Sapiens
FTNVFGKKR

SEQ ID NO: 55879 - protein, 9 aa, Homo Sapiens
FTQGWGSRR

SEQ ID NO: 55880 - protein, 9 aa, Homo Sapiens
FTQKPGFPK

SEQ ID NO: 55881 - protein, 9 aa, Homo Sapiens
FTQSGTMKM

SEQ ID NO: 55882 - protein, 9 aa, Homo Sapiens
FTSPPSLFK

SEQ ID NO: 55883 - protein, 9 aa, Homo Sapiens
FTTNGSLTR

SEQ ID NO: 55884 - protein, 9 aa, Homo Sapiens
FTTSASLTR

SEQ ID NO: 55885 - protein, 9 aa, Homo Sapiens
FTTVGSAEK

SEQ ID NO: 55886 - protein, 9 aa, Homo Sapiens
FTTYINRKR

SEQ ID NO: 55887 - protein, 9 aa, Homo Sapiens
FTVEGIKRR

SEQ ID NO: 55888 - protein, 9 aa, Homo Sapiens
FTVTVGNNR

SEQ ID NO: 55889 - protein, 9 aa, Homo Sapiens
FTWPGQRER

SEQ ID NO: 55890 - protein, 9 aa, Homo Sapiens
FTYMNPAQR

SEQ ID NO: 55891 - protein, 9 aa, Homo Sapiens
FVAPPTAAV

SEQ ID NO: 55892 - protein, 9 aa, Homo Sapiens
FVAQPGLSR

SEQ ID NO: 55893 - protein, 9 aa, Homo Sapiens
FVFDRPVHR

SEQ ID NO: 55894 - protein, 9 aa, Homo Sapiens
FVIDPGFAK

SEQ ID NO: 55895 - protein, 9 aa, Homo Sapiens
FVIKPKIQR

SEQ ID NO: 55896 - protein, 9 aa, Homo Sapiens
FVISPPALR

SEQ ID NO: 55897 - protein, 9 aa, Homo Sapiens
FVMGVNHEK

SEQ ID NO: 55898 - protein, 9 aa, Homo Sapiens
FVQNPNNNR

SEQ ID NO: 55899 - protein, 9 aa, Homo Sapiens
FVSDNSLNR

SEQ ID NO: 55900 - protein, 9 aa, Homo Sapiens
FVTPVTNQR

SEQ ID NO: 55901 - protein, 9 aa, Homo Sapiens
FVTSMMTGR

SEQ ID NO: 55902 - protein, 9 aa, Homo Sapiens
FVVEKVLDR

SEQ ID NO: 55903 - protein, 9 aa, Homo Sapiens
FVVQKISPR

SEQ ID NO: 55904 - protein, 9 aa, Homo Sapiens
FVYGEPVTR

SEQ ID NO: 55905 - protein, 9 aa, Homo Sapiens
FVYGSGVYR

SEQ ID NO: 55906 - protein, 9 aa, Homo Sapiens
GAAFPSSLR

SEQ ID NO: 55907 - protein, 9 aa, Homo Sapiens
GPGPRPLAR

SEQ ID NO: 55908 - protein, 9 aa, Homo Sapiens
GSIGSSFPR

SEQ ID NO: 55909 - protein, 9 aa, Homo Sapiens
GSVSIWTGR

SEQ ID NO: 55910 - protein, 9 aa, Homo Sapiens
GTADVHFER

SEQ ID NO: 55911 - protein, 9 aa, Homo Sapiens
GTIGKKFAR

SEQ ID NO: 55912 - protein, 9 aa, Homo Sapiens
GTLGGMLTR

SEQ ID NO: 55913 - protein, 9 aa, Homo Sapiens
GTSSVIVSR

SEQ ID NO: 55914 - protein, 9 aa, Homo Sapiens
GTTVPFTSR

SEQ ID NO: 55915 - protein, 9 aa, Homo Sapiens
GTYVSSVPR

SEQ ID NO: 55916 - protein, 9 aa, Homo Sapiens
GVANALAHR

SEQ ID NO: 55917 - protein, 9 aa, Homo Sapiens
GVAPVFKKR

SEQ ID NO: 55918 - protein, 9 aa, Homo Sapiens
GVIGQRMPR

SEQ ID NO: 55919 - protein, 9 aa, Homo Sapiens
GVKVPGEYR

SEQ ID NO: 55920 - protein, 9 aa, Homo Sapiens
GVMVGMGQK

SEQ ID NO: 55921 - protein, 9 aa, Homo Sapiens
GVSLPTSSR

SEQ ID NO: 55922 - protein, 9 aa, Homo Sapiens
GVSPVITVR

SEQ ID NO: 55923 - protein, 9 aa, Homo Sapiens
GVVEKMQQR

SEQ ID NO: 55924 - protein, 9 aa, Homo Sapiens
HAFVSTLTR

SEQ ID NO: 55925 - protein, 9 aa, Homo Sapiens
HAQSIGMNR

SEQ ID NO: 55926 - protein, 9 aa, Homo Sapiens
HIDVITAEM

SEQ ID NO: 55927 - protein, 9 aa, Homo Sapiens
HISCVIKER

SEQ ID NO: 55928 - protein, 9 aa, Homo Sapiens
HLAWINTPR

SEQ ID NO: 55929 - protein, 9 aa, Homo Sapiens
HLITAGVPR

SEQ ID NO: 55930 - protein, 9 aa, Homo Sapiens
HSAPIYEFR

SEQ ID NO: 55931 - protein, 9 aa, Homo Sapiens
HSMDFVAYR

SEQ ID NO: 55932 - protein, 9 aa, Homo Sapiens
HSSLPGLSR

SEQ ID NO: 55933 - protein, 9 aa, Homo Sapiens
HSVFSASAR

SEQ ID NO: 55934 - protein, 9 aa, Homo Sapiens
HTAAVSTAM

SEQ ID NO: 55935 - protein, 9 aa, Homo Sapiens
HTADISSHF

SEQ ID NO: 55936 - protein, 9 aa, Homo Sapiens
HTAGATSSL

SEQ ID NO: 55937 - protein, 9 aa, Homo Sapiens
HTANIFSVK

SEQ ID NO: 55938 - protein, 9 aa, Homo Sapiens
HTFDHINKR

SEQ ID NO: 55939 - protein, 9 aa, Homo Sapiens
HTGNIFSSR

SEQ ID NO: 55940 - protein, 9 aa, Homo Sapiens
HTIAPMGTR

SEQ ID NO: 55941 - protein, 9 aa, Homo Sapiens
HTIDWVREK

SEQ ID NO: 55942 - protein, 9 aa, Homo Sapiens
HTIPAKMFR

SEQ ID NO: 55943 - protein, 9 aa, Homo Sapiens
HTIRGLIAR

SEQ ID NO: 55944 - protein, 9 aa, Homo Sapiens
HTLEDLSAR

SEQ ID NO: 55945 - protein, 9 aa, Homo Sapiens
HTLEPLIPR

SEQ ID NO: 55946 - protein, 9 aa, Homo Sapiens
HTNFSTKAM

SEQ ID NO: 55947 - protein, 9 aa, Homo Sapiens
HTNREGVPM

SEQ ID NO: 55948 - protein, 9 aa, Homo Sapiens
HTNVATAVL

SEQ ID NO: 55949 - protein, 9 aa, Homo Sapiens
HTTEISVSR

SEQ ID NO: 55950 - protein, 9 aa, Homo Sapiens
HTVGLKLHR

SEQ ID NO: 55951 - protein, 9 aa, Homo Sapiens
HTVLSKLTR

SEQ ID NO: 55952 - protein, 9 aa, Homo Sapiens
HVAQIYAIR

SEQ ID NO: 55953 - protein, 9 aa, Homo Sapiens
HVASVLCQR

SEQ ID NO: 55954 - protein, 9 aa, Homo Sapiens
HVAVPTHFF

SEQ ID NO: 55955 - protein, 9 aa, Homo Sapiens
HVFGRSLLR

SEQ ID NO: 55956 - protein, 9 aa, Homo Sapiens
HVIQPRADR

SEQ ID NO: 55957 - protein, 9 aa, Homo Sapiens
HVLESGGFR

SEQ ID NO: 55958 - protein, 9 aa, Homo Sapiens
HVTDPFIRR

SEQ ID NO: 55959 - protein, 9 aa, Homo Sapiens
HVVAIGRTR

SEQ ID NO: 55960 - protein, 9 aa, Homo Sapiens
HVVDIVALK

SEQ ID NO: 55961 - protein, 9 aa, Homo Sapiens
HVVSEGVPR

SEQ ID NO: 55962 - protein, 9 aa, Homo Sapiens
IILGPTKDR

SEQ ID NO: 55963 - protein, 9 aa, Homo Sapiens
IIVDIATKR

SEQ ID NO: 55964 - protein, 9 aa, Homo Sapiens
ISSRNTGQR

SEQ ID NO: 55965 - protein, 9 aa, Homo Sapiens
ISTASLNLR

SEQ ID NO: 55966 - protein, 9 aa, Homo Sapiens
ITIPRRSKR

SEQ ID NO: 55967 - protein, 9 aa, Homo Sapiens
ITSENVAER

SEQ ID NO: 55968 - protein, 9 aa, Homo Sapiens
ITSPVVTQK

SEQ ID NO: 55969 - protein, 9 aa, Homo Sapiens
ITTGNSPPR

SEQ ID NO: 55970 - protein, 9 aa, Homo Sapiens
IVAEVVSAR

SEQ ID NO: 55971 - protein, 9 aa, Homo Sapiens
IVAPGGALR

SEQ ID NO: 55972 - protein, 9 aa, Homo Sapiens
IVGDPSTAK

SEQ ID NO: 55973 - protein, 9 aa, Homo Sapiens
IVKPPASAR

SEQ ID NO: 55974 - protein, 9 aa, Homo Sapiens
IVNRTIANM

SEQ ID NO: 55975 - protein, 9 aa, Homo Sapiens
IVTEIACGR

SEQ ID NO: 55976 - protein, 9 aa, Homo Sapiens
IVTGTSIQR

SEQ ID NO: 55977 - protein, 9 aa, Homo Sapiens
IVVDPFDPR

SEQ ID NO: 55978 - protein, 9 aa, Homo Sapiens
LAAPASLRP

SEQ ID NO: 55979 - protein, 9 aa, Homo Sapiens
LAAPSGLER

SEQ ID NO: 55980 - protein, 9 aa, Homo Sapiens
LAIGLTGQR

SEQ ID NO: 55981 - protein, 9 aa, Homo Sapiens
LAINGSANR

SEQ ID NO: 55982 - protein, 9 aa, Homo Sapiens
LANDPTSLR

SEQ ID NO: 55983 - protein, 9 aa, Homo Sapiens
LAQTGSLGR

SEQ ID NO: 55984 - protein, 9 aa, Homo Sapiens
LASQPSIPR

SEQ ID NO: 55985 - protein, 9 aa, Homo Sapiens
LAVEAGATR

SEQ ID NO: 55986 - protein, 9 aa, Homo Sapiens
LAVNISAAR

SEQ ID NO: 55987 - protein, 9 aa, Homo Sapiens
LGHPDTLNQ

SEQ ID NO: 55988 - protein, 9 aa, Homo Sapiens
LIIGPSKER

SEQ ID NO: 55989 - protein, 9 aa, Homo Sapiens
LPAEQGSPR

SEQ ID NO: 55990 - protein, 9 aa, Homo Sapiens
LPFGSSPHR

SEQ ID NO: 55991 - protein, 9 aa, Homo Sapiens
LSFEGATKR

SEQ ID NO: 55992 - protein, 9 aa, Homo Sapiens
LTAEAFGFK

SEQ ID NO: 55993 - protein, 9 aa, Homo Sapiens
LTAGVSAGR

SEQ ID NO: 55994 - protein, 9 aa, Homo Sapiens
LTAPSTSAR

SEQ ID NO: 55995 - protein, 9 aa, Homo Sapiens
LTFDGKRMR

SEQ ID NO: 55996 - protein, 9 aa, Homo Sapiens
LTFEQAVAR

SEQ ID NO: 55997 - protein, 9 aa, Homo Sapiens
LTMDSSGPK

SEQ ID NO: 55998 - protein, 9 aa, Homo Sapiens
LTSDISEER

SEQ ID NO: 55999 - protein, 9 aa, Homo Sapiens
LTSEVHSVR

SEQ ID NO: 56000 - protein, 9 aa, Homo Sapiens
LTVGFGLAR

SEQ ID NO: 56001 - protein, 9 aa, Homo Sapiens
LVAQATATR

SEQ ID NO: 56002 - protein, 9 aa, Homo Sapiens
LVAQTVGSR

SEQ ID NO: 56003 - protein, 9 aa, Homo Sapiens
LVCPSRSVP

SEQ ID NO: 56004 - protein, 9 aa, Homo Sapiens
LVIGGSSER

SEQ ID NO: 56005 - protein, 9 aa, Homo Sapiens
LVSQPGLNR

SEQ ID NO: 56006 - protein, 9 aa, Homo Sapiens
LVVENSAQR

SEQ ID NO: 56007 - protein, 9 aa, Homo Sapiens
LVVPPSRYR

SEQ ID NO: 56008 - protein, 9 aa, Homo Sapiens
LVVYPWTQR

SEQ ID NO: 56009 - protein, 9 aa, Homo Sapiens
MAAAAFAEK

SEQ ID NO: 56010 - protein, 9 aa, Homo Sapiens
MAAAVGVRG

SEQ ID NO: 56011 - protein, 9 aa, Homo Sapiens
MAGPGGLAR

SEQ ID NO: 56012 - protein, 9 aa, Homo Sapiens
MAIDGVAPR

SEQ ID NO: 56013 - protein, 9 aa, Homo Sapiens
MAVEAGQSR

SEQ ID NO: 56014 - protein, 9 aa, Homo Sapiens
MAVNVIGQR

SEQ ID NO: 56015 - protein, 9 aa, Homo Sapiens
MAVTALAAR

SEQ ID NO: 56016 - protein, 9 aa, Homo Sapiens
MIVRPSQPR

SEQ ID NO: 56017 - protein, 9 aa, Homo Sapiens
MPASVVGQR

SEQ ID NO: 56018 - protein, 9 aa, Homo Sapiens
MPHTSGMNR

SEQ ID NO: 56019 - protein, 9 aa, Homo Sapiens
MPIPGGNQR

SEQ ID NO: 56020 - protein, 9 aa, Homo Sapiens
MSASTTTLR

SEQ ID NO: 56021 - protein, 9 aa, Homo Sapiens
MSCPGSSYR

SEQ ID NO: 56022 - protein, 9 aa, Homo Sapiens
MSISGSSAR

SEQ ID NO: 56023 - protein, 9 aa, Homo Sapiens
MSSPPSAAR

SEQ ID NO: 56024 - protein, 9 aa, Homo Sapiens
MSVNPGMAR

SEQ ID NO: 56025 - protein, 9 aa, Homo Sapiens
MTGPGTHQL

SEQ ID NO: 56026 - protein, 9 aa, Homo Sapiens
MTIEELLTR

SEQ ID NO: 56027 - protein, 9 aa, Homo Sapiens
MTKKPGMFF

SEQ ID NO: 56028 - protein, 9 aa, Homo Sapiens
MTNLPAVGR

SEQ ID NO: 56029 - protein, 9 aa, Homo Sapiens
MVADVFSHR

SEQ ID NO: 56030 - protein, 9 aa, Homo Sapiens
MVAGTTMAM

SEQ ID NO: 56031 - protein, 9 aa, Homo Sapiens
MVITPQNGR

SEQ ID NO: 56032 - protein, 9 aa, Homo Sapiens
MVKFGGSGR

SEQ ID NO: 56033 - protein, 9 aa, Homo Sapiens
MVYDSPLCR

SEQ ID NO: 56034 - protein, 9 aa, Homo Sapiens
NANLPSSLR

SEQ ID NO: 56035 - protein, 9 aa, Homo Sapiens
NAVDVKQYR

SEQ ID NO: 56036 - protein, 9 aa, Homo Sapiens
NIKNSSVPR

SEQ ID NO: 56037 - protein, 9 aa, Homo Sapiens
NIPPPSVNR

SEQ ID NO: 56038 - protein, 9 aa, Homo Sapiens
NLLPSRDIQ

SEQ ID NO: 56039 - protein, 9 aa, Homo Sapiens
NLMGKTSER

SEQ ID NO: 56040 - protein, 9 aa, Homo Sapiens
NSIKPLRER

SEQ ID NO: 56041 - protein, 9 aa, Homo Sapiens
NTASIAQAR

SEQ ID NO: 56042 - protein, 9 aa, Homo Sapiens
NTIDPSHPM

SEQ ID NO: 56043 - protein, 9 aa, Homo Sapiens
NTNDFVTLR

SEQ ID NO: 56044 - protein, 9 aa, Homo Sapiens
NTTDLYSYR

SEQ ID NO: 56045 - protein, 9 aa, Homo Sapiens
NTVGLVVER

SEQ ID NO: 56046 - protein, 9 aa, Homo Sapiens
NVADLTSLR

SEQ ID NO: 56047 - protein, 9 aa, Homo Sapiens
NVKGPGLQR

SEQ ID NO: 56048 - protein, 9 aa, Homo Sapiens
NVNEVISNR

SEQ ID NO: 56049 - protein, 9 aa, Homo Sapiens
NVVNIIVAR

SEQ ID NO: 56050 - protein, 9 aa, Homo Sapiens
PDSPITLQS

SEQ ID NO: 56051 - protein, 9 aa, Homo Sapiens
PFDITVMIR

SEQ ID NO: 56052 - protein, 9 aa, Homo Sapiens
QAALASQYR

SEQ ID NO: 56053 - protein, 9 aa, Homo Sapiens
QAIKGMHIR

SEQ ID NO: 56054 - protein, 9 aa, Homo Sapiens
QAQKPSVPR

SEQ ID NO: 56055 - protein, 9 aa, Homo Sapiens
QGFFTGRGR

SEQ ID NO: 56056 - protein, 9 aa, Homo Sapiens
QIGPVSSSR

SEQ ID NO: 56057 - protein, 9 aa, Homo Sapiens
QILEQPKQR

SEQ ID NO: 56058 - protein, 9 aa, Homo Sapiens
QLSELTVER

SEQ ID NO: 56059 - protein, 9 aa, Homo Sapiens
QSIFNIGSR

SEQ ID NO: 56060 - protein, 9 aa, Homo Sapiens
QSYDNFSYR

SEQ ID NO: 56061 - protein, 9 aa, Homo Sapiens
QTAGLSLQR

SEQ ID NO: 56062 - protein, 9 aa, Homo Sapiens
QTHFQLAYR

SEQ ID NO: 56063 - protein, 9 aa, Homo Sapiens
QTILTEIYR

SEQ ID NO: 56064 - protein, 9 aa, Homo Sapiens
QTIQGILER

SEQ ID NO: 56065 - protein, 9 aa, Homo Sapiens
QTIQSFTLR

SEQ ID NO: 56066 - protein, 9 aa, Homo Sapiens
QTLSPQMWK

SEQ ID NO: 56067 - protein, 9 aa, Homo Sapiens
QTMTEVRAR

SEQ ID NO: 56068 - protein, 9 aa, Homo Sapiens
QTYVSGTLR

SEQ ID NO: 56069 - protein, 9 aa, Homo Sapiens
QVADVVVSR

SEQ ID NO: 56070 - protein, 9 aa, Homo Sapiens
QVAGITGAR

SEQ ID NO: 56071 - protein, 9 aa, Homo Sapiens
QVFEKSPLR

SEQ ID NO: 56072 - protein, 9 aa, Homo Sapiens
QVFSHLKRL

SEQ ID NO: 56073 - protein, 9 aa, Homo Sapiens
QVIESAMER

SEQ ID NO: 56074 - protein, 9 aa, Homo Sapiens
QVIKGVLFR

SEQ ID NO: 56075 - protein, 9 aa, Homo Sapiens
QVIPGSQTR

SEQ ID NO: 56076 - protein, 9 aa, Homo Sapiens
QVITIGNER

SEQ ID NO: 56077 - protein, 9 aa, Homo Sapiens
QVLQAMRQR

SEQ ID NO: 56078 - protein, 9 aa, Homo Sapiens
QVVDKVTQR

SEQ ID NO: 56079 - protein, 9 aa, Homo Sapiens
QVVKPTAER

SEQ ID NO: 56080 - protein, 9 aa, Homo Sapiens
SAAEVGFVR

SEQ ID NO: 56081 - protein, 9 aa, Homo Sapiens
SAAHLFGYR

SEQ ID NO: 56082 - protein, 9 aa, Homo Sapiens
SAAKLHALR

SEQ ID NO: 56083 - protein, 9 aa, Homo Sapiens
SAAPPTVGR

SEQ ID NO: 56084 - protein, 9 aa, Homo Sapiens
SAGGSFTVR

SEQ ID NO: 56085 - protein, 9 aa, Homo Sapiens
SAHFSPVLR

SEQ ID NO: 56086 - protein, 9 aa, Homo Sapiens
SAIGYLTSR

SEQ ID NO: 56087 - protein, 9 aa, Homo Sapiens
SAIPAYSKR

SEQ ID NO: 56088 - protein, 9 aa, Homo Sapiens
SAIVMMKNR

SEQ ID NO: 56089 - protein, 9 aa, Homo Sapiens
SALRPSTSR

SEQ ID NO: 56090 - protein, 9 aa, Homo Sapiens
SASLPSSGR

SEQ ID NO: 56091 - protein, 9 aa, Homo Sapiens
SATDITLRR

SEQ ID NO: 56092 - protein, 9 aa, Homo Sapiens
SAVAGRLER

SEQ ID NO: 56093 - protein, 9 aa, Homo Sapiens
SAVGKLSSR

SEQ ID NO: 56094 - protein, 9 aa, Homo Sapiens
SFDGSVRAR

SEQ ID NO: 56095 - protein, 9 aa, Homo Sapiens
SIEKLPCHR

SEQ ID NO: 56096 - protein, 9 aa, Homo Sapiens
SIIEHTRER

SEQ ID NO: 56097 - protein, 9 aa, Homo Sapiens
SIIGKGGQR

SEQ ID NO: 56098 - protein, 9 aa, Homo Sapiens
SIIGVTEPR

SEQ ID NO: 56099 - protein, 9 aa, Homo Sapiens
SISVPSTPR

SEQ ID NO: 56100 - protein, 9 aa, Homo Sapiens
SLADIMAKR

SEQ ID NO: 56101 - protein, 9 aa, Homo Sapiens
SLAPPSGER

SEQ ID NO: 56102 - protein, 9 aa, Homo Sapiens
SLNTPGSFR

SEQ ID NO: 56103 - protein, 9 aa, Homo Sapiens
SLPGPGAAR

SEQ ID NO: 56104 - protein, 9 aa, Homo Sapiens
SLYGPGTNR

SEQ ID NO: 56105 - protein, 9 aa, Homo Sapiens
SSALPSGTR

SEQ ID NO: 56106 - protein, 9 aa, Homo Sapiens
SSALPTTGR

SEQ ID NO: 56107 - protein, 9 aa, Homo Sapiens
SSASVTSVR

SEQ ID NO: 56108 - protein, 9 aa, Homo Sapiens
SSAWSTVFR

SEQ ID NO: 56109 - protein, 9 aa, Homo Sapiens
SSIDINSSR

SEQ ID NO: 56110 - protein, 9 aa, Homo Sapiens
SSIRPISER

SEQ ID NO: 56111 - protein, 9 aa, Homo Sapiens
SSKPSSIPR

SEQ ID NO: 56112 - protein, 9 aa, Homo Sapiens
SSMFGTLPR

SEQ ID NO: 56113 - protein, 9 aa, Homo Sapiens
SSSPVFTFR

SEQ ID NO: 56114 - protein, 9 aa, Homo Sapiens
SSSSPFSNR

SEQ ID NO: 56115 - protein, 9 aa, Homo Sapiens
STAANFLSR

SEQ ID NO: 56116 - protein, 9 aa, Homo Sapiens
STASVIQAR

SEQ ID NO: 56117 - protein, 9 aa, Homo Sapiens
STCSLGSVR

SEQ ID NO: 56118 - protein, 9 aa, Homo Sapiens
STFDTPYCR

SEQ ID NO: 56119 - protein, 9 aa, Homo Sapiens
STFEWVARR

SEQ ID NO: 56120 - protein, 9 aa, Homo Sapiens
STFRESFKK

SEQ ID NO: 56121 - protein, 9 aa, Homo Sapiens
STFTNITYR

SEQ ID NO: 56122 - protein, 9 aa, Homo Sapiens
STIDCGLVR

SEQ ID NO: 56123 - protein, 9 aa, Homo Sapiens
STIDPSGTR

SEQ ID NO: 56124 - protein, 9 aa, Homo Sapiens
STIEYVIQR

SEQ ID NO: 56125 - protein, 9 aa, Homo Sapiens
STIQPPSER

SEQ ID NO: 56126 - protein, 9 aa, Homo Sapiens
STISEVLGR

SEQ ID NO: 56127 - protein, 9 aa, Homo Sapiens
STKFPAYER

SEQ ID NO: 56128 - protein, 9 aa, Homo Sapiens
STKPPGTFL

SEQ ID NO: 56129 - protein, 9 aa, Homo Sapiens
STLPATSTR

SEQ ID NO: 56130 - protein, 9 aa, Homo Sapiens
STNNPSELR

SEQ ID NO: 56131 - protein, 9 aa, Homo Sapiens
STPDLAANR

SEQ ID NO: 56132 - protein, 9 aa, Homo Sapiens
STPPPFQGR

SEQ ID NO: 56133 - protein, 9 aa, Homo Sapiens
STRPPSVTR

SEQ ID NO: 56134 - protein, 9 aa, Homo Sapiens
STSSVSEIR

SEQ ID NO: 56135 - protein, 9 aa, Homo Sapiens
STTLLVSYR

SEQ ID NO: 56136 - protein, 9 aa, Homo Sapiens
STVESLSKR

SEQ ID NO: 56137 - protein, 9 aa, Homo Sapiens
STVGSAISR

SEQ ID NO: 56138 - protein, 9 aa, Homo Sapiens
STVGWASQK

SEQ ID NO: 56139 - protein, 9 aa, Homo Sapiens
STVSPPAGR

SEQ ID NO: 56140 - protein, 9 aa, Homo Sapiens
STVTGKLER

SEQ ID NO: 56141 - protein, 9 aa, Homo Sapiens
SVAALTSKR

SEQ ID NO: 56142 - protein, 9 aa, Homo Sapiens
SVAFSSDNR

SEQ ID NO: 56143 - protein, 9 aa, Homo Sapiens
SVELVTQQM

SEQ ID NO: 56144 - protein, 9 aa, Homo Sapiens
SVFHVGAER

SEQ ID NO: 56145 - protein, 9 aa, Homo Sapiens
SVHAPSLRR

SEQ ID NO: 56146 - protein, 9 aa, Homo Sapiens
SVHLSPCFR

SEQ ID NO: 56147 - protein, 9 aa, Homo Sapiens
SVHVPGMNR

SEQ ID NO: 56148 - protein, 9 aa, Homo Sapiens
SVIGAREER

SEQ ID NO: 56149 - protein, 9 aa, Homo Sapiens
SVIKNLQSR

SEQ ID NO: 56150 - protein, 9 aa, Homo Sapiens
SVIPNCQFR

SEQ ID NO: 56151 - protein, 9 aa, Homo Sapiens
SVIQDMAVR

SEQ ID NO: 56152 - protein, 9 aa, Homo Sapiens
SVIQTAGYR

SEQ ID NO: 56153 - protein, 9 aa, Homo Sapiens
SVISGISSR

SEQ ID NO: 56154 - protein, 9 aa, Homo Sapiens
SVISPVGNR

SEQ ID NO: 56155 - protein, 9 aa, Homo Sapiens
SVKDYCFAR

SEQ ID NO: 56156 - protein, 9 aa, Homo Sapiens
SVKEVALGR

SEQ ID NO: 56157 - protein, 9 aa, Homo Sapiens
SVKEWTITY

SEQ ID NO: 56158 - protein, 9 aa, Homo Sapiens
SVKFGATLR

SEQ ID NO: 56159 - protein, 9 aa, Homo Sapiens
SVLEGMGFR

SEQ ID NO: 56160 - protein, 9 aa, Homo Sapiens
SVLEKLGER

SEQ ID NO: 56161 - protein, 9 aa, Homo Sapiens
SVLNFATNR

SEQ ID NO: 56162 - protein, 9 aa, Homo Sapiens
SVMGVTVSR

SEQ ID NO: 56163 - protein, 9 aa, Homo Sapiens
SVRENRSLF

SEQ ID NO: 56164 - protein, 9 aa, Homo Sapiens
SVSDIIRLR

SEQ ID NO: 56165 - protein, 9 aa, Homo Sapiens
SVSDLAPPR

SEQ ID NO: 56166 - protein, 9 aa, Homo Sapiens
SVSEVVVNR

SEQ ID NO: 56167 - protein, 9 aa, Homo Sapiens
SVSPVVHVR

SEQ ID NO: 56168 - protein, 9 aa, Homo Sapiens
SVTDAVALR

SEQ ID NO: 56169 - protein, 9 aa, Homo Sapiens
SVVEIASLR

SEQ ID NO: 56170 - protein, 9 aa, Homo Sapiens
TAAPPSVCR

SEQ ID NO: 56171 - protein, 9 aa, Homo Sapiens
TAMPPGTAR

SEQ ID NO: 56172 - protein, 9 aa, Homo Sapiens
TATEWSQPR

SEQ ID NO: 56173 - protein, 9 aa, Homo Sapiens
TAVAALSGR

SEQ ID NO: 56174 - protein, 9 aa, Homo Sapiens
TDLDTVPLR

SEQ ID NO: 56175 - protein, 9 aa, Homo Sapiens
TIGKKFEKR

SEQ ID NO: 56176 - protein, 9 aa, Homo Sapiens
TIIDIITHR

SEQ ID NO: 56177 - protein, 9 aa, Homo Sapiens
TIIEVNGKR

SEQ ID NO: 56178 - protein, 9 aa, Homo Sapiens
TIVNILTNR

SEQ ID NO: 56179 - protein, 9 aa, Homo Sapiens
TPAGGGFPR

SEQ ID NO: 56180 - protein, 9 aa, Homo Sapiens
TPYAGGLFR

SEQ ID NO: 56181 - protein, 9 aa, Homo Sapiens
TSAAIQAYR

SEQ ID NO: 56182 - protein, 9 aa, Homo Sapiens
TSGLPSSVR

SEQ ID NO: 56183 - protein, 9 aa, Homo Sapiens
TSSPSSIPR

SEQ ID NO: 56184 - protein, 9 aa, Homo Sapiens
TSYGGTLRR

SEQ ID NO: 56185 - protein, 9 aa, Homo Sapiens
TTAPVVSTR

SEQ ID NO: 56186 - protein, 9 aa, Homo Sapiens
TTFGPKSQR

SEQ ID NO: 56187 - protein, 9 aa, Homo Sapiens
TTFPESHLR

SEQ ID NO: 56188 - protein, 9 aa, Homo Sapiens
TTISLETAR

SEQ ID NO: 56189 - protein, 9 aa, Homo Sapiens
TTRDSPVLR

SEQ ID NO: 56190 - protein, 9 aa, Homo Sapiens
TTTATVLAR

SEQ ID NO: 56191 - protein, 9 aa, Homo Sapiens
TTTEHRFFR

SEQ ID NO: 56192 - protein, 9 aa, Homo Sapiens
TTTEIIKRR

SEQ ID NO: 56193 - protein, 9 aa, Homo Sapiens
TTTSLVLER

SEQ ID NO: 56194 - protein, 9 aa, Homo Sapiens
TTVDIFHKK

SEQ ID NO: 56195 - protein, 9 aa, Homo Sapiens
TTVEGLITR

SEQ ID NO: 56196 - protein, 9 aa, Homo Sapiens
TTVGTLSQR

SEQ ID NO: 56197 - protein, 9 aa, Homo Sapiens
TVAAVFRGR

SEQ ID NO: 56198 - protein, 9 aa, Homo Sapiens
TVDGPREPR

SEQ ID NO: 56199 - protein, 9 aa, Homo Sapiens
TVFESRNLR

SEQ ID NO: 56200 - protein, 9 aa, Homo Sapiens
TVFRSTDFF

SEQ ID NO: 56201 - protein, 9 aa, Homo Sapiens
TVIDIHTLR

SEQ ID NO: 56202 - protein, 9 aa, Homo Sapiens
TVIKQTMER

SEQ ID NO: 56203 - protein, 9 aa, Homo Sapiens
TVIKVMTTR

SEQ ID NO: 56204 - protein, 9 aa, Homo Sapiens
TVIPPGLTR

SEQ ID NO: 56205 - protein, 9 aa, Homo Sapiens
TVISRVIGR

SEQ ID NO: 56206 - protein, 9 aa, Homo Sapiens
TVLFTGVRR

SEQ ID NO: 56207 - protein, 9 aa, Homo Sapiens
TVMVPSLLR

SEQ ID NO: 56208 - protein, 9 aa, Homo Sapiens
TVQLRNPPR

SEQ ID NO: 56209 - protein, 9 aa, Homo Sapiens
TVVGDVGGR

SEQ ID NO: 56210 - protein, 9 aa, Homo Sapiens
TVVQNLMER

SEQ ID NO: 56211 - protein, 9 aa, Homo Sapiens
TVVTGTLER

SEQ ID NO: 56212 - protein, 9 aa, Homo Sapiens
TVYHSPVSR

SEQ ID NO: 56213 - protein, 9 aa, Homo Sapiens
VATDITSTR

SEQ ID NO: 56214 - protein, 9 aa, Homo Sapiens
VAVTPFSLR

SEQ ID NO: 56215 - protein, 9 aa, Homo Sapiens
VDVRIGMTR

SEQ ID NO: 56216 - protein, 9 aa, Homo Sapiens
VPDTIATLR

SEQ ID NO: 56217 - protein, 9 aa, Homo Sapiens
VPFGAGRHR

SEQ ID NO: 56218 - protein, 9 aa, Homo Sapiens
VPGPPGSSR

SEQ ID NO: 56219 - protein, 9 aa, Homo Sapiens
VSLGPGARG

SEQ ID NO: 56220 - protein, 9 aa, Homo Sapiens
VTIKKDVDG

SEQ ID NO: 56221 - protein, 9 aa, Homo Sapiens
VVAPPGAPK

SEQ ID NO: 56222 - protein, 9 aa, Homo Sapiens
VVAPRLNSR

SEQ ID NO: 56223 - protein, 9 aa, Homo Sapiens
VVFGGGEAR

SEQ ID NO: 56224 - protein, 9 aa, Homo Sapiens
VVGPPGATR

SEQ ID NO: 56225 - protein, 9 aa, Homo Sapiens
VVGPVSLPR

SEQ ID NO: 56226 - protein, 9 aa, Homo Sapiens
VVIIVRAPR

SEQ ID NO: 56227 - protein, 9 aa, Homo Sapiens
WAAAFSSQR

SEQ ID NO: 56228 - protein, 9 aa, Homo Sapiens
WSAPNYCYR

SEQ ID NO: 56229 - protein, 9 aa, Homo Sapiens
WSESVQLSR

SEQ ID NO: 56230 - protein, 9 aa, Homo Sapiens
WTQGKGLGR

SEQ ID NO: 56231 - protein, 9 aa, Homo Sapiens
WTYDPNEPR

SEQ ID NO: 56232 - protein, 9 aa, Homo Sapiens
WVIGSVVAR

SEQ ID NO: 56233 - protein, 9 aa, Homo Sapiens
WVRCPFEQR

SEQ ID NO: 56234 - protein, 9 aa, Homo Sapiens
WVSADGFLR

SEQ ID NO: 56235 - protein, 9 aa, Homo Sapiens
WVSENFQER

SEQ ID NO: 56236 - protein, 9 aa, Homo Sapiens
WVVGKKSDR

SEQ ID NO: 56237 - protein, 9 aa, Homo Sapiens
YAAFIFGGR

SEQ ID NO: 56238 - protein, 9 aa, Homo Sapiens
YAAFVQTHR

SEQ ID NO: 56239 - protein, 9 aa, Homo Sapiens
YAASIIIRR

SEQ ID NO: 56240 - protein, 9 aa, Homo Sapiens
YAINVSQKR

SEQ ID NO: 56241 - protein, 9 aa, Homo Sapiens
YALDPSFPR

SEQ ID NO: 56242 - protein, 9 aa, Homo Sapiens
YAVGLAALR

SEQ ID NO: 56243 - protein, 9 aa, Homo Sapiens
YLADPMKAR

SEQ ID NO: 56244 - protein, 9 aa, Homo Sapiens
YNIHWPIRR

SEQ ID NO: 56245 - protein, 9 aa, Homo Sapiens
YSCEFGSAK

SEQ ID NO: 56246 - protein, 9 aa, Homo Sapiens
YSFSATSSR

SEQ ID NO: 56247 - protein, 9 aa, Homo Sapiens
YSFTTTAER

SEQ ID NO: 56248 - protein, 9 aa, Homo Sapiens
YSGPTSVSR

SEQ ID NO: 56249 - protein, 9 aa, Homo Sapiens
YSQINGASR

SEQ ID NO: 56250 - protein, 9 aa, Homo Sapiens
YSSDVIQHR

SEQ ID NO: 56251 - protein, 9 aa, Homo Sapiens
YSSTQVSVR

SEQ ID NO: 56252 - protein, 9 aa, Homo Sapiens
YSTNIFTKR

SEQ ID NO: 56253 - protein, 9 aa, Homo Sapiens
YSVGAGHFR

SEQ ID NO: 56254 - protein, 9 aa, Homo Sapiens
YSVVPMTSR

SEQ ID NO: 56255 - protein, 9 aa, Homo Sapiens
YTAPPLQSK

SEQ ID NO: 56256 - protein, 9 aa, Homo Sapiens
YTAQPTQGY

SEQ ID NO: 56257 - protein, 9 aa, Homo Sapiens
YTASVVRSR

SEQ ID NO: 56258 - protein, 9 aa, Homo Sapiens
YTIIERNNR

SEQ ID NO: 56259 - protein, 9 aa, Homo Sapiens
YTISDTIAR

SEQ ID NO: 56260 - protein, 9 aa, Homo Sapiens
YTMVSPSGR

SEQ ID NO: 56261 - protein, 9 aa, Homo Sapiens
YTPTISRER

SEQ ID NO: 56262 - protein, 9 aa, Homo Sapiens
YTQPGPGYR

SEQ ID NO: 56263 - protein, 9 aa, Homo Sapiens
YTRESTEFL

SEQ ID NO: 56264 - protein, 9 aa, Homo Sapiens
YTSGSFQTR

SEQ ID NO: 56265 - protein, 9 aa, Homo Sapiens
YTSNIYTRR

SEQ ID NO: 56266 - protein, 9 aa, Homo Sapiens
YVANVGTNR

SEQ ID NO: 56267 - protein, 9 aa, Homo Sapiens
YVETPRGLR

SEQ ID NO: 56268 - protein, 9 aa, Homo Sapiens
YVFADSKKR

SEQ ID NO: 56269 - protein, 9 aa, Homo Sapiens
YVFGGVRSR

SEQ ID NO: 56270 - protein, 9 aa, Homo Sapiens
YVFPVSQKR

SEQ ID NO: 56271 - protein, 9 aa, Homo Sapiens
YVGEIIGKR

SEQ ID NO: 56272 - protein, 9 aa, Homo Sapiens
YVGRPSLNR

SEQ ID NO: 56273 - protein, 9 aa, Homo Sapiens
YVIESARQR

SEQ ID NO: 56274 - protein, 9 aa, Homo Sapiens
YVIKPGNTK

SEQ ID NO: 56275 - protein, 9 aa, Homo Sapiens
YVMPSSSAR

SEQ ID NO: 56276 - protein, 9 aa, Homo Sapiens
YVTTSTRTY

SEQ ID NO: 56277 - protein, 9 aa, Homo Sapiens
YVVEKVLDR

SEQ ID NO: 56278 - protein, 9 aa, Homo Sapiens
YVVGGSIPR

SEQ ID NO: 56279 - protein, 9 aa, Homo Sapiens
YVYCKTHPR

SEQ ID NO: 56280 - protein, 10 aa, Homo Sapiens
ALPTWKMAAR

SEQ ID NO: 56281 - protein, 10 aa, Homo Sapiens
ATIDDVLSAR

SEQ ID NO: 56282 - protein, 10 aa, Homo Sapiens
AVIDVDVMAR

SEQ ID NO: 56283 - protein, 10 aa, Homo Sapiens
AVIENLPKKR

SEQ ID NO: 56284 - protein, 10 aa, Homo Sapiens
AVIHLALKER

SEQ ID NO: 56285 - protein, 10 aa, Homo Sapiens
AVPDAVGKCR

SEQ ID NO: 56286 - protein, 10 aa, Homo Sapiens
AVPEAIPTPR

SEQ ID NO: 56287 - protein, 10 aa, Homo Sapiens
AVVPFLPLQR

SEQ ID NO: 56288 - protein, 10 aa, Homo Sapiens
CTADWLPAGR

SEQ ID NO: 56289 - protein, 10 aa, Homo Sapiens
CTADWLPIGR

SEQ ID NO: 56290 - protein, 10 aa, Homo Sapiens
CTVDWLPLGR

SEQ ID NO: 56291 - protein, 10 aa, Homo Sapiens
DAAEAGLLSR

SEQ ID NO: 56292 - protein, 10 aa, Homo Sapiens
DAAFIIGSGR

SEQ ID NO: 56293 - protein, 10 aa, Homo Sapiens
DAAGPREAFR

SEQ ID NO: 56294 - protein, 10 aa, Homo Sapiens
DAAIPSKSRL

SEQ ID NO: 56295 - protein, 10 aa, Homo Sapiens
DAAPGGSEKL

SEQ ID NO: 56296 - protein, 10 aa, Homo Sapiens
DAFYSKTKRF

SEQ ID NO: 56297 - protein, 10 aa, Homo Sapiens
DAIRGGLPKL

SEQ ID NO: 56298 - protein, 10 aa, Homo Sapiens
DAYGSELVER

SEQ ID NO: 56299 - protein, 10 aa, Homo Sapiens
DAYPKNPHLR

SEQ ID NO: 56300 - protein, 10 aa, Homo Sapiens
DIICGFLKER

SEQ ID NO: 56301 - protein, 10 aa, Homo Sapiens
DIIHLHSQRL

SEQ ID NO: 56302 - protein, 10 aa, Homo Sapiens
DIMDSSLTRR

SEQ ID NO: 56303 - protein, 10 aa, Homo Sapiens
DIYDRKNMPR

SEQ ID NO: 56304 - protein, 10 aa, Homo Sapiens
DIYEFLPSKR

SEQ ID NO: 56305 - protein, 10 aa, Homo Sapiens
DLFPTSDTPR

SEQ ID NO: 56306 - protein, 10 aa, Homo Sapiens
DLISPRQPRL

SEQ ID NO: 56307 - protein, 10 aa, Homo Sapiens
DSAGPWTMSR

SEQ ID NO: 56308 - protein, 10 aa, Homo Sapiens
DSAPPSSVAR

SEQ ID NO: 56309 - protein, 10 aa, Homo Sapiens
DSAPPTPVNR

SEQ ID NO: 56310 - protein, 10 aa, Homo Sapiens
DSATGLTATR

SEQ ID NO: 56311 - protein, 10 aa, Homo Sapiens
DSFPERRAPR

SEQ ID NO: 56312 - protein, 10 aa, Homo Sapiens
DSIEAELTRR

SEQ ID NO: 56313 - protein, 10 aa, Homo Sapiens
DSRDGKFIHR

SEQ ID NO: 56314 - protein, 10 aa, Homo Sapiens
DSVGKLVTVR

SEQ ID NO: 56315 - protein, 10 aa, Homo Sapiens
DSYTATGYGR

SEQ ID NO: 56316 - protein, 10 aa, Homo Sapiens
DTAAGGFQQR

SEQ ID NO: 56317 - protein, 10 aa, Homo Sapiens
DTAALSHARL

SEQ ID NO: 56318 - protein, 10 aa, Homo Sapiens
DTAAWTVGRI

SEQ ID NO: 56319 - protein, 10 aa, Homo Sapiens
DTACVGPTLR

SEQ ID NO: 56320 - protein, 10 aa, Homo Sapiens
DTAPSGVSRF

SEQ ID NO: 56321 - protein, 10 aa, Homo Sapiens
DTFEALKRNR

SEQ ID NO: 56322 - protein, 10 aa, Homo Sapiens
DTFPSGIIGR

SEQ ID NO: 56323 - protein, 10 aa, Homo Sapiens
DTIAKVNAAM

SEQ ID NO: 56324 - protein, 10 aa, Homo Sapiens
DTICGKSVER

SEQ ID NO: 56325 - protein, 10 aa, Homo Sapiens
DTICQINSER

SEQ ID NO: 56326 - protein, 10 aa, Homo Sapiens
DTIDERTINK

SEQ ID NO: 56327 - protein, 10 aa, Homo Sapiens
DTIDIAPNHR

SEQ ID NO: 56328 - protein, 10 aa, Homo Sapiens
DTIDSYMNRL

SEQ ID NO: 56329 - protein, 10 aa, Homo Sapiens
DTIDVSNLNR

SEQ ID NO: 56330 - protein, 10 aa, Homo Sapiens
DTIEKSNLNR

SEQ ID NO: 56331 - protein, 10 aa, Homo Sapiens
DTIIDIITHR

SEQ ID NO: 56332 - protein, 10 aa, Homo Sapiens
DTIRPEHVLR

SEQ ID NO: 56333 - protein, 10 aa, Homo Sapiens
DTIVGMLHNR

SEQ ID NO: 56334 - protein, 10 aa, Homo Sapiens
DTMKVLGVQR

SEQ ID NO: 56335 - protein, 10 aa, Homo Sapiens
DTPERGFSLR

SEQ ID NO: 56336 - protein, 10 aa, Homo Sapiens
DTPLFIGKVR

SEQ ID NO: 56337 - protein, 10 aa, Homo Sapiens
DTQHFISKER

SEQ ID NO: 56338 - protein, 10 aa, Homo Sapiens
DTRMGPLINR

SEQ ID NO: 56339 - protein, 10 aa, Homo Sapiens
DTSGGTTALR

SEQ ID NO: 56340 - protein, 10 aa, Homo Sapiens
DTSNIITVRV

SEQ ID NO: 56341 - protein, 10 aa, Homo Sapiens
DTSSRSHIFR

SEQ ID NO: 56342 - protein, 10 aa, Homo Sapiens
DTTSIPLRLC

SEQ ID NO: 56343 - protein, 10 aa, Homo Sapiens
DTTSTGLAQR

SEQ ID NO: 56344 - protein, 10 aa, Homo Sapiens
DTVAQITQRF

SEQ ID NO: 56345 - protein, 10 aa, Homo Sapiens
DTVATLPRGR

SEQ ID NO: 56346 - protein, 10 aa, Homo Sapiens
DTVDLTSVLR

SEQ ID NO: 56347 - protein, 10 aa, Homo Sapiens
DTVSVPYVFR

SEQ ID NO: 56348 - protein, 10 aa, Homo Sapiens
DTVTMQVTAR

SEQ ID NO: 56349 - protein, 10 aa, Homo Sapiens
DTWAGSHSLR

SEQ ID NO: 56350 - protein, 10 aa, Homo Sapiens
DTYPSISNAR

SEQ ID NO: 56351 - protein, 10 aa, Homo Sapiens
DTYTKKQVLR

SEQ ID NO: 56352 - protein, 10 aa, Homo Sapiens
DVAAVVDGRL

SEQ ID NO: 56353 - protein, 10 aa, Homo Sapiens
DVASFFGKRR

SEQ ID NO: 56354 - protein, 10 aa, Homo Sapiens
DVCQLVYVER

SEQ ID NO: 56355 - protein, 10 aa, Homo Sapiens
DVETVPQTHR

SEQ ID NO: 56356 - protein, 10 aa, Homo Sapiens
DVFEGSIIRC

SEQ ID NO: 56357 - protein, 10 aa, Homo Sapiens
DVFWLRFSNR

SEQ ID NO: 56358 - protein, 10 aa, Homo Sapiens
DVHNFPGTSR

SEQ ID NO: 56359 - protein, 10 aa, Homo Sapiens
DVIDDASSRR

SEQ ID NO: 56360 - protein, 10 aa, Homo Sapiens
DVIDEGKANR

SEQ ID NO: 56361 - protein, 10 aa, Homo Sapiens
DVIDGPISQR

SEQ ID NO: 56362 - protein, 10 aa, Homo Sapiens
DVIKPGTVKR

SEQ ID NO: 56363 - protein, 10 aa, Homo Sapiens
DVIKSGCSAR

SEQ ID NO: 56364 - protein, 10 aa, Homo Sapiens
DVISMTANRL

SEQ ID NO: 56365 - protein, 10 aa, Homo Sapiens
DVISNINITR

SEQ ID NO: 56366 - protein, 10 aa, Homo Sapiens
DVLNPSGTQR

SEQ ID NO: 56367 - protein, 10 aa, Homo Sapiens
DVMASGTVKR

SEQ ID NO: 56368 - protein, 10 aa, Homo Sapiens
DVMIHPVTNR

SEQ ID NO: 56369 - protein, 10 aa, Homo Sapiens
DVQEFKSSFK

SEQ ID NO: 56370 - protein, 10 aa, Homo Sapiens
DVSPFPPRKR

SEQ ID NO: 56371 - protein, 10 aa, Homo Sapiens
DVTSTTSSRV

SEQ ID NO: 56372 - protein, 10 aa, Homo Sapiens
DVVPYPISLR

SEQ ID NO: 56373 - protein, 10 aa, Homo Sapiens
DVYDAFPPLR

SEQ ID NO: 56374 - protein, 10 aa, Homo Sapiens
DVYENLYAGR

SEQ ID NO: 56375 - protein, 10 aa, Homo Sapiens
EAAAVHGARF

SEQ ID NO: 56376 - protein, 10 aa, Homo Sapiens
EAAFATKDRL

SEQ ID NO: 56377 - protein, 10 aa, Homo Sapiens
EAFEHPNVVR

SEQ ID NO: 56378 - protein, 10 aa, Homo Sapiens
EAFFSKTKRF

SEQ ID NO: 56379 - protein, 10 aa, Homo Sapiens
EAFGKIVAER

SEQ ID NO: 56380 - protein, 10 aa, Homo Sapiens
EAFKPILSTR

SEQ ID NO: 56381 - protein, 10 aa, Homo Sapiens
EAFPSQGTKR

SEQ ID NO: 56382 - protein, 10 aa, Homo Sapiens
EAFSCIPSMR

SEQ ID NO: 56383 - protein, 10 aa, Homo Sapiens
EAFSLDSSLR

SEQ ID NO: 56384 - protein, 10 aa, Homo Sapiens
EAIGPVHQNR

SEQ ID NO: 56385 - protein, 10 aa, Homo Sapiens
EAINITNNER

SEQ ID NO: 56386 - protein, 10 aa, Homo Sapiens
EAISLLNSER

SEQ ID NO: 56387 - protein, 10 aa, Homo Sapiens
EAISVVAQRL

SEQ ID NO: 56388 - protein, 10 aa, Homo Sapiens
EALGSGLVSR

SEQ ID NO: 56389 - protein, 10 aa, Homo Sapiens
EANSNAVRFR

SEQ ID NO: 56390 - protein, 10 aa, Homo Sapiens
EAVAPEFTNR

SEQ ID NO: 56391 - protein, 10 aa, Homo Sapiens
EAVDISSKRM

SEQ ID NO: 56392 - protein, 10 aa, Homo Sapiens
EAVGVDISGR

SEQ ID NO: 56393 - protein, 10 aa, Homo Sapiens
EAVHDLLRPR

SEQ ID NO: 56394 - protein, 10 aa, Homo Sapiens
EAYNETFSNR

SEQ ID NO: 56395 - protein, 10 aa, Homo Sapiens
EIASVAYRYR

SEQ ID NO: 56396 - protein, 10 aa, Homo Sapiens
EIGPVSSSRF

SEQ ID NO: 56397 - protein, 10 aa, Homo Sapiens
EIIEAPMAWR

SEQ ID NO: 56398 - protein, 10 aa, Homo Sapiens
EIIEEHLANR

SEQ ID NO: 56399 - protein, 10 aa, Homo Sapiens
EIIIVDTSGR

SEQ ID NO: 56400 - protein, 10 aa, Homo Sapiens
EIINEDIAKR

SEQ ID NO: 56401 - protein, 10 aa, Homo Sapiens
EIIQSTPYGR

SEQ ID NO: 56402 - protein, 10 aa, Homo Sapiens
EIKKPPVSER

SEQ ID NO: 56403 - protein, 10 aa, Homo Sapiens
EIVHGDLSPR

SEQ ID NO: 56404 - protein, 10 aa, Homo Sapiens
EIYEFAATQR

SEQ ID NO: 56405 - protein, 10 aa, Homo Sapiens
EIYGGSDSRF

SEQ ID NO: 56406 - protein, 10 aa, Homo Sapiens
EIYSFSESLR

SEQ ID NO: 56407 - protein, 10 aa, Homo Sapiens
EIYTGTSVAR

SEQ ID NO: 56408 - protein, 10 aa, Homo Sapiens
ELFHQQGTPR

SEQ ID NO: 56409 - protein, 10 aa, Homo Sapiens
ELISTTANYR

SEQ ID NO: 56410 - protein, 10 aa, Homo Sapiens
ELMDKPLTFR

SEQ ID NO: 56411 - protein, 10 aa, Homo Sapiens
ELPIVTPALR

SEQ ID NO: 56412 - protein, 10 aa, Homo Sapiens
ELRPLPVSVR

SEQ ID NO: 56413 - protein, 10 aa, Homo Sapiens
ELYAEKVATR

SEQ ID NO: 56414 - protein, 10 aa, Homo Sapiens
ESAAKLHALR

SEQ ID NO: 56415 - protein, 10 aa, Homo Sapiens
ESASASETLR

SEQ ID NO: 56416 - protein, 10 aa, Homo Sapiens
ESFGFTADLR

SEQ ID NO: 56417 - protein, 10 aa, Homo Sapiens
ESFGPQPISR

SEQ ID NO: 56418 - protein, 10 aa, Homo Sapiens
ESFPGSFRGR

SEQ ID NO: 56419 - protein, 10 aa, Homo Sapiens
ESFSPGDTPR

SEQ ID NO: 56420 - protein, 10 aa, Homo Sapiens
ESIDDALNCR

SEQ ID NO: 56421 - protein, 10 aa, Homo Sapiens
ESIGRVLAQR

SEQ ID NO: 56422 - protein, 10 aa, Homo Sapiens
ESIHQYLLQR

SEQ ID NO: 56423 - protein, 10 aa, Homo Sapiens
ESMDTPTSTR

SEQ ID NO: 56424 - protein, 10 aa, Homo Sapiens
ESTTVATRRL

SEQ ID NO: 56425 - protein, 10 aa, Homo Sapiens
ESVGGRVAER

SEQ ID NO: 56426 - protein, 10 aa, Homo Sapiens
ESVGSMAKRL

SEQ ID NO: 56427 - protein, 10 aa, Homo Sapiens
ESVSGLLMKR

SEQ ID NO: 56428 - protein, 10 aa, Homo Sapiens
ETAEQGLLNR

SEQ ID NO: 56429 - protein, 10 aa, Homo Sapiens
ETAETFDSMR

SEQ ID NO: 56430 - protein, 10 aa, Homo Sapiens
ETAGSTKYRL

SEQ ID NO: 56431 - protein, 10 aa, Homo Sapiens
ETAGSTSIPK

SEQ ID NO: 56432 - protein, 10 aa, Homo Sapiens
ETALNSKAYK

SEQ ID NO: 56433 - protein, 10 aa, Homo Sapiens
ETAPRHMMRL

SEQ ID NO: 56434 - protein, 10 aa, Homo Sapiens
ETASKTLSRF

SEQ ID NO: 56435 - protein, 10 aa, Homo Sapiens
ETASNEVVYR

SEQ ID NO: 56436 - protein, 10 aa, Homo Sapiens
ETAYHMAVAR

SEQ ID NO: 56437 - protein, 10 aa, Homo Sapiens
ETFDFQAMGR

SEQ ID NO: 56438 - protein, 10 aa, Homo Sapiens
ETFDKTILRA

SEQ ID NO: 56439 - protein, 10 aa, Homo Sapiens
ETFDYIGSSR

SEQ ID NO: 56440 - protein, 10 aa, Homo Sapiens
ETFEHPNVVR

SEQ ID NO: 56441 - protein, 10 aa, Homo Sapiens
ETFSYPDFLR

SEQ ID NO: 56442 - protein, 10 aa, Homo Sapiens
ETFTHHLQRL

SEQ ID NO: 56443 - protein, 10 aa, Homo Sapiens
ETHERGVSIR

SEQ ID NO: 56444 - protein, 10 aa, Homo Sapiens
ETHGNLMTER

SEQ ID NO: 56445 - protein, 10 aa, Homo Sapiens
ETHSHFLARL

SEQ ID NO: 56446 - protein, 10 aa, Homo Sapiens
ETICRVTGGM

SEQ ID NO: 56447 - protein, 10 aa, Homo Sapiens
ETIEGMLLRL

SEQ ID NO: 56448 - protein, 10 aa, Homo Sapiens
ETIFGNRIKR

SEQ ID NO: 56449 - protein, 10 aa, Homo Sapiens
ETIGKKFEKR

SEQ ID NO: 56450 - protein, 10 aa, Homo Sapiens
ETIGTGGFAK

SEQ ID NO: 56451 - protein, 10 aa, Homo Sapiens
ETIKDGVSRF

SEQ ID NO: 56452 - protein, 10 aa, Homo Sapiens
ETIKGHSVRL

SEQ ID NO: 56453 - protein, 10 aa, Homo Sapiens
ETIKSLLIRR

SEQ ID NO: 56454 - protein, 10 aa, Homo Sapiens
ETISLAEQRL

SEQ ID NO: 56455 - protein, 10 aa, Homo Sapiens
ETKDLSMSTR

SEQ ID NO: 56456 - protein, 10 aa, Homo Sapiens
ETLGPKPAAR

SEQ ID NO: 56457 - protein, 10 aa, Homo Sapiens
ETLKHSGIGR

SEQ ID NO: 56458 - protein, 10 aa, Homo Sapiens
ETLPPVGVNR

SEQ ID NO: 56459 - protein, 10 aa, Homo Sapiens
ETLSAVTNNR

SEQ ID NO: 56460 - protein, 10 aa, Homo Sapiens
ETMGHSADRL

SEQ ID NO: 56461 - protein, 10 aa, Homo Sapiens
ETMGTIEVQR

SEQ ID NO: 56462 - protein, 10 aa, Homo Sapiens
ETMSPGVFSR

SEQ ID NO: 56463 - protein, 10 aa, Homo Sapiens
ETNGGQVTYR

SEQ ID NO: 56464 - protein, 10 aa, Homo Sapiens
ETNHTSRPRL

SEQ ID NO: 56465 - protein, 10 aa, Homo Sapiens
ETNMYEGVGR

SEQ ID NO: 56466 - protein, 10 aa, Homo Sapiens
ETPAISPSKR

SEQ ID NO: 56467 - protein, 10 aa, Homo Sapiens
ETPDPSGGFR

SEQ ID NO: 56468 - protein, 10 aa, Homo Sapiens
ETPGHTPSLR

SEQ ID NO: 56469 - protein, 10 aa, Homo Sapiens
ETPNMELSCR

SEQ ID NO: 56470 - protein, 10 aa, Homo Sapiens
ETPSAPLLSR

SEQ ID NO: 56471 - protein, 10 aa, Homo Sapiens
ETQPGRLLGR

SEQ ID NO: 56472 - protein, 10 aa, Homo Sapiens
ETQYSVDTRR

SEQ ID NO: 56473 - protein, 10 aa, Homo Sapiens
ETRDGQVLGR

SEQ ID NO: 56474 - protein, 10 aa, Homo Sapiens
ETSDFLGGLR

SEQ ID NO: 56475 - protein, 10 aa, Homo Sapiens
ETSGISIYRL

SEQ ID NO: 56476 - protein, 10 aa, Homo Sapiens
ETSPLGNARL

SEQ ID NO: 56477 - protein, 10 aa, Homo Sapiens
ETSPLTAEKL

SEQ ID NO: 56478 - protein, 10 aa, Homo Sapiens
ETSQAGLFRL

SEQ ID NO: 56479 - protein, 10 aa, Homo Sapiens
ETSRLTIAFF

SEQ ID NO: 56480 - protein, 10 aa, Homo Sapiens
ETSTEAATRL

SEQ ID NO: 56481 - protein, 10 aa, Homo Sapiens
ETTFGPKSQR

SEQ ID NO: 56482 - protein, 10 aa, Homo Sapiens
ETTPPLSTER

SEQ ID NO: 56483 - protein, 10 aa, Homo Sapiens
ETVGTGIMGR

SEQ ID NO: 56484 - protein, 10 aa, Homo Sapiens
ETVMLHARKL

SEQ ID NO: 56485 - protein, 10 aa, Homo Sapiens
ETVNFSGVKR

SEQ ID NO: 56486 - protein, 10 aa, Homo Sapiens
ETVNLRSLGF

SEQ ID NO: 56487 - protein, 10 aa, Homo Sapiens
ETVPAPSANK

SEQ ID NO: 56488 - protein, 10 aa, Homo Sapiens
ETVPYWTRSR

SEQ ID NO: 56489 - protein, 10 aa, Homo Sapiens
ETVQAQSSRL

SEQ ID NO: 56490 - protein, 10 aa, Homo Sapiens
ETVQLRNPPR

SEQ ID NO: 56491 - protein, 10 aa, Homo Sapiens
ETVRTSEVLR

SEQ ID NO: 56492 - protein, 10 aa, Homo Sapiens
ETVSEASQRL

SEQ ID NO: 56493 - protein, 10 aa, Homo Sapiens
ETVTGGFGAK

SEQ ID NO: 56494 - protein, 10 aa, Homo Sapiens
ETYEGSPVSK

SEQ ID NO: 56495 - protein, 10 aa, Homo Sapiens
ETYETKTALM

SEQ ID NO: 56496 - protein, 10 aa, Homo Sapiens
EVAAMENVHR

SEQ ID NO: 56497 - protein, 10 aa, Homo Sapiens
EVAEGGLPRA

SEQ ID NO: 56498 - protein, 10 aa, Homo Sapiens
EVAERLGVTR

SEQ ID NO: 56499 - protein, 10 aa, Homo Sapiens
EVAGFGESRC

SEQ ID NO: 56500 - protein, 10 aa, Homo Sapiens
EVAGFVLNRL

SEQ ID NO: 56501 - protein, 10 aa, Homo Sapiens
EVAGLRLRPR

SEQ ID NO: 56502 - protein, 10 aa, Homo Sapiens
EVAPCMGDRF

SEQ ID NO: 56503 - protein, 10 aa, Homo Sapiens
EVAPPASGTR

SEQ ID NO: 56504 - protein, 10 aa, Homo Sapiens
EVAPPEYHRK

SEQ ID NO: 56505 - protein, 10 aa, Homo Sapiens
EVAQLIQGGR

SEQ ID NO: 56506 - protein, 10 aa, Homo Sapiens
EVAQPSEVLR

SEQ ID NO: 56507 - protein, 10 aa, Homo Sapiens
EVASAVCLRL

SEQ ID NO: 56508 - protein, 10 aa, Homo Sapiens
EVASDLASSR

SEQ ID NO: 56509 - protein, 10 aa, Homo Sapiens
EVAVETTTPK

SEQ ID NO: 56510 - protein, 10 aa, Homo Sapiens
EVCPLSESRF

SEQ ID NO: 56511 - protein, 10 aa, Homo Sapiens
EVEPGVHLGR

SEQ ID NO: 56512 - protein, 10 aa, Homo Sapiens
EVFDKTYQFL

SEQ ID NO: 56513 - protein, 10 aa, Homo Sapiens
EVFESSVPQR

SEQ ID NO: 56514 - protein, 10 aa, Homo Sapiens
EVFEYSSSTR

SEQ ID NO: 56515 - protein, 10 aa, Homo Sapiens
EVFGTADLYR

SEQ ID NO: 56516 - protein, 10 aa, Homo Sapiens
EVFGVTDNPR

SEQ ID NO: 56517 - protein, 10 aa, Homo Sapiens
EVFLAQGTLR

SEQ ID NO: 56518 - protein, 10 aa, Homo Sapiens
EVFNKFFKER

SEQ ID NO: 56519 - protein, 10 aa, Homo Sapiens
EVFPLAMNYL

SEQ ID NO: 56520 - protein, 10 aa, Homo Sapiens
EVGPDAASLR

SEQ ID NO: 56521 - protein, 10 aa, Homo Sapiens
EVGPEGALGK

SEQ ID NO: 56522 - protein, 10 aa, Homo Sapiens
EVGPREAGLR

SEQ ID NO: 56523 - protein, 10 aa, Homo Sapiens
EVGTASPMAR

SEQ ID NO: 56524 - protein, 10 aa, Homo Sapiens
EVHYHLPVAR

SEQ ID NO: 56525 - protein, 10 aa, Homo Sapiens
EVIEGPQNAR

SEQ ID NO: 56526 - protein, 10 aa, Homo Sapiens
EVIKPWITKR

SEQ ID NO: 56527 - protein, 10 aa, Homo Sapiens
EVILATPYGR

SEQ ID NO: 56528 - protein, 10 aa, Homo Sapiens
EVIPEGAMLR

SEQ ID NO: 56529 - protein, 10 aa, Homo Sapiens
EVIQLQGDQR

SEQ ID NO: 56530 - protein, 10 aa, Homo Sapiens
EVIWPRPHPR

SEQ ID NO: 56531 - protein, 10 aa, Homo Sapiens
EVKNGIPSNR

SEQ ID NO: 56532 - protein, 10 aa, Homo Sapiens
EVKRPGESLR

SEQ ID NO: 56533 - protein, 10 aa, Homo Sapiens
EVLAGPLAQR

SEQ ID NO: 56534 - protein, 10 aa, Homo Sapiens
EVLKTRMALR

SEQ ID NO: 56535 - protein, 10 aa, Homo Sapiens
EVLPSPRGQR

SEQ ID NO: 56536 - protein, 10 aa, Homo Sapiens
EVLSKALSQR

SEQ ID NO: 56537 - protein, 10 aa, Homo Sapiens
EVMEYTTILR

SEQ ID NO: 56538 - protein, 10 aa, Homo Sapiens
EVMIAEPSCR

SEQ ID NO: 56539 - protein, 10 aa, Homo Sapiens
EVNAPIQGSR

SEQ ID NO: 56540 - protein, 10 aa, Homo Sapiens
EVNERHQILR

SEQ ID NO: 56541 - protein, 10 aa, Homo Sapiens
EVNPDCSVSR

SEQ ID NO: 56542 - protein, 10 aa, Homo Sapiens
EVNQETIQRL

SEQ ID NO: 56543 - protein, 10 aa, Homo Sapiens
EVNQPKFNQR

SEQ ID NO: 56544 - protein, 10 aa, Homo Sapiens
EVPLGQSIPR

SEQ ID NO: 56545 - protein, 10 aa, Homo Sapiens
EVPREKLASR

SEQ ID NO: 56546 - protein, 10 aa, Homo Sapiens
EVPSVPTNGM

SEQ ID NO: 56547 - protein, 10 aa, Homo Sapiens
EVQDLHLAQR

SEQ ID NO: 56548 - protein, 10 aa, Homo Sapiens
EVRQPPPRVR

SEQ ID NO: 56549 - protein, 10 aa, Homo Sapiens
EVSDVEIITR

SEQ ID NO: 56550 - protein, 10 aa, Homo Sapiens
EVSPPNLRGR

SEQ ID NO: 56551 - protein, 10 aa, Homo Sapiens
EVTDYAIARR

SEQ ID NO: 56552 - protein, 10 aa, Homo Sapiens
EVTEDVYTSR

SEQ ID NO: 56553 - protein, 10 aa, Homo Sapiens
EVTRILDGKR

SEQ ID NO: 56554 - protein, 10 aa, Homo Sapiens
EVVAGEFGSR

SEQ ID NO: 56555 - protein, 10 aa, Homo Sapiens
EVVDFIQSKI

SEQ ID NO: 56556 - protein, 10 aa, Homo Sapiens
EVVDKSQVSR

SEQ ID NO: 56557 - protein, 10 aa, Homo Sapiens
EVVDSNPYSR

SEQ ID NO: 56558 - protein, 10 aa, Homo Sapiens
EVVDVMVIGR

SEQ ID NO: 56559 - protein, 10 aa, Homo Sapiens
EVVELPVTER

SEQ ID NO: 56560 - protein, 10 aa, Homo Sapiens
EVVGNMAVSR

SEQ ID NO: 56561 - protein, 10 aa, Homo Sapiens
EVVQSSPVER

SEQ ID NO: 56562 - protein, 10 aa, Homo Sapiens
EVVSGSGLTR

SEQ ID NO: 56563 - protein, 10 aa, Homo Sapiens
EVVTGVIGQR

SEQ ID NO: 56564 - protein, 10 aa, Homo Sapiens
EVVTSMGTQR

SEQ ID NO: 56565 - protein, 10 aa, Homo Sapiens
EVWIPKNGTR

SEQ ID NO: 56566 - protein, 10 aa, Homo Sapiens
EVYDGPKNVR

SEQ ID NO: 56567 - protein, 10 aa, Homo Sapiens
EVYDQLFKSR

SEQ ID NO: 56568 - protein, 10 aa, Homo Sapiens
EVYNEFVRKR

SEQ ID NO: 56569 - protein, 10 aa, Homo Sapiens
EVYPFGIVGM

SEQ ID NO: 56570 - protein, 10 aa, Homo Sapiens
FAHHGRSLPR

SEQ ID NO: 56571 - protein, 10 aa, Homo Sapiens
FSFCLPGSVR

SEQ ID NO: 56572 - protein, 10 aa, Homo Sapiens
FSVEGQLEFR

SEQ ID NO: 56573 - protein, 10 aa, Homo Sapiens
FTAPSTVGKR

SEQ ID NO: 56574 - protein, 10 aa, Homo Sapiens
FTASGEAEAR

SEQ ID NO: 56575 - protein, 10 aa, Homo Sapiens
FTFTYVGGPR

SEQ ID NO: 56576 - protein, 10 aa, Homo Sapiens
FTIDDFEIGR

SEQ ID NO: 56577 - protein, 10 aa, Homo Sapiens
FTKFPTKTGR

SEQ ID NO: 56578 - protein, 10 aa, Homo Sapiens
FTKGIPNVLR

SEQ ID NO: 56579 - protein, 10 aa, Homo Sapiens
FTMASSPAQR

SEQ ID NO: 56580 - protein, 10 aa, Homo Sapiens
FTTGTPPAPR

SEQ ID NO: 56581 - protein, 10 aa, Homo Sapiens
FVAPPPKTQR

SEQ ID NO: 56582 - protein, 10 aa, Homo Sapiens
FVGTAGTVGR

SEQ ID NO: 56583 - protein, 10 aa, Homo Sapiens
FVISTDGSVR

SEQ ID NO: 56584 - protein, 10 aa, Homo Sapiens
GTIFIIKGVR

SEQ ID NO: 56585 - protein, 10 aa, Homo Sapiens
GVFEGIPTYR

SEQ ID NO: 56586 - protein, 10 aa, Homo Sapiens
GVPQALFGVR

SEQ ID NO: 56587 - protein, 10 aa, Homo Sapiens
HIIDPATSAR

SEQ ID NO: 56588 - protein, 10 aa, Homo Sapiens
HTIAPMGTRR

SEQ ID NO: 56589 - protein, 10 aa, Homo Sapiens
HTIQLIQHNR

SEQ ID NO: 56590 - protein, 10 aa, Homo Sapiens
HTKDLPFRCK

SEQ ID NO: 56591 - protein, 10 aa, Homo Sapiens
HTNDTIGSVR

SEQ ID NO: 56592 - protein, 10 aa, Homo Sapiens
HTRTPPIIHR

SEQ ID NO: 56593 - protein, 10 aa, Homo Sapiens
HTTEISVSRL

SEQ ID NO: 56594 - protein, 10 aa, Homo Sapiens
HVAESSLSRL

SEQ ID NO: 56595 - protein, 10 aa, Homo Sapiens
HVIIGLKTAK

SEQ ID NO: 56596 - protein, 10 aa, Homo Sapiens
HVIRGYVGNR

SEQ ID NO: 56597 - protein, 10 aa, Homo Sapiens
HVIVMAATNR

SEQ ID NO: 56598 - protein, 10 aa, Homo Sapiens
HVLDLVSHPR

SEQ ID NO: 56599 - protein, 10 aa, Homo Sapiens
HVMGFSVTGR

SEQ ID NO: 56600 - protein, 10 aa, Homo Sapiens
HVPCADSLPR

SEQ ID NO: 56601 - protein, 10 aa, Homo Sapiens
HVPGSPFTAR

SEQ ID NO: 56602 - protein, 10 aa, Homo Sapiens
HVYDGKFLAR

SEQ ID NO: 56603 - protein, 10 aa, Homo Sapiens
IDISDIAEKR

SEQ ID NO: 56604 - protein, 10 aa, Homo Sapiens
IPYDQSPGPK

SEQ ID NO: 56605 - protein, 10 aa, Homo Sapiens
LDTNADKQLS

SEQ ID NO: 56606 - protein, 10 aa, Homo Sapiens
LTAPSTSARL

SEQ ID NO: 56607 - protein, 10 aa, Homo Sapiens
LVAEGLATRR

SEQ ID NO: 56608 - protein, 10 aa, Homo Sapiens
MIREGKIAGR

SEQ ID NO: 56609 - protein, 10 aa, Homo Sapiens
MPIKLKIGLR

SEQ ID NO: 56610 - protein, 10 aa, Homo Sapiens
MTAPSNFLHR

SEQ ID NO: 56611 - protein, 10 aa, Homo Sapiens
MTCGNTKVLR

SEQ ID NO: 56612 - protein, 10 aa, Homo Sapiens
MTNEAGAPRL

SEQ ID NO: 56613 - protein, 10 aa, Homo Sapiens
MTQDAQNALR

SEQ ID NO: 56614 - protein, 10 aa, Homo Sapiens
MVADVFSHRF

SEQ ID NO: 56615 - protein, 10 aa, Homo Sapiens
MVAPGSVTSR

SEQ ID NO: 56616 - protein, 10 aa, Homo Sapiens
MVTGGANLGR

SEQ ID NO: 56617 - protein, 10 aa, Homo Sapiens
NIISGSGRPR

SEQ ID NO: 56618 - protein, 10 aa, Homo Sapiens
NSAGPYFNPR

SEQ ID NO: 56619 - protein, 10 aa, Homo Sapiens
NTFFAKNGYR

SEQ ID NO: 56620 - protein, 10 aa, Homo Sapiens
NTIDQKIVER

SEQ ID NO: 56621 - protein, 10 aa, Homo Sapiens
NVIDWSDVRK

SEQ ID NO: 56622 - protein, 10 aa, Homo Sapiens
NVKDKPTVER

SEQ ID NO: 56623 - protein, 10 aa, Homo Sapiens
PPGLAVKELK

SEQ ID NO: 56624 - protein, 10 aa, Homo Sapiens
QLAQFHFTNR

SEQ ID NO: 56625 - protein, 10 aa, Homo Sapiens
QTIEERKERL

SEQ ID NO: 56626 - protein, 10 aa, Homo Sapiens
QTISGTGALR

SEQ ID NO: 56627 - protein, 10 aa, Homo Sapiens
QTSGLPSSVR

SEQ ID NO: 56628 - protein, 10 aa, Homo Sapiens
QVEPGVHLGR

SEQ ID NO: 56629 - protein, 10 aa, Homo Sapiens
SAAGPGFTSR

SEQ ID NO: 56630 - protein, 10 aa, Homo Sapiens
SDMSLTACKV

SEQ ID NO: 56631 - protein, 10 aa, Homo Sapiens
SHIDRVYTLR

SEQ ID NO: 56632 - protein, 10 aa, Homo Sapiens
SIPGGYNALR

SEQ ID NO: 56633 - protein, 10 aa, Homo Sapiens
SIVEFQPTLR

SEQ ID NO: 56634 - protein, 10 aa, Homo Sapiens
SLSDFSWSQR

SEQ ID NO: 56635 - protein, 10 aa, Homo Sapiens
SPTDWTVSHR

SEQ ID NO: 56636 - protein, 10 aa, Homo Sapiens
SSADPSGAFR

SEQ ID NO: 56637 - protein, 10 aa, Homo Sapiens
SSAGGSFTVR

SEQ ID NO: 56638 - protein, 10 aa, Homo Sapiens
SSVDFSLSGR

SEQ ID NO: 56639 - protein, 10 aa, Homo Sapiens
SSYGQQSSFR

SEQ ID NO: 56640 - protein, 10 aa, Homo Sapiens
STFNFHPNVR

SEQ ID NO: 56641 - protein, 10 aa, Homo Sapiens
STIRLLTSLR

SEQ ID NO: 56642 - protein, 10 aa, Homo Sapiens
STIVPSLKHR

SEQ ID NO: 56643 - protein, 10 aa, Homo Sapiens
STNPFQTNAR

SEQ ID NO: 56644 - protein, 10 aa, Homo Sapiens
STPGYIFGKR

SEQ ID NO: 56645 - protein, 10 aa, Homo Sapiens
STTEVTQPRT

SEQ ID NO: 56646 - protein, 10 aa, Homo Sapiens
STVGGWVSTR

SEQ ID NO: 56647 - protein, 10 aa, Homo Sapiens
STVGIIGLGR

SEQ ID NO: 56648 - protein, 10 aa, Homo Sapiens
STVSFGASTR

SEQ ID NO: 56649 - protein, 10 aa, Homo Sapiens
STYYGSFVTR

SEQ ID NO: 56650 - protein, 10 aa, Homo Sapiens
SVAEMPQNYR

SEQ ID NO: 56651 - protein, 10 aa, Homo Sapiens
SVASTPISQR

SEQ ID NO: 56652 - protein, 10 aa, Homo Sapiens
SVFPQNGAAR

SEQ ID NO: 56653 - protein, 10 aa, Homo Sapiens
SVIDSVTKKR

SEQ ID NO: 56654 - protein, 10 aa, Homo Sapiens
SVIEGVSRSR

SEQ ID NO: 56655 - protein, 10 aa, Homo Sapiens
SVIKEMLNRL

SEQ ID NO: 56656 - protein, 10 aa, Homo Sapiens
SVINPGAIYR

SEQ ID NO: 56657 - protein, 10 aa, Homo Sapiens
SVINSVSTSR

SEQ ID NO: 56658 - protein, 10 aa, Homo Sapiens
SVLEATRVNR

SEQ ID NO: 56659 - protein, 10 aa, Homo Sapiens
SVMGVTVSRL

SEQ ID NO: 56660 - protein, 10 aa, Homo Sapiens
SVQGAGTSYR

SEQ ID NO: 56661 - protein, 10 aa, Homo Sapiens
SVVEGGLRAR

SEQ ID NO: 56662 - protein, 10 aa, Homo Sapiens
SVVEIASLRF

SEQ ID NO: 56663 - protein, 10 aa, Homo Sapiens
SVYDALPLTR

SEQ ID NO: 56664 - protein, 10 aa, Homo Sapiens
TAAAIGATPR

SEQ ID NO: 56665 - protein, 10 aa, Homo Sapiens
TAAGPLFQQR

SEQ ID NO: 56666 - protein, 10 aa, Homo Sapiens
TADGVPVNSR

SEQ ID NO: 56667 - protein, 10 aa, Homo Sapiens
TADGVPVSSR

SEQ ID NO: 56668 - protein, 10 aa, Homo Sapiens
TIIEKPPAER

SEQ ID NO: 56669 - protein, 10 aa, Homo Sapiens
TILEFLPKQR

SEQ ID NO: 56670 - protein, 10 aa, Homo Sapiens
TQADLKSSTF

SEQ ID NO: 56671 - protein, 10 aa, Homo Sapiens
TSAESWGTGR

SEQ ID NO: 56672 - protein, 10 aa, Homo Sapiens
TTFPFDPERR

SEQ ID NO: 56673 - protein, 10 aa, Homo Sapiens
TTISKYFSER

SEQ ID NO: 56674 - protein, 10 aa, Homo Sapiens
TTIWKLDGLR

SEQ ID NO: 56675 - protein, 10 aa, Homo Sapiens
TTKELGTVMR

SEQ ID NO: 56676 - protein, 10 aa, Homo Sapiens
TTKVGPNATY

SEQ ID NO: 56677 - protein, 10 aa, Homo Sapiens
TVAEIKKQYR

SEQ ID NO: 56678 - protein, 10 aa, Homo Sapiens
TVAEKLDWAR

SEQ ID NO: 56679 - protein, 10 aa, Homo Sapiens
TVIDIHTLRI

SEQ ID NO: 56680 - protein, 10 aa, Homo Sapiens
TVIDVSTADR

SEQ ID NO: 56681 - protein, 10 aa, Homo Sapiens
TVVEDVTVGR

SEQ ID NO: 56682 - protein, 10 aa, Homo Sapiens
VFDAKRLIGR

SEQ ID NO: 56683 - protein, 10 aa, Homo Sapiens
VGKDPGLAGR

SEQ ID NO: 56684 - protein, 10 aa, Homo Sapiens
VSAGIQTSFR

SEQ ID NO: 56685 - protein, 10 aa, Homo Sapiens
VVDVRIGMTR

SEQ ID NO: 56686 - protein, 10 aa, Homo Sapiens
WTMSNITAGR

SEQ ID NO: 56687 - protein, 10 aa, Homo Sapiens
WVYDEPLLKR

SEQ ID NO: 56688 - protein, 10 aa, Homo Sapiens
YAFNSGNVER

SEQ ID NO: 56689 - protein, 10 aa, Homo Sapiens
YANEVGEAFR

SEQ ID NO: 56690 - protein, 10 aa, Homo Sapiens
YLITFNPVGR

SEQ ID NO: 56691 - protein, 10 aa, Homo Sapiens
YSFFSPSPAR

SEQ ID NO: 56692 - protein, 10 aa, Homo Sapiens
YSFHRGNSQR

SEQ ID NO: 56693 - protein, 10 aa, Homo Sapiens
YTFYSISQER

SEQ ID NO: 56694 - protein, 10 aa, Homo Sapiens
YTIGTGSYGR

SEQ ID NO: 56695 - protein, 10 aa, Homo Sapiens
YTISDTIARF

SEQ ID NO: 56696 - protein, 10 aa, Homo Sapiens
YTKSGYCVNR

SEQ ID NO: 56697 - protein, 10 aa, Homo Sapiens
YTLDVTTGQR

SEQ ID NO: 56698 - protein, 10 aa, Homo Sapiens
YTNGKCVILR

SEQ ID NO: 56699 - protein, 10 aa, Homo Sapiens
YTSNIYTRRV

SEQ ID NO: 56700 - protein, 10 aa, Homo Sapiens
YVIGGHCGYR

SEQ ID NO: 56701 - protein, 10 aa, Homo Sapiens
YVISQMLSAR

SEQ ID NO: 56702 - protein, 10 aa, Homo Sapiens
YVYDKNVLQR

SEQ ID NO: 56703 - protein, 10 aa, Homo Sapiens
YVYPDKTRPR

SEQ ID NO: 56704 - protein, 11 aa, Homo Sapiens
AAWTPGPASNR

SEQ ID NO: 56705 - protein, 11 aa, Homo Sapiens
AQKAEGAGDAK

SEQ ID NO: 56706 - protein, 11 aa, Homo Sapiens
AVAGQELCQPR

SEQ ID NO: 56707 - protein, 11 aa, Homo Sapiens
AVVDVRIGMTR

SEQ ID NO: 56708 - protein, 11 aa, Homo Sapiens
CVYEPDRNALR

SEQ ID NO: 56709 - protein, 11 aa, Homo Sapiens
DAAHPTNVQRL

SEQ ID NO: 56710 - protein, 11 aa, Homo Sapiens
DAIHSMGLIHR

SEQ ID NO: 56711 - protein, 11 aa, Homo Sapiens
DAILHSEDSLR

SEQ ID NO: 56712 - protein, 11 aa, Homo Sapiens
DANGNSFATRI

SEQ ID NO: 56713 - protein, 11 aa, Homo Sapiens
DHSPRARSVAP

SEQ ID NO: 56714 - protein, 11 aa, Homo Sapiens
DIIQPSSTRAR

SEQ ID NO: 56715 - protein, 11 aa, Homo Sapiens
DIQNPDITSSR

SEQ ID NO: 56716 - protein, 11 aa, Homo Sapiens
DLIPCKEAGIR

SEQ ID NO: 56717 - protein, 11 aa, Homo Sapiens
DPKAPGLGAFR

SEQ ID NO: 56718 - protein, 11 aa, Homo Sapiens
DSFCSNGVTHR

SEQ ID NO: 56719 - protein, 11 aa, Homo Sapiens
DSIDPASIEAR

SEQ ID NO: 56720 - protein, 11 aa, Homo Sapiens
DSIGSTVSSER

SEQ ID NO: 56721 - protein, 11 aa, Homo Sapiens
DSMASGTLHLR

SEQ ID NO: 56722 - protein, 11 aa, Homo Sapiens
DSYASGEGLKR

SEQ ID NO: 56723 - protein, 11 aa, Homo Sapiens
DTAPCPINNER

SEQ ID NO: 56724 - protein, 11 aa, Homo Sapiens
DTAPTGHTLRL

SEQ ID NO: 56725 - protein, 11 aa, Homo Sapiens
DTIDERAINKK

SEQ ID NO: 56726 - protein, 11 aa, Homo Sapiens
DTIDERTINKK

SEQ ID NO: 56727 - protein, 11 aa, Homo Sapiens
DTIGISQPQWR

SEQ ID NO: 56728 - protein, 11 aa, Homo Sapiens
DTILNSNHIGR

SEQ ID NO: 56729 - protein, 11 aa, Homo Sapiens
DTITTDTGFMR

SEQ ID NO: 56730 - protein, 11 aa, Homo Sapiens
DTIVSGTLPQR

SEQ ID NO: 56731 - protein, 11 aa, Homo Sapiens
DTKELEKMTNR

SEQ ID NO: 56732 - protein, 11 aa, Homo Sapiens
DTKENLEGTLR

SEQ ID NO: 56733 - protein, 11 aa, Homo Sapiens
DTKGHSLSVQR

SEQ ID NO: 56734 - protein, 11 aa, Homo Sapiens
DTKRSQIYGSR

SEQ ID NO: 56735 - protein, 11 aa, Homo Sapiens
DTSSETVFGKR

SEQ ID NO: 56736 - protein, 11 aa, Homo Sapiens
DTTSTGLAQRL

SEQ ID NO: 56737 - protein, 11 aa, Homo Sapiens
DTVPSVSSINR

SEQ ID NO: 56738 - protein, 11 aa, Homo Sapiens
DTVWVNVGGLR

SEQ ID NO: 56739 - protein, 11 aa, Homo Sapiens
DTYNTLKYANR

SEQ ID NO: 56740 - protein, 11 aa, Homo Sapiens
DVAQWNIGSLR

SEQ ID NO: 56741 - protein, 11 aa, Homo Sapiens
DVFKSNKEVGR

SEQ ID NO: 56742 - protein, 11 aa, Homo Sapiens
DVFPNQPGGKR

SEQ ID NO: 56743 - protein, 11 aa, Homo Sapiens
DVFVVGTERGR

SEQ ID NO: 56744 - protein, 11 aa, Homo Sapiens
DVISRNEIQGR

SEQ ID NO: 56745 - protein, 11 aa, Homo Sapiens
DVISVEKTVKR

SEQ ID NO: 56746 - protein, 11 aa, Homo Sapiens
DVITIIDRSFR

SEQ ID NO: 56747 - protein, 11 aa, Homo Sapiens
DVKTTDGYLLR

SEQ ID NO: 56748 - protein, 11 aa, Homo Sapiens
DVMTALSQGYR

SEQ ID NO: 56749 - protein, 11 aa, Homo Sapiens
DVNSNNNMSYR

SEQ ID NO: 56750 - protein, 11 aa, Homo Sapiens
DVVKLTKNSKR

SEQ ID NO: 56751 - protein, 11 aa, Homo Sapiens
DVVYALKRQGR

SEQ ID NO: 56752 - protein, 11 aa, Homo Sapiens
DVYSGTPTKVR

SEQ ID NO: 56753 - protein, 11 aa, Homo Sapiens
EAAAAALSVRR

SEQ ID NO: 56754 - protein, 11 aa, Homo Sapiens
EAAFATKDRLR

SEQ ID NO: 56755 - protein, 11 aa, Homo Sapiens
EAGPGPRPLAR

SEQ ID NO: 56756 - protein, 11 aa, Homo Sapiens
EAISQVDKLLR

SEQ ID NO: 56757 - protein, 11 aa, Homo Sapiens
EAKPPTVTMPR

SEQ ID NO: 56758 - protein, 11 aa, Homo Sapiens
EAMDQYSIALR

SEQ ID NO: 56759 - protein, 11 aa, Homo Sapiens
EAMDVTTTSTR

SEQ ID NO: 56760 - protein, 11 aa, Homo Sapiens
EAMQSLVTSSR

SEQ ID NO: 56761 - protein, 11 aa, Homo Sapiens
EASPSPCITER

SEQ ID NO: 56762 - protein, 11 aa, Homo Sapiens
EAVKPTVGMKR

SEQ ID NO: 56763 - protein, 11 aa, Homo Sapiens
EAVTQSLLSSR

SEQ ID NO: 56764 - protein, 11 aa, Homo Sapiens
EAWFPGSGAFR

SEQ ID NO: 56765 - protein, 11 aa, Homo Sapiens
EDVPSGRLHLR

SEQ ID NO: 56766 - protein, 11 aa, Homo Sapiens
EIIAPSPQRSR

SEQ ID NO: 56767 - protein, 11 aa, Homo Sapiens
EIKGTNGQVTR

SEQ ID NO: 56768 - protein, 11 aa, Homo Sapiens
EILDSQNLNSR

SEQ ID NO: 56769 - protein, 11 aa, Homo Sapiens
EILELAGNAAR

SEQ ID NO: 56770 - protein, 11 aa, Homo Sapiens
ESAFLSKRNPR

SEQ ID NO: 56771 - protein, 11 aa, Homo Sapiens
ESFASDPILYR

SEQ ID NO: 56772 - protein, 11 aa, Homo Sapiens
ESFFGERRIPR

SEQ ID NO: 56773 - protein, 11 aa, Homo Sapiens
ESFFPYQVTER

SEQ ID NO: 56774 - protein, 11 aa, Homo Sapiens
ESIDPQFTIRR

SEQ ID NO: 56775 - protein, 11 aa, Homo Sapiens
ESIGNCPFSQR

SEQ ID NO: 56776 - protein, 11 aa, Homo Sapiens
ESIPGGYNALR

SEQ ID NO: 56777 - protein, 11 aa, Homo Sapiens
ESKQAGQSVFR

SEQ ID NO: 56778 - protein, 11 aa, Homo Sapiens
ESSAGGSFTVR

SEQ ID NO: 56779 - protein, 11 aa, Homo Sapiens
ESVSFTDGSVR

SEQ ID NO: 56780 - protein, 11 aa, Homo Sapiens
ESYTPSKISVR

SEQ ID NO: 56781 - protein, 11 aa, Homo Sapiens
ETATTPIFANR

SEQ ID NO: 56782 - protein, 11 aa, Homo Sapiens
ETFRSSDPATR

SEQ ID NO: 56783 - protein, 11 aa, Homo Sapiens
ETHESDINSVR

SEQ ID NO: 56784 - protein, 11 aa, Homo Sapiens
ETIDNGFGHSR

SEQ ID NO: 56785 - protein, 11 aa, Homo Sapiens
ETIDTSRVSLR

SEQ ID NO: 56786 - protein, 11 aa, Homo Sapiens
ETIDVHSGYDI

SEQ ID NO: 56787 - protein, 11 aa, Homo Sapiens
ETIGNELFNCR

SEQ ID NO: 56788 - protein, 11 aa, Homo Sapiens
ETIHADSVAKR

SEQ ID NO: 56789 - protein, 11 aa, Homo Sapiens
ETIHPGNVQSR

SEQ ID NO: 56790 - protein, 11 aa, Homo Sapiens
ETILASSGTDR

SEQ ID NO: 56791 - protein, 11 aa, Homo Sapiens
ETILGDIDRAR

SEQ ID NO: 56792 - protein, 11 aa, Homo Sapiens
ETIMSSSMGKR

SEQ ID NO: 56793 - protein, 11 aa, Homo Sapiens
ETINTGPFVMR

SEQ ID NO: 56794 - protein, 11 aa, Homo Sapiens
ETIPGPDAKVR

SEQ ID NO: 56795 - protein, 11 aa, Homo Sapiens
ETIPLGDLQAR

SEQ ID NO: 56796 - protein, 11 aa, Homo Sapiens
ETISSKNIISR

SEQ ID NO: 56797 - protein, 11 aa, Homo Sapiens
ETKDSGSFLLR

SEQ ID NO: 56798 - protein, 11 aa, Homo Sapiens
ETKSTLLFGQR

SEQ ID NO: 56799 - protein, 11 aa, Homo Sapiens
ETLAFPGHVAA

SEQ ID NO: 56800 - protein, 11 aa, Homo Sapiens
ETLEGWKATRR

SEQ ID NO: 56801 - protein, 11 aa, Homo Sapiens
ETLPDGTKRSR

SEQ ID NO: 56802 - protein, 11 aa, Homo Sapiens
ETPNFIIPAQR

SEQ ID NO: 56803 - protein, 11 aa, Homo Sapiens
ETQVSDFLSGR

SEQ ID NO: 56804 - protein, 11 aa, Homo Sapiens
ETVAVSPTICR

SEQ ID NO: 56805 - protein, 11 aa, Homo Sapiens
ETVPAFSERTC

SEQ ID NO: 56806 - protein, 11 aa, Homo Sapiens
ETVQKETIHPR

SEQ ID NO: 56807 - protein, 11 aa, Homo Sapiens
ETYLNENLRKR

SEQ ID NO: 56808 - protein, 11 aa, Homo Sapiens
ETYRGGMAINR

SEQ ID NO: 56809 - protein, 11 aa, Homo Sapiens
EVAKQALNRLR

SEQ ID NO: 56810 - protein, 11 aa, Homo Sapiens
EVAQVESLRYR

SEQ ID NO: 56811 - protein, 11 aa, Homo Sapiens
EVFIGESLSSR

SEQ ID NO: 56812 - protein, 11 aa, Homo Sapiens
EVFTTLSVTKR

SEQ ID NO: 56813 - protein, 11 aa, Homo Sapiens
EVHAVGLYGAR

SEQ ID NO: 56814 - protein, 11 aa, Homo Sapiens
EVIDQRLIEAR

SEQ ID NO: 56815 - protein, 11 aa, Homo Sapiens
EVIEGYEIACR

SEQ ID NO: 56816 - protein, 11 aa, Homo Sapiens
EVIGSKLNISR

SEQ ID NO: 56817 - protein, 11 aa, Homo Sapiens
EVIHLNVGGKR

SEQ ID NO: 56818 - protein, 11 aa, Homo Sapiens
EVIKTRLQSSR

SEQ ID NO: 56819 - protein, 11 aa, Homo Sapiens
EVINAREVAPR

SEQ ID NO: 56820 - protein, 11 aa, Homo Sapiens
EVINELFYTER

SEQ ID NO: 56821 - protein, 11 aa, Homo Sapiens
EVIPYTPAMQR

SEQ ID NO: 56822 - protein, 11 aa, Homo Sapiens
EVIQNPATITR

SEQ ID NO: 56823 - protein, 11 aa, Homo Sapiens
EVISLSQVTPK

SEQ ID NO: 56824 - protein, 11 aa, Homo Sapiens
EVISTPGVVAR

SEQ ID NO: 56825 - protein, 11 aa, Homo Sapiens
EVIVVVGGCER

SEQ ID NO: 56826 - protein, 11 aa, Homo Sapiens
EVKQVESGTLR

SEQ ID NO: 56827 - protein, 11 aa, Homo Sapiens
EVMRQRGINMR

SEQ ID NO: 56828 - protein, 11 aa, Homo Sapiens
EVQDRVMLTGR

SEQ ID NO: 56829 - protein, 11 aa, Homo Sapiens
EVQQARDLQNR

SEQ ID NO: 56830 - protein, 11 aa, Homo Sapiens
EVQVASQSSQR

SEQ ID NO: 56831 - protein, 11 aa, Homo Sapiens
EVRADTGGLGR

SEQ ID NO: 56832 - protein, 11 aa, Homo Sapiens
EVRAVGQGVLR

SEQ ID NO: 56833 - protein, 11 aa, Homo Sapiens
EVTPVTGASLR

SEQ ID NO: 56834 - protein, 11 aa, Homo Sapiens
EVVDTTASTKR

SEQ ID NO: 56835 - protein, 11 aa, Homo Sapiens
EVVEGMDISTR

SEQ ID NO: 56836 - protein, 11 aa, Homo Sapiens
EVVTGVIGQRM

SEQ ID NO: 56837 - protein, 11 aa, Homo Sapiens
EVVTPNIFNSR

SEQ ID NO: 56838 - protein, 11 aa, Homo Sapiens
EVWIPKNGTRR

SEQ ID NO: 56839 - protein, 11 aa, Homo Sapiens
EVYQGCGTELR

SEQ ID NO: 56840 - protein, 11 aa, Homo Sapiens
FSFSPGAGAFR

SEQ ID NO: 56841 - protein, 11 aa, Homo Sapiens
FSVNASSERLN

SEQ ID NO: 56842 - protein, 11 aa, Homo Sapiens
FTIGTSMTTGR

SEQ ID NO: 56843 - protein, 11 aa, Homo Sapiens
FTLEASEGCYR

SEQ ID NO: 56844 - protein, 11 aa, Homo Sapiens
FTMASSPAQRR

SEQ ID NO: 56845 - protein, 11 aa, Homo Sapiens
FTNEVLTKTYR

SEQ ID NO: 56846 - protein, 11 aa, Homo Sapiens
FTTESRLGGAR

SEQ ID NO: 56847 - protein, 11 aa, Homo Sapiens
FVIDSDHLGHR

SEQ ID NO: 56848 - protein, 11 aa, Homo Sapiens
FVIENESPSGR

SEQ ID NO: 56849 - protein, 11 aa, Homo Sapiens
FVKDSIRLVKR

SEQ ID NO: 56850 - protein, 11 aa, Homo Sapiens
FVSAGIQTSFR

SEQ ID NO: 56851 - protein, 11 aa, Homo Sapiens
FVVEPSEATNR

SEQ ID NO: 56852 - protein, 11 aa, Homo Sapiens
GVYATRSSAVR

SEQ ID NO: 56853 - protein, 11 aa, Homo Sapiens
HIIEKDKITTR

SEQ ID NO: 56854 - protein, 11 aa, Homo Sapiens
HLLDPSSFTGR

SEQ ID NO: 56855 - protein, 11 aa, Homo Sapiens
HSLSLEAPRLH

SEQ ID NO: 56856 - protein, 11 aa, Homo Sapiens
HTLLVTVSGQR

SEQ ID NO: 56857 - protein, 11 aa, Homo Sapiens
HVAESSLSRLR

SEQ ID NO: 56858 - protein, 11 aa, Homo Sapiens
HVKTGGKISLR

SEQ ID NO: 56859 - protein, 11 aa, Homo Sapiens
IVIETGPLKGR

SEQ ID NO: 56860 - protein, 11 aa, Homo Sapiens
LAINGMDVNGR

SEQ ID NO: 56861 - protein, 11 aa, Homo Sapiens
LSFIPPDGNFR

SEQ ID NO: 56862 - protein, 11 aa, Homo Sapiens
LSISSESLQAR

SEQ ID NO: 56863 - protein, 11 aa, Homo Sapiens
LVWKPRPASAR

SEQ ID NO: 56864 - protein, 11 aa, Homo Sapiens
MAAAGAAVARS

SEQ ID NO: 56865 - protein, 11 aa, Homo Sapiens
MTIGTDSALHR

SEQ ID NO: 56866 - protein, 11 aa, Homo Sapiens
MTKGTSSFGKR

SEQ ID NO: 56867 - protein, 11 aa, Homo Sapiens
MTQDAQNALRR

SEQ ID NO: 56868 - protein, 11 aa, Homo Sapiens
MVVDSSNTALR

SEQ ID NO: 56869 - protein, 11 aa, Homo Sapiens
NTMDADSLVSR

SEQ ID NO: 56870 - protein, 11 aa, Homo Sapiens
NVAEVDKVTGR

SEQ ID NO: 56871 - protein, 11 aa, Homo Sapiens
NVIEPSFGLGR

SEQ ID NO: 56872 - protein, 11 aa, Homo Sapiens
NVIESKAYVGR

SEQ ID NO: 56873 - protein, 11 aa, Homo Sapiens
QGYTQPGPGYR

SEQ ID NO: 56874 - protein, 11 aa, Homo Sapiens
QSVTEVSESTV

SEQ ID NO: 56875 - protein, 11 aa, Homo Sapiens
QSYDPNHPSYR

SEQ ID NO: 56876 - protein, 11 aa, Homo Sapiens
QTLQPSDHGSR

SEQ ID NO: 56877 - protein, 11 aa, Homo Sapiens
QTVQSELFRSR

SEQ ID NO: 56878 - protein, 11 aa, Homo Sapiens
QVIGPLTEGQR

SEQ ID NO: 56879 - protein, 11 aa, Homo Sapiens
SAQDPSQLSFR

SEQ ID NO: 56880 - protein, 11 aa, Homo Sapiens
SLSGGGGSRSI

SEQ ID NO: 56881 - protein, 11 aa, Homo Sapiens
STIDCGLVRLR

SEQ ID NO: 56882 - protein, 11 aa, Homo Sapiens
STIGFKLPNHR

SEQ ID NO: 56883 - protein, 11 aa, Homo Sapiens
STIGFKLPSYR

SEQ ID NO: 56884 - protein, 11 aa, Homo Sapiens
STMPHTSGMNR

SEQ ID NO: 56885 - protein, 11 aa, Homo Sapiens
STVNPEQYSKR

SEQ ID NO: 56886 - protein, 11 aa, Homo Sapiens
SVAGLTAAAYR

SEQ ID NO: 56887 - protein, 11 aa, Homo Sapiens
SVISSRNTGQR

SEQ ID NO: 56888 - protein, 11 aa, Homo Sapiens
SVVVPSGQEQR

SEQ ID NO: 56889 - protein, 11 aa, Homo Sapiens
TAIEAQHLLKR

SEQ ID NO: 56890 - protein, 11 aa, Homo Sapiens
TAITSQYLAER

SEQ ID NO: 56891 - protein, 11 aa, Homo Sapiens
TELSVRAKPSA

SEQ ID NO: 56892 - protein, 11 aa, Homo Sapiens
TLIDPETLLPR

SEQ ID NO: 56893 - protein, 11 aa, Homo Sapiens
TSFFPTAGGFR

SEQ ID NO: 56894 - protein, 11 aa, Homo Sapiens
TSFPSGEATPR

SEQ ID NO: 56895 - protein, 11 aa, Homo Sapiens
TTAGAVTQCYR

SEQ ID NO: 56896 - protein, 11 aa, Homo Sapiens
TTVLPSSSSSR

SEQ ID NO: 56897 - protein, 11 aa, Homo Sapiens
TVFDAKRLIGR

SEQ ID NO: 56898 - protein, 11 aa, Homo Sapiens
VDFVVAAASLR

SEQ ID NO: 56899 - protein, 11 aa, Homo Sapiens
WTLDPTSLSTR

SEQ ID NO: 56900 - protein, 11 aa, Homo Sapiens
YTSDADGLCTR

SEQ ID NO: 56901 - protein, 11 aa, Homo Sapiens
YVIDSGKMKEK

SEQ ID NO: 56902 - protein, 8 aa, Homo Sapiens
AEITPKGR

SEQ ID NO: 56903 - protein, 8 aa, Homo Sapiens
APPEYHRK

SEQ ID NO: 56904 - protein, 8 aa, Homo Sapiens
DEPPVFSR

SEQ ID NO: 56905 - protein, 8 aa, Homo Sapiens
EIGPSICR

SEQ ID NO: 56906 - protein, 8 aa, Homo Sapiens
ENAPLAKR

SEQ ID NO: 56907 - protein, 8 aa, Homo Sapiens
FEVDTVAP

SEQ ID NO: 56908 - protein, 8 aa, Homo Sapiens
FNEKSKEL

SEQ ID NO: 56909 - protein, 8 aa, Homo Sapiens
FSPVGSVL

SEQ ID NO: 56910 - protein, 8 aa, Homo Sapiens
IDQKIVER

SEQ ID NO: 56911 - protein, 8 aa, Homo Sapiens
ILIDPFHK

SEQ ID NO: 56912 - protein, 8 aa, Homo Sapiens
LADIMAKR

SEQ ID NO: 56913 - protein, 8 aa, Homo Sapiens
MHKAELVK

SEQ ID NO: 56914 - protein, 8 aa, Homo Sapiens
MVQQLGKA

SEQ ID NO: 56915 - protein, 8 aa, Homo Sapiens
MVVQGKRM

SEQ ID NO: 56916 - protein, 8 aa, Homo Sapiens
PAISPSKR

SEQ ID NO: 56917 - protein, 8 aa, Homo Sapiens
PAKAIGHR

SEQ ID NO: 56918 - protein, 8 aa, Homo Sapiens
PRNPVNKR

SEQ ID NO: 56919 - protein, 8 aa, Homo Sapiens
RVDPVNFK

SEQ ID NO: 56920 - protein, 8 aa, Homo Sapiens
SGPSIVHR

SEQ ID NO: 56921 - protein, 8 aa, Homo Sapiens
SSGAVVHR

SEQ ID NO: 56922 - protein, 8 aa, Homo Sapiens
TADVHFER

SEQ ID NO: 56923 - protein, 8 aa, Homo Sapiens
TFSGVYKK

SEQ ID NO: 56924 - protein, 8 aa, Homo Sapiens
TGNPTVVR

SEQ ID NO: 56925 - protein, 8 aa, Homo Sapiens
TPTISRER

SEQ ID NO: 56926 - protein, 8 aa, Homo Sapiens
VAAVAARR

SEQ ID NO: 56927 - protein, 8 aa, Homo Sapiens
VATLPRGR

SEQ ID NO: 56928 - protein, 8 aa, Homo Sapiens
VFRDPALK

SEQ ID NO: 56929 - protein, 8 aa, Homo Sapiens
VIPQKKGK

SEQ ID NO: 56930 - protein, 9 aa, Homo Sapiens
AAAGAFAGR

SEQ ID NO: 56931 - protein, 9 aa, Homo Sapiens
AAAGLAGPR

SEQ ID NO: 56932 - protein, 9 aa, Homo Sapiens
AALPGIVHR

SEQ ID NO: 56933 - protein, 9 aa, Homo Sapiens
AAVAAVAAR

SEQ ID NO: 56934 - protein, 9 aa, Homo Sapiens
AAVDSSVPR

SEQ ID NO: 56935 - protein, 9 aa, Homo Sapiens
AAVDVVRAR

SEQ ID NO: 56936 - protein, 9 aa, Homo Sapiens
AAVPVAAAR

SEQ ID NO: 56937 - protein, 9 aa, Homo Sapiens
AAVPVIISR

SEQ ID NO: 56938 - protein, 9 aa, Homo Sapiens
AEVDKVTGR

SEQ ID NO: 56939 - protein, 9 aa, Homo Sapiens
AIAAIKTKR

SEQ ID NO: 56940 - protein, 9 aa, Homo Sapiens
AIATIKTKR

SEQ ID NO: 56941 - protein, 9 aa, Homo Sapiens
AIPGFTINR

SEQ ID NO: 56942 - protein, 9 aa, Homo Sapiens
AITQVVVSR

SEQ ID NO: 56943 - protein, 9 aa, Homo Sapiens
AIVDVVANR

SEQ ID NO: 56944 - protein, 9 aa, Homo Sapiens
ASAPVTVKR

SEQ ID NO: 56945 - protein, 9 aa, Homo Sapiens
ASSYIAHLR

SEQ ID NO: 56946 - protein, 9 aa, Homo Sapiens
ATAELIMSR

SEQ ID NO: 56947 - protein, 9 aa, Homo Sapiens
ATIALMIQR

SEQ ID NO: 56948 - protein, 9 aa, Homo Sapiens
ATIQGAYAR

SEQ ID NO: 56949 - protein, 9 aa, Homo Sapiens
ATSGVVAVR

SEQ ID NO: 56950 - protein, 9 aa, Homo Sapiens
ATSPLQENR

SEQ ID NO: 56951 - protein, 9 aa, Homo Sapiens
ATTPIFANR

SEQ ID NO: 56952 - protein, 9 aa, Homo Sapiens
AVAAVAARR

SEQ ID NO: 56953 - protein, 9 aa, Homo Sapiens
AVIDVGINR

SEQ ID NO: 56954 - protein, 9 aa, Homo Sapiens
AVMGNPVTR

SEQ ID NO: 56955 - protein, 9 aa, Homo Sapiens
AVSPTICRR

SEQ ID NO: 56956 - protein, 9 aa, Homo Sapiens
AVTDVEATR

SEQ ID NO: 56957 - protein, 9 aa, Homo Sapiens
AVVALAVGR

SEQ ID NO: 56958 - protein, 9 aa, Homo Sapiens
AVVAVAEKR

SEQ ID NO: 56959 - protein, 9 aa, Homo Sapiens
AVYDFFIGR

SEQ ID NO: 56960 - protein, 9 aa, Homo Sapiens
CAEQVQPPR

SEQ ID NO: 56961 - protein, 9 aa, Homo Sapiens
CAPRRKVAL

SEQ ID NO: 56962 - protein, 9 aa, Homo Sapiens
CIISLVTQR

SEQ ID NO: 56963 - protein, 9 aa, Homo Sapiens
CTALGEIGR

SEQ ID NO: 56964 - protein, 9 aa, Homo Sapiens
CTVANPVSR

SEQ ID NO: 56965 - protein, 9 aa, Homo Sapiens
CVKSFVTKR

SEQ ID NO: 56966 - protein, 9 aa, Homo Sapiens
CVSPTVNQR

SEQ ID NO: 56967 - protein, 9 aa, Homo Sapiens
DAAEPDVQR

SEQ ID NO: 56968 - protein, 9 aa, Homo Sapiens
DAAFNKITR

SEQ ID NO: 56969 - protein, 9 aa, Homo Sapiens
DAAGVFCIR

SEQ ID NO: 56970 - protein, 9 aa, Homo Sapiens
DAAIVGAVR

SEQ ID NO: 56971 - protein, 9 aa, Homo Sapiens
DAAKDSILR

SEQ ID NO: 56972 - protein, 9 aa, Homo Sapiens
DAATEIVER

SEQ ID NO: 56973 - protein, 9 aa, Homo Sapiens
DAEAIYVTR

SEQ ID NO: 56974 - protein, 9 aa, Homo Sapiens
DAQKPSLTR

SEQ ID NO: 56975 - protein, 9 aa, Homo Sapiens
DASRNVFSR

SEQ ID NO: 56976 - protein, 9 aa, Homo Sapiens
DAVDVFETR

SEQ ID NO: 56977 - protein, 9 aa, Homo Sapiens
DAVNLAFGR

SEQ ID NO: 56978 - protein, 9 aa, Homo Sapiens
DAWEPKVLR

SEQ ID NO: 56979 - protein, 9 aa, Homo Sapiens
DAWPGQRER

SEQ ID NO: 56980 - protein, 9 aa, Homo Sapiens
DIFNQVVPR

SEQ ID NO: 56981 - protein, 9 aa, Homo Sapiens
DIFPKVTCR

SEQ ID NO: 56982 - protein, 9 aa, Homo Sapiens
DIFSEVVGR

SEQ ID NO: 56983 - protein, 9 aa, Homo Sapiens
DIIGPMPAK

SEQ ID NO: 56984 - protein, 9 aa, Homo Sapiens
DIIPNPQER

SEQ ID NO: 56985 - protein, 9 aa, Homo Sapiens
DIIQPSSTR

SEQ ID NO: 56986 - protein, 9 aa, Homo Sapiens
DIQGHPFFR

SEQ ID NO: 56987 - protein, 9 aa, Homo Sapiens
DITTGQPPR

SEQ ID NO: 56988 - protein, 9 aa, Homo Sapiens
DIYFNPKTR

SEQ ID NO: 56989 - protein, 9 aa, Homo Sapiens
DLAKIIFKR

SEQ ID NO: 56990 - protein, 9 aa, Homo Sapiens
DLEPPVVKR

SEQ ID NO: 56991 - protein, 9 aa, Homo Sapiens
DLFDFITER

SEQ ID NO: 56992 - protein, 9 aa, Homo Sapiens
DLFYNIATR

SEQ ID NO: 56993 - protein, 9 aa, Homo Sapiens
DLIGCIIGR

SEQ ID NO: 56994 - protein, 9 aa, Homo Sapiens
DMFATPQYR

SEQ ID NO: 56995 - protein, 9 aa, Homo Sapiens
DPAGVHPPR

SEQ ID NO: 56996 - protein, 9 aa, Homo Sapiens
DPFHKAIRR

SEQ ID NO: 56997 - protein, 9 aa, Homo Sapiens
DPTDVAALR

SEQ ID NO: 56998 - protein, 9 aa, Homo Sapiens
DPYSTGHLR

SEQ ID NO: 56999 - protein, 9 aa, Homo Sapiens
DSAPVETPR

SEQ ID NO: 57000 - protein, 9 aa, Homo Sapiens
DSCPNPIQR

SEQ ID NO: 57001 - protein, 9 aa, Homo Sapiens
DSFQKVILR

SEQ ID NO: 57002 - protein, 9 aa, Homo Sapiens
DSFSAGEPR

SEQ ID NO: 57003 - protein, 9 aa, Homo Sapiens
DSFTGPRRR

SEQ ID NO: 57004 - protein, 9 aa, Homo Sapiens
DSMPEPASR

SEQ ID NO: 57005 - protein, 9 aa, Homo Sapiens
DSQYPPVQR

SEQ ID NO: 57006 - protein, 9 aa, Homo Sapiens
DSSGLTVHR

SEQ ID NO: 57007 - protein, 9 aa, Homo Sapiens
DSSQLIHCR

SEQ ID NO: 57008 - protein, 9 aa, Homo Sapiens
DSVFVENCR

SEQ ID NO: 57009 - protein, 9 aa, Homo Sapiens
DSVNIGRKR

SEQ ID NO: 57010 - protein, 9 aa, Homo Sapiens
DTAAQITQR

SEQ ID NO: 57011 - protein, 9 aa, Homo Sapiens
DTHGSFVVR

SEQ ID NO: 57012 - protein, 9 aa, Homo Sapiens
DTIEIITDR

SEQ ID NO: 57013 - protein, 9 aa, Homo Sapiens
DTITETDLR

SEQ ID NO: 57014 - protein, 9 aa, Homo Sapiens
DTMPPKGVR

SEQ ID NO: 57015 - protein, 9 aa, Homo Sapiens
DTPGIQIGR

SEQ ID NO: 57016 - protein, 9 aa, Homo Sapiens
DTQKFSVMR

SEQ ID NO: 57017 - protein, 9 aa, Homo Sapiens
DTVAQITQR

SEQ ID NO: 57018 - protein, 9 aa, Homo Sapiens
DVAAQQSLR

SEQ ID NO: 57019 - protein, 9 aa, Homo Sapiens
DVARLVVER

SEQ ID NO: 57020 - protein, 9 aa, Homo Sapiens
DVASVIVTK

SEQ ID NO: 57021 - protein, 9 aa, Homo Sapiens
DVFIPKPFR

SEQ ID NO: 57022 - protein, 9 aa, Homo Sapiens
DVFPGPSFR

SEQ ID NO: 57023 - protein, 9 aa, Homo Sapiens
DVFVVGTER

SEQ ID NO: 57024 - protein, 9 aa, Homo Sapiens
DVFYLQPER

SEQ ID NO: 57025 - protein, 9 aa, Homo Sapiens
DVIGVTKGK

SEQ ID NO: 57026 - protein, 9 aa, Homo Sapiens
DVNSFVRSR

SEQ ID NO: 57027 - protein, 9 aa, Homo Sapiens
DVPSPFNHR

SEQ ID NO: 57028 - protein, 9 aa, Homo Sapiens
DVSHPIIYR

SEQ ID NO: 57029 - protein, 9 aa, Homo Sapiens
DVSPVVSTY

SEQ ID NO: 57030 - protein, 9 aa, Homo Sapiens
DVTKITKLR

SEQ ID NO: 57031 - protein, 9 aa, Homo Sapiens
DVVYNAVHR

SEQ ID NO: 57032 - protein, 9 aa, Homo Sapiens
DVYENLHTK

SEQ ID NO: 57033 - protein, 9 aa, Homo Sapiens
DVYPEIIER

SEQ ID NO: 57034 - protein, 9 aa, Homo Sapiens
DVYTPKSSR

SEQ ID NO: 57035 - protein, 9 aa, Homo Sapiens
EAAAIIAQR

SEQ ID NO: 57036 - protein, 9 aa, Homo Sapiens
EAAIGVTKR

SEQ ID NO: 57037 - protein, 9 aa, Homo Sapiens
EAAPVVVGH

SEQ ID NO: 57038 - protein, 9 aa, Homo Sapiens
EAAQKFLER

SEQ ID NO: 57039 - protein, 9 aa, Homo Sapiens
EAAYIGSMR

SEQ ID NO: 57040 - protein, 9 aa, Homo Sapiens
EAEVASLNR

SEQ ID NO: 57041 - protein, 9 aa, Homo Sapiens
EAFDFVKQR

SEQ ID NO: 57042 - protein, 9 aa, Homo Sapiens
EAFQTTISK

SEQ ID NO: 57043 - protein, 9 aa, Homo Sapiens
EAGAIISTR

SEQ ID NO: 57044 - protein, 9 aa, Homo Sapiens
EAGAPELQR

SEQ ID NO: 57045 - protein, 9 aa, Homo Sapiens
EAGPSIVHR

SEQ ID NO: 57046 - protein, 9 aa, Homo Sapiens
EAHARIHLR

SEQ ID NO: 57047 - protein, 9 aa, Homo Sapiens
EAHFVPLVK

SEQ ID NO: 57048 - protein, 9 aa, Homo Sapiens
EAIAKGIRR

SEQ ID NO: 57049 - protein, 9 aa, Homo Sapiens
EAIGNEVTR

SEQ ID NO: 57050 - protein, 9 aa, Homo Sapiens
EAIGPSTIR

SEQ ID NO: 57051 - protein, 9 aa, Homo Sapiens
EAIYDICRR

SEQ ID NO: 57052 - protein, 9 aa, Homo Sapiens
EAKFPTMNR

SEQ ID NO: 57053 - protein, 9 aa, Homo Sapiens
EALNQVTQR

SEQ ID NO: 57054 - protein, 9 aa, Homo Sapiens
EATAMAMGR

SEQ ID NO: 57055 - protein, 9 aa, Homo Sapiens
EAVFNPQSR

SEQ ID NO: 57056 - protein, 9 aa, Homo Sapiens
EAVGVTSQR

SEQ ID NO: 57057 - protein, 9 aa, Homo Sapiens
EAVKLIIGR

SEQ ID NO: 57058 - protein, 9 aa, Homo Sapiens
EAVKPFGLK

SEQ ID NO: 57059 - protein, 9 aa, Homo Sapiens
EAYRFVKEK

SEQ ID NO: 57060 - protein, 9 aa, Homo Sapiens
EDFYTATER

SEQ ID NO: 57061 - protein, 9 aa, Homo Sapiens
EGAGILLTR

SEQ ID NO: 57062 - protein, 9 aa, Homo Sapiens
EGIGSTVFR

SEQ ID NO: 57063 - protein, 9 aa, Homo Sapiens
EGTVICVTR

SEQ ID NO: 57064 - protein, 9 aa, Homo Sapiens
EGVGILLTR

SEQ ID NO: 57065 - protein, 9 aa, Homo Sapiens
EIAAVIETV

SEQ ID NO: 57066 - protein, 9 aa, Homo Sapiens
EIAIIPSKK

SEQ ID NO: 57067 - protein, 9 aa, Homo Sapiens
EIAPDIRGR

SEQ ID NO: 57068 - protein, 9 aa, Homo Sapiens
EIEPNVFLR

SEQ ID NO: 57069 - protein, 9 aa, Homo Sapiens
EIEWNPATK

SEQ ID NO: 57070 - protein, 9 aa, Homo Sapiens
EIFDGIQPK

SEQ ID NO: 57071 - protein, 9 aa, Homo Sapiens
EIFGTIGMR

SEQ ID NO: 57072 - protein, 9 aa, Homo Sapiens
EIFQNEVAR

SEQ ID NO: 57073 - protein, 9 aa, Homo Sapiens
EIGPVSSSR

SEQ ID NO: 57074 - protein, 9 aa, Homo Sapiens
EIGWFPCNR

SEQ ID NO: 57075 - protein, 9 aa, Homo Sapiens
EIIAKEEQR

SEQ ID NO: 57076 - protein, 9 aa, Homo Sapiens
EIIEQPKQR

SEQ ID NO: 57077 - protein, 9 aa, Homo Sapiens
EIIEQPRQR

SEQ ID NO: 57078 - protein, 9 aa, Homo Sapiens
EIINIMQDR

SEQ ID NO: 57079 - protein, 9 aa, Homo Sapiens
EIISKLQGR

SEQ ID NO: 57080 - protein, 9 aa, Homo Sapiens
EIKHFVSER

SEQ ID NO: 57081 - protein, 9 aa, Homo Sapiens
EINKLLAHR

SEQ ID NO: 57082 - protein, 9 aa, Homo Sapiens
EIPALSVSR

SEQ ID NO: 57083 - protein, 9 aa, Homo Sapiens
EIPENFTTR

SEQ ID NO: 57084 - protein, 9 aa, Homo Sapiens
EISAPVSER

SEQ ID NO: 57085 - protein, 9 aa, Homo Sapiens
EISGTFTHR

SEQ ID NO: 57086 - protein, 9 aa, Homo Sapiens
EISSPAVER

SEQ ID NO: 57087 - protein, 9 aa, Homo Sapiens
EITPPVVLR

SEQ ID NO: 57088 - protein, 9 aa, Homo Sapiens
EIVDVPVEK

SEQ ID NO: 57089 - protein, 9 aa, Homo Sapiens
EIVGSIKMR

SEQ ID NO: 57090 - protein, 9 aa, Homo Sapiens
EIVKAIKER

SEQ ID NO: 57091 - protein, 9 aa, Homo Sapiens
EIVKPSPKR

SEQ ID NO: 57092 - protein, 9 aa, Homo Sapiens
EIVSRVSKR

SEQ ID NO: 57093 - protein, 9 aa, Homo Sapiens
EIYEYIIFR

SEQ ID NO: 57094 - protein, 9 aa, Homo Sapiens
EIYGVTHTR

SEQ ID NO: 57095 - protein, 9 aa, Homo Sapiens
EIYRPPASR

SEQ ID NO: 57096 - protein, 9 aa, Homo Sapiens
ELAKIMRTR

SEQ ID NO: 57097 - protein, 9 aa, Homo Sapiens
ELAQVIVSR

SEQ ID NO: 57098 - protein, 9 aa, Homo Sapiens
ELFKNVCER

SEQ ID NO: 57099 - protein, 9 aa, Homo Sapiens
ELFPAPILR

SEQ ID NO: 57100 - protein, 9 aa, Homo Sapiens
ELIKIIRRR

SEQ ID NO: 57101 - protein, 9 aa, Homo Sapiens
ELIQDITQR

SEQ ID NO: 57102 - protein, 9 aa, Homo Sapiens
ELIQEITQR

SEQ ID NO: 57103 - protein, 9 aa, Homo Sapiens
ELMGYIMGK

SEQ ID NO: 57104 - protein, 9 aa, Homo Sapiens
ELNPSTGNR

SEQ ID NO: 57105 - protein, 9 aa, Homo Sapiens
ELSDLHAHK

SEQ ID NO: 57106 - protein, 9 aa, Homo Sapiens
ELVPFESPR

SEQ ID NO: 57107 - protein, 9 aa, Homo Sapiens
ELVSITANK

SEQ ID NO: 57108 - protein, 9 aa, Homo Sapiens
ELVSPKLNR

SEQ ID NO: 57109 - protein, 9 aa, Homo Sapiens
ELYNAPEGR

SEQ ID NO: 57110 - protein, 9 aa, Homo Sapiens
EMTGYVVTR

SEQ ID NO: 57111 - protein, 9 aa, Homo Sapiens
ENADVPVVR

SEQ ID NO: 57112 - protein, 9 aa, Homo Sapiens
ENFGNTTPR

SEQ ID NO: 57113 - protein, 9 aa, Homo Sapiens
ENTAITIGR

SEQ ID NO: 57114 - protein, 9 aa, Homo Sapiens
EPAAVIVEK

SEQ ID NO: 57115 - protein, 9 aa, Homo Sapiens
EPSEVFINR

SEQ ID NO: 57116 - protein, 9 aa, Homo Sapiens
EPVEVVAPR

SEQ ID NO: 57117 - protein, 9 aa, Homo Sapiens
EPYANPTKR

SEQ ID NO: 57118 - protein, 9 aa, Homo Sapiens
ESAPKASLR

SEQ ID NO: 57119 - protein, 9 aa, Homo Sapiens
ESAPVHNSF

SEQ ID NO: 57120 - protein, 9 aa, Homo Sapiens
ESAQDFASR

SEQ ID NO: 57121 - protein, 9 aa, Homo Sapiens
ESAYNAFNR

SEQ ID NO: 57122 - protein, 9 aa, Homo Sapiens
ESFCDKVMR

SEQ ID NO: 57123 - protein, 9 aa, Homo Sapiens
ESFGVPKGR

SEQ ID NO: 57124 - protein, 9 aa, Homo Sapiens
ESFKEKFVR

SEQ ID NO: 57125 - protein, 9 aa, Homo Sapiens
ESFPSVNSR

SEQ ID NO: 57126 - protein, 9 aa, Homo Sapiens
ESIDKKISR

SEQ ID NO: 57127 - protein, 9 aa, Homo Sapiens
ESIDQYIER

SEQ ID NO: 57128 - protein, 9 aa, Homo Sapiens
ESIRAAVNR

SEQ ID NO: 57129 - protein, 9 aa, Homo Sapiens
ESQSNPVFR

SEQ ID NO: 57130 - protein, 9 aa, Homo Sapiens
ESTNFATLR

SEQ ID NO: 57131 - protein, 9 aa, Homo Sapiens
ESTPITAVK

SEQ ID NO: 57132 - protein, 9 aa, Homo Sapiens
ETADVIAKV

SEQ ID NO: 57133 - protein, 9 aa, Homo Sapiens
ETAFAFHLR

SEQ ID NO: 57134 - protein, 9 aa, Homo Sapiens
ETAIPFRSR

SEQ ID NO: 57135 - protein, 9 aa, Homo Sapiens
ETAIPSSTR

SEQ ID NO: 57136 - protein, 9 aa, Homo Sapiens
ETAKPIPAR

SEQ ID NO: 57137 - protein, 9 aa, Homo Sapiens
ETDGFQVKR

SEQ ID NO: 57138 - protein, 9 aa, Homo Sapiens
ETEPTIIER

SEQ ID NO: 57139 - protein, 9 aa, Homo Sapiens
ETESVVSLR

SEQ ID NO: 57140 - protein, 9 aa, Homo Sapiens
ETFKSIMKK

SEQ ID NO: 57141 - protein, 9 aa, Homo Sapiens
ETFLAQRQR

SEQ ID NO: 57142 - protein, 9 aa, Homo Sapiens
ETFNSITKR

SEQ ID NO: 57143 - protein, 9 aa, Homo Sapiens
ETFNTPAMY

SEQ ID NO: 57144 - protein, 9 aa, Homo Sapiens
ETFQFILGK

SEQ ID NO: 57145 - protein, 9 aa, Homo Sapiens
ETFSGVYKK

SEQ ID NO: 57146 - protein, 9 aa, Homo Sapiens
ETIDVHSGY

SEQ ID NO: 57147 - protein, 9 aa, Homo Sapiens
ETIGEILKK

SEQ ID NO: 57148 - protein, 9 aa, Homo Sapiens
ETIGKKFEK

SEQ ID NO: 57149 - protein, 9 aa, Homo Sapiens
ETIKQLQER

SEQ ID NO: 57150 - protein, 9 aa, Homo Sapiens
ETILRTNKR

SEQ ID NO: 57151 - protein, 9 aa, Homo Sapiens
ETIPSFTGR

SEQ ID NO: 57152 - protein, 9 aa, Homo Sapiens
ETISTATGR

SEQ ID NO: 57153 - protein, 9 aa, Homo Sapiens
ETLLLQAER

SEQ ID NO: 57154 - protein, 9 aa, Homo Sapiens
ETLMETHER

SEQ ID NO: 57155 - protein, 9 aa, Homo Sapiens
ETLSQSPPK

SEQ ID NO: 57156 - protein, 9 aa, Homo Sapiens
ETMPCVKKK

SEQ ID NO: 57157 - protein, 9 aa, Homo Sapiens
ETMPYVKKK

SEQ ID NO: 57158 - protein, 9 aa, Homo Sapiens
ETNTGEVYR

SEQ ID NO: 57159 - protein, 9 aa, Homo Sapiens
ETNYGIPQR

SEQ ID NO: 57160 - protein, 9 aa, Homo Sapiens
ETPAISPSK

SEQ ID NO: 57161 - protein, 9 aa, Homo Sapiens
ETPITSVPR

SEQ ID NO: 57162 - protein, 9 aa, Homo Sapiens
ETQLPVSFR

SEQ ID NO: 57163 - protein, 9 aa, Homo Sapiens
ETQPPVALK

SEQ ID NO: 57164 - protein, 9 aa, Homo Sapiens
ETREVQNLR

SEQ ID NO: 57165 - protein, 9 aa, Homo Sapiens
ETSGFPSQR

SEQ ID NO: 57166 - protein, 9 aa, Homo Sapiens
ETSGPTYIK

SEQ ID NO: 57167 - protein, 9 aa, Homo Sapiens
ETSNLIIMR

SEQ ID NO: 57168 - protein, 9 aa, Homo Sapiens
ETTVYVIVR

SEQ ID NO: 57169 - protein, 9 aa, Homo Sapiens
ETVEDIAAR

SEQ ID NO: 57170 - protein, 9 aa, Homo Sapiens
ETVEKFRQR

SEQ ID NO: 57171 - protein, 9 aa, Homo Sapiens
ETVGSIFSR

SEQ ID NO: 57172 - protein, 9 aa, Homo Sapiens
ETVPAFSER

SEQ ID NO: 57173 - protein, 9 aa, Homo Sapiens
ETVTSFRKR

SEQ ID NO: 57174 - protein, 9 aa, Homo Sapiens
ETYKYLYGR

SEQ ID NO: 57175 - protein, 9 aa, Homo Sapiens
ETYLHRIGR

SEQ ID NO: 57176 - protein, 9 aa, Homo Sapiens
ETYLNENLR

SEQ ID NO: 57177 - protein, 9 aa, Homo Sapiens
EVADLKIKR

SEQ ID NO: 57178 - protein, 9 aa, Homo Sapiens
EVAGIVAAR

SEQ ID NO: 57179 - protein, 9 aa, Homo Sapiens
EVAGLQVGR

SEQ ID NO: 57180 - protein, 9 aa, Homo Sapiens
EVAGQFVIK

SEQ ID NO: 57181 - protein, 9 aa, Homo Sapiens
EVANIPVAR

SEQ ID NO: 57182 - protein, 9 aa, Homo Sapiens
EVAPDVRLR

SEQ ID NO: 57183 - protein, 9 aa, Homo Sapiens
EVAPPEYHR

SEQ ID NO: 57184 - protein, 9 aa, Homo Sapiens
EVAQFLTGR

SEQ ID NO: 57185 - protein, 9 aa, Homo Sapiens
EVDAAMAAR

SEQ ID NO: 57186 - protein, 9 aa, Homo Sapiens
EVENFSCSR

SEQ ID NO: 57187 - protein, 9 aa, Homo Sapiens
EVESLTAAR

SEQ ID NO: 57188 - protein, 9 aa, Homo Sapiens
EVFAGVTTH

SEQ ID NO: 57189 - protein, 9 aa, Homo Sapiens
EVFDKTYQF

SEQ ID NO: 57190 - protein, 9 aa, Homo Sapiens
EVFEYIIFR

SEQ ID NO: 57191 - protein, 9 aa, Homo Sapiens
EVFGQITER

SEQ ID NO: 57192 - protein, 9 aa, Homo Sapiens
EVFQNANFR

SEQ ID NO: 57193 - protein, 9 aa, Homo Sapiens
EVFSHILKR

SEQ ID NO: 57194 - protein, 9 aa, Homo Sapiens
EVFTPVFER

SEQ ID NO: 57195 - protein, 9 aa, Homo Sapiens
EVFTPVVQR

SEQ ID NO: 57196 - protein, 9 aa, Homo Sapiens
EVFVGKIPR

SEQ ID NO: 57197 - protein, 9 aa, Homo Sapiens
EVGDIVVGR

SEQ ID NO: 57198 - protein, 9 aa, Homo Sapiens
EVHAVVTVR

SEQ ID NO: 57199 - protein, 9 aa, Homo Sapiens
EVIEIMTDR

SEQ ID NO: 57200 - protein, 9 aa, Homo Sapiens
EVIKNRFHR

SEQ ID NO: 57201 - protein, 9 aa, Homo Sapiens
EVIKPWITK

SEQ ID NO: 57202 - protein, 9 aa, Homo Sapiens
EVIKSMKPK

SEQ ID NO: 57203 - protein, 9 aa, Homo Sapiens
EVIKVIHGK

SEQ ID NO: 57204 - protein, 9 aa, Homo Sapiens
EVISLINTR

SEQ ID NO: 57205 - protein, 9 aa, Homo Sapiens
EVKKICMQR

SEQ ID NO: 57206 - protein, 9 aa, Homo Sapiens
EVLPKPRMR

SEQ ID NO: 57207 - protein, 9 aa, Homo Sapiens
EVLSDPQTR

SEQ ID NO: 57208 - protein, 9 aa, Homo Sapiens
EVMGTGAVR

SEQ ID NO: 57209 - protein, 9 aa, Homo Sapiens
EVNIPTDLR

SEQ ID NO: 57210 - protein, 9 aa, Homo Sapiens
EVNQETIQR

SEQ ID NO: 57211 - protein, 9 aa, Homo Sapiens
EVPELYHQR

SEQ ID NO: 57212 - protein, 9 aa, Homo Sapiens
EVPEPCLPR

SEQ ID NO: 57213 - protein, 9 aa, Homo Sapiens
EVPEVTRSR

SEQ ID NO: 57214 - protein, 9 aa, Homo Sapiens
EVPNKIINR

SEQ ID NO: 57215 - protein, 9 aa, Homo Sapiens
EVPSFTMGR

SEQ ID NO: 57216 - protein, 9 aa, Homo Sapiens
EVPSPEAGR

SEQ ID NO: 57217 - protein, 9 aa, Homo Sapiens
EVQRILHQR

SEQ ID NO: 57218 - protein, 9 aa, Homo Sapiens
EVQSNPKIR

SEQ ID NO: 57219 - protein, 9 aa, Homo Sapiens
EVQVVNTER

SEQ ID NO: 57220 - protein, 9 aa, Homo Sapiens
EVRLNVEEK

SEQ ID NO: 57221 - protein, 9 aa, Homo Sapiens
EVSAEVRER

SEQ ID NO: 57222 - protein, 9 aa, Homo Sapiens
EVSGCGSLR

SEQ ID NO: 57223 - protein, 9 aa, Homo Sapiens
EVSSIIKKK

SEQ ID NO: 57224 - protein, 9 aa, Homo Sapiens
EVSSMVLTK

SEQ ID NO: 57225 - protein, 9 aa, Homo Sapiens
EVSSVSPLK

SEQ ID NO: 57226 - protein, 9 aa, Homo Sapiens
EVSTVNVRR

SEQ ID NO: 57227 - protein, 9 aa, Homo Sapiens
EVTCLDPLR

SEQ ID NO: 57228 - protein, 9 aa, Homo Sapiens
EVTDYAIAR

SEQ ID NO: 57229 - protein, 9 aa, Homo Sapiens
EVTDYTTGR

SEQ ID NO: 57230 - protein, 9 aa, Homo Sapiens
EVTETICKR

SEQ ID NO: 57231 - protein, 9 aa, Homo Sapiens
EVTGFGVTR

SEQ ID NO: 57232 - protein, 9 aa, Homo Sapiens
EVTRILDGK

SEQ ID NO: 57233 - protein, 9 aa, Homo Sapiens
EVTTTVLVR

SEQ ID NO: 57234 - protein, 9 aa, Homo Sapiens
EVVAKFLHK

SEQ ID NO: 57235 - protein, 9 aa, Homo Sapiens
EVVEIQIDR

SEQ ID NO: 57236 - protein, 9 aa, Homo Sapiens
EVVEQGITR

SEQ ID NO: 57237 - protein, 9 aa, Homo Sapiens
EVVGIIESR

SEQ ID NO: 57238 - protein, 9 aa, Homo Sapiens
EVVGSVQGK

SEQ ID NO: 57239 - protein, 9 aa, Homo Sapiens
EVVIYVVER

SEQ ID NO: 57240 - protein, 9 aa, Homo Sapiens
EVVNKRFVR

SEQ ID NO: 57241 - protein, 9 aa, Homo Sapiens
EVVPEPVAR

SEQ ID NO: 57242 - protein, 9 aa, Homo Sapiens
EVVPRVTKK

SEQ ID NO: 57243 - protein, 9 aa, Homo Sapiens
EVVRLLVTR

SEQ ID NO: 57244 - protein, 9 aa, Homo Sapiens
EVVRTIKER

SEQ ID NO: 57245 - protein, 9 aa, Homo Sapiens
EVVSGVVSK

SEQ ID NO: 57246 - protein, 9 aa, Homo Sapiens
EVVSLLLDR

SEQ ID NO: 57247 - protein, 9 aa, Homo Sapiens
EVVVSGKLR

SEQ ID NO: 57248 - protein, 9 aa, Homo Sapiens
EVVYRFTAR

SEQ ID NO: 57249 - protein, 9 aa, Homo Sapiens
EVWKGIKKR

SEQ ID NO: 57250 - protein, 9 aa, Homo Sapiens
EVYKELRLR

SEQ ID NO: 57251 - protein, 9 aa, Homo Sapiens
FAAESIIKR

SEQ ID NO: 57252 - protein, 9 aa, Homo Sapiens
FASLPQVER

SEQ ID NO: 57253 - protein, 9 aa, Homo Sapiens
FASPLGAGR

SEQ ID NO: 57254 - protein, 9 aa, Homo Sapiens
FASQGGLAR

SEQ ID NO: 57255 - protein, 9 aa, Homo Sapiens
FDAKRLIGR

SEQ ID NO: 57256 - protein, 9 aa, Homo Sapiens
FEPAKGGEK

SEQ ID NO: 57257 - protein, 9 aa, Homo Sapiens
FIVNTNVPR

SEQ ID NO: 57258 - protein, 9 aa, Homo Sapiens
FLSAVFFAK

SEQ ID NO: 57259 - protein, 9 aa, Homo Sapiens
FSAPENAVR

SEQ ID NO: 57260 - protein, 9 aa, Homo Sapiens
FSAPNYCYR

SEQ ID NO: 57261 - protein, 9 aa, Homo Sapiens
FSFSKTPKR

SEQ ID NO: 57262 - protein, 9 aa, Homo Sapiens
FSGEGQSLR

SEQ ID NO: 57263 - protein, 9 aa, Homo Sapiens
FSIDVGYER

SEQ ID NO: 57264 - protein, 9 aa, Homo Sapiens
FSNDVIRKR

SEQ ID NO: 57265 - protein, 9 aa, Homo Sapiens
FSSSEKIKD

SEQ ID NO: 57266 - protein, 9 aa, Homo Sapiens
FSTTAVSAR

SEQ ID NO: 57267 - protein, 9 aa, Homo Sapiens
FSVPVIYER

SEQ ID NO: 57268 - protein, 9 aa, Homo Sapiens
FTAPSTVGK

SEQ ID NO: 57269 - protein, 9 aa, Homo Sapiens
FTQKPGFPK

SEQ ID NO: 57270 - protein, 9 aa, Homo Sapiens
FTSGYIPAR

SEQ ID NO: 57271 - protein, 9 aa, Homo Sapiens
FTVTVGNNR

SEQ ID NO: 57272 - protein, 9 aa, Homo Sapiens
FTYDPWIGK

SEQ ID NO: 57273 - protein, 9 aa, Homo Sapiens
FTYMNPAQR

SEQ ID NO: 57274 - protein, 9 aa, Homo Sapiens
FVFDRPVHR

SEQ ID NO: 57275 - protein, 9 aa, Homo Sapiens
FVFGLPLER

SEQ ID NO: 57276 - protein, 9 aa, Homo Sapiens
FVFKPNSKK

SEQ ID NO: 57277 - protein, 9 aa, Homo Sapiens
FVIGCYLDR

SEQ ID NO: 57278 - protein, 9 aa, Homo Sapiens
FVTPVTNQR

SEQ ID NO: 57279 - protein, 9 aa, Homo Sapiens
FVVEKVLDR

SEQ ID NO: 57280 - protein, 9 aa, Homo Sapiens
FVYEPKEQK

SEQ ID NO: 57281 - protein, 9 aa, Homo Sapiens
FVYGEPVTR

SEQ ID NO: 57282 - protein, 9 aa, Homo Sapiens
FVYGSGVYR

SEQ ID NO: 57283 - protein, 9 aa, Homo Sapiens
GDEPPVFSR

SEQ ID NO: 57284 - protein, 9 aa, Homo Sapiens
GEDPPVHVR

SEQ ID NO: 57285 - protein, 9 aa, Homo Sapiens
GEEPPIVRR

SEQ ID NO: 57286 - protein, 9 aa, Homo Sapiens
GKDPPVHFR

SEQ ID NO: 57287 - protein, 9 aa, Homo Sapiens
GSSDVIIHR

SEQ ID NO: 57288 - protein, 9 aa, Homo Sapiens
GSSPVFNQR

SEQ ID NO: 57289 - protein, 9 aa, Homo Sapiens
GTADVHFER

SEQ ID NO: 57290 - protein, 9 aa, Homo Sapiens
GTIGKKFAR

SEQ ID NO: 57291 - protein, 9 aa, Homo Sapiens
GTSSVIVSR

SEQ ID NO: 57292 - protein, 9 aa, Homo Sapiens
GTVELGPKR

SEQ ID NO: 57293 - protein, 9 aa, Homo Sapiens
GTYVSSVPR

SEQ ID NO: 57294 - protein, 9 aa, Homo Sapiens
GVAALYKFR

SEQ ID NO: 57295 - protein, 9 aa, Homo Sapiens
GVANALAHR

SEQ ID NO: 57296 - protein, 9 aa, Homo Sapiens
GVAPVFKKR

SEQ ID NO: 57297 - protein, 9 aa, Homo Sapiens
GVARIFNTR

SEQ ID NO: 57298 - protein, 9 aa, Homo Sapiens
GVKVPGEYR

SEQ ID NO: 57299 - protein, 9 aa, Homo Sapiens
GVMPSHFSR

SEQ ID NO: 57300 - protein, 9 aa, Homo Sapiens
GVSPVITVR

SEQ ID NO: 57301 - protein, 9 aa, Homo Sapiens
GVSSVIHPK

SEQ ID NO: 57302 - protein, 9 aa, Homo Sapiens
HAADPIITR

SEQ ID NO: 57303 - protein, 9 aa, Homo Sapiens
HAAVGQLGR

SEQ ID NO: 57304 - protein, 9 aa, Homo Sapiens
HAVGIVVNK

SEQ ID NO: 57305 - protein, 9 aa, Homo Sapiens
HAVVVGVYR

SEQ ID NO: 57306 - protein, 9 aa, Homo Sapiens
HIAVGSPGR

SEQ ID NO: 57307 - protein, 9 aa, Homo Sapiens
HISCVIKER

SEQ ID NO: 57308 - protein, 9 aa, Homo Sapiens
HIVSIEVQR

SEQ ID NO: 57309 - protein, 9 aa, Homo Sapiens
HPAVVIRQR

SEQ ID NO: 57310 - protein, 9 aa, Homo Sapiens
HSADFETVR

SEQ ID NO: 57311 - protein, 9 aa, Homo Sapiens
HSAMAVVSR

SEQ ID NO: 57312 - protein, 9 aa, Homo Sapiens
HSMDFVAYR

SEQ ID NO: 57313 - protein, 9 aa, Homo Sapiens
HSTDFEVHR

SEQ ID NO: 57314 - protein, 9 aa, Homo Sapiens
HTADISSHF

SEQ ID NO: 57315 - protein, 9 aa, Homo Sapiens
HTIPIPVAR

SEQ ID NO: 57316 - protein, 9 aa, Homo Sapiens
HTLEPLIPR

SEQ ID NO: 57317 - protein, 9 aa, Homo Sapiens
HTPENPVIR

SEQ ID NO: 57318 - protein, 9 aa, Homo Sapiens
HVAQIYAIR

SEQ ID NO: 57319 - protein, 9 aa, Homo Sapiens
HVASQPVMR

SEQ ID NO: 57320 - protein, 9 aa, Homo Sapiens
HVHEPNPLR

SEQ ID NO: 57321 - protein, 9 aa, Homo Sapiens
HVHGLPVTR

SEQ ID NO: 57322 - protein, 9 aa, Homo Sapiens
HVIETLIGK

SEQ ID NO: 57323 - protein, 9 aa, Homo Sapiens
HVTLHVHEP

SEQ ID NO: 57324 - protein, 9 aa, Homo Sapiens
HVVAIGRTR

SEQ ID NO: 57325 - protein, 9 aa, Homo Sapiens
HVVDIVALK

SEQ ID NO: 57326 - protein, 9 aa, Homo Sapiens
HVVTIIKGK

SEQ ID NO: 57327 - protein, 9 aa, Homo Sapiens
IASLIPTPR

SEQ ID NO: 57328 - protein, 9 aa, Homo Sapiens
IDERAINKK

SEQ ID NO: 57329 - protein, 9 aa, Homo Sapiens
IDERTINKK

SEQ ID NO: 57330 - protein, 9 aa, Homo Sapiens
IGSPIVSPR

SEQ ID NO: 57331 - protein, 9 aa, Homo Sapiens
IIVDIATKR

SEQ ID NO: 57332 - protein, 9 aa, Homo Sapiens
IPAAIATAK

SEQ ID NO: 57333 - protein, 9 aa, Homo Sapiens
ISSGAVVHR

SEQ ID NO: 57334 - protein, 9 aa, Homo Sapiens
ITPAVVSER

SEQ ID NO: 57335 - protein, 9 aa, Homo Sapiens
ITSPVVTQK

SEQ ID NO: 57336 - protein, 9 aa, Homo Sapiens
ITTGNSPPR

SEQ ID NO: 57337 - protein, 9 aa, Homo Sapiens
IVTEIACGR

SEQ ID NO: 57338 - protein, 9 aa, Homo Sapiens
IVTGTSIQR

SEQ ID NO: 57339 - protein, 9 aa, Homo Sapiens
IVTGVEEGR

SEQ ID NO: 57340 - protein, 9 aa, Homo Sapiens
IVYGQPRTR

SEQ ID NO: 57341 - protein, 9 aa, Homo Sapiens
KAANVLITR

SEQ ID NO: 57342 - protein, 9 aa, Homo Sapiens
LAGDVPAAR

SEQ ID NO: 57343 - protein, 9 aa, Homo Sapiens
LAPERRSTL

SEQ ID NO: 57344 - protein, 9 aa, Homo Sapiens
LAQTGSLGR

SEQ ID NO: 57345 - protein, 9 aa, Homo Sapiens
LPAKAIGHR

SEQ ID NO: 57346 - protein, 9 aa, Homo Sapiens
LPAPAAVGR

SEQ ID NO: 57347 - protein, 9 aa, Homo Sapiens
LPFGSSPHR

SEQ ID NO: 57348 - protein, 9 aa, Homo Sapiens
LPHGNVSAR

SEQ ID NO: 57349 - protein, 9 aa, Homo Sapiens
LPMQGNPPR

SEQ ID NO: 57350 - protein, 9 aa, Homo Sapiens
LPSPLSDPR

SEQ ID NO: 57351 - protein, 9 aa, Homo Sapiens
LPSPVTAQK

SEQ ID NO: 57352 - protein, 9 aa, Homo Sapiens
LSFEGATKR

SEQ ID NO: 57353 - protein, 9 aa, Homo Sapiens
LSNNNQALR

SEQ ID NO: 57354 - protein, 9 aa, Homo Sapiens
LSSGVSEIR

SEQ ID NO: 57355 - protein, 9 aa, Homo Sapiens
LVGPVPAGR

SEQ ID NO: 57356 - protein, 9 aa, Homo Sapiens
LVVENSAQR

SEQ ID NO: 57357 - protein, 9 aa, Homo Sapiens
LVVYPWTQR

SEQ ID NO: 57358 - protein, 9 aa, Homo Sapiens
MAAAAFAEK

SEQ ID NO: 57359 - protein, 9 aa, Homo Sapiens
MAGPGGLAR

SEQ ID NO: 57360 - protein, 9 aa, Homo Sapiens
MPASVVGQR

SEQ ID NO: 57361 - protein, 9 aa, Homo Sapiens
MSHGVPVVR

SEQ ID NO: 57362 - protein, 9 aa, Homo Sapiens
MTEGGVVLR

SEQ ID NO: 57363 - protein, 9 aa, Homo Sapiens
MTNLPAVGR

SEQ ID NO: 57364 - protein, 9 aa, Homo Sapiens
MTNTPVVVR

SEQ ID NO: 57365 - protein, 9 aa, Homo Sapiens
MTPPVNPSR

SEQ ID NO: 57366 - protein, 9 aa, Homo Sapiens
MVAKVDEVK

SEQ ID NO: 57367 - protein, 9 aa, Homo Sapiens
MVGPPGTGK

SEQ ID NO: 57368 - protein, 9 aa, Homo Sapiens
MVTGQTVCK

SEQ ID NO: 57369 - protein, 9 aa, Homo Sapiens
NAAFSANER

SEQ ID NO: 57370 - protein, 9 aa, Homo Sapiens
NAAGLLAAR

SEQ ID NO: 57371 - protein, 9 aa, Homo Sapiens
NAIGGKYNR

SEQ ID NO: 57372 - protein, 9 aa, Homo Sapiens
NANPLIYQR

SEQ ID NO: 57373 - protein, 9 aa, Homo Sapiens
NASQIRELR

SEQ ID NO: 57374 - protein, 9 aa, Homo Sapiens
NASQLITQR

SEQ ID NO: 57375 - protein, 9 aa, Homo Sapiens
NATPLTIER

SEQ ID NO: 57376 - protein, 9 aa, Homo Sapiens
NATYVQPRR

SEQ ID NO: 57377 - protein, 9 aa, Homo Sapiens
NAVDVKQYR

SEQ ID NO: 57378 - protein, 9 aa, Homo Sapiens
NIADIEEKR

SEQ ID NO: 57379 - protein, 9 aa, Homo Sapiens
NIADLAVRR

SEQ ID NO: 57380 - protein, 9 aa, Homo Sapiens
NIIDNPYLR

SEQ ID NO: 57381 - protein, 9 aa, Homo Sapiens
NIQVNNISI

SEQ ID NO: 57382 - protein, 9 aa, Homo Sapiens
NLTDIVAQR

SEQ ID NO: 57383 - protein, 9 aa, Homo Sapiens
NMFDHPIPR

SEQ ID NO: 57384 - protein, 9 aa, Homo Sapiens
NNSPVLSER

SEQ ID NO: 57385 - protein, 9 aa, Homo Sapiens
NSAFVERVR

SEQ ID NO: 57386 - protein, 9 aa, Homo Sapiens
NSISSVVSR

SEQ ID NO: 57387 - protein, 9 aa, Homo Sapiens
NSKESYELR

SEQ ID NO: 57388 - protein, 9 aa, Homo Sapiens
NSMGFGAER

SEQ ID NO: 57389 - protein, 9 aa, Homo Sapiens
NSPDISATR

SEQ ID NO: 57390 - protein, 9 aa, Homo Sapiens
NTAVSQLTK

SEQ ID NO: 57391 - protein, 9 aa, Homo Sapiens
NTIEKPILR

SEQ ID NO: 57392 - protein, 9 aa, Homo Sapiens
NTIKLIVGR

SEQ ID NO: 57393 - protein, 9 aa, Homo Sapiens
NTIPEVHKK

SEQ ID NO: 57394 - protein, 9 aa, Homo Sapiens
NTIQNEAQR

SEQ ID NO: 57395 - protein, 9 aa, Homo Sapiens
NTNDFVTLR

SEQ ID NO: 57396 - protein, 9 aa, Homo Sapiens
NTSTSIVNR

SEQ ID NO: 57397 - protein, 9 aa, Homo Sapiens
NTTSAVTVK

SEQ ID NO: 57398 - protein, 9 aa, Homo Sapiens
NTVGLVVER

SEQ ID NO: 57399 - protein, 9 aa, Homo Sapiens
NTVHDIVNR

SEQ ID NO: 57400 - protein, 9 aa, Homo Sapiens
NTVTPAVGR

SEQ ID NO: 57401 - protein, 9 aa, Homo Sapiens
NVAANVTSR

SEQ ID NO: 57402 - protein, 9 aa, Homo Sapiens
NVADLHEKY

SEQ ID NO: 57403 - protein, 9 aa, Homo Sapiens
NVADLTSLR

SEQ ID NO: 57404 - protein, 9 aa, Homo Sapiens
NVALIRDTK

SEQ ID NO: 57405 - protein, 9 aa, Homo Sapiens
NVHGGTILK

SEQ ID NO: 57406 - protein, 9 aa, Homo Sapiens
NVIRYIVCR

SEQ ID NO: 57407 - protein, 9 aa, Homo Sapiens
NVKFIQEKK

SEQ ID NO: 57408 - protein, 9 aa, Homo Sapiens
NVKGPGLQR

SEQ ID NO: 57409 - protein, 9 aa, Homo Sapiens
NVNEVISNR

SEQ ID NO: 57410 - protein, 9 aa, Homo Sapiens
NVPAVVVGR

SEQ ID NO: 57411 - protein, 9 aa, Homo Sapiens
NVTYVVKER

SEQ ID NO: 57412 - protein, 9 aa, Homo Sapiens
NVVRNISYK

SEQ ID NO: 57413 - protein, 9 aa, Homo Sapiens
PALAPVVSR

SEQ ID NO: 57414 - protein, 9 aa, Homo Sapiens
PASPVVHIR

SEQ ID NO: 57415 - protein, 9 aa, Homo Sapiens
PSSETVICR

SEQ ID NO: 57416 - protein, 9 aa, Homo Sapiens
QANGFSVVR

SEQ ID NO: 57417 - protein, 9 aa, Homo Sapiens
QASAVTVTR

SEQ ID NO: 57418 - protein, 9 aa, Homo Sapiens
QIFSGTSKR

SEQ ID NO: 57419 - protein, 9 aa, Homo Sapiens
QILEQPKQR

SEQ ID NO: 57420 - protein, 9 aa, Homo Sapiens
QISEVVVVK

SEQ ID NO: 57421 - protein, 9 aa, Homo Sapiens
QITAVIINR

SEQ ID NO: 57422 - protein, 9 aa, Homo Sapiens
QPTDVVKVR

SEQ ID NO: 57423 - protein, 9 aa, Homo Sapiens
QSPEFSVTR

SEQ ID NO: 57424 - protein, 9 aa, Homo Sapiens
QSSNLIQHR

SEQ ID NO: 57425 - protein, 9 aa, Homo Sapiens
QTIQGILER

SEQ ID NO: 57426 - protein, 9 aa, Homo Sapiens
QTPNTFPKR

SEQ ID NO: 57427 - protein, 9 aa, Homo Sapiens
QTVRIPSQR

SEQ ID NO: 57428 - protein, 9 aa, Homo Sapiens
QVADVVVSR

SEQ ID NO: 57429 - protein, 9 aa, Homo Sapiens
QVAPPVLKR

SEQ ID NO: 57430 - protein, 9 aa, Homo Sapiens
QVAPTQDLR

SEQ ID NO: 57431 - protein, 9 aa, Homo Sapiens
QVATVIQSR

SEQ ID NO: 57432 - protein, 9 aa, Homo Sapiens
QVFEKSPLR

SEQ ID NO: 57433 - protein, 9 aa, Homo Sapiens
QVFNKLIRR

SEQ ID NO: 57434 - protein, 9 aa, Homo Sapiens
QVVDKVTQR

SEQ ID NO: 57435 - protein, 9 aa, Homo Sapiens
QVVEVNPVR

SEQ ID NO: 57436 - protein, 9 aa, Homo Sapiens
RAAIPIAKR

SEQ ID NO: 57437 - protein, 9 aa, Homo Sapiens
RTSEIYVHR

SEQ ID NO: 57438 - protein, 9 aa, Homo Sapiens
SAAEVGFVR

SEQ ID NO: 57439 - protein, 9 aa, Homo Sapiens
SAALPQSQR

SEQ ID NO: 57440 - protein, 9 aa, Homo Sapiens
SAAPAITCR

SEQ ID NO: 57441 - protein, 9 aa, Homo Sapiens
SAASTALER

SEQ ID NO: 57442 - protein, 9 aa, Homo Sapiens
SAASYFQKR

SEQ ID NO: 57443 - protein, 9 aa, Homo Sapiens
SAFRNVNTR

SEQ ID NO: 57444 - protein, 9 aa, Homo Sapiens
SAHFSPVLR

SEQ ID NO: 57445 - protein, 9 aa, Homo Sapiens
SAIHIRVFR

SEQ ID NO: 57446 - protein, 9 aa, Homo Sapiens
SAIPAYSKR

SEQ ID NO: 57447 - protein, 9 aa, Homo Sapiens
SAISYINQR

SEQ ID NO: 57448 - protein, 9 aa, Homo Sapiens
SASPSVISR

SEQ ID NO: 57449 - protein, 9 aa, Homo Sapiens
SASSVTVTR

SEQ ID NO: 57450 - protein, 9 aa, Homo Sapiens
SDAGIFFTR

SEQ ID NO: 57451 - protein, 9 aa, Homo Sapiens
SIFDKNHER

SEQ ID NO: 57452 - protein, 9 aa, Homo Sapiens
SIIGVTEPR

SEQ ID NO: 57453 - protein, 9 aa, Homo Sapiens
SLADIMAKR

SEQ ID NO: 57454 - protein, 9 aa, Homo Sapiens
SLANIARQR

SEQ ID NO: 57455 - protein, 9 aa, Homo Sapiens
SPASIGQPR

SEQ ID NO: 57456 - protein, 9 aa, Homo Sapiens
SSALPTTGR

SEQ ID NO: 57457 - protein, 9 aa, Homo Sapiens
SSAPVVVTR

SEQ ID NO: 57458 - protein, 9 aa, Homo Sapiens
SSIDISQSR

SEQ ID NO: 57459 - protein, 9 aa, Homo Sapiens
SSIRPISER

SEQ ID NO: 57460 - protein, 9 aa, Homo Sapiens
SSMFGTLPR

SEQ ID NO: 57461 - protein, 9 aa, Homo Sapiens
SSPAPRTAL

SEQ ID NO: 57462 - protein, 9 aa, Homo Sapiens
SSSFVLSHR

SEQ ID NO: 57463 - protein, 9 aa, Homo Sapiens
SSSKTTWPR

SEQ ID NO: 57464 - protein, 9 aa, Homo Sapiens
SSSLIIHQR

SEQ ID NO: 57465 - protein, 9 aa, Homo Sapiens
SSSPVVVQH

SEQ ID NO: 57466 - protein, 9 aa, Homo Sapiens
STADLIRCK

SEQ ID NO: 57467 - protein, 9 aa, Homo Sapiens
STAKIQIVR

SEQ ID NO: 57468 - protein, 9 aa, Homo Sapiens
STANIDDLK

SEQ ID NO: 57469 - protein, 9 aa, Homo Sapiens
STAPAQLGK

SEQ ID NO: 57470 - protein, 9 aa, Homo Sapiens
STARHLYLR

SEQ ID NO: 57471 - protein, 9 aa, Homo Sapiens
STFDTPYCR

SEQ ID NO: 57472 - protein, 9 aa, Homo Sapiens
STFNQVVLK

SEQ ID NO: 57473 - protein, 9 aa, Homo Sapiens
STFRESFKK

SEQ ID NO: 57474 - protein, 9 aa, Homo Sapiens
STIDCGLVR

SEQ ID NO: 57475 - protein, 9 aa, Homo Sapiens
STIEYVIQR

SEQ ID NO: 57476 - protein, 9 aa, Homo Sapiens
STISEVLGR

SEQ ID NO: 57477 - protein, 9 aa, Homo Sapiens
STKFPAYER

SEQ ID NO: 57478 - protein, 9 aa, Homo Sapiens
STPDLAANR

SEQ ID NO: 57479 - protein, 9 aa, Homo Sapiens
STPEIAEQR

SEQ ID NO: 57480 - protein, 9 aa, Homo Sapiens
STSPITVCH

SEQ ID NO: 57481 - protein, 9 aa, Homo Sapiens
STVGSAISR

SEQ ID NO: 57482 - protein, 9 aa, Homo Sapiens
SVAALPVCK

SEQ ID NO: 57483 - protein, 9 aa, Homo Sapiens
SVAALTSKR

SEQ ID NO: 57484 - protein, 9 aa, Homo Sapiens
SVAKIVSDR

SEQ ID NO: 57485 - protein, 9 aa, Homo Sapiens
SVAKTILKR

SEQ ID NO: 57486 - protein, 9 aa, Homo Sapiens
SVARITCVR

SEQ ID NO: 57487 - protein, 9 aa, Homo Sapiens
SVESIISPK

SEQ ID NO: 57488 - protein, 9 aa, Homo Sapiens
SVFLYQSLR

SEQ ID NO: 57489 - protein, 9 aa, Homo Sapiens
SVFNEHPSR

SEQ ID NO: 57490 - protein, 9 aa, Homo Sapiens
SVFQTTDTK

SEQ ID NO: 57491 - protein, 9 aa, Homo Sapiens
SVGPAVQAR

SEQ ID NO: 57492 - protein, 9 aa, Homo Sapiens
SVIGAREER

SEQ ID NO: 57493 - protein, 9 aa, Homo Sapiens
SVIRPILKR

SEQ ID NO: 57494 - protein, 9 aa, Homo Sapiens
SVISGISSR

SEQ ID NO: 57495 - protein, 9 aa, Homo Sapiens
SVLDYFSER

SEQ ID NO: 57496 - protein, 9 aa, Homo Sapiens
SVQGIIIYR

SEQ ID NO: 57497 - protein, 9 aa, Homo Sapiens
SVSDIIRLR

SEQ ID NO: 57498 - protein, 9 aa, Homo Sapiens
SVSDLAPPR

SEQ ID NO: 57499 - protein, 9 aa, Homo Sapiens
SVSEVVVNR

SEQ ID NO: 57500 - protein, 9 aa, Homo Sapiens
SVSGIPNAR

SEQ ID NO: 57501 - protein, 9 aa, Homo Sapiens
SVSNVVITK

SEQ ID NO: 57502 - protein, 9 aa, Homo Sapiens
SVSSLISGR

SEQ ID NO: 57503 - protein, 9 aa, Homo Sapiens
SVTALAVSR

SEQ ID NO: 57504 - protein, 9 aa, Homo Sapiens
SVVGIPVFR

SEQ ID NO: 57505 - protein, 9 aa, Homo Sapiens
TAAAAASIR

SEQ ID NO: 57506 - protein, 9 aa, Homo Sapiens
TAAATVLKR

SEQ ID NO: 57507 - protein, 9 aa, Homo Sapiens
TAAFGHVQR

SEQ ID NO: 57508 - protein, 9 aa, Homo Sapiens
TAAPPSVCR

SEQ ID NO: 57509 - protein, 9 aa, Homo Sapiens
TAATRAALC

SEQ ID NO: 57510 - protein, 9 aa, Homo Sapiens
TALHVACQR

SEQ ID NO: 57511 - protein, 9 aa, Homo Sapiens
TDSPVHVGR

SEQ ID NO: 57512 - protein, 9 aa, Homo Sapiens
TGIFLPILR

SEQ ID NO: 57513 - protein, 9 aa, Homo Sapiens
TIHEIHCQR

SEQ ID NO: 57514 - protein, 9 aa, Homo Sapiens
TIIDIITHR

SEQ ID NO: 57515 - protein, 9 aa, Homo Sapiens
TIVNILTNR

SEQ ID NO: 57516 - protein, 9 aa, Homo Sapiens
TLSNIIEQR

SEQ ID NO: 57517 - protein, 9 aa, Homo Sapiens
TLSPAFSTR

SEQ ID NO: 57518 - protein, 9 aa, Homo Sapiens
TMSNITAGR

SEQ ID NO: 57519 - protein, 9 aa, Homo Sapiens
TNAAVTVLR

SEQ ID NO: 57520 - protein, 9 aa, Homo Sapiens
TPAGGGFPR

SEQ ID NO: 57521 - protein, 9 aa, Homo Sapiens
TSEAPQPPR

SEQ ID NO: 57522 - protein, 9 aa, Homo Sapiens
TSETPQPPR

SEQ ID NO: 57523 - protein, 9 aa, Homo Sapiens
TSSAQIIQR

SEQ ID NO: 57524 - protein, 9 aa, Homo Sapiens
TSSGNPIFR

SEQ ID NO: 57525 - protein, 9 aa, Homo Sapiens
TSSPSSIPR

SEQ ID NO: 57526 - protein, 9 aa, Homo Sapiens
TSTPVIVMR

SEQ ID NO: 57527 - protein, 9 aa, Homo Sapiens
TTAAAPTLR

SEQ ID NO: 57528 - protein, 9 aa, Homo Sapiens
TTAFEVEER

SEQ ID NO: 57529 - protein, 9 aa, Homo Sapiens
TTAPVVSTR

SEQ ID NO: 57530 - protein, 9 aa, Homo Sapiens
TTAQEVLAR

SEQ ID NO: 57531 - protein, 9 aa, Homo Sapiens
TTASVVIIR

SEQ ID NO: 57532 - protein, 9 aa, Homo Sapiens
TTCISAHVR

SEQ ID NO: 57533 - protein, 9 aa, Homo Sapiens
TTFPKIHSR

SEQ ID NO: 57534 - protein, 9 aa, Homo Sapiens
TTFQDQLNR

SEQ ID NO: 57535 - protein, 9 aa, Homo Sapiens
TTGESVITR

SEQ ID NO: 57536 - protein, 9 aa, Homo Sapiens
TTGWGVSPR

SEQ ID NO: 57537 - protein, 9 aa, Homo Sapiens
TTITAPPSR

SEQ ID NO: 57538 - protein, 9 aa, Homo Sapiens
TTNVPEIQR

SEQ ID NO: 57539 - protein, 9 aa, Homo Sapiens
TTPIFANRR

SEQ ID NO: 57540 - protein, 9 aa, Homo Sapiens
TTPNISVKK

SEQ ID NO: 57541 - protein, 9 aa, Homo Sapiens
TTQQADIPR

SEQ ID NO: 57542 - protein, 9 aa, Homo Sapiens
TTSVITIVK

SEQ ID NO: 57543 - protein, 9 aa, Homo Sapiens
TTTEIIKRR

SEQ ID NO: 57544 - protein, 9 aa, Homo Sapiens
TTTSLVLER

SEQ ID NO: 57545 - protein, 9 aa, Homo Sapiens
TTVDIFHKK

SEQ ID NO: 57546 - protein, 9 aa, Homo Sapiens
TTVEGLITR

SEQ ID NO: 57547 - protein, 9 aa, Homo Sapiens
TTVGTLSQR

SEQ ID NO: 57548 - protein, 9 aa, Homo Sapiens
TTVPHVFSK

SEQ ID NO: 57549 - protein, 9 aa, Homo Sapiens
TVAAVFRGR

SEQ ID NO: 57550 - protein, 9 aa, Homo Sapiens
TVATLPRGR

SEQ ID NO: 57551 - protein, 9 aa, Homo Sapiens
TVAVSDIPR

SEQ ID NO: 57552 - protein, 9 aa, Homo Sapiens
TVFESRNLR

SEQ ID NO: 57553 - protein, 9 aa, Homo Sapiens
TVGDIVLLR

SEQ ID NO: 57554 - protein, 9 aa, Homo Sapiens
TVIADICRR

SEQ ID NO: 57555 - protein, 9 aa, Homo Sapiens
TVIFVASQK

SEQ ID NO: 57556 - protein, 9 aa, Homo Sapiens
TVIHFNNPK

SEQ ID NO: 57557 - protein, 9 aa, Homo Sapiens
TVPEVIVAR

SEQ ID NO: 57558 - protein, 9 aa, Homo Sapiens
TVSAAVAER

SEQ ID NO: 57559 - protein, 9 aa, Homo Sapiens
TVSGPGVAR

SEQ ID NO: 57560 - protein, 9 aa, Homo Sapiens
TVVQNLMER

SEQ ID NO: 57561 - protein, 9 aa, Homo Sapiens
TVYHSPVSR

SEQ ID NO: 57562 - protein, 9 aa, Homo Sapiens
VATDITSTR

SEQ ID NO: 57563 - protein, 9 aa, Homo Sapiens
VDVRIGMTR

SEQ ID NO: 57564 - protein, 9 aa, Homo Sapiens
VPIGYHVPR

SEQ ID NO: 57565 - protein, 9 aa, Homo Sapiens
VPKAAIVAR

SEQ ID NO: 57566 - protein, 9 aa, Homo Sapiens
VTIKKDVDG

SEQ ID NO: 57567 - protein, 9 aa, Homo Sapiens
VVAPPGAPK

SEQ ID NO: 57568 - protein, 9 aa, Homo Sapiens
VVFEKAIQR

SEQ ID NO: 57569 - protein, 9 aa, Homo Sapiens
WVIGSVVAR

SEQ ID NO: 57570 - protein, 9 aa, Homo Sapiens
WVSENFQER

SEQ ID NO: 57571 - protein, 9 aa, Homo Sapiens
YAAFVQTHR

SEQ ID NO: 57572 - protein, 9 aa, Homo Sapiens
YAASIIIRR

SEQ ID NO: 57573 - protein, 9 aa, Homo Sapiens
YDAEISRKR

SEQ ID NO: 57574 - protein, 9 aa, Homo Sapiens
YIMPKPARR

SEQ ID NO: 57575 - protein, 9 aa, Homo Sapiens
YPVGIFQKR

SEQ ID NO: 57576 - protein, 9 aa, Homo Sapiens
YSFTTTAER

SEQ ID NO: 57577 - protein, 9 aa, Homo Sapiens
YSPGIVSTR

SEQ ID NO: 57578 - protein, 9 aa, Homo Sapiens
YSSTQVSVR

SEQ ID NO: 57579 - protein, 9 aa, Homo Sapiens
YSSTVVVKR

SEQ ID NO: 57580 - protein, 9 aa, Homo Sapiens
YSVNVDYSK

SEQ ID NO: 57581 - protein, 9 aa, Homo Sapiens
YTPTISRER

SEQ ID NO: 57582 - protein, 9 aa, Homo Sapiens
YVANVGTNR

SEQ ID NO: 57583 - protein, 9 aa, Homo Sapiens
YVFPKPFNR

SEQ ID NO: 57584 - protein, 9 aa, Homo Sapiens
YVFPVSQKR

SEQ ID NO: 57585 - protein, 9 aa, Homo Sapiens
YVIKPGNTK

SEQ ID NO: 57586 - protein, 9 aa, Homo Sapiens
YVMPSSSAR

SEQ ID NO: 57587 - protein, 9 aa, Homo Sapiens
YVNQGEILR

SEQ ID NO: 57588 - protein, 9 aa, Homo Sapiens
YVQRFHYSR

SEQ ID NO: 57589 - protein, 9 aa, Homo Sapiens
YVVEKVLDR

SEQ ID NO: 57590 - protein, 10 aa, Homo Sapiens
ADAPVTQIGF

SEQ ID NO: 57591 - protein, 10 aa, Homo Sapiens
ASADISLERL

SEQ ID NO: 57592 - protein, 10 aa, Homo Sapiens
ATAGIIGVNR

SEQ ID NO: 57593 - protein, 10 aa, Homo Sapiens
ATENIPVVRR

SEQ ID NO: 57594 - protein, 10 aa, Homo Sapiens
ATIDGSVNPK

SEQ ID NO: 57595 - protein, 10 aa, Homo Sapiens
ATSGIDPVVR

SEQ ID NO: 57596 - protein, 10 aa, Homo Sapiens
ATSPIIIHRL

SEQ ID NO: 57597 - protein, 10 aa, Homo Sapiens
AVANIVNSVK

SEQ ID NO: 57598 - protein, 10 aa, Homo Sapiens
AVIPCFPYAR

SEQ ID NO: 57599 - protein, 10 aa, Homo Sapiens
AVPEAIPTPR

SEQ ID NO: 57600 - protein, 10 aa, Homo Sapiens
AVSSVVNNSR

SEQ ID NO: 57601 - protein, 10 aa, Homo Sapiens
AVVPFLPLQR

SEQ ID NO: 57602 - protein, 10 aa, Homo Sapiens
AVYGQKEIHR

SEQ ID NO: 57603 - protein, 10 aa, Homo Sapiens
CIAEQPQPKR

SEQ ID NO: 57604 - protein, 10 aa, Homo Sapiens
CTADWLPAGR

SEQ ID NO: 57605 - protein, 10 aa, Homo Sapiens
CTADWLPIGR

SEQ ID NO: 57606 - protein, 10 aa, Homo Sapiens
CVSPTVNQRL

SEQ ID NO: 57607 - protein, 10 aa, Homo Sapiens
CVTDISHLVR

SEQ ID NO: 57608 - protein, 10 aa, Homo Sapiens
DAAEIRLVSK

SEQ ID NO: 57609 - protein, 10 aa, Homo Sapiens
DAAFIIGSGR

SEQ ID NO: 57610 - protein, 10 aa, Homo Sapiens
DAAGPREAFR

SEQ ID NO: 57611 - protein, 10 aa, Homo Sapiens
DAFGTGIVEK

SEQ ID NO: 57612 - protein, 10 aa, Homo Sapiens
DAGSVPHVNR

SEQ ID NO: 57613 - protein, 10 aa, Homo Sapiens
DAIQDKKNFR

SEQ ID NO: 57614 - protein, 10 aa, Homo Sapiens
DASLGNLFAR

SEQ ID NO: 57615 - protein, 10 aa, Homo Sapiens
DAWLPGEATR

SEQ ID NO: 57616 - protein, 10 aa, Homo Sapiens
DAYGSELVER

SEQ ID NO: 57617 - protein, 10 aa, Homo Sapiens
DAYPKNPHLR

SEQ ID NO: 57618 - protein, 10 aa, Homo Sapiens
DIFQQTPLGR

SEQ ID NO: 57619 - protein, 10 aa, Homo Sapiens
DIYDRKNMPR

SEQ ID NO: 57620 - protein, 10 aa, Homo Sapiens
DIYEFLPSKR

SEQ ID NO: 57621 - protein, 10 aa, Homo Sapiens
DLFPTSDTPR

SEQ ID NO: 57622 - protein, 10 aa, Homo Sapiens
DSAPPSSVAR

SEQ ID NO: 57623 - protein, 10 aa, Homo Sapiens
DSAPPTPVNR

SEQ ID NO: 57624 - protein, 10 aa, Homo Sapiens
DSINVIDVNK

SEQ ID NO: 57625 - protein, 10 aa, Homo Sapiens
DTFSVAFIKK

SEQ ID NO: 57626 - protein, 10 aa, Homo Sapiens
DTGTLRPVRR

SEQ ID NO: 57627 - protein, 10 aa, Homo Sapiens
DTIRPEHVLR

SEQ ID NO: 57628 - protein, 10 aa, Homo Sapiens
DTMKVLGVQR

SEQ ID NO: 57629 - protein, 10 aa, Homo Sapiens
DTPGFIVNRL

SEQ ID NO: 57630 - protein, 10 aa, Homo Sapiens
DTSGGTTALR

SEQ ID NO: 57631 - protein, 10 aa, Homo Sapiens
DTSRLTKITK

SEQ ID NO: 57632 - protein, 10 aa, Homo Sapiens
DTVATLPRGR

SEQ ID NO: 57633 - protein, 10 aa, Homo Sapiens
DTVDLTSVLR

SEQ ID NO: 57634 - protein, 10 aa, Homo Sapiens
DTVSVPYVFR

SEQ ID NO: 57635 - protein, 10 aa, Homo Sapiens
DTVTMQVTAR

SEQ ID NO: 57636 - protein, 10 aa, Homo Sapiens
DVAAVVDGRL

SEQ ID NO: 57637 - protein, 10 aa, Homo Sapiens
DVASVIVTKL

SEQ ID NO: 57638 - protein, 10 aa, Homo Sapiens
DVAYINVETK

SEQ ID NO: 57639 - protein, 10 aa, Homo Sapiens
DVIDGPISQR

SEQ ID NO: 57640 - protein, 10 aa, Homo Sapiens
DVIKPGTVKR

SEQ ID NO: 57641 - protein, 10 aa, Homo Sapiens
DVISNINITR

SEQ ID NO: 57642 - protein, 10 aa, Homo Sapiens
DVMASGTVKR

SEQ ID NO: 57643 - protein, 10 aa, Homo Sapiens
DVMVGPFKLR

SEQ ID NO: 57644 - protein, 10 aa, Homo Sapiens
DVQGALVNLR

SEQ ID NO: 57645 - protein, 10 aa, Homo Sapiens
DVSPVKPLSR

SEQ ID NO: 57646 - protein, 10 aa, Homo Sapiens
DVVGPVSLPR

SEQ ID NO: 57647 - protein, 10 aa, Homo Sapiens
DVVKLTKNSK

SEQ ID NO: 57648 - protein, 10 aa, Homo Sapiens
DVVNVVFVDR

SEQ ID NO: 57649 - protein, 10 aa, Homo Sapiens
DVYDAFPPLR

SEQ ID NO: 57650 - protein, 10 aa, Homo Sapiens
EAAAVHGARF

SEQ ID NO: 57651 - protein, 10 aa, Homo Sapiens
EAAKDLLYRR

SEQ ID NO: 57652 - protein, 10 aa, Homo Sapiens
EAAQLREERL

SEQ ID NO: 57653 - protein, 10 aa, Homo Sapiens
EAAVVAVAEK

SEQ ID NO: 57654 - protein, 10 aa, Homo Sapiens
EAAVVQSCTR

SEQ ID NO: 57655 - protein, 10 aa, Homo Sapiens
EAFEHPNVVR

SEQ ID NO: 57656 - protein, 10 aa, Homo Sapiens
EAFGKIVAER

SEQ ID NO: 57657 - protein, 10 aa, Homo Sapiens
EAFKDIPVQR

SEQ ID NO: 57658 - protein, 10 aa, Homo Sapiens
EAFKPILSTR

SEQ ID NO: 57659 - protein, 10 aa, Homo Sapiens
EAFPSQGTKR

SEQ ID NO: 57660 - protein, 10 aa, Homo Sapiens
EAHFVPLVKR

SEQ ID NO: 57661 - protein, 10 aa, Homo Sapiens
EAIGPVHQNR

SEQ ID NO: 57662 - protein, 10 aa, Homo Sapiens
EAILLEIPRL

SEQ ID NO: 57663 - protein, 10 aa, Homo Sapiens
EAINITNNEK

SEQ ID NO: 57664 - protein, 10 aa, Homo Sapiens
EAKNPADLPK

SEQ ID NO: 57665 - protein, 10 aa, Homo Sapiens
EALGSGLVSR

SEQ ID NO: 57666 - protein, 10 aa, Homo Sapiens
EAMIEVNINK

SEQ ID NO: 57667 - protein, 10 aa, Homo Sapiens
EANSNAVRFR

SEQ ID NO: 57668 - protein, 10 aa, Homo Sapiens
EAPIISNSER

SEQ ID NO: 57669 - protein, 10 aa, Homo Sapiens
EAQKPYLVQR

SEQ ID NO: 57670 - protein, 10 aa, Homo Sapiens
EAVAPEFTNR

SEQ ID NO: 57671 - protein, 10 aa, Homo Sapiens
EAVSVYPEKL

SEQ ID NO: 57672 - protein, 10 aa, Homo Sapiens
EAYFVPLVKR

SEQ ID NO: 57673 - protein, 10 aa, Homo Sapiens
EDFNHEPCQR

SEQ ID NO: 57674 - protein, 10 aa, Homo Sapiens
EDYNLIVIER

SEQ ID NO: 57675 - protein, 10 aa, Homo Sapiens
EIAKLKAAQR

SEQ ID NO: 57676 - protein, 10 aa, Homo Sapiens
EIASVAYRYR

SEQ ID NO: 57677 - protein, 10 aa, Homo Sapiens
EIFYTAIVNR

SEQ ID NO: 57678 - protein, 10 aa, Homo Sapiens
EIIEEHLANR

SEQ ID NO: 57679 - protein, 10 aa, Homo Sapiens
EIINEDIAKR

SEQ ID NO: 57680 - protein, 10 aa, Homo Sapiens
EIIQSTPYGR

SEQ ID NO: 57681 - protein, 10 aa, Homo Sapiens
EIISERTKPR

SEQ ID NO: 57682 - protein, 10 aa, Homo Sapiens
EIIVDIATKR

SEQ ID NO: 57683 - protein, 10 aa, Homo Sapiens
EIKGFYDPPR

SEQ ID NO: 57684 - protein, 10 aa, Homo Sapiens
EIKKPPVSER

SEQ ID NO: 57685 - protein, 10 aa, Homo Sapiens
EIPEHFGAVR

SEQ ID NO: 57686 - protein, 10 aa, Homo Sapiens
EIPQLVPIGK

SEQ ID NO: 57687 - protein, 10 aa, Homo Sapiens
EIPTFQPLLK

SEQ ID NO: 57688 - protein, 10 aa, Homo Sapiens
EIVKDLAKPR

SEQ ID NO: 57689 - protein, 10 aa, Homo Sapiens
EIYDRREYSR

SEQ ID NO: 57690 - protein, 10 aa, Homo Sapiens
EIYGGSDSRF

SEQ ID NO: 57691 - protein, 10 aa, Homo Sapiens
ELALIYGTPR

SEQ ID NO: 57692 - protein, 10 aa, Homo Sapiens
ELFHQQGTPR

SEQ ID NO: 57693 - protein, 10 aa, Homo Sapiens
ELPIVTPALR

SEQ ID NO: 57694 - protein, 10 aa, Homo Sapiens
ELSNVLAAMR

SEQ ID NO: 57695 - protein, 10 aa, Homo Sapiens
ELYAEKVATR

SEQ ID NO: 57696 - protein, 10 aa, Homo Sapiens
EMFDGSLYHK

SEQ ID NO: 57697 - protein, 10 aa, Homo Sapiens
EMFVGVGASR

SEQ ID NO: 57698 - protein, 10 aa, Homo Sapiens
ENSPLGEALR

SEQ ID NO: 57699 - protein, 10 aa, Homo Sapiens
ENYGQKIIKK

SEQ ID NO: 57700 - protein, 10 aa, Homo Sapiens
ESAIAIATGK

SEQ ID NO: 57701 - protein, 10 aa, Homo Sapiens
ESFGPQPISR

SEQ ID NO: 57702 - protein, 10 aa, Homo Sapiens
ESFPGSFRGR

SEQ ID NO: 57703 - protein, 10 aa, Homo Sapiens
ESHYALPLGR

SEQ ID NO: 57704 - protein, 10 aa, Homo Sapiens
ESIDDALNCR

SEQ ID NO: 57705 - protein, 10 aa, Homo Sapiens
ESIDPQFTIR

SEQ ID NO: 57706 - protein, 10 aa, Homo Sapiens
ESMLTPPIAR

SEQ ID NO: 57707 - protein, 10 aa, Homo Sapiens
ESVAAPITVR

SEQ ID NO: 57708 - protein, 10 aa, Homo Sapiens
ESVGGRVAER

SEQ ID NO: 57709 - protein, 10 aa, Homo Sapiens
ESVSEVVVNR

SEQ ID NO: 57710 - protein, 10 aa, Homo Sapiens
ESYQEVTVQR

SEQ ID NO: 57711 - protein, 10 aa, Homo Sapiens
ETAFGYKGLK

SEQ ID NO: 57712 - protein, 10 aa, Homo Sapiens
ETAGSTSIPK

SEQ ID NO: 57713 - protein, 10 aa, Homo Sapiens
ETALIDRTGR

SEQ ID NO: 57714 - protein, 10 aa, Homo Sapiens
ETALNSKAYK

SEQ ID NO: 57715 - protein, 10 aa, Homo Sapiens
ETASNEVVYR

SEQ ID NO: 57716 - protein, 10 aa, Homo Sapiens
ETATPAPVEK

SEQ ID NO: 57717 - protein, 10 aa, Homo Sapiens
ETFDFQAMGR

SEQ ID NO: 57718 - protein, 10 aa, Homo Sapiens
ETFEHPNVVR

SEQ ID NO: 57719 - protein, 10 aa, Homo Sapiens
ETFNSITKRR

SEQ ID NO: 57720 - protein, 10 aa, Homo Sapiens
ETFNYNAIDR

SEQ ID NO: 57721 - protein, 10 aa, Homo Sapiens
ETFSGVYKKL

SEQ ID NO: 57722 - protein, 10 aa, Homo Sapiens
ETFSYPDFLR

SEQ ID NO: 57723 - protein, 10 aa, Homo Sapiens
ETFTPNRVEK

SEQ ID NO: 57724 - protein, 10 aa, Homo Sapiens
ETIGKKFEKR

SEQ ID NO: 57725 - protein, 10 aa, Homo Sapiens
ETIGTGGFAK

SEQ ID NO: 57726 - protein, 10 aa, Homo Sapiens
ETIKSLLIRR

SEQ ID NO: 57727 - protein, 10 aa, Homo Sapiens
ETIPLTAEKL

SEQ ID NO: 57728 - protein, 10 aa, Homo Sapiens
ETLGPKPAAR

SEQ ID NO: 57729 - protein, 10 aa, Homo Sapiens
ETLKHSGIGR

SEQ ID NO: 57730 - protein, 10 aa, Homo Sapiens
ETLPPVGVNR

SEQ ID NO: 57731 - protein, 10 aa, Homo Sapiens
ETLSAVTNNR

SEQ ID NO: 57732 - protein, 10 aa, Homo Sapiens
ETLTRPFSGR

SEQ ID NO: 57733 - protein, 10 aa, Homo Sapiens
ETMGTIEVQR

SEQ ID NO: 57734 - protein, 10 aa, Homo Sapiens
ETMSPGVFSR

SEQ ID NO: 57735 - protein, 10 aa, Homo Sapiens
ETNMYEGVGR

SEQ ID NO: 57736 - protein, 10 aa, Homo Sapiens
ETPAISPSKR

SEQ ID NO: 57737 - protein, 10 aa, Homo Sapiens
ETPDIKLFGK

SEQ ID NO: 57738 - protein, 10 aa, Homo Sapiens
ETPDPSGGFR

SEQ ID NO: 57739 - protein, 10 aa, Homo Sapiens
ETPGHTPSLR

SEQ ID NO: 57740 - protein, 10 aa, Homo Sapiens
ETPQVAVIVR

SEQ ID NO: 57741 - protein, 10 aa, Homo Sapiens
ETPTFAKVQR

SEQ ID NO: 57742 - protein, 10 aa, Homo Sapiens
ETQANNLICR

SEQ ID NO: 57743 - protein, 10 aa, Homo Sapiens
ETQPGRLLGR

SEQ ID NO: 57744 - protein, 10 aa, Homo Sapiens
ETSKMKVLRF

SEQ ID NO: 57745 - protein, 10 aa, Homo Sapiens
ETSPLTAEKL

SEQ ID NO: 57746 - protein, 10 aa, Homo Sapiens
ETSRLNIERM

SEQ ID NO: 57747 - protein, 10 aa, Homo Sapiens
ETSTEAATRL

SEQ ID NO: 57748 - protein, 10 aa, Homo Sapiens
ETTPLTIEKL

SEQ ID NO: 57749 - protein, 10 aa, Homo Sapiens
ETVFESRNLR

SEQ ID NO: 57750 - protein, 10 aa, Homo Sapiens
ETVGTGIMGR

SEQ ID NO: 57751 - protein, 10 aa, Homo Sapiens
ETVGVKINEK

SEQ ID NO: 57752 - protein, 10 aa, Homo Sapiens
ETVKVQIHSR

SEQ ID NO: 57753 - protein, 10 aa, Homo Sapiens
ETVNVEPLTK

SEQ ID NO: 57754 - protein, 10 aa, Homo Sapiens
ETVQLRNPPR

SEQ ID NO: 57755 - protein, 10 aa, Homo Sapiens
ETVTGGFGAK

SEQ ID NO: 57756 - protein, 10 aa, Homo Sapiens
ETYEGSPVSK

SEQ ID NO: 57757 - protein, 10 aa, Homo Sapiens
EVAAMENVHR

SEQ ID NO: 57758 - protein, 10 aa, Homo Sapiens
EVAERLGVTR

SEQ ID NO: 57759 - protein, 10 aa, Homo Sapiens
EVAGIINDAK

SEQ ID NO: 57760 - protein, 10 aa, Homo Sapiens
EVAPCMGDRF

SEQ ID NO: 57761 - protein, 10 aa, Homo Sapiens
EVAPPEYHRK

SEQ ID NO: 57762 - protein, 10 aa, Homo Sapiens
EVAQLIQGGR

SEQ ID NO: 57763 - protein, 10 aa, Homo Sapiens
EVASFVADRL

SEQ ID NO: 57764 - protein, 10 aa, Homo Sapiens
EVASVWVERI

SEQ ID NO: 57765 - protein, 10 aa, Homo Sapiens
EVCGQDITTK

SEQ ID NO: 57766 - protein, 10 aa, Homo Sapiens
EVEPGVHLGR

SEQ ID NO: 57767 - protein, 10 aa, Homo Sapiens
EVESTEYVNR

SEQ ID NO: 57768 - protein, 10 aa, Homo Sapiens
EVFFSEKIYK

SEQ ID NO: 57769 - protein, 10 aa, Homo Sapiens
EVFGVTDNPR

SEQ ID NO: 57770 - protein, 10 aa, Homo Sapiens
EVFLAQGTLR

SEQ ID NO: 57771 - protein, 10 aa, Homo Sapiens
EVFNDPKVLK

SEQ ID NO: 57772 - protein, 10 aa, Homo Sapiens
EVFNKFFKER

SEQ ID NO: 57773 - protein, 10 aa, Homo Sapiens
EVFPLKVFGY

SEQ ID NO: 57774 - protein, 10 aa, Homo Sapiens
EVFRTKIVEK

SEQ ID NO: 57775 - protein, 10 aa, Homo Sapiens
EVGDIVKVTR

SEQ ID NO: 57776 - protein, 10 aa, Homo Sapiens
EVGKAGHIMR

SEQ ID NO: 57777 - protein, 10 aa, Homo Sapiens
EVGPEGALGK

SEQ ID NO: 57778 - protein, 10 aa, Homo Sapiens
EVGPGAVGER

SEQ ID NO: 57779 - protein, 10 aa, Homo Sapiens
EVGTASPMAR

SEQ ID NO: 57780 - protein, 10 aa, Homo Sapiens
EVHYHLPVAR

SEQ ID NO: 57781 - protein, 10 aa, Homo Sapiens
EVIKPWITKR

SEQ ID NO: 57782 - protein, 10 aa, Homo Sapiens
EVILATPYGR

SEQ ID NO: 57783 - protein, 10 aa, Homo Sapiens
EVILIDPFHK

SEQ ID NO: 57784 - protein, 10 aa, Homo Sapiens
EVINKNVTEK

SEQ ID NO: 57785 - protein, 10 aa, Homo Sapiens
EVIQLQGDQR

SEQ ID NO: 57786 - protein, 10 aa, Homo Sapiens
EVIRAYDTTK

SEQ ID NO: 57787 - protein, 10 aa, Homo Sapiens
EVISGQKLTR

SEQ ID NO: 57788 - protein, 10 aa, Homo Sapiens
EVKRPGESLR

SEQ ID NO: 57789 - protein, 10 aa, Homo Sapiens
EVLGAPVKGK

SEQ ID NO: 57790 - protein, 10 aa, Homo Sapiens
EVMIAEPSCR

SEQ ID NO: 57791 - protein, 10 aa, Homo Sapiens
EVNQETIQRL

SEQ ID NO: 57792 - protein, 10 aa, Homo Sapiens
EVNQPKFNQR

SEQ ID NO: 57793 - protein, 10 aa, Homo Sapiens
EVPAAYQTPK

SEQ ID NO: 57794 - protein, 10 aa, Homo Sapiens
EVPEGGLVPK

SEQ ID NO: 57795 - protein, 10 aa, Homo Sapiens
EVPEIVPFRL

SEQ ID NO: 57796 - protein, 10 aa, Homo Sapiens
EVPPNQIVGR

SEQ ID NO: 57797 - protein, 10 aa, Homo Sapiens
EVPQIEVTRF

SEQ ID NO: 57798 - protein, 10 aa, Homo Sapiens
EVPREKLASR

SEQ ID NO: 57799 - protein, 10 aa, Homo Sapiens
EVPSEIEVPR

SEQ ID NO: 57800 - protein, 10 aa, Homo Sapiens
EVPSFLVERM

SEQ ID NO: 57801 - protein, 10 aa, Homo Sapiens
EVQDLHLAQR

SEQ ID NO: 57802 - protein, 10 aa, Homo Sapiens
EVSDVEIITR

SEQ ID NO: 57803 - protein, 10 aa, Homo Sapiens
EVSPITGRSK

SEQ ID NO: 57804 - protein, 10 aa, Homo Sapiens
EVSPMYGVQK

SEQ ID NO: 57805 - protein, 10 aa, Homo Sapiens
EVSSVSPLKN

SEQ ID NO: 57806 - protein, 10 aa, Homo Sapiens
EVSTVNVRRR

SEQ ID NO: 57807 - protein, 10 aa, Homo Sapiens
EVTEEGVRFR

SEQ ID NO: 57808 - protein, 10 aa, Homo Sapiens
EVTEGLDVLR

SEQ ID NO: 57809 - protein, 10 aa, Homo Sapiens
EVTNIKKTLK

SEQ ID NO: 57810 - protein, 10 aa, Homo Sapiens
EVTPAMQIPR

SEQ ID NO: 57811 - protein, 10 aa, Homo Sapiens
EVTQDFMMYR

SEQ ID NO: 57812 - protein, 10 aa, Homo Sapiens
EVVAGEFGSR

SEQ ID NO: 57813 - protein, 10 aa, Homo Sapiens
EVVDKSQVSR

SEQ ID NO: 57814 - protein, 10 aa, Homo Sapiens
EVVDSNPYSR

SEQ ID NO: 57815 - protein, 10 aa, Homo Sapiens
EVVDVMVIGR

SEQ ID NO: 57816 - protein, 10 aa, Homo Sapiens
EVVELPVTER

SEQ ID NO: 57817 - protein, 10 aa, Homo Sapiens
EVVIPQKKGK

SEQ ID NO: 57818 - protein, 10 aa, Homo Sapiens
EVVQSSPVER

SEQ ID NO: 57819 - protein, 10 aa, Homo Sapiens
EVVSGSGLTR

SEQ ID NO: 57820 - protein, 10 aa, Homo Sapiens
EVVSQEAELR

SEQ ID NO: 57821 - protein, 10 aa, Homo Sapiens
EVVTGVIGQR

SEQ ID NO: 57822 - protein, 10 aa, Homo Sapiens
EVVTSMGTQR

SEQ ID NO: 57823 - protein, 10 aa, Homo Sapiens
EVVVAFPAAR

SEQ ID NO: 57824 - protein, 10 aa, Homo Sapiens
EVYDGPKNVR

SEQ ID NO: 57825 - protein, 10 aa, Homo Sapiens
EVYNEFVRKR

SEQ ID NO: 57826 - protein, 10 aa, Homo Sapiens
EVYPFGIVGM

SEQ ID NO: 57827 - protein, 10 aa, Homo Sapiens
EVYVEVAYPR

SEQ ID NO: 57828 - protein, 10 aa, Homo Sapiens
EVYVWDVNSR

SEQ ID NO: 57829 - protein, 10 aa, Homo Sapiens
FAAGILESKR

SEQ ID NO: 57830 - protein, 10 aa, Homo Sapiens
FAFEGILIKK

SEQ ID NO: 57831 - protein, 10 aa, Homo Sapiens
FAIQPNTTGK

SEQ ID NO: 57832 - protein, 10 aa, Homo Sapiens
FEITPPVVLR

SEQ ID NO: 57833 - protein, 10 aa, Homo Sapiens
FIIDDKGILR

SEQ ID NO: 57834 - protein, 10 aa, Homo Sapiens
FIIDGKGVLR

SEQ ID NO: 57835 - protein, 10 aa, Homo Sapiens
FNSDVVIVER

SEQ ID NO: 57836 - protein, 10 aa, Homo Sapiens
FPAGVPVSER

SEQ ID NO: 57837 - protein, 10 aa, Homo Sapiens
FSSGETATYR

SEQ ID NO: 57838 - protein, 10 aa, Homo Sapiens
FSVSDLAPPR

SEQ ID NO: 57839 - protein, 10 aa, Homo Sapiens
FTASGEAEAR

SEQ ID NO: 57840 - protein, 10 aa, Homo Sapiens
FTIDDFEIGR

SEQ ID NO: 57841 - protein, 10 aa, Homo Sapiens
FTMASSPAQR

SEQ ID NO: 57842 - protein, 10 aa, Homo Sapiens
FVSTVPSKLR

SEQ ID NO: 57843 - protein, 10 aa, Homo Sapiens
FVWTEPHSKR

SEQ ID NO: 57844 - protein, 10 aa, Homo Sapiens
FVYEPKEQKK

SEQ ID NO: 57845 - protein, 10 aa, Homo Sapiens
GLSPGVSVRS

SEQ ID NO: 57846 - protein, 10 aa, Homo Sapiens
GTFGEVFKAR

SEQ ID NO: 57847 - protein, 10 aa, Homo Sapiens
GTVFIIQGLR

SEQ ID NO: 57848 - protein, 10 aa, Homo Sapiens
GVFEGIPTYR

SEQ ID NO: 57849 - protein, 10 aa, Homo Sapiens
HAFHFHCISR

SEQ ID NO: 57850 - protein, 10 aa, Homo Sapiens
HAIKSVKIYR

SEQ ID NO: 57851 - protein, 10 aa, Homo Sapiens
HNMDVPNIKR

SEQ ID NO: 57852 - protein, 10 aa, Homo Sapiens
HPSKVVITRL

SEQ ID NO: 57853 - protein, 10 aa, Homo Sapiens
HSAPLTPVAR

SEQ ID NO: 57854 - protein, 10 aa, Homo Sapiens
HSAVGQGVPR

SEQ ID NO: 57855 - protein, 10 aa, Homo Sapiens
HTAQIEIVRL

SEQ ID NO: 57856 - protein, 10 aa, Homo Sapiens
HTGPQQDPRL

SEQ ID NO: 57857 - protein, 10 aa, Homo Sapiens
HTIAPMGTRR

SEQ ID NO: 57858 - protein, 10 aa, Homo Sapiens
HTSISSLFER

SEQ ID NO: 57859 - protein, 10 aa, Homo Sapiens
HTVRDHLVGR

SEQ ID NO: 57860 - protein, 10 aa, Homo Sapiens
HVIRGYVGNR

SEQ ID NO: 57861 - protein, 10 aa, Homo Sapiens
HVSLITPTKR

SEQ ID NO: 57862 - protein, 10 aa, Homo Sapiens
HVYDGKFLAR

SEQ ID NO: 57863 - protein, 10 aa, Homo Sapiens
HVYVGNISKK

SEQ ID NO: 57864 - protein, 10 aa, Homo Sapiens
IAIKPDGVQR

SEQ ID NO: 57865 - protein, 10 aa, Homo Sapiens
IIQNVPVHQR

SEQ ID NO: 57866 - protein, 10 aa, Homo Sapiens
IPAAIATAKR

SEQ ID NO: 57867 - protein, 10 aa, Homo Sapiens
IPFGNNPIFR

SEQ ID NO: 57868 - protein, 10 aa, Homo Sapiens
IPVNGGLAAR

SEQ ID NO: 57869 - protein, 10 aa, Homo Sapiens
ISFSGLPSGR

SEQ ID NO: 57870 - protein, 10 aa, Homo Sapiens
ITAGLDPVGR

SEQ ID NO: 57871 - protein, 10 aa, Homo Sapiens
ITFDVAPSRL

SEQ ID NO: 57872 - protein, 10 aa, Homo Sapiens
ITIEIPEVLK

SEQ ID NO: 57873 - protein, 10 aa, Homo Sapiens
ITNNIDPVGR

SEQ ID NO: 57874 - protein, 10 aa, Homo Sapiens
ITSIVVLVER

SEQ ID NO: 57875 - protein, 10 aa, Homo Sapiens
ITSPPNALPR

SEQ ID NO: 57876 - protein, 10 aa, Homo Sapiens
IVFPETSQPR

SEQ ID NO: 57877 - protein, 10 aa, Homo Sapiens
IVKGPRGTLR

SEQ ID NO: 57878 - protein, 10 aa, Homo Sapiens
IVLVYITYHW

SEQ ID NO: 57879 - protein, 10 aa, Homo Sapiens
IVVDAIDVLK

SEQ ID NO: 57880 - protein, 10 aa, Homo Sapiens
KASAALSVPR

SEQ ID NO: 57881 - protein, 10 aa, Homo Sapiens
LAAGIVGNLR

SEQ ID NO: 57882 - protein, 10 aa, Homo Sapiens
LGGSRGAPGL

SEQ ID NO: 57883 - protein, 10 aa, Homo Sapiens
LPSPSHVGPI

SEQ ID NO: 57884 - protein, 10 aa, Homo Sapiens
LVAEGLATRR

SEQ ID NO: 57885 - protein, 10 aa, Homo Sapiens
LVAEITPKGR

SEQ ID NO: 57886 - protein, 10 aa, Homo Sapiens
LVAEQVTYQR

SEQ ID NO: 57887 - protein, 10 aa, Homo Sapiens
LVFPSEIVGK

SEQ ID NO: 57888 - protein, 10 aa, Homo Sapiens
LVHDGLGDLR

SEQ ID NO: 57889 - protein, 10 aa, Homo Sapiens
LVKGAEITGK

SEQ ID NO: 57890 - protein, 10 aa, Homo Sapiens
LVQEQPLPEP

SEQ ID NO: 57891 - protein, 10 aa, Homo Sapiens
MTKSGYQPPR

SEQ ID NO: 57892 - protein, 10 aa, Homo Sapiens
MTQDAQNALR

SEQ ID NO: 57893 - protein, 10 aa, Homo Sapiens
MTSALPIIQK

SEQ ID NO: 57894 - protein, 10 aa, Homo Sapiens
MVSSQTKTVR

SEQ ID NO: 57895 - protein, 10 aa, Homo Sapiens
MVWEGYNVVR

SEQ ID NO: 57896 - protein, 10 aa, Homo Sapiens
MVYPFTGDHK

SEQ ID NO: 57897 - protein, 10 aa, Homo Sapiens
NAYTGIVLLR

SEQ ID NO: 57898 - protein, 10 aa, Homo Sapiens
NGTSSVIVSR

SEQ ID NO: 57899 - protein, 10 aa, Homo Sapiens
NIISGSGRPR

SEQ ID NO: 57900 - protein, 10 aa, Homo Sapiens
NSAGPYFNPR

SEQ ID NO: 57901 - protein, 10 aa, Homo Sapiens
NSFDPSKITR

SEQ ID NO: 57902 - protein, 10 aa, Homo Sapiens
NTFDFIKVLR

SEQ ID NO: 57903 - protein, 10 aa, Homo Sapiens
NTFLGTPVQK

SEQ ID NO: 57904 - protein, 10 aa, Homo Sapiens
NTFRRDPTAR

SEQ ID NO: 57905 - protein, 10 aa, Homo Sapiens
NTIDQKIVER

SEQ ID NO: 57906 - protein, 10 aa, Homo Sapiens
NTITPVVGKK

SEQ ID NO: 57907 - protein, 10 aa, Homo Sapiens
NTPAIPSFKR

SEQ ID NO: 57908 - protein, 10 aa, Homo Sapiens
NTSNMPVAAR

SEQ ID NO: 57909 - protein, 10 aa, Homo Sapiens
NTSPYSVQQR

SEQ ID NO: 57910 - protein, 10 aa, Homo Sapiens
NTVDEVYVSR

SEQ ID NO: 57911 - protein, 10 aa, Homo Sapiens
NVAEKNWYPR

SEQ ID NO: 57912 - protein, 10 aa, Homo Sapiens
NVAPIAGETK

SEQ ID NO: 57913 - protein, 10 aa, Homo Sapiens
NVAPLKTHFR

SEQ ID NO: 57914 - protein, 10 aa, Homo Sapiens
NVIDWSDVRK

SEQ ID NO: 57915 - protein, 10 aa, Homo Sapiens
NVKDKPTVER

SEQ ID NO: 57916 - protein, 10 aa, Homo Sapiens
NVPNSAIYKR

SEQ ID NO: 57917 - protein, 10 aa, Homo Sapiens
NVTDDTYYYR

SEQ ID NO: 57918 - protein, 10 aa, Homo Sapiens
NVVKFYGHRR

SEQ ID NO: 57919 - protein, 10 aa, Homo Sapiens
NVVNLIEICR

SEQ ID NO: 57920 - protein, 10 aa, Homo Sapiens
NVYPAECRGR

SEQ ID NO: 57921 - protein, 10 aa, Homo Sapiens
NVYPSKPLTK

SEQ ID NO: 57922 - protein, 10 aa, Homo Sapiens
PGEEPPIVRR

SEQ ID NO: 57923 - protein, 10 aa, Homo Sapiens
PRTSEIYVHR

SEQ ID NO: 57924 - protein, 10 aa, Homo Sapiens
QIFPSKPVSR

SEQ ID NO: 57925 - protein, 10 aa, Homo Sapiens
QLAQFHFTNR

SEQ ID NO: 57926 - protein, 10 aa, Homo Sapiens
QTIPPPYVVR

SEQ ID NO: 57927 - protein, 10 aa, Homo Sapiens
QTMSDQIIGR

SEQ ID NO: 57928 - protein, 10 aa, Homo Sapiens
QTQGPPDYPR

SEQ ID NO: 57929 - protein, 10 aa, Homo Sapiens
QTSGLPSSVR

SEQ ID NO: 57930 - protein, 10 aa, Homo Sapiens
QVADVVVSRW

SEQ ID NO: 57931 - protein, 10 aa, Homo Sapiens
QVANSAFVER

SEQ ID NO: 57932 - protein, 10 aa, Homo Sapiens
QVAPAQLVTR

SEQ ID NO: 57933 - protein, 10 aa, Homo Sapiens
QVEPGVHLGR

SEQ ID NO: 57934 - protein, 10 aa, Homo Sapiens
QVFNSKVTSR

SEQ ID NO: 57935 - protein, 10 aa, Homo Sapiens
QVSDVPATSR

SEQ ID NO: 57936 - protein, 10 aa, Homo Sapiens
SAAAVFNDRL

SEQ ID NO: 57937 - protein, 10 aa, Homo Sapiens
SAAAVLSHNR

SEQ ID NO: 57938 - protein, 10 aa, Homo Sapiens
SAAGPVAAPR

SEQ ID NO: 57939 - protein, 10 aa, Homo Sapiens
SAAPGTPLAR

SEQ ID NO: 57940 - protein, 10 aa, Homo Sapiens
SAVDITKVAR

SEQ ID NO: 57941 - protein, 10 aa, Homo Sapiens
SAYDQKNIRR

SEQ ID NO: 57942 - protein, 10 aa, Homo Sapiens
SIFDGRVVAK

SEQ ID NO: 57943 - protein, 10 aa, Homo Sapiens
SLPDFPAAAK

SEQ ID NO: 57944 - protein, 10 aa, Homo Sapiens
SNSGITRVEK

SEQ ID NO: 57945 - protein, 10 aa, Homo Sapiens
SPSPLGGIKR

SEQ ID NO: 57946 - protein, 10 aa, Homo Sapiens
SSAGGSFTVR

SEQ ID NO: 57947 - protein, 10 aa, Homo Sapiens
SSSTVVSTQR

SEQ ID NO: 57948 - protein, 10 aa, Homo Sapiens
STCQTISVDR

SEQ ID NO: 57949 - protein, 10 aa, Homo Sapiens
STFDTQITKK

SEQ ID NO: 57950 - protein, 10 aa, Homo Sapiens
STFNFHPNVR

SEQ ID NO: 57951 - protein, 10 aa, Homo Sapiens
STFNQVVLKR

SEQ ID NO: 57952 - protein, 10 aa, Homo Sapiens
STPSDINSPR

SEQ ID NO: 57953 - protein, 10 aa, Homo Sapiens
STSEAPQPPR

SEQ ID NO: 57954 - protein, 10 aa, Homo Sapiens
STSETPQPPR

SEQ ID NO: 57955 - protein, 10 aa, Homo Sapiens
STTEVTQPRT

SEQ ID NO: 57956 - protein, 10 aa, Homo Sapiens
STVGGWVSTR

SEQ ID NO: 57957 - protein, 10 aa, Homo Sapiens
STWGSPGWVR

SEQ ID NO: 57958 - protein, 10 aa, Homo Sapiens
STYYGSFVTR

SEQ ID NO: 57959 - protein, 10 aa, Homo Sapiens
SVAEMPQNYR

SEQ ID NO: 57960 - protein, 10 aa, Homo Sapiens
SVAGMPATSR

SEQ ID NO: 57961 - protein, 10 aa, Homo Sapiens
SVASTPISQR

SEQ ID NO: 57962 - protein, 10 aa, Homo Sapiens
SVFDAYVLPK

SEQ ID NO: 57963 - protein, 10 aa, Homo Sapiens
SVFEDPVISK

SEQ ID NO: 57964 - protein, 10 aa, Homo Sapiens
SVFEERPERR

SEQ ID NO: 57965 - protein, 10 aa, Homo Sapiens
SVFGSGNTGR

SEQ ID NO: 57966 - protein, 10 aa, Homo Sapiens
SVFNEHPSRR

SEQ ID NO: 57967 - protein, 10 aa, Homo Sapiens
SVFPQNGAAR

SEQ ID NO: 57968 - protein, 10 aa, Homo Sapiens
SVGEITGHNK

SEQ ID NO: 57969 - protein, 10 aa, Homo Sapiens
SVIDSVTKKR

SEQ ID NO: 57970 - protein, 10 aa, Homo Sapiens
SVINPGAIYR

SEQ ID NO: 57971 - protein, 10 aa, Homo Sapiens
SVINSVSTSR

SEQ ID NO: 57972 - protein, 10 aa, Homo Sapiens
SVISGPQNTR

SEQ ID NO: 57973 - protein, 10 aa, Homo Sapiens
SVPPPPAVGR

SEQ ID NO: 57974 - protein, 10 aa, Homo Sapiens
SVSEGLNVPR

SEQ ID NO: 57975 - protein, 10 aa, Homo Sapiens
SVSEVHPSRL

SEQ ID NO: 57976 - protein, 10 aa, Homo Sapiens
SVSPPQEARL

SEQ ID NO: 57977 - protein, 10 aa, Homo Sapiens
SVSSSTHFTR

SEQ ID NO: 57978 - protein, 10 aa, Homo Sapiens
SVTEAIPVSR

SEQ ID NO: 57979 - protein, 10 aa, Homo Sapiens
SVVEGGLRAR

SEQ ID NO: 57980 - protein, 10 aa, Homo Sapiens
SVYGYGVQKR

SEQ ID NO: 57981 - protein, 10 aa, Homo Sapiens
TAAAIGATPR

SEQ ID NO: 57982 - protein, 10 aa, Homo Sapiens
TAADLGSVVR

SEQ ID NO: 57983 - protein, 10 aa, Homo Sapiens
TAAGQGILSR

SEQ ID NO: 57984 - protein, 10 aa, Homo Sapiens
TAAPAYGLPK

SEQ ID NO: 57985 - protein, 10 aa, Homo Sapiens
TADGVPVSSR

SEQ ID NO: 57986 - protein, 10 aa, Homo Sapiens
TAFEEAQLPR

SEQ ID NO: 57987 - protein, 10 aa, Homo Sapiens
TAMDVVYALK

SEQ ID NO: 57988 - protein, 10 aa, Homo Sapiens
TAYGGKYSVK

SEQ ID NO: 57989 - protein, 10 aa, Homo Sapiens
TDLEPPVVKR

SEQ ID NO: 57990 - protein, 10 aa, Homo Sapiens
TDNSLICVAR

SEQ ID NO: 57991 - protein, 10 aa, Homo Sapiens
TIIDLPGITR

SEQ ID NO: 57992 - protein, 10 aa, Homo Sapiens
TIIEKPPAER

SEQ ID NO: 57993 - protein, 10 aa, Homo Sapiens
TIMEDYFAYR

SEQ ID NO: 57994 - protein, 10 aa, Homo Sapiens
TIPQFQNFYR

SEQ ID NO: 57995 - protein, 10 aa, Homo Sapiens
TPFNYNPSPR

SEQ ID NO: 57996 - protein, 10 aa, Homo Sapiens
TSAALPQSQR

SEQ ID NO: 57997 - protein, 10 aa, Homo Sapiens
TSAESWGTGR

SEQ ID NO: 57998 - protein, 10 aa, Homo Sapiens
TSFDGSLIQK

SEQ ID NO: 57999 - protein, 10 aa, Homo Sapiens
TSFPLSGPPR

SEQ ID NO: 58000 - protein, 10 aa, Homo Sapiens
TTARIRDTLR

SEQ ID NO: 58001 - protein, 10 aa, Homo Sapiens
TTFPESHLRT

SEQ ID NO: 58002 - protein, 10 aa, Homo Sapiens
TTFPLPVATR

SEQ ID NO: 58003 - protein, 10 aa, Homo Sapiens
TTFPMSNHTR

SEQ ID NO: 58004 - protein, 10 aa, Homo Sapiens
TTISKYFSER

SEQ ID NO: 58005 - protein, 10 aa, Homo Sapiens
TTISSFPQLK

SEQ ID NO: 58006 - protein, 10 aa, Homo Sapiens
TTLEHQKTFR

SEQ ID NO: 58007 - protein, 10 aa, Homo Sapiens
TTLELLEVRR

SEQ ID NO: 58008 - protein, 10 aa, Homo Sapiens
TTNDIVISKL

SEQ ID NO: 58009 - protein, 10 aa, Homo Sapiens
TTSDPPNICK

SEQ ID NO: 58010 - protein, 10 aa, Homo Sapiens
TTSPSGSLLR

SEQ ID NO: 58011 - protein, 10 aa, Homo Sapiens
TTTGVDPVAK

SEQ ID NO: 58012 - protein, 10 aa, Homo Sapiens
TTTQITKTVK

SEQ ID NO: 58013 - protein, 10 aa, Homo Sapiens
TTVDIFHKKH

SEQ ID NO: 58014 - protein, 10 aa, Homo Sapiens
TTVQVKEVNR

SEQ ID NO: 58015 - protein, 10 aa, Homo Sapiens
TTVTVAPAPR

SEQ ID NO: 58016 - protein, 10 aa, Homo Sapiens
TVAEIKKQYR

SEQ ID NO: 58017 - protein, 10 aa, Homo Sapiens
TVAEKLDWAR

SEQ ID NO: 58018 - protein, 10 aa, Homo Sapiens
TVAPSVGITR

SEQ ID NO: 58019 - protein, 10 aa, Homo Sapiens
TVENFGQLGR

SEQ ID NO: 58020 - protein, 10 aa, Homo Sapiens
TVFNVDLPCR

SEQ ID NO: 58021 - protein, 10 aa, Homo Sapiens
TVFRTPAIKR

SEQ ID NO: 58022 - protein, 10 aa, Homo Sapiens
TVIDVSTADR

SEQ ID NO: 58023 - protein, 10 aa, Homo Sapiens
TVISGPGTGK

SEQ ID NO: 58024 - protein, 10 aa, Homo Sapiens
TVNTSLNVYR

SEQ ID NO: 58025 - protein, 10 aa, Homo Sapiens
TVVDIDPPLR

SEQ ID NO: 58026 - protein, 10 aa, Homo Sapiens
TVVEDVTVGR

SEQ ID NO: 58027 - protein, 10 aa, Homo Sapiens
TVVYFPVRGR

SEQ ID NO: 58028 - protein, 10 aa, Homo Sapiens
VAFINEKMAR

SEQ ID NO: 58029 - protein, 10 aa, Homo Sapiens
VFDAKRLIGR

SEQ ID NO: 58030 - protein, 10 aa, Homo Sapiens
VLTGKMEKGL

SEQ ID NO: 58031 - protein, 10 aa, Homo Sapiens
VTIFIRGGNK

SEQ ID NO: 58032 - protein, 10 aa, Homo Sapiens
WTMSNITAGR

SEQ ID NO: 58033 - protein, 10 aa, Homo Sapiens
YAAISQVDRL

SEQ ID NO: 58034 - protein, 10 aa, Homo Sapiens
YAFNSGNVER

SEQ ID NO: 58035 - protein, 10 aa, Homo Sapiens
YAGGPSGVAR

SEQ ID NO: 58036 - protein, 10 aa, Homo Sapiens
YANEVGEAFR

SEQ ID NO: 58037 - protein, 10 aa, Homo Sapiens
YDPRNPVNKR

SEQ ID NO: 58038 - protein, 10 aa, Homo Sapiens
YIITGGGFLR

SEQ ID NO: 58039 - protein, 10 aa, Homo Sapiens
YLITFNPVGR

SEQ ID NO: 58040 - protein, 10 aa, Homo Sapiens
YTFQDKQVSR

SEQ ID NO: 58041 - protein, 10 aa, Homo Sapiens
YTFYSISQER

SEQ ID NO: 58042 - protein, 10 aa, Homo Sapiens
YTKDAMPINK

SEQ ID NO: 58043 - protein, 10 aa, Homo Sapiens
YTSGIPSSSR

SEQ ID NO: 58044 - protein, 10 aa, Homo Sapiens
YVADLGDILK

SEQ ID NO: 58045 - protein, 10 aa, Homo Sapiens
YVYPDKTRPR

SEQ ID NO: 58046 - protein, 11 aa, Homo Sapiens
AAAAAGAFAGR

SEQ ID NO: 58047 - protein, 11 aa, Homo Sapiens
AMVIVALIDRM

SEQ ID NO: 58048 - protein, 11 aa, Homo Sapiens
ATAGDGLIELR

SEQ ID NO: 58049 - protein, 11 aa, Homo Sapiens
ATIDVEHSHVR

SEQ ID NO: 58050 - protein, 11 aa, Homo Sapiens
AVFPSLLTNPK

SEQ ID NO: 58051 - protein, 11 aa, Homo Sapiens
AVVDFKAVQGR

SEQ ID NO: 58052 - protein, 11 aa, Homo Sapiens
AVVDVRIGMTR

SEQ ID NO: 58053 - protein, 11 aa, Homo Sapiens
CTIKTDPVTGR

SEQ ID NO: 58054 - protein, 11 aa, Homo Sapiens
CVVVVNPQTKR

SEQ ID NO: 58055 - protein, 11 aa, Homo Sapiens
DAAHPTNVQRL

SEQ ID NO: 58056 - protein, 11 aa, Homo Sapiens
DANGNSFATRI

SEQ ID NO: 58057 - protein, 11 aa, Homo Sapiens
DASPASAGICR

SEQ ID NO: 58058 - protein, 11 aa, Homo Sapiens
DAVPCSTTINR

SEQ ID NO: 58059 - protein, 11 aa, Homo Sapiens
DAVQTVTGGLR

SEQ ID NO: 58060 - protein, 11 aa, Homo Sapiens
DIAEPGSVAGR

SEQ ID NO: 58061 - protein, 11 aa, Homo Sapiens
DIYNSDPLICR

SEQ ID NO: 58062 - protein, 11 aa, Homo Sapiens
DLADLSCLVYR

SEQ ID NO: 58063 - protein, 11 aa, Homo Sapiens
DLALSFRVGAR

SEQ ID NO: 58064 - protein, 11 aa, Homo Sapiens
DLFEDGGIIRR

SEQ ID NO: 58065 - protein, 11 aa, Homo Sapiens
DPAGALQAAFR

SEQ ID NO: 58066 - protein, 11 aa, Homo Sapiens
DSFCSNGVTHR

SEQ ID NO: 58067 - protein, 11 aa, Homo Sapiens
DSIGSTVSSER

SEQ ID NO: 58068 - protein, 11 aa, Homo Sapiens
DSMLVDPKHHR

SEQ ID NO: 58069 - protein, 11 aa, Homo Sapiens
DSSSVASKVFR

SEQ ID NO: 58070 - protein, 11 aa, Homo Sapiens
DSVLMEQPPLR

SEQ ID NO: 58071 - protein, 11 aa, Homo Sapiens
DSYASGEGLKR

SEQ ID NO: 58072 - protein, 11 aa, Homo Sapiens
DTAPCPINNER

SEQ ID NO: 58073 - protein, 11 aa, Homo Sapiens
DTIDERAINKK

SEQ ID NO: 58074 - protein, 11 aa, Homo Sapiens
DTIDERTINKK

SEQ ID NO: 58075 - protein, 11 aa, Homo Sapiens
DTISNKKVLPK

SEQ ID NO: 58076 - protein, 11 aa, Homo Sapiens
DTISPYSRMKR

SEQ ID NO: 58077 - protein, 11 aa, Homo Sapiens
DTITTDTGFMR

SEQ ID NO: 58078 - protein, 11 aa, Homo Sapiens
DTIVSGTLPQR

SEQ ID NO: 58079 - protein, 11 aa, Homo Sapiens
DTSSLPTVIMR

SEQ ID NO: 58080 - protein, 11 aa, Homo Sapiens
DTVPSVSSINR

SEQ ID NO: 58081 - protein, 11 aa, Homo Sapiens
DVAALHGPVVR

SEQ ID NO: 58082 - protein, 11 aa, Homo Sapiens
DVFKSNKEVGR

SEQ ID NO: 58083 - protein, 11 aa, Homo Sapiens
DVFSGVKPLTR

SEQ ID NO: 58084 - protein, 11 aa, Homo Sapiens
DVFVVGTERGR

SEQ ID NO: 58085 - protein, 11 aa, Homo Sapiens
DVISVEKTVKR

SEQ ID NO: 58086 - protein, 11 aa, Homo Sapiens
DVITDSPTHKR

SEQ ID NO: 58087 - protein, 11 aa, Homo Sapiens
DVITIIDRSFR

SEQ ID NO: 58088 - protein, 11 aa, Homo Sapiens
DVTPIPSDSTR

SEQ ID NO: 58089 - protein, 11 aa, Homo Sapiens
DVVKLTKNSKR

SEQ ID NO: 58090 - protein, 11 aa, Homo Sapiens
DVVYALKRQGR

SEQ ID NO: 58091 - protein, 11 aa, Homo Sapiens
EAAAISGLQKR

SEQ ID NO: 58092 - protein, 11 aa, Homo Sapiens
EAANKVVLQLK

SEQ ID NO: 58093 - protein, 11 aa, Homo Sapiens
EAANYQDTIGR

SEQ ID NO: 58094 - protein, 11 aa, Homo Sapiens
EAAPDPAGVGR

SEQ ID NO: 58095 - protein, 11 aa, Homo Sapiens
EAAPGALGQVK

SEQ ID NO: 58096 - protein, 11 aa, Homo Sapiens
EAASYLDQISR

SEQ ID NO: 58097 - protein, 11 aa, Homo Sapiens
EAAVAIKAMAK

SEQ ID NO: 58098 - protein, 11 aa, Homo Sapiens
EAAVVAVAEKR

SEQ ID NO: 58099 - protein, 11 aa, Homo Sapiens
EAFEHPNVVRL

SEQ ID NO: 58100 - protein, 11 aa, Homo Sapiens
EAFRNLVPVTR

SEQ ID NO: 58101 - protein, 11 aa, Homo Sapiens
EAFSQFGPIER

SEQ ID NO: 58102 - protein, 11 aa, Homo Sapiens
EAFSTPQQLEK

SEQ ID NO: 58103 - protein, 11 aa, Homo Sapiens
EAFSVFGQVER

SEQ ID NO: 58104 - protein, 11 aa, Homo Sapiens
EAFTSEHWLVR

SEQ ID NO: 58105 - protein, 11 aa, Homo Sapiens
EAGPGPRPLAR

SEQ ID NO: 58106 - protein, 11 aa, Homo Sapiens
EAHQAETEVLR

SEQ ID NO: 58107 - protein, 11 aa, Homo Sapiens
EAICPEGIARL

SEQ ID NO: 58108 - protein, 11 aa, Homo Sapiens
EAISEVLQDLR

SEQ ID NO: 58109 - protein, 11 aa, Homo Sapiens
EALHQKNIVHR

SEQ ID NO: 58110 - protein, 11 aa, Homo Sapiens
EALPHVVPTLR

SEQ ID NO: 58111 - protein, 11 aa, Homo Sapiens
EASEEAVSVQR

SEQ ID NO: 58112 - protein, 11 aa, Homo Sapiens
EAVGSYAENQR

SEQ ID NO: 58113 - protein, 11 aa, Homo Sapiens
EAVKPTVGMKR

SEQ ID NO: 58114 - protein, 11 aa, Homo Sapiens
EAYEVLSDAKK

SEQ ID NO: 58115 - protein, 11 aa, Homo Sapiens
EIADTMVQIFK

SEQ ID NO: 58116 - protein, 11 aa, Homo Sapiens
EIAQNNVEVAR

SEQ ID NO: 58117 - protein, 11 aa, Homo Sapiens
EIARFFKLHER

SEQ ID NO: 58118 - protein, 11 aa, Homo Sapiens
EIARFYKLHER

SEQ ID NO: 58119 - protein, 11 aa, Homo Sapiens
EIASFDKAKLK

SEQ ID NO: 58120 - protein, 11 aa, Homo Sapiens
EIIAPSPQRSR

SEQ ID NO: 58121 - protein, 11 aa, Homo Sapiens
EIKGTNGQVTR

SEQ ID NO: 58122 - protein, 11 aa, Homo Sapiens
EIPDNVGDWLR

SEQ ID NO: 58123 - protein, 11 aa, Homo Sapiens
EIVGNLPSAMR

SEQ ID NO: 58124 - protein, 11 aa, Homo Sapiens
EIVTERSVSSR

SEQ ID NO: 58125 - protein, 11 aa, Homo Sapiens
EIYDRREYSRF

SEQ ID NO: 58126 - protein, 11 aa, Homo Sapiens
ELFEDSQLTTR

SEQ ID NO: 58127 - protein, 11 aa, Homo Sapiens
ELFHVEPGLQR

SEQ ID NO: 58128 - protein, 11 aa, Homo Sapiens
ELFRPKDPQGR

SEQ ID NO: 58129 - protein, 11 aa, Homo Sapiens
ELITQRELVSR

SEQ ID NO: 58130 - protein, 11 aa, Homo Sapiens
ELVEPSSVALR

SEQ ID NO: 58131 - protein, 11 aa, Homo Sapiens
ESAGGLIQTAR

SEQ ID NO: 58132 - protein, 11 aa, Homo Sapiens
ESFASDPILYR

SEQ ID NO: 58133 - protein, 11 aa, Homo Sapiens
ESFFPYQVTER

SEQ ID NO: 58134 - protein, 11 aa, Homo Sapiens
ESFGPQPISRL

SEQ ID NO: 58135 - protein, 11 aa, Homo Sapiens
ESFPELTIITR

SEQ ID NO: 58136 - protein, 11 aa, Homo Sapiens
ESFPSIGPQRL

SEQ ID NO: 58137 - protein, 11 aa, Homo Sapiens
ESFSDYPPLGR

SEQ ID NO: 58138 - protein, 11 aa, Homo Sapiens
ESGGASVISTR

SEQ ID NO: 58139 - protein, 11 aa, Homo Sapiens
ESIDPQFTIRR

SEQ ID NO: 58140 - protein, 11 aa, Homo Sapiens
ESIGNCPFSQR

SEQ ID NO: 58141 - protein, 11 aa, Homo Sapiens
ESLPATHIRGK

SEQ ID NO: 58142 - protein, 11 aa, Homo Sapiens
ESMLTPPIARR

SEQ ID NO: 58143 - protein, 11 aa, Homo Sapiens
ESSAGGSFTVR

SEQ ID NO: 58144 - protein, 11 aa, Homo Sapiens
ESVPPGTTISR

SEQ ID NO: 58145 - protein, 11 aa, Homo Sapiens
ESVSEGLNVPR

SEQ ID NO: 58146 - protein, 11 aa, Homo Sapiens
ESYTPSKISVR

SEQ ID NO: 58147 - protein, 11 aa, Homo Sapiens
ETAGRTPKLAR

SEQ ID NO: 58148 - protein, 11 aa, Homo Sapiens
ETAGSTSIPKR

SEQ ID NO: 58149 - protein, 11 aa, Homo Sapiens
ETALNSKAYKR

SEQ ID NO: 58150 - protein, 11 aa, Homo Sapiens
ETALPGAFKTR

SEQ ID NO: 58151 - protein, 11 aa, Homo Sapiens
ETALYGNLILR

SEQ ID NO: 58152 - protein, 11 aa, Homo Sapiens
ETASNEVVYRF

SEQ ID NO: 58153 - protein, 11 aa, Homo Sapiens
ETATTPIFANR

SEQ ID NO: 58154 - protein, 11 aa, Homo Sapiens
ETFEHPNVVRL

SEQ ID NO: 58155 - protein, 11 aa, Homo Sapiens
ETFKEQGNAYY

SEQ ID NO: 58156 - protein, 11 aa, Homo Sapiens
ETFLTSPEELY

SEQ ID NO: 58157 - protein, 11 aa, Homo Sapiens
ETFRSSDPATR

SEQ ID NO: 58158 - protein, 11 aa, Homo Sapiens
ETFSGVYKKLT

SEQ ID NO: 58159 - protein, 11 aa, Homo Sapiens
ETIDNGFGHSR

SEQ ID NO: 58160 - protein, 11 aa, Homo Sapiens
ETIGNELFNCR

SEQ ID NO: 58161 - protein, 11 aa, Homo Sapiens
ETIHADSVAKR

SEQ ID NO: 58162 - protein, 11 aa, Homo Sapiens
ETILASSGTDR

SEQ ID NO: 58163 - protein, 11 aa, Homo Sapiens
ETIPGPDAKVR

SEQ ID NO: 58164 - protein, 11 aa, Homo Sapiens
ETISSKNIISR

SEQ ID NO: 58165 - protein, 11 aa, Homo Sapiens
ETLKNTKEIQR

SEQ ID NO: 58166 - protein, 11 aa, Homo Sapiens
ETNEIANANSR

SEQ ID NO: 58167 - protein, 11 aa, Homo Sapiens
ETPKPGTCVKR

SEQ ID NO: 58168 - protein, 11 aa, Homo Sapiens
ETQSRTITVTR

SEQ ID NO: 58169 - protein, 11 aa, Homo Sapiens
ETVPKDLRHLR

SEQ ID NO: 58170 - protein, 11 aa, Homo Sapiens
ETVQKETIHPR

SEQ ID NO: 58171 - protein, 11 aa, Homo Sapiens
ETVSEEKRIYR

SEQ ID NO: 58172 - protein, 11 aa, Homo Sapiens
ETVTGGFGAKK

SEQ ID NO: 58173 - protein, 11 aa, Homo Sapiens
ETYEEIYKSTK

SEQ ID NO: 58174 - protein, 11 aa, Homo Sapiens
ETYLNENLRKR

SEQ ID NO: 58175 - protein, 11 aa, Homo Sapiens
ETYTAYLIETR

SEQ ID NO: 58176 - protein, 11 aa, Homo Sapiens
EVAGTVTGQKR

SEQ ID NO: 58177 - protein, 11 aa, Homo Sapiens
EVAPEIKASER

SEQ ID NO: 58178 - protein, 11 aa, Homo Sapiens
EVAPPEYHRKA

SEQ ID NO: 58179 - protein, 11 aa, Homo Sapiens
EVAPPKAHEVR

SEQ ID NO: 58180 - protein, 11 aa, Homo Sapiens
EVEPQGVIVTR

SEQ ID NO: 58181 - protein, 11 aa, Homo Sapiens
EVFFSEKIYKL

SEQ ID NO: 58182 - protein, 11 aa, Homo Sapiens
EVFGAEGFHEK

SEQ ID NO: 58183 - protein, 11 aa, Homo Sapiens
EVFTTLSVTKR

SEQ ID NO: 58184 - protein, 11 aa, Homo Sapiens
EVFTTTEGRTR

SEQ ID NO: 58185 - protein, 11 aa, Homo Sapiens
EVFYPGETVVH

SEQ ID NO: 58186 - protein, 11 aa, Homo Sapiens
EVGICNEAGFR

SEQ ID NO: 58187 - protein, 11 aa, Homo Sapiens
EVGPGPGGITR

SEQ ID NO: 58188 - protein, 11 aa, Homo Sapiens
EVHGEAQRVLR

SEQ ID NO: 58189 - protein, 11 aa, Homo Sapiens
EVIAQLENAAK

SEQ ID NO: 58190 - protein, 11 aa, Homo Sapiens
EVIEGYEIACR

SEQ ID NO: 58191 - protein, 11 aa, Homo Sapiens
EVIGSKLNISR

SEQ ID NO: 58192 - protein, 11 aa, Homo Sapiens
EVIKDGYENAR

SEQ ID NO: 58193 - protein, 11 aa, Homo Sapiens
EVINFGDCLVR

SEQ ID NO: 58194 - protein, 11 aa, Homo Sapiens
EVINTPRVVDR

SEQ ID NO: 58195 - protein, 11 aa, Homo Sapiens
EVIPYTPAMQR

SEQ ID NO: 58196 - protein, 11 aa, Homo Sapiens
EVIQESGTKLK

SEQ ID NO: 58197 - protein, 11 aa, Homo Sapiens
EVIQLIKTNKK

SEQ ID NO: 58198 - protein, 11 aa, Homo Sapiens
EVIQLQGDQRK

SEQ ID NO: 58199 - protein, 11 aa, Homo Sapiens
EVIQNPATITR

SEQ ID NO: 58200 - protein, 11 aa, Homo Sapiens
EVISLGLPFGK

SEQ ID NO: 58201 - protein, 11 aa, Homo Sapiens
EVISLSQVTPK

SEQ ID NO: 58202 - protein, 11 aa, Homo Sapiens
EVISTPGVVAR

SEQ ID NO: 58203 - protein, 11 aa, Homo Sapiens
EVIVVVGGCER

SEQ ID NO: 58204 - protein, 11 aa, Homo Sapiens
EVKRLKVTELR

SEQ ID NO: 58205 - protein, 11 aa, Homo Sapiens
EVLEQSAQTLR

SEQ ID NO: 58206 - protein, 11 aa, Homo Sapiens
EVLHIGSAHNR

SEQ ID NO: 58207 - protein, 11 aa, Homo Sapiens
EVLNDPENMEK

SEQ ID NO: 58208 - protein, 11 aa, Homo Sapiens
EVLNKHSLSGR

SEQ ID NO: 58209 - protein, 11 aa, Homo Sapiens
EVMQWSQSLEK

SEQ ID NO: 58210 - protein, 11 aa, Homo Sapiens
EVMRQRGINMR

SEQ ID NO: 58211 - protein, 11 aa, Homo Sapiens
EVNGAPVYVVR

SEQ ID NO: 58212 - protein, 11 aa, Homo Sapiens
EVPGSPIFVMR

SEQ ID NO: 58213 - protein, 11 aa, Homo Sapiens
EVPHELVAQSR

SEQ ID NO: 58214 - protein, 11 aa, Homo Sapiens
EVPLEENVNRR

SEQ ID NO: 58215 - protein, 11 aa, Homo Sapiens
EVPRTIIVTTR

SEQ ID NO: 58216 - protein, 11 aa, Homo Sapiens
EVQDRVMLTGR

SEQ ID NO: 58217 - protein, 11 aa, Homo Sapiens
EVQQARDLQNR

SEQ ID NO: 58218 - protein, 11 aa, Homo Sapiens
EVRADTGGLGR

SEQ ID NO: 58219 - protein, 11 aa, Homo Sapiens
EVTPVTGASLR

SEQ ID NO: 58220 - protein, 11 aa, Homo Sapiens
EVVCNDRLGKK

SEQ ID NO: 58221 - protein, 11 aa, Homo Sapiens
EVVDTTASTKR

SEQ ID NO: 58222 - protein, 11 aa, Homo Sapiens
EVVEFLKNPQK

SEQ ID NO: 58223 - protein, 11 aa, Homo Sapiens
EVVEGMDISTR

SEQ ID NO: 58224 - protein, 11 aa, Homo Sapiens
EVVKNTENFLK

SEQ ID NO: 58225 - protein, 11 aa, Homo Sapiens
EVVTPNIFNSR

SEQ ID NO: 58226 - protein, 11 aa, Homo Sapiens
EVWIPKNGTRR

SEQ ID NO: 58227 - protein, 11 aa, Homo Sapiens
EVYHNLKNVIK

SEQ ID NO: 58228 - protein, 11 aa, Homo Sapiens
EVYQGCGTELR

SEQ ID NO: 58229 - protein, 11 aa, Homo Sapiens
FAITAIKGVGR

SEQ ID NO: 58230 - protein, 11 aa, Homo Sapiens
FTAFEEAQLPR

SEQ ID NO: 58231 - protein, 11 aa, Homo Sapiens
FTASGEAEARR

SEQ ID NO: 58232 - protein, 11 aa, Homo Sapiens
FTNEVLTKTYR

SEQ ID NO: 58233 - protein, 11 aa, Homo Sapiens
FTNSKKSVTLR

SEQ ID NO: 58234 - protein, 11 aa, Homo Sapiens
FVIDSDHLGHR

SEQ ID NO: 58235 - protein, 11 aa, Homo Sapiens
FVWSGTAEARK

SEQ ID NO: 58236 - protein, 11 aa, Homo Sapiens
GFEITPPVVLR

SEQ ID NO: 58237 - protein, 11 aa, Homo Sapiens
GTFGATSLQQR

SEQ ID NO: 58238 - protein, 11 aa, Homo Sapiens
GYEPLPPTIGR

SEQ ID NO: 58239 - protein, 11 aa, Homo Sapiens
HAVDGNTVELK

SEQ ID NO: 58240 - protein, 11 aa, Homo Sapiens
HAVEISAVHSR

SEQ ID NO: 58241 - protein, 11 aa, Homo Sapiens
HAYPDELIRQR

SEQ ID NO: 58242 - protein, 11 aa, Homo Sapiens
HIIEKDKITTR

SEQ ID NO: 58243 - protein, 11 aa, Homo Sapiens
HSIDGRVVEPK

SEQ ID NO: 58244 - protein, 11 aa, Homo Sapiens
HSLSLEAPRLH

SEQ ID NO: 58245 - protein, 11 aa, Homo Sapiens
HTINGHNAEVR

SEQ ID NO: 58246 - protein, 11 aa, Homo Sapiens
HTPTPGIYMGR

SEQ ID NO: 58247 - protein, 11 aa, Homo Sapiens
HTVNMRDPLNR

SEQ ID NO: 58248 - protein, 11 aa, Homo Sapiens
HVAESSLSRLR

SEQ ID NO: 58249 - protein, 11 aa, Homo Sapiens
HVFESNPSIRK

SEQ ID NO: 58250 - protein, 11 aa, Homo Sapiens
HVFPTDENIKR

SEQ ID NO: 58251 - protein, 11 aa, Homo Sapiens
HVKTGGKISLR

SEQ ID NO: 58252 - protein, 11 aa, Homo Sapiens
HVPEGQTIKGR

SEQ ID NO: 58253 - protein, 11 aa, Homo Sapiens
HVPYGVAQTPR

SEQ ID NO: 58254 - protein, 11 aa, Homo Sapiens
HVYVNQGEILR

SEQ ID NO: 58255 - protein, 11 aa, Homo Sapiens
LGPHERSPALR

SEQ ID NO: 58256 - protein, 11 aa, Homo Sapiens
LPAPTSTSTGR

SEQ ID NO: 58257 - protein, 11 aa, Homo Sapiens
LSFETTDESLR

SEQ ID NO: 58258 - protein, 11 aa, Homo Sapiens
LVAEKVVVITK

SEQ ID NO: 58259 - protein, 11 aa, Homo Sapiens
LVFPSEIVGKR

SEQ ID NO: 58260 - protein, 11 aa, Homo Sapiens
MAAAGAAVARS

SEQ ID NO: 58261 - protein, 11 aa, Homo Sapiens
MAISSGAVVHR

SEQ ID NO: 58262 - protein, 11 aa, Homo Sapiens
MTFGIEPFKTK

SEQ ID NO: 58263 - protein, 11 aa, Homo Sapiens
MTFTSQLIVER

SEQ ID NO: 58264 - protein, 11 aa, Homo Sapiens
MTPELAGVIKR

SEQ ID NO: 58265 - protein, 11 aa, Homo Sapiens
MTQDAQNALRR

SEQ ID NO: 58266 - protein, 11 aa, Homo Sapiens
MTVPPPSVSGR

SEQ ID NO: 58267 - protein, 11 aa, Homo Sapiens
NAFGPGTANER

SEQ ID NO: 58268 - protein, 11 aa, Homo Sapiens
NIASPGTVHKR

SEQ ID NO: 58269 - protein, 11 aa, Homo Sapiens
NLAEKSTVHMR

SEQ ID NO: 58270 - protein, 11 aa, Homo Sapiens
NSASATALVSR

SEQ ID NO: 58271 - protein, 11 aa, Homo Sapiens
NSFDPSKITRK

SEQ ID NO: 58272 - protein, 11 aa, Homo Sapiens
NTFEFAKPVQR

SEQ ID NO: 58273 - protein, 11 aa, Homo Sapiens
NTFGKAGIKTK

SEQ ID NO: 58274 - protein, 11 aa, Homo Sapiens
NTIGKEEIQQR

SEQ ID NO: 58275 - protein, 11 aa, Homo Sapiens
NTKSQSAFDLK

SEQ ID NO: 58276 - protein, 11 aa, Homo Sapiens
NTMDADSLVSR

SEQ ID NO: 58277 - protein, 11 aa, Homo Sapiens
NTPSFGSKIIR

SEQ ID NO: 58278 - protein, 11 aa, Homo Sapiens
NTQTEEAIQTR

SEQ ID NO: 58279 - protein, 11 aa, Homo Sapiens
NTVNTSLNVYR

SEQ ID NO: 58280 - protein, 11 aa, Homo Sapiens
NVAACKENFQR

SEQ ID NO: 58281 - protein, 11 aa, Homo Sapiens
NVAALPGIVHR

SEQ ID NO: 58282 - protein, 11 aa, Homo Sapiens
NVAATFKGIVR

SEQ ID NO: 58283 - protein, 11 aa, Homo Sapiens
NVAELKKSFNR

SEQ ID NO: 58284 - protein, 11 aa, Homo Sapiens
NVAEVDKVTGR

SEQ ID NO: 58285 - protein, 11 aa, Homo Sapiens
NVIEPSFGLGR

SEQ ID NO: 58286 - protein, 11 aa, Homo Sapiens
NVIESKAYVGR

SEQ ID NO: 58287 - protein, 11 aa, Homo Sapiens
NVKNVSVKDVR

SEQ ID NO: 58288 - protein, 11 aa, Homo Sapiens
NVPDSFNEVCR

SEQ ID NO: 58289 - protein, 11 aa, Homo Sapiens
NVVDPRTCLNR

SEQ ID NO: 58290 - protein, 11 aa, Homo Sapiens
NVVEYIPNAER

SEQ ID NO: 58291 - protein, 11 aa, Homo Sapiens
NVYPNFRPTPK

SEQ ID NO: 58292 - protein, 11 aa, Homo Sapiens
QAADKIHSSFR

SEQ ID NO: 58293 - protein, 11 aa, Homo Sapiens
QIAEGMAYIER

SEQ ID NO: 58294 - protein, 11 aa, Homo Sapiens
QIFSDLNATYR

SEQ ID NO: 58295 - protein, 11 aa, Homo Sapiens
QLFDPMTGTFR

SEQ ID NO: 58296 - protein, 11 aa, Homo Sapiens
QTVSEPAVIKR

SEQ ID NO: 58297 - protein, 11 aa, Homo Sapiens
QVANSAFVERL

SEQ ID NO: 58298 - protein, 11 aa, Homo Sapiens
QVFKPPPEGTR

SEQ ID NO: 58299 - protein, 11 aa, Homo Sapiens
QVIGPLTEGQR

SEQ ID NO: 58300 - protein, 11 aa, Homo Sapiens
QVIIFVKSVQR

SEQ ID NO: 58301 - protein, 11 aa, Homo Sapiens
QVVGEATFIAR

SEQ ID NO: 58302 - protein, 11 aa, Homo Sapiens
QVVIFVKSVQR

SEQ ID NO: 58303 - protein, 11 aa, Homo Sapiens
RVFPVRPGSGR

SEQ ID NO: 58304 - protein, 11 aa, Homo Sapiens
SAFATPFLVVR

SEQ ID NO: 58305 - protein, 11 aa, Homo Sapiens
SIFEPAKGGEK

SEQ ID NO: 58306 - protein, 11 aa, Homo Sapiens
SIIDMDAVCKR

SEQ ID NO: 58307 - protein, 11 aa, Homo Sapiens
SPIGASGVAHR

SEQ ID NO: 58308 - protein, 11 aa, Homo Sapiens
SSFNSNTFLTR

SEQ ID NO: 58309 - protein, 11 aa, Homo Sapiens
STASVGRFQER

SEQ ID NO: 58310 - protein, 11 aa, Homo Sapiens
STIALALGVER

SEQ ID NO: 58311 - protein, 11 aa, Homo Sapiens
STIDCGLVRLR

SEQ ID NO: 58312 - protein, 11 aa, Homo Sapiens
STIETVPYWTR

SEQ ID NO: 58313 - protein, 11 aa, Homo Sapiens
STIGFKLPNHR

SEQ ID NO: 58314 - protein, 11 aa, Homo Sapiens
STINGYEGTGR

SEQ ID NO: 58315 - protein, 11 aa, Homo Sapiens
STMPHTSGMNR

SEQ ID NO: 58316 - protein, 11 aa, Homo Sapiens
STPAGVQVILR

SEQ ID NO: 58317 - protein, 11 aa, Homo Sapiens
STVGAGAYAYK

SEQ ID NO: 58318 - protein, 11 aa, Homo Sapiens
STYAAFVQTHR

SEQ ID NO: 58319 - protein, 11 aa, Homo Sapiens
STYATTIRDSK

SEQ ID NO: 58320 - protein, 11 aa, Homo Sapiens
SVAGLTAAAYR

SEQ ID NO: 58321 - protein, 11 aa, Homo Sapiens
SVFPQNGAARR

SEQ ID NO: 58322 - protein, 11 aa, Homo Sapiens
SVFTNERFPLR

SEQ ID NO: 58323 - protein, 11 aa, Homo Sapiens
SVISATSSAGR

SEQ ID NO: 58324 - protein, 11 aa, Homo Sapiens
SVISSRNTGQR

SEQ ID NO: 58325 - protein, 11 aa, Homo Sapiens
SVISVEDPPQR

SEQ ID NO: 58326 - protein, 11 aa, Homo Sapiens
SVLEATRVNRR

SEQ ID NO: 58327 - protein, 11 aa, Homo Sapiens
SVPEFPLSPPK

SEQ ID NO: 58328 - protein, 11 aa, Homo Sapiens
SVPSSETVICR

SEQ ID NO: 58329 - protein, 11 aa, Homo Sapiens
SVPWYIDPSKR

SEQ ID NO: 58330 - protein, 11 aa, Homo Sapiens
SVSEVHPSRLQ

SEQ ID NO: 58331 - protein, 11 aa, Homo Sapiens
SVTPEGVIKQR

SEQ ID NO: 58332 - protein, 11 aa, Homo Sapiens
SVYDHQGIFKR

SEQ ID NO: 58333 - protein, 11 aa, Homo Sapiens
SVYSPSGPVNR

SEQ ID NO: 58334 - protein, 11 aa, Homo Sapiens
TAIEAQHLLKR

SEQ ID NO: 58335 - protein, 11 aa, Homo Sapiens
TAIHIDPATHR

SEQ ID NO: 58336 - protein, 11 aa, Homo Sapiens
TAYDPDKKDLR

SEQ ID NO: 58337 - protein, 11 aa, Homo Sapiens
TAYVMKDPETR

SEQ ID NO: 58338 - protein, 11 aa, Homo Sapiens
TELSVRAKPSA

SEQ ID NO: 58339 - protein, 11 aa, Homo Sapiens
TIFSAPNYCYR

SEQ ID NO: 58340 - protein, 11 aa, Homo Sapiens
TIIEVNGKRVR

SEQ ID NO: 58341 - protein, 11 aa, Homo Sapiens
TLIDPETLLPR

SEQ ID NO: 58342 - protein, 11 aa, Homo Sapiens
TPAGVQVILRR

SEQ ID NO: 58343 - protein, 11 aa, Homo Sapiens
TSFDGSLIQKM

SEQ ID NO: 58344 - protein, 11 aa, Homo Sapiens
TSFPSGEATPR

SEQ ID NO: 58345 - protein, 11 aa, Homo Sapiens
TSSEITTKDLK

SEQ ID NO: 58346 - protein, 11 aa, Homo Sapiens
TTAAGPLFQQR

SEQ ID NO: 58347 - protein, 11 aa, Homo Sapiens
TTADGSSILDR

SEQ ID NO: 58348 - protein, 11 aa, Homo Sapiens
TTAGAVTQCYR

SEQ ID NO: 58349 - protein, 11 aa, Homo Sapiens
TTAQEVLARAR

SEQ ID NO: 58350 - protein, 11 aa, Homo Sapiens
TTFTWNINHAR

SEQ ID NO: 58351 - protein, 11 aa, Homo Sapiens
TTHSMALIHNR

SEQ ID NO: 58352 - protein, 11 aa, Homo Sapiens
TTKVTGSLETK

SEQ ID NO: 58353 - protein, 11 aa, Homo Sapiens
TTVAKTVTVTR

SEQ ID NO: 58354 - protein, 11 aa, Homo Sapiens
TTVDESQVVTR

SEQ ID NO: 58355 - protein, 11 aa, Homo Sapiens
TTVNFINQNLR

SEQ ID NO: 58356 - protein, 11 aa, Homo Sapiens
TTVQPSATLQR

SEQ ID NO: 58357 - protein, 11 aa, Homo Sapiens
TTVTPFTAQQR

SEQ ID NO: 58358 - protein, 11 aa, Homo Sapiens
TVAELKQLVAR

SEQ ID NO: 58359 - protein, 11 aa, Homo Sapiens
TVFDAKRLIGR

SEQ ID NO: 58360 - protein, 11 aa, Homo Sapiens
TVFGATGFLGR

SEQ ID NO: 58361 - protein, 11 aa, Homo Sapiens
TVFNAHEPFRR

SEQ ID NO: 58362 - protein, 11 aa, Homo Sapiens
TVIEKTESWPR

SEQ ID NO: 58363 - protein, 11 aa, Homo Sapiens
TVIPATVVTSR

SEQ ID NO: 58364 - protein, 11 aa, Homo Sapiens
TVIQLQNIAEK

SEQ ID NO: 58365 - protein, 11 aa, Homo Sapiens
TVIRNPNGGFR

SEQ ID NO: 58366 - protein, 11 aa, Homo Sapiens
TVISLKKLIVR

SEQ ID NO: 58367 - protein, 11 aa, Homo Sapiens
TVISQEPFVPK

SEQ ID NO: 58368 - protein, 11 aa, Homo Sapiens
TVSPVSGINTR

SEQ ID NO: 58369 - protein, 11 aa, Homo Sapiens
TVVGENGSVLR

SEQ ID NO: 58370 - protein, 11 aa, Homo Sapiens
TVWSAPNYCYR

SEQ ID NO: 58371 - protein, 11 aa, Homo Sapiens
TVYYSPETIGR

SEQ ID NO: 58372 - protein, 11 aa, Homo Sapiens
VTAGGGQILSR

SEQ ID NO: 58373 - protein, 11 aa, Homo Sapiens
VVAPPGVVVSR

SEQ ID NO: 58374 - protein, 11 aa, Homo Sapiens
WTISNITAGNR

SEQ ID NO: 58375 - protein, 8 aa, Homo Sapiens
ALRYPMAV

SEQ ID NO: 58376 - protein, 8 aa, Homo Sapiens
ARLEALKE

SEQ ID NO: 58377 - protein, 8 aa, Homo Sapiens
ASGLIHRV

SEQ ID NO: 58378 - protein, 8 aa, Homo Sapiens
DVSSALDK

SEQ ID NO: 58379 - protein, 8 aa, Homo Sapiens
EAFPVHGF

SEQ ID NO: 58380 - protein, 8 aa, Homo Sapiens
ESPPEINT

SEQ ID NO: 58381 - protein, 8 aa, Homo Sapiens
FSDIPNPI

SEQ ID NO: 58382 - protein, 8 aa, Homo Sapiens
GEVPLTPT

SEQ ID NO: 58383 - protein, 8 aa, Homo Sapiens
GGGRFGGF

SEQ ID NO: 58384 - protein, 8 aa, Homo Sapiens
HFDPTISL

SEQ ID NO: 58385 - protein, 8 aa, Homo Sapiens
KVPQLEIV

SEQ ID NO: 58386 - protein, 8 aa, Homo Sapiens
LAFSRALE

SEQ ID NO: 58387 - protein, 8 aa, Homo Sapiens
LEEYTKKL

SEQ ID NO: 58388 - protein, 8 aa, Homo Sapiens
LLPGELAK

SEQ ID NO: 58389 - protein, 8 aa, Homo Sapiens
LSDYNIQK

SEQ ID NO: 58390 - protein, 8 aa, Homo Sapiens
LSKEMVSL

SEQ ID NO: 58391 - protein, 8 aa, Homo Sapiens
LSLPVPGA

SEQ ID NO: 58392 - protein, 8 aa, Homo Sapiens
LVNLGGSK

SEQ ID NO: 58393 - protein, 8 aa, Homo Sapiens
NHQPFLER

SEQ ID NO: 58394 - protein, 8 aa, Homo Sapiens
NVKVDPEI

SEQ ID NO: 58395 - protein, 8 aa, Homo Sapiens
NVPGEIVE

SEQ ID NO: 58396 - protein, 8 aa, Homo Sapiens
PLGDLTPT

SEQ ID NO: 58397 - protein, 8 aa, Homo Sapiens
QEPVLGPV

SEQ ID NO: 58398 - protein, 8 aa, Homo Sapiens
REYHTEKL

SEQ ID NO: 58399 - protein, 8 aa, Homo Sapiens
RTLYGFGG

SEQ ID NO: 58400 - protein, 8 aa, Homo Sapiens
SPVVRVAV

SEQ ID NO: 58401 - protein, 8 aa, Homo Sapiens
SSSYSKQF

SEQ ID NO: 58402 - protein, 8 aa, Homo Sapiens
SYSVYVYK

SEQ ID NO: 58403 - protein, 8 aa, Homo Sapiens
TEDELQDK

SEQ ID NO: 58404 - protein, 8 aa, Homo Sapiens
TEELAYLK

SEQ ID NO: 58405 - protein, 8 aa, Homo Sapiens
TYFPHFDL

SEQ ID NO: 58406 - protein, 8 aa, Homo Sapiens
VAPVLPGA

SEQ ID NO: 58407 - protein, 8 aa, Homo Sapiens
VDVVAPTV

SEQ ID NO: 58408 - protein, 8 aa, Homo Sapiens
VETLEKNL

SEQ ID NO: 58409 - protein, 8 aa, Homo Sapiens
VHLTPEEK

SEQ ID NO: 58410 - protein, 8 aa, Homo Sapiens
VNDIFERI

SEQ ID NO: 58411 - protein, 8 aa, Homo Sapiens
VPPFLQPE

SEQ ID NO: 58412 - protein, 8 aa, Homo Sapiens
VVVSTPTP

SEQ ID NO: 58413 - protein, 8 aa, Homo Sapiens
VYPFPGPI

SEQ ID NO: 58414 - protein, 8 aa, Homo Sapiens
WPRGLFRL

SEQ ID NO: 58415 - protein, 9 aa, Homo Sapiens
AAAVGAFLI

SEQ ID NO: 58416 - protein, 9 aa, Homo Sapiens
AATEIVERV

SEQ ID NO: 58417 - protein, 9 aa, Homo Sapiens
AIAPIIAAV

SEQ ID NO: 58418 - protein, 9 aa, Homo Sapiens
ATFFLPYLL

SEQ ID NO: 58419 - protein, 9 aa, Homo Sapiens
ATPRYMTYN

SEQ ID NO: 58420 - protein, 9 aa, Homo Sapiens
AVADILFLL

SEQ ID NO: 58421 - protein, 9 aa, Homo Sapiens
AVANIVNSV

SEQ ID NO: 58422 - protein, 9 aa, Homo Sapiens
AVSDILEKL

SEQ ID NO: 58423 - protein, 9 aa, Homo Sapiens
AVSDVIQQL

SEQ ID NO: 58424 - protein, 9 aa, Homo Sapiens
DAAAVNFQL

SEQ ID NO: 58425 - protein, 9 aa, Homo Sapiens
DAANVLLQL

SEQ ID NO: 58426 - protein, 9 aa, Homo Sapiens
DAANVMVYV

SEQ ID NO: 58427 - protein, 9 aa, Homo Sapiens
DAHTVLALI

SEQ ID NO: 58428 - protein, 9 aa, Homo Sapiens
DATNILNKL

SEQ ID NO: 58429 - protein, 9 aa, Homo Sapiens
DIAGFIHKI

SEQ ID NO: 58430 - protein, 9 aa, Homo Sapiens
DIANFQVLV

SEQ ID NO: 58431 - protein, 9 aa, Homo Sapiens
DIATILSKV

SEQ ID NO: 58432 - protein, 9 aa, Homo Sapiens
DIFDAMFSV

SEQ ID NO: 58433 - protein, 9 aa, Homo Sapiens
DIFRYQDEV

SEQ ID NO: 58434 - protein, 9 aa, Homo Sapiens
DIFSDLYYV

SEQ ID NO: 58435 - protein, 9 aa, Homo Sapiens
DIPHMDIEA

SEQ ID NO: 58436 - protein, 9 aa, Homo Sapiens
DISQLFDFI

SEQ ID NO: 58437 - protein, 9 aa, Homo Sapiens
DISSITEAV

SEQ ID NO: 58438 - protein, 9 aa, Homo Sapiens
DLAAVILHV

SEQ ID NO: 58439 - protein, 9 aa, Homo Sapiens
DLAPINAFI

SEQ ID NO: 58440 - protein, 9 aa, Homo Sapiens
DLILPVPAF

SEQ ID NO: 58441 - protein, 9 aa, Homo Sapiens
DLMAPQPGV

SEQ ID NO: 58442 - protein, 9 aa, Homo Sapiens
DLPSFTQNV

SEQ ID NO: 58443 - protein, 9 aa, Homo Sapiens
DLSNIINKL

SEQ ID NO: 58444 - protein, 9 aa, Homo Sapiens
DLTEFQTNL

SEQ ID NO: 58445 - protein, 9 aa, Homo Sapiens
DNAAIIMKV

SEQ ID NO: 58446 - protein, 9 aa, Homo Sapiens
DPAGIFELV

SEQ ID NO: 58447 - protein, 9 aa, Homo Sapiens
DPEPEDENL

SEQ ID NO: 58448 - protein, 9 aa, Homo Sapiens
DQSYVISFV

SEQ ID NO: 58449 - protein, 9 aa, Homo Sapiens
DQTEYLEER

SEQ ID NO: 58450 - protein, 9 aa, Homo Sapiens
DSINFLDHI

SEQ ID NO: 58451 - protein, 9 aa, Homo Sapiens
DSSEEKFLR

SEQ ID NO: 58452 - protein, 9 aa, Homo Sapiens
DSSEIHFKV

SEQ ID NO: 58453 - protein, 9 aa, Homo Sapiens
DSSNVVQLI

SEQ ID NO: 58454 - protein, 9 aa, Homo Sapiens
DSVLIIETV

SEQ ID NO: 58455 - protein, 9 aa, Homo Sapiens
DTAEIIKTL

SEQ ID NO: 58456 - protein, 9 aa, Homo Sapiens
DTAEILSRL

SEQ ID NO: 58457 - protein, 9 aa, Homo Sapiens
DTAHVLFTL

SEQ ID NO: 58458 - protein, 9 aa, Homo Sapiens
DTAPVIIFV

SEQ ID NO: 58459 - protein, 9 aa, Homo Sapiens
DTFFRPLNV

SEQ ID NO: 58460 - protein, 9 aa, Homo Sapiens
DTFGKINFL

SEQ ID NO: 58461 - protein, 9 aa, Homo Sapiens
DTFPTAMHI

SEQ ID NO: 58462 - protein, 9 aa, Homo Sapiens
DTFRGVAFV

SEQ ID NO: 58463 - protein, 9 aa, Homo Sapiens
DTFSGQFVL

SEQ ID NO: 58464 - protein, 9 aa, Homo Sapiens
DTFSVQVLV

SEQ ID NO: 58465 - protein, 9 aa, Homo Sapiens
DTFSYTVRI

SEQ ID NO: 58466 - protein, 9 aa, Homo Sapiens
DTFVHIWKL

SEQ ID NO: 58467 - protein, 9 aa, Homo Sapiens
DTFVHVTDL

SEQ ID NO: 58468 - protein, 9 aa, Homo Sapiens
DTHHLVNYI

SEQ ID NO: 58469 - protein, 9 aa, Homo Sapiens
DTIGVLVRL

SEQ ID NO: 58470 - protein, 9 aa, Homo Sapiens
DTSDIKELI

SEQ ID NO: 58471 - protein, 9 aa, Homo Sapiens
DTSDVVLEL

SEQ ID NO: 58472 - protein, 9 aa, Homo Sapiens
DTSPVFQRL

SEQ ID NO: 58473 - protein, 9 aa, Homo Sapiens
DTSRIYVAL

SEQ ID NO: 58474 - protein, 9 aa, Homo Sapiens
DTSSLFDKL

SEQ ID NO: 58475 - protein, 9 aa, Homo Sapiens
DTTAIDVQV

SEQ ID NO: 58476 - protein, 9 aa, Homo Sapiens
DTTVIIWQV

SEQ ID NO: 58477 - protein, 9 aa, Homo Sapiens
DTVQFAEYI

SEQ ID NO: 58478 - protein, 9 aa, Homo Sapiens
DVAEFLYQV

SEQ ID NO: 58479 - protein, 9 aa, Homo Sapiens
DVAEVLWEI

SEQ ID NO: 58480 - protein, 9 aa, Homo Sapiens
DVANKIGII

SEQ ID NO: 58481 - protein, 9 aa, Homo Sapiens
DVAPFTTKI

SEQ ID NO: 58482 - protein, 9 aa, Homo Sapiens
DVAQIFNNI

SEQ ID NO: 58483 - protein, 9 aa, Homo Sapiens
DVAQIIIRI

SEQ ID NO: 58484 - protein, 9 aa, Homo Sapiens
DVASFATKL

SEQ ID NO: 58485 - protein, 9 aa, Homo Sapiens
DVASIFLQV

SEQ ID NO: 58486 - protein, 9 aa, Homo Sapiens
DVFGHFILI

SEQ ID NO: 58487 - protein, 9 aa, Homo Sapiens
DVFHMVVEV

SEQ ID NO: 58488 - protein, 9 aa, Homo Sapiens
DVFVHQTAI

SEQ ID NO: 58489 - protein, 9 aa, Homo Sapiens
DVGDIVHSV

SEQ ID NO: 58490 - protein, 9 aa, Homo Sapiens
DVIDIMENL

SEQ ID NO: 58491 - protein, 9 aa, Homo Sapiens
DVIEPSEFV

SEQ ID NO: 58492 - protein, 9 aa, Homo Sapiens
DVIEVIEKA

SEQ ID NO: 58493 - protein, 9 aa, Homo Sapiens
DVINVFHHL

SEQ ID NO: 58494 - protein, 9 aa, Homo Sapiens
DVINVFHRL

SEQ ID NO: 58495 - protein, 9 aa, Homo Sapiens
DVIPPLEQL

SEQ ID NO: 58496 - protein, 9 aa, Homo Sapiens
DVIYPMAVV

SEQ ID NO: 58497 - protein, 9 aa, Homo Sapiens
DVSIINITV

SEQ ID NO: 58498 - protein, 9 aa, Homo Sapiens
DVSKIFQVV

SEQ ID NO: 58499 - protein, 9 aa, Homo Sapiens
DVSNVIEKV

SEQ ID NO: 58500 - protein, 9 aa, Homo Sapiens
DVSSALDKL

SEQ ID NO: 58501 - protein, 9 aa, Homo Sapiens
DVSSILTSI

SEQ ID NO: 58502 - protein, 9 aa, Homo Sapiens
DVTAIIFVV

SEQ ID NO: 58503 - protein, 9 aa, Homo Sapiens
DVTDFISHL

SEQ ID NO: 58504 - protein, 9 aa, Homo Sapiens
DVTQIVEIL

SEQ ID NO: 58505 - protein, 9 aa, Homo Sapiens
DVVNILVYV

SEQ ID NO: 58506 - protein, 9 aa, Homo Sapiens
DVVSLFITV

SEQ ID NO: 58507 - protein, 9 aa, Homo Sapiens
DVYDKVDYL

SEQ ID NO: 58508 - protein, 9 aa, Homo Sapiens
EAAAIHVLV

SEQ ID NO: 58509 - protein, 9 aa, Homo Sapiens
EAAALLIRL

SEQ ID NO: 58510 - protein, 9 aa, Homo Sapiens
EAAAVFKTL

SEQ ID NO: 58511 - protein, 9 aa, Homo Sapiens
EAAAVRALV

SEQ ID NO: 58512 - protein, 9 aa, Homo Sapiens
EAACLIVSV

SEQ ID NO: 58513 - protein, 9 aa, Homo Sapiens
EAADIIQKL

SEQ ID NO: 58514 - protein, 9 aa, Homo Sapiens
EAADIVESL

SEQ ID NO: 58515 - protein, 9 aa, Homo Sapiens
EAADLLQFL

SEQ ID NO: 58516 - protein, 9 aa, Homo Sapiens
EAADVLIKA

SEQ ID NO: 58517 - protein, 9 aa, Homo Sapiens
EAADVWYNL

SEQ ID NO: 58518 - protein, 9 aa, Homo Sapiens
EAAEIHLRL

SEQ ID NO: 58519 - protein, 9 aa, Homo Sapiens
EAAEVILRV

SEQ ID NO: 58520 - protein, 9 aa, Homo Sapiens
EAAFILQNL

SEQ ID NO: 58521 - protein, 9 aa, Homo Sapiens
EAAFPIAVV

SEQ ID NO: 58522 - protein, 9 aa, Homo Sapiens
EAAGIDWGI

SEQ ID NO: 58523 - protein, 9 aa, Homo Sapiens
EAAGIMENI

SEQ ID NO: 58524 - protein, 9 aa, Homo Sapiens
EAAMAFAYL

SEQ ID NO: 58525 - protein, 9 aa, Homo Sapiens
EAANFIMKV

SEQ ID NO: 58526 - protein, 9 aa, Homo Sapiens
EAANLFQFL

SEQ ID NO: 58527 - protein, 9 aa, Homo Sapiens
EAAPLLVHV

SEQ ID NO: 58528 - protein, 9 aa, Homo Sapiens
EAAQILRLL

SEQ ID NO: 58529 - protein, 9 aa, Homo Sapiens
EAASLFNRI

SEQ ID NO: 58530 - protein, 9 aa, Homo Sapiens
EAFDRSFEV

SEQ ID NO: 58531 - protein, 9 aa, Homo Sapiens
EAFFVKEYI

SEQ ID NO: 58532 - protein, 9 aa, Homo Sapiens
EAFGQSFSI

SEQ ID NO: 58533 - protein, 9 aa, Homo Sapiens
EAFHYIFNV

SEQ ID NO: 58534 - protein, 9 aa, Homo Sapiens
EAFVHVVTL

SEQ ID NO: 58535 - protein, 9 aa, Homo Sapiens
EAFYNVITV

SEQ ID NO: 58536 - protein, 9 aa, Homo Sapiens
EAFYYIHNL

SEQ ID NO: 58537 - protein, 9 aa, Homo Sapiens
EAIDFIDSI

SEQ ID NO: 58538 - protein, 9 aa, Homo Sapiens
EAIDRIFAI

SEQ ID NO: 58539 - protein, 9 aa, Homo Sapiens
EAIDWLLGL

SEQ ID NO: 58540 - protein, 9 aa, Homo Sapiens
EAIFILARA

SEQ ID NO: 58541 - protein, 9 aa, Homo Sapiens
EAIGFIDWV

SEQ ID NO: 58542 - protein, 9 aa, Homo Sapiens
EAIHNFVEV

SEQ ID NO: 58543 - protein, 9 aa, Homo Sapiens
EAINIIQGI

SEQ ID NO: 58544 - protein, 9 aa, Homo Sapiens
EAIQLIARI

SEQ ID NO: 58545 - protein, 9 aa, Homo Sapiens
EAMAAIFKI

SEQ ID NO: 58546 - protein, 9 aa, Homo Sapiens
EAMELIVKL

SEQ ID NO: 58547 - protein, 9 aa, Homo Sapiens
EAMKQILGV

SEQ ID NO: 58548 - protein, 9 aa, Homo Sapiens
EAMTQIIRV

SEQ ID NO: 58549 - protein, 9 aa, Homo Sapiens
EASAILVHL

SEQ ID NO: 58550 - protein, 9 aa, Homo Sapiens
EASAVIQGL

SEQ ID NO: 58551 - protein, 9 aa, Homo Sapiens
EASDLIIKL

SEQ ID NO: 58552 - protein, 9 aa, Homo Sapiens
EASDLLERL

SEQ ID NO: 58553 - protein, 9 aa, Homo Sapiens
EASEFIVYV

SEQ ID NO: 58554 - protein, 9 aa, Homo Sapiens
EASFVLHTI

SEQ ID NO: 58555 - protein, 9 aa, Homo Sapiens
EASYLITSV

SEQ ID NO: 58556 - protein, 9 aa, Homo Sapiens
EATDIALLL

SEQ ID NO: 58557 - protein, 9 aa, Homo Sapiens
EATKINLSL

SEQ ID NO: 58558 - protein, 9 aa, Homo Sapiens
EATKIWAEL

SEQ ID NO: 58559 - protein, 9 aa, Homo Sapiens
EAVAVIENI

SEQ ID NO: 58560 - protein, 9 aa, Homo Sapiens
EAVDLITRL

SEQ ID NO: 58561 - protein, 9 aa, Homo Sapiens
EAVEVIHKL

SEQ ID NO: 58562 - protein, 9 aa, Homo Sapiens
EAVSVIQSI

SEQ ID NO: 58563 - protein, 9 aa, Homo Sapiens
EGAAVFWNV

SEQ ID NO: 58564 - protein, 9 aa, Homo Sapiens
EGSPIKVTL

SEQ ID NO: 58565 - protein, 9 aa, Homo Sapiens
EGTDILVYV

SEQ ID NO: 58566 - protein, 9 aa, Homo Sapiens
EGVDIILGV

SEQ ID NO: 58567 - protein, 9 aa, Homo Sapiens
EIAAVIETV

SEQ ID NO: 58568 - protein, 9 aa, Homo Sapiens
EIADFFTEL

SEQ ID NO: 58569 - protein, 9 aa, Homo Sapiens
EIADKIYNL

SEQ ID NO: 58570 - protein, 9 aa, Homo Sapiens
EIADLVTSV

SEQ ID NO: 58571 - protein, 9 aa, Homo Sapiens
EIADVFAQI

SEQ ID NO: 58572 - protein, 9 aa, Homo Sapiens
EIAEIKAQL

SEQ ID NO: 58573 - protein, 9 aa, Homo Sapiens
EIAFIPNDV

SEQ ID NO: 58574 - protein, 9 aa, Homo Sapiens
EIANILQEL

SEQ ID NO: 58575 - protein, 9 aa, Homo Sapiens
EIAPINFKV

SEQ ID NO: 58576 - protein, 9 aa, Homo Sapiens
EIAQMMVYV

SEQ ID NO: 58577 - protein, 9 aa, Homo Sapiens
EIAQVVEKV

SEQ ID NO: 58578 - protein, 9 aa, Homo Sapiens
EIASITEQL

SEQ ID NO: 58579 - protein, 9 aa, Homo Sapiens
EIASLDVKI

SEQ ID NO: 58580 - protein, 9 aa, Homo Sapiens
EIAVPVANL

SEQ ID NO: 58581 - protein, 9 aa, Homo Sapiens
EIFDKIHSL

SEQ ID NO: 58582 - protein, 9 aa, Homo Sapiens
EIFPVSFHV

SEQ ID NO: 58583 - protein, 9 aa, Homo Sapiens
EIFRNLASV

SEQ ID NO: 58584 - protein, 9 aa, Homo Sapiens
EIFSKNYRV

SEQ ID NO: 58585 - protein, 9 aa, Homo Sapiens
EIGHILHHV

SEQ ID NO: 58586 - protein, 9 aa, Homo Sapiens
EIIDFFLGA

SEQ ID NO: 58587 - protein, 9 aa, Homo Sapiens
EIIHDLPVL

SEQ ID NO: 58588 - protein, 9 aa, Homo Sapiens
EIIQRIENV

SEQ ID NO: 58589 - protein, 9 aa, Homo Sapiens
EIPEWVHQL

SEQ ID NO: 58590 - protein, 9 aa, Homo Sapiens
EISAFHTLL

SEQ ID NO: 58591 - protein, 9 aa, Homo Sapiens
EISDIGAKI

SEQ ID NO: 58592 - protein, 9 aa, Homo Sapiens
EISDIHTKL

SEQ ID NO: 58593 - protein, 9 aa, Homo Sapiens
EISGIVEVV

SEQ ID NO: 58594 - protein, 9 aa, Homo Sapiens
EISHIVNRI

SEQ ID NO: 58595 - protein, 9 aa, Homo Sapiens
EISHVLNFL

SEQ ID NO: 58596 - protein, 9 aa, Homo Sapiens
EISPLISYA

SEQ ID NO: 58597 - protein, 9 aa, Homo Sapiens
EISRIFHYI

SEQ ID NO: 58598 - protein, 9 aa, Homo Sapiens
EISSIISKM

SEQ ID NO: 58599 - protein, 9 aa, Homo Sapiens
EISSILQEL

SEQ ID NO: 58600 - protein, 9 aa, Homo Sapiens
EISSVPTFL

SEQ ID NO: 58601 - protein, 9 aa, Homo Sapiens
EISTVLQYV

SEQ ID NO: 58602 - protein, 9 aa, Homo Sapiens
EITDINENI

SEQ ID NO: 58603 - protein, 9 aa, Homo Sapiens
EIVDFAKQV

SEQ ID NO: 58604 - protein, 9 aa, Homo Sapiens
EIVNIARQM

SEQ ID NO: 58605 - protein, 9 aa, Homo Sapiens
EIVTIWDSV

SEQ ID NO: 58606 - protein, 9 aa, Homo Sapiens
EIYKEFFEV

SEQ ID NO: 58607 - protein, 9 aa, Homo Sapiens
EIYRYIHYV

SEQ ID NO: 58608 - protein, 9 aa, Homo Sapiens
ELAALFYSV

SEQ ID NO: 58609 - protein, 9 aa, Homo Sapiens
ELAEIVFKV

SEQ ID NO: 58610 - protein, 9 aa, Homo Sapiens
ELAEIYAKL

SEQ ID NO: 58611 - protein, 9 aa, Homo Sapiens
ELAGIVCTL

SEQ ID NO: 58612 - protein, 9 aa, Homo Sapiens
ELANLYHHV

SEQ ID NO: 58613 - protein, 9 aa, Homo Sapiens
ELARVLVTL

SEQ ID NO: 58614 - protein, 9 aa, Homo Sapiens
ELFAVIAHV

SEQ ID NO: 58615 - protein, 9 aa, Homo Sapiens
ELFGKFDQI

SEQ ID NO: 58616 - protein, 9 aa, Homo Sapiens
ELFPLIFPA

SEQ ID NO: 58617 - protein, 9 aa, Homo Sapiens
ELFPQLISV

SEQ ID NO: 58618 - protein, 9 aa, Homo Sapiens
ELFTGFIKV

SEQ ID NO: 58619 - protein, 9 aa, Homo Sapiens
ELGGIIAEV

SEQ ID NO: 58620 - protein, 9 aa, Homo Sapiens
ELHYIPIRV

SEQ ID NO: 58621 - protein, 9 aa, Homo Sapiens
ELHYLEVYL

SEQ ID NO: 58622 - protein, 9 aa, Homo Sapiens
ELMGYIRNV

SEQ ID NO: 58623 - protein, 9 aa, Homo Sapiens
ELMNILNKV

SEQ ID NO: 58624 - protein, 9 aa, Homo Sapiens
ELQGFIARV

SEQ ID NO: 58625 - protein, 9 aa, Homo Sapiens
ELSDVLIYL

SEQ ID NO: 58626 - protein, 9 aa, Homo Sapiens
ELSEISERL

SEQ ID NO: 58627 - protein, 9 aa, Homo Sapiens
ELSFRISEL

SEQ ID NO: 58628 - protein, 9 aa, Homo Sapiens
ELSHVQIPV

SEQ ID NO: 58629 - protein, 9 aa, Homo Sapiens
ELSKIIQKV

SEQ ID NO: 58630 - protein, 9 aa, Homo Sapiens
ELSNVLAAM

SEQ ID NO: 58631 - protein, 9 aa, Homo Sapiens
ELSPIREEL

SEQ ID NO: 58632 - protein, 9 aa, Homo Sapiens
ELSRIVLEV

SEQ ID NO: 58633 - protein, 9 aa, Homo Sapiens
ELTQIIADV

SEQ ID NO: 58634 - protein, 9 aa, Homo Sapiens
ELVNFIERV

SEQ ID NO: 58635 - protein, 9 aa, Homo Sapiens
ELYPYQERV

SEQ ID NO: 58636 - protein, 9 aa, Homo Sapiens
EMVDIIETV

SEQ ID NO: 58637 - protein, 9 aa, Homo Sapiens
ENTDILIYV

SEQ ID NO: 58638 - protein, 9 aa, Homo Sapiens
EQADIFERV

SEQ ID NO: 58639 - protein, 9 aa, Homo Sapiens
EQASILSLV

SEQ ID NO: 58640 - protein, 9 aa, Homo Sapiens
ESAAINQIL

SEQ ID NO: 58641 - protein, 9 aa, Homo Sapiens
ESADLIHWL

SEQ ID NO: 58642 - protein, 9 aa, Homo Sapiens
ESAPIGIRV

SEQ ID NO: 58643 - protein, 9 aa, Homo Sapiens
ESAWVLTNI

SEQ ID NO: 58644 - protein, 9 aa, Homo Sapiens
ESFGFTADL

SEQ ID NO: 58645 - protein, 9 aa, Homo Sapiens
ESFIKAIGV

SEQ ID NO: 58646 - protein, 9 aa, Homo Sapiens
ESFPHQALL

SEQ ID NO: 58647 - protein, 9 aa, Homo Sapiens
ESFSDYPPL

SEQ ID NO: 58648 - protein, 9 aa, Homo Sapiens
ESFYIQTLL

SEQ ID NO: 58649 - protein, 9 aa, Homo Sapiens
ESIDIITRA

SEQ ID NO: 58650 - protein, 9 aa, Homo Sapiens
ESIDRVYSL

SEQ ID NO: 58651 - protein, 9 aa, Homo Sapiens
ESIHVTLNV

SEQ ID NO: 58652 - protein, 9 aa, Homo Sapiens
ESKFFEHFI

SEQ ID NO: 58653 - protein, 9 aa, Homo Sapiens
ESMDILFRI

SEQ ID NO: 58654 - protein, 9 aa, Homo Sapiens
ESSDVIRLI

SEQ ID NO: 58655 - protein, 9 aa, Homo Sapiens
ESSPFVERL

SEQ ID NO: 58656 - protein, 9 aa, Homo Sapiens
ESSYIFVSV

SEQ ID NO: 58657 - protein, 9 aa, Homo Sapiens
ESSYVFLHV

SEQ ID NO: 58658 - protein, 9 aa, Homo Sapiens
ESTAIIAVV

SEQ ID NO: 58659 - protein, 9 aa, Homo Sapiens
ESVSIFSSA

SEQ ID NO: 58660 - protein, 9 aa, Homo Sapiens
ESVSLLWKV

SEQ ID NO: 58661 - protein, 9 aa, Homo Sapiens
ESYHVPELI

SEQ ID NO: 58662 - protein, 9 aa, Homo Sapiens
ETAAFIERL

SEQ ID NO: 58663 - protein, 9 aa, Homo Sapiens
ETAAIFHYL

SEQ ID NO: 58664 - protein, 9 aa, Homo Sapiens
ETADITHAL

SEQ ID NO: 58665 - protein, 9 aa, Homo Sapiens
ETADVIAKV

SEQ ID NO: 58666 - protein, 9 aa, Homo Sapiens
ETAENILGV

SEQ ID NO: 58667 - protein, 9 aa, Homo Sapiens
ETAFIHYRL

SEQ ID NO: 58668 - protein, 9 aa, Homo Sapiens
ETAFVVDEV

SEQ ID NO: 58669 - protein, 9 aa, Homo Sapiens
ETAHFFEEI

SEQ ID NO: 58670 - protein, 9 aa, Homo Sapiens
ETAKLIEKL

SEQ ID NO: 58671 - protein, 9 aa, Homo Sapiens
ETARLTSFI

SEQ ID NO: 58672 - protein, 9 aa, Homo Sapiens
ETASILMHA

SEQ ID NO: 58673 - protein, 9 aa, Homo Sapiens
ETATMHILV

SEQ ID NO: 58674 - protein, 9 aa, Homo Sapiens
ETAYIRVKV

SEQ ID NO: 58675 - protein, 9 aa, Homo Sapiens
ETFAFIQQL

SEQ ID NO: 58676 - protein, 9 aa, Homo Sapiens
ETFAFQAEI

SEQ ID NO: 58677 - protein, 9 aa, Homo Sapiens
ETFDFVHNV

SEQ ID NO: 58678 - protein, 9 aa, Homo Sapiens
ETFFGVQWV

SEQ ID NO: 58679 - protein, 9 aa, Homo Sapiens
ETFGMKLSV

SEQ ID NO: 58680 - protein, 9 aa, Homo Sapiens
ETFGMVVKM

SEQ ID NO: 58681 - protein, 9 aa, Homo Sapiens
ETFHDIAQV

SEQ ID NO: 58682 - protein, 9 aa, Homo Sapiens
ETFISHLEV

SEQ ID NO: 58683 - protein, 9 aa, Homo Sapiens
ETFISLVSI

SEQ ID NO: 58684 - protein, 9 aa, Homo Sapiens
ETFMNRVEV

SEQ ID NO: 58685 - protein, 9 aa, Homo Sapiens
ETFNDFVRL

SEQ ID NO: 58686 - protein, 9 aa, Homo Sapiens
ETFPANIQV

SEQ ID NO: 58687 - protein, 9 aa, Homo Sapiens
ETFPGVTAL

SEQ ID NO: 58688 - protein, 9 aa, Homo Sapiens
ETFQNSVFV

SEQ ID NO: 58689 - protein, 9 aa, Homo Sapiens
ETFSQHTFL

SEQ ID NO: 58690 - protein, 9 aa, Homo Sapiens
ETFSYPDFL

SEQ ID NO: 58691 - protein, 9 aa, Homo Sapiens
ETFVGDYTL

SEQ ID NO: 58692 - protein, 9 aa, Homo Sapiens
ETFVMRLTV

SEQ ID NO: 58693 - protein, 9 aa, Homo Sapiens
ETFVPHVTL

SEQ ID NO: 58694 - protein, 9 aa, Homo Sapiens
ETFYIGKLI

SEQ ID NO: 58695 - protein, 9 aa, Homo Sapiens
ETGAFFFLI

SEQ ID NO: 58696 - protein, 9 aa, Homo Sapiens
ETHFGFETV

SEQ ID NO: 58697 - protein, 9 aa, Homo Sapiens
ETHFLDEEV

SEQ ID NO: 58698 - protein, 9 aa, Homo Sapiens
ETIAIVEHI

SEQ ID NO: 58699 - protein, 9 aa, Homo Sapiens
ETIALLFEL

SEQ ID NO: 58700 - protein, 9 aa, Homo Sapiens
ETIDLLVQI

SEQ ID NO: 58701 - protein, 9 aa, Homo Sapiens
ETIFGEWTV

SEQ ID NO: 58702 - protein, 9 aa, Homo Sapiens
ETIGVVHLV

SEQ ID NO: 58703 - protein, 9 aa, Homo Sapiens
ETILIIRRL

SEQ ID NO: 58704 - protein, 9 aa, Homo Sapiens
ETIRNIPHL

SEQ ID NO: 58705 - protein, 9 aa, Homo Sapiens
ETMQATIHV

SEQ ID NO: 58706 - protein, 9 aa, Homo Sapiens
ETSALKFEI

SEQ ID NO: 58707 - protein, 9 aa, Homo Sapiens
ETSDILQRV

SEQ ID NO: 58708 - protein, 9 aa, Homo Sapiens
ETSPHTFQL

SEQ ID NO: 58709 - protein, 9 aa, Homo Sapiens
ETSPVLQKL

SEQ ID NO: 58710 - protein, 9 aa, Homo Sapiens
ETSSIMQKL

SEQ ID NO: 58711 - protein, 9 aa, Homo Sapiens
ETSSVVRKI

SEQ ID NO: 58712 - protein, 9 aa, Homo Sapiens
ETTDNVFTL

SEQ ID NO: 58713 - protein, 9 aa, Homo Sapiens
ETTPVHPLL

SEQ ID NO: 58714 - protein, 9 aa, Homo Sapiens
ETTSIDVDL

SEQ ID NO: 58715 - protein, 9 aa, Homo Sapiens
ETVDFKAPL

SEQ ID NO: 58716 - protein, 9 aa, Homo Sapiens
ETVDFWLKV

SEQ ID NO: 58717 - protein, 9 aa, Homo Sapiens
ETVDLIKFI

SEQ ID NO: 58718 - protein, 9 aa, Homo Sapiens
ETVEVVNSL

SEQ ID NO: 58719 - protein, 9 aa, Homo Sapiens
ETVGILHKV

SEQ ID NO: 58720 - protein, 9 aa, Homo Sapiens
ETVHLFMEA

SEQ ID NO: 58721 - protein, 9 aa, Homo Sapiens
ETVIIPEQV

SEQ ID NO: 58722 - protein, 9 aa, Homo Sapiens
ETVIPVDVM

SEQ ID NO: 58723 - protein, 9 aa, Homo Sapiens
ETVLIETQL

SEQ ID NO: 58724 - protein, 9 aa, Homo Sapiens
ETVLILEEL

SEQ ID NO: 58725 - protein, 9 aa, Homo Sapiens
ETVLWVVHV

SEQ ID NO: 58726 - protein, 9 aa, Homo Sapiens
ETVNIWSHL

SEQ ID NO: 58727 - protein, 9 aa, Homo Sapiens
ETVPFIKTI

SEQ ID NO: 58728 - protein, 9 aa, Homo Sapiens
ETVVIFYDV

SEQ ID NO: 58729 - protein, 9 aa, Homo Sapiens
ETWIGIYTV

SEQ ID NO: 58730 - protein, 9 aa, Homo Sapiens
ETYLNISQV

SEQ ID NO: 58731 - protein, 9 aa, Homo Sapiens
ETYPDAVKI

SEQ ID NO: 58732 - protein, 9 aa, Homo Sapiens
ETYPDPVRV

SEQ ID NO: 58733 - protein, 9 aa, Homo Sapiens
EVAALIRSL

SEQ ID NO: 58734 - protein, 9 aa, Homo Sapiens
EVADFLIKA

SEQ ID NO: 58735 - protein, 9 aa, Homo Sapiens
EVADLQPQL

SEQ ID NO: 58736 - protein, 9 aa, Homo Sapiens
EVADVGIEV

SEQ ID NO: 58737 - protein, 9 aa, Homo Sapiens
EVAEFVQSL

SEQ ID NO: 58738 - protein, 9 aa, Homo Sapiens
EVAELFQRL

SEQ ID NO: 58739 - protein, 9 aa, Homo Sapiens
EVAEVLQKL

SEQ ID NO: 58740 - protein, 9 aa, Homo Sapiens
EVAGLWIKI

SEQ ID NO: 58741 - protein, 9 aa, Homo Sapiens
EVAGMLIGL

SEQ ID NO: 58742 - protein, 9 aa, Homo Sapiens
EVAKIIYIV

SEQ ID NO: 58743 - protein, 9 aa, Homo Sapiens
EVAKMIQEV

SEQ ID NO: 58744 - protein, 9 aa, Homo Sapiens
EVAKVIVSM

SEQ ID NO: 58745 - protein, 9 aa, Homo Sapiens
EVANAVAFI

SEQ ID NO: 58746 - protein, 9 aa, Homo Sapiens
EVAPISDII

SEQ ID NO: 58747 - protein, 9 aa, Homo Sapiens
EVAPSFGTL

SEQ ID NO: 58748 - protein, 9 aa, Homo Sapiens
EVAQIIRKL

SEQ ID NO: 58749 - protein, 9 aa, Homo Sapiens
EVFALIHEL

SEQ ID NO: 58750 - protein, 9 aa, Homo Sapiens
EVFDEVVQI

SEQ ID NO: 58751 - protein, 9 aa, Homo Sapiens
EVFDKLARV

SEQ ID NO: 58752 - protein, 9 aa, Homo Sapiens
EVFDKTYQF

SEQ ID NO: 58753 - protein, 9 aa, Homo Sapiens
EVFDVIAEI

SEQ ID NO: 58754 - protein, 9 aa, Homo Sapiens
EVFEDAAEI

SEQ ID NO: 58755 - protein, 9 aa, Homo Sapiens
EVFEFRPEL

SEQ ID NO: 58756 - protein, 9 aa, Homo Sapiens
EVFEKATFI

SEQ ID NO: 58757 - protein, 9 aa, Homo Sapiens
EVFEVVERV

SEQ ID NO: 58758 - protein, 9 aa, Homo Sapiens
EVFFETFNV

SEQ ID NO: 58759 - protein, 9 aa, Homo Sapiens
EVFFKEIFL

SEQ ID NO: 58760 - protein, 9 aa, Homo Sapiens
EVFGFISLL

SEQ ID NO: 58761 - protein, 9 aa, Homo Sapiens
EVFGFVQTL

SEQ ID NO: 58762 - protein, 9 aa, Homo Sapiens
EVFGHAIKA

SEQ ID NO: 58763 - protein, 9 aa, Homo Sapiens
EVFGLVQQL

SEQ ID NO: 58764 - protein, 9 aa, Homo Sapiens
EVFHFFNVL

SEQ ID NO: 58765 - protein, 9 aa, Homo Sapiens
EVFHQAFLL

SEQ ID NO: 58766 - protein, 9 aa, Homo Sapiens
EVFHVPLLL

SEQ ID NO: 58767 - protein, 9 aa, Homo Sapiens
EVFIKFIQV

SEQ ID NO: 58768 - protein, 9 aa, Homo Sapiens
EVFLKAFAV

SEQ ID NO: 58769 - protein, 9 aa, Homo Sapiens
EVFNYIHNI

SEQ ID NO: 58770 - protein, 9 aa, Homo Sapiens
EVFPTQHVV

SEQ ID NO: 58771 - protein, 9 aa, Homo Sapiens
EVFQGVEKL

SEQ ID NO: 58772 - protein, 9 aa, Homo Sapiens
EVFRVVDTL

SEQ ID NO: 58773 - protein, 9 aa, Homo Sapiens
EVFSSFAHA

SEQ ID NO: 58774 - protein, 9 aa, Homo Sapiens
EVFSYHQGL

SEQ ID NO: 58775 - protein, 9 aa, Homo Sapiens
EVGGEALGR

SEQ ID NO: 58776 - protein, 9 aa, Homo Sapiens
EVGPKFRGV

SEQ ID NO: 58777 - protein, 9 aa, Homo Sapiens
EVIAEAVGV

SEQ ID NO: 58778 - protein, 9 aa, Homo Sapiens
EVIALLHSL

SEQ ID NO: 58779 - protein, 9 aa, Homo Sapiens
EVIDFSHGL

SEQ ID NO: 58780 - protein, 9 aa, Homo Sapiens
EVIDLKAEI

SEQ ID NO: 58781 - protein, 9 aa, Homo Sapiens
EVIEGYEIA

SEQ ID NO: 58782 - protein, 9 aa, Homo Sapiens
EVIEKFDYV

SEQ ID NO: 58783 - protein, 9 aa, Homo Sapiens
EVIGKITAL

SEQ ID NO: 58784 - protein, 9 aa, Homo Sapiens
EVIKELAQI

SEQ ID NO: 58785 - protein, 9 aa, Homo Sapiens
EVILRVDNI

SEQ ID NO: 58786 - protein, 9 aa, Homo Sapiens
EVINTVAQV

SEQ ID NO: 58787 - protein, 9 aa, Homo Sapiens
EVIPVPIEV

SEQ ID NO: 58788 - protein, 9 aa, Homo Sapiens
EVIRDVINV

SEQ ID NO: 58789 - protein, 9 aa, Homo Sapiens
EVIRYAVQV

SEQ ID NO: 58790 - protein, 9 aa, Homo Sapiens
EVISKLYAV

SEQ ID NO: 58791 - protein, 9 aa, Homo Sapiens
EVISKTPTL

SEQ ID NO: 58792 - protein, 9 aa, Homo Sapiens
EVITKFINV

SEQ ID NO: 58793 - protein, 9 aa, Homo Sapiens
EVIVGTVTL

SEQ ID NO: 58794 - protein, 9 aa, Homo Sapiens
EVIWLTQHV

SEQ ID NO: 58795 - protein, 9 aa, Homo Sapiens
EVLDFITHL

SEQ ID NO: 58796 - protein, 9 aa, Homo Sapiens
EVLGFVAKL

SEQ ID NO: 58797 - protein, 9 aa, Homo Sapiens
EVLHFSVGV

SEQ ID NO: 58798 - protein, 9 aa, Homo Sapiens
EVLKAVTAL

SEQ ID NO: 58799 - protein, 9 aa, Homo Sapiens
EVMEHRFFL

SEQ ID NO: 58800 - protein, 9 aa, Homo Sapiens
EVMEPTWHI

SEQ ID NO: 58801 - protein, 9 aa, Homo Sapiens
EVMEWMNNV

SEQ ID NO: 58802 - protein, 9 aa, Homo Sapiens
EVMKIKAEI

SEQ ID NO: 58803 - protein, 9 aa, Homo Sapiens
EVMKYITSL

SEQ ID NO: 58804 - protein, 9 aa, Homo Sapiens
EVMMLTERV

SEQ ID NO: 58805 - protein, 9 aa, Homo Sapiens
EVMPFIDEI

SEQ ID NO: 58806 - protein, 9 aa, Homo Sapiens
EVMQAVARL

SEQ ID NO: 58807 - protein, 9 aa, Homo Sapiens
EVMQEVAQL

SEQ ID NO: 58808 - protein, 9 aa, Homo Sapiens
EVMQVLSHV

SEQ ID NO: 58809 - protein, 9 aa, Homo Sapiens
EVMSVIAQV

SEQ ID NO: 58810 - protein, 9 aa, Homo Sapiens
EVPFFPARV

SEQ ID NO: 58811 - protein, 9 aa, Homo Sapiens
EVPHFHHEL

SEQ ID NO: 58812 - protein, 9 aa, Homo Sapiens
EVPPPFTLV

SEQ ID NO: 58813 - protein, 9 aa, Homo Sapiens
EVQAILAFL

SEQ ID NO: 58814 - protein, 9 aa, Homo Sapiens
EVRDIKEFL

SEQ ID NO: 58815 - protein, 9 aa, Homo Sapiens
EVSALINKL

SEQ ID NO: 58816 - protein, 9 aa, Homo Sapiens
EVSDLVEMI

SEQ ID NO: 58817 - protein, 9 aa, Homo Sapiens
EVSEIHIKV

SEQ ID NO: 58818 - protein, 9 aa, Homo Sapiens
EVSEIIDGL

SEQ ID NO: 58819 - protein, 9 aa, Homo Sapiens
EVSFINIKT

SEQ ID NO: 58820 - protein, 9 aa, Homo Sapiens
EVSFIVQLV

SEQ ID NO: 58821 - protein, 9 aa, Homo Sapiens
EVSFVIHNL

SEQ ID NO: 58822 - protein, 9 aa, Homo Sapiens
EVSKAIINI

SEQ ID NO: 58823 - protein, 9 aa, Homo Sapiens
EVSQYIYQV

SEQ ID NO: 58824 - protein, 9 aa, Homo Sapiens
EVSRVLEQV

SEQ ID NO: 58825 - protein, 9 aa, Homo Sapiens
EVSSVVQVL

SEQ ID NO: 58826 - protein, 9 aa, Homo Sapiens
EVTEFFVTL

SEQ ID NO: 58827 - protein, 9 aa, Homo Sapiens
EVTLIHSQV

SEQ ID NO: 58828 - protein, 9 aa, Homo Sapiens
EVTNLRAEL

SEQ ID NO: 58829 - protein, 9 aa, Homo Sapiens
EVTNVWINV

SEQ ID NO: 58830 - protein, 9 aa, Homo Sapiens
EVTSINSFL

SEQ ID NO: 58831 - protein, 9 aa, Homo Sapiens
EVTSLKHLL

SEQ ID NO: 58832 - protein, 9 aa, Homo Sapiens
EVTVINERL

SEQ ID NO: 58833 - protein, 9 aa, Homo Sapiens
EVVAVRQEL

SEQ ID NO: 58834 - protein, 9 aa, Homo Sapiens
EVVDIFQVV

SEQ ID NO: 58835 - protein, 9 aa, Homo Sapiens
EVVGLIFRL

SEQ ID NO: 58836 - protein, 9 aa, Homo Sapiens
EVVILDVRV

SEQ ID NO: 58837 - protein, 9 aa, Homo Sapiens
EVVKFVNFL

SEQ ID NO: 58838 - protein, 9 aa, Homo Sapiens
EVVNIVKHL

SEQ ID NO: 58839 - protein, 9 aa, Homo Sapiens
EVVNVWTHL

SEQ ID NO: 58840 - protein, 9 aa, Homo Sapiens
EVYAQVARL

SEQ ID NO: 58841 - protein, 9 aa, Homo Sapiens
EVYEKPVQV

SEQ ID NO: 58842 - protein, 9 aa, Homo Sapiens
EVYPGQQYL

SEQ ID NO: 58843 - protein, 9 aa, Homo Sapiens
FAADIISVL

SEQ ID NO: 58844 - protein, 9 aa, Homo Sapiens
FAAGIIAHL

SEQ ID NO: 58845 - protein, 9 aa, Homo Sapiens
FASGLIHRV

SEQ ID NO: 58846 - protein, 9 aa, Homo Sapiens
FASTILHLV

SEQ ID NO: 58847 - protein, 9 aa, Homo Sapiens
FATEVRAVI

SEQ ID NO: 58848 - protein, 9 aa, Homo Sapiens
FAVTEYPTL

SEQ ID NO: 58849 - protein, 9 aa, Homo Sapiens
FAVYIHALL

SEQ ID NO: 58850 - protein, 9 aa, Homo Sapiens
FFDTASTGK

SEQ ID NO: 58851 - protein, 9 aa, Homo Sapiens
FIAPSGHGL

SEQ ID NO: 58852 - protein, 9 aa, Homo Sapiens
FISGILAAL

SEQ ID NO: 58853 - protein, 9 aa, Homo Sapiens
FLANVSTVL

SEQ ID NO: 58854 - protein, 9 aa, Homo Sapiens
FLVHNVKEL

SEQ ID NO: 58855 - protein, 9 aa, Homo Sapiens
FNFFAPPEV

SEQ ID NO: 58856 - protein, 9 aa, Homo Sapiens
FPVHGFPTL

SEQ ID NO: 58857 - protein, 9 aa, Homo Sapiens
FRVPTANVS

SEQ ID NO: 58858 - protein, 9 aa, Homo Sapiens
FSAEDIAKI

SEQ ID NO: 58859 - protein, 9 aa, Homo Sapiens
FSAEIIYHL

SEQ ID NO: 58860 - protein, 9 aa, Homo Sapiens
FSHAQTVVL

SEQ ID NO: 58861 - protein, 9 aa, Homo Sapiens
FSPFHASVL

SEQ ID NO: 58862 - protein, 9 aa, Homo Sapiens
FSSHILVVV

SEQ ID NO: 58863 - protein, 9 aa, Homo Sapiens
FSTSLVHSI

SEQ ID NO: 58864 - protein, 9 aa, Homo Sapiens
FSTTVIQNV

SEQ ID NO: 58865 - protein, 9 aa, Homo Sapiens
FSVDINNEV

SEQ ID NO: 58866 - protein, 9 aa, Homo Sapiens
FTAAIISRV

SEQ ID NO: 58867 - protein, 9 aa, Homo Sapiens
FTADFVRQL

SEQ ID NO: 58868 - protein, 9 aa, Homo Sapiens
FTADVRSVL

SEQ ID NO: 58869 - protein, 9 aa, Homo Sapiens
FTAGIVEAV

SEQ ID NO: 58870 - protein, 9 aa, Homo Sapiens
FTAKVFAKL

SEQ ID NO: 58871 - protein, 9 aa, Homo Sapiens
FTAKVNIEV

SEQ ID NO: 58872 - protein, 9 aa, Homo Sapiens
FTAKVWDAV

SEQ ID NO: 58873 - protein, 9 aa, Homo Sapiens
FTAVVITGV

SEQ ID NO: 58874 - protein, 9 aa, Homo Sapiens
FTFGIESHI

SEQ ID NO: 58875 - protein, 9 aa, Homo Sapiens
FTFSGICRV

SEQ ID NO: 58876 - protein, 9 aa, Homo Sapiens
FTIDIKSFL

SEQ ID NO: 58877 - protein, 9 aa, Homo Sapiens
FTIFLPASV

SEQ ID NO: 58878 - protein, 9 aa, Homo Sapiens
FTIFRTISV

SEQ ID NO: 58879 - protein, 9 aa, Homo Sapiens
FTSDIALRL

SEQ ID NO: 58880 - protein, 9 aa, Homo Sapiens
FTSQVIRNL

SEQ ID NO: 58881 - protein, 9 aa, Homo Sapiens
FTTDVQLGI

SEQ ID NO: 58882 - protein, 9 aa, Homo Sapiens
FTTHILEVI

SEQ ID NO: 58883 - protein, 9 aa, Homo Sapiens
FTVSLNHKL

SEQ ID NO: 58884 - protein, 9 aa, Homo Sapiens
FTWEGLYNV

SEQ ID NO: 58885 - protein, 9 aa, Homo Sapiens
FVALPGVAV

SEQ ID NO: 58886 - protein, 9 aa, Homo Sapiens
FVAPPTAAV

SEQ ID NO: 58887 - protein, 9 aa, Homo Sapiens
FVASHPWEV

SEQ ID NO: 58888 - protein, 9 aa, Homo Sapiens
FVEWIPNNV

SEQ ID NO: 58889 - protein, 9 aa, Homo Sapiens
FVGYFPATV

SEQ ID NO: 58890 - protein, 9 aa, Homo Sapiens
FVIHNLPVL

SEQ ID NO: 58891 - protein, 9 aa, Homo Sapiens
FVIRNIVEA

SEQ ID NO: 58892 - protein, 9 aa, Homo Sapiens
FVNDIFERI

SEQ ID NO: 58893 - protein, 9 aa, Homo Sapiens
FVNEIISRI

SEQ ID NO: 58894 - protein, 9 aa, Homo Sapiens
FVSGVIVKI

SEQ ID NO: 58895 - protein, 9 aa, Homo Sapiens
FVVKAYLPV

SEQ ID NO: 58896 - protein, 9 aa, Homo Sapiens
GGPGGVGGL

SEQ ID NO: 58897 - protein, 9 aa, Homo Sapiens
GTAAVFNAV

SEQ ID NO: 58898 - protein, 9 aa, Homo Sapiens
GTIGLIHAV

SEQ ID NO: 58899 - protein, 9 aa, Homo Sapiens
GTVFIIQGL

SEQ ID NO: 58900 - protein, 9 aa, Homo Sapiens
GVVDIFQTV

SEQ ID NO: 58901 - protein, 9 aa, Homo Sapiens
HAAGVLLHV

SEQ ID NO: 58902 - protein, 9 aa, Homo Sapiens
HAAHIISEL

SEQ ID NO: 58903 - protein, 9 aa, Homo Sapiens
HAAKVILQV

SEQ ID NO: 58904 - protein, 9 aa, Homo Sapiens
HAANIVTAI

SEQ ID NO: 58905 - protein, 9 aa, Homo Sapiens
HACGVIATI

SEQ ID NO: 58906 - protein, 9 aa, Homo Sapiens
HIADIVHTL

SEQ ID NO: 58907 - protein, 9 aa, Homo Sapiens
HIPNIFQKI

SEQ ID NO: 58908 - protein, 9 aa, Homo Sapiens
HLANIVERV

SEQ ID NO: 58909 - protein, 9 aa, Homo Sapiens
HLGYLPNQL

SEQ ID NO: 58910 - protein, 9 aa, Homo Sapiens
HNAGISFSV

SEQ ID NO: 58911 - protein, 9 aa, Homo Sapiens
HNALESVPL

SEQ ID NO: 58912 - protein, 9 aa, Homo Sapiens
HNIYVDALL

SEQ ID NO: 58913 - protein, 9 aa, Homo Sapiens
HRHPDEAAF

SEQ ID NO: 58914 - protein, 9 aa, Homo Sapiens
HSAEILAEI

SEQ ID NO: 58915 - protein, 9 aa, Homo Sapiens
HSASIPGIL

SEQ ID NO: 58916 - protein, 9 aa, Homo Sapiens
HSIPVTVEV

SEQ ID NO: 58917 - protein, 9 aa, Homo Sapiens
HSVYIPNKV

SEQ ID NO: 58918 - protein, 9 aa, Homo Sapiens
HTAEILDFA

SEQ ID NO: 58919 - protein, 9 aa, Homo Sapiens
HTANIQTLI

SEQ ID NO: 58920 - protein, 9 aa, Homo Sapiens
HTEFIFTTI

SEQ ID NO: 58921 - protein, 9 aa, Homo Sapiens
HTFSGVASV

SEQ ID NO: 58922 - protein, 9 aa, Homo Sapiens
HTFYNELRV

SEQ ID NO: 58923 - protein, 9 aa, Homo Sapiens
HTIDTILTV

SEQ ID NO: 58924 - protein, 9 aa, Homo Sapiens
HTIFPSEYL

SEQ ID NO: 58925 - protein, 9 aa, Homo Sapiens
HTILIVEKV

SEQ ID NO: 58926 - protein, 9 aa, Homo Sapiens
HTISPLDLA

SEQ ID NO: 58927 - protein, 9 aa, Homo Sapiens
HTISVPYSV

SEQ ID NO: 58928 - protein, 9 aa, Homo Sapiens
HTKFVRDMI

SEQ ID NO: 58929 - protein, 9 aa, Homo Sapiens
HTLFVRAMI

SEQ ID NO: 58930 - protein, 9 aa, Homo Sapiens
HTMDPQLRL

SEQ ID NO: 58931 - protein, 9 aa, Homo Sapiens
HTTDFYFNI

SEQ ID NO: 58932 - protein, 9 aa, Homo Sapiens
HTVGFILQL

SEQ ID NO: 58933 - protein, 9 aa, Homo Sapiens
HTVMIQETV

SEQ ID NO: 58934 - protein, 9 aa, Homo Sapiens
HTYHIKNYI

SEQ ID NO: 58935 - protein, 9 aa, Homo Sapiens
HVALVLFEL

SEQ ID NO: 58936 - protein, 9 aa, Homo Sapiens
HVANIVEKL

SEQ ID NO: 58937 - protein, 9 aa, Homo Sapiens
HVAQFQEFL

SEQ ID NO: 58938 - protein, 9 aa, Homo Sapiens
HVGDIIKEV

SEQ ID NO: 58939 - protein, 9 aa, Homo Sapiens
HVIDVQILI

SEQ ID NO: 58940 - protein, 9 aa, Homo Sapiens
HVIRINKML

SEQ ID NO: 58941 - protein, 9 aa, Homo Sapiens
HVSQIFNMI

SEQ ID NO: 58942 - protein, 9 aa, Homo Sapiens
HVTEILADI

SEQ ID NO: 58943 - protein, 9 aa, Homo Sapiens
HVTMVVAEL

SEQ ID NO: 58944 - protein, 9 aa, Homo Sapiens
HVVDFFNRV

SEQ ID NO: 58945 - protein, 9 aa, Homo Sapiens
HVVDVSVAV

SEQ ID NO: 58946 - protein, 9 aa, Homo Sapiens
HVVEILVET

SEQ ID NO: 58947 - protein, 9 aa, Homo Sapiens
HYGPGWVSM

SEQ ID NO: 58948 - protein, 9 aa, Homo Sapiens
IASPVIAAV

SEQ ID NO: 58949 - protein, 9 aa, Homo Sapiens
IDAPGHRDF

SEQ ID NO: 58950 - protein, 9 aa, Homo Sapiens
IDENNSEIL

SEQ ID NO: 58951 - protein, 9 aa, Homo Sapiens
IIAGVIYQA

SEQ ID NO: 58952 - protein, 9 aa, Homo Sapiens
ILASIFETV

SEQ ID NO: 58953 - protein, 9 aa, Homo Sapiens
IPPLTQTPV

SEQ ID NO: 58954 - protein, 9 aa, Homo Sapiens
IQKEDVPSE

SEQ ID NO: 58955 - protein, 9 aa, Homo Sapiens
IRLENEIQT

SEQ ID NO: 58956 - protein, 9 aa, Homo Sapiens
ISYFVAEFI

SEQ ID NO: 58957 - protein, 9 aa, Homo Sapiens
ITAAVIEHL

SEQ ID NO: 58958 - protein, 9 aa, Homo Sapiens
ITAPIEAQV

SEQ ID NO: 58959 - protein, 9 aa, Homo Sapiens
ITAPPTPGI

SEQ ID NO: 58960 - protein, 9 aa, Homo Sapiens
ITAQIFSYL

SEQ ID NO: 58961 - protein, 9 aa, Homo Sapiens
ITFGRMVQV

SEQ ID NO: 58962 - protein, 9 aa, Homo Sapiens
ITIHLPSPV

SEQ ID NO: 58963 - protein, 9 aa, Homo Sapiens
ITSELVSKI

SEQ ID NO: 58964 - protein, 9 aa, Homo Sapiens
ITSSIHFEA

SEQ ID NO: 58965 - protein, 9 aa, Homo Sapiens
ITTDVLYTI

SEQ ID NO: 58966 - protein, 9 aa, Homo Sapiens
ITTEILKSV

SEQ ID NO: 58967 - protein, 9 aa, Homo Sapiens
IVADVQISV

SEQ ID NO: 58968 - protein, 9 aa, Homo Sapiens
IVAEIIKKV

SEQ ID NO: 58969 - protein, 9 aa, Homo Sapiens
IVSDVIRGI

SEQ ID NO: 58970 - protein, 9 aa, Homo Sapiens
IVSPVVAAV

SEQ ID NO: 58971 - protein, 9 aa, Homo Sapiens
IVTEIISEI

SEQ ID NO: 58972 - protein, 9 aa, Homo Sapiens
IWHHTFYNE

SEQ ID NO: 58973 - protein, 9 aa, Homo Sapiens
KTVYFDFQV

SEQ ID NO: 58974 - protein, 9 aa, Homo Sapiens
KVANIIAEV

SEQ ID NO: 58975 - protein, 9 aa, Homo Sapiens
LAAYHPWVV

SEQ ID NO: 58976 - protein, 9 aa, Homo Sapiens
LATDILMGV

SEQ ID NO: 58977 - protein, 9 aa, Homo Sapiens
LESSVIKLE

SEQ ID NO: 58978 - protein, 9 aa, Homo Sapiens
LEVDIDIKI

SEQ ID NO: 58979 - protein, 9 aa, Homo Sapiens
LLPVLESFK

SEQ ID NO: 58980 - protein, 9 aa, Homo Sapiens
LPAKVYVGV

SEQ ID NO: 58981 - protein, 9 aa, Homo Sapiens
LSADIFQQV

SEQ ID NO: 58982 - protein, 9 aa, Homo Sapiens
LSFFVGYGV

SEQ ID NO: 58983 - protein, 9 aa, Homo Sapiens
LSNFIKAMV

SEQ ID NO: 58984 - protein, 9 aa, Homo Sapiens
LSSDVISNI

SEQ ID NO: 58985 - protein, 9 aa, Homo Sapiens
LSSNVILHV

SEQ ID NO: 58986 - protein, 9 aa, Homo Sapiens
LTADINWAV

SEQ ID NO: 58987 - protein, 9 aa, Homo Sapiens
LTAEITSKI

SEQ ID NO: 58988 - protein, 9 aa, Homo Sapiens
LTIFVSAKL

SEQ ID NO: 58989 - protein, 9 aa, Homo Sapiens
LTRTPIVTL

SEQ ID NO: 58990 - protein, 9 aa, Homo Sapiens
LTSDIIESI

SEQ ID NO: 58991 - protein, 9 aa, Homo Sapiens
LTSELITHI

SEQ ID NO: 58992 - protein, 9 aa, Homo Sapiens
LTSGIVIQV

SEQ ID NO: 58993 - protein, 9 aa, Homo Sapiens
LTSNIIAWL

SEQ ID NO: 58994 - protein, 9 aa, Homo Sapiens
LVADLVQEV

SEQ ID NO: 58995 - protein, 9 aa, Homo Sapiens
LVAEIITHL

SEQ ID NO: 58996 - protein, 9 aa, Homo Sapiens
LVANIIQNV

SEQ ID NO: 58997 - protein, 9 aa, Homo Sapiens
LVAQIVTKV

SEQ ID NO: 58998 - protein, 9 aa, Homo Sapiens
LVASVRVPA

SEQ ID NO: 58999 - protein, 9 aa, Homo Sapiens
LVIDVIHEV

SEQ ID NO: 59000 - protein, 9 aa, Homo Sapiens
LVSNVIELL

SEQ ID NO: 59001 - protein, 9 aa, Homo Sapiens
LVSPVVQNI

SEQ ID NO: 59002 - protein, 9 aa, Homo Sapiens
LVSQYFQTV

SEQ ID NO: 59003 - protein, 9 aa, Homo Sapiens
LVSSLFFHV

SEQ ID NO: 59004 - protein, 9 aa, Homo Sapiens
LVVSIIHHV

SEQ ID NO: 59005 - protein, 9 aa, Homo Sapiens
LVYPFPGPI

SEQ ID NO: 59006 - protein, 9 aa, Homo Sapiens
MAAALFVLL

SEQ ID NO: 59007 - protein, 9 aa, Homo Sapiens
MAARIIAKL

SEQ ID NO: 59008 - protein, 9 aa, Homo Sapiens
MIADIHCMI

SEQ ID NO: 59009 - protein, 9 aa, Homo Sapiens
MLAWINESL

SEQ ID NO: 59010 - protein, 9 aa, Homo Sapiens
MLPGILSQL

SEQ ID NO: 59011 - protein, 9 aa, Homo Sapiens
MPADIATLL

SEQ ID NO: 59012 - protein, 9 aa, Homo Sapiens
MPAFIFEHI

SEQ ID NO: 59013 - protein, 9 aa, Homo Sapiens
MSSSVVVRL

SEQ ID NO: 59014 - protein, 9 aa, Homo Sapiens
MSVHLPFAV

SEQ ID NO: 59015 - protein, 9 aa, Homo Sapiens
MSVPLVHQV

SEQ ID NO: 59016 - protein, 9 aa, Homo Sapiens
MSWIPQETL

SEQ ID NO: 59017 - protein, 9 aa, Homo Sapiens
MSYYFLHVV

SEQ ID NO: 59018 - protein, 9 aa, Homo Sapiens
MTAALQAAL

SEQ ID NO: 59019 - protein, 9 aa, Homo Sapiens
MTADLPNEL

SEQ ID NO: 59020 - protein, 9 aa, Homo Sapiens
MTALVNVAL

SEQ ID NO: 59021 - protein, 9 aa, Homo Sapiens
MTMNVIQTV

SEQ ID NO: 59022 - protein, 9 aa, Homo Sapiens
MTPEIIQKL

SEQ ID NO: 59023 - protein, 9 aa, Homo Sapiens
MTQDKVFRL

SEQ ID NO: 59024 - protein, 9 aa, Homo Sapiens
MTSNIVQCL

SEQ ID NO: 59025 - protein, 9 aa, Homo Sapiens
MTSTIGFRV

SEQ ID NO: 59026 - protein, 9 aa, Homo Sapiens
MTTAFIHAL

SEQ ID NO: 59027 - protein, 9 aa, Homo Sapiens
MTTAILERL

SEQ ID NO: 59028 - protein, 9 aa, Homo Sapiens
MTTEILRSM

SEQ ID NO: 59029 - protein, 9 aa, Homo Sapiens
MTTEVLKSL

SEQ ID NO: 59030 - protein, 9 aa, Homo Sapiens
MTTKLISEL

SEQ ID NO: 59031 - protein, 9 aa, Homo Sapiens
MTVAIVKAL

SEQ ID NO: 59032 - protein, 9 aa, Homo Sapiens
MTVQAQPQI

SEQ ID NO: 59033 - protein, 9 aa, Homo Sapiens
MTVQILLKL

SEQ ID NO: 59034 - protein, 9 aa, Homo Sapiens
MVADKFTEL

SEQ ID NO: 59035 - protein, 9 aa, Homo Sapiens
MVAEILHHL

SEQ ID NO: 59036 - protein, 9 aa, Homo Sapiens
MVAHLAINV

SEQ ID NO: 59037 - protein, 9 aa, Homo Sapiens
MVALPMVLV

SEQ ID NO: 59038 - protein, 9 aa, Homo Sapiens
MVAPAVASV

SEQ ID NO: 59039 - protein, 9 aa, Homo Sapiens
MVAPVWYLV

SEQ ID NO: 59040 - protein, 9 aa, Homo Sapiens
MVSSIIEQL

SEQ ID NO: 59041 - protein, 9 aa, Homo Sapiens
MVVDIVQEL

SEQ ID NO: 59042 - protein, 9 aa, Homo Sapiens
MVVGWVKEI

SEQ ID NO: 59043 - protein, 9 aa, Homo Sapiens
NAANIFERL

SEQ ID NO: 59044 - protein, 9 aa, Homo Sapiens
NASPVISSV

SEQ ID NO: 59045 - protein, 9 aa, Homo Sapiens
NIAPIIQKV

SEQ ID NO: 59046 - protein, 9 aa, Homo Sapiens
NIAQVLAEL

SEQ ID NO: 59047 - protein, 9 aa, Homo Sapiens
NIPSFIVRL

SEQ ID NO: 59048 - protein, 9 aa, Homo Sapiens
NISQVIAVV

SEQ ID NO: 59049 - protein, 9 aa, Homo Sapiens
NIVPVIAKA

SEQ ID NO: 59050 - protein, 9 aa, Homo Sapiens
NLQIDPTIQ

SEQ ID NO: 59051 - protein, 9 aa, Homo Sapiens
NNAAIIMKI

SEQ ID NO: 59052 - protein, 9 aa, Homo Sapiens
NSADISITL

SEQ ID NO: 59053 - protein, 9 aa, Homo Sapiens
NSASIFNTL

SEQ ID NO: 59054 - protein, 9 aa, Homo Sapiens
NSSQVVVAV

SEQ ID NO: 59055 - protein, 9 aa, Homo Sapiens
NSVFVATFL

SEQ ID NO: 59056 - protein, 9 aa, Homo Sapiens
NTATIFHEL

SEQ ID NO: 59057 - protein, 9 aa, Homo Sapiens
NTAYIQAIV

SEQ ID NO: 59058 - protein, 9 aa, Homo Sapiens
NTCPYVHNI

SEQ ID NO: 59059 - protein, 9 aa, Homo Sapiens
NTFFVLVRV

SEQ ID NO: 59060 - protein, 9 aa, Homo Sapiens
NTFGAINYV

SEQ ID NO: 59061 - protein, 9 aa, Homo Sapiens
NTIPLFVQL

SEQ ID NO: 59062 - protein, 9 aa, Homo Sapiens
NTQGLIFVV

SEQ ID NO: 59063 - protein, 9 aa, Homo Sapiens
NTSAIVICI

SEQ ID NO: 59064 - protein, 9 aa, Homo Sapiens
NTSHILEAI

SEQ ID NO: 59065 - protein, 9 aa, Homo Sapiens
NTTDIFQTV

SEQ ID NO: 59066 - protein, 9 aa, Homo Sapiens
NTVDFFNQI

SEQ ID NO: 59067 - protein, 9 aa, Homo Sapiens
NVADVVIKF

SEQ ID NO: 59068 - protein, 9 aa, Homo Sapiens
NVAEIVIHI

SEQ ID NO: 59069 - protein, 9 aa, Homo Sapiens
NVAHILQTL

SEQ ID NO: 59070 - protein, 9 aa, Homo Sapiens
NVAKILELV

SEQ ID NO: 59071 - protein, 9 aa, Homo Sapiens
NVALVLERL

SEQ ID NO: 59072 - protein, 9 aa, Homo Sapiens
NVANLPFPL

SEQ ID NO: 59073 - protein, 9 aa, Homo Sapiens
NVAPIINRV

SEQ ID NO: 59074 - protein, 9 aa, Homo Sapiens
NVAPIISKV

SEQ ID NO: 59075 - protein, 9 aa, Homo Sapiens
NVFDEAVRV

SEQ ID NO: 59076 - protein, 9 aa, Homo Sapiens
NVFEGFYGV

SEQ ID NO: 59077 - protein, 9 aa, Homo Sapiens
NVFFKNYEI

SEQ ID NO: 59078 - protein, 9 aa, Homo Sapiens
NVFGHFILI

SEQ ID NO: 59079 - protein, 9 aa, Homo Sapiens
NVFHLVATV

SEQ ID NO: 59080 - protein, 9 aa, Homo Sapiens
NVFPNHISV

SEQ ID NO: 59081 - protein, 9 aa, Homo Sapiens
NVIEWTVGV

SEQ ID NO: 59082 - protein, 9 aa, Homo Sapiens
NVPGEIVES

SEQ ID NO: 59083 - protein, 9 aa, Homo Sapiens
NVSEIIATI

SEQ ID NO: 59084 - protein, 9 aa, Homo Sapiens
NVTSIMFLV

SEQ ID NO: 59085 - protein, 9 aa, Homo Sapiens
NVTWVIVNL

SEQ ID NO: 59086 - protein, 9 aa, Homo Sapiens
NVVDVFHAV

SEQ ID NO: 59087 - protein, 9 aa, Homo Sapiens
NVVGFVMGL

SEQ ID NO: 59088 - protein, 9 aa, Homo Sapiens
PGHLQEGFG

SEQ ID NO: 59089 - protein, 9 aa, Homo Sapiens
PSVEVDVKA

SEQ ID NO: 59090 - protein, 9 aa, Homo Sapiens
QAADVLELL

SEQ ID NO: 59091 - protein, 9 aa, Homo Sapiens
QIADIVTSV

SEQ ID NO: 59092 - protein, 9 aa, Homo Sapiens
QLDDLKVEL

SEQ ID NO: 59093 - protein, 9 aa, Homo Sapiens
QLVDIIEKV

SEQ ID NO: 59094 - protein, 9 aa, Homo Sapiens
QPEFHIEIL

SEQ ID NO: 59095 - protein, 9 aa, Homo Sapiens
QPHQPLPPT

SEQ ID NO: 59096 - protein, 9 aa, Homo Sapiens
QSAEIWEKL

SEQ ID NO: 59097 - protein, 9 aa, Homo Sapiens
QSANIIELL

SEQ ID NO: 59098 - protein, 9 aa, Homo Sapiens
QSIYIPRGV

SEQ ID NO: 59099 - protein, 9 aa, Homo Sapiens
QSVDLVFPV

SEQ ID NO: 59100 - protein, 9 aa, Homo Sapiens
QTAEIFQAL

SEQ ID NO: 59101 - protein, 9 aa, Homo Sapiens
QTEDELQDK

SEQ ID NO: 59102 - protein, 9 aa, Homo Sapiens
QTHGFIIRV

SEQ ID NO: 59103 - protein, 9 aa, Homo Sapiens
QTHSVFVNV

SEQ ID NO: 59104 - protein, 9 aa, Homo Sapiens
QTIALITYL

SEQ ID NO: 59105 - protein, 9 aa, Homo Sapiens
QTISLLAHL

SEQ ID NO: 59106 - protein, 9 aa, Homo Sapiens
QTSDITEYL

SEQ ID NO: 59107 - protein, 9 aa, Homo Sapiens
QTSQLIIQL

SEQ ID NO: 59108 - protein, 9 aa, Homo Sapiens
QTVDIPENV

SEQ ID NO: 59109 - protein, 9 aa, Homo Sapiens
QTVDIRAQL

SEQ ID NO: 59110 - protein, 9 aa, Homo Sapiens
QTVGVIVRL

SEQ ID NO: 59111 - protein, 9 aa, Homo Sapiens
QTVNVLAQI

SEQ ID NO: 59112 - protein, 9 aa, Homo Sapiens
QTYFFPIHL

SEQ ID NO: 59113 - protein, 9 aa, Homo Sapiens
QVAEIVATL

SEQ ID NO: 59114 - protein, 9 aa, Homo Sapiens
QVANVRFNV

SEQ ID NO: 59115 - protein, 9 aa, Homo Sapiens
QVFDYVTGV

SEQ ID NO: 59116 - protein, 9 aa, Homo Sapiens
QVSQICIQV

SEQ ID NO: 59117 - protein, 9 aa, Homo Sapiens
QVTDIVVLV

SEQ ID NO: 59118 - protein, 9 aa, Homo Sapiens
QVTQIRIMV

SEQ ID NO: 59119 - protein, 9 aa, Homo Sapiens
RTTDIVIRI

SEQ ID NO: 59120 - protein, 9 aa, Homo Sapiens
RVADVIAQV

SEQ ID NO: 59121 - protein, 9 aa, Homo Sapiens
SAADIPINI

SEQ ID NO: 59122 - protein, 9 aa, Homo Sapiens
SAADLQFAL

SEQ ID NO: 59123 - protein, 9 aa, Homo Sapiens
SAAFIFSYI

SEQ ID NO: 59124 - protein, 9 aa, Homo Sapiens
SAAFIISYV

SEQ ID NO: 59125 - protein, 9 aa, Homo Sapiens
SAAFVIAYI

SEQ ID NO: 59126 - protein, 9 aa, Homo Sapiens
SAAGVLIKL

SEQ ID NO: 59127 - protein, 9 aa, Homo Sapiens
SAFGQIYKV

SEQ ID NO: 59128 - protein, 9 aa, Homo Sapiens
SASKIIVFV

SEQ ID NO: 59129 - protein, 9 aa, Homo Sapiens
SASPIFTHV

SEQ ID NO: 59130 - protein, 9 aa, Homo Sapiens
SDYPPLGRF

SEQ ID NO: 59131 - protein, 9 aa, Homo Sapiens
SELQVPLFI

SEQ ID NO: 59132 - protein, 9 aa, Homo Sapiens
SFVNDIFER

SEQ ID NO: 59133 - protein, 9 aa, Homo Sapiens
SIAEVVHQL

SEQ ID NO: 59134 - protein, 9 aa, Homo Sapiens
SIAGIFKEV

SEQ ID NO: 59135 - protein, 9 aa, Homo Sapiens
SIAPIVIFA

SEQ ID NO: 59136 - protein, 9 aa, Homo Sapiens
SIIAEVKAQ

SEQ ID NO: 59137 - protein, 9 aa, Homo Sapiens
SIIGRLLEV

SEQ ID NO: 59138 - protein, 9 aa, Homo Sapiens
SISDVIAQV

SEQ ID NO: 59139 - protein, 9 aa, Homo Sapiens
SLAAVVLGL

SEQ ID NO: 59140 - protein, 9 aa, Homo Sapiens
SLAPIIVHV

SEQ ID NO: 59141 - protein, 9 aa, Homo Sapiens
SLMTSLDIL

SEQ ID NO: 59142 - protein, 9 aa, Homo Sapiens
SLPDIKVYL

SEQ ID NO: 59143 - protein, 9 aa, Homo Sapiens
SLPQNIPPL

SEQ ID NO: 59144 - protein, 9 aa, Homo Sapiens
SLSAIFNNV

SEQ ID NO: 59145 - protein, 9 aa, Homo Sapiens
SNSDVIIYV

SEQ ID NO: 59146 - protein, 9 aa, Homo Sapiens
SSHFVPVFV

SEQ ID NO: 59147 - protein, 9 aa, Homo Sapiens
STASILASV

SEQ ID NO: 59148 - protein, 9 aa, Homo Sapiens
STFFQETNI

SEQ ID NO: 59149 - protein, 9 aa, Homo Sapiens
STFGYVHGV

SEQ ID NO: 59150 - protein, 9 aa, Homo Sapiens
STIAILNSV

SEQ ID NO: 59151 - protein, 9 aa, Homo Sapiens
STIALALGV

SEQ ID NO: 59152 - protein, 9 aa, Homo Sapiens
STIFPLDGV

SEQ ID NO: 59153 - protein, 9 aa, Homo Sapiens
STLFLPHYA

SEQ ID NO: 59154 - protein, 9 aa, Homo Sapiens
STPNFVVEV

SEQ ID NO: 59155 - protein, 9 aa, Homo Sapiens
STSDIITRI

SEQ ID NO: 59156 - protein, 9 aa, Homo Sapiens
STSSVFRLV

SEQ ID NO: 59157 - protein, 9 aa, Homo Sapiens
STVEVIFHV

SEQ ID NO: 59158 - protein, 9 aa, Homo Sapiens
STVHFIIFV

SEQ ID NO: 59159 - protein, 9 aa, Homo Sapiens
STVSIQIKL

SEQ ID NO: 59160 - protein, 9 aa, Homo Sapiens
SVAEINVLI

SEQ ID NO: 59161 - protein, 9 aa, Homo Sapiens
SVALVIHNV

SEQ ID NO: 59162 - protein, 9 aa, Homo Sapiens
SVAQVKAMI

SEQ ID NO: 59163 - protein, 9 aa, Homo Sapiens
SVEDIFSEV

SEQ ID NO: 59164 - protein, 9 aa, Homo Sapiens
SVFGFSFKL

SEQ ID NO: 59165 - protein, 9 aa, Homo Sapiens
SVFTFVAEV

SEQ ID NO: 59166 - protein, 9 aa, Homo Sapiens
SVGEIITNI

SEQ ID NO: 59167 - protein, 9 aa, Homo Sapiens
SVIEQIVYV

SEQ ID NO: 59168 - protein, 9 aa, Homo Sapiens
SVITQVFHV

SEQ ID NO: 59169 - protein, 9 aa, Homo Sapiens
SVPQIHVNL

SEQ ID NO: 59170 - protein, 9 aa, Homo Sapiens
SVSSVVHYL

SEQ ID NO: 59171 - protein, 9 aa, Homo Sapiens
SVTDLAFKV

SEQ ID NO: 59172 - protein, 9 aa, Homo Sapiens
SVTDTNVIL

SEQ ID NO: 59173 - protein, 9 aa, Homo Sapiens
SVTFVAEQV

SEQ ID NO: 59174 - protein, 9 aa, Homo Sapiens
SVTQIYHAV

SEQ ID NO: 59175 - protein, 9 aa, Homo Sapiens
SVTSIIFLV

SEQ ID NO: 59176 - protein, 9 aa, Homo Sapiens
SVTSILKTL

SEQ ID NO: 59177 - protein, 9 aa, Homo Sapiens
SVTSTFSKL

SEQ ID NO: 59178 - protein, 9 aa, Homo Sapiens
SVVADTPEL

SEQ ID NO: 59179 - protein, 9 aa, Homo Sapiens
SVVDVFAQL

SEQ ID NO: 59180 - protein, 9 aa, Homo Sapiens
TASKVIVAV

SEQ ID NO: 59181 - protein, 9 aa, Homo Sapiens
TASPVIKAV

SEQ ID NO: 59182 - protein, 9 aa, Homo Sapiens
TATDIRVTL

SEQ ID NO: 59183 - protein, 9 aa, Homo Sapiens
TATEIAINV

SEQ ID NO: 59184 - protein, 9 aa, Homo Sapiens
TIAQVLVHL

SEQ ID NO: 59185 - protein, 9 aa, Homo Sapiens
TISHVIIGL

SEQ ID NO: 59186 - protein, 9 aa, Homo Sapiens
TITDIISAL

SEQ ID NO: 59187 - protein, 9 aa, Homo Sapiens
TLADLVHHV

SEQ ID NO: 59188 - protein, 9 aa, Homo Sapiens
TLADVLYHV

SEQ ID NO: 59189 - protein, 9 aa, Homo Sapiens
TLASIIKEV

SEQ ID NO: 59190 - protein, 9 aa, Homo Sapiens
TLPYIKQEV

SEQ ID NO: 59191 - protein, 9 aa, Homo Sapiens
TLSDIKALI

SEQ ID NO: 59192 - protein, 9 aa, Homo Sapiens
TNADIIETL

SEQ ID NO: 59193 - protein, 9 aa, Homo Sapiens
TQTPVVVPP

SEQ ID NO: 59194 - protein, 9 aa, Homo Sapiens
TRIPKIQKL

SEQ ID NO: 59195 - protein, 9 aa, Homo Sapiens
TSAAIYHVL

SEQ ID NO: 59196 - protein, 9 aa, Homo Sapiens
TSATIVYHL

SEQ ID NO: 59197 - protein, 9 aa, Homo Sapiens
TSSGVVWEV

SEQ ID NO: 59198 - protein, 9 aa, Homo Sapiens
TTAAFIRVV

SEQ ID NO: 59199 - protein, 9 aa, Homo Sapiens
TTAGILATL

SEQ ID NO: 59200 - protein, 9 aa, Homo Sapiens
TTALAIYHV

SEQ ID NO: 59201 - protein, 9 aa, Homo Sapiens
TTARAFAVV

SEQ ID NO: 59202 - protein, 9 aa, Homo Sapiens
TTFDKEFLL

SEQ ID NO: 59203 - protein, 9 aa, Homo Sapiens
TTFPRPVTV

SEQ ID NO: 59204 - protein, 9 aa, Homo Sapiens
TTIDLVAFL

SEQ ID NO: 59205 - protein, 9 aa, Homo Sapiens
TTKFIKSFL

SEQ ID NO: 59206 - protein, 9 aa, Homo Sapiens
TTSPITYTL

SEQ ID NO: 59207 - protein, 9 aa, Homo Sapiens
TTSVIKIAV

SEQ ID NO: 59208 - protein, 9 aa, Homo Sapiens
TTVDINTQV

SEQ ID NO: 59209 - protein, 9 aa, Homo Sapiens
TTVDLSVHV

SEQ ID NO: 59210 - protein, 9 aa, Homo Sapiens
TTVEIFNKL

SEQ ID NO: 59211 - protein, 9 aa, Homo Sapiens
TTYYIHQLL

SEQ ID NO: 59212 - protein, 9 aa, Homo Sapiens
TVAAILLGL

SEQ ID NO: 59213 - protein, 9 aa, Homo Sapiens
TVADFFIKA

SEQ ID NO: 59214 - protein, 9 aa, Homo Sapiens
TVADMLHVV

SEQ ID NO: 59215 - protein, 9 aa, Homo Sapiens
TVAEISQFL

SEQ ID NO: 59216 - protein, 9 aa, Homo Sapiens
TVAELFTRI

SEQ ID NO: 59217 - protein, 9 aa, Homo Sapiens
TVANIPEKI

SEQ ID NO: 59218 - protein, 9 aa, Homo Sapiens
TVAQIKATV

SEQ ID NO: 59219 - protein, 9 aa, Homo Sapiens
TVDMESTEV

SEQ ID NO: 59220 - protein, 9 aa, Homo Sapiens
TVDQIRAIM

SEQ ID NO: 59221 - protein, 9 aa, Homo Sapiens
TVFEGRIYV

SEQ ID NO: 59222 - protein, 9 aa, Homo Sapiens
TVFEHTFHV

SEQ ID NO: 59223 - protein, 9 aa, Homo Sapiens
TVIRPFPGL

SEQ ID NO: 59224 - protein, 9 aa, Homo Sapiens
TVMGKIFAV

SEQ ID NO: 59225 - protein, 9 aa, Homo Sapiens
TVPELTQQV

SEQ ID NO: 59226 - protein, 9 aa, Homo Sapiens
TVSDVLNSV

SEQ ID NO: 59227 - protein, 9 aa, Homo Sapiens
TVSEVIQGL

SEQ ID NO: 59228 - protein, 9 aa, Homo Sapiens
TVTDVVRFI

SEQ ID NO: 59229 - protein, 9 aa, Homo Sapiens
TVTSVLEYL

SEQ ID NO: 59230 - protein, 9 aa, Homo Sapiens
TVTTVILEV

SEQ ID NO: 59231 - protein, 9 aa, Homo Sapiens
TVVDLHFPL

SEQ ID NO: 59232 - protein, 9 aa, Homo Sapiens
TVVEIILQA

SEQ ID NO: 59233 - protein, 9 aa, Homo Sapiens
TVVNFLIRV

SEQ ID NO: 59234 - protein, 9 aa, Homo Sapiens
VDAVKGEIL

SEQ ID NO: 59235 - protein, 9 aa, Homo Sapiens
VDGEIILHL

SEQ ID NO: 59236 - protein, 9 aa, Homo Sapiens
VEELKPTPE

SEQ ID NO: 59237 - protein, 9 aa, Homo Sapiens
VETGVLKPG

SEQ ID NO: 59238 - protein, 9 aa, Homo Sapiens
VGGSTRIPK

SEQ ID NO: 59239 - protein, 9 aa, Homo Sapiens
VMAPRTLVL

SEQ ID NO: 59240 - protein, 9 aa, Homo Sapiens
VNFTVDQIR

SEQ ID NO: 59241 - protein, 9 aa, Homo Sapiens
VPPFLQPEV

SEQ ID NO: 59242 - protein, 9 aa, Homo Sapiens
VPQLEIVPN

SEQ ID NO: 59243 - protein, 9 aa, Homo Sapiens
VPVHFDASV

SEQ ID NO: 59244 - protein, 9 aa, Homo Sapiens
VSSDIIEAV

SEQ ID NO: 59245 - protein, 9 aa, Homo Sapiens
VTTDIQVKV

SEQ ID NO: 59246 - protein, 9 aa, Homo Sapiens
VTVPVEILS

SEQ ID NO: 59247 - protein, 9 aa, Homo Sapiens
VVPPFLQPE

SEQ ID NO: 59248 - protein, 9 aa, Homo Sapiens
VVPTSQVVT

SEQ ID NO: 59249 - protein, 9 aa, Homo Sapiens
VVTFAPVNV

SEQ ID NO: 59250 - protein, 9 aa, Homo Sapiens
WTSAITVAI

SEQ ID NO: 59251 - protein, 9 aa, Homo Sapiens
WVTEIFSQI

SEQ ID NO: 59252 - protein, 9 aa, Homo Sapiens
YAAELIERV

SEQ ID NO: 59253 - protein, 9 aa, Homo Sapiens
YAARIWDGV

SEQ ID NO: 59254 - protein, 9 aa, Homo Sapiens
YAFNMKATV

SEQ ID NO: 59255 - protein, 9 aa, Homo Sapiens
YAFPKAVSV

SEQ ID NO: 59256 - protein, 9 aa, Homo Sapiens
YASGINVNL

SEQ ID NO: 59257 - protein, 9 aa, Homo Sapiens
YLADIFTKL

SEQ ID NO: 59258 - protein, 9 aa, Homo Sapiens
YLADLYHFV

SEQ ID NO: 59259 - protein, 9 aa, Homo Sapiens
YPASIVHQV

SEQ ID NO: 59260 - protein, 9 aa, Homo Sapiens
YPFPGPIPN

SEQ ID NO: 59261 - protein, 9 aa, Homo Sapiens
YPVEIHEYL

SEQ ID NO: 59262 - protein, 9 aa, Homo Sapiens
YQEPVLGPV

SEQ ID NO: 59263 - protein, 9 aa, Homo Sapiens
YSAPVIHVL

SEQ ID NO: 59264 - protein, 9 aa, Homo Sapiens
YSFHKFHYL

SEQ ID NO: 59265 - protein, 9 aa, Homo Sapiens
YSFTTTAER

SEQ ID NO: 59266 - protein, 9 aa, Homo Sapiens
YSFYLPIAA

SEQ ID NO: 59267 - protein, 9 aa, Homo Sapiens
YSIDLSERV

SEQ ID NO: 59268 - protein, 9 aa, Homo Sapiens
YSKEGWEYV

SEQ ID NO: 59269 - protein, 9 aa, Homo Sapiens
YTAEIKQNL

SEQ ID NO: 59270 - protein, 9 aa, Homo Sapiens
YTFDMVFGA

SEQ ID NO: 59271 - protein, 9 aa, Homo Sapiens
YTFFTPNNI

SEQ ID NO: 59272 - protein, 9 aa, Homo Sapiens
YTFSEPFHL

SEQ ID NO: 59273 - protein, 9 aa, Homo Sapiens
YTGIVNIGV

SEQ ID NO: 59274 - protein, 9 aa, Homo Sapiens
YTIPPGHQV

SEQ ID NO: 59275 - protein, 9 aa, Homo Sapiens
YTLFMIDGY

SEQ ID NO: 59276 - protein, 9 aa, Homo Sapiens
YTLVTYVPV

SEQ ID NO: 59277 - protein, 9 aa, Homo Sapiens
YTSDLHFQV

SEQ ID NO: 59278 - protein, 9 aa, Homo Sapiens
YTSEVQAIL

SEQ ID NO: 59279 - protein, 9 aa, Homo Sapiens
YTSHLHVSL

SEQ ID NO: 59280 - protein, 9 aa, Homo Sapiens
YTSHLRSLV

SEQ ID NO: 59281 - protein, 9 aa, Homo Sapiens
YTSNIPIIL

SEQ ID NO: 59282 - protein, 9 aa, Homo Sapiens
YTSRIVVRL

SEQ ID NO: 59283 - protein, 9 aa, Homo Sapiens
YTTDFIYQL

SEQ ID NO: 59284 - protein, 9 aa, Homo Sapiens
YTTNVLQLL

SEQ ID NO: 59285 - protein, 9 aa, Homo Sapiens
YTVQFTTMV

SEQ ID NO: 59286 - protein, 9 aa, Homo Sapiens
YTYYYPHYL

SEQ ID NO: 59287 - protein, 9 aa, Homo Sapiens
YVNDIVIGI

SEQ ID NO: 59288 - protein, 9 aa, Homo Sapiens
YVNLPTIAL

SEQ ID NO: 59289 - protein, 9 aa, Homo Sapiens
YVPPPFAAA

SEQ ID NO: 59290 - protein, 9 aa, Homo Sapiens
YVSDILNYI

SEQ ID NO: 59291 - protein, 9 aa, Homo Sapiens
YVSEILEKV

SEQ ID NO: 59292 - protein, 9 aa, Homo Sapiens
YVSSIVVSL

SEQ ID NO: 59293 - protein, 9 aa, Homo Sapiens
YVTDVLYRV

SEQ ID NO: 59294 - protein, 9 aa, Homo Sapiens
YVTSILQSL

SEQ ID NO: 59295 - protein, 9 aa, Homo Sapiens
YVTSVILHI

SEQ ID NO: 59296 - protein, 9 aa, Homo Sapiens
YVVPFVAKV

SEQ ID NO: 59297 - protein, 9 aa, Homo Sapiens
YVVSVIEQI

SEQ ID NO: 59298 - protein, 10 aa, Homo Sapiens
AALRPLVKPK

SEQ ID NO: 59299 - protein, 10 aa, Homo Sapiens
ALFPHLLQPV

SEQ ID NO: 59300 - protein, 10 aa, Homo Sapiens
APGNLSLPIP

SEQ ID NO: 59301 - protein, 10 aa, Homo Sapiens
APVNVTTEVK

SEQ ID NO: 59302 - protein, 10 aa, Homo Sapiens
ASLDKFLANV

SEQ ID NO: 59303 - protein, 10 aa, Homo Sapiens
ATVYVDVLKD

SEQ ID NO: 59304 - protein, 10 aa, Homo Sapiens
DAVGQISVHV

SEQ ID NO: 59305 - protein, 10 aa, Homo Sapiens
DESGPSIVHR

SEQ ID NO: 59306 - protein, 10 aa, Homo Sapiens
DIGSESTEDQ

SEQ ID NO: 59307 - protein, 10 aa, Homo Sapiens
DIISQVDAKV

SEQ ID NO: 59308 - protein, 10 aa, Homo Sapiens
DIVNFVHTNL

SEQ ID NO: 59309 - protein, 10 aa, Homo Sapiens
DKTLEQQENF

SEQ ID NO: 59310 - protein, 10 aa, Homo Sapiens
DKVIPLAIPQ

SEQ ID NO: 59311 - protein, 10 aa, Homo Sapiens
DLRGENPTLF

SEQ ID NO: 59312 - protein, 10 aa, Homo Sapiens
DLSAPQIGVV

SEQ ID NO: 59313 - protein, 10 aa, Homo Sapiens
DSSHVSLVQL

SEQ ID NO: 59314 - protein, 10 aa, Homo Sapiens
DTANDGFVRL

SEQ ID NO: 59315 - protein, 10 aa, Homo Sapiens
DTAQIFRVNL

SEQ ID NO: 59316 - protein, 10 aa, Homo Sapiens
DTATAHSWFV

SEQ ID NO: 59317 - protein, 10 aa, Homo Sapiens
DTAWISSILL

SEQ ID NO: 59318 - protein, 10 aa, Homo Sapiens
DTIAGLSVHV

SEQ ID NO: 59319 - protein, 10 aa, Homo Sapiens
DTIPVVHASI

SEQ ID NO: 59320 - protein, 10 aa, Homo Sapiens
DTITPQQVFV

SEQ ID NO: 59321 - protein, 10 aa, Homo Sapiens
DTSNIITVRV

SEQ ID NO: 59322 - protein, 10 aa, Homo Sapiens
DTYGFPVDLT

SEQ ID NO: 59323 - protein, 10 aa, Homo Sapiens
DVAAVVVPIL

SEQ ID NO: 59324 - protein, 10 aa, Homo Sapiens
DVAPISDIIA

SEQ ID NO: 59325 - protein, 10 aa, Homo Sapiens
DVAQIFNNIL

SEQ ID NO: 59326 - protein, 10 aa, Homo Sapiens
DVATITKTVV

SEQ ID NO: 59327 - protein, 10 aa, Homo Sapiens
DVQIGDIVTV

SEQ ID NO: 59328 - protein, 10 aa, Homo Sapiens
DVTDFISHLF

SEQ ID NO: 59329 - protein, 10 aa, Homo Sapiens
DVVGITYDHV

SEQ ID NO: 59330 - protein, 10 aa, Homo Sapiens
EAAFFEGHFL

SEQ ID NO: 59331 - protein, 10 aa, Homo Sapiens
EAFHVFKVFV

SEQ ID NO: 59332 - protein, 10 aa, Homo Sapiens
EAFQGTKVFV

SEQ ID NO: 59333 - protein, 10 aa, Homo Sapiens
EAFVWEPAMV

SEQ ID NO: 59334 - protein, 10 aa, Homo Sapiens
EAIGVIFTHV

SEQ ID NO: 59335 - protein, 10 aa, Homo Sapiens
EASDVVLEVL

SEQ ID NO: 59336 - protein, 10 aa, Homo Sapiens
EASHLVTDRI

SEQ ID NO: 59337 - protein, 10 aa, Homo Sapiens
EASYVNLPTI

SEQ ID NO: 59338 - protein, 10 aa, Homo Sapiens
EATPIVRVAV

SEQ ID NO: 59339 - protein, 10 aa, Homo Sapiens
EAVSVVGFGV

SEQ ID NO: 59340 - protein, 10 aa, Homo Sapiens
EELVRMVLNG

SEQ ID NO: 59341 - protein, 10 aa, Homo Sapiens
EEQLQQIRAE

SEQ ID NO: 59342 - protein, 10 aa, Homo Sapiens
EIAHIALETL

SEQ ID NO: 59343 - protein, 10 aa, Homo Sapiens
EIASFPIYKV

SEQ ID NO: 59344 - protein, 10 aa, Homo Sapiens
EIFDGNVAHI

SEQ ID NO: 59345 - protein, 10 aa, Homo Sapiens
EIFNGTKMFV

SEQ ID NO: 59346 - protein, 10 aa, Homo Sapiens
EIFNLKFAQA

SEQ ID NO: 59347 - protein, 10 aa, Homo Sapiens
EIFQKPFQTL

SEQ ID NO: 59348 - protein, 10 aa, Homo Sapiens
EIFSRGPYSV

SEQ ID NO: 59349 - protein, 10 aa, Homo Sapiens
EIFTEQVVTA

SEQ ID NO: 59350 - protein, 10 aa, Homo Sapiens
EIIEDLEAQV

SEQ ID NO: 59351 - protein, 10 aa, Homo Sapiens
EIPEFLFGEV

SEQ ID NO: 59352 - protein, 10 aa, Homo Sapiens
EISSLVKYFI

SEQ ID NO: 59353 - protein, 10 aa, Homo Sapiens
EIVNISSGYV

SEQ ID NO: 59354 - protein, 10 aa, Homo Sapiens
EIYNGKLFDL

SEQ ID NO: 59355 - protein, 10 aa, Homo Sapiens
EIYQKAFDLI

SEQ ID NO: 59356 - protein, 10 aa, Homo Sapiens
EIYQKPFQTL

SEQ ID NO: 59357 - protein, 10 aa, Homo Sapiens
ELERPGGNEI

SEQ ID NO: 59358 - protein, 10 aa, Homo Sapiens
ELFPAPILRA

SEQ ID NO: 59359 - protein, 10 aa, Homo Sapiens
ELFPENVYSV

SEQ ID NO: 59360 - protein, 10 aa, Homo Sapiens
ELFPIQMEGV

SEQ ID NO: 59361 - protein, 10 aa, Homo Sapiens
ELPDFGGNVL

SEQ ID NO: 59362 - protein, 10 aa, Homo Sapiens
ELPDGQVITI

SEQ ID NO: 59363 - protein, 10 aa, Homo Sapiens
ELSAVARVEL

SEQ ID NO: 59364 - protein, 10 aa, Homo Sapiens
ELYDLRQHFV

SEQ ID NO: 59365 - protein, 10 aa, Homo Sapiens
ENTDVFKFSI

SEQ ID NO: 59366 - protein, 10 aa, Homo Sapiens
ERPGGNEITR

SEQ ID NO: 59367 - protein, 10 aa, Homo Sapiens
ESFGNEIYTV

SEQ ID NO: 59368 - protein, 10 aa, Homo Sapiens
ESFNVPGLYI

SEQ ID NO: 59369 - protein, 10 aa, Homo Sapiens
ESFSDYPPLG

SEQ ID NO: 59370 - protein, 10 aa, Homo Sapiens
ESIFFNSHNV

SEQ ID NO: 59371 - protein, 10 aa, Homo Sapiens
ESSGILNVLI

SEQ ID NO: 59372 - protein, 10 aa, Homo Sapiens
ESSPFVERLL

SEQ ID NO: 59373 - protein, 10 aa, Homo Sapiens
ETAGVVSTNL

SEQ ID NO: 59374 - protein, 10 aa, Homo Sapiens
ETATLSDIKA

SEQ ID NO: 59375 - protein, 10 aa, Homo Sapiens
ETFFLPLVEL

SEQ ID NO: 59376 - protein, 10 aa, Homo Sapiens
ETFGQYPLQV

SEQ ID NO: 59377 - protein, 10 aa, Homo Sapiens
ETFGVTTTKV

SEQ ID NO: 59378 - protein, 10 aa, Homo Sapiens
ETFKNSFVEA

SEQ ID NO: 59379 - protein, 10 aa, Homo Sapiens
ETFLHIYQYV

SEQ ID NO: 59380 - protein, 10 aa, Homo Sapiens
ETFNTPAMYV

SEQ ID NO: 59381 - protein, 10 aa, Homo Sapiens
ETFNVPALFI

SEQ ID NO: 59382 - protein, 10 aa, Homo Sapiens
ETFNVPAMYV

SEQ ID NO: 59383 - protein, 10 aa, Homo Sapiens
ETFPANIQVV

SEQ ID NO: 59384 - protein, 10 aa, Homo Sapiens
ETFPGVTALF

SEQ ID NO: 59385 - protein, 10 aa, Homo Sapiens
ETFPIPKAFV

SEQ ID NO: 59386 - protein, 10 aa, Homo Sapiens
ETFQRPYQYL

SEQ ID NO: 59387 - protein, 10 aa, Homo Sapiens
ETFQVTGQQI

SEQ ID NO: 59388 - protein, 10 aa, Homo Sapiens
ETIGLQHIKV

SEQ ID NO: 59389 - protein, 10 aa, Homo Sapiens
ETIGVVHLVL

SEQ ID NO: 59390 - protein, 10 aa, Homo Sapiens
ETILISNNQV

SEQ ID NO: 59391 - protein, 10 aa, Homo Sapiens
ETINLTHTAL

SEQ ID NO: 59392 - protein, 10 aa, Homo Sapiens
ETIPGPDAKV

SEQ ID NO: 59393 - protein, 10 aa, Homo Sapiens
ETIPLTAEKL

SEQ ID NO: 59394 - protein, 10 aa, Homo Sapiens
ETIQALETLV

SEQ ID NO: 59395 - protein, 10 aa, Homo Sapiens
ETITRVLYEV

SEQ ID NO: 59396 - protein, 10 aa, Homo Sapiens
ETIYIVGGCL

SEQ ID NO: 59397 - protein, 10 aa, Homo Sapiens
ETLFPSKIGV

SEQ ID NO: 59398 - protein, 10 aa, Homo Sapiens
ETSELWQIKL

SEQ ID NO: 59399 - protein, 10 aa, Homo Sapiens
ETSGFVDKLF

SEQ ID NO: 59400 - protein, 10 aa, Homo Sapiens
ETSGIGEARV

SEQ ID NO: 59401 - protein, 10 aa, Homo Sapiens
ETSGISIYRL

SEQ ID NO: 59402 - protein, 10 aa, Homo Sapiens
ETSKLIYDFI

SEQ ID NO: 59403 - protein, 10 aa, Homo Sapiens
ETSPITDTDL

SEQ ID NO: 59404 - protein, 10 aa, Homo Sapiens
ETSPLTAEKL

SEQ ID NO: 59405 - protein, 10 aa, Homo Sapiens
ETSQAGLFRL

SEQ ID NO: 59406 - protein, 10 aa, Homo Sapiens
ETSSLSHTLF

SEQ ID NO: 59407 - protein, 10 aa, Homo Sapiens
ETTPLTIEKL

SEQ ID NO: 59408 - protein, 10 aa, Homo Sapiens
ETTSISKITV

SEQ ID NO: 59409 - protein, 10 aa, Homo Sapiens
ETVAQIKAHV

SEQ ID NO: 59410 - protein, 10 aa, Homo Sapiens
ETVEDIAARL

SEQ ID NO: 59411 - protein, 10 aa, Homo Sapiens
ETVGDLRDFV

SEQ ID NO: 59412 - protein, 10 aa, Homo Sapiens
ETVSGLKGYV

SEQ ID NO: 59413 - protein, 10 aa, Homo Sapiens
ETYHGVFVNI

SEQ ID NO: 59414 - protein, 10 aa, Homo Sapiens
ETYQFSGVYV

SEQ ID NO: 59415 - protein, 10 aa, Homo Sapiens
EVAKQALNRL

SEQ ID NO: 59416 - protein, 10 aa, Homo Sapiens
EVAPPTPLTP

SEQ ID NO: 59417 - protein, 10 aa, Homo Sapiens
EVAPSFGTLL

SEQ ID NO: 59418 - protein, 10 aa, Homo Sapiens
EVAPVAQVAL

SEQ ID NO: 59419 - protein, 10 aa, Homo Sapiens
EVFASLFHKV

SEQ ID NO: 59420 - protein, 10 aa, Homo Sapiens
EVFDKDLSKL

SEQ ID NO: 59421 - protein, 10 aa, Homo Sapiens
EVFDKTYQFL

SEQ ID NO: 59422 - protein, 10 aa, Homo Sapiens
EVFEATDIKI

SEQ ID NO: 59423 - protein, 10 aa, Homo Sapiens
EVFEFRPELV

SEQ ID NO: 59424 - protein, 10 aa, Homo Sapiens
EVFNMKTMRV

SEQ ID NO: 59425 - protein, 10 aa, Homo Sapiens
EVFPDQFIHL

SEQ ID NO: 59426 - protein, 10 aa, Homo Sapiens
EVFPLAMNYL

SEQ ID NO: 59427 - protein, 10 aa, Homo Sapiens
EVFPLGGVGA

SEQ ID NO: 59428 - protein, 10 aa, Homo Sapiens
EVFPPPVAML

SEQ ID NO: 59429 - protein, 10 aa, Homo Sapiens
EVFPVSKTLV

SEQ ID NO: 59430 - protein, 10 aa, Homo Sapiens
EVFQDLFTEL

SEQ ID NO: 59431 - protein, 10 aa, Homo Sapiens
EVFRIGNVEI

SEQ ID NO: 59432 - protein, 10 aa, Homo Sapiens
EVFYPGETVV

SEQ ID NO: 59433 - protein, 10 aa, Homo Sapiens
EVGPPLPPLL

SEQ ID NO: 59434 - protein, 10 aa, Homo Sapiens
EVIGKGPFSV

SEQ ID NO: 59435 - protein, 10 aa, Homo Sapiens
EVIKPGDLGV

SEQ ID NO: 59436 - protein, 10 aa, Homo Sapiens
EVIPNSNFYV

SEQ ID NO: 59437 - protein, 10 aa, Homo Sapiens
EVIRGWEEGV

SEQ ID NO: 59438 - protein, 10 aa, Homo Sapiens
EVISFVPPPL

SEQ ID NO: 59439 - protein, 10 aa, Homo Sapiens
EVISTPGVVA

SEQ ID NO: 59440 - protein, 10 aa, Homo Sapiens
EVLQTHSVFV

SEQ ID NO: 59441 - protein, 10 aa, Homo Sapiens
EVPHFHHELV

SEQ ID NO: 59442 - protein, 10 aa, Homo Sapiens
EVSNIVKEAI

SEQ ID NO: 59443 - protein, 10 aa, Homo Sapiens
EVSPVALQRL

SEQ ID NO: 59444 - protein, 10 aa, Homo Sapiens
EVSPVSFHQV

SEQ ID NO: 59445 - protein, 10 aa, Homo Sapiens
EVSRIINYNV

SEQ ID NO: 59446 - protein, 10 aa, Homo Sapiens
EVSSVVCFLL

SEQ ID NO: 59447 - protein, 10 aa, Homo Sapiens
EVSWISSIML

SEQ ID NO: 59448 - protein, 10 aa, Homo Sapiens
EVTDFAGQYV

SEQ ID NO: 59449 - protein, 10 aa, Homo Sapiens
EVTPVTGASL

SEQ ID NO: 59450 - protein, 10 aa, Homo Sapiens
EVVAGRFIEV

SEQ ID NO: 59451 - protein, 10 aa, Homo Sapiens
EVVDFIQSKI

SEQ ID NO: 59452 - protein, 10 aa, Homo Sapiens
EVVDIIRVNV

SEQ ID NO: 59453 - protein, 10 aa, Homo Sapiens
EVVDIMRVNV

SEQ ID NO: 59454 - protein, 10 aa, Homo Sapiens
EVVGLIFRLT

SEQ ID NO: 59455 - protein, 10 aa, Homo Sapiens
EVVSGVVSKV

SEQ ID NO: 59456 - protein, 10 aa, Homo Sapiens
EVVVGDLVEV

SEQ ID NO: 59457 - protein, 10 aa, Homo Sapiens
EVYAGNFVEV

SEQ ID NO: 59458 - protein, 10 aa, Homo Sapiens
EVYEGEVTEL

SEQ ID NO: 59459 - protein, 10 aa, Homo Sapiens
EVYEHVYETV

SEQ ID NO: 59460 - protein, 10 aa, Homo Sapiens
EVYGGENVEL

SEQ ID NO: 59461 - protein, 10 aa, Homo Sapiens
EVYGSLPAFL

SEQ ID NO: 59462 - protein, 10 aa, Homo Sapiens
EVYPFGIVGM

SEQ ID NO: 59463 - protein, 10 aa, Homo Sapiens
EVYTPKEIFV

SEQ ID NO: 59464 - protein, 10 aa, Homo Sapiens
EYHAKATEHL

SEQ ID NO: 59465 - protein, 10 aa, Homo Sapiens
FAARPQVVAV

SEQ ID NO: 59466 - protein, 10 aa, Homo Sapiens
FEGSALGKQL

SEQ ID NO: 59467 - protein, 10 aa, Homo Sapiens
FITTVKTAWL

SEQ ID NO: 59468 - protein, 10 aa, Homo Sapiens
FLATEGDHLQ

SEQ ID NO: 59469 - protein, 10 aa, Homo Sapiens
FLFDGSPTYV

SEQ ID NO: 59470 - protein, 10 aa, Homo Sapiens
FLSALEEYTK

SEQ ID NO: 59471 - protein, 10 aa, Homo Sapiens
FSFGGKLVTF

SEQ ID NO: 59472 - protein, 10 aa, Homo Sapiens
FSWEGAFQHV

SEQ ID NO: 59473 - protein, 10 aa, Homo Sapiens
FTAGIVEAVL

SEQ ID NO: 59474 - protein, 10 aa, Homo Sapiens
FTFYHQGHEL

SEQ ID NO: 59475 - protein, 10 aa, Homo Sapiens
FTITPGSEQI

SEQ ID NO: 59476 - protein, 10 aa, Homo Sapiens
FTITPPTAQV

SEQ ID NO: 59477 - protein, 10 aa, Homo Sapiens
FTNQGTVIHF

SEQ ID NO: 59478 - protein, 10 aa, Homo Sapiens
FTSDRGFQFV

SEQ ID NO: 59479 - protein, 10 aa, Homo Sapiens
FTVDQIRAIM

SEQ ID NO: 59480 - protein, 10 aa, Homo Sapiens
FVNDIFERIA

SEQ ID NO: 59481 - protein, 10 aa, Homo Sapiens
FVSPVAKAVI

SEQ ID NO: 59482 - protein, 10 aa, Homo Sapiens
FVSSLNKIAM

SEQ ID NO: 59483 - protein, 10 aa, Homo Sapiens
FVYGGPQVQL

SEQ ID NO: 59484 - protein, 10 aa, Homo Sapiens
FVYPLDFART

SEQ ID NO: 59485 - protein, 10 aa, Homo Sapiens
GEFVSETESR

SEQ ID NO: 59486 - protein, 10 aa, Homo Sapiens
GEYGAEALER

SEQ ID NO: 59487 - protein, 10 aa, Homo Sapiens
GGIGTVPVGR

SEQ ID NO: 59488 - protein, 10 aa, Homo Sapiens
GVAALYKFRV

SEQ ID NO: 59489 - protein, 10 aa, Homo Sapiens
HAARIINDLL

SEQ ID NO: 59490 - protein, 10 aa, Homo Sapiens
HAVVTVPAYF

SEQ ID NO: 59491 - protein, 10 aa, Homo Sapiens
HLGYLPNQLF

SEQ ID NO: 59492 - protein, 10 aa, Homo Sapiens
HQPHQPLPPT

SEQ ID NO: 59493 - protein, 10 aa, Homo Sapiens
HRHPDEAAFF

SEQ ID NO: 59494 - protein, 10 aa, Homo Sapiens
HSAPPFPAAV

SEQ ID NO: 59495 - protein, 10 aa, Homo Sapiens
HSASIPGILA

SEQ ID NO: 59496 - protein, 10 aa, Homo Sapiens
HSMSGPLIGV

SEQ ID NO: 59497 - protein, 10 aa, Homo Sapiens
HTAEILDFAL

SEQ ID NO: 59498 - protein, 10 aa, Homo Sapiens
HTALITDIGL

SEQ ID NO: 59499 - protein, 10 aa, Homo Sapiens
HTAWIEHVHV

SEQ ID NO: 59500 - protein, 10 aa, Homo Sapiens
HTSPLTQIRL

SEQ ID NO: 59501 - protein, 10 aa, Homo Sapiens
HTYDRFFLGV

SEQ ID NO: 59502 - protein, 10 aa, Homo Sapiens
HVADPVEAVL

SEQ ID NO: 59503 - protein, 10 aa, Homo Sapiens
HVFDHPWETV

SEQ ID NO: 59504 - protein, 10 aa, Homo Sapiens
HVFTGEKVAV

SEQ ID NO: 59505 - protein, 10 aa, Homo Sapiens
HVYFGDPVSL

SEQ ID NO: 59506 - protein, 10 aa, Homo Sapiens
IADLQPNTEY

SEQ ID NO: 59507 - protein, 10 aa, Homo Sapiens
IEIEVAGLLP

SEQ ID NO: 59508 - protein, 10 aa, Homo Sapiens
ISDTNVILSM

SEQ ID NO: 59509 - protein, 10 aa, Homo Sapiens
IVAEVVSARI

SEQ ID NO: 59510 - protein, 10 aa, Homo Sapiens
IVFNGKLYSV

SEQ ID NO: 59511 - protein, 10 aa, Homo Sapiens
IWHHTFYNEL

SEQ ID NO: 59512 - protein, 10 aa, Homo Sapiens
KSTEILLRKL

SEQ ID NO: 59513 - protein, 10 aa, Homo Sapiens
KVPQLEIVPN

SEQ ID NO: 59514 - protein, 10 aa, Homo Sapiens
LAAESARVTL

SEQ ID NO: 59515 - protein, 10 aa, Homo Sapiens
LLFEGEKITI

SEQ ID NO: 59516 - protein, 10 aa, Homo Sapiens
LPIPDPGVSV

SEQ ID NO: 59517 - protein, 10 aa, Homo Sapiens
LRASGAGKAI

SEQ ID NO: 59518 - protein, 10 aa, Homo Sapiens
LSPDAILDAI

SEQ ID NO: 59519 - protein, 10 aa, Homo Sapiens
LVAASQAALG

SEQ ID NO: 59520 - protein, 10 aa, Homo Sapiens
LVHNVKELEV

SEQ ID NO: 59521 - protein, 10 aa, Homo Sapiens
LVSPITGEKI

SEQ ID NO: 59522 - protein, 10 aa, Homo Sapiens
LVYDGKIYTL

SEQ ID NO: 59523 - protein, 10 aa, Homo Sapiens
LVYQHSIIPL

SEQ ID NO: 59524 - protein, 10 aa, Homo Sapiens
MIFDHEFTKL

SEQ ID NO: 59525 - protein, 10 aa, Homo Sapiens
MIPSIRNGIL

SEQ ID NO: 59526 - protein, 10 aa, Homo Sapiens
MSASIGVVGV

SEQ ID NO: 59527 - protein, 10 aa, Homo Sapiens
MSIYPSPTGV

SEQ ID NO: 59528 - protein, 10 aa, Homo Sapiens
MTAAIKDLQV

SEQ ID NO: 59529 - protein, 10 aa, Homo Sapiens
MTFDPQDILL

SEQ ID NO: 59530 - protein, 10 aa, Homo Sapiens
MVDVLVFASS

SEQ ID NO: 59531 - protein, 10 aa, Homo Sapiens
MVLPFEPVPV

SEQ ID NO: 59532 - protein, 10 aa, Homo Sapiens
MVMEIRNAYV

SEQ ID NO: 59533 - protein, 10 aa, Homo Sapiens
MVSDLSQVTV

SEQ ID NO: 59534 - protein, 10 aa, Homo Sapiens
MVVSDFHVFV

SEQ ID NO: 59535 - protein, 10 aa, Homo Sapiens
NIPPLTQTPV

SEQ ID NO: 59536 - protein, 10 aa, Homo Sapiens
NLEKETEGLR

SEQ ID NO: 59537 - protein, 10 aa, Homo Sapiens
NLPINGNGKQ

SEQ ID NO: 59538 - protein, 10 aa, Homo Sapiens
NTAPLTDYFL

SEQ ID NO: 59539 - protein, 10 aa, Homo Sapiens
NTSDIILVGL

SEQ ID NO: 59540 - protein, 10 aa, Homo Sapiens
NTSELAKDFI

SEQ ID NO: 59541 - protein, 10 aa, Homo Sapiens
NTVFVDRALI

SEQ ID NO: 59542 - protein, 10 aa, Homo Sapiens
NVIGEPFLNV

SEQ ID NO: 59543 - protein, 10 aa, Homo Sapiens
NVIHNLATYV

SEQ ID NO: 59544 - protein, 10 aa, Homo Sapiens
NVPEGLLATV

SEQ ID NO: 59545 - protein, 10 aa, Homo Sapiens
NVPGEIVESL

SEQ ID NO: 59546 - protein, 10 aa, Homo Sapiens
PFPLQVVSVG

SEQ ID NO: 59547 - protein, 10 aa, Homo Sapiens
PPGQVAASPD

SEQ ID NO: 59548 - protein, 10 aa, Homo Sapiens
PVDGVVLVDP

SEQ ID NO: 59549 - protein, 10 aa, Homo Sapiens
QGLLPVLESF

SEQ ID NO: 59550 - protein, 10 aa, Homo Sapiens
QGRTLYGFGG

SEQ ID NO: 59551 - protein, 10 aa, Homo Sapiens
QTISITKAGV

SEQ ID NO: 59552 - protein, 10 aa, Homo Sapiens
QTQISETNVI

SEQ ID NO: 59553 - protein, 10 aa, Homo Sapiens
QVANSAFVER

SEQ ID NO: 59554 - protein, 10 aa, Homo Sapiens
QVFPGLLERV

SEQ ID NO: 59555 - protein, 10 aa, Homo Sapiens
QVIKPPLIFV

SEQ ID NO: 59556 - protein, 10 aa, Homo Sapiens
QVTGVTRVTI

SEQ ID NO: 59557 - protein, 10 aa, Homo Sapiens
REYHTEKLVT

SEQ ID NO: 59558 - protein, 10 aa, Homo Sapiens
RVAPEEHPVL

SEQ ID NO: 59559 - protein, 10 aa, Homo Sapiens
SAADVVLYGV

SEQ ID NO: 59560 - protein, 10 aa, Homo Sapiens
SALEEYTKKL

SEQ ID NO: 59561 - protein, 10 aa, Homo Sapiens
SEDIPLNLSR

SEQ ID NO: 59562 - protein, 10 aa, Homo Sapiens
SFGGSYGGSF

SEQ ID NO: 59563 - protein, 10 aa, Homo Sapiens
SIHSFELDLL

SEQ ID NO: 59564 - protein, 10 aa, Homo Sapiens
SIYGGFLLGV

SEQ ID NO: 59565 - protein, 10 aa, Homo Sapiens
SLENVPNVGV

SEQ ID NO: 59566 - protein, 10 aa, Homo Sapiens
SLPQNIPPLT

SEQ ID NO: 59567 - protein, 10 aa, Homo Sapiens
SLVNLGGSKS

SEQ ID NO: 59568 - protein, 10 aa, Homo Sapiens
SLYQSKYEEL

SEQ ID NO: 59569 - protein, 10 aa, Homo Sapiens
STSAVIGVRV

SEQ ID NO: 59570 - protein, 10 aa, Homo Sapiens
STSDLYNFQV

SEQ ID NO: 59571 - protein, 10 aa, Homo Sapiens
SVFGGKNIHV

SEQ ID NO: 59572 - protein, 10 aa, Homo Sapiens
SVIDIINGEA

SEQ ID NO: 59573 - protein, 10 aa, Homo Sapiens
SVIDPPAVNL

SEQ ID NO: 59574 - protein, 10 aa, Homo Sapiens
SVSDISQYRV

SEQ ID NO: 59575 - protein, 10 aa, Homo Sapiens
SVSPVVRVAV

SEQ ID NO: 59576 - protein, 10 aa, Homo Sapiens
SVYAHFPINV

SEQ ID NO: 59577 - protein, 10 aa, Homo Sapiens
SVYEGGVFFL

SEQ ID NO: 59578 - protein, 10 aa, Homo Sapiens
SYFEKSKEQL

SEQ ID NO: 59579 - protein, 10 aa, Homo Sapiens
SYVGDEAQSK

SEQ ID NO: 59580 - protein, 10 aa, Homo Sapiens
TAVLKFAAEE

SEQ ID NO: 59581 - protein, 10 aa, Homo Sapiens
TFPGFFSPML

SEQ ID NO: 59582 - protein, 10 aa, Homo Sapiens
THLAPYSDEL

SEQ ID NO: 59583 - protein, 10 aa, Homo Sapiens
TIFTGHTAVV

SEQ ID NO: 59584 - protein, 10 aa, Homo Sapiens
TIPDFIFANV

SEQ ID NO: 59585 - protein, 10 aa, Homo Sapiens
TLPHFISPYL

SEQ ID NO: 59586 - protein, 10 aa, Homo Sapiens
TLSEKAKPAL

SEQ ID NO: 59587 - protein, 10 aa, Homo Sapiens
TLTDKSGPEL

SEQ ID NO: 59588 - protein, 10 aa, Homo Sapiens
TPGNRIVYLY

SEQ ID NO: 59589 - protein, 10 aa, Homo Sapiens
TQTPVVVPPF

SEQ ID NO: 59590 - protein, 10 aa, Homo Sapiens
TTAELAVSLL

SEQ ID NO: 59591 - protein, 10 aa, Homo Sapiens
TTAEVVVTEI

SEQ ID NO: 59592 - protein, 10 aa, Homo Sapiens
TTFEHDIQAL

SEQ ID NO: 59593 - protein, 10 aa, Homo Sapiens
TTFESSHYLL

SEQ ID NO: 59594 - protein, 10 aa, Homo Sapiens
TTIENIEITI

SEQ ID NO: 59595 - protein, 10 aa, Homo Sapiens
TTIENISVSV

SEQ ID NO: 59596 - protein, 10 aa, Homo Sapiens
TTSTISHQVL

SEQ ID NO: 59597 - protein, 10 aa, Homo Sapiens
TTVDAMKLGV

SEQ ID NO: 59598 - protein, 10 aa, Homo Sapiens
TTYEGIFKTL

SEQ ID NO: 59599 - protein, 10 aa, Homo Sapiens
TVADVVLWSV

SEQ ID NO: 59600 - protein, 10 aa, Homo Sapiens
TVAEITGHQL

SEQ ID NO: 59601 - protein, 10 aa, Homo Sapiens
TVAEVTEVSV

SEQ ID NO: 59602 - protein, 10 aa, Homo Sapiens
TVAEVTSIQL

SEQ ID NO: 59603 - protein, 10 aa, Homo Sapiens
TVFDEAIRAV

SEQ ID NO: 59604 - protein, 10 aa, Homo Sapiens
TVFPGAVPVL

SEQ ID NO: 59605 - protein, 10 aa, Homo Sapiens
TVFPKEPVEL

SEQ ID NO: 59606 - protein, 10 aa, Homo Sapiens
TVFSHAQTVV

SEQ ID NO: 59607 - protein, 10 aa, Homo Sapiens
TVFSKSFEQV

SEQ ID NO: 59608 - protein, 10 aa, Homo Sapiens
TVFTDHMLTV

SEQ ID NO: 59609 - protein, 10 aa, Homo Sapiens
TVMDSKIVQV

SEQ ID NO: 59610 - protein, 10 aa, Homo Sapiens
TVSEVIQGLL

SEQ ID NO: 59611 - protein, 10 aa, Homo Sapiens
TVSPYTEIHL

SEQ ID NO: 59612 - protein, 10 aa, Homo Sapiens
TVTDLVEYSI

SEQ ID NO: 59613 - protein, 10 aa, Homo Sapiens
TVVEFPIRGL

SEQ ID NO: 59614 - protein, 10 aa, Homo Sapiens
TVYGGYLCSV

SEQ ID NO: 59615 - protein, 10 aa, Homo Sapiens
VAPEEHPVLL

SEQ ID NO: 59616 - protein, 10 aa, Homo Sapiens
VDTLPTVSSV

SEQ ID NO: 59617 - protein, 10 aa, Homo Sapiens
VLSPADKTNV

SEQ ID NO: 59618 - protein, 10 aa, Homo Sapiens
VPQLEIVPNS

SEQ ID NO: 59619 - protein, 10 aa, Homo Sapiens
VTFAPVNVTT

SEQ ID NO: 59620 - protein, 10 aa, Homo Sapiens
VVAPVTHVSV

SEQ ID NO: 59621 - protein, 10 aa, Homo Sapiens
VVGEPLPLPQ

SEQ ID NO: 59622 - protein, 10 aa, Homo Sapiens
VVPPFLQPEV

SEQ ID NO: 59623 - protein, 10 aa, Homo Sapiens
VVVPPFLQPE

SEQ ID NO: 59624 - protein, 10 aa, Homo Sapiens
VYPFPGPIPN

SEQ ID NO: 59625 - protein, 10 aa, Homo Sapiens
YAAPGGLIGV

SEQ ID NO: 59626 - protein, 10 aa, Homo Sapiens
YAAPPSPPLS

SEQ ID NO: 59627 - protein, 10 aa, Homo Sapiens
YDAEISQIHQ

SEQ ID NO: 59628 - protein, 10 aa, Homo Sapiens
YTFSEPFHLI

SEQ ID NO: 59629 - protein, 10 aa, Homo Sapiens
YVPVHFDASV

SEQ ID NO: 59630 - protein, 11 aa, Homo Sapiens
ALDVANKIGII

SEQ ID NO: 59631 - protein, 11 aa, Homo Sapiens
APIRLPEHVTV

SEQ ID NO: 59632 - protein, 11 aa, Homo Sapiens
APPPISGGGYR

SEQ ID NO: 59633 - protein, 11 aa, Homo Sapiens
APSFSDIPNPI

SEQ ID NO: 59634 - protein, 11 aa, Homo Sapiens
AVISPHYDSLL

SEQ ID NO: 59635 - protein, 11 aa, Homo Sapiens
DIFYPGDQQSV

SEQ ID NO: 59636 - protein, 11 aa, Homo Sapiens
DIPDDLNSIRA

SEQ ID NO: 59637 - protein, 11 aa, Homo Sapiens
DISIIPPLFTV

SEQ ID NO: 59638 - protein, 11 aa, Homo Sapiens
DIVDIKGMGTV

SEQ ID NO: 59639 - protein, 11 aa, Homo Sapiens
DSSLPQNQPFV

SEQ ID NO: 59640 - protein, 11 aa, Homo Sapiens
DTFRAGAFDQL

SEQ ID NO: 59641 - protein, 11 aa, Homo Sapiens
DTISTIKDIAV

SEQ ID NO: 59642 - protein, 11 aa, Homo Sapiens
DVAAVVVPILF

SEQ ID NO: 59643 - protein, 11 aa, Homo Sapiens
DVAHSDLILHV

SEQ ID NO: 59644 - protein, 11 aa, Homo Sapiens
DVAPPLIVHNI

SEQ ID NO: 59645 - protein, 11 aa, Homo Sapiens
DVAPQAPVHFL

SEQ ID NO: 59646 - protein, 11 aa, Homo Sapiens
DVAPTHILYAV

SEQ ID NO: 59647 - protein, 11 aa, Homo Sapiens
DVPGDKLLEPV

SEQ ID NO: 59648 - protein, 11 aa, Homo Sapiens
EAFGDTKFSAV

SEQ ID NO: 59649 - protein, 11 aa, Homo Sapiens
EAFPVHGFPTL

SEQ ID NO: 59650 - protein, 11 aa, Homo Sapiens
EAIDPLNLGNI

SEQ ID NO: 59651 - protein, 11 aa, Homo Sapiens
EIAPHALLQAV

SEQ ID NO: 59652 - protein, 11 aa, Homo Sapiens
EIFASKHIIGL

SEQ ID NO: 59653 - protein, 11 aa, Homo Sapiens
EIIDREAIQEL

SEQ ID NO: 59654 - protein, 11 aa, Homo Sapiens
EISTIASNYHL

SEQ ID NO: 59655 - protein, 11 aa, Homo Sapiens
EIVDKSGVVRV

SEQ ID NO: 59656 - protein, 11 aa, Homo Sapiens
EKVLVEGGPAP

SEQ ID NO: 59657 - protein, 11 aa, Homo Sapiens
ELPDFGGNVLL

SEQ ID NO: 59658 - protein, 11 aa, Homo Sapiens
EQFGGNPFASL

SEQ ID NO: 59659 - protein, 11 aa, Homo Sapiens
ESAKIGGIITV

SEQ ID NO: 59660 - protein, 11 aa, Homo Sapiens
ESAPGDFSLSV

SEQ ID NO: 59661 - protein, 11 aa, Homo Sapiens
ETADVIAKVAF

SEQ ID NO: 59662 - protein, 11 aa, Homo Sapiens
ETAGVVSTNLI

SEQ ID NO: 59663 - protein, 11 aa, Homo Sapiens
ETANADIVTLL

SEQ ID NO: 59664 - protein, 11 aa, Homo Sapiens
ETAPAKLIVYL

SEQ ID NO: 59665 - protein, 11 aa, Homo Sapiens
ETAPRTIFQRV

SEQ ID NO: 59666 - protein, 11 aa, Homo Sapiens
ETAQAIKGMHI

SEQ ID NO: 59667 - protein, 11 aa, Homo Sapiens
ETFEKSRLYQL

SEQ ID NO: 59668 - protein, 11 aa, Homo Sapiens
ETFKPPKDIDL

SEQ ID NO: 59669 - protein, 11 aa, Homo Sapiens
ETFTALSVLGV

SEQ ID NO: 59670 - protein, 11 aa, Homo Sapiens
ETIGTGGFAKV

SEQ ID NO: 59671 - protein, 11 aa, Homo Sapiens
ETIHIRGGVFS

SEQ ID NO: 59672 - protein, 11 aa, Homo Sapiens
ETINTRLISGV

SEQ ID NO: 59673 - protein, 11 aa, Homo Sapiens
ETVPSWMVAVI

SEQ ID NO: 59674 - protein, 11 aa, Homo Sapiens
ETVQVIPGSKL

SEQ ID NO: 59675 - protein, 11 aa, Homo Sapiens
ETVSPDKDWYV

SEQ ID NO: 59676 - protein, 11 aa, Homo Sapiens
ETYEAKRNEFL

SEQ ID NO: 59677 - protein, 11 aa, Homo Sapiens
EVAAIGQLAFL

SEQ ID NO: 59678 - protein, 11 aa, Homo Sapiens
EVADEKMLSGL

SEQ ID NO: 59679 - protein, 11 aa, Homo Sapiens
EVAGILEPVGL

SEQ ID NO: 59680 - protein, 11 aa, Homo Sapiens
EVAPPRLLEEV

SEQ ID NO: 59681 - protein, 11 aa, Homo Sapiens
EVAPVVTTEHI

SEQ ID NO: 59682 - protein, 11 aa, Homo Sapiens
EVAYIDGQVLV

SEQ ID NO: 59683 - protein, 11 aa, Homo Sapiens
EVDETYVPKEF

SEQ ID NO: 59684 - protein, 11 aa, Homo Sapiens
EVFAPPAEAYA

SEQ ID NO: 59685 - protein, 11 aa, Homo Sapiens
EVFDPSGVASI

SEQ ID NO: 59686 - protein, 11 aa, Homo Sapiens
EVFEDAAEIRL

SEQ ID NO: 59687 - protein, 11 aa, Homo Sapiens
EVFEKATFIKV

SEQ ID NO: 59688 - protein, 11 aa, Homo Sapiens
EVFFSEKIYKL

SEQ ID NO: 59689 - protein, 11 aa, Homo Sapiens
EVFGTADLYRV

SEQ ID NO: 59690 - protein, 11 aa, Homo Sapiens
EVFPVSKTLVL

SEQ ID NO: 59691 - protein, 11 aa, Homo Sapiens
EVFSSFAHAQV

SEQ ID NO: 59692 - protein, 11 aa, Homo Sapiens
EVGGEALGRLL

SEQ ID NO: 59693 - protein, 11 aa, Homo Sapiens
EVIGGLGAARV

SEQ ID NO: 59694 - protein, 11 aa, Homo Sapiens
EVIHGIFKAYI

SEQ ID NO: 59695 - protein, 11 aa, Homo Sapiens
EVIQSDSLWLV

SEQ ID NO: 59696 - protein, 11 aa, Homo Sapiens
EVIRLAQDAEV

SEQ ID NO: 59697 - protein, 11 aa, Homo Sapiens
EVIRLKGLVSI

SEQ ID NO: 59698 - protein, 11 aa, Homo Sapiens
EVISRQATINI

SEQ ID NO: 59699 - protein, 11 aa, Homo Sapiens
EVKPSLVIDYL

SEQ ID NO: 59700 - protein, 11 aa, Homo Sapiens
EVNEAFAPQYL

SEQ ID NO: 59701 - protein, 11 aa, Homo Sapiens
EVPPGSAIIHI

SEQ ID NO: 59702 - protein, 11 aa, Homo Sapiens
EVSGGTVRELV

SEQ ID NO: 59703 - protein, 11 aa, Homo Sapiens
EVSGNVSPGTR

SEQ ID NO: 59704 - protein, 11 aa, Homo Sapiens
FAIGIVGDAGV

SEQ ID NO: 59705 - protein, 11 aa, Homo Sapiens
FAWGNGEKVNI

SEQ ID NO: 59706 - protein, 11 aa, Homo Sapiens
FPANVAHSVYV

SEQ ID NO: 59707 - protein, 11 aa, Homo Sapiens
FQSSAVMALQE

SEQ ID NO: 59708 - protein, 11 aa, Homo Sapiens
FTAPTFTGSFL

SEQ ID NO: 59709 - protein, 11 aa, Homo Sapiens
FTFPGNLVTSV

SEQ ID NO: 59710 - protein, 11 aa, Homo Sapiens
FTITPPTAQVV

SEQ ID NO: 59711 - protein, 11 aa, Homo Sapiens
FTYRGVDLDQL

SEQ ID NO: 59712 - protein, 11 aa, Homo Sapiens
FVNDIFERIAG

SEQ ID NO: 59713 - protein, 11 aa, Homo Sapiens
FVYEQKLNEYV

SEQ ID NO: 59714 - protein, 11 aa, Homo Sapiens
GALEPHINAQI

SEQ ID NO: 59715 - protein, 11 aa, Homo Sapiens
GEFSITYKPVK

SEQ ID NO: 59716 - protein, 11 aa, Homo Sapiens
GEGMRYIIILD

SEQ ID NO: 59717 - protein, 11 aa, Homo Sapiens
GFEKPSAIQQR

SEQ ID NO: 59718 - protein, 11 aa, Homo Sapiens
GGFGGGSFRGS

SEQ ID NO: 59719 - protein, 11 aa, Homo Sapiens
GHQQLYWSHPR

SEQ ID NO: 59720 - protein, 11 aa, Homo Sapiens
GHYTEGAELVD

SEQ ID NO: 59721 - protein, 11 aa, Homo Sapiens
GLADALGGPLL

SEQ ID NO: 59722 - protein, 11 aa, Homo Sapiens
GPEETLPGQDS

SEQ ID NO: 59723 - protein, 11 aa, Homo Sapiens
GVGEFEAGISK

SEQ ID NO: 59724 - protein, 11 aa, Homo Sapiens
HHPGIAEFPSR

SEQ ID NO: 59725 - protein, 11 aa, Homo Sapiens
HLGYLPNQLFR

SEQ ID NO: 59726 - protein, 11 aa, Homo Sapiens
HRHPDEAAFFD

SEQ ID NO: 59727 - protein, 11 aa, Homo Sapiens
HSFNTDPEVFI

SEQ ID NO: 59728 - protein, 11 aa, Homo Sapiens
HTMSSSHLFYL

SEQ ID NO: 59729 - protein, 11 aa, Homo Sapiens
HVIDSIVGDGI

SEQ ID NO: 59730 - protein, 11 aa, Homo Sapiens
HVYDGKFLARV

SEQ ID NO: 59731 - protein, 11 aa, Homo Sapiens
IIKFPLTTESA

SEQ ID NO: 59732 - protein, 11 aa, Homo Sapiens
ITIHLPSPVTA

SEQ ID NO: 59733 - protein, 11 aa, Homo Sapiens
ITQIEHEVSSS

SEQ ID NO: 59734 - protein, 11 aa, Homo Sapiens
ITTVFSHAQTV

SEQ ID NO: 59735 - protein, 11 aa, Homo Sapiens
IVKDWNDMERI

SEQ ID NO: 59736 - protein, 11 aa, Homo Sapiens
KEDQTEYLEER

SEQ ID NO: 59737 - protein, 11 aa, Homo Sapiens
KNLQTVNVDEN

SEQ ID NO: 59738 - protein, 11 aa, Homo Sapiens
KVPQLEIVPNS

SEQ ID NO: 59739 - protein, 11 aa, Homo Sapiens
LISNASDALDK

SEQ ID NO: 59740 - protein, 11 aa, Homo Sapiens
LSQQDGAAGVP

SEQ ID NO: 59741 - protein, 11 aa, Homo Sapiens
MHQPHQPLPPT

SEQ ID NO: 59742 - protein, 11 aa, Homo Sapiens
MIILPEMVGSM

SEQ ID NO: 59743 - protein, 11 aa, Homo Sapiens
MTAKIVGDVFI

SEQ ID NO: 59744 - protein, 11 aa, Homo Sapiens
MTASVLRSISL

SEQ ID NO: 59745 - protein, 11 aa, Homo Sapiens
MTFDANPYDSV

SEQ ID NO: 59746 - protein, 11 aa, Homo Sapiens
MTFGLTDRPQL

SEQ ID NO: 59747 - protein, 11 aa, Homo Sapiens
MTFPGERIYEV

SEQ ID NO: 59748 - protein, 11 aa, Homo Sapiens
MVFKPSDVMLV

SEQ ID NO: 59749 - protein, 11 aa, Homo Sapiens
NDENEHQLSLR

SEQ ID NO: 59750 - protein, 11 aa, Homo Sapiens
NTIEHLLPLFL

SEQ ID NO: 59751 - protein, 11 aa, Homo Sapiens
NVYETTEFDQL

SEQ ID NO: 59752 - protein, 11 aa, Homo Sapiens
NVYPEEMIVAL

SEQ ID NO: 59753 - protein, 11 aa, Homo Sapiens
PKFEVIEKPQA

SEQ ID NO: 59754 - protein, 11 aa, Homo Sapiens
PMFIVNTNVPR

SEQ ID NO: 59755 - protein, 11 aa, Homo Sapiens
PRIASNAGSIA

SEQ ID NO: 59756 - protein, 11 aa, Homo Sapiens
PVVVPPFLQPE

SEQ ID NO: 59757 - protein, 11 aa, Homo Sapiens
QTAPKIFGGEI

SEQ ID NO: 59758 - protein, 11 aa, Homo Sapiens
QVIILNHPGQI

SEQ ID NO: 59759 - protein, 11 aa, Homo Sapiens
RAADPLVGVFL

SEQ ID NO: 59760 - protein, 11 aa, Homo Sapiens
REYHTEKLVTS

SEQ ID NO: 59761 - protein, 11 aa, Homo Sapiens
SFKKSFKLSGF

SEQ ID NO: 59762 - protein, 11 aa, Homo Sapiens
SFSDYPPLGRF

SEQ ID NO: 59763 - protein, 11 aa, Homo Sapiens
SHFEQWGTLTD

SEQ ID NO: 59764 - protein, 11 aa, Homo Sapiens
SIFGEDALANV

SEQ ID NO: 59765 - protein, 11 aa, Homo Sapiens
SLGGGFGGGSR

SEQ ID NO: 59766 - protein, 11 aa, Homo Sapiens
SLPQNIPPLTQ

SEQ ID NO: 59767 - protein, 11 aa, Homo Sapiens
SSLLEKGLDGA

SEQ ID NO: 59768 - protein, 11 aa, Homo Sapiens
STLSEKAKPAL

SEQ ID NO: 59769 - protein, 11 aa, Homo Sapiens
STTAVVTNPKE

SEQ ID NO: 59770 - protein, 11 aa, Homo Sapiens
SVFDAYVLPKL

SEQ ID NO: 59771 - protein, 11 aa, Homo Sapiens
SVIDHIHLISV

SEQ ID NO: 59772 - protein, 11 aa, Homo Sapiens
SVSPVVRVAVE

SEQ ID NO: 59773 - protein, 11 aa, Homo Sapiens
SVTDTNVILSM

SEQ ID NO: 59774 - protein, 11 aa, Homo Sapiens
TADPLSLLRNV

SEQ ID NO: 59775 - protein, 11 aa, Homo Sapiens
TAQVIILNHPG

SEQ ID NO: 59776 - protein, 11 aa, Homo Sapiens
TDAPSFSDIPN

SEQ ID NO: 59777 - protein, 11 aa, Homo Sapiens
TEELNREVATN

SEQ ID NO: 59778 - protein, 11 aa, Homo Sapiens
TEVLKTHGLLV

SEQ ID NO: 59779 - protein, 11 aa, Homo Sapiens
THAVVTVPAYF

SEQ ID NO: 59780 - protein, 11 aa, Homo Sapiens
TLVTYVPVTTF

SEQ ID NO: 59781 - protein, 11 aa, Homo Sapiens
TSAAVAGIYRV

SEQ ID NO: 59782 - protein, 11 aa, Homo Sapiens
TTFEHAHNMRV

SEQ ID NO: 59783 - protein, 11 aa, Homo Sapiens
TTVLSRAIAEL

SEQ ID NO: 59784 - protein, 11 aa, Homo Sapiens
TVARVHIGQVI

SEQ ID NO: 59785 - protein, 11 aa, Homo Sapiens
TVFAPVIQAGM

SEQ ID NO: 59786 - protein, 11 aa, Homo Sapiens
TVFSHAQTVVL

SEQ ID NO: 59787 - protein, 11 aa, Homo Sapiens
TVIETVADQTV

SEQ ID NO: 59788 - protein, 11 aa, Homo Sapiens
TVKDVNQQEFV

SEQ ID NO: 59789 - protein, 11 aa, Homo Sapiens
TVSSVGALHAL

SEQ ID NO: 59790 - protein, 11 aa, Homo Sapiens
VEALLAFGEGL

SEQ ID NO: 59791 - protein, 11 aa, Homo Sapiens
VHTIVISVQHD

SEQ ID NO: 59792 - protein, 11 aa, Homo Sapiens
VLDIGAGTGIL

SEQ ID NO: 59793 - protein, 11 aa, Homo Sapiens
VLSPADKTNVK

SEQ ID NO: 59794 - protein, 11 aa, Homo Sapiens
VQFLGDAVFIP

SEQ ID NO: 59795 - protein, 11 aa, Homo Sapiens
VTINQSLLTPL

SEQ ID NO: 59796 - protein, 11 aa, Homo Sapiens
VTVNQSLLSPL

SEQ ID NO: 59797 - protein, 11 aa, Homo Sapiens
YARSIFGEDAL

SEQ ID NO: 59798 - protein, 11 aa, Homo Sapiens
YAYNPLAGGLL

SEQ ID NO: 59799 - protein, 11 aa, Homo Sapiens
YDESGPSIVHR

SEQ ID NO: 59800 - protein, 11 aa, Homo Sapiens
YKVPQLEIVPN

SEQ ID NO: 59801 - protein, 11 aa, Homo Sapiens
YTIPPMEKAVV

SEQ ID NO: 59802 - protein, 11 aa, Homo Sapiens
YVFGKPFATPL

SEQ ID NO: 59803 - protein, 11 aa, Homo Sapiens
YVPPPFAAAAI

SEQ ID NO: 59804 - protein, 11 aa, Homo Sapiens
YVSDAFHKAFL

SEQ ID NO: 59805 - protein, 8 aa, Homo Sapiens
AIRHQRAL

SEQ ID NO: 59806 - protein, 8 aa, Homo Sapiens
CVFKKIER

SEQ ID NO: 59807 - protein, 8 aa, Homo Sapiens
EEQLQQIR

SEQ ID NO: 59808 - protein, 8 aa, Homo Sapiens
ITTTINPR

SEQ ID NO: 59809 - protein, 8 aa, Homo Sapiens
KIRVPFLR

SEQ ID NO: 59810 - protein, 8 aa, Homo Sapiens
KKGKPELR

SEQ ID NO: 59811 - protein, 8 aa, Homo Sapiens
KMRIPVAR

SEQ ID NO: 59812 - protein, 8 aa, Homo Sapiens
KTQIPTQR

SEQ ID NO: 59813 - protein, 8 aa, Homo Sapiens
KTWLPSCR

SEQ ID NO: 59814 - protein, 8 aa, Homo Sapiens
KVWVPKQK

SEQ ID NO: 59815 - protein, 8 aa, Homo Sapiens
KWLSLLQR

SEQ ID NO: 59816 - protein, 8 aa, Homo Sapiens
LLCNVILW

SEQ ID NO: 59817 - protein, 8 aa, Homo Sapiens
LSRTARAW

SEQ ID NO: 59818 - protein, 8 aa, Homo Sapiens
MSLTACKV

SEQ ID NO: 59819 - protein, 8 aa, Homo Sapiens
QRSRVAYR

SEQ ID NO: 59820 - protein, 8 aa, Homo Sapiens
RIFVHYPR

SEQ ID NO: 59821 - protein, 8 aa, Homo Sapiens
RIGVITNR

SEQ ID NO: 59822 - protein, 8 aa, Homo Sapiens
RIRAPIMR

SEQ ID NO: 59823 - protein, 8 aa, Homo Sapiens
RISKPHLR

SEQ ID NO: 59824 - protein, 8 aa, Homo Sapiens
RISLQWLR

SEQ ID NO: 59825 - protein, 8 aa, Homo Sapiens
RLKSPVLR

SEQ ID NO: 59826 - protein, 8 aa, Homo Sapiens
RLLLPHNR

SEQ ID NO: 59827 - protein, 8 aa, Homo Sapiens
RLREPLLR

SEQ ID NO: 59828 - protein, 8 aa, Homo Sapiens
RMGLSMER

SEQ ID NO: 59829 - protein, 8 aa, Homo Sapiens
RMGPVMDR

SEQ ID NO: 59830 - protein, 8 aa, Homo Sapiens
RSKQGFPR

SEQ ID NO: 59831 - protein, 8 aa, Homo Sapiens
RTSKPVFR

SEQ ID NO: 59832 - protein, 8 aa, Homo Sapiens
RVFKTVNR

SEQ ID NO: 59833 - protein, 8 aa, Homo Sapiens
RVKESITR

SEQ ID NO: 59834 - protein, 8 aa, Homo Sapiens
RVTKVLGR

SEQ ID NO: 59835 - protein, 8 aa, Homo Sapiens
TVKWFNVR

SEQ ID NO: 59836 - protein, 8 aa, Homo Sapiens
YDRQGIGR

SEQ ID NO: 59837 - protein, 8 aa, Homo Sapiens
YWVPRNAL

SEQ ID NO: 59838 - protein, 9 aa, Homo Sapiens
AGKSVHVLR

SEQ ID NO: 59839 - protein, 9 aa, Homo Sapiens
AIFTKAYQR

SEQ ID NO: 59840 - protein, 9 aa, Homo Sapiens
AIKIQSVYR

SEQ ID NO: 59841 - protein, 9 aa, Homo Sapiens
AIKPFYQKR

SEQ ID NO: 59842 - protein, 9 aa, Homo Sapiens
AIKSVKIYR

SEQ ID NO: 59843 - protein, 9 aa, Homo Sapiens
AINYPTVPR

SEQ ID NO: 59844 - protein, 9 aa, Homo Sapiens
AIQDKKNFR

SEQ ID NO: 59845 - protein, 9 aa, Homo Sapiens
AIREHLCIR

SEQ ID NO: 59846 - protein, 9 aa, Homo Sapiens
AIRQVITTR

SEQ ID NO: 59847 - protein, 9 aa, Homo Sapiens
AIRSSVIPR

SEQ ID NO: 59848 - protein, 9 aa, Homo Sapiens
AIWSGAALR

SEQ ID NO: 59849 - protein, 9 aa, Homo Sapiens
AIYKFQSRR

SEQ ID NO: 59850 - protein, 9 aa, Homo Sapiens
ALAALIFRR

SEQ ID NO: 59851 - protein, 9 aa, Homo Sapiens
ALAEFHVQR

SEQ ID NO: 59852 - protein, 9 aa, Homo Sapiens
ALAEYVIYR

SEQ ID NO: 59853 - protein, 9 aa, Homo Sapiens
ALFAGGKLR

SEQ ID NO: 59854 - protein, 9 aa, Homo Sapiens
ALFGANANR

SEQ ID NO: 59855 - protein, 9 aa, Homo Sapiens
ALFGCPNPR

SEQ ID NO: 59856 - protein, 9 aa, Homo Sapiens
ALFLFQEPR

SEQ ID NO: 59857 - protein, 9 aa, Homo Sapiens
ALFNTRIPR

SEQ ID NO: 59858 - protein, 9 aa, Homo Sapiens
ALKERIELR

SEQ ID NO: 59859 - protein, 9 aa, Homo Sapiens
ALLGVPHCR

SEQ ID NO: 59860 - protein, 9 aa, Homo Sapiens
ALNAHTFLR

SEQ ID NO: 59861 - protein, 9 aa, Homo Sapiens
ALNDVTAAR

SEQ ID NO: 59862 - protein, 9 aa, Homo Sapiens
ALNEEIVNR

SEQ ID NO: 59863 - protein, 9 aa, Homo Sapiens
ALNGKIYFR

SEQ ID NO: 59864 - protein, 9 aa, Homo Sapiens
ALNPINVKR

SEQ ID NO: 59865 - protein, 9 aa, Homo Sapiens
ALNSKAYKR

SEQ ID NO: 59866 - protein, 9 aa, Homo Sapiens
ALNSNNFVR

SEQ ID NO: 59867 - protein, 9 aa, Homo Sapiens
ALNVITKKR

SEQ ID NO: 59868 - protein, 9 aa, Homo Sapiens
ALNVLLFYR

SEQ ID NO: 59869 - protein, 9 aa, Homo Sapiens
ALNVPLHNR

SEQ ID NO: 59870 - protein, 9 aa, Homo Sapiens
ALQSMISSR

SEQ ID NO: 59871 - protein, 9 aa, Homo Sapiens
ALQTRLAKR

SEQ ID NO: 59872 - protein, 9 aa, Homo Sapiens
ALRDTPIPR

SEQ ID NO: 59873 - protein, 9 aa, Homo Sapiens
ALRGKVYQR

SEQ ID NO: 59874 - protein, 9 aa, Homo Sapiens
ALRRSPVPR

SEQ ID NO: 59875 - protein, 9 aa, Homo Sapiens
ALRSGPSLR

SEQ ID NO: 59876 - protein, 9 aa, Homo Sapiens
ALRSPLAQR

SEQ ID NO: 59877 - protein, 9 aa, Homo Sapiens
ALSGFTIFR

SEQ ID NO: 59878 - protein, 9 aa, Homo Sapiens
ALSHHLVAR

SEQ ID NO: 59879 - protein, 9 aa, Homo Sapiens
ALTEKQWLR

SEQ ID NO: 59880 - protein, 9 aa, Homo Sapiens
ALWRWTQVR

SEQ ID NO: 59881 - protein, 9 aa, Homo Sapiens
ALYGDKKPR

SEQ ID NO: 59882 - protein, 9 aa, Homo Sapiens
ALYRGPITR

SEQ ID NO: 59883 - protein, 9 aa, Homo Sapiens
AMGINMPAR

SEQ ID NO: 59884 - protein, 9 aa, Homo Sapiens
AMITVHTPR

SEQ ID NO: 59885 - protein, 9 aa, Homo Sapiens
AMRDSIHAR

SEQ ID NO: 59886 - protein, 9 aa, Homo Sapiens
AMWNRPCQR

SEQ ID NO: 59887 - protein, 9 aa, Homo Sapiens
AMWQKNFKR

SEQ ID NO: 59888 - protein, 9 aa, Homo Sapiens
AQADPLVRR

SEQ ID NO: 59889 - protein, 9 aa, Homo Sapiens
AQIKATVKR

SEQ ID NO: 59890 - protein, 9 aa, Homo Sapiens
AQKKASFLR

SEQ ID NO: 59891 - protein, 9 aa, Homo Sapiens
AQMSSVFQR

SEQ ID NO: 59892 - protein, 9 aa, Homo Sapiens
AQNPSLFVK

SEQ ID NO: 59893 - protein, 9 aa, Homo Sapiens
AQNSGLTLR

SEQ ID NO: 59894 - protein, 9 aa, Homo Sapiens
AQQLITICR

SEQ ID NO: 59895 - protein, 9 aa, Homo Sapiens
AQRDPIIAK

SEQ ID NO: 59896 - protein, 9 aa, Homo Sapiens
AQTGLLWLR

SEQ ID NO: 59897 - protein, 9 aa, Homo Sapiens
AQWQKVLPR

SEQ ID NO: 59898 - protein, 9 aa, Homo Sapiens
ASFGGLASR

SEQ ID NO: 59899 - protein, 9 aa, Homo Sapiens
ASIDWLAQR

SEQ ID NO: 59900 - protein, 9 aa, Homo Sapiens
ASLHWTSER

SEQ ID NO: 59901 - protein, 9 aa, Homo Sapiens
ASNPATFQR

SEQ ID NO: 59902 - protein, 9 aa, Homo Sapiens
ASQAFAAQR

SEQ ID NO: 59903 - protein, 9 aa, Homo Sapiens
ASQGFRFLR

SEQ ID NO: 59904 - protein, 9 aa, Homo Sapiens
ASRIRIALR

SEQ ID NO: 59905 - protein, 9 aa, Homo Sapiens
ASRPPVTLR

SEQ ID NO: 59906 - protein, 9 aa, Homo Sapiens
ASYKWNVSR

SEQ ID NO: 59907 - protein, 9 aa, Homo Sapiens
ASYYKDALR

SEQ ID NO: 59908 - protein, 9 aa, Homo Sapiens
ATAELIMSR

SEQ ID NO: 59909 - protein, 9 aa, Homo Sapiens
ATASLRKLR

SEQ ID NO: 59910 - protein, 9 aa, Homo Sapiens
ATATVYFKR

SEQ ID NO: 59911 - protein, 9 aa, Homo Sapiens
ATELWTYVR

SEQ ID NO: 59912 - protein, 9 aa, Homo Sapiens
ATFLPKWTR

SEQ ID NO: 59913 - protein, 9 aa, Homo Sapiens
ATFPGMWER

SEQ ID NO: 59914 - protein, 9 aa, Homo Sapiens
ATFQFTVER

SEQ ID NO: 59915 - protein, 9 aa, Homo Sapiens
ATIALMIQR

SEQ ID NO: 59916 - protein, 9 aa, Homo Sapiens
ATIQGAYAR

SEQ ID NO: 59917 - protein, 9 aa, Homo Sapiens
ATKFKQLYR

SEQ ID NO: 59918 - protein, 9 aa, Homo Sapiens
ATKILTELR

SEQ ID NO: 59919 - protein, 9 aa, Homo Sapiens
ATKNGILYR

SEQ ID NO: 59920 - protein, 9 aa, Homo Sapiens
ATKQYALGR

SEQ ID NO: 59921 - protein, 9 aa, Homo Sapiens
ATLLRPVLR

SEQ ID NO: 59922 - protein, 9 aa, Homo Sapiens
ATLNVSTTR

SEQ ID NO: 59923 - protein, 9 aa, Homo Sapiens
ATLQYIVGR

SEQ ID NO: 59924 - protein, 9 aa, Homo Sapiens
ATLYLGWNR

SEQ ID NO: 59925 - protein, 9 aa, Homo Sapiens
ATNILTATR

SEQ ID NO: 59926 - protein, 9 aa, Homo Sapiens
ATQSFSTFR

SEQ ID NO: 59927 - protein, 9 aa, Homo Sapiens
ATRAGLQVR

SEQ ID NO: 59928 - protein, 9 aa, Homo Sapiens
ATRGLPAAR

SEQ ID NO: 59929 - protein, 9 aa, Homo Sapiens
ATRKNLFER

SEQ ID NO: 59930 - protein, 9 aa, Homo Sapiens
ATRLGYFGR

SEQ ID NO: 59931 - protein, 9 aa, Homo Sapiens
ATRLLAEKR

SEQ ID NO: 59932 - protein, 9 aa, Homo Sapiens
ATRPVTPPR

SEQ ID NO: 59933 - protein, 9 aa, Homo Sapiens
ATRSFPQLR

SEQ ID NO: 59934 - protein, 9 aa, Homo Sapiens
ATRWPLAVR

SEQ ID NO: 59935 - protein, 9 aa, Homo Sapiens
ATSAVTVTR

SEQ ID NO: 59936 - protein, 9 aa, Homo Sapiens
ATSGVVAVR

SEQ ID NO: 59937 - protein, 9 aa, Homo Sapiens
ATSPALFNR

SEQ ID NO: 59938 - protein, 9 aa, Homo Sapiens
ATSPLQENR

SEQ ID NO: 59939 - protein, 9 aa, Homo Sapiens
ATSPVVYTR

SEQ ID NO: 59940 - protein, 9 aa, Homo Sapiens
ATSRTYLYR

SEQ ID NO: 59941 - protein, 9 aa, Homo Sapiens
ATTPIFANR

SEQ ID NO: 59942 - protein, 9 aa, Homo Sapiens
ATWFNQPAR

SEQ ID NO: 59943 - protein, 9 aa, Homo Sapiens
ATYGKPVHH

SEQ ID NO: 59944 - protein, 9 aa, Homo Sapiens
ATYGLNVER

SEQ ID NO: 59945 - protein, 9 aa, Homo Sapiens
ATYPYQVVR

SEQ ID NO: 59946 - protein, 9 aa, Homo Sapiens
AVAAVAARR

SEQ ID NO: 59947 - protein, 9 aa, Homo Sapiens
AVANFIRQR

SEQ ID NO: 59948 - protein, 9 aa, Homo Sapiens
AVCSIVTQR

SEQ ID NO: 59949 - protein, 9 aa, Homo Sapiens
AVFAGFEGR

SEQ ID NO: 59950 - protein, 9 aa, Homo Sapiens
AVFSRISTR

SEQ ID NO: 59951 - protein, 9 aa, Homo Sapiens
AVFYTFVFR

SEQ ID NO: 59952 - protein, 9 aa, Homo Sapiens
AVGGVYHPR

SEQ ID NO: 59953 - protein, 9 aa, Homo Sapiens
AVHDLLRPR

SEQ ID NO: 59954 - protein, 9 aa, Homo Sapiens
AVKDWANQR

SEQ ID NO: 59955 - protein, 9 aa, Homo Sapiens
AVLKITAQR

SEQ ID NO: 59956 - protein, 9 aa, Homo Sapiens
AVMGNPVTR

SEQ ID NO: 59957 - protein, 9 aa, Homo Sapiens
AVMKNQVAR

SEQ ID NO: 59958 - protein, 9 aa, Homo Sapiens
AVNKFGVGR

SEQ ID NO: 59959 - protein, 9 aa, Homo Sapiens
AVRALVASR

SEQ ID NO: 59960 - protein, 9 aa, Homo Sapiens
AVRPGDRVL

SEQ ID NO: 59961 - protein, 9 aa, Homo Sapiens
AVRPVIEKR

SEQ ID NO: 59962 - protein, 9 aa, Homo Sapiens
AVRQPVFLR

SEQ ID NO: 59963 - protein, 9 aa, Homo Sapiens
AVTAFVTFR

SEQ ID NO: 59964 - protein, 9 aa, Homo Sapiens
AVYDFFIGR

SEQ ID NO: 59965 - protein, 9 aa, Homo Sapiens
AVYEINVLR

SEQ ID NO: 59966 - protein, 9 aa, Homo Sapiens
GLAGVCALR

SEQ ID NO: 59967 - protein, 9 aa, Homo Sapiens
GLFEKRRFR

SEQ ID NO: 59968 - protein, 9 aa, Homo Sapiens
GLFSGLIPR

SEQ ID NO: 59969 - protein, 9 aa, Homo Sapiens
GLFSVCYPR

SEQ ID NO: 59970 - protein, 9 aa, Homo Sapiens
GLGGTLPPR

SEQ ID NO: 59971 - protein, 9 aa, Homo Sapiens
GLKGYVAER

SEQ ID NO: 59972 - protein, 9 aa, Homo Sapiens
GLKQVIIPR

SEQ ID NO: 59973 - protein, 9 aa, Homo Sapiens
GMRPGVAYR

SEQ ID NO: 59974 - protein, 9 aa, Homo Sapiens
GQRPHHFLR

SEQ ID NO: 59975 - protein, 9 aa, Homo Sapiens
GQRVFVVKR

SEQ ID NO: 59976 - protein, 9 aa, Homo Sapiens
GSRSFIINR

SEQ ID NO: 59977 - protein, 9 aa, Homo Sapiens
GSWQGPPPR

SEQ ID NO: 59978 - protein, 9 aa, Homo Sapiens
GSYHPGVFR

SEQ ID NO: 59979 - protein, 9 aa, Homo Sapiens
GSYSKAFAR

SEQ ID NO: 59980 - protein, 9 aa, Homo Sapiens
GTACGKYYR

SEQ ID NO: 59981 - protein, 9 aa, Homo Sapiens
GTADVHFER

SEQ ID NO: 59982 - protein, 9 aa, Homo Sapiens
GTAKWAWLR

SEQ ID NO: 59983 - protein, 9 aa, Homo Sapiens
GTGPNVPPR

SEQ ID NO: 59984 - protein, 9 aa, Homo Sapiens
GTIGKKFAR

SEQ ID NO: 59985 - protein, 9 aa, Homo Sapiens
GTKEICVVR

SEQ ID NO: 59986 - protein, 9 aa, Homo Sapiens
GTQSFVFQR

SEQ ID NO: 59987 - protein, 9 aa, Homo Sapiens
GTRYGASLR

SEQ ID NO: 59988 - protein, 9 aa, Homo Sapiens
GTSQLYVYR

SEQ ID NO: 59989 - protein, 9 aa, Homo Sapiens
GTSSVIVSR

SEQ ID NO: 59990 - protein, 9 aa, Homo Sapiens
GTVKWFNVR

SEQ ID NO: 59991 - protein, 9 aa, Homo Sapiens
GTWNWIWRR

SEQ ID NO: 59992 - protein, 9 aa, Homo Sapiens
GTYPWVVDR

SEQ ID NO: 59993 - protein, 9 aa, Homo Sapiens
GTYTDVTPR

SEQ ID NO: 59994 - protein, 9 aa, Homo Sapiens
GTYVSSVPR

SEQ ID NO: 59995 - protein, 9 aa, Homo Sapiens
GVANALAHR

SEQ ID NO: 59996 - protein, 9 aa, Homo Sapiens
GVMPSHFSR

SEQ ID NO: 59997 - protein, 9 aa, Homo Sapiens
GVNQLKFAR

SEQ ID NO: 59998 - protein, 9 aa, Homo Sapiens
GVRPPVGNR

SEQ ID NO: 59999 - protein, 9 aa, Homo Sapiens
GVRTPVPPR

SEQ ID NO: 60000 - protein, 9 aa, Homo Sapiens
HIHSVIILR

SEQ ID NO: 60001 - protein, 9 aa, Homo Sapiens
HINTVFVLR

SEQ ID NO: 60002 - protein, 9 aa, Homo Sapiens
HIQEIRTLR

SEQ ID NO: 60003 - protein, 9 aa, Homo Sapiens
HIQPGTVNR

SEQ ID NO: 60004 - protein, 9 aa, Homo Sapiens
HLFDHVTVR

SEQ ID NO: 60005 - protein, 9 aa, Homo Sapiens
HLFDHVVNR

SEQ ID NO: 60006 - protein, 9 aa, Homo Sapiens
HLFGGIAER

SEQ ID NO: 60007 - protein, 9 aa, Homo Sapiens
HLFPYVKKR

SEQ ID NO: 60008 - protein, 9 aa, Homo Sapiens
HLFQYPCAR

SEQ ID NO: 60009 - protein, 9 aa, Homo Sapiens
HLKEDLNLR

SEQ ID NO: 60010 - protein, 9 aa, Homo Sapiens
HLKEIISYR

SEQ ID NO: 60011 - protein, 9 aa, Homo Sapiens
HLLADVARF

SEQ ID NO: 60012 - protein, 9 aa, Homo Sapiens
HLNAQQVSR

SEQ ID NO: 60013 - protein, 9 aa, Homo Sapiens
HLNAVRIQR

SEQ ID NO: 60014 - protein, 9 aa, Homo Sapiens
HLNGLTETR

SEQ ID NO: 60015 - protein, 9 aa, Homo Sapiens
HLRDGISAR

SEQ ID NO: 60016 - protein, 9 aa, Homo Sapiens
HLYGFPQPR

SEQ ID NO: 60017 - protein, 9 aa, Homo Sapiens
HQRGLTVLR

SEQ ID NO: 60018 - protein, 9 aa, Homo Sapiens
HQVDFTFDR

SEQ ID NO: 60019 - protein, 9 aa, Homo Sapiens
HSMALIHNR

SEQ ID NO: 60020 - protein, 9 aa, Homo Sapiens
HSMDFVAYR

SEQ ID NO: 60021 - protein, 9 aa, Homo Sapiens
HSYYNVWLR

SEQ ID NO: 60022 - protein, 9 aa, Homo Sapiens
HTFDHINKR

SEQ ID NO: 60023 - protein, 9 aa, Homo Sapiens
HTLEPLIPR

SEQ ID NO: 60024 - protein, 9 aa, Homo Sapiens
HTNAVATVR

SEQ ID NO: 60025 - protein, 9 aa, Homo Sapiens
HTRHYELYR

SEQ ID NO: 60026 - protein, 9 aa, Homo Sapiens
HVHEPNPLR

SEQ ID NO: 60027 - protein, 9 aa, Homo Sapiens
HVRTWSVTR

SEQ ID NO: 60028 - protein, 9 aa, Homo Sapiens
IAPGVTHEL

SEQ ID NO: 60029 - protein, 9 aa, Homo Sapiens
IIAAKKVLR

SEQ ID NO: 60030 - protein, 9 aa, Homo Sapiens
IIFVKSVQR

SEQ ID NO: 60031 - protein, 9 aa, Homo Sapiens
IINKVTRNR

SEQ ID NO: 60032 - protein, 9 aa, Homo Sapiens
IIQKYIRAR

SEQ ID NO: 60033 - protein, 9 aa, Homo Sapiens
IIQSTPYGR

SEQ ID NO: 60034 - protein, 9 aa, Homo Sapiens
ILAPRPWSR

SEQ ID NO: 60035 - protein, 9 aa, Homo Sapiens
ILFGKKYEK

SEQ ID NO: 60036 - protein, 9 aa, Homo Sapiens
ILHFGLPPR

SEQ ID NO: 60037 - protein, 9 aa, Homo Sapiens
ILKAQVAAR

SEQ ID NO: 60038 - protein, 9 aa, Homo Sapiens
ILKTITHPR

SEQ ID NO: 60039 - protein, 9 aa, Homo Sapiens
ILNGGPSKR

SEQ ID NO: 60040 - protein, 9 aa, Homo Sapiens
ILNSNHIGR

SEQ ID NO: 60041 - protein, 9 aa, Homo Sapiens
ILNTWISLK

SEQ ID NO: 60042 - protein, 9 aa, Homo Sapiens
ILQILSLNR

SEQ ID NO: 60043 - protein, 9 aa, Homo Sapiens
ILQQQVNPR

SEQ ID NO: 60044 - protein, 9 aa, Homo Sapiens
ILRDFFELR

SEQ ID NO: 60045 - protein, 9 aa, Homo Sapiens
ILRPVFQQR

SEQ ID NO: 60046 - protein, 9 aa, Homo Sapiens
ILRTEQWPR

SEQ ID NO: 60047 - protein, 9 aa, Homo Sapiens
ILSKPPAER

SEQ ID NO: 60048 - protein, 9 aa, Homo Sapiens
ILYEKPHFR

SEQ ID NO: 60049 - protein, 9 aa, Homo Sapiens
ILYPATTGR

SEQ ID NO: 60050 - protein, 9 aa, Homo Sapiens
IMKVHRIYR

SEQ ID NO: 60051 - protein, 9 aa, Homo Sapiens
IQAGIYATR

SEQ ID NO: 60052 - protein, 9 aa, Homo Sapiens
IQAGYSSPR

SEQ ID NO: 60053 - protein, 9 aa, Homo Sapiens
IQKEQNYQR

SEQ ID NO: 60054 - protein, 9 aa, Homo Sapiens
IQNRFKYAR

SEQ ID NO: 60055 - protein, 9 aa, Homo Sapiens
IQSSFVVER

SEQ ID NO: 60056 - protein, 9 aa, Homo Sapiens
IQVSQIVAR

SEQ ID NO: 60057 - protein, 9 aa, Homo Sapiens
ISHHWPFQR

SEQ ID NO: 60058 - protein, 9 aa, Homo Sapiens
ITQIEHEVS

SEQ ID NO: 60059 - protein, 9 aa, Homo Sapiens
ITRIFGVKR

SEQ ID NO: 60060 - protein, 9 aa, Homo Sapiens
ITYLMEHKR

SEQ ID NO: 60061 - protein, 9 aa, Homo Sapiens
IVHGDLSPR

SEQ ID NO: 60062 - protein, 9 aa, Homo Sapiens
IVHTVTVKR

SEQ ID NO: 60063 - protein, 9 aa, Homo Sapiens
IVKEFQRNR

SEQ ID NO: 60064 - protein, 9 aa, Homo Sapiens
IVKKNFDLR

SEQ ID NO: 60065 - protein, 9 aa, Homo Sapiens
IVKPPASAR

SEQ ID NO: 60066 - protein, 9 aa, Homo Sapiens
IVNENLVER

SEQ ID NO: 60067 - protein, 9 aa, Homo Sapiens
IVPGNVKSL

SEQ ID NO: 60068 - protein, 9 aa, Homo Sapiens
IVQQFGYQR

SEQ ID NO: 60069 - protein, 9 aa, Homo Sapiens
IVRANLARV

SEQ ID NO: 60070 - protein, 9 aa, Homo Sapiens
KAANVLITR

SEQ ID NO: 60071 - protein, 9 aa, Homo Sapiens
KAFDRITTR

SEQ ID NO: 60072 - protein, 9 aa, Homo Sapiens
KAKSIVFHR

SEQ ID NO: 60073 - protein, 9 aa, Homo Sapiens
KAKYPPVNR

SEQ ID NO: 60074 - protein, 9 aa, Homo Sapiens
KAPGSTSNL

SEQ ID NO: 60075 - protein, 9 aa, Homo Sapiens
KAPVTKVAA

SEQ ID NO: 60076 - protein, 9 aa, Homo Sapiens
KIADFGLAR

SEQ ID NO: 60077 - protein, 9 aa, Homo Sapiens
KIAEHIAGR

SEQ ID NO: 60078 - protein, 9 aa, Homo Sapiens
KIALKEITR

SEQ ID NO: 60079 - protein, 9 aa, Homo Sapiens
KIAVHCTVR

SEQ ID NO: 60080 - protein, 9 aa, Homo Sapiens
KICFIPRYR

SEQ ID NO: 60081 - protein, 9 aa, Homo Sapiens
KICGKAFSR

SEQ ID NO: 60082 - protein, 9 aa, Homo Sapiens
KIFAGKVLR

SEQ ID NO: 60083 - protein, 9 aa, Homo Sapiens
KIFGNKEMR

SEQ ID NO: 60084 - protein, 9 aa, Homo Sapiens
KIGSFLSNR

SEQ ID NO: 60085 - protein, 9 aa, Homo Sapiens
KIIAKIQQR

SEQ ID NO: 60086 - protein, 9 aa, Homo Sapiens
KIIEPIQSR

SEQ ID NO: 60087 - protein, 9 aa, Homo Sapiens
KIIVNRLAR

SEQ ID NO: 60088 - protein, 9 aa, Homo Sapiens
KIKDTVLQR

SEQ ID NO: 60089 - protein, 9 aa, Homo Sapiens
KIKELYRRR

SEQ ID NO: 60090 - protein, 9 aa, Homo Sapiens
KIKFPLPHR

SEQ ID NO: 60091 - protein, 9 aa, Homo Sapiens
KIKNYILMR

SEQ ID NO: 60092 - protein, 9 aa, Homo Sapiens
KIKPRNITR

SEQ ID NO: 60093 - protein, 9 aa, Homo Sapiens
KILGPFHKR

SEQ ID NO: 60094 - protein, 9 aa, Homo Sapiens
KILKDIANR

SEQ ID NO: 60095 - protein, 9 aa, Homo Sapiens
KIMLKVYSR

SEQ ID NO: 60096 - protein, 9 aa, Homo Sapiens
KIMLPPRNR

SEQ ID NO: 60097 - protein, 9 aa, Homo Sapiens
KINLIIHQR

SEQ ID NO: 60098 - protein, 9 aa, Homo Sapiens
KINLRIQTR

SEQ ID NO: 60099 - protein, 9 aa, Homo Sapiens
KINPVQQSR

SEQ ID NO: 60100 - protein, 9 aa, Homo Sapiens
KINSLAHLR

SEQ ID NO: 60101 - protein, 9 aa, Homo Sapiens
KIRIEDPPR

SEQ ID NO: 60102 - protein, 9 aa, Homo Sapiens
KIRIFDLGR

SEQ ID NO: 60103 - protein, 9 aa, Homo Sapiens
KIRKTFVQR

SEQ ID NO: 60104 - protein, 9 aa, Homo Sapiens
KISGFPKNR

SEQ ID NO: 60105 - protein, 9 aa, Homo Sapiens
KISSFLRQR

SEQ ID NO: 60106 - protein, 9 aa, Homo Sapiens
KISSPKVGR

SEQ ID NO: 60107 - protein, 9 aa, Homo Sapiens
KISSTAVTR

SEQ ID NO: 60108 - protein, 9 aa, Homo Sapiens
KIWQNLRLK

SEQ ID NO: 60109 - protein, 9 aa, Homo Sapiens
KLAFSKVLR

SEQ ID NO: 60110 - protein, 9 aa, Homo Sapiens
KLALRYAGR

SEQ ID NO: 60111 - protein, 9 aa, Homo Sapiens
KLAPEFAKR

SEQ ID NO: 60112 - protein, 9 aa, Homo Sapiens
KLAPFIAKR

SEQ ID NO: 60113 - protein, 9 aa, Homo Sapiens
KLASDPALR

SEQ ID NO: 60114 - protein, 9 aa, Homo Sapiens
KLASYQAAR

SEQ ID NO: 60115 - protein, 9 aa, Homo Sapiens
KLAVAIALR

SEQ ID NO: 60116 - protein, 9 aa, Homo Sapiens
KLCGYVIFR

SEQ ID NO: 60117 - protein, 9 aa, Homo Sapiens
KLDRPRFER

SEQ ID NO: 60118 - protein, 9 aa, Homo Sapiens
KLDSVRVLR

SEQ ID NO: 60119 - protein, 9 aa, Homo Sapiens
KLFAIIVGR

SEQ ID NO: 60120 - protein, 9 aa, Homo Sapiens
KLFEKSKCR

SEQ ID NO: 60121 - protein, 9 aa, Homo Sapiens
KLFELYTKR

SEQ ID NO: 60122 - protein, 9 aa, Homo Sapiens
KLFNGTFLK

SEQ ID NO: 60123 - protein, 9 aa, Homo Sapiens
KLFQAPCQR

SEQ ID NO: 60124 - protein, 9 aa, Homo Sapiens
KLFSPVIAR

SEQ ID NO: 60125 - protein, 9 aa, Homo Sapiens
KLFSVTRNR

SEQ ID NO: 60126 - protein, 9 aa, Homo Sapiens
KLFVGFLNR

SEQ ID NO: 60127 - protein, 9 aa, Homo Sapiens
KLGKITFIR

SEQ ID NO: 60128 - protein, 9 aa, Homo Sapiens
KLHDMIIKR

SEQ ID NO: 60129 - protein, 9 aa, Homo Sapiens
KLHTSIAGR

SEQ ID NO: 60130 - protein, 9 aa, Homo Sapiens
KLIPVHQVR

SEQ ID NO: 60131 - protein, 9 aa, Homo Sapiens
KLISGWVSR

SEQ ID NO: 60132 - protein, 9 aa, Homo Sapiens
KLKAIVASK

SEQ ID NO: 60133 - protein, 9 aa, Homo Sapiens
KLKEILKER

SEQ ID NO: 60134 - protein, 9 aa, Homo Sapiens
KLKGIGKPR

SEQ ID NO: 60135 - protein, 9 aa, Homo Sapiens
KLKKPEAVR

SEQ ID NO: 60136 - protein, 9 aa, Homo Sapiens
KLKSFESER

SEQ ID NO: 60137 - protein, 9 aa, Homo Sapiens
KLKWIVSGR

SEQ ID NO: 60138 - protein, 9 aa, Homo Sapiens
KLKYLAFLR

SEQ ID NO: 60139 - protein, 9 aa, Homo Sapiens
KLLACIASR

SEQ ID NO: 60140 - protein, 9 aa, Homo Sapiens
KLLESIFHR

SEQ ID NO: 60141 - protein, 9 aa, Homo Sapiens
KLLEVWFSR

SEQ ID NO: 60142 - protein, 9 aa, Homo Sapiens
KLLGGLAVR

SEQ ID NO: 60143 - protein, 9 aa, Homo Sapiens
KLLQPLVPR

SEQ ID NO: 60144 - protein, 9 aa, Homo Sapiens
KLLSTSAKR

SEQ ID NO: 60145 - protein, 9 aa, Homo Sapiens
KLMVHLVER

SEQ ID NO: 60146 - protein, 9 aa, Homo Sapiens
KLNEIWHRR

SEQ ID NO: 60147 - protein, 9 aa, Homo Sapiens
KLNEVIVTR

SEQ ID NO: 60148 - protein, 9 aa, Homo Sapiens
KLNIMAAKR

SEQ ID NO: 60149 - protein, 9 aa, Homo Sapiens
KLNIPAILR

SEQ ID NO: 60150 - protein, 9 aa, Homo Sapiens
KLNIPGCYR

SEQ ID NO: 60151 - protein, 9 aa, Homo Sapiens
KLNIRPLLR

SEQ ID NO: 60152 - protein, 9 aa, Homo Sapiens
KLNPQQFEV

SEQ ID NO: 60153 - protein, 9 aa, Homo Sapiens
KLNPRKIIR

SEQ ID NO: 60154 - protein, 9 aa, Homo Sapiens
KLQDAGVYR

SEQ ID NO: 60155 - protein, 9 aa, Homo Sapiens
KLQDERTVR

SEQ ID NO: 60156 - protein, 9 aa, Homo Sapiens
KLQEAMKLR

SEQ ID NO: 60157 - protein, 9 aa, Homo Sapiens
KLQEMRAQR

SEQ ID NO: 60158 - protein, 9 aa, Homo Sapiens
KLQPPPLGR

SEQ ID NO: 60159 - protein, 9 aa, Homo Sapiens
KLQPPPVGR

SEQ ID NO: 60160 - protein, 9 aa, Homo Sapiens
KLQSGKISR

SEQ ID NO: 60161 - protein, 9 aa, Homo Sapiens
KLRANVNAR

SEQ ID NO: 60162 - protein, 9 aa, Homo Sapiens
KLRDFLLEH

SEQ ID NO: 60163 - protein, 9 aa, Homo Sapiens
KLRDWTPPR

SEQ ID NO: 60164 - protein, 9 aa, Homo Sapiens
KLREQVVKR

SEQ ID NO: 60165 - protein, 9 aa, Homo Sapiens
KLRGIVSEK

SEQ ID NO: 60166 - protein, 9 aa, Homo Sapiens
KLRQPFFQK

SEQ ID NO: 60167 - protein, 9 aa, Homo Sapiens
KLSGLPKHR

SEQ ID NO: 60168 - protein, 9 aa, Homo Sapiens
KLSIFIHKR

SEQ ID NO: 60169 - protein, 9 aa, Homo Sapiens
KLSIVPVRR

SEQ ID NO: 60170 - protein, 9 aa, Homo Sapiens
KLSKIRVVR

SEQ ID NO: 60171 - protein, 9 aa, Homo Sapiens
KLSPCTVTR

SEQ ID NO: 60172 - protein, 9 aa, Homo Sapiens
KLSPSPSLR

SEQ ID NO: 60173 - protein, 9 aa, Homo Sapiens
KLSPSPSSR

SEQ ID NO: 60174 - protein, 9 aa, Homo Sapiens
KLSSSFSSR

SEQ ID NO: 60175 - protein, 9 aa, Homo Sapiens
KLSSVSICR

SEQ ID NO: 60176 - protein, 9 aa, Homo Sapiens
KLSSYPRLR

SEQ ID NO: 60177 - protein, 9 aa, Homo Sapiens
KLSTFPANR

SEQ ID NO: 60178 - protein, 9 aa, Homo Sapiens
KLTDCVVMR

SEQ ID NO: 60179 - protein, 9 aa, Homo Sapiens
KLTFEELER

SEQ ID NO: 60180 - protein, 9 aa, Homo Sapiens
KLWDGSEAR

SEQ ID NO: 60181 - protein, 9 aa, Homo Sapiens
KLWDGVSNR

SEQ ID NO: 60182 - protein, 9 aa, Homo Sapiens
KLWEISTGR

SEQ ID NO: 60183 - protein, 9 aa, Homo Sapiens
KLWVIARER

SEQ ID NO: 60184 - protein, 9 aa, Homo Sapiens
KLYHKKIFR

SEQ ID NO: 60185 - protein, 9 aa, Homo Sapiens
KLYLPTGPR

SEQ ID NO: 60186 - protein, 9 aa, Homo Sapiens
KLYNKITSR

SEQ ID NO: 60187 - protein, 9 aa, Homo Sapiens
KLYPDSRVR

SEQ ID NO: 60188 - protein, 9 aa, Homo Sapiens
KLYPLPSAR

SEQ ID NO: 60189 - protein, 9 aa, Homo Sapiens
KLYPWIHQF

SEQ ID NO: 60190 - protein, 9 aa, Homo Sapiens
KLYSLLFRR

SEQ ID NO: 60191 - protein, 9 aa, Homo Sapiens
KMALSFVQR

SEQ ID NO: 60192 - protein, 9 aa, Homo Sapiens
KMFFTTKHR

SEQ ID NO: 60193 - protein, 9 aa, Homo Sapiens
KMFNALIHR

SEQ ID NO: 60194 - protein, 9 aa, Homo Sapiens
KMHTSQDFR

SEQ ID NO: 60195 - protein, 9 aa, Homo Sapiens
KMKPDVVLR

SEQ ID NO: 60196 - protein, 9 aa, Homo Sapiens
KMVGFIIGR

SEQ ID NO: 60197 - protein, 9 aa, Homo Sapiens
KMYEEHLKR

SEQ ID NO: 60198 - protein, 9 aa, Homo Sapiens
KNLFRTVLR

SEQ ID NO: 60199 - protein, 9 aa, Homo Sapiens
KQATLLLER

SEQ ID NO: 60200 - protein, 9 aa, Homo Sapiens
KQATMKALR

SEQ ID NO: 60201 - protein, 9 aa, Homo Sapiens
KQFFVAVER

SEQ ID NO: 60202 - protein, 9 aa, Homo Sapiens
KQKESWQLR

SEQ ID NO: 60203 - protein, 9 aa, Homo Sapiens
KQKSSLIWR

SEQ ID NO: 60204 - protein, 9 aa, Homo Sapiens
KQLEEEKRR

SEQ ID NO: 60205 - protein, 9 aa, Homo Sapiens
KQLGYSVYR

SEQ ID NO: 60206 - protein, 9 aa, Homo Sapiens
KQMSFLEKR

SEQ ID NO: 60207 - protein, 9 aa, Homo Sapiens
KQNDTKVLR

SEQ ID NO: 60208 - protein, 9 aa, Homo Sapiens
KQNPFWWTH

SEQ ID NO: 60209 - protein, 9 aa, Homo Sapiens
KQNVKIWGR

SEQ ID NO: 60210 - protein, 9 aa, Homo Sapiens
KQQEIVVSR

SEQ ID NO: 60211 - protein, 9 aa, Homo Sapiens
KQQELLRQR

SEQ ID NO: 60212 - protein, 9 aa, Homo Sapiens
KQQGVLALR

SEQ ID NO: 60213 - protein, 9 aa, Homo Sapiens
KQRLFENLR

SEQ ID NO: 60214 - protein, 9 aa, Homo Sapiens
KQRLIYQGR

SEQ ID NO: 60215 - protein, 9 aa, Homo Sapiens
KQWDYYARR

SEQ ID NO: 60216 - protein, 9 aa, Homo Sapiens
KQWKDVVER

SEQ ID NO: 60217 - protein, 9 aa, Homo Sapiens
KQWPKRSLR

SEQ ID NO: 60218 - protein, 9 aa, Homo Sapiens
KQYVTQINR

SEQ ID NO: 60219 - protein, 9 aa, Homo Sapiens
KSANICIGR

SEQ ID NO: 60220 - protein, 9 aa, Homo Sapiens
KSEKRTFLR

SEQ ID NO: 60221 - protein, 9 aa, Homo Sapiens
KSFDKNLYR

SEQ ID NO: 60222 - protein, 9 aa, Homo Sapiens
KSFGCPSVR

SEQ ID NO: 60223 - protein, 9 aa, Homo Sapiens
KSFGDLVSR

SEQ ID NO: 60224 - protein, 9 aa, Homo Sapiens
KSFQKIQVR

SEQ ID NO: 60225 - protein, 9 aa, Homo Sapiens
KSHLIIHQR

SEQ ID NO: 60226 - protein, 9 aa, Homo Sapiens
KSKLIIHQR

SEQ ID NO: 60227 - protein, 9 aa, Homo Sapiens
KSKPGQFIR

SEQ ID NO: 60228 - protein, 9 aa, Homo Sapiens
KSKVPAFVR

SEQ ID NO: 60229 - protein, 9 aa, Homo Sapiens
KSLIKSWKK

SEQ ID NO: 60230 - protein, 9 aa, Homo Sapiens
KSLLKEFKR

SEQ ID NO: 60231 - protein, 9 aa, Homo Sapiens
KSNGSVFVR

SEQ ID NO: 60232 - protein, 9 aa, Homo Sapiens
KSNLIVHQR

SEQ ID NO: 60233 - protein, 9 aa, Homo Sapiens
KSNLIVVQR

SEQ ID NO: 60234 - protein, 9 aa, Homo Sapiens
KSQIVTNVR

SEQ ID NO: 60235 - protein, 9 aa, Homo Sapiens
KSQLIIHQR

SEQ ID NO: 60236 - protein, 9 aa, Homo Sapiens
KSQLIVHQR

SEQ ID NO: 60237 - protein, 9 aa, Homo Sapiens
KSRDPFWNR

SEQ ID NO: 60238 - protein, 9 aa, Homo Sapiens
KSYLIIHQR

SEQ ID NO: 60239 - protein, 9 aa, Homo Sapiens
KTAGINVRK

SEQ ID NO: 60240 - protein, 9 aa, Homo Sapiens
KTAVAPIER

SEQ ID NO: 60241 - protein, 9 aa, Homo Sapiens
KTFEISIGR

SEQ ID NO: 60242 - protein, 9 aa, Homo Sapiens
KTFEKNVVR

SEQ ID NO: 60243 - protein, 9 aa, Homo Sapiens
KTFGQKPVK

SEQ ID NO: 60244 - protein, 9 aa, Homo Sapiens
KTFHGLLTR

SEQ ID NO: 60245 - protein, 9 aa, Homo Sapiens
KTFHRYTVR

SEQ ID NO: 60246 - protein, 9 aa, Homo Sapiens
KTFSEILNR

SEQ ID NO: 60247 - protein, 9 aa, Homo Sapiens
KTFYWREHL

SEQ ID NO: 60248 - protein, 9 aa, Homo Sapiens
KTHAVILSR

SEQ ID NO: 60249 - protein, 9 aa, Homo Sapiens
KTHNLLTTR

SEQ ID NO: 60250 - protein, 9 aa, Homo Sapiens
KTIDIREER

SEQ ID NO: 60251 - protein, 9 aa, Homo Sapiens
KTILKRLFR

SEQ ID NO: 60252 - protein, 9 aa, Homo Sapiens
KTIWSTMLR

SEQ ID NO: 60253 - protein, 9 aa, Homo Sapiens
KTKEGYYYR

SEQ ID NO: 60254 - protein, 9 aa, Homo Sapiens
KTKLPVTLR

SEQ ID NO: 60255 - protein, 9 aa, Homo Sapiens
KTLEGVITR

SEQ ID NO: 60256 - protein, 9 aa, Homo Sapiens
KTLGLAIKR

SEQ ID NO: 60257 - protein, 9 aa, Homo Sapiens
KTLGTVTPR

SEQ ID NO: 60258 - protein, 9 aa, Homo Sapiens
KTLLVNNNR

SEQ ID NO: 60259 - protein, 9 aa, Homo Sapiens
KTLPKIVGR

SEQ ID NO: 60260 - protein, 9 aa, Homo Sapiens
KTLPWGPKR

SEQ ID NO: 60261 - protein, 9 aa, Homo Sapiens
KTLRGINSR

SEQ ID NO: 60262 - protein, 9 aa, Homo Sapiens
KTMPTTFNR

SEQ ID NO: 60263 - protein, 9 aa, Homo Sapiens
KTNFRCALR

SEQ ID NO: 60264 - protein, 9 aa, Homo Sapiens
KTNFRLLKR

SEQ ID NO: 60265 - protein, 9 aa, Homo Sapiens
KTNGKFLIR

SEQ ID NO: 60266 - protein, 9 aa, Homo Sapiens
KTQEPFSVR

SEQ ID NO: 60267 - protein, 9 aa, Homo Sapiens
KTQPPLMKR

SEQ ID NO: 60268 - protein, 9 aa, Homo Sapiens
KTRPFEYLR

SEQ ID NO: 60269 - protein, 9 aa, Homo Sapiens
KTSMHWVVR

SEQ ID NO: 60270 - protein, 9 aa, Homo Sapiens
KTTKKIVLR

SEQ ID NO: 60271 - protein, 9 aa, Homo Sapiens
KTTTVKFNR

SEQ ID NO: 60272 - protein, 9 aa, Homo Sapiens
KTTYWICER

SEQ ID NO: 60273 - protein, 9 aa, Homo Sapiens
KTVRLVIGR

SEQ ID NO: 60274 - protein, 9 aa, Homo Sapiens
KTVSLVLQR

SEQ ID NO: 60275 - protein, 9 aa, Homo Sapiens
KTVYPASYR

SEQ ID NO: 60276 - protein, 9 aa, Homo Sapiens
KVAAIVVKR

SEQ ID NO: 60277 - protein, 9 aa, Homo Sapiens
KVFDVTKGR

SEQ ID NO: 60278 - protein, 9 aa, Homo Sapiens
KVFGGTVHK

SEQ ID NO: 60279 - protein, 9 aa, Homo Sapiens
KVFHRPWRR

SEQ ID NO: 60280 - protein, 9 aa, Homo Sapiens
KVFLFIRNR

SEQ ID NO: 60281 - protein, 9 aa, Homo Sapiens
KVIEKQLER

SEQ ID NO: 60282 - protein, 9 aa, Homo Sapiens
KVIPPIRSR

SEQ ID NO: 60283 - protein, 9 aa, Homo Sapiens
KVKEPPILR

SEQ ID NO: 60284 - protein, 9 aa, Homo Sapiens
KVKGLVSSR

SEQ ID NO: 60285 - protein, 9 aa, Homo Sapiens
KVKGPALSR

SEQ ID NO: 60286 - protein, 9 aa, Homo Sapiens
KVKNELFKR

SEQ ID NO: 60287 - protein, 9 aa, Homo Sapiens
KVLGPIHER

SEQ ID NO: 60288 - protein, 9 aa, Homo Sapiens
KVLRPFLLR

SEQ ID NO: 60289 - protein, 9 aa, Homo Sapiens
KVMGILINR

SEQ ID NO: 60290 - protein, 9 aa, Homo Sapiens
KVMNSAVMR

SEQ ID NO: 60291 - protein, 9 aa, Homo Sapiens
KVNDVEAIR

SEQ ID NO: 60292 - protein, 9 aa, Homo Sapiens
KVNLNTIKR

SEQ ID NO: 60293 - protein, 9 aa, Homo Sapiens
KVQERRFLR

SEQ ID NO: 60294 - protein, 9 aa, Homo Sapiens
KVRNFEVHR

SEQ ID NO: 60295 - protein, 9 aa, Homo Sapiens
KVSDWSYER

SEQ ID NO: 60296 - protein, 9 aa, Homo Sapiens
KVSGDIFSR

SEQ ID NO: 60297 - protein, 9 aa, Homo Sapiens
KVSKKEFLR

SEQ ID NO: 60298 - protein, 9 aa, Homo Sapiens
KVSLVTHQR

SEQ ID NO: 60299 - protein, 9 aa, Homo Sapiens
KVSPVSYLR

SEQ ID NO: 60300 - protein, 9 aa, Homo Sapiens
KVTEKIPVR

SEQ ID NO: 60301 - protein, 9 aa, Homo Sapiens
KVWPLASGR

SEQ ID NO: 60302 - protein, 9 aa, Homo Sapiens
KVWVKLIGR

SEQ ID NO: 60303 - protein, 9 aa, Homo Sapiens
KVYELQASR

SEQ ID NO: 60304 - protein, 9 aa, Homo Sapiens
KVYTPVASR

SEQ ID NO: 60305 - protein, 9 aa, Homo Sapiens
LAMPVMVLR

SEQ ID NO: 60306 - protein, 9 aa, Homo Sapiens
LINEESHFP

SEQ ID NO: 60307 - protein, 9 aa, Homo Sapiens
LINNKIANR

SEQ ID NO: 60308 - protein, 9 aa, Homo Sapiens
LIYNHITTR

SEQ ID NO: 60309 - protein, 9 aa, Homo Sapiens
LLHEKRYLR

SEQ ID NO: 60310 - protein, 9 aa, Homo Sapiens
LLNAVIVQR

SEQ ID NO: 60311 - protein, 9 aa, Homo Sapiens
LLNTGTCPR

SEQ ID NO: 60312 - protein, 9 aa, Homo Sapiens
LLQEHFYLR

SEQ ID NO: 60313 - protein, 9 aa, Homo Sapiens
LLQEKRFLR

SEQ ID NO: 60314 - protein, 9 aa, Homo Sapiens
LLQKSFLRR

SEQ ID NO: 60315 - protein, 9 aa, Homo Sapiens
LLRGGIAER

SEQ ID NO: 60316 - protein, 9 aa, Homo Sapiens
LLWYHTVVR

SEQ ID NO: 60317 - protein, 9 aa, Homo Sapiens
LLYSHPTSR

SEQ ID NO: 60318 - protein, 9 aa, Homo Sapiens
LMFDKTTNR

SEQ ID NO: 60319 - protein, 9 aa, Homo Sapiens
LMQQQKSFR

SEQ ID NO: 60320 - protein, 9 aa, Homo Sapiens
LQAPLPPMR

SEQ ID NO: 60321 - protein, 9 aa, Homo Sapiens
LQNAVIIQR

SEQ ID NO: 60322 - protein, 9 aa, Homo Sapiens
LQNDEVAFR

SEQ ID NO: 60323 - protein, 9 aa, Homo Sapiens
LQNEPIPER

SEQ ID NO: 60324 - protein, 9 aa, Homo Sapiens
LQNPDLALR

SEQ ID NO: 60325 - protein, 9 aa, Homo Sapiens
LQNVNITLR

SEQ ID NO: 60326 - protein, 9 aa, Homo Sapiens
LRLAELARR

SEQ ID NO: 60327 - protein, 9 aa, Homo Sapiens
LRNKTIFLR

SEQ ID NO: 60328 - protein, 9 aa, Homo Sapiens
LSSGLTAAR

SEQ ID NO: 60329 - protein, 9 aa, Homo Sapiens
LSSTVLIVR

SEQ ID NO: 60330 - protein, 9 aa, Homo Sapiens
LTGPVMPVR

SEQ ID NO: 60331 - protein, 9 aa, Homo Sapiens
LVATHDYYR

SEQ ID NO: 60332 - protein, 9 aa, Homo Sapiens
LVREIRQYR

SEQ ID NO: 60333 - protein, 9 aa, Homo Sapiens
LYDRQGIGR

SEQ ID NO: 60334 - protein, 9 aa, Homo Sapiens
MAPLKMLAL

SEQ ID NO: 60335 - protein, 9 aa, Homo Sapiens
MIRTKIAHR

SEQ ID NO: 60336 - protein, 9 aa, Homo Sapiens
MLNISPIGR

SEQ ID NO: 60337 - protein, 9 aa, Homo Sapiens
MLNTVLYAR

SEQ ID NO: 60338 - protein, 9 aa, Homo Sapiens
MLNVSPIGR

SEQ ID NO: 60339 - protein, 9 aa, Homo Sapiens
MLQTFISHR

SEQ ID NO: 60340 - protein, 9 aa, Homo Sapiens
MLWKKLIER

SEQ ID NO: 60341 - protein, 9 aa, Homo Sapiens
MLYGLIHAR

SEQ ID NO: 60342 - protein, 9 aa, Homo Sapiens
MMFSATFPK

SEQ ID NO: 60343 - protein, 9 aa, Homo Sapiens
MMTPYVVTR

SEQ ID NO: 60344 - protein, 9 aa, Homo Sapiens
MQAENIYNR

SEQ ID NO: 60345 - protein, 9 aa, Homo Sapiens
MVLAHVTNR

SEQ ID NO: 60346 - protein, 9 aa, Homo Sapiens
MVQNRVFLR

SEQ ID NO: 60347 - protein, 9 aa, Homo Sapiens
MVQRLTYRR

SEQ ID NO: 60348 - protein, 9 aa, Homo Sapiens
NVPVRDIPA

SEQ ID NO: 60349 - protein, 9 aa, Homo Sapiens
PIRLLAAAA

SEQ ID NO: 60350 - protein, 9 aa, Homo Sapiens
QIFSGTSKR

SEQ ID NO: 60351 - protein, 9 aa, Homo Sapiens
QIKNFLSKR

SEQ ID NO: 60352 - protein, 9 aa, Homo Sapiens
QIQKWIRTR

SEQ ID NO: 60353 - protein, 9 aa, Homo Sapiens
QITAVIINR

SEQ ID NO: 60354 - protein, 9 aa, Homo Sapiens
QLFHKEVLR

SEQ ID NO: 60355 - protein, 9 aa, Homo Sapiens
QLFSHTQLR

SEQ ID NO: 60356 - protein, 9 aa, Homo Sapiens
QLKAPHANR

SEQ ID NO: 60357 - protein, 9 aa, Homo Sapiens
QLMPALVQR

SEQ ID NO: 60358 - protein, 9 aa, Homo Sapiens
QLQDPREPR

SEQ ID NO: 60359 - protein, 9 aa, Homo Sapiens
QLREGICSR

SEQ ID NO: 60360 - protein, 9 aa, Homo Sapiens
QLRNFLAKR

SEQ ID NO: 60361 - protein, 9 aa, Homo Sapiens
QLYDRQLYR

SEQ ID NO: 60362 - protein, 9 aa, Homo Sapiens
QLYEYLQNR

SEQ ID NO: 60363 - protein, 9 aa, Homo Sapiens
QLYHSPARR

SEQ ID NO: 60364 - protein, 9 aa, Homo Sapiens
QLYPRNFLR

SEQ ID NO: 60365 - protein, 9 aa, Homo Sapiens
QMRPFLENR

SEQ ID NO: 60366 - protein, 9 aa, Homo Sapiens
QQLYWSHPR

SEQ ID NO: 60367 - protein, 9 aa, Homo Sapiens
QQNEVRVLR

SEQ ID NO: 60368 - protein, 9 aa, Homo Sapiens
QQNSGHFLR

SEQ ID NO: 60369 - protein, 9 aa, Homo Sapiens
QQQTQLNLR

SEQ ID NO: 60370 - protein, 9 aa, Homo Sapiens
QTCGKQFLR

SEQ ID NO: 60371 - protein, 9 aa, Homo Sapiens
QTFARTVAR

SEQ ID NO: 60372 - protein, 9 aa, Homo Sapiens
QTFYKFMKR

SEQ ID NO: 60373 - protein, 9 aa, Homo Sapiens
QTKPVVVYR

SEQ ID NO: 60374 - protein, 9 aa, Homo Sapiens
QTKPVYVYR

SEQ ID NO: 60375 - protein, 9 aa, Homo Sapiens
QTMFHHFQR

SEQ ID NO: 60376 - protein, 9 aa, Homo Sapiens
QTQSIYIPR

SEQ ID NO: 60377 - protein, 9 aa, Homo Sapiens
QVADVVVSR

SEQ ID NO: 60378 - protein, 9 aa, Homo Sapiens
QVAIKVIPR

SEQ ID NO: 60379 - protein, 9 aa, Homo Sapiens
QVFEKSPLR

SEQ ID NO: 60380 - protein, 9 aa, Homo Sapiens
QVNKAPKMR

SEQ ID NO: 60381 - protein, 9 aa, Homo Sapiens
QVRVWFQNR

SEQ ID NO: 60382 - protein, 9 aa, Homo Sapiens
RAGSRVAYR

SEQ ID NO: 60383 - protein, 9 aa, Homo Sapiens
RANMPLHVR

SEQ ID NO: 60384 - protein, 9 aa, Homo Sapiens
RARLQQFFR

SEQ ID NO: 60385 - protein, 9 aa, Homo Sapiens
RARPGVTLR

SEQ ID NO: 60386 - protein, 9 aa, Homo Sapiens
RASAIIIQR

SEQ ID NO: 60387 - protein, 9 aa, Homo Sapiens
RATEVTVAR

SEQ ID NO: 60388 - protein, 9 aa, Homo Sapiens
RIANGIATR

SEQ ID NO: 60389 - protein, 9 aa, Homo Sapiens
RIAQLICER

SEQ ID NO: 60390 - protein, 9 aa, Homo Sapiens
RICQIVSTR

SEQ ID NO: 60391 - protein, 9 aa, Homo Sapiens
RIFAGFRTR

SEQ ID NO: 60392 - protein, 9 aa, Homo Sapiens
RIFEKMFAM

SEQ ID NO: 60393 - protein, 9 aa, Homo Sapiens
RIFGKKQMR

SEQ ID NO: 60394 - protein, 9 aa, Homo Sapiens
RIFGPIWNR

SEQ ID NO: 60395 - protein, 9 aa, Homo Sapiens
RIFKPTHSR

SEQ ID NO: 60396 - protein, 9 aa, Homo Sapiens
RIFSGAVTR

SEQ ID NO: 60397 - protein, 9 aa, Homo Sapiens
RIFTLKPVR

SEQ ID NO: 60398 - protein, 9 aa, Homo Sapiens
RIFTSVPKR

SEQ ID NO: 60399 - protein, 9 aa, Homo Sapiens
RIGQAIARR

SEQ ID NO: 60400 - protein, 9 aa, Homo Sapiens
RIHSITAER

SEQ ID NO: 60401 - protein, 9 aa, Homo Sapiens
RIIEPLTSR

SEQ ID NO: 60402 - protein, 9 aa, Homo Sapiens
RIKEIFCPK

SEQ ID NO: 60403 - protein, 9 aa, Homo Sapiens
RIKEVLKER

SEQ ID NO: 60404 - protein, 9 aa, Homo Sapiens
RIKPPYANR

SEQ ID NO: 60405 - protein, 9 aa, Homo Sapiens
RILPRLQAR

SEQ ID NO: 60406 - protein, 9 aa, Homo Sapiens
RILPWSTFR

SEQ ID NO: 60407 - protein, 9 aa, Homo Sapiens
RIMAKYYTR

SEQ ID NO: 60408 - protein, 9 aa, Homo Sapiens
RIMKAQALR

SEQ ID NO: 60409 - protein, 9 aa, Homo Sapiens
RINERMPPR

SEQ ID NO: 60410 - protein, 9 aa, Homo Sapiens
RIPPPKVHR

SEQ ID NO: 60411 - protein, 9 aa, Homo Sapiens
RIQEEIAKR

SEQ ID NO: 60412 - protein, 9 aa, Homo Sapiens
RIRDIDLKR

SEQ ID NO: 60413 - protein, 9 aa, Homo Sapiens
RITNHIHVR

SEQ ID NO: 60414 - protein, 9 aa, Homo Sapiens
RITSLLAYR

SEQ ID NO: 60415 - protein, 9 aa, Homo Sapiens
RIYADPTKR

SEQ ID NO: 60416 - protein, 9 aa, Homo Sapiens
RIYEYVESR

SEQ ID NO: 60417 - protein, 9 aa, Homo Sapiens
RIYQYIQSR

SEQ ID NO: 60418 - protein, 9 aa, Homo Sapiens
RIYSKFHQK

SEQ ID NO: 60419 - protein, 9 aa, Homo Sapiens
RIYSYVVSR

SEQ ID NO: 60420 - protein, 9 aa, Homo Sapiens
RKIDTHPSP

SEQ ID NO: 60421 - protein, 9 aa, Homo Sapiens
RLADFAKER

SEQ ID NO: 60422 - protein, 9 aa, Homo Sapiens
RLADVFNQR

SEQ ID NO: 60423 - protein, 9 aa, Homo Sapiens
RLAEVIKNR

SEQ ID NO: 60424 - protein, 9 aa, Homo Sapiens
RLALAPAAR

SEQ ID NO: 60425 - protein, 9 aa, Homo Sapiens
RLAPIPRAR

SEQ ID NO: 60426 - protein, 9 aa, Homo Sapiens
RLAQEKALK

SEQ ID NO: 60427 - protein, 9 aa, Homo Sapiens
RLAQFIGNR

SEQ ID NO: 60428 - protein, 9 aa, Homo Sapiens
RLAQQLRQR

SEQ ID NO: 60429 - protein, 9 aa, Homo Sapiens
RLASNVAKR

SEQ ID NO: 60430 - protein, 9 aa, Homo Sapiens
RLAVRTVIR

SEQ ID NO: 60431 - protein, 9 aa, Homo Sapiens
RLCNWVSRR

SEQ ID NO: 60432 - protein, 9 aa, Homo Sapiens
RLCPHPLLR

SEQ ID NO: 60433 - protein, 9 aa, Homo Sapiens
RLDQMRKFR

SEQ ID NO: 60434 - protein, 9 aa, Homo Sapiens
RLEERYVPR

SEQ ID NO: 60435 - protein, 9 aa, Homo Sapiens
RLFCWIVTR

SEQ ID NO: 60436 - protein, 9 aa, Homo Sapiens
RLFEWVVNR

SEQ ID NO: 60437 - protein, 9 aa, Homo Sapiens
RLFFGPQHR

SEQ ID NO: 60438 - protein, 9 aa, Homo Sapiens
RLFGALLER

SEQ ID NO: 60439 - protein, 9 aa, Homo Sapiens
RLFHLHSQK

SEQ ID NO: 60440 - protein, 9 aa, Homo Sapiens
RLFNAIIHR

SEQ ID NO: 60441 - protein, 9 aa, Homo Sapiens
RLFPGLTSR

SEQ ID NO: 60442 - protein, 9 aa, Homo Sapiens
RLFPPAFRR

SEQ ID NO: 60443 - protein, 9 aa, Homo Sapiens
RLFQCLLHR

SEQ ID NO: 60444 - protein, 9 aa, Homo Sapiens
RLFQTAITR

SEQ ID NO: 60445 - protein, 9 aa, Homo Sapiens
RLFSIVRPR

SEQ ID NO: 60446 - protein, 9 aa, Homo Sapiens
RLFTEKILR

SEQ ID NO: 60447 - protein, 9 aa, Homo Sapiens
RLFVGSIPK

SEQ ID NO: 60448 - protein, 9 aa, Homo Sapiens
RLFVSVHLR

SEQ ID NO: 60449 - protein, 9 aa, Homo Sapiens
RLFWPFSKR

SEQ ID NO: 60450 - protein, 9 aa, Homo Sapiens
RLGEALPGR

SEQ ID NO: 60451 - protein, 9 aa, Homo Sapiens
RLGEKICTR

SEQ ID NO: 60452 - protein, 9 aa, Homo Sapiens
RLGQHSCLR

SEQ ID NO: 60453 - protein, 9 aa, Homo Sapiens
RLGQPLTGR

SEQ ID NO: 60454 - protein, 9 aa, Homo Sapiens
RLGQPPGVR

SEQ ID NO: 60455 - protein, 9 aa, Homo Sapiens
RLGYTPVCR

SEQ ID NO: 60456 - protein, 9 aa, Homo Sapiens
RLHDRIVFR

SEQ ID NO: 60457 - protein, 9 aa, Homo Sapiens
RLHGLEMER

SEQ ID NO: 60458 - protein, 9 aa, Homo Sapiens
RLHLTLRSA

SEQ ID NO: 60459 - protein, 9 aa, Homo Sapiens
RLHPFHVIR

SEQ ID NO: 60460 - protein, 9 aa, Homo Sapiens
RLIAELARR

SEQ ID NO: 60461 - protein, 9 aa, Homo Sapiens
RLIDQKWQR

SEQ ID NO: 60462 - protein, 9 aa, Homo Sapiens
RLIGTKTCR

SEQ ID NO: 60463 - protein, 9 aa, Homo Sapiens
RLIGWGQIR

SEQ ID NO: 60464 - protein, 9 aa, Homo Sapiens
RLIIKPYLR

SEQ ID NO: 60465 - protein, 9 aa, Homo Sapiens
RLISETAQR

SEQ ID NO: 60466 - protein, 9 aa, Homo Sapiens
RLKAAITIR

SEQ ID NO: 60467 - protein, 9 aa, Homo Sapiens
RLKDSWVER

SEQ ID NO: 60468 - protein, 9 aa, Homo Sapiens
RLKEEILNR

SEQ ID NO: 60469 - protein, 9 aa, Homo Sapiens
RLKEKLTSR

SEQ ID NO: 60470 - protein, 9 aa, Homo Sapiens
RLKEVFQTK

SEQ ID NO: 60471 - protein, 9 aa, Homo Sapiens
RLKIGFILR

SEQ ID NO: 60472 - protein, 9 aa, Homo Sapiens
RLKKFITRR

SEQ ID NO: 60473 - protein, 9 aa, Homo Sapiens
RLKLSDVAR

SEQ ID NO: 60474 - protein, 9 aa, Homo Sapiens
RLKMLGQTR

SEQ ID NO: 60475 - protein, 9 aa, Homo Sapiens
RLKPDWVLR

SEQ ID NO: 60476 - protein, 9 aa, Homo Sapiens
RLKTFPCKR

SEQ ID NO: 60477 - protein, 9 aa, Homo Sapiens
RLKYPPFAK

SEQ ID NO: 60478 - protein, 9 aa, Homo Sapiens
RLLDFLQKR

SEQ ID NO: 60479 - protein, 9 aa, Homo Sapiens
RLLDGIKQR

SEQ ID NO: 60480 - protein, 9 aa, Homo Sapiens
RLLEKPYVR

SEQ ID NO: 60481 - protein, 9 aa, Homo Sapiens
RLLHYFRGR

SEQ ID NO: 60482 - protein, 9 aa, Homo Sapiens
RLLKKQFFH

SEQ ID NO: 60483 - protein, 9 aa, Homo Sapiens
RLLSAVTAR

SEQ ID NO: 60484 - protein, 9 aa, Homo Sapiens
RLMKIGIVR

SEQ ID NO: 60485 - protein, 9 aa, Homo Sapiens
RLMKVFVTR

SEQ ID NO: 60486 - protein, 9 aa, Homo Sapiens
RLMMEQRSR

SEQ ID NO: 60487 - protein, 9 aa, Homo Sapiens
RLMQESVRR

SEQ ID NO: 60488 - protein, 9 aa, Homo Sapiens
RLNGLAAQR

SEQ ID NO: 60489 - protein, 9 aa, Homo Sapiens
RLNINARER

SEQ ID NO: 60490 - protein, 9 aa, Homo Sapiens
RLNSKQLNR

SEQ ID NO: 60491 - protein, 9 aa, Homo Sapiens
RLNSKWDLR

SEQ ID NO: 60492 - protein, 9 aa, Homo Sapiens
RLQARIAHR

SEQ ID NO: 60493 - protein, 9 aa, Homo Sapiens
RLQDAAVVR

SEQ ID NO: 60494 - protein, 9 aa, Homo Sapiens
RLQDNRQFR

SEQ ID NO: 60495 - protein, 9 aa, Homo Sapiens
RLQEIERRR

SEQ ID NO: 60496 - protein, 9 aa, Homo Sapiens
RLQEKLTSR

SEQ ID NO: 60497 - protein, 9 aa, Homo Sapiens
RLQHYFMGR

SEQ ID NO: 60498 - protein, 9 aa, Homo Sapiens
RLQKLWVGR

SEQ ID NO: 60499 - protein, 9 aa, Homo Sapiens
RLQPPRDLR

SEQ ID NO: 60500 - protein, 9 aa, Homo Sapiens
RLQQAQMLR

SEQ ID NO: 60501 - protein, 9 aa, Homo Sapiens
RLQQLRELR

SEQ ID NO: 60502 - protein, 9 aa, Homo Sapiens
RLQSIHTMR

SEQ ID NO: 60503 - protein, 9 aa, Homo Sapiens
RLRDDTELR

SEQ ID NO: 60504 - protein, 9 aa, Homo Sapiens
RLREGQTLR

SEQ ID NO: 60505 - protein, 9 aa, Homo Sapiens
RLREMIEKR

SEQ ID NO: 60506 - protein, 9 aa, Homo Sapiens
RLREPLLRR

SEQ ID NO: 60507 - protein, 9 aa, Homo Sapiens
RLRFSAFLR

SEQ ID NO: 60508 - protein, 9 aa, Homo Sapiens
RLRHQELFR

SEQ ID NO: 60509 - protein, 9 aa, Homo Sapiens
RLRQHWKLR

SEQ ID NO: 60510 - protein, 9 aa, Homo Sapiens
RLRREYLYR

SEQ ID NO: 60511 - protein, 9 aa, Homo Sapiens
RLSAKMALR

SEQ ID NO: 60512 - protein, 9 aa, Homo Sapiens
RLSDFQMHR

SEQ ID NO: 60513 - protein, 9 aa, Homo Sapiens
RLSDNPRAR

SEQ ID NO: 60514 - protein, 9 aa, Homo Sapiens
RLSDVTRER

SEQ ID NO: 60515 - protein, 9 aa, Homo Sapiens
RLSENVVNR

SEQ ID NO: 60516 - protein, 9 aa, Homo Sapiens
RLSKIGATR

SEQ ID NO: 60517 - protein, 9 aa, Homo Sapiens
RLSLQVVNR

SEQ ID NO: 60518 - protein, 9 aa, Homo Sapiens
RLSPFLAAR

SEQ ID NO: 60519 - protein, 9 aa, Homo Sapiens
RLSPVPVPR

SEQ ID NO: 60520 - protein, 9 aa, Homo Sapiens
RLSSAINHR

SEQ ID NO: 60521 - protein, 9 aa, Homo Sapiens
RLTNVAVVR

SEQ ID NO: 60522 - protein, 9 aa, Homo Sapiens
RLVESTSLR

SEQ ID NO: 60523 - protein, 9 aa, Homo Sapiens
RLVGIISSR

SEQ ID NO: 60524 - protein, 9 aa, Homo Sapiens
RLVKREYLR

SEQ ID NO: 60525 - protein, 9 aa, Homo Sapiens
RLWDFIENR

SEQ ID NO: 60526 - protein, 9 aa, Homo Sapiens
RLWDLQQLR

SEQ ID NO: 60527 - protein, 9 aa, Homo Sapiens
RLWDRAYVR

SEQ ID NO: 60528 - protein, 9 aa, Homo Sapiens
RLWEVATAR

SEQ ID NO: 60529 - protein, 9 aa, Homo Sapiens
RLWGNHKNR

SEQ ID NO: 60530 - protein, 9 aa, Homo Sapiens
RLWSLSYTK

SEQ ID NO: 60531 - protein, 9 aa, Homo Sapiens
RLYGGMNYR

SEQ ID NO: 60532 - protein, 9 aa, Homo Sapiens
RLYLNVLNR

SEQ ID NO: 60533 - protein, 9 aa, Homo Sapiens
RLYMKLVMR

SEQ ID NO: 60534 - protein, 9 aa, Homo Sapiens
RLYPTPRVR

SEQ ID NO: 60535 - protein, 9 aa, Homo Sapiens
RLYQGHTLR

SEQ ID NO: 60536 - protein, 9 aa, Homo Sapiens
RLYTKFSAR

SEQ ID NO: 60537 - protein, 9 aa, Homo Sapiens
RMAWKSFTR

SEQ ID NO: 60538 - protein, 9 aa, Homo Sapiens
RMFRWLVLR

SEQ ID NO: 60539 - protein, 9 aa, Homo Sapiens
RMHLSQIQR

SEQ ID NO: 60540 - protein, 9 aa, Homo Sapiens
RMISKQFHH

SEQ ID NO: 60541 - protein, 9 aa, Homo Sapiens
RMIVRVTNR

SEQ ID NO: 60542 - protein, 9 aa, Homo Sapiens
RMKEFERER

SEQ ID NO: 60543 - protein, 9 aa, Homo Sapiens
RMLERVIGR

SEQ ID NO: 60544 - protein, 9 aa, Homo Sapiens
RMLPSTSRR

SEQ ID NO: 60545 - protein, 9 aa, Homo Sapiens
RMQEENITR

SEQ ID NO: 60546 - protein, 9 aa, Homo Sapiens
RMTDKCFRK

SEQ ID NO: 60547 - protein, 9 aa, Homo Sapiens
RMVAVLVSR

SEQ ID NO: 60548 - protein, 9 aa, Homo Sapiens
RNTLFQLQR

SEQ ID NO: 60549 - protein, 9 aa, Homo Sapiens
RPVRGPLLR

SEQ ID NO: 60550 - protein, 9 aa, Homo Sapiens
RQAGLSYIR

SEQ ID NO: 60551 - protein, 9 aa, Homo Sapiens
RQASVIIQR

SEQ ID NO: 60552 - protein, 9 aa, Homo Sapiens
RQAVKTPPR

SEQ ID NO: 60553 - protein, 9 aa, Homo Sapiens
RQFFFINRR

SEQ ID NO: 60554 - protein, 9 aa, Homo Sapiens
RQFQARVSR

SEQ ID NO: 60555 - protein, 9 aa, Homo Sapiens
RQFQFKVKR

SEQ ID NO: 60556 - protein, 9 aa, Homo Sapiens
RQFYINVER

SEQ ID NO: 60557 - protein, 9 aa, Homo Sapiens
RQHQRFMAR

SEQ ID NO: 60558 - protein, 9 aa, Homo Sapiens
RQKEIVIDR

SEQ ID NO: 60559 - protein, 9 aa, Homo Sapiens
RQKELACLR

SEQ ID NO: 60560 - protein, 9 aa, Homo Sapiens
RQKEYVAPR

SEQ ID NO: 60561 - protein, 9 aa, Homo Sapiens
RQKFQILGR

SEQ ID NO: 60562 - protein, 9 aa, Homo Sapiens
RQKLEEALR

SEQ ID NO: 60563 - protein, 9 aa, Homo Sapiens
RQKPPIIHR

SEQ ID NO: 60564 - protein, 9 aa, Homo Sapiens
RQKQQLVER

SEQ ID NO: 60565 - protein, 9 aa, Homo Sapiens
RQLFRILFR

SEQ ID NO: 60566 - protein, 9 aa, Homo Sapiens
RQLKHSYYR

SEQ ID NO: 60567 - protein, 9 aa, Homo Sapiens
RQLWRVIER

SEQ ID NO: 60568 - protein, 9 aa, Homo Sapiens
RQMEMKILR

SEQ ID NO: 60569 - protein, 9 aa, Homo Sapiens
RQNLYTKYR

SEQ ID NO: 60570 - protein, 9 aa, Homo Sapiens
RQQASIISR

SEQ ID NO: 60571 - protein, 9 aa, Homo Sapiens
RQRAILYKR

SEQ ID NO: 60572 - protein, 9 aa, Homo Sapiens
RQSLHTYLR

SEQ ID NO: 60573 - protein, 9 aa, Homo Sapiens
RQTGIVLNR

SEQ ID NO: 60574 - protein, 9 aa, Homo Sapiens
RQVGIICER

SEQ ID NO: 60575 - protein, 9 aa, Homo Sapiens
RQVGMICER

SEQ ID NO: 60576 - protein, 9 aa, Homo Sapiens
RQYLDPAQR

SEQ ID NO: 60577 - protein, 9 aa, Homo Sapiens
RRFSLMTLR

SEQ ID NO: 60578 - protein, 9 aa, Homo Sapiens
RRPSFLPPR

SEQ ID NO: 60579 - protein, 9 aa, Homo Sapiens
RSAAKFYRR

SEQ ID NO: 60580 - protein, 9 aa, Homo Sapiens
RSAALSWLR

SEQ ID NO: 60581 - protein, 9 aa, Homo Sapiens
RSFGWKDQR

SEQ ID NO: 60582 - protein, 9 aa, Homo Sapiens
RSFSGLIKR

SEQ ID NO: 60583 - protein, 9 aa, Homo Sapiens
RSFSLGVPR

SEQ ID NO: 60584 - protein, 9 aa, Homo Sapiens
RSGFPRYNR

SEQ ID NO: 60585 - protein, 9 aa, Homo Sapiens
RSHSIFSIR

SEQ ID NO: 60586 - protein, 9 aa, Homo Sapiens
RSIYLQWNR

SEQ ID NO: 60587 - protein, 9 aa, Homo Sapiens
RSNPKIWNV

SEQ ID NO: 60588 - protein, 9 aa, Homo Sapiens
RSRPYAVLR

SEQ ID NO: 60589 - protein, 9 aa, Homo Sapiens
RSVGRIIGR

SEQ ID NO: 60590 - protein, 9 aa, Homo Sapiens
RSYLIIHQR

SEQ ID NO: 60591 - protein, 9 aa, Homo Sapiens
RSYLTVHKR

SEQ ID NO: 60592 - protein, 9 aa, Homo Sapiens
RSYPVTEQR

SEQ ID NO: 60593 - protein, 9 aa, Homo Sapiens
RSYTKAYSR

SEQ ID NO: 60594 - protein, 9 aa, Homo Sapiens
RSYVTTSTR

SEQ ID NO: 60595 - protein, 9 aa, Homo Sapiens
RTAALPTFR

SEQ ID NO: 60596 - protein, 9 aa, Homo Sapiens
RTFLHTVQR

SEQ ID NO: 60597 - protein, 9 aa, Homo Sapiens
RTFLSKTGR

SEQ ID NO: 60598 - protein, 9 aa, Homo Sapiens
RTFTWLVGK

SEQ ID NO: 60599 - protein, 9 aa, Homo Sapiens
RTIAPIIGR

SEQ ID NO: 60600 - protein, 9 aa, Homo Sapiens
RTILFGVKR

SEQ ID NO: 60601 - protein, 9 aa, Homo Sapiens
RTIRYLYRR

SEQ ID NO: 60602 - protein, 9 aa, Homo Sapiens
RTISETIER

SEQ ID NO: 60603 - protein, 9 aa, Homo Sapiens
RTKAPKIQR

SEQ ID NO: 60604 - protein, 9 aa, Homo Sapiens
RTKLSLIMR

SEQ ID NO: 60605 - protein, 9 aa, Homo Sapiens
RTLEKISSR

SEQ ID NO: 60606 - protein, 9 aa, Homo Sapiens
RTLIPRYFR

SEQ ID NO: 60607 - protein, 9 aa, Homo Sapiens
RTLLVADPR

SEQ ID NO: 60608 - protein, 9 aa, Homo Sapiens
RTLQEPVAR

SEQ ID NO: 60609 - protein, 9 aa, Homo Sapiens
RTLTYMSHR

SEQ ID NO: 60610 - protein, 9 aa, Homo Sapiens
RTLVTGALR

SEQ ID NO: 60611 - protein, 9 aa, Homo Sapiens
RTMALPVGR

SEQ ID NO: 60612 - protein, 9 aa, Homo Sapiens
RTNESLIQR

SEQ ID NO: 60613 - protein, 9 aa, Homo Sapiens
RTNHIGWVR

SEQ ID NO: 60614 - protein, 9 aa, Homo Sapiens
RTNILCTVR

SEQ ID NO: 60615 - protein, 9 aa, Homo Sapiens
RTNQFSVTR

SEQ ID NO: 60616 - protein, 9 aa, Homo Sapiens
RTNSCPIVR

SEQ ID NO: 60617 - protein, 9 aa, Homo Sapiens
RTPGPRPPR

SEQ ID NO: 60618 - protein, 9 aa, Homo Sapiens
RTPLMKAAR

SEQ ID NO: 60619 - protein, 9 aa, Homo Sapiens
RTQLLGQLR

SEQ ID NO: 60620 - protein, 9 aa, Homo Sapiens
RTRLAAWAR

SEQ ID NO: 60621 - protein, 9 aa, Homo Sapiens
RTRWSGITR

SEQ ID NO: 60622 - protein, 9 aa, Homo Sapiens
RTSASIILR

SEQ ID NO: 60623 - protein, 9 aa, Homo Sapiens
RTSEIYVHR

SEQ ID NO: 60624 - protein, 9 aa, Homo Sapiens
RTSFFHVKR

SEQ ID NO: 60625 - protein, 9 aa, Homo Sapiens
RTSIFIAHR

SEQ ID NO: 60626 - protein, 9 aa, Homo Sapiens
RTVEDVFLR

SEQ ID NO: 60627 - protein, 9 aa, Homo Sapiens
RTVEKTWKL

SEQ ID NO: 60628 - protein, 9 aa, Homo Sapiens
RTYQSITER

SEQ ID NO: 60629 - protein, 9 aa, Homo Sapiens
RTYYSPVYR

SEQ ID NO: 60630 - protein, 9 aa, Homo Sapiens
RVAAHPILR

SEQ ID NO: 60631 - protein, 9 aa, Homo Sapiens
RVEFPRSGR

SEQ ID NO: 60632 - protein, 9 aa, Homo Sapiens
RVFDMIRRR

SEQ ID NO: 60633 - protein, 9 aa, Homo Sapiens
RVFKTVNRR

SEQ ID NO: 60634 - protein, 9 aa, Homo Sapiens
RVFPHAEFR

SEQ ID NO: 60635 - protein, 9 aa, Homo Sapiens
RVFPMPLPR

SEQ ID NO: 60636 - protein, 9 aa, Homo Sapiens
RVFRNQLPR

SEQ ID NO: 60637 - protein, 9 aa, Homo Sapiens
RVFSLVGKR

SEQ ID NO: 60638 - protein, 9 aa, Homo Sapiens
RVGDVYIPR

SEQ ID NO: 60639 - protein, 9 aa, Homo Sapiens
RVGEFCHNR

SEQ ID NO: 60640 - protein, 9 aa, Homo Sapiens
RVGQAVALR

SEQ ID NO: 60641 - protein, 9 aa, Homo Sapiens
RVHSIFVLR

SEQ ID NO: 60642 - protein, 9 aa, Homo Sapiens
RVIAHTQMR

SEQ ID NO: 60643 - protein, 9 aa, Homo Sapiens
RVIKWLYGL

SEQ ID NO: 60644 - protein, 9 aa, Homo Sapiens
RVILPALSR

SEQ ID NO: 60645 - protein, 9 aa, Homo Sapiens
RVITALVER

SEQ ID NO: 60646 - protein, 9 aa, Homo Sapiens
RVIWGKVTR

SEQ ID NO: 60647 - protein, 9 aa, Homo Sapiens
RVKELEVRK

SEQ ID NO: 60648 - protein, 9 aa, Homo Sapiens
RVKEYFVFR

SEQ ID NO: 60649 - protein, 9 aa, Homo Sapiens
RVKGPGISK

SEQ ID NO: 60650 - protein, 9 aa, Homo Sapiens
RVKGVTIVK

SEQ ID NO: 60651 - protein, 9 aa, Homo Sapiens
RVLDALVAR

SEQ ID NO: 60652 - protein, 9 aa, Homo Sapiens
RVLDFDVKR

SEQ ID NO: 60653 - protein, 9 aa, Homo Sapiens
RVLEDRALK

SEQ ID NO: 60654 - protein, 9 aa, Homo Sapiens
RVLPAPAPR

SEQ ID NO: 60655 - protein, 9 aa, Homo Sapiens
RVLSKAFSR

SEQ ID NO: 60656 - protein, 9 aa, Homo Sapiens
RVLSQPQLR

SEQ ID NO: 60657 - protein, 9 aa, Homo Sapiens
RVLTAPTLR

SEQ ID NO: 60658 - protein, 9 aa, Homo Sapiens
RVMFKITAR

SEQ ID NO: 60659 - protein, 9 aa, Homo Sapiens
RVMGIRVLR

SEQ ID NO: 60660 - protein, 9 aa, Homo Sapiens
RVMKALVNR

SEQ ID NO: 60661 - protein, 9 aa, Homo Sapiens
RVNAELQAR

SEQ ID NO: 60662 - protein, 9 aa, Homo Sapiens
RVNEKEIVR

SEQ ID NO: 60663 - protein, 9 aa, Homo Sapiens
RVNIPKVLR

SEQ ID NO: 60664 - protein, 9 aa, Homo Sapiens
RVNKPPYPK

SEQ ID NO: 60665 - protein, 9 aa, Homo Sapiens
RVNLAKPMR

SEQ ID NO: 60666 - protein, 9 aa, Homo Sapiens
RVNQQIRLR

SEQ ID NO: 60667 - protein, 9 aa, Homo Sapiens
RVNVTGIYR

SEQ ID NO: 60668 - protein, 9 aa, Homo Sapiens
RVQDHIQSR

SEQ ID NO: 60669 - protein, 9 aa, Homo Sapiens
RVQEEVKLR

SEQ ID NO: 60670 - protein, 9 aa, Homo Sapiens
RVQFGVMTR

SEQ ID NO: 60671 - protein, 9 aa, Homo Sapiens
RVQKSPVFR

SEQ ID NO: 60672 - protein, 9 aa, Homo Sapiens
RVQLPKRYR

SEQ ID NO: 60673 - protein, 9 aa, Homo Sapiens
RVQPIKLAR

SEQ ID NO: 60674 - protein, 9 aa, Homo Sapiens
RVQVQVVER

SEQ ID NO: 60675 - protein, 9 aa, Homo Sapiens
RVQVVGTYR

SEQ ID NO: 60676 - protein, 9 aa, Homo Sapiens
RVQVWFQNR

SEQ ID NO: 60677 - protein, 9 aa, Homo Sapiens
RVRDVFEAK

SEQ ID NO: 60678 - protein, 9 aa, Homo Sapiens
RVREKPPWR

SEQ ID NO: 60679 - protein, 9 aa, Homo Sapiens
RVSADSFVR

SEQ ID NO: 60680 - protein, 9 aa, Homo Sapiens
RVSEVLQNR

SEQ ID NO: 60681 - protein, 9 aa, Homo Sapiens
RVSGILVKR

SEQ ID NO: 60682 - protein, 9 aa, Homo Sapiens
RVSGLVPSR

SEQ ID NO: 60683 - protein, 9 aa, Homo Sapiens
RVTGVSSFR

SEQ ID NO: 60684 - protein, 9 aa, Homo Sapiens
RVTLKQYPR

SEQ ID NO: 60685 - protein, 9 aa, Homo Sapiens
RVTNFVAQR

SEQ ID NO: 60686 - protein, 9 aa, Homo Sapiens
RVVGVTQPR

SEQ ID NO: 60687 - protein, 9 aa, Homo Sapiens
RVWDLRTGR

SEQ ID NO: 60688 - protein, 9 aa, Homo Sapiens
RVWKHLTTK

SEQ ID NO: 60689 - protein, 9 aa, Homo Sapiens
RVYHYFQWR

SEQ ID NO: 60690 - protein, 9 aa, Homo Sapiens
RVYNIYIRR

SEQ ID NO: 60691 - protein, 9 aa, Homo Sapiens
RVYNWDVKR

SEQ ID NO: 60692 - protein, 9 aa, Homo Sapiens
RVYQKPPMR

SEQ ID NO: 60693 - protein, 9 aa, Homo Sapiens
RVYRNFHYR

SEQ ID NO: 60694 - protein, 9 aa, Homo Sapiens
RVYTYIQSR

SEQ ID NO: 60695 - protein, 9 aa, Homo Sapiens
SALPWSINR

SEQ ID NO: 60696 - protein, 9 aa, Homo Sapiens
SGPGPAAAL

SEQ ID NO: 60697 - protein, 9 aa, Homo Sapiens
SICGKVFVR

SEQ ID NO: 60698 - protein, 9 aa, Homo Sapiens
SIFSNIKNR

SEQ ID NO: 60699 - protein, 9 aa, Homo Sapiens
SILLWATQR

SEQ ID NO: 60700 - protein, 9 aa, Homo Sapiens
SILSHIHKR

SEQ ID NO: 60701 - protein, 9 aa, Homo Sapiens
SIMKWNRER

SEQ ID NO: 60702 - protein, 9 aa, Homo Sapiens
SINKPTSER

SEQ ID NO: 60703 - protein, 9 aa, Homo Sapiens
SINQVVQLR

SEQ ID NO: 60704 - protein, 9 aa, Homo Sapiens
SINVHLSAR

SEQ ID NO: 60705 - protein, 9 aa, Homo Sapiens
SIQHPGGQR

SEQ ID NO: 60706 - protein, 9 aa, Homo Sapiens
SIQSFFYSR

SEQ ID NO: 60707 - protein, 9 aa, Homo Sapiens
SIRDPVHNR

SEQ ID NO: 60708 - protein, 9 aa, Homo Sapiens
SIREPIANR

SEQ ID NO: 60709 - protein, 9 aa, Homo Sapiens
SIRSFEMNR

SEQ ID NO: 60710 - protein, 9 aa, Homo Sapiens
SISGPFGSR

SEQ ID NO: 60711 - protein, 9 aa, Homo Sapiens
SLADIMAKR

SEQ ID NO: 60712 - protein, 9 aa, Homo Sapiens
SLANIARQR

SEQ ID NO: 60713 - protein, 9 aa, Homo Sapiens
SLAPPPRER

SEQ ID NO: 60714 - protein, 9 aa, Homo Sapiens
SLFAGGMLR

SEQ ID NO: 60715 - protein, 9 aa, Homo Sapiens
SLFKQTFQR

SEQ ID NO: 60716 - protein, 9 aa, Homo Sapiens
SLFQAFVKR

SEQ ID NO: 60717 - protein, 9 aa, Homo Sapiens
SLFRPGGRA

SEQ ID NO: 60718 - protein, 9 aa, Homo Sapiens
SLFSAVVAR

SEQ ID NO: 60719 - protein, 9 aa, Homo Sapiens
SLFSGRLVR

SEQ ID NO: 60720 - protein, 9 aa, Homo Sapiens
SLFTQTHQR

SEQ ID NO: 60721 - protein, 9 aa, Homo Sapiens
SLGPPPYLR

SEQ ID NO: 60722 - protein, 9 aa, Homo Sapiens
SLGSNTYNR

SEQ ID NO: 60723 - protein, 9 aa, Homo Sapiens
SLKAPPARP

SEQ ID NO: 60724 - protein, 9 aa, Homo Sapiens
SLLKKLFCR

SEQ ID NO: 60725 - protein, 9 aa, Homo Sapiens
SLMDKTFER

SEQ ID NO: 60726 - protein, 9 aa, Homo Sapiens
SLMQFSKPR

SEQ ID NO: 60727 - protein, 9 aa, Homo Sapiens
SLMSALAAR

SEQ ID NO: 60728 - protein, 9 aa, Homo Sapiens
SLMSQVSYR

SEQ ID NO: 60729 - protein, 9 aa, Homo Sapiens
SLNLRTFLR

SEQ ID NO: 60730 - protein, 9 aa, Homo Sapiens
SLNNKILNR

SEQ ID NO: 60731 - protein, 9 aa, Homo Sapiens
SLNPKNVNR

SEQ ID NO: 60732 - protein, 9 aa, Homo Sapiens
SLNPKTWGR

SEQ ID NO: 60733 - protein, 9 aa, Homo Sapiens
SLNPTSVAR

SEQ ID NO: 60734 - protein, 9 aa, Homo Sapiens
SLNTPGSFR

SEQ ID NO: 60735 - protein, 9 aa, Homo Sapiens
SLNVALPMR

SEQ ID NO: 60736 - protein, 9 aa, Homo Sapiens
SLQRWEHLK

SEQ ID NO: 60737 - protein, 9 aa, Homo Sapiens
SLQSAQYLR

SEQ ID NO: 60738 - protein, 9 aa, Homo Sapiens
SLRPFVQKR

SEQ ID NO: 60739 - protein, 9 aa, Homo Sapiens
SLRVHITSR

SEQ ID NO: 60740 - protein, 9 aa, Homo Sapiens
SLSSLTYQR

SEQ ID NO: 60741 - protein, 9 aa, Homo Sapiens
SLWKKTVYR

SEQ ID NO: 60742 - protein, 9 aa, Homo Sapiens
SLYGAARYR

SEQ ID NO: 60743 - protein, 9 aa, Homo Sapiens
SLYGPGTNR

SEQ ID NO: 60744 - protein, 9 aa, Homo Sapiens
SLYHQPANR

SEQ ID NO: 60745 - protein, 9 aa, Homo Sapiens
SLYSVVSLR

SEQ ID NO: 60746 - protein, 9 aa, Homo Sapiens
SMFDVHVKR

SEQ ID NO: 60747 - protein, 9 aa, Homo Sapiens
SMFQKIILR

SEQ ID NO: 60748 - protein, 9 aa, Homo Sapiens
SMFRKPYVR

SEQ ID NO: 60749 - protein, 9 aa, Homo Sapiens
SMRDHIDYR

SEQ ID NO: 60750 - protein, 9 aa, Homo Sapiens
SMSSTFFSR

SEQ ID NO: 60751 - protein, 9 aa, Homo Sapiens
SMWKGKTLR

SEQ ID NO: 60752 - protein, 9 aa, Homo Sapiens
SQFQGLPSR

SEQ ID NO: 60753 - protein, 9 aa, Homo Sapiens
SQNSLFTFR

SEQ ID NO: 60754 - protein, 9 aa, Homo Sapiens
SQNSVVIIR

SEQ ID NO: 60755 - protein, 9 aa, Homo Sapiens
SSKKVAFLR

SEQ ID NO: 60756 - protein, 9 aa, Homo Sapiens
SSRKEYFYR

SEQ ID NO: 60757 - protein, 9 aa, Homo Sapiens
SSYFRIHER

SEQ ID NO: 60758 - protein, 9 aa, Homo Sapiens
SSYPKQILR

SEQ ID NO: 60759 - protein, 9 aa, Homo Sapiens
STAKIQIVR

SEQ ID NO: 60760 - protein, 9 aa, Homo Sapiens
STARHLYLR

SEQ ID NO: 60761 - protein, 9 aa, Homo Sapiens
STFDTPYCR

SEQ ID NO: 60762 - protein, 9 aa, Homo Sapiens
STFEWVARR

SEQ ID NO: 60763 - protein, 9 aa, Homo Sapiens
STFTNITYR

SEQ ID NO: 60764 - protein, 9 aa, Homo Sapiens
STIPFHYKR

SEQ ID NO: 60765 - protein, 9 aa, Homo Sapiens
STISQRPYR

SEQ ID NO: 60766 - protein, 9 aa, Homo Sapiens
STKFPAYER

SEQ ID NO: 60767 - protein, 9 aa, Homo Sapiens
STLSPIAPR

SEQ ID NO: 60768 - protein, 9 aa, Homo Sapiens
STMPGLPTR

SEQ ID NO: 60769 - protein, 9 aa, Homo Sapiens
STNFKLIYR

SEQ ID NO: 60770 - protein, 9 aa, Homo Sapiens
STNIVSVCR

SEQ ID NO: 60771 - protein, 9 aa, Homo Sapiens
STNLKTHFR

SEQ ID NO: 60772 - protein, 9 aa, Homo Sapiens
STNPFRPQK

SEQ ID NO: 60773 - protein, 9 aa, Homo Sapiens
STNSHPILR

SEQ ID NO: 60774 - protein, 9 aa, Homo Sapiens
STQLFCSTR

SEQ ID NO: 60775 - protein, 9 aa, Homo Sapiens
STQLTIHQR

SEQ ID NO: 60776 - protein, 9 aa, Homo Sapiens
STREYVMFR

SEQ ID NO: 60777 - protein, 9 aa, Homo Sapiens
STRLFAVLR

SEQ ID NO: 60778 - protein, 9 aa, Homo Sapiens
STRPPSVTR

SEQ ID NO: 60779 - protein, 9 aa, Homo Sapiens
STSKRHWLR

SEQ ID NO: 60780 - protein, 9 aa, Homo Sapiens
STWLKGQVR

SEQ ID NO: 60781 - protein, 9 aa, Homo Sapiens
STYIRLYGR

SEQ ID NO: 60782 - protein, 9 aa, Homo Sapiens
SVARITCVR

SEQ ID NO: 60783 - protein, 9 aa, Homo Sapiens
SVFLYQSLR

SEQ ID NO: 60784 - protein, 9 aa, Homo Sapiens
SVFNEHPSR

SEQ ID NO: 60785 - protein, 9 aa, Homo Sapiens
SVFVATFLR

SEQ ID NO: 60786 - protein, 9 aa, Homo Sapiens
SVKDYCFAR

SEQ ID NO: 60787 - protein, 9 aa, Homo Sapiens
SVKFGATLR

SEQ ID NO: 60788 - protein, 9 aa, Homo Sapiens
SVKSITNPR

SEQ ID NO: 60789 - protein, 9 aa, Homo Sapiens
SVLAYSFSR

SEQ ID NO: 60790 - protein, 9 aa, Homo Sapiens
SVLEQSFLR

SEQ ID NO: 60791 - protein, 9 aa, Homo Sapiens
SVLNFATNR

SEQ ID NO: 60792 - protein, 9 aa, Homo Sapiens
SVNNLMAKR

SEQ ID NO: 60793 - protein, 9 aa, Homo Sapiens
SVNNSIFYR

SEQ ID NO: 60794 - protein, 9 aa, Homo Sapiens
SVNSHIYQR

SEQ ID NO: 60795 - protein, 9 aa, Homo Sapiens
SVNSVAVLR

SEQ ID NO: 60796 - protein, 9 aa, Homo Sapiens
SVQGIIIYR

SEQ ID NO: 60797 - protein, 9 aa, Homo Sapiens
SVRDCAWLR

SEQ ID NO: 60798 - protein, 9 aa, Homo Sapiens
SVRGFNMGR

SEQ ID NO: 60799 - protein, 9 aa, Homo Sapiens
SVSDLAPPR

SEQ ID NO: 60800 - protein, 9 aa, Homo Sapiens
SVSEVVVNR

SEQ ID NO: 60801 - protein, 9 aa, Homo Sapiens
SVSPVVHVR

SEQ ID NO: 60802 - protein, 9 aa, Homo Sapiens
SVWKMYHSR

SEQ ID NO: 60803 - protein, 9 aa, Homo Sapiens
SVWPFLVQR

SEQ ID NO: 60804 - protein, 9 aa, Homo Sapiens
TAPQGNVDL

SEQ ID NO: 60805 - protein, 9 aa, Homo Sapiens
TINDISVLR

SEQ ID NO: 60806 - protein, 9 aa, Homo Sapiens
TIRDRPFER

SEQ ID NO: 60807 - protein, 9 aa, Homo Sapiens
TIRSIYHVR

SEQ ID NO: 60808 - protein, 9 aa, Homo Sapiens
TIVSTRHYR

SEQ ID NO: 60809 - protein, 9 aa, Homo Sapiens
TLACRPWLR

SEQ ID NO: 60810 - protein, 9 aa, Homo Sapiens
TLFKGVITR

SEQ ID NO: 60811 - protein, 9 aa, Homo Sapiens
TLKPDPHLR

SEQ ID NO: 60812 - protein, 9 aa, Homo Sapiens
TLKSGISYR

SEQ ID NO: 60813 - protein, 9 aa, Homo Sapiens
TLLPSHPPR

SEQ ID NO: 60814 - protein, 9 aa, Homo Sapiens
TLMPHNYSR

SEQ ID NO: 60815 - protein, 9 aa, Homo Sapiens
TLRDLIFKR

SEQ ID NO: 60816 - protein, 9 aa, Homo Sapiens
TLRHYGYLR

SEQ ID NO: 60817 - protein, 9 aa, Homo Sapiens
TLRSSCLYR

SEQ ID NO: 60818 - protein, 9 aa, Homo Sapiens
TLSAVTNNR

SEQ ID NO: 60819 - protein, 9 aa, Homo Sapiens
TLSPAFSTR

SEQ ID NO: 60820 - protein, 9 aa, Homo Sapiens
TLYEGTWRR

SEQ ID NO: 60821 - protein, 9 aa, Homo Sapiens
TMNPSVVQR

SEQ ID NO: 60822 - protein, 9 aa, Homo Sapiens
TQHQIIHTR

SEQ ID NO: 60823 - protein, 9 aa, Homo Sapiens
TQLNTTWLR

SEQ ID NO: 60824 - protein, 9 aa, Homo Sapiens
TTFPESHLR

SEQ ID NO: 60825 - protein, 9 aa, Homo Sapiens
TTLTKIALR

SEQ ID NO: 60826 - protein, 9 aa, Homo Sapiens
TVHRGPLPR

SEQ ID NO: 60827 - protein, 9 aa, Homo Sapiens
TVKRGLVLR

SEQ ID NO: 60828 - protein, 9 aa, Homo Sapiens
TVKVQIHSR

SEQ ID NO: 60829 - protein, 9 aa, Homo Sapiens
TVMSVKIIR

SEQ ID NO: 60830 - protein, 9 aa, Homo Sapiens
TVRDAVVGR

SEQ ID NO: 60831 - protein, 9 aa, Homo Sapiens
TVRDHLVGR

SEQ ID NO: 60832 - protein, 9 aa, Homo Sapiens
TVYHSPVSR

SEQ ID NO: 60833 - protein, 9 aa, Homo Sapiens
VARDALLAR

SEQ ID NO: 60834 - protein, 9 aa, Homo Sapiens
VIFVKSVQR

SEQ ID NO: 60835 - protein, 9 aa, Homo Sapiens
VIKDKFIRR

SEQ ID NO: 60836 - protein, 9 aa, Homo Sapiens
VIKEVRINR

SEQ ID NO: 60837 - protein, 9 aa, Homo Sapiens
VIKPWITKR

SEQ ID NO: 60838 - protein, 9 aa, Homo Sapiens
VILPPRPPK

SEQ ID NO: 60839 - protein, 9 aa, Homo Sapiens
VINSVSTSR

SEQ ID NO: 60840 - protein, 9 aa, Homo Sapiens
VIRGYVGNR

SEQ ID NO: 60841 - protein, 9 aa, Homo Sapiens
VISNINITR

SEQ ID NO: 60842 - protein, 9 aa, Homo Sapiens
VKGPRGTLR

SEQ ID NO: 60843 - protein, 9 aa, Homo Sapiens
VKKGKPELR

SEQ ID NO: 60844 - protein, 9 aa, Homo Sapiens
VLAGPLAQR

SEQ ID NO: 60845 - protein, 9 aa, Homo Sapiens
VLAGRYSGR

SEQ ID NO: 60846 - protein, 9 aa, Homo Sapiens
VLGPPPPPR

SEQ ID NO: 60847 - protein, 9 aa, Homo Sapiens
VLGPVPLTR

SEQ ID NO: 60848 - protein, 9 aa, Homo Sapiens
VLKDIVSQR

SEQ ID NO: 60849 - protein, 9 aa, Homo Sapiens
VLKETVSQR

SEQ ID NO: 60850 - protein, 9 aa, Homo Sapiens
VLKEVVRQR

SEQ ID NO: 60851 - protein, 9 aa, Homo Sapiens
VLKHVLTPR

SEQ ID NO: 60852 - protein, 9 aa, Homo Sapiens
VLKSTPQVR

SEQ ID NO: 60853 - protein, 9 aa, Homo Sapiens
VLMEQPPLR

SEQ ID NO: 60854 - protein, 9 aa, Homo Sapiens
VLNGELPLR

SEQ ID NO: 60855 - protein, 9 aa, Homo Sapiens
VLNPTPIKR

SEQ ID NO: 60856 - protein, 9 aa, Homo Sapiens
VLQERVMTR

SEQ ID NO: 60857 - protein, 9 aa, Homo Sapiens
VLQVSAAPR

SEQ ID NO: 60858 - protein, 9 aa, Homo Sapiens
VLRKDIYQR

SEQ ID NO: 60859 - protein, 9 aa, Homo Sapiens
VLRQAIAER

SEQ ID NO: 60860 - protein, 9 aa, Homo Sapiens
VLSPPRWPR

SEQ ID NO: 60861 - protein, 9 aa, Homo Sapiens
VLTGYIYPR

SEQ ID NO: 60862 - protein, 9 aa, Homo Sapiens
VLWDKIVLR

SEQ ID NO: 60863 - protein, 9 aa, Homo Sapiens
VLYNGFTGR

SEQ ID NO: 60864 - protein, 9 aa, Homo Sapiens
VMKDFEEMR

SEQ ID NO: 60865 - protein, 9 aa, Homo Sapiens
VMQKRISFR

SEQ ID NO: 60866 - protein, 9 aa, Homo Sapiens
VMYGIVYTR

SEQ ID NO: 60867 - protein, 9 aa, Homo Sapiens
VMYSTLPGR

SEQ ID NO: 60868 - protein, 9 aa, Homo Sapiens
VQAGIFVER

SEQ ID NO: 60869 - protein, 9 aa, Homo Sapiens
VQGPVITTR

SEQ ID NO: 60870 - protein, 9 aa, Homo Sapiens
VQHEINTLR

SEQ ID NO: 60871 - protein, 9 aa, Homo Sapiens
VQKPSYYVR

SEQ ID NO: 60872 - protein, 9 aa, Homo Sapiens
VQQRYLSYR

SEQ ID NO: 60873 - protein, 9 aa, Homo Sapiens
VQVGPLPSR

SEQ ID NO: 60874 - protein, 9 aa, Homo Sapiens
VSNKWLHER

SEQ ID NO: 60875 - protein, 9 aa, Homo Sapiens
VTFPVRQPR

SEQ ID NO: 60876 - protein, 9 aa, Homo Sapiens
VTNAQAVLR

SEQ ID NO: 60877 - protein, 9 aa, Homo Sapiens
VTNNSVALR

SEQ ID NO: 60878 - protein, 9 aa, Homo Sapiens
VTYTEHAKR

SEQ ID NO: 60879 - protein, 9 aa, Homo Sapiens
VVAPRLNSR

SEQ ID NO: 60880 - protein, 9 aa, Homo Sapiens
VVDPHSFPR

SEQ ID NO: 60881 - protein, 9 aa, Homo Sapiens
VVFDSNTNR

SEQ ID NO: 60882 - protein, 9 aa, Homo Sapiens
VVFQKRQER

SEQ ID NO: 60883 - protein, 9 aa, Homo Sapiens
VVFVYVATR

SEQ ID NO: 60884 - protein, 9 aa, Homo Sapiens
VVNPKVFPH

SEQ ID NO: 60885 - protein, 9 aa, Homo Sapiens
VVQSSPVER

SEQ ID NO: 60886 - protein, 9 aa, Homo Sapiens
VVRSSRWVR

SEQ ID NO: 60887 - protein, 9 aa, Homo Sapiens
VVYPKVIER

SEQ ID NO: 60888 - protein, 9 aa, Homo Sapiens
WVSVVTPAR

SEQ ID NO: 60889 - protein, 9 aa, Homo Sapiens
YQYPSSQPR

SEQ ID NO: 60890 - protein, 9 aa, Homo Sapiens
YTQPGPGYR

SEQ ID NO: 60891 - protein, 9 aa, Homo Sapiens
YVQRFHYSR

SEQ ID NO: 60892 - protein, 10 aa, Homo Sapiens
AALYPPWRGV

SEQ ID NO: 60893 - protein, 10 aa, Homo Sapiens
AGEDPGLARQ

SEQ ID NO: 60894 - protein, 10 aa, Homo Sapiens
AGLQRLSKER

SEQ ID NO: 60895 - protein, 10 aa, Homo Sapiens
AIFKGVFVHR

SEQ ID NO: 60896 - protein, 10 aa, Homo Sapiens
AIMKVHRIYR

SEQ ID NO: 60897 - protein, 10 aa, Homo Sapiens
ALAMGSRALR

SEQ ID NO: 60898 - protein, 10 aa, Homo Sapiens
ALAPGLPTAR

SEQ ID NO: 60899 - protein, 10 aa, Homo Sapiens
ALAPKFPEYR

SEQ ID NO: 60900 - protein, 10 aa, Homo Sapiens
ALFASGLIHR

SEQ ID NO: 60901 - protein, 10 aa, Homo Sapiens
ALGTYYPPPR

SEQ ID NO: 60902 - protein, 10 aa, Homo Sapiens
ALKPGIHVPR

SEQ ID NO: 60903 - protein, 10 aa, Homo Sapiens
ALKQGNAIMR

SEQ ID NO: 60904 - protein, 10 aa, Homo Sapiens
ALMDRDLVHR

SEQ ID NO: 60905 - protein, 10 aa, Homo Sapiens
ALMDRGAIVR

SEQ ID NO: 60906 - protein, 10 aa, Homo Sapiens
ALNDAKRELR

SEQ ID NO: 60907 - protein, 10 aa, Homo Sapiens
ALNSIEGVYR

SEQ ID NO: 60908 - protein, 10 aa, Homo Sapiens
ALQEFSKVYR

SEQ ID NO: 60909 - protein, 10 aa, Homo Sapiens
ALQSHQPVAR

SEQ ID NO: 60910 - protein, 10 aa, Homo Sapiens
ALRHPIQVSR

SEQ ID NO: 60911 - protein, 10 aa, Homo Sapiens
AMFGPKGFGR

SEQ ID NO: 60912 - protein, 10 aa, Homo Sapiens
AMFHKVRVPR

SEQ ID NO: 60913 - protein, 10 aa, Homo Sapiens
AQCPFLGPPR

SEQ ID NO: 60914 - protein, 10 aa, Homo Sapiens
AQHGGIYVKR

SEQ ID NO: 60915 - protein, 10 aa, Homo Sapiens
AQKNYPYSPR

SEQ ID NO: 60916 - protein, 10 aa, Homo Sapiens
AQQNSGHFLR

SEQ ID NO: 60917 - protein, 10 aa, Homo Sapiens
AQWQKVLPRR

SEQ ID NO: 60918 - protein, 10 aa, Homo Sapiens
ARVVIERIAR

SEQ ID NO: 60919 - protein, 10 aa, Homo Sapiens
ASHSRPCVFR

SEQ ID NO: 60920 - protein, 10 aa, Homo Sapiens
ASNPCGNIQR

SEQ ID NO: 60921 - protein, 10 aa, Homo Sapiens
ATAAFGHVQR

SEQ ID NO: 60922 - protein, 10 aa, Homo Sapiens
ATAALAWRPP

SEQ ID NO: 60923 - protein, 10 aa, Homo Sapiens
ATAGIIGVNR

SEQ ID NO: 60924 - protein, 10 aa, Homo Sapiens
ATAYRPDWNR

SEQ ID NO: 60925 - protein, 10 aa, Homo Sapiens
ATFDRQELQR

SEQ ID NO: 60926 - protein, 10 aa, Homo Sapiens
ATNAAVTVLR

SEQ ID NO: 60927 - protein, 10 aa, Homo Sapiens
ATNGREGLLR

SEQ ID NO: 60928 - protein, 10 aa, Homo Sapiens
ATQPWNRIQR

SEQ ID NO: 60929 - protein, 10 aa, Homo Sapiens
ATREFIEMWR

SEQ ID NO: 60930 - protein, 10 aa, Homo Sapiens
AVAKLFWSQR

SEQ ID NO: 60931 - protein, 10 aa, Homo Sapiens
AVFPFKPPQR

SEQ ID NO: 60932 - protein, 10 aa, Homo Sapiens
AVIPCFPYAR

SEQ ID NO: 60933 - protein, 10 aa, Homo Sapiens
AVKQGRFYLR

SEQ ID NO: 60934 - protein, 10 aa, Homo Sapiens
EESNYELEGK

SEQ ID NO: 60935 - protein, 10 aa, Homo Sapiens
FIAILIARQC

SEQ ID NO: 60936 - protein, 10 aa, Homo Sapiens
GIKPPPIIGR

SEQ ID NO: 60937 - protein, 10 aa, Homo Sapiens
GLDKKVGAER

SEQ ID NO: 60938 - protein, 10 aa, Homo Sapiens
GQVITIGNER

SEQ ID NO: 60939 - protein, 10 aa, Homo Sapiens
GQYPIWMNQR

SEQ ID NO: 60940 - protein, 10 aa, Homo Sapiens
GTIAGLNVLR

SEQ ID NO: 60941 - protein, 10 aa, Homo Sapiens
GTLQPPFTAR

SEQ ID NO: 60942 - protein, 10 aa, Homo Sapiens
GTNADTPVLR

SEQ ID NO: 60943 - protein, 10 aa, Homo Sapiens
HLHQKGIIYR

SEQ ID NO: 60944 - protein, 10 aa, Homo Sapiens
HLQTGYKVER

SEQ ID NO: 60945 - protein, 10 aa, Homo Sapiens
HLRDFNFSRL

SEQ ID NO: 60946 - protein, 10 aa, Homo Sapiens
HLYEQPKINR

SEQ ID NO: 60947 - protein, 10 aa, Homo Sapiens
HQQLYWSHPR

SEQ ID NO: 60948 - protein, 10 aa, Homo Sapiens
HSQDLSGRLR

SEQ ID NO: 60949 - protein, 10 aa, Homo Sapiens
HTRTPPIIHR

SEQ ID NO: 60950 - protein, 10 aa, Homo Sapiens
HVYDGKFLAR

SEQ ID NO: 60951 - protein, 10 aa, Homo Sapiens
IANPNVPAYR

SEQ ID NO: 60952 - protein, 10 aa, Homo Sapiens
ILANNCPALR

SEQ ID NO: 60953 - protein, 10 aa, Homo Sapiens
ILKTGGGFQR

SEQ ID NO: 60954 - protein, 10 aa, Homo Sapiens
IQFQGGFSSR

SEQ ID NO: 60955 - protein, 10 aa, Homo Sapiens
IVKGPRGTLR

SEQ ID NO: 60956 - protein, 10 aa, Homo Sapiens
IVNDKSQNLR

SEQ ID NO: 60957 - protein, 10 aa, Homo Sapiens
IVNENLVERF

SEQ ID NO: 60958 - protein, 10 aa, Homo Sapiens
IVRPFSIETK

SEQ ID NO: 60959 - protein, 10 aa, Homo Sapiens
KAKQGYVIYR

SEQ ID NO: 60960 - protein, 10 aa, Homo Sapiens
KASELRIQLR

SEQ ID NO: 60961 - protein, 10 aa, Homo Sapiens
KICAAIPTSR

SEQ ID NO: 60962 - protein, 10 aa, Homo Sapiens
KIFAGKVLRL

SEQ ID NO: 60963 - protein, 10 aa, Homo Sapiens
KIHLQIARQR

SEQ ID NO: 60964 - protein, 10 aa, Homo Sapiens
KIKEGAENLR

SEQ ID NO: 60965 - protein, 10 aa, Homo Sapiens
KIKESVIISR

SEQ ID NO: 60966 - protein, 10 aa, Homo Sapiens
KIKIIAPPER

SEQ ID NO: 60967 - protein, 10 aa, Homo Sapiens
KIKNGTPPMR

SEQ ID NO: 60968 - protein, 10 aa, Homo Sapiens
KILEPGRRER

SEQ ID NO: 60969 - protein, 10 aa, Homo Sapiens
KIMPVQKQTR

SEQ ID NO: 60970 - protein, 10 aa, Homo Sapiens
KINPDWKTHR

SEQ ID NO: 60971 - protein, 10 aa, Homo Sapiens
KIRDLIAIER

SEQ ID NO: 60972 - protein, 10 aa, Homo Sapiens
KIRIEDPPRR

SEQ ID NO: 60973 - protein, 10 aa, Homo Sapiens
KIRPHIATLR

SEQ ID NO: 60974 - protein, 10 aa, Homo Sapiens
KIRPHITTLR

SEQ ID NO: 60975 - protein, 10 aa, Homo Sapiens
KISVVTKRER

SEQ ID NO: 60976 - protein, 10 aa, Homo Sapiens
KLAPGGHVGR

SEQ ID NO: 60977 - protein, 10 aa, Homo Sapiens
KLFEREPTKR

SEQ ID NO: 60978 - protein, 10 aa, Homo Sapiens
KLFQGQLVLR

SEQ ID NO: 60979 - protein, 10 aa, Homo Sapiens
KLFSPNIKFR

SEQ ID NO: 60980 - protein, 10 aa, Homo Sapiens
KLHVDPENFR

SEQ ID NO: 60981 - protein, 10 aa, Homo Sapiens
KLIETGERER

SEQ ID NO: 60982 - protein, 10 aa, Homo Sapiens
KLIEWENNRL

SEQ ID NO: 60983 - protein, 10 aa, Homo Sapiens
KLKEIQLQER

SEQ ID NO: 60984 - protein, 10 aa, Homo Sapiens
KLKTVDVIVR

SEQ ID NO: 60985 - protein, 10 aa, Homo Sapiens
KLLCGLLAER

SEQ ID NO: 60986 - protein, 10 aa, Homo Sapiens
KLLERIGIAR

SEQ ID NO: 60987 - protein, 10 aa, Homo Sapiens
KLLGGLAVRR

SEQ ID NO: 60988 - protein, 10 aa, Homo Sapiens
KLLLHRPFFR

SEQ ID NO: 60989 - protein, 10 aa, Homo Sapiens
KLLPNGFTKR

SEQ ID NO: 60990 - protein, 10 aa, Homo Sapiens
KLLWQDSRYR

SEQ ID NO: 60991 - protein, 10 aa, Homo Sapiens
KLMEMKKLLR

SEQ ID NO: 60992 - protein, 10 aa, Homo Sapiens
KLNAKLAELR

SEQ ID NO: 60993 - protein, 10 aa, Homo Sapiens
KLNPYAKTMR

SEQ ID NO: 60994 - protein, 10 aa, Homo Sapiens
KLNSIHISQR

SEQ ID NO: 60995 - protein, 10 aa, Homo Sapiens
KLQELKAILR

SEQ ID NO: 60996 - protein, 10 aa, Homo Sapiens
KLQEYLGKFR

SEQ ID NO: 60997 - protein, 10 aa, Homo Sapiens
KLQGSKRILR

SEQ ID NO: 60998 - protein, 10 aa, Homo Sapiens
KLREAEEALR

SEQ ID NO: 60999 - protein, 10 aa, Homo Sapiens
KLRQPFFQKR

SEQ ID NO: 61000 - protein, 10 aa, Homo Sapiens
KLTDIARHVR

SEQ ID NO: 61001 - protein, 10 aa, Homo Sapiens
KLTFISGRTK

SEQ ID NO: 61002 - protein, 10 aa, Homo Sapiens
KLVSFGRTLT

SEQ ID NO: 61003 - protein, 10 aa, Homo Sapiens
KLYPGKSLLR

SEQ ID NO: 61004 - protein, 10 aa, Homo Sapiens
KLYSEQRAIR

SEQ ID NO: 61005 - protein, 10 aa, Homo Sapiens
KMKDPKQIIR

SEQ ID NO: 61006 - protein, 10 aa, Homo Sapiens
KMLQTDPTAR

SEQ ID NO: 61007 - protein, 10 aa, Homo Sapiens
KMMADYGIRK

SEQ ID NO: 61008 - protein, 10 aa, Homo Sapiens
KMQEQLERNR

SEQ ID NO: 61009 - protein, 10 aa, Homo Sapiens
KMYEEHLKRM

SEQ ID NO: 61010 - protein, 10 aa, Homo Sapiens
KQFQKSLPPR

SEQ ID NO: 61011 - protein, 10 aa, Homo Sapiens
KQIASVMKHR

SEQ ID NO: 61012 - protein, 10 aa, Homo Sapiens
KQINIDFRTR

SEQ ID NO: 61013 - protein, 10 aa, Homo Sapiens
KQKDLSGFYR

SEQ ID NO: 61014 - protein, 10 aa, Homo Sapiens
KQLLKKEWLR

SEQ ID NO: 61015 - protein, 10 aa, Homo Sapiens
KQLNFVFTGR

SEQ ID NO: 61016 - protein, 10 aa, Homo Sapiens
KQNYVHRIGR

SEQ ID NO: 61017 - protein, 10 aa, Homo Sapiens
KQRDDILINR

SEQ ID NO: 61018 - protein, 10 aa, Homo Sapiens
KQRGEEMIAR

SEQ ID NO: 61019 - protein, 10 aa, Homo Sapiens
KQRHVQLLGR

SEQ ID NO: 61020 - protein, 10 aa, Homo Sapiens
KQSPLQKHLR

SEQ ID NO: 61021 - protein, 10 aa, Homo Sapiens
KQVDPSITRR

SEQ ID NO: 61022 - protein, 10 aa, Homo Sapiens
KQWYGKIVCR

SEQ ID NO: 61023 - protein, 10 aa, Homo Sapiens
KQYEEVMVKR

SEQ ID NO: 61024 - protein, 10 aa, Homo Sapiens
KQYNYLHEFR

SEQ ID NO: 61025 - protein, 10 aa, Homo Sapiens
KSAAWHGILR

SEQ ID NO: 61026 - protein, 10 aa, Homo Sapiens
KSANTEPYYR

SEQ ID NO: 61027 - protein, 10 aa, Homo Sapiens
KSFIRKDHLR

SEQ ID NO: 61028 - protein, 10 aa, Homo Sapiens
KSFLGINKER

SEQ ID NO: 61029 - protein, 10 aa, Homo Sapiens
KSFYQFQHYR

SEQ ID NO: 61030 - protein, 10 aa, Homo Sapiens
KSIWNNRWLR

SEQ ID NO: 61031 - protein, 10 aa, Homo Sapiens
KSKDFVQVMR

SEQ ID NO: 61032 - protein, 10 aa, Homo Sapiens
KSLDQAISRF

SEQ ID NO: 61033 - protein, 10 aa, Homo Sapiens
KSNSIIVSPR

SEQ ID NO: 61034 - protein, 10 aa, Homo Sapiens
KSREHGIAMR

SEQ ID NO: 61035 - protein, 10 aa, Homo Sapiens
KSSDIAKTFR

SEQ ID NO: 61036 - protein, 10 aa, Homo Sapiens
KTAGKRYVYR

SEQ ID NO: 61037 - protein, 10 aa, Homo Sapiens
KTAKLILERF

SEQ ID NO: 61038 - protein, 10 aa, Homo Sapiens
KTFEFNKELR

SEQ ID NO: 61039 - protein, 10 aa, Homo Sapiens
KTFPYQHRYR

SEQ ID NO: 61040 - protein, 10 aa, Homo Sapiens
KTFSDEGRLR

SEQ ID NO: 61041 - protein, 10 aa, Homo Sapiens
KTIDKKTFYK

SEQ ID NO: 61042 - protein, 10 aa, Homo Sapiens
KTIDMELVKR

SEQ ID NO: 61043 - protein, 10 aa, Homo Sapiens
KTIDTKTVCR

SEQ ID NO: 61044 - protein, 10 aa, Homo Sapiens
KTKDIVNGLR

SEQ ID NO: 61045 - protein, 10 aa, Homo Sapiens
KTKDPTAALR

SEQ ID NO: 61046 - protein, 10 aa, Homo Sapiens
KTKQEVEISR

SEQ ID NO: 61047 - protein, 10 aa, Homo Sapiens
KTKTEQFQAR

SEQ ID NO: 61048 - protein, 10 aa, Homo Sapiens
KTLPGPKIAR

SEQ ID NO: 61049 - protein, 10 aa, Homo Sapiens
KTLTGVLPER

SEQ ID NO: 61050 - protein, 10 aa, Homo Sapiens
KTMNEKAWKR

SEQ ID NO: 61051 - protein, 10 aa, Homo Sapiens
KTNAKLYCNR

SEQ ID NO: 61052 - protein, 10 aa, Homo Sapiens
KTQGLKIHQR

SEQ ID NO: 61053 - protein, 10 aa, Homo Sapiens
KTQKENTVFR

SEQ ID NO: 61054 - protein, 10 aa, Homo Sapiens
KTQQTRDVLR

SEQ ID NO: 61055 - protein, 10 aa, Homo Sapiens
KTRDAILQLR

SEQ ID NO: 61056 - protein, 10 aa, Homo Sapiens
KTRGFSFPRQ

SEQ ID NO: 61057 - protein, 10 aa, Homo Sapiens
KTRLGRNVYR

SEQ ID NO: 61058 - protein, 10 aa, Homo Sapiens
KTRPFEYLRL

SEQ ID NO: 61059 - protein, 10 aa, Homo Sapiens
KTRSERQLLR

SEQ ID NO: 61060 - protein, 10 aa, Homo Sapiens
KTSTVPPSLR

SEQ ID NO: 61061 - protein, 10 aa, Homo Sapiens
KTWFVEDINR

SEQ ID NO: 61062 - protein, 10 aa, Homo Sapiens
KVAQPKEVYR

SEQ ID NO: 61063 - protein, 10 aa, Homo Sapiens
KVCDLKWIHR

SEQ ID NO: 61064 - protein, 10 aa, Homo Sapiens
KVFCVQRPDR

SEQ ID NO: 61065 - protein, 10 aa, Homo Sapiens
KVFESWMHHW

SEQ ID NO: 61066 - protein, 10 aa, Homo Sapiens
KVFHAERIVR

SEQ ID NO: 61067 - protein, 10 aa, Homo Sapiens
KVFSIGPVFR

SEQ ID NO: 61068 - protein, 10 aa, Homo Sapiens
KVIERAAFPR

SEQ ID NO: 61069 - protein, 10 aa, Homo Sapiens
KVKAPPSVPR

SEQ ID NO: 61070 - protein, 10 aa, Homo Sapiens
KVKCPVFVVR

SEQ ID NO: 61071 - protein, 10 aa, Homo Sapiens
KVMELHKSYR

SEQ ID NO: 61072 - protein, 10 aa, Homo Sapiens
KVMHFVARVR

SEQ ID NO: 61073 - protein, 10 aa, Homo Sapiens
KVQEGERQLR

SEQ ID NO: 61074 - protein, 10 aa, Homo Sapiens
KVQTFPFLGR

SEQ ID NO: 61075 - protein, 10 aa, Homo Sapiens
KVRKIGELVR

SEQ ID NO: 61076 - protein, 10 aa, Homo Sapiens
LLQDLEKKER

SEQ ID NO: 61077 - protein, 10 aa, Homo Sapiens
LLWEEKFPER

SEQ ID NO: 61078 - protein, 10 aa, Homo Sapiens
LQFPVGRIHR

SEQ ID NO: 61079 - protein, 10 aa, Homo Sapiens
LQFPVGRVHR

SEQ ID NO: 61080 - protein, 10 aa, Homo Sapiens
LQNEPLPERL

SEQ ID NO: 61081 - protein, 10 aa, Homo Sapiens
LVNKRIGLYR

SEQ ID NO: 61082 - protein, 10 aa, Homo Sapiens
MIWRGRSTYR

SEQ ID NO: 61083 - protein, 10 aa, Homo Sapiens
MLAPPLGNTR

SEQ ID NO: 61084 - protein, 10 aa, Homo Sapiens
MLITERKHFR

SEQ ID NO: 61085 - protein, 10 aa, Homo Sapiens
MQYPFKPCMR

SEQ ID NO: 61086 - protein, 10 aa, Homo Sapiens
MTKSGYQPPR

SEQ ID NO: 61087 - protein, 10 aa, Homo Sapiens
NSRSRSPIQR

SEQ ID NO: 61088 - protein, 10 aa, Homo Sapiens
QLAQFHFTNR

SEQ ID NO: 61089 - protein, 10 aa, Homo Sapiens
QLFPGYGNGR

SEQ ID NO: 61090 - protein, 10 aa, Homo Sapiens
QLRQGQLTGR

SEQ ID NO: 61091 - protein, 10 aa, Homo Sapiens
QLYPWKYISR

SEQ ID NO: 61092 - protein, 10 aa, Homo Sapiens
QMYDKGLVYR

SEQ ID NO: 61093 - protein, 10 aa, Homo Sapiens
QTILHFPQNR

SEQ ID NO: 61094 - protein, 10 aa, Homo Sapiens
QTIPPPYVVR

SEQ ID NO: 61095 - protein, 10 aa, Homo Sapiens
QTKAPPFVAR

SEQ ID NO: 61096 - protein, 10 aa, Homo Sapiens
QVANSAFVER

SEQ ID NO: 61097 - protein, 10 aa, Homo Sapiens
QVKSGRPSLR

SEQ ID NO: 61098 - protein, 10 aa, Homo Sapiens
QVQPKPSPPR

SEQ ID NO: 61099 - protein, 10 aa, Homo Sapiens
RAKVEVNIPR

SEQ ID NO: 61100 - protein, 10 aa, Homo Sapiens
RALAMLQRFS

SEQ ID NO: 61101 - protein, 10 aa, Homo Sapiens
RALGVPFVPR

SEQ ID NO: 61102 - protein, 10 aa, Homo Sapiens
RGFRYNWPQR

SEQ ID NO: 61103 - protein, 10 aa, Homo Sapiens
RGSGLQLLPR

SEQ ID NO: 61104 - protein, 10 aa, Homo Sapiens
RHPLADILHR

SEQ ID NO: 61105 - protein, 10 aa, Homo Sapiens
RIAELQQRNR

SEQ ID NO: 61106 - protein, 10 aa, Homo Sapiens
RIAEPSVCGR

SEQ ID NO: 61107 - protein, 10 aa, Homo Sapiens
RIAQLVARQR

SEQ ID NO: 61108 - protein, 10 aa, Homo Sapiens
RIASHPILCR

SEQ ID NO: 61109 - protein, 10 aa, Homo Sapiens
RIGVITNRER

SEQ ID NO: 61110 - protein, 10 aa, Homo Sapiens
RIIPGGIADR

SEQ ID NO: 61111 - protein, 10 aa, Homo Sapiens
RIIPGGVAER

SEQ ID NO: 61112 - protein, 10 aa, Homo Sapiens
RIKDSENFRR

SEQ ID NO: 61113 - protein, 10 aa, Homo Sapiens
RIKLEGIITR

SEQ ID NO: 61114 - protein, 10 aa, Homo Sapiens
RIKRHLLTQR

SEQ ID NO: 61115 - protein, 10 aa, Homo Sapiens
RILKSPEIQR

SEQ ID NO: 61116 - protein, 10 aa, Homo Sapiens
RILNSHCFAR

SEQ ID NO: 61117 - protein, 10 aa, Homo Sapiens
RIMDRFNLPR

SEQ ID NO: 61118 - protein, 10 aa, Homo Sapiens
RIMELEGRVR

SEQ ID NO: 61119 - protein, 10 aa, Homo Sapiens
RINSYSGIKR

SEQ ID NO: 61120 - protein, 10 aa, Homo Sapiens
RIQAGDPVAR

SEQ ID NO: 61121 - protein, 10 aa, Homo Sapiens
RIQELEERRR

SEQ ID NO: 61122 - protein, 10 aa, Homo Sapiens
RIRAPIMRMR

SEQ ID NO: 61123 - protein, 10 aa, Homo Sapiens
RIREAAGLFR

SEQ ID NO: 61124 - protein, 10 aa, Homo Sapiens
RIREIELKNR

SEQ ID NO: 61125 - protein, 10 aa, Homo Sapiens
RIREILKASR

SEQ ID NO: 61126 - protein, 10 aa, Homo Sapiens
RIRPAVGWGR

SEQ ID NO: 61127 - protein, 10 aa, Homo Sapiens
RIYAGGEHYR

SEQ ID NO: 61128 - protein, 10 aa, Homo Sapiens
RIYAQKFIDR

SEQ ID NO: 61129 - protein, 10 aa, Homo Sapiens
RIYEIEDRTR

SEQ ID NO: 61130 - protein, 10 aa, Homo Sapiens
RIYELRNKER

SEQ ID NO: 61131 - protein, 10 aa, Homo Sapiens
RIYNGIGVSR

SEQ ID NO: 61132 - protein, 10 aa, Homo Sapiens
RLAAVVGVER

SEQ ID NO: 61133 - protein, 10 aa, Homo Sapiens
RLADTHFVQR

SEQ ID NO: 61134 - protein, 10 aa, Homo Sapiens
RLAEKLRAQK

SEQ ID NO: 61135 - protein, 10 aa, Homo Sapiens
RLAELARRQR

SEQ ID NO: 61136 - protein, 10 aa, Homo Sapiens
RLAELRQRQR

SEQ ID NO: 61137 - protein, 10 aa, Homo Sapiens
RLAPRFGTER

SEQ ID NO: 61138 - protein, 10 aa, Homo Sapiens
RLAQFIGNRR

SEQ ID NO: 61139 - protein, 10 aa, Homo Sapiens
RLFEWVVNRI

SEQ ID NO: 61140 - protein, 10 aa, Homo Sapiens
RLFNHPNILR

SEQ ID NO: 61141 - protein, 10 aa, Homo Sapiens
RLFPLLPLRP

SEQ ID NO: 61142 - protein, 10 aa, Homo Sapiens
RLFSIKPFYR

SEQ ID NO: 61143 - protein, 10 aa, Homo Sapiens
RLFSIVRPRR

SEQ ID NO: 61144 - protein, 10 aa, Homo Sapiens
RLGAPFTVGR

SEQ ID NO: 61145 - protein, 10 aa, Homo Sapiens
RLGPPKRPPR

SEQ ID NO: 61146 - protein, 10 aa, Homo Sapiens
RLHDSLAIER

SEQ ID NO: 61147 - protein, 10 aa, Homo Sapiens
RLHEEGIIYR

SEQ ID NO: 61148 - protein, 10 aa, Homo Sapiens
RLHELRIARL

SEQ ID NO: 61149 - protein, 10 aa, Homo Sapiens
RLHPRAVNCR

SEQ ID NO: 61150 - protein, 10 aa, Homo Sapiens
RLHQVQRITR

SEQ ID NO: 61151 - protein, 10 aa, Homo Sapiens
RLIGWGQIRR

SEQ ID NO: 61152 - protein, 10 aa, Homo Sapiens
RLIPDFPVAR

SEQ ID NO: 61153 - protein, 10 aa, Homo Sapiens
RLKDKIPNVR

SEQ ID NO: 61154 - protein, 10 aa, Homo Sapiens
RLKDSWVERL

SEQ ID NO: 61155 - protein, 10 aa, Homo Sapiens
RLKEDVLEQR

SEQ ID NO: 61156 - protein, 10 aa, Homo Sapiens
RLKEGININR

SEQ ID NO: 61157 - protein, 10 aa, Homo Sapiens
RLKFGFGFHR

SEQ ID NO: 61158 - protein, 10 aa, Homo Sapiens
RLKPFGVQRF

SEQ ID NO: 61159 - protein, 10 aa, Homo Sapiens
RLKQIKEFHR

SEQ ID NO: 61160 - protein, 10 aa, Homo Sapiens
RLKSRQGLLR

SEQ ID NO: 61161 - protein, 10 aa, Homo Sapiens
RLLEYTPTAR

SEQ ID NO: 61162 - protein, 10 aa, Homo Sapiens
RLLGKGGFAR

SEQ ID NO: 61163 - protein, 10 aa, Homo Sapiens
RLLHGSPNLR

SEQ ID NO: 61164 - protein, 10 aa, Homo Sapiens
RLLHHKRIYK

SEQ ID NO: 61165 - protein, 10 aa, Homo Sapiens
RLLNFQRQLR

SEQ ID NO: 61166 - protein, 10 aa, Homo Sapiens
RLLPPVGTGR

SEQ ID NO: 61167 - protein, 10 aa, Homo Sapiens
RLLQHTPSAR

SEQ ID NO: 61168 - protein, 10 aa, Homo Sapiens
RLLSAFLPAR

SEQ ID NO: 61169 - protein, 10 aa, Homo Sapiens
RLLSIVGRQR

SEQ ID NO: 61170 - protein, 10 aa, Homo Sapiens
RLLSPPLRPR

SEQ ID NO: 61171 - protein, 10 aa, Homo Sapiens
RLNPKNVHQR

SEQ ID NO: 61172 - protein, 10 aa, Homo Sapiens
RLNPQYPMFR

SEQ ID NO: 61173 - protein, 10 aa, Homo Sapiens
RLNSSPITTR

SEQ ID NO: 61174 - protein, 10 aa, Homo Sapiens
RLNTSIPQKR

SEQ ID NO: 61175 - protein, 10 aa, Homo Sapiens
RLPELARVLR

SEQ ID NO: 61176 - protein, 10 aa, Homo Sapiens
RLPTSKRSLR

SEQ ID NO: 61177 - protein, 10 aa, Homo Sapiens
RLQAWERAFR

SEQ ID NO: 61178 - protein, 10 aa, Homo Sapiens
RLQDLKSRFR

SEQ ID NO: 61179 - protein, 10 aa, Homo Sapiens
RLQDPQKVAR

SEQ ID NO: 61180 - protein, 10 aa, Homo Sapiens
RLQNEHRVLR

SEQ ID NO: 61181 - protein, 10 aa, Homo Sapiens
RLQPGPPRGR

SEQ ID NO: 61182 - protein, 10 aa, Homo Sapiens
RLQQAGNVLR

SEQ ID NO: 61183 - protein, 10 aa, Homo Sapiens
RLQQDNIRTR

SEQ ID NO: 61184 - protein, 10 aa, Homo Sapiens
RLRAVDFAER

SEQ ID NO: 61185 - protein, 10 aa, Homo Sapiens
RLRDPAQQVR

SEQ ID NO: 61186 - protein, 10 aa, Homo Sapiens
RLREEVTKLR

SEQ ID NO: 61187 - protein, 10 aa, Homo Sapiens
RLREGANINR

SEQ ID NO: 61188 - protein, 10 aa, Homo Sapiens
RLREKLTLLH

SEQ ID NO: 61189 - protein, 10 aa, Homo Sapiens
RLREPLLRRL

SEQ ID NO: 61190 - protein, 10 aa, Homo Sapiens
RLRFGPPAYR

SEQ ID NO: 61191 - protein, 10 aa, Homo Sapiens
RLRGSANAVR

SEQ ID NO: 61192 - protein, 10 aa, Homo Sapiens
RLRPEREPRL

SEQ ID NO: 61193 - protein, 10 aa, Homo Sapiens
RLRPGDGLLR

SEQ ID NO: 61194 - protein, 10 aa, Homo Sapiens
RLSDVLKRKR

SEQ ID NO: 61195 - protein, 10 aa, Homo Sapiens
RLSFVRNRCR

SEQ ID NO: 61196 - protein, 10 aa, Homo Sapiens
RLSPSPTSQR

SEQ ID NO: 61197 - protein, 10 aa, Homo Sapiens
RLTKHTKFVR

SEQ ID NO: 61198 - protein, 10 aa, Homo Sapiens
RLWDRAYVRL

SEQ ID NO: 61199 - protein, 10 aa, Homo Sapiens
RLYSENDRLR

SEQ ID NO: 61200 - protein, 10 aa, Homo Sapiens
RLYVRVKTER

SEQ ID NO: 61201 - protein, 10 aa, Homo Sapiens
RMFAPTKTWR

SEQ ID NO: 61202 - protein, 10 aa, Homo Sapiens
RMFDQQICHR

SEQ ID NO: 61203 - protein, 10 aa, Homo Sapiens
RMFEFQNFER

SEQ ID NO: 61204 - protein, 10 aa, Homo Sapiens
RMFLSFPTTK

SEQ ID NO: 61205 - protein, 10 aa, Homo Sapiens
RMLELPTIYR

SEQ ID NO: 61206 - protein, 10 aa, Homo Sapiens
RMLTSGVVHR

SEQ ID NO: 61207 - protein, 10 aa, Homo Sapiens
RMMNCPKILR

SEQ ID NO: 61208 - protein, 10 aa, Homo Sapiens
RMQEKHLHLR

SEQ ID NO: 61209 - protein, 10 aa, Homo Sapiens
RMRHLKIVYR

SEQ ID NO: 61210 - protein, 10 aa, Homo Sapiens
RQAEVKRLFR

SEQ ID NO: 61211 - protein, 10 aa, Homo Sapiens
RQAFLSGRSR

SEQ ID NO: 61212 - protein, 10 aa, Homo Sapiens
RQATVAMMNR

SEQ ID NO: 61213 - protein, 10 aa, Homo Sapiens
RQHTFALHQR

SEQ ID NO: 61214 - protein, 10 aa, Homo Sapiens
RQINWTVLYR

SEQ ID NO: 61215 - protein, 10 aa, Homo Sapiens
RQKELESNYR

SEQ ID NO: 61216 - protein, 10 aa, Homo Sapiens
RQKGINGQLR

SEQ ID NO: 61217 - protein, 10 aa, Homo Sapiens
RQNKLTYTMR

SEQ ID NO: 61218 - protein, 10 aa, Homo Sapiens
RQQETEHIPR

SEQ ID NO: 61219 - protein, 10 aa, Homo Sapiens
RQQHPPPPPR

SEQ ID NO: 61220 - protein, 10 aa, Homo Sapiens
RSKDLRHAFR

SEQ ID NO: 61221 - protein, 10 aa, Homo Sapiens
RSNKLHFAFR

SEQ ID NO: 61222 - protein, 10 aa, Homo Sapiens
RSQDWKFALR

SEQ ID NO: 61223 - protein, 10 aa, Homo Sapiens
RSQEYKIVLR

SEQ ID NO: 61224 - protein, 10 aa, Homo Sapiens
RSQKPVMVKR

SEQ ID NO: 61225 - protein, 10 aa, Homo Sapiens
RSYKARLPLR

SEQ ID NO: 61226 - protein, 10 aa, Homo Sapiens
RTAFGAVCRR

SEQ ID NO: 61227 - protein, 10 aa, Homo Sapiens
RTAFLKHTQR

SEQ ID NO: 61228 - protein, 10 aa, Homo Sapiens
RTEGRPTVNR

SEQ ID NO: 61229 - protein, 10 aa, Homo Sapiens
RTFLLQGLLR

SEQ ID NO: 61230 - protein, 10 aa, Homo Sapiens
RTFSRHVVQR

SEQ ID NO: 61231 - protein, 10 aa, Homo Sapiens
RTFSSIPVSR

SEQ ID NO: 61232 - protein, 10 aa, Homo Sapiens
RTGPPMGSRF

SEQ ID NO: 61233 - protein, 10 aa, Homo Sapiens
RTHSLRYFRL

SEQ ID NO: 61234 - protein, 10 aa, Homo Sapiens
RTIAKRLVLR

SEQ ID NO: 61235 - protein, 10 aa, Homo Sapiens
RTINVYPNFR

SEQ ID NO: 61236 - protein, 10 aa, Homo Sapiens
RTITARITGR

SEQ ID NO: 61237 - protein, 10 aa, Homo Sapiens
RTKQEVLSLR

SEQ ID NO: 61238 - protein, 10 aa, Homo Sapiens
RTKTELSQLR

SEQ ID NO: 61239 - protein, 10 aa, Homo Sapiens
RTLEFIPKGR

SEQ ID NO: 61240 - protein, 10 aa, Homo Sapiens
RTLPWSSVLR

SEQ ID NO: 61241 - protein, 10 aa, Homo Sapiens
RTLYERIVSR

SEQ ID NO: 61242 - protein, 10 aa, Homo Sapiens
RTNQFSVTRH

SEQ ID NO: 61243 - protein, 10 aa, Homo Sapiens
RTPGNERPPR

SEQ ID NO: 61244 - protein, 10 aa, Homo Sapiens
RTREEIQEVR

SEQ ID NO: 61245 - protein, 10 aa, Homo Sapiens
RTRKFMTNRL

SEQ ID NO: 61246 - protein, 10 aa, Homo Sapiens
RTSEGVLRNR

SEQ ID NO: 61247 - protein, 10 aa, Homo Sapiens
RTSRPLKILR

SEQ ID NO: 61248 - protein, 10 aa, Homo Sapiens
RTVEGALKER

SEQ ID NO: 61249 - protein, 10 aa, Homo Sapiens
RTYDREGFKK

SEQ ID NO: 61250 - protein, 10 aa, Homo Sapiens
RTYSLGSALR

SEQ ID NO: 61251 - protein, 10 aa, Homo Sapiens
RVAAWGGKLR

SEQ ID NO: 61252 - protein, 10 aa, Homo Sapiens
RVADVYRYCR

SEQ ID NO: 61253 - protein, 10 aa, Homo Sapiens
RVAPSLKSQR

SEQ ID NO: 61254 - protein, 10 aa, Homo Sapiens
RVATVTRILR

SEQ ID NO: 61255 - protein, 10 aa, Homo Sapiens
RVAVVNQIAR

SEQ ID NO: 61256 - protein, 10 aa, Homo Sapiens
RVFIGGKINR

SEQ ID NO: 61257 - protein, 10 aa, Homo Sapiens
RVFQGFFTGR

SEQ ID NO: 61258 - protein, 10 aa, Homo Sapiens
RVFRGRFQGR

SEQ ID NO: 61259 - protein, 10 aa, Homo Sapiens
RVFVVKRQNR

SEQ ID NO: 61260 - protein, 10 aa, Homo Sapiens
RVGDNWREAR

SEQ ID NO: 61261 - protein, 10 aa, Homo Sapiens
RVHLPSSIYR

SEQ ID NO: 61262 - protein, 10 aa, Homo Sapiens
RVHSIFVLRL

SEQ ID NO: 61263 - protein, 10 aa, Homo Sapiens
RVIIEKYYTR

SEQ ID NO: 61264 - protein, 10 aa, Homo Sapiens
RVKDLMVINR

SEQ ID NO: 61265 - protein, 10 aa, Homo Sapiens
RVKLPSGSKK

SEQ ID NO: 61266 - protein, 10 aa, Homo Sapiens
RVKNFGIWLR

SEQ ID NO: 61267 - protein, 10 aa, Homo Sapiens
RVKQLQENRL

SEQ ID NO: 61268 - protein, 10 aa, Homo Sapiens
RVKTVWLVGR

SEQ ID NO: 61269 - protein, 10 aa, Homo Sapiens
RVLDVGFVGR

SEQ ID NO: 61270 - protein, 10 aa, Homo Sapiens
RVLEGFIKGR

SEQ ID NO: 61271 - protein, 10 aa, Homo Sapiens
RVLHLEKRER

SEQ ID NO: 61272 - protein, 10 aa, Homo Sapiens
RVLRQISNNR

SEQ ID NO: 61273 - protein, 10 aa, Homo Sapiens
RVLSKAFSRL

SEQ ID NO: 61274 - protein, 10 aa, Homo Sapiens
RVMFDKITSR

SEQ ID NO: 61275 - protein, 10 aa, Homo Sapiens
RVNGSLAVSR

SEQ ID NO: 61276 - protein, 10 aa, Homo Sapiens
RVNKPPYPKL

SEQ ID NO: 61277 - protein, 10 aa, Homo Sapiens
RVQECNYNRL

SEQ ID NO: 61278 - protein, 10 aa, Homo Sapiens
RVQLHIFTGR

SEQ ID NO: 61279 - protein, 10 aa, Homo Sapiens
RVQPRAPCLR

SEQ ID NO: 61280 - protein, 10 aa, Homo Sapiens
RVQSPKPLFR

SEQ ID NO: 61281 - protein, 10 aa, Homo Sapiens
RVRDIAIATR

SEQ ID NO: 61282 - protein, 10 aa, Homo Sapiens
RVRDIQKQVR

SEQ ID NO: 61283 - protein, 10 aa, Homo Sapiens
RVRQSPLATR

SEQ ID NO: 61284 - protein, 10 aa, Homo Sapiens
RVSEVKPSYR

SEQ ID NO: 61285 - protein, 10 aa, Homo Sapiens
RVSPQPMISR

SEQ ID NO: 61286 - protein, 10 aa, Homo Sapiens
RVSPTSPRLR

SEQ ID NO: 61287 - protein, 10 aa, Homo Sapiens
RVSTSHQPLR

SEQ ID NO: 61288 - protein, 10 aa, Homo Sapiens
RVTPAAANYR

SEQ ID NO: 61289 - protein, 10 aa, Homo Sapiens
RVVLVEGKAR

SEQ ID NO: 61290 - protein, 10 aa, Homo Sapiens
RVWIQGKFQK

SEQ ID NO: 61291 - protein, 10 aa, Homo Sapiens
RVYHYFQWRR

SEQ ID NO: 61292 - protein, 10 aa, Homo Sapiens
RYRPGTVALR

SEQ ID NO: 61293 - protein, 10 aa, Homo Sapiens
SDMSLTACKV

SEQ ID NO: 61294 - protein, 10 aa, Homo Sapiens
SIAGCRIIGR

SEQ ID NO: 61295 - protein, 10 aa, Homo Sapiens
SIMKWNRERR

SEQ ID NO: 61296 - protein, 10 aa, Homo Sapiens
SLAGGIWHGR

SEQ ID NO: 61297 - protein, 10 aa, Homo Sapiens
SLFRGEHHSR

SEQ ID NO: 61298 - protein, 10 aa, Homo Sapiens
SLGTLNFPGR

SEQ ID NO: 61299 - protein, 10 aa, Homo Sapiens
SLKGSFGVTR

SEQ ID NO: 61300 - protein, 10 aa, Homo Sapiens
SLLASGRAPR

SEQ ID NO: 61301 - protein, 10 aa, Homo Sapiens
SLNPKTWGRL

SEQ ID NO: 61302 - protein, 10 aa, Homo Sapiens
SLRDYTPASR

SEQ ID NO: 61303 - protein, 10 aa, Homo Sapiens
SLRSVVGISR

SEQ ID NO: 61304 - protein, 10 aa, Homo Sapiens
SLSDRTNLYR

SEQ ID NO: 61305 - protein, 10 aa, Homo Sapiens
SLSPIYPAAR

SEQ ID NO: 61306 - protein, 10 aa, Homo Sapiens
SLTGHISTVR

SEQ ID NO: 61307 - protein, 10 aa, Homo Sapiens
SMRPPIIIHR

SEQ ID NO: 61308 - protein, 10 aa, Homo Sapiens
SSHKTFRIKR

SEQ ID NO: 61309 - protein, 10 aa, Homo Sapiens
STKKIPTVNR

SEQ ID NO: 61310 - protein, 10 aa, Homo Sapiens
STKPGSYIFR

SEQ ID NO: 61311 - protein, 10 aa, Homo Sapiens
STKSFPPCMR

SEQ ID NO: 61312 - protein, 10 aa, Homo Sapiens
STRGKPNFTR

SEQ ID NO: 61313 - protein, 10 aa, Homo Sapiens
STTGHCVHMR

SEQ ID NO: 61314 - protein, 10 aa, Homo Sapiens
STYYGSFVTR

SEQ ID NO: 61315 - protein, 10 aa, Homo Sapiens
SVASLVGRSK

SEQ ID NO: 61316 - protein, 10 aa, Homo Sapiens
SVIPDREYLR

SEQ ID NO: 61317 - protein, 10 aa, Homo Sapiens
SVLEATRVNR

SEQ ID NO: 61318 - protein, 10 aa, Homo Sapiens
SVMYSTLPGR

SEQ ID NO: 61319 - protein, 10 aa, Homo Sapiens
SVRPKPFLNR

SEQ ID NO: 61320 - protein, 10 aa, Homo Sapiens
TGSRPIPSRP

SEQ ID NO: 61321 - protein, 10 aa, Homo Sapiens
TIMDRSIILR

SEQ ID NO: 61322 - protein, 10 aa, Homo Sapiens
TLLEISKRFR

SEQ ID NO: 61323 - protein, 10 aa, Homo Sapiens
TLREYKVVGR

SEQ ID NO: 61324 - protein, 10 aa, Homo Sapiens
TLRKPPAVGR

SEQ ID NO: 61325 - protein, 10 aa, Homo Sapiens
TMYPGLPSRL

SEQ ID NO: 61326 - protein, 10 aa, Homo Sapiens
TTLSRERWLR

SEQ ID NO: 61327 - protein, 10 aa, Homo Sapiens
TVFPHGLPPR

SEQ ID NO: 61328 - protein, 10 aa, Homo Sapiens
TVKATGPALR

SEQ ID NO: 61329 - protein, 10 aa, Homo Sapiens
TVKKGKPELR

SEQ ID NO: 61330 - protein, 10 aa, Homo Sapiens
TVNTSLNVYR

SEQ ID NO: 61331 - protein, 10 aa, Homo Sapiens
TVQKETIHPR

SEQ ID NO: 61332 - protein, 10 aa, Homo Sapiens
TVVSIQRRYR

SEQ ID NO: 61333 - protein, 10 aa, Homo Sapiens
VIIGGDGRRN

SEQ ID NO: 61334 - protein, 10 aa, Homo Sapiens
VKPDQLIKRR

SEQ ID NO: 61335 - protein, 10 aa, Homo Sapiens
VLNEGMPIYR

SEQ ID NO: 61336 - protein, 10 aa, Homo Sapiens
VLVAVKGAHV

SEQ ID NO: 61337 - protein, 10 aa, Homo Sapiens
VLWRKGDIVR

SEQ ID NO: 61338 - protein, 10 aa, Homo Sapiens
VLYDRQGIGR

SEQ ID NO: 61339 - protein, 10 aa, Homo Sapiens
VQAFVRHMQR

SEQ ID NO: 61340 - protein, 10 aa, Homo Sapiens
VQFPHESSPR

SEQ ID NO: 61341 - protein, 10 aa, Homo Sapiens
VQKPGFGVGR

SEQ ID NO: 61342 - protein, 10 aa, Homo Sapiens
VQKPPLNIQR

SEQ ID NO: 61343 - protein, 10 aa, Homo Sapiens
VVKPQSVTVR

SEQ ID NO: 61344 - protein, 10 aa, Homo Sapiens
VVKVGGPVYR

SEQ ID NO: 61345 - protein, 10 aa, Homo Sapiens
VVQGDPRELR

SEQ ID NO: 61346 - protein, 10 aa, Homo Sapiens
VVQQVKGHYR

SEQ ID NO: 61347 - protein, 10 aa, Homo Sapiens
VVREPSGTLR

SEQ ID NO: 61348 - protein, 10 aa, Homo Sapiens
VVYALKRQGR

SEQ ID NO: 61349 - protein, 10 aa, Homo Sapiens
WSIMKWNRER

SEQ ID NO: 61350 - protein, 11 aa, Homo Sapiens
AIQGKEVRFLR

SEQ ID NO: 61351 - protein, 11 aa, Homo Sapiens
AIWSGAALRAR

SEQ ID NO: 61352 - protein, 11 aa, Homo Sapiens
ALAAEALRVAR

SEQ ID NO: 61353 - protein, 11 aa, Homo Sapiens
ALAKFKSSIYR

SEQ ID NO: 61354 - protein, 11 aa, Homo Sapiens
ALAPAEVQVLR

SEQ ID NO: 61355 - protein, 11 aa, Homo Sapiens
ALFNPDVCWDR

SEQ ID NO: 61356 - protein, 11 aa, Homo Sapiens
ALGTYYPPPRL

SEQ ID NO: 61357 - protein, 11 aa, Homo Sapiens
ALIPHSDQRLR

SEQ ID NO: 61358 - protein, 11 aa, Homo Sapiens
ALKPLRDVFQR

SEQ ID NO: 61359 - protein, 11 aa, Homo Sapiens
ALLGGRWLQPR

SEQ ID NO: 61360 - protein, 11 aa, Homo Sapiens
ALMPMKVKQLR

SEQ ID NO: 61361 - protein, 11 aa, Homo Sapiens
ALRALEGLVYR

SEQ ID NO: 61362 - protein, 11 aa, Homo Sapiens
ALVAGIDRYPR

SEQ ID NO: 61363 - protein, 11 aa, Homo Sapiens
ALWDRYMGTLR

SEQ ID NO: 61364 - protein, 11 aa, Homo Sapiens
AMFQPSSPTRR

SEQ ID NO: 61365 - protein, 11 aa, Homo Sapiens
AMKRGEPAIYR

SEQ ID NO: 61366 - protein, 11 aa, Homo Sapiens
AQFDSPEILRR

SEQ ID NO: 61367 - protein, 11 aa, Homo Sapiens
AQFKPSSQILR

SEQ ID NO: 61368 - protein, 11 aa, Homo Sapiens
AQMDRVLREER

SEQ ID NO: 61369 - protein, 11 aa, Homo Sapiens
ASKMESTIKPR

SEQ ID NO: 61370 - protein, 11 aa, Homo Sapiens
ASMPWGDPNYR

SEQ ID NO: 61371 - protein, 11 aa, Homo Sapiens
ASSPGGVYATR

SEQ ID NO: 61372 - protein, 11 aa, Homo Sapiens
ATAPVVTFSPR

SEQ ID NO: 61373 - protein, 11 aa, Homo Sapiens
ATFFPSSSRNR

SEQ ID NO: 61374 - protein, 11 aa, Homo Sapiens
ATLKDITRRLK

SEQ ID NO: 61375 - protein, 11 aa, Homo Sapiens
ATMVPSVLWPR

SEQ ID NO: 61376 - protein, 11 aa, Homo Sapiens
ATRTDKVRALR

SEQ ID NO: 61377 - protein, 11 aa, Homo Sapiens
ATRWAKKIEAR

SEQ ID NO: 61378 - protein, 11 aa, Homo Sapiens
ATVKKGKPELR

SEQ ID NO: 61379 - protein, 11 aa, Homo Sapiens
ATVQQLEGRWR

SEQ ID NO: 61380 - protein, 11 aa, Homo Sapiens
ATYSLANERLR

SEQ ID NO: 61381 - protein, 11 aa, Homo Sapiens
AVFDRDINCRR

SEQ ID NO: 61382 - protein, 11 aa, Homo Sapiens
AVIGGIDGRLR

SEQ ID NO: 61383 - protein, 11 aa, Homo Sapiens
AVKAPGFGDNR

SEQ ID NO: 61384 - protein, 11 aa, Homo Sapiens
AVLPAGAFARR

SEQ ID NO: 61385 - protein, 11 aa, Homo Sapiens
AVLSNPDKRLR

SEQ ID NO: 61386 - protein, 11 aa, Homo Sapiens
AVLSSGLTAAR

SEQ ID NO: 61387 - protein, 11 aa, Homo Sapiens
AVREVLHGNQR

SEQ ID NO: 61388 - protein, 11 aa, Homo Sapiens
AVRNAGSRFLR

SEQ ID NO: 61389 - protein, 11 aa, Homo Sapiens
GGSTMFRDFGR

SEQ ID NO: 61390 - protein, 11 aa, Homo Sapiens
GIKPEWMMIHR

SEQ ID NO: 61391 - protein, 11 aa, Homo Sapiens
GLANGEVRIYR

SEQ ID NO: 61392 - protein, 11 aa, Homo Sapiens
GLAPMGTLPRR

SEQ ID NO: 61393 - protein, 11 aa, Homo Sapiens
GLWARGPGSCR

SEQ ID NO: 61394 - protein, 11 aa, Homo Sapiens
GMNPREPAVYR

SEQ ID NO: 61395 - protein, 11 aa, Homo Sapiens
GQKPGGSDFLR

SEQ ID NO: 61396 - protein, 11 aa, Homo Sapiens
GTKQQEIVVSR

SEQ ID NO: 61397 - protein, 11 aa, Homo Sapiens
GTLGFGDKFKR

SEQ ID NO: 61398 - protein, 11 aa, Homo Sapiens
GTLREYKVVGR

SEQ ID NO: 61399 - protein, 11 aa, Homo Sapiens
GTMSDVLRAER

SEQ ID NO: 61400 - protein, 11 aa, Homo Sapiens
GTQPTVLRTFR

SEQ ID NO: 61401 - protein, 11 aa, Homo Sapiens
GTSSFKESALR

SEQ ID NO: 61402 - protein, 11 aa, Homo Sapiens
GVVPAGVILER

SEQ ID NO: 61403 - protein, 11 aa, Homo Sapiens
GVYATRSSAVR

SEQ ID NO: 61404 - protein, 11 aa, Homo Sapiens
HIIEKDKITTR

SEQ ID NO: 61405 - protein, 11 aa, Homo Sapiens
HLFQYPCARAK

SEQ ID NO: 61406 - protein, 11 aa, Homo Sapiens
HLNSQFPGTQR

SEQ ID NO: 61407 - protein, 11 aa, Homo Sapiens
HQQSGSELALR

SEQ ID NO: 61408 - protein, 11 aa, Homo Sapiens
HTNDTIGSVRR

SEQ ID NO: 61409 - protein, 11 aa, Homo Sapiens
HVKDAGFYVCR

SEQ ID NO: 61410 - protein, 11 aa, Homo Sapiens
ILAFREKEWQR

SEQ ID NO: 61411 - protein, 11 aa, Homo Sapiens
ILKSPGSVVFR

SEQ ID NO: 61412 - protein, 11 aa, Homo Sapiens
ILNDKRHILTK

SEQ ID NO: 61413 - protein, 11 aa, Homo Sapiens
ILQNEPLPERL

SEQ ID NO: 61414 - protein, 11 aa, Homo Sapiens
IQFEPEEDIKR

SEQ ID NO: 61415 - protein, 11 aa, Homo Sapiens
KAFPYSSHLIR

SEQ ID NO: 61416 - protein, 11 aa, Homo Sapiens
KAWPRNAETQR

SEQ ID NO: 61417 - protein, 11 aa, Homo Sapiens
KIFAKPEEQRK

SEQ ID NO: 61418 - protein, 11 aa, Homo Sapiens
KIIEKQPGHIR

SEQ ID NO: 61419 - protein, 11 aa, Homo Sapiens
KIKDFGEAAKR

SEQ ID NO: 61420 - protein, 11 aa, Homo Sapiens
KIKENRQQIVR

SEQ ID NO: 61421 - protein, 11 aa, Homo Sapiens
KILWFIPFRQR

SEQ ID NO: 61422 - protein, 11 aa, Homo Sapiens
KIQDSLGGRVR

SEQ ID NO: 61423 - protein, 11 aa, Homo Sapiens
KIQKHQEHILR

SEQ ID NO: 61424 - protein, 11 aa, Homo Sapiens
KIRVVRKSIAR

SEQ ID NO: 61425 - protein, 11 aa, Homo Sapiens
KIWSQKSGMER

SEQ ID NO: 61426 - protein, 11 aa, Homo Sapiens
KLADFGLARAK

SEQ ID NO: 61427 - protein, 11 aa, Homo Sapiens
KLFDRPQELKL

SEQ ID NO: 61428 - protein, 11 aa, Homo Sapiens
KLFDWANTSRR

SEQ ID NO: 61429 - protein, 11 aa, Homo Sapiens
KLFKDIGLSPR

SEQ ID NO: 61430 - protein, 11 aa, Homo Sapiens
KLFKPPQPPAR

SEQ ID NO: 61431 - protein, 11 aa, Homo Sapiens
KLFQSNDPTLR

SEQ ID NO: 61432 - protein, 11 aa, Homo Sapiens
KLFRGPLVINR

SEQ ID NO: 61433 - protein, 11 aa, Homo Sapiens
KLFSTPSPVIR

SEQ ID NO: 61434 - protein, 11 aa, Homo Sapiens
KLIDPQTQVTR

SEQ ID NO: 61435 - protein, 11 aa, Homo Sapiens
KLIEQDLCRER

SEQ ID NO: 61436 - protein, 11 aa, Homo Sapiens
KLIGEYGLRNK

SEQ ID NO: 61437 - protein, 11 aa, Homo Sapiens
KLIKEGDIVKR

SEQ ID NO: 61438 - protein, 11 aa, Homo Sapiens
KLINRPIIVFR

SEQ ID NO: 61439 - protein, 11 aa, Homo Sapiens
KLKDASKSLER

SEQ ID NO: 61440 - protein, 11 aa, Homo Sapiens
KLKDIVSLVPR

SEQ ID NO: 61441 - protein, 11 aa, Homo Sapiens
KLKDKNTLFTR

SEQ ID NO: 61442 - protein, 11 aa, Homo Sapiens
KLKDLGNLVLR

SEQ ID NO: 61443 - protein, 11 aa, Homo Sapiens
KLKDQNIFVSR

SEQ ID NO: 61444 - protein, 11 aa, Homo Sapiens
KLKDSEAELQR

SEQ ID NO: 61445 - protein, 11 aa, Homo Sapiens
KLKECVSILPR

SEQ ID NO: 61446 - protein, 11 aa, Homo Sapiens
KLKEGAENLRR

SEQ ID NO: 61447 - protein, 11 aa, Homo Sapiens
KLKETGYVVER

SEQ ID NO: 61448 - protein, 11 aa, Homo Sapiens
KLKETSSFRMR

SEQ ID NO: 61449 - protein, 11 aa, Homo Sapiens
KLKGDDLQAIK

SEQ ID NO: 61450 - protein, 11 aa, Homo Sapiens
KLKYLAFLRKR

SEQ ID NO: 61451 - protein, 11 aa, Homo Sapiens
KLLAELEGKLR

SEQ ID NO: 61452 - protein, 11 aa, Homo Sapiens
KLLDWIEGKER

SEQ ID NO: 61453 - protein, 11 aa, Homo Sapiens
KLLKPISGKLR

SEQ ID NO: 61454 - protein, 11 aa, Homo Sapiens
KLLNSSKARLR

SEQ ID NO: 61455 - protein, 11 aa, Homo Sapiens
KLLTRAGSFSR

SEQ ID NO: 61456 - protein, 11 aa, Homo Sapiens
KLMDGSLQRAR

SEQ ID NO: 61457 - protein, 11 aa, Homo Sapiens
KLMDVGLIAIR

SEQ ID NO: 61458 - protein, 11 aa, Homo Sapiens
KLNAKLAELRR

SEQ ID NO: 61459 - protein, 11 aa, Homo Sapiens
KLNEQQSVLQR

SEQ ID NO: 61460 - protein, 11 aa, Homo Sapiens
KLNPYAKTMRR

SEQ ID NO: 61461 - protein, 11 aa, Homo Sapiens
KLPPVYVRKER

SEQ ID NO: 61462 - protein, 11 aa, Homo Sapiens
KLQGEFQLRLR

SEQ ID NO: 61463 - protein, 11 aa, Homo Sapiens
KLQKLNEVRKR

SEQ ID NO: 61464 - protein, 11 aa, Homo Sapiens
KLQTPNTFPKR

SEQ ID NO: 61465 - protein, 11 aa, Homo Sapiens
KLREAEEALRR

SEQ ID NO: 61466 - protein, 11 aa, Homo Sapiens
KLREELGLCER

SEQ ID NO: 61467 - protein, 11 aa, Homo Sapiens
KLREIEENQKR

SEQ ID NO: 61468 - protein, 11 aa, Homo Sapiens
KLRIQEEIAKR

SEQ ID NO: 61469 - protein, 11 aa, Homo Sapiens
KLRPSADELLR

SEQ ID NO: 61470 - protein, 11 aa, Homo Sapiens
KLRTELPAGAR

SEQ ID NO: 61471 - protein, 11 aa, Homo Sapiens
KLTDSVLRSFR

SEQ ID NO: 61472 - protein, 11 aa, Homo Sapiens
KLWDIRDGMCR

SEQ ID NO: 61473 - protein, 11 aa, Homo Sapiens
KLWDVRDSMCR

SEQ ID NO: 61474 - protein, 11 aa, Homo Sapiens
KLWDVREGMCR

SEQ ID NO: 61475 - protein, 11 aa, Homo Sapiens
KLWERNIKSHL

SEQ ID NO: 61476 - protein, 11 aa, Homo Sapiens
KLWMKELQTQR

SEQ ID NO: 61477 - protein, 11 aa, Homo Sapiens
KLYEAYSKVCR

SEQ ID NO: 61478 - protein, 11 aa, Homo Sapiens
KLYVANVGTNR

SEQ ID NO: 61479 - protein, 11 aa, Homo Sapiens
KMIDMAEPAQR

SEQ ID NO: 61480 - protein, 11 aa, Homo Sapiens
KMKESSPLSSR

SEQ ID NO: 61481 - protein, 11 aa, Homo Sapiens
KMKITDFENRR

SEQ ID NO: 61482 - protein, 11 aa, Homo Sapiens
KMLPERGQRVR

SEQ ID NO: 61483 - protein, 11 aa, Homo Sapiens
KMLQHIDYRMR

SEQ ID NO: 61484 - protein, 11 aa, Homo Sapiens
KMQDVDLFIKR

SEQ ID NO: 61485 - protein, 11 aa, Homo Sapiens
KMRLWDLQQLR

SEQ ID NO: 61486 - protein, 11 aa, Homo Sapiens
KQFEGSTSFVR

SEQ ID NO: 61487 - protein, 11 aa, Homo Sapiens
KQLPLVKPYLR

SEQ ID NO: 61488 - protein, 11 aa, Homo Sapiens
KQLQKDKQVYR

SEQ ID NO: 61489 - protein, 11 aa, Homo Sapiens
KQLYDKGLVYR

SEQ ID NO: 61490 - protein, 11 aa, Homo Sapiens
KQMDLNTGRMR

SEQ ID NO: 61491 - protein, 11 aa, Homo Sapiens
KQNEFRDDACR

SEQ ID NO: 61492 - protein, 11 aa, Homo Sapiens
KQNPFWWTHQR

SEQ ID NO: 61493 - protein, 11 aa, Homo Sapiens
KQRDLEGAVSR

SEQ ID NO: 61494 - protein, 11 aa, Homo Sapiens
KQREQPEMVFR

SEQ ID NO: 61495 - protein, 11 aa, Homo Sapiens
KQSQHMTEVVR

SEQ ID NO: 61496 - protein, 11 aa, Homo Sapiens
KSEEKELRKFR

SEQ ID NO: 61497 - protein, 11 aa, Homo Sapiens
KSLLMGKEFQR

SEQ ID NO: 61498 - protein, 11 aa, Homo Sapiens
KSLPSEVERLR

SEQ ID NO: 61499 - protein, 11 aa, Homo Sapiens
KSQEKVGIVGR

SEQ ID NO: 61500 - protein, 11 aa, Homo Sapiens
KTEEEALKHFR

SEQ ID NO: 61501 - protein, 11 aa, Homo Sapiens
KTFQGKPIMAR

SEQ ID NO: 61502 - protein, 11 aa, Homo Sapiens
KTFSQSSKLIR

SEQ ID NO: 61503 - protein, 11 aa, Homo Sapiens
KTFTGHREWVR

SEQ ID NO: 61504 - protein, 11 aa, Homo Sapiens
KTGESGMIVFR

SEQ ID NO: 61505 - protein, 11 aa, Homo Sapiens
KTIDPKVAFPR

SEQ ID NO: 61506 - protein, 11 aa, Homo Sapiens
KTIPKGFSSSR

SEQ ID NO: 61507 - protein, 11 aa, Homo Sapiens
KTITGKTFSSR

SEQ ID NO: 61508 - protein, 11 aa, Homo Sapiens
KTITQVKKIGR

SEQ ID NO: 61509 - protein, 11 aa, Homo Sapiens
KTKIIAKIQQR

SEQ ID NO: 61510 - protein, 11 aa, Homo Sapiens
KTKKGTDVMVR

SEQ ID NO: 61511 - protein, 11 aa, Homo Sapiens
KTKPIHTIIRK

SEQ ID NO: 61512 - protein, 11 aa, Homo Sapiens
KTLAGDVHIVR

SEQ ID NO: 61513 - protein, 11 aa, Homo Sapiens
KTLDKAGVLHR

SEQ ID NO: 61514 - protein, 11 aa, Homo Sapiens
KTLHGSALFQR

SEQ ID NO: 61515 - protein, 11 aa, Homo Sapiens
KTLLDKALTQR

SEQ ID NO: 61516 - protein, 11 aa, Homo Sapiens
KTLNYTARFSR

SEQ ID NO: 61517 - protein, 11 aa, Homo Sapiens
KTLPPTDCRLR

SEQ ID NO: 61518 - protein, 11 aa, Homo Sapiens
KTLSPDQRVER

SEQ ID NO: 61519 - protein, 11 aa, Homo Sapiens
KTNNSEKFERF

SEQ ID NO: 61520 - protein, 11 aa, Homo Sapiens
KTRVIWGKVTR

SEQ ID NO: 61521 - protein, 11 aa, Homo Sapiens
KTSPKPLPSRF

SEQ ID NO: 61522 - protein, 11 aa, Homo Sapiens
KTYAICGAIRR

SEQ ID NO: 61523 - protein, 11 aa, Homo Sapiens
KTYQVTPMTPR

SEQ ID NO: 61524 - protein, 11 aa, Homo Sapiens
KTYYQDRPFFR

SEQ ID NO: 61525 - protein, 11 aa, Homo Sapiens
KVADGFKVVAR

SEQ ID NO: 61526 - protein, 11 aa, Homo Sapiens
KVAELKGHTSR

SEQ ID NO: 61527 - protein, 11 aa, Homo Sapiens
KVAPSELARSR

SEQ ID NO: 61528 - protein, 11 aa, Homo Sapiens
KVFALAEYRTR

SEQ ID NO: 61529 - protein, 11 aa, Homo Sapiens
KVFERVSRSVR

SEQ ID NO: 61530 - protein, 11 aa, Homo Sapiens
KVFNQPKAKAK

SEQ ID NO: 61531 - protein, 11 aa, Homo Sapiens
KVFPEDMAKYR

SEQ ID NO: 61532 - protein, 11 aa, Homo Sapiens
KVFPSHFTQQR

SEQ ID NO: 61533 - protein, 11 aa, Homo Sapiens
KVFSEASSLRR

SEQ ID NO: 61534 - protein, 11 aa, Homo Sapiens
KVFVKSSDLLK

SEQ ID NO: 61535 - protein, 11 aa, Homo Sapiens
KVIDGERVIGR

SEQ ID NO: 61536 - protein, 11 aa, Homo Sapiens
KVKAEGPGLSR

SEQ ID NO: 61537 - protein, 11 aa, Homo Sapiens
KVKCSGPGLER

SEQ ID NO: 61538 - protein, 11 aa, Homo Sapiens
KVKEWYVGVLR

SEQ ID NO: 61539 - protein, 11 aa, Homo Sapiens
KVKSYIHEVAR

SEQ ID NO: 61540 - protein, 11 aa, Homo Sapiens
KVKTPEMIIQK

SEQ ID NO: 61541 - protein, 11 aa, Homo Sapiens
KVLAKQLVHLR

SEQ ID NO: 61542 - protein, 11 aa, Homo Sapiens
KVLSNRPIMFR

SEQ ID NO: 61543 - protein, 11 aa, Homo Sapiens
KVQFRDPKSQR

SEQ ID NO: 61544 - protein, 11 aa, Homo Sapiens
KVQSSLGGRVR

SEQ ID NO: 61545 - protein, 11 aa, Homo Sapiens
KVRGISEVLAR

SEQ ID NO: 61546 - protein, 11 aa, Homo Sapiens
KVRVSQRELSR

SEQ ID NO: 61547 - protein, 11 aa, Homo Sapiens
KVVEDGILKLR

SEQ ID NO: 61548 - protein, 11 aa, Homo Sapiens
LKLGGRVKTWK

SEQ ID NO: 61549 - protein, 11 aa, Homo Sapiens
LLLPAASRPPR

SEQ ID NO: 61550 - protein, 11 aa, Homo Sapiens
LLNDRKVFVGR

SEQ ID NO: 61551 - protein, 11 aa, Homo Sapiens
LLPGESNKIPR

SEQ ID NO: 61552 - protein, 11 aa, Homo Sapiens
LRQETNRLLEH

SEQ ID NO: 61553 - protein, 11 aa, Homo Sapiens
LSYDQAKRVPR

SEQ ID NO: 61554 - protein, 11 aa, Homo Sapiens
LTREHGRAYLR

SEQ ID NO: 61555 - protein, 11 aa, Homo Sapiens
MDAKSLTAWSR

SEQ ID NO: 61556 - protein, 11 aa, Homo Sapiens
MIKGKTPEEIR

SEQ ID NO: 61557 - protein, 11 aa, Homo Sapiens
MLMSTATAFYR

SEQ ID NO: 61558 - protein, 11 aa, Homo Sapiens
MLWERLSSTKR

SEQ ID NO: 61559 - protein, 11 aa, Homo Sapiens
MQIAWSREFLK

SEQ ID NO: 61560 - protein, 11 aa, Homo Sapiens
MVKPTPGLTPR

SEQ ID NO: 61561 - protein, 11 aa, Homo Sapiens
NVGDWLRGVYR

SEQ ID NO: 61562 - protein, 11 aa, Homo Sapiens
QARLRDDTELR

SEQ ID NO: 61563 - protein, 11 aa, Homo Sapiens
QLFRGSSLLFR

SEQ ID NO: 61564 - protein, 11 aa, Homo Sapiens
QLQRRFKEFLR

SEQ ID NO: 61565 - protein, 11 aa, Homo Sapiens
QLRVGEFCHNR

SEQ ID NO: 61566 - protein, 11 aa, Homo Sapiens
QPKIVKWDRDM

SEQ ID NO: 61567 - protein, 11 aa, Homo Sapiens
QQRQEQSYFVR

SEQ ID NO: 61568 - protein, 11 aa, Homo Sapiens
QTMPTNMPPPR

SEQ ID NO: 61569 - protein, 11 aa, Homo Sapiens
QVKREDTLCVR

SEQ ID NO: 61570 - protein, 11 aa, Homo Sapiens
QVRSIQQTMAR

SEQ ID NO: 61571 - protein, 11 aa, Homo Sapiens
QVVGEATFIAR

SEQ ID NO: 61572 - protein, 11 aa, Homo Sapiens
RARPSLTVTPR

SEQ ID NO: 61573 - protein, 11 aa, Homo Sapiens
RAWDGMKEWSR

SEQ ID NO: 61574 - protein, 11 aa, Homo Sapiens
RGFQRDLSSLR

SEQ ID NO: 61575 - protein, 11 aa, Homo Sapiens
RIAPPDRRFSR

SEQ ID NO: 61576 - protein, 11 aa, Homo Sapiens
RIFPVDKSRSR

SEQ ID NO: 61577 - protein, 11 aa, Homo Sapiens
RIKDDEWNIYR

SEQ ID NO: 61578 - protein, 11 aa, Homo Sapiens
RIKDQYKVSVR

SEQ ID NO: 61579 - protein, 11 aa, Homo Sapiens
RIKRALDLNLK

SEQ ID NO: 61580 - protein, 11 aa, Homo Sapiens
RIKTPIPTSLR

SEQ ID NO: 61581 - protein, 11 aa, Homo Sapiens
RIMAKDLVRTR

SEQ ID NO: 61582 - protein, 11 aa, Homo Sapiens
RIMELEGRVRR

SEQ ID NO: 61583 - protein, 11 aa, Homo Sapiens
RINEILSNALK

SEQ ID NO: 61584 - protein, 11 aa, Homo Sapiens
RINELPSTMQR

SEQ ID NO: 61585 - protein, 11 aa, Homo Sapiens
RIQEAVYKNVR

SEQ ID NO: 61586 - protein, 11 aa, Homo Sapiens
RIQEDYLRILR

SEQ ID NO: 61587 - protein, 11 aa, Homo Sapiens
RIQNPSAYAKR

SEQ ID NO: 61588 - protein, 11 aa, Homo Sapiens
RIQNWLSAKVR

SEQ ID NO: 61589 - protein, 11 aa, Homo Sapiens
RIRDSEYEIQR

SEQ ID NO: 61590 - protein, 11 aa, Homo Sapiens
RIREDIAKYLR

SEQ ID NO: 61591 - protein, 11 aa, Homo Sapiens
RIRTGSALVQR

SEQ ID NO: 61592 - protein, 11 aa, Homo Sapiens
RIWGDCTVRKK

SEQ ID NO: 61593 - protein, 11 aa, Homo Sapiens
RIWQSPRFIAR

SEQ ID NO: 61594 - protein, 11 aa, Homo Sapiens
RLADKSVLVCK

SEQ ID NO: 61595 - protein, 11 aa, Homo Sapiens
RLAEKSCRNLR

SEQ ID NO: 61596 - protein, 11 aa, Homo Sapiens
RLAEVIQKHQR

SEQ ID NO: 61597 - protein, 11 aa, Homo Sapiens
RLASSYIAHLR

SEQ ID NO: 61598 - protein, 11 aa, Homo Sapiens
RLEERSSEFYR

SEQ ID NO: 61599 - protein, 11 aa, Homo Sapiens
RLFANRSSIMR

SEQ ID NO: 61600 - protein, 11 aa, Homo Sapiens
RLFDIKPEQQR

SEQ ID NO: 61601 - protein, 11 aa, Homo Sapiens
RLFEEPELTQR

SEQ ID NO: 61602 - protein, 11 aa, Homo Sapiens
RLFEGTGARLR

SEQ ID NO: 61603 - protein, 11 aa, Homo Sapiens
RLFEMPAVLER

SEQ ID NO: 61604 - protein, 11 aa, Homo Sapiens
RLFGLAQRSAR

SEQ ID NO: 61605 - protein, 11 aa, Homo Sapiens
RLFPSVPLFAR

SEQ ID NO: 61606 - protein, 11 aa, Homo Sapiens
RLFQPNLNMDR

SEQ ID NO: 61607 - protein, 11 aa, Homo Sapiens
RLFQPWGSILR

SEQ ID NO: 61608 - protein, 11 aa, Homo Sapiens
RLFQSNDQTLR

SEQ ID NO: 61609 - protein, 11 aa, Homo Sapiens
RLFSIVRPRRL

SEQ ID NO: 61610 - protein, 11 aa, Homo Sapiens
RLFSKSIETLR

SEQ ID NO: 61611 - protein, 11 aa, Homo Sapiens
RLGSWARALLR

SEQ ID NO: 61612 - protein, 11 aa, Homo Sapiens
RLIAAFEQKER

SEQ ID NO: 61613 - protein, 11 aa, Homo Sapiens
RLIAASTSRTR

SEQ ID NO: 61614 - protein, 11 aa, Homo Sapiens
RLIEKKVHSER

SEQ ID NO: 61615 - protein, 11 aa, Homo Sapiens
RLIGLPEGRAR

SEQ ID NO: 61616 - protein, 11 aa, Homo Sapiens
RLILIESRIHR

SEQ ID NO: 61617 - protein, 11 aa, Homo Sapiens
RLKAACNLLQR

SEQ ID NO: 61618 - protein, 11 aa, Homo Sapiens
RLKAQKSLLYR

SEQ ID NO: 61619 - protein, 11 aa, Homo Sapiens
RLKDENGALIR

SEQ ID NO: 61620 - protein, 11 aa, Homo Sapiens
RLKEAYSVKSR

SEQ ID NO: 61621 - protein, 11 aa, Homo Sapiens
RLKEEYQSLIR

SEQ ID NO: 61622 - protein, 11 aa, Homo Sapiens
RLKEKEDALTR

SEQ ID NO: 61623 - protein, 11 aa, Homo Sapiens
RLKGDAWVYKR

SEQ ID NO: 61624 - protein, 11 aa, Homo Sapiens
RLKINLIIHQR

SEQ ID NO: 61625 - protein, 11 aa, Homo Sapiens
RLKNNQSKFFR

SEQ ID NO: 61626 - protein, 11 aa, Homo Sapiens
RLKPTNPAAQK

SEQ ID NO: 61627 - protein, 11 aa, Homo Sapiens
RLKRIAGQDLR

SEQ ID NO: 61628 - protein, 11 aa, Homo Sapiens
RLLDEEISRVR

SEQ ID NO: 61629 - protein, 11 aa, Homo Sapiens
RLLDQRDRIMR

SEQ ID NO: 61630 - protein, 11 aa, Homo Sapiens
RLLEADSKSMR

SEQ ID NO: 61631 - protein, 11 aa, Homo Sapiens
RLLERFHGASR

SEQ ID NO: 61632 - protein, 11 aa, Homo Sapiens
RLLNFPTIVER

SEQ ID NO: 61633 - protein, 11 aa, Homo Sapiens
RLLPAELPAKR

SEQ ID NO: 61634 - protein, 11 aa, Homo Sapiens
RLLPLAPGRLR

SEQ ID NO: 61635 - protein, 11 aa, Homo Sapiens
RLLPRHDDFAR

SEQ ID NO: 61636 - protein, 11 aa, Homo Sapiens
RLLQDPARTLR

SEQ ID NO: 61637 - protein, 11 aa, Homo Sapiens
RLLQTGQERAR

SEQ ID NO: 61638 - protein, 11 aa, Homo Sapiens
RLLRKGNYAER

SEQ ID NO: 61639 - protein, 11 aa, Homo Sapiens
RLLRKGNYSER

SEQ ID NO: 61640 - protein, 11 aa, Homo Sapiens
RLLVVYPWTQR

SEQ ID NO: 61641 - protein, 11 aa, Homo Sapiens
RLMEEDPAFRR

SEQ ID NO: 61642 - protein, 11 aa, Homo Sapiens
RLMMDFDGKNR

SEQ ID NO: 61643 - protein, 11 aa, Homo Sapiens
RLNARIGKMKR

SEQ ID NO: 61644 - protein, 11 aa, Homo Sapiens
RLNDKEGYVPR

SEQ ID NO: 61645 - protein, 11 aa, Homo Sapiens
RLNHEGKIVLR

SEQ ID NO: 61646 - protein, 11 aa, Homo Sapiens
RLNKRKEYMVR

SEQ ID NO: 61647 - protein, 11 aa, Homo Sapiens
RLPEPTTRLPR

SEQ ID NO: 61648 - protein, 11 aa, Homo Sapiens
RLQAANDSVCR

SEQ ID NO: 61649 - protein, 11 aa, Homo Sapiens
RLQDFKGNILR

SEQ ID NO: 61650 - protein, 11 aa, Homo Sapiens
RLQDNRQFRGR

SEQ ID NO: 61651 - protein, 11 aa, Homo Sapiens
RLQPYNGVALR

SEQ ID NO: 61652 - protein, 11 aa, Homo Sapiens
RLQQLTEVSRR

SEQ ID NO: 61653 - protein, 11 aa, Homo Sapiens
RLQQQLEKKQR

SEQ ID NO: 61654 - protein, 11 aa, Homo Sapiens
RLRAAYNLVKR

SEQ ID NO: 61655 - protein, 11 aa, Homo Sapiens
RLRDDLNVTRL

SEQ ID NO: 61656 - protein, 11 aa, Homo Sapiens
RLRDGQLVSQR

SEQ ID NO: 61657 - protein, 11 aa, Homo Sapiens
RLRDQGGVVLR

SEQ ID NO: 61658 - protein, 11 aa, Homo Sapiens
RLRELMGELQR

SEQ ID NO: 61659 - protein, 11 aa, Homo Sapiens
RLRELTSIVNR

SEQ ID NO: 61660 - protein, 11 aa, Homo Sapiens
RLRELVPGVPR

SEQ ID NO: 61661 - protein, 11 aa, Homo Sapiens
RLREQGGAVLR

SEQ ID NO: 61662 - protein, 11 aa, Homo Sapiens
RLRPFHLAAVR

SEQ ID NO: 61663 - protein, 11 aa, Homo Sapiens
RLRPLERPALR

SEQ ID NO: 61664 - protein, 11 aa, Homo Sapiens
RLRPPIMIMMR

SEQ ID NO: 61665 - protein, 11 aa, Homo Sapiens
RLSEGFSIHTR

SEQ ID NO: 61666 - protein, 11 aa, Homo Sapiens
RLTEGSERLPR

SEQ ID NO: 61667 - protein, 11 aa, Homo Sapiens
RLYDSSPSRQR

SEQ ID NO: 61668 - protein, 11 aa, Homo Sapiens
RLYDVPANSMR

SEQ ID NO: 61669 - protein, 11 aa, Homo Sapiens
RLYHPTVPLAR

SEQ ID NO: 61670 - protein, 11 aa, Homo Sapiens
RMAPPASRAPQ

SEQ ID NO: 61671 - protein, 11 aa, Homo Sapiens
RMEEIEGFRYR

SEQ ID NO: 61672 - protein, 11 aa, Homo Sapiens
RMFAPTKTWRR

SEQ ID NO: 61673 - protein, 11 aa, Homo Sapiens
RMFHIRAVILR

SEQ ID NO: 61674 - protein, 11 aa, Homo Sapiens
RMKSLEQDALR

SEQ ID NO: 61675 - protein, 11 aa, Homo Sapiens
RMLEEGSFRGR

SEQ ID NO: 61676 - protein, 11 aa, Homo Sapiens
RMLFKSKAYER

SEQ ID NO: 61677 - protein, 11 aa, Homo Sapiens
RMLPPLTKNQR

SEQ ID NO: 61678 - protein, 11 aa, Homo Sapiens
RMNPNSPSITY

SEQ ID NO: 61679 - protein, 11 aa, Homo Sapiens
RMRVLSKAFSR

SEQ ID NO: 61680 - protein, 11 aa, Homo Sapiens
RMRYISSQIER

SEQ ID NO: 61681 - protein, 11 aa, Homo Sapiens
RQFADPGALQR

SEQ ID NO: 61682 - protein, 11 aa, Homo Sapiens
RQFWFQGNRYR

SEQ ID NO: 61683 - protein, 11 aa, Homo Sapiens
RQIDQFLVVAR

SEQ ID NO: 61684 - protein, 11 aa, Homo Sapiens
RQINWTVLYRR

SEQ ID NO: 61685 - protein, 11 aa, Homo Sapiens
RQKLQDLNDLR

SEQ ID NO: 61686 - protein, 11 aa, Homo Sapiens
RQMAHVQIFQR

SEQ ID NO: 61687 - protein, 11 aa, Homo Sapiens
RQQLRSDIQKR

SEQ ID NO: 61688 - protein, 11 aa, Homo Sapiens
RQQQEEMRQLR

SEQ ID NO: 61689 - protein, 11 aa, Homo Sapiens
RQTSTKGQVLR

SEQ ID NO: 61690 - protein, 11 aa, Homo Sapiens
RQYQMNKNFER

SEQ ID NO: 61691 - protein, 11 aa, Homo Sapiens
RSAPGGIRETR

SEQ ID NO: 61692 - protein, 11 aa, Homo Sapiens
RSIERHAPWVR

SEQ ID NO: 61693 - protein, 11 aa, Homo Sapiens
RSLDVVGKIRR

SEQ ID NO: 61694 - protein, 11 aa, Homo Sapiens
RSWEAAKLFAR

SEQ ID NO: 61695 - protein, 11 aa, Homo Sapiens
RTAPAANLASR

SEQ ID NO: 61696 - protein, 11 aa, Homo Sapiens
RTFATALDTTR

SEQ ID NO: 61697 - protein, 11 aa, Homo Sapiens
RTFGNDARFIR

SEQ ID NO: 61698 - protein, 11 aa, Homo Sapiens
RTFGNEARFIR

SEQ ID NO: 61699 - protein, 11 aa, Homo Sapiens
RTFNRGSHLTR

SEQ ID NO: 61700 - protein, 11 aa, Homo Sapiens
RTFNRKSGVSR

SEQ ID NO: 61701 - protein, 11 aa, Homo Sapiens
RTIGISVDPRR

SEQ ID NO: 61702 - protein, 11 aa, Homo Sapiens
RTIQAHEGFVR

SEQ ID NO: 61703 - protein, 11 aa, Homo Sapiens
RTIQYNMTRTR

SEQ ID NO: 61704 - protein, 11 aa, Homo Sapiens
RTKRWEGGYER

SEQ ID NO: 61705 - protein, 11 aa, Homo Sapiens
RTLKPEGNILR

SEQ ID NO: 61706 - protein, 11 aa, Homo Sapiens
RTLMGPTRVFR

SEQ ID NO: 61707 - protein, 11 aa, Homo Sapiens
RTLTPISGGQR

SEQ ID NO: 61708 - protein, 11 aa, Homo Sapiens
RTMKYTTATGR

SEQ ID NO: 61709 - protein, 11 aa, Homo Sapiens
RTMPLLSLHSR

SEQ ID NO: 61710 - protein, 11 aa, Homo Sapiens
RTMSCSDKILR

SEQ ID NO: 61711 - protein, 11 aa, Homo Sapiens
RTMVDKLLSSR

SEQ ID NO: 61712 - protein, 11 aa, Homo Sapiens
RTMWFAGGFHR

SEQ ID NO: 61713 - protein, 11 aa, Homo Sapiens
RTNERLKVALR

SEQ ID NO: 61714 - protein, 11 aa, Homo Sapiens
RTQLYEYLQNR

SEQ ID NO: 61715 - protein, 11 aa, Homo Sapiens
RTQNVLGEKGR

SEQ ID NO: 61716 - protein, 11 aa, Homo Sapiens
RTQQRYLKVLR

SEQ ID NO: 61717 - protein, 11 aa, Homo Sapiens
RTRDIINVSNR

SEQ ID NO: 61718 - protein, 11 aa, Homo Sapiens
RTRDYASLPPK

SEQ ID NO: 61719 - protein, 11 aa, Homo Sapiens
RTRPEVGEMLR

SEQ ID NO: 61720 - protein, 11 aa, Homo Sapiens
RTRTGSSFSVR

SEQ ID NO: 61721 - protein, 11 aa, Homo Sapiens
RTYDETYQRYR

SEQ ID NO: 61722 - protein, 11 aa, Homo Sapiens
RVAFRDADMQR

SEQ ID NO: 61723 - protein, 11 aa, Homo Sapiens
RVAKFPENRNR

SEQ ID NO: 61724 - protein, 11 aa, Homo Sapiens
RVANHQKDLFR

SEQ ID NO: 61725 - protein, 11 aa, Homo Sapiens
RVAQKKASFLR

SEQ ID NO: 61726 - protein, 11 aa, Homo Sapiens
RVCQGIGMVNR

SEQ ID NO: 61727 - protein, 11 aa, Homo Sapiens
RVCSNRHGLIR

SEQ ID NO: 61728 - protein, 11 aa, Homo Sapiens
RVETRITARLR

SEQ ID NO: 61729 - protein, 11 aa, Homo Sapiens
RVFAAESIIKR

SEQ ID NO: 61730 - protein, 11 aa, Homo Sapiens
RVFEHHGQVRL

SEQ ID NO: 61731 - protein, 11 aa, Homo Sapiens
RVFPVRPGSGR

SEQ ID NO: 61732 - protein, 11 aa, Homo Sapiens
RVFQGAPKGYR

SEQ ID NO: 61733 - protein, 11 aa, Homo Sapiens
RVIDEAKKWER

SEQ ID NO: 61734 - protein, 11 aa, Homo Sapiens
RVIEDRDSQLR

SEQ ID NO: 61735 - protein, 11 aa, Homo Sapiens
RVIQPMGMSPR

SEQ ID NO: 61736 - protein, 11 aa, Homo Sapiens
RVISGHLGWVR

SEQ ID NO: 61737 - protein, 11 aa, Homo Sapiens
RVKDADGVLCR

SEQ ID NO: 61738 - protein, 11 aa, Homo Sapiens
RVKDLESLFHR

SEQ ID NO: 61739 - protein, 11 aa, Homo Sapiens
RVKEPVKELLR

SEQ ID NO: 61740 - protein, 11 aa, Homo Sapiens
RVKETSNENLR

SEQ ID NO: 61741 - protein, 11 aa, Homo Sapiens
RVKEVEEMCKR

SEQ ID NO: 61742 - protein, 11 aa, Homo Sapiens
RVKIADMGFAR

SEQ ID NO: 61743 - protein, 11 aa, Homo Sapiens
RVKQTFSCLPR

SEQ ID NO: 61744 - protein, 11 aa, Homo Sapiens
RVKTPTSQSYR

SEQ ID NO: 61745 - protein, 11 aa, Homo Sapiens
RVLDALVAREK

SEQ ID NO: 61746 - protein, 11 aa, Homo Sapiens
RVLDERLVRLR

SEQ ID NO: 61747 - protein, 11 aa, Homo Sapiens
RVLDTNDRFLR

SEQ ID NO: 61748 - protein, 11 aa, Homo Sapiens
RVLEKLGVTVR

SEQ ID NO: 61749 - protein, 11 aa, Homo Sapiens
RVLLREAGFKR

SEQ ID NO: 61750 - protein, 11 aa, Homo Sapiens
RVLSGHLMQTR

SEQ ID NO: 61751 - protein, 11 aa, Homo Sapiens
RVMMEVQKRQR

SEQ ID NO: 61752 - protein, 11 aa, Homo Sapiens
RVNEVGVDVNR

SEQ ID NO: 61753 - protein, 11 aa, Homo Sapiens
RVNLSAAQTLR

SEQ ID NO: 61754 - protein, 11 aa, Homo Sapiens
RVQEAVESMVK

SEQ ID NO: 61755 - protein, 11 aa, Homo Sapiens
RVQGEAQKVER

SEQ ID NO: 61756 - protein, 11 aa, Homo Sapiens
RVQIHANCRIR

SEQ ID NO: 61757 - protein, 11 aa, Homo Sapiens
RVRVVCGPGLR

SEQ ID NO: 61758 - protein, 11 aa, Homo Sapiens
RVSYKGSISYR

SEQ ID NO: 61759 - protein, 11 aa, Homo Sapiens
RVVEASDRLQR

SEQ ID NO: 61760 - protein, 11 aa, Homo Sapiens
RVVEGNHMVYR

SEQ ID NO: 61761 - protein, 11 aa, Homo Sapiens
RVVKDITNAFR

SEQ ID NO: 61762 - protein, 11 aa, Homo Sapiens
RVVQQEEGWFR

SEQ ID NO: 61763 - protein, 11 aa, Homo Sapiens
RVWDISGLRKK

SEQ ID NO: 61764 - protein, 11 aa, Homo Sapiens
RVYDPASPQRR

SEQ ID NO: 61765 - protein, 11 aa, Homo Sapiens
RVYNGRLKVQR

SEQ ID NO: 61766 - protein, 11 aa, Homo Sapiens
RVYSPPEWISR

SEQ ID NO: 61767 - protein, 11 aa, Homo Sapiens
SIAPGQCRPPR

SEQ ID NO: 61768 - protein, 11 aa, Homo Sapiens
SIIGGGVKAPR

SEQ ID NO: 61769 - protein, 11 aa, Homo Sapiens
SIMKWNRERRR

SEQ ID NO: 61770 - protein, 11 aa, Homo Sapiens
SIRNAHSIHQR

SEQ ID NO: 61771 - protein, 11 aa, Homo Sapiens
SIRRFTTSVVR

SEQ ID NO: 61772 - protein, 11 aa, Homo Sapiens
SIVGENETYPR

SEQ ID NO: 61773 - protein, 11 aa, Homo Sapiens
SLADGRDRPLR

SEQ ID NO: 61774 - protein, 11 aa, Homo Sapiens
SLFDNPRTFSR

SEQ ID NO: 61775 - protein, 11 aa, Homo Sapiens
SLFGRDCSVQR

SEQ ID NO: 61776 - protein, 11 aa, Homo Sapiens
SLGMVLRMNAQ

SEQ ID NO: 61777 - protein, 11 aa, Homo Sapiens
SLHQRGLTVLR

SEQ ID NO: 61778 - protein, 11 aa, Homo Sapiens
SLKFHNELNLR

SEQ ID NO: 61779 - protein, 11 aa, Homo Sapiens
SLKGVDPKFLR

SEQ ID NO: 61780 - protein, 11 aa, Homo Sapiens
SLKHSTTLTNR

SEQ ID NO: 61781 - protein, 11 aa, Homo Sapiens
SLKSQLIVHQR

SEQ ID NO: 61782 - protein, 11 aa, Homo Sapiens
SLNGNSSIVGR

SEQ ID NO: 61783 - protein, 11 aa, Homo Sapiens
SLSRHAALLYR

SEQ ID NO: 61784 - protein, 11 aa, Homo Sapiens
SQFRKDKIWLR

SEQ ID NO: 61785 - protein, 11 aa, Homo Sapiens
SQFVISPPALR

SEQ ID NO: 61786 - protein, 11 aa, Homo Sapiens
SQYGWSGNMER

SEQ ID NO: 61787 - protein, 11 aa, Homo Sapiens
STFIHAEDFAR

SEQ ID NO: 61788 - protein, 11 aa, Homo Sapiens
STIDADQRVLR

SEQ ID NO: 61789 - protein, 11 aa, Homo Sapiens
STIDWNKLYRR

SEQ ID NO: 61790 - protein, 11 aa, Homo Sapiens
STMPHTSGMNR

SEQ ID NO: 61791 - protein, 11 aa, Homo Sapiens
STMYPGLPSRL

SEQ ID NO: 61792 - protein, 11 aa, Homo Sapiens
STQPAPRSIFR

SEQ ID NO: 61793 - protein, 11 aa, Homo Sapiens
STYGWTANMER

SEQ ID NO: 61794 - protein, 11 aa, Homo Sapiens
SVAGLTAAAYR

SEQ ID NO: 61795 - protein, 11 aa, Homo Sapiens
SVKEISDIVQR

SEQ ID NO: 61796 - protein, 11 aa, Homo Sapiens
SVLRANMPLHV

SEQ ID NO: 61797 - protein, 11 aa, Homo Sapiens
SVMDQEMRVKR

SEQ ID NO: 61798 - protein, 11 aa, Homo Sapiens
SVQPEELIYQR

SEQ ID NO: 61799 - protein, 11 aa, Homo Sapiens
SVQPSSSLSAR

SEQ ID NO: 61800 - protein, 11 aa, Homo Sapiens
SVQTADHRFLR

SEQ ID NO: 61801 - protein, 11 aa, Homo Sapiens
SVREGQGFAFR

SEQ ID NO: 61802 - protein, 11 aa, Homo Sapiens
SVRSGYSHLPR

SEQ ID NO: 61803 - protein, 11 aa, Homo Sapiens
SVTPEGVIKQR

SEQ ID NO: 61804 - protein, 11 aa, Homo Sapiens
SVYSPSGPVNR

SEQ ID NO: 61805 - protein, 11 aa, Homo Sapiens
TIMPKDIQLAR

SEQ ID NO: 61806 - protein, 11 aa, Homo Sapiens
TLKPNLTIHQR

SEQ ID NO: 61807 - protein, 11 aa, Homo Sapiens
TLQGYGFPVNR

SEQ ID NO: 61808 - protein, 11 aa, Homo Sapiens
TMKSANICIGR

SEQ ID NO: 61809 - protein, 11 aa, Homo Sapiens
TTFTWNINHAR

SEQ ID NO: 61810 - protein, 11 aa, Homo Sapiens
TVFDAKRLIGR

SEQ ID NO: 61811 - protein, 11 aa, Homo Sapiens
TVIEKTESWPR

SEQ ID NO: 61812 - protein, 11 aa, Homo Sapiens
TVKDLRLVTNR

SEQ ID NO: 61813 - protein, 11 aa, Homo Sapiens
VIRSAVSVHLR

SEQ ID NO: 61814 - protein, 11 aa, Homo Sapiens
VLKTDEGIAYR

SEQ ID NO: 61815 - protein, 11 aa, Homo Sapiens
VLRQPQLGVLR

SEQ ID NO: 61816 - protein, 11 aa, Homo Sapiens
VTTFEALKARV

SEQ ID NO: 61817 - protein, 11 aa, Homo Sapiens
VVAPPGVVVSR

SEQ ID NO: 61818 - protein, 11 aa, Homo Sapiens
VVFSIICWFKR

SEQ ID NO: 61819 - protein, 11 aa, Homo Sapiens
VVKPDQLIKRR

SEQ ID NO: 61820 - protein, 11 aa, Homo Sapiens
VVLKWYENFQR

SEQ ID NO: 61821 - protein, 11 aa, Homo Sapiens
VVRDPAASQPR

SEQ ID NO: 61822 - protein, 8 aa, Homo Sapiens
AAERRGPL

SEQ ID NO: 61823 - protein, 8 aa, Homo Sapiens
APAAIPAL

SEQ ID NO: 61824 - protein, 8 aa, Homo Sapiens
APALAPTL

SEQ ID NO: 61825 - protein, 8 aa, Homo Sapiens
APAPSPQI

SEQ ID NO: 61826 - protein, 8 aa, Homo Sapiens
APAPVPVL

SEQ ID NO: 61827 - protein, 8 aa, Homo Sapiens
APDGLPAL

SEQ ID NO: 61828 - protein, 8 aa, Homo Sapiens
APEEHPVL

SEQ ID NO: 61829 - protein, 8 aa, Homo Sapiens
APFLRIAF

SEQ ID NO: 61830 - protein, 8 aa, Homo Sapiens
APGPGLGL

SEQ ID NO: 61831 - protein, 8 aa, Homo Sapiens
APGPGLLL

SEQ ID NO: 61832 - protein, 8 aa, Homo Sapiens
APGPVIGL

SEQ ID NO: 61833 - protein, 8 aa, Homo Sapiens
APGQGGIL

SEQ ID NO: 61834 - protein, 8 aa, Homo Sapiens
APLLRWVL

SEQ ID NO: 61835 - protein, 8 aa, Homo Sapiens
APLSGPVL

SEQ ID NO: 61836 - protein, 8 aa, Homo Sapiens
APNIISQL

SEQ ID NO: 61837 - protein, 8 aa, Homo Sapiens
APQLLIVL

SEQ ID NO: 61838 - protein, 8 aa, Homo Sapiens
APSPLPKM

SEQ ID NO: 61839 - protein, 8 aa, Homo Sapiens
APTLLPEL

SEQ ID NO: 61840 - protein, 8 aa, Homo Sapiens
APTPIQAL

SEQ ID NO: 61841 - protein, 8 aa, Homo Sapiens
APTPVPAL

SEQ ID NO: 61842 - protein, 8 aa, Homo Sapiens
APVGGHIL

SEQ ID NO: 61843 - protein, 8 aa, Homo Sapiens
APYGRITL

SEQ ID NO: 61844 - protein, 8 aa, Homo Sapiens
APYPSPVL

SEQ ID NO: 61845 - protein, 8 aa, Homo Sapiens
ETYVPKEF

SEQ ID NO: 61846 - protein, 8 aa, Homo Sapiens
FPAEPLEL

SEQ ID NO: 61847 - protein, 8 aa, Homo Sapiens
FPEKKPRL

SEQ ID NO: 61848 - protein, 8 aa, Homo Sapiens
FPHPLPSL

SEQ ID NO: 61849 - protein, 8 aa, Homo Sapiens
FPKEPVEL

SEQ ID NO: 61850 - protein, 8 aa, Homo Sapiens
IPAVGSSL

SEQ ID NO: 61851 - protein, 8 aa, Homo Sapiens
IPHIHKSL

SEQ ID NO: 61852 - protein, 8 aa, Homo Sapiens
IPTCKITL

SEQ ID NO: 61853 - protein, 8 aa, Homo Sapiens
KPFLGVCL

SEQ ID NO: 61854 - protein, 8 aa, Homo Sapiens
LPAPLPGL

SEQ ID NO: 61855 - protein, 8 aa, Homo Sapiens
LPIVTPAL

SEQ ID NO: 61856 - protein, 8 aa, Homo Sapiens
LPSHPLEL

SEQ ID NO: 61857 - protein, 8 aa, Homo Sapiens
LPSNLPQL

SEQ ID NO: 61858 - protein, 8 aa, Homo Sapiens
LPTGSTPL

SEQ ID NO: 61859 - protein, 8 aa, Homo Sapiens
LQAPVLVA

SEQ ID NO: 61860 - protein, 8 aa, Homo Sapiens
MPDSAAAL

SEQ ID NO: 61861 - protein, 8 aa, Homo Sapiens
MPGALPSL

SEQ ID NO: 61862 - protein, 8 aa, Homo Sapiens
MPRWAERL

SEQ ID NO: 61863 - protein, 8 aa, Homo Sapiens
MPVSGPGL

SEQ ID NO: 61864 - protein, 8 aa, Homo Sapiens
PASKRPPL

SEQ ID NO: 61865 - protein, 8 aa, Homo Sapiens
PAWPHRGL

SEQ ID NO: 61866 - protein, 8 aa, Homo Sapiens
PEAKKPRL

SEQ ID NO: 61867 - protein, 8 aa, Homo Sapiens
PHLVGPHL

SEQ ID NO: 61868 - protein, 8 aa, Homo Sapiens
PKRPPSAF

SEQ ID NO: 61869 - protein, 8 aa, Homo Sapiens
PRPPPKPM

SEQ ID NO: 61870 - protein, 8 aa, Homo Sapiens
PRPVLRAL

SEQ ID NO: 61871 - protein, 8 aa, Homo Sapiens
PSAARHSL

SEQ ID NO: 61872 - protein, 8 aa, Homo Sapiens
QTAAAAAL

SEQ ID NO: 61873 - protein, 8 aa, Homo Sapiens
RPFLLRRI

SEQ ID NO: 61874 - protein, 8 aa, Homo Sapiens
RPQQIPVL

SEQ ID NO: 61875 - protein, 8 aa, Homo Sapiens
RPSLLPLH

SEQ ID NO: 61876 - protein, 8 aa, Homo Sapiens
SLHHPTLI

SEQ ID NO: 61877 - protein, 8 aa, Homo Sapiens
SPAIGAYL

SEQ ID NO: 61878 - protein, 8 aa, Homo Sapiens
SPAILPPL

SEQ ID NO: 61879 - protein, 8 aa, Homo Sapiens
SPAITATL

SEQ ID NO: 61880 - protein, 8 aa, Homo Sapiens
SPAPRTAL

SEQ ID NO: 61881 - protein, 8 aa, Homo Sapiens
SPASLSSL

SEQ ID NO: 61882 - protein, 8 aa, Homo Sapiens
SPAVGSIL

SEQ ID NO: 61883 - protein, 8 aa, Homo Sapiens
SPEAACVI

SEQ ID NO: 61884 - protein, 8 aa, Homo Sapiens
SPFFREAL

SEQ ID NO: 61885 - protein, 8 aa, Homo Sapiens
SPFFRNLL

SEQ ID NO: 61886 - protein, 8 aa, Homo Sapiens
SPGLGGPL

SEQ ID NO: 61887 - protein, 8 aa, Homo Sapiens
SPIIRPLL

SEQ ID NO: 61888 - protein, 8 aa, Homo Sapiens
SPIRPLGL

SEQ ID NO: 61889 - protein, 8 aa, Homo Sapiens
SPLGSPEL

SEQ ID NO: 61890 - protein, 8 aa, Homo Sapiens
SPLPLTAL

SEQ ID NO: 61891 - protein, 8 aa, Homo Sapiens
SPLYRDEL

SEQ ID NO: 61892 - protein, 8 aa, Homo Sapiens
SPMLLVAL

SEQ ID NO: 61893 - protein, 8 aa, Homo Sapiens
SPMSVNAV

SEQ ID NO: 61894 - protein, 8 aa, Homo Sapiens
SPNKLYTL

SEQ ID NO: 61895 - protein, 8 aa, Homo Sapiens
SPQPGSAL

SEQ ID NO: 61896 - protein, 8 aa, Homo Sapiens
SPTIGKQL

SEQ ID NO: 61897 - protein, 8 aa, Homo Sapiens
SPTQLPIL

SEQ ID NO: 61898 - protein, 8 aa, Homo Sapiens
SPVFKTVL

SEQ ID NO: 61899 - protein, 8 aa, Homo Sapiens
SPVLLNCL

SEQ ID NO: 61900 - protein, 8 aa, Homo Sapiens
SPVVHSVL

SEQ ID NO: 61901 - protein, 8 aa, Homo Sapiens
SPVVRVAV

SEQ ID NO: 61902 - protein, 8 aa, Homo Sapiens
SPWPGTTL

SEQ ID NO: 61903 - protein, 8 aa, Homo Sapiens
SPYYRTKL

SEQ ID NO: 61904 - protein, 8 aa, Homo Sapiens
TPAALAAL

SEQ ID NO: 61905 - protein, 8 aa, Homo Sapiens
TPAVGPPL

SEQ ID NO: 61906 - protein, 8 aa, Homo Sapiens
TPLLMQAL

SEQ ID NO: 61907 - protein, 8 aa, Homo Sapiens
TPMLLRAL

SEQ ID NO: 61908 - protein, 8 aa, Homo Sapiens
TPTQGSVL

SEQ ID NO: 61909 - protein, 8 aa, Homo Sapiens
VAVPGQPI

SEQ ID NO: 61910 - protein, 8 aa, Homo Sapiens
VPLGPGQI

SEQ ID NO: 61911 - protein, 8 aa, Homo Sapiens
VPQGGPVL

SEQ ID NO: 61912 - protein, 8 aa, Homo Sapiens
YPNPLPVL

SEQ ID NO: 61913 - protein, 8 aa, Homo Sapiens
YPTSIASL

SEQ ID NO: 61914 - protein, 9 aa, Homo Sapiens
AAAAPSPVL

SEQ ID NO: 61915 - protein, 9 aa, Homo Sapiens
AAAAPSPVM

SEQ ID NO: 61916 - protein, 9 aa, Homo Sapiens
AAAGPGAAL

SEQ ID NO: 61917 - protein, 9 aa, Homo Sapiens
AAMAGRLMI

SEQ ID NO: 61918 - protein, 9 aa, Homo Sapiens
AARPATSTL

SEQ ID NO: 61919 - protein, 9 aa, Homo Sapiens
AARWASAKL

SEQ ID NO: 61920 - protein, 9 aa, Homo Sapiens
AARWVAKSL

SEQ ID NO: 61921 - protein, 9 aa, Homo Sapiens
AAYLRALSL

SEQ ID NO: 61922 - protein, 9 aa, Homo Sapiens
AGTPSPIQL

SEQ ID NO: 61923 - protein, 9 aa, Homo Sapiens
AIIRDRAAL

SEQ ID NO: 61924 - protein, 9 aa, Homo Sapiens
AIRNAMGSL

SEQ ID NO: 61925 - protein, 9 aa, Homo Sapiens
ALAPALSAP

SEQ ID NO: 61926 - protein, 9 aa, Homo Sapiens
APAAAAGLL

SEQ ID NO: 61927 - protein, 9 aa, Homo Sapiens
APAAAGAAL

SEQ ID NO: 61928 - protein, 9 aa, Homo Sapiens
APAAAPSSL

SEQ ID NO: 61929 - protein, 9 aa, Homo Sapiens
APAAATVAV

SEQ ID NO: 61930 - protein, 9 aa, Homo Sapiens
APAAAVPTL

SEQ ID NO: 61931 - protein, 9 aa, Homo Sapiens
APAAPGLSL

SEQ ID NO: 61932 - protein, 9 aa, Homo Sapiens
APAAVALVL

SEQ ID NO: 61933 - protein, 9 aa, Homo Sapiens
APAELKSPF

SEQ ID NO: 61934 - protein, 9 aa, Homo Sapiens
APAERQIDL

SEQ ID NO: 61935 - protein, 9 aa, Homo Sapiens
APAGGAGAL

SEQ ID NO: 61936 - protein, 9 aa, Homo Sapiens
APAGGTLLL

SEQ ID NO: 61937 - protein, 9 aa, Homo Sapiens
APAGSIISL

SEQ ID NO: 61938 - protein, 9 aa, Homo Sapiens
APALLGLAL

SEQ ID NO: 61939 - protein, 9 aa, Homo Sapiens
APALPGPAL

SEQ ID NO: 61940 - protein, 9 aa, Homo Sapiens
APALPGPQF

SEQ ID NO: 61941 - protein, 9 aa, Homo Sapiens
APALSGANL

SEQ ID NO: 61942 - protein, 9 aa, Homo Sapiens
APALVSKKL

SEQ ID NO: 61943 - protein, 9 aa, Homo Sapiens
APAPAAHVA

SEQ ID NO: 61944 - protein, 9 aa, Homo Sapiens
APAPASISL

SEQ ID NO: 61945 - protein, 9 aa, Homo Sapiens
APAPESITL

SEQ ID NO: 61946 - protein, 9 aa, Homo Sapiens
APAPGAPLL

SEQ ID NO: 61947 - protein, 9 aa, Homo Sapiens
APAPGLGAA

SEQ ID NO: 61948 - protein, 9 aa, Homo Sapiens
APAPIHNQF

SEQ ID NO: 61949 - protein, 9 aa, Homo Sapiens
APAPPPEEV

SEQ ID NO: 61950 - protein, 9 aa, Homo Sapiens
APAPPSSGL

SEQ ID NO: 61951 - protein, 9 aa, Homo Sapiens
APAPRPSLL

SEQ ID NO: 61952 - protein, 9 aa, Homo Sapiens
APAPSTVHF

SEQ ID NO: 61953 - protein, 9 aa, Homo Sapiens
APAPTAVVL

SEQ ID NO: 61954 - protein, 9 aa, Homo Sapiens
APAPVQPPM

SEQ ID NO: 61955 - protein, 9 aa, Homo Sapiens
APASAVSGL

SEQ ID NO: 61956 - protein, 9 aa, Homo Sapiens
APASFGKSF

SEQ ID NO: 61957 - protein, 9 aa, Homo Sapiens
APASGYLTF

SEQ ID NO: 61958 - protein, 9 aa, Homo Sapiens
APASPFRQL

SEQ ID NO: 61959 - protein, 9 aa, Homo Sapiens
APASRLLAL

SEQ ID NO: 61960 - protein, 9 aa, Homo Sapiens
APASVHSEI

SEQ ID NO: 61961 - protein, 9 aa, Homo Sapiens
APASWWNHM

SEQ ID NO: 61962 - protein, 9 aa, Homo Sapiens
APATVGLAF

SEQ ID NO: 61963 - protein, 9 aa, Homo Sapiens
APAYLPRSL

SEQ ID NO: 61964 - protein, 9 aa, Homo Sapiens
APDAKLITL

SEQ ID NO: 61965 - protein, 9 aa, Homo Sapiens
APDEAAEAL

SEQ ID NO: 61966 - protein, 9 aa, Homo Sapiens
APDIPTPVL

SEQ ID NO: 61967 - protein, 9 aa, Homo Sapiens
APDSQRLKL

SEQ ID NO: 61968 - protein, 9 aa, Homo Sapiens
APEFRRLGL

SEQ ID NO: 61969 - protein, 9 aa, Homo Sapiens
APELLRALL

SEQ ID NO: 61970 - protein, 9 aa, Homo Sapiens
APELQRHEL

SEQ ID NO: 61971 - protein, 9 aa, Homo Sapiens
APFLRNVEL

SEQ ID NO: 61972 - protein, 9 aa, Homo Sapiens
APFLRQEFI

SEQ ID NO: 61973 - protein, 9 aa, Homo Sapiens
APFTAGTSL

SEQ ID NO: 61974 - protein, 9 aa, Homo Sapiens
APGAFIASL

SEQ ID NO: 61975 - protein, 9 aa, Homo Sapiens
APGEFRAIM

SEQ ID NO: 61976 - protein, 9 aa, Homo Sapiens
APGEPGSAF

SEQ ID NO: 61977 - protein, 9 aa, Homo Sapiens
APGEVGSVL

SEQ ID NO: 61978 - protein, 9 aa, Homo Sapiens
APGGGPGTL

SEQ ID NO: 61979 - protein, 9 aa, Homo Sapiens
APGIRSWSL

SEQ ID NO: 61980 - protein, 9 aa, Homo Sapiens
APGLFGTPL

SEQ ID NO: 61981 - protein, 9 aa, Homo Sapiens
APGLIKTSF

SEQ ID NO: 61982 - protein, 9 aa, Homo Sapiens
APGPGRKEL

SEQ ID NO: 61983 - protein, 9 aa, Homo Sapiens
APGPPSVVV

SEQ ID NO: 61984 - protein, 9 aa, Homo Sapiens
APGPSGQSV

SEQ ID NO: 61985 - protein, 9 aa, Homo Sapiens
APGQPGTIL

SEQ ID NO: 61986 - protein, 9 aa, Homo Sapiens
APGQPSPVL

SEQ ID NO: 61987 - protein, 9 aa, Homo Sapiens
APGQRVGML

SEQ ID NO: 61988 - protein, 9 aa, Homo Sapiens
APGSWSQVL

SEQ ID NO: 61989 - protein, 9 aa, Homo Sapiens
APGVPGHTV

SEQ ID NO: 61990 - protein, 9 aa, Homo Sapiens
APGVRAVEL

SEQ ID NO: 61991 - protein, 9 aa, Homo Sapiens
APGYLPTSL

SEQ ID NO: 61992 - protein, 9 aa, Homo Sapiens
APHDYGLIL

SEQ ID NO: 61993 - protein, 9 aa, Homo Sapiens
APHEILIQI

SEQ ID NO: 61994 - protein, 9 aa, Homo Sapiens
APHLTHHTL

SEQ ID NO: 61995 - protein, 9 aa, Homo Sapiens
APHLVGPHL

SEQ ID NO: 61996 - protein, 9 aa, Homo Sapiens
APHWKRHQL

SEQ ID NO: 61997 - protein, 9 aa, Homo Sapiens
APIAKVGVL

SEQ ID NO: 61998 - protein, 9 aa, Homo Sapiens
APIASIHSF

SEQ ID NO: 61999 - protein, 9 aa, Homo Sapiens
APIMSGQGL

SEQ ID NO: 62000 - protein, 9 aa, Homo Sapiens
APINFTSRL

SEQ ID NO: 62001 - protein, 9 aa, Homo Sapiens
APISDIIAI

SEQ ID NO: 62002 - protein, 9 aa, Homo Sapiens
APITDPQQL

SEQ ID NO: 62003 - protein, 9 aa, Homo Sapiens
APKPGGLSL

SEQ ID NO: 62004 - protein, 9 aa, Homo Sapiens
APKPKWTQL

SEQ ID NO: 62005 - protein, 9 aa, Homo Sapiens
APKRPPLAF

SEQ ID NO: 62006 - protein, 9 aa, Homo Sapiens
APKRPPSAF

SEQ ID NO: 62007 - protein, 9 aa, Homo Sapiens
APLAVFQML

SEQ ID NO: 62008 - protein, 9 aa, Homo Sapiens
APLDSIHSL

SEQ ID NO: 62009 - protein, 9 aa, Homo Sapiens
APLEDEATL

SEQ ID NO: 62010 - protein, 9 aa, Homo Sapiens
APLGGTPTL

SEQ ID NO: 62011 - protein, 9 aa, Homo Sapiens
APLGQFVSL

SEQ ID NO: 62012 - protein, 9 aa, Homo Sapiens
APLGVGLGL

SEQ ID NO: 62013 - protein, 9 aa, Homo Sapiens
APLPGMTSL

SEQ ID NO: 62014 - protein, 9 aa, Homo Sapiens
APLQHRHVL

SEQ ID NO: 62015 - protein, 9 aa, Homo Sapiens
APMDVRQWV

SEQ ID NO: 62016 - protein, 9 aa, Homo Sapiens
APMIKKIAF

SEQ ID NO: 62017 - protein, 9 aa, Homo Sapiens
APMMVSNIL

SEQ ID NO: 62018 - protein, 9 aa, Homo Sapiens
APMSAAHQL

SEQ ID NO: 62019 - protein, 9 aa, Homo Sapiens
APMSPSTAL

SEQ ID NO: 62020 - protein, 9 aa, Homo Sapiens
APNERPYSL

SEQ ID NO: 62021 - protein, 9 aa, Homo Sapiens
APNGAGLVL

SEQ ID NO: 62022 - protein, 9 aa, Homo Sapiens
APNLRGSGV

SEQ ID NO: 62023 - protein, 9 aa, Homo Sapiens
APNYRLKSL

SEQ ID NO: 62024 - protein, 9 aa, Homo Sapiens
APQGGMAAL

SEQ ID NO: 62025 - protein, 9 aa, Homo Sapiens
APQLTASRL

SEQ ID NO: 62026 - protein, 9 aa, Homo Sapiens
APQPAKPRL

SEQ ID NO: 62027 - protein, 9 aa, Homo Sapiens
APQPAQVAL

SEQ ID NO: 62028 - protein, 9 aa, Homo Sapiens
APQRPLSTF

SEQ ID NO: 62029 - protein, 9 aa, Homo Sapiens
APQRVRVTL

SEQ ID NO: 62030 - protein, 9 aa, Homo Sapiens
APQSFRAEL

SEQ ID NO: 62031 - protein, 9 aa, Homo Sapiens
APQTSTPSL

SEQ ID NO: 62032 - protein, 9 aa, Homo Sapiens
APQVHIFSL

SEQ ID NO: 62033 - protein, 9 aa, Homo Sapiens
APRAGTPGF

SEQ ID NO: 62034 - protein, 9 aa, Homo Sapiens
APRDWKATL

SEQ ID NO: 62035 - protein, 9 aa, Homo Sapiens
APRELGLGL

SEQ ID NO: 62036 - protein, 9 aa, Homo Sapiens
APRHGSLGF

SEQ ID NO: 62037 - protein, 9 aa, Homo Sapiens
APRKPDWDL

SEQ ID NO: 62038 - protein, 9 aa, Homo Sapiens
APRLMITHI

SEQ ID NO: 62039 - protein, 9 aa, Homo Sapiens
APRLQSEVA

SEQ ID NO: 62040 - protein, 9 aa, Homo Sapiens
APRPAGSYL

SEQ ID NO: 62041 - protein, 9 aa, Homo Sapiens
APRPPFSTM

SEQ ID NO: 62042 - protein, 9 aa, Homo Sapiens
APRPPPKPM

SEQ ID NO: 62043 - protein, 9 aa, Homo Sapiens
APRPPVSAA

SEQ ID NO: 62044 - protein, 9 aa, Homo Sapiens
APRQPGLMA

SEQ ID NO: 62045 - protein, 9 aa, Homo Sapiens
APRTIFQRV

SEQ ID NO: 62046 - protein, 9 aa, Homo Sapiens
APRTVALTA

SEQ ID NO: 62047 - protein, 9 aa, Homo Sapiens
APRTVLLLL

SEQ ID NO: 62048 - protein, 9 aa, Homo Sapiens
APRVPVQAL

SEQ ID NO: 62049 - protein, 9 aa, Homo Sapiens
APRYSAPVI

SEQ ID NO: 62050 - protein, 9 aa, Homo Sapiens
APSAAPEAL

SEQ ID NO: 62051 - protein, 9 aa, Homo Sapiens
APSAGGCLL

SEQ ID NO: 62052 - protein, 9 aa, Homo Sapiens
APSAPAAAV

SEQ ID NO: 62053 - protein, 9 aa, Homo Sapiens
APSASVVLL

SEQ ID NO: 62054 - protein, 9 aa, Homo Sapiens
APSATMSSF

SEQ ID NO: 62055 - protein, 9 aa, Homo Sapiens
APSEKFLNM

SEQ ID NO: 62056 - protein, 9 aa, Homo Sapiens
APSESFVVL

SEQ ID NO: 62057 - protein, 9 aa, Homo Sapiens
APSGIGSIF

SEQ ID NO: 62058 - protein, 9 aa, Homo Sapiens
APSIQTPSL

SEQ ID NO: 62059 - protein, 9 aa, Homo Sapiens
APSLKNAAF

SEQ ID NO: 62060 - protein, 9 aa, Homo Sapiens
APSLKQFSL

SEQ ID NO: 62061 - protein, 9 aa, Homo Sapiens
APSLVAPAL

SEQ ID NO: 62062 - protein, 9 aa, Homo Sapiens
APSPLQPAL

SEQ ID NO: 62063 - protein, 9 aa, Homo Sapiens
APSPLSSSL

SEQ ID NO: 62064 - protein, 9 aa, Homo Sapiens
APSPPAVDL

SEQ ID NO: 62065 - protein, 9 aa, Homo Sapiens
APSPPLRAL

SEQ ID NO: 62066 - protein, 9 aa, Homo Sapiens
APSPPLSGL

SEQ ID NO: 62067 - protein, 9 aa, Homo Sapiens
APSPRPLSL

SEQ ID NO: 62068 - protein, 9 aa, Homo Sapiens
APSPVIPRL

SEQ ID NO: 62069 - protein, 9 aa, Homo Sapiens
APSQQQPML

SEQ ID NO: 62070 - protein, 9 aa, Homo Sapiens
APSQQRQQI

SEQ ID NO: 62071 - protein, 9 aa, Homo Sapiens
APSRNGMVL

SEQ ID NO: 62072 - protein, 9 aa, Homo Sapiens
APSRSLNEL

SEQ ID NO: 62073 - protein, 9 aa, Homo Sapiens
APSSPGSSW

SEQ ID NO: 62074 - protein, 9 aa, Homo Sapiens
APSSPRPAL

SEQ ID NO: 62075 - protein, 9 aa, Homo Sapiens
APSYLARSL

SEQ ID NO: 62076 - protein, 9 aa, Homo Sapiens
APSYPMASL

SEQ ID NO: 62077 - protein, 9 aa, Homo Sapiens
APTFTGSFL

SEQ ID NO: 62078 - protein, 9 aa, Homo Sapiens
APTPAGLSL

SEQ ID NO: 62079 - protein, 9 aa, Homo Sapiens
APTPAPSTI

SEQ ID NO: 62080 - protein, 9 aa, Homo Sapiens
APTPARPVL

SEQ ID NO: 62081 - protein, 9 aa, Homo Sapiens
APVASPAAL

SEQ ID NO: 62082 - protein, 9 aa, Homo Sapiens
APVAVWAAL

SEQ ID NO: 62083 - protein, 9 aa, Homo Sapiens
APVGGSPGL

SEQ ID NO: 62084 - protein, 9 aa, Homo Sapiens
APVGIRHRL

SEQ ID NO: 62085 - protein, 9 aa, Homo Sapiens
APVGSGSAL

SEQ ID NO: 62086 - protein, 9 aa, Homo Sapiens
APVGVHPSL

SEQ ID NO: 62087 - protein, 9 aa, Homo Sapiens
APVLPHTAV

SEQ ID NO: 62088 - protein, 9 aa, Homo Sapiens
APVNVTTEV

SEQ ID NO: 62089 - protein, 9 aa, Homo Sapiens
APVPPPTSL

SEQ ID NO: 62090 - protein, 9 aa, Homo Sapiens
APVSPRPGL

SEQ ID NO: 62091 - protein, 9 aa, Homo Sapiens
APVYLAAVI

SEQ ID NO: 62092 - protein, 9 aa, Homo Sapiens
APVYMAAVI

SEQ ID NO: 62093 - protein, 9 aa, Homo Sapiens
APWEKRVDL

SEQ ID NO: 62094 - protein, 9 aa, Homo Sapiens
APWHPPTLL

SEQ ID NO: 62095 - protein, 9 aa, Homo Sapiens
APWQVVPEL

SEQ ID NO: 62096 - protein, 9 aa, Homo Sapiens
APYGGPIAL

SEQ ID NO: 62097 - protein, 9 aa, Homo Sapiens
APYQFLTAF

SEQ ID NO: 62098 - protein, 9 aa, Homo Sapiens
APYSRPKQL

SEQ ID NO: 62099 - protein, 9 aa, Homo Sapiens
AVAKHFVAL

SEQ ID NO: 62100 - protein, 9 aa, Homo Sapiens
AVAPVASAL

SEQ ID NO: 62101 - protein, 9 aa, Homo Sapiens
AVEPGRPPL

SEQ ID NO: 62102 - protein, 9 aa, Homo Sapiens
AVRLIMDSL

SEQ ID NO: 62103 - protein, 9 aa, Homo Sapiens
AVRLITSSL

SEQ ID NO: 62104 - protein, 9 aa, Homo Sapiens
DPMKARVVL

SEQ ID NO: 62105 - protein, 9 aa, Homo Sapiens
EPIPKGPVL

SEQ ID NO: 62106 - protein, 9 aa, Homo Sapiens
EPRFVLRAL

SEQ ID NO: 62107 - protein, 9 aa, Homo Sapiens
EPRPPHGEL

SEQ ID NO: 62108 - protein, 9 aa, Homo Sapiens
EPRYPPHSL

SEQ ID NO: 62109 - protein, 9 aa, Homo Sapiens
FPAAPAPKM

SEQ ID NO: 62110 - protein, 9 aa, Homo Sapiens
FPAAPIPTL

SEQ ID NO: 62111 - protein, 9 aa, Homo Sapiens
FPAEDWAGL

SEQ ID NO: 62112 - protein, 9 aa, Homo Sapiens
FPAPILRAV

SEQ ID NO: 62113 - protein, 9 aa, Homo Sapiens
FPELPKSAL

SEQ ID NO: 62114 - protein, 9 aa, Homo Sapiens
FPESERPEM

SEQ ID NO: 62115 - protein, 9 aa, Homo Sapiens
FPHEPWLRL

SEQ ID NO: 62116 - protein, 9 aa, Homo Sapiens
FPHLPGKTF

SEQ ID NO: 62117 - protein, 9 aa, Homo Sapiens
FPHMPCAYL

SEQ ID NO: 62118 - protein, 9 aa, Homo Sapiens
FPHVQTDVL

SEQ ID NO: 62119 - protein, 9 aa, Homo Sapiens
FPIHVQTSL

SEQ ID NO: 62120 - protein, 9 aa, Homo Sapiens
FPKGFSVEL

SEQ ID NO: 62121 - protein, 9 aa, Homo Sapiens
FPKIPPHSL

SEQ ID NO: 62122 - protein, 9 aa, Homo Sapiens
FPMEIRQYL

SEQ ID NO: 62123 - protein, 9 aa, Homo Sapiens
FPMELRQFL

SEQ ID NO: 62124 - protein, 9 aa, Homo Sapiens
FPMSPVTSV

SEQ ID NO: 62125 - protein, 9 aa, Homo Sapiens
FPNIPGKSL

SEQ ID NO: 62126 - protein, 9 aa, Homo Sapiens
FPNKPPLTF

SEQ ID NO: 62127 - protein, 9 aa, Homo Sapiens
FPNKQGYVL

SEQ ID NO: 62128 - protein, 9 aa, Homo Sapiens
FPQVGRTAL

SEQ ID NO: 62129 - protein, 9 aa, Homo Sapiens
FPRDKLAEL

SEQ ID NO: 62130 - protein, 9 aa, Homo Sapiens
FPREPRPKL

SEQ ID NO: 62131 - protein, 9 aa, Homo Sapiens
FPRLPPASV

SEQ ID NO: 62132 - protein, 9 aa, Homo Sapiens
FPRPVTVEP

SEQ ID NO: 62133 - protein, 9 aa, Homo Sapiens
FPVLPGSHL

SEQ ID NO: 62134 - protein, 9 aa, Homo Sapiens
GAFLRHAAL

SEQ ID NO: 62135 - protein, 9 aa, Homo Sapiens
GAMAVRRVL

SEQ ID NO: 62136 - protein, 9 aa, Homo Sapiens
GARPPRLPL

SEQ ID NO: 62137 - protein, 9 aa, Homo Sapiens
GIRPPTRTA

SEQ ID NO: 62138 - protein, 9 aa, Homo Sapiens
GPAGPGASL

SEQ ID NO: 62139 - protein, 9 aa, Homo Sapiens
GPAGPILSL

SEQ ID NO: 62140 - protein, 9 aa, Homo Sapiens
GPALGRSFL

SEQ ID NO: 62141 - protein, 9 aa, Homo Sapiens
GPALSRHLL

SEQ ID NO: 62142 - protein, 9 aa, Homo Sapiens
GPAPVGRFF

SEQ ID NO: 62143 - protein, 9 aa, Homo Sapiens
GPAYAFTAL

SEQ ID NO: 62144 - protein, 9 aa, Homo Sapiens
GPESRPTEL

SEQ ID NO: 62145 - protein, 9 aa, Homo Sapiens
GPESRTISL

SEQ ID NO: 62146 - protein, 9 aa, Homo Sapiens
GPGWRPLLL

SEQ ID NO: 62147 - protein, 9 aa, Homo Sapiens
GPHQRHIAL

SEQ ID NO: 62148 - protein, 9 aa, Homo Sapiens
GPIYPGHGM

SEQ ID NO: 62149 - protein, 9 aa, Homo Sapiens
GPLDKWRAL

SEQ ID NO: 62150 - protein, 9 aa, Homo Sapiens
GPLFRNSQL

SEQ ID NO: 62151 - protein, 9 aa, Homo Sapiens
GPLPPHLAL

SEQ ID NO: 62152 - protein, 9 aa, Homo Sapiens
GPLYKNGSL

SEQ ID NO: 62153 - protein, 9 aa, Homo Sapiens
GPMGGGLTL

SEQ ID NO: 62154 - protein, 9 aa, Homo Sapiens
GPMNLRAAF

SEQ ID NO: 62155 - protein, 9 aa, Homo Sapiens
GPNERIGMV

SEQ ID NO: 62156 - protein, 9 aa, Homo Sapiens
GPNVTKITL

SEQ ID NO: 62157 - protein, 9 aa, Homo Sapiens
GPREAFRQL

SEQ ID NO: 62158 - protein, 9 aa, Homo Sapiens
GPREALSRL

SEQ ID NO: 62159 - protein, 9 aa, Homo Sapiens
GPRLPWTRL

SEQ ID NO: 62160 - protein, 9 aa, Homo Sapiens
GPRPGAERL

SEQ ID NO: 62161 - protein, 9 aa, Homo Sapiens
GPRSSLRVL

SEQ ID NO: 62162 - protein, 9 aa, Homo Sapiens
GPRSWIQKV

SEQ ID NO: 62163 - protein, 9 aa, Homo Sapiens
GPSAPFSTL

SEQ ID NO: 62164 - protein, 9 aa, Homo Sapiens
GPSLAAPAL

SEQ ID NO: 62165 - protein, 9 aa, Homo Sapiens
GPSPNPLIL

SEQ ID NO: 62166 - protein, 9 aa, Homo Sapiens
GPSSPGLTL

SEQ ID NO: 62167 - protein, 9 aa, Homo Sapiens
GPSSPWTQL

SEQ ID NO: 62168 - protein, 9 aa, Homo Sapiens
GPTEGRPQL

SEQ ID NO: 62169 - protein, 9 aa, Homo Sapiens
GPTQPPLSL

SEQ ID NO: 62170 - protein, 9 aa, Homo Sapiens
GVRPSPMQL

SEQ ID NO: 62171 - protein, 9 aa, Homo Sapiens
GVRPVSGDL

SEQ ID NO: 62172 - protein, 9 aa, Homo Sapiens
HAAAYRNAL

SEQ ID NO: 62173 - protein, 9 aa, Homo Sapiens
HPAAKMIVM

SEQ ID NO: 62174 - protein, 9 aa, Homo Sapiens
HPAGPRTVF

SEQ ID NO: 62175 - protein, 9 aa, Homo Sapiens
HPAVHAGIL

SEQ ID NO: 62176 - protein, 9 aa, Homo Sapiens
HPESERISM

SEQ ID NO: 62177 - protein, 9 aa, Homo Sapiens
HPFFKDMSL

SEQ ID NO: 62178 - protein, 9 aa, Homo Sapiens
HPGPVNSEL

SEQ ID NO: 62179 - protein, 9 aa, Homo Sapiens
HPINPRVAL

SEQ ID NO: 62180 - protein, 9 aa, Homo Sapiens
HPIYNIKSL

SEQ ID NO: 62181 - protein, 9 aa, Homo Sapiens
HPLSNPAEL

SEQ ID NO: 62182 - protein, 9 aa, Homo Sapiens
HPMAYQLQL

SEQ ID NO: 62183 - protein, 9 aa, Homo Sapiens
HPMGGLNAM

SEQ ID NO: 62184 - protein, 9 aa, Homo Sapiens
HPMNSISSL

SEQ ID NO: 62185 - protein, 9 aa, Homo Sapiens
HPNGNITEL

SEQ ID NO: 62186 - protein, 9 aa, Homo Sapiens
HPNSNLLDL

SEQ ID NO: 62187 - protein, 9 aa, Homo Sapiens
HPQPGAVEL

SEQ ID NO: 62188 - protein, 9 aa, Homo Sapiens
HPRAYFMQL

SEQ ID NO: 62189 - protein, 9 aa, Homo Sapiens
HPRDFFSRL

SEQ ID NO: 62190 - protein, 9 aa, Homo Sapiens
HPRDPNLLL

SEQ ID NO: 62191 - protein, 9 aa, Homo Sapiens
HPREPALGP

SEQ ID NO: 62192 - protein, 9 aa, Homo Sapiens
HPRIITEGF

SEQ ID NO: 62193 - protein, 9 aa, Homo Sapiens
HPRLVVIVL

SEQ ID NO: 62194 - protein, 9 aa, Homo Sapiens
HPRSPTPTL

SEQ ID NO: 62195 - protein, 9 aa, Homo Sapiens
HPRVGDLIL

SEQ ID NO: 62196 - protein, 9 aa, Homo Sapiens
HPRYFGPNL

SEQ ID NO: 62197 - protein, 9 aa, Homo Sapiens
HPSLPASSL

SEQ ID NO: 62198 - protein, 9 aa, Homo Sapiens
HPTDERVAL

SEQ ID NO: 62199 - protein, 9 aa, Homo Sapiens
HPTSHVSLL

SEQ ID NO: 62200 - protein, 9 aa, Homo Sapiens
IAAPTSSAL

SEQ ID NO: 62201 - protein, 9 aa, Homo Sapiens
IARLPSSTL

SEQ ID NO: 62202 - protein, 9 aa, Homo Sapiens
IINAARESL

SEQ ID NO: 62203 - protein, 9 aa, Homo Sapiens
IIREPLTEL

SEQ ID NO: 62204 - protein, 9 aa, Homo Sapiens
IPAAPVPSL

SEQ ID NO: 62205 - protein, 9 aa, Homo Sapiens
IPAASAAAM

SEQ ID NO: 62206 - protein, 9 aa, Homo Sapiens
IPADTFAAL

SEQ ID NO: 62207 - protein, 9 aa, Homo Sapiens
IPAGGVLTL

SEQ ID NO: 62208 - protein, 9 aa, Homo Sapiens
IPAKKYVKL

SEQ ID NO: 62209 - protein, 9 aa, Homo Sapiens
IPAKPPVSF

SEQ ID NO: 62210 - protein, 9 aa, Homo Sapiens
IPALGGISL

SEQ ID NO: 62211 - protein, 9 aa, Homo Sapiens
IPANPPMAF

SEQ ID NO: 62212 - protein, 9 aa, Homo Sapiens
IPANWKTEL

SEQ ID NO: 62213 - protein, 9 aa, Homo Sapiens
IPASNRLLL

SEQ ID NO: 62214 - protein, 9 aa, Homo Sapiens
IPCPTVVLL

SEQ ID NO: 62215 - protein, 9 aa, Homo Sapiens
IPDHFRPPL

SEQ ID NO: 62216 - protein, 9 aa, Homo Sapiens
IPELHRPVV

SEQ ID NO: 62217 - protein, 9 aa, Homo Sapiens
IPFAAPTAL

SEQ ID NO: 62218 - protein, 9 aa, Homo Sapiens
IPFSGALEL

SEQ ID NO: 62219 - protein, 9 aa, Homo Sapiens
IPFWRNTAV

SEQ ID NO: 62220 - protein, 9 aa, Homo Sapiens
IPGEPGFPL

SEQ ID NO: 62221 - protein, 9 aa, Homo Sapiens
IPHMDIEAL

SEQ ID NO: 62222 - protein, 9 aa, Homo Sapiens
IPIGGGTSV

SEQ ID NO: 62223 - protein, 9 aa, Homo Sapiens
IPISPSTEV

SEQ ID NO: 62224 - protein, 9 aa, Homo Sapiens
IPKNNPPTL

SEQ ID NO: 62225 - protein, 9 aa, Homo Sapiens
IPKPLNPAL

SEQ ID NO: 62226 - protein, 9 aa, Homo Sapiens
IPKSAVGEL

SEQ ID NO: 62227 - protein, 9 aa, Homo Sapiens
IPLAKRVAL

SEQ ID NO: 62228 - protein, 9 aa, Homo Sapiens
IPLKPSNEL

SEQ ID NO: 62229 - protein, 9 aa, Homo Sapiens
IPLLGKSSL

SEQ ID NO: 62230 - protein, 9 aa, Homo Sapiens
IPMNIGTGL

SEQ ID NO: 62231 - protein, 9 aa, Homo Sapiens
IPMSDPQVL

SEQ ID NO: 62232 - protein, 9 aa, Homo Sapiens
IPMTGKPSL

SEQ ID NO: 62233 - protein, 9 aa, Homo Sapiens
IPMTPTSSF

SEQ ID NO: 62234 - protein, 9 aa, Homo Sapiens
IPNEIIHAL

SEQ ID NO: 62235 - protein, 9 aa, Homo Sapiens
IPNERTMQL

SEQ ID NO: 62236 - protein, 9 aa, Homo Sapiens
IPNFPRSTV

SEQ ID NO: 62237 - protein, 9 aa, Homo Sapiens
IPNNVKTAV

SEQ ID NO: 62238 - protein, 9 aa, Homo Sapiens
IPQPPILQL

SEQ ID NO: 62239 - protein, 9 aa, Homo Sapiens
IPQPTPASL

SEQ ID NO: 62240 - protein, 9 aa, Homo Sapiens
IPRILGPGL

SEQ ID NO: 62241 - protein, 9 aa, Homo Sapiens
IPRLIVSQL

SEQ ID NO: 62242 - protein, 9 aa, Homo Sapiens
IPRYIVSQL

SEQ ID NO: 62243 - protein, 9 aa, Homo Sapiens
IPSEWHIEL

SEQ ID NO: 62244 - protein, 9 aa, Homo Sapiens
IPSSHPVSL

SEQ ID NO: 62245 - protein, 9 aa, Homo Sapiens
IPTGEGPPL

SEQ ID NO: 62246 - protein, 9 aa, Homo Sapiens
IPYEGFASL

SEQ ID NO: 62247 - protein, 9 aa, Homo Sapiens
IPYGERITL

SEQ ID NO: 62248 - protein, 9 aa, Homo Sapiens
IPYPRPIHL

SEQ ID NO: 62249 - protein, 9 aa, Homo Sapiens
ITAPPGTAA

SEQ ID NO: 62250 - protein, 9 aa, Homo Sapiens
ITAPPSRVL

SEQ ID NO: 62251 - protein, 9 aa, Homo Sapiens
IVAQSGPAL

SEQ ID NO: 62252 - protein, 9 aa, Homo Sapiens
KAASVRPVL

SEQ ID NO: 62253 - protein, 9 aa, Homo Sapiens
KINKKRIAL

SEQ ID NO: 62254 - protein, 9 aa, Homo Sapiens
KIRDVTKCL

SEQ ID NO: 62255 - protein, 9 aa, Homo Sapiens
KLAPPSSTL

SEQ ID NO: 62256 - protein, 9 aa, Homo Sapiens
KPANVFITA

SEQ ID NO: 62257 - protein, 9 aa, Homo Sapiens
KPASFMTSI

SEQ ID NO: 62258 - protein, 9 aa, Homo Sapiens
KPASVFVQL

SEQ ID NO: 62259 - protein, 9 aa, Homo Sapiens
KPFAEVRIL

SEQ ID NO: 62260 - protein, 9 aa, Homo Sapiens
KPGKFVTTL

SEQ ID NO: 62261 - protein, 9 aa, Homo Sapiens
KPHVNVGTI

SEQ ID NO: 62262 - protein, 9 aa, Homo Sapiens
KPIEQLLGF

SEQ ID NO: 62263 - protein, 9 aa, Homo Sapiens
KPIFSLNTV

SEQ ID NO: 62264 - protein, 9 aa, Homo Sapiens
KPINFSVIL

SEQ ID NO: 62265 - protein, 9 aa, Homo Sapiens
KPKAPPPSL

SEQ ID NO: 62266 - protein, 9 aa, Homo Sapiens
KPKFILSVL

SEQ ID NO: 62267 - protein, 9 aa, Homo Sapiens
KPKIQHVGL

SEQ ID NO: 62268 - protein, 9 aa, Homo Sapiens
KPKMNYEKL

SEQ ID NO: 62269 - protein, 9 aa, Homo Sapiens
KPLDNASKL

SEQ ID NO: 62270 - protein, 9 aa, Homo Sapiens
KPLEKPLKL

SEQ ID NO: 62271 - protein, 9 aa, Homo Sapiens
KPMEGWIAV

SEQ ID NO: 62272 - protein, 9 aa, Homo Sapiens
KPMEKLLGL

SEQ ID NO: 62273 - protein, 9 aa, Homo Sapiens
KPMKSVLVV

SEQ ID NO: 62274 - protein, 9 aa, Homo Sapiens
KPMTLKLIM

SEQ ID NO: 62275 - protein, 9 aa, Homo Sapiens
KPPSPGTVL

SEQ ID NO: 62276 - protein, 9 aa, Homo Sapiens
KPRPIIPML

SEQ ID NO: 62277 - protein, 9 aa, Homo Sapiens
KPRPPLHLL

SEQ ID NO: 62278 - protein, 9 aa, Homo Sapiens
KPRSPPRAL

SEQ ID NO: 62279 - protein, 9 aa, Homo Sapiens
KPSGVSAAL

SEQ ID NO: 62280 - protein, 9 aa, Homo Sapiens
KPSKWWTCF

SEQ ID NO: 62281 - protein, 9 aa, Homo Sapiens
KPSLPFTSL

SEQ ID NO: 62282 - protein, 9 aa, Homo Sapiens
KPSPKTIAF

SEQ ID NO: 62283 - protein, 9 aa, Homo Sapiens
KPSSTTPRL

SEQ ID NO: 62284 - protein, 9 aa, Homo Sapiens
KPSSWLRTL

SEQ ID NO: 62285 - protein, 9 aa, Homo Sapiens
KPTDKLRAL

SEQ ID NO: 62286 - protein, 9 aa, Homo Sapiens
KPTHVVVTL

SEQ ID NO: 62287 - protein, 9 aa, Homo Sapiens
KPTKSITCL

SEQ ID NO: 62288 - protein, 9 aa, Homo Sapiens
KPTRKFAYL

SEQ ID NO: 62289 - protein, 9 aa, Homo Sapiens
KPVAPSNVL

SEQ ID NO: 62290 - protein, 9 aa, Homo Sapiens
KPVIPAAAL

SEQ ID NO: 62291 - protein, 9 aa, Homo Sapiens
KPVSLGQAL

SEQ ID NO: 62292 - protein, 9 aa, Homo Sapiens
KPVYPGQTL

SEQ ID NO: 62293 - protein, 9 aa, Homo Sapiens
KPWEKSPIL

SEQ ID NO: 62294 - protein, 9 aa, Homo Sapiens
KPYLPSRAL

SEQ ID NO: 62295 - protein, 9 aa, Homo Sapiens
KPYSGGLCL

SEQ ID NO: 62296 - protein, 9 aa, Homo Sapiens
KVRAVFDNL

SEQ ID NO: 62297 - protein, 9 aa, Homo Sapiens
KVRDPRPWL

SEQ ID NO: 62298 - protein, 9 aa, Homo Sapiens
KVREEFKEL

SEQ ID NO: 62299 - protein, 9 aa, Homo Sapiens
LDPVLQNPL

SEQ ID NO: 62300 - protein, 9 aa, Homo Sapiens
LIRPVSASF

SEQ ID NO: 62301 - protein, 9 aa, Homo Sapiens
LPAAPASSL

SEQ ID NO: 62302 - protein, 9 aa, Homo Sapiens
LPAAPGKGL

SEQ ID NO: 62303 - protein, 9 aa, Homo Sapiens
LPAEGVKEL

SEQ ID NO: 62304 - protein, 9 aa, Homo Sapiens
LPAGAALCL

SEQ ID NO: 62305 - protein, 9 aa, Homo Sapiens
LPALPLAEL

SEQ ID NO: 62306 - protein, 9 aa, Homo Sapiens
LPALPTQAL

SEQ ID NO: 62307 - protein, 9 aa, Homo Sapiens
LPAPKWTEL

SEQ ID NO: 62308 - protein, 9 aa, Homo Sapiens
LPAPPHIDV

SEQ ID NO: 62309 - protein, 9 aa, Homo Sapiens
LPAPPTQNM

SEQ ID NO: 62310 - protein, 9 aa, Homo Sapiens
LPAPSWNVL

SEQ ID NO: 62311 - protein, 9 aa, Homo Sapiens
LPAQPASTF

SEQ ID NO: 62312 - protein, 9 aa, Homo Sapiens
LPAQSAATL

SEQ ID NO: 62313 - protein, 9 aa, Homo Sapiens
LPARFFSCM

SEQ ID NO: 62314 - protein, 9 aa, Homo Sapiens
LPARFYQAL

SEQ ID NO: 62315 - protein, 9 aa, Homo Sapiens
LPASGQIAL

SEQ ID NO: 62316 - protein, 9 aa, Homo Sapiens
LPASPAHQL

SEQ ID NO: 62317 - protein, 9 aa, Homo Sapiens
LPASVHPQL

SEQ ID NO: 62318 - protein, 9 aa, Homo Sapiens
LPATATMSL

SEQ ID NO: 62319 - protein, 9 aa, Homo Sapiens
LPAWPHRGL

SEQ ID NO: 62320 - protein, 9 aa, Homo Sapiens
LPCGASVIL

SEQ ID NO: 62321 - protein, 9 aa, Homo Sapiens
LPCPGKATL

SEQ ID NO: 62322 - protein, 9 aa, Homo Sapiens
LPDERTISL

SEQ ID NO: 62323 - protein, 9 aa, Homo Sapiens
LPDFERESL

SEQ ID NO: 62324 - protein, 9 aa, Homo Sapiens
LPEAKKPRL

SEQ ID NO: 62325 - protein, 9 aa, Homo Sapiens
LPEKNRQML

SEQ ID NO: 62326 - protein, 9 aa, Homo Sapiens
LPFKYPAVL

SEQ ID NO: 62327 - protein, 9 aa, Homo Sapiens
LPFLRITSL

SEQ ID NO: 62328 - protein, 9 aa, Homo Sapiens
LPGGPTLTF

SEQ ID NO: 62329 - protein, 9 aa, Homo Sapiens
LPGPTGSVV

SEQ ID NO: 62330 - protein, 9 aa, Homo Sapiens
LPGPVTLVM

SEQ ID NO: 62331 - protein, 9 aa, Homo Sapiens
LPGSGKSTL

SEQ ID NO: 62332 - protein, 9 aa, Homo Sapiens
LPHAPGVQM

SEQ ID NO: 62333 - protein, 9 aa, Homo Sapiens
LPHLPSLEI

SEQ ID NO: 62334 - protein, 9 aa, Homo Sapiens
LPHSATVTL

SEQ ID NO: 62335 - protein, 9 aa, Homo Sapiens
LPHVPLGVI

SEQ ID NO: 62336 - protein, 9 aa, Homo Sapiens
LPIAASSSL

SEQ ID NO: 62337 - protein, 9 aa, Homo Sapiens
LPKPPFGML

SEQ ID NO: 62338 - protein, 9 aa, Homo Sapiens
LPKQPPLAL

SEQ ID NO: 62339 - protein, 9 aa, Homo Sapiens
LPKQPPLML

SEQ ID NO: 62340 - protein, 9 aa, Homo Sapiens
LPKVQSIQL

SEQ ID NO: 62341 - protein, 9 aa, Homo Sapiens
LPLAHVLEL

SEQ ID NO: 62342 - protein, 9 aa, Homo Sapiens
LPNDVISSL

SEQ ID NO: 62343 - protein, 9 aa, Homo Sapiens
LPNVPSIAL

SEQ ID NO: 62344 - protein, 9 aa, Homo Sapiens
LPPPPPHAL

SEQ ID NO: 62345 - protein, 9 aa, Homo Sapiens
LPQANRDTL

SEQ ID NO: 62346 - protein, 9 aa, Homo Sapiens
LPQGIVREL

SEQ ID NO: 62347 - protein, 9 aa, Homo Sapiens
LPQKAGGFL

SEQ ID NO: 62348 - protein, 9 aa, Homo Sapiens
LPQKPHLKL

SEQ ID NO: 62349 - protein, 9 aa, Homo Sapiens
LPQLTGPVL

SEQ ID NO: 62350 - protein, 9 aa, Homo Sapiens
LPQPVPLSV

SEQ ID NO: 62351 - protein, 9 aa, Homo Sapiens
LPRELSKQV

SEQ ID NO: 62352 - protein, 9 aa, Homo Sapiens
LPRPPPPEM

SEQ ID NO: 62353 - protein, 9 aa, Homo Sapiens
LPRPVPLVA

SEQ ID NO: 62354 - protein, 9 aa, Homo Sapiens
LPRPVPQNL

SEQ ID NO: 62355 - protein, 9 aa, Homo Sapiens
LPRQPPMSL

SEQ ID NO: 62356 - protein, 9 aa, Homo Sapiens
LPRREGYEF

SEQ ID NO: 62357 - protein, 9 aa, Homo Sapiens
LPSAPGVVL

SEQ ID NO: 62358 - protein, 9 aa, Homo Sapiens
LPSEHQTIL

SEQ ID NO: 62359 - protein, 9 aa, Homo Sapiens
LPSGAILSL

SEQ ID NO: 62360 - protein, 9 aa, Homo Sapiens
LPSGFRKFL

SEQ ID NO: 62361 - protein, 9 aa, Homo Sapiens
LPSKPSSTL

SEQ ID NO: 62362 - protein, 9 aa, Homo Sapiens
LPSKPYSTL

SEQ ID NO: 62363 - protein, 9 aa, Homo Sapiens
LPSLPTAEL

SEQ ID NO: 62364 - protein, 9 aa, Homo Sapiens
LPSMPEPAL

SEQ ID NO: 62365 - protein, 9 aa, Homo Sapiens
LPSPEGLSL

SEQ ID NO: 62366 - protein, 9 aa, Homo Sapiens
LPSPFLRAL

SEQ ID NO: 62367 - protein, 9 aa, Homo Sapiens
LPSPPAVAV

SEQ ID NO: 62368 - protein, 9 aa, Homo Sapiens
LPSQKTASL

SEQ ID NO: 62369 - protein, 9 aa, Homo Sapiens
LPSQVSRVV

SEQ ID NO: 62370 - protein, 9 aa, Homo Sapiens
LPSRKLVAL

SEQ ID NO: 62371 - protein, 9 aa, Homo Sapiens
LPSSPPDAL

SEQ ID NO: 62372 - protein, 9 aa, Homo Sapiens
LPSSVISAI

SEQ ID NO: 62373 - protein, 9 aa, Homo Sapiens
LPSTPGLGM

SEQ ID NO: 62374 - protein, 9 aa, Homo Sapiens
LPSTVKQAV

SEQ ID NO: 62375 - protein, 9 aa, Homo Sapiens
LPSVPSTHL

SEQ ID NO: 62376 - protein, 9 aa, Homo Sapiens
LPSWGRAEL

SEQ ID NO: 62377 - protein, 9 aa, Homo Sapiens
LPTSPGPAL

SEQ ID NO: 62378 - protein, 9 aa, Homo Sapiens
LPTWRPTSM

SEQ ID NO: 62379 - protein, 9 aa, Homo Sapiens
LPVASSSTL

SEQ ID NO: 62380 - protein, 9 aa, Homo Sapiens
LPVGTGTSL

SEQ ID NO: 62381 - protein, 9 aa, Homo Sapiens
LPWASTHSL

SEQ ID NO: 62382 - protein, 9 aa, Homo Sapiens
LPWPARPAL

SEQ ID NO: 62383 - protein, 9 aa, Homo Sapiens
LPYAGDVSM

SEQ ID NO: 62384 - protein, 9 aa, Homo Sapiens
LPYSIRVLL

SEQ ID NO: 62385 - protein, 9 aa, Homo Sapiens
LPYSVGRVL

SEQ ID NO: 62386 - protein, 9 aa, Homo Sapiens
LTRPGSSSL

SEQ ID NO: 62387 - protein, 9 aa, Homo Sapiens
LVMAPRTVL

SEQ ID NO: 62388 - protein, 9 aa, Homo Sapiens
LVRDVVSSL

SEQ ID NO: 62389 - protein, 9 aa, Homo Sapiens
LVRPVFGEL

SEQ ID NO: 62390 - protein, 9 aa, Homo Sapiens
MIRAAPPPL

SEQ ID NO: 62391 - protein, 9 aa, Homo Sapiens
MPAFLRSAL

SEQ ID NO: 62392 - protein, 9 aa, Homo Sapiens
MPAITGTGL

SEQ ID NO: 62393 - protein, 9 aa, Homo Sapiens
MPALRSINL

SEQ ID NO: 62394 - protein, 9 aa, Homo Sapiens
MPANSGLAL

SEQ ID NO: 62395 - protein, 9 aa, Homo Sapiens
MPARWLTHL

SEQ ID NO: 62396 - protein, 9 aa, Homo Sapiens
MPHVPITTL

SEQ ID NO: 62397 - protein, 9 aa, Homo Sapiens
MPKFSVSGL

SEQ ID NO: 62398 - protein, 9 aa, Homo Sapiens
MPKKNRIAI

SEQ ID NO: 62399 - protein, 9 aa, Homo Sapiens
MPKMDQDSL

SEQ ID NO: 62400 - protein, 9 aa, Homo Sapiens
MPLAEAGAL

SEQ ID NO: 62401 - protein, 9 aa, Homo Sapiens
MPLPGTKAL

SEQ ID NO: 62402 - protein, 9 aa, Homo Sapiens
MPQDLRSPA

SEQ ID NO: 62403 - protein, 9 aa, Homo Sapiens
MPRGVVVTL

SEQ ID NO: 62404 - protein, 9 aa, Homo Sapiens
MPSPVSPKL

SEQ ID NO: 62405 - protein, 9 aa, Homo Sapiens
MPSQFRDIL

SEQ ID NO: 62406 - protein, 9 aa, Homo Sapiens
MPSSAVRVL

SEQ ID NO: 62407 - protein, 9 aa, Homo Sapiens
MPTIPALAL

SEQ ID NO: 62408 - protein, 9 aa, Homo Sapiens
MPTMRLLSF

SEQ ID NO: 62409 - protein, 9 aa, Homo Sapiens
MVRRFLVTL

SEQ ID NO: 62410 - protein, 9 aa, Homo Sapiens
NAAERRGPL

SEQ ID NO: 62411 - protein, 9 aa, Homo Sapiens
NIRNIGKTL

SEQ ID NO: 62412 - protein, 9 aa, Homo Sapiens
NPAAAAAAV

SEQ ID NO: 62413 - protein, 9 aa, Homo Sapiens
NPAENFRVL

SEQ ID NO: 62414 - protein, 9 aa, Homo Sapiens
NPAPPIDAV

SEQ ID NO: 62415 - protein, 9 aa, Homo Sapiens
NPASKVIAL

SEQ ID NO: 62416 - protein, 9 aa, Homo Sapiens
NPASPPLSL

SEQ ID NO: 62417 - protein, 9 aa, Homo Sapiens
NPDIMRQTL

SEQ ID NO: 62418 - protein, 9 aa, Homo Sapiens
NPEKRYNVL

SEQ ID NO: 62419 - protein, 9 aa, Homo Sapiens
NPEVRRAVL

SEQ ID NO: 62420 - protein, 9 aa, Homo Sapiens
NPHEPWNRL

SEQ ID NO: 62421 - protein, 9 aa, Homo Sapiens
NPISTVTEL

SEQ ID NO: 62422 - protein, 9 aa, Homo Sapiens
NPKNPGLWL

SEQ ID NO: 62423 - protein, 9 aa, Homo Sapiens
NPMVTGTSV

SEQ ID NO: 62424 - protein, 9 aa, Homo Sapiens
NPMVVANAV

SEQ ID NO: 62425 - protein, 9 aa, Homo Sapiens
NPNHRTPTL

SEQ ID NO: 62426 - protein, 9 aa, Homo Sapiens
NPNLRKNVL

SEQ ID NO: 62427 - protein, 9 aa, Homo Sapiens
NPNMRLSQL

SEQ ID NO: 62428 - protein, 9 aa, Homo Sapiens
NPQERTLTL

SEQ ID NO: 62429 - protein, 9 aa, Homo Sapiens
NPRDLFGSL

SEQ ID NO: 62430 - protein, 9 aa, Homo Sapiens
NPRIPYTEL

SEQ ID NO: 62431 - protein, 9 aa, Homo Sapiens
NPRKYLRSV

SEQ ID NO: 62432 - protein, 9 aa, Homo Sapiens
NPRPTAQDL

SEQ ID NO: 62433 - protein, 9 aa, Homo Sapiens
NPRSVTLLI

SEQ ID NO: 62434 - protein, 9 aa, Homo Sapiens
NPTQVGTAL

SEQ ID NO: 62435 - protein, 9 aa, Homo Sapiens
NVRIATTAL

SEQ ID NO: 62436 - protein, 9 aa, Homo Sapiens
NVRPPNTAL

SEQ ID NO: 62437 - protein, 9 aa, Homo Sapiens
NVRPVPLEL

SEQ ID NO: 62438 - protein, 9 aa, Homo Sapiens
PAYHSSLMD

SEQ ID NO: 62439 - protein, 9 aa, Homo Sapiens
PPEYHRKAV

SEQ ID NO: 62440 - protein, 9 aa, Homo Sapiens
PSIVHRKCF

SEQ ID NO: 62441 - protein, 9 aa, Homo Sapiens
PSRTLFPSL

SEQ ID NO: 62442 - protein, 9 aa, Homo Sapiens
PSSAPAVST

SEQ ID NO: 62443 - protein, 9 aa, Homo Sapiens
QAAAVRHVL

SEQ ID NO: 62444 - protein, 9 aa, Homo Sapiens
QPAEMAAEL

SEQ ID NO: 62445 - protein, 9 aa, Homo Sapiens
QPAQAPGTL

SEQ ID NO: 62446 - protein, 9 aa, Homo Sapiens
QPASFAVSL

SEQ ID NO: 62447 - protein, 9 aa, Homo Sapiens
QPATPGLGM

SEQ ID NO: 62448 - protein, 9 aa, Homo Sapiens
QPESIRSDL

SEQ ID NO: 62449 - protein, 9 aa, Homo Sapiens
QPEWLRAEV

SEQ ID NO: 62450 - protein, 9 aa, Homo Sapiens
QPFGGGSHM

SEQ ID NO: 62451 - protein, 9 aa, Homo Sapiens
QPHLSRQDL

SEQ ID NO: 62452 - protein, 9 aa, Homo Sapiens
QPITPGPSI

SEQ ID NO: 62453 - protein, 9 aa, Homo Sapiens
QPLARPNTL

SEQ ID NO: 62454 - protein, 9 aa, Homo Sapiens
QPNMRLRQL

SEQ ID NO: 62455 - protein, 9 aa, Homo Sapiens
QPNPLPLRL

SEQ ID NO: 62456 - protein, 9 aa, Homo Sapiens
QPPSIRNGL

SEQ ID NO: 62457 - protein, 9 aa, Homo Sapiens
QPQFQRQGL

SEQ ID NO: 62458 - protein, 9 aa, Homo Sapiens
QPQHAFNAL

SEQ ID NO: 62459 - protein, 9 aa, Homo Sapiens
QPQNGRMLV

SEQ ID NO: 62460 - protein, 9 aa, Homo Sapiens
QPSEVLRTV

SEQ ID NO: 62461 - protein, 9 aa, Homo Sapiens
QPSFPTPQL

SEQ ID NO: 62462 - protein, 9 aa, Homo Sapiens
QPTCPGAQL

SEQ ID NO: 62463 - protein, 9 aa, Homo Sapiens
QTAPLRAEL

SEQ ID NO: 62464 - protein, 9 aa, Homo Sapiens
QVQGPRPVL

SEQ ID NO: 62465 - protein, 9 aa, Homo Sapiens
RAAPHRISL

SEQ ID NO: 62466 - protein, 9 aa, Homo Sapiens
RIRAPIMRM

SEQ ID NO: 62467 - protein, 9 aa, Homo Sapiens
RIVPRFSEL

SEQ ID NO: 62468 - protein, 9 aa, Homo Sapiens
RLQAQRNEL

SEQ ID NO: 62469 - protein, 9 aa, Homo Sapiens
RLREVSEKL

SEQ ID NO: 62470 - protein, 9 aa, Homo Sapiens
RPAAIPIEI

SEQ ID NO: 62471 - protein, 9 aa, Homo Sapiens
RPAANFDAI

SEQ ID NO: 62472 - protein, 9 aa, Homo Sapiens
RPAANPIQF

SEQ ID NO: 62473 - protein, 9 aa, Homo Sapiens
RPADYLFML

SEQ ID NO: 62474 - protein, 9 aa, Homo Sapiens
RPAERLDYL

SEQ ID NO: 62475 - protein, 9 aa, Homo Sapiens
RPAFFAERL

SEQ ID NO: 62476 - protein, 9 aa, Homo Sapiens
RPAFFSPSL

SEQ ID NO: 62477 - protein, 9 aa, Homo Sapiens
RPAFPVKKL

SEQ ID NO: 62478 - protein, 9 aa, Homo Sapiens
RPAGLQGAL

SEQ ID NO: 62479 - protein, 9 aa, Homo Sapiens
RPALFANLF

SEQ ID NO: 62480 - protein, 9 aa, Homo Sapiens
RPALPVSYL

SEQ ID NO: 62481 - protein, 9 aa, Homo Sapiens
RPAPARPTM

SEQ ID NO: 62482 - protein, 9 aa, Homo Sapiens
RPAPLSAEL

SEQ ID NO: 62483 - protein, 9 aa, Homo Sapiens
RPAPPPEAL

SEQ ID NO: 62484 - protein, 9 aa, Homo Sapiens
RPAQKHWVL

SEQ ID NO: 62485 - protein, 9 aa, Homo Sapiens
RPAQLHIGF

SEQ ID NO: 62486 - protein, 9 aa, Homo Sapiens
RPARDMWVM

SEQ ID NO: 62487 - protein, 9 aa, Homo Sapiens
RPAVERLEL

SEQ ID NO: 62488 - protein, 9 aa, Homo Sapiens
RPCDISRQL

SEQ ID NO: 62489 - protein, 9 aa, Homo Sapiens
RPDITHQSL

SEQ ID NO: 62490 - protein, 9 aa, Homo Sapiens
RPDLRMAAI

SEQ ID NO: 62491 - protein, 9 aa, Homo Sapiens
RPDSPAHVL

SEQ ID NO: 62492 - protein, 9 aa, Homo Sapiens
RPEDRILVL

SEQ ID NO: 62493 - protein, 9 aa, Homo Sapiens
RPEEGRPVV

SEQ ID NO: 62494 - protein, 9 aa, Homo Sapiens
RPENRSFYL

SEQ ID NO: 62495 - protein, 9 aa, Homo Sapiens
RPENYREAL

SEQ ID NO: 62496 - protein, 9 aa, Homo Sapiens
RPERVKPFM

SEQ ID NO: 62497 - protein, 9 aa, Homo Sapiens
RPFEDQTSL

SEQ ID NO: 62498 - protein, 9 aa, Homo Sapiens
RPFERTITM

SEQ ID NO: 62499 - protein, 9 aa, Homo Sapiens
RPFHGISTV

SEQ ID NO: 62500 - protein, 9 aa, Homo Sapiens
RPFHGWTSL

SEQ ID NO: 62501 - protein, 9 aa, Homo Sapiens
RPFLSRESL

SEQ ID NO: 62502 - protein, 9 aa, Homo Sapiens
RPFPKLRIL

SEQ ID NO: 62503 - protein, 9 aa, Homo Sapiens
RPFPVPSSL

SEQ ID NO: 62504 - protein, 9 aa, Homo Sapiens
RPGHKPSIL

SEQ ID NO: 62505 - protein, 9 aa, Homo Sapiens
RPGNIYSTL

SEQ ID NO: 62506 - protein, 9 aa, Homo Sapiens
RPGYCYTAL

SEQ ID NO: 62507 - protein, 9 aa, Homo Sapiens
RPHAFQVIL

SEQ ID NO: 62508 - protein, 9 aa, Homo Sapiens
RPHHKILDM

SEQ ID NO: 62509 - protein, 9 aa, Homo Sapiens
RPHKPGLYL

SEQ ID NO: 62510 - protein, 9 aa, Homo Sapiens
RPHSSLREL

SEQ ID NO: 62511 - protein, 9 aa, Homo Sapiens
RPHTVLTVI

SEQ ID NO: 62512 - protein, 9 aa, Homo Sapiens
RPHYSLRTL

SEQ ID NO: 62513 - protein, 9 aa, Homo Sapiens
RPILIIVTL

SEQ ID NO: 62514 - protein, 9 aa, Homo Sapiens
RPIMFRGEV

SEQ ID NO: 62515 - protein, 9 aa, Homo Sapiens
RPINALDEL

SEQ ID NO: 62516 - protein, 9 aa, Homo Sapiens
RPIPQWIRM

SEQ ID NO: 62517 - protein, 9 aa, Homo Sapiens
RPIQPIAGL

SEQ ID NO: 62518 - protein, 9 aa, Homo Sapiens
RPIRQILYL

SEQ ID NO: 62519 - protein, 9 aa, Homo Sapiens
RPIWQLSHF

SEQ ID NO: 62520 - protein, 9 aa, Homo Sapiens
RPKALTQVL

SEQ ID NO: 62521 - protein, 9 aa, Homo Sapiens
RPKLIGEEL

SEQ ID NO: 62522 - protein, 9 aa, Homo Sapiens
RPKLNRENF

SEQ ID NO: 62523 - protein, 9 aa, Homo Sapiens
RPKNLMQTL

SEQ ID NO: 62524 - protein, 9 aa, Homo Sapiens
RPKPIITSV

SEQ ID NO: 62525 - protein, 9 aa, Homo Sapiens
RPKTFGMDM

SEQ ID NO: 62526 - protein, 9 aa, Homo Sapiens
RPKTGVRGL

SEQ ID NO: 62527 - protein, 9 aa, Homo Sapiens
RPKYPGIKF

SEQ ID NO: 62528 - protein, 9 aa, Homo Sapiens
RPKYQFLSL

SEQ ID NO: 62529 - protein, 9 aa, Homo Sapiens
RPLLKAITA

SEQ ID NO: 62530 - protein, 9 aa, Homo Sapiens
RPLSKTVRF

SEQ ID NO: 62531 - protein, 9 aa, Homo Sapiens
RPLYKNIVL

SEQ ID NO: 62532 - protein, 9 aa, Homo Sapiens
RPMGAGEAL

SEQ ID NO: 62533 - protein, 9 aa, Homo Sapiens
RPMNENVQM

SEQ ID NO: 62534 - protein, 9 aa, Homo Sapiens
RPNDSRMLV

SEQ ID NO: 62535 - protein, 9 aa, Homo Sapiens
RPNGVITGL

SEQ ID NO: 62536 - protein, 9 aa, Homo Sapiens
RPNNAYTAM

SEQ ID NO: 62537 - protein, 9 aa, Homo Sapiens
RPNPGFSML

SEQ ID NO: 62538 - protein, 9 aa, Homo Sapiens
RPPPIGAEV

SEQ ID NO: 62539 - protein, 9 aa, Homo Sapiens
RPPPPNSVI

SEQ ID NO: 62540 - protein, 9 aa, Homo Sapiens
RPQGGQDIL

SEQ ID NO: 62541 - protein, 9 aa, Homo Sapiens
RPQIHGYDL

SEQ ID NO: 62542 - protein, 9 aa, Homo Sapiens
RPQKPSLEF

SEQ ID NO: 62543 - protein, 9 aa, Homo Sapiens
RPQKVCSFL

SEQ ID NO: 62544 - protein, 9 aa, Homo Sapiens
RPQLKGVVL

SEQ ID NO: 62545 - protein, 9 aa, Homo Sapiens
RPQPVLPLL

SEQ ID NO: 62546 - protein, 9 aa, Homo Sapiens
RPRATVMVM

SEQ ID NO: 62547 - protein, 9 aa, Homo Sapiens
RPRDPTPSF

SEQ ID NO: 62548 - protein, 9 aa, Homo Sapiens
RPRDYTVNL

SEQ ID NO: 62549 - protein, 9 aa, Homo Sapiens
RPREAEVRF

SEQ ID NO: 62550 - protein, 9 aa, Homo Sapiens
RPRIDLIVF

SEQ ID NO: 62551 - protein, 9 aa, Homo Sapiens
RPRPGNILL

SEQ ID NO: 62552 - protein, 9 aa, Homo Sapiens
RPRPPITLL

SEQ ID NO: 62553 - protein, 9 aa, Homo Sapiens
RPSGPGPEL

SEQ ID NO: 62554 - protein, 9 aa, Homo Sapiens
RPSGPSKAL

SEQ ID NO: 62555 - protein, 9 aa, Homo Sapiens
RPSLPLPHF

SEQ ID NO: 62556 - protein, 9 aa, Homo Sapiens
RPSLRLQLL

SEQ ID NO: 62557 - protein, 9 aa, Homo Sapiens
RPSPPVQSV

SEQ ID NO: 62558 - protein, 9 aa, Homo Sapiens
RPSQFPHSL

SEQ ID NO: 62559 - protein, 9 aa, Homo Sapiens
RPSQNLLQL

SEQ ID NO: 62560 - protein, 9 aa, Homo Sapiens
RPSSHPLIF

SEQ ID NO: 62561 - protein, 9 aa, Homo Sapiens
RPSVGVQSL

SEQ ID NO: 62562 - protein, 9 aa, Homo Sapiens
RPTDKPLRL

SEQ ID NO: 62563 - protein, 9 aa, Homo Sapiens
RPTFRQMQL

SEQ ID NO: 62564 - protein, 9 aa, Homo Sapiens
RPTMAFVRL

SEQ ID NO: 62565 - protein, 9 aa, Homo Sapiens
RPVKPELAL

SEQ ID NO: 62566 - protein, 9 aa, Homo Sapiens
RPVPPPPSL

SEQ ID NO: 62567 - protein, 9 aa, Homo Sapiens
RPVTPITNF

SEQ ID NO: 62568 - protein, 9 aa, Homo Sapiens
RPWALSVTM

SEQ ID NO: 62569 - protein, 9 aa, Homo Sapiens
RPWIRELIL

SEQ ID NO: 62570 - protein, 9 aa, Homo Sapiens
RPWLRPAAL

SEQ ID NO: 62571 - protein, 9 aa, Homo Sapiens
RPWSNSRGL

SEQ ID NO: 62572 - protein, 9 aa, Homo Sapiens
RPYEKGRLI

SEQ ID NO: 62573 - protein, 9 aa, Homo Sapiens
RPYEPINSI

SEQ ID NO: 62574 - protein, 9 aa, Homo Sapiens
RPYPVMRKI

SEQ ID NO: 62575 - protein, 9 aa, Homo Sapiens
RPYSFFTKL

SEQ ID NO: 62576 - protein, 9 aa, Homo Sapiens
RPYSNVSNL

SEQ ID NO: 62577 - protein, 9 aa, Homo Sapiens
RPYSQVNVL

SEQ ID NO: 62578 - protein, 9 aa, Homo Sapiens
RTRPPSVQV

SEQ ID NO: 62579 - protein, 9 aa, Homo Sapiens
RVAEFHTEL

SEQ ID NO: 62580 - protein, 9 aa, Homo Sapiens
RVELRPTTL

SEQ ID NO: 62581 - protein, 9 aa, Homo Sapiens
RVKEIGSTM

SEQ ID NO: 62582 - protein, 9 aa, Homo Sapiens
RVMGDRSVL

SEQ ID NO: 62583 - protein, 9 aa, Homo Sapiens
RVMIIRTML

SEQ ID NO: 62584 - protein, 9 aa, Homo Sapiens
RVREITENL

SEQ ID NO: 62585 - protein, 9 aa, Homo Sapiens
RVRPLFCAL

SEQ ID NO: 62586 - protein, 9 aa, Homo Sapiens
RVSPPHLTL

SEQ ID NO: 62587 - protein, 9 aa, Homo Sapiens
SAAFPGASL

SEQ ID NO: 62588 - protein, 9 aa, Homo Sapiens
SAAMPGASL

SEQ ID NO: 62589 - protein, 9 aa, Homo Sapiens
SASPPGPTL

SEQ ID NO: 62590 - protein, 9 aa, Homo Sapiens
SINAQRNAL

SEQ ID NO: 62591 - protein, 9 aa, Homo Sapiens
SIREAGGAF

SEQ ID NO: 62592 - protein, 9 aa, Homo Sapiens
SPAAATTVL

SEQ ID NO: 62593 - protein, 9 aa, Homo Sapiens
SPADRMLTV

SEQ ID NO: 62594 - protein, 9 aa, Homo Sapiens
SPAFRILSV

SEQ ID NO: 62595 - protein, 9 aa, Homo Sapiens
SPAFSTRVL

SEQ ID NO: 62596 - protein, 9 aa, Homo Sapiens
SPAGPGLSL

SEQ ID NO: 62597 - protein, 9 aa, Homo Sapiens
SPAGPILSI

SEQ ID NO: 62598 - protein, 9 aa, Homo Sapiens
SPAGVSATL

SEQ ID NO: 62599 - protein, 9 aa, Homo Sapiens
SPAHAVDAV

SEQ ID NO: 62600 - protein, 9 aa, Homo Sapiens
SPAIQRNTF

SEQ ID NO: 62601 - protein, 9 aa, Homo Sapiens
SPAKNPSSL

SEQ ID NO: 62602 - protein, 9 aa, Homo Sapiens
SPALKTTRL

SEQ ID NO: 62603 - protein, 9 aa, Homo Sapiens
SPALPGLKL

SEQ ID NO: 62604 - protein, 9 aa, Homo Sapiens
SPALPSSGA

SEQ ID NO: 62605 - protein, 9 aa, Homo Sapiens
SPANPAHIL

SEQ ID NO: 62606 - protein, 9 aa, Homo Sapiens
SPAPSKTLM

SEQ ID NO: 62607 - protein, 9 aa, Homo Sapiens
SPAPTHNSL

SEQ ID NO: 62608 - protein, 9 aa, Homo Sapiens
SPAPTITSL

SEQ ID NO: 62609 - protein, 9 aa, Homo Sapiens
SPAQVKTSV

SEQ ID NO: 62610 - protein, 9 aa, Homo Sapiens
SPASPAPDL

SEQ ID NO: 62611 - protein, 9 aa, Homo Sapiens
SPASPKISL

SEQ ID NO: 62612 - protein, 9 aa, Homo Sapiens
SPASPLKEL

SEQ ID NO: 62613 - protein, 9 aa, Homo Sapiens
SPASRSISL

SEQ ID NO: 62614 - protein, 9 aa, Homo Sapiens
SPASTPSCL

SEQ ID NO: 62615 - protein, 9 aa, Homo Sapiens
SPATTGTFL

SEQ ID NO: 62616 - protein, 9 aa, Homo Sapiens
SPAYRDLAA

SEQ ID NO: 62617 - protein, 9 aa, Homo Sapiens
SPCFRDVQI

SEQ ID NO: 62618 - protein, 9 aa, Homo Sapiens
SPCLKVFEL

SEQ ID NO: 62619 - protein, 9 aa, Homo Sapiens
SPDAKIFCL

SEQ ID NO: 62620 - protein, 9 aa, Homo Sapiens
SPDDPAGLL

SEQ ID NO: 62621 - protein, 9 aa, Homo Sapiens
SPDDSIGCL

SEQ ID NO: 62622 - protein, 9 aa, Homo Sapiens
SPDLRLTWL

SEQ ID NO: 62623 - protein, 9 aa, Homo Sapiens
SPDLSSLSL

SEQ ID NO: 62624 - protein, 9 aa, Homo Sapiens
SPDTKKIAL

SEQ ID NO: 62625 - protein, 9 aa, Homo Sapiens
SPDTVSPSL

SEQ ID NO: 62626 - protein, 9 aa, Homo Sapiens
SPEAVGPEL

SEQ ID NO: 62627 - protein, 9 aa, Homo Sapiens
SPEPSKIML

SEQ ID NO: 62628 - protein, 9 aa, Homo Sapiens
SPEQSRNVL

SEQ ID NO: 62629 - protein, 9 aa, Homo Sapiens
SPESLRSKV

SEQ ID NO: 62630 - protein, 9 aa, Homo Sapiens
SPETRENAL

SEQ ID NO: 62631 - protein, 9 aa, Homo Sapiens
SPFARGNVF

SEQ ID NO: 62632 - protein, 9 aa, Homo Sapiens
SPFFERSGL

SEQ ID NO: 62633 - protein, 9 aa, Homo Sapiens
SPFHRNLFL

SEQ ID NO: 62634 - protein, 9 aa, Homo Sapiens
SPFLTITSM

SEQ ID NO: 62635 - protein, 9 aa, Homo Sapiens
SPFPTSTPL

SEQ ID NO: 62636 - protein, 9 aa, Homo Sapiens
SPFSFHHVL

SEQ ID NO: 62637 - protein, 9 aa, Homo Sapiens
SPFSRKLDL

SEQ ID NO: 62638 - protein, 9 aa, Homo Sapiens
SPGARLITI

SEQ ID NO: 62639 - protein, 9 aa, Homo Sapiens
SPGDFSISV

SEQ ID NO: 62640 - protein, 9 aa, Homo Sapiens
SPGGAHGML

SEQ ID NO: 62641 - protein, 9 aa, Homo Sapiens
SPGLGSTPL

SEQ ID NO: 62642 - protein, 9 aa, Homo Sapiens
SPGLRALEA

SEQ ID NO: 62643 - protein, 9 aa, Homo Sapiens
SPGLRDVAL

SEQ ID NO: 62644 - protein, 9 aa, Homo Sapiens
SPGPEKMAL

SEQ ID NO: 62645 - protein, 9 aa, Homo Sapiens
SPGPPAPHM

SEQ ID NO: 62646 - protein, 9 aa, Homo Sapiens
SPGPRPVLL

SEQ ID NO: 62647 - protein, 9 aa, Homo Sapiens
SPGQRAVLL

SEQ ID NO: 62648 - protein, 9 aa, Homo Sapiens
SPGQRSISL

SEQ ID NO: 62649 - protein, 9 aa, Homo Sapiens
SPGSPRPAL

SEQ ID NO: 62650 - protein, 9 aa, Homo Sapiens
SPGSRQIQL

SEQ ID NO: 62651 - protein, 9 aa, Homo Sapiens
SPGVGKTSL

SEQ ID NO: 62652 - protein, 9 aa, Homo Sapiens
SPGVPGSVF

SEQ ID NO: 62653 - protein, 9 aa, Homo Sapiens
SPGWVRLAL

SEQ ID NO: 62654 - protein, 9 aa, Homo Sapiens
SPGYDFSCL

SEQ ID NO: 62655 - protein, 9 aa, Homo Sapiens
SPHATAQGL

SEQ ID NO: 62656 - protein, 9 aa, Homo Sapiens
SPHDISNVL

SEQ ID NO: 62657 - protein, 9 aa, Homo Sapiens
SPHDVSSVL

SEQ ID NO: 62658 - protein, 9 aa, Homo Sapiens
SPHGGALVM

SEQ ID NO: 62659 - protein, 9 aa, Homo Sapiens
SPHGHILVL

SEQ ID NO: 62660 - protein, 9 aa, Homo Sapiens
SPHGPSAKF

SEQ ID NO: 62661 - protein, 9 aa, Homo Sapiens
SPHKDSVFL

SEQ ID NO: 62662 - protein, 9 aa, Homo Sapiens
SPHLPHNSL

SEQ ID NO: 62663 - protein, 9 aa, Homo Sapiens
SPHPAATAL

SEQ ID NO: 62664 - protein, 9 aa, Homo Sapiens
SPHRPLAGL

SEQ ID NO: 62665 - protein, 9 aa, Homo Sapiens
SPHSAAYVL

SEQ ID NO: 62666 - protein, 9 aa, Homo Sapiens
SPHSAYTTL

SEQ ID NO: 62667 - protein, 9 aa, Homo Sapiens
SPHTPNEKF

SEQ ID NO: 62668 - protein, 9 aa, Homo Sapiens
SPIEKSGVL

SEQ ID NO: 62669 - protein, 9 aa, Homo Sapiens
SPIENIQRV

SEQ ID NO: 62670 - protein, 9 aa, Homo Sapiens
SPIGRDGKL

SEQ ID NO: 62671 - protein, 9 aa, Homo Sapiens
SPIITLVAL

SEQ ID NO: 62672 - protein, 9 aa, Homo Sapiens
SPIQKPQGL

SEQ ID NO: 62673 - protein, 9 aa, Homo Sapiens
SPISHFLDL

SEQ ID NO: 62674 - protein, 9 aa, Homo Sapiens
SPISSDQSL

SEQ ID NO: 62675 - protein, 9 aa, Homo Sapiens
SPITGRSKL

SEQ ID NO: 62676 - protein, 9 aa, Homo Sapiens
SPKFSELVM

SEQ ID NO: 62677 - protein, 9 aa, Homo Sapiens
SPKKPVIVF

SEQ ID NO: 62678 - protein, 9 aa, Homo Sapiens
SPKLPVSSL

SEQ ID NO: 62679 - protein, 9 aa, Homo Sapiens
SPKPWIPVL

SEQ ID NO: 62680 - protein, 9 aa, Homo Sapiens
SPKRDLIAL

SEQ ID NO: 62681 - protein, 9 aa, Homo Sapiens
SPKSPTAAL

SEQ ID NO: 62682 - protein, 9 aa, Homo Sapiens
SPLGHRMQL

SEQ ID NO: 62683 - protein, 9 aa, Homo Sapiens
SPLIGRISF

SEQ ID NO: 62684 - protein, 9 aa, Homo Sapiens
SPLKKEQPL

SEQ ID NO: 62685 - protein, 9 aa, Homo Sapiens
SPLLSVTSF

SEQ ID NO: 62686 - protein, 9 aa, Homo Sapiens
SPLNRAGLL

SEQ ID NO: 62687 - protein, 9 aa, Homo Sapiens
SPLNSSSAL

SEQ ID NO: 62688 - protein, 9 aa, Homo Sapiens
SPLPAGNAL

SEQ ID NO: 62689 - protein, 9 aa, Homo Sapiens
SPLPSPSAM

SEQ ID NO: 62690 - protein, 9 aa, Homo Sapiens
SPLQASSAL

SEQ ID NO: 62691 - protein, 9 aa, Homo Sapiens
SPLSAAAAT

SEQ ID NO: 62692 - protein, 9 aa, Homo Sapiens
SPLSPQSSI

SEQ ID NO: 62693 - protein, 9 aa, Homo Sapiens
SPLSSHPVV

SEQ ID NO: 62694 - protein, 9 aa, Homo Sapiens
SPLTKSISL

SEQ ID NO: 62695 - protein, 9 aa, Homo Sapiens
SPLVSRLTL

SEQ ID NO: 62696 - protein, 9 aa, Homo Sapiens
SPMADRSMM

SEQ ID NO: 62697 - protein, 9 aa, Homo Sapiens
SPMAERSMM

SEQ ID NO: 62698 - protein, 9 aa, Homo Sapiens
SPMGSTEDL

SEQ ID NO: 62699 - protein, 9 aa, Homo Sapiens
SPMIPSIVV

SEQ ID NO: 62700 - protein, 9 aa, Homo Sapiens
SPMPGTLTA

SEQ ID NO: 62701 - protein, 9 aa, Homo Sapiens
SPMRDAPCL

SEQ ID NO: 62702 - protein, 9 aa, Homo Sapiens
SPMSVNAVM

SEQ ID NO: 62703 - protein, 9 aa, Homo Sapiens
SPNAEIHIL

SEQ ID NO: 62704 - protein, 9 aa, Homo Sapiens
SPNAIFKAL

SEQ ID NO: 62705 - protein, 9 aa, Homo Sapiens
SPNCKLLIV

SEQ ID NO: 62706 - protein, 9 aa, Homo Sapiens
SPNDFSVSL

SEQ ID NO: 62707 - protein, 9 aa, Homo Sapiens
SPNGHRPQL

SEQ ID NO: 62708 - protein, 9 aa, Homo Sapiens
SPNLRLLDL

SEQ ID NO: 62709 - protein, 9 aa, Homo Sapiens
SPNPEIPAL

SEQ ID NO: 62710 - protein, 9 aa, Homo Sapiens
SPNQKLLAV

SEQ ID NO: 62711 - protein, 9 aa, Homo Sapiens
SPNSKVNTL

SEQ ID NO: 62712 - protein, 9 aa, Homo Sapiens
SPNSYFMDV

SEQ ID NO: 62713 - protein, 9 aa, Homo Sapiens
SPNTDREVL

SEQ ID NO: 62714 - protein, 9 aa, Homo Sapiens
SPNVPSRCL

SEQ ID NO: 62715 - protein, 9 aa, Homo Sapiens
SPNYDHVVL

SEQ ID NO: 62716 - protein, 9 aa, Homo Sapiens
SPPDPARRE

SEQ ID NO: 62717 - protein, 9 aa, Homo Sapiens
SPQAEQPSL

SEQ ID NO: 62718 - protein, 9 aa, Homo Sapiens
SPQAPTHFL

SEQ ID NO: 62719 - protein, 9 aa, Homo Sapiens
SPQAPTLQV

SEQ ID NO: 62720 - protein, 9 aa, Homo Sapiens
SPQASIIAM

SEQ ID NO: 62721 - protein, 9 aa, Homo Sapiens
SPQDFGLVL

SEQ ID NO: 62722 - protein, 9 aa, Homo Sapiens
SPQDSRLYL

SEQ ID NO: 62723 - protein, 9 aa, Homo Sapiens
SPQEARNML

SEQ ID NO: 62724 - protein, 9 aa, Homo Sapiens
SPQEDGVEL

SEQ ID NO: 62725 - protein, 9 aa, Homo Sapiens
SPQEFIHEL

SEQ ID NO: 62726 - protein, 9 aa, Homo Sapiens
SPQGLKPVV

SEQ ID NO: 62727 - protein, 9 aa, Homo Sapiens
SPQGRVMTI

SEQ ID NO: 62728 - protein, 9 aa, Homo Sapiens
SPQKVTLYL

SEQ ID NO: 62729 - protein, 9 aa, Homo Sapiens
SPQNVPEKL

SEQ ID NO: 62730 - protein, 9 aa, Homo Sapiens
SPQPAQQKL

SEQ ID NO: 62731 - protein, 9 aa, Homo Sapiens
SPQPRLIYL

SEQ ID NO: 62732 - protein, 9 aa, Homo Sapiens
SPQQKLVCL

SEQ ID NO: 62733 - protein, 9 aa, Homo Sapiens
SPQQVSAQL

SEQ ID NO: 62734 - protein, 9 aa, Homo Sapiens
SPQSPGDAL

SEQ ID NO: 62735 - protein, 9 aa, Homo Sapiens
SPQSTVTVF

SEQ ID NO: 62736 - protein, 9 aa, Homo Sapiens
SPRAIHSWL

SEQ ID NO: 62737 - protein, 9 aa, Homo Sapiens
SPREAARVL

SEQ ID NO: 62738 - protein, 9 aa, Homo Sapiens
SPREALIRL

SEQ ID NO: 62739 - protein, 9 aa, Homo Sapiens
SPREVFFRV

SEQ ID NO: 62740 - protein, 9 aa, Homo Sapiens
SPRHSFNNL

SEQ ID NO: 62741 - protein, 9 aa, Homo Sapiens
SPRITFPSL

SEQ ID NO: 62742 - protein, 9 aa, Homo Sapiens
SPRLMSNAL

SEQ ID NO: 62743 - protein, 9 aa, Homo Sapiens
SPRLPAREL

SEQ ID NO: 62744 - protein, 9 aa, Homo Sapiens
SPRLPVGGF

SEQ ID NO: 62745 - protein, 9 aa, Homo Sapiens
SPRMPSSGF

SEQ ID NO: 62746 - protein, 9 aa, Homo Sapiens
SPRNEVEAL

SEQ ID NO: 62747 - protein, 9 aa, Homo Sapiens
SPRNLAMEA

SEQ ID NO: 62748 - protein, 9 aa, Homo Sapiens
SPRPDRALV

SEQ ID NO: 62749 - protein, 9 aa, Homo Sapiens
SPRPNHSYI

SEQ ID NO: 62750 - protein, 9 aa, Homo Sapiens
SPRPPIRQW

SEQ ID NO: 62751 - protein, 9 aa, Homo Sapiens
SPRPTGSDL

SEQ ID NO: 62752 - protein, 9 aa, Homo Sapiens
SPRPVVVET

SEQ ID NO: 62753 - protein, 9 aa, Homo Sapiens
SPRSSTVHI

SEQ ID NO: 62754 - protein, 9 aa, Homo Sapiens
SPRVPNSSV

SEQ ID NO: 62755 - protein, 9 aa, Homo Sapiens
SPRVYWLGL

SEQ ID NO: 62756 - protein, 9 aa, Homo Sapiens
SPRYIFTML

SEQ ID NO: 62757 - protein, 9 aa, Homo Sapiens
SPSALIWWL

SEQ ID NO: 62758 - protein, 9 aa, Homo Sapiens
SPSASALTL

SEQ ID NO: 62759 - protein, 9 aa, Homo Sapiens
SPSATASIL

SEQ ID NO: 62760 - protein, 9 aa, Homo Sapiens
SPSATLAAL

SEQ ID NO: 62761 - protein, 9 aa, Homo Sapiens
SPSAYVLEI

SEQ ID NO: 62762 - protein, 9 aa, Homo Sapiens
SPSDPSSSL

SEQ ID NO: 62763 - protein, 9 aa, Homo Sapiens
SPSDRPLSL

SEQ ID NO: 62764 - protein, 9 aa, Homo Sapiens
SPSDSFSVL

SEQ ID NO: 62765 - protein, 9 aa, Homo Sapiens
SPSETVSSL

SEQ ID NO: 62766 - protein, 9 aa, Homo Sapiens
SPSGAMSNL

SEQ ID NO: 62767 - protein, 9 aa, Homo Sapiens
SPSGLHSKL

SEQ ID NO: 62768 - protein, 9 aa, Homo Sapiens
SPSGRLCLL

SEQ ID NO: 62769 - protein, 9 aa, Homo Sapiens
SPSGSKMQL

SEQ ID NO: 62770 - protein, 9 aa, Homo Sapiens
SPSIKDLPA

SEQ ID NO: 62771 - protein, 9 aa, Homo Sapiens
SPSKPNPVF

SEQ ID NO: 62772 - protein, 9 aa, Homo Sapiens
SPSLNREEV

SEQ ID NO: 62773 - protein, 9 aa, Homo Sapiens
SPSLPNITL

SEQ ID NO: 62774 - protein, 9 aa, Homo Sapiens
SPSLPTASL

SEQ ID NO: 62775 - protein, 9 aa, Homo Sapiens
SPSNGVGSL

SEQ ID NO: 62776 - protein, 9 aa, Homo Sapiens
SPSPPSVAV

SEQ ID NO: 62777 - protein, 9 aa, Homo Sapiens
SPSQGSPAL

SEQ ID NO: 62778 - protein, 9 aa, Homo Sapiens
SPSSDSLLF

SEQ ID NO: 62779 - protein, 9 aa, Homo Sapiens
SPSSILSTL

SEQ ID NO: 62780 - protein, 9 aa, Homo Sapiens
SPSSKYVKL

SEQ ID NO: 62781 - protein, 9 aa, Homo Sapiens
SPSSLFSAL

SEQ ID NO: 62782 - protein, 9 aa, Homo Sapiens
SPSSSATSL

SEQ ID NO: 62783 - protein, 9 aa, Homo Sapiens
SPSVKPNEL

SEQ ID NO: 62784 - protein, 9 aa, Homo Sapiens
SPSWRLTGF

SEQ ID NO: 62785 - protein, 9 aa, Homo Sapiens
SPTATPRTL

SEQ ID NO: 62786 - protein, 9 aa, Homo Sapiens
SPTDGLSVM

SEQ ID NO: 62787 - protein, 9 aa, Homo Sapiens
SPTENSFTL

SEQ ID NO: 62788 - protein, 9 aa, Homo Sapiens
SPTHPGEGL

SEQ ID NO: 62789 - protein, 9 aa, Homo Sapiens
SPTQVVSQL

SEQ ID NO: 62790 - protein, 9 aa, Homo Sapiens
SPTTAFTVL

SEQ ID NO: 62791 - protein, 9 aa, Homo Sapiens
SPVADWSEL

SEQ ID NO: 62792 - protein, 9 aa, Homo Sapiens
SPVFRLETL

SEQ ID NO: 62793 - protein, 9 aa, Homo Sapiens
SPVLSLSSL

SEQ ID NO: 62794 - protein, 9 aa, Homo Sapiens
SPVNGKLSV

SEQ ID NO: 62795 - protein, 9 aa, Homo Sapiens
SPVPIPVSL

SEQ ID NO: 62796 - protein, 9 aa, Homo Sapiens
SPVQPSKQL

SEQ ID NO: 62797 - protein, 9 aa, Homo Sapiens
SPVSGGVNL

SEQ ID NO: 62798 - protein, 9 aa, Homo Sapiens
SPVVKGNAL

SEQ ID NO: 62799 - protein, 9 aa, Homo Sapiens
SPWADNTAL

SEQ ID NO: 62800 - protein, 9 aa, Homo Sapiens
SPWKPPTYL

SEQ ID NO: 62801 - protein, 9 aa, Homo Sapiens
SPWLAGNEL

SEQ ID NO: 62802 - protein, 9 aa, Homo Sapiens
SPWLHAPSL

SEQ ID NO: 62803 - protein, 9 aa, Homo Sapiens
SPWLLRVEL

SEQ ID NO: 62804 - protein, 9 aa, Homo Sapiens
SPWSGLMAL

SEQ ID NO: 62805 - protein, 9 aa, Homo Sapiens
SPWSISSTM

SEQ ID NO: 62806 - protein, 9 aa, Homo Sapiens
SPYLRPLTL

SEQ ID NO: 62807 - protein, 9 aa, Homo Sapiens
SPYPEAVEL

SEQ ID NO: 62808 - protein, 9 aa, Homo Sapiens
SPYPESICL

SEQ ID NO: 62809 - protein, 9 aa, Homo Sapiens
SPYPNPSFL

SEQ ID NO: 62810 - protein, 9 aa, Homo Sapiens
SPYQGGVFF

SEQ ID NO: 62811 - protein, 9 aa, Homo Sapiens
SPYQNIKIL

SEQ ID NO: 62812 - protein, 9 aa, Homo Sapiens
SRAKAVRAL

SEQ ID NO: 62813 - protein, 9 aa, Homo Sapiens
SSPRLSSSL

SEQ ID NO: 62814 - protein, 9 aa, Homo Sapiens
SVKPASSSF

SEQ ID NO: 62815 - protein, 9 aa, Homo Sapiens
SVKSPNQSL

SEQ ID NO: 62816 - protein, 9 aa, Homo Sapiens
SVQRWREAL

SEQ ID NO: 62817 - protein, 9 aa, Homo Sapiens
SVRPLVTEL

SEQ ID NO: 62818 - protein, 9 aa, Homo Sapiens
SVRQPSLHM

SEQ ID NO: 62819 - protein, 9 aa, Homo Sapiens
TAAAVGAVF

SEQ ID NO: 62820 - protein, 9 aa, Homo Sapiens
TAAPPAQPL

SEQ ID NO: 62821 - protein, 9 aa, Homo Sapiens
TAAPVPTTL

SEQ ID NO: 62822 - protein, 9 aa, Homo Sapiens
TPADGFTVL

SEQ ID NO: 62823 - protein, 9 aa, Homo Sapiens
TPAEVRQVL

SEQ ID NO: 62824 - protein, 9 aa, Homo Sapiens
TPAGDIMEL

SEQ ID NO: 62825 - protein, 9 aa, Homo Sapiens
TPAGNFVTL

SEQ ID NO: 62826 - protein, 9 aa, Homo Sapiens
TPAGVQVIL

SEQ ID NO: 62827 - protein, 9 aa, Homo Sapiens
TPAKWVTCL

SEQ ID NO: 62828 - protein, 9 aa, Homo Sapiens
TPAPGFSSM

SEQ ID NO: 62829 - protein, 9 aa, Homo Sapiens
TPAPPTHAL

SEQ ID NO: 62830 - protein, 9 aa, Homo Sapiens
TPAPTAGAL

SEQ ID NO: 62831 - protein, 9 aa, Homo Sapiens
TPAPVPTSL

SEQ ID NO: 62832 - protein, 9 aa, Homo Sapiens
TPARKEISL

SEQ ID NO: 62833 - protein, 9 aa, Homo Sapiens
TPASAGHVW

SEQ ID NO: 62834 - protein, 9 aa, Homo Sapiens
TPAVIRISV

SEQ ID NO: 62835 - protein, 9 aa, Homo Sapiens
TPAWVRQVL

SEQ ID NO: 62836 - protein, 9 aa, Homo Sapiens
TPDPSRSVF

SEQ ID NO: 62837 - protein, 9 aa, Homo Sapiens
TPETVRMVL

SEQ ID NO: 62838 - protein, 9 aa, Homo Sapiens
TPFPFRTGL

SEQ ID NO: 62839 - protein, 9 aa, Homo Sapiens
TPGPAGSRL

SEQ ID NO: 62840 - protein, 9 aa, Homo Sapiens
TPGPVGLAL

SEQ ID NO: 62841 - protein, 9 aa, Homo Sapiens
TPHAVGVLL

SEQ ID NO: 62842 - protein, 9 aa, Homo Sapiens
TPHFSGLAA

SEQ ID NO: 62843 - protein, 9 aa, Homo Sapiens
TPHLRNLAV

SEQ ID NO: 62844 - protein, 9 aa, Homo Sapiens
TPHQTFVRL

SEQ ID NO: 62845 - protein, 9 aa, Homo Sapiens
TPHVVGSRF

SEQ ID NO: 62846 - protein, 9 aa, Homo Sapiens
TPIAVGTVI

SEQ ID NO: 62847 - protein, 9 aa, Homo Sapiens
TPINKRPVL

SEQ ID NO: 62848 - protein, 9 aa, Homo Sapiens
TPIPGTIEM

SEQ ID NO: 62849 - protein, 9 aa, Homo Sapiens
TPIQGTSEL

SEQ ID NO: 62850 - protein, 9 aa, Homo Sapiens
TPISQAQKL

SEQ ID NO: 62851 - protein, 9 aa, Homo Sapiens
TPLARIVAF

SEQ ID NO: 62852 - protein, 9 aa, Homo Sapiens
TPLSSTVTL

SEQ ID NO: 62853 - protein, 9 aa, Homo Sapiens
TPLSTGGTL

SEQ ID NO: 62854 - protein, 9 aa, Homo Sapiens
TPLYKKKEL

SEQ ID NO: 62855 - protein, 9 aa, Homo Sapiens
TPMFREYSL

SEQ ID NO: 62856 - protein, 9 aa, Homo Sapiens
TPMGPGRTV

SEQ ID NO: 62857 - protein, 9 aa, Homo Sapiens
TPMQVVTCL

SEQ ID NO: 62858 - protein, 9 aa, Homo Sapiens
TPQAKKIKL

SEQ ID NO: 62859 - protein, 9 aa, Homo Sapiens
TPQDRQCVL

SEQ ID NO: 62860 - protein, 9 aa, Homo Sapiens
TPQGFRSTL

SEQ ID NO: 62861 - protein, 9 aa, Homo Sapiens
TPQSNRPVM

SEQ ID NO: 62862 - protein, 9 aa, Homo Sapiens
TPRLPARLI

SEQ ID NO: 62863 - protein, 9 aa, Homo Sapiens
TPRLPQRNL

SEQ ID NO: 62864 - protein, 9 aa, Homo Sapiens
TPRVPDNSL

SEQ ID NO: 62865 - protein, 9 aa, Homo Sapiens
TPSAGKAML

SEQ ID NO: 62866 - protein, 9 aa, Homo Sapiens
TPSEPHPVL

SEQ ID NO: 62867 - protein, 9 aa, Homo Sapiens
TPSKPPAQL

SEQ ID NO: 62868 - protein, 9 aa, Homo Sapiens
TPSQIGVIL

SEQ ID NO: 62869 - protein, 9 aa, Homo Sapiens
TPVAGSQSL

SEQ ID NO: 62870 - protein, 9 aa, Homo Sapiens
TPVASRQSL

SEQ ID NO: 62871 - protein, 9 aa, Homo Sapiens
TPVIVGSAL

SEQ ID NO: 62872 - protein, 9 aa, Homo Sapiens
TPWQPPTVL

SEQ ID NO: 62873 - protein, 9 aa, Homo Sapiens
TPYNYPVPV

SEQ ID NO: 62874 - protein, 9 aa, Homo Sapiens
TVKPLTLEL

SEQ ID NO: 62875 - protein, 9 aa, Homo Sapiens
TVRKILSRL

SEQ ID NO: 62876 - protein, 9 aa, Homo Sapiens
VAPGALLGL

SEQ ID NO: 62877 - protein, 9 aa, Homo Sapiens
VARPLSTAL

SEQ ID NO: 62878 - protein, 9 aa, Homo Sapiens
VDPNRAVPL

SEQ ID NO: 62879 - protein, 9 aa, Homo Sapiens
VIRELSRAL

SEQ ID NO: 62880 - protein, 9 aa, Homo Sapiens
VPAAVFGSL

SEQ ID NO: 62881 - protein, 9 aa, Homo Sapiens
VPAEHQVAM

SEQ ID NO: 62882 - protein, 9 aa, Homo Sapiens
VPAENKSVL

SEQ ID NO: 62883 - protein, 9 aa, Homo Sapiens
VPAEPKLAF

SEQ ID NO: 62884 - protein, 9 aa, Homo Sapiens
VPAEPSSLL

SEQ ID NO: 62885 - protein, 9 aa, Homo Sapiens
VPAESAAVL

SEQ ID NO: 62886 - protein, 9 aa, Homo Sapiens
VPAGGAVAV

SEQ ID NO: 62887 - protein, 9 aa, Homo Sapiens
VPAPSPLSA

SEQ ID NO: 62888 - protein, 9 aa, Homo Sapiens
VPAQSRPCV

SEQ ID NO: 62889 - protein, 9 aa, Homo Sapiens
VPARPYRVL

SEQ ID NO: 62890 - protein, 9 aa, Homo Sapiens
VPASFRLQM

SEQ ID NO: 62891 - protein, 9 aa, Homo Sapiens
VPASKRPPL

SEQ ID NO: 62892 - protein, 9 aa, Homo Sapiens
VPASLMVSL

SEQ ID NO: 62893 - protein, 9 aa, Homo Sapiens
VPAVPTVGF

SEQ ID NO: 62894 - protein, 9 aa, Homo Sapiens
VPAVTTPVL

SEQ ID NO: 62895 - protein, 9 aa, Homo Sapiens
VPCGNIVGL

SEQ ID NO: 62896 - protein, 9 aa, Homo Sapiens
VPDAKIRIF

SEQ ID NO: 62897 - protein, 9 aa, Homo Sapiens
VPDEHFSTL

SEQ ID NO: 62898 - protein, 9 aa, Homo Sapiens
VPDERRYSL

SEQ ID NO: 62899 - protein, 9 aa, Homo Sapiens
VPDQPHPEI

SEQ ID NO: 62900 - protein, 9 aa, Homo Sapiens
VPDSVKKEL

SEQ ID NO: 62901 - protein, 9 aa, Homo Sapiens
VPEEARPAL

SEQ ID NO: 62902 - protein, 9 aa, Homo Sapiens
VPFERPAVI

SEQ ID NO: 62903 - protein, 9 aa, Homo Sapiens
VPGGRFISM

SEQ ID NO: 62904 - protein, 9 aa, Homo Sapiens
VPGTYRKVV

SEQ ID NO: 62905 - protein, 9 aa, Homo Sapiens
VPHGAGYEL

SEQ ID NO: 62906 - protein, 9 aa, Homo Sapiens
VPHGHITSL

SEQ ID NO: 62907 - protein, 9 aa, Homo Sapiens
VPHKIITHL

SEQ ID NO: 62908 - protein, 9 aa, Homo Sapiens
VPIMVKSKL

SEQ ID NO: 62909 - protein, 9 aa, Homo Sapiens
VPIQSSVVL

SEQ ID NO: 62910 - protein, 9 aa, Homo Sapiens
VPKQPPKTL

SEQ ID NO: 62911 - protein, 9 aa, Homo Sapiens
VPKYWGSGL

SEQ ID NO: 62912 - protein, 9 aa, Homo Sapiens
VPLAQAQAL

SEQ ID NO: 62913 - protein, 9 aa, Homo Sapiens
VPLGAGIAL

SEQ ID NO: 62914 - protein, 9 aa, Homo Sapiens
VPMFRNVSL

SEQ ID NO: 62915 - protein, 9 aa, Homo Sapiens
VPNNKITVV

SEQ ID NO: 62916 - protein, 9 aa, Homo Sapiens
VPNQKRLTL

SEQ ID NO: 62917 - protein, 9 aa, Homo Sapiens
VPNWHRDLV

SEQ ID NO: 62918 - protein, 9 aa, Homo Sapiens
VPPPPHRPL

SEQ ID NO: 62919 - protein, 9 aa, Homo Sapiens
VPQAKPVAV

SEQ ID NO: 62920 - protein, 9 aa, Homo Sapiens
VPQPHPQTL

SEQ ID NO: 62921 - protein, 9 aa, Homo Sapiens
VPQSGVPAL

SEQ ID NO: 62922 - protein, 9 aa, Homo Sapiens
VPQSVTECV

SEQ ID NO: 62923 - protein, 9 aa, Homo Sapiens
VPREPPVSL

SEQ ID NO: 62924 - protein, 9 aa, Homo Sapiens
VPRFYIRIL

SEQ ID NO: 62925 - protein, 9 aa, Homo Sapiens
VPRGQGSQF

SEQ ID NO: 62926 - protein, 9 aa, Homo Sapiens
VPRLPATAA

SEQ ID NO: 62927 - protein, 9 aa, Homo Sapiens
VPRPIFSQL

SEQ ID NO: 62928 - protein, 9 aa, Homo Sapiens
VPRPPQTSL

SEQ ID NO: 62929 - protein, 9 aa, Homo Sapiens
VPRPPSNPP

SEQ ID NO: 62930 - protein, 9 aa, Homo Sapiens
VPRPVLRAL

SEQ ID NO: 62931 - protein, 9 aa, Homo Sapiens
VPRVLGSSV

SEQ ID NO: 62932 - protein, 9 aa, Homo Sapiens
VPSAAGYAL

SEQ ID NO: 62933 - protein, 9 aa, Homo Sapiens
VPSAVALVL

SEQ ID NO: 62934 - protein, 9 aa, Homo Sapiens
VPSEPGGVL

SEQ ID NO: 62935 - protein, 9 aa, Homo Sapiens
VPSKPPMSL

SEQ ID NO: 62936 - protein, 9 aa, Homo Sapiens
VPSPYLSSL

SEQ ID NO: 62937 - protein, 9 aa, Homo Sapiens
VPVAKTAEL

SEQ ID NO: 62938 - protein, 9 aa, Homo Sapiens
VPVGNSPAL

SEQ ID NO: 62939 - protein, 9 aa, Homo Sapiens
VPVPHTTAL

SEQ ID NO: 62940 - protein, 9 aa, Homo Sapiens
VPVPPNVAF

SEQ ID NO: 62941 - protein, 9 aa, Homo Sapiens
VPYGKGPSF

SEQ ID NO: 62942 - protein, 9 aa, Homo Sapiens
VPYGTPLSV

SEQ ID NO: 62943 - protein, 9 aa, Homo Sapiens
VPYSTSASL

SEQ ID NO: 62944 - protein, 9 aa, Homo Sapiens
VVAPAGITL

SEQ ID NO: 62945 - protein, 9 aa, Homo Sapiens
VVKPPGSSL

SEQ ID NO: 62946 - protein, 9 aa, Homo Sapiens
VVRIITSEL

SEQ ID NO: 62947 - protein, 9 aa, Homo Sapiens
WARPLSVSF

SEQ ID NO: 62948 - protein, 9 aa, Homo Sapiens
WPHDTIGSL

SEQ ID NO: 62949 - protein, 9 aa, Homo Sapiens
WVRPDLGEL

SEQ ID NO: 62950 - protein, 9 aa, Homo Sapiens
YLRPPNTSL

SEQ ID NO: 62951 - protein, 9 aa, Homo Sapiens
YPAAKRVKL

SEQ ID NO: 62952 - protein, 9 aa, Homo Sapiens
YPAAVPQAL

SEQ ID NO: 62953 - protein, 9 aa, Homo Sapiens
YPAQITPKM

SEQ ID NO: 62954 - protein, 9 aa, Homo Sapiens
YPAYLGARL

SEQ ID NO: 62955 - protein, 9 aa, Homo Sapiens
YPDEKSVCL

SEQ ID NO: 62956 - protein, 9 aa, Homo Sapiens
YPEELKPVL

SEQ ID NO: 62957 - protein, 9 aa, Homo Sapiens
YPGAERNLL

SEQ ID NO: 62958 - protein, 9 aa, Homo Sapiens
YPGQPHPAL

SEQ ID NO: 62959 - protein, 9 aa, Homo Sapiens
YPHEPTAVF

SEQ ID NO: 62960 - protein, 9 aa, Homo Sapiens
YPHLHNAEL

SEQ ID NO: 62961 - protein, 9 aa, Homo Sapiens
YPKRPLLGL

SEQ ID NO: 62962 - protein, 9 aa, Homo Sapiens
YPLLKNISM

SEQ ID NO: 62963 - protein, 9 aa, Homo Sapiens
YPLRPGPQL

SEQ ID NO: 62964 - protein, 9 aa, Homo Sapiens
YPNERFELL

SEQ ID NO: 62965 - protein, 9 aa, Homo Sapiens
YPRNPTVRW

SEQ ID NO: 62966 - protein, 9 aa, Homo Sapiens
YPRPGTPAA

SEQ ID NO: 62967 - protein, 9 aa, Homo Sapiens
YPRSLFPSL

SEQ ID NO: 62968 - protein, 9 aa, Homo Sapiens
YPSLPTMTV

SEQ ID NO: 62969 - protein, 9 aa, Homo Sapiens
YPSLPTPLL

SEQ ID NO: 62970 - protein, 9 aa, Homo Sapiens
YPYPYPHTL

SEQ ID NO: 62971 - protein, 10 aa, Homo Sapiens
AANPNRFITL

SEQ ID NO: 62972 - protein, 10 aa, Homo Sapiens
AARPVPWNAL

SEQ ID NO: 62973 - protein, 10 aa, Homo Sapiens
AASEKRLHAL

SEQ ID NO: 62974 - protein, 10 aa, Homo Sapiens
APAAPSATAL

SEQ ID NO: 62975 - protein, 10 aa, Homo Sapiens
APAGGSPRML

SEQ ID NO: 62976 - protein, 10 aa, Homo Sapiens
APAPAEKTPV

SEQ ID NO: 62977 - protein, 10 aa, Homo Sapiens
APAPEVGRTL

SEQ ID NO: 62978 - protein, 10 aa, Homo Sapiens
APAPKPYVCL

SEQ ID NO: 62979 - protein, 10 aa, Homo Sapiens
APAPPPEEVL

SEQ ID NO: 62980 - protein, 10 aa, Homo Sapiens
APAPRSGECL

SEQ ID NO: 62981 - protein, 10 aa, Homo Sapiens
APAPSKGQTL

SEQ ID NO: 62982 - protein, 10 aa, Homo Sapiens
APAQPPSQTF

SEQ ID NO: 62983 - protein, 10 aa, Homo Sapiens
APASAFGSSL

SEQ ID NO: 62984 - protein, 10 aa, Homo Sapiens
APAYQRFHAL

SEQ ID NO: 62985 - protein, 10 aa, Homo Sapiens
APDGSQRAVL

SEQ ID NO: 62986 - protein, 10 aa, Homo Sapiens
APDSQRLKLL

SEQ ID NO: 62987 - protein, 10 aa, Homo Sapiens
APEVLPKPRM

SEQ ID NO: 62988 - protein, 10 aa, Homo Sapiens
APFDRRATSL

SEQ ID NO: 62989 - protein, 10 aa, Homo Sapiens
APFGLKPRSV

SEQ ID NO: 62990 - protein, 10 aa, Homo Sapiens
APFQGDQRSL

SEQ ID NO: 62991 - protein, 10 aa, Homo Sapiens
APGAPAAVAL

SEQ ID NO: 62992 - protein, 10 aa, Homo Sapiens
APGDYGRQAL

SEQ ID NO: 62993 - protein, 10 aa, Homo Sapiens
APGGTGIVSA

SEQ ID NO: 62994 - protein, 10 aa, Homo Sapiens
APGIIPRISV

SEQ ID NO: 62995 - protein, 10 aa, Homo Sapiens
APGIRDHESL

SEQ ID NO: 62996 - protein, 10 aa, Homo Sapiens
APHALLQAVL

SEQ ID NO: 62997 - protein, 10 aa, Homo Sapiens
APHARNGLSL

SEQ ID NO: 62998 - protein, 10 aa, Homo Sapiens
APHEPDGVAL

SEQ ID NO: 62999 - protein, 10 aa, Homo Sapiens
APHPSSWETL

SEQ ID NO: 63000 - protein, 10 aa, Homo Sapiens
APIDRVGQTI

SEQ ID NO: 63001 - protein, 10 aa, Homo Sapiens
APIGPHLQSM

SEQ ID NO: 63002 - protein, 10 aa, Homo Sapiens
APIIRVGGAL

SEQ ID NO: 63003 - protein, 10 aa, Homo Sapiens
APINKAGSFL

SEQ ID NO: 63004 - protein, 10 aa, Homo Sapiens
APIQGNREEL

SEQ ID NO: 63005 - protein, 10 aa, Homo Sapiens
APKKPTGVDL

SEQ ID NO: 63006 - protein, 10 aa, Homo Sapiens
APKPSSRPSL

SEQ ID NO: 63007 - protein, 10 aa, Homo Sapiens
APKRPPSAFF

SEQ ID NO: 63008 - protein, 10 aa, Homo Sapiens
APLAAGMIAL

SEQ ID NO: 63009 - protein, 10 aa, Homo Sapiens
APMPCNLIKL

SEQ ID NO: 63010 - protein, 10 aa, Homo Sapiens
APPEYHRKAV

SEQ ID NO: 63011 - protein, 10 aa, Homo Sapiens
APPQEQKQML

SEQ ID NO: 63012 - protein, 10 aa, Homo Sapiens
APPVRPQNSL

SEQ ID NO: 63013 - protein, 10 aa, Homo Sapiens
APQTQHVSPM

SEQ ID NO: 63014 - protein, 10 aa, Homo Sapiens
APRAALVFAL

SEQ ID NO: 63015 - protein, 10 aa, Homo Sapiens
APRAASTESL

SEQ ID NO: 63016 - protein, 10 aa, Homo Sapiens
APRAGPDPRL

SEQ ID NO: 63017 - protein, 10 aa, Homo Sapiens
APRDAYWIAM

SEQ ID NO: 63018 - protein, 10 aa, Homo Sapiens
APREPPPVEL

SEQ ID NO: 63019 - protein, 10 aa, Homo Sapiens
APRGELYKEL

SEQ ID NO: 63020 - protein, 10 aa, Homo Sapiens
APRGTWSTGL

SEQ ID NO: 63021 - protein, 10 aa, Homo Sapiens
APRHPSTNSL

SEQ ID NO: 63022 - protein, 10 aa, Homo Sapiens
APRIALHTAL

SEQ ID NO: 63023 - protein, 10 aa, Homo Sapiens
APRPASGPIR

SEQ ID NO: 63024 - protein, 10 aa, Homo Sapiens
APRTIFQRVL

SEQ ID NO: 63025 - protein, 10 aa, Homo Sapiens
APRTVALTAL

SEQ ID NO: 63026 - protein, 10 aa, Homo Sapiens
APRTVSVQTL

SEQ ID NO: 63027 - protein, 10 aa, Homo Sapiens
APRWGNPRAL

SEQ ID NO: 63028 - protein, 10 aa, Homo Sapiens
APSAARELSL

SEQ ID NO: 63029 - protein, 10 aa, Homo Sapiens
APSDNRVTSF

SEQ ID NO: 63030 - protein, 10 aa, Homo Sapiens
APSGESRKFL

SEQ ID NO: 63031 - protein, 10 aa, Homo Sapiens
APSGGRLLSA

SEQ ID NO: 63032 - protein, 10 aa, Homo Sapiens
APSGSLAVPL

SEQ ID NO: 63033 - protein, 10 aa, Homo Sapiens
APSIFGGTDM

SEQ ID NO: 63034 - protein, 10 aa, Homo Sapiens
APSLFHLNLL

SEQ ID NO: 63035 - protein, 10 aa, Homo Sapiens
APSMDRAAVA

SEQ ID NO: 63036 - protein, 10 aa, Homo Sapiens
APSPAPKQSF

SEQ ID NO: 63037 - protein, 10 aa, Homo Sapiens
APSPTHVAEL

SEQ ID NO: 63038 - protein, 10 aa, Homo Sapiens
APSQQRLVVV

SEQ ID NO: 63039 - protein, 10 aa, Homo Sapiens
APSSETGTSL

SEQ ID NO: 63040 - protein, 10 aa, Homo Sapiens
APSSPRPALP

SEQ ID NO: 63041 - protein, 10 aa, Homo Sapiens
APSSYDPLAL

SEQ ID NO: 63042 - protein, 10 aa, Homo Sapiens
APTIVGKSSL

SEQ ID NO: 63043 - protein, 10 aa, Homo Sapiens
APTPIQALTL

SEQ ID NO: 63044 - protein, 10 aa, Homo Sapiens
APVNAGPSSL

SEQ ID NO: 63045 - protein, 10 aa, Homo Sapiens
APVPTTTLVL

SEQ ID NO: 63046 - protein, 10 aa, Homo Sapiens
APYERRAMEL

SEQ ID NO: 63047 - protein, 10 aa, Homo Sapiens
APYGGPIALL

SEQ ID NO: 63048 - protein, 10 aa, Homo Sapiens
APYRDLPASL

SEQ ID NO: 63049 - protein, 10 aa, Homo Sapiens
ASPKSPTAAL

SEQ ID NO: 63050 - protein, 10 aa, Homo Sapiens
AVDPNRAVPL

SEQ ID NO: 63051 - protein, 10 aa, Homo Sapiens
DALREPGKAL

SEQ ID NO: 63052 - protein, 10 aa, Homo Sapiens
EPAPASVTAL

SEQ ID NO: 63053 - protein, 10 aa, Homo Sapiens
FPAKPGSLTL

SEQ ID NO: 63054 - protein, 10 aa, Homo Sapiens
FPAPGKTVTL

SEQ ID NO: 63055 - protein, 10 aa, Homo Sapiens
FPHPVNQVTF

SEQ ID NO: 63056 - protein, 10 aa, Homo Sapiens
FPRDPKRLTP

SEQ ID NO: 63057 - protein, 10 aa, Homo Sapiens
GPAATSGAVL

SEQ ID NO: 63058 - protein, 10 aa, Homo Sapiens
GPAVGPRGNL

SEQ ID NO: 63059 - protein, 10 aa, Homo Sapiens
GPFPGKFNEV

SEQ ID NO: 63060 - protein, 10 aa, Homo Sapiens
GPIGCGKTSL

SEQ ID NO: 63061 - protein, 10 aa, Homo Sapiens
GPKPGGGPGL

SEQ ID NO: 63062 - protein, 10 aa, Homo Sapiens
GPLPGPGPAL

SEQ ID NO: 63063 - protein, 10 aa, Homo Sapiens
GPMPQTREHL

SEQ ID NO: 63064 - protein, 10 aa, Homo Sapiens
GPNERIGMVV

SEQ ID NO: 63065 - protein, 10 aa, Homo Sapiens
GPNGGIVTSL

SEQ ID NO: 63066 - protein, 10 aa, Homo Sapiens
GPRPITQSEL

SEQ ID NO: 63067 - protein, 10 aa, Homo Sapiens
GPRSPSVIFM

SEQ ID NO: 63068 - protein, 10 aa, Homo Sapiens
GPSIVHRKCF

SEQ ID NO: 63069 - protein, 10 aa, Homo Sapiens
HPHAVNEIAL

SEQ ID NO: 63070 - protein, 10 aa, Homo Sapiens
HPISDHEATL

SEQ ID NO: 63071 - protein, 10 aa, Homo Sapiens
HPKYPDGKTF

SEQ ID NO: 63072 - protein, 10 aa, Homo Sapiens
HPNSNIYNTL

SEQ ID NO: 63073 - protein, 10 aa, Homo Sapiens
HPPMILPLPL

SEQ ID NO: 63074 - protein, 10 aa, Homo Sapiens
HPQPGSANSL

SEQ ID NO: 63075 - protein, 10 aa, Homo Sapiens
HPRSPNVLSV

SEQ ID NO: 63076 - protein, 10 aa, Homo Sapiens
HPRTSITVVL

SEQ ID NO: 63077 - protein, 10 aa, Homo Sapiens
HPRVPSLTTV

SEQ ID NO: 63078 - protein, 10 aa, Homo Sapiens
IPAKVVREVL

SEQ ID NO: 63079 - protein, 10 aa, Homo Sapiens
IPAPGSGVSF

SEQ ID NO: 63080 - protein, 10 aa, Homo Sapiens
IPMPFSSSSL

SEQ ID NO: 63081 - protein, 10 aa, Homo Sapiens
IPQKQREITL

SEQ ID NO: 63082 - protein, 10 aa, Homo Sapiens
IPRDPSQQEL

SEQ ID NO: 63083 - protein, 10 aa, Homo Sapiens
IPRPVDGVEV

SEQ ID NO: 63084 - protein, 10 aa, Homo Sapiens
IPWTPPGTAL

SEQ ID NO: 63085 - protein, 10 aa, Homo Sapiens
IPYTGPFNLL

SEQ ID NO: 63086 - protein, 10 aa, Homo Sapiens
IVDGHERAML

SEQ ID NO: 63087 - protein, 10 aa, Homo Sapiens
IVDGNHRLTL

SEQ ID NO: 63088 - protein, 10 aa, Homo Sapiens
KPAAPSFGVL

SEQ ID NO: 63089 - protein, 10 aa, Homo Sapiens
KPAPPFNVTV

SEQ ID NO: 63090 - protein, 10 aa, Homo Sapiens
KPFGLKVSQL

SEQ ID NO: 63091 - protein, 10 aa, Homo Sapiens
KPHSGFHVAF

SEQ ID NO: 63092 - protein, 10 aa, Homo Sapiens
KPIDVSRLDL

SEQ ID NO: 63093 - protein, 10 aa, Homo Sapiens
KPIFSKIVSL

SEQ ID NO: 63094 - protein, 10 aa, Homo Sapiens
KPKCGRMISF

SEQ ID NO: 63095 - protein, 10 aa, Homo Sapiens
KPKDPLKISL

SEQ ID NO: 63096 - protein, 10 aa, Homo Sapiens
KPKPTNPVEI

SEQ ID NO: 63097 - protein, 10 aa, Homo Sapiens
KPKPVKPVTF

SEQ ID NO: 63098 - protein, 10 aa, Homo Sapiens
KPMEGNFEEI

SEQ ID NO: 63099 - protein, 10 aa, Homo Sapiens
KPNDSRALQL

SEQ ID NO: 63100 - protein, 10 aa, Homo Sapiens
KPNQISGTVF

SEQ ID NO: 63101 - protein, 10 aa, Homo Sapiens
KPRNVQILNM

SEQ ID NO: 63102 - protein, 10 aa, Homo Sapiens
KPRNVVFVDM

SEQ ID NO: 63103 - protein, 10 aa, Homo Sapiens
KPRPDVTNEL

SEQ ID NO: 63104 - protein, 10 aa, Homo Sapiens
KPSEERVREI

SEQ ID NO: 63105 - protein, 10 aa, Homo Sapiens
KPSESIYSAL

SEQ ID NO: 63106 - protein, 10 aa, Homo Sapiens
KPTDEKLREL

SEQ ID NO: 63107 - protein, 10 aa, Homo Sapiens
KVRYPDRITL

SEQ ID NO: 63108 - protein, 10 aa, Homo Sapiens
LGSPAAGTLA

SEQ ID NO: 63109 - protein, 10 aa, Homo Sapiens
LIMGFLVLGL

SEQ ID NO: 63110 - protein, 10 aa, Homo Sapiens
LPAAAMARAM

SEQ ID NO: 63111 - protein, 10 aa, Homo Sapiens
LPAPCTPLSL

SEQ ID NO: 63112 - protein, 10 aa, Homo Sapiens
LPASWRPVTL

SEQ ID NO: 63113 - protein, 10 aa, Homo Sapiens
LPDQDQRSQL

SEQ ID NO: 63114 - protein, 10 aa, Homo Sapiens
LPDSGHLHPL

SEQ ID NO: 63115 - protein, 10 aa, Homo Sapiens
LPKPGGAHSL

SEQ ID NO: 63116 - protein, 10 aa, Homo Sapiens
LPKSPPYTAF

SEQ ID NO: 63117 - protein, 10 aa, Homo Sapiens
LPMKEGCTEV

SEQ ID NO: 63118 - protein, 10 aa, Homo Sapiens
LPPEIVPATL

SEQ ID NO: 63119 - protein, 10 aa, Homo Sapiens
LPPLPKRPAL

SEQ ID NO: 63120 - protein, 10 aa, Homo Sapiens
LPRAVGTQTL

SEQ ID NO: 63121 - protein, 10 aa, Homo Sapiens
LPRGMQPTEF

SEQ ID NO: 63122 - protein, 10 aa, Homo Sapiens
LPRGSIPRSL

SEQ ID NO: 63123 - protein, 10 aa, Homo Sapiens
LPRKPVAGAL

SEQ ID NO: 63124 - protein, 10 aa, Homo Sapiens
LPRPHASIMF

SEQ ID NO: 63125 - protein, 10 aa, Homo Sapiens
LPRRPNDIYV

SEQ ID NO: 63126 - protein, 10 aa, Homo Sapiens
LPSAHRVSGL

SEQ ID NO: 63127 - protein, 10 aa, Homo Sapiens
LPSDLRTISL

SEQ ID NO: 63128 - protein, 10 aa, Homo Sapiens
LPSNTKFVAL

SEQ ID NO: 63129 - protein, 10 aa, Homo Sapiens
LPYLPSGESL

SEQ ID NO: 63130 - protein, 10 aa, Homo Sapiens
MPQSGTGVSV

SEQ ID NO: 63131 - protein, 10 aa, Homo Sapiens
MPRGIYHSAL

SEQ ID NO: 63132 - protein, 10 aa, Homo Sapiens
MPRQPSATRL

SEQ ID NO: 63133 - protein, 10 aa, Homo Sapiens
MPSASRVILL

SEQ ID NO: 63134 - protein, 10 aa, Homo Sapiens
MPSEQIRNQL

SEQ ID NO: 63135 - protein, 10 aa, Homo Sapiens
MPSLKHIVEL

SEQ ID NO: 63136 - protein, 10 aa, Homo Sapiens
MPYDSNRVVL

SEQ ID NO: 63137 - protein, 10 aa, Homo Sapiens
MPYSNGRPAL

SEQ ID NO: 63138 - protein, 10 aa, Homo Sapiens
NPNQNKNVAL

SEQ ID NO: 63139 - protein, 10 aa, Homo Sapiens
NPRDLPLMAL

SEQ ID NO: 63140 - protein, 10 aa, Homo Sapiens
NPRLNILDTL

SEQ ID NO: 63141 - protein, 10 aa, Homo Sapiens
NPRNFSDNQL

SEQ ID NO: 63142 - protein, 10 aa, Homo Sapiens
NPRPVFGICL

SEQ ID NO: 63143 - protein, 10 aa, Homo Sapiens
NPRQINWTVL

SEQ ID NO: 63144 - protein, 10 aa, Homo Sapiens
NPSALRETVV

SEQ ID NO: 63145 - protein, 10 aa, Homo Sapiens
NPSSQRALCL

SEQ ID NO: 63146 - protein, 10 aa, Homo Sapiens
PRPDRLVNRL

SEQ ID NO: 63147 - protein, 10 aa, Homo Sapiens
PRPSTGPHKL

SEQ ID NO: 63148 - protein, 10 aa, Homo Sapiens
QPADVIKTHM

SEQ ID NO: 63149 - protein, 10 aa, Homo Sapiens
QPANKGFRAL

SEQ ID NO: 63150 - protein, 10 aa, Homo Sapiens
QPAPPREAHF

SEQ ID NO: 63151 - protein, 10 aa, Homo Sapiens
QPDQTRIVAL

SEQ ID NO: 63152 - protein, 10 aa, Homo Sapiens
QPDYSERLCL

SEQ ID NO: 63153 - protein, 10 aa, Homo Sapiens
QPHVGDYRQL

SEQ ID NO: 63154 - protein, 10 aa, Homo Sapiens
QPLAPSGLTL

SEQ ID NO: 63155 - protein, 10 aa, Homo Sapiens
QSAQRAKASL

SEQ ID NO: 63156 - protein, 10 aa, Homo Sapiens
QVDPKKRISM

SEQ ID NO: 63157 - protein, 10 aa, Homo Sapiens
QVRLPDGTSL

SEQ ID NO: 63158 - protein, 10 aa, Homo Sapiens
RASPVRLLSL

SEQ ID NO: 63159 - protein, 10 aa, Homo Sapiens
RGPLPPLRPL

SEQ ID NO: 63160 - protein, 10 aa, Homo Sapiens
RIRAAWTRAL

SEQ ID NO: 63161 - protein, 10 aa, Homo Sapiens
RIRMTDGRTL

SEQ ID NO: 63162 - protein, 10 aa, Homo Sapiens
RPAAGFVAGL

SEQ ID NO: 63163 - protein, 10 aa, Homo Sapiens
RPAAPGQTPL

SEQ ID NO: 63164 - protein, 10 aa, Homo Sapiens
RPAEVGGMQL

SEQ ID NO: 63165 - protein, 10 aa, Homo Sapiens
RPANHRQLTF

SEQ ID NO: 63166 - protein, 10 aa, Homo Sapiens
RPAPLPAAVV

SEQ ID NO: 63167 - protein, 10 aa, Homo Sapiens
RPAPPMKGQL

SEQ ID NO: 63168 - protein, 10 aa, Homo Sapiens
RPASYQSVSV

SEQ ID NO: 63169 - protein, 10 aa, Homo Sapiens
RPDDKRILEF

SEQ ID NO: 63170 - protein, 10 aa, Homo Sapiens
RPDERRFAVF

SEQ ID NO: 63171 - protein, 10 aa, Homo Sapiens
RPDKRFRLAL

SEQ ID NO: 63172 - protein, 10 aa, Homo Sapiens
RPDPAGHLTL

SEQ ID NO: 63173 - protein, 10 aa, Homo Sapiens
RPFISEGTTL

SEQ ID NO: 63174 - protein, 10 aa, Homo Sapiens
RPIFPGKHYL

SEQ ID NO: 63175 - protein, 10 aa, Homo Sapiens
RPIGIGVQGL

SEQ ID NO: 63176 - protein, 10 aa, Homo Sapiens
RPKAISPYHL

SEQ ID NO: 63177 - protein, 10 aa, Homo Sapiens
RPKLPEDPLL

SEQ ID NO: 63178 - protein, 10 aa, Homo Sapiens
RPKPPSATSI

SEQ ID NO: 63179 - protein, 10 aa, Homo Sapiens
RPKQPGPVKL

SEQ ID NO: 63180 - protein, 10 aa, Homo Sapiens
RPMAFLREYF

SEQ ID NO: 63181 - protein, 10 aa, Homo Sapiens
RPMPGMQQQM

SEQ ID NO: 63182 - protein, 10 aa, Homo Sapiens
RPMPPEARRL

SEQ ID NO: 63183 - protein, 10 aa, Homo Sapiens
RPMYGAVTSF

SEQ ID NO: 63184 - protein, 10 aa, Homo Sapiens
RPNQHNTVKL

SEQ ID NO: 63185 - protein, 10 aa, Homo Sapiens
RPPLEEKKAL

SEQ ID NO: 63186 - protein, 10 aa, Homo Sapiens
RPPPSPSGTI

SEQ ID NO: 63187 - protein, 10 aa, Homo Sapiens
RPPYYTPNQL

SEQ ID NO: 63188 - protein, 10 aa, Homo Sapiens
RPQAPATVGL

SEQ ID NO: 63189 - protein, 10 aa, Homo Sapiens
RPRDALPRLL

SEQ ID NO: 63190 - protein, 10 aa, Homo Sapiens
RPRDDGLMDL

SEQ ID NO: 63191 - protein, 10 aa, Homo Sapiens
RPREAEVRFL

SEQ ID NO: 63192 - protein, 10 aa, Homo Sapiens
RPRGFAYVQF

SEQ ID NO: 63193 - protein, 10 aa, Homo Sapiens
RPRKAFLLLL

SEQ ID NO: 63194 - protein, 10 aa, Homo Sapiens
RPRPDEERPL

SEQ ID NO: 63195 - protein, 10 aa, Homo Sapiens
RPRPEYVAIF

SEQ ID NO: 63196 - protein, 10 aa, Homo Sapiens
RPRPSEDTFL

SEQ ID NO: 63197 - protein, 10 aa, Homo Sapiens
RPRPSGEEVL

SEQ ID NO: 63198 - protein, 10 aa, Homo Sapiens
RPRSWRELPL

SEQ ID NO: 63199 - protein, 10 aa, Homo Sapiens
RPRTEVSLSA

SEQ ID NO: 63200 - protein, 10 aa, Homo Sapiens
RPSDEVIREL

SEQ ID NO: 63201 - protein, 10 aa, Homo Sapiens
RPSGEAFVEL

SEQ ID NO: 63202 - protein, 10 aa, Homo Sapiens
RPSGSWNGAL

SEQ ID NO: 63203 - protein, 10 aa, Homo Sapiens
RPSPWRPLVL

SEQ ID NO: 63204 - protein, 10 aa, Homo Sapiens
RPSQNNTIGL

SEQ ID NO: 63205 - protein, 10 aa, Homo Sapiens
RPSSQYIVAL

SEQ ID NO: 63206 - protein, 10 aa, Homo Sapiens
RPSTPHTITL

SEQ ID NO: 63207 - protein, 10 aa, Homo Sapiens
RPSTRIQQQL

SEQ ID NO: 63208 - protein, 10 aa, Homo Sapiens
RPVAPSGTAL

SEQ ID NO: 63209 - protein, 10 aa, Homo Sapiens
RPVNLMGTSL

SEQ ID NO: 63210 - protein, 10 aa, Homo Sapiens
RPWLEGRHTL

SEQ ID NO: 63211 - protein, 10 aa, Homo Sapiens
RPYGCVLRAA

SEQ ID NO: 63212 - protein, 10 aa, Homo Sapiens
RVADFGSATF

SEQ ID NO: 63213 - protein, 10 aa, Homo Sapiens
RVAEHHVATL

SEQ ID NO: 63214 - protein, 10 aa, Homo Sapiens
RVREIIINAV

SEQ ID NO: 63215 - protein, 10 aa, Homo Sapiens
RVREITENLM

SEQ ID NO: 63216 - protein, 10 aa, Homo Sapiens
RVRFLEQQTL

SEQ ID NO: 63217 - protein, 10 aa, Homo Sapiens
SIRPVSEVTL

SEQ ID NO: 63218 - protein, 10 aa, Homo Sapiens
SPAAPSPLAL

SEQ ID NO: 63219 - protein, 10 aa, Homo Sapiens
SPAGEWRALL

SEQ ID NO: 63220 - protein, 10 aa, Homo Sapiens
SPAGGGAEAL

SEQ ID NO: 63221 - protein, 10 aa, Homo Sapiens
SPAGNSPAPL

SEQ ID NO: 63222 - protein, 10 aa, Homo Sapiens
SPANTRYLFL

SEQ ID NO: 63223 - protein, 10 aa, Homo Sapiens
SPASIRTTDF

SEQ ID NO: 63224 - protein, 10 aa, Homo Sapiens
SPASRSISLL

SEQ ID NO: 63225 - protein, 10 aa, Homo Sapiens
SPCAAELTAL

SEQ ID NO: 63226 - protein, 10 aa, Homo Sapiens
SPDGSKILAT

SEQ ID NO: 63227 - protein, 10 aa, Homo Sapiens
SPDKIPWSAL

SEQ ID NO: 63228 - protein, 10 aa, Homo Sapiens
SPDQKKIISL

SEQ ID NO: 63229 - protein, 10 aa, Homo Sapiens
SPDTAIRSGL

SEQ ID NO: 63230 - protein, 10 aa, Homo Sapiens
SPEGPSKPSL

SEQ ID NO: 63231 - protein, 10 aa, Homo Sapiens
SPGQHYFSSL

SEQ ID NO: 63232 - protein, 10 aa, Homo Sapiens
SPHLPGTSSA

SEQ ID NO: 63233 - protein, 10 aa, Homo Sapiens
SPHPGLLLDL

SEQ ID NO: 63234 - protein, 10 aa, Homo Sapiens
SPHPPSEVTA

SEQ ID NO: 63235 - protein, 10 aa, Homo Sapiens
SPIGASGVAH

SEQ ID NO: 63236 - protein, 10 aa, Homo Sapiens
SPIGKSPYTL

SEQ ID NO: 63237 - protein, 10 aa, Homo Sapiens
SPIKVTLATL

SEQ ID NO: 63238 - protein, 10 aa, Homo Sapiens
SPIVTSGLIM

SEQ ID NO: 63239 - protein, 10 aa, Homo Sapiens
SPKGCGTVLL

SEQ ID NO: 63240 - protein, 10 aa, Homo Sapiens
SPKPALCVTL

SEQ ID NO: 63241 - protein, 10 aa, Homo Sapiens
SPLAASKECL

SEQ ID NO: 63242 - protein, 10 aa, Homo Sapiens
SPLPVGQNSL

SEQ ID NO: 63243 - protein, 10 aa, Homo Sapiens
SPLSAARAAL

SEQ ID NO: 63244 - protein, 10 aa, Homo Sapiens
SPLSSETTQL

SEQ ID NO: 63245 - protein, 10 aa, Homo Sapiens
SPMAQSTSSL

SEQ ID NO: 63246 - protein, 10 aa, Homo Sapiens
SPMDGTSSAL

SEQ ID NO: 63247 - protein, 10 aa, Homo Sapiens
SPMEGTGISL

SEQ ID NO: 63248 - protein, 10 aa, Homo Sapiens
SPMPGTLTAL

SEQ ID NO: 63249 - protein, 10 aa, Homo Sapiens
SPMPPSEVKL

SEQ ID NO: 63250 - protein, 10 aa, Homo Sapiens
SPMSIPTNTM

SEQ ID NO: 63251 - protein, 10 aa, Homo Sapiens
SPNACGGIAL

SEQ ID NO: 63252 - protein, 10 aa, Homo Sapiens
SPNQSLRLGL

SEQ ID NO: 63253 - protein, 10 aa, Homo Sapiens
SPNSAHAVSL

SEQ ID NO: 63254 - protein, 10 aa, Homo Sapiens
SPNTAGLRSL

SEQ ID NO: 63255 - protein, 10 aa, Homo Sapiens
SPPSAARHSL

SEQ ID NO: 63256 - protein, 10 aa, Homo Sapiens
SPPSQPAVAL

SEQ ID NO: 63257 - protein, 10 aa, Homo Sapiens
SPPTPIRSVL

SEQ ID NO: 63258 - protein, 10 aa, Homo Sapiens
SPQSGNFRQL

SEQ ID NO: 63259 - protein, 10 aa, Homo Sapiens
SPQYRLRIAM

SEQ ID NO: 63260 - protein, 10 aa, Homo Sapiens
SPRDITTIKL

SEQ ID NO: 63261 - protein, 10 aa, Homo Sapiens
SPREEPRAPW

SEQ ID NO: 63262 - protein, 10 aa, Homo Sapiens
SPRLPVGGFR

SEQ ID NO: 63263 - protein, 10 aa, Homo Sapiens
SPRPALPALL

SEQ ID NO: 63264 - protein, 10 aa, Homo Sapiens
SPRPNHSYIF

SEQ ID NO: 63265 - protein, 10 aa, Homo Sapiens
SPRPNIILGL

SEQ ID NO: 63266 - protein, 10 aa, Homo Sapiens
SPRPTQFSCV

SEQ ID NO: 63267 - protein, 10 aa, Homo Sapiens
SPRSPISPEL

SEQ ID NO: 63268 - protein, 10 aa, Homo Sapiens
SPRSPSTTYL

SEQ ID NO: 63269 - protein, 10 aa, Homo Sapiens
SPRSPTQHCL

SEQ ID NO: 63270 - protein, 10 aa, Homo Sapiens
SPRSSDLVKL

SEQ ID NO: 63271 - protein, 10 aa, Homo Sapiens
SPRSSTVHIL

SEQ ID NO: 63272 - protein, 10 aa, Homo Sapiens
SPSLNREEVM

SEQ ID NO: 63273 - protein, 10 aa, Homo Sapiens
SPSPERSLLL

SEQ ID NO: 63274 - protein, 10 aa, Homo Sapiens
SPSPLSGSAL

SEQ ID NO: 63275 - protein, 10 aa, Homo Sapiens
SPSPVLRLVL

SEQ ID NO: 63276 - protein, 10 aa, Homo Sapiens
SPSRNRSLQL

SEQ ID NO: 63277 - protein, 10 aa, Homo Sapiens
SPSSVTGNAL

SEQ ID NO: 63278 - protein, 10 aa, Homo Sapiens
SPTPRIKAEL

SEQ ID NO: 63279 - protein, 10 aa, Homo Sapiens
SPTSAHLLQL

SEQ ID NO: 63280 - protein, 10 aa, Homo Sapiens
SPTSVRQMAL

SEQ ID NO: 63281 - protein, 10 aa, Homo Sapiens
SPVSYLRVSM

SEQ ID NO: 63282 - protein, 10 aa, Homo Sapiens
SPYFQRPLAL

SEQ ID NO: 63283 - protein, 10 aa, Homo Sapiens
SPYPRVKVDF

SEQ ID NO: 63284 - protein, 10 aa, Homo Sapiens
SPYPTKTQTM

SEQ ID NO: 63285 - protein, 10 aa, Homo Sapiens
TPAAVRELVL

SEQ ID NO: 63286 - protein, 10 aa, Homo Sapiens
TPAPSRTASF

SEQ ID NO: 63287 - protein, 10 aa, Homo Sapiens
TPDKFGRTCL

SEQ ID NO: 63288 - protein, 10 aa, Homo Sapiens
TPFGGRLLVL

SEQ ID NO: 63289 - protein, 10 aa, Homo Sapiens
TPLASTSNSL

SEQ ID NO: 63290 - protein, 10 aa, Homo Sapiens
TPLLMQALPM

SEQ ID NO: 63291 - protein, 10 aa, Homo Sapiens
TPQSILRSTL

SEQ ID NO: 63292 - protein, 10 aa, Homo Sapiens
TPRDLVLRSL

SEQ ID NO: 63293 - protein, 10 aa, Homo Sapiens
TPRSYVGVTL

SEQ ID NO: 63294 - protein, 10 aa, Homo Sapiens
TPSKPSGLSL

SEQ ID NO: 63295 - protein, 10 aa, Homo Sapiens
TPSKPTSESF

SEQ ID NO: 63296 - protein, 10 aa, Homo Sapiens
TPSPVRLHAL

SEQ ID NO: 63297 - protein, 10 aa, Homo Sapiens
TPSPYDHDSL

SEQ ID NO: 63298 - protein, 10 aa, Homo Sapiens
TPTSAPRSVM

SEQ ID NO: 63299 - protein, 10 aa, Homo Sapiens
VPAARSILAL

SEQ ID NO: 63300 - protein, 10 aa, Homo Sapiens
VPAKAKLTKL

SEQ ID NO: 63301 - protein, 10 aa, Homo Sapiens
VPAPVPLMSL

SEQ ID NO: 63302 - protein, 10 aa, Homo Sapiens
VPASQKLRQL

SEQ ID NO: 63303 - protein, 10 aa, Homo Sapiens
VPGPPARLGL

SEQ ID NO: 63304 - protein, 10 aa, Homo Sapiens
VPKAPGFAQM

SEQ ID NO: 63305 - protein, 10 aa, Homo Sapiens
VPKPPSIEEF

SEQ ID NO: 63306 - protein, 10 aa, Homo Sapiens
VPNATIRNVL

SEQ ID NO: 63307 - protein, 10 aa, Homo Sapiens
VPNQKRLTLL

SEQ ID NO: 63308 - protein, 10 aa, Homo Sapiens
VPRFLMSSTM

SEQ ID NO: 63309 - protein, 10 aa, Homo Sapiens
VPRPPPLYSH

SEQ ID NO: 63310 - protein, 10 aa, Homo Sapiens
VPRQPTVTSV

SEQ ID NO: 63311 - protein, 10 aa, Homo Sapiens
VPTSPKGRLL

SEQ ID NO: 63312 - protein, 10 aa, Homo Sapiens
WPKDVGIVAL

SEQ ID NO: 63313 - protein, 10 aa, Homo Sapiens
YPARYRPTAL

SEQ ID NO: 63314 - protein, 10 aa, Homo Sapiens
YPFKPPKVAF

SEQ ID NO: 63315 - protein, 10 aa, Homo Sapiens
YPFKPPKVTF

SEQ ID NO: 63316 - protein, 10 aa, Homo Sapiens
YPSEQEKLSL

SEQ ID NO: 63317 - protein, 10 aa, Homo Sapiens
YPYNAPTVKF

SEQ ID NO: 63318 - protein, 11 aa, Homo Sapiens
AALSPSSGQRL

SEQ ID NO: 63319 - protein, 11 aa, Homo Sapiens
AASKERSGVSL

SEQ ID NO: 63320 - protein, 11 aa, Homo Sapiens
APAAYPREVAL

SEQ ID NO: 63321 - protein, 11 aa, Homo Sapiens
APAGTTSSRVL

SEQ ID NO: 63322 - protein, 11 aa, Homo Sapiens
APAPGAPLLPL

SEQ ID NO: 63323 - protein, 11 aa, Homo Sapiens
APAPSRGSVQV

SEQ ID NO: 63324 - protein, 11 aa, Homo Sapiens
APDAAPAPASI

SEQ ID NO: 63325 - protein, 11 aa, Homo Sapiens
APDKHHITPLL

SEQ ID NO: 63326 - protein, 11 aa, Homo Sapiens
APDVGRMGIEI

SEQ ID NO: 63327 - protein, 11 aa, Homo Sapiens
APFEPLASGIL

SEQ ID NO: 63328 - protein, 11 aa, Homo Sapiens
APLSEDQRTAL

SEQ ID NO: 63329 - protein, 11 aa, Homo Sapiens
APNLGRSFHIL

SEQ ID NO: 63330 - protein, 11 aa, Homo Sapiens
APNPYRSENCL

SEQ ID NO: 63331 - protein, 11 aa, Homo Sapiens
APRAPPGPAGL

SEQ ID NO: 63332 - protein, 11 aa, Homo Sapiens
APREALAQTVL

SEQ ID NO: 63333 - protein, 11 aa, Homo Sapiens
APREGISQEAL

SEQ ID NO: 63334 - protein, 11 aa, Homo Sapiens
APRPASGPIRP

SEQ ID NO: 63335 - protein, 11 aa, Homo Sapiens
APRPDRLVNRL

SEQ ID NO: 63336 - protein, 11 aa, Homo Sapiens
APRPLQAGPAM

SEQ ID NO: 63337 - protein, 11 aa, Homo Sapiens
APRPSTGPHKL

SEQ ID NO: 63338 - protein, 11 aa, Homo Sapiens
APRQPGLMAQM

SEQ ID NO: 63339 - protein, 11 aa, Homo Sapiens
APRSFHPPAAM

SEQ ID NO: 63340 - protein, 11 aa, Homo Sapiens
APRTVALTALL

SEQ ID NO: 63341 - protein, 11 aa, Homo Sapiens
APRWLEEEAAL

SEQ ID NO: 63342 - protein, 11 aa, Homo Sapiens
APSDLRTIQTF

SEQ ID NO: 63343 - protein, 11 aa, Homo Sapiens
APSGLRSQVQF

SEQ ID NO: 63344 - protein, 11 aa, Homo Sapiens
APSHLMALLTL

SEQ ID NO: 63345 - protein, 11 aa, Homo Sapiens
APSLINSSSTL

SEQ ID NO: 63346 - protein, 11 aa, Homo Sapiens
APSPVIPRLTL

SEQ ID NO: 63347 - protein, 11 aa, Homo Sapiens
APSSAAWVQTL

SEQ ID NO: 63348 - protein, 11 aa, Homo Sapiens
APTQEKIFAVL

SEQ ID NO: 63349 - protein, 11 aa, Homo Sapiens
APYGKNQVQAL

SEQ ID NO: 63350 - protein, 11 aa, Homo Sapiens
APYMRSMMQSL

SEQ ID NO: 63351 - protein, 11 aa, Homo Sapiens
AVRDISEASVF

SEQ ID NO: 63352 - protein, 11 aa, Homo Sapiens
FPMGDRLYIGL

SEQ ID NO: 63353 - protein, 11 aa, Homo Sapiens
FPRAPSTSDSV

SEQ ID NO: 63354 - protein, 11 aa, Homo Sapiens
FPRSPGQPSSL

SEQ ID NO: 63355 - protein, 11 aa, Homo Sapiens
GPDEAKIKALL

SEQ ID NO: 63356 - protein, 11 aa, Homo Sapiens
GPGLSRTGVEL

SEQ ID NO: 63357 - protein, 11 aa, Homo Sapiens
GPNPKSSRTTL

SEQ ID NO: 63358 - protein, 11 aa, Homo Sapiens
GPRFTLKLRSL

SEQ ID NO: 63359 - protein, 11 aa, Homo Sapiens
HESEQLGSISV

SEQ ID NO: 63360 - protein, 11 aa, Homo Sapiens
HPIQVQPGRIL

SEQ ID NO: 63361 - protein, 11 aa, Homo Sapiens
HPISSEELLSL

SEQ ID NO: 63362 - protein, 11 aa, Homo Sapiens
HPRDPNLLLSV

SEQ ID NO: 63363 - protein, 11 aa, Homo Sapiens
HPYPPGPGVAL

SEQ ID NO: 63364 - protein, 11 aa, Homo Sapiens
INAKSRAEAAL

SEQ ID NO: 63365 - protein, 11 aa, Homo Sapiens
IPMGQAVNSQL

SEQ ID NO: 63366 - protein, 11 aa, Homo Sapiens
IPQGGRGAIQF

SEQ ID NO: 63367 - protein, 11 aa, Homo Sapiens
IPRLPERMTTL

SEQ ID NO: 63368 - protein, 11 aa, Homo Sapiens
IPRRPGALDGL

SEQ ID NO: 63369 - protein, 11 aa, Homo Sapiens
IPRRQEHDISL

SEQ ID NO: 63370 - protein, 11 aa, Homo Sapiens
IPRTPLSPSPM

SEQ ID NO: 63371 - protein, 11 aa, Homo Sapiens
IPYHSEVPVSL

SEQ ID NO: 63372 - protein, 11 aa, Homo Sapiens
KPAGPPGILAL

SEQ ID NO: 63373 - protein, 11 aa, Homo Sapiens
KPFEQVKGITL

SEQ ID NO: 63374 - protein, 11 aa, Homo Sapiens
KPIAVGSMSML

SEQ ID NO: 63375 - protein, 11 aa, Homo Sapiens
KPNANRIALDF

SEQ ID NO: 63376 - protein, 11 aa, Homo Sapiens
KPNDVSVFTTL

SEQ ID NO: 63377 - protein, 11 aa, Homo Sapiens
KPNEFASQINL

SEQ ID NO: 63378 - protein, 11 aa, Homo Sapiens
KPQDYKKRLSV

SEQ ID NO: 63379 - protein, 11 aa, Homo Sapiens
KPVNPSPLSQL

SEQ ID NO: 63380 - protein, 11 aa, Homo Sapiens
KPYQGVGSSSM

SEQ ID NO: 63381 - protein, 11 aa, Homo Sapiens
LPDLQRSKQAL

SEQ ID NO: 63382 - protein, 11 aa, Homo Sapiens
LPDSGHLHPLL

SEQ ID NO: 63383 - protein, 11 aa, Homo Sapiens
LPHGGEGWQQL

SEQ ID NO: 63384 - protein, 11 aa, Homo Sapiens
LPMGALPQGPM

SEQ ID NO: 63385 - protein, 11 aa, Homo Sapiens
LPRSIGNLTQL

SEQ ID NO: 63386 - protein, 11 aa, Homo Sapiens
LPRTIFPTSTI

SEQ ID NO: 63387 - protein, 11 aa, Homo Sapiens
LPRYLMGETQL

SEQ ID NO: 63388 - protein, 11 aa, Homo Sapiens
LPSGDRVAVSV

SEQ ID NO: 63389 - protein, 11 aa, Homo Sapiens
MPAFSKIGGIL

SEQ ID NO: 63390 - protein, 11 aa, Homo Sapiens
MPDSLRSGEYL

SEQ ID NO: 63391 - protein, 11 aa, Homo Sapiens
MPDVGRSMQQL

SEQ ID NO: 63392 - protein, 11 aa, Homo Sapiens
MPFPNIRSAEL

SEQ ID NO: 63393 - protein, 11 aa, Homo Sapiens
MPRPDTCPPEL

SEQ ID NO: 63394 - protein, 11 aa, Homo Sapiens
MPRTGNGPMSV

SEQ ID NO: 63395 - protein, 11 aa, Homo Sapiens
MPSSHRILHKL

SEQ ID NO: 63396 - protein, 11 aa, Homo Sapiens
NPRQPLPASGL

SEQ ID NO: 63397 - protein, 11 aa, Homo Sapiens
NVSRAKAVRAL

SEQ ID NO: 63398 - protein, 11 aa, Homo Sapiens
QPIDNVSRNLL

SEQ ID NO: 63399 - protein, 11 aa, Homo Sapiens
QPSPARAPAEL

SEQ ID NO: 63400 - protein, 11 aa, Homo Sapiens
RPAALRGALLG

SEQ ID NO: 63401 - protein, 11 aa, Homo Sapiens
RPADPEKNQSL

SEQ ID NO: 63402 - protein, 11 aa, Homo Sapiens
RPDDRSQGAII

SEQ ID NO: 63403 - protein, 11 aa, Homo Sapiens
RPDVGRYLREL

SEQ ID NO: 63404 - protein, 11 aa, Homo Sapiens
RPEDRMFHIRA

SEQ ID NO: 63405 - protein, 11 aa, Homo Sapiens
RPFGSISRIYL

SEQ ID NO: 63406 - protein, 11 aa, Homo Sapiens
RPKAKGGLASL

SEQ ID NO: 63407 - protein, 11 aa, Homo Sapiens
RPLEMIEPRTL

SEQ ID NO: 63408 - protein, 11 aa, Homo Sapiens
RPNDSRMLVAL

SEQ ID NO: 63409 - protein, 11 aa, Homo Sapiens
RPNVQAISSRL

SEQ ID NO: 63410 - protein, 11 aa, Homo Sapiens
RPPNYSGTIAL

SEQ ID NO: 63411 - protein, 11 aa, Homo Sapiens
RPPPPGMRGLL

SEQ ID NO: 63412 - protein, 11 aa, Homo Sapiens
RPQCPVGFNTL

SEQ ID NO: 63413 - protein, 11 aa, Homo Sapiens
RPRPGNILLQL

SEQ ID NO: 63414 - protein, 11 aa, Homo Sapiens
RPRPTEATVSL

SEQ ID NO: 63415 - protein, 11 aa, Homo Sapiens
RPRTEVSLSAF

SEQ ID NO: 63416 - protein, 11 aa, Homo Sapiens
RPRTPPEAIAL

SEQ ID NO: 63417 - protein, 11 aa, Homo Sapiens
RPSGLHGDVSL

SEQ ID NO: 63418 - protein, 11 aa, Homo Sapiens
RPTGSQGLSSL

SEQ ID NO: 63419 - protein, 11 aa, Homo Sapiens
RPYAPINANAI

SEQ ID NO: 63420 - protein, 11 aa, Homo Sapiens
SASVQRADTSL

SEQ ID NO: 63421 - protein, 11 aa, Homo Sapiens
SGPSIVHRKCF

SEQ ID NO: 63422 - protein, 11 aa, Homo Sapiens
SPAAKSPSAQL

SEQ ID NO: 63423 - protein, 11 aa, Homo Sapiens
SPAGPGRAASL

SEQ ID NO: 63424 - protein, 11 aa, Homo Sapiens
SPALNKMFCQL

SEQ ID NO: 63425 - protein, 11 aa, Homo Sapiens
SPALYRNVNTL

SEQ ID NO: 63426 - protein, 11 aa, Homo Sapiens
SPANPAHILSL

SEQ ID NO: 63427 - protein, 11 aa, Homo Sapiens
SPASKAARESL

SEQ ID NO: 63428 - protein, 11 aa, Homo Sapiens
SPAVERLISSL

SEQ ID NO: 63429 - protein, 11 aa, Homo Sapiens
SPDLGKNLQTL

SEQ ID NO: 63430 - protein, 11 aa, Homo Sapiens
SPDPHKGLVLL

SEQ ID NO: 63431 - protein, 11 aa, Homo Sapiens
SPFLPGFSQSL

SEQ ID NO: 63432 - protein, 11 aa, Homo Sapiens
SPFSFHHVLSL

SEQ ID NO: 63433 - protein, 11 aa, Homo Sapiens
SPMMPRITSVF

SEQ ID NO: 63434 - protein, 11 aa, Homo Sapiens
SPMSADRVVAF

SEQ ID NO: 63435 - protein, 11 aa, Homo Sapiens
SPMSDVVSREL

SEQ ID NO: 63436 - protein, 11 aa, Homo Sapiens
SPNQARAQAAL

SEQ ID NO: 63437 - protein, 11 aa, Homo Sapiens
SPNQKLLAVSL

SEQ ID NO: 63438 - protein, 11 aa, Homo Sapiens
SPQLGRAVQLL

SEQ ID NO: 63439 - protein, 11 aa, Homo Sapiens
SPRPDRALVQL

SEQ ID NO: 63440 - protein, 11 aa, Homo Sapiens
SPRTAVAPSAV

SEQ ID NO: 63441 - protein, 11 aa, Homo Sapiens
SPSAAHFITRL

SEQ ID NO: 63442 - protein, 11 aa, Homo Sapiens
SPSPINSSQAL

SEQ ID NO: 63443 - protein, 11 aa, Homo Sapiens
SPSPLRAGVDI

SEQ ID NO: 63444 - protein, 11 aa, Homo Sapiens
SPSTNRGPIQM

SEQ ID NO: 63445 - protein, 11 aa, Homo Sapiens
SPTDPFNRQTL

SEQ ID NO: 63446 - protein, 11 aa, Homo Sapiens
SPTDRSMSSSL

SEQ ID NO: 63447 - protein, 11 aa, Homo Sapiens
SPVDPGARQAL

SEQ ID NO: 63448 - protein, 11 aa, Homo Sapiens
SPYGSDRLVQL

SEQ ID NO: 63449 - protein, 11 aa, Homo Sapiens
SPYLPRGDPVL

SEQ ID NO: 63450 - protein, 11 aa, Homo Sapiens
SVDGTRTNVYL

SEQ ID NO: 63451 - protein, 11 aa, Homo Sapiens
TICLAHALTVL

SEQ ID NO: 63452 - protein, 11 aa, Homo Sapiens
TPDTGRILSKL

SEQ ID NO: 63453 - protein, 11 aa, Homo Sapiens
TPDTNHTPVAL

SEQ ID NO: 63454 - protein, 11 aa, Homo Sapiens
TPMPKDVRQSL

SEQ ID NO: 63455 - protein, 11 aa, Homo Sapiens
TPRDLAVPAAL

SEQ ID NO: 63456 - protein, 11 aa, Homo Sapiens
TPRDQQGPGTL

SEQ ID NO: 63457 - protein, 11 aa, Homo Sapiens
TPRGTTKVVSI

SEQ ID NO: 63458 - protein, 11 aa, Homo Sapiens
TPRPGSAESAL

SEQ ID NO: 63459 - protein, 11 aa, Homo Sapiens
TPSLVKSTSQL

SEQ ID NO: 63460 - protein, 11 aa, Homo Sapiens
TVMGAEIRHVL

SEQ ID NO: 63461 - protein, 11 aa, Homo Sapiens
VPDAKKACTYI

SEQ ID NO: 63462 - protein, 11 aa, Homo Sapiens
VPDDDRSLINL

SEQ ID NO: 63463 - protein, 11 aa, Homo Sapiens
VPDSSGPERIL

SEQ ID NO: 63464 - protein, 11 aa, Homo Sapiens
VPDTSRIYVAL

SEQ ID NO: 63465 - protein, 11 aa, Homo Sapiens
VPHPNWPNHTL

SEQ ID NO: 63466 - protein, 11 aa, Homo Sapiens
VPKTTGEGTSL

SEQ ID NO: 63467 - protein, 11 aa, Homo Sapiens
VPNAGRGLVRL

SEQ ID NO: 63468 - protein, 11 aa, Homo Sapiens
VPRASVPDGFL

SEQ ID NO: 63469 - protein, 11 aa, Homo Sapiens
VPRNPTIGDKF

SEQ ID NO: 63470 - protein, 11 aa, Homo Sapiens
VPRPVLRALSF

SEQ ID NO: 63471 - protein, 11 aa, Homo Sapiens
VPRSPFKVKVL

SEQ ID NO: 63472 - protein, 11 aa, Homo Sapiens
YPMDLGGRNFL

SEQ ID NO: 63473 - protein, 11 aa, Homo Sapiens
YPVPASKRPPL

SEQ ID NO: 63474 - protein, 8 aa, Homo Sapiens
APATRAAL

SEQ ID NO: 63475 - protein, 8 aa, Homo Sapiens
APHLLRLF

SEQ ID NO: 63476 - protein, 8 aa, Homo Sapiens
APILKRAL

SEQ ID NO: 63477 - protein, 8 aa, Homo Sapiens
APLALHLL

SEQ ID NO: 63478 - protein, 8 aa, Homo Sapiens
APLLRWVL

SEQ ID NO: 63479 - protein, 8 aa, Homo Sapiens
APQNKPEL

SEQ ID NO: 63480 - protein, 8 aa, Homo Sapiens
APVQRPKL

SEQ ID NO: 63481 - protein, 8 aa, Homo Sapiens
APYNKPSL

SEQ ID NO: 63482 - protein, 8 aa, Homo Sapiens
FPHPPKRL

SEQ ID NO: 63483 - protein, 8 aa, Homo Sapiens
FPKEPVEL

SEQ ID NO: 63484 - protein, 8 aa, Homo Sapiens
GPIKKPVL

SEQ ID NO: 63485 - protein, 8 aa, Homo Sapiens
GVKKPTKA

SEQ ID NO: 63486 - protein, 8 aa, Homo Sapiens
HPKAKLVL

SEQ ID NO: 63487 - protein, 8 aa, Homo Sapiens
HPKYKTEL

SEQ ID NO: 63488 - protein, 8 aa, Homo Sapiens
HPRSPNVL

SEQ ID NO: 63489 - protein, 8 aa, Homo Sapiens
KPISPKLL

SEQ ID NO: 63490 - protein, 8 aa, Homo Sapiens
KPKIPKGV

SEQ ID NO: 63491 - protein, 8 aa, Homo Sapiens
KPVNRISL

SEQ ID NO: 63492 - protein, 8 aa, Homo Sapiens
KPYIRTSL

SEQ ID NO: 63493 - protein, 8 aa, Homo Sapiens
LNPNAKEF

SEQ ID NO: 63494 - protein, 8 aa, Homo Sapiens
LPHLRNKL

SEQ ID NO: 63495 - protein, 8 aa, Homo Sapiens
LPHLTRRL

SEQ ID NO: 63496 - protein, 8 aa, Homo Sapiens
LPKKPVGL

SEQ ID NO: 63497 - protein, 8 aa, Homo Sapiens
LPQRKPSL

SEQ ID NO: 63498 - protein, 8 aa, Homo Sapiens
LPRKFPSL

SEQ ID NO: 63499 - protein, 8 aa, Homo Sapiens
LPWYPKVL

SEQ ID NO: 63500 - protein, 8 aa, Homo Sapiens
MPKMGKTI

SEQ ID NO: 63501 - protein, 8 aa, Homo Sapiens
MPRNGSRL

SEQ ID NO: 63502 - protein, 8 aa, Homo Sapiens
NPKKPLTL

SEQ ID NO: 63503 - protein, 8 aa, Homo Sapiens
PASKRPPL

SEQ ID NO: 63504 - protein, 8 aa, Homo Sapiens
PKAHIRKL

SEQ ID NO: 63505 - protein, 8 aa, Homo Sapiens
PKPKAKTL

SEQ ID NO: 63506 - protein, 8 aa, Homo Sapiens
PKPQGTKI

SEQ ID NO: 63507 - protein, 8 aa, Homo Sapiens
PLSKIKTL

SEQ ID NO: 63508 - protein, 8 aa, Homo Sapiens
PQSNRPVM

SEQ ID NO: 63509 - protein, 8 aa, Homo Sapiens
PRPPPKPM

SEQ ID NO: 63510 - protein, 8 aa, Homo Sapiens
PRSPPRAL

SEQ ID NO: 63511 - protein, 8 aa, Homo Sapiens
PSGSKKVI

SEQ ID NO: 63512 - protein, 8 aa, Homo Sapiens
PYSRPKQL

SEQ ID NO: 63513 - protein, 8 aa, Homo Sapiens
QAPKPRKQ

SEQ ID NO: 63514 - protein, 8 aa, Homo Sapiens
QLMKPKKT

SEQ ID NO: 63515 - protein, 8 aa, Homo Sapiens
QPKQPLRL

SEQ ID NO: 63516 - protein, 8 aa, Homo Sapiens
RLIKPKVM

SEQ ID NO: 63517 - protein, 8 aa, Homo Sapiens
RPFLLRRI

SEQ ID NO: 63518 - protein, 8 aa, Homo Sapiens
RPHLAKVL

SEQ ID NO: 63519 - protein, 8 aa, Homo Sapiens
RPKVLMRL

SEQ ID NO: 63520 - protein, 8 aa, Homo Sapiens
RPNTPKTL

SEQ ID NO: 63521 - protein, 8 aa, Homo Sapiens
RPRKAFLL

SEQ ID NO: 63522 - protein, 8 aa, Homo Sapiens
RPRPGTGL

SEQ ID NO: 63523 - protein, 8 aa, Homo Sapiens
RPRPPRQL

SEQ ID NO: 63524 - protein, 8 aa, Homo Sapiens
RPSERPSL

SEQ ID NO: 63525 - protein, 8 aa, Homo Sapiens
RPTCKAVL

SEQ ID NO: 63526 - protein, 8 aa, Homo Sapiens
RPTPKNSL

SEQ ID NO: 63527 - protein, 8 aa, Homo Sapiens
RPVKKPKI

SEQ ID NO: 63528 - protein, 8 aa, Homo Sapiens
RPYAKHWL

SEQ ID NO: 63529 - protein, 8 aa, Homo Sapiens
SFSKAFGQ

SEQ ID NO: 63530 - protein, 8 aa, Homo Sapiens
SPAKLHEL

SEQ ID NO: 63531 - protein, 8 aa, Homo Sapiens
SPAKPKAV

SEQ ID NO: 63532 - protein, 8 aa, Homo Sapiens
SPAKRPRL

SEQ ID NO: 63533 - protein, 8 aa, Homo Sapiens
SPAVLRPI

SEQ ID NO: 63534 - protein, 8 aa, Homo Sapiens
SPGPRPVL

SEQ ID NO: 63535 - protein, 8 aa, Homo Sapiens
SPGQRAVL

SEQ ID NO: 63536 - protein, 8 aa, Homo Sapiens
SPIIRPLL

SEQ ID NO: 63537 - protein, 8 aa, Homo Sapiens
SPKFGKLV

SEQ ID NO: 63538 - protein, 8 aa, Homo Sapiens
SPKLLHKF

SEQ ID NO: 63539 - protein, 8 aa, Homo Sapiens
SPKVKMAL

SEQ ID NO: 63540 - protein, 8 aa, Homo Sapiens
SPKVPRTL

SEQ ID NO: 63541 - protein, 8 aa, Homo Sapiens
SPNVPKSL

SEQ ID NO: 63542 - protein, 8 aa, Homo Sapiens
SPRKGWSF

SEQ ID NO: 63543 - protein, 8 aa, Homo Sapiens
SPTFLALR

SEQ ID NO: 63544 - protein, 8 aa, Homo Sapiens
SPTIGKQL

SEQ ID NO: 63545 - protein, 8 aa, Homo Sapiens
SPVKKPSL

SEQ ID NO: 63546 - protein, 8 aa, Homo Sapiens
SPYIRTKL

SEQ ID NO: 63547 - protein, 8 aa, Homo Sapiens
SVKRPKLL

SEQ ID NO: 63548 - protein, 8 aa, Homo Sapiens
TPFIRPVM

SEQ ID NO: 63549 - protein, 8 aa, Homo Sapiens
TPFKGGTL

SEQ ID NO: 63550 - protein, 8 aa, Homo Sapiens
TPRPGQEL

SEQ ID NO: 63551 - protein, 8 aa, Homo Sapiens
VKPKPRAL

SEQ ID NO: 63552 - protein, 8 aa, Homo Sapiens
VLENVKEM

SEQ ID NO: 63553 - protein, 8 aa, Homo Sapiens
VPKTHLEL

SEQ ID NO: 63554 - protein, 9 aa, Homo Sapiens
AAKRSGLAV

SEQ ID NO: 63555 - protein, 9 aa, Homo Sapiens
AAMNGRKIL

SEQ ID NO: 63556 - protein, 9 aa, Homo Sapiens
AARAPRKVL

SEQ ID NO: 63557 - protein, 9 aa, Homo Sapiens
AARPATSTL

SEQ ID NO: 63558 - protein, 9 aa, Homo Sapiens
AAVRKPIVL

SEQ ID NO: 63559 - protein, 9 aa, Homo Sapiens
AAWRRRNTL

SEQ ID NO: 63560 - protein, 9 aa, Homo Sapiens
AICPHRPVL

SEQ ID NO: 63561 - protein, 9 aa, Homo Sapiens
AIKNVNTAL

SEQ ID NO: 63562 - protein, 9 aa, Homo Sapiens
ALKRQGRTL

SEQ ID NO: 63563 - protein, 9 aa, Homo Sapiens
APAAAGAAL

SEQ ID NO: 63564 - protein, 9 aa, Homo Sapiens
APAAGSKVL

SEQ ID NO: 63565 - protein, 9 aa, Homo Sapiens
APAAPGLSL

SEQ ID NO: 63566 - protein, 9 aa, Homo Sapiens
APAGRKVGL

SEQ ID NO: 63567 - protein, 9 aa, Homo Sapiens
APALVSKKL

SEQ ID NO: 63568 - protein, 9 aa, Homo Sapiens
APAPPKAEA

SEQ ID NO: 63569 - protein, 9 aa, Homo Sapiens
APAPPSKVI

SEQ ID NO: 63570 - protein, 9 aa, Homo Sapiens
APAPTAVVL

SEQ ID NO: 63571 - protein, 9 aa, Homo Sapiens
APAPVQPPM

SEQ ID NO: 63572 - protein, 9 aa, Homo Sapiens
APASFGKSF

SEQ ID NO: 63573 - protein, 9 aa, Homo Sapiens
APCKQRISV

SEQ ID NO: 63574 - protein, 9 aa, Homo Sapiens
APDCHGPVL

SEQ ID NO: 63575 - protein, 9 aa, Homo Sapiens
APDSQRLKL

SEQ ID NO: 63576 - protein, 9 aa, Homo Sapiens
APEDKKEIL

SEQ ID NO: 63577 - protein, 9 aa, Homo Sapiens
APELPIKIL

SEQ ID NO: 63578 - protein, 9 aa, Homo Sapiens
APELQRHEL

SEQ ID NO: 63579 - protein, 9 aa, Homo Sapiens
APFLRNVEL

SEQ ID NO: 63580 - protein, 9 aa, Homo Sapiens
APGPGRKEL

SEQ ID NO: 63581 - protein, 9 aa, Homo Sapiens
APGSARRPL

SEQ ID NO: 63582 - protein, 9 aa, Homo Sapiens
APHDYGLIL

SEQ ID NO: 63583 - protein, 9 aa, Homo Sapiens
APHEPVKTL

SEQ ID NO: 63584 - protein, 9 aa, Homo Sapiens
APHLVGPHL

SEQ ID NO: 63585 - protein, 9 aa, Homo Sapiens
APHRGRPSL

SEQ ID NO: 63586 - protein, 9 aa, Homo Sapiens
APHWKRHQL

SEQ ID NO: 63587 - protein, 9 aa, Homo Sapiens
APHWRMKQL

SEQ ID NO: 63588 - protein, 9 aa, Homo Sapiens
APIAKVGVL

SEQ ID NO: 63589 - protein, 9 aa, Homo Sapiens
APIERVKLL

SEQ ID NO: 63590 - protein, 9 aa, Homo Sapiens
APKAGPGVV

SEQ ID NO: 63591 - protein, 9 aa, Homo Sapiens
APKEAPKKL

SEQ ID NO: 63592 - protein, 9 aa, Homo Sapiens
APKGSLKDI

SEQ ID NO: 63593 - protein, 9 aa, Homo Sapiens
APKKLIRYI

SEQ ID NO: 63594 - protein, 9 aa, Homo Sapiens
APKPDKKIV

SEQ ID NO: 63595 - protein, 9 aa, Homo Sapiens
APKPKWTQL

SEQ ID NO: 63596 - protein, 9 aa, Homo Sapiens
APKPLHKVV

SEQ ID NO: 63597 - protein, 9 aa, Homo Sapiens
APKPPFQSH

SEQ ID NO: 63598 - protein, 9 aa, Homo Sapiens
APKPQGTKI

SEQ ID NO: 63599 - protein, 9 aa, Homo Sapiens
APKPRLNQL

SEQ ID NO: 63600 - protein, 9 aa, Homo Sapiens
APKPTLLWL

SEQ ID NO: 63601 - protein, 9 aa, Homo Sapiens
APKRPPSAF

SEQ ID NO: 63602 - protein, 9 aa, Homo Sapiens
APKRPPSGF

SEQ ID NO: 63603 - protein, 9 aa, Homo Sapiens
APKSMQSAI

SEQ ID NO: 63604 - protein, 9 aa, Homo Sapiens
APKSPSQDV

SEQ ID NO: 63605 - protein, 9 aa, Homo Sapiens
APKSSKTEL

SEQ ID NO: 63606 - protein, 9 aa, Homo Sapiens
APKSTKPSL

SEQ ID NO: 63607 - protein, 9 aa, Homo Sapiens
APKSVLGKV

SEQ ID NO: 63608 - protein, 9 aa, Homo Sapiens
APKYILEQF

SEQ ID NO: 63609 - protein, 9 aa, Homo Sapiens
APLPSIKEI

SEQ ID NO: 63610 - protein, 9 aa, Homo Sapiens
APLQHRHVL

SEQ ID NO: 63611 - protein, 9 aa, Homo Sapiens
APLQRSQSL

SEQ ID NO: 63612 - protein, 9 aa, Homo Sapiens
APLSGSKEM

SEQ ID NO: 63613 - protein, 9 aa, Homo Sapiens
APMIKKIAF

SEQ ID NO: 63614 - protein, 9 aa, Homo Sapiens
APMKAPKRM

SEQ ID NO: 63615 - protein, 9 aa, Homo Sapiens
APMNVRRGL

SEQ ID NO: 63616 - protein, 9 aa, Homo Sapiens
APMTKIKKL

SEQ ID NO: 63617 - protein, 9 aa, Homo Sapiens
APNAGKSTL

SEQ ID NO: 63618 - protein, 9 aa, Homo Sapiens
APNEKMKQV

SEQ ID NO: 63619 - protein, 9 aa, Homo Sapiens
APNSRPALL

SEQ ID NO: 63620 - protein, 9 aa, Homo Sapiens
APNYRLKSL

SEQ ID NO: 63621 - protein, 9 aa, Homo Sapiens
APQPAKPRL

SEQ ID NO: 63622 - protein, 9 aa, Homo Sapiens
APQRVRVTL

SEQ ID NO: 63623 - protein, 9 aa, Homo Sapiens
APQSFRAEL

SEQ ID NO: 63624 - protein, 9 aa, Homo Sapiens
APQSNKERL

SEQ ID NO: 63625 - protein, 9 aa, Homo Sapiens
APRAALTRL

SEQ ID NO: 63626 - protein, 9 aa, Homo Sapiens
APRAAREAL

SEQ ID NO: 63627 - protein, 9 aa, Homo Sapiens
APRDGRVVF

SEQ ID NO: 63628 - protein, 9 aa, Homo Sapiens
APRDSLRSL

SEQ ID NO: 63629 - protein, 9 aa, Homo Sapiens
APRDTAKAF

SEQ ID NO: 63630 - protein, 9 aa, Homo Sapiens
APRGDKEEL

SEQ ID NO: 63631 - protein, 9 aa, Homo Sapiens
APRGPGAEL

SEQ ID NO: 63632 - protein, 9 aa, Homo Sapiens
APRHGLQSL

SEQ ID NO: 63633 - protein, 9 aa, Homo Sapiens
APRIALHTA

SEQ ID NO: 63634 - protein, 9 aa, Homo Sapiens
APRIESKSM

SEQ ID NO: 63635 - protein, 9 aa, Homo Sapiens
APRKPDWDL

SEQ ID NO: 63636 - protein, 9 aa, Homo Sapiens
APRLETKSL

SEQ ID NO: 63637 - protein, 9 aa, Homo Sapiens
APRLPITGL

SEQ ID NO: 63638 - protein, 9 aa, Homo Sapiens
APRPAGSYL

SEQ ID NO: 63639 - protein, 9 aa, Homo Sapiens
APRPGPRAV

SEQ ID NO: 63640 - protein, 9 aa, Homo Sapiens
APRPPPARL

SEQ ID NO: 63641 - protein, 9 aa, Homo Sapiens
APRPPPKPM

SEQ ID NO: 63642 - protein, 9 aa, Homo Sapiens
APRPPVSAA

SEQ ID NO: 63643 - protein, 9 aa, Homo Sapiens
APRPRLLLL

SEQ ID NO: 63644 - protein, 9 aa, Homo Sapiens
APRPYSKQV

SEQ ID NO: 63645 - protein, 9 aa, Homo Sapiens
APRQPGLMA

SEQ ID NO: 63646 - protein, 9 aa, Homo Sapiens
APRQTHKVI

SEQ ID NO: 63647 - protein, 9 aa, Homo Sapiens
APRSPGQVT

SEQ ID NO: 63648 - protein, 9 aa, Homo Sapiens
APRTFSNSL

SEQ ID NO: 63649 - protein, 9 aa, Homo Sapiens
APRTPTHRL

SEQ ID NO: 63650 - protein, 9 aa, Homo Sapiens
APRTVALTA

SEQ ID NO: 63651 - protein, 9 aa, Homo Sapiens
APRVKEGPL

SEQ ID NO: 63652 - protein, 9 aa, Homo Sapiens
APRVPVQAL

SEQ ID NO: 63653 - protein, 9 aa, Homo Sapiens
APRYSAPVI

SEQ ID NO: 63654 - protein, 9 aa, Homo Sapiens
APSKHVHPL

SEQ ID NO: 63655 - protein, 9 aa, Homo Sapiens
APSNRVKGI

SEQ ID NO: 63656 - protein, 9 aa, Homo Sapiens
APSPRPLSL

SEQ ID NO: 63657 - protein, 9 aa, Homo Sapiens
APSRNGMVL

SEQ ID NO: 63658 - protein, 9 aa, Homo Sapiens
APSSPRPAL

SEQ ID NO: 63659 - protein, 9 aa, Homo Sapiens
APTGAKRTL

SEQ ID NO: 63660 - protein, 9 aa, Homo Sapiens
APTGHLHTV

SEQ ID NO: 63661 - protein, 9 aa, Homo Sapiens
APTGSGKTI

SEQ ID NO: 63662 - protein, 9 aa, Homo Sapiens
APTPARPVL

SEQ ID NO: 63663 - protein, 9 aa, Homo Sapiens
APTSAGKTL

SEQ ID NO: 63664 - protein, 9 aa, Homo Sapiens
APTTKIKKL

SEQ ID NO: 63665 - protein, 9 aa, Homo Sapiens
APTVRSKAL

SEQ ID NO: 63666 - protein, 9 aa, Homo Sapiens
APVCSSKTL

SEQ ID NO: 63667 - protein, 9 aa, Homo Sapiens
APVGIRHRL

SEQ ID NO: 63668 - protein, 9 aa, Homo Sapiens
APVGSGSAL

SEQ ID NO: 63669 - protein, 9 aa, Homo Sapiens
APVSSKSSL

SEQ ID NO: 63670 - protein, 9 aa, Homo Sapiens
APWDRVVDL

SEQ ID NO: 63671 - protein, 9 aa, Homo Sapiens
APWEKRVDL

SEQ ID NO: 63672 - protein, 9 aa, Homo Sapiens
APWKERVEL

SEQ ID NO: 63673 - protein, 9 aa, Homo Sapiens
APYFRLLRL

SEQ ID NO: 63674 - protein, 9 aa, Homo Sapiens
APYGGPIAL

SEQ ID NO: 63675 - protein, 9 aa, Homo Sapiens
APYGNPKNM

SEQ ID NO: 63676 - protein, 9 aa, Homo Sapiens
APYSRPKQL

SEQ ID NO: 63677 - protein, 9 aa, Homo Sapiens
AVKQRGISL

SEQ ID NO: 63678 - protein, 9 aa, Homo Sapiens
AVLPVVKVL

SEQ ID NO: 63679 - protein, 9 aa, Homo Sapiens
AVNQNTKLL

SEQ ID NO: 63680 - protein, 9 aa, Homo Sapiens
AVRAGRLQL

SEQ ID NO: 63681 - protein, 9 aa, Homo Sapiens
AVWDRMKVA

SEQ ID NO: 63682 - protein, 9 aa, Homo Sapiens
DAIKLNPRL

SEQ ID NO: 63683 - protein, 9 aa, Homo Sapiens
EPCGLRGAL

SEQ ID NO: 63684 - protein, 9 aa, Homo Sapiens
EPCNGRTAL

SEQ ID NO: 63685 - protein, 9 aa, Homo Sapiens
EPRPPHGEL

SEQ ID NO: 63686 - protein, 9 aa, Homo Sapiens
EPRYPPHSL

SEQ ID NO: 63687 - protein, 9 aa, Homo Sapiens
EVKRPGESL

SEQ ID NO: 63688 - protein, 9 aa, Homo Sapiens
FAKVPLKCL

SEQ ID NO: 63689 - protein, 9 aa, Homo Sapiens
FPAPDRKKL

SEQ ID NO: 63690 - protein, 9 aa, Homo Sapiens
FPELPKSAL

SEQ ID NO: 63691 - protein, 9 aa, Homo Sapiens
FPEPSRPPL

SEQ ID NO: 63692 - protein, 9 aa, Homo Sapiens
FPHKRLQQL

SEQ ID NO: 63693 - protein, 9 aa, Homo Sapiens
FPKAAIKRL

SEQ ID NO: 63694 - protein, 9 aa, Homo Sapiens
FPKGFSVEL

SEQ ID NO: 63695 - protein, 9 aa, Homo Sapiens
FPKGSRSVV

SEQ ID NO: 63696 - protein, 9 aa, Homo Sapiens
FPKWKPGSL

SEQ ID NO: 63697 - protein, 9 aa, Homo Sapiens
FPNIPGKSL

SEQ ID NO: 63698 - protein, 9 aa, Homo Sapiens
FPQVGRTAL

SEQ ID NO: 63699 - protein, 9 aa, Homo Sapiens
FPRAFPKKL

SEQ ID NO: 63700 - protein, 9 aa, Homo Sapiens
FPREPRPKL

SEQ ID NO: 63701 - protein, 9 aa, Homo Sapiens
FPRFPHRGL

SEQ ID NO: 63702 - protein, 9 aa, Homo Sapiens
FPRKPSAPK

SEQ ID NO: 63703 - protein, 9 aa, Homo Sapiens
FPSNFIKEL

SEQ ID NO: 63704 - protein, 9 aa, Homo Sapiens
FPWEVPKKL

SEQ ID NO: 63705 - protein, 9 aa, Homo Sapiens
FSNGHIKVL

SEQ ID NO: 63706 - protein, 9 aa, Homo Sapiens
GAKPAGSGL

SEQ ID NO: 63707 - protein, 9 aa, Homo Sapiens
GAKPAPRAL

SEQ ID NO: 63708 - protein, 9 aa, Homo Sapiens
GAMAVRRVL

SEQ ID NO: 63709 - protein, 9 aa, Homo Sapiens
GAQGGRPSL

SEQ ID NO: 63710 - protein, 9 aa, Homo Sapiens
GIKRHVKAL

SEQ ID NO: 63711 - protein, 9 aa, Homo Sapiens
GPAPSRPAL

SEQ ID NO: 63712 - protein, 9 aa, Homo Sapiens
GPHQRHIAL

SEQ ID NO: 63713 - protein, 9 aa, Homo Sapiens
GPITKPKKV

SEQ ID NO: 63714 - protein, 9 aa, Homo Sapiens
GPIYPGHGM

SEQ ID NO: 63715 - protein, 9 aa, Homo Sapiens
GPKAHIRKL

SEQ ID NO: 63716 - protein, 9 aa, Homo Sapiens
GPKGHVSSL

SEQ ID NO: 63717 - protein, 9 aa, Homo Sapiens
GPKGTMKML

SEQ ID NO: 63718 - protein, 9 aa, Homo Sapiens
GPKLASRIL

SEQ ID NO: 63719 - protein, 9 aa, Homo Sapiens
GPKPKAHQF

SEQ ID NO: 63720 - protein, 9 aa, Homo Sapiens
GPKPKPLVV

SEQ ID NO: 63721 - protein, 9 aa, Homo Sapiens
GPKPKTFLL

SEQ ID NO: 63722 - protein, 9 aa, Homo Sapiens
GPKPLFRRM

SEQ ID NO: 63723 - protein, 9 aa, Homo Sapiens
GPKQQFSTL

SEQ ID NO: 63724 - protein, 9 aa, Homo Sapiens
GPKSKLKLL

SEQ ID NO: 63725 - protein, 9 aa, Homo Sapiens
GPKSKVLIL

SEQ ID NO: 63726 - protein, 9 aa, Homo Sapiens
GPKSMMKML

SEQ ID NO: 63727 - protein, 9 aa, Homo Sapiens
GPLFRNSQL

SEQ ID NO: 63728 - protein, 9 aa, Homo Sapiens
GPMPKPHSV

SEQ ID NO: 63729 - protein, 9 aa, Homo Sapiens
GPNSNIRTV

SEQ ID NO: 63730 - protein, 9 aa, Homo Sapiens
GPQAVRAAL

SEQ ID NO: 63731 - protein, 9 aa, Homo Sapiens
GPQQTQKVF

SEQ ID NO: 63732 - protein, 9 aa, Homo Sapiens
GPRALRLLL

SEQ ID NO: 63733 - protein, 9 aa, Homo Sapiens
GPRAPGPSL

SEQ ID NO: 63734 - protein, 9 aa, Homo Sapiens
GPREAFRQL

SEQ ID NO: 63735 - protein, 9 aa, Homo Sapiens
GPRKGGRVI

SEQ ID NO: 63736 - protein, 9 aa, Homo Sapiens
GPRNAQRVL

SEQ ID NO: 63737 - protein, 9 aa, Homo Sapiens
GPRSSLRVL

SEQ ID NO: 63738 - protein, 9 aa, Homo Sapiens
GPSAVMPAL

SEQ ID NO: 63739 - protein, 9 aa, Homo Sapiens
GPSNVFKIV

SEQ ID NO: 63740 - protein, 9 aa, Homo Sapiens
GPTEGRPQL

SEQ ID NO: 63741 - protein, 9 aa, Homo Sapiens
GPYPQRKVI

SEQ ID NO: 63742 - protein, 9 aa, Homo Sapiens
GVKKPTKAL

SEQ ID NO: 63743 - protein, 9 aa, Homo Sapiens
GVRPPAPSL

SEQ ID NO: 63744 - protein, 9 aa, Homo Sapiens
HAWDHAKSV

SEQ ID NO: 63745 - protein, 9 aa, Homo Sapiens
HIKPGAKVL

SEQ ID NO: 63746 - protein, 9 aa, Homo Sapiens
HPAGPRTVF

SEQ ID NO: 63747 - protein, 9 aa, Homo Sapiens
HPFFKDMSL

SEQ ID NO: 63748 - protein, 9 aa, Homo Sapiens
HPGPVNSEL

SEQ ID NO: 63749 - protein, 9 aa, Homo Sapiens
HPINPRVAL

SEQ ID NO: 63750 - protein, 9 aa, Homo Sapiens
HPIRLGLAL

SEQ ID NO: 63751 - protein, 9 aa, Homo Sapiens
HPIVQPKQL

SEQ ID NO: 63752 - protein, 9 aa, Homo Sapiens
HPIYNIKSL

SEQ ID NO: 63753 - protein, 9 aa, Homo Sapiens
HPKDNLIKL

SEQ ID NO: 63754 - protein, 9 aa, Homo Sapiens
HPKFVGKTL

SEQ ID NO: 63755 - protein, 9 aa, Homo Sapiens
HPKKPGVGV

SEQ ID NO: 63756 - protein, 9 aa, Homo Sapiens
HPKPEGLAA

SEQ ID NO: 63757 - protein, 9 aa, Homo Sapiens
HPKRPLLAF

SEQ ID NO: 63758 - protein, 9 aa, Homo Sapiens
HPKRPMHIL

SEQ ID NO: 63759 - protein, 9 aa, Homo Sapiens
HPKSVIVGL

SEQ ID NO: 63760 - protein, 9 aa, Homo Sapiens
HPKTGRISV

SEQ ID NO: 63761 - protein, 9 aa, Homo Sapiens
HPKVGRVSI

SEQ ID NO: 63762 - protein, 9 aa, Homo Sapiens
HPKVSGHVI

SEQ ID NO: 63763 - protein, 9 aa, Homo Sapiens
HPMPRVNEI

SEQ ID NO: 63764 - protein, 9 aa, Homo Sapiens
HPNFTEKTI

SEQ ID NO: 63765 - protein, 9 aa, Homo Sapiens
HPNGNITEL

SEQ ID NO: 63766 - protein, 9 aa, Homo Sapiens
HPNLHGPEI

SEQ ID NO: 63767 - protein, 9 aa, Homo Sapiens
HPNSLMKKI

SEQ ID NO: 63768 - protein, 9 aa, Homo Sapiens
HPRAYFMQL

SEQ ID NO: 63769 - protein, 9 aa, Homo Sapiens
HPRDFFSRL

SEQ ID NO: 63770 - protein, 9 aa, Homo Sapiens
HPRDPNLLL

SEQ ID NO: 63771 - protein, 9 aa, Homo Sapiens
HPRMPLQRL

SEQ ID NO: 63772 - protein, 9 aa, Homo Sapiens
HPRSPTPTL

SEQ ID NO: 63773 - protein, 9 aa, Homo Sapiens
HPSFQVKEL

SEQ ID NO: 63774 - protein, 9 aa, Homo Sapiens
HPSNVLHFF

SEQ ID NO: 63775 - protein, 9 aa, Homo Sapiens
HPSSYTKVI

SEQ ID NO: 63776 - protein, 9 aa, Homo Sapiens
HPTAAVKML

SEQ ID NO: 63777 - protein, 9 aa, Homo Sapiens
HPTDERVAL

SEQ ID NO: 63778 - protein, 9 aa, Homo Sapiens
HPTFNLKSL

SEQ ID NO: 63779 - protein, 9 aa, Homo Sapiens
HPTSHVSLL

SEQ ID NO: 63780 - protein, 9 aa, Homo Sapiens
HPVNAFKLM

SEQ ID NO: 63781 - protein, 9 aa, Homo Sapiens
HPVSREWTL

SEQ ID NO: 63782 - protein, 9 aa, Homo Sapiens
HVSANLKTL

SEQ ID NO: 63783 - protein, 9 aa, Homo Sapiens
IAMRDRNAL

SEQ ID NO: 63784 - protein, 9 aa, Homo Sapiens
IARLPSSTL

SEQ ID NO: 63785 - protein, 9 aa, Homo Sapiens
IIQKHLKTM

SEQ ID NO: 63786 - protein, 9 aa, Homo Sapiens
IIQKPKISM

SEQ ID NO: 63787 - protein, 9 aa, Homo Sapiens
IIRNVKGPV

SEQ ID NO: 63788 - protein, 9 aa, Homo Sapiens
IPAEGRVAL

SEQ ID NO: 63789 - protein, 9 aa, Homo Sapiens
IPAKLHNSL

SEQ ID NO: 63790 - protein, 9 aa, Homo Sapiens
IPFEKKPAL

SEQ ID NO: 63791 - protein, 9 aa, Homo Sapiens
IPKEHHRFV

SEQ ID NO: 63792 - protein, 9 aa, Homo Sapiens
IPKGKTGVI

SEQ ID NO: 63793 - protein, 9 aa, Homo Sapiens
IPKKEKPEL

SEQ ID NO: 63794 - protein, 9 aa, Homo Sapiens
IPKKHISQI

SEQ ID NO: 63795 - protein, 9 aa, Homo Sapiens
IPKNNPPTL

SEQ ID NO: 63796 - protein, 9 aa, Homo Sapiens
IPKNSPPTL

SEQ ID NO: 63797 - protein, 9 aa, Homo Sapiens
IPKPLNPAL

SEQ ID NO: 63798 - protein, 9 aa, Homo Sapiens
IPKPVHTRF

SEQ ID NO: 63799 - protein, 9 aa, Homo Sapiens
IPKSAIRVI

SEQ ID NO: 63800 - protein, 9 aa, Homo Sapiens
IPKSAVGEL

SEQ ID NO: 63801 - protein, 9 aa, Homo Sapiens
IPKSKFLAL

SEQ ID NO: 63802 - protein, 9 aa, Homo Sapiens
IPKTSGSEM

SEQ ID NO: 63803 - protein, 9 aa, Homo Sapiens
IPLAKRVAL

SEQ ID NO: 63804 - protein, 9 aa, Homo Sapiens
IPLKEKPVL

SEQ ID NO: 63805 - protein, 9 aa, Homo Sapiens
IPLSGRNPL

SEQ ID NO: 63806 - protein, 9 aa, Homo Sapiens
IPLSKIKTL

SEQ ID NO: 63807 - protein, 9 aa, Homo Sapiens
IPMTGKPSL

SEQ ID NO: 63808 - protein, 9 aa, Homo Sapiens
IPNEIIHAL

SEQ ID NO: 63809 - protein, 9 aa, Homo Sapiens
IPNFPRSTV

SEQ ID NO: 63810 - protein, 9 aa, Homo Sapiens
IPNNVKTAV

SEQ ID NO: 63811 - protein, 9 aa, Homo Sapiens
IPNTQIKAL

SEQ ID NO: 63812 - protein, 9 aa, Homo Sapiens
IPQPSGKVL

SEQ ID NO: 63813 - protein, 9 aa, Homo Sapiens
IPRCPKKSF

SEQ ID NO: 63814 - protein, 9 aa, Homo Sapiens
IPRESIKLV

SEQ ID NO: 63815 - protein, 9 aa, Homo Sapiens
IPRNPPPRL

SEQ ID NO: 63816 - protein, 9 aa, Homo Sapiens
IPSSVNKSM

SEQ ID NO: 63817 - protein, 9 aa, Homo Sapiens
IVKGPRGTL

SEQ ID NO: 63818 - protein, 9 aa, Homo Sapiens
IVKPKPRAL

SEQ ID NO: 63819 - protein, 9 aa, Homo Sapiens
KAASVRPVL

SEQ ID NO: 63820 - protein, 9 aa, Homo Sapiens
KAKAPLREL

SEQ ID NO: 63821 - protein, 9 aa, Homo Sapiens
KAKLHIKKL

SEQ ID NO: 63822 - protein, 9 aa, Homo Sapiens
KAKPVTTNL

SEQ ID NO: 63823 - protein, 9 aa, Homo Sapiens
KATQNFKVM

SEQ ID NO: 63824 - protein, 9 aa, Homo Sapiens
KIRDVTKCL

SEQ ID NO: 63825 - protein, 9 aa, Homo Sapiens
KIREFLKKV

SEQ ID NO: 63826 - protein, 9 aa, Homo Sapiens
KLKPNTKIM

SEQ ID NO: 63827 - protein, 9 aa, Homo Sapiens
KLNPYAKTM

SEQ ID NO: 63828 - protein, 9 aa, Homo Sapiens
KPATKTAEL

SEQ ID NO: 63829 - protein, 9 aa, Homo Sapiens
KPEEQRKTL

SEQ ID NO: 63830 - protein, 9 aa, Homo Sapiens
KPFAGRPMI

SEQ ID NO: 63831 - protein, 9 aa, Homo Sapiens
KPGDFIHTL

SEQ ID NO: 63832 - protein, 9 aa, Homo Sapiens
KPGVATKLL

SEQ ID NO: 63833 - protein, 9 aa, Homo Sapiens
KPHETYRLL

SEQ ID NO: 63834 - protein, 9 aa, Homo Sapiens
KPIDGRKLL

SEQ ID NO: 63835 - protein, 9 aa, Homo Sapiens
KPIEPRREL

SEQ ID NO: 63836 - protein, 9 aa, Homo Sapiens
KPIPSKPQL

SEQ ID NO: 63837 - protein, 9 aa, Homo Sapiens
KPIQPKPTV

SEQ ID NO: 63838 - protein, 9 aa, Homo Sapiens
KPKAPPPSL

SEQ ID NO: 63839 - protein, 9 aa, Homo Sapiens
KPKDKVSLI

SEQ ID NO: 63840 - protein, 9 aa, Homo Sapiens
KPKEPITDV

SEQ ID NO: 63841 - protein, 9 aa, Homo Sapiens
KPKEPQPEV

SEQ ID NO: 63842 - protein, 9 aa, Homo Sapiens
KPKEVKPKI

SEQ ID NO: 63843 - protein, 9 aa, Homo Sapiens
KPKFILSVL

SEQ ID NO: 63844 - protein, 9 aa, Homo Sapiens
KPKGKVTIL

SEQ ID NO: 63845 - protein, 9 aa, Homo Sapiens
KPKIQHVGL

SEQ ID NO: 63846 - protein, 9 aa, Homo Sapiens
KPKITPVTV

SEQ ID NO: 63847 - protein, 9 aa, Homo Sapiens
KPKKPGKYI

SEQ ID NO: 63848 - protein, 9 aa, Homo Sapiens
KPKMNYEKL

SEQ ID NO: 63849 - protein, 9 aa, Homo Sapiens
KPKMVSKKL

SEQ ID NO: 63850 - protein, 9 aa, Homo Sapiens
KPKNAIHTF

SEQ ID NO: 63851 - protein, 9 aa, Homo Sapiens
KPKPGNMPF

SEQ ID NO: 63852 - protein, 9 aa, Homo Sapiens
KPKPIGKLA

SEQ ID NO: 63853 - protein, 9 aa, Homo Sapiens
KPKPKKPTL

SEQ ID NO: 63854 - protein, 9 aa, Homo Sapiens
KPKPNPNLL

SEQ ID NO: 63855 - protein, 9 aa, Homo Sapiens
KPKPTPDYL

SEQ ID NO: 63856 - protein, 9 aa, Homo Sapiens
KPKSLWKSV

SEQ ID NO: 63857 - protein, 9 aa, Homo Sapiens
KPKSYSSSL

SEQ ID NO: 63858 - protein, 9 aa, Homo Sapiens
KPKTGRSLL

SEQ ID NO: 63859 - protein, 9 aa, Homo Sapiens
KPKWNHLVH

SEQ ID NO: 63860 - protein, 9 aa, Homo Sapiens
KPLAGAKIV

SEQ ID NO: 63861 - protein, 9 aa, Homo Sapiens
KPLHIKPRL

SEQ ID NO: 63862 - protein, 9 aa, Homo Sapiens
KPLSIPKRL

SEQ ID NO: 63863 - protein, 9 aa, Homo Sapiens
KPLSNMKIL

SEQ ID NO: 63864 - protein, 9 aa, Homo Sapiens
KPMEKLLGL

SEQ ID NO: 63865 - protein, 9 aa, Homo Sapiens
KPMMKEFRF

SEQ ID NO: 63866 - protein, 9 aa, Homo Sapiens
KPNANRIAL

SEQ ID NO: 63867 - protein, 9 aa, Homo Sapiens
KPNGIYRKL

SEQ ID NO: 63868 - protein, 9 aa, Homo Sapiens
KPNIHKRVL

SEQ ID NO: 63869 - protein, 9 aa, Homo Sapiens
KPNYKKLEL

SEQ ID NO: 63870 - protein, 9 aa, Homo Sapiens
KPQDYKKRL

SEQ ID NO: 63871 - protein, 9 aa, Homo Sapiens
KPQKNKPLL

SEQ ID NO: 63872 - protein, 9 aa, Homo Sapiens
KPQPRPQTL

SEQ ID NO: 63873 - protein, 9 aa, Homo Sapiens
KPQSKELTL

SEQ ID NO: 63874 - protein, 9 aa, Homo Sapiens
KPQTKLLIL

SEQ ID NO: 63875 - protein, 9 aa, Homo Sapiens
KPRGFARGL

SEQ ID NO: 63876 - protein, 9 aa, Homo Sapiens
KPRKLVNTI

SEQ ID NO: 63877 - protein, 9 aa, Homo Sapiens
KPRKPITFV

SEQ ID NO: 63878 - protein, 9 aa, Homo Sapiens
KPRMRGLLA

SEQ ID NO: 63879 - protein, 9 aa, Homo Sapiens
KPRPIIPML

SEQ ID NO: 63880 - protein, 9 aa, Homo Sapiens
KPRPPLHLL

SEQ ID NO: 63881 - protein, 9 aa, Homo Sapiens
KPRPPPSQL

SEQ ID NO: 63882 - protein, 9 aa, Homo Sapiens
KPRQSSPQL

SEQ ID NO: 63883 - protein, 9 aa, Homo Sapiens
KPRSPPRAL

SEQ ID NO: 63884 - protein, 9 aa, Homo Sapiens
KPSATGKVI

SEQ ID NO: 63885 - protein, 9 aa, Homo Sapiens
KPSGVSAAL

SEQ ID NO: 63886 - protein, 9 aa, Homo Sapiens
KPSLPFTSL

SEQ ID NO: 63887 - protein, 9 aa, Homo Sapiens
KPSSWLRTL

SEQ ID NO: 63888 - protein, 9 aa, Homo Sapiens
KPTDKLRAL

SEQ ID NO: 63889 - protein, 9 aa, Homo Sapiens
KPTDWQKKI

SEQ ID NO: 63890 - protein, 9 aa, Homo Sapiens
KPTFGRSIL

SEQ ID NO: 63891 - protein, 9 aa, Homo Sapiens
KPTGTPKAL

SEQ ID NO: 63892 - protein, 9 aa, Homo Sapiens
KPTPPKSQV

SEQ ID NO: 63893 - protein, 9 aa, Homo Sapiens
KPVKPHSSF

SEQ ID NO: 63894 - protein, 9 aa, Homo Sapiens
KPVYPGQTL

SEQ ID NO: 63895 - protein, 9 aa, Homo Sapiens
KPWEKSPIL

SEQ ID NO: 63896 - protein, 9 aa, Homo Sapiens
KPWLRALQL

SEQ ID NO: 63897 - protein, 9 aa, Homo Sapiens
KPYAFDRVF

SEQ ID NO: 63898 - protein, 9 aa, Homo Sapiens
KPYEGRPSF

SEQ ID NO: 63899 - protein, 9 aa, Homo Sapiens
KPYSGGLCL

SEQ ID NO: 63900 - protein, 9 aa, Homo Sapiens
KSKNPGEAL

SEQ ID NO: 63901 - protein, 9 aa, Homo Sapiens
KVRKPGIAM

SEQ ID NO: 63902 - protein, 9 aa, Homo Sapiens
KVRVPRQSL

SEQ ID NO: 63903 - protein, 9 aa, Homo Sapiens
LAKGHIKAL

SEQ ID NO: 63904 - protein, 9 aa, Homo Sapiens
LAKKPHTSL

SEQ ID NO: 63905 - protein, 9 aa, Homo Sapiens
LAKTQGNVF

SEQ ID NO: 63906 - protein, 9 aa, Homo Sapiens
LANKDRPAL

SEQ ID NO: 63907 - protein, 9 aa, Homo Sapiens
LARPASAAL

SEQ ID NO: 63908 - protein, 9 aa, Homo Sapiens
LIRKPLRSL

SEQ ID NO: 63909 - protein, 9 aa, Homo Sapiens
LPAKFKKLL

SEQ ID NO: 63910 - protein, 9 aa, Homo Sapiens
LPAPPKIYF

SEQ ID NO: 63911 - protein, 9 aa, Homo Sapiens
LPCPGKATL

SEQ ID NO: 63912 - protein, 9 aa, Homo Sapiens
LPEAKKPRL

SEQ ID NO: 63913 - protein, 9 aa, Homo Sapiens
LPFKKGEIL

SEQ ID NO: 63914 - protein, 9 aa, Homo Sapiens
LPFLRITSL

SEQ ID NO: 63915 - protein, 9 aa, Homo Sapiens
LPHAPGVQM

SEQ ID NO: 63916 - protein, 9 aa, Homo Sapiens
LPHNRLVSL

SEQ ID NO: 63917 - protein, 9 aa, Homo Sapiens
LPHNTHRVV

SEQ ID NO: 63918 - protein, 9 aa, Homo Sapiens
LPINSRKCL

SEQ ID NO: 63919 - protein, 9 aa, Homo Sapiens
LPISHKRVL

SEQ ID NO: 63920 - protein, 9 aa, Homo Sapiens
LPKAKLKEI

SEQ ID NO: 63921 - protein, 9 aa, Homo Sapiens
LPKATILDL

SEQ ID NO: 63922 - protein, 9 aa, Homo Sapiens
LPKDAVKHL

SEQ ID NO: 63923 - protein, 9 aa, Homo Sapiens
LPKDKPRYL

SEQ ID NO: 63924 - protein, 9 aa, Homo Sapiens
LPKDRLKKF

SEQ ID NO: 63925 - protein, 9 aa, Homo Sapiens
LPKEKRHVL

SEQ ID NO: 63926 - protein, 9 aa, Homo Sapiens
LPKESVKIL

SEQ ID NO: 63927 - protein, 9 aa, Homo Sapiens
LPKGGNKHL

SEQ ID NO: 63928 - protein, 9 aa, Homo Sapiens
LPKHVIKQI

SEQ ID NO: 63929 - protein, 9 aa, Homo Sapiens
LPKKNGLYL

SEQ ID NO: 63930 - protein, 9 aa, Homo Sapiens
LPKKPCKNL

SEQ ID NO: 63931 - protein, 9 aa, Homo Sapiens
LPKLHIVQV

SEQ ID NO: 63932 - protein, 9 aa, Homo Sapiens
LPKNTHPFL

SEQ ID NO: 63933 - protein, 9 aa, Homo Sapiens
LPKPFFRLL

SEQ ID NO: 63934 - protein, 9 aa, Homo Sapiens
LPKPKAKTL

SEQ ID NO: 63935 - protein, 9 aa, Homo Sapiens
LPKPPFGML

SEQ ID NO: 63936 - protein, 9 aa, Homo Sapiens
LPKPPGRGV

SEQ ID NO: 63937 - protein, 9 aa, Homo Sapiens
LPKPSSHGL

SEQ ID NO: 63938 - protein, 9 aa, Homo Sapiens
LPKQPPLAL

SEQ ID NO: 63939 - protein, 9 aa, Homo Sapiens
LPKSPNPSF

SEQ ID NO: 63940 - protein, 9 aa, Homo Sapiens
LPKVPEKKL

SEQ ID NO: 63941 - protein, 9 aa, Homo Sapiens
LPLHKVKSL

SEQ ID NO: 63942 - protein, 9 aa, Homo Sapiens
LPNAKIKEL

SEQ ID NO: 63943 - protein, 9 aa, Homo Sapiens
LPNEQTKTL

SEQ ID NO: 63944 - protein, 9 aa, Homo Sapiens
LPNGRFKEF

SEQ ID NO: 63945 - protein, 9 aa, Homo Sapiens
LPNYKSKIL

SEQ ID NO: 63946 - protein, 9 aa, Homo Sapiens
LPQANRDTL

SEQ ID NO: 63947 - protein, 9 aa, Homo Sapiens
LPQGIVREL

SEQ ID NO: 63948 - protein, 9 aa, Homo Sapiens
LPQKKSKAL

SEQ ID NO: 63949 - protein, 9 aa, Homo Sapiens
LPQKMKGKL

SEQ ID NO: 63950 - protein, 9 aa, Homo Sapiens
LPQYKEREV

SEQ ID NO: 63951 - protein, 9 aa, Homo Sapiens
LPRFQPRVL

SEQ ID NO: 63952 - protein, 9 aa, Homo Sapiens
LPRKQGSIL

SEQ ID NO: 63953 - protein, 9 aa, Homo Sapiens
LPRPPPPEM

SEQ ID NO: 63954 - protein, 9 aa, Homo Sapiens
LPRPVPQNL

SEQ ID NO: 63955 - protein, 9 aa, Homo Sapiens
LPRRPLRAF

SEQ ID NO: 63956 - protein, 9 aa, Homo Sapiens
LPRSVKTVL

SEQ ID NO: 63957 - protein, 9 aa, Homo Sapiens
LPSEHQTIL

SEQ ID NO: 63958 - protein, 9 aa, Homo Sapiens
LPSENHKEM

SEQ ID NO: 63959 - protein, 9 aa, Homo Sapiens
LPSESMKVV

SEQ ID NO: 63960 - protein, 9 aa, Homo Sapiens
LPSGSKKVI

SEQ ID NO: 63961 - protein, 9 aa, Homo Sapiens
LPSKPSSTL

SEQ ID NO: 63962 - protein, 9 aa, Homo Sapiens
LPSPFLRAL

SEQ ID NO: 63963 - protein, 9 aa, Homo Sapiens
LPSSGRSSL

SEQ ID NO: 63964 - protein, 9 aa, Homo Sapiens
LPWPARPAL

SEQ ID NO: 63965 - protein, 9 aa, Homo Sapiens
LVKHGLRAL

SEQ ID NO: 63966 - protein, 9 aa, Homo Sapiens
LVMAPRTVL

SEQ ID NO: 63967 - protein, 9 aa, Homo Sapiens
LVRAKCKEV

SEQ ID NO: 63968 - protein, 9 aa, Homo Sapiens
LVRDVVSSL

SEQ ID NO: 63969 - protein, 9 aa, Homo Sapiens
LVRPVFGEL

SEQ ID NO: 63970 - protein, 9 aa, Homo Sapiens
LVRRHIKVI

SEQ ID NO: 63971 - protein, 9 aa, Homo Sapiens
MPHEKHYTL

SEQ ID NO: 63972 - protein, 9 aa, Homo Sapiens
MPKAEKNAV

SEQ ID NO: 63973 - protein, 9 aa, Homo Sapiens
MPKKDARTL

SEQ ID NO: 63974 - protein, 9 aa, Homo Sapiens
MPKKNRIAI

SEQ ID NO: 63975 - protein, 9 aa, Homo Sapiens
MPKKSIKKL

SEQ ID NO: 63976 - protein, 9 aa, Homo Sapiens
MPKKSSVVL

SEQ ID NO: 63977 - protein, 9 aa, Homo Sapiens
MPKMDQDSL

SEQ ID NO: 63978 - protein, 9 aa, Homo Sapiens
MPKPPNLIM

SEQ ID NO: 63979 - protein, 9 aa, Homo Sapiens
MPKVKTIEL

SEQ ID NO: 63980 - protein, 9 aa, Homo Sapiens
MPLPGTKAL

SEQ ID NO: 63981 - protein, 9 aa, Homo Sapiens
MPQKERESI

SEQ ID NO: 63982 - protein, 9 aa, Homo Sapiens
MPRHFATKL

SEQ ID NO: 63983 - protein, 9 aa, Homo Sapiens
MPSQFRDIL

SEQ ID NO: 63984 - protein, 9 aa, Homo Sapiens
MPSSAVRVL

SEQ ID NO: 63985 - protein, 9 aa, Homo Sapiens
MPTPVIKAF

SEQ ID NO: 63986 - protein, 9 aa, Homo Sapiens
MTQQPRPVL

SEQ ID NO: 63987 - protein, 9 aa, Homo Sapiens
MVLENVKEM

SEQ ID NO: 63988 - protein, 9 aa, Homo Sapiens
NALHNIKTL

SEQ ID NO: 63989 - protein, 9 aa, Homo Sapiens
NLNPNAKEF

SEQ ID NO: 63990 - protein, 9 aa, Homo Sapiens
NPAENFRVL

SEQ ID NO: 63991 - protein, 9 aa, Homo Sapiens
NPEVRRAVL

SEQ ID NO: 63992 - protein, 9 aa, Homo Sapiens
NPHGARLSL

SEQ ID NO: 63993 - protein, 9 aa, Homo Sapiens
NPKEAGQRL

SEQ ID NO: 63994 - protein, 9 aa, Homo Sapiens
NPKKPITEI

SEQ ID NO: 63995 - protein, 9 aa, Homo Sapiens
NPKNPGLWL

SEQ ID NO: 63996 - protein, 9 aa, Homo Sapiens
NPKNVNRVL

SEQ ID NO: 63997 - protein, 9 aa, Homo Sapiens
NPKPKFFVL

SEQ ID NO: 63998 - protein, 9 aa, Homo Sapiens
NPKRQTLVF

SEQ ID NO: 63999 - protein, 9 aa, Homo Sapiens
NPNLRKNVL

SEQ ID NO: 64000 - protein, 9 aa, Homo Sapiens
NPRFGGKEL

SEQ ID NO: 64001 - protein, 9 aa, Homo Sapiens
NPRIPYTEL

SEQ ID NO: 64002 - protein, 9 aa, Homo Sapiens
NPRKHITSL

SEQ ID NO: 64003 - protein, 9 aa, Homo Sapiens
NPRKYLRSV

SEQ ID NO: 64004 - protein, 9 aa, Homo Sapiens
NVRPPNTAL

SEQ ID NO: 64005 - protein, 9 aa, Homo Sapiens
PAVAKLRRL

SEQ ID NO: 64006 - protein, 9 aa, Homo Sapiens
PREKKISIL

SEQ ID NO: 64007 - protein, 9 aa, Homo Sapiens
PSRTLFPSL

SEQ ID NO: 64008 - protein, 9 aa, Homo Sapiens
PSSAPAVST

SEQ ID NO: 64009 - protein, 9 aa, Homo Sapiens
PSSKLIRIL

SEQ ID NO: 64010 - protein, 9 aa, Homo Sapiens
QEQNQEQPI

SEQ ID NO: 64011 - protein, 9 aa, Homo Sapiens
QILRPPKVL

SEQ ID NO: 64012 - protein, 9 aa, Homo Sapiens
QIRPDRQTL

SEQ ID NO: 64013 - protein, 9 aa, Homo Sapiens
QPACKRLTL

SEQ ID NO: 64014 - protein, 9 aa, Homo Sapiens
QPAGHRPAL

SEQ ID NO: 64015 - protein, 9 aa, Homo Sapiens
QPGRPLRVV

SEQ ID NO: 64016 - protein, 9 aa, Homo Sapiens
QPHTILRVV

SEQ ID NO: 64017 - protein, 9 aa, Homo Sapiens
QPKEKISKV

SEQ ID NO: 64018 - protein, 9 aa, Homo Sapiens
QPKLPITVL

SEQ ID NO: 64019 - protein, 9 aa, Homo Sapiens
QPKQRGFRF

SEQ ID NO: 64020 - protein, 9 aa, Homo Sapiens
QPLKAKTSL

SEQ ID NO: 64021 - protein, 9 aa, Homo Sapiens
QPNMRLRQL

SEQ ID NO: 64022 - protein, 9 aa, Homo Sapiens
QPQFQRQGL

SEQ ID NO: 64023 - protein, 9 aa, Homo Sapiens
QPSFSAKKM

SEQ ID NO: 64024 - protein, 9 aa, Homo Sapiens
QPTGGKARL

SEQ ID NO: 64025 - protein, 9 aa, Homo Sapiens
QPYNSRPAV

SEQ ID NO: 64026 - protein, 9 aa, Homo Sapiens
QQMENRPSV

SEQ ID NO: 64027 - protein, 9 aa, Homo Sapiens
QSVKRPKLL

SEQ ID NO: 64028 - protein, 9 aa, Homo Sapiens
QTLNNIKQF

SEQ ID NO: 64029 - protein, 9 aa, Homo Sapiens
QVKSGRPSL

SEQ ID NO: 64030 - protein, 9 aa, Homo Sapiens
QVQGPRPVL

SEQ ID NO: 64031 - protein, 9 aa, Homo Sapiens
QVRLPLGTL

SEQ ID NO: 64032 - protein, 9 aa, Homo Sapiens
RAKAIIVEF

SEQ ID NO: 64033 - protein, 9 aa, Homo Sapiens
RAKFWVKEL

SEQ ID NO: 64034 - protein, 9 aa, Homo Sapiens
RAKNWVKEL

SEQ ID NO: 64035 - protein, 9 aa, Homo Sapiens
RAKTWVKEL

SEQ ID NO: 64036 - protein, 9 aa, Homo Sapiens
RAKVHIKKL

SEQ ID NO: 64037 - protein, 9 aa, Homo Sapiens
RAMDKKKVL

SEQ ID NO: 64038 - protein, 9 aa, Homo Sapiens
RAWKKNEKL

SEQ ID NO: 64039 - protein, 9 aa, Homo Sapiens
RIKLGIKSL

SEQ ID NO: 64040 - protein, 9 aa, Homo Sapiens
RIKQKMKEL

SEQ ID NO: 64041 - protein, 9 aa, Homo Sapiens
RINHYIKTL

SEQ ID NO: 64042 - protein, 9 aa, Homo Sapiens
RLKDHVKQL

SEQ ID NO: 64043 - protein, 9 aa, Homo Sapiens
RLKQKIKVL

SEQ ID NO: 64044 - protein, 9 aa, Homo Sapiens
RLKSLMKIL

SEQ ID NO: 64045 - protein, 9 aa, Homo Sapiens
RLKSSVKAV

SEQ ID NO: 64046 - protein, 9 aa, Homo Sapiens
RLSPNHKVL

SEQ ID NO: 64047 - protein, 9 aa, Homo Sapiens
RPAFPVKKL

SEQ ID NO: 64048 - protein, 9 aa, Homo Sapiens
RPALPRSEL

SEQ ID NO: 64049 - protein, 9 aa, Homo Sapiens
RPAPARPTM

SEQ ID NO: 64050 - protein, 9 aa, Homo Sapiens
RPAPLSAEL

SEQ ID NO: 64051 - protein, 9 aa, Homo Sapiens
RPAPPPEAL

SEQ ID NO: 64052 - protein, 9 aa, Homo Sapiens
RPAPPREEI

SEQ ID NO: 64053 - protein, 9 aa, Homo Sapiens
RPAQVSQPF

SEQ ID NO: 64054 - protein, 9 aa, Homo Sapiens
RPAVGHSGL

SEQ ID NO: 64055 - protein, 9 aa, Homo Sapiens
RPAYRKVFL

SEQ ID NO: 64056 - protein, 9 aa, Homo Sapiens
RPCDISRQL

SEQ ID NO: 64057 - protein, 9 aa, Homo Sapiens
RPDAEKKEM

SEQ ID NO: 64058 - protein, 9 aa, Homo Sapiens
RPDLREKVI

SEQ ID NO: 64059 - protein, 9 aa, Homo Sapiens
RPEEGRPVV

SEQ ID NO: 64060 - protein, 9 aa, Homo Sapiens
RPFDKLEQL

SEQ ID NO: 64061 - protein, 9 aa, Homo Sapiens
RPFERTITM

SEQ ID NO: 64062 - protein, 9 aa, Homo Sapiens
RPFSPREAL

SEQ ID NO: 64063 - protein, 9 aa, Homo Sapiens
RPGELLKTV

SEQ ID NO: 64064 - protein, 9 aa, Homo Sapiens
RPHAPGRPA

SEQ ID NO: 64065 - protein, 9 aa, Homo Sapiens
RPHKPGLYL

SEQ ID NO: 64066 - protein, 9 aa, Homo Sapiens
RPHLSGRKL

SEQ ID NO: 64067 - protein, 9 aa, Homo Sapiens
RPHMFPKML

SEQ ID NO: 64068 - protein, 9 aa, Homo Sapiens
RPHPKPKQF

SEQ ID NO: 64069 - protein, 9 aa, Homo Sapiens
RPHVAQPTL

SEQ ID NO: 64070 - protein, 9 aa, Homo Sapiens
RPHYSLRTL

SEQ ID NO: 64071 - protein, 9 aa, Homo Sapiens
RPIASGPVV

SEQ ID NO: 64072 - protein, 9 aa, Homo Sapiens
RPIMFRGEV

SEQ ID NO: 64073 - protein, 9 aa, Homo Sapiens
RPISGQKEV

SEQ ID NO: 64074 - protein, 9 aa, Homo Sapiens
RPKALTQVL

SEQ ID NO: 64075 - protein, 9 aa, Homo Sapiens
RPKDPNNLL

SEQ ID NO: 64076 - protein, 9 aa, Homo Sapiens
RPKDYANTL

SEQ ID NO: 64077 - protein, 9 aa, Homo Sapiens
RPKEKSLVL

SEQ ID NO: 64078 - protein, 9 aa, Homo Sapiens
RPKFSVCVL

SEQ ID NO: 64079 - protein, 9 aa, Homo Sapiens
RPKGFYVET

SEQ ID NO: 64080 - protein, 9 aa, Homo Sapiens
RPKIKVSLI

SEQ ID NO: 64081 - protein, 9 aa, Homo Sapiens
RPKKPGQSF

SEQ ID NO: 64082 - protein, 9 aa, Homo Sapiens
RPKKVGVRY

SEQ ID NO: 64083 - protein, 9 aa, Homo Sapiens
RPKLIGEEL

SEQ ID NO: 64084 - protein, 9 aa, Homo Sapiens
RPKLNRENF

SEQ ID NO: 64085 - protein, 9 aa, Homo Sapiens
RPKNLMQTL

SEQ ID NO: 64086 - protein, 9 aa, Homo Sapiens
RPKNVVLRL

SEQ ID NO: 64087 - protein, 9 aa, Homo Sapiens
RPKPIITSV

SEQ ID NO: 64088 - protein, 9 aa, Homo Sapiens
RPKPPNVRT

SEQ ID NO: 64089 - protein, 9 aa, Homo Sapiens
RPKRPANQF

SEQ ID NO: 64090 - protein, 9 aa, Homo Sapiens
RPKSAFKVQ

SEQ ID NO: 64091 - protein, 9 aa, Homo Sapiens
RPKTFGMDM

SEQ ID NO: 64092 - protein, 9 aa, Homo Sapiens
RPKTGVRGL

SEQ ID NO: 64093 - protein, 9 aa, Homo Sapiens
RPKTPFKAW

SEQ ID NO: 64094 - protein, 9 aa, Homo Sapiens
RPKYPGIKF

SEQ ID NO: 64095 - protein, 9 aa, Homo Sapiens
RPKYQFLSL

SEQ ID NO: 64096 - protein, 9 aa, Homo Sapiens
RPLKGRINL

SEQ ID NO: 64097 - protein, 9 aa, Homo Sapiens
RPLSKTVRF

SEQ ID NO: 64098 - protein, 9 aa, Homo Sapiens
RPLVKPKIV

SEQ ID NO: 64099 - protein, 9 aa, Homo Sapiens
RPLVVKTSL

SEQ ID NO: 64100 - protein, 9 aa, Homo Sapiens
RPLYKNIVL

SEQ ID NO: 64101 - protein, 9 aa, Homo Sapiens
RPMGAGEAL

SEQ ID NO: 64102 - protein, 9 aa, Homo Sapiens
RPMKVGHVT

SEQ ID NO: 64103 - protein, 9 aa, Homo Sapiens
RPMYSKPSI

SEQ ID NO: 64104 - protein, 9 aa, Homo Sapiens
RPNFNIKGI

SEQ ID NO: 64105 - protein, 9 aa, Homo Sapiens
RPNGGPRAL

SEQ ID NO: 64106 - protein, 9 aa, Homo Sapiens
RPNIAQKRM

SEQ ID NO: 64107 - protein, 9 aa, Homo Sapiens
RPPQRQVVL

SEQ ID NO: 64108 - protein, 9 aa, Homo Sapiens
RPQLKGVVL

SEQ ID NO: 64109 - protein, 9 aa, Homo Sapiens
RPQLLKNAL

SEQ ID NO: 64110 - protein, 9 aa, Homo Sapiens
RPQLQRQVL

SEQ ID NO: 64111 - protein, 9 aa, Homo Sapiens
RPQVAKTLL

SEQ ID NO: 64112 - protein, 9 aa, Homo Sapiens
RPRATVMVM

SEQ ID NO: 64113 - protein, 9 aa, Homo Sapiens
RPRDPTPSF

SEQ ID NO: 64114 - protein, 9 aa, Homo Sapiens
RPRDYTVNL

SEQ ID NO: 64115 - protein, 9 aa, Homo Sapiens
RPREEVRAL

SEQ ID NO: 64116 - protein, 9 aa, Homo Sapiens
RPREVTVSL

SEQ ID NO: 64117 - protein, 9 aa, Homo Sapiens
RPRHQGVMV

SEQ ID NO: 64118 - protein, 9 aa, Homo Sapiens
RPRITRICL

SEQ ID NO: 64119 - protein, 9 aa, Homo Sapiens
RPRPERNIL

SEQ ID NO: 64120 - protein, 9 aa, Homo Sapiens
RPRPGNILL

SEQ ID NO: 64121 - protein, 9 aa, Homo Sapiens
RPRPPITLL

SEQ ID NO: 64122 - protein, 9 aa, Homo Sapiens
RPRPPQKAL

SEQ ID NO: 64123 - protein, 9 aa, Homo Sapiens
RPRPTEATV

SEQ ID NO: 64124 - protein, 9 aa, Homo Sapiens
RPRPVLRSV

SEQ ID NO: 64125 - protein, 9 aa, Homo Sapiens
RPSEWDKRL

SEQ ID NO: 64126 - protein, 9 aa, Homo Sapiens
RPSGPGPEL

SEQ ID NO: 64127 - protein, 9 aa, Homo Sapiens
RPSGPSKAL

SEQ ID NO: 64128 - protein, 9 aa, Homo Sapiens
RPTFFARKF

SEQ ID NO: 64129 - protein, 9 aa, Homo Sapiens
RPTLPVKSL

SEQ ID NO: 64130 - protein, 9 aa, Homo Sapiens
RPVLPRTEA

SEQ ID NO: 64131 - protein, 9 aa, Homo Sapiens
RPVPPPPSL

SEQ ID NO: 64132 - protein, 9 aa, Homo Sapiens
RPWHKTVTI

SEQ ID NO: 64133 - protein, 9 aa, Homo Sapiens
RPWLRPAAL

SEQ ID NO: 64134 - protein, 9 aa, Homo Sapiens
RPWSNSRGL

SEQ ID NO: 64135 - protein, 9 aa, Homo Sapiens
RPYEKGRLI

SEQ ID NO: 64136 - protein, 9 aa, Homo Sapiens
RPYYPRKAL

SEQ ID NO: 64137 - protein, 9 aa, Homo Sapiens
RRPPPPPPP

SEQ ID NO: 64138 - protein, 9 aa, Homo Sapiens
RTAKGKPVL

SEQ ID NO: 64139 - protein, 9 aa, Homo Sapiens
RTKASVHTL

SEQ ID NO: 64140 - protein, 9 aa, Homo Sapiens
RTWKNLKQI

SEQ ID NO: 64141 - protein, 9 aa, Homo Sapiens
RVAGIHKKV

SEQ ID NO: 64142 - protein, 9 aa, Homo Sapiens
RVFGNKKQL

SEQ ID NO: 64143 - protein, 9 aa, Homo Sapiens
RVIEHYKKL

SEQ ID NO: 64144 - protein, 9 aa, Homo Sapiens
RVKAPNKSL

SEQ ID NO: 64145 - protein, 9 aa, Homo Sapiens
RVKDPTKAL

SEQ ID NO: 64146 - protein, 9 aa, Homo Sapiens
RVKEIGSTM

SEQ ID NO: 64147 - protein, 9 aa, Homo Sapiens
RVKEPVKEL

SEQ ID NO: 64148 - protein, 9 aa, Homo Sapiens
RVKLDGSRL

SEQ ID NO: 64149 - protein, 9 aa, Homo Sapiens
RVKLPSKAL

SEQ ID NO: 64150 - protein, 9 aa, Homo Sapiens
RVKLTAKKL

SEQ ID NO: 64151 - protein, 9 aa, Homo Sapiens
RVKNAVKYL

SEQ ID NO: 64152 - protein, 9 aa, Homo Sapiens
RVKYNLNSL

SEQ ID NO: 64153 - protein, 9 aa, Homo Sapiens
RVMGDRSVL

SEQ ID NO: 64154 - protein, 9 aa, Homo Sapiens
RVMNVHKML

SEQ ID NO: 64155 - protein, 9 aa, Homo Sapiens
RVQKIRPSI

SEQ ID NO: 64156 - protein, 9 aa, Homo Sapiens
RVQKSKAVL

SEQ ID NO: 64157 - protein, 9 aa, Homo Sapiens
RVRDIQKQV

SEQ ID NO: 64158 - protein, 9 aa, Homo Sapiens
RVRELERQL

SEQ ID NO: 64159 - protein, 9 aa, Homo Sapiens
RVRPTCKRM

SEQ ID NO: 64160 - protein, 9 aa, Homo Sapiens
RVSLVRKEL

SEQ ID NO: 64161 - protein, 9 aa, Homo Sapiens
RVSSHLKHL

SEQ ID NO: 64162 - protein, 9 aa, Homo Sapiens
RVYSHLKSV

SEQ ID NO: 64163 - protein, 9 aa, Homo Sapiens
SALQNIKRL

SEQ ID NO: 64164 - protein, 9 aa, Homo Sapiens
SPAAEKAQL

SEQ ID NO: 64165 - protein, 9 aa, Homo Sapiens
SPAAGIKTV

SEQ ID NO: 64166 - protein, 9 aa, Homo Sapiens
SPADIVKNL

SEQ ID NO: 64167 - protein, 9 aa, Homo Sapiens
SPADRQLVA

SEQ ID NO: 64168 - protein, 9 aa, Homo Sapiens
SPAFRILSV

SEQ ID NO: 64169 - protein, 9 aa, Homo Sapiens
SPAFSTRVL

SEQ ID NO: 64170 - protein, 9 aa, Homo Sapiens
SPAGKTNAL

SEQ ID NO: 64171 - protein, 9 aa, Homo Sapiens
SPAKPHTTL

SEQ ID NO: 64172 - protein, 9 aa, Homo Sapiens
SPALPGLKL

SEQ ID NO: 64173 - protein, 9 aa, Homo Sapiens
SPANKPKIL

SEQ ID NO: 64174 - protein, 9 aa, Homo Sapiens
SPAPSKTLM

SEQ ID NO: 64175 - protein, 9 aa, Homo Sapiens
SPAPTHNSL

SEQ ID NO: 64176 - protein, 9 aa, Homo Sapiens
SPAQVKTSV

SEQ ID NO: 64177 - protein, 9 aa, Homo Sapiens
SPASPKISL

SEQ ID NO: 64178 - protein, 9 aa, Homo Sapiens
SPASRSISL

SEQ ID NO: 64179 - protein, 9 aa, Homo Sapiens
SPAYRDLAA

SEQ ID NO: 64180 - protein, 9 aa, Homo Sapiens
SPCPSKSGL

SEQ ID NO: 64181 - protein, 9 aa, Homo Sapiens
SPCQDVKQL

SEQ ID NO: 64182 - protein, 9 aa, Homo Sapiens
SPDTKKIAL

SEQ ID NO: 64183 - protein, 9 aa, Homo Sapiens
SPEAQPKTL

SEQ ID NO: 64184 - protein, 9 aa, Homo Sapiens
SPEETRAAL

SEQ ID NO: 64185 - protein, 9 aa, Homo Sapiens
SPEQSRNVL

SEQ ID NO: 64186 - protein, 9 aa, Homo Sapiens
SPFEQAKKV

SEQ ID NO: 64187 - protein, 9 aa, Homo Sapiens
SPFHRNLFL

SEQ ID NO: 64188 - protein, 9 aa, Homo Sapiens
SPFNDRFPL

SEQ ID NO: 64189 - protein, 9 aa, Homo Sapiens
SPFSFHHVL

SEQ ID NO: 64190 - protein, 9 aa, Homo Sapiens
SPGNIGKLL

SEQ ID NO: 64191 - protein, 9 aa, Homo Sapiens
SPGPEKMAL

SEQ ID NO: 64192 - protein, 9 aa, Homo Sapiens
SPGPSRPGL

SEQ ID NO: 64193 - protein, 9 aa, Homo Sapiens
SPGQRSISL

SEQ ID NO: 64194 - protein, 9 aa, Homo Sapiens
SPGSPRPAL

SEQ ID NO: 64195 - protein, 9 aa, Homo Sapiens
SPGSRKMVV

SEQ ID NO: 64196 - protein, 9 aa, Homo Sapiens
SPGSSPKVL

SEQ ID NO: 64197 - protein, 9 aa, Homo Sapiens
SPGWVRLAL

SEQ ID NO: 64198 - protein, 9 aa, Homo Sapiens
SPHFKSGSL

SEQ ID NO: 64199 - protein, 9 aa, Homo Sapiens
SPHGHILVL

SEQ ID NO: 64200 - protein, 9 aa, Homo Sapiens
SPHIPYKLL

SEQ ID NO: 64201 - protein, 9 aa, Homo Sapiens
SPHRPLAGL

SEQ ID NO: 64202 - protein, 9 aa, Homo Sapiens
SPHRQYKGM

SEQ ID NO: 64203 - protein, 9 aa, Homo Sapiens
SPIEKSGVL

SEQ ID NO: 64204 - protein, 9 aa, Homo Sapiens
SPIERNEQL

SEQ ID NO: 64205 - protein, 9 aa, Homo Sapiens
SPIERQKSL

SEQ ID NO: 64206 - protein, 9 aa, Homo Sapiens
SPIGRSCTL

SEQ ID NO: 64207 - protein, 9 aa, Homo Sapiens
SPITGRSKL

SEQ ID NO: 64208 - protein, 9 aa, Homo Sapiens
SPIVKSAKF

SEQ ID NO: 64209 - protein, 9 aa, Homo Sapiens
SPKAALRYA

SEQ ID NO: 64210 - protein, 9 aa, Homo Sapiens
SPKADVKNL

SEQ ID NO: 64211 - protein, 9 aa, Homo Sapiens
SPKDVILKV

SEQ ID NO: 64212 - protein, 9 aa, Homo Sapiens
SPKESRSKF

SEQ ID NO: 64213 - protein, 9 aa, Homo Sapiens
SPKFSELVM

SEQ ID NO: 64214 - protein, 9 aa, Homo Sapiens
SPKGCGTVL

SEQ ID NO: 64215 - protein, 9 aa, Homo Sapiens
SPKGHLTRL

SEQ ID NO: 64216 - protein, 9 aa, Homo Sapiens
SPKGKFSLF

SEQ ID NO: 64217 - protein, 9 aa, Homo Sapiens
SPKIASHQF

SEQ ID NO: 64218 - protein, 9 aa, Homo Sapiens
SPKIHARVF

SEQ ID NO: 64219 - protein, 9 aa, Homo Sapiens
SPKIRSHAV

SEQ ID NO: 64220 - protein, 9 aa, Homo Sapiens
SPKITTSLL

SEQ ID NO: 64221 - protein, 9 aa, Homo Sapiens
SPKKPGREI

SEQ ID NO: 64222 - protein, 9 aa, Homo Sapiens
SPKKPVIVF

SEQ ID NO: 64223 - protein, 9 aa, Homo Sapiens
SPKLHAEAI

SEQ ID NO: 64224 - protein, 9 aa, Homo Sapiens
SPKLPVSSL

SEQ ID NO: 64225 - protein, 9 aa, Homo Sapiens
SPKLSNKEL

SEQ ID NO: 64226 - protein, 9 aa, Homo Sapiens
SPKMPLKTL

SEQ ID NO: 64227 - protein, 9 aa, Homo Sapiens
SPKPAIKSI

SEQ ID NO: 64228 - protein, 9 aa, Homo Sapiens
SPKPDPKTI

SEQ ID NO: 64229 - protein, 9 aa, Homo Sapiens
SPKPNGPVL

SEQ ID NO: 64230 - protein, 9 aa, Homo Sapiens
SPKPPSQQL

SEQ ID NO: 64231 - protein, 9 aa, Homo Sapiens
SPKPPTSMF

SEQ ID NO: 64232 - protein, 9 aa, Homo Sapiens
SPKPWIPVL

SEQ ID NO: 64233 - protein, 9 aa, Homo Sapiens
SPKQILDPA

SEQ ID NO: 64234 - protein, 9 aa, Homo Sapiens
SPKRPRLQL

SEQ ID NO: 64235 - protein, 9 aa, Homo Sapiens
SPKRWQKIF

SEQ ID NO: 64236 - protein, 9 aa, Homo Sapiens
SPKSPGLKA

SEQ ID NO: 64237 - protein, 9 aa, Homo Sapiens
SPKSPTAAL

SEQ ID NO: 64238 - protein, 9 aa, Homo Sapiens
SPKSYLEIL

SEQ ID NO: 64239 - protein, 9 aa, Homo Sapiens
SPKVEPRAL

SEQ ID NO: 64240 - protein, 9 aa, Homo Sapiens
SPKVNKDTL

SEQ ID NO: 64241 - protein, 9 aa, Homo Sapiens
SPKVPRTLL

SEQ ID NO: 64242 - protein, 9 aa, Homo Sapiens
SPKYIQKQI

SEQ ID NO: 64243 - protein, 9 aa, Homo Sapiens
SPLAKKKLL

SEQ ID NO: 64244 - protein, 9 aa, Homo Sapiens
SPLDNSKAV

SEQ ID NO: 64245 - protein, 9 aa, Homo Sapiens
SPLFNTKQY

SEQ ID NO: 64246 - protein, 9 aa, Homo Sapiens
SPLGHRMQL

SEQ ID NO: 64247 - protein, 9 aa, Homo Sapiens
SPLKKEQPL

SEQ ID NO: 64248 - protein, 9 aa, Homo Sapiens
SPLLKQYIL

SEQ ID NO: 64249 - protein, 9 aa, Homo Sapiens
SPLSHHSQL

SEQ ID NO: 64250 - protein, 9 aa, Homo Sapiens
SPLTKSISL

SEQ ID NO: 64251 - protein, 9 aa, Homo Sapiens
SPLYLAHEV

SEQ ID NO: 64252 - protein, 9 aa, Homo Sapiens
SPMADRSMM

SEQ ID NO: 64253 - protein, 9 aa, Homo Sapiens
SPMAERSMM

SEQ ID NO: 64254 - protein, 9 aa, Homo Sapiens
SPMRDAPCL

SEQ ID NO: 64255 - protein, 9 aa, Homo Sapiens
SPMSQRPVL

SEQ ID NO: 64256 - protein, 9 aa, Homo Sapiens
SPNAEIHIL

SEQ ID NO: 64257 - protein, 9 aa, Homo Sapiens
SPNAIFKAL

SEQ ID NO: 64258 - protein, 9 aa, Homo Sapiens
SPNENFKTV

SEQ ID NO: 64259 - protein, 9 aa, Homo Sapiens
SPNGHRPQL

SEQ ID NO: 64260 - protein, 9 aa, Homo Sapiens
SPNKKPFSL

SEQ ID NO: 64261 - protein, 9 aa, Homo Sapiens
SPNLRLLDL

SEQ ID NO: 64262 - protein, 9 aa, Homo Sapiens
SPNMHRRVI

SEQ ID NO: 64263 - protein, 9 aa, Homo Sapiens
SPNQKLLAV

SEQ ID NO: 64264 - protein, 9 aa, Homo Sapiens
SPNSILKAA

SEQ ID NO: 64265 - protein, 9 aa, Homo Sapiens
SPNSKVNTL

SEQ ID NO: 64266 - protein, 9 aa, Homo Sapiens
SPNSSPRTL

SEQ ID NO: 64267 - protein, 9 aa, Homo Sapiens
SPNSVKPEM

SEQ ID NO: 64268 - protein, 9 aa, Homo Sapiens
SPNTDREVL

SEQ ID NO: 64269 - protein, 9 aa, Homo Sapiens
SPQANRTYV

SEQ ID NO: 64270 - protein, 9 aa, Homo Sapiens
SPQDKRTLL

SEQ ID NO: 64271 - protein, 9 aa, Homo Sapiens
SPQEARNML

SEQ ID NO: 64272 - protein, 9 aa, Homo Sapiens
SPQEFIHEL

SEQ ID NO: 64273 - protein, 9 aa, Homo Sapiens
SPQGLKPVV

SEQ ID NO: 64274 - protein, 9 aa, Homo Sapiens
SPQGRVMTI

SEQ ID NO: 64275 - protein, 9 aa, Homo Sapiens
SPQGVSKTL

SEQ ID NO: 64276 - protein, 9 aa, Homo Sapiens
SPQPRLIYL

SEQ ID NO: 64277 - protein, 9 aa, Homo Sapiens
SPQQKLVCL

SEQ ID NO: 64278 - protein, 9 aa, Homo Sapiens
SPQRPRPTL

SEQ ID NO: 64279 - protein, 9 aa, Homo Sapiens
SPQSPGDAL

SEQ ID NO: 64280 - protein, 9 aa, Homo Sapiens
SPQTHWKTV

SEQ ID NO: 64281 - protein, 9 aa, Homo Sapiens
SPQVCLKRL

SEQ ID NO: 64282 - protein, 9 aa, Homo Sapiens
SPQVQRPSF

SEQ ID NO: 64283 - protein, 9 aa, Homo Sapiens
SPRAPVQVI

SEQ ID NO: 64284 - protein, 9 aa, Homo Sapiens
SPRDKIYTI

SEQ ID NO: 64285 - protein, 9 aa, Homo Sapiens
SPRDPVLTL

SEQ ID NO: 64286 - protein, 9 aa, Homo Sapiens
SPREAARVL

SEQ ID NO: 64287 - protein, 9 aa, Homo Sapiens
SPREVFFRV

SEQ ID NO: 64288 - protein, 9 aa, Homo Sapiens
SPRGFPLGL

SEQ ID NO: 64289 - protein, 9 aa, Homo Sapiens
SPRGPGCSL

SEQ ID NO: 64290 - protein, 9 aa, Homo Sapiens
SPRHKMKII

SEQ ID NO: 64291 - protein, 9 aa, Homo Sapiens
SPRHPGVIF

SEQ ID NO: 64292 - protein, 9 aa, Homo Sapiens
SPRHSFNNL

SEQ ID NO: 64293 - protein, 9 aa, Homo Sapiens
SPRKLPTSL

SEQ ID NO: 64294 - protein, 9 aa, Homo Sapiens
SPRKSPRLM

SEQ ID NO: 64295 - protein, 9 aa, Homo Sapiens
SPRLPAREL

SEQ ID NO: 64296 - protein, 9 aa, Homo Sapiens
SPRLPVGGF

SEQ ID NO: 64297 - protein, 9 aa, Homo Sapiens
SPRMPSSGF

SEQ ID NO: 64298 - protein, 9 aa, Homo Sapiens
SPRNEVEAL

SEQ ID NO: 64299 - protein, 9 aa, Homo Sapiens
SPRPDRALV

SEQ ID NO: 64300 - protein, 9 aa, Homo Sapiens
SPRPGGPYL

SEQ ID NO: 64301 - protein, 9 aa, Homo Sapiens
SPRPKMDAI

SEQ ID NO: 64302 - protein, 9 aa, Homo Sapiens
SPRPPAEGF

SEQ ID NO: 64303 - protein, 9 aa, Homo Sapiens
SPRPPLISV

SEQ ID NO: 64304 - protein, 9 aa, Homo Sapiens
SPRPTGSDL

SEQ ID NO: 64305 - protein, 9 aa, Homo Sapiens
SPRVKVKNL

SEQ ID NO: 64306 - protein, 9 aa, Homo Sapiens
SPRVPLSAY

SEQ ID NO: 64307 - protein, 9 aa, Homo Sapiens
SPRVPNSSV

SEQ ID NO: 64308 - protein, 9 aa, Homo Sapiens
SPRVQFQSL

SEQ ID NO: 64309 - protein, 9 aa, Homo Sapiens
SPRVTGRLL

SEQ ID NO: 64310 - protein, 9 aa, Homo Sapiens
SPRVYWLGL

SEQ ID NO: 64311 - protein, 9 aa, Homo Sapiens
SPRYIFTML

SEQ ID NO: 64312 - protein, 9 aa, Homo Sapiens
SPSEIVKQI

SEQ ID NO: 64313 - protein, 9 aa, Homo Sapiens
SPSGDRPAV

SEQ ID NO: 64314 - protein, 9 aa, Homo Sapiens
SPSGSKMQL

SEQ ID NO: 64315 - protein, 9 aa, Homo Sapiens
SPSHNLKSL

SEQ ID NO: 64316 - protein, 9 aa, Homo Sapiens
SPSKPAKSL

SEQ ID NO: 64317 - protein, 9 aa, Homo Sapiens
SPSLPKKSL

SEQ ID NO: 64318 - protein, 9 aa, Homo Sapiens
SPSPRLKSV

SEQ ID NO: 64319 - protein, 9 aa, Homo Sapiens
SPSSPGSSL

SEQ ID NO: 64320 - protein, 9 aa, Homo Sapiens
SPTCTNKEL

SEQ ID NO: 64321 - protein, 9 aa, Homo Sapiens
SPTEERPTV

SEQ ID NO: 64322 - protein, 9 aa, Homo Sapiens
SPTGSGKSL

SEQ ID NO: 64323 - protein, 9 aa, Homo Sapiens
SPTGTGKTL

SEQ ID NO: 64324 - protein, 9 aa, Homo Sapiens
SPTTAFTVL

SEQ ID NO: 64325 - protein, 9 aa, Homo Sapiens
SPVFRLETL

SEQ ID NO: 64326 - protein, 9 aa, Homo Sapiens
SPVNGKLSV

SEQ ID NO: 64327 - protein, 9 aa, Homo Sapiens
SPWKRQIDL

SEQ ID NO: 64328 - protein, 9 aa, Homo Sapiens
SPYKRDNTF

SEQ ID NO: 64329 - protein, 9 aa, Homo Sapiens
SPYLRPLTL

SEQ ID NO: 64330 - protein, 9 aa, Homo Sapiens
SPYQNIKIL

SEQ ID NO: 64331 - protein, 9 aa, Homo Sapiens
SQRQGRPTL

SEQ ID NO: 64332 - protein, 9 aa, Homo Sapiens
SRAKAVRAL

SEQ ID NO: 64333 - protein, 9 aa, Homo Sapiens
SVKGHVKML

SEQ ID NO: 64334 - protein, 9 aa, Homo Sapiens
SVKPASSSF

SEQ ID NO: 64335 - protein, 9 aa, Homo Sapiens
SVKSPNQSL

SEQ ID NO: 64336 - protein, 9 aa, Homo Sapiens
SVKWPNSVM

SEQ ID NO: 64337 - protein, 9 aa, Homo Sapiens
SVQTHIKTL

SEQ ID NO: 64338 - protein, 9 aa, Homo Sapiens
TAKGHIVLL

SEQ ID NO: 64339 - protein, 9 aa, Homo Sapiens
TIKKRFKVL

SEQ ID NO: 64340 - protein, 9 aa, Homo Sapiens
TLNPNAKEF

SEQ ID NO: 64341 - protein, 9 aa, Homo Sapiens
TPAEVRQVL

SEQ ID NO: 64342 - protein, 9 aa, Homo Sapiens
TPAMQRKKL

SEQ ID NO: 64343 - protein, 9 aa, Homo Sapiens
TPAPPTHAL

SEQ ID NO: 64344 - protein, 9 aa, Homo Sapiens
TPAPRRAVL

SEQ ID NO: 64345 - protein, 9 aa, Homo Sapiens
TPASGTKVI

SEQ ID NO: 64346 - protein, 9 aa, Homo Sapiens
TPCKTPKQL

SEQ ID NO: 64347 - protein, 9 aa, Homo Sapiens
TPINKRPVL

SEQ ID NO: 64348 - protein, 9 aa, Homo Sapiens
TPKEAFRQL

SEQ ID NO: 64349 - protein, 9 aa, Homo Sapiens
TPKEEAQSL

SEQ ID NO: 64350 - protein, 9 aa, Homo Sapiens
TPKGETRQL

SEQ ID NO: 64351 - protein, 9 aa, Homo Sapiens
TPKKPVGEV

SEQ ID NO: 64352 - protein, 9 aa, Homo Sapiens
TPKKTTPIL

SEQ ID NO: 64353 - protein, 9 aa, Homo Sapiens
TPKMPGQSV

SEQ ID NO: 64354 - protein, 9 aa, Homo Sapiens
TPKNTSVSL

SEQ ID NO: 64355 - protein, 9 aa, Homo Sapiens
TPKPATEAV

SEQ ID NO: 64356 - protein, 9 aa, Homo Sapiens
TPKPQTKEL

SEQ ID NO: 64357 - protein, 9 aa, Homo Sapiens
TPKPSFFDF

SEQ ID NO: 64358 - protein, 9 aa, Homo Sapiens
TPKSQVGTL

SEQ ID NO: 64359 - protein, 9 aa, Homo Sapiens
TPKWITPVL

SEQ ID NO: 64360 - protein, 9 aa, Homo Sapiens
TPLARHRTL

SEQ ID NO: 64361 - protein, 9 aa, Homo Sapiens
TPLASFKIL

SEQ ID NO: 64362 - protein, 9 aa, Homo Sapiens
TPLCPRPAL

SEQ ID NO: 64363 - protein, 9 aa, Homo Sapiens
TPMFREYSL

SEQ ID NO: 64364 - protein, 9 aa, Homo Sapiens
TPMGPGRTV

SEQ ID NO: 64365 - protein, 9 aa, Homo Sapiens
TPNDGRCHL

SEQ ID NO: 64366 - protein, 9 aa, Homo Sapiens
TPNENRQKL

SEQ ID NO: 64367 - protein, 9 aa, Homo Sapiens
TPNEYIKTL

SEQ ID NO: 64368 - protein, 9 aa, Homo Sapiens
TPNGAKDCL

SEQ ID NO: 64369 - protein, 9 aa, Homo Sapiens
TPNHKKWKV

SEQ ID NO: 64370 - protein, 9 aa, Homo Sapiens
TPQAKKIKL

SEQ ID NO: 64371 - protein, 9 aa, Homo Sapiens
TPQDRQCVL

SEQ ID NO: 64372 - protein, 9 aa, Homo Sapiens
TPQGFRSTL

SEQ ID NO: 64373 - protein, 9 aa, Homo Sapiens
TPQSNRPVM

SEQ ID NO: 64374 - protein, 9 aa, Homo Sapiens
TPRHKQPTL

SEQ ID NO: 64375 - protein, 9 aa, Homo Sapiens
TPRLPQRNL

SEQ ID NO: 64376 - protein, 9 aa, Homo Sapiens
TPRNLNRSL

SEQ ID NO: 64377 - protein, 9 aa, Homo Sapiens
TPRPMTAEL

SEQ ID NO: 64378 - protein, 9 aa, Homo Sapiens
TPRPPGPGL

SEQ ID NO: 64379 - protein, 9 aa, Homo Sapiens
TPRRPAGLL

SEQ ID NO: 64380 - protein, 9 aa, Homo Sapiens
TPRSGGHLM

SEQ ID NO: 64381 - protein, 9 aa, Homo Sapiens
TPSAGKAML

SEQ ID NO: 64382 - protein, 9 aa, Homo Sapiens
TPSDGRPEL

SEQ ID NO: 64383 - protein, 9 aa, Homo Sapiens
TPSEPHPVL

SEQ ID NO: 64384 - protein, 9 aa, Homo Sapiens
TPSSVRKQL

SEQ ID NO: 64385 - protein, 9 aa, Homo Sapiens
TPTEKPKLL

SEQ ID NO: 64386 - protein, 9 aa, Homo Sapiens
TPVASRQSL

SEQ ID NO: 64387 - protein, 9 aa, Homo Sapiens
TPWPRGRLL

SEQ ID NO: 64388 - protein, 9 aa, Homo Sapiens
TRLIKPKVM

SEQ ID NO: 64389 - protein, 9 aa, Homo Sapiens
TVKAHPKYL

SEQ ID NO: 64390 - protein, 9 aa, Homo Sapiens
TVKPLTLEL

SEQ ID NO: 64391 - protein, 9 aa, Homo Sapiens
VARRVLQAL

SEQ ID NO: 64392 - protein, 9 aa, Homo Sapiens
VINGNIKTV

SEQ ID NO: 64393 - protein, 9 aa, Homo Sapiens
VINTHTKVL

SEQ ID NO: 64394 - protein, 9 aa, Homo Sapiens
VPAEPKLAF

SEQ ID NO: 64395 - protein, 9 aa, Homo Sapiens
VPAQSRPCV

SEQ ID NO: 64396 - protein, 9 aa, Homo Sapiens
VPASKRPPL

SEQ ID NO: 64397 - protein, 9 aa, Homo Sapiens
VPEEARPAL

SEQ ID NO: 64398 - protein, 9 aa, Homo Sapiens
VPESHRKPL

SEQ ID NO: 64399 - protein, 9 aa, Homo Sapiens
VPFERPAVI

SEQ ID NO: 64400 - protein, 9 aa, Homo Sapiens
VPFFPARVL

SEQ ID NO: 64401 - protein, 9 aa, Homo Sapiens
VPHGHITSL

SEQ ID NO: 64402 - protein, 9 aa, Homo Sapiens
VPKKAWRKL

SEQ ID NO: 64403 - protein, 9 aa, Homo Sapiens
VPKLKVCAL

SEQ ID NO: 64404 - protein, 9 aa, Homo Sapiens
VPKPFRPIL

SEQ ID NO: 64405 - protein, 9 aa, Homo Sapiens
VPKPRIKII

SEQ ID NO: 64406 - protein, 9 aa, Homo Sapiens
VPKQPPKTL

SEQ ID NO: 64407 - protein, 9 aa, Homo Sapiens
VPKSGTPQL

SEQ ID NO: 64408 - protein, 9 aa, Homo Sapiens
VPLPVKVCF

SEQ ID NO: 64409 - protein, 9 aa, Homo Sapiens
VPMFRNVSL

SEQ ID NO: 64410 - protein, 9 aa, Homo Sapiens
VPMSALKSV

SEQ ID NO: 64411 - protein, 9 aa, Homo Sapiens
VPNAGRGLV

SEQ ID NO: 64412 - protein, 9 aa, Homo Sapiens
VPNPRIKLI

SEQ ID NO: 64413 - protein, 9 aa, Homo Sapiens
VPNPSLKTF

SEQ ID NO: 64414 - protein, 9 aa, Homo Sapiens
VPNQKRLTL

SEQ ID NO: 64415 - protein, 9 aa, Homo Sapiens
VPPPPHRPL

SEQ ID NO: 64416 - protein, 9 aa, Homo Sapiens
VPRFYIRIL

SEQ ID NO: 64417 - protein, 9 aa, Homo Sapiens
VPRGQGSQF

SEQ ID NO: 64418 - protein, 9 aa, Homo Sapiens
VPRPGKAAF

SEQ ID NO: 64419 - protein, 9 aa, Homo Sapiens
VPRPIFSQL

SEQ ID NO: 64420 - protein, 9 aa, Homo Sapiens
VPRPPQTSL

SEQ ID NO: 64421 - protein, 9 aa, Homo Sapiens
VPRPVLRAL

SEQ ID NO: 64422 - protein, 9 aa, Homo Sapiens
VPRQNVPVI

SEQ ID NO: 64423 - protein, 9 aa, Homo Sapiens
VPRTERPAL

SEQ ID NO: 64424 - protein, 9 aa, Homo Sapiens
VPRVPTHTL

SEQ ID NO: 64425 - protein, 9 aa, Homo Sapiens
VPSEGKKSL

SEQ ID NO: 64426 - protein, 9 aa, Homo Sapiens
VPTKHAKVL

SEQ ID NO: 64427 - protein, 9 aa, Homo Sapiens
VPTTKKKML

SEQ ID NO: 64428 - protein, 9 aa, Homo Sapiens
VVKKHIKEL

SEQ ID NO: 64429 - protein, 9 aa, Homo Sapiens
VVKPPGSSL

SEQ ID NO: 64430 - protein, 9 aa, Homo Sapiens
VVPPFLQPE

SEQ ID NO: 64431 - protein, 9 aa, Homo Sapiens
WPQPDKPMF

SEQ ID NO: 64432 - protein, 9 aa, Homo Sapiens
YAKRPGIGL

SEQ ID NO: 64433 - protein, 9 aa, Homo Sapiens
YLRPPNTSL

SEQ ID NO: 64434 - protein, 9 aa, Homo Sapiens
YPAAKRVKL

SEQ ID NO: 64435 - protein, 9 aa, Homo Sapiens
YPGQPHPAL

SEQ ID NO: 64436 - protein, 9 aa, Homo Sapiens
YPHLHNAEL

SEQ ID NO: 64437 - protein, 9 aa, Homo Sapiens
YPKRPLLGL

SEQ ID NO: 64438 - protein, 9 aa, Homo Sapiens
YPLESRPSL

SEQ ID NO: 64439 - protein, 9 aa, Homo Sapiens
YPNRGNTCL

SEQ ID NO: 64440 - protein, 9 aa, Homo Sapiens
YPNVGKSSF

SEQ ID NO: 64441 - protein, 9 aa, Homo Sapiens
YPNVNIHNF

SEQ ID NO: 64442 - protein, 9 aa, Homo Sapiens
YPRKGRIAV

SEQ ID NO: 64443 - protein, 9 aa, Homo Sapiens
YPRSLFPSL

SEQ ID NO: 64444 - protein, 9 aa, Homo Sapiens
YPSAYIKVF

SEQ ID NO: 64445 - protein, 9 aa, Homo Sapiens
YPSEKRGEL

SEQ ID NO: 64446 - protein, 9 aa, Homo Sapiens
YPSSGAKSL

SEQ ID NO: 64447 - protein, 9 aa, Homo Sapiens
YVKSTKLVL

SEQ ID NO: 64448 - protein, 9 aa, Homo Sapiens
YVMDTRPKL

SEQ ID NO: 64449 - protein, 10 aa, Homo Sapiens
AAKPPARKAL

SEQ ID NO: 64450 - protein, 10 aa, Homo Sapiens
AASWEHIKAV

SEQ ID NO: 64451 - protein, 10 aa, Homo Sapiens
AGPLRAPLLL

SEQ ID NO: 64452 - protein, 10 aa, Homo Sapiens
APAAGAGRLL

SEQ ID NO: 64453 - protein, 10 aa, Homo Sapiens
APAGGDKKVI

SEQ ID NO: 64454 - protein, 10 aa, Homo Sapiens
APAGGSPRML

SEQ ID NO: 64455 - protein, 10 aa, Homo Sapiens
APAPAEKTPV

SEQ ID NO: 64456 - protein, 10 aa, Homo Sapiens
APAPRSGECL

SEQ ID NO: 64457 - protein, 10 aa, Homo Sapiens
APAPSKGQTL

SEQ ID NO: 64458 - protein, 10 aa, Homo Sapiens
APDGSQRAVL

SEQ ID NO: 64459 - protein, 10 aa, Homo Sapiens
APDSQRLKLL

SEQ ID NO: 64460 - protein, 10 aa, Homo Sapiens
APFDRRATSL

SEQ ID NO: 64461 - protein, 10 aa, Homo Sapiens
APGASKLRAV

SEQ ID NO: 64462 - protein, 10 aa, Homo Sapiens
APHARNGLSL

SEQ ID NO: 64463 - protein, 10 aa, Homo Sapiens
APHEPDGVAL

SEQ ID NO: 64464 - protein, 10 aa, Homo Sapiens
APIDRVGQTI

SEQ ID NO: 64465 - protein, 10 aa, Homo Sapiens
APIIRVGGAL

SEQ ID NO: 64466 - protein, 10 aa, Homo Sapiens
APINKAGSFL

SEQ ID NO: 64467 - protein, 10 aa, Homo Sapiens
APIQGNREEL

SEQ ID NO: 64468 - protein, 10 aa, Homo Sapiens
APKAVWLPAM

SEQ ID NO: 64469 - protein, 10 aa, Homo Sapiens
APKGPSRESV

SEQ ID NO: 64470 - protein, 10 aa, Homo Sapiens
APKHFLPEML

SEQ ID NO: 64471 - protein, 10 aa, Homo Sapiens
APKKKIQTTL

SEQ ID NO: 64472 - protein, 10 aa, Homo Sapiens
APKKPTGVDL

SEQ ID NO: 64473 - protein, 10 aa, Homo Sapiens
APKPAAPTTL

SEQ ID NO: 64474 - protein, 10 aa, Homo Sapiens
APKPPFQSHF

SEQ ID NO: 64475 - protein, 10 aa, Homo Sapiens
APKPSSRPSL

SEQ ID NO: 64476 - protein, 10 aa, Homo Sapiens
APKRPPSAFF

SEQ ID NO: 64477 - protein, 10 aa, Homo Sapiens
APKSGNTGEL

SEQ ID NO: 64478 - protein, 10 aa, Homo Sapiens
APKSMQSAIM

SEQ ID NO: 64479 - protein, 10 aa, Homo Sapiens
APKYGSYNVF

SEQ ID NO: 64480 - protein, 10 aa, Homo Sapiens
APLAGKGKQL

SEQ ID NO: 64481 - protein, 10 aa, Homo Sapiens
APLLVHVSSF

SEQ ID NO: 64482 - protein, 10 aa, Homo Sapiens
APLNEAMAVL

SEQ ID NO: 64483 - protein, 10 aa, Homo Sapiens
APNASNLKIV

SEQ ID NO: 64484 - protein, 10 aa, Homo Sapiens
APNEKMKQVL

SEQ ID NO: 64485 - protein, 10 aa, Homo Sapiens
APNPQDRKKF

SEQ ID NO: 64486 - protein, 10 aa, Homo Sapiens
APPEYHRKAV

SEQ ID NO: 64487 - protein, 10 aa, Homo Sapiens
APQTQHVSPM

SEQ ID NO: 64488 - protein, 10 aa, Homo Sapiens
APRARHLQSL

SEQ ID NO: 64489 - protein, 10 aa, Homo Sapiens
APRDAYWIAM

SEQ ID NO: 64490 - protein, 10 aa, Homo Sapiens
APREPPPVEL

SEQ ID NO: 64491 - protein, 10 aa, Homo Sapiens
APRGFLKRVF

SEQ ID NO: 64492 - protein, 10 aa, Homo Sapiens
APRHPSTNSL

SEQ ID NO: 64493 - protein, 10 aa, Homo Sapiens
APRIALHTAL

SEQ ID NO: 64494 - protein, 10 aa, Homo Sapiens
APRKVLGSST

SEQ ID NO: 64495 - protein, 10 aa, Homo Sapiens
APRNSNLREL

SEQ ID NO: 64496 - protein, 10 aa, Homo Sapiens
APRPASGPIR

SEQ ID NO: 64497 - protein, 10 aa, Homo Sapiens
APRPNPAQSL

SEQ ID NO: 64498 - protein, 10 aa, Homo Sapiens
APRSVAVSSI

SEQ ID NO: 64499 - protein, 10 aa, Homo Sapiens
APRTIFQRVL

SEQ ID NO: 64500 - protein, 10 aa, Homo Sapiens
APRTVALTAL

SEQ ID NO: 64501 - protein, 10 aa, Homo Sapiens
APRWGNPRAL

SEQ ID NO: 64502 - protein, 10 aa, Homo Sapiens
APSAARELSL

SEQ ID NO: 64503 - protein, 10 aa, Homo Sapiens
APSEDIWKKF

SEQ ID NO: 64504 - protein, 10 aa, Homo Sapiens
APSGGRLLSA

SEQ ID NO: 64505 - protein, 10 aa, Homo Sapiens
APSPADPRVL

SEQ ID NO: 64506 - protein, 10 aa, Homo Sapiens
APSPTHVAEL

SEQ ID NO: 64507 - protein, 10 aa, Homo Sapiens
APSQQRLVVV

SEQ ID NO: 64508 - protein, 10 aa, Homo Sapiens
APSRIFWRTV

SEQ ID NO: 64509 - protein, 10 aa, Homo Sapiens
APSTMKIKII

SEQ ID NO: 64510 - protein, 10 aa, Homo Sapiens
APWGGVAKTL

SEQ ID NO: 64511 - protein, 10 aa, Homo Sapiens
APWSGRFYSL

SEQ ID NO: 64512 - protein, 10 aa, Homo Sapiens
APYERRAMEL

SEQ ID NO: 64513 - protein, 10 aa, Homo Sapiens
ASPKSPTAAL

SEQ ID NO: 64514 - protein, 10 aa, Homo Sapiens
AVAKSKLREL

SEQ ID NO: 64515 - protein, 10 aa, Homo Sapiens
AVRELDGRTL

SEQ ID NO: 64516 - protein, 10 aa, Homo Sapiens
AVSAAIVKEL

SEQ ID NO: 64517 - protein, 10 aa, Homo Sapiens
AVSDGVIKVF

SEQ ID NO: 64518 - protein, 10 aa, Homo Sapiens
EAIKNVNTAL

SEQ ID NO: 64519 - protein, 10 aa, Homo Sapiens
EEQLQQIRAE

SEQ ID NO: 64520 - protein, 10 aa, Homo Sapiens
FPKGYRHPAL

SEQ ID NO: 64521 - protein, 10 aa, Homo Sapiens
FPMLPKQPML

SEQ ID NO: 64522 - protein, 10 aa, Homo Sapiens
FPQKLRPRLL

SEQ ID NO: 64523 - protein, 10 aa, Homo Sapiens
GAAVRIGSVL

SEQ ID NO: 64524 - protein, 10 aa, Homo Sapiens
GPKPGGGPGL

SEQ ID NO: 64525 - protein, 10 aa, Homo Sapiens
GPNERIGMVV

SEQ ID NO: 64526 - protein, 10 aa, Homo Sapiens
GPSIVHRKCF

SEQ ID NO: 64527 - protein, 10 aa, Homo Sapiens
GPSSNKPRVI

SEQ ID NO: 64528 - protein, 10 aa, Homo Sapiens
GPWRDKDPAL

SEQ ID NO: 64529 - protein, 10 aa, Homo Sapiens
GVSSSHVRVL

SEQ ID NO: 64530 - protein, 10 aa, Homo Sapiens
HPFPESKPVL

SEQ ID NO: 64531 - protein, 10 aa, Homo Sapiens
HPKFQKPKQL

SEQ ID NO: 64532 - protein, 10 aa, Homo Sapiens
HPKPSGKPLP

SEQ ID NO: 64533 - protein, 10 aa, Homo Sapiens
HPKTPLPPEL

SEQ ID NO: 64534 - protein, 10 aa, Homo Sapiens
HPMKPHRIRM

SEQ ID NO: 64535 - protein, 10 aa, Homo Sapiens
HPMKPHRLAL

SEQ ID NO: 64536 - protein, 10 aa, Homo Sapiens
HPPNYKKPVL

SEQ ID NO: 64537 - protein, 10 aa, Homo Sapiens
HPREPLPPIQ

SEQ ID NO: 64538 - protein, 10 aa, Homo Sapiens
HPRSPNVLSV

SEQ ID NO: 64539 - protein, 10 aa, Homo Sapiens
HPYHFKPKKI

SEQ ID NO: 64540 - protein, 10 aa, Homo Sapiens
IAKRPPLQSL

SEQ ID NO: 64541 - protein, 10 aa, Homo Sapiens
IPFVIPRPIL

SEQ ID NO: 64542 - protein, 10 aa, Homo Sapiens
IPKKAFLRAL

SEQ ID NO: 64543 - protein, 10 aa, Homo Sapiens
IVSNTLVRAL

SEQ ID NO: 64544 - protein, 10 aa, Homo Sapiens
KPFSQHVRKL

SEQ ID NO: 64545 - protein, 10 aa, Homo Sapiens
KPHSGFHVAF

SEQ ID NO: 64546 - protein, 10 aa, Homo Sapiens
KPIFSKIVSL

SEQ ID NO: 64547 - protein, 10 aa, Homo Sapiens
KPKAAKPKVV

SEQ ID NO: 64548 - protein, 10 aa, Homo Sapiens
KPKDPLKISL

SEQ ID NO: 64549 - protein, 10 aa, Homo Sapiens
KPKEHKKLFL

SEQ ID NO: 64550 - protein, 10 aa, Homo Sapiens
KPKENNFKAV

SEQ ID NO: 64551 - protein, 10 aa, Homo Sapiens
KPKPGHTPIF

SEQ ID NO: 64552 - protein, 10 aa, Homo Sapiens
KPKPTHKPTL

SEQ ID NO: 64553 - protein, 10 aa, Homo Sapiens
KPKPTNPVEI

SEQ ID NO: 64554 - protein, 10 aa, Homo Sapiens
KPKPVKPVTF

SEQ ID NO: 64555 - protein, 10 aa, Homo Sapiens
KPKRDRHIML

SEQ ID NO: 64556 - protein, 10 aa, Homo Sapiens
KPKSEIHVSM

SEQ ID NO: 64557 - protein, 10 aa, Homo Sapiens
KPNDSRALQL

SEQ ID NO: 64558 - protein, 10 aa, Homo Sapiens
KPNKPKPCGL

SEQ ID NO: 64559 - protein, 10 aa, Homo Sapiens
KPNPNQIISV

SEQ ID NO: 64560 - protein, 10 aa, Homo Sapiens
KPQEEQKTSL

SEQ ID NO: 64561 - protein, 10 aa, Homo Sapiens
KPQQKGLRLL

SEQ ID NO: 64562 - protein, 10 aa, Homo Sapiens
KPRVPPATAF

SEQ ID NO: 64563 - protein, 10 aa, Homo Sapiens
KPSEERVREI

SEQ ID NO: 64564 - protein, 10 aa, Homo Sapiens
KPSTAHHRPL

SEQ ID NO: 64565 - protein, 10 aa, Homo Sapiens
KPSTNVKKSI

SEQ ID NO: 64566 - protein, 10 aa, Homo Sapiens
KPTDEKLREL

SEQ ID NO: 64567 - protein, 10 aa, Homo Sapiens
KPTSERKVSL

SEQ ID NO: 64568 - protein, 10 aa, Homo Sapiens
KVPQLEIVPN

SEQ ID NO: 64569 - protein, 10 aa, Homo Sapiens
KVRGQTPKVA

SEQ ID NO: 64570 - protein, 10 aa, Homo Sapiens
LPKDQQITAL

SEQ ID NO: 64571 - protein, 10 aa, Homo Sapiens
LPKIPSNATL

SEQ ID NO: 64572 - protein, 10 aa, Homo Sapiens
LPKKPCKNLL

SEQ ID NO: 64573 - protein, 10 aa, Homo Sapiens
LPKKPCKNLM

SEQ ID NO: 64574 - protein, 10 aa, Homo Sapiens
LPKKPKKVAF

SEQ ID NO: 64575 - protein, 10 aa, Homo Sapiens
LPKPGGAHSL

SEQ ID NO: 64576 - protein, 10 aa, Homo Sapiens
LPKPHGIRAL

SEQ ID NO: 64577 - protein, 10 aa, Homo Sapiens
LPKQEKRHVL

SEQ ID NO: 64578 - protein, 10 aa, Homo Sapiens
LPKSPPYTAF

SEQ ID NO: 64579 - protein, 10 aa, Homo Sapiens
LPPLPKRPAL

SEQ ID NO: 64580 - protein, 10 aa, Homo Sapiens
LPRAVGTQTL

SEQ ID NO: 64581 - protein, 10 aa, Homo Sapiens
LPRGSIPRSL

SEQ ID NO: 64582 - protein, 10 aa, Homo Sapiens
LPSDLRTISL

SEQ ID NO: 64583 - protein, 10 aa, Homo Sapiens
LPSSIRTKAL

SEQ ID NO: 64584 - protein, 10 aa, Homo Sapiens
LPSSKLIRIL

SEQ ID NO: 64585 - protein, 10 aa, Homo Sapiens
MPCSVIRPIL

SEQ ID NO: 64586 - protein, 10 aa, Homo Sapiens
MPHPATGKTV

SEQ ID NO: 64587 - protein, 10 aa, Homo Sapiens
MPKEPHIREM

SEQ ID NO: 64588 - protein, 10 aa, Homo Sapiens
MPKKDARTLL

SEQ ID NO: 64589 - protein, 10 aa, Homo Sapiens
MPRQPSATRL

SEQ ID NO: 64590 - protein, 10 aa, Homo Sapiens
MPSASRVILL

SEQ ID NO: 64591 - protein, 10 aa, Homo Sapiens
MPYSNGRPAL

SEQ ID NO: 64592 - protein, 10 aa, Homo Sapiens
NPKPASPRFL

SEQ ID NO: 64593 - protein, 10 aa, Homo Sapiens
NPMGGYGKTI

SEQ ID NO: 64594 - protein, 10 aa, Homo Sapiens
NPNQNKNVAL

SEQ ID NO: 64595 - protein, 10 aa, Homo Sapiens
NPSPWIYREL

SEQ ID NO: 64596 - protein, 10 aa, Homo Sapiens
QLMKPKKTEI

SEQ ID NO: 64597 - protein, 10 aa, Homo Sapiens
QPAATKIRNL

SEQ ID NO: 64598 - protein, 10 aa, Homo Sapiens
QPANKGFRAL

SEQ ID NO: 64599 - protein, 10 aa, Homo Sapiens
QPDQTRIVAL

SEQ ID NO: 64600 - protein, 10 aa, Homo Sapiens
QPFAWKKKAL

SEQ ID NO: 64601 - protein, 10 aa, Homo Sapiens
QPKKVKGVGF

SEQ ID NO: 64602 - protein, 10 aa, Homo Sapiens
QPKQKIRVAL

SEQ ID NO: 64603 - protein, 10 aa, Homo Sapiens
QPNGKVFKKL

SEQ ID NO: 64604 - protein, 10 aa, Homo Sapiens
QPNRYTNRVV

SEQ ID NO: 64605 - protein, 10 aa, Homo Sapiens
RIKKPIKTKF

SEQ ID NO: 64606 - protein, 10 aa, Homo Sapiens
RPAACGRTSL

SEQ ID NO: 64607 - protein, 10 aa, Homo Sapiens
RPAAPGQTPL

SEQ ID NO: 64608 - protein, 10 aa, Homo Sapiens
RPANHRQLTF

SEQ ID NO: 64609 - protein, 10 aa, Homo Sapiens
RPAPHFERTA

SEQ ID NO: 64610 - protein, 10 aa, Homo Sapiens
RPDPNTGKVH

SEQ ID NO: 64611 - protein, 10 aa, Homo Sapiens
RPFERRLYVL

SEQ ID NO: 64612 - protein, 10 aa, Homo Sapiens
RPFHNGVKCL

SEQ ID NO: 64613 - protein, 10 aa, Homo Sapiens
RPFSGRRLPV

SEQ ID NO: 64614 - protein, 10 aa, Homo Sapiens
RPFVGHTRSV

SEQ ID NO: 64615 - protein, 10 aa, Homo Sapiens
RPHKVDGRVV

SEQ ID NO: 64616 - protein, 10 aa, Homo Sapiens
RPHSIDGRVV

SEQ ID NO: 64617 - protein, 10 aa, Homo Sapiens
RPIGSRKVKL

SEQ ID NO: 64618 - protein, 10 aa, Homo Sapiens
RPIKPPRKDL

SEQ ID NO: 64619 - protein, 10 aa, Homo Sapiens
RPKAISPYHL

SEQ ID NO: 64620 - protein, 10 aa, Homo Sapiens
RPKARNEVRL

SEQ ID NO: 64621 - protein, 10 aa, Homo Sapiens
RPKEDTQKLL

SEQ ID NO: 64622 - protein, 10 aa, Homo Sapiens
RPKEIKVSKM

SEQ ID NO: 64623 - protein, 10 aa, Homo Sapiens
RPKENSMSTL

SEQ ID NO: 64624 - protein, 10 aa, Homo Sapiens
RPKKEKSSFL

SEQ ID NO: 64625 - protein, 10 aa, Homo Sapiens
RPKLPEDPLL

SEQ ID NO: 64626 - protein, 10 aa, Homo Sapiens
RPKNDLGHPF

SEQ ID NO: 64627 - protein, 10 aa, Homo Sapiens
RPKPKTLHEL

SEQ ID NO: 64628 - protein, 10 aa, Homo Sapiens
RPKPPNVRTA

SEQ ID NO: 64629 - protein, 10 aa, Homo Sapiens
RPKPPSATSI

SEQ ID NO: 64630 - protein, 10 aa, Homo Sapiens
RPKPSASEVL

SEQ ID NO: 64631 - protein, 10 aa, Homo Sapiens
RPKQEKAFSL

SEQ ID NO: 64632 - protein, 10 aa, Homo Sapiens
RPKQPGPVKL

SEQ ID NO: 64633 - protein, 10 aa, Homo Sapiens
RPKSFILPKL

SEQ ID NO: 64634 - protein, 10 aa, Homo Sapiens
RPKTVRDTLL

SEQ ID NO: 64635 - protein, 10 aa, Homo Sapiens
RPKVVRSVHY

SEQ ID NO: 64636 - protein, 10 aa, Homo Sapiens
RPLRPKPPLL

SEQ ID NO: 64637 - protein, 10 aa, Homo Sapiens
RPMPPEARRL

SEQ ID NO: 64638 - protein, 10 aa, Homo Sapiens
RPNDSRMLVA

SEQ ID NO: 64639 - protein, 10 aa, Homo Sapiens
RPNGTKVAVL

SEQ ID NO: 64640 - protein, 10 aa, Homo Sapiens
RPNSKIKVKF

SEQ ID NO: 64641 - protein, 10 aa, Homo Sapiens
RPPRGPLAEL

SEQ ID NO: 64642 - protein, 10 aa, Homo Sapiens
RPQASAWKKL

SEQ ID NO: 64643 - protein, 10 aa, Homo Sapiens
RPQLHKNTVL

SEQ ID NO: 64644 - protein, 10 aa, Homo Sapiens
RPQLHQKSIM

SEQ ID NO: 64645 - protein, 10 aa, Homo Sapiens
RPQPQPRPAL

SEQ ID NO: 64646 - protein, 10 aa, Homo Sapiens
RPQSSRPVLL

SEQ ID NO: 64647 - protein, 10 aa, Homo Sapiens
RPRDPFTKKL

SEQ ID NO: 64648 - protein, 10 aa, Homo Sapiens
RPREAEVRFL

SEQ ID NO: 64649 - protein, 10 aa, Homo Sapiens
RPRKAFLLLL

SEQ ID NO: 64650 - protein, 10 aa, Homo Sapiens
RPRKDPLRHL

SEQ ID NO: 64651 - protein, 10 aa, Homo Sapiens
RPRPDEERPL

SEQ ID NO: 64652 - protein, 10 aa, Homo Sapiens
RPRPHSAPSL

SEQ ID NO: 64653 - protein, 10 aa, Homo Sapiens
RPRPNTFIIR

SEQ ID NO: 64654 - protein, 10 aa, Homo Sapiens
RPRPNTFVIR

SEQ ID NO: 64655 - protein, 10 aa, Homo Sapiens
RPSDEVIREL

SEQ ID NO: 64656 - protein, 10 aa, Homo Sapiens
RPSDSQSKRL

SEQ ID NO: 64657 - protein, 10 aa, Homo Sapiens
RPSEKNQHIM

SEQ ID NO: 64658 - protein, 10 aa, Homo Sapiens
RPSLVHSRDM

SEQ ID NO: 64659 - protein, 10 aa, Homo Sapiens
RPSPCNGRKI

SEQ ID NO: 64660 - protein, 10 aa, Homo Sapiens
RPSSKKTYSL

SEQ ID NO: 64661 - protein, 10 aa, Homo Sapiens
RPVAPSGTAL

SEQ ID NO: 64662 - protein, 10 aa, Homo Sapiens
RPWEKNSTTL

SEQ ID NO: 64663 - protein, 10 aa, Homo Sapiens
RPWLEGRHTL

SEQ ID NO: 64664 - protein, 10 aa, Homo Sapiens
RPYAAGGKKL

SEQ ID NO: 64665 - protein, 10 aa, Homo Sapiens
RSFKGHVRKM

SEQ ID NO: 64666 - protein, 10 aa, Homo Sapiens
RTFDRALRAL

SEQ ID NO: 64667 - protein, 10 aa, Homo Sapiens
RVKEPVKELL

SEQ ID NO: 64668 - protein, 10 aa, Homo Sapiens
RVKPPKESAL

SEQ ID NO: 64669 - protein, 10 aa, Homo Sapiens
RVKPYIRTSL

SEQ ID NO: 64670 - protein, 10 aa, Homo Sapiens
RVKVGSRLTL

SEQ ID NO: 64671 - protein, 10 aa, Homo Sapiens
RVRSFLRGLP

SEQ ID NO: 64672 - protein, 10 aa, Homo Sapiens
SPAGSIVHEL

SEQ ID NO: 64673 - protein, 10 aa, Homo Sapiens
SPAIMSPKLF

SEQ ID NO: 64674 - protein, 10 aa, Homo Sapiens
SPAKGQKPAL

SEQ ID NO: 64675 - protein, 10 aa, Homo Sapiens
SPALTISKVL

SEQ ID NO: 64676 - protein, 10 aa, Homo Sapiens
SPATTVVRTL

SEQ ID NO: 64677 - protein, 10 aa, Homo Sapiens
SPCQDFGKRM

SEQ ID NO: 64678 - protein, 10 aa, Homo Sapiens
SPGPTWGRVV

SEQ ID NO: 64679 - protein, 10 aa, Homo Sapiens
SPHAAHLKKL

SEQ ID NO: 64680 - protein, 10 aa, Homo Sapiens
SPHTPRRTSL

SEQ ID NO: 64681 - protein, 10 aa, Homo Sapiens
SPKAALRYAA

SEQ ID NO: 64682 - protein, 10 aa, Homo Sapiens
SPKESRSKFF

SEQ ID NO: 64683 - protein, 10 aa, Homo Sapiens
SPKGCGTVLL

SEQ ID NO: 64684 - protein, 10 aa, Homo Sapiens
SPKKAKSRLI

SEQ ID NO: 64685 - protein, 10 aa, Homo Sapiens
SPKPALCVTL

SEQ ID NO: 64686 - protein, 10 aa, Homo Sapiens
SPKPPSSFKM

SEQ ID NO: 64687 - protein, 10 aa, Homo Sapiens
SPKTPGCSDL

SEQ ID NO: 64688 - protein, 10 aa, Homo Sapiens
SPLKGHERTV

SEQ ID NO: 64689 - protein, 10 aa, Homo Sapiens
SPLPQKKMTM

SEQ ID NO: 64690 - protein, 10 aa, Homo Sapiens
SPLQIERSLS

SEQ ID NO: 64691 - protein, 10 aa, Homo Sapiens
SPMEGTGISL

SEQ ID NO: 64692 - protein, 10 aa, Homo Sapiens
SPMHERVTSF

SEQ ID NO: 64693 - protein, 10 aa, Homo Sapiens
SPNGNLIRML

SEQ ID NO: 64694 - protein, 10 aa, Homo Sapiens
SPNGPKMGLL

SEQ ID NO: 64695 - protein, 10 aa, Homo Sapiens
SPNGTIRNIL

SEQ ID NO: 64696 - protein, 10 aa, Homo Sapiens
SPNPDREAIL

SEQ ID NO: 64697 - protein, 10 aa, Homo Sapiens
SPPELKRPRL

SEQ ID NO: 64698 - protein, 10 aa, Homo Sapiens
SPPSAARHSL

SEQ ID NO: 64699 - protein, 10 aa, Homo Sapiens
SPQEKPLRTL

SEQ ID NO: 64700 - protein, 10 aa, Homo Sapiens
SPQPPKKDSL

SEQ ID NO: 64701 - protein, 10 aa, Homo Sapiens
SPQSGNFRQL

SEQ ID NO: 64702 - protein, 10 aa, Homo Sapiens
SPREEPRAPW

SEQ ID NO: 64703 - protein, 10 aa, Homo Sapiens
SPRKAIHSDF

SEQ ID NO: 64704 - protein, 10 aa, Homo Sapiens
SPRPNHSYIF

SEQ ID NO: 64705 - protein, 10 aa, Homo Sapiens
SPRPPLGSSL

SEQ ID NO: 64706 - protein, 10 aa, Homo Sapiens
SPRSSLNNSL

SEQ ID NO: 64707 - protein, 10 aa, Homo Sapiens
SPSRNRSLQL

SEQ ID NO: 64708 - protein, 10 aa, Homo Sapiens
SPSSVTGNAL

SEQ ID NO: 64709 - protein, 10 aa, Homo Sapiens
SPTFRRPKTL

SEQ ID NO: 64710 - protein, 10 aa, Homo Sapiens
SPTPRIKAEL

SEQ ID NO: 64711 - protein, 10 aa, Homo Sapiens
SPTPVSWHVM

SEQ ID NO: 64712 - protein, 10 aa, Homo Sapiens
SPVSGTPKQL

SEQ ID NO: 64713 - protein, 10 aa, Homo Sapiens
SSPKLPVSSL

SEQ ID NO: 64714 - protein, 10 aa, Homo Sapiens
TAKPQSTTSL

SEQ ID NO: 64715 - protein, 10 aa, Homo Sapiens
TPDQGKARLL

SEQ ID NO: 64716 - protein, 10 aa, Homo Sapiens
TPKPQTKELM

SEQ ID NO: 64717 - protein, 10 aa, Homo Sapiens
TPKQKPKTPF

SEQ ID NO: 64718 - protein, 10 aa, Homo Sapiens
TPKSTPVKTL

SEQ ID NO: 64719 - protein, 10 aa, Homo Sapiens
TPMSSHGRVL

SEQ ID NO: 64720 - protein, 10 aa, Homo Sapiens
TPSGHIKRPM

SEQ ID NO: 64721 - protein, 10 aa, Homo Sapiens
TPTSAPRSVM

SEQ ID NO: 64722 - protein, 10 aa, Homo Sapiens
VPAPQHLKTL

SEQ ID NO: 64723 - protein, 10 aa, Homo Sapiens
VPASQKLRQL

SEQ ID NO: 64724 - protein, 10 aa, Homo Sapiens
VPAYDKIRVL

SEQ ID NO: 64725 - protein, 10 aa, Homo Sapiens
VPKKPGPPVL

SEQ ID NO: 64726 - protein, 10 aa, Homo Sapiens
VPKPGAGSKL

SEQ ID NO: 64727 - protein, 10 aa, Homo Sapiens
VPKPPSIEEF

SEQ ID NO: 64728 - protein, 10 aa, Homo Sapiens
VPNGALKKSL

SEQ ID NO: 64729 - protein, 10 aa, Homo Sapiens
VPRPAARVAL

SEQ ID NO: 64730 - protein, 10 aa, Homo Sapiens
VPRQPTVTSV

SEQ ID NO: 64731 - protein, 10 aa, Homo Sapiens
VSRAKAVRAL

SEQ ID NO: 64732 - protein, 10 aa, Homo Sapiens
VVPPFLQPEV

SEQ ID NO: 64733 - protein, 10 aa, Homo Sapiens
WPKDVGIVAL

SEQ ID NO: 64734 - protein, 10 aa, Homo Sapiens
YPARYRPTAL

SEQ ID NO: 64735 - protein, 10 aa, Homo Sapiens
YPFKPPKVAF

SEQ ID NO: 64736 - protein, 10 aa, Homo Sapiens
YPKKPKDEAF

SEQ ID NO: 64737 - protein, 10 aa, Homo Sapiens
YPMDLGGRNF

SEQ ID NO: 64738 - protein, 10 aa, Homo Sapiens
YPSLPKSLPL

SEQ ID NO: 64739 - protein, 11 aa, Homo Sapiens
AASKERSGVSL

SEQ ID NO: 64740 - protein, 11 aa, Homo Sapiens
AGAAVRIGSVL

SEQ ID NO: 64741 - protein, 11 aa, Homo Sapiens
APAGRKVGLIA

SEQ ID NO: 64742 - protein, 11 aa, Homo Sapiens
APAGTTSSRVL

SEQ ID NO: 64743 - protein, 11 aa, Homo Sapiens
APAIGRYIRTL

SEQ ID NO: 64744 - protein, 11 aa, Homo Sapiens
APALARTLQSL

SEQ ID NO: 64745 - protein, 11 aa, Homo Sapiens
APDAAPAPASI

SEQ ID NO: 64746 - protein, 11 aa, Homo Sapiens
APDLQRVHKRI

SEQ ID NO: 64747 - protein, 11 aa, Homo Sapiens
APKFRLHSATL

SEQ ID NO: 64748 - protein, 11 aa, Homo Sapiens
APKGTKRDPAL

SEQ ID NO: 64749 - protein, 11 aa, Homo Sapiens
APKSRQELIAL

SEQ ID NO: 64750 - protein, 11 aa, Homo Sapiens
APNLGRSFHIL

SEQ ID NO: 64751 - protein, 11 aa, Homo Sapiens
APNPAKATVTA

SEQ ID NO: 64752 - protein, 11 aa, Homo Sapiens
APNPYRSENCL

SEQ ID NO: 64753 - protein, 11 aa, Homo Sapiens
APRADEITRRL

SEQ ID NO: 64754 - protein, 11 aa, Homo Sapiens
APRHPSTNSLL

SEQ ID NO: 64755 - protein, 11 aa, Homo Sapiens
APRPASGPIRP

SEQ ID NO: 64756 - protein, 11 aa, Homo Sapiens
APRPDSRHHSL

SEQ ID NO: 64757 - protein, 11 aa, Homo Sapiens
APRQPGLMAQM

SEQ ID NO: 64758 - protein, 11 aa, Homo Sapiens
APRTVALTALL

SEQ ID NO: 64759 - protein, 11 aa, Homo Sapiens
APSAAKLLVQL

SEQ ID NO: 64760 - protein, 11 aa, Homo Sapiens
APSARRGTLAV

SEQ ID NO: 64761 - protein, 11 aa, Homo Sapiens
APSGQHSQAQL

SEQ ID NO: 64762 - protein, 11 aa, Homo Sapiens
APSSQAAARVV

SEQ ID NO: 64763 - protein, 11 aa, Homo Sapiens
APTQEKIFAVL

SEQ ID NO: 64764 - protein, 11 aa, Homo Sapiens
APYERRAMELL

SEQ ID NO: 64765 - protein, 11 aa, Homo Sapiens
APYMRSMMQSL

SEQ ID NO: 64766 - protein, 11 aa, Homo Sapiens
AVHYDRSGRSL

SEQ ID NO: 64767 - protein, 11 aa, Homo Sapiens
FPAQRPPQRTL

SEQ ID NO: 64768 - protein, 11 aa, Homo Sapiens
GPAGSRSGRLF

SEQ ID NO: 64769 - protein, 11 aa, Homo Sapiens
GPNPKSSRTTL

SEQ ID NO: 64770 - protein, 11 aa, Homo Sapiens
GPSGAAAMRSM

SEQ ID NO: 64771 - protein, 11 aa, Homo Sapiens
HPHSGSGRSVL

SEQ ID NO: 64772 - protein, 11 aa, Homo Sapiens
HPSASLIDRTI

SEQ ID NO: 64773 - protein, 11 aa, Homo Sapiens
HPSETRTLVAV

SEQ ID NO: 64774 - protein, 11 aa, Homo Sapiens
HPSVSRYHAVL

SEQ ID NO: 64775 - protein, 11 aa, Homo Sapiens
IPASSHGKRGL

SEQ ID NO: 64776 - protein, 11 aa, Homo Sapiens
IPDASKLQFIL

SEQ ID NO: 64777 - protein, 11 aa, Homo Sapiens
IPSADRHKSKL

SEQ ID NO: 64778 - protein, 11 aa, Homo Sapiens
KASELHSVRKL

SEQ ID NO: 64779 - protein, 11 aa, Homo Sapiens
KPGAHLTVKKI

SEQ ID NO: 64780 - protein, 11 aa, Homo Sapiens
KPKPNGRTVEV

SEQ ID NO: 64781 - protein, 11 aa, Homo Sapiens
KPNANRIALDF

SEQ ID NO: 64782 - protein, 11 aa, Homo Sapiens
KPNSFVKFRCM

SEQ ID NO: 64783 - protein, 11 aa, Homo Sapiens
KPQDYKKRLSV

SEQ ID NO: 64784 - protein, 11 aa, Homo Sapiens
KPSAVAPQRKM

SEQ ID NO: 64785 - protein, 11 aa, Homo Sapiens
KPSPLLVGREF

SEQ ID NO: 64786 - protein, 11 aa, Homo Sapiens
KPTPVKPNYAL

SEQ ID NO: 64787 - protein, 11 aa, Homo Sapiens
LARQAPKPRKQ

SEQ ID NO: 64788 - protein, 11 aa, Homo Sapiens
LPADHPKGRLL

SEQ ID NO: 64789 - protein, 11 aa, Homo Sapiens
LPDLQRSKQAL

SEQ ID NO: 64790 - protein, 11 aa, Homo Sapiens
LPHIEKTIRQL

SEQ ID NO: 64791 - protein, 11 aa, Homo Sapiens
LPMQEKTYRRL

SEQ ID NO: 64792 - protein, 11 aa, Homo Sapiens
LPNSQKAVKAL

SEQ ID NO: 64793 - protein, 11 aa, Homo Sapiens
LPRKNLPERLL

SEQ ID NO: 64794 - protein, 11 aa, Homo Sapiens
MPSSHRILHKL

SEQ ID NO: 64795 - protein, 11 aa, Homo Sapiens
MPSSSGSARSL

SEQ ID NO: 64796 - protein, 11 aa, Homo Sapiens
MPSSSKTKPVL

SEQ ID NO: 64797 - protein, 11 aa, Homo Sapiens
NVSRAKAVRAL

SEQ ID NO: 64798 - protein, 11 aa, Homo Sapiens
PRPDSRHHSLA

SEQ ID NO: 64799 - protein, 11 aa, Homo Sapiens
QPCPSLAQHSL

SEQ ID NO: 64800 - protein, 11 aa, Homo Sapiens
QPMSFRPRILI

SEQ ID NO: 64801 - protein, 11 aa, Homo Sapiens
RADENHPQRVL

SEQ ID NO: 64802 - protein, 11 aa, Homo Sapiens
RIKLGIKSLVS

SEQ ID NO: 64803 - protein, 11 aa, Homo Sapiens
RIMSEKITRTL

SEQ ID NO: 64804 - protein, 11 aa, Homo Sapiens
RLSQSKASKEL

SEQ ID NO: 64805 - protein, 11 aa, Homo Sapiens
RPALQHVVKVL

SEQ ID NO: 64806 - protein, 11 aa, Homo Sapiens
RPCAGRSRDIL

SEQ ID NO: 64807 - protein, 11 aa, Homo Sapiens
RPDLERICRMV

SEQ ID NO: 64808 - protein, 11 aa, Homo Sapiens
RPDVGRYLREL

SEQ ID NO: 64809 - protein, 11 aa, Homo Sapiens
RPGAHLTVKKI

SEQ ID NO: 64810 - protein, 11 aa, Homo Sapiens
RPHAPHSPIKF

SEQ ID NO: 64811 - protein, 11 aa, Homo Sapiens
RPKAKGGLASL

SEQ ID NO: 64812 - protein, 11 aa, Homo Sapiens
RPKGSEMKYAL

SEQ ID NO: 64813 - protein, 11 aa, Homo Sapiens
RPKLQHSTSIL

SEQ ID NO: 64814 - protein, 11 aa, Homo Sapiens
RPKPSSSPVIF

SEQ ID NO: 64815 - protein, 11 aa, Homo Sapiens
RPKRPPLKEFF

SEQ ID NO: 64816 - protein, 11 aa, Homo Sapiens
RPKSSQIGAVV

SEQ ID NO: 64817 - protein, 11 aa, Homo Sapiens
RPKTVRDTLLA

SEQ ID NO: 64818 - protein, 11 aa, Homo Sapiens
RPLEMIEPRTL

SEQ ID NO: 64819 - protein, 11 aa, Homo Sapiens
RPNDSRMLVAL

SEQ ID NO: 64820 - protein, 11 aa, Homo Sapiens
RPNFNIKGIRF

SEQ ID NO: 64821 - protein, 11 aa, Homo Sapiens
RPNLSHTGRGI

SEQ ID NO: 64822 - protein, 11 aa, Homo Sapiens
RPPGFYPHRVL

SEQ ID NO: 64823 - protein, 11 aa, Homo Sapiens
RPQIDKKGRAV

SEQ ID NO: 64824 - protein, 11 aa, Homo Sapiens
RPQSKAPDSTL

SEQ ID NO: 64825 - protein, 11 aa, Homo Sapiens
RPRLQLKPRTV

SEQ ID NO: 64826 - protein, 11 aa, Homo Sapiens
RPRLTSNEKLM

SEQ ID NO: 64827 - protein, 11 aa, Homo Sapiens
RPRNPAGRTGL

SEQ ID NO: 64828 - protein, 11 aa, Homo Sapiens
RPRPGNILLQL

SEQ ID NO: 64829 - protein, 11 aa, Homo Sapiens
RPRPTEATVSL

SEQ ID NO: 64830 - protein, 11 aa, Homo Sapiens
RPRTPPEAIAL

SEQ ID NO: 64831 - protein, 11 aa, Homo Sapiens
RPSFPKAARQF

SEQ ID NO: 64832 - protein, 11 aa, Homo Sapiens
RPSGLHGDVSL

SEQ ID NO: 64833 - protein, 11 aa, Homo Sapiens
RPSTGLLRHIL

SEQ ID NO: 64834 - protein, 11 aa, Homo Sapiens
RPSYWKFLLRL

SEQ ID NO: 64835 - protein, 11 aa, Homo Sapiens
RPWEKNSTTLP

SEQ ID NO: 64836 - protein, 11 aa, Homo Sapiens
RPWINKKIIEY

SEQ ID NO: 64837 - protein, 11 aa, Homo Sapiens
RPYQEKSLRKM

SEQ ID NO: 64838 - protein, 11 aa, Homo Sapiens
RTACERAKRTL

SEQ ID NO: 64839 - protein, 11 aa, Homo Sapiens
RVFEHHGQVRL

SEQ ID NO: 64840 - protein, 11 aa, Homo Sapiens
RVQGDKRLSSL

SEQ ID NO: 64841 - protein, 11 aa, Homo Sapiens
SADIRKAYRKL

SEQ ID NO: 64842 - protein, 11 aa, Homo Sapiens
SPADLRTNHTL

SEQ ID NO: 64843 - protein, 11 aa, Homo Sapiens
SPALNKMFCQL

SEQ ID NO: 64844 - protein, 11 aa, Homo Sapiens
SPASSTTARVI

SEQ ID NO: 64845 - protein, 11 aa, Homo Sapiens
SPDITHQKRVF

SEQ ID NO: 64846 - protein, 11 aa, Homo Sapiens
SPDPHKGLVLL

SEQ ID NO: 64847 - protein, 11 aa, Homo Sapiens
SPISSNSHRSL

SEQ ID NO: 64848 - protein, 11 aa, Homo Sapiens
SPKKPGREIEL

SEQ ID NO: 64849 - protein, 11 aa, Homo Sapiens
SPKLPVSSLGL

SEQ ID NO: 64850 - protein, 11 aa, Homo Sapiens
SPKPGTGEPVL

SEQ ID NO: 64851 - protein, 11 aa, Homo Sapiens
SPKRPPSPIKF

SEQ ID NO: 64852 - protein, 11 aa, Homo Sapiens
SPKSTGSVRQL

SEQ ID NO: 64853 - protein, 11 aa, Homo Sapiens
SPNGHRPQLRA

SEQ ID NO: 64854 - protein, 11 aa, Homo Sapiens
SPNLSKCGEEL

SEQ ID NO: 64855 - protein, 11 aa, Homo Sapiens
SPNQARAQAAL

SEQ ID NO: 64856 - protein, 11 aa, Homo Sapiens
SPNQRHRDLEL

SEQ ID NO: 64857 - protein, 11 aa, Homo Sapiens
SPRGNLPLRKL

SEQ ID NO: 64858 - protein, 11 aa, Homo Sapiens
SPRPDRALVQL

SEQ ID NO: 64859 - protein, 11 aa, Homo Sapiens
SPRQGNSKNVL

SEQ ID NO: 64860 - protein, 11 aa, Homo Sapiens
SPSIHQSVVAV

SEQ ID NO: 64861 - protein, 11 aa, Homo Sapiens
SPSKTRGQIQV

SEQ ID NO: 64862 - protein, 11 aa, Homo Sapiens
SPVDPGARQAL

SEQ ID NO: 64863 - protein, 11 aa, Homo Sapiens
SVSFSKSGRLL

SEQ ID NO: 64864 - protein, 11 aa, Homo Sapiens
TPARAPGTRTL

SEQ ID NO: 64865 - protein, 11 aa, Homo Sapiens
TPDHGRHRRLL

SEQ ID NO: 64866 - protein, 11 aa, Homo Sapiens
TPKRPSTSQTV

SEQ ID NO: 64867 - protein, 11 aa, Homo Sapiens
TPSLVKSTSQL

SEQ ID NO: 64868 - protein, 11 aa, Homo Sapiens
TPSSPRAGQLL

SEQ ID NO: 64869 - protein, 11 aa, Homo Sapiens
VPAVAKLRRLL

SEQ ID NO: 64870 - protein, 11 aa, Homo Sapiens
VPDSSGPERIL

SEQ ID NO: 64871 - protein, 11 aa, Homo Sapiens
VPDTSRIYVAL

SEQ ID NO: 64872 - protein, 11 aa, Homo Sapiens
VPHPKKPEHTL

SEQ ID NO: 64873 - protein, 11 aa, Homo Sapiens
VPHPKKPGHIL

SEQ ID NO: 64874 - protein, 11 aa, Homo Sapiens
VPHPSKPNHTL

SEQ ID NO: 64875 - protein, 11 aa, Homo Sapiens
VPKPIGGVVVF

SEQ ID NO: 64876 - protein, 11 aa, Homo Sapiens
VPKPRIKIIDF

SEQ ID NO: 64877 - protein, 11 aa, Homo Sapiens
VPKTAENFRAL

SEQ ID NO: 64878 - protein, 11 aa, Homo Sapiens
VPKTTGEGTSL

SEQ ID NO: 64879 - protein, 11 aa, Homo Sapiens
VPNPRIKLIDF

SEQ ID NO: 64880 - protein, 11 aa, Homo Sapiens
VPNSAIYKRVL

SEQ ID NO: 64881 - protein, 11 aa, Homo Sapiens
VPSVSSISRIL

SEQ ID NO: 64882 - protein, 11 aa, Homo Sapiens
VPSWSKVNQGL

SEQ ID NO: 64883 - protein, 11 aa, Homo Sapiens
VVDPKKPFRKL

SEQ ID NO: 64884 - protein, 11 aa, Homo Sapiens
VVDPRRPFRKL

SEQ ID NO: 64885 - protein, 11 aa, Homo Sapiens
YPSSVNSARTV

SEQ ID NO: 64886 - protein, 8 aa, Homo Sapiens
ALIQNKVL

SEQ ID NO: 64887 - protein, 8 aa, Homo Sapiens
ALLIQKAL

SEQ ID NO: 64888 - protein, 8 aa, Homo Sapiens
ALLVKTTL

SEQ ID NO: 64889 - protein, 8 aa, Homo Sapiens
APLLRWVL

SEQ ID NO: 64890 - protein, 8 aa, Homo Sapiens
AQRLKFRL

SEQ ID NO: 64891 - protein, 8 aa, Homo Sapiens
DAFPKRIL

SEQ ID NO: 64892 - protein, 8 aa, Homo Sapiens
DALVHFAL

SEQ ID NO: 64893 - protein, 8 aa, Homo Sapiens
DAQFHFVL

SEQ ID NO: 64894 - protein, 8 aa, Homo Sapiens
DAYIRIVL

SEQ ID NO: 64895 - protein, 8 aa, Homo Sapiens
DFKDKIVL

SEQ ID NO: 64896 - protein, 8 aa, Homo Sapiens
DFLLKPEL

SEQ ID NO: 64897 - protein, 8 aa, Homo Sapiens
DIILKTVL

SEQ ID NO: 64898 - protein, 8 aa, Homo Sapiens
DILLRPEL

SEQ ID NO: 64899 - protein, 8 aa, Homo Sapiens
DILPKKIL

SEQ ID NO: 64900 - protein, 8 aa, Homo Sapiens
DIWKKFEL

SEQ ID NO: 64901 - protein, 8 aa, Homo Sapiens
DLIEKVVI

SEQ ID NO: 64902 - protein, 8 aa, Homo Sapiens
DLLGRFVL

SEQ ID NO: 64903 - protein, 8 aa, Homo Sapiens
DLLKKLEL

SEQ ID NO: 64904 - protein, 8 aa, Homo Sapiens
DLLLHSAL

SEQ ID NO: 64905 - protein, 8 aa, Homo Sapiens
DLLVKYIF

SEQ ID NO: 64906 - protein, 8 aa, Homo Sapiens
DLRIAHML

SEQ ID NO: 64907 - protein, 8 aa, Homo Sapiens
DLRTRVVL

SEQ ID NO: 64908 - protein, 8 aa, Homo Sapiens
DLWTKIIL

SEQ ID NO: 64909 - protein, 8 aa, Homo Sapiens
DLYRKVML

SEQ ID NO: 64910 - protein, 8 aa, Homo Sapiens
DMAPKYIL

SEQ ID NO: 64911 - protein, 8 aa, Homo Sapiens
DMKTKYFF

SEQ ID NO: 64912 - protein, 8 aa, Homo Sapiens
DMLIRQLL

SEQ ID NO: 64913 - protein, 8 aa, Homo Sapiens
DMLLKEYL

SEQ ID NO: 64914 - protein, 8 aa, Homo Sapiens
DVITKFEL

SEQ ID NO: 64915 - protein, 8 aa, Homo Sapiens
EAFAKVDL

SEQ ID NO: 64916 - protein, 8 aa, Homo Sapiens
EAFLKHIL

SEQ ID NO: 64917 - protein, 8 aa, Homo Sapiens
EAFVRAFL

SEQ ID NO: 64918 - protein, 8 aa, Homo Sapiens
EAFVREVL

SEQ ID NO: 64919 - protein, 8 aa, Homo Sapiens
EAFVRHIL

SEQ ID NO: 64920 - protein, 8 aa, Homo Sapiens
EALIRTVF

SEQ ID NO: 64921 - protein, 8 aa, Homo Sapiens
EALKKLIL

SEQ ID NO: 64922 - protein, 8 aa, Homo Sapiens
EALLRYVL

SEQ ID NO: 64923 - protein, 8 aa, Homo Sapiens
EALYKWLL

SEQ ID NO: 64924 - protein, 8 aa, Homo Sapiens
EAYLKAML

SEQ ID NO: 64925 - protein, 8 aa, Homo Sapiens
EGYIKKLL

SEQ ID NO: 64926 - protein, 8 aa, Homo Sapiens
ELLQKIEV

SEQ ID NO: 64927 - protein, 8 aa, Homo Sapiens
ELWQRVSL

SEQ ID NO: 64928 - protein, 8 aa, Homo Sapiens
EMILKVVM

SEQ ID NO: 64929 - protein, 8 aa, Homo Sapiens
EMLIRVNM

SEQ ID NO: 64930 - protein, 8 aa, Homo Sapiens
EPLVRQVL

SEQ ID NO: 64931 - protein, 8 aa, Homo Sapiens
FAKFVVDL

SEQ ID NO: 64932 - protein, 8 aa, Homo Sapiens
FAMIIDKL

SEQ ID NO: 64933 - protein, 8 aa, Homo Sapiens
FAYLRDLL

SEQ ID NO: 64934 - protein, 8 aa, Homo Sapiens
FFYEKAIL

SEQ ID NO: 64935 - protein, 8 aa, Homo Sapiens
FGKEKFEV

SEQ ID NO: 64936 - protein, 8 aa, Homo Sapiens
FGLLKAIL

SEQ ID NO: 64937 - protein, 8 aa, Homo Sapiens
FIKIKMAF

SEQ ID NO: 64938 - protein, 8 aa, Homo Sapiens
FILKKPKL

SEQ ID NO: 64939 - protein, 8 aa, Homo Sapiens
FIYNRVVL

SEQ ID NO: 64940 - protein, 8 aa, Homo Sapiens
FLFPHSVL

SEQ ID NO: 64941 - protein, 8 aa, Homo Sapiens
FLKVSSVF

SEQ ID NO: 64942 - protein, 8 aa, Homo Sapiens
FLPLKTML

SEQ ID NO: 64943 - protein, 8 aa, Homo Sapiens
FLRLITTL

SEQ ID NO: 64944 - protein, 8 aa, Homo Sapiens
FLRYAVVL

SEQ ID NO: 64945 - protein, 8 aa, Homo Sapiens
FLVVRHQL

SEQ ID NO: 64946 - protein, 8 aa, Homo Sapiens
FLWERPTL

SEQ ID NO: 64947 - protein, 8 aa, Homo Sapiens
FLWQHQLL

SEQ ID NO: 64948 - protein, 8 aa, Homo Sapiens
FLWQHVEL

SEQ ID NO: 64949 - protein, 8 aa, Homo Sapiens
FMLKKIVL

SEQ ID NO: 64950 - protein, 8 aa, Homo Sapiens
FNWIKTQL

SEQ ID NO: 64951 - protein, 8 aa, Homo Sapiens
FPDLKERL

SEQ ID NO: 64952 - protein, 8 aa, Homo Sapiens
FPFLKMVL

SEQ ID NO: 64953 - protein, 8 aa, Homo Sapiens
FPFSRPEL

SEQ ID NO: 64954 - protein, 8 aa, Homo Sapiens
FPHIKLTL

SEQ ID NO: 64955 - protein, 8 aa, Homo Sapiens
FPHLTVVL

SEQ ID NO: 64956 - protein, 8 aa, Homo Sapiens
FPIFKACF

SEQ ID NO: 64957 - protein, 8 aa, Homo Sapiens
FPIYKVLF

SEQ ID NO: 64958 - protein, 8 aa, Homo Sapiens
FPKAVSVF

SEQ ID NO: 64959 - protein, 8 aa, Homo Sapiens
FPKEIQML

SEQ ID NO: 64960 - protein, 8 aa, Homo Sapiens
FPLIKEII

SEQ ID NO: 64961 - protein, 8 aa, Homo Sapiens
FPLPHRVL

SEQ ID NO: 64962 - protein, 8 aa, Homo Sapiens
FPLVKSAL

SEQ ID NO: 64963 - protein, 8 aa, Homo Sapiens
FPNLARVL

SEQ ID NO: 64964 - protein, 8 aa, Homo Sapiens
FPPLHYEL

SEQ ID NO: 64965 - protein, 8 aa, Homo Sapiens
FPSIKTEF

SEQ ID NO: 64966 - protein, 8 aa, Homo Sapiens
FQIEHHLF

SEQ ID NO: 64967 - protein, 8 aa, Homo Sapiens
FQKIQVRL

SEQ ID NO: 64968 - protein, 8 aa, Homo Sapiens
FTKVKPLL

SEQ ID NO: 64969 - protein, 8 aa, Homo Sapiens
FVIKKHEL

SEQ ID NO: 64970 - protein, 8 aa, Homo Sapiens
HLFPKLEL

SEQ ID NO: 64971 - protein, 8 aa, Homo Sapiens
HLLIKRSL

SEQ ID NO: 64972 - protein, 8 aa, Homo Sapiens
HNFIKVTL

SEQ ID NO: 64973 - protein, 8 aa, Homo Sapiens
HPHWKVRL

SEQ ID NO: 64974 - protein, 8 aa, Homo Sapiens
HPTLKLIL

SEQ ID NO: 64975 - protein, 8 aa, Homo Sapiens
IAHLRQIL

SEQ ID NO: 64976 - protein, 8 aa, Homo Sapiens
IAKLMVEL

SEQ ID NO: 64977 - protein, 8 aa, Homo Sapiens
IFKDKVVL

SEQ ID NO: 64978 - protein, 8 aa, Homo Sapiens
IIKDKHIL

SEQ ID NO: 64979 - protein, 8 aa, Homo Sapiens
ILKQMQVL

SEQ ID NO: 64980 - protein, 8 aa, Homo Sapiens
IPEIKTIL

SEQ ID NO: 64981 - protein, 8 aa, Homo Sapiens
IPLVKVDM

SEQ ID NO: 64982 - protein, 8 aa, Homo Sapiens
IPMIIHQL

SEQ ID NO: 64983 - protein, 8 aa, Homo Sapiens
IPTLKISL

SEQ ID NO: 64984 - protein, 8 aa, Homo Sapiens
IQNFKRTL

SEQ ID NO: 64985 - protein, 8 aa, Homo Sapiens
ITLNRHVI

SEQ ID NO: 64986 - protein, 8 aa, Homo Sapiens
KPFEKFLL

SEQ ID NO: 64987 - protein, 8 aa, Homo Sapiens
LAIYKQVL

SEQ ID NO: 64988 - protein, 8 aa, Homo Sapiens
LAKLKYQF

SEQ ID NO: 64989 - protein, 8 aa, Homo Sapiens
LALLKVLL

SEQ ID NO: 64990 - protein, 8 aa, Homo Sapiens
LAVLKHVL

SEQ ID NO: 64991 - protein, 8 aa, Homo Sapiens
LFIVKNEL

SEQ ID NO: 64992 - protein, 8 aa, Homo Sapiens
LGHVRYVL

SEQ ID NO: 64993 - protein, 8 aa, Homo Sapiens
LIILKQVM

SEQ ID NO: 64994 - protein, 8 aa, Homo Sapiens
LLHKRVVL

SEQ ID NO: 64995 - protein, 8 aa, Homo Sapiens
LLKSKLYL

SEQ ID NO: 64996 - protein, 8 aa, Homo Sapiens
LLKYKSII

SEQ ID NO: 64997 - protein, 8 aa, Homo Sapiens
LLLKKWSL

SEQ ID NO: 64998 - protein, 8 aa, Homo Sapiens
LPDIREVL

SEQ ID NO: 64999 - protein, 8 aa, Homo Sapiens
LPFKKSLL

SEQ ID NO: 65000 - protein, 8 aa, Homo Sapiens
LPHLRNKL

SEQ ID NO: 65001 - protein, 8 aa, Homo Sapiens
LPHVVPTL

SEQ ID NO: 65002 - protein, 8 aa, Homo Sapiens
LPIVKTEF

SEQ ID NO: 65003 - protein, 8 aa, Homo Sapiens
LPKIKAIP

SEQ ID NO: 65004 - protein, 8 aa, Homo Sapiens
LPKLLVEF

SEQ ID NO: 65005 - protein, 8 aa, Homo Sapiens
LPKLYVKL

SEQ ID NO: 65006 - protein, 8 aa, Homo Sapiens
LPLTHFEL

SEQ ID NO: 65007 - protein, 8 aa, Homo Sapiens
LPLVKPYL

SEQ ID NO: 65008 - protein, 8 aa, Homo Sapiens
LPNIHPEL

SEQ ID NO: 65009 - protein, 8 aa, Homo Sapiens
LPNIQAVL

SEQ ID NO: 65010 - protein, 8 aa, Homo Sapiens
LPTLKPIL

SEQ ID NO: 65011 - protein, 8 aa, Homo Sapiens
LPYIKQEV

SEQ ID NO: 65012 - protein, 8 aa, Homo Sapiens
LPYLKVKL

SEQ ID NO: 65013 - protein, 8 aa, Homo Sapiens
MAFLKTAL

SEQ ID NO: 65014 - protein, 8 aa, Homo Sapiens
MLLCKIML

SEQ ID NO: 65015 - protein, 8 aa, Homo Sapiens
MNKYKVVL

SEQ ID NO: 65016 - protein, 8 aa, Homo Sapiens
MPKVHIEF

SEQ ID NO: 65017 - protein, 8 aa, Homo Sapiens
MPTVHYEF

SEQ ID NO: 65018 - protein, 8 aa, Homo Sapiens
MPVLKVVL

SEQ ID NO: 65019 - protein, 8 aa, Homo Sapiens
NALLRYLL

SEQ ID NO: 65020 - protein, 8 aa, Homo Sapiens
NIKPHWMF

SEQ ID NO: 65021 - protein, 8 aa, Homo Sapiens
NLIKKTVL

SEQ ID NO: 65022 - protein, 8 aa, Homo Sapiens
NLKVKVLF

SEQ ID NO: 65023 - protein, 8 aa, Homo Sapiens
NLLGKFEL

SEQ ID NO: 65024 - protein, 8 aa, Homo Sapiens
NLLLKHLF

SEQ ID NO: 65025 - protein, 8 aa, Homo Sapiens
NPLLRYVF

SEQ ID NO: 65026 - protein, 8 aa, Homo Sapiens
PPFKELLL

SEQ ID NO: 65027 - protein, 8 aa, Homo Sapiens
QAIIKHLL

SEQ ID NO: 65028 - protein, 8 aa, Homo Sapiens
QALLRISL

SEQ ID NO: 65029 - protein, 8 aa, Homo Sapiens
QATLRWLL

SEQ ID NO: 65030 - protein, 8 aa, Homo Sapiens
QFIIKHEL

SEQ ID NO: 65031 - protein, 8 aa, Homo Sapiens
QGYLRSVF

SEQ ID NO: 65032 - protein, 8 aa, Homo Sapiens
QPLLREVL

SEQ ID NO: 65033 - protein, 8 aa, Homo Sapiens
QPYLRELL

SEQ ID NO: 65034 - protein, 8 aa, Homo Sapiens
QPYSRFLL

SEQ ID NO: 65035 - protein, 8 aa, Homo Sapiens
SALIKAEL

SEQ ID NO: 65036 - protein, 8 aa, Homo Sapiens
SLLLKAVV

SEQ ID NO: 65037 - protein, 8 aa, Homo Sapiens
SNKLHFAF

SEQ ID NO: 65038 - protein, 8 aa, Homo Sapiens
SPVFKTVL

SEQ ID NO: 65039 - protein, 8 aa, Homo Sapiens
TAIRHHVL

SEQ ID NO: 65040 - protein, 8 aa, Homo Sapiens
TEKPKFIL

SEQ ID NO: 65041 - protein, 8 aa, Homo Sapiens
TLINHRVL

SEQ ID NO: 65042 - protein, 8 aa, Homo Sapiens
TLLIREIL

SEQ ID NO: 65043 - protein, 8 aa, Homo Sapiens
TPFIRPVM

SEQ ID NO: 65044 - protein, 8 aa, Homo Sapiens
TPFPKNFL

SEQ ID NO: 65045 - protein, 8 aa, Homo Sapiens
TPLKKFLL

SEQ ID NO: 65046 - protein, 8 aa, Homo Sapiens
VLLQKQIL

SEQ ID NO: 65047 - protein, 8 aa, Homo Sapiens
VPFLVSVL

SEQ ID NO: 65048 - protein, 8 aa, Homo Sapiens
VPKTHLEL

SEQ ID NO: 65049 - protein, 8 aa, Homo Sapiens
VPLPKQSL

SEQ ID NO: 65050 - protein, 8 aa, Homo Sapiens
VPSIKFCL

SEQ ID NO: 65051 - protein, 8 aa, Homo Sapiens
VPSPKVVL

SEQ ID NO: 65052 - protein, 8 aa, Homo Sapiens
VPWLKREL

SEQ ID NO: 65053 - protein, 8 aa, Homo Sapiens
VPYFRNIL

SEQ ID NO: 65054 - protein, 8 aa, Homo Sapiens
WIKEKIYV

SEQ ID NO: 65055 - protein, 8 aa, Homo Sapiens
WLTQKQTL

SEQ ID NO: 65056 - protein, 8 aa, Homo Sapiens
WPLLKQVL

SEQ ID NO: 65057 - protein, 8 aa, Homo Sapiens
WPLPKALL

SEQ ID NO: 65058 - protein, 8 aa, Homo Sapiens
YAFLHRTL

SEQ ID NO: 65059 - protein, 8 aa, Homo Sapiens
YAFLREAL

SEQ ID NO: 65060 - protein, 8 aa, Homo Sapiens
YAIIKEEL

SEQ ID NO: 65061 - protein, 8 aa, Homo Sapiens
YAKLIAEL

SEQ ID NO: 65062 - protein, 8 aa, Homo Sapiens
YALPHAIL

SEQ ID NO: 65063 - protein, 8 aa, Homo Sapiens
YFIVKEIL

SEQ ID NO: 65064 - protein, 8 aa, Homo Sapiens
YGMPRQIL

SEQ ID NO: 65065 - protein, 8 aa, Homo Sapiens
YGVLRFIM

SEQ ID NO: 65066 - protein, 8 aa, Homo Sapiens
YIDQKFVL

SEQ ID NO: 65067 - protein, 8 aa, Homo Sapiens
YILPKNVL

SEQ ID NO: 65068 - protein, 8 aa, Homo Sapiens
YIYSKVQL

SEQ ID NO: 65069 - protein, 8 aa, Homo Sapiens
YLFPKFTL

SEQ ID NO: 65070 - protein, 8 aa, Homo Sapiens
YLNYKVCL

SEQ ID NO: 65071 - protein, 8 aa, Homo Sapiens
YLRSVFAL

SEQ ID NO: 65072 - protein, 8 aa, Homo Sapiens
YLWTKQVL

SEQ ID NO: 65073 - protein, 8 aa, Homo Sapiens
YPCSKFII

SEQ ID NO: 65074 - protein, 8 aa, Homo Sapiens
YPFHVPLL

SEQ ID NO: 65075 - protein, 8 aa, Homo Sapiens
YPLWKVTF

SEQ ID NO: 65076 - protein, 8 aa, Homo Sapiens
YPMPRVIF

SEQ ID NO: 65077 - protein, 8 aa, Homo Sapiens
YPWVHVVI

SEQ ID NO: 65078 - protein, 9 aa, Homo Sapiens
AALARLLAA

SEQ ID NO: 65079 - protein, 9 aa, Homo Sapiens
AAMPRIYEL

SEQ ID NO: 65080 - protein, 9 aa, Homo Sapiens
AAYLRALSL

SEQ ID NO: 65081 - protein, 9 aa, Homo Sapiens
AILLKKISL

SEQ ID NO: 65082 - protein, 9 aa, Homo Sapiens
AILRRLVAL

SEQ ID NO: 65083 - protein, 9 aa, Homo Sapiens
ALALRFLAL

SEQ ID NO: 65084 - protein, 9 aa, Homo Sapiens
ALHHRILAL

SEQ ID NO: 65085 - protein, 9 aa, Homo Sapiens
ALKLKQKSL

SEQ ID NO: 65086 - protein, 9 aa, Homo Sapiens
ALLDKLYAL

SEQ ID NO: 65087 - protein, 9 aa, Homo Sapiens
ALLQRLEAL

SEQ ID NO: 65088 - protein, 9 aa, Homo Sapiens
AMLERLLSL

SEQ ID NO: 65089 - protein, 9 aa, Homo Sapiens
ASFIITKAI

SEQ ID NO: 65090 - protein, 9 aa, Homo Sapiens
ASYLRLWAL

SEQ ID NO: 65091 - protein, 9 aa, Homo Sapiens
AVILRALSL

SEQ ID NO: 65092 - protein, 9 aa, Homo Sapiens
CPLLRTLDV

SEQ ID NO: 65093 - protein, 9 aa, Homo Sapiens
CPLPRPWAL

SEQ ID NO: 65094 - protein, 9 aa, Homo Sapiens
DAAIRVWSL

SEQ ID NO: 65095 - protein, 9 aa, Homo Sapiens
DAFVRLIAL

SEQ ID NO: 65096 - protein, 9 aa, Homo Sapiens
DAHIRLWDL

SEQ ID NO: 65097 - protein, 9 aa, Homo Sapiens
DAKIRIFDL

SEQ ID NO: 65098 - protein, 9 aa, Homo Sapiens
DAKQKWLLL

SEQ ID NO: 65099 - protein, 9 aa, Homo Sapiens
DALQRSVQL

SEQ ID NO: 65100 - protein, 9 aa, Homo Sapiens
DATIRIWSV

SEQ ID NO: 65101 - protein, 9 aa, Homo Sapiens
DFKIKTVEL

SEQ ID NO: 65102 - protein, 9 aa, Homo Sapiens
DFKIRTIEL

SEQ ID NO: 65103 - protein, 9 aa, Homo Sapiens
DFKIRTVEI

SEQ ID NO: 65104 - protein, 9 aa, Homo Sapiens
DGLLRVLTV

SEQ ID NO: 65105 - protein, 9 aa, Homo Sapiens
DIHHKVLSL

SEQ ID NO: 65106 - protein, 9 aa, Homo Sapiens
DIIKKPIAL

SEQ ID NO: 65107 - protein, 9 aa, Homo Sapiens
DIITHILAL

SEQ ID NO: 65108 - protein, 9 aa, Homo Sapiens
DIIYKKIAL

SEQ ID NO: 65109 - protein, 9 aa, Homo Sapiens
DIKEKLCYV

SEQ ID NO: 65110 - protein, 9 aa, Homo Sapiens
DIKKILDSV

SEQ ID NO: 65111 - protein, 9 aa, Homo Sapiens
DIKSFITSI

SEQ ID NO: 65112 - protein, 9 aa, Homo Sapiens
DIKSKIRAL

SEQ ID NO: 65113 - protein, 9 aa, Homo Sapiens
DILHRVLCL

SEQ ID NO: 65114 - protein, 9 aa, Homo Sapiens
DILKRLYEL

SEQ ID NO: 65115 - protein, 9 aa, Homo Sapiens
DILNKALEL

SEQ ID NO: 65116 - protein, 9 aa, Homo Sapiens
DILRRVLVL

SEQ ID NO: 65117 - protein, 9 aa, Homo Sapiens
DILSRIHTI

SEQ ID NO: 65118 - protein, 9 aa, Homo Sapiens
DINVRWLAV

SEQ ID NO: 65119 - protein, 9 aa, Homo Sapiens
DIWVKSYSL

SEQ ID NO: 65120 - protein, 9 aa, Homo Sapiens
DIYQRALNL

SEQ ID NO: 65121 - protein, 9 aa, Homo Sapiens
DLFRKALEL

SEQ ID NO: 65122 - protein, 9 aa, Homo Sapiens
DLHEKDFSL

SEQ ID NO: 65123 - protein, 9 aa, Homo Sapiens
DLIGKLTSL

SEQ ID NO: 65124 - protein, 9 aa, Homo Sapiens
DLIIKGISV

SEQ ID NO: 65125 - protein, 9 aa, Homo Sapiens
DLILKWLTL

SEQ ID NO: 65126 - protein, 9 aa, Homo Sapiens
DLIMKVENL

SEQ ID NO: 65127 - protein, 9 aa, Homo Sapiens
DLISRDYSL

SEQ ID NO: 65128 - protein, 9 aa, Homo Sapiens
DLITRQKQL

SEQ ID NO: 65129 - protein, 9 aa, Homo Sapiens
DLKAQILEL

SEQ ID NO: 65130 - protein, 9 aa, Homo Sapiens
DLKAQLREL

SEQ ID NO: 65131 - protein, 9 aa, Homo Sapiens
DLKIKRSKL

SEQ ID NO: 65132 - protein, 9 aa, Homo Sapiens
DLKLRKFVF

SEQ ID NO: 65133 - protein, 9 aa, Homo Sapiens
DLKPKVYNL

SEQ ID NO: 65134 - protein, 9 aa, Homo Sapiens
DLKPRNIFL

SEQ ID NO: 65135 - protein, 9 aa, Homo Sapiens
DLKQKVENL

SEQ ID NO: 65136 - protein, 9 aa, Homo Sapiens
DLKQLQESL

SEQ ID NO: 65137 - protein, 9 aa, Homo Sapiens
DLKTKVLVL

SEQ ID NO: 65138 - protein, 9 aa, Homo Sapiens
DLKVKLTEV

SEQ ID NO: 65139 - protein, 9 aa, Homo Sapiens
DLLARIETL

SEQ ID NO: 65140 - protein, 9 aa, Homo Sapiens
DLLEKSFSL

SEQ ID NO: 65141 - protein, 9 aa, Homo Sapiens
DLLIRAVEA

SEQ ID NO: 65142 - protein, 9 aa, Homo Sapiens
DLLKRILKM

SEQ ID NO: 65143 - protein, 9 aa, Homo Sapiens
DLLKRLEAA

SEQ ID NO: 65144 - protein, 9 aa, Homo Sapiens
DLLLRIREL

SEQ ID NO: 65145 - protein, 9 aa, Homo Sapiens
DLLQRLDAL

SEQ ID NO: 65146 - protein, 9 aa, Homo Sapiens
DLLRKVGAL

SEQ ID NO: 65147 - protein, 9 aa, Homo Sapiens
DLMIRLLEL

SEQ ID NO: 65148 - protein, 9 aa, Homo Sapiens
DLNIRVERL

SEQ ID NO: 65149 - protein, 9 aa, Homo Sapiens
DLNYRWVSL

SEQ ID NO: 65150 - protein, 9 aa, Homo Sapiens
DLQARITSL

SEQ ID NO: 65151 - protein, 9 aa, Homo Sapiens
DLQKRLLAL

SEQ ID NO: 65152 - protein, 9 aa, Homo Sapiens
DLRTKGFSL

SEQ ID NO: 65153 - protein, 9 aa, Homo Sapiens
DLYTRFDTL

SEQ ID NO: 65154 - protein, 9 aa, Homo Sapiens
DMALKSLSL

SEQ ID NO: 65155 - protein, 9 aa, Homo Sapiens
DMFYRNWAL

SEQ ID NO: 65156 - protein, 9 aa, Homo Sapiens
DMIKRALDF

SEQ ID NO: 65157 - protein, 9 aa, Homo Sapiens
DMKIKVTDL

SEQ ID NO: 65158 - protein, 9 aa, Homo Sapiens
DMKIRLFTS

SEQ ID NO: 65159 - protein, 9 aa, Homo Sapiens
DMKTKYFFF

SEQ ID NO: 65160 - protein, 9 aa, Homo Sapiens
DMLLKEYLL

SEQ ID NO: 65161 - protein, 9 aa, Homo Sapiens
DMLLKIKAV

SEQ ID NO: 65162 - protein, 9 aa, Homo Sapiens
DMLVKVNAL

SEQ ID NO: 65163 - protein, 9 aa, Homo Sapiens
DNMPRILSL

SEQ ID NO: 65164 - protein, 9 aa, Homo Sapiens
DPPLKFMSV

SEQ ID NO: 65165 - protein, 9 aa, Homo Sapiens
DPYLKPYAV

SEQ ID NO: 65166 - protein, 9 aa, Homo Sapiens
DQFQKVLSL

SEQ ID NO: 65167 - protein, 9 aa, Homo Sapiens
DSIIRIWSV

SEQ ID NO: 65168 - protein, 9 aa, Homo Sapiens
DVKLKFEEI

SEQ ID NO: 65169 - protein, 9 aa, Homo Sapiens
DVQLRLNSI

SEQ ID NO: 65170 - protein, 9 aa, Homo Sapiens
EAHLKFLAF

SEQ ID NO: 65171 - protein, 9 aa, Homo Sapiens
EALAKLISL

SEQ ID NO: 65172 - protein, 9 aa, Homo Sapiens
EALQRLVNL

SEQ ID NO: 65173 - protein, 9 aa, Homo Sapiens
EALVRTVAL

SEQ ID NO: 65174 - protein, 9 aa, Homo Sapiens
EAQLRQFTL

SEQ ID NO: 65175 - protein, 9 aa, Homo Sapiens
EARPRPLSL

SEQ ID NO: 65176 - protein, 9 aa, Homo Sapiens
EATLRCWAL

SEQ ID NO: 65177 - protein, 9 aa, Homo Sapiens
EGFLKAQAL

SEQ ID NO: 65178 - protein, 9 aa, Homo Sapiens
EGKLRLVEI

SEQ ID NO: 65179 - protein, 9 aa, Homo Sapiens
EGLPKPLTL

SEQ ID NO: 65180 - protein, 9 aa, Homo Sapiens
EIIHRYVEL

SEQ ID NO: 65181 - protein, 9 aa, Homo Sapiens
EIILRQEVL

SEQ ID NO: 65182 - protein, 9 aa, Homo Sapiens
EIKEKLLQL

SEQ ID NO: 65183 - protein, 9 aa, Homo Sapiens
EIKFKVETL

SEQ ID NO: 65184 - protein, 9 aa, Homo Sapiens
EIKLRLLDL

SEQ ID NO: 65185 - protein, 9 aa, Homo Sapiens
EIKTKIKEL

SEQ ID NO: 65186 - protein, 9 aa, Homo Sapiens
EIKVKLIEA

SEQ ID NO: 65187 - protein, 9 aa, Homo Sapiens
EILLRKLPF

SEQ ID NO: 65188 - protein, 9 aa, Homo Sapiens
EILLRVLTL

SEQ ID NO: 65189 - protein, 9 aa, Homo Sapiens
EIRKVVQSL

SEQ ID NO: 65190 - protein, 9 aa, Homo Sapiens
EIRLKIVGT

SEQ ID NO: 65191 - protein, 9 aa, Homo Sapiens
ELDVRITAL

SEQ ID NO: 65192 - protein, 9 aa, Homo Sapiens
ELFLRFISL

SEQ ID NO: 65193 - protein, 9 aa, Homo Sapiens
ELFLRGPAL

SEQ ID NO: 65194 - protein, 9 aa, Homo Sapiens
ELFLRRISL

SEQ ID NO: 65195 - protein, 9 aa, Homo Sapiens
ELFPRYTSL

SEQ ID NO: 65196 - protein, 9 aa, Homo Sapiens
ELITKAVAA

SEQ ID NO: 65197 - protein, 9 aa, Homo Sapiens
ELKIKRSLF

SEQ ID NO: 65198 - protein, 9 aa, Homo Sapiens
ELKLKEIQL

SEQ ID NO: 65199 - protein, 9 aa, Homo Sapiens
ELKLSIICL

SEQ ID NO: 65200 - protein, 9 aa, Homo Sapiens
ELKQRFSVF

SEQ ID NO: 65201 - protein, 9 aa, Homo Sapiens
ELLFRPTAL

SEQ ID NO: 65202 - protein, 9 aa, Homo Sapiens
ELLKKLVGL

SEQ ID NO: 65203 - protein, 9 aa, Homo Sapiens
ELLQKVITL

SEQ ID NO: 65204 - protein, 9 aa, Homo Sapiens
ELLTKALHL

SEQ ID NO: 65205 - protein, 9 aa, Homo Sapiens
ELLTKTYVL

SEQ ID NO: 65206 - protein, 9 aa, Homo Sapiens
ELNPKILAL

SEQ ID NO: 65207 - protein, 9 aa, Homo Sapiens
ELQEKFLSL

SEQ ID NO: 65208 - protein, 9 aa, Homo Sapiens
ELQLRLLAL

SEQ ID NO: 65209 - protein, 9 aa, Homo Sapiens
ELQSRLAAL

SEQ ID NO: 65210 - protein, 9 aa, Homo Sapiens
ELRLKPQLL

SEQ ID NO: 65211 - protein, 9 aa, Homo Sapiens
ELRLKYYGL

SEQ ID NO: 65212 - protein, 9 aa, Homo Sapiens
ELRPLPVSV

SEQ ID NO: 65213 - protein, 9 aa, Homo Sapiens
ELRVKELEV

SEQ ID NO: 65214 - protein, 9 aa, Homo Sapiens
ELWKKVETL

SEQ ID NO: 65215 - protein, 9 aa, Homo Sapiens
ELYQRIYAF

SEQ ID NO: 65216 - protein, 9 aa, Homo Sapiens
EMKLRLLDL

SEQ ID NO: 65217 - protein, 9 aa, Homo Sapiens
EMLKKFLSF

SEQ ID NO: 65218 - protein, 9 aa, Homo Sapiens
EQKLRVELL

SEQ ID NO: 65219 - protein, 9 aa, Homo Sapiens
ERPIRIVAL

SEQ ID NO: 65220 - protein, 9 aa, Homo Sapiens
ETLLRVMTL

SEQ ID NO: 65221 - protein, 9 aa, Homo Sapiens
EVILRAEAV

SEQ ID NO: 65222 - protein, 9 aa, Homo Sapiens
EVISKLYAV

SEQ ID NO: 65223 - protein, 9 aa, Homo Sapiens
EVKTKLFSL

SEQ ID NO: 65224 - protein, 9 aa, Homo Sapiens
EVLQRIESL

SEQ ID NO: 65225 - protein, 9 aa, Homo Sapiens
EVYLKPYFL

SEQ ID NO: 65226 - protein, 9 aa, Homo Sapiens
FAHLRLEVL

SEQ ID NO: 65227 - protein, 9 aa, Homo Sapiens
FAKIYADTF

SEQ ID NO: 65228 - protein, 9 aa, Homo Sapiens
FAKLRELLL

SEQ ID NO: 65229 - protein, 9 aa, Homo Sapiens
FAKVHILYV

SEQ ID NO: 65230 - protein, 9 aa, Homo Sapiens
FALGKILSV

SEQ ID NO: 65231 - protein, 9 aa, Homo Sapiens
FANLKYVSL

SEQ ID NO: 65232 - protein, 9 aa, Homo Sapiens
FFKERVMEI

SEQ ID NO: 65233 - protein, 9 aa, Homo Sapiens
FFMERSWSV

SEQ ID NO: 65234 - protein, 9 aa, Homo Sapiens
FFMLRSLSL

SEQ ID NO: 65235 - protein, 9 aa, Homo Sapiens
FGFERLEVL

SEQ ID NO: 65236 - protein, 9 aa, Homo Sapiens
FGKLRNIEL

SEQ ID NO: 65237 - protein, 9 aa, Homo Sapiens
FGLARAFGV

SEQ ID NO: 65238 - protein, 9 aa, Homo Sapiens
FGLARAFSL

SEQ ID NO: 65239 - protein, 9 aa, Homo Sapiens
FGLARIYSF

SEQ ID NO: 65240 - protein, 9 aa, Homo Sapiens
FGLPRWVTL

SEQ ID NO: 65241 - protein, 9 aa, Homo Sapiens
FIAQKILAL

SEQ ID NO: 65242 - protein, 9 aa, Homo Sapiens
FIFLRLNVL

SEQ ID NO: 65243 - protein, 9 aa, Homo Sapiens
FIFQKVGKL

SEQ ID NO: 65244 - protein, 9 aa, Homo Sapiens
FIHQHFVEV

SEQ ID NO: 65245 - protein, 9 aa, Homo Sapiens
FIISRTQAL

SEQ ID NO: 65246 - protein, 9 aa, Homo Sapiens
FIKRVYVSL

SEQ ID NO: 65247 - protein, 9 aa, Homo Sapiens
FILERRMTL

SEQ ID NO: 65248 - protein, 9 aa, Homo Sapiens
FILERRSLL

SEQ ID NO: 65249 - protein, 9 aa, Homo Sapiens
FILKKLDSI

SEQ ID NO: 65250 - protein, 9 aa, Homo Sapiens
FILPKEIAV

SEQ ID NO: 65251 - protein, 9 aa, Homo Sapiens
FINARNWTL

SEQ ID NO: 65252 - protein, 9 aa, Homo Sapiens
FLAPRLLSL

SEQ ID NO: 65253 - protein, 9 aa, Homo Sapiens
FLAQRAVEL

SEQ ID NO: 65254 - protein, 9 aa, Homo Sapiens
FLEEREIAL

SEQ ID NO: 65255 - protein, 9 aa, Homo Sapiens
FLFSKFIEL

SEQ ID NO: 65256 - protein, 9 aa, Homo Sapiens
FLHIKETVL

SEQ ID NO: 65257 - protein, 9 aa, Homo Sapiens
FLISRLIKL

SEQ ID NO: 65258 - protein, 9 aa, Homo Sapiens
FLKEIVETF

SEQ ID NO: 65259 - protein, 9 aa, Homo Sapiens
FLKIKPVSL

SEQ ID NO: 65260 - protein, 9 aa, Homo Sapiens
FLKQRPTKL

SEQ ID NO: 65261 - protein, 9 aa, Homo Sapiens
FLLDKKIGV

SEQ ID NO: 65262 - protein, 9 aa, Homo Sapiens
FLLEKGYEV

SEQ ID NO: 65263 - protein, 9 aa, Homo Sapiens
FLLEKPFSV

SEQ ID NO: 65264 - protein, 9 aa, Homo Sapiens
FLLGKEVSL

SEQ ID NO: 65265 - protein, 9 aa, Homo Sapiens
FLLPKVQSI

SEQ ID NO: 65266 - protein, 9 aa, Homo Sapiens
FLLQRVHSL

SEQ ID NO: 65267 - protein, 9 aa, Homo Sapiens
FLLRRLVTL

SEQ ID NO: 65268 - protein, 9 aa, Homo Sapiens
FLRELVITI

SEQ ID NO: 65269 - protein, 9 aa, Homo Sapiens
FLREWVESM

SEQ ID NO: 65270 - protein, 9 aa, Homo Sapiens
FLREYFERL

SEQ ID NO: 65271 - protein, 9 aa, Homo Sapiens
FLRLKLNNL

SEQ ID NO: 65272 - protein, 9 aa, Homo Sapiens
FLRTREPAL

SEQ ID NO: 65273 - protein, 9 aa, Homo Sapiens
FLYIRQLAI

SEQ ID NO: 65274 - protein, 9 aa, Homo Sapiens
FLYPFPLAL

SEQ ID NO: 65275 - protein, 9 aa, Homo Sapiens
FMKPGKVVL

SEQ ID NO: 65276 - protein, 9 aa, Homo Sapiens
FMNPHLISV

SEQ ID NO: 65277 - protein, 9 aa, Homo Sapiens
FNFLRNVSL

SEQ ID NO: 65278 - protein, 9 aa, Homo Sapiens
FNRPRIETL

SEQ ID NO: 65279 - protein, 9 aa, Homo Sapiens
FNWGRVVAL

SEQ ID NO: 65280 - protein, 9 aa, Homo Sapiens
FPFERLYDL

SEQ ID NO: 65281 - protein, 9 aa, Homo Sapiens
FPGRNKFFC

SEQ ID NO: 65282 - protein, 9 aa, Homo Sapiens
FPHLREEIL

SEQ ID NO: 65283 - protein, 9 aa, Homo Sapiens
FPHLRVLEA

SEQ ID NO: 65284 - protein, 9 aa, Homo Sapiens
FPHPKYVDL

SEQ ID NO: 65285 - protein, 9 aa, Homo Sapiens
FPKWKPGSL

SEQ ID NO: 65286 - protein, 9 aa, Homo Sapiens
FPKWSVISL

SEQ ID NO: 65287 - protein, 9 aa, Homo Sapiens
FPLNKLTEL

SEQ ID NO: 65288 - protein, 9 aa, Homo Sapiens
FPMAKLLYL

SEQ ID NO: 65289 - protein, 9 aa, Homo Sapiens
FPPKKLFSL

SEQ ID NO: 65290 - protein, 9 aa, Homo Sapiens
FPVCPKLSL

SEQ ID NO: 65291 - protein, 9 aa, Homo Sapiens
FPWEKPTTL

SEQ ID NO: 65292 - protein, 9 aa, Homo Sapiens
FQKVKEWSL

SEQ ID NO: 65293 - protein, 9 aa, Homo Sapiens
FQMKKVLCL

SEQ ID NO: 65294 - protein, 9 aa, Homo Sapiens
FSFVRVISL

SEQ ID NO: 65295 - protein, 9 aa, Homo Sapiens
FSKMKALAV

SEQ ID NO: 65296 - protein, 9 aa, Homo Sapiens
FTIFRTISV

SEQ ID NO: 65297 - protein, 9 aa, Homo Sapiens
FVKILIVEI

SEQ ID NO: 65298 - protein, 9 aa, Homo Sapiens
FVKLRIDLL

SEQ ID NO: 65299 - protein, 9 aa, Homo Sapiens
FVKTKVWSL

SEQ ID NO: 65300 - protein, 9 aa, Homo Sapiens
FVLQRLVFL

SEQ ID NO: 65301 - protein, 9 aa, Homo Sapiens
FVMLRVFQL

SEQ ID NO: 65302 - protein, 9 aa, Homo Sapiens
FVQPRLESL

SEQ ID NO: 65303 - protein, 9 aa, Homo Sapiens
GLCERLVSL

SEQ ID NO: 65304 - protein, 9 aa, Homo Sapiens
GLKVREYEL

SEQ ID NO: 65305 - protein, 9 aa, Homo Sapiens
HAIQKLYSL

SEQ ID NO: 65306 - protein, 9 aa, Homo Sapiens
HALERLFTM

SEQ ID NO: 65307 - protein, 9 aa, Homo Sapiens
HFLQKLYSL

SEQ ID NO: 65308 - protein, 9 aa, Homo Sapiens
HLAVKHFSV

SEQ ID NO: 65309 - protein, 9 aa, Homo Sapiens
HLEIKVLCL

SEQ ID NO: 65310 - protein, 9 aa, Homo Sapiens
HLFQRLAAL

SEQ ID NO: 65311 - protein, 9 aa, Homo Sapiens
HLILRAEGL

SEQ ID NO: 65312 - protein, 9 aa, Homo Sapiens
HLKALTSEL

SEQ ID NO: 65313 - protein, 9 aa, Homo Sapiens
HLKPISREL

SEQ ID NO: 65314 - protein, 9 aa, Homo Sapiens
HLKQHYIDL

SEQ ID NO: 65315 - protein, 9 aa, Homo Sapiens
HLVQKPFSL

SEQ ID NO: 65316 - protein, 9 aa, Homo Sapiens
HLYARQLTL

SEQ ID NO: 65317 - protein, 9 aa, Homo Sapiens
HPYNKLWSL

SEQ ID NO: 65318 - protein, 9 aa, Homo Sapiens
HVITKTMEL

SEQ ID NO: 65319 - protein, 9 aa, Homo Sapiens
HVNIRLVEL

SEQ ID NO: 65320 - protein, 9 aa, Homo Sapiens
IFKSRLVEL

SEQ ID NO: 65321 - protein, 9 aa, Homo Sapiens
IGKMRYVSV

SEQ ID NO: 65322 - protein, 9 aa, Homo Sapiens
ILAIRQNAL

SEQ ID NO: 65323 - protein, 9 aa, Homo Sapiens
ILILRALHV

SEQ ID NO: 65324 - protein, 9 aa, Homo Sapiens
ILIRKVSSL

SEQ ID NO: 65325 - protein, 9 aa, Homo Sapiens
ILKEKWSAL

SEQ ID NO: 65326 - protein, 9 aa, Homo Sapiens
ILKKVLEAL

SEQ ID NO: 65327 - protein, 9 aa, Homo Sapiens
ILLEKILSL

SEQ ID NO: 65328 - protein, 9 aa, Homo Sapiens
ILRAILLSL

SEQ ID NO: 65329 - protein, 9 aa, Homo Sapiens
IPALRDISI

SEQ ID NO: 65330 - protein, 9 aa, Homo Sapiens
IPKSKFLAL

SEQ ID NO: 65331 - protein, 9 aa, Homo Sapiens
IPLAKRVAL

SEQ ID NO: 65332 - protein, 9 aa, Homo Sapiens
IPLHVFVLL

SEQ ID NO: 65333 - protein, 9 aa, Homo Sapiens
IPNEIIHAL

SEQ ID NO: 65334 - protein, 9 aa, Homo Sapiens
IPNVRIQAV

SEQ ID NO: 65335 - protein, 9 aa, Homo Sapiens
IPQLRVSSV

SEQ ID NO: 65336 - protein, 9 aa, Homo Sapiens
IPQVKYICL

SEQ ID NO: 65337 - protein, 9 aa, Homo Sapiens
ISPKVKMAL

SEQ ID NO: 65338 - protein, 9 aa, Homo Sapiens
LAAARLAAA

SEQ ID NO: 65339 - protein, 9 aa, Homo Sapiens
LAMLRSLDL

SEQ ID NO: 65340 - protein, 9 aa, Homo Sapiens
LFNKQLESI

SEQ ID NO: 65341 - protein, 9 aa, Homo Sapiens
LFRDKVVAL

SEQ ID NO: 65342 - protein, 9 aa, Homo Sapiens
LGKERFLEL

SEQ ID NO: 65343 - protein, 9 aa, Homo Sapiens
LIRIKPLKL

SEQ ID NO: 65344 - protein, 9 aa, Homo Sapiens
LLFKKVKAL

SEQ ID NO: 65345 - protein, 9 aa, Homo Sapiens
LLFLRASEL

SEQ ID NO: 65346 - protein, 9 aa, Homo Sapiens
LLILRPEEL

SEQ ID NO: 65347 - protein, 9 aa, Homo Sapiens
LLKEHYVDL

SEQ ID NO: 65348 - protein, 9 aa, Homo Sapiens
LLKIKDTVL

SEQ ID NO: 65349 - protein, 9 aa, Homo Sapiens
LLKSKLLVL

SEQ ID NO: 65350 - protein, 9 aa, Homo Sapiens
LLLDKKYAL

SEQ ID NO: 65351 - protein, 9 aa, Homo Sapiens
LLLERAKEL

SEQ ID NO: 65352 - protein, 9 aa, Homo Sapiens
LLNQKPLSL

SEQ ID NO: 65353 - protein, 9 aa, Homo Sapiens
LLQIRAEAL

SEQ ID NO: 65354 - protein, 9 aa, Homo Sapiens
LLQLKVKCL

SEQ ID NO: 65355 - protein, 9 aa, Homo Sapiens
LLRAHVICL

SEQ ID NO: 65356 - protein, 9 aa, Homo Sapiens
LLREKVEFL

SEQ ID NO: 65357 - protein, 9 aa, Homo Sapiens
LLRIKINEL

SEQ ID NO: 65358 - protein, 9 aa, Homo Sapiens
LLRLFKTAL

SEQ ID NO: 65359 - protein, 9 aa, Homo Sapiens
LLTLKLVSL

SEQ ID NO: 65360 - protein, 9 aa, Homo Sapiens
LLYEKGISL

SEQ ID NO: 65361 - protein, 9 aa, Homo Sapiens
LPALRSIGL

SEQ ID NO: 65362 - protein, 9 aa, Homo Sapiens
LPDERTISL

SEQ ID NO: 65363 - protein, 9 aa, Homo Sapiens
LPDIKVLTL

SEQ ID NO: 65364 - protein, 9 aa, Homo Sapiens
LPFLRITSL

SEQ ID NO: 65365 - protein, 9 aa, Homo Sapiens
LPHHRVIEV

SEQ ID NO: 65366 - protein, 9 aa, Homo Sapiens
LPHNRLVSL

SEQ ID NO: 65367 - protein, 9 aa, Homo Sapiens
LPIKESEII

SEQ ID NO: 65368 - protein, 9 aa, Homo Sapiens
LPKLHIVQV

SEQ ID NO: 65369 - protein, 9 aa, Homo Sapiens
LPLEKVYSL

SEQ ID NO: 65370 - protein, 9 aa, Homo Sapiens
LPLHKVKSL

SEQ ID NO: 65371 - protein, 9 aa, Homo Sapiens
LPLLRVLSI

SEQ ID NO: 65372 - protein, 9 aa, Homo Sapiens
LPLMKFLEV

SEQ ID NO: 65373 - protein, 9 aa, Homo Sapiens
LPQIKIISA

SEQ ID NO: 65374 - protein, 9 aa, Homo Sapiens
LPQYRLISI

SEQ ID NO: 65375 - protein, 9 aa, Homo Sapiens
LPRVRLLPL

SEQ ID NO: 65376 - protein, 9 aa, Homo Sapiens
LPSLKVSCL

SEQ ID NO: 65377 - protein, 9 aa, Homo Sapiens
LPSRKLVAL

SEQ ID NO: 65378 - protein, 9 aa, Homo Sapiens
LPWKRIVAV

SEQ ID NO: 65379 - protein, 9 aa, Homo Sapiens
LQIQRNVTL

SEQ ID NO: 65380 - protein, 9 aa, Homo Sapiens
LQLLQRATL

SEQ ID NO: 65381 - protein, 9 aa, Homo Sapiens
MALVRFVNL

SEQ ID NO: 65382 - protein, 9 aa, Homo Sapiens
MAPLKMLAL

SEQ ID NO: 65383 - protein, 9 aa, Homo Sapiens
MFHIRAVIL

SEQ ID NO: 65384 - protein, 9 aa, Homo Sapiens
MIIIVGTRI

SEQ ID NO: 65385 - protein, 9 aa, Homo Sapiens
MIKEKLCYV

SEQ ID NO: 65386 - protein, 9 aa, Homo Sapiens
MIKPRIVLL

SEQ ID NO: 65387 - protein, 9 aa, Homo Sapiens
MLAARLVCL

SEQ ID NO: 65388 - protein, 9 aa, Homo Sapiens
MLATRVFSL

SEQ ID NO: 65389 - protein, 9 aa, Homo Sapiens
MLLSKINSL

SEQ ID NO: 65390 - protein, 9 aa, Homo Sapiens
MLYPKLISL

SEQ ID NO: 65391 - protein, 9 aa, Homo Sapiens
MMKLIINSL

SEQ ID NO: 65392 - protein, 9 aa, Homo Sapiens
MNILRFLAL

SEQ ID NO: 65393 - protein, 9 aa, Homo Sapiens
MPALRSINL

SEQ ID NO: 65394 - protein, 9 aa, Homo Sapiens
MPAVKAIIY

SEQ ID NO: 65395 - protein, 9 aa, Homo Sapiens
MPGTRFIAF

SEQ ID NO: 65396 - protein, 9 aa, Homo Sapiens
MPSSRLWSL

SEQ ID NO: 65397 - protein, 9 aa, Homo Sapiens
MPTMRLLSF

SEQ ID NO: 65398 - protein, 9 aa, Homo Sapiens
MVLLRKLCL

SEQ ID NO: 65399 - protein, 9 aa, Homo Sapiens
NFIEKVEAL

SEQ ID NO: 65400 - protein, 9 aa, Homo Sapiens
NGYKRVLAL

SEQ ID NO: 65401 - protein, 9 aa, Homo Sapiens
NIKEKLFSL

SEQ ID NO: 65402 - protein, 9 aa, Homo Sapiens
NILDRFLAL

SEQ ID NO: 65403 - protein, 9 aa, Homo Sapiens
NIWIRVASL

SEQ ID NO: 65404 - protein, 9 aa, Homo Sapiens
NLAERIKSL

SEQ ID NO: 65405 - protein, 9 aa, Homo Sapiens
NLFTRPEVL

SEQ ID NO: 65406 - protein, 9 aa, Homo Sapiens
NLHLKFLAL

SEQ ID NO: 65407 - protein, 9 aa, Homo Sapiens
NLKAHVVAV

SEQ ID NO: 65408 - protein, 9 aa, Homo Sapiens
NLKEKIKEL

SEQ ID NO: 65409 - protein, 9 aa, Homo Sapiens
NLKIKWENL

SEQ ID NO: 65410 - protein, 9 aa, Homo Sapiens
NLKLKLHSF

SEQ ID NO: 65411 - protein, 9 aa, Homo Sapiens
NLKLKLHTF

SEQ ID NO: 65412 - protein, 9 aa, Homo Sapiens
NLKLKLTAV

SEQ ID NO: 65413 - protein, 9 aa, Homo Sapiens
NLKLRIYFL

SEQ ID NO: 65414 - protein, 9 aa, Homo Sapiens
NLKSKYFAV

SEQ ID NO: 65415 - protein, 9 aa, Homo Sapiens
NLLKRFLVL

SEQ ID NO: 65416 - protein, 9 aa, Homo Sapiens
NLLPRLAAF

SEQ ID NO: 65417 - protein, 9 aa, Homo Sapiens
NLYRKFWSL

SEQ ID NO: 65418 - protein, 9 aa, Homo Sapiens
NPIWRVISL

SEQ ID NO: 65419 - protein, 9 aa, Homo Sapiens
NPLLRVINL

SEQ ID NO: 65420 - protein, 9 aa, Homo Sapiens
NPYSRLMAL

SEQ ID NO: 65421 - protein, 9 aa, Homo Sapiens
PIATRIFDI

SEQ ID NO: 65422 - protein, 9 aa, Homo Sapiens
QAITRVIPL

SEQ ID NO: 65423 - protein, 9 aa, Homo Sapiens
QANIRLTSL

SEQ ID NO: 65424 - protein, 9 aa, Homo Sapiens
QAWLRLTSL

SEQ ID NO: 65425 - protein, 9 aa, Homo Sapiens
QGFFRSISL

SEQ ID NO: 65426 - protein, 9 aa, Homo Sapiens
QILPKIKAI

SEQ ID NO: 65427 - protein, 9 aa, Homo Sapiens
QIVERLFSL

SEQ ID NO: 65428 - protein, 9 aa, Homo Sapiens
QLELRVEAL

SEQ ID NO: 65429 - protein, 9 aa, Homo Sapiens
QLFQRPNAL

SEQ ID NO: 65430 - protein, 9 aa, Homo Sapiens
QLFQRTNAL

SEQ ID NO: 65431 - protein, 9 aa, Homo Sapiens
QLFVRAQEL

SEQ ID NO: 65432 - protein, 9 aa, Homo Sapiens
QLFVRLLAL

SEQ ID NO: 65433 - protein, 9 aa, Homo Sapiens
QLHIKVTSL

SEQ ID NO: 65434 - protein, 9 aa, Homo Sapiens
QLIEKRLNL

SEQ ID NO: 65435 - protein, 9 aa, Homo Sapiens
QLIQKFISV

SEQ ID NO: 65436 - protein, 9 aa, Homo Sapiens
QLLEKVIEL

SEQ ID NO: 65437 - protein, 9 aa, Homo Sapiens
QLLLKALTL

SEQ ID NO: 65438 - protein, 9 aa, Homo Sapiens
QLLLKKMYL

SEQ ID NO: 65439 - protein, 9 aa, Homo Sapiens
QLSLRTVSL

SEQ ID NO: 65440 - protein, 9 aa, Homo Sapiens
QLYLKLWNL

SEQ ID NO: 65441 - protein, 9 aa, Homo Sapiens
QLYRKYLEL

SEQ ID NO: 65442 - protein, 9 aa, Homo Sapiens
QNLVKIMSL

SEQ ID NO: 65443 - protein, 9 aa, Homo Sapiens
QNMIKGVTL

SEQ ID NO: 65444 - protein, 9 aa, Homo Sapiens
QPIIRIQSI

SEQ ID NO: 65445 - protein, 9 aa, Homo Sapiens
QPILRFLQL

SEQ ID NO: 65446 - protein, 9 aa, Homo Sapiens
QSLERVYSL

SEQ ID NO: 65447 - protein, 9 aa, Homo Sapiens
QSMIRILGL

SEQ ID NO: 65448 - protein, 9 aa, Homo Sapiens
QVIIRVLEL

SEQ ID NO: 65449 - protein, 9 aa, Homo Sapiens
QVLLRCLTL

SEQ ID NO: 65450 - protein, 9 aa, Homo Sapiens
QYHIKPLSL

SEQ ID NO: 65451 - protein, 9 aa, Homo Sapiens
RPKIKVSLI

SEQ ID NO: 65452 - protein, 9 aa, Homo Sapiens
RPKYQFLSL

SEQ ID NO: 65453 - protein, 9 aa, Homo Sapiens
RPWLRPAAL

SEQ ID NO: 65454 - protein, 9 aa, Homo Sapiens
SAFLKTIAL

SEQ ID NO: 65455 - protein, 9 aa, Homo Sapiens
SAGLRVLAL

SEQ ID NO: 65456 - protein, 9 aa, Homo Sapiens
SALERLTTL

SEQ ID NO: 65457 - protein, 9 aa, Homo Sapiens
SAMVRVISV

SEQ ID NO: 65458 - protein, 9 aa, Homo Sapiens
SIIQRLLEV

SEQ ID NO: 65459 - protein, 9 aa, Homo Sapiens
SIKKLITSM

SEQ ID NO: 65460 - protein, 9 aa, Homo Sapiens
SILQRPLSL

SEQ ID NO: 65461 - protein, 9 aa, Homo Sapiens
SKRYLFISI

SEQ ID NO: 65462 - protein, 9 aa, Homo Sapiens
SLAVRVNSL

SEQ ID NO: 65463 - protein, 9 aa, Homo Sapiens
SLFKRLYSL

SEQ ID NO: 65464 - protein, 9 aa, Homo Sapiens
SLITRLLEV

SEQ ID NO: 65465 - protein, 9 aa, Homo Sapiens
SLKERFAFL

SEQ ID NO: 65466 - protein, 9 aa, Homo Sapiens
SLKLKWLAL

SEQ ID NO: 65467 - protein, 9 aa, Homo Sapiens
SLLEKLSAL

SEQ ID NO: 65468 - protein, 9 aa, Homo Sapiens
SMLNRILAV

SEQ ID NO: 65469 - protein, 9 aa, Homo Sapiens
SMLQRVLHL

SEQ ID NO: 65470 - protein, 9 aa, Homo Sapiens
SNKVRILEL

SEQ ID NO: 65471 - protein, 9 aa, Homo Sapiens
SPLTKSISL

SEQ ID NO: 65472 - protein, 9 aa, Homo Sapiens
SPYLRPLTL

SEQ ID NO: 65473 - protein, 9 aa, Homo Sapiens
SQMLRAVSL

SEQ ID NO: 65474 - protein, 9 aa, Homo Sapiens
SRVLKVLSV

SEQ ID NO: 65475 - protein, 9 aa, Homo Sapiens
SVFQRYLAL

SEQ ID NO: 65476 - protein, 9 aa, Homo Sapiens
SVLVRQISL

SEQ ID NO: 65477 - protein, 9 aa, Homo Sapiens
TAKFHFVDL

SEQ ID NO: 65478 - protein, 9 aa, Homo Sapiens
TAKIRPFAV

SEQ ID NO: 65479 - protein, 9 aa, Homo Sapiens
TALLIMRTV

SEQ ID NO: 65480 - protein, 9 aa, Homo Sapiens
TALLKSLSA

SEQ ID NO: 65481 - protein, 9 aa, Homo Sapiens
TALMKLKSL

SEQ ID NO: 65482 - protein, 9 aa, Homo Sapiens
TALPRIFSL

SEQ ID NO: 65483 - protein, 9 aa, Homo Sapiens
TFIQRVQSL

SEQ ID NO: 65484 - protein, 9 aa, Homo Sapiens
TFLQRLISL

SEQ ID NO: 65485 - protein, 9 aa, Homo Sapiens
TGYLKGYTL

SEQ ID NO: 65486 - protein, 9 aa, Homo Sapiens
TIIPKVLAM

SEQ ID NO: 65487 - protein, 9 aa, Homo Sapiens
TIKKRFKVL

SEQ ID NO: 65488 - protein, 9 aa, Homo Sapiens
TIMPKDIQL

SEQ ID NO: 65489 - protein, 9 aa, Homo Sapiens
TLFKKIQAL

SEQ ID NO: 65490 - protein, 9 aa, Homo Sapiens
TLIHKPVSL

SEQ ID NO: 65491 - protein, 9 aa, Homo Sapiens
TLKEYLESL

SEQ ID NO: 65492 - protein, 9 aa, Homo Sapiens
TLKRTIEAL

SEQ ID NO: 65493 - protein, 9 aa, Homo Sapiens
TLLERAFSL

SEQ ID NO: 65494 - protein, 9 aa, Homo Sapiens
TLMIKTITL

SEQ ID NO: 65495 - protein, 9 aa, Homo Sapiens
TLNEKLTAL

SEQ ID NO: 65496 - protein, 9 aa, Homo Sapiens
TLNIKPVSL

SEQ ID NO: 65497 - protein, 9 aa, Homo Sapiens
TLRLKVEEL

SEQ ID NO: 65498 - protein, 9 aa, Homo Sapiens
TLTSKLYSL

SEQ ID NO: 65499 - protein, 9 aa, Homo Sapiens
TNMLKVVAL

SEQ ID NO: 65500 - protein, 9 aa, Homo Sapiens
TNTLRILAL

SEQ ID NO: 65501 - protein, 9 aa, Homo Sapiens
TPHLRNLAV

SEQ ID NO: 65502 - protein, 9 aa, Homo Sapiens
TPILKPVSL

SEQ ID NO: 65503 - protein, 9 aa, Homo Sapiens
TPISRLVAL

SEQ ID NO: 65504 - protein, 9 aa, Homo Sapiens
TPLARIVAF

SEQ ID NO: 65505 - protein, 9 aa, Homo Sapiens
TPMFREYSL

SEQ ID NO: 65506 - protein, 9 aa, Homo Sapiens
TVKVHVVAL

SEQ ID NO: 65507 - protein, 9 aa, Homo Sapiens
VAAKKNVSI

SEQ ID NO: 65508 - protein, 9 aa, Homo Sapiens
VALLRVTPF

SEQ ID NO: 65509 - protein, 9 aa, Homo Sapiens
VGLIRNLAL

SEQ ID NO: 65510 - protein, 9 aa, Homo Sapiens
VGLLRLHSL

SEQ ID NO: 65511 - protein, 9 aa, Homo Sapiens
VIIEKTYSL

SEQ ID NO: 65512 - protein, 9 aa, Homo Sapiens
VLHVKTESL

SEQ ID NO: 65513 - protein, 9 aa, Homo Sapiens
VLMIKALEL

SEQ ID NO: 65514 - protein, 9 aa, Homo Sapiens
VLQQRLIAL

SEQ ID NO: 65515 - protein, 9 aa, Homo Sapiens
VMAPRSLIL

SEQ ID NO: 65516 - protein, 9 aa, Homo Sapiens
VPFERPAVI

SEQ ID NO: 65517 - protein, 9 aa, Homo Sapiens
VPLLKSLEV

SEQ ID NO: 65518 - protein, 9 aa, Homo Sapiens
VPLPRLLEV

SEQ ID NO: 65519 - protein, 9 aa, Homo Sapiens
VPLVREITF

SEQ ID NO: 65520 - protein, 9 aa, Homo Sapiens
VPMFRNVSL

SEQ ID NO: 65521 - protein, 9 aa, Homo Sapiens
VPYEKGFAL

SEQ ID NO: 65522 - protein, 9 aa, Homo Sapiens
VPYLKIFTV

SEQ ID NO: 65523 - protein, 9 aa, Homo Sapiens
WIHVKPERL

SEQ ID NO: 65524 - protein, 9 aa, Homo Sapiens
WIKEKIYVL

SEQ ID NO: 65525 - protein, 9 aa, Homo Sapiens
WLHLIPQTL

SEQ ID NO: 65526 - protein, 9 aa, Homo Sapiens
WLKICRLTA

SEQ ID NO: 65527 - protein, 9 aa, Homo Sapiens
WMHKVPASL

SEQ ID NO: 65528 - protein, 9 aa, Homo Sapiens
WVKEKVVAL

SEQ ID NO: 65529 - protein, 9 aa, Homo Sapiens
YAFPKAVSV

SEQ ID NO: 65530 - protein, 9 aa, Homo Sapiens
YAFVRPVIL

SEQ ID NO: 65531 - protein, 9 aa, Homo Sapiens
YAKIHIPII

SEQ ID NO: 65532 - protein, 9 aa, Homo Sapiens
YAKIVEIPF

SEQ ID NO: 65533 - protein, 9 aa, Homo Sapiens
YALNHTLSV

SEQ ID NO: 65534 - protein, 9 aa, Homo Sapiens
YAQIRTIAI

SEQ ID NO: 65535 - protein, 9 aa, Homo Sapiens
YARLHPRAV

SEQ ID NO: 65536 - protein, 9 aa, Homo Sapiens
YFKIYIDSL

SEQ ID NO: 65537 - protein, 9 aa, Homo Sapiens
YFLSRAQSL

SEQ ID NO: 65538 - protein, 9 aa, Homo Sapiens
YFRVMVDSL

SEQ ID NO: 65539 - protein, 9 aa, Homo Sapiens
YGFEKPSAI

SEQ ID NO: 65540 - protein, 9 aa, Homo Sapiens
YGKIAVMEL

SEQ ID NO: 65541 - protein, 9 aa, Homo Sapiens
YGMERVWCV

SEQ ID NO: 65542 - protein, 9 aa, Homo Sapiens
YGYVRAEVL

SEQ ID NO: 65543 - protein, 9 aa, Homo Sapiens
YIHVHFLEV

SEQ ID NO: 65544 - protein, 9 aa, Homo Sapiens
YIIKDKHIL

SEQ ID NO: 65545 - protein, 9 aa, Homo Sapiens
YIKRLLETL

SEQ ID NO: 65546 - protein, 9 aa, Homo Sapiens
YILGKFFAL

SEQ ID NO: 65547 - protein, 9 aa, Homo Sapiens
YLAIRTAQI

SEQ ID NO: 65548 - protein, 9 aa, Homo Sapiens
YLFERIKEL

SEQ ID NO: 65549 - protein, 9 aa, Homo Sapiens
YLFERTFNL

SEQ ID NO: 65550 - protein, 9 aa, Homo Sapiens
YLGAKPRSL

SEQ ID NO: 65551 - protein, 9 aa, Homo Sapiens
YLKPYFLEA

SEQ ID NO: 65552 - protein, 9 aa, Homo Sapiens
YLKTKFICV

SEQ ID NO: 65553 - protein, 9 aa, Homo Sapiens
YLKVKGNVF

SEQ ID NO: 65554 - protein, 9 aa, Homo Sapiens
YLKVLPQEL

SEQ ID NO: 65555 - protein, 9 aa, Homo Sapiens
YLKVLVDSL

SEQ ID NO: 65556 - protein, 9 aa, Homo Sapiens
YLKVRPDEI

SEQ ID NO: 65557 - protein, 9 aa, Homo Sapiens
YLLEKFVAV

SEQ ID NO: 65558 - protein, 9 aa, Homo Sapiens
YLLEKSRAI

SEQ ID NO: 65559 - protein, 9 aa, Homo Sapiens
YLLEKSRIV

SEQ ID NO: 65560 - protein, 9 aa, Homo Sapiens
YLLEKSRVI

SEQ ID NO: 65561 - protein, 9 aa, Homo Sapiens
YLLLKTHQL

SEQ ID NO: 65562 - protein, 9 aa, Homo Sapiens
YLLQRAVEV

SEQ ID NO: 65563 - protein, 9 aa, Homo Sapiens
YLNVREAVL

SEQ ID NO: 65564 - protein, 9 aa, Homo Sapiens
YLPTRVTAI

SEQ ID NO: 65565 - protein, 9 aa, Homo Sapiens
YLRELLTTM

SEQ ID NO: 65566 - protein, 9 aa, Homo Sapiens
YLRLVETSL

SEQ ID NO: 65567 - protein, 9 aa, Homo Sapiens
YLRNLTWTL

SEQ ID NO: 65568 - protein, 9 aa, Homo Sapiens
YLRQYPFQL

SEQ ID NO: 65569 - protein, 9 aa, Homo Sapiens
YLSPKLWAL

SEQ ID NO: 65570 - protein, 9 aa, Homo Sapiens
YMYQLFRSL

SEQ ID NO: 65571 - protein, 9 aa, Homo Sapiens
YPFQKPVTL

SEQ ID NO: 65572 - protein, 9 aa, Homo Sapiens
YPKLKTDVL

SEQ ID NO: 65573 - protein, 9 aa, Homo Sapiens
YPLLKDPSL

SEQ ID NO: 65574 - protein, 9 aa, Homo Sapiens
YPLLKNISM

SEQ ID NO: 65575 - protein, 9 aa, Homo Sapiens
YPNERFELL

SEQ ID NO: 65576 - protein, 9 aa, Homo Sapiens
YVKLTPVSL

SEQ ID NO: 65577 - protein, 9 aa, Homo Sapiens
YVLLKALAL

SEQ ID NO: 65578 - protein, 10 aa, Homo Sapiens
DIKESHLIEL

SEQ ID NO: 65579 - protein, 10 aa, Homo Sapiens
DLRTKATIEL

SEQ ID NO: 65580 - protein, 10 aa, Homo Sapiens
EAFLKHILSV

SEQ ID NO: 65581 - protein, 10 aa, Homo Sapiens
EAYLKYIEGL

SEQ ID NO: 65582 - protein, 10 aa, Homo Sapiens
FMKEKLLAEL

SEQ ID NO: 65583 - protein, 10 aa, Homo Sapiens
FPLIKEIISI

SEQ ID NO: 65584 - protein, 10 aa, Homo Sapiens
FPTVHAVILL

SEQ ID NO: 65585 - protein, 10 aa, Homo Sapiens
IISPKVKMAL

SEQ ID NO: 65586 - protein, 10 aa, Homo Sapiens
IPIVHRVIKV

SEQ ID NO: 65587 - protein, 10 aa, Homo Sapiens
KVTSLGVLLL

SEQ ID NO: 65588 - protein, 10 aa, Homo Sapiens
LINGRTNLSI

SEQ ID NO: 65589 - protein, 10 aa, Homo Sapiens
LLKIKGVISF

SEQ ID NO: 65590 - protein, 10 aa, Homo Sapiens
LPFQKDGIIF

SEQ ID NO: 65591 - protein, 10 aa, Homo Sapiens
LPHLRNKLVI

SEQ ID NO: 65592 - protein, 10 aa, Homo Sapiens
LSGMLFLNSL

SEQ ID NO: 65593 - protein, 10 aa, Homo Sapiens
MPFIKSQHEL

SEQ ID NO: 65594 - protein, 10 aa, Homo Sapiens
MPSLKHIVEL

SEQ ID NO: 65595 - protein, 10 aa, Homo Sapiens
TIPPMEKAVV

SEQ ID NO: 65596 - protein, 10 aa, Homo Sapiens
VLLKARLVPA

SEQ ID NO: 65597 - protein, 10 aa, Homo Sapiens
WPLIKATVGL

SEQ ID NO: 65598 - protein, 10 aa, Homo Sapiens
YAYLKAIVLF

SEQ ID NO: 65599 - protein, 10 aa, Homo Sapiens
YLFDRNGVCL

SEQ ID NO: 65600 - protein, 11 aa, Homo Sapiens
DIKLKDIEHAL

SEQ ID NO: 65601 - protein, 11 aa, Homo Sapiens
DLRSGLLHVAI

SEQ ID NO: 65602 - protein, 11 aa, Homo Sapiens
FIFEKKLAQAL

SEQ ID NO: 65603 - protein, 11 aa, Homo Sapiens
LPHLRNKLVIK

SEQ ID NO: 65604 - protein, 11 aa, Homo Sapiens
LPRIKTEIEAL

SEQ ID NO: 65605 - protein, 11 aa, Homo Sapiens
SIISPKVKMAL

SEQ ID NO: 65606 - protein, 11 aa, Homo Sapiens
SLFTKELEHAL

SEQ ID NO: 65607 - protein, 11 aa, Homo Sapiens
VPLLKTLDHVL

SEQ ID NO: 65608 - protein, 11 aa, Homo Sapiens
VPNLHKVIVVW

SEQ ID NO: 65609 - protein, 11 aa, Homo Sapiens
VVLLKARLVPA

SEQ ID NO: 65610 - protein, 8 aa, Homo Sapiens
ALAPILDD

SEQ ID NO: 65611 - protein, 8 aa, Homo Sapiens
AQSKDFAV

SEQ ID NO: 65612 - protein, 8 aa, Homo Sapiens
AVDKAYKL

SEQ ID NO: 65613 - protein, 8 aa, Homo Sapiens
GQFKTYAI

SEQ ID NO: 65614 - protein, 8 aa, Homo Sapiens
HQDLSQKI

SEQ ID NO: 65615 - protein, 8 aa, Homo Sapiens
HQTSAESW

SEQ ID NO: 65616 - protein, 8 aa, Homo Sapiens
ILGPTFTL

SEQ ID NO: 65617 - protein, 8 aa, Homo Sapiens
IQGPDYVL

SEQ ID NO: 65618 - protein, 8 aa, Homo Sapiens
ISMGDHLW

SEQ ID NO: 65619 - protein, 8 aa, Homo Sapiens
KLGPEKRI

SEQ ID NO: 65620 - protein, 8 aa, Homo Sapiens
LQKKNHLI

SEQ ID NO: 65621 - protein, 8 aa, Homo Sapiens
LQWLKIII

SEQ ID NO: 65622 - protein, 8 aa, Homo Sapiens
RLAPNFRW

SEQ ID NO: 65623 - protein, 8 aa, Homo Sapiens
RQSLEVKM

SEQ ID NO: 65624 - protein, 8 aa, Homo Sapiens
RQYKDYKI

SEQ ID NO: 65625 - protein, 8 aa, Homo Sapiens
SVCKDFVW

SEQ ID NO: 65626 - protein, 8 aa, Homo Sapiens
VQAPDWHL

SEQ ID NO: 65627 - protein, 8 aa, Homo Sapiens
VQGPDWHL

SEQ ID NO: 65628 - protein, 8 aa, Homo Sapiens
YQDTPKQI

SEQ ID NO: 65629 - protein, 9 aa, Homo Sapiens
AESHIILVL

SEQ ID NO: 65630 - protein, 9 aa, Homo Sapiens
AETAVQLFI

SEQ ID NO: 65631 - protein, 9 aa, Homo Sapiens
AETHIVLLF

SEQ ID NO: 65632 - protein, 9 aa, Homo Sapiens
AGDGTFQKW

SEQ ID NO: 65633 - protein, 9 aa, Homo Sapiens
AGDRTFQKW

SEQ ID NO: 65634 - protein, 9 aa, Homo Sapiens
AIDFSHEEW

SEQ ID NO: 65635 - protein, 9 aa, Homo Sapiens
AIDFTHEEW

SEQ ID NO: 65636 - protein, 9 aa, Homo Sapiens
AIDSIHQLW

SEQ ID NO: 65637 - protein, 9 aa, Homo Sapiens
AIESGQHYW

SEQ ID NO: 65638 - protein, 9 aa, Homo Sapiens
AIHPDMVTI

SEQ ID NO: 65639 - protein, 9 aa, Homo Sapiens
AILELDEHL

SEQ ID NO: 65640 - protein, 9 aa, Homo Sapiens
AISDLQQLW

SEQ ID NO: 65641 - protein, 9 aa, Homo Sapiens
AISSVRLYI

SEQ ID NO: 65642 - protein, 9 aa, Homo Sapiens
AIVKEIVNI

SEQ ID NO: 65643 - protein, 9 aa, Homo Sapiens
AIWKELISL

SEQ ID NO: 65644 - protein, 9 aa, Homo Sapiens
AIYGNEPEI

SEQ ID NO: 65645 - protein, 9 aa, Homo Sapiens
ALAAGEIGF

SEQ ID NO: 65646 - protein, 9 aa, Homo Sapiens
ALAEKEHKL

SEQ ID NO: 65647 - protein, 9 aa, Homo Sapiens
ALAKLVEAI

SEQ ID NO: 65648 - protein, 9 aa, Homo Sapiens
ALAKTEVSL

SEQ ID NO: 65649 - protein, 9 aa, Homo Sapiens
ALAPHEEYI

SEQ ID NO: 65650 - protein, 9 aa, Homo Sapiens
ALAPILDDG

SEQ ID NO: 65651 - protein, 9 aa, Homo Sapiens
ALAPKDKKI

SEQ ID NO: 65652 - protein, 9 aa, Homo Sapiens
ALAPPEVVM

SEQ ID NO: 65653 - protein, 9 aa, Homo Sapiens
ALAPSTMKI

SEQ ID NO: 65654 - protein, 9 aa, Homo Sapiens
ALARLVLRL

SEQ ID NO: 65655 - protein, 9 aa, Homo Sapiens
ALAVLEDRF

SEQ ID NO: 65656 - protein, 9 aa, Homo Sapiens
ALAVRGSDR

SEQ ID NO: 65657 - protein, 9 aa, Homo Sapiens
ALCATDFKF

SEQ ID NO: 65658 - protein, 9 aa, Homo Sapiens
ALCATDYTF

SEQ ID NO: 65659 - protein, 9 aa, Homo Sapiens
ALCGEQVHI

SEQ ID NO: 65660 - protein, 9 aa, Homo Sapiens
ALCNIHENI

SEQ ID NO: 65661 - protein, 9 aa, Homo Sapiens
ALCQEQIGW

SEQ ID NO: 65662 - protein, 9 aa, Homo Sapiens
ALDAHQQSI

SEQ ID NO: 65663 - protein, 9 aa, Homo Sapiens
ALDATHQQL

SEQ ID NO: 65664 - protein, 9 aa, Homo Sapiens
ALDEVVLKF

SEQ ID NO: 65665 - protein, 9 aa, Homo Sapiens
ALDKATVLL

SEQ ID NO: 65666 - protein, 9 aa, Homo Sapiens
ALDKSNTHI

SEQ ID NO: 65667 - protein, 9 aa, Homo Sapiens
ALDNSVYLW

SEQ ID NO: 65668 - protein, 9 aa, Homo Sapiens
ALDPTARKI

SEQ ID NO: 65669 - protein, 9 aa, Homo Sapiens
ALDTKGPEI

SEQ ID NO: 65670 - protein, 9 aa, Homo Sapiens
ALDTTRHEL

SEQ ID NO: 65671 - protein, 9 aa, Homo Sapiens
ALDVSFNKF

SEQ ID NO: 65672 - protein, 9 aa, Homo Sapiens
ALERRIEYI

SEQ ID NO: 65673 - protein, 9 aa, Homo Sapiens
ALERVLQDW

SEQ ID NO: 65674 - protein, 9 aa, Homo Sapiens
ALFNGAQKL

SEQ ID NO: 65675 - protein, 9 aa, Homo Sapiens
ALFNGISKW

SEQ ID NO: 65676 - protein, 9 aa, Homo Sapiens
ALFNPDVCW

SEQ ID NO: 65677 - protein, 9 aa, Homo Sapiens
ALFQIEQGI

SEQ ID NO: 65678 - protein, 9 aa, Homo Sapiens
ALFRELISW

SEQ ID NO: 65679 - protein, 9 aa, Homo Sapiens
ALGECYEKL

SEQ ID NO: 65680 - protein, 9 aa, Homo Sapiens
ALHNLDRKW

SEQ ID NO: 65681 - protein, 9 aa, Homo Sapiens
ALHVGFDNF

SEQ ID NO: 65682 - protein, 9 aa, Homo Sapiens
ALICFEEHI

SEQ ID NO: 65683 - protein, 9 aa, Homo Sapiens
ALIKDKILF

SEQ ID NO: 65684 - protein, 9 aa, Homo Sapiens
ALILGGDRM

SEQ ID NO: 65685 - protein, 9 aa, Homo Sapiens
ALILVDDRF

SEQ ID NO: 65686 - protein, 9 aa, Homo Sapiens
ALIPETTTL

SEQ ID NO: 65687 - protein, 9 aa, Homo Sapiens
ALIRLLESF

SEQ ID NO: 65688 - protein, 9 aa, Homo Sapiens
ALIWDIQQM

SEQ ID NO: 65689 - protein, 9 aa, Homo Sapiens
ALLAEGITW

SEQ ID NO: 65690 - protein, 9 aa, Homo Sapiens
ALLAGSEYL

SEQ ID NO: 65691 - protein, 9 aa, Homo Sapiens
ALLNLAERL

SEQ ID NO: 65692 - protein, 9 aa, Homo Sapiens
ALMAQEQKL

SEQ ID NO: 65693 - protein, 9 aa, Homo Sapiens
ALMEQRLFW

SEQ ID NO: 65694 - protein, 9 aa, Homo Sapiens
ALNIVGDLL

SEQ ID NO: 65695 - protein, 9 aa, Homo Sapiens
ALNQLFEKI

SEQ ID NO: 65696 - protein, 9 aa, Homo Sapiens
ALNSKDAAL

SEQ ID NO: 65697 - protein, 9 aa, Homo Sapiens
ALNSREPHM

SEQ ID NO: 65698 - protein, 9 aa, Homo Sapiens
ALPDQSFLW

SEQ ID NO: 65699 - protein, 9 aa, Homo Sapiens
ALPNVYEVI

SEQ ID NO: 65700 - protein, 9 aa, Homo Sapiens
ALQERDVAI

SEQ ID NO: 65701 - protein, 9 aa, Homo Sapiens
ALQKDALSI

SEQ ID NO: 65702 - protein, 9 aa, Homo Sapiens
ALQLGELKI

SEQ ID NO: 65703 - protein, 9 aa, Homo Sapiens
ALREENEQL

SEQ ID NO: 65704 - protein, 9 aa, Homo Sapiens
ALSCDNLTL

SEQ ID NO: 65705 - protein, 9 aa, Homo Sapiens
ALSDGVHKI

SEQ ID NO: 65706 - protein, 9 aa, Homo Sapiens
ALSDLALHF

SEQ ID NO: 65707 - protein, 9 aa, Homo Sapiens
ALSDYDLVL

SEQ ID NO: 65708 - protein, 9 aa, Homo Sapiens
ALSEMVEYI

SEQ ID NO: 65709 - protein, 9 aa, Homo Sapiens
ALSGCEISI

SEQ ID NO: 65710 - protein, 9 aa, Homo Sapiens
ALSKEIYVI

SEQ ID NO: 65711 - protein, 9 aa, Homo Sapiens
ALSKLREDF

SEQ ID NO: 65712 - protein, 9 aa, Homo Sapiens
ALSLVSCKL

SEQ ID NO: 65713 - protein, 9 aa, Homo Sapiens
ALSNLEVKL

SEQ ID NO: 65714 - protein, 9 aa, Homo Sapiens
ALSPVPSHW

SEQ ID NO: 65715 - protein, 9 aa, Homo Sapiens
ALSRLKLKL

SEQ ID NO: 65716 - protein, 9 aa, Homo Sapiens
ALTPLEPRL

SEQ ID NO: 65717 - protein, 9 aa, Homo Sapiens
ALTSAGDRF

SEQ ID NO: 65718 - protein, 9 aa, Homo Sapiens
ALTSIAQKI

SEQ ID NO: 65719 - protein, 9 aa, Homo Sapiens
ALVALKDLL

SEQ ID NO: 65720 - protein, 9 aa, Homo Sapiens
ALVRDILYV

SEQ ID NO: 65721 - protein, 9 aa, Homo Sapiens
ALVRFVNLI

SEQ ID NO: 65722 - protein, 9 aa, Homo Sapiens
ALYASRLYL

SEQ ID NO: 65723 - protein, 9 aa, Homo Sapiens
ALYGQPLLL

SEQ ID NO: 65724 - protein, 9 aa, Homo Sapiens
AMAKIQAKI

SEQ ID NO: 65725 - protein, 9 aa, Homo Sapiens
AMAPERTGW

SEQ ID NO: 65726 - protein, 9 aa, Homo Sapiens
AMDFTPEEW

SEQ ID NO: 65727 - protein, 9 aa, Homo Sapiens
AMHAQDPQM

SEQ ID NO: 65728 - protein, 9 aa, Homo Sapiens
AMIELVERL

SEQ ID NO: 65729 - protein, 9 aa, Homo Sapiens
AMVAPDVQI

SEQ ID NO: 65730 - protein, 9 aa, Homo Sapiens
AMYPKYDRI

SEQ ID NO: 65731 - protein, 9 aa, Homo Sapiens
AQAADVLEL

SEQ ID NO: 65732 - protein, 9 aa, Homo Sapiens
AQAALAVNI

SEQ ID NO: 65733 - protein, 9 aa, Homo Sapiens
AQAALQSSW

SEQ ID NO: 65734 - protein, 9 aa, Homo Sapiens
AQAAQQLWL

SEQ ID NO: 65735 - protein, 9 aa, Homo Sapiens
AQAAREFIL

SEQ ID NO: 65736 - protein, 9 aa, Homo Sapiens
AQAASQHVF

SEQ ID NO: 65737 - protein, 9 aa, Homo Sapiens
AQAEAADSW

SEQ ID NO: 65738 - protein, 9 aa, Homo Sapiens
AQAEYIEKF

SEQ ID NO: 65739 - protein, 9 aa, Homo Sapiens
AQAFIHNSL

SEQ ID NO: 65740 - protein, 9 aa, Homo Sapiens
AQAGDKCDF

SEQ ID NO: 65741 - protein, 9 aa, Homo Sapiens
AQAIKGMHI

SEQ ID NO: 65742 - protein, 9 aa, Homo Sapiens
AQAKAGNLM

SEQ ID NO: 65743 - protein, 9 aa, Homo Sapiens
AQAKPALKI

SEQ ID NO: 65744 - protein, 9 aa, Homo Sapiens
AQALAKLTI

SEQ ID NO: 65745 - protein, 9 aa, Homo Sapiens
AQALLEYHL

SEQ ID NO: 65746 - protein, 9 aa, Homo Sapiens
AQALVLQVF

SEQ ID NO: 65747 - protein, 9 aa, Homo Sapiens
AQAPPTAQL

SEQ ID NO: 65748 - protein, 9 aa, Homo Sapiens
AQAPSSFQL

SEQ ID NO: 65749 - protein, 9 aa, Homo Sapiens
AQAPVMNTW

SEQ ID NO: 65750 - protein, 9 aa, Homo Sapiens
AQAQEVFFL

SEQ ID NO: 65751 - protein, 9 aa, Homo Sapiens
AQAQIVQSW

SEQ ID NO: 65752 - protein, 9 aa, Homo Sapiens
AQAREFGNL

SEQ ID NO: 65753 - protein, 9 aa, Homo Sapiens
AQARINARL

SEQ ID NO: 65754 - protein, 9 aa, Homo Sapiens
AQATGIESL

SEQ ID NO: 65755 - protein, 9 aa, Homo Sapiens
AQATPDHVL

SEQ ID NO: 65756 - protein, 9 aa, Homo Sapiens
AQAVTTSKW

SEQ ID NO: 65757 - protein, 9 aa, Homo Sapiens
AQCLEHYEF

SEQ ID NO: 65758 - protein, 9 aa, Homo Sapiens
AQCLLRLVL

SEQ ID NO: 65759 - protein, 9 aa, Homo Sapiens
AQCNKAINI

SEQ ID NO: 65760 - protein, 9 aa, Homo Sapiens
AQCPIVERL

SEQ ID NO: 65761 - protein, 9 aa, Homo Sapiens
AQCTLINFL

SEQ ID NO: 65762 - protein, 9 aa, Homo Sapiens
AQCVIYHEL

SEQ ID NO: 65763 - protein, 9 aa, Homo Sapiens
AQDDPDSCL

SEQ ID NO: 65764 - protein, 9 aa, Homo Sapiens
AQDEEIARL

SEQ ID NO: 65765 - protein, 9 aa, Homo Sapiens
AQDEHLITF

SEQ ID NO: 65766 - protein, 9 aa, Homo Sapiens
AQDGKIKVW

SEQ ID NO: 65767 - protein, 9 aa, Homo Sapiens
AQDIERASF

SEQ ID NO: 65768 - protein, 9 aa, Homo Sapiens
AQDKQFGTW

SEQ ID NO: 65769 - protein, 9 aa, Homo Sapiens
AQDLVYSFF

SEQ ID NO: 65770 - protein, 9 aa, Homo Sapiens
AQDNADYRL

SEQ ID NO: 65771 - protein, 9 aa, Homo Sapiens
AQDPEIASL

SEQ ID NO: 65772 - protein, 9 aa, Homo Sapiens
AQDPENQAL

SEQ ID NO: 65773 - protein, 9 aa, Homo Sapiens
AQDPSQLSF

SEQ ID NO: 65774 - protein, 9 aa, Homo Sapiens
AQDPVFQKL

SEQ ID NO: 65775 - protein, 9 aa, Homo Sapiens
AQDRQVCLW

SEQ ID NO: 65776 - protein, 9 aa, Homo Sapiens
AQDSAAVQI

SEQ ID NO: 65777 - protein, 9 aa, Homo Sapiens
AQDVFNHSW

SEQ ID NO: 65778 - protein, 9 aa, Homo Sapiens
AQDYLQCVL

SEQ ID NO: 65779 - protein, 9 aa, Homo Sapiens
AQEDGKVYI

SEQ ID NO: 65780 - protein, 9 aa, Homo Sapiens
AQEFFLHLI

SEQ ID NO: 65781 - protein, 9 aa, Homo Sapiens
AQEIGEERI

SEQ ID NO: 65782 - protein, 9 aa, Homo Sapiens
AQENCFQYL

SEQ ID NO: 65783 - protein, 9 aa, Homo Sapiens
AQEQGQHLI

SEQ ID NO: 65784 - protein, 9 aa, Homo Sapiens
AQERGVRCL

SEQ ID NO: 65785 - protein, 9 aa, Homo Sapiens
AQEVHSTGI

SEQ ID NO: 65786 - protein, 9 aa, Homo Sapiens
AQFEHTILL

SEQ ID NO: 65787 - protein, 9 aa, Homo Sapiens
AQFHPEVGL

SEQ ID NO: 65788 - protein, 9 aa, Homo Sapiens
AQFKGIEKL

SEQ ID NO: 65789 - protein, 9 aa, Homo Sapiens
AQFKGTQSL

SEQ ID NO: 65790 - protein, 9 aa, Homo Sapiens
AQFTTALRL

SEQ ID NO: 65791 - protein, 9 aa, Homo Sapiens
AQGDVRLCL

SEQ ID NO: 65792 - protein, 9 aa, Homo Sapiens
AQGGVLPNI

SEQ ID NO: 65793 - protein, 9 aa, Homo Sapiens
AQGKMKLLI

SEQ ID NO: 65794 - protein, 9 aa, Homo Sapiens
AQGPALDLI

SEQ ID NO: 65795 - protein, 9 aa, Homo Sapiens
AQHDAQEFM

SEQ ID NO: 65796 - protein, 9 aa, Homo Sapiens
AQHDDELTI

SEQ ID NO: 65797 - protein, 9 aa, Homo Sapiens
AQHGQPLNM

SEQ ID NO: 65798 - protein, 9 aa, Homo Sapiens
AQHIVPCTI

SEQ ID NO: 65799 - protein, 9 aa, Homo Sapiens
AQHPSALRF

SEQ ID NO: 65800 - protein, 9 aa, Homo Sapiens
AQHQTKLYL

SEQ ID NO: 65801 - protein, 9 aa, Homo Sapiens
AQHSVPLQL

SEQ ID NO: 65802 - protein, 9 aa, Homo Sapiens
AQHVEVESI

SEQ ID NO: 65803 - protein, 9 aa, Homo Sapiens
AQHYQDTLI

SEQ ID NO: 65804 - protein, 9 aa, Homo Sapiens
AQIKELEEL

SEQ ID NO: 65805 - protein, 9 aa, Homo Sapiens
AQIKEMVEL

SEQ ID NO: 65806 - protein, 9 aa, Homo Sapiens
AQILQSDLL

SEQ ID NO: 65807 - protein, 9 aa, Homo Sapiens
AQIPQKVLW

SEQ ID NO: 65808 - protein, 9 aa, Homo Sapiens
AQIPVVFRL

SEQ ID NO: 65809 - protein, 9 aa, Homo Sapiens
AQIRETETF

SEQ ID NO: 65810 - protein, 9 aa, Homo Sapiens
AQIRTIAII

SEQ ID NO: 65811 - protein, 9 aa, Homo Sapiens
AQITGTEHL

SEQ ID NO: 65812 - protein, 9 aa, Homo Sapiens
AQLAAAEKF

SEQ ID NO: 65813 - protein, 9 aa, Homo Sapiens
AQLEEEWGL

SEQ ID NO: 65814 - protein, 9 aa, Homo Sapiens
AQLNIGNVL

SEQ ID NO: 65815 - protein, 9 aa, Homo Sapiens
AQLPDRCTL

SEQ ID NO: 65816 - protein, 9 aa, Homo Sapiens
AQLPEQVTL

SEQ ID NO: 65817 - protein, 9 aa, Homo Sapiens
AQLPMSIRI

SEQ ID NO: 65818 - protein, 9 aa, Homo Sapiens
AQLRFIQAW

SEQ ID NO: 65819 - protein, 9 aa, Homo Sapiens
AQLRQYHRL

SEQ ID NO: 65820 - protein, 9 aa, Homo Sapiens
AQMDYQLRL

SEQ ID NO: 65821 - protein, 9 aa, Homo Sapiens
AQMFSDMVL

SEQ ID NO: 65822 - protein, 9 aa, Homo Sapiens
AQMGSEAHV

SEQ ID NO: 65823 - protein, 9 aa, Homo Sapiens
AQMLDPYLI

SEQ ID NO: 65824 - protein, 9 aa, Homo Sapiens
AQMVTQAMW

SEQ ID NO: 65825 - protein, 9 aa, Homo Sapiens
AQNGIPLRI

SEQ ID NO: 65826 - protein, 9 aa, Homo Sapiens
AQNGVSQLI

SEQ ID NO: 65827 - protein, 9 aa, Homo Sapiens
AQNKLFNKI

SEQ ID NO: 65828 - protein, 9 aa, Homo Sapiens
AQNQGDIKL

SEQ ID NO: 65829 - protein, 9 aa, Homo Sapiens
AQNRAEIKL

SEQ ID NO: 65830 - protein, 9 aa, Homo Sapiens
AQNRFLLEL

SEQ ID NO: 65831 - protein, 9 aa, Homo Sapiens
AQPKGDPRI

SEQ ID NO: 65832 - protein, 9 aa, Homo Sapiens
AQQELKLLL

SEQ ID NO: 65833 - protein, 9 aa, Homo Sapiens
AQQGKEYEL

SEQ ID NO: 65834 - protein, 9 aa, Homo Sapiens
AQQHREALI

SEQ ID NO: 65835 - protein, 9 aa, Homo Sapiens
AQQKEEAQL

SEQ ID NO: 65836 - protein, 9 aa, Homo Sapiens
AQQLEEARL

SEQ ID NO: 65837 - protein, 9 aa, Homo Sapiens
AQQNLALQL

SEQ ID NO: 65838 - protein, 9 aa, Homo Sapiens
AQQSLQSFW

SEQ ID NO: 65839 - protein, 9 aa, Homo Sapiens
AQREDALEL

SEQ ID NO: 65840 - protein, 9 aa, Homo Sapiens
AQRKEREVL

SEQ ID NO: 65841 - protein, 9 aa, Homo Sapiens
AQRSGLNQI

SEQ ID NO: 65842 - protein, 9 aa, Homo Sapiens
AQSAVEILL

SEQ ID NO: 65843 - protein, 9 aa, Homo Sapiens
AQSDIEHLF

SEQ ID NO: 65844 - protein, 9 aa, Homo Sapiens
AQSDLKEVM

SEQ ID NO: 65845 - protein, 9 aa, Homo Sapiens
AQSFITSSW

SEQ ID NO: 65846 - protein, 9 aa, Homo Sapiens
AQSGHEVTL

SEQ ID NO: 65847 - protein, 9 aa, Homo Sapiens
AQSHPEMGL

SEQ ID NO: 65848 - protein, 9 aa, Homo Sapiens
AQSHVKISF

SEQ ID NO: 65849 - protein, 9 aa, Homo Sapiens
AQSKLALVL

SEQ ID NO: 65850 - protein, 9 aa, Homo Sapiens
AQSLVLDTL

SEQ ID NO: 65851 - protein, 9 aa, Homo Sapiens
AQSQAVTKI

SEQ ID NO: 65852 - protein, 9 aa, Homo Sapiens
AQSRIALAL

SEQ ID NO: 65853 - protein, 9 aa, Homo Sapiens
AQSSLDLFL

SEQ ID NO: 65854 - protein, 9 aa, Homo Sapiens
AQSYIAHNF

SEQ ID NO: 65855 - protein, 9 aa, Homo Sapiens
AQSYIAQNF

SEQ ID NO: 65856 - protein, 9 aa, Homo Sapiens
AQTHVDLSF

SEQ ID NO: 65857 - protein, 9 aa, Homo Sapiens
AQTIHEENI

SEQ ID NO: 65858 - protein, 9 aa, Homo Sapiens
AQTRLGNGW

SEQ ID NO: 65859 - protein, 9 aa, Homo Sapiens
AQTSTLLCF

SEQ ID NO: 65860 - protein, 9 aa, Homo Sapiens
AQTTMEPHL

SEQ ID NO: 65861 - protein, 9 aa, Homo Sapiens
AQTVANFNI

SEQ ID NO: 65862 - protein, 9 aa, Homo Sapiens
AQVAKESVL

SEQ ID NO: 65863 - protein, 9 aa, Homo Sapiens
AQVEDFLQF

SEQ ID NO: 65864 - protein, 9 aa, Homo Sapiens
AQVMWFEKL

SEQ ID NO: 65865 - protein, 9 aa, Homo Sapiens
AQVPFEQIL

SEQ ID NO: 65866 - protein, 9 aa, Homo Sapiens
AQVQKDARI

SEQ ID NO: 65867 - protein, 9 aa, Homo Sapiens
AQVRKENQW

SEQ ID NO: 65868 - protein, 9 aa, Homo Sapiens
AQVVGVLKI

SEQ ID NO: 65869 - protein, 9 aa, Homo Sapiens
AQWADQEQW

SEQ ID NO: 65870 - protein, 9 aa, Homo Sapiens
AQYDRQIRL

SEQ ID NO: 65871 - protein, 9 aa, Homo Sapiens
AQYEHDLEV

SEQ ID NO: 65872 - protein, 9 aa, Homo Sapiens
AQYFEPLTL

SEQ ID NO: 65873 - protein, 9 aa, Homo Sapiens
AQYKEISKF

SEQ ID NO: 65874 - protein, 9 aa, Homo Sapiens
AQYPSEHLI

SEQ ID NO: 65875 - protein, 9 aa, Homo Sapiens
AQYREVAAF

SEQ ID NO: 65876 - protein, 9 aa, Homo Sapiens
ATDGKVLLW

SEQ ID NO: 65877 - protein, 9 aa, Homo Sapiens
AVAGEDARI

SEQ ID NO: 65878 - protein, 9 aa, Homo Sapiens
AVAPPDAGL

SEQ ID NO: 65879 - protein, 9 aa, Homo Sapiens
AVDEVVLKF

SEQ ID NO: 65880 - protein, 9 aa, Homo Sapiens
AVDFTQEEW

SEQ ID NO: 65881 - protein, 9 aa, Homo Sapiens
AVDGISLHL

SEQ ID NO: 65882 - protein, 9 aa, Homo Sapiens
AVDNILLKL

SEQ ID NO: 65883 - protein, 9 aa, Homo Sapiens
AVDPAILLI

SEQ ID NO: 65884 - protein, 9 aa, Homo Sapiens
AVHAEVFTI

SEQ ID NO: 65885 - protein, 9 aa, Homo Sapiens
AVIEAEHTL

SEQ ID NO: 65886 - protein, 9 aa, Homo Sapiens
AVSDILEKL

SEQ ID NO: 65887 - protein, 9 aa, Homo Sapiens
AVSLILEEW

SEQ ID NO: 65888 - protein, 9 aa, Homo Sapiens
AVSNLALQF

SEQ ID NO: 65889 - protein, 9 aa, Homo Sapiens
AVSRILEEW

SEQ ID NO: 65890 - protein, 9 aa, Homo Sapiens
AVSSPDPLL

SEQ ID NO: 65891 - protein, 9 aa, Homo Sapiens
AVTMDDFRW

SEQ ID NO: 65892 - protein, 9 aa, Homo Sapiens
AVVAAGDKW

SEQ ID NO: 65893 - protein, 9 aa, Homo Sapiens
AVVDLIDAI

SEQ ID NO: 65894 - protein, 9 aa, Homo Sapiens
AVVKIVEEW

SEQ ID NO: 65895 - protein, 9 aa, Homo Sapiens
AVVNVADLW

SEQ ID NO: 65896 - protein, 9 aa, Homo Sapiens
DLIGVVEAL

SEQ ID NO: 65897 - protein, 9 aa, Homo Sapiens
EGTVIIPNL

SEQ ID NO: 65898 - protein, 9 aa, Homo Sapiens
EIQRLEGQL

SEQ ID NO: 65899 - protein, 9 aa, Homo Sapiens
EIVRESHSL

SEQ ID NO: 65900 - protein, 9 aa, Homo Sapiens
ELAPYDENW

SEQ ID NO: 65901 - protein, 9 aa, Homo Sapiens
ELQRVLQSL

SEQ ID NO: 65902 - protein, 9 aa, Homo Sapiens
ENRGPTELL

SEQ ID NO: 65903 - protein, 9 aa, Homo Sapiens
EQDQAVHLW

SEQ ID NO: 65904 - protein, 9 aa, Homo Sapiens
EQNRQPLLL

SEQ ID NO: 65905 - protein, 9 aa, Homo Sapiens
ERVSYALLF

SEQ ID NO: 65906 - protein, 9 aa, Homo Sapiens
ESLTANLLI

SEQ ID NO: 65907 - protein, 9 aa, Homo Sapiens
FDPNIRDSR

SEQ ID NO: 65908 - protein, 9 aa, Homo Sapiens
FEAPIKLVF

SEQ ID NO: 65909 - protein, 9 aa, Homo Sapiens
FIDVDDERW

SEQ ID NO: 65910 - protein, 9 aa, Homo Sapiens
FLDDLGLKF

SEQ ID NO: 65911 - protein, 9 aa, Homo Sapiens
FLDENVHFF

SEQ ID NO: 65912 - protein, 9 aa, Homo Sapiens
FLDGNELTL

SEQ ID NO: 65913 - protein, 9 aa, Homo Sapiens
FLDGNEMTL

SEQ ID NO: 65914 - protein, 9 aa, Homo Sapiens
FLDLTEQEF

SEQ ID NO: 65915 - protein, 9 aa, Homo Sapiens
FLDSLRDLI

SEQ ID NO: 65916 - protein, 9 aa, Homo Sapiens
FLEDGIRMW

SEQ ID NO: 65917 - protein, 9 aa, Homo Sapiens
FLHELEEKM

SEQ ID NO: 65918 - protein, 9 aa, Homo Sapiens
FLIRESETL

SEQ ID NO: 65919 - protein, 9 aa, Homo Sapiens
FLLALEPEL

SEQ ID NO: 65920 - protein, 9 aa, Homo Sapiens
FLPREDHLF

SEQ ID NO: 65921 - protein, 9 aa, Homo Sapiens
FLPRTDYSF

SEQ ID NO: 65922 - protein, 9 aa, Homo Sapiens
FLSKVEETF

SEQ ID NO: 65923 - protein, 9 aa, Homo Sapiens
FLSPDKLSL

SEQ ID NO: 65924 - protein, 9 aa, Homo Sapiens
FLSSFEEKI

SEQ ID NO: 65925 - protein, 9 aa, Homo Sapiens
FLSSVIQNL

SEQ ID NO: 65926 - protein, 9 aa, Homo Sapiens
FLVLDEQRF

SEQ ID NO: 65927 - protein, 9 aa, Homo Sapiens
FLVPTFEQL

SEQ ID NO: 65928 - protein, 9 aa, Homo Sapiens
FLWKEPATM

SEQ ID NO: 65929 - protein, 9 aa, Homo Sapiens
FLYQPDWRF

SEQ ID NO: 65930 - protein, 9 aa, Homo Sapiens
FLYSDEVQI

SEQ ID NO: 65931 - protein, 9 aa, Homo Sapiens
FMDESTQCF

SEQ ID NO: 65932 - protein, 9 aa, Homo Sapiens
FMEAYDQKI

SEQ ID NO: 65933 - protein, 9 aa, Homo Sapiens
FMSEISDEF

SEQ ID NO: 65934 - protein, 9 aa, Homo Sapiens
FMTDVKENF

SEQ ID NO: 65935 - protein, 9 aa, Homo Sapiens
FQAEIAQLM

SEQ ID NO: 65936 - protein, 9 aa, Homo Sapiens
FQAHKEENW

SEQ ID NO: 65937 - protein, 9 aa, Homo Sapiens
FQALPHELF

SEQ ID NO: 65938 - protein, 9 aa, Homo Sapiens
FQAPTAKEM

SEQ ID NO: 65939 - protein, 9 aa, Homo Sapiens
FQAWDDARM

SEQ ID NO: 65940 - protein, 9 aa, Homo Sapiens
FQCQTKLEL

SEQ ID NO: 65941 - protein, 9 aa, Homo Sapiens
FQDALEPLL

SEQ ID NO: 65942 - protein, 9 aa, Homo Sapiens
FQDEINWRL

SEQ ID NO: 65943 - protein, 9 aa, Homo Sapiens
FQDGTKATF

SEQ ID NO: 65944 - protein, 9 aa, Homo Sapiens
FQDKRNLYL

SEQ ID NO: 65945 - protein, 9 aa, Homo Sapiens
FQDPVPLTV

SEQ ID NO: 65946 - protein, 9 aa, Homo Sapiens
FQDQVLDLL

SEQ ID NO: 65947 - protein, 9 aa, Homo Sapiens
FQDSGLSRF

SEQ ID NO: 65948 - protein, 9 aa, Homo Sapiens
FQEADSPTL

SEQ ID NO: 65949 - protein, 9 aa, Homo Sapiens
FQEDIISIW

SEQ ID NO: 65950 - protein, 9 aa, Homo Sapiens
FQEDSRSTL

SEQ ID NO: 65951 - protein, 9 aa, Homo Sapiens
FQGDIRLLM

SEQ ID NO: 65952 - protein, 9 aa, Homo Sapiens
FQHALEELM

SEQ ID NO: 65953 - protein, 9 aa, Homo Sapiens
FQHGKVEII

SEQ ID NO: 65954 - protein, 9 aa, Homo Sapiens
FQHWDPDIL

SEQ ID NO: 65955 - protein, 9 aa, Homo Sapiens
FQIGDYLDI

SEQ ID NO: 65956 - protein, 9 aa, Homo Sapiens
FQIGPCEGI

SEQ ID NO: 65957 - protein, 9 aa, Homo Sapiens
FQLIQKELI

SEQ ID NO: 65958 - protein, 9 aa, Homo Sapiens
FQLRDKYMF

SEQ ID NO: 65959 - protein, 9 aa, Homo Sapiens
FQLRSFDQL

SEQ ID NO: 65960 - protein, 9 aa, Homo Sapiens
FQLTQGDQL

SEQ ID NO: 65961 - protein, 9 aa, Homo Sapiens
FQNIRPLFI

SEQ ID NO: 65962 - protein, 9 aa, Homo Sapiens
FQRLAALKL

SEQ ID NO: 65963 - protein, 9 aa, Homo Sapiens
FQSFQDHKL

SEQ ID NO: 65964 - protein, 9 aa, Homo Sapiens
FQSGRDDTW

SEQ ID NO: 65965 - protein, 9 aa, Homo Sapiens
FQSSAVMAL

SEQ ID NO: 65966 - protein, 9 aa, Homo Sapiens
FSAAHEEQW

SEQ ID NO: 65967 - protein, 9 aa, Homo Sapiens
FTAGKDHKI

SEQ ID NO: 65968 - protein, 9 aa, Homo Sapiens
FVDCPDESW

SEQ ID NO: 65969 - protein, 9 aa, Homo Sapiens
FVDDQQTFF

SEQ ID NO: 65970 - protein, 9 aa, Homo Sapiens
FVDSCLQKI

SEQ ID NO: 65971 - protein, 9 aa, Homo Sapiens
FVNDIFERI

SEQ ID NO: 65972 - protein, 9 aa, Homo Sapiens
GIDKPDVRF

SEQ ID NO: 65973 - protein, 9 aa, Homo Sapiens
GIDQSYQLL

SEQ ID NO: 65974 - protein, 9 aa, Homo Sapiens
GIMKKAYEL

SEQ ID NO: 65975 - protein, 9 aa, Homo Sapiens
GISFPDPKM

SEQ ID NO: 65976 - protein, 9 aa, Homo Sapiens
GISMGDHLW

SEQ ID NO: 65977 - protein, 9 aa, Homo Sapiens
GIYPHKLVF

SEQ ID NO: 65978 - protein, 9 aa, Homo Sapiens
GLAPKDPAL

SEQ ID NO: 65979 - protein, 9 aa, Homo Sapiens
GLAPTDPVL

SEQ ID NO: 65980 - protein, 9 aa, Homo Sapiens
GLCDSIITI

SEQ ID NO: 65981 - protein, 9 aa, Homo Sapiens
GLDVEDVKF

SEQ ID NO: 65982 - protein, 9 aa, Homo Sapiens
GLFHGNEML

SEQ ID NO: 65983 - protein, 9 aa, Homo Sapiens
GLFHGTELL

SEQ ID NO: 65984 - protein, 9 aa, Homo Sapiens
GLHSVLEEW

SEQ ID NO: 65985 - protein, 9 aa, Homo Sapiens
GLIKLYENF

SEQ ID NO: 65986 - protein, 9 aa, Homo Sapiens
GLINDMVRF

SEQ ID NO: 65987 - protein, 9 aa, Homo Sapiens
GLSDLRLEL

SEQ ID NO: 65988 - protein, 9 aa, Homo Sapiens
GLSFVRLLL

SEQ ID NO: 65989 - protein, 9 aa, Homo Sapiens
GLSKDITHF

SEQ ID NO: 65990 - protein, 9 aa, Homo Sapiens
GLSNTVMRL

SEQ ID NO: 65991 - protein, 9 aa, Homo Sapiens
GLVDGGDHI

SEQ ID NO: 65992 - protein, 9 aa, Homo Sapiens
GLYPAPLKI

SEQ ID NO: 65993 - protein, 9 aa, Homo Sapiens
GMAAVVDRI

SEQ ID NO: 65994 - protein, 9 aa, Homo Sapiens
GQADVISKL

SEQ ID NO: 65995 - protein, 9 aa, Homo Sapiens
GQAEALDKI

SEQ ID NO: 65996 - protein, 9 aa, Homo Sapiens
GQAEDHLKL

SEQ ID NO: 65997 - protein, 9 aa, Homo Sapiens
GQAGGKLHI

SEQ ID NO: 65998 - protein, 9 aa, Homo Sapiens
GQALDGVSI

SEQ ID NO: 65999 - protein, 9 aa, Homo Sapiens
GQALPEMEI

SEQ ID NO: 66000 - protein, 9 aa, Homo Sapiens
GQAPPGKAL

SEQ ID NO: 66001 - protein, 9 aa, Homo Sapiens
GQARPLEFL

SEQ ID NO: 66002 - protein, 9 aa, Homo Sapiens
GQASLIDLL

SEQ ID NO: 66003 - protein, 9 aa, Homo Sapiens
GQASVSLRL

SEQ ID NO: 66004 - protein, 9 aa, Homo Sapiens
GQATTAYFL

SEQ ID NO: 66005 - protein, 9 aa, Homo Sapiens
GQAVEVVTL

SEQ ID NO: 66006 - protein, 9 aa, Homo Sapiens
GQCGKSFSL

SEQ ID NO: 66007 - protein, 9 aa, Homo Sapiens
GQCGLTFKW

SEQ ID NO: 66008 - protein, 9 aa, Homo Sapiens
GQCGNQIGF

SEQ ID NO: 66009 - protein, 9 aa, Homo Sapiens
GQCIKEAHL

SEQ ID NO: 66010 - protein, 9 aa, Homo Sapiens
GQCRLRVEF

SEQ ID NO: 66011 - protein, 9 aa, Homo Sapiens
GQCSQNEYF

SEQ ID NO: 66012 - protein, 9 aa, Homo Sapiens
GQCVIGLQM

SEQ ID NO: 66013 - protein, 9 aa, Homo Sapiens
GQDAASKAW

SEQ ID NO: 66014 - protein, 9 aa, Homo Sapiens
GQDAHCQLL

SEQ ID NO: 66015 - protein, 9 aa, Homo Sapiens
GQDAVAIEL

SEQ ID NO: 66016 - protein, 9 aa, Homo Sapiens
GQDDLVVCL

SEQ ID NO: 66017 - protein, 9 aa, Homo Sapiens
GQDGSVVQF

SEQ ID NO: 66018 - protein, 9 aa, Homo Sapiens
GQDIEYIEI

SEQ ID NO: 66019 - protein, 9 aa, Homo Sapiens
GQDKIRPLW

SEQ ID NO: 66020 - protein, 9 aa, Homo Sapiens
GQDKLVHLW

SEQ ID NO: 66021 - protein, 9 aa, Homo Sapiens
GQDMLYQSL

SEQ ID NO: 66022 - protein, 9 aa, Homo Sapiens
GQDPDEIGI

SEQ ID NO: 66023 - protein, 9 aa, Homo Sapiens
GQDPGAPQL

SEQ ID NO: 66024 - protein, 9 aa, Homo Sapiens
GQDRILIRF

SEQ ID NO: 66025 - protein, 9 aa, Homo Sapiens
GQDSIVLLI

SEQ ID NO: 66026 - protein, 9 aa, Homo Sapiens
GQDSSEIHF

SEQ ID NO: 66027 - protein, 9 aa, Homo Sapiens
GQDVGRYQV

SEQ ID NO: 66028 - protein, 9 aa, Homo Sapiens
GQDYEHVTM

SEQ ID NO: 66029 - protein, 9 aa, Homo Sapiens
GQEGSIHNL

SEQ ID NO: 66030 - protein, 9 aa, Homo Sapiens
GQFALSGSW

SEQ ID NO: 66031 - protein, 9 aa, Homo Sapiens
GQFCIPEHI

SEQ ID NO: 66032 - protein, 9 aa, Homo Sapiens
GQFDVEFRL

SEQ ID NO: 66033 - protein, 9 aa, Homo Sapiens
GQFIGPHRI

SEQ ID NO: 66034 - protein, 9 aa, Homo Sapiens
GQFLEVITL

SEQ ID NO: 66035 - protein, 9 aa, Homo Sapiens
GQFPGHNEF

SEQ ID NO: 66036 - protein, 9 aa, Homo Sapiens
GQFRDQIKF

SEQ ID NO: 66037 - protein, 9 aa, Homo Sapiens
GQFSKPFSF

SEQ ID NO: 66038 - protein, 9 aa, Homo Sapiens
GQGHFWELW

SEQ ID NO: 66039 - protein, 9 aa, Homo Sapiens
GQHADIYKL

SEQ ID NO: 66040 - protein, 9 aa, Homo Sapiens
GQHAFYQLI

SEQ ID NO: 66041 - protein, 9 aa, Homo Sapiens
GQHAVSAYL

SEQ ID NO: 66042 - protein, 9 aa, Homo Sapiens
GQHPSQHLI

SEQ ID NO: 66043 - protein, 9 aa, Homo Sapiens
GQHSSNVQW

SEQ ID NO: 66044 - protein, 9 aa, Homo Sapiens
GQHVATQHF

SEQ ID NO: 66045 - protein, 9 aa, Homo Sapiens
GQIDLLERL

SEQ ID NO: 66046 - protein, 9 aa, Homo Sapiens
GQIDPEPVM

SEQ ID NO: 66047 - protein, 9 aa, Homo Sapiens
GQIEDELNL

SEQ ID NO: 66048 - protein, 9 aa, Homo Sapiens
GQIFILDCL

SEQ ID NO: 66049 - protein, 9 aa, Homo Sapiens
GQIKEVERI

SEQ ID NO: 66050 - protein, 9 aa, Homo Sapiens
GQIKQIIRI

SEQ ID NO: 66051 - protein, 9 aa, Homo Sapiens
GQIMDSETF

SEQ ID NO: 66052 - protein, 9 aa, Homo Sapiens
GQIVLVDDW

SEQ ID NO: 66053 - protein, 9 aa, Homo Sapiens
GQKEGEPRI

SEQ ID NO: 66054 - protein, 9 aa, Homo Sapiens
GQLAEHESI

SEQ ID NO: 66055 - protein, 9 aa, Homo Sapiens
GQLALDPSL

SEQ ID NO: 66056 - protein, 9 aa, Homo Sapiens
GQLDFSEFL

SEQ ID NO: 66057 - protein, 9 aa, Homo Sapiens
GQLDVRELI

SEQ ID NO: 66058 - protein, 9 aa, Homo Sapiens
GQLLNDPFL

SEQ ID NO: 66059 - protein, 9 aa, Homo Sapiens
GQLVLQDVW

SEQ ID NO: 66060 - protein, 9 aa, Homo Sapiens
GQMAYILQL

SEQ ID NO: 66061 - protein, 9 aa, Homo Sapiens
GQMHGVVFW

SEQ ID NO: 66062 - protein, 9 aa, Homo Sapiens
GQMPSDKTI

SEQ ID NO: 66063 - protein, 9 aa, Homo Sapiens
GQMQMAELL

SEQ ID NO: 66064 - protein, 9 aa, Homo Sapiens
GQNPFELAF

SEQ ID NO: 66065 - protein, 9 aa, Homo Sapiens
GQNPTEAEL

SEQ ID NO: 66066 - protein, 9 aa, Homo Sapiens
GQNRIHLEI

SEQ ID NO: 66067 - protein, 9 aa, Homo Sapiens
GQNSADISI

SEQ ID NO: 66068 - protein, 9 aa, Homo Sapiens
GQNSLCHQI

SEQ ID NO: 66069 - protein, 9 aa, Homo Sapiens
GQQLEIVCL

SEQ ID NO: 66070 - protein, 9 aa, Homo Sapiens
GQQQETETF

SEQ ID NO: 66071 - protein, 9 aa, Homo Sapiens
GQRKEVEVF

SEQ ID NO: 66072 - protein, 9 aa, Homo Sapiens
GQSALPQRL

SEQ ID NO: 66073 - protein, 9 aa, Homo Sapiens
GQSAVASNI

SEQ ID NO: 66074 - protein, 9 aa, Homo Sapiens
GQSELASRL

SEQ ID NO: 66075 - protein, 9 aa, Homo Sapiens
GQSFSEQHI

SEQ ID NO: 66076 - protein, 9 aa, Homo Sapiens
GQSGAGNNW

SEQ ID NO: 66077 - protein, 9 aa, Homo Sapiens
GQSIDKSYL

SEQ ID NO: 66078 - protein, 9 aa, Homo Sapiens
GQSIYGDKF

SEQ ID NO: 66079 - protein, 9 aa, Homo Sapiens
GQSKENNYL

SEQ ID NO: 66080 - protein, 9 aa, Homo Sapiens
GQSKGFAFI

SEQ ID NO: 66081 - protein, 9 aa, Homo Sapiens
GQSKITFLL

SEQ ID NO: 66082 - protein, 9 aa, Homo Sapiens
GQSPVKAEW

SEQ ID NO: 66083 - protein, 9 aa, Homo Sapiens
GQSRAIERL

SEQ ID NO: 66084 - protein, 9 aa, Homo Sapiens
GQSTVNHSL

SEQ ID NO: 66085 - protein, 9 aa, Homo Sapiens
GQSVLRSSW

SEQ ID NO: 66086 - protein, 9 aa, Homo Sapiens
GQSWHPEHF

SEQ ID NO: 66087 - protein, 9 aa, Homo Sapiens
GQSWPESLI

SEQ ID NO: 66088 - protein, 9 aa, Homo Sapiens
GQTAEVPNL

SEQ ID NO: 66089 - protein, 9 aa, Homo Sapiens
GQTAIDAAL

SEQ ID NO: 66090 - protein, 9 aa, Homo Sapiens
GQTKEVLVI

SEQ ID NO: 66091 - protein, 9 aa, Homo Sapiens
GQTREHALL

SEQ ID NO: 66092 - protein, 9 aa, Homo Sapiens
GQTSVIEQI

SEQ ID NO: 66093 - protein, 9 aa, Homo Sapiens
GQTSVVSFL

SEQ ID NO: 66094 - protein, 9 aa, Homo Sapiens
GQVFFVDHI

SEQ ID NO: 66095 - protein, 9 aa, Homo Sapiens
GQVHLFEHI

SEQ ID NO: 66096 - protein, 9 aa, Homo Sapiens
GQVPDTNYI

SEQ ID NO: 66097 - protein, 9 aa, Homo Sapiens
GQVQYLDLI

SEQ ID NO: 66098 - protein, 9 aa, Homo Sapiens
GQVSIHSVW

SEQ ID NO: 66099 - protein, 9 aa, Homo Sapiens
GQVTDPRGI

SEQ ID NO: 66100 - protein, 9 aa, Homo Sapiens
GQWKEEQKL

SEQ ID NO: 66101 - protein, 9 aa, Homo Sapiens
GQWKKGFVL

SEQ ID NO: 66102 - protein, 9 aa, Homo Sapiens
GQWRFVDVL

SEQ ID NO: 66103 - protein, 9 aa, Homo Sapiens
GQYYDLLRL

SEQ ID NO: 66104 - protein, 9 aa, Homo Sapiens
GQYYKPEQF

SEQ ID NO: 66105 - protein, 9 aa, Homo Sapiens
GVCKNDPKL

SEQ ID NO: 66106 - protein, 9 aa, Homo Sapiens
GVFHGIENF

SEQ ID NO: 66107 - protein, 9 aa, Homo Sapiens
GVSHVFEYI

SEQ ID NO: 66108 - protein, 9 aa, Homo Sapiens
GVTKFGDNI

SEQ ID NO: 66109 - protein, 9 aa, Homo Sapiens
GVTVVGDII

SEQ ID NO: 66110 - protein, 9 aa, Homo Sapiens
GVVKEGDQI

SEQ ID NO: 66111 - protein, 9 aa, Homo Sapiens
GVVQSGDHI

SEQ ID NO: 66112 - protein, 9 aa, Homo Sapiens
GVVSKGDKI

SEQ ID NO: 66113 - protein, 9 aa, Homo Sapiens
HAIEDKETI

SEQ ID NO: 66114 - protein, 9 aa, Homo Sapiens
HEGDIILKI

SEQ ID NO: 66115 - protein, 9 aa, Homo Sapiens
HIAKLQELW

SEQ ID NO: 66116 - protein, 9 aa, Homo Sapiens
HIAQRDYSW

SEQ ID NO: 66117 - protein, 9 aa, Homo Sapiens
HIDAVSLLL

SEQ ID NO: 66118 - protein, 9 aa, Homo Sapiens
HIDNNILLI

SEQ ID NO: 66119 - protein, 9 aa, Homo Sapiens
HIFKDKVVL

SEQ ID NO: 66120 - protein, 9 aa, Homo Sapiens
HIIGQESAI

SEQ ID NO: 66121 - protein, 9 aa, Homo Sapiens
HIIHIDFGF

SEQ ID NO: 66122 - protein, 9 aa, Homo Sapiens
HILELVDNW

SEQ ID NO: 66123 - protein, 9 aa, Homo Sapiens
HILRGEPVI

SEQ ID NO: 66124 - protein, 9 aa, Homo Sapiens
HINHDDPSL

SEQ ID NO: 66125 - protein, 9 aa, Homo Sapiens
HITKVEERL

SEQ ID NO: 66126 - protein, 9 aa, Homo Sapiens
HIVSVDEHL

SEQ ID NO: 66127 - protein, 9 aa, Homo Sapiens
HIYHSEYFL

SEQ ID NO: 66128 - protein, 9 aa, Homo Sapiens
HLAGVKDQL

SEQ ID NO: 66129 - protein, 9 aa, Homo Sapiens
HLAKDLLVL

SEQ ID NO: 66130 - protein, 9 aa, Homo Sapiens
HLANIVERL

SEQ ID NO: 66131 - protein, 9 aa, Homo Sapiens
HLAVEHDNI

SEQ ID NO: 66132 - protein, 9 aa, Homo Sapiens
HLAVNDFEL

SEQ ID NO: 66133 - protein, 9 aa, Homo Sapiens
HLAVVELLL

SEQ ID NO: 66134 - protein, 9 aa, Homo Sapiens
HLAWFGDSL

SEQ ID NO: 66135 - protein, 9 aa, Homo Sapiens
HLAWVQEEW

SEQ ID NO: 66136 - protein, 9 aa, Homo Sapiens
HLCSYQHKF

SEQ ID NO: 66137 - protein, 9 aa, Homo Sapiens
HLCTYEKQI

SEQ ID NO: 66138 - protein, 9 aa, Homo Sapiens
HLDATKLLL

SEQ ID NO: 66139 - protein, 9 aa, Homo Sapiens
HLDDIRNDW

SEQ ID NO: 66140 - protein, 9 aa, Homo Sapiens
HLDDIRQDW

SEQ ID NO: 66141 - protein, 9 aa, Homo Sapiens
HLDDQMTLL

SEQ ID NO: 66142 - protein, 9 aa, Homo Sapiens
HLDEAIHVL

SEQ ID NO: 66143 - protein, 9 aa, Homo Sapiens
HLDEARTLL

SEQ ID NO: 66144 - protein, 9 aa, Homo Sapiens
HLDEKSFRW

SEQ ID NO: 66145 - protein, 9 aa, Homo Sapiens
HLDEVFLEL

SEQ ID NO: 66146 - protein, 9 aa, Homo Sapiens
HLDGHHVVF

SEQ ID NO: 66147 - protein, 9 aa, Homo Sapiens
HLDISRDRL

SEQ ID NO: 66148 - protein, 9 aa, Homo Sapiens
HLDKEIEKL

SEQ ID NO: 66149 - protein, 9 aa, Homo Sapiens
HLDKQQVQL

SEQ ID NO: 66150 - protein, 9 aa, Homo Sapiens
HLDMEHERL

SEQ ID NO: 66151 - protein, 9 aa, Homo Sapiens
HLDPNSDCL

SEQ ID NO: 66152 - protein, 9 aa, Homo Sapiens
HLDQSDSDF

SEQ ID NO: 66153 - protein, 9 aa, Homo Sapiens
HLDRIVALF

SEQ ID NO: 66154 - protein, 9 aa, Homo Sapiens
HLDRTMYLL

SEQ ID NO: 66155 - protein, 9 aa, Homo Sapiens
HLDTTQQMI

SEQ ID NO: 66156 - protein, 9 aa, Homo Sapiens
HLEASAEKW

SEQ ID NO: 66157 - protein, 9 aa, Homo Sapiens
HLEDVFQLF

SEQ ID NO: 66158 - protein, 9 aa, Homo Sapiens
HLEKSVEKI

SEQ ID NO: 66159 - protein, 9 aa, Homo Sapiens
HLETGGQKI

SEQ ID NO: 66160 - protein, 9 aa, Homo Sapiens
HLFEDAYLL

SEQ ID NO: 66161 - protein, 9 aa, Homo Sapiens
HLFGECLFI

SEQ ID NO: 66162 - protein, 9 aa, Homo Sapiens
HLGKIEELL

SEQ ID NO: 66163 - protein, 9 aa, Homo Sapiens
HLGSVILIF

SEQ ID NO: 66164 - protein, 9 aa, Homo Sapiens
HLHEWIDLI

SEQ ID NO: 66165 - protein, 9 aa, Homo Sapiens
HLHFPDPSL

SEQ ID NO: 66166 - protein, 9 aa, Homo Sapiens
HLHQTPLHL

SEQ ID NO: 66167 - protein, 9 aa, Homo Sapiens
HLHRDKALL

SEQ ID NO: 66168 - protein, 9 aa, Homo Sapiens
HLIAQHSAI

SEQ ID NO: 66169 - protein, 9 aa, Homo Sapiens
HLINFSETL

SEQ ID NO: 66170 - protein, 9 aa, Homo Sapiens
HLLLEVEVI

SEQ ID NO: 66171 - protein, 9 aa, Homo Sapiens
HLLSDELLL

SEQ ID NO: 66172 - protein, 9 aa, Homo Sapiens
HLMEDRAYM

SEQ ID NO: 66173 - protein, 9 aa, Homo Sapiens
HLNALEERF

SEQ ID NO: 66174 - protein, 9 aa, Homo Sapiens
HLNPETITI

SEQ ID NO: 66175 - protein, 9 aa, Homo Sapiens
HLPSFDAHL

SEQ ID NO: 66176 - protein, 9 aa, Homo Sapiens
HLQQDSLKL

SEQ ID NO: 66177 - protein, 9 aa, Homo Sapiens
HLSDVVLRF

SEQ ID NO: 66178 - protein, 9 aa, Homo Sapiens
HLSEMVMKL

SEQ ID NO: 66179 - protein, 9 aa, Homo Sapiens
HLSEVQAFF

SEQ ID NO: 66180 - protein, 9 aa, Homo Sapiens
HLSGDSLFL

SEQ ID NO: 66181 - protein, 9 aa, Homo Sapiens
HLSIINEYL

SEQ ID NO: 66182 - protein, 9 aa, Homo Sapiens
HLSKIETRI

SEQ ID NO: 66183 - protein, 9 aa, Homo Sapiens
HLSSAHLAF

SEQ ID NO: 66184 - protein, 9 aa, Homo Sapiens
HLSSGHLKW

SEQ ID NO: 66185 - protein, 9 aa, Homo Sapiens
HLSSIEVLI

SEQ ID NO: 66186 - protein, 9 aa, Homo Sapiens
HLSSLIAQL

SEQ ID NO: 66187 - protein, 9 aa, Homo Sapiens
HLSTYSLVW

SEQ ID NO: 66188 - protein, 9 aa, Homo Sapiens
HLSVKDYCF

SEQ ID NO: 66189 - protein, 9 aa, Homo Sapiens
HLTELQEFW

SEQ ID NO: 66190 - protein, 9 aa, Homo Sapiens
HLTTVLDKL

SEQ ID NO: 66191 - protein, 9 aa, Homo Sapiens
HLVDLRISW

SEQ ID NO: 66192 - protein, 9 aa, Homo Sapiens
HLVGVDSLI

SEQ ID NO: 66193 - protein, 9 aa, Homo Sapiens
HLVHLPEEL

SEQ ID NO: 66194 - protein, 9 aa, Homo Sapiens
HLVKIGDLF

SEQ ID NO: 66195 - protein, 9 aa, Homo Sapiens
HLVSEDVKW

SEQ ID NO: 66196 - protein, 9 aa, Homo Sapiens
HLWTGEEQL

SEQ ID NO: 66197 - protein, 9 aa, Homo Sapiens
HLYFETVTI

SEQ ID NO: 66198 - protein, 9 aa, Homo Sapiens
HLYSSIEHL

SEQ ID NO: 66199 - protein, 9 aa, Homo Sapiens
HMAVAREDL

SEQ ID NO: 66200 - protein, 9 aa, Homo Sapiens
HMDGKIRLW

SEQ ID NO: 66201 - protein, 9 aa, Homo Sapiens
HMEFCYQEL

SEQ ID NO: 66202 - protein, 9 aa, Homo Sapiens
HMIRDIQTL

SEQ ID NO: 66203 - protein, 9 aa, Homo Sapiens
HQAAQALHL

SEQ ID NO: 66204 - protein, 9 aa, Homo Sapiens
HQAFVYDHL

SEQ ID NO: 66205 - protein, 9 aa, Homo Sapiens
HQAGISDTL

SEQ ID NO: 66206 - protein, 9 aa, Homo Sapiens
HQAGSDSLL

SEQ ID NO: 66207 - protein, 9 aa, Homo Sapiens
HQAPDTQSI

SEQ ID NO: 66208 - protein, 9 aa, Homo Sapiens
HQAQIDHYL

SEQ ID NO: 66209 - protein, 9 aa, Homo Sapiens
HQDDFNQLL

SEQ ID NO: 66210 - protein, 9 aa, Homo Sapiens
HQDEDKQLI

SEQ ID NO: 66211 - protein, 9 aa, Homo Sapiens
HQDGIHILV

SEQ ID NO: 66212 - protein, 9 aa, Homo Sapiens
HQDITEDSF

SEQ ID NO: 66213 - protein, 9 aa, Homo Sapiens
HQDLHSEAW

SEQ ID NO: 66214 - protein, 9 aa, Homo Sapiens
HQDPADPKM

SEQ ID NO: 66215 - protein, 9 aa, Homo Sapiens
HQDPQQNFL

SEQ ID NO: 66216 - protein, 9 aa, Homo Sapiens
HQDQLQVLL

SEQ ID NO: 66217 - protein, 9 aa, Homo Sapiens
HQDQMVQKI

SEQ ID NO: 66218 - protein, 9 aa, Homo Sapiens
HQDSRAHLL

SEQ ID NO: 66219 - protein, 9 aa, Homo Sapiens
HQDVDLVCI

SEQ ID NO: 66220 - protein, 9 aa, Homo Sapiens
HQEKPERPL

SEQ ID NO: 66221 - protein, 9 aa, Homo Sapiens
HQEQGHQLL

SEQ ID NO: 66222 - protein, 9 aa, Homo Sapiens
HQEVVELLI

SEQ ID NO: 66223 - protein, 9 aa, Homo Sapiens
HQFEKIEQF

SEQ ID NO: 66224 - protein, 9 aa, Homo Sapiens
HQFESSFEL

SEQ ID NO: 66225 - protein, 9 aa, Homo Sapiens
HQHEYFFLI

SEQ ID NO: 66226 - protein, 9 aa, Homo Sapiens
HQHNVSLQL

SEQ ID NO: 66227 - protein, 9 aa, Homo Sapiens
HQIAEEHGL

SEQ ID NO: 66228 - protein, 9 aa, Homo Sapiens
HQIDLIVQL

SEQ ID NO: 66229 - protein, 9 aa, Homo Sapiens
HQIGCQSSI

SEQ ID NO: 66230 - protein, 9 aa, Homo Sapiens
HQIIRDEGI

SEQ ID NO: 66231 - protein, 9 aa, Homo Sapiens
HQILTPFLL

SEQ ID NO: 66232 - protein, 9 aa, Homo Sapiens
HQITEVGTM

SEQ ID NO: 66233 - protein, 9 aa, Homo Sapiens
HQLDEIICW

SEQ ID NO: 66234 - protein, 9 aa, Homo Sapiens
HQLDSIDLW

SEQ ID NO: 66235 - protein, 9 aa, Homo Sapiens
HQLLEKVRI

SEQ ID NO: 66236 - protein, 9 aa, Homo Sapiens
HQNLKEFAL

SEQ ID NO: 66237 - protein, 9 aa, Homo Sapiens
HQNVESHLL

SEQ ID NO: 66238 - protein, 9 aa, Homo Sapiens
HQPSVLLEL

SEQ ID NO: 66239 - protein, 9 aa, Homo Sapiens
HQQLEEAQI

SEQ ID NO: 66240 - protein, 9 aa, Homo Sapiens
HQQLEGWKW

SEQ ID NO: 66241 - protein, 9 aa, Homo Sapiens
HQQLEGWRW

SEQ ID NO: 66242 - protein, 9 aa, Homo Sapiens
HQSALELIM

SEQ ID NO: 66243 - protein, 9 aa, Homo Sapiens
HQSASEHGL

SEQ ID NO: 66244 - protein, 9 aa, Homo Sapiens
HQSEVAQSF

SEQ ID NO: 66245 - protein, 9 aa, Homo Sapiens
HQSIIIERM

SEQ ID NO: 66246 - protein, 9 aa, Homo Sapiens
HQSKEENLI

SEQ ID NO: 66247 - protein, 9 aa, Homo Sapiens
HQSNVFHHI

SEQ ID NO: 66248 - protein, 9 aa, Homo Sapiens
HQSSHGDIF

SEQ ID NO: 66249 - protein, 9 aa, Homo Sapiens
HQTAIPCLL

SEQ ID NO: 66250 - protein, 9 aa, Homo Sapiens
HQTGGEVTI

SEQ ID NO: 66251 - protein, 9 aa, Homo Sapiens
HQTIVMQFI

SEQ ID NO: 66252 - protein, 9 aa, Homo Sapiens
HQTQVSQRL

SEQ ID NO: 66253 - protein, 9 aa, Homo Sapiens
HQTRAEEGL

SEQ ID NO: 66254 - protein, 9 aa, Homo Sapiens
HQVEEDYLF

SEQ ID NO: 66255 - protein, 9 aa, Homo Sapiens
HQVQHEARL

SEQ ID NO: 66256 - protein, 9 aa, Homo Sapiens
HQVRSMDEL

SEQ ID NO: 66257 - protein, 9 aa, Homo Sapiens
HQWLGPEFL

SEQ ID NO: 66258 - protein, 9 aa, Homo Sapiens
HTIGIGDSI

SEQ ID NO: 66259 - protein, 9 aa, Homo Sapiens
HTSPEDPCF

SEQ ID NO: 66260 - protein, 9 aa, Homo Sapiens
HTVFLFALL

SEQ ID NO: 66261 - protein, 9 aa, Homo Sapiens
HVDCVHLLL

SEQ ID NO: 66262 - protein, 9 aa, Homo Sapiens
HVDIVKLLL

SEQ ID NO: 66263 - protein, 9 aa, Homo Sapiens
HVDKVIMKL

SEQ ID NO: 66264 - protein, 9 aa, Homo Sapiens
HVICLAEEF

SEQ ID NO: 66265 - protein, 9 aa, Homo Sapiens
HVIDDFVQF

SEQ ID NO: 66266 - protein, 9 aa, Homo Sapiens
HVIDGEKTI

SEQ ID NO: 66267 - protein, 9 aa, Homo Sapiens
HVQDAEEAW

SEQ ID NO: 66268 - protein, 9 aa, Homo Sapiens
HVSAVPESL

SEQ ID NO: 66269 - protein, 9 aa, Homo Sapiens
HVSCVKLLL

SEQ ID NO: 66270 - protein, 9 aa, Homo Sapiens
HVSDLEYRI

SEQ ID NO: 66271 - protein, 9 aa, Homo Sapiens
HVSLVQLTL

SEQ ID NO: 66272 - protein, 9 aa, Homo Sapiens
HVSNLEFPF

SEQ ID NO: 66273 - protein, 9 aa, Homo Sapiens
IALLKIRSK

SEQ ID NO: 66274 - protein, 9 aa, Homo Sapiens
IIDEQPLIF

SEQ ID NO: 66275 - protein, 9 aa, Homo Sapiens
IIDNSPQAF

SEQ ID NO: 66276 - protein, 9 aa, Homo Sapiens
IIDPVALEI

SEQ ID NO: 66277 - protein, 9 aa, Homo Sapiens
IIISTPEKW

SEQ ID NO: 66278 - protein, 9 aa, Homo Sapiens
ILAAVETRL

SEQ ID NO: 66279 - protein, 9 aa, Homo Sapiens
ILAIAGEDF

SEQ ID NO: 66280 - protein, 9 aa, Homo Sapiens
ILANDGVLL

SEQ ID NO: 66281 - protein, 9 aa, Homo Sapiens
ILANIGDHF

SEQ ID NO: 66282 - protein, 9 aa, Homo Sapiens
ILARDILEI

SEQ ID NO: 66283 - protein, 9 aa, Homo Sapiens
ILATDDPNF

SEQ ID NO: 66284 - protein, 9 aa, Homo Sapiens
ILDDTVQRF

SEQ ID NO: 66285 - protein, 9 aa, Homo Sapiens
ILDGNQLHI

SEQ ID NO: 66286 - protein, 9 aa, Homo Sapiens
ILDKTGDKL

SEQ ID NO: 66287 - protein, 9 aa, Homo Sapiens
ILDPHVVLL

SEQ ID NO: 66288 - protein, 9 aa, Homo Sapiens
ILDPRPTII

SEQ ID NO: 66289 - protein, 9 aa, Homo Sapiens
ILDPSNTEI

SEQ ID NO: 66290 - protein, 9 aa, Homo Sapiens
ILDQREASI

SEQ ID NO: 66291 - protein, 9 aa, Homo Sapiens
ILDQTKTEL

SEQ ID NO: 66292 - protein, 9 aa, Homo Sapiens
ILDSSPEKL

SEQ ID NO: 66293 - protein, 9 aa, Homo Sapiens
ILDTEAVAW

SEQ ID NO: 66294 - protein, 9 aa, Homo Sapiens
ILEKESALF

SEQ ID NO: 66295 - protein, 9 aa, Homo Sapiens
ILEPLNPLL

SEQ ID NO: 66296 - protein, 9 aa, Homo Sapiens
ILIKQDQTL

SEQ ID NO: 66297 - protein, 9 aa, Homo Sapiens
ILNDVQDRF

SEQ ID NO: 66298 - protein, 9 aa, Homo Sapiens
ILNKVEERM

SEQ ID NO: 66299 - protein, 9 aa, Homo Sapiens
ILQDGRIFI

SEQ ID NO: 66300 - protein, 9 aa, Homo Sapiens
ILQEREYRL

SEQ ID NO: 66301 - protein, 9 aa, Homo Sapiens
ILQHLSEAW

SEQ ID NO: 66302 - protein, 9 aa, Homo Sapiens
ILQRVIDYI

SEQ ID NO: 66303 - protein, 9 aa, Homo Sapiens
ILRAILEVL

SEQ ID NO: 66304 - protein, 9 aa, Homo Sapiens
ILSDDKHDW

SEQ ID NO: 66305 - protein, 9 aa, Homo Sapiens
ILSEDKLTI

SEQ ID NO: 66306 - protein, 9 aa, Homo Sapiens
ILSGVVTKM

SEQ ID NO: 66307 - protein, 9 aa, Homo Sapiens
ILSKIPDEI

SEQ ID NO: 66308 - protein, 9 aa, Homo Sapiens
ILSSFESRL

SEQ ID NO: 66309 - protein, 9 aa, Homo Sapiens
ILYHLGEEW

SEQ ID NO: 66310 - protein, 9 aa, Homo Sapiens
ILYSKTEHL

SEQ ID NO: 66311 - protein, 9 aa, Homo Sapiens
IMDSLFQSF

SEQ ID NO: 66312 - protein, 9 aa, Homo Sapiens
IMDVTEEVW

SEQ ID NO: 66313 - protein, 9 aa, Homo Sapiens
IMKDKDNFW

SEQ ID NO: 66314 - protein, 9 aa, Homo Sapiens
IQAGIFQEF

SEQ ID NO: 66315 - protein, 9 aa, Homo Sapiens
IQAKVEPEI

SEQ ID NO: 66316 - protein, 9 aa, Homo Sapiens
IQARLPLLL

SEQ ID NO: 66317 - protein, 9 aa, Homo Sapiens
IQCRADQSF

SEQ ID NO: 66318 - protein, 9 aa, Homo Sapiens
IQDAGRTQI

SEQ ID NO: 66319 - protein, 9 aa, Homo Sapiens
IQDDAVHTL

SEQ ID NO: 66320 - protein, 9 aa, Homo Sapiens
IQDDMHLVI

SEQ ID NO: 66321 - protein, 9 aa, Homo Sapiens
IQDEEFYTL

SEQ ID NO: 66322 - protein, 9 aa, Homo Sapiens
IQDEIRSVI

SEQ ID NO: 66323 - protein, 9 aa, Homo Sapiens
IQDFMFHGI

SEQ ID NO: 66324 - protein, 9 aa, Homo Sapiens
IQDIYENSW

SEQ ID NO: 66325 - protein, 9 aa, Homo Sapiens
IQDKSVSFF

SEQ ID NO: 66326 - protein, 9 aa, Homo Sapiens
IQDPASQRL

SEQ ID NO: 66327 - protein, 9 aa, Homo Sapiens
IQDRGDQAF

SEQ ID NO: 66328 - protein, 9 aa, Homo Sapiens
IQDRVLYVL

SEQ ID NO: 66329 - protein, 9 aa, Homo Sapiens
IQHAEEFLI

SEQ ID NO: 66330 - protein, 9 aa, Homo Sapiens
IQHVVEDSW

SEQ ID NO: 66331 - protein, 9 aa, Homo Sapiens
IQIMKVEEI

SEQ ID NO: 66332 - protein, 9 aa, Homo Sapiens
IQSNYDIAI

SEQ ID NO: 66333 - protein, 9 aa, Homo Sapiens
IQTAVRLLL

SEQ ID NO: 66334 - protein, 9 aa, Homo Sapiens
IQVDLADKL

SEQ ID NO: 66335 - protein, 9 aa, Homo Sapiens
IRHTGEKPF

SEQ ID NO: 66336 - protein, 9 aa, Homo Sapiens
IRLSLEKKL

SEQ ID NO: 66337 - protein, 9 aa, Homo Sapiens
ISSFKDPKI

SEQ ID NO: 66338 - protein, 9 aa, Homo Sapiens
ISTHIGNEL

SEQ ID NO: 66339 - protein, 9 aa, Homo Sapiens
ITHKGEIEI

SEQ ID NO: 66340 - protein, 9 aa, Homo Sapiens
IVDIGRQDW

SEQ ID NO: 66341 - protein, 9 aa, Homo Sapiens
IVQGPDPNL

SEQ ID NO: 66342 - protein, 9 aa, Homo Sapiens
KAHPDVLTI

SEQ ID NO: 66343 - protein, 9 aa, Homo Sapiens
KAPGSTSNL

SEQ ID NO: 66344 - protein, 9 aa, Homo Sapiens
KAPVTKVAA

SEQ ID NO: 66345 - protein, 9 aa, Homo Sapiens
KESEVVMKF

SEQ ID NO: 66346 - protein, 9 aa, Homo Sapiens
KESSAKLYI

SEQ ID NO: 66347 - protein, 9 aa, Homo Sapiens
KESTLHLVL

SEQ ID NO: 66348 - protein, 9 aa, Homo Sapiens
KHLDVVTLL

SEQ ID NO: 66349 - protein, 9 aa, Homo Sapiens
KIAEKEVRI

SEQ ID NO: 66350 - protein, 9 aa, Homo Sapiens
KIAPNTPQL

SEQ ID NO: 66351 - protein, 9 aa, Homo Sapiens
KICDIAINW

SEQ ID NO: 66352 - protein, 9 aa, Homo Sapiens
KIDDILQTL

SEQ ID NO: 66353 - protein, 9 aa, Homo Sapiens
KIDGQQTII

SEQ ID NO: 66354 - protein, 9 aa, Homo Sapiens
KIDRLILEL

SEQ ID NO: 66355 - protein, 9 aa, Homo Sapiens
KIFPMGDRL

SEQ ID NO: 66356 - protein, 9 aa, Homo Sapiens
KIIEQEKEI

SEQ ID NO: 66357 - protein, 9 aa, Homo Sapiens
KIIESEEEL

SEQ ID NO: 66358 - protein, 9 aa, Homo Sapiens
KIIGDLLQF

SEQ ID NO: 66359 - protein, 9 aa, Homo Sapiens
KIIHDFPQF

SEQ ID NO: 66360 - protein, 9 aa, Homo Sapiens
KIMEEKIQI

SEQ ID NO: 66361 - protein, 9 aa, Homo Sapiens
KISEVVELL

SEQ ID NO: 66362 - protein, 9 aa, Homo Sapiens
KISLISEKW

SEQ ID NO: 66363 - protein, 9 aa, Homo Sapiens
KISMPDFDL

SEQ ID NO: 66364 - protein, 9 aa, Homo Sapiens
KISPEDTHL

SEQ ID NO: 66365 - protein, 9 aa, Homo Sapiens
KITDVIIGF

SEQ ID NO: 66366 - protein, 9 aa, Homo Sapiens
KIVEIDAHI

SEQ ID NO: 66367 - protein, 9 aa, Homo Sapiens
KIVIDFDSI

SEQ ID NO: 66368 - protein, 9 aa, Homo Sapiens
KIVPVEITI

SEQ ID NO: 66369 - protein, 9 aa, Homo Sapiens
KLAECQDQL

SEQ ID NO: 66370 - protein, 9 aa, Homo Sapiens
KLAEFIDFL

SEQ ID NO: 66371 - protein, 9 aa, Homo Sapiens
KLAEQYESF

SEQ ID NO: 66372 - protein, 9 aa, Homo Sapiens
KLAPKDIKI

SEQ ID NO: 66373 - protein, 9 aa, Homo Sapiens
KLAPKDVKI

SEQ ID NO: 66374 - protein, 9 aa, Homo Sapiens
KLAPPLVTL

SEQ ID NO: 66375 - protein, 9 aa, Homo Sapiens
KLAPPSSTL

SEQ ID NO: 66376 - protein, 9 aa, Homo Sapiens
KLAQDDLHI

SEQ ID NO: 66377 - protein, 9 aa, Homo Sapiens
KLATGQEEF

SEQ ID NO: 66378 - protein, 9 aa, Homo Sapiens
KLCDVTTGL

SEQ ID NO: 66379 - protein, 9 aa, Homo Sapiens
KLCEEEAVI

SEQ ID NO: 66380 - protein, 9 aa, Homo Sapiens
KLCKLQEAL

SEQ ID NO: 66381 - protein, 9 aa, Homo Sapiens
KLCSSAETL

SEQ ID NO: 66382 - protein, 9 aa, Homo Sapiens
KLCYVALDF

SEQ ID NO: 66383 - protein, 9 aa, Homo Sapiens
KLDAEVSKW

SEQ ID NO: 66384 - protein, 9 aa, Homo Sapiens
KLDDHVKKF

SEQ ID NO: 66385 - protein, 9 aa, Homo Sapiens
KLDDIVQHI

SEQ ID NO: 66386 - protein, 9 aa, Homo Sapiens
KLDEDVKMI

SEQ ID NO: 66387 - protein, 9 aa, Homo Sapiens
KLDELYGTW

SEQ ID NO: 66388 - protein, 9 aa, Homo Sapiens
KLDEREAGI

SEQ ID NO: 66389 - protein, 9 aa, Homo Sapiens
KLDETGNSL

SEQ ID NO: 66390 - protein, 9 aa, Homo Sapiens
KLDGLIHRF

SEQ ID NO: 66391 - protein, 9 aa, Homo Sapiens
KLDHVVTII

SEQ ID NO: 66392 - protein, 9 aa, Homo Sapiens
KLDLERETI

SEQ ID NO: 66393 - protein, 9 aa, Homo Sapiens
KLDPKALEW

SEQ ID NO: 66394 - protein, 9 aa, Homo Sapiens
KLDPSPQTI

SEQ ID NO: 66395 - protein, 9 aa, Homo Sapiens
KLDSSETTM

SEQ ID NO: 66396 - protein, 9 aa, Homo Sapiens
KLDTAYDDL

SEQ ID NO: 66397 - protein, 9 aa, Homo Sapiens
KLDTITWTW

SEQ ID NO: 66398 - protein, 9 aa, Homo Sapiens
KLDWVEVGL

SEQ ID NO: 66399 - protein, 9 aa, Homo Sapiens
KLEAGIRGI

SEQ ID NO: 66400 - protein, 9 aa, Homo Sapiens
KLEDLKLLF

SEQ ID NO: 66401 - protein, 9 aa, Homo Sapiens
KLEDTITLI

SEQ ID NO: 66402 - protein, 9 aa, Homo Sapiens
KLEEGKYLI

SEQ ID NO: 66403 - protein, 9 aa, Homo Sapiens
KLEEHEESL

SEQ ID NO: 66404 - protein, 9 aa, Homo Sapiens
KLEEIIHQI

SEQ ID NO: 66405 - protein, 9 aa, Homo Sapiens
KLEEKEHLL

SEQ ID NO: 66406 - protein, 9 aa, Homo Sapiens
KLEEKERAL

SEQ ID NO: 66407 - protein, 9 aa, Homo Sapiens
KLEEKRAEL

SEQ ID NO: 66408 - protein, 9 aa, Homo Sapiens
KLEGFHTQI

SEQ ID NO: 66409 - protein, 9 aa, Homo Sapiens
KLEGPDVSL

SEQ ID NO: 66410 - protein, 9 aa, Homo Sapiens
KLESIGQRI

SEQ ID NO: 66411 - protein, 9 aa, Homo Sapiens
KLFDQANKL

SEQ ID NO: 66412 - protein, 9 aa, Homo Sapiens
KLFGMIITI

SEQ ID NO: 66413 - protein, 9 aa, Homo Sapiens
KLFKEVASL

SEQ ID NO: 66414 - protein, 9 aa, Homo Sapiens
KLFNDAIRL

SEQ ID NO: 66415 - protein, 9 aa, Homo Sapiens
KLFPYEEHL

SEQ ID NO: 66416 - protein, 9 aa, Homo Sapiens
KLFQGQLVL

SEQ ID NO: 66417 - protein, 9 aa, Homo Sapiens
KLFSLQDLL

SEQ ID NO: 66418 - protein, 9 aa, Homo Sapiens
KLHCEVEVI

SEQ ID NO: 66419 - protein, 9 aa, Homo Sapiens
KLHDVEHVL

SEQ ID NO: 66420 - protein, 9 aa, Homo Sapiens
KLHEEIEHL

SEQ ID NO: 66421 - protein, 9 aa, Homo Sapiens
KLHGKPIRI

SEQ ID NO: 66422 - protein, 9 aa, Homo Sapiens
KLHRGEIKL

SEQ ID NO: 66423 - protein, 9 aa, Homo Sapiens
KLIDDVHRL

SEQ ID NO: 66424 - protein, 9 aa, Homo Sapiens
KLIEFMDTF

SEQ ID NO: 66425 - protein, 9 aa, Homo Sapiens
KLIENNDTI

SEQ ID NO: 66426 - protein, 9 aa, Homo Sapiens
KLIGKEVCF

SEQ ID NO: 66427 - protein, 9 aa, Homo Sapiens
KLIHPDEDI

SEQ ID NO: 66428 - protein, 9 aa, Homo Sapiens
KLIKDGLII

SEQ ID NO: 66429 - protein, 9 aa, Homo Sapiens
KLIKEGDIV

SEQ ID NO: 66430 - protein, 9 aa, Homo Sapiens
KLIKGVERL

SEQ ID NO: 66431 - protein, 9 aa, Homo Sapiens
KLISEEDLL

SEQ ID NO: 66432 - protein, 9 aa, Homo Sapiens
KLKQFEERL

SEQ ID NO: 66433 - protein, 9 aa, Homo Sapiens
KLLDLIEDL

SEQ ID NO: 66434 - protein, 9 aa, Homo Sapiens
KLLEEICNL

SEQ ID NO: 66435 - protein, 9 aa, Homo Sapiens
KLLEVYEQL

SEQ ID NO: 66436 - protein, 9 aa, Homo Sapiens
KLLEYIEEI

SEQ ID NO: 66437 - protein, 9 aa, Homo Sapiens
KLLLDHQCL

SEQ ID NO: 66438 - protein, 9 aa, Homo Sapiens
KLLNLISKL

SEQ ID NO: 66439 - protein, 9 aa, Homo Sapiens
KLLPENNVL

SEQ ID NO: 66440 - protein, 9 aa, Homo Sapiens
KLLPETVTI

SEQ ID NO: 66441 - protein, 9 aa, Homo Sapiens
KLLYLEDFF

SEQ ID NO: 66442 - protein, 9 aa, Homo Sapiens
KLMAIPLVF

SEQ ID NO: 66443 - protein, 9 aa, Homo Sapiens
KLMELLEEI

SEQ ID NO: 66444 - protein, 9 aa, Homo Sapiens
KLMELYERL

SEQ ID NO: 66445 - protein, 9 aa, Homo Sapiens
KLMSELESF

SEQ ID NO: 66446 - protein, 9 aa, Homo Sapiens
KLNDMIDAI

SEQ ID NO: 66447 - protein, 9 aa, Homo Sapiens
KLNEAKEEF

SEQ ID NO: 66448 - protein, 9 aa, Homo Sapiens
KLNEIVDQI

SEQ ID NO: 66449 - protein, 9 aa, Homo Sapiens
KLPNYEEKI

SEQ ID NO: 66450 - protein, 9 aa, Homo Sapiens
KLPPKDLRI

SEQ ID NO: 66451 - protein, 9 aa, Homo Sapiens
KLQDGVHII

SEQ ID NO: 66452 - protein, 9 aa, Homo Sapiens
KLQDVADSF

SEQ ID NO: 66453 - protein, 9 aa, Homo Sapiens
KLQEIENAI

SEQ ID NO: 66454 - protein, 9 aa, Homo Sapiens
KLQEVDSLW

SEQ ID NO: 66455 - protein, 9 aa, Homo Sapiens
KLQEVLDYL

SEQ ID NO: 66456 - protein, 9 aa, Homo Sapiens
KLQNKEHVI

SEQ ID NO: 66457 - protein, 9 aa, Homo Sapiens
KLQYFMEQF

SEQ ID NO: 66458 - protein, 9 aa, Homo Sapiens
KLREDLERL

SEQ ID NO: 66459 - protein, 9 aa, Homo Sapiens
KLSAEKVEI

SEQ ID NO: 66460 - protein, 9 aa, Homo Sapiens
KLSEDLMEF

SEQ ID NO: 66461 - protein, 9 aa, Homo Sapiens
KLSEIPLTL

SEQ ID NO: 66462 - protein, 9 aa, Homo Sapiens
KLSELQLRV

SEQ ID NO: 66463 - protein, 9 aa, Homo Sapiens
KLSETFLHI

SEQ ID NO: 66464 - protein, 9 aa, Homo Sapiens
KLSEYEMSI

SEQ ID NO: 66465 - protein, 9 aa, Homo Sapiens
KLSGEYEKF

SEQ ID NO: 66466 - protein, 9 aa, Homo Sapiens
KLSHETVTI

SEQ ID NO: 66467 - protein, 9 aa, Homo Sapiens
KLSKFKIRI

SEQ ID NO: 66468 - protein, 9 aa, Homo Sapiens
KLSLNMDNL

SEQ ID NO: 66469 - protein, 9 aa, Homo Sapiens
KLSPEELLL

SEQ ID NO: 66470 - protein, 9 aa, Homo Sapiens
KLSPEEYVL

SEQ ID NO: 66471 - protein, 9 aa, Homo Sapiens
KLSQLEEHL

SEQ ID NO: 66472 - protein, 9 aa, Homo Sapiens
KLSSHEEAL

SEQ ID NO: 66473 - protein, 9 aa, Homo Sapiens
KLTEDKETL

SEQ ID NO: 66474 - protein, 9 aa, Homo Sapiens
KLTEENTTL

SEQ ID NO: 66475 - protein, 9 aa, Homo Sapiens
KLTELEQRI

SEQ ID NO: 66476 - protein, 9 aa, Homo Sapiens
KLTIHGDLY

SEQ ID NO: 66477 - protein, 9 aa, Homo Sapiens
KLTKDGNVL

SEQ ID NO: 66478 - protein, 9 aa, Homo Sapiens
KLTKTNERL

SEQ ID NO: 66479 - protein, 9 aa, Homo Sapiens
KLTNIVEKF

SEQ ID NO: 66480 - protein, 9 aa, Homo Sapiens
KLTPIHDRI

SEQ ID NO: 66481 - protein, 9 aa, Homo Sapiens
KLTPVPDSF

SEQ ID NO: 66482 - protein, 9 aa, Homo Sapiens
KLVAGEHGL

SEQ ID NO: 66483 - protein, 9 aa, Homo Sapiens
KLVAIVDVI

SEQ ID NO: 66484 - protein, 9 aa, Homo Sapiens
KLVDDQMNW

SEQ ID NO: 66485 - protein, 9 aa, Homo Sapiens
KLVDEEPQL

SEQ ID NO: 66486 - protein, 9 aa, Homo Sapiens
KLVEEFMLL

SEQ ID NO: 66487 - protein, 9 aa, Homo Sapiens
KLVEGQEKL

SEQ ID NO: 66488 - protein, 9 aa, Homo Sapiens
KLVFIGDTL

SEQ ID NO: 66489 - protein, 9 aa, Homo Sapiens
KLVHPTDKF

SEQ ID NO: 66490 - protein, 9 aa, Homo Sapiens
KLVQIEYAL

SEQ ID NO: 66491 - protein, 9 aa, Homo Sapiens
KLVWFDLDL

SEQ ID NO: 66492 - protein, 9 aa, Homo Sapiens
KLWADRISL

SEQ ID NO: 66493 - protein, 9 aa, Homo Sapiens
KLWEAESKL

SEQ ID NO: 66494 - protein, 9 aa, Homo Sapiens
KLYDDMIRL

SEQ ID NO: 66495 - protein, 9 aa, Homo Sapiens
KLYDGFQYL

SEQ ID NO: 66496 - protein, 9 aa, Homo Sapiens
KLYGKPIRV

SEQ ID NO: 66497 - protein, 9 aa, Homo Sapiens
KLYHNEVEI

SEQ ID NO: 66498 - protein, 9 aa, Homo Sapiens
KLYPLEIVF

SEQ ID NO: 66499 - protein, 9 aa, Homo Sapiens
KLYPWIHQF

SEQ ID NO: 66500 - protein, 9 aa, Homo Sapiens
KLYSEMEQL

SEQ ID NO: 66501 - protein, 9 aa, Homo Sapiens
KMADIEYRL

SEQ ID NO: 66502 - protein, 9 aa, Homo Sapiens
KMCPPDEGW

SEQ ID NO: 66503 - protein, 9 aa, Homo Sapiens
KMDEVLYSI

SEQ ID NO: 66504 - protein, 9 aa, Homo Sapiens
KMDRALLEL

SEQ ID NO: 66505 - protein, 9 aa, Homo Sapiens
KMDRKDKLF

SEQ ID NO: 66506 - protein, 9 aa, Homo Sapiens
KMFFLIEKI

SEQ ID NO: 66507 - protein, 9 aa, Homo Sapiens
KMGGKDFSF

SEQ ID NO: 66508 - protein, 9 aa, Homo Sapiens
KMHARDFTV

SEQ ID NO: 66509 - protein, 9 aa, Homo Sapiens
KMIDSGDKL

SEQ ID NO: 66510 - protein, 9 aa, Homo Sapiens
KMMDVTVTI

SEQ ID NO: 66511 - protein, 9 aa, Homo Sapiens
KMQELEAKL

SEQ ID NO: 66512 - protein, 9 aa, Homo Sapiens
KMSEKILLL

SEQ ID NO: 66513 - protein, 9 aa, Homo Sapiens
KMSSKKLKI

SEQ ID NO: 66514 - protein, 9 aa, Homo Sapiens
KMVRADPSL

SEQ ID NO: 66515 - protein, 9 aa, Homo Sapiens
KMVTEKAGF

SEQ ID NO: 66516 - protein, 9 aa, Homo Sapiens
KMWEEAISL

SEQ ID NO: 66517 - protein, 9 aa, Homo Sapiens
KPERSFEIL

SEQ ID NO: 66518 - protein, 9 aa, Homo Sapiens
KQAADMILL

SEQ ID NO: 66519 - protein, 9 aa, Homo Sapiens
KQAEEYLSF

SEQ ID NO: 66520 - protein, 9 aa, Homo Sapiens
KQAEIVKRL

SEQ ID NO: 66521 - protein, 9 aa, Homo Sapiens
KQAETIEKL

SEQ ID NO: 66522 - protein, 9 aa, Homo Sapiens
KQAEVVGYF

SEQ ID NO: 66523 - protein, 9 aa, Homo Sapiens
KQAGLVVKL

SEQ ID NO: 66524 - protein, 9 aa, Homo Sapiens
KQAHVDVKF

SEQ ID NO: 66525 - protein, 9 aa, Homo Sapiens
KQALDKLKL

SEQ ID NO: 66526 - protein, 9 aa, Homo Sapiens
KQALVNCNW

SEQ ID NO: 66527 - protein, 9 aa, Homo Sapiens
KQAPPLEDI

SEQ ID NO: 66528 - protein, 9 aa, Homo Sapiens
KQAVGHEAI

SEQ ID NO: 66529 - protein, 9 aa, Homo Sapiens
KQAVTKAGW

SEQ ID NO: 66530 - protein, 9 aa, Homo Sapiens
KQCSENVHI

SEQ ID NO: 66531 - protein, 9 aa, Homo Sapiens
KQDETQTKI

SEQ ID NO: 66532 - protein, 9 aa, Homo Sapiens
KQDFSPEVL

SEQ ID NO: 66533 - protein, 9 aa, Homo Sapiens
KQDGSTIHI

SEQ ID NO: 66534 - protein, 9 aa, Homo Sapiens
KQDGTIQNL

SEQ ID NO: 66535 - protein, 9 aa, Homo Sapiens
KQDKACRFL

SEQ ID NO: 66536 - protein, 9 aa, Homo Sapiens
KQDKDAIAI

SEQ ID NO: 66537 - protein, 9 aa, Homo Sapiens
KQDKGGFGF

SEQ ID NO: 66538 - protein, 9 aa, Homo Sapiens
KQDKKEMAI

SEQ ID NO: 66539 - protein, 9 aa, Homo Sapiens
KQDNCVHDL

SEQ ID NO: 66540 - protein, 9 aa, Homo Sapiens
KQDNETFGF

SEQ ID NO: 66541 - protein, 9 aa, Homo Sapiens
KQDQSNVQI

SEQ ID NO: 66542 - protein, 9 aa, Homo Sapiens
KQDRLNQTL

SEQ ID NO: 66543 - protein, 9 aa, Homo Sapiens
KQDWLILHI

SEQ ID NO: 66544 - protein, 9 aa, Homo Sapiens
KQEDCVVVW

SEQ ID NO: 66545 - protein, 9 aa, Homo Sapiens
KQEEQDRLL

SEQ ID NO: 66546 - protein, 9 aa, Homo Sapiens
KQEFLEQKI

SEQ ID NO: 66547 - protein, 9 aa, Homo Sapiens
KQEGAVHVL

SEQ ID NO: 66548 - protein, 9 aa, Homo Sapiens
KQEIGFGNW

SEQ ID NO: 66549 - protein, 9 aa, Homo Sapiens
KQEKPERLL

SEQ ID NO: 66550 - protein, 9 aa, Homo Sapiens
KQELIQAEI

SEQ ID NO: 66551 - protein, 9 aa, Homo Sapiens
KQESIVLKL

SEQ ID NO: 66552 - protein, 9 aa, Homo Sapiens
KQESTVMVL

SEQ ID NO: 66553 - protein, 9 aa, Homo Sapiens
KQFAEENGL

SEQ ID NO: 66554 - protein, 9 aa, Homo Sapiens
KQFAEGSTL

SEQ ID NO: 66555 - protein, 9 aa, Homo Sapiens
KQFAEILHF

SEQ ID NO: 66556 - protein, 9 aa, Homo Sapiens
KQFEGTVEI

SEQ ID NO: 66557 - protein, 9 aa, Homo Sapiens
KQFELALQL

SEQ ID NO: 66558 - protein, 9 aa, Homo Sapiens
KQFFEEVGI

SEQ ID NO: 66559 - protein, 9 aa, Homo Sapiens
KQFGNILIL

SEQ ID NO: 66560 - protein, 9 aa, Homo Sapiens
KQFKYGNQL

SEQ ID NO: 66561 - protein, 9 aa, Homo Sapiens
KQFQFGHAL

SEQ ID NO: 66562 - protein, 9 aa, Homo Sapiens
KQFTVAELF

SEQ ID NO: 66563 - protein, 9 aa, Homo Sapiens
KQFYYRDEF

SEQ ID NO: 66564 - protein, 9 aa, Homo Sapiens
KQHAAELHL

SEQ ID NO: 66565 - protein, 9 aa, Homo Sapiens
KQHIPDAKL

SEQ ID NO: 66566 - protein, 9 aa, Homo Sapiens
KQIAEAVRL

SEQ ID NO: 66567 - protein, 9 aa, Homo Sapiens
KQIDDRKEW

SEQ ID NO: 66568 - protein, 9 aa, Homo Sapiens
KQIDKEPKI

SEQ ID NO: 66569 - protein, 9 aa, Homo Sapiens
KQIDSVNHI

SEQ ID NO: 66570 - protein, 9 aa, Homo Sapiens
KQIFEDHVF

SEQ ID NO: 66571 - protein, 9 aa, Homo Sapiens
KQIMENAEI

SEQ ID NO: 66572 - protein, 9 aa, Homo Sapiens
KQINQEYLI

SEQ ID NO: 66573 - protein, 9 aa, Homo Sapiens
KQIQDMLGL

SEQ ID NO: 66574 - protein, 9 aa, Homo Sapiens
KQIQEDWEL

SEQ ID NO: 66575 - protein, 9 aa, Homo Sapiens
KQLAEDVKL

SEQ ID NO: 66576 - protein, 9 aa, Homo Sapiens
KQLEDGRTL

SEQ ID NO: 66577 - protein, 9 aa, Homo Sapiens
KQLEDILVL

SEQ ID NO: 66578 - protein, 9 aa, Homo Sapiens
KQLFTLVEW

SEQ ID NO: 66579 - protein, 9 aa, Homo Sapiens
KQLKEELRL

SEQ ID NO: 66580 - protein, 9 aa, Homo Sapiens
KQLKLDPSI

SEQ ID NO: 66581 - protein, 9 aa, Homo Sapiens
KQLRDELRL

SEQ ID NO: 66582 - protein, 9 aa, Homo Sapiens
KQMAAEEAM

SEQ ID NO: 66583 - protein, 9 aa, Homo Sapiens
KQMEDGHTL

SEQ ID NO: 66584 - protein, 9 aa, Homo Sapiens
KQMPEEPKL

SEQ ID NO: 66585 - protein, 9 aa, Homo Sapiens
KQMPEPEQL

SEQ ID NO: 66586 - protein, 9 aa, Homo Sapiens
KQMSISTGL

SEQ ID NO: 66587 - protein, 9 aa, Homo Sapiens
KQNHESVQW

SEQ ID NO: 66588 - protein, 9 aa, Homo Sapiens
KQNRPIPQW

SEQ ID NO: 66589 - protein, 9 aa, Homo Sapiens
KQPRQDYQL

SEQ ID NO: 66590 - protein, 9 aa, Homo Sapiens
KQQEYEEQF

SEQ ID NO: 66591 - protein, 9 aa, Homo Sapiens
KQQMLEQHL

SEQ ID NO: 66592 - protein, 9 aa, Homo Sapiens
KQQRNEVSF

SEQ ID NO: 66593 - protein, 9 aa, Homo Sapiens
KQSDSLTRI

SEQ ID NO: 66594 - protein, 9 aa, Homo Sapiens
KQSEDMHAF

SEQ ID NO: 66595 - protein, 9 aa, Homo Sapiens
KQSEEHNML

SEQ ID NO: 66596 - protein, 9 aa, Homo Sapiens
KQSKTVDVL

SEQ ID NO: 66597 - protein, 9 aa, Homo Sapiens
KQSLDVLDL

SEQ ID NO: 66598 - protein, 9 aa, Homo Sapiens
KQSNSYDMF

SEQ ID NO: 66599 - protein, 9 aa, Homo Sapiens
KQSPECENF

SEQ ID NO: 66600 - protein, 9 aa, Homo Sapiens
KQSPPIVKI

SEQ ID NO: 66601 - protein, 9 aa, Homo Sapiens
KQSRDISTL

SEQ ID NO: 66602 - protein, 9 aa, Homo Sapiens
KQSSVMQRL

SEQ ID NO: 66603 - protein, 9 aa, Homo Sapiens
KQTALASRF

SEQ ID NO: 66604 - protein, 9 aa, Homo Sapiens
KQTAVPTIF

SEQ ID NO: 66605 - protein, 9 aa, Homo Sapiens
KQTDFEHRI

SEQ ID NO: 66606 - protein, 9 aa, Homo Sapiens
KQTEIAKRL

SEQ ID NO: 66607 - protein, 9 aa, Homo Sapiens
KQTEVETVM

SEQ ID NO: 66608 - protein, 9 aa, Homo Sapiens
KQTQPERYI

SEQ ID NO: 66609 - protein, 9 aa, Homo Sapiens
KQTTKSELL

SEQ ID NO: 66610 - protein, 9 aa, Homo Sapiens
KQVDLENVW

SEQ ID NO: 66611 - protein, 9 aa, Homo Sapiens
KQVEEIFNL

SEQ ID NO: 66612 - protein, 9 aa, Homo Sapiens
KQVFTSEKF

SEQ ID NO: 66613 - protein, 9 aa, Homo Sapiens
KQVHPDTGI

SEQ ID NO: 66614 - protein, 9 aa, Homo Sapiens
KQVTTAENL

SEQ ID NO: 66615 - protein, 9 aa, Homo Sapiens
KQVVEISSL

SEQ ID NO: 66616 - protein, 9 aa, Homo Sapiens
KQWTEILHF

SEQ ID NO: 66617 - protein, 9 aa, Homo Sapiens
KQYADVEGF

SEQ ID NO: 66618 - protein, 9 aa, Homo Sapiens
KQYGNEVFL

SEQ ID NO: 66619 - protein, 9 aa, Homo Sapiens
KQYNVDYKL

SEQ ID NO: 66620 - protein, 9 aa, Homo Sapiens
KQYPISLVL

SEQ ID NO: 66621 - protein, 9 aa, Homo Sapiens
KQYRGKELL

SEQ ID NO: 66622 - protein, 9 aa, Homo Sapiens
KQYSGEEGF

SEQ ID NO: 66623 - protein, 9 aa, Homo Sapiens
KQYTGINAI

SEQ ID NO: 66624 - protein, 9 aa, Homo Sapiens
KSCDLLLFL

SEQ ID NO: 66625 - protein, 9 aa, Homo Sapiens
KTAPFDSRF

SEQ ID NO: 66626 - protein, 9 aa, Homo Sapiens
KTCSKEFKL

SEQ ID NO: 66627 - protein, 9 aa, Homo Sapiens
KVAELFEKL

SEQ ID NO: 66628 - protein, 9 aa, Homo Sapiens
KVASALEKW

SEQ ID NO: 66629 - protein, 9 aa, Homo Sapiens
KVATAQDDI

SEQ ID NO: 66630 - protein, 9 aa, Homo Sapiens
KVCVEHHTF

SEQ ID NO: 66631 - protein, 9 aa, Homo Sapiens
KVDGSEPKL

SEQ ID NO: 66632 - protein, 9 aa, Homo Sapiens
KVEETFQCI

SEQ ID NO: 66633 - protein, 9 aa, Homo Sapiens
KVHDFDVKI

SEQ ID NO: 66634 - protein, 9 aa, Homo Sapiens
KVIDVDHGI

SEQ ID NO: 66635 - protein, 9 aa, Homo Sapiens
KVIELQEII

SEQ ID NO: 66636 - protein, 9 aa, Homo Sapiens
KVLELFESF

SEQ ID NO: 66637 - protein, 9 aa, Homo Sapiens
KVMCIEHEI

SEQ ID NO: 66638 - protein, 9 aa, Homo Sapiens
KVMEYENRI

SEQ ID NO: 66639 - protein, 9 aa, Homo Sapiens
KVSDILLRL

SEQ ID NO: 66640 - protein, 9 aa, Homo Sapiens
KVSDYEMKL

SEQ ID NO: 66641 - protein, 9 aa, Homo Sapiens
KVSELKEEL

SEQ ID NO: 66642 - protein, 9 aa, Homo Sapiens
KVSSVMDRF

SEQ ID NO: 66643 - protein, 9 aa, Homo Sapiens
KVVDDTLEL

SEQ ID NO: 66644 - protein, 9 aa, Homo Sapiens
KVVGKDYLL

SEQ ID NO: 66645 - protein, 9 aa, Homo Sapiens
KVYEYDTVI

SEQ ID NO: 66646 - protein, 9 aa, Homo Sapiens
LAPILDDGW

SEQ ID NO: 66647 - protein, 9 aa, Homo Sapiens
LEARNKLLL

SEQ ID NO: 66648 - protein, 9 aa, Homo Sapiens
LELARKIIL

SEQ ID NO: 66649 - protein, 9 aa, Homo Sapiens
LEQRFLELL

SEQ ID NO: 66650 - protein, 9 aa, Homo Sapiens
LIDENDNKI

SEQ ID NO: 66651 - protein, 9 aa, Homo Sapiens
LIIWGVLEL

SEQ ID NO: 66652 - protein, 9 aa, Homo Sapiens
LIMVAIPII

SEQ ID NO: 66653 - protein, 9 aa, Homo Sapiens
LISITKLEW

SEQ ID NO: 66654 - protein, 9 aa, Homo Sapiens
LIVDRDEAW

SEQ ID NO: 66655 - protein, 9 aa, Homo Sapiens
LIYSGKLLL

SEQ ID NO: 66656 - protein, 9 aa, Homo Sapiens
LLAEEIEKF

SEQ ID NO: 66657 - protein, 9 aa, Homo Sapiens
LLAEPVPGI

SEQ ID NO: 66658 - protein, 9 aa, Homo Sapiens
LLAHPDAPM

SEQ ID NO: 66659 - protein, 9 aa, Homo Sapiens
LLDATQHTL

SEQ ID NO: 66660 - protein, 9 aa, Homo Sapiens
LLDEVIQEF

SEQ ID NO: 66661 - protein, 9 aa, Homo Sapiens
LLDKAQDLF

SEQ ID NO: 66662 - protein, 9 aa, Homo Sapiens
LLDKKSLKI

SEQ ID NO: 66663 - protein, 9 aa, Homo Sapiens
LLDLKEPTW

SEQ ID NO: 66664 - protein, 9 aa, Homo Sapiens
LLDMSYEQL

SEQ ID NO: 66665 - protein, 9 aa, Homo Sapiens
LLDSQSHHL

SEQ ID NO: 66666 - protein, 9 aa, Homo Sapiens
LLDSSHSEL

SEQ ID NO: 66667 - protein, 9 aa, Homo Sapiens
LLDVTPLSL

SEQ ID NO: 66668 - protein, 9 aa, Homo Sapiens
LLFEGEKKI

SEQ ID NO: 66669 - protein, 9 aa, Homo Sapiens
LLFSHEEEL

SEQ ID NO: 66670 - protein, 9 aa, Homo Sapiens
LLFVDEPKL

SEQ ID NO: 66671 - protein, 9 aa, Homo Sapiens
LLIDDKGTI

SEQ ID NO: 66672 - protein, 9 aa, Homo Sapiens
LLIDFAHSW

SEQ ID NO: 66673 - protein, 9 aa, Homo Sapiens
LLIDPEPQI

SEQ ID NO: 66674 - protein, 9 aa, Homo Sapiens
LLNKAPEYL

SEQ ID NO: 66675 - protein, 9 aa, Homo Sapiens
LLNNAFEEL

SEQ ID NO: 66676 - protein, 9 aa, Homo Sapiens
LLNSKEAAL

SEQ ID NO: 66677 - protein, 9 aa, Homo Sapiens
LLNTVGDLL

SEQ ID NO: 66678 - protein, 9 aa, Homo Sapiens
LLNVINENF

SEQ ID NO: 66679 - protein, 9 aa, Homo Sapiens
LLPADGILI

SEQ ID NO: 66680 - protein, 9 aa, Homo Sapiens
LLQEEFVKW

SEQ ID NO: 66681 - protein, 9 aa, Homo Sapiens
LLQGHERSI

SEQ ID NO: 66682 - protein, 9 aa, Homo Sapiens
LLSDTKLEL

SEQ ID NO: 66683 - protein, 9 aa, Homo Sapiens
LLSDVRFVL

SEQ ID NO: 66684 - protein, 9 aa, Homo Sapiens
LLSEEEYHL

SEQ ID NO: 66685 - protein, 9 aa, Homo Sapiens
LLSEIEEHL

SEQ ID NO: 66686 - protein, 9 aa, Homo Sapiens
LLSHVEQLL

SEQ ID NO: 66687 - protein, 9 aa, Homo Sapiens
LLSIVNPEW

SEQ ID NO: 66688 - protein, 9 aa, Homo Sapiens
LLSLVKEEF

SEQ ID NO: 66689 - protein, 9 aa, Homo Sapiens
LLSPVSVEW

SEQ ID NO: 66690 - protein, 9 aa, Homo Sapiens
LLSQDFVQI

SEQ ID NO: 66691 - protein, 9 aa, Homo Sapiens
LLTEISSSW

SEQ ID NO: 66692 - protein, 9 aa, Homo Sapiens
LLTTMGDRF

SEQ ID NO: 66693 - protein, 9 aa, Homo Sapiens
LLWQENERL

SEQ ID NO: 66694 - protein, 9 aa, Homo Sapiens
LLYLLEHTW

SEQ ID NO: 66695 - protein, 9 aa, Homo Sapiens
LMDESVLKF

SEQ ID NO: 66696 - protein, 9 aa, Homo Sapiens
LMDPDTKLI

SEQ ID NO: 66697 - protein, 9 aa, Homo Sapiens
LMTWVQDQL

SEQ ID NO: 66698 - protein, 9 aa, Homo Sapiens
LQATEDAKL

SEQ ID NO: 66699 - protein, 9 aa, Homo Sapiens
LQDDIPTTF

SEQ ID NO: 66700 - protein, 9 aa, Homo Sapiens
LQDKDTYSW

SEQ ID NO: 66701 - protein, 9 aa, Homo Sapiens
LQDLTPLKL

SEQ ID NO: 66702 - protein, 9 aa, Homo Sapiens
LQDPGNHLI

SEQ ID NO: 66703 - protein, 9 aa, Homo Sapiens
LQDRPIPEW

SEQ ID NO: 66704 - protein, 9 aa, Homo Sapiens
LQDTLIHLI

SEQ ID NO: 66705 - protein, 9 aa, Homo Sapiens
LQDVIDLRL

SEQ ID NO: 66706 - protein, 9 aa, Homo Sapiens
LQEACEAYL

SEQ ID NO: 66707 - protein, 9 aa, Homo Sapiens
LQHGAEPTI

SEQ ID NO: 66708 - protein, 9 aa, Homo Sapiens
LQIGDVVRI

SEQ ID NO: 66709 - protein, 9 aa, Homo Sapiens
LQINDKIAL

SEQ ID NO: 66710 - protein, 9 aa, Homo Sapiens
LQLDKEFQL

SEQ ID NO: 66711 - protein, 9 aa, Homo Sapiens
LQNIGIDKI

SEQ ID NO: 66712 - protein, 9 aa, Homo Sapiens
LQNKLPELW

SEQ ID NO: 66713 - protein, 9 aa, Homo Sapiens
LQNNTILRL

SEQ ID NO: 66714 - protein, 9 aa, Homo Sapiens
LQNPDLVSL

SEQ ID NO: 66715 - protein, 9 aa, Homo Sapiens
LQRANDDRW

SEQ ID NO: 66716 - protein, 9 aa, Homo Sapiens
LQSGADPTL

SEQ ID NO: 66717 - protein, 9 aa, Homo Sapiens
LQSKLKDLF

SEQ ID NO: 66718 - protein, 9 aa, Homo Sapiens
LQSLNFERI

SEQ ID NO: 66719 - protein, 9 aa, Homo Sapiens
LQSRIEDRL

SEQ ID NO: 66720 - protein, 9 aa, Homo Sapiens
LQTSIREEI

SEQ ID NO: 66721 - protein, 9 aa, Homo Sapiens
LQVGKGDEV

SEQ ID NO: 66722 - protein, 9 aa, Homo Sapiens
LQYSFPLQL

SEQ ID NO: 66723 - protein, 9 aa, Homo Sapiens
LSEDKTLLL

SEQ ID NO: 66724 - protein, 9 aa, Homo Sapiens
LTDKSCQSF

SEQ ID NO: 66725 - protein, 9 aa, Homo Sapiens
LVADPDCRW

SEQ ID NO: 66726 - protein, 9 aa, Homo Sapiens
LVQAERTVL

SEQ ID NO: 66727 - protein, 9 aa, Homo Sapiens
MAPLKMLAL

SEQ ID NO: 66728 - protein, 9 aa, Homo Sapiens
MIDDTYQCL

SEQ ID NO: 66729 - protein, 9 aa, Homo Sapiens
MIDNVILLI

SEQ ID NO: 66730 - protein, 9 aa, Homo Sapiens
MIHEPEPHI

SEQ ID NO: 66731 - protein, 9 aa, Homo Sapiens
MIRKEELEI

SEQ ID NO: 66732 - protein, 9 aa, Homo Sapiens
MLDNSFERL

SEQ ID NO: 66733 - protein, 9 aa, Homo Sapiens
MLDPHQTLF

SEQ ID NO: 66734 - protein, 9 aa, Homo Sapiens
MLYPLSHGF

SEQ ID NO: 66735 - protein, 9 aa, Homo Sapiens
MQEPSAHTF

SEQ ID NO: 66736 - protein, 9 aa, Homo Sapiens
MQNPRQYKI

SEQ ID NO: 66737 - protein, 9 aa, Homo Sapiens
MQVKVGNEV

SEQ ID NO: 66738 - protein, 9 aa, Homo Sapiens
MVDGTLLLL

SEQ ID NO: 66739 - protein, 9 aa, Homo Sapiens
NIDDKDFKW

SEQ ID NO: 66740 - protein, 9 aa, Homo Sapiens
NLVQVGDSL

SEQ ID NO: 66741 - protein, 9 aa, Homo Sapiens
NQDHVHAVW

SEQ ID NO: 66742 - protein, 9 aa, Homo Sapiens
NQDLTFQHI

SEQ ID NO: 66743 - protein, 9 aa, Homo Sapiens
NQMVEISAW

SEQ ID NO: 66744 - protein, 9 aa, Homo Sapiens
NQTAVECTW

SEQ ID NO: 66745 - protein, 9 aa, Homo Sapiens
QESNVQLKL

SEQ ID NO: 66746 - protein, 9 aa, Homo Sapiens
QESNVRLKL

SEQ ID NO: 66747 - protein, 9 aa, Homo Sapiens
QIAPPSHLI

SEQ ID NO: 66748 - protein, 9 aa, Homo Sapiens
QIDDVTIKI

SEQ ID NO: 66749 - protein, 9 aa, Homo Sapiens
QIGPPEVHL

SEQ ID NO: 66750 - protein, 9 aa, Homo Sapiens
QIHQGEERL

SEQ ID NO: 66751 - protein, 9 aa, Homo Sapiens
QISAGEEKW

SEQ ID NO: 66752 - protein, 9 aa, Homo Sapiens
QISKEYERF

SEQ ID NO: 66753 - protein, 9 aa, Homo Sapiens
QISQAYEVL

SEQ ID NO: 66754 - protein, 9 aa, Homo Sapiens
QLAEVEEKI

SEQ ID NO: 66755 - protein, 9 aa, Homo Sapiens
QLAFIEELF

SEQ ID NO: 66756 - protein, 9 aa, Homo Sapiens
QLAGFSHQI

SEQ ID NO: 66757 - protein, 9 aa, Homo Sapiens
QLAQHDEDL

SEQ ID NO: 66758 - protein, 9 aa, Homo Sapiens
QLCDLETKL

SEQ ID NO: 66759 - protein, 9 aa, Homo Sapiens
QLCEDIIQL

SEQ ID NO: 66760 - protein, 9 aa, Homo Sapiens
QLDETSHRW

SEQ ID NO: 66761 - protein, 9 aa, Homo Sapiens
QLEKHTRYW

SEQ ID NO: 66762 - protein, 9 aa, Homo Sapiens
QLENKEHLW

SEQ ID NO: 66763 - protein, 9 aa, Homo Sapiens
QLFVGTERI

SEQ ID NO: 66764 - protein, 9 aa, Homo Sapiens
QLIDKVWQL

SEQ ID NO: 66765 - protein, 9 aa, Homo Sapiens
QLIDMEWKF

SEQ ID NO: 66766 - protein, 9 aa, Homo Sapiens
QLLGLHEQL

SEQ ID NO: 66767 - protein, 9 aa, Homo Sapiens
QLSDVAEKL

SEQ ID NO: 66768 - protein, 9 aa, Homo Sapiens
QLSNGDHHF

SEQ ID NO: 66769 - protein, 9 aa, Homo Sapiens
QLSNISCSF

SEQ ID NO: 66770 - protein, 9 aa, Homo Sapiens
QLSPVLLYL

SEQ ID NO: 66771 - protein, 9 aa, Homo Sapiens
QLVDREHKL

SEQ ID NO: 66772 - protein, 9 aa, Homo Sapiens
QLVMEGYKW

SEQ ID NO: 66773 - protein, 9 aa, Homo Sapiens
QLVMEGYNW

SEQ ID NO: 66774 - protein, 9 aa, Homo Sapiens
QLYPLQDIL

SEQ ID NO: 66775 - protein, 9 aa, Homo Sapiens
QMFGEMEVW

SEQ ID NO: 66776 - protein, 9 aa, Homo Sapiens
QMSGAQIKI

SEQ ID NO: 66777 - protein, 9 aa, Homo Sapiens
QQAAIPIQI

SEQ ID NO: 66778 - protein, 9 aa, Homo Sapiens
QQASMEEKF

SEQ ID NO: 66779 - protein, 9 aa, Homo Sapiens
QQAWPLEGF

SEQ ID NO: 66780 - protein, 9 aa, Homo Sapiens
QQCVVANKL

SEQ ID NO: 66781 - protein, 9 aa, Homo Sapiens
QQDAQEFFL

SEQ ID NO: 66782 - protein, 9 aa, Homo Sapiens
QQDDGKMFI

SEQ ID NO: 66783 - protein, 9 aa, Homo Sapiens
QQDKLNTRW

SEQ ID NO: 66784 - protein, 9 aa, Homo Sapiens
QQDQVDRNI

SEQ ID NO: 66785 - protein, 9 aa, Homo Sapiens
QQDRIQQEI

SEQ ID NO: 66786 - protein, 9 aa, Homo Sapiens
QQDSGRLYL

SEQ ID NO: 66787 - protein, 9 aa, Homo Sapiens
QQDWVVQRI

SEQ ID NO: 66788 - protein, 9 aa, Homo Sapiens
QQFPAPLGW

SEQ ID NO: 66789 - protein, 9 aa, Homo Sapiens
QQHEIESRI

SEQ ID NO: 66790 - protein, 9 aa, Homo Sapiens
QQHSGQHLI

SEQ ID NO: 66791 - protein, 9 aa, Homo Sapiens
QQHVIETLI

SEQ ID NO: 66792 - protein, 9 aa, Homo Sapiens
QQIKELEKL

SEQ ID NO: 66793 - protein, 9 aa, Homo Sapiens
QQIKQVEEF

SEQ ID NO: 66794 - protein, 9 aa, Homo Sapiens
QQLEDLCSW

SEQ ID NO: 66795 - protein, 9 aa, Homo Sapiens
QQLPDILKI

SEQ ID NO: 66796 - protein, 9 aa, Homo Sapiens
QQLRQETGL

SEQ ID NO: 66797 - protein, 9 aa, Homo Sapiens
QQNNVEHKV

SEQ ID NO: 66798 - protein, 9 aa, Homo Sapiens
QQSADRCFL

SEQ ID NO: 66799 - protein, 9 aa, Homo Sapiens
QQSNVILLL

SEQ ID NO: 66800 - protein, 9 aa, Homo Sapiens
QQSSLSLRW

SEQ ID NO: 66801 - protein, 9 aa, Homo Sapiens
QQSVIGDYL

SEQ ID NO: 66802 - protein, 9 aa, Homo Sapiens
QQTDIAVNW

SEQ ID NO: 66803 - protein, 9 aa, Homo Sapiens
QQTSEHALF

SEQ ID NO: 66804 - protein, 9 aa, Homo Sapiens
QQVKDVQKL

SEQ ID NO: 66805 - protein, 9 aa, Homo Sapiens
QQWQDLMSI

SEQ ID NO: 66806 - protein, 9 aa, Homo Sapiens
QSESELQKL

SEQ ID NO: 66807 - protein, 9 aa, Homo Sapiens
QTLELKNSI

SEQ ID NO: 66808 - protein, 9 aa, Homo Sapiens
QVDRIILQL

SEQ ID NO: 66809 - protein, 9 aa, Homo Sapiens
QVSSEDVRW

SEQ ID NO: 66810 - protein, 9 aa, Homo Sapiens
RAAVIGDVI

SEQ ID NO: 66811 - protein, 9 aa, Homo Sapiens
RADDTFEAL

SEQ ID NO: 66812 - protein, 9 aa, Homo Sapiens
RADPLFLLI

SEQ ID NO: 66813 - protein, 9 aa, Homo Sapiens
RALIEKVGI

SEQ ID NO: 66814 - protein, 9 aa, Homo Sapiens
RAQEGDWRW

SEQ ID NO: 66815 - protein, 9 aa, Homo Sapiens
RDIFKKQII

SEQ ID NO: 66816 - protein, 9 aa, Homo Sapiens
REAELQMLL

SEQ ID NO: 66817 - protein, 9 aa, Homo Sapiens
REAPIHLDF

SEQ ID NO: 66818 - protein, 9 aa, Homo Sapiens
REASIYTGI

SEQ ID NO: 66819 - protein, 9 aa, Homo Sapiens
RECENQLVL

SEQ ID NO: 66820 - protein, 9 aa, Homo Sapiens
REDKVHLKL

SEQ ID NO: 66821 - protein, 9 aa, Homo Sapiens
REHPLYLRL

SEQ ID NO: 66822 - protein, 9 aa, Homo Sapiens
REHTALLKI

SEQ ID NO: 66823 - protein, 9 aa, Homo Sapiens
RESERQLRL

SEQ ID NO: 66824 - protein, 9 aa, Homo Sapiens
REWSGKEKW

SEQ ID NO: 66825 - protein, 9 aa, Homo Sapiens
RGAQVEEIW

SEQ ID NO: 66826 - protein, 9 aa, Homo Sapiens
RGDDTPLHL

SEQ ID NO: 66827 - protein, 9 aa, Homo Sapiens
RIADFQDVL

SEQ ID NO: 66828 - protein, 9 aa, Homo Sapiens
RIADKEVTI

SEQ ID NO: 66829 - protein, 9 aa, Homo Sapiens
RIADSFQVI

SEQ ID NO: 66830 - protein, 9 aa, Homo Sapiens
RIAEYAFKL

SEQ ID NO: 66831 - protein, 9 aa, Homo Sapiens
RIAGEASRL

SEQ ID NO: 66832 - protein, 9 aa, Homo Sapiens
RIAHIPLYF

SEQ ID NO: 66833 - protein, 9 aa, Homo Sapiens
RIAIYELLF

SEQ ID NO: 66834 - protein, 9 aa, Homo Sapiens
RIAPPDRRF

SEQ ID NO: 66835 - protein, 9 aa, Homo Sapiens
RIAPRPYRL

SEQ ID NO: 66836 - protein, 9 aa, Homo Sapiens
RIAPSGDQW

SEQ ID NO: 66837 - protein, 9 aa, Homo Sapiens
RIAQEVQRF

SEQ ID NO: 66838 - protein, 9 aa, Homo Sapiens
RIAQPGDHV

SEQ ID NO: 66839 - protein, 9 aa, Homo Sapiens
RIASEASRL

SEQ ID NO: 66840 - protein, 9 aa, Homo Sapiens
RIATDRLHI

SEQ ID NO: 66841 - protein, 9 aa, Homo Sapiens
RIATEFNQL

SEQ ID NO: 66842 - protein, 9 aa, Homo Sapiens
RICPIDITL

SEQ ID NO: 66843 - protein, 9 aa, Homo Sapiens
RIDDLEKNI

SEQ ID NO: 66844 - protein, 9 aa, Homo Sapiens
RIDEARQEL

SEQ ID NO: 66845 - protein, 9 aa, Homo Sapiens
RIDGKTYVI

SEQ ID NO: 66846 - protein, 9 aa, Homo Sapiens
RIDGVLIRM

SEQ ID NO: 66847 - protein, 9 aa, Homo Sapiens
RIDGVSLLV

SEQ ID NO: 66848 - protein, 9 aa, Homo Sapiens
RIDPSSLSF

SEQ ID NO: 66849 - protein, 9 aa, Homo Sapiens
RIDQVNQLL

SEQ ID NO: 66850 - protein, 9 aa, Homo Sapiens
RIEDRLERL

SEQ ID NO: 66851 - protein, 9 aa, Homo Sapiens
RIEEGLDQI

SEQ ID NO: 66852 - protein, 9 aa, Homo Sapiens
RIEPPDRRW

SEQ ID NO: 66853 - protein, 9 aa, Homo Sapiens
RIFEKMFAM

SEQ ID NO: 66854 - protein, 9 aa, Homo Sapiens
RIFGESIMI

SEQ ID NO: 66855 - protein, 9 aa, Homo Sapiens
RIFGGLDML

SEQ ID NO: 66856 - protein, 9 aa, Homo Sapiens
RIFPDKFVL

SEQ ID NO: 66857 - protein, 9 aa, Homo Sapiens
RIGKFEARF

SEQ ID NO: 66858 - protein, 9 aa, Homo Sapiens
RIHKGDRVL

SEQ ID NO: 66859 - protein, 9 aa, Homo Sapiens
RIHLRDYVI

SEQ ID NO: 66860 - protein, 9 aa, Homo Sapiens
RIHQDGIHI

SEQ ID NO: 66861 - protein, 9 aa, Homo Sapiens
RIHTGEKPF

SEQ ID NO: 66862 - protein, 9 aa, Homo Sapiens
RIIEREEKI

SEQ ID NO: 66863 - protein, 9 aa, Homo Sapiens
RIIFVDEVF

SEQ ID NO: 66864 - protein, 9 aa, Homo Sapiens
RIIGLKDEF

SEQ ID NO: 66865 - protein, 9 aa, Homo Sapiens
RIIHLVHRF

SEQ ID NO: 66866 - protein, 9 aa, Homo Sapiens
RIIHTGEKF

SEQ ID NO: 66867 - protein, 9 aa, Homo Sapiens
RIIKETQRL

SEQ ID NO: 66868 - protein, 9 aa, Homo Sapiens
RIIQSWEKI

SEQ ID NO: 66869 - protein, 9 aa, Homo Sapiens
RIISHFDIF

SEQ ID NO: 66870 - protein, 9 aa, Homo Sapiens
RIKELEERI

SEQ ID NO: 66871 - protein, 9 aa, Homo Sapiens
RIKELPELW

SEQ ID NO: 66872 - protein, 9 aa, Homo Sapiens
RIKNNDPKL

SEQ ID NO: 66873 - protein, 9 aa, Homo Sapiens
RILDESHSI

SEQ ID NO: 66874 - protein, 9 aa, Homo Sapiens
RILDILEYI

SEQ ID NO: 66875 - protein, 9 aa, Homo Sapiens
RILEFDYEM

SEQ ID NO: 66876 - protein, 9 aa, Homo Sapiens
RILGIIDAI

SEQ ID NO: 66877 - protein, 9 aa, Homo Sapiens
RILIEFDTL

SEQ ID NO: 66878 - protein, 9 aa, Homo Sapiens
RILQDEQYL

SEQ ID NO: 66879 - protein, 9 aa, Homo Sapiens
RILRDIETF

SEQ ID NO: 66880 - protein, 9 aa, Homo Sapiens
RILVDQQVW

SEQ ID NO: 66881 - protein, 9 aa, Homo Sapiens
RIMDPEIAL

SEQ ID NO: 66882 - protein, 9 aa, Homo Sapiens
RIMEIVDAI

SEQ ID NO: 66883 - protein, 9 aa, Homo Sapiens
RIMEVIDAI

SEQ ID NO: 66884 - protein, 9 aa, Homo Sapiens
RIMSEERSL

SEQ ID NO: 66885 - protein, 9 aa, Homo Sapiens
RIMSGESTF

SEQ ID NO: 66886 - protein, 9 aa, Homo Sapiens
RINRQLEAL

SEQ ID NO: 66887 - protein, 9 aa, Homo Sapiens
RIPQIGDKF

SEQ ID NO: 66888 - protein, 9 aa, Homo Sapiens
RIPYKDTFW

SEQ ID NO: 66889 - protein, 9 aa, Homo Sapiens
RIQAGEEKL

SEQ ID NO: 66890 - protein, 9 aa, Homo Sapiens
RIQEFEAAL

SEQ ID NO: 66891 - protein, 9 aa, Homo Sapiens
RIQELEDLL

SEQ ID NO: 66892 - protein, 9 aa, Homo Sapiens
RIQKELAEI

SEQ ID NO: 66893 - protein, 9 aa, Homo Sapiens
RISCKEELL

SEQ ID NO: 66894 - protein, 9 aa, Homo Sapiens
RISDAITHL

SEQ ID NO: 66895 - protein, 9 aa, Homo Sapiens
RISEAKEEL

SEQ ID NO: 66896 - protein, 9 aa, Homo Sapiens
RISEAYESL

SEQ ID NO: 66897 - protein, 9 aa, Homo Sapiens
RISEESTKI

SEQ ID NO: 66898 - protein, 9 aa, Homo Sapiens
RISELRLIL

SEQ ID NO: 66899 - protein, 9 aa, Homo Sapiens
RISEVFDCW

SEQ ID NO: 66900 - protein, 9 aa, Homo Sapiens
RISLEYSEL

SEQ ID NO: 66901 - protein, 9 aa, Homo Sapiens
RISLPLPNF

SEQ ID NO: 66902 - protein, 9 aa, Homo Sapiens
RISPDRVYI

SEQ ID NO: 66903 - protein, 9 aa, Homo Sapiens
RITNVQILI

SEQ ID NO: 66904 - protein, 9 aa, Homo Sapiens
RIVDVYENL

SEQ ID NO: 66905 - protein, 9 aa, Homo Sapiens
RIVEDDASI

SEQ ID NO: 66906 - protein, 9 aa, Homo Sapiens
RIVEPYIAW

SEQ ID NO: 66907 - protein, 9 aa, Homo Sapiens
RIVEPYVTW

SEQ ID NO: 66908 - protein, 9 aa, Homo Sapiens
RIVETEAYL

SEQ ID NO: 66909 - protein, 9 aa, Homo Sapiens
RIYESHVGI

SEQ ID NO: 66910 - protein, 9 aa, Homo Sapiens
RIYFGEVQL

SEQ ID NO: 66911 - protein, 9 aa, Homo Sapiens
RIYNFAHRF

SEQ ID NO: 66912 - protein, 9 aa, Homo Sapiens
RLAACVNLI

SEQ ID NO: 66913 - protein, 9 aa, Homo Sapiens
RLADELSGW

SEQ ID NO: 66914 - protein, 9 aa, Homo Sapiens
RLAEDAPNF

SEQ ID NO: 66915 - protein, 9 aa, Homo Sapiens
RLAEDKAEL

SEQ ID NO: 66916 - protein, 9 aa, Homo Sapiens
RLAEISDVW

SEQ ID NO: 66917 - protein, 9 aa, Homo Sapiens
RLAELERKL

SEQ ID NO: 66918 - protein, 9 aa, Homo Sapiens
RLAELQEQL

SEQ ID NO: 66919 - protein, 9 aa, Homo Sapiens
RLAETQEEI

SEQ ID NO: 66920 - protein, 9 aa, Homo Sapiens
RLAEVEEKL

SEQ ID NO: 66921 - protein, 9 aa, Homo Sapiens
RLAEVKDSL

SEQ ID NO: 66922 - protein, 9 aa, Homo Sapiens
RLAEVVHEL

SEQ ID NO: 66923 - protein, 9 aa, Homo Sapiens
RLAGKELRF

SEQ ID NO: 66924 - protein, 9 aa, Homo Sapiens
RLAHEIEAL

SEQ ID NO: 66925 - protein, 9 aa, Homo Sapiens
RLAHVGPRL

SEQ ID NO: 66926 - protein, 9 aa, Homo Sapiens
RLAHYIDRV

SEQ ID NO: 66927 - protein, 9 aa, Homo Sapiens
RLAKSDPMV

SEQ ID NO: 66928 - protein, 9 aa, Homo Sapiens
RLALKEDKF

SEQ ID NO: 66929 - protein, 9 aa, Homo Sapiens
RLALLQEQW

SEQ ID NO: 66930 - protein, 9 aa, Homo Sapiens
RLALVISEL

SEQ ID NO: 66931 - protein, 9 aa, Homo Sapiens
RLANPDQSL

SEQ ID NO: 66932 - protein, 9 aa, Homo Sapiens
RLAPDYDAL

SEQ ID NO: 66933 - protein, 9 aa, Homo Sapiens
RLAPTLSQL

SEQ ID NO: 66934 - protein, 9 aa, Homo Sapiens
RLAPYIIDL

SEQ ID NO: 66935 - protein, 9 aa, Homo Sapiens
RLAQEAVTL

SEQ ID NO: 66936 - protein, 9 aa, Homo Sapiens
RLAQICSSI

SEQ ID NO: 66937 - protein, 9 aa, Homo Sapiens
RLARQDPQL

SEQ ID NO: 66938 - protein, 9 aa, Homo Sapiens
RLATLNEKL

SEQ ID NO: 66939 - protein, 9 aa, Homo Sapiens
RLAVDTDTF

SEQ ID NO: 66940 - protein, 9 aa, Homo Sapiens
RLAVKAAFF

SEQ ID NO: 66941 - protein, 9 aa, Homo Sapiens
RLAVYIDRV

SEQ ID NO: 66942 - protein, 9 aa, Homo Sapiens
RLCEIFTRM

SEQ ID NO: 66943 - protein, 9 aa, Homo Sapiens
RLCPASSAW

SEQ ID NO: 66944 - protein, 9 aa, Homo Sapiens
RLCPLVEHL

SEQ ID NO: 66945 - protein, 9 aa, Homo Sapiens
RLCVLNEIL

SEQ ID NO: 66946 - protein, 9 aa, Homo Sapiens
RLDASENRL

SEQ ID NO: 66947 - protein, 9 aa, Homo Sapiens
RLDAVLQRI

SEQ ID NO: 66948 - protein, 9 aa, Homo Sapiens
RLDDAIHVL

SEQ ID NO: 66949 - protein, 9 aa, Homo Sapiens
RLDDSLLYL

SEQ ID NO: 66950 - protein, 9 aa, Homo Sapiens
RLDEAAQRL

SEQ ID NO: 66951 - protein, 9 aa, Homo Sapiens
RLDEAFDFV

SEQ ID NO: 66952 - protein, 9 aa, Homo Sapiens
RLDEARQML

SEQ ID NO: 66953 - protein, 9 aa, Homo Sapiens
RLDECEEAF

SEQ ID NO: 66954 - protein, 9 aa, Homo Sapiens
RLDELNLSW

SEQ ID NO: 66955 - protein, 9 aa, Homo Sapiens
RLDETIQAI

SEQ ID NO: 66956 - protein, 9 aa, Homo Sapiens
RLDHKFDLM

SEQ ID NO: 66957 - protein, 9 aa, Homo Sapiens
RLDHLAEKF

SEQ ID NO: 66958 - protein, 9 aa, Homo Sapiens
RLDIDPETI

SEQ ID NO: 66959 - protein, 9 aa, Homo Sapiens
RLDKTEQSL

SEQ ID NO: 66960 - protein, 9 aa, Homo Sapiens
RLDMPEVLW

SEQ ID NO: 66961 - protein, 9 aa, Homo Sapiens
RLDNEKEGF

SEQ ID NO: 66962 - protein, 9 aa, Homo Sapiens
RLDNGQVGL

SEQ ID NO: 66963 - protein, 9 aa, Homo Sapiens
RLDNITQVM

SEQ ID NO: 66964 - protein, 9 aa, Homo Sapiens
RLDPADLQL

SEQ ID NO: 66965 - protein, 9 aa, Homo Sapiens
RLDPAQRKL

SEQ ID NO: 66966 - protein, 9 aa, Homo Sapiens
RLDPHPELL

SEQ ID NO: 66967 - protein, 9 aa, Homo Sapiens
RLDPKGKSL

SEQ ID NO: 66968 - protein, 9 aa, Homo Sapiens
RLDPNVQKW

SEQ ID NO: 66969 - protein, 9 aa, Homo Sapiens
RLDPTAVNI

SEQ ID NO: 66970 - protein, 9 aa, Homo Sapiens
RLDQAEKKL

SEQ ID NO: 66971 - protein, 9 aa, Homo Sapiens
RLDQAVLDL

SEQ ID NO: 66972 - protein, 9 aa, Homo Sapiens
RLDQVEQEL

SEQ ID NO: 66973 - protein, 9 aa, Homo Sapiens
RLDRPVVGW

SEQ ID NO: 66974 - protein, 9 aa, Homo Sapiens
RLDSDEQKI

SEQ ID NO: 66975 - protein, 9 aa, Homo Sapiens
RLDSIDPAL

SEQ ID NO: 66976 - protein, 9 aa, Homo Sapiens
RLDSIEAKL

SEQ ID NO: 66977 - protein, 9 aa, Homo Sapiens
RLDTGPQSL

SEQ ID NO: 66978 - protein, 9 aa, Homo Sapiens
RLDTTLIDF

SEQ ID NO: 66979 - protein, 9 aa, Homo Sapiens
RLDVGNFSW

SEQ ID NO: 66980 - protein, 9 aa, Homo Sapiens
RLDVTSNKL

SEQ ID NO: 66981 - protein, 9 aa, Homo Sapiens
RLDVTVQSF

SEQ ID NO: 66982 - protein, 9 aa, Homo Sapiens
RLDYITAEI

SEQ ID NO: 66983 - protein, 9 aa, Homo Sapiens
RLEALAAEF

SEQ ID NO: 66984 - protein, 9 aa, Homo Sapiens
RLEATETQL

SEQ ID NO: 66985 - protein, 9 aa, Homo Sapiens
RLEAVPLEF

SEQ ID NO: 66986 - protein, 9 aa, Homo Sapiens
RLEDAFIVI

SEQ ID NO: 66987 - protein, 9 aa, Homo Sapiens
RLEDQHRLL

SEQ ID NO: 66988 - protein, 9 aa, Homo Sapiens
RLEDSSQQL

SEQ ID NO: 66989 - protein, 9 aa, Homo Sapiens
RLEEEKRML

SEQ ID NO: 66990 - protein, 9 aa, Homo Sapiens
RLEEEMRKL

SEQ ID NO: 66991 - protein, 9 aa, Homo Sapiens
RLEEGIRFL

SEQ ID NO: 66992 - protein, 9 aa, Homo Sapiens
RLEEMNINI

SEQ ID NO: 66993 - protein, 9 aa, Homo Sapiens
RLEERSSEF

SEQ ID NO: 66994 - protein, 9 aa, Homo Sapiens
RLEERSVLF

SEQ ID NO: 66995 - protein, 9 aa, Homo Sapiens
RLEESRRLW

SEQ ID NO: 66996 - protein, 9 aa, Homo Sapiens
RLEETQALL

SEQ ID NO: 66997 - protein, 9 aa, Homo Sapiens
RLEKSGDLL

SEQ ID NO: 66998 - protein, 9 aa, Homo Sapiens
RLENRYEAL

SEQ ID NO: 66999 - protein, 9 aa, Homo Sapiens
RLENTKQQL

SEQ ID NO: 67000 - protein, 9 aa, Homo Sapiens
RLENTQYLL

SEQ ID NO: 67001 - protein, 9 aa, Homo Sapiens
RLEPLVLFL

SEQ ID NO: 67002 - protein, 9 aa, Homo Sapiens
RLEQDEYAL

SEQ ID NO: 67003 - protein, 9 aa, Homo Sapiens
RLEQNQQHL

SEQ ID NO: 67004 - protein, 9 aa, Homo Sapiens
RLEVGTETI

SEQ ID NO: 67005 - protein, 9 aa, Homo Sapiens
RLFATDERF

SEQ ID NO: 67006 - protein, 9 aa, Homo Sapiens
RLFAVLEQL

SEQ ID NO: 67007 - protein, 9 aa, Homo Sapiens
RLFEGNALL

SEQ ID NO: 67008 - protein, 9 aa, Homo Sapiens
RLFEVPHEL

SEQ ID NO: 67009 - protein, 9 aa, Homo Sapiens
RLFGAVVRW

SEQ ID NO: 67010 - protein, 9 aa, Homo Sapiens
RLFKDQLVY

SEQ ID NO: 67011 - protein, 9 aa, Homo Sapiens
RLFKNDPLF

SEQ ID NO: 67012 - protein, 9 aa, Homo Sapiens
RLFKNQEDL

SEQ ID NO: 67013 - protein, 9 aa, Homo Sapiens
RLFLDGDQL

SEQ ID NO: 67014 - protein, 9 aa, Homo Sapiens
RLFLDSNGL

SEQ ID NO: 67015 - protein, 9 aa, Homo Sapiens
RLFLEQFSI

SEQ ID NO: 67016 - protein, 9 aa, Homo Sapiens
RLFNAVVRW

SEQ ID NO: 67017 - protein, 9 aa, Homo Sapiens
RLFNEQNFF

SEQ ID NO: 67018 - protein, 9 aa, Homo Sapiens
RLFPGSSFL

SEQ ID NO: 67019 - protein, 9 aa, Homo Sapiens
RLFQENSVL

SEQ ID NO: 67020 - protein, 9 aa, Homo Sapiens
RLFQKTLKL

SEQ ID NO: 67021 - protein, 9 aa, Homo Sapiens
RLFQTEEKI

SEQ ID NO: 67022 - protein, 9 aa, Homo Sapiens
RLFRDLVSL

SEQ ID NO: 67023 - protein, 9 aa, Homo Sapiens
RLFSKYQYF

SEQ ID NO: 67024 - protein, 9 aa, Homo Sapiens
RLFVGEPVW

SEQ ID NO: 67025 - protein, 9 aa, Homo Sapiens
RLGPPEPMM

SEQ ID NO: 67026 - protein, 9 aa, Homo Sapiens
RLGPSVVGL

SEQ ID NO: 67027 - protein, 9 aa, Homo Sapiens
RLGSLVDEF

SEQ ID NO: 67028 - protein, 9 aa, Homo Sapiens
RLGTFETQI

SEQ ID NO: 67029 - protein, 9 aa, Homo Sapiens
RLGYFDDAL

SEQ ID NO: 67030 - protein, 9 aa, Homo Sapiens
RLHCESESF

SEQ ID NO: 67031 - protein, 9 aa, Homo Sapiens
RLHEKGVLL

SEQ ID NO: 67032 - protein, 9 aa, Homo Sapiens
RLHEKVNII

SEQ ID NO: 67033 - protein, 9 aa, Homo Sapiens
RLHGLPEQF

SEQ ID NO: 67034 - protein, 9 aa, Homo Sapiens
RLHSGEVKF

SEQ ID NO: 67035 - protein, 9 aa, Homo Sapiens
RLIAKEMNI

SEQ ID NO: 67036 - protein, 9 aa, Homo Sapiens
RLIAQRYLL

SEQ ID NO: 67037 - protein, 9 aa, Homo Sapiens
RLIDHDPCL

SEQ ID NO: 67038 - protein, 9 aa, Homo Sapiens
RLIEDTEDW

SEQ ID NO: 67039 - protein, 9 aa, Homo Sapiens
RLIEEENML

SEQ ID NO: 67040 - protein, 9 aa, Homo Sapiens
RLIEESVTV

SEQ ID NO: 67041 - protein, 9 aa, Homo Sapiens
RLIEETISI

SEQ ID NO: 67042 - protein, 9 aa, Homo Sapiens
RLIELDESF

SEQ ID NO: 67043 - protein, 9 aa, Homo Sapiens
RLIEQEEYL

SEQ ID NO: 67044 - protein, 9 aa, Homo Sapiens
RLIESLFTI

SEQ ID NO: 67045 - protein, 9 aa, Homo Sapiens
RLIGHQEAF

SEQ ID NO: 67046 - protein, 9 aa, Homo Sapiens
RLIKDTLAL

SEQ ID NO: 67047 - protein, 9 aa, Homo Sapiens
RLIKSFEKV

SEQ ID NO: 67048 - protein, 9 aa, Homo Sapiens
RLILIESRI

SEQ ID NO: 67049 - protein, 9 aa, Homo Sapiens
RLINQVLEL

SEQ ID NO: 67050 - protein, 9 aa, Homo Sapiens
RLINTQAIF

SEQ ID NO: 67051 - protein, 9 aa, Homo Sapiens
RLIPERTVW

SEQ ID NO: 67052 - protein, 9 aa, Homo Sapiens
RLIPTLVSI

SEQ ID NO: 67053 - protein, 9 aa, Homo Sapiens
RLIQETEVI

SEQ ID NO: 67054 - protein, 9 aa, Homo Sapiens
RLIRIFEKL

SEQ ID NO: 67055 - protein, 9 aa, Homo Sapiens
RLIVDVIRF

SEQ ID NO: 67056 - protein, 9 aa, Homo Sapiens
RLIVLFSHW

SEQ ID NO: 67057 - protein, 9 aa, Homo Sapiens
RLKEKEDAL

SEQ ID NO: 67058 - protein, 9 aa, Homo Sapiens
RLKQDYLRI

SEQ ID NO: 67059 - protein, 9 aa, Homo Sapiens
RLLDLHQSW

SEQ ID NO: 67060 - protein, 9 aa, Homo Sapiens
RLLDSEIKI

SEQ ID NO: 67061 - protein, 9 aa, Homo Sapiens
RLLDYVVNI

SEQ ID NO: 67062 - protein, 9 aa, Homo Sapiens
RLLEEHAKL

SEQ ID NO: 67063 - protein, 9 aa, Homo Sapiens
RLLEEIHAM

SEQ ID NO: 67064 - protein, 9 aa, Homo Sapiens
RLLEENDQL

SEQ ID NO: 67065 - protein, 9 aa, Homo Sapiens
RLLELIEGF

SEQ ID NO: 67066 - protein, 9 aa, Homo Sapiens
RLLEQEKSL

SEQ ID NO: 67067 - protein, 9 aa, Homo Sapiens
RLLESFETM

SEQ ID NO: 67068 - protein, 9 aa, Homo Sapiens
RLLFLKDVL

SEQ ID NO: 67069 - protein, 9 aa, Homo Sapiens
RLLKSKLYL

SEQ ID NO: 67070 - protein, 9 aa, Homo Sapiens
RLLLDHEAL

SEQ ID NO: 67071 - protein, 9 aa, Homo Sapiens
RLLLLPLLL

SEQ ID NO: 67072 - protein, 9 aa, Homo Sapiens
RLLNFDTEL

SEQ ID NO: 67073 - protein, 9 aa, Homo Sapiens
RLLPEKLTI

SEQ ID NO: 67074 - protein, 9 aa, Homo Sapiens
RLLPESWGF

SEQ ID NO: 67075 - protein, 9 aa, Homo Sapiens
RLLQDKEGL

SEQ ID NO: 67076 - protein, 9 aa, Homo Sapiens
RLLQEQHQL

SEQ ID NO: 67077 - protein, 9 aa, Homo Sapiens
RLLQETLYM

SEQ ID NO: 67078 - protein, 9 aa, Homo Sapiens
RLLQRDVQI

SEQ ID NO: 67079 - protein, 9 aa, Homo Sapiens
RLLSIKEAF

SEQ ID NO: 67080 - protein, 9 aa, Homo Sapiens
RLLSSFDFF

SEQ ID NO: 67081 - protein, 9 aa, Homo Sapiens
RLMEEKEKL

SEQ ID NO: 67082 - protein, 9 aa, Homo Sapiens
RLMEICESL

SEQ ID NO: 67083 - protein, 9 aa, Homo Sapiens
RLMFEYQTL

SEQ ID NO: 67084 - protein, 9 aa, Homo Sapiens
RLMKEKQRL

SEQ ID NO: 67085 - protein, 9 aa, Homo Sapiens
RLMKELEEI

SEQ ID NO: 67086 - protein, 9 aa, Homo Sapiens
RLMQCVSSF

SEQ ID NO: 67087 - protein, 9 aa, Homo Sapiens
RLMQVGEEF

SEQ ID NO: 67088 - protein, 9 aa, Homo Sapiens
RLNDGNEYL

SEQ ID NO: 67089 - protein, 9 aa, Homo Sapiens
RLNEDFDHF

SEQ ID NO: 67090 - protein, 9 aa, Homo Sapiens
RLNELMSQI

SEQ ID NO: 67091 - protein, 9 aa, Homo Sapiens
RLNKHEENL

SEQ ID NO: 67092 - protein, 9 aa, Homo Sapiens
RLNKVISEL

SEQ ID NO: 67093 - protein, 9 aa, Homo Sapiens
RLNPLVLLL

SEQ ID NO: 67094 - protein, 9 aa, Homo Sapiens
RLNRIENAL

SEQ ID NO: 67095 - protein, 9 aa, Homo Sapiens
RLNSAPDMR

SEQ ID NO: 67096 - protein, 9 aa, Homo Sapiens
RLNVEFALI

SEQ ID NO: 67097 - protein, 9 aa, Homo Sapiens
RLNVLREYL

SEQ ID NO: 67098 - protein, 9 aa, Homo Sapiens
RLPCYFENL

SEQ ID NO: 67099 - protein, 9 aa, Homo Sapiens
RLPDMEMVI

SEQ ID NO: 67100 - protein, 9 aa, Homo Sapiens
RLPEEEHEF

SEQ ID NO: 67101 - protein, 9 aa, Homo Sapiens
RLPEEWSQW

SEQ ID NO: 67102 - protein, 9 aa, Homo Sapiens
RLPGEAQKI

SEQ ID NO: 67103 - protein, 9 aa, Homo Sapiens
RLPIEDPYL

SEQ ID NO: 67104 - protein, 9 aa, Homo Sapiens
RLPKDFVDL

SEQ ID NO: 67105 - protein, 9 aa, Homo Sapiens
RLPQYDFVF

SEQ ID NO: 67106 - protein, 9 aa, Homo Sapiens
RLQAEAQEL

SEQ ID NO: 67107 - protein, 9 aa, Homo Sapiens
RLQAEAQQL

SEQ ID NO: 67108 - protein, 9 aa, Homo Sapiens
RLQALDTGW

SEQ ID NO: 67109 - protein, 9 aa, Homo Sapiens
RLQDFKDCI

SEQ ID NO: 67110 - protein, 9 aa, Homo Sapiens
RLQDFKLDF

SEQ ID NO: 67111 - protein, 9 aa, Homo Sapiens
RLQDIEERI

SEQ ID NO: 67112 - protein, 9 aa, Homo Sapiens
RLQDLKDRL

SEQ ID NO: 67113 - protein, 9 aa, Homo Sapiens
RLQEASQTI

SEQ ID NO: 67114 - protein, 9 aa, Homo Sapiens
RLQEESEVL

SEQ ID NO: 67115 - protein, 9 aa, Homo Sapiens
RLQEGNESL

SEQ ID NO: 67116 - protein, 9 aa, Homo Sapiens
RLQESFDTI

SEQ ID NO: 67117 - protein, 9 aa, Homo Sapiens
RLQHLAESW

SEQ ID NO: 67118 - protein, 9 aa, Homo Sapiens
RLQIEIGKL

SEQ ID NO: 67119 - protein, 9 aa, Homo Sapiens
RLQIEKERL

SEQ ID NO: 67120 - protein, 9 aa, Homo Sapiens
RLQIEREKL

SEQ ID NO: 67121 - protein, 9 aa, Homo Sapiens
RLQKEQEKL

SEQ ID NO: 67122 - protein, 9 aa, Homo Sapiens
RLQLEKAAW

SEQ ID NO: 67123 - protein, 9 aa, Homo Sapiens
RLQNIEAHL

SEQ ID NO: 67124 - protein, 9 aa, Homo Sapiens
RLQQDKVLI

SEQ ID NO: 67125 - protein, 9 aa, Homo Sapiens
RLQQEETQL

SEQ ID NO: 67126 - protein, 9 aa, Homo Sapiens
RLQQELMTL

SEQ ID NO: 67127 - protein, 9 aa, Homo Sapiens
RLQQMSERF

SEQ ID NO: 67128 - protein, 9 aa, Homo Sapiens
RLQSGVNTL

SEQ ID NO: 67129 - protein, 9 aa, Homo Sapiens
RLQSKVLKL

SEQ ID NO: 67130 - protein, 9 aa, Homo Sapiens
RLQSTSERL

SEQ ID NO: 67131 - protein, 9 aa, Homo Sapiens
RLQTSEAAL

SEQ ID NO: 67132 - protein, 9 aa, Homo Sapiens
RLQVACDLL

SEQ ID NO: 67133 - protein, 9 aa, Homo Sapiens
RLQVEKERL

SEQ ID NO: 67134 - protein, 9 aa, Homo Sapiens
RLREVSEKL

SEQ ID NO: 67135 - protein, 9 aa, Homo Sapiens
RLRQERESL

SEQ ID NO: 67136 - protein, 9 aa, Homo Sapiens
RLSAQDPVV

SEQ ID NO: 67137 - protein, 9 aa, Homo Sapiens
RLSDLLTDF

SEQ ID NO: 67138 - protein, 9 aa, Homo Sapiens
RLSEEEQRL

SEQ ID NO: 67139 - protein, 9 aa, Homo Sapiens
RLSEVQASL

SEQ ID NO: 67140 - protein, 9 aa, Homo Sapiens
RLSFCQELW

SEQ ID NO: 67141 - protein, 9 aa, Homo Sapiens
RLSFLVSYI

SEQ ID NO: 67142 - protein, 9 aa, Homo Sapiens
RLSGIEERY

SEQ ID NO: 67143 - protein, 9 aa, Homo Sapiens
RLSGKILHI

SEQ ID NO: 67144 - protein, 9 aa, Homo Sapiens
RLSHSQERL

SEQ ID NO: 67145 - protein, 9 aa, Homo Sapiens
RLSITNETF

SEQ ID NO: 67146 - protein, 9 aa, Homo Sapiens
RLSKEETVL

SEQ ID NO: 67147 - protein, 9 aa, Homo Sapiens
RLSKEYDQL

SEQ ID NO: 67148 - protein, 9 aa, Homo Sapiens
RLSLTYERL

SEQ ID NO: 67149 - protein, 9 aa, Homo Sapiens
RLSNKVEAI

SEQ ID NO: 67150 - protein, 9 aa, Homo Sapiens
RLSPIENFL

SEQ ID NO: 67151 - protein, 9 aa, Homo Sapiens
RLSPNEEAF

SEQ ID NO: 67152 - protein, 9 aa, Homo Sapiens
RLSPVSPAL

SEQ ID NO: 67153 - protein, 9 aa, Homo Sapiens
RLSQECEKL

SEQ ID NO: 67154 - protein, 9 aa, Homo Sapiens
RLSQIKEKM

SEQ ID NO: 67155 - protein, 9 aa, Homo Sapiens
RLSQVSDSV

SEQ ID NO: 67156 - protein, 9 aa, Homo Sapiens
RLSSDTTLM

SEQ ID NO: 67157 - protein, 9 aa, Homo Sapiens
RLSSIKTRF

SEQ ID NO: 67158 - protein, 9 aa, Homo Sapiens
RLSTLIEFL

SEQ ID NO: 67159 - protein, 9 aa, Homo Sapiens
RLSTMQDSL

SEQ ID NO: 67160 - protein, 9 aa, Homo Sapiens
RLSVEKATI

SEQ ID NO: 67161 - protein, 9 aa, Homo Sapiens
RLSVLVDEF

SEQ ID NO: 67162 - protein, 9 aa, Homo Sapiens
RLSVSTETL

SEQ ID NO: 67163 - protein, 9 aa, Homo Sapiens
RLSYVGNNF

SEQ ID NO: 67164 - protein, 9 aa, Homo Sapiens
RLTEICTKI

SEQ ID NO: 67165 - protein, 9 aa, Homo Sapiens
RLTEIGPRM

SEQ ID NO: 67166 - protein, 9 aa, Homo Sapiens
RLTGVNDKM

SEQ ID NO: 67167 - protein, 9 aa, Homo Sapiens
RLTHLIDHL

SEQ ID NO: 67168 - protein, 9 aa, Homo Sapiens
RLTKLQDNL

SEQ ID NO: 67169 - protein, 9 aa, Homo Sapiens
RLTNHQELW

SEQ ID NO: 67170 - protein, 9 aa, Homo Sapiens
RLTTSTSTF

SEQ ID NO: 67171 - protein, 9 aa, Homo Sapiens
RLVDTGDKF

SEQ ID NO: 67172 - protein, 9 aa, Homo Sapiens
RLVEGLDQF

SEQ ID NO: 67173 - protein, 9 aa, Homo Sapiens
RLVEREAGL

SEQ ID NO: 67174 - protein, 9 aa, Homo Sapiens
RLVGKETSI

SEQ ID NO: 67175 - protein, 9 aa, Homo Sapiens
RLVGSQEEL

SEQ ID NO: 67176 - protein, 9 aa, Homo Sapiens
RLVHHDDCL

SEQ ID NO: 67177 - protein, 9 aa, Homo Sapiens
RLVKDQEAL

SEQ ID NO: 67178 - protein, 9 aa, Homo Sapiens
RLVKEYTVL

SEQ ID NO: 67179 - protein, 9 aa, Homo Sapiens
RLVLDPYLL

SEQ ID NO: 67180 - protein, 9 aa, Homo Sapiens
RLVNWSCTL

SEQ ID NO: 67181 - protein, 9 aa, Homo Sapiens
RLVRSDVAM

SEQ ID NO: 67182 - protein, 9 aa, Homo Sapiens
RLVSSDPEI

SEQ ID NO: 67183 - protein, 9 aa, Homo Sapiens
RLVSSEQAL

SEQ ID NO: 67184 - protein, 9 aa, Homo Sapiens
RLVSWVNLI

SEQ ID NO: 67185 - protein, 9 aa, Homo Sapiens
RLVVTADDF

SEQ ID NO: 67186 - protein, 9 aa, Homo Sapiens
RLVYLNEAW

SEQ ID NO: 67187 - protein, 9 aa, Homo Sapiens
RLWGLTEMF

SEQ ID NO: 67188 - protein, 9 aa, Homo Sapiens
RLWKDEPTM

SEQ ID NO: 67189 - protein, 9 aa, Homo Sapiens
RLYFAETVL

SEQ ID NO: 67190 - protein, 9 aa, Homo Sapiens
RLYFDEISF

SEQ ID NO: 67191 - protein, 9 aa, Homo Sapiens
RLYHELVGL

SEQ ID NO: 67192 - protein, 9 aa, Homo Sapiens
RLYKDDQLL

SEQ ID NO: 67193 - protein, 9 aa, Homo Sapiens
RLYKYDHNF

SEQ ID NO: 67194 - protein, 9 aa, Homo Sapiens
RLYPLAIQI

SEQ ID NO: 67195 - protein, 9 aa, Homo Sapiens
RLYQECEKL

SEQ ID NO: 67196 - protein, 9 aa, Homo Sapiens
RLYQVEYAF

SEQ ID NO: 67197 - protein, 9 aa, Homo Sapiens
RLYSVSYLL

SEQ ID NO: 67198 - protein, 9 aa, Homo Sapiens
RMADSGESL

SEQ ID NO: 67199 - protein, 9 aa, Homo Sapiens
RMAPDYDHL

SEQ ID NO: 67200 - protein, 9 aa, Homo Sapiens
RMCTLIDKF

SEQ ID NO: 67201 - protein, 9 aa, Homo Sapiens
RMDAGEVTL

SEQ ID NO: 67202 - protein, 9 aa, Homo Sapiens
RMDEEFTKI

SEQ ID NO: 67203 - protein, 9 aa, Homo Sapiens
RMDELFVLI

SEQ ID NO: 67204 - protein, 9 aa, Homo Sapiens
RMDFEDLGL

SEQ ID NO: 67205 - protein, 9 aa, Homo Sapiens
RMDKLGRTI

SEQ ID NO: 67206 - protein, 9 aa, Homo Sapiens
RMDSGLDKF

SEQ ID NO: 67207 - protein, 9 aa, Homo Sapiens
RMDYEDDRL

SEQ ID NO: 67208 - protein, 9 aa, Homo Sapiens
RMEDIKILI

SEQ ID NO: 67209 - protein, 9 aa, Homo Sapiens
RMEDRLDRL

SEQ ID NO: 67210 - protein, 9 aa, Homo Sapiens
RMEEEQHHW

SEQ ID NO: 67211 - protein, 9 aa, Homo Sapiens
RMEKGEPYM

SEQ ID NO: 67212 - protein, 9 aa, Homo Sapiens
RMEKLNQLW

SEQ ID NO: 67213 - protein, 9 aa, Homo Sapiens
RMESSINHI

SEQ ID NO: 67214 - protein, 9 aa, Homo Sapiens
RMFLENETW

SEQ ID NO: 67215 - protein, 9 aa, Homo Sapiens
RMFPGEVAL

SEQ ID NO: 67216 - protein, 9 aa, Homo Sapiens
RMHQAIERF

SEQ ID NO: 67217 - protein, 9 aa, Homo Sapiens
RMIDIQTRM

SEQ ID NO: 67218 - protein, 9 aa, Homo Sapiens
RMIEVEQKL

SEQ ID NO: 67219 - protein, 9 aa, Homo Sapiens
RMIEVQDEL

SEQ ID NO: 67220 - protein, 9 aa, Homo Sapiens
RMIQIQENM

SEQ ID NO: 67221 - protein, 9 aa, Homo Sapiens
RMITETEKF

SEQ ID NO: 67222 - protein, 9 aa, Homo Sapiens
RMLDSVEKL

SEQ ID NO: 67223 - protein, 9 aa, Homo Sapiens
RMLIALDKW

SEQ ID NO: 67224 - protein, 9 aa, Homo Sapiens
RMNALFVQF

SEQ ID NO: 67225 - protein, 9 aa, Homo Sapiens
RMNEVISLW

SEQ ID NO: 67226 - protein, 9 aa, Homo Sapiens
RMNGFIDQI

SEQ ID NO: 67227 - protein, 9 aa, Homo Sapiens
RMNQEIVNL

SEQ ID NO: 67228 - protein, 9 aa, Homo Sapiens
RMNVLADAL

SEQ ID NO: 67229 - protein, 9 aa, Homo Sapiens
RMPEEDNKI

SEQ ID NO: 67230 - protein, 9 aa, Homo Sapiens
RMQGQEAVL

SEQ ID NO: 67231 - protein, 9 aa, Homo Sapiens
RMQKEITAL

SEQ ID NO: 67232 - protein, 9 aa, Homo Sapiens
RMSDDVHSL

SEQ ID NO: 67233 - protein, 9 aa, Homo Sapiens
RMSLVEPQI

SEQ ID NO: 67234 - protein, 9 aa, Homo Sapiens
RMSSFGDFV

SEQ ID NO: 67235 - protein, 9 aa, Homo Sapiens
RMTEDALRL

SEQ ID NO: 67236 - protein, 9 aa, Homo Sapiens
RMVEIGSRW

SEQ ID NO: 67237 - protein, 9 aa, Homo Sapiens
RMVKTYEKL

SEQ ID NO: 67238 - protein, 9 aa, Homo Sapiens
RMVNDAEKF

SEQ ID NO: 67239 - protein, 9 aa, Homo Sapiens
RMVVTGDNV

SEQ ID NO: 67240 - protein, 9 aa, Homo Sapiens
RMYELVHRM

SEQ ID NO: 67241 - protein, 9 aa, Homo Sapiens
RQAAEDKSW

SEQ ID NO: 67242 - protein, 9 aa, Homo Sapiens
RQAAEEIRI

SEQ ID NO: 67243 - protein, 9 aa, Homo Sapiens
RQADCKMKL

SEQ ID NO: 67244 - protein, 9 aa, Homo Sapiens
RQADFVQVL

SEQ ID NO: 67245 - protein, 9 aa, Homo Sapiens
RQADKVWRL

SEQ ID NO: 67246 - protein, 9 aa, Homo Sapiens
RQAEETVDF

SEQ ID NO: 67247 - protein, 9 aa, Homo Sapiens
RQAEMLDDL

SEQ ID NO: 67248 - protein, 9 aa, Homo Sapiens
RQAFHMEQL

SEQ ID NO: 67249 - protein, 9 aa, Homo Sapiens
RQAHMQARF

SEQ ID NO: 67250 - protein, 9 aa, Homo Sapiens
RQAIHEPKL

SEQ ID NO: 67251 - protein, 9 aa, Homo Sapiens
RQAKEERTF

SEQ ID NO: 67252 - protein, 9 aa, Homo Sapiens
RQALATDEL

SEQ ID NO: 67253 - protein, 9 aa, Homo Sapiens
RQALFGDHV

SEQ ID NO: 67254 - protein, 9 aa, Homo Sapiens
RQALGVSLF

SEQ ID NO: 67255 - protein, 9 aa, Homo Sapiens
RQALPQVRL

SEQ ID NO: 67256 - protein, 9 aa, Homo Sapiens
RQANNINML

SEQ ID NO: 67257 - protein, 9 aa, Homo Sapiens
RQAPPHIEL

SEQ ID NO: 67258 - protein, 9 aa, Homo Sapiens
RQAQAEDAL

SEQ ID NO: 67259 - protein, 9 aa, Homo Sapiens
RQAQVAEKL

SEQ ID NO: 67260 - protein, 9 aa, Homo Sapiens
RQASPNIVI

SEQ ID NO: 67261 - protein, 9 aa, Homo Sapiens
RQDALVCFL

SEQ ID NO: 67262 - protein, 9 aa, Homo Sapiens
RQDAQQEDF

SEQ ID NO: 67263 - protein, 9 aa, Homo Sapiens
RQDAVHAIL

SEQ ID NO: 67264 - protein, 9 aa, Homo Sapiens
RQDESIQRI

SEQ ID NO: 67265 - protein, 9 aa, Homo Sapiens
RQDFSPEEL

SEQ ID NO: 67266 - protein, 9 aa, Homo Sapiens
RQDGSVNFF

SEQ ID NO: 67267 - protein, 9 aa, Homo Sapiens
RQDGVLQDW

SEQ ID NO: 67268 - protein, 9 aa, Homo Sapiens
RQDIDQAKI

SEQ ID NO: 67269 - protein, 9 aa, Homo Sapiens
RQDIDTQKI

SEQ ID NO: 67270 - protein, 9 aa, Homo Sapiens
RQDIFQEQL

SEQ ID NO: 67271 - protein, 9 aa, Homo Sapiens
RQDINKEHL

SEQ ID NO: 67272 - protein, 9 aa, Homo Sapiens
RQDISVHKL

SEQ ID NO: 67273 - protein, 9 aa, Homo Sapiens
RQDKLKVHM

SEQ ID NO: 67274 - protein, 9 aa, Homo Sapiens
RQDLERVMI

SEQ ID NO: 67275 - protein, 9 aa, Homo Sapiens
RQDLTQSLI

SEQ ID NO: 67276 - protein, 9 aa, Homo Sapiens
RQDLTTLDV

SEQ ID NO: 67277 - protein, 9 aa, Homo Sapiens
RQDNERVLF

SEQ ID NO: 67278 - protein, 9 aa, Homo Sapiens
RQDNKCLEL

SEQ ID NO: 67279 - protein, 9 aa, Homo Sapiens
RQDNSILKV

SEQ ID NO: 67280 - protein, 9 aa, Homo Sapiens
RQDPDKQLM

SEQ ID NO: 67281 - protein, 9 aa, Homo Sapiens
RQDPFTVHM

SEQ ID NO: 67282 - protein, 9 aa, Homo Sapiens
RQDPGTELL

SEQ ID NO: 67283 - protein, 9 aa, Homo Sapiens
RQDQIHSSI

SEQ ID NO: 67284 - protein, 9 aa, Homo Sapiens
RQDQIQQVV

SEQ ID NO: 67285 - protein, 9 aa, Homo Sapiens
RQDQRVEQL

SEQ ID NO: 67286 - protein, 9 aa, Homo Sapiens
RQDQSIILL

SEQ ID NO: 67287 - protein, 9 aa, Homo Sapiens
RQDRDALHM

SEQ ID NO: 67288 - protein, 9 aa, Homo Sapiens
RQDSINLFL

SEQ ID NO: 67289 - protein, 9 aa, Homo Sapiens
RQDSIPAFL

SEQ ID NO: 67290 - protein, 9 aa, Homo Sapiens
RQDTVRSFL

SEQ ID NO: 67291 - protein, 9 aa, Homo Sapiens
RQDVATNLL

SEQ ID NO: 67292 - protein, 9 aa, Homo Sapiens
RQDVDNASL

SEQ ID NO: 67293 - protein, 9 aa, Homo Sapiens
RQDVESCYF

SEQ ID NO: 67294 - protein, 9 aa, Homo Sapiens
RQEAIDWLL

SEQ ID NO: 67295 - protein, 9 aa, Homo Sapiens
RQEATVNYL

SEQ ID NO: 67296 - protein, 9 aa, Homo Sapiens
RQEAYLEAL

SEQ ID NO: 67297 - protein, 9 aa, Homo Sapiens
RQEDDKLFL

SEQ ID NO: 67298 - protein, 9 aa, Homo Sapiens
RQEDLIMKV

SEQ ID NO: 67299 - protein, 9 aa, Homo Sapiens
RQEEGVFGF

SEQ ID NO: 67300 - protein, 9 aa, Homo Sapiens
RQEELRVYL

SEQ ID NO: 67301 - protein, 9 aa, Homo Sapiens
RQEGAKVSL

SEQ ID NO: 67302 - protein, 9 aa, Homo Sapiens
RQEGHSQGF

SEQ ID NO: 67303 - protein, 9 aa, Homo Sapiens
RQEGVPRTF

SEQ ID NO: 67304 - protein, 9 aa, Homo Sapiens
RQEGWIHHL

SEQ ID NO: 67305 - protein, 9 aa, Homo Sapiens
RQEISFGKL

SEQ ID NO: 67306 - protein, 9 aa, Homo Sapiens
RQEKEITKL

SEQ ID NO: 67307 - protein, 9 aa, Homo Sapiens
RQEKMNEKI

SEQ ID NO: 67308 - protein, 9 aa, Homo Sapiens
RQELTYQEL

SEQ ID NO: 67309 - protein, 9 aa, Homo Sapiens
RQELYVEDF

SEQ ID NO: 67310 - protein, 9 aa, Homo Sapiens
RQENGASVI

SEQ ID NO: 67311 - protein, 9 aa, Homo Sapiens
RQENMVLKL

SEQ ID NO: 67312 - protein, 9 aa, Homo Sapiens
RQEPVQPLL

SEQ ID NO: 67313 - protein, 9 aa, Homo Sapiens
RQESSVRLW

SEQ ID NO: 67314 - protein, 9 aa, Homo Sapiens
RQETKEAQL

SEQ ID NO: 67315 - protein, 9 aa, Homo Sapiens
RQEVDNTFW

SEQ ID NO: 67316 - protein, 9 aa, Homo Sapiens
RQFDVDILI

SEQ ID NO: 67317 - protein, 9 aa, Homo Sapiens
RQFEGLMRF

SEQ ID NO: 67318 - protein, 9 aa, Homo Sapiens
RQFEIERDL

SEQ ID NO: 67319 - protein, 9 aa, Homo Sapiens
RQFGKKHLF

SEQ ID NO: 67320 - protein, 9 aa, Homo Sapiens
RQFKEIAAV

SEQ ID NO: 67321 - protein, 9 aa, Homo Sapiens
RQFLNRDDI

SEQ ID NO: 67322 - protein, 9 aa, Homo Sapiens
RQFMAETQF

SEQ ID NO: 67323 - protein, 9 aa, Homo Sapiens
RQFPFHEMF

SEQ ID NO: 67324 - protein, 9 aa, Homo Sapiens
RQFPGSHRV

SEQ ID NO: 67325 - protein, 9 aa, Homo Sapiens
RQFPTAFEF

SEQ ID NO: 67326 - protein, 9 aa, Homo Sapiens
RQFPVTVHF

SEQ ID NO: 67327 - protein, 9 aa, Homo Sapiens
RQFQELNEL

SEQ ID NO: 67328 - protein, 9 aa, Homo Sapiens
RQFSTPFQL

SEQ ID NO: 67329 - protein, 9 aa, Homo Sapiens
RQFYEEELI

SEQ ID NO: 67330 - protein, 9 aa, Homo Sapiens
RQGDLEPKF

SEQ ID NO: 67331 - protein, 9 aa, Homo Sapiens
RQGDQDVSL

SEQ ID NO: 67332 - protein, 9 aa, Homo Sapiens
RQGEVVQRL

SEQ ID NO: 67333 - protein, 9 aa, Homo Sapiens
RQGIPNESW

SEQ ID NO: 67334 - protein, 9 aa, Homo Sapiens
RQGKAKLVI

SEQ ID NO: 67335 - protein, 9 aa, Homo Sapiens
RQGKVEDKW

SEQ ID NO: 67336 - protein, 9 aa, Homo Sapiens
RQGPEESGL

SEQ ID NO: 67337 - protein, 9 aa, Homo Sapiens
RQGQIEVSI

SEQ ID NO: 67338 - protein, 9 aa, Homo Sapiens
RQGRTLYGF

SEQ ID NO: 67339 - protein, 9 aa, Homo Sapiens
RQHAEHIFL

SEQ ID NO: 67340 - protein, 9 aa, Homo Sapiens
RQHAYEHSL

SEQ ID NO: 67341 - protein, 9 aa, Homo Sapiens
RQHEDFVWL

SEQ ID NO: 67342 - protein, 9 aa, Homo Sapiens
RQHEEPESF

SEQ ID NO: 67343 - protein, 9 aa, Homo Sapiens
RQHEIVLKV

SEQ ID NO: 67344 - protein, 9 aa, Homo Sapiens
RQHEKTHWL

SEQ ID NO: 67345 - protein, 9 aa, Homo Sapiens
RQHFSPLSL

SEQ ID NO: 67346 - protein, 9 aa, Homo Sapiens
RQHLQEVGL

SEQ ID NO: 67347 - protein, 9 aa, Homo Sapiens
RQHNTEIRM

SEQ ID NO: 67348 - protein, 9 aa, Homo Sapiens
RQHNWPLTM

SEQ ID NO: 67349 - protein, 9 aa, Homo Sapiens
RQHNYTEAF

SEQ ID NO: 67350 - protein, 9 aa, Homo Sapiens
RQHSALTRL

SEQ ID NO: 67351 - protein, 9 aa, Homo Sapiens
RQHTQIVRL

SEQ ID NO: 67352 - protein, 9 aa, Homo Sapiens
RQHVEFDML

SEQ ID NO: 67353 - protein, 9 aa, Homo Sapiens
RQHVIDVQI

SEQ ID NO: 67354 - protein, 9 aa, Homo Sapiens
RQHWTMTKI

SEQ ID NO: 67355 - protein, 9 aa, Homo Sapiens
RQIDEQQKL

SEQ ID NO: 67356 - protein, 9 aa, Homo Sapiens
RQIDQFLVV

SEQ ID NO: 67357 - protein, 9 aa, Homo Sapiens
RQIEYEYKL

SEQ ID NO: 67358 - protein, 9 aa, Homo Sapiens
RQIGSVDTF

SEQ ID NO: 67359 - protein, 9 aa, Homo Sapiens
RQIGVEHVV

SEQ ID NO: 67360 - protein, 9 aa, Homo Sapiens
RQIHKFEEL

SEQ ID NO: 67361 - protein, 9 aa, Homo Sapiens
RQIITDHRW

SEQ ID NO: 67362 - protein, 9 aa, Homo Sapiens
RQIKDRVTM

SEQ ID NO: 67363 - protein, 9 aa, Homo Sapiens
RQIKDTVTM

SEQ ID NO: 67364 - protein, 9 aa, Homo Sapiens
RQIKEPVKF

SEQ ID NO: 67365 - protein, 9 aa, Homo Sapiens
RQIKNFHKL

SEQ ID NO: 67366 - protein, 9 aa, Homo Sapiens
RQILEGVHF

SEQ ID NO: 67367 - protein, 9 aa, Homo Sapiens
RQIQESVTF

SEQ ID NO: 67368 - protein, 9 aa, Homo Sapiens
RQIQVMEKL

SEQ ID NO: 67369 - protein, 9 aa, Homo Sapiens
RQISQDVKL

SEQ ID NO: 67370 - protein, 9 aa, Homo Sapiens
RQITQVYGF

SEQ ID NO: 67371 - protein, 9 aa, Homo Sapiens
RQKAIEEFF

SEQ ID NO: 67372 - protein, 9 aa, Homo Sapiens
RQLAEEILM

SEQ ID NO: 67373 - protein, 9 aa, Homo Sapiens
RQLAKIHAI

SEQ ID NO: 67374 - protein, 9 aa, Homo Sapiens
RQLALAEKF

SEQ ID NO: 67375 - protein, 9 aa, Homo Sapiens
RQLDTETNL

SEQ ID NO: 67376 - protein, 9 aa, Homo Sapiens
RQLDTVNFF

SEQ ID NO: 67377 - protein, 9 aa, Homo Sapiens
RQLEAIVRI

SEQ ID NO: 67378 - protein, 9 aa, Homo Sapiens
RQLEEARQI

SEQ ID NO: 67379 - protein, 9 aa, Homo Sapiens
RQLEEEQKL

SEQ ID NO: 67380 - protein, 9 aa, Homo Sapiens
RQLEEKEKL

SEQ ID NO: 67381 - protein, 9 aa, Homo Sapiens
RQLESMIRL

SEQ ID NO: 67382 - protein, 9 aa, Homo Sapiens
RQLFKDYEI

SEQ ID NO: 67383 - protein, 9 aa, Homo Sapiens
RQLIIRDIL

SEQ ID NO: 67384 - protein, 9 aa, Homo Sapiens
RQLIQESKF

SEQ ID NO: 67385 - protein, 9 aa, Homo Sapiens
RQLPSSHAL

SEQ ID NO: 67386 - protein, 9 aa, Homo Sapiens
RQLQDPLVI

SEQ ID NO: 67387 - protein, 9 aa, Homo Sapiens
RQLQVLDLF

SEQ ID NO: 67388 - protein, 9 aa, Homo Sapiens
RQMGYTEAI

SEQ ID NO: 67389 - protein, 9 aa, Homo Sapiens
RQMLEALNF

SEQ ID NO: 67390 - protein, 9 aa, Homo Sapiens
RQMVEHGGF

SEQ ID NO: 67391 - protein, 9 aa, Homo Sapiens
RQNESYLNF

SEQ ID NO: 67392 - protein, 9 aa, Homo Sapiens
RQNGDDPLL

SEQ ID NO: 67393 - protein, 9 aa, Homo Sapiens
RQNHSILKI

SEQ ID NO: 67394 - protein, 9 aa, Homo Sapiens
RQNIEANFI

SEQ ID NO: 67395 - protein, 9 aa, Homo Sapiens
RQNKLTYTM

SEQ ID NO: 67396 - protein, 9 aa, Homo Sapiens
RQNLAEMGL

SEQ ID NO: 67397 - protein, 9 aa, Homo Sapiens
RQPDKEFSF

SEQ ID NO: 67398 - protein, 9 aa, Homo Sapiens
RQPDLVLRL

SEQ ID NO: 67399 - protein, 9 aa, Homo Sapiens
RQPKVVERL

SEQ ID NO: 67400 - protein, 9 aa, Homo Sapiens
RQPMPDPGL

SEQ ID NO: 67401 - protein, 9 aa, Homo Sapiens
RQPNIFEIL

SEQ ID NO: 67402 - protein, 9 aa, Homo Sapiens
RQQEEITHL

SEQ ID NO: 67403 - protein, 9 aa, Homo Sapiens
RQQEGESRL

SEQ ID NO: 67404 - protein, 9 aa, Homo Sapiens
RQQEIEEKL

SEQ ID NO: 67405 - protein, 9 aa, Homo Sapiens
RQQEVETEL

SEQ ID NO: 67406 - protein, 9 aa, Homo Sapiens
RQQEYDFKM

SEQ ID NO: 67407 - protein, 9 aa, Homo Sapiens
RQQEYKEKL

SEQ ID NO: 67408 - protein, 9 aa, Homo Sapiens
RQQFHDAKF

SEQ ID NO: 67409 - protein, 9 aa, Homo Sapiens
RQQKEAACF

SEQ ID NO: 67410 - protein, 9 aa, Homo Sapiens
RQQKEITAL

SEQ ID NO: 67411 - protein, 9 aa, Homo Sapiens
RQQKEVLSW

SEQ ID NO: 67412 - protein, 9 aa, Homo Sapiens
RQQKQRQLL

SEQ ID NO: 67413 - protein, 9 aa, Homo Sapiens
RQQLELIRL

SEQ ID NO: 67414 - protein, 9 aa, Homo Sapiens
RQQLEMYSI

SEQ ID NO: 67415 - protein, 9 aa, Homo Sapiens
RQQLGEMGL

SEQ ID NO: 67416 - protein, 9 aa, Homo Sapiens
RQQLQAHQL

SEQ ID NO: 67417 - protein, 9 aa, Homo Sapiens
RQQQDEAYL

SEQ ID NO: 67418 - protein, 9 aa, Homo Sapiens
RQQQDLVAF

SEQ ID NO: 67419 - protein, 9 aa, Homo Sapiens
RQQSHFAMM

SEQ ID NO: 67420 - protein, 9 aa, Homo Sapiens
RQREMEEQM

SEQ ID NO: 67421 - protein, 9 aa, Homo Sapiens
RQSDLLVKL

SEQ ID NO: 67422 - protein, 9 aa, Homo Sapiens
RQSEDFNSL

SEQ ID NO: 67423 - protein, 9 aa, Homo Sapiens
RQSELEPVV

SEQ ID NO: 67424 - protein, 9 aa, Homo Sapiens
RQSFALEQL

SEQ ID NO: 67425 - protein, 9 aa, Homo Sapiens
RQSGDSVRL

SEQ ID NO: 67426 - protein, 9 aa, Homo Sapiens
RQSIVVSFL

SEQ ID NO: 67427 - protein, 9 aa, Homo Sapiens
RQSKNEALL

SEQ ID NO: 67428 - protein, 9 aa, Homo Sapiens
RQSLREARI

SEQ ID NO: 67429 - protein, 9 aa, Homo Sapiens
RQSLSLPSM

SEQ ID NO: 67430 - protein, 9 aa, Homo Sapiens
RQSPHSNLF

SEQ ID NO: 67431 - protein, 9 aa, Homo Sapiens
RQSTLEKKI

SEQ ID NO: 67432 - protein, 9 aa, Homo Sapiens
RQSVLRELF

SEQ ID NO: 67433 - protein, 9 aa, Homo Sapiens
RQSVYEEKL

SEQ ID NO: 67434 - protein, 9 aa, Homo Sapiens
RQTAEYSAF

SEQ ID NO: 67435 - protein, 9 aa, Homo Sapiens
RQTFVIHKL

SEQ ID NO: 67436 - protein, 9 aa, Homo Sapiens
RQTHTVDSL

SEQ ID NO: 67437 - protein, 9 aa, Homo Sapiens
RQTIINDYI

SEQ ID NO: 67438 - protein, 9 aa, Homo Sapiens
RQTIQVSLM

SEQ ID NO: 67439 - protein, 9 aa, Homo Sapiens
RQTLQEDLL

SEQ ID NO: 67440 - protein, 9 aa, Homo Sapiens
RQTNNQQNW

SEQ ID NO: 67441 - protein, 9 aa, Homo Sapiens
RQTPEPAGL

SEQ ID NO: 67442 - protein, 9 aa, Homo Sapiens
RQTSGEVGL

SEQ ID NO: 67443 - protein, 9 aa, Homo Sapiens
RQTTITSHF

SEQ ID NO: 67444 - protein, 9 aa, Homo Sapiens
RQTVADQVL

SEQ ID NO: 67445 - protein, 9 aa, Homo Sapiens
RQTVAVGVI

SEQ ID NO: 67446 - protein, 9 aa, Homo Sapiens
RQTWDQLLL

SEQ ID NO: 67447 - protein, 9 aa, Homo Sapiens
RQVAEAPGL

SEQ ID NO: 67448 - protein, 9 aa, Homo Sapiens
RQVAKVEKF

SEQ ID NO: 67449 - protein, 9 aa, Homo Sapiens
RQVASHVGL

SEQ ID NO: 67450 - protein, 9 aa, Homo Sapiens
RQVEEAERL

SEQ ID NO: 67451 - protein, 9 aa, Homo Sapiens
RQVETTETL

SEQ ID NO: 67452 - protein, 9 aa, Homo Sapiens
RQVGATVEF

SEQ ID NO: 67453 - protein, 9 aa, Homo Sapiens
RQVGKTLRI

SEQ ID NO: 67454 - protein, 9 aa, Homo Sapiens
RQVGPDGLM

SEQ ID NO: 67455 - protein, 9 aa, Homo Sapiens
RQVGVTEML

SEQ ID NO: 67456 - protein, 9 aa, Homo Sapiens
RQVIAAVKW

SEQ ID NO: 67457 - protein, 9 aa, Homo Sapiens
RQVKGDLAF

SEQ ID NO: 67458 - protein, 9 aa, Homo Sapiens
RQVKVILNI

SEQ ID NO: 67459 - protein, 9 aa, Homo Sapiens
RQVLENFKL

SEQ ID NO: 67460 - protein, 9 aa, Homo Sapiens
RQVLHGEAL

SEQ ID NO: 67461 - protein, 9 aa, Homo Sapiens
RQVTEECQL

SEQ ID NO: 67462 - protein, 9 aa, Homo Sapiens
RQVTKEEGL

SEQ ID NO: 67463 - protein, 9 aa, Homo Sapiens
RQVVHVETL

SEQ ID NO: 67464 - protein, 9 aa, Homo Sapiens
RQWDYTEKL

SEQ ID NO: 67465 - protein, 9 aa, Homo Sapiens
RQWEEQGEL

SEQ ID NO: 67466 - protein, 9 aa, Homo Sapiens
RQWQDVESL

SEQ ID NO: 67467 - protein, 9 aa, Homo Sapiens
RQYAKDIGF

SEQ ID NO: 67468 - protein, 9 aa, Homo Sapiens
RQYFQEIGL

SEQ ID NO: 67469 - protein, 9 aa, Homo Sapiens
RQYGDESTL

SEQ ID NO: 67470 - protein, 9 aa, Homo Sapiens
RQYGEVANL

SEQ ID NO: 67471 - protein, 9 aa, Homo Sapiens
RQYHENIKI

SEQ ID NO: 67472 - protein, 9 aa, Homo Sapiens
RQYLECEVF

SEQ ID NO: 67473 - protein, 9 aa, Homo Sapiens
RQYPEVEIF

SEQ ID NO: 67474 - protein, 9 aa, Homo Sapiens
RQYYTAEKL

SEQ ID NO: 67475 - protein, 9 aa, Homo Sapiens
RSDIGEFEW

SEQ ID NO: 67476 - protein, 9 aa, Homo Sapiens
RSDPGHYSF

SEQ ID NO: 67477 - protein, 9 aa, Homo Sapiens
RSDYEDPAF

SEQ ID NO: 67478 - protein, 9 aa, Homo Sapiens
RSESRPDIL

SEQ ID NO: 67479 - protein, 9 aa, Homo Sapiens
RSFDSEFKL

SEQ ID NO: 67480 - protein, 9 aa, Homo Sapiens
RSFQGKESI

SEQ ID NO: 67481 - protein, 9 aa, Homo Sapiens
RSIDDVVRL

SEQ ID NO: 67482 - protein, 9 aa, Homo Sapiens
RSLDDALKL

SEQ ID NO: 67483 - protein, 9 aa, Homo Sapiens
RSMEDFVTW

SEQ ID NO: 67484 - protein, 9 aa, Homo Sapiens
RSMGLPLQF

SEQ ID NO: 67485 - protein, 9 aa, Homo Sapiens
RSSTPLPTI

SEQ ID NO: 67486 - protein, 9 aa, Homo Sapiens
RSTMVDPAI

SEQ ID NO: 67487 - protein, 9 aa, Homo Sapiens
RTDAGVHAL

SEQ ID NO: 67488 - protein, 9 aa, Homo Sapiens
RTDVVELLL

SEQ ID NO: 67489 - protein, 9 aa, Homo Sapiens
RTDYSFHKF

SEQ ID NO: 67490 - protein, 9 aa, Homo Sapiens
RTFEKDHRL

SEQ ID NO: 67491 - protein, 9 aa, Homo Sapiens
RTFQDEPLI

SEQ ID NO: 67492 - protein, 9 aa, Homo Sapiens
RTIEDFNKF

SEQ ID NO: 67493 - protein, 9 aa, Homo Sapiens
RTLDFDPLL

SEQ ID NO: 67494 - protein, 9 aa, Homo Sapiens
RTLPVDFHI

SEQ ID NO: 67495 - protein, 9 aa, Homo Sapiens
RTMDDKTVF

SEQ ID NO: 67496 - protein, 9 aa, Homo Sapiens
RTNGKEPEL

SEQ ID NO: 67497 - protein, 9 aa, Homo Sapiens
RTVEDFNKF

SEQ ID NO: 67498 - protein, 9 aa, Homo Sapiens
RTVKVGDTL

SEQ ID NO: 67499 - protein, 9 aa, Homo Sapiens
RTVYFSEQW

SEQ ID NO: 67500 - protein, 9 aa, Homo Sapiens
RVAAVLLQF

SEQ ID NO: 67501 - protein, 9 aa, Homo Sapiens
RVAHFGYHW

SEQ ID NO: 67502 - protein, 9 aa, Homo Sapiens
RVANVADVV

SEQ ID NO: 67503 - protein, 9 aa, Homo Sapiens
RVAPEQQMI

SEQ ID NO: 67504 - protein, 9 aa, Homo Sapiens
RVAQLLERW

SEQ ID NO: 67505 - protein, 9 aa, Homo Sapiens
RVCEDFGVI

SEQ ID NO: 67506 - protein, 9 aa, Homo Sapiens
RVCEVDNEL

SEQ ID NO: 67507 - protein, 9 aa, Homo Sapiens
RVCMDFNII

SEQ ID NO: 67508 - protein, 9 aa, Homo Sapiens
RVDDGSQKI

SEQ ID NO: 67509 - protein, 9 aa, Homo Sapiens
RVDDIFSDL

SEQ ID NO: 67510 - protein, 9 aa, Homo Sapiens
RVDEEPTTL

SEQ ID NO: 67511 - protein, 9 aa, Homo Sapiens
RVDGAVSSW

SEQ ID NO: 67512 - protein, 9 aa, Homo Sapiens
RVDITLLGF

SEQ ID NO: 67513 - protein, 9 aa, Homo Sapiens
RVDKNAPTV

SEQ ID NO: 67514 - protein, 9 aa, Homo Sapiens
RVDKSAVGF

SEQ ID NO: 67515 - protein, 9 aa, Homo Sapiens
RVDRIILLF

SEQ ID NO: 67516 - protein, 9 aa, Homo Sapiens
RVDTTLLGF

SEQ ID NO: 67517 - protein, 9 aa, Homo Sapiens
RVECQSHRL

SEQ ID NO: 67518 - protein, 9 aa, Homo Sapiens
RVEGAQQRW

SEQ ID NO: 67519 - protein, 9 aa, Homo Sapiens
RVELECETI

SEQ ID NO: 67520 - protein, 9 aa, Homo Sapiens
RVFAAESII

SEQ ID NO: 67521 - protein, 9 aa, Homo Sapiens
RVFASPLRL

SEQ ID NO: 67522 - protein, 9 aa, Homo Sapiens
RVFPHEVNW

SEQ ID NO: 67523 - protein, 9 aa, Homo Sapiens
RVFQTEAEL

SEQ ID NO: 67524 - protein, 9 aa, Homo Sapiens
RVFQVEYAM

SEQ ID NO: 67525 - protein, 9 aa, Homo Sapiens
RVFREVEML

SEQ ID NO: 67526 - protein, 9 aa, Homo Sapiens
RVFREVETL

SEQ ID NO: 67527 - protein, 9 aa, Homo Sapiens
RVFSLSSEF

SEQ ID NO: 67528 - protein, 9 aa, Homo Sapiens
RVFVDDVTI

SEQ ID NO: 67529 - protein, 9 aa, Homo Sapiens
RVFVGGDDF

SEQ ID NO: 67530 - protein, 9 aa, Homo Sapiens
RVHAFLEQW

SEQ ID NO: 67531 - protein, 9 aa, Homo Sapiens
RVHPETYEW

SEQ ID NO: 67532 - protein, 9 aa, Homo Sapiens
RVIDVGSEW

SEQ ID NO: 67533 - protein, 9 aa, Homo Sapiens
RVIDYAVKI

SEQ ID NO: 67534 - protein, 9 aa, Homo Sapiens
RVIEFAAKF

SEQ ID NO: 67535 - protein, 9 aa, Homo Sapiens
RVIGQDHDF

SEQ ID NO: 67536 - protein, 9 aa, Homo Sapiens
RVINEEYKI

SEQ ID NO: 67537 - protein, 9 aa, Homo Sapiens
RVINKEHVL

SEQ ID NO: 67538 - protein, 9 aa, Homo Sapiens
RVIPSQEHL

SEQ ID NO: 67539 - protein, 9 aa, Homo Sapiens
RVISFEEQV

SEQ ID NO: 67540 - protein, 9 aa, Homo Sapiens
RVLDLVEVL

SEQ ID NO: 67541 - protein, 9 aa, Homo Sapiens
RVLEELETL

SEQ ID NO: 67542 - protein, 9 aa, Homo Sapiens
RVLEGHEEL

SEQ ID NO: 67543 - protein, 9 aa, Homo Sapiens
RVLFIKDVI

SEQ ID NO: 67544 - protein, 9 aa, Homo Sapiens
RVLQQEHRL

SEQ ID NO: 67545 - protein, 9 aa, Homo Sapiens
RVNPVEYSI

SEQ ID NO: 67546 - protein, 9 aa, Homo Sapiens
RVQDLEQKM

SEQ ID NO: 67547 - protein, 9 aa, Homo Sapiens
RVQKEVAGF

SEQ ID NO: 67548 - protein, 9 aa, Homo Sapiens
RVQLDVFTL

SEQ ID NO: 67549 - protein, 9 aa, Homo Sapiens
RVSEIRDAF

SEQ ID NO: 67550 - protein, 9 aa, Homo Sapiens
RVSELHLEV

SEQ ID NO: 67551 - protein, 9 aa, Homo Sapiens
RVSELQVLL

SEQ ID NO: 67552 - protein, 9 aa, Homo Sapiens
RVSHLIEHL

SEQ ID NO: 67553 - protein, 9 aa, Homo Sapiens
RVSINKDEL

SEQ ID NO: 67554 - protein, 9 aa, Homo Sapiens
RVSPEEVTI

SEQ ID NO: 67555 - protein, 9 aa, Homo Sapiens
RVSQLQIQF

SEQ ID NO: 67556 - protein, 9 aa, Homo Sapiens
RVSQTPESL

SEQ ID NO: 67557 - protein, 9 aa, Homo Sapiens
RVTSVVTGF

SEQ ID NO: 67558 - protein, 9 aa, Homo Sapiens
RVVDFDETW

SEQ ID NO: 67559 - protein, 9 aa, Homo Sapiens
RVVDIYSKF

SEQ ID NO: 67560 - protein, 9 aa, Homo Sapiens
RVVDLITNL

SEQ ID NO: 67561 - protein, 9 aa, Homo Sapiens
RVVEEPYTV

SEQ ID NO: 67562 - protein, 9 aa, Homo Sapiens
RVVKLNEVI

SEQ ID NO: 67563 - protein, 9 aa, Homo Sapiens
RVVKNFEHL

SEQ ID NO: 67564 - protein, 9 aa, Homo Sapiens
RVVQQEEGW

SEQ ID NO: 67565 - protein, 9 aa, Homo Sapiens
RVVTEDQLL

SEQ ID NO: 67566 - protein, 9 aa, Homo Sapiens
RVWQWDEKW

SEQ ID NO: 67567 - protein, 9 aa, Homo Sapiens
RVYEFLDKL

SEQ ID NO: 67568 - protein, 9 aa, Homo Sapiens
SHEKLLLQI

SEQ ID NO: 67569 - protein, 9 aa, Homo Sapiens
SIAHIGDVM

SEQ ID NO: 67570 - protein, 9 aa, Homo Sapiens
SIAPEDPFV

SEQ ID NO: 67571 - protein, 9 aa, Homo Sapiens
SIASPDVKL

SEQ ID NO: 67572 - protein, 9 aa, Homo Sapiens
SIDKTEAGI

SEQ ID NO: 67573 - protein, 9 aa, Homo Sapiens
SIDVGYERF

SEQ ID NO: 67574 - protein, 9 aa, Homo Sapiens
SIMHEDWCW

SEQ ID NO: 67575 - protein, 9 aa, Homo Sapiens
SIYEGDESF

SEQ ID NO: 67576 - protein, 9 aa, Homo Sapiens
SIYSGLEAF

SEQ ID NO: 67577 - protein, 9 aa, Homo Sapiens
SLAEDNLKL

SEQ ID NO: 67578 - protein, 9 aa, Homo Sapiens
SLAEEHEGL

SEQ ID NO: 67579 - protein, 9 aa, Homo Sapiens
SLCPDLMEI

SEQ ID NO: 67580 - protein, 9 aa, Homo Sapiens
SLDAHEETI

SEQ ID NO: 67581 - protein, 9 aa, Homo Sapiens
SLDGYFHLW

SEQ ID NO: 67582 - protein, 9 aa, Homo Sapiens
SLDNIVKLW

SEQ ID NO: 67583 - protein, 9 aa, Homo Sapiens
SLDSSTLLF

SEQ ID NO: 67584 - protein, 9 aa, Homo Sapiens
SLFSDKQMI

SEQ ID NO: 67585 - protein, 9 aa, Homo Sapiens
SLHQVSFLF

SEQ ID NO: 67586 - protein, 9 aa, Homo Sapiens
SLIDADPYL

SEQ ID NO: 67587 - protein, 9 aa, Homo Sapiens
SLIELFESF

SEQ ID NO: 67588 - protein, 9 aa, Homo Sapiens
SLSDTHDRL

SEQ ID NO: 67589 - protein, 9 aa, Homo Sapiens
SLSDTVEKL

SEQ ID NO: 67590 - protein, 9 aa, Homo Sapiens
SLSDVLDAF

SEQ ID NO: 67591 - protein, 9 aa, Homo Sapiens
SLSQVFLHL

SEQ ID NO: 67592 - protein, 9 aa, Homo Sapiens
SLSRGEEGF

SEQ ID NO: 67593 - protein, 9 aa, Homo Sapiens
SLSRIGDEL

SEQ ID NO: 67594 - protein, 9 aa, Homo Sapiens
SLSRKDSRW

SEQ ID NO: 67595 - protein, 9 aa, Homo Sapiens
SLVALSEKL

SEQ ID NO: 67596 - protein, 9 aa, Homo Sapiens
SLWYGKEYW

SEQ ID NO: 67597 - protein, 9 aa, Homo Sapiens
SLYDQAEKL

SEQ ID NO: 67598 - protein, 9 aa, Homo Sapiens
SMCGLMLKL

SEQ ID NO: 67599 - protein, 9 aa, Homo Sapiens
SMDKTMILW

SEQ ID NO: 67600 - protein, 9 aa, Homo Sapiens
SMDQTILLW

SEQ ID NO: 67601 - protein, 9 aa, Homo Sapiens
SMMDVDHQI

SEQ ID NO: 67602 - protein, 9 aa, Homo Sapiens
SMSPTGDFL

SEQ ID NO: 67603 - protein, 9 aa, Homo Sapiens
SQAAVSARF

SEQ ID NO: 67604 - protein, 9 aa, Homo Sapiens
SQADCAVLI

SEQ ID NO: 67605 - protein, 9 aa, Homo Sapiens
SQAEIEQKI

SEQ ID NO: 67606 - protein, 9 aa, Homo Sapiens
SQANIAQVL

SEQ ID NO: 67607 - protein, 9 aa, Homo Sapiens
SQANVVVKI

SEQ ID NO: 67608 - protein, 9 aa, Homo Sapiens
SQAPEAWRL

SEQ ID NO: 67609 - protein, 9 aa, Homo Sapiens
SQAPEKVTL

SEQ ID NO: 67610 - protein, 9 aa, Homo Sapiens
SQCAKTFSL

SEQ ID NO: 67611 - protein, 9 aa, Homo Sapiens
SQCGKTFTW

SEQ ID NO: 67612 - protein, 9 aa, Homo Sapiens
SQCPHIVRI

SEQ ID NO: 67613 - protein, 9 aa, Homo Sapiens
SQCVTGLVF

SEQ ID NO: 67614 - protein, 9 aa, Homo Sapiens
SQDGRVFIW

SEQ ID NO: 67615 - protein, 9 aa, Homo Sapiens
SQDGTLQSF

SEQ ID NO: 67616 - protein, 9 aa, Homo Sapiens
SQDIVNQVL

SEQ ID NO: 67617 - protein, 9 aa, Homo Sapiens
SQDLTHLNL

SEQ ID NO: 67618 - protein, 9 aa, Homo Sapiens
SQDPDFLTI

SEQ ID NO: 67619 - protein, 9 aa, Homo Sapiens
SQDPESLLL

SEQ ID NO: 67620 - protein, 9 aa, Homo Sapiens
SQDPFPAAI

SEQ ID NO: 67621 - protein, 9 aa, Homo Sapiens
SQDPGTHVV

SEQ ID NO: 67622 - protein, 9 aa, Homo Sapiens
SQDPNRVEL

SEQ ID NO: 67623 - protein, 9 aa, Homo Sapiens
SQDPPEKSI

SEQ ID NO: 67624 - protein, 9 aa, Homo Sapiens
SQDQVFLRW

SEQ ID NO: 67625 - protein, 9 aa, Homo Sapiens
SQDRHVDVL

SEQ ID NO: 67626 - protein, 9 aa, Homo Sapiens
SQDRTAKLW

SEQ ID NO: 67627 - protein, 9 aa, Homo Sapiens
SQDTGKYCF

SEQ ID NO: 67628 - protein, 9 aa, Homo Sapiens
SQDWRDSEW

SEQ ID NO: 67629 - protein, 9 aa, Homo Sapiens
SQDYGKHLL

SEQ ID NO: 67630 - protein, 9 aa, Homo Sapiens
SQEEKAAYL

SEQ ID NO: 67631 - protein, 9 aa, Homo Sapiens
SQEGASVKI

SEQ ID NO: 67632 - protein, 9 aa, Homo Sapiens
SQENLVVHI

SEQ ID NO: 67633 - protein, 9 aa, Homo Sapiens
SQFASVERI

SEQ ID NO: 67634 - protein, 9 aa, Homo Sapiens
SQFGHCFSW

SEQ ID NO: 67635 - protein, 9 aa, Homo Sapiens
SQFGTEHVL

SEQ ID NO: 67636 - protein, 9 aa, Homo Sapiens
SQFKGYFIF

SEQ ID NO: 67637 - protein, 9 aa, Homo Sapiens
SQFKYALVW

SEQ ID NO: 67638 - protein, 9 aa, Homo Sapiens
SQFSYQHAI

SEQ ID NO: 67639 - protein, 9 aa, Homo Sapiens
SQGSVGFLW

SEQ ID NO: 67640 - protein, 9 aa, Homo Sapiens
SQHGYYEKL

SEQ ID NO: 67641 - protein, 9 aa, Homo Sapiens
SQHQAIERF

SEQ ID NO: 67642 - protein, 9 aa, Homo Sapiens
SQHSVDQSW

SEQ ID NO: 67643 - protein, 9 aa, Homo Sapiens
SQIADVARF

SEQ ID NO: 67644 - protein, 9 aa, Homo Sapiens
SQIALNEKL

SEQ ID NO: 67645 - protein, 9 aa, Homo Sapiens
SQIEADFRL

SEQ ID NO: 67646 - protein, 9 aa, Homo Sapiens
SQIIQKEDL

SEQ ID NO: 67647 - protein, 9 aa, Homo Sapiens
SQIKNEINI

SEQ ID NO: 67648 - protein, 9 aa, Homo Sapiens
SQINRAYQF

SEQ ID NO: 67649 - protein, 9 aa, Homo Sapiens
SQIREMETL

SEQ ID NO: 67650 - protein, 9 aa, Homo Sapiens
SQLIDTHLL

SEQ ID NO: 67651 - protein, 9 aa, Homo Sapiens
SQLPVDHIL

SEQ ID NO: 67652 - protein, 9 aa, Homo Sapiens
SQMGPDAHM

SEQ ID NO: 67653 - protein, 9 aa, Homo Sapiens
SQNAIDHKI

SEQ ID NO: 67654 - protein, 9 aa, Homo Sapiens
SQPERDWVL

SEQ ID NO: 67655 - protein, 9 aa, Homo Sapiens
SQQELEAKL

SEQ ID NO: 67656 - protein, 9 aa, Homo Sapiens
SQQERDWVL

SEQ ID NO: 67657 - protein, 9 aa, Homo Sapiens
SQSATEVRL

SEQ ID NO: 67658 - protein, 9 aa, Homo Sapiens
SQSAVKTKF

SEQ ID NO: 67659 - protein, 9 aa, Homo Sapiens
SQSHAYQQF

SEQ ID NO: 67660 - protein, 9 aa, Homo Sapiens
SQSPKDTSF

SEQ ID NO: 67661 - protein, 9 aa, Homo Sapiens
SQSPMLLEL

SEQ ID NO: 67662 - protein, 9 aa, Homo Sapiens
SQSPVPCKL

SEQ ID NO: 67663 - protein, 9 aa, Homo Sapiens
SQSTVKVLI

SEQ ID NO: 67664 - protein, 9 aa, Homo Sapiens
SQTTVYEKL

SEQ ID NO: 67665 - protein, 9 aa, Homo Sapiens
SQTVVEEYL

SEQ ID NO: 67666 - protein, 9 aa, Homo Sapiens
SQVEGEHQL

SEQ ID NO: 67667 - protein, 9 aa, Homo Sapiens
SQVGVEPSI

SEQ ID NO: 67668 - protein, 9 aa, Homo Sapiens
SQVIPMEEF

SEQ ID NO: 67669 - protein, 9 aa, Homo Sapiens
SQVKLQDFF

SEQ ID NO: 67670 - protein, 9 aa, Homo Sapiens
SQVRDVIGF

SEQ ID NO: 67671 - protein, 9 aa, Homo Sapiens
SQYPFPVTL

SEQ ID NO: 67672 - protein, 9 aa, Homo Sapiens
SSPAPRTAL

SEQ ID NO: 67673 - protein, 9 aa, Homo Sapiens
STTKIGDAI

SEQ ID NO: 67674 - protein, 9 aa, Homo Sapiens
STVGFGDQI

SEQ ID NO: 67675 - protein, 9 aa, Homo Sapiens
SVDETTQAM

SEQ ID NO: 67676 - protein, 9 aa, Homo Sapiens
SVIDSDEKW

SEQ ID NO: 67677 - protein, 9 aa, Homo Sapiens
SVIFGEALW

SEQ ID NO: 67678 - protein, 9 aa, Homo Sapiens
SVMKTEPSI

SEQ ID NO: 67679 - protein, 9 aa, Homo Sapiens
SVQGGETRI

SEQ ID NO: 67680 - protein, 9 aa, Homo Sapiens
SVTEIQEKW

SEQ ID NO: 67681 - protein, 9 aa, Homo Sapiens
SVYDGKLLI

SEQ ID NO: 67682 - protein, 9 aa, Homo Sapiens
TLDPNTREW

SEQ ID NO: 67683 - protein, 9 aa, Homo Sapiens
TLDPVEKAL

SEQ ID NO: 67684 - protein, 9 aa, Homo Sapiens
TLDTIQLAF

SEQ ID NO: 67685 - protein, 9 aa, Homo Sapiens
TLGPKDPGL

SEQ ID NO: 67686 - protein, 9 aa, Homo Sapiens
TLHRYEHAL

SEQ ID NO: 67687 - protein, 9 aa, Homo Sapiens
TLSTFKESW

SEQ ID NO: 67688 - protein, 9 aa, Homo Sapiens
TLSVSGDRL

SEQ ID NO: 67689 - protein, 9 aa, Homo Sapiens
TMVEAFDRW

SEQ ID NO: 67690 - protein, 9 aa, Homo Sapiens
TNSAILPLL

SEQ ID NO: 67691 - protein, 9 aa, Homo Sapiens
TQALEKYNI

SEQ ID NO: 67692 - protein, 9 aa, Homo Sapiens
TQAPVVPYW

SEQ ID NO: 67693 - protein, 9 aa, Homo Sapiens
TQDAVPLTL

SEQ ID NO: 67694 - protein, 9 aa, Homo Sapiens
TQDECILHF

SEQ ID NO: 67695 - protein, 9 aa, Homo Sapiens
TQDGIKLMF

SEQ ID NO: 67696 - protein, 9 aa, Homo Sapiens
TQDNGILTF

SEQ ID NO: 67697 - protein, 9 aa, Homo Sapiens
TQDNITVRW

SEQ ID NO: 67698 - protein, 9 aa, Homo Sapiens
TQDTQPHYI

SEQ ID NO: 67699 - protein, 9 aa, Homo Sapiens
TQESTFQEL

SEQ ID NO: 67700 - protein, 9 aa, Homo Sapiens
TQGPIEVYL

SEQ ID NO: 67701 - protein, 9 aa, Homo Sapiens
TQGQVDEKW

SEQ ID NO: 67702 - protein, 9 aa, Homo Sapiens
TQIITKYLW

SEQ ID NO: 67703 - protein, 9 aa, Homo Sapiens
TQMPDPKTF

SEQ ID NO: 67704 - protein, 9 aa, Homo Sapiens
TQNLDVHFW

SEQ ID NO: 67705 - protein, 9 aa, Homo Sapiens
TQQNWDYRW

SEQ ID NO: 67706 - protein, 9 aa, Homo Sapiens
TQQQHDFTL

SEQ ID NO: 67707 - protein, 9 aa, Homo Sapiens
TQQWEDYRF

SEQ ID NO: 67708 - protein, 9 aa, Homo Sapiens
TQSEVDPHL

SEQ ID NO: 67709 - protein, 9 aa, Homo Sapiens
TQTAVITRI

SEQ ID NO: 67710 - protein, 9 aa, Homo Sapiens
TQTLVREYF

SEQ ID NO: 67711 - protein, 9 aa, Homo Sapiens
TQTTHELTI

SEQ ID NO: 67712 - protein, 9 aa, Homo Sapiens
TQYISEPKL

SEQ ID NO: 67713 - protein, 9 aa, Homo Sapiens
TVTGVGDVF

SEQ ID NO: 67714 - protein, 9 aa, Homo Sapiens
VADLVGFLL

SEQ ID NO: 67715 - protein, 9 aa, Homo Sapiens
VIAPPDFVL

SEQ ID NO: 67716 - protein, 9 aa, Homo Sapiens
VIDDAFALW

SEQ ID NO: 67717 - protein, 9 aa, Homo Sapiens
VIDNIRLCF

SEQ ID NO: 67718 - protein, 9 aa, Homo Sapiens
VIQENEHAL

SEQ ID NO: 67719 - protein, 9 aa, Homo Sapiens
VLAQADHEL

SEQ ID NO: 67720 - protein, 9 aa, Homo Sapiens
VLCALGLVL

SEQ ID NO: 67721 - protein, 9 aa, Homo Sapiens
VLDDKDYFL

SEQ ID NO: 67722 - protein, 9 aa, Homo Sapiens
VLDITRLLL

SEQ ID NO: 67723 - protein, 9 aa, Homo Sapiens
VLDQKEHRL

SEQ ID NO: 67724 - protein, 9 aa, Homo Sapiens
VLFAEEPGL

SEQ ID NO: 67725 - protein, 9 aa, Homo Sapiens
VLFDDELLM

SEQ ID NO: 67726 - protein, 9 aa, Homo Sapiens
VLFPEPLTW

SEQ ID NO: 67727 - protein, 9 aa, Homo Sapiens
VLFPGTDHI

SEQ ID NO: 67728 - protein, 9 aa, Homo Sapiens
VLHFKEWQL

SEQ ID NO: 67729 - protein, 9 aa, Homo Sapiens
VLHPTPELW

SEQ ID NO: 67730 - protein, 9 aa, Homo Sapiens
VLIDIREYW

SEQ ID NO: 67731 - protein, 9 aa, Homo Sapiens
VLQNGGDKL

SEQ ID NO: 67732 - protein, 9 aa, Homo Sapiens
VLQPEEPKI

SEQ ID NO: 67733 - protein, 9 aa, Homo Sapiens
VLQQKEHTI

SEQ ID NO: 67734 - protein, 9 aa, Homo Sapiens
VLSDLDQKW

SEQ ID NO: 67735 - protein, 9 aa, Homo Sapiens
VLSHVVLEF

SEQ ID NO: 67736 - protein, 9 aa, Homo Sapiens
VLTSKGDAW

SEQ ID NO: 67737 - protein, 9 aa, Homo Sapiens
VLVKVFEKF

SEQ ID NO: 67738 - protein, 9 aa, Homo Sapiens
VLYDRPLKI

SEQ ID NO: 67739 - protein, 9 aa, Homo Sapiens
VLYVENERW

SEQ ID NO: 67740 - protein, 9 aa, Homo Sapiens
VMDAALLLI

SEQ ID NO: 67741 - protein, 9 aa, Homo Sapiens
VMDPTKILI

SEQ ID NO: 67742 - protein, 9 aa, Homo Sapiens
VMDQKEHKL

SEQ ID NO: 67743 - protein, 9 aa, Homo Sapiens
VQAGDVITI

SEQ ID NO: 67744 - protein, 9 aa, Homo Sapiens
VQAIKDHAF

SEQ ID NO: 67745 - protein, 9 aa, Homo Sapiens
VQALVSGKL

SEQ ID NO: 67746 - protein, 9 aa, Homo Sapiens
VQAPANDSW

SEQ ID NO: 67747 - protein, 9 aa, Homo Sapiens
VQDESHSEW

SEQ ID NO: 67748 - protein, 9 aa, Homo Sapiens
VQDGATHSL

SEQ ID NO: 67749 - protein, 9 aa, Homo Sapiens
VQDRFEVNI

SEQ ID NO: 67750 - protein, 9 aa, Homo Sapiens
VQGHVEELW

SEQ ID NO: 67751 - protein, 9 aa, Homo Sapiens
VQHNMVDVL

SEQ ID NO: 67752 - protein, 9 aa, Homo Sapiens
VQHQDALQI

SEQ ID NO: 67753 - protein, 9 aa, Homo Sapiens
VQHSDVLFL

SEQ ID NO: 67754 - protein, 9 aa, Homo Sapiens
VQIGEKEGW

SEQ ID NO: 67755 - protein, 9 aa, Homo Sapiens
VQISDKITI

SEQ ID NO: 67756 - protein, 9 aa, Homo Sapiens
VQLKDLEKW

SEQ ID NO: 67757 - protein, 9 aa, Homo Sapiens
VQMQREWSF

SEQ ID NO: 67758 - protein, 9 aa, Homo Sapiens
VQQLEQWEF

SEQ ID NO: 67759 - protein, 9 aa, Homo Sapiens
VQSGLRILL

SEQ ID NO: 67760 - protein, 9 aa, Homo Sapiens
VQYALPLQL

SEQ ID NO: 67761 - protein, 9 aa, Homo Sapiens
VVAPGQEKI

SEQ ID NO: 67762 - protein, 9 aa, Homo Sapiens
VVEDGYEFF

SEQ ID NO: 67763 - protein, 9 aa, Homo Sapiens
WIDKCQNNL

SEQ ID NO: 67764 - protein, 9 aa, Homo Sapiens
WLHGLESQI

SEQ ID NO: 67765 - protein, 9 aa, Homo Sapiens
WLSSVVDHF

SEQ ID NO: 67766 - protein, 9 aa, Homo Sapiens
WLYGEDHQI

SEQ ID NO: 67767 - protein, 9 aa, Homo Sapiens
WQEGSVTRL

SEQ ID NO: 67768 - protein, 9 aa, Homo Sapiens
WQHDEPCYW

SEQ ID NO: 67769 - protein, 9 aa, Homo Sapiens
WSFDGIDRW

SEQ ID NO: 67770 - protein, 9 aa, Homo Sapiens
YIAEEYSRL

SEQ ID NO: 67771 - protein, 9 aa, Homo Sapiens
YIDASCLTW

SEQ ID NO: 67772 - protein, 9 aa, Homo Sapiens
YIFEEPFTI

SEQ ID NO: 67773 - protein, 9 aa, Homo Sapiens
YIIEREPLI

SEQ ID NO: 67774 - protein, 9 aa, Homo Sapiens
YIIKDKHIL

SEQ ID NO: 67775 - protein, 9 aa, Homo Sapiens
YINVEREEW

SEQ ID NO: 67776 - protein, 9 aa, Homo Sapiens
YIVFGEAKI

SEQ ID NO: 67777 - protein, 9 aa, Homo Sapiens
YLAKHIENI

SEQ ID NO: 67778 - protein, 9 aa, Homo Sapiens
YLAQHYDKI

SEQ ID NO: 67779 - protein, 9 aa, Homo Sapiens
YLASEISTW

SEQ ID NO: 67780 - protein, 9 aa, Homo Sapiens
YLCYEVERL

SEQ ID NO: 67781 - protein, 9 aa, Homo Sapiens
YLDPNYQSI

SEQ ID NO: 67782 - protein, 9 aa, Homo Sapiens
YLDQVKLQF

SEQ ID NO: 67783 - protein, 9 aa, Homo Sapiens
YLEDTDRNL

SEQ ID NO: 67784 - protein, 9 aa, Homo Sapiens
YLEGECVEW

SEQ ID NO: 67785 - protein, 9 aa, Homo Sapiens
YLENGKETL

SEQ ID NO: 67786 - protein, 9 aa, Homo Sapiens
YLFKGNNRW

SEQ ID NO: 67787 - protein, 9 aa, Homo Sapiens
YLFPNRLEW

SEQ ID NO: 67788 - protein, 9 aa, Homo Sapiens
YLIEPDVEL

SEQ ID NO: 67789 - protein, 9 aa, Homo Sapiens
YLIKDGKLI

SEQ ID NO: 67790 - protein, 9 aa, Homo Sapiens
YLMAEKLGI

SEQ ID NO: 67791 - protein, 9 aa, Homo Sapiens
YLNDLHEVL

SEQ ID NO: 67792 - protein, 9 aa, Homo Sapiens
YLNQDNCTW

SEQ ID NO: 67793 - protein, 9 aa, Homo Sapiens
YLSDPCPGL

SEQ ID NO: 67794 - protein, 9 aa, Homo Sapiens
YLSLTPEQW

SEQ ID NO: 67795 - protein, 9 aa, Homo Sapiens
YLSNADERL

SEQ ID NO: 67796 - protein, 9 aa, Homo Sapiens
YLSPDLSKI

SEQ ID NO: 67797 - protein, 9 aa, Homo Sapiens
YLTAEILEL

SEQ ID NO: 67798 - protein, 9 aa, Homo Sapiens
YLTELIDRF

SEQ ID NO: 67799 - protein, 9 aa, Homo Sapiens
YLVEDIQHI

SEQ ID NO: 67800 - protein, 9 aa, Homo Sapiens
YLVKIFEEL

SEQ ID NO: 67801 - protein, 9 aa, Homo Sapiens
YLVKREDYL

SEQ ID NO: 67802 - protein, 9 aa, Homo Sapiens
YQAEIPDRL

SEQ ID NO: 67803 - protein, 9 aa, Homo Sapiens
YQAHYGEQL

SEQ ID NO: 67804 - protein, 9 aa, Homo Sapiens
YQARDLMLM

SEQ ID NO: 67805 - protein, 9 aa, Homo Sapiens
YQDEVFGGF

SEQ ID NO: 67806 - protein, 9 aa, Homo Sapiens
YQDLIDRGW

SEQ ID NO: 67807 - protein, 9 aa, Homo Sapiens
YQDLLNVKM

SEQ ID NO: 67808 - protein, 9 aa, Homo Sapiens
YQDVGSLNI

SEQ ID NO: 67809 - protein, 9 aa, Homo Sapiens
YQDVSCLQF

SEQ ID NO: 67810 - protein, 9 aa, Homo Sapiens
YQEKGVRVL

SEQ ID NO: 67811 - protein, 9 aa, Homo Sapiens
YQFGEIRTI

SEQ ID NO: 67812 - protein, 9 aa, Homo Sapiens
YQGEGAHHI

SEQ ID NO: 67813 - protein, 9 aa, Homo Sapiens
YQGFDTDTW

SEQ ID NO: 67814 - protein, 9 aa, Homo Sapiens
YQGNTALHL

SEQ ID NO: 67815 - protein, 9 aa, Homo Sapiens
YQHGIFQSI

SEQ ID NO: 67816 - protein, 9 aa, Homo Sapiens
YQHIDRWLL

SEQ ID NO: 67817 - protein, 9 aa, Homo Sapiens
YQHKEEYQL

SEQ ID NO: 67818 - protein, 9 aa, Homo Sapiens
YQHKLAEKL

SEQ ID NO: 67819 - protein, 9 aa, Homo Sapiens
YQIDPDACF

SEQ ID NO: 67820 - protein, 9 aa, Homo Sapiens
YQLEIPENF

SEQ ID NO: 67821 - protein, 9 aa, Homo Sapiens
YQLSKEYTL

SEQ ID NO: 67822 - protein, 9 aa, Homo Sapiens
YQLTIEPLL

SEQ ID NO: 67823 - protein, 9 aa, Homo Sapiens
YQNLIDVGF

SEQ ID NO: 67824 - protein, 9 aa, Homo Sapiens
YQNMTVDIL

SEQ ID NO: 67825 - protein, 9 aa, Homo Sapiens
YQNQEIHNL

SEQ ID NO: 67826 - protein, 9 aa, Homo Sapiens
YQQELEREL

SEQ ID NO: 67827 - protein, 9 aa, Homo Sapiens
YQQKEIEFL

SEQ ID NO: 67828 - protein, 9 aa, Homo Sapiens
YQQSMDSKL

SEQ ID NO: 67829 - protein, 9 aa, Homo Sapiens
YQSIEFSRL

SEQ ID NO: 67830 - protein, 9 aa, Homo Sapiens
YQSKVRELI

SEQ ID NO: 67831 - protein, 9 aa, Homo Sapiens
YQSLCPTSW

SEQ ID NO: 67832 - protein, 9 aa, Homo Sapiens
YQSPTGDRI

SEQ ID NO: 67833 - protein, 9 aa, Homo Sapiens
YQTEIGQTL

SEQ ID NO: 67834 - protein, 9 aa, Homo Sapiens
YQVEGMEWL

SEQ ID NO: 67835 - protein, 9 aa, Homo Sapiens
YQYPRPLLI

SEQ ID NO: 67836 - protein, 9 aa, Homo Sapiens
YTSESGDRL

SEQ ID NO: 67837 - protein, 9 aa, Homo Sapiens
YVADLGDIL

SEQ ID NO: 67838 - protein, 9 aa, Homo Sapiens
YVSSPDPQL

SEQ ID NO: 67839 - protein, 10 aa, Homo Sapiens
AEIKELFQYI

SEQ ID NO: 67840 - protein, 10 aa, Homo Sapiens
AIFCETRAEW

SEQ ID NO: 67841 - protein, 10 aa, Homo Sapiens
ALAEQKCEEW

SEQ ID NO: 67842 - protein, 10 aa, Homo Sapiens
ALAKTGAESI

SEQ ID NO: 67843 - protein, 10 aa, Homo Sapiens
ALALIYNEAL

SEQ ID NO: 67844 - protein, 10 aa, Homo Sapiens
ALAPAEVQVL

SEQ ID NO: 67845 - protein, 10 aa, Homo Sapiens
ALAPHLDDAL

SEQ ID NO: 67846 - protein, 10 aa, Homo Sapiens
ALAPILDDGW

SEQ ID NO: 67847 - protein, 10 aa, Homo Sapiens
ALAQATPDHF

SEQ ID NO: 67848 - protein, 10 aa, Homo Sapiens
ALASSLLDRF

SEQ ID NO: 67849 - protein, 10 aa, Homo Sapiens
ALCGTVLDHL

SEQ ID NO: 67850 - protein, 10 aa, Homo Sapiens
ALDDSIGDVW

SEQ ID NO: 67851 - protein, 10 aa, Homo Sapiens
ALDFNTKVFW

SEQ ID NO: 67852 - protein, 10 aa, Homo Sapiens
ALDPNAYEAF

SEQ ID NO: 67853 - protein, 10 aa, Homo Sapiens
ALDPSLVPTF

SEQ ID NO: 67854 - protein, 10 aa, Homo Sapiens
ALDSPGTDHF

SEQ ID NO: 67855 - protein, 10 aa, Homo Sapiens
ALEALVPVTI

SEQ ID NO: 67856 - protein, 10 aa, Homo Sapiens
ALESGRYELL

SEQ ID NO: 67857 - protein, 10 aa, Homo Sapiens
ALFLDKMGSL

SEQ ID NO: 67858 - protein, 10 aa, Homo Sapiens
ALFPGDVDRL

SEQ ID NO: 67859 - protein, 10 aa, Homo Sapiens
ALFPKDVDRL

SEQ ID NO: 67860 - protein, 10 aa, Homo Sapiens
ALGPLVGDNF

SEQ ID NO: 67861 - protein, 10 aa, Homo Sapiens
ALHQDVQAMW

SEQ ID NO: 67862 - protein, 10 aa, Homo Sapiens
ALINDELVEW

SEQ ID NO: 67863 - protein, 10 aa, Homo Sapiens
ALMKEEGVKL

SEQ ID NO: 67864 - protein, 10 aa, Homo Sapiens
ALPEFGEVEI

SEQ ID NO: 67865 - protein, 10 aa, Homo Sapiens
ALPGPSLDQW

SEQ ID NO: 67866 - protein, 10 aa, Homo Sapiens
ALQRANDDRW

SEQ ID NO: 67867 - protein, 10 aa, Homo Sapiens
ALSQVGDLAF

SEQ ID NO: 67868 - protein, 10 aa, Homo Sapiens
ALVALTSERF

SEQ ID NO: 67869 - protein, 10 aa, Homo Sapiens
ALVDVIEDKL

SEQ ID NO: 67870 - protein, 10 aa, Homo Sapiens
ALYTEKFEEF

SEQ ID NO: 67871 - protein, 10 aa, Homo Sapiens
AMEEALFQHF

SEQ ID NO: 67872 - protein, 10 aa, Homo Sapiens
AMITDLEERL

SEQ ID NO: 67873 - protein, 10 aa, Homo Sapiens
AMVSLEMEKL

SEQ ID NO: 67874 - protein, 10 aa, Homo Sapiens
AMWPEQSDKW

SEQ ID NO: 67875 - protein, 10 aa, Homo Sapiens
AQAADVLELL

SEQ ID NO: 67876 - protein, 10 aa, Homo Sapiens
AQAAEFREAW

SEQ ID NO: 67877 - protein, 10 aa, Homo Sapiens
AQAEDMNVKL

SEQ ID NO: 67878 - protein, 10 aa, Homo Sapiens
AQAEPERHVW

SEQ ID NO: 67879 - protein, 10 aa, Homo Sapiens
AQAGEFGDRL

SEQ ID NO: 67880 - protein, 10 aa, Homo Sapiens
AQAGPGGDTW

SEQ ID NO: 67881 - protein, 10 aa, Homo Sapiens
AQAGYEVVGL

SEQ ID NO: 67882 - protein, 10 aa, Homo Sapiens
AQAKADKIKL

SEQ ID NO: 67883 - protein, 10 aa, Homo Sapiens
AQAKAESITL

SEQ ID NO: 67884 - protein, 10 aa, Homo Sapiens
AQAKEENVGL

SEQ ID NO: 67885 - protein, 10 aa, Homo Sapiens
AQALEELTGF

SEQ ID NO: 67886 - protein, 10 aa, Homo Sapiens
AQALTDQQQF

SEQ ID NO: 67887 - protein, 10 aa, Homo Sapiens
AQAPSSFQLL

SEQ ID NO: 67888 - protein, 10 aa, Homo Sapiens
AQARDEEQRL

SEQ ID NO: 67889 - protein, 10 aa, Homo Sapiens
AQAWIKKDQF

SEQ ID NO: 67890 - protein, 10 aa, Homo Sapiens
AQCAAIAERL

SEQ ID NO: 67891 - protein, 10 aa, Homo Sapiens
AQCPGLPDLI

SEQ ID NO: 67892 - protein, 10 aa, Homo Sapiens
AQDATKLDTW

SEQ ID NO: 67893 - protein, 10 aa, Homo Sapiens
AQDFKTDLRF

SEQ ID NO: 67894 - protein, 10 aa, Homo Sapiens
AQDFLLKWSF

SEQ ID NO: 67895 - protein, 10 aa, Homo Sapiens
AQDFNTDLRF

SEQ ID NO: 67896 - protein, 10 aa, Homo Sapiens
AQDKEAAEAI

SEQ ID NO: 67897 - protein, 10 aa, Homo Sapiens
AQDLDTMQRL

SEQ ID NO: 67898 - protein, 10 aa, Homo Sapiens
AQDLWSEQSI

SEQ ID NO: 67899 - protein, 10 aa, Homo Sapiens
AQDPQMLDQL

SEQ ID NO: 67900 - protein, 10 aa, Homo Sapiens
AQDVPSAQQW

SEQ ID NO: 67901 - protein, 10 aa, Homo Sapiens
AQDYGGLLLL

SEQ ID NO: 67902 - protein, 10 aa, Homo Sapiens
AQEALTVLSL

SEQ ID NO: 67903 - protein, 10 aa, Homo Sapiens
AQEDVTLEHL

SEQ ID NO: 67904 - protein, 10 aa, Homo Sapiens
AQEEGTSQAL

SEQ ID NO: 67905 - protein, 10 aa, Homo Sapiens
AQEGESSQQL

SEQ ID NO: 67906 - protein, 10 aa, Homo Sapiens
AQENRVVAFF

SEQ ID NO: 67907 - protein, 10 aa, Homo Sapiens
AQESACNNTL

SEQ ID NO: 67908 - protein, 10 aa, Homo Sapiens
AQFHPDGLIF

SEQ ID NO: 67909 - protein, 10 aa, Homo Sapiens
AQFIDKPVCF

SEQ ID NO: 67910 - protein, 10 aa, Homo Sapiens
AQGPAGAEKL

SEQ ID NO: 67911 - protein, 10 aa, Homo Sapiens
AQHKADMQRW

SEQ ID NO: 67912 - protein, 10 aa, Homo Sapiens
AQHLFIQTFW

SEQ ID NO: 67913 - protein, 10 aa, Homo Sapiens
AQHPATTEDI

SEQ ID NO: 67914 - protein, 10 aa, Homo Sapiens
AQHQALVTLW

SEQ ID NO: 67915 - protein, 10 aa, Homo Sapiens
AQIADLQQKL

SEQ ID NO: 67916 - protein, 10 aa, Homo Sapiens
AQIAEGMAYI

SEQ ID NO: 67917 - protein, 10 aa, Homo Sapiens
AQIAELKMQL

SEQ ID NO: 67918 - protein, 10 aa, Homo Sapiens
AQIEDLQVKL

SEQ ID NO: 67919 - protein, 10 aa, Homo Sapiens
AQIKAGYQSL

SEQ ID NO: 67920 - protein, 10 aa, Homo Sapiens
AQIKANYDVL

SEQ ID NO: 67921 - protein, 10 aa, Homo Sapiens
AQIKFLYEEL

SEQ ID NO: 67922 - protein, 10 aa, Homo Sapiens
AQIQEQHVQI

SEQ ID NO: 67923 - protein, 10 aa, Homo Sapiens
AQITEEEAKL

SEQ ID NO: 67924 - protein, 10 aa, Homo Sapiens
AQLEEKNQEL

SEQ ID NO: 67925 - protein, 10 aa, Homo Sapiens
AQLNFTKDQL

SEQ ID NO: 67926 - protein, 10 aa, Homo Sapiens
AQLNIAEQNW

SEQ ID NO: 67927 - protein, 10 aa, Homo Sapiens
AQLQELQVKF

SEQ ID NO: 67928 - protein, 10 aa, Homo Sapiens
AQMEVASFLL

SEQ ID NO: 67929 - protein, 10 aa, Homo Sapiens
AQMSKQLDMF

SEQ ID NO: 67930 - protein, 10 aa, Homo Sapiens
AQQEAERARF

SEQ ID NO: 67931 - protein, 10 aa, Homo Sapiens
AQQPQKEAAL

SEQ ID NO: 67932 - protein, 10 aa, Homo Sapiens
AQRSGCEERW

SEQ ID NO: 67933 - protein, 10 aa, Homo Sapiens
AQSEAEKERI

SEQ ID NO: 67934 - protein, 10 aa, Homo Sapiens
AQSKDFAVGI

SEQ ID NO: 67935 - protein, 10 aa, Homo Sapiens
AQSQIHNTCW

SEQ ID NO: 67936 - protein, 10 aa, Homo Sapiens
AQTVSPAEKW

SEQ ID NO: 67937 - protein, 10 aa, Homo Sapiens
AQVEKEFCQL

SEQ ID NO: 67938 - protein, 10 aa, Homo Sapiens
AQVFVHGESL

SEQ ID NO: 67939 - protein, 10 aa, Homo Sapiens
AQVGPEIEQF

SEQ ID NO: 67940 - protein, 10 aa, Homo Sapiens
AQVKEAGIAW

SEQ ID NO: 67941 - protein, 10 aa, Homo Sapiens
AQVQVAGDML

SEQ ID NO: 67942 - protein, 10 aa, Homo Sapiens
AQVRDLEEKL

SEQ ID NO: 67943 - protein, 10 aa, Homo Sapiens
AQVRLYKEEL

SEQ ID NO: 67944 - protein, 10 aa, Homo Sapiens
AQVYLLPDFL

SEQ ID NO: 67945 - protein, 10 aa, Homo Sapiens
AQYSQDYQQF

SEQ ID NO: 67946 - protein, 10 aa, Homo Sapiens
AVDGLSFQAF

SEQ ID NO: 67947 - protein, 10 aa, Homo Sapiens
AVEAESEQKW

SEQ ID NO: 67948 - protein, 10 aa, Homo Sapiens
AVIEDTWHYF

SEQ ID NO: 67949 - protein, 10 aa, Homo Sapiens
DIQSRSKEQL

SEQ ID NO: 67950 - protein, 10 aa, Homo Sapiens
EARRLNPGAI

SEQ ID NO: 67951 - protein, 10 aa, Homo Sapiens
ELQPSEEVTW

SEQ ID NO: 67952 - protein, 10 aa, Homo Sapiens
ERVQAQEQRI

SEQ ID NO: 67953 - protein, 10 aa, Homo Sapiens
ESQDQVFLRW

SEQ ID NO: 67954 - protein, 10 aa, Homo Sapiens
FLYTGEGDTV

SEQ ID NO: 67955 - protein, 10 aa, Homo Sapiens
FQAKLEHEYI

SEQ ID NO: 67956 - protein, 10 aa, Homo Sapiens
FQDDPDIIAF

SEQ ID NO: 67957 - protein, 10 aa, Homo Sapiens
FQDNFEFVQW

SEQ ID NO: 67958 - protein, 10 aa, Homo Sapiens
FQGRAEVVSL

SEQ ID NO: 67959 - protein, 10 aa, Homo Sapiens
FQIEDVIHKF

SEQ ID NO: 67960 - protein, 10 aa, Homo Sapiens
FQIIEEDAAL

SEQ ID NO: 67961 - protein, 10 aa, Homo Sapiens
FQISKEYERF

SEQ ID NO: 67962 - protein, 10 aa, Homo Sapiens
FQNNEKFVQF

SEQ ID NO: 67963 - protein, 10 aa, Homo Sapiens
FQVKEVDVGL

SEQ ID NO: 67964 - protein, 10 aa, Homo Sapiens
FQYPCYQEGL

SEQ ID NO: 67965 - protein, 10 aa, Homo Sapiens
FSAPTLEDHF

SEQ ID NO: 67966 - protein, 10 aa, Homo Sapiens
FVDCPGHDIL

SEQ ID NO: 67967 - protein, 10 aa, Homo Sapiens
GLIADAKTLI

SEQ ID NO: 67968 - protein, 10 aa, Homo Sapiens
GLIEVKTDEF

SEQ ID NO: 67969 - protein, 10 aa, Homo Sapiens
GLIHGDFNEF

SEQ ID NO: 67970 - protein, 10 aa, Homo Sapiens
GLPNNIVDVW

SEQ ID NO: 67971 - protein, 10 aa, Homo Sapiens
GLQTKEEVSI

SEQ ID NO: 67972 - protein, 10 aa, Homo Sapiens
GLSRELFESW

SEQ ID NO: 67973 - protein, 10 aa, Homo Sapiens
GLVLDPKVGF

SEQ ID NO: 67974 - protein, 10 aa, Homo Sapiens
GLWRGEEVTL

SEQ ID NO: 67975 - protein, 10 aa, Homo Sapiens
GLYGIKDDVF

SEQ ID NO: 67976 - protein, 10 aa, Homo Sapiens
GLYRDEHQDF

SEQ ID NO: 67977 - protein, 10 aa, Homo Sapiens
GQAEPESVLL

SEQ ID NO: 67978 - protein, 10 aa, Homo Sapiens
GQAGAARDAL

SEQ ID NO: 67979 - protein, 10 aa, Homo Sapiens
GQALELPLRI

SEQ ID NO: 67980 - protein, 10 aa, Homo Sapiens
GQAPPDQEAL

SEQ ID NO: 67981 - protein, 10 aa, Homo Sapiens
GQAQPIIDQL

SEQ ID NO: 67982 - protein, 10 aa, Homo Sapiens
GQCRQELARL

SEQ ID NO: 67983 - protein, 10 aa, Homo Sapiens
GQDEPLIHVF

SEQ ID NO: 67984 - protein, 10 aa, Homo Sapiens
GQDPGPEPRL

SEQ ID NO: 67985 - protein, 10 aa, Homo Sapiens
GQDPHSSQAF

SEQ ID NO: 67986 - protein, 10 aa, Homo Sapiens
GQDPKNFSEI

SEQ ID NO: 67987 - protein, 10 aa, Homo Sapiens
GQDPPSGDRL

SEQ ID NO: 67988 - protein, 10 aa, Homo Sapiens
GQDPRINVVL

SEQ ID NO: 67989 - protein, 10 aa, Homo Sapiens
GQEKIPVHKF

SEQ ID NO: 67990 - protein, 10 aa, Homo Sapiens
GQEKNSSNFI

SEQ ID NO: 67991 - protein, 10 aa, Homo Sapiens
GQESAQNTKF

SEQ ID NO: 67992 - protein, 10 aa, Homo Sapiens
GQFEEFGQTF

SEQ ID NO: 67993 - protein, 10 aa, Homo Sapiens
GQFFPDIVEF

SEQ ID NO: 67994 - protein, 10 aa, Homo Sapiens
GQFHDLMELF

SEQ ID NO: 67995 - protein, 10 aa, Homo Sapiens
GQFPGHNEFF

SEQ ID NO: 67996 - protein, 10 aa, Homo Sapiens
GQFQHALEEL

SEQ ID NO: 67997 - protein, 10 aa, Homo Sapiens
GQFYDLKELF

SEQ ID NO: 67998 - protein, 10 aa, Homo Sapiens
GQGILSQDAW

SEQ ID NO: 67999 - protein, 10 aa, Homo Sapiens
GQHLGALDYL

SEQ ID NO: 68000 - protein, 10 aa, Homo Sapiens
GQIPLKEVTF

SEQ ID NO: 68001 - protein, 10 aa, Homo Sapiens
GQIQEAIALI

SEQ ID NO: 68002 - protein, 10 aa, Homo Sapiens
GQIQVNIQEW

SEQ ID NO: 68003 - protein, 10 aa, Homo Sapiens
GQIRDNKIGI

SEQ ID NO: 68004 - protein, 10 aa, Homo Sapiens
GQIYANNDKL

SEQ ID NO: 68005 - protein, 10 aa, Homo Sapiens
GQIYGDVLYF

SEQ ID NO: 68006 - protein, 10 aa, Homo Sapiens
GQLDDARVIL

SEQ ID NO: 68007 - protein, 10 aa, Homo Sapiens
GQLKGEVAQM

SEQ ID NO: 68008 - protein, 10 aa, Homo Sapiens
GQLRAQEAGL

SEQ ID NO: 68009 - protein, 10 aa, Homo Sapiens
GQMSFDHQQL

SEQ ID NO: 68010 - protein, 10 aa, Homo Sapiens
GQMVIDEELL

SEQ ID NO: 68011 - protein, 10 aa, Homo Sapiens
GQPGFHSDTL

SEQ ID NO: 68012 - protein, 10 aa, Homo Sapiens
GQSREELDKF

SEQ ID NO: 68013 - protein, 10 aa, Homo Sapiens
GQVEVTGDEY

SEQ ID NO: 68014 - protein, 10 aa, Homo Sapiens
GQVKILEDSF

SEQ ID NO: 68015 - protein, 10 aa, Homo Sapiens
GQVPCHFEFI

SEQ ID NO: 68016 - protein, 10 aa, Homo Sapiens
GQVPPGTNHI

SEQ ID NO: 68017 - protein, 10 aa, Homo Sapiens
GQWREYFSAL

SEQ ID NO: 68018 - protein, 10 aa, Homo Sapiens
GQYDGKVDIW

SEQ ID NO: 68019 - protein, 10 aa, Homo Sapiens
GQYDGKVDVW

SEQ ID NO: 68020 - protein, 10 aa, Homo Sapiens
GVIDDAFALW

SEQ ID NO: 68021 - protein, 10 aa, Homo Sapiens
HIDPNVDYQF

SEQ ID NO: 68022 - protein, 10 aa, Homo Sapiens
HIIDDALVRL

SEQ ID NO: 68023 - protein, 10 aa, Homo Sapiens
HIQKEDVPSE

SEQ ID NO: 68024 - protein, 10 aa, Homo Sapiens
HIVDEVNGLI

SEQ ID NO: 68025 - protein, 10 aa, Homo Sapiens
HLANEKNLKL

SEQ ID NO: 68026 - protein, 10 aa, Homo Sapiens
HLASGGNDNL

SEQ ID NO: 68027 - protein, 10 aa, Homo Sapiens
HLDGNTEPGL

SEQ ID NO: 68028 - protein, 10 aa, Homo Sapiens
HLDGNVLDHF

SEQ ID NO: 68029 - protein, 10 aa, Homo Sapiens
HLDHCMHDHF

SEQ ID NO: 68030 - protein, 10 aa, Homo Sapiens
HLENAGCNKI

SEQ ID NO: 68031 - protein, 10 aa, Homo Sapiens
HLENSGWQKI

SEQ ID NO: 68032 - protein, 10 aa, Homo Sapiens
HLHNGDLDHF

SEQ ID NO: 68033 - protein, 10 aa, Homo Sapiens
HLIDGDVVLF

SEQ ID NO: 68034 - protein, 10 aa, Homo Sapiens
HLIEDVLNQL

SEQ ID NO: 68035 - protein, 10 aa, Homo Sapiens
HLIEEINDEM

SEQ ID NO: 68036 - protein, 10 aa, Homo Sapiens
HLIGSGSEKM

SEQ ID NO: 68037 - protein, 10 aa, Homo Sapiens
HLINDCSNTF

SEQ ID NO: 68038 - protein, 10 aa, Homo Sapiens
HLINQNSDYL

SEQ ID NO: 68039 - protein, 10 aa, Homo Sapiens
HLISIIKDDL

SEQ ID NO: 68040 - protein, 10 aa, Homo Sapiens
HLIYLINDVL

SEQ ID NO: 68041 - protein, 10 aa, Homo Sapiens
HLLDDRKLEL

SEQ ID NO: 68042 - protein, 10 aa, Homo Sapiens
HLLEDAFNQI

SEQ ID NO: 68043 - protein, 10 aa, Homo Sapiens
HLLEKDIITL

SEQ ID NO: 68044 - protein, 10 aa, Homo Sapiens
HLLNVINENF

SEQ ID NO: 68045 - protein, 10 aa, Homo Sapiens
HLNPSDTEEW

SEQ ID NO: 68046 - protein, 10 aa, Homo Sapiens
HLPASGLDIF

SEQ ID NO: 68047 - protein, 10 aa, Homo Sapiens
HLQRNINENF

SEQ ID NO: 68048 - protein, 10 aa, Homo Sapiens
HLTAITVDVW

SEQ ID NO: 68049 - protein, 10 aa, Homo Sapiens
HLVEMDTDQL

SEQ ID NO: 68050 - protein, 10 aa, Homo Sapiens
HLVKPFADTL

SEQ ID NO: 68051 - protein, 10 aa, Homo Sapiens
HLVSEGVLLF

SEQ ID NO: 68052 - protein, 10 aa, Homo Sapiens
HLWDEDFVQW

SEQ ID NO: 68053 - protein, 10 aa, Homo Sapiens
HLWTGEEQLW

SEQ ID NO: 68054 - protein, 10 aa, Homo Sapiens
HLYEEKFESI

SEQ ID NO: 68055 - protein, 10 aa, Homo Sapiens
HLYRDGEGRI

SEQ ID NO: 68056 - protein, 10 aa, Homo Sapiens
HMISDGFLTI

SEQ ID NO: 68057 - protein, 10 aa, Homo Sapiens
HMVSDEYEQL

SEQ ID NO: 68058 - protein, 10 aa, Homo Sapiens
HQAGISDTLW

SEQ ID NO: 68059 - protein, 10 aa, Homo Sapiens
HQARIEIESF

SEQ ID NO: 68060 - protein, 10 aa, Homo Sapiens
HQASHQPLYL

SEQ ID NO: 68061 - protein, 10 aa, Homo Sapiens
HQDPGQPLYI

SEQ ID NO: 68062 - protein, 10 aa, Homo Sapiens
HQDSRAHLLL

SEQ ID NO: 68063 - protein, 10 aa, Homo Sapiens
HQEGNKNVGL

SEQ ID NO: 68064 - protein, 10 aa, Homo Sapiens
HQEQANNDFF

SEQ ID NO: 68065 - protein, 10 aa, Homo Sapiens
HQFGTDKDVF

SEQ ID NO: 68066 - protein, 10 aa, Homo Sapiens
HQFQNSADSL

SEQ ID NO: 68067 - protein, 10 aa, Homo Sapiens
HQHEPFLDFL

SEQ ID NO: 68068 - protein, 10 aa, Homo Sapiens
HQIGSGKCEI

SEQ ID NO: 68069 - protein, 10 aa, Homo Sapiens
HQISSGLEAM

SEQ ID NO: 68070 - protein, 10 aa, Homo Sapiens
HQLEDLEATF

SEQ ID NO: 68071 - protein, 10 aa, Homo Sapiens
HQLFLEPEVL

SEQ ID NO: 68072 - protein, 10 aa, Homo Sapiens
HQLPSEHQTI

SEQ ID NO: 68073 - protein, 10 aa, Homo Sapiens
HQMDNAQDLL

SEQ ID NO: 68074 - protein, 10 aa, Homo Sapiens
HQNDDAEVSL

SEQ ID NO: 68075 - protein, 10 aa, Homo Sapiens
HQQLEDLCSW

SEQ ID NO: 68076 - protein, 10 aa, Homo Sapiens
HQQNALFQYF

SEQ ID NO: 68077 - protein, 10 aa, Homo Sapiens
HQSGIVQLLW

SEQ ID NO: 68078 - protein, 10 aa, Homo Sapiens
HQSKLTNEDF

SEQ ID NO: 68079 - protein, 10 aa, Homo Sapiens
HQTEGDGDVL

SEQ ID NO: 68080 - protein, 10 aa, Homo Sapiens
HQTQDSQVYW

SEQ ID NO: 68081 - protein, 10 aa, Homo Sapiens
HQVDYILETW

SEQ ID NO: 68082 - protein, 10 aa, Homo Sapiens
HQVKDLLDLI

SEQ ID NO: 68083 - protein, 10 aa, Homo Sapiens
HQVNSDLLGW

SEQ ID NO: 68084 - protein, 10 aa, Homo Sapiens
HQVVEDGYEF

SEQ ID NO: 68085 - protein, 10 aa, Homo Sapiens
HVDGQTHMLF

SEQ ID NO: 68086 - protein, 10 aa, Homo Sapiens
IIDGNPETFW

SEQ ID NO: 68087 - protein, 10 aa, Homo Sapiens
IIDPGDSDII

SEQ ID NO: 68088 - protein, 10 aa, Homo Sapiens
IIDTPGHESF

SEQ ID NO: 68089 - protein, 10 aa, Homo Sapiens
ILDESDHITM

SEQ ID NO: 68090 - protein, 10 aa, Homo Sapiens
ILEDLDLDKF

SEQ ID NO: 68091 - protein, 10 aa, Homo Sapiens
ILIDENDNKI

SEQ ID NO: 68092 - protein, 10 aa, Homo Sapiens
ILIGDPTVRW

SEQ ID NO: 68093 - protein, 10 aa, Homo Sapiens
ILMKDLADEL

SEQ ID NO: 68094 - protein, 10 aa, Homo Sapiens
ILNMEDDQNW

SEQ ID NO: 68095 - protein, 10 aa, Homo Sapiens
ILNSLYNENL

SEQ ID NO: 68096 - protein, 10 aa, Homo Sapiens
ILYDDKGACL

SEQ ID NO: 68097 - protein, 10 aa, Homo Sapiens
IMVAPDKDYF

SEQ ID NO: 68098 - protein, 10 aa, Homo Sapiens
IPAAIIFDIL

SEQ ID NO: 68099 - protein, 10 aa, Homo Sapiens
IPSQPFLTAL

SEQ ID NO: 68100 - protein, 10 aa, Homo Sapiens
IQAGQCGNQI

SEQ ID NO: 68101 - protein, 10 aa, Homo Sapiens
IQDAQDKLYL

SEQ ID NO: 68102 - protein, 10 aa, Homo Sapiens
IQDGKGDVTI

SEQ ID NO: 68103 - protein, 10 aa, Homo Sapiens
IQDKGSIQKF

SEQ ID NO: 68104 - protein, 10 aa, Homo Sapiens
IQDQGGWVRL

SEQ ID NO: 68105 - protein, 10 aa, Homo Sapiens
IQDSTEDHTW

SEQ ID NO: 68106 - protein, 10 aa, Homo Sapiens
IQENTQTPTV

SEQ ID NO: 68107 - protein, 10 aa, Homo Sapiens
IQFADDMQEF

SEQ ID NO: 68108 - protein, 10 aa, Homo Sapiens
IQIGCHTDDL

SEQ ID NO: 68109 - protein, 10 aa, Homo Sapiens
IQINQEEERL

SEQ ID NO: 68110 - protein, 10 aa, Homo Sapiens
IQQRGGEERL

SEQ ID NO: 68111 - protein, 10 aa, Homo Sapiens
IQSISLLDQL

SEQ ID NO: 68112 - protein, 10 aa, Homo Sapiens
IQTVPNLDWL

SEQ ID NO: 68113 - protein, 10 aa, Homo Sapiens
IQVEPVLDYL

SEQ ID NO: 68114 - protein, 10 aa, Homo Sapiens
IVAPDADARW

SEQ ID NO: 68115 - protein, 10 aa, Homo Sapiens
IVDGHSVEEL

SEQ ID NO: 68116 - protein, 10 aa, Homo Sapiens
IVIGDEHISF

SEQ ID NO: 68117 - protein, 10 aa, Homo Sapiens
KEAADIIQKL

SEQ ID NO: 68118 - protein, 10 aa, Homo Sapiens
KIAHVFLDLT

SEQ ID NO: 68119 - protein, 10 aa, Homo Sapiens
KIAKENLDVF

SEQ ID NO: 68120 - protein, 10 aa, Homo Sapiens
KIDGLLIDQI

SEQ ID NO: 68121 - protein, 10 aa, Homo Sapiens
KIDPSTLQMW

SEQ ID NO: 68122 - protein, 10 aa, Homo Sapiens
KIEDIDNEDW

SEQ ID NO: 68123 - protein, 10 aa, Homo Sapiens
KIIDETMAQL

SEQ ID NO: 68124 - protein, 10 aa, Homo Sapiens
KIIEDLGVHF

SEQ ID NO: 68125 - protein, 10 aa, Homo Sapiens
KIIGINGDFF

SEQ ID NO: 68126 - protein, 10 aa, Homo Sapiens
KIQQGALELL

SEQ ID NO: 68127 - protein, 10 aa, Homo Sapiens
KIVEIINEEL

SEQ ID NO: 68128 - protein, 10 aa, Homo Sapiens
KLADIQIEQL

SEQ ID NO: 68129 - protein, 10 aa, Homo Sapiens
KLAEAERVGL

SEQ ID NO: 68130 - protein, 10 aa, Homo Sapiens
KLAELKQECL

SEQ ID NO: 68131 - protein, 10 aa, Homo Sapiens
KLANVFFDTF

SEQ ID NO: 68132 - protein, 10 aa, Homo Sapiens
KLAQENMDLF

SEQ ID NO: 68133 - protein, 10 aa, Homo Sapiens
KLAQTYMDKL

SEQ ID NO: 68134 - protein, 10 aa, Homo Sapiens
KLASSELERL

SEQ ID NO: 68135 - protein, 10 aa, Homo Sapiens
KLCEGFNEVL

SEQ ID NO: 68136 - protein, 10 aa, Homo Sapiens
KLCRPSKDYL

SEQ ID NO: 68137 - protein, 10 aa, Homo Sapiens
KLDDTSLEFL

SEQ ID NO: 68138 - protein, 10 aa, Homo Sapiens
KLDPSIFESL

SEQ ID NO: 68139 - protein, 10 aa, Homo Sapiens
KLDQPFIDCI

SEQ ID NO: 68140 - protein, 10 aa, Homo Sapiens
KLDSGKELHI

SEQ ID NO: 68141 - protein, 10 aa, Homo Sapiens
KLDSGKELKI

SEQ ID NO: 68142 - protein, 10 aa, Homo Sapiens
KLEDIFQQEF

SEQ ID NO: 68143 - protein, 10 aa, Homo Sapiens
KLEDPHVDII

SEQ ID NO: 68144 - protein, 10 aa, Homo Sapiens
KLEEIDWVTF

SEQ ID NO: 68145 - protein, 10 aa, Homo Sapiens
KLEKNLSDRL

SEQ ID NO: 68146 - protein, 10 aa, Homo Sapiens
KLENGEIETI

SEQ ID NO: 68147 - protein, 10 aa, Homo Sapiens
KLFADAVQEL

SEQ ID NO: 68148 - protein, 10 aa, Homo Sapiens
KLFDDCTQQF

SEQ ID NO: 68149 - protein, 10 aa, Homo Sapiens
KLFEDGKTGF

SEQ ID NO: 68150 - protein, 10 aa, Homo Sapiens
KLFEGENEHL

SEQ ID NO: 68151 - protein, 10 aa, Homo Sapiens
KLFGEKSASF

SEQ ID NO: 68152 - protein, 10 aa, Homo Sapiens
KLFSEKRVEL

SEQ ID NO: 68153 - protein, 10 aa, Homo Sapiens
KLFTSEEEHL

SEQ ID NO: 68154 - protein, 10 aa, Homo Sapiens
KLIDDQDISI

SEQ ID NO: 68155 - protein, 10 aa, Homo Sapiens
KLIDDVHRLF

SEQ ID NO: 68156 - protein, 10 aa, Homo Sapiens
KLIDVTNIYW

SEQ ID NO: 68157 - protein, 10 aa, Homo Sapiens
KLIEESCPQL

SEQ ID NO: 68158 - protein, 10 aa, Homo Sapiens
KLIGDPNLEF

SEQ ID NO: 68159 - protein, 10 aa, Homo Sapiens
KLIGLAVDYF

SEQ ID NO: 68160 - protein, 10 aa, Homo Sapiens
KLIGRYFDEI

SEQ ID NO: 68161 - protein, 10 aa, Homo Sapiens
KLISSDGHEF

SEQ ID NO: 68162 - protein, 10 aa, Homo Sapiens
KLLDEKTSKL

SEQ ID NO: 68163 - protein, 10 aa, Homo Sapiens
KLLDLENENM

SEQ ID NO: 68164 - protein, 10 aa, Homo Sapiens
KLLDTMVDTF

SEQ ID NO: 68165 - protein, 10 aa, Homo Sapiens
KLLEDRIAEF

SEQ ID NO: 68166 - protein, 10 aa, Homo Sapiens
KLLEENVSAF

SEQ ID NO: 68167 - protein, 10 aa, Homo Sapiens
KLLEEQGIFL

SEQ ID NO: 68168 - protein, 10 aa, Homo Sapiens
KLLEGEEERL

SEQ ID NO: 68169 - protein, 10 aa, Homo Sapiens
KLLEGEESRI

SEQ ID NO: 68170 - protein, 10 aa, Homo Sapiens
KLLNTVGDLL

SEQ ID NO: 68171 - protein, 10 aa, Homo Sapiens
KLLPGIEVLW

SEQ ID NO: 68172 - protein, 10 aa, Homo Sapiens
KLLQEQDQEL

SEQ ID NO: 68173 - protein, 10 aa, Homo Sapiens
KLLRDDEAHL

SEQ ID NO: 68174 - protein, 10 aa, Homo Sapiens
KLLSQDFVQI

SEQ ID NO: 68175 - protein, 10 aa, Homo Sapiens
KLLTEKDAQI

SEQ ID NO: 68176 - protein, 10 aa, Homo Sapiens
KLMDLDVEQL

SEQ ID NO: 68177 - protein, 10 aa, Homo Sapiens
KLMKEDGTTL

SEQ ID NO: 68178 - protein, 10 aa, Homo Sapiens
KLMPNFSDSF

SEQ ID NO: 68179 - protein, 10 aa, Homo Sapiens
KLNTLETEEW

SEQ ID NO: 68180 - protein, 10 aa, Homo Sapiens
KLPEFYDETL

SEQ ID NO: 68181 - protein, 10 aa, Homo Sapiens
KLPSGEDYNL

SEQ ID NO: 68182 - protein, 10 aa, Homo Sapiens
KLPVHTEISW

SEQ ID NO: 68183 - protein, 10 aa, Homo Sapiens
KLSEELLDKW

SEQ ID NO: 68184 - protein, 10 aa, Homo Sapiens
KLTTAFEEVW

SEQ ID NO: 68185 - protein, 10 aa, Homo Sapiens
KLVNIRNDDI

SEQ ID NO: 68186 - protein, 10 aa, Homo Sapiens
KLVSIEKEKI

SEQ ID NO: 68187 - protein, 10 aa, Homo Sapiens
KLVYQIFDTF

SEQ ID NO: 68188 - protein, 10 aa, Homo Sapiens
KLWEMDNMLI

SEQ ID NO: 68189 - protein, 10 aa, Homo Sapiens
KLWNEVTTSF

SEQ ID NO: 68190 - protein, 10 aa, Homo Sapiens
KLYANMFERL

SEQ ID NO: 68191 - protein, 10 aa, Homo Sapiens
KLYEEINQVF

SEQ ID NO: 68192 - protein, 10 aa, Homo Sapiens
KLYENLGEYF

SEQ ID NO: 68193 - protein, 10 aa, Homo Sapiens
KLYSSEQLLI

SEQ ID NO: 68194 - protein, 10 aa, Homo Sapiens
KMDPSCTVGF

SEQ ID NO: 68195 - protein, 10 aa, Homo Sapiens
KMEDTDFVGW

SEQ ID NO: 68196 - protein, 10 aa, Homo Sapiens
KMIEDLQNEL

SEQ ID NO: 68197 - protein, 10 aa, Homo Sapiens
KMPSGEFARI

SEQ ID NO: 68198 - protein, 10 aa, Homo Sapiens
KMTQIMFETF

SEQ ID NO: 68199 - protein, 10 aa, Homo Sapiens
KMVDERTDYL

SEQ ID NO: 68200 - protein, 10 aa, Homo Sapiens
KMVKDLVASL

SEQ ID NO: 68201 - protein, 10 aa, Homo Sapiens
KQADEEFQIL

SEQ ID NO: 68202 - protein, 10 aa, Homo Sapiens
KQAEEKGVVL

SEQ ID NO: 68203 - protein, 10 aa, Homo Sapiens
KQAFGEKITM

SEQ ID NO: 68204 - protein, 10 aa, Homo Sapiens
KQAPPQKVSF

SEQ ID NO: 68205 - protein, 10 aa, Homo Sapiens
KQDALDYITW

SEQ ID NO: 68206 - protein, 10 aa, Homo Sapiens
KQDAVDYLTW

SEQ ID NO: 68207 - protein, 10 aa, Homo Sapiens
KQDPNYLATM

SEQ ID NO: 68208 - protein, 10 aa, Homo Sapiens
KQDSLKCDSL

SEQ ID NO: 68209 - protein, 10 aa, Homo Sapiens
KQDSLVILTI

SEQ ID NO: 68210 - protein, 10 aa, Homo Sapiens
KQFAPEYEKI

SEQ ID NO: 68211 - protein, 10 aa, Homo Sapiens
KQFDDVLIYL

SEQ ID NO: 68212 - protein, 10 aa, Homo Sapiens
KQFEGLADKL

SEQ ID NO: 68213 - protein, 10 aa, Homo Sapiens
KQFEPNDFYL

SEQ ID NO: 68214 - protein, 10 aa, Homo Sapiens
KQFGIDGESF

SEQ ID NO: 68215 - protein, 10 aa, Homo Sapiens
KQFHDSKIKF

SEQ ID NO: 68216 - protein, 10 aa, Homo Sapiens
KQFLSETEKM

SEQ ID NO: 68217 - protein, 10 aa, Homo Sapiens
KQFRTEMEDL

SEQ ID NO: 68218 - protein, 10 aa, Homo Sapiens
KQIEDQMTRL

SEQ ID NO: 68219 - protein, 10 aa, Homo Sapiens
KQIESDRQNL

SEQ ID NO: 68220 - protein, 10 aa, Homo Sapiens
KQIESLNDKL

SEQ ID NO: 68221 - protein, 10 aa, Homo Sapiens
KQIGVSVDTW

SEQ ID NO: 68222 - protein, 10 aa, Homo Sapiens
KQIKDDNQEI

SEQ ID NO: 68223 - protein, 10 aa, Homo Sapiens
KQILDGVHYL

SEQ ID NO: 68224 - protein, 10 aa, Homo Sapiens
KQILEGVYYL

SEQ ID NO: 68225 - protein, 10 aa, Homo Sapiens
KQIQEKQGQL

SEQ ID NO: 68226 - protein, 10 aa, Homo Sapiens
KQISKILEEF

SEQ ID NO: 68227 - protein, 10 aa, Homo Sapiens
KQISQAYEVL

SEQ ID NO: 68228 - protein, 10 aa, Homo Sapiens
KQITEDTVEF

SEQ ID NO: 68229 - protein, 10 aa, Homo Sapiens
KQITEENFQL

SEQ ID NO: 68230 - protein, 10 aa, Homo Sapiens
KQLAEEETKI

SEQ ID NO: 68231 - protein, 10 aa, Homo Sapiens
KQLDDLKVEL

SEQ ID NO: 68232 - protein, 10 aa, Homo Sapiens
KQLEAINDKL

SEQ ID NO: 68233 - protein, 10 aa, Homo Sapiens
KQLEEQNARL

SEQ ID NO: 68234 - protein, 10 aa, Homo Sapiens
KQLEIAHEKL

SEQ ID NO: 68235 - protein, 10 aa, Homo Sapiens
KQLEKDFSSM

SEQ ID NO: 68236 - protein, 10 aa, Homo Sapiens
KQLKEAQGKI

SEQ ID NO: 68237 - protein, 10 aa, Homo Sapiens
KQLLPVCDTW

SEQ ID NO: 68238 - protein, 10 aa, Homo Sapiens
KQLSGEEVSW

SEQ ID NO: 68239 - protein, 10 aa, Homo Sapiens
KQLSLKVDEL

SEQ ID NO: 68240 - protein, 10 aa, Homo Sapiens
KQMEDGHTLF

SEQ ID NO: 68241 - protein, 10 aa, Homo Sapiens
KQMEQISQFL

SEQ ID NO: 68242 - protein, 10 aa, Homo Sapiens
KQMKSEVATL

SEQ ID NO: 68243 - protein, 10 aa, Homo Sapiens
KQMLPLNTNI

SEQ ID NO: 68244 - protein, 10 aa, Homo Sapiens
KQMPDVNVSW

SEQ ID NO: 68245 - protein, 10 aa, Homo Sapiens
KQMQSDPHKL

SEQ ID NO: 68246 - protein, 10 aa, Homo Sapiens
KQMVEDYQWL

SEQ ID NO: 68247 - protein, 10 aa, Homo Sapiens
KQNAEELQDF

SEQ ID NO: 68248 - protein, 10 aa, Homo Sapiens
KQPEEVFDVL

SEQ ID NO: 68249 - protein, 10 aa, Homo Sapiens
KQQDVIYELI

SEQ ID NO: 68250 - protein, 10 aa, Homo Sapiens
KQQENVTLLL

SEQ ID NO: 68251 - protein, 10 aa, Homo Sapiens
KQTVCGFDLL

SEQ ID NO: 68252 - protein, 10 aa, Homo Sapiens
KQVDDLASVW

SEQ ID NO: 68253 - protein, 10 aa, Homo Sapiens
KQVEDDIQQL

SEQ ID NO: 68254 - protein, 10 aa, Homo Sapiens
KQVEDEKNSF

SEQ ID NO: 68255 - protein, 10 aa, Homo Sapiens
KQVMEGRVTF

SEQ ID NO: 68256 - protein, 10 aa, Homo Sapiens
KQVQADFITL

SEQ ID NO: 68257 - protein, 10 aa, Homo Sapiens
KQVQTLQDEL

SEQ ID NO: 68258 - protein, 10 aa, Homo Sapiens
KQVSDLISVL

SEQ ID NO: 68259 - protein, 10 aa, Homo Sapiens
KQVYDIAAKF

SEQ ID NO: 68260 - protein, 10 aa, Homo Sapiens
KQYEEFYVGL

SEQ ID NO: 68261 - protein, 10 aa, Homo Sapiens
KQYIISEELI

SEQ ID NO: 68262 - protein, 10 aa, Homo Sapiens
KQYKGIVDCI

SEQ ID NO: 68263 - protein, 10 aa, Homo Sapiens
KQYLSENEQW

SEQ ID NO: 68264 - protein, 10 aa, Homo Sapiens
KTDGGDPSGL

SEQ ID NO: 68265 - protein, 10 aa, Homo Sapiens
KTDPTERLTI

SEQ ID NO: 68266 - protein, 10 aa, Homo Sapiens
KTIGGGDDSF

SEQ ID NO: 68267 - protein, 10 aa, Homo Sapiens
KVFELDLVTL

SEQ ID NO: 68268 - protein, 10 aa, Homo Sapiens
KVFNGEGEQI

SEQ ID NO: 68269 - protein, 10 aa, Homo Sapiens
KVIGILQDGF

SEQ ID NO: 68270 - protein, 10 aa, Homo Sapiens
KVPQLEIVPN

SEQ ID NO: 68271 - protein, 10 aa, Homo Sapiens
LDKLSSLNKI

SEQ ID NO: 68272 - protein, 10 aa, Homo Sapiens
LLALVKPEVW

SEQ ID NO: 68273 - protein, 10 aa, Homo Sapiens
LLAPDGHLQF

SEQ ID NO: 68274 - protein, 10 aa, Homo Sapiens
LLAPSDVAGW

SEQ ID NO: 68275 - protein, 10 aa, Homo Sapiens
LLDCGWDEHF

SEQ ID NO: 68276 - protein, 10 aa, Homo Sapiens
LLDPDVVARF

SEQ ID NO: 68277 - protein, 10 aa, Homo Sapiens
LLDPEANECW

SEQ ID NO: 68278 - protein, 10 aa, Homo Sapiens
LLDSRSYETL

SEQ ID NO: 68279 - protein, 10 aa, Homo Sapiens
LLFEADTITL

SEQ ID NO: 68280 - protein, 10 aa, Homo Sapiens
LLFEGEKITI

SEQ ID NO: 68281 - protein, 10 aa, Homo Sapiens
LLFHLGAEEI

SEQ ID NO: 68282 - protein, 10 aa, Homo Sapiens
LLFNSKNEDL

SEQ ID NO: 68283 - protein, 10 aa, Homo Sapiens
LLFWDKETQI

SEQ ID NO: 68284 - protein, 10 aa, Homo Sapiens
LLGRGQEAHL

SEQ ID NO: 68285 - protein, 10 aa, Homo Sapiens
LLHQDVNTAW

SEQ ID NO: 68286 - protein, 10 aa, Homo Sapiens
LLLDDSLVSI

SEQ ID NO: 68287 - protein, 10 aa, Homo Sapiens
LLNPSYLDCF

SEQ ID NO: 68288 - protein, 10 aa, Homo Sapiens
LLQETAYERL

SEQ ID NO: 68289 - protein, 10 aa, Homo Sapiens
LLQFGPTEKF

SEQ ID NO: 68290 - protein, 10 aa, Homo Sapiens
LLSDDSKFGF

SEQ ID NO: 68291 - protein, 10 aa, Homo Sapiens
LLVPALGESW

SEQ ID NO: 68292 - protein, 10 aa, Homo Sapiens
LLYDDKGVGL

SEQ ID NO: 68293 - protein, 10 aa, Homo Sapiens
LMAQHFDEVW

SEQ ID NO: 68294 - protein, 10 aa, Homo Sapiens
LQANISPEFW

SEQ ID NO: 68295 - protein, 10 aa, Homo Sapiens
LQAPLGYDKF

SEQ ID NO: 68296 - protein, 10 aa, Homo Sapiens
LQAPSVKDFL

SEQ ID NO: 68297 - protein, 10 aa, Homo Sapiens
LQDGHEREYI

SEQ ID NO: 68298 - protein, 10 aa, Homo Sapiens
LQDPNNKSNW

SEQ ID NO: 68299 - protein, 10 aa, Homo Sapiens
LQDPTNLDKF

SEQ ID NO: 68300 - protein, 10 aa, Homo Sapiens
LQFDEKCLSI

SEQ ID NO: 68301 - protein, 10 aa, Homo Sapiens
LQIDDVTIKI

SEQ ID NO: 68302 - protein, 10 aa, Homo Sapiens
LQIEDFEARI

SEQ ID NO: 68303 - protein, 10 aa, Homo Sapiens
LQINQTFEEL

SEQ ID NO: 68304 - protein, 10 aa, Homo Sapiens
LQLDKEFQLF

SEQ ID NO: 68305 - protein, 10 aa, Homo Sapiens
LQSLLVEERL

SEQ ID NO: 68306 - protein, 10 aa, Homo Sapiens
LTRHYDPSKI

SEQ ID NO: 68307 - protein, 10 aa, Homo Sapiens
MQCDAKFDFL

SEQ ID NO: 68308 - protein, 10 aa, Homo Sapiens
MQCQAQVDQL

SEQ ID NO: 68309 - protein, 10 aa, Homo Sapiens
NQGSPEICGF

SEQ ID NO: 68310 - protein, 10 aa, Homo Sapiens
QEARNIYQEF

SEQ ID NO: 68311 - protein, 10 aa, Homo Sapiens
QLFQEYDNHI

SEQ ID NO: 68312 - protein, 10 aa, Homo Sapiens
QLHAAESDEF

SEQ ID NO: 68313 - protein, 10 aa, Homo Sapiens
QLIERILEAW

SEQ ID NO: 68314 - protein, 10 aa, Homo Sapiens
QLLKDPQVLF

SEQ ID NO: 68315 - protein, 10 aa, Homo Sapiens
QLQKPDVVGI

SEQ ID NO: 68316 - protein, 10 aa, Homo Sapiens
QQADASKQLW

SEQ ID NO: 68317 - protein, 10 aa, Homo Sapiens
QQAEEGSARL

SEQ ID NO: 68318 - protein, 10 aa, Homo Sapiens
QQARNVMQSW

SEQ ID NO: 68319 - protein, 10 aa, Homo Sapiens
QQDPVIYQRL

SEQ ID NO: 68320 - protein, 10 aa, Homo Sapiens
QQFSKVIDEL

SEQ ID NO: 68321 - protein, 10 aa, Homo Sapiens
QQHQALQTNW

SEQ ID NO: 68322 - protein, 10 aa, Homo Sapiens
QQIAKDMERW

SEQ ID NO: 68323 - protein, 10 aa, Homo Sapiens
QQIEELENHL

SEQ ID NO: 68324 - protein, 10 aa, Homo Sapiens
QQIKDLEQKL

SEQ ID NO: 68325 - protein, 10 aa, Homo Sapiens
QQIQEKVATF

SEQ ID NO: 68326 - protein, 10 aa, Homo Sapiens
QQMEAEHNTL

SEQ ID NO: 68327 - protein, 10 aa, Homo Sapiens
QQNPGKFDEL

SEQ ID NO: 68328 - protein, 10 aa, Homo Sapiens
QQTALCNDYF

SEQ ID NO: 68329 - protein, 10 aa, Homo Sapiens
QRVEEELLAL

SEQ ID NO: 68330 - protein, 10 aa, Homo Sapiens
QVARPGGDTI

SEQ ID NO: 68331 - protein, 10 aa, Homo Sapiens
QVGQLAAAGI

SEQ ID NO: 68332 - protein, 10 aa, Homo Sapiens
QVVEDGYEFF

SEQ ID NO: 68333 - protein, 10 aa, Homo Sapiens
RAGDLVELLL

SEQ ID NO: 68334 - protein, 10 aa, Homo Sapiens
RAIMDKKANI

SEQ ID NO: 68335 - protein, 10 aa, Homo Sapiens
RAVDDGVNTF

SEQ ID NO: 68336 - protein, 10 aa, Homo Sapiens
REACPELDYF

SEQ ID NO: 68337 - protein, 10 aa, Homo Sapiens
REAFLVNSDL

SEQ ID NO: 68338 - protein, 10 aa, Homo Sapiens
REAGNINQSL

SEQ ID NO: 68339 - protein, 10 aa, Homo Sapiens
RESPNITDRW

SEQ ID NO: 68340 - protein, 10 aa, Homo Sapiens
RIADEDRGNW

SEQ ID NO: 68341 - protein, 10 aa, Homo Sapiens
RIAEEVNCLL

SEQ ID NO: 68342 - protein, 10 aa, Homo Sapiens
RIDPFVRTFL

SEQ ID NO: 68343 - protein, 10 aa, Homo Sapiens
RIEENTGHTF

SEQ ID NO: 68344 - protein, 10 aa, Homo Sapiens
RIESVIKELW

SEQ ID NO: 68345 - protein, 10 aa, Homo Sapiens
RIFSGGDQSF

SEQ ID NO: 68346 - protein, 10 aa, Homo Sapiens
RIHNEDNSQF

SEQ ID NO: 68347 - protein, 10 aa, Homo Sapiens
RIIDEVVNKF

SEQ ID NO: 68348 - protein, 10 aa, Homo Sapiens
RIIEAEESRM

SEQ ID NO: 68349 - protein, 10 aa, Homo Sapiens
RIIKDVVLQW

SEQ ID NO: 68350 - protein, 10 aa, Homo Sapiens
RIIKNEVKKL

SEQ ID NO: 68351 - protein, 10 aa, Homo Sapiens
RIIKVGGERF

SEQ ID NO: 68352 - protein, 10 aa, Homo Sapiens
RIINDLLQSL

SEQ ID NO: 68353 - protein, 10 aa, Homo Sapiens
RIIWQEEDTF

SEQ ID NO: 68354 - protein, 10 aa, Homo Sapiens
RIKEDVGDNW

SEQ ID NO: 68355 - protein, 10 aa, Homo Sapiens
RILAAETDRL

SEQ ID NO: 68356 - protein, 10 aa, Homo Sapiens
RILADLEDYL

SEQ ID NO: 68357 - protein, 10 aa, Homo Sapiens
RILATLEDGW

SEQ ID NO: 68358 - protein, 10 aa, Homo Sapiens
RILDLIDDAW

SEQ ID NO: 68359 - protein, 10 aa, Homo Sapiens
RILELDQELI

SEQ ID NO: 68360 - protein, 10 aa, Homo Sapiens
RILGSDTESW

SEQ ID NO: 68361 - protein, 10 aa, Homo Sapiens
RILQDEQYLM

SEQ ID NO: 68362 - protein, 10 aa, Homo Sapiens
RIMKIDIEKF

SEQ ID NO: 68363 - protein, 10 aa, Homo Sapiens
RINEDQKVAL

SEQ ID NO: 68364 - protein, 10 aa, Homo Sapiens
RINNEDNSQF

SEQ ID NO: 68365 - protein, 10 aa, Homo Sapiens
RIQNSGAEAW

SEQ ID NO: 68366 - protein, 10 aa, Homo Sapiens
RIQQESGCKI

SEQ ID NO: 68367 - protein, 10 aa, Homo Sapiens
RISDDKYGRI

SEQ ID NO: 68368 - protein, 10 aa, Homo Sapiens
RISEDVEERL

SEQ ID NO: 68369 - protein, 10 aa, Homo Sapiens
RISKDEHQDL

SEQ ID NO: 68370 - protein, 10 aa, Homo Sapiens
RISKEEAMRW

SEQ ID NO: 68371 - protein, 10 aa, Homo Sapiens
RISPDQGQQF

SEQ ID NO: 68372 - protein, 10 aa, Homo Sapiens
RISVIQKEEF

SEQ ID NO: 68373 - protein, 10 aa, Homo Sapiens
RIVDDCGGAF

SEQ ID NO: 68374 - protein, 10 aa, Homo Sapiens
RIVDDFGTHL

SEQ ID NO: 68375 - protein, 10 aa, Homo Sapiens
RIVKESGGKL

SEQ ID NO: 68376 - protein, 10 aa, Homo Sapiens
RIVKIGDFGL

SEQ ID NO: 68377 - protein, 10 aa, Homo Sapiens
RIWGTEGDSW

SEQ ID NO: 68378 - protein, 10 aa, Homo Sapiens
RIYWDGPLAL

SEQ ID NO: 68379 - protein, 10 aa, Homo Sapiens
RLAALEEQRM

SEQ ID NO: 68380 - protein, 10 aa, Homo Sapiens
RLADDLNEKI

SEQ ID NO: 68381 - protein, 10 aa, Homo Sapiens
RLADEFGVAV

SEQ ID NO: 68382 - protein, 10 aa, Homo Sapiens
RLAEAEKSQL

SEQ ID NO: 68383 - protein, 10 aa, Homo Sapiens
RLAEDVSDQL

SEQ ID NO: 68384 - protein, 10 aa, Homo Sapiens
RLAEERHNRL

SEQ ID NO: 68385 - protein, 10 aa, Homo Sapiens
RLAEEVNDKL

SEQ ID NO: 68386 - protein, 10 aa, Homo Sapiens
RLAEFLGDQM

SEQ ID NO: 68387 - protein, 10 aa, Homo Sapiens
RLAELTVDEF

SEQ ID NO: 68388 - protein, 10 aa, Homo Sapiens
RLAKELLDSF

SEQ ID NO: 68389 - protein, 10 aa, Homo Sapiens
RLALPDYEYL

SEQ ID NO: 68390 - protein, 10 aa, Homo Sapiens
RLANIDEEML

SEQ ID NO: 68391 - protein, 10 aa, Homo Sapiens
RLAQEAASKL

SEQ ID NO: 68392 - protein, 10 aa, Homo Sapiens
RLAQEGIYTL

SEQ ID NO: 68393 - protein, 10 aa, Homo Sapiens
RLAQEGKDCL

SEQ ID NO: 68394 - protein, 10 aa, Homo Sapiens
RLAQTHRDAL

SEQ ID NO: 68395 - protein, 10 aa, Homo Sapiens
RLASLKTDTF

SEQ ID NO: 68396 - protein, 10 aa, Homo Sapiens
RLASLNAEAL

SEQ ID NO: 68397 - protein, 10 aa, Homo Sapiens
RLAVDKSASL

SEQ ID NO: 68398 - protein, 10 aa, Homo Sapiens
RLAYCQSEEL

SEQ ID NO: 68399 - protein, 10 aa, Homo Sapiens
RLAYSEPCGL

SEQ ID NO: 68400 - protein, 10 aa, Homo Sapiens
RLCHEDVEAL

SEQ ID NO: 68401 - protein, 10 aa, Homo Sapiens
RLCPTHADSL

SEQ ID NO: 68402 - protein, 10 aa, Homo Sapiens
RLDDLFLESF

SEQ ID NO: 68403 - protein, 10 aa, Homo Sapiens
RLDDSSFLGL

SEQ ID NO: 68404 - protein, 10 aa, Homo Sapiens
RLDDSVFEGL

SEQ ID NO: 68405 - protein, 10 aa, Homo Sapiens
RLDDTVHVVI

SEQ ID NO: 68406 - protein, 10 aa, Homo Sapiens
RLDGGTDITF

SEQ ID NO: 68407 - protein, 10 aa, Homo Sapiens
RLDGHTISDL

SEQ ID NO: 68408 - protein, 10 aa, Homo Sapiens
RLDQEHSDKF

SEQ ID NO: 68409 - protein, 10 aa, Homo Sapiens
RLDQPKLDEV

SEQ ID NO: 68410 - protein, 10 aa, Homo Sapiens
RLDRTEIITF

SEQ ID NO: 68411 - protein, 10 aa, Homo Sapiens
RLDSDAVNTI

SEQ ID NO: 68412 - protein, 10 aa, Homo Sapiens
RLDSIVGPQL

SEQ ID NO: 68413 - protein, 10 aa, Homo Sapiens
RLDSVACDVL

SEQ ID NO: 68414 - protein, 10 aa, Homo Sapiens
RLEASETESF

SEQ ID NO: 68415 - protein, 10 aa, Homo Sapiens
RLEASSSQSF

SEQ ID NO: 68416 - protein, 10 aa, Homo Sapiens
RLEDTKNNNL

SEQ ID NO: 68417 - protein, 10 aa, Homo Sapiens
RLEEGHRQYL

SEQ ID NO: 68418 - protein, 10 aa, Homo Sapiens
RLEFPSGETI

SEQ ID NO: 68419 - protein, 10 aa, Homo Sapiens
RLEGREFEFL

SEQ ID NO: 68420 - protein, 10 aa, Homo Sapiens
RLEKGVDVKF

SEQ ID NO: 68421 - protein, 10 aa, Homo Sapiens
RLEKNVKEVL

SEQ ID NO: 68422 - protein, 10 aa, Homo Sapiens
RLENDGATAL

SEQ ID NO: 68423 - protein, 10 aa, Homo Sapiens
RLEQEEQQRL

SEQ ID NO: 68424 - protein, 10 aa, Homo Sapiens
RLEQGYELQF

SEQ ID NO: 68425 - protein, 10 aa, Homo Sapiens
RLEQIKKTEL

SEQ ID NO: 68426 - protein, 10 aa, Homo Sapiens
RLERSIRDEI

SEQ ID NO: 68427 - protein, 10 aa, Homo Sapiens
RLESFLHDSW

SEQ ID NO: 68428 - protein, 10 aa, Homo Sapiens
RLFDANKDRF

SEQ ID NO: 68429 - protein, 10 aa, Homo Sapiens
RLFEDTFVNF

SEQ ID NO: 68430 - protein, 10 aa, Homo Sapiens
RLFELAKDYM

SEQ ID NO: 68431 - protein, 10 aa, Homo Sapiens
RLFGDVEASL

SEQ ID NO: 68432 - protein, 10 aa, Homo Sapiens
RLFGGDMEKF

SEQ ID NO: 68433 - protein, 10 aa, Homo Sapiens
RLFHEDGECW

SEQ ID NO: 68434 - protein, 10 aa, Homo Sapiens
RLFIQKEEQL

SEQ ID NO: 68435 - protein, 10 aa, Homo Sapiens
RLFKEGKERM

SEQ ID NO: 68436 - protein, 10 aa, Homo Sapiens
RLFKIDKEYL

SEQ ID NO: 68437 - protein, 10 aa, Homo Sapiens
RLFKNDPLFF

SEQ ID NO: 68438 - protein, 10 aa, Homo Sapiens
RLFNDPVAMV

SEQ ID NO: 68439 - protein, 10 aa, Homo Sapiens
RLFPGLAIKI

SEQ ID NO: 68440 - protein, 10 aa, Homo Sapiens
RLFSEIQTTL

SEQ ID NO: 68441 - protein, 10 aa, Homo Sapiens
RLFSKSIETL

SEQ ID NO: 68442 - protein, 10 aa, Homo Sapiens
RLFTSAEETF

SEQ ID NO: 68443 - protein, 10 aa, Homo Sapiens
RLFYFSNEKY

SEQ ID NO: 68444 - protein, 10 aa, Homo Sapiens
RLGGTKQDYL

SEQ ID NO: 68445 - protein, 10 aa, Homo Sapiens
RLGKNGADEI

SEQ ID NO: 68446 - protein, 10 aa, Homo Sapiens
RLHNVFNDFL

SEQ ID NO: 68447 - protein, 10 aa, Homo Sapiens
RLHQEERMKL

SEQ ID NO: 68448 - protein, 10 aa, Homo Sapiens
RLHSLDRVYF

SEQ ID NO: 68449 - protein, 10 aa, Homo Sapiens
RLHVCEVDSL

SEQ ID NO: 68450 - protein, 10 aa, Homo Sapiens
RLHVTALDYL

SEQ ID NO: 68451 - protein, 10 aa, Homo Sapiens
RLHWIDREKL

SEQ ID NO: 68452 - protein, 10 aa, Homo Sapiens
RLIAEKRSLF

SEQ ID NO: 68453 - protein, 10 aa, Homo Sapiens
RLIDHDPCLF

SEQ ID NO: 68454 - protein, 10 aa, Homo Sapiens
RLIEVTEEEL

SEQ ID NO: 68455 - protein, 10 aa, Homo Sapiens
RLIKEELIRL

SEQ ID NO: 68456 - protein, 10 aa, Homo Sapiens
RLIKEKEEAF

SEQ ID NO: 68457 - protein, 10 aa, Homo Sapiens
RLINLVGESL

SEQ ID NO: 68458 - protein, 10 aa, Homo Sapiens
RLIRDLHQHL

SEQ ID NO: 68459 - protein, 10 aa, Homo Sapiens
RLISQIVSSI

SEQ ID NO: 68460 - protein, 10 aa, Homo Sapiens
RLIYDTKGRF

SEQ ID NO: 68461 - protein, 10 aa, Homo Sapiens
RLKEAEEERL

SEQ ID NO: 68462 - protein, 10 aa, Homo Sapiens
RLKEEGNEQF

SEQ ID NO: 68463 - protein, 10 aa, Homo Sapiens
RLKEIKEELL

SEQ ID NO: 68464 - protein, 10 aa, Homo Sapiens
RLLAEEEQQL

SEQ ID NO: 68465 - protein, 10 aa, Homo Sapiens
RLLAETHYQL

SEQ ID NO: 68466 - protein, 10 aa, Homo Sapiens
RLLDKESSKW

SEQ ID NO: 68467 - protein, 10 aa, Homo Sapiens
RLLDLENSLL

SEQ ID NO: 68468 - protein, 10 aa, Homo Sapiens
RLLEEEGVSL

SEQ ID NO: 68469 - protein, 10 aa, Homo Sapiens
RLLEEEIIAF

SEQ ID NO: 68470 - protein, 10 aa, Homo Sapiens
RLLGEASSNW

SEQ ID NO: 68471 - protein, 10 aa, Homo Sapiens
RLLKDYEDKI

SEQ ID NO: 68472 - protein, 10 aa, Homo Sapiens
RLLLAGYDDF

SEQ ID NO: 68473 - protein, 10 aa, Homo Sapiens
RLLLPVAEYF

SEQ ID NO: 68474 - protein, 10 aa, Homo Sapiens
RLLNNAFEEL

SEQ ID NO: 68475 - protein, 10 aa, Homo Sapiens
RLLPGLVETF

SEQ ID NO: 68476 - protein, 10 aa, Homo Sapiens
RLLPSELTLW

SEQ ID NO: 68477 - protein, 10 aa, Homo Sapiens
RLLQDHPWLL

SEQ ID NO: 68478 - protein, 10 aa, Homo Sapiens
RLLQEKVNQL

SEQ ID NO: 68479 - protein, 10 aa, Homo Sapiens
RLLSLVKEEF

SEQ ID NO: 68480 - protein, 10 aa, Homo Sapiens
RLLSVEHEDF

SEQ ID NO: 68481 - protein, 10 aa, Homo Sapiens
RLLSVGGEAF

SEQ ID NO: 68482 - protein, 10 aa, Homo Sapiens
RLLTEISSSW

SEQ ID NO: 68483 - protein, 10 aa, Homo Sapiens
RLLYPPETGL

SEQ ID NO: 68484 - protein, 10 aa, Homo Sapiens
RLMEIYQEKL

SEQ ID NO: 68485 - protein, 10 aa, Homo Sapiens
RLMGSVKDHL

SEQ ID NO: 68486 - protein, 10 aa, Homo Sapiens
RLMIVKKEKL

SEQ ID NO: 68487 - protein, 10 aa, Homo Sapiens
RLMKELNQKL

SEQ ID NO: 68488 - protein, 10 aa, Homo Sapiens
RLMMDPLTGL

SEQ ID NO: 68489 - protein, 10 aa, Homo Sapiens
RLMQEVNRQL

SEQ ID NO: 68490 - protein, 10 aa, Homo Sapiens
RLMQGDEICL

SEQ ID NO: 68491 - protein, 10 aa, Homo Sapiens
RLMQKKETNL

SEQ ID NO: 68492 - protein, 10 aa, Homo Sapiens
RLMVPVTVVF

SEQ ID NO: 68493 - protein, 10 aa, Homo Sapiens
RLNEKNYELL

SEQ ID NO: 68494 - protein, 10 aa, Homo Sapiens
RLNHEGKIVL

SEQ ID NO: 68495 - protein, 10 aa, Homo Sapiens
RLNKDRCVRL

SEQ ID NO: 68496 - protein, 10 aa, Homo Sapiens
RLNLVECDYF

SEQ ID NO: 68497 - protein, 10 aa, Homo Sapiens
RLNQSQREEL

SEQ ID NO: 68498 - protein, 10 aa, Homo Sapiens
RLNRQLEEKI

SEQ ID NO: 68499 - protein, 10 aa, Homo Sapiens
RLNSELQQQL

SEQ ID NO: 68500 - protein, 10 aa, Homo Sapiens
RLPAEDEVLL

SEQ ID NO: 68501 - protein, 10 aa, Homo Sapiens
RLPDAAEPCL

SEQ ID NO: 68502 - protein, 10 aa, Homo Sapiens
RLPDEKVELF

SEQ ID NO: 68503 - protein, 10 aa, Homo Sapiens
RLPDLIKEVL

SEQ ID NO: 68504 - protein, 10 aa, Homo Sapiens
RLPEEEFGHF

SEQ ID NO: 68505 - protein, 10 aa, Homo Sapiens
RLPEEEHEFF

SEQ ID NO: 68506 - protein, 10 aa, Homo Sapiens
RLPEEVVDFL

SEQ ID NO: 68507 - protein, 10 aa, Homo Sapiens
RLPGGNEIGM

SEQ ID NO: 68508 - protein, 10 aa, Homo Sapiens
RLPGGPTLTF

SEQ ID NO: 68509 - protein, 10 aa, Homo Sapiens
RLPGYAEVLL

SEQ ID NO: 68510 - protein, 10 aa, Homo Sapiens
RLPHSGEAQL

SEQ ID NO: 68511 - protein, 10 aa, Homo Sapiens
RLPKILEDGL

SEQ ID NO: 68512 - protein, 10 aa, Homo Sapiens
RLPTEEEWEF

SEQ ID NO: 68513 - protein, 10 aa, Homo Sapiens
RLQAKKEEII

SEQ ID NO: 68514 - protein, 10 aa, Homo Sapiens
RLQDLGMELL

SEQ ID NO: 68515 - protein, 10 aa, Homo Sapiens
RLQEEFEATL

SEQ ID NO: 68516 - protein, 10 aa, Homo Sapiens
RLQEEKLCKI

SEQ ID NO: 68517 - protein, 10 aa, Homo Sapiens
RLQEETGAKI

SEQ ID NO: 68518 - protein, 10 aa, Homo Sapiens
RLQEPKKDLI

SEQ ID NO: 68519 - protein, 10 aa, Homo Sapiens
RLQQEVEEQL

SEQ ID NO: 68520 - protein, 10 aa, Homo Sapiens
RLSAEERDQL

SEQ ID NO: 68521 - protein, 10 aa, Homo Sapiens
RLSESDYEKL

SEQ ID NO: 68522 - protein, 10 aa, Homo Sapiens
RLSKEDIERM

SEQ ID NO: 68523 - protein, 10 aa, Homo Sapiens
RLSMNVGDQF

SEQ ID NO: 68524 - protein, 10 aa, Homo Sapiens
RLSPSGDSVF

SEQ ID NO: 68525 - protein, 10 aa, Homo Sapiens
RLSQALKEHL

SEQ ID NO: 68526 - protein, 10 aa, Homo Sapiens
RLSQETQQYF

SEQ ID NO: 68527 - protein, 10 aa, Homo Sapiens
RLSRTPGNRI

SEQ ID NO: 68528 - protein, 10 aa, Homo Sapiens
RLSVGTNEKI

SEQ ID NO: 68529 - protein, 10 aa, Homo Sapiens
RLTNAGYDYL

SEQ ID NO: 68530 - protein, 10 aa, Homo Sapiens
RLVAGSTDQL

SEQ ID NO: 68531 - protein, 10 aa, Homo Sapiens
RLVAVEENVW

SEQ ID NO: 68532 - protein, 10 aa, Homo Sapiens
RLVDPHIEMI

SEQ ID NO: 68533 - protein, 10 aa, Homo Sapiens
RLVDTGDKFR

SEQ ID NO: 68534 - protein, 10 aa, Homo Sapiens
RLVEDMENKI

SEQ ID NO: 68535 - protein, 10 aa, Homo Sapiens
RLVEEKVNQL

SEQ ID NO: 68536 - protein, 10 aa, Homo Sapiens
RLVESDPQGL

SEQ ID NO: 68537 - protein, 10 aa, Homo Sapiens
RLVEVNGENV

SEQ ID NO: 68538 - protein, 10 aa, Homo Sapiens
RLVKDQEALM

SEQ ID NO: 68539 - protein, 10 aa, Homo Sapiens
RLVLEVAQHL

SEQ ID NO: 68540 - protein, 10 aa, Homo Sapiens
RLVNQEIEKF

SEQ ID NO: 68541 - protein, 10 aa, Homo Sapiens
RLVPDSDVRF

SEQ ID NO: 68542 - protein, 10 aa, Homo Sapiens
RLVRDLVTGF

SEQ ID NO: 68543 - protein, 10 aa, Homo Sapiens
RLVREIAQDF

SEQ ID NO: 68544 - protein, 10 aa, Homo Sapiens
RLVRELEKKF

SEQ ID NO: 68545 - protein, 10 aa, Homo Sapiens
RLVSLIFNSF

SEQ ID NO: 68546 - protein, 10 aa, Homo Sapiens
RLWKNVYDEL

SEQ ID NO: 68547 - protein, 10 aa, Homo Sapiens
RLWNETVELF

SEQ ID NO: 68548 - protein, 10 aa, Homo Sapiens
RLWNIQTDTL

SEQ ID NO: 68549 - protein, 10 aa, Homo Sapiens
RLYHEDHPQL

SEQ ID NO: 68550 - protein, 10 aa, Homo Sapiens
RLYNKIREDF

SEQ ID NO: 68551 - protein, 10 aa, Homo Sapiens
RLYPEGLAQL

SEQ ID NO: 68552 - protein, 10 aa, Homo Sapiens
RLYYIGGEVF

SEQ ID NO: 68553 - protein, 10 aa, Homo Sapiens
RMCKPPGDRL

SEQ ID NO: 68554 - protein, 10 aa, Homo Sapiens
RMEAPKIDRI

SEQ ID NO: 68555 - protein, 10 aa, Homo Sapiens
RMESVFNQAI

SEQ ID NO: 68556 - protein, 10 aa, Homo Sapiens
RMFADDLHNL

SEQ ID NO: 68557 - protein, 10 aa, Homo Sapiens
RMFNSIAETW

SEQ ID NO: 68558 - protein, 10 aa, Homo Sapiens
RMHDEKVDLW

SEQ ID NO: 68559 - protein, 10 aa, Homo Sapiens
RMHNEKVDLW

SEQ ID NO: 68560 - protein, 10 aa, Homo Sapiens
RMIKEFRATL

SEQ ID NO: 68561 - protein, 10 aa, Homo Sapiens
RMIKQLKEEL

SEQ ID NO: 68562 - protein, 10 aa, Homo Sapiens
RMIMEGQYQF

SEQ ID NO: 68563 - protein, 10 aa, Homo Sapiens
RMKGGEKIGI

SEQ ID NO: 68564 - protein, 10 aa, Homo Sapiens
RMLDSGADYL

SEQ ID NO: 68565 - protein, 10 aa, Homo Sapiens
RMLEESNLSF

SEQ ID NO: 68566 - protein, 10 aa, Homo Sapiens
RMQVANIDKF

SEQ ID NO: 68567 - protein, 10 aa, Homo Sapiens
RMTLADDVTL

SEQ ID NO: 68568 - protein, 10 aa, Homo Sapiens
RMVDENCVGF

SEQ ID NO: 68569 - protein, 10 aa, Homo Sapiens
RMVEEIGVEL

SEQ ID NO: 68570 - protein, 10 aa, Homo Sapiens
RMVQNLLDKL

SEQ ID NO: 68571 - protein, 10 aa, Homo Sapiens
RMVSEAGTGF

SEQ ID NO: 68572 - protein, 10 aa, Homo Sapiens
RMYDERAQEW

SEQ ID NO: 68573 - protein, 10 aa, Homo Sapiens
RQAADFAEQF

SEQ ID NO: 68574 - protein, 10 aa, Homo Sapiens
RQADCHINNL

SEQ ID NO: 68575 - protein, 10 aa, Homo Sapiens
RQADFEAHNI

SEQ ID NO: 68576 - protein, 10 aa, Homo Sapiens
RQAEELFHNL

SEQ ID NO: 68577 - protein, 10 aa, Homo Sapiens
RQAEEQIEHL

SEQ ID NO: 68578 - protein, 10 aa, Homo Sapiens
RQAFPNTNRW

SEQ ID NO: 68579 - protein, 10 aa, Homo Sapiens
RQAHLTNQYM

SEQ ID NO: 68580 - protein, 10 aa, Homo Sapiens
RQAIEELYYF

SEQ ID NO: 68581 - protein, 10 aa, Homo Sapiens
RQAKLDYQRL

SEQ ID NO: 68582 - protein, 10 aa, Homo Sapiens
RQALETAVNL

SEQ ID NO: 68583 - protein, 10 aa, Homo Sapiens
RQANEEYQIL

SEQ ID NO: 68584 - protein, 10 aa, Homo Sapiens
RQAQQERDEL

SEQ ID NO: 68585 - protein, 10 aa, Homo Sapiens
RQAQTDRVSL

SEQ ID NO: 68586 - protein, 10 aa, Homo Sapiens
RQATSTASTF

SEQ ID NO: 68587 - protein, 10 aa, Homo Sapiens
RQAVQILDEL

SEQ ID NO: 68588 - protein, 10 aa, Homo Sapiens
RQAWLGEEVL

SEQ ID NO: 68589 - protein, 10 aa, Homo Sapiens
RQCLHEVHQI

SEQ ID NO: 68590 - protein, 10 aa, Homo Sapiens
RQCPLALDAI

SEQ ID NO: 68591 - protein, 10 aa, Homo Sapiens
RQCQPQVQAF

SEQ ID NO: 68592 - protein, 10 aa, Homo Sapiens
RQCVEKEERF

SEQ ID NO: 68593 - protein, 10 aa, Homo Sapiens
RQDAGGILHI

SEQ ID NO: 68594 - protein, 10 aa, Homo Sapiens
RQDAVMQQVF

SEQ ID NO: 68595 - protein, 10 aa, Homo Sapiens
RQDCVKEIGL

SEQ ID NO: 68596 - protein, 10 aa, Homo Sapiens
RQDDPSYRSF

SEQ ID NO: 68597 - protein, 10 aa, Homo Sapiens
RQDEKCDYYF

SEQ ID NO: 68598 - protein, 10 aa, Homo Sapiens
RQDGGQNESF

SEQ ID NO: 68599 - protein, 10 aa, Homo Sapiens
RQDINKEHLW

SEQ ID NO: 68600 - protein, 10 aa, Homo Sapiens
RQDMLTLQMI

SEQ ID NO: 68601 - protein, 10 aa, Homo Sapiens
RQDNPKLDSM

SEQ ID NO: 68602 - protein, 10 aa, Homo Sapiens
RQDQLILQII

SEQ ID NO: 68603 - protein, 10 aa, Homo Sapiens
RQDWGPITSI

SEQ ID NO: 68604 - protein, 10 aa, Homo Sapiens
RQEDAEYQAF

SEQ ID NO: 68605 - protein, 10 aa, Homo Sapiens
RQEDGIKNFF

SEQ ID NO: 68606 - protein, 10 aa, Homo Sapiens
RQEMIATQKL

SEQ ID NO: 68607 - protein, 10 aa, Homo Sapiens
RQENEQRRLF

SEQ ID NO: 68608 - protein, 10 aa, Homo Sapiens
RQERVMFDKI

SEQ ID NO: 68609 - protein, 10 aa, Homo Sapiens
RQESESVLTL

SEQ ID NO: 68610 - protein, 10 aa, Homo Sapiens
RQESGNNEVI

SEQ ID NO: 68611 - protein, 10 aa, Homo Sapiens
RQESVTKQQW

SEQ ID NO: 68612 - protein, 10 aa, Homo Sapiens
RQETEEKILL

SEQ ID NO: 68613 - protein, 10 aa, Homo Sapiens
RQFEDEKANW

SEQ ID NO: 68614 - protein, 10 aa, Homo Sapiens
RQFEEQKQKL

SEQ ID NO: 68615 - protein, 10 aa, Homo Sapiens
RQFEFSVDSF

SEQ ID NO: 68616 - protein, 10 aa, Homo Sapiens
RQFHEKTSAL

SEQ ID NO: 68617 - protein, 10 aa, Homo Sapiens
RQFKEIAAVI

SEQ ID NO: 68618 - protein, 10 aa, Homo Sapiens
RQFLRGLDFL

SEQ ID NO: 68619 - protein, 10 aa, Homo Sapiens
RQFSGARNQL

SEQ ID NO: 68620 - protein, 10 aa, Homo Sapiens
RQGEAEFNRI

SEQ ID NO: 68621 - protein, 10 aa, Homo Sapiens
RQHALLQEEL

SEQ ID NO: 68622 - protein, 10 aa, Homo Sapiens
RQHFIQEEQI

SEQ ID NO: 68623 - protein, 10 aa, Homo Sapiens
RQHLGKGHLL

SEQ ID NO: 68624 - protein, 10 aa, Homo Sapiens
RQHLQEVGLF

SEQ ID NO: 68625 - protein, 10 aa, Homo Sapiens
RQICPSLAGF

SEQ ID NO: 68626 - protein, 10 aa, Homo Sapiens
RQIDLVDNYF

SEQ ID NO: 68627 - protein, 10 aa, Homo Sapiens
RQIDQMVGLI

SEQ ID NO: 68628 - protein, 10 aa, Homo Sapiens
RQIDRENQRL

SEQ ID NO: 68629 - protein, 10 aa, Homo Sapiens
RQIEETLAHF

SEQ ID NO: 68630 - protein, 10 aa, Homo Sapiens
RQIEKDITSF

SEQ ID NO: 68631 - protein, 10 aa, Homo Sapiens
RQIGDKDQKI

SEQ ID NO: 68632 - protein, 10 aa, Homo Sapiens
RQIGEGQVSL

SEQ ID NO: 68633 - protein, 10 aa, Homo Sapiens
RQIHANHETL

SEQ ID NO: 68634 - protein, 10 aa, Homo Sapiens
RQIKEGAGVW

SEQ ID NO: 68635 - protein, 10 aa, Homo Sapiens
RQIKEQGKTI

SEQ ID NO: 68636 - protein, 10 aa, Homo Sapiens
RQILEGVHFL

SEQ ID NO: 68637 - protein, 10 aa, Homo Sapiens
RQILEGVHYL

SEQ ID NO: 68638 - protein, 10 aa, Homo Sapiens
RQILEKAGGL

SEQ ID NO: 68639 - protein, 10 aa, Homo Sapiens
RQILEKAIQL

SEQ ID NO: 68640 - protein, 10 aa, Homo Sapiens
RQINEDNERW

SEQ ID NO: 68641 - protein, 10 aa, Homo Sapiens
RQIQLIREML

SEQ ID NO: 68642 - protein, 10 aa, Homo Sapiens
RQIRSDFVTL

SEQ ID NO: 68643 - protein, 10 aa, Homo Sapiens
RQISALEDDL

SEQ ID NO: 68644 - protein, 10 aa, Homo Sapiens
RQISQDFSEL

SEQ ID NO: 68645 - protein, 10 aa, Homo Sapiens
RQISSAMEQL

SEQ ID NO: 68646 - protein, 10 aa, Homo Sapiens
RQIYGPECTF

SEQ ID NO: 68647 - protein, 10 aa, Homo Sapiens
RQIYIYNEKI

SEQ ID NO: 68648 - protein, 10 aa, Homo Sapiens
RQKEEEDLKL

SEQ ID NO: 68649 - protein, 10 aa, Homo Sapiens
RQLAQHDEDL

SEQ ID NO: 68650 - protein, 10 aa, Homo Sapiens
RQLDETNALL

SEQ ID NO: 68651 - protein, 10 aa, Homo Sapiens
RQLDVSSNEL

SEQ ID NO: 68652 - protein, 10 aa, Homo Sapiens
RQLEDPNGSF

SEQ ID NO: 68653 - protein, 10 aa, Homo Sapiens
RQLEEEGITF

SEQ ID NO: 68654 - protein, 10 aa, Homo Sapiens
RQLEEKDRVL

SEQ ID NO: 68655 - protein, 10 aa, Homo Sapiens
RQLEEKKAEL

SEQ ID NO: 68656 - protein, 10 aa, Homo Sapiens
RQLEESASHL

SEQ ID NO: 68657 - protein, 10 aa, Homo Sapiens
RQLEIVGEKL

SEQ ID NO: 68658 - protein, 10 aa, Homo Sapiens
RQLENLVQEL

SEQ ID NO: 68659 - protein, 10 aa, Homo Sapiens
RQLEQELHKW

SEQ ID NO: 68660 - protein, 10 aa, Homo Sapiens
RQLESEREAL

SEQ ID NO: 68661 - protein, 10 aa, Homo Sapiens
RQLGEANEEF

SEQ ID NO: 68662 - protein, 10 aa, Homo Sapiens
RQLKIKEVTL

SEQ ID NO: 68663 - protein, 10 aa, Homo Sapiens
RQLKNIKDAF

SEQ ID NO: 68664 - protein, 10 aa, Homo Sapiens
RQLLDHMDSW

SEQ ID NO: 68665 - protein, 10 aa, Homo Sapiens
RQLLDQVEQI

SEQ ID NO: 68666 - protein, 10 aa, Homo Sapiens
RQLNEKLVQL

SEQ ID NO: 68667 - protein, 10 aa, Homo Sapiens
RQLQDPLVIM

SEQ ID NO: 68668 - protein, 10 aa, Homo Sapiens
RQLQEDAARL

SEQ ID NO: 68669 - protein, 10 aa, Homo Sapiens
RQLQESAAKL

SEQ ID NO: 68670 - protein, 10 aa, Homo Sapiens
RQLQESEQQL

SEQ ID NO: 68671 - protein, 10 aa, Homo Sapiens
RQLQIDIDCL

SEQ ID NO: 68672 - protein, 10 aa, Homo Sapiens
RQLQPASELW

SEQ ID NO: 68673 - protein, 10 aa, Homo Sapiens
RQLVDTTVEL

SEQ ID NO: 68674 - protein, 10 aa, Homo Sapiens
RQMDFEFAAW

SEQ ID NO: 68675 - protein, 10 aa, Homo Sapiens
RQMEHFLDSW

SEQ ID NO: 68676 - protein, 10 aa, Homo Sapiens
RQMHLMIDQL

SEQ ID NO: 68677 - protein, 10 aa, Homo Sapiens
RQMKEDAEKF

SEQ ID NO: 68678 - protein, 10 aa, Homo Sapiens
RQMLEALNFL

SEQ ID NO: 68679 - protein, 10 aa, Homo Sapiens
RQMNIDVATW

SEQ ID NO: 68680 - protein, 10 aa, Homo Sapiens
RQMPGKELEW

SEQ ID NO: 68681 - protein, 10 aa, Homo Sapiens
RQMREMEENF

SEQ ID NO: 68682 - protein, 10 aa, Homo Sapiens
RQMSGAQIKI

SEQ ID NO: 68683 - protein, 10 aa, Homo Sapiens
RQMSIHMEEL

SEQ ID NO: 68684 - protein, 10 aa, Homo Sapiens
RQMTDPNVAL

SEQ ID NO: 68685 - protein, 10 aa, Homo Sapiens
RQMVVLEEEF

SEQ ID NO: 68686 - protein, 10 aa, Homo Sapiens
RQNIEDKVHM

SEQ ID NO: 68687 - protein, 10 aa, Homo Sapiens
RQNKELKVKL

SEQ ID NO: 68688 - protein, 10 aa, Homo Sapiens
RQNVGTLESF

SEQ ID NO: 68689 - protein, 10 aa, Homo Sapiens
RQPAEMAAEL

SEQ ID NO: 68690 - protein, 10 aa, Homo Sapiens
RQPDKENVTL

SEQ ID NO: 68691 - protein, 10 aa, Homo Sapiens
RQPIPVKDLL

SEQ ID NO: 68692 - protein, 10 aa, Homo Sapiens
RQPLEGSDLW

SEQ ID NO: 68693 - protein, 10 aa, Homo Sapiens
RQPLITLQYF

SEQ ID NO: 68694 - protein, 10 aa, Homo Sapiens
RQPRDFGDSL

SEQ ID NO: 68695 - protein, 10 aa, Homo Sapiens
RQPSVIYSWI

SEQ ID NO: 68696 - protein, 10 aa, Homo Sapiens
RQQAAPDADL

SEQ ID NO: 68697 - protein, 10 aa, Homo Sapiens
RQQISGPELL

SEQ ID NO: 68698 - protein, 10 aa, Homo Sapiens
RQQNDELTTL

SEQ ID NO: 68699 - protein, 10 aa, Homo Sapiens
RQQPPDLVEF

SEQ ID NO: 68700 - protein, 10 aa, Homo Sapiens
RQQPPSTTTF

SEQ ID NO: 68701 - protein, 10 aa, Homo Sapiens
RQQQLESEQF

SEQ ID NO: 68702 - protein, 10 aa, Homo Sapiens
RQQQPPPETF

SEQ ID NO: 68703 - protein, 10 aa, Homo Sapiens
RQQTDMAVNW

SEQ ID NO: 68704 - protein, 10 aa, Homo Sapiens
RQRDADVEKI

SEQ ID NO: 68705 - protein, 10 aa, Homo Sapiens
RQREELREKL

SEQ ID NO: 68706 - protein, 10 aa, Homo Sapiens
RQSGEAFVEL

SEQ ID NO: 68707 - protein, 10 aa, Homo Sapiens
RQSKISLDNL

SEQ ID NO: 68708 - protein, 10 aa, Homo Sapiens
RQSQLVVDWL

SEQ ID NO: 68709 - protein, 10 aa, Homo Sapiens
RQSVQEHCTF

SEQ ID NO: 68710 - protein, 10 aa, Homo Sapiens
RQTAQGMDYL

SEQ ID NO: 68711 - protein, 10 aa, Homo Sapiens
RQTQALADQF

SEQ ID NO: 68712 - protein, 10 aa, Homo Sapiens
RQVDIATQGW

SEQ ID NO: 68713 - protein, 10 aa, Homo Sapiens
RQVEDLQATF

SEQ ID NO: 68714 - protein, 10 aa, Homo Sapiens
RQVEKVVDKF

SEQ ID NO: 68715 - protein, 10 aa, Homo Sapiens
RQVFEGQNRI

SEQ ID NO: 68716 - protein, 10 aa, Homo Sapiens
RQVGIICERL

SEQ ID NO: 68717 - protein, 10 aa, Homo Sapiens
RQVGMICERL

SEQ ID NO: 68718 - protein, 10 aa, Homo Sapiens
RQVKEMNPAL

SEQ ID NO: 68719 - protein, 10 aa, Homo Sapiens
RQVKGDLAFL

SEQ ID NO: 68720 - protein, 10 aa, Homo Sapiens
RQVLEDFPTI

SEQ ID NO: 68721 - protein, 10 aa, Homo Sapiens
RQVLEIESSW

SEQ ID NO: 68722 - protein, 10 aa, Homo Sapiens
RQVQDLHVKL

SEQ ID NO: 68723 - protein, 10 aa, Homo Sapiens
RQVQSQAHGL

SEQ ID NO: 68724 - protein, 10 aa, Homo Sapiens
RQVRPVTEKL

SEQ ID NO: 68725 - protein, 10 aa, Homo Sapiens
RQVYDGFSFI

SEQ ID NO: 68726 - protein, 10 aa, Homo Sapiens
RQWLEASSQL

SEQ ID NO: 68727 - protein, 10 aa, Homo Sapiens
RQYAACEQRL

SEQ ID NO: 68728 - protein, 10 aa, Homo Sapiens
RQYAKDIGFI

SEQ ID NO: 68729 - protein, 10 aa, Homo Sapiens
RQYEEKNKEF

SEQ ID NO: 68730 - protein, 10 aa, Homo Sapiens
RQYKDYKIHW

SEQ ID NO: 68731 - protein, 10 aa, Homo Sapiens
RQYKGMFDTL

SEQ ID NO: 68732 - protein, 10 aa, Homo Sapiens
RQYLDEEFVL

SEQ ID NO: 68733 - protein, 10 aa, Homo Sapiens
RSIDMDNYML

SEQ ID NO: 68734 - protein, 10 aa, Homo Sapiens
RSIEEVYYLW

SEQ ID NO: 68735 - protein, 10 aa, Homo Sapiens
RSINQGLDRL

SEQ ID NO: 68736 - protein, 10 aa, Homo Sapiens
RSTSVTNDKL

SEQ ID NO: 68737 - protein, 10 aa, Homo Sapiens
RTAPFHLDLW

SEQ ID NO: 68738 - protein, 10 aa, Homo Sapiens
RTDGKVFQFL

SEQ ID NO: 68739 - protein, 10 aa, Homo Sapiens
RTIDEHDAII

SEQ ID NO: 68740 - protein, 10 aa, Homo Sapiens
RTIQGLIDFI

SEQ ID NO: 68741 - protein, 10 aa, Homo Sapiens
RTSPGSLDKI

SEQ ID NO: 68742 - protein, 10 aa, Homo Sapiens
RTVELFYDVL

SEQ ID NO: 68743 - protein, 10 aa, Homo Sapiens
RVADEMDVML

SEQ ID NO: 68744 - protein, 10 aa, Homo Sapiens
RVADTFQDYF

SEQ ID NO: 68745 - protein, 10 aa, Homo Sapiens
RVAEERGAVL

SEQ ID NO: 68746 - protein, 10 aa, Homo Sapiens
RVAIEHLDKI

SEQ ID NO: 68747 - protein, 10 aa, Homo Sapiens
RVANPRLDTF

SEQ ID NO: 68748 - protein, 10 aa, Homo Sapiens
RVCKILGSGI

SEQ ID NO: 68749 - protein, 10 aa, Homo Sapiens
RVDNMIIQSI

SEQ ID NO: 68750 - protein, 10 aa, Homo Sapiens
RVDPDVAQHW

SEQ ID NO: 68751 - protein, 10 aa, Homo Sapiens
RVDPNGSRYL

SEQ ID NO: 68752 - protein, 10 aa, Homo Sapiens
RVEGMTELYF

SEQ ID NO: 68753 - protein, 10 aa, Homo Sapiens
RVESLEMERW

SEQ ID NO: 68754 - protein, 10 aa, Homo Sapiens
RVHNLITDFL

SEQ ID NO: 68755 - protein, 10 aa, Homo Sapiens
RVIEDRDSQL

SEQ ID NO: 68756 - protein, 10 aa, Homo Sapiens
RVIEEAKTAF

SEQ ID NO: 68757 - protein, 10 aa, Homo Sapiens
RVIEGKVDQI

SEQ ID NO: 68758 - protein, 10 aa, Homo Sapiens
RVIKDKQTQL

SEQ ID NO: 68759 - protein, 10 aa, Homo Sapiens
RVIKGNIDKF

SEQ ID NO: 68760 - protein, 10 aa, Homo Sapiens
RVILDEGHAI

SEQ ID NO: 68761 - protein, 10 aa, Homo Sapiens
RVINEEYKIW

SEQ ID NO: 68762 - protein, 10 aa, Homo Sapiens
RVIQKALESI

SEQ ID NO: 68763 - protein, 10 aa, Homo Sapiens
RVIVAEFDSF

SEQ ID NO: 68764 - protein, 10 aa, Homo Sapiens
RVLDERLVRL

SEQ ID NO: 68765 - protein, 10 aa, Homo Sapiens
RVLKEDKERW

SEQ ID NO: 68766 - protein, 10 aa, Homo Sapiens
RVLKGDVEKL

SEQ ID NO: 68767 - protein, 10 aa, Homo Sapiens
RVLQNGGDKL

SEQ ID NO: 68768 - protein, 10 aa, Homo Sapiens
RVLREERAYI

SEQ ID NO: 68769 - protein, 10 aa, Homo Sapiens
RVQGPELISL

SEQ ID NO: 68770 - protein, 10 aa, Homo Sapiens
RVQLGGSDQL

SEQ ID NO: 68771 - protein, 10 aa, Homo Sapiens
RVSAVQMDDW

SEQ ID NO: 68772 - protein, 10 aa, Homo Sapiens
RVSINGYDHF

SEQ ID NO: 68773 - protein, 10 aa, Homo Sapiens
RVSKILKEEW

SEQ ID NO: 68774 - protein, 10 aa, Homo Sapiens
RVSPALGITW

SEQ ID NO: 68775 - protein, 10 aa, Homo Sapiens
RVSQDGLDLL

SEQ ID NO: 68776 - protein, 10 aa, Homo Sapiens
RVSSDEDLKL

SEQ ID NO: 68777 - protein, 10 aa, Homo Sapiens
RVVDTFQDYF

SEQ ID NO: 68778 - protein, 10 aa, Homo Sapiens
RVVKDITNAF

SEQ ID NO: 68779 - protein, 10 aa, Homo Sapiens
RVVKGQVEYL

SEQ ID NO: 68780 - protein, 10 aa, Homo Sapiens
RVVNGKVEYF

SEQ ID NO: 68781 - protein, 10 aa, Homo Sapiens
SIIADDFAAF

SEQ ID NO: 68782 - protein, 10 aa, Homo Sapiens
SLAREVYTEW

SEQ ID NO: 68783 - protein, 10 aa, Homo Sapiens
SLDPSRPVTF

SEQ ID NO: 68784 - protein, 10 aa, Homo Sapiens
SLEKVCADLI

SEQ ID NO: 68785 - protein, 10 aa, Homo Sapiens
SLFDDKAVEI

SEQ ID NO: 68786 - protein, 10 aa, Homo Sapiens
SLFSAVREDF

SEQ ID NO: 68787 - protein, 10 aa, Homo Sapiens
SLGPNGLDKM

SEQ ID NO: 68788 - protein, 10 aa, Homo Sapiens
SLGPVGLDKM

SEQ ID NO: 68789 - protein, 10 aa, Homo Sapiens
SLGTGYTEEF

SEQ ID NO: 68790 - protein, 10 aa, Homo Sapiens
SLISSDYELL

SEQ ID NO: 68791 - protein, 10 aa, Homo Sapiens
SLLDDTTVTL

SEQ ID NO: 68792 - protein, 10 aa, Homo Sapiens
SLSQPKMDEL

SEQ ID NO: 68793 - protein, 10 aa, Homo Sapiens
SLVAAGHDCF

SEQ ID NO: 68794 - protein, 10 aa, Homo Sapiens
SLVEVDREFW

SEQ ID NO: 68795 - protein, 10 aa, Homo Sapiens
SMEKSFSDLF

SEQ ID NO: 68796 - protein, 10 aa, Homo Sapiens
SMGFFTKEEW

SEQ ID NO: 68797 - protein, 10 aa, Homo Sapiens
SQAGITETEW

SEQ ID NO: 68798 - protein, 10 aa, Homo Sapiens
SQCPPDYHHI

SEQ ID NO: 68799 - protein, 10 aa, Homo Sapiens
SQDKNLYHNL

SEQ ID NO: 68800 - protein, 10 aa, Homo Sapiens
SQDPSGDSKL

SEQ ID NO: 68801 - protein, 10 aa, Homo Sapiens
SQDPTKEIRF

SEQ ID NO: 68802 - protein, 10 aa, Homo Sapiens
SQDQFSDMRI

SEQ ID NO: 68803 - protein, 10 aa, Homo Sapiens
SQEMKCILHW

SEQ ID NO: 68804 - protein, 10 aa, Homo Sapiens
SQEQSFSDKL

SEQ ID NO: 68805 - protein, 10 aa, Homo Sapiens
SQFGHVVDIV

SEQ ID NO: 68806 - protein, 10 aa, Homo Sapiens
SQFLADTERF

SEQ ID NO: 68807 - protein, 10 aa, Homo Sapiens
SQFLAKVESF

SEQ ID NO: 68808 - protein, 10 aa, Homo Sapiens
SQFPTPEAVL

SEQ ID NO: 68809 - protein, 10 aa, Homo Sapiens
SQFREEEITL

SEQ ID NO: 68810 - protein, 10 aa, Homo Sapiens
SQGFPDTYRL

SEQ ID NO: 68811 - protein, 10 aa, Homo Sapiens
SQGQPAQDIF

SEQ ID NO: 68812 - protein, 10 aa, Homo Sapiens
SQHNPVPDFI

SEQ ID NO: 68813 - protein, 10 aa, Homo Sapiens
SQIAKDVCTF

SEQ ID NO: 68814 - protein, 10 aa, Homo Sapiens
SQIDAEFEKM

SEQ ID NO: 68815 - protein, 10 aa, Homo Sapiens
SQIDDLYSTI

SEQ ID NO: 68816 - protein, 10 aa, Homo Sapiens
SQIKQEVENF

SEQ ID NO: 68817 - protein, 10 aa, Homo Sapiens
SQIREMETLI

SEQ ID NO: 68818 - protein, 10 aa, Homo Sapiens
SQISAGEEKW

SEQ ID NO: 68819 - protein, 10 aa, Homo Sapiens
SQLDDQYSRF

SEQ ID NO: 68820 - protein, 10 aa, Homo Sapiens
SQLKEHFAQF

SEQ ID NO: 68821 - protein, 10 aa, Homo Sapiens
SQSKDSDVYI

SEQ ID NO: 68822 - protein, 10 aa, Homo Sapiens
SQTQPDLDHL

SEQ ID NO: 68823 - protein, 10 aa, Homo Sapiens
SQVEGEHQLW

SEQ ID NO: 68824 - protein, 10 aa, Homo Sapiens
SQVHIMDEHW

SEQ ID NO: 68825 - protein, 10 aa, Homo Sapiens
SQVPNEKVGW

SEQ ID NO: 68826 - protein, 10 aa, Homo Sapiens
SQYEALKEDW

SEQ ID NO: 68827 - protein, 10 aa, Homo Sapiens
SQYPQSDDKL

SEQ ID NO: 68828 - protein, 10 aa, Homo Sapiens
SSYAHKASSI

SEQ ID NO: 68829 - protein, 10 aa, Homo Sapiens
SVERSLSDLF

SEQ ID NO: 68830 - protein, 10 aa, Homo Sapiens
SVINDTVVRF

SEQ ID NO: 68831 - protein, 10 aa, Homo Sapiens
SVMPAGVDKI

SEQ ID NO: 68832 - protein, 10 aa, Homo Sapiens
TLASAGFDRL

SEQ ID NO: 68833 - protein, 10 aa, Homo Sapiens
TLFKGFGDRL

SEQ ID NO: 68834 - protein, 10 aa, Homo Sapiens
TLIEDEIATI

SEQ ID NO: 68835 - protein, 10 aa, Homo Sapiens
TLQRGKEENI

SEQ ID NO: 68836 - protein, 10 aa, Homo Sapiens
TQEEPYSDII

SEQ ID NO: 68837 - protein, 10 aa, Homo Sapiens
TQIEDAVSLW

SEQ ID NO: 68838 - protein, 10 aa, Homo Sapiens
TQIGGERYNF

SEQ ID NO: 68839 - protein, 10 aa, Homo Sapiens
TQIKQKVDSL

SEQ ID NO: 68840 - protein, 10 aa, Homo Sapiens
TQSCADLDKW

SEQ ID NO: 68841 - protein, 10 aa, Homo Sapiens
TQVPEGAAKW

SEQ ID NO: 68842 - protein, 10 aa, Homo Sapiens
TVARGEPESL

SEQ ID NO: 68843 - protein, 10 aa, Homo Sapiens
VIHQSVYELI

SEQ ID NO: 68844 - protein, 10 aa, Homo Sapiens
VLADVMDDQL

SEQ ID NO: 68845 - protein, 10 aa, Homo Sapiens
VLAPILPDNF

SEQ ID NO: 68846 - protein, 10 aa, Homo Sapiens
VLDPHTSHSW

SEQ ID NO: 68847 - protein, 10 aa, Homo Sapiens
VLDSSLSELF

SEQ ID NO: 68848 - protein, 10 aa, Homo Sapiens
VLDVSGADML

SEQ ID NO: 68849 - protein, 10 aa, Homo Sapiens
VLFAIKEVGF

SEQ ID NO: 68850 - protein, 10 aa, Homo Sapiens
VLFEDAVAHI

SEQ ID NO: 68851 - protein, 10 aa, Homo Sapiens
VLFRFSDDAF

SEQ ID NO: 68852 - protein, 10 aa, Homo Sapiens
VLIGNLGDKL

SEQ ID NO: 68853 - protein, 10 aa, Homo Sapiens
VLLDNQTVTF

SEQ ID NO: 68854 - protein, 10 aa, Homo Sapiens
VMVDDRLVTM

SEQ ID NO: 68855 - protein, 10 aa, Homo Sapiens
VQDKGSIHKF

SEQ ID NO: 68856 - protein, 10 aa, Homo Sapiens
VQDPHSRICF

SEQ ID NO: 68857 - protein, 10 aa, Homo Sapiens
VQDPSQFDVL

SEQ ID NO: 68858 - protein, 10 aa, Homo Sapiens
VQDPSVFVTF

SEQ ID NO: 68859 - protein, 10 aa, Homo Sapiens
VQDVQGDGRW

SEQ ID NO: 68860 - protein, 10 aa, Homo Sapiens
VQENIGPLRI

SEQ ID NO: 68861 - protein, 10 aa, Homo Sapiens
VQIGQVHEEF

SEQ ID NO: 68862 - protein, 10 aa, Homo Sapiens
VQILQEVNDF

SEQ ID NO: 68863 - protein, 10 aa, Homo Sapiens
VQNEAKLDEI

SEQ ID NO: 68864 - protein, 10 aa, Homo Sapiens
VQVQPGVDII

SEQ ID NO: 68865 - protein, 10 aa, Homo Sapiens
VQWDEAEITI

SEQ ID NO: 68866 - protein, 10 aa, Homo Sapiens
WLDPNETNEI

SEQ ID NO: 68867 - protein, 10 aa, Homo Sapiens
WLLDDSKTWW

SEQ ID NO: 68868 - protein, 10 aa, Homo Sapiens
WLVADPDCRW

SEQ ID NO: 68869 - protein, 10 aa, Homo Sapiens
WQEGSVTRLW

SEQ ID NO: 68870 - protein, 10 aa, Homo Sapiens
WQKADINTKW

SEQ ID NO: 68871 - protein, 10 aa, Homo Sapiens
WQVDTKEEVW

SEQ ID NO: 68872 - protein, 10 aa, Homo Sapiens
YILANIGDHF

SEQ ID NO: 68873 - protein, 10 aa, Homo Sapiens
YLASDPDCRW

SEQ ID NO: 68874 - protein, 10 aa, Homo Sapiens
YLAYDIGNHF

SEQ ID NO: 68875 - protein, 10 aa, Homo Sapiens
YLDRKSDERL

SEQ ID NO: 68876 - protein, 10 aa, Homo Sapiens
YLEGECLELL

SEQ ID NO: 68877 - protein, 10 aa, Homo Sapiens
YLEGECVEWL

SEQ ID NO: 68878 - protein, 10 aa, Homo Sapiens
YLESKDNQKL

SEQ ID NO: 68879 - protein, 10 aa, Homo Sapiens
YLHESTQDEL

SEQ ID NO: 68880 - protein, 10 aa, Homo Sapiens
YLINMHVDEF

SEQ ID NO: 68881 - protein, 10 aa, Homo Sapiens
YLIVDRDEAW

SEQ ID NO: 68882 - protein, 10 aa, Homo Sapiens
YLPDGSYEDW

SEQ ID NO: 68883 - protein, 10 aa, Homo Sapiens
YMCVGIMDRF

SEQ ID NO: 68884 - protein, 10 aa, Homo Sapiens
YMFQHIEESF

SEQ ID NO: 68885 - protein, 10 aa, Homo Sapiens
YMIHEPEPHI

SEQ ID NO: 68886 - protein, 10 aa, Homo Sapiens
YMVADKFTEL

SEQ ID NO: 68887 - protein, 10 aa, Homo Sapiens
YMVADRFSEL

SEQ ID NO: 68888 - protein, 10 aa, Homo Sapiens
YQALTVHDNL

SEQ ID NO: 68889 - protein, 10 aa, Homo Sapiens
YQAPDIDVQL

SEQ ID NO: 68890 - protein, 10 aa, Homo Sapiens
YQDMPEYENF

SEQ ID NO: 68891 - protein, 10 aa, Homo Sapiens
YQDPDGTRKL

SEQ ID NO: 68892 - protein, 10 aa, Homo Sapiens
YQDPSNAQFL

SEQ ID NO: 68893 - protein, 10 aa, Homo Sapiens
YQEPIPTAQL

SEQ ID NO: 68894 - protein, 10 aa, Homo Sapiens
YQHGHINSYL

SEQ ID NO: 68895 - protein, 10 aa, Homo Sapiens
YQILDGIHYL

SEQ ID NO: 68896 - protein, 10 aa, Homo Sapiens
YQIPDVRDIF

SEQ ID NO: 68897 - protein, 10 aa, Homo Sapiens
YQMKEEEVQL

SEQ ID NO: 68898 - protein, 10 aa, Homo Sapiens
YQNEDEKVTL

SEQ ID NO: 68899 - protein, 10 aa, Homo Sapiens
YQQELERELF

SEQ ID NO: 68900 - protein, 10 aa, Homo Sapiens
YQQQGRLDKL

SEQ ID NO: 68901 - protein, 10 aa, Homo Sapiens
YQWDDPDPRL

SEQ ID NO: 68902 - protein, 10 aa, Homo Sapiens
YQYLGEPETF

SEQ ID NO: 68903 - protein, 10 aa, Homo Sapiens
YQYQDGCIVW

SEQ ID NO: 68904 - protein, 10 aa, Homo Sapiens
YVDKSRGDKL

SEQ ID NO: 68905 - protein, 10 aa, Homo Sapiens
YVDPSGGDRF

SEQ ID NO: 68906 - protein, 10 aa, Homo Sapiens
YVHKSVMEEL

SEQ ID NO: 68907 - protein, 11 aa, Homo Sapiens
AAPAKKPYRKA

SEQ ID NO: 68908 - protein, 11 aa, Homo Sapiens
AGGVQRQEVVC

SEQ ID NO: 68909 - protein, 11 aa, Homo Sapiens
AIIDPGDSDII

SEQ ID NO: 68910 - protein, 11 aa, Homo Sapiens
AIVDVPVGEEL

SEQ ID NO: 68911 - protein, 11 aa, Homo Sapiens
ALDPNSKGNSL

SEQ ID NO: 68912 - protein, 11 aa, Homo Sapiens
ALDRQTATQLL

SEQ ID NO: 68913 - protein, 11 aa, Homo Sapiens
ALFDKSINEFW

SEQ ID NO: 68914 - protein, 11 aa, Homo Sapiens
ALHIPFSVDEI

SEQ ID NO: 68915 - protein, 11 aa, Homo Sapiens
ALIFEGTDTHW

SEQ ID NO: 68916 - protein, 11 aa, Homo Sapiens
ALLALKEVEEI

SEQ ID NO: 68917 - protein, 11 aa, Homo Sapiens
ALLERLSELAL

SEQ ID NO: 68918 - protein, 11 aa, Homo Sapiens
ALQSFLKAEEL

SEQ ID NO: 68919 - protein, 11 aa, Homo Sapiens
ALQSPFYGDKM

SEQ ID NO: 68920 - protein, 11 aa, Homo Sapiens
ALSEDHAWVVF

SEQ ID NO: 68921 - protein, 11 aa, Homo Sapiens
ALTDDGRVFLW

SEQ ID NO: 68922 - protein, 11 aa, Homo Sapiens
ALVPETIHDEL

SEQ ID NO: 68923 - protein, 11 aa, Homo Sapiens
ALYSHEDVCVF

SEQ ID NO: 68924 - protein, 11 aa, Homo Sapiens
AMPLPGVGEEL

SEQ ID NO: 68925 - protein, 11 aa, Homo Sapiens
ANALGGKGAGF

SEQ ID NO: 68926 - protein, 11 aa, Homo Sapiens
AQAHCGAGDEL

SEQ ID NO: 68927 - protein, 11 aa, Homo Sapiens
AQAPVTKGCYL

SEQ ID NO: 68928 - protein, 11 aa, Homo Sapiens
AQAQDAELVRL

SEQ ID NO: 68929 - protein, 11 aa, Homo Sapiens
AQARVPLGDEM

SEQ ID NO: 68930 - protein, 11 aa, Homo Sapiens
AQDANAAQQEL

SEQ ID NO: 68931 - protein, 11 aa, Homo Sapiens
AQDQTQDTQLI

SEQ ID NO: 68932 - protein, 11 aa, Homo Sapiens
AQDSTDLVAKL

SEQ ID NO: 68933 - protein, 11 aa, Homo Sapiens
AQEARNIYQEF

SEQ ID NO: 68934 - protein, 11 aa, Homo Sapiens
AQEPCNGRTAL

SEQ ID NO: 68935 - protein, 11 aa, Homo Sapiens
AQETVKHSDLF

SEQ ID NO: 68936 - protein, 11 aa, Homo Sapiens
AQFDNHNSQVW

SEQ ID NO: 68937 - protein, 11 aa, Homo Sapiens
AQFEGIVTDLI

SEQ ID NO: 68938 - protein, 11 aa, Homo Sapiens
AQFEPDSTEYI

SEQ ID NO: 68939 - protein, 11 aa, Homo Sapiens
AQHFLPAGDSV

SEQ ID NO: 68940 - protein, 11 aa, Homo Sapiens
AQHKADIEERL

SEQ ID NO: 68941 - protein, 11 aa, Homo Sapiens
AQIDDDVFDKI

SEQ ID NO: 68942 - protein, 11 aa, Homo Sapiens
AQIIEADEVLL

SEQ ID NO: 68943 - protein, 11 aa, Homo Sapiens
AQILLKGAERL

SEQ ID NO: 68944 - protein, 11 aa, Homo Sapiens
AQLDCSKLETL

SEQ ID NO: 68945 - protein, 11 aa, Homo Sapiens
AQLSPLDSETL

SEQ ID NO: 68946 - protein, 11 aa, Homo Sapiens
AQMTPSPSEMF

SEQ ID NO: 68947 - protein, 11 aa, Homo Sapiens
AQNVLSKADVI

SEQ ID NO: 68948 - protein, 11 aa, Homo Sapiens
AQQAEEGSARL

SEQ ID NO: 68949 - protein, 11 aa, Homo Sapiens
AQQASEKIDRF

SEQ ID NO: 68950 - protein, 11 aa, Homo Sapiens
AQQRNCEAETL

SEQ ID NO: 68951 - protein, 11 aa, Homo Sapiens
AQSKKITKEEF

SEQ ID NO: 68952 - protein, 11 aa, Homo Sapiens
AQSQLIKSDEM

SEQ ID NO: 68953 - protein, 11 aa, Homo Sapiens
AQSSKSVKEAW

SEQ ID NO: 68954 - protein, 11 aa, Homo Sapiens
AQSSREICEAF

SEQ ID NO: 68955 - protein, 11 aa, Homo Sapiens
AQTLSLEADKW

SEQ ID NO: 68956 - protein, 11 aa, Homo Sapiens
AQVADAFLSKF

SEQ ID NO: 68957 - protein, 11 aa, Homo Sapiens
AQVADVVVSRW

SEQ ID NO: 68958 - protein, 11 aa, Homo Sapiens
AQVNTKVSDSL

SEQ ID NO: 68959 - protein, 11 aa, Homo Sapiens
AQVPNIDFEGL

SEQ ID NO: 68960 - protein, 11 aa, Homo Sapiens
AQYFLDKIDVI

SEQ ID NO: 68961 - protein, 11 aa, Homo Sapiens
AVIDIPGADTL

SEQ ID NO: 68962 - protein, 11 aa, Homo Sapiens
EGEKHIYSPII

SEQ ID NO: 68963 - protein, 11 aa, Homo Sapiens
ELYMEQKNERL

SEQ ID NO: 68964 - protein, 11 aa, Homo Sapiens
EPFGKIDNIVL

SEQ ID NO: 68965 - protein, 11 aa, Homo Sapiens
FIFDSAGKELF

SEQ ID NO: 68966 - protein, 11 aa, Homo Sapiens
FLDGELKSDVF

SEQ ID NO: 68967 - protein, 11 aa, Homo Sapiens
FLLDPVKGERL

SEQ ID NO: 68968 - protein, 11 aa, Homo Sapiens
FQAVHVQGEDL

SEQ ID NO: 68969 - protein, 11 aa, Homo Sapiens
FQENSTIGQKI

SEQ ID NO: 68970 - protein, 11 aa, Homo Sapiens
GAGFSIRYEIF

SEQ ID NO: 68971 - protein, 11 aa, Homo Sapiens
GLCAIAQAESL

SEQ ID NO: 68972 - protein, 11 aa, Homo Sapiens
GLFADGHLILW

SEQ ID NO: 68973 - protein, 11 aa, Homo Sapiens
GLFEDTNLCAI

SEQ ID NO: 68974 - protein, 11 aa, Homo Sapiens
GLIDDNDLYRW

SEQ ID NO: 68975 - protein, 11 aa, Homo Sapiens
GLIDDYSMVRF

SEQ ID NO: 68976 - protein, 11 aa, Homo Sapiens
GLVPRLLGDIL

SEQ ID NO: 68977 - protein, 11 aa, Homo Sapiens
GMSNDGRFLKF

SEQ ID NO: 68978 - protein, 11 aa, Homo Sapiens
GQAAGVLIHSI

SEQ ID NO: 68979 - protein, 11 aa, Homo Sapiens
GQAGSSIPSTW

SEQ ID NO: 68980 - protein, 11 aa, Homo Sapiens
GQASGELLQQI

SEQ ID NO: 68981 - protein, 11 aa, Homo Sapiens
GQCVAAKPESW

SEQ ID NO: 68982 - protein, 11 aa, Homo Sapiens
GQDAHCQLLRF

SEQ ID NO: 68983 - protein, 11 aa, Homo Sapiens
GQDVGRYQVSW

SEQ ID NO: 68984 - protein, 11 aa, Homo Sapiens
GQDVSQAQRQI

SEQ ID NO: 68985 - protein, 11 aa, Homo Sapiens
GQHTSSTTSAW

SEQ ID NO: 68986 - protein, 11 aa, Homo Sapiens
GQIDDHQSSRL

SEQ ID NO: 68987 - protein, 11 aa, Homo Sapiens
GQLSEGAIAAI

SEQ ID NO: 68988 - protein, 11 aa, Homo Sapiens
GQNPEKIFQNL

SEQ ID NO: 68989 - protein, 11 aa, Homo Sapiens
GQQKPHPGERL

SEQ ID NO: 68990 - protein, 11 aa, Homo Sapiens
GQQSAHLAELI

SEQ ID NO: 68991 - protein, 11 aa, Homo Sapiens
GQSKAVGQDTL

SEQ ID NO: 68992 - protein, 11 aa, Homo Sapiens
GQVEIHLGDSL

SEQ ID NO: 68993 - protein, 11 aa, Homo Sapiens
GQVITIGNERF

SEQ ID NO: 68994 - protein, 11 aa, Homo Sapiens
GQYHGDAGDSL

SEQ ID NO: 68995 - protein, 11 aa, Homo Sapiens
HIIEDTEEARL

SEQ ID NO: 68996 - protein, 11 aa, Homo Sapiens
HIMKSADVEKL

SEQ ID NO: 68997 - protein, 11 aa, Homo Sapiens
HIQAGQCGNQI

SEQ ID NO: 68998 - protein, 11 aa, Homo Sapiens
HLDSNIENQEI

SEQ ID NO: 68999 - protein, 11 aa, Homo Sapiens
HLEEAFTSEHW

SEQ ID NO: 69000 - protein, 11 aa, Homo Sapiens
HLESGSGKVTF

SEQ ID NO: 69001 - protein, 11 aa, Homo Sapiens
HLFKEGIKPMW

SEQ ID NO: 69002 - protein, 11 aa, Homo Sapiens
HLIHEQIPLSL

SEQ ID NO: 69003 - protein, 11 aa, Homo Sapiens
HLIPDGEITSI

SEQ ID NO: 69004 - protein, 11 aa, Homo Sapiens
HLLAEQEKQQF

SEQ ID NO: 69005 - protein, 11 aa, Homo Sapiens
HLLLPSQEESF

SEQ ID NO: 69006 - protein, 11 aa, Homo Sapiens
HLLVEHETQKL

SEQ ID NO: 69007 - protein, 11 aa, Homo Sapiens
HLNQFVDHEKI

SEQ ID NO: 69008 - protein, 11 aa, Homo Sapiens
HLQRIIQQETL

SEQ ID NO: 69009 - protein, 11 aa, Homo Sapiens
HLVPPEIIQSL

SEQ ID NO: 69010 - protein, 11 aa, Homo Sapiens
HLYRDGHEEAL

SEQ ID NO: 69011 - protein, 11 aa, Homo Sapiens
HMESVNAEAKL

SEQ ID NO: 69012 - protein, 11 aa, Homo Sapiens
HQDESSSFHHL

SEQ ID NO: 69013 - protein, 11 aa, Homo Sapiens
HQDTQGTSHRW

SEQ ID NO: 69014 - protein, 11 aa, Homo Sapiens
HQHRSGIESAL

SEQ ID NO: 69015 - protein, 11 aa, Homo Sapiens
HQHVSTHSDIL

SEQ ID NO: 69016 - protein, 11 aa, Homo Sapiens
HQIEAVDGEEL

SEQ ID NO: 69017 - protein, 11 aa, Homo Sapiens
HQIGPGMVQQI

SEQ ID NO: 69018 - protein, 11 aa, Homo Sapiens
HQINDASRGTL

SEQ ID NO: 69019 - protein, 11 aa, Homo Sapiens
HQLDVVIAEKL

SEQ ID NO: 69020 - protein, 11 aa, Homo Sapiens
HVIDSIVGDGI

SEQ ID NO: 69021 - protein, 11 aa, Homo Sapiens
HVVHPPTGEEF

SEQ ID NO: 69022 - protein, 11 aa, Homo Sapiens
IIFEDDRCLAF

SEQ ID NO: 69023 - protein, 11 aa, Homo Sapiens
ILADLHSADQL

SEQ ID NO: 69024 - protein, 11 aa, Homo Sapiens
ILDAGGHNVTI

SEQ ID NO: 69025 - protein, 11 aa, Homo Sapiens
ILDDGGDLTHW

SEQ ID NO: 69026 - protein, 11 aa, Homo Sapiens
ILEGRTISVQF

SEQ ID NO: 69027 - protein, 11 aa, Homo Sapiens
ILILDNDGDRL

SEQ ID NO: 69028 - protein, 11 aa, Homo Sapiens
ILINDAGEVRL

SEQ ID NO: 69029 - protein, 11 aa, Homo Sapiens
ILLDDTGLAYI

SEQ ID NO: 69030 - protein, 11 aa, Homo Sapiens
ILLDERGQIKL

SEQ ID NO: 69031 - protein, 11 aa, Homo Sapiens
ILSSIPEAEKF

SEQ ID NO: 69032 - protein, 11 aa, Homo Sapiens
ILTTEGRNALI

SEQ ID NO: 69033 - protein, 11 aa, Homo Sapiens
ILWSPHYKELI

SEQ ID NO: 69034 - protein, 11 aa, Homo Sapiens
IQALDSEGNTF

SEQ ID NO: 69035 - protein, 11 aa, Homo Sapiens
IQDPASQRLTW

SEQ ID NO: 69036 - protein, 11 aa, Homo Sapiens
IQGPVGLDQRF

SEQ ID NO: 69037 - protein, 11 aa, Homo Sapiens
IQQNNDIVQSL

SEQ ID NO: 69038 - protein, 11 aa, Homo Sapiens
KASGFEESMKW

SEQ ID NO: 69039 - protein, 11 aa, Homo Sapiens
KILAEGGGAKF

SEQ ID NO: 69040 - protein, 11 aa, Homo Sapiens
KIVEIINEELW

SEQ ID NO: 69041 - protein, 11 aa, Homo Sapiens
KLAPITYPQGL

SEQ ID NO: 69042 - protein, 11 aa, Homo Sapiens
KLAVGDNNSKW

SEQ ID NO: 69043 - protein, 11 aa, Homo Sapiens
KLDSSDIYNEL

SEQ ID NO: 69044 - protein, 11 aa, Homo Sapiens
KLEAEADKIGL

SEQ ID NO: 69045 - protein, 11 aa, Homo Sapiens
KLEENNGTDLL

SEQ ID NO: 69046 - protein, 11 aa, Homo Sapiens
KLESIDKIARW

SEQ ID NO: 69047 - protein, 11 aa, Homo Sapiens
KLFADAVQELL

SEQ ID NO: 69048 - protein, 11 aa, Homo Sapiens
KLFDLDEKLML

SEQ ID NO: 69049 - protein, 11 aa, Homo Sapiens
KLFGEKGSDRF

SEQ ID NO: 69050 - protein, 11 aa, Homo Sapiens
KLFNESHGIFL

SEQ ID NO: 69051 - protein, 11 aa, Homo Sapiens
KLFQSDTNAML

SEQ ID NO: 69052 - protein, 11 aa, Homo Sapiens
KLFSEKRVELL

SEQ ID NO: 69053 - protein, 11 aa, Homo Sapiens
KLHIPYAGETL

SEQ ID NO: 69054 - protein, 11 aa, Homo Sapiens
KLHWQKNGDYL

SEQ ID NO: 69055 - protein, 11 aa, Homo Sapiens
KLIADVGLVGF

SEQ ID NO: 69056 - protein, 11 aa, Homo Sapiens
KLIAEKSEAKI

SEQ ID NO: 69057 - protein, 11 aa, Homo Sapiens
KLIDETQDMLL

SEQ ID NO: 69058 - protein, 11 aa, Homo Sapiens
KLIDTIPDDKL

SEQ ID NO: 69059 - protein, 11 aa, Homo Sapiens
KLIECGWKDQL

SEQ ID NO: 69060 - protein, 11 aa, Homo Sapiens
KLIETGERERL

SEQ ID NO: 69061 - protein, 11 aa, Homo Sapiens
KLIGDTPIDTF

SEQ ID NO: 69062 - protein, 11 aa, Homo Sapiens
KLIQEKKDNLL

SEQ ID NO: 69063 - protein, 11 aa, Homo Sapiens
KLIQESPTVEL

SEQ ID NO: 69064 - protein, 11 aa, Homo Sapiens
KLKSNDGEERL

SEQ ID NO: 69065 - protein, 11 aa, Homo Sapiens
KLLPDTILEKL

SEQ ID NO: 69066 - protein, 11 aa, Homo Sapiens
KLLQNIGIDKI

SEQ ID NO: 69067 - protein, 11 aa, Homo Sapiens
KLNENHSGELW

SEQ ID NO: 69068 - protein, 11 aa, Homo Sapiens
KLPSSYELDVL

SEQ ID NO: 69069 - protein, 11 aa, Homo Sapiens
KLQEEKVRAVF

SEQ ID NO: 69070 - protein, 11 aa, Homo Sapiens
KLSEDGTYTGF

SEQ ID NO: 69071 - protein, 11 aa, Homo Sapiens
KLSPEELLLRW

SEQ ID NO: 69072 - protein, 11 aa, Homo Sapiens
KLYEEKTGNAW

SEQ ID NO: 69073 - protein, 11 aa, Homo Sapiens
KLYGSGDQEAW

SEQ ID NO: 69074 - protein, 11 aa, Homo Sapiens
KLYNNITFEEL

SEQ ID NO: 69075 - protein, 11 aa, Homo Sapiens
KMLSCAGADRL

SEQ ID NO: 69076 - protein, 11 aa, Homo Sapiens
KMVNSGMLETI

SEQ ID NO: 69077 - protein, 11 aa, Homo Sapiens
KQADLYISEGL

SEQ ID NO: 69078 - protein, 11 aa, Homo Sapiens
KQAEEPRGSSL

SEQ ID NO: 69079 - protein, 11 aa, Homo Sapiens
KQAHVELAERM

SEQ ID NO: 69080 - protein, 11 aa, Homo Sapiens
KQAPGEKGNIL

SEQ ID NO: 69081 - protein, 11 aa, Homo Sapiens
KQDDSQSSNQF

SEQ ID NO: 69082 - protein, 11 aa, Homo Sapiens
KQDSLGQLVDW

SEQ ID NO: 69083 - protein, 11 aa, Homo Sapiens
KQEGIATSDNF

SEQ ID NO: 69084 - protein, 11 aa, Homo Sapiens
KQENTQTEQKL

SEQ ID NO: 69085 - protein, 11 aa, Homo Sapiens
KQFAAIQKEQL

SEQ ID NO: 69086 - protein, 11 aa, Homo Sapiens
KQFAEENGLLF

SEQ ID NO: 69087 - protein, 11 aa, Homo Sapiens
KQFAEGSTLKL

SEQ ID NO: 69088 - protein, 11 aa, Homo Sapiens
KQFAEMYVAKF

SEQ ID NO: 69089 - protein, 11 aa, Homo Sapiens
KQFAGYSEEVL

SEQ ID NO: 69090 - protein, 11 aa, Homo Sapiens
KQFHSVEVHKW

SEQ ID NO: 69091 - protein, 11 aa, Homo Sapiens
KQFIDGRLDLL

SEQ ID NO: 69092 - protein, 11 aa, Homo Sapiens
KQFYEPKPDLL

SEQ ID NO: 69093 - protein, 11 aa, Homo Sapiens
KQHSWHESDSF

SEQ ID NO: 69094 - protein, 11 aa, Homo Sapiens
KQICVVMLETL

SEQ ID NO: 69095 - protein, 11 aa, Homo Sapiens
KQIDELDILRL

SEQ ID NO: 69096 - protein, 11 aa, Homo Sapiens
KQIESDRQNLL

SEQ ID NO: 69097 - protein, 11 aa, Homo Sapiens
KQLDPGQRDLF

SEQ ID NO: 69098 - protein, 11 aa, Homo Sapiens
KQNELLEPNSF

SEQ ID NO: 69099 - protein, 11 aa, Homo Sapiens
KQSKDGAGFLI

SEQ ID NO: 69100 - protein, 11 aa, Homo Sapiens
KQSVHIVENEI

SEQ ID NO: 69101 - protein, 11 aa, Homo Sapiens
KQVEDDIQQLL

SEQ ID NO: 69102 - protein, 11 aa, Homo Sapiens
KQVKPYVEEGL

SEQ ID NO: 69103 - protein, 11 aa, Homo Sapiens
KQVLNYLGECF

SEQ ID NO: 69104 - protein, 11 aa, Homo Sapiens
KQWKHFSGDHL

SEQ ID NO: 69105 - protein, 11 aa, Homo Sapiens
KQYGDKIIEEL

SEQ ID NO: 69106 - protein, 11 aa, Homo Sapiens
KQYIEFVADRL

SEQ ID NO: 69107 - protein, 11 aa, Homo Sapiens
KVLGNPKSDEM

SEQ ID NO: 69108 - protein, 11 aa, Homo Sapiens
LEQNQLYGEVI

SEQ ID NO: 69109 - protein, 11 aa, Homo Sapiens
LLFEGEKKITI

SEQ ID NO: 69110 - protein, 11 aa, Homo Sapiens
LLHSSHISEEL

SEQ ID NO: 69111 - protein, 11 aa, Homo Sapiens
LLIDDKGTIKL

SEQ ID NO: 69112 - protein, 11 aa, Homo Sapiens
LLIGQTEVDIM

SEQ ID NO: 69113 - protein, 11 aa, Homo Sapiens
LLVENIERETF

SEQ ID NO: 69114 - protein, 11 aa, Homo Sapiens
LQDKEGLSNQL

SEQ ID NO: 69115 - protein, 11 aa, Homo Sapiens
LQDNPASGEKF

SEQ ID NO: 69116 - protein, 11 aa, Homo Sapiens
LQHQEVKPYTL

SEQ ID NO: 69117 - protein, 11 aa, Homo Sapiens
LQIRNDVLDSL

SEQ ID NO: 69118 - protein, 11 aa, Homo Sapiens
LQWLESKEEVL

SEQ ID NO: 69119 - protein, 11 aa, Homo Sapiens
LSSDDANVLVW

SEQ ID NO: 69120 - protein, 11 aa, Homo Sapiens
MIINDPRYSAL

SEQ ID NO: 69121 - protein, 11 aa, Homo Sapiens
QGLNEGVGQGI

SEQ ID NO: 69122 - protein, 11 aa, Homo Sapiens
QIILEDQNCKL

SEQ ID NO: 69123 - protein, 11 aa, Homo Sapiens
QIVTAGLGDHL

SEQ ID NO: 69124 - protein, 11 aa, Homo Sapiens
QLEPEELYQTF

SEQ ID NO: 69125 - protein, 11 aa, Homo Sapiens
QLQDGHEREYI

SEQ ID NO: 69126 - protein, 11 aa, Homo Sapiens
QQAQLAAAEKF

SEQ ID NO: 69127 - protein, 11 aa, Homo Sapiens
QQCHQSILELF

SEQ ID NO: 69128 - protein, 11 aa, Homo Sapiens
RAANILVGENL

SEQ ID NO: 69129 - protein, 11 aa, Homo Sapiens
RAANILVSDTL

SEQ ID NO: 69130 - protein, 11 aa, Homo Sapiens
RAFQAHKEENW

SEQ ID NO: 69131 - protein, 11 aa, Homo Sapiens
RAQAGEFGDRL

SEQ ID NO: 69132 - protein, 11 aa, Homo Sapiens
REVDLKNGHNL

SEQ ID NO: 69133 - protein, 11 aa, Homo Sapiens
RIAEALSKMKL

SEQ ID NO: 69134 - protein, 11 aa, Homo Sapiens
RIAEIIKGELW

SEQ ID NO: 69135 - protein, 11 aa, Homo Sapiens
RIAQGLSSESW

SEQ ID NO: 69136 - protein, 11 aa, Homo Sapiens
RICEVINEAVW

SEQ ID NO: 69137 - protein, 11 aa, Homo Sapiens
RIDQKIYGELW

SEQ ID NO: 69138 - protein, 11 aa, Homo Sapiens
RIEDPQIQAHW

SEQ ID NO: 69139 - protein, 11 aa, Homo Sapiens
RIFNDSDFTGF

SEQ ID NO: 69140 - protein, 11 aa, Homo Sapiens
RIHNELSPLKL

SEQ ID NO: 69141 - protein, 11 aa, Homo Sapiens
RIHSGEKSESI

SEQ ID NO: 69142 - protein, 11 aa, Homo Sapiens
RIIDEEGVESI

SEQ ID NO: 69143 - protein, 11 aa, Homo Sapiens
RIIDNMGQEVI

SEQ ID NO: 69144 - protein, 11 aa, Homo Sapiens
RIIDVIDKELI

SEQ ID NO: 69145 - protein, 11 aa, Homo Sapiens
RIIEENIPELL

SEQ ID NO: 69146 - protein, 11 aa, Homo Sapiens
RIIEETLALKF

SEQ ID NO: 69147 - protein, 11 aa, Homo Sapiens
RIIGAKDHASI

SEQ ID NO: 69148 - protein, 11 aa, Homo Sapiens
RIINEPTAAAI

SEQ ID NO: 69149 - protein, 11 aa, Homo Sapiens
RIKENKGEERL

SEQ ID NO: 69150 - protein, 11 aa, Homo Sapiens
RILDMGFADTM

SEQ ID NO: 69151 - protein, 11 aa, Homo Sapiens
RIMDEKTASEL

SEQ ID NO: 69152 - protein, 11 aa, Homo Sapiens
RIMQDFESDTF

SEQ ID NO: 69153 - protein, 11 aa, Homo Sapiens
RINEDPKDALL

SEQ ID NO: 69154 - protein, 11 aa, Homo Sapiens
RIVDDCGGAFT

SEQ ID NO: 69155 - protein, 11 aa, Homo Sapiens
RIVDDWANDGW

SEQ ID NO: 69156 - protein, 11 aa, Homo Sapiens
RIVPSEVEPFL

SEQ ID NO: 69157 - protein, 11 aa, Homo Sapiens
RIYNDDKNTYI

SEQ ID NO: 69158 - protein, 11 aa, Homo Sapiens
RLAEETGVHII

SEQ ID NO: 69159 - protein, 11 aa, Homo Sapiens
RLAELTVDEFL

SEQ ID NO: 69160 - protein, 11 aa, Homo Sapiens
RLAEYFIGDVF

SEQ ID NO: 69161 - protein, 11 aa, Homo Sapiens
RLALFNPDVCW

SEQ ID NO: 69162 - protein, 11 aa, Homo Sapiens
RLAQDYLQCVL

SEQ ID NO: 69163 - protein, 11 aa, Homo Sapiens
RLCPNSTGAEI

SEQ ID NO: 69164 - protein, 11 aa, Homo Sapiens
RLCQPPVDGDL

SEQ ID NO: 69165 - protein, 11 aa, Homo Sapiens
RLDIDPETITW

SEQ ID NO: 69166 - protein, 11 aa, Homo Sapiens
RLEDELGGQFL

SEQ ID NO: 69167 - protein, 11 aa, Homo Sapiens
RLEEASLLHQF

SEQ ID NO: 69168 - protein, 11 aa, Homo Sapiens
RLEIEAENHYW

SEQ ID NO: 69169 - protein, 11 aa, Homo Sapiens
RLEKPAKYDDI

SEQ ID NO: 69170 - protein, 11 aa, Homo Sapiens
RLESIISGAAL

SEQ ID NO: 69171 - protein, 11 aa, Homo Sapiens
RLESNKEGTRW

SEQ ID NO: 69172 - protein, 11 aa, Homo Sapiens
RLESRTQLVTM

SEQ ID NO: 69173 - protein, 11 aa, Homo Sapiens
RLFDANKAELF

SEQ ID NO: 69174 - protein, 11 aa, Homo Sapiens
RLFDDSTVTTV

SEQ ID NO: 69175 - protein, 11 aa, Homo Sapiens
RLFDEGTISKW

SEQ ID NO: 69176 - protein, 11 aa, Homo Sapiens
RLFDEPQLASL

SEQ ID NO: 69177 - protein, 11 aa, Homo Sapiens
RLFDTQSKEKL

SEQ ID NO: 69178 - protein, 11 aa, Homo Sapiens
RLFEAEAQDLF

SEQ ID NO: 69179 - protein, 11 aa, Homo Sapiens
RLFEMGFAEQL

SEQ ID NO: 69180 - protein, 11 aa, Homo Sapiens
RLFGDEAAEQW

SEQ ID NO: 69181 - protein, 11 aa, Homo Sapiens
RLFGEDEVEVL

SEQ ID NO: 69182 - protein, 11 aa, Homo Sapiens
RLFGPVDSEQL

SEQ ID NO: 69183 - protein, 11 aa, Homo Sapiens
RLFILDEADKL

SEQ ID NO: 69184 - protein, 11 aa, Homo Sapiens
RLFKTALQEEI

SEQ ID NO: 69185 - protein, 11 aa, Homo Sapiens
RLFNDPVAMVL

SEQ ID NO: 69186 - protein, 11 aa, Homo Sapiens
RLFPNSFNDKF

SEQ ID NO: 69187 - protein, 11 aa, Homo Sapiens
RLFRAQDPDQL

SEQ ID NO: 69188 - protein, 11 aa, Homo Sapiens
RLFTEKVNNTF

SEQ ID NO: 69189 - protein, 11 aa, Homo Sapiens
RLHLSERRDSF

SEQ ID NO: 69190 - protein, 11 aa, Homo Sapiens
RLHQEGKFVEL

SEQ ID NO: 69191 - protein, 11 aa, Homo Sapiens
RLIALDAAEEF

SEQ ID NO: 69192 - protein, 11 aa, Homo Sapiens
RLIDDMVAQAM

SEQ ID NO: 69193 - protein, 11 aa, Homo Sapiens
RLIDGREAVTF

SEQ ID NO: 69194 - protein, 11 aa, Homo Sapiens
RLIEAGEQLGF

SEQ ID NO: 69195 - protein, 11 aa, Homo Sapiens
RLIEPPHTDSL

SEQ ID NO: 69196 - protein, 11 aa, Homo Sapiens
RLIFQPIEESF

SEQ ID NO: 69197 - protein, 11 aa, Homo Sapiens
RLIGDAAKNQL

SEQ ID NO: 69198 - protein, 11 aa, Homo Sapiens
RLIHEPSAALL

SEQ ID NO: 69199 - protein, 11 aa, Homo Sapiens
RLIHEQDLEWL

SEQ ID NO: 69200 - protein, 11 aa, Homo Sapiens
RLIKHAVQERL

SEQ ID NO: 69201 - protein, 11 aa, Homo Sapiens
RLILYNDGDSL

SEQ ID NO: 69202 - protein, 11 aa, Homo Sapiens
RLIQQVAQEIW

SEQ ID NO: 69203 - protein, 11 aa, Homo Sapiens
RLISEAQIQEF

SEQ ID NO: 69204 - protein, 11 aa, Homo Sapiens
RLKAAEADSKL

SEQ ID NO: 69205 - protein, 11 aa, Homo Sapiens
RLKSDERPVHI

SEQ ID NO: 69206 - protein, 11 aa, Homo Sapiens
RLLAEEEQQLL

SEQ ID NO: 69207 - protein, 11 aa, Homo Sapiens
RLLAEIGAVTL

SEQ ID NO: 69208 - protein, 11 aa, Homo Sapiens
RLLAGPDTEVL

SEQ ID NO: 69209 - protein, 11 aa, Homo Sapiens
RLLDDRHDSGL

SEQ ID NO: 69210 - protein, 11 aa, Homo Sapiens
RLLDKLVGEFL

SEQ ID NO: 69211 - protein, 11 aa, Homo Sapiens
RLLEDKKITVL

SEQ ID NO: 69212 - protein, 11 aa, Homo Sapiens
RLLEDSALSKY

SEQ ID NO: 69213 - protein, 11 aa, Homo Sapiens
RLLEEKDPVPL

SEQ ID NO: 69214 - protein, 11 aa, Homo Sapiens
RLLFSSDSDLL

SEQ ID NO: 69215 - protein, 11 aa, Homo Sapiens
RLLGTPSQETW

SEQ ID NO: 69216 - protein, 11 aa, Homo Sapiens
RLLHHDDPEVL

SEQ ID NO: 69217 - protein, 11 aa, Homo Sapiens
RLLKGKKGEQM

SEQ ID NO: 69218 - protein, 11 aa, Homo Sapiens
RLLQEDSSPLL

SEQ ID NO: 69219 - protein, 11 aa, Homo Sapiens
RLLSELEYEAW

SEQ ID NO: 69220 - protein, 11 aa, Homo Sapiens
RLLVFTSDDTF

SEQ ID NO: 69221 - protein, 11 aa, Homo Sapiens
RLMDEFKIGEL

SEQ ID NO: 69222 - protein, 11 aa, Homo Sapiens
RLMNDMTAVAL

SEQ ID NO: 69223 - protein, 11 aa, Homo Sapiens
RLMNETTAVAL

SEQ ID NO: 69224 - protein, 11 aa, Homo Sapiens
RLNYEHDNISL

SEQ ID NO: 69225 - protein, 11 aa, Homo Sapiens
RLPAAGVGDMV

SEQ ID NO: 69226 - protein, 11 aa, Homo Sapiens
RLPADTCLLEF

SEQ ID NO: 69227 - protein, 11 aa, Homo Sapiens
RLPDHLIKDLF

SEQ ID NO: 69228 - protein, 11 aa, Homo Sapiens
RLPDNYTQDTW

SEQ ID NO: 69229 - protein, 11 aa, Homo Sapiens
RLPGFSDSNVI

SEQ ID NO: 69230 - protein, 11 aa, Homo Sapiens
RLPPEIFGDAL

SEQ ID NO: 69231 - protein, 11 aa, Homo Sapiens
RLPSSSSGDQL

SEQ ID NO: 69232 - protein, 11 aa, Homo Sapiens
RLPVGGFADLM

SEQ ID NO: 69233 - protein, 11 aa, Homo Sapiens
RLQAEEKAHAF

SEQ ID NO: 69234 - protein, 11 aa, Homo Sapiens
RLQEALDAEML

SEQ ID NO: 69235 - protein, 11 aa, Homo Sapiens
RLQIEDFEARI

SEQ ID NO: 69236 - protein, 11 aa, Homo Sapiens
RLQLEKAAWRW

SEQ ID NO: 69237 - protein, 11 aa, Homo Sapiens
RLQQLFKGSQF

SEQ ID NO: 69238 - protein, 11 aa, Homo Sapiens
RLQYAIISEAW

SEQ ID NO: 69239 - protein, 11 aa, Homo Sapiens
RLREEQQRERL

SEQ ID NO: 69240 - protein, 11 aa, Homo Sapiens
RLRYPVTPELL

SEQ ID NO: 69241 - protein, 11 aa, Homo Sapiens
RLSLPESTESF

SEQ ID NO: 69242 - protein, 11 aa, Homo Sapiens
RLSQATDLEQL

SEQ ID NO: 69243 - protein, 11 aa, Homo Sapiens
RLVAGPRTDTL

SEQ ID NO: 69244 - protein, 11 aa, Homo Sapiens
RLVAGSTDQLL

SEQ ID NO: 69245 - protein, 11 aa, Homo Sapiens
RLVHTTAIEHF

SEQ ID NO: 69246 - protein, 11 aa, Homo Sapiens
RLVPKHEEEAF

SEQ ID NO: 69247 - protein, 11 aa, Homo Sapiens
RLVRDKDTDKF

SEQ ID NO: 69248 - protein, 11 aa, Homo Sapiens
RLWEDSAGEKW

SEQ ID NO: 69249 - protein, 11 aa, Homo Sapiens
RLWGDHGQEAL

SEQ ID NO: 69250 - protein, 11 aa, Homo Sapiens
RLYAESDYDAF

SEQ ID NO: 69251 - protein, 11 aa, Homo Sapiens
RLYAGPEVDIW

SEQ ID NO: 69252 - protein, 11 aa, Homo Sapiens
RLYDLDKDEKI

SEQ ID NO: 69253 - protein, 11 aa, Homo Sapiens
RLYEAYLPETF

SEQ ID NO: 69254 - protein, 11 aa, Homo Sapiens
RLYEDSGYSSF

SEQ ID NO: 69255 - protein, 11 aa, Homo Sapiens
RLYHEADKTYM

SEQ ID NO: 69256 - protein, 11 aa, Homo Sapiens
RLYSENDRLRI

SEQ ID NO: 69257 - protein, 11 aa, Homo Sapiens
RLYTEDEFEKF

SEQ ID NO: 69258 - protein, 11 aa, Homo Sapiens
RLYTEEAFDKL

SEQ ID NO: 69259 - protein, 11 aa, Homo Sapiens
RMAPDHEKACI

SEQ ID NO: 69260 - protein, 11 aa, Homo Sapiens
RMENGVLGNAL

SEQ ID NO: 69261 - protein, 11 aa, Homo Sapiens
RMIHEDTRHLL

SEQ ID NO: 69262 - protein, 11 aa, Homo Sapiens
RMQLSDDEGHF

SEQ ID NO: 69263 - protein, 11 aa, Homo Sapiens
RMSYNEKSDIW

SEQ ID NO: 69264 - protein, 11 aa, Homo Sapiens
RQAAEDKSWRV

SEQ ID NO: 69265 - protein, 11 aa, Homo Sapiens
RQAAGKIFEIF

SEQ ID NO: 69266 - protein, 11 aa, Homo Sapiens
RQAAKTEIEKL

SEQ ID NO: 69267 - protein, 11 aa, Homo Sapiens
RQAATEFGWTL

SEQ ID NO: 69268 - protein, 11 aa, Homo Sapiens
RQADFEAHNIL

SEQ ID NO: 69269 - protein, 11 aa, Homo Sapiens
RQADTKAIQHL

SEQ ID NO: 69270 - protein, 11 aa, Homo Sapiens
RQALEEANAEL

SEQ ID NO: 69271 - protein, 11 aa, Homo Sapiens
RQALMPTLEAL

SEQ ID NO: 69272 - protein, 11 aa, Homo Sapiens
RQALPDSPERF

SEQ ID NO: 69273 - protein, 11 aa, Homo Sapiens
RQALVEFEDVL

SEQ ID NO: 69274 - protein, 11 aa, Homo Sapiens
RQAMPFKCMQL

SEQ ID NO: 69275 - protein, 11 aa, Homo Sapiens
RQAQASFRDGL

SEQ ID NO: 69276 - protein, 11 aa, Homo Sapiens
RQAQENATLLF

SEQ ID NO: 69277 - protein, 11 aa, Homo Sapiens
RQCEVLIRELW

SEQ ID NO: 69278 - protein, 11 aa, Homo Sapiens
RQDKRTVYVYL

SEQ ID NO: 69279 - protein, 11 aa, Homo Sapiens
RQEDVIATANL

SEQ ID NO: 69280 - protein, 11 aa, Homo Sapiens
RQENIELGEKL

SEQ ID NO: 69281 - protein, 11 aa, Homo Sapiens
RQEPYTLPQGF

SEQ ID NO: 69282 - protein, 11 aa, Homo Sapiens
RQETVAQAALL

SEQ ID NO: 69283 - protein, 11 aa, Homo Sapiens
RQFCSGSGHHL

SEQ ID NO: 69284 - protein, 11 aa, Homo Sapiens
RQFDEESLESF

SEQ ID NO: 69285 - protein, 11 aa, Homo Sapiens
RQFFNEPEENF

SEQ ID NO: 69286 - protein, 11 aa, Homo Sapiens
RQFMEIEPEML

SEQ ID NO: 69287 - protein, 11 aa, Homo Sapiens
RQFVEHASEKL

SEQ ID NO: 69288 - protein, 11 aa, Homo Sapiens
RQFVPIKVEQI

SEQ ID NO: 69289 - protein, 11 aa, Homo Sapiens
RQGKFEAAETL

SEQ ID NO: 69290 - protein, 11 aa, Homo Sapiens
RQGSPKILEHL

SEQ ID NO: 69291 - protein, 11 aa, Homo Sapiens
RQHAEHIFLSF

SEQ ID NO: 69292 - protein, 11 aa, Homo Sapiens
RQHEIDGKALF

SEQ ID NO: 69293 - protein, 11 aa, Homo Sapiens
RQHIQVFIDRF

SEQ ID NO: 69294 - protein, 11 aa, Homo Sapiens
RQHLQATGVSL

SEQ ID NO: 69295 - protein, 11 aa, Homo Sapiens
RQHPFEDGAKL

SEQ ID NO: 69296 - protein, 11 aa, Homo Sapiens
RQHQAGSDSLL

SEQ ID NO: 69297 - protein, 11 aa, Homo Sapiens
RQHSLPSSEHL

SEQ ID NO: 69298 - protein, 11 aa, Homo Sapiens
RQIASQLEQEW

SEQ ID NO: 69299 - protein, 11 aa, Homo Sapiens
RQIEEQKALAL

SEQ ID NO: 69300 - protein, 11 aa, Homo Sapiens
RQIEILELEDL

SEQ ID NO: 69301 - protein, 11 aa, Homo Sapiens
RQIIEQDKHAL

SEQ ID NO: 69302 - protein, 11 aa, Homo Sapiens
RQILEKKEGLF

SEQ ID NO: 69303 - protein, 11 aa, Homo Sapiens
RQIPLYIDDTL

SEQ ID NO: 69304 - protein, 11 aa, Homo Sapiens
RQISNIKKEKL

SEQ ID NO: 69305 - protein, 11 aa, Homo Sapiens
RQISTSGELSF

SEQ ID NO: 69306 - protein, 11 aa, Homo Sapiens
RQIYEEANKTM

SEQ ID NO: 69307 - protein, 11 aa, Homo Sapiens
RQLDEGEISTI

SEQ ID NO: 69308 - protein, 11 aa, Homo Sapiens
RQLEALENDNF

SEQ ID NO: 69309 - protein, 11 aa, Homo Sapiens
RQLEEYQGILL

SEQ ID NO: 69310 - protein, 11 aa, Homo Sapiens
RQLKDEAIVYL

SEQ ID NO: 69311 - protein, 11 aa, Homo Sapiens
RQLKKLDEDSL

SEQ ID NO: 69312 - protein, 11 aa, Homo Sapiens
RQLLLYEAEAL

SEQ ID NO: 69313 - protein, 11 aa, Homo Sapiens
RQLNEKLVQLI

SEQ ID NO: 69314 - protein, 11 aa, Homo Sapiens
RQLQQELADTL

SEQ ID NO: 69315 - protein, 11 aa, Homo Sapiens
RQLREQVNDLF

SEQ ID NO: 69316 - protein, 11 aa, Homo Sapiens
RQLSEEERGRL

SEQ ID NO: 69317 - protein, 11 aa, Homo Sapiens
RQLTANTGHTI

SEQ ID NO: 69318 - protein, 11 aa, Homo Sapiens
RQLWDSAVSHF

SEQ ID NO: 69319 - protein, 11 aa, Homo Sapiens
RQMQLEDGGQL

SEQ ID NO: 69320 - protein, 11 aa, Homo Sapiens
RQMQQKMKETL

SEQ ID NO: 69321 - protein, 11 aa, Homo Sapiens
RQNAEQHVTQL

SEQ ID NO: 69322 - protein, 11 aa, Homo Sapiens
RQNKESILEKF

SEQ ID NO: 69323 - protein, 11 aa, Homo Sapiens
RQNKTEAEQQI

SEQ ID NO: 69324 - protein, 11 aa, Homo Sapiens
RQNLDALLNQL

SEQ ID NO: 69325 - protein, 11 aa, Homo Sapiens
RQNLFQEAEEF

SEQ ID NO: 69326 - protein, 11 aa, Homo Sapiens
RQPRNPKTDKL

SEQ ID NO: 69327 - protein, 11 aa, Homo Sapiens
RQQALQHAQTL

SEQ ID NO: 69328 - protein, 11 aa, Homo Sapiens
RQQEQMKQQQW

SEQ ID NO: 69329 - protein, 11 aa, Homo Sapiens
RQQFEVNGHFF

SEQ ID NO: 69330 - protein, 11 aa, Homo Sapiens
RQQGKEVGETL

SEQ ID NO: 69331 - protein, 11 aa, Homo Sapiens
RQQGNEPSQIL

SEQ ID NO: 69332 - protein, 11 aa, Homo Sapiens
RQQHEGAQGAL

SEQ ID NO: 69333 - protein, 11 aa, Homo Sapiens
RQQLPLPYEQL

SEQ ID NO: 69334 - protein, 11 aa, Homo Sapiens
RQQLPTFLQQM

SEQ ID NO: 69335 - protein, 11 aa, Homo Sapiens
RQQLQTTRQEL

SEQ ID NO: 69336 - protein, 11 aa, Homo Sapiens
RQSFGTNSDVL

SEQ ID NO: 69337 - protein, 11 aa, Homo Sapiens
RQSLAESLFAW

SEQ ID NO: 69338 - protein, 11 aa, Homo Sapiens
RQTLSVVFDAF

SEQ ID NO: 69339 - protein, 11 aa, Homo Sapiens
RQTMEDLISLW

SEQ ID NO: 69340 - protein, 11 aa, Homo Sapiens
RQVDAEVAQQW

SEQ ID NO: 69341 - protein, 11 aa, Homo Sapiens
RQVGVGYVDSI

SEQ ID NO: 69342 - protein, 11 aa, Homo Sapiens
RQVTGVTRVTI

SEQ ID NO: 69343 - protein, 11 aa, Homo Sapiens
RQVVESVGNQM

SEQ ID NO: 69344 - protein, 11 aa, Homo Sapiens
RQWADDWLVHL

SEQ ID NO: 69345 - protein, 11 aa, Homo Sapiens
RQWEEQGELLL

SEQ ID NO: 69346 - protein, 11 aa, Homo Sapiens
RQYGDESTLAF

SEQ ID NO: 69347 - protein, 11 aa, Homo Sapiens
RQYGSEGRFTF

SEQ ID NO: 69348 - protein, 11 aa, Homo Sapiens
RQYSDMPPLTL

SEQ ID NO: 69349 - protein, 11 aa, Homo Sapiens
RSDPGLLTNTM

SEQ ID NO: 69350 - protein, 11 aa, Homo Sapiens
RSYQDPSNAQF

SEQ ID NO: 69351 - protein, 11 aa, Homo Sapiens
RTAGTLFGEGF

SEQ ID NO: 69352 - protein, 11 aa, Homo Sapiens
RTFKTVFAEHI

SEQ ID NO: 69353 - protein, 11 aa, Homo Sapiens
RTIADSLINSF

SEQ ID NO: 69354 - protein, 11 aa, Homo Sapiens
RTIAETEAAYL

SEQ ID NO: 69355 - protein, 11 aa, Homo Sapiens
RTILQHLSEAW

SEQ ID NO: 69356 - protein, 11 aa, Homo Sapiens
RVAEETIKDYF

SEQ ID NO: 69357 - protein, 11 aa, Homo Sapiens
RVDPNGSRYLL

SEQ ID NO: 69358 - protein, 11 aa, Homo Sapiens
RVFEDESGKHW

SEQ ID NO: 69359 - protein, 11 aa, Homo Sapiens
RVHDVLFGDVW

SEQ ID NO: 69360 - protein, 11 aa, Homo Sapiens
RVIDDSLVVGV

SEQ ID NO: 69361 - protein, 11 aa, Homo Sapiens
RVIEEAKTAFL

SEQ ID NO: 69362 - protein, 11 aa, Homo Sapiens
RVINEPTAAAL

SEQ ID NO: 69363 - protein, 11 aa, Homo Sapiens
RVISELQEACW

SEQ ID NO: 69364 - protein, 11 aa, Homo Sapiens
RVLPSIVNEVL

SEQ ID NO: 69365 - protein, 11 aa, Homo Sapiens
RVMDASAFEIF

SEQ ID NO: 69366 - protein, 11 aa, Homo Sapiens
RVMSEKDEYQF

SEQ ID NO: 69367 - protein, 11 aa, Homo Sapiens
RVNGQYIMEGL

SEQ ID NO: 69368 - protein, 11 aa, Homo Sapiens
RVREEHQGENL

SEQ ID NO: 69369 - protein, 11 aa, Homo Sapiens
RVVDDDGMTSL

SEQ ID NO: 69370 - protein, 11 aa, Homo Sapiens
RVVDEKTKDLI

SEQ ID NO: 69371 - protein, 11 aa, Homo Sapiens
RVWDVNTGEVL

SEQ ID NO: 69372 - protein, 11 aa, Homo Sapiens
SLAADAGLLQF

SEQ ID NO: 69373 - protein, 11 aa, Homo Sapiens
SLVASGKAELI

SEQ ID NO: 69374 - protein, 11 aa, Homo Sapiens
SLYQDQILEKF

SEQ ID NO: 69375 - protein, 11 aa, Homo Sapiens
SQCGAGVFEYF

SEQ ID NO: 69376 - protein, 11 aa, Homo Sapiens
SQEEPGKGSFW

SEQ ID NO: 69377 - protein, 11 aa, Homo Sapiens
SQEMDAGLQAW

SEQ ID NO: 69378 - protein, 11 aa, Homo Sapiens
SQGFLPHFQHF

SEQ ID NO: 69379 - protein, 11 aa, Homo Sapiens
SQHDGSITASL

SEQ ID NO: 69380 - protein, 11 aa, Homo Sapiens
SQINLSVENAW

SEQ ID NO: 69381 - protein, 11 aa, Homo Sapiens
SQSPALELDKF

SEQ ID NO: 69382 - protein, 11 aa, Homo Sapiens
SQSPGSSENQM

SEQ ID NO: 69383 - protein, 11 aa, Homo Sapiens
SQVALADKELL

SEQ ID NO: 69384 - protein, 11 aa, Homo Sapiens
SQVIIREGELL

SEQ ID NO: 69385 - protein, 11 aa, Homo Sapiens
TLIPHTDGEKL

SEQ ID NO: 69386 - protein, 11 aa, Homo Sapiens
TLQVNGRHEYL

SEQ ID NO: 69387 - protein, 11 aa, Homo Sapiens
TLVEDPAGCVW

SEQ ID NO: 69388 - protein, 11 aa, Homo Sapiens
TQANPGKGEGL

SEQ ID NO: 69389 - protein, 11 aa, Homo Sapiens
TQERGQESNRF

SEQ ID NO: 69390 - protein, 11 aa, Homo Sapiens
TQFFGFDTETF

SEQ ID NO: 69391 - protein, 11 aa, Homo Sapiens
VLLEEGEAQRL

SEQ ID NO: 69392 - protein, 11 aa, Homo Sapiens
VLLNEDGKQLL

SEQ ID NO: 69393 - protein, 11 aa, Homo Sapiens
VLPGFPDADSF

SEQ ID NO: 69394 - protein, 11 aa, Homo Sapiens
VMIDEDMTARI

SEQ ID NO: 69395 - protein, 11 aa, Homo Sapiens
VQEGHTAVVSF

SEQ ID NO: 69396 - protein, 11 aa, Homo Sapiens
VQEGQNLKITI

SEQ ID NO: 69397 - protein, 11 aa, Homo Sapiens
VQFDSGKLEAL

SEQ ID NO: 69398 - protein, 11 aa, Homo Sapiens
VQFPGDQDLRF

SEQ ID NO: 69399 - protein, 11 aa, Homo Sapiens
VQHSNVVINLI

SEQ ID NO: 69400 - protein, 11 aa, Homo Sapiens
VQQDPKHMEAW

SEQ ID NO: 69401 - protein, 11 aa, Homo Sapiens
VSDGNINSDRI

SEQ ID NO: 69402 - protein, 11 aa, Homo Sapiens
VVDRSQAGDRI

SEQ ID NO: 69403 - protein, 11 aa, Homo Sapiens
YEFDEQGHSTW

SEQ ID NO: 69404 - protein, 11 aa, Homo Sapiens
YLAADGKSTTW

SEQ ID NO: 69405 - protein, 11 aa, Homo Sapiens
YLAQPLLREVL

SEQ ID NO: 69406 - protein, 11 aa, Homo Sapiens
YLEKSGVLDTL

SEQ ID NO: 69407 - protein, 11 aa, Homo Sapiens
YLFGSDVVAQF

SEQ ID NO: 69408 - protein, 11 aa, Homo Sapiens
YLINPNGEVQW

SEQ ID NO: 69409 - protein, 11 aa, Homo Sapiens
YLVDDSFSQAL

SEQ ID NO: 69410 - protein, 11 aa, Homo Sapiens
YLVSPITGEKI

SEQ ID NO: 69411 - protein, 11 aa, Homo Sapiens
YLYESGETEKL

SEQ ID NO: 69412 - protein, 11 aa, Homo Sapiens
YMIGSEVGNYL

SEQ ID NO: 69413 - protein, 11 aa, Homo Sapiens
YQAKENDFDRL

SEQ ID NO: 69414 - protein, 11 aa, Homo Sapiens
YQDAAGPREAF

SEQ ID NO: 69415 - protein, 11 aa, Homo Sapiens
YQFIEPFEEKF

SEQ ID NO: 69416 - protein, 11 aa, Homo Sapiens
YQLDLPKANLL

SEQ ID NO: 69417 - protein, 11 aa, Homo Sapiens
YQLFDNDRTQL

SEQ ID NO: 69418 - protein, 11 aa, Homo Sapiens
YQLQTIKPENF

SEQ ID NO: 69419 - protein, 11 aa, Homo Sapiens
YVCDPVLGDKW

SEQ ID NO: 69420 - protein, 8 aa, Homo Sapiens
AQAEALRI

SEQ ID NO: 69421 - protein, 8 aa, Homo Sapiens
AQFKQLLI

SEQ ID NO: 69422 - protein, 8 aa, Homo Sapiens
AQFPSVAV

SEQ ID NO: 69423 - protein, 8 aa, Homo Sapiens
AQIQVQHV

SEQ ID NO: 69424 - protein, 8 aa, Homo Sapiens
AQLAVTKI

SEQ ID NO: 69425 - protein, 8 aa, Homo Sapiens
AQLPAHRV

SEQ ID NO: 69426 - protein, 8 aa, Homo Sapiens
AQQVCHAI

SEQ ID NO: 69427 - protein, 8 aa, Homo Sapiens
AQVLLHNV

SEQ ID NO: 69428 - protein, 8 aa, Homo Sapiens
AQYFLDKI

SEQ ID NO: 69429 - protein, 8 aa, Homo Sapiens
AQYQFTGI

SEQ ID NO: 69430 - protein, 8 aa, Homo Sapiens
FQRIVENV

SEQ ID NO: 69431 - protein, 8 aa, Homo Sapiens
FQTILTEI

SEQ ID NO: 69432 - protein, 8 aa, Homo Sapiens
FQVLQPQV

SEQ ID NO: 69433 - protein, 8 aa, Homo Sapiens
GKDAVEDL

SEQ ID NO: 69434 - protein, 8 aa, Homo Sapiens
GQCTQVRV

SEQ ID NO: 69435 - protein, 8 aa, Homo Sapiens
GQFKTYAI

SEQ ID NO: 69436 - protein, 8 aa, Homo Sapiens
GQIKIWEV

SEQ ID NO: 69437 - protein, 8 aa, Homo Sapiens
GQIVQSKI

SEQ ID NO: 69438 - protein, 8 aa, Homo Sapiens
GQLKGFAV

SEQ ID NO: 69439 - protein, 8 aa, Homo Sapiens
GQLKSVTI

SEQ ID NO: 69440 - protein, 8 aa, Homo Sapiens
GQVCLPVI

SEQ ID NO: 69441 - protein, 8 aa, Homo Sapiens
GQVIIHNI

SEQ ID NO: 69442 - protein, 8 aa, Homo Sapiens
GQWEVKKI

SEQ ID NO: 69443 - protein, 8 aa, Homo Sapiens
GSVVQFKI

SEQ ID NO: 69444 - protein, 8 aa, Homo Sapiens
HIFHAIAV

SEQ ID NO: 69445 - protein, 8 aa, Homo Sapiens
HQIIVQNV

SEQ ID NO: 69446 - protein, 8 aa, Homo Sapiens
HQQSIPAV

SEQ ID NO: 69447 - protein, 8 aa, Homo Sapiens
HQYVVPKI

SEQ ID NO: 69448 - protein, 8 aa, Homo Sapiens
HTICLWDI

SEQ ID NO: 69449 - protein, 8 aa, Homo Sapiens
IFCLQKLI

SEQ ID NO: 69450 - protein, 8 aa, Homo Sapiens
IQFPIQKI

SEQ ID NO: 69451 - protein, 8 aa, Homo Sapiens
IQHLIPKI

SEQ ID NO: 69452 - protein, 8 aa, Homo Sapiens
KGIVLEKV

SEQ ID NO: 69453 - protein, 8 aa, Homo Sapiens
KNICQFLV

SEQ ID NO: 69454 - protein, 8 aa, Homo Sapiens
KQIIHHLV

SEQ ID NO: 69455 - protein, 8 aa, Homo Sapiens
KQLIAKKI

SEQ ID NO: 69456 - protein, 8 aa, Homo Sapiens
KQLKAEVI

SEQ ID NO: 69457 - protein, 8 aa, Homo Sapiens
KQLTMYRV

SEQ ID NO: 69458 - protein, 8 aa, Homo Sapiens
KQLYLERV

SEQ ID NO: 69459 - protein, 8 aa, Homo Sapiens
KQMFVQRV

SEQ ID NO: 69460 - protein, 8 aa, Homo Sapiens
KQVQQPSV

SEQ ID NO: 69461 - protein, 8 aa, Homo Sapiens
KVHPAVVI

SEQ ID NO: 69462 - protein, 8 aa, Homo Sapiens
LQKKAILK

SEQ ID NO: 69463 - protein, 8 aa, Homo Sapiens
LQRVIDYI

SEQ ID NO: 69464 - protein, 8 aa, Homo Sapiens
MQIRIHQI

SEQ ID NO: 69465 - protein, 8 aa, Homo Sapiens
QQIKLWKV

SEQ ID NO: 69466 - protein, 8 aa, Homo Sapiens
QTIPLNKI

SEQ ID NO: 69467 - protein, 8 aa, Homo Sapiens
RCFYGFQI

SEQ ID NO: 69468 - protein, 8 aa, Homo Sapiens
RDYLHYHI

SEQ ID NO: 69469 - protein, 8 aa, Homo Sapiens
RILKSPEI

SEQ ID NO: 69470 - protein, 8 aa, Homo Sapiens
RIMKAQAL

SEQ ID NO: 69471 - protein, 8 aa, Homo Sapiens
RLKEAYSV

SEQ ID NO: 69472 - protein, 8 aa, Homo Sapiens
RLQIHQLI

SEQ ID NO: 69473 - protein, 8 aa, Homo Sapiens
RLQTALLV

SEQ ID NO: 69474 - protein, 8 aa, Homo Sapiens
RQFAAQTV

SEQ ID NO: 69475 - protein, 8 aa, Homo Sapiens
RQFSHRAI

SEQ ID NO: 69476 - protein, 8 aa, Homo Sapiens
RQHPGHLL

SEQ ID NO: 69477 - protein, 8 aa, Homo Sapiens
RQHPQPYI

SEQ ID NO: 69478 - protein, 8 aa, Homo Sapiens
RQHVLTRI

SEQ ID NO: 69479 - protein, 8 aa, Homo Sapiens
RQIDQFLV

SEQ ID NO: 69480 - protein, 8 aa, Homo Sapiens
RQIGQRTI

SEQ ID NO: 69481 - protein, 8 aa, Homo Sapiens
RQIKINEV

SEQ ID NO: 69482 - protein, 8 aa, Homo Sapiens
RQIKSFRV

SEQ ID NO: 69483 - protein, 8 aa, Homo Sapiens
RQISLNKV

SEQ ID NO: 69484 - protein, 8 aa, Homo Sapiens
RQKEIPRV

SEQ ID NO: 69485 - protein, 8 aa, Homo Sapiens
RQKFGYSV

SEQ ID NO: 69486 - protein, 8 aa, Homo Sapiens
RQKLDPKI

SEQ ID NO: 69487 - protein, 8 aa, Homo Sapiens
RQMFVNKV

SEQ ID NO: 69488 - protein, 8 aa, Homo Sapiens
RQMFVQRV

SEQ ID NO: 69489 - protein, 8 aa, Homo Sapiens
RQTVAVGV

SEQ ID NO: 69490 - protein, 8 aa, Homo Sapiens
RQVFQQTI

SEQ ID NO: 69491 - protein, 8 aa, Homo Sapiens
RQWLIEQI

SEQ ID NO: 69492 - protein, 8 aa, Homo Sapiens
RQYKDYKI

SEQ ID NO: 69493 - protein, 8 aa, Homo Sapiens
RSFQTSAI

SEQ ID NO: 69494 - protein, 8 aa, Homo Sapiens
RTFKGFQI

SEQ ID NO: 69495 - protein, 8 aa, Homo Sapiens
RTIKLEHV

SEQ ID NO: 69496 - protein, 8 aa, Homo Sapiens
RTMLVRKI

SEQ ID NO: 69497 - protein, 8 aa, Homo Sapiens
RVLRVYSI

SEQ ID NO: 69498 - protein, 8 aa, Homo Sapiens
RVVKLNEV

SEQ ID NO: 69499 - protein, 8 aa, Homo Sapiens
SQCLSKLV

SEQ ID NO: 69500 - protein, 8 aa, Homo Sapiens
SQFIEPKI

SEQ ID NO: 69501 - protein, 8 aa, Homo Sapiens
SQFLYPKV

SEQ ID NO: 69502 - protein, 8 aa, Homo Sapiens
SQIKLYNI

SEQ ID NO: 69503 - protein, 8 aa, Homo Sapiens
SQLILHLI

SEQ ID NO: 69504 - protein, 8 aa, Homo Sapiens
SQLRVAKV

SEQ ID NO: 69505 - protein, 8 aa, Homo Sapiens
SQSLLPAI

SEQ ID NO: 69506 - protein, 8 aa, Homo Sapiens
SQTIQPKV

SEQ ID NO: 69507 - protein, 8 aa, Homo Sapiens
TQLGAFYI

SEQ ID NO: 69508 - protein, 8 aa, Homo Sapiens
VQIKQETI

SEQ ID NO: 69509 - protein, 8 aa, Homo Sapiens
VQIRIFKI

SEQ ID NO: 69510 - protein, 8 aa, Homo Sapiens
VQLLIPRI

SEQ ID NO: 69511 - protein, 8 aa, Homo Sapiens
VQRLEPVI

SEQ ID NO: 69512 - protein, 8 aa, Homo Sapiens
YLRIADLI

SEQ ID NO: 69513 - protein, 8 aa, Homo Sapiens
YQFRLIVI

SEQ ID NO: 69514 - protein, 8 aa, Homo Sapiens
YQIAVTKV

SEQ ID NO: 69515 - protein, 8 aa, Homo Sapiens
YQIFQELI

SEQ ID NO: 69516 - protein, 8 aa, Homo Sapiens
YQIIMTMI

SEQ ID NO: 69517 - protein, 9 aa, Homo Sapiens
AAFEKALEV

SEQ ID NO: 69518 - protein, 9 aa, Homo Sapiens
AAGAVFLSV

SEQ ID NO: 69519 - protein, 9 aa, Homo Sapiens
AAHQIVQLI

SEQ ID NO: 69520 - protein, 9 aa, Homo Sapiens
AALKLPLLV

SEQ ID NO: 69521 - protein, 9 aa, Homo Sapiens
AAMSVAQRV

SEQ ID NO: 69522 - protein, 9 aa, Homo Sapiens
AASPIITLV

SEQ ID NO: 69523 - protein, 9 aa, Homo Sapiens
AAYKEAFEI

SEQ ID NO: 69524 - protein, 9 aa, Homo Sapiens
AETAVQLFI

SEQ ID NO: 69525 - protein, 9 aa, Homo Sapiens
AETRVFLEV

SEQ ID NO: 69526 - protein, 9 aa, Homo Sapiens
AFSDVILAV

SEQ ID NO: 69527 - protein, 9 aa, Homo Sapiens
AGFAFLTGV

SEQ ID NO: 69528 - protein, 9 aa, Homo Sapiens
AIARICQTV

SEQ ID NO: 69529 - protein, 9 aa, Homo Sapiens
AIFAIPLQI

SEQ ID NO: 69530 - protein, 9 aa, Homo Sapiens
AIFQIIQSI

SEQ ID NO: 69531 - protein, 9 aa, Homo Sapiens
AIFSKVMVI

SEQ ID NO: 69532 - protein, 9 aa, Homo Sapiens
AIINLFHLI

SEQ ID NO: 69533 - protein, 9 aa, Homo Sapiens
AIMDIVIKV

SEQ ID NO: 69534 - protein, 9 aa, Homo Sapiens
AISGMILSI

SEQ ID NO: 69535 - protein, 9 aa, Homo Sapiens
AISSVRLYI

SEQ ID NO: 69536 - protein, 9 aa, Homo Sapiens
AITSVQQRL

SEQ ID NO: 69537 - protein, 9 aa, Homo Sapiens
AIVDCIISI

SEQ ID NO: 69538 - protein, 9 aa, Homo Sapiens
AIYHVIMSV

SEQ ID NO: 69539 - protein, 9 aa, Homo Sapiens
AIYPEPFLI

SEQ ID NO: 69540 - protein, 9 aa, Homo Sapiens
ALAATVFCV

SEQ ID NO: 69541 - protein, 9 aa, Homo Sapiens
ALAKHLIKI

SEQ ID NO: 69542 - protein, 9 aa, Homo Sapiens
ALAKVLLSL

SEQ ID NO: 69543 - protein, 9 aa, Homo Sapiens
ALAPSTMKI

SEQ ID NO: 69544 - protein, 9 aa, Homo Sapiens
ALAQIPQKV

SEQ ID NO: 69545 - protein, 9 aa, Homo Sapiens
ALAQPVTTV

SEQ ID NO: 69546 - protein, 9 aa, Homo Sapiens
ALASEPLKV

SEQ ID NO: 69547 - protein, 9 aa, Homo Sapiens
ALCNIHENI

SEQ ID NO: 69548 - protein, 9 aa, Homo Sapiens
ALCPRIHEV

SEQ ID NO: 69549 - protein, 9 aa, Homo Sapiens
ALCVIRNLI

SEQ ID NO: 69550 - protein, 9 aa, Homo Sapiens
ALCVLAQTV

SEQ ID NO: 69551 - protein, 9 aa, Homo Sapiens
ALDAHQQSI

SEQ ID NO: 69552 - protein, 9 aa, Homo Sapiens
ALFDAQAQV

SEQ ID NO: 69553 - protein, 9 aa, Homo Sapiens
ALFNGAQKL

SEQ ID NO: 69554 - protein, 9 aa, Homo Sapiens
ALFPERITV

SEQ ID NO: 69555 - protein, 9 aa, Homo Sapiens
ALFQRPPLI

SEQ ID NO: 69556 - protein, 9 aa, Homo Sapiens
ALHDILTEI

SEQ ID NO: 69557 - protein, 9 aa, Homo Sapiens
ALIAHYPRI

SEQ ID NO: 69558 - protein, 9 aa, Homo Sapiens
ALIPIPLAV

SEQ ID NO: 69559 - protein, 9 aa, Homo Sapiens
ALKKADIGV

SEQ ID NO: 69560 - protein, 9 aa, Homo Sapiens
ALKKAEIGI

SEQ ID NO: 69561 - protein, 9 aa, Homo Sapiens
ALKNLQDKI

SEQ ID NO: 69562 - protein, 9 aa, Homo Sapiens
ALLAKILQI

SEQ ID NO: 69563 - protein, 9 aa, Homo Sapiens
ALLAYTLGV

SEQ ID NO: 69564 - protein, 9 aa, Homo Sapiens
ALLGILQHV

SEQ ID NO: 69565 - protein, 9 aa, Homo Sapiens
ALLNKTMRI

SEQ ID NO: 69566 - protein, 9 aa, Homo Sapiens
ALLRVTPFI

SEQ ID NO: 69567 - protein, 9 aa, Homo Sapiens
ALLRYVLSI

SEQ ID NO: 69568 - protein, 9 aa, Homo Sapiens
ALNAVRLLV

SEQ ID NO: 69569 - protein, 9 aa, Homo Sapiens
ALNELLQHV

SEQ ID NO: 69570 - protein, 9 aa, Homo Sapiens
ALNRLFQQI

SEQ ID NO: 69571 - protein, 9 aa, Homo Sapiens
ALNRSVQVV

SEQ ID NO: 69572 - protein, 9 aa, Homo Sapiens
ALNSGILTI

SEQ ID NO: 69573 - protein, 9 aa, Homo Sapiens
ALNSKILSV

SEQ ID NO: 69574 - protein, 9 aa, Homo Sapiens
ALNYLQLLV

SEQ ID NO: 69575 - protein, 9 aa, Homo Sapiens
ALPKIILAV

SEQ ID NO: 69576 - protein, 9 aa, Homo Sapiens
ALPNVYEVI

SEQ ID NO: 69577 - protein, 9 aa, Homo Sapiens
ALRALQDQV

SEQ ID NO: 69578 - protein, 9 aa, Homo Sapiens
ALRWSVDSI

SEQ ID NO: 69579 - protein, 9 aa, Homo Sapiens
ALSDIFQAV

SEQ ID NO: 69580 - protein, 9 aa, Homo Sapiens
ALSKVHFTA

SEQ ID NO: 69581 - protein, 9 aa, Homo Sapiens
ALSPSYLTV

SEQ ID NO: 69582 - protein, 9 aa, Homo Sapiens
ALSRLKLKL

SEQ ID NO: 69583 - protein, 9 aa, Homo Sapiens
ALSTLRQKI

SEQ ID NO: 69584 - protein, 9 aa, Homo Sapiens
ALTDVILCV

SEQ ID NO: 69585 - protein, 9 aa, Homo Sapiens
ALTSIAQKI

SEQ ID NO: 69586 - protein, 9 aa, Homo Sapiens
ALVRYYLQV

SEQ ID NO: 69587 - protein, 9 aa, Homo Sapiens
ALYCHQLNI

SEQ ID NO: 69588 - protein, 9 aa, Homo Sapiens
ALYEQSLHI

SEQ ID NO: 69589 - protein, 9 aa, Homo Sapiens
ALYGQPLLL

SEQ ID NO: 69590 - protein, 9 aa, Homo Sapiens
ALYPNVVQV

SEQ ID NO: 69591 - protein, 9 aa, Homo Sapiens
AMAKIQAKI

SEQ ID NO: 69592 - protein, 9 aa, Homo Sapiens
AMAPVTTRI

SEQ ID NO: 69593 - protein, 9 aa, Homo Sapiens
AMFGKLMTI

SEQ ID NO: 69594 - protein, 9 aa, Homo Sapiens
AMKPKPLSV

SEQ ID NO: 69595 - protein, 9 aa, Homo Sapiens
AMYPKYDRI

SEQ ID NO: 69596 - protein, 9 aa, Homo Sapiens
AQAAALYKV

SEQ ID NO: 69597 - protein, 9 aa, Homo Sapiens
AQAALAVNI

SEQ ID NO: 69598 - protein, 9 aa, Homo Sapiens
AQAELAQKL

SEQ ID NO: 69599 - protein, 9 aa, Homo Sapiens
AQAIKGMHI

SEQ ID NO: 69600 - protein, 9 aa, Homo Sapiens
AQAKIYWNL

SEQ ID NO: 69601 - protein, 9 aa, Homo Sapiens
AQAKPALKI

SEQ ID NO: 69602 - protein, 9 aa, Homo Sapiens
AQALAKLTI

SEQ ID NO: 69603 - protein, 9 aa, Homo Sapiens
AQALVKQDL

SEQ ID NO: 69604 - protein, 9 aa, Homo Sapiens
AQAMIFCHT

SEQ ID NO: 69605 - protein, 9 aa, Homo Sapiens
AQAPDLQRV

SEQ ID NO: 69606 - protein, 9 aa, Homo Sapiens
AQAVTQLMV

SEQ ID NO: 69607 - protein, 9 aa, Homo Sapiens
AQCLLRLVL

SEQ ID NO: 69608 - protein, 9 aa, Homo Sapiens
AQCNKAINI

SEQ ID NO: 69609 - protein, 9 aa, Homo Sapiens
AQCPIVERL

SEQ ID NO: 69610 - protein, 9 aa, Homo Sapiens
AQDFRVLYV

SEQ ID NO: 69611 - protein, 9 aa, Homo Sapiens
AQFAARAII

SEQ ID NO: 69612 - protein, 9 aa, Homo Sapiens
AQFEHTILL

SEQ ID NO: 69613 - protein, 9 aa, Homo Sapiens
AQFEHTLLV

SEQ ID NO: 69614 - protein, 9 aa, Homo Sapiens
AQFGYYFRV

SEQ ID NO: 69615 - protein, 9 aa, Homo Sapiens
AQFKGTQSL

SEQ ID NO: 69616 - protein, 9 aa, Homo Sapiens
AQFLYAQKL

SEQ ID NO: 69617 - protein, 9 aa, Homo Sapiens
AQFPESFTV

SEQ ID NO: 69618 - protein, 9 aa, Homo Sapiens
AQFSAQPHV

SEQ ID NO: 69619 - protein, 9 aa, Homo Sapiens
AQFSKSIEV

SEQ ID NO: 69620 - protein, 9 aa, Homo Sapiens
AQFSLPCEV

SEQ ID NO: 69621 - protein, 9 aa, Homo Sapiens
AQFTTALRL

SEQ ID NO: 69622 - protein, 9 aa, Homo Sapiens
AQFVLLTQI

SEQ ID NO: 69623 - protein, 9 aa, Homo Sapiens
AQGATLLHI

SEQ ID NO: 69624 - protein, 9 aa, Homo Sapiens
AQGGVLPNI

SEQ ID NO: 69625 - protein, 9 aa, Homo Sapiens
AQGKMKLLI

SEQ ID NO: 69626 - protein, 9 aa, Homo Sapiens
AQGKVKLVV

SEQ ID NO: 69627 - protein, 9 aa, Homo Sapiens
AQGLFTNCV

SEQ ID NO: 69628 - protein, 9 aa, Homo Sapiens
AQGQQTLKV

SEQ ID NO: 69629 - protein, 9 aa, Homo Sapiens
AQGVFQILI

SEQ ID NO: 69630 - protein, 9 aa, Homo Sapiens
AQHDDELTI

SEQ ID NO: 69631 - protein, 9 aa, Homo Sapiens
AQHGVCSVL

SEQ ID NO: 69632 - protein, 9 aa, Homo Sapiens
AQHIVPCTI

SEQ ID NO: 69633 - protein, 9 aa, Homo Sapiens
AQHKFLVAV

SEQ ID NO: 69634 - protein, 9 aa, Homo Sapiens
AQHKWILQL

SEQ ID NO: 69635 - protein, 9 aa, Homo Sapiens
AQHPNIVTV

SEQ ID NO: 69636 - protein, 9 aa, Homo Sapiens
AQHQTKLYL

SEQ ID NO: 69637 - protein, 9 aa, Homo Sapiens
AQHSIVLPL

SEQ ID NO: 69638 - protein, 9 aa, Homo Sapiens
AQHSVPLQL

SEQ ID NO: 69639 - protein, 9 aa, Homo Sapiens
AQHVEVESI

SEQ ID NO: 69640 - protein, 9 aa, Homo Sapiens
AQIDHYLGL

SEQ ID NO: 69641 - protein, 9 aa, Homo Sapiens
AQIELLQLL

SEQ ID NO: 69642 - protein, 9 aa, Homo Sapiens
AQIHGIVLV

SEQ ID NO: 69643 - protein, 9 aa, Homo Sapiens
AQIHTPVAI

SEQ ID NO: 69644 - protein, 9 aa, Homo Sapiens
AQIKPFYTV

SEQ ID NO: 69645 - protein, 9 aa, Homo Sapiens
AQILGPLSI

SEQ ID NO: 69646 - protein, 9 aa, Homo Sapiens
AQILQILTV

SEQ ID NO: 69647 - protein, 9 aa, Homo Sapiens
AQILRLLHI

SEQ ID NO: 69648 - protein, 9 aa, Homo Sapiens
AQIPLAAVI

SEQ ID NO: 69649 - protein, 9 aa, Homo Sapiens
AQIPSKVSV

SEQ ID NO: 69650 - protein, 9 aa, Homo Sapiens
AQIRTIAII

SEQ ID NO: 69651 - protein, 9 aa, Homo Sapiens
AQIRYLTQV

SEQ ID NO: 69652 - protein, 9 aa, Homo Sapiens
AQITQKIGV

SEQ ID NO: 69653 - protein, 9 aa, Homo Sapiens
AQKEEQLKI

SEQ ID NO: 69654 - protein, 9 aa, Homo Sapiens
AQKPVVHLI

SEQ ID NO: 69655 - protein, 9 aa, Homo Sapiens
AQKRVLLQA

SEQ ID NO: 69656 - protein, 9 aa, Homo Sapiens
AQKTILLQV

SEQ ID NO: 69657 - protein, 9 aa, Homo Sapiens
AQLAAAAEI

SEQ ID NO: 69658 - protein, 9 aa, Homo Sapiens
AQLAEDLKV

SEQ ID NO: 69659 - protein, 9 aa, Homo Sapiens
AQLELISRI

SEQ ID NO: 69660 - protein, 9 aa, Homo Sapiens
AQLGAVVAV

SEQ ID NO: 69661 - protein, 9 aa, Homo Sapiens
AQLKSLELI

SEQ ID NO: 69662 - protein, 9 aa, Homo Sapiens
AQLLKALEV

SEQ ID NO: 69663 - protein, 9 aa, Homo Sapiens
AQLLLPVSI

SEQ ID NO: 69664 - protein, 9 aa, Homo Sapiens
AQLLVACKV

SEQ ID NO: 69665 - protein, 9 aa, Homo Sapiens
AQLPLKVEV

SEQ ID NO: 69666 - protein, 9 aa, Homo Sapiens
AQLPMSIRI

SEQ ID NO: 69667 - protein, 9 aa, Homo Sapiens
AQLPSLLSV

SEQ ID NO: 69668 - protein, 9 aa, Homo Sapiens
AQLPTIVAI

SEQ ID NO: 69669 - protein, 9 aa, Homo Sapiens
AQLSPQLTV

SEQ ID NO: 69670 - protein, 9 aa, Homo Sapiens
AQLSPTHQI

SEQ ID NO: 69671 - protein, 9 aa, Homo Sapiens
AQLTSTPAI

SEQ ID NO: 69672 - protein, 9 aa, Homo Sapiens
AQMDYQLRL

SEQ ID NO: 69673 - protein, 9 aa, Homo Sapiens
AQNARALKI

SEQ ID NO: 69674 - protein, 9 aa, Homo Sapiens
AQNGIPLRI

SEQ ID NO: 69675 - protein, 9 aa, Homo Sapiens
AQNGVSQLI

SEQ ID NO: 69676 - protein, 9 aa, Homo Sapiens
AQNKLFNKI

SEQ ID NO: 69677 - protein, 9 aa, Homo Sapiens
AQNLHQNLI

SEQ ID NO: 69678 - protein, 9 aa, Homo Sapiens
AQNPQIKRI

SEQ ID NO: 69679 - protein, 9 aa, Homo Sapiens
AQNQVLNLI

SEQ ID NO: 69680 - protein, 9 aa, Homo Sapiens
AQNRFLLEL

SEQ ID NO: 69681 - protein, 9 aa, Homo Sapiens
AQNRLHVSI

SEQ ID NO: 69682 - protein, 9 aa, Homo Sapiens
AQNRQEFAV

SEQ ID NO: 69683 - protein, 9 aa, Homo Sapiens
AQPGIQMKV

SEQ ID NO: 69684 - protein, 9 aa, Homo Sapiens
AQPLQPLQV

SEQ ID NO: 69685 - protein, 9 aa, Homo Sapiens
AQQELKLLL

SEQ ID NO: 69686 - protein, 9 aa, Homo Sapiens
AQQIIQLNI

SEQ ID NO: 69687 - protein, 9 aa, Homo Sapiens
AQQPHIAGV

SEQ ID NO: 69688 - protein, 9 aa, Homo Sapiens
AQQPTAVQV

SEQ ID NO: 69689 - protein, 9 aa, Homo Sapiens
AQQVVKQEL

SEQ ID NO: 69690 - protein, 9 aa, Homo Sapiens
AQRAEPMRI

SEQ ID NO: 69691 - protein, 9 aa, Homo Sapiens
AQRAVELFI

SEQ ID NO: 69692 - protein, 9 aa, Homo Sapiens
AQRCKELGI

SEQ ID NO: 69693 - protein, 9 aa, Homo Sapiens
AQSAVEILL

SEQ ID NO: 69694 - protein, 9 aa, Homo Sapiens
AQSESILKV

SEQ ID NO: 69695 - protein, 9 aa, Homo Sapiens
AQSGLIVSI

SEQ ID NO: 69696 - protein, 9 aa, Homo Sapiens
AQSGTIMAV

SEQ ID NO: 69697 - protein, 9 aa, Homo Sapiens
AQSKLALVL

SEQ ID NO: 69698 - protein, 9 aa, Homo Sapiens
AQSQAVTKI

SEQ ID NO: 69699 - protein, 9 aa, Homo Sapiens
AQSRIALAL

SEQ ID NO: 69700 - protein, 9 aa, Homo Sapiens
AQSSLDLFL

SEQ ID NO: 69701 - protein, 9 aa, Homo Sapiens
AQSTSIQRI

SEQ ID NO: 69702 - protein, 9 aa, Homo Sapiens
AQTFIALCA

SEQ ID NO: 69703 - protein, 9 aa, Homo Sapiens
AQTKVTFLI

SEQ ID NO: 69704 - protein, 9 aa, Homo Sapiens
AQTLLTQDV

SEQ ID NO: 69705 - protein, 9 aa, Homo Sapiens
AQTLQQYRV

SEQ ID NO: 69706 - protein, 9 aa, Homo Sapiens
AQTSYIQQI

SEQ ID NO: 69707 - protein, 9 aa, Homo Sapiens
AQTVANFNI

SEQ ID NO: 69708 - protein, 9 aa, Homo Sapiens
AQVALVNEV

SEQ ID NO: 69709 - protein, 9 aa, Homo Sapiens
AQVKAPLVL

SEQ ID NO: 69710 - protein, 9 aa, Homo Sapiens
AQVNLKYLL

SEQ ID NO: 69711 - protein, 9 aa, Homo Sapiens
AQVPIILAV

SEQ ID NO: 69712 - protein, 9 aa, Homo Sapiens
AQVPMNMTI

SEQ ID NO: 69713 - protein, 9 aa, Homo Sapiens
AQVPVFLAL

SEQ ID NO: 69714 - protein, 9 aa, Homo Sapiens
AQVVGVLKI

SEQ ID NO: 69715 - protein, 9 aa, Homo Sapiens
AQWHEQILV

SEQ ID NO: 69716 - protein, 9 aa, Homo Sapiens
AQWLIQRGV

SEQ ID NO: 69717 - protein, 9 aa, Homo Sapiens
AQYDGAYKV

SEQ ID NO: 69718 - protein, 9 aa, Homo Sapiens
AQYDRQIRL

SEQ ID NO: 69719 - protein, 9 aa, Homo Sapiens
AQYEHDLEV

SEQ ID NO: 69720 - protein, 9 aa, Homo Sapiens
AQYENPPHI

SEQ ID NO: 69721 - protein, 9 aa, Homo Sapiens
AQYFEPLTL

SEQ ID NO: 69722 - protein, 9 aa, Homo Sapiens
AQYGKKVMV

SEQ ID NO: 69723 - protein, 9 aa, Homo Sapiens
AQYKFVYQV

SEQ ID NO: 69724 - protein, 9 aa, Homo Sapiens
AQYLINARL

SEQ ID NO: 69725 - protein, 9 aa, Homo Sapiens
AQYLINVRL

SEQ ID NO: 69726 - protein, 9 aa, Homo Sapiens
AQYLLQNSV

SEQ ID NO: 69727 - protein, 9 aa, Homo Sapiens
AQYNFILVV

SEQ ID NO: 69728 - protein, 9 aa, Homo Sapiens
AQYNPKLDV

SEQ ID NO: 69729 - protein, 9 aa, Homo Sapiens
AQYPSEHLI

SEQ ID NO: 69730 - protein, 9 aa, Homo Sapiens
AQYRGILEA

SEQ ID NO: 69731 - protein, 9 aa, Homo Sapiens
AQYRLVTEI

SEQ ID NO: 69732 - protein, 9 aa, Homo Sapiens
ASCDKILVI

SEQ ID NO: 69733 - protein, 9 aa, Homo Sapiens
ASCGAIQYI

SEQ ID NO: 69734 - protein, 9 aa, Homo Sapiens
ASLVFPLLV

SEQ ID NO: 69735 - protein, 9 aa, Homo Sapiens
ASYSGLMRI

SEQ ID NO: 69736 - protein, 9 aa, Homo Sapiens
ATASVNLKV

SEQ ID NO: 69737 - protein, 9 aa, Homo Sapiens
ATCMAILHV

SEQ ID NO: 69738 - protein, 9 aa, Homo Sapiens
ATHLVILLI

SEQ ID NO: 69739 - protein, 9 aa, Homo Sapiens
ATMPVTMLI

SEQ ID NO: 69740 - protein, 9 aa, Homo Sapiens
ATVPIRLII

SEQ ID NO: 69741 - protein, 9 aa, Homo Sapiens
ATVVTQLLV

SEQ ID NO: 69742 - protein, 9 aa, Homo Sapiens
AVADILFLL

SEQ ID NO: 69743 - protein, 9 aa, Homo Sapiens
AVAKHNLNI

SEQ ID NO: 69744 - protein, 9 aa, Homo Sapiens
AVDPAILLI

SEQ ID NO: 69745 - protein, 9 aa, Homo Sapiens
AVHAEVFTI

SEQ ID NO: 69746 - protein, 9 aa, Homo Sapiens
AVHNVPLSV

SEQ ID NO: 69747 - protein, 9 aa, Homo Sapiens
AVSPYQQVI

SEQ ID NO: 69748 - protein, 9 aa, Homo Sapiens
AVSSIAQKI

SEQ ID NO: 69749 - protein, 9 aa, Homo Sapiens
AVTDASFKV

SEQ ID NO: 69750 - protein, 9 aa, Homo Sapiens
AVVDTVLAL

SEQ ID NO: 69751 - protein, 9 aa, Homo Sapiens
AVYRKALVI

SEQ ID NO: 69752 - protein, 9 aa, Homo Sapiens
DIRGKLLQV

SEQ ID NO: 69753 - protein, 9 aa, Homo Sapiens
DLAAVILHV

SEQ ID NO: 69754 - protein, 9 aa, Homo Sapiens
DSQPPVFKV

SEQ ID NO: 69755 - protein, 9 aa, Homo Sapiens
EAAEVILRV

SEQ ID NO: 69756 - protein, 9 aa, Homo Sapiens
EIVRESHSL

SEQ ID NO: 69757 - protein, 9 aa, Homo Sapiens
ELAEIVFKV

SEQ ID NO: 69758 - protein, 9 aa, Homo Sapiens
ELCDIILRV

SEQ ID NO: 69759 - protein, 9 aa, Homo Sapiens
ELFGKFLFI

SEQ ID NO: 69760 - protein, 9 aa, Homo Sapiens
ELLRIGLSV

SEQ ID NO: 69761 - protein, 9 aa, Homo Sapiens
ELSKIIQKV

SEQ ID NO: 69762 - protein, 9 aa, Homo Sapiens
ELSRIVLEV

SEQ ID NO: 69763 - protein, 9 aa, Homo Sapiens
ELYPEPLLV

SEQ ID NO: 69764 - protein, 9 aa, Homo Sapiens
EQAATQLKV

SEQ ID NO: 69765 - protein, 9 aa, Homo Sapiens
EQAQVKLLV

SEQ ID NO: 69766 - protein, 9 aa, Homo Sapiens
EQFHYFILI

SEQ ID NO: 69767 - protein, 9 aa, Homo Sapiens
EQGEIILKV

SEQ ID NO: 69768 - protein, 9 aa, Homo Sapiens
EQGKIQLLI

SEQ ID NO: 69769 - protein, 9 aa, Homo Sapiens
EQHKALLKV

SEQ ID NO: 69770 - protein, 9 aa, Homo Sapiens
EQIRLAQMI

SEQ ID NO: 69771 - protein, 9 aa, Homo Sapiens
EQQSVLQRI

SEQ ID NO: 69772 - protein, 9 aa, Homo Sapiens
EQYKFPVVI

SEQ ID NO: 69773 - protein, 9 aa, Homo Sapiens
ESYGNPLRV

SEQ ID NO: 69774 - protein, 9 aa, Homo Sapiens
FALRVQQLV

SEQ ID NO: 69775 - protein, 9 aa, Homo Sapiens
FASQVEQLI

SEQ ID NO: 69776 - protein, 9 aa, Homo Sapiens
FEFDIHQVI

SEQ ID NO: 69777 - protein, 9 aa, Homo Sapiens
FETIVKQQI

SEQ ID NO: 69778 - protein, 9 aa, Homo Sapiens
FIAPVTLKV

SEQ ID NO: 69779 - protein, 9 aa, Homo Sapiens
FIGDVTQKI

SEQ ID NO: 69780 - protein, 9 aa, Homo Sapiens
FISKEILTI

SEQ ID NO: 69781 - protein, 9 aa, Homo Sapiens
FITNIPFDV

SEQ ID NO: 69782 - protein, 9 aa, Homo Sapiens
FLADIVQKL

SEQ ID NO: 69783 - protein, 9 aa, Homo Sapiens
FLCPFHLSV

SEQ ID NO: 69784 - protein, 9 aa, Homo Sapiens
FLFQEPRSI

SEQ ID NO: 69785 - protein, 9 aa, Homo Sapiens
FLGTFILKV

SEQ ID NO: 69786 - protein, 9 aa, Homo Sapiens
FLHGPDQQV

SEQ ID NO: 69787 - protein, 9 aa, Homo Sapiens
FLLDKALLI

SEQ ID NO: 69788 - protein, 9 aa, Homo Sapiens
FLLEKPFSV

SEQ ID NO: 69789 - protein, 9 aa, Homo Sapiens
FLLHIQQQV

SEQ ID NO: 69790 - protein, 9 aa, Homo Sapiens
FLNEIQQSI

SEQ ID NO: 69791 - protein, 9 aa, Homo Sapiens
FLPRIQQQI

SEQ ID NO: 69792 - protein, 9 aa, Homo Sapiens
FLRNLQDSI

SEQ ID NO: 69793 - protein, 9 aa, Homo Sapiens
FLSSVIQNL

SEQ ID NO: 69794 - protein, 9 aa, Homo Sapiens
FLYSDEVQI

SEQ ID NO: 69795 - protein, 9 aa, Homo Sapiens
FMASQMLKV

SEQ ID NO: 69796 - protein, 9 aa, Homo Sapiens
FMFGQKLNV

SEQ ID NO: 69797 - protein, 9 aa, Homo Sapiens
FQAEIAQLM

SEQ ID NO: 69798 - protein, 9 aa, Homo Sapiens
FQALLPYAV

SEQ ID NO: 69799 - protein, 9 aa, Homo Sapiens
FQDELIRAI

SEQ ID NO: 69800 - protein, 9 aa, Homo Sapiens
FQDPVPLTV

SEQ ID NO: 69801 - protein, 9 aa, Homo Sapiens
FQFGVPQAL

SEQ ID NO: 69802 - protein, 9 aa, Homo Sapiens
FQGDIRLLM

SEQ ID NO: 69803 - protein, 9 aa, Homo Sapiens
FQHGKVEII

SEQ ID NO: 69804 - protein, 9 aa, Homo Sapiens
FQHKLGIAV

SEQ ID NO: 69805 - protein, 9 aa, Homo Sapiens
FQHTGIYSV

SEQ ID NO: 69806 - protein, 9 aa, Homo Sapiens
FQHVAAPYI

SEQ ID NO: 69807 - protein, 9 aa, Homo Sapiens
FQIGPCEGI

SEQ ID NO: 69808 - protein, 9 aa, Homo Sapiens
FQKLYDLYI

SEQ ID NO: 69809 - protein, 9 aa, Homo Sapiens
FQLIQKELI

SEQ ID NO: 69810 - protein, 9 aa, Homo Sapiens
FQNIRPLFI

SEQ ID NO: 69811 - protein, 9 aa, Homo Sapiens
FQNNVQVKV

SEQ ID NO: 69812 - protein, 9 aa, Homo Sapiens
FQNTFPHSI

SEQ ID NO: 69813 - protein, 9 aa, Homo Sapiens
FQQPKPLSV

SEQ ID NO: 69814 - protein, 9 aa, Homo Sapiens
FQRAVKDEL

SEQ ID NO: 69815 - protein, 9 aa, Homo Sapiens
FQSSAVMAL

SEQ ID NO: 69816 - protein, 9 aa, Homo Sapiens
FQSTTGHCV

SEQ ID NO: 69817 - protein, 9 aa, Homo Sapiens
FQTLKYLAI

SEQ ID NO: 69818 - protein, 9 aa, Homo Sapiens
FQVTRDLIV

SEQ ID NO: 69819 - protein, 9 aa, Homo Sapiens
FRVPTANVS

SEQ ID NO: 69820 - protein, 9 aa, Homo Sapiens
FSSDFTLKI

SEQ ID NO: 69821 - protein, 9 aa, Homo Sapiens
FSVPVKQEV

SEQ ID NO: 69822 - protein, 9 aa, Homo Sapiens
FVCDIRPEI

SEQ ID NO: 69823 - protein, 9 aa, Homo Sapiens
FVFKEPQQV

SEQ ID NO: 69824 - protein, 9 aa, Homo Sapiens
FVNDIFERI

SEQ ID NO: 69825 - protein, 9 aa, Homo Sapiens
FVSGVIVKI

SEQ ID NO: 69826 - protein, 9 aa, Homo Sapiens
GAAATHLEV

SEQ ID NO: 69827 - protein, 9 aa, Homo Sapiens
GEHGLIIRV

SEQ ID NO: 69828 - protein, 9 aa, Homo Sapiens
GGFNGSLRV

SEQ ID NO: 69829 - protein, 9 aa, Homo Sapiens
GGIGQPLSL

SEQ ID NO: 69830 - protein, 9 aa, Homo Sapiens
GLAFVPLQI

SEQ ID NO: 69831 - protein, 9 aa, Homo Sapiens
GLAPPQHLI

SEQ ID NO: 69832 - protein, 9 aa, Homo Sapiens
GLCDSIITI

SEQ ID NO: 69833 - protein, 9 aa, Homo Sapiens
GLCQFIQEV

SEQ ID NO: 69834 - protein, 9 aa, Homo Sapiens
GLFAGPCKV

SEQ ID NO: 69835 - protein, 9 aa, Homo Sapiens
GLFRVTPEI

SEQ ID NO: 69836 - protein, 9 aa, Homo Sapiens
GLFSKVTLI

SEQ ID NO: 69837 - protein, 9 aa, Homo Sapiens
GLGKTIQAI

SEQ ID NO: 69838 - protein, 9 aa, Homo Sapiens
GLGKTIQTI

SEQ ID NO: 69839 - protein, 9 aa, Homo Sapiens
GLHNVVYGI

SEQ ID NO: 69840 - protein, 9 aa, Homo Sapiens
GLHRQLLYI

SEQ ID NO: 69841 - protein, 9 aa, Homo Sapiens
GLIHISQVI

SEQ ID NO: 69842 - protein, 9 aa, Homo Sapiens
GLKKVIQKV

SEQ ID NO: 69843 - protein, 9 aa, Homo Sapiens
GLLEALLKI

SEQ ID NO: 69844 - protein, 9 aa, Homo Sapiens
GLLPSPLAV

SEQ ID NO: 69845 - protein, 9 aa, Homo Sapiens
GLNDFIQKI

SEQ ID NO: 69846 - protein, 9 aa, Homo Sapiens
GLNTIPLFV

SEQ ID NO: 69847 - protein, 9 aa, Homo Sapiens
GLSETILAV

SEQ ID NO: 69848 - protein, 9 aa, Homo Sapiens
GLSKCEIKV

SEQ ID NO: 69849 - protein, 9 aa, Homo Sapiens
GLTDIRTLV

SEQ ID NO: 69850 - protein, 9 aa, Homo Sapiens
GLTSAIQAV

SEQ ID NO: 69851 - protein, 9 aa, Homo Sapiens
GLVSTGLKV

SEQ ID NO: 69852 - protein, 9 aa, Homo Sapiens
GLYPAPLKI

SEQ ID NO: 69853 - protein, 9 aa, Homo Sapiens
GMTVVQHCV

SEQ ID NO: 69854 - protein, 9 aa, Homo Sapiens
GMYIFLHTV

SEQ ID NO: 69855 - protein, 9 aa, Homo Sapiens
GQADLATKV

SEQ ID NO: 69856 - protein, 9 aa, Homo Sapiens
GQADPVVAV

SEQ ID NO: 69857 - protein, 9 aa, Homo Sapiens
GQAEALDKI

SEQ ID NO: 69858 - protein, 9 aa, Homo Sapiens
GQAFLYHQV

SEQ ID NO: 69859 - protein, 9 aa, Homo Sapiens
GQAGGKLHI

SEQ ID NO: 69860 - protein, 9 aa, Homo Sapiens
GQAPEGLKV

SEQ ID NO: 69861 - protein, 9 aa, Homo Sapiens
GQASIPTEI

SEQ ID NO: 69862 - protein, 9 aa, Homo Sapiens
GQCGKSFSL

SEQ ID NO: 69863 - protein, 9 aa, Homo Sapiens
GQDSIVLLI

SEQ ID NO: 69864 - protein, 9 aa, Homo Sapiens
GQDVGRYQV

SEQ ID NO: 69865 - protein, 9 aa, Homo Sapiens
GQFCIPEHI

SEQ ID NO: 69866 - protein, 9 aa, Homo Sapiens
GQFDRPAGV

SEQ ID NO: 69867 - protein, 9 aa, Homo Sapiens
GQFGIHNGV

SEQ ID NO: 69868 - protein, 9 aa, Homo Sapiens
GQFIGPHRI

SEQ ID NO: 69869 - protein, 9 aa, Homo Sapiens
GQFILTPHI

SEQ ID NO: 69870 - protein, 9 aa, Homo Sapiens
GQFKGLVKA

SEQ ID NO: 69871 - protein, 9 aa, Homo Sapiens
GQFKKTQIL

SEQ ID NO: 69872 - protein, 9 aa, Homo Sapiens
GQFLTKRGV

SEQ ID NO: 69873 - protein, 9 aa, Homo Sapiens
GQFTGSTGV

SEQ ID NO: 69874 - protein, 9 aa, Homo Sapiens
GQGPSHLSV

SEQ ID NO: 69875 - protein, 9 aa, Homo Sapiens
GQGRIILKA

SEQ ID NO: 69876 - protein, 9 aa, Homo Sapiens
GQHAFYQLI

SEQ ID NO: 69877 - protein, 9 aa, Homo Sapiens
GQHEISFSV

SEQ ID NO: 69878 - protein, 9 aa, Homo Sapiens
GQHFNIPAI

SEQ ID NO: 69879 - protein, 9 aa, Homo Sapiens
GQHMVEQLL

SEQ ID NO: 69880 - protein, 9 aa, Homo Sapiens
GQHPSQHLI

SEQ ID NO: 69881 - protein, 9 aa, Homo Sapiens
GQIELRTYV

SEQ ID NO: 69882 - protein, 9 aa, Homo Sapiens
GQIEVVPEV

SEQ ID NO: 69883 - protein, 9 aa, Homo Sapiens
GQIKEVERI

SEQ ID NO: 69884 - protein, 9 aa, Homo Sapiens
GQIKQIIRI

SEQ ID NO: 69885 - protein, 9 aa, Homo Sapiens
GQILPVPNV

SEQ ID NO: 69886 - protein, 9 aa, Homo Sapiens
GQINQKLGV

SEQ ID NO: 69887 - protein, 9 aa, Homo Sapiens
GQISETLKT

SEQ ID NO: 69888 - protein, 9 aa, Homo Sapiens
GQISEVVVV

SEQ ID NO: 69889 - protein, 9 aa, Homo Sapiens
GQISVHVDI

SEQ ID NO: 69890 - protein, 9 aa, Homo Sapiens
GQKEGEPRI

SEQ ID NO: 69891 - protein, 9 aa, Homo Sapiens
GQKKLVLIL

SEQ ID NO: 69892 - protein, 9 aa, Homo Sapiens
GQKSYLDVI

SEQ ID NO: 69893 - protein, 9 aa, Homo Sapiens
GQLAEHESI

SEQ ID NO: 69894 - protein, 9 aa, Homo Sapiens
GQLDVRELI

SEQ ID NO: 69895 - protein, 9 aa, Homo Sapiens
GQLIEPLQI

SEQ ID NO: 69896 - protein, 9 aa, Homo Sapiens
GQLLVKPTI

SEQ ID NO: 69897 - protein, 9 aa, Homo Sapiens
GQLNLHQRI

SEQ ID NO: 69898 - protein, 9 aa, Homo Sapiens
GQLNQAMKI

SEQ ID NO: 69899 - protein, 9 aa, Homo Sapiens
GQLPEAPVI

SEQ ID NO: 69900 - protein, 9 aa, Homo Sapiens
GQLRLAHGV

SEQ ID NO: 69901 - protein, 9 aa, Homo Sapiens
GQLTLHQRI

SEQ ID NO: 69902 - protein, 9 aa, Homo Sapiens
GQMAYILQL

SEQ ID NO: 69903 - protein, 9 aa, Homo Sapiens
GQMDPSAQI

SEQ ID NO: 69904 - protein, 9 aa, Homo Sapiens
GQMPNNQSI

SEQ ID NO: 69905 - protein, 9 aa, Homo Sapiens
GQMPSDKTI

SEQ ID NO: 69906 - protein, 9 aa, Homo Sapiens
GQMQDARAI

SEQ ID NO: 69907 - protein, 9 aa, Homo Sapiens
GQNESFARI

SEQ ID NO: 69908 - protein, 9 aa, Homo Sapiens
GQNPTNAEV

SEQ ID NO: 69909 - protein, 9 aa, Homo Sapiens
GQNRIHLEI

SEQ ID NO: 69910 - protein, 9 aa, Homo Sapiens
GQNSLCHQI

SEQ ID NO: 69911 - protein, 9 aa, Homo Sapiens
GQPGSVLRV

SEQ ID NO: 69912 - protein, 9 aa, Homo Sapiens
GQPNILICI

SEQ ID NO: 69913 - protein, 9 aa, Homo Sapiens
GQPSIINHI

SEQ ID NO: 69914 - protein, 9 aa, Homo Sapiens
GQQAIVLCI

SEQ ID NO: 69915 - protein, 9 aa, Homo Sapiens
GQQIQIQTV

SEQ ID NO: 69916 - protein, 9 aa, Homo Sapiens
GQQTIIACI

SEQ ID NO: 69917 - protein, 9 aa, Homo Sapiens
GQSFSEQHI

SEQ ID NO: 69918 - protein, 9 aa, Homo Sapiens
GQSKFAPTV

SEQ ID NO: 69919 - protein, 9 aa, Homo Sapiens
GQSKITFLL

SEQ ID NO: 69920 - protein, 9 aa, Homo Sapiens
GQSKVFFRA

SEQ ID NO: 69921 - protein, 9 aa, Homo Sapiens
GQSPVALDI

SEQ ID NO: 69922 - protein, 9 aa, Homo Sapiens
GQSRGVPAV

SEQ ID NO: 69923 - protein, 9 aa, Homo Sapiens
GQSYVVNRV

SEQ ID NO: 69924 - protein, 9 aa, Homo Sapiens
GQTFVFHVV

SEQ ID NO: 69925 - protein, 9 aa, Homo Sapiens
GQTGVIRSV

SEQ ID NO: 69926 - protein, 9 aa, Homo Sapiens
GQTIIHHHI

SEQ ID NO: 69927 - protein, 9 aa, Homo Sapiens
GQTITISRV

SEQ ID NO: 69928 - protein, 9 aa, Homo Sapiens
GQTKEVLVI

SEQ ID NO: 69929 - protein, 9 aa, Homo Sapiens
GQTPFYIRI

SEQ ID NO: 69930 - protein, 9 aa, Homo Sapiens
GQTPKQLFV

SEQ ID NO: 69931 - protein, 9 aa, Homo Sapiens
GQTPLMLAI

SEQ ID NO: 69932 - protein, 9 aa, Homo Sapiens
GQTPSQLLI

SEQ ID NO: 69933 - protein, 9 aa, Homo Sapiens
GQTQVEIKV

SEQ ID NO: 69934 - protein, 9 aa, Homo Sapiens
GQTSVIEQI

SEQ ID NO: 69935 - protein, 9 aa, Homo Sapiens
GQTTVQVRV

SEQ ID NO: 69936 - protein, 9 aa, Homo Sapiens
GQTVNLQAV

SEQ ID NO: 69937 - protein, 9 aa, Homo Sapiens
GQVERAVVI

SEQ ID NO: 69938 - protein, 9 aa, Homo Sapiens
GQVHLFEHI

SEQ ID NO: 69939 - protein, 9 aa, Homo Sapiens
GQVIQKETV

SEQ ID NO: 69940 - protein, 9 aa, Homo Sapiens
GQVKLTKAV

SEQ ID NO: 69941 - protein, 9 aa, Homo Sapiens
GQVKPYSSV

SEQ ID NO: 69942 - protein, 9 aa, Homo Sapiens
GQVLVKPYI

SEQ ID NO: 69943 - protein, 9 aa, Homo Sapiens
GQVPPLQSV

SEQ ID NO: 69944 - protein, 9 aa, Homo Sapiens
GQVTCVVEI

SEQ ID NO: 69945 - protein, 9 aa, Homo Sapiens
GQVVAMKKI

SEQ ID NO: 69946 - protein, 9 aa, Homo Sapiens
GQWASVIRV

SEQ ID NO: 69947 - protein, 9 aa, Homo Sapiens
GQWGRAWEV

SEQ ID NO: 69948 - protein, 9 aa, Homo Sapiens
GQWKEEQKL

SEQ ID NO: 69949 - protein, 9 aa, Homo Sapiens
GQWKKGFVL

SEQ ID NO: 69950 - protein, 9 aa, Homo Sapiens
GQWLGGRQI

SEQ ID NO: 69951 - protein, 9 aa, Homo Sapiens
GQYMGQLKM

SEQ ID NO: 69952 - protein, 9 aa, Homo Sapiens
GQYPRFLRA

SEQ ID NO: 69953 - protein, 9 aa, Homo Sapiens
GQYQECLQL

SEQ ID NO: 69954 - protein, 9 aa, Homo Sapiens
GQYTDLLRL

SEQ ID NO: 69955 - protein, 9 aa, Homo Sapiens
GQYVQPQGV

SEQ ID NO: 69956 - protein, 9 aa, Homo Sapiens
GQYYAIKKI

SEQ ID NO: 69957 - protein, 9 aa, Homo Sapiens
GSFGKVFLV

SEQ ID NO: 69958 - protein, 9 aa, Homo Sapiens
GSPAVTLLI

SEQ ID NO: 69959 - protein, 9 aa, Homo Sapiens
GSWDKMLKI

SEQ ID NO: 69960 - protein, 9 aa, Homo Sapiens
GSYRNALKI

SEQ ID NO: 69961 - protein, 9 aa, Homo Sapiens
GTAPVNLNI

SEQ ID NO: 69962 - protein, 9 aa, Homo Sapiens
GVAIPLPGV

SEQ ID NO: 69963 - protein, 9 aa, Homo Sapiens
GVLRQQLVV

SEQ ID NO: 69964 - protein, 9 aa, Homo Sapiens
GVNKDSYLI

SEQ ID NO: 69965 - protein, 9 aa, Homo Sapiens
GVSDVELRV

SEQ ID NO: 69966 - protein, 9 aa, Homo Sapiens
GVTAIIFCV

SEQ ID NO: 69967 - protein, 9 aa, Homo Sapiens
HAAKVILQV

SEQ ID NO: 69968 - protein, 9 aa, Homo Sapiens
HACGVIATI

SEQ ID NO: 69969 - protein, 9 aa, Homo Sapiens
HAFSFPLLI

SEQ ID NO: 69970 - protein, 9 aa, Homo Sapiens
HEGDIILKI

SEQ ID NO: 69971 - protein, 9 aa, Homo Sapiens
HEIDYILLV

SEQ ID NO: 69972 - protein, 9 aa, Homo Sapiens
HETEVLLKV

SEQ ID NO: 69973 - protein, 9 aa, Homo Sapiens
HGFAGVILI

SEQ ID NO: 69974 - protein, 9 aa, Homo Sapiens
HIAEVSQEV

SEQ ID NO: 69975 - protein, 9 aa, Homo Sapiens
HIDNNILLI

SEQ ID NO: 69976 - protein, 9 aa, Homo Sapiens
HIGQVIMSI

SEQ ID NO: 69977 - protein, 9 aa, Homo Sapiens
HIIENIVAV

SEQ ID NO: 69978 - protein, 9 aa, Homo Sapiens
HIPEVYLIV

SEQ ID NO: 69979 - protein, 9 aa, Homo Sapiens
HIPNIFQKI

SEQ ID NO: 69980 - protein, 9 aa, Homo Sapiens
HISHIAQQV

SEQ ID NO: 69981 - protein, 9 aa, Homo Sapiens
HISMVIQKI

SEQ ID NO: 69982 - protein, 9 aa, Homo Sapiens
HISPVKLHL

SEQ ID NO: 69983 - protein, 9 aa, Homo Sapiens
HITNIPFSI

SEQ ID NO: 69984 - protein, 9 aa, Homo Sapiens
HLAAPKLGV

SEQ ID NO: 69985 - protein, 9 aa, Homo Sapiens
HLAEHSLQV

SEQ ID NO: 69986 - protein, 9 aa, Homo Sapiens
HLAEVSAEV

SEQ ID NO: 69987 - protein, 9 aa, Homo Sapiens
HLANIVERV

SEQ ID NO: 69988 - protein, 9 aa, Homo Sapiens
HLAVVELLL

SEQ ID NO: 69989 - protein, 9 aa, Homo Sapiens
HLDATKLLL

SEQ ID NO: 69990 - protein, 9 aa, Homo Sapiens
HLDTTQQMI

SEQ ID NO: 69991 - protein, 9 aa, Homo Sapiens
HLDVVALLI

SEQ ID NO: 69992 - protein, 9 aa, Homo Sapiens
HLFIEPRTI

SEQ ID NO: 69993 - protein, 9 aa, Homo Sapiens
HLFIPALSV

SEQ ID NO: 69994 - protein, 9 aa, Homo Sapiens
HLFSVAQEL

SEQ ID NO: 69995 - protein, 9 aa, Homo Sapiens
HLGDFPLAV

SEQ ID NO: 69996 - protein, 9 aa, Homo Sapiens
HLIAQHSAI

SEQ ID NO: 69997 - protein, 9 aa, Homo Sapiens
HLIDFMSEI

SEQ ID NO: 69998 - protein, 9 aa, Homo Sapiens
HLITPLVTI

SEQ ID NO: 69999 - protein, 9 aa, Homo Sapiens
HLKNTMETI

SEQ ID NO: 70000 - protein, 9 aa, Homo Sapiens
HLKQYERSI

SEQ ID NO: 70001 - protein, 9 aa, Homo Sapiens
HLLETPLVV

SEQ ID NO: 70002 - protein, 9 aa, Homo Sapiens
HLLLEVEVI

SEQ ID NO: 70003 - protein, 9 aa, Homo Sapiens
HLLPCEVAV

SEQ ID NO: 70004 - protein, 9 aa, Homo Sapiens
HLLPTEQRI

SEQ ID NO: 70005 - protein, 9 aa, Homo Sapiens
HLLPTQLEV

SEQ ID NO: 70006 - protein, 9 aa, Homo Sapiens
HLLQYNHRV

SEQ ID NO: 70007 - protein, 9 aa, Homo Sapiens
HLMHLELDI

SEQ ID NO: 70008 - protein, 9 aa, Homo Sapiens
HLNPDPQLI

SEQ ID NO: 70009 - protein, 9 aa, Homo Sapiens
HLNSEKLII

SEQ ID NO: 70010 - protein, 9 aa, Homo Sapiens
HLPVINVGI

SEQ ID NO: 70011 - protein, 9 aa, Homo Sapiens
HLREYQDLL

SEQ ID NO: 70012 - protein, 9 aa, Homo Sapiens
HLSDTLWLI

SEQ ID NO: 70013 - protein, 9 aa, Homo Sapiens
HLSKIETRI

SEQ ID NO: 70014 - protein, 9 aa, Homo Sapiens
HLTDITLKV

SEQ ID NO: 70015 - protein, 9 aa, Homo Sapiens
HLTEEALKV

SEQ ID NO: 70016 - protein, 9 aa, Homo Sapiens
HLTEMQAKV

SEQ ID NO: 70017 - protein, 9 aa, Homo Sapiens
HLTETQVKI

SEQ ID NO: 70018 - protein, 9 aa, Homo Sapiens
HLTGHTLKI

SEQ ID NO: 70019 - protein, 9 aa, Homo Sapiens
HLTPLPLYV

SEQ ID NO: 70020 - protein, 9 aa, Homo Sapiens
HLTPVTLEL

SEQ ID NO: 70021 - protein, 9 aa, Homo Sapiens
HLYDIHVTV

SEQ ID NO: 70022 - protein, 9 aa, Homo Sapiens
HLYFETVTI

SEQ ID NO: 70023 - protein, 9 aa, Homo Sapiens
HMFGQNLEV

SEQ ID NO: 70024 - protein, 9 aa, Homo Sapiens
HMYPEKLKV

SEQ ID NO: 70025 - protein, 9 aa, Homo Sapiens
HQAAQALHL

SEQ ID NO: 70026 - protein, 9 aa, Homo Sapiens
HQADIGEYV

SEQ ID NO: 70027 - protein, 9 aa, Homo Sapiens
HQAEYELNI

SEQ ID NO: 70028 - protein, 9 aa, Homo Sapiens
HQAGPVIKV

SEQ ID NO: 70029 - protein, 9 aa, Homo Sapiens
HQALHSISV

SEQ ID NO: 70030 - protein, 9 aa, Homo Sapiens
HQAQLISKI

SEQ ID NO: 70031 - protein, 9 aa, Homo Sapiens
HQDQMVQKI

SEQ ID NO: 70032 - protein, 9 aa, Homo Sapiens
HQESYPLSV

SEQ ID NO: 70033 - protein, 9 aa, Homo Sapiens
HQEVVELLI

SEQ ID NO: 70034 - protein, 9 aa, Homo Sapiens
HQFESSFEL

SEQ ID NO: 70035 - protein, 9 aa, Homo Sapiens
HQFQLDITV

SEQ ID NO: 70036 - protein, 9 aa, Homo Sapiens
HQFVECLKL

SEQ ID NO: 70037 - protein, 9 aa, Homo Sapiens
HQGDSKLLI

SEQ ID NO: 70038 - protein, 9 aa, Homo Sapiens
HQGVAVLGI

SEQ ID NO: 70039 - protein, 9 aa, Homo Sapiens
HQHEYFFLI

SEQ ID NO: 70040 - protein, 9 aa, Homo Sapiens
HQHNVSLQL

SEQ ID NO: 70041 - protein, 9 aa, Homo Sapiens
HQHRLGLGV

SEQ ID NO: 70042 - protein, 9 aa, Homo Sapiens
HQIDLIVQL

SEQ ID NO: 70043 - protein, 9 aa, Homo Sapiens
HQIFHVLVV

SEQ ID NO: 70044 - protein, 9 aa, Homo Sapiens
HQIGCQSSI

SEQ ID NO: 70045 - protein, 9 aa, Homo Sapiens
HQIHVEQSI

SEQ ID NO: 70046 - protein, 9 aa, Homo Sapiens
HQIIQQYMV

SEQ ID NO: 70047 - protein, 9 aa, Homo Sapiens
HQILTPFLL

SEQ ID NO: 70048 - protein, 9 aa, Homo Sapiens
HQIQNVVTV

SEQ ID NO: 70049 - protein, 9 aa, Homo Sapiens
HQLFHIFVV

SEQ ID NO: 70050 - protein, 9 aa, Homo Sapiens
HQLNICSKV

SEQ ID NO: 70051 - protein, 9 aa, Homo Sapiens
HQLPLPHNV

SEQ ID NO: 70052 - protein, 9 aa, Homo Sapiens
HQMEFPCNI

SEQ ID NO: 70053 - protein, 9 aa, Homo Sapiens
HQNDKQISI

SEQ ID NO: 70054 - protein, 9 aa, Homo Sapiens
HQNHLIVKV

SEQ ID NO: 70055 - protein, 9 aa, Homo Sapiens
HQPDPAIGV

SEQ ID NO: 70056 - protein, 9 aa, Homo Sapiens
HQPPPAPRV

SEQ ID NO: 70057 - protein, 9 aa, Homo Sapiens
HQPSVLLEL

SEQ ID NO: 70058 - protein, 9 aa, Homo Sapiens
HQQIQAQLV

SEQ ID NO: 70059 - protein, 9 aa, Homo Sapiens
HQREKDFLL

SEQ ID NO: 70060 - protein, 9 aa, Homo Sapiens
HQREREFLL

SEQ ID NO: 70061 - protein, 9 aa, Homo Sapiens
HQRLEPATL

SEQ ID NO: 70062 - protein, 9 aa, Homo Sapiens
HQRSFDIGI

SEQ ID NO: 70063 - protein, 9 aa, Homo Sapiens
HQRTFVLEV

SEQ ID NO: 70064 - protein, 9 aa, Homo Sapiens
HQSALELIM

SEQ ID NO: 70065 - protein, 9 aa, Homo Sapiens
HQSDRYVKI

SEQ ID NO: 70066 - protein, 9 aa, Homo Sapiens
HQSGIVQLL

SEQ ID NO: 70067 - protein, 9 aa, Homo Sapiens
HQSHLILRA

SEQ ID NO: 70068 - protein, 9 aa, Homo Sapiens
HQSTVDWIV

SEQ ID NO: 70069 - protein, 9 aa, Homo Sapiens
HQTITIQEM

SEQ ID NO: 70070 - protein, 9 aa, Homo Sapiens
HQTIVMQFI

SEQ ID NO: 70071 - protein, 9 aa, Homo Sapiens
HQTIVVQLL

SEQ ID NO: 70072 - protein, 9 aa, Homo Sapiens
HQTNLILQT

SEQ ID NO: 70073 - protein, 9 aa, Homo Sapiens
HQTPLHLAV

SEQ ID NO: 70074 - protein, 9 aa, Homo Sapiens
HQTQVSQRL

SEQ ID NO: 70075 - protein, 9 aa, Homo Sapiens
HQVPAVSSV

SEQ ID NO: 70076 - protein, 9 aa, Homo Sapiens
HQWNPPLAV

SEQ ID NO: 70077 - protein, 9 aa, Homo Sapiens
HQYFHICFV

SEQ ID NO: 70078 - protein, 9 aa, Homo Sapiens
HQYINCFTL

SEQ ID NO: 70079 - protein, 9 aa, Homo Sapiens
HSAELALNV

SEQ ID NO: 70080 - protein, 9 aa, Homo Sapiens
HSLPLLLFI

SEQ ID NO: 70081 - protein, 9 aa, Homo Sapiens
HSQNVKLLI

SEQ ID NO: 70082 - protein, 9 aa, Homo Sapiens
HSVDQYLNI

SEQ ID NO: 70083 - protein, 9 aa, Homo Sapiens
HTAAVKLLL

SEQ ID NO: 70084 - protein, 9 aa, Homo Sapiens
HTANIQTLI

SEQ ID NO: 70085 - protein, 9 aa, Homo Sapiens
HTIDTILTV

SEQ ID NO: 70086 - protein, 9 aa, Homo Sapiens
HTQNVPLSV

SEQ ID NO: 70087 - protein, 9 aa, Homo Sapiens
HVASVPTAV

SEQ ID NO: 70088 - protein, 9 aa, Homo Sapiens
HVHGVLNGV

SEQ ID NO: 70089 - protein, 9 aa, Homo Sapiens
HVLSLPLRI

SEQ ID NO: 70090 - protein, 9 aa, Homo Sapiens
HVPDPVISI

SEQ ID NO: 70091 - protein, 9 aa, Homo Sapiens
HVPNVTLLI

SEQ ID NO: 70092 - protein, 9 aa, Homo Sapiens
HVSCVKLLL

SEQ ID NO: 70093 - protein, 9 aa, Homo Sapiens
HVSEVPVSV

SEQ ID NO: 70094 - protein, 9 aa, Homo Sapiens
HVSLVQLTL

SEQ ID NO: 70095 - protein, 9 aa, Homo Sapiens
HVTPLKLMV

SEQ ID NO: 70096 - protein, 9 aa, Homo Sapiens
HVYDGKFLA

SEQ ID NO: 70097 - protein, 9 aa, Homo Sapiens
IANTVELRV

SEQ ID NO: 70098 - protein, 9 aa, Homo Sapiens
IIAHLPLLI

SEQ ID NO: 70099 - protein, 9 aa, Homo Sapiens
IIFETPLRV

SEQ ID NO: 70100 - protein, 9 aa, Homo Sapiens
IISKTKQVI

SEQ ID NO: 70101 - protein, 9 aa, Homo Sapiens
IISQVDAKV

SEQ ID NO: 70102 - protein, 9 aa, Homo Sapiens
IKLDISRTF

SEQ ID NO: 70103 - protein, 9 aa, Homo Sapiens
ILAELLLRV

SEQ ID NO: 70104 - protein, 9 aa, Homo Sapiens
ILAPVVKEI

SEQ ID NO: 70105 - protein, 9 aa, Homo Sapiens
ILAQQPLSV

SEQ ID NO: 70106 - protein, 9 aa, Homo Sapiens
ILCPKPVHV

SEQ ID NO: 70107 - protein, 9 aa, Homo Sapiens
ILDGNQLHI

SEQ ID NO: 70108 - protein, 9 aa, Homo Sapiens
ILFGHENRV

SEQ ID NO: 70109 - protein, 9 aa, Homo Sapiens
ILGDILLKV

SEQ ID NO: 70110 - protein, 9 aa, Homo Sapiens
ILKGFDPLL

SEQ ID NO: 70111 - protein, 9 aa, Homo Sapiens
ILLATGLHV

SEQ ID NO: 70112 - protein, 9 aa, Homo Sapiens
ILLKDILSV

SEQ ID NO: 70113 - protein, 9 aa, Homo Sapiens
ILPALCVLI

SEQ ID NO: 70114 - protein, 9 aa, Homo Sapiens
ILPCIKELV

SEQ ID NO: 70115 - protein, 9 aa, Homo Sapiens
ILPKILQDV

SEQ ID NO: 70116 - protein, 9 aa, Homo Sapiens
ILSEVQQAV

SEQ ID NO: 70117 - protein, 9 aa, Homo Sapiens
ILSPTVVSI

SEQ ID NO: 70118 - protein, 9 aa, Homo Sapiens
ILSSKVLTI

SEQ ID NO: 70119 - protein, 9 aa, Homo Sapiens
ILTKILYLI

SEQ ID NO: 70120 - protein, 9 aa, Homo Sapiens
IQARLPLLL

SEQ ID NO: 70121 - protein, 9 aa, Homo Sapiens
IQFKKPIIV

SEQ ID NO: 70122 - protein, 9 aa, Homo Sapiens
IQHAEEFLI

SEQ ID NO: 70123 - protein, 9 aa, Homo Sapiens
IQHMELQLI

SEQ ID NO: 70124 - protein, 9 aa, Homo Sapiens
IQHVFQNLI

SEQ ID NO: 70125 - protein, 9 aa, Homo Sapiens
IQIMKVEEI

SEQ ID NO: 70126 - protein, 9 aa, Homo Sapiens
IQMKIFPAL

SEQ ID NO: 70127 - protein, 9 aa, Homo Sapiens
IQPNIQLIL

SEQ ID NO: 70128 - protein, 9 aa, Homo Sapiens
IQRGPVRGI

SEQ ID NO: 70129 - protein, 9 aa, Homo Sapiens
IQSQVVAQI

SEQ ID NO: 70130 - protein, 9 aa, Homo Sapiens
IQTAVRLLL

SEQ ID NO: 70131 - protein, 9 aa, Homo Sapiens
IQVQQPQQV

SEQ ID NO: 70132 - protein, 9 aa, Homo Sapiens
IQYIRPVFV

SEQ ID NO: 70133 - protein, 9 aa, Homo Sapiens
IQYQAVPQI

SEQ ID NO: 70134 - protein, 9 aa, Homo Sapiens
ISSHIPLII

SEQ ID NO: 70135 - protein, 9 aa, Homo Sapiens
ISSNTSLKV

SEQ ID NO: 70136 - protein, 9 aa, Homo Sapiens
IVAHIIQKI

SEQ ID NO: 70137 - protein, 9 aa, Homo Sapiens
IVNGHTLLV

SEQ ID NO: 70138 - protein, 9 aa, Homo Sapiens
KAAKTPLKI

SEQ ID NO: 70139 - protein, 9 aa, Homo Sapiens
KAFAEKLSV

SEQ ID NO: 70140 - protein, 9 aa, Homo Sapiens
KATAYILSV

SEQ ID NO: 70141 - protein, 9 aa, Homo Sapiens
KAYHEQLSV

SEQ ID NO: 70142 - protein, 9 aa, Homo Sapiens
KEFEGKTLV

SEQ ID NO: 70143 - protein, 9 aa, Homo Sapiens
KEFIGQQLI

SEQ ID NO: 70144 - protein, 9 aa, Homo Sapiens
KEFKSQLFV

SEQ ID NO: 70145 - protein, 9 aa, Homo Sapiens
KEIFLRELI

SEQ ID NO: 70146 - protein, 9 aa, Homo Sapiens
KETNIQLFV

SEQ ID NO: 70147 - protein, 9 aa, Homo Sapiens
KIAPYSVEI

SEQ ID NO: 70148 - protein, 9 aa, Homo Sapiens
KICDYLFNV

SEQ ID NO: 70149 - protein, 9 aa, Homo Sapiens
KIFQEMLYI

SEQ ID NO: 70150 - protein, 9 aa, Homo Sapiens
KIIDIQEKV

SEQ ID NO: 70151 - protein, 9 aa, Homo Sapiens
KILEKEIRV

SEQ ID NO: 70152 - protein, 9 aa, Homo Sapiens
KINEKPQVI

SEQ ID NO: 70153 - protein, 9 aa, Homo Sapiens
KIPQVPLCV

SEQ ID NO: 70154 - protein, 9 aa, Homo Sapiens
KISKIPFKV

SEQ ID NO: 70155 - protein, 9 aa, Homo Sapiens
KITDLKQKV

SEQ ID NO: 70156 - protein, 9 aa, Homo Sapiens
KITGMLLEI

SEQ ID NO: 70157 - protein, 9 aa, Homo Sapiens
KITTVIQHV

SEQ ID NO: 70158 - protein, 9 aa, Homo Sapiens
KIVEIDAHI

SEQ ID NO: 70159 - protein, 9 aa, Homo Sapiens
KIYAIPIEI

SEQ ID NO: 70160 - protein, 9 aa, Homo Sapiens
KIYEGQVEV

SEQ ID NO: 70161 - protein, 9 aa, Homo Sapiens
KIYEHHIKV

SEQ ID NO: 70162 - protein, 9 aa, Homo Sapiens
KLAEVSQNI

SEQ ID NO: 70163 - protein, 9 aa, Homo Sapiens
KLAKLQAQV

SEQ ID NO: 70164 - protein, 9 aa, Homo Sapiens
KLAPKDIKI

SEQ ID NO: 70165 - protein, 9 aa, Homo Sapiens
KLAPKDVKI

SEQ ID NO: 70166 - protein, 9 aa, Homo Sapiens
KLAPPLVTL

SEQ ID NO: 70167 - protein, 9 aa, Homo Sapiens
KLASKYLHV

SEQ ID NO: 70168 - protein, 9 aa, Homo Sapiens
KLAVRPLSV

SEQ ID NO: 70169 - protein, 9 aa, Homo Sapiens
KLCDIIVHI

SEQ ID NO: 70170 - protein, 9 aa, Homo Sapiens
KLCDVTTGL

SEQ ID NO: 70171 - protein, 9 aa, Homo Sapiens
KLCEGFNEV

SEQ ID NO: 70172 - protein, 9 aa, Homo Sapiens
KLCYVGYNI

SEQ ID NO: 70173 - protein, 9 aa, Homo Sapiens
KLDDIVQHI

SEQ ID NO: 70174 - protein, 9 aa, Homo Sapiens
KLDHVVTII

SEQ ID NO: 70175 - protein, 9 aa, Homo Sapiens
KLDSTPLKA

SEQ ID NO: 70176 - protein, 9 aa, Homo Sapiens
KLEEIRIKV

SEQ ID NO: 70177 - protein, 9 aa, Homo Sapiens
KLFAKHIKV

SEQ ID NO: 70178 - protein, 9 aa, Homo Sapiens
KLFDAPLSI

SEQ ID NO: 70179 - protein, 9 aa, Homo Sapiens
KLFDTQHRV

SEQ ID NO: 70180 - protein, 9 aa, Homo Sapiens
KLFEKKYSV

SEQ ID NO: 70181 - protein, 9 aa, Homo Sapiens
KLFGMIITI

SEQ ID NO: 70182 - protein, 9 aa, Homo Sapiens
KLFIGGLNV

SEQ ID NO: 70183 - protein, 9 aa, Homo Sapiens
KLFQGQLVL

SEQ ID NO: 70184 - protein, 9 aa, Homo Sapiens
KLFRGPLVI

SEQ ID NO: 70185 - protein, 9 aa, Homo Sapiens
KLFSYCVKV

SEQ ID NO: 70186 - protein, 9 aa, Homo Sapiens
KLFVIAQKI

SEQ ID NO: 70187 - protein, 9 aa, Homo Sapiens
KLGEIVTTI

SEQ ID NO: 70188 - protein, 9 aa, Homo Sapiens
KLHGKILVI

SEQ ID NO: 70189 - protein, 9 aa, Homo Sapiens
KLHGKPIRI

SEQ ID NO: 70190 - protein, 9 aa, Homo Sapiens
KLHGVNINV

SEQ ID NO: 70191 - protein, 9 aa, Homo Sapiens
KLHYVVTEV

SEQ ID NO: 70192 - protein, 9 aa, Homo Sapiens
KLIANNTTV

SEQ ID NO: 70193 - protein, 9 aa, Homo Sapiens
KLIENNDTI

SEQ ID NO: 70194 - protein, 9 aa, Homo Sapiens
KLIGQVHEV

SEQ ID NO: 70195 - protein, 9 aa, Homo Sapiens
KLIILPLII

SEQ ID NO: 70196 - protein, 9 aa, Homo Sapiens
KLIKDGLII

SEQ ID NO: 70197 - protein, 9 aa, Homo Sapiens
KLILLITQV

SEQ ID NO: 70198 - protein, 9 aa, Homo Sapiens
KLIPNAIQI

SEQ ID NO: 70199 - protein, 9 aa, Homo Sapiens
KLIQNVFEI

SEQ ID NO: 70200 - protein, 9 aa, Homo Sapiens
KLITKAEKI

SEQ ID NO: 70201 - protein, 9 aa, Homo Sapiens
KLKEIFDKI

SEQ ID NO: 70202 - protein, 9 aa, Homo Sapiens
KLKNVIHKI

SEQ ID NO: 70203 - protein, 9 aa, Homo Sapiens
KLKQFEERL

SEQ ID NO: 70204 - protein, 9 aa, Homo Sapiens
KLLDFILKT

SEQ ID NO: 70205 - protein, 9 aa, Homo Sapiens
KLLEATSAV

SEQ ID NO: 70206 - protein, 9 aa, Homo Sapiens
KLLEKAFSI

SEQ ID NO: 70207 - protein, 9 aa, Homo Sapiens
KLLEPVLLL

SEQ ID NO: 70208 - protein, 9 aa, Homo Sapiens
KLLEQALVI

SEQ ID NO: 70209 - protein, 9 aa, Homo Sapiens
KLLEQTQII

SEQ ID NO: 70210 - protein, 9 aa, Homo Sapiens
KLLEYIEEI

SEQ ID NO: 70211 - protein, 9 aa, Homo Sapiens
KLLFWVTEV

SEQ ID NO: 70212 - protein, 9 aa, Homo Sapiens
KLLKCSRLV

SEQ ID NO: 70213 - protein, 9 aa, Homo Sapiens
KLLKLFQGV

SEQ ID NO: 70214 - protein, 9 aa, Homo Sapiens
KLLKPSLAV

SEQ ID NO: 70215 - protein, 9 aa, Homo Sapiens
KLLNLISKL

SEQ ID NO: 70216 - protein, 9 aa, Homo Sapiens
KLLPEYPGV

SEQ ID NO: 70217 - protein, 9 aa, Homo Sapiens
KLMELLEEI

SEQ ID NO: 70218 - protein, 9 aa, Homo Sapiens
KLMPVIMII

SEQ ID NO: 70219 - protein, 9 aa, Homo Sapiens
KLNELGQRI

SEQ ID NO: 70220 - protein, 9 aa, Homo Sapiens
KLNPQQFEV

SEQ ID NO: 70221 - protein, 9 aa, Homo Sapiens
KLNVAPLAV

SEQ ID NO: 70222 - protein, 9 aa, Homo Sapiens
KLPEAQQRV

SEQ ID NO: 70223 - protein, 9 aa, Homo Sapiens
KLPEAVQLI

SEQ ID NO: 70224 - protein, 9 aa, Homo Sapiens
KLPFAAAQI

SEQ ID NO: 70225 - protein, 9 aa, Homo Sapiens
KLPPKDLRI

SEQ ID NO: 70226 - protein, 9 aa, Homo Sapiens
KLPYEDVAI

SEQ ID NO: 70227 - protein, 9 aa, Homo Sapiens
KLQEIENAI

SEQ ID NO: 70228 - protein, 9 aa, Homo Sapiens
KLQQTTQLI

SEQ ID NO: 70229 - protein, 9 aa, Homo Sapiens
KLRHIVDEV

SEQ ID NO: 70230 - protein, 9 aa, Homo Sapiens
KLSAEKVEI

SEQ ID NO: 70231 - protein, 9 aa, Homo Sapiens
KLSEIPLTL

SEQ ID NO: 70232 - protein, 9 aa, Homo Sapiens
KLSELQLRV

SEQ ID NO: 70233 - protein, 9 aa, Homo Sapiens
KLSETFLHI

SEQ ID NO: 70234 - protein, 9 aa, Homo Sapiens
KLSEYEMSI

SEQ ID NO: 70235 - protein, 9 aa, Homo Sapiens
KLSKFKIRI

SEQ ID NO: 70236 - protein, 9 aa, Homo Sapiens
KLTEIRHEV

SEQ ID NO: 70237 - protein, 9 aa, Homo Sapiens
KLTELEQRI

SEQ ID NO: 70238 - protein, 9 aa, Homo Sapiens
KLTVVLEAV

SEQ ID NO: 70239 - protein, 9 aa, Homo Sapiens
KLTVVVNNI

SEQ ID NO: 70240 - protein, 9 aa, Homo Sapiens
KLVAIVDVI

SEQ ID NO: 70241 - protein, 9 aa, Homo Sapiens
KLVDCIIEV

SEQ ID NO: 70242 - protein, 9 aa, Homo Sapiens
KLVELPYTV

SEQ ID NO: 70243 - protein, 9 aa, Homo Sapiens
KLVGEFLEV

SEQ ID NO: 70244 - protein, 9 aa, Homo Sapiens
KLVKIKQEI

SEQ ID NO: 70245 - protein, 9 aa, Homo Sapiens
KLVKSQISV

SEQ ID NO: 70246 - protein, 9 aa, Homo Sapiens
KLWKGARSV

SEQ ID NO: 70247 - protein, 9 aa, Homo Sapiens
KLWSRSLKL

SEQ ID NO: 70248 - protein, 9 aa, Homo Sapiens
KLYEQHHVV

SEQ ID NO: 70249 - protein, 9 aa, Homo Sapiens
KLYGKPIRV

SEQ ID NO: 70250 - protein, 9 aa, Homo Sapiens
KLYGRPIKI

SEQ ID NO: 70251 - protein, 9 aa, Homo Sapiens
KLYHNEVEI

SEQ ID NO: 70252 - protein, 9 aa, Homo Sapiens
KLYQRDLEV

SEQ ID NO: 70253 - protein, 9 aa, Homo Sapiens
KMAPALRKV

SEQ ID NO: 70254 - protein, 9 aa, Homo Sapiens
KMFEVDMKI

SEQ ID NO: 70255 - protein, 9 aa, Homo Sapiens
KMFFLIEKI

SEQ ID NO: 70256 - protein, 9 aa, Homo Sapiens
KMMDVTVTI

SEQ ID NO: 70257 - protein, 9 aa, Homo Sapiens
KMPDVELFV

SEQ ID NO: 70258 - protein, 9 aa, Homo Sapiens
KMPEINAKV

SEQ ID NO: 70259 - protein, 9 aa, Homo Sapiens
KMSEKILLL

SEQ ID NO: 70260 - protein, 9 aa, Homo Sapiens
KMSSVKLRL

SEQ ID NO: 70261 - protein, 9 aa, Homo Sapiens
KMTPEQLAI

SEQ ID NO: 70262 - protein, 9 aa, Homo Sapiens
KMYAVDTRV

SEQ ID NO: 70263 - protein, 9 aa, Homo Sapiens
KQAAKCLLL

SEQ ID NO: 70264 - protein, 9 aa, Homo Sapiens
KQAFERLEV

SEQ ID NO: 70265 - protein, 9 aa, Homo Sapiens
KQAGLVSKI

SEQ ID NO: 70266 - protein, 9 aa, Homo Sapiens
KQAITQVVV

SEQ ID NO: 70267 - protein, 9 aa, Homo Sapiens
KQAPPLEDI

SEQ ID NO: 70268 - protein, 9 aa, Homo Sapiens
KQAQVPLAA

SEQ ID NO: 70269 - protein, 9 aa, Homo Sapiens
KQCEELVQI

SEQ ID NO: 70270 - protein, 9 aa, Homo Sapiens
KQFDIQLLT

SEQ ID NO: 70271 - protein, 9 aa, Homo Sapiens
KQFEGTVEI

SEQ ID NO: 70272 - protein, 9 aa, Homo Sapiens
KQFEKQVEL

SEQ ID NO: 70273 - protein, 9 aa, Homo Sapiens
KQFELALQL

SEQ ID NO: 70274 - protein, 9 aa, Homo Sapiens
KQFGNILIL

SEQ ID NO: 70275 - protein, 9 aa, Homo Sapiens
KQFHHQLRV

SEQ ID NO: 70276 - protein, 9 aa, Homo Sapiens
KQFLVKVLI

SEQ ID NO: 70277 - protein, 9 aa, Homo Sapiens
KQFVSQELV

SEQ ID NO: 70278 - protein, 9 aa, Homo Sapiens
KQGAFITLV

SEQ ID NO: 70279 - protein, 9 aa, Homo Sapiens
KQGPMTQAI

SEQ ID NO: 70280 - protein, 9 aa, Homo Sapiens
KQGYVIYRI

SEQ ID NO: 70281 - protein, 9 aa, Homo Sapiens
KQHFINQAV

SEQ ID NO: 70282 - protein, 9 aa, Homo Sapiens
KQHGVNVSV

SEQ ID NO: 70283 - protein, 9 aa, Homo Sapiens
KQIDQFLVV

SEQ ID NO: 70284 - protein, 9 aa, Homo Sapiens
KQIDVYRSV

SEQ ID NO: 70285 - protein, 9 aa, Homo Sapiens
KQILQAKRI

SEQ ID NO: 70286 - protein, 9 aa, Homo Sapiens
KQINIDFRT

SEQ ID NO: 70287 - protein, 9 aa, Homo Sapiens
KQINQEYLI

SEQ ID NO: 70288 - protein, 9 aa, Homo Sapiens
KQIPAITCI

SEQ ID NO: 70289 - protein, 9 aa, Homo Sapiens
KQIPLHPVI

SEQ ID NO: 70290 - protein, 9 aa, Homo Sapiens
KQISQAYEV

SEQ ID NO: 70291 - protein, 9 aa, Homo Sapiens
KQLAFQQQL

SEQ ID NO: 70292 - protein, 9 aa, Homo Sapiens
KQLKEKMKI

SEQ ID NO: 70293 - protein, 9 aa, Homo Sapiens
KQLPKFFLI

SEQ ID NO: 70294 - protein, 9 aa, Homo Sapiens
KQLTVKEAV

SEQ ID NO: 70295 - protein, 9 aa, Homo Sapiens
KQMDAILKA

SEQ ID NO: 70296 - protein, 9 aa, Homo Sapiens
KQMLLFTHI

SEQ ID NO: 70297 - protein, 9 aa, Homo Sapiens
KQMSISTGL

SEQ ID NO: 70298 - protein, 9 aa, Homo Sapiens
KQNITTAEI

SEQ ID NO: 70299 - protein, 9 aa, Homo Sapiens
KQPAFTIHV

SEQ ID NO: 70300 - protein, 9 aa, Homo Sapiens
KQPKGTFLI

SEQ ID NO: 70301 - protein, 9 aa, Homo Sapiens
KQPPIDNII

SEQ ID NO: 70302 - protein, 9 aa, Homo Sapiens
KQQLFSYAI

SEQ ID NO: 70303 - protein, 9 aa, Homo Sapiens
KQQQQQQFV

SEQ ID NO: 70304 - protein, 9 aa, Homo Sapiens
KQQQTMLRV

SEQ ID NO: 70305 - protein, 9 aa, Homo Sapiens
KQQVQQLQV

SEQ ID NO: 70306 - protein, 9 aa, Homo Sapiens
KQSNVQILV

SEQ ID NO: 70307 - protein, 9 aa, Homo Sapiens
KQSPPIVKI

SEQ ID NO: 70308 - protein, 9 aa, Homo Sapiens
KQSSVMQRL

SEQ ID NO: 70309 - protein, 9 aa, Homo Sapiens
KQTDFEHRI

SEQ ID NO: 70310 - protein, 9 aa, Homo Sapiens
KQTERIQMI

SEQ ID NO: 70311 - protein, 9 aa, Homo Sapiens
KQTPKVLVV

SEQ ID NO: 70312 - protein, 9 aa, Homo Sapiens
KQTVHKLLI

SEQ ID NO: 70313 - protein, 9 aa, Homo Sapiens
KQVDLIDLV

SEQ ID NO: 70314 - protein, 9 aa, Homo Sapiens
KQVEQDIKV

SEQ ID NO: 70315 - protein, 9 aa, Homo Sapiens
KQVHPDTGI

SEQ ID NO: 70316 - protein, 9 aa, Homo Sapiens
KQVLGQMVI

SEQ ID NO: 70317 - protein, 9 aa, Homo Sapiens
KQVLLREGI

SEQ ID NO: 70318 - protein, 9 aa, Homo Sapiens
KQVNSVICI

SEQ ID NO: 70319 - protein, 9 aa, Homo Sapiens
KQVSDLISV

SEQ ID NO: 70320 - protein, 9 aa, Homo Sapiens
KQYGNEVFL

SEQ ID NO: 70321 - protein, 9 aa, Homo Sapiens
KQYPISLVL

SEQ ID NO: 70322 - protein, 9 aa, Homo Sapiens
KQYTGINAI

SEQ ID NO: 70323 - protein, 9 aa, Homo Sapiens
KSCDLLLFL

SEQ ID NO: 70324 - protein, 9 aa, Homo Sapiens
KSCVIVIRV

SEQ ID NO: 70325 - protein, 9 aa, Homo Sapiens
KSSCVKLQV

SEQ ID NO: 70326 - protein, 9 aa, Homo Sapiens
KSSEIEQAV

SEQ ID NO: 70327 - protein, 9 aa, Homo Sapiens
KSVLVKQTI

SEQ ID NO: 70328 - protein, 9 aa, Homo Sapiens
KSYKGRQII

SEQ ID NO: 70329 - protein, 9 aa, Homo Sapiens
KTASIELRV

SEQ ID NO: 70330 - protein, 9 aa, Homo Sapiens
KTLPVAFKV

SEQ ID NO: 70331 - protein, 9 aa, Homo Sapiens
KTLSAILRI

SEQ ID NO: 70332 - protein, 9 aa, Homo Sapiens
KVADKIQLI

SEQ ID NO: 70333 - protein, 9 aa, Homo Sapiens
KVADTILFL

SEQ ID NO: 70334 - protein, 9 aa, Homo Sapiens
KVFNRYLEV

SEQ ID NO: 70335 - protein, 9 aa, Homo Sapiens
KVFPLLLCI

SEQ ID NO: 70336 - protein, 9 aa, Homo Sapiens
KVGHVILEV

SEQ ID NO: 70337 - protein, 9 aa, Homo Sapiens
KVGSFSQNV

SEQ ID NO: 70338 - protein, 9 aa, Homo Sapiens
KVHHVLLHI

SEQ ID NO: 70339 - protein, 9 aa, Homo Sapiens
KVIDTQQKV

SEQ ID NO: 70340 - protein, 9 aa, Homo Sapiens
KVLDILQHI

SEQ ID NO: 70341 - protein, 9 aa, Homo Sapiens
KVLSTKIEI

SEQ ID NO: 70342 - protein, 9 aa, Homo Sapiens
KVSAAALAV

SEQ ID NO: 70343 - protein, 9 aa, Homo Sapiens
KVVALVHAV

SEQ ID NO: 70344 - protein, 9 aa, Homo Sapiens
KVVNIVPVI

SEQ ID NO: 70345 - protein, 9 aa, Homo Sapiens
KVWKEQFRV

SEQ ID NO: 70346 - protein, 9 aa, Homo Sapiens
LEHKIIIRV

SEQ ID NO: 70347 - protein, 9 aa, Homo Sapiens
LETNVPLLV

SEQ ID NO: 70348 - protein, 9 aa, Homo Sapiens
LIMVAIPII

SEQ ID NO: 70349 - protein, 9 aa, Homo Sapiens
LIPNLPLQI

SEQ ID NO: 70350 - protein, 9 aa, Homo Sapiens
LIYSGKLLL

SEQ ID NO: 70351 - protein, 9 aa, Homo Sapiens
LKKPDGVKI

SEQ ID NO: 70352 - protein, 9 aa, Homo Sapiens
LKLLLPLLL

SEQ ID NO: 70353 - protein, 9 aa, Homo Sapiens
LLADPQQKI

SEQ ID NO: 70354 - protein, 9 aa, Homo Sapiens
LLAEPVPGI

SEQ ID NO: 70355 - protein, 9 aa, Homo Sapiens
LLAPEPLLV

SEQ ID NO: 70356 - protein, 9 aa, Homo Sapiens
LLCSLVKTI

SEQ ID NO: 70357 - protein, 9 aa, Homo Sapiens
LLDKKSLKI

SEQ ID NO: 70358 - protein, 9 aa, Homo Sapiens
LLFDRPMHV

SEQ ID NO: 70359 - protein, 9 aa, Homo Sapiens
LLFEGEKKI

SEQ ID NO: 70360 - protein, 9 aa, Homo Sapiens
LLFKEGVMV

SEQ ID NO: 70361 - protein, 9 aa, Homo Sapiens
LLFPESIRV

SEQ ID NO: 70362 - protein, 9 aa, Homo Sapiens
LLHNVSQNI

SEQ ID NO: 70363 - protein, 9 aa, Homo Sapiens
LLIPIHLEV

SEQ ID NO: 70364 - protein, 9 aa, Homo Sapiens
LLKEREEKV

SEQ ID NO: 70365 - protein, 9 aa, Homo Sapiens
LLNDHIYVV

SEQ ID NO: 70366 - protein, 9 aa, Homo Sapiens
LLNKSIIRV

SEQ ID NO: 70367 - protein, 9 aa, Homo Sapiens
LLPDIVTCV

SEQ ID NO: 70368 - protein, 9 aa, Homo Sapiens
LLPDLIQKV

SEQ ID NO: 70369 - protein, 9 aa, Homo Sapiens
LLPSVRQEV

SEQ ID NO: 70370 - protein, 9 aa, Homo Sapiens
LLQDIILQV

SEQ ID NO: 70371 - protein, 9 aa, Homo Sapiens
LLRDREVGI

SEQ ID NO: 70372 - protein, 9 aa, Homo Sapiens
LLSDTKLEL

SEQ ID NO: 70373 - protein, 9 aa, Homo Sapiens
LLSDVRFVL

SEQ ID NO: 70374 - protein, 9 aa, Homo Sapiens
LLSEAVQKI

SEQ ID NO: 70375 - protein, 9 aa, Homo Sapiens
LLSHVEQLL

SEQ ID NO: 70376 - protein, 9 aa, Homo Sapiens
LLSPVVPQI

SEQ ID NO: 70377 - protein, 9 aa, Homo Sapiens
LLSRVLFAL

SEQ ID NO: 70378 - protein, 9 aa, Homo Sapiens
LLTELHQLI

SEQ ID NO: 70379 - protein, 9 aa, Homo Sapiens
LLVDEFLKV

SEQ ID NO: 70380 - protein, 9 aa, Homo Sapiens
LMKDCEAEV

SEQ ID NO: 70381 - protein, 9 aa, Homo Sapiens
LMNAVVQTV

SEQ ID NO: 70382 - protein, 9 aa, Homo Sapiens
LQALEVLKI

SEQ ID NO: 70383 - protein, 9 aa, Homo Sapiens
LQAPTPLQI

SEQ ID NO: 70384 - protein, 9 aa, Homo Sapiens
LQCQRIFQV

SEQ ID NO: 70385 - protein, 9 aa, Homo Sapiens
LQFDGIHVV

SEQ ID NO: 70386 - protein, 9 aa, Homo Sapiens
LQHEGIFRV

SEQ ID NO: 70387 - protein, 9 aa, Homo Sapiens
LQHEISCKL

SEQ ID NO: 70388 - protein, 9 aa, Homo Sapiens
LQHPVTTDI

SEQ ID NO: 70389 - protein, 9 aa, Homo Sapiens
LQLELAQVL

SEQ ID NO: 70390 - protein, 9 aa, Homo Sapiens
LQNADPLKV

SEQ ID NO: 70391 - protein, 9 aa, Homo Sapiens
LQNAVIYSI

SEQ ID NO: 70392 - protein, 9 aa, Homo Sapiens
LQNGVLLRT

SEQ ID NO: 70393 - protein, 9 aa, Homo Sapiens
LQNQIVWKI

SEQ ID NO: 70394 - protein, 9 aa, Homo Sapiens
LQPEIIVKI

SEQ ID NO: 70395 - protein, 9 aa, Homo Sapiens
LQQDCALRV

SEQ ID NO: 70396 - protein, 9 aa, Homo Sapiens
LQQSKILKV

SEQ ID NO: 70397 - protein, 9 aa, Homo Sapiens
LQRPDEEAI

SEQ ID NO: 70398 - protein, 9 aa, Homo Sapiens
LQRYSEDRI

SEQ ID NO: 70399 - protein, 9 aa, Homo Sapiens
LQSAHPVRV

SEQ ID NO: 70400 - protein, 9 aa, Homo Sapiens
LQTVGIFRV

SEQ ID NO: 70401 - protein, 9 aa, Homo Sapiens
LQVFLPQAI

SEQ ID NO: 70402 - protein, 9 aa, Homo Sapiens
LQVLIKQEI

SEQ ID NO: 70403 - protein, 9 aa, Homo Sapiens
LQWDKVLRL

SEQ ID NO: 70404 - protein, 9 aa, Homo Sapiens
LQYSFPLQL

SEQ ID NO: 70405 - protein, 9 aa, Homo Sapiens
LRLLKTLET

SEQ ID NO: 70406 - protein, 9 aa, Homo Sapiens
LSFKDPFVI

SEQ ID NO: 70407 - protein, 9 aa, Homo Sapiens
LSMGLILRL

SEQ ID NO: 70408 - protein, 9 aa, Homo Sapiens
LTQDIIMKI

SEQ ID NO: 70409 - protein, 9 aa, Homo Sapiens
LTTKIMQLI

SEQ ID NO: 70410 - protein, 9 aa, Homo Sapiens
LVFGKPVRV

SEQ ID NO: 70411 - protein, 9 aa, Homo Sapiens
LVSFIPLNI

SEQ ID NO: 70412 - protein, 9 aa, Homo Sapiens
LVTDLVLHI

SEQ ID NO: 70413 - protein, 9 aa, Homo Sapiens
MIDNVILLI

SEQ ID NO: 70414 - protein, 9 aa, Homo Sapiens
MIRKEELEI

SEQ ID NO: 70415 - protein, 9 aa, Homo Sapiens
MLFGHPLLV

SEQ ID NO: 70416 - protein, 9 aa, Homo Sapiens
MLRIVEPYI

SEQ ID NO: 70417 - protein, 9 aa, Homo Sapiens
MLRIVEPYV

SEQ ID NO: 70418 - protein, 9 aa, Homo Sapiens
MLRLLFTLV

SEQ ID NO: 70419 - protein, 9 aa, Homo Sapiens
MLSRVVLSA

SEQ ID NO: 70420 - protein, 9 aa, Homo Sapiens
MMAKKHLEI

SEQ ID NO: 70421 - protein, 9 aa, Homo Sapiens
MQFSGSLHT

SEQ ID NO: 70422 - protein, 9 aa, Homo Sapiens
MQLPTRQEI

SEQ ID NO: 70423 - protein, 9 aa, Homo Sapiens
MQNPRQYKI

SEQ ID NO: 70424 - protein, 9 aa, Homo Sapiens
MQTKVVERI

SEQ ID NO: 70425 - protein, 9 aa, Homo Sapiens
MQVNQPLQT

SEQ ID NO: 70426 - protein, 9 aa, Homo Sapiens
MSADVPLVV

SEQ ID NO: 70427 - protein, 9 aa, Homo Sapiens
NLANVVLLL

SEQ ID NO: 70428 - protein, 9 aa, Homo Sapiens
NLAPVILQL

SEQ ID NO: 70429 - protein, 9 aa, Homo Sapiens
NLIGLPLLI

SEQ ID NO: 70430 - protein, 9 aa, Homo Sapiens
NLYNHPQLI

SEQ ID NO: 70431 - protein, 9 aa, Homo Sapiens
NQFPGFKEV

SEQ ID NO: 70432 - protein, 9 aa, Homo Sapiens
NQSSVDLKL

SEQ ID NO: 70433 - protein, 9 aa, Homo Sapiens
NQTPVTLQV

SEQ ID NO: 70434 - protein, 9 aa, Homo Sapiens
NQVGIVLNV

SEQ ID NO: 70435 - protein, 9 aa, Homo Sapiens
NQYRLIVNV

SEQ ID NO: 70436 - protein, 9 aa, Homo Sapiens
NVASVELKI

SEQ ID NO: 70437 - protein, 9 aa, Homo Sapiens
PTPPVFQVR

SEQ ID NO: 70438 - protein, 9 aa, Homo Sapiens
QAADFALKV

SEQ ID NO: 70439 - protein, 9 aa, Homo Sapiens
QALSPLLSV

SEQ ID NO: 70440 - protein, 9 aa, Homo Sapiens
QGCGTELRV

SEQ ID NO: 70441 - protein, 9 aa, Homo Sapiens
QIHSVITAI

SEQ ID NO: 70442 - protein, 9 aa, Homo Sapiens
QIQSIQQSI

SEQ ID NO: 70443 - protein, 9 aa, Homo Sapiens
QIRKIVDQI

SEQ ID NO: 70444 - protein, 9 aa, Homo Sapiens
QITQVNQRV

SEQ ID NO: 70445 - protein, 9 aa, Homo Sapiens
QIYAIRQSI

SEQ ID NO: 70446 - protein, 9 aa, Homo Sapiens
QLAPVFQRV

SEQ ID NO: 70447 - protein, 9 aa, Homo Sapiens
QLASGLLLV

SEQ ID NO: 70448 - protein, 9 aa, Homo Sapiens
QLLDTLLAI

SEQ ID NO: 70449 - protein, 9 aa, Homo Sapiens
QLLGLIQRV

SEQ ID NO: 70450 - protein, 9 aa, Homo Sapiens
QLMPLPVKV

SEQ ID NO: 70451 - protein, 9 aa, Homo Sapiens
QLRNLFDSI

SEQ ID NO: 70452 - protein, 9 aa, Homo Sapiens
QLSPVLLYL

SEQ ID NO: 70453 - protein, 9 aa, Homo Sapiens
QLSTVITQV

SEQ ID NO: 70454 - protein, 9 aa, Homo Sapiens
QLTLIKQEI

SEQ ID NO: 70455 - protein, 9 aa, Homo Sapiens
QLTNVILHL

SEQ ID NO: 70456 - protein, 9 aa, Homo Sapiens
QLVDIIEKV

SEQ ID NO: 70457 - protein, 9 aa, Homo Sapiens
QMLDVAIRV

SEQ ID NO: 70458 - protein, 9 aa, Homo Sapiens
QMNHIVMEI

SEQ ID NO: 70459 - protein, 9 aa, Homo Sapiens
QMSDLPVKV

SEQ ID NO: 70460 - protein, 9 aa, Homo Sapiens
QMSGAQIKI

SEQ ID NO: 70461 - protein, 9 aa, Homo Sapiens
QMTNILQQI

SEQ ID NO: 70462 - protein, 9 aa, Homo Sapiens
QMVRMILKI

SEQ ID NO: 70463 - protein, 9 aa, Homo Sapiens
QQAAIPIQI

SEQ ID NO: 70464 - protein, 9 aa, Homo Sapiens
QQADVRLML

SEQ ID NO: 70465 - protein, 9 aa, Homo Sapiens
QQAPAVDVV

SEQ ID NO: 70466 - protein, 9 aa, Homo Sapiens
QQAVARLEI

SEQ ID NO: 70467 - protein, 9 aa, Homo Sapiens
QQCPERLEV

SEQ ID NO: 70468 - protein, 9 aa, Homo Sapiens
QQDQVDRNI

SEQ ID NO: 70469 - protein, 9 aa, Homo Sapiens
QQDRIQQEI

SEQ ID NO: 70470 - protein, 9 aa, Homo Sapiens
QQFNVQALV

SEQ ID NO: 70471 - protein, 9 aa, Homo Sapiens
QQGTTKLSV

SEQ ID NO: 70472 - protein, 9 aa, Homo Sapiens
QQHPLILKV

SEQ ID NO: 70473 - protein, 9 aa, Homo Sapiens
QQHSILLLL

SEQ ID NO: 70474 - protein, 9 aa, Homo Sapiens
QQHSIPVFI

SEQ ID NO: 70475 - protein, 9 aa, Homo Sapiens
QQHVIETLI

SEQ ID NO: 70476 - protein, 9 aa, Homo Sapiens
QQIELDLKA

SEQ ID NO: 70477 - protein, 9 aa, Homo Sapiens
QQIGKVVQV

SEQ ID NO: 70478 - protein, 9 aa, Homo Sapiens
QQISGVQQI

SEQ ID NO: 70479 - protein, 9 aa, Homo Sapiens
QQLCIFWKV

SEQ ID NO: 70480 - protein, 9 aa, Homo Sapiens
QQLGLKQQI

SEQ ID NO: 70481 - protein, 9 aa, Homo Sapiens
QQLPDILKI

SEQ ID NO: 70482 - protein, 9 aa, Homo Sapiens
QQNGSVVRV

SEQ ID NO: 70483 - protein, 9 aa, Homo Sapiens
QQNGTPLKV

SEQ ID NO: 70484 - protein, 9 aa, Homo Sapiens
QQNPLVQRV

SEQ ID NO: 70485 - protein, 9 aa, Homo Sapiens
QQPPVQPQV

SEQ ID NO: 70486 - protein, 9 aa, Homo Sapiens
QQQNQRLLV

SEQ ID NO: 70487 - protein, 9 aa, Homo Sapiens
QQSGVPQQI

SEQ ID NO: 70488 - protein, 9 aa, Homo Sapiens
QQSIERLLV

SEQ ID NO: 70489 - protein, 9 aa, Homo Sapiens
QQTPLHLAV

SEQ ID NO: 70490 - protein, 9 aa, Homo Sapiens
QQVAFQPSI

SEQ ID NO: 70491 - protein, 9 aa, Homo Sapiens
QQVQTQIQV

SEQ ID NO: 70492 - protein, 9 aa, Homo Sapiens
QQYECVAEI

SEQ ID NO: 70493 - protein, 9 aa, Homo Sapiens
QQYQWLEKV

SEQ ID NO: 70494 - protein, 9 aa, Homo Sapiens
QSCGTYLRV

SEQ ID NO: 70495 - protein, 9 aa, Homo Sapiens
QSCVIIIRI

SEQ ID NO: 70496 - protein, 9 aa, Homo Sapiens
QSESELQKL

SEQ ID NO: 70497 - protein, 9 aa, Homo Sapiens
QTSATFLRV

SEQ ID NO: 70498 - protein, 9 aa, Homo Sapiens
QVAAEILEI

SEQ ID NO: 70499 - protein, 9 aa, Homo Sapiens
QVAGTPMFV

SEQ ID NO: 70500 - protein, 9 aa, Homo Sapiens
QVANLQMKI

SEQ ID NO: 70501 - protein, 9 aa, Homo Sapiens
QVANVRFNV

SEQ ID NO: 70502 - protein, 9 aa, Homo Sapiens
QVAPVPLNV

SEQ ID NO: 70503 - protein, 9 aa, Homo Sapiens
QVCAIIERV

SEQ ID NO: 70504 - protein, 9 aa, Homo Sapiens
QVFKGAVKI

SEQ ID NO: 70505 - protein, 9 aa, Homo Sapiens
QVVGTPLLV

SEQ ID NO: 70506 - protein, 9 aa, Homo Sapiens
RAAEFYAKV

SEQ ID NO: 70507 - protein, 9 aa, Homo Sapiens
RAAQLAIRV

SEQ ID NO: 70508 - protein, 9 aa, Homo Sapiens
RAASVFIRV

SEQ ID NO: 70509 - protein, 9 aa, Homo Sapiens
RAATFPLQV

SEQ ID NO: 70510 - protein, 9 aa, Homo Sapiens
RAFGIPIRV

SEQ ID NO: 70511 - protein, 9 aa, Homo Sapiens
RAHNVPLKL

SEQ ID NO: 70512 - protein, 9 aa, Homo Sapiens
RALDYALQI

SEQ ID NO: 70513 - protein, 9 aa, Homo Sapiens
RALKGVLRV

SEQ ID NO: 70514 - protein, 9 aa, Homo Sapiens
RALQQFLYV

SEQ ID NO: 70515 - protein, 9 aa, Homo Sapiens
RALSILQNV

SEQ ID NO: 70516 - protein, 9 aa, Homo Sapiens
RAMSIAQRV

SEQ ID NO: 70517 - protein, 9 aa, Homo Sapiens
RAQGVVLKV

SEQ ID NO: 70518 - protein, 9 aa, Homo Sapiens
RASGIFLRL

SEQ ID NO: 70519 - protein, 9 aa, Homo Sapiens
RATGISFAI

SEQ ID NO: 70520 - protein, 9 aa, Homo Sapiens
RAYIVQLQI

SEQ ID NO: 70521 - protein, 9 aa, Homo Sapiens
REAEIYQTV

SEQ ID NO: 70522 - protein, 9 aa, Homo Sapiens
REHTALLKI

SEQ ID NO: 70523 - protein, 9 aa, Homo Sapiens
REINYILRV

SEQ ID NO: 70524 - protein, 9 aa, Homo Sapiens
REYFHKLLI

SEQ ID NO: 70525 - protein, 9 aa, Homo Sapiens
RGADISLQV

SEQ ID NO: 70526 - protein, 9 aa, Homo Sapiens
RGCDLLQEV

SEQ ID NO: 70527 - protein, 9 aa, Homo Sapiens
RGFDKAYVV

SEQ ID NO: 70528 - protein, 9 aa, Homo Sapiens
RGTKVILHL

SEQ ID NO: 70529 - protein, 9 aa, Homo Sapiens
RHCDLQVRI

SEQ ID NO: 70530 - protein, 9 aa, Homo Sapiens
RIAAQGFTV

SEQ ID NO: 70531 - protein, 9 aa, Homo Sapiens
RIADSFQVI

SEQ ID NO: 70532 - protein, 9 aa, Homo Sapiens
RIAHAKQII

SEQ ID NO: 70533 - protein, 9 aa, Homo Sapiens
RIAQLRFLL

SEQ ID NO: 70534 - protein, 9 aa, Homo Sapiens
RIDGKTYVI

SEQ ID NO: 70535 - protein, 9 aa, Homo Sapiens
RIDGVSLLV

SEQ ID NO: 70536 - protein, 9 aa, Homo Sapiens
RIFGESIMI

SEQ ID NO: 70537 - protein, 9 aa, Homo Sapiens
RIFGETIDI

SEQ ID NO: 70538 - protein, 9 aa, Homo Sapiens
RIFGYPVGI

SEQ ID NO: 70539 - protein, 9 aa, Homo Sapiens
RIFIGTFKA

SEQ ID NO: 70540 - protein, 9 aa, Homo Sapiens
RIFQTLLEV

SEQ ID NO: 70541 - protein, 9 aa, Homo Sapiens
RIFSEVRRI

SEQ ID NO: 70542 - protein, 9 aa, Homo Sapiens
RIFVGLCQV

SEQ ID NO: 70543 - protein, 9 aa, Homo Sapiens
RIHPFHILI

SEQ ID NO: 70544 - protein, 9 aa, Homo Sapiens
RIHPVSTMV

SEQ ID NO: 70545 - protein, 9 aa, Homo Sapiens
RIICEAHKV

SEQ ID NO: 70546 - protein, 9 aa, Homo Sapiens
RIINTFLKT

SEQ ID NO: 70547 - protein, 9 aa, Homo Sapiens
RIKAIVHAV

SEQ ID NO: 70548 - protein, 9 aa, Homo Sapiens
RIKELEERI

SEQ ID NO: 70549 - protein, 9 aa, Homo Sapiens
RIKEYPLYI

SEQ ID NO: 70550 - protein, 9 aa, Homo Sapiens
RIKKPDYKV

SEQ ID NO: 70551 - protein, 9 aa, Homo Sapiens
RIKNNDPKL

SEQ ID NO: 70552 - protein, 9 aa, Homo Sapiens
RIKQITEEV

SEQ ID NO: 70553 - protein, 9 aa, Homo Sapiens
RIKRDIMSI

SEQ ID NO: 70554 - protein, 9 aa, Homo Sapiens
RIKSQELEV

SEQ ID NO: 70555 - protein, 9 aa, Homo Sapiens
RILDGMFAI

SEQ ID NO: 70556 - protein, 9 aa, Homo Sapiens
RILDVAQDL

SEQ ID NO: 70557 - protein, 9 aa, Homo Sapiens
RILGIIDAI

SEQ ID NO: 70558 - protein, 9 aa, Homo Sapiens
RILSLEQRV

SEQ ID NO: 70559 - protein, 9 aa, Homo Sapiens
RIMEIVDAI

SEQ ID NO: 70560 - protein, 9 aa, Homo Sapiens
RIMEVIDAI

SEQ ID NO: 70561 - protein, 9 aa, Homo Sapiens
RINNINILV

SEQ ID NO: 70562 - protein, 9 aa, Homo Sapiens
RIPAYFVTV

SEQ ID NO: 70563 - protein, 9 aa, Homo Sapiens
RIPELVQRI

SEQ ID NO: 70564 - protein, 9 aa, Homo Sapiens
RISDIRLFI

SEQ ID NO: 70565 - protein, 9 aa, Homo Sapiens
RISDVHFSV

SEQ ID NO: 70566 - protein, 9 aa, Homo Sapiens
RISELQWSV

SEQ ID NO: 70567 - protein, 9 aa, Homo Sapiens
RISPPATSV

SEQ ID NO: 70568 - protein, 9 aa, Homo Sapiens
RISPWLLRV

SEQ ID NO: 70569 - protein, 9 aa, Homo Sapiens
RISSKSLKV

SEQ ID NO: 70570 - protein, 9 aa, Homo Sapiens
RITSLIVHV

SEQ ID NO: 70571 - protein, 9 aa, Homo Sapiens
RIVKGEVSV

SEQ ID NO: 70572 - protein, 9 aa, Homo Sapiens
RIYESHVGI

SEQ ID NO: 70573 - protein, 9 aa, Homo Sapiens
RIYKYIHKV

SEQ ID NO: 70574 - protein, 9 aa, Homo Sapiens
RKTEVLLKV

SEQ ID NO: 70575 - protein, 9 aa, Homo Sapiens
RKYPTLLEV

SEQ ID NO: 70576 - protein, 9 aa, Homo Sapiens
RLAACVNLI

SEQ ID NO: 70577 - protein, 9 aa, Homo Sapiens
RLAALEQNV

SEQ ID NO: 70578 - protein, 9 aa, Homo Sapiens
RLAALQHRL

SEQ ID NO: 70579 - protein, 9 aa, Homo Sapiens
RLADKSVLV

SEQ ID NO: 70580 - protein, 9 aa, Homo Sapiens
RLAETQEEI

SEQ ID NO: 70581 - protein, 9 aa, Homo Sapiens
RLAFPVEVV

SEQ ID NO: 70582 - protein, 9 aa, Homo Sapiens
RLAHLGVQV

SEQ ID NO: 70583 - protein, 9 aa, Homo Sapiens
RLAHYIDRV

SEQ ID NO: 70584 - protein, 9 aa, Homo Sapiens
RLAKSDPMV

SEQ ID NO: 70585 - protein, 9 aa, Homo Sapiens
RLAQHITYV

SEQ ID NO: 70586 - protein, 9 aa, Homo Sapiens
RLAQVAKAV

SEQ ID NO: 70587 - protein, 9 aa, Homo Sapiens
RLAVYIDKV

SEQ ID NO: 70588 - protein, 9 aa, Homo Sapiens
RLAVYIDRV

SEQ ID NO: 70589 - protein, 9 aa, Homo Sapiens
RLCEIFTRM

SEQ ID NO: 70590 - protein, 9 aa, Homo Sapiens
RLCSISVTA

SEQ ID NO: 70591 - protein, 9 aa, Homo Sapiens
RLDAVLQRI

SEQ ID NO: 70592 - protein, 9 aa, Homo Sapiens
RLDETIQAI

SEQ ID NO: 70593 - protein, 9 aa, Homo Sapiens
RLFDDVPQV

SEQ ID NO: 70594 - protein, 9 aa, Homo Sapiens
RLFDEPQLA

SEQ ID NO: 70595 - protein, 9 aa, Homo Sapiens
RLFHPKLII

SEQ ID NO: 70596 - protein, 9 aa, Homo Sapiens
RLFIGGKKV

SEQ ID NO: 70597 - protein, 9 aa, Homo Sapiens
RLFQKTLKL

SEQ ID NO: 70598 - protein, 9 aa, Homo Sapiens
RLFQTEEKI

SEQ ID NO: 70599 - protein, 9 aa, Homo Sapiens
RLFSKEEKL

SEQ ID NO: 70600 - protein, 9 aa, Homo Sapiens
RLGCFNLTI

SEQ ID NO: 70601 - protein, 9 aa, Homo Sapiens
RLGCFNLTV

SEQ ID NO: 70602 - protein, 9 aa, Homo Sapiens
RLGKIVSKI

SEQ ID NO: 70603 - protein, 9 aa, Homo Sapiens
RLHDQMVKI

SEQ ID NO: 70604 - protein, 9 aa, Homo Sapiens
RLHEKVNII

SEQ ID NO: 70605 - protein, 9 aa, Homo Sapiens
RLHFLPESV

SEQ ID NO: 70606 - protein, 9 aa, Homo Sapiens
RLHKIKICI

SEQ ID NO: 70607 - protein, 9 aa, Homo Sapiens
RLIAKEMNI

SEQ ID NO: 70608 - protein, 9 aa, Homo Sapiens
RLIAQRYLL

SEQ ID NO: 70609 - protein, 9 aa, Homo Sapiens
RLIDLHTNV

SEQ ID NO: 70610 - protein, 9 aa, Homo Sapiens
RLIEETISI

SEQ ID NO: 70611 - protein, 9 aa, Homo Sapiens
RLIEHCDHI

SEQ ID NO: 70612 - protein, 9 aa, Homo Sapiens
RLIESLFTI

SEQ ID NO: 70613 - protein, 9 aa, Homo Sapiens
RLIILIQQV

SEQ ID NO: 70614 - protein, 9 aa, Homo Sapiens
RLIKSFEKV

SEQ ID NO: 70615 - protein, 9 aa, Homo Sapiens
RLILIESRI

SEQ ID NO: 70616 - protein, 9 aa, Homo Sapiens
RLINQVLEL

SEQ ID NO: 70617 - protein, 9 aa, Homo Sapiens
RLIPNAIQV

SEQ ID NO: 70618 - protein, 9 aa, Homo Sapiens
RLIPTLVSI

SEQ ID NO: 70619 - protein, 9 aa, Homo Sapiens
RLISKFDTV

SEQ ID NO: 70620 - protein, 9 aa, Homo Sapiens
RLKASRETI

SEQ ID NO: 70621 - protein, 9 aa, Homo Sapiens
RLKDLEALL

SEQ ID NO: 70622 - protein, 9 aa, Homo Sapiens
RLKEAFDYI

SEQ ID NO: 70623 - protein, 9 aa, Homo Sapiens
RLKEIEHNL

SEQ ID NO: 70624 - protein, 9 aa, Homo Sapiens
RLKEIKEEL

SEQ ID NO: 70625 - protein, 9 aa, Homo Sapiens
RLKELESQV

SEQ ID NO: 70626 - protein, 9 aa, Homo Sapiens
RLKENQISV

SEQ ID NO: 70627 - protein, 9 aa, Homo Sapiens
RLKEYEKAL

SEQ ID NO: 70628 - protein, 9 aa, Homo Sapiens
RLKFSADKV

SEQ ID NO: 70629 - protein, 9 aa, Homo Sapiens
RLKGKDMVV

SEQ ID NO: 70630 - protein, 9 aa, Homo Sapiens
RLKKPDQAI

SEQ ID NO: 70631 - protein, 9 aa, Homo Sapiens
RLKNLEPKM

SEQ ID NO: 70632 - protein, 9 aa, Homo Sapiens
RLKPEIQCV

SEQ ID NO: 70633 - protein, 9 aa, Homo Sapiens
RLKPPSNVV

SEQ ID NO: 70634 - protein, 9 aa, Homo Sapiens
RLKSKDVKL

SEQ ID NO: 70635 - protein, 9 aa, Homo Sapiens
RLKTLEREI

SEQ ID NO: 70636 - protein, 9 aa, Homo Sapiens
RLLDQRDRI

SEQ ID NO: 70637 - protein, 9 aa, Homo Sapiens
RLLDSEIKI

SEQ ID NO: 70638 - protein, 9 aa, Homo Sapiens
RLLDSVRAI

SEQ ID NO: 70639 - protein, 9 aa, Homo Sapiens
RLLDYVATV

SEQ ID NO: 70640 - protein, 9 aa, Homo Sapiens
RLLDYVVNI

SEQ ID NO: 70641 - protein, 9 aa, Homo Sapiens
RLLEEQRRV

SEQ ID NO: 70642 - protein, 9 aa, Homo Sapiens
RLLEKSQRV

SEQ ID NO: 70643 - protein, 9 aa, Homo Sapiens
RLLENMTEV

SEQ ID NO: 70644 - protein, 9 aa, Homo Sapiens
RLLEQGIRV

SEQ ID NO: 70645 - protein, 9 aa, Homo Sapiens
RLLIPVRTV

SEQ ID NO: 70646 - protein, 9 aa, Homo Sapiens
RLLKHKLKV

SEQ ID NO: 70647 - protein, 9 aa, Homo Sapiens
RLLKSKLYL

SEQ ID NO: 70648 - protein, 9 aa, Homo Sapiens
RLLLLPLLL

SEQ ID NO: 70649 - protein, 9 aa, Homo Sapiens
RLLNILMQL

SEQ ID NO: 70650 - protein, 9 aa, Homo Sapiens
RLLPAFLKV

SEQ ID NO: 70651 - protein, 9 aa, Homo Sapiens
RLLPEKLTI

SEQ ID NO: 70652 - protein, 9 aa, Homo Sapiens
RLLPGNATI

SEQ ID NO: 70653 - protein, 9 aa, Homo Sapiens
RLLPKVQEV

SEQ ID NO: 70654 - protein, 9 aa, Homo Sapiens
RLLQQEEKV

SEQ ID NO: 70655 - protein, 9 aa, Homo Sapiens
RLLQQMIDI

SEQ ID NO: 70656 - protein, 9 aa, Homo Sapiens
RLLQQVSQI

SEQ ID NO: 70657 - protein, 9 aa, Homo Sapiens
RLLQRDVQI

SEQ ID NO: 70658 - protein, 9 aa, Homo Sapiens
RLMDPVKHI

SEQ ID NO: 70659 - protein, 9 aa, Homo Sapiens
RLMNDMTAV

SEQ ID NO: 70660 - protein, 9 aa, Homo Sapiens
RLMNETTAV

SEQ ID NO: 70661 - protein, 9 aa, Homo Sapiens
RLMSGKVKV

SEQ ID NO: 70662 - protein, 9 aa, Homo Sapiens
RLNEAAVTV

SEQ ID NO: 70663 - protein, 9 aa, Homo Sapiens
RLNIPVSQV

SEQ ID NO: 70664 - protein, 9 aa, Homo Sapiens
RLNKVIKSV

SEQ ID NO: 70665 - protein, 9 aa, Homo Sapiens
RLNLVEAFV

SEQ ID NO: 70666 - protein, 9 aa, Homo Sapiens
RLNPEMLQI

SEQ ID NO: 70667 - protein, 9 aa, Homo Sapiens
RLNPLVLLL

SEQ ID NO: 70668 - protein, 9 aa, Homo Sapiens
RLPAWQPIL

SEQ ID NO: 70669 - protein, 9 aa, Homo Sapiens
RLPDVQLWL

SEQ ID NO: 70670 - protein, 9 aa, Homo Sapiens
RLPEAIEEV

SEQ ID NO: 70671 - protein, 9 aa, Homo Sapiens
RLPEIYIQL

SEQ ID NO: 70672 - protein, 9 aa, Homo Sapiens
RLPGEAQKI

SEQ ID NO: 70673 - protein, 9 aa, Homo Sapiens
RLPIEDPYL

SEQ ID NO: 70674 - protein, 9 aa, Homo Sapiens
RLPLVVSFI

SEQ ID NO: 70675 - protein, 9 aa, Homo Sapiens
RLPPEVNRI

SEQ ID NO: 70676 - protein, 9 aa, Homo Sapiens
RLPPPFPGL

SEQ ID NO: 70677 - protein, 9 aa, Homo Sapiens
RLPQYYIVV

SEQ ID NO: 70678 - protein, 9 aa, Homo Sapiens
RLPRPLPAV

SEQ ID NO: 70679 - protein, 9 aa, Homo Sapiens
RLPRSVTTV

SEQ ID NO: 70680 - protein, 9 aa, Homo Sapiens
RLQDAIAKV

SEQ ID NO: 70681 - protein, 9 aa, Homo Sapiens
RLQEASQTI

SEQ ID NO: 70682 - protein, 9 aa, Homo Sapiens
RLQEVTHSV

SEQ ID NO: 70683 - protein, 9 aa, Homo Sapiens
RLQKLHTSI

SEQ ID NO: 70684 - protein, 9 aa, Homo Sapiens
RLQKYPVRV

SEQ ID NO: 70685 - protein, 9 aa, Homo Sapiens
RLQNIRNTI

SEQ ID NO: 70686 - protein, 9 aa, Homo Sapiens
RLQQLQHRV

SEQ ID NO: 70687 - protein, 9 aa, Homo Sapiens
RLQRIHAEI

SEQ ID NO: 70688 - protein, 9 aa, Homo Sapiens
RLQSKTIKV

SEQ ID NO: 70689 - protein, 9 aa, Homo Sapiens
RLRDFQERL

SEQ ID NO: 70690 - protein, 9 aa, Homo Sapiens
RLRPEDPVL

SEQ ID NO: 70691 - protein, 9 aa, Homo Sapiens
RLRSFTTTI

SEQ ID NO: 70692 - protein, 9 aa, Homo Sapiens
RLSCFAQTV

SEQ ID NO: 70693 - protein, 9 aa, Homo Sapiens
RLSEVQASL

SEQ ID NO: 70694 - protein, 9 aa, Homo Sapiens
RLSLHKGKI

SEQ ID NO: 70695 - protein, 9 aa, Homo Sapiens
RLSNKVEAI

SEQ ID NO: 70696 - protein, 9 aa, Homo Sapiens
RLSNRVVRV

SEQ ID NO: 70697 - protein, 9 aa, Homo Sapiens
RLSPKPVRV

SEQ ID NO: 70698 - protein, 9 aa, Homo Sapiens
RLSPVSPAL

SEQ ID NO: 70699 - protein, 9 aa, Homo Sapiens
RLSQTFLQL

SEQ ID NO: 70700 - protein, 9 aa, Homo Sapiens
RLSSVNAEV

SEQ ID NO: 70701 - protein, 9 aa, Homo Sapiens
RLTDTDAAI

SEQ ID NO: 70702 - protein, 9 aa, Homo Sapiens
RLTDYISKV

SEQ ID NO: 70703 - protein, 9 aa, Homo Sapiens
RLTEICTKI

SEQ ID NO: 70704 - protein, 9 aa, Homo Sapiens
RLTKGKFAV

SEQ ID NO: 70705 - protein, 9 aa, Homo Sapiens
RLTPKLMEV

SEQ ID NO: 70706 - protein, 9 aa, Homo Sapiens
RLTPLQLEI

SEQ ID NO: 70707 - protein, 9 aa, Homo Sapiens
RLTPQAVKI

SEQ ID NO: 70708 - protein, 9 aa, Homo Sapiens
RLTQEKITV

SEQ ID NO: 70709 - protein, 9 aa, Homo Sapiens
RLTRLYLKA

SEQ ID NO: 70710 - protein, 9 aa, Homo Sapiens
RLTSFIGAI

SEQ ID NO: 70711 - protein, 9 aa, Homo Sapiens
RLVEIQYEL

SEQ ID NO: 70712 - protein, 9 aa, Homo Sapiens
RLVEVPMEL

SEQ ID NO: 70713 - protein, 9 aa, Homo Sapiens
RLVNWSCTL

SEQ ID NO: 70714 - protein, 9 aa, Homo Sapiens
RLVRVSTSV

SEQ ID NO: 70715 - protein, 9 aa, Homo Sapiens
RLVSSDPEI

SEQ ID NO: 70716 - protein, 9 aa, Homo Sapiens
RLVSWVNLI

SEQ ID NO: 70717 - protein, 9 aa, Homo Sapiens
RLYFGERNV

SEQ ID NO: 70718 - protein, 9 aa, Homo Sapiens
RLYGKLAKV

SEQ ID NO: 70719 - protein, 9 aa, Homo Sapiens
RLYGKVLRA

SEQ ID NO: 70720 - protein, 9 aa, Homo Sapiens
RLYHITDQV

SEQ ID NO: 70721 - protein, 9 aa, Homo Sapiens
RLYNPFLRV

SEQ ID NO: 70722 - protein, 9 aa, Homo Sapiens
RLYPLAIQI

SEQ ID NO: 70723 - protein, 9 aa, Homo Sapiens
RLYQKDLRA

SEQ ID NO: 70724 - protein, 9 aa, Homo Sapiens
RLYSVSYLL

SEQ ID NO: 70725 - protein, 9 aa, Homo Sapiens
RMARTPQTV

SEQ ID NO: 70726 - protein, 9 aa, Homo Sapiens
RMAVLNEQV

SEQ ID NO: 70727 - protein, 9 aa, Homo Sapiens
RMDELFVLI

SEQ ID NO: 70728 - protein, 9 aa, Homo Sapiens
RMDGHIQLI

SEQ ID NO: 70729 - protein, 9 aa, Homo Sapiens
RMEDIKILI

SEQ ID NO: 70730 - protein, 9 aa, Homo Sapiens
RMFDGKFVV

SEQ ID NO: 70731 - protein, 9 aa, Homo Sapiens
RMFFGKNKV

SEQ ID NO: 70732 - protein, 9 aa, Homo Sapiens
RMFFHFSEI

SEQ ID NO: 70733 - protein, 9 aa, Homo Sapiens
RMFGIPVVV

SEQ ID NO: 70734 - protein, 9 aa, Homo Sapiens
RMFHIRAVI

SEQ ID NO: 70735 - protein, 9 aa, Homo Sapiens
RMGPPLHTV

SEQ ID NO: 70736 - protein, 9 aa, Homo Sapiens
RMIDIQTRM

SEQ ID NO: 70737 - protein, 9 aa, Homo Sapiens
RMIEVEQKL

SEQ ID NO: 70738 - protein, 9 aa, Homo Sapiens
RMIGQICEV

SEQ ID NO: 70739 - protein, 9 aa, Homo Sapiens
RMIKLGLGI

SEQ ID NO: 70740 - protein, 9 aa, Homo Sapiens
RMITAMNTI

SEQ ID NO: 70741 - protein, 9 aa, Homo Sapiens
RMLAHPLHV

SEQ ID NO: 70742 - protein, 9 aa, Homo Sapiens
RMLIKLLEV

SEQ ID NO: 70743 - protein, 9 aa, Homo Sapiens
RMLKEILKI

SEQ ID NO: 70744 - protein, 9 aa, Homo Sapiens
RMLPHAPGV

SEQ ID NO: 70745 - protein, 9 aa, Homo Sapiens
RMLYMIEQV

SEQ ID NO: 70746 - protein, 9 aa, Homo Sapiens
RMNPNSPSI

SEQ ID NO: 70747 - protein, 9 aa, Homo Sapiens
RMPKVQQTV

SEQ ID NO: 70748 - protein, 9 aa, Homo Sapiens
RMREEFDKI

SEQ ID NO: 70749 - protein, 9 aa, Homo Sapiens
RMVAEIQNV

SEQ ID NO: 70750 - protein, 9 aa, Homo Sapiens
RQAAFKLYA

SEQ ID NO: 70751 - protein, 9 aa, Homo Sapiens
RQADFVQVL

SEQ ID NO: 70752 - protein, 9 aa, Homo Sapiens
RQADKVWRL

SEQ ID NO: 70753 - protein, 9 aa, Homo Sapiens
RQALAAPRV

SEQ ID NO: 70754 - protein, 9 aa, Homo Sapiens
RQALPQVRL

SEQ ID NO: 70755 - protein, 9 aa, Homo Sapiens
RQAPPHIEL

SEQ ID NO: 70756 - protein, 9 aa, Homo Sapiens
RQAPVLLQT

SEQ ID NO: 70757 - protein, 9 aa, Homo Sapiens
RQATPLKKV

SEQ ID NO: 70758 - protein, 9 aa, Homo Sapiens
RQAYVQFAL

SEQ ID NO: 70759 - protein, 9 aa, Homo Sapiens
RQDESIQRI

SEQ ID NO: 70760 - protein, 9 aa, Homo Sapiens
RQDLTQSLI

SEQ ID NO: 70761 - protein, 9 aa, Homo Sapiens
RQDNSILKV

SEQ ID NO: 70762 - protein, 9 aa, Homo Sapiens
RQDQIQQVV

SEQ ID NO: 70763 - protein, 9 aa, Homo Sapiens
RQEDLIMKV

SEQ ID NO: 70764 - protein, 9 aa, Homo Sapiens
RQFDNFKRV

SEQ ID NO: 70765 - protein, 9 aa, Homo Sapiens
RQFDVDILI

SEQ ID NO: 70766 - protein, 9 aa, Homo Sapiens
RQFGVIAKT

SEQ ID NO: 70767 - protein, 9 aa, Homo Sapiens
RQFIAAIKL

SEQ ID NO: 70768 - protein, 9 aa, Homo Sapiens
RQFKEIAAV

SEQ ID NO: 70769 - protein, 9 aa, Homo Sapiens
RQFLNRDDI

SEQ ID NO: 70770 - protein, 9 aa, Homo Sapiens
RQFPGSHRV

SEQ ID NO: 70771 - protein, 9 aa, Homo Sapiens
RQFPVTVHF

SEQ ID NO: 70772 - protein, 9 aa, Homo Sapiens
RQFSTPFQL

SEQ ID NO: 70773 - protein, 9 aa, Homo Sapiens
RQFVHIKKI

SEQ ID NO: 70774 - protein, 9 aa, Homo Sapiens
RQFVTATDV

SEQ ID NO: 70775 - protein, 9 aa, Homo Sapiens
RQFYEEELI

SEQ ID NO: 70776 - protein, 9 aa, Homo Sapiens
RQGEVVQRL

SEQ ID NO: 70777 - protein, 9 aa, Homo Sapiens
RQGKAKLVI

SEQ ID NO: 70778 - protein, 9 aa, Homo Sapiens
RQGLSMRQI

SEQ ID NO: 70779 - protein, 9 aa, Homo Sapiens
RQGMFAQLV

SEQ ID NO: 70780 - protein, 9 aa, Homo Sapiens
RQGPEGLEV

SEQ ID NO: 70781 - protein, 9 aa, Homo Sapiens
RQGPNANLV

SEQ ID NO: 70782 - protein, 9 aa, Homo Sapiens
RQGPVNQTV

SEQ ID NO: 70783 - protein, 9 aa, Homo Sapiens
RQGQIEVSI

SEQ ID NO: 70784 - protein, 9 aa, Homo Sapiens
RQGTHITVV

SEQ ID NO: 70785 - protein, 9 aa, Homo Sapiens
RQGVLGIKV

SEQ ID NO: 70786 - protein, 9 aa, Homo Sapiens
RQHEIILKA

SEQ ID NO: 70787 - protein, 9 aa, Homo Sapiens
RQHEIVLKV

SEQ ID NO: 70788 - protein, 9 aa, Homo Sapiens
RQHFVYDHV

SEQ ID NO: 70789 - protein, 9 aa, Homo Sapiens
RQHILQQVL

SEQ ID NO: 70790 - protein, 9 aa, Homo Sapiens
RQHLLFRSL

SEQ ID NO: 70791 - protein, 9 aa, Homo Sapiens
RQHLQATGV

SEQ ID NO: 70792 - protein, 9 aa, Homo Sapiens
RQHNWPLTM

SEQ ID NO: 70793 - protein, 9 aa, Homo Sapiens
RQHPFYFKA

SEQ ID NO: 70794 - protein, 9 aa, Homo Sapiens
RQHPLRFIL

SEQ ID NO: 70795 - protein, 9 aa, Homo Sapiens
RQHQQPFQV

SEQ ID NO: 70796 - protein, 9 aa, Homo Sapiens
RQHTQIVRL

SEQ ID NO: 70797 - protein, 9 aa, Homo Sapiens
RQHVIDVQI

SEQ ID NO: 70798 - protein, 9 aa, Homo Sapiens
RQHWTMTKI

SEQ ID NO: 70799 - protein, 9 aa, Homo Sapiens
RQIDQFLVV

SEQ ID NO: 70800 - protein, 9 aa, Homo Sapiens
RQIEREHLI

SEQ ID NO: 70801 - protein, 9 aa, Homo Sapiens
RQIEYEYKL

SEQ ID NO: 70802 - protein, 9 aa, Homo Sapiens
RQIFNGTFV

SEQ ID NO: 70803 - protein, 9 aa, Homo Sapiens
RQIGVEHVV

SEQ ID NO: 70804 - protein, 9 aa, Homo Sapiens
RQIKIKTGV

SEQ ID NO: 70805 - protein, 9 aa, Homo Sapiens
RQILAARAI

SEQ ID NO: 70806 - protein, 9 aa, Homo Sapiens
RQIQVMEKL

SEQ ID NO: 70807 - protein, 9 aa, Homo Sapiens
RQKLQLEKV

SEQ ID NO: 70808 - protein, 9 aa, Homo Sapiens
RQLAKIHAI

SEQ ID NO: 70809 - protein, 9 aa, Homo Sapiens
RQLEAIVRI

SEQ ID NO: 70810 - protein, 9 aa, Homo Sapiens
RQLEEARQI

SEQ ID NO: 70811 - protein, 9 aa, Homo Sapiens
RQLEKIKTI

SEQ ID NO: 70812 - protein, 9 aa, Homo Sapiens
RQLEKLKEV

SEQ ID NO: 70813 - protein, 9 aa, Homo Sapiens
RQLESLIRL

SEQ ID NO: 70814 - protein, 9 aa, Homo Sapiens
RQLESMIRL

SEQ ID NO: 70815 - protein, 9 aa, Homo Sapiens
RQLGHALLV

SEQ ID NO: 70816 - protein, 9 aa, Homo Sapiens
RQLGSKVLL

SEQ ID NO: 70817 - protein, 9 aa, Homo Sapiens
RQLHLNQLI

SEQ ID NO: 70818 - protein, 9 aa, Homo Sapiens
RQLKAFKSV

SEQ ID NO: 70819 - protein, 9 aa, Homo Sapiens
RQLLKSYKI

SEQ ID NO: 70820 - protein, 9 aa, Homo Sapiens
RQLNLENVV

SEQ ID NO: 70821 - protein, 9 aa, Homo Sapiens
RQLPMKIRI

SEQ ID NO: 70822 - protein, 9 aa, Homo Sapiens
RQLPSSHAL

SEQ ID NO: 70823 - protein, 9 aa, Homo Sapiens
RQLRQEVVV

SEQ ID NO: 70824 - protein, 9 aa, Homo Sapiens
RQLSRELRL

SEQ ID NO: 70825 - protein, 9 aa, Homo Sapiens
RQLTEKLTV

SEQ ID NO: 70826 - protein, 9 aa, Homo Sapiens
RQLVAQSGV

SEQ ID NO: 70827 - protein, 9 aa, Homo Sapiens
RQLYEPLVM

SEQ ID NO: 70828 - protein, 9 aa, Homo Sapiens
RQMIMIRSI

SEQ ID NO: 70829 - protein, 9 aa, Homo Sapiens
RQMSVNSSI

SEQ ID NO: 70830 - protein, 9 aa, Homo Sapiens
RQMTVIRKV

SEQ ID NO: 70831 - protein, 9 aa, Homo Sapiens
RQNHSILKI

SEQ ID NO: 70832 - protein, 9 aa, Homo Sapiens
RQNKLTYTM

SEQ ID NO: 70833 - protein, 9 aa, Homo Sapiens
RQNPLVTGI

SEQ ID NO: 70834 - protein, 9 aa, Homo Sapiens
RQNTIVVKV

SEQ ID NO: 70835 - protein, 9 aa, Homo Sapiens
RQPDLVLRL

SEQ ID NO: 70836 - protein, 9 aa, Homo Sapiens
RQPHTILRV

SEQ ID NO: 70837 - protein, 9 aa, Homo Sapiens
RQPPLVTGI

SEQ ID NO: 70838 - protein, 9 aa, Homo Sapiens
RQPYYATRV

SEQ ID NO: 70839 - protein, 9 aa, Homo Sapiens
RQQAHIQVV

SEQ ID NO: 70840 - protein, 9 aa, Homo Sapiens
RQQEKHFEV

SEQ ID NO: 70841 - protein, 9 aa, Homo Sapiens
RQQGPLRSI

SEQ ID NO: 70842 - protein, 9 aa, Homo Sapiens
RQQLVKLEM

SEQ ID NO: 70843 - protein, 9 aa, Homo Sapiens
RQQQKLLKV

SEQ ID NO: 70844 - protein, 9 aa, Homo Sapiens
RQQYLRQEV

SEQ ID NO: 70845 - protein, 9 aa, Homo Sapiens
RQRVIIDEL

SEQ ID NO: 70846 - protein, 9 aa, Homo Sapiens
RQSELEPVV

SEQ ID NO: 70847 - protein, 9 aa, Homo Sapiens
RQSFVFIVT

SEQ ID NO: 70848 - protein, 9 aa, Homo Sapiens
RQSISKALV

SEQ ID NO: 70849 - protein, 9 aa, Homo Sapiens
RQSIVGAEV

SEQ ID NO: 70850 - protein, 9 aa, Homo Sapiens
RQSTAKIQI

SEQ ID NO: 70851 - protein, 9 aa, Homo Sapiens
RQSVNVESI

SEQ ID NO: 70852 - protein, 9 aa, Homo Sapiens
RQTEALKCV

SEQ ID NO: 70853 - protein, 9 aa, Homo Sapiens
RQTFVIHKL

SEQ ID NO: 70854 - protein, 9 aa, Homo Sapiens
RQTGKILKV

SEQ ID NO: 70855 - protein, 9 aa, Homo Sapiens
RQTKTSLEV

SEQ ID NO: 70856 - protein, 9 aa, Homo Sapiens
RQTVAVGVI

SEQ ID NO: 70857 - protein, 9 aa, Homo Sapiens
RQVASHVGL

SEQ ID NO: 70858 - protein, 9 aa, Homo Sapiens
RQVGKTLRI

SEQ ID NO: 70859 - protein, 9 aa, Homo Sapiens
RQVGQIIRV

SEQ ID NO: 70860 - protein, 9 aa, Homo Sapiens
RQVKVILNI

SEQ ID NO: 70861 - protein, 9 aa, Homo Sapiens
RQVPFHLHI

SEQ ID NO: 70862 - protein, 9 aa, Homo Sapiens
RQVQGPVLV

SEQ ID NO: 70863 - protein, 9 aa, Homo Sapiens
RQVSMVQTL

SEQ ID NO: 70864 - protein, 9 aa, Homo Sapiens
RQVTGVTRV

SEQ ID NO: 70865 - protein, 9 aa, Homo Sapiens
RQVVLKYTV

SEQ ID NO: 70866 - protein, 9 aa, Homo Sapiens
RQWADDWLV

SEQ ID NO: 70867 - protein, 9 aa, Homo Sapiens
RQWDYTEKL

SEQ ID NO: 70868 - protein, 9 aa, Homo Sapiens
RQWIGSIEV

SEQ ID NO: 70869 - protein, 9 aa, Homo Sapiens
RQWKKISAI

SEQ ID NO: 70870 - protein, 9 aa, Homo Sapiens
RQWLAIQKL

SEQ ID NO: 70871 - protein, 9 aa, Homo Sapiens
RQWNVNWDI

SEQ ID NO: 70872 - protein, 9 aa, Homo Sapiens
RQWSSCRHI

SEQ ID NO: 70873 - protein, 9 aa, Homo Sapiens
RQYHENIKI

SEQ ID NO: 70874 - protein, 9 aa, Homo Sapiens
RQYLPIFAV

SEQ ID NO: 70875 - protein, 9 aa, Homo Sapiens
RQYTEAISV

SEQ ID NO: 70876 - protein, 9 aa, Homo Sapiens
RSAEVTLEV

SEQ ID NO: 70877 - protein, 9 aa, Homo Sapiens
RSALPTKTV

SEQ ID NO: 70878 - protein, 9 aa, Homo Sapiens
RSAVVEMLI

SEQ ID NO: 70879 - protein, 9 aa, Homo Sapiens
RSGHFEQAI

SEQ ID NO: 70880 - protein, 9 aa, Homo Sapiens
RSHGVLLEV

SEQ ID NO: 70881 - protein, 9 aa, Homo Sapiens
RSIAFHSAV

SEQ ID NO: 70882 - protein, 9 aa, Homo Sapiens
RSIEEVLRI

SEQ ID NO: 70883 - protein, 9 aa, Homo Sapiens
RSITVEQHI

SEQ ID NO: 70884 - protein, 9 aa, Homo Sapiens
RSIVLLLKV

SEQ ID NO: 70885 - protein, 9 aa, Homo Sapiens
RSLEQDLKV

SEQ ID NO: 70886 - protein, 9 aa, Homo Sapiens
RSLGIMQTV

SEQ ID NO: 70887 - protein, 9 aa, Homo Sapiens
RSLPCQVYV

SEQ ID NO: 70888 - protein, 9 aa, Homo Sapiens
RSSGYPLTI

SEQ ID NO: 70889 - protein, 9 aa, Homo Sapiens
RSVDLQTRI

SEQ ID NO: 70890 - protein, 9 aa, Homo Sapiens
RSVLIANTV

SEQ ID NO: 70891 - protein, 9 aa, Homo Sapiens
RSVPVRLHV

SEQ ID NO: 70892 - protein, 9 aa, Homo Sapiens
RSVRTVMRV

SEQ ID NO: 70893 - protein, 9 aa, Homo Sapiens
RSWKEPCQV

SEQ ID NO: 70894 - protein, 9 aa, Homo Sapiens
RTLAEIAKV

SEQ ID NO: 70895 - protein, 9 aa, Homo Sapiens
RTMEIFQLL

SEQ ID NO: 70896 - protein, 9 aa, Homo Sapiens
RTSDKAILV

SEQ ID NO: 70897 - protein, 9 aa, Homo Sapiens
RTSSVQLRV

SEQ ID NO: 70898 - protein, 9 aa, Homo Sapiens
RTTDIVIRI

SEQ ID NO: 70899 - protein, 9 aa, Homo Sapiens
RTTETQVLV

SEQ ID NO: 70900 - protein, 9 aa, Homo Sapiens
RTVDARLKL

SEQ ID NO: 70901 - protein, 9 aa, Homo Sapiens
RTVELFYDV

SEQ ID NO: 70902 - protein, 9 aa, Homo Sapiens
RTYVYVLTV

SEQ ID NO: 70903 - protein, 9 aa, Homo Sapiens
RVAAQGFVV

SEQ ID NO: 70904 - protein, 9 aa, Homo Sapiens
RVANQDLQV

SEQ ID NO: 70905 - protein, 9 aa, Homo Sapiens
RVANVADVV

SEQ ID NO: 70906 - protein, 9 aa, Homo Sapiens
RVAPEQQMI

SEQ ID NO: 70907 - protein, 9 aa, Homo Sapiens
RVCAASLYV

SEQ ID NO: 70908 - protein, 9 aa, Homo Sapiens
RVEEAKLLV

SEQ ID NO: 70909 - protein, 9 aa, Homo Sapiens
RVFASPLRL

SEQ ID NO: 70910 - protein, 9 aa, Homo Sapiens
RVFASSDTI

SEQ ID NO: 70911 - protein, 9 aa, Homo Sapiens
RVFENIVAV

SEQ ID NO: 70912 - protein, 9 aa, Homo Sapiens
RVFPSPMRI

SEQ ID NO: 70913 - protein, 9 aa, Homo Sapiens
RVFTGQAKV

SEQ ID NO: 70914 - protein, 9 aa, Homo Sapiens
RVFVKPLVL

SEQ ID NO: 70915 - protein, 9 aa, Homo Sapiens
RVGDQILRV

SEQ ID NO: 70916 - protein, 9 aa, Homo Sapiens
RVHDYDMRV

SEQ ID NO: 70917 - protein, 9 aa, Homo Sapiens
RVHEIFKRI

SEQ ID NO: 70918 - protein, 9 aa, Homo Sapiens
RVHGLALQI

SEQ ID NO: 70919 - protein, 9 aa, Homo Sapiens
RVHPVSTMI

SEQ ID NO: 70920 - protein, 9 aa, Homo Sapiens
RVIDYAVKI

SEQ ID NO: 70921 - protein, 9 aa, Homo Sapiens
RVIDYILDL

SEQ ID NO: 70922 - protein, 9 aa, Homo Sapiens
RVKFTDDRV

SEQ ID NO: 70923 - protein, 9 aa, Homo Sapiens
RVKLDSVRV

SEQ ID NO: 70924 - protein, 9 aa, Homo Sapiens
RVKPIIDLV

SEQ ID NO: 70925 - protein, 9 aa, Homo Sapiens
RVLDLAEQV

SEQ ID NO: 70926 - protein, 9 aa, Homo Sapiens
RVLFIKDVI

SEQ ID NO: 70927 - protein, 9 aa, Homo Sapiens
RVLQAIDSI

SEQ ID NO: 70928 - protein, 9 aa, Homo Sapiens
RVLQLFTRI

SEQ ID NO: 70929 - protein, 9 aa, Homo Sapiens
RVLQNLLTI

SEQ ID NO: 70930 - protein, 9 aa, Homo Sapiens
RVMELFFTV

SEQ ID NO: 70931 - protein, 9 aa, Homo Sapiens
RVMLYPSRI

SEQ ID NO: 70932 - protein, 9 aa, Homo Sapiens
RVMSGKLTV

SEQ ID NO: 70933 - protein, 9 aa, Homo Sapiens
RVNPVEYSI

SEQ ID NO: 70934 - protein, 9 aa, Homo Sapiens
RVPSINQKI

SEQ ID NO: 70935 - protein, 9 aa, Homo Sapiens
RVSELHLEV

SEQ ID NO: 70936 - protein, 9 aa, Homo Sapiens
RVSPVHLQI

SEQ ID NO: 70937 - protein, 9 aa, Homo Sapiens
RVTDKVLTA

SEQ ID NO: 70938 - protein, 9 aa, Homo Sapiens
RVTFVNFTV

SEQ ID NO: 70939 - protein, 9 aa, Homo Sapiens
RVTTINQEI

SEQ ID NO: 70940 - protein, 9 aa, Homo Sapiens
RVVKLNEVI

SEQ ID NO: 70941 - protein, 9 aa, Homo Sapiens
RVVRNNLRV

SEQ ID NO: 70942 - protein, 9 aa, Homo Sapiens
RVYNGRLKV

SEQ ID NO: 70943 - protein, 9 aa, Homo Sapiens
SAFATPFLV

SEQ ID NO: 70944 - protein, 9 aa, Homo Sapiens
SASRVVQVV

SEQ ID NO: 70945 - protein, 9 aa, Homo Sapiens
SEYPVILSI

SEQ ID NO: 70946 - protein, 9 aa, Homo Sapiens
SGYDTILRV

SEQ ID NO: 70947 - protein, 9 aa, Homo Sapiens
SIATLLLRI

SEQ ID NO: 70948 - protein, 9 aa, Homo Sapiens
SIFGKQLVV

SEQ ID NO: 70949 - protein, 9 aa, Homo Sapiens
SIFKGQQLV

SEQ ID NO: 70950 - protein, 9 aa, Homo Sapiens
SIHDVTFQV

SEQ ID NO: 70951 - protein, 9 aa, Homo Sapiens
SIIDTELKV

SEQ ID NO: 70952 - protein, 9 aa, Homo Sapiens
SISGMLLKV

SEQ ID NO: 70953 - protein, 9 aa, Homo Sapiens
SITANILAV

SEQ ID NO: 70954 - protein, 9 aa, Homo Sapiens
SITSVTVKI

SEQ ID NO: 70955 - protein, 9 aa, Homo Sapiens
SLADIAQKL

SEQ ID NO: 70956 - protein, 9 aa, Homo Sapiens
SLADVHIEV

SEQ ID NO: 70957 - protein, 9 aa, Homo Sapiens
SLALIEQRI

SEQ ID NO: 70958 - protein, 9 aa, Homo Sapiens
SLAPVLCGI

SEQ ID NO: 70959 - protein, 9 aa, Homo Sapiens
SLASLPLRV

SEQ ID NO: 70960 - protein, 9 aa, Homo Sapiens
SLCDIAILV

SEQ ID NO: 70961 - protein, 9 aa, Homo Sapiens
SLFEEMLQV

SEQ ID NO: 70962 - protein, 9 aa, Homo Sapiens
SLFKLIVKV

SEQ ID NO: 70963 - protein, 9 aa, Homo Sapiens
SLFPGKLEV

SEQ ID NO: 70964 - protein, 9 aa, Homo Sapiens
SLFPGQVVI

SEQ ID NO: 70965 - protein, 9 aa, Homo Sapiens
SLFRGSHRV

SEQ ID NO: 70966 - protein, 9 aa, Homo Sapiens
SLHDAIMIV

SEQ ID NO: 70967 - protein, 9 aa, Homo Sapiens
SLHKCFVRV

SEQ ID NO: 70968 - protein, 9 aa, Homo Sapiens
SLIGLHFKI

SEQ ID NO: 70969 - protein, 9 aa, Homo Sapiens
SLINSFLKI

SEQ ID NO: 70970 - protein, 9 aa, Homo Sapiens
SLLHMPFTI

SEQ ID NO: 70971 - protein, 9 aa, Homo Sapiens
SLLHVEQEV

SEQ ID NO: 70972 - protein, 9 aa, Homo Sapiens
SLLKEPQKV

SEQ ID NO: 70973 - protein, 9 aa, Homo Sapiens
SLLPHPIIV

SEQ ID NO: 70974 - protein, 9 aa, Homo Sapiens
SLLPQKQEV

SEQ ID NO: 70975 - protein, 9 aa, Homo Sapiens
SLLRSIFTV

SEQ ID NO: 70976 - protein, 9 aa, Homo Sapiens
SLPSVRQDV

SEQ ID NO: 70977 - protein, 9 aa, Homo Sapiens
SLSGRPLKV

SEQ ID NO: 70978 - protein, 9 aa, Homo Sapiens
SLSQVFLHL

SEQ ID NO: 70979 - protein, 9 aa, Homo Sapiens
SLTSVVLTL

SEQ ID NO: 70980 - protein, 9 aa, Homo Sapiens
SLVEIILHV

SEQ ID NO: 70981 - protein, 9 aa, Homo Sapiens
SLVNIVQHI

SEQ ID NO: 70982 - protein, 9 aa, Homo Sapiens
SLVSIPLVI

SEQ ID NO: 70983 - protein, 9 aa, Homo Sapiens
SLYGGTITI

SEQ ID NO: 70984 - protein, 9 aa, Homo Sapiens
SLYPIAVLI

SEQ ID NO: 70985 - protein, 9 aa, Homo Sapiens
SLYVRPVLI

SEQ ID NO: 70986 - protein, 9 aa, Homo Sapiens
SMCGLMLKL

SEQ ID NO: 70987 - protein, 9 aa, Homo Sapiens
SMFGAGLTV

SEQ ID NO: 70988 - protein, 9 aa, Homo Sapiens
SMPDVDLHV

SEQ ID NO: 70989 - protein, 9 aa, Homo Sapiens
SMTSLAQKI

SEQ ID NO: 70990 - protein, 9 aa, Homo Sapiens
SQAAAKLAL

SEQ ID NO: 70991 - protein, 9 aa, Homo Sapiens
SQAAVPTQV

SEQ ID NO: 70992 - protein, 9 aa, Homo Sapiens
SQADCAVLI

SEQ ID NO: 70993 - protein, 9 aa, Homo Sapiens
SQAEIEQKI

SEQ ID NO: 70994 - protein, 9 aa, Homo Sapiens
SQAIHQLKV

SEQ ID NO: 70995 - protein, 9 aa, Homo Sapiens
SQAIVKVVI

SEQ ID NO: 70996 - protein, 9 aa, Homo Sapiens
SQAMPVTTI

SEQ ID NO: 70997 - protein, 9 aa, Homo Sapiens
SQANIAQVL

SEQ ID NO: 70998 - protein, 9 aa, Homo Sapiens
SQANVVVKI

SEQ ID NO: 70999 - protein, 9 aa, Homo Sapiens
SQAPSTMQV

SEQ ID NO: 71000 - protein, 9 aa, Homo Sapiens
SQARFGQSV

SEQ ID NO: 71001 - protein, 9 aa, Homo Sapiens
SQASVTIRI

SEQ ID NO: 71002 - protein, 9 aa, Homo Sapiens
SQCPHIVRI

SEQ ID NO: 71003 - protein, 9 aa, Homo Sapiens
SQFAFESVV

SEQ ID NO: 71004 - protein, 9 aa, Homo Sapiens
SQFGHVVDI

SEQ ID NO: 71005 - protein, 9 aa, Homo Sapiens
SQFGQILDI

SEQ ID NO: 71006 - protein, 9 aa, Homo Sapiens
SQFPKHLIV

SEQ ID NO: 71007 - protein, 9 aa, Homo Sapiens
SQFPLPLAV

SEQ ID NO: 71008 - protein, 9 aa, Homo Sapiens
SQFPTPEAV

SEQ ID NO: 71009 - protein, 9 aa, Homo Sapiens
SQFSGKITV

SEQ ID NO: 71010 - protein, 9 aa, Homo Sapiens
SQFSYQHAI

SEQ ID NO: 71011 - protein, 9 aa, Homo Sapiens
SQFVPALKI

SEQ ID NO: 71012 - protein, 9 aa, Homo Sapiens
SQFVRPLIA

SEQ ID NO: 71013 - protein, 9 aa, Homo Sapiens
SQGVICLDI

SEQ ID NO: 71014 - protein, 9 aa, Homo Sapiens
SQHDILQMI

SEQ ID NO: 71015 - protein, 9 aa, Homo Sapiens
SQHGVIIQL

SEQ ID NO: 71016 - protein, 9 aa, Homo Sapiens
SQIEADFRL

SEQ ID NO: 71017 - protein, 9 aa, Homo Sapiens
SQIHDIVLV

SEQ ID NO: 71018 - protein, 9 aa, Homo Sapiens
SQIKYAAKV

SEQ ID NO: 71019 - protein, 9 aa, Homo Sapiens
SQINKFLYL

SEQ ID NO: 71020 - protein, 9 aa, Homo Sapiens
SQIPAQPSV

SEQ ID NO: 71021 - protein, 9 aa, Homo Sapiens
SQIYPVVCV

SEQ ID NO: 71022 - protein, 9 aa, Homo Sapiens
SQKAIQDEI

SEQ ID NO: 71023 - protein, 9 aa, Homo Sapiens
SQKDIEQSI

SEQ ID NO: 71024 - protein, 9 aa, Homo Sapiens
SQKHLILLI

SEQ ID NO: 71025 - protein, 9 aa, Homo Sapiens
SQLASLLKV

SEQ ID NO: 71026 - protein, 9 aa, Homo Sapiens
SQLDVPFKV

SEQ ID NO: 71027 - protein, 9 aa, Homo Sapiens
SQLISHHRI

SEQ ID NO: 71028 - protein, 9 aa, Homo Sapiens
SQLIVHQEI

SEQ ID NO: 71029 - protein, 9 aa, Homo Sapiens
SQLIVHQGI

SEQ ID NO: 71030 - protein, 9 aa, Homo Sapiens
SQLIVHQRI

SEQ ID NO: 71031 - protein, 9 aa, Homo Sapiens
SQLKHIFKT

SEQ ID NO: 71032 - protein, 9 aa, Homo Sapiens
SQLPQAQKV

SEQ ID NO: 71033 - protein, 9 aa, Homo Sapiens
SQLQEHQRI

SEQ ID NO: 71034 - protein, 9 aa, Homo Sapiens
SQLQTRQQI

SEQ ID NO: 71035 - protein, 9 aa, Homo Sapiens
SQLTQHQSI

SEQ ID NO: 71036 - protein, 9 aa, Homo Sapiens
SQMPTVIYV

SEQ ID NO: 71037 - protein, 9 aa, Homo Sapiens
SQMPVPVHV

SEQ ID NO: 71038 - protein, 9 aa, Homo Sapiens
SQNGKQYII

SEQ ID NO: 71039 - protein, 9 aa, Homo Sapiens
SQNGVLLGI

SEQ ID NO: 71040 - protein, 9 aa, Homo Sapiens
SQNKSYLAV

SEQ ID NO: 71041 - protein, 9 aa, Homo Sapiens
SQNQKRLYI

SEQ ID NO: 71042 - protein, 9 aa, Homo Sapiens
SQPGIKFTI

SEQ ID NO: 71043 - protein, 9 aa, Homo Sapiens
SQPLGSFLI

SEQ ID NO: 71044 - protein, 9 aa, Homo Sapiens
SQPSKTLFV

SEQ ID NO: 71045 - protein, 9 aa, Homo Sapiens
SQPVLQIFV

SEQ ID NO: 71046 - protein, 9 aa, Homo Sapiens
SQRFIPELI

SEQ ID NO: 71047 - protein, 9 aa, Homo Sapiens
SQSIHQAVI

SEQ ID NO: 71048 - protein, 9 aa, Homo Sapiens
SQSPLPQYV

SEQ ID NO: 71049 - protein, 9 aa, Homo Sapiens
SQSSLIHLV

SEQ ID NO: 71050 - protein, 9 aa, Homo Sapiens
SQSTVKVLI

SEQ ID NO: 71051 - protein, 9 aa, Homo Sapiens
SQTAIALDI

SEQ ID NO: 71052 - protein, 9 aa, Homo Sapiens
SQTDGTLKI

SEQ ID NO: 71053 - protein, 9 aa, Homo Sapiens
SQTFVNPHV

SEQ ID NO: 71054 - protein, 9 aa, Homo Sapiens
SQTIALLNI

SEQ ID NO: 71055 - protein, 9 aa, Homo Sapiens
SQTILIQNI

SEQ ID NO: 71056 - protein, 9 aa, Homo Sapiens
SQTSIGQVI

SEQ ID NO: 71057 - protein, 9 aa, Homo Sapiens
SQTVPSPTI

SEQ ID NO: 71058 - protein, 9 aa, Homo Sapiens
SQVDVAVKI

SEQ ID NO: 71059 - protein, 9 aa, Homo Sapiens
SQVEILQRV

SEQ ID NO: 71060 - protein, 9 aa, Homo Sapiens
SQVEQQQLI

SEQ ID NO: 71061 - protein, 9 aa, Homo Sapiens
SQVKSKLQI

SEQ ID NO: 71062 - protein, 9 aa, Homo Sapiens
SQVNILSKI

SEQ ID NO: 71063 - protein, 9 aa, Homo Sapiens
SQWRAVQGI

SEQ ID NO: 71064 - protein, 9 aa, Homo Sapiens
SQWSLQHEI

SEQ ID NO: 71065 - protein, 9 aa, Homo Sapiens
SQWSPALTI

SEQ ID NO: 71066 - protein, 9 aa, Homo Sapiens
SQYKTTILL

SEQ ID NO: 71067 - protein, 9 aa, Homo Sapiens
SQYPFPVTL

SEQ ID NO: 71068 - protein, 9 aa, Homo Sapiens
SSPPPHPQL

SEQ ID NO: 71069 - protein, 9 aa, Homo Sapiens
SSQFLYPKV

SEQ ID NO: 71070 - protein, 9 aa, Homo Sapiens
SSQTIQPKV

SEQ ID NO: 71071 - protein, 9 aa, Homo Sapiens
SSSAVFLII

SEQ ID NO: 71072 - protein, 9 aa, Homo Sapiens
SSSTVVQEI

SEQ ID NO: 71073 - protein, 9 aa, Homo Sapiens
SSVDQPLKI

SEQ ID NO: 71074 - protein, 9 aa, Homo Sapiens
STAAVIQNV

SEQ ID NO: 71075 - protein, 9 aa, Homo Sapiens
STLAVQQYI

SEQ ID NO: 71076 - protein, 9 aa, Homo Sapiens
STSSLLLRI

SEQ ID NO: 71077 - protein, 9 aa, Homo Sapiens
STYLRPLLV

SEQ ID NO: 71078 - protein, 9 aa, Homo Sapiens
SVCKLQQKV

SEQ ID NO: 71079 - protein, 9 aa, Homo Sapiens
SVHKVTIKI

SEQ ID NO: 71080 - protein, 9 aa, Homo Sapiens
SVNATPLTI

SEQ ID NO: 71081 - protein, 9 aa, Homo Sapiens
SVYDGKLLI

SEQ ID NO: 71082 - protein, 9 aa, Homo Sapiens
TIRYPDPLI

SEQ ID NO: 71083 - protein, 9 aa, Homo Sapiens
TISKVLLSI

SEQ ID NO: 71084 - protein, 9 aa, Homo Sapiens
TLAAVLQRI

SEQ ID NO: 71085 - protein, 9 aa, Homo Sapiens
TLFPSKIGV

SEQ ID NO: 71086 - protein, 9 aa, Homo Sapiens
TLFPVRLLV

SEQ ID NO: 71087 - protein, 9 aa, Homo Sapiens
TLHAAVLQI

SEQ ID NO: 71088 - protein, 9 aa, Homo Sapiens
TLINLLLKV

SEQ ID NO: 71089 - protein, 9 aa, Homo Sapiens
TLKTTEPGV

SEQ ID NO: 71090 - protein, 9 aa, Homo Sapiens
TLMSLPTKI

SEQ ID NO: 71091 - protein, 9 aa, Homo Sapiens
TLPYIKQEV

SEQ ID NO: 71092 - protein, 9 aa, Homo Sapiens
TLSDIKALI

SEQ ID NO: 71093 - protein, 9 aa, Homo Sapiens
TLTDIEQKV

SEQ ID NO: 71094 - protein, 9 aa, Homo Sapiens
TMIDFPQMV

SEQ ID NO: 71095 - protein, 9 aa, Homo Sapiens
TQAHVQTGI

SEQ ID NO: 71096 - protein, 9 aa, Homo Sapiens
TQEQVRLLI

SEQ ID NO: 71097 - protein, 9 aa, Homo Sapiens
TQHAVGIVV

SEQ ID NO: 71098 - protein, 9 aa, Homo Sapiens
TQHHVEALV

SEQ ID NO: 71099 - protein, 9 aa, Homo Sapiens
TQILQTVRI

SEQ ID NO: 71100 - protein, 9 aa, Homo Sapiens
TQKELFDVV

SEQ ID NO: 71101 - protein, 9 aa, Homo Sapiens
TQLPQSMKI

SEQ ID NO: 71102 - protein, 9 aa, Homo Sapiens
TQLTIHQRV

SEQ ID NO: 71103 - protein, 9 aa, Homo Sapiens
TQMIKAWQV

SEQ ID NO: 71104 - protein, 9 aa, Homo Sapiens
TQNFLIQKI

SEQ ID NO: 71105 - protein, 9 aa, Homo Sapiens
TQQDVELHV

SEQ ID NO: 71106 - protein, 9 aa, Homo Sapiens
TQQQLPQKV

SEQ ID NO: 71107 - protein, 9 aa, Homo Sapiens
TQTAVITRI

SEQ ID NO: 71108 - protein, 9 aa, Homo Sapiens
TQTTHELTI

SEQ ID NO: 71109 - protein, 9 aa, Homo Sapiens
TQVGIEWNL

SEQ ID NO: 71110 - protein, 9 aa, Homo Sapiens
TQVGPGPQI

SEQ ID NO: 71111 - protein, 9 aa, Homo Sapiens
TQVKTPVQV

SEQ ID NO: 71112 - protein, 9 aa, Homo Sapiens
TQVVGILKI

SEQ ID NO: 71113 - protein, 9 aa, Homo Sapiens
TSSKVIQSV

SEQ ID NO: 71114 - protein, 9 aa, Homo Sapiens
TVAPTSLVV

SEQ ID NO: 71115 - protein, 9 aa, Homo Sapiens
TVFFHPLLI

SEQ ID NO: 71116 - protein, 9 aa, Homo Sapiens
TVNEIVLKV

SEQ ID NO: 71117 - protein, 9 aa, Homo Sapiens
TVTTVILEV

SEQ ID NO: 71118 - protein, 9 aa, Homo Sapiens
VILDLPLVI

SEQ ID NO: 71119 - protein, 9 aa, Homo Sapiens
VLAEIPQQV

SEQ ID NO: 71120 - protein, 9 aa, Homo Sapiens
VLHDVIYVI

SEQ ID NO: 71121 - protein, 9 aa, Homo Sapiens
VLPAVSLEV

SEQ ID NO: 71122 - protein, 9 aa, Homo Sapiens
VLSQHFQTV

SEQ ID NO: 71123 - protein, 9 aa, Homo Sapiens
VLTPVILQV

SEQ ID NO: 71124 - protein, 9 aa, Homo Sapiens
VLTQIILKT

SEQ ID NO: 71125 - protein, 9 aa, Homo Sapiens
VLYDRPLKI

SEQ ID NO: 71126 - protein, 9 aa, Homo Sapiens
VMDAALLLI

SEQ ID NO: 71127 - protein, 9 aa, Homo Sapiens
VMFKTPVSI

SEQ ID NO: 71128 - protein, 9 aa, Homo Sapiens
VMKHADPRI

SEQ ID NO: 71129 - protein, 9 aa, Homo Sapiens
VQCPHPQIL

SEQ ID NO: 71130 - protein, 9 aa, Homo Sapiens
VQFEDGQKI

SEQ ID NO: 71131 - protein, 9 aa, Homo Sapiens
VQFFSGLEI

SEQ ID NO: 71132 - protein, 9 aa, Homo Sapiens
VQFLVPQSI

SEQ ID NO: 71133 - protein, 9 aa, Homo Sapiens
VQFRLRQVV

SEQ ID NO: 71134 - protein, 9 aa, Homo Sapiens
VQFTVKLRL

SEQ ID NO: 71135 - protein, 9 aa, Homo Sapiens
VQHIPSPKV

SEQ ID NO: 71136 - protein, 9 aa, Homo Sapiens
VQHQDALQI

SEQ ID NO: 71137 - protein, 9 aa, Homo Sapiens
VQIPVFVMI

SEQ ID NO: 71138 - protein, 9 aa, Homo Sapiens
VQMQVVQQL

SEQ ID NO: 71139 - protein, 9 aa, Homo Sapiens
VQNDTLLQV

SEQ ID NO: 71140 - protein, 9 aa, Homo Sapiens
VQNHEFLLV

SEQ ID NO: 71141 - protein, 9 aa, Homo Sapiens
VQNPQAQTI

SEQ ID NO: 71142 - protein, 9 aa, Homo Sapiens
VQRDADIGV

SEQ ID NO: 71143 - protein, 9 aa, Homo Sapiens
VQTAVRLLL

SEQ ID NO: 71144 - protein, 9 aa, Homo Sapiens
VQTSQITKI

SEQ ID NO: 71145 - protein, 9 aa, Homo Sapiens
VQVGETFKV

SEQ ID NO: 71146 - protein, 9 aa, Homo Sapiens
VQVPVPVTV

SEQ ID NO: 71147 - protein, 9 aa, Homo Sapiens
VQYALPLQL

SEQ ID NO: 71148 - protein, 9 aa, Homo Sapiens
VQYAYFKKV

SEQ ID NO: 71149 - protein, 9 aa, Homo Sapiens
VQYKGHVEI

SEQ ID NO: 71150 - protein, 9 aa, Homo Sapiens
VQYNEPLKV

SEQ ID NO: 71151 - protein, 9 aa, Homo Sapiens
VVNKIRLKI

SEQ ID NO: 71152 - protein, 9 aa, Homo Sapiens
VVNKTDLKV

SEQ ID NO: 71153 - protein, 9 aa, Homo Sapiens
VVSDILFKI

SEQ ID NO: 71154 - protein, 9 aa, Homo Sapiens
VVTAVKFTI

SEQ ID NO: 71155 - protein, 9 aa, Homo Sapiens
VVVSVPQRI

SEQ ID NO: 71156 - protein, 9 aa, Homo Sapiens
WQLKVIENV

SEQ ID NO: 71157 - protein, 9 aa, Homo Sapiens
WQNVRALYI

SEQ ID NO: 71158 - protein, 9 aa, Homo Sapiens
WQVVDTPGI

SEQ ID NO: 71159 - protein, 9 aa, Homo Sapiens
WTTSRVLKV

SEQ ID NO: 71160 - protein, 9 aa, Homo Sapiens
YALNHTLSV

SEQ ID NO: 71161 - protein, 9 aa, Homo Sapiens
YIFEEPFTI

SEQ ID NO: 71162 - protein, 9 aa, Homo Sapiens
YLCMKTLLL

SEQ ID NO: 71163 - protein, 9 aa, Homo Sapiens
YLFDLPLKV

SEQ ID NO: 71164 - protein, 9 aa, Homo Sapiens
YLFKCPQSV

SEQ ID NO: 71165 - protein, 9 aa, Homo Sapiens
YLFPGHPPT

SEQ ID NO: 71166 - protein, 9 aa, Homo Sapiens
YLFTSPQRV

SEQ ID NO: 71167 - protein, 9 aa, Homo Sapiens
YLGIVELLV

SEQ ID NO: 71168 - protein, 9 aa, Homo Sapiens
YLKDLIEEV

SEQ ID NO: 71169 - protein, 9 aa, Homo Sapiens
YLLDQHILI

SEQ ID NO: 71170 - protein, 9 aa, Homo Sapiens
YLLPAIVHI

SEQ ID NO: 71171 - protein, 9 aa, Homo Sapiens
YLLSYIQSI

SEQ ID NO: 71172 - protein, 9 aa, Homo Sapiens
YLNKHIQKV

SEQ ID NO: 71173 - protein, 9 aa, Homo Sapiens
YLPPATQVV

SEQ ID NO: 71174 - protein, 9 aa, Homo Sapiens
YLPPTVITI

SEQ ID NO: 71175 - protein, 9 aa, Homo Sapiens
YLTAEILEL

SEQ ID NO: 71176 - protein, 9 aa, Homo Sapiens
YLTEVFLHV

SEQ ID NO: 71177 - protein, 9 aa, Homo Sapiens
YQFGEIRTI

SEQ ID NO: 71178 - protein, 9 aa, Homo Sapiens
YQHGIFQSI

SEQ ID NO: 71179 - protein, 9 aa, Homo Sapiens
YQHKFQLQM

SEQ ID NO: 71180 - protein, 9 aa, Homo Sapiens
YQHLRPQSI

SEQ ID NO: 71181 - protein, 9 aa, Homo Sapiens
YQKSTELLI

SEQ ID NO: 71182 - protein, 9 aa, Homo Sapiens
YQLGELVKV

SEQ ID NO: 71183 - protein, 9 aa, Homo Sapiens
YQLPEILRT

SEQ ID NO: 71184 - protein, 9 aa, Homo Sapiens
YQPFKPLSI

SEQ ID NO: 71185 - protein, 9 aa, Homo Sapiens
YQPKIQQFL

SEQ ID NO: 71186 - protein, 9 aa, Homo Sapiens
YQPWLDLKI

SEQ ID NO: 71187 - protein, 9 aa, Homo Sapiens
YQSKVRELI

SEQ ID NO: 71188 - protein, 9 aa, Homo Sapiens
YQTEIGQTL

SEQ ID NO: 71189 - protein, 9 aa, Homo Sapiens
YQTIPLNKI

SEQ ID NO: 71190 - protein, 9 aa, Homo Sapiens
YQTPLELKL

SEQ ID NO: 71191 - protein, 9 aa, Homo Sapiens
YQTPLHLAV

SEQ ID NO: 71192 - protein, 9 aa, Homo Sapiens
YQTQLIQRV

SEQ ID NO: 71193 - protein, 9 aa, Homo Sapiens
YQTVVTPVI

SEQ ID NO: 71194 - protein, 9 aa, Homo Sapiens
YQVGQLYSV

SEQ ID NO: 71195 - protein, 9 aa, Homo Sapiens
YQVRIQPSI

SEQ ID NO: 71196 - protein, 9 aa, Homo Sapiens
YQYLLVTAL

SEQ ID NO: 71197 - protein, 9 aa, Homo Sapiens
YQYPRPLLI

SEQ ID NO: 71198 - protein, 9 aa, Homo Sapiens
YQYPVIIHL

SEQ ID NO: 71199 - protein, 9 aa, Homo Sapiens
YSPNCKLLI

SEQ ID NO: 71200 - protein, 9 aa, Homo Sapiens
YSSNTRFTI

SEQ ID NO: 71201 - protein, 9 aa, Homo Sapiens
YTDATPLRV

SEQ ID NO: 71202 - protein, 9 aa, Homo Sapiens
YTLGVKQLI

SEQ ID NO: 71203 - protein, 9 aa, Homo Sapiens
YTTDRVMTV

SEQ ID NO: 71204 - protein, 9 aa, Homo Sapiens
YVHMVTHFI

SEQ ID NO: 71205 - protein, 9 aa, Homo Sapiens
YVIELQHVV

SEQ ID NO: 71206 - protein, 9 aa, Homo Sapiens
YVLDLAAKV

SEQ ID NO: 71207 - protein, 9 aa, Homo Sapiens
YVTSVILHI

SEQ ID NO: 71208 - protein, 10 aa, Homo Sapiens
AAGPPISEGK

SEQ ID NO: 71209 - protein, 10 aa, Homo Sapiens
AIIDGKIFCV

SEQ ID NO: 71210 - protein, 10 aa, Homo Sapiens
ALFAGGKLRV

SEQ ID NO: 71211 - protein, 10 aa, Homo Sapiens
ALSPITKLSV

SEQ ID NO: 71212 - protein, 10 aa, Homo Sapiens
AMINSSVHVI

SEQ ID NO: 71213 - protein, 10 aa, Homo Sapiens
AQAELQQHDV

SEQ ID NO: 71214 - protein, 10 aa, Homo Sapiens
AQAQRLMQLI

SEQ ID NO: 71215 - protein, 10 aa, Homo Sapiens
AQCRLQLQVL

SEQ ID NO: 71216 - protein, 10 aa, Homo Sapiens
AQFFIHPLMI

SEQ ID NO: 71217 - protein, 10 aa, Homo Sapiens
AQFKQGVKSV

SEQ ID NO: 71218 - protein, 10 aa, Homo Sapiens
AQFSKSIEVI

SEQ ID NO: 71219 - protein, 10 aa, Homo Sapiens
AQHDPLLTGV

SEQ ID NO: 71220 - protein, 10 aa, Homo Sapiens
AQIELLQLLV

SEQ ID NO: 71221 - protein, 10 aa, Homo Sapiens
AQIYAIRQSI

SEQ ID NO: 71222 - protein, 10 aa, Homo Sapiens
AQLQDFDWQV

SEQ ID NO: 71223 - protein, 10 aa, Homo Sapiens
AQLQIGVIRV

SEQ ID NO: 71224 - protein, 10 aa, Homo Sapiens
AQNPSLFVKI

SEQ ID NO: 71225 - protein, 10 aa, Homo Sapiens
AQQDRIQQEI

SEQ ID NO: 71226 - protein, 10 aa, Homo Sapiens
AQQQDVHLTV

SEQ ID NO: 71227 - protein, 10 aa, Homo Sapiens
AQVAAEILEI

SEQ ID NO: 71228 - protein, 10 aa, Homo Sapiens
AQVCAIIERV

SEQ ID NO: 71229 - protein, 10 aa, Homo Sapiens
AQVEGGVHSL

SEQ ID NO: 71230 - protein, 10 aa, Homo Sapiens
AQVKSLTQKV

SEQ ID NO: 71231 - protein, 10 aa, Homo Sapiens
AQYKFIYVAI

SEQ ID NO: 71232 - protein, 10 aa, Homo Sapiens
AQYSGAQVRV

SEQ ID NO: 71233 - protein, 10 aa, Homo Sapiens
ASQSTVKVLI

SEQ ID NO: 71234 - protein, 10 aa, Homo Sapiens
AVMDAALLLI

SEQ ID NO: 71235 - protein, 10 aa, Homo Sapiens
AVVRNALAHV

SEQ ID NO: 71236 - protein, 10 aa, Homo Sapiens
DGRATQKLIV

SEQ ID NO: 71237 - protein, 10 aa, Homo Sapiens
DTGRPSTTVR

SEQ ID NO: 71238 - protein, 10 aa, Homo Sapiens
FQTEVGKQLI

SEQ ID NO: 71239 - protein, 10 aa, Homo Sapiens
GLPKNPDLRI

SEQ ID NO: 71240 - protein, 10 aa, Homo Sapiens
GLSPVTNLTV

SEQ ID NO: 71241 - protein, 10 aa, Homo Sapiens
GQAALDRLKV

SEQ ID NO: 71242 - protein, 10 aa, Homo Sapiens
GQAGGKLHII

SEQ ID NO: 71243 - protein, 10 aa, Homo Sapiens
GQAHIHVVGV

SEQ ID NO: 71244 - protein, 10 aa, Homo Sapiens
GQALELPLRI

SEQ ID NO: 71245 - protein, 10 aa, Homo Sapiens
GQCHLQFQLI

SEQ ID NO: 71246 - protein, 10 aa, Homo Sapiens
GQDNITVLHV

SEQ ID NO: 71247 - protein, 10 aa, Homo Sapiens
GQFCDVRLQV

SEQ ID NO: 71248 - protein, 10 aa, Homo Sapiens
GQFKDIITKV

SEQ ID NO: 71249 - protein, 10 aa, Homo Sapiens
GQFKKTQILV

SEQ ID NO: 71250 - protein, 10 aa, Homo Sapiens
GQFRGGGVCI

SEQ ID NO: 71251 - protein, 10 aa, Homo Sapiens
GQHGGFVVTV

SEQ ID NO: 71252 - protein, 10 aa, Homo Sapiens
GQHLVQQLVL

SEQ ID NO: 71253 - protein, 10 aa, Homo Sapiens
GQIDKLTLKI

SEQ ID NO: 71254 - protein, 10 aa, Homo Sapiens
GQINKNLLTV

SEQ ID NO: 71255 - protein, 10 aa, Homo Sapiens
GQKPGGSDFL

SEQ ID NO: 71256 - protein, 10 aa, Homo Sapiens
GQLTSNLLLI

SEQ ID NO: 71257 - protein, 10 aa, Homo Sapiens
GQMLTRILVI

SEQ ID NO: 71258 - protein, 10 aa, Homo Sapiens
GQMQNIQVSI

SEQ ID NO: 71259 - protein, 10 aa, Homo Sapiens
GQPNITKLII

SEQ ID NO: 71260 - protein, 10 aa, Homo Sapiens
GQPNTLICLV

SEQ ID NO: 71261 - protein, 10 aa, Homo Sapiens
GQSTPRLFSI

SEQ ID NO: 71262 - protein, 10 aa, Homo Sapiens
GQVPCHFEFI

SEQ ID NO: 71263 - protein, 10 aa, Homo Sapiens
GQVTALLTSI

SEQ ID NO: 71264 - protein, 10 aa, Homo Sapiens
GQYDQPVLAV

SEQ ID NO: 71265 - protein, 10 aa, Homo Sapiens
HLLDFPNIVI

SEQ ID NO: 71266 - protein, 10 aa, Homo Sapiens
HLLSGQLPTI

SEQ ID NO: 71267 - protein, 10 aa, Homo Sapiens
HLPKSIYSQI

SEQ ID NO: 71268 - protein, 10 aa, Homo Sapiens
HLTDITLKVA

SEQ ID NO: 71269 - protein, 10 aa, Homo Sapiens
HLYRDGEGRI

SEQ ID NO: 71270 - protein, 10 aa, Homo Sapiens
HQHQVHNVEI

SEQ ID NO: 71271 - protein, 10 aa, Homo Sapiens
HQHSILACKI

SEQ ID NO: 71272 - protein, 10 aa, Homo Sapiens
HQLENLSNFI

SEQ ID NO: 71273 - protein, 10 aa, Homo Sapiens
HQTNLILQTF

SEQ ID NO: 71274 - protein, 10 aa, Homo Sapiens
HQVKDLLDLI

SEQ ID NO: 71275 - protein, 10 aa, Homo Sapiens
ILFLIAGKIV

SEQ ID NO: 71276 - protein, 10 aa, Homo Sapiens
IQIDLETGKI

SEQ ID NO: 71277 - protein, 10 aa, Homo Sapiens
IQQSIERLLV

SEQ ID NO: 71278 - protein, 10 aa, Homo Sapiens
IQTAVRLLLP

SEQ ID NO: 71279 - protein, 10 aa, Homo Sapiens
KIIYIVHDEV

SEQ ID NO: 71280 - protein, 10 aa, Homo Sapiens
KLAEVTKVVV

SEQ ID NO: 71281 - protein, 10 aa, Homo Sapiens
KLFNGCPLRI

SEQ ID NO: 71282 - protein, 10 aa, Homo Sapiens
KLLEVQILEV

SEQ ID NO: 71283 - protein, 10 aa, Homo Sapiens
KLLNPSLQKV

SEQ ID NO: 71284 - protein, 10 aa, Homo Sapiens
KLLSPVVPQI

SEQ ID NO: 71285 - protein, 10 aa, Homo Sapiens
KLVNIRNDDI

SEQ ID NO: 71286 - protein, 10 aa, Homo Sapiens
KLWEMDNMLI

SEQ ID NO: 71287 - protein, 10 aa, Homo Sapiens
KLYSSEQLLI

SEQ ID NO: 71288 - protein, 10 aa, Homo Sapiens
KMYSEIDIKV

SEQ ID NO: 71289 - protein, 10 aa, Homo Sapiens
KQCDLEIMEI

SEQ ID NO: 71290 - protein, 10 aa, Homo Sapiens
KQDHRGAFLI

SEQ ID NO: 71291 - protein, 10 aa, Homo Sapiens
KQENKTLLKV

SEQ ID NO: 71292 - protein, 10 aa, Homo Sapiens
KQHGDVVSAI

SEQ ID NO: 71293 - protein, 10 aa, Homo Sapiens
KQLAENLVVI

SEQ ID NO: 71294 - protein, 10 aa, Homo Sapiens
KQLASGLLLV

SEQ ID NO: 71295 - protein, 10 aa, Homo Sapiens
KQLDGIHVTI

SEQ ID NO: 71296 - protein, 10 aa, Homo Sapiens
KQLEKTLLEI

SEQ ID NO: 71297 - protein, 10 aa, Homo Sapiens
KQLENGVLQI

SEQ ID NO: 71298 - protein, 10 aa, Homo Sapiens
KQLESQLHRL

SEQ ID NO: 71299 - protein, 10 aa, Homo Sapiens
KQLQQCIQTI

SEQ ID NO: 71300 - protein, 10 aa, Homo Sapiens
KQLQQELLLI

SEQ ID NO: 71301 - protein, 10 aa, Homo Sapiens
KQMKPHIQNI

SEQ ID NO: 71302 - protein, 10 aa, Homo Sapiens
KQMLPLNTNI

SEQ ID NO: 71303 - protein, 10 aa, Homo Sapiens
KQNPEGQWTI

SEQ ID NO: 71304 - protein, 10 aa, Homo Sapiens
KQPSHHPLRI

SEQ ID NO: 71305 - protein, 10 aa, Homo Sapiens
KQQDVIYELI

SEQ ID NO: 71306 - protein, 10 aa, Homo Sapiens
KQQENVTLLL

SEQ ID NO: 71307 - protein, 10 aa, Homo Sapiens
KQVELELQQI

SEQ ID NO: 71308 - protein, 10 aa, Homo Sapiens
KQWKGGPVKI

SEQ ID NO: 71309 - protein, 10 aa, Homo Sapiens
KQYEGGIFKI

SEQ ID NO: 71310 - protein, 10 aa, Homo Sapiens
KVFDGCPLKI

SEQ ID NO: 71311 - protein, 10 aa, Homo Sapiens
KVFNGCPLRI

SEQ ID NO: 71312 - protein, 10 aa, Homo Sapiens
LAEKHLFSTI

SEQ ID NO: 71313 - protein, 10 aa, Homo Sapiens
LLFEGEKITI

SEQ ID NO: 71314 - protein, 10 aa, Homo Sapiens
LQAQIQEQHV

SEQ ID NO: 71315 - protein, 10 aa, Homo Sapiens
QLILDPIFKV

SEQ ID NO: 71316 - protein, 10 aa, Homo Sapiens
QQSCGTYLRV

SEQ ID NO: 71317 - protein, 10 aa, Homo Sapiens
RAFGGKDIKV

SEQ ID NO: 71318 - protein, 10 aa, Homo Sapiens
REFGVNVFIV

SEQ ID NO: 71319 - protein, 10 aa, Homo Sapiens
RGALDAELKA

SEQ ID NO: 71320 - protein, 10 aa, Homo Sapiens
RIADGLPVAV

SEQ ID NO: 71321 - protein, 10 aa, Homo Sapiens
RIFGKKQMRI

SEQ ID NO: 71322 - protein, 10 aa, Homo Sapiens
RIHAVDHMEI

SEQ ID NO: 71323 - protein, 10 aa, Homo Sapiens
RISDVHFSVK

SEQ ID NO: 71324 - protein, 10 aa, Homo Sapiens
RIVATKPLYV

SEQ ID NO: 71325 - protein, 10 aa, Homo Sapiens
RIVENVNVII

SEQ ID NO: 71326 - protein, 10 aa, Homo Sapiens
RIYTGEKLHV

SEQ ID NO: 71327 - protein, 10 aa, Homo Sapiens
RLAAIVAKQV

SEQ ID NO: 71328 - protein, 10 aa, Homo Sapiens
RLADMHSTEI

SEQ ID NO: 71329 - protein, 10 aa, Homo Sapiens
RLAEGTGLQI

SEQ ID NO: 71330 - protein, 10 aa, Homo Sapiens
RLAKVHAYII

SEQ ID NO: 71331 - protein, 10 aa, Homo Sapiens
RLALVTGGEI

SEQ ID NO: 71332 - protein, 10 aa, Homo Sapiens
RLASSGALRV

SEQ ID NO: 71333 - protein, 10 aa, Homo Sapiens
RLCDVLIESI

SEQ ID NO: 71334 - protein, 10 aa, Homo Sapiens
RLCQIGQFTV

SEQ ID NO: 71335 - protein, 10 aa, Homo Sapiens
RLFPGLAIKI

SEQ ID NO: 71336 - protein, 10 aa, Homo Sapiens
RLIAIGGVKI

SEQ ID NO: 71337 - protein, 10 aa, Homo Sapiens
RLIGQIVSSI

SEQ ID NO: 71338 - protein, 10 aa, Homo Sapiens
RLISQIVSSI

SEQ ID NO: 71339 - protein, 10 aa, Homo Sapiens
RLKEIKEELL

SEQ ID NO: 71340 - protein, 10 aa, Homo Sapiens
RLLAEPVPGI

SEQ ID NO: 71341 - protein, 10 aa, Homo Sapiens
RLLDLENIQI

SEQ ID NO: 71342 - protein, 10 aa, Homo Sapiens
RLLEDKKITV

SEQ ID NO: 71343 - protein, 10 aa, Homo Sapiens
RLLENMTEVV

SEQ ID NO: 71344 - protein, 10 aa, Homo Sapiens
RLLGVCYIVV

SEQ ID NO: 71345 - protein, 10 aa, Homo Sapiens
RLLGYQGIAV

SEQ ID NO: 71346 - protein, 10 aa, Homo Sapiens
RLLNKSIIRV

SEQ ID NO: 71347 - protein, 10 aa, Homo Sapiens
RLMPALGVSV

SEQ ID NO: 71348 - protein, 10 aa, Homo Sapiens
RLPSVPFETI

SEQ ID NO: 71349 - protein, 10 aa, Homo Sapiens
RLPVIEPVSI

SEQ ID NO: 71350 - protein, 10 aa, Homo Sapiens
RLQARIAHRI

SEQ ID NO: 71351 - protein, 10 aa, Homo Sapiens
RLQEPKKDLI

SEQ ID NO: 71352 - protein, 10 aa, Homo Sapiens
RLRDPDSHIV

SEQ ID NO: 71353 - protein, 10 aa, Homo Sapiens
RLSETDFKVM

SEQ ID NO: 71354 - protein, 10 aa, Homo Sapiens
RLVEVNGENV

SEQ ID NO: 71355 - protein, 10 aa, Homo Sapiens
RLYDGLFKVI

SEQ ID NO: 71356 - protein, 10 aa, Homo Sapiens
RMFDGKFVVA

SEQ ID NO: 71357 - protein, 10 aa, Homo Sapiens
RMIAGQVLDI

SEQ ID NO: 71358 - protein, 10 aa, Homo Sapiens
RMIKEKLCYV

SEQ ID NO: 71359 - protein, 10 aa, Homo Sapiens
RMKGGEKIGI

SEQ ID NO: 71360 - protein, 10 aa, Homo Sapiens
RMLAHPLHVI

SEQ ID NO: 71361 - protein, 10 aa, Homo Sapiens
RQADFEAHNI

SEQ ID NO: 71362 - protein, 10 aa, Homo Sapiens
RQADITRETV

SEQ ID NO: 71363 - protein, 10 aa, Homo Sapiens
RQADLKNWSL

SEQ ID NO: 71364 - protein, 10 aa, Homo Sapiens
RQAEITRLLL

SEQ ID NO: 71365 - protein, 10 aa, Homo Sapiens
RQAEVTRLLL

SEQ ID NO: 71366 - protein, 10 aa, Homo Sapiens
RQAKLDYQRL

SEQ ID NO: 71367 - protein, 10 aa, Homo Sapiens
RQATINIGTI

SEQ ID NO: 71368 - protein, 10 aa, Homo Sapiens
RQCLHEVHQI

SEQ ID NO: 71369 - protein, 10 aa, Homo Sapiens
RQCPLALDAI

SEQ ID NO: 71370 - protein, 10 aa, Homo Sapiens
RQDAGGILHI

SEQ ID NO: 71371 - protein, 10 aa, Homo Sapiens
RQFGFIVLTT

SEQ ID NO: 71372 - protein, 10 aa, Homo Sapiens
RQFKEIAAVI

SEQ ID NO: 71373 - protein, 10 aa, Homo Sapiens
RQFKPCIKQI

SEQ ID NO: 71374 - protein, 10 aa, Homo Sapiens
RQFQPTQDNV

SEQ ID NO: 71375 - protein, 10 aa, Homo Sapiens
RQFSGARNQL

SEQ ID NO: 71376 - protein, 10 aa, Homo Sapiens
RQGSFSLLMF

SEQ ID NO: 71377 - protein, 10 aa, Homo Sapiens
RQHEIIHTGV

SEQ ID NO: 71378 - protein, 10 aa, Homo Sapiens
RQHEIVLKVA

SEQ ID NO: 71379 - protein, 10 aa, Homo Sapiens
RQHFIQEEQI

SEQ ID NO: 71380 - protein, 10 aa, Homo Sapiens
RQHVLTRIGV

SEQ ID NO: 71381 - protein, 10 aa, Homo Sapiens
RQIAKAYARI

SEQ ID NO: 71382 - protein, 10 aa, Homo Sapiens
RQIDQFLVVA

SEQ ID NO: 71383 - protein, 10 aa, Homo Sapiens
RQIDQMVGLI

SEQ ID NO: 71384 - protein, 10 aa, Homo Sapiens
RQIEGRVVEI

SEQ ID NO: 71385 - protein, 10 aa, Homo Sapiens
RQIKIKTGVV

SEQ ID NO: 71386 - protein, 10 aa, Homo Sapiens
RQILEGVHFL

SEQ ID NO: 71387 - protein, 10 aa, Homo Sapiens
RQIYIYNEKI

SEQ ID NO: 71388 - protein, 10 aa, Homo Sapiens
RQKDMAKVFV

SEQ ID NO: 71389 - protein, 10 aa, Homo Sapiens
RQKDVKIVTV

SEQ ID NO: 71390 - protein, 10 aa, Homo Sapiens
RQKEADMYRI

SEQ ID NO: 71391 - protein, 10 aa, Homo Sapiens
RQKEGIKLTI

SEQ ID NO: 71392 - protein, 10 aa, Homo Sapiens
RQKIAEEIGI

SEQ ID NO: 71393 - protein, 10 aa, Homo Sapiens
RQLKHSYYRI

SEQ ID NO: 71394 - protein, 10 aa, Homo Sapiens
RQLQKMVHDI

SEQ ID NO: 71395 - protein, 10 aa, Homo Sapiens
RQLSHAISVI

SEQ ID NO: 71396 - protein, 10 aa, Homo Sapiens
RQLSSGVSEI

SEQ ID NO: 71397 - protein, 10 aa, Homo Sapiens
RQMDIIVSEV

SEQ ID NO: 71398 - protein, 10 aa, Homo Sapiens
RQMEMKILRA

SEQ ID NO: 71399 - protein, 10 aa, Homo Sapiens
RQMEPFPLRV

SEQ ID NO: 71400 - protein, 10 aa, Homo Sapiens
RQMSGAQIKI

SEQ ID NO: 71401 - protein, 10 aa, Homo Sapiens
RQNFTEPTAI

SEQ ID NO: 71402 - protein, 10 aa, Homo Sapiens
RQPDSGISSI

SEQ ID NO: 71403 - protein, 10 aa, Homo Sapiens
RQPNISDQQV

SEQ ID NO: 71404 - protein, 10 aa, Homo Sapiens
RQPQGHLLLI

SEQ ID NO: 71405 - protein, 10 aa, Homo Sapiens
RQPVMTPCKI

SEQ ID NO: 71406 - protein, 10 aa, Homo Sapiens
RQSGCLPLLI

SEQ ID NO: 71407 - protein, 10 aa, Homo Sapiens
RQSQALILKI

SEQ ID NO: 71408 - protein, 10 aa, Homo Sapiens
RQSSLELTVW

SEQ ID NO: 71409 - protein, 10 aa, Homo Sapiens
RQTEIYQYVL

SEQ ID NO: 71410 - protein, 10 aa, Homo Sapiens
RQTKPLKVQV

SEQ ID NO: 71411 - protein, 10 aa, Homo Sapiens
RQTNIIWAVF

SEQ ID NO: 71412 - protein, 10 aa, Homo Sapiens
RQVEELQLQV

SEQ ID NO: 71413 - protein, 10 aa, Homo Sapiens
RQVGKTLRIQ

SEQ ID NO: 71414 - protein, 10 aa, Homo Sapiens
RQVLEDFPTI

SEQ ID NO: 71415 - protein, 10 aa, Homo Sapiens
RQVRELKTKI

SEQ ID NO: 71416 - protein, 10 aa, Homo Sapiens
RQWEESWQQV

SEQ ID NO: 71417 - protein, 10 aa, Homo Sapiens
RQWQIEGTGI

SEQ ID NO: 71418 - protein, 10 aa, Homo Sapiens
RQYAKDIGFI

SEQ ID NO: 71419 - protein, 10 aa, Homo Sapiens
RQYNIQKKEI

SEQ ID NO: 71420 - protein, 10 aa, Homo Sapiens
RQYPWGTVQV

SEQ ID NO: 71421 - protein, 10 aa, Homo Sapiens
RQYPWGVAEV

SEQ ID NO: 71422 - protein, 10 aa, Homo Sapiens
RQYPWGVVQV

SEQ ID NO: 71423 - protein, 10 aa, Homo Sapiens
RVAQLEQVYI

SEQ ID NO: 71424 - protein, 10 aa, Homo Sapiens
RVAREAIQKV

SEQ ID NO: 71425 - protein, 10 aa, Homo Sapiens
RVCKILGSGI

SEQ ID NO: 71426 - protein, 10 aa, Homo Sapiens
RVGDIHILEV

SEQ ID NO: 71427 - protein, 10 aa, Homo Sapiens
RVLQNVAFSV

SEQ ID NO: 71428 - protein, 10 aa, Homo Sapiens
RVYGGLTTKV

SEQ ID NO: 71429 - protein, 10 aa, Homo Sapiens
SLADLQNDEV

SEQ ID NO: 71430 - protein, 10 aa, Homo Sapiens
SLFAGGMLRV

SEQ ID NO: 71431 - protein, 10 aa, Homo Sapiens
SLFAGQPLTI

SEQ ID NO: 71432 - protein, 10 aa, Homo Sapiens
SLHAAAVLLL

SEQ ID NO: 71433 - protein, 10 aa, Homo Sapiens
SQADCAVLIV

SEQ ID NO: 71434 - protein, 10 aa, Homo Sapiens
SQADLAVLVI

SEQ ID NO: 71435 - protein, 10 aa, Homo Sapiens
SQAKRVLQEV

SEQ ID NO: 71436 - protein, 10 aa, Homo Sapiens
SQIGTGDLKI

SEQ ID NO: 71437 - protein, 10 aa, Homo Sapiens
SQLKQQIQSI

SEQ ID NO: 71438 - protein, 10 aa, Homo Sapiens
SQMEQFPVKV

SEQ ID NO: 71439 - protein, 10 aa, Homo Sapiens
SQQNGTPLKV

SEQ ID NO: 71440 - protein, 10 aa, Homo Sapiens
SQTSVQLIVF

SEQ ID NO: 71441 - protein, 10 aa, Homo Sapiens
SQVAGTPMFV

SEQ ID NO: 71442 - protein, 10 aa, Homo Sapiens
SVFGTMPLKV

SEQ ID NO: 71443 - protein, 10 aa, Homo Sapiens
TLFGKAILRI

SEQ ID NO: 71444 - protein, 10 aa, Homo Sapiens
TQLNLRSLLV

SEQ ID NO: 71445 - protein, 10 aa, Homo Sapiens
TQMNHIVMEI

SEQ ID NO: 71446 - protein, 10 aa, Homo Sapiens
VLISGVVHEI

SEQ ID NO: 71447 - protein, 10 aa, Homo Sapiens
VQAGVTYLFV

SEQ ID NO: 71448 - protein, 10 aa, Homo Sapiens
VQIKDVNLEV

SEQ ID NO: 71449 - protein, 10 aa, Homo Sapiens
VQPHISPLTI

SEQ ID NO: 71450 - protein, 10 aa, Homo Sapiens
VQSQRVLLFV

SEQ ID NO: 71451 - protein, 10 aa, Homo Sapiens
VQVESVNLQV

SEQ ID NO: 71452 - protein, 10 aa, Homo Sapiens
VVPPFLQPEV

SEQ ID NO: 71453 - protein, 10 aa, Homo Sapiens
YAGCVAHLII

SEQ ID NO: 71454 - protein, 10 aa, Homo Sapiens
YDAEISQIHQ

SEQ ID NO: 71455 - protein, 10 aa, Homo Sapiens
YQIDAAIVRI

SEQ ID NO: 71456 - protein, 10 aa, Homo Sapiens
YQILPLHSQI

SEQ ID NO: 71457 - protein, 10 aa, Homo Sapiens
YQKKTQLEHI

SEQ ID NO: 71458 - protein, 10 aa, Homo Sapiens
YQYKNICQQV

SEQ ID NO: 71459 - protein, 11 aa, Homo Sapiens
ALFASGLIHRV

SEQ ID NO: 71460 - protein, 11 aa, Homo Sapiens
ALQEASEAYLV

SEQ ID NO: 71461 - protein, 11 aa, Homo Sapiens
AQAEAEKIRKI

SEQ ID NO: 71462 - protein, 11 aa, Homo Sapiens
AQDYLQCVLQI

SEQ ID NO: 71463 - protein, 11 aa, Homo Sapiens
AQFHPTEDLVV

SEQ ID NO: 71464 - protein, 11 aa, Homo Sapiens
AQFNNLGVLHV

SEQ ID NO: 71465 - protein, 11 aa, Homo Sapiens
AQHSVPLQLEL

SEQ ID NO: 71466 - protein, 11 aa, Homo Sapiens
AQIDSNIAHTV

SEQ ID NO: 71467 - protein, 11 aa, Homo Sapiens
AQLDPEALGNI

SEQ ID NO: 71468 - protein, 11 aa, Homo Sapiens
AQTEQGDIFKI

SEQ ID NO: 71469 - protein, 11 aa, Homo Sapiens
AQYFLDKIDVI

SEQ ID NO: 71470 - protein, 11 aa, Homo Sapiens
AVIKHSLVHKV

SEQ ID NO: 71471 - protein, 11 aa, Homo Sapiens
ERAGGALELLL

SEQ ID NO: 71472 - protein, 11 aa, Homo Sapiens
ETQITQIEHEV

SEQ ID NO: 71473 - protein, 11 aa, Homo Sapiens
GLDPSTPAQVI

SEQ ID NO: 71474 - protein, 11 aa, Homo Sapiens
GQAEEVVQERI

SEQ ID NO: 71475 - protein, 11 aa, Homo Sapiens
GQASGELLQQI

SEQ ID NO: 71476 - protein, 11 aa, Homo Sapiens
GQDGSVVQFKI

SEQ ID NO: 71477 - protein, 11 aa, Homo Sapiens
GQFDHPNIIRL

SEQ ID NO: 71478 - protein, 11 aa, Homo Sapiens
GQFTGSTGVQV

SEQ ID NO: 71479 - protein, 11 aa, Homo Sapiens
GQGSFGKVFLV

SEQ ID NO: 71480 - protein, 11 aa, Homo Sapiens
GQIGPAPPLKV

SEQ ID NO: 71481 - protein, 11 aa, Homo Sapiens
GQIRNLESARV

SEQ ID NO: 71482 - protein, 11 aa, Homo Sapiens
GQLDSPGSLKI

SEQ ID NO: 71483 - protein, 11 aa, Homo Sapiens
GQLDTPGVHNV

SEQ ID NO: 71484 - protein, 11 aa, Homo Sapiens
GQLSEGAIAAI

SEQ ID NO: 71485 - protein, 11 aa, Homo Sapiens
GQMAMGGAMGI

SEQ ID NO: 71486 - protein, 11 aa, Homo Sapiens
GQNESFARIQV

SEQ ID NO: 71487 - protein, 11 aa, Homo Sapiens
GQSELASRLTL

SEQ ID NO: 71488 - protein, 11 aa, Homo Sapiens
GQSELTLLLKI

SEQ ID NO: 71489 - protein, 11 aa, Homo Sapiens
GQSKGFALVGV

SEQ ID NO: 71490 - protein, 11 aa, Homo Sapiens
GQSKGYAEVVV

SEQ ID NO: 71491 - protein, 11 aa, Homo Sapiens
GQSPMAALILV

SEQ ID NO: 71492 - protein, 11 aa, Homo Sapiens
GQVTRADILQV

SEQ ID NO: 71493 - protein, 11 aa, Homo Sapiens
GQWLAHAIQTV

SEQ ID NO: 71494 - protein, 11 aa, Homo Sapiens
GQYAGHVVPTI

SEQ ID NO: 71495 - protein, 11 aa, Homo Sapiens
GQYAMTRAQRV

SEQ ID NO: 71496 - protein, 11 aa, Homo Sapiens
HLASIHGYLGI

SEQ ID NO: 71497 - protein, 11 aa, Homo Sapiens
HQIGPGMVQQI

SEQ ID NO: 71498 - protein, 11 aa, Homo Sapiens
HQQSIPAVLEI

SEQ ID NO: 71499 - protein, 11 aa, Homo Sapiens
IILSILEVIII

SEQ ID NO: 71500 - protein, 11 aa, Homo Sapiens
IQFKKPIIVAV

SEQ ID NO: 71501 - protein, 11 aa, Homo Sapiens
KEIENGHIFTV

SEQ ID NO: 71502 - protein, 11 aa, Homo Sapiens
KIISVDEIFKI

SEQ ID NO: 71503 - protein, 11 aa, Homo Sapiens
KLFADAGLVCI

SEQ ID NO: 71504 - protein, 11 aa, Homo Sapiens
KLFPKGTIFTA

SEQ ID NO: 71505 - protein, 11 aa, Homo Sapiens
KLWDTETGQCI

SEQ ID NO: 71506 - protein, 11 aa, Homo Sapiens
KMWDLSSNQAI

SEQ ID NO: 71507 - protein, 11 aa, Homo Sapiens
KQIDYTVPTVI

SEQ ID NO: 71508 - protein, 11 aa, Homo Sapiens
KQLSDTSIIAV

SEQ ID NO: 71509 - protein, 11 aa, Homo Sapiens
KQSPLQKHLRV

SEQ ID NO: 71510 - protein, 11 aa, Homo Sapiens
LLFEGEKKITI

SEQ ID NO: 71511 - protein, 11 aa, Homo Sapiens
LPAKEENVILV

SEQ ID NO: 71512 - protein, 11 aa, Homo Sapiens
PTSSQFLYPKV

SEQ ID NO: 71513 - protein, 11 aa, Homo Sapiens
RIAEALSKMKL

SEQ ID NO: 71514 - protein, 11 aa, Homo Sapiens
RILDIDIPMSV

SEQ ID NO: 71515 - protein, 11 aa, Homo Sapiens
RLADFGISAQI

SEQ ID NO: 71516 - protein, 11 aa, Homo Sapiens
RLAEAHAKVRL

SEQ ID NO: 71517 - protein, 11 aa, Homo Sapiens
RLAEALPKQSV

SEQ ID NO: 71518 - protein, 11 aa, Homo Sapiens
RLCPNSTGAEI

SEQ ID NO: 71519 - protein, 11 aa, Homo Sapiens
RLDPQSGALYI

SEQ ID NO: 71520 - protein, 11 aa, Homo Sapiens
RLFDDSTVTTV

SEQ ID NO: 71521 - protein, 11 aa, Homo Sapiens
RLFFPEDPVKI

SEQ ID NO: 71522 - protein, 11 aa, Homo Sapiens
RLFHDSAVTSV

SEQ ID NO: 71523 - protein, 11 aa, Homo Sapiens
RLFKIDKEYLL

SEQ ID NO: 71524 - protein, 11 aa, Homo Sapiens
RLFPKALGQLI

SEQ ID NO: 71525 - protein, 11 aa, Homo Sapiens
RLFPVPGSGLV

SEQ ID NO: 71526 - protein, 11 aa, Homo Sapiens
RLIEVNGVDLV

SEQ ID NO: 71527 - protein, 11 aa, Homo Sapiens
RLIGDAAKNQV

SEQ ID NO: 71528 - protein, 11 aa, Homo Sapiens
RLKAAEAESKL

SEQ ID NO: 71529 - protein, 11 aa, Homo Sapiens
RLKFLNDSEQV

SEQ ID NO: 71530 - protein, 11 aa, Homo Sapiens
RLKTQSELDRI

SEQ ID NO: 71531 - protein, 11 aa, Homo Sapiens
RLKYALTGDEV

SEQ ID NO: 71532 - protein, 11 aa, Homo Sapiens
RLLNVEVPQKV

SEQ ID NO: 71533 - protein, 11 aa, Homo Sapiens
RLLPGDIILKV

SEQ ID NO: 71534 - protein, 11 aa, Homo Sapiens
RLLPPGAVVAV

SEQ ID NO: 71535 - protein, 11 aa, Homo Sapiens
RLPAAGVGDMV

SEQ ID NO: 71536 - protein, 11 aa, Homo Sapiens
RLPFLDSQTGV

SEQ ID NO: 71537 - protein, 11 aa, Homo Sapiens
RLPPDTLLQQV

SEQ ID NO: 71538 - protein, 11 aa, Homo Sapiens
RLSASSTFQSI

SEQ ID NO: 71539 - protein, 11 aa, Homo Sapiens
RLSEEASQALI

SEQ ID NO: 71540 - protein, 11 aa, Homo Sapiens
RLSQAGARVKI

SEQ ID NO: 71541 - protein, 11 aa, Homo Sapiens
RMAEAHARIHL

SEQ ID NO: 71542 - protein, 11 aa, Homo Sapiens
RQAAEDKSWRV

SEQ ID NO: 71543 - protein, 11 aa, Homo Sapiens
RQAAGKIFEIF

SEQ ID NO: 71544 - protein, 11 aa, Homo Sapiens
RQAATEFGWTL

SEQ ID NO: 71545 - protein, 11 aa, Homo Sapiens
RQADCILIVGL

SEQ ID NO: 71546 - protein, 11 aa, Homo Sapiens
RQATAASSVMV

SEQ ID NO: 71547 - protein, 11 aa, Homo Sapiens
RQDLTQSLIMI

SEQ ID NO: 71548 - protein, 11 aa, Homo Sapiens
RQFDHPHIVKL

SEQ ID NO: 71549 - protein, 11 aa, Homo Sapiens
RQFESLPATHI

SEQ ID NO: 71550 - protein, 11 aa, Homo Sapiens
RQFKHSEKVHV

SEQ ID NO: 71551 - protein, 11 aa, Homo Sapiens
RQFSTPFQLQC

SEQ ID NO: 71552 - protein, 11 aa, Homo Sapiens
RQFVPIKVEQI

SEQ ID NO: 71553 - protein, 11 aa, Homo Sapiens
RQHEIVLKVAY

SEQ ID NO: 71554 - protein, 11 aa, Homo Sapiens
RQIDVHIFNAV

SEQ ID NO: 71555 - protein, 11 aa, Homo Sapiens
RQILLGPNTGL

SEQ ID NO: 71556 - protein, 11 aa, Homo Sapiens
RQLGSKYILGI

SEQ ID NO: 71557 - protein, 11 aa, Homo Sapiens
RQLKLPQIQKI

SEQ ID NO: 71558 - protein, 11 aa, Homo Sapiens
RQLNEKLVQLI

SEQ ID NO: 71559 - protein, 11 aa, Homo Sapiens
RQLTANTGHTI

SEQ ID NO: 71560 - protein, 11 aa, Homo Sapiens
RQMAEIAVNAV

SEQ ID NO: 71561 - protein, 11 aa, Homo Sapiens
RQSGSAVITFV

SEQ ID NO: 71562 - protein, 11 aa, Homo Sapiens
RQTASVTLQAI

SEQ ID NO: 71563 - protein, 11 aa, Homo Sapiens
RQTKTSLEVSL

SEQ ID NO: 71564 - protein, 11 aa, Homo Sapiens
RQVGQVAKQQV

SEQ ID NO: 71565 - protein, 11 aa, Homo Sapiens
RQVQPEGPYRV

SEQ ID NO: 71566 - protein, 11 aa, Homo Sapiens
RQVTGVTRVTI

SEQ ID NO: 71567 - protein, 11 aa, Homo Sapiens
RQYDGSRNPRI

SEQ ID NO: 71568 - protein, 11 aa, Homo Sapiens
RQYESLPATHI

SEQ ID NO: 71569 - protein, 11 aa, Homo Sapiens
RQYLDPAQRGV

SEQ ID NO: 71570 - protein, 11 aa, Homo Sapiens
RQYLECEVFRV

SEQ ID NO: 71571 - protein, 11 aa, Homo Sapiens
RQYLPGNEQGV

SEQ ID NO: 71572 - protein, 11 aa, Homo Sapiens
RVIDREGVYEI

SEQ ID NO: 71573 - protein, 11 aa, Homo Sapiens
RVLKPGGLLKV

SEQ ID NO: 71574 - protein, 11 aa, Homo Sapiens
SQFKGVDILLT

SEQ ID NO: 71575 - protein, 11 aa, Homo Sapiens
SQHGIHDGLTV

SEQ ID NO: 71576 - protein, 11 aa, Homo Sapiens
SQSQLISQMGI

SEQ ID NO: 71577 - protein, 11 aa, Homo Sapiens
SQVAVAGLLTV

SEQ ID NO: 71578 - protein, 11 aa, Homo Sapiens
SVFPGARLLTI

SEQ ID NO: 71579 - protein, 11 aa, Homo Sapiens
TQDQNSSSWLI

SEQ ID NO: 71580 - protein, 11 aa, Homo Sapiens
VQALVSGKLAL

SEQ ID NO: 71581 - protein, 11 aa, Homo Sapiens
VQFEDGQKIVV

SEQ ID NO: 71582 - protein, 11 aa, Homo Sapiens
VQPTAAPGQKV

SEQ ID NO: 71583 - protein, 11 aa, Homo Sapiens
VTIKKDVDGAY

SEQ ID NO: 71584 - protein, 11 aa, Homo Sapiens
VVVATNGKVLK

SEQ ID NO: 71585 - protein, 11 aa, Homo Sapiens
YQFDKVGILTL

SEQ ID NO: 71586 - protein, 11 aa, Homo Sapiens
YQKPGVGLDAI

SEQ ID NO: 71587 - protein, 11 aa, Homo Sapiens
YQPLFDKRFEI

SEQ ID NO: 71588 - protein, 8 aa, Homo Sapiens
AAERRGPL

SEQ ID NO: 71589 - protein, 8 aa, Homo Sapiens
AEFQHLVL

SEQ ID NO: 71590 - protein, 8 aa, Homo Sapiens
AEVLHTVL

SEQ ID NO: 71591 - protein, 8 aa, Homo Sapiens
AHFPHQVL

SEQ ID NO: 71592 - protein, 8 aa, Homo Sapiens
APFQHSPL

SEQ ID NO: 71593 - protein, 8 aa, Homo Sapiens
APLVHATL

SEQ ID NO: 71594 - protein, 8 aa, Homo Sapiens
AQLAHAVL

SEQ ID NO: 71595 - protein, 8 aa, Homo Sapiens
ARYQGREL

SEQ ID NO: 71596 - protein, 8 aa, Homo Sapiens
CDFVHQAL

SEQ ID NO: 71597 - protein, 8 aa, Homo Sapiens
CHAVHVAL

SEQ ID NO: 71598 - protein, 8 aa, Homo Sapiens
CMRLHLQL

SEQ ID NO: 71599 - protein, 8 aa, Homo Sapiens
CQVEHTSL

SEQ ID NO: 71600 - protein, 8 aa, Homo Sapiens
CRITHKTL

SEQ ID NO: 71601 - protein, 8 aa, Homo Sapiens
CRLEHTTL

SEQ ID NO: 71602 - protein, 8 aa, Homo Sapiens
CRVNHVTL

SEQ ID NO: 71603 - protein, 8 aa, Homo Sapiens
CRYQGPVL

SEQ ID NO: 71604 - protein, 8 aa, Homo Sapiens
DALVHARL

SEQ ID NO: 71605 - protein, 8 aa, Homo Sapiens
DALVHFAL

SEQ ID NO: 71606 - protein, 8 aa, Homo Sapiens
DASVHPTL

SEQ ID NO: 71607 - protein, 8 aa, Homo Sapiens
DAVERHAL

SEQ ID NO: 71608 - protein, 8 aa, Homo Sapiens
DAVTHARF

SEQ ID NO: 71609 - protein, 8 aa, Homo Sapiens
DDMQHQVL

SEQ ID NO: 71610 - protein, 8 aa, Homo Sapiens
DEAIRAVL

SEQ ID NO: 71611 - protein, 8 aa, Homo Sapiens
DEFVKSVL

SEQ ID NO: 71612 - protein, 8 aa, Homo Sapiens
DEGRHLTL

SEQ ID NO: 71613 - protein, 8 aa, Homo Sapiens
DEINHQSL

SEQ ID NO: 71614 - protein, 8 aa, Homo Sapiens
DELNHASI

SEQ ID NO: 71615 - protein, 8 aa, Homo Sapiens
DESIHLQL

SEQ ID NO: 71616 - protein, 8 aa, Homo Sapiens
DEVGHLAL

SEQ ID NO: 71617 - protein, 8 aa, Homo Sapiens
DEVIHGIF

SEQ ID NO: 71618 - protein, 8 aa, Homo Sapiens
DEVKRGVL

SEQ ID NO: 71619 - protein, 8 aa, Homo Sapiens
DFATHGKL

SEQ ID NO: 71620 - protein, 8 aa, Homo Sapiens
DGFLHETL

SEQ ID NO: 71621 - protein, 8 aa, Homo Sapiens
DGFQHGEL

SEQ ID NO: 71622 - protein, 8 aa, Homo Sapiens
DGFRHQAL

SEQ ID NO: 71623 - protein, 8 aa, Homo Sapiens
DGLIHTSL

SEQ ID NO: 71624 - protein, 8 aa, Homo Sapiens
DGVPREGL

SEQ ID NO: 71625 - protein, 8 aa, Homo Sapiens
DGYRHEML

SEQ ID NO: 71626 - protein, 8 aa, Homo Sapiens
DHISHFIL

SEQ ID NO: 71627 - protein, 8 aa, Homo Sapiens
DHWVHVLV

SEQ ID NO: 71628 - protein, 8 aa, Homo Sapiens
DHYEKPEL

SEQ ID NO: 71629 - protein, 8 aa, Homo Sapiens
DIKRALGI

SEQ ID NO: 71630 - protein, 8 aa, Homo Sapiens
DIRVLRIG

SEQ ID NO: 71631 - protein, 8 aa, Homo Sapiens
DKMTHRIL

SEQ ID NO: 71632 - protein, 8 aa, Homo Sapiens
DMYSHYVL

SEQ ID NO: 71633 - protein, 8 aa, Homo Sapiens
DNVAHSSL

SEQ ID NO: 71634 - protein, 8 aa, Homo Sapiens
DNVTHAHL

SEQ ID NO: 71635 - protein, 8 aa, Homo Sapiens
DPVVHSAL

SEQ ID NO: 71636 - protein, 8 aa, Homo Sapiens
DQARHYLL

SEQ ID NO: 71637 - protein, 8 aa, Homo Sapiens
DQAVHAEV

SEQ ID NO: 71638 - protein, 8 aa, Homo Sapiens
DQFLKICL

SEQ ID NO: 71639 - protein, 8 aa, Homo Sapiens
DQFLRDNL

SEQ ID NO: 71640 - protein, 8 aa, Homo Sapiens
DQFLREVL

SEQ ID NO: 71641 - protein, 8 aa, Homo Sapiens
DQIVRHDL

SEQ ID NO: 71642 - protein, 8 aa, Homo Sapiens
DQLRHGGL

SEQ ID NO: 71643 - protein, 8 aa, Homo Sapiens
DQSLHREL

SEQ ID NO: 71644 - protein, 8 aa, Homo Sapiens
DQTKRLEL

SEQ ID NO: 71645 - protein, 8 aa, Homo Sapiens
DQVARTHL

SEQ ID NO: 71646 - protein, 8 aa, Homo Sapiens
DQVLHLSF

SEQ ID NO: 71647 - protein, 8 aa, Homo Sapiens
DQVQHMEL

SEQ ID NO: 71648 - protein, 8 aa, Homo Sapiens
DQVTHIRI

SEQ ID NO: 71649 - protein, 8 aa, Homo Sapiens
DQYSRFSL

SEQ ID NO: 71650 - protein, 8 aa, Homo Sapiens
DRAGSIVL

SEQ ID NO: 71651 - protein, 8 aa, Homo Sapiens
DRAKHLEF

SEQ ID NO: 71652 - protein, 8 aa, Homo Sapiens
DRALHAKL

SEQ ID NO: 71653 - protein, 8 aa, Homo Sapiens
DRALRAAL

SEQ ID NO: 71654 - protein, 8 aa, Homo Sapiens
DRALRSFL

SEQ ID NO: 71655 - protein, 8 aa, Homo Sapiens
DRARYSAF

SEQ ID NO: 71656 - protein, 8 aa, Homo Sapiens
DRAYVRQL

SEQ ID NO: 71657 - protein, 8 aa, Homo Sapiens
DRFKVKEV

SEQ ID NO: 71658 - protein, 8 aa, Homo Sapiens
DRFKVMKA

SEQ ID NO: 71659 - protein, 8 aa, Homo Sapiens
DRFNHFSL

SEQ ID NO: 71660 - protein, 8 aa, Homo Sapiens
DRFRDSIL

SEQ ID NO: 71661 - protein, 8 aa, Homo Sapiens
DRFRNNSL

SEQ ID NO: 71662 - protein, 8 aa, Homo Sapiens
DRFRSQIL

SEQ ID NO: 71663 - protein, 8 aa, Homo Sapiens
DRHMYHSL

SEQ ID NO: 71664 - protein, 8 aa, Homo Sapiens
DRHVGMAV

SEQ ID NO: 71665 - protein, 8 aa, Homo Sapiens
DRIEITSL

SEQ ID NO: 71666 - protein, 8 aa, Homo Sapiens
DRIKRAFL

SEQ ID NO: 71667 - protein, 8 aa, Homo Sapiens
DRILIHSL

SEQ ID NO: 71668 - protein, 8 aa, Homo Sapiens
DRILREEL

SEQ ID NO: 71669 - protein, 8 aa, Homo Sapiens
DRILRPEL

SEQ ID NO: 71670 - protein, 8 aa, Homo Sapiens
DRIVSMTL

SEQ ID NO: 71671 - protein, 8 aa, Homo Sapiens
DRLINSEL

SEQ ID NO: 71672 - protein, 8 aa, Homo Sapiens
DRLIVGTA

SEQ ID NO: 71673 - protein, 8 aa, Homo Sapiens
DRLKPLKM

SEQ ID NO: 71674 - protein, 8 aa, Homo Sapiens
DRLKPLLV

SEQ ID NO: 71675 - protein, 8 aa, Homo Sapiens
DRLKSALL

SEQ ID NO: 71676 - protein, 8 aa, Homo Sapiens
DRLKSLTM

SEQ ID NO: 71677 - protein, 8 aa, Homo Sapiens
DRLQWVTI

SEQ ID NO: 71678 - protein, 8 aa, Homo Sapiens
DRLSASSL

SEQ ID NO: 71679 - protein, 8 aa, Homo Sapiens
DRLYSRKI

SEQ ID NO: 71680 - protein, 8 aa, Homo Sapiens
DRMFHIRA

SEQ ID NO: 71681 - protein, 8 aa, Homo Sapiens
DRMKTVSV

SEQ ID NO: 71682 - protein, 8 aa, Homo Sapiens
DRMLRSAM

SEQ ID NO: 71683 - protein, 8 aa, Homo Sapiens
DRMVGQVL

SEQ ID NO: 71684 - protein, 8 aa, Homo Sapiens
DRMYRSAV

SEQ ID NO: 71685 - protein, 8 aa, Homo Sapiens
DRNQPVTL

SEQ ID NO: 71686 - protein, 8 aa, Homo Sapiens
DRQCARVL

SEQ ID NO: 71687 - protein, 8 aa, Homo Sapiens
DRQKSRIL

SEQ ID NO: 71688 - protein, 8 aa, Homo Sapiens
DRQVVSEL

SEQ ID NO: 71689 - protein, 8 aa, Homo Sapiens
DRRDHPLP

SEQ ID NO: 71690 - protein, 8 aa, Homo Sapiens
DRTGHIKL

SEQ ID NO: 71691 - protein, 8 aa, Homo Sapiens
DRVAHMEF

SEQ ID NO: 71692 - protein, 8 aa, Homo Sapiens
DRVFHESI

SEQ ID NO: 71693 - protein, 8 aa, Homo Sapiens
DRVGRQEL

SEQ ID NO: 71694 - protein, 8 aa, Homo Sapiens
DRVIKASL

SEQ ID NO: 71695 - protein, 8 aa, Homo Sapiens
DRVIKNCI

SEQ ID NO: 71696 - protein, 8 aa, Homo Sapiens
DRVRALEL

SEQ ID NO: 71697 - protein, 8 aa, Homo Sapiens
DRVRHSML

SEQ ID NO: 71698 - protein, 8 aa, Homo Sapiens
DRVTRSTL

SEQ ID NO: 71699 - protein, 8 aa, Homo Sapiens
DRVVIQEM

SEQ ID NO: 71700 - protein, 8 aa, Homo Sapiens
DRVVVIRF

SEQ ID NO: 71701 - protein, 8 aa, Homo Sapiens
DRWWHATL

SEQ ID NO: 71702 - protein, 8 aa, Homo Sapiens
DRYGGQPL

SEQ ID NO: 71703 - protein, 8 aa, Homo Sapiens
DRYIFVSL

SEQ ID NO: 71704 - protein, 8 aa, Homo Sapiens
DRYLPDTL

SEQ ID NO: 71705 - protein, 8 aa, Homo Sapiens
DRYPNQTL

SEQ ID NO: 71706 - protein, 8 aa, Homo Sapiens
DRYYTPTI

SEQ ID NO: 71707 - protein, 8 aa, Homo Sapiens
DSAMHLAL

SEQ ID NO: 71708 - protein, 8 aa, Homo Sapiens
DSPLHKAL

SEQ ID NO: 71709 - protein, 8 aa, Homo Sapiens
DSVVRRQL

SEQ ID NO: 71710 - protein, 8 aa, Homo Sapiens
DTYSHQAL

SEQ ID NO: 71711 - protein, 8 aa, Homo Sapiens
DVAYHNSL

SEQ ID NO: 71712 - protein, 8 aa, Homo Sapiens
DVGVHCVL

SEQ ID NO: 71713 - protein, 8 aa, Homo Sapiens
DVTLHQAL

SEQ ID NO: 71714 - protein, 8 aa, Homo Sapiens
DYLRPIAL

SEQ ID NO: 71715 - protein, 8 aa, Homo Sapiens
EEFTHTTL

SEQ ID NO: 71716 - protein, 8 aa, Homo Sapiens
ENATHTQL

SEQ ID NO: 71717 - protein, 8 aa, Homo Sapiens
ENSLHRAL

SEQ ID NO: 71718 - protein, 8 aa, Homo Sapiens
ENVAHNAL

SEQ ID NO: 71719 - protein, 8 aa, Homo Sapiens
EPATHNAL

SEQ ID NO: 71720 - protein, 8 aa, Homo Sapiens
EQLEHCEL

SEQ ID NO: 71721 - protein, 8 aa, Homo Sapiens
EQTTHPEL

SEQ ID NO: 71722 - protein, 8 aa, Homo Sapiens
EQTYHAKL

SEQ ID NO: 71723 - protein, 8 aa, Homo Sapiens
EQVLHKQL

SEQ ID NO: 71724 - protein, 8 aa, Homo Sapiens
EQYEHASI

SEQ ID NO: 71725 - protein, 8 aa, Homo Sapiens
ERFSHVAM

SEQ ID NO: 71726 - protein, 8 aa, Homo Sapiens
ERIDHIKL

SEQ ID NO: 71727 - protein, 8 aa, Homo Sapiens
ERLEHPVL

SEQ ID NO: 71728 - protein, 8 aa, Homo Sapiens
ERMLRLSL

SEQ ID NO: 71729 - protein, 8 aa, Homo Sapiens
ERSIHDAL

SEQ ID NO: 71730 - protein, 8 aa, Homo Sapiens
ERVVHYEI

SEQ ID NO: 71731 - protein, 8 aa, Homo Sapiens
ERYFHHVL

SEQ ID NO: 71732 - protein, 8 aa, Homo Sapiens
ESTLHLVL

SEQ ID NO: 71733 - protein, 8 aa, Homo Sapiens
EVYAHAVL

SEQ ID NO: 71734 - protein, 8 aa, Homo Sapiens
FEAIHHEL

SEQ ID NO: 71735 - protein, 8 aa, Homo Sapiens
FEFVHALL

SEQ ID NO: 71736 - protein, 8 aa, Homo Sapiens
FEVEHECL

SEQ ID NO: 71737 - protein, 8 aa, Homo Sapiens
FQTIHKTI

SEQ ID NO: 71738 - protein, 8 aa, Homo Sapiens
FQVKRQVL

SEQ ID NO: 71739 - protein, 8 aa, Homo Sapiens
FRQIHKVL

SEQ ID NO: 71740 - protein, 8 aa, Homo Sapiens
FRVLHTAL

SEQ ID NO: 71741 - protein, 8 aa, Homo Sapiens
GRYIRSAL

SEQ ID NO: 71742 - protein, 8 aa, Homo Sapiens
HEIAHAVL

SEQ ID NO: 71743 - protein, 8 aa, Homo Sapiens
HETLHQSL

SEQ ID NO: 71744 - protein, 8 aa, Homo Sapiens
HEVLHHTL

SEQ ID NO: 71745 - protein, 8 aa, Homo Sapiens
HGIIHRDL

SEQ ID NO: 71746 - protein, 8 aa, Homo Sapiens
HGIVHRAL

SEQ ID NO: 71747 - protein, 8 aa, Homo Sapiens
HGIVHSDL

SEQ ID NO: 71748 - protein, 8 aa, Homo Sapiens
HGLIHNVL

SEQ ID NO: 71749 - protein, 8 aa, Homo Sapiens
HGYVHETL

SEQ ID NO: 71750 - protein, 8 aa, Homo Sapiens
HHYLRPSL

SEQ ID NO: 71751 - protein, 8 aa, Homo Sapiens
HMVVHRDL

SEQ ID NO: 71752 - protein, 8 aa, Homo Sapiens
HPAGHLVL

SEQ ID NO: 71753 - protein, 8 aa, Homo Sapiens
HPGSHTVL

SEQ ID NO: 71754 - protein, 8 aa, Homo Sapiens
HPGTHTVL

SEQ ID NO: 71755 - protein, 8 aa, Homo Sapiens
HPNVHFVL

SEQ ID NO: 71756 - protein, 8 aa, Homo Sapiens
HPVPHAAL

SEQ ID NO: 71757 - protein, 8 aa, Homo Sapiens
HQIIHTGL

SEQ ID NO: 71758 - protein, 8 aa, Homo Sapiens
HQVTRAVL

SEQ ID NO: 71759 - protein, 8 aa, Homo Sapiens
HRAFHLAL

SEQ ID NO: 71760 - protein, 8 aa, Homo Sapiens
HRAVREVL

SEQ ID NO: 71761 - protein, 8 aa, Homo Sapiens
HRFGGLVL

SEQ ID NO: 71762 - protein, 8 aa, Homo Sapiens
HRFIVNTL

SEQ ID NO: 71763 - protein, 8 aa, Homo Sapiens
HRGHHTFL

SEQ ID NO: 71764 - protein, 8 aa, Homo Sapiens
HRVIHRDI

SEQ ID NO: 71765 - protein, 8 aa, Homo Sapiens
HRVLHNSL

SEQ ID NO: 71766 - protein, 8 aa, Homo Sapiens
HRYYGKSL

SEQ ID NO: 71767 - protein, 8 aa, Homo Sapiens
HSVLHRAL

SEQ ID NO: 71768 - protein, 8 aa, Homo Sapiens
HSVVHALL

SEQ ID NO: 71769 - protein, 8 aa, Homo Sapiens
HVFHHSVL

SEQ ID NO: 71770 - protein, 8 aa, Homo Sapiens
HVVIHQSL

SEQ ID NO: 71771 - protein, 8 aa, Homo Sapiens
IEFQREAL

SEQ ID NO: 71772 - protein, 8 aa, Homo Sapiens
IEIIHEEL

SEQ ID NO: 71773 - protein, 8 aa, Homo Sapiens
IGTFHTSL

SEQ ID NO: 71774 - protein, 8 aa, Homo Sapiens
IGTTHVTL

SEQ ID NO: 71775 - protein, 8 aa, Homo Sapiens
IGVVHLVL

SEQ ID NO: 71776 - protein, 8 aa, Homo Sapiens
ILTTHTTL

SEQ ID NO: 71777 - protein, 8 aa, Homo Sapiens
IPHIHKSL

SEQ ID NO: 71778 - protein, 8 aa, Homo Sapiens
IPMIHAVL

SEQ ID NO: 71779 - protein, 8 aa, Homo Sapiens
IQAIHSTI

SEQ ID NO: 71780 - protein, 8 aa, Homo Sapiens
IQAVRRSL

SEQ ID NO: 71781 - protein, 8 aa, Homo Sapiens
IQILHQVL

SEQ ID NO: 71782 - protein, 8 aa, Homo Sapiens
IQSIRMGM

SEQ ID NO: 71783 - protein, 8 aa, Homo Sapiens
IQVVREEL

SEQ ID NO: 71784 - protein, 8 aa, Homo Sapiens
IRMTHNLL

SEQ ID NO: 71785 - protein, 8 aa, Homo Sapiens
IRNIGKTL

SEQ ID NO: 71786 - protein, 8 aa, Homo Sapiens
IRQKALKL

SEQ ID NO: 71787 - protein, 8 aa, Homo Sapiens
KEAIHSQL

SEQ ID NO: 71788 - protein, 8 aa, Homo Sapiens
LAITHHVL

SEQ ID NO: 71789 - protein, 8 aa, Homo Sapiens
LATLHTAL

SEQ ID NO: 71790 - protein, 8 aa, Homo Sapiens
LAVLHTVL

SEQ ID NO: 71791 - protein, 8 aa, Homo Sapiens
LDATHQQL

SEQ ID NO: 71792 - protein, 8 aa, Homo Sapiens
LDVIHEVL

SEQ ID NO: 71793 - protein, 8 aa, Homo Sapiens
LEAQHQAL

SEQ ID NO: 71794 - protein, 8 aa, Homo Sapiens
LEAQHRSL

SEQ ID NO: 71795 - protein, 8 aa, Homo Sapiens
LEAVHDLL

SEQ ID NO: 71796 - protein, 8 aa, Homo Sapiens
LEAVHDVL

SEQ ID NO: 71797 - protein, 8 aa, Homo Sapiens
LEETHKAL

SEQ ID NO: 71798 - protein, 8 aa, Homo Sapiens
LEGRHAEL

SEQ ID NO: 71799 - protein, 8 aa, Homo Sapiens
LETGHRAL

SEQ ID NO: 71800 - protein, 8 aa, Homo Sapiens
LGFTHHCL

SEQ ID NO: 71801 - protein, 8 aa, Homo Sapiens
LNVLHSEL

SEQ ID NO: 71802 - protein, 8 aa, Homo Sapiens
LPAEHGVL

SEQ ID NO: 71803 - protein, 8 aa, Homo Sapiens
LPASHMEL

SEQ ID NO: 71804 - protein, 8 aa, Homo Sapiens
LPNIHPEL

SEQ ID NO: 71805 - protein, 8 aa, Homo Sapiens
LPSIHSLL

SEQ ID NO: 71806 - protein, 8 aa, Homo Sapiens
LQAERRAL

SEQ ID NO: 71807 - protein, 8 aa, Homo Sapiens
LQALHDAL

SEQ ID NO: 71808 - protein, 8 aa, Homo Sapiens
LQAQRENL

SEQ ID NO: 71809 - protein, 8 aa, Homo Sapiens
LQASHSEL

SEQ ID NO: 71810 - protein, 8 aa, Homo Sapiens
LQAVRQAL

SEQ ID NO: 71811 - protein, 8 aa, Homo Sapiens
LQHIRNSL

SEQ ID NO: 71812 - protein, 8 aa, Homo Sapiens
LQLWNGLL

SEQ ID NO: 71813 - protein, 8 aa, Homo Sapiens
LQNAHGEL

SEQ ID NO: 71814 - protein, 8 aa, Homo Sapiens
LQNEHRVL

SEQ ID NO: 71815 - protein, 8 aa, Homo Sapiens
LQRIHAEI

SEQ ID NO: 71816 - protein, 8 aa, Homo Sapiens
LQSRHVAL

SEQ ID NO: 71817 - protein, 8 aa, Homo Sapiens
LQVAHEEI

SEQ ID NO: 71818 - protein, 8 aa, Homo Sapiens
LQVLHRKL

SEQ ID NO: 71819 - protein, 8 aa, Homo Sapiens
LRFQSSAV

SEQ ID NO: 71820 - protein, 8 aa, Homo Sapiens
LRHLGRTL

SEQ ID NO: 71821 - protein, 8 aa, Homo Sapiens
LRLAHECL

SEQ ID NO: 71822 - protein, 8 aa, Homo Sapiens
LRLEHTKL

SEQ ID NO: 71823 - protein, 8 aa, Homo Sapiens
LRLPGRKL

SEQ ID NO: 71824 - protein, 8 aa, Homo Sapiens
LRQHIAEL

SEQ ID NO: 71825 - protein, 8 aa, Homo Sapiens
LRTMHHLL

SEQ ID NO: 71826 - protein, 8 aa, Homo Sapiens
LRVEHEKL

SEQ ID NO: 71827 - protein, 8 aa, Homo Sapiens
MEAEHNTL

SEQ ID NO: 71828 - protein, 8 aa, Homo Sapiens
MEALHLHL

SEQ ID NO: 71829 - protein, 8 aa, Homo Sapiens
MEALHYML

SEQ ID NO: 71830 - protein, 8 aa, Homo Sapiens
MENIHSEM

SEQ ID NO: 71831 - protein, 8 aa, Homo Sapiens
MEVVHKEL

SEQ ID NO: 71832 - protein, 8 aa, Homo Sapiens
MKMTHSEL

SEQ ID NO: 71833 - protein, 8 aa, Homo Sapiens
MNGIHSEL

SEQ ID NO: 71834 - protein, 8 aa, Homo Sapiens
MPTVHYEF

SEQ ID NO: 71835 - protein, 8 aa, Homo Sapiens
MQIKHELL

SEQ ID NO: 71836 - protein, 8 aa, Homo Sapiens
MRHLISSL

SEQ ID NO: 71837 - protein, 8 aa, Homo Sapiens
MRLLPRLL

SEQ ID NO: 71838 - protein, 8 aa, Homo Sapiens
MRLTPRAL

SEQ ID NO: 71839 - protein, 8 aa, Homo Sapiens
MRQKAVSL

SEQ ID NO: 71840 - protein, 8 aa, Homo Sapiens
MRVERSTL

SEQ ID NO: 71841 - protein, 8 aa, Homo Sapiens
MRYLGKVL

SEQ ID NO: 71842 - protein, 8 aa, Homo Sapiens
MSARHMAL

SEQ ID NO: 71843 - protein, 8 aa, Homo Sapiens
NALAHHVL

SEQ ID NO: 71844 - protein, 8 aa, Homo Sapiens
NAVLHKVL

SEQ ID NO: 71845 - protein, 8 aa, Homo Sapiens
NDGTHMAL

SEQ ID NO: 71846 - protein, 8 aa, Homo Sapiens
NEFLRSGL

SEQ ID NO: 71847 - protein, 8 aa, Homo Sapiens
NERLHSEL

SEQ ID NO: 71848 - protein, 8 aa, Homo Sapiens
NESTRSVL

SEQ ID NO: 71849 - protein, 8 aa, Homo Sapiens
NETYHLTL

SEQ ID NO: 71850 - protein, 8 aa, Homo Sapiens
NEVLHQEL

SEQ ID NO: 71851 - protein, 8 aa, Homo Sapiens
NEVQRTML

SEQ ID NO: 71852 - protein, 8 aa, Homo Sapiens
NEVVRSDL

SEQ ID NO: 71853 - protein, 8 aa, Homo Sapiens
NGFMHHVL

SEQ ID NO: 71854 - protein, 8 aa, Homo Sapiens
NGSLHQEL

SEQ ID NO: 71855 - protein, 8 aa, Homo Sapiens
NHTTHMSL

SEQ ID NO: 71856 - protein, 8 aa, Homo Sapiens
NKTIHAEL

SEQ ID NO: 71857 - protein, 8 aa, Homo Sapiens
NMTVHSAL

SEQ ID NO: 71858 - protein, 8 aa, Homo Sapiens
NQIIHRDL

SEQ ID NO: 71859 - protein, 8 aa, Homo Sapiens
NQIVHRDI

SEQ ID NO: 71860 - protein, 8 aa, Homo Sapiens
NQLLKPTL

SEQ ID NO: 71861 - protein, 8 aa, Homo Sapiens
NQLTHTDL

SEQ ID NO: 71862 - protein, 8 aa, Homo Sapiens
NQTPHLLL

SEQ ID NO: 71863 - protein, 8 aa, Homo Sapiens
NQTVHRLL

SEQ ID NO: 71864 - protein, 8 aa, Homo Sapiens
NQVAHLEL

SEQ ID NO: 71865 - protein, 8 aa, Homo Sapiens
NQVIHWEI

SEQ ID NO: 71866 - protein, 8 aa, Homo Sapiens
NQYLRVSL

SEQ ID NO: 71867 - protein, 8 aa, Homo Sapiens
NRALRTDL

SEQ ID NO: 71868 - protein, 8 aa, Homo Sapiens
NRAPSLTL

SEQ ID NO: 71869 - protein, 8 aa, Homo Sapiens
NRAVVGVV

SEQ ID NO: 71870 - protein, 8 aa, Homo Sapiens
NRFQIATV

SEQ ID NO: 71871 - protein, 8 aa, Homo Sapiens
NRFVGILM

SEQ ID NO: 71872 - protein, 8 aa, Homo Sapiens
NRFVRTVL

SEQ ID NO: 71873 - protein, 8 aa, Homo Sapiens
NRFYHEEL

SEQ ID NO: 71874 - protein, 8 aa, Homo Sapiens
NRHLHFTL

SEQ ID NO: 71875 - protein, 8 aa, Homo Sapiens
NRIIHRDL

SEQ ID NO: 71876 - protein, 8 aa, Homo Sapiens
NRIVHISV

SEQ ID NO: 71877 - protein, 8 aa, Homo Sapiens
NRIVIRGL

SEQ ID NO: 71878 - protein, 8 aa, Homo Sapiens
NRKEGLRL

SEQ ID NO: 71879 - protein, 8 aa, Homo Sapiens
NRLIGQIV

SEQ ID NO: 71880 - protein, 8 aa, Homo Sapiens
NRLIPTEL

SEQ ID NO: 71881 - protein, 8 aa, Homo Sapiens
NRLISQIV

SEQ ID NO: 71882 - protein, 8 aa, Homo Sapiens
NRLMGRTL

SEQ ID NO: 71883 - protein, 8 aa, Homo Sapiens
NRLQWVQL

SEQ ID NO: 71884 - protein, 8 aa, Homo Sapiens
NRLSVSSL

SEQ ID NO: 71885 - protein, 8 aa, Homo Sapiens
NRLTHRLL

SEQ ID NO: 71886 - protein, 8 aa, Homo Sapiens
NRLTWIVV

SEQ ID NO: 71887 - protein, 8 aa, Homo Sapiens
NRMIKSEL

SEQ ID NO: 71888 - protein, 8 aa, Homo Sapiens
NRMTHKLL

SEQ ID NO: 71889 - protein, 8 aa, Homo Sapiens
NRRYHPAL

SEQ ID NO: 71890 - protein, 8 aa, Homo Sapiens
NRSIHRVF

SEQ ID NO: 71891 - protein, 8 aa, Homo Sapiens
NRVIHRDL

SEQ ID NO: 71892 - protein, 8 aa, Homo Sapiens
NRVKTEAL

SEQ ID NO: 71893 - protein, 8 aa, Homo Sapiens
NRVLHQEL

SEQ ID NO: 71894 - protein, 8 aa, Homo Sapiens
NRVQNMAL

SEQ ID NO: 71895 - protein, 8 aa, Homo Sapiens
NRVRPLVL

SEQ ID NO: 71896 - protein, 8 aa, Homo Sapiens
NRYIANTV

SEQ ID NO: 71897 - protein, 8 aa, Homo Sapiens
NRYPASSL

SEQ ID NO: 71898 - protein, 8 aa, Homo Sapiens
NRYPNIEL

SEQ ID NO: 71899 - protein, 8 aa, Homo Sapiens
NRYSTVSL

SEQ ID NO: 71900 - protein, 8 aa, Homo Sapiens
NRYVGRTF

SEQ ID NO: 71901 - protein, 8 aa, Homo Sapiens
NRYVKPGL

SEQ ID NO: 71902 - protein, 8 aa, Homo Sapiens
NSFTHEAL

SEQ ID NO: 71903 - protein, 8 aa, Homo Sapiens
NSVVHKVL

SEQ ID NO: 71904 - protein, 8 aa, Homo Sapiens
NVAQHTSL

SEQ ID NO: 71905 - protein, 8 aa, Homo Sapiens
NVATHSTL

SEQ ID NO: 71906 - protein, 8 aa, Homo Sapiens
NVTNHGAL

SEQ ID NO: 71907 - protein, 8 aa, Homo Sapiens
PFCHSELI

SEQ ID NO: 71908 - protein, 8 aa, Homo Sapiens
QGVVHRDL

SEQ ID NO: 71909 - protein, 8 aa, Homo Sapiens
QQGAHSAL

SEQ ID NO: 71910 - protein, 8 aa, Homo Sapiens
QQIQRSSL

SEQ ID NO: 71911 - protein, 8 aa, Homo Sapiens
QQQQHQAL

SEQ ID NO: 71912 - protein, 8 aa, Homo Sapiens
QQVVRIAL

SEQ ID NO: 71913 - protein, 8 aa, Homo Sapiens
QRFARMEL

SEQ ID NO: 71914 - protein, 8 aa, Homo Sapiens
QRFSHQTL

SEQ ID NO: 71915 - protein, 8 aa, Homo Sapiens
QRIDRLAL

SEQ ID NO: 71916 - protein, 8 aa, Homo Sapiens
QRIIRNAL

SEQ ID NO: 71917 - protein, 8 aa, Homo Sapiens
RDVVHSTL

SEQ ID NO: 71918 - protein, 8 aa, Homo Sapiens
RPTVHQTL

SEQ ID NO: 71919 - protein, 8 aa, Homo Sapiens
RPYVHKIL

SEQ ID NO: 71920 - protein, 8 aa, Homo Sapiens
RQLERSAL

SEQ ID NO: 71921 - protein, 8 aa, Homo Sapiens
SFSKAFGQ

SEQ ID NO: 71922 - protein, 8 aa, Homo Sapiens
SPAGHSFL

SEQ ID NO: 71923 - protein, 8 aa, Homo Sapiens
SPTVHLGL

SEQ ID NO: 71924 - protein, 8 aa, Homo Sapiens
SPVVHQSL

SEQ ID NO: 71925 - protein, 8 aa, Homo Sapiens
SPVVHSVL

SEQ ID NO: 71926 - protein, 8 aa, Homo Sapiens
SQFSHMSL

SEQ ID NO: 71927 - protein, 8 aa, Homo Sapiens
SQFTRNAL

SEQ ID NO: 71928 - protein, 8 aa, Homo Sapiens
SQHLHEVL

SEQ ID NO: 71929 - protein, 8 aa, Homo Sapiens
SQLRVAKV

SEQ ID NO: 71930 - protein, 8 aa, Homo Sapiens
SRALRQAL

SEQ ID NO: 71931 - protein, 8 aa, Homo Sapiens
SRHLHASL

SEQ ID NO: 71932 - protein, 8 aa, Homo Sapiens
SRICHREL

SEQ ID NO: 71933 - protein, 8 aa, Homo Sapiens
SRNLRSSL

SEQ ID NO: 71934 - protein, 8 aa, Homo Sapiens
SRTNRPPL

SEQ ID NO: 71935 - protein, 8 aa, Homo Sapiens
SRVIRNAL

SEQ ID NO: 71936 - protein, 8 aa, Homo Sapiens
SRVLRTSL

SEQ ID NO: 71937 - protein, 8 aa, Homo Sapiens
SRWAGRAL

SEQ ID NO: 71938 - protein, 8 aa, Homo Sapiens
SRYLRAVL

SEQ ID NO: 71939 - protein, 8 aa, Homo Sapiens
SRYTGASL

SEQ ID NO: 71940 - protein, 8 aa, Homo Sapiens
SSALHQTL

SEQ ID NO: 71941 - protein, 8 aa, Homo Sapiens
SSVSHSVL

SEQ ID NO: 71942 - protein, 8 aa, Homo Sapiens
TAIRHHVL

SEQ ID NO: 71943 - protein, 8 aa, Homo Sapiens
TEAVHTML

SEQ ID NO: 71944 - protein, 8 aa, Homo Sapiens
TEELAYLK

SEQ ID NO: 71945 - protein, 8 aa, Homo Sapiens
TGWVHDVL

SEQ ID NO: 71946 - protein, 8 aa, Homo Sapiens
THTRHYEL

SEQ ID NO: 71947 - protein, 8 aa, Homo Sapiens
TQAIHDVF

SEQ ID NO: 71948 - protein, 8 aa, Homo Sapiens
TQFVHHAL

SEQ ID NO: 71949 - protein, 8 aa, Homo Sapiens
TQQLHPVL

SEQ ID NO: 71950 - protein, 8 aa, Homo Sapiens
TQTAHTEL

SEQ ID NO: 71951 - protein, 8 aa, Homo Sapiens
TQTRHGVL

SEQ ID NO: 71952 - protein, 8 aa, Homo Sapiens
TRAIVRAL

SEQ ID NO: 71953 - protein, 8 aa, Homo Sapiens
TRIIHRLL

SEQ ID NO: 71954 - protein, 8 aa, Homo Sapiens
TRILRQTL

SEQ ID NO: 71955 - protein, 8 aa, Homo Sapiens
TRLKSRVL

SEQ ID NO: 71956 - protein, 8 aa, Homo Sapiens
TRLVRGEL

SEQ ID NO: 71957 - protein, 8 aa, Homo Sapiens
TRRVHPAL

SEQ ID NO: 71958 - protein, 8 aa, Homo Sapiens
TRVPHSKL

SEQ ID NO: 71959 - protein, 8 aa, Homo Sapiens
VAVIHQSL

SEQ ID NO: 71960 - protein, 8 aa, Homo Sapiens
VEALHEVL

SEQ ID NO: 71961 - protein, 8 aa, Homo Sapiens
VEASHLAL

SEQ ID NO: 71962 - protein, 8 aa, Homo Sapiens
VEMHHEAL

SEQ ID NO: 71963 - protein, 8 aa, Homo Sapiens
VPFNHEIL

SEQ ID NO: 71964 - protein, 8 aa, Homo Sapiens
VPHFHHEL

SEQ ID NO: 71965 - protein, 8 aa, Homo Sapiens
VPNVHGAL

SEQ ID NO: 71966 - protein, 8 aa, Homo Sapiens
VQATRTSL

SEQ ID NO: 71967 - protein, 8 aa, Homo Sapiens
VQEIHQVL

SEQ ID NO: 71968 - protein, 8 aa, Homo Sapiens
VQNSHTEL

SEQ ID NO: 71969 - protein, 8 aa, Homo Sapiens
VQVAHEKL

SEQ ID NO: 71970 - protein, 8 aa, Homo Sapiens
VQYERPCL

SEQ ID NO: 71971 - protein, 8 aa, Homo Sapiens
VRFKHRYL

SEQ ID NO: 71972 - protein, 8 aa, Homo Sapiens
VRLIMDSL

SEQ ID NO: 71973 - protein, 8 aa, Homo Sapiens
VRVGHSEL

SEQ ID NO: 71974 - protein, 8 aa, Homo Sapiens
VRVKHKLL

SEQ ID NO: 71975 - protein, 8 aa, Homo Sapiens
VRWFHRDL

SEQ ID NO: 71976 - protein, 8 aa, Homo Sapiens
VRYAHEKL

SEQ ID NO: 71977 - protein, 8 aa, Homo Sapiens
VSPLHRVL

SEQ ID NO: 71978 - protein, 8 aa, Homo Sapiens
YEFVHHAL

SEQ ID NO: 71979 - protein, 8 aa, Homo Sapiens
YEVHHQKL

SEQ ID NO: 71980 - protein, 8 aa, Homo Sapiens
YQAAHCVL

SEQ ID NO: 71981 - protein, 8 aa, Homo Sapiens
YQAQHGAL

SEQ ID NO: 71982 - protein, 8 aa, Homo Sapiens
YQFLHHTL

SEQ ID NO: 71983 - protein, 8 aa, Homo Sapiens
YQILHECL

SEQ ID NO: 71984 - protein, 8 aa, Homo Sapiens
YQVLRSVL

SEQ ID NO: 71985 - protein, 8 aa, Homo Sapiens
YQYMHETI

SEQ ID NO: 71986 - protein, 8 aa, Homo Sapiens
YRATHRLL

SEQ ID NO: 71987 - protein, 8 aa, Homo Sapiens
YRFSRAAL

SEQ ID NO: 71988 - protein, 8 aa, Homo Sapiens
YSVEHNQL

SEQ ID NO: 71989 - protein, 9 aa, Homo Sapiens
AAKNLANTI

SEQ ID NO: 71990 - protein, 9 aa, Homo Sapiens
AAPAYSRAL

SEQ ID NO: 71991 - protein, 9 aa, Homo Sapiens
ADRERKVAL

SEQ ID NO: 71992 - protein, 9 aa, Homo Sapiens
ADYKRSSSL

SEQ ID NO: 71993 - protein, 9 aa, Homo Sapiens
AELERNVAL

SEQ ID NO: 71994 - protein, 9 aa, Homo Sapiens
AIPMIHAVL

SEQ ID NO: 71995 - protein, 9 aa, Homo Sapiens
AIQVVRSAL

SEQ ID NO: 71996 - protein, 9 aa, Homo Sapiens
APFLRNVEL

SEQ ID NO: 71997 - protein, 9 aa, Homo Sapiens
APLQRSQSL

SEQ ID NO: 71998 - protein, 9 aa, Homo Sapiens
ARFSARSSL

SEQ ID NO: 71999 - protein, 9 aa, Homo Sapiens
ARFSGNLLV

SEQ ID NO: 72000 - protein, 9 aa, Homo Sapiens
ARISRSISL

SEQ ID NO: 72001 - protein, 9 aa, Homo Sapiens
ARLDHKFDL

SEQ ID NO: 72002 - protein, 9 aa, Homo Sapiens
ARLEGRSSL

SEQ ID NO: 72003 - protein, 9 aa, Homo Sapiens
ARLQTALLV

SEQ ID NO: 72004 - protein, 9 aa, Homo Sapiens
ARLSRSSAL

SEQ ID NO: 72005 - protein, 9 aa, Homo Sapiens
ARVGSRAAL

SEQ ID NO: 72006 - protein, 9 aa, Homo Sapiens
ARYAVRRSL

SEQ ID NO: 72007 - protein, 9 aa, Homo Sapiens
AVITRAPVL

SEQ ID NO: 72008 - protein, 9 aa, Homo Sapiens
CRFEGQFSI

SEQ ID NO: 72009 - protein, 9 aa, Homo Sapiens
CRLEIRSSL

SEQ ID NO: 72010 - protein, 9 aa, Homo Sapiens
CRLLRIDEL

SEQ ID NO: 72011 - protein, 9 aa, Homo Sapiens
CRVAVRRAL

SEQ ID NO: 72012 - protein, 9 aa, Homo Sapiens
CRYNLPIIL

SEQ ID NO: 72013 - protein, 9 aa, Homo Sapiens
CRYQGPVLL

SEQ ID NO: 72014 - protein, 9 aa, Homo Sapiens
CRYSKGLVL

SEQ ID NO: 72015 - protein, 9 aa, Homo Sapiens
DAAIRVWSL

SEQ ID NO: 72016 - protein, 9 aa, Homo Sapiens
DAFAKSLAL

SEQ ID NO: 72017 - protein, 9 aa, Homo Sapiens
DAFERIDSF

SEQ ID NO: 72018 - protein, 9 aa, Homo Sapiens
DAFVRLIAL

SEQ ID NO: 72019 - protein, 9 aa, Homo Sapiens
DAHLRPTSL

SEQ ID NO: 72020 - protein, 9 aa, Homo Sapiens
DALCRITAL

SEQ ID NO: 72021 - protein, 9 aa, Homo Sapiens
DALQRSVQL

SEQ ID NO: 72022 - protein, 9 aa, Homo Sapiens
DANLRKNEL

SEQ ID NO: 72023 - protein, 9 aa, Homo Sapiens
DAQSRPTSL

SEQ ID NO: 72024 - protein, 9 aa, Homo Sapiens
DAVIRNNTL

SEQ ID NO: 72025 - protein, 9 aa, Homo Sapiens
DAVKREAAL

SEQ ID NO: 72026 - protein, 9 aa, Homo Sapiens
DAYALNHTL

SEQ ID NO: 72027 - protein, 9 aa, Homo Sapiens
DAYELKHAL

SEQ ID NO: 72028 - protein, 9 aa, Homo Sapiens
DAYVRRMAA

SEQ ID NO: 72029 - protein, 9 aa, Homo Sapiens
DCYTRIWSL

SEQ ID NO: 72030 - protein, 9 aa, Homo Sapiens
DDARRLTVM

SEQ ID NO: 72031 - protein, 9 aa, Homo Sapiens
DDFERISEL

SEQ ID NO: 72032 - protein, 9 aa, Homo Sapiens
DDFRRADCL

SEQ ID NO: 72033 - protein, 9 aa, Homo Sapiens
DDLKRATEL

SEQ ID NO: 72034 - protein, 9 aa, Homo Sapiens
DEALRRSDL

SEQ ID NO: 72035 - protein, 9 aa, Homo Sapiens
DEATRLMAL

SEQ ID NO: 72036 - protein, 9 aa, Homo Sapiens
DEFCRKFRL

SEQ ID NO: 72037 - protein, 9 aa, Homo Sapiens
DEFLRISTA

SEQ ID NO: 72038 - protein, 9 aa, Homo Sapiens
DEFQRGDQL

SEQ ID NO: 72039 - protein, 9 aa, Homo Sapiens
DEHAREMCL

SEQ ID NO: 72040 - protein, 9 aa, Homo Sapiens
DEKLRLQQL

SEQ ID NO: 72041 - protein, 9 aa, Homo Sapiens
DELERITKL

SEQ ID NO: 72042 - protein, 9 aa, Homo Sapiens
DELIRSIEL

SEQ ID NO: 72043 - protein, 9 aa, Homo Sapiens
DELKRSVAL

SEQ ID NO: 72044 - protein, 9 aa, Homo Sapiens
DELLRIVSI

SEQ ID NO: 72045 - protein, 9 aa, Homo Sapiens
DELLRVTDL

SEQ ID NO: 72046 - protein, 9 aa, Homo Sapiens
DELRRAGSL

SEQ ID NO: 72047 - protein, 9 aa, Homo Sapiens
DELRRHLEL

SEQ ID NO: 72048 - protein, 9 aa, Homo Sapiens
DEQERCITI

SEQ ID NO: 72049 - protein, 9 aa, Homo Sapiens
DEQVRLYKL

SEQ ID NO: 72050 - protein, 9 aa, Homo Sapiens
DERLRIFAL

SEQ ID NO: 72051 - protein, 9 aa, Homo Sapiens
DERLRINSL

SEQ ID NO: 72052 - protein, 9 aa, Homo Sapiens
DEVERTQTL

SEQ ID NO: 72053 - protein, 9 aa, Homo Sapiens
DEVERVITI

SEQ ID NO: 72054 - protein, 9 aa, Homo Sapiens
DEVLRRVTL

SEQ ID NO: 72055 - protein, 9 aa, Homo Sapiens
DEVQRRLQL

SEQ ID NO: 72056 - protein, 9 aa, Homo Sapiens
DEVTRNLSL

SEQ ID NO: 72057 - protein, 9 aa, Homo Sapiens
DEYEKLQVL

SEQ ID NO: 72058 - protein, 9 aa, Homo Sapiens
DGFLRCLSL

SEQ ID NO: 72059 - protein, 9 aa, Homo Sapiens
DGMERPSSL

SEQ ID NO: 72060 - protein, 9 aa, Homo Sapiens
DGSLRVTAL

SEQ ID NO: 72061 - protein, 9 aa, Homo Sapiens
DGVKRTTPL

SEQ ID NO: 72062 - protein, 9 aa, Homo Sapiens
DGYLKTSAL

SEQ ID NO: 72063 - protein, 9 aa, Homo Sapiens
DGYRRILNL

SEQ ID NO: 72064 - protein, 9 aa, Homo Sapiens
DGYVRIHYF

SEQ ID NO: 72065 - protein, 9 aa, Homo Sapiens
DHFASVHSV

SEQ ID NO: 72066 - protein, 9 aa, Homo Sapiens
DHFIRTLSL

SEQ ID NO: 72067 - protein, 9 aa, Homo Sapiens
DHFSRPVGL

SEQ ID NO: 72068 - protein, 9 aa, Homo Sapiens
DHIQRIMTL

SEQ ID NO: 72069 - protein, 9 aa, Homo Sapiens
DHIRRQTSL

SEQ ID NO: 72070 - protein, 9 aa, Homo Sapiens
DHLKRVKDL

SEQ ID NO: 72071 - protein, 9 aa, Homo Sapiens
DHYQRILQL

SEQ ID NO: 72072 - protein, 9 aa, Homo Sapiens
DHYQRQRVL

SEQ ID NO: 72073 - protein, 9 aa, Homo Sapiens
DKLIRISAL

SEQ ID NO: 72074 - protein, 9 aa, Homo Sapiens
DKLKREIEL

SEQ ID NO: 72075 - protein, 9 aa, Homo Sapiens
DKYERLVKL

SEQ ID NO: 72076 - protein, 9 aa, Homo Sapiens
DKYLHTNCL

SEQ ID NO: 72077 - protein, 9 aa, Homo Sapiens
DLEERKNSL

SEQ ID NO: 72078 - protein, 9 aa, Homo Sapiens
DLYERQVCL

SEQ ID NO: 72079 - protein, 9 aa, Homo Sapiens
DLYTRFDTL

SEQ ID NO: 72080 - protein, 9 aa, Homo Sapiens
DLYTRTTNL

SEQ ID NO: 72081 - protein, 9 aa, Homo Sapiens
DMFYRNWAL

SEQ ID NO: 72082 - protein, 9 aa, Homo Sapiens
DMLERAVSV

SEQ ID NO: 72083 - protein, 9 aa, Homo Sapiens
DMLERECTL

SEQ ID NO: 72084 - protein, 9 aa, Homo Sapiens
DMLVKVNAL

SEQ ID NO: 72085 - protein, 9 aa, Homo Sapiens
DMYLKLVQL

SEQ ID NO: 72086 - protein, 9 aa, Homo Sapiens
DMYNRMTSA

SEQ ID NO: 72087 - protein, 9 aa, Homo Sapiens
DNARRLTGF

SEQ ID NO: 72088 - protein, 9 aa, Homo Sapiens
DNAVRNAAL

SEQ ID NO: 72089 - protein, 9 aa, Homo Sapiens
DNLLRLKEL

SEQ ID NO: 72090 - protein, 9 aa, Homo Sapiens
DNMPRILSL

SEQ ID NO: 72091 - protein, 9 aa, Homo Sapiens
DNQERFNSL

SEQ ID NO: 72092 - protein, 9 aa, Homo Sapiens
DNTVRIISL

SEQ ID NO: 72093 - protein, 9 aa, Homo Sapiens
DNVERADAL

SEQ ID NO: 72094 - protein, 9 aa, Homo Sapiens
DNVIRIYSL

SEQ ID NO: 72095 - protein, 9 aa, Homo Sapiens
DNYVRETKL

SEQ ID NO: 72096 - protein, 9 aa, Homo Sapiens
DNYVRTSEI

SEQ ID NO: 72097 - protein, 9 aa, Homo Sapiens
DPYLRSLEL

SEQ ID NO: 72098 - protein, 9 aa, Homo Sapiens
DQASRLQSL

SEQ ID NO: 72099 - protein, 9 aa, Homo Sapiens
DQAVRTMEI

SEQ ID NO: 72100 - protein, 9 aa, Homo Sapiens
DQDVRHLAL

SEQ ID NO: 72101 - protein, 9 aa, Homo Sapiens
DQFERIKTL

SEQ ID NO: 72102 - protein, 9 aa, Homo Sapiens
DQFQKVLSL

SEQ ID NO: 72103 - protein, 9 aa, Homo Sapiens
DQFVRGEVL

SEQ ID NO: 72104 - protein, 9 aa, Homo Sapiens
DQIIRLEKL

SEQ ID NO: 72105 - protein, 9 aa, Homo Sapiens
DQISHRASL

SEQ ID NO: 72106 - protein, 9 aa, Homo Sapiens
DQKERDVIM

SEQ ID NO: 72107 - protein, 9 aa, Homo Sapiens
DQLLRNNDL

SEQ ID NO: 72108 - protein, 9 aa, Homo Sapiens
DQLMRQLDL

SEQ ID NO: 72109 - protein, 9 aa, Homo Sapiens
DQLVRIAKV

SEQ ID NO: 72110 - protein, 9 aa, Homo Sapiens
DQMMRAIAM

SEQ ID NO: 72111 - protein, 9 aa, Homo Sapiens
DQMQRKLTL

SEQ ID NO: 72112 - protein, 9 aa, Homo Sapiens
DQMSRLAKL

SEQ ID NO: 72113 - protein, 9 aa, Homo Sapiens
DQQVRYNAL

SEQ ID NO: 72114 - protein, 9 aa, Homo Sapiens
DQRERLAPF

SEQ ID NO: 72115 - protein, 9 aa, Homo Sapiens
DQTIRIHGL

SEQ ID NO: 72116 - protein, 9 aa, Homo Sapiens
DQVIHSNPA

SEQ ID NO: 72117 - protein, 9 aa, Homo Sapiens
DQVKRYYSV

SEQ ID NO: 72118 - protein, 9 aa, Homo Sapiens
DQVLRCSKI

SEQ ID NO: 72119 - protein, 9 aa, Homo Sapiens
DQVSRLVTI

SEQ ID NO: 72120 - protein, 9 aa, Homo Sapiens
DQVVKTIGL

SEQ ID NO: 72121 - protein, 9 aa, Homo Sapiens
DQYKRETIL

SEQ ID NO: 72122 - protein, 9 aa, Homo Sapiens
DRAFHFTAM

SEQ ID NO: 72123 - protein, 9 aa, Homo Sapiens
DRAKVILKP

SEQ ID NO: 72124 - protein, 9 aa, Homo Sapiens
DRALRSFKL

SEQ ID NO: 72125 - protein, 9 aa, Homo Sapiens
DRANRFEYL

SEQ ID NO: 72126 - protein, 9 aa, Homo Sapiens
DRAPAQPAM

SEQ ID NO: 72127 - protein, 9 aa, Homo Sapiens
DRCDQPLTL

SEQ ID NO: 72128 - protein, 9 aa, Homo Sapiens
DRCSIHLQL

SEQ ID NO: 72129 - protein, 9 aa, Homo Sapiens
DRDRRGPPL

SEQ ID NO: 72130 - protein, 9 aa, Homo Sapiens
DRDYRREVM

SEQ ID NO: 72131 - protein, 9 aa, Homo Sapiens
DRENRRISI

SEQ ID NO: 72132 - protein, 9 aa, Homo Sapiens
DRFARVLKI

SEQ ID NO: 72133 - protein, 9 aa, Homo Sapiens
DRFDFVHDL

SEQ ID NO: 72134 - protein, 9 aa, Homo Sapiens
DRFDGYIFL

SEQ ID NO: 72135 - protein, 9 aa, Homo Sapiens
DRFDGYVFL

SEQ ID NO: 72136 - protein, 9 aa, Homo Sapiens
DRFDRDRPL

SEQ ID NO: 72137 - protein, 9 aa, Homo Sapiens
DRFEFPEQL

SEQ ID NO: 72138 - protein, 9 aa, Homo Sapiens
DRFEKTNEM

SEQ ID NO: 72139 - protein, 9 aa, Homo Sapiens
DRFENQVDM

SEQ ID NO: 72140 - protein, 9 aa, Homo Sapiens
DRFERDTRV

SEQ ID NO: 72141 - protein, 9 aa, Homo Sapiens
DRFERLVEL

SEQ ID NO: 72142 - protein, 9 aa, Homo Sapiens
DRFGGALDA

SEQ ID NO: 72143 - protein, 9 aa, Homo Sapiens
DRFHKQEEL

SEQ ID NO: 72144 - protein, 9 aa, Homo Sapiens
DRFINGSAL

SEQ ID NO: 72145 - protein, 9 aa, Homo Sapiens
DRFKESLTL

SEQ ID NO: 72146 - protein, 9 aa, Homo Sapiens
DRFKSHPSL

SEQ ID NO: 72147 - protein, 9 aa, Homo Sapiens
DRFLKVYDL

SEQ ID NO: 72148 - protein, 9 aa, Homo Sapiens
DRFLRKITI

SEQ ID NO: 72149 - protein, 9 aa, Homo Sapiens
DRFLRQLDF

SEQ ID NO: 72150 - protein, 9 aa, Homo Sapiens
DRFLSKMKV

SEQ ID NO: 72151 - protein, 9 aa, Homo Sapiens
DRFLSRTFL

SEQ ID NO: 72152 - protein, 9 aa, Homo Sapiens
DRFLSSMSV

SEQ ID NO: 72153 - protein, 9 aa, Homo Sapiens
DRFLWSQQA

SEQ ID NO: 72154 - protein, 9 aa, Homo Sapiens
DRFNGVSEA

SEQ ID NO: 72155 - protein, 9 aa, Homo Sapiens
DRFQAEGSL

SEQ ID NO: 72156 - protein, 9 aa, Homo Sapiens
DRFQAHSKL

SEQ ID NO: 72157 - protein, 9 aa, Homo Sapiens
DRFQPNMTL

SEQ ID NO: 72158 - protein, 9 aa, Homo Sapiens
DRFTKSISI

SEQ ID NO: 72159 - protein, 9 aa, Homo Sapiens
DRHERITKL

SEQ ID NO: 72160 - protein, 9 aa, Homo Sapiens
DRHIWITAA

SEQ ID NO: 72161 - protein, 9 aa, Homo Sapiens
DRHLRTLQI

SEQ ID NO: 72162 - protein, 9 aa, Homo Sapiens
DRIERMLRL

SEQ ID NO: 72163 - protein, 9 aa, Homo Sapiens
DRIIRGNQL

SEQ ID NO: 72164 - protein, 9 aa, Homo Sapiens
DRIISVNSV

SEQ ID NO: 72165 - protein, 9 aa, Homo Sapiens
DRIKARMSL

SEQ ID NO: 72166 - protein, 9 aa, Homo Sapiens
DRIPERDKL

SEQ ID NO: 72167 - protein, 9 aa, Homo Sapiens
DRIRYVQSL

SEQ ID NO: 72168 - protein, 9 aa, Homo Sapiens
DRITGRAGL

SEQ ID NO: 72169 - protein, 9 aa, Homo Sapiens
DRITRYQGV

SEQ ID NO: 72170 - protein, 9 aa, Homo Sapiens
DRIVERCDL

SEQ ID NO: 72171 - protein, 9 aa, Homo Sapiens
DRLARDYAA

SEQ ID NO: 72172 - protein, 9 aa, Homo Sapiens
DRLDREEAF

SEQ ID NO: 72173 - protein, 9 aa, Homo Sapiens
DRLGKKVRV

SEQ ID NO: 72174 - protein, 9 aa, Homo Sapiens
DRLHKVKTV

SEQ ID NO: 72175 - protein, 9 aa, Homo Sapiens
DRLKDGLCL

SEQ ID NO: 72176 - protein, 9 aa, Homo Sapiens
DRLKFFETL

SEQ ID NO: 72177 - protein, 9 aa, Homo Sapiens
DRLKVFKEV

SEQ ID NO: 72178 - protein, 9 aa, Homo Sapiens
DRLKVIPKL

SEQ ID NO: 72179 - protein, 9 aa, Homo Sapiens
DRLLALNSL

SEQ ID NO: 72180 - protein, 9 aa, Homo Sapiens
DRLLRIRAL

SEQ ID NO: 72181 - protein, 9 aa, Homo Sapiens
DRLLRISQL

SEQ ID NO: 72182 - protein, 9 aa, Homo Sapiens
DRLLRTMAF

SEQ ID NO: 72183 - protein, 9 aa, Homo Sapiens
DRLLWARSV

SEQ ID NO: 72184 - protein, 9 aa, Homo Sapiens
DRLNHLLSV

SEQ ID NO: 72185 - protein, 9 aa, Homo Sapiens
DRLNKKVVL

SEQ ID NO: 72186 - protein, 9 aa, Homo Sapiens
DRLNVTEEL

SEQ ID NO: 72187 - protein, 9 aa, Homo Sapiens
DRLPGPRAV

SEQ ID NO: 72188 - protein, 9 aa, Homo Sapiens
DRLPKFLIV

SEQ ID NO: 72189 - protein, 9 aa, Homo Sapiens
DRLQGLSSL

SEQ ID NO: 72190 - protein, 9 aa, Homo Sapiens
DRLRTLLQL

SEQ ID NO: 72191 - protein, 9 aa, Homo Sapiens
DRLRYRNVI

SEQ ID NO: 72192 - protein, 9 aa, Homo Sapiens
DRLTNGNSL

SEQ ID NO: 72193 - protein, 9 aa, Homo Sapiens
DRLTVRCGL

SEQ ID NO: 72194 - protein, 9 aa, Homo Sapiens
DRMFHIRAV

SEQ ID NO: 72195 - protein, 9 aa, Homo Sapiens
DRMKIGASL

SEQ ID NO: 72196 - protein, 9 aa, Homo Sapiens
DRMLRSALL

SEQ ID NO: 72197 - protein, 9 aa, Homo Sapiens
DRMRLSTAL

SEQ ID NO: 72198 - protein, 9 aa, Homo Sapiens
DRMTLLLRL

SEQ ID NO: 72199 - protein, 9 aa, Homo Sapiens
DRNAHLNAL

SEQ ID NO: 72200 - protein, 9 aa, Homo Sapiens
DRNDRAIRV

SEQ ID NO: 72201 - protein, 9 aa, Homo Sapiens
DRNIKKITL

SEQ ID NO: 72202 - protein, 9 aa, Homo Sapiens
DRNIRYVAL

SEQ ID NO: 72203 - protein, 9 aa, Homo Sapiens
DRQIRLWGL

SEQ ID NO: 72204 - protein, 9 aa, Homo Sapiens
DRQWKKISA

SEQ ID NO: 72205 - protein, 9 aa, Homo Sapiens
DRQYKDYKI

SEQ ID NO: 72206 - protein, 9 aa, Homo Sapiens
DRRAFIITI

SEQ ID NO: 72207 - protein, 9 aa, Homo Sapiens
DRRERLRQL

SEQ ID NO: 72208 - protein, 9 aa, Homo Sapiens
DRRERVLKL

SEQ ID NO: 72209 - protein, 9 aa, Homo Sapiens
DRRGRPVGF

SEQ ID NO: 72210 - protein, 9 aa, Homo Sapiens
DRRLRIPEL

SEQ ID NO: 72211 - protein, 9 aa, Homo Sapiens
DRRSRIEAL

SEQ ID NO: 72212 - protein, 9 aa, Homo Sapiens
DRSAHFSTL

SEQ ID NO: 72213 - protein, 9 aa, Homo Sapiens
DRSLRVWSM

SEQ ID NO: 72214 - protein, 9 aa, Homo Sapiens
DRSTREVEL

SEQ ID NO: 72215 - protein, 9 aa, Homo Sapiens
DRTAIHEVM

SEQ ID NO: 72216 - protein, 9 aa, Homo Sapiens
DRTAQLTSL

SEQ ID NO: 72217 - protein, 9 aa, Homo Sapiens
DRTMRQRAL

SEQ ID NO: 72218 - protein, 9 aa, Homo Sapiens
DRTSIHEAM

SEQ ID NO: 72219 - protein, 9 aa, Homo Sapiens
DRTTISRAL

SEQ ID NO: 72220 - protein, 9 aa, Homo Sapiens
DRVAIHEAM

SEQ ID NO: 72221 - protein, 9 aa, Homo Sapiens
DRVALRNLL

SEQ ID NO: 72222 - protein, 9 aa, Homo Sapiens
DRVATQLVV

SEQ ID NO: 72223 - protein, 9 aa, Homo Sapiens
DRVDREITM

SEQ ID NO: 72224 - protein, 9 aa, Homo Sapiens
DRVFRNETL

SEQ ID NO: 72225 - protein, 9 aa, Homo Sapiens
DRVKMGFVM

SEQ ID NO: 72226 - protein, 9 aa, Homo Sapiens
DRVLREERA

SEQ ID NO: 72227 - protein, 9 aa, Homo Sapiens
DRVLRIHRI

SEQ ID NO: 72228 - protein, 9 aa, Homo Sapiens
DRVLRVYSI

SEQ ID NO: 72229 - protein, 9 aa, Homo Sapiens
DRVQRMLEV

SEQ ID NO: 72230 - protein, 9 aa, Homo Sapiens
DRVTITNCL

SEQ ID NO: 72231 - protein, 9 aa, Homo Sapiens
DRVTRLEFL

SEQ ID NO: 72232 - protein, 9 aa, Homo Sapiens
DRYDGLRRL

SEQ ID NO: 72233 - protein, 9 aa, Homo Sapiens
DRYDGMVGF

SEQ ID NO: 72234 - protein, 9 aa, Homo Sapiens
DRYDSFIEL

SEQ ID NO: 72235 - protein, 9 aa, Homo Sapiens
DRYEFSSHI

SEQ ID NO: 72236 - protein, 9 aa, Homo Sapiens
DRYERLTSV

SEQ ID NO: 72237 - protein, 9 aa, Homo Sapiens
DRYFRIQEV

SEQ ID NO: 72238 - protein, 9 aa, Homo Sapiens
DRYGGQPLF

SEQ ID NO: 72239 - protein, 9 aa, Homo Sapiens
DRYHEKLAV

SEQ ID NO: 72240 - protein, 9 aa, Homo Sapiens
DRYHRFKEL

SEQ ID NO: 72241 - protein, 9 aa, Homo Sapiens
DRYIFASNL

SEQ ID NO: 72242 - protein, 9 aa, Homo Sapiens
DRYIFVSLL

SEQ ID NO: 72243 - protein, 9 aa, Homo Sapiens
DRYIQQKRL

SEQ ID NO: 72244 - protein, 9 aa, Homo Sapiens
DRYISKMFL

SEQ ID NO: 72245 - protein, 9 aa, Homo Sapiens
DRYKNLPTA

SEQ ID NO: 72246 - protein, 9 aa, Homo Sapiens
DRYLAIVHA

SEQ ID NO: 72247 - protein, 9 aa, Homo Sapiens
DRYLAVVHA

SEQ ID NO: 72248 - protein, 9 aa, Homo Sapiens
DRYLKSESL

SEQ ID NO: 72249 - protein, 9 aa, Homo Sapiens
DRYLNIVHA

SEQ ID NO: 72250 - protein, 9 aa, Homo Sapiens
DRYLQDNPA

SEQ ID NO: 72251 - protein, 9 aa, Homo Sapiens
DRYLRPHAF

SEQ ID NO: 72252 - protein, 9 aa, Homo Sapiens
DRYLTEQCL

SEQ ID NO: 72253 - protein, 9 aa, Homo Sapiens
DRYNRKYLM

SEQ ID NO: 72254 - protein, 9 aa, Homo Sapiens
DRYPGSTFM

SEQ ID NO: 72255 - protein, 9 aa, Homo Sapiens
DRYPKKLVQ

SEQ ID NO: 72256 - protein, 9 aa, Homo Sapiens
DRYPRKVTA

SEQ ID NO: 72257 - protein, 9 aa, Homo Sapiens
DRYQYPFVL

SEQ ID NO: 72258 - protein, 9 aa, Homo Sapiens
DRYRQDPQL

SEQ ID NO: 72259 - protein, 9 aa, Homo Sapiens
DRYSGNVTI

SEQ ID NO: 72260 - protein, 9 aa, Homo Sapiens
DRYTIHSQL

SEQ ID NO: 72261 - protein, 9 aa, Homo Sapiens
DRYWCPPLL

SEQ ID NO: 72262 - protein, 9 aa, Homo Sapiens
DRYYERNEL

SEQ ID NO: 72263 - protein, 9 aa, Homo Sapiens
DSFARLDAL

SEQ ID NO: 72264 - protein, 9 aa, Homo Sapiens
DSFARLVEL

SEQ ID NO: 72265 - protein, 9 aa, Homo Sapiens
DSFERSNSL

SEQ ID NO: 72266 - protein, 9 aa, Homo Sapiens
DSYRKKVVL

SEQ ID NO: 72267 - protein, 9 aa, Homo Sapiens
DSYSHIMAL

SEQ ID NO: 72268 - protein, 9 aa, Homo Sapiens
DSYVRPCTL

SEQ ID NO: 72269 - protein, 9 aa, Homo Sapiens
DTFIRHIAL

SEQ ID NO: 72270 - protein, 9 aa, Homo Sapiens
DTLQRVNQL

SEQ ID NO: 72271 - protein, 9 aa, Homo Sapiens
DTYPRKWGL

SEQ ID NO: 72272 - protein, 9 aa, Homo Sapiens
DVAPKRQAL

SEQ ID NO: 72273 - protein, 9 aa, Homo Sapiens
DVAQRCKEL

SEQ ID NO: 72274 - protein, 9 aa, Homo Sapiens
DVMIRKEEL

SEQ ID NO: 72275 - protein, 9 aa, Homo Sapiens
DVQLRLNSI

SEQ ID NO: 72276 - protein, 9 aa, Homo Sapiens
DVVKRLLSL

SEQ ID NO: 72277 - protein, 9 aa, Homo Sapiens
DVYERLTNL

SEQ ID NO: 72278 - protein, 9 aa, Homo Sapiens
DVYQRIVWL

SEQ ID NO: 72279 - protein, 9 aa, Homo Sapiens
DVYRKLIEL

SEQ ID NO: 72280 - protein, 9 aa, Homo Sapiens
EALVRTVAL

SEQ ID NO: 72281 - protein, 9 aa, Homo Sapiens
EAVARGCAL

SEQ ID NO: 72282 - protein, 9 aa, Homo Sapiens
EAYEREVSL

SEQ ID NO: 72283 - protein, 9 aa, Homo Sapiens
EDYTRYNQL

SEQ ID NO: 72284 - protein, 9 aa, Homo Sapiens
EEFRRLAAL

SEQ ID NO: 72285 - protein, 9 aa, Homo Sapiens
EELERTAEL

SEQ ID NO: 72286 - protein, 9 aa, Homo Sapiens
EELERVSAL

SEQ ID NO: 72287 - protein, 9 aa, Homo Sapiens
EEWERHEAL

SEQ ID NO: 72288 - protein, 9 aa, Homo Sapiens
EGFDRSTSL

SEQ ID NO: 72289 - protein, 9 aa, Homo Sapiens
ELFLRRISL

SEQ ID NO: 72290 - protein, 9 aa, Homo Sapiens
ENIMRLSSL

SEQ ID NO: 72291 - protein, 9 aa, Homo Sapiens
ENRVLHQEL

SEQ ID NO: 72292 - protein, 9 aa, Homo Sapiens
EQMERLEAL

SEQ ID NO: 72293 - protein, 9 aa, Homo Sapiens
EQVLRWSSL

SEQ ID NO: 72294 - protein, 9 aa, Homo Sapiens
EQYIRRLAA

SEQ ID NO: 72295 - protein, 9 aa, Homo Sapiens
EQYLRIISH

SEQ ID NO: 72296 - protein, 9 aa, Homo Sapiens
ERALRELAL

SEQ ID NO: 72297 - protein, 9 aa, Homo Sapiens
ERCLHGLSL

SEQ ID NO: 72298 - protein, 9 aa, Homo Sapiens
ERFADRSLL

SEQ ID NO: 72299 - protein, 9 aa, Homo Sapiens
ERFARNSTL

SEQ ID NO: 72300 - protein, 9 aa, Homo Sapiens
ERFDGMLLA

SEQ ID NO: 72301 - protein, 9 aa, Homo Sapiens
ERFDSRSNL

SEQ ID NO: 72302 - protein, 9 aa, Homo Sapiens
ERFEKTFQL

SEQ ID NO: 72303 - protein, 9 aa, Homo Sapiens
ERFHHVTVL

SEQ ID NO: 72304 - protein, 9 aa, Homo Sapiens
ERFKNKITV

SEQ ID NO: 72305 - protein, 9 aa, Homo Sapiens
ERFLKGEGL

SEQ ID NO: 72306 - protein, 9 aa, Homo Sapiens
ERFNVPVSL

SEQ ID NO: 72307 - protein, 9 aa, Homo Sapiens
ERFPTHAKL

SEQ ID NO: 72308 - protein, 9 aa, Homo Sapiens
ERFQTTTTL

SEQ ID NO: 72309 - protein, 9 aa, Homo Sapiens
ERFRCPEAI

SEQ ID NO: 72310 - protein, 9 aa, Homo Sapiens
ERHWRIFSL

SEQ ID NO: 72311 - protein, 9 aa, Homo Sapiens
ERIDTRNEL

SEQ ID NO: 72312 - protein, 9 aa, Homo Sapiens
ERIKRLEEL

SEQ ID NO: 72313 - protein, 9 aa, Homo Sapiens
ERIMKAQAL

SEQ ID NO: 72314 - protein, 9 aa, Homo Sapiens
ERIPKALEV

SEQ ID NO: 72315 - protein, 9 aa, Homo Sapiens
ERISRGGSL

SEQ ID NO: 72316 - protein, 9 aa, Homo Sapiens
ERKERLESL

SEQ ID NO: 72317 - protein, 9 aa, Homo Sapiens
ERLAIRAQL

SEQ ID NO: 72318 - protein, 9 aa, Homo Sapiens
ERLERIFQL

SEQ ID NO: 72319 - protein, 9 aa, Homo Sapiens
ERLERQERL

SEQ ID NO: 72320 - protein, 9 aa, Homo Sapiens
ERLGQALEL

SEQ ID NO: 72321 - protein, 9 aa, Homo Sapiens
ERLGQFMTL

SEQ ID NO: 72322 - protein, 9 aa, Homo Sapiens
ERLIRTIAA

SEQ ID NO: 72323 - protein, 9 aa, Homo Sapiens
ERLKIRGSL

SEQ ID NO: 72324 - protein, 9 aa, Homo Sapiens
ERLKREAQL

SEQ ID NO: 72325 - protein, 9 aa, Homo Sapiens
ERLLTYNSL

SEQ ID NO: 72326 - protein, 9 aa, Homo Sapiens
ERLNRLETL

SEQ ID NO: 72327 - protein, 9 aa, Homo Sapiens
ERLPEHCKL

SEQ ID NO: 72328 - protein, 9 aa, Homo Sapiens
ERLQRFQNL

SEQ ID NO: 72329 - protein, 9 aa, Homo Sapiens
ERLSRETAL

SEQ ID NO: 72330 - protein, 9 aa, Homo Sapiens
ERLVRAYEL

SEQ ID NO: 72331 - protein, 9 aa, Homo Sapiens
ERQDRISRL

SEQ ID NO: 72332 - protein, 9 aa, Homo Sapiens
ERWARPPAV

SEQ ID NO: 72333 - protein, 9 aa, Homo Sapiens
ERWSKHRVV

SEQ ID NO: 72334 - protein, 9 aa, Homo Sapiens
ERYAKIVEI

SEQ ID NO: 72335 - protein, 9 aa, Homo Sapiens
ERYELLNVL

SEQ ID NO: 72336 - protein, 9 aa, Homo Sapiens
ERYFISHVL

SEQ ID NO: 72337 - protein, 9 aa, Homo Sapiens
ERYHAGKCL

SEQ ID NO: 72338 - protein, 9 aa, Homo Sapiens
ERYLLTQEL

SEQ ID NO: 72339 - protein, 9 aa, Homo Sapiens
ERYRAITSA

SEQ ID NO: 72340 - protein, 9 aa, Homo Sapiens
ERYSASKPL

SEQ ID NO: 72341 - protein, 9 aa, Homo Sapiens
ESALRKQSL

SEQ ID NO: 72342 - protein, 9 aa, Homo Sapiens
EVLQRGEAL

SEQ ID NO: 72343 - protein, 9 aa, Homo Sapiens
FEMATRAAL

SEQ ID NO: 72344 - protein, 9 aa, Homo Sapiens
FNFLRNVSL

SEQ ID NO: 72345 - protein, 9 aa, Homo Sapiens
FQRQRVDAL

SEQ ID NO: 72346 - protein, 9 aa, Homo Sapiens
FRHDRSLEL

SEQ ID NO: 72347 - protein, 9 aa, Homo Sapiens
FRLPRKEKL

SEQ ID NO: 72348 - protein, 9 aa, Homo Sapiens
FRSGSSRVL

SEQ ID NO: 72349 - protein, 9 aa, Homo Sapiens
FRVPTANVS

SEQ ID NO: 72350 - protein, 9 aa, Homo Sapiens
FRYFRMPEL

SEQ ID NO: 72351 - protein, 9 aa, Homo Sapiens
FRYHGLSSL

SEQ ID NO: 72352 - protein, 9 aa, Homo Sapiens
FRYLMGERL

SEQ ID NO: 72353 - protein, 9 aa, Homo Sapiens
FRYQGHVGA

SEQ ID NO: 72354 - protein, 9 aa, Homo Sapiens
FRYQGYIGA

SEQ ID NO: 72355 - protein, 9 aa, Homo Sapiens
GEELLHSVL

SEQ ID NO: 72356 - protein, 9 aa, Homo Sapiens
GEGLKRSAL

SEQ ID NO: 72357 - protein, 9 aa, Homo Sapiens
GLEFAHMAL

SEQ ID NO: 72358 - protein, 9 aa, Homo Sapiens
GQPMVHGAL

SEQ ID NO: 72359 - protein, 9 aa, Homo Sapiens
GQWKKGFVL

SEQ ID NO: 72360 - protein, 9 aa, Homo Sapiens
GRAFRTVTL

SEQ ID NO: 72361 - protein, 9 aa, Homo Sapiens
GRAGRSVSL

SEQ ID NO: 72362 - protein, 9 aa, Homo Sapiens
GRFDREICL

SEQ ID NO: 72363 - protein, 9 aa, Homo Sapiens
GRFGSRDAL

SEQ ID NO: 72364 - protein, 9 aa, Homo Sapiens
GRLGRSESL

SEQ ID NO: 72365 - protein, 9 aa, Homo Sapiens
GRLVRAQAL

SEQ ID NO: 72366 - protein, 9 aa, Homo Sapiens
GRVAERSQL

SEQ ID NO: 72367 - protein, 9 aa, Homo Sapiens
GRVAPRSGL

SEQ ID NO: 72368 - protein, 9 aa, Homo Sapiens
GRWDRVCSL

SEQ ID NO: 72369 - protein, 9 aa, Homo Sapiens
GRYLRRELL

SEQ ID NO: 72370 - protein, 9 aa, Homo Sapiens
GRYNPRRSL

SEQ ID NO: 72371 - protein, 9 aa, Homo Sapiens
HAALRCESL

SEQ ID NO: 72372 - protein, 9 aa, Homo Sapiens
HCYSRLREL

SEQ ID NO: 72373 - protein, 9 aa, Homo Sapiens
HEAERNIAL

SEQ ID NO: 72374 - protein, 9 aa, Homo Sapiens
HELQRFYSL

SEQ ID NO: 72375 - protein, 9 aa, Homo Sapiens
HGYERYNAM

SEQ ID NO: 72376 - protein, 9 aa, Homo Sapiens
HPYQRIVTA

SEQ ID NO: 72377 - protein, 9 aa, Homo Sapiens
HQFSRDASV

SEQ ID NO: 72378 - protein, 9 aa, Homo Sapiens
HRAVGHFEL

SEQ ID NO: 72379 - protein, 9 aa, Homo Sapiens
HRCPFPHVV

SEQ ID NO: 72380 - protein, 9 aa, Homo Sapiens
HRDQRDVSL

SEQ ID NO: 72381 - protein, 9 aa, Homo Sapiens
HRFPFSSAL

SEQ ID NO: 72382 - protein, 9 aa, Homo Sapiens
HRFYFENAL

SEQ ID NO: 72383 - protein, 9 aa, Homo Sapiens
HRLHHVSSL

SEQ ID NO: 72384 - protein, 9 aa, Homo Sapiens
HRLPHVLLL

SEQ ID NO: 72385 - protein, 9 aa, Homo Sapiens
HRLTDRLQV

SEQ ID NO: 72386 - protein, 9 aa, Homo Sapiens
HRMNREEIL

SEQ ID NO: 72387 - protein, 9 aa, Homo Sapiens
HRQVRKYVM

SEQ ID NO: 72388 - protein, 9 aa, Homo Sapiens
HRWVNYESM

SEQ ID NO: 72389 - protein, 9 aa, Homo Sapiens
HRYEREEAF

SEQ ID NO: 72390 - protein, 9 aa, Homo Sapiens
HYDRSGRSL

SEQ ID NO: 72391 - protein, 9 aa, Homo Sapiens
IAYIRDLAL

SEQ ID NO: 72392 - protein, 9 aa, Homo Sapiens
IDYQRNVPA

SEQ ID NO: 72393 - protein, 9 aa, Homo Sapiens
IEFSRLTSL

SEQ ID NO: 72394 - protein, 9 aa, Homo Sapiens
IEISRNEAL

SEQ ID NO: 72395 - protein, 9 aa, Homo Sapiens
IEYARQLEM

SEQ ID NO: 72396 - protein, 9 aa, Homo Sapiens
IEYEKKQTL

SEQ ID NO: 72397 - protein, 9 aa, Homo Sapiens
IEYIRQGSL

SEQ ID NO: 72398 - protein, 9 aa, Homo Sapiens
IGYARNPSL

SEQ ID NO: 72399 - protein, 9 aa, Homo Sapiens
IHAKRVTIM

SEQ ID NO: 72400 - protein, 9 aa, Homo Sapiens
IKYNRKISA

SEQ ID NO: 72401 - protein, 9 aa, Homo Sapiens
IPLAKRVAL

SEQ ID NO: 72402 - protein, 9 aa, Homo Sapiens
IPYARDAVI

SEQ ID NO: 72403 - protein, 9 aa, Homo Sapiens
IPYKREESL

SEQ ID NO: 72404 - protein, 9 aa, Homo Sapiens
IQQKRTVAF

SEQ ID NO: 72405 - protein, 9 aa, Homo Sapiens
IRAAWTRAL

SEQ ID NO: 72406 - protein, 9 aa, Homo Sapiens
IRAFREEAI

SEQ ID NO: 72407 - protein, 9 aa, Homo Sapiens
IREPRTTAL

SEQ ID NO: 72408 - protein, 9 aa, Homo Sapiens
IRFGGRKEI

SEQ ID NO: 72409 - protein, 9 aa, Homo Sapiens
IRFGRKPSL

SEQ ID NO: 72410 - protein, 9 aa, Homo Sapiens
IRHERNVIL

SEQ ID NO: 72411 - protein, 9 aa, Homo Sapiens
IRKERPISL

SEQ ID NO: 72412 - protein, 9 aa, Homo Sapiens
IRLDKKLSV

SEQ ID NO: 72413 - protein, 9 aa, Homo Sapiens
IRMEHVKIV

SEQ ID NO: 72414 - protein, 9 aa, Homo Sapiens
IRMEREALL

SEQ ID NO: 72415 - protein, 9 aa, Homo Sapiens
IRNHHVASL

SEQ ID NO: 72416 - protein, 9 aa, Homo Sapiens
IRQERDQRL

SEQ ID NO: 72417 - protein, 9 aa, Homo Sapiens
IRQQRLISI

SEQ ID NO: 72418 - protein, 9 aa, Homo Sapiens
IRVIAHTQM

SEQ ID NO: 72419 - protein, 9 aa, Homo Sapiens
IRVLGRKEL

SEQ ID NO: 72420 - protein, 9 aa, Homo Sapiens
IRYDTVLAL

SEQ ID NO: 72421 - protein, 9 aa, Homo Sapiens
IRYFPTQAL

SEQ ID NO: 72422 - protein, 9 aa, Homo Sapiens
IRYIHRPCL

SEQ ID NO: 72423 - protein, 9 aa, Homo Sapiens
IRYPDSHQL

SEQ ID NO: 72424 - protein, 9 aa, Homo Sapiens
IRYVTPRAL

SEQ ID NO: 72425 - protein, 9 aa, Homo Sapiens
KAYERGISL

SEQ ID NO: 72426 - protein, 9 aa, Homo Sapiens
KDMERLTSL

SEQ ID NO: 72427 - protein, 9 aa, Homo Sapiens
KLQNNSLLP

SEQ ID NO: 72428 - protein, 9 aa, Homo Sapiens
KRFSGTVRL

SEQ ID NO: 72429 - protein, 9 aa, Homo Sapiens
KRINWRTVL

SEQ ID NO: 72430 - protein, 9 aa, Homo Sapiens
KRYAGALRA

SEQ ID NO: 72431 - protein, 9 aa, Homo Sapiens
KRYDREFLL

SEQ ID NO: 72432 - protein, 9 aa, Homo Sapiens
KRYSRSLTI

SEQ ID NO: 72433 - protein, 9 aa, Homo Sapiens
LAAARLAAA

SEQ ID NO: 72434 - protein, 9 aa, Homo Sapiens
LAALRLQSL

SEQ ID NO: 72435 - protein, 9 aa, Homo Sapiens
LDLQRTLSL

SEQ ID NO: 72436 - protein, 9 aa, Homo Sapiens
LDRERILSL

SEQ ID NO: 72437 - protein, 9 aa, Homo Sapiens
LEFLRDEEL

SEQ ID NO: 72438 - protein, 9 aa, Homo Sapiens
LELERKQAL

SEQ ID NO: 72439 - protein, 9 aa, Homo Sapiens
LERERAAQL

SEQ ID NO: 72440 - protein, 9 aa, Homo Sapiens
LEVARNVAL

SEQ ID NO: 72441 - protein, 9 aa, Homo Sapiens
LEYERQLVL

SEQ ID NO: 72442 - protein, 9 aa, Homo Sapiens
LPDERTISL

SEQ ID NO: 72443 - protein, 9 aa, Homo Sapiens
LPFLRITSL

SEQ ID NO: 72444 - protein, 9 aa, Homo Sapiens
LPHNRLVSL

SEQ ID NO: 72445 - protein, 9 aa, Homo Sapiens
LPHNRMQAL

SEQ ID NO: 72446 - protein, 9 aa, Homo Sapiens
LPWKRIVAV

SEQ ID NO: 72447 - protein, 9 aa, Homo Sapiens
LQIDNARLA

SEQ ID NO: 72448 - protein, 9 aa, Homo Sapiens
LQIQRNVTL

SEQ ID NO: 72449 - protein, 9 aa, Homo Sapiens
LQLERAQSL

SEQ ID NO: 72450 - protein, 9 aa, Homo Sapiens
LQYNRAQVL

SEQ ID NO: 72451 - protein, 9 aa, Homo Sapiens
LQYSRQEGL

SEQ ID NO: 72452 - protein, 9 aa, Homo Sapiens
LQYTRKAEF

SEQ ID NO: 72453 - protein, 9 aa, Homo Sapiens
LRAVRCHSL

SEQ ID NO: 72454 - protein, 9 aa, Homo Sapiens
LRDDRVLPL

SEQ ID NO: 72455 - protein, 9 aa, Homo Sapiens
LRELEREVL

SEQ ID NO: 72456 - protein, 9 aa, Homo Sapiens
LRFDGALNV

SEQ ID NO: 72457 - protein, 9 aa, Homo Sapiens
LRFDKEVAL

SEQ ID NO: 72458 - protein, 9 aa, Homo Sapiens
LRFGNPLLV

SEQ ID NO: 72459 - protein, 9 aa, Homo Sapiens
LRFKKGHCL

SEQ ID NO: 72460 - protein, 9 aa, Homo Sapiens
LRFKKPQSL

SEQ ID NO: 72461 - protein, 9 aa, Homo Sapiens
LRFLFENKL

SEQ ID NO: 72462 - protein, 9 aa, Homo Sapiens
LRFLHENQL

SEQ ID NO: 72463 - protein, 9 aa, Homo Sapiens
LRFPGQLNA

SEQ ID NO: 72464 - protein, 9 aa, Homo Sapiens
LRFPHHSQL

SEQ ID NO: 72465 - protein, 9 aa, Homo Sapiens
LRFQSSAVM

SEQ ID NO: 72466 - protein, 9 aa, Homo Sapiens
LRHDRPYTL

SEQ ID NO: 72467 - protein, 9 aa, Homo Sapiens
LRHLQTITL

SEQ ID NO: 72468 - protein, 9 aa, Homo Sapiens
LRHNGPPPV

SEQ ID NO: 72469 - protein, 9 aa, Homo Sapiens
LRHPRINVL

SEQ ID NO: 72470 - protein, 9 aa, Homo Sapiens
LRHVGRHCL

SEQ ID NO: 72471 - protein, 9 aa, Homo Sapiens
LRIERESAL

SEQ ID NO: 72472 - protein, 9 aa, Homo Sapiens
LRIQQREQL

SEQ ID NO: 72473 - protein, 9 aa, Homo Sapiens
LRLLIHQSL

SEQ ID NO: 72474 - protein, 9 aa, Homo Sapiens
LRLPRRESL

SEQ ID NO: 72475 - protein, 9 aa, Homo Sapiens
LRMAVRNNL

SEQ ID NO: 72476 - protein, 9 aa, Homo Sapiens
LRPGVRHPL

SEQ ID NO: 72477 - protein, 9 aa, Homo Sapiens
LRRLREQVL

SEQ ID NO: 72478 - protein, 9 aa, Homo Sapiens
LRVVRVVDL

SEQ ID NO: 72479 - protein, 9 aa, Homo Sapiens
LRYAAVRTL

SEQ ID NO: 72480 - protein, 9 aa, Homo Sapiens
LRYDHQQRL

SEQ ID NO: 72481 - protein, 9 aa, Homo Sapiens
LRYDHQSRL

SEQ ID NO: 72482 - protein, 9 aa, Homo Sapiens
LRYGGNLSL

SEQ ID NO: 72483 - protein, 9 aa, Homo Sapiens
LRYLKQSKV

SEQ ID NO: 72484 - protein, 9 aa, Homo Sapiens
LRYLRDDGL

SEQ ID NO: 72485 - protein, 9 aa, Homo Sapiens
LRYPMAVGL

SEQ ID NO: 72486 - protein, 9 aa, Homo Sapiens
LSYLRESSL

SEQ ID NO: 72487 - protein, 9 aa, Homo Sapiens
LSYLRVNVL

SEQ ID NO: 72488 - protein, 9 aa, Homo Sapiens
MAAQRQRAL

SEQ ID NO: 72489 - protein, 9 aa, Homo Sapiens
MEAVRVNPL

SEQ ID NO: 72490 - protein, 9 aa, Homo Sapiens
MEFERQAEI

SEQ ID NO: 72491 - protein, 9 aa, Homo Sapiens
MELCRSLAL

SEQ ID NO: 72492 - protein, 9 aa, Homo Sapiens
MELERIVSA

SEQ ID NO: 72493 - protein, 9 aa, Homo Sapiens
MELERVKAL

SEQ ID NO: 72494 - protein, 9 aa, Homo Sapiens
MELQGERAI

SEQ ID NO: 72495 - protein, 9 aa, Homo Sapiens
MEQLRGEAL

SEQ ID NO: 72496 - protein, 9 aa, Homo Sapiens
MERERKVSM

SEQ ID NO: 72497 - protein, 9 aa, Homo Sapiens
MEYLRFREL

SEQ ID NO: 72498 - protein, 9 aa, Homo Sapiens
MGFSRDQAL

SEQ ID NO: 72499 - protein, 9 aa, Homo Sapiens
MGYEREQVI

SEQ ID NO: 72500 - protein, 9 aa, Homo Sapiens
MGYLRIADL

SEQ ID NO: 72501 - protein, 9 aa, Homo Sapiens
MQAPGRGPL

SEQ ID NO: 72502 - protein, 9 aa, Homo Sapiens
MQYLKENSL

SEQ ID NO: 72503 - protein, 9 aa, Homo Sapiens
MRFDGLLGF

SEQ ID NO: 72504 - protein, 9 aa, Homo Sapiens
MRFDGRLGF

SEQ ID NO: 72505 - protein, 9 aa, Homo Sapiens
MRFLAATFL

SEQ ID NO: 72506 - protein, 9 aa, Homo Sapiens
MRFLIKGSV

SEQ ID NO: 72507 - protein, 9 aa, Homo Sapiens
MRHKLKTAF

SEQ ID NO: 72508 - protein, 9 aa, Homo Sapiens
MRHVVSHAL

SEQ ID NO: 72509 - protein, 9 aa, Homo Sapiens
MRIFRDQSL

SEQ ID NO: 72510 - protein, 9 aa, Homo Sapiens
MRKIREIVL

SEQ ID NO: 72511 - protein, 9 aa, Homo Sapiens
MRKVPRVSL

SEQ ID NO: 72512 - protein, 9 aa, Homo Sapiens
MRLEQRDSL

SEQ ID NO: 72513 - protein, 9 aa, Homo Sapiens
MRLGGRLVL

SEQ ID NO: 72514 - protein, 9 aa, Homo Sapiens
MRLGPRTAA

SEQ ID NO: 72515 - protein, 9 aa, Homo Sapiens
MRLPGGPTL

SEQ ID NO: 72516 - protein, 9 aa, Homo Sapiens
MRLSLPLLL

SEQ ID NO: 72517 - protein, 9 aa, Homo Sapiens
MRLSRELQL

SEQ ID NO: 72518 - protein, 9 aa, Homo Sapiens
MRMATPLLM

SEQ ID NO: 72519 - protein, 9 aa, Homo Sapiens
MRMNRICRM

SEQ ID NO: 72520 - protein, 9 aa, Homo Sapiens
MRMVLNESL

SEQ ID NO: 72521 - protein, 9 aa, Homo Sapiens
MRRDGWPAM

SEQ ID NO: 72522 - protein, 9 aa, Homo Sapiens
MRSLKRAAL

SEQ ID NO: 72523 - protein, 9 aa, Homo Sapiens
MRSLLRTPF

SEQ ID NO: 72524 - protein, 9 aa, Homo Sapiens
MRTVKRETL

SEQ ID NO: 72525 - protein, 9 aa, Homo Sapiens
MRVSDRQQL

SEQ ID NO: 72526 - protein, 9 aa, Homo Sapiens
MRVSNRSLL

SEQ ID NO: 72527 - protein, 9 aa, Homo Sapiens
MRYAVNVAL

SEQ ID NO: 72528 - protein, 9 aa, Homo Sapiens
MRYLHRIYV

SEQ ID NO: 72529 - protein, 9 aa, Homo Sapiens
MRYLLKVQF

SEQ ID NO: 72530 - protein, 9 aa, Homo Sapiens
MRYLLPSVV

SEQ ID NO: 72531 - protein, 9 aa, Homo Sapiens
MRYNLQSAL

SEQ ID NO: 72532 - protein, 9 aa, Homo Sapiens
MRYVASYLL

SEQ ID NO: 72533 - protein, 9 aa, Homo Sapiens
NAAERRGPL

SEQ ID NO: 72534 - protein, 9 aa, Homo Sapiens
NAFRRFSSL

SEQ ID NO: 72535 - protein, 9 aa, Homo Sapiens
NALMRLNQI

SEQ ID NO: 72536 - protein, 9 aa, Homo Sapiens
NEATRQVAL

SEQ ID NO: 72537 - protein, 9 aa, Homo Sapiens
NEFVRDTAL

SEQ ID NO: 72538 - protein, 9 aa, Homo Sapiens
NELERLSNL

SEQ ID NO: 72539 - protein, 9 aa, Homo Sapiens
NELERNITI

SEQ ID NO: 72540 - protein, 9 aa, Homo Sapiens
NELKRLCGL

SEQ ID NO: 72541 - protein, 9 aa, Homo Sapiens
NELQRKDAL

SEQ ID NO: 72542 - protein, 9 aa, Homo Sapiens
NELVRISSM

SEQ ID NO: 72543 - protein, 9 aa, Homo Sapiens
NELVRTKTL

SEQ ID NO: 72544 - protein, 9 aa, Homo Sapiens
NEVERTQAL

SEQ ID NO: 72545 - protein, 9 aa, Homo Sapiens
NGAARLTAL

SEQ ID NO: 72546 - protein, 9 aa, Homo Sapiens
NGATRKLAL

SEQ ID NO: 72547 - protein, 9 aa, Homo Sapiens
NGQPIHAEL

SEQ ID NO: 72548 - protein, 9 aa, Homo Sapiens
NGYKRVLAL

SEQ ID NO: 72549 - protein, 9 aa, Homo Sapiens
NGYLRAAEL

SEQ ID NO: 72550 - protein, 9 aa, Homo Sapiens
NHFDRSVVL

SEQ ID NO: 72551 - protein, 9 aa, Homo Sapiens
NKYERELML

SEQ ID NO: 72552 - protein, 9 aa, Homo Sapiens
NNMQRQLAL

SEQ ID NO: 72553 - protein, 9 aa, Homo Sapiens
NPHDRVVAL

SEQ ID NO: 72554 - protein, 9 aa, Homo Sapiens
NPHKRISAF

SEQ ID NO: 72555 - protein, 9 aa, Homo Sapiens
NPNLRKNVL

SEQ ID NO: 72556 - protein, 9 aa, Homo Sapiens
NPQLRSVAL

SEQ ID NO: 72557 - protein, 9 aa, Homo Sapiens
NPYSRLMAL

SEQ ID NO: 72558 - protein, 9 aa, Homo Sapiens
NQAERRAVL

SEQ ID NO: 72559 - protein, 9 aa, Homo Sapiens
NQIERCNSL

SEQ ID NO: 72560 - protein, 9 aa, Homo Sapiens
NQIIRHNEL

SEQ ID NO: 72561 - protein, 9 aa, Homo Sapiens
NQISDRAAL

SEQ ID NO: 72562 - protein, 9 aa, Homo Sapiens
NQLIRTSGV

SEQ ID NO: 72563 - protein, 9 aa, Homo Sapiens
NQLKRIAKM

SEQ ID NO: 72564 - protein, 9 aa, Homo Sapiens
NQLQRLCVL

SEQ ID NO: 72565 - protein, 9 aa, Homo Sapiens
NQRHRDLEL

SEQ ID NO: 72566 - protein, 9 aa, Homo Sapiens
NQVARFNDL

SEQ ID NO: 72567 - protein, 9 aa, Homo Sapiens
NQVVREAIL

SEQ ID NO: 72568 - protein, 9 aa, Homo Sapiens
NQWSRIASL

SEQ ID NO: 72569 - protein, 9 aa, Homo Sapiens
NRAACHLKL

SEQ ID NO: 72570 - protein, 9 aa, Homo Sapiens
NRALKRFSL

SEQ ID NO: 72571 - protein, 9 aa, Homo Sapiens
NRALRGQSL

SEQ ID NO: 72572 - protein, 9 aa, Homo Sapiens
NRANRAVAI

SEQ ID NO: 72573 - protein, 9 aa, Homo Sapiens
NRAVVGVVA

SEQ ID NO: 72574 - protein, 9 aa, Homo Sapiens
NREARNYTL

SEQ ID NO: 72575 - protein, 9 aa, Homo Sapiens
NREVPREAL

SEQ ID NO: 72576 - protein, 9 aa, Homo Sapiens
NRFDAVQSA

SEQ ID NO: 72577 - protein, 9 aa, Homo Sapiens
NRFEKRINV

SEQ ID NO: 72578 - protein, 9 aa, Homo Sapiens
NRFGGGPAV

SEQ ID NO: 72579 - protein, 9 aa, Homo Sapiens
NRFKLVNSA

SEQ ID NO: 72580 - protein, 9 aa, Homo Sapiens
NRFLHMHEL

SEQ ID NO: 72581 - protein, 9 aa, Homo Sapiens
NRFNYPFEL

SEQ ID NO: 72582 - protein, 9 aa, Homo Sapiens
NRFPAVNSL

SEQ ID NO: 72583 - protein, 9 aa, Homo Sapiens
NRFPWPKVL

SEQ ID NO: 72584 - protein, 9 aa, Homo Sapiens
NRFSDHVAL

SEQ ID NO: 72585 - protein, 9 aa, Homo Sapiens
NRFSPKASL

SEQ ID NO: 72586 - protein, 9 aa, Homo Sapiens
NRFTHVLTA

SEQ ID NO: 72587 - protein, 9 aa, Homo Sapiens
NRFVGILMA

SEQ ID NO: 72588 - protein, 9 aa, Homo Sapiens
NRGDFFMTL

SEQ ID NO: 72589 - protein, 9 aa, Homo Sapiens
NRHAVVMEL

SEQ ID NO: 72590 - protein, 9 aa, Homo Sapiens
NRHLFKDKV

SEQ ID NO: 72591 - protein, 9 aa, Homo Sapiens
NRHLRDEGL

SEQ ID NO: 72592 - protein, 9 aa, Homo Sapiens
NRHPNFLVV

SEQ ID NO: 72593 - protein, 9 aa, Homo Sapiens
NRHYYSITI

SEQ ID NO: 72594 - protein, 9 aa, Homo Sapiens
NRICKVLAV

SEQ ID NO: 72595 - protein, 9 aa, Homo Sapiens
NRIEERLNL

SEQ ID NO: 72596 - protein, 9 aa, Homo Sapiens
NRIEKREVL

SEQ ID NO: 72597 - protein, 9 aa, Homo Sapiens
NRIHHKLVL

SEQ ID NO: 72598 - protein, 9 aa, Homo Sapiens
NRIKGIPKL

SEQ ID NO: 72599 - protein, 9 aa, Homo Sapiens
NRIRVRQDL

SEQ ID NO: 72600 - protein, 9 aa, Homo Sapiens
NRISHHKIL

SEQ ID NO: 72601 - protein, 9 aa, Homo Sapiens
NRIYRMIKL

SEQ ID NO: 72602 - protein, 9 aa, Homo Sapiens
NRLAMATAL

SEQ ID NO: 72603 - protein, 9 aa, Homo Sapiens
NRLDAELQL

SEQ ID NO: 72604 - protein, 9 aa, Homo Sapiens
NRLDRHEQI

SEQ ID NO: 72605 - protein, 9 aa, Homo Sapiens
NRLDYHISV

SEQ ID NO: 72606 - protein, 9 aa, Homo Sapiens
NRLETPMEL

SEQ ID NO: 72607 - protein, 9 aa, Homo Sapiens
NRLGQHSCL

SEQ ID NO: 72608 - protein, 9 aa, Homo Sapiens
NRLHDRIVF

SEQ ID NO: 72609 - protein, 9 aa, Homo Sapiens
NRLKVGLQV

SEQ ID NO: 72610 - protein, 9 aa, Homo Sapiens
NRLLQRKQM

SEQ ID NO: 72611 - protein, 9 aa, Homo Sapiens
NRLPKPVLL

SEQ ID NO: 72612 - protein, 9 aa, Homo Sapiens
NRLPLVVSF

SEQ ID NO: 72613 - protein, 9 aa, Homo Sapiens
NRLPRSVTT

SEQ ID NO: 72614 - protein, 9 aa, Homo Sapiens
NRLPRVLIL

SEQ ID NO: 72615 - protein, 9 aa, Homo Sapiens
NRLQAVEAL

SEQ ID NO: 72616 - protein, 9 aa, Homo Sapiens
NRLTFASTL

SEQ ID NO: 72617 - protein, 9 aa, Homo Sapiens
NRLTKIEGL

SEQ ID NO: 72618 - protein, 9 aa, Homo Sapiens
NRLVRLVCV

SEQ ID NO: 72619 - protein, 9 aa, Homo Sapiens
NRMADAIIL

SEQ ID NO: 72620 - protein, 9 aa, Homo Sapiens
NRMLAQQAV

SEQ ID NO: 72621 - protein, 9 aa, Homo Sapiens
NRNPRNLEL

SEQ ID NO: 72622 - protein, 9 aa, Homo Sapiens
NRQDRYVFL

SEQ ID NO: 72623 - protein, 9 aa, Homo Sapiens
NRRLKKYAL

SEQ ID NO: 72624 - protein, 9 aa, Homo Sapiens
NRTMVQLGI

SEQ ID NO: 72625 - protein, 9 aa, Homo Sapiens
NRVCTTVAI

SEQ ID NO: 72626 - protein, 9 aa, Homo Sapiens
NRVLGPCAL

SEQ ID NO: 72627 - protein, 9 aa, Homo Sapiens
NRVLRISQL

SEQ ID NO: 72628 - protein, 9 aa, Homo Sapiens
NRVNFRGSL

SEQ ID NO: 72629 - protein, 9 aa, Homo Sapiens
NRVQRDSVI

SEQ ID NO: 72630 - protein, 9 aa, Homo Sapiens
NRVSSRLGL

SEQ ID NO: 72631 - protein, 9 aa, Homo Sapiens
NRWKQSVEL

SEQ ID NO: 72632 - protein, 9 aa, Homo Sapiens
NRWLRTISV

SEQ ID NO: 72633 - protein, 9 aa, Homo Sapiens
NRYDGIYKV

SEQ ID NO: 72634 - protein, 9 aa, Homo Sapiens
NRYDGQVAV

SEQ ID NO: 72635 - protein, 9 aa, Homo Sapiens
NRYDKKYSW

SEQ ID NO: 72636 - protein, 9 aa, Homo Sapiens
NRYEDALVL

SEQ ID NO: 72637 - protein, 9 aa, Homo Sapiens
NRYERAIYA

SEQ ID NO: 72638 - protein, 9 aa, Homo Sapiens
NRYGMGTSV

SEQ ID NO: 72639 - protein, 9 aa, Homo Sapiens
NRYGQLTIL

SEQ ID NO: 72640 - protein, 9 aa, Homo Sapiens
NRYHVPVVV

SEQ ID NO: 72641 - protein, 9 aa, Homo Sapiens
NRYIHILMI

SEQ ID NO: 72642 - protein, 9 aa, Homo Sapiens
NRYIMKSFL

SEQ ID NO: 72643 - protein, 9 aa, Homo Sapiens
NRYIPTAAA

SEQ ID NO: 72644 - protein, 9 aa, Homo Sapiens
NRYLPTDTL

SEQ ID NO: 72645 - protein, 9 aa, Homo Sapiens
NRYLYFSST

SEQ ID NO: 72646 - protein, 9 aa, Homo Sapiens
NRYLYLSTM

SEQ ID NO: 72647 - protein, 9 aa, Homo Sapiens
NRYQGGFLI

SEQ ID NO: 72648 - protein, 9 aa, Homo Sapiens
NTLKRVSSL

SEQ ID NO: 72649 - protein, 9 aa, Homo Sapiens
PQYSRQNSL

SEQ ID NO: 72650 - protein, 9 aa, Homo Sapiens
QDAARKEAL

SEQ ID NO: 72651 - protein, 9 aa, Homo Sapiens
QDLRRTNSL

SEQ ID NO: 72652 - protein, 9 aa, Homo Sapiens
QDMQRKVEL

SEQ ID NO: 72653 - protein, 9 aa, Homo Sapiens
QDYKRMNML

SEQ ID NO: 72654 - protein, 9 aa, Homo Sapiens
QEAERKNSL

SEQ ID NO: 72655 - protein, 9 aa, Homo Sapiens
QEAVRNQSL

SEQ ID NO: 72656 - protein, 9 aa, Homo Sapiens
QEVLRTLAL

SEQ ID NO: 72657 - protein, 9 aa, Homo Sapiens
QEYERRAQL

SEQ ID NO: 72658 - protein, 9 aa, Homo Sapiens
QEYQRESML

SEQ ID NO: 72659 - protein, 9 aa, Homo Sapiens
QEYTRVCSL

SEQ ID NO: 72660 - protein, 9 aa, Homo Sapiens
QHATRFIAL

SEQ ID NO: 72661 - protein, 9 aa, Homo Sapiens
QLFQRPNAL

SEQ ID NO: 72662 - protein, 9 aa, Homo Sapiens
QLFQRTNAL

SEQ ID NO: 72663 - protein, 9 aa, Homo Sapiens
QNILALRSI

SEQ ID NO: 72664 - protein, 9 aa, Homo Sapiens
QNLERGTAV

SEQ ID NO: 72665 - protein, 9 aa, Homo Sapiens
QQAVRQNGL

SEQ ID NO: 72666 - protein, 9 aa, Homo Sapiens
QQEQRTNAL

SEQ ID NO: 72667 - protein, 9 aa, Homo Sapiens
QQLQRIAQL

SEQ ID NO: 72668 - protein, 9 aa, Homo Sapiens
QQLQRKTAL

SEQ ID NO: 72669 - protein, 9 aa, Homo Sapiens
QQQARTAAL

SEQ ID NO: 72670 - protein, 9 aa, Homo Sapiens
QQQKRTEAL

SEQ ID NO: 72671 - protein, 9 aa, Homo Sapiens
QQQQRNLSL

SEQ ID NO: 72672 - protein, 9 aa, Homo Sapiens
QQYLRQEVL

SEQ ID NO: 72673 - protein, 9 aa, Homo Sapiens
QQYQRRLAA

SEQ ID NO: 72674 - protein, 9 aa, Homo Sapiens
QRFEGTTSL

SEQ ID NO: 72675 - protein, 9 aa, Homo Sapiens
QRFHFASAL

SEQ ID NO: 72676 - protein, 9 aa, Homo Sapiens
QRKERLYPL

SEQ ID NO: 72677 - protein, 9 aa, Homo Sapiens
QRLIRESAL

SEQ ID NO: 72678 - protein, 9 aa, Homo Sapiens
QRLKFRLNL

SEQ ID NO: 72679 - protein, 9 aa, Homo Sapiens
QRLPRPSSL

SEQ ID NO: 72680 - protein, 9 aa, Homo Sapiens
QRLQRLERL

SEQ ID NO: 72681 - protein, 9 aa, Homo Sapiens
QRLSSHPVL

SEQ ID NO: 72682 - protein, 9 aa, Homo Sapiens
QRLVRVLQI

SEQ ID NO: 72683 - protein, 9 aa, Homo Sapiens
QRVADRLGL

SEQ ID NO: 72684 - protein, 9 aa, Homo Sapiens
QRVFPHAEF

SEQ ID NO: 72685 - protein, 9 aa, Homo Sapiens
QRVPEREAL

SEQ ID NO: 72686 - protein, 9 aa, Homo Sapiens
QRYARPPVL

SEQ ID NO: 72687 - protein, 9 aa, Homo Sapiens
QRYDHYSVL

SEQ ID NO: 72688 - protein, 9 aa, Homo Sapiens
QRYLRSSRF

SEQ ID NO: 72689 - protein, 9 aa, Homo Sapiens
QRYNSFISL

SEQ ID NO: 72690 - protein, 9 aa, Homo Sapiens
RAALRSCSL

SEQ ID NO: 72691 - protein, 9 aa, Homo Sapiens
RFTEKGPLL

SEQ ID NO: 72692 - protein, 9 aa, Homo Sapiens
RPFERTITM

SEQ ID NO: 72693 - protein, 9 aa, Homo Sapiens
RPTARINSI

SEQ ID NO: 72694 - protein, 9 aa, Homo Sapiens
RPWLRPAAL

SEQ ID NO: 72695 - protein, 9 aa, Homo Sapiens
RQVTGVTRV

SEQ ID NO: 72696 - protein, 9 aa, Homo Sapiens
RRFHFSQSL

SEQ ID NO: 72697 - protein, 9 aa, Homo Sapiens
RTLSPRGSL

SEQ ID NO: 72698 - protein, 9 aa, Homo Sapiens
SAYQRYYSL

SEQ ID NO: 72699 - protein, 9 aa, Homo Sapiens
SDLERVTSL

SEQ ID NO: 72700 - protein, 9 aa, Homo Sapiens
SDLLLHSAL

SEQ ID NO: 72701 - protein, 9 aa, Homo Sapiens
SEFERLECL

SEQ ID NO: 72702 - protein, 9 aa, Homo Sapiens
SEFGRNYSL

SEQ ID NO: 72703 - protein, 9 aa, Homo Sapiens
SEYMRLRQL

SEQ ID NO: 72704 - protein, 9 aa, Homo Sapiens
SEYQRFAVM

SEQ ID NO: 72705 - protein, 9 aa, Homo Sapiens
SGYVRGQTL

SEQ ID NO: 72706 - protein, 9 aa, Homo Sapiens
SHYERVQML

SEQ ID NO: 72707 - protein, 9 aa, Homo Sapiens
SLYRREESL

SEQ ID NO: 72708 - protein, 9 aa, Homo Sapiens
SPARTALTG

SEQ ID NO: 72709 - protein, 9 aa, Homo Sapiens
SPASRSISL

SEQ ID NO: 72710 - protein, 9 aa, Homo Sapiens
SPFKRQLSL

SEQ ID NO: 72711 - protein, 9 aa, Homo Sapiens
SPYKRDNTF

SEQ ID NO: 72712 - protein, 9 aa, Homo Sapiens
SPYLRFGCL

SEQ ID NO: 72713 - protein, 9 aa, Homo Sapiens
SPYLRPLTL

SEQ ID NO: 72714 - protein, 9 aa, Homo Sapiens
SPYQRKAGL

SEQ ID NO: 72715 - protein, 9 aa, Homo Sapiens
SQAARLLSL

SEQ ID NO: 72716 - protein, 9 aa, Homo Sapiens
SQAMRYRAL

SEQ ID NO: 72717 - protein, 9 aa, Homo Sapiens
SQFWRMVAL

SEQ ID NO: 72718 - protein, 9 aa, Homo Sapiens
SQLERENTL

SEQ ID NO: 72719 - protein, 9 aa, Homo Sapiens
SQLNRPNSL

SEQ ID NO: 72720 - protein, 9 aa, Homo Sapiens
SQLSGRRVL

SEQ ID NO: 72721 - protein, 9 aa, Homo Sapiens
SQLSRTAAL

SEQ ID NO: 72722 - protein, 9 aa, Homo Sapiens
SQMLRAVSL

SEQ ID NO: 72723 - protein, 9 aa, Homo Sapiens
SQRQGRPTL

SEQ ID NO: 72724 - protein, 9 aa, Homo Sapiens
SQTQRLEAL

SEQ ID NO: 72725 - protein, 9 aa, Homo Sapiens
SQVDRLVAL

SEQ ID NO: 72726 - protein, 9 aa, Homo Sapiens
SQVPRSSSM

SEQ ID NO: 72727 - protein, 9 aa, Homo Sapiens
SQYQRFTYL

SEQ ID NO: 72728 - protein, 9 aa, Homo Sapiens
SQYQRLLCI

SEQ ID NO: 72729 - protein, 9 aa, Homo Sapiens
SRFARLQKL

SEQ ID NO: 72730 - protein, 9 aa, Homo Sapiens
SRFEFNQSL

SEQ ID NO: 72731 - protein, 9 aa, Homo Sapiens
SRFEGLSPL

SEQ ID NO: 72732 - protein, 9 aa, Homo Sapiens
SRFNRYYSL

SEQ ID NO: 72733 - protein, 9 aa, Homo Sapiens
SRFPEALRL

SEQ ID NO: 72734 - protein, 9 aa, Homo Sapiens
SRFPRQGDL

SEQ ID NO: 72735 - protein, 9 aa, Homo Sapiens
SRFQGTLYL

SEQ ID NO: 72736 - protein, 9 aa, Homo Sapiens
SRFSHLTSL

SEQ ID NO: 72737 - protein, 9 aa, Homo Sapiens
SRHPFLTAL

SEQ ID NO: 72738 - protein, 9 aa, Homo Sapiens
SRIARTLGL

SEQ ID NO: 72739 - protein, 9 aa, Homo Sapiens
SRIEDRRIL

SEQ ID NO: 72740 - protein, 9 aa, Homo Sapiens
SRLAGRDAL

SEQ ID NO: 72741 - protein, 9 aa, Homo Sapiens
SRLEERSVL

SEQ ID NO: 72742 - protein, 9 aa, Homo Sapiens
SRLEKRSEF

SEQ ID NO: 72743 - protein, 9 aa, Homo Sapiens
SRLERREQL

SEQ ID NO: 72744 - protein, 9 aa, Homo Sapiens
SRLGSSRVL

SEQ ID NO: 72745 - protein, 9 aa, Homo Sapiens
SRLKMRAEL

SEQ ID NO: 72746 - protein, 9 aa, Homo Sapiens
SRLKSILKL

SEQ ID NO: 72747 - protein, 9 aa, Homo Sapiens
SRLLKGTSL

SEQ ID NO: 72748 - protein, 9 aa, Homo Sapiens
SRLPLRAQI

SEQ ID NO: 72749 - protein, 9 aa, Homo Sapiens
SRLSSTSSL

SEQ ID NO: 72750 - protein, 9 aa, Homo Sapiens
SRLTAREAM

SEQ ID NO: 72751 - protein, 9 aa, Homo Sapiens
SRLVKREYL

SEQ ID NO: 72752 - protein, 9 aa, Homo Sapiens
SRLVVKTAL

SEQ ID NO: 72753 - protein, 9 aa, Homo Sapiens
SRMANRDLL

SEQ ID NO: 72754 - protein, 9 aa, Homo Sapiens
SRMIRKMKL

SEQ ID NO: 72755 - protein, 9 aa, Homo Sapiens
SRMIRWTKL

SEQ ID NO: 72756 - protein, 9 aa, Homo Sapiens
SRMPGELVL

SEQ ID NO: 72757 - protein, 9 aa, Homo Sapiens
SRQQRLSAL

SEQ ID NO: 72758 - protein, 9 aa, Homo Sapiens
SRTPGRSEL

SEQ ID NO: 72759 - protein, 9 aa, Homo Sapiens
SRVAKTNSL

SEQ ID NO: 72760 - protein, 9 aa, Homo Sapiens
SRVEFRLSL

SEQ ID NO: 72761 - protein, 9 aa, Homo Sapiens
SRVIRVSEL

SEQ ID NO: 72762 - protein, 9 aa, Homo Sapiens
SRVLKVLSV

SEQ ID NO: 72763 - protein, 9 aa, Homo Sapiens
SRVNRLSVL

SEQ ID NO: 72764 - protein, 9 aa, Homo Sapiens
SRYDGQIAV

SEQ ID NO: 72765 - protein, 9 aa, Homo Sapiens
SRYEHVMKL

SEQ ID NO: 72766 - protein, 9 aa, Homo Sapiens
SRYFKGPEL

SEQ ID NO: 72767 - protein, 9 aa, Homo Sapiens
SRYFRMSDI

SEQ ID NO: 72768 - protein, 9 aa, Homo Sapiens
SRYGGGPAV

SEQ ID NO: 72769 - protein, 9 aa, Homo Sapiens
SRYGGGPRL

SEQ ID NO: 72770 - protein, 9 aa, Homo Sapiens
SRYLNEKAV

SEQ ID NO: 72771 - protein, 9 aa, Homo Sapiens
SRYLYTLVI

SEQ ID NO: 72772 - protein, 9 aa, Homo Sapiens
SRYMKLTVV

SEQ ID NO: 72773 - protein, 9 aa, Homo Sapiens
SRYMRINSL

SEQ ID NO: 72774 - protein, 9 aa, Homo Sapiens
SRYSFIQAL

SEQ ID NO: 72775 - protein, 9 aa, Homo Sapiens
SRYSMYNSV

SEQ ID NO: 72776 - protein, 9 aa, Homo Sapiens
SRYWRITNA

SEQ ID NO: 72777 - protein, 9 aa, Homo Sapiens
SRYYRAPEI

SEQ ID NO: 72778 - protein, 9 aa, Homo Sapiens
TAFKRNLSL

SEQ ID NO: 72779 - protein, 9 aa, Homo Sapiens
TDYLRQRAL

SEQ ID NO: 72780 - protein, 9 aa, Homo Sapiens
TEFKRGLPL

SEQ ID NO: 72781 - protein, 9 aa, Homo Sapiens
TEMERTLAL

SEQ ID NO: 72782 - protein, 9 aa, Homo Sapiens
TPHLRNLAV

SEQ ID NO: 72783 - protein, 9 aa, Homo Sapiens
TPISRLVAL

SEQ ID NO: 72784 - protein, 9 aa, Homo Sapiens
TQTVRVVAL

SEQ ID NO: 72785 - protein, 9 aa, Homo Sapiens
TQVKRLESL

SEQ ID NO: 72786 - protein, 9 aa, Homo Sapiens
TQYSKVLAL

SEQ ID NO: 72787 - protein, 9 aa, Homo Sapiens
TRCPLVLKL

SEQ ID NO: 72788 - protein, 9 aa, Homo Sapiens
TRFAEVECL

SEQ ID NO: 72789 - protein, 9 aa, Homo Sapiens
TRFSLARQV

SEQ ID NO: 72790 - protein, 9 aa, Homo Sapiens
TRHPFLTAL

SEQ ID NO: 72791 - protein, 9 aa, Homo Sapiens
TRIEQNLVL

SEQ ID NO: 72792 - protein, 9 aa, Homo Sapiens
TRIKKHLSL

SEQ ID NO: 72793 - protein, 9 aa, Homo Sapiens
TRILFKNTL

SEQ ID NO: 72794 - protein, 9 aa, Homo Sapiens
TRILKRITV

SEQ ID NO: 72795 - protein, 9 aa, Homo Sapiens
TRILRSAKL

SEQ ID NO: 72796 - protein, 9 aa, Homo Sapiens
TRIPKIQKL

SEQ ID NO: 72797 - protein, 9 aa, Homo Sapiens
TRLAQRLIM

SEQ ID NO: 72798 - protein, 9 aa, Homo Sapiens
TRLEFQQQL

SEQ ID NO: 72799 - protein, 9 aa, Homo Sapiens
TRLESRTQL

SEQ ID NO: 72800 - protein, 9 aa, Homo Sapiens
TRLPTPVLL

SEQ ID NO: 72801 - protein, 9 aa, Homo Sapiens
TRMPPRSVL

SEQ ID NO: 72802 - protein, 9 aa, Homo Sapiens
TRQERILAL

SEQ ID NO: 72803 - protein, 9 aa, Homo Sapiens
TRQLRNSTL

SEQ ID NO: 72804 - protein, 9 aa, Homo Sapiens
TRTEQTFIL

SEQ ID NO: 72805 - protein, 9 aa, Homo Sapiens
TRVDTILEF

SEQ ID NO: 72806 - protein, 9 aa, Homo Sapiens
TRVIKQSSL

SEQ ID NO: 72807 - protein, 9 aa, Homo Sapiens
TRVKAVRIL

SEQ ID NO: 72808 - protein, 9 aa, Homo Sapiens
TRVQSRLAL

SEQ ID NO: 72809 - protein, 9 aa, Homo Sapiens
TRYDAQLIL

SEQ ID NO: 72810 - protein, 9 aa, Homo Sapiens
TRYETYVQL

SEQ ID NO: 72811 - protein, 9 aa, Homo Sapiens
TRYLKQFHL

SEQ ID NO: 72812 - protein, 9 aa, Homo Sapiens
TRYNHMLSA

SEQ ID NO: 72813 - protein, 9 aa, Homo Sapiens
TRYNKIKAI

SEQ ID NO: 72814 - protein, 9 aa, Homo Sapiens
TVYLRDIAL

SEQ ID NO: 72815 - protein, 9 aa, Homo Sapiens
VDLERTIAL

SEQ ID NO: 72816 - protein, 9 aa, Homo Sapiens
VEFQRAQSL

SEQ ID NO: 72817 - protein, 9 aa, Homo Sapiens
VEFVRFTSL

SEQ ID NO: 72818 - protein, 9 aa, Homo Sapiens
VGLIRNLAL

SEQ ID NO: 72819 - protein, 9 aa, Homo Sapiens
VPFPRLHFF

SEQ ID NO: 72820 - protein, 9 aa, Homo Sapiens
VPMFRNVSL

SEQ ID NO: 72821 - protein, 9 aa, Homo Sapiens
VPYPRKITL

SEQ ID NO: 72822 - protein, 9 aa, Homo Sapiens
VQALRTVSL

SEQ ID NO: 72823 - protein, 9 aa, Homo Sapiens
VQAPRLAAL

SEQ ID NO: 72824 - protein, 9 aa, Homo Sapiens
VQQKRPTAL

SEQ ID NO: 72825 - protein, 9 aa, Homo Sapiens
VQVVREETL

SEQ ID NO: 72826 - protein, 9 aa, Homo Sapiens
VRAKWFPEV

SEQ ID NO: 72827 - protein, 9 aa, Homo Sapiens
VRAPPHVRF

SEQ ID NO: 72828 - protein, 9 aa, Homo Sapiens
VRFHRPYRL

SEQ ID NO: 72829 - protein, 9 aa, Homo Sapiens
VRFLEQQTL

SEQ ID NO: 72830 - protein, 9 aa, Homo Sapiens
VRFTRQDKL

SEQ ID NO: 72831 - protein, 9 aa, Homo Sapiens
VRHGRSLAL

SEQ ID NO: 72832 - protein, 9 aa, Homo Sapiens
VRIKDRNKL

SEQ ID NO: 72833 - protein, 9 aa, Homo Sapiens
VRIYDRRML

SEQ ID NO: 72834 - protein, 9 aa, Homo Sapiens
VRLAGRPQL

SEQ ID NO: 72835 - protein, 9 aa, Homo Sapiens
VRLAHREQV

SEQ ID NO: 72836 - protein, 9 aa, Homo Sapiens
VRLDREHRV

SEQ ID NO: 72837 - protein, 9 aa, Homo Sapiens
VRLHQRLQL

SEQ ID NO: 72838 - protein, 9 aa, Homo Sapiens
VRLPRQDAL

SEQ ID NO: 72839 - protein, 9 aa, Homo Sapiens
VRLWDHATM

SEQ ID NO: 72840 - protein, 9 aa, Homo Sapiens
VRMVRVLTV

SEQ ID NO: 72841 - protein, 9 aa, Homo Sapiens
VRNNLRSAL

SEQ ID NO: 72842 - protein, 9 aa, Homo Sapiens
VRNPRITSL

SEQ ID NO: 72843 - protein, 9 aa, Homo Sapiens
VRSLRTAAL

SEQ ID NO: 72844 - protein, 9 aa, Homo Sapiens
VRTVMRVPL

SEQ ID NO: 72845 - protein, 9 aa, Homo Sapiens
VRVDRDYVL

SEQ ID NO: 72846 - protein, 9 aa, Homo Sapiens
VRVIRLSSL

SEQ ID NO: 72847 - protein, 9 aa, Homo Sapiens
VRYDSSNQV

SEQ ID NO: 72848 - protein, 9 aa, Homo Sapiens
VRYKQVHAL

SEQ ID NO: 72849 - protein, 9 aa, Homo Sapiens
VRYPDRITL

SEQ ID NO: 72850 - protein, 9 aa, Homo Sapiens
VRYPGTTRV

SEQ ID NO: 72851 - protein, 9 aa, Homo Sapiens
VRYVLKEGL

SEQ ID NO: 72852 - protein, 9 aa, Homo Sapiens
VVVDRKHVP

SEQ ID NO: 72853 - protein, 9 aa, Homo Sapiens
VVYKRYASL

SEQ ID NO: 72854 - protein, 9 aa, Homo Sapiens
YDYLRPIAL

SEQ ID NO: 72855 - protein, 9 aa, Homo Sapiens
YEFERTTSI

SEQ ID NO: 72856 - protein, 9 aa, Homo Sapiens
YEMQRNLSL

SEQ ID NO: 72857 - protein, 9 aa, Homo Sapiens
YERERVVAA

SEQ ID NO: 72858 - protein, 9 aa, Homo Sapiens
YEVQRAVSL

SEQ ID NO: 72859 - protein, 9 aa, Homo Sapiens
YPAERKQAL

SEQ ID NO: 72860 - protein, 9 aa, Homo Sapiens
YQLYRNTTL

SEQ ID NO: 72861 - protein, 9 aa, Homo Sapiens
YQMEHRASL

SEQ ID NO: 72862 - protein, 9 aa, Homo Sapiens
YQQPRGVAL

SEQ ID NO: 72863 - protein, 9 aa, Homo Sapiens
YQYLLVTAL

SEQ ID NO: 72864 - protein, 9 aa, Homo Sapiens
YRFETVQKL

SEQ ID NO: 72865 - protein, 9 aa, Homo Sapiens
YRFGDSQQL

SEQ ID NO: 72866 - protein, 9 aa, Homo Sapiens
YRFKKRTEL

SEQ ID NO: 72867 - protein, 9 aa, Homo Sapiens
YRFLFNSNT

SEQ ID NO: 72868 - protein, 9 aa, Homo Sapiens
YRFLQTAEM

SEQ ID NO: 72869 - protein, 9 aa, Homo Sapiens
YRGERINQL

SEQ ID NO: 72870 - protein, 9 aa, Homo Sapiens
YRHQRIHSL

SEQ ID NO: 72871 - protein, 9 aa, Homo Sapiens
YRISRNVRL

SEQ ID NO: 72872 - protein, 9 aa, Homo Sapiens
YRLAVRTVI

SEQ ID NO: 72873 - protein, 9 aa, Homo Sapiens
YRLKAHQRL

SEQ ID NO: 72874 - protein, 9 aa, Homo Sapiens
YRLMRDNNL

SEQ ID NO: 72875 - protein, 9 aa, Homo Sapiens
YRNAYTMVL

SEQ ID NO: 72876 - protein, 9 aa, Homo Sapiens
YRSAVRATL

SEQ ID NO: 72877 - protein, 9 aa, Homo Sapiens
YRVPAKSTL

SEQ ID NO: 72878 - protein, 9 aa, Homo Sapiens
YRYGREEML

SEQ ID NO: 72879 - protein, 9 aa, Homo Sapiens
YRYLNTQFI

SEQ ID NO: 72880 - protein, 9 aa, Homo Sapiens
YRYMNPAIV

SEQ ID NO: 72881 - protein, 9 aa, Homo Sapiens
YRYNPRPRL

SEQ ID NO: 72882 - protein, 9 aa, Homo Sapiens
YRYPRPASV

SEQ ID NO: 72883 - protein, 9 aa, Homo Sapiens
YRYYQQLKL

SEQ ID NO: 72884 - protein, 10 aa, Homo Sapiens
AAGPPISEGK

SEQ ID NO: 72885 - protein, 10 aa, Homo Sapiens
AGAGIALNDH

SEQ ID NO: 72886 - protein, 10 aa, Homo Sapiens
APAYQRFHAL

SEQ ID NO: 72887 - protein, 10 aa, Homo Sapiens
AVSSDTLVAA

SEQ ID NO: 72888 - protein, 10 aa, Homo Sapiens
DPRHGRYLTV

SEQ ID NO: 72889 - protein, 10 aa, Homo Sapiens
DQYARIWNAL

SEQ ID NO: 72890 - protein, 10 aa, Homo Sapiens
DQYMRTGEGF

SEQ ID NO: 72891 - protein, 10 aa, Homo Sapiens
DRAPSRKDSL

SEQ ID NO: 72892 - protein, 10 aa, Homo Sapiens
DRDTRRDVTL

SEQ ID NO: 72893 - protein, 10 aa, Homo Sapiens
DRFHEMHVAL

SEQ ID NO: 72894 - protein, 10 aa, Homo Sapiens
DRFNHFSLTL

SEQ ID NO: 72895 - protein, 10 aa, Homo Sapiens
DRFSDSHNAL

SEQ ID NO: 72896 - protein, 10 aa, Homo Sapiens
DRLAHEIEAL

SEQ ID NO: 72897 - protein, 10 aa, Homo Sapiens
DRLDLARKEL

SEQ ID NO: 72898 - protein, 10 aa, Homo Sapiens
DRLKAIRTTL

SEQ ID NO: 72899 - protein, 10 aa, Homo Sapiens
DRLNKVISEL

SEQ ID NO: 72900 - protein, 10 aa, Homo Sapiens
DRLRTERDSL

SEQ ID NO: 72901 - protein, 10 aa, Homo Sapiens
DRMFHIRAVI

SEQ ID NO: 72902 - protein, 10 aa, Homo Sapiens
DRMLRSAMRL

SEQ ID NO: 72903 - protein, 10 aa, Homo Sapiens
DRMQKEITAL

SEQ ID NO: 72904 - protein, 10 aa, Homo Sapiens
DRYDAPGIAL

SEQ ID NO: 72905 - protein, 10 aa, Homo Sapiens
DRYLQSGGGM

SEQ ID NO: 72906 - protein, 10 aa, Homo Sapiens
DRYMRLKEEL

SEQ ID NO: 72907 - protein, 10 aa, Homo Sapiens
DRYVAIARAL

SEQ ID NO: 72908 - protein, 10 aa, Homo Sapiens
EEQLQQIRAE

SEQ ID NO: 72909 - protein, 10 aa, Homo Sapiens
ENYDRGYSSL

SEQ ID NO: 72910 - protein, 10 aa, Homo Sapiens
ERFDGMLLAM

SEQ ID NO: 72911 - protein, 10 aa, Homo Sapiens
FEAEVLHTVL

SEQ ID NO: 72912 - protein, 10 aa, Homo Sapiens
GELFLRRISL

SEQ ID NO: 72913 - protein, 10 aa, Homo Sapiens
HDKYERLVKL

SEQ ID NO: 72914 - protein, 10 aa, Homo Sapiens
IEYLAHWLYH

SEQ ID NO: 72915 - protein, 10 aa, Homo Sapiens
IRLTGGEPLI

SEQ ID NO: 72916 - protein, 10 aa, Homo Sapiens
IRYERDNNFL

SEQ ID NO: 72917 - protein, 10 aa, Homo Sapiens
IRYSGQYREL

SEQ ID NO: 72918 - protein, 10 aa, Homo Sapiens
LRYADRVKEL

SEQ ID NO: 72919 - protein, 10 aa, Homo Sapiens
MEYERQVASL

SEQ ID NO: 72920 - protein, 10 aa, Homo Sapiens
MRLGPRTAAL

SEQ ID NO: 72921 - protein, 10 aa, Homo Sapiens
NRFAGFGIGL

SEQ ID NO: 72922 - protein, 10 aa, Homo Sapiens
NRLLKQREEL

SEQ ID NO: 72923 - protein, 10 aa, Homo Sapiens
NRYDGIYKVV

SEQ ID NO: 72924 - protein, 10 aa, Homo Sapiens
NRYDGQVAVF

SEQ ID NO: 72925 - protein, 10 aa, Homo Sapiens
NRYDKKIDSL

SEQ ID NO: 72926 - protein, 10 aa, Homo Sapiens
NRYHVPVVVV

SEQ ID NO: 72927 - protein, 10 aa, Homo Sapiens
NRYMNHMQSL

SEQ ID NO: 72928 - protein, 10 aa, Homo Sapiens
NRYPASSLVV

SEQ ID NO: 72929 - protein, 10 aa, Homo Sapiens
RRYSATRAAL

SEQ ID NO: 72930 - protein, 10 aa, Homo Sapiens
SIPYKREESL

SEQ ID NO: 72931 - protein, 10 aa, Homo Sapiens
SMPRINHGVL

SEQ ID NO: 72932 - protein, 10 aa, Homo Sapiens
SRFAGYVTSI

SEQ ID NO: 72933 - protein, 10 aa, Homo Sapiens
SRMSERQLAL

SEQ ID NO: 72934 - protein, 10 aa, Homo Sapiens
SRMSERQVAL

SEQ ID NO: 72935 - protein, 10 aa, Homo Sapiens
SRYQAQHGAL

SEQ ID NO: 72936 - protein, 10 aa, Homo Sapiens
TRFDPTWESL

SEQ ID NO: 72937 - protein, 10 aa, Homo Sapiens
TRYSRNDLHL

SEQ ID NO: 72938 - protein, 10 aa, Homo Sapiens
VHYDRSGRSL

SEQ ID NO: 72939 - protein, 10 aa, Homo Sapiens
VKYVIIQQNL

SEQ ID NO: 72940 - protein, 10 aa, Homo Sapiens
VRFDVHDVTL

SEQ ID NO: 72941 - protein, 10 aa, Homo Sapiens
YRFNGQYSSL

SEQ ID NO: 72942 - protein, 10 aa, Homo Sapiens
YRNESARESL

SEQ ID NO: 72943 - protein, 11 aa, Homo Sapiens
AFEAEVLHTVL

SEQ ID NO: 72944 - protein, 11 aa, Homo Sapiens
APYMRSMMQSL

SEQ ID NO: 72945 - protein, 11 aa, Homo Sapiens
AVHYDRSGRSL

SEQ ID NO: 72946 - protein, 11 aa, Homo Sapiens
CRLPRGLAGAL

SEQ ID NO: 72947 - protein, 11 aa, Homo Sapiens
DAISRRAIWDL

SEQ ID NO: 72948 - protein, 11 aa, Homo Sapiens
DEYVRGLHAQL

SEQ ID NO: 72949 - protein, 11 aa, Homo Sapiens
DHMLRGMPLSL

SEQ ID NO: 72950 - protein, 11 aa, Homo Sapiens
DNYKRVTGTSL

SEQ ID NO: 72951 - protein, 11 aa, Homo Sapiens
DQFSRSVNVSL

SEQ ID NO: 72952 - protein, 11 aa, Homo Sapiens
DQLSRLGSSSL

SEQ ID NO: 72953 - protein, 11 aa, Homo Sapiens
DQYMRTGEGFL

SEQ ID NO: 72954 - protein, 11 aa, Homo Sapiens
DRIQRNKAAAL

SEQ ID NO: 72955 - protein, 11 aa, Homo Sapiens
DRLSKGGRLCL

SEQ ID NO: 72956 - protein, 11 aa, Homo Sapiens
DRYNPENLATL

SEQ ID NO: 72957 - protein, 11 aa, Homo Sapiens
DRYQGNQDRVL

SEQ ID NO: 72958 - protein, 11 aa, Homo Sapiens
GIDRYPRKVTA

SEQ ID NO: 72959 - protein, 11 aa, Homo Sapiens
HHFQRGDGAAL

SEQ ID NO: 72960 - protein, 11 aa, Homo Sapiens
HTSDRALHAKL

SEQ ID NO: 72961 - protein, 11 aa, Homo Sapiens
LKPPHPHHRAL

SEQ ID NO: 72962 - protein, 11 aa, Homo Sapiens
LRYDHQSRLTA

SEQ ID NO: 72963 - protein, 11 aa, Homo Sapiens
MDLELSLTSTY

SEQ ID NO: 72964 - protein, 11 aa, Homo Sapiens
NRLENDGATAL

SEQ ID NO: 72965 - protein, 11 aa, Homo Sapiens
QDNRALRGQSL

SEQ ID NO: 72966 - protein, 11 aa, Homo Sapiens
QRLEKHELIEF

SEQ ID NO: 72967 - protein, 11 aa, Homo Sapiens
SRYLRPPNTSL

SEQ ID NO: 72968 - protein, 11 aa, Homo Sapiens
TASDLLLHSAL

SEQ ID NO: 72969 - protein, 11 aa, Homo Sapiens
TEENRVLHQEL

SEQ ID NO: 72970 - protein, 11 aa, Homo Sapiens
VNDPRPQHKYN

SEQ ID NO: 72971 - protein, 8 aa, Homo Sapiens
ADVQKERY

SEQ ID NO: 72972 - protein, 8 aa, Homo Sapiens
ALQEAHLC

SEQ ID NO: 72973 - protein, 8 aa, Homo Sapiens
ANKLITVY

SEQ ID NO: 72974 - protein, 8 aa, Homo Sapiens
AQAAIVVY

SEQ ID NO: 72975 - protein, 8 aa, Homo Sapiens
AQAAPQTY

SEQ ID NO: 72976 - protein, 8 aa, Homo Sapiens
AQAESLRY

SEQ ID NO: 72977 - protein, 8 aa, Homo Sapiens
AQAVINAY

SEQ ID NO: 72978 - protein, 8 aa, Homo Sapiens
AQIIQRSF

SEQ ID NO: 72979 - protein, 8 aa, Homo Sapiens
AQKEIATL

SEQ ID NO: 72980 - protein, 8 aa, Homo Sapiens
AQKLLEQY

SEQ ID NO: 72981 - protein, 8 aa, Homo Sapiens
AQKQLLEY

SEQ ID NO: 72982 - protein, 8 aa, Homo Sapiens
AQKTSLRY

SEQ ID NO: 72983 - protein, 8 aa, Homo Sapiens
AQKVIYTL

SEQ ID NO: 72984 - protein, 8 aa, Homo Sapiens
AQLLQYRA

SEQ ID NO: 72985 - protein, 8 aa, Homo Sapiens
AQLTHTQF

SEQ ID NO: 72986 - protein, 8 aa, Homo Sapiens
AQMEVASF

SEQ ID NO: 72987 - protein, 8 aa, Homo Sapiens
AQMPTVHY

SEQ ID NO: 72988 - protein, 8 aa, Homo Sapiens
AQQPSYVY

SEQ ID NO: 72989 - protein, 8 aa, Homo Sapiens
AQRASVAF

SEQ ID NO: 72990 - protein, 8 aa, Homo Sapiens
AQRHVLTY

SEQ ID NO: 72991 - protein, 8 aa, Homo Sapiens
AQRIVEKL

SEQ ID NO: 72992 - protein, 8 aa, Homo Sapiens
AQRLIRMY

SEQ ID NO: 72993 - protein, 8 aa, Homo Sapiens
AQRLVRVL

SEQ ID NO: 72994 - protein, 8 aa, Homo Sapiens
AQRPTATY

SEQ ID NO: 72995 - protein, 8 aa, Homo Sapiens
AQTVGNTY

SEQ ID NO: 72996 - protein, 8 aa, Homo Sapiens
AQTVVVEY

SEQ ID NO: 72997 - protein, 8 aa, Homo Sapiens
ARVIIEKY

SEQ ID NO: 72998 - protein, 8 aa, Homo Sapiens
ASKVVTVF

SEQ ID NO: 72999 - protein, 8 aa, Homo Sapiens
AVYKVSEY

SEQ ID NO: 73000 - protein, 8 aa, Homo Sapiens
EEQLQQIR

SEQ ID NO: 73001 - protein, 8 aa, Homo Sapiens
EQRKIVEF

SEQ ID NO: 73002 - protein, 8 aa, Homo Sapiens
FNEKSKEL

SEQ ID NO: 73003 - protein, 8 aa, Homo Sapiens
FQHVGKAF

SEQ ID NO: 73004 - protein, 8 aa, Homo Sapiens
FQKIVVLF

SEQ ID NO: 73005 - protein, 8 aa, Homo Sapiens
FQKPISTL

SEQ ID NO: 73006 - protein, 8 aa, Homo Sapiens
FQKVITEY

SEQ ID NO: 73007 - protein, 8 aa, Homo Sapiens
FQMEQIVY

SEQ ID NO: 73008 - protein, 8 aa, Homo Sapiens
FQNDIHVY

SEQ ID NO: 73009 - protein, 8 aa, Homo Sapiens
FQTTISKY

SEQ ID NO: 73010 - protein, 8 aa, Homo Sapiens
GGKLMITY

SEQ ID NO: 73011 - protein, 8 aa, Homo Sapiens
GQAPGYSY

SEQ ID NO: 73012 - protein, 8 aa, Homo Sapiens
GQFGVGFY

SEQ ID NO: 73013 - protein, 8 aa, Homo Sapiens
GQHPALSY

SEQ ID NO: 73014 - protein, 8 aa, Homo Sapiens
GQIEVVKY

SEQ ID NO: 73015 - protein, 8 aa, Homo Sapiens
GQITHIQY

SEQ ID NO: 73016 - protein, 8 aa, Homo Sapiens
GQKKVEEL

SEQ ID NO: 73017 - protein, 8 aa, Homo Sapiens
GQKSLRSY

SEQ ID NO: 73018 - protein, 8 aa, Homo Sapiens
GQRLVYQF

SEQ ID NO: 73019 - protein, 8 aa, Homo Sapiens
GQRVIGHY

SEQ ID NO: 73020 - protein, 8 aa, Homo Sapiens
GQRVISMY

SEQ ID NO: 73021 - protein, 8 aa, Homo Sapiens
GQTLFAGY

SEQ ID NO: 73022 - protein, 8 aa, Homo Sapiens
GQTSIRPY

SEQ ID NO: 73023 - protein, 8 aa, Homo Sapiens
GQYTGHEY

SEQ ID NO: 73024 - protein, 8 aa, Homo Sapiens
GSIYIHVY

SEQ ID NO: 73025 - protein, 8 aa, Homo Sapiens
GSRVISHY

SEQ ID NO: 73026 - protein, 8 aa, Homo Sapiens
HGHLSAVY

SEQ ID NO: 73027 - protein, 8 aa, Homo Sapiens
HQFLQNEY

SEQ ID NO: 73028 - protein, 8 aa, Homo Sapiens
HQHLAAGY

SEQ ID NO: 73029 - protein, 8 aa, Homo Sapiens
HQHTISTL

SEQ ID NO: 73030 - protein, 8 aa, Homo Sapiens
HQHVPAGY

SEQ ID NO: 73031 - protein, 8 aa, Homo Sapiens
HQKQISSL

SEQ ID NO: 73032 - protein, 8 aa, Homo Sapiens
HQLAVTAY

SEQ ID NO: 73033 - protein, 8 aa, Homo Sapiens
HQNLIATY

SEQ ID NO: 73034 - protein, 8 aa, Homo Sapiens
HQNVSILY

SEQ ID NO: 73035 - protein, 8 aa, Homo Sapiens
HQREIFLF

SEQ ID NO: 73036 - protein, 8 aa, Homo Sapiens
HQREIQVM

SEQ ID NO: 73037 - protein, 8 aa, Homo Sapiens
HQREITSL

SEQ ID NO: 73038 - protein, 8 aa, Homo Sapiens
HQRLIFRL

SEQ ID NO: 73039 - protein, 8 aa, Homo Sapiens
HQVEIKVY

SEQ ID NO: 73040 - protein, 8 aa, Homo Sapiens
HQVVVAKY

SEQ ID NO: 73041 - protein, 8 aa, Homo Sapiens
HQYHIRAY

SEQ ID NO: 73042 - protein, 8 aa, Homo Sapiens
HQYKVRAY

SEQ ID NO: 73043 - protein, 8 aa, Homo Sapiens
HSKVLYVY

SEQ ID NO: 73044 - protein, 8 aa, Homo Sapiens
HSVLIHEY

SEQ ID NO: 73045 - protein, 8 aa, Homo Sapiens
HTFLHTVY

SEQ ID NO: 73046 - protein, 8 aa, Homo Sapiens
IGKVVQVY

SEQ ID NO: 73047 - protein, 8 aa, Homo Sapiens
IKDKQVKY

SEQ ID NO: 73048 - protein, 8 aa, Homo Sapiens
IKVGGERF

SEQ ID NO: 73049 - protein, 8 aa, Homo Sapiens
ILMPNIGY

SEQ ID NO: 73050 - protein, 8 aa, Homo Sapiens
IQHPSNVL

SEQ ID NO: 73051 - protein, 8 aa, Homo Sapiens
IQKIIETL

SEQ ID NO: 73052 - protein, 8 aa, Homo Sapiens
IQKNVQLY

SEQ ID NO: 73053 - protein, 8 aa, Homo Sapiens
IQKQVSVL

SEQ ID NO: 73054 - protein, 8 aa, Homo Sapiens
IQRKVEKL

SEQ ID NO: 73055 - protein, 8 aa, Homo Sapiens
IQTHVLSY

SEQ ID NO: 73056 - protein, 8 aa, Homo Sapiens
ISKALVAY

SEQ ID NO: 73057 - protein, 8 aa, Homo Sapiens
ISRELYEY

SEQ ID NO: 73058 - protein, 8 aa, Homo Sapiens
IVKEVSTY

SEQ ID NO: 73059 - protein, 8 aa, Homo Sapiens
KQFKSEAY

SEQ ID NO: 73060 - protein, 8 aa, Homo Sapiens
KQKLILKY

SEQ ID NO: 73061 - protein, 8 aa, Homo Sapiens
KQRQLTSY

SEQ ID NO: 73062 - protein, 8 aa, Homo Sapiens
KQYKVVVY

SEQ ID NO: 73063 - protein, 8 aa, Homo Sapiens
LAKQITSY

SEQ ID NO: 73064 - protein, 8 aa, Homo Sapiens
LAKQVIEY

SEQ ID NO: 73065 - protein, 8 aa, Homo Sapiens
LIKKDVNY

SEQ ID NO: 73066 - protein, 8 aa, Homo Sapiens
LKEKIAKY

SEQ ID NO: 73067 - protein, 8 aa, Homo Sapiens
LLKGIDRY

SEQ ID NO: 73068 - protein, 8 aa, Homo Sapiens
LNITNVAF

SEQ ID NO: 73069 - protein, 8 aa, Homo Sapiens
LQKLISQL

SEQ ID NO: 73070 - protein, 8 aa, Homo Sapiens
LQKQSVVY

SEQ ID NO: 73071 - protein, 8 aa, Homo Sapiens
LQKVITLY

SEQ ID NO: 73072 - protein, 8 aa, Homo Sapiens
LQNSVKQY

SEQ ID NO: 73073 - protein, 8 aa, Homo Sapiens
LQQAKDEI

SEQ ID NO: 73074 - protein, 8 aa, Homo Sapiens
LSKRQGLF

SEQ ID NO: 73075 - protein, 8 aa, Homo Sapiens
LVHLAIRF

SEQ ID NO: 73076 - protein, 8 aa, Homo Sapiens
LVKAGKVY

SEQ ID NO: 73077 - protein, 8 aa, Homo Sapiens
MQIFVKTL

SEQ ID NO: 73078 - protein, 8 aa, Homo Sapiens
MQKEITAL

SEQ ID NO: 73079 - protein, 8 aa, Homo Sapiens
MQRLIEKY

SEQ ID NO: 73080 - protein, 8 aa, Homo Sapiens
NQIVVSDY

SEQ ID NO: 73081 - protein, 8 aa, Homo Sapiens
NSKVVSQY

SEQ ID NO: 73082 - protein, 8 aa, Homo Sapiens
NTKLPSSF

SEQ ID NO: 73083 - protein, 8 aa, Homo Sapiens
PQMKVNEY

SEQ ID NO: 73084 - protein, 8 aa, Homo Sapiens
QALILKIA

SEQ ID NO: 73085 - protein, 8 aa, Homo Sapiens
QQNEVRVL

SEQ ID NO: 73086 - protein, 8 aa, Homo Sapiens
QQRVVRVY

SEQ ID NO: 73087 - protein, 8 aa, Homo Sapiens
RAKLLQKY

SEQ ID NO: 73088 - protein, 8 aa, Homo Sapiens
RIMKAQAY

SEQ ID NO: 73089 - protein, 8 aa, Homo Sapiens
RQFCTGEF

SEQ ID NO: 73090 - protein, 8 aa, Homo Sapiens
RQIEITIY

SEQ ID NO: 73091 - protein, 8 aa, Homo Sapiens
RQIGSRSY

SEQ ID NO: 73092 - protein, 8 aa, Homo Sapiens
RQKAVSLF

SEQ ID NO: 73093 - protein, 8 aa, Homo Sapiens
RQKQMKVL

SEQ ID NO: 73094 - protein, 8 aa, Homo Sapiens
RQKQVVIL

SEQ ID NO: 73095 - protein, 8 aa, Homo Sapiens
RQLEAARY

SEQ ID NO: 73096 - protein, 8 aa, Homo Sapiens
RQRIVQQY

SEQ ID NO: 73097 - protein, 8 aa, Homo Sapiens
SKEEAEAL

SEQ ID NO: 73098 - protein, 8 aa, Homo Sapiens
SKNLSSIS

SEQ ID NO: 73099 - protein, 8 aa, Homo Sapiens
SQAIIHQY

SEQ ID NO: 73100 - protein, 8 aa, Homo Sapiens
SQALIEAY

SEQ ID NO: 73101 - protein, 8 aa, Homo Sapiens
SQHASETF

SEQ ID NO: 73102 - protein, 8 aa, Homo Sapiens
SQHVVTNY

SEQ ID NO: 73103 - protein, 8 aa, Homo Sapiens
SQIQNREF

SEQ ID NO: 73104 - protein, 8 aa, Homo Sapiens
SQIRLIVY

SEQ ID NO: 73105 - protein, 8 aa, Homo Sapiens
SQKEKLSH

SEQ ID NO: 73106 - protein, 8 aa, Homo Sapiens
SQKEVVLY

SEQ ID NO: 73107 - protein, 8 aa, Homo Sapiens
SQLLVHVL

SEQ ID NO: 73108 - protein, 8 aa, Homo Sapiens
SQMVISFY

SEQ ID NO: 73109 - protein, 8 aa, Homo Sapiens
SQNFHTSY

SEQ ID NO: 73110 - protein, 8 aa, Homo Sapiens
SQNRVAEF

SEQ ID NO: 73111 - protein, 8 aa, Homo Sapiens
SQRAGLQF

SEQ ID NO: 73112 - protein, 8 aa, Homo Sapiens
SQRIFITY

SEQ ID NO: 73113 - protein, 8 aa, Homo Sapiens
SQRMVEGY

SEQ ID NO: 73114 - protein, 8 aa, Homo Sapiens
SQRSVRLY

SEQ ID NO: 73115 - protein, 8 aa, Homo Sapiens
SQYRIKEY

SEQ ID NO: 73116 - protein, 8 aa, Homo Sapiens
SSFKVAQY

SEQ ID NO: 73117 - protein, 8 aa, Homo Sapiens
TEELAYLK

SEQ ID NO: 73118 - protein, 8 aa, Homo Sapiens
TGKLISSY

SEQ ID NO: 73119 - protein, 8 aa, Homo Sapiens
TQKQVLNY

SEQ ID NO: 73120 - protein, 8 aa, Homo Sapiens
TQKVTAGY

SEQ ID NO: 73121 - protein, 8 aa, Homo Sapiens
TQRLISEL

SEQ ID NO: 73122 - protein, 8 aa, Homo Sapiens
TQRLVQVM

SEQ ID NO: 73123 - protein, 8 aa, Homo Sapiens
TQTLVREY

SEQ ID NO: 73124 - protein, 8 aa, Homo Sapiens
TQVILREY

SEQ ID NO: 73125 - protein, 8 aa, Homo Sapiens
TQVLNTHY

SEQ ID NO: 73126 - protein, 8 aa, Homo Sapiens
TQYIIHNY

SEQ ID NO: 73127 - protein, 8 aa, Homo Sapiens
TVGNNKTL

SEQ ID NO: 73128 - protein, 8 aa, Homo Sapiens
VAMYVHAY

SEQ ID NO: 73129 - protein, 8 aa, Homo Sapiens
VQELQNLL

SEQ ID NO: 73130 - protein, 8 aa, Homo Sapiens
VQKAIAHY

SEQ ID NO: 73131 - protein, 8 aa, Homo Sapiens
VQKAIPMY

SEQ ID NO: 73132 - protein, 8 aa, Homo Sapiens
VQKILQDY

SEQ ID NO: 73133 - protein, 8 aa, Homo Sapiens
VQQVAAEY

SEQ ID NO: 73134 - protein, 8 aa, Homo Sapiens
VQRAVCML

SEQ ID NO: 73135 - protein, 8 aa, Homo Sapiens
VQRNVNVF

SEQ ID NO: 73136 - protein, 8 aa, Homo Sapiens
VQRVASVM

SEQ ID NO: 73137 - protein, 8 aa, Homo Sapiens
VQTLVEKY

SEQ ID NO: 73138 - protein, 8 aa, Homo Sapiens
VSAVVHEY

SEQ ID NO: 73139 - protein, 8 aa, Homo Sapiens
VSKCLTEY

SEQ ID NO: 73140 - protein, 8 aa, Homo Sapiens
YHIRNQTY

SEQ ID NO: 73141 - protein, 8 aa, Homo Sapiens
YQKAIEVL

SEQ ID NO: 73142 - protein, 8 aa, Homo Sapiens
YQKEVSHL

SEQ ID NO: 73143 - protein, 8 aa, Homo Sapiens
YQKKLRSM

SEQ ID NO: 73144 - protein, 8 aa, Homo Sapiens
YQKLLKYY

SEQ ID NO: 73145 - protein, 8 aa, Homo Sapiens
YQQIIQTY

SEQ ID NO: 73146 - protein, 8 aa, Homo Sapiens
YQQTIKKY

SEQ ID NO: 73147 - protein, 8 aa, Homo Sapiens
YQSPVRVY

SEQ ID NO: 73148 - protein, 8 aa, Homo Sapiens
YQYTIRAH

SEQ ID NO: 73149 - protein, 8 aa, Homo Sapiens
YSHLVPVY

SEQ ID NO: 73150 - protein, 9 aa, Homo Sapiens
AAAAAAAAY

SEQ ID NO: 73151 - protein, 9 aa, Homo Sapiens
AAAAAAAQY

SEQ ID NO: 73152 - protein, 9 aa, Homo Sapiens
AAAAAQSVY

SEQ ID NO: 73153 - protein, 9 aa, Homo Sapiens
AAANPTLAF

SEQ ID NO: 73154 - protein, 9 aa, Homo Sapiens
AAAPAGTTF

SEQ ID NO: 73155 - protein, 9 aa, Homo Sapiens
AAAPPALCY

SEQ ID NO: 73156 - protein, 9 aa, Homo Sapiens
AAAPVIKAY

SEQ ID NO: 73157 - protein, 9 aa, Homo Sapiens
AAAVPRAAF

SEQ ID NO: 73158 - protein, 9 aa, Homo Sapiens
AAAVPTRSY

SEQ ID NO: 73159 - protein, 9 aa, Homo Sapiens
AACQIARAY

SEQ ID NO: 73160 - protein, 9 aa, Homo Sapiens
AAFPGASLY

SEQ ID NO: 73161 - protein, 9 aa, Homo Sapiens
AAHPSEATF

SEQ ID NO: 73162 - protein, 9 aa, Homo Sapiens
AAHTVTAAY

SEQ ID NO: 73163 - protein, 9 aa, Homo Sapiens
AAIRENPVY

SEQ ID NO: 73164 - protein, 9 aa, Homo Sapiens
AAMPRPVSY

SEQ ID NO: 73165 - protein, 9 aa, Homo Sapiens
AANPAYGRY

SEQ ID NO: 73166 - protein, 9 aa, Homo Sapiens
AANPHSFVF

SEQ ID NO: 73167 - protein, 9 aa, Homo Sapiens
AANPISGHY

SEQ ID NO: 73168 - protein, 9 aa, Homo Sapiens
AARVIIEKY

SEQ ID NO: 73169 - protein, 9 aa, Homo Sapiens
AASRIKTIY

SEQ ID NO: 73170 - protein, 9 aa, Homo Sapiens
AAVGTGSSY

SEQ ID NO: 73171 - protein, 9 aa, Homo Sapiens
AAYGYGIRY

SEQ ID NO: 73172 - protein, 9 aa, Homo Sapiens
AEKECKIEY

SEQ ID NO: 73173 - protein, 9 aa, Homo Sapiens
AERLVEIQY

SEQ ID NO: 73174 - protein, 9 aa, Homo Sapiens
AFIITGQTY

SEQ ID NO: 73175 - protein, 9 aa, Homo Sapiens
AFKKGDRVF

SEQ ID NO: 73176 - protein, 9 aa, Homo Sapiens
AGAPPGTAY

SEQ ID NO: 73177 - protein, 9 aa, Homo Sapiens
AGFAAIVAY

SEQ ID NO: 73178 - protein, 9 aa, Homo Sapiens
AGHAIITNY

SEQ ID NO: 73179 - protein, 9 aa, Homo Sapiens
AGHLSTAQY

SEQ ID NO: 73180 - protein, 9 aa, Homo Sapiens
AGIFPRLSF

SEQ ID NO: 73181 - protein, 9 aa, Homo Sapiens
AGKMITAAY

SEQ ID NO: 73182 - protein, 9 aa, Homo Sapiens
AGKTVVAEY

SEQ ID NO: 73183 - protein, 9 aa, Homo Sapiens
AGQKATAAF

SEQ ID NO: 73184 - protein, 9 aa, Homo Sapiens
AGRLLLENY

SEQ ID NO: 73185 - protein, 9 aa, Homo Sapiens
AIANLQRAY

SEQ ID NO: 73186 - protein, 9 aa, Homo Sapiens
AIAPNVTVM

SEQ ID NO: 73187 - protein, 9 aa, Homo Sapiens
AIATGGAVF

SEQ ID NO: 73188 - protein, 9 aa, Homo Sapiens
AIATLAACY

SEQ ID NO: 73189 - protein, 9 aa, Homo Sapiens
AIFPNGAAY

SEQ ID NO: 73190 - protein, 9 aa, Homo Sapiens
AIFPSPMMY

SEQ ID NO: 73191 - protein, 9 aa, Homo Sapiens
AIFRPGTSF

SEQ ID NO: 73192 - protein, 9 aa, Homo Sapiens
AIFSKNSKY

SEQ ID NO: 73193 - protein, 9 aa, Homo Sapiens
AIHTGEKPY

SEQ ID NO: 73194 - protein, 9 aa, Homo Sapiens
AIIADSSTF

SEQ ID NO: 73195 - protein, 9 aa, Homo Sapiens
AIIAPHAGY

SEQ ID NO: 73196 - protein, 9 aa, Homo Sapiens
AIIDILTHY

SEQ ID NO: 73197 - protein, 9 aa, Homo Sapiens
AIIDTVINY

SEQ ID NO: 73198 - protein, 9 aa, Homo Sapiens
AIIERTASF

SEQ ID NO: 73199 - protein, 9 aa, Homo Sapiens
AIIERVQRY

SEQ ID NO: 73200 - protein, 9 aa, Homo Sapiens
AIIPSHLAY

SEQ ID NO: 73201 - protein, 9 aa, Homo Sapiens
AIITPQTCY

SEQ ID NO: 73202 - protein, 9 aa, Homo Sapiens
AIITTHLQY

SEQ ID NO: 73203 - protein, 9 aa, Homo Sapiens
AIKAFIAVY

SEQ ID NO: 73204 - protein, 9 aa, Homo Sapiens
AIKDKQVKY

SEQ ID NO: 73205 - protein, 9 aa, Homo Sapiens
AIKGVGRRY

SEQ ID NO: 73206 - protein, 9 aa, Homo Sapiens
AIKIEVATY

SEQ ID NO: 73207 - protein, 9 aa, Homo Sapiens
AIKPGTPLY

SEQ ID NO: 73208 - protein, 9 aa, Homo Sapiens
AIKPTSKEF

SEQ ID NO: 73209 - protein, 9 aa, Homo Sapiens
AILDYYKTG

SEQ ID NO: 73210 - protein, 9 aa, Homo Sapiens
AINASTGNY

SEQ ID NO: 73211 - protein, 9 aa, Homo Sapiens
AIQEVMESY

SEQ ID NO: 73212 - protein, 9 aa, Homo Sapiens
AIQPGSINY

SEQ ID NO: 73213 - protein, 9 aa, Homo Sapiens
AIRKELNEF

SEQ ID NO: 73214 - protein, 9 aa, Homo Sapiens
AIRQQIESY

SEQ ID NO: 73215 - protein, 9 aa, Homo Sapiens
AIRVELVQY

SEQ ID NO: 73216 - protein, 9 aa, Homo Sapiens
AISPSSLTY

SEQ ID NO: 73217 - protein, 9 aa, Homo Sapiens
AIYGGSASY

SEQ ID NO: 73218 - protein, 9 aa, Homo Sapiens
AKAPPTACY

SEQ ID NO: 73219 - protein, 9 aa, Homo Sapiens
ALAADHTVY

SEQ ID NO: 73220 - protein, 9 aa, Homo Sapiens
ALAGTFHYY

SEQ ID NO: 73221 - protein, 9 aa, Homo Sapiens
ALAIMCRVY

SEQ ID NO: 73222 - protein, 9 aa, Homo Sapiens
ALAPAGFSY

SEQ ID NO: 73223 - protein, 9 aa, Homo Sapiens
ALAPSFVEF

SEQ ID NO: 73224 - protein, 9 aa, Homo Sapiens
ALASAVSGY

SEQ ID NO: 73225 - protein, 9 aa, Homo Sapiens
ALATALCPH

SEQ ID NO: 73226 - protein, 9 aa, Homo Sapiens
ALAVIITSY

SEQ ID NO: 73227 - protein, 9 aa, Homo Sapiens
ALCDIKQAY

SEQ ID NO: 73228 - protein, 9 aa, Homo Sapiens
ALCKLGVVY

SEQ ID NO: 73229 - protein, 9 aa, Homo Sapiens
ALFASQEKF

SEQ ID NO: 73230 - protein, 9 aa, Homo Sapiens
ALFAVPKNY

SEQ ID NO: 73231 - protein, 9 aa, Homo Sapiens
ALFGGSQKY

SEQ ID NO: 73232 - protein, 9 aa, Homo Sapiens
ALFLEHEGY

SEQ ID NO: 73233 - protein, 9 aa, Homo Sapiens
ALFRHEVGY

SEQ ID NO: 73234 - protein, 9 aa, Homo Sapiens
ALGSFVEEY

SEQ ID NO: 73235 - protein, 9 aa, Homo Sapiens
ALIEGGMKY

SEQ ID NO: 73236 - protein, 9 aa, Homo Sapiens
ALIKDREGY

SEQ ID NO: 73237 - protein, 9 aa, Homo Sapiens
ALIKSGLGF

SEQ ID NO: 73238 - protein, 9 aa, Homo Sapiens
ALIPETTTL

SEQ ID NO: 73239 - protein, 9 aa, Homo Sapiens
ALIQSFSHY

SEQ ID NO: 73240 - protein, 9 aa, Homo Sapiens
ALKECLTAY

SEQ ID NO: 73241 - protein, 9 aa, Homo Sapiens
ALKEDAATF

SEQ ID NO: 73242 - protein, 9 aa, Homo Sapiens
ALKEDMSGY

SEQ ID NO: 73243 - protein, 9 aa, Homo Sapiens
ALKIKEITY

SEQ ID NO: 73244 - protein, 9 aa, Homo Sapiens
ALKNPSEEY

SEQ ID NO: 73245 - protein, 9 aa, Homo Sapiens
ALKNRQELY

SEQ ID NO: 73246 - protein, 9 aa, Homo Sapiens
ALKNVTVSF

SEQ ID NO: 73247 - protein, 9 aa, Homo Sapiens
ALKPGLSAY

SEQ ID NO: 73248 - protein, 9 aa, Homo Sapiens
ALKPSVKVY

SEQ ID NO: 73249 - protein, 9 aa, Homo Sapiens
ALLKIEGVY

SEQ ID NO: 73250 - protein, 9 aa, Homo Sapiens
ALMGEHIHY

SEQ ID NO: 73251 - protein, 9 aa, Homo Sapiens
ALMPPFTAF

SEQ ID NO: 73252 - protein, 9 aa, Homo Sapiens
ALNDKGQVY

SEQ ID NO: 73253 - protein, 9 aa, Homo Sapiens
ALNIATHVL

SEQ ID NO: 73254 - protein, 9 aa, Homo Sapiens
ALNPESEQY

SEQ ID NO: 73255 - protein, 9 aa, Homo Sapiens
ALNPQNTVF

SEQ ID NO: 73256 - protein, 9 aa, Homo Sapiens
ALNSKATFY

SEQ ID NO: 73257 - protein, 9 aa, Homo Sapiens
ALNTIVTVY

SEQ ID NO: 73258 - protein, 9 aa, Homo Sapiens
ALPGHAESY

SEQ ID NO: 73259 - protein, 9 aa, Homo Sapiens
ALPPQQQHY

SEQ ID NO: 73260 - protein, 9 aa, Homo Sapiens
ALQEACEAY

SEQ ID NO: 73261 - protein, 9 aa, Homo Sapiens
ALQEASEAY

SEQ ID NO: 73262 - protein, 9 aa, Homo Sapiens
ALQKFTEAY

SEQ ID NO: 73263 - protein, 9 aa, Homo Sapiens
ALQRASTAL

SEQ ID NO: 73264 - protein, 9 aa, Homo Sapiens
ALRDVRQQY

SEQ ID NO: 73265 - protein, 9 aa, Homo Sapiens
ALREEVESF

SEQ ID NO: 73266 - protein, 9 aa, Homo Sapiens
ALRPGDPGF

SEQ ID NO: 73267 - protein, 9 aa, Homo Sapiens
ALRQMQVLY

SEQ ID NO: 73268 - protein, 9 aa, Homo Sapiens
ALSKGATVY

SEQ ID NO: 73269 - protein, 9 aa, Homo Sapiens
ALSLVRQLY

SEQ ID NO: 73270 - protein, 9 aa, Homo Sapiens
ALSPNAKEF

SEQ ID NO: 73271 - protein, 9 aa, Homo Sapiens
ALSPNHRIY

SEQ ID NO: 73272 - protein, 9 aa, Homo Sapiens
ALSPVRGCY

SEQ ID NO: 73273 - protein, 9 aa, Homo Sapiens
ALSQAVARY

SEQ ID NO: 73274 - protein, 9 aa, Homo Sapiens
ALTETGSVF

SEQ ID NO: 73275 - protein, 9 aa, Homo Sapiens
ALTTIFQKY

SEQ ID NO: 73276 - protein, 9 aa, Homo Sapiens
ALVASKVFY

SEQ ID NO: 73277 - protein, 9 aa, Homo Sapiens
ALVDIIHGY

SEQ ID NO: 73278 - protein, 9 aa, Homo Sapiens
ALVKAGKVY

SEQ ID NO: 73279 - protein, 9 aa, Homo Sapiens
ALVNAAVTY

SEQ ID NO: 73280 - protein, 9 aa, Homo Sapiens
ALVPPSADY

SEQ ID NO: 73281 - protein, 9 aa, Homo Sapiens
ALVSICNKY

SEQ ID NO: 73282 - protein, 9 aa, Homo Sapiens
ALYKKILKY

SEQ ID NO: 73283 - protein, 9 aa, Homo Sapiens
ALYPQTTCF

SEQ ID NO: 73284 - protein, 9 aa, Homo Sapiens
AMAEPNAKF

SEQ ID NO: 73285 - protein, 9 aa, Homo Sapiens
AMHPQVNIY

SEQ ID NO: 73286 - protein, 9 aa, Homo Sapiens
AMHSDSQTF

SEQ ID NO: 73287 - protein, 9 aa, Homo Sapiens
AMIDGQSAF

SEQ ID NO: 73288 - protein, 9 aa, Homo Sapiens
AMIDTGKAF

SEQ ID NO: 73289 - protein, 9 aa, Homo Sapiens
AMKKVFRVY

SEQ ID NO: 73290 - protein, 9 aa, Homo Sapiens
AMKLGEEAF

SEQ ID NO: 73291 - protein, 9 aa, Homo Sapiens
AMKPKPLSV

SEQ ID NO: 73292 - protein, 9 aa, Homo Sapiens
AMLRQLAQY

SEQ ID NO: 73293 - protein, 9 aa, Homo Sapiens
AMMGLAQIY

SEQ ID NO: 73294 - protein, 9 aa, Homo Sapiens
AMMHGGTGF

SEQ ID NO: 73295 - protein, 9 aa, Homo Sapiens
AMNPTNTVF

SEQ ID NO: 73296 - protein, 9 aa, Homo Sapiens
AMQQKPTAY

SEQ ID NO: 73297 - protein, 9 aa, Homo Sapiens
AMRIGAEVY

SEQ ID NO: 73298 - protein, 9 aa, Homo Sapiens
AMRPGLEGY

SEQ ID NO: 73299 - protein, 9 aa, Homo Sapiens
AMRWFQQKY

SEQ ID NO: 73300 - protein, 9 aa, Homo Sapiens
AMVGHQVSF

SEQ ID NO: 73301 - protein, 9 aa, Homo Sapiens
AMYPHIFYF

SEQ ID NO: 73302 - protein, 9 aa, Homo Sapiens
AMYPIRSAY

SEQ ID NO: 73303 - protein, 9 aa, Homo Sapiens
AMYSRKAMY

SEQ ID NO: 73304 - protein, 9 aa, Homo Sapiens
AQAAPKSLF

SEQ ID NO: 73305 - protein, 9 aa, Homo Sapiens
AQAAQQLQY

SEQ ID NO: 73306 - protein, 9 aa, Homo Sapiens
AQAASQHVF

SEQ ID NO: 73307 - protein, 9 aa, Homo Sapiens
AQAEKHFHY

SEQ ID NO: 73308 - protein, 9 aa, Homo Sapiens
AQAELESRY

SEQ ID NO: 73309 - protein, 9 aa, Homo Sapiens
AQAFIHNSL

SEQ ID NO: 73310 - protein, 9 aa, Homo Sapiens
AQAISRFAY

SEQ ID NO: 73311 - protein, 9 aa, Homo Sapiens
AQALVLQVF

SEQ ID NO: 73312 - protein, 9 aa, Homo Sapiens
AQAMYIDSY

SEQ ID NO: 73313 - protein, 9 aa, Homo Sapiens
AQAPAGTSF

SEQ ID NO: 73314 - protein, 9 aa, Homo Sapiens
AQAPAQSQF

SEQ ID NO: 73315 - protein, 9 aa, Homo Sapiens
AQAPIPAWF

SEQ ID NO: 73316 - protein, 9 aa, Homo Sapiens
AQAPPTAQL

SEQ ID NO: 73317 - protein, 9 aa, Homo Sapiens
AQAQIVQSW

SEQ ID NO: 73318 - protein, 9 aa, Homo Sapiens
AQAQLQKRY

SEQ ID NO: 73319 - protein, 9 aa, Homo Sapiens
AQCPIVERL

SEQ ID NO: 73320 - protein, 9 aa, Homo Sapiens
AQDEHLITF

SEQ ID NO: 73321 - protein, 9 aa, Homo Sapiens
AQDGPRVRY

SEQ ID NO: 73322 - protein, 9 aa, Homo Sapiens
AQEIVHCVF

SEQ ID NO: 73323 - protein, 9 aa, Homo Sapiens
AQERSRLTY

SEQ ID NO: 73324 - protein, 9 aa, Homo Sapiens
AQFETKKLY

SEQ ID NO: 73325 - protein, 9 aa, Homo Sapiens
AQFKGTQSL

SEQ ID NO: 73326 - protein, 9 aa, Homo Sapiens
AQFKTSNSY

SEQ ID NO: 73327 - protein, 9 aa, Homo Sapiens
AQFPGACGL

SEQ ID NO: 73328 - protein, 9 aa, Homo Sapiens
AQFPNGPQF

SEQ ID NO: 73329 - protein, 9 aa, Homo Sapiens
AQFPSSGRF

SEQ ID NO: 73330 - protein, 9 aa, Homo Sapiens
AQFRVTEAL

SEQ ID NO: 73331 - protein, 9 aa, Homo Sapiens
AQGVPRYSY

SEQ ID NO: 73332 - protein, 9 aa, Homo Sapiens
AQHGVCSVL

SEQ ID NO: 73333 - protein, 9 aa, Homo Sapiens
AQHIVTIVH

SEQ ID NO: 73334 - protein, 9 aa, Homo Sapiens
AQHLFIQTF

SEQ ID NO: 73335 - protein, 9 aa, Homo Sapiens
AQHLFLQAF

SEQ ID NO: 73336 - protein, 9 aa, Homo Sapiens
AQHLSQLLF

SEQ ID NO: 73337 - protein, 9 aa, Homo Sapiens
AQHLTVSGF

SEQ ID NO: 73338 - protein, 9 aa, Homo Sapiens
AQHPNIVTV

SEQ ID NO: 73339 - protein, 9 aa, Homo Sapiens
AQHPSALRF

SEQ ID NO: 73340 - protein, 9 aa, Homo Sapiens
AQHSYFGSF

SEQ ID NO: 73341 - protein, 9 aa, Homo Sapiens
AQHYTETAL

SEQ ID NO: 73342 - protein, 9 aa, Homo Sapiens
AQIDSNIAH

SEQ ID NO: 73343 - protein, 9 aa, Homo Sapiens
AQIEGVVPF

SEQ ID NO: 73344 - protein, 9 aa, Homo Sapiens
AQIENKEAY

SEQ ID NO: 73345 - protein, 9 aa, Homo Sapiens
AQIFRPLKF

SEQ ID NO: 73346 - protein, 9 aa, Homo Sapiens
AQIKEMVEL

SEQ ID NO: 73347 - protein, 9 aa, Homo Sapiens
AQIKFLNTY

SEQ ID NO: 73348 - protein, 9 aa, Homo Sapiens
AQIKHLARL

SEQ ID NO: 73349 - protein, 9 aa, Homo Sapiens
AQIKVTKEL

SEQ ID NO: 73350 - protein, 9 aa, Homo Sapiens
AQIPPHAVM

SEQ ID NO: 73351 - protein, 9 aa, Homo Sapiens
AQIRETETF

SEQ ID NO: 73352 - protein, 9 aa, Homo Sapiens
AQIVGLNCL

SEQ ID NO: 73353 - protein, 9 aa, Homo Sapiens
AQIVHAISY

SEQ ID NO: 73354 - protein, 9 aa, Homo Sapiens
AQIVSATAI

SEQ ID NO: 73355 - protein, 9 aa, Homo Sapiens
AQIVTRSVL

SEQ ID NO: 73356 - protein, 9 aa, Homo Sapiens
AQIVVPVTF

SEQ ID NO: 73357 - protein, 9 aa, Homo Sapiens
AQIYQLIEY

SEQ ID NO: 73358 - protein, 9 aa, Homo Sapiens
AQKDHLSKL

SEQ ID NO: 73359 - protein, 9 aa, Homo Sapiens
AQKDQEIAF

SEQ ID NO: 73360 - protein, 9 aa, Homo Sapiens
AQKGGAAGF

SEQ ID NO: 73361 - protein, 9 aa, Homo Sapiens
AQKGLQVDL

SEQ ID NO: 73362 - protein, 9 aa, Homo Sapiens
AQKIDLPEY

SEQ ID NO: 73363 - protein, 9 aa, Homo Sapiens
AQKKLISQV

SEQ ID NO: 73364 - protein, 9 aa, Homo Sapiens
AQKKLLSKM

SEQ ID NO: 73365 - protein, 9 aa, Homo Sapiens
AQKLLSEAL

SEQ ID NO: 73366 - protein, 9 aa, Homo Sapiens
AQKMQTVTA

SEQ ID NO: 73367 - protein, 9 aa, Homo Sapiens
AQKNHIPVF

SEQ ID NO: 73368 - protein, 9 aa, Homo Sapiens
AQKPLPQAL

SEQ ID NO: 73369 - protein, 9 aa, Homo Sapiens
AQKPQLLRH

SEQ ID NO: 73370 - protein, 9 aa, Homo Sapiens
AQKSDIVQL

SEQ ID NO: 73371 - protein, 9 aa, Homo Sapiens
AQKSISQHY

SEQ ID NO: 73372 - protein, 9 aa, Homo Sapiens
AQKVAISEF

SEQ ID NO: 73373 - protein, 9 aa, Homo Sapiens
AQKVGAVAA

SEQ ID NO: 73374 - protein, 9 aa, Homo Sapiens
AQKVIAVVM

SEQ ID NO: 73375 - protein, 9 aa, Homo Sapiens
AQKVIKSQL

SEQ ID NO: 73376 - protein, 9 aa, Homo Sapiens
AQKVIYTLM

SEQ ID NO: 73377 - protein, 9 aa, Homo Sapiens
AQKVSSQSF

SEQ ID NO: 73378 - protein, 9 aa, Homo Sapiens
AQLAAAEKF

SEQ ID NO: 73379 - protein, 9 aa, Homo Sapiens
AQLERQLQF

SEQ ID NO: 73380 - protein, 9 aa, Homo Sapiens
AQLGLGHSY

SEQ ID NO: 73381 - protein, 9 aa, Homo Sapiens
AQLKDYITY

SEQ ID NO: 73382 - protein, 9 aa, Homo Sapiens
AQLPEKVEY

SEQ ID NO: 73383 - protein, 9 aa, Homo Sapiens
AQLRNLEAY

SEQ ID NO: 73384 - protein, 9 aa, Homo Sapiens
AQLSKQSSF

SEQ ID NO: 73385 - protein, 9 aa, Homo Sapiens
AQLWTDLQY

SEQ ID NO: 73386 - protein, 9 aa, Homo Sapiens
AQMAQVLQF

SEQ ID NO: 73387 - protein, 9 aa, Homo Sapiens
AQMAYPTAY

SEQ ID NO: 73388 - protein, 9 aa, Homo Sapiens
AQMKPIFSF

SEQ ID NO: 73389 - protein, 9 aa, Homo Sapiens
AQNASRNTF

SEQ ID NO: 73390 - protein, 9 aa, Homo Sapiens
AQNAVRLHY

SEQ ID NO: 73391 - protein, 9 aa, Homo Sapiens
AQNGPNTSL

SEQ ID NO: 73392 - protein, 9 aa, Homo Sapiens
AQNICTSKL

SEQ ID NO: 73393 - protein, 9 aa, Homo Sapiens
AQNLHNSYY

SEQ ID NO: 73394 - protein, 9 aa, Homo Sapiens
AQNLSIIQY

SEQ ID NO: 73395 - protein, 9 aa, Homo Sapiens
AQNPLLCAF

SEQ ID NO: 73396 - protein, 9 aa, Homo Sapiens
AQNPRPTRL

SEQ ID NO: 73397 - protein, 9 aa, Homo Sapiens
AQNRFLLEL

SEQ ID NO: 73398 - protein, 9 aa, Homo Sapiens
AQNRKLIEF

SEQ ID NO: 73399 - protein, 9 aa, Homo Sapiens
AQNVSCASF

SEQ ID NO: 73400 - protein, 9 aa, Homo Sapiens
AQPALKTQF

SEQ ID NO: 73401 - protein, 9 aa, Homo Sapiens
AQPATAAAY

SEQ ID NO: 73402 - protein, 9 aa, Homo Sapiens
AQPEISRAF

SEQ ID NO: 73403 - protein, 9 aa, Homo Sapiens
AQPEPSTGF

SEQ ID NO: 73404 - protein, 9 aa, Homo Sapiens
AQPETRVSY

SEQ ID NO: 73405 - protein, 9 aa, Homo Sapiens
AQPHHGVPY

SEQ ID NO: 73406 - protein, 9 aa, Homo Sapiens
AQPKGVLLY

SEQ ID NO: 73407 - protein, 9 aa, Homo Sapiens
AQPKPATAL

SEQ ID NO: 73408 - protein, 9 aa, Homo Sapiens
AQPPVGAAY

SEQ ID NO: 73409 - protein, 9 aa, Homo Sapiens
AQPPVSTEY

SEQ ID NO: 73410 - protein, 9 aa, Homo Sapiens
AQQDLQSKF

SEQ ID NO: 73411 - protein, 9 aa, Homo Sapiens
AQQEARTEF

SEQ ID NO: 73412 - protein, 9 aa, Homo Sapiens
AQQIQKVVM

SEQ ID NO: 73413 - protein, 9 aa, Homo Sapiens
AQQKAMKSL

SEQ ID NO: 73414 - protein, 9 aa, Homo Sapiens
AQQKKSLSL

SEQ ID NO: 73415 - protein, 9 aa, Homo Sapiens
AQQKNLEGY

SEQ ID NO: 73416 - protein, 9 aa, Homo Sapiens
AQQLQGQQF

SEQ ID NO: 73417 - protein, 9 aa, Homo Sapiens
AQQPCYLLY

SEQ ID NO: 73418 - protein, 9 aa, Homo Sapiens
AQQRYATSF

SEQ ID NO: 73419 - protein, 9 aa, Homo Sapiens
AQQSEPIAY

SEQ ID NO: 73420 - protein, 9 aa, Homo Sapiens
AQQSIREKY

SEQ ID NO: 73421 - protein, 9 aa, Homo Sapiens
AQQVVLSSY

SEQ ID NO: 73422 - protein, 9 aa, Homo Sapiens
AQRAINNEM

SEQ ID NO: 73423 - protein, 9 aa, Homo Sapiens
AQRASSNVF

SEQ ID NO: 73424 - protein, 9 aa, Homo Sapiens
AQRDIIFEL

SEQ ID NO: 73425 - protein, 9 aa, Homo Sapiens
AQREDELTF

SEQ ID NO: 73426 - protein, 9 aa, Homo Sapiens
AQREKQEIL

SEQ ID NO: 73427 - protein, 9 aa, Homo Sapiens
AQRFFAQKF

SEQ ID NO: 73428 - protein, 9 aa, Homo Sapiens
AQRGIGVAA

SEQ ID NO: 73429 - protein, 9 aa, Homo Sapiens
AQRILRVNL

SEQ ID NO: 73430 - protein, 9 aa, Homo Sapiens
AQRIQNGSY

SEQ ID NO: 73431 - protein, 9 aa, Homo Sapiens
AQRKFGVVL

SEQ ID NO: 73432 - protein, 9 aa, Homo Sapiens
AQRKTLSGF

SEQ ID NO: 73433 - protein, 9 aa, Homo Sapiens
AQRLLEVTA

SEQ ID NO: 73434 - protein, 9 aa, Homo Sapiens
AQRPGPMEL

SEQ ID NO: 73435 - protein, 9 aa, Homo Sapiens
AQRPNLIGL

SEQ ID NO: 73436 - protein, 9 aa, Homo Sapiens
AQRPNPVQL

SEQ ID NO: 73437 - protein, 9 aa, Homo Sapiens
AQRPSSPAL

SEQ ID NO: 73438 - protein, 9 aa, Homo Sapiens
AQRPTEQEL

SEQ ID NO: 73439 - protein, 9 aa, Homo Sapiens
AQRRLKAEL

SEQ ID NO: 73440 - protein, 9 aa, Homo Sapiens
AQRTPVQMM

SEQ ID NO: 73441 - protein, 9 aa, Homo Sapiens
AQRVLTQTA

SEQ ID NO: 73442 - protein, 9 aa, Homo Sapiens
AQRYNELSY

SEQ ID NO: 73443 - protein, 9 aa, Homo Sapiens
AQSDFISAF

SEQ ID NO: 73444 - protein, 9 aa, Homo Sapiens
AQSHLVTGY

SEQ ID NO: 73445 - protein, 9 aa, Homo Sapiens
AQSHVKISF

SEQ ID NO: 73446 - protein, 9 aa, Homo Sapiens
AQSPIPNLY

SEQ ID NO: 73447 - protein, 9 aa, Homo Sapiens
AQSPLCRSL

SEQ ID NO: 73448 - protein, 9 aa, Homo Sapiens
AQSRFLSTY

SEQ ID NO: 73449 - protein, 9 aa, Homo Sapiens
AQSSLQEVY

SEQ ID NO: 73450 - protein, 9 aa, Homo Sapiens
AQTPGAHHF

SEQ ID NO: 73451 - protein, 9 aa, Homo Sapiens
AQVDGGANF

SEQ ID NO: 73452 - protein, 9 aa, Homo Sapiens
AQVIVFQTY

SEQ ID NO: 73453 - protein, 9 aa, Homo Sapiens
AQVKKATVF

SEQ ID NO: 73454 - protein, 9 aa, Homo Sapiens
AQVKPDGTY

SEQ ID NO: 73455 - protein, 9 aa, Homo Sapiens
AQVLSVVAH

SEQ ID NO: 73456 - protein, 9 aa, Homo Sapiens
AQVPKSSAL

SEQ ID NO: 73457 - protein, 9 aa, Homo Sapiens
AQVSKVEAL

SEQ ID NO: 73458 - protein, 9 aa, Homo Sapiens
AQVSRRISF

SEQ ID NO: 73459 - protein, 9 aa, Homo Sapiens
AQVVLYRSY

SEQ ID NO: 73460 - protein, 9 aa, Homo Sapiens
AQVVQWVSF

SEQ ID NO: 73461 - protein, 9 aa, Homo Sapiens
AQVWMITRY

SEQ ID NO: 73462 - protein, 9 aa, Homo Sapiens
AQYGKLESL

SEQ ID NO: 73463 - protein, 9 aa, Homo Sapiens
AQYKARVAL

SEQ ID NO: 73464 - protein, 9 aa, Homo Sapiens
AQYKEISKF

SEQ ID NO: 73465 - protein, 9 aa, Homo Sapiens
AQYLINARL

SEQ ID NO: 73466 - protein, 9 aa, Homo Sapiens
AQYLINVRL

SEQ ID NO: 73467 - protein, 9 aa, Homo Sapiens
AQYLPKEQY

SEQ ID NO: 73468 - protein, 9 aa, Homo Sapiens
AQYQSVPVY

SEQ ID NO: 73469 - protein, 9 aa, Homo Sapiens
AQYREVAAF

SEQ ID NO: 73470 - protein, 9 aa, Homo Sapiens
ASAAPHTSF

SEQ ID NO: 73471 - protein, 9 aa, Homo Sapiens
ASIEEKVAY

SEQ ID NO: 73472 - protein, 9 aa, Homo Sapiens
ASKEEATTF

SEQ ID NO: 73473 - protein, 9 aa, Homo Sapiens
ASNPRQAAY

SEQ ID NO: 73474 - protein, 9 aa, Homo Sapiens
ASNPRVTRF

SEQ ID NO: 73475 - protein, 9 aa, Homo Sapiens
ASQAGMTAY

SEQ ID NO: 73476 - protein, 9 aa, Homo Sapiens
ASQAVGETY

SEQ ID NO: 73477 - protein, 9 aa, Homo Sapiens
ASQKGMSVY

SEQ ID NO: 73478 - protein, 9 aa, Homo Sapiens
ASSPAAVSY

SEQ ID NO: 73479 - protein, 9 aa, Homo Sapiens
ASSPPHLQF

SEQ ID NO: 73480 - protein, 9 aa, Homo Sapiens
ASYEVKELY

SEQ ID NO: 73481 - protein, 9 aa, Homo Sapiens
ATAAAAAAY

SEQ ID NO: 73482 - protein, 9 aa, Homo Sapiens
ATAPPAPAY

SEQ ID NO: 73483 - protein, 9 aa, Homo Sapiens
ATGPPNTSY

SEQ ID NO: 73484 - protein, 9 aa, Homo Sapiens
ATHQNLTSY

SEQ ID NO: 73485 - protein, 9 aa, Homo Sapiens
ATPDIKSHY

SEQ ID NO: 73486 - protein, 9 aa, Homo Sapiens
ATSGVHSNF

SEQ ID NO: 73487 - protein, 9 aa, Homo Sapiens
AVAAPSSTF

SEQ ID NO: 73488 - protein, 9 aa, Homo Sapiens
AVAEPVVSY

SEQ ID NO: 73489 - protein, 9 aa, Homo Sapiens
AVAGARDTY

SEQ ID NO: 73490 - protein, 9 aa, Homo Sapiens
AVAGMKMSY

SEQ ID NO: 73491 - protein, 9 aa, Homo Sapiens
AVAKPFITY

SEQ ID NO: 73492 - protein, 9 aa, Homo Sapiens
AVALDNSVY

SEQ ID NO: 73493 - protein, 9 aa, Homo Sapiens
AVAPFFKSY

SEQ ID NO: 73494 - protein, 9 aa, Homo Sapiens
AVAPPGCSH

SEQ ID NO: 73495 - protein, 9 aa, Homo Sapiens
AVAPPSTSA

SEQ ID NO: 73496 - protein, 9 aa, Homo Sapiens
AVAPVASAL

SEQ ID NO: 73497 - protein, 9 aa, Homo Sapiens
AVAPVSAVH

SEQ ID NO: 73498 - protein, 9 aa, Homo Sapiens
AVAVGHRVY

SEQ ID NO: 73499 - protein, 9 aa, Homo Sapiens
AVCDRISRY

SEQ ID NO: 73500 - protein, 9 aa, Homo Sapiens
AVCEVALDY

SEQ ID NO: 73501 - protein, 9 aa, Homo Sapiens
AVCEVVTQF

SEQ ID NO: 73502 - protein, 9 aa, Homo Sapiens
AVFEEIDTY

SEQ ID NO: 73503 - protein, 9 aa, Homo Sapiens
AVFNHTEDY

SEQ ID NO: 73504 - protein, 9 aa, Homo Sapiens
AVGFPTHLY

SEQ ID NO: 73505 - protein, 9 aa, Homo Sapiens
AVGPRVFQY

SEQ ID NO: 73506 - protein, 9 aa, Homo Sapiens
AVHDITVAY

SEQ ID NO: 73507 - protein, 9 aa, Homo Sapiens
AVHPGNMMY

SEQ ID NO: 73508 - protein, 9 aa, Homo Sapiens
AVIAHQDSY

SEQ ID NO: 73509 - protein, 9 aa, Homo Sapiens
AVIAIFKSY

SEQ ID NO: 73510 - protein, 9 aa, Homo Sapiens
AVIAPKSSY

SEQ ID NO: 73511 - protein, 9 aa, Homo Sapiens
AVIEDTWHY

SEQ ID NO: 73512 - protein, 9 aa, Homo Sapiens
AVIKIQSSY

SEQ ID NO: 73513 - protein, 9 aa, Homo Sapiens
AVIKSNHSY

SEQ ID NO: 73514 - protein, 9 aa, Homo Sapiens
AVISSVAHY

SEQ ID NO: 73515 - protein, 9 aa, Homo Sapiens
AVISTILKY

SEQ ID NO: 73516 - protein, 9 aa, Homo Sapiens
AVKAELRQY

SEQ ID NO: 73517 - protein, 9 aa, Homo Sapiens
AVKAIIYQY

SEQ ID NO: 73518 - protein, 9 aa, Homo Sapiens
AVKFPEITY

SEQ ID NO: 73519 - protein, 9 aa, Homo Sapiens
AVKPDQIQY

SEQ ID NO: 73520 - protein, 9 aa, Homo Sapiens
AVKVSPVSY

SEQ ID NO: 73521 - protein, 9 aa, Homo Sapiens
AVNALQSVY

SEQ ID NO: 73522 - protein, 9 aa, Homo Sapiens
AVNEAIKSY

SEQ ID NO: 73523 - protein, 9 aa, Homo Sapiens
AVNGHTNSF

SEQ ID NO: 73524 - protein, 9 aa, Homo Sapiens
AVNKVIKSY

SEQ ID NO: 73525 - protein, 9 aa, Homo Sapiens
AVNSLISKY

SEQ ID NO: 73526 - protein, 9 aa, Homo Sapiens
AVNVGVTAY

SEQ ID NO: 73527 - protein, 9 aa, Homo Sapiens
AVQKAIAHY

SEQ ID NO: 73528 - protein, 9 aa, Homo Sapiens
AVQKAIPMY

SEQ ID NO: 73529 - protein, 9 aa, Homo Sapiens
AVRDHNVEF

SEQ ID NO: 73530 - protein, 9 aa, Homo Sapiens
AVRDYEKVY

SEQ ID NO: 73531 - protein, 9 aa, Homo Sapiens
AVRHTIQVY

SEQ ID NO: 73532 - protein, 9 aa, Homo Sapiens
AVRPFGCSF

SEQ ID NO: 73533 - protein, 9 aa, Homo Sapiens
AVRPGLPAY

SEQ ID NO: 73534 - protein, 9 aa, Homo Sapiens
AVRPLELAY

SEQ ID NO: 73535 - protein, 9 aa, Homo Sapiens
AVRSGIVEY

SEQ ID NO: 73536 - protein, 9 aa, Homo Sapiens
AVRTTGNVY

SEQ ID NO: 73537 - protein, 9 aa, Homo Sapiens
AVSAVVHEY

SEQ ID NO: 73538 - protein, 9 aa, Homo Sapiens
AVSKPGMDY

SEQ ID NO: 73539 - protein, 9 aa, Homo Sapiens
AVSPAVPVY

SEQ ID NO: 73540 - protein, 9 aa, Homo Sapiens
AVSPLARSY

SEQ ID NO: 73541 - protein, 9 aa, Homo Sapiens
AVSPSSVFY

SEQ ID NO: 73542 - protein, 9 aa, Homo Sapiens
AVSQIVTVY

SEQ ID NO: 73543 - protein, 9 aa, Homo Sapiens
AVTASIHVY

SEQ ID NO: 73544 - protein, 9 aa, Homo Sapiens
AVTHIGRVY

SEQ ID NO: 73545 - protein, 9 aa, Homo Sapiens
AVTVSGHVY

SEQ ID NO: 73546 - protein, 9 aa, Homo Sapiens
AVYKEAQYY

SEQ ID NO: 73547 - protein, 9 aa, Homo Sapiens
AVYPVRSAY

SEQ ID NO: 73548 - protein, 9 aa, Homo Sapiens
CAPRRKVAL

SEQ ID NO: 73549 - protein, 9 aa, Homo Sapiens
CVAPTIHVY

SEQ ID NO: 73550 - protein, 9 aa, Homo Sapiens
CVKPDVHVY

SEQ ID NO: 73551 - protein, 9 aa, Homo Sapiens
DRIINTLSI

SEQ ID NO: 73552 - protein, 9 aa, Homo Sapiens
ELKAPGISY

SEQ ID NO: 73553 - protein, 9 aa, Homo Sapiens
EMMKVVQVY

SEQ ID NO: 73554 - protein, 9 aa, Homo Sapiens
EQILATAVY

SEQ ID NO: 73555 - protein, 9 aa, Homo Sapiens
EQRSGDITY

SEQ ID NO: 73556 - protein, 9 aa, Homo Sapiens
EQYEQILAF

SEQ ID NO: 73557 - protein, 9 aa, Homo Sapiens
ESRQITQVY

SEQ ID NO: 73558 - protein, 9 aa, Homo Sapiens
EVAPAGASY

SEQ ID NO: 73559 - protein, 9 aa, Homo Sapiens
EVGDKVVIF

SEQ ID NO: 73560 - protein, 9 aa, Homo Sapiens
FAFEHSEEY

SEQ ID NO: 73561 - protein, 9 aa, Homo Sapiens
FANLPNQVY

SEQ ID NO: 73562 - protein, 9 aa, Homo Sapiens
FEKSTGLPH

SEQ ID NO: 73563 - protein, 9 aa, Homo Sapiens
FFLLAYDLY

SEQ ID NO: 73564 - protein, 9 aa, Homo Sapiens
FGKAPGTPH

SEQ ID NO: 73565 - protein, 9 aa, Homo Sapiens
FGKLIDLAY

SEQ ID NO: 73566 - protein, 9 aa, Homo Sapiens
FIAPTGHSL

SEQ ID NO: 73567 - protein, 9 aa, Homo Sapiens
FIKDGSSTY

SEQ ID NO: 73568 - protein, 9 aa, Homo Sapiens
FIMGKTIEF

SEQ ID NO: 73569 - protein, 9 aa, Homo Sapiens
FIRPVDPEY

SEQ ID NO: 73570 - protein, 9 aa, Homo Sapiens
FLAPLVTEY

SEQ ID NO: 73571 - protein, 9 aa, Homo Sapiens
FLCGVMKTY

SEQ ID NO: 73572 - protein, 9 aa, Homo Sapiens
FLFDGSPTY

SEQ ID NO: 73573 - protein, 9 aa, Homo Sapiens
FLMKNSDLY

SEQ ID NO: 73574 - protein, 9 aa, Homo Sapiens
FLQESNVLY

SEQ ID NO: 73575 - protein, 9 aa, Homo Sapiens
FMKPSHQGY

SEQ ID NO: 73576 - protein, 9 aa, Homo Sapiens
FMQPGGTKY

SEQ ID NO: 73577 - protein, 9 aa, Homo Sapiens
FMSEISDEF

SEQ ID NO: 73578 - protein, 9 aa, Homo Sapiens
FQAMGKTSF

SEQ ID NO: 73579 - protein, 9 aa, Homo Sapiens
FQAPTAKEM

SEQ ID NO: 73580 - protein, 9 aa, Homo Sapiens
FQFIMKQSY

SEQ ID NO: 73581 - protein, 9 aa, Homo Sapiens
FQIMNEIVY

SEQ ID NO: 73582 - protein, 9 aa, Homo Sapiens
FQKILTLTY

SEQ ID NO: 73583 - protein, 9 aa, Homo Sapiens
FQKIVVLFY

SEQ ID NO: 73584 - protein, 9 aa, Homo Sapiens
FQKPSGVSA

SEQ ID NO: 73585 - protein, 9 aa, Homo Sapiens
FQKQLLEDY

SEQ ID NO: 73586 - protein, 9 aa, Homo Sapiens
FQKVILDGY

SEQ ID NO: 73587 - protein, 9 aa, Homo Sapiens
FQKVITEYL

SEQ ID NO: 73588 - protein, 9 aa, Homo Sapiens
FQNNTTNRY

SEQ ID NO: 73589 - protein, 9 aa, Homo Sapiens
FQQDLEAKY

SEQ ID NO: 73590 - protein, 9 aa, Homo Sapiens
FQQIYARQY

SEQ ID NO: 73591 - protein, 9 aa, Homo Sapiens
FQQLIQSSF

SEQ ID NO: 73592 - protein, 9 aa, Homo Sapiens
FQRGYYRYY

SEQ ID NO: 73593 - protein, 9 aa, Homo Sapiens
FQRNIKKEY

SEQ ID NO: 73594 - protein, 9 aa, Homo Sapiens
FQSLPKSAF

SEQ ID NO: 73595 - protein, 9 aa, Homo Sapiens
FQSSAVMAL

SEQ ID NO: 73596 - protein, 9 aa, Homo Sapiens
FQTPEHVCF

SEQ ID NO: 73597 - protein, 9 aa, Homo Sapiens
FQYESKVFY

SEQ ID NO: 73598 - protein, 9 aa, Homo Sapiens
FSKDIVENY

SEQ ID NO: 73599 - protein, 9 aa, Homo Sapiens
FVAEERKHY

SEQ ID NO: 73600 - protein, 9 aa, Homo Sapiens
FVAEERVSF

SEQ ID NO: 73601 - protein, 9 aa, Homo Sapiens
FVAEQKVEY

SEQ ID NO: 73602 - protein, 9 aa, Homo Sapiens
FVEVGRVAY

SEQ ID NO: 73603 - protein, 9 aa, Homo Sapiens
FVIEEKHGF

SEQ ID NO: 73604 - protein, 9 aa, Homo Sapiens
FVKDEKTRF

SEQ ID NO: 73605 - protein, 9 aa, Homo Sapiens
FVKDSGACF

SEQ ID NO: 73606 - protein, 9 aa, Homo Sapiens
FVYKGGKIY

SEQ ID NO: 73607 - protein, 9 aa, Homo Sapiens
GAHLDLSAF

SEQ ID NO: 73608 - protein, 9 aa, Homo Sapiens
GAKISIMTY

SEQ ID NO: 73609 - protein, 9 aa, Homo Sapiens
GANQSGQVF

SEQ ID NO: 73610 - protein, 9 aa, Homo Sapiens
GAYEQVIKY

SEQ ID NO: 73611 - protein, 9 aa, Homo Sapiens
GAYGQAVRY

SEQ ID NO: 73612 - protein, 9 aa, Homo Sapiens
GEMPTSVAY

SEQ ID NO: 73613 - protein, 9 aa, Homo Sapiens
GGPGGVGGL

SEQ ID NO: 73614 - protein, 9 aa, Homo Sapiens
GIARFFTEY

SEQ ID NO: 73615 - protein, 9 aa, Homo Sapiens
GIFGKGSAY

SEQ ID NO: 73616 - protein, 9 aa, Homo Sapiens
GIHPDDLSF

SEQ ID NO: 73617 - protein, 9 aa, Homo Sapiens
GIHSGEKPY

SEQ ID NO: 73618 - protein, 9 aa, Homo Sapiens
GIHTGQFVY

SEQ ID NO: 73619 - protein, 9 aa, Homo Sapiens
GIIPVGGTY

SEQ ID NO: 73620 - protein, 9 aa, Homo Sapiens
GIIRPGTAF

SEQ ID NO: 73621 - protein, 9 aa, Homo Sapiens
GINISGNFY

SEQ ID NO: 73622 - protein, 9 aa, Homo Sapiens
GIREEEVSY

SEQ ID NO: 73623 - protein, 9 aa, Homo Sapiens
GIYPHKLVF

SEQ ID NO: 73624 - protein, 9 aa, Homo Sapiens
GLAYICQTY

SEQ ID NO: 73625 - protein, 9 aa, Homo Sapiens
GLFQGKTPL

SEQ ID NO: 73626 - protein, 9 aa, Homo Sapiens
GLGSGGSIR

SEQ ID NO: 73627 - protein, 9 aa, Homo Sapiens
GLHPERVSY

SEQ ID NO: 73628 - protein, 9 aa, Homo Sapiens
GLHSVDVTY

SEQ ID NO: 73629 - protein, 9 aa, Homo Sapiens
GLKDKETRY

SEQ ID NO: 73630 - protein, 9 aa, Homo Sapiens
GLKPSTSKY

SEQ ID NO: 73631 - protein, 9 aa, Homo Sapiens
GLMKANHVF

SEQ ID NO: 73632 - protein, 9 aa, Homo Sapiens
GLMKGKHYY

SEQ ID NO: 73633 - protein, 9 aa, Homo Sapiens
GLNKVSPVY

SEQ ID NO: 73634 - protein, 9 aa, Homo Sapiens
GLRAPVSAY

SEQ ID NO: 73635 - protein, 9 aa, Homo Sapiens
GLSGLHRTY

SEQ ID NO: 73636 - protein, 9 aa, Homo Sapiens
GLSKPVSSY

SEQ ID NO: 73637 - protein, 9 aa, Homo Sapiens
GLYRTGKSY

SEQ ID NO: 73638 - protein, 9 aa, Homo Sapiens
GMIDAARTY

SEQ ID NO: 73639 - protein, 9 aa, Homo Sapiens
GMQIPSTQF

SEQ ID NO: 73640 - protein, 9 aa, Homo Sapiens
GMYGKIAVM

SEQ ID NO: 73641 - protein, 9 aa, Homo Sapiens
GQADVISKL

SEQ ID NO: 73642 - protein, 9 aa, Homo Sapiens
GQAGMHATY

SEQ ID NO: 73643 - protein, 9 aa, Homo Sapiens
GQANKVMIY

SEQ ID NO: 73644 - protein, 9 aa, Homo Sapiens
GQAPAVRCL

SEQ ID NO: 73645 - protein, 9 aa, Homo Sapiens
GQAPPGKAL

SEQ ID NO: 73646 - protein, 9 aa, Homo Sapiens
GQAPSSSSL

SEQ ID NO: 73647 - protein, 9 aa, Homo Sapiens
GQASGGHYY

SEQ ID NO: 73648 - protein, 9 aa, Homo Sapiens
GQCGNQIGF

SEQ ID NO: 73649 - protein, 9 aa, Homo Sapiens
GQEFIRVGY

SEQ ID NO: 73650 - protein, 9 aa, Homo Sapiens
GQELLRIAL

SEQ ID NO: 73651 - protein, 9 aa, Homo Sapiens
GQFFCGNKY

SEQ ID NO: 73652 - protein, 9 aa, Homo Sapiens
GQFLAPNSH

SEQ ID NO: 73653 - protein, 9 aa, Homo Sapiens
GQFLPQTQF

SEQ ID NO: 73654 - protein, 9 aa, Homo Sapiens
GQFLVRIIY

SEQ ID NO: 73655 - protein, 9 aa, Homo Sapiens
GQFPGHNEF

SEQ ID NO: 73656 - protein, 9 aa, Homo Sapiens
GQFPSPHHH

SEQ ID NO: 73657 - protein, 9 aa, Homo Sapiens
GQFRDQIKF

SEQ ID NO: 73658 - protein, 9 aa, Homo Sapiens
GQFSKPFSF

SEQ ID NO: 73659 - protein, 9 aa, Homo Sapiens
GQFWGQKPW

SEQ ID NO: 73660 - protein, 9 aa, Homo Sapiens
GQGAFGRVY

SEQ ID NO: 73661 - protein, 9 aa, Homo Sapiens
GQGTFGEVF

SEQ ID NO: 73662 - protein, 9 aa, Homo Sapiens
GQHAGLEKY

SEQ ID NO: 73663 - protein, 9 aa, Homo Sapiens
GQHGYSTGY

SEQ ID NO: 73664 - protein, 9 aa, Homo Sapiens
GQHIQLVQY

SEQ ID NO: 73665 - protein, 9 aa, Homo Sapiens
GQHNQSVNY

SEQ ID NO: 73666 - protein, 9 aa, Homo Sapiens
GQHPNIITL

SEQ ID NO: 73667 - protein, 9 aa, Homo Sapiens
GQHSHVVRY

SEQ ID NO: 73668 - protein, 9 aa, Homo Sapiens
GQHVATQHF

SEQ ID NO: 73669 - protein, 9 aa, Homo Sapiens
GQHVTAALY

SEQ ID NO: 73670 - protein, 9 aa, Homo Sapiens
GQIEFLRCY

SEQ ID NO: 73671 - protein, 9 aa, Homo Sapiens
GQIEGVRQM

SEQ ID NO: 73672 - protein, 9 aa, Homo Sapiens
GQIEHKLAF

SEQ ID NO: 73673 - protein, 9 aa, Homo Sapiens
GQIGHGYKY

SEQ ID NO: 73674 - protein, 9 aa, Homo Sapiens
GQIGMIQAL

SEQ ID NO: 73675 - protein, 9 aa, Homo Sapiens
GQIGVRTPL

SEQ ID NO: 73676 - protein, 9 aa, Homo Sapiens
GQIIGEGRY

SEQ ID NO: 73677 - protein, 9 aa, Homo Sapiens
GQILRIIQL

SEQ ID NO: 73678 - protein, 9 aa, Homo Sapiens
GQILSVIKM

SEQ ID NO: 73679 - protein, 9 aa, Homo Sapiens
GQIMDSETF

SEQ ID NO: 73680 - protein, 9 aa, Homo Sapiens
GQIPATALL

SEQ ID NO: 73681 - protein, 9 aa, Homo Sapiens
GQIPEIIFY

SEQ ID NO: 73682 - protein, 9 aa, Homo Sapiens
GQIPQILYY

SEQ ID NO: 73683 - protein, 9 aa, Homo Sapiens
GQIQEKVRY

SEQ ID NO: 73684 - protein, 9 aa, Homo Sapiens
GQIQKVHPA

SEQ ID NO: 73685 - protein, 9 aa, Homo Sapiens
GQISGLNVL

SEQ ID NO: 73686 - protein, 9 aa, Homo Sapiens
GQIVSSQVL

SEQ ID NO: 73687 - protein, 9 aa, Homo Sapiens
GQKAGELSL

SEQ ID NO: 73688 - protein, 9 aa, Homo Sapiens
GQKENVVVY

SEQ ID NO: 73689 - protein, 9 aa, Homo Sapiens
GQKIFYVNY

SEQ ID NO: 73690 - protein, 9 aa, Homo Sapiens
GQKIIKKNL

SEQ ID NO: 73691 - protein, 9 aa, Homo Sapiens
GQKINIHEY

SEQ ID NO: 73692 - protein, 9 aa, Homo Sapiens
GQKIQIVTA

SEQ ID NO: 73693 - protein, 9 aa, Homo Sapiens
GQKISTVAV

SEQ ID NO: 73694 - protein, 9 aa, Homo Sapiens
GQKLAEQMF

SEQ ID NO: 73695 - protein, 9 aa, Homo Sapiens
GQKLGGQSF

SEQ ID NO: 73696 - protein, 9 aa, Homo Sapiens
GQKLILTTL

SEQ ID NO: 73697 - protein, 9 aa, Homo Sapiens
GQKMTTLQH

SEQ ID NO: 73698 - protein, 9 aa, Homo Sapiens
GQKPGGSDF

SEQ ID NO: 73699 - protein, 9 aa, Homo Sapiens
GQKPNPYFY

SEQ ID NO: 73700 - protein, 9 aa, Homo Sapiens
GQKPWSQHY

SEQ ID NO: 73701 - protein, 9 aa, Homo Sapiens
GQKQAQQVM

SEQ ID NO: 73702 - protein, 9 aa, Homo Sapiens
GQKQVIPGL

SEQ ID NO: 73703 - protein, 9 aa, Homo Sapiens
GQKQYNVDY

SEQ ID NO: 73704 - protein, 9 aa, Homo Sapiens
GQKRVVNVY

SEQ ID NO: 73705 - protein, 9 aa, Homo Sapiens
GQKVLVNVL

SEQ ID NO: 73706 - protein, 9 aa, Homo Sapiens
GQKVTDDMY

SEQ ID NO: 73707 - protein, 9 aa, Homo Sapiens
GQKYPVHIY

SEQ ID NO: 73708 - protein, 9 aa, Homo Sapiens
GQLFHIACF

SEQ ID NO: 73709 - protein, 9 aa, Homo Sapiens
GQLGLLARY

SEQ ID NO: 73710 - protein, 9 aa, Homo Sapiens
GQLPGLHEY

SEQ ID NO: 73711 - protein, 9 aa, Homo Sapiens
GQLTGMYRY

SEQ ID NO: 73712 - protein, 9 aa, Homo Sapiens
GQMAQKFSF

SEQ ID NO: 73713 - protein, 9 aa, Homo Sapiens
GQMPHSHQY

SEQ ID NO: 73714 - protein, 9 aa, Homo Sapiens
GQNAQTMAY

SEQ ID NO: 73715 - protein, 9 aa, Homo Sapiens
GQNASVLAY

SEQ ID NO: 73716 - protein, 9 aa, Homo Sapiens
GQNISQQAL

SEQ ID NO: 73717 - protein, 9 aa, Homo Sapiens
GQNKAVKVY

SEQ ID NO: 73718 - protein, 9 aa, Homo Sapiens
GQNKKVMIY

SEQ ID NO: 73719 - protein, 9 aa, Homo Sapiens
GQNPAEGSF

SEQ ID NO: 73720 - protein, 9 aa, Homo Sapiens
GQNPFELAF

SEQ ID NO: 73721 - protein, 9 aa, Homo Sapiens
GQNPTEAEL

SEQ ID NO: 73722 - protein, 9 aa, Homo Sapiens
GQNRDGIVF

SEQ ID NO: 73723 - protein, 9 aa, Homo Sapiens
GQPAFCTSY

SEQ ID NO: 73724 - protein, 9 aa, Homo Sapiens
GQPDISRPF

SEQ ID NO: 73725 - protein, 9 aa, Homo Sapiens
GQPGAFTCY

SEQ ID NO: 73726 - protein, 9 aa, Homo Sapiens
GQPLHASNY

SEQ ID NO: 73727 - protein, 9 aa, Homo Sapiens
GQPLPTSNY

SEQ ID NO: 73728 - protein, 9 aa, Homo Sapiens
GQPQPGFGY

SEQ ID NO: 73729 - protein, 9 aa, Homo Sapiens
GQQEITNRL

SEQ ID NO: 73730 - protein, 9 aa, Homo Sapiens
GQQGSCLVY

SEQ ID NO: 73731 - protein, 9 aa, Homo Sapiens
GQQPSQSAF

SEQ ID NO: 73732 - protein, 9 aa, Homo Sapiens
GQQQNVMVY

SEQ ID NO: 73733 - protein, 9 aa, Homo Sapiens
GQQQPVPSY

SEQ ID NO: 73734 - protein, 9 aa, Homo Sapiens
GQQRCIATY

SEQ ID NO: 73735 - protein, 9 aa, Homo Sapiens
GQQSSYPGY

SEQ ID NO: 73736 - protein, 9 aa, Homo Sapiens
GQQVPMELY

SEQ ID NO: 73737 - protein, 9 aa, Homo Sapiens
GQQVTLTTH

SEQ ID NO: 73738 - protein, 9 aa, Homo Sapiens
GQRAKSMKF

SEQ ID NO: 73739 - protein, 9 aa, Homo Sapiens
GQREGSRGF

SEQ ID NO: 73740 - protein, 9 aa, Homo Sapiens
GQRELIESY

SEQ ID NO: 73741 - protein, 9 aa, Homo Sapiens
GQREVHRLY

SEQ ID NO: 73742 - protein, 9 aa, Homo Sapiens
GQRFLEVQY

SEQ ID NO: 73743 - protein, 9 aa, Homo Sapiens
GQRKEVEVF

SEQ ID NO: 73744 - protein, 9 aa, Homo Sapiens
GQRKNIEKL

SEQ ID NO: 73745 - protein, 9 aa, Homo Sapiens
GQRKPATSY

SEQ ID NO: 73746 - protein, 9 aa, Homo Sapiens
GQRKPVAVL

SEQ ID NO: 73747 - protein, 9 aa, Homo Sapiens
GQRPQLTAA

SEQ ID NO: 73748 - protein, 9 aa, Homo Sapiens
GQRPTQPVY

SEQ ID NO: 73749 - protein, 9 aa, Homo Sapiens
GQRQVGVGY

SEQ ID NO: 73750 - protein, 9 aa, Homo Sapiens
GQRSYLVQY

SEQ ID NO: 73751 - protein, 9 aa, Homo Sapiens
GQRTGQVTV

SEQ ID NO: 73752 - protein, 9 aa, Homo Sapiens
GQSGLFTQY

SEQ ID NO: 73753 - protein, 9 aa, Homo Sapiens
GQSKAVKVY

SEQ ID NO: 73754 - protein, 9 aa, Homo Sapiens
GQSKSVKIY

SEQ ID NO: 73755 - protein, 9 aa, Homo Sapiens
GQSPLSQKY

SEQ ID NO: 73756 - protein, 9 aa, Homo Sapiens
GQSRLIFTY

SEQ ID NO: 73757 - protein, 9 aa, Homo Sapiens
GQTAYATSY

SEQ ID NO: 73758 - protein, 9 aa, Homo Sapiens
GQTGSGKTF

SEQ ID NO: 73759 - protein, 9 aa, Homo Sapiens
GQTGTGKTF

SEQ ID NO: 73760 - protein, 9 aa, Homo Sapiens
GQTGTKSVF

SEQ ID NO: 73761 - protein, 9 aa, Homo Sapiens
GQTGVTTSF

SEQ ID NO: 73762 - protein, 9 aa, Homo Sapiens
GQTKPVVVY

SEQ ID NO: 73763 - protein, 9 aa, Homo Sapiens
GQTKPVYVY

SEQ ID NO: 73764 - protein, 9 aa, Homo Sapiens
GQTKQVTVY

SEQ ID NO: 73765 - protein, 9 aa, Homo Sapiens
GQTPGGAQF

SEQ ID NO: 73766 - protein, 9 aa, Homo Sapiens
GQVAAGGAF

SEQ ID NO: 73767 - protein, 9 aa, Homo Sapiens
GQVALRTSL

SEQ ID NO: 73768 - protein, 9 aa, Homo Sapiens
GQVFLKTAL

SEQ ID NO: 73769 - protein, 9 aa, Homo Sapiens
GQVFPLSSH

SEQ ID NO: 73770 - protein, 9 aa, Homo Sapiens
GQVKAAVKY

SEQ ID NO: 73771 - protein, 9 aa, Homo Sapiens
GQVKTGISM

SEQ ID NO: 73772 - protein, 9 aa, Homo Sapiens
GQVLGVIGY

SEQ ID NO: 73773 - protein, 9 aa, Homo Sapiens
GQVQKIVLY

SEQ ID NO: 73774 - protein, 9 aa, Homo Sapiens
GQVQVRTLY

SEQ ID NO: 73775 - protein, 9 aa, Homo Sapiens
GQVTFLHVF

SEQ ID NO: 73776 - protein, 9 aa, Homo Sapiens
GQWGGGSHY

SEQ ID NO: 73777 - protein, 9 aa, Homo Sapiens
GQYEQVKQL

SEQ ID NO: 73778 - protein, 9 aa, Homo Sapiens
GQYPTQPTY

SEQ ID NO: 73779 - protein, 9 aa, Homo Sapiens
GQYPYPSGF

SEQ ID NO: 73780 - protein, 9 aa, Homo Sapiens
GQYQFDVKY

SEQ ID NO: 73781 - protein, 9 aa, Homo Sapiens
GQYYKPEQF

SEQ ID NO: 73782 - protein, 9 aa, Homo Sapiens
GSFIHREEY

SEQ ID NO: 73783 - protein, 9 aa, Homo Sapiens
GSFQTPSSF

SEQ ID NO: 73784 - protein, 9 aa, Homo Sapiens
GSGPAGYSY

SEQ ID NO: 73785 - protein, 9 aa, Homo Sapiens
GSHLTPLCY

SEQ ID NO: 73786 - protein, 9 aa, Homo Sapiens
GSQRISSIY

SEQ ID NO: 73787 - protein, 9 aa, Homo Sapiens
GSRVISICY

SEQ ID NO: 73788 - protein, 9 aa, Homo Sapiens
GTAMIFTCF

SEQ ID NO: 73789 - protein, 9 aa, Homo Sapiens
GTGFPHMLF

SEQ ID NO: 73790 - protein, 9 aa, Homo Sapiens
GVAPPAGAY

SEQ ID NO: 73791 - protein, 9 aa, Homo Sapiens
GVCHIFASF

SEQ ID NO: 73792 - protein, 9 aa, Homo Sapiens
GVIPSTLAF

SEQ ID NO: 73793 - protein, 9 aa, Homo Sapiens
GVIQPGRGF

SEQ ID NO: 73794 - protein, 9 aa, Homo Sapiens
GVISKTLTY

SEQ ID NO: 73795 - protein, 9 aa, Homo Sapiens
GVKPGVVQY

SEQ ID NO: 73796 - protein, 9 aa, Homo Sapiens
GVKSVGQGY

SEQ ID NO: 73797 - protein, 9 aa, Homo Sapiens
GVMKSGHVF

SEQ ID NO: 73798 - protein, 9 aa, Homo Sapiens
GVTHICPVY

SEQ ID NO: 73799 - protein, 9 aa, Homo Sapiens
HEIVLKVAY

SEQ ID NO: 73800 - protein, 9 aa, Homo Sapiens
HGIDPTGTY

SEQ ID NO: 73801 - protein, 9 aa, Homo Sapiens
HGQVQRVAF

SEQ ID NO: 73802 - protein, 9 aa, Homo Sapiens
HIKAFDRAF

SEQ ID NO: 73803 - protein, 9 aa, Homo Sapiens
HIKTETVTY

SEQ ID NO: 73804 - protein, 9 aa, Homo Sapiens
HINSIKSVF

SEQ ID NO: 73805 - protein, 9 aa, Homo Sapiens
HISPVTSTY

SEQ ID NO: 73806 - protein, 9 aa, Homo Sapiens
HLFDIITQY

SEQ ID NO: 73807 - protein, 9 aa, Homo Sapiens
HLKEDQTEY

SEQ ID NO: 73808 - protein, 9 aa, Homo Sapiens
HLKKLKESY

SEQ ID NO: 73809 - protein, 9 aa, Homo Sapiens
HLQKSLSSY

SEQ ID NO: 73810 - protein, 9 aa, Homo Sapiens
HLRDYFEEY

SEQ ID NO: 73811 - protein, 9 aa, Homo Sapiens
HLRPESHSY

SEQ ID NO: 73812 - protein, 9 aa, Homo Sapiens
HLRPRPRAY

SEQ ID NO: 73813 - protein, 9 aa, Homo Sapiens
HMMEKIKSY

SEQ ID NO: 73814 - protein, 9 aa, Homo Sapiens
HQAIHTIEF

SEQ ID NO: 73815 - protein, 9 aa, Homo Sapiens
HQAIHTIEY

SEQ ID NO: 73816 - protein, 9 aa, Homo Sapiens
HQALPSVSH

SEQ ID NO: 73817 - protein, 9 aa, Homo Sapiens
HQAPRQLFY

SEQ ID NO: 73818 - protein, 9 aa, Homo Sapiens
HQASHQPLY

SEQ ID NO: 73819 - protein, 9 aa, Homo Sapiens
HQEIARSSY

SEQ ID NO: 73820 - protein, 9 aa, Homo Sapiens
HQFEGAEEY

SEQ ID NO: 73821 - protein, 9 aa, Homo Sapiens
HQFEKIEQF

SEQ ID NO: 73822 - protein, 9 aa, Homo Sapiens
HQFYPTVVY

SEQ ID NO: 73823 - protein, 9 aa, Homo Sapiens
HQGCLTSSY

SEQ ID NO: 73824 - protein, 9 aa, Homo Sapiens
HQGPVPLSY

SEQ ID NO: 73825 - protein, 9 aa, Homo Sapiens
HQGYPHRNF

SEQ ID NO: 73826 - protein, 9 aa, Homo Sapiens
HQHLSKESL

SEQ ID NO: 73827 - protein, 9 aa, Homo Sapiens
HQHLSKESM

SEQ ID NO: 73828 - protein, 9 aa, Homo Sapiens
HQIGNLKKY

SEQ ID NO: 73829 - protein, 9 aa, Homo Sapiens
HQITEVGTM

SEQ ID NO: 73830 - protein, 9 aa, Homo Sapiens
HQITVLHVY

SEQ ID NO: 73831 - protein, 9 aa, Homo Sapiens
HQKELAAQL

SEQ ID NO: 73832 - protein, 9 aa, Homo Sapiens
HQKIHTDAF

SEQ ID NO: 73833 - protein, 9 aa, Homo Sapiens
HQKKEFVKY

SEQ ID NO: 73834 - protein, 9 aa, Homo Sapiens
HQKQAPISY

SEQ ID NO: 73835 - protein, 9 aa, Homo Sapiens
HQKSELLEL

SEQ ID NO: 73836 - protein, 9 aa, Homo Sapiens
HQKVEAQVY

SEQ ID NO: 73837 - protein, 9 aa, Homo Sapiens
HQLATDSTF

SEQ ID NO: 73838 - protein, 9 aa, Homo Sapiens
HQLGNNSVF

SEQ ID NO: 73839 - protein, 9 aa, Homo Sapiens
HQMTPSSSY

SEQ ID NO: 73840 - protein, 9 aa, Homo Sapiens
HQNEIVQSL

SEQ ID NO: 73841 - protein, 9 aa, Homo Sapiens
HQNQLLSSL

SEQ ID NO: 73842 - protein, 9 aa, Homo Sapiens
HQNSNIRTY

SEQ ID NO: 73843 - protein, 9 aa, Homo Sapiens
HQQKVLRLY

SEQ ID NO: 73844 - protein, 9 aa, Homo Sapiens
HQQLHNETY

SEQ ID NO: 73845 - protein, 9 aa, Homo Sapiens
HQQPPSQQY

SEQ ID NO: 73846 - protein, 9 aa, Homo Sapiens
HQRIQEEKY

SEQ ID NO: 73847 - protein, 9 aa, Homo Sapiens
HQRLQLCVF

SEQ ID NO: 73848 - protein, 9 aa, Homo Sapiens
HQRRQLVHF

SEQ ID NO: 73849 - protein, 9 aa, Homo Sapiens
HQRSFTETM

SEQ ID NO: 73850 - protein, 9 aa, Homo Sapiens
HQRWVFVCL

SEQ ID NO: 73851 - protein, 9 aa, Homo Sapiens
HQSPATPAF

SEQ ID NO: 73852 - protein, 9 aa, Homo Sapiens
HQVTVAQSY

SEQ ID NO: 73853 - protein, 9 aa, Homo Sapiens
HQYDGLVEL

SEQ ID NO: 73854 - protein, 9 aa, Homo Sapiens
HQYSIQVAF

SEQ ID NO: 73855 - protein, 9 aa, Homo Sapiens
HSAPGGPSY

SEQ ID NO: 73856 - protein, 9 aa, Homo Sapiens
HSIPSGHVY

SEQ ID NO: 73857 - protein, 9 aa, Homo Sapiens
HSRLIVLHY

SEQ ID NO: 73858 - protein, 9 aa, Homo Sapiens
HVAQPDSVY

SEQ ID NO: 73859 - protein, 9 aa, Homo Sapiens
HVGKTPIVG

SEQ ID NO: 73860 - protein, 9 aa, Homo Sapiens
HVIENSNAF

SEQ ID NO: 73861 - protein, 9 aa, Homo Sapiens
HVNGIVQKY

SEQ ID NO: 73862 - protein, 9 aa, Homo Sapiens
HVYEIPVEY

SEQ ID NO: 73863 - protein, 9 aa, Homo Sapiens
ICHVVGITY

SEQ ID NO: 73864 - protein, 9 aa, Homo Sapiens
IEKDPSLVY

SEQ ID NO: 73865 - protein, 9 aa, Homo Sapiens
IEMPSHQTY

SEQ ID NO: 73866 - protein, 9 aa, Homo Sapiens
IIAEPGRYY

SEQ ID NO: 73867 - protein, 9 aa, Homo Sapiens
IIAPCKVYY

SEQ ID NO: 73868 - protein, 9 aa, Homo Sapiens
IIAPPERKY

SEQ ID NO: 73869 - protein, 9 aa, Homo Sapiens
IIFPDDCEF

SEQ ID NO: 73870 - protein, 9 aa, Homo Sapiens
IIHDFPQFY

SEQ ID NO: 73871 - protein, 9 aa, Homo Sapiens
IIHEEVEKY

SEQ ID NO: 73872 - protein, 9 aa, Homo Sapiens
IIHEGSSVY

SEQ ID NO: 73873 - protein, 9 aa, Homo Sapiens
IIHSGEKPY

SEQ ID NO: 73874 - protein, 9 aa, Homo Sapiens
IIHTEEKPY

SEQ ID NO: 73875 - protein, 9 aa, Homo Sapiens
IIHTEGKSY

SEQ ID NO: 73876 - protein, 9 aa, Homo Sapiens
IIHTGEKPY

SEQ ID NO: 73877 - protein, 9 aa, Homo Sapiens
IIHTGENLY

SEQ ID NO: 73878 - protein, 9 aa, Homo Sapiens
IIIDKEYYY

SEQ ID NO: 73879 - protein, 9 aa, Homo Sapiens
IIKEESDSF

SEQ ID NO: 73880 - protein, 9 aa, Homo Sapiens
IIKSGDQTF

SEQ ID NO: 73881 - protein, 9 aa, Homo Sapiens
IIKVGGERF

SEQ ID NO: 73882 - protein, 9 aa, Homo Sapiens
IIMSKSTTY

SEQ ID NO: 73883 - protein, 9 aa, Homo Sapiens
IINNAIVHY

SEQ ID NO: 73884 - protein, 9 aa, Homo Sapiens
IIRENEFSF

SEQ ID NO: 73885 - protein, 9 aa, Homo Sapiens
IISPVGDAY

SEQ ID NO: 73886 - protein, 9 aa, Homo Sapiens
IISSVIQKF

SEQ ID NO: 73887 - protein, 9 aa, Homo Sapiens
IITKGTQTY

SEQ ID NO: 73888 - protein, 9 aa, Homo Sapiens
IIYDRDFSY

SEQ ID NO: 73889 - protein, 9 aa, Homo Sapiens
IIYTGEKPY

SEQ ID NO: 73890 - protein, 9 aa, Homo Sapiens
ILAAANPAY

SEQ ID NO: 73891 - protein, 9 aa, Homo Sapiens
ILADMADVY

SEQ ID NO: 73892 - protein, 9 aa, Homo Sapiens
ILAGHENSY

SEQ ID NO: 73893 - protein, 9 aa, Homo Sapiens
ILAQLNAKY

SEQ ID NO: 73894 - protein, 9 aa, Homo Sapiens
ILARNFVNY

SEQ ID NO: 73895 - protein, 9 aa, Homo Sapiens
ILATAGTHF

SEQ ID NO: 73896 - protein, 9 aa, Homo Sapiens
ILFKGDLNY

SEQ ID NO: 73897 - protein, 9 aa, Homo Sapiens
ILGPPGSVY

SEQ ID NO: 73898 - protein, 9 aa, Homo Sapiens
ILHANVVVY

SEQ ID NO: 73899 - protein, 9 aa, Homo Sapiens
ILHTTGLQY

SEQ ID NO: 73900 - protein, 9 aa, Homo Sapiens
ILIACGTSY

SEQ ID NO: 73901 - protein, 9 aa, Homo Sapiens
ILIGPTFSY

SEQ ID NO: 73902 - protein, 9 aa, Homo Sapiens
ILINSGSRY

SEQ ID NO: 73903 - protein, 9 aa, Homo Sapiens
ILIQIISHY

SEQ ID NO: 73904 - protein, 9 aa, Homo Sapiens
ILKDSISSY

SEQ ID NO: 73905 - protein, 9 aa, Homo Sapiens
ILKEDPFLF

SEQ ID NO: 73906 - protein, 9 aa, Homo Sapiens
ILKEEQELY

SEQ ID NO: 73907 - protein, 9 aa, Homo Sapiens
ILKFPHSAH

SEQ ID NO: 73908 - protein, 9 aa, Homo Sapiens
ILKPDGSLY

SEQ ID NO: 73909 - protein, 9 aa, Homo Sapiens
ILKPGSTAL

SEQ ID NO: 73910 - protein, 9 aa, Homo Sapiens
ILKQEQEEY

SEQ ID NO: 73911 - protein, 9 aa, Homo Sapiens
ILKQKNVSY

SEQ ID NO: 73912 - protein, 9 aa, Homo Sapiens
ILKRNIQQY

SEQ ID NO: 73913 - protein, 9 aa, Homo Sapiens
ILNKPGLKY

SEQ ID NO: 73914 - protein, 9 aa, Homo Sapiens
ILNKSETGY

SEQ ID NO: 73915 - protein, 9 aa, Homo Sapiens
ILNREVVNY

SEQ ID NO: 73916 - protein, 9 aa, Homo Sapiens
ILNSGARGY

SEQ ID NO: 73917 - protein, 9 aa, Homo Sapiens
ILPKCRTSY

SEQ ID NO: 73918 - protein, 9 aa, Homo Sapiens
ILPLIISKY

SEQ ID NO: 73919 - protein, 9 aa, Homo Sapiens
ILPPFFKHF

SEQ ID NO: 73920 - protein, 9 aa, Homo Sapiens
ILQDYTHEF

SEQ ID NO: 73921 - protein, 9 aa, Homo Sapiens
ILQKGQTAY

SEQ ID NO: 73922 - protein, 9 aa, Homo Sapiens
ILRETTVKY

SEQ ID NO: 73923 - protein, 9 aa, Homo Sapiens
ILRPEELGF

SEQ ID NO: 73924 - protein, 9 aa, Homo Sapiens
ILRPGGCLF

SEQ ID NO: 73925 - protein, 9 aa, Homo Sapiens
ILSGVVTKM

SEQ ID NO: 73926 - protein, 9 aa, Homo Sapiens
ILSHINTVF

SEQ ID NO: 73927 - protein, 9 aa, Homo Sapiens
ILTVGGTAY

SEQ ID NO: 73928 - protein, 9 aa, Homo Sapiens
ILYNIKQEY

SEQ ID NO: 73929 - protein, 9 aa, Homo Sapiens
IMCILRELY

SEQ ID NO: 73930 - protein, 9 aa, Homo Sapiens
IMKIDIEKF

SEQ ID NO: 73931 - protein, 9 aa, Homo Sapiens
IMKKIRESY

SEQ ID NO: 73932 - protein, 9 aa, Homo Sapiens
IMKNPEVEF

SEQ ID NO: 73933 - protein, 9 aa, Homo Sapiens
IMNGGCETF

SEQ ID NO: 73934 - protein, 9 aa, Homo Sapiens
IMQSIQSKY

SEQ ID NO: 73935 - protein, 9 aa, Homo Sapiens
IMRAGMSSL

SEQ ID NO: 73936 - protein, 9 aa, Homo Sapiens
IMVKPHEEY

SEQ ID NO: 73937 - protein, 9 aa, Homo Sapiens
IQAGIFQEF

SEQ ID NO: 73938 - protein, 9 aa, Homo Sapiens
IQAPLVYHF

SEQ ID NO: 73939 - protein, 9 aa, Homo Sapiens
IQAQKSSEY

SEQ ID NO: 73940 - protein, 9 aa, Homo Sapiens
IQASTVVTY

SEQ ID NO: 73941 - protein, 9 aa, Homo Sapiens
IQEESLRTY

SEQ ID NO: 73942 - protein, 9 aa, Homo Sapiens
IQFEIAHAY

SEQ ID NO: 73943 - protein, 9 aa, Homo Sapiens
IQFNLRNLY

SEQ ID NO: 73944 - protein, 9 aa, Homo Sapiens
IQGVPKVTY

SEQ ID NO: 73945 - protein, 9 aa, Homo Sapiens
IQHLVPASF

SEQ ID NO: 73946 - protein, 9 aa, Homo Sapiens
IQHPLIKKY

SEQ ID NO: 73947 - protein, 9 aa, Homo Sapiens
IQHSTIIGF

SEQ ID NO: 73948 - protein, 9 aa, Homo Sapiens
IQIGLTREF

SEQ ID NO: 73949 - protein, 9 aa, Homo Sapiens
IQIPGSREF

SEQ ID NO: 73950 - protein, 9 aa, Homo Sapiens
IQKAPGERL

SEQ ID NO: 73951 - protein, 9 aa, Homo Sapiens
IQKDPGESL

SEQ ID NO: 73952 - protein, 9 aa, Homo Sapiens
IQKEATWTM

SEQ ID NO: 73953 - protein, 9 aa, Homo Sapiens
IQKELIEEF

SEQ ID NO: 73954 - protein, 9 aa, Homo Sapiens
IQKENPKVV

SEQ ID NO: 73955 - protein, 9 aa, Homo Sapiens
IQKESTLHL

SEQ ID NO: 73956 - protein, 9 aa, Homo Sapiens
IQKFHSRAL

SEQ ID NO: 73957 - protein, 9 aa, Homo Sapiens
IQKKAVKNF

SEQ ID NO: 73958 - protein, 9 aa, Homo Sapiens
IQKKIREKF

SEQ ID NO: 73959 - protein, 9 aa, Homo Sapiens
IQKPGSNAF

SEQ ID NO: 73960 - protein, 9 aa, Homo Sapiens
IQKQFEELY

SEQ ID NO: 73961 - protein, 9 aa, Homo Sapiens
IQKQISYNY

SEQ ID NO: 73962 - protein, 9 aa, Homo Sapiens
IQKTGGTTF

SEQ ID NO: 73963 - protein, 9 aa, Homo Sapiens
IQLLQKLTY

SEQ ID NO: 73964 - protein, 9 aa, Homo Sapiens
IQLRAQKGY

SEQ ID NO: 73965 - protein, 9 aa, Homo Sapiens
IQMETQSSM

SEQ ID NO: 73966 - protein, 9 aa, Homo Sapiens
IQMRDLEGY

SEQ ID NO: 73967 - protein, 9 aa, Homo Sapiens
IQMTLPKTY

SEQ ID NO: 73968 - protein, 9 aa, Homo Sapiens
IQNDRQLQY

SEQ ID NO: 73969 - protein, 9 aa, Homo Sapiens
IQNNPHASY

SEQ ID NO: 73970 - protein, 9 aa, Homo Sapiens
IQNPDPAVY

SEQ ID NO: 73971 - protein, 9 aa, Homo Sapiens
IQNVSTCRF

SEQ ID NO: 73972 - protein, 9 aa, Homo Sapiens
IQPDVFSHY

SEQ ID NO: 73973 - protein, 9 aa, Homo Sapiens
IQQEVIKAY

SEQ ID NO: 73974 - protein, 9 aa, Homo Sapiens
IQQKRTVAF

SEQ ID NO: 73975 - protein, 9 aa, Homo Sapiens
IQQLVRKSY

SEQ ID NO: 73976 - protein, 9 aa, Homo Sapiens
IQQRPSMQF

SEQ ID NO: 73977 - protein, 9 aa, Homo Sapiens
IQQRVVRVY

SEQ ID NO: 73978 - protein, 9 aa, Homo Sapiens
IQQVGNEAY

SEQ ID NO: 73979 - protein, 9 aa, Homo Sapiens
IQRIFLITL

SEQ ID NO: 73980 - protein, 9 aa, Homo Sapiens
IQRMHLRQY

SEQ ID NO: 73981 - protein, 9 aa, Homo Sapiens
IQRNPEISH

SEQ ID NO: 73982 - protein, 9 aa, Homo Sapiens
IQRQETISL

SEQ ID NO: 73983 - protein, 9 aa, Homo Sapiens
IQRTEAYEY

SEQ ID NO: 73984 - protein, 9 aa, Homo Sapiens
IQRVAAGVL

SEQ ID NO: 73985 - protein, 9 aa, Homo Sapiens
IQSHVIRGY

SEQ ID NO: 73986 - protein, 9 aa, Homo Sapiens
IQSRITKTF

SEQ ID NO: 73987 - protein, 9 aa, Homo Sapiens
IQSTIRTQF

SEQ ID NO: 73988 - protein, 9 aa, Homo Sapiens
IQTKRSFQY

SEQ ID NO: 73989 - protein, 9 aa, Homo Sapiens
IQTSTGKVF

SEQ ID NO: 73990 - protein, 9 aa, Homo Sapiens
IQVDPNYAY

SEQ ID NO: 73991 - protein, 9 aa, Homo Sapiens
IQVKVRDTY

SEQ ID NO: 73992 - protein, 9 aa, Homo Sapiens
IQVVSKNLY

SEQ ID NO: 73993 - protein, 9 aa, Homo Sapiens
IQYDKTNVL

SEQ ID NO: 73994 - protein, 9 aa, Homo Sapiens
IQYGEDLEF

SEQ ID NO: 73995 - protein, 9 aa, Homo Sapiens
IQYKTLRTF

SEQ ID NO: 73996 - protein, 9 aa, Homo Sapiens
IRHTGEKPF

SEQ ID NO: 73997 - protein, 9 aa, Homo Sapiens
IRHTGERPY

SEQ ID NO: 73998 - protein, 9 aa, Homo Sapiens
ISAPHMHAY

SEQ ID NO: 73999 - protein, 9 aa, Homo Sapiens
ISERIQLSI

SEQ ID NO: 74000 - protein, 9 aa, Homo Sapiens
ISGPLSPAY

SEQ ID NO: 74001 - protein, 9 aa, Homo Sapiens
ISHQNYIAY

SEQ ID NO: 74002 - protein, 9 aa, Homo Sapiens
ISIDGSRSY

SEQ ID NO: 74003 - protein, 9 aa, Homo Sapiens
ISKALVAYY

SEQ ID NO: 74004 - protein, 9 aa, Homo Sapiens
ISKSTGQEY

SEQ ID NO: 74005 - protein, 9 aa, Homo Sapiens
ISNGGAQTY

SEQ ID NO: 74006 - protein, 9 aa, Homo Sapiens
ISPFEHQTY

SEQ ID NO: 74007 - protein, 9 aa, Homo Sapiens
ISRETGEPY

SEQ ID NO: 74008 - protein, 9 aa, Homo Sapiens
ISREWTQKY

SEQ ID NO: 74009 - protein, 9 aa, Homo Sapiens
ISSPVVTSL

SEQ ID NO: 74010 - protein, 9 aa, Homo Sapiens
ITAPPGTAA

SEQ ID NO: 74011 - protein, 9 aa, Homo Sapiens
ITAPPSRVL

SEQ ID NO: 74012 - protein, 9 aa, Homo Sapiens
ITFEGKVAF

SEQ ID NO: 74013 - protein, 9 aa, Homo Sapiens
ITKDRPINF

SEQ ID NO: 74014 - protein, 9 aa, Homo Sapiens
ITNDTVQTY

SEQ ID NO: 74015 - protein, 9 aa, Homo Sapiens
ITSPHTTSY

SEQ ID NO: 74016 - protein, 9 aa, Homo Sapiens
ITSSPHPEY

SEQ ID NO: 74017 - protein, 9 aa, Homo Sapiens
IVAKSSLQY

SEQ ID NO: 74018 - protein, 9 aa, Homo Sapiens
IVEGENHTY

SEQ ID NO: 74019 - protein, 9 aa, Homo Sapiens
IVFIERTDF

SEQ ID NO: 74020 - protein, 9 aa, Homo Sapiens
IVGPDGLVY

SEQ ID NO: 74021 - protein, 9 aa, Homo Sapiens
IVKEKGTVY

SEQ ID NO: 74022 - protein, 9 aa, Homo Sapiens
IVKKPGNIY

SEQ ID NO: 74023 - protein, 9 aa, Homo Sapiens
IVKPKPRAL

SEQ ID NO: 74024 - protein, 9 aa, Homo Sapiens
IVVKPNLEY

SEQ ID NO: 74025 - protein, 9 aa, Homo Sapiens
IVYPGIAVF

SEQ ID NO: 74026 - protein, 9 aa, Homo Sapiens
IVYPQKAYY

SEQ ID NO: 74027 - protein, 9 aa, Homo Sapiens
KAFPFHIIF

SEQ ID NO: 74028 - protein, 9 aa, Homo Sapiens
KAIATTVTY

SEQ ID NO: 74029 - protein, 9 aa, Homo Sapiens
KASGTLREY

SEQ ID NO: 74030 - protein, 9 aa, Homo Sapiens
KASNPHASF

SEQ ID NO: 74031 - protein, 9 aa, Homo Sapiens
KAVSLFLCY

SEQ ID NO: 74032 - protein, 9 aa, Homo Sapiens
KAYGENIGY

SEQ ID NO: 74033 - protein, 9 aa, Homo Sapiens
KEIESRVVF

SEQ ID NO: 74034 - protein, 9 aa, Homo Sapiens
KFIDTTSKF

SEQ ID NO: 74035 - protein, 9 aa, Homo Sapiens
KFKEVGEAF

SEQ ID NO: 74036 - protein, 9 aa, Homo Sapiens
KFNEPGSQY

SEQ ID NO: 74037 - protein, 9 aa, Homo Sapiens
KFSPNTSQF

SEQ ID NO: 74038 - protein, 9 aa, Homo Sapiens
KIAEQVASF

SEQ ID NO: 74039 - protein, 9 aa, Homo Sapiens
KIFPSVIKY

SEQ ID NO: 74040 - protein, 9 aa, Homo Sapiens
KIHKPEKAF

SEQ ID NO: 74041 - protein, 9 aa, Homo Sapiens
KIIKEKQAF

SEQ ID NO: 74042 - protein, 9 aa, Homo Sapiens
KIIKNVEKY

SEQ ID NO: 74043 - protein, 9 aa, Homo Sapiens
KIINDNATY

SEQ ID NO: 74044 - protein, 9 aa, Homo Sapiens
KIIRNVGKY

SEQ ID NO: 74045 - protein, 9 aa, Homo Sapiens
KIISDNLTY

SEQ ID NO: 74046 - protein, 9 aa, Homo Sapiens
KIKEYIQKY

SEQ ID NO: 74047 - protein, 9 aa, Homo Sapiens
KIKPVSLTF

SEQ ID NO: 74048 - protein, 9 aa, Homo Sapiens
KIKSFEVVF

SEQ ID NO: 74049 - protein, 9 aa, Homo Sapiens
KIKSFVKVY

SEQ ID NO: 74050 - protein, 9 aa, Homo Sapiens
KIKTIGATY

SEQ ID NO: 74051 - protein, 9 aa, Homo Sapiens
KIKTIGSTY

SEQ ID NO: 74052 - protein, 9 aa, Homo Sapiens
KILDMQQTY

SEQ ID NO: 74053 - protein, 9 aa, Homo Sapiens
KIMDVGQSY

SEQ ID NO: 74054 - protein, 9 aa, Homo Sapiens
KIYPLPHMY

SEQ ID NO: 74055 - protein, 9 aa, Homo Sapiens
KLAEQAERY

SEQ ID NO: 74056 - protein, 9 aa, Homo Sapiens
KLAEQYESF

SEQ ID NO: 74057 - protein, 9 aa, Homo Sapiens
KLAGDHIEY

SEQ ID NO: 74058 - protein, 9 aa, Homo Sapiens
KLANIVERY

SEQ ID NO: 74059 - protein, 9 aa, Homo Sapiens
KLAPPSSTL

SEQ ID NO: 74060 - protein, 9 aa, Homo Sapiens
KLAQIRHIY

SEQ ID NO: 74061 - protein, 9 aa, Homo Sapiens
KLFACEVLY

SEQ ID NO: 74062 - protein, 9 aa, Homo Sapiens
KLFGFTERY

SEQ ID NO: 74063 - protein, 9 aa, Homo Sapiens
KLFIGGLSF

SEQ ID NO: 74064 - protein, 9 aa, Homo Sapiens
KLFLEGMHY

SEQ ID NO: 74065 - protein, 9 aa, Homo Sapiens
KLFPYALAF

SEQ ID NO: 74066 - protein, 9 aa, Homo Sapiens
KLFVGGLNF

SEQ ID NO: 74067 - protein, 9 aa, Homo Sapiens
KLHLQSTDY

SEQ ID NO: 74068 - protein, 9 aa, Homo Sapiens
KLIDSLHSY

SEQ ID NO: 74069 - protein, 9 aa, Homo Sapiens
KLIEFMDTF

SEQ ID NO: 74070 - protein, 9 aa, Homo Sapiens
KLIESTSTM

SEQ ID NO: 74071 - protein, 9 aa, Homo Sapiens
KLIGKEVCF

SEQ ID NO: 74072 - protein, 9 aa, Homo Sapiens
KLIKRHEAF

SEQ ID NO: 74073 - protein, 9 aa, Homo Sapiens
KLISQQKAF

SEQ ID NO: 74074 - protein, 9 aa, Homo Sapiens
KLIWKVTDY

SEQ ID NO: 74075 - protein, 9 aa, Homo Sapiens
KLKDATERY

SEQ ID NO: 74076 - protein, 9 aa, Homo Sapiens
KLKEKFQHY

SEQ ID NO: 74077 - protein, 9 aa, Homo Sapiens
KLKGSGLRY

SEQ ID NO: 74078 - protein, 9 aa, Homo Sapiens
KLKRLDEKF

SEQ ID NO: 74079 - protein, 9 aa, Homo Sapiens
KLMSELESF

SEQ ID NO: 74080 - protein, 9 aa, Homo Sapiens
KLNEGVVEF

SEQ ID NO: 74081 - protein, 9 aa, Homo Sapiens
KLNESVMVF

SEQ ID NO: 74082 - protein, 9 aa, Homo Sapiens
KLNPYAKTM

SEQ ID NO: 74083 - protein, 9 aa, Homo Sapiens
KLPDFESRY

SEQ ID NO: 74084 - protein, 9 aa, Homo Sapiens
KLPDIFQSY

SEQ ID NO: 74085 - protein, 9 aa, Homo Sapiens
KLPDIFSVY

SEQ ID NO: 74086 - protein, 9 aa, Homo Sapiens
KLPDVYGVF

SEQ ID NO: 74087 - protein, 9 aa, Homo Sapiens
KLPEKTQTF

SEQ ID NO: 74088 - protein, 9 aa, Homo Sapiens
KLPKGTVSF

SEQ ID NO: 74089 - protein, 9 aa, Homo Sapiens
KLQDPFSLY

SEQ ID NO: 74090 - protein, 9 aa, Homo Sapiens
KLQEALMHY

SEQ ID NO: 74091 - protein, 9 aa, Homo Sapiens
KLQVQIQAY

SEQ ID NO: 74092 - protein, 9 aa, Homo Sapiens
KLREDLERL

SEQ ID NO: 74093 - protein, 9 aa, Homo Sapiens
KLRVETQKF

SEQ ID NO: 74094 - protein, 9 aa, Homo Sapiens
KLSEIVREF

SEQ ID NO: 74095 - protein, 9 aa, Homo Sapiens
KLSKPRVTF

SEQ ID NO: 74096 - protein, 9 aa, Homo Sapiens
KLSPLKSKF

SEQ ID NO: 74097 - protein, 9 aa, Homo Sapiens
KLTKAVATY

SEQ ID NO: 74098 - protein, 9 aa, Homo Sapiens
KLVELCVQY

SEQ ID NO: 74099 - protein, 9 aa, Homo Sapiens
KLVHPTDKY

SEQ ID NO: 74100 - protein, 9 aa, Homo Sapiens
KLVPPHETF

SEQ ID NO: 74101 - protein, 9 aa, Homo Sapiens
KLVSKIAKY

SEQ ID NO: 74102 - protein, 9 aa, Homo Sapiens
KLYDPGQQY

SEQ ID NO: 74103 - protein, 9 aa, Homo Sapiens
KLYEKFLEF

SEQ ID NO: 74104 - protein, 9 aa, Homo Sapiens
KLYPLEIVF

SEQ ID NO: 74105 - protein, 9 aa, Homo Sapiens
KLYPWIHQF

SEQ ID NO: 74106 - protein, 9 aa, Homo Sapiens
KLYQSIIGY

SEQ ID NO: 74107 - protein, 9 aa, Homo Sapiens
KLYVPVKEY

SEQ ID NO: 74108 - protein, 9 aa, Homo Sapiens
KMIPPGIHF

SEQ ID NO: 74109 - protein, 9 aa, Homo Sapiens
KMKEIAEAY

SEQ ID NO: 74110 - protein, 9 aa, Homo Sapiens
KMKPEVTAL

SEQ ID NO: 74111 - protein, 9 aa, Homo Sapiens
KMMPGCEIY

SEQ ID NO: 74112 - protein, 9 aa, Homo Sapiens
KMNPQSAFF

SEQ ID NO: 74113 - protein, 9 aa, Homo Sapiens
KMQGVGEKF

SEQ ID NO: 74114 - protein, 9 aa, Homo Sapiens
KMRPGEATL

SEQ ID NO: 74115 - protein, 9 aa, Homo Sapiens
KMYTDGSTF

SEQ ID NO: 74116 - protein, 9 aa, Homo Sapiens
KQAEEYLSF

SEQ ID NO: 74117 - protein, 9 aa, Homo Sapiens
KQAKLVEQY

SEQ ID NO: 74118 - protein, 9 aa, Homo Sapiens
KQFEGSTSF

SEQ ID NO: 74119 - protein, 9 aa, Homo Sapiens
KQFEKQVEL

SEQ ID NO: 74120 - protein, 9 aa, Homo Sapiens
KQFGNILIL

SEQ ID NO: 74121 - protein, 9 aa, Homo Sapiens
KQFHRIVTY

SEQ ID NO: 74122 - protein, 9 aa, Homo Sapiens
KQFPEVIKY

SEQ ID NO: 74123 - protein, 9 aa, Homo Sapiens
KQFQFGHAL

SEQ ID NO: 74124 - protein, 9 aa, Homo Sapiens
KQIASVMKH

SEQ ID NO: 74125 - protein, 9 aa, Homo Sapiens
KQIENARMF

SEQ ID NO: 74126 - protein, 9 aa, Homo Sapiens
KQIESKTAF

SEQ ID NO: 74127 - protein, 9 aa, Homo Sapiens
KQIFETIYY

SEQ ID NO: 74128 - protein, 9 aa, Homo Sapiens
KQIFKGKTF

SEQ ID NO: 74129 - protein, 9 aa, Homo Sapiens
KQIHFLYQY

SEQ ID NO: 74130 - protein, 9 aa, Homo Sapiens
KQIIRNIKF

SEQ ID NO: 74131 - protein, 9 aa, Homo Sapiens
KQIKTIERY

SEQ ID NO: 74132 - protein, 9 aa, Homo Sapiens
KQILLENTF

SEQ ID NO: 74133 - protein, 9 aa, Homo Sapiens
KQILSNPKF

SEQ ID NO: 74134 - protein, 9 aa, Homo Sapiens
KQINSVNKF

SEQ ID NO: 74135 - protein, 9 aa, Homo Sapiens
KQIPRILGP

SEQ ID NO: 74136 - protein, 9 aa, Homo Sapiens
KQISAEKQY

SEQ ID NO: 74137 - protein, 9 aa, Homo Sapiens
KQISRVEAM

SEQ ID NO: 74138 - protein, 9 aa, Homo Sapiens
KQISSNKCF

SEQ ID NO: 74139 - protein, 9 aa, Homo Sapiens
KQITADKQY

SEQ ID NO: 74140 - protein, 9 aa, Homo Sapiens
KQIVAGVNY

SEQ ID NO: 74141 - protein, 9 aa, Homo Sapiens
KQIVDRVSY

SEQ ID NO: 74142 - protein, 9 aa, Homo Sapiens
KQIVPKESL

SEQ ID NO: 74143 - protein, 9 aa, Homo Sapiens
KQIYYSDKY

SEQ ID NO: 74144 - protein, 9 aa, Homo Sapiens
KQKALNAGY

SEQ ID NO: 74145 - protein, 9 aa, Homo Sapiens
KQKELLKQY

SEQ ID NO: 74146 - protein, 9 aa, Homo Sapiens
KQKERFAAL

SEQ ID NO: 74147 - protein, 9 aa, Homo Sapiens
KQKEVIEGY

SEQ ID NO: 74148 - protein, 9 aa, Homo Sapiens
KQKISKEEF

SEQ ID NO: 74149 - protein, 9 aa, Homo Sapiens
KQKLTSIQF

SEQ ID NO: 74150 - protein, 9 aa, Homo Sapiens
KQKNTVVRY

SEQ ID NO: 74151 - protein, 9 aa, Homo Sapiens
KQKPMNVGL

SEQ ID NO: 74152 - protein, 9 aa, Homo Sapiens
KQKPVLQKY

SEQ ID NO: 74153 - protein, 9 aa, Homo Sapiens
KQKVDLQSL

SEQ ID NO: 74154 - protein, 9 aa, Homo Sapiens
KQKVPLGTF

SEQ ID NO: 74155 - protein, 9 aa, Homo Sapiens
KQMEQISQF

SEQ ID NO: 74156 - protein, 9 aa, Homo Sapiens
KQMLSALNY

SEQ ID NO: 74157 - protein, 9 aa, Homo Sapiens
KQMSISTGL

SEQ ID NO: 74158 - protein, 9 aa, Homo Sapiens
KQPDNSPEY

SEQ ID NO: 74159 - protein, 9 aa, Homo Sapiens
KQPSILSKF

SEQ ID NO: 74160 - protein, 9 aa, Homo Sapiens
KQPSVLVTF

SEQ ID NO: 74161 - protein, 9 aa, Homo Sapiens
KQQLQTQGY

SEQ ID NO: 74162 - protein, 9 aa, Homo Sapiens
KQQNPRLVY

SEQ ID NO: 74163 - protein, 9 aa, Homo Sapiens
KQQQPPTVY

SEQ ID NO: 74164 - protein, 9 aa, Homo Sapiens
KQRDFNQNF

SEQ ID NO: 74165 - protein, 9 aa, Homo Sapiens
KQRLTPKLF

SEQ ID NO: 74166 - protein, 9 aa, Homo Sapiens
KQRTHVMRF

SEQ ID NO: 74167 - protein, 9 aa, Homo Sapiens
KQTALASRF

SEQ ID NO: 74168 - protein, 9 aa, Homo Sapiens
KQTQIFTTY

SEQ ID NO: 74169 - protein, 9 aa, Homo Sapiens
KQTQTFTTY

SEQ ID NO: 74170 - protein, 9 aa, Homo Sapiens
KQVGSHPSF

SEQ ID NO: 74171 - protein, 9 aa, Homo Sapiens
KQVKYFIHY

SEQ ID NO: 74172 - protein, 9 aa, Homo Sapiens
KQVVPVSSH

SEQ ID NO: 74173 - protein, 9 aa, Homo Sapiens
KQYADKLEF

SEQ ID NO: 74174 - protein, 9 aa, Homo Sapiens
KQYADVEGF

SEQ ID NO: 74175 - protein, 9 aa, Homo Sapiens
KQYGEGLSY

SEQ ID NO: 74176 - protein, 9 aa, Homo Sapiens
KQYIMDTVF

SEQ ID NO: 74177 - protein, 9 aa, Homo Sapiens
KQYLPNIAY

SEQ ID NO: 74178 - protein, 9 aa, Homo Sapiens
KQYPRKNLF

SEQ ID NO: 74179 - protein, 9 aa, Homo Sapiens
KQYPYNNLY

SEQ ID NO: 74180 - protein, 9 aa, Homo Sapiens
KSFPGGKEY

SEQ ID NO: 74181 - protein, 9 aa, Homo Sapiens
KSIDNKALY

SEQ ID NO: 74182 - protein, 9 aa, Homo Sapiens
KSMFQRTTY

SEQ ID NO: 74183 - protein, 9 aa, Homo Sapiens
KSPDASSAF

SEQ ID NO: 74184 - protein, 9 aa, Homo Sapiens
KSSEVFTTF

SEQ ID NO: 74185 - protein, 9 aa, Homo Sapiens
KSVRPGASY

SEQ ID NO: 74186 - protein, 9 aa, Homo Sapiens
KTAPFDSRF

SEQ ID NO: 74187 - protein, 9 aa, Homo Sapiens
KTFPYQHRY

SEQ ID NO: 74188 - protein, 9 aa, Homo Sapiens
KTFVTYTVY

SEQ ID NO: 74189 - protein, 9 aa, Homo Sapiens
KTIDKKTFY

SEQ ID NO: 74190 - protein, 9 aa, Homo Sapiens
KTKEIEQVY

SEQ ID NO: 74191 - protein, 9 aa, Homo Sapiens
KTQIPTQRY

SEQ ID NO: 74192 - protein, 9 aa, Homo Sapiens
KVADMALHY

SEQ ID NO: 74193 - protein, 9 aa, Homo Sapiens
KVADPVVTF

SEQ ID NO: 74194 - protein, 9 aa, Homo Sapiens
KVAGHSLGY

SEQ ID NO: 74195 - protein, 9 aa, Homo Sapiens
KVAMSKEQY

SEQ ID NO: 74196 - protein, 9 aa, Homo Sapiens
KVANIILSY

SEQ ID NO: 74197 - protein, 9 aa, Homo Sapiens
KVAQPKEVY

SEQ ID NO: 74198 - protein, 9 aa, Homo Sapiens
KVCDIYINY

SEQ ID NO: 74199 - protein, 9 aa, Homo Sapiens
KVFERAVQY

SEQ ID NO: 74200 - protein, 9 aa, Homo Sapiens
KVFGATTNY

SEQ ID NO: 74201 - protein, 9 aa, Homo Sapiens
KVFVVGESY

SEQ ID NO: 74202 - protein, 9 aa, Homo Sapiens
KVHVPARPY

SEQ ID NO: 74203 - protein, 9 aa, Homo Sapiens
KVINAAHSF

SEQ ID NO: 74204 - protein, 9 aa, Homo Sapiens
KVIQAQTAF

SEQ ID NO: 74205 - protein, 9 aa, Homo Sapiens
KVIQSVANY

SEQ ID NO: 74206 - protein, 9 aa, Homo Sapiens
KVISSSSSF

SEQ ID NO: 74207 - protein, 9 aa, Homo Sapiens
KVKAKSIVF

SEQ ID NO: 74208 - protein, 9 aa, Homo Sapiens
KVKPDSKAF

SEQ ID NO: 74209 - protein, 9 aa, Homo Sapiens
KVMELHKSY

SEQ ID NO: 74210 - protein, 9 aa, Homo Sapiens
KVMPQNHSF

SEQ ID NO: 74211 - protein, 9 aa, Homo Sapiens
KVNDILELY

SEQ ID NO: 74212 - protein, 9 aa, Homo Sapiens
KVQEESVTF

SEQ ID NO: 74213 - protein, 9 aa, Homo Sapiens
KVRESERAF

SEQ ID NO: 74214 - protein, 9 aa, Homo Sapiens
KVSSINSRF

SEQ ID NO: 74215 - protein, 9 aa, Homo Sapiens
KVTWITKSF

SEQ ID NO: 74216 - protein, 9 aa, Homo Sapiens
KVYDLVKAY

SEQ ID NO: 74217 - protein, 9 aa, Homo Sapiens
KVYDPVSEY

SEQ ID NO: 74218 - protein, 9 aa, Homo Sapiens
KVYQETSEM

SEQ ID NO: 74219 - protein, 9 aa, Homo Sapiens
LAGQATTAY

SEQ ID NO: 74220 - protein, 9 aa, Homo Sapiens
LAKGGTVEY

SEQ ID NO: 74221 - protein, 9 aa, Homo Sapiens
LAQTTRTAY

SEQ ID NO: 74222 - protein, 9 aa, Homo Sapiens
LIAGQINTY

SEQ ID NO: 74223 - protein, 9 aa, Homo Sapiens
LIARSLGKY

SEQ ID NO: 74224 - protein, 9 aa, Homo Sapiens
LIFPQDRVF

SEQ ID NO: 74225 - protein, 9 aa, Homo Sapiens
LIHEGENSY

SEQ ID NO: 74226 - protein, 9 aa, Homo Sapiens
LIHRGVSAY

SEQ ID NO: 74227 - protein, 9 aa, Homo Sapiens
LIIANTMAF

SEQ ID NO: 74228 - protein, 9 aa, Homo Sapiens
LIIGKGAAY

SEQ ID NO: 74229 - protein, 9 aa, Homo Sapiens
LIKEKEEAF

SEQ ID NO: 74230 - protein, 9 aa, Homo Sapiens
LIKETTTGY

SEQ ID NO: 74231 - protein, 9 aa, Homo Sapiens
LIKRNKQTY

SEQ ID NO: 74232 - protein, 9 aa, Homo Sapiens
LIRDNRVVY

SEQ ID NO: 74233 - protein, 9 aa, Homo Sapiens
LIREEKNSY

SEQ ID NO: 74234 - protein, 9 aa, Homo Sapiens
LIREYIVEY

SEQ ID NO: 74235 - protein, 9 aa, Homo Sapiens
LIRKDTPHY

SEQ ID NO: 74236 - protein, 9 aa, Homo Sapiens
LIRPVSASF

SEQ ID NO: 74237 - protein, 9 aa, Homo Sapiens
LISSAHSTF

SEQ ID NO: 74238 - protein, 9 aa, Homo Sapiens
LIYEHLQQY

SEQ ID NO: 74239 - protein, 9 aa, Homo Sapiens
LIYEKAKHY

SEQ ID NO: 74240 - protein, 9 aa, Homo Sapiens
LLADITSKY

SEQ ID NO: 74241 - protein, 9 aa, Homo Sapiens
LLADPTGAF

SEQ ID NO: 74242 - protein, 9 aa, Homo Sapiens
LLAHPDAPM

SEQ ID NO: 74243 - protein, 9 aa, Homo Sapiens
LLAKNRQTF

SEQ ID NO: 74244 - protein, 9 aa, Homo Sapiens
LLFPITEKY

SEQ ID NO: 74245 - protein, 9 aa, Homo Sapiens
LLHEVDTQY

SEQ ID NO: 74246 - protein, 9 aa, Homo Sapiens
LLKDKITQY

SEQ ID NO: 74247 - protein, 9 aa, Homo Sapiens
LLKDSIVQL

SEQ ID NO: 74248 - protein, 9 aa, Homo Sapiens
LLKEDDPSY

SEQ ID NO: 74249 - protein, 9 aa, Homo Sapiens
LLKKGPKVY

SEQ ID NO: 74250 - protein, 9 aa, Homo Sapiens
LLKQIQEAY

SEQ ID NO: 74251 - protein, 9 aa, Homo Sapiens
LLKSEKSSY

SEQ ID NO: 74252 - protein, 9 aa, Homo Sapiens
LLKSPGACF

SEQ ID NO: 74253 - protein, 9 aa, Homo Sapiens
LLMGKEVGF

SEQ ID NO: 74254 - protein, 9 aa, Homo Sapiens
LLMPHSAQF

SEQ ID NO: 74255 - protein, 9 aa, Homo Sapiens
LLNKTNVKF

SEQ ID NO: 74256 - protein, 9 aa, Homo Sapiens
LLNSATTSL

SEQ ID NO: 74257 - protein, 9 aa, Homo Sapiens
LLQNPQLAY

SEQ ID NO: 74258 - protein, 9 aa, Homo Sapiens
LLQNSVKQY

SEQ ID NO: 74259 - protein, 9 aa, Homo Sapiens
LLQTRGDSF

SEQ ID NO: 74260 - protein, 9 aa, Homo Sapiens
LLQTVHAEY

SEQ ID NO: 74261 - protein, 9 aa, Homo Sapiens
LLREEDNKY

SEQ ID NO: 74262 - protein, 9 aa, Homo Sapiens
LLREENEGY

SEQ ID NO: 74263 - protein, 9 aa, Homo Sapiens
LLSKGHSCY

SEQ ID NO: 74264 - protein, 9 aa, Homo Sapiens
LLTKNGHVY

SEQ ID NO: 74265 - protein, 9 aa, Homo Sapiens
LLYESPERY

SEQ ID NO: 74266 - protein, 9 aa, Homo Sapiens
LLYQEKIRY

SEQ ID NO: 74267 - protein, 9 aa, Homo Sapiens
LLYTEVTRY

SEQ ID NO: 74268 - protein, 9 aa, Homo Sapiens
LMKEVMEHY

SEQ ID NO: 74269 - protein, 9 aa, Homo Sapiens
LMVGTSIHY

SEQ ID NO: 74270 - protein, 9 aa, Homo Sapiens
LMVPVTVVF

SEQ ID NO: 74271 - protein, 9 aa, Homo Sapiens
LQAHTQSVY

SEQ ID NO: 74272 - protein, 9 aa, Homo Sapiens
LQAMPRTEF

SEQ ID NO: 74273 - protein, 9 aa, Homo Sapiens
LQAPAFTGY

SEQ ID NO: 74274 - protein, 9 aa, Homo Sapiens
LQAPPLTSL

SEQ ID NO: 74275 - protein, 9 aa, Homo Sapiens
LQAQKLVQY

SEQ ID NO: 74276 - protein, 9 aa, Homo Sapiens
LQEQMRALY

SEQ ID NO: 74277 - protein, 9 aa, Homo Sapiens
LQFGPTEKF

SEQ ID NO: 74278 - protein, 9 aa, Homo Sapiens
LQFPVGRVH

SEQ ID NO: 74279 - protein, 9 aa, Homo Sapiens
LQHDNIVKY

SEQ ID NO: 74280 - protein, 9 aa, Homo Sapiens
LQHLQIFTY

SEQ ID NO: 74281 - protein, 9 aa, Homo Sapiens
LQHPDVAAY

SEQ ID NO: 74282 - protein, 9 aa, Homo Sapiens
LQHPNIVGY

SEQ ID NO: 74283 - protein, 9 aa, Homo Sapiens
LQHPNIVRF

SEQ ID NO: 74284 - protein, 9 aa, Homo Sapiens
LQIATHTAF

SEQ ID NO: 74285 - protein, 9 aa, Homo Sapiens
LQIDNARLA

SEQ ID NO: 74286 - protein, 9 aa, Homo Sapiens
LQIGVIRVY

SEQ ID NO: 74287 - protein, 9 aa, Homo Sapiens
LQIGVKSEF

SEQ ID NO: 74288 - protein, 9 aa, Homo Sapiens
LQIIPTLCH

SEQ ID NO: 74289 - protein, 9 aa, Homo Sapiens
LQINDKIAL

SEQ ID NO: 74290 - protein, 9 aa, Homo Sapiens
LQIQRNVTL

SEQ ID NO: 74291 - protein, 9 aa, Homo Sapiens
LQIQSPDQY

SEQ ID NO: 74292 - protein, 9 aa, Homo Sapiens
LQIVHETGY

SEQ ID NO: 74293 - protein, 9 aa, Homo Sapiens
LQKAQTQEF

SEQ ID NO: 74294 - protein, 9 aa, Homo Sapiens
LQKDLSKSM

SEQ ID NO: 74295 - protein, 9 aa, Homo Sapiens
LQKEDVKPY

SEQ ID NO: 74296 - protein, 9 aa, Homo Sapiens
LQKEGPRAF

SEQ ID NO: 74297 - protein, 9 aa, Homo Sapiens
LQKELQEQM

SEQ ID NO: 74298 - protein, 9 aa, Homo Sapiens
LQKGEANIF

SEQ ID NO: 74299 - protein, 9 aa, Homo Sapiens
LQKIEVPLY

SEQ ID NO: 74300 - protein, 9 aa, Homo Sapiens
LQKKFQKQF

SEQ ID NO: 74301 - protein, 9 aa, Homo Sapiens
LQKNVPILY

SEQ ID NO: 74302 - protein, 9 aa, Homo Sapiens
LQKPGETVF

SEQ ID NO: 74303 - protein, 9 aa, Homo Sapiens
LQKPQPQLY

SEQ ID NO: 74304 - protein, 9 aa, Homo Sapiens
LQKPVLPLY

SEQ ID NO: 74305 - protein, 9 aa, Homo Sapiens
LQKSDLSTL

SEQ ID NO: 74306 - protein, 9 aa, Homo Sapiens
LQKVVLPSY

SEQ ID NO: 74307 - protein, 9 aa, Homo Sapiens
LQKYEKEKF

SEQ ID NO: 74308 - protein, 9 aa, Homo Sapiens
LQMAKQLGY

SEQ ID NO: 74309 - protein, 9 aa, Homo Sapiens
LQNKVSGKF

SEQ ID NO: 74310 - protein, 9 aa, Homo Sapiens
LQNLFEEKY

SEQ ID NO: 74311 - protein, 9 aa, Homo Sapiens
LQNNLVELY

SEQ ID NO: 74312 - protein, 9 aa, Homo Sapiens
LQNPDLVSL

SEQ ID NO: 74313 - protein, 9 aa, Homo Sapiens
LQNPKVTEF

SEQ ID NO: 74314 - protein, 9 aa, Homo Sapiens
LQPEPIKVY

SEQ ID NO: 74315 - protein, 9 aa, Homo Sapiens
LQPERCAVF

SEQ ID NO: 74316 - protein, 9 aa, Homo Sapiens
LQQKISVLY

SEQ ID NO: 74317 - protein, 9 aa, Homo Sapiens
LQQNPVTEY

SEQ ID NO: 74318 - protein, 9 aa, Homo Sapiens
LQQPRSLTY

SEQ ID NO: 74319 - protein, 9 aa, Homo Sapiens
LQRAHEQRF

SEQ ID NO: 74320 - protein, 9 aa, Homo Sapiens
LQRANLLSY

SEQ ID NO: 74321 - protein, 9 aa, Homo Sapiens
LQRATGISF

SEQ ID NO: 74322 - protein, 9 aa, Homo Sapiens
LQRATPEQY

SEQ ID NO: 74323 - protein, 9 aa, Homo Sapiens
LQRDKPIEM

SEQ ID NO: 74324 - protein, 9 aa, Homo Sapiens
LQREEEEAF

SEQ ID NO: 74325 - protein, 9 aa, Homo Sapiens
LQREGVSHY

SEQ ID NO: 74326 - protein, 9 aa, Homo Sapiens
LQRGGLKQL

SEQ ID NO: 74327 - protein, 9 aa, Homo Sapiens
LQRLENTQY

SEQ ID NO: 74328 - protein, 9 aa, Homo Sapiens
LQRMEQQEM

SEQ ID NO: 74329 - protein, 9 aa, Homo Sapiens
LQRMTDKCF

SEQ ID NO: 74330 - protein, 9 aa, Homo Sapiens
LQRPNLQKY

SEQ ID NO: 74331 - protein, 9 aa, Homo Sapiens
LQRQGLVSL

SEQ ID NO: 74332 - protein, 9 aa, Homo Sapiens
LQRSPHQGF

SEQ ID NO: 74333 - protein, 9 aa, Homo Sapiens
LQRTMNEIY

SEQ ID NO: 74334 - protein, 9 aa, Homo Sapiens
LQRVLQSEF

SEQ ID NO: 74335 - protein, 9 aa, Homo Sapiens
LQSLPTRAY

SEQ ID NO: 74336 - protein, 9 aa, Homo Sapiens
LQSPNRVGF

SEQ ID NO: 74337 - protein, 9 aa, Homo Sapiens
LQVVKQLAY

SEQ ID NO: 74338 - protein, 9 aa, Homo Sapiens
LRNQLQSVY

SEQ ID NO: 74339 - protein, 9 aa, Homo Sapiens
LSAGATKVY

SEQ ID NO: 74340 - protein, 9 aa, Homo Sapiens
LSAGATRVY

SEQ ID NO: 74341 - protein, 9 aa, Homo Sapiens
LSDTEVLEY

SEQ ID NO: 74342 - protein, 9 aa, Homo Sapiens
LSHEESVSF

SEQ ID NO: 74343 - protein, 9 aa, Homo Sapiens
LSHLPSHHY

SEQ ID NO: 74344 - protein, 9 aa, Homo Sapiens
LSKELRQKY

SEQ ID NO: 74345 - protein, 9 aa, Homo Sapiens
LSKLTDIQY

SEQ ID NO: 74346 - protein, 9 aa, Homo Sapiens
LSKQLNIAY

SEQ ID NO: 74347 - protein, 9 aa, Homo Sapiens
LSQVPSLSH

SEQ ID NO: 74348 - protein, 9 aa, Homo Sapiens
LVIGAGACY

SEQ ID NO: 74349 - protein, 9 aa, Homo Sapiens
LVINSKNQY

SEQ ID NO: 74350 - protein, 9 aa, Homo Sapiens
LVIQDKNKY

SEQ ID NO: 74351 - protein, 9 aa, Homo Sapiens
LVKREDYLY

SEQ ID NO: 74352 - protein, 9 aa, Homo Sapiens
LVKSQISVY

SEQ ID NO: 74353 - protein, 9 aa, Homo Sapiens
LVRELEKKF

SEQ ID NO: 74354 - protein, 9 aa, Homo Sapiens
LVRPPVQVY

SEQ ID NO: 74355 - protein, 9 aa, Homo Sapiens
LVSGGHMEY

SEQ ID NO: 74356 - protein, 9 aa, Homo Sapiens
LVSKQVKEY

SEQ ID NO: 74357 - protein, 9 aa, Homo Sapiens
LVVDSHVQY

SEQ ID NO: 74358 - protein, 9 aa, Homo Sapiens
LVYNGVYQY

SEQ ID NO: 74359 - protein, 9 aa, Homo Sapiens
MARSPGRAY

SEQ ID NO: 74360 - protein, 9 aa, Homo Sapiens
MEIGKTETF

SEQ ID NO: 74361 - protein, 9 aa, Homo Sapiens
MIIFIHSYY

SEQ ID NO: 74362 - protein, 9 aa, Homo Sapiens
MIIGGGMAF

SEQ ID NO: 74363 - protein, 9 aa, Homo Sapiens
MIKGVTLGF

SEQ ID NO: 74364 - protein, 9 aa, Homo Sapiens
MISEPRISY

SEQ ID NO: 74365 - protein, 9 aa, Homo Sapiens
MLAGATAVY

SEQ ID NO: 74366 - protein, 9 aa, Homo Sapiens
MLAPLSTTY

SEQ ID NO: 74367 - protein, 9 aa, Homo Sapiens
MLAPPRELF

SEQ ID NO: 74368 - protein, 9 aa, Homo Sapiens
MLKIAEMEY

SEQ ID NO: 74369 - protein, 9 aa, Homo Sapiens
MLRDIIREY

SEQ ID NO: 74370 - protein, 9 aa, Homo Sapiens
MLYKGQTAY

SEQ ID NO: 74371 - protein, 9 aa, Homo Sapiens
MMIPSQISY

SEQ ID NO: 74372 - protein, 9 aa, Homo Sapiens
MMKTEGPSY

SEQ ID NO: 74373 - protein, 9 aa, Homo Sapiens
MMNGGHYTY

SEQ ID NO: 74374 - protein, 9 aa, Homo Sapiens
MMYSGELKF

SEQ ID NO: 74375 - protein, 9 aa, Homo Sapiens
MQAQSIETY

SEQ ID NO: 74376 - protein, 9 aa, Homo Sapiens
MQKLPGTSH

SEQ ID NO: 74377 - protein, 9 aa, Homo Sapiens
MQLPNGVTY

SEQ ID NO: 74378 - protein, 9 aa, Homo Sapiens
MQNHIVQAF

SEQ ID NO: 74379 - protein, 9 aa, Homo Sapiens
MQQIQKGSY

SEQ ID NO: 74380 - protein, 9 aa, Homo Sapiens
MQQPQISVY

SEQ ID NO: 74381 - protein, 9 aa, Homo Sapiens
MQREPNQAF

SEQ ID NO: 74382 - protein, 9 aa, Homo Sapiens
MSKAPSNTF

SEQ ID NO: 74383 - protein, 9 aa, Homo Sapiens
MTNPHNHLY

SEQ ID NO: 74384 - protein, 9 aa, Homo Sapiens
MVADRVEVY

SEQ ID NO: 74385 - protein, 9 aa, Homo Sapiens
MVQRGGCVY

SEQ ID NO: 74386 - protein, 9 aa, Homo Sapiens
MVVEERCVY

SEQ ID NO: 74387 - protein, 9 aa, Homo Sapiens
NALECARAI

SEQ ID NO: 74388 - protein, 9 aa, Homo Sapiens
NIHSGDRPY

SEQ ID NO: 74389 - protein, 9 aa, Homo Sapiens
NLKTVQPVL

SEQ ID NO: 74390 - protein, 9 aa, Homo Sapiens
NQIESKAAY

SEQ ID NO: 74391 - protein, 9 aa, Homo Sapiens
NQIKSGTPY

SEQ ID NO: 74392 - protein, 9 aa, Homo Sapiens
NQIPFIIQY

SEQ ID NO: 74393 - protein, 9 aa, Homo Sapiens
NQIRPGLQY

SEQ ID NO: 74394 - protein, 9 aa, Homo Sapiens
NQKPPSAEF

SEQ ID NO: 74395 - protein, 9 aa, Homo Sapiens
NQKPPSAEY

SEQ ID NO: 74396 - protein, 9 aa, Homo Sapiens
NQKQQHLAF

SEQ ID NO: 74397 - protein, 9 aa, Homo Sapiens
NQRVQTVHF

SEQ ID NO: 74398 - protein, 9 aa, Homo Sapiens
NQVQSGRAF

SEQ ID NO: 74399 - protein, 9 aa, Homo Sapiens
NVIRDAVTY

SEQ ID NO: 74400 - protein, 9 aa, Homo Sapiens
PQAPSGPSY

SEQ ID NO: 74401 - protein, 9 aa, Homo Sapiens
PQCPSGRVY

SEQ ID NO: 74402 - protein, 9 aa, Homo Sapiens
PQHQSIQEY

SEQ ID NO: 74403 - protein, 9 aa, Homo Sapiens
PQKIAGELY

SEQ ID NO: 74404 - protein, 9 aa, Homo Sapiens
PQMPTQAMF

SEQ ID NO: 74405 - protein, 9 aa, Homo Sapiens
PQRATSNVF

SEQ ID NO: 74406 - protein, 9 aa, Homo Sapiens
PQYQTWEEF

SEQ ID NO: 74407 - protein, 9 aa, Homo Sapiens
QAIKNGQAL

SEQ ID NO: 74408 - protein, 9 aa, Homo Sapiens
QAYHSPATA

SEQ ID NO: 74409 - protein, 9 aa, Homo Sapiens
QERPSVTSY

SEQ ID NO: 74410 - protein, 9 aa, Homo Sapiens
QIALPSGCY

SEQ ID NO: 74411 - protein, 9 aa, Homo Sapiens
QIIQEKRGY

SEQ ID NO: 74412 - protein, 9 aa, Homo Sapiens
QIKPDMETY

SEQ ID NO: 74413 - protein, 9 aa, Homo Sapiens
QIRDVPVLY

SEQ ID NO: 74414 - protein, 9 aa, Homo Sapiens
QLGPVGGVF

SEQ ID NO: 74415 - protein, 9 aa, Homo Sapiens
QLIDIKVAH

SEQ ID NO: 74416 - protein, 9 aa, Homo Sapiens
QLINHIEQF

SEQ ID NO: 74417 - protein, 9 aa, Homo Sapiens
QLIRCIVEY

SEQ ID NO: 74418 - protein, 9 aa, Homo Sapiens
QLKGGIHKY

SEQ ID NO: 74419 - protein, 9 aa, Homo Sapiens
QLPKPTSTY

SEQ ID NO: 74420 - protein, 9 aa, Homo Sapiens
QLQKDKQVY

SEQ ID NO: 74421 - protein, 9 aa, Homo Sapiens
QLRAQILAY

SEQ ID NO: 74422 - protein, 9 aa, Homo Sapiens
QLRAQIMAY

SEQ ID NO: 74423 - protein, 9 aa, Homo Sapiens
QLSFPVRAY

SEQ ID NO: 74424 - protein, 9 aa, Homo Sapiens
QLVAEQVTY

SEQ ID NO: 74425 - protein, 9 aa, Homo Sapiens
QMAGLRDTY

SEQ ID NO: 74426 - protein, 9 aa, Homo Sapiens
QMSNITVTY

SEQ ID NO: 74427 - protein, 9 aa, Homo Sapiens
QMWISKQEY

SEQ ID NO: 74428 - protein, 9 aa, Homo Sapiens
QQAALASQY

SEQ ID NO: 74429 - protein, 9 aa, Homo Sapiens
QQALHTVQY

SEQ ID NO: 74430 - protein, 9 aa, Homo Sapiens
QQALLRISL

SEQ ID NO: 74431 - protein, 9 aa, Homo Sapiens
QQAQAFYTF

SEQ ID NO: 74432 - protein, 9 aa, Homo Sapiens
QQFLIQQQY

SEQ ID NO: 74433 - protein, 9 aa, Homo Sapiens
QQFPAFNSY

SEQ ID NO: 74434 - protein, 9 aa, Homo Sapiens
QQFRNAPPF

SEQ ID NO: 74435 - protein, 9 aa, Homo Sapiens
QQHFDVQQY

SEQ ID NO: 74436 - protein, 9 aa, Homo Sapiens
QQHSAQAMF

SEQ ID NO: 74437 - protein, 9 aa, Homo Sapiens
QQIDIQTHF

SEQ ID NO: 74438 - protein, 9 aa, Homo Sapiens
QQIPSKVLF

SEQ ID NO: 74439 - protein, 9 aa, Homo Sapiens
QQITPQLAL

SEQ ID NO: 74440 - protein, 9 aa, Homo Sapiens
QQIYARQYY

SEQ ID NO: 74441 - protein, 9 aa, Homo Sapiens
QQLQGQQFY

SEQ ID NO: 74442 - protein, 9 aa, Homo Sapiens
QQLQLFTEY

SEQ ID NO: 74443 - protein, 9 aa, Homo Sapiens
QQMEQFIQY

SEQ ID NO: 74444 - protein, 9 aa, Homo Sapiens
QQNLNTITY

SEQ ID NO: 74445 - protein, 9 aa, Homo Sapiens
QQNNVENVY

SEQ ID NO: 74446 - protein, 9 aa, Homo Sapiens
QQNPKVQKY

SEQ ID NO: 74447 - protein, 9 aa, Homo Sapiens
QQNPQPLIF

SEQ ID NO: 74448 - protein, 9 aa, Homo Sapiens
QQNQYQASY

SEQ ID NO: 74449 - protein, 9 aa, Homo Sapiens
QQPASGVAY

SEQ ID NO: 74450 - protein, 9 aa, Homo Sapiens
QQQAPGKNF

SEQ ID NO: 74451 - protein, 9 aa, Homo Sapiens
QQQIIRETF

SEQ ID NO: 74452 - protein, 9 aa, Homo Sapiens
QQQIVRETF

SEQ ID NO: 74453 - protein, 9 aa, Homo Sapiens
QQQPALVNY

SEQ ID NO: 74454 - protein, 9 aa, Homo Sapiens
QQQQNPQVY

SEQ ID NO: 74455 - protein, 9 aa, Homo Sapiens
QQQQPQHAF

SEQ ID NO: 74456 - protein, 9 aa, Homo Sapiens
QQQQQQQFQ

SEQ ID NO: 74457 - protein, 9 aa, Homo Sapiens
QQQQQTQAF

SEQ ID NO: 74458 - protein, 9 aa, Homo Sapiens
QQRDLTSQF

SEQ ID NO: 74459 - protein, 9 aa, Homo Sapiens
QQRHLFRTY

SEQ ID NO: 74460 - protein, 9 aa, Homo Sapiens
QQRLLQQQM

SEQ ID NO: 74461 - protein, 9 aa, Homo Sapiens
QQRNAYTRF

SEQ ID NO: 74462 - protein, 9 aa, Homo Sapiens
QQSGAHVEL

SEQ ID NO: 74463 - protein, 9 aa, Homo Sapiens
QQSPGSKAF

SEQ ID NO: 74464 - protein, 9 aa, Homo Sapiens
QQTNSIRNY

SEQ ID NO: 74465 - protein, 9 aa, Homo Sapiens
QQVESRWGY

SEQ ID NO: 74466 - protein, 9 aa, Homo Sapiens
QQVPVNQVF

SEQ ID NO: 74467 - protein, 9 aa, Homo Sapiens
QQVPVPHVY

SEQ ID NO: 74468 - protein, 9 aa, Homo Sapiens
QQYNSFVSL

SEQ ID NO: 74469 - protein, 9 aa, Homo Sapiens
QQYPGQQGY

SEQ ID NO: 74470 - protein, 9 aa, Homo Sapiens
QQYVGKVKF

SEQ ID NO: 74471 - protein, 9 aa, Homo Sapiens
QSKTIKVSY

SEQ ID NO: 74472 - protein, 9 aa, Homo Sapiens
QSSKALLQL

SEQ ID NO: 74473 - protein, 9 aa, Homo Sapiens
QTVLESIEY

SEQ ID NO: 74474 - protein, 9 aa, Homo Sapiens
QVADIDGQY

SEQ ID NO: 74475 - protein, 9 aa, Homo Sapiens
QVAEIVSKY

SEQ ID NO: 74476 - protein, 9 aa, Homo Sapiens
QVAPLTHVF

SEQ ID NO: 74477 - protein, 9 aa, Homo Sapiens
QVAPVANSY

SEQ ID NO: 74478 - protein, 9 aa, Homo Sapiens
QVFEGHTHY

SEQ ID NO: 74479 - protein, 9 aa, Homo Sapiens
QVMEGRVTF

SEQ ID NO: 74480 - protein, 9 aa, Homo Sapiens
QVMPGNIVF

SEQ ID NO: 74481 - protein, 9 aa, Homo Sapiens
QVQQVAAEY

SEQ ID NO: 74482 - protein, 9 aa, Homo Sapiens
QVVFSGKAY

SEQ ID NO: 74483 - protein, 9 aa, Homo Sapiens
QVYGGVTYY

SEQ ID NO: 74484 - protein, 9 aa, Homo Sapiens
RAAPFSLEY

SEQ ID NO: 74485 - protein, 9 aa, Homo Sapiens
RAFHPDLEF

SEQ ID NO: 74486 - protein, 9 aa, Homo Sapiens
RAFPNKQGY

SEQ ID NO: 74487 - protein, 9 aa, Homo Sapiens
RAKEIRLSL

SEQ ID NO: 74488 - protein, 9 aa, Homo Sapiens
RANEPCTSF

SEQ ID NO: 74489 - protein, 9 aa, Homo Sapiens
RANPFNTPH

SEQ ID NO: 74490 - protein, 9 aa, Homo Sapiens
RAQILRIQY

SEQ ID NO: 74491 - protein, 9 aa, Homo Sapiens
RAQPRGAVY

SEQ ID NO: 74492 - protein, 9 aa, Homo Sapiens
RARELLVSY

SEQ ID NO: 74493 - protein, 9 aa, Homo Sapiens
RAYAKALHY

SEQ ID NO: 74494 - protein, 9 aa, Homo Sapiens
RAYAKDVKF

SEQ ID NO: 74495 - protein, 9 aa, Homo Sapiens
RAYQQSEAY

SEQ ID NO: 74496 - protein, 9 aa, Homo Sapiens
RECPSVLEY

SEQ ID NO: 74497 - protein, 9 aa, Homo Sapiens
REIESSPQY

SEQ ID NO: 74498 - protein, 9 aa, Homo Sapiens
RENDIKSYF

SEQ ID NO: 74499 - protein, 9 aa, Homo Sapiens
RERELAEKY

SEQ ID NO: 74500 - protein, 9 aa, Homo Sapiens
RFYIESISY

SEQ ID NO: 74501 - protein, 9 aa, Homo Sapiens
RGFAHGSVY

SEQ ID NO: 74502 - protein, 9 aa, Homo Sapiens
RGQQVIVSY

SEQ ID NO: 74503 - protein, 9 aa, Homo Sapiens
RHMEQHVSF

SEQ ID NO: 74504 - protein, 9 aa, Homo Sapiens
RIADISQVY

SEQ ID NO: 74505 - protein, 9 aa, Homo Sapiens
RIADLISSF

SEQ ID NO: 74506 - protein, 9 aa, Homo Sapiens
RIADRGAEY

SEQ ID NO: 74507 - protein, 9 aa, Homo Sapiens
RIAPAFSSM

SEQ ID NO: 74508 - protein, 9 aa, Homo Sapiens
RIAPPDRRF

SEQ ID NO: 74509 - protein, 9 aa, Homo Sapiens
RIATPFQVY

SEQ ID NO: 74510 - protein, 9 aa, Homo Sapiens
RIFANAHTY

SEQ ID NO: 74511 - protein, 9 aa, Homo Sapiens
RIFANTESY

SEQ ID NO: 74512 - protein, 9 aa, Homo Sapiens
RIFEKDSKF

SEQ ID NO: 74513 - protein, 9 aa, Homo Sapiens
RIFGTDSQY

SEQ ID NO: 74514 - protein, 9 aa, Homo Sapiens
RIFPLSEDY

SEQ ID NO: 74515 - protein, 9 aa, Homo Sapiens
RIHTGEKPY

SEQ ID NO: 74516 - protein, 9 aa, Homo Sapiens
RIHTGERPY

SEQ ID NO: 74517 - protein, 9 aa, Homo Sapiens
RIIFVDEVF

SEQ ID NO: 74518 - protein, 9 aa, Homo Sapiens
RIIHTGEKF

SEQ ID NO: 74519 - protein, 9 aa, Homo Sapiens
RIIPRHLQL

SEQ ID NO: 74520 - protein, 9 aa, Homo Sapiens
RIIPRSVLY

SEQ ID NO: 74521 - protein, 9 aa, Homo Sapiens
RIKAQDEAF

SEQ ID NO: 74522 - protein, 9 aa, Homo Sapiens
RIKETKEVY

SEQ ID NO: 74523 - protein, 9 aa, Homo Sapiens
RIKLEAERF

SEQ ID NO: 74524 - protein, 9 aa, Homo Sapiens
RIKLGDYHF

SEQ ID NO: 74525 - protein, 9 aa, Homo Sapiens
RIKNNDPKL

SEQ ID NO: 74526 - protein, 9 aa, Homo Sapiens
RIKPNAITY

SEQ ID NO: 74527 - protein, 9 aa, Homo Sapiens
RIKPRPERF

SEQ ID NO: 74528 - protein, 9 aa, Homo Sapiens
RIKTEEEAF

SEQ ID NO: 74529 - protein, 9 aa, Homo Sapiens
RILGLLQTY

SEQ ID NO: 74530 - protein, 9 aa, Homo Sapiens
RIMKKTSLY

SEQ ID NO: 74531 - protein, 9 aa, Homo Sapiens
RIMSGESTF

SEQ ID NO: 74532 - protein, 9 aa, Homo Sapiens
RINENDPEY

SEQ ID NO: 74533 - protein, 9 aa, Homo Sapiens
RINPQTTEF

SEQ ID NO: 74534 - protein, 9 aa, Homo Sapiens
RIREDIAKY

SEQ ID NO: 74535 - protein, 9 aa, Homo Sapiens
RISDFHETY

SEQ ID NO: 74536 - protein, 9 aa, Homo Sapiens
RISDIMDVY

SEQ ID NO: 74537 - protein, 9 aa, Homo Sapiens
RISGVDRYY

SEQ ID NO: 74538 - protein, 9 aa, Homo Sapiens
RISVIKSVF

SEQ ID NO: 74539 - protein, 9 aa, Homo Sapiens
RITENTSQY

SEQ ID NO: 74540 - protein, 9 aa, Homo Sapiens
RLAEQAERY

SEQ ID NO: 74541 - protein, 9 aa, Homo Sapiens
RLAEQVSSY

SEQ ID NO: 74542 - protein, 9 aa, Homo Sapiens
RLAKGSECY

SEQ ID NO: 74543 - protein, 9 aa, Homo Sapiens
RLAPRGSGY

SEQ ID NO: 74544 - protein, 9 aa, Homo Sapiens
RLAQLLEGY

SEQ ID NO: 74545 - protein, 9 aa, Homo Sapiens
RLATLFESY

SEQ ID NO: 74546 - protein, 9 aa, Homo Sapiens
RLFEKMQAY

SEQ ID NO: 74547 - protein, 9 aa, Homo Sapiens
RLFFHCSQY

SEQ ID NO: 74548 - protein, 9 aa, Homo Sapiens
RLFKDQLVY

SEQ ID NO: 74549 - protein, 9 aa, Homo Sapiens
RLFKIDKEY

SEQ ID NO: 74550 - protein, 9 aa, Homo Sapiens
RLFPLIQAM

SEQ ID NO: 74551 - protein, 9 aa, Homo Sapiens
RLFPLIQTM

SEQ ID NO: 74552 - protein, 9 aa, Homo Sapiens
RLFQDEEIY

SEQ ID NO: 74553 - protein, 9 aa, Homo Sapiens
RLFQENSVL

SEQ ID NO: 74554 - protein, 9 aa, Homo Sapiens
RLFRDATRY

SEQ ID NO: 74555 - protein, 9 aa, Homo Sapiens
RLFSRLYTY

SEQ ID NO: 74556 - protein, 9 aa, Homo Sapiens
RLFVGARIY

SEQ ID NO: 74557 - protein, 9 aa, Homo Sapiens
RLHCESESF

SEQ ID NO: 74558 - protein, 9 aa, Homo Sapiens
RLHSGEVKF

SEQ ID NO: 74559 - protein, 9 aa, Homo Sapiens
RLHSHDVRY

SEQ ID NO: 74560 - protein, 9 aa, Homo Sapiens
RLIGHQEAF

SEQ ID NO: 74561 - protein, 9 aa, Homo Sapiens
RLIGIYKTY

SEQ ID NO: 74562 - protein, 9 aa, Homo Sapiens
RLILDWVPY

SEQ ID NO: 74563 - protein, 9 aa, Homo Sapiens
RLINTQAIF

SEQ ID NO: 74564 - protein, 9 aa, Homo Sapiens
RLIPHVQVF

SEQ ID NO: 74565 - protein, 9 aa, Homo Sapiens
RLIPSLRTY

SEQ ID NO: 74566 - protein, 9 aa, Homo Sapiens
RLISENSVY

SEQ ID NO: 74567 - protein, 9 aa, Homo Sapiens
RLKDGVLAY

SEQ ID NO: 74568 - protein, 9 aa, Homo Sapiens
RLKDVVRAY

SEQ ID NO: 74569 - protein, 9 aa, Homo Sapiens
RLKEFLKNY

SEQ ID NO: 74570 - protein, 9 aa, Homo Sapiens
RLKGKDMVV

SEQ ID NO: 74571 - protein, 9 aa, Homo Sapiens
RLKKLIEQY

SEQ ID NO: 74572 - protein, 9 aa, Homo Sapiens
RLKLEVQKY

SEQ ID NO: 74573 - protein, 9 aa, Homo Sapiens
RLKLQGAKF

SEQ ID NO: 74574 - protein, 9 aa, Homo Sapiens
RLKNERTVF

SEQ ID NO: 74575 - protein, 9 aa, Homo Sapiens
RLKSKDVKL

SEQ ID NO: 74576 - protein, 9 aa, Homo Sapiens
RLKSQDLEL

SEQ ID NO: 74577 - protein, 9 aa, Homo Sapiens
RLKTMTDTY

SEQ ID NO: 74578 - protein, 9 aa, Homo Sapiens
RLKVEGHRF

SEQ ID NO: 74579 - protein, 9 aa, Homo Sapiens
RLLDTTITF

SEQ ID NO: 74580 - protein, 9 aa, Homo Sapiens
RLMKQISSF

SEQ ID NO: 74581 - protein, 9 aa, Homo Sapiens
RLMQCVSSF

SEQ ID NO: 74582 - protein, 9 aa, Homo Sapiens
RLMQVGEEF

SEQ ID NO: 74583 - protein, 9 aa, Homo Sapiens
RLNEAEQKY

SEQ ID NO: 74584 - protein, 9 aa, Homo Sapiens
RLNKVISEL

SEQ ID NO: 74585 - protein, 9 aa, Homo Sapiens
RLNNKINSY

SEQ ID NO: 74586 - protein, 9 aa, Homo Sapiens
RLNSAPDMR

SEQ ID NO: 74587 - protein, 9 aa, Homo Sapiens
RLPAGQATY

SEQ ID NO: 74588 - protein, 9 aa, Homo Sapiens
RLPATRTVY

SEQ ID NO: 74589 - protein, 9 aa, Homo Sapiens
RLPDAHSDY

SEQ ID NO: 74590 - protein, 9 aa, Homo Sapiens
RLQAKVEKY

SEQ ID NO: 74591 - protein, 9 aa, Homo Sapiens
RLQDQHMFY

SEQ ID NO: 74592 - protein, 9 aa, Homo Sapiens
RLQEALNLF

SEQ ID NO: 74593 - protein, 9 aa, Homo Sapiens
RLQEFLTAY

SEQ ID NO: 74594 - protein, 9 aa, Homo Sapiens
RLQEVLNDY

SEQ ID NO: 74595 - protein, 9 aa, Homo Sapiens
RLQKIQNAY

SEQ ID NO: 74596 - protein, 9 aa, Homo Sapiens
RLQPFLQRY

SEQ ID NO: 74597 - protein, 9 aa, Homo Sapiens
RLQSSFTAF

SEQ ID NO: 74598 - protein, 9 aa, Homo Sapiens
RLQVSYEEY

SEQ ID NO: 74599 - protein, 9 aa, Homo Sapiens
RLRDDIKEY

SEQ ID NO: 74600 - protein, 9 aa, Homo Sapiens
RLSLNGVRF

SEQ ID NO: 74601 - protein, 9 aa, Homo Sapiens
RLSPAGAAL

SEQ ID NO: 74602 - protein, 9 aa, Homo Sapiens
RLSPGESAY

SEQ ID NO: 74603 - protein, 9 aa, Homo Sapiens
RLTTSTSTF

SEQ ID NO: 74604 - protein, 9 aa, Homo Sapiens
RLVAIRTEY

SEQ ID NO: 74605 - protein, 9 aa, Homo Sapiens
RLVELLVSY

SEQ ID NO: 74606 - protein, 9 aa, Homo Sapiens
RLVPTGLDF

SEQ ID NO: 74607 - protein, 9 aa, Homo Sapiens
RLVPVLSSY

SEQ ID NO: 74608 - protein, 9 aa, Homo Sapiens
RLVQSPNSY

SEQ ID NO: 74609 - protein, 9 aa, Homo Sapiens
RLYEAMCEF

SEQ ID NO: 74610 - protein, 9 aa, Homo Sapiens
RLYFSQQTY

SEQ ID NO: 74611 - protein, 9 aa, Homo Sapiens
RLYQHAVEY

SEQ ID NO: 74612 - protein, 9 aa, Homo Sapiens
RMHPALSAF

SEQ ID NO: 74613 - protein, 9 aa, Homo Sapiens
RMHQAIERF

SEQ ID NO: 74614 - protein, 9 aa, Homo Sapiens
RMIDIQTRM

SEQ ID NO: 74615 - protein, 9 aa, Homo Sapiens
RMIIAVTSY

SEQ ID NO: 74616 - protein, 9 aa, Homo Sapiens
RMIKEKLCY

SEQ ID NO: 74617 - protein, 9 aa, Homo Sapiens
RMITETEKF

SEQ ID NO: 74618 - protein, 9 aa, Homo Sapiens
RMIYLVTEY

SEQ ID NO: 74619 - protein, 9 aa, Homo Sapiens
RMKDEIREY

SEQ ID NO: 74620 - protein, 9 aa, Homo Sapiens
RMKEVGKVF

SEQ ID NO: 74621 - protein, 9 aa, Homo Sapiens
RMKKLDQQY

SEQ ID NO: 74622 - protein, 9 aa, Homo Sapiens
RMKLKAEAY

SEQ ID NO: 74623 - protein, 9 aa, Homo Sapiens
RMKVTNEDF

SEQ ID NO: 74624 - protein, 9 aa, Homo Sapiens
RMLFKSKAY

SEQ ID NO: 74625 - protein, 9 aa, Homo Sapiens
RMMDSQENY

SEQ ID NO: 74626 - protein, 9 aa, Homo Sapiens
RMNCVLATY

SEQ ID NO: 74627 - protein, 9 aa, Homo Sapiens
RMPPFTQAF

SEQ ID NO: 74628 - protein, 9 aa, Homo Sapiens
RMQDTSVSF

SEQ ID NO: 74629 - protein, 9 aa, Homo Sapiens
RMQEGSEVY

SEQ ID NO: 74630 - protein, 9 aa, Homo Sapiens
RMRHLKIVY

SEQ ID NO: 74631 - protein, 9 aa, Homo Sapiens
RMVEMFLEY

SEQ ID NO: 74632 - protein, 9 aa, Homo Sapiens
RMVLVNAVY

SEQ ID NO: 74633 - protein, 9 aa, Homo Sapiens
RMVQEAEKY

SEQ ID NO: 74634 - protein, 9 aa, Homo Sapiens
RMYPGLQVY

SEQ ID NO: 74635 - protein, 9 aa, Homo Sapiens
RQAAFVDSY

SEQ ID NO: 74636 - protein, 9 aa, Homo Sapiens
RQADFVQVL

SEQ ID NO: 74637 - protein, 9 aa, Homo Sapiens
RQAEMKRLY

SEQ ID NO: 74638 - protein, 9 aa, Homo Sapiens
RQAHLTNQY

SEQ ID NO: 74639 - protein, 9 aa, Homo Sapiens
RQAHMQARF

SEQ ID NO: 74640 - protein, 9 aa, Homo Sapiens
RQAIGLMGY

SEQ ID NO: 74641 - protein, 9 aa, Homo Sapiens
RQALKVIFY

SEQ ID NO: 74642 - protein, 9 aa, Homo Sapiens
RQALLIERY

SEQ ID NO: 74643 - protein, 9 aa, Homo Sapiens
RQALLLLAL

SEQ ID NO: 74644 - protein, 9 aa, Homo Sapiens
RQAMPFKCM

SEQ ID NO: 74645 - protein, 9 aa, Homo Sapiens
RQAPPHIEL

SEQ ID NO: 74646 - protein, 9 aa, Homo Sapiens
RQATVNVSY

SEQ ID NO: 74647 - protein, 9 aa, Homo Sapiens
RQCPLKVSY

SEQ ID NO: 74648 - protein, 9 aa, Homo Sapiens
RQELSHALY

SEQ ID NO: 74649 - protein, 9 aa, Homo Sapiens
RQFCQTVGY

SEQ ID NO: 74650 - protein, 9 aa, Homo Sapiens
RQFDLAWQY

SEQ ID NO: 74651 - protein, 9 aa, Homo Sapiens
RQFEGLMRF

SEQ ID NO: 74652 - protein, 9 aa, Homo Sapiens
RQFEGLQGY

SEQ ID NO: 74653 - protein, 9 aa, Homo Sapiens
RQFGKKHLF

SEQ ID NO: 74654 - protein, 9 aa, Homo Sapiens
RQFMAETQF

SEQ ID NO: 74655 - protein, 9 aa, Homo Sapiens
RQFPFHEMF

SEQ ID NO: 74656 - protein, 9 aa, Homo Sapiens
RQFPGSHRV

SEQ ID NO: 74657 - protein, 9 aa, Homo Sapiens
RQFPTAFEF

SEQ ID NO: 74658 - protein, 9 aa, Homo Sapiens
RQFPVTVHF

SEQ ID NO: 74659 - protein, 9 aa, Homo Sapiens
RQGAHIVGY

SEQ ID NO: 74660 - protein, 9 aa, Homo Sapiens
RQGFVPAAY

SEQ ID NO: 74661 - protein, 9 aa, Homo Sapiens
RQHEEPESF

SEQ ID NO: 74662 - protein, 9 aa, Homo Sapiens
RQHFSPLSL

SEQ ID NO: 74663 - protein, 9 aa, Homo Sapiens
RQHLQATGV

SEQ ID NO: 74664 - protein, 9 aa, Homo Sapiens
RQHNTEIRM

SEQ ID NO: 74665 - protein, 9 aa, Homo Sapiens
RQHNYTEAF

SEQ ID NO: 74666 - protein, 9 aa, Homo Sapiens
RQHPIQVFY

SEQ ID NO: 74667 - protein, 9 aa, Homo Sapiens
RQHRMMILY

SEQ ID NO: 74668 - protein, 9 aa, Homo Sapiens
RQIAKAMEA

SEQ ID NO: 74669 - protein, 9 aa, Homo Sapiens
RQIASNTSL

SEQ ID NO: 74670 - protein, 9 aa, Homo Sapiens
RQIDFVLSY

SEQ ID NO: 74671 - protein, 9 aa, Homo Sapiens
RQIDLVDNY

SEQ ID NO: 74672 - protein, 9 aa, Homo Sapiens
RQIDRQNRL

SEQ ID NO: 74673 - protein, 9 aa, Homo Sapiens
RQIEEQKAL

SEQ ID NO: 74674 - protein, 9 aa, Homo Sapiens
RQIGSVDTF

SEQ ID NO: 74675 - protein, 9 aa, Homo Sapiens
RQIHKFEEL

SEQ ID NO: 74676 - protein, 9 aa, Homo Sapiens
RQIHKVLGM

SEQ ID NO: 74677 - protein, 9 aa, Homo Sapiens
RQIKHMIKY

SEQ ID NO: 74678 - protein, 9 aa, Homo Sapiens
RQINWTVLY

SEQ ID NO: 74679 - protein, 9 aa, Homo Sapiens
RQIQESVTF

SEQ ID NO: 74680 - protein, 9 aa, Homo Sapiens
RQITQVYGF

SEQ ID NO: 74681 - protein, 9 aa, Homo Sapiens
RQIVSAVAY

SEQ ID NO: 74682 - protein, 9 aa, Homo Sapiens
RQIVSAVQY

SEQ ID NO: 74683 - protein, 9 aa, Homo Sapiens
RQIVSGLKY

SEQ ID NO: 74684 - protein, 9 aa, Homo Sapiens
RQKDNLNNY

SEQ ID NO: 74685 - protein, 9 aa, Homo Sapiens
RQKDPVKGM

SEQ ID NO: 74686 - protein, 9 aa, Homo Sapiens
RQKEIPRVL

SEQ ID NO: 74687 - protein, 9 aa, Homo Sapiens
RQKELESNY

SEQ ID NO: 74688 - protein, 9 aa, Homo Sapiens
RQKEVNENF

SEQ ID NO: 74689 - protein, 9 aa, Homo Sapiens
RQKGEQFRL

SEQ ID NO: 74690 - protein, 9 aa, Homo Sapiens
RQKKLEVAM

SEQ ID NO: 74691 - protein, 9 aa, Homo Sapiens
RQKKLFCRY

SEQ ID NO: 74692 - protein, 9 aa, Homo Sapiens
RQKLIAQDY

SEQ ID NO: 74693 - protein, 9 aa, Homo Sapiens
RQKLVRNIY

SEQ ID NO: 74694 - protein, 9 aa, Homo Sapiens
RQKQLQQQF

SEQ ID NO: 74695 - protein, 9 aa, Homo Sapiens
RQKTAVHVL

SEQ ID NO: 74696 - protein, 9 aa, Homo Sapiens
RQKVKNTEF

SEQ ID NO: 74697 - protein, 9 aa, Homo Sapiens
RQKYNVRSM

SEQ ID NO: 74698 - protein, 9 aa, Homo Sapiens
RQLDRNLTF

SEQ ID NO: 74699 - protein, 9 aa, Homo Sapiens
RQLIQESKF

SEQ ID NO: 74700 - protein, 9 aa, Homo Sapiens
RQLLIPCAY

SEQ ID NO: 74701 - protein, 9 aa, Homo Sapiens
RQLLQEDRY

SEQ ID NO: 74702 - protein, 9 aa, Homo Sapiens
RQLLYITAF

SEQ ID NO: 74703 - protein, 9 aa, Homo Sapiens
RQLPCMHEF

SEQ ID NO: 74704 - protein, 9 aa, Homo Sapiens
RQLPSFQTF

SEQ ID NO: 74705 - protein, 9 aa, Homo Sapiens
RQLPSSHAL

SEQ ID NO: 74706 - protein, 9 aa, Homo Sapiens
RQLQQLISF

SEQ ID NO: 74707 - protein, 9 aa, Homo Sapiens
RQMAHVQIF

SEQ ID NO: 74708 - protein, 9 aa, Homo Sapiens
RQMVEHGGF

SEQ ID NO: 74709 - protein, 9 aa, Homo Sapiens
RQNESYLNF

SEQ ID NO: 74710 - protein, 9 aa, Homo Sapiens
RQNIGVATF

SEQ ID NO: 74711 - protein, 9 aa, Homo Sapiens
RQNKLTYTM

SEQ ID NO: 74712 - protein, 9 aa, Homo Sapiens
RQNLLSQSH

SEQ ID NO: 74713 - protein, 9 aa, Homo Sapiens
RQNRVCTTV

SEQ ID NO: 74714 - protein, 9 aa, Homo Sapiens
RQNVAVNEL

SEQ ID NO: 74715 - protein, 9 aa, Homo Sapiens
RQNVKRATF

SEQ ID NO: 74716 - protein, 9 aa, Homo Sapiens
RQPAKVAAL

SEQ ID NO: 74717 - protein, 9 aa, Homo Sapiens
RQPGFASNF

SEQ ID NO: 74718 - protein, 9 aa, Homo Sapiens
RQPGSTAQY

SEQ ID NO: 74719 - protein, 9 aa, Homo Sapiens
RQPLITLQY

SEQ ID NO: 74720 - protein, 9 aa, Homo Sapiens
RQPLKATAY

SEQ ID NO: 74721 - protein, 9 aa, Homo Sapiens
RQPNIKQKF

SEQ ID NO: 74722 - protein, 9 aa, Homo Sapiens
RQPPSTTTF

SEQ ID NO: 74723 - protein, 9 aa, Homo Sapiens
RQPRPSSQY

SEQ ID NO: 74724 - protein, 9 aa, Homo Sapiens
RQPVTKNTF

SEQ ID NO: 74725 - protein, 9 aa, Homo Sapiens
RQQCAFIQF

SEQ ID NO: 74726 - protein, 9 aa, Homo Sapiens
RQQKEAACF

SEQ ID NO: 74727 - protein, 9 aa, Homo Sapiens
RQQQSQTAY

SEQ ID NO: 74728 - protein, 9 aa, Homo Sapiens
RQQSHFAMM

SEQ ID NO: 74729 - protein, 9 aa, Homo Sapiens
RQREIEIRF

SEQ ID NO: 74730 - protein, 9 aa, Homo Sapiens
RQREMEEQM

SEQ ID NO: 74731 - protein, 9 aa, Homo Sapiens
RQRETEAAL

SEQ ID NO: 74732 - protein, 9 aa, Homo Sapiens
RQRGINMRY

SEQ ID NO: 74733 - protein, 9 aa, Homo Sapiens
RQRLQSNAL

SEQ ID NO: 74734 - protein, 9 aa, Homo Sapiens
RQRPYVVTF

SEQ ID NO: 74735 - protein, 9 aa, Homo Sapiens
RQRTEIARL

SEQ ID NO: 74736 - protein, 9 aa, Homo Sapiens
RQSPHSNLF

SEQ ID NO: 74737 - protein, 9 aa, Homo Sapiens
RQSPPRAAL

SEQ ID NO: 74738 - protein, 9 aa, Homo Sapiens
RQSTPRVSF

SEQ ID NO: 74739 - protein, 9 aa, Homo Sapiens
RQTTITSHF

SEQ ID NO: 74740 - protein, 9 aa, Homo Sapiens
RQVAPASGY

SEQ ID NO: 74741 - protein, 9 aa, Homo Sapiens
RQVCQLLGY

SEQ ID NO: 74742 - protein, 9 aa, Homo Sapiens
RQVGATVEF

SEQ ID NO: 74743 - protein, 9 aa, Homo Sapiens
RQVHPFHVY

SEQ ID NO: 74744 - protein, 9 aa, Homo Sapiens
RQVKGDLAF

SEQ ID NO: 74745 - protein, 9 aa, Homo Sapiens
RQVSTLNSY

SEQ ID NO: 74746 - protein, 9 aa, Homo Sapiens
RQVVRSSKF

SEQ ID NO: 74747 - protein, 9 aa, Homo Sapiens
RQVYLPMSY

SEQ ID NO: 74748 - protein, 9 aa, Homo Sapiens
RQYAKDIGF

SEQ ID NO: 74749 - protein, 9 aa, Homo Sapiens
RQYHLQQLF

SEQ ID NO: 74750 - protein, 9 aa, Homo Sapiens
RQYLECEVF

SEQ ID NO: 74751 - protein, 9 aa, Homo Sapiens
RQYLEEVGY

SEQ ID NO: 74752 - protein, 9 aa, Homo Sapiens
RQYPEVIKY

SEQ ID NO: 74753 - protein, 9 aa, Homo Sapiens
RQYVVRKPL

SEQ ID NO: 74754 - protein, 9 aa, Homo Sapiens
RSFPGFQAF

SEQ ID NO: 74755 - protein, 9 aa, Homo Sapiens
RSIPAITRY

SEQ ID NO: 74756 - protein, 9 aa, Homo Sapiens
RSIQQNIQY

SEQ ID NO: 74757 - protein, 9 aa, Homo Sapiens
RSKPQLARY

SEQ ID NO: 74758 - protein, 9 aa, Homo Sapiens
RSLQENIAY

SEQ ID NO: 74759 - protein, 9 aa, Homo Sapiens
RSNTGGQAF

SEQ ID NO: 74760 - protein, 9 aa, Homo Sapiens
RSPDFASSF

SEQ ID NO: 74761 - protein, 9 aa, Homo Sapiens
RSSPPGHYY

SEQ ID NO: 74762 - protein, 9 aa, Homo Sapiens
RSSPPSSQF

SEQ ID NO: 74763 - protein, 9 aa, Homo Sapiens
RTAGPHTQF

SEQ ID NO: 74764 - protein, 9 aa, Homo Sapiens
RTAPSGSEY

SEQ ID NO: 74765 - protein, 9 aa, Homo Sapiens
RTAQEVETY

SEQ ID NO: 74766 - protein, 9 aa, Homo Sapiens
RTHLPGRTY

SEQ ID NO: 74767 - protein, 9 aa, Homo Sapiens
RTHTGERPF

SEQ ID NO: 74768 - protein, 9 aa, Homo Sapiens
RTMDDKTVF

SEQ ID NO: 74769 - protein, 9 aa, Homo Sapiens
RTMEIESTF

SEQ ID NO: 74770 - protein, 9 aa, Homo Sapiens
RTMPSNACF

SEQ ID NO: 74771 - protein, 9 aa, Homo Sapiens
RTSPFFSVY

SEQ ID NO: 74772 - protein, 9 aa, Homo Sapiens
RTSTSQAVF

SEQ ID NO: 74773 - protein, 9 aa, Homo Sapiens
RTVPFCSTF

SEQ ID NO: 74774 - protein, 9 aa, Homo Sapiens
RTYDMIQYY

SEQ ID NO: 74775 - protein, 9 aa, Homo Sapiens
RTYGVVAQY

SEQ ID NO: 74776 - protein, 9 aa, Homo Sapiens
RVADFTEQY

SEQ ID NO: 74777 - protein, 9 aa, Homo Sapiens
RVADLTEQY

SEQ ID NO: 74778 - protein, 9 aa, Homo Sapiens
RVADTFQDY

SEQ ID NO: 74779 - protein, 9 aa, Homo Sapiens
RVAMYVHAY

SEQ ID NO: 74780 - protein, 9 aa, Homo Sapiens
RVAPKQKEF

SEQ ID NO: 74781 - protein, 9 aa, Homo Sapiens
RVAPTANIF

SEQ ID NO: 74782 - protein, 9 aa, Homo Sapiens
RVAQLEQVY

SEQ ID NO: 74783 - protein, 9 aa, Homo Sapiens
RVASVMQEY

SEQ ID NO: 74784 - protein, 9 aa, Homo Sapiens
RVFFVHEGY

SEQ ID NO: 74785 - protein, 9 aa, Homo Sapiens
RVFPYISVM

SEQ ID NO: 74786 - protein, 9 aa, Homo Sapiens
RVFQECLTY

SEQ ID NO: 74787 - protein, 9 aa, Homo Sapiens
RVFSLSSEF

SEQ ID NO: 74788 - protein, 9 aa, Homo Sapiens
RVGPVAATY

SEQ ID NO: 74789 - protein, 9 aa, Homo Sapiens
RVHLPSSIY

SEQ ID NO: 74790 - protein, 9 aa, Homo Sapiens
RVHSGERPF

SEQ ID NO: 74791 - protein, 9 aa, Homo Sapiens
RVHTGERPF

SEQ ID NO: 74792 - protein, 9 aa, Homo Sapiens
RVIDVGSEW

SEQ ID NO: 74793 - protein, 9 aa, Homo Sapiens
RVIELAVKY

SEQ ID NO: 74794 - protein, 9 aa, Homo Sapiens
RVIELVQKY

SEQ ID NO: 74795 - protein, 9 aa, Homo Sapiens
RVINLHEVY

SEQ ID NO: 74796 - protein, 9 aa, Homo Sapiens
RVIQCYIQY

SEQ ID NO: 74797 - protein, 9 aa, Homo Sapiens
RVIQSVTSY

SEQ ID NO: 74798 - protein, 9 aa, Homo Sapiens
RVISKASAY

SEQ ID NO: 74799 - protein, 9 aa, Homo Sapiens
RVIVVSMNY

SEQ ID NO: 74800 - protein, 9 aa, Homo Sapiens
RVKAWTSRY

SEQ ID NO: 74801 - protein, 9 aa, Homo Sapiens
RVKDLESLF

SEQ ID NO: 74802 - protein, 9 aa, Homo Sapiens
RVKEIGSTM

SEQ ID NO: 74803 - protein, 9 aa, Homo Sapiens
RVKEKEAEL

SEQ ID NO: 74804 - protein, 9 aa, Homo Sapiens
RVKEKEAIL

SEQ ID NO: 74805 - protein, 9 aa, Homo Sapiens
RVKLPSKAL

SEQ ID NO: 74806 - protein, 9 aa, Homo Sapiens
RVKNPDKRF

SEQ ID NO: 74807 - protein, 9 aa, Homo Sapiens
RVKPGDVAV

SEQ ID NO: 74808 - protein, 9 aa, Homo Sapiens
RVKPNIFSY

SEQ ID NO: 74809 - protein, 9 aa, Homo Sapiens
RVKQEEQRY

SEQ ID NO: 74810 - protein, 9 aa, Homo Sapiens
RVNKEMARY

SEQ ID NO: 74811 - protein, 9 aa, Homo Sapiens
RVPKTGSAY

SEQ ID NO: 74812 - protein, 9 aa, Homo Sapiens
RVQEGNESY

SEQ ID NO: 74813 - protein, 9 aa, Homo Sapiens
RVQGFQVEY

SEQ ID NO: 74814 - protein, 9 aa, Homo Sapiens
RVQLERVAF

SEQ ID NO: 74815 - protein, 9 aa, Homo Sapiens
RVSHINSNY

SEQ ID NO: 74816 - protein, 9 aa, Homo Sapiens
RVSNIRQVF

SEQ ID NO: 74817 - protein, 9 aa, Homo Sapiens
RVSNVKSVY

SEQ ID NO: 74818 - protein, 9 aa, Homo Sapiens
RVSPDGTAF

SEQ ID NO: 74819 - protein, 9 aa, Homo Sapiens
RVSPPHLTL

SEQ ID NO: 74820 - protein, 9 aa, Homo Sapiens
RVVDIYSKF

SEQ ID NO: 74821 - protein, 9 aa, Homo Sapiens
RVVKGEKSF

SEQ ID NO: 74822 - protein, 9 aa, Homo Sapiens
RVVKGQVEY

SEQ ID NO: 74823 - protein, 9 aa, Homo Sapiens
RVVPHGQSF

SEQ ID NO: 74824 - protein, 9 aa, Homo Sapiens
RVVPQFVVF

SEQ ID NO: 74825 - protein, 9 aa, Homo Sapiens
RVYESKAEF

SEQ ID NO: 74826 - protein, 9 aa, Homo Sapiens
RVYIGRLSY

SEQ ID NO: 74827 - protein, 9 aa, Homo Sapiens
RVYPELQRF

SEQ ID NO: 74828 - protein, 9 aa, Homo Sapiens
RVYPQAVYF

SEQ ID NO: 74829 - protein, 9 aa, Homo Sapiens
RVYVDITTY

SEQ ID NO: 74830 - protein, 9 aa, Homo Sapiens
RVYVGSIYY

SEQ ID NO: 74831 - protein, 9 aa, Homo Sapiens
SAAQPGVAF

SEQ ID NO: 74832 - protein, 9 aa, Homo Sapiens
SAKLERSHY

SEQ ID NO: 74833 - protein, 9 aa, Homo Sapiens
SANVSKVSF

SEQ ID NO: 74834 - protein, 9 aa, Homo Sapiens
SARAGETRF

SEQ ID NO: 74835 - protein, 9 aa, Homo Sapiens
SARLEKLGY

SEQ ID NO: 74836 - protein, 9 aa, Homo Sapiens
SAYGSVKAY

SEQ ID NO: 74837 - protein, 9 aa, Homo Sapiens
SEFPGAQHY

SEQ ID NO: 74838 - protein, 9 aa, Homo Sapiens
SGFENKISY

SEQ ID NO: 74839 - protein, 9 aa, Homo Sapiens
SGKLVQIEY

SEQ ID NO: 74840 - protein, 9 aa, Homo Sapiens
SGKPQEAVY

SEQ ID NO: 74841 - protein, 9 aa, Homo Sapiens
SGRMQKVSY

SEQ ID NO: 74842 - protein, 9 aa, Homo Sapiens
SIAPFHICY

SEQ ID NO: 74843 - protein, 9 aa, Homo Sapiens
SIFGLGLAY

SEQ ID NO: 74844 - protein, 9 aa, Homo Sapiens
SIIPGSAAY

SEQ ID NO: 74845 - protein, 9 aa, Homo Sapiens
SIKETVEAY

SEQ ID NO: 74846 - protein, 9 aa, Homo Sapiens
SIPDIKTAF

SEQ ID NO: 74847 - protein, 9 aa, Homo Sapiens
SIRDGVRAY

SEQ ID NO: 74848 - protein, 9 aa, Homo Sapiens
SIREAGGAF

SEQ ID NO: 74849 - protein, 9 aa, Homo Sapiens
SISGVTAAY

SEQ ID NO: 74850 - protein, 9 aa, Homo Sapiens
SISKALVAY

SEQ ID NO: 74851 - protein, 9 aa, Homo Sapiens
SIYPLHDVF

SEQ ID NO: 74852 - protein, 9 aa, Homo Sapiens
SIYWTAVTY

SEQ ID NO: 74853 - protein, 9 aa, Homo Sapiens
SLATPATHY

SEQ ID NO: 74854 - protein, 9 aa, Homo Sapiens
SLAYLVNTY

SEQ ID NO: 74855 - protein, 9 aa, Homo Sapiens
SLDAPHSTY

SEQ ID NO: 74856 - protein, 9 aa, Homo Sapiens
SLFDNPRTF

SEQ ID NO: 74857 - protein, 9 aa, Homo Sapiens
SLFHAQLAY

SEQ ID NO: 74858 - protein, 9 aa, Homo Sapiens
SLFKSLSRY

SEQ ID NO: 74859 - protein, 9 aa, Homo Sapiens
SLFLPRTDY

SEQ ID NO: 74860 - protein, 9 aa, Homo Sapiens
SLFPHHGTF

SEQ ID NO: 74861 - protein, 9 aa, Homo Sapiens
SLFRKVSVY

SEQ ID NO: 74862 - protein, 9 aa, Homo Sapiens
SLFVGHMDY

SEQ ID NO: 74863 - protein, 9 aa, Homo Sapiens
SLFVSNHAY

SEQ ID NO: 74864 - protein, 9 aa, Homo Sapiens
SLGQPHIAY

SEQ ID NO: 74865 - protein, 9 aa, Homo Sapiens
SLHPGSSAL

SEQ ID NO: 74866 - protein, 9 aa, Homo Sapiens
SLIDTVRSY

SEQ ID NO: 74867 - protein, 9 aa, Homo Sapiens
SLKDPSNNF

SEQ ID NO: 74868 - protein, 9 aa, Homo Sapiens
SLKGLTNSY

SEQ ID NO: 74869 - protein, 9 aa, Homo Sapiens
SLKGVDPKF

SEQ ID NO: 74870 - protein, 9 aa, Homo Sapiens
SLKKQVQSY

SEQ ID NO: 74871 - protein, 9 aa, Homo Sapiens
SLKQEVESF

SEQ ID NO: 74872 - protein, 9 aa, Homo Sapiens
SLMALQNAY

SEQ ID NO: 74873 - protein, 9 aa, Homo Sapiens
SLMHPSISF

SEQ ID NO: 74874 - protein, 9 aa, Homo Sapiens
SLNAGKQRY

SEQ ID NO: 74875 - protein, 9 aa, Homo Sapiens
SLPDFGISY

SEQ ID NO: 74876 - protein, 9 aa, Homo Sapiens
SLREDQQSF

SEQ ID NO: 74877 - protein, 9 aa, Homo Sapiens
SLRFIDVEF

SEQ ID NO: 74878 - protein, 9 aa, Homo Sapiens
SLSDRTNLY

SEQ ID NO: 74879 - protein, 9 aa, Homo Sapiens
SLVGITSAY

SEQ ID NO: 74880 - protein, 9 aa, Homo Sapiens
SLVGPTQSF

SEQ ID NO: 74881 - protein, 9 aa, Homo Sapiens
SMARETVGY

SEQ ID NO: 74882 - protein, 9 aa, Homo Sapiens
SMHLQLTCF

SEQ ID NO: 74883 - protein, 9 aa, Homo Sapiens
SMIIFIHSY

SEQ ID NO: 74884 - protein, 9 aa, Homo Sapiens
SMILNVLEY

SEQ ID NO: 74885 - protein, 9 aa, Homo Sapiens
SMKAKITAY

SEQ ID NO: 74886 - protein, 9 aa, Homo Sapiens
SMKGDPVNY

SEQ ID NO: 74887 - protein, 9 aa, Homo Sapiens
SMKPGEYSY

SEQ ID NO: 74888 - protein, 9 aa, Homo Sapiens
SMQNGVKVY

SEQ ID NO: 74889 - protein, 9 aa, Homo Sapiens
SMRKTFARY

SEQ ID NO: 74890 - protein, 9 aa, Homo Sapiens
SMSDPGVSY

SEQ ID NO: 74891 - protein, 9 aa, Homo Sapiens
SQAAVSARF

SEQ ID NO: 74892 - protein, 9 aa, Homo Sapiens
SQADIKKAY

SEQ ID NO: 74893 - protein, 9 aa, Homo Sapiens
SQAEDVATY

SEQ ID NO: 74894 - protein, 9 aa, Homo Sapiens
SQAESKVFY

SEQ ID NO: 74895 - protein, 9 aa, Homo Sapiens
SQAKALVYY

SEQ ID NO: 74896 - protein, 9 aa, Homo Sapiens
SQALAIRSY

SEQ ID NO: 74897 - protein, 9 aa, Homo Sapiens
SQANIAQVL

SEQ ID NO: 74898 - protein, 9 aa, Homo Sapiens
SQAPQRLSF

SEQ ID NO: 74899 - protein, 9 aa, Homo Sapiens
SQARLLTSF

SEQ ID NO: 74900 - protein, 9 aa, Homo Sapiens
SQARTLITF

SEQ ID NO: 74901 - protein, 9 aa, Homo Sapiens
SQATPHSSY

SEQ ID NO: 74902 - protein, 9 aa, Homo Sapiens
SQCVTGLVF

SEQ ID NO: 74903 - protein, 9 aa, Homo Sapiens
SQEKPSTTY

SEQ ID NO: 74904 - protein, 9 aa, Homo Sapiens
SQFDSTTGF

SEQ ID NO: 74905 - protein, 9 aa, Homo Sapiens
SQFGGGSQY

SEQ ID NO: 74906 - protein, 9 aa, Homo Sapiens
SQFGTVTRF

SEQ ID NO: 74907 - protein, 9 aa, Homo Sapiens
SQFHGLITH

SEQ ID NO: 74908 - protein, 9 aa, Homo Sapiens
SQFIFEHSY

SEQ ID NO: 74909 - protein, 9 aa, Homo Sapiens
SQFKGYFIF

SEQ ID NO: 74910 - protein, 9 aa, Homo Sapiens
SQFPQPQHF

SEQ ID NO: 74911 - protein, 9 aa, Homo Sapiens
SQFSAPRDY

SEQ ID NO: 74912 - protein, 9 aa, Homo Sapiens
SQFSVPSSY

SEQ ID NO: 74913 - protein, 9 aa, Homo Sapiens
SQGLPASRY

SEQ ID NO: 74914 - protein, 9 aa, Homo Sapiens
SQGPVKHVY

SEQ ID NO: 74915 - protein, 9 aa, Homo Sapiens
SQGRPSSMY

SEQ ID NO: 74916 - protein, 9 aa, Homo Sapiens
SQGVHISVY

SEQ ID NO: 74917 - protein, 9 aa, Homo Sapiens
SQHIADTHF

SEQ ID NO: 74918 - protein, 9 aa, Homo Sapiens
SQHPQQTSF

SEQ ID NO: 74919 - protein, 9 aa, Homo Sapiens
SQHQAIERF

SEQ ID NO: 74920 - protein, 9 aa, Homo Sapiens
SQHQETPVY

SEQ ID NO: 74921 - protein, 9 aa, Homo Sapiens
SQHQVKEAL

SEQ ID NO: 74922 - protein, 9 aa, Homo Sapiens
SQHYHQGYY

SEQ ID NO: 74923 - protein, 9 aa, Homo Sapiens
SQIADVARF

SEQ ID NO: 74924 - protein, 9 aa, Homo Sapiens
SQIDNNEPY

SEQ ID NO: 74925 - protein, 9 aa, Homo Sapiens
SQIDNRAVL

SEQ ID NO: 74926 - protein, 9 aa, Homo Sapiens
SQIEEHKVF

SEQ ID NO: 74927 - protein, 9 aa, Homo Sapiens
SQIFIGPTY

SEQ ID NO: 74928 - protein, 9 aa, Homo Sapiens
SQIFISRTY

SEQ ID NO: 74929 - protein, 9 aa, Homo Sapiens
SQIFQLCQF

SEQ ID NO: 74930 - protein, 9 aa, Homo Sapiens
SQIGAVVSH

SEQ ID NO: 74931 - protein, 9 aa, Homo Sapiens
SQIGNCALY

SEQ ID NO: 74932 - protein, 9 aa, Homo Sapiens
SQIISLQTL

SEQ ID NO: 74933 - protein, 9 aa, Homo Sapiens
SQIKAVENY

SEQ ID NO: 74934 - protein, 9 aa, Homo Sapiens
SQILPTEEY

SEQ ID NO: 74935 - protein, 9 aa, Homo Sapiens
SQILSVESY

SEQ ID NO: 74936 - protein, 9 aa, Homo Sapiens
SQINRAYQF

SEQ ID NO: 74937 - protein, 9 aa, Homo Sapiens
SQIQPKLIF

SEQ ID NO: 74938 - protein, 9 aa, Homo Sapiens
SQIRMQNHF

SEQ ID NO: 74939 - protein, 9 aa, Homo Sapiens
SQISKVELF

SEQ ID NO: 74940 - protein, 9 aa, Homo Sapiens
SQIYQSIEF

SEQ ID NO: 74941 - protein, 9 aa, Homo Sapiens
SQKAFCGIY

SEQ ID NO: 74942 - protein, 9 aa, Homo Sapiens
SQKALMLEL

SEQ ID NO: 74943 - protein, 9 aa, Homo Sapiens
SQKDKVRQF

SEQ ID NO: 74944 - protein, 9 aa, Homo Sapiens
SQKENINVL

SEQ ID NO: 74945 - protein, 9 aa, Homo Sapiens
SQKENVLQY

SEQ ID NO: 74946 - protein, 9 aa, Homo Sapiens
SQKGSLISH

SEQ ID NO: 74947 - protein, 9 aa, Homo Sapiens
SQKIALNAH

SEQ ID NO: 74948 - protein, 9 aa, Homo Sapiens
SQKIETMQF

SEQ ID NO: 74949 - protein, 9 aa, Homo Sapiens
SQKIPGMTL

SEQ ID NO: 74950 - protein, 9 aa, Homo Sapiens
SQKIPKVDF

SEQ ID NO: 74951 - protein, 9 aa, Homo Sapiens
SQKKDSLSM

SEQ ID NO: 74952 - protein, 9 aa, Homo Sapiens
SQKKPTVTL

SEQ ID NO: 74953 - protein, 9 aa, Homo Sapiens
SQKNINLIF

SEQ ID NO: 74954 - protein, 9 aa, Homo Sapiens
SQKPGVLTH

SEQ ID NO: 74955 - protein, 9 aa, Homo Sapiens
SQKQIEEHF

SEQ ID NO: 74956 - protein, 9 aa, Homo Sapiens
SQKQISIQH

SEQ ID NO: 74957 - protein, 9 aa, Homo Sapiens
SQKSGLIEH

SEQ ID NO: 74958 - protein, 9 aa, Homo Sapiens
SQKVIGTPH

SEQ ID NO: 74959 - protein, 9 aa, Homo Sapiens
SQKVSGPQY

SEQ ID NO: 74960 - protein, 9 aa, Homo Sapiens
SQKVTFCSH

SEQ ID NO: 74961 - protein, 9 aa, Homo Sapiens
SQLHARPSY

SEQ ID NO: 74962 - protein, 9 aa, Homo Sapiens
SQLKGVSTF

SEQ ID NO: 74963 - protein, 9 aa, Homo Sapiens
SQLPEKVEY

SEQ ID NO: 74964 - protein, 9 aa, Homo Sapiens
SQLPLKVEF

SEQ ID NO: 74965 - protein, 9 aa, Homo Sapiens
SQLVAGVAF

SEQ ID NO: 74966 - protein, 9 aa, Homo Sapiens
SQMGNLHAF

SEQ ID NO: 74967 - protein, 9 aa, Homo Sapiens
SQMKSYQSF

SEQ ID NO: 74968 - protein, 9 aa, Homo Sapiens
SQMPKLEAF

SEQ ID NO: 74969 - protein, 9 aa, Homo Sapiens
SQNKSVHSF

SEQ ID NO: 74970 - protein, 9 aa, Homo Sapiens
SQNMNTKYY

SEQ ID NO: 74971 - protein, 9 aa, Homo Sapiens
SQNNLRVHY

SEQ ID NO: 74972 - protein, 9 aa, Homo Sapiens
SQPASGNTF

SEQ ID NO: 74973 - protein, 9 aa, Homo Sapiens
SQPAVATSF

SEQ ID NO: 74974 - protein, 9 aa, Homo Sapiens
SQPYGQQSY

SEQ ID NO: 74975 - protein, 9 aa, Homo Sapiens
SQQAAIQAY

SEQ ID NO: 74976 - protein, 9 aa, Homo Sapiens
SQQAYQEAF

SEQ ID NO: 74977 - protein, 9 aa, Homo Sapiens
SQQMVMVKY

SEQ ID NO: 74978 - protein, 9 aa, Homo Sapiens
SQQPGHQDF

SEQ ID NO: 74979 - protein, 9 aa, Homo Sapiens
SQQSGEKAF

SEQ ID NO: 74980 - protein, 9 aa, Homo Sapiens
SQQSKISGY

SEQ ID NO: 74981 - protein, 9 aa, Homo Sapiens
SQRAVLVQF

SEQ ID NO: 74982 - protein, 9 aa, Homo Sapiens
SQRDYTQYY

SEQ ID NO: 74983 - protein, 9 aa, Homo Sapiens
SQRFKSSVY

SEQ ID NO: 74984 - protein, 9 aa, Homo Sapiens
SQRIIRNAL

SEQ ID NO: 74985 - protein, 9 aa, Homo Sapiens
SQRIPAHRF

SEQ ID NO: 74986 - protein, 9 aa, Homo Sapiens
SQRLGSQKF

SEQ ID NO: 74987 - protein, 9 aa, Homo Sapiens
SQRLVEERY

SEQ ID NO: 74988 - protein, 9 aa, Homo Sapiens
SQRPAARAF

SEQ ID NO: 74989 - protein, 9 aa, Homo Sapiens
SQRPGAQAL

SEQ ID NO: 74990 - protein, 9 aa, Homo Sapiens
SQRPTVEEL

SEQ ID NO: 74991 - protein, 9 aa, Homo Sapiens
SQRQGRISF

SEQ ID NO: 74992 - protein, 9 aa, Homo Sapiens
SQRSPSELF

SEQ ID NO: 74993 - protein, 9 aa, Homo Sapiens
SQRSTATMY

SEQ ID NO: 74994 - protein, 9 aa, Homo Sapiens
SQRVLYIRY

SEQ ID NO: 74995 - protein, 9 aa, Homo Sapiens
SQSAVKTKF

SEQ ID NO: 74996 - protein, 9 aa, Homo Sapiens
SQSGYSQSY

SEQ ID NO: 74997 - protein, 9 aa, Homo Sapiens
SQSIQNTVY

SEQ ID NO: 74998 - protein, 9 aa, Homo Sapiens
SQSLSHNVF

SEQ ID NO: 74999 - protein, 9 aa, Homo Sapiens
SQSPQGRVM

SEQ ID NO: 75000 - protein, 9 aa, Homo Sapiens
SQTEVSSEY

SEQ ID NO: 75001 - protein, 9 aa, Homo Sapiens
SQTLPTSNY

SEQ ID NO: 75002 - protein, 9 aa, Homo Sapiens
SQVDRLVAL

SEQ ID NO: 75003 - protein, 9 aa, Homo Sapiens
SQVDSKSTF

SEQ ID NO: 75004 - protein, 9 aa, Homo Sapiens
SQVLGLHCY

SEQ ID NO: 75005 - protein, 9 aa, Homo Sapiens
SQVLNRLTF

SEQ ID NO: 75006 - protein, 9 aa, Homo Sapiens
SQVPFPSRL

SEQ ID NO: 75007 - protein, 9 aa, Homo Sapiens
SQVPQQSHF

SEQ ID NO: 75008 - protein, 9 aa, Homo Sapiens
SQVPRSSSM

SEQ ID NO: 75009 - protein, 9 aa, Homo Sapiens
SQVPTQMSF

SEQ ID NO: 75010 - protein, 9 aa, Homo Sapiens
SQVPVKHVY

SEQ ID NO: 75011 - protein, 9 aa, Homo Sapiens
SQVQGTYKY

SEQ ID NO: 75012 - protein, 9 aa, Homo Sapiens
SQVRDVIGF

SEQ ID NO: 75013 - protein, 9 aa, Homo Sapiens
SQVTKSVDF

SEQ ID NO: 75014 - protein, 9 aa, Homo Sapiens
SQVVAGTNY

SEQ ID NO: 75015 - protein, 9 aa, Homo Sapiens
SQVVTRYAY

SEQ ID NO: 75016 - protein, 9 aa, Homo Sapiens
SQYDPKIVY

SEQ ID NO: 75017 - protein, 9 aa, Homo Sapiens
SQYGSQVGY

SEQ ID NO: 75018 - protein, 9 aa, Homo Sapiens
SQYPFPVTL

SEQ ID NO: 75019 - protein, 9 aa, Homo Sapiens
SQYQGVVVY

SEQ ID NO: 75020 - protein, 9 aa, Homo Sapiens
SSHVTNVSF

SEQ ID NO: 75021 - protein, 9 aa, Homo Sapiens
SSKEGGVTF

SEQ ID NO: 75022 - protein, 9 aa, Homo Sapiens
SSMKPTLSH

SEQ ID NO: 75023 - protein, 9 aa, Homo Sapiens
SSNPSVTRY

SEQ ID NO: 75024 - protein, 9 aa, Homo Sapiens
STAPHETSF

SEQ ID NO: 75025 - protein, 9 aa, Homo Sapiens
STHVTISTY

SEQ ID NO: 75026 - protein, 9 aa, Homo Sapiens
STKEDAVSF

SEQ ID NO: 75027 - protein, 9 aa, Homo Sapiens
STKPADMKY

SEQ ID NO: 75028 - protein, 9 aa, Homo Sapiens
STYPRPHEY

SEQ ID NO: 75029 - protein, 9 aa, Homo Sapiens
STYQGERAY

SEQ ID NO: 75030 - protein, 9 aa, Homo Sapiens
SVADIRNAY

SEQ ID NO: 75031 - protein, 9 aa, Homo Sapiens
SVAGHVEVY

SEQ ID NO: 75032 - protein, 9 aa, Homo Sapiens
SVAPGQQVY

SEQ ID NO: 75033 - protein, 9 aa, Homo Sapiens
SVFPERLGF

SEQ ID NO: 75034 - protein, 9 aa, Homo Sapiens
SVHNAGISF

SEQ ID NO: 75035 - protein, 9 aa, Homo Sapiens
SVHQPGSHY

SEQ ID NO: 75036 - protein, 9 aa, Homo Sapiens
SVHSGERPF

SEQ ID NO: 75037 - protein, 9 aa, Homo Sapiens
SVIATIQEY

SEQ ID NO: 75038 - protein, 9 aa, Homo Sapiens
SVIDIINKY

SEQ ID NO: 75039 - protein, 9 aa, Homo Sapiens
SVIDYSNAF

SEQ ID NO: 75040 - protein, 9 aa, Homo Sapiens
SVIESHTEF

SEQ ID NO: 75041 - protein, 9 aa, Homo Sapiens
SVIGASSQF

SEQ ID NO: 75042 - protein, 9 aa, Homo Sapiens
SVIKQTSAF

SEQ ID NO: 75043 - protein, 9 aa, Homo Sapiens
SVINPGAIY

SEQ ID NO: 75044 - protein, 9 aa, Homo Sapiens
SVKASSVVY

SEQ ID NO: 75045 - protein, 9 aa, Homo Sapiens
SVKDGAICY

SEQ ID NO: 75046 - protein, 9 aa, Homo Sapiens
SVKEMRERY

SEQ ID NO: 75047 - protein, 9 aa, Homo Sapiens
SVKEWTITY

SEQ ID NO: 75048 - protein, 9 aa, Homo Sapiens
SVKPASSSF

SEQ ID NO: 75049 - protein, 9 aa, Homo Sapiens
SVKRHEVQF

SEQ ID NO: 75050 - protein, 9 aa, Homo Sapiens
SVMRLTISY

SEQ ID NO: 75051 - protein, 9 aa, Homo Sapiens
SVMTLVSTY

SEQ ID NO: 75052 - protein, 9 aa, Homo Sapiens
SVNLQVATY

SEQ ID NO: 75053 - protein, 9 aa, Homo Sapiens
SVNTPTKTY

SEQ ID NO: 75054 - protein, 9 aa, Homo Sapiens
SVQGAGTSY

SEQ ID NO: 75055 - protein, 9 aa, Homo Sapiens
SVRKDIESY

SEQ ID NO: 75056 - protein, 9 aa, Homo Sapiens
SVSPAGDLF

SEQ ID NO: 75057 - protein, 9 aa, Homo Sapiens
SVVDISQQY

SEQ ID NO: 75058 - protein, 9 aa, Homo Sapiens
SVVGAISSY

SEQ ID NO: 75059 - protein, 9 aa, Homo Sapiens
SVVKELSSF

SEQ ID NO: 75060 - protein, 9 aa, Homo Sapiens
SVYRTVIEY

SEQ ID NO: 75061 - protein, 9 aa, Homo Sapiens
TAAAVGAVF

SEQ ID NO: 75062 - protein, 9 aa, Homo Sapiens
TAKGGDISV

SEQ ID NO: 75063 - protein, 9 aa, Homo Sapiens
TAKSVTCTY

SEQ ID NO: 75064 - protein, 9 aa, Homo Sapiens
TAYPGQTQY

SEQ ID NO: 75065 - protein, 9 aa, Homo Sapiens
TIHTGEKPY

SEQ ID NO: 75066 - protein, 9 aa, Homo Sapiens
TIKSATISY

SEQ ID NO: 75067 - protein, 9 aa, Homo Sapiens
TIMQNPRQY

SEQ ID NO: 75068 - protein, 9 aa, Homo Sapiens
TINAAHVEY

SEQ ID NO: 75069 - protein, 9 aa, Homo Sapiens
TLAFPSEHF

SEQ ID NO: 75070 - protein, 9 aa, Homo Sapiens
TLFPEKQIY

SEQ ID NO: 75071 - protein, 9 aa, Homo Sapiens
TLHERFTKY

SEQ ID NO: 75072 - protein, 9 aa, Homo Sapiens
TLHGLQQYY

SEQ ID NO: 75073 - protein, 9 aa, Homo Sapiens
TLIDSSSSF

SEQ ID NO: 75074 - protein, 9 aa, Homo Sapiens
TLISPSFCY

SEQ ID NO: 75075 - protein, 9 aa, Homo Sapiens
TLITGLEEY

SEQ ID NO: 75076 - protein, 9 aa, Homo Sapiens
TLKDRELSF

SEQ ID NO: 75077 - protein, 9 aa, Homo Sapiens
TLKGPDSHY

SEQ ID NO: 75078 - protein, 9 aa, Homo Sapiens
TLKGVTQYY

SEQ ID NO: 75079 - protein, 9 aa, Homo Sapiens
TLKKAAVHY

SEQ ID NO: 75080 - protein, 9 aa, Homo Sapiens
TLKPSNKAF

SEQ ID NO: 75081 - protein, 9 aa, Homo Sapiens
TLKTPGKSF

SEQ ID NO: 75082 - protein, 9 aa, Homo Sapiens
TLMGPTRVF

SEQ ID NO: 75083 - protein, 9 aa, Homo Sapiens
TLMKQYIEF

SEQ ID NO: 75084 - protein, 9 aa, Homo Sapiens
TLMLEHQAF

SEQ ID NO: 75085 - protein, 9 aa, Homo Sapiens
TLNERFTSY

SEQ ID NO: 75086 - protein, 9 aa, Homo Sapiens
TLNPNAKEF

SEQ ID NO: 75087 - protein, 9 aa, Homo Sapiens
TLNVSTTRY

SEQ ID NO: 75088 - protein, 9 aa, Homo Sapiens
TLQKQCVPF

SEQ ID NO: 75089 - protein, 9 aa, Homo Sapiens
TLQKQSVVY

SEQ ID NO: 75090 - protein, 9 aa, Homo Sapiens
TLQVVTAHY

SEQ ID NO: 75091 - protein, 9 aa, Homo Sapiens
TLRQKIRKY

SEQ ID NO: 75092 - protein, 9 aa, Homo Sapiens
TLSSIRSKY

SEQ ID NO: 75093 - protein, 9 aa, Homo Sapiens
TLTPIIQEY

SEQ ID NO: 75094 - protein, 9 aa, Homo Sapiens
TLTPISAAY

SEQ ID NO: 75095 - protein, 9 aa, Homo Sapiens
TMAPPVMAY

SEQ ID NO: 75096 - protein, 9 aa, Homo Sapiens
TMCPHILRY

SEQ ID NO: 75097 - protein, 9 aa, Homo Sapiens
TMFVQRQVF

SEQ ID NO: 75098 - protein, 9 aa, Homo Sapiens
TMKDFNHSY

SEQ ID NO: 75099 - protein, 9 aa, Homo Sapiens
TMKPMNVEY

SEQ ID NO: 75100 - protein, 9 aa, Homo Sapiens
TMKPSETSF

SEQ ID NO: 75101 - protein, 9 aa, Homo Sapiens
TMMQSGGTF

SEQ ID NO: 75102 - protein, 9 aa, Homo Sapiens
TMRCLFEAY

SEQ ID NO: 75103 - protein, 9 aa, Homo Sapiens
TMRPLATAY

SEQ ID NO: 75104 - protein, 9 aa, Homo Sapiens
TMVGKTFTY

SEQ ID NO: 75105 - protein, 9 aa, Homo Sapiens
TQAAPALDF

SEQ ID NO: 75106 - protein, 9 aa, Homo Sapiens
TQAPIFISF

SEQ ID NO: 75107 - protein, 9 aa, Homo Sapiens
TQAQIKAAY

SEQ ID NO: 75108 - protein, 9 aa, Homo Sapiens
TQAQTTATY

SEQ ID NO: 75109 - protein, 9 aa, Homo Sapiens
TQAYGQQSY

SEQ ID NO: 75110 - protein, 9 aa, Homo Sapiens
TQFGGKRPF

SEQ ID NO: 75111 - protein, 9 aa, Homo Sapiens
TQFVSGSKY

SEQ ID NO: 75112 - protein, 9 aa, Homo Sapiens
TQHPTLRLY

SEQ ID NO: 75113 - protein, 9 aa, Homo Sapiens
TQIPTETTY

SEQ ID NO: 75114 - protein, 9 aa, Homo Sapiens
TQIQPQPGF

SEQ ID NO: 75115 - protein, 9 aa, Homo Sapiens
TQIRVVNAF

SEQ ID NO: 75116 - protein, 9 aa, Homo Sapiens
TQKDNYRVY

SEQ ID NO: 75117 - protein, 9 aa, Homo Sapiens
TQKEHLLKY

SEQ ID NO: 75118 - protein, 9 aa, Homo Sapiens
TQKENLRKF

SEQ ID NO: 75119 - protein, 9 aa, Homo Sapiens
TQKIGVHAF

SEQ ID NO: 75120 - protein, 9 aa, Homo Sapiens
TQKPLPVSL

SEQ ID NO: 75121 - protein, 9 aa, Homo Sapiens
TQKSVTVAF

SEQ ID NO: 75122 - protein, 9 aa, Homo Sapiens
TQKTISLDY

SEQ ID NO: 75123 - protein, 9 aa, Homo Sapiens
TQMPDPKTF

SEQ ID NO: 75124 - protein, 9 aa, Homo Sapiens
TQNGMVQEY

SEQ ID NO: 75125 - protein, 9 aa, Homo Sapiens
TQNKDINQY

SEQ ID NO: 75126 - protein, 9 aa, Homo Sapiens
TQPAPRSIF

SEQ ID NO: 75127 - protein, 9 aa, Homo Sapiens
TQPHPNTVY

SEQ ID NO: 75128 - protein, 9 aa, Homo Sapiens
TQQIKSHEY

SEQ ID NO: 75129 - protein, 9 aa, Homo Sapiens
TQQLLKTAL

SEQ ID NO: 75130 - protein, 9 aa, Homo Sapiens
TQQLQTTCH

SEQ ID NO: 75131 - protein, 9 aa, Homo Sapiens
TQRDFMLSF

SEQ ID NO: 75132 - protein, 9 aa, Homo Sapiens
TQREFMLSF

SEQ ID NO: 75133 - protein, 9 aa, Homo Sapiens
TQREGVSSL

SEQ ID NO: 75134 - protein, 9 aa, Homo Sapiens
TQREVIQAL

SEQ ID NO: 75135 - protein, 9 aa, Homo Sapiens
TQRFMNICF

SEQ ID NO: 75136 - protein, 9 aa, Homo Sapiens
TQRGLKTVF

SEQ ID NO: 75137 - protein, 9 aa, Homo Sapiens
TQRGSIPTY

SEQ ID NO: 75138 - protein, 9 aa, Homo Sapiens
TQRLKIMEY

SEQ ID NO: 75139 - protein, 9 aa, Homo Sapiens
TQRMFEIDY

SEQ ID NO: 75140 - protein, 9 aa, Homo Sapiens
TQRPADVIF

SEQ ID NO: 75141 - protein, 9 aa, Homo Sapiens
TQRPNLIGL

SEQ ID NO: 75142 - protein, 9 aa, Homo Sapiens
TQRSQQLEF

SEQ ID NO: 75143 - protein, 9 aa, Homo Sapiens
TQSGGVRPF

SEQ ID NO: 75144 - protein, 9 aa, Homo Sapiens
TQSGINGTY

SEQ ID NO: 75145 - protein, 9 aa, Homo Sapiens
TQTNKTSSF

SEQ ID NO: 75146 - protein, 9 aa, Homo Sapiens
TQVIHSIEY

SEQ ID NO: 75147 - protein, 9 aa, Homo Sapiens
TQVPPKHVY

SEQ ID NO: 75148 - protein, 9 aa, Homo Sapiens
TQVQGLQHY

SEQ ID NO: 75149 - protein, 9 aa, Homo Sapiens
TQYESKVFY

SEQ ID NO: 75150 - protein, 9 aa, Homo Sapiens
TQYTKPNQY

SEQ ID NO: 75151 - protein, 9 aa, Homo Sapiens
TSAPTGHTF

SEQ ID NO: 75152 - protein, 9 aa, Homo Sapiens
TSFPHESTF

SEQ ID NO: 75153 - protein, 9 aa, Homo Sapiens
TSRIQKLCY

SEQ ID NO: 75154 - protein, 9 aa, Homo Sapiens
TTFPKDPVY

SEQ ID NO: 75155 - protein, 9 aa, Homo Sapiens
TTGKPHVAY

SEQ ID NO: 75156 - protein, 9 aa, Homo Sapiens
TTIDVRTTF

SEQ ID NO: 75157 - protein, 9 aa, Homo Sapiens
TVFSRSQVY

SEQ ID NO: 75158 - protein, 9 aa, Homo Sapiens
TVHGVTQAF

SEQ ID NO: 75159 - protein, 9 aa, Homo Sapiens
TVHTGDRPY

SEQ ID NO: 75160 - protein, 9 aa, Homo Sapiens
TVIDSQTHY

SEQ ID NO: 75161 - protein, 9 aa, Homo Sapiens
TVIPNSHVY

SEQ ID NO: 75162 - protein, 9 aa, Homo Sapiens
TVKDGVTLY

SEQ ID NO: 75163 - protein, 9 aa, Homo Sapiens
TVKDSRTVY

SEQ ID NO: 75164 - protein, 9 aa, Homo Sapiens
TVKVEDLTF

SEQ ID NO: 75165 - protein, 9 aa, Homo Sapiens
TVSPAHTSY

SEQ ID NO: 75166 - protein, 9 aa, Homo Sapiens
TVYMGKVTF

SEQ ID NO: 75167 - protein, 9 aa, Homo Sapiens
VAFPSSSVY

SEQ ID NO: 75168 - protein, 9 aa, Homo Sapiens
VAKEKDIVY

SEQ ID NO: 75169 - protein, 9 aa, Homo Sapiens
VAKTNTVSY

SEQ ID NO: 75170 - protein, 9 aa, Homo Sapiens
VANPNSAIF

SEQ ID NO: 75171 - protein, 9 aa, Homo Sapiens
VAPGKDLTK

SEQ ID NO: 75172 - protein, 9 aa, Homo Sapiens
VEKAPQETY

SEQ ID NO: 75173 - protein, 9 aa, Homo Sapiens
VEKGDHVAY

SEQ ID NO: 75174 - protein, 9 aa, Homo Sapiens
VGIDLGTTY

SEQ ID NO: 75175 - protein, 9 aa, Homo Sapiens
VGVKPVGSD

SEQ ID NO: 75176 - protein, 9 aa, Homo Sapiens
VGYPGRQYY

SEQ ID NO: 75177 - protein, 9 aa, Homo Sapiens
VIAPIISNF

SEQ ID NO: 75178 - protein, 9 aa, Homo Sapiens
VIASIISRY

SEQ ID NO: 75179 - protein, 9 aa, Homo Sapiens
VIFAGGQAY

SEQ ID NO: 75180 - protein, 9 aa, Homo Sapiens
VIFGGLTGY

SEQ ID NO: 75181 - protein, 9 aa, Homo Sapiens
VIFPEGTRY

SEQ ID NO: 75182 - protein, 9 aa, Homo Sapiens
VIIDDRHVY

SEQ ID NO: 75183 - protein, 9 aa, Homo Sapiens
VIIKGTQIY

SEQ ID NO: 75184 - protein, 9 aa, Homo Sapiens
VIIKGTQVY

SEQ ID NO: 75185 - protein, 9 aa, Homo Sapiens
VIKETQERY

SEQ ID NO: 75186 - protein, 9 aa, Homo Sapiens
VILPPLSPY

SEQ ID NO: 75187 - protein, 9 aa, Homo Sapiens
VIRDEVEKY

SEQ ID NO: 75188 - protein, 9 aa, Homo Sapiens
VIRDVEQQF

SEQ ID NO: 75189 - protein, 9 aa, Homo Sapiens
VIRELKEQY

SEQ ID NO: 75190 - protein, 9 aa, Homo Sapiens
VIRQQCVEY

SEQ ID NO: 75191 - protein, 9 aa, Homo Sapiens
VIVGGSSEY

SEQ ID NO: 75192 - protein, 9 aa, Homo Sapiens
VIYPQSASY

SEQ ID NO: 75193 - protein, 9 aa, Homo Sapiens
VLAEKAAAY

SEQ ID NO: 75194 - protein, 9 aa, Homo Sapiens
VLAEVAQHY

SEQ ID NO: 75195 - protein, 9 aa, Homo Sapiens
VLAGHGHLY

SEQ ID NO: 75196 - protein, 9 aa, Homo Sapiens
VLFEHAVGY

SEQ ID NO: 75197 - protein, 9 aa, Homo Sapiens
VLFPLKSEF

SEQ ID NO: 75198 - protein, 9 aa, Homo Sapiens
VLIDVGTGY

SEQ ID NO: 75199 - protein, 9 aa, Homo Sapiens
VLKAAAHHY

SEQ ID NO: 75200 - protein, 9 aa, Homo Sapiens
VLKEEGVSF

SEQ ID NO: 75201 - protein, 9 aa, Homo Sapiens
VLKEKIAKY

SEQ ID NO: 75202 - protein, 9 aa, Homo Sapiens
VLKHPDKKF

SEQ ID NO: 75203 - protein, 9 aa, Homo Sapiens
VLKKLDEQY

SEQ ID NO: 75204 - protein, 9 aa, Homo Sapiens
VLKLTPVAY

SEQ ID NO: 75205 - protein, 9 aa, Homo Sapiens
VLKLVDISY

SEQ ID NO: 75206 - protein, 9 aa, Homo Sapiens
VLKNQEVEF

SEQ ID NO: 75207 - protein, 9 aa, Homo Sapiens
VLKPNIISY

SEQ ID NO: 75208 - protein, 9 aa, Homo Sapiens
VLKQEQEEY

SEQ ID NO: 75209 - protein, 9 aa, Homo Sapiens
VLMKKSETY

SEQ ID NO: 75210 - protein, 9 aa, Homo Sapiens
VLMPKVMHY

SEQ ID NO: 75211 - protein, 9 aa, Homo Sapiens
VLNKVITVY

SEQ ID NO: 75212 - protein, 9 aa, Homo Sapiens
VLNQPNSVF

SEQ ID NO: 75213 - protein, 9 aa, Homo Sapiens
VLQITKIIY

SEQ ID NO: 75214 - protein, 9 aa, Homo Sapiens
VLREESREY

SEQ ID NO: 75215 - protein, 9 aa, Homo Sapiens
VLREIAEEY

SEQ ID NO: 75216 - protein, 9 aa, Homo Sapiens
VLRPFPASY

SEQ ID NO: 75217 - protein, 9 aa, Homo Sapiens
VLRQETEFF

SEQ ID NO: 75218 - protein, 9 aa, Homo Sapiens
VLSPVGKQY

SEQ ID NO: 75219 - protein, 9 aa, Homo Sapiens
VLYLEGVKF

SEQ ID NO: 75220 - protein, 9 aa, Homo Sapiens
VLYPHLSTY

SEQ ID NO: 75221 - protein, 9 aa, Homo Sapiens
VMHQIISKY

SEQ ID NO: 75222 - protein, 9 aa, Homo Sapiens
VMIIRTMLY

SEQ ID NO: 75223 - protein, 9 aa, Homo Sapiens
VMINKATPY

SEQ ID NO: 75224 - protein, 9 aa, Homo Sapiens
VMIRDILMY

SEQ ID NO: 75225 - protein, 9 aa, Homo Sapiens
VMKSLTQTF

SEQ ID NO: 75226 - protein, 9 aa, Homo Sapiens
VMRAYLQQL

SEQ ID NO: 75227 - protein, 9 aa, Homo Sapiens
VMRKLQKTY

SEQ ID NO: 75228 - protein, 9 aa, Homo Sapiens
VQAGNSSLY

SEQ ID NO: 75229 - protein, 9 aa, Homo Sapiens
VQCPHPQIL

SEQ ID NO: 75230 - protein, 9 aa, Homo Sapiens
VQFKLPDVY

SEQ ID NO: 75231 - protein, 9 aa, Homo Sapiens
VQFSNHTGY

SEQ ID NO: 75232 - protein, 9 aa, Homo Sapiens
VQGIFVEKY

SEQ ID NO: 75233 - protein, 9 aa, Homo Sapiens
VQGLLSETY

SEQ ID NO: 75234 - protein, 9 aa, Homo Sapiens
VQGPVGTDF

SEQ ID NO: 75235 - protein, 9 aa, Homo Sapiens
VQGRPGAPF

SEQ ID NO: 75236 - protein, 9 aa, Homo Sapiens
VQHCQSRVF

SEQ ID NO: 75237 - protein, 9 aa, Homo Sapiens
VQHKTTEAL

SEQ ID NO: 75238 - protein, 9 aa, Homo Sapiens
VQIDITRVF

SEQ ID NO: 75239 - protein, 9 aa, Homo Sapiens
VQIEHISSL

SEQ ID NO: 75240 - protein, 9 aa, Homo Sapiens
VQIFERSVY

SEQ ID NO: 75241 - protein, 9 aa, Homo Sapiens
VQINVPITF

SEQ ID NO: 75242 - protein, 9 aa, Homo Sapiens
VQIPPSTTY

SEQ ID NO: 75243 - protein, 9 aa, Homo Sapiens
VQISPMSAF

SEQ ID NO: 75244 - protein, 9 aa, Homo Sapiens
VQITEARCF

SEQ ID NO: 75245 - protein, 9 aa, Homo Sapiens
VQKEDIEVY

SEQ ID NO: 75246 - protein, 9 aa, Homo Sapiens
VQKEGKISY

SEQ ID NO: 75247 - protein, 9 aa, Homo Sapiens
VQKEGPTAL

SEQ ID NO: 75248 - protein, 9 aa, Homo Sapiens
VQKHNIQAL

SEQ ID NO: 75249 - protein, 9 aa, Homo Sapiens
VQKKLRSSL

SEQ ID NO: 75250 - protein, 9 aa, Homo Sapiens
VQKLLEQGL

SEQ ID NO: 75251 - protein, 9 aa, Homo Sapiens
VQKPDAANY

SEQ ID NO: 75252 - protein, 9 aa, Homo Sapiens
VQKRKQLEL

SEQ ID NO: 75253 - protein, 9 aa, Homo Sapiens
VQKVDQYLY

SEQ ID NO: 75254 - protein, 9 aa, Homo Sapiens
VQLEQLRPF

SEQ ID NO: 75255 - protein, 9 aa, Homo Sapiens
VQMKIKELY

SEQ ID NO: 75256 - protein, 9 aa, Homo Sapiens
VQNKLGVVF

SEQ ID NO: 75257 - protein, 9 aa, Homo Sapiens
VQNKNSSYF

SEQ ID NO: 75258 - protein, 9 aa, Homo Sapiens
VQNMKPEEY

SEQ ID NO: 75259 - protein, 9 aa, Homo Sapiens
VQNPALTAL

SEQ ID NO: 75260 - protein, 9 aa, Homo Sapiens
VQPKLWARY

SEQ ID NO: 75261 - protein, 9 aa, Homo Sapiens
VQPPKQQPM

SEQ ID NO: 75262 - protein, 9 aa, Homo Sapiens
VQPSKFNSY

SEQ ID NO: 75263 - protein, 9 aa, Homo Sapiens
VQPSKQLEY

SEQ ID NO: 75264 - protein, 9 aa, Homo Sapiens
VQQLQRLSF

SEQ ID NO: 75265 - protein, 9 aa, Homo Sapiens
VQQNNTESF

SEQ ID NO: 75266 - protein, 9 aa, Homo Sapiens
VQQPGQTNF

SEQ ID NO: 75267 - protein, 9 aa, Homo Sapiens
VQQVHVATY

SEQ ID NO: 75268 - protein, 9 aa, Homo Sapiens
VQQVQRLPF

SEQ ID NO: 75269 - protein, 9 aa, Homo Sapiens
VQQVQVSCF

SEQ ID NO: 75270 - protein, 9 aa, Homo Sapiens
VQRARQIAA

SEQ ID NO: 75271 - protein, 9 aa, Homo Sapiens
VQREYNLNF

SEQ ID NO: 75272 - protein, 9 aa, Homo Sapiens
VQRGGIKLH

SEQ ID NO: 75273 - protein, 9 aa, Homo Sapiens
VQRGIGTAY

SEQ ID NO: 75274 - protein, 9 aa, Homo Sapiens
VQRILRERF

SEQ ID NO: 75275 - protein, 9 aa, Homo Sapiens
VQRITQETF

SEQ ID NO: 75276 - protein, 9 aa, Homo Sapiens
VQRKLGFAL

SEQ ID NO: 75277 - protein, 9 aa, Homo Sapiens
VQRNHETAF

SEQ ID NO: 75278 - protein, 9 aa, Homo Sapiens
VQRPEFHAL

SEQ ID NO: 75279 - protein, 9 aa, Homo Sapiens
VQRPQVVEY

SEQ ID NO: 75280 - protein, 9 aa, Homo Sapiens
VQRRPGQSF

SEQ ID NO: 75281 - protein, 9 aa, Homo Sapiens
VQRTQAPAV

SEQ ID NO: 75282 - protein, 9 aa, Homo Sapiens
VQRVETISL

SEQ ID NO: 75283 - protein, 9 aa, Homo Sapiens
VQRYSQDSF

SEQ ID NO: 75284 - protein, 9 aa, Homo Sapiens
VQSPACTSY

SEQ ID NO: 75285 - protein, 9 aa, Homo Sapiens
VQSSIASAF

SEQ ID NO: 75286 - protein, 9 aa, Homo Sapiens
VQSSTSIRY

SEQ ID NO: 75287 - protein, 9 aa, Homo Sapiens
VQVKRIHEY

SEQ ID NO: 75288 - protein, 9 aa, Homo Sapiens
VQYRYFKGY

SEQ ID NO: 75289 - protein, 9 aa, Homo Sapiens
VQYVHTQRF

SEQ ID NO: 75290 - protein, 9 aa, Homo Sapiens
VSHIMLESY

SEQ ID NO: 75291 - protein, 9 aa, Homo Sapiens
VSHLIATEY

SEQ ID NO: 75292 - protein, 9 aa, Homo Sapiens
VSHWQQQSY

SEQ ID NO: 75293 - protein, 9 aa, Homo Sapiens
VSKPCFTAY

SEQ ID NO: 75294 - protein, 9 aa, Homo Sapiens
VSKPDLITF

SEQ ID NO: 75295 - protein, 9 aa, Homo Sapiens
VSYKGSISY

SEQ ID NO: 75296 - protein, 9 aa, Homo Sapiens
VTKALEHAF

SEQ ID NO: 75297 - protein, 9 aa, Homo Sapiens
VTKPEGKDY

SEQ ID NO: 75298 - protein, 9 aa, Homo Sapiens
VTKPVGGNY

SEQ ID NO: 75299 - protein, 9 aa, Homo Sapiens
VTNPNNTFY

SEQ ID NO: 75300 - protein, 9 aa, Homo Sapiens
VTRPTGVSF

SEQ ID NO: 75301 - protein, 9 aa, Homo Sapiens
VTSPIRASY

SEQ ID NO: 75302 - protein, 9 aa, Homo Sapiens
VVAGDIAVY

SEQ ID NO: 75303 - protein, 9 aa, Homo Sapiens
VVAGIKEYF

SEQ ID NO: 75304 - protein, 9 aa, Homo Sapiens
VVAGSVVSY

SEQ ID NO: 75305 - protein, 9 aa, Homo Sapiens
VVAPAGITL

SEQ ID NO: 75306 - protein, 9 aa, Homo Sapiens
VVAPAGVTL

SEQ ID NO: 75307 - protein, 9 aa, Homo Sapiens
VVAPITTGY

SEQ ID NO: 75308 - protein, 9 aa, Homo Sapiens
VVEGNHTVY

SEQ ID NO: 75309 - protein, 9 aa, Homo Sapiens
VVFPNGKSH

SEQ ID NO: 75310 - protein, 9 aa, Homo Sapiens
VVGPNHAAF

SEQ ID NO: 75311 - protein, 9 aa, Homo Sapiens
VVIDLGEAF

SEQ ID NO: 75312 - protein, 9 aa, Homo Sapiens
VVIGSHAAF

SEQ ID NO: 75313 - protein, 9 aa, Homo Sapiens
VVISSDGQF

SEQ ID NO: 75314 - protein, 9 aa, Homo Sapiens
VVKEPETRY

SEQ ID NO: 75315 - protein, 9 aa, Homo Sapiens
VVKMPSGEF

SEQ ID NO: 75316 - protein, 9 aa, Homo Sapiens
VVKPPGSSL

SEQ ID NO: 75317 - protein, 9 aa, Homo Sapiens
VVKPSDEEL

SEQ ID NO: 75318 - protein, 9 aa, Homo Sapiens
VVNSPHRQY

SEQ ID NO: 75319 - protein, 9 aa, Homo Sapiens
VVQEPGQVF

SEQ ID NO: 75320 - protein, 9 aa, Homo Sapiens
VVREMTEGY

SEQ ID NO: 75321 - protein, 9 aa, Homo Sapiens
VVRKEVIRF

SEQ ID NO: 75322 - protein, 9 aa, Homo Sapiens
VVYKNPSEY

SEQ ID NO: 75323 - protein, 9 aa, Homo Sapiens
VVYPSEICF

SEQ ID NO: 75324 - protein, 9 aa, Homo Sapiens
WQKGIGEFF

SEQ ID NO: 75325 - protein, 9 aa, Homo Sapiens
WQTVVGKTY

SEQ ID NO: 75326 - protein, 9 aa, Homo Sapiens
YAFDFARQS

SEQ ID NO: 75327 - protein, 9 aa, Homo Sapiens
YANEVGEAF

SEQ ID NO: 75328 - protein, 9 aa, Homo Sapiens
YIFKERESF

SEQ ID NO: 75329 - protein, 9 aa, Homo Sapiens
YIQKNVQLY

SEQ ID NO: 75330 - protein, 9 aa, Homo Sapiens
YIRGSTIKY

SEQ ID NO: 75331 - protein, 9 aa, Homo Sapiens
YIRQGEQSL

SEQ ID NO: 75332 - protein, 9 aa, Homo Sapiens
YISFRHHVY

SEQ ID NO: 75333 - protein, 9 aa, Homo Sapiens
YLGEFSITY

SEQ ID NO: 75334 - protein, 9 aa, Homo Sapiens
YLIDRDPTY

SEQ ID NO: 75335 - protein, 9 aa, Homo Sapiens
YLKIRHSSY

SEQ ID NO: 75336 - protein, 9 aa, Homo Sapiens
YLLPDTKAY

SEQ ID NO: 75337 - protein, 9 aa, Homo Sapiens
YLNEKAVSY

SEQ ID NO: 75338 - protein, 9 aa, Homo Sapiens
YLNQTSRSF

SEQ ID NO: 75339 - protein, 9 aa, Homo Sapiens
YLYPDGRSY

SEQ ID NO: 75340 - protein, 9 aa, Homo Sapiens
YLYPDQTHF

SEQ ID NO: 75341 - protein, 9 aa, Homo Sapiens
YMFVDENTF

SEQ ID NO: 75342 - protein, 9 aa, Homo Sapiens
YMIAHITGL

SEQ ID NO: 75343 - protein, 9 aa, Homo Sapiens
YMKSEDPLF

SEQ ID NO: 75344 - protein, 9 aa, Homo Sapiens
YMRDPDDQY

SEQ ID NO: 75345 - protein, 9 aa, Homo Sapiens
YMSGYHTGY

SEQ ID NO: 75346 - protein, 9 aa, Homo Sapiens
YQAEAREAL

SEQ ID NO: 75347 - protein, 9 aa, Homo Sapiens
YQASYNQSF

SEQ ID NO: 75348 - protein, 9 aa, Homo Sapiens
YQFTGIKKY

SEQ ID NO: 75349 - protein, 9 aa, Homo Sapiens
YQHGHINSY

SEQ ID NO: 75350 - protein, 9 aa, Homo Sapiens
YQIDPDACF

SEQ ID NO: 75351 - protein, 9 aa, Homo Sapiens
YQIEPVKKM

SEQ ID NO: 75352 - protein, 9 aa, Homo Sapiens
YQIHRIRHF

SEQ ID NO: 75353 - protein, 9 aa, Homo Sapiens
YQIKVHRKY

SEQ ID NO: 75354 - protein, 9 aa, Homo Sapiens
YQILQGIVF

SEQ ID NO: 75355 - protein, 9 aa, Homo Sapiens
YQILQNYQF

SEQ ID NO: 75356 - protein, 9 aa, Homo Sapiens
YQKQPKIGY

SEQ ID NO: 75357 - protein, 9 aa, Homo Sapiens
YQLIDCAQY

SEQ ID NO: 75358 - protein, 9 aa, Homo Sapiens
YQLVKTYEY

SEQ ID NO: 75359 - protein, 9 aa, Homo Sapiens
YQNVCTQSY

SEQ ID NO: 75360 - protein, 9 aa, Homo Sapiens
YQPAPPSGY

SEQ ID NO: 75361 - protein, 9 aa, Homo Sapiens
YQPETNSSF

SEQ ID NO: 75362 - protein, 9 aa, Homo Sapiens
YQPLQIETY

SEQ ID NO: 75363 - protein, 9 aa, Homo Sapiens
YQPTPTAGY

SEQ ID NO: 75364 - protein, 9 aa, Homo Sapiens
YQQQQQSEL

SEQ ID NO: 75365 - protein, 9 aa, Homo Sapiens
YQRDGPMCM

SEQ ID NO: 75366 - protein, 9 aa, Homo Sapiens
YQRDLEVAL

SEQ ID NO: 75367 - protein, 9 aa, Homo Sapiens
YQRHETEQF

SEQ ID NO: 75368 - protein, 9 aa, Homo Sapiens
YQSDPSGNY

SEQ ID NO: 75369 - protein, 9 aa, Homo Sapiens
YQSHGRSAF

SEQ ID NO: 75370 - protein, 9 aa, Homo Sapiens
YQTAISENY

SEQ ID NO: 75371 - protein, 9 aa, Homo Sapiens
YQTAPKAGY

SEQ ID NO: 75372 - protein, 9 aa, Homo Sapiens
YQTDPSGTY

SEQ ID NO: 75373 - protein, 9 aa, Homo Sapiens
YQVGINQRF

SEQ ID NO: 75374 - protein, 9 aa, Homo Sapiens
YQYLEQSKY

SEQ ID NO: 75375 - protein, 9 aa, Homo Sapiens
YQYLLVTAL

SEQ ID NO: 75376 - protein, 9 aa, Homo Sapiens
YQYPVIIHL

SEQ ID NO: 75377 - protein, 9 aa, Homo Sapiens
YSFGGCHRY

SEQ ID NO: 75378 - protein, 9 aa, Homo Sapiens
YSHLVSVGY

SEQ ID NO: 75379 - protein, 9 aa, Homo Sapiens
YSKKLEAKY

SEQ ID NO: 75380 - protein, 9 aa, Homo Sapiens
YSMPSTHAM

SEQ ID NO: 75381 - protein, 9 aa, Homo Sapiens
YSNGFCTVY

SEQ ID NO: 75382 - protein, 9 aa, Homo Sapiens
YSQEQRQAF

SEQ ID NO: 75383 - protein, 9 aa, Homo Sapiens
YTAQPTQGY

SEQ ID NO: 75384 - protein, 9 aa, Homo Sapiens
YTGPSHHSY

SEQ ID NO: 75385 - protein, 9 aa, Homo Sapiens
YTQQATQSY

SEQ ID NO: 75386 - protein, 9 aa, Homo Sapiens
YVAPAYGVY

SEQ ID NO: 75387 - protein, 9 aa, Homo Sapiens
YVIGGHCGY

SEQ ID NO: 75388 - protein, 9 aa, Homo Sapiens
YVKDDKASF

SEQ ID NO: 75389 - protein, 9 aa, Homo Sapiens
YVNLPTIAL

SEQ ID NO: 75390 - protein, 9 aa, Homo Sapiens
YVTTSTRTY

SEQ ID NO: 75391 - protein, 10 aa, Homo Sapiens
AAAAAAPPDP

SEQ ID NO: 75392 - protein, 10 aa, Homo Sapiens
AAAAAAQSVY

SEQ ID NO: 75393 - protein, 10 aa, Homo Sapiens
AAGPPISEGK

SEQ ID NO: 75394 - protein, 10 aa, Homo Sapiens
AAYGGYPTAH

SEQ ID NO: 75395 - protein, 10 aa, Homo Sapiens
AEKAPTNIVY

SEQ ID NO: 75396 - protein, 10 aa, Homo Sapiens
AIAKAGIPVY

SEQ ID NO: 75397 - protein, 10 aa, Homo Sapiens
AIFGPPNTYY

SEQ ID NO: 75398 - protein, 10 aa, Homo Sapiens
AIKADHVSTY

SEQ ID NO: 75399 - protein, 10 aa, Homo Sapiens
AIKPGTSVEY

SEQ ID NO: 75400 - protein, 10 aa, Homo Sapiens
AIVKEKGTVY

SEQ ID NO: 75401 - protein, 10 aa, Homo Sapiens
ALAEAGVAVF

SEQ ID NO: 75402 - protein, 10 aa, Homo Sapiens
ALAPALVETY

SEQ ID NO: 75403 - protein, 10 aa, Homo Sapiens
ALGPPLNIHY

SEQ ID NO: 75404 - protein, 10 aa, Homo Sapiens
ALIARSLGKY

SEQ ID NO: 75405 - protein, 10 aa, Homo Sapiens
ALIEFIRSEY

SEQ ID NO: 75406 - protein, 10 aa, Homo Sapiens
ALKPPPIKLY

SEQ ID NO: 75407 - protein, 10 aa, Homo Sapiens
ALKRQGRTLY

SEQ ID NO: 75408 - protein, 10 aa, Homo Sapiens
ALPDTLKVTY

SEQ ID NO: 75409 - protein, 10 aa, Homo Sapiens
ALPPGSVISY

SEQ ID NO: 75410 - protein, 10 aa, Homo Sapiens
ALPQHKLTCF

SEQ ID NO: 75411 - protein, 10 aa, Homo Sapiens
ALQEALTEHY

SEQ ID NO: 75412 - protein, 10 aa, Homo Sapiens
ALRASVETGF

SEQ ID NO: 75413 - protein, 10 aa, Homo Sapiens
ALRDNSTMGY

SEQ ID NO: 75414 - protein, 10 aa, Homo Sapiens
ALRKSEIEYY

SEQ ID NO: 75415 - protein, 10 aa, Homo Sapiens
ALRPLDHESY

SEQ ID NO: 75416 - protein, 10 aa, Homo Sapiens
AMLAGATAVY

SEQ ID NO: 75417 - protein, 10 aa, Homo Sapiens
AMYLHRPEEY

SEQ ID NO: 75418 - protein, 10 aa, Homo Sapiens
ANAGAILSQF

SEQ ID NO: 75419 - protein, 10 aa, Homo Sapiens
AQAEAAGAAF

SEQ ID NO: 75420 - protein, 10 aa, Homo Sapiens
AQAEAQQPTF

SEQ ID NO: 75421 - protein, 10 aa, Homo Sapiens
AQAFIHNSLY

SEQ ID NO: 75422 - protein, 10 aa, Homo Sapiens
AQAGWLQHDF

SEQ ID NO: 75423 - protein, 10 aa, Homo Sapiens
AQAGWLQHDY

SEQ ID NO: 75424 - protein, 10 aa, Homo Sapiens
AQAHFNNGEY

SEQ ID NO: 75425 - protein, 10 aa, Homo Sapiens
AQAIEDMVGY

SEQ ID NO: 75426 - protein, 10 aa, Homo Sapiens
AQAPCGQAAY

SEQ ID NO: 75427 - protein, 10 aa, Homo Sapiens
AQAPVTKGCY

SEQ ID NO: 75428 - protein, 10 aa, Homo Sapiens
AQAQKCFALY

SEQ ID NO: 75429 - protein, 10 aa, Homo Sapiens
AQCDKPNKEF

SEQ ID NO: 75430 - protein, 10 aa, Homo Sapiens
AQEPNVKETY

SEQ ID NO: 75431 - protein, 10 aa, Homo Sapiens
AQFEPDSTEY

SEQ ID NO: 75432 - protein, 10 aa, Homo Sapiens
AQFHPDGLIF

SEQ ID NO: 75433 - protein, 10 aa, Homo Sapiens
AQFIDKPVCF

SEQ ID NO: 75434 - protein, 10 aa, Homo Sapiens
AQFRDPCRSY

SEQ ID NO: 75435 - protein, 10 aa, Homo Sapiens
AQFTAQVHHF

SEQ ID NO: 75436 - protein, 10 aa, Homo Sapiens
AQHEDQVEQY

SEQ ID NO: 75437 - protein, 10 aa, Homo Sapiens
AQHLQAAVAF

SEQ ID NO: 75438 - protein, 10 aa, Homo Sapiens
AQICSSIRTH

SEQ ID NO: 75439 - protein, 10 aa, Homo Sapiens
AQIKEKLERY

SEQ ID NO: 75440 - protein, 10 aa, Homo Sapiens
AQILDKATEY

SEQ ID NO: 75441 - protein, 10 aa, Homo Sapiens
AQILKVIEAY

SEQ ID NO: 75442 - protein, 10 aa, Homo Sapiens
AQINELHLAY

SEQ ID NO: 75443 - protein, 10 aa, Homo Sapiens
AQINSVFNKY

SEQ ID NO: 75444 - protein, 10 aa, Homo Sapiens
AQIPVDLSEL

SEQ ID NO: 75445 - protein, 10 aa, Homo Sapiens
AQIRYEGILY

SEQ ID NO: 75446 - protein, 10 aa, Homo Sapiens
AQITQKIGVH

SEQ ID NO: 75447 - protein, 10 aa, Homo Sapiens
AQKAASKVTL

SEQ ID NO: 75448 - protein, 10 aa, Homo Sapiens
AQKAVGKDNF

SEQ ID NO: 75449 - protein, 10 aa, Homo Sapiens
AQKEPHPLQF

SEQ ID NO: 75450 - protein, 10 aa, Homo Sapiens
AQKQIFDVVY

SEQ ID NO: 75451 - protein, 10 aa, Homo Sapiens
AQKRLSENAF

SEQ ID NO: 75452 - protein, 10 aa, Homo Sapiens
AQKSGDGVQF

SEQ ID NO: 75453 - protein, 10 aa, Homo Sapiens
AQKSSELEQY

SEQ ID NO: 75454 - protein, 10 aa, Homo Sapiens
AQKTIVKETY

SEQ ID NO: 75455 - protein, 10 aa, Homo Sapiens
AQKYHEYSHY

SEQ ID NO: 75456 - protein, 10 aa, Homo Sapiens
AQLDPSLVAF

SEQ ID NO: 75457 - protein, 10 aa, Homo Sapiens
AQLGPVGGVF

SEQ ID NO: 75458 - protein, 10 aa, Homo Sapiens
AQLPKPTSTY

SEQ ID NO: 75459 - protein, 10 aa, Homo Sapiens
AQMPTVHYEF

SEQ ID NO: 75460 - protein, 10 aa, Homo Sapiens
AQNAVQRAAY

SEQ ID NO: 75461 - protein, 10 aa, Homo Sapiens
AQNEGKAMSY

SEQ ID NO: 75462 - protein, 10 aa, Homo Sapiens
AQNPANMSKY

SEQ ID NO: 75463 - protein, 10 aa, Homo Sapiens
AQNPSGETAF

SEQ ID NO: 75464 - protein, 10 aa, Homo Sapiens
AQNRFEVLTF

SEQ ID NO: 75465 - protein, 10 aa, Homo Sapiens
AQPGSEPTPM

SEQ ID NO: 75466 - protein, 10 aa, Homo Sapiens
AQPLESGTHF

SEQ ID NO: 75467 - protein, 10 aa, Homo Sapiens
AQPLNVGVAH

SEQ ID NO: 75468 - protein, 10 aa, Homo Sapiens
AQPLQPLQVY

SEQ ID NO: 75469 - protein, 10 aa, Homo Sapiens
AQQDVLKKSY

SEQ ID NO: 75470 - protein, 10 aa, Homo Sapiens
AQQEAERARF

SEQ ID NO: 75471 - protein, 10 aa, Homo Sapiens
AQQEAQRAQF

SEQ ID NO: 75472 - protein, 10 aa, Homo Sapiens
AQQPALIHGY

SEQ ID NO: 75473 - protein, 10 aa, Homo Sapiens
AQQPHIAGVF

SEQ ID NO: 75474 - protein, 10 aa, Homo Sapiens
AQQPLSVTCF

SEQ ID NO: 75475 - protein, 10 aa, Homo Sapiens
AQRAPGGLSY

SEQ ID NO: 75476 - protein, 10 aa, Homo Sapiens
AQRDVMLENY

SEQ ID NO: 75477 - protein, 10 aa, Homo Sapiens
AQRENLSAAF

SEQ ID NO: 75478 - protein, 10 aa, Homo Sapiens
AQREPLSSAF

SEQ ID NO: 75479 - protein, 10 aa, Homo Sapiens
AQRPDNPREF

SEQ ID NO: 75480 - protein, 10 aa, Homo Sapiens
AQRQDIAFAY

SEQ ID NO: 75481 - protein, 10 aa, Homo Sapiens
AQRQEIRTAY

SEQ ID NO: 75482 - protein, 10 aa, Homo Sapiens
AQRQPMKPTY

SEQ ID NO: 75483 - protein, 10 aa, Homo Sapiens
AQRRDPSIHY

SEQ ID NO: 75484 - protein, 10 aa, Homo Sapiens
AQRSTETALY

SEQ ID NO: 75485 - protein, 10 aa, Homo Sapiens
AQRTPVQMMY

SEQ ID NO: 75486 - protein, 10 aa, Homo Sapiens
AQSGTQLATY

SEQ ID NO: 75487 - protein, 10 aa, Homo Sapiens
AQTPAHIAAF

SEQ ID NO: 75488 - protein, 10 aa, Homo Sapiens
AQVLAELKEY

SEQ ID NO: 75489 - protein, 10 aa, Homo Sapiens
AQVQYPLQTF

SEQ ID NO: 75490 - protein, 10 aa, Homo Sapiens
AQYDQASTKY

SEQ ID NO: 75491 - protein, 10 aa, Homo Sapiens
AQYENPPHIY

SEQ ID NO: 75492 - protein, 10 aa, Homo Sapiens
AQYPSQPQRF

SEQ ID NO: 75493 - protein, 10 aa, Homo Sapiens
AQYRISMAAY

SEQ ID NO: 75494 - protein, 10 aa, Homo Sapiens
AQYSQDYQQF

SEQ ID NO: 75495 - protein, 10 aa, Homo Sapiens
ASFDGRISVY

SEQ ID NO: 75496 - protein, 10 aa, Homo Sapiens
ATNPESKVFY

SEQ ID NO: 75497 - protein, 10 aa, Homo Sapiens
AVASFRSKAY

SEQ ID NO: 75498 - protein, 10 aa, Homo Sapiens
AVAYVHSQGY

SEQ ID NO: 75499 - protein, 10 aa, Homo Sapiens
AVFQGKKITF

SEQ ID NO: 75500 - protein, 10 aa, Homo Sapiens
AVIGDVIRVY

SEQ ID NO: 75501 - protein, 10 aa, Homo Sapiens
AVILPPLSPY

SEQ ID NO: 75502 - protein, 10 aa, Homo Sapiens
AVIQVGKEKY

SEQ ID NO: 75503 - protein, 10 aa, Homo Sapiens
AVKNDYEMTF

SEQ ID NO: 75504 - protein, 10 aa, Homo Sapiens
AVMKSLTQTF

SEQ ID NO: 75505 - protein, 10 aa, Homo Sapiens
AVNGAVGTTF

SEQ ID NO: 75506 - protein, 10 aa, Homo Sapiens
AVQGRCTVEY

SEQ ID NO: 75507 - protein, 10 aa, Homo Sapiens
AVVQTVKASY

SEQ ID NO: 75508 - protein, 10 aa, Homo Sapiens
AVYPQATQTY

SEQ ID NO: 75509 - protein, 10 aa, Homo Sapiens
DQLEYQEELR

SEQ ID NO: 75510 - protein, 10 aa, Homo Sapiens
DSQRVLYIRY

SEQ ID NO: 75511 - protein, 10 aa, Homo Sapiens
DTGRPSTTVR

SEQ ID NO: 75512 - protein, 10 aa, Homo Sapiens
EEQLQQIRAE

SEQ ID NO: 75513 - protein, 10 aa, Homo Sapiens
FIIDTRDAGY

SEQ ID NO: 75514 - protein, 10 aa, Homo Sapiens
FLIKRNKQTY

SEQ ID NO: 75515 - protein, 10 aa, Homo Sapiens
FQIEVQKGRY

SEQ ID NO: 75516 - protein, 10 aa, Homo Sapiens
FQIGQAKNTY

SEQ ID NO: 75517 - protein, 10 aa, Homo Sapiens
FQISKEYERF

SEQ ID NO: 75518 - protein, 10 aa, Homo Sapiens
FQKADGVPVY

SEQ ID NO: 75519 - protein, 10 aa, Homo Sapiens
FQKGESPVDY

SEQ ID NO: 75520 - protein, 10 aa, Homo Sapiens
FQKLPSKVQY

SEQ ID NO: 75521 - protein, 10 aa, Homo Sapiens
FQLPGGHLEF

SEQ ID NO: 75522 - protein, 10 aa, Homo Sapiens
FQYDDSGNTF

SEQ ID NO: 75523 - protein, 10 aa, Homo Sapiens
FQYDSTHGKF

SEQ ID NO: 75524 - protein, 10 aa, Homo Sapiens
GASQAGMTGY

SEQ ID NO: 75525 - protein, 10 aa, Homo Sapiens
GGGLSVSSSR

SEQ ID NO: 75526 - protein, 10 aa, Homo Sapiens
GIFPAKTITY

SEQ ID NO: 75527 - protein, 10 aa, Homo Sapiens
GLARHAMAVY

SEQ ID NO: 75528 - protein, 10 aa, Homo Sapiens
GLFPGSNATF

SEQ ID NO: 75529 - protein, 10 aa, Homo Sapiens
GLFQHICTAY

SEQ ID NO: 75530 - protein, 10 aa, Homo Sapiens
GLKPVVGEVY

SEQ ID NO: 75531 - protein, 10 aa, Homo Sapiens
GLYSPQYISY

SEQ ID NO: 75532 - protein, 10 aa, Homo Sapiens
GMAAMPQTVY

SEQ ID NO: 75533 - protein, 10 aa, Homo Sapiens
GMAGSGKTTF

SEQ ID NO: 75534 - protein, 10 aa, Homo Sapiens
GMFDQKSSSH

SEQ ID NO: 75535 - protein, 10 aa, Homo Sapiens
GMKDGQKITF

SEQ ID NO: 75536 - protein, 10 aa, Homo Sapiens
GMNPREPAVY

SEQ ID NO: 75537 - protein, 10 aa, Homo Sapiens
GMNRFNSRTY

SEQ ID NO: 75538 - protein, 10 aa, Homo Sapiens
GMQRATNVTY

SEQ ID NO: 75539 - protein, 10 aa, Homo Sapiens
GQAGMHATYY

SEQ ID NO: 75540 - protein, 10 aa, Homo Sapiens
GQAPINNTGF

SEQ ID NO: 75541 - protein, 10 aa, Homo Sapiens
GQAYIVSSGF

SEQ ID NO: 75542 - protein, 10 aa, Homo Sapiens
GQAYTIQGQY

SEQ ID NO: 75543 - protein, 10 aa, Homo Sapiens
GQCTQVRVEF

SEQ ID NO: 75544 - protein, 10 aa, Homo Sapiens
GQDPHSSQAF

SEQ ID NO: 75545 - protein, 10 aa, Homo Sapiens
GQERPSVTSY

SEQ ID NO: 75546 - protein, 10 aa, Homo Sapiens
GQFEEFGQTF

SEQ ID NO: 75547 - protein, 10 aa, Homo Sapiens
GQFPGHNEFF

SEQ ID NO: 75548 - protein, 10 aa, Homo Sapiens
GQHPKQCAYF

SEQ ID NO: 75549 - protein, 10 aa, Homo Sapiens
GQIEHKLAFL

SEQ ID NO: 75550 - protein, 10 aa, Homo Sapiens
GQIELTGKRY

SEQ ID NO: 75551 - protein, 10 aa, Homo Sapiens
GQIHTGMGSY

SEQ ID NO: 75552 - protein, 10 aa, Homo Sapiens
GQILMPNIGY

SEQ ID NO: 75553 - protein, 10 aa, Homo Sapiens
GQISDPSRSY

SEQ ID NO: 75554 - protein, 10 aa, Homo Sapiens
GQKCEFQDAY

SEQ ID NO: 75555 - protein, 10 aa, Homo Sapiens
GQKGTCGIQY

SEQ ID NO: 75556 - protein, 10 aa, Homo Sapiens
GQKPNEYQEY

SEQ ID NO: 75557 - protein, 10 aa, Homo Sapiens
GQLSWHQKTY

SEQ ID NO: 75558 - protein, 10 aa, Homo Sapiens
GQLVFKSDAY

SEQ ID NO: 75559 - protein, 10 aa, Homo Sapiens
GQNAAVVHRF

SEQ ID NO: 75560 - protein, 10 aa, Homo Sapiens
GQNDPLKDSY

SEQ ID NO: 75561 - protein, 10 aa, Homo Sapiens
GQNGQQILSA

SEQ ID NO: 75562 - protein, 10 aa, Homo Sapiens
GQNNSVFTLY

SEQ ID NO: 75563 - protein, 10 aa, Homo Sapiens
GQNPTNAEVL

SEQ ID NO: 75564 - protein, 10 aa, Homo Sapiens
GQNVADYMRY

SEQ ID NO: 75565 - protein, 10 aa, Homo Sapiens
GQPAKADQCY

SEQ ID NO: 75566 - protein, 10 aa, Homo Sapiens
GQPLRPQANY

SEQ ID NO: 75567 - protein, 10 aa, Homo Sapiens
GQPPFASRSF

SEQ ID NO: 75568 - protein, 10 aa, Homo Sapiens
GQPQAPMGSY

SEQ ID NO: 75569 - protein, 10 aa, Homo Sapiens
GQPVKVRVSY

SEQ ID NO: 75570 - protein, 10 aa, Homo Sapiens
GQQAALASQY

SEQ ID NO: 75571 - protein, 10 aa, Homo Sapiens
GQRKGAGSVF

SEQ ID NO: 75572 - protein, 10 aa, Homo Sapiens
GQRRHFIIQY

SEQ ID NO: 75573 - protein, 10 aa, Homo Sapiens
GQSPTGSVCY

SEQ ID NO: 75574 - protein, 10 aa, Homo Sapiens
GQTEPHTVLF

SEQ ID NO: 75575 - protein, 10 aa, Homo Sapiens
GQVEVTGDEY

SEQ ID NO: 75576 - protein, 10 aa, Homo Sapiens
GQVKFKSSNY

SEQ ID NO: 75577 - protein, 10 aa, Homo Sapiens
GQVPHSLETL

SEQ ID NO: 75578 - protein, 10 aa, Homo Sapiens
GQYGNPLNKY

SEQ ID NO: 75579 - protein, 10 aa, Homo Sapiens
GQYPLQVNGY

SEQ ID NO: 75580 - protein, 10 aa, Homo Sapiens
GQYSTGKTTF

SEQ ID NO: 75581 - protein, 10 aa, Homo Sapiens
GTGGIVSTAF

SEQ ID NO: 75582 - protein, 10 aa, Homo Sapiens
GVFQSTDTCY

SEQ ID NO: 75583 - protein, 10 aa, Homo Sapiens
GVIEKLLTSY

SEQ ID NO: 75584 - protein, 10 aa, Homo Sapiens
GVNPHVNHLY

SEQ ID NO: 75585 - protein, 10 aa, Homo Sapiens
GVNPRVNHLY

SEQ ID NO: 75586 - protein, 10 aa, Homo Sapiens
HLPLLPNVSY

SEQ ID NO: 75587 - protein, 10 aa, Homo Sapiens
HLYPNTPYAY

SEQ ID NO: 75588 - protein, 10 aa, Homo Sapiens
HQFPELMGVF

SEQ ID NO: 75589 - protein, 10 aa, Homo Sapiens
HQGPATTVAF

SEQ ID NO: 75590 - protein, 10 aa, Homo Sapiens
HQLRAQILAY

SEQ ID NO: 75591 - protein, 10 aa, Homo Sapiens
HQLRAQIMAY

SEQ ID NO: 75592 - protein, 10 aa, Homo Sapiens
HQPDNIKALF

SEQ ID NO: 75593 - protein, 10 aa, Homo Sapiens
HQPLHVTKGY

SEQ ID NO: 75594 - protein, 10 aa, Homo Sapiens
HQRPDKQNLF

SEQ ID NO: 75595 - protein, 10 aa, Homo Sapiens
HQVAPSPAGY

SEQ ID NO: 75596 - protein, 10 aa, Homo Sapiens
HQVPFAPIVF

SEQ ID NO: 75597 - protein, 10 aa, Homo Sapiens
HSRNEGVATY

SEQ ID NO: 75598 - protein, 10 aa, Homo Sapiens
HVASCGVNLY

SEQ ID NO: 75599 - protein, 10 aa, Homo Sapiens
IGQSKSVKIY

SEQ ID NO: 75600 - protein, 10 aa, Homo Sapiens
IIAEVAKNEF

SEQ ID NO: 75601 - protein, 10 aa, Homo Sapiens
IIAPHAGYTY

SEQ ID NO: 75602 - protein, 10 aa, Homo Sapiens
IIAQSAKFSG

SEQ ID NO: 75603 - protein, 10 aa, Homo Sapiens
IIIDGGNSEY

SEQ ID NO: 75604 - protein, 10 aa, Homo Sapiens
IIIETDHNAY

SEQ ID NO: 75605 - protein, 10 aa, Homo Sapiens
IIIGDNKTQY

SEQ ID NO: 75606 - protein, 10 aa, Homo Sapiens
IIIGQESITY

SEQ ID NO: 75607 - protein, 10 aa, Homo Sapiens
ILAEGGGAKF

SEQ ID NO: 75608 - protein, 10 aa, Homo Sapiens
ILIGNPGCTY

SEQ ID NO: 75609 - protein, 10 aa, Homo Sapiens
ILKDMGITEY

SEQ ID NO: 75610 - protein, 10 aa, Homo Sapiens
ILKSPGSVVF

SEQ ID NO: 75611 - protein, 10 aa, Homo Sapiens
ILNGSHPVSF

SEQ ID NO: 75612 - protein, 10 aa, Homo Sapiens
ILNPEEIEKY

SEQ ID NO: 75613 - protein, 10 aa, Homo Sapiens
ILPPPVHVDY

SEQ ID NO: 75614 - protein, 10 aa, Homo Sapiens
ILSKLTDIQY

SEQ ID NO: 75615 - protein, 10 aa, Homo Sapiens
ILTSNDALLF

SEQ ID NO: 75616 - protein, 10 aa, Homo Sapiens
IMIRESGQLF

SEQ ID NO: 75617 - protein, 10 aa, Homo Sapiens
IMQDFESDTF

SEQ ID NO: 75618 - protein, 10 aa, Homo Sapiens
IMRECQEESF

SEQ ID NO: 75619 - protein, 10 aa, Homo Sapiens
IQAQMVTTDF

SEQ ID NO: 75620 - protein, 10 aa, Homo Sapiens
IQFADDMQEF

SEQ ID NO: 75621 - protein, 10 aa, Homo Sapiens
IQIALPSGCY

SEQ ID NO: 75622 - protein, 10 aa, Homo Sapiens
IQIKDAIGRY

SEQ ID NO: 75623 - protein, 10 aa, Homo Sapiens
IQIKQQSTSY

SEQ ID NO: 75624 - protein, 10 aa, Homo Sapiens
IQKDNPKIVH

SEQ ID NO: 75625 - protein, 10 aa, Homo Sapiens
IQKEQDYQRY

SEQ ID NO: 75626 - protein, 10 aa, Homo Sapiens
IQKESQYIKY

SEQ ID NO: 75627 - protein, 10 aa, Homo Sapiens
IQKGQALITF

SEQ ID NO: 75628 - protein, 10 aa, Homo Sapiens
IQNGAQGIRF

SEQ ID NO: 75629 - protein, 10 aa, Homo Sapiens
IQNGTSGIRF

SEQ ID NO: 75630 - protein, 10 aa, Homo Sapiens
IQNKKTCVEY

SEQ ID NO: 75631 - protein, 10 aa, Homo Sapiens
IQNPDLWNSY

SEQ ID NO: 75632 - protein, 10 aa, Homo Sapiens
IQNQAEPREF

SEQ ID NO: 75633 - protein, 10 aa, Homo Sapiens
IQPGEQKYEY

SEQ ID NO: 75634 - protein, 10 aa, Homo Sapiens
IQPGRGFVLY

SEQ ID NO: 75635 - protein, 10 aa, Homo Sapiens
IQPPKGVLLY

SEQ ID NO: 75636 - protein, 10 aa, Homo Sapiens
IQPPKGVLMY

SEQ ID NO: 75637 - protein, 10 aa, Homo Sapiens
IQRLIEQEEY

SEQ ID NO: 75638 - protein, 10 aa, Homo Sapiens
IQRPDKHESF

SEQ ID NO: 75639 - protein, 10 aa, Homo Sapiens
IQRTPKIQVY

SEQ ID NO: 75640 - protein, 10 aa, Homo Sapiens
IQYSGEVRRF

SEQ ID NO: 75641 - protein, 10 aa, Homo Sapiens
IRLENEIQTY

SEQ ID NO: 75642 - protein, 10 aa, Homo Sapiens
ISKSGGDYAY

SEQ ID NO: 75643 - protein, 10 aa, Homo Sapiens
ITINAAHVEY

SEQ ID NO: 75644 - protein, 10 aa, Homo Sapiens
ITKPPDGSAF

SEQ ID NO: 75645 - protein, 10 aa, Homo Sapiens
IVFVGTGQTY

SEQ ID NO: 75646 - protein, 10 aa, Homo Sapiens
IVGPTLKATF

SEQ ID NO: 75647 - protein, 10 aa, Homo Sapiens
IVIEEKDVVY

SEQ ID NO: 75648 - protein, 10 aa, Homo Sapiens
IVIGDEHISF

SEQ ID NO: 75649 - protein, 10 aa, Homo Sapiens
KAFDCPETEY

SEQ ID NO: 75650 - protein, 10 aa, Homo Sapiens
KAFDLTEQRY

SEQ ID NO: 75651 - protein, 10 aa, Homo Sapiens
KANPFGGASH

SEQ ID NO: 75652 - protein, 10 aa, Homo Sapiens
KEKPVCGTTY

SEQ ID NO: 75653 - protein, 10 aa, Homo Sapiens
KIADMGHLKY

SEQ ID NO: 75654 - protein, 10 aa, Homo Sapiens
KIIETTGVHF

SEQ ID NO: 75655 - protein, 10 aa, Homo Sapiens
KIIHTGEKPY

SEQ ID NO: 75656 - protein, 10 aa, Homo Sapiens
KIRPGEQEQY

SEQ ID NO: 75657 - protein, 10 aa, Homo Sapiens
KISPFEHQTY

SEQ ID NO: 75658 - protein, 10 aa, Homo Sapiens
KIYDREQTRY

SEQ ID NO: 75659 - protein, 10 aa, Homo Sapiens
KIYPGHGRRY

SEQ ID NO: 75660 - protein, 10 aa, Homo Sapiens
KLADQIFAYY

SEQ ID NO: 75661 - protein, 10 aa, Homo Sapiens
KLAPAQYIRY

SEQ ID NO: 75662 - protein, 10 aa, Homo Sapiens
KLASTGTSEY

SEQ ID NO: 75663 - protein, 10 aa, Homo Sapiens
KLDPHNHVLY

SEQ ID NO: 75664 - protein, 10 aa, Homo Sapiens
KLFDATLTQY

SEQ ID NO: 75665 - protein, 10 aa, Homo Sapiens
KLFDDCTQQF

SEQ ID NO: 75666 - protein, 10 aa, Homo Sapiens
KLFDDCTQQY

SEQ ID NO: 75667 - protein, 10 aa, Homo Sapiens
KLFDDLTSSY

SEQ ID NO: 75668 - protein, 10 aa, Homo Sapiens
KLFDHAVSKF

SEQ ID NO: 75669 - protein, 10 aa, Homo Sapiens
KLFEDGKTGF

SEQ ID NO: 75670 - protein, 10 aa, Homo Sapiens
KLFGEKSASF

SEQ ID NO: 75671 - protein, 10 aa, Homo Sapiens
KLFPDIPIGY

SEQ ID NO: 75672 - protein, 10 aa, Homo Sapiens
KLFPGSPAIY

SEQ ID NO: 75673 - protein, 10 aa, Homo Sapiens
KLIDLSQVMY

SEQ ID NO: 75674 - protein, 10 aa, Homo Sapiens
KLIEGCFEGY

SEQ ID NO: 75675 - protein, 10 aa, Homo Sapiens
KLIYEKAKHY

SEQ ID NO: 75676 - protein, 10 aa, Homo Sapiens
KLKEVDRTAM

SEQ ID NO: 75677 - protein, 10 aa, Homo Sapiens
KLNPRLAILY

SEQ ID NO: 75678 - protein, 10 aa, Homo Sapiens
KLNVAPLAVF

SEQ ID NO: 75679 - protein, 10 aa, Homo Sapiens
KLPEFTKSEY

SEQ ID NO: 75680 - protein, 10 aa, Homo Sapiens
KLPNFGFVVF

SEQ ID NO: 75681 - protein, 10 aa, Homo Sapiens
KLSEGVTISY

SEQ ID NO: 75682 - protein, 10 aa, Homo Sapiens
KLSEPSSLQY

SEQ ID NO: 75683 - protein, 10 aa, Homo Sapiens
KLVEAIRTNY

SEQ ID NO: 75684 - protein, 10 aa, Homo Sapiens
KLVSEKLASY

SEQ ID NO: 75685 - protein, 10 aa, Homo Sapiens
KLYDVVDVKY

SEQ ID NO: 75686 - protein, 10 aa, Homo Sapiens
KLYQDTHQEY

SEQ ID NO: 75687 - protein, 10 aa, Homo Sapiens
KLYQFNPAFF

SEQ ID NO: 75688 - protein, 10 aa, Homo Sapiens
KLYRPGSVAY

SEQ ID NO: 75689 - protein, 10 aa, Homo Sapiens
KLYSPSSQQY

SEQ ID NO: 75690 - protein, 10 aa, Homo Sapiens
KMFNALIHRY

SEQ ID NO: 75691 - protein, 10 aa, Homo Sapiens
KMLPDKDCRY

SEQ ID NO: 75692 - protein, 10 aa, Homo Sapiens
KMPEVRQSSF

SEQ ID NO: 75693 - protein, 10 aa, Homo Sapiens
KMRGGSILSH

SEQ ID NO: 75694 - protein, 10 aa, Homo Sapiens
KQAPPQKVSF

SEQ ID NO: 75695 - protein, 10 aa, Homo Sapiens
KQFDAGTVNY

SEQ ID NO: 75696 - protein, 10 aa, Homo Sapiens
KQFEKQVELY

SEQ ID NO: 75697 - protein, 10 aa, Homo Sapiens
KQFQKVITEY

SEQ ID NO: 75698 - protein, 10 aa, Homo Sapiens
KQFRPPMGGY

SEQ ID NO: 75699 - protein, 10 aa, Homo Sapiens
KQFSKRYLKY

SEQ ID NO: 75700 - protein, 10 aa, Homo Sapiens
KQHNHLERAF

SEQ ID NO: 75701 - protein, 10 aa, Homo Sapiens
KQIANSQDGY

SEQ ID NO: 75702 - protein, 10 aa, Homo Sapiens
KQIDPVLQVY

SEQ ID NO: 75703 - protein, 10 aa, Homo Sapiens
KQIDRQLTAY

SEQ ID NO: 75704 - protein, 10 aa, Homo Sapiens
KQIEERASHY

SEQ ID NO: 75705 - protein, 10 aa, Homo Sapiens
KQIEERMLSH

SEQ ID NO: 75706 - protein, 10 aa, Homo Sapiens
KQIEGTGISM

SEQ ID NO: 75707 - protein, 10 aa, Homo Sapiens
KQIIVDPLSF

SEQ ID NO: 75708 - protein, 10 aa, Homo Sapiens
KQIKPDMETY

SEQ ID NO: 75709 - protein, 10 aa, Homo Sapiens
KQILTEGERY

SEQ ID NO: 75710 - protein, 10 aa, Homo Sapiens
KQISVGFIGY

SEQ ID NO: 75711 - protein, 10 aa, Homo Sapiens
KQIVEILTAY

SEQ ID NO: 75712 - protein, 10 aa, Homo Sapiens
KQIYTAEEKY

SEQ ID NO: 75713 - protein, 10 aa, Homo Sapiens
KQKDIVSIHY

SEQ ID NO: 75714 - protein, 10 aa, Homo Sapiens
KQKGDRVVLF

SEQ ID NO: 75715 - protein, 10 aa, Homo Sapiens
KQKVTSKIDY

SEQ ID NO: 75716 - protein, 10 aa, Homo Sapiens
KQLQKDKQVY

SEQ ID NO: 75717 - protein, 10 aa, Homo Sapiens
KQLVAEQVTY

SEQ ID NO: 75718 - protein, 10 aa, Homo Sapiens
KQMEDGHTLF

SEQ ID NO: 75719 - protein, 10 aa, Homo Sapiens
KQMENDIQLY

SEQ ID NO: 75720 - protein, 10 aa, Homo Sapiens
KQMTFEAQAF

SEQ ID NO: 75721 - protein, 10 aa, Homo Sapiens
KQNPKDIHTL

SEQ ID NO: 75722 - protein, 10 aa, Homo Sapiens
KQNPLLAEAY

SEQ ID NO: 75723 - protein, 10 aa, Homo Sapiens
KQQHFDVQQY

SEQ ID NO: 75724 - protein, 10 aa, Homo Sapiens
KQQNQYQASY

SEQ ID NO: 75725 - protein, 10 aa, Homo Sapiens
KQRDVDFKAF

SEQ ID NO: 75726 - protein, 10 aa, Homo Sapiens
KQRPTKLKSL

SEQ ID NO: 75727 - protein, 10 aa, Homo Sapiens
KQVMEGRVTF

SEQ ID NO: 75728 - protein, 10 aa, Homo Sapiens
KQYERSIVDY

SEQ ID NO: 75729 - protein, 10 aa, Homo Sapiens
KQYEVEIQTY

SEQ ID NO: 75730 - protein, 10 aa, Homo Sapiens
KQYISAVQMY

SEQ ID NO: 75731 - protein, 10 aa, Homo Sapiens
KQYSPLLAAF

SEQ ID NO: 75732 - protein, 10 aa, Homo Sapiens
KQYYALEVSY

SEQ ID NO: 75733 - protein, 10 aa, Homo Sapiens
KSFSESGINY

SEQ ID NO: 75734 - protein, 10 aa, Homo Sapiens
KVADWTGATY

SEQ ID NO: 75735 - protein, 10 aa, Homo Sapiens
KVFDGIPPPY

SEQ ID NO: 75736 - protein, 10 aa, Homo Sapiens
KVFGPTIVAH

SEQ ID NO: 75737 - protein, 10 aa, Homo Sapiens
KVFPEDMAKY

SEQ ID NO: 75738 - protein, 10 aa, Homo Sapiens
KVNTPTTTVY

SEQ ID NO: 75739 - protein, 10 aa, Homo Sapiens
KVQKEGKISY

SEQ ID NO: 75740 - protein, 10 aa, Homo Sapiens
KVSEVSSTCY

SEQ ID NO: 75741 - protein, 10 aa, Homo Sapiens
LIFDNKHTNY

SEQ ID NO: 75742 - protein, 10 aa, Homo Sapiens
LIFPDRATLY

SEQ ID NO: 75743 - protein, 10 aa, Homo Sapiens
LLAGQATTAY

SEQ ID NO: 75744 - protein, 10 aa, Homo Sapiens
LLHGNPGSTY

SEQ ID NO: 75745 - protein, 10 aa, Homo Sapiens
LLHQTGLSLY

SEQ ID NO: 75746 - protein, 10 aa, Homo Sapiens
LLIAGQINTY

SEQ ID NO: 75747 - protein, 10 aa, Homo Sapiens
LLIPGLATAY

SEQ ID NO: 75748 - protein, 10 aa, Homo Sapiens
LLKDGKTQDY

SEQ ID NO: 75749 - protein, 10 aa, Homo Sapiens
LLKPGGVLTY

SEQ ID NO: 75750 - protein, 10 aa, Homo Sapiens
LLKPNTSVQF

SEQ ID NO: 75751 - protein, 10 aa, Homo Sapiens
LLNGQVREEY

SEQ ID NO: 75752 - protein, 10 aa, Homo Sapiens
LLYPYEQAQY

SEQ ID NO: 75753 - protein, 10 aa, Homo Sapiens
LMIDVTKSYY

SEQ ID NO: 75754 - protein, 10 aa, Homo Sapiens
LMKAIDFEYY

SEQ ID NO: 75755 - protein, 10 aa, Homo Sapiens
LMPEFQFGTY

SEQ ID NO: 75756 - protein, 10 aa, Homo Sapiens
LMPQFSTIEY

SEQ ID NO: 75757 - protein, 10 aa, Homo Sapiens
LQFNPKFMTF

SEQ ID NO: 75758 - protein, 10 aa, Homo Sapiens
LQHDNIIAYY

SEQ ID NO: 75759 - protein, 10 aa, Homo Sapiens
LQHLQLFTEY

SEQ ID NO: 75760 - protein, 10 aa, Homo Sapiens
LQKTGHRVTY

SEQ ID NO: 75761 - protein, 10 aa, Homo Sapiens
LQLPARNLTY

SEQ ID NO: 75762 - protein, 10 aa, Homo Sapiens
LQNADPLKVY

SEQ ID NO: 75763 - protein, 10 aa, Homo Sapiens
LQNHENESVY

SEQ ID NO: 75764 - protein, 10 aa, Homo Sapiens
LQNIAEKGSY

SEQ ID NO: 75765 - protein, 10 aa, Homo Sapiens
LQQEGLLSRY

SEQ ID NO: 75766 - protein, 10 aa, Homo Sapiens
LQQGHLNQAF

SEQ ID NO: 75767 - protein, 10 aa, Homo Sapiens
LQQRHQLESY

SEQ ID NO: 75768 - protein, 10 aa, Homo Sapiens
LQREIQEGAY

SEQ ID NO: 75769 - protein, 10 aa, Homo Sapiens
LQRVFPHAEF

SEQ ID NO: 75770 - protein, 10 aa, Homo Sapiens
LQRVPSYDSF

SEQ ID NO: 75771 - protein, 10 aa, Homo Sapiens
LQSQVGTKTY

SEQ ID NO: 75772 - protein, 10 aa, Homo Sapiens
LQVEGHSNVY

SEQ ID NO: 75773 - protein, 10 aa, Homo Sapiens
LSKPVPESEF

SEQ ID NO: 75774 - protein, 10 aa, Homo Sapiens
LVFKEDGQEY

SEQ ID NO: 75775 - protein, 10 aa, Homo Sapiens
LVYRADTQTY

SEQ ID NO: 75776 - protein, 10 aa, Homo Sapiens
MIIGPPRTNY

SEQ ID NO: 75777 - protein, 10 aa, Homo Sapiens
MLAKTGVHHY

SEQ ID NO: 75778 - protein, 10 aa, Homo Sapiens
MQHSLAGQTY

SEQ ID NO: 75779 - protein, 10 aa, Homo Sapiens
MQKAFNSSSF

SEQ ID NO: 75780 - protein, 10 aa, Homo Sapiens
MQKPFEDASF

SEQ ID NO: 75781 - protein, 10 aa, Homo Sapiens
MQYPGRSLVF

SEQ ID NO: 75782 - protein, 10 aa, Homo Sapiens
QAGPATGQAY

SEQ ID NO: 75783 - protein, 10 aa, Homo Sapiens
QMPPWNQTEF

SEQ ID NO: 75784 - protein, 10 aa, Homo Sapiens
QQHDFTSQIF

SEQ ID NO: 75785 - protein, 10 aa, Homo Sapiens
QQHPQAAASY

SEQ ID NO: 75786 - protein, 10 aa, Homo Sapiens
QQHSPQQIAY

SEQ ID NO: 75787 - protein, 10 aa, Homo Sapiens
QQIAPDVDTY

SEQ ID NO: 75788 - protein, 10 aa, Homo Sapiens
QQIEIERSLY

SEQ ID NO: 75789 - protein, 10 aa, Homo Sapiens
QQIGKVVQVY

SEQ ID NO: 75790 - protein, 10 aa, Homo Sapiens
QQIQEKVATF

SEQ ID NO: 75791 - protein, 10 aa, Homo Sapiens
QQMNSFLSRY

SEQ ID NO: 75792 - protein, 10 aa, Homo Sapiens
QQMWISKQEY

SEQ ID NO: 75793 - protein, 10 aa, Homo Sapiens
QQNKELENKY

SEQ ID NO: 75794 - protein, 10 aa, Homo Sapiens
QQNVSFVTGY

SEQ ID NO: 75795 - protein, 10 aa, Homo Sapiens
QQQQPALVNY

SEQ ID NO: 75796 - protein, 10 aa, Homo Sapiens
QQVQQVAAEY

SEQ ID NO: 75797 - protein, 10 aa, Homo Sapiens
RAAQLEPITY

SEQ ID NO: 75798 - protein, 10 aa, Homo Sapiens
RAATFIQSTF

SEQ ID NO: 75799 - protein, 10 aa, Homo Sapiens
RAFALVSQAY

SEQ ID NO: 75800 - protein, 10 aa, Homo Sapiens
RAFIITGQTY

SEQ ID NO: 75801 - protein, 10 aa, Homo Sapiens
RAFKEVGIEF

SEQ ID NO: 75802 - protein, 10 aa, Homo Sapiens
RAFPYGNVAF

SEQ ID NO: 75803 - protein, 10 aa, Homo Sapiens
RANPQVGVAF

SEQ ID NO: 75804 - protein, 10 aa, Homo Sapiens
RAYPHNLMTF

SEQ ID NO: 75805 - protein, 10 aa, Homo Sapiens
RAYPVGGLCY

SEQ ID NO: 75806 - protein, 10 aa, Homo Sapiens
RIFDRAVAAY

SEQ ID NO: 75807 - protein, 10 aa, Homo Sapiens
RIHNEDNSQF

SEQ ID NO: 75808 - protein, 10 aa, Homo Sapiens
RIIAEPGRYY

SEQ ID NO: 75809 - protein, 10 aa, Homo Sapiens
RIITKGTQTY

SEQ ID NO: 75810 - protein, 10 aa, Homo Sapiens
RILDGKRIQY

SEQ ID NO: 75811 - protein, 10 aa, Homo Sapiens
RILPKCRTSY

SEQ ID NO: 75812 - protein, 10 aa, Homo Sapiens
RIMDSSQNAY

SEQ ID NO: 75813 - protein, 10 aa, Homo Sapiens
RINNEDNSQF

SEQ ID NO: 75814 - protein, 10 aa, Homo Sapiens
RIQESSQVLY

SEQ ID NO: 75815 - protein, 10 aa, Homo Sapiens
RIQGVPKVTY

SEQ ID NO: 75816 - protein, 10 aa, Homo Sapiens
RIYNDDKNTY

SEQ ID NO: 75817 - protein, 10 aa, Homo Sapiens
RIYPYAAISY

SEQ ID NO: 75818 - protein, 10 aa, Homo Sapiens
RLAEAQSNSF

SEQ ID NO: 75819 - protein, 10 aa, Homo Sapiens
RLAHEVGWKY

SEQ ID NO: 75820 - protein, 10 aa, Homo Sapiens
RLFKQEGTCY

SEQ ID NO: 75821 - protein, 10 aa, Homo Sapiens
RLFNLVHQAY

SEQ ID NO: 75822 - protein, 10 aa, Homo Sapiens
RLFPRPVVAF

SEQ ID NO: 75823 - protein, 10 aa, Homo Sapiens
RLFSHEGSSF

SEQ ID NO: 75824 - protein, 10 aa, Homo Sapiens
RLFTSAEETF

SEQ ID NO: 75825 - protein, 10 aa, Homo Sapiens
RLFYFSNEKY

SEQ ID NO: 75826 - protein, 10 aa, Homo Sapiens
RLIDKTKVTY

SEQ ID NO: 75827 - protein, 10 aa, Homo Sapiens
RLISGVVQSY

SEQ ID NO: 75828 - protein, 10 aa, Homo Sapiens
RLKEEGNEQF

SEQ ID NO: 75829 - protein, 10 aa, Homo Sapiens
RLKPDFIDGY

SEQ ID NO: 75830 - protein, 10 aa, Homo Sapiens
RLKPTRKFAY

SEQ ID NO: 75831 - protein, 10 aa, Homo Sapiens
RLMAEDEEGY

SEQ ID NO: 75832 - protein, 10 aa, Homo Sapiens
RLPETELGEY

SEQ ID NO: 75833 - protein, 10 aa, Homo Sapiens
RLPSETIQTY

SEQ ID NO: 75834 - protein, 10 aa, Homo Sapiens
RLQDQGLILY

SEQ ID NO: 75835 - protein, 10 aa, Homo Sapiens
RLQGISFGMY

SEQ ID NO: 75836 - protein, 10 aa, Homo Sapiens
RLQPLTQAAY

SEQ ID NO: 75837 - protein, 10 aa, Homo Sapiens
RLQPYNGVAL

SEQ ID NO: 75838 - protein, 10 aa, Homo Sapiens
RLRDENGRPY

SEQ ID NO: 75839 - protein, 10 aa, Homo Sapiens
RLRISPDRVY

SEQ ID NO: 75840 - protein, 10 aa, Homo Sapiens
RLRVSSEIRY

SEQ ID NO: 75841 - protein, 10 aa, Homo Sapiens
RLSTPSASTY

SEQ ID NO: 75842 - protein, 10 aa, Homo Sapiens
RLVGLKKSFY

SEQ ID NO: 75843 - protein, 10 aa, Homo Sapiens
RLVPGAYLEY

SEQ ID NO: 75844 - protein, 10 aa, Homo Sapiens
RLYGKDYNVY

SEQ ID NO: 75845 - protein, 10 aa, Homo Sapiens
RLYGPSSVSF

SEQ ID NO: 75846 - protein, 10 aa, Homo Sapiens
RLYHEADKTY

SEQ ID NO: 75847 - protein, 10 aa, Homo Sapiens
RLYQLDKSTF

SEQ ID NO: 75848 - protein, 10 aa, Homo Sapiens
RLYTQGYISY

SEQ ID NO: 75849 - protein, 10 aa, Homo Sapiens
RMFNGEKINY

SEQ ID NO: 75850 - protein, 10 aa, Homo Sapiens
RMHPHLSKGY

SEQ ID NO: 75851 - protein, 10 aa, Homo Sapiens
RMIAILTENY

SEQ ID NO: 75852 - protein, 10 aa, Homo Sapiens
RMIDFAHSTF

SEQ ID NO: 75853 - protein, 10 aa, Homo Sapiens
RMKETQKSIY

SEQ ID NO: 75854 - protein, 10 aa, Homo Sapiens
RMKKEASVKF

SEQ ID NO: 75855 - protein, 10 aa, Homo Sapiens
RMKTGNKIRY

SEQ ID NO: 75856 - protein, 10 aa, Homo Sapiens
RMMNAIKESY

SEQ ID NO: 75857 - protein, 10 aa, Homo Sapiens
RMSDVVKGVY

SEQ ID NO: 75858 - protein, 10 aa, Homo Sapiens
RMSPATTGTF

SEQ ID NO: 75859 - protein, 10 aa, Homo Sapiens
RMSPFPLTSM

SEQ ID NO: 75860 - protein, 10 aa, Homo Sapiens
RMVSEAGTGF

SEQ ID NO: 75861 - protein, 10 aa, Homo Sapiens
RQAFFLHTTY

SEQ ID NO: 75862 - protein, 10 aa, Homo Sapiens
RQAGLSYIRY

SEQ ID NO: 75863 - protein, 10 aa, Homo Sapiens
RQALPQVRLY

SEQ ID NO: 75864 - protein, 10 aa, Homo Sapiens
RQAPQPQSSL

SEQ ID NO: 75865 - protein, 10 aa, Homo Sapiens
RQAPVLLQTY

SEQ ID NO: 75866 - protein, 10 aa, Homo Sapiens
RQATAASSVM

SEQ ID NO: 75867 - protein, 10 aa, Homo Sapiens
RQATSTASTF

SEQ ID NO: 75868 - protein, 10 aa, Homo Sapiens
RQEDDRGITY

SEQ ID NO: 75869 - protein, 10 aa, Homo Sapiens
RQFDPQPLAM

SEQ ID NO: 75870 - protein, 10 aa, Homo Sapiens
RQFSEQQPAF

SEQ ID NO: 75871 - protein, 10 aa, Homo Sapiens
RQFWFQGNRY

SEQ ID NO: 75872 - protein, 10 aa, Homo Sapiens
RQHPHCYVQY

SEQ ID NO: 75873 - protein, 10 aa, Homo Sapiens
RQHSIYKNGY

SEQ ID NO: 75874 - protein, 10 aa, Homo Sapiens
RQICPSLAGF

SEQ ID NO: 75875 - protein, 10 aa, Homo Sapiens
RQIDATFVRF

SEQ ID NO: 75876 - protein, 10 aa, Homo Sapiens
RQIDLVDNYF

SEQ ID NO: 75877 - protein, 10 aa, Homo Sapiens
RQIEETLAHF

SEQ ID NO: 75878 - protein, 10 aa, Homo Sapiens
RQIEKDITSF

SEQ ID NO: 75879 - protein, 10 aa, Homo Sapiens
RQIEPANREF

SEQ ID NO: 75880 - protein, 10 aa, Homo Sapiens
RQIHANHETL

SEQ ID NO: 75881 - protein, 10 aa, Homo Sapiens
RQIIGPFQRF

SEQ ID NO: 75882 - protein, 10 aa, Homo Sapiens
RQIPQATASM

SEQ ID NO: 75883 - protein, 10 aa, Homo Sapiens
RQIPYTMMKF

SEQ ID NO: 75884 - protein, 10 aa, Homo Sapiens
RQITDKAREF

SEQ ID NO: 75885 - protein, 10 aa, Homo Sapiens
RQIYGPECTF

SEQ ID NO: 75886 - protein, 10 aa, Homo Sapiens
RQKPVDLLKY

SEQ ID NO: 75887 - protein, 10 aa, Homo Sapiens
RQKQGVVLKY

SEQ ID NO: 75888 - protein, 10 aa, Homo Sapiens
RQKVGTSSRY

SEQ ID NO: 75889 - protein, 10 aa, Homo Sapiens
RQLDNAVSAF

SEQ ID NO: 75890 - protein, 10 aa, Homo Sapiens
RQLEDILSTY

SEQ ID NO: 75891 - protein, 10 aa, Homo Sapiens
RQLEEEGITF

SEQ ID NO: 75892 - protein, 10 aa, Homo Sapiens
RQLGIIVSDF

SEQ ID NO: 75893 - protein, 10 aa, Homo Sapiens
RQLGLEHTRY

SEQ ID NO: 75894 - protein, 10 aa, Homo Sapiens
RQLPEPLISF

SEQ ID NO: 75895 - protein, 10 aa, Homo Sapiens
RQNALGHVRY

SEQ ID NO: 75896 - protein, 10 aa, Homo Sapiens
RQNEHCLTNF

SEQ ID NO: 75897 - protein, 10 aa, Homo Sapiens
RQNPHHVHEW

SEQ ID NO: 75898 - protein, 10 aa, Homo Sapiens
RQNVGTLESF

SEQ ID NO: 75899 - protein, 10 aa, Homo Sapiens
RQPDNAKALY

SEQ ID NO: 75900 - protein, 10 aa, Homo Sapiens
RQPDSPTALY

SEQ ID NO: 75901 - protein, 10 aa, Homo Sapiens
RQPLALNVAY

SEQ ID NO: 75902 - protein, 10 aa, Homo Sapiens
RQQPMEGATY

SEQ ID NO: 75903 - protein, 10 aa, Homo Sapiens
RQQPPSTTTF

SEQ ID NO: 75904 - protein, 10 aa, Homo Sapiens
RQRDSKIDSL

SEQ ID NO: 75905 - protein, 10 aa, Homo Sapiens
RQRDYKLAAL

SEQ ID NO: 75906 - protein, 10 aa, Homo Sapiens
RQRQEVCQSY

SEQ ID NO: 75907 - protein, 10 aa, Homo Sapiens
RQSVQEHCTF

SEQ ID NO: 75908 - protein, 10 aa, Homo Sapiens
RQVDLSVHAY

SEQ ID NO: 75909 - protein, 10 aa, Homo Sapiens
RQVEDLQATF

SEQ ID NO: 75910 - protein, 10 aa, Homo Sapiens
RQVSHKHIVY

SEQ ID NO: 75911 - protein, 10 aa, Homo Sapiens
RQYDKFLTHF

SEQ ID NO: 75912 - protein, 10 aa, Homo Sapiens
RQYEGHVNEY

SEQ ID NO: 75913 - protein, 10 aa, Homo Sapiens
RQYHLQQLFY

SEQ ID NO: 75914 - protein, 10 aa, Homo Sapiens
RQYNRDWQSY

SEQ ID NO: 75915 - protein, 10 aa, Homo Sapiens
RQYPDLETKY

SEQ ID NO: 75916 - protein, 10 aa, Homo Sapiens
RQYPWGTVQV

SEQ ID NO: 75917 - protein, 10 aa, Homo Sapiens
RQYPWGVAEV

SEQ ID NO: 75918 - protein, 10 aa, Homo Sapiens
RQYPWGVVQV

SEQ ID NO: 75919 - protein, 10 aa, Homo Sapiens
RSFAGNLNTY

SEQ ID NO: 75920 - protein, 10 aa, Homo Sapiens
RSKNPSKESF

SEQ ID NO: 75921 - protein, 10 aa, Homo Sapiens
RTFDETVSTY

SEQ ID NO: 75922 - protein, 10 aa, Homo Sapiens
RTFDLTVVSY

SEQ ID NO: 75923 - protein, 10 aa, Homo Sapiens
RVADFGSATF

SEQ ID NO: 75924 - protein, 10 aa, Homo Sapiens
RVADNAQQQY

SEQ ID NO: 75925 - protein, 10 aa, Homo Sapiens
RVAELDKITY

SEQ ID NO: 75926 - protein, 10 aa, Homo Sapiens
RVFDHKQGTY

SEQ ID NO: 75927 - protein, 10 aa, Homo Sapiens
RVFDKDGNGY

SEQ ID NO: 75928 - protein, 10 aa, Homo Sapiens
RVFKSGETTY

SEQ ID NO: 75929 - protein, 10 aa, Homo Sapiens
RVFPDKGYSF

SEQ ID NO: 75930 - protein, 10 aa, Homo Sapiens
RVFPEKGYSF

SEQ ID NO: 75931 - protein, 10 aa, Homo Sapiens
RVFQGAPKGY

SEQ ID NO: 75932 - protein, 10 aa, Homo Sapiens
RVGPIEATSF

SEQ ID NO: 75933 - protein, 10 aa, Homo Sapiens
RVIEEAKTAF

SEQ ID NO: 75934 - protein, 10 aa, Homo Sapiens
RVITISKSEY

SEQ ID NO: 75935 - protein, 10 aa, Homo Sapiens
RVIVGGSSEY

SEQ ID NO: 75936 - protein, 10 aa, Homo Sapiens
RVKGPGISKF

SEQ ID NO: 75937 - protein, 10 aa, Homo Sapiens
RVPECQVTTY

SEQ ID NO: 75938 - protein, 10 aa, Homo Sapiens
RVREAENVAF

SEQ ID NO: 75939 - protein, 10 aa, Homo Sapiens
RVSNFKPGVY

SEQ ID NO: 75940 - protein, 10 aa, Homo Sapiens
RVSSQQTVSY

SEQ ID NO: 75941 - protein, 10 aa, Homo Sapiens
RVVEGNHTVY

SEQ ID NO: 75942 - protein, 10 aa, Homo Sapiens
RVVEGNHVVY

SEQ ID NO: 75943 - protein, 10 aa, Homo Sapiens
RVYPERSTSY

SEQ ID NO: 75944 - protein, 10 aa, Homo Sapiens
SEPSFITESY

SEQ ID NO: 75945 - protein, 10 aa, Homo Sapiens
SGSQRISSIY

SEQ ID NO: 75946 - protein, 10 aa, Homo Sapiens
SINPDEAVAY

SEQ ID NO: 75947 - protein, 10 aa, Homo Sapiens
SIRPDNMSEY

SEQ ID NO: 75948 - protein, 10 aa, Homo Sapiens
SIYRGPSHTY

SEQ ID NO: 75949 - protein, 10 aa, Homo Sapiens
SLAKIGFHLY

SEQ ID NO: 75950 - protein, 10 aa, Homo Sapiens
SLARTSSAEY

SEQ ID NO: 75951 - protein, 10 aa, Homo Sapiens
SLFGSSRVQY

SEQ ID NO: 75952 - protein, 10 aa, Homo Sapiens
SLFHGGKSHY

SEQ ID NO: 75953 - protein, 10 aa, Homo Sapiens
SLHDNKYIRY

SEQ ID NO: 75954 - protein, 10 aa, Homo Sapiens
SLHPHERLSY

SEQ ID NO: 75955 - protein, 10 aa, Homo Sapiens
SLIKETTTGY

SEQ ID NO: 75956 - protein, 10 aa, Homo Sapiens
SLNSKVVSQY

SEQ ID NO: 75957 - protein, 10 aa, Homo Sapiens
SLPNFKQNEF

SEQ ID NO: 75958 - protein, 10 aa, Homo Sapiens
SLPPGVHISY

SEQ ID NO: 75959 - protein, 10 aa, Homo Sapiens
SLPSHLNISY

SEQ ID NO: 75960 - protein, 10 aa, Homo Sapiens
SMFTEKTTTY

SEQ ID NO: 75961 - protein, 10 aa, Homo Sapiens
SQATPNQQTY

SEQ ID NO: 75962 - protein, 10 aa, Homo Sapiens
SQCGKAFTHY

SEQ ID NO: 75963 - protein, 10 aa, Homo Sapiens
SQFHGLITHY

SEQ ID NO: 75964 - protein, 10 aa, Homo Sapiens
SQFLQAAERY

SEQ ID NO: 75965 - protein, 10 aa, Homo Sapiens
SQFPTQPGQY

SEQ ID NO: 75966 - protein, 10 aa, Homo Sapiens
SQFTDGQQLY

SEQ ID NO: 75967 - protein, 10 aa, Homo Sapiens
SQGPASHSRF

SEQ ID NO: 75968 - protein, 10 aa, Homo Sapiens
SQHAKYTCSF

SEQ ID NO: 75969 - protein, 10 aa, Homo Sapiens
SQHDEKMTTF

SEQ ID NO: 75970 - protein, 10 aa, Homo Sapiens
SQHGLSKVVY

SEQ ID NO: 75971 - protein, 10 aa, Homo Sapiens
SQHGPSVCSF

SEQ ID NO: 75972 - protein, 10 aa, Homo Sapiens
SQHIGTGNLY

SEQ ID NO: 75973 - protein, 10 aa, Homo Sapiens
SQIAKDVCTF

SEQ ID NO: 75974 - protein, 10 aa, Homo Sapiens
SQIFIGPTYY

SEQ ID NO: 75975 - protein, 10 aa, Homo Sapiens
SQIPGPTAAY

SEQ ID NO: 75976 - protein, 10 aa, Homo Sapiens
SQISEALSRY

SEQ ID NO: 75977 - protein, 10 aa, Homo Sapiens
SQISILKELY

SEQ ID NO: 75978 - protein, 10 aa, Homo Sapiens
SQKVIAHSEY

SEQ ID NO: 75979 - protein, 10 aa, Homo Sapiens
SQLEHLQSKY

SEQ ID NO: 75980 - protein, 10 aa, Homo Sapiens
SQNRPPPNAY

SEQ ID NO: 75981 - protein, 10 aa, Homo Sapiens
SQPQSSTGGY

SEQ ID NO: 75982 - protein, 10 aa, Homo Sapiens
SQQPASGVAY

SEQ ID NO: 75983 - protein, 10 aa, Homo Sapiens
SQRDPPHNNF

SEQ ID NO: 75984 - protein, 10 aa, Homo Sapiens
SQRNAVDLVY

SEQ ID NO: 75985 - protein, 10 aa, Homo Sapiens
SQRPGAHLTV

SEQ ID NO: 75986 - protein, 10 aa, Homo Sapiens
SQRPPTRETF

SEQ ID NO: 75987 - protein, 10 aa, Homo Sapiens
SQRQAKIQRY

SEQ ID NO: 75988 - protein, 10 aa, Homo Sapiens
SQRYQVGVHY

SEQ ID NO: 75989 - protein, 10 aa, Homo Sapiens
SQSPAYNSQY

SEQ ID NO: 75990 - protein, 10 aa, Homo Sapiens
SQTPNNTVTY

SEQ ID NO: 75991 - protein, 10 aa, Homo Sapiens
SQVSHTHLAF

SEQ ID NO: 75992 - protein, 10 aa, Homo Sapiens
SQVVFSGKAY

SEQ ID NO: 75993 - protein, 10 aa, Homo Sapiens
SQYGELIEKY

SEQ ID NO: 75994 - protein, 10 aa, Homo Sapiens
SQYNIRGVTY

SEQ ID NO: 75995 - protein, 10 aa, Homo Sapiens
SQYPFPVTLY

SEQ ID NO: 75996 - protein, 10 aa, Homo Sapiens
SQYPGGQPTY

SEQ ID NO: 75997 - protein, 10 aa, Homo Sapiens
SQYPNQPTRF

SEQ ID NO: 75998 - protein, 10 aa, Homo Sapiens
SQYSQQSSSY

SEQ ID NO: 75999 - protein, 10 aa, Homo Sapiens
SSKPWPDATY

SEQ ID NO: 76000 - protein, 10 aa, Homo Sapiens
SSQFGGGSQY

SEQ ID NO: 76001 - protein, 10 aa, Homo Sapiens
SSYAHKASSI

SEQ ID NO: 76002 - protein, 10 aa, Homo Sapiens
SVAKTNTVSY

SEQ ID NO: 76003 - protein, 10 aa, Homo Sapiens
SVFPGHPVQF

SEQ ID NO: 76004 - protein, 10 aa, Homo Sapiens
SVIRELKEQY

SEQ ID NO: 76005 - protein, 10 aa, Homo Sapiens
SVKQPDLVSY

SEQ ID NO: 76006 - protein, 10 aa, Homo Sapiens
SVNGERLGTY

SEQ ID NO: 76007 - protein, 10 aa, Homo Sapiens
SVSGAGCTTY

SEQ ID NO: 76008 - protein, 10 aa, Homo Sapiens
SYGGGSGGGF

SEQ ID NO: 76009 - protein, 10 aa, Homo Sapiens
TIHGAAGTVY

SEQ ID NO: 76010 - protein, 10 aa, Homo Sapiens
TKTGMLSRAT

SEQ ID NO: 76011 - protein, 10 aa, Homo Sapiens
TLARNCFQLY

SEQ ID NO: 76012 - protein, 10 aa, Homo Sapiens
TLFKEDFINY

SEQ ID NO: 76013 - protein, 10 aa, Homo Sapiens
TLKSGDGITF

SEQ ID NO: 76014 - protein, 10 aa, Homo Sapiens
TLNQKEAVAY

SEQ ID NO: 76015 - protein, 10 aa, Homo Sapiens
TLNREGTETF

SEQ ID NO: 76016 - protein, 10 aa, Homo Sapiens
TLPGHIQAVY

SEQ ID NO: 76017 - protein, 10 aa, Homo Sapiens
TLQRATGISF

SEQ ID NO: 76018 - protein, 10 aa, Homo Sapiens
TLRSEGFDTY

SEQ ID NO: 76019 - protein, 10 aa, Homo Sapiens
TLVHADLSEY

SEQ ID NO: 76020 - protein, 10 aa, Homo Sapiens
TMQSATGIQY

SEQ ID NO: 76021 - protein, 10 aa, Homo Sapiens
TQAQIKAAYY

SEQ ID NO: 76022 - protein, 10 aa, Homo Sapiens
TQARHALCQF

SEQ ID NO: 76023 - protein, 10 aa, Homo Sapiens
TQIGGERYNF

SEQ ID NO: 76024 - protein, 10 aa, Homo Sapiens
TQKAAVETSF

SEQ ID NO: 76025 - protein, 10 aa, Homo Sapiens
TQKGGTISCY

SEQ ID NO: 76026 - protein, 10 aa, Homo Sapiens
TQKGPENLHY

SEQ ID NO: 76027 - protein, 10 aa, Homo Sapiens
TQKIPDQDFY

SEQ ID NO: 76028 - protein, 10 aa, Homo Sapiens
TQNNAMKISF

SEQ ID NO: 76029 - protein, 10 aa, Homo Sapiens
TQNPYHQQAL

SEQ ID NO: 76030 - protein, 10 aa, Homo Sapiens
TQPDLPATTY

SEQ ID NO: 76031 - protein, 10 aa, Homo Sapiens
TQPDWIAICY

SEQ ID NO: 76032 - protein, 10 aa, Homo Sapiens
TQQGAALQNY

SEQ ID NO: 76033 - protein, 10 aa, Homo Sapiens
TQQIPSKVLF

SEQ ID NO: 76034 - protein, 10 aa, Homo Sapiens
TQQPFDVSAF

SEQ ID NO: 76035 - protein, 10 aa, Homo Sapiens
TQRPIALELY

SEQ ID NO: 76036 - protein, 10 aa, Homo Sapiens
TQRSHLTQEY

SEQ ID NO: 76037 - protein, 10 aa, Homo Sapiens
TQSPVSSEEY

SEQ ID NO: 76038 - protein, 10 aa, Homo Sapiens
TSQYQGVVVY

SEQ ID NO: 76039 - protein, 10 aa, Homo Sapiens
TTKSADRVTY

SEQ ID NO: 76040 - protein, 10 aa, Homo Sapiens
TVEKGDHVAY

SEQ ID NO: 76041 - protein, 10 aa, Homo Sapiens
TVIPNSHVYY

SEQ ID NO: 76042 - protein, 10 aa, Homo Sapiens
TVKGVSLSSY

SEQ ID NO: 76043 - protein, 10 aa, Homo Sapiens
VASQKGMSVY

SEQ ID NO: 76044 - protein, 10 aa, Homo Sapiens
VINPKDNNQF

SEQ ID NO: 76045 - protein, 10 aa, Homo Sapiens
VINSKASLTY

SEQ ID NO: 76046 - protein, 10 aa, Homo Sapiens
VIVPSSEITY

SEQ ID NO: 76047 - protein, 10 aa, Homo Sapiens
VLAPHLTRAY

SEQ ID NO: 76048 - protein, 10 aa, Homo Sapiens
VLHQDSGLGY

SEQ ID NO: 76049 - protein, 10 aa, Homo Sapiens
VLKADEGISF

SEQ ID NO: 76050 - protein, 10 aa, Homo Sapiens
VLKPGMVVTF

SEQ ID NO: 76051 - protein, 10 aa, Homo Sapiens
VLKTDEGIAY

SEQ ID NO: 76052 - protein, 10 aa, Homo Sapiens
VLNPLCQVDY

SEQ ID NO: 76053 - protein, 10 aa, Homo Sapiens
VLSAADKGNV

SEQ ID NO: 76054 - protein, 10 aa, Homo Sapiens
VLVQHNLVSY

SEQ ID NO: 76055 - protein, 10 aa, Homo Sapiens
VMFPGNSPSY

SEQ ID NO: 76056 - protein, 10 aa, Homo Sapiens
VMMIPSQISY

SEQ ID NO: 76057 - protein, 10 aa, Homo Sapiens
VQADVQKERY

SEQ ID NO: 76058 - protein, 10 aa, Homo Sapiens
VQAVHKNTTY

SEQ ID NO: 76059 - protein, 10 aa, Homo Sapiens
VQEGNVESAY

SEQ ID NO: 76060 - protein, 10 aa, Homo Sapiens
VQFDGTNSAF

SEQ ID NO: 76061 - protein, 10 aa, Homo Sapiens
VQFGANKNQY

SEQ ID NO: 76062 - protein, 10 aa, Homo Sapiens
VQFGANKSQY

SEQ ID NO: 76063 - protein, 10 aa, Homo Sapiens
VQFIGRESKY

SEQ ID NO: 76064 - protein, 10 aa, Homo Sapiens
VQFQGKKTKF

SEQ ID NO: 76065 - protein, 10 aa, Homo Sapiens
VQFVGREAKY

SEQ ID NO: 76066 - protein, 10 aa, Homo Sapiens
VQHGVEGLTY

SEQ ID NO: 76067 - protein, 10 aa, Homo Sapiens
VQIGQVHEEF

SEQ ID NO: 76068 - protein, 10 aa, Homo Sapiens
VQITEARCFY

SEQ ID NO: 76069 - protein, 10 aa, Homo Sapiens
VQIVSKKVSY

SEQ ID NO: 76070 - protein, 10 aa, Homo Sapiens
VQKEDISVVF

SEQ ID NO: 76071 - protein, 10 aa, Homo Sapiens
VQKGMPHKCY

SEQ ID NO: 76072 - protein, 10 aa, Homo Sapiens
VQKKDTGHIY

SEQ ID NO: 76073 - protein, 10 aa, Homo Sapiens
VQKNDVNVEF

SEQ ID NO: 76074 - protein, 10 aa, Homo Sapiens
VQKPDAANYY

SEQ ID NO: 76075 - protein, 10 aa, Homo Sapiens
VQPKHVKEAF

SEQ ID NO: 76076 - protein, 10 aa, Homo Sapiens
VQPTFTASQY

SEQ ID NO: 76077 - protein, 10 aa, Homo Sapiens
VQQKESGLKY

SEQ ID NO: 76078 - protein, 10 aa, Homo Sapiens
VQQPGQTNFY

SEQ ID NO: 76079 - protein, 10 aa, Homo Sapiens
VQRGGTPSAF

SEQ ID NO: 76080 - protein, 10 aa, Homo Sapiens
VQRIQESTCF

SEQ ID NO: 76081 - protein, 10 aa, Homo Sapiens
VQRLNESTSY

SEQ ID NO: 76082 - protein, 10 aa, Homo Sapiens
VQRLPVGAAF

SEQ ID NO: 76083 - protein, 10 aa, Homo Sapiens
VQSPNCNQRY

SEQ ID NO: 76084 - protein, 10 aa, Homo Sapiens
VQVDGKIGLF

SEQ ID NO: 76085 - protein, 10 aa, Homo Sapiens
VRDEESHEFV

SEQ ID NO: 76086 - protein, 10 aa, Homo Sapiens
VTAVAGLTSY

SEQ ID NO: 76087 - protein, 10 aa, Homo Sapiens
VTIKKDVDGA

SEQ ID NO: 76088 - protein, 10 aa, Homo Sapiens
VVCPVSDILY

SEQ ID NO: 76089 - protein, 10 aa, Homo Sapiens
VVGPSSVLTY

SEQ ID NO: 76090 - protein, 10 aa, Homo Sapiens
VVQGLLSETY

SEQ ID NO: 76091 - protein, 10 aa, Homo Sapiens
VVRDEESHEF

SEQ ID NO: 76092 - protein, 10 aa, Homo Sapiens
VVRDENSSVY

SEQ ID NO: 76093 - protein, 10 aa, Homo Sapiens
VVVAVGRALY

SEQ ID NO: 76094 - protein, 10 aa, Homo Sapiens
YAQDEHLITF

SEQ ID NO: 76095 - protein, 10 aa, Homo Sapiens
YDAEISQIHQ

SEQ ID NO: 76096 - protein, 10 aa, Homo Sapiens
YLFQGRQECY

SEQ ID NO: 76097 - protein, 10 aa, Homo Sapiens
YLMEEDEDAY

SEQ ID NO: 76098 - protein, 10 aa, Homo Sapiens
YLNEQGDRVY

SEQ ID NO: 76099 - protein, 10 aa, Homo Sapiens
YLPQHTIETY

SEQ ID NO: 76100 - protein, 10 aa, Homo Sapiens
YMIDPSGVSY

SEQ ID NO: 76101 - protein, 10 aa, Homo Sapiens
YQHDDGRVSY

SEQ ID NO: 76102 - protein, 10 aa, Homo Sapiens
YQIGDVFISH

SEQ ID NO: 76103 - protein, 10 aa, Homo Sapiens
YQKPIIQSEY

SEQ ID NO: 76104 - protein, 10 aa, Homo Sapiens
YQNNIKNDKY

SEQ ID NO: 76105 - protein, 10 aa, Homo Sapiens
YQPEQPNLVY

SEQ ID NO: 76106 - protein, 10 aa, Homo Sapiens
YQPEVHGVSY

SEQ ID NO: 76107 - protein, 10 aa, Homo Sapiens
YQPSPSPQSY

SEQ ID NO: 76108 - protein, 10 aa, Homo Sapiens
YQTIGNHASY

SEQ ID NO: 76109 - protein, 10 aa, Homo Sapiens
YQYSDQGIDY

SEQ ID NO: 76110 - protein, 10 aa, Homo Sapiens
YVHDDGRVSY

SEQ ID NO: 76111 - protein, 11 aa, Homo Sapiens
AAAAAAAGSPY

SEQ ID NO: 76112 - protein, 11 aa, Homo Sapiens
AEQNRKDAEAW

SEQ ID NO: 76113 - protein, 11 aa, Homo Sapiens
AEQRGELAIKD

SEQ ID NO: 76114 - protein, 11 aa, Homo Sapiens
AEVNADRITWL

SEQ ID NO: 76115 - protein, 11 aa, Homo Sapiens
AGGYFTSPGGY

SEQ ID NO: 76116 - protein, 11 aa, Homo Sapiens
AIKKPSGDDRY

SEQ ID NO: 76117 - protein, 11 aa, Homo Sapiens
ALAGLKTVSSY

SEQ ID NO: 76118 - protein, 11 aa, Homo Sapiens
ALISGGKDSCY

SEQ ID NO: 76119 - protein, 11 aa, Homo Sapiens
ALQNHENESVY

SEQ ID NO: 76120 - protein, 11 aa, Homo Sapiens
ALRPSTSRSLY

SEQ ID NO: 76121 - protein, 11 aa, Homo Sapiens
AMFDQSQIQEF

SEQ ID NO: 76122 - protein, 11 aa, Homo Sapiens
ANALGGKGAGF

SEQ ID NO: 76123 - protein, 11 aa, Homo Sapiens
AQAAPQTYAEY

SEQ ID NO: 76124 - protein, 11 aa, Homo Sapiens
AQAGHAIITNY

SEQ ID NO: 76125 - protein, 11 aa, Homo Sapiens
AQAQLRNLEAY

SEQ ID NO: 76126 - protein, 11 aa, Homo Sapiens
AQCSHAAVSAY

SEQ ID NO: 76127 - protein, 11 aa, Homo Sapiens
AQFGHTSIVAY

SEQ ID NO: 76128 - protein, 11 aa, Homo Sapiens
AQFPGACGLRY

SEQ ID NO: 76129 - protein, 11 aa, Homo Sapiens
AQHDAQEFMAF

SEQ ID NO: 76130 - protein, 11 aa, Homo Sapiens
AQHNTRMLATY

SEQ ID NO: 76131 - protein, 11 aa, Homo Sapiens
AQKFATDGEGY

SEQ ID NO: 76132 - protein, 11 aa, Homo Sapiens
AQKKPFTPVKY

SEQ ID NO: 76133 - protein, 11 aa, Homo Sapiens
AQKPGAPLQAF

SEQ ID NO: 76134 - protein, 11 aa, Homo Sapiens
AQKPSVPRSNF

SEQ ID NO: 76135 - protein, 11 aa, Homo Sapiens
AQLILKAISSY

SEQ ID NO: 76136 - protein, 11 aa, Homo Sapiens
AQLNRDMIVSF

SEQ ID NO: 76137 - protein, 11 aa, Homo Sapiens
AQNLGNFIVRY

SEQ ID NO: 76138 - protein, 11 aa, Homo Sapiens
AQQHPQAAASY

SEQ ID NO: 76139 - protein, 11 aa, Homo Sapiens
AQQVQQVAAEY

SEQ ID NO: 76140 - protein, 11 aa, Homo Sapiens
AQRALDEATKY

SEQ ID NO: 76141 - protein, 11 aa, Homo Sapiens
AQREAAEVCEY

SEQ ID NO: 76142 - protein, 11 aa, Homo Sapiens
AQRIVRVPILY

SEQ ID NO: 76143 - protein, 11 aa, Homo Sapiens
AQRLGVSQSTH

SEQ ID NO: 76144 - protein, 11 aa, Homo Sapiens
AQRSARALLDY

SEQ ID NO: 76145 - protein, 11 aa, Homo Sapiens
AQSGTGKTATF

SEQ ID NO: 76146 - protein, 11 aa, Homo Sapiens
AQSSIALHHQY

SEQ ID NO: 76147 - protein, 11 aa, Homo Sapiens
AQVKADGHKVY

SEQ ID NO: 76148 - protein, 11 aa, Homo Sapiens
AQYAQRASVAF

SEQ ID NO: 76149 - protein, 11 aa, Homo Sapiens
AQYLPKEQYLY

SEQ ID NO: 76150 - protein, 11 aa, Homo Sapiens
AQYQFTGIKKY

SEQ ID NO: 76151 - protein, 11 aa, Homo Sapiens
AVNPSILPTAF

SEQ ID NO: 76152 - protein, 11 aa, Homo Sapiens
AVRDISEASVF

SEQ ID NO: 76153 - protein, 11 aa, Homo Sapiens
EQFLDTNETPY

SEQ ID NO: 76154 - protein, 11 aa, Homo Sapiens
EQIYPVNAISF

SEQ ID NO: 76155 - protein, 11 aa, Homo Sapiens
ETQITQIEHEV

SEQ ID NO: 76156 - protein, 11 aa, Homo Sapiens
FEIDGRKNKSY

SEQ ID NO: 76157 - protein, 11 aa, Homo Sapiens
FIFREGDGVYY

SEQ ID NO: 76158 - protein, 11 aa, Homo Sapiens
FMKDTDSINLY

SEQ ID NO: 76159 - protein, 11 aa, Homo Sapiens
FQKEDSPATFY

SEQ ID NO: 76160 - protein, 11 aa, Homo Sapiens
GAIKADHVSTY

SEQ ID NO: 76161 - protein, 11 aa, Homo Sapiens
GIIHLGATSCY

SEQ ID NO: 76162 - protein, 11 aa, Homo Sapiens
GLGSGGSIRSS

SEQ ID NO: 76163 - protein, 11 aa, Homo Sapiens
GQFGVGFYSAY

SEQ ID NO: 76164 - protein, 11 aa, Homo Sapiens
GQHFPIEVRHY

SEQ ID NO: 76165 - protein, 11 aa, Homo Sapiens
GQHRSTIITLY

SEQ ID NO: 76166 - protein, 11 aa, Homo Sapiens
GQHSQGLGGHY

SEQ ID NO: 76167 - protein, 11 aa, Homo Sapiens
GQIDKEAVQKY

SEQ ID NO: 76168 - protein, 11 aa, Homo Sapiens
GQIKTVYPASY

SEQ ID NO: 76169 - protein, 11 aa, Homo Sapiens
GQIVQSKINSF

SEQ ID NO: 76170 - protein, 11 aa, Homo Sapiens
GQIYDRQGATY

SEQ ID NO: 76171 - protein, 11 aa, Homo Sapiens
GQKLPKSRTAY

SEQ ID NO: 76172 - protein, 11 aa, Homo Sapiens
GQLDAAQRTLY

SEQ ID NO: 76173 - protein, 11 aa, Homo Sapiens
GQNGKDEVVAY

SEQ ID NO: 76174 - protein, 11 aa, Homo Sapiens
GQPAQDIFSVY

SEQ ID NO: 76175 - protein, 11 aa, Homo Sapiens
GQPERKFMQTF

SEQ ID NO: 76176 - protein, 11 aa, Homo Sapiens
GQPGQKQSTTF

SEQ ID NO: 76177 - protein, 11 aa, Homo Sapiens
GQQIGKVVQVY

SEQ ID NO: 76178 - protein, 11 aa, Homo Sapiens
GQQVHNLLLTY

SEQ ID NO: 76179 - protein, 11 aa, Homo Sapiens
GQYSPPPYSEY

SEQ ID NO: 76180 - protein, 11 aa, Homo Sapiens
GVAGVGAGLAY

SEQ ID NO: 76181 - protein, 11 aa, Homo Sapiens
GVFEPNNPVCF

SEQ ID NO: 76182 - protein, 11 aa, Homo Sapiens
HQYNPKFQTLF

SEQ ID NO: 76183 - protein, 11 aa, Homo Sapiens
HQYPNFKDIRY

SEQ ID NO: 76184 - protein, 11 aa, Homo Sapiens
IARDEGGKAFF

SEQ ID NO: 76185 - protein, 11 aa, Homo Sapiens
IEYPTGSGNVY

SEQ ID NO: 76186 - protein, 11 aa, Homo Sapiens
IIISGGPNSVY

SEQ ID NO: 76187 - protein, 11 aa, Homo Sapiens
IIYPLCENNVY

SEQ ID NO: 76188 - protein, 11 aa, Homo Sapiens
ILFPVSGVGSY

SEQ ID NO: 76189 - protein, 11 aa, Homo Sapiens
ILGPSHPDTSY

SEQ ID NO: 76190 - protein, 11 aa, Homo Sapiens
ILKEADQKEQF

SEQ ID NO: 76191 - protein, 11 aa, Homo Sapiens
ILKEDPANTVY

SEQ ID NO: 76192 - protein, 11 aa, Homo Sapiens
ILREDPAYLHY

SEQ ID NO: 76193 - protein, 11 aa, Homo Sapiens
ILSDPKKKTRY

SEQ ID NO: 76194 - protein, 11 aa, Homo Sapiens
IMFDVTSRVTY

SEQ ID NO: 76195 - protein, 11 aa, Homo Sapiens
IMKSIGEAIQY

SEQ ID NO: 76196 - protein, 11 aa, Homo Sapiens
IQFRLPDGSSF

SEQ ID NO: 76197 - protein, 11 aa, Homo Sapiens
IQINPQNKADF

SEQ ID NO: 76198 - protein, 11 aa, Homo Sapiens
IQKFPYDDPTY

SEQ ID NO: 76199 - protein, 11 aa, Homo Sapiens
IQKQEQIPLTY

SEQ ID NO: 76200 - protein, 11 aa, Homo Sapiens
IQLEPDQIIHY

SEQ ID NO: 76201 - protein, 11 aa, Homo Sapiens
IQMKPGSKIRY

SEQ ID NO: 76202 - protein, 11 aa, Homo Sapiens
IQNPDITSSRY

SEQ ID NO: 76203 - protein, 11 aa, Homo Sapiens
IQPEKDIIVEF

SEQ ID NO: 76204 - protein, 11 aa, Homo Sapiens
IQPHPRTGNKY

SEQ ID NO: 76205 - protein, 11 aa, Homo Sapiens
IQPNTTGKQLF

SEQ ID NO: 76206 - protein, 11 aa, Homo Sapiens
IQQHFSATLAY

SEQ ID NO: 76207 - protein, 11 aa, Homo Sapiens
ITKPQNLNDAY

SEQ ID NO: 76208 - protein, 11 aa, Homo Sapiens
IVFVSENVTQY

SEQ ID NO: 76209 - protein, 11 aa, Homo Sapiens
KITDSAGHILY

SEQ ID NO: 76210 - protein, 11 aa, Homo Sapiens
KLFGPFTRNYY

SEQ ID NO: 76211 - protein, 11 aa, Homo Sapiens
KLHVSGESSVF

SEQ ID NO: 76212 - protein, 11 aa, Homo Sapiens
KLIHPTENITF

SEQ ID NO: 76213 - protein, 11 aa, Homo Sapiens
KLKEAETRAEF

SEQ ID NO: 76214 - protein, 11 aa, Homo Sapiens
KLKGTVGEPTY

SEQ ID NO: 76215 - protein, 11 aa, Homo Sapiens
KLKPTSKDQVL

SEQ ID NO: 76216 - protein, 11 aa, Homo Sapiens
KLKTEQGGAHF

SEQ ID NO: 76217 - protein, 11 aa, Homo Sapiens
KLYEGKTKEVY

SEQ ID NO: 76218 - protein, 11 aa, Homo Sapiens
KMKENGREGCF

SEQ ID NO: 76219 - protein, 11 aa, Homo Sapiens
KMKQDAQVVLY

SEQ ID NO: 76220 - protein, 11 aa, Homo Sapiens
KMYSTDDGVQF

SEQ ID NO: 76221 - protein, 11 aa, Homo Sapiens
KQAEWSSKTSY

SEQ ID NO: 76222 - protein, 11 aa, Homo Sapiens
KQASVVIQQQY

SEQ ID NO: 76223 - protein, 11 aa, Homo Sapiens
KQFFQDKARFY

SEQ ID NO: 76224 - protein, 11 aa, Homo Sapiens
KQIDNTGSSTY

SEQ ID NO: 76225 - protein, 11 aa, Homo Sapiens
KQIDPEMLNSF

SEQ ID NO: 76226 - protein, 11 aa, Homo Sapiens
KQIGGGDIAVF

SEQ ID NO: 76227 - protein, 11 aa, Homo Sapiens
KQIVPKESLVY

SEQ ID NO: 76228 - protein, 11 aa, Homo Sapiens
KQKAAGVRDVF

SEQ ID NO: 76229 - protein, 11 aa, Homo Sapiens
KQLNIAYDVTY

SEQ ID NO: 76230 - protein, 11 aa, Homo Sapiens
KQNELLEPNSF

SEQ ID NO: 76231 - protein, 11 aa, Homo Sapiens
KQNLRAIYQCF

SEQ ID NO: 76232 - protein, 11 aa, Homo Sapiens
KQNPAANKTNY

SEQ ID NO: 76233 - protein, 11 aa, Homo Sapiens
KQNPTVGFELY

SEQ ID NO: 76234 - protein, 11 aa, Homo Sapiens
KQPAIMPGQSY

SEQ ID NO: 76235 - protein, 11 aa, Homo Sapiens
KQSVQGAGTSY

SEQ ID NO: 76236 - protein, 11 aa, Homo Sapiens
KQYPPNTSKVY

SEQ ID NO: 76237 - protein, 11 aa, Homo Sapiens
KQYYALEVSYF

SEQ ID NO: 76238 - protein, 11 aa, Homo Sapiens
KVASQKGMSVY

SEQ ID NO: 76239 - protein, 11 aa, Homo Sapiens
KVFDPSCGLPY

SEQ ID NO: 76240 - protein, 11 aa, Homo Sapiens
LLARPSSTITY

SEQ ID NO: 76241 - protein, 11 aa, Homo Sapiens
LLNPSKECEPY

SEQ ID NO: 76242 - protein, 11 aa, Homo Sapiens
LLYPTEDYKVY

SEQ ID NO: 76243 - protein, 11 aa, Homo Sapiens
LMIKENPSSQY

SEQ ID NO: 76244 - protein, 11 aa, Homo Sapiens
LQHDYGHLSVY

SEQ ID NO: 76245 - protein, 11 aa, Homo Sapiens
LQIGADDVEAF

SEQ ID NO: 76246 - protein, 11 aa, Homo Sapiens
LQIHPVVITSF

SEQ ID NO: 76247 - protein, 11 aa, Homo Sapiens
LQKGVNILTSY

SEQ ID NO: 76248 - protein, 11 aa, Homo Sapiens
LQKISGQNGTF

SEQ ID NO: 76249 - protein, 11 aa, Homo Sapiens
LQPLLDNQVGF

SEQ ID NO: 76250 - protein, 11 aa, Homo Sapiens
LQREAQTLQQY

SEQ ID NO: 76251 - protein, 11 aa, Homo Sapiens
LQYLSQGNVVF

SEQ ID NO: 76252 - protein, 11 aa, Homo Sapiens
NTSQYQGVVVY

SEQ ID NO: 76253 - protein, 11 aa, Homo Sapiens
QPSSQYRIKEY

SEQ ID NO: 76254 - protein, 11 aa, Homo Sapiens
QQFYQPKIQQF

SEQ ID NO: 76255 - protein, 11 aa, Homo Sapiens
QQGPVGVNVTY

SEQ ID NO: 76256 - protein, 11 aa, Homo Sapiens
QQIPASDTQQL

SEQ ID NO: 76257 - protein, 11 aa, Homo Sapiens
QQLDPDEKIAY

SEQ ID NO: 76258 - protein, 11 aa, Homo Sapiens
QQLDPDEKITY

SEQ ID NO: 76259 - protein, 11 aa, Homo Sapiens
QQLDPEQKITY

SEQ ID NO: 76260 - protein, 11 aa, Homo Sapiens
QQPNGAGFAAF

SEQ ID NO: 76261 - protein, 11 aa, Homo Sapiens
QQQHSPQQIAY

SEQ ID NO: 76262 - protein, 11 aa, Homo Sapiens
QQYYPDGNSQY

SEQ ID NO: 76263 - protein, 11 aa, Homo Sapiens
RAFDQGADAIY

SEQ ID NO: 76264 - protein, 11 aa, Homo Sapiens
RAFDSQNNTVY

SEQ ID NO: 76265 - protein, 11 aa, Homo Sapiens
RAKPEYISKTY

SEQ ID NO: 76266 - protein, 11 aa, Homo Sapiens
RIFPSHISSRY

SEQ ID NO: 76267 - protein, 11 aa, Homo Sapiens
RIKKPDYKVAY

SEQ ID NO: 76268 - protein, 11 aa, Homo Sapiens
RIMDPDVITGY

SEQ ID NO: 76269 - protein, 11 aa, Homo Sapiens
RLFDANKAELF

SEQ ID NO: 76270 - protein, 11 aa, Homo Sapiens
RLFPSAAQVTF

SEQ ID NO: 76271 - protein, 11 aa, Homo Sapiens
RLFSTAEAAVY

SEQ ID NO: 76272 - protein, 11 aa, Homo Sapiens
RLFTEKVNNTF

SEQ ID NO: 76273 - protein, 11 aa, Homo Sapiens
RLGGGTYGEVF

SEQ ID NO: 76274 - protein, 11 aa, Homo Sapiens
RLHEAFSPVSY

SEQ ID NO: 76275 - protein, 11 aa, Homo Sapiens
RLIAQRYLLQY

SEQ ID NO: 76276 - protein, 11 aa, Homo Sapiens
RLIHPKSGRSY

SEQ ID NO: 76277 - protein, 11 aa, Homo Sapiens
RLIPDGCGVKY

SEQ ID NO: 76278 - protein, 11 aa, Homo Sapiens
RLKENNIEQIY

SEQ ID NO: 76279 - protein, 11 aa, Homo Sapiens
RLLKPGGVLTY

SEQ ID NO: 76280 - protein, 11 aa, Homo Sapiens
RLMVVEERCVY

SEQ ID NO: 76281 - protein, 11 aa, Homo Sapiens
RLNFSHGTHEY

SEQ ID NO: 76282 - protein, 11 aa, Homo Sapiens
RLNLESSNSKY

SEQ ID NO: 76283 - protein, 11 aa, Homo Sapiens
RLNVSQDDVLY

SEQ ID NO: 76284 - protein, 11 aa, Homo Sapiens
RLQSKTIKVSY

SEQ ID NO: 76285 - protein, 11 aa, Homo Sapiens
RLYEDSGYSSF

SEQ ID NO: 76286 - protein, 11 aa, Homo Sapiens
RLYKEELEQTY

SEQ ID NO: 76287 - protein, 11 aa, Homo Sapiens
RMKETQKSIYY

SEQ ID NO: 76288 - protein, 11 aa, Homo Sapiens
RMNPNSPSITY

SEQ ID NO: 76289 - protein, 11 aa, Homo Sapiens
RMQDTSVSFGY

SEQ ID NO: 76290 - protein, 11 aa, Homo Sapiens
RMQHSLAGQTY

SEQ ID NO: 76291 - protein, 11 aa, Homo Sapiens
RQADCHINNLY

SEQ ID NO: 76292 - protein, 11 aa, Homo Sapiens
RQALAYLEQSY

SEQ ID NO: 76293 - protein, 11 aa, Homo Sapiens
RQALQDLLSEY

SEQ ID NO: 76294 - protein, 11 aa, Homo Sapiens
RQGPEGLEVSF

SEQ ID NO: 76295 - protein, 11 aa, Homo Sapiens
RQHEIDGKALF

SEQ ID NO: 76296 - protein, 11 aa, Homo Sapiens
RQHEIVLKVAY

SEQ ID NO: 76297 - protein, 11 aa, Homo Sapiens
RQIGVEHVVVY

SEQ ID NO: 76298 - protein, 11 aa, Homo Sapiens
RQISTSGELSF

SEQ ID NO: 76299 - protein, 11 aa, Homo Sapiens
RQKAVSLFLCY

SEQ ID NO: 76300 - protein, 11 aa, Homo Sapiens
RQNGDDPLLTY

SEQ ID NO: 76301 - protein, 11 aa, Homo Sapiens
RQNLLSQSHAY

SEQ ID NO: 76302 - protein, 11 aa, Homo Sapiens
RQPAAFIVTQY

SEQ ID NO: 76303 - protein, 11 aa, Homo Sapiens
RQRPSVGVQSL

SEQ ID NO: 76304 - protein, 11 aa, Homo Sapiens
RQSISKALVAY

SEQ ID NO: 76305 - protein, 11 aa, Homo Sapiens
RQYGDESTLAF

SEQ ID NO: 76306 - protein, 11 aa, Homo Sapiens
RQYGSEGRFTF

SEQ ID NO: 76307 - protein, 11 aa, Homo Sapiens
RQYSRNEPLTF

SEQ ID NO: 76308 - protein, 11 aa, Homo Sapiens
RSYAGKNAVAY

SEQ ID NO: 76309 - protein, 11 aa, Homo Sapiens
RTKADSVPGTY

SEQ ID NO: 76310 - protein, 11 aa, Homo Sapiens
RVIGEDGQSVY

SEQ ID NO: 76311 - protein, 11 aa, Homo Sapiens
RVIVPSSEITY

SEQ ID NO: 76312 - protein, 11 aa, Homo Sapiens
RVYWNDGLDQY

SEQ ID NO: 76313 - protein, 11 aa, Homo Sapiens
SINPLGGFVHY

SEQ ID NO: 76314 - protein, 11 aa, Homo Sapiens
SIYPGNSDTRY

SEQ ID NO: 76315 - protein, 11 aa, Homo Sapiens
SLGGGFGGGSR

SEQ ID NO: 76316 - protein, 11 aa, Homo Sapiens
SLIGAARTKTY

SEQ ID NO: 76317 - protein, 11 aa, Homo Sapiens
SLYASSPGGVY

SEQ ID NO: 76318 - protein, 11 aa, Homo Sapiens
SMFDQSQIQEF

SEQ ID NO: 76319 - protein, 11 aa, Homo Sapiens
SQFGGGSQYAY

SEQ ID NO: 76320 - protein, 11 aa, Homo Sapiens
SQFIGYPITLY

SEQ ID NO: 76321 - protein, 11 aa, Homo Sapiens
SQHSASSANVF

SEQ ID NO: 76322 - protein, 11 aa, Homo Sapiens
SQHSPSKKALY

SEQ ID NO: 76323 - protein, 11 aa, Homo Sapiens
SQIGDDRPISY

SEQ ID NO: 76324 - protein, 11 aa, Homo Sapiens
SQIPAAVKLTY

SEQ ID NO: 76325 - protein, 11 aa, Homo Sapiens
SQIVPKVAVFY

SEQ ID NO: 76326 - protein, 11 aa, Homo Sapiens
SQPDWPGGSRY

SEQ ID NO: 76327 - protein, 11 aa, Homo Sapiens
SQRAVTNHSVY

SEQ ID NO: 76328 - protein, 11 aa, Homo Sapiens
SQRDPPHNNFF

SEQ ID NO: 76329 - protein, 11 aa, Homo Sapiens
SQRDTVLSTLY

SEQ ID NO: 76330 - protein, 11 aa, Homo Sapiens
SQYPVPDVSTY

SEQ ID NO: 76331 - protein, 11 aa, Homo Sapiens
SVIDSAELQAY

SEQ ID NO: 76332 - protein, 11 aa, Homo Sapiens
SVINSKASLTY

SEQ ID NO: 76333 - protein, 11 aa, Homo Sapiens
SVKSAAKESLY

SEQ ID NO: 76334 - protein, 11 aa, Homo Sapiens
SVNSHAATTQY

SEQ ID NO: 76335 - protein, 11 aa, Homo Sapiens
TEELNREVATN

SEQ ID NO: 76336 - protein, 11 aa, Homo Sapiens
TLIHSDLTSVY

SEQ ID NO: 76337 - protein, 11 aa, Homo Sapiens
TLQDSRTNTAY

SEQ ID NO: 76338 - protein, 11 aa, Homo Sapiens
TMILTVGGTAY

SEQ ID NO: 76339 - protein, 11 aa, Homo Sapiens
TQFINPETPGY

SEQ ID NO: 76340 - protein, 11 aa, Homo Sapiens
TQFPSTVSTVY

SEQ ID NO: 76341 - protein, 11 aa, Homo Sapiens
TQISKTNTQTY

SEQ ID NO: 76342 - protein, 11 aa, Homo Sapiens
TQNQRSESNRF

SEQ ID NO: 76343 - protein, 11 aa, Homo Sapiens
TQRNGICEVLY

SEQ ID NO: 76344 - protein, 11 aa, Homo Sapiens
TQRRGNMVTTY

SEQ ID NO: 76345 - protein, 11 aa, Homo Sapiens
TVKDDLSFAGY

SEQ ID NO: 76346 - protein, 11 aa, Homo Sapiens
VGTHLAYAAAF

SEQ ID NO: 76347 - protein, 11 aa, Homo Sapiens
VIKDDVASEVY

SEQ ID NO: 76348 - protein, 11 aa, Homo Sapiens
VIKQEKLGTVY

SEQ ID NO: 76349 - protein, 11 aa, Homo Sapiens
VLQLPARNLTY

SEQ ID NO: 76350 - protein, 11 aa, Homo Sapiens
VLSAADKGNVK

SEQ ID NO: 76351 - protein, 11 aa, Homo Sapiens
VLYDQPRHVQY

SEQ ID NO: 76352 - protein, 11 aa, Homo Sapiens
VLYPHEPTAVF

SEQ ID NO: 76353 - protein, 11 aa, Homo Sapiens
VMMDPNSTQRY

SEQ ID NO: 76354 - protein, 11 aa, Homo Sapiens
VMYNSSDHDVY

SEQ ID NO: 76355 - protein, 11 aa, Homo Sapiens
VQADSKGTVSF

SEQ ID NO: 76356 - protein, 11 aa, Homo Sapiens
VQKAAPGSQRY

SEQ ID NO: 76357 - protein, 11 aa, Homo Sapiens
VQKDGVGMVEY

SEQ ID NO: 76358 - protein, 11 aa, Homo Sapiens
VQKKPAELQGF

SEQ ID NO: 76359 - protein, 11 aa, Homo Sapiens
VQKYQSPVRVY

SEQ ID NO: 76360 - protein, 11 aa, Homo Sapiens
VQPEAAGSVAM

SEQ ID NO: 76361 - protein, 11 aa, Homo Sapiens
VQRVASVMQEY

SEQ ID NO: 76362 - protein, 11 aa, Homo Sapiens
VQVAAQDLTDY

SEQ ID NO: 76363 - protein, 11 aa, Homo Sapiens
VQYQDPAAVSF

SEQ ID NO: 76364 - protein, 11 aa, Homo Sapiens
VSGSQRISSIY

SEQ ID NO: 76365 - protein, 11 aa, Homo Sapiens
VVYLQKLDTAY

SEQ ID NO: 76366 - protein, 11 aa, Homo Sapiens
YAGQRLPQHGY

SEQ ID NO: 76367 - protein, 11 aa, Homo Sapiens
YAKSSVGETVY

SEQ ID NO: 76368 - protein, 11 aa, Homo Sapiens
YIRPEGQDSAF

SEQ ID NO: 76369 - protein, 11 aa, Homo Sapiens
YLFEPHSGEDY

SEQ ID NO: 76370 - protein, 11 aa, Homo Sapiens
YLFEPHSGEEY

SEQ ID NO: 76371 - protein, 11 aa, Homo Sapiens
YQIDITTENQY

SEQ ID NO: 76372 - protein, 11 aa, Homo Sapiens
YQLKVVNPQEY

SEQ ID NO: 76373 - protein, 11 aa, Homo Sapiens
YQTDNKKAITY

SEQ ID NO: 76374 - protein, 11 aa, Homo Sapiens
YSFDSRHKPAF

SEQ ID NO: 76375 - protein, 11 aa, Homo Sapiens
YSLDGRLLSTY

SEQ ID NO: 76376 - protein, 11 aa, Homo Sapiens
YSVMINKATPY

SEQ ID NO: 76377 - protein, 11 aa, Homo Sapiens
YSVNGERLGTY

SEQ ID NO: 76378 - protein, 11 aa, Homo Sapiens
YVIDQGETDVY

SEQ ID NO: 76379 - protein, 8 aa, Homo Sapiens
ARAGETRF

SEQ ID NO: 76380 - protein, 8 aa, Homo Sapiens
AVYKVSEY

SEQ ID NO: 76381 - protein, 8 aa, Homo Sapiens
DAFAPVAY

SEQ ID NO: 76382 - protein, 8 aa, Homo Sapiens
DAFKASVY

SEQ ID NO: 76383 - protein, 8 aa, Homo Sapiens
DALVITHY

SEQ ID NO: 76384 - protein, 8 aa, Homo Sapiens
DAYAINSY

SEQ ID NO: 76385 - protein, 8 aa, Homo Sapiens
DFFQHVEM

SEQ ID NO: 76386 - protein, 8 aa, Homo Sapiens
DFLAALEY

SEQ ID NO: 76387 - protein, 8 aa, Homo Sapiens
DFLLSRQM

SEQ ID NO: 76388 - protein, 8 aa, Homo Sapiens
DGRTIVCY

SEQ ID NO: 76389 - protein, 8 aa, Homo Sapiens
DIAKHLTY

SEQ ID NO: 76390 - protein, 8 aa, Homo Sapiens
DIHRSIKY

SEQ ID NO: 76391 - protein, 8 aa, Homo Sapiens
DIMKIREY

SEQ ID NO: 76392 - protein, 8 aa, Homo Sapiens
DLLLVRQY

SEQ ID NO: 76393 - protein, 8 aa, Homo Sapiens
DLLQHSEY

SEQ ID NO: 76394 - protein, 8 aa, Homo Sapiens
DLLVHVEY

SEQ ID NO: 76395 - protein, 8 aa, Homo Sapiens
DLRKSPVF

SEQ ID NO: 76396 - protein, 8 aa, Homo Sapiens
DLRRDIAY

SEQ ID NO: 76397 - protein, 8 aa, Homo Sapiens
DLWPAKQY

SEQ ID NO: 76398 - protein, 8 aa, Homo Sapiens
DLYSAYDY

SEQ ID NO: 76399 - protein, 8 aa, Homo Sapiens
DMARVSTY

SEQ ID NO: 76400 - protein, 8 aa, Homo Sapiens
DMFKILTY

SEQ ID NO: 76401 - protein, 8 aa, Homo Sapiens
DMKKAITY

SEQ ID NO: 76402 - protein, 8 aa, Homo Sapiens
DPYQVHVC

SEQ ID NO: 76403 - protein, 8 aa, Homo Sapiens
DQKIHRPM

SEQ ID NO: 76404 - protein, 8 aa, Homo Sapiens
DQRVIYYY

SEQ ID NO: 76405 - protein, 8 aa, Homo Sapiens
DSYKVTHY

SEQ ID NO: 76406 - protein, 8 aa, Homo Sapiens
DTYKAITY

SEQ ID NO: 76407 - protein, 8 aa, Homo Sapiens
DVHQVACY

SEQ ID NO: 76408 - protein, 8 aa, Homo Sapiens
DVLKALQM

SEQ ID NO: 76409 - protein, 8 aa, Homo Sapiens
DVNKVVEY

SEQ ID NO: 76410 - protein, 8 aa, Homo Sapiens
DVPLVVEY

SEQ ID NO: 76411 - protein, 8 aa, Homo Sapiens
DVVAHEVY

SEQ ID NO: 76412 - protein, 8 aa, Homo Sapiens
EAFLVPAY

SEQ ID NO: 76413 - protein, 8 aa, Homo Sapiens
EFRKVVEY

SEQ ID NO: 76414 - protein, 8 aa, Homo Sapiens
EQHESIVM

SEQ ID NO: 76415 - protein, 8 aa, Homo Sapiens
ESYSIYVY

SEQ ID NO: 76416 - protein, 8 aa, Homo Sapiens
EVILHHEY

SEQ ID NO: 76417 - protein, 8 aa, Homo Sapiens
EVLISRVY

SEQ ID NO: 76418 - protein, 8 aa, Homo Sapiens
EVYQVTVY

SEQ ID NO: 76419 - protein, 8 aa, Homo Sapiens
FALVSQAY

SEQ ID NO: 76420 - protein, 8 aa, Homo Sapiens
FDRLVLQY

SEQ ID NO: 76421 - protein, 8 aa, Homo Sapiens
FLALGNSF

SEQ ID NO: 76422 - protein, 8 aa, Homo Sapiens
FLYLSAEY

SEQ ID NO: 76423 - protein, 8 aa, Homo Sapiens
FNEKSKEL

SEQ ID NO: 76424 - protein, 8 aa, Homo Sapiens
FPHTTPSM

SEQ ID NO: 76425 - protein, 8 aa, Homo Sapiens
FPLKALQY

SEQ ID NO: 76426 - protein, 8 aa, Homo Sapiens
FPLLATAY

SEQ ID NO: 76427 - protein, 8 aa, Homo Sapiens
FPMEIRQY

SEQ ID NO: 76428 - protein, 8 aa, Homo Sapiens
FPTISLEF

SEQ ID NO: 76429 - protein, 8 aa, Homo Sapiens
FPYLSESY

SEQ ID NO: 76430 - protein, 8 aa, Homo Sapiens
FQKVITEY

SEQ ID NO: 76431 - protein, 8 aa, Homo Sapiens
FQYLSKTY

SEQ ID NO: 76432 - protein, 8 aa, Homo Sapiens
HALLVNHY

SEQ ID NO: 76433 - protein, 8 aa, Homo Sapiens
HAVVVGVY

SEQ ID NO: 76434 - protein, 8 aa, Homo Sapiens
HFYQGLVY

SEQ ID NO: 76435 - protein, 8 aa, Homo Sapiens
HIGIPLTY

SEQ ID NO: 76436 - protein, 8 aa, Homo Sapiens
HQREIQVM

SEQ ID NO: 76437 - protein, 8 aa, Homo Sapiens
HQYHIRAY

SEQ ID NO: 76438 - protein, 8 aa, Homo Sapiens
HQYKVRAY

SEQ ID NO: 76439 - protein, 8 aa, Homo Sapiens
HVIIQAEF

SEQ ID NO: 76440 - protein, 8 aa, Homo Sapiens
IPREVVAY

SEQ ID NO: 76441 - protein, 8 aa, Homo Sapiens
IPRITIEM

SEQ ID NO: 76442 - protein, 8 aa, Homo Sapiens
IQRLITEM

SEQ ID NO: 76443 - protein, 8 aa, Homo Sapiens
LAYLVNTY

SEQ ID NO: 76444 - protein, 8 aa, Homo Sapiens
LEQQNQVL

SEQ ID NO: 76445 - protein, 8 aa, Homo Sapiens
LIKKDVNY

SEQ ID NO: 76446 - protein, 8 aa, Homo Sapiens
LPFTPLSY

SEQ ID NO: 76447 - protein, 8 aa, Homo Sapiens
LPLVSSTY

SEQ ID NO: 76448 - protein, 8 aa, Homo Sapiens
LPYESQVY

SEQ ID NO: 76449 - protein, 8 aa, Homo Sapiens
LPYQVNQM

SEQ ID NO: 76450 - protein, 8 aa, Homo Sapiens
LQQAKEDL

SEQ ID NO: 76451 - protein, 8 aa, Homo Sapiens
LQRLVNLY

SEQ ID NO: 76452 - protein, 8 aa, Homo Sapiens
LTTKQSSY

SEQ ID NO: 76453 - protein, 8 aa, Homo Sapiens
MAFQNDVY

SEQ ID NO: 76454 - protein, 8 aa, Homo Sapiens
MINKATPY

SEQ ID NO: 76455 - protein, 8 aa, Homo Sapiens
MPKVHIEF

SEQ ID NO: 76456 - protein, 8 aa, Homo Sapiens
MPTVHYEF

SEQ ID NO: 76457 - protein, 8 aa, Homo Sapiens
MQRLIEKY

SEQ ID NO: 76458 - protein, 8 aa, Homo Sapiens
NFLLSHEY

SEQ ID NO: 76459 - protein, 8 aa, Homo Sapiens
NLLRISVY

SEQ ID NO: 76460 - protein, 8 aa, Homo Sapiens
NVIKVSVY

SEQ ID NO: 76461 - protein, 8 aa, Homo Sapiens
PIYIITEY

SEQ ID NO: 76462 - protein, 8 aa, Homo Sapiens
QQIPDHPK

SEQ ID NO: 76463 - protein, 8 aa, Homo Sapiens
QQRVVRVY

SEQ ID NO: 76464 - protein, 8 aa, Homo Sapiens
QYEQILAF

SEQ ID NO: 76465 - protein, 8 aa, Homo Sapiens
SALPALVM

SEQ ID NO: 76466 - protein, 8 aa, Homo Sapiens
SDRTITEY

SEQ ID NO: 76467 - protein, 8 aa, Homo Sapiens
SDRVVVTY

SEQ ID NO: 76468 - protein, 8 aa, Homo Sapiens
SQRIFITY

SEQ ID NO: 76469 - protein, 8 aa, Homo Sapiens
SQYRIKEY

SEQ ID NO: 76470 - protein, 8 aa, Homo Sapiens
SVYKAFVM

SEQ ID NO: 76471 - protein, 8 aa, Homo Sapiens
TQRLVQVM

SEQ ID NO: 76472 - protein, 8 aa, Homo Sapiens
TQTLVREY

SEQ ID NO: 76473 - protein, 8 aa, Homo Sapiens
TVGNNKTL

SEQ ID NO: 76474 - protein, 8 aa, Homo Sapiens
TVIEHPEY

SEQ ID NO: 76475 - protein, 8 aa, Homo Sapiens
VAVAHAVY

SEQ ID NO: 76476 - protein, 8 aa, Homo Sapiens
VHFPMVVY

SEQ ID NO: 76477 - protein, 8 aa, Homo Sapiens
VPYRIFPY

SEQ ID NO: 76478 - protein, 8 aa, Homo Sapiens
YALQVHCY

SEQ ID NO: 76479 - protein, 8 aa, Homo Sapiens
YATVHQSY

SEQ ID NO: 76480 - protein, 8 aa, Homo Sapiens
YPVEIHEY

SEQ ID NO: 76481 - protein, 8 aa, Homo Sapiens
YPYAAISY

SEQ ID NO: 76482 - protein, 8 aa, Homo Sapiens
YPYTITEY

SEQ ID NO: 76483 - protein, 8 aa, Homo Sapiens
YQRLIASY

SEQ ID NO: 76484 - protein, 9 aa, Homo Sapiens
AAAPAGTTF

SEQ ID NO: 76485 - protein, 9 aa, Homo Sapiens
ACYSPHAAY

SEQ ID NO: 76486 - protein, 9 aa, Homo Sapiens
AFYEHAQTY

SEQ ID NO: 76487 - protein, 9 aa, Homo Sapiens
AIRQQIESY

SEQ ID NO: 76488 - protein, 9 aa, Homo Sapiens
AIYGGSASY

SEQ ID NO: 76489 - protein, 9 aa, Homo Sapiens
ALAADHTVY

SEQ ID NO: 76490 - protein, 9 aa, Homo Sapiens
ALAPAGFSY

SEQ ID NO: 76491 - protein, 9 aa, Homo Sapiens
ALCDIKQAY

SEQ ID NO: 76492 - protein, 9 aa, Homo Sapiens
ALQEASEAY

SEQ ID NO: 76493 - protein, 9 aa, Homo Sapiens
ALVKAGKVY

SEQ ID NO: 76494 - protein, 9 aa, Homo Sapiens
ALWIGTTSF

SEQ ID NO: 76495 - protein, 9 aa, Homo Sapiens
ALWKQFQSF

SEQ ID NO: 76496 - protein, 9 aa, Homo Sapiens
ALYPQTTCF

SEQ ID NO: 76497 - protein, 9 aa, Homo Sapiens
AMNPTNTVF

SEQ ID NO: 76498 - protein, 9 aa, Homo Sapiens
APAPPASQY

SEQ ID NO: 76499 - protein, 9 aa, Homo Sapiens
APYQFLTAF

SEQ ID NO: 76500 - protein, 9 aa, Homo Sapiens
AQHLFLQAF

SEQ ID NO: 76501 - protein, 9 aa, Homo Sapiens
ARAGETRFT

SEQ ID NO: 76502 - protein, 9 aa, Homo Sapiens
ATAQPPAPL

SEQ ID NO: 76503 - protein, 9 aa, Homo Sapiens
AVAPFFKSY

SEQ ID NO: 76504 - protein, 9 aa, Homo Sapiens
AVHDITVAY

SEQ ID NO: 76505 - protein, 9 aa, Homo Sapiens
AVRDYEKVY

SEQ ID NO: 76506 - protein, 9 aa, Homo Sapiens
AVRPLELAY

SEQ ID NO: 76507 - protein, 9 aa, Homo Sapiens
AVRTTGNVY

SEQ ID NO: 76508 - protein, 9 aa, Homo Sapiens
AVSAVVHEY

SEQ ID NO: 76509 - protein, 9 aa, Homo Sapiens
CFYQHKEEY

SEQ ID NO: 76510 - protein, 9 aa, Homo Sapiens
CIHDVSSTY

SEQ ID NO: 76511 - protein, 9 aa, Homo Sapiens
CLADGALIY

SEQ ID NO: 76512 - protein, 9 aa, Homo Sapiens
CLARLFTAY

SEQ ID NO: 76513 - protein, 9 aa, Homo Sapiens
CLIEAVQVY

SEQ ID NO: 76514 - protein, 9 aa, Homo Sapiens
CLNSLIQVF

SEQ ID NO: 76515 - protein, 9 aa, Homo Sapiens
CQHDFQAPY

SEQ ID NO: 76516 - protein, 9 aa, Homo Sapiens
CQYFRALLY

SEQ ID NO: 76517 - protein, 9 aa, Homo Sapiens
CVAPTIHVY

SEQ ID NO: 76518 - protein, 9 aa, Homo Sapiens
CVAPTNPRF

SEQ ID NO: 76519 - protein, 9 aa, Homo Sapiens
DAFEFHEAF

SEQ ID NO: 76520 - protein, 9 aa, Homo Sapiens
DAGPPTHAF

SEQ ID NO: 76521 - protein, 9 aa, Homo Sapiens
DAWKLTTQY

SEQ ID NO: 76522 - protein, 9 aa, Homo Sapiens
DAYELKHAL

SEQ ID NO: 76523 - protein, 9 aa, Homo Sapiens
DAYPQRIKF

SEQ ID NO: 76524 - protein, 9 aa, Homo Sapiens
DAYTHLETF

SEQ ID NO: 76525 - protein, 9 aa, Homo Sapiens
DAYTLAKAY

SEQ ID NO: 76526 - protein, 9 aa, Homo Sapiens
DAYTSRLGY

SEQ ID NO: 76527 - protein, 9 aa, Homo Sapiens
DFESHITSY

SEQ ID NO: 76528 - protein, 9 aa, Homo Sapiens
DFFAQQTRF

SEQ ID NO: 76529 - protein, 9 aa, Homo Sapiens
DFFKERTSF

SEQ ID NO: 76530 - protein, 9 aa, Homo Sapiens
DFREQKHSY

SEQ ID NO: 76531 - protein, 9 aa, Homo Sapiens
DFYEQNSRY

SEQ ID NO: 76532 - protein, 9 aa, Homo Sapiens
DGHLFQVEY

SEQ ID NO: 76533 - protein, 9 aa, Homo Sapiens
DGRVFQVEY

SEQ ID NO: 76534 - protein, 9 aa, Homo Sapiens
DHALHTISY

SEQ ID NO: 76535 - protein, 9 aa, Homo Sapiens
DIADPFFAY

SEQ ID NO: 76536 - protein, 9 aa, Homo Sapiens
DIAPPLIAF

SEQ ID NO: 76537 - protein, 9 aa, Homo Sapiens
DIIKDQKAY

SEQ ID NO: 76538 - protein, 9 aa, Homo Sapiens
DIKKTGVVF

SEQ ID NO: 76539 - protein, 9 aa, Homo Sapiens
DILFVRTSY

SEQ ID NO: 76540 - protein, 9 aa, Homo Sapiens
DIREEAEKY

SEQ ID NO: 76541 - protein, 9 aa, Homo Sapiens
DIREEKASW

SEQ ID NO: 76542 - protein, 9 aa, Homo Sapiens
DIREEKTSW

SEQ ID NO: 76543 - protein, 9 aa, Homo Sapiens
DIRKELEKY

SEQ ID NO: 76544 - protein, 9 aa, Homo Sapiens
DIRQERTAW

SEQ ID NO: 76545 - protein, 9 aa, Homo Sapiens
DIYDHAVLF

SEQ ID NO: 76546 - protein, 9 aa, Homo Sapiens
DIYIQSAKY

SEQ ID NO: 76547 - protein, 9 aa, Homo Sapiens
DIYKILTSY

SEQ ID NO: 76548 - protein, 9 aa, Homo Sapiens
DIYRELYAF

SEQ ID NO: 76549 - protein, 9 aa, Homo Sapiens
DLANIRSEY

SEQ ID NO: 76550 - protein, 9 aa, Homo Sapiens
DLAVPHTSY

SEQ ID NO: 76551 - protein, 9 aa, Homo Sapiens
DLDSRVLYY

SEQ ID NO: 76552 - protein, 9 aa, Homo Sapiens
DLFEQKVVF

SEQ ID NO: 76553 - protein, 9 aa, Homo Sapiens
DLFGRDLSY

SEQ ID NO: 76554 - protein, 9 aa, Homo Sapiens
DLFKVVPEM

SEQ ID NO: 76555 - protein, 9 aa, Homo Sapiens
DLIGHIVEF

SEQ ID NO: 76556 - protein, 9 aa, Homo Sapiens
DLKETNISY

SEQ ID NO: 76557 - protein, 9 aa, Homo Sapiens
DLLGVGAEY

SEQ ID NO: 76558 - protein, 9 aa, Homo Sapiens
DLLPSFHPY

SEQ ID NO: 76559 - protein, 9 aa, Homo Sapiens
DLPKAHTAF

SEQ ID NO: 76560 - protein, 9 aa, Homo Sapiens
DLRFIDAVY

SEQ ID NO: 76561 - protein, 9 aa, Homo Sapiens
DLRHFDPEF

SEQ ID NO: 76562 - protein, 9 aa, Homo Sapiens
DLRKEDVAM

SEQ ID NO: 76563 - protein, 9 aa, Homo Sapiens
DLRKNYTAY

SEQ ID NO: 76564 - protein, 9 aa, Homo Sapiens
DLRPDEEVF

SEQ ID NO: 76565 - protein, 9 aa, Homo Sapiens
DLRQELLAF

SEQ ID NO: 76566 - protein, 9 aa, Homo Sapiens
DLRSEQPCF

SEQ ID NO: 76567 - protein, 9 aa, Homo Sapiens
DLRTKEVVF

SEQ ID NO: 76568 - protein, 9 aa, Homo Sapiens
DLWLEREVF

SEQ ID NO: 76569 - protein, 9 aa, Homo Sapiens
DLYAVINHY

SEQ ID NO: 76570 - protein, 9 aa, Homo Sapiens
DLYKGSVAL

SEQ ID NO: 76571 - protein, 9 aa, Homo Sapiens
DLYPHVVGF

SEQ ID NO: 76572 - protein, 9 aa, Homo Sapiens
DLYQVIHKM

SEQ ID NO: 76573 - protein, 9 aa, Homo Sapiens
DLYRIFSKY

SEQ ID NO: 76574 - protein, 9 aa, Homo Sapiens
DLYVLRYEY

SEQ ID NO: 76575 - protein, 9 aa, Homo Sapiens
DLYYGGEAF

SEQ ID NO: 76576 - protein, 9 aa, Homo Sapiens
DMAKVFVEY

SEQ ID NO: 76577 - protein, 9 aa, Homo Sapiens
DMFAHPYQY

SEQ ID NO: 76578 - protein, 9 aa, Homo Sapiens
DMFEILTRY

SEQ ID NO: 76579 - protein, 9 aa, Homo Sapiens
DMHIQITDF

SEQ ID NO: 76580 - protein, 9 aa, Homo Sapiens
DMKAFVENY

SEQ ID NO: 76581 - protein, 9 aa, Homo Sapiens
DMMGHGSDY

SEQ ID NO: 76582 - protein, 9 aa, Homo Sapiens
DMNRHLHEY

SEQ ID NO: 76583 - protein, 9 aa, Homo Sapiens
DPYEVGHSM

SEQ ID NO: 76584 - protein, 9 aa, Homo Sapiens
DQAFGLPRL

SEQ ID NO: 76585 - protein, 9 aa, Homo Sapiens
DQFLQLSQY

SEQ ID NO: 76586 - protein, 9 aa, Homo Sapiens
DQGPAHPPG

SEQ ID NO: 76587 - protein, 9 aa, Homo Sapiens
DQKVHNVSF

SEQ ID NO: 76588 - protein, 9 aa, Homo Sapiens
DQMAKVLQF

SEQ ID NO: 76589 - protein, 9 aa, Homo Sapiens
DQMISRIEY

SEQ ID NO: 76590 - protein, 9 aa, Homo Sapiens
DQMVYTVRY

SEQ ID NO: 76591 - protein, 9 aa, Homo Sapiens
DQQQFNTMY

SEQ ID NO: 76592 - protein, 9 aa, Homo Sapiens
DQRDYICEY

SEQ ID NO: 76593 - protein, 9 aa, Homo Sapiens
DQREGGQVY

SEQ ID NO: 76594 - protein, 9 aa, Homo Sapiens
DQVAIHEAM

SEQ ID NO: 76595 - protein, 9 aa, Homo Sapiens
DQVIHTSSF

SEQ ID NO: 76596 - protein, 9 aa, Homo Sapiens
DSYKPIVEY

SEQ ID NO: 76597 - protein, 9 aa, Homo Sapiens
DTYEITKSY

SEQ ID NO: 76598 - protein, 9 aa, Homo Sapiens
DVAPTHILY

SEQ ID NO: 76599 - protein, 9 aa, Homo Sapiens
DVFSVKTEM

SEQ ID NO: 76600 - protein, 9 aa, Homo Sapiens
DVIQAGKEY

SEQ ID NO: 76601 - protein, 9 aa, Homo Sapiens
DVKVERIEY

SEQ ID NO: 76602 - protein, 9 aa, Homo Sapiens
DVRSQVTHY

SEQ ID NO: 76603 - protein, 9 aa, Homo Sapiens
DVSPVVSTY

SEQ ID NO: 76604 - protein, 9 aa, Homo Sapiens
DVYALKKPY

SEQ ID NO: 76605 - protein, 9 aa, Homo Sapiens
DVYGGTNRY

SEQ ID NO: 76606 - protein, 9 aa, Homo Sapiens
DVYLLHESY

SEQ ID NO: 76607 - protein, 9 aa, Homo Sapiens
DVYNHFLLY

SEQ ID NO: 76608 - protein, 9 aa, Homo Sapiens
EAAKPSPAM

SEQ ID NO: 76609 - protein, 9 aa, Homo Sapiens
EAAPPGELY

SEQ ID NO: 76610 - protein, 9 aa, Homo Sapiens
EAIIPGSVY

SEQ ID NO: 76611 - protein, 9 aa, Homo Sapiens
EAWRLLSTY

SEQ ID NO: 76612 - protein, 9 aa, Homo Sapiens
EAYHSVIKY

SEQ ID NO: 76613 - protein, 9 aa, Homo Sapiens
EAYNAVVRY

SEQ ID NO: 76614 - protein, 9 aa, Homo Sapiens
EAYVHVNQY

SEQ ID NO: 76615 - protein, 9 aa, Homo Sapiens
EFFRVVSEY

SEQ ID NO: 76616 - protein, 9 aa, Homo Sapiens
EIASSGTSY

SEQ ID NO: 76617 - protein, 9 aa, Homo Sapiens
EIFQHLMAY

SEQ ID NO: 76618 - protein, 9 aa, Homo Sapiens
EIREAANAM

SEQ ID NO: 76619 - protein, 9 aa, Homo Sapiens
EIREELEQY

SEQ ID NO: 76620 - protein, 9 aa, Homo Sapiens
EIRKDISAM

SEQ ID NO: 76621 - protein, 9 aa, Homo Sapiens
EIYPQSHSY

SEQ ID NO: 76622 - protein, 9 aa, Homo Sapiens
ELADIKQAY

SEQ ID NO: 76623 - protein, 9 aa, Homo Sapiens
ELAKQITSY

SEQ ID NO: 76624 - protein, 9 aa, Homo Sapiens
ELAKQVIEY

SEQ ID NO: 76625 - protein, 9 aa, Homo Sapiens
ELAPKFLAM

SEQ ID NO: 76626 - protein, 9 aa, Homo Sapiens
ELAPNFQVF

SEQ ID NO: 76627 - protein, 9 aa, Homo Sapiens
ELAPSLPSY

SEQ ID NO: 76628 - protein, 9 aa, Homo Sapiens
ELASWGHEY

SEQ ID NO: 76629 - protein, 9 aa, Homo Sapiens
ELDPESREY

SEQ ID NO: 76630 - protein, 9 aa, Homo Sapiens
ELESTNRRY

SEQ ID NO: 76631 - protein, 9 aa, Homo Sapiens
ELFDTVQVY

SEQ ID NO: 76632 - protein, 9 aa, Homo Sapiens
ELFKEARKY

SEQ ID NO: 76633 - protein, 9 aa, Homo Sapiens
ELFSSRSKY

SEQ ID NO: 76634 - protein, 9 aa, Homo Sapiens
ELIPLVTTY

SEQ ID NO: 76635 - protein, 9 aa, Homo Sapiens
ELKAPGISY

SEQ ID NO: 76636 - protein, 9 aa, Homo Sapiens
ELNPKILAL

SEQ ID NO: 76637 - protein, 9 aa, Homo Sapiens
ELRAKFEEY

SEQ ID NO: 76638 - protein, 9 aa, Homo Sapiens
ELREGFVEY

SEQ ID NO: 76639 - protein, 9 aa, Homo Sapiens
ELREQTVHY

SEQ ID NO: 76640 - protein, 9 aa, Homo Sapiens
ELRNASAVM

SEQ ID NO: 76641 - protein, 9 aa, Homo Sapiens
ELRTECNHY

SEQ ID NO: 76642 - protein, 9 aa, Homo Sapiens
ELSSVKLEY

SEQ ID NO: 76643 - protein, 9 aa, Homo Sapiens
ELVKLQQTY

SEQ ID NO: 76644 - protein, 9 aa, Homo Sapiens
ELVKSHSSY

SEQ ID NO: 76645 - protein, 9 aa, Homo Sapiens
ELVPESQAY

SEQ ID NO: 76646 - protein, 9 aa, Homo Sapiens
ELWKNPTAF

SEQ ID NO: 76647 - protein, 9 aa, Homo Sapiens
ELYHQSVVY

SEQ ID NO: 76648 - protein, 9 aa, Homo Sapiens
ELYNTIRDY

SEQ ID NO: 76649 - protein, 9 aa, Homo Sapiens
ELYQRIYAF

SEQ ID NO: 76650 - protein, 9 aa, Homo Sapiens
ELYRATREF

SEQ ID NO: 76651 - protein, 9 aa, Homo Sapiens
ELYRVTREY

SEQ ID NO: 76652 - protein, 9 aa, Homo Sapiens
EMARHLREY

SEQ ID NO: 76653 - protein, 9 aa, Homo Sapiens
EMIAQQREY

SEQ ID NO: 76654 - protein, 9 aa, Homo Sapiens
EMMKVVQVY

SEQ ID NO: 76655 - protein, 9 aa, Homo Sapiens
EMRKIVAEY

SEQ ID NO: 76656 - protein, 9 aa, Homo Sapiens
EMVDKTPVM

SEQ ID NO: 76657 - protein, 9 aa, Homo Sapiens
EPRKGEPAY

SEQ ID NO: 76658 - protein, 9 aa, Homo Sapiens
EQAPPVIYY

SEQ ID NO: 76659 - protein, 9 aa, Homo Sapiens
EQILATAVY

SEQ ID NO: 76660 - protein, 9 aa, Homo Sapiens
EQLTPGVVY

SEQ ID NO: 76661 - protein, 9 aa, Homo Sapiens
EQRAHVQEF

SEQ ID NO: 76662 - protein, 9 aa, Homo Sapiens
EQRFPVATM

SEQ ID NO: 76663 - protein, 9 aa, Homo Sapiens
EQVPQQPTY

SEQ ID NO: 76664 - protein, 9 aa, Homo Sapiens
EQWKSHRSY

SEQ ID NO: 76665 - protein, 9 aa, Homo Sapiens
EQYDAFVKF

SEQ ID NO: 76666 - protein, 9 aa, Homo Sapiens
EQYEQILAF

SEQ ID NO: 76667 - protein, 9 aa, Homo Sapiens
EQYESFVKF

SEQ ID NO: 76668 - protein, 9 aa, Homo Sapiens
EQYQKTEAY

SEQ ID NO: 76669 - protein, 9 aa, Homo Sapiens
EQYTPKAKY

SEQ ID NO: 76670 - protein, 9 aa, Homo Sapiens
ESAPVHNSF

SEQ ID NO: 76671 - protein, 9 aa, Homo Sapiens
ESRQITQVY

SEQ ID NO: 76672 - protein, 9 aa, Homo Sapiens
ESYENKEAY

SEQ ID NO: 76673 - protein, 9 aa, Homo Sapiens
EVAPAGASY

SEQ ID NO: 76674 - protein, 9 aa, Homo Sapiens
EVAPALSVF

SEQ ID NO: 76675 - protein, 9 aa, Homo Sapiens
EVAPPRLVM

SEQ ID NO: 76676 - protein, 9 aa, Homo Sapiens
EVFKERIGY

SEQ ID NO: 76677 - protein, 9 aa, Homo Sapiens
EVGPAGSQF

SEQ ID NO: 76678 - protein, 9 aa, Homo Sapiens
EVIKSQEVF

SEQ ID NO: 76679 - protein, 9 aa, Homo Sapiens
EVIPPMKEF

SEQ ID NO: 76680 - protein, 9 aa, Homo Sapiens
EVIPTHTVY

SEQ ID NO: 76681 - protein, 9 aa, Homo Sapiens
EVIPYTPAM

SEQ ID NO: 76682 - protein, 9 aa, Homo Sapiens
EVLGLILRY

SEQ ID NO: 76683 - protein, 9 aa, Homo Sapiens
EVLIHGVSY

SEQ ID NO: 76684 - protein, 9 aa, Homo Sapiens
EVLPINTQY

SEQ ID NO: 76685 - protein, 9 aa, Homo Sapiens
EVLPPIHAY

SEQ ID NO: 76686 - protein, 9 aa, Homo Sapiens
EVMPAQWEF

SEQ ID NO: 76687 - protein, 9 aa, Homo Sapiens
EVNPNTRVM

SEQ ID NO: 76688 - protein, 9 aa, Homo Sapiens
EVRKEEQRY

SEQ ID NO: 76689 - protein, 9 aa, Homo Sapiens
EVSKNLVAM

SEQ ID NO: 76690 - protein, 9 aa, Homo Sapiens
EVYAGSHQY

SEQ ID NO: 76691 - protein, 9 aa, Homo Sapiens
EVYHKSMTL

SEQ ID NO: 76692 - protein, 9 aa, Homo Sapiens
EVYVPHTVY

SEQ ID NO: 76693 - protein, 9 aa, Homo Sapiens
FAFEHSEEY

SEQ ID NO: 76694 - protein, 9 aa, Homo Sapiens
FIAPTGHSL

SEQ ID NO: 76695 - protein, 9 aa, Homo Sapiens
FIDASRLVY

SEQ ID NO: 76696 - protein, 9 aa, Homo Sapiens
FIGEFTTSY

SEQ ID NO: 76697 - protein, 9 aa, Homo Sapiens
FIGKPDMAY

SEQ ID NO: 76698 - protein, 9 aa, Homo Sapiens
FIKDGSSTY

SEQ ID NO: 76699 - protein, 9 aa, Homo Sapiens
FIMGKTIEF

SEQ ID NO: 76700 - protein, 9 aa, Homo Sapiens
FINPKPITY

SEQ ID NO: 76701 - protein, 9 aa, Homo Sapiens
FINQNLRTY

SEQ ID NO: 76702 - protein, 9 aa, Homo Sapiens
FIRGSVVRY

SEQ ID NO: 76703 - protein, 9 aa, Homo Sapiens
FIRPVDPEY

SEQ ID NO: 76704 - protein, 9 aa, Homo Sapiens
FIRVVGSEF

SEQ ID NO: 76705 - protein, 9 aa, Homo Sapiens
FIVDARPAM

SEQ ID NO: 76706 - protein, 9 aa, Homo Sapiens
FIYDSVKVY

SEQ ID NO: 76707 - protein, 9 aa, Homo Sapiens
FIYQNPHIF

SEQ ID NO: 76708 - protein, 9 aa, Homo Sapiens
FLADPVSNM

SEQ ID NO: 76709 - protein, 9 aa, Homo Sapiens
FLAPLVTEY

SEQ ID NO: 76710 - protein, 9 aa, Homo Sapiens
FLAQHGSEY

SEQ ID NO: 76711 - protein, 9 aa, Homo Sapiens
FLCESVFSY

SEQ ID NO: 76712 - protein, 9 aa, Homo Sapiens
FLCGVMKTY

SEQ ID NO: 76713 - protein, 9 aa, Homo Sapiens
FLDPRQPSY

SEQ ID NO: 76714 - protein, 9 aa, Homo Sapiens
FLEETNRLY

SEQ ID NO: 76715 - protein, 9 aa, Homo Sapiens
FLFDGSPTY

SEQ ID NO: 76716 - protein, 9 aa, Homo Sapiens
FLGPLHPSF

SEQ ID NO: 76717 - protein, 9 aa, Homo Sapiens
FLHEHKIVY

SEQ ID NO: 76718 - protein, 9 aa, Homo Sapiens
FLHESLVEY

SEQ ID NO: 76719 - protein, 9 aa, Homo Sapiens
FLIDLKTRY

SEQ ID NO: 76720 - protein, 9 aa, Homo Sapiens
FLIDRSPEY

SEQ ID NO: 76721 - protein, 9 aa, Homo Sapiens
FLKPGEKTY

SEQ ID NO: 76722 - protein, 9 aa, Homo Sapiens
FLLESGAAY

SEQ ID NO: 76723 - protein, 9 aa, Homo Sapiens
FLLNHSLEY

SEQ ID NO: 76724 - protein, 9 aa, Homo Sapiens
FLLPVINEM

SEQ ID NO: 76725 - protein, 9 aa, Homo Sapiens
FLNDSYLKY

SEQ ID NO: 76726 - protein, 9 aa, Homo Sapiens
FLNKASAVY

SEQ ID NO: 76727 - protein, 9 aa, Homo Sapiens
FLNPLISKY

SEQ ID NO: 76728 - protein, 9 aa, Homo Sapiens
FLQESNVLY

SEQ ID NO: 76729 - protein, 9 aa, Homo Sapiens
FLRTREPAL

SEQ ID NO: 76730 - protein, 9 aa, Homo Sapiens
FLRVDDESM

SEQ ID NO: 76731 - protein, 9 aa, Homo Sapiens
FLTEVTDVY

SEQ ID NO: 76732 - protein, 9 aa, Homo Sapiens
FLWCEVEKY

SEQ ID NO: 76733 - protein, 9 aa, Homo Sapiens
FLYDKALTF

SEQ ID NO: 76734 - protein, 9 aa, Homo Sapiens
FLYPFPLAL

SEQ ID NO: 76735 - protein, 9 aa, Homo Sapiens
FLYTGGIGF

SEQ ID NO: 76736 - protein, 9 aa, Homo Sapiens
FPALPGSSY

SEQ ID NO: 76737 - protein, 9 aa, Homo Sapiens
FPHKFEISF

SEQ ID NO: 76738 - protein, 9 aa, Homo Sapiens
FPHPHIHEY

SEQ ID NO: 76739 - protein, 9 aa, Homo Sapiens
FPHSAHQKY

SEQ ID NO: 76740 - protein, 9 aa, Homo Sapiens
FPSLQRLVY

SEQ ID NO: 76741 - protein, 9 aa, Homo Sapiens
FPVEIKSFY

SEQ ID NO: 76742 - protein, 9 aa, Homo Sapiens
FPYEEHLEM

SEQ ID NO: 76743 - protein, 9 aa, Homo Sapiens
FPYGTTVTY

SEQ ID NO: 76744 - protein, 9 aa, Homo Sapiens
FPYPFQVVY

SEQ ID NO: 76745 - protein, 9 aa, Homo Sapiens
FQAPTAKEM

SEQ ID NO: 76746 - protein, 9 aa, Homo Sapiens
FQFIMKQSY

SEQ ID NO: 76747 - protein, 9 aa, Homo Sapiens
FQMGPTQAY

SEQ ID NO: 76748 - protein, 9 aa, Homo Sapiens
FQTHTTPVL

SEQ ID NO: 76749 - protein, 9 aa, Homo Sapiens
FQYESKVFY

SEQ ID NO: 76750 - protein, 9 aa, Homo Sapiens
FQYSKSPSL

SEQ ID NO: 76751 - protein, 9 aa, Homo Sapiens
FVAEERVSF

SEQ ID NO: 76752 - protein, 9 aa, Homo Sapiens
FVAEQKVEY

SEQ ID NO: 76753 - protein, 9 aa, Homo Sapiens
FVAPATGAH

SEQ ID NO: 76754 - protein, 9 aa, Homo Sapiens
FVAPEIVNY

SEQ ID NO: 76755 - protein, 9 aa, Homo Sapiens
FVEVGRVAY

SEQ ID NO: 76756 - protein, 9 aa, Homo Sapiens
FVKDSGACF

SEQ ID NO: 76757 - protein, 9 aa, Homo Sapiens
FVLKEGVEY

SEQ ID NO: 76758 - protein, 9 aa, Homo Sapiens
FVNPGVVEF

SEQ ID NO: 76759 - protein, 9 aa, Homo Sapiens
FVNPHVSSF

SEQ ID NO: 76760 - protein, 9 aa, Homo Sapiens
FVRDDGSSM

SEQ ID NO: 76761 - protein, 9 aa, Homo Sapiens
FVYITDNAY

SEQ ID NO: 76762 - protein, 9 aa, Homo Sapiens
FVYKEEHPF

SEQ ID NO: 76763 - protein, 9 aa, Homo Sapiens
FVYKGGKIY

SEQ ID NO: 76764 - protein, 9 aa, Homo Sapiens
GLAAASVVM

SEQ ID NO: 76765 - protein, 9 aa, Homo Sapiens
GLASPHSQY

SEQ ID NO: 76766 - protein, 9 aa, Homo Sapiens
GLFQHQTTY

SEQ ID NO: 76767 - protein, 9 aa, Homo Sapiens
GLGPPATVM

SEQ ID NO: 76768 - protein, 9 aa, Homo Sapiens
GLNKVSPVY

SEQ ID NO: 76769 - protein, 9 aa, Homo Sapiens
GLSKPVSSY

SEQ ID NO: 76770 - protein, 9 aa, Homo Sapiens
GMYGKIAVM

SEQ ID NO: 76771 - protein, 9 aa, Homo Sapiens
GQRPTQPVY

SEQ ID NO: 76772 - protein, 9 aa, Homo Sapiens
GVAPESFEY

SEQ ID NO: 76773 - protein, 9 aa, Homo Sapiens
HAADVFEAY

SEQ ID NO: 76774 - protein, 9 aa, Homo Sapiens
HAALHLMAF

SEQ ID NO: 76775 - protein, 9 aa, Homo Sapiens
HAGPPHNEY

SEQ ID NO: 76776 - protein, 9 aa, Homo Sapiens
HAIMRSPQM

SEQ ID NO: 76777 - protein, 9 aa, Homo Sapiens
HAIPPTLAM

SEQ ID NO: 76778 - protein, 9 aa, Homo Sapiens
HAVGPSTAM

SEQ ID NO: 76779 - protein, 9 aa, Homo Sapiens
HAYIHSVQF

SEQ ID NO: 76780 - protein, 9 aa, Homo Sapiens
HCLEHLVQY

SEQ ID NO: 76781 - protein, 9 aa, Homo Sapiens
HFIRPGNAL

SEQ ID NO: 76782 - protein, 9 aa, Homo Sapiens
HGIDPTGTY

SEQ ID NO: 76783 - protein, 9 aa, Homo Sapiens
HIAENILSY

SEQ ID NO: 76784 - protein, 9 aa, Homo Sapiens
HIAIPQEAY

SEQ ID NO: 76785 - protein, 9 aa, Homo Sapiens
HIASFLSVF

SEQ ID NO: 76786 - protein, 9 aa, Homo Sapiens
HICAVVVEY

SEQ ID NO: 76787 - protein, 9 aa, Homo Sapiens
HIITGVAVF

SEQ ID NO: 76788 - protein, 9 aa, Homo Sapiens
HIKNPDWRY

SEQ ID NO: 76789 - protein, 9 aa, Homo Sapiens
HIKTETVTY

SEQ ID NO: 76790 - protein, 9 aa, Homo Sapiens
HIMEIFSTY

SEQ ID NO: 76791 - protein, 9 aa, Homo Sapiens
HIMPPQQHY

SEQ ID NO: 76792 - protein, 9 aa, Homo Sapiens
HINSIKSVF

SEQ ID NO: 76793 - protein, 9 aa, Homo Sapiens
HIRENSYSY

SEQ ID NO: 76794 - protein, 9 aa, Homo Sapiens
HIRFDEISF

SEQ ID NO: 76795 - protein, 9 aa, Homo Sapiens
HIRQELAVF

SEQ ID NO: 76796 - protein, 9 aa, Homo Sapiens
HISPVTSTY

SEQ ID NO: 76797 - protein, 9 aa, Homo Sapiens
HIYDMSTVM

SEQ ID NO: 76798 - protein, 9 aa, Homo Sapiens
HLAAHIEEY

SEQ ID NO: 76799 - protein, 9 aa, Homo Sapiens
HLAFFHQGY

SEQ ID NO: 76800 - protein, 9 aa, Homo Sapiens
HLAGTHTSL

SEQ ID NO: 76801 - protein, 9 aa, Homo Sapiens
HLANEMETY

SEQ ID NO: 76802 - protein, 9 aa, Homo Sapiens
HLAPPPLKY

SEQ ID NO: 76803 - protein, 9 aa, Homo Sapiens
HLEGKPRIL

SEQ ID NO: 76804 - protein, 9 aa, Homo Sapiens
HLFDIITQY

SEQ ID NO: 76805 - protein, 9 aa, Homo Sapiens
HLFSPGTSF

SEQ ID NO: 76806 - protein, 9 aa, Homo Sapiens
HLGDFHRTY

SEQ ID NO: 76807 - protein, 9 aa, Homo Sapiens
HLGEFVNVF

SEQ ID NO: 76808 - protein, 9 aa, Homo Sapiens
HLGVFPSYY

SEQ ID NO: 76809 - protein, 9 aa, Homo Sapiens
HLHASTTVL

SEQ ID NO: 76810 - protein, 9 aa, Homo Sapiens
HLHHGKTCF

SEQ ID NO: 76811 - protein, 9 aa, Homo Sapiens
HLHHPSVAY

SEQ ID NO: 76812 - protein, 9 aa, Homo Sapiens
HLHMETSDF

SEQ ID NO: 76813 - protein, 9 aa, Homo Sapiens
HLIERSQVF

SEQ ID NO: 76814 - protein, 9 aa, Homo Sapiens
HLIPAGSQL

SEQ ID NO: 76815 - protein, 9 aa, Homo Sapiens
HLKEDQTEY

SEQ ID NO: 76816 - protein, 9 aa, Homo Sapiens
HLKFEINAY

SEQ ID NO: 76817 - protein, 9 aa, Homo Sapiens
HLKKHGLTY

SEQ ID NO: 76818 - protein, 9 aa, Homo Sapiens
HLLEKSNIY

SEQ ID NO: 76819 - protein, 9 aa, Homo Sapiens
HLLLKSLTY

SEQ ID NO: 76820 - protein, 9 aa, Homo Sapiens
HLLPEEQVY

SEQ ID NO: 76821 - protein, 9 aa, Homo Sapiens
HLLPIQSTY

SEQ ID NO: 76822 - protein, 9 aa, Homo Sapiens
HLNPGLQLY

SEQ ID NO: 76823 - protein, 9 aa, Homo Sapiens
HLNYEHRVF

SEQ ID NO: 76824 - protein, 9 aa, Homo Sapiens
HLPPPSVAY

SEQ ID NO: 76825 - protein, 9 aa, Homo Sapiens
HLQFPGAVY

SEQ ID NO: 76826 - protein, 9 aa, Homo Sapiens
HLRDPELAL

SEQ ID NO: 76827 - protein, 9 aa, Homo Sapiens
HLRDYFEEY

SEQ ID NO: 76828 - protein, 9 aa, Homo Sapiens
HLRDYFEQY

SEQ ID NO: 76829 - protein, 9 aa, Homo Sapiens
HLRETQAQY

SEQ ID NO: 76830 - protein, 9 aa, Homo Sapiens
HLRGNEVLY

SEQ ID NO: 76831 - protein, 9 aa, Homo Sapiens
HLRNPSAAF

SEQ ID NO: 76832 - protein, 9 aa, Homo Sapiens
HLRPESHSY

SEQ ID NO: 76833 - protein, 9 aa, Homo Sapiens
HLRPRPRAY

SEQ ID NO: 76834 - protein, 9 aa, Homo Sapiens
HLSDSKNVF

SEQ ID NO: 76835 - protein, 9 aa, Homo Sapiens
HLSNDHICY

SEQ ID NO: 76836 - protein, 9 aa, Homo Sapiens
HLSSAHLAF

SEQ ID NO: 76837 - protein, 9 aa, Homo Sapiens
HLTVDARVY

SEQ ID NO: 76838 - protein, 9 aa, Homo Sapiens
HLTVHNIAY

SEQ ID NO: 76839 - protein, 9 aa, Homo Sapiens
HLVAVFNEY

SEQ ID NO: 76840 - protein, 9 aa, Homo Sapiens
HLVKLGKAY

SEQ ID NO: 76841 - protein, 9 aa, Homo Sapiens
HLVSPLTTY

SEQ ID NO: 76842 - protein, 9 aa, Homo Sapiens
HLWDWRTGY

SEQ ID NO: 76843 - protein, 9 aa, Homo Sapiens
HLYARQLTL

SEQ ID NO: 76844 - protein, 9 aa, Homo Sapiens
HLYEGDNLY

SEQ ID NO: 76845 - protein, 9 aa, Homo Sapiens
HLYETQRKY

SEQ ID NO: 76846 - protein, 9 aa, Homo Sapiens
HLYGSLLYY

SEQ ID NO: 76847 - protein, 9 aa, Homo Sapiens
HLYQNTRSY

SEQ ID NO: 76848 - protein, 9 aa, Homo Sapiens
HLYSTHAAL

SEQ ID NO: 76849 - protein, 9 aa, Homo Sapiens
HMFEAHSDY

SEQ ID NO: 76850 - protein, 9 aa, Homo Sapiens
HMHNRFVVY

SEQ ID NO: 76851 - protein, 9 aa, Homo Sapiens
HPAPPPSNY

SEQ ID NO: 76852 - protein, 9 aa, Homo Sapiens
HPILNDPIY

SEQ ID NO: 76853 - protein, 9 aa, Homo Sapiens
HPIQTQAQY

SEQ ID NO: 76854 - protein, 9 aa, Homo Sapiens
HPLTPGSHY

SEQ ID NO: 76855 - protein, 9 aa, Homo Sapiens
HPTSVISGY

SEQ ID NO: 76856 - protein, 9 aa, Homo Sapiens
HPTVVISAY

SEQ ID NO: 76857 - protein, 9 aa, Homo Sapiens
HPWGSSSSF

SEQ ID NO: 76858 - protein, 9 aa, Homo Sapiens
HQAIHTIEF

SEQ ID NO: 76859 - protein, 9 aa, Homo Sapiens
HQAIHTIEY

SEQ ID NO: 76860 - protein, 9 aa, Homo Sapiens
HQASHQPLY

SEQ ID NO: 76861 - protein, 9 aa, Homo Sapiens
HQHLSKESM

SEQ ID NO: 76862 - protein, 9 aa, Homo Sapiens
HQITVLHVY

SEQ ID NO: 76863 - protein, 9 aa, Homo Sapiens
HQMTPSSSY

SEQ ID NO: 76864 - protein, 9 aa, Homo Sapiens
HQQPPSQQY

SEQ ID NO: 76865 - protein, 9 aa, Homo Sapiens
HQYFSYNQM

SEQ ID NO: 76866 - protein, 9 aa, Homo Sapiens
HQYSIQVAF

SEQ ID NO: 76867 - protein, 9 aa, Homo Sapiens
HSAPGGPSY

SEQ ID NO: 76868 - protein, 9 aa, Homo Sapiens
HSIPSGHVY

SEQ ID NO: 76869 - protein, 9 aa, Homo Sapiens
HVANTLSVY

SEQ ID NO: 76870 - protein, 9 aa, Homo Sapiens
HVAPQQNAL

SEQ ID NO: 76871 - protein, 9 aa, Homo Sapiens
HVAPVAGQL

SEQ ID NO: 76872 - protein, 9 aa, Homo Sapiens
HVAQPDSVY

SEQ ID NO: 76873 - protein, 9 aa, Homo Sapiens
HVASVTDSF

SEQ ID NO: 76874 - protein, 9 aa, Homo Sapiens
HVCDEVNVY

SEQ ID NO: 76875 - protein, 9 aa, Homo Sapiens
HVFIGGTPL

SEQ ID NO: 76876 - protein, 9 aa, Homo Sapiens
HVGLPSVSY

SEQ ID NO: 76877 - protein, 9 aa, Homo Sapiens
HVGPFIDSY

SEQ ID NO: 76878 - protein, 9 aa, Homo Sapiens
HVGPGVLSM

SEQ ID NO: 76879 - protein, 9 aa, Homo Sapiens
HVGQAGVQM

SEQ ID NO: 76880 - protein, 9 aa, Homo Sapiens
HVHHLINEY

SEQ ID NO: 76881 - protein, 9 aa, Homo Sapiens
HVIANSGQF

SEQ ID NO: 76882 - protein, 9 aa, Homo Sapiens
HVIDVKFLY

SEQ ID NO: 76883 - protein, 9 aa, Homo Sapiens
HVIENSNAF

SEQ ID NO: 76884 - protein, 9 aa, Homo Sapiens
HVINTGNSM

SEQ ID NO: 76885 - protein, 9 aa, Homo Sapiens
HVMEHICKL

SEQ ID NO: 76886 - protein, 9 aa, Homo Sapiens
HVNGIVQKY

SEQ ID NO: 76887 - protein, 9 aa, Homo Sapiens
HVRDCVQTY

SEQ ID NO: 76888 - protein, 9 aa, Homo Sapiens
HVSGESSVF

SEQ ID NO: 76889 - protein, 9 aa, Homo Sapiens
HVSPDFKTY

SEQ ID NO: 76890 - protein, 9 aa, Homo Sapiens
HVSTVNPNY

SEQ ID NO: 76891 - protein, 9 aa, Homo Sapiens
HVTSNHVSY

SEQ ID NO: 76892 - protein, 9 aa, Homo Sapiens
HVVAASKAM

SEQ ID NO: 76893 - protein, 9 aa, Homo Sapiens
HVVAGTAGY

SEQ ID NO: 76894 - protein, 9 aa, Homo Sapiens
HVYEIPVEY

SEQ ID NO: 76895 - protein, 9 aa, Homo Sapiens
HVYHHASML

SEQ ID NO: 76896 - protein, 9 aa, Homo Sapiens
HVYPAQVQY

SEQ ID NO: 76897 - protein, 9 aa, Homo Sapiens
ICHVVGITY

SEQ ID NO: 76898 - protein, 9 aa, Homo Sapiens
IIHEGSSVY

SEQ ID NO: 76899 - protein, 9 aa, Homo Sapiens
IIREKDTEY

SEQ ID NO: 76900 - protein, 9 aa, Homo Sapiens
IIRENEFSF

SEQ ID NO: 76901 - protein, 9 aa, Homo Sapiens
IIRTGEKPY

SEQ ID NO: 76902 - protein, 9 aa, Homo Sapiens
ILAAANPAY

SEQ ID NO: 76903 - protein, 9 aa, Homo Sapiens
ILAARSPVF

SEQ ID NO: 76904 - protein, 9 aa, Homo Sapiens
ILGPPGSVY

SEQ ID NO: 76905 - protein, 9 aa, Homo Sapiens
ILHANVVVY

SEQ ID NO: 76906 - protein, 9 aa, Homo Sapiens
ILIACGTSY

SEQ ID NO: 76907 - protein, 9 aa, Homo Sapiens
ILINSGSRY

SEQ ID NO: 76908 - protein, 9 aa, Homo Sapiens
ILKPDGSLY

SEQ ID NO: 76909 - protein, 9 aa, Homo Sapiens
ILMDPSPEY

SEQ ID NO: 76910 - protein, 9 aa, Homo Sapiens
ILNPHGIPL

SEQ ID NO: 76911 - protein, 9 aa, Homo Sapiens
ILRDKEPKM

SEQ ID NO: 76912 - protein, 9 aa, Homo Sapiens
ILRETTVKY

SEQ ID NO: 76913 - protein, 9 aa, Homo Sapiens
ILRLGGIAY

SEQ ID NO: 76914 - protein, 9 aa, Homo Sapiens
ILRPEELGF

SEQ ID NO: 76915 - protein, 9 aa, Homo Sapiens
ILRPGGCLF

SEQ ID NO: 76916 - protein, 9 aa, Homo Sapiens
ILRTDNISF

SEQ ID NO: 76917 - protein, 9 aa, Homo Sapiens
ILTVGGTAY

SEQ ID NO: 76918 - protein, 9 aa, Homo Sapiens
IMKNPEVEF

SEQ ID NO: 76919 - protein, 9 aa, Homo Sapiens
IMVKPHEEY

SEQ ID NO: 76920 - protein, 9 aa, Homo Sapiens
IPAATTIAY

SEQ ID NO: 76921 - protein, 9 aa, Homo Sapiens
IPFRPSIQF

SEQ ID NO: 76922 - protein, 9 aa, Homo Sapiens
IPMTPTSSF

SEQ ID NO: 76923 - protein, 9 aa, Homo Sapiens
IPYQDRESY

SEQ ID NO: 76924 - protein, 9 aa, Homo Sapiens
IQEESLRTY

SEQ ID NO: 76925 - protein, 9 aa, Homo Sapiens
IQFEIAHAY

SEQ ID NO: 76926 - protein, 9 aa, Homo Sapiens
IQKQFEELY

SEQ ID NO: 76927 - protein, 9 aa, Homo Sapiens
IQQIFHTTY

SEQ ID NO: 76928 - protein, 9 aa, Homo Sapiens
ITARDPAIM

SEQ ID NO: 76929 - protein, 9 aa, Homo Sapiens
IVAKSSLQY

SEQ ID NO: 76930 - protein, 9 aa, Homo Sapiens
IVKKPGNIY

SEQ ID NO: 76931 - protein, 9 aa, Homo Sapiens
IVRTGESSY

SEQ ID NO: 76932 - protein, 9 aa, Homo Sapiens
IVYPGIAVF

SEQ ID NO: 76933 - protein, 9 aa, Homo Sapiens
IVYPQKAYY

SEQ ID NO: 76934 - protein, 9 aa, Homo Sapiens
KAPGSTSNL

SEQ ID NO: 76935 - protein, 9 aa, Homo Sapiens
KVRESERAF

SEQ ID NO: 76936 - protein, 9 aa, Homo Sapiens
LAYLQRIAL

SEQ ID NO: 76937 - protein, 9 aa, Homo Sapiens
LIKEKEEAF

SEQ ID NO: 76938 - protein, 9 aa, Homo Sapiens
LIKYLDPEY

SEQ ID NO: 76939 - protein, 9 aa, Homo Sapiens
LIRDKEVEF

SEQ ID NO: 76940 - protein, 9 aa, Homo Sapiens
LIRDNRVVY

SEQ ID NO: 76941 - protein, 9 aa, Homo Sapiens
LIREEKNSY

SEQ ID NO: 76942 - protein, 9 aa, Homo Sapiens
LIRPVSASF

SEQ ID NO: 76943 - protein, 9 aa, Homo Sapiens
LIYDGKVEM

SEQ ID NO: 76944 - protein, 9 aa, Homo Sapiens
LIYEHLQQY

SEQ ID NO: 76945 - protein, 9 aa, Homo Sapiens
LLADITSKY

SEQ ID NO: 76946 - protein, 9 aa, Homo Sapiens
LLADPTGAF

SEQ ID NO: 76947 - protein, 9 aa, Homo Sapiens
LLAHPDAPM

SEQ ID NO: 76948 - protein, 9 aa, Homo Sapiens
LLDDSVRVY

SEQ ID NO: 76949 - protein, 9 aa, Homo Sapiens
LLETVVRVY

SEQ ID NO: 76950 - protein, 9 aa, Homo Sapiens
LLHAFQATF

SEQ ID NO: 76951 - protein, 9 aa, Homo Sapiens
LLHASLSEY

SEQ ID NO: 76952 - protein, 9 aa, Homo Sapiens
LLKSEKSSY

SEQ ID NO: 76953 - protein, 9 aa, Homo Sapiens
LLKSPGACF

SEQ ID NO: 76954 - protein, 9 aa, Homo Sapiens
LLREEDNKY

SEQ ID NO: 76955 - protein, 9 aa, Homo Sapiens
LLREELQAY

SEQ ID NO: 76956 - protein, 9 aa, Homo Sapiens
LLREENEGY

SEQ ID NO: 76957 - protein, 9 aa, Homo Sapiens
LLRFADNTF

SEQ ID NO: 76958 - protein, 9 aa, Homo Sapiens
LLTDIIAAY

SEQ ID NO: 76959 - protein, 9 aa, Homo Sapiens
LLTKNGHVY

SEQ ID NO: 76960 - protein, 9 aa, Homo Sapiens
LLYDTQQSF

SEQ ID NO: 76961 - protein, 9 aa, Homo Sapiens
LLYTTPTTY

SEQ ID NO: 76962 - protein, 9 aa, Homo Sapiens
LPFDKETGF

SEQ ID NO: 76963 - protein, 9 aa, Homo Sapiens
LPFEGKCYY

SEQ ID NO: 76964 - protein, 9 aa, Homo Sapiens
LPREGEQNF

SEQ ID NO: 76965 - protein, 9 aa, Homo Sapiens
LPYAGDVSM

SEQ ID NO: 76966 - protein, 9 aa, Homo Sapiens
LPYNHQHEY

SEQ ID NO: 76967 - protein, 9 aa, Homo Sapiens
LPYQGHNSF

SEQ ID NO: 76968 - protein, 9 aa, Homo Sapiens
LPYTVVIHY

SEQ ID NO: 76969 - protein, 9 aa, Homo Sapiens
LQALFKEAY

SEQ ID NO: 76970 - protein, 9 aa, Homo Sapiens
LQAVFVQSY

SEQ ID NO: 76971 - protein, 9 aa, Homo Sapiens
LQQVDTSTR

SEQ ID NO: 76972 - protein, 9 aa, Homo Sapiens
LQRLENTQY

SEQ ID NO: 76973 - protein, 9 aa, Homo Sapiens
LQYSGKTTF

SEQ ID NO: 76974 - protein, 9 aa, Homo Sapiens
LSGNNVVEY

SEQ ID NO: 76975 - protein, 9 aa, Homo Sapiens
LSVGSPSVL

SEQ ID NO: 76976 - protein, 9 aa, Homo Sapiens
LTVGNNKTL

SEQ ID NO: 76977 - protein, 9 aa, Homo Sapiens
LVRELEKKF

SEQ ID NO: 76978 - protein, 9 aa, Homo Sapiens
LVYNGVYQY

SEQ ID NO: 76979 - protein, 9 aa, Homo Sapiens
MAAMPQTVY

SEQ ID NO: 76980 - protein, 9 aa, Homo Sapiens
MAHSFGESY

SEQ ID NO: 76981 - protein, 9 aa, Homo Sapiens
MARDEKNYY

SEQ ID NO: 76982 - protein, 9 aa, Homo Sapiens
MARSPGRAY

SEQ ID NO: 76983 - protein, 9 aa, Homo Sapiens
MARYEREQY

SEQ ID NO: 76984 - protein, 9 aa, Homo Sapiens
MAWLVDHVY

SEQ ID NO: 76985 - protein, 9 aa, Homo Sapiens
MAYETLEQY

SEQ ID NO: 76986 - protein, 9 aa, Homo Sapiens
MIAEPAHFY

SEQ ID NO: 76987 - protein, 9 aa, Homo Sapiens
MIASHLLAY

SEQ ID NO: 76988 - protein, 9 aa, Homo Sapiens
MLAETSTVF

SEQ ID NO: 76989 - protein, 9 aa, Homo Sapiens
MLAGATAVY

SEQ ID NO: 76990 - protein, 9 aa, Homo Sapiens
MLAPLSTTY

SEQ ID NO: 76991 - protein, 9 aa, Homo Sapiens
MLAPPRELF

SEQ ID NO: 76992 - protein, 9 aa, Homo Sapiens
MLFNLGSAY

SEQ ID NO: 76993 - protein, 9 aa, Homo Sapiens
MLKIAEMEY

SEQ ID NO: 76994 - protein, 9 aa, Homo Sapiens
MLLDPVRSY

SEQ ID NO: 76995 - protein, 9 aa, Homo Sapiens
MLRATGKAY

SEQ ID NO: 76996 - protein, 9 aa, Homo Sapiens
MLRDIIREY

SEQ ID NO: 76997 - protein, 9 aa, Homo Sapiens
MLYDTSILY

SEQ ID NO: 76998 - protein, 9 aa, Homo Sapiens
MLYGTITEF

SEQ ID NO: 76999 - protein, 9 aa, Homo Sapiens
MLYKGQTAY

SEQ ID NO: 77000 - protein, 9 aa, Homo Sapiens
MLYPLSHGF

SEQ ID NO: 77001 - protein, 9 aa, Homo Sapiens
MLYTIHNTY

SEQ ID NO: 77002 - protein, 9 aa, Homo Sapiens
MLYYQTEKY

SEQ ID NO: 77003 - protein, 9 aa, Homo Sapiens
MMAGPMAAF

SEQ ID NO: 77004 - protein, 9 aa, Homo Sapiens
MMDQARSAF

SEQ ID NO: 77005 - protein, 9 aa, Homo Sapiens
MMIPSQISY

SEQ ID NO: 77006 - protein, 9 aa, Homo Sapiens
MMKTEGPSY

SEQ ID NO: 77007 - protein, 9 aa, Homo Sapiens
MMYSGELKF

SEQ ID NO: 77008 - protein, 9 aa, Homo Sapiens
MPAAGGVLY

SEQ ID NO: 77009 - protein, 9 aa, Homo Sapiens
MPAPEIVSY

SEQ ID NO: 77010 - protein, 9 aa, Homo Sapiens
MPAVKAIIY

SEQ ID NO: 77011 - protein, 9 aa, Homo Sapiens
MPEPASRCL

SEQ ID NO: 77012 - protein, 9 aa, Homo Sapiens
MPFPAHLTY

SEQ ID NO: 77013 - protein, 9 aa, Homo Sapiens
MPHNYSRCY

SEQ ID NO: 77014 - protein, 9 aa, Homo Sapiens
MPMGPDQKY

SEQ ID NO: 77015 - protein, 9 aa, Homo Sapiens
MPQFSTIEY

SEQ ID NO: 77016 - protein, 9 aa, Homo Sapiens
MPRLEVQSF

SEQ ID NO: 77017 - protein, 9 aa, Homo Sapiens
MPRVQTQQY

SEQ ID NO: 77018 - protein, 9 aa, Homo Sapiens
MPYLEHESF

SEQ ID NO: 77019 - protein, 9 aa, Homo Sapiens
MPYNHQHKY

SEQ ID NO: 77020 - protein, 9 aa, Homo Sapiens
MPYSHPSSY

SEQ ID NO: 77021 - protein, 9 aa, Homo Sapiens
MQHIFLNNY

SEQ ID NO: 77022 - protein, 9 aa, Homo Sapiens
MQIVHKITL

SEQ ID NO: 77023 - protein, 9 aa, Homo Sapiens
MQLPNGVTY

SEQ ID NO: 77024 - protein, 9 aa, Homo Sapiens
MQNPNAIIL

SEQ ID NO: 77025 - protein, 9 aa, Homo Sapiens
MQREPNQAF

SEQ ID NO: 77026 - protein, 9 aa, Homo Sapiens
MVADRVEVY

SEQ ID NO: 77027 - protein, 9 aa, Homo Sapiens
MVAKVGVSM

SEQ ID NO: 77028 - protein, 9 aa, Homo Sapiens
MVASMRLAY

SEQ ID NO: 77029 - protein, 9 aa, Homo Sapiens
MVHSEVAAY

SEQ ID NO: 77030 - protein, 9 aa, Homo Sapiens
MVIRPHKSF

SEQ ID NO: 77031 - protein, 9 aa, Homo Sapiens
MVMEIRNAY

SEQ ID NO: 77032 - protein, 9 aa, Homo Sapiens
MVRFGEYQF

SEQ ID NO: 77033 - protein, 9 aa, Homo Sapiens
MVSEAGTGF

SEQ ID NO: 77034 - protein, 9 aa, Homo Sapiens
MVTKPVQEY

SEQ ID NO: 77035 - protein, 9 aa, Homo Sapiens
MVVEERCVY

SEQ ID NO: 77036 - protein, 9 aa, Homo Sapiens
MVVGTGTSL

SEQ ID NO: 77037 - protein, 9 aa, Homo Sapiens
NAAFPFLAY

SEQ ID NO: 77038 - protein, 9 aa, Homo Sapiens
NAAPPPVTY

SEQ ID NO: 77039 - protein, 9 aa, Homo Sapiens
NAAPSHTKF

SEQ ID NO: 77040 - protein, 9 aa, Homo Sapiens
NAFEELVAF

SEQ ID NO: 77041 - protein, 9 aa, Homo Sapiens
NAHEFITSF

SEQ ID NO: 77042 - protein, 9 aa, Homo Sapiens
NAISVTTSY

SEQ ID NO: 77043 - protein, 9 aa, Homo Sapiens
NIAGDGSVF

SEQ ID NO: 77044 - protein, 9 aa, Homo Sapiens
NIEEAVRLY

SEQ ID NO: 77045 - protein, 9 aa, Homo Sapiens
NIFSEVRVY

SEQ ID NO: 77046 - protein, 9 aa, Homo Sapiens
NIHSGDRPY

SEQ ID NO: 77047 - protein, 9 aa, Homo Sapiens
NIKTGGRVY

SEQ ID NO: 77048 - protein, 9 aa, Homo Sapiens
NINVPSSVY

SEQ ID NO: 77049 - protein, 9 aa, Homo Sapiens
NIRDIDKAL

SEQ ID NO: 77050 - protein, 9 aa, Homo Sapiens
NIREIEIDY

SEQ ID NO: 77051 - protein, 9 aa, Homo Sapiens
NIREVGFEY

SEQ ID NO: 77052 - protein, 9 aa, Homo Sapiens
NIRPADSRW

SEQ ID NO: 77053 - protein, 9 aa, Homo Sapiens
NIVDKTASF

SEQ ID NO: 77054 - protein, 9 aa, Homo Sapiens
NIVHATQLY

SEQ ID NO: 77055 - protein, 9 aa, Homo Sapiens
NIYKEIENY

SEQ ID NO: 77056 - protein, 9 aa, Homo Sapiens
NLAEALLTY

SEQ ID NO: 77057 - protein, 9 aa, Homo Sapiens
NLAPKSTAM

SEQ ID NO: 77058 - protein, 9 aa, Homo Sapiens
NLAVHQECY

SEQ ID NO: 77059 - protein, 9 aa, Homo Sapiens
NLAVSNHVF

SEQ ID NO: 77060 - protein, 9 aa, Homo Sapiens
NLCTEIVEY

SEQ ID NO: 77061 - protein, 9 aa, Homo Sapiens
NLFKTNHVF

SEQ ID NO: 77062 - protein, 9 aa, Homo Sapiens
NLHSGARPY

SEQ ID NO: 77063 - protein, 9 aa, Homo Sapiens
NLHSSSSTF

SEQ ID NO: 77064 - protein, 9 aa, Homo Sapiens
NLIGPGHSF

SEQ ID NO: 77065 - protein, 9 aa, Homo Sapiens
NLKAPSRHY

SEQ ID NO: 77066 - protein, 9 aa, Homo Sapiens
NLKKSDRYY

SEQ ID NO: 77067 - protein, 9 aa, Homo Sapiens
NLLDPGSSY

SEQ ID NO: 77068 - protein, 9 aa, Homo Sapiens
NLLEKQLEY

SEQ ID NO: 77069 - protein, 9 aa, Homo Sapiens
NLLKEVRIY

SEQ ID NO: 77070 - protein, 9 aa, Homo Sapiens
NLLSQSHAY

SEQ ID NO: 77071 - protein, 9 aa, Homo Sapiens
NLMELTQIY

SEQ ID NO: 77072 - protein, 9 aa, Homo Sapiens
NLPEETNEM

SEQ ID NO: 77073 - protein, 9 aa, Homo Sapiens
NLRHLDLAY

SEQ ID NO: 77074 - protein, 9 aa, Homo Sapiens
NLRPVGEDF

SEQ ID NO: 77075 - protein, 9 aa, Homo Sapiens
NLSEIHVAF

SEQ ID NO: 77076 - protein, 9 aa, Homo Sapiens
NLVKHAEVY

SEQ ID NO: 77077 - protein, 9 aa, Homo Sapiens
NLVVSGKVY

SEQ ID NO: 77078 - protein, 9 aa, Homo Sapiens
NLYDHELVF

SEQ ID NO: 77079 - protein, 9 aa, Homo Sapiens
NLYPGNEGY

SEQ ID NO: 77080 - protein, 9 aa, Homo Sapiens
NLYPHRTAF

SEQ ID NO: 77081 - protein, 9 aa, Homo Sapiens
NLYQNCIRY

SEQ ID NO: 77082 - protein, 9 aa, Homo Sapiens
NLYRQLISY

SEQ ID NO: 77083 - protein, 9 aa, Homo Sapiens
NMANIREYY

SEQ ID NO: 77084 - protein, 9 aa, Homo Sapiens
NMNDLVSEY

SEQ ID NO: 77085 - protein, 9 aa, Homo Sapiens
NMWNTGSTY

SEQ ID NO: 77086 - protein, 9 aa, Homo Sapiens
NMYKGGQYY

SEQ ID NO: 77087 - protein, 9 aa, Homo Sapiens
NMYSSILTM

SEQ ID NO: 77088 - protein, 9 aa, Homo Sapiens
NPNSPSITY

SEQ ID NO: 77089 - protein, 9 aa, Homo Sapiens
NPYDRGSAF

SEQ ID NO: 77090 - protein, 9 aa, Homo Sapiens
NQHAYPTAY

SEQ ID NO: 77091 - protein, 9 aa, Homo Sapiens
NQHGIILKY

SEQ ID NO: 77092 - protein, 9 aa, Homo Sapiens
NQIESKAAY

SEQ ID NO: 77093 - protein, 9 aa, Homo Sapiens
NQIPFIIQY

SEQ ID NO: 77094 - protein, 9 aa, Homo Sapiens
NQIRPGLQY

SEQ ID NO: 77095 - protein, 9 aa, Homo Sapiens
NQKPPSAEF

SEQ ID NO: 77096 - protein, 9 aa, Homo Sapiens
NQKPPSAEY

SEQ ID NO: 77097 - protein, 9 aa, Homo Sapiens
NQLKPGLQY

SEQ ID NO: 77098 - protein, 9 aa, Homo Sapiens
NQRLAYVTY

SEQ ID NO: 77099 - protein, 9 aa, Homo Sapiens
NQVIFPVSY

SEQ ID NO: 77100 - protein, 9 aa, Homo Sapiens
NQVQSGRAF

SEQ ID NO: 77101 - protein, 9 aa, Homo Sapiens
NQWEALTEY

SEQ ID NO: 77102 - protein, 9 aa, Homo Sapiens
NQYISQQEY

SEQ ID NO: 77103 - protein, 9 aa, Homo Sapiens
NSAPEHISY

SEQ ID NO: 77104 - protein, 9 aa, Homo Sapiens
NTHRHLTEF

SEQ ID NO: 77105 - protein, 9 aa, Homo Sapiens
NTIDPSHPM

SEQ ID NO: 77106 - protein, 9 aa, Homo Sapiens
NVACPGTAL

SEQ ID NO: 77107 - protein, 9 aa, Homo Sapiens
NVADLHEKY

SEQ ID NO: 77108 - protein, 9 aa, Homo Sapiens
NVAEKGPAY

SEQ ID NO: 77109 - protein, 9 aa, Homo Sapiens
NVAPYDPHF

SEQ ID NO: 77110 - protein, 9 aa, Homo Sapiens
NVAVPSHLY

SEQ ID NO: 77111 - protein, 9 aa, Homo Sapiens
NVFGVCHIF

SEQ ID NO: 77112 - protein, 9 aa, Homo Sapiens
NVHSFFSAF

SEQ ID NO: 77113 - protein, 9 aa, Homo Sapiens
NVIATETSY

SEQ ID NO: 77114 - protein, 9 aa, Homo Sapiens
NVIHNLATY

SEQ ID NO: 77115 - protein, 9 aa, Homo Sapiens
NVIRDAVTY

SEQ ID NO: 77116 - protein, 9 aa, Homo Sapiens
NVRCESEVF

SEQ ID NO: 77117 - protein, 9 aa, Homo Sapiens
NVRSEEQVF

SEQ ID NO: 77118 - protein, 9 aa, Homo Sapiens
NVSSPHREF

SEQ ID NO: 77119 - protein, 9 aa, Homo Sapiens
NVVKTGRVM

SEQ ID NO: 77120 - protein, 9 aa, Homo Sapiens
NVYCGVHRY

SEQ ID NO: 77121 - protein, 9 aa, Homo Sapiens
NVYDFKTTY

SEQ ID NO: 77122 - protein, 9 aa, Homo Sapiens
QARIEIESF

SEQ ID NO: 77123 - protein, 9 aa, Homo Sapiens
QERPSVTSY

SEQ ID NO: 77124 - protein, 9 aa, Homo Sapiens
QIAEFKEAF

SEQ ID NO: 77125 - protein, 9 aa, Homo Sapiens
QIALPSGCY

SEQ ID NO: 77126 - protein, 9 aa, Homo Sapiens
QIGPVAGVM

SEQ ID NO: 77127 - protein, 9 aa, Homo Sapiens
QIRELEAEF

SEQ ID NO: 77128 - protein, 9 aa, Homo Sapiens
QIYQQLSRY

SEQ ID NO: 77129 - protein, 9 aa, Homo Sapiens
QLGPVGGVF

SEQ ID NO: 77130 - protein, 9 aa, Homo Sapiens
QLIDLAEEY

SEQ ID NO: 77131 - protein, 9 aa, Homo Sapiens
QLIRCIVEY

SEQ ID NO: 77132 - protein, 9 aa, Homo Sapiens
QLPKPTSTY

SEQ ID NO: 77133 - protein, 9 aa, Homo Sapiens
QLRAQILAY

SEQ ID NO: 77134 - protein, 9 aa, Homo Sapiens
QLRPEFEAM

SEQ ID NO: 77135 - protein, 9 aa, Homo Sapiens
QLTGQTPVF

SEQ ID NO: 77136 - protein, 9 aa, Homo Sapiens
QLVTGGESF

SEQ ID NO: 77137 - protein, 9 aa, Homo Sapiens
QLYEGKEQM

SEQ ID NO: 77138 - protein, 9 aa, Homo Sapiens
QLYEQVVKF

SEQ ID NO: 77139 - protein, 9 aa, Homo Sapiens
QLYKMRNGY

SEQ ID NO: 77140 - protein, 9 aa, Homo Sapiens
QLYQQSRAY

SEQ ID NO: 77141 - protein, 9 aa, Homo Sapiens
QMWISKQEY

SEQ ID NO: 77142 - protein, 9 aa, Homo Sapiens
QMYRTEIRM

SEQ ID NO: 77143 - protein, 9 aa, Homo Sapiens
QPIVWITPY

SEQ ID NO: 77144 - protein, 9 aa, Homo Sapiens
QQALHTVQY

SEQ ID NO: 77145 - protein, 9 aa, Homo Sapiens
QQEERKRLY

SEQ ID NO: 77146 - protein, 9 aa, Homo Sapiens
QQNDQQLVY

SEQ ID NO: 77147 - protein, 9 aa, Homo Sapiens
QQNPQPLIF

SEQ ID NO: 77148 - protein, 9 aa, Homo Sapiens
QVAPLTHVF

SEQ ID NO: 77149 - protein, 9 aa, Homo Sapiens
QVAPSLSAL

SEQ ID NO: 77150 - protein, 9 aa, Homo Sapiens
QVAPVANSY

SEQ ID NO: 77151 - protein, 9 aa, Homo Sapiens
QVFEGHTHY

SEQ ID NO: 77152 - protein, 9 aa, Homo Sapiens
QVKPNDQHF

SEQ ID NO: 77153 - protein, 9 aa, Homo Sapiens
QVSPATQQM

SEQ ID NO: 77154 - protein, 9 aa, Homo Sapiens
QVVFSGKAY

SEQ ID NO: 77155 - protein, 9 aa, Homo Sapiens
QVVLLNTSY

SEQ ID NO: 77156 - protein, 9 aa, Homo Sapiens
QVVPAGLAF

SEQ ID NO: 77157 - protein, 9 aa, Homo Sapiens
QVYEGERAM

SEQ ID NO: 77158 - protein, 9 aa, Homo Sapiens
QVYETLLTY

SEQ ID NO: 77159 - protein, 9 aa, Homo Sapiens
QVYGGVTYY

SEQ ID NO: 77160 - protein, 9 aa, Homo Sapiens
RAYQQSEAY

SEQ ID NO: 77161 - protein, 9 aa, Homo Sapiens
RIAPAFSSM

SEQ ID NO: 77162 - protein, 9 aa, Homo Sapiens
RLKDRDPEF

SEQ ID NO: 77163 - protein, 9 aa, Homo Sapiens
RLQEFLTAY

SEQ ID NO: 77164 - protein, 9 aa, Homo Sapiens
RLYFSQQTY

SEQ ID NO: 77165 - protein, 9 aa, Homo Sapiens
RPREIINTY

SEQ ID NO: 77166 - protein, 9 aa, Homo Sapiens
RVAPAHGLF

SEQ ID NO: 77167 - protein, 9 aa, Homo Sapiens
SAAQPGVAF

SEQ ID NO: 77168 - protein, 9 aa, Homo Sapiens
SALEHSIQY

SEQ ID NO: 77169 - protein, 9 aa, Homo Sapiens
SALPTVVAY

SEQ ID NO: 77170 - protein, 9 aa, Homo Sapiens
SARAGETRF

SEQ ID NO: 77171 - protein, 9 aa, Homo Sapiens
SAYAQIVQF

SEQ ID NO: 77172 - protein, 9 aa, Homo Sapiens
SAYGSVKAY

SEQ ID NO: 77173 - protein, 9 aa, Homo Sapiens
SHLTHSSTF

SEQ ID NO: 77174 - protein, 9 aa, Homo Sapiens
SIAHGTPVM

SEQ ID NO: 77175 - protein, 9 aa, Homo Sapiens
SIAPFHICY

SEQ ID NO: 77176 - protein, 9 aa, Homo Sapiens
SIFEHKIVF

SEQ ID NO: 77177 - protein, 9 aa, Homo Sapiens
SIFKHEIPY

SEQ ID NO: 77178 - protein, 9 aa, Homo Sapiens
SILEKTSAY

SEQ ID NO: 77179 - protein, 9 aa, Homo Sapiens
SIMEHNVAY

SEQ ID NO: 77180 - protein, 9 aa, Homo Sapiens
SIMEHNVSY

SEQ ID NO: 77181 - protein, 9 aa, Homo Sapiens
SIRDGVRAY

SEQ ID NO: 77182 - protein, 9 aa, Homo Sapiens
SIREAGGAF

SEQ ID NO: 77183 - protein, 9 aa, Homo Sapiens
SISGVTAAY

SEQ ID NO: 77184 - protein, 9 aa, Homo Sapiens
SISKALVAY

SEQ ID NO: 77185 - protein, 9 aa, Homo Sapiens
SIYEASSLY

SEQ ID NO: 77186 - protein, 9 aa, Homo Sapiens
SIYEGDESF

SEQ ID NO: 77187 - protein, 9 aa, Homo Sapiens
SIYWTAVTY

SEQ ID NO: 77188 - protein, 9 aa, Homo Sapiens
SLADLKSLY

SEQ ID NO: 77189 - protein, 9 aa, Homo Sapiens
SLAEPGSAY

SEQ ID NO: 77190 - protein, 9 aa, Homo Sapiens
SLAGPVVSM

SEQ ID NO: 77191 - protein, 9 aa, Homo Sapiens
SLAHAGVAL

SEQ ID NO: 77192 - protein, 9 aa, Homo Sapiens
SLAPPHHPM

SEQ ID NO: 77193 - protein, 9 aa, Homo Sapiens
SLARPGHPM

SEQ ID NO: 77194 - protein, 9 aa, Homo Sapiens
SLATPATHY

SEQ ID NO: 77195 - protein, 9 aa, Homo Sapiens
SLAYLVNTY

SEQ ID NO: 77196 - protein, 9 aa, Homo Sapiens
SLCTKSVSY

SEQ ID NO: 77197 - protein, 9 aa, Homo Sapiens
SLDAPHSTY

SEQ ID NO: 77198 - protein, 9 aa, Homo Sapiens
SLDIKSVSY

SEQ ID NO: 77199 - protein, 9 aa, Homo Sapiens
SLELLSSHY

SEQ ID NO: 77200 - protein, 9 aa, Homo Sapiens
SLFASRTLF

SEQ ID NO: 77201 - protein, 9 aa, Homo Sapiens
SLFDNPRTF

SEQ ID NO: 77202 - protein, 9 aa, Homo Sapiens
SLFHAQLAY

SEQ ID NO: 77203 - protein, 9 aa, Homo Sapiens
SLFINTSSY

SEQ ID NO: 77204 - protein, 9 aa, Homo Sapiens
SLFKSLSRY

SEQ ID NO: 77205 - protein, 9 aa, Homo Sapiens
SLFPHHGTF

SEQ ID NO: 77206 - protein, 9 aa, Homo Sapiens
SLFVPFTVY

SEQ ID NO: 77207 - protein, 9 aa, Homo Sapiens
SLFVSNHAY

SEQ ID NO: 77208 - protein, 9 aa, Homo Sapiens
SLGQPHIAY

SEQ ID NO: 77209 - protein, 9 aa, Homo Sapiens
SLHDISTEM

SEQ ID NO: 77210 - protein, 9 aa, Homo Sapiens
SLIQAGQQF

SEQ ID NO: 77211 - protein, 9 aa, Homo Sapiens
SLKGVDPKF

SEQ ID NO: 77212 - protein, 9 aa, Homo Sapiens
SLLEHIMIY

SEQ ID NO: 77213 - protein, 9 aa, Homo Sapiens
SLLERLLTY

SEQ ID NO: 77214 - protein, 9 aa, Homo Sapiens
SLLRPGHSF

SEQ ID NO: 77215 - protein, 9 aa, Homo Sapiens
SLLVSVLEY

SEQ ID NO: 77216 - protein, 9 aa, Homo Sapiens
SLRDKDLEM

SEQ ID NO: 77217 - protein, 9 aa, Homo Sapiens
SLREDQQSF

SEQ ID NO: 77218 - protein, 9 aa, Homo Sapiens
SLRERDAAL

SEQ ID NO: 77219 - protein, 9 aa, Homo Sapiens
SLRFIDVEF

SEQ ID NO: 77220 - protein, 9 aa, Homo Sapiens
SLRHVDASF

SEQ ID NO: 77221 - protein, 9 aa, Homo Sapiens
SLRKELSHY

SEQ ID NO: 77222 - protein, 9 aa, Homo Sapiens
SLRPLDIEF

SEQ ID NO: 77223 - protein, 9 aa, Homo Sapiens
SLRQVVNVY

SEQ ID NO: 77224 - protein, 9 aa, Homo Sapiens
SLSPFAITY

SEQ ID NO: 77225 - protein, 9 aa, Homo Sapiens
SLSVKSSVY

SEQ ID NO: 77226 - protein, 9 aa, Homo Sapiens
SLVEVNPAY

SEQ ID NO: 77227 - protein, 9 aa, Homo Sapiens
SLVGITSAY

SEQ ID NO: 77228 - protein, 9 aa, Homo Sapiens
SLVGPTQSF

SEQ ID NO: 77229 - protein, 9 aa, Homo Sapiens
SLVKPSVDY

SEQ ID NO: 77230 - protein, 9 aa, Homo Sapiens
SLVQPQSQY

SEQ ID NO: 77231 - protein, 9 aa, Homo Sapiens
SLYDRIVLF

SEQ ID NO: 77232 - protein, 9 aa, Homo Sapiens
SLYEDDITF

SEQ ID NO: 77233 - protein, 9 aa, Homo Sapiens
SLYIANHAY

SEQ ID NO: 77234 - protein, 9 aa, Homo Sapiens
SLYKTHPQY

SEQ ID NO: 77235 - protein, 9 aa, Homo Sapiens
SLYSKGLVF

SEQ ID NO: 77236 - protein, 9 aa, Homo Sapiens
SMHLQLTCF

SEQ ID NO: 77237 - protein, 9 aa, Homo Sapiens
SMRKTFARY

SEQ ID NO: 77238 - protein, 9 aa, Homo Sapiens
SMRQPDLKY

SEQ ID NO: 77239 - protein, 9 aa, Homo Sapiens
SMRSPELAL

SEQ ID NO: 77240 - protein, 9 aa, Homo Sapiens
SMSDPGVSY

SEQ ID NO: 77241 - protein, 9 aa, Homo Sapiens
SMYDKVLML

SEQ ID NO: 77242 - protein, 9 aa, Homo Sapiens
SPFLTITSM

SEQ ID NO: 77243 - protein, 9 aa, Homo Sapiens
SPFQPHVPY

SEQ ID NO: 77244 - protein, 9 aa, Homo Sapiens
SQARLLTSF

SEQ ID NO: 77245 - protein, 9 aa, Homo Sapiens
SQATPHSSY

SEQ ID NO: 77246 - protein, 9 aa, Homo Sapiens
SQFGGGSQY

SEQ ID NO: 77247 - protein, 9 aa, Homo Sapiens
SQFGTVTRF

SEQ ID NO: 77248 - protein, 9 aa, Homo Sapiens
SQFIFEHSY

SEQ ID NO: 77249 - protein, 9 aa, Homo Sapiens
SQFKGYFIF

SEQ ID NO: 77250 - protein, 9 aa, Homo Sapiens
SQHQETPVY

SEQ ID NO: 77251 - protein, 9 aa, Homo Sapiens
SQIEEHKVF

SEQ ID NO: 77252 - protein, 9 aa, Homo Sapiens
SQKVSGPQY

SEQ ID NO: 77253 - protein, 9 aa, Homo Sapiens
SQLHARPSY

SEQ ID NO: 77254 - protein, 9 aa, Homo Sapiens
SQLPPLTAF

SEQ ID NO: 77255 - protein, 9 aa, Homo Sapiens
SQLVAGVAF

SEQ ID NO: 77256 - protein, 9 aa, Homo Sapiens
SQRLESVSF

SEQ ID NO: 77257 - protein, 9 aa, Homo Sapiens
SQRPAARAF

SEQ ID NO: 77258 - protein, 9 aa, Homo Sapiens
SQTEVSSEY

SEQ ID NO: 77259 - protein, 9 aa, Homo Sapiens
SQTNPGSQF

SEQ ID NO: 77260 - protein, 9 aa, Homo Sapiens
SQVPRSSSM

SEQ ID NO: 77261 - protein, 9 aa, Homo Sapiens
SQYDNCLTY

SEQ ID NO: 77262 - protein, 9 aa, Homo Sapiens
SQYPFPVTL

SEQ ID NO: 77263 - protein, 9 aa, Homo Sapiens
SQYQGVVVY

SEQ ID NO: 77264 - protein, 9 aa, Homo Sapiens
STKPADMKY

SEQ ID NO: 77265 - protein, 9 aa, Homo Sapiens
SVADIRNAY

SEQ ID NO: 77266 - protein, 9 aa, Homo Sapiens
SVAGHVEVY

SEQ ID NO: 77267 - protein, 9 aa, Homo Sapiens
SVAKESIPL

SEQ ID NO: 77268 - protein, 9 aa, Homo Sapiens
SVFCGTSTY

SEQ ID NO: 77269 - protein, 9 aa, Homo Sapiens
SVFGTHQAF

SEQ ID NO: 77270 - protein, 9 aa, Homo Sapiens
SVHNAGISF

SEQ ID NO: 77271 - protein, 9 aa, Homo Sapiens
SVHQPGSHY

SEQ ID NO: 77272 - protein, 9 aa, Homo Sapiens
SVHSPSTSM

SEQ ID NO: 77273 - protein, 9 aa, Homo Sapiens
SVIATIQEY

SEQ ID NO: 77274 - protein, 9 aa, Homo Sapiens
SVIEQILHY

SEQ ID NO: 77275 - protein, 9 aa, Homo Sapiens
SVIESHTEF

SEQ ID NO: 77276 - protein, 9 aa, Homo Sapiens
SVIGASSQF

SEQ ID NO: 77277 - protein, 9 aa, Homo Sapiens
SVINPGAIY

SEQ ID NO: 77278 - protein, 9 aa, Homo Sapiens
SVKASSVVY

SEQ ID NO: 77279 - protein, 9 aa, Homo Sapiens
SVKDGAICY

SEQ ID NO: 77280 - protein, 9 aa, Homo Sapiens
SVKDPSPLY

SEQ ID NO: 77281 - protein, 9 aa, Homo Sapiens
SVKPASSSF

SEQ ID NO: 77282 - protein, 9 aa, Homo Sapiens
SVMTLVSTY

SEQ ID NO: 77283 - protein, 9 aa, Homo Sapiens
SVNTPTKTY

SEQ ID NO: 77284 - protein, 9 aa, Homo Sapiens
SVQGAGTSY

SEQ ID NO: 77285 - protein, 9 aa, Homo Sapiens
SVREWEMQF

SEQ ID NO: 77286 - protein, 9 aa, Homo Sapiens
SVRIADKKY

SEQ ID NO: 77287 - protein, 9 aa, Homo Sapiens
SVRKDIESY

SEQ ID NO: 77288 - protein, 9 aa, Homo Sapiens
SVSHPMPTM

SEQ ID NO: 77289 - protein, 9 aa, Homo Sapiens
SVVDISQQY

SEQ ID NO: 77290 - protein, 9 aa, Homo Sapiens
SVVGAISSY

SEQ ID NO: 77291 - protein, 9 aa, Homo Sapiens
SVVSTGTSF

SEQ ID NO: 77292 - protein, 9 aa, Homo Sapiens
SVYDGAVGY

SEQ ID NO: 77293 - protein, 9 aa, Homo Sapiens
SVYDHQGIF

SEQ ID NO: 77294 - protein, 9 aa, Homo Sapiens
SVYEGGVFF

SEQ ID NO: 77295 - protein, 9 aa, Homo Sapiens
SVYETQTKY

SEQ ID NO: 77296 - protein, 9 aa, Homo Sapiens
SVYHPQLAY

SEQ ID NO: 77297 - protein, 9 aa, Homo Sapiens
SVYLHPNSY

SEQ ID NO: 77298 - protein, 9 aa, Homo Sapiens
SVYRTVIEY

SEQ ID NO: 77299 - protein, 9 aa, Homo Sapiens
TAAAVGAVF

SEQ ID NO: 77300 - protein, 9 aa, Homo Sapiens
TAAPPAQPL

SEQ ID NO: 77301 - protein, 9 aa, Homo Sapiens
TAHIHATEY

SEQ ID NO: 77302 - protein, 9 aa, Homo Sapiens
TAHLNVNSF

SEQ ID NO: 77303 - protein, 9 aa, Homo Sapiens
TALPTRIAY

SEQ ID NO: 77304 - protein, 9 aa, Homo Sapiens
TARVITNQY

SEQ ID NO: 77305 - protein, 9 aa, Homo Sapiens
TAWEVRAVY

SEQ ID NO: 77306 - protein, 9 aa, Homo Sapiens
TAYPGQTQY

SEQ ID NO: 77307 - protein, 9 aa, Homo Sapiens
TCNVHKSAF

SEQ ID NO: 77308 - protein, 9 aa, Homo Sapiens
TEREPDQTF

SEQ ID NO: 77309 - protein, 9 aa, Homo Sapiens
TFMDHVLRY

SEQ ID NO: 77310 - protein, 9 aa, Homo Sapiens
TFMEQKITY

SEQ ID NO: 77311 - protein, 9 aa, Homo Sapiens
TFNEPGSEY

SEQ ID NO: 77312 - protein, 9 aa, Homo Sapiens
THLNELLMA

SEQ ID NO: 77313 - protein, 9 aa, Homo Sapiens
THYQLGLAY

SEQ ID NO: 77314 - protein, 9 aa, Homo Sapiens
TIAKPTTHF

SEQ ID NO: 77315 - protein, 9 aa, Homo Sapiens
TIAPCQKAM

SEQ ID NO: 77316 - protein, 9 aa, Homo Sapiens
TIAPRTHPY

SEQ ID NO: 77317 - protein, 9 aa, Homo Sapiens
TIDPNTRTL

SEQ ID NO: 77318 - protein, 9 aa, Homo Sapiens
TIIPKVLAM

SEQ ID NO: 77319 - protein, 9 aa, Homo Sapiens
TIKETDPDY

SEQ ID NO: 77320 - protein, 9 aa, Homo Sapiens
TILDDAKIY

SEQ ID NO: 77321 - protein, 9 aa, Homo Sapiens
TILHSTGQY

SEQ ID NO: 77322 - protein, 9 aa, Homo Sapiens
TIMAHVTEF

SEQ ID NO: 77323 - protein, 9 aa, Homo Sapiens
TINAAHVEY

SEQ ID NO: 77324 - protein, 9 aa, Homo Sapiens
TIRPEETAW

SEQ ID NO: 77325 - protein, 9 aa, Homo Sapiens
TIRQEEGVF

SEQ ID NO: 77326 - protein, 9 aa, Homo Sapiens
TIRYPDPLI

SEQ ID NO: 77327 - protein, 9 aa, Homo Sapiens
TISPKSTVY

SEQ ID NO: 77328 - protein, 9 aa, Homo Sapiens
TIVKAGPEY

SEQ ID NO: 77329 - protein, 9 aa, Homo Sapiens
TIVPKVLVM

SEQ ID NO: 77330 - protein, 9 aa, Homo Sapiens
TLADIICEY

SEQ ID NO: 77331 - protein, 9 aa, Homo Sapiens
TLADVKHVF

SEQ ID NO: 77332 - protein, 9 aa, Homo Sapiens
TLAFPSEHF

SEQ ID NO: 77333 - protein, 9 aa, Homo Sapiens
TLANIHKIY

SEQ ID NO: 77334 - protein, 9 aa, Homo Sapiens
TLAPASSSA

SEQ ID NO: 77335 - protein, 9 aa, Homo Sapiens
TLAPAVERM

SEQ ID NO: 77336 - protein, 9 aa, Homo Sapiens
TLAPGSRGY

SEQ ID NO: 77337 - protein, 9 aa, Homo Sapiens
TLAPLNQVF

SEQ ID NO: 77338 - protein, 9 aa, Homo Sapiens
TLAPSLGCF

SEQ ID NO: 77339 - protein, 9 aa, Homo Sapiens
TLAPVQMTF

SEQ ID NO: 77340 - protein, 9 aa, Homo Sapiens
TLAQLQQEF

SEQ ID NO: 77341 - protein, 9 aa, Homo Sapiens
TLDASTKIY

SEQ ID NO: 77342 - protein, 9 aa, Homo Sapiens
TLFETDERY

SEQ ID NO: 77343 - protein, 9 aa, Homo Sapiens
TLFHFGNCF

SEQ ID NO: 77344 - protein, 9 aa, Homo Sapiens
TLFPEKQIY

SEQ ID NO: 77345 - protein, 9 aa, Homo Sapiens
TLGDFAAEY

SEQ ID NO: 77346 - protein, 9 aa, Homo Sapiens
TLGPVSRSY

SEQ ID NO: 77347 - protein, 9 aa, Homo Sapiens
TLHDTRTHF

SEQ ID NO: 77348 - protein, 9 aa, Homo Sapiens
TLHERFTKY

SEQ ID NO: 77349 - protein, 9 aa, Homo Sapiens
TLHKPTQVM

SEQ ID NO: 77350 - protein, 9 aa, Homo Sapiens
TLIDSSSSF

SEQ ID NO: 77351 - protein, 9 aa, Homo Sapiens
TLIEQQFTY

SEQ ID NO: 77352 - protein, 9 aa, Homo Sapiens
TLIQSGPAL

SEQ ID NO: 77353 - protein, 9 aa, Homo Sapiens
TLISCQSQF

SEQ ID NO: 77354 - protein, 9 aa, Homo Sapiens
TLISPSFCY

SEQ ID NO: 77355 - protein, 9 aa, Homo Sapiens
TLITGLEEY

SEQ ID NO: 77356 - protein, 9 aa, Homo Sapiens
TLITQFLVY

SEQ ID NO: 77357 - protein, 9 aa, Homo Sapiens
TLKDRELSF

SEQ ID NO: 77358 - protein, 9 aa, Homo Sapiens
TLKEEWIAY

SEQ ID NO: 77359 - protein, 9 aa, Homo Sapiens
TLKGPDSHY

SEQ ID NO: 77360 - protein, 9 aa, Homo Sapiens
TLKQQEEVF

SEQ ID NO: 77361 - protein, 9 aa, Homo Sapiens
TLKTPGKSF

SEQ ID NO: 77362 - protein, 9 aa, Homo Sapiens
TLLAELREY

SEQ ID NO: 77363 - protein, 9 aa, Homo Sapiens
TLLASNEAF

SEQ ID NO: 77364 - protein, 9 aa, Homo Sapiens
TLLEKQLEY

SEQ ID NO: 77365 - protein, 9 aa, Homo Sapiens
TLLESYQVY

SEQ ID NO: 77366 - protein, 9 aa, Homo Sapiens
TLLFPGREF

SEQ ID NO: 77367 - protein, 9 aa, Homo Sapiens
TLLLKIQEY

SEQ ID NO: 77368 - protein, 9 aa, Homo Sapiens
TLLPGCRVM

SEQ ID NO: 77369 - protein, 9 aa, Homo Sapiens
TLLQSIISY

SEQ ID NO: 77370 - protein, 9 aa, Homo Sapiens
TLLQSVHIY

SEQ ID NO: 77371 - protein, 9 aa, Homo Sapiens
TLLSHVALY

SEQ ID NO: 77372 - protein, 9 aa, Homo Sapiens
TLLSSLSRY

SEQ ID NO: 77373 - protein, 9 aa, Homo Sapiens
TLLWPGHEY

SEQ ID NO: 77374 - protein, 9 aa, Homo Sapiens
TLMGPTRVF

SEQ ID NO: 77375 - protein, 9 aa, Homo Sapiens
TLMKQYIEF

SEQ ID NO: 77376 - protein, 9 aa, Homo Sapiens
TLMLEHQAF

SEQ ID NO: 77377 - protein, 9 aa, Homo Sapiens
TLNARTSIL

SEQ ID NO: 77378 - protein, 9 aa, Homo Sapiens
TLNERFTSY

SEQ ID NO: 77379 - protein, 9 aa, Homo Sapiens
TLNNSTQTY

SEQ ID NO: 77380 - protein, 9 aa, Homo Sapiens
TLNPNAKEF

SEQ ID NO: 77381 - protein, 9 aa, Homo Sapiens
TLNVSTTRY

SEQ ID NO: 77382 - protein, 9 aa, Homo Sapiens
TLPDDHSSY

SEQ ID NO: 77383 - protein, 9 aa, Homo Sapiens
TLPFHSVIY

SEQ ID NO: 77384 - protein, 9 aa, Homo Sapiens
TLQKQCVPF

SEQ ID NO: 77385 - protein, 9 aa, Homo Sapiens
TLQKQSVVY

SEQ ID NO: 77386 - protein, 9 aa, Homo Sapiens
TLRAAGKTY

SEQ ID NO: 77387 - protein, 9 aa, Homo Sapiens
TLRAVELLY

SEQ ID NO: 77388 - protein, 9 aa, Homo Sapiens
TLRDIETFY

SEQ ID NO: 77389 - protein, 9 aa, Homo Sapiens
TLRDPGSQL

SEQ ID NO: 77390 - protein, 9 aa, Homo Sapiens
TLRDSMLKY

SEQ ID NO: 77391 - protein, 9 aa, Homo Sapiens
TLRKDYARY

SEQ ID NO: 77392 - protein, 9 aa, Homo Sapiens
TLRKPSPVY

SEQ ID NO: 77393 - protein, 9 aa, Homo Sapiens
TLRPYFQVY

SEQ ID NO: 77394 - protein, 9 aa, Homo Sapiens
TLRQTITTF

SEQ ID NO: 77395 - protein, 9 aa, Homo Sapiens
TLSPTGDVY

SEQ ID NO: 77396 - protein, 9 aa, Homo Sapiens
TLSRETIEY

SEQ ID NO: 77397 - protein, 9 aa, Homo Sapiens
TLTAPSLSY

SEQ ID NO: 77398 - protein, 9 aa, Homo Sapiens
TLTDVAHEY

SEQ ID NO: 77399 - protein, 9 aa, Homo Sapiens
TLTPIIQEY

SEQ ID NO: 77400 - protein, 9 aa, Homo Sapiens
TLTPISAAY

SEQ ID NO: 77401 - protein, 9 aa, Homo Sapiens
TLTQGGVTY

SEQ ID NO: 77402 - protein, 9 aa, Homo Sapiens
TLVDNISTM

SEQ ID NO: 77403 - protein, 9 aa, Homo Sapiens
TLYETIIGY

SEQ ID NO: 77404 - protein, 9 aa, Homo Sapiens
TLYFSYTHM

SEQ ID NO: 77405 - protein, 9 aa, Homo Sapiens
TLYKAILEY

SEQ ID NO: 77406 - protein, 9 aa, Homo Sapiens
TLYPLHILF

SEQ ID NO: 77407 - protein, 9 aa, Homo Sapiens
TLYVGNLSF

SEQ ID NO: 77408 - protein, 9 aa, Homo Sapiens
TMADKIIMY

SEQ ID NO: 77409 - protein, 9 aa, Homo Sapiens
TMAPPVMAY

SEQ ID NO: 77410 - protein, 9 aa, Homo Sapiens
TMCGHELTY

SEQ ID NO: 77411 - protein, 9 aa, Homo Sapiens
TMCPHILRY

SEQ ID NO: 77412 - protein, 9 aa, Homo Sapiens
TMFSSEVQF

SEQ ID NO: 77413 - protein, 9 aa, Homo Sapiens
TMFVQRQVF

SEQ ID NO: 77414 - protein, 9 aa, Homo Sapiens
TMHASILAY

SEQ ID NO: 77415 - protein, 9 aa, Homo Sapiens
TMKDFNHSY

SEQ ID NO: 77416 - protein, 9 aa, Homo Sapiens
TMKPSETSF

SEQ ID NO: 77417 - protein, 9 aa, Homo Sapiens
TMMEDFRKY

SEQ ID NO: 77418 - protein, 9 aa, Homo Sapiens
TMMQSGGTF

SEQ ID NO: 77419 - protein, 9 aa, Homo Sapiens
TMRPLATAY

SEQ ID NO: 77420 - protein, 9 aa, Homo Sapiens
TMRQPSVIY

SEQ ID NO: 77421 - protein, 9 aa, Homo Sapiens
TMTSSVQVY

SEQ ID NO: 77422 - protein, 9 aa, Homo Sapiens
TMVGKTFTY

SEQ ID NO: 77423 - protein, 9 aa, Homo Sapiens
TMVNSENTY

SEQ ID NO: 77424 - protein, 9 aa, Homo Sapiens
TPAPGGSPY

SEQ ID NO: 77425 - protein, 9 aa, Homo Sapiens
TPYEGQRSY

SEQ ID NO: 77426 - protein, 9 aa, Homo Sapiens
TQAGEGRVY

SEQ ID NO: 77427 - protein, 9 aa, Homo Sapiens
TQAIHNTVF

SEQ ID NO: 77428 - protein, 9 aa, Homo Sapiens
TQALASVAY

SEQ ID NO: 77429 - protein, 9 aa, Homo Sapiens
TQAPIFISF

SEQ ID NO: 77430 - protein, 9 aa, Homo Sapiens
TQAQIKAAY

SEQ ID NO: 77431 - protein, 9 aa, Homo Sapiens
TQAQTTATY

SEQ ID NO: 77432 - protein, 9 aa, Homo Sapiens
TQAYGQQSY

SEQ ID NO: 77433 - protein, 9 aa, Homo Sapiens
TQFGGKRPF

SEQ ID NO: 77434 - protein, 9 aa, Homo Sapiens
TQFVSGSKY

SEQ ID NO: 77435 - protein, 9 aa, Homo Sapiens
TQILQSPAF

SEQ ID NO: 77436 - protein, 9 aa, Homo Sapiens
TQKEHLLKY

SEQ ID NO: 77437 - protein, 9 aa, Homo Sapiens
TQPLHEVVY

SEQ ID NO: 77438 - protein, 9 aa, Homo Sapiens
TQRDFMLSF

SEQ ID NO: 77439 - protein, 9 aa, Homo Sapiens
TQREFMLSF

SEQ ID NO: 77440 - protein, 9 aa, Homo Sapiens
TQRLKIMEY

SEQ ID NO: 77441 - protein, 9 aa, Homo Sapiens
TQRMFEIDY

SEQ ID NO: 77442 - protein, 9 aa, Homo Sapiens
TQRSQQLEF

SEQ ID NO: 77443 - protein, 9 aa, Homo Sapiens
TQVIHSIEY

SEQ ID NO: 77444 - protein, 9 aa, Homo Sapiens
TQYESKVFY

SEQ ID NO: 77445 - protein, 9 aa, Homo Sapiens
TSAPTGHTF

SEQ ID NO: 77446 - protein, 9 aa, Homo Sapiens
TTAPSHAKF

SEQ ID NO: 77447 - protein, 9 aa, Homo Sapiens
TTEEVCRIY

SEQ ID NO: 77448 - protein, 9 aa, Homo Sapiens
TTKDGDTVF

SEQ ID NO: 77449 - protein, 9 aa, Homo Sapiens
TVAPAQVAL

SEQ ID NO: 77450 - protein, 9 aa, Homo Sapiens
TVETASREY

SEQ ID NO: 77451 - protein, 9 aa, Homo Sapiens
TVFSRSQVF

SEQ ID NO: 77452 - protein, 9 aa, Homo Sapiens
TVFSRSQVY

SEQ ID NO: 77453 - protein, 9 aa, Homo Sapiens
TVHGVTQAF

SEQ ID NO: 77454 - protein, 9 aa, Homo Sapiens
TVHQVTEAF

SEQ ID NO: 77455 - protein, 9 aa, Homo Sapiens
TVIDSQTHY

SEQ ID NO: 77456 - protein, 9 aa, Homo Sapiens
TVIEPLKGY

SEQ ID NO: 77457 - protein, 9 aa, Homo Sapiens
TVIPNSHVY

SEQ ID NO: 77458 - protein, 9 aa, Homo Sapiens
TVIPRVYTY

SEQ ID NO: 77459 - protein, 9 aa, Homo Sapiens
TVKDSRTVY

SEQ ID NO: 77460 - protein, 9 aa, Homo Sapiens
TVKPEDLEL

SEQ ID NO: 77461 - protein, 9 aa, Homo Sapiens
TVKQEDSLF

SEQ ID NO: 77462 - protein, 9 aa, Homo Sapiens
TVKVEDLTF

SEQ ID NO: 77463 - protein, 9 aa, Homo Sapiens
TVKVFNTVY

SEQ ID NO: 77464 - protein, 9 aa, Homo Sapiens
TVLPFSQEF

SEQ ID NO: 77465 - protein, 9 aa, Homo Sapiens
TVLQAVSAF

SEQ ID NO: 77466 - protein, 9 aa, Homo Sapiens
TVMGTSTEY

SEQ ID NO: 77467 - protein, 9 aa, Homo Sapiens
TVNQFLTQY

SEQ ID NO: 77468 - protein, 9 aa, Homo Sapiens
TVRAEDQVY

SEQ ID NO: 77469 - protein, 9 aa, Homo Sapiens
TVRDSDSGL

SEQ ID NO: 77470 - protein, 9 aa, Homo Sapiens
TVRDYEHQF

SEQ ID NO: 77471 - protein, 9 aa, Homo Sapiens
TVREEFIIF

SEQ ID NO: 77472 - protein, 9 aa, Homo Sapiens
TVRETQTMY

SEQ ID NO: 77473 - protein, 9 aa, Homo Sapiens
TVRHGTVRY

SEQ ID NO: 77474 - protein, 9 aa, Homo Sapiens
TVRNEDNSL

SEQ ID NO: 77475 - protein, 9 aa, Homo Sapiens
TVRSDLSTF

SEQ ID NO: 77476 - protein, 9 aa, Homo Sapiens
TVSDAILRY

SEQ ID NO: 77477 - protein, 9 aa, Homo Sapiens
TVSEEKRIY

SEQ ID NO: 77478 - protein, 9 aa, Homo Sapiens
TVSPAHTSY

SEQ ID NO: 77479 - protein, 9 aa, Homo Sapiens
TVSQPNLKY

SEQ ID NO: 77480 - protein, 9 aa, Homo Sapiens
TVTEVLLKY

SEQ ID NO: 77481 - protein, 9 aa, Homo Sapiens
TVTIPSAVY

SEQ ID NO: 77482 - protein, 9 aa, Homo Sapiens
TVVDVLTSY

SEQ ID NO: 77483 - protein, 9 aa, Homo Sapiens
TVYDKPASF

SEQ ID NO: 77484 - protein, 9 aa, Homo Sapiens
TVYMGKVTF

SEQ ID NO: 77485 - protein, 9 aa, Homo Sapiens
TVYPVAIKY

SEQ ID NO: 77486 - protein, 9 aa, Homo Sapiens
VIFAGGQAY

SEQ ID NO: 77487 - protein, 9 aa, Homo Sapiens
VILPPLSPY

SEQ ID NO: 77488 - protein, 9 aa, Homo Sapiens
VIRQQCVEY

SEQ ID NO: 77489 - protein, 9 aa, Homo Sapiens
VLFEGDEVY

SEQ ID NO: 77490 - protein, 9 aa, Homo Sapiens
VLFEHAVGY

SEQ ID NO: 77491 - protein, 9 aa, Homo Sapiens
VLIDVGTGY

SEQ ID NO: 77492 - protein, 9 aa, Homo Sapiens
VLYDRVLKY

SEQ ID NO: 77493 - protein, 9 aa, Homo Sapiens
VLYPHLSTY

SEQ ID NO: 77494 - protein, 9 aa, Homo Sapiens
VPAEHQVAM

SEQ ID NO: 77495 - protein, 9 aa, Homo Sapiens
VPRIQLEEY

SEQ ID NO: 77496 - protein, 9 aa, Homo Sapiens
VPRSGDRVY

SEQ ID NO: 77497 - protein, 9 aa, Homo Sapiens
VPYCSVVCF

SEQ ID NO: 77498 - protein, 9 aa, Homo Sapiens
VQYEMRTLY

SEQ ID NO: 77499 - protein, 9 aa, Homo Sapiens
VTIKKDVDG

SEQ ID NO: 77500 - protein, 9 aa, Homo Sapiens
VVAPITTGY

SEQ ID NO: 77501 - protein, 9 aa, Homo Sapiens
WLHETERVY

SEQ ID NO: 77502 - protein, 9 aa, Homo Sapiens
WVLETKEVY

SEQ ID NO: 77503 - protein, 9 aa, Homo Sapiens
YFYVIGSSY

SEQ ID NO: 77504 - protein, 9 aa, Homo Sapiens
YIFKERESF

SEQ ID NO: 77505 - protein, 9 aa, Homo Sapiens
YILDQTNVY

SEQ ID NO: 77506 - protein, 9 aa, Homo Sapiens
YIRDLALEY

SEQ ID NO: 77507 - protein, 9 aa, Homo Sapiens
YIRGSTIKY

SEQ ID NO: 77508 - protein, 9 aa, Homo Sapiens
YIRQGEQSL

SEQ ID NO: 77509 - protein, 9 aa, Homo Sapiens
YISFRHHVY

SEQ ID NO: 77510 - protein, 9 aa, Homo Sapiens
YIYPKHLKY

SEQ ID NO: 77511 - protein, 9 aa, Homo Sapiens
YIYTTKTLY

SEQ ID NO: 77512 - protein, 9 aa, Homo Sapiens
YLAVVHAVY

SEQ ID NO: 77513 - protein, 9 aa, Homo Sapiens
YLFAHAVDF

SEQ ID NO: 77514 - protein, 9 aa, Homo Sapiens
YLFEWRTQY

SEQ ID NO: 77515 - protein, 9 aa, Homo Sapiens
YLGEFSITY

SEQ ID NO: 77516 - protein, 9 aa, Homo Sapiens
YLIDRDPTY

SEQ ID NO: 77517 - protein, 9 aa, Homo Sapiens
YLISGGTSY

SEQ ID NO: 77518 - protein, 9 aa, Homo Sapiens
YLLPDTKAY

SEQ ID NO: 77519 - protein, 9 aa, Homo Sapiens
YLLPHILVY

SEQ ID NO: 77520 - protein, 9 aa, Homo Sapiens
YLNEKAVSY

SEQ ID NO: 77521 - protein, 9 aa, Homo Sapiens
YLNQTSRSF

SEQ ID NO: 77522 - protein, 9 aa, Homo Sapiens
YLREEVKTF

SEQ ID NO: 77523 - protein, 9 aa, Homo Sapiens
YLRELLTTM

SEQ ID NO: 77524 - protein, 9 aa, Homo Sapiens
YLRKEDMEY

SEQ ID NO: 77525 - protein, 9 aa, Homo Sapiens
YLVKKGSVF

SEQ ID NO: 77526 - protein, 9 aa, Homo Sapiens
YLYGQTTTY

SEQ ID NO: 77527 - protein, 9 aa, Homo Sapiens
YLYLRGLVY

SEQ ID NO: 77528 - protein, 9 aa, Homo Sapiens
YLYPDGRSY

SEQ ID NO: 77529 - protein, 9 aa, Homo Sapiens
YLYPDQTHF

SEQ ID NO: 77530 - protein, 9 aa, Homo Sapiens
YMFVDENTF

SEQ ID NO: 77531 - protein, 9 aa, Homo Sapiens
YMKSEDPLF

SEQ ID NO: 77532 - protein, 9 aa, Homo Sapiens
YMRDPDDQY

SEQ ID NO: 77533 - protein, 9 aa, Homo Sapiens
YMYRHKGTY

SEQ ID NO: 77534 - protein, 9 aa, Homo Sapiens
YPHDRPTLY

SEQ ID NO: 77535 - protein, 9 aa, Homo Sapiens
YPHEPTAVF

SEQ ID NO: 77536 - protein, 9 aa, Homo Sapiens
YPKANIVAY

SEQ ID NO: 77537 - protein, 9 aa, Homo Sapiens
YPRPRDTSF

SEQ ID NO: 77538 - protein, 9 aa, Homo Sapiens
YPSIHITAY

SEQ ID NO: 77539 - protein, 9 aa, Homo Sapiens
YPTQPGQGY

SEQ ID NO: 77540 - protein, 9 aa, Homo Sapiens
YPWSQRVSF

SEQ ID NO: 77541 - protein, 9 aa, Homo Sapiens
YPYPYPHTL

SEQ ID NO: 77542 - protein, 9 aa, Homo Sapiens
YQEKGVRVL

SEQ ID NO: 77543 - protein, 9 aa, Homo Sapiens
YQHGHINSY

SEQ ID NO: 77544 - protein, 9 aa, Homo Sapiens
YQRDLEVAL

SEQ ID NO: 77545 - protein, 9 aa, Homo Sapiens
YTAQPTQGY

SEQ ID NO: 77546 - protein, 9 aa, Homo Sapiens
YTGPSHHSY

SEQ ID NO: 77547 - protein, 9 aa, Homo Sapiens
YVAPAYGVY

SEQ ID NO: 77548 - protein, 9 aa, Homo Sapiens
YVAPEILSY

SEQ ID NO: 77549 - protein, 9 aa, Homo Sapiens
YVFQSENTF

SEQ ID NO: 77550 - protein, 9 aa, Homo Sapiens
YVHETLTVY

SEQ ID NO: 77551 - protein, 9 aa, Homo Sapiens
YVHTTVNEM

SEQ ID NO: 77552 - protein, 9 aa, Homo Sapiens
YVNSPGEKY

SEQ ID NO: 77553 - protein, 9 aa, Homo Sapiens
YVRDSKIRY

SEQ ID NO: 77554 - protein, 9 aa, Homo Sapiens
YVRPAEPAF

SEQ ID NO: 77555 - protein, 9 aa, Homo Sapiens
YVTTSTRTY

SEQ ID NO: 77556 - protein, 9 aa, Homo Sapiens
YVYPKYLKY

SEQ ID NO: 77557 - protein, 9 aa, Homo Sapiens
YVYPLQLKY

SEQ ID NO: 77558 - protein, 9 aa, Homo Sapiens
YVYSHFLQF

SEQ ID NO: 77559 - protein, 10 aa, Homo Sapiens
AAGPPISEGK

SEQ ID NO: 77560 - protein, 10 aa, Homo Sapiens
AGHINPLIIY

SEQ ID NO: 77561 - protein, 10 aa, Homo Sapiens
ALAPALVETY

SEQ ID NO: 77562 - protein, 10 aa, Homo Sapiens
ANAGAILSQF

SEQ ID NO: 77563 - protein, 10 aa, Homo Sapiens
AVDSRTGKLT

SEQ ID NO: 77564 - protein, 10 aa, Homo Sapiens
DIAAVPATAM

SEQ ID NO: 77565 - protein, 10 aa, Homo Sapiens
DMHSGHFVTY

SEQ ID NO: 77566 - protein, 10 aa, Homo Sapiens
DPYGSGGQKF

SEQ ID NO: 77567 - protein, 10 aa, Homo Sapiens
DQVKELLTSF

SEQ ID NO: 77568 - protein, 10 aa, Homo Sapiens
DQYLGHLQQY

SEQ ID NO: 77569 - protein, 10 aa, Homo Sapiens
DTGRPSTTVR

SEQ ID NO: 77570 - protein, 10 aa, Homo Sapiens
DVYCPVQWEY

SEQ ID NO: 77571 - protein, 10 aa, Homo Sapiens
EEPIYIITEY

SEQ ID NO: 77572 - protein, 10 aa, Homo Sapiens
EFMPASRSEY

SEQ ID NO: 77573 - protein, 10 aa, Homo Sapiens
EHVVVPIVAF

SEQ ID NO: 77574 - protein, 10 aa, Homo Sapiens
EIYGGSDSRF

SEQ ID NO: 77575 - protein, 10 aa, Homo Sapiens
ELAPTLLTAM

SEQ ID NO: 77576 - protein, 10 aa, Homo Sapiens
ELAQTTRTAY

SEQ ID NO: 77577 - protein, 10 aa, Homo Sapiens
ELFMSSFQSY

SEQ ID NO: 77578 - protein, 10 aa, Homo Sapiens
ELRDNDKTRY

SEQ ID NO: 77579 - protein, 10 aa, Homo Sapiens
ELYYGGHLCY

SEQ ID NO: 77580 - protein, 10 aa, Homo Sapiens
EMYNRPVEVY

SEQ ID NO: 77581 - protein, 10 aa, Homo Sapiens
EQAPAPARPY

SEQ ID NO: 77582 - protein, 10 aa, Homo Sapiens
EQIRNQLTAM

SEQ ID NO: 77583 - protein, 10 aa, Homo Sapiens
EVAPVISSAY

SEQ ID NO: 77584 - protein, 10 aa, Homo Sapiens
EVFMHVSTAY

SEQ ID NO: 77585 - protein, 10 aa, Homo Sapiens
EVRLQNETSY

SEQ ID NO: 77586 - protein, 10 aa, Homo Sapiens
FLHPFPSESY

SEQ ID NO: 77587 - protein, 10 aa, Homo Sapiens
FLWAGGRASY

SEQ ID NO: 77588 - protein, 10 aa, Homo Sapiens
FLWQEGHSAF

SEQ ID NO: 77589 - protein, 10 aa, Homo Sapiens
FMRQAGEVTY

SEQ ID NO: 77590 - protein, 10 aa, Homo Sapiens
FPHNFQETTY

SEQ ID NO: 77591 - protein, 10 aa, Homo Sapiens
FPYDYSASEY

SEQ ID NO: 77592 - protein, 10 aa, Homo Sapiens
FQYDDSGNTF

SEQ ID NO: 77593 - protein, 10 aa, Homo Sapiens
FVYEVTSTKY

SEQ ID NO: 77594 - protein, 10 aa, Homo Sapiens
GAGGGFGSRS

SEQ ID NO: 77595 - protein, 10 aa, Homo Sapiens
GGGLSVSSSR

SEQ ID NO: 77596 - protein, 10 aa, Homo Sapiens
GLFQHICTAY

SEQ ID NO: 77597 - protein, 10 aa, Homo Sapiens
HAFGGNKASY

SEQ ID NO: 77598 - protein, 10 aa, Homo Sapiens
HIAEEADRKY

SEQ ID NO: 77599 - protein, 10 aa, Homo Sapiens
HIKPGAKVLY

SEQ ID NO: 77600 - protein, 10 aa, Homo Sapiens
HIYDKTSVLF

SEQ ID NO: 77601 - protein, 10 aa, Homo Sapiens
HIYTFPHASF

SEQ ID NO: 77602 - protein, 10 aa, Homo Sapiens
HLAEDCMKHY

SEQ ID NO: 77603 - protein, 10 aa, Homo Sapiens
HLDPNSGRCF

SEQ ID NO: 77604 - protein, 10 aa, Homo Sapiens
HLFEHILNGY

SEQ ID NO: 77605 - protein, 10 aa, Homo Sapiens
HLFGQPNSAY

SEQ ID NO: 77606 - protein, 10 aa, Homo Sapiens
HLIDDYGNTY

SEQ ID NO: 77607 - protein, 10 aa, Homo Sapiens
HLIEAHKECM

SEQ ID NO: 77608 - protein, 10 aa, Homo Sapiens
HLITFETEVY

SEQ ID NO: 77609 - protein, 10 aa, Homo Sapiens
HLLAGGFAEF

SEQ ID NO: 77610 - protein, 10 aa, Homo Sapiens
HLLDSVGSCY

SEQ ID NO: 77611 - protein, 10 aa, Homo Sapiens
HLLPYNMTVY

SEQ ID NO: 77612 - protein, 10 aa, Homo Sapiens
HLPAYLVAAF

SEQ ID NO: 77613 - protein, 10 aa, Homo Sapiens
HLPLLPNVSY

SEQ ID NO: 77614 - protein, 10 aa, Homo Sapiens
HLRDERDICF

SEQ ID NO: 77615 - protein, 10 aa, Homo Sapiens
HLYDTPGSTY

SEQ ID NO: 77616 - protein, 10 aa, Homo Sapiens
HLYPNTPYAY

SEQ ID NO: 77617 - protein, 10 aa, Homo Sapiens
HMREAGDVCY

SEQ ID NO: 77618 - protein, 10 aa, Homo Sapiens
HPIEGSTTVF

SEQ ID NO: 77619 - protein, 10 aa, Homo Sapiens
HQAACLIQAY

SEQ ID NO: 77620 - protein, 10 aa, Homo Sapiens
HQLRAQILAY

SEQ ID NO: 77621 - protein, 10 aa, Homo Sapiens
HQLRAQIMAY

SEQ ID NO: 77622 - protein, 10 aa, Homo Sapiens
HQPLHVTKGY

SEQ ID NO: 77623 - protein, 10 aa, Homo Sapiens
HVAPVTSVEW

SEQ ID NO: 77624 - protein, 10 aa, Homo Sapiens
HVASCGVNLY

SEQ ID NO: 77625 - protein, 10 aa, Homo Sapiens
HVKDANGNSF

SEQ ID NO: 77626 - protein, 10 aa, Homo Sapiens
HVNPYIGLFF

SEQ ID NO: 77627 - protein, 10 aa, Homo Sapiens
HVYPAGSQVM

SEQ ID NO: 77628 - protein, 10 aa, Homo Sapiens
IGQSKSVKIY

SEQ ID NO: 77629 - protein, 10 aa, Homo Sapiens
IMRECQEESF

SEQ ID NO: 77630 - protein, 10 aa, Homo Sapiens
LLYPYEQAQY

SEQ ID NO: 77631 - protein, 10 aa, Homo Sapiens
LPFPGRSASY

SEQ ID NO: 77632 - protein, 10 aa, Homo Sapiens
MAYGASFLSF

SEQ ID NO: 77633 - protein, 10 aa, Homo Sapiens
MILTVGGTAY

SEQ ID NO: 77634 - protein, 10 aa, Homo Sapiens
MLIHEPFKKY

SEQ ID NO: 77635 - protein, 10 aa, Homo Sapiens
MLPHYEPIPF

SEQ ID NO: 77636 - protein, 10 aa, Homo Sapiens
MQKPFEDASF

SEQ ID NO: 77637 - protein, 10 aa, Homo Sapiens
MQYPGRSLVF

SEQ ID NO: 77638 - protein, 10 aa, Homo Sapiens
MVKVDPETRY

SEQ ID NO: 77639 - protein, 10 aa, Homo Sapiens
MVNPFAYEEY

SEQ ID NO: 77640 - protein, 10 aa, Homo Sapiens
NIKNDPDKEY

SEQ ID NO: 77641 - protein, 10 aa, Homo Sapiens
NIRNEIGVFY

SEQ ID NO: 77642 - protein, 10 aa, Homo Sapiens
NLFGGEPLSY

SEQ ID NO: 77643 - protein, 10 aa, Homo Sapiens
NLKDADSTEF

SEQ ID NO: 77644 - protein, 10 aa, Homo Sapiens
NLPDEIYHVY

SEQ ID NO: 77645 - protein, 10 aa, Homo Sapiens
NLPVPSGVAF

SEQ ID NO: 77646 - protein, 10 aa, Homo Sapiens
NMQLPNGVTY

SEQ ID NO: 77647 - protein, 10 aa, Homo Sapiens
NQRTDLGTSY

SEQ ID NO: 77648 - protein, 10 aa, Homo Sapiens
NVVQPMKELY

SEQ ID NO: 77649 - protein, 10 aa, Homo Sapiens
NVYTHSFLCY

SEQ ID NO: 77650 - protein, 10 aa, Homo Sapiens
PHIHARVYNY

SEQ ID NO: 77651 - protein, 10 aa, Homo Sapiens
QAGPATGQAY

SEQ ID NO: 77652 - protein, 10 aa, Homo Sapiens
QCFPFETSSY

SEQ ID NO: 77653 - protein, 10 aa, Homo Sapiens
QFYDNKGITY

SEQ ID NO: 77654 - protein, 10 aa, Homo Sapiens
QLYDKQREEY

SEQ ID NO: 77655 - protein, 10 aa, Homo Sapiens
QLYQENKREY

SEQ ID NO: 77656 - protein, 10 aa, Homo Sapiens
QMPPWNQTEF

SEQ ID NO: 77657 - protein, 10 aa, Homo Sapiens
QVAENPHSEY

SEQ ID NO: 77658 - protein, 10 aa, Homo Sapiens
RQGVDADING

SEQ ID NO: 77659 - protein, 10 aa, Homo Sapiens
SIAPGLSVTY

SEQ ID NO: 77660 - protein, 10 aa, Homo Sapiens
SIRPDNMSEY

SEQ ID NO: 77661 - protein, 10 aa, Homo Sapiens
SLFGSSRVQY

SEQ ID NO: 77662 - protein, 10 aa, Homo Sapiens
SLFHGGKSHY

SEQ ID NO: 77663 - protein, 10 aa, Homo Sapiens
SLLEGQKIAF

SEQ ID NO: 77664 - protein, 10 aa, Homo Sapiens
SLPDYRAATY

SEQ ID NO: 77665 - protein, 10 aa, Homo Sapiens
SLPNFKQNEF

SEQ ID NO: 77666 - protein, 10 aa, Homo Sapiens
SLPPGVHISY

SEQ ID NO: 77667 - protein, 10 aa, Homo Sapiens
SLPQYSPVTF

SEQ ID NO: 77668 - protein, 10 aa, Homo Sapiens
SLPSHLNISY

SEQ ID NO: 77669 - protein, 10 aa, Homo Sapiens
SLRDEKGALF

SEQ ID NO: 77670 - protein, 10 aa, Homo Sapiens
SLRDSRSLSY

SEQ ID NO: 77671 - protein, 10 aa, Homo Sapiens
SLRGTSDHEY

SEQ ID NO: 77672 - protein, 10 aa, Homo Sapiens
SLRKAIETVY

SEQ ID NO: 77673 - protein, 10 aa, Homo Sapiens
SLRPIDSNTF

SEQ ID NO: 77674 - protein, 10 aa, Homo Sapiens
SLTEYPRETF

SEQ ID NO: 77675 - protein, 10 aa, Homo Sapiens
SLYECRYSVF

SEQ ID NO: 77676 - protein, 10 aa, Homo Sapiens
SMAYPSLVAM

SEQ ID NO: 77677 - protein, 10 aa, Homo Sapiens
SQLEHLQSKY

SEQ ID NO: 77678 - protein, 10 aa, Homo Sapiens
SQQPASGVAY

SEQ ID NO: 77679 - protein, 10 aa, Homo Sapiens
SQRPPTRETF

SEQ ID NO: 77680 - protein, 10 aa, Homo Sapiens
SQVDPPTTTM

SEQ ID NO: 77681 - protein, 10 aa, Homo Sapiens
SQYNIRGVTY

SEQ ID NO: 77682 - protein, 10 aa, Homo Sapiens
SQYPFPVTLY

SEQ ID NO: 77683 - protein, 10 aa, Homo Sapiens
SSKPWPDATY

SEQ ID NO: 77684 - protein, 10 aa, Homo Sapiens
SVAEITNACF

SEQ ID NO: 77685 - protein, 10 aa, Homo Sapiens
SVMINKATPY

SEQ ID NO: 77686 - protein, 10 aa, Homo Sapiens
SYGGGSGGGF

SEQ ID NO: 77687 - protein, 10 aa, Homo Sapiens
TCVTTSGSTY

SEQ ID NO: 77688 - protein, 10 aa, Homo Sapiens
TFARVPVATY

SEQ ID NO: 77689 - protein, 10 aa, Homo Sapiens
TILGPPGSVY

SEQ ID NO: 77690 - protein, 10 aa, Homo Sapiens
TIRREDLISF

SEQ ID NO: 77691 - protein, 10 aa, Homo Sapiens
TISDHGTVTY

SEQ ID NO: 77692 - protein, 10 aa, Homo Sapiens
TITDVPVTVY

SEQ ID NO: 77693 - protein, 10 aa, Homo Sapiens
TIYESKMIEY

SEQ ID NO: 77694 - protein, 10 aa, Homo Sapiens
TLFDSRHLLY

SEQ ID NO: 77695 - protein, 10 aa, Homo Sapiens
TLFELHRTTF

SEQ ID NO: 77696 - protein, 10 aa, Homo Sapiens
TLKSGDGITF

SEQ ID NO: 77697 - protein, 10 aa, Homo Sapiens
TLPGHIQAVY

SEQ ID NO: 77698 - protein, 10 aa, Homo Sapiens
TLPTLPAKVY

SEQ ID NO: 77699 - protein, 10 aa, Homo Sapiens
TLQRATGISF

SEQ ID NO: 77700 - protein, 10 aa, Homo Sapiens
TLRSEGFDTY

SEQ ID NO: 77701 - protein, 10 aa, Homo Sapiens
TLYQPSATSY

SEQ ID NO: 77702 - protein, 10 aa, Homo Sapiens
TQPDWIAICY

SEQ ID NO: 77703 - protein, 10 aa, Homo Sapiens
TVCPEGARVY

SEQ ID NO: 77704 - protein, 10 aa, Homo Sapiens
TVIPNSHVYY

SEQ ID NO: 77705 - protein, 10 aa, Homo Sapiens
TVKGVSLSSY

SEQ ID NO: 77706 - protein, 10 aa, Homo Sapiens
TVLRLPVEAF

SEQ ID NO: 77707 - protein, 10 aa, Homo Sapiens
TVRGPPDSDF

SEQ ID NO: 77708 - protein, 10 aa, Homo Sapiens
TVVEPYNATL

SEQ ID NO: 77709 - protein, 10 aa, Homo Sapiens
VLPAALAVYM

SEQ ID NO: 77710 - protein, 10 aa, Homo Sapiens
VTIKKDVDGA

SEQ ID NO: 77711 - protein, 10 aa, Homo Sapiens
YDAEISQIHQ

SEQ ID NO: 77712 - protein, 10 aa, Homo Sapiens
YIFPSSISAM

SEQ ID NO: 77713 - protein, 10 aa, Homo Sapiens
YINPAKLTPY

SEQ ID NO: 77714 - protein, 10 aa, Homo Sapiens
YINPYQPNEY

SEQ ID NO: 77715 - protein, 10 aa, Homo Sapiens
YLFQGRQECY

SEQ ID NO: 77716 - protein, 10 aa, Homo Sapiens
YLRESSLLAY

SEQ ID NO: 77717 - protein, 10 aa, Homo Sapiens
YLRPGQAAAF

SEQ ID NO: 77718 - protein, 10 aa, Homo Sapiens
YMIDPSGVSY

SEQ ID NO: 77719 - protein, 10 aa, Homo Sapiens
YMIERPEPEF

SEQ ID NO: 77720 - protein, 10 aa, Homo Sapiens
YMNPYQLNAY

SEQ ID NO: 77721 - protein, 10 aa, Homo Sapiens
YPYPYPHTLY

SEQ ID NO: 77722 - protein, 10 aa, Homo Sapiens
YVHDDGRVSY

SEQ ID NO: 77723 - protein, 10 aa, Homo Sapiens
YVNCGHVTAY

SEQ ID NO: 77724 - protein, 11 aa, Homo Sapiens
DLRRERDSASF

SEQ ID NO: 77725 - protein, 11 aa, Homo Sapiens
ELRAPCLPVTY

SEQ ID NO: 77726 - protein, 11 aa, Homo Sapiens
ELRAPVAGTCY

SEQ ID NO: 77727 - protein, 11 aa, Homo Sapiens
EQIYPVNAISF

SEQ ID NO: 77728 - protein, 11 aa, Homo Sapiens
EVLMLLPPAHY

SEQ ID NO: 77729 - protein, 11 aa, Homo Sapiens
FIFREGDGVYY

SEQ ID NO: 77730 - protein, 11 aa, Homo Sapiens
FLTAAKKARAG

SEQ ID NO: 77731 - protein, 11 aa, Homo Sapiens
FVAPSRPFVVY

SEQ ID NO: 77732 - protein, 11 aa, Homo Sapiens
GLGSGGSIRSS

SEQ ID NO: 77733 - protein, 11 aa, Homo Sapiens
HLYGLGSGSSY

SEQ ID NO: 77734 - protein, 11 aa, Homo Sapiens
HVRAELPSSHY

SEQ ID NO: 77735 - protein, 11 aa, Homo Sapiens
HVRPVTQGDVY

SEQ ID NO: 77736 - protein, 11 aa, Homo Sapiens
IAKNRKDIENQ

SEQ ID NO: 77737 - protein, 11 aa, Homo Sapiens
LQHDFGHLSVF

SEQ ID NO: 77738 - protein, 11 aa, Homo Sapiens
NIFHPTDPVAY

SEQ ID NO: 77739 - protein, 11 aa, Homo Sapiens
NIYHPLDPVAY

SEQ ID NO: 77740 - protein, 11 aa, Homo Sapiens
NLRGTTEGVYY

SEQ ID NO: 77741 - protein, 11 aa, Homo Sapiens
NLRSPNNFLSY

SEQ ID NO: 77742 - protein, 11 aa, Homo Sapiens
REEPIYIITEY

SEQ ID NO: 77743 - protein, 11 aa, Homo Sapiens
RQGVDADINGL

SEQ ID NO: 77744 - protein, 11 aa, Homo Sapiens
SEHVHSQGRVM

SEQ ID NO: 77745 - protein, 11 aa, Homo Sapiens
SINPLGGFVHY

SEQ ID NO: 77746 - protein, 11 aa, Homo Sapiens
SIYPGNSDTRY

SEQ ID NO: 77747 - protein, 11 aa, Homo Sapiens
SLYASSPGGVY

SEQ ID NO: 77748 - protein, 11 aa, Homo Sapiens
SQRAVTNHSVY

SEQ ID NO: 77749 - protein, 11 aa, Homo Sapiens
TLFGNNKLTTF

SEQ ID NO: 77750 - protein, 11 aa, Homo Sapiens
TLKEEVNELQY

SEQ ID NO: 77751 - protein, 11 aa, Homo Sapiens
TLQDSRTNTAY

SEQ ID NO: 77752 - protein, 11 aa, Homo Sapiens
TLWVDPYEVSY

SEQ ID NO: 77753 - protein, 11 aa, Homo Sapiens
TLYPGQGNNSY

SEQ ID NO: 77754 - protein, 11 aa, Homo Sapiens
TQFINPETPGY

SEQ ID NO: 77755 - protein, 11 aa, Homo Sapiens
TQYERFIPSAY

SEQ ID NO: 77756 - protein, 11 aa, Homo Sapiens
TVAPPVPATPY

SEQ ID NO: 77757 - protein, 11 aa, Homo Sapiens
VTIKKDVDGAY

SEQ ID NO: 77758 - protein, 11 aa, Homo Sapiens
YDKKGPAAIQK

SEQ ID NO: 77759 - protein, 11 aa, Homo Sapiens
YIRPEGQDSAF

SEQ ID NO: 77760 - protein, 11 aa, Homo Sapiens
YLFEPHSGEEY

SEQ ID NO: 77761 - protein, 11 aa, Homo Sapiens
YMCPNSSTVEY

SEQ ID NO: 77762 - protein, 11 aa, Homo Sapiens
YQAELSQMQTQ

SEQ ID NO: 77763 - protein, 8 aa, Homo Sapiens
AGYTARVY

SEQ ID NO: 77764 - protein, 8 aa, Homo Sapiens
AKANPQVL

SEQ ID NO: 77765 - protein, 8 aa, Homo Sapiens
AKAPSRMY

SEQ ID NO: 77766 - protein, 8 aa, Homo Sapiens
AKFKSSIY

SEQ ID NO: 77767 - protein, 8 aa, Homo Sapiens
AKFVTKAY

SEQ ID NO: 77768 - protein, 8 aa, Homo Sapiens
AKGWAPTF

SEQ ID NO: 77769 - protein, 8 aa, Homo Sapiens
AKHIFKTY

SEQ ID NO: 77770 - protein, 8 aa, Homo Sapiens
AKIKPNIF

SEQ ID NO: 77771 - protein, 8 aa, Homo Sapiens
AKILPIMF

SEQ ID NO: 77772 - protein, 8 aa, Homo Sapiens
AKSVTCTY

SEQ ID NO: 77773 - protein, 8 aa, Homo Sapiens
AKTNTVSY

SEQ ID NO: 77774 - protein, 8 aa, Homo Sapiens
AQFLFGHY

SEQ ID NO: 77775 - protein, 8 aa, Homo Sapiens
AQGVILVY

SEQ ID NO: 77776 - protein, 8 aa, Homo Sapiens
AQILLKAL

SEQ ID NO: 77777 - protein, 8 aa, Homo Sapiens
AQKTSLRY

SEQ ID NO: 77778 - protein, 8 aa, Homo Sapiens
AQRASVAF

SEQ ID NO: 77779 - protein, 8 aa, Homo Sapiens
AQRHVLTY

SEQ ID NO: 77780 - protein, 8 aa, Homo Sapiens
AQRKFRPY

SEQ ID NO: 77781 - protein, 8 aa, Homo Sapiens
AQRLVRVL

SEQ ID NO: 77782 - protein, 8 aa, Homo Sapiens
AQRPTATY

SEQ ID NO: 77783 - protein, 8 aa, Homo Sapiens
AQRQDIAF

SEQ ID NO: 77784 - protein, 8 aa, Homo Sapiens
AQVKLLEF

SEQ ID NO: 77785 - protein, 8 aa, Homo Sapiens
EEQLQQIR

SEQ ID NO: 77786 - protein, 8 aa, Homo Sapiens
FKIHPMAY

SEQ ID NO: 77787 - protein, 8 aa, Homo Sapiens
FKKGDRVF

SEQ ID NO: 77788 - protein, 8 aa, Homo Sapiens
FKVKSHVY

SEQ ID NO: 77789 - protein, 8 aa, Homo Sapiens
FQFLPHAY

SEQ ID NO: 77790 - protein, 8 aa, Homo Sapiens
FQHVGKAF

SEQ ID NO: 77791 - protein, 8 aa, Homo Sapiens
FQKVITEY

SEQ ID NO: 77792 - protein, 8 aa, Homo Sapiens
FQMEQIVY

SEQ ID NO: 77793 - protein, 8 aa, Homo Sapiens
FQTTISKY

SEQ ID NO: 77794 - protein, 8 aa, Homo Sapiens
FQYLSKTY

SEQ ID NO: 77795 - protein, 8 aa, Homo Sapiens
GAEAKPAE

SEQ ID NO: 77796 - protein, 8 aa, Homo Sapiens
GKIRHLCF

SEQ ID NO: 77797 - protein, 8 aa, Homo Sapiens
GKLISVEY

SEQ ID NO: 77798 - protein, 8 aa, Homo Sapiens
GKLVQIEY

SEQ ID NO: 77799 - protein, 8 aa, Homo Sapiens
GKSKGIAY

SEQ ID NO: 77800 - protein, 8 aa, Homo Sapiens
GKWMGIAF

SEQ ID NO: 77801 - protein, 8 aa, Homo Sapiens
GQGFALVY

SEQ ID NO: 77802 - protein, 8 aa, Homo Sapiens
GQHPALSY

SEQ ID NO: 77803 - protein, 8 aa, Homo Sapiens
GQHVFLVY

SEQ ID NO: 77804 - protein, 8 aa, Homo Sapiens
GQITHIQY

SEQ ID NO: 77805 - protein, 8 aa, Homo Sapiens
GQRVIGHY

SEQ ID NO: 77806 - protein, 8 aa, Homo Sapiens
GQRVISMY

SEQ ID NO: 77807 - protein, 8 aa, Homo Sapiens
GQRYIQFY

SEQ ID NO: 77808 - protein, 8 aa, Homo Sapiens
GQTLFAGY

SEQ ID NO: 77809 - protein, 8 aa, Homo Sapiens
GQYLFCRY

SEQ ID NO: 77810 - protein, 8 aa, Homo Sapiens
GQYTGHEY

SEQ ID NO: 77811 - protein, 8 aa, Homo Sapiens
HGHLSAVY

SEQ ID NO: 77812 - protein, 8 aa, Homo Sapiens
HHLVARVY

SEQ ID NO: 77813 - protein, 8 aa, Homo Sapiens
HHYLISIY

SEQ ID NO: 77814 - protein, 8 aa, Homo Sapiens
HKVSPMLY

SEQ ID NO: 77815 - protein, 8 aa, Homo Sapiens
HQFLQNEY

SEQ ID NO: 77816 - protein, 8 aa, Homo Sapiens
HQKLGIAY

SEQ ID NO: 77817 - protein, 8 aa, Homo Sapiens
HQLAVTAY

SEQ ID NO: 77818 - protein, 8 aa, Homo Sapiens
HQREIQVM

SEQ ID NO: 77819 - protein, 8 aa, Homo Sapiens
HQVVVAKY

SEQ ID NO: 77820 - protein, 8 aa, Homo Sapiens
HQYHIRAY

SEQ ID NO: 77821 - protein, 8 aa, Homo Sapiens
HQYKVRAY

SEQ ID NO: 77822 - protein, 8 aa, Homo Sapiens
IKADHVST

SEQ ID NO: 77823 - protein, 8 aa, Homo Sapiens
IKAIQLEY

SEQ ID NO: 77824 - protein, 8 aa, Homo Sapiens
IQHPSNVL

SEQ ID NO: 77825 - protein, 8 aa, Homo Sapiens
IQRLQLCY

SEQ ID NO: 77826 - protein, 8 aa, Homo Sapiens
IQTRGGTF

SEQ ID NO: 77827 - protein, 8 aa, Homo Sapiens
IQYLFLEY

SEQ ID NO: 77828 - protein, 8 aa, Homo Sapiens
KGFAFVEY

SEQ ID NO: 77829 - protein, 8 aa, Homo Sapiens
KGFAFVQY

SEQ ID NO: 77830 - protein, 8 aa, Homo Sapiens
KGLKVREY

SEQ ID NO: 77831 - protein, 8 aa, Homo Sapiens
KGYAFIEY

SEQ ID NO: 77832 - protein, 8 aa, Homo Sapiens
KGYAFVQY

SEQ ID NO: 77833 - protein, 8 aa, Homo Sapiens
KKFKNLKY

SEQ ID NO: 77834 - protein, 8 aa, Homo Sapiens
KKNVSVQY

SEQ ID NO: 77835 - protein, 8 aa, Homo Sapiens
KKVLQSEF

SEQ ID NO: 77836 - protein, 8 aa, Homo Sapiens
KKVTSVVF

SEQ ID NO: 77837 - protein, 8 aa, Homo Sapiens
KQFKSEAY

SEQ ID NO: 77838 - protein, 8 aa, Homo Sapiens
KQGVVLKY

SEQ ID NO: 77839 - protein, 8 aa, Homo Sapiens
KQIEPSLY

SEQ ID NO: 77840 - protein, 8 aa, Homo Sapiens
KQRLQQLF

SEQ ID NO: 77841 - protein, 8 aa, Homo Sapiens
KQRQLTSY

SEQ ID NO: 77842 - protein, 8 aa, Homo Sapiens
KQYKVVVY

SEQ ID NO: 77843 - protein, 8 aa, Homo Sapiens
KQYLAVVF

SEQ ID NO: 77844 - protein, 8 aa, Homo Sapiens
LKVKGNVF

SEQ ID NO: 77845 - protein, 8 aa, Homo Sapiens
LKYLTKKY

SEQ ID NO: 77846 - protein, 8 aa, Homo Sapiens
LQHASAVL

SEQ ID NO: 77847 - protein, 8 aa, Homo Sapiens
LQRLVEGY

SEQ ID NO: 77848 - protein, 8 aa, Homo Sapiens
LQRLVNLY

SEQ ID NO: 77849 - protein, 8 aa, Homo Sapiens
LQTVHAEY

SEQ ID NO: 77850 - protein, 8 aa, Homo Sapiens
MQWRALVL

SEQ ID NO: 77851 - protein, 8 aa, Homo Sapiens
PLRNPIIY

SEQ ID NO: 77852 - protein, 8 aa, Homo Sapiens
QQRVVRVY

SEQ ID NO: 77853 - protein, 8 aa, Homo Sapiens
QQVVLSSY

SEQ ID NO: 77854 - protein, 8 aa, Homo Sapiens
RAFVSMVY

SEQ ID NO: 77855 - protein, 8 aa, Homo Sapiens
RGFCFITY

SEQ ID NO: 77856 - protein, 8 aa, Homo Sapiens
RGHLAKIY

SEQ ID NO: 77857 - protein, 8 aa, Homo Sapiens
RKAVLTEY

SEQ ID NO: 77858 - protein, 8 aa, Homo Sapiens
RKAVSKLY

SEQ ID NO: 77859 - protein, 8 aa, Homo Sapiens
RKFVNKSY

SEQ ID NO: 77860 - protein, 8 aa, Homo Sapiens
RKGQAVTL

SEQ ID NO: 77861 - protein, 8 aa, Homo Sapiens
RKIGARIY

SEQ ID NO: 77862 - protein, 8 aa, Homo Sapiens
RKIGARVY

SEQ ID NO: 77863 - protein, 8 aa, Homo Sapiens
RKILSRLF

SEQ ID NO: 77864 - protein, 8 aa, Homo Sapiens
RKSIARVL

SEQ ID NO: 77865 - protein, 8 aa, Homo Sapiens
RKTIPIKY

SEQ ID NO: 77866 - protein, 8 aa, Homo Sapiens
RQFCTGEF

SEQ ID NO: 77867 - protein, 8 aa, Homo Sapiens
RQIGSRSY

SEQ ID NO: 77868 - protein, 8 aa, Homo Sapiens
RQKQSLEY

SEQ ID NO: 77869 - protein, 8 aa, Homo Sapiens
RQLEAARY

SEQ ID NO: 77870 - protein, 8 aa, Homo Sapiens
RQRIVQQY

SEQ ID NO: 77871 - protein, 8 aa, Homo Sapiens
RQVLTSSF

SEQ ID NO: 77872 - protein, 8 aa, Homo Sapiens
RQYEQQTY

SEQ ID NO: 77873 - protein, 8 aa, Homo Sapiens
RQYMFSSL

SEQ ID NO: 77874 - protein, 8 aa, Homo Sapiens
RQYRAVVY

SEQ ID NO: 77875 - protein, 8 aa, Homo Sapiens
SGYEAAVY

SEQ ID NO: 77876 - protein, 8 aa, Homo Sapiens
SKAKPSVL

SEQ ID NO: 77877 - protein, 8 aa, Homo Sapiens
SKAPAPTF

SEQ ID NO: 77878 - protein, 8 aa, Homo Sapiens
SKAPHLAY

SEQ ID NO: 77879 - protein, 8 aa, Homo Sapiens
SKAPVLTY

SEQ ID NO: 77880 - protein, 8 aa, Homo Sapiens
SKIPAVTY

SEQ ID NO: 77881 - protein, 8 aa, Homo Sapiens
SKIPHRVF

SEQ ID NO: 77882 - protein, 8 aa, Homo Sapiens
SKMNSIVY

SEQ ID NO: 77883 - protein, 8 aa, Homo Sapiens
SKYLHVGY

SEQ ID NO: 77884 - protein, 8 aa, Homo Sapiens
SQRAGLQF

SEQ ID NO: 77885 - protein, 8 aa, Homo Sapiens
SQRIFITY

SEQ ID NO: 77886 - protein, 8 aa, Homo Sapiens
SQRSVRLY

SEQ ID NO: 77887 - protein, 8 aa, Homo Sapiens
SQYRIKEY

SEQ ID NO: 77888 - protein, 8 aa, Homo Sapiens
TEELAYLK

SEQ ID NO: 77889 - protein, 8 aa, Homo Sapiens
TKHIGLVY

SEQ ID NO: 77890 - protein, 8 aa, Homo Sapiens
TKYQVTWY

SEQ ID NO: 77891 - protein, 8 aa, Homo Sapiens
TQRLVQVM

SEQ ID NO: 77892 - protein, 8 aa, Homo Sapiens
TQTLVREY

SEQ ID NO: 77893 - protein, 8 aa, Homo Sapiens
TQVILREY

SEQ ID NO: 77894 - protein, 8 aa, Homo Sapiens
TQYIIHNY

SEQ ID NO: 77895 - protein, 8 aa, Homo Sapiens
VKAELRQY

SEQ ID NO: 77896 - protein, 8 aa, Homo Sapiens
VKAKSIVF

SEQ ID NO: 77897 - protein, 8 aa, Homo Sapiens
VKHFHVEY

SEQ ID NO: 77898 - protein, 8 aa, Homo Sapiens
VKVVPTVY

SEQ ID NO: 77899 - protein, 8 aa, Homo Sapiens
VQLILHEY

SEQ ID NO: 77900 - protein, 8 aa, Homo Sapiens
VQQVAAEY

SEQ ID NO: 77901 - protein, 8 aa, Homo Sapiens
VQRVASVM

SEQ ID NO: 77902 - protein, 8 aa, Homo Sapiens
YKFKVIAY

SEQ ID NO: 77903 - protein, 8 aa, Homo Sapiens
YKIDPSTL

SEQ ID NO: 77904 - protein, 8 aa, Homo Sapiens
YKIMPLEL

SEQ ID NO: 77905 - protein, 8 aa, Homo Sapiens
YKVETKKY

SEQ ID NO: 77906 - protein, 8 aa, Homo Sapiens
YKVVGRCL

SEQ ID NO: 77907 - protein, 8 aa, Homo Sapiens
YQRFTDCY

SEQ ID NO: 77908 - protein, 8 aa, Homo Sapiens
YQRLIASY

SEQ ID NO: 77909 - protein, 8 aa, Homo Sapiens
YQSPVRVY

SEQ ID NO: 77910 - protein, 8 aa, Homo Sapiens
YQYTIRAH

SEQ ID NO: 77911 - protein, 9 aa, Homo Sapiens
AAAAAQSVY

SEQ ID NO: 77912 - protein, 9 aa, Homo Sapiens
AAANPTLAF

SEQ ID NO: 77913 - protein, 9 aa, Homo Sapiens
AAAPAGTTF

SEQ ID NO: 77914 - protein, 9 aa, Homo Sapiens
AAAPVIKAY

SEQ ID NO: 77915 - protein, 9 aa, Homo Sapiens
AAESPAGRA

SEQ ID NO: 77916 - protein, 9 aa, Homo Sapiens
AAFTLRTQY

SEQ ID NO: 77917 - protein, 9 aa, Homo Sapiens
AAIRENPVY

SEQ ID NO: 77918 - protein, 9 aa, Homo Sapiens
AANLFAQTY

SEQ ID NO: 77919 - protein, 9 aa, Homo Sapiens
AANPHSFVF

SEQ ID NO: 77920 - protein, 9 aa, Homo Sapiens
AARICANKY

SEQ ID NO: 77921 - protein, 9 aa, Homo Sapiens
AAVGTGSSY

SEQ ID NO: 77922 - protein, 9 aa, Homo Sapiens
AAYKWLVCY

SEQ ID NO: 77923 - protein, 9 aa, Homo Sapiens
AAYLQHLCY

SEQ ID NO: 77924 - protein, 9 aa, Homo Sapiens
AEWSSKTSY

SEQ ID NO: 77925 - protein, 9 aa, Homo Sapiens
AEYQFTGTY

SEQ ID NO: 77926 - protein, 9 aa, Homo Sapiens
AGAPPGTAY

SEQ ID NO: 77927 - protein, 9 aa, Homo Sapiens
AGFAAIVAY

SEQ ID NO: 77928 - protein, 9 aa, Homo Sapiens
AGFAFRQTY

SEQ ID NO: 77929 - protein, 9 aa, Homo Sapiens
AGHLSTAQY

SEQ ID NO: 77930 - protein, 9 aa, Homo Sapiens
AGYLGFKAY

SEQ ID NO: 77931 - protein, 9 aa, Homo Sapiens
AHAHPQEVY

SEQ ID NO: 77932 - protein, 9 aa, Homo Sapiens
AHFAKSISL

SEQ ID NO: 77933 - protein, 9 aa, Homo Sapiens
AHIKVGETY

SEQ ID NO: 77934 - protein, 9 aa, Homo Sapiens
AHIVSRLFY

SEQ ID NO: 77935 - protein, 9 aa, Homo Sapiens
AHKANTLVY

SEQ ID NO: 77936 - protein, 9 aa, Homo Sapiens
AHNMRVMKF

SEQ ID NO: 77937 - protein, 9 aa, Homo Sapiens
AHNPQQIYF

SEQ ID NO: 77938 - protein, 9 aa, Homo Sapiens
AHQGNPAVY

SEQ ID NO: 77939 - protein, 9 aa, Homo Sapiens
AHRNPKIGY

SEQ ID NO: 77940 - protein, 9 aa, Homo Sapiens
AHSGVLLQY

SEQ ID NO: 77941 - protein, 9 aa, Homo Sapiens
AHSLVGTPY

SEQ ID NO: 77942 - protein, 9 aa, Homo Sapiens
AHSVPSPAF

SEQ ID NO: 77943 - protein, 9 aa, Homo Sapiens
AHWVTHTSY

SEQ ID NO: 77944 - protein, 9 aa, Homo Sapiens
AHYNLQNAF

SEQ ID NO: 77945 - protein, 9 aa, Homo Sapiens
AHYPSQPVF

SEQ ID NO: 77946 - protein, 9 aa, Homo Sapiens
AIYGGSASY

SEQ ID NO: 77947 - protein, 9 aa, Homo Sapiens
AKAFLSTLF

SEQ ID NO: 77948 - protein, 9 aa, Homo Sapiens
AKAGILTTL

SEQ ID NO: 77949 - protein, 9 aa, Homo Sapiens
AKAGITTTL

SEQ ID NO: 77950 - protein, 9 aa, Homo Sapiens
AKAISKNVL

SEQ ID NO: 77951 - protein, 9 aa, Homo Sapiens
AKAKPEASF

SEQ ID NO: 77952 - protein, 9 aa, Homo Sapiens
AKAPPPVFY

SEQ ID NO: 77953 - protein, 9 aa, Homo Sapiens
AKAPPTACY

SEQ ID NO: 77954 - protein, 9 aa, Homo Sapiens
AKAPVGPVT

SEQ ID NO: 77955 - protein, 9 aa, Homo Sapiens
AKAPYLAKF

SEQ ID NO: 77956 - protein, 9 aa, Homo Sapiens
AKAQALVQY

SEQ ID NO: 77957 - protein, 9 aa, Homo Sapiens
AKAQSGLAF

SEQ ID NO: 77958 - protein, 9 aa, Homo Sapiens
AKASKIEVY

SEQ ID NO: 77959 - protein, 9 aa, Homo Sapiens
AKAYPPTSM

SEQ ID NO: 77960 - protein, 9 aa, Homo Sapiens
AKCALAYFY

SEQ ID NO: 77961 - protein, 9 aa, Homo Sapiens
AKCGLPLFY

SEQ ID NO: 77962 - protein, 9 aa, Homo Sapiens
AKDPRYARY

SEQ ID NO: 77963 - protein, 9 aa, Homo Sapiens
AKDPTAVIF

SEQ ID NO: 77964 - protein, 9 aa, Homo Sapiens
AKDQSVRIW

SEQ ID NO: 77965 - protein, 9 aa, Homo Sapiens
AKEEHLRQY

SEQ ID NO: 77966 - protein, 9 aa, Homo Sapiens
AKEFNPRSF

SEQ ID NO: 77967 - protein, 9 aa, Homo Sapiens
AKFAYKDEY

SEQ ID NO: 77968 - protein, 9 aa, Homo Sapiens
AKFENLCKL

SEQ ID NO: 77969 - protein, 9 aa, Homo Sapiens
AKFFTESRL

SEQ ID NO: 77970 - protein, 9 aa, Homo Sapiens
AKFIASTGM

SEQ ID NO: 77971 - protein, 9 aa, Homo Sapiens
AKFIEGVVL

SEQ ID NO: 77972 - protein, 9 aa, Homo Sapiens
AKFKDFYQF

SEQ ID NO: 77973 - protein, 9 aa, Homo Sapiens
AKFLGFVAF

SEQ ID NO: 77974 - protein, 9 aa, Homo Sapiens
AKFPLCMVF

SEQ ID NO: 77975 - protein, 9 aa, Homo Sapiens
AKFQPPPEY

SEQ ID NO: 77976 - protein, 9 aa, Homo Sapiens
AKFRSNLPA

SEQ ID NO: 77977 - protein, 9 aa, Homo Sapiens
AKFSATPRY

SEQ ID NO: 77978 - protein, 9 aa, Homo Sapiens
AKFSLPVSL

SEQ ID NO: 77979 - protein, 9 aa, Homo Sapiens
AKFSRPAQL

SEQ ID NO: 77980 - protein, 9 aa, Homo Sapiens
AKFVDGEWY

SEQ ID NO: 77981 - protein, 9 aa, Homo Sapiens
AKFYCRLYY

SEQ ID NO: 77982 - protein, 9 aa, Homo Sapiens
AKGIRNVPY

SEQ ID NO: 77983 - protein, 9 aa, Homo Sapiens
AKGPTLTVY

SEQ ID NO: 77984 - protein, 9 aa, Homo Sapiens
AKGSFVCIY

SEQ ID NO: 77985 - protein, 9 aa, Homo Sapiens
AKHIFKTYL

SEQ ID NO: 77986 - protein, 9 aa, Homo Sapiens
AKHIFPVTF

SEQ ID NO: 77987 - protein, 9 aa, Homo Sapiens
AKHPGLGEY

SEQ ID NO: 77988 - protein, 9 aa, Homo Sapiens
AKIAVVEKY

SEQ ID NO: 77989 - protein, 9 aa, Homo Sapiens
AKICFHHHF

SEQ ID NO: 77990 - protein, 9 aa, Homo Sapiens
AKICHQIEY

SEQ ID NO: 77991 - protein, 9 aa, Homo Sapiens
AKIDSKLGH

SEQ ID NO: 77992 - protein, 9 aa, Homo Sapiens
AKIERFEFY

SEQ ID NO: 77993 - protein, 9 aa, Homo Sapiens
AKIFGIQSF

SEQ ID NO: 77994 - protein, 9 aa, Homo Sapiens
AKIFRGQVY

SEQ ID NO: 77995 - protein, 9 aa, Homo Sapiens
AKIKGKNSF

SEQ ID NO: 77996 - protein, 9 aa, Homo Sapiens
AKIKSLTEY

SEQ ID NO: 77997 - protein, 9 aa, Homo Sapiens
AKILLDPYY

SEQ ID NO: 77998 - protein, 9 aa, Homo Sapiens
AKINEIRQM

SEQ ID NO: 77999 - protein, 9 aa, Homo Sapiens
AKINETDTF

SEQ ID NO: 78000 - protein, 9 aa, Homo Sapiens
AKINSGSSL

SEQ ID NO: 78001 - protein, 9 aa, Homo Sapiens
AKIPFSACL

SEQ ID NO: 78002 - protein, 9 aa, Homo Sapiens
AKIPGTGAL

SEQ ID NO: 78003 - protein, 9 aa, Homo Sapiens
AKIPLGFYY

SEQ ID NO: 78004 - protein, 9 aa, Homo Sapiens
AKIPSVIEY

SEQ ID NO: 78005 - protein, 9 aa, Homo Sapiens
AKIQKAVEY

SEQ ID NO: 78006 - protein, 9 aa, Homo Sapiens
AKISTLPQL

SEQ ID NO: 78007 - protein, 9 aa, Homo Sapiens
AKITAQEAV

SEQ ID NO: 78008 - protein, 9 aa, Homo Sapiens
AKIVPKISY

SEQ ID NO: 78009 - protein, 9 aa, Homo Sapiens
AKIVRLTEY

SEQ ID NO: 78010 - protein, 9 aa, Homo Sapiens
AKIYPDPEL

SEQ ID NO: 78011 - protein, 9 aa, Homo Sapiens
AKKDFEKKF

SEQ ID NO: 78012 - protein, 9 aa, Homo Sapiens
AKKDYNEAY

SEQ ID NO: 78013 - protein, 9 aa, Homo Sapiens
AKKFEASGF

SEQ ID NO: 78014 - protein, 9 aa, Homo Sapiens
AKKGEEALF

SEQ ID NO: 78015 - protein, 9 aa, Homo Sapiens
AKKGIDYDF

SEQ ID NO: 78016 - protein, 9 aa, Homo Sapiens
AKKISQLGY

SEQ ID NO: 78017 - protein, 9 aa, Homo Sapiens
AKKLFGSTF

SEQ ID NO: 78018 - protein, 9 aa, Homo Sapiens
AKKYIDQKF

SEQ ID NO: 78019 - protein, 9 aa, Homo Sapiens
AKLAKTCTL

SEQ ID NO: 78020 - protein, 9 aa, Homo Sapiens
AKLASYVKF

SEQ ID NO: 78021 - protein, 9 aa, Homo Sapiens
AKLDSLQTL

SEQ ID NO: 78022 - protein, 9 aa, Homo Sapiens
AKLDVFQSY

SEQ ID NO: 78023 - protein, 9 aa, Homo Sapiens
AKLEERTGY

SEQ ID NO: 78024 - protein, 9 aa, Homo Sapiens
AKLESMETY

SEQ ID NO: 78025 - protein, 9 aa, Homo Sapiens
AKLFFHTEY

SEQ ID NO: 78026 - protein, 9 aa, Homo Sapiens
AKLIAVEIY

SEQ ID NO: 78027 - protein, 9 aa, Homo Sapiens
AKLIQCIVF

SEQ ID NO: 78028 - protein, 9 aa, Homo Sapiens
AKLKGIGEY

SEQ ID NO: 78029 - protein, 9 aa, Homo Sapiens
AKLKKFIAY

SEQ ID NO: 78030 - protein, 9 aa, Homo Sapiens
AKLLHTDSY

SEQ ID NO: 78031 - protein, 9 aa, Homo Sapiens
AKLNNQARF

SEQ ID NO: 78032 - protein, 9 aa, Homo Sapiens
AKLNPGIAY

SEQ ID NO: 78033 - protein, 9 aa, Homo Sapiens
AKLPEIEEY

SEQ ID NO: 78034 - protein, 9 aa, Homo Sapiens
AKLPIEPRF

SEQ ID NO: 78035 - protein, 9 aa, Homo Sapiens
AKLPKQFKF

SEQ ID NO: 78036 - protein, 9 aa, Homo Sapiens
AKLPSETIF

SEQ ID NO: 78037 - protein, 9 aa, Homo Sapiens
AKLPTGTTL

SEQ ID NO: 78038 - protein, 9 aa, Homo Sapiens
AKLQQTTQL

SEQ ID NO: 78039 - protein, 9 aa, Homo Sapiens
AKLRLLSSF

SEQ ID NO: 78040 - protein, 9 aa, Homo Sapiens
AKLTISPDY

SEQ ID NO: 78041 - protein, 9 aa, Homo Sapiens
AKMATGNYF

SEQ ID NO: 78042 - protein, 9 aa, Homo Sapiens
AKMKGFDVF

SEQ ID NO: 78043 - protein, 9 aa, Homo Sapiens
AKMKTPVQY

SEQ ID NO: 78044 - protein, 9 aa, Homo Sapiens
AKMVVDAVM

SEQ ID NO: 78045 - protein, 9 aa, Homo Sapiens
AKNLFPNTY

SEQ ID NO: 78046 - protein, 9 aa, Homo Sapiens
AKNNGIVSY

SEQ ID NO: 78047 - protein, 9 aa, Homo Sapiens
AKNNVVINY

SEQ ID NO: 78048 - protein, 9 aa, Homo Sapiens
AKNPKIAVS

SEQ ID NO: 78049 - protein, 9 aa, Homo Sapiens
AKNPRINQL

SEQ ID NO: 78050 - protein, 9 aa, Homo Sapiens
AKPFSVVVF

SEQ ID NO: 78051 - protein, 9 aa, Homo Sapiens
AKPKIEHTY

SEQ ID NO: 78052 - protein, 9 aa, Homo Sapiens
AKPLKLYVY

SEQ ID NO: 78053 - protein, 9 aa, Homo Sapiens
AKPTLQLVY

SEQ ID NO: 78054 - protein, 9 aa, Homo Sapiens
AKPTRLNVF

SEQ ID NO: 78055 - protein, 9 aa, Homo Sapiens
AKQDVVLNY

SEQ ID NO: 78056 - protein, 9 aa, Homo Sapiens
AKQIHAVRY

SEQ ID NO: 78057 - protein, 9 aa, Homo Sapiens
AKQLSAQSY

SEQ ID NO: 78058 - protein, 9 aa, Homo Sapiens
AKQPHVGDY

SEQ ID NO: 78059 - protein, 9 aa, Homo Sapiens
AKQRLQQLF

SEQ ID NO: 78060 - protein, 9 aa, Homo Sapiens
AKQRLTPKL

SEQ ID NO: 78061 - protein, 9 aa, Homo Sapiens
AKRFDVSGY

SEQ ID NO: 78062 - protein, 9 aa, Homo Sapiens
AKRIGEVQV

SEQ ID NO: 78063 - protein, 9 aa, Homo Sapiens
AKRLLINLY

SEQ ID NO: 78064 - protein, 9 aa, Homo Sapiens
AKRLREERL

SEQ ID NO: 78065 - protein, 9 aa, Homo Sapiens
AKRLWGDIY

SEQ ID NO: 78066 - protein, 9 aa, Homo Sapiens
AKRMVEHKF

SEQ ID NO: 78067 - protein, 9 aa, Homo Sapiens
AKRPELRNY

SEQ ID NO: 78068 - protein, 9 aa, Homo Sapiens
AKRPSDIKF

SEQ ID NO: 78069 - protein, 9 aa, Homo Sapiens
AKRSDELSF

SEQ ID NO: 78070 - protein, 9 aa, Homo Sapiens
AKRYEKLDF

SEQ ID NO: 78071 - protein, 9 aa, Homo Sapiens
AKSGVGTAL

SEQ ID NO: 78072 - protein, 9 aa, Homo Sapiens
AKSPPHCEL

SEQ ID NO: 78073 - protein, 9 aa, Homo Sapiens
AKSTLRVLY

SEQ ID NO: 78074 - protein, 9 aa, Homo Sapiens
AKSVGPLQY

SEQ ID NO: 78075 - protein, 9 aa, Homo Sapiens
AKSVPSHTY

SEQ ID NO: 78076 - protein, 9 aa, Homo Sapiens
AKSVPTKTY

SEQ ID NO: 78077 - protein, 9 aa, Homo Sapiens
AKTEVSLTL

SEQ ID NO: 78078 - protein, 9 aa, Homo Sapiens
AKTGLTPLM

SEQ ID NO: 78079 - protein, 9 aa, Homo Sapiens
AKTVLAIRY

SEQ ID NO: 78080 - protein, 9 aa, Homo Sapiens
AKVANASYY

SEQ ID NO: 78081 - protein, 9 aa, Homo Sapiens
AKVATGRVL

SEQ ID NO: 78082 - protein, 9 aa, Homo Sapiens
AKVDATADY

SEQ ID NO: 78083 - protein, 9 aa, Homo Sapiens
AKVDLVSAY

SEQ ID NO: 78084 - protein, 9 aa, Homo Sapiens
AKVDRLEAF

SEQ ID NO: 78085 - protein, 9 aa, Homo Sapiens
AKVGKAHVY

SEQ ID NO: 78086 - protein, 9 aa, Homo Sapiens
AKVGSLECL

SEQ ID NO: 78087 - protein, 9 aa, Homo Sapiens
AKVGTRLMF

SEQ ID NO: 78088 - protein, 9 aa, Homo Sapiens
AKVGTRLVF

SEQ ID NO: 78089 - protein, 9 aa, Homo Sapiens
AKVILLTGY

SEQ ID NO: 78090 - protein, 9 aa, Homo Sapiens
AKVKATTSL

SEQ ID NO: 78091 - protein, 9 aa, Homo Sapiens
AKVKFEERY

SEQ ID NO: 78092 - protein, 9 aa, Homo Sapiens
AKVKNSTEF

SEQ ID NO: 78093 - protein, 9 aa, Homo Sapiens
AKVKQRIDY

SEQ ID NO: 78094 - protein, 9 aa, Homo Sapiens
AKVLHGEQY

SEQ ID NO: 78095 - protein, 9 aa, Homo Sapiens
AKVLKTVTF

SEQ ID NO: 78096 - protein, 9 aa, Homo Sapiens
AKVMNLIVF

SEQ ID NO: 78097 - protein, 9 aa, Homo Sapiens
AKVSGGPSL

SEQ ID NO: 78098 - protein, 9 aa, Homo Sapiens
AKVVDKSEY

SEQ ID NO: 78099 - protein, 9 aa, Homo Sapiens
AKVYLTTGY

SEQ ID NO: 78100 - protein, 9 aa, Homo Sapiens
AKWLQDEMF

SEQ ID NO: 78101 - protein, 9 aa, Homo Sapiens
AKWSVESIF

SEQ ID NO: 78102 - protein, 9 aa, Homo Sapiens
AKYDWEQKY

SEQ ID NO: 78103 - protein, 9 aa, Homo Sapiens
AKYEDLYAF

SEQ ID NO: 78104 - protein, 9 aa, Homo Sapiens
AKYESQTSF

SEQ ID NO: 78105 - protein, 9 aa, Homo Sapiens
AKYFIRDEF

SEQ ID NO: 78106 - protein, 9 aa, Homo Sapiens
AKYGIPLAY

SEQ ID NO: 78107 - protein, 9 aa, Homo Sapiens
AKYGYKLCL

SEQ ID NO: 78108 - protein, 9 aa, Homo Sapiens
AKYIETSEL

SEQ ID NO: 78109 - protein, 9 aa, Homo Sapiens
AKYIPELAY

SEQ ID NO: 78110 - protein, 9 aa, Homo Sapiens
AKYITEPEM

SEQ ID NO: 78111 - protein, 9 aa, Homo Sapiens
AKYIVSVGY

SEQ ID NO: 78112 - protein, 9 aa, Homo Sapiens
AKYPAPERL

SEQ ID NO: 78113 - protein, 9 aa, Homo Sapiens
AKYPEIKSL

SEQ ID NO: 78114 - protein, 9 aa, Homo Sapiens
AKYPHVEDY

SEQ ID NO: 78115 - protein, 9 aa, Homo Sapiens
AKYPIKQSL

SEQ ID NO: 78116 - protein, 9 aa, Homo Sapiens
AKYRKIHLF

SEQ ID NO: 78117 - protein, 9 aa, Homo Sapiens
AKYSTPATL

SEQ ID NO: 78118 - protein, 9 aa, Homo Sapiens
AKYYTRITM

SEQ ID NO: 78119 - protein, 9 aa, Homo Sapiens
ALAPAGFSY

SEQ ID NO: 78120 - protein, 9 aa, Homo Sapiens
ALFRTIITY

SEQ ID NO: 78121 - protein, 9 aa, Homo Sapiens
ALLKTGAAY

SEQ ID NO: 78122 - protein, 9 aa, Homo Sapiens
ALMPPFTAF

SEQ ID NO: 78123 - protein, 9 aa, Homo Sapiens
ALWIGTTSF

SEQ ID NO: 78124 - protein, 9 aa, Homo Sapiens
ALWKQFQSF

SEQ ID NO: 78125 - protein, 9 aa, Homo Sapiens
ALYPQTTCF

SEQ ID NO: 78126 - protein, 9 aa, Homo Sapiens
AMHPQVNIY

SEQ ID NO: 78127 - protein, 9 aa, Homo Sapiens
AMIARELLY

SEQ ID NO: 78128 - protein, 9 aa, Homo Sapiens
AMIDGQSAF

SEQ ID NO: 78129 - protein, 9 aa, Homo Sapiens
AMIDTGKAF

SEQ ID NO: 78130 - protein, 9 aa, Homo Sapiens
AMLRQLAQY

SEQ ID NO: 78131 - protein, 9 aa, Homo Sapiens
AMMHGGTGF

SEQ ID NO: 78132 - protein, 9 aa, Homo Sapiens
AMNPTNTVF

SEQ ID NO: 78133 - protein, 9 aa, Homo Sapiens
AMRIGAEVY

SEQ ID NO: 78134 - protein, 9 aa, Homo Sapiens
AMRWFQQKY

SEQ ID NO: 78135 - protein, 9 aa, Homo Sapiens
AMVGHQVSF

SEQ ID NO: 78136 - protein, 9 aa, Homo Sapiens
AMYPHIFYF

SEQ ID NO: 78137 - protein, 9 aa, Homo Sapiens
AMYSRKAMY

SEQ ID NO: 78138 - protein, 9 aa, Homo Sapiens
AQAAPSSSF

SEQ ID NO: 78139 - protein, 9 aa, Homo Sapiens
AQAASQHVF

SEQ ID NO: 78140 - protein, 9 aa, Homo Sapiens
AQAELESRY

SEQ ID NO: 78141 - protein, 9 aa, Homo Sapiens
AQAISRFAY

SEQ ID NO: 78142 - protein, 9 aa, Homo Sapiens
AQAMFNLGY

SEQ ID NO: 78143 - protein, 9 aa, Homo Sapiens
AQAPAGTSF

SEQ ID NO: 78144 - protein, 9 aa, Homo Sapiens
AQAPAQSQF

SEQ ID NO: 78145 - protein, 9 aa, Homo Sapiens
AQAPIAAVL

SEQ ID NO: 78146 - protein, 9 aa, Homo Sapiens
AQAPPTAQL

SEQ ID NO: 78147 - protein, 9 aa, Homo Sapiens
AQAQLQKRY

SEQ ID NO: 78148 - protein, 9 aa, Homo Sapiens
AQARWWATF

SEQ ID NO: 78149 - protein, 9 aa, Homo Sapiens
AQDAGYRMY

SEQ ID NO: 78150 - protein, 9 aa, Homo Sapiens
AQDEHLITF

SEQ ID NO: 78151 - protein, 9 aa, Homo Sapiens
AQEDAQRLY

SEQ ID NO: 78152 - protein, 9 aa, Homo Sapiens
AQEQDSPAF

SEQ ID NO: 78153 - protein, 9 aa, Homo Sapiens
AQERSRLTY

SEQ ID NO: 78154 - protein, 9 aa, Homo Sapiens
AQFETKKLY

SEQ ID NO: 78155 - protein, 9 aa, Homo Sapiens
AQFKGTQSL

SEQ ID NO: 78156 - protein, 9 aa, Homo Sapiens
AQFKTSNSY

SEQ ID NO: 78157 - protein, 9 aa, Homo Sapiens
AQFPFHELF

SEQ ID NO: 78158 - protein, 9 aa, Homo Sapiens
AQFPNGPQF

SEQ ID NO: 78159 - protein, 9 aa, Homo Sapiens
AQFPSSGRF

SEQ ID NO: 78160 - protein, 9 aa, Homo Sapiens
AQHGVCSVL

SEQ ID NO: 78161 - protein, 9 aa, Homo Sapiens
AQHKFLVAV

SEQ ID NO: 78162 - protein, 9 aa, Homo Sapiens
AQHLFIQTF

SEQ ID NO: 78163 - protein, 9 aa, Homo Sapiens
AQHLFLQAF

SEQ ID NO: 78164 - protein, 9 aa, Homo Sapiens
AQHLSQLLF

SEQ ID NO: 78165 - protein, 9 aa, Homo Sapiens
AQHLTVSGF

SEQ ID NO: 78166 - protein, 9 aa, Homo Sapiens
AQHPSALRF

SEQ ID NO: 78167 - protein, 9 aa, Homo Sapiens
AQHSYFGSF

SEQ ID NO: 78168 - protein, 9 aa, Homo Sapiens
AQHVFKVSL

SEQ ID NO: 78169 - protein, 9 aa, Homo Sapiens
AQHYTETAL

SEQ ID NO: 78170 - protein, 9 aa, Homo Sapiens
AQIEGVVPF

SEQ ID NO: 78171 - protein, 9 aa, Homo Sapiens
AQIFRPLKF

SEQ ID NO: 78172 - protein, 9 aa, Homo Sapiens
AQIKFLNTY

SEQ ID NO: 78173 - protein, 9 aa, Homo Sapiens
AQIPPHAVM

SEQ ID NO: 78174 - protein, 9 aa, Homo Sapiens
AQIVHAISY

SEQ ID NO: 78175 - protein, 9 aa, Homo Sapiens
AQIYQLIEY

SEQ ID NO: 78176 - protein, 9 aa, Homo Sapiens
AQKDQEIAF

SEQ ID NO: 78177 - protein, 9 aa, Homo Sapiens
AQKIDLPEY

SEQ ID NO: 78178 - protein, 9 aa, Homo Sapiens
AQKSISQHY

SEQ ID NO: 78179 - protein, 9 aa, Homo Sapiens
AQLAAAEKF

SEQ ID NO: 78180 - protein, 9 aa, Homo Sapiens
AQLERQLQF

SEQ ID NO: 78181 - protein, 9 aa, Homo Sapiens
AQLGLGHSY

SEQ ID NO: 78182 - protein, 9 aa, Homo Sapiens
AQLIASAKY

SEQ ID NO: 78183 - protein, 9 aa, Homo Sapiens
AQLKDYITY

SEQ ID NO: 78184 - protein, 9 aa, Homo Sapiens
AQLPEKVEY

SEQ ID NO: 78185 - protein, 9 aa, Homo Sapiens
AQLRNLEAY

SEQ ID NO: 78186 - protein, 9 aa, Homo Sapiens
AQLSKQSSF

SEQ ID NO: 78187 - protein, 9 aa, Homo Sapiens
AQLWTDLQY

SEQ ID NO: 78188 - protein, 9 aa, Homo Sapiens
AQMAQVLQF

SEQ ID NO: 78189 - protein, 9 aa, Homo Sapiens
AQNAVRLHY

SEQ ID NO: 78190 - protein, 9 aa, Homo Sapiens
AQNLSIIQY

SEQ ID NO: 78191 - protein, 9 aa, Homo Sapiens
AQNVSCASF

SEQ ID NO: 78192 - protein, 9 aa, Homo Sapiens
AQPALKTQF

SEQ ID NO: 78193 - protein, 9 aa, Homo Sapiens
AQPEPSTGF

SEQ ID NO: 78194 - protein, 9 aa, Homo Sapiens
AQPETRVSY

SEQ ID NO: 78195 - protein, 9 aa, Homo Sapiens
AQPHHGVPY

SEQ ID NO: 78196 - protein, 9 aa, Homo Sapiens
AQPPVGAAY

SEQ ID NO: 78197 - protein, 9 aa, Homo Sapiens
AQQEARTEF

SEQ ID NO: 78198 - protein, 9 aa, Homo Sapiens
AQQVVLSSY

SEQ ID NO: 78199 - protein, 9 aa, Homo Sapiens
AQRAFILTV

SEQ ID NO: 78200 - protein, 9 aa, Homo Sapiens
AQRASSNVF

SEQ ID NO: 78201 - protein, 9 aa, Homo Sapiens
AQREDELTF

SEQ ID NO: 78202 - protein, 9 aa, Homo Sapiens
AQRIQKLSF

SEQ ID NO: 78203 - protein, 9 aa, Homo Sapiens
AQRIQNGSY

SEQ ID NO: 78204 - protein, 9 aa, Homo Sapiens
AQRKTLSGF

SEQ ID NO: 78205 - protein, 9 aa, Homo Sapiens
AQRPTEQEL

SEQ ID NO: 78206 - protein, 9 aa, Homo Sapiens
AQRQFVVAA

SEQ ID NO: 78207 - protein, 9 aa, Homo Sapiens
AQRSTETAL

SEQ ID NO: 78208 - protein, 9 aa, Homo Sapiens
AQRYNELSY

SEQ ID NO: 78209 - protein, 9 aa, Homo Sapiens
AQSDFISAF

SEQ ID NO: 78210 - protein, 9 aa, Homo Sapiens
AQSHVKISF

SEQ ID NO: 78211 - protein, 9 aa, Homo Sapiens
AQSPELRTY

SEQ ID NO: 78212 - protein, 9 aa, Homo Sapiens
AQSRFLSTY

SEQ ID NO: 78213 - protein, 9 aa, Homo Sapiens
AQVDPLSAL

SEQ ID NO: 78214 - protein, 9 aa, Homo Sapiens
AQVIVFQTY

SEQ ID NO: 78215 - protein, 9 aa, Homo Sapiens
AQVKKATVF

SEQ ID NO: 78216 - protein, 9 aa, Homo Sapiens
AQVKPDGTY

SEQ ID NO: 78217 - protein, 9 aa, Homo Sapiens
AQVLSVVAH

SEQ ID NO: 78218 - protein, 9 aa, Homo Sapiens
AQVPKSSAL

SEQ ID NO: 78219 - protein, 9 aa, Homo Sapiens
AQVSPRITF

SEQ ID NO: 78220 - protein, 9 aa, Homo Sapiens
AQVSRRISF

SEQ ID NO: 78221 - protein, 9 aa, Homo Sapiens
AQVVLYRSY

SEQ ID NO: 78222 - protein, 9 aa, Homo Sapiens
AQVVQWVSF

SEQ ID NO: 78223 - protein, 9 aa, Homo Sapiens
AQVWMITRY

SEQ ID NO: 78224 - protein, 9 aa, Homo Sapiens
AQWAIHPTF

SEQ ID NO: 78225 - protein, 9 aa, Homo Sapiens
AQWEETVTY

SEQ ID NO: 78226 - protein, 9 aa, Homo Sapiens
AQWKHAVKF

SEQ ID NO: 78227 - protein, 9 aa, Homo Sapiens
AQYDGAYKV

SEQ ID NO: 78228 - protein, 9 aa, Homo Sapiens
AQYDRQIRL

SEQ ID NO: 78229 - protein, 9 aa, Homo Sapiens
AQYEHDLEV

SEQ ID NO: 78230 - protein, 9 aa, Homo Sapiens
AQYKARVAL

SEQ ID NO: 78231 - protein, 9 aa, Homo Sapiens
AQYKEISKF

SEQ ID NO: 78232 - protein, 9 aa, Homo Sapiens
AQYLPKEQY

SEQ ID NO: 78233 - protein, 9 aa, Homo Sapiens
AQYQSVPVY

SEQ ID NO: 78234 - protein, 9 aa, Homo Sapiens
AQYREVAAF

SEQ ID NO: 78235 - protein, 9 aa, Homo Sapiens
ARFKERVGY

SEQ ID NO: 78236 - protein, 9 aa, Homo Sapiens
ARIYHTIAY

SEQ ID NO: 78237 - protein, 9 aa, Homo Sapiens
ASYEVKELY

SEQ ID NO: 78238 - protein, 9 aa, Homo Sapiens
EKAPTNIVY

SEQ ID NO: 78239 - protein, 9 aa, Homo Sapiens
EKVFPLAEY

SEQ ID NO: 78240 - protein, 9 aa, Homo Sapiens
EQYEQILAF

SEQ ID NO: 78241 - protein, 9 aa, Homo Sapiens
EQYESFVKF

SEQ ID NO: 78242 - protein, 9 aa, Homo Sapiens
FAFEHSEEY

SEQ ID NO: 78243 - protein, 9 aa, Homo Sapiens
FHLEAREVY

SEQ ID NO: 78244 - protein, 9 aa, Homo Sapiens
FKALIAAQY

SEQ ID NO: 78245 - protein, 9 aa, Homo Sapiens
FKAPITSEF

SEQ ID NO: 78246 - protein, 9 aa, Homo Sapiens
FKEAEVRVY

SEQ ID NO: 78247 - protein, 9 aa, Homo Sapiens
FKEGKERMY

SEQ ID NO: 78248 - protein, 9 aa, Homo Sapiens
FKFGKELTF

SEQ ID NO: 78249 - protein, 9 aa, Homo Sapiens
FKFMPPPTY

SEQ ID NO: 78250 - protein, 9 aa, Homo Sapiens
FKFSSKNQL

SEQ ID NO: 78251 - protein, 9 aa, Homo Sapiens
FKFVEQQSY

SEQ ID NO: 78252 - protein, 9 aa, Homo Sapiens
FKGELIHVF

SEQ ID NO: 78253 - protein, 9 aa, Homo Sapiens
FKIEPPGLF

SEQ ID NO: 78254 - protein, 9 aa, Homo Sapiens
FKIKITSEL

SEQ ID NO: 78255 - protein, 9 aa, Homo Sapiens
FKIPSNTTL

SEQ ID NO: 78256 - protein, 9 aa, Homo Sapiens
FKKLHEAHF

SEQ ID NO: 78257 - protein, 9 aa, Homo Sapiens
FKKPGSKNF

SEQ ID NO: 78258 - protein, 9 aa, Homo Sapiens
FKKYLQETY

SEQ ID NO: 78259 - protein, 9 aa, Homo Sapiens
FKLEPLQAY

SEQ ID NO: 78260 - protein, 9 aa, Homo Sapiens
FKLLPQLTY

SEQ ID NO: 78261 - protein, 9 aa, Homo Sapiens
FKPETISAF

SEQ ID NO: 78262 - protein, 9 aa, Homo Sapiens
FKPKGGVIF

SEQ ID NO: 78263 - protein, 9 aa, Homo Sapiens
FKPNQTRTY

SEQ ID NO: 78264 - protein, 9 aa, Homo Sapiens
FKRKYGKSL

SEQ ID NO: 78265 - protein, 9 aa, Homo Sapiens
FKSNVTKTM

SEQ ID NO: 78266 - protein, 9 aa, Homo Sapiens
FKSPAASSF

SEQ ID NO: 78267 - protein, 9 aa, Homo Sapiens
FKSQANQNY

SEQ ID NO: 78268 - protein, 9 aa, Homo Sapiens
FKVALLDVF

SEQ ID NO: 78269 - protein, 9 aa, Homo Sapiens
FKVLHIVNF

SEQ ID NO: 78270 - protein, 9 aa, Homo Sapiens
FKVNKKITF

SEQ ID NO: 78271 - protein, 9 aa, Homo Sapiens
FKVSDEVGF

SEQ ID NO: 78272 - protein, 9 aa, Homo Sapiens
FKYNKPAFL

SEQ ID NO: 78273 - protein, 9 aa, Homo Sapiens
FLEETNRLY

SEQ ID NO: 78274 - protein, 9 aa, Homo Sapiens
FLFDGSPTY

SEQ ID NO: 78275 - protein, 9 aa, Homo Sapiens
FQAILDHTY

SEQ ID NO: 78276 - protein, 9 aa, Homo Sapiens
FQAMGKTSF

SEQ ID NO: 78277 - protein, 9 aa, Homo Sapiens
FQAPTAKEM

SEQ ID NO: 78278 - protein, 9 aa, Homo Sapiens
FQFDVQRKY

SEQ ID NO: 78279 - protein, 9 aa, Homo Sapiens
FQFIMKQSY

SEQ ID NO: 78280 - protein, 9 aa, Homo Sapiens
FQFLPHAYY

SEQ ID NO: 78281 - protein, 9 aa, Homo Sapiens
FQKPSGVSA

SEQ ID NO: 78282 - protein, 9 aa, Homo Sapiens
FQLGESVKY

SEQ ID NO: 78283 - protein, 9 aa, Homo Sapiens
FQLGSKLVY

SEQ ID NO: 78284 - protein, 9 aa, Homo Sapiens
FQNNTTNRY

SEQ ID NO: 78285 - protein, 9 aa, Homo Sapiens
FQRGYYRYY

SEQ ID NO: 78286 - protein, 9 aa, Homo Sapiens
FQSLPKSAF

SEQ ID NO: 78287 - protein, 9 aa, Homo Sapiens
FQYESKVFY

SEQ ID NO: 78288 - protein, 9 aa, Homo Sapiens
FQYSKSPSL

SEQ ID NO: 78289 - protein, 9 aa, Homo Sapiens
FSYGTKILY

SEQ ID NO: 78290 - protein, 9 aa, Homo Sapiens
GADVNRVTY

SEQ ID NO: 78291 - protein, 9 aa, Homo Sapiens
GARPVELGF

SEQ ID NO: 78292 - protein, 9 aa, Homo Sapiens
GAYEQVIKY

SEQ ID NO: 78293 - protein, 9 aa, Homo Sapiens
GAYGQAVRY

SEQ ID NO: 78294 - protein, 9 aa, Homo Sapiens
GAYVSLLEY

SEQ ID NO: 78295 - protein, 9 aa, Homo Sapiens
GGPGGVGGL

SEQ ID NO: 78296 - protein, 9 aa, Homo Sapiens
GHYPRHIVF

SEQ ID NO: 78297 - protein, 9 aa, Homo Sapiens
GKAAAAVAF

SEQ ID NO: 78298 - protein, 9 aa, Homo Sapiens
GKAEIARAY

SEQ ID NO: 78299 - protein, 9 aa, Homo Sapiens
GKAFFLSSY

SEQ ID NO: 78300 - protein, 9 aa, Homo Sapiens
GKAFGDSSY

SEQ ID NO: 78301 - protein, 9 aa, Homo Sapiens
GKAFIFPSF

SEQ ID NO: 78302 - protein, 9 aa, Homo Sapiens
GKAFIRSSY

SEQ ID NO: 78303 - protein, 9 aa, Homo Sapiens
GKAFNGKAY

SEQ ID NO: 78304 - protein, 9 aa, Homo Sapiens
GKAFNRNSY

SEQ ID NO: 78305 - protein, 9 aa, Homo Sapiens
GKAFNRSSY

SEQ ID NO: 78306 - protein, 9 aa, Homo Sapiens
GKAFNSRSY

SEQ ID NO: 78307 - protein, 9 aa, Homo Sapiens
GKAFNSSSY

SEQ ID NO: 78308 - protein, 9 aa, Homo Sapiens
GKAFRCSSY

SEQ ID NO: 78309 - protein, 9 aa, Homo Sapiens
GKAFSCSKY

SEQ ID NO: 78310 - protein, 9 aa, Homo Sapiens
GKAFSCSSY

SEQ ID NO: 78311 - protein, 9 aa, Homo Sapiens
GKAFSHSSY

SEQ ID NO: 78312 - protein, 9 aa, Homo Sapiens
GKAFSLRSY

SEQ ID NO: 78313 - protein, 9 aa, Homo Sapiens
GKAFSQKQY

SEQ ID NO: 78314 - protein, 9 aa, Homo Sapiens
GKAFSQSAY

SEQ ID NO: 78315 - protein, 9 aa, Homo Sapiens
GKAFSQSSY

SEQ ID NO: 78316 - protein, 9 aa, Homo Sapiens
GKAFSRISY

SEQ ID NO: 78317 - protein, 9 aa, Homo Sapiens
GKAFSRMSY

SEQ ID NO: 78318 - protein, 9 aa, Homo Sapiens
GKAFSRSSF

SEQ ID NO: 78319 - protein, 9 aa, Homo Sapiens
GKAFSRSSY

SEQ ID NO: 78320 - protein, 9 aa, Homo Sapiens
GKAFSRSTY

SEQ ID NO: 78321 - protein, 9 aa, Homo Sapiens
GKAFSSHAY

SEQ ID NO: 78322 - protein, 9 aa, Homo Sapiens
GKAFSSKSY

SEQ ID NO: 78323 - protein, 9 aa, Homo Sapiens
GKAFSYRSA

SEQ ID NO: 78324 - protein, 9 aa, Homo Sapiens
GKAFSYRSY

SEQ ID NO: 78325 - protein, 9 aa, Homo Sapiens
GKAFTCSSY

SEQ ID NO: 78326 - protein, 9 aa, Homo Sapiens
GKAFTHSRF

SEQ ID NO: 78327 - protein, 9 aa, Homo Sapiens
GKAFTQSAY

SEQ ID NO: 78328 - protein, 9 aa, Homo Sapiens
GKAFTRVNY

SEQ ID NO: 78329 - protein, 9 aa, Homo Sapiens
GKAIVSRQF

SEQ ID NO: 78330 - protein, 9 aa, Homo Sapiens
GKALEVAEY

SEQ ID NO: 78331 - protein, 9 aa, Homo Sapiens
GKANIIFSY

SEQ ID NO: 78332 - protein, 9 aa, Homo Sapiens
GKAPGAEEY

SEQ ID NO: 78333 - protein, 9 aa, Homo Sapiens
GKAPHGPSF

SEQ ID NO: 78334 - protein, 9 aa, Homo Sapiens
GKAPLNVQF

SEQ ID NO: 78335 - protein, 9 aa, Homo Sapiens
GKAPNILLY

SEQ ID NO: 78336 - protein, 9 aa, Homo Sapiens
GKARHRLSF

SEQ ID NO: 78337 - protein, 9 aa, Homo Sapiens
GKASPSPSL

SEQ ID NO: 78338 - protein, 9 aa, Homo Sapiens
GKAWGILTF

SEQ ID NO: 78339 - protein, 9 aa, Homo Sapiens
GKAYHPHCF

SEQ ID NO: 78340 - protein, 9 aa, Homo Sapiens
GKCFSVLGF

SEQ ID NO: 78341 - protein, 9 aa, Homo Sapiens
GKCSGPRAF

SEQ ID NO: 78342 - protein, 9 aa, Homo Sapiens
GKEETRRFY

SEQ ID NO: 78343 - protein, 9 aa, Homo Sapiens
GKEKLPRYY

SEQ ID NO: 78344 - protein, 9 aa, Homo Sapiens
GKFASVFVY

SEQ ID NO: 78345 - protein, 9 aa, Homo Sapiens
GKFDGDSAY

SEQ ID NO: 78346 - protein, 9 aa, Homo Sapiens
GKFDWRQQY

SEQ ID NO: 78347 - protein, 9 aa, Homo Sapiens
GKFFHRSCF

SEQ ID NO: 78348 - protein, 9 aa, Homo Sapiens
GKFFRYSSY

SEQ ID NO: 78349 - protein, 9 aa, Homo Sapiens
GKFFSQKSY

SEQ ID NO: 78350 - protein, 9 aa, Homo Sapiens
GKFFSQMSY

SEQ ID NO: 78351 - protein, 9 aa, Homo Sapiens
GKFFSQSSH

SEQ ID NO: 78352 - protein, 9 aa, Homo Sapiens
GKFFSRLSY

SEQ ID NO: 78353 - protein, 9 aa, Homo Sapiens
GKFFSRVSY

SEQ ID NO: 78354 - protein, 9 aa, Homo Sapiens
GKFHQESKF

SEQ ID NO: 78355 - protein, 9 aa, Homo Sapiens
GKFHSIVRL

SEQ ID NO: 78356 - protein, 9 aa, Homo Sapiens
GKFILSIAY

SEQ ID NO: 78357 - protein, 9 aa, Homo Sapiens
GKFLGLRAY

SEQ ID NO: 78358 - protein, 9 aa, Homo Sapiens
GKFLQGDSF

SEQ ID NO: 78359 - protein, 9 aa, Homo Sapiens
GKFPSLLTH

SEQ ID NO: 78360 - protein, 9 aa, Homo Sapiens
GKFQDNFEF

SEQ ID NO: 78361 - protein, 9 aa, Homo Sapiens
GKFTKTHKF

SEQ ID NO: 78362 - protein, 9 aa, Homo Sapiens
GKGFTRISY

SEQ ID NO: 78363 - protein, 9 aa, Homo Sapiens
GKGFTRTSY

SEQ ID NO: 78364 - protein, 9 aa, Homo Sapiens
GKGGFGTVF

SEQ ID NO: 78365 - protein, 9 aa, Homo Sapiens
GKGKFGNVY

SEQ ID NO: 78366 - protein, 9 aa, Homo Sapiens
GKGNFGEVY

SEQ ID NO: 78367 - protein, 9 aa, Homo Sapiens
GKGSFGEVF

SEQ ID NO: 78368 - protein, 9 aa, Homo Sapiens
GKGSFGEVY

SEQ ID NO: 78369 - protein, 9 aa, Homo Sapiens
GKHFSGESY

SEQ ID NO: 78370 - protein, 9 aa, Homo Sapiens
GKHVPRAVF

SEQ ID NO: 78371 - protein, 9 aa, Homo Sapiens
GKIAVMELF

SEQ ID NO: 78372 - protein, 9 aa, Homo Sapiens
GKIEFISTM

SEQ ID NO: 78373 - protein, 9 aa, Homo Sapiens
GKIERAIGL

SEQ ID NO: 78374 - protein, 9 aa, Homo Sapiens
GKIETIEVM

SEQ ID NO: 78375 - protein, 9 aa, Homo Sapiens
GKIFTFGSY

SEQ ID NO: 78376 - protein, 9 aa, Homo Sapiens
GKIGTVMTF

SEQ ID NO: 78377 - protein, 9 aa, Homo Sapiens
GKIGYYLVL

SEQ ID NO: 78378 - protein, 9 aa, Homo Sapiens
GKIIKPLQY

SEQ ID NO: 78379 - protein, 9 aa, Homo Sapiens
GKINETINY

SEQ ID NO: 78380 - protein, 9 aa, Homo Sapiens
GKINVVPQF

SEQ ID NO: 78381 - protein, 9 aa, Homo Sapiens
GKIPVSRGF

SEQ ID NO: 78382 - protein, 9 aa, Homo Sapiens
GKIQFGYVY

SEQ ID NO: 78383 - protein, 9 aa, Homo Sapiens
GKIRKDLKY

SEQ ID NO: 78384 - protein, 9 aa, Homo Sapiens
GKISDARVV

SEQ ID NO: 78385 - protein, 9 aa, Homo Sapiens
GKISKEKSF

SEQ ID NO: 78386 - protein, 9 aa, Homo Sapiens
GKITDFIKF

SEQ ID NO: 78387 - protein, 9 aa, Homo Sapiens
GKKENDIDY

SEQ ID NO: 78388 - protein, 9 aa, Homo Sapiens
GKKGHVLSY

SEQ ID NO: 78389 - protein, 9 aa, Homo Sapiens
GKKKYETEF

SEQ ID NO: 78390 - protein, 9 aa, Homo Sapiens
GKKLEERGF

SEQ ID NO: 78391 - protein, 9 aa, Homo Sapiens
GKKLFGEGY

SEQ ID NO: 78392 - protein, 9 aa, Homo Sapiens
GKKLTELSM

SEQ ID NO: 78393 - protein, 9 aa, Homo Sapiens
GKLFNRIAY

SEQ ID NO: 78394 - protein, 9 aa, Homo Sapiens
GKLFPLPGY

SEQ ID NO: 78395 - protein, 9 aa, Homo Sapiens
GKLFSQLSY

SEQ ID NO: 78396 - protein, 9 aa, Homo Sapiens
GKLFTQNSH

SEQ ID NO: 78397 - protein, 9 aa, Homo Sapiens
GKLGFLASY

SEQ ID NO: 78398 - protein, 9 aa, Homo Sapiens
GKLGGQDSF

SEQ ID NO: 78399 - protein, 9 aa, Homo Sapiens
GKLIIWDSY

SEQ ID NO: 78400 - protein, 9 aa, Homo Sapiens
GKLKALKTY

SEQ ID NO: 78401 - protein, 9 aa, Homo Sapiens
GKLKDLSRF

SEQ ID NO: 78402 - protein, 9 aa, Homo Sapiens
GKLKGEATV

SEQ ID NO: 78403 - protein, 9 aa, Homo Sapiens
GKLKPTMAF

SEQ ID NO: 78404 - protein, 9 aa, Homo Sapiens
GKLKQFDAY

SEQ ID NO: 78405 - protein, 9 aa, Homo Sapiens
GKLLIGTLY

SEQ ID NO: 78406 - protein, 9 aa, Homo Sapiens
GKLLRDLEY

SEQ ID NO: 78407 - protein, 9 aa, Homo Sapiens
GKLLRTILF

SEQ ID NO: 78408 - protein, 9 aa, Homo Sapiens
GKLQKTVSY

SEQ ID NO: 78409 - protein, 9 aa, Homo Sapiens
GKLQYELQY

SEQ ID NO: 78410 - protein, 9 aa, Homo Sapiens
GKLVALHTF

SEQ ID NO: 78411 - protein, 9 aa, Homo Sapiens
GKLWNLNNY

SEQ ID NO: 78412 - protein, 9 aa, Homo Sapiens
GKMEIFTLF

SEQ ID NO: 78413 - protein, 9 aa, Homo Sapiens
GKMGKGVSF

SEQ ID NO: 78414 - protein, 9 aa, Homo Sapiens
GKMGTLVSL

SEQ ID NO: 78415 - protein, 9 aa, Homo Sapiens
GKMKIFVKY

SEQ ID NO: 78416 - protein, 9 aa, Homo Sapiens
GKMNPQSAF

SEQ ID NO: 78417 - protein, 9 aa, Homo Sapiens
GKNDPSSTF

SEQ ID NO: 78418 - protein, 9 aa, Homo Sapiens
GKNITQLSY

SEQ ID NO: 78419 - protein, 9 aa, Homo Sapiens
GKNLYTNEY

SEQ ID NO: 78420 - protein, 9 aa, Homo Sapiens
GKNPDEVSY

SEQ ID NO: 78421 - protein, 9 aa, Homo Sapiens
GKPEPKVVY

SEQ ID NO: 78422 - protein, 9 aa, Homo Sapiens
GKPFRQPCY

SEQ ID NO: 78423 - protein, 9 aa, Homo Sapiens
GKPGHLQFY

SEQ ID NO: 78424 - protein, 9 aa, Homo Sapiens
GKPLKLMVY

SEQ ID NO: 78425 - protein, 9 aa, Homo Sapiens
GKPNTLVCF

SEQ ID NO: 78426 - protein, 9 aa, Homo Sapiens
GKPTHFTVY

SEQ ID NO: 78427 - protein, 9 aa, Homo Sapiens
GKPVVNVSY

SEQ ID NO: 78428 - protein, 9 aa, Homo Sapiens
GKPWHKNCF

SEQ ID NO: 78429 - protein, 9 aa, Homo Sapiens
GKQQWQQLY

SEQ ID NO: 78430 - protein, 9 aa, Homo Sapiens
GKRFEIACY

SEQ ID NO: 78431 - protein, 9 aa, Homo Sapiens
GKRKEIYKY

SEQ ID NO: 78432 - protein, 9 aa, Homo Sapiens
GKRLDVTGF

SEQ ID NO: 78433 - protein, 9 aa, Homo Sapiens
GKRLNTREF

SEQ ID NO: 78434 - protein, 9 aa, Homo Sapiens
GKRPFGVSL

SEQ ID NO: 78435 - protein, 9 aa, Homo Sapiens
GKRPPGVLH

SEQ ID NO: 78436 - protein, 9 aa, Homo Sapiens
GKRTDEAAF

SEQ ID NO: 78437 - protein, 9 aa, Homo Sapiens
GKSDPFLEF

SEQ ID NO: 78438 - protein, 9 aa, Homo Sapiens
GKSEVTSSF

SEQ ID NO: 78439 - protein, 9 aa, Homo Sapiens
GKSFASKEY

SEQ ID NO: 78440 - protein, 9 aa, Homo Sapiens
GKSFGTSSY

SEQ ID NO: 78441 - protein, 9 aa, Homo Sapiens
GKSFSRSAY

SEQ ID NO: 78442 - protein, 9 aa, Homo Sapiens
GKSFSRSSF

SEQ ID NO: 78443 - protein, 9 aa, Homo Sapiens
GKSFTSNSY

SEQ ID NO: 78444 - protein, 9 aa, Homo Sapiens
GKSGHILSY

SEQ ID NO: 78445 - protein, 9 aa, Homo Sapiens
GKSHIGLVY

SEQ ID NO: 78446 - protein, 9 aa, Homo Sapiens
GKSSVINAM

SEQ ID NO: 78447 - protein, 9 aa, Homo Sapiens
GKSSVIQVF

SEQ ID NO: 78448 - protein, 9 aa, Homo Sapiens
GKSTSIQSF

SEQ ID NO: 78449 - protein, 9 aa, Homo Sapiens
GKSTVINAM

SEQ ID NO: 78450 - protein, 9 aa, Homo Sapiens
GKSYSVALY

SEQ ID NO: 78451 - protein, 9 aa, Homo Sapiens
GKTAVDTVF

SEQ ID NO: 78452 - protein, 9 aa, Homo Sapiens
GKTCLLISY

SEQ ID NO: 78453 - protein, 9 aa, Homo Sapiens
GKTDPGTVF

SEQ ID NO: 78454 - protein, 9 aa, Homo Sapiens
GKTFSKSTY

SEQ ID NO: 78455 - protein, 9 aa, Homo Sapiens
GKTFSNSSY

SEQ ID NO: 78456 - protein, 9 aa, Homo Sapiens
GKTFSQTSY

SEQ ID NO: 78457 - protein, 9 aa, Homo Sapiens
GKTFSQTYY

SEQ ID NO: 78458 - protein, 9 aa, Homo Sapiens
GKTIQTISF

SEQ ID NO: 78459 - protein, 9 aa, Homo Sapiens
GKTSLITRF

SEQ ID NO: 78460 - protein, 9 aa, Homo Sapiens
GKTSLVQRY

SEQ ID NO: 78461 - protein, 9 aa, Homo Sapiens
GKTTQVTQF

SEQ ID NO: 78462 - protein, 9 aa, Homo Sapiens
GKTVQIPVY

SEQ ID NO: 78463 - protein, 9 aa, Homo Sapiens
GKVAVVAGY

SEQ ID NO: 78464 - protein, 9 aa, Homo Sapiens
GKVFATTGY

SEQ ID NO: 78465 - protein, 9 aa, Homo Sapiens
GKVFFTEKF

SEQ ID NO: 78466 - protein, 9 aa, Homo Sapiens
GKVFKHRSY

SEQ ID NO: 78467 - protein, 9 aa, Homo Sapiens
GKVFRHNSY

SEQ ID NO: 78468 - protein, 9 aa, Homo Sapiens
GKVFSNNSY

SEQ ID NO: 78469 - protein, 9 aa, Homo Sapiens
GKVFSQNAY

SEQ ID NO: 78470 - protein, 9 aa, Homo Sapiens
GKVFSRITY

SEQ ID NO: 78471 - protein, 9 aa, Homo Sapiens
GKVFSRNSY

SEQ ID NO: 78472 - protein, 9 aa, Homo Sapiens
GKVGSQSSF

SEQ ID NO: 78473 - protein, 9 aa, Homo Sapiens
GKVIGIAIM

SEQ ID NO: 78474 - protein, 9 aa, Homo Sapiens
GKVKLVVRY

SEQ ID NO: 78475 - protein, 9 aa, Homo Sapiens
GKVLTDEQY

SEQ ID NO: 78476 - protein, 9 aa, Homo Sapiens
GKVMGKVFF

SEQ ID NO: 78477 - protein, 9 aa, Homo Sapiens
GKVPQPAIL

SEQ ID NO: 78478 - protein, 9 aa, Homo Sapiens
GKVPVVVSY

SEQ ID NO: 78479 - protein, 9 aa, Homo Sapiens
GKVQENSAY

SEQ ID NO: 78480 - protein, 9 aa, Homo Sapiens
GKVRPYSVY

SEQ ID NO: 78481 - protein, 9 aa, Homo Sapiens
GKVTGDTVY

SEQ ID NO: 78482 - protein, 9 aa, Homo Sapiens
GKVTSIMQF

SEQ ID NO: 78483 - protein, 9 aa, Homo Sapiens
GKVVKVTIM

SEQ ID NO: 78484 - protein, 9 aa, Homo Sapiens
GKVVVGHAL

SEQ ID NO: 78485 - protein, 9 aa, Homo Sapiens
GKVYSSSSY

SEQ ID NO: 78486 - protein, 9 aa, Homo Sapiens
GKWFTPTEF

SEQ ID NO: 78487 - protein, 9 aa, Homo Sapiens
GKWKQISKY

SEQ ID NO: 78488 - protein, 9 aa, Homo Sapiens
GKWNLKQQY

SEQ ID NO: 78489 - protein, 9 aa, Homo Sapiens
GKWPQIMIF

SEQ ID NO: 78490 - protein, 9 aa, Homo Sapiens
GKYASIILF

SEQ ID NO: 78491 - protein, 9 aa, Homo Sapiens
GKYASPDVF

SEQ ID NO: 78492 - protein, 9 aa, Homo Sapiens
GKYAVIGTY

SEQ ID NO: 78493 - protein, 9 aa, Homo Sapiens
GKYEAVERY

SEQ ID NO: 78494 - protein, 9 aa, Homo Sapiens
GKYEEVEYY

SEQ ID NO: 78495 - protein, 9 aa, Homo Sapiens
GKYFDKASY

SEQ ID NO: 78496 - protein, 9 aa, Homo Sapiens
GKYFEPEAY

SEQ ID NO: 78497 - protein, 9 aa, Homo Sapiens
GKYFSLEGY

SEQ ID NO: 78498 - protein, 9 aa, Homo Sapiens
GKYGFVIAV

SEQ ID NO: 78499 - protein, 9 aa, Homo Sapiens
GKYGGMQMF

SEQ ID NO: 78500 - protein, 9 aa, Homo Sapiens
GKYGSSLEF

SEQ ID NO: 78501 - protein, 9 aa, Homo Sapiens
GKYGTLQEF

SEQ ID NO: 78502 - protein, 9 aa, Homo Sapiens
GKYIPKQSF

SEQ ID NO: 78503 - protein, 9 aa, Homo Sapiens
GKYKFLQKY

SEQ ID NO: 78504 - protein, 9 aa, Homo Sapiens
GKYKSVSAF

SEQ ID NO: 78505 - protein, 9 aa, Homo Sapiens
GKYLELLGY

SEQ ID NO: 78506 - protein, 9 aa, Homo Sapiens
GKYNQILAF

SEQ ID NO: 78507 - protein, 9 aa, Homo Sapiens
GKYPSWTFY

SEQ ID NO: 78508 - protein, 9 aa, Homo Sapiens
GKYQEALSY

SEQ ID NO: 78509 - protein, 9 aa, Homo Sapiens
GKYVSVGAF

SEQ ID NO: 78510 - protein, 9 aa, Homo Sapiens
GKYYFYDNY

SEQ ID NO: 78511 - protein, 9 aa, Homo Sapiens
GKYYRVCTL

SEQ ID NO: 78512 - protein, 9 aa, Homo Sapiens
GMWKGGRSH

SEQ ID NO: 78513 - protein, 9 aa, Homo Sapiens
GMYGKIAVM

SEQ ID NO: 78514 - protein, 9 aa, Homo Sapiens
GNYATVISH

SEQ ID NO: 78515 - protein, 9 aa, Homo Sapiens
GQAGMHATY

SEQ ID NO: 78516 - protein, 9 aa, Homo Sapiens
GQAPPGKAL

SEQ ID NO: 78517 - protein, 9 aa, Homo Sapiens
GQCRLRVEF

SEQ ID NO: 78518 - protein, 9 aa, Homo Sapiens
GQEGKYRVY

SEQ ID NO: 78519 - protein, 9 aa, Homo Sapiens
GQEVSPKVY

SEQ ID NO: 78520 - protein, 9 aa, Homo Sapiens
GQFASDVQF

SEQ ID NO: 78521 - protein, 9 aa, Homo Sapiens
GQFGTINNF

SEQ ID NO: 78522 - protein, 9 aa, Homo Sapiens
GQFLAPNSH

SEQ ID NO: 78523 - protein, 9 aa, Homo Sapiens
GQFLVRIIY

SEQ ID NO: 78524 - protein, 9 aa, Homo Sapiens
GQFPGHNEF

SEQ ID NO: 78525 - protein, 9 aa, Homo Sapiens
GQFSKPFSF

SEQ ID NO: 78526 - protein, 9 aa, Homo Sapiens
GQHGYSTGY

SEQ ID NO: 78527 - protein, 9 aa, Homo Sapiens
GQHIQLVQY

SEQ ID NO: 78528 - protein, 9 aa, Homo Sapiens
GQHNQSVNY

SEQ ID NO: 78529 - protein, 9 aa, Homo Sapiens
GQHSHVVRY

SEQ ID NO: 78530 - protein, 9 aa, Homo Sapiens
GQHVTAALY

SEQ ID NO: 78531 - protein, 9 aa, Homo Sapiens
GQIEFLRCY

SEQ ID NO: 78532 - protein, 9 aa, Homo Sapiens
GQIEHKLAF

SEQ ID NO: 78533 - protein, 9 aa, Homo Sapiens
GQIPQILYY

SEQ ID NO: 78534 - protein, 9 aa, Homo Sapiens
GQKIFYVNY

SEQ ID NO: 78535 - protein, 9 aa, Homo Sapiens
GQKLAEQMF

SEQ ID NO: 78536 - protein, 9 aa, Homo Sapiens
GQKLGGQSF

SEQ ID NO: 78537 - protein, 9 aa, Homo Sapiens
GQKPGGSDF

SEQ ID NO: 78538 - protein, 9 aa, Homo Sapiens
GQKPWSQHY

SEQ ID NO: 78539 - protein, 9 aa, Homo Sapiens
GQKQYNVDY

SEQ ID NO: 78540 - protein, 9 aa, Homo Sapiens
GQLFHIACF

SEQ ID NO: 78541 - protein, 9 aa, Homo Sapiens
GQLGFHVKY

SEQ ID NO: 78542 - protein, 9 aa, Homo Sapiens
GQLGFHVNY

SEQ ID NO: 78543 - protein, 9 aa, Homo Sapiens
GQLGLLARY

SEQ ID NO: 78544 - protein, 9 aa, Homo Sapiens
GQLGTHAEY

SEQ ID NO: 78545 - protein, 9 aa, Homo Sapiens
GQLMFMNKY

SEQ ID NO: 78546 - protein, 9 aa, Homo Sapiens
GQLPGLHEY

SEQ ID NO: 78547 - protein, 9 aa, Homo Sapiens
GQLVKMLLY

SEQ ID NO: 78548 - protein, 9 aa, Homo Sapiens
GQLVRSILY

SEQ ID NO: 78549 - protein, 9 aa, Homo Sapiens
GQMIFAQAL

SEQ ID NO: 78550 - protein, 9 aa, Homo Sapiens
GQNAQTMAY

SEQ ID NO: 78551 - protein, 9 aa, Homo Sapiens
GQNASVLAY

SEQ ID NO: 78552 - protein, 9 aa, Homo Sapiens
GQNKKVMIY

SEQ ID NO: 78553 - protein, 9 aa, Homo Sapiens
GQNPFELAF

SEQ ID NO: 78554 - protein, 9 aa, Homo Sapiens
GQPGAFTCY

SEQ ID NO: 78555 - protein, 9 aa, Homo Sapiens
GQQGSCLVY

SEQ ID NO: 78556 - protein, 9 aa, Homo Sapiens
GQQRCIATY

SEQ ID NO: 78557 - protein, 9 aa, Homo Sapiens
GQRAKSMKF

SEQ ID NO: 78558 - protein, 9 aa, Homo Sapiens
GQREGSRGF

SEQ ID NO: 78559 - protein, 9 aa, Homo Sapiens
GQRGSGSSF

SEQ ID NO: 78560 - protein, 9 aa, Homo Sapiens
GQRKEVEVF

SEQ ID NO: 78561 - protein, 9 aa, Homo Sapiens
GQRKPATSY

SEQ ID NO: 78562 - protein, 9 aa, Homo Sapiens
GQRPTQPVY

SEQ ID NO: 78563 - protein, 9 aa, Homo Sapiens
GQRQVGVGY

SEQ ID NO: 78564 - protein, 9 aa, Homo Sapiens
GQRSYLVQY

SEQ ID NO: 78565 - protein, 9 aa, Homo Sapiens
GQRTFGENY

SEQ ID NO: 78566 - protein, 9 aa, Homo Sapiens
GQSKDKVIY

SEQ ID NO: 78567 - protein, 9 aa, Homo Sapiens
GQSRLIFTY

SEQ ID NO: 78568 - protein, 9 aa, Homo Sapiens
GQTAYATSY

SEQ ID NO: 78569 - protein, 9 aa, Homo Sapiens
GQTGTGKTF

SEQ ID NO: 78570 - protein, 9 aa, Homo Sapiens
GQTGTKSVF

SEQ ID NO: 78571 - protein, 9 aa, Homo Sapiens
GQTKPVVVY

SEQ ID NO: 78572 - protein, 9 aa, Homo Sapiens
GQTKPVYVY

SEQ ID NO: 78573 - protein, 9 aa, Homo Sapiens
GQTKQVTVY

SEQ ID NO: 78574 - protein, 9 aa, Homo Sapiens
GQVAAGGAF

SEQ ID NO: 78575 - protein, 9 aa, Homo Sapiens
GQVKAAVKY

SEQ ID NO: 78576 - protein, 9 aa, Homo Sapiens
GQVKTGISM

SEQ ID NO: 78577 - protein, 9 aa, Homo Sapiens
GQVQKIVLY

SEQ ID NO: 78578 - protein, 9 aa, Homo Sapiens
GQVQLPSPH

SEQ ID NO: 78579 - protein, 9 aa, Homo Sapiens
GQVQVRTLY

SEQ ID NO: 78580 - protein, 9 aa, Homo Sapiens
GQVTFLHVF

SEQ ID NO: 78581 - protein, 9 aa, Homo Sapiens
GQVYSELKY

SEQ ID NO: 78582 - protein, 9 aa, Homo Sapiens
GQWGGGSHY

SEQ ID NO: 78583 - protein, 9 aa, Homo Sapiens
GQYKGPIQY

SEQ ID NO: 78584 - protein, 9 aa, Homo Sapiens
GQYPTQPTY

SEQ ID NO: 78585 - protein, 9 aa, Homo Sapiens
GQYPVFNQY

SEQ ID NO: 78586 - protein, 9 aa, Homo Sapiens
GQYPYPSGF

SEQ ID NO: 78587 - protein, 9 aa, Homo Sapiens
GQYQFDVKY

SEQ ID NO: 78588 - protein, 9 aa, Homo Sapiens
GQYYKPEQF

SEQ ID NO: 78589 - protein, 9 aa, Homo Sapiens
HERTFLLEY

SEQ ID NO: 78590 - protein, 9 aa, Homo Sapiens
HGIDPTGTY

SEQ ID NO: 78591 - protein, 9 aa, Homo Sapiens
HHFLQVLTY

SEQ ID NO: 78592 - protein, 9 aa, Homo Sapiens
HHGPMAVAF

SEQ ID NO: 78593 - protein, 9 aa, Homo Sapiens
HHIPDVITY

SEQ ID NO: 78594 - protein, 9 aa, Homo Sapiens
HHVIARHEY

SEQ ID NO: 78595 - protein, 9 aa, Homo Sapiens
HKFPDEDSY

SEQ ID NO: 78596 - protein, 9 aa, Homo Sapiens
HKGKFGHEF

SEQ ID NO: 78597 - protein, 9 aa, Homo Sapiens
HKIDKSHEF

SEQ ID NO: 78598 - protein, 9 aa, Homo Sapiens
HKIEAGNEF

SEQ ID NO: 78599 - protein, 9 aa, Homo Sapiens
HKKPFLAKY

SEQ ID NO: 78600 - protein, 9 aa, Homo Sapiens
HKLDISDEF

SEQ ID NO: 78601 - protein, 9 aa, Homo Sapiens
HKLGNSCEF

SEQ ID NO: 78602 - protein, 9 aa, Homo Sapiens
HKLWDPNEF

SEQ ID NO: 78603 - protein, 9 aa, Homo Sapiens
HKMVVESAY

SEQ ID NO: 78604 - protein, 9 aa, Homo Sapiens
HKPDFISLF

SEQ ID NO: 78605 - protein, 9 aa, Homo Sapiens
HKRIHGVGF

SEQ ID NO: 78606 - protein, 9 aa, Homo Sapiens
HKRLPDVRF

SEQ ID NO: 78607 - protein, 9 aa, Homo Sapiens
HKVANTSSF

SEQ ID NO: 78608 - protein, 9 aa, Homo Sapiens
HKVISGTTL

SEQ ID NO: 78609 - protein, 9 aa, Homo Sapiens
HKYLTVKDY

SEQ ID NO: 78610 - protein, 9 aa, Homo Sapiens
HQAIHTIEF

SEQ ID NO: 78611 - protein, 9 aa, Homo Sapiens
HQAIHTIEY

SEQ ID NO: 78612 - protein, 9 aa, Homo Sapiens
HQALPSVSH

SEQ ID NO: 78613 - protein, 9 aa, Homo Sapiens
HQAPRQLFY

SEQ ID NO: 78614 - protein, 9 aa, Homo Sapiens
HQASHQPLY

SEQ ID NO: 78615 - protein, 9 aa, Homo Sapiens
HQHLSKESM

SEQ ID NO: 78616 - protein, 9 aa, Homo Sapiens
HQITVLHVY

SEQ ID NO: 78617 - protein, 9 aa, Homo Sapiens
HQKKEFVKY

SEQ ID NO: 78618 - protein, 9 aa, Homo Sapiens
HQLATDSTF

SEQ ID NO: 78619 - protein, 9 aa, Homo Sapiens
HQLEFIQKF

SEQ ID NO: 78620 - protein, 9 aa, Homo Sapiens
HQLGNNSVF

SEQ ID NO: 78621 - protein, 9 aa, Homo Sapiens
HQMTPSSSY

SEQ ID NO: 78622 - protein, 9 aa, Homo Sapiens
HQNSNIRTY

SEQ ID NO: 78623 - protein, 9 aa, Homo Sapiens
HQQPPSQQY

SEQ ID NO: 78624 - protein, 9 aa, Homo Sapiens
HQRLQLCVF

SEQ ID NO: 78625 - protein, 9 aa, Homo Sapiens
HQRQNINKF

SEQ ID NO: 78626 - protein, 9 aa, Homo Sapiens
HQRSFTETM

SEQ ID NO: 78627 - protein, 9 aa, Homo Sapiens
HQVLIMTCY

SEQ ID NO: 78628 - protein, 9 aa, Homo Sapiens
HQVSLLARF

SEQ ID NO: 78629 - protein, 9 aa, Homo Sapiens
HQYFSYNQM

SEQ ID NO: 78630 - protein, 9 aa, Homo Sapiens
HQYSIQVAF

SEQ ID NO: 78631 - protein, 9 aa, Homo Sapiens
HSWLTRAMY

SEQ ID NO: 78632 - protein, 9 aa, Homo Sapiens
HVGKTPIVG

SEQ ID NO: 78633 - protein, 9 aa, Homo Sapiens
IHCDMVITY

SEQ ID NO: 78634 - protein, 9 aa, Homo Sapiens
IHFISPNIY

SEQ ID NO: 78635 - protein, 9 aa, Homo Sapiens
IHNPTGRSY

SEQ ID NO: 78636 - protein, 9 aa, Homo Sapiens
IHYQMVYSY

SEQ ID NO: 78637 - protein, 9 aa, Homo Sapiens
IILMILLLI

SEQ ID NO: 78638 - protein, 9 aa, Homo Sapiens
IILPFLILL

SEQ ID NO: 78639 - protein, 9 aa, Homo Sapiens
IKAAFKTSY

SEQ ID NO: 78640 - protein, 9 aa, Homo Sapiens
IKADHVSTY

SEQ ID NO: 78641 - protein, 9 aa, Homo Sapiens
IKAPTPTCF

SEQ ID NO: 78642 - protein, 9 aa, Homo Sapiens
IKDNVVIVY

SEQ ID NO: 78643 - protein, 9 aa, Homo Sapiens
IKDPKEREF

SEQ ID NO: 78644 - protein, 9 aa, Homo Sapiens
IKENPSSQY

SEQ ID NO: 78645 - protein, 9 aa, Homo Sapiens
IKFFTGDVF

SEQ ID NO: 78646 - protein, 9 aa, Homo Sapiens
IKFSEEQRF

SEQ ID NO: 78647 - protein, 9 aa, Homo Sapiens
IKHPNLVRY

SEQ ID NO: 78648 - protein, 9 aa, Homo Sapiens
IKISNPTEF

SEQ ID NO: 78649 - protein, 9 aa, Homo Sapiens
IKKDSGKEF

SEQ ID NO: 78650 - protein, 9 aa, Homo Sapiens
IKKEFDKKY

SEQ ID NO: 78651 - protein, 9 aa, Homo Sapiens
IKKIADDKY

SEQ ID NO: 78652 - protein, 9 aa, Homo Sapiens
IKKKPGTSL

SEQ ID NO: 78653 - protein, 9 aa, Homo Sapiens
IKLLETESF

SEQ ID NO: 78654 - protein, 9 aa, Homo Sapiens
IKLPSVTSF

SEQ ID NO: 78655 - protein, 9 aa, Homo Sapiens
IKMGLLSSF

SEQ ID NO: 78656 - protein, 9 aa, Homo Sapiens
IKNQLIEQF

SEQ ID NO: 78657 - protein, 9 aa, Homo Sapiens
IKPDGLLEF

SEQ ID NO: 78658 - protein, 9 aa, Homo Sapiens
IKPEQTTEY

SEQ ID NO: 78659 - protein, 9 aa, Homo Sapiens
IKPETILYY

SEQ ID NO: 78660 - protein, 9 aa, Homo Sapiens
IKPGTSVEY

SEQ ID NO: 78661 - protein, 9 aa, Homo Sapiens
IKVIPTLAL

SEQ ID NO: 78662 - protein, 9 aa, Homo Sapiens
IKVPDFSEY

SEQ ID NO: 78663 - protein, 9 aa, Homo Sapiens
IKYNTIETF

SEQ ID NO: 78664 - protein, 9 aa, Homo Sapiens
ILAARSPVF

SEQ ID NO: 78665 - protein, 9 aa, Homo Sapiens
ILGPPGSVY

SEQ ID NO: 78666 - protein, 9 aa, Homo Sapiens
ILIACGTSY

SEQ ID NO: 78667 - protein, 9 aa, Homo Sapiens
ILKPDGSLY

SEQ ID NO: 78668 - protein, 9 aa, Homo Sapiens
ILRPGGCLF

SEQ ID NO: 78669 - protein, 9 aa, Homo Sapiens
ILTVGGTAY

SEQ ID NO: 78670 - protein, 9 aa, Homo Sapiens
ILYNIKQEY

SEQ ID NO: 78671 - protein, 9 aa, Homo Sapiens
IMEHRFKTY

SEQ ID NO: 78672 - protein, 9 aa, Homo Sapiens
IMKIDIEKF

SEQ ID NO: 78673 - protein, 9 aa, Homo Sapiens
IMKNPEVEF

SEQ ID NO: 78674 - protein, 9 aa, Homo Sapiens
IMVKPHEEY

SEQ ID NO: 78675 - protein, 9 aa, Homo Sapiens
IQAGIFQEF

SEQ ID NO: 78676 - protein, 9 aa, Homo Sapiens
IQASTVVTY

SEQ ID NO: 78677 - protein, 9 aa, Homo Sapiens
IQEEFYRVY

SEQ ID NO: 78678 - protein, 9 aa, Homo Sapiens
IQEESLRTY

SEQ ID NO: 78679 - protein, 9 aa, Homo Sapiens
IQFEIAHAY

SEQ ID NO: 78680 - protein, 9 aa, Homo Sapiens
IQFKLHESY

SEQ ID NO: 78681 - protein, 9 aa, Homo Sapiens
IQFNLRNLY

SEQ ID NO: 78682 - protein, 9 aa, Homo Sapiens
IQHSTIIGF

SEQ ID NO: 78683 - protein, 9 aa, Homo Sapiens
IQKPGSNAF

SEQ ID NO: 78684 - protein, 9 aa, Homo Sapiens
IQKQFEELY

SEQ ID NO: 78685 - protein, 9 aa, Homo Sapiens
IQLLQKLTY

SEQ ID NO: 78686 - protein, 9 aa, Homo Sapiens
IQNDRQLQY

SEQ ID NO: 78687 - protein, 9 aa, Homo Sapiens
IQNNPHASY

SEQ ID NO: 78688 - protein, 9 aa, Homo Sapiens
IQNPDPAVY

SEQ ID NO: 78689 - protein, 9 aa, Homo Sapiens
IQRQETISL

SEQ ID NO: 78690 - protein, 9 aa, Homo Sapiens
IQRTEAYEY

SEQ ID NO: 78691 - protein, 9 aa, Homo Sapiens
IQVDPNYAY

SEQ ID NO: 78692 - protein, 9 aa, Homo Sapiens
IQVKVRDTY

SEQ ID NO: 78693 - protein, 9 aa, Homo Sapiens
IQVVSKNLY

SEQ ID NO: 78694 - protein, 9 aa, Homo Sapiens
IQYDKTNVL

SEQ ID NO: 78695 - protein, 9 aa, Homo Sapiens
IQYKTLRTF

SEQ ID NO: 78696 - protein, 9 aa, Homo Sapiens
ISRETGEPY

SEQ ID NO: 78697 - protein, 9 aa, Homo Sapiens
KAFDFPSSF

SEQ ID NO: 78698 - protein, 9 aa, Homo Sapiens
KALSRLISF

SEQ ID NO: 78699 - protein, 9 aa, Homo Sapiens
KAVLDSYEY

SEQ ID NO: 78700 - protein, 9 aa, Homo Sapiens
KAYGASKTF

SEQ ID NO: 78701 - protein, 9 aa, Homo Sapiens
KEYEKALKY

SEQ ID NO: 78702 - protein, 9 aa, Homo Sapiens
KEYERFSKY

SEQ ID NO: 78703 - protein, 9 aa, Homo Sapiens
KGRVFEVSL

SEQ ID NO: 78704 - protein, 9 aa, Homo Sapiens
KHFEVLISY

SEQ ID NO: 78705 - protein, 9 aa, Homo Sapiens
KHFGTILNY

SEQ ID NO: 78706 - protein, 9 aa, Homo Sapiens
KHKTFVEKY

SEQ ID NO: 78707 - protein, 9 aa, Homo Sapiens
KHLDKFSSY

SEQ ID NO: 78708 - protein, 9 aa, Homo Sapiens
KHQEHILRF

SEQ ID NO: 78709 - protein, 9 aa, Homo Sapiens
KIRGGKQFI

SEQ ID NO: 78710 - protein, 9 aa, Homo Sapiens
KKADCTITM

SEQ ID NO: 78711 - protein, 9 aa, Homo Sapiens
KKADIGVAM

SEQ ID NO: 78712 - protein, 9 aa, Homo Sapiens
KKADLILSY

SEQ ID NO: 78713 - protein, 9 aa, Homo Sapiens
KKAEIGIAM

SEQ ID NO: 78714 - protein, 9 aa, Homo Sapiens
KKAHLGTAL

SEQ ID NO: 78715 - protein, 9 aa, Homo Sapiens
KKAIATLCF

SEQ ID NO: 78716 - protein, 9 aa, Homo Sapiens
KKAIQDPAF

SEQ ID NO: 78717 - protein, 9 aa, Homo Sapiens
KKALAAAGY

SEQ ID NO: 78718 - protein, 9 aa, Homo Sapiens
KKALAAGGY

SEQ ID NO: 78719 - protein, 9 aa, Homo Sapiens
KKAMPGAEY

SEQ ID NO: 78720 - protein, 9 aa, Homo Sapiens
KKAMTVGEY

SEQ ID NO: 78721 - protein, 9 aa, Homo Sapiens
KKANITFEY

SEQ ID NO: 78722 - protein, 9 aa, Homo Sapiens
KKAPAGPSL

SEQ ID NO: 78723 - protein, 9 aa, Homo Sapiens
KKAPDFVFY

SEQ ID NO: 78724 - protein, 9 aa, Homo Sapiens
KKAPLLLHY

SEQ ID NO: 78725 - protein, 9 aa, Homo Sapiens
KKASIGYTY

SEQ ID NO: 78726 - protein, 9 aa, Homo Sapiens
KKAVGGVAL

SEQ ID NO: 78727 - protein, 9 aa, Homo Sapiens
KKCDISLQF

SEQ ID NO: 78728 - protein, 9 aa, Homo Sapiens
KKDPVKKIF

SEQ ID NO: 78729 - protein, 9 aa, Homo Sapiens
KKELTGRTL

SEQ ID NO: 78730 - protein, 9 aa, Homo Sapiens
KKFASFNAY

SEQ ID NO: 78731 - protein, 9 aa, Homo Sapiens
KKFENTEMF

SEQ ID NO: 78732 - protein, 9 aa, Homo Sapiens
KKFGDFITL

SEQ ID NO: 78733 - protein, 9 aa, Homo Sapiens
KKFKDIIHY

SEQ ID NO: 78734 - protein, 9 aa, Homo Sapiens
KKFKGDLAY

SEQ ID NO: 78735 - protein, 9 aa, Homo Sapiens
KKFKIVRTF

SEQ ID NO: 78736 - protein, 9 aa, Homo Sapiens
KKFLEPYIY

SEQ ID NO: 78737 - protein, 9 aa, Homo Sapiens
KKFPQMTSY

SEQ ID NO: 78738 - protein, 9 aa, Homo Sapiens
KKFQRPHDY

SEQ ID NO: 78739 - protein, 9 aa, Homo Sapiens
KKFQSFQDH

SEQ ID NO: 78740 - protein, 9 aa, Homo Sapiens
KKFQSFQEH

SEQ ID NO: 78741 - protein, 9 aa, Homo Sapiens
KKFSAMHEF

SEQ ID NO: 78742 - protein, 9 aa, Homo Sapiens
KKFSFKKPF

SEQ ID NO: 78743 - protein, 9 aa, Homo Sapiens
KKFSIEKRF

SEQ ID NO: 78744 - protein, 9 aa, Homo Sapiens
KKFSLPLYF

SEQ ID NO: 78745 - protein, 9 aa, Homo Sapiens
KKFVIDVGY

SEQ ID NO: 78746 - protein, 9 aa, Homo Sapiens
KKFVTQQQY

SEQ ID NO: 78747 - protein, 9 aa, Homo Sapiens
KKGFTAVGY

SEQ ID NO: 78748 - protein, 9 aa, Homo Sapiens
KKGILLQLF

SEQ ID NO: 78749 - protein, 9 aa, Homo Sapiens
KKGPSGYGF

SEQ ID NO: 78750 - protein, 9 aa, Homo Sapiens
KKHILVMSF

SEQ ID NO: 78751 - protein, 9 aa, Homo Sapiens
KKHLVSAGY

SEQ ID NO: 78752 - protein, 9 aa, Homo Sapiens
KKHPSLIPL

SEQ ID NO: 78753 - protein, 9 aa, Homo Sapiens
KKHSQFIGY

SEQ ID NO: 78754 - protein, 9 aa, Homo Sapiens
KKIAIGVIF

SEQ ID NO: 78755 - protein, 9 aa, Homo Sapiens
KKIDSQRDF

SEQ ID NO: 78756 - protein, 9 aa, Homo Sapiens
KKIEDLIKY

SEQ ID NO: 78757 - protein, 9 aa, Homo Sapiens
KKIEDNNTL

SEQ ID NO: 78758 - protein, 9 aa, Homo Sapiens
KKIEFGVVY

SEQ ID NO: 78759 - protein, 9 aa, Homo Sapiens
KKIEHDVVM

SEQ ID NO: 78760 - protein, 9 aa, Homo Sapiens
KKIEKLEEY

SEQ ID NO: 78761 - protein, 9 aa, Homo Sapiens
KKIELDVKY

SEQ ID NO: 78762 - protein, 9 aa, Homo Sapiens
KKIEMVRAY

SEQ ID NO: 78763 - protein, 9 aa, Homo Sapiens
KKIENLEAL

SEQ ID NO: 78764 - protein, 9 aa, Homo Sapiens
KKIEQQGGF

SEQ ID NO: 78765 - protein, 9 aa, Homo Sapiens
KKIPGGKKF

SEQ ID NO: 78766 - protein, 9 aa, Homo Sapiens
KKIPSTVEF

SEQ ID NO: 78767 - protein, 9 aa, Homo Sapiens
KKIRTSPTF

SEQ ID NO: 78768 - protein, 9 aa, Homo Sapiens
KKISELDAF

SEQ ID NO: 78769 - protein, 9 aa, Homo Sapiens
KKISSKINY

SEQ ID NO: 78770 - protein, 9 aa, Homo Sapiens
KKITNNIVY

SEQ ID NO: 78771 - protein, 9 aa, Homo Sapiens
KKIYLQDEF

SEQ ID NO: 78772 - protein, 9 aa, Homo Sapiens
KKKAEGTVF

SEQ ID NO: 78773 - protein, 9 aa, Homo Sapiens
KKKDFDTAL

SEQ ID NO: 78774 - protein, 9 aa, Homo Sapiens
KKKEPEPNF

SEQ ID NO: 78775 - protein, 9 aa, Homo Sapiens
KKKIPSLSF

SEQ ID NO: 78776 - protein, 9 aa, Homo Sapiens
KKKPKDLDF

SEQ ID NO: 78777 - protein, 9 aa, Homo Sapiens
KKKPVVTIY

SEQ ID NO: 78778 - protein, 9 aa, Homo Sapiens
KKKQIEQKF

SEQ ID NO: 78779 - protein, 9 aa, Homo Sapiens
KKKVERLTM

SEQ ID NO: 78780 - protein, 9 aa, Homo Sapiens
KKLANKVVY

SEQ ID NO: 78781 - protein, 9 aa, Homo Sapiens
KKLDLISEL

SEQ ID NO: 78782 - protein, 9 aa, Homo Sapiens
KKLDSQISL

SEQ ID NO: 78783 - protein, 9 aa, Homo Sapiens
KKLELSHEY

SEQ ID NO: 78784 - protein, 9 aa, Homo Sapiens
KKLLSLLTF

SEQ ID NO: 78785 - protein, 9 aa, Homo Sapiens
KKLPIVACF

SEQ ID NO: 78786 - protein, 9 aa, Homo Sapiens
KKLQKAALL

SEQ ID NO: 78787 - protein, 9 aa, Homo Sapiens
KKLQQTQEY

SEQ ID NO: 78788 - protein, 9 aa, Homo Sapiens
KKLSSAVVF

SEQ ID NO: 78789 - protein, 9 aa, Homo Sapiens
KKLSSPSNY

SEQ ID NO: 78790 - protein, 9 aa, Homo Sapiens
KKMELLQKY

SEQ ID NO: 78791 - protein, 9 aa, Homo Sapiens
KKMKLQGQF

SEQ ID NO: 78792 - protein, 9 aa, Homo Sapiens
KKMPKIPVL

SEQ ID NO: 78793 - protein, 9 aa, Homo Sapiens
KKMPSKTSL

SEQ ID NO: 78794 - protein, 9 aa, Homo Sapiens
KKMTLQTGF

SEQ ID NO: 78795 - protein, 9 aa, Homo Sapiens
KKMVSKYKY

SEQ ID NO: 78796 - protein, 9 aa, Homo Sapiens
KKNELIEAF

SEQ ID NO: 78797 - protein, 9 aa, Homo Sapiens
KKNLVTISY

SEQ ID NO: 78798 - protein, 9 aa, Homo Sapiens
KKNPFHLEL

SEQ ID NO: 78799 - protein, 9 aa, Homo Sapiens
KKNPNIKSL

SEQ ID NO: 78800 - protein, 9 aa, Homo Sapiens
KKPDYKVAY

SEQ ID NO: 78801 - protein, 9 aa, Homo Sapiens
KKPELVISY

SEQ ID NO: 78802 - protein, 9 aa, Homo Sapiens
KKPLSTPSM

SEQ ID NO: 78803 - protein, 9 aa, Homo Sapiens
KKPTGLVTF

SEQ ID NO: 78804 - protein, 9 aa, Homo Sapiens
KKPTVTLTY

SEQ ID NO: 78805 - protein, 9 aa, Homo Sapiens
KKQDPDVPF

SEQ ID NO: 78806 - protein, 9 aa, Homo Sapiens
KKRERDLEL

SEQ ID NO: 78807 - protein, 9 aa, Homo Sapiens
KKRLETVAL

SEQ ID NO: 78808 - protein, 9 aa, Homo Sapiens
KKRPPLQEY

SEQ ID NO: 78809 - protein, 9 aa, Homo Sapiens
KKSDPVVSY

SEQ ID NO: 78810 - protein, 9 aa, Homo Sapiens
KKSDVEAIF

SEQ ID NO: 78811 - protein, 9 aa, Homo Sapiens
KKSDVETIF

SEQ ID NO: 78812 - protein, 9 aa, Homo Sapiens
KKSEPEPVY

SEQ ID NO: 78813 - protein, 9 aa, Homo Sapiens
KKSKENVLY

SEQ ID NO: 78814 - protein, 9 aa, Homo Sapiens
KKTFSYAGF

SEQ ID NO: 78815 - protein, 9 aa, Homo Sapiens
KKVAPAPAV

SEQ ID NO: 78816 - protein, 9 aa, Homo Sapiens
KKVAVATPA

SEQ ID NO: 78817 - protein, 9 aa, Homo Sapiens
KKVEKSKIF

SEQ ID NO: 78818 - protein, 9 aa, Homo Sapiens
KKVEQTIQY

SEQ ID NO: 78819 - protein, 9 aa, Homo Sapiens
KKVERQTEL

SEQ ID NO: 78820 - protein, 9 aa, Homo Sapiens
KKVGIVGKY

SEQ ID NO: 78821 - protein, 9 aa, Homo Sapiens
KKVNVQVSF

SEQ ID NO: 78822 - protein, 9 aa, Homo Sapiens
KKVPHNINF

SEQ ID NO: 78823 - protein, 9 aa, Homo Sapiens
KKVQPNSSY

SEQ ID NO: 78824 - protein, 9 aa, Homo Sapiens
KKVSKAAIL

SEQ ID NO: 78825 - protein, 9 aa, Homo Sapiens
KKVTGELAF

SEQ ID NO: 78826 - protein, 9 aa, Homo Sapiens
KKVTNIISF

SEQ ID NO: 78827 - protein, 9 aa, Homo Sapiens
KKVWKPQLF

SEQ ID NO: 78828 - protein, 9 aa, Homo Sapiens
KKWATKTRL

SEQ ID NO: 78829 - protein, 9 aa, Homo Sapiens
KKWFSDHRY

SEQ ID NO: 78830 - protein, 9 aa, Homo Sapiens
KKWFSDTRY

SEQ ID NO: 78831 - protein, 9 aa, Homo Sapiens
KKWISLTNF

SEQ ID NO: 78832 - protein, 9 aa, Homo Sapiens
KKWNLPVYF

SEQ ID NO: 78833 - protein, 9 aa, Homo Sapiens
KKWQKSLQY

SEQ ID NO: 78834 - protein, 9 aa, Homo Sapiens
KKWVNEVRY

SEQ ID NO: 78835 - protein, 9 aa, Homo Sapiens
KKYAEALDY

SEQ ID NO: 78836 - protein, 9 aa, Homo Sapiens
KKYAEVLRY

SEQ ID NO: 78837 - protein, 9 aa, Homo Sapiens
KKYEQLKAM

SEQ ID NO: 78838 - protein, 9 aa, Homo Sapiens
KKYFETEQM

SEQ ID NO: 78839 - protein, 9 aa, Homo Sapiens
KKYLMIEEY

SEQ ID NO: 78840 - protein, 9 aa, Homo Sapiens
KKYNMKLVY

SEQ ID NO: 78841 - protein, 9 aa, Homo Sapiens
KKYPEKLYF

SEQ ID NO: 78842 - protein, 9 aa, Homo Sapiens
KKYPFILEV

SEQ ID NO: 78843 - protein, 9 aa, Homo Sapiens
KKYQLTNAF

SEQ ID NO: 78844 - protein, 9 aa, Homo Sapiens
KLFACEVLY

SEQ ID NO: 78845 - protein, 9 aa, Homo Sapiens
KLFIGGLSF

SEQ ID NO: 78846 - protein, 9 aa, Homo Sapiens
KLFLTGESY

SEQ ID NO: 78847 - protein, 9 aa, Homo Sapiens
KLPDIFSVY

SEQ ID NO: 78848 - protein, 9 aa, Homo Sapiens
KLTEPHQVY

SEQ ID NO: 78849 - protein, 9 aa, Homo Sapiens
KLYEKFLEF

SEQ ID NO: 78850 - protein, 9 aa, Homo Sapiens
KLYQSIIGY

SEQ ID NO: 78851 - protein, 9 aa, Homo Sapiens
KMHQSRISY

SEQ ID NO: 78852 - protein, 9 aa, Homo Sapiens
KMKEIAEAY

SEQ ID NO: 78853 - protein, 9 aa, Homo Sapiens
KMRPGEATL

SEQ ID NO: 78854 - protein, 9 aa, Homo Sapiens
KMYTDGSTF

SEQ ID NO: 78855 - protein, 9 aa, Homo Sapiens
KNHEFIATF

SEQ ID NO: 78856 - protein, 9 aa, Homo Sapiens
KQADPFASL

SEQ ID NO: 78857 - protein, 9 aa, Homo Sapiens
KQAKLVEQY

SEQ ID NO: 78858 - protein, 9 aa, Homo Sapiens
KQCGRAFTY

SEQ ID NO: 78859 - protein, 9 aa, Homo Sapiens
KQDTVRVAF

SEQ ID NO: 78860 - protein, 9 aa, Homo Sapiens
KQFEGSTSF

SEQ ID NO: 78861 - protein, 9 aa, Homo Sapiens
KQFFGIVGF

SEQ ID NO: 78862 - protein, 9 aa, Homo Sapiens
KQFGNILIL

SEQ ID NO: 78863 - protein, 9 aa, Homo Sapiens
KQFHRIVTY

SEQ ID NO: 78864 - protein, 9 aa, Homo Sapiens
KQFPEVIKY

SEQ ID NO: 78865 - protein, 9 aa, Homo Sapiens
KQFQFGHAL

SEQ ID NO: 78866 - protein, 9 aa, Homo Sapiens
KQHYGFVLY

SEQ ID NO: 78867 - protein, 9 aa, Homo Sapiens
KQIAMCVLY

SEQ ID NO: 78868 - protein, 9 aa, Homo Sapiens
KQIENARMF

SEQ ID NO: 78869 - protein, 9 aa, Homo Sapiens
KQIESKTAF

SEQ ID NO: 78870 - protein, 9 aa, Homo Sapiens
KQIFETIYY

SEQ ID NO: 78871 - protein, 9 aa, Homo Sapiens
KQIHFLYQY

SEQ ID NO: 78872 - protein, 9 aa, Homo Sapiens
KQIKTIERY

SEQ ID NO: 78873 - protein, 9 aa, Homo Sapiens
KQILLENTF

SEQ ID NO: 78874 - protein, 9 aa, Homo Sapiens
KQISSNKCF

SEQ ID NO: 78875 - protein, 9 aa, Homo Sapiens
KQIVDRVSY

SEQ ID NO: 78876 - protein, 9 aa, Homo Sapiens
KQKNTVVRY

SEQ ID NO: 78877 - protein, 9 aa, Homo Sapiens
KQLEDGRTL

SEQ ID NO: 78878 - protein, 9 aa, Homo Sapiens
KQLEHVMHF

SEQ ID NO: 78879 - protein, 9 aa, Homo Sapiens
KQLPDQISF

SEQ ID NO: 78880 - protein, 9 aa, Homo Sapiens
KQLPGFTTL

SEQ ID NO: 78881 - protein, 9 aa, Homo Sapiens
KQMEQISQF

SEQ ID NO: 78882 - protein, 9 aa, Homo Sapiens
KQMLSALNY

SEQ ID NO: 78883 - protein, 9 aa, Homo Sapiens
KQPDNSPEY

SEQ ID NO: 78884 - protein, 9 aa, Homo Sapiens
KQQNPRLVY

SEQ ID NO: 78885 - protein, 9 aa, Homo Sapiens
KQQQPPTVY

SEQ ID NO: 78886 - protein, 9 aa, Homo Sapiens
KQREFESRL

SEQ ID NO: 78887 - protein, 9 aa, Homo Sapiens
KQRKPRILF

SEQ ID NO: 78888 - protein, 9 aa, Homo Sapiens
KQRLFIINF

SEQ ID NO: 78889 - protein, 9 aa, Homo Sapiens
KQRTHVMRF

SEQ ID NO: 78890 - protein, 9 aa, Homo Sapiens
KQSQELSQY

SEQ ID NO: 78891 - protein, 9 aa, Homo Sapiens
KQSQILLVY

SEQ ID NO: 78892 - protein, 9 aa, Homo Sapiens
KQTQIFTTY

SEQ ID NO: 78893 - protein, 9 aa, Homo Sapiens
KQTQTFTTY

SEQ ID NO: 78894 - protein, 9 aa, Homo Sapiens
KQVASSTGF

SEQ ID NO: 78895 - protein, 9 aa, Homo Sapiens
KQVKYFIHY

SEQ ID NO: 78896 - protein, 9 aa, Homo Sapiens
KQYADVEGF

SEQ ID NO: 78897 - protein, 9 aa, Homo Sapiens
KQYEKSSRF

SEQ ID NO: 78898 - protein, 9 aa, Homo Sapiens
KQYGEGLSY

SEQ ID NO: 78899 - protein, 9 aa, Homo Sapiens
KQYGFFSYL

SEQ ID NO: 78900 - protein, 9 aa, Homo Sapiens
KQYIMDTVF

SEQ ID NO: 78901 - protein, 9 aa, Homo Sapiens
KQYLPNIAY

SEQ ID NO: 78902 - protein, 9 aa, Homo Sapiens
KQYPISLVL

SEQ ID NO: 78903 - protein, 9 aa, Homo Sapiens
KQYPYNNLY

SEQ ID NO: 78904 - protein, 9 aa, Homo Sapiens
KSFPGGKEY

SEQ ID NO: 78905 - protein, 9 aa, Homo Sapiens
KSQVGTLLF

SEQ ID NO: 78906 - protein, 9 aa, Homo Sapiens
KSYSVGVAY

SEQ ID NO: 78907 - protein, 9 aa, Homo Sapiens
LAGDKSRPF

SEQ ID NO: 78908 - protein, 9 aa, Homo Sapiens
LAPLKYLAL

SEQ ID NO: 78909 - protein, 9 aa, Homo Sapiens
LHYMGTSTF

SEQ ID NO: 78910 - protein, 9 aa, Homo Sapiens
LKAEVGNSM

SEQ ID NO: 78911 - protein, 9 aa, Homo Sapiens
LKALLLSSY

SEQ ID NO: 78912 - protein, 9 aa, Homo Sapiens
LKAMLSTGF

SEQ ID NO: 78913 - protein, 9 aa, Homo Sapiens
LKAPALPLL

SEQ ID NO: 78914 - protein, 9 aa, Homo Sapiens
LKEEKPKMY

SEQ ID NO: 78915 - protein, 9 aa, Homo Sapiens
LKEGGHRVL

SEQ ID NO: 78916 - protein, 9 aa, Homo Sapiens
LKEGHKKIY

SEQ ID NO: 78917 - protein, 9 aa, Homo Sapiens
LKFIPHKDY

SEQ ID NO: 78918 - protein, 9 aa, Homo Sapiens
LKFNGALTM

SEQ ID NO: 78919 - protein, 9 aa, Homo Sapiens
LKHIFKTSL

SEQ ID NO: 78920 - protein, 9 aa, Homo Sapiens
LKHKFITRY

SEQ ID NO: 78921 - protein, 9 aa, Homo Sapiens
LKHQMETHY

SEQ ID NO: 78922 - protein, 9 aa, Homo Sapiens
LKIGDTVSF

SEQ ID NO: 78923 - protein, 9 aa, Homo Sapiens
LKKDDSVGY

SEQ ID NO: 78924 - protein, 9 aa, Homo Sapiens
LKKTEVSRY

SEQ ID NO: 78925 - protein, 9 aa, Homo Sapiens
LKLDSKNAL

SEQ ID NO: 78926 - protein, 9 aa, Homo Sapiens
LKLGYVSRY

SEQ ID NO: 78927 - protein, 9 aa, Homo Sapiens
LKLPGGSCM

SEQ ID NO: 78928 - protein, 9 aa, Homo Sapiens
LKMIPRIDY

SEQ ID NO: 78929 - protein, 9 aa, Homo Sapiens
LKMPSVAQF

SEQ ID NO: 78930 - protein, 9 aa, Homo Sapiens
LKNGALVVY

SEQ ID NO: 78931 - protein, 9 aa, Homo Sapiens
LKNPNAPML

SEQ ID NO: 78932 - protein, 9 aa, Homo Sapiens
LKPEGVLVY

SEQ ID NO: 78933 - protein, 9 aa, Homo Sapiens
LKPGGVLTY

SEQ ID NO: 78934 - protein, 9 aa, Homo Sapiens
LKPGMVVTF

SEQ ID NO: 78935 - protein, 9 aa, Homo Sapiens
LKPNTSVQF

SEQ ID NO: 78936 - protein, 9 aa, Homo Sapiens
LKPQVSSIF

SEQ ID NO: 78937 - protein, 9 aa, Homo Sapiens
LKPVVGEVY

SEQ ID NO: 78938 - protein, 9 aa, Homo Sapiens
LKPYFLEAY

SEQ ID NO: 78939 - protein, 9 aa, Homo Sapiens
LKRLEEHRY

SEQ ID NO: 78940 - protein, 9 aa, Homo Sapiens
LKRPLEATF

SEQ ID NO: 78941 - protein, 9 aa, Homo Sapiens
LKRQGRTLY

SEQ ID NO: 78942 - protein, 9 aa, Homo Sapiens
LKSGGVNQY

SEQ ID NO: 78943 - protein, 9 aa, Homo Sapiens
LKSPGSVVF

SEQ ID NO: 78944 - protein, 9 aa, Homo Sapiens
LKTGISDVF

SEQ ID NO: 78945 - protein, 9 aa, Homo Sapiens
LKTYGQSTY

SEQ ID NO: 78946 - protein, 9 aa, Homo Sapiens
LKVKDLRQY

SEQ ID NO: 78947 - protein, 9 aa, Homo Sapiens
LKWIIKSNY

SEQ ID NO: 78948 - protein, 9 aa, Homo Sapiens
LKYGKPLQL

SEQ ID NO: 78949 - protein, 9 aa, Homo Sapiens
LKYHPRVLY

SEQ ID NO: 78950 - protein, 9 aa, Homo Sapiens
LKYHQRVLY

SEQ ID NO: 78951 - protein, 9 aa, Homo Sapiens
LLADPTGAF

SEQ ID NO: 78952 - protein, 9 aa, Homo Sapiens
LLAVFVTPL

SEQ ID NO: 78953 - protein, 9 aa, Homo Sapiens
LLDDSVRVY

SEQ ID NO: 78954 - protein, 9 aa, Homo Sapiens
LLYESPERY

SEQ ID NO: 78955 - protein, 9 aa, Homo Sapiens
LMVGTSIHY

SEQ ID NO: 78956 - protein, 9 aa, Homo Sapiens
LMYVGRVVF

SEQ ID NO: 78957 - protein, 9 aa, Homo Sapiens
LQAMPRTEF

SEQ ID NO: 78958 - protein, 9 aa, Homo Sapiens
LQAPAFTGY

SEQ ID NO: 78959 - protein, 9 aa, Homo Sapiens
LQAPPLTSL

SEQ ID NO: 78960 - protein, 9 aa, Homo Sapiens
LQAVFVQSY

SEQ ID NO: 78961 - protein, 9 aa, Homo Sapiens
LQHDNIIAY

SEQ ID NO: 78962 - protein, 9 aa, Homo Sapiens
LQHPDVAAY

SEQ ID NO: 78963 - protein, 9 aa, Homo Sapiens
LQHPNIVGY

SEQ ID NO: 78964 - protein, 9 aa, Homo Sapiens
LQIATHTAF

SEQ ID NO: 78965 - protein, 9 aa, Homo Sapiens
LQIDNARLA

SEQ ID NO: 78966 - protein, 9 aa, Homo Sapiens
LQIGVIRVY

SEQ ID NO: 78967 - protein, 9 aa, Homo Sapiens
LQIVHETGY

SEQ ID NO: 78968 - protein, 9 aa, Homo Sapiens
LQKAQTQEF

SEQ ID NO: 78969 - protein, 9 aa, Homo Sapiens
LQKPGETVF

SEQ ID NO: 78970 - protein, 9 aa, Homo Sapiens
LQLDRISVY

SEQ ID NO: 78971 - protein, 9 aa, Homo Sapiens
LQNLFEEKY

SEQ ID NO: 78972 - protein, 9 aa, Homo Sapiens
LQQPRSLTY

SEQ ID NO: 78973 - protein, 9 aa, Homo Sapiens
LQRATGISF

SEQ ID NO: 78974 - protein, 9 aa, Homo Sapiens
LQREEEEAF

SEQ ID NO: 78975 - protein, 9 aa, Homo Sapiens
LQREGVSHY

SEQ ID NO: 78976 - protein, 9 aa, Homo Sapiens
LQRFPNKPY

SEQ ID NO: 78977 - protein, 9 aa, Homo Sapiens
LQRLENTQY

SEQ ID NO: 78978 - protein, 9 aa, Homo Sapiens
LQRMTDKCF

SEQ ID NO: 78979 - protein, 9 aa, Homo Sapiens
LQRVGAGTY

SEQ ID NO: 78980 - protein, 9 aa, Homo Sapiens
LQRVLQSEF

SEQ ID NO: 78981 - protein, 9 aa, Homo Sapiens
LQRVSYLVF

SEQ ID NO: 78982 - protein, 9 aa, Homo Sapiens
LQSLPTRAY

SEQ ID NO: 78983 - protein, 9 aa, Homo Sapiens
LQYSGKTTF

SEQ ID NO: 78984 - protein, 9 aa, Homo Sapiens
MAPLKMLAL

SEQ ID NO: 78985 - protein, 9 aa, Homo Sapiens
MKAAFQSQY

SEQ ID NO: 78986 - protein, 9 aa, Homo Sapiens
MKARVVLKY

SEQ ID NO: 78987 - protein, 9 aa, Homo Sapiens
MKCYTPLVY

SEQ ID NO: 78988 - protein, 9 aa, Homo Sapiens
MKFMTQSAF

SEQ ID NO: 78989 - protein, 9 aa, Homo Sapiens
MKHGQRITF

SEQ ID NO: 78990 - protein, 9 aa, Homo Sapiens
MKILTERGY

SEQ ID NO: 78991 - protein, 9 aa, Homo Sapiens
MKIPTGQEY

SEQ ID NO: 78992 - protein, 9 aa, Homo Sapiens
MKKEFTLEF

SEQ ID NO: 78993 - protein, 9 aa, Homo Sapiens
MKKIENCNY

SEQ ID NO: 78994 - protein, 9 aa, Homo Sapiens
MKKLWGDRY

SEQ ID NO: 78995 - protein, 9 aa, Homo Sapiens
MKLSLVAAM

SEQ ID NO: 78996 - protein, 9 aa, Homo Sapiens
MKQDRITRY

SEQ ID NO: 78997 - protein, 9 aa, Homo Sapiens
MKSPFGSSF

SEQ ID NO: 78998 - protein, 9 aa, Homo Sapiens
MKVLLAAAL

SEQ ID NO: 78999 - protein, 9 aa, Homo Sapiens
MKYEDAVQF

SEQ ID NO: 79000 - protein, 9 aa, Homo Sapiens
MKYPKVKKY

SEQ ID NO: 79001 - protein, 9 aa, Homo Sapiens
MLYKGQTAY

SEQ ID NO: 79002 - protein, 9 aa, Homo Sapiens
MMAGPMAAF

SEQ ID NO: 79003 - protein, 9 aa, Homo Sapiens
MMDQARSAF

SEQ ID NO: 79004 - protein, 9 aa, Homo Sapiens
MMIPSQISY

SEQ ID NO: 79005 - protein, 9 aa, Homo Sapiens
MMYSGELKF

SEQ ID NO: 79006 - protein, 9 aa, Homo Sapiens
MPYLEHESF

SEQ ID NO: 79007 - protein, 9 aa, Homo Sapiens
MQHIFLNNY

SEQ ID NO: 79008 - protein, 9 aa, Homo Sapiens
MQHRYIELF

SEQ ID NO: 79009 - protein, 9 aa, Homo Sapiens
MQHRYVELF

SEQ ID NO: 79010 - protein, 9 aa, Homo Sapiens
MQLPNGVTY

SEQ ID NO: 79011 - protein, 9 aa, Homo Sapiens
MQREPNQAF

SEQ ID NO: 79012 - protein, 9 aa, Homo Sapiens
NGAVLMIVI

SEQ ID NO: 79013 - protein, 9 aa, Homo Sapiens
NKADVILKY

SEQ ID NO: 79014 - protein, 9 aa, Homo Sapiens
NKAEVHESY

SEQ ID NO: 79015 - protein, 9 aa, Homo Sapiens
NKFYSGTGY

SEQ ID NO: 79016 - protein, 9 aa, Homo Sapiens
NKIFLPTIY

SEQ ID NO: 79017 - protein, 9 aa, Homo Sapiens
NKLPTGGCY

SEQ ID NO: 79018 - protein, 9 aa, Homo Sapiens
NKVISSVSY

SEQ ID NO: 79019 - protein, 9 aa, Homo Sapiens
NKYLTAEAF

SEQ ID NO: 79020 - protein, 9 aa, Homo Sapiens
NKYMGLTQF

SEQ ID NO: 79021 - protein, 9 aa, Homo Sapiens
NQIPFIIQY

SEQ ID NO: 79022 - protein, 9 aa, Homo Sapiens
NQKPPSAEY

SEQ ID NO: 79023 - protein, 9 aa, Homo Sapiens
NQRLAYVTY

SEQ ID NO: 79024 - protein, 9 aa, Homo Sapiens
NQVIFPVSY

SEQ ID NO: 79025 - protein, 9 aa, Homo Sapiens
NQWEALTEY

SEQ ID NO: 79026 - protein, 9 aa, Homo Sapiens
NQYISQQEY

SEQ ID NO: 79027 - protein, 9 aa, Homo Sapiens
PAYHSSLMD

SEQ ID NO: 79028 - protein, 9 aa, Homo Sapiens
PHVSPRHSF

SEQ ID NO: 79029 - protein, 9 aa, Homo Sapiens
PIRLLAAAA

SEQ ID NO: 79030 - protein, 9 aa, Homo Sapiens
PPHPPPPPP

SEQ ID NO: 79031 - protein, 9 aa, Homo Sapiens
PQAPSGPSY

SEQ ID NO: 79032 - protein, 9 aa, Homo Sapiens
PQRATSNVF

SEQ ID NO: 79033 - protein, 9 aa, Homo Sapiens
PQVSLSKLF

SEQ ID NO: 79034 - protein, 9 aa, Homo Sapiens
PQYQTWEEF

SEQ ID NO: 79035 - protein, 9 aa, Homo Sapiens
PSIVHRKCF

SEQ ID NO: 79036 - protein, 9 aa, Homo Sapiens
QAYHSPATA

SEQ ID NO: 79037 - protein, 9 aa, Homo Sapiens
QKAFNSSSF

SEQ ID NO: 79038 - protein, 9 aa, Homo Sapiens
QKCEFQDAY

SEQ ID NO: 79039 - protein, 9 aa, Homo Sapiens
QKCELPVSY

SEQ ID NO: 79040 - protein, 9 aa, Homo Sapiens
QKFGERVAY

SEQ ID NO: 79041 - protein, 9 aa, Homo Sapiens
QKIDVQESF

SEQ ID NO: 79042 - protein, 9 aa, Homo Sapiens
QKLPVANEY

SEQ ID NO: 79043 - protein, 9 aa, Homo Sapiens
QKRPQGLSF

SEQ ID NO: 79044 - protein, 9 aa, Homo Sapiens
QKTIVKETY

SEQ ID NO: 79045 - protein, 9 aa, Homo Sapiens
QKVIAHSEY

SEQ ID NO: 79046 - protein, 9 aa, Homo Sapiens
QKVKLFTAH

SEQ ID NO: 79047 - protein, 9 aa, Homo Sapiens
QKYPTKVSF

SEQ ID NO: 79048 - protein, 9 aa, Homo Sapiens
QMWISKQEY

SEQ ID NO: 79049 - protein, 9 aa, Homo Sapiens
QMYRTEIRM

SEQ ID NO: 79050 - protein, 9 aa, Homo Sapiens
QQEERKRLY

SEQ ID NO: 79051 - protein, 9 aa, Homo Sapiens
QQFLIQQQY

SEQ ID NO: 79052 - protein, 9 aa, Homo Sapiens
QQFPAFNSY

SEQ ID NO: 79053 - protein, 9 aa, Homo Sapiens
QQFRNAPPF

SEQ ID NO: 79054 - protein, 9 aa, Homo Sapiens
QQIEPLFQF

SEQ ID NO: 79055 - protein, 9 aa, Homo Sapiens
QQLQLFTEY

SEQ ID NO: 79056 - protein, 9 aa, Homo Sapiens
QQNLNTITY

SEQ ID NO: 79057 - protein, 9 aa, Homo Sapiens
QQNPQPLIF

SEQ ID NO: 79058 - protein, 9 aa, Homo Sapiens
QQSPDVLVY

SEQ ID NO: 79059 - protein, 9 aa, Homo Sapiens
QQVPVNQVF

SEQ ID NO: 79060 - protein, 9 aa, Homo Sapiens
QQVSRIAAY

SEQ ID NO: 79061 - protein, 9 aa, Homo Sapiens
QQYNSFVSL

SEQ ID NO: 79062 - protein, 9 aa, Homo Sapiens
QQYQQQAGY

SEQ ID NO: 79063 - protein, 9 aa, Homo Sapiens
QQYVGKVKF

SEQ ID NO: 79064 - protein, 9 aa, Homo Sapiens
RAAPFSLEY

SEQ ID NO: 79065 - protein, 9 aa, Homo Sapiens
RAFPNKQGY

SEQ ID NO: 79066 - protein, 9 aa, Homo Sapiens
RANPFNTPH

SEQ ID NO: 79067 - protein, 9 aa, Homo Sapiens
RAQPRGAVY

SEQ ID NO: 79068 - protein, 9 aa, Homo Sapiens
RARELLVSY

SEQ ID NO: 79069 - protein, 9 aa, Homo Sapiens
RAYAKALHY

SEQ ID NO: 79070 - protein, 9 aa, Homo Sapiens
RAYFELSEY

SEQ ID NO: 79071 - protein, 9 aa, Homo Sapiens
RAYLVRWEY

SEQ ID NO: 79072 - protein, 9 aa, Homo Sapiens
RAYQQSEAY

SEQ ID NO: 79073 - protein, 9 aa, Homo Sapiens
RECPSVLEY

SEQ ID NO: 79074 - protein, 9 aa, Homo Sapiens
REIESSPQY

SEQ ID NO: 79075 - protein, 9 aa, Homo Sapiens
REVAPRLAF

SEQ ID NO: 79076 - protein, 9 aa, Homo Sapiens
RGFAHGSVY

SEQ ID NO: 79077 - protein, 9 aa, Homo Sapiens
RGFLAREQY

SEQ ID NO: 79078 - protein, 9 aa, Homo Sapiens
RGFYSVETF

SEQ ID NO: 79079 - protein, 9 aa, Homo Sapiens
RGWDGFVEF

SEQ ID NO: 79080 - protein, 9 aa, Homo Sapiens
RGWKLQVSY

SEQ ID NO: 79081 - protein, 9 aa, Homo Sapiens
RGYLARKAF

SEQ ID NO: 79082 - protein, 9 aa, Homo Sapiens
RGYYSLETF

SEQ ID NO: 79083 - protein, 9 aa, Homo Sapiens
RHFGTILNY

SEQ ID NO: 79084 - protein, 9 aa, Homo Sapiens
RHGPPMHSY

SEQ ID NO: 79085 - protein, 9 aa, Homo Sapiens
RHIDCAHVY

SEQ ID NO: 79086 - protein, 9 aa, Homo Sapiens
RHLEPALAF

SEQ ID NO: 79087 - protein, 9 aa, Homo Sapiens
RHLLFLLEY

SEQ ID NO: 79088 - protein, 9 aa, Homo Sapiens
RHMEQHVSF

SEQ ID NO: 79089 - protein, 9 aa, Homo Sapiens
RHMSLLTAF

SEQ ID NO: 79090 - protein, 9 aa, Homo Sapiens
RHNLSLNRY

SEQ ID NO: 79091 - protein, 9 aa, Homo Sapiens
RHQYHIRAY

SEQ ID NO: 79092 - protein, 9 aa, Homo Sapiens
RHRCIGENF

SEQ ID NO: 79093 - protein, 9 aa, Homo Sapiens
RHREHLINY

SEQ ID NO: 79094 - protein, 9 aa, Homo Sapiens
RHRPELIEY

SEQ ID NO: 79095 - protein, 9 aa, Homo Sapiens
RHSDIVVLY

SEQ ID NO: 79096 - protein, 9 aa, Homo Sapiens
RHSLPKVSY

SEQ ID NO: 79097 - protein, 9 aa, Homo Sapiens
RHSLPLQSF

SEQ ID NO: 79098 - protein, 9 aa, Homo Sapiens
RHVDAMNEY

SEQ ID NO: 79099 - protein, 9 aa, Homo Sapiens
RHWGGQADF

SEQ ID NO: 79100 - protein, 9 aa, Homo Sapiens
RKAALKNAF

SEQ ID NO: 79101 - protein, 9 aa, Homo Sapiens
RKADALKAM

SEQ ID NO: 79102 - protein, 9 aa, Homo Sapiens
RKAEAAVVA

SEQ ID NO: 79103 - protein, 9 aa, Homo Sapiens
RKAHLTNQY

SEQ ID NO: 79104 - protein, 9 aa, Homo Sapiens
RKAIDYIKY

SEQ ID NO: 79105 - protein, 9 aa, Homo Sapiens
RKAIDYIRF

SEQ ID NO: 79106 - protein, 9 aa, Homo Sapiens
RKAISRELY

SEQ ID NO: 79107 - protein, 9 aa, Homo Sapiens
RKAKQKLGF

SEQ ID NO: 79108 - protein, 9 aa, Homo Sapiens
RKALERELY

SEQ ID NO: 79109 - protein, 9 aa, Homo Sapiens
RKAQPPQAF

SEQ ID NO: 79110 - protein, 9 aa, Homo Sapiens
RKAVSYAKF

SEQ ID NO: 79111 - protein, 9 aa, Homo Sapiens
RKAVTVVKF

SEQ ID NO: 79112 - protein, 9 aa, Homo Sapiens
RKAYSTTSI

SEQ ID NO: 79113 - protein, 9 aa, Homo Sapiens
RKCVDTYKY

SEQ ID NO: 79114 - protein, 9 aa, Homo Sapiens
RKDDPRLSF

SEQ ID NO: 79115 - protein, 9 aa, Homo Sapiens
RKDKSLRVM

SEQ ID NO: 79116 - protein, 9 aa, Homo Sapiens
RKDLFIATY

SEQ ID NO: 79117 - protein, 9 aa, Homo Sapiens
RKDPNKLVL

SEQ ID NO: 79118 - protein, 9 aa, Homo Sapiens
RKDPRQIFF

SEQ ID NO: 79119 - protein, 9 aa, Homo Sapiens
RKEDCQRFY

SEQ ID NO: 79120 - protein, 9 aa, Homo Sapiens
RKEERRITY

SEQ ID NO: 79121 - protein, 9 aa, Homo Sapiens
RKEETVTVY

SEQ ID NO: 79122 - protein, 9 aa, Homo Sapiens
RKELESRAL

SEQ ID NO: 79123 - protein, 9 aa, Homo Sapiens
RKENLTRLF

SEQ ID NO: 79124 - protein, 9 aa, Homo Sapiens
RKEPAALQY

SEQ ID NO: 79125 - protein, 9 aa, Homo Sapiens
RKEPGQRLL

SEQ ID NO: 79126 - protein, 9 aa, Homo Sapiens
RKFDAIYKY

SEQ ID NO: 79127 - protein, 9 aa, Homo Sapiens
RKFHGYNSL

SEQ ID NO: 79128 - protein, 9 aa, Homo Sapiens
RKFINLNEF

SEQ ID NO: 79129 - protein, 9 aa, Homo Sapiens
RKFKHFQEF

SEQ ID NO: 79130 - protein, 9 aa, Homo Sapiens
RKFKWGKGF

SEQ ID NO: 79131 - protein, 9 aa, Homo Sapiens
RKFLDTSHY

SEQ ID NO: 79132 - protein, 9 aa, Homo Sapiens
RKFLEKEVF

SEQ ID NO: 79133 - protein, 9 aa, Homo Sapiens
RKFMTNRLL

SEQ ID NO: 79134 - protein, 9 aa, Homo Sapiens
RKFPSLRAV

SEQ ID NO: 79135 - protein, 9 aa, Homo Sapiens
RKFPYPLQW

SEQ ID NO: 79136 - protein, 9 aa, Homo Sapiens
RKFSLKTVL

SEQ ID NO: 79137 - protein, 9 aa, Homo Sapiens
RKFSTKVTL

SEQ ID NO: 79138 - protein, 9 aa, Homo Sapiens
RKFTQLREY

SEQ ID NO: 79139 - protein, 9 aa, Homo Sapiens
RKFVADGIF

SEQ ID NO: 79140 - protein, 9 aa, Homo Sapiens
RKFYKGKKY

SEQ ID NO: 79141 - protein, 9 aa, Homo Sapiens
RKGEFETGF

SEQ ID NO: 79142 - protein, 9 aa, Homo Sapiens
RKGEFVNEY

SEQ ID NO: 79143 - protein, 9 aa, Homo Sapiens
RKHEHVGSF

SEQ ID NO: 79144 - protein, 9 aa, Homo Sapiens
RKHGLEVIY

SEQ ID NO: 79145 - protein, 9 aa, Homo Sapiens
RKHNQRPTF

SEQ ID NO: 79146 - protein, 9 aa, Homo Sapiens
RKIASRNEF

SEQ ID NO: 79147 - protein, 9 aa, Homo Sapiens
RKIEARVSA

SEQ ID NO: 79148 - protein, 9 aa, Homo Sapiens
RKIEEIKDF

SEQ ID NO: 79149 - protein, 9 aa, Homo Sapiens
RKIEEKIIY

SEQ ID NO: 79150 - protein, 9 aa, Homo Sapiens
RKIEVEHIF

SEQ ID NO: 79151 - protein, 9 aa, Homo Sapiens
RKIGELVRY

SEQ ID NO: 79152 - protein, 9 aa, Homo Sapiens
RKIHTGENL

SEQ ID NO: 79153 - protein, 9 aa, Homo Sapiens
RKIIGGVDY

SEQ ID NO: 79154 - protein, 9 aa, Homo Sapiens
RKIKVSNTL

SEQ ID NO: 79155 - protein, 9 aa, Homo Sapiens
RKILPRSDY

SEQ ID NO: 79156 - protein, 9 aa, Homo Sapiens
RKINCRLSY

SEQ ID NO: 79157 - protein, 9 aa, Homo Sapiens
RKINLNISY

SEQ ID NO: 79158 - protein, 9 aa, Homo Sapiens
RKIPTGAEA

SEQ ID NO: 79159 - protein, 9 aa, Homo Sapiens
RKISAIRSY

SEQ ID NO: 79160 - protein, 9 aa, Homo Sapiens
RKITLRQVF

SEQ ID NO: 79161 - protein, 9 aa, Homo Sapiens
RKITTYVSF

SEQ ID NO: 79162 - protein, 9 aa, Homo Sapiens
RKKAYADFY

SEQ ID NO: 79163 - protein, 9 aa, Homo Sapiens
RKKDWKTLY

SEQ ID NO: 79164 - protein, 9 aa, Homo Sapiens
RKKPPMNSM

SEQ ID NO: 79165 - protein, 9 aa, Homo Sapiens
RKKPTTEGF

SEQ ID NO: 79166 - protein, 9 aa, Homo Sapiens
RKKSTTIRF

SEQ ID NO: 79167 - protein, 9 aa, Homo Sapiens
RKKTERLAF

SEQ ID NO: 79168 - protein, 9 aa, Homo Sapiens
RKLDEQQEF

SEQ ID NO: 79169 - protein, 9 aa, Homo Sapiens
RKLDKLTVL

SEQ ID NO: 79170 - protein, 9 aa, Homo Sapiens
RKLDQVSQF

SEQ ID NO: 79171 - protein, 9 aa, Homo Sapiens
RKLDVVVRF

SEQ ID NO: 79172 - protein, 9 aa, Homo Sapiens
RKLENKNAF

SEQ ID NO: 79173 - protein, 9 aa, Homo Sapiens
RKLKIQQSY

SEQ ID NO: 79174 - protein, 9 aa, Homo Sapiens
RKLLEKCAM

SEQ ID NO: 79175 - protein, 9 aa, Homo Sapiens
RKLNNFNSY

SEQ ID NO: 79176 - protein, 9 aa, Homo Sapiens
RKLPCSHEY

SEQ ID NO: 79177 - protein, 9 aa, Homo Sapiens
RKLPPRVCV

SEQ ID NO: 79178 - protein, 9 aa, Homo Sapiens
RKLQWQTTL

SEQ ID NO: 79179 - protein, 9 aa, Homo Sapiens
RKLTPKEAF

SEQ ID NO: 79180 - protein, 9 aa, Homo Sapiens
RKLTQETTY

SEQ ID NO: 79181 - protein, 9 aa, Homo Sapiens
RKMDKIKTF

SEQ ID NO: 79182 - protein, 9 aa, Homo Sapiens
RKMEIYRPH

SEQ ID NO: 79183 - protein, 9 aa, Homo Sapiens
RKMEPSTAA

SEQ ID NO: 79184 - protein, 9 aa, Homo Sapiens
RKMPLPLKL

SEQ ID NO: 79185 - protein, 9 aa, Homo Sapiens
RKMVGSRMF

SEQ ID NO: 79186 - protein, 9 aa, Homo Sapiens
RKNLPSTAL

SEQ ID NO: 79187 - protein, 9 aa, Homo Sapiens
RKNLSIQRY

SEQ ID NO: 79188 - protein, 9 aa, Homo Sapiens
RKNPSDPKL

SEQ ID NO: 79189 - protein, 9 aa, Homo Sapiens
RKNPVTSTY

SEQ ID NO: 79190 - protein, 9 aa, Homo Sapiens
RKPEGGPSF

SEQ ID NO: 79191 - protein, 9 aa, Homo Sapiens
RKPFGSKMY

SEQ ID NO: 79192 - protein, 9 aa, Homo Sapiens
RKPLPKTVY

SEQ ID NO: 79193 - protein, 9 aa, Homo Sapiens
RKPLTTSGF

SEQ ID NO: 79194 - protein, 9 aa, Homo Sapiens
RKPSIVTKY

SEQ ID NO: 79195 - protein, 9 aa, Homo Sapiens
RKQANRMSF

SEQ ID NO: 79196 - protein, 9 aa, Homo Sapiens
RKQIFILLF

SEQ ID NO: 79197 - protein, 9 aa, Homo Sapiens
RKQLHKLRY

SEQ ID NO: 79198 - protein, 9 aa, Homo Sapiens
RKQPMSATL

SEQ ID NO: 79199 - protein, 9 aa, Homo Sapiens
RKQPVKVVY

SEQ ID NO: 79200 - protein, 9 aa, Homo Sapiens
RKRLEAQGY

SEQ ID NO: 79201 - protein, 9 aa, Homo Sapiens
RKSDITSEL

SEQ ID NO: 79202 - protein, 9 aa, Homo Sapiens
RKSEVSPRI

SEQ ID NO: 79203 - protein, 9 aa, Homo Sapiens
RKSFYSSHY

SEQ ID NO: 79204 - protein, 9 aa, Homo Sapiens
RKSGVGNIF

SEQ ID NO: 79205 - protein, 9 aa, Homo Sapiens
RKSQVSIRY

SEQ ID NO: 79206 - protein, 9 aa, Homo Sapiens
RKSTSFRVY

SEQ ID NO: 79207 - protein, 9 aa, Homo Sapiens
RKTDQLVSF

SEQ ID NO: 79208 - protein, 9 aa, Homo Sapiens
RKTEPATGF

SEQ ID NO: 79209 - protein, 9 aa, Homo Sapiens
RKTFLKLAF

SEQ ID NO: 79210 - protein, 9 aa, Homo Sapiens
RKTFSQSTY

SEQ ID NO: 79211 - protein, 9 aa, Homo Sapiens
RKTYSTEEY

SEQ ID NO: 79212 - protein, 9 aa, Homo Sapiens
RKVDKQTAL

SEQ ID NO: 79213 - protein, 9 aa, Homo Sapiens
RKVDTKALY

SEQ ID NO: 79214 - protein, 9 aa, Homo Sapiens
RKVDVEEEF

SEQ ID NO: 79215 - protein, 9 aa, Homo Sapiens
RKVKIDKRF

SEQ ID NO: 79216 - protein, 9 aa, Homo Sapiens
RKVPDNQQF

SEQ ID NO: 79217 - protein, 9 aa, Homo Sapiens
RKVPFGKTY

SEQ ID NO: 79218 - protein, 9 aa, Homo Sapiens
RKVPYCVKF

SEQ ID NO: 79219 - protein, 9 aa, Homo Sapiens
RKVQPPQNY

SEQ ID NO: 79220 - protein, 9 aa, Homo Sapiens
RKVYSILSL

SEQ ID NO: 79221 - protein, 9 aa, Homo Sapiens
RKWFEPSQF

SEQ ID NO: 79222 - protein, 9 aa, Homo Sapiens
RKWSSEKRF

SEQ ID NO: 79223 - protein, 9 aa, Homo Sapiens
RKYAFELKM

SEQ ID NO: 79224 - protein, 9 aa, Homo Sapiens
RKYDEVLHM

SEQ ID NO: 79225 - protein, 9 aa, Homo Sapiens
RKYEKPQEL

SEQ ID NO: 79226 - protein, 9 aa, Homo Sapiens
RKYESVLQL

SEQ ID NO: 79227 - protein, 9 aa, Homo Sapiens
RKYGGRLVT

SEQ ID NO: 79228 - protein, 9 aa, Homo Sapiens
RKYHQRPTF

SEQ ID NO: 79229 - protein, 9 aa, Homo Sapiens
RKYLGQLHY

SEQ ID NO: 79230 - protein, 9 aa, Homo Sapiens
RKYNWSAKA

SEQ ID NO: 79231 - protein, 9 aa, Homo Sapiens
RKYPENDLF

SEQ ID NO: 79232 - protein, 9 aa, Homo Sapiens
RKYSSVHTI

SEQ ID NO: 79233 - protein, 9 aa, Homo Sapiens
RKYVNGSTY

SEQ ID NO: 79234 - protein, 9 aa, Homo Sapiens
RKYWKNLTF

SEQ ID NO: 79235 - protein, 9 aa, Homo Sapiens
RLFATDERF

SEQ ID NO: 79236 - protein, 9 aa, Homo Sapiens
RLFFHCSQY

SEQ ID NO: 79237 - protein, 9 aa, Homo Sapiens
RLFKDQLVY

SEQ ID NO: 79238 - protein, 9 aa, Homo Sapiens
RLINTQAIF

SEQ ID NO: 79239 - protein, 9 aa, Homo Sapiens
RLIPHVQVF

SEQ ID NO: 79240 - protein, 9 aa, Homo Sapiens
RLLDTTITF

SEQ ID NO: 79241 - protein, 9 aa, Homo Sapiens
RLQEFLTAY

SEQ ID NO: 79242 - protein, 9 aa, Homo Sapiens
RLSLNGVRF

SEQ ID NO: 79243 - protein, 9 aa, Homo Sapiens
RLVELLVSY

SEQ ID NO: 79244 - protein, 9 aa, Homo Sapiens
RLWEQLVHF

SEQ ID NO: 79245 - protein, 9 aa, Homo Sapiens
RLWISVARY

SEQ ID NO: 79246 - protein, 9 aa, Homo Sapiens
RLYFSQQTY

SEQ ID NO: 79247 - protein, 9 aa, Homo Sapiens
RLYQHAVEY

SEQ ID NO: 79248 - protein, 9 aa, Homo Sapiens
RMHQAIERF

SEQ ID NO: 79249 - protein, 9 aa, Homo Sapiens
RMIDLLEEY

SEQ ID NO: 79250 - protein, 9 aa, Homo Sapiens
RMIKEKLCY

SEQ ID NO: 79251 - protein, 9 aa, Homo Sapiens
RMIYLVTEY

SEQ ID NO: 79252 - protein, 9 aa, Homo Sapiens
RMLFKSKAY

SEQ ID NO: 79253 - protein, 9 aa, Homo Sapiens
RMVEMFLEY

SEQ ID NO: 79254 - protein, 9 aa, Homo Sapiens
RMVLVNAVY

SEQ ID NO: 79255 - protein, 9 aa, Homo Sapiens
RMWKTLTFF

SEQ ID NO: 79256 - protein, 9 aa, Homo Sapiens
RMYPGLQVY

SEQ ID NO: 79257 - protein, 9 aa, Homo Sapiens
RPIVWGLAF

SEQ ID NO: 79258 - protein, 9 aa, Homo Sapiens
RPVPKGATY

SEQ ID NO: 79259 - protein, 9 aa, Homo Sapiens
RQAEMKRLY

SEQ ID NO: 79260 - protein, 9 aa, Homo Sapiens
RQAHLTNQY

SEQ ID NO: 79261 - protein, 9 aa, Homo Sapiens
RQAHMQARF

SEQ ID NO: 79262 - protein, 9 aa, Homo Sapiens
RQAIGLMGY

SEQ ID NO: 79263 - protein, 9 aa, Homo Sapiens
RQAKEERTF

SEQ ID NO: 79264 - protein, 9 aa, Homo Sapiens
RQALLIERY

SEQ ID NO: 79265 - protein, 9 aa, Homo Sapiens
RQALLLLAL

SEQ ID NO: 79266 - protein, 9 aa, Homo Sapiens
RQALLTQHY

SEQ ID NO: 79267 - protein, 9 aa, Homo Sapiens
RQAMGMLAF

SEQ ID NO: 79268 - protein, 9 aa, Homo Sapiens
RQAMPFKCM

SEQ ID NO: 79269 - protein, 9 aa, Homo Sapiens
RQAPPHIEL

SEQ ID NO: 79270 - protein, 9 aa, Homo Sapiens
RQAPVAAVF

SEQ ID NO: 79271 - protein, 9 aa, Homo Sapiens
RQATVNVSY

SEQ ID NO: 79272 - protein, 9 aa, Homo Sapiens
RQAVFTAKY

SEQ ID NO: 79273 - protein, 9 aa, Homo Sapiens
RQCPLKVSY

SEQ ID NO: 79274 - protein, 9 aa, Homo Sapiens
RQEGVPRTF

SEQ ID NO: 79275 - protein, 9 aa, Homo Sapiens
RQEQTKRML

SEQ ID NO: 79276 - protein, 9 aa, Homo Sapiens
RQESSVRLW

SEQ ID NO: 79277 - protein, 9 aa, Homo Sapiens
RQFCQTVGY

SEQ ID NO: 79278 - protein, 9 aa, Homo Sapiens
RQFDLAWQY

SEQ ID NO: 79279 - protein, 9 aa, Homo Sapiens
RQFEGLMRF

SEQ ID NO: 79280 - protein, 9 aa, Homo Sapiens
RQFEGLQGY

SEQ ID NO: 79281 - protein, 9 aa, Homo Sapiens
RQFGKKHLF

SEQ ID NO: 79282 - protein, 9 aa, Homo Sapiens
RQFMAETQF

SEQ ID NO: 79283 - protein, 9 aa, Homo Sapiens
RQFPFHEMF

SEQ ID NO: 79284 - protein, 9 aa, Homo Sapiens
RQFPFSSAL

SEQ ID NO: 79285 - protein, 9 aa, Homo Sapiens
RQFPTAFEF

SEQ ID NO: 79286 - protein, 9 aa, Homo Sapiens
RQFPVTVHF

SEQ ID NO: 79287 - protein, 9 aa, Homo Sapiens
RQFVKRIGY

SEQ ID NO: 79288 - protein, 9 aa, Homo Sapiens
RQGTPLIAF

SEQ ID NO: 79289 - protein, 9 aa, Homo Sapiens
RQHNYTEAF

SEQ ID NO: 79290 - protein, 9 aa, Homo Sapiens
RQHRMMILY

SEQ ID NO: 79291 - protein, 9 aa, Homo Sapiens
RQIDFVLSY

SEQ ID NO: 79292 - protein, 9 aa, Homo Sapiens
RQIDQFLVV

SEQ ID NO: 79293 - protein, 9 aa, Homo Sapiens
RQIKHMIKY

SEQ ID NO: 79294 - protein, 9 aa, Homo Sapiens
RQINWTVLY

SEQ ID NO: 79295 - protein, 9 aa, Homo Sapiens
RQIQESVTF

SEQ ID NO: 79296 - protein, 9 aa, Homo Sapiens
RQISREVTY

SEQ ID NO: 79297 - protein, 9 aa, Homo Sapiens
RQIVSAVAY

SEQ ID NO: 79298 - protein, 9 aa, Homo Sapiens
RQKELESNY

SEQ ID NO: 79299 - protein, 9 aa, Homo Sapiens
RQKKLFCRY

SEQ ID NO: 79300 - protein, 9 aa, Homo Sapiens
RQKLVRNIY

SEQ ID NO: 79301 - protein, 9 aa, Homo Sapiens
RQLAHIYHY

SEQ ID NO: 79302 - protein, 9 aa, Homo Sapiens
RQLCFKSQY

SEQ ID NO: 79303 - protein, 9 aa, Homo Sapiens
RQLDRNLTF

SEQ ID NO: 79304 - protein, 9 aa, Homo Sapiens
RQLGSLSKY

SEQ ID NO: 79305 - protein, 9 aa, Homo Sapiens
RQLLIPCAY

SEQ ID NO: 79306 - protein, 9 aa, Homo Sapiens
RQLLYITAF

SEQ ID NO: 79307 - protein, 9 aa, Homo Sapiens
RQLPCMHEF

SEQ ID NO: 79308 - protein, 9 aa, Homo Sapiens
RQLPRFSMY

SEQ ID NO: 79309 - protein, 9 aa, Homo Sapiens
RQLPSFQTF

SEQ ID NO: 79310 - protein, 9 aa, Homo Sapiens
RQLPSSHAL

SEQ ID NO: 79311 - protein, 9 aa, Homo Sapiens
RQLQQLISF

SEQ ID NO: 79312 - protein, 9 aa, Homo Sapiens
RQLSSSSSY

SEQ ID NO: 79313 - protein, 9 aa, Homo Sapiens
RQMAHVQIF

SEQ ID NO: 79314 - protein, 9 aa, Homo Sapiens
RQPLITLQY

SEQ ID NO: 79315 - protein, 9 aa, Homo Sapiens
RQPPSTTTF

SEQ ID NO: 79316 - protein, 9 aa, Homo Sapiens
RQQKEAACF

SEQ ID NO: 79317 - protein, 9 aa, Homo Sapiens
RQQQSQTAY

SEQ ID NO: 79318 - protein, 9 aa, Homo Sapiens
RQREIEIRF

SEQ ID NO: 79319 - protein, 9 aa, Homo Sapiens
RQREMEEQM

SEQ ID NO: 79320 - protein, 9 aa, Homo Sapiens
RQRFRQFGY

SEQ ID NO: 79321 - protein, 9 aa, Homo Sapiens
RQRLQSNAL

SEQ ID NO: 79322 - protein, 9 aa, Homo Sapiens
RQSPHSNLF

SEQ ID NO: 79323 - protein, 9 aa, Homo Sapiens
RQSPPRAAL

SEQ ID NO: 79324 - protein, 9 aa, Homo Sapiens
RQSTPRVSF

SEQ ID NO: 79325 - protein, 9 aa, Homo Sapiens
RQTIFNISL

SEQ ID NO: 79326 - protein, 9 aa, Homo Sapiens
RQVAPASGY

SEQ ID NO: 79327 - protein, 9 aa, Homo Sapiens
RQVCQLLGY

SEQ ID NO: 79328 - protein, 9 aa, Homo Sapiens
RQVGATVEF

SEQ ID NO: 79329 - protein, 9 aa, Homo Sapiens
RQVKGDLAF

SEQ ID NO: 79330 - protein, 9 aa, Homo Sapiens
RQVSTLNSY

SEQ ID NO: 79331 - protein, 9 aa, Homo Sapiens
RQVVRSSKF

SEQ ID NO: 79332 - protein, 9 aa, Homo Sapiens
RQVYLPMSY

SEQ ID NO: 79333 - protein, 9 aa, Homo Sapiens
RQWKPQLGF

SEQ ID NO: 79334 - protein, 9 aa, Homo Sapiens
RQWLIDTLY

SEQ ID NO: 79335 - protein, 9 aa, Homo Sapiens
RQYAKDIGF

SEQ ID NO: 79336 - protein, 9 aa, Homo Sapiens
RQYDKFLTH

SEQ ID NO: 79337 - protein, 9 aa, Homo Sapiens
RQYHLQQLF

SEQ ID NO: 79338 - protein, 9 aa, Homo Sapiens
RQYLDQQQY

SEQ ID NO: 79339 - protein, 9 aa, Homo Sapiens
RQYLECEVF

SEQ ID NO: 79340 - protein, 9 aa, Homo Sapiens
RQYLEEVGY

SEQ ID NO: 79341 - protein, 9 aa, Homo Sapiens
RQYLQEVGY

SEQ ID NO: 79342 - protein, 9 aa, Homo Sapiens
RQYPEVIKY

SEQ ID NO: 79343 - protein, 9 aa, Homo Sapiens
RQYPTPFQL

SEQ ID NO: 79344 - protein, 9 aa, Homo Sapiens
RSAIFSITY

SEQ ID NO: 79345 - protein, 9 aa, Homo Sapiens
RSAVFSVTY

SEQ ID NO: 79346 - protein, 9 aa, Homo Sapiens
RSFPGFQAF

SEQ ID NO: 79347 - protein, 9 aa, Homo Sapiens
RTAPSGSEY

SEQ ID NO: 79348 - protein, 9 aa, Homo Sapiens
SAAQPGVAF

SEQ ID NO: 79349 - protein, 9 aa, Homo Sapiens
SARAGETRF

SEQ ID NO: 79350 - protein, 9 aa, Homo Sapiens
SAYAQIVQF

SEQ ID NO: 79351 - protein, 9 aa, Homo Sapiens
SAYGSVKAY

SEQ ID NO: 79352 - protein, 9 aa, Homo Sapiens
SGFENKISY

SEQ ID NO: 79353 - protein, 9 aa, Homo Sapiens
SGRMQKVSY

SEQ ID NO: 79354 - protein, 9 aa, Homo Sapiens
SHAISMSAY

SEQ ID NO: 79355 - protein, 9 aa, Homo Sapiens
SHHLVARVY

SEQ ID NO: 79356 - protein, 9 aa, Homo Sapiens
SHIPQSSSY

SEQ ID NO: 79357 - protein, 9 aa, Homo Sapiens
SHLFVTSSF

SEQ ID NO: 79358 - protein, 9 aa, Homo Sapiens
SHLGESSSY

SEQ ID NO: 79359 - protein, 9 aa, Homo Sapiens
SHMEFYNQY

SEQ ID NO: 79360 - protein, 9 aa, Homo Sapiens
SHRAFVVKY

SEQ ID NO: 79361 - protein, 9 aa, Homo Sapiens
SHYPFFSTF

SEQ ID NO: 79362 - protein, 9 aa, Homo Sapiens
SHYVAFVKY

SEQ ID NO: 79363 - protein, 9 aa, Homo Sapiens
SIVNRTVTF

SEQ ID NO: 79364 - protein, 9 aa, Homo Sapiens
SKAAPSRLF

SEQ ID NO: 79365 - protein, 9 aa, Homo Sapiens
SKACVGNAY

SEQ ID NO: 79366 - protein, 9 aa, Homo Sapiens
SKALPASSF

SEQ ID NO: 79367 - protein, 9 aa, Homo Sapiens
SKAPAGSSL

SEQ ID NO: 79368 - protein, 9 aa, Homo Sapiens
SKAPAPVTY

SEQ ID NO: 79369 - protein, 9 aa, Homo Sapiens
SKAPGMNSL

SEQ ID NO: 79370 - protein, 9 aa, Homo Sapiens
SKAPGPAMY

SEQ ID NO: 79371 - protein, 9 aa, Homo Sapiens
SKASQFTGY

SEQ ID NO: 79372 - protein, 9 aa, Homo Sapiens
SKAVAVTSM

SEQ ID NO: 79373 - protein, 9 aa, Homo Sapiens
SKCEFAVGY

SEQ ID NO: 79374 - protein, 9 aa, Homo Sapiens
SKCFGFVSY

SEQ ID NO: 79375 - protein, 9 aa, Homo Sapiens
SKCGKSFRY

SEQ ID NO: 79376 - protein, 9 aa, Homo Sapiens
SKCSRGALY

SEQ ID NO: 79377 - protein, 9 aa, Homo Sapiens
SKDKRALKF

SEQ ID NO: 79378 - protein, 9 aa, Homo Sapiens
SKDKRDVYY

SEQ ID NO: 79379 - protein, 9 aa, Homo Sapiens
SKEDDVRQY

SEQ ID NO: 79380 - protein, 9 aa, Homo Sapiens
SKEEAMRWF

SEQ ID NO: 79381 - protein, 9 aa, Homo Sapiens
SKEPSARLL

SEQ ID NO: 79382 - protein, 9 aa, Homo Sapiens
SKFDGTRLY

SEQ ID NO: 79383 - protein, 9 aa, Homo Sapiens
SKFGTGNKY

SEQ ID NO: 79384 - protein, 9 aa, Homo Sapiens
SKFIIHNVY

SEQ ID NO: 79385 - protein, 9 aa, Homo Sapiens
SKFILIAAY

SEQ ID NO: 79386 - protein, 9 aa, Homo Sapiens
SKFPTQISL

SEQ ID NO: 79387 - protein, 9 aa, Homo Sapiens
SKFSNPRAL

SEQ ID NO: 79388 - protein, 9 aa, Homo Sapiens
SKFSQKIRY

SEQ ID NO: 79389 - protein, 9 aa, Homo Sapiens
SKFSQQQSF

SEQ ID NO: 79390 - protein, 9 aa, Homo Sapiens
SKFSSASKY

SEQ ID NO: 79391 - protein, 9 aa, Homo Sapiens
SKGIVVTAY

SEQ ID NO: 79392 - protein, 9 aa, Homo Sapiens
SKHDAATCF

SEQ ID NO: 79393 - protein, 9 aa, Homo Sapiens
SKHRAQVIY

SEQ ID NO: 79394 - protein, 9 aa, Homo Sapiens
SKIAGILHY

SEQ ID NO: 79395 - protein, 9 aa, Homo Sapiens
SKIDYFLEY

SEQ ID NO: 79396 - protein, 9 aa, Homo Sapiens
SKINPNTAY

SEQ ID NO: 79397 - protein, 9 aa, Homo Sapiens
SKIRAPTTM

SEQ ID NO: 79398 - protein, 9 aa, Homo Sapiens
SKIRVPVRY

SEQ ID NO: 79399 - protein, 9 aa, Homo Sapiens
SKITMPIAF

SEQ ID NO: 79400 - protein, 9 aa, Homo Sapiens
SKIYKPLLF

SEQ ID NO: 79401 - protein, 9 aa, Homo Sapiens
SKKFGDMSY

SEQ ID NO: 79402 - protein, 9 aa, Homo Sapiens
SKKHLETKF

SEQ ID NO: 79403 - protein, 9 aa, Homo Sapiens
SKKIDRHMY

SEQ ID NO: 79404 - protein, 9 aa, Homo Sapiens
SKKPESTSF

SEQ ID NO: 79405 - protein, 9 aa, Homo Sapiens
SKKPLILVY

SEQ ID NO: 79406 - protein, 9 aa, Homo Sapiens
SKKWGFTKF

SEQ ID NO: 79407 - protein, 9 aa, Homo Sapiens
SKLFSSVTF

SEQ ID NO: 79408 - protein, 9 aa, Homo Sapiens
SKLGKHAHF

SEQ ID NO: 79409 - protein, 9 aa, Homo Sapiens
SKLGPGEKY

SEQ ID NO: 79410 - protein, 9 aa, Homo Sapiens
SKLKETSPL

SEQ ID NO: 79411 - protein, 9 aa, Homo Sapiens
SKLLANMVY

SEQ ID NO: 79412 - protein, 9 aa, Homo Sapiens
SKLLLPITY

SEQ ID NO: 79413 - protein, 9 aa, Homo Sapiens
SKLPKDTAL

SEQ ID NO: 79414 - protein, 9 aa, Homo Sapiens
SKLPSSIEY

SEQ ID NO: 79415 - protein, 9 aa, Homo Sapiens
SKLPVITCY

SEQ ID NO: 79416 - protein, 9 aa, Homo Sapiens
SKLQNNNVY

SEQ ID NO: 79417 - protein, 9 aa, Homo Sapiens
SKLQWVSVF

SEQ ID NO: 79418 - protein, 9 aa, Homo Sapiens
SKLSFSQVF

SEQ ID NO: 79419 - protein, 9 aa, Homo Sapiens
SKLTQILSY

SEQ ID NO: 79420 - protein, 9 aa, Homo Sapiens
SKLWIIMEY

SEQ ID NO: 79421 - protein, 9 aa, Homo Sapiens
SKMDLIEHY

SEQ ID NO: 79422 - protein, 9 aa, Homo Sapiens
SKMFHPNVY

SEQ ID NO: 79423 - protein, 9 aa, Homo Sapiens
SKMGKQLTY

SEQ ID NO: 79424 - protein, 9 aa, Homo Sapiens
SKMHTSQDF

SEQ ID NO: 79425 - protein, 9 aa, Homo Sapiens
SKMLQHIDY

SEQ ID NO: 79426 - protein, 9 aa, Homo Sapiens
SKMSELQTY

SEQ ID NO: 79427 - protein, 9 aa, Homo Sapiens
SKNDLAVAY

SEQ ID NO: 79428 - protein, 9 aa, Homo Sapiens
SKNKSIICY

SEQ ID NO: 79429 - protein, 9 aa, Homo Sapiens
SKNPHIVSF

SEQ ID NO: 79430 - protein, 9 aa, Homo Sapiens
SKNPSKESF

SEQ ID NO: 79431 - protein, 9 aa, Homo Sapiens
SKNVSGISF

SEQ ID NO: 79432 - protein, 9 aa, Homo Sapiens
SKPASNPKF

SEQ ID NO: 79433 - protein, 9 aa, Homo Sapiens
SKPGVSLVY

SEQ ID NO: 79434 - protein, 9 aa, Homo Sapiens
SKPKEKLVY

SEQ ID NO: 79435 - protein, 9 aa, Homo Sapiens
SKPSTICKY

SEQ ID NO: 79436 - protein, 9 aa, Homo Sapiens
SKQAGQSVF

SEQ ID NO: 79437 - protein, 9 aa, Homo Sapiens
SKQASTVVF

SEQ ID NO: 79438 - protein, 9 aa, Homo Sapiens
SKQETGTEF

SEQ ID NO: 79439 - protein, 9 aa, Homo Sapiens
SKQLFMTAY

SEQ ID NO: 79440 - protein, 9 aa, Homo Sapiens
SKRIAQETF

SEQ ID NO: 79441 - protein, 9 aa, Homo Sapiens
SKRISKLAY

SEQ ID NO: 79442 - protein, 9 aa, Homo Sapiens
SKRIWGELY

SEQ ID NO: 79443 - protein, 9 aa, Homo Sapiens
SKSIPHNCY

SEQ ID NO: 79444 - protein, 9 aa, Homo Sapiens
SKSPDLLMY

SEQ ID NO: 79445 - protein, 9 aa, Homo Sapiens
SKSQALAVY

SEQ ID NO: 79446 - protein, 9 aa, Homo Sapiens
SKTETNVYF

SEQ ID NO: 79447 - protein, 9 aa, Homo Sapiens
SKTQVTVQY

SEQ ID NO: 79448 - protein, 9 aa, Homo Sapiens
SKTSEVNCY

SEQ ID NO: 79449 - protein, 9 aa, Homo Sapiens
SKVANTILF

SEQ ID NO: 79450 - protein, 9 aa, Homo Sapiens
SKVCMYFTY

SEQ ID NO: 79451 - protein, 9 aa, Homo Sapiens
SKVDGKLSF

SEQ ID NO: 79452 - protein, 9 aa, Homo Sapiens
SKVGSRLGY

SEQ ID NO: 79453 - protein, 9 aa, Homo Sapiens
SKVIEDVAF

SEQ ID NO: 79454 - protein, 9 aa, Homo Sapiens
SKVLLPLTY

SEQ ID NO: 79455 - protein, 9 aa, Homo Sapiens
SKVMNIVSY

SEQ ID NO: 79456 - protein, 9 aa, Homo Sapiens
SKVPLKHEY

SEQ ID NO: 79457 - protein, 9 aa, Homo Sapiens
SKVPSAPHF

SEQ ID NO: 79458 - protein, 9 aa, Homo Sapiens
SKVQTAVTM

SEQ ID NO: 79459 - protein, 9 aa, Homo Sapiens
SKVVPFSHY

SEQ ID NO: 79460 - protein, 9 aa, Homo Sapiens
SKWLKHQAF

SEQ ID NO: 79461 - protein, 9 aa, Homo Sapiens
SKWNTRESY

SEQ ID NO: 79462 - protein, 9 aa, Homo Sapiens
SKYATGIRY

SEQ ID NO: 79463 - protein, 9 aa, Homo Sapiens
SKYEALQTF

SEQ ID NO: 79464 - protein, 9 aa, Homo Sapiens
SKYEKLAKI

SEQ ID NO: 79465 - protein, 9 aa, Homo Sapiens
SKYFERHGY

SEQ ID NO: 79466 - protein, 9 aa, Homo Sapiens
SKYNFENKY

SEQ ID NO: 79467 - protein, 9 aa, Homo Sapiens
SKYQTVEKL

SEQ ID NO: 79468 - protein, 9 aa, Homo Sapiens
SLFVSNHAY

SEQ ID NO: 79469 - protein, 9 aa, Homo Sapiens
SMHLQLTCF

SEQ ID NO: 79470 - protein, 9 aa, Homo Sapiens
SMRKTFARY

SEQ ID NO: 79471 - protein, 9 aa, Homo Sapiens
SMSDPGVSY

SEQ ID NO: 79472 - protein, 9 aa, Homo Sapiens
SMWIERTSF

SEQ ID NO: 79473 - protein, 9 aa, Homo Sapiens
SNYHFGVTY

SEQ ID NO: 79474 - protein, 9 aa, Homo Sapiens
SQADIKKAY

SEQ ID NO: 79475 - protein, 9 aa, Homo Sapiens
SQALAIRSY

SEQ ID NO: 79476 - protein, 9 aa, Homo Sapiens
SQARLLTSF

SEQ ID NO: 79477 - protein, 9 aa, Homo Sapiens
SQARTLITF

SEQ ID NO: 79478 - protein, 9 aa, Homo Sapiens
SQATPHSSY

SEQ ID NO: 79479 - protein, 9 aa, Homo Sapiens
SQDPGTHVV

SEQ ID NO: 79480 - protein, 9 aa, Homo Sapiens
SQDTFKVHY

SEQ ID NO: 79481 - protein, 9 aa, Homo Sapiens
SQFASSYVF

SEQ ID NO: 79482 - protein, 9 aa, Homo Sapiens
SQFDSTTGF

SEQ ID NO: 79483 - protein, 9 aa, Homo Sapiens
SQFGGGSQY

SEQ ID NO: 79484 - protein, 9 aa, Homo Sapiens
SQFGTVTRF

SEQ ID NO: 79485 - protein, 9 aa, Homo Sapiens
SQFIFEHSY

SEQ ID NO: 79486 - protein, 9 aa, Homo Sapiens
SQFINFPIY

SEQ ID NO: 79487 - protein, 9 aa, Homo Sapiens
SQFKGYFIF

SEQ ID NO: 79488 - protein, 9 aa, Homo Sapiens
SQFPQPQHF

SEQ ID NO: 79489 - protein, 9 aa, Homo Sapiens
SQFSVPSSY

SEQ ID NO: 79490 - protein, 9 aa, Homo Sapiens
SQGPVKHVY

SEQ ID NO: 79491 - protein, 9 aa, Homo Sapiens
SQGSFPEHY

SEQ ID NO: 79492 - protein, 9 aa, Homo Sapiens
SQHPQQTSF

SEQ ID NO: 79493 - protein, 9 aa, Homo Sapiens
SQHQAIERF

SEQ ID NO: 79494 - protein, 9 aa, Homo Sapiens
SQHQETPVY

SEQ ID NO: 79495 - protein, 9 aa, Homo Sapiens
SQIDNNEPY

SEQ ID NO: 79496 - protein, 9 aa, Homo Sapiens
SQIEEHKVF

SEQ ID NO: 79497 - protein, 9 aa, Homo Sapiens
SQIFISRTY

SEQ ID NO: 79498 - protein, 9 aa, Homo Sapiens
SQIYQSIEF

SEQ ID NO: 79499 - protein, 9 aa, Homo Sapiens
SQKVSGPQY

SEQ ID NO: 79500 - protein, 9 aa, Homo Sapiens
SQLKGVSTF

SEQ ID NO: 79501 - protein, 9 aa, Homo Sapiens
SQLPEKVEY

SEQ ID NO: 79502 - protein, 9 aa, Homo Sapiens
SQLPPLTAF

SEQ ID NO: 79503 - protein, 9 aa, Homo Sapiens
SQLVAGVAF

SEQ ID NO: 79504 - protein, 9 aa, Homo Sapiens
SQMKSYQSF

SEQ ID NO: 79505 - protein, 9 aa, Homo Sapiens
SQRDYTQYY

SEQ ID NO: 79506 - protein, 9 aa, Homo Sapiens
SQRFKSSVY

SEQ ID NO: 79507 - protein, 9 aa, Homo Sapiens
SQRLESVSF

SEQ ID NO: 79508 - protein, 9 aa, Homo Sapiens
SQRLGSQKF

SEQ ID NO: 79509 - protein, 9 aa, Homo Sapiens
SQRPAARAF

SEQ ID NO: 79510 - protein, 9 aa, Homo Sapiens
SQRSPSELF

SEQ ID NO: 79511 - protein, 9 aa, Homo Sapiens
SQRSTATMY

SEQ ID NO: 79512 - protein, 9 aa, Homo Sapiens
SQRVLYIRY

SEQ ID NO: 79513 - protein, 9 aa, Homo Sapiens
SQTEVSSEY

SEQ ID NO: 79514 - protein, 9 aa, Homo Sapiens
SQTNPGSQF

SEQ ID NO: 79515 - protein, 9 aa, Homo Sapiens
SQVDSKSTF

SEQ ID NO: 79516 - protein, 9 aa, Homo Sapiens
SQVKPLFQF

SEQ ID NO: 79517 - protein, 9 aa, Homo Sapiens
SQVLGLHCY

SEQ ID NO: 79518 - protein, 9 aa, Homo Sapiens
SQVLLLKSF

SEQ ID NO: 79519 - protein, 9 aa, Homo Sapiens
SQVPQQSHF

SEQ ID NO: 79520 - protein, 9 aa, Homo Sapiens
SQVPRSSSM

SEQ ID NO: 79521 - protein, 9 aa, Homo Sapiens
SQVPTQMSF

SEQ ID NO: 79522 - protein, 9 aa, Homo Sapiens
SQVPVKHVY

SEQ ID NO: 79523 - protein, 9 aa, Homo Sapiens
SQYCGRLEY

SEQ ID NO: 79524 - protein, 9 aa, Homo Sapiens
SQYGSQVGY

SEQ ID NO: 79525 - protein, 9 aa, Homo Sapiens
SQYLTRITI

SEQ ID NO: 79526 - protein, 9 aa, Homo Sapiens
SQYPFPVTL

SEQ ID NO: 79527 - protein, 9 aa, Homo Sapiens
SQYQGVVVY

SEQ ID NO: 79528 - protein, 9 aa, Homo Sapiens
TAYPGQTQY

SEQ ID NO: 79529 - protein, 9 aa, Homo Sapiens
THAANTVVY

SEQ ID NO: 79530 - protein, 9 aa, Homo Sapiens
THLKPGTLY

SEQ ID NO: 79531 - protein, 9 aa, Homo Sapiens
THYIQHLSF

SEQ ID NO: 79532 - protein, 9 aa, Homo Sapiens
THYQLGLAY

SEQ ID NO: 79533 - protein, 9 aa, Homo Sapiens
TKADHMGSY

SEQ ID NO: 79534 - protein, 9 aa, Homo Sapiens
TKAEPSISY

SEQ ID NO: 79535 - protein, 9 aa, Homo Sapiens
TKAGVLARY

SEQ ID NO: 79536 - protein, 9 aa, Homo Sapiens
TKAVSSVKF

SEQ ID NO: 79537 - protein, 9 aa, Homo Sapiens
TKDGVREVF

SEQ ID NO: 79538 - protein, 9 aa, Homo Sapiens
TKDSTRLKY

SEQ ID NO: 79539 - protein, 9 aa, Homo Sapiens
TKFPAEQYY

SEQ ID NO: 79540 - protein, 9 aa, Homo Sapiens
TKFQAGVRF

SEQ ID NO: 79541 - protein, 9 aa, Homo Sapiens
TKFQEAVTF

SEQ ID NO: 79542 - protein, 9 aa, Homo Sapiens
TKIDVSYEY

SEQ ID NO: 79543 - protein, 9 aa, Homo Sapiens
TKIQHILTY

SEQ ID NO: 79544 - protein, 9 aa, Homo Sapiens
TKISTHVSF

SEQ ID NO: 79545 - protein, 9 aa, Homo Sapiens
TKISTQLDF

SEQ ID NO: 79546 - protein, 9 aa, Homo Sapiens
TKKGIGPVY

SEQ ID NO: 79547 - protein, 9 aa, Homo Sapiens
TKKVTSVVF

SEQ ID NO: 79548 - protein, 9 aa, Homo Sapiens
TKLEGGVAY

SEQ ID NO: 79549 - protein, 9 aa, Homo Sapiens
TKLGKPFKY

SEQ ID NO: 79550 - protein, 9 aa, Homo Sapiens
TKLPFIVVM

SEQ ID NO: 79551 - protein, 9 aa, Homo Sapiens
TKNISAISY

SEQ ID NO: 79552 - protein, 9 aa, Homo Sapiens
TKPGLYTAY

SEQ ID NO: 79553 - protein, 9 aa, Homo Sapiens
TKQPIPAAY

SEQ ID NO: 79554 - protein, 9 aa, Homo Sapiens
TKVDIKETY

SEQ ID NO: 79555 - protein, 9 aa, Homo Sapiens
TKVGPNATY

SEQ ID NO: 79556 - protein, 9 aa, Homo Sapiens
TKVVQNDAY

SEQ ID NO: 79557 - protein, 9 aa, Homo Sapiens
TKVYTQVEF

SEQ ID NO: 79558 - protein, 9 aa, Homo Sapiens
TKYHGPKAL

SEQ ID NO: 79559 - protein, 9 aa, Homo Sapiens
TKYLENQAF

SEQ ID NO: 79560 - protein, 9 aa, Homo Sapiens
TKYMRDPTF

SEQ ID NO: 79561 - protein, 9 aa, Homo Sapiens
TLYETIIGY

SEQ ID NO: 79562 - protein, 9 aa, Homo Sapiens
TMCPHILRY

SEQ ID NO: 79563 - protein, 9 aa, Homo Sapiens
TMFVQRQVF

SEQ ID NO: 79564 - protein, 9 aa, Homo Sapiens
TMKPSETSF

SEQ ID NO: 79565 - protein, 9 aa, Homo Sapiens
TQAPIFISF

SEQ ID NO: 79566 - protein, 9 aa, Homo Sapiens
TQAQIKAAY

SEQ ID NO: 79567 - protein, 9 aa, Homo Sapiens
TQAQTTATY

SEQ ID NO: 79568 - protein, 9 aa, Homo Sapiens
TQFGGKRPF

SEQ ID NO: 79569 - protein, 9 aa, Homo Sapiens
TQFVSGSKY

SEQ ID NO: 79570 - protein, 9 aa, Homo Sapiens
TQHPTLRLY

SEQ ID NO: 79571 - protein, 9 aa, Homo Sapiens
TQILQSPAF

SEQ ID NO: 79572 - protein, 9 aa, Homo Sapiens
TQIPRKVVY

SEQ ID NO: 79573 - protein, 9 aa, Homo Sapiens
TQIPTETTY

SEQ ID NO: 79574 - protein, 9 aa, Homo Sapiens
TQKEHLLKY

SEQ ID NO: 79575 - protein, 9 aa, Homo Sapiens
TQMDVKLVF

SEQ ID NO: 79576 - protein, 9 aa, Homo Sapiens
TQMPDPKTF

SEQ ID NO: 79577 - protein, 9 aa, Homo Sapiens
TQRDFMLSF

SEQ ID NO: 79578 - protein, 9 aa, Homo Sapiens
TQREFMLSF

SEQ ID NO: 79579 - protein, 9 aa, Homo Sapiens
TQRLKIMEY

SEQ ID NO: 79580 - protein, 9 aa, Homo Sapiens
TQRMFEIDY

SEQ ID NO: 79581 - protein, 9 aa, Homo Sapiens
TQRSQQLEF

SEQ ID NO: 79582 - protein, 9 aa, Homo Sapiens
TQVIHSIEY

SEQ ID NO: 79583 - protein, 9 aa, Homo Sapiens
TQYESKVFY

SEQ ID NO: 79584 - protein, 9 aa, Homo Sapiens
TQYTKPNQY

SEQ ID NO: 79585 - protein, 9 aa, Homo Sapiens
VAYDSKQYY

SEQ ID NO: 79586 - protein, 9 aa, Homo Sapiens
VEWEGTTPY

SEQ ID NO: 79587 - protein, 9 aa, Homo Sapiens
VHFVQTNSF

SEQ ID NO: 79588 - protein, 9 aa, Homo Sapiens
VHLPSCTVF

SEQ ID NO: 79589 - protein, 9 aa, Homo Sapiens
VHNPDVITY

SEQ ID NO: 79590 - protein, 9 aa, Homo Sapiens
VHPPPTTTY

SEQ ID NO: 79591 - protein, 9 aa, Homo Sapiens
VHRATGHEF

SEQ ID NO: 79592 - protein, 9 aa, Homo Sapiens
VHRQFAIVF

SEQ ID NO: 79593 - protein, 9 aa, Homo Sapiens
VKADGHKVY

SEQ ID NO: 79594 - protein, 9 aa, Homo Sapiens
VKAEIRQQF

SEQ ID NO: 79595 - protein, 9 aa, Homo Sapiens
VKAELRQYF

SEQ ID NO: 79596 - protein, 9 aa, Homo Sapiens
VKAEMLHMY

SEQ ID NO: 79597 - protein, 9 aa, Homo Sapiens
VKALMRFAF

SEQ ID NO: 79598 - protein, 9 aa, Homo Sapiens
VKAPGKSSF

SEQ ID NO: 79599 - protein, 9 aa, Homo Sapiens
VKAPPQTRL

SEQ ID NO: 79600 - protein, 9 aa, Homo Sapiens
VKATTKIKY

SEQ ID NO: 79601 - protein, 9 aa, Homo Sapiens
VKAVLAESY

SEQ ID NO: 79602 - protein, 9 aa, Homo Sapiens
VKDAKIAVY

SEQ ID NO: 79603 - protein, 9 aa, Homo Sapiens
VKDDIFRIY

SEQ ID NO: 79604 - protein, 9 aa, Homo Sapiens
VKEGVSAAF

SEQ ID NO: 79605 - protein, 9 aa, Homo Sapiens
VKFDAVIGY

SEQ ID NO: 79606 - protein, 9 aa, Homo Sapiens
VKFNPIETF

SEQ ID NO: 79607 - protein, 9 aa, Homo Sapiens
VKFPSKSAL

SEQ ID NO: 79608 - protein, 9 aa, Homo Sapiens
VKFSPSSRY

SEQ ID NO: 79609 - protein, 9 aa, Homo Sapiens
VKHIHVKAF

SEQ ID NO: 79610 - protein, 9 aa, Homo Sapiens
VKHPPSVKY

SEQ ID NO: 79611 - protein, 9 aa, Homo Sapiens
VKIGALEGY

SEQ ID NO: 79612 - protein, 9 aa, Homo Sapiens
VKIKTKLFY

SEQ ID NO: 79613 - protein, 9 aa, Homo Sapiens
VKIQKHVTF

SEQ ID NO: 79614 - protein, 9 aa, Homo Sapiens
VKKIDKYLY

SEQ ID NO: 79615 - protein, 9 aa, Homo Sapiens
VKLDPRPEY

SEQ ID NO: 79616 - protein, 9 aa, Homo Sapiens
VKLPSGEDY

SEQ ID NO: 79617 - protein, 9 aa, Homo Sapiens
VKNIERTLY

SEQ ID NO: 79618 - protein, 9 aa, Homo Sapiens
VKNIKQAEF

SEQ ID NO: 79619 - protein, 9 aa, Homo Sapiens
VKNKDIRKF

SEQ ID NO: 79620 - protein, 9 aa, Homo Sapiens
VKNKIASKY

SEQ ID NO: 79621 - protein, 9 aa, Homo Sapiens
VKNWVPTAY

SEQ ID NO: 79622 - protein, 9 aa, Homo Sapiens
VKPQSGSPY

SEQ ID NO: 79623 - protein, 9 aa, Homo Sapiens
VKPQTSPEY

SEQ ID NO: 79624 - protein, 9 aa, Homo Sapiens
VKRKQFEKY

SEQ ID NO: 79625 - protein, 9 aa, Homo Sapiens
VKRSAAEMY

SEQ ID NO: 79626 - protein, 9 aa, Homo Sapiens
VKSKIASKY

SEQ ID NO: 79627 - protein, 9 aa, Homo Sapiens
VKTGTITTF

SEQ ID NO: 79628 - protein, 9 aa, Homo Sapiens
VKVDLSEKY

SEQ ID NO: 79629 - protein, 9 aa, Homo Sapiens
VKVIDRILY

SEQ ID NO: 79630 - protein, 9 aa, Homo Sapiens
VKVIQQESY

SEQ ID NO: 79631 - protein, 9 aa, Homo Sapiens
VKVKDSTEY

SEQ ID NO: 79632 - protein, 9 aa, Homo Sapiens
VKWKGSLFF

SEQ ID NO: 79633 - protein, 9 aa, Homo Sapiens
VKYERQPEY

SEQ ID NO: 79634 - protein, 9 aa, Homo Sapiens
VKYIQQENF

SEQ ID NO: 79635 - protein, 9 aa, Homo Sapiens
VKYIQTDGY

SEQ ID NO: 79636 - protein, 9 aa, Homo Sapiens
VKYTNNEAY

SEQ ID NO: 79637 - protein, 9 aa, Homo Sapiens
VKYTQRVDY

SEQ ID NO: 79638 - protein, 9 aa, Homo Sapiens
VKYYQSHHY

SEQ ID NO: 79639 - protein, 9 aa, Homo Sapiens
VLFEHAVGY

SEQ ID NO: 79640 - protein, 9 aa, Homo Sapiens
VLYPHLSTY

SEQ ID NO: 79641 - protein, 9 aa, Homo Sapiens
VMINKATPY

SEQ ID NO: 79642 - protein, 9 aa, Homo Sapiens
VMLPTGAAF

SEQ ID NO: 79643 - protein, 9 aa, Homo Sapiens
VPNLFSLQL

SEQ ID NO: 79644 - protein, 9 aa, Homo Sapiens
VQCPHPQIL

SEQ ID NO: 79645 - protein, 9 aa, Homo Sapiens
VQENGQRKY

SEQ ID NO: 79646 - protein, 9 aa, Homo Sapiens
VQGIFVEKY

SEQ ID NO: 79647 - protein, 9 aa, Homo Sapiens
VQGLLSETY

SEQ ID NO: 79648 - protein, 9 aa, Homo Sapiens
VQGPVGTDF

SEQ ID NO: 79649 - protein, 9 aa, Homo Sapiens
VQHCQSRVF

SEQ ID NO: 79650 - protein, 9 aa, Homo Sapiens
VQIPPSTTY

SEQ ID NO: 79651 - protein, 9 aa, Homo Sapiens
VQISPMSAF

SEQ ID NO: 79652 - protein, 9 aa, Homo Sapiens
VQKEDIEVY

SEQ ID NO: 79653 - protein, 9 aa, Homo Sapiens
VQKEGKISY

SEQ ID NO: 79654 - protein, 9 aa, Homo Sapiens
VQPSKFNSY

SEQ ID NO: 79655 - protein, 9 aa, Homo Sapiens
VQQLQRLSF

SEQ ID NO: 79656 - protein, 9 aa, Homo Sapiens
VQQVHVATY

SEQ ID NO: 79657 - protein, 9 aa, Homo Sapiens
VQQVQRLPF

SEQ ID NO: 79658 - protein, 9 aa, Homo Sapiens
VQRGIGTAY

SEQ ID NO: 79659 - protein, 9 aa, Homo Sapiens
VQRITQETF

SEQ ID NO: 79660 - protein, 9 aa, Homo Sapiens
VQRNHETAF

SEQ ID NO: 79661 - protein, 9 aa, Homo Sapiens
VQRPQVVEY

SEQ ID NO: 79662 - protein, 9 aa, Homo Sapiens
VQRVETISL

SEQ ID NO: 79663 - protein, 9 aa, Homo Sapiens
VQVKRIHEY

SEQ ID NO: 79664 - protein, 9 aa, Homo Sapiens
VQYRYFKGY

SEQ ID NO: 79665 - protein, 9 aa, Homo Sapiens
VQYVHTQRF

SEQ ID NO: 79666 - protein, 9 aa, Homo Sapiens
VSYKGSISY

SEQ ID NO: 79667 - protein, 9 aa, Homo Sapiens
WHAPPVTTY

SEQ ID NO: 79668 - protein, 9 aa, Homo Sapiens
WKHAGKQDY

SEQ ID NO: 79669 - protein, 9 aa, Homo Sapiens
WQTVVGKTY

SEQ ID NO: 79670 - protein, 9 aa, Homo Sapiens
YHGKTGRVY

SEQ ID NO: 79671 - protein, 9 aa, Homo Sapiens
YHIGIPLTY

SEQ ID NO: 79672 - protein, 9 aa, Homo Sapiens
YHLGVVEAY

SEQ ID NO: 79673 - protein, 9 aa, Homo Sapiens
YHSFVSSVF

SEQ ID NO: 79674 - protein, 9 aa, Homo Sapiens
YKAFVMETF

SEQ ID NO: 79675 - protein, 9 aa, Homo Sapiens
YKALESIEY

SEQ ID NO: 79676 - protein, 9 aa, Homo Sapiens
YKAPILLAL

SEQ ID NO: 79677 - protein, 9 aa, Homo Sapiens
YKAPITNEF

SEQ ID NO: 79678 - protein, 9 aa, Homo Sapiens
YKAQPVIEF

SEQ ID NO: 79679 - protein, 9 aa, Homo Sapiens
YKAWSSIVY

SEQ ID NO: 79680 - protein, 9 aa, Homo Sapiens
YKAYLESFY

SEQ ID NO: 79681 - protein, 9 aa, Homo Sapiens
YKFDFPVSY

SEQ ID NO: 79682 - protein, 9 aa, Homo Sapiens
YKIAFPYLY

SEQ ID NO: 79683 - protein, 9 aa, Homo Sapiens
YKIDGSLEV

SEQ ID NO: 79684 - protein, 9 aa, Homo Sapiens
YKIGDLTGY

SEQ ID NO: 79685 - protein, 9 aa, Homo Sapiens
YKIGLVEAL

SEQ ID NO: 79686 - protein, 9 aa, Homo Sapiens
YKIKYPENF

SEQ ID NO: 79687 - protein, 9 aa, Homo Sapiens
YKILGGSVL

SEQ ID NO: 79688 - protein, 9 aa, Homo Sapiens
YKIPYTTVL

SEQ ID NO: 79689 - protein, 9 aa, Homo Sapiens
YKITAEEMY

SEQ ID NO: 79690 - protein, 9 aa, Homo Sapiens
YKKDVGKTL

SEQ ID NO: 79691 - protein, 9 aa, Homo Sapiens
YKKELEKTY

SEQ ID NO: 79692 - protein, 9 aa, Homo Sapiens
YKKGKDSLY

SEQ ID NO: 79693 - protein, 9 aa, Homo Sapiens
YKKPPMTCL

SEQ ID NO: 79694 - protein, 9 aa, Homo Sapiens
YKKSGKLVF

SEQ ID NO: 79695 - protein, 9 aa, Homo Sapiens
YKKTKEAVL

SEQ ID NO: 79696 - protein, 9 aa, Homo Sapiens
YKLDKQHTF

SEQ ID NO: 79697 - protein, 9 aa, Homo Sapiens
YKLDPDRQY

SEQ ID NO: 79698 - protein, 9 aa, Homo Sapiens
YKLELEQTY

SEQ ID NO: 79699 - protein, 9 aa, Homo Sapiens
YKLLGGLAV

SEQ ID NO: 79700 - protein, 9 aa, Homo Sapiens
YKLLPHSEY

SEQ ID NO: 79701 - protein, 9 aa, Homo Sapiens
YKLPDNVTF

SEQ ID NO: 79702 - protein, 9 aa, Homo Sapiens
YKLRAAEQY

SEQ ID NO: 79703 - protein, 9 aa, Homo Sapiens
YKMDPTKQY

SEQ ID NO: 79704 - protein, 9 aa, Homo Sapiens
YKMRNGYEL

SEQ ID NO: 79705 - protein, 9 aa, Homo Sapiens
YKNIPQMSF

SEQ ID NO: 79706 - protein, 9 aa, Homo Sapiens
YKNRTILGY

SEQ ID NO: 79707 - protein, 9 aa, Homo Sapiens
YKPDVKIEY

SEQ ID NO: 79708 - protein, 9 aa, Homo Sapiens
YKPPPQHMF

SEQ ID NO: 79709 - protein, 9 aa, Homo Sapiens
YKPVANHQY

SEQ ID NO: 79710 - protein, 9 aa, Homo Sapiens
YKQLGYSVY

SEQ ID NO: 79711 - protein, 9 aa, Homo Sapiens
YKRDFEAKL

SEQ ID NO: 79712 - protein, 9 aa, Homo Sapiens
YKRDPSKQY

SEQ ID NO: 79713 - protein, 9 aa, Homo Sapiens
YKRISRVEF

SEQ ID NO: 79714 - protein, 9 aa, Homo Sapiens
YKRQGAARF

SEQ ID NO: 79715 - protein, 9 aa, Homo Sapiens
YKRVTGTSL

SEQ ID NO: 79716 - protein, 9 aa, Homo Sapiens
YKSPASDTY

SEQ ID NO: 79717 - protein, 9 aa, Homo Sapiens
YKTPHRVAF

SEQ ID NO: 79718 - protein, 9 aa, Homo Sapiens
YKVDLESKL

SEQ ID NO: 79719 - protein, 9 aa, Homo Sapiens
YKVDNLEEF

SEQ ID NO: 79720 - protein, 9 aa, Homo Sapiens
YKVEYPIMY

SEQ ID NO: 79721 - protein, 9 aa, Homo Sapiens
YKVFKEEKY

SEQ ID NO: 79722 - protein, 9 aa, Homo Sapiens
YKVFREEKY

SEQ ID NO: 79723 - protein, 9 aa, Homo Sapiens
YKVPAGVSL

SEQ ID NO: 79724 - protein, 9 aa, Homo Sapiens
YKVPHPLEH

SEQ ID NO: 79725 - protein, 9 aa, Homo Sapiens
YKVTTQTSL

SEQ ID NO: 79726 - protein, 9 aa, Homo Sapiens
YKWSNKLQY

SEQ ID NO: 79727 - protein, 9 aa, Homo Sapiens
YKYEDLVRM

SEQ ID NO: 79728 - protein, 9 aa, Homo Sapiens
YKYPSDISY

SEQ ID NO: 79729 - protein, 9 aa, Homo Sapiens
YKYSGRDSL

SEQ ID NO: 79730 - protein, 9 aa, Homo Sapiens
YLLPDTKAY

SEQ ID NO: 79731 - protein, 9 aa, Homo Sapiens
YLRKEDMEY

SEQ ID NO: 79732 - protein, 9 aa, Homo Sapiens
YLYGQTTTY

SEQ ID NO: 79733 - protein, 9 aa, Homo Sapiens
YMRDPDDQY

SEQ ID NO: 79734 - protein, 9 aa, Homo Sapiens
YMYRHKGTY

SEQ ID NO: 79735 - protein, 9 aa, Homo Sapiens
YQADIERMY

SEQ ID NO: 79736 - protein, 9 aa, Homo Sapiens
YQEKGVRVL

SEQ ID NO: 79737 - protein, 9 aa, Homo Sapiens
YQFTGIKKY

SEQ ID NO: 79738 - protein, 9 aa, Homo Sapiens
YQHGHINSY

SEQ ID NO: 79739 - protein, 9 aa, Homo Sapiens
YQIDPDACF

SEQ ID NO: 79740 - protein, 9 aa, Homo Sapiens
YQIKVHRKY

SEQ ID NO: 79741 - protein, 9 aa, Homo Sapiens
YQKQPKIGY

SEQ ID NO: 79742 - protein, 9 aa, Homo Sapiens
YQLVKTYEY

SEQ ID NO: 79743 - protein, 9 aa, Homo Sapiens
YQPIQSPTF

SEQ ID NO: 79744 - protein, 9 aa, Homo Sapiens
YQQIFLHEF

SEQ ID NO: 79745 - protein, 9 aa, Homo Sapiens
YQRDLEVAL

SEQ ID NO: 79746 - protein, 9 aa, Homo Sapiens
YQTAISENY

SEQ ID NO: 79747 - protein, 9 aa, Homo Sapiens
YQTAPKAGY

SEQ ID NO: 79748 - protein, 9 aa, Homo Sapiens
YQYLEQSKY

SEQ ID NO: 79749 - protein, 9 aa, Homo Sapiens
YQYLLVTAL

SEQ ID NO: 79750 - protein, 9 aa, Homo Sapiens
YQYPRPLLI

SEQ ID NO: 79751 - protein, 9 aa, Homo Sapiens
YVPPLAPHP

SEQ ID NO: 79752 - protein, 10 aa, Homo Sapiens
AAAAAAPPDP

SEQ ID NO: 79753 - protein, 10 aa, Homo Sapiens
AKAAEEAKKF

SEQ ID NO: 79754 - protein, 10 aa, Homo Sapiens
AKAAGPLQVY

SEQ ID NO: 79755 - protein, 10 aa, Homo Sapiens
AKAGGFVVGY

SEQ ID NO: 79756 - protein, 10 aa, Homo Sapiens
AKAIATTVTY

SEQ ID NO: 79757 - protein, 10 aa, Homo Sapiens
AKANPQYTVY

SEQ ID NO: 79758 - protein, 10 aa, Homo Sapiens
AKAPFAAHGY

SEQ ID NO: 79759 - protein, 10 aa, Homo Sapiens
AKAPGAIGPY

SEQ ID NO: 79760 - protein, 10 aa, Homo Sapiens
AKAPVGPVTM

SEQ ID NO: 79761 - protein, 10 aa, Homo Sapiens
AKASPTQNLF

SEQ ID NO: 79762 - protein, 10 aa, Homo Sapiens
AKATILCTSY

SEQ ID NO: 79763 - protein, 10 aa, Homo Sapiens
AKCQQLQQEY

SEQ ID NO: 79764 - protein, 10 aa, Homo Sapiens
AKDPANGRQF

SEQ ID NO: 79765 - protein, 10 aa, Homo Sapiens
AKDPSVSIRY

SEQ ID NO: 79766 - protein, 10 aa, Homo Sapiens
AKFAEEFYSF

SEQ ID NO: 79767 - protein, 10 aa, Homo Sapiens
AKFNKKAERF

SEQ ID NO: 79768 - protein, 10 aa, Homo Sapiens
AKFPLPMEVF

SEQ ID NO: 79769 - protein, 10 aa, Homo Sapiens
AKFQYECGNY

SEQ ID NO: 79770 - protein, 10 aa, Homo Sapiens
AKFREIAEAY

SEQ ID NO: 79771 - protein, 10 aa, Homo Sapiens
AKGNIPAESY

SEQ ID NO: 79772 - protein, 10 aa, Homo Sapiens
AKIAEQVASF

SEQ ID NO: 79773 - protein, 10 aa, Homo Sapiens
AKIALMNSVF

SEQ ID NO: 79774 - protein, 10 aa, Homo Sapiens
AKIGGIITVF

SEQ ID NO: 79775 - protein, 10 aa, Homo Sapiens
AKIGSEIGCY

SEQ ID NO: 79776 - protein, 10 aa, Homo Sapiens
AKIKQKCPLY

SEQ ID NO: 79777 - protein, 10 aa, Homo Sapiens
AKILNHPRVY

SEQ ID NO: 79778 - protein, 10 aa, Homo Sapiens
AKKGFTAVGY

SEQ ID NO: 79779 - protein, 10 aa, Homo Sapiens
AKKRDIYDKY

SEQ ID NO: 79780 - protein, 10 aa, Homo Sapiens
AKLAGDHIEY

SEQ ID NO: 79781 - protein, 10 aa, Homo Sapiens
AKLDELKLKY

SEQ ID NO: 79782 - protein, 10 aa, Homo Sapiens
AKLGKEIEEY

SEQ ID NO: 79783 - protein, 10 aa, Homo Sapiens
AKLPDFESRY

SEQ ID NO: 79784 - protein, 10 aa, Homo Sapiens
AKLPFTPLSY

SEQ ID NO: 79785 - protein, 10 aa, Homo Sapiens
AKLPGGVQNF

SEQ ID NO: 79786 - protein, 10 aa, Homo Sapiens
AKLQDPFSLY

SEQ ID NO: 79787 - protein, 10 aa, Homo Sapiens
AKMMPGCEIY

SEQ ID NO: 79788 - protein, 10 aa, Homo Sapiens
AKNPQEQKSF

SEQ ID NO: 79789 - protein, 10 aa, Homo Sapiens
AKPAGGPKPP

SEQ ID NO: 79790 - protein, 10 aa, Homo Sapiens
AKPDSTLHTY

SEQ ID NO: 79791 - protein, 10 aa, Homo Sapiens
AKPEYISKTY

SEQ ID NO: 79792 - protein, 10 aa, Homo Sapiens
AKPHGPRTLY

SEQ ID NO: 79793 - protein, 10 aa, Homo Sapiens
AKPLAALVTY

SEQ ID NO: 79794 - protein, 10 aa, Homo Sapiens
AKPNGLILQY

SEQ ID NO: 79795 - protein, 10 aa, Homo Sapiens
AKPQHVTETF

SEQ ID NO: 79796 - protein, 10 aa, Homo Sapiens
AKPRSLQTGF

SEQ ID NO: 79797 - protein, 10 aa, Homo Sapiens
AKRADLQSTF

SEQ ID NO: 79798 - protein, 10 aa, Homo Sapiens
AKRPELRNYF

SEQ ID NO: 79799 - protein, 10 aa, Homo Sapiens
AKRPKFLTTY

SEQ ID NO: 79800 - protein, 10 aa, Homo Sapiens
AKSNELFTTF

SEQ ID NO: 79801 - protein, 10 aa, Homo Sapiens
AKSSTTVSSF

SEQ ID NO: 79802 - protein, 10 aa, Homo Sapiens
AKSSVGETVY

SEQ ID NO: 79803 - protein, 10 aa, Homo Sapiens
AKTPQKSVSF

SEQ ID NO: 79804 - protein, 10 aa, Homo Sapiens
AKVDENHSEF

SEQ ID NO: 79805 - protein, 10 aa, Homo Sapiens
AKVDLNSNGF

SEQ ID NO: 79806 - protein, 10 aa, Homo Sapiens
AKVDQNRVRY

SEQ ID NO: 79807 - protein, 10 aa, Homo Sapiens
AKVDTDGNGY

SEQ ID NO: 79808 - protein, 10 aa, Homo Sapiens
AKVFGATTNY

SEQ ID NO: 79809 - protein, 10 aa, Homo Sapiens
AKVFITKQGY

SEQ ID NO: 79810 - protein, 10 aa, Homo Sapiens
AKVINDGLFY

SEQ ID NO: 79811 - protein, 10 aa, Homo Sapiens
AKVKDKVYGC

SEQ ID NO: 79812 - protein, 10 aa, Homo Sapiens
AKVSSNKTGF

SEQ ID NO: 79813 - protein, 10 aa, Homo Sapiens
AKVTFTYTEF

SEQ ID NO: 79814 - protein, 10 aa, Homo Sapiens
AKYFIRDEFL

SEQ ID NO: 79815 - protein, 10 aa, Homo Sapiens
AKYIPELAYY

SEQ ID NO: 79816 - protein, 10 aa, Homo Sapiens
AKYLDEDTIY

SEQ ID NO: 79817 - protein, 10 aa, Homo Sapiens
AKYLSGIAHF

SEQ ID NO: 79818 - protein, 10 aa, Homo Sapiens
AKYMAEVKKY

SEQ ID NO: 79819 - protein, 10 aa, Homo Sapiens
AKYMKDLISY

SEQ ID NO: 79820 - protein, 10 aa, Homo Sapiens
AKYNACILEY

SEQ ID NO: 79821 - protein, 10 aa, Homo Sapiens
AKYNKILNKY

SEQ ID NO: 79822 - protein, 10 aa, Homo Sapiens
AKYPAESPDY

SEQ ID NO: 79823 - protein, 10 aa, Homo Sapiens
AQAFIHNSLY

SEQ ID NO: 79824 - protein, 10 aa, Homo Sapiens
AQAGWLQHDY

SEQ ID NO: 79825 - protein, 10 aa, Homo Sapiens
AQAHFNNGEY

SEQ ID NO: 79826 - protein, 10 aa, Homo Sapiens
AQAPCGQAAY

SEQ ID NO: 79827 - protein, 10 aa, Homo Sapiens
AQFHPDGLIF

SEQ ID NO: 79828 - protein, 10 aa, Homo Sapiens
AQFIDKPVCF

SEQ ID NO: 79829 - protein, 10 aa, Homo Sapiens
AQHEGESVSY

SEQ ID NO: 79830 - protein, 10 aa, Homo Sapiens
AQLDPSLVAF

SEQ ID NO: 79831 - protein, 10 aa, Homo Sapiens
AQLPKPTSTY

SEQ ID NO: 79832 - protein, 10 aa, Homo Sapiens
AQNPANMSKY

SEQ ID NO: 79833 - protein, 10 aa, Homo Sapiens
AQNPSGETAF

SEQ ID NO: 79834 - protein, 10 aa, Homo Sapiens
AQRAPGGLSY

SEQ ID NO: 79835 - protein, 10 aa, Homo Sapiens
AQRPDNPREF

SEQ ID NO: 79836 - protein, 10 aa, Homo Sapiens
AQRQDIAFAY

SEQ ID NO: 79837 - protein, 10 aa, Homo Sapiens
AQRQEIRTAY

SEQ ID NO: 79838 - protein, 10 aa, Homo Sapiens
AQRQEISAAF

SEQ ID NO: 79839 - protein, 10 aa, Homo Sapiens
AQRRDPSIHY

SEQ ID NO: 79840 - protein, 10 aa, Homo Sapiens
AQRSTETALY

SEQ ID NO: 79841 - protein, 10 aa, Homo Sapiens
AQVQYPLQTF

SEQ ID NO: 79842 - protein, 10 aa, Homo Sapiens
AQYDQASTKY

SEQ ID NO: 79843 - protein, 10 aa, Homo Sapiens
AQYPSQPQRF

SEQ ID NO: 79844 - protein, 10 aa, Homo Sapiens
AQYQREYSEF

SEQ ID NO: 79845 - protein, 10 aa, Homo Sapiens
AQYSQDYQQF

SEQ ID NO: 79846 - protein, 10 aa, Homo Sapiens
FKGPELLVDY

SEQ ID NO: 79847 - protein, 10 aa, Homo Sapiens
FKIDDQRRTH

SEQ ID NO: 79848 - protein, 10 aa, Homo Sapiens
FKLGGVTASF

SEQ ID NO: 79849 - protein, 10 aa, Homo Sapiens
FKPEEIQTVY

SEQ ID NO: 79850 - protein, 10 aa, Homo Sapiens
FKSGSPVATF

SEQ ID NO: 79851 - protein, 10 aa, Homo Sapiens
FKVDAGKLHY

SEQ ID NO: 79852 - protein, 10 aa, Homo Sapiens
FKVSASPLLY

SEQ ID NO: 79853 - protein, 10 aa, Homo Sapiens
FKYPNFDVEY

SEQ ID NO: 79854 - protein, 10 aa, Homo Sapiens
FQLPGGHLEF

SEQ ID NO: 79855 - protein, 10 aa, Homo Sapiens
FQYDDSGNTF

SEQ ID NO: 79856 - protein, 10 aa, Homo Sapiens
FQYDSTHGKF

SEQ ID NO: 79857 - protein, 10 aa, Homo Sapiens
GASQFMGNVY

SEQ ID NO: 79858 - protein, 10 aa, Homo Sapiens
GKADGQQSSF

SEQ ID NO: 79859 - protein, 10 aa, Homo Sapiens
GKAEVAVTLY

SEQ ID NO: 79860 - protein, 10 aa, Homo Sapiens
GKAFSCSSSF

SEQ ID NO: 79861 - protein, 10 aa, Homo Sapiens
GKAFTHYSTY

SEQ ID NO: 79862 - protein, 10 aa, Homo Sapiens
GKAITFVTQY

SEQ ID NO: 79863 - protein, 10 aa, Homo Sapiens
GKDIGRGIGY

SEQ ID NO: 79864 - protein, 10 aa, Homo Sapiens
GKFAGNPWYY

SEQ ID NO: 79865 - protein, 10 aa, Homo Sapiens
GKFCMISATF

SEQ ID NO: 79866 - protein, 10 aa, Homo Sapiens
GKFDHADRTF

SEQ ID NO: 79867 - protein, 10 aa, Homo Sapiens
GKFGGDFLVY

SEQ ID NO: 79868 - protein, 10 aa, Homo Sapiens
GKFGHEFLEF

SEQ ID NO: 79869 - protein, 10 aa, Homo Sapiens
GKFKGVGRSY

SEQ ID NO: 79870 - protein, 10 aa, Homo Sapiens
GKFKPNSVTY

SEQ ID NO: 79871 - protein, 10 aa, Homo Sapiens
GKFKQAETLY

SEQ ID NO: 79872 - protein, 10 aa, Homo Sapiens
GKFNVLLTTY

SEQ ID NO: 79873 - protein, 10 aa, Homo Sapiens
GKFQEEANIY

SEQ ID NO: 79874 - protein, 10 aa, Homo Sapiens
GKFQGLIEKF

SEQ ID NO: 79875 - protein, 10 aa, Homo Sapiens
GKFTEGNITY

SEQ ID NO: 79876 - protein, 10 aa, Homo Sapiens
GKHFGTILNY

SEQ ID NO: 79877 - protein, 10 aa, Homo Sapiens
GKIADRFLLY

SEQ ID NO: 79878 - protein, 10 aa, Homo Sapiens
GKIEGLTAEF

SEQ ID NO: 79879 - protein, 10 aa, Homo Sapiens
GKIISDNLTY

SEQ ID NO: 79880 - protein, 10 aa, Homo Sapiens
GKINILLQTY

SEQ ID NO: 79881 - protein, 10 aa, Homo Sapiens
GKIQGIIAEY

SEQ ID NO: 79882 - protein, 10 aa, Homo Sapiens
GKLDERHRLF

SEQ ID NO: 79883 - protein, 10 aa, Homo Sapiens
GKLEDIPAFF

SEQ ID NO: 79884 - protein, 10 aa, Homo Sapiens
GKLGKGFGAF

SEQ ID NO: 79885 - protein, 10 aa, Homo Sapiens
GKLGNESVTF

SEQ ID NO: 79886 - protein, 10 aa, Homo Sapiens
GKLIWKVTDY

SEQ ID NO: 79887 - protein, 10 aa, Homo Sapiens
GKLPAGGVLY

SEQ ID NO: 79888 - protein, 10 aa, Homo Sapiens
GKLYLEREEY

SEQ ID NO: 79889 - protein, 10 aa, Homo Sapiens
GKMNPQSAFF

SEQ ID NO: 79890 - protein, 10 aa, Homo Sapiens
GKNPFLGIAY

SEQ ID NO: 79891 - protein, 10 aa, Homo Sapiens
GKPEKPSVTY

SEQ ID NO: 79892 - protein, 10 aa, Homo Sapiens
GKPLGPRTLY

SEQ ID NO: 79893 - protein, 10 aa, Homo Sapiens
GKPPFEANTY

SEQ ID NO: 79894 - protein, 10 aa, Homo Sapiens
GKPQNAPEGY

SEQ ID NO: 79895 - protein, 10 aa, Homo Sapiens
GKPRFQQTSF

SEQ ID NO: 79896 - protein, 10 aa, Homo Sapiens
GKQFHRIVTY

SEQ ID NO: 79897 - protein, 10 aa, Homo Sapiens
GKREGIDQSY

SEQ ID NO: 79898 - protein, 10 aa, Homo Sapiens
GKRPEEENVY

SEQ ID NO: 79899 - protein, 10 aa, Homo Sapiens
GKTSFGMSVF

SEQ ID NO: 79900 - protein, 10 aa, Homo Sapiens
GKVFTGGALY

SEQ ID NO: 79901 - protein, 10 aa, Homo Sapiens
GKVGPMIGQY

SEQ ID NO: 79902 - protein, 10 aa, Homo Sapiens
GKVISSSSSF

SEQ ID NO: 79903 - protein, 10 aa, Homo Sapiens
GKVITSSSSF

SEQ ID NO: 79904 - protein, 10 aa, Homo Sapiens
GKVQDAFISY

SEQ ID NO: 79905 - protein, 10 aa, Homo Sapiens
GKVRDINRTY

SEQ ID NO: 79906 - protein, 10 aa, Homo Sapiens
GKYDSELMCY

SEQ ID NO: 79907 - protein, 10 aa, Homo Sapiens
GKYEAVERYY

SEQ ID NO: 79908 - protein, 10 aa, Homo Sapiens
GKYEEVEYYY

SEQ ID NO: 79909 - protein, 10 aa, Homo Sapiens
GKYEQAIQCY

SEQ ID NO: 79910 - protein, 10 aa, Homo Sapiens
GKYFGGVLEY

SEQ ID NO: 79911 - protein, 10 aa, Homo Sapiens
GKYKNSEINF

SEQ ID NO: 79912 - protein, 10 aa, Homo Sapiens
GKYKQALLQY

SEQ ID NO: 79913 - protein, 10 aa, Homo Sapiens
GKYLASCVQY

SEQ ID NO: 79914 - protein, 10 aa, Homo Sapiens
GKYMQAVIQY

SEQ ID NO: 79915 - protein, 10 aa, Homo Sapiens
GKYRDAVSRY

SEQ ID NO: 79916 - protein, 10 aa, Homo Sapiens
GKYREFHRMY

SEQ ID NO: 79917 - protein, 10 aa, Homo Sapiens
GMAAMPQTVY

SEQ ID NO: 79918 - protein, 10 aa, Homo Sapiens
GQDPHSSQAF

SEQ ID NO: 79919 - protein, 10 aa, Homo Sapiens
GQFPGHNEFF

SEQ ID NO: 79920 - protein, 10 aa, Homo Sapiens
GQILMPNIGY

SEQ ID NO: 79921 - protein, 10 aa, Homo Sapiens
GQKGTCGIQY

SEQ ID NO: 79922 - protein, 10 aa, Homo Sapiens
GQRKGAGSVF

SEQ ID NO: 79923 - protein, 10 aa, Homo Sapiens
GQYGNPLNKY

SEQ ID NO: 79924 - protein, 10 aa, Homo Sapiens
GQYSTGKTTF

SEQ ID NO: 79925 - protein, 10 aa, Homo Sapiens
GRIKAIQLEY

SEQ ID NO: 79926 - protein, 10 aa, Homo Sapiens
HKAPASGICF

SEQ ID NO: 79927 - protein, 10 aa, Homo Sapiens
HKFAKDFMTY

SEQ ID NO: 79928 - protein, 10 aa, Homo Sapiens
HKKQDPDVPF

SEQ ID NO: 79929 - protein, 10 aa, Homo Sapiens
HKVDLPFQEY

SEQ ID NO: 79930 - protein, 10 aa, Homo Sapiens
HKVETFSGVY

SEQ ID NO: 79931 - protein, 10 aa, Homo Sapiens
HQAACLIQAY

SEQ ID NO: 79932 - protein, 10 aa, Homo Sapiens
HQLRAQILAY

SEQ ID NO: 79933 - protein, 10 aa, Homo Sapiens
HQLRAQIMAY

SEQ ID NO: 79934 - protein, 10 aa, Homo Sapiens
HQRPDKQNLF

SEQ ID NO: 79935 - protein, 10 aa, Homo Sapiens
HQVAPSPAGY

SEQ ID NO: 79936 - protein, 10 aa, Homo Sapiens
IGHYTLKIEI

SEQ ID NO: 79937 - protein, 10 aa, Homo Sapiens
IGQSKSVKIY

SEQ ID NO: 79938 - protein, 10 aa, Homo Sapiens
IKAIFPNGQF

SEQ ID NO: 79939 - protein, 10 aa, Homo Sapiens
IKDPGPTRTF

SEQ ID NO: 79940 - protein, 10 aa, Homo Sapiens
IKKPDYKVAY

SEQ ID NO: 79941 - protein, 10 aa, Homo Sapiens
IKKSDPVVSY

SEQ ID NO: 79942 - protein, 10 aa, Homo Sapiens
IKMDASLGNL

SEQ ID NO: 79943 - protein, 10 aa, Homo Sapiens
IKPGEHGSTY

SEQ ID NO: 79944 - protein, 10 aa, Homo Sapiens
IKVWDTCTTY

SEQ ID NO: 79945 - protein, 10 aa, Homo Sapiens
IKYDLKGSTY

SEQ ID NO: 79946 - protein, 10 aa, Homo Sapiens
IKYDPSIGIY

SEQ ID NO: 79947 - protein, 10 aa, Homo Sapiens
IKYKERFLVY

SEQ ID NO: 79948 - protein, 10 aa, Homo Sapiens
IMRECQEESF

SEQ ID NO: 79949 - protein, 10 aa, Homo Sapiens
IQIALPSGCY

SEQ ID NO: 79950 - protein, 10 aa, Homo Sapiens
IQQLATIFTH

SEQ ID NO: 79951 - protein, 10 aa, Homo Sapiens
KGYLVSVDGY

SEQ ID NO: 79952 - protein, 10 aa, Homo Sapiens
KGYPSEFATY

SEQ ID NO: 79953 - protein, 10 aa, Homo Sapiens
KGYPSEFSTY

SEQ ID NO: 79954 - protein, 10 aa, Homo Sapiens
KHADPRIQGY

SEQ ID NO: 79955 - protein, 10 aa, Homo Sapiens
KHLPASNVSF

SEQ ID NO: 79956 - protein, 10 aa, Homo Sapiens
KHYEDNCISY

SEQ ID NO: 79957 - protein, 10 aa, Homo Sapiens
KKAACIAEQY

SEQ ID NO: 79958 - protein, 10 aa, Homo Sapiens
KKAPAQKVPA

SEQ ID NO: 79959 - protein, 10 aa, Homo Sapiens
KKAPGSGAVF

SEQ ID NO: 79960 - protein, 10 aa, Homo Sapiens
KKAQNIMESF

SEQ ID NO: 79961 - protein, 10 aa, Homo Sapiens
KKAVPKEDIY

SEQ ID NO: 79962 - protein, 10 aa, Homo Sapiens
KKCDISLQFF

SEQ ID NO: 79963 - protein, 10 aa, Homo Sapiens
KKFAFVHISF

SEQ ID NO: 79964 - protein, 10 aa, Homo Sapiens
KKFEASGFCY

SEQ ID NO: 79965 - protein, 10 aa, Homo Sapiens
KKFFGEFTGF

SEQ ID NO: 79966 - protein, 10 aa, Homo Sapiens
KKFNEPGSQY

SEQ ID NO: 79967 - protein, 10 aa, Homo Sapiens
KKFNSSVLSF

SEQ ID NO: 79968 - protein, 10 aa, Homo Sapiens
KKFSGKHVVF

SEQ ID NO: 79969 - protein, 10 aa, Homo Sapiens
KKHYAPLQAY

SEQ ID NO: 79970 - protein, 10 aa, Homo Sapiens
KKIADFLNSF

SEQ ID NO: 79971 - protein, 10 aa, Homo Sapiens
KKIDASQTEF

SEQ ID NO: 79972 - protein, 10 aa, Homo Sapiens
KKIEEFLSSF

SEQ ID NO: 79973 - protein, 10 aa, Homo Sapiens
KKIESSGVTY

SEQ ID NO: 79974 - protein, 10 aa, Homo Sapiens
KKIEVLDVSY

SEQ ID NO: 79975 - protein, 10 aa, Homo Sapiens
KKIKQDIYCY

SEQ ID NO: 79976 - protein, 10 aa, Homo Sapiens
KKKEEMLKKF

SEQ ID NO: 79977 - protein, 10 aa, Homo Sapiens
KKKTVIEIEF

SEQ ID NO: 79978 - protein, 10 aa, Homo Sapiens
KKLDEQYQKY

SEQ ID NO: 79979 - protein, 10 aa, Homo Sapiens
KKLDNLQCLY

SEQ ID NO: 79980 - protein, 10 aa, Homo Sapiens
KKLEDIRTRY

SEQ ID NO: 79981 - protein, 10 aa, Homo Sapiens
KKLEELEQKY

SEQ ID NO: 79982 - protein, 10 aa, Homo Sapiens
KKLEKETTMY

SEQ ID NO: 79983 - protein, 10 aa, Homo Sapiens
KKLPCQITSY

SEQ ID NO: 79984 - protein, 10 aa, Homo Sapiens
KKLPKGTVSF

SEQ ID NO: 79985 - protein, 10 aa, Homo Sapiens
KKLQGEVEKY

SEQ ID NO: 79986 - protein, 10 aa, Homo Sapiens
KKMETNYQRF

SEQ ID NO: 79987 - protein, 10 aa, Homo Sapiens
KKPAFNLSAF

SEQ ID NO: 79988 - protein, 10 aa, Homo Sapiens
KKPDLPQTNF

SEQ ID NO: 79989 - protein, 10 aa, Homo Sapiens
KKPDQHFKPY

SEQ ID NO: 79990 - protein, 10 aa, Homo Sapiens
KKPESFFTQF

SEQ ID NO: 79991 - protein, 10 aa, Homo Sapiens
KKPGHVAEVY

SEQ ID NO: 79992 - protein, 10 aa, Homo Sapiens
KKPPGAQLGF

SEQ ID NO: 79993 - protein, 10 aa, Homo Sapiens
KKQKPSRVLY

SEQ ID NO: 79994 - protein, 10 aa, Homo Sapiens
KKQPSVLVTF

SEQ ID NO: 79995 - protein, 10 aa, Homo Sapiens
KKRPGIETLF

SEQ ID NO: 79996 - protein, 10 aa, Homo Sapiens
KKSEASGFCY

SEQ ID NO: 79997 - protein, 10 aa, Homo Sapiens
KKVAPQNDSF

SEQ ID NO: 79998 - protein, 10 aa, Homo Sapiens
KKVDGSVNAY

SEQ ID NO: 79999 - protein, 10 aa, Homo Sapiens
KKVENFTVSF

SEQ ID NO: 80000 - protein, 10 aa, Homo Sapiens
KKVFLGRDTY

SEQ ID NO: 80001 - protein, 10 aa, Homo Sapiens
KKWEQDPETF

SEQ ID NO: 80002 - protein, 10 aa, Homo Sapiens
KKWVELPITF

SEQ ID NO: 80003 - protein, 10 aa, Homo Sapiens
KKYAEDRERF

SEQ ID NO: 80004 - protein, 10 aa, Homo Sapiens
KKYAGGVAEY

SEQ ID NO: 80005 - protein, 10 aa, Homo Sapiens
KKYDEAIKCY

SEQ ID NO: 80006 - protein, 10 aa, Homo Sapiens
KKYDKSLRKY

SEQ ID NO: 80007 - protein, 10 aa, Homo Sapiens
KKYGAAMVVM

SEQ ID NO: 80008 - protein, 10 aa, Homo Sapiens
KKYGVDLIRY

SEQ ID NO: 80009 - protein, 10 aa, Homo Sapiens
KKYLDAEQSY

SEQ ID NO: 80010 - protein, 10 aa, Homo Sapiens
KKYNMRVEDY

SEQ ID NO: 80011 - protein, 10 aa, Homo Sapiens
KKYPFILEVY

SEQ ID NO: 80012 - protein, 10 aa, Homo Sapiens
KKYPKALVKY

SEQ ID NO: 80013 - protein, 10 aa, Homo Sapiens
KKYTEITATY

SEQ ID NO: 80014 - protein, 10 aa, Homo Sapiens
KLFPGSPAIY

SEQ ID NO: 80015 - protein, 10 aa, Homo Sapiens
KLYRPGSVAY

SEQ ID NO: 80016 - protein, 10 aa, Homo Sapiens
KMLPDKDCRY

SEQ ID NO: 80017 - protein, 10 aa, Homo Sapiens
KMYDAAKLLY

SEQ ID NO: 80018 - protein, 10 aa, Homo Sapiens
KQAPPQKVSF

SEQ ID NO: 80019 - protein, 10 aa, Homo Sapiens
KQEEERGRVY

SEQ ID NO: 80020 - protein, 10 aa, Homo Sapiens
KQFDAGTVNY

SEQ ID NO: 80021 - protein, 10 aa, Homo Sapiens
KQFDRKHHTY

SEQ ID NO: 80022 - protein, 10 aa, Homo Sapiens
KQFEKQVELY

SEQ ID NO: 80023 - protein, 10 aa, Homo Sapiens
KQFQKVITEY

SEQ ID NO: 80024 - protein, 10 aa, Homo Sapiens
KQFRPPMGGY

SEQ ID NO: 80025 - protein, 10 aa, Homo Sapiens
KQIDPVLQVY

SEQ ID NO: 80026 - protein, 10 aa, Homo Sapiens
KQIDRQLTAY

SEQ ID NO: 80027 - protein, 10 aa, Homo Sapiens
KQISVGFIGY

SEQ ID NO: 80028 - protein, 10 aa, Homo Sapiens
KQIVEILTAY

SEQ ID NO: 80029 - protein, 10 aa, Homo Sapiens
KQKDIVSIHY

SEQ ID NO: 80030 - protein, 10 aa, Homo Sapiens
KQLKEAQVQY

SEQ ID NO: 80031 - protein, 10 aa, Homo Sapiens
KQLQKDKQVY

SEQ ID NO: 80032 - protein, 10 aa, Homo Sapiens
KQLVAEQVTY

SEQ ID NO: 80033 - protein, 10 aa, Homo Sapiens
KQMTFEAQAF

SEQ ID NO: 80034 - protein, 10 aa, Homo Sapiens
KQNPLLAEAY

SEQ ID NO: 80035 - protein, 10 aa, Homo Sapiens
KQVMEGRVTF

SEQ ID NO: 80036 - protein, 10 aa, Homo Sapiens
KQWLSKKSTY

SEQ ID NO: 80037 - protein, 10 aa, Homo Sapiens
KQYEVEIQTY

SEQ ID NO: 80038 - protein, 10 aa, Homo Sapiens
KQYISAVQMY

SEQ ID NO: 80039 - protein, 10 aa, Homo Sapiens
KQYYALEVSY

SEQ ID NO: 80040 - protein, 10 aa, Homo Sapiens
KRFEPGTQRF

SEQ ID NO: 80041 - protein, 10 aa, Homo Sapiens
LKAPGTNVAM

SEQ ID NO: 80042 - protein, 10 aa, Homo Sapiens
LKDEVRTLTY

SEQ ID NO: 80043 - protein, 10 aa, Homo Sapiens
LKFDSKYMNF

SEQ ID NO: 80044 - protein, 10 aa, Homo Sapiens
LKYEHKEIEY

SEQ ID NO: 80045 - protein, 10 aa, Homo Sapiens
LKYEPTNVRY

SEQ ID NO: 80046 - protein, 10 aa, Homo Sapiens
LMIDVTKSYY

SEQ ID NO: 80047 - protein, 10 aa, Homo Sapiens
LQFNPKFMTF

SEQ ID NO: 80048 - protein, 10 aa, Homo Sapiens
LQLPARNLTY

SEQ ID NO: 80049 - protein, 10 aa, Homo Sapiens
LQVEGHSNVY

SEQ ID NO: 80050 - protein, 10 aa, Homo Sapiens
LSDIKGLIKY

SEQ ID NO: 80051 - protein, 10 aa, Homo Sapiens
LSVKEKNISI

SEQ ID NO: 80052 - protein, 10 aa, Homo Sapiens
MKIWTSEHVF

SEQ ID NO: 80053 - protein, 10 aa, Homo Sapiens
MKYKSEGKCF

SEQ ID NO: 80054 - protein, 10 aa, Homo Sapiens
MQYPGRSLVF

SEQ ID NO: 80055 - protein, 10 aa, Homo Sapiens
NSKLPSSIEY

SEQ ID NO: 80056 - protein, 10 aa, Homo Sapiens
PLMTGISSLY

SEQ ID NO: 80057 - protein, 10 aa, Homo Sapiens
QKIQGEGNPY

SEQ ID NO: 80058 - protein, 10 aa, Homo Sapiens
QKNVECARVY

SEQ ID NO: 80059 - protein, 10 aa, Homo Sapiens
QKYQPRIAVF

SEQ ID NO: 80060 - protein, 10 aa, Homo Sapiens
QKYQSPVRVY

SEQ ID NO: 80061 - protein, 10 aa, Homo Sapiens
QQHDFTSQIF

SEQ ID NO: 80062 - protein, 10 aa, Homo Sapiens
QQIGKVVQVY

SEQ ID NO: 80063 - protein, 10 aa, Homo Sapiens
QQKYPTKVSF

SEQ ID NO: 80064 - protein, 10 aa, Homo Sapiens
QQMWISKQEY

SEQ ID NO: 80065 - protein, 10 aa, Homo Sapiens
QSQFIFEHSY

SEQ ID NO: 80066 - protein, 10 aa, Homo Sapiens
RAFPYGNVAF

SEQ ID NO: 80067 - protein, 10 aa, Homo Sapiens
RANPQVGVAF

SEQ ID NO: 80068 - protein, 10 aa, Homo Sapiens
RHLHPIQTSF

SEQ ID NO: 80069 - protein, 10 aa, Homo Sapiens
RHSGPLRVAM

SEQ ID NO: 80070 - protein, 10 aa, Homo Sapiens
RHYVGSAAAF

SEQ ID NO: 80071 - protein, 10 aa, Homo Sapiens
RHYYSITINY

SEQ ID NO: 80072 - protein, 10 aa, Homo Sapiens
RISQFSGVTF

SEQ ID NO: 80073 - protein, 10 aa, Homo Sapiens
RKAAITMQRY

SEQ ID NO: 80074 - protein, 10 aa, Homo Sapiens
RKAASLKSNY

SEQ ID NO: 80075 - protein, 10 aa, Homo Sapiens
RKANILTNRY

SEQ ID NO: 80076 - protein, 10 aa, Homo Sapiens
RKAQSVYSSY

SEQ ID NO: 80077 - protein, 10 aa, Homo Sapiens
RKDGSFIVRY

SEQ ID NO: 80078 - protein, 10 aa, Homo Sapiens
RKDPHGFFAF

SEQ ID NO: 80079 - protein, 10 aa, Homo Sapiens
RKFAYLGRLA

SEQ ID NO: 80080 - protein, 10 aa, Homo Sapiens
RKFEPGTQRF

SEQ ID NO: 80081 - protein, 10 aa, Homo Sapiens
RKFGSDKGVF

SEQ ID NO: 80082 - protein, 10 aa, Homo Sapiens
RKFIEAAQRY

SEQ ID NO: 80083 - protein, 10 aa, Homo Sapiens
RKFKEAERLF

SEQ ID NO: 80084 - protein, 10 aa, Homo Sapiens
RKFKQVAEAY

SEQ ID NO: 80085 - protein, 10 aa, Homo Sapiens
RKFLESTDSF

SEQ ID NO: 80086 - protein, 10 aa, Homo Sapiens
RKFPAGKVPA

SEQ ID NO: 80087 - protein, 10 aa, Homo Sapiens
RKFQEQNETF

SEQ ID NO: 80088 - protein, 10 aa, Homo Sapiens
RKFRHDKRVY

SEQ ID NO: 80089 - protein, 10 aa, Homo Sapiens
RKFSENPHVY

SEQ ID NO: 80090 - protein, 10 aa, Homo Sapiens
RKGINTLVTY

SEQ ID NO: 80091 - protein, 10 aa, Homo Sapiens
RKHQINIEKY

SEQ ID NO: 80092 - protein, 10 aa, Homo Sapiens
RKIAVAKQNY

SEQ ID NO: 80093 - protein, 10 aa, Homo Sapiens
RKIDAAKNTF

SEQ ID NO: 80094 - protein, 10 aa, Homo Sapiens
RKIDEQNKEF

SEQ ID NO: 80095 - protein, 10 aa, Homo Sapiens
RKIEAEIVRI

SEQ ID NO: 80096 - protein, 10 aa, Homo Sapiens
RKIEDNEFHY

SEQ ID NO: 80097 - protein, 10 aa, Homo Sapiens
RKIETFLNHY

SEQ ID NO: 80098 - protein, 10 aa, Homo Sapiens
RKIFPSVIKY

SEQ ID NO: 80099 - protein, 10 aa, Homo Sapiens
RKIFTSSSNF

SEQ ID NO: 80100 - protein, 10 aa, Homo Sapiens
RKIGDTSVSY

SEQ ID NO: 80101 - protein, 10 aa, Homo Sapiens
RKILATGENY

SEQ ID NO: 80102 - protein, 10 aa, Homo Sapiens
RKILEAQETF

SEQ ID NO: 80103 - protein, 10 aa, Homo Sapiens
RKIPGVPIMY

SEQ ID NO: 80104 - protein, 10 aa, Homo Sapiens
RKIPVPANRY

SEQ ID NO: 80105 - protein, 10 aa, Homo Sapiens
RKISGLKTSM

SEQ ID NO: 80106 - protein, 10 aa, Homo Sapiens
RKKINSTTLY

SEQ ID NO: 80107 - protein, 10 aa, Homo Sapiens
RKKLPVDSVF

SEQ ID NO: 80108 - protein, 10 aa, Homo Sapiens
RKKLYYDTDY

SEQ ID NO: 80109 - protein, 10 aa, Homo Sapiens
RKKPGLAITF

SEQ ID NO: 80110 - protein, 10 aa, Homo Sapiens
RKKQSDVMRF

SEQ ID NO: 80111 - protein, 10 aa, Homo Sapiens
RKLDEMTASY

SEQ ID NO: 80112 - protein, 10 aa, Homo Sapiens
RKLDFPSASF

SEQ ID NO: 80113 - protein, 10 aa, Homo Sapiens
RKLFGFTERY

SEQ ID NO: 80114 - protein, 10 aa, Homo Sapiens
RKLFIGGLSF

SEQ ID NO: 80115 - protein, 10 aa, Homo Sapiens
RKLPEKTQTF

SEQ ID NO: 80116 - protein, 10 aa, Homo Sapiens
RKLSTFRESF

SEQ ID NO: 80117 - protein, 10 aa, Homo Sapiens
RKLVTTSETY

SEQ ID NO: 80118 - protein, 10 aa, Homo Sapiens
RKMEHDGSLF

SEQ ID NO: 80119 - protein, 10 aa, Homo Sapiens
RKNPAERMSY

SEQ ID NO: 80120 - protein, 10 aa, Homo Sapiens
RKNPEFRVQF

SEQ ID NO: 80121 - protein, 10 aa, Homo Sapiens
RKNPQHKIEY

SEQ ID NO: 80122 - protein, 10 aa, Homo Sapiens
RKNPVQEQTY

SEQ ID NO: 80123 - protein, 10 aa, Homo Sapiens
RKPDEDMKLY

SEQ ID NO: 80124 - protein, 10 aa, Homo Sapiens
RKPDFRNPLY

SEQ ID NO: 80125 - protein, 10 aa, Homo Sapiens
RKPDQVFQSY

SEQ ID NO: 80126 - protein, 10 aa, Homo Sapiens
RKPPAPKSTY

SEQ ID NO: 80127 - protein, 10 aa, Homo Sapiens
RKPQSSLLRY

SEQ ID NO: 80128 - protein, 10 aa, Homo Sapiens
RKPSEEFNGY

SEQ ID NO: 80129 - protein, 10 aa, Homo Sapiens
RKPTVTHVHY

SEQ ID NO: 80130 - protein, 10 aa, Homo Sapiens
RKQDYEQAVF

SEQ ID NO: 80131 - protein, 10 aa, Homo Sapiens
RKREEIPLDF

SEQ ID NO: 80132 - protein, 10 aa, Homo Sapiens
RKRYDAATTY

SEQ ID NO: 80133 - protein, 10 aa, Homo Sapiens
RKTEYISTEF

SEQ ID NO: 80134 - protein, 10 aa, Homo Sapiens
RKVATEFESF

SEQ ID NO: 80135 - protein, 10 aa, Homo Sapiens
RKVDVEEEFF

SEQ ID NO: 80136 - protein, 10 aa, Homo Sapiens
RKVEDLFLTF

SEQ ID NO: 80137 - protein, 10 aa, Homo Sapiens
RKVEQLQQEY

SEQ ID NO: 80138 - protein, 10 aa, Homo Sapiens
RKVKFTQQNY

SEQ ID NO: 80139 - protein, 10 aa, Homo Sapiens
RKVKNSQSFF

SEQ ID NO: 80140 - protein, 10 aa, Homo Sapiens
RKVLPLEEAY

SEQ ID NO: 80141 - protein, 10 aa, Homo Sapiens
RKVLVKVDEY

SEQ ID NO: 80142 - protein, 10 aa, Homo Sapiens
RKVQPPQQNY

SEQ ID NO: 80143 - protein, 10 aa, Homo Sapiens
RKVWAEAVHY

SEQ ID NO: 80144 - protein, 10 aa, Homo Sapiens
RKWDDDYVRY

SEQ ID NO: 80145 - protein, 10 aa, Homo Sapiens
RKYDAKFTDF

SEQ ID NO: 80146 - protein, 10 aa, Homo Sapiens
RKYEAFLQRY

SEQ ID NO: 80147 - protein, 10 aa, Homo Sapiens
RKYEAIQLTF

SEQ ID NO: 80148 - protein, 10 aa, Homo Sapiens
RKYHKLGTGF

SEQ ID NO: 80149 - protein, 10 aa, Homo Sapiens
RKYIGYARQY

SEQ ID NO: 80150 - protein, 10 aa, Homo Sapiens
RKYPEAAACY

SEQ ID NO: 80151 - protein, 10 aa, Homo Sapiens
RLRDENGRPY

SEQ ID NO: 80152 - protein, 10 aa, Homo Sapiens
RLYGKDYNVY

SEQ ID NO: 80153 - protein, 10 aa, Homo Sapiens
RLYGPSSVSF

SEQ ID NO: 80154 - protein, 10 aa, Homo Sapiens
RLYTQGYISY

SEQ ID NO: 80155 - protein, 10 aa, Homo Sapiens
RMKTGNKIRY

SEQ ID NO: 80156 - protein, 10 aa, Homo Sapiens
RQAGLSYIRY

SEQ ID NO: 80157 - protein, 10 aa, Homo Sapiens
RQAPVLLQTY

SEQ ID NO: 80158 - protein, 10 aa, Homo Sapiens
RQATSTASTF

SEQ ID NO: 80159 - protein, 10 aa, Homo Sapiens
RQFCSKLGKY

SEQ ID NO: 80160 - protein, 10 aa, Homo Sapiens
RQFWFQGNRY

SEQ ID NO: 80161 - protein, 10 aa, Homo Sapiens
RQHPHCYVQY

SEQ ID NO: 80162 - protein, 10 aa, Homo Sapiens
RQHSIYKNGY

SEQ ID NO: 80163 - protein, 10 aa, Homo Sapiens
RQICPSLAGF

SEQ ID NO: 80164 - protein, 10 aa, Homo Sapiens
RQIDLVDNYF

SEQ ID NO: 80165 - protein, 10 aa, Homo Sapiens
RQIPYTMMKF

SEQ ID NO: 80166 - protein, 10 aa, Homo Sapiens
RQKQGVVLKY

SEQ ID NO: 80167 - protein, 10 aa, Homo Sapiens
RQLEDILSTY

SEQ ID NO: 80168 - protein, 10 aa, Homo Sapiens
RQLEEEGITF

SEQ ID NO: 80169 - protein, 10 aa, Homo Sapiens
RQLGLEHTRY

SEQ ID NO: 80170 - protein, 10 aa, Homo Sapiens
RQLPEPLISF

SEQ ID NO: 80171 - protein, 10 aa, Homo Sapiens
RQLSFTGVTF

SEQ ID NO: 80172 - protein, 10 aa, Homo Sapiens
RQPDSPTALY

SEQ ID NO: 80173 - protein, 10 aa, Homo Sapiens
RQQEERKRLY

SEQ ID NO: 80174 - protein, 10 aa, Homo Sapiens
RQQPPSTTTF

SEQ ID NO: 80175 - protein, 10 aa, Homo Sapiens
RQREEQLVSF

SEQ ID NO: 80176 - protein, 10 aa, Homo Sapiens
RQRQEVCQSY

SEQ ID NO: 80177 - protein, 10 aa, Homo Sapiens
RQVEDLQATF

SEQ ID NO: 80178 - protein, 10 aa, Homo Sapiens
RQYDGIFYEF

SEQ ID NO: 80179 - protein, 10 aa, Homo Sapiens
RQYDKFLTHF

SEQ ID NO: 80180 - protein, 10 aa, Homo Sapiens
RQYEGHVNEY

SEQ ID NO: 80181 - protein, 10 aa, Homo Sapiens
RQYGQTVATY

SEQ ID NO: 80182 - protein, 10 aa, Homo Sapiens
RQYHLQQLFY

SEQ ID NO: 80183 - protein, 10 aa, Homo Sapiens
RQYNRDWQSY

SEQ ID NO: 80184 - protein, 10 aa, Homo Sapiens
RQYPWGTVQV

SEQ ID NO: 80185 - protein, 10 aa, Homo Sapiens
RQYPWGVVQV

SEQ ID NO: 80186 - protein, 10 aa, Homo Sapiens
RVYPERSTSY

SEQ ID NO: 80187 - protein, 10 aa, Homo Sapiens
SGSQFEFTQF

SEQ ID NO: 80188 - protein, 10 aa, Homo Sapiens
SGSQRISSIY

SEQ ID NO: 80189 - protein, 10 aa, Homo Sapiens
SKAFPFYSSY

SEQ ID NO: 80190 - protein, 10 aa, Homo Sapiens
SKFLAPYTTF

SEQ ID NO: 80191 - protein, 10 aa, Homo Sapiens
SKHPGHYAVY

SEQ ID NO: 80192 - protein, 10 aa, Homo Sapiens
SKIETRGTRY

SEQ ID NO: 80193 - protein, 10 aa, Homo Sapiens
SKINHEPTTF

SEQ ID NO: 80194 - protein, 10 aa, Homo Sapiens
SKIYPSREEY

SEQ ID NO: 80195 - protein, 10 aa, Homo Sapiens
SKLEHTAQTY

SEQ ID NO: 80196 - protein, 10 aa, Homo Sapiens
SKMDPTDAKY

SEQ ID NO: 80197 - protein, 10 aa, Homo Sapiens
SKPAYGNSPY

SEQ ID NO: 80198 - protein, 10 aa, Homo Sapiens
SKPRNVPAAY

SEQ ID NO: 80199 - protein, 10 aa, Homo Sapiens
SKRLESGVQF

SEQ ID NO: 80200 - protein, 10 aa, Homo Sapiens
SKTGSVTTTY

SEQ ID NO: 80201 - protein, 10 aa, Homo Sapiens
SKVRALKTAY

SEQ ID NO: 80202 - protein, 10 aa, Homo Sapiens
SKYAADRNHY

SEQ ID NO: 80203 - protein, 10 aa, Homo Sapiens
SKYGRDWERY

SEQ ID NO: 80204 - protein, 10 aa, Homo Sapiens
SKYPASSSVF

SEQ ID NO: 80205 - protein, 10 aa, Homo Sapiens
SKYVSLITSY

SEQ ID NO: 80206 - protein, 10 aa, Homo Sapiens
SQFHGLITHY

SEQ ID NO: 80207 - protein, 10 aa, Homo Sapiens
SQHAKYTCSF

SEQ ID NO: 80208 - protein, 10 aa, Homo Sapiens
SQHIGTGNLY

SEQ ID NO: 80209 - protein, 10 aa, Homo Sapiens
SQQPASGVAY

SEQ ID NO: 80210 - protein, 10 aa, Homo Sapiens
SQRDPPHNNF

SEQ ID NO: 80211 - protein, 10 aa, Homo Sapiens
SQRPPTRETF

SEQ ID NO: 80212 - protein, 10 aa, Homo Sapiens
SQYNIRGVTY

SEQ ID NO: 80213 - protein, 10 aa, Homo Sapiens
SQYPFPVTLY

SEQ ID NO: 80214 - protein, 10 aa, Homo Sapiens
SQYPGGQPTY

SEQ ID NO: 80215 - protein, 10 aa, Homo Sapiens
SQYPNQPTRF

SEQ ID NO: 80216 - protein, 10 aa, Homo Sapiens
SSQFGGGSQY

SEQ ID NO: 80217 - protein, 10 aa, Homo Sapiens
STINPDHLSY

SEQ ID NO: 80218 - protein, 10 aa, Homo Sapiens
TKFSQDFSTF

SEQ ID NO: 80219 - protein, 10 aa, Homo Sapiens
TKIKTIGSTY

SEQ ID NO: 80220 - protein, 10 aa, Homo Sapiens
TKLKNTLIQY

SEQ ID NO: 80221 - protein, 10 aa, Homo Sapiens
TKLQAQHVSY

SEQ ID NO: 80222 - protein, 10 aa, Homo Sapiens
TKRPGLMTKY

SEQ ID NO: 80223 - protein, 10 aa, Homo Sapiens
TKWPGDILAY

SEQ ID NO: 80224 - protein, 10 aa, Homo Sapiens
TPICPHSLSF

SEQ ID NO: 80225 - protein, 10 aa, Homo Sapiens
TTAPTHVLAM

SEQ ID NO: 80226 - protein, 10 aa, Homo Sapiens
VHAPPMQLGF

SEQ ID NO: 80227 - protein, 10 aa, Homo Sapiens
VKEKATGRYY

SEQ ID NO: 80228 - protein, 10 aa, Homo Sapiens
VKFGGQLLSF

SEQ ID NO: 80229 - protein, 10 aa, Homo Sapiens
VKIINDNATY

SEQ ID NO: 80230 - protein, 10 aa, Homo Sapiens
VKVLITSQGY

SEQ ID NO: 80231 - protein, 10 aa, Homo Sapiens
VKVNIIQEEY

SEQ ID NO: 80232 - protein, 10 aa, Homo Sapiens
VKVPTTLAEY

SEQ ID NO: 80233 - protein, 10 aa, Homo Sapiens
VKYNGPESQY

SEQ ID NO: 80234 - protein, 10 aa, Homo Sapiens
VLSAADKGNV

SEQ ID NO: 80235 - protein, 10 aa, Homo Sapiens
VMFPGNSPSY

SEQ ID NO: 80236 - protein, 10 aa, Homo Sapiens
VQADVQKERY

SEQ ID NO: 80237 - protein, 10 aa, Homo Sapiens
VQFDGTNSAF

SEQ ID NO: 80238 - protein, 10 aa, Homo Sapiens
VQFGANKSQY

SEQ ID NO: 80239 - protein, 10 aa, Homo Sapiens
VQFIGRESKY

SEQ ID NO: 80240 - protein, 10 aa, Homo Sapiens
VQRGGTPSAF

SEQ ID NO: 80241 - protein, 10 aa, Homo Sapiens
VQRLPVGAAF

SEQ ID NO: 80242 - protein, 10 aa, Homo Sapiens
VQVDDIKRVY

SEQ ID NO: 80243 - protein, 10 aa, Homo Sapiens
VQVTPLSSGY

SEQ ID NO: 80244 - protein, 10 aa, Homo Sapiens
VVGEHKDKVI

SEQ ID NO: 80245 - protein, 10 aa, Homo Sapiens
YAKLNPGIAY

SEQ ID NO: 80246 - protein, 10 aa, Homo Sapiens
YGSKPLNIAY

SEQ ID NO: 80247 - protein, 10 aa, Homo Sapiens
YKAKQGYVIY

SEQ ID NO: 80248 - protein, 10 aa, Homo Sapiens
YKAKYPIVGY

SEQ ID NO: 80249 - protein, 10 aa, Homo Sapiens
YKALLPQQSY

SEQ ID NO: 80250 - protein, 10 aa, Homo Sapiens
YKASSEMALY

SEQ ID NO: 80251 - protein, 10 aa, Homo Sapiens
YKFEEHGKAF

SEQ ID NO: 80252 - protein, 10 aa, Homo Sapiens
YKFYSVNVDY

SEQ ID NO: 80253 - protein, 10 aa, Homo Sapiens
YKHFNRHGKF

SEQ ID NO: 80254 - protein, 10 aa, Homo Sapiens
YKIDEDGKKF

SEQ ID NO: 80255 - protein, 10 aa, Homo Sapiens
YKIKTLIKKY

SEQ ID NO: 80256 - protein, 10 aa, Homo Sapiens
YKIKYPENFF

SEQ ID NO: 80257 - protein, 10 aa, Homo Sapiens
YKKGENPVSY

SEQ ID NO: 80258 - protein, 10 aa, Homo Sapiens
YKRPQELETF

SEQ ID NO: 80259 - protein, 10 aa, Homo Sapiens
YKVETVGDKY

SEQ ID NO: 80260 - protein, 10 aa, Homo Sapiens
YKVFVVGESY

SEQ ID NO: 80261 - protein, 10 aa, Homo Sapiens
YKVPDGMVGF

SEQ ID NO: 80262 - protein, 10 aa, Homo Sapiens
YKVSEYARRF

SEQ ID NO: 80263 - protein, 10 aa, Homo Sapiens
YKYEAPWTVY

SEQ ID NO: 80264 - protein, 10 aa, Homo Sapiens
YKYEGVRGLY

SEQ ID NO: 80265 - protein, 10 aa, Homo Sapiens
YKYTDKIMTY

SEQ ID NO: 80266 - protein, 10 aa, Homo Sapiens
YMIDPSGVSY

SEQ ID NO: 80267 - protein, 10 aa, Homo Sapiens
YMIERPEPEF

SEQ ID NO: 80268 - protein, 10 aa, Homo Sapiens
YQHDDGRVSY

SEQ ID NO: 80269 - protein, 10 aa, Homo Sapiens
YQYSDQGIDY

SEQ ID NO: 80270 - protein, 11 aa, Homo Sapiens
AGGYFTSPGGY

SEQ ID NO: 80271 - protein, 11 aa, Homo Sapiens
AGSKQLFMTAY

SEQ ID NO: 80272 - protein, 11 aa, Homo Sapiens
AKAAEAAASAY

SEQ ID NO: 80273 - protein, 11 aa, Homo Sapiens
AKAGTEEAIVY

SEQ ID NO: 80274 - protein, 11 aa, Homo Sapiens
AKASLNGADIY

SEQ ID NO: 80275 - protein, 11 aa, Homo Sapiens
AKFLDPITGTF

SEQ ID NO: 80276 - protein, 11 aa, Homo Sapiens
AKFRENVEDVF

SEQ ID NO: 80277 - protein, 11 aa, Homo Sapiens
AKFSPVATASY

SEQ ID NO: 80278 - protein, 11 aa, Homo Sapiens
AKIENVQKTGF

SEQ ID NO: 80279 - protein, 11 aa, Homo Sapiens
AKILADQQDKY

SEQ ID NO: 80280 - protein, 11 aa, Homo Sapiens
AKINFDSNSAY

SEQ ID NO: 80281 - protein, 11 aa, Homo Sapiens
AKIPVTIITGY

SEQ ID NO: 80282 - protein, 11 aa, Homo Sapiens
AKIYQQNPEAY

SEQ ID NO: 80283 - protein, 11 aa, Homo Sapiens
AKKSEASGFCY

SEQ ID NO: 80284 - protein, 11 aa, Homo Sapiens
AKLDHVNIVHY

SEQ ID NO: 80285 - protein, 11 aa, Homo Sapiens
AKLFPGSPAIY

SEQ ID NO: 80286 - protein, 11 aa, Homo Sapiens
AKLPSRPADNY

SEQ ID NO: 80287 - protein, 11 aa, Homo Sapiens
AKLVSEKLASY

SEQ ID NO: 80288 - protein, 11 aa, Homo Sapiens
AKMDPSCTVGF

SEQ ID NO: 80289 - protein, 11 aa, Homo Sapiens
AKNPSWASITY

SEQ ID NO: 80290 - protein, 11 aa, Homo Sapiens
AKRDVPALDRY

SEQ ID NO: 80291 - protein, 11 aa, Homo Sapiens
AKRGAFGHERY

SEQ ID NO: 80292 - protein, 11 aa, Homo Sapiens
AKVINDGLFYY

SEQ ID NO: 80293 - protein, 11 aa, Homo Sapiens
AKWNPTAGVAF

SEQ ID NO: 80294 - protein, 11 aa, Homo Sapiens
AKYATGENTVF

SEQ ID NO: 80295 - protein, 11 aa, Homo Sapiens
AKYLPHSAGRY

SEQ ID NO: 80296 - protein, 11 aa, Homo Sapiens
AKYPASTVQIL

SEQ ID NO: 80297 - protein, 11 aa, Homo Sapiens
AKYQIDPDACF

SEQ ID NO: 80298 - protein, 11 aa, Homo Sapiens
AKYVQGDAIGY

SEQ ID NO: 80299 - protein, 11 aa, Homo Sapiens
AQCSHAAVSAY

SEQ ID NO: 80300 - protein, 11 aa, Homo Sapiens
AQFGHTSIVAY

SEQ ID NO: 80301 - protein, 11 aa, Homo Sapiens
AQFPGACGLRY

SEQ ID NO: 80302 - protein, 11 aa, Homo Sapiens
AQYAQRASVAF

SEQ ID NO: 80303 - protein, 11 aa, Homo Sapiens
AQYLPKEQYLY

SEQ ID NO: 80304 - protein, 11 aa, Homo Sapiens
AQYSQDYQQFY

SEQ ID NO: 80305 - protein, 11 aa, Homo Sapiens
FKINQKEGISY

SEQ ID NO: 80306 - protein, 11 aa, Homo Sapiens
FKPDFGAESIY

SEQ ID NO: 80307 - protein, 11 aa, Homo Sapiens
FKRDLEWVERL

SEQ ID NO: 80308 - protein, 11 aa, Homo Sapiens
FKYDDAERRFY

SEQ ID NO: 80309 - protein, 11 aa, Homo Sapiens
GHFGPINSVAF

SEQ ID NO: 80310 - protein, 11 aa, Homo Sapiens
GHYLGEFSITY

SEQ ID NO: 80311 - protein, 11 aa, Homo Sapiens
GKFDQIYDVGY

SEQ ID NO: 80312 - protein, 11 aa, Homo Sapiens
GKFHYKKEGTY

SEQ ID NO: 80313 - protein, 11 aa, Homo Sapiens
GKFNPHVHVEY

SEQ ID NO: 80314 - protein, 11 aa, Homo Sapiens
GKFYPELKLAY

SEQ ID NO: 80315 - protein, 11 aa, Homo Sapiens
GKHFSHAGALF

SEQ ID NO: 80316 - protein, 11 aa, Homo Sapiens
GKHQPHKVTQY

SEQ ID NO: 80317 - protein, 11 aa, Homo Sapiens
GKIGGAQNRSY

SEQ ID NO: 80318 - protein, 11 aa, Homo Sapiens
GKIPSPLSSSY

SEQ ID NO: 80319 - protein, 11 aa, Homo Sapiens
GKISETTARTY

SEQ ID NO: 80320 - protein, 11 aa, Homo Sapiens
GKLDQPDRFSF

SEQ ID NO: 80321 - protein, 11 aa, Homo Sapiens
GKLGNESVTFY

SEQ ID NO: 80322 - protein, 11 aa, Homo Sapiens
GKLKDPANFQY

SEQ ID NO: 80323 - protein, 11 aa, Homo Sapiens
GKLPNFGFVVF

SEQ ID NO: 80324 - protein, 11 aa, Homo Sapiens
GKPYVAMVTTY

SEQ ID NO: 80325 - protein, 11 aa, Homo Sapiens
GKSKGFGFVSF

SEQ ID NO: 80326 - protein, 11 aa, Homo Sapiens
GKVGNVGQTNY

SEQ ID NO: 80327 - protein, 11 aa, Homo Sapiens
GKVRAVIGSTY

SEQ ID NO: 80328 - protein, 11 aa, Homo Sapiens
GKYAERDIVQF

SEQ ID NO: 80329 - protein, 11 aa, Homo Sapiens
GKYENNYNAVF

SEQ ID NO: 80330 - protein, 11 aa, Homo Sapiens
GKYFSLIPTGF

SEQ ID NO: 80331 - protein, 11 aa, Homo Sapiens
GKYGFSDPLTF

SEQ ID NO: 80332 - protein, 11 aa, Homo Sapiens
GKYKDNEAIEF

SEQ ID NO: 80333 - protein, 11 aa, Homo Sapiens
GKYLGINKELY

SEQ ID NO: 80334 - protein, 11 aa, Homo Sapiens
GQFYDNKGITY

SEQ ID NO: 80335 - protein, 11 aa, Homo Sapiens
GQHRSTIITLY

SEQ ID NO: 80336 - protein, 11 aa, Homo Sapiens
GQIKTVYPASY

SEQ ID NO: 80337 - protein, 11 aa, Homo Sapiens
GQYSPPPYSEY

SEQ ID NO: 80338 - protein, 11 aa, Homo Sapiens
GRSKGFGFVCF

SEQ ID NO: 80339 - protein, 11 aa, Homo Sapiens
GRSKGYGFITF

SEQ ID NO: 80340 - protein, 11 aa, Homo Sapiens
HKYSGKEGDKF

SEQ ID NO: 80341 - protein, 11 aa, Homo Sapiens
HQYNPKFQTLF

SEQ ID NO: 80342 - protein, 11 aa, Homo Sapiens
HYLKGLKIEKM

SEQ ID NO: 80343 - protein, 11 aa, Homo Sapiens
IKHSTPSPTKY

SEQ ID NO: 80344 - protein, 11 aa, Homo Sapiens
IKHSTPSPTRY

SEQ ID NO: 80345 - protein, 11 aa, Homo Sapiens
IKLDPHNHVLY

SEQ ID NO: 80346 - protein, 11 aa, Homo Sapiens
IMFDVTSRVTY

SEQ ID NO: 80347 - protein, 11 aa, Homo Sapiens
IQWHQDSGCLY

SEQ ID NO: 80348 - protein, 11 aa, Homo Sapiens
KKADVDAIHEY

SEQ ID NO: 80349 - protein, 11 aa, Homo Sapiens
KKFLPGMAIGY

SEQ ID NO: 80350 - protein, 11 aa, Homo Sapiens
KKFNEPGSQYF

SEQ ID NO: 80351 - protein, 11 aa, Homo Sapiens
KKFSDSVKSTF

SEQ ID NO: 80352 - protein, 11 aa, Homo Sapiens
KKFSNPYSIEY

SEQ ID NO: 80353 - protein, 11 aa, Homo Sapiens
KKFVETPGQKY

SEQ ID NO: 80354 - protein, 11 aa, Homo Sapiens
KKFWPNPCSTF

SEQ ID NO: 80355 - protein, 11 aa, Homo Sapiens
KKIEDNNTLVF

SEQ ID NO: 80356 - protein, 11 aa, Homo Sapiens
KKIEISQHAKY

SEQ ID NO: 80357 - protein, 11 aa, Homo Sapiens
KKILQKGQTAY

SEQ ID NO: 80358 - protein, 11 aa, Homo Sapiens
KKIYDREQTRY

SEQ ID NO: 80359 - protein, 11 aa, Homo Sapiens
KKLGQSIESSY

SEQ ID NO: 80360 - protein, 11 aa, Homo Sapiens
KKLSEPSSLQY

SEQ ID NO: 80361 - protein, 11 aa, Homo Sapiens
KKPITTGGVTY

SEQ ID NO: 80362 - protein, 11 aa, Homo Sapiens
KKPKNENPVDY

SEQ ID NO: 80363 - protein, 11 aa, Homo Sapiens
KKRFTEEATKY

SEQ ID NO: 80364 - protein, 11 aa, Homo Sapiens
KKRPETVATQF

SEQ ID NO: 80365 - protein, 11 aa, Homo Sapiens
KKYDGRTKPIP

SEQ ID NO: 80366 - protein, 11 aa, Homo Sapiens
KKYEDICPSTH

SEQ ID NO: 80367 - protein, 11 aa, Homo Sapiens
KKYLTEGLLQF

SEQ ID NO: 80368 - protein, 11 aa, Homo Sapiens
KKYPFILEVYY

SEQ ID NO: 80369 - protein, 11 aa, Homo Sapiens
KKYYPTAEEVY

SEQ ID NO: 80370 - protein, 11 aa, Homo Sapiens
KMYSTDDGVQF

SEQ ID NO: 80371 - protein, 11 aa, Homo Sapiens
KQAEWSSKTSY

SEQ ID NO: 80372 - protein, 11 aa, Homo Sapiens
KQIDNTGSSTY

SEQ ID NO: 80373 - protein, 11 aa, Homo Sapiens
KQRPIFIITEY

SEQ ID NO: 80374 - protein, 11 aa, Homo Sapiens
LKFPHSAHQKY

SEQ ID NO: 80375 - protein, 11 aa, Homo Sapiens
LKIEPEEPITF

SEQ ID NO: 80376 - protein, 11 aa, Homo Sapiens
LKYDAQDKALY

SEQ ID NO: 80377 - protein, 11 aa, Homo Sapiens
LQHDFGHLSVF

SEQ ID NO: 80378 - protein, 11 aa, Homo Sapiens
LQHDYGHLSVY

SEQ ID NO: 80379 - protein, 11 aa, Homo Sapiens
LQWSPTENTVF

SEQ ID NO: 80380 - protein, 11 aa, Homo Sapiens
LQYLSQGNVVF

SEQ ID NO: 80381 - protein, 11 aa, Homo Sapiens
MKFKPNQTRTY

SEQ ID NO: 80382 - protein, 11 aa, Homo Sapiens
MKYNARDTVFY

SEQ ID NO: 80383 - protein, 11 aa, Homo Sapiens
QKIQDAQDKLY

SEQ ID NO: 80384 - protein, 11 aa, Homo Sapiens
QPSSQYRIKEY

SEQ ID NO: 80385 - protein, 11 aa, Homo Sapiens
QQLDPEQKITY

SEQ ID NO: 80386 - protein, 11 aa, Homo Sapiens
RAFDQGADAIY

SEQ ID NO: 80387 - protein, 11 aa, Homo Sapiens
RHAECLKALGY

SEQ ID NO: 80388 - protein, 11 aa, Homo Sapiens
RKAAITIQSSY

SEQ ID NO: 80389 - protein, 11 aa, Homo Sapiens
RKAPQHTAVGF

SEQ ID NO: 80390 - protein, 11 aa, Homo Sapiens
RKEQETALRVY

SEQ ID NO: 80391 - protein, 11 aa, Homo Sapiens
RKFGEAIGMGF

SEQ ID NO: 80392 - protein, 11 aa, Homo Sapiens
RKFPAGKVPAF

SEQ ID NO: 80393 - protein, 11 aa, Homo Sapiens
RKFPGRPEEEY

SEQ ID NO: 80394 - protein, 11 aa, Homo Sapiens
RKFPVPKPIDY

SEQ ID NO: 80395 - protein, 11 aa, Homo Sapiens
RKFQPYKPFYY

SEQ ID NO: 80396 - protein, 11 aa, Homo Sapiens
RKHGGEKGVPF

SEQ ID NO: 80397 - protein, 11 aa, Homo Sapiens
RKHGVVPLATY

SEQ ID NO: 80398 - protein, 11 aa, Homo Sapiens
RKIQEESLRTY

SEQ ID NO: 80399 - protein, 11 aa, Homo Sapiens
RKKAACIAEQY

SEQ ID NO: 80400 - protein, 11 aa, Homo Sapiens
RKKNEELEQLY

SEQ ID NO: 80401 - protein, 11 aa, Homo Sapiens
RKLDPPGGQFY

SEQ ID NO: 80402 - protein, 11 aa, Homo Sapiens
RKLDRSVFTAY

SEQ ID NO: 80403 - protein, 11 aa, Homo Sapiens
RKLEAAEDIAY

SEQ ID NO: 80404 - protein, 11 aa, Homo Sapiens
RKLQDVFEFRY

SEQ ID NO: 80405 - protein, 11 aa, Homo Sapiens
RKLTDDELFQY

SEQ ID NO: 80406 - protein, 11 aa, Homo Sapiens
RKLTSNLRIGF

SEQ ID NO: 80407 - protein, 11 aa, Homo Sapiens
RKMDVSKITRY

SEQ ID NO: 80408 - protein, 11 aa, Homo Sapiens
RKMNVSPDVNY

SEQ ID NO: 80409 - protein, 11 aa, Homo Sapiens
RKQEEERGRVY

SEQ ID NO: 80410 - protein, 11 aa, Homo Sapiens
RKRDFELAQAY

SEQ ID NO: 80411 - protein, 11 aa, Homo Sapiens
RKRGWDENVYY

SEQ ID NO: 80412 - protein, 11 aa, Homo Sapiens
RKRPVPKGATY

SEQ ID NO: 80413 - protein, 11 aa, Homo Sapiens
RKTGQAPGYSY

SEQ ID NO: 80414 - protein, 11 aa, Homo Sapiens
RKTVTAMDVVY

SEQ ID NO: 80415 - protein, 11 aa, Homo Sapiens
RKVDPEALQVF

SEQ ID NO: 80416 - protein, 11 aa, Homo Sapiens
RKVDPMAIVVF

SEQ ID NO: 80417 - protein, 11 aa, Homo Sapiens
RKWAPPKFLPH

SEQ ID NO: 80418 - protein, 11 aa, Homo Sapiens
RKWQQLQAKRY

SEQ ID NO: 80419 - protein, 11 aa, Homo Sapiens
RKYGNANVWKY

SEQ ID NO: 80420 - protein, 11 aa, Homo Sapiens
RKYGSVTVWRY

SEQ ID NO: 80421 - protein, 11 aa, Homo Sapiens
RMKETQKSIYY

SEQ ID NO: 80422 - protein, 11 aa, Homo Sapiens
RMNPNSPSITY

SEQ ID NO: 80423 - protein, 11 aa, Homo Sapiens
RNMQLPNGVTY

SEQ ID NO: 80424 - protein, 11 aa, Homo Sapiens
RQIGVEHVVVY

SEQ ID NO: 80425 - protein, 11 aa, Homo Sapiens
RQRPQMKVNEY

SEQ ID NO: 80426 - protein, 11 aa, Homo Sapiens
RQYGSEGRFTF

SEQ ID NO: 80427 - protein, 11 aa, Homo Sapiens
RQYSRNEPLTF

SEQ ID NO: 80428 - protein, 11 aa, Homo Sapiens
SGPSIVHRKCF

SEQ ID NO: 80429 - protein, 11 aa, Homo Sapiens
SKFDEQRTATY

SEQ ID NO: 80430 - protein, 11 aa, Homo Sapiens
SKFQPQSPDFL

SEQ ID NO: 80431 - protein, 11 aa, Homo Sapiens
SKIHFISPNIY

SEQ ID NO: 80432 - protein, 11 aa, Homo Sapiens
SKLPGSIQHVY

SEQ ID NO: 80433 - protein, 11 aa, Homo Sapiens
SKRPPSVGDVF

SEQ ID NO: 80434 - protein, 11 aa, Homo Sapiens
SKYAPAEGNRY

SEQ ID NO: 80435 - protein, 11 aa, Homo Sapiens
SKYAPEEGNRY

SEQ ID NO: 80436 - protein, 11 aa, Homo Sapiens
SKYDPEEPIYF

SEQ ID NO: 80437 - protein, 11 aa, Homo Sapiens
SKYSNSDVIIY

SEQ ID NO: 80438 - protein, 11 aa, Homo Sapiens
SQRAVTNHSVY

SEQ ID NO: 80439 - protein, 11 aa, Homo Sapiens
THRPVNVVNVY

SEQ ID NO: 80440 - protein, 11 aa, Homo Sapiens
TQFINPETPGY

SEQ ID NO: 80441 - protein, 11 aa, Homo Sapiens
TQFPSTVSTVY

SEQ ID NO: 80442 - protein, 11 aa, Homo Sapiens
VKFDAVSGDYY

SEQ ID NO: 80443 - protein, 11 aa, Homo Sapiens
VKYTPRGAGSY

SEQ ID NO: 80444 - protein, 11 aa, Homo Sapiens
VKYTQSNSVCY

SEQ ID NO: 80445 - protein, 11 aa, Homo Sapiens
VQRVASVMQEY

SEQ ID NO: 80446 - protein, 11 aa, Homo Sapiens
VQYQDPAAVSF

SEQ ID NO: 80447 - protein, 11 aa, Homo Sapiens
VSGSQRISSIY

SEQ ID NO: 80448 - protein, 11 aa, Homo Sapiens
VVSEVDIAKAD

SEQ ID NO: 80449 - protein, 11 aa, Homo Sapiens
YGQTGAGKTYT

SEQ ID NO: 80450 - protein, 11 aa, Homo Sapiens
YKEEGSKVTTY

SEQ ID NO: 80451 - protein, 11 aa, Homo Sapiens
YKFYPPKVELF

SEQ ID NO: 80452 - protein, 11 aa, Homo Sapiens
YKHFEETQHTY

SEQ ID NO: 80453 - protein, 11 aa, Homo Sapiens
YKIYPGHGRRY

SEQ ID NO: 80454 - protein, 11 aa, Homo Sapiens
YKLSLEFPSGY

SEQ ID NO: 80455 - protein, 11 aa, Homo Sapiens
YKYKDFGQMGF

SEQ ID NO: 80456 - protein, 11 aa, Homo Sapiens
YKYLNQTSRSF

SEQ ID NO: 80457 - protein, 11 aa, Homo Sapiens
YLFEPHSGEEY

SEQ ID NO: 80458 - protein, 11 aa, Homo Sapiens
YSLDGRLLSTY

SEQ ID NO: 80459 - protein, 8 aa, Homo Sapiens
AHAKAIEM

SEQ ID NO: 80460 - protein, 8 aa, Homo Sapiens
AHGTSFLL

SEQ ID NO: 80461 - protein, 8 aa, Homo Sapiens
AHHAGPEL

SEQ ID NO: 80462 - protein, 8 aa, Homo Sapiens
AHMPAAAL

SEQ ID NO: 80463 - protein, 8 aa, Homo Sapiens
AHSLSPTL

SEQ ID NO: 80464 - protein, 8 aa, Homo Sapiens
AHVSGAVL

SEQ ID NO: 80465 - protein, 8 aa, Homo Sapiens
AHWKGQVL

SEQ ID NO: 80466 - protein, 8 aa, Homo Sapiens
CHGVSVAL

SEQ ID NO: 80467 - protein, 8 aa, Homo Sapiens
DHCVAHKL

SEQ ID NO: 80468 - protein, 8 aa, Homo Sapiens
DHILKWEL

SEQ ID NO: 80469 - protein, 8 aa, Homo Sapiens
DHLRQTLL

SEQ ID NO: 80470 - protein, 8 aa, Homo Sapiens
DHSQAVTL

SEQ ID NO: 80471 - protein, 8 aa, Homo Sapiens
DHTQAIVL

SEQ ID NO: 80472 - protein, 8 aa, Homo Sapiens
DHTVGFIL

SEQ ID NO: 80473 - protein, 8 aa, Homo Sapiens
DHVTATQL

SEQ ID NO: 80474 - protein, 8 aa, Homo Sapiens
EHGPNPIL

SEQ ID NO: 80475 - protein, 8 aa, Homo Sapiens
EHGSQPEL

SEQ ID NO: 80476 - protein, 8 aa, Homo Sapiens
EHSKPVVL

SEQ ID NO: 80477 - protein, 8 aa, Homo Sapiens
EHVAAAEL

SEQ ID NO: 80478 - protein, 8 aa, Homo Sapiens
EHYVAVQL

SEQ ID NO: 80479 - protein, 8 aa, Homo Sapiens
FEHLAPVL

SEQ ID NO: 80480 - protein, 8 aa, Homo Sapiens
FHAFGRVL

SEQ ID NO: 80481 - protein, 8 aa, Homo Sapiens
FHFQAPTM

SEQ ID NO: 80482 - protein, 8 aa, Homo Sapiens
FHGDCLTL

SEQ ID NO: 80483 - protein, 8 aa, Homo Sapiens
FHHVSAVL

SEQ ID NO: 80484 - protein, 8 aa, Homo Sapiens
FHIQAQKL

SEQ ID NO: 80485 - protein, 8 aa, Homo Sapiens
FHIRAVIL

SEQ ID NO: 80486 - protein, 8 aa, Homo Sapiens
FHLKGRKL

SEQ ID NO: 80487 - protein, 8 aa, Homo Sapiens
FHQLGRKL

SEQ ID NO: 80488 - protein, 8 aa, Homo Sapiens
FHQRGIAL

SEQ ID NO: 80489 - protein, 8 aa, Homo Sapiens
FHSIGLIL

SEQ ID NO: 80490 - protein, 8 aa, Homo Sapiens
FHTGLKLL

SEQ ID NO: 80491 - protein, 8 aa, Homo Sapiens
FQHVGQTL

SEQ ID NO: 80492 - protein, 8 aa, Homo Sapiens
GHEIGRML

SEQ ID NO: 80493 - protein, 8 aa, Homo Sapiens
HAAHQAIL

SEQ ID NO: 80494 - protein, 8 aa, Homo Sapiens
HCSRNPVL

SEQ ID NO: 80495 - protein, 8 aa, Homo Sapiens
HEPEPHIL

SEQ ID NO: 80496 - protein, 8 aa, Homo Sapiens
HFAKSISL

SEQ ID NO: 80497 - protein, 8 aa, Homo Sapiens
HFASSHAL

SEQ ID NO: 80498 - protein, 8 aa, Homo Sapiens
HHAISAKL

SEQ ID NO: 80499 - protein, 8 aa, Homo Sapiens
HHANPILL

SEQ ID NO: 80500 - protein, 8 aa, Homo Sapiens
HHDDPEVL

SEQ ID NO: 80501 - protein, 8 aa, Homo Sapiens
HHDLAPAL

SEQ ID NO: 80502 - protein, 8 aa, Homo Sapiens
HHFEAIAL

SEQ ID NO: 80503 - protein, 8 aa, Homo Sapiens
HHFVAVAL

SEQ ID NO: 80504 - protein, 8 aa, Homo Sapiens
HHFVAVIL

SEQ ID NO: 80505 - protein, 8 aa, Homo Sapiens
HHGISRTL

SEQ ID NO: 80506 - protein, 8 aa, Homo Sapiens
HHGPPAVL

SEQ ID NO: 80507 - protein, 8 aa, Homo Sapiens
HHHLGYSL

SEQ ID NO: 80508 - protein, 8 aa, Homo Sapiens
HHIQGQGL

SEQ ID NO: 80509 - protein, 8 aa, Homo Sapiens
HHIVSIEV

SEQ ID NO: 80510 - protein, 8 aa, Homo Sapiens
HHLIQAVL

SEQ ID NO: 80511 - protein, 8 aa, Homo Sapiens
HHNWPSLL

SEQ ID NO: 80512 - protein, 8 aa, Homo Sapiens
HHSLASSL

SEQ ID NO: 80513 - protein, 8 aa, Homo Sapiens
HHSVGTEL

SEQ ID NO: 80514 - protein, 8 aa, Homo Sapiens
HHTVGLKL

SEQ ID NO: 80515 - protein, 8 aa, Homo Sapiens
HQAVAVIL

SEQ ID NO: 80516 - protein, 8 aa, Homo Sapiens
HQGPARAL

SEQ ID NO: 80517 - protein, 8 aa, Homo Sapiens
HQLRAQIL

SEQ ID NO: 80518 - protein, 8 aa, Homo Sapiens
HSINALLI

SEQ ID NO: 80519 - protein, 8 aa, Homo Sapiens
HVGKTPIV

SEQ ID NO: 80520 - protein, 8 aa, Homo Sapiens
HYSHPPLL

SEQ ID NO: 80521 - protein, 8 aa, Homo Sapiens
IHAAAVLL

SEQ ID NO: 80522 - protein, 8 aa, Homo Sapiens
IHFLDKEL

SEQ ID NO: 80523 - protein, 8 aa, Homo Sapiens
IHGPFLII

SEQ ID NO: 80524 - protein, 8 aa, Homo Sapiens
IHGPFLVI

SEQ ID NO: 80525 - protein, 8 aa, Homo Sapiens
IHGPPLII

SEQ ID NO: 80526 - protein, 8 aa, Homo Sapiens
IHGRAMLL

SEQ ID NO: 80527 - protein, 8 aa, Homo Sapiens
IHHLGNQL

SEQ ID NO: 80528 - protein, 8 aa, Homo Sapiens
IHLPAAVL

SEQ ID NO: 80529 - protein, 8 aa, Homo Sapiens
IHSSSTVL

SEQ ID NO: 80530 - protein, 8 aa, Homo Sapiens
ILEDEKRL

SEQ ID NO: 80531 - protein, 8 aa, Homo Sapiens
IQHPSNVL

SEQ ID NO: 80532 - protein, 8 aa, Homo Sapiens
LHGPQETL

SEQ ID NO: 80533 - protein, 8 aa, Homo Sapiens
LHGWAFTL

SEQ ID NO: 80534 - protein, 8 aa, Homo Sapiens
LHHKGFKL

SEQ ID NO: 80535 - protein, 8 aa, Homo Sapiens
LHITGREL

SEQ ID NO: 80536 - protein, 8 aa, Homo Sapiens
LHSFGKVL

SEQ ID NO: 80537 - protein, 8 aa, Homo Sapiens
LHSNGFSL

SEQ ID NO: 80538 - protein, 8 aa, Homo Sapiens
LHYTSRQL

SEQ ID NO: 80539 - protein, 8 aa, Homo Sapiens
LLYSYERA

SEQ ID NO: 80540 - protein, 8 aa, Homo Sapiens
LSHLALGL

SEQ ID NO: 80541 - protein, 8 aa, Homo Sapiens
MHAGSLLL

SEQ ID NO: 80542 - protein, 8 aa, Homo Sapiens
MHAPGKGL

SEQ ID NO: 80543 - protein, 8 aa, Homo Sapiens
MHAQSAEL

SEQ ID NO: 80544 - protein, 8 aa, Homo Sapiens
MHGFSVTL

SEQ ID NO: 80545 - protein, 8 aa, Homo Sapiens
MHGISQIL

SEQ ID NO: 80546 - protein, 8 aa, Homo Sapiens
MHIKSIIL

SEQ ID NO: 80547 - protein, 8 aa, Homo Sapiens
MHLRQYEL

SEQ ID NO: 80548 - protein, 8 aa, Homo Sapiens
MHTIAAQL

SEQ ID NO: 80549 - protein, 8 aa, Homo Sapiens
MHVPSVAL

SEQ ID NO: 80550 - protein, 8 aa, Homo Sapiens
MQAKGILL

SEQ ID NO: 80551 - protein, 8 aa, Homo Sapiens
MQIFVKTL

SEQ ID NO: 80552 - protein, 8 aa, Homo Sapiens
MQWRALVL

SEQ ID NO: 80553 - protein, 8 aa, Homo Sapiens
MQYPGRSL

SEQ ID NO: 80554 - protein, 8 aa, Homo Sapiens
NHANGLTL

SEQ ID NO: 80555 - protein, 8 aa, Homo Sapiens
NHGITLPL

SEQ ID NO: 80556 - protein, 8 aa, Homo Sapiens
NHGPGMAM

SEQ ID NO: 80557 - protein, 8 aa, Homo Sapiens
NHHSAMVL

SEQ ID NO: 80558 - protein, 8 aa, Homo Sapiens
NHHVAAAL

SEQ ID NO: 80559 - protein, 8 aa, Homo Sapiens
NHVISPLL

SEQ ID NO: 80560 - protein, 8 aa, Homo Sapiens
PYPEPSKL

SEQ ID NO: 80561 - protein, 8 aa, Homo Sapiens
QEKGVRVL

SEQ ID NO: 80562 - protein, 8 aa, Homo Sapiens
QHAVGIVV

SEQ ID NO: 80563 - protein, 8 aa, Homo Sapiens
QHDFPRAL

SEQ ID NO: 80564 - protein, 8 aa, Homo Sapiens
QHEFGRLL

SEQ ID NO: 80565 - protein, 8 aa, Homo Sapiens
QHFLEKVL

SEQ ID NO: 80566 - protein, 8 aa, Homo Sapiens
QHGPDKVL

SEQ ID NO: 80567 - protein, 8 aa, Homo Sapiens
QHGVCSVL

SEQ ID NO: 80568 - protein, 8 aa, Homo Sapiens
QHHTQPVL

SEQ ID NO: 80569 - protein, 8 aa, Homo Sapiens
QHILQQVL

SEQ ID NO: 80570 - protein, 8 aa, Homo Sapiens
QHLKAIDL

SEQ ID NO: 80571 - protein, 8 aa, Homo Sapiens
QHPQAASI

SEQ ID NO: 80572 - protein, 8 aa, Homo Sapiens
QHQGAVEL

SEQ ID NO: 80573 - protein, 8 aa, Homo Sapiens
QHTESMVL

SEQ ID NO: 80574 - protein, 8 aa, Homo Sapiens
QQGPQPTL

SEQ ID NO: 80575 - protein, 8 aa, Homo Sapiens
RHVVAVVL

SEQ ID NO: 80576 - protein, 8 aa, Homo Sapiens
SAHHSISL

SEQ ID NO: 80577 - protein, 8 aa, Homo Sapiens
SHAKGIVL

SEQ ID NO: 80578 - protein, 8 aa, Homo Sapiens
SHAQTVVL

SEQ ID NO: 80579 - protein, 8 aa, Homo Sapiens
SHGPIAVL

SEQ ID NO: 80580 - protein, 8 aa, Homo Sapiens
SHHPSFTL

SEQ ID NO: 80581 - protein, 8 aa, Homo Sapiens
SHIRGLGL

SEQ ID NO: 80582 - protein, 8 aa, Homo Sapiens
SHLLAIGL

SEQ ID NO: 80583 - protein, 8 aa, Homo Sapiens
SHSHSPTL

SEQ ID NO: 80584 - protein, 8 aa, Homo Sapiens
SHVVQRVL

SEQ ID NO: 80585 - protein, 8 aa, Homo Sapiens
SHYGQPVL

SEQ ID NO: 80586 - protein, 8 aa, Homo Sapiens
THAFSRQL

SEQ ID NO: 80587 - protein, 8 aa, Homo Sapiens
THGPPVQL

SEQ ID NO: 80588 - protein, 8 aa, Homo Sapiens
THIDAIIL

SEQ ID NO: 80589 - protein, 8 aa, Homo Sapiens
THILGFEL

SEQ ID NO: 80590 - protein, 8 aa, Homo Sapiens
THLLGVAL

SEQ ID NO: 80591 - protein, 8 aa, Homo Sapiens
THLLQQEL

SEQ ID NO: 80592 - protein, 8 aa, Homo Sapiens
THSLPLLL

SEQ ID NO: 80593 - protein, 8 aa, Homo Sapiens
THSVSAVL

SEQ ID NO: 80594 - protein, 8 aa, Homo Sapiens
VHIGQVIM

SEQ ID NO: 80595 - protein, 8 aa, Homo Sapiens
WHAKPLTL

SEQ ID NO: 80596 - protein, 8 aa, Homo Sapiens
WHGPLLAL

SEQ ID NO: 80597 - protein, 8 aa, Homo Sapiens
WHLRAQDL

SEQ ID NO: 80598 - protein, 8 aa, Homo Sapiens
YHASGAEL

SEQ ID NO: 80599 - protein, 8 aa, Homo Sapiens
YHGAAFQL

SEQ ID NO: 80600 - protein, 8 aa, Homo Sapiens
YHGLTVPL

SEQ ID NO: 80601 - protein, 8 aa, Homo Sapiens
YHGPGYRL

SEQ ID NO: 80602 - protein, 8 aa, Homo Sapiens
YHHVGKLL

SEQ ID NO: 80603 - protein, 8 aa, Homo Sapiens
YHIKPLSL

SEQ ID NO: 80604 - protein, 8 aa, Homo Sapiens
YHKLARKL

SEQ ID NO: 80605 - protein, 8 aa, Homo Sapiens
YHNGDKYL

SEQ ID NO: 80606 - protein, 8 aa, Homo Sapiens
YHQTASIL

SEQ ID NO: 80607 - protein, 8 aa, Homo Sapiens
YPGPAVVL

SEQ ID NO: 80608 - protein, 8 aa, Homo Sapiens
YQAAAPVL

SEQ ID NO: 80609 - protein, 8 aa, Homo Sapiens
YQHTGAVL

SEQ ID NO: 80610 - protein, 9 aa, Homo Sapiens
AHAAQVTCV

SEQ ID NO: 80611 - protein, 9 aa, Homo Sapiens
AHACNPSTL

SEQ ID NO: 80612 - protein, 9 aa, Homo Sapiens
AHAEHGGVL

SEQ ID NO: 80613 - protein, 9 aa, Homo Sapiens
AHAFHQPHV

SEQ ID NO: 80614 - protein, 9 aa, Homo Sapiens
AHAFPQDEL

SEQ ID NO: 80615 - protein, 9 aa, Homo Sapiens
AHAHDAIRL

SEQ ID NO: 80616 - protein, 9 aa, Homo Sapiens
AHAHPQEVY

SEQ ID NO: 80617 - protein, 9 aa, Homo Sapiens
AHAHRVAEL

SEQ ID NO: 80618 - protein, 9 aa, Homo Sapiens
AHAKEMEAL

SEQ ID NO: 80619 - protein, 9 aa, Homo Sapiens
AHAKSSVAL

SEQ ID NO: 80620 - protein, 9 aa, Homo Sapiens
AHAPHPNVM

SEQ ID NO: 80621 - protein, 9 aa, Homo Sapiens
AHAQPQTTM

SEQ ID NO: 80622 - protein, 9 aa, Homo Sapiens
AHAVYQAVL

SEQ ID NO: 80623 - protein, 9 aa, Homo Sapiens
AHCAHVFTT

SEQ ID NO: 80624 - protein, 9 aa, Homo Sapiens
AHCGAGDEL

SEQ ID NO: 80625 - protein, 9 aa, Homo Sapiens
AHCGDPVSL

SEQ ID NO: 80626 - protein, 9 aa, Homo Sapiens
AHCPELVTL

SEQ ID NO: 80627 - protein, 9 aa, Homo Sapiens
AHCPGIKVV

SEQ ID NO: 80628 - protein, 9 aa, Homo Sapiens
AHCPKAEVL

SEQ ID NO: 80629 - protein, 9 aa, Homo Sapiens
AHCWVVVRL

SEQ ID NO: 80630 - protein, 9 aa, Homo Sapiens
AHDDGRWSL

SEQ ID NO: 80631 - protein, 9 aa, Homo Sapiens
AHDDSVMYL

SEQ ID NO: 80632 - protein, 9 aa, Homo Sapiens
AHDLAVRLL

SEQ ID NO: 80633 - protein, 9 aa, Homo Sapiens
AHDPISPVL

SEQ ID NO: 80634 - protein, 9 aa, Homo Sapiens
AHDQAVRTL

SEQ ID NO: 80635 - protein, 9 aa, Homo Sapiens
AHDSAIKAL

SEQ ID NO: 80636 - protein, 9 aa, Homo Sapiens
AHDVDPIEL

SEQ ID NO: 80637 - protein, 9 aa, Homo Sapiens
AHEENVRFI

SEQ ID NO: 80638 - protein, 9 aa, Homo Sapiens
AHEENVRFV

SEQ ID NO: 80639 - protein, 9 aa, Homo Sapiens
AHEIYQKIL

SEQ ID NO: 80640 - protein, 9 aa, Homo Sapiens
AHEVHQKIL

SEQ ID NO: 80641 - protein, 9 aa, Homo Sapiens
AHFAKSISL

SEQ ID NO: 80642 - protein, 9 aa, Homo Sapiens
AHFDGLIFV

SEQ ID NO: 80643 - protein, 9 aa, Homo Sapiens
AHFERSWVL

SEQ ID NO: 80644 - protein, 9 aa, Homo Sapiens
AHFGFDEQL

SEQ ID NO: 80645 - protein, 9 aa, Homo Sapiens
AHFGYHWSL

SEQ ID NO: 80646 - protein, 9 aa, Homo Sapiens
AHFKETLAL

SEQ ID NO: 80647 - protein, 9 aa, Homo Sapiens
AHFPINVVI

SEQ ID NO: 80648 - protein, 9 aa, Homo Sapiens
AHFQKSYTL

SEQ ID NO: 80649 - protein, 9 aa, Homo Sapiens
AHFQQPPTL

SEQ ID NO: 80650 - protein, 9 aa, Homo Sapiens
AHGPPVTCL

SEQ ID NO: 80651 - protein, 9 aa, Homo Sapiens
AHGYPRQAL

SEQ ID NO: 80652 - protein, 9 aa, Homo Sapiens
AHHFPGPLL

SEQ ID NO: 80653 - protein, 9 aa, Homo Sapiens
AHHGISRTL

SEQ ID NO: 80654 - protein, 9 aa, Homo Sapiens
AHIEGNMKL

SEQ ID NO: 80655 - protein, 9 aa, Homo Sapiens
AHIGPVLSL

SEQ ID NO: 80656 - protein, 9 aa, Homo Sapiens
AHIIALESI

SEQ ID NO: 80657 - protein, 9 aa, Homo Sapiens
AHIIQKILL

SEQ ID NO: 80658 - protein, 9 aa, Homo Sapiens
AHIISELIL

SEQ ID NO: 80659 - protein, 9 aa, Homo Sapiens
AHIKDAVAL

SEQ ID NO: 80660 - protein, 9 aa, Homo Sapiens
AHIKPNALL

SEQ ID NO: 80661 - protein, 9 aa, Homo Sapiens
AHINTDMTL

SEQ ID NO: 80662 - protein, 9 aa, Homo Sapiens
AHIPKSDAL

SEQ ID NO: 80663 - protein, 9 aa, Homo Sapiens
AHIQASGHL

SEQ ID NO: 80664 - protein, 9 aa, Homo Sapiens
AHISEQAVW

SEQ ID NO: 80665 - protein, 9 aa, Homo Sapiens
AHISGATSV

SEQ ID NO: 80666 - protein, 9 aa, Homo Sapiens
AHITGGGLL

SEQ ID NO: 80667 - protein, 9 aa, Homo Sapiens
AHKEICAVL

SEQ ID NO: 80668 - protein, 9 aa, Homo Sapiens
AHKQVAAEL

SEQ ID NO: 80669 - protein, 9 aa, Homo Sapiens
AHLDAILIL

SEQ ID NO: 80670 - protein, 9 aa, Homo Sapiens
AHLDATTVL

SEQ ID NO: 80671 - protein, 9 aa, Homo Sapiens
AHLDRPVVL

SEQ ID NO: 80672 - protein, 9 aa, Homo Sapiens
AHLDRTMYL

SEQ ID NO: 80673 - protein, 9 aa, Homo Sapiens
AHLGSALVL

SEQ ID NO: 80674 - protein, 9 aa, Homo Sapiens
AHLQSSVVV

SEQ ID NO: 80675 - protein, 9 aa, Homo Sapiens
AHMDIFQNL

SEQ ID NO: 80676 - protein, 9 aa, Homo Sapiens
AHMDTVRTL

SEQ ID NO: 80677 - protein, 9 aa, Homo Sapiens
AHNLCYTTL

SEQ ID NO: 80678 - protein, 9 aa, Homo Sapiens
AHNMRVMKF

SEQ ID NO: 80679 - protein, 9 aa, Homo Sapiens
AHNPNMTHL

SEQ ID NO: 80680 - protein, 9 aa, Homo Sapiens
AHNVKAMVL

SEQ ID NO: 80681 - protein, 9 aa, Homo Sapiens
AHQAPEAAL

SEQ ID NO: 80682 - protein, 9 aa, Homo Sapiens
AHQETFPAL

SEQ ID NO: 80683 - protein, 9 aa, Homo Sapiens
AHQKFALRL

SEQ ID NO: 80684 - protein, 9 aa, Homo Sapiens
AHQPHIAGL

SEQ ID NO: 80685 - protein, 9 aa, Homo Sapiens
AHSDPVSAV

SEQ ID NO: 80686 - protein, 9 aa, Homo Sapiens
AHSEQTLSL

SEQ ID NO: 80687 - protein, 9 aa, Homo Sapiens
AHSIQIMKV

SEQ ID NO: 80688 - protein, 9 aa, Homo Sapiens
AHSKGVTCL

SEQ ID NO: 80689 - protein, 9 aa, Homo Sapiens
AHSLPMSVV

SEQ ID NO: 80690 - protein, 9 aa, Homo Sapiens
AHSNLASVL

SEQ ID NO: 80691 - protein, 9 aa, Homo Sapiens
AHSPASLSF

SEQ ID NO: 80692 - protein, 9 aa, Homo Sapiens
AHSPLAAQL

SEQ ID NO: 80693 - protein, 9 aa, Homo Sapiens
AHSPSLQSL

SEQ ID NO: 80694 - protein, 9 aa, Homo Sapiens
AHSSFQMAL

SEQ ID NO: 80695 - protein, 9 aa, Homo Sapiens
AHSSLQIVL

SEQ ID NO: 80696 - protein, 9 aa, Homo Sapiens
AHSSPVQSL

SEQ ID NO: 80697 - protein, 9 aa, Homo Sapiens
AHSSPWPAF

SEQ ID NO: 80698 - protein, 9 aa, Homo Sapiens
AHSTIMPRL

SEQ ID NO: 80699 - protein, 9 aa, Homo Sapiens
AHSVPSPAF

SEQ ID NO: 80700 - protein, 9 aa, Homo Sapiens
AHTKPRPAL

SEQ ID NO: 80701 - protein, 9 aa, Homo Sapiens
AHTQATLLL

SEQ ID NO: 80702 - protein, 9 aa, Homo Sapiens
AHTRTVTTL

SEQ ID NO: 80703 - protein, 9 aa, Homo Sapiens
AHTYQSPLL

SEQ ID NO: 80704 - protein, 9 aa, Homo Sapiens
AHVASQPVM

SEQ ID NO: 80705 - protein, 9 aa, Homo Sapiens
AHVNSRISV

SEQ ID NO: 80706 - protein, 9 aa, Homo Sapiens
AHVPTLQVL

SEQ ID NO: 80707 - protein, 9 aa, Homo Sapiens
AHVQNGIAL

SEQ ID NO: 80708 - protein, 9 aa, Homo Sapiens
AHVQTGITA

SEQ ID NO: 80709 - protein, 9 aa, Homo Sapiens
AHVVSQTAV

SEQ ID NO: 80710 - protein, 9 aa, Homo Sapiens
AHWHKGTTL

SEQ ID NO: 80711 - protein, 9 aa, Homo Sapiens
AHYADVLGL

SEQ ID NO: 80712 - protein, 9 aa, Homo Sapiens
AHYARPRAV

SEQ ID NO: 80713 - protein, 9 aa, Homo Sapiens
AHYFTAILL

SEQ ID NO: 80714 - protein, 9 aa, Homo Sapiens
AHYPSQPVF

SEQ ID NO: 80715 - protein, 9 aa, Homo Sapiens
AHYSAVTSL

SEQ ID NO: 80716 - protein, 9 aa, Homo Sapiens
APAPTAVVL

SEQ ID NO: 80717 - protein, 9 aa, Homo Sapiens
AQAPIAAVL

SEQ ID NO: 80718 - protein, 9 aa, Homo Sapiens
AQAPPTAQL

SEQ ID NO: 80719 - protein, 9 aa, Homo Sapiens
AQAPVAAVL

SEQ ID NO: 80720 - protein, 9 aa, Homo Sapiens
AQGPVAAVL

SEQ ID NO: 80721 - protein, 9 aa, Homo Sapiens
AQVPKSSAL

SEQ ID NO: 80722 - protein, 9 aa, Homo Sapiens
ARDPGARVL

SEQ ID NO: 80723 - protein, 9 aa, Homo Sapiens
CHALTFPSL

SEQ ID NO: 80724 - protein, 9 aa, Homo Sapiens
CHLKNSSQL

SEQ ID NO: 80725 - protein, 9 aa, Homo Sapiens
CHLKTISSL

SEQ ID NO: 80726 - protein, 9 aa, Homo Sapiens
CHNAQTFNL

SEQ ID NO: 80727 - protein, 9 aa, Homo Sapiens
DHARGNPEL

SEQ ID NO: 80728 - protein, 9 aa, Homo Sapiens
DHEPNKRIL

SEQ ID NO: 80729 - protein, 9 aa, Homo Sapiens
DHFSKSLFL

SEQ ID NO: 80730 - protein, 9 aa, Homo Sapiens
DHIAHIIEL

SEQ ID NO: 80731 - protein, 9 aa, Homo Sapiens
DHILARESL

SEQ ID NO: 80732 - protein, 9 aa, Homo Sapiens
DHIRFISEL

SEQ ID NO: 80733 - protein, 9 aa, Homo Sapiens
DHMRFISEL

SEQ ID NO: 80734 - protein, 9 aa, Homo Sapiens
DHQQNSPTL

SEQ ID NO: 80735 - protein, 9 aa, Homo Sapiens
DHYQRILQL

SEQ ID NO: 80736 - protein, 9 aa, Homo Sapiens
EHAGLFLVM

SEQ ID NO: 80737 - protein, 9 aa, Homo Sapiens
EHAGVISVL

SEQ ID NO: 80738 - protein, 9 aa, Homo Sapiens
EHAHNMRVM

SEQ ID NO: 80739 - protein, 9 aa, Homo Sapiens
EHAPAPQEV

SEQ ID NO: 80740 - protein, 9 aa, Homo Sapiens
EHAPIRSSL

SEQ ID NO: 80741 - protein, 9 aa, Homo Sapiens
EHAPSIIFM

SEQ ID NO: 80742 - protein, 9 aa, Homo Sapiens
EHAPSIVFI

SEQ ID NO: 80743 - protein, 9 aa, Homo Sapiens
EHAQARLTL

SEQ ID NO: 80744 - protein, 9 aa, Homo Sapiens
EHARPQTTL

SEQ ID NO: 80745 - protein, 9 aa, Homo Sapiens
EHDPSSIYL

SEQ ID NO: 80746 - protein, 9 aa, Homo Sapiens
EHEESKRVL

SEQ ID NO: 80747 - protein, 9 aa, Homo Sapiens
EHEKALHIL

SEQ ID NO: 80748 - protein, 9 aa, Homo Sapiens
EHEPETHTL

SEQ ID NO: 80749 - protein, 9 aa, Homo Sapiens
EHEREVRAL

SEQ ID NO: 80750 - protein, 9 aa, Homo Sapiens
EHESLCHIL

SEQ ID NO: 80751 - protein, 9 aa, Homo Sapiens
EHFDRILEM

SEQ ID NO: 80752 - protein, 9 aa, Homo Sapiens
EHFEKAIEL

SEQ ID NO: 80753 - protein, 9 aa, Homo Sapiens
EHFFHSLML

SEQ ID NO: 80754 - protein, 9 aa, Homo Sapiens
EHFKTSPKI

SEQ ID NO: 80755 - protein, 9 aa, Homo Sapiens
EHFNGVAEL

SEQ ID NO: 80756 - protein, 9 aa, Homo Sapiens
EHHEAVEAL

SEQ ID NO: 80757 - protein, 9 aa, Homo Sapiens
EHHLSEVAL

SEQ ID NO: 80758 - protein, 9 aa, Homo Sapiens
EHIDISTVL

SEQ ID NO: 80759 - protein, 9 aa, Homo Sapiens
EHILYNLVL

SEQ ID NO: 80760 - protein, 9 aa, Homo Sapiens
EHINAGRTV

SEQ ID NO: 80761 - protein, 9 aa, Homo Sapiens
EHINSVSAM

SEQ ID NO: 80762 - protein, 9 aa, Homo Sapiens
EHIPESPYL

SEQ ID NO: 80763 - protein, 9 aa, Homo Sapiens
EHIQNIMTL

SEQ ID NO: 80764 - protein, 9 aa, Homo Sapiens
EHIVPNAEL

SEQ ID NO: 80765 - protein, 9 aa, Homo Sapiens
EHKYSSSPL

SEQ ID NO: 80766 - protein, 9 aa, Homo Sapiens
EHLPVSAEI

SEQ ID NO: 80767 - protein, 9 aa, Homo Sapiens
EHMATIEAL

SEQ ID NO: 80768 - protein, 9 aa, Homo Sapiens
EHMKEIVVL

SEQ ID NO: 80769 - protein, 9 aa, Homo Sapiens
EHMPSGESL

SEQ ID NO: 80770 - protein, 9 aa, Homo Sapiens
EHMQGSGSL

SEQ ID NO: 80771 - protein, 9 aa, Homo Sapiens
EHMSSSSSL

SEQ ID NO: 80772 - protein, 9 aa, Homo Sapiens
EHQDRALTL

SEQ ID NO: 80773 - protein, 9 aa, Homo Sapiens
EHSAPAKVV

SEQ ID NO: 80774 - protein, 9 aa, Homo Sapiens
EHSKVRLVI

SEQ ID NO: 80775 - protein, 9 aa, Homo Sapiens
EHSLPTLGL

SEQ ID NO: 80776 - protein, 9 aa, Homo Sapiens
EHSYAVSSV

SEQ ID NO: 80777 - protein, 9 aa, Homo Sapiens
EHVASSPAL

SEQ ID NO: 80778 - protein, 9 aa, Homo Sapiens
EHVDKAIAL

SEQ ID NO: 80779 - protein, 9 aa, Homo Sapiens
EHVFWVVSL

SEQ ID NO: 80780 - protein, 9 aa, Homo Sapiens
EHVLLVSIL

SEQ ID NO: 80781 - protein, 9 aa, Homo Sapiens
EHVPNSVRL

SEQ ID NO: 80782 - protein, 9 aa, Homo Sapiens
EHYHLTEAL

SEQ ID NO: 80783 - protein, 9 aa, Homo Sapiens
EHYLPSAIL

SEQ ID NO: 80784 - protein, 9 aa, Homo Sapiens
EHYRHALRL

SEQ ID NO: 80785 - protein, 9 aa, Homo Sapiens
EHYSTCIKL

SEQ ID NO: 80786 - protein, 9 aa, Homo Sapiens
EHYYNAISV

SEQ ID NO: 80787 - protein, 9 aa, Homo Sapiens
ELYATPATL

SEQ ID NO: 80788 - protein, 9 aa, Homo Sapiens
ERYSASKPL

SEQ ID NO: 80789 - protein, 9 aa, Homo Sapiens
FHAAWSSVL

SEQ ID NO: 80790 - protein, 9 aa, Homo Sapiens
FHAETLTAL

SEQ ID NO: 80791 - protein, 9 aa, Homo Sapiens
FHAGFGVVL

SEQ ID NO: 80792 - protein, 9 aa, Homo Sapiens
FHAGKSQGL

SEQ ID NO: 80793 - protein, 9 aa, Homo Sapiens
FHAVMGRTL

SEQ ID NO: 80794 - protein, 9 aa, Homo Sapiens
FHDATRVYL

SEQ ID NO: 80795 - protein, 9 aa, Homo Sapiens
FHDGSVHIV

SEQ ID NO: 80796 - protein, 9 aa, Homo Sapiens
FHDLPKAVL

SEQ ID NO: 80797 - protein, 9 aa, Homo Sapiens
FHDMGGVQL

SEQ ID NO: 80798 - protein, 9 aa, Homo Sapiens
FHDMMPKYL

SEQ ID NO: 80799 - protein, 9 aa, Homo Sapiens
FHDPDSAVV

SEQ ID NO: 80800 - protein, 9 aa, Homo Sapiens
FHEEHSRVL

SEQ ID NO: 80801 - protein, 9 aa, Homo Sapiens
FHEFHSPAL

SEQ ID NO: 80802 - protein, 9 aa, Homo Sapiens
FHFAGDGKL

SEQ ID NO: 80803 - protein, 9 aa, Homo Sapiens
FHFEPNEYF

SEQ ID NO: 80804 - protein, 9 aa, Homo Sapiens
FHGPPEPVL

SEQ ID NO: 80805 - protein, 9 aa, Homo Sapiens
FHHEGGVDV

SEQ ID NO: 80806 - protein, 9 aa, Homo Sapiens
FHHEYPWIL

SEQ ID NO: 80807 - protein, 9 aa, Homo Sapiens
FHHGAQAGL

SEQ ID NO: 80808 - protein, 9 aa, Homo Sapiens
FHHHPSTAL

SEQ ID NO: 80809 - protein, 9 aa, Homo Sapiens
FHHPNILEL

SEQ ID NO: 80810 - protein, 9 aa, Homo Sapiens
FHHPSAVRL

SEQ ID NO: 80811 - protein, 9 aa, Homo Sapiens
FHHTPISSM

SEQ ID NO: 80812 - protein, 9 aa, Homo Sapiens
FHHVGQAGL

SEQ ID NO: 80813 - protein, 9 aa, Homo Sapiens
FHIAGAYLL

SEQ ID NO: 80814 - protein, 9 aa, Homo Sapiens
FHIALGGLL

SEQ ID NO: 80815 - protein, 9 aa, Homo Sapiens
FHIDFGHFL

SEQ ID NO: 80816 - protein, 9 aa, Homo Sapiens
FHIDFGHIL

SEQ ID NO: 80817 - protein, 9 aa, Homo Sapiens
FHIEKPKAV

SEQ ID NO: 80818 - protein, 9 aa, Homo Sapiens
FHITVGKAI

SEQ ID NO: 80819 - protein, 9 aa, Homo Sapiens
FHLALGQVL

SEQ ID NO: 80820 - protein, 9 aa, Homo Sapiens
FHLEHAANL

SEQ ID NO: 80821 - protein, 9 aa, Homo Sapiens
FHLGHAAML

SEQ ID NO: 80822 - protein, 9 aa, Homo Sapiens
FHLHSQKCL

SEQ ID NO: 80823 - protein, 9 aa, Homo Sapiens
FHMDPSGTF

SEQ ID NO: 80824 - protein, 9 aa, Homo Sapiens
FHMGGNMEL

SEQ ID NO: 80825 - protein, 9 aa, Homo Sapiens
FHMPITSAM

SEQ ID NO: 80826 - protein, 9 aa, Homo Sapiens
FHNFIKVTL

SEQ ID NO: 80827 - protein, 9 aa, Homo Sapiens
FHNGSTPTL

SEQ ID NO: 80828 - protein, 9 aa, Homo Sapiens
FHNGVAAGL

SEQ ID NO: 80829 - protein, 9 aa, Homo Sapiens
FHNLPSLTL

SEQ ID NO: 80830 - protein, 9 aa, Homo Sapiens
FHNQGPVIK

SEQ ID NO: 80831 - protein, 9 aa, Homo Sapiens
FHQPDSVIL

SEQ ID NO: 80832 - protein, 9 aa, Homo Sapiens
FHQPTQPVA

SEQ ID NO: 80833 - protein, 9 aa, Homo Sapiens
FHSGGKFIL

SEQ ID NO: 80834 - protein, 9 aa, Homo Sapiens
FHSGHARAL

SEQ ID NO: 80835 - protein, 9 aa, Homo Sapiens
FHSHDGPSL

SEQ ID NO: 80836 - protein, 9 aa, Homo Sapiens
FHSKESIVA

SEQ ID NO: 80837 - protein, 9 aa, Homo Sapiens
FHSNDVATL

SEQ ID NO: 80838 - protein, 9 aa, Homo Sapiens
FHSPPQEAL

SEQ ID NO: 80839 - protein, 9 aa, Homo Sapiens
FHSPYCKLV

SEQ ID NO: 80840 - protein, 9 aa, Homo Sapiens
FHTEALTAL

SEQ ID NO: 80841 - protein, 9 aa, Homo Sapiens
FHTPKNTSV

SEQ ID NO: 80842 - protein, 9 aa, Homo Sapiens
FHTTPNTSL

SEQ ID NO: 80843 - protein, 9 aa, Homo Sapiens
FHVGKTPIV

SEQ ID NO: 80844 - protein, 9 aa, Homo Sapiens
FHVGLPGAL

SEQ ID NO: 80845 - protein, 9 aa, Homo Sapiens
FHVPAGQPL

SEQ ID NO: 80846 - protein, 9 aa, Homo Sapiens
FHYGIKQLL

SEQ ID NO: 80847 - protein, 9 aa, Homo Sapiens
FHYIFNVQL

SEQ ID NO: 80848 - protein, 9 aa, Homo Sapiens
FHYPGVQNL

SEQ ID NO: 80849 - protein, 9 aa, Homo Sapiens
FIADHCPTL

SEQ ID NO: 80850 - protein, 9 aa, Homo Sapiens
FQAPTAKEM

SEQ ID NO: 80851 - protein, 9 aa, Homo Sapiens
FQEADSPTL

SEQ ID NO: 80852 - protein, 9 aa, Homo Sapiens
FQSAAIGAL

SEQ ID NO: 80853 - protein, 9 aa, Homo Sapiens
FQTIARNAL

SEQ ID NO: 80854 - protein, 9 aa, Homo Sapiens
FQYSKSPSL

SEQ ID NO: 80855 - protein, 9 aa, Homo Sapiens
GGHGPSFPL

SEQ ID NO: 80856 - protein, 9 aa, Homo Sapiens
GHAAPTNVV

SEQ ID NO: 80857 - protein, 9 aa, Homo Sapiens
GHAASSPEI

SEQ ID NO: 80858 - protein, 9 aa, Homo Sapiens
GHADVAQLL

SEQ ID NO: 80859 - protein, 9 aa, Homo Sapiens
GHAMPIRSL

SEQ ID NO: 80860 - protein, 9 aa, Homo Sapiens
GHAPYSRTL

SEQ ID NO: 80861 - protein, 9 aa, Homo Sapiens
GHASENPKL

SEQ ID NO: 80862 - protein, 9 aa, Homo Sapiens
GHASHQPAI

SEQ ID NO: 80863 - protein, 9 aa, Homo Sapiens
GHASPCPPL

SEQ ID NO: 80864 - protein, 9 aa, Homo Sapiens
GHATPVSSL

SEQ ID NO: 80865 - protein, 9 aa, Homo Sapiens
GHDASQITL

SEQ ID NO: 80866 - protein, 9 aa, Homo Sapiens
GHDNRVSCL

SEQ ID NO: 80867 - protein, 9 aa, Homo Sapiens
GHENRVSTL

SEQ ID NO: 80868 - protein, 9 aa, Homo Sapiens
GHEPMPPTL

SEQ ID NO: 80869 - protein, 9 aa, Homo Sapiens
GHFEKPLFL

SEQ ID NO: 80870 - protein, 9 aa, Homo Sapiens
GHFKDPKRL

SEQ ID NO: 80871 - protein, 9 aa, Homo Sapiens
GHFPLSITL

SEQ ID NO: 80872 - protein, 9 aa, Homo Sapiens
GHFPSPIRL

SEQ ID NO: 80873 - protein, 9 aa, Homo Sapiens
GHFQGEIKL

SEQ ID NO: 80874 - protein, 9 aa, Homo Sapiens
GHFQGGIQV

SEQ ID NO: 80875 - protein, 9 aa, Homo Sapiens
GHFQKMLVV

SEQ ID NO: 80876 - protein, 9 aa, Homo Sapiens
GHFQRAAQL

SEQ ID NO: 80877 - protein, 9 aa, Homo Sapiens
GHFSKALEL

SEQ ID NO: 80878 - protein, 9 aa, Homo Sapiens
GHGSPFPSL

SEQ ID NO: 80879 - protein, 9 aa, Homo Sapiens
GHHAQPLAL

SEQ ID NO: 80880 - protein, 9 aa, Homo Sapiens
GHHLPQQSL

SEQ ID NO: 80881 - protein, 9 aa, Homo Sapiens
GHHQPITAM

SEQ ID NO: 80882 - protein, 9 aa, Homo Sapiens
GHIAKALAL

SEQ ID NO: 80883 - protein, 9 aa, Homo Sapiens
GHIDHPVMV

SEQ ID NO: 80884 - protein, 9 aa, Homo Sapiens
GHIDVVQVL

SEQ ID NO: 80885 - protein, 9 aa, Homo Sapiens
GHIESSALL

SEQ ID NO: 80886 - protein, 9 aa, Homo Sapiens
GHIPSAIVL

SEQ ID NO: 80887 - protein, 9 aa, Homo Sapiens
GHIPWGTVF

SEQ ID NO: 80888 - protein, 9 aa, Homo Sapiens
GHLEKAVVL

SEQ ID NO: 80889 - protein, 9 aa, Homo Sapiens
GHLENNPAL

SEQ ID NO: 80890 - protein, 9 aa, Homo Sapiens
GHMEAVSSV

SEQ ID NO: 80891 - protein, 9 aa, Homo Sapiens
GHMFPSHLL

SEQ ID NO: 80892 - protein, 9 aa, Homo Sapiens
GHMPPLTSA

SEQ ID NO: 80893 - protein, 9 aa, Homo Sapiens
GHMPTVELL

SEQ ID NO: 80894 - protein, 9 aa, Homo Sapiens
GHNGWVTQI

SEQ ID NO: 80895 - protein, 9 aa, Homo Sapiens
GHNLQTVQL

SEQ ID NO: 80896 - protein, 9 aa, Homo Sapiens
GHRANSPSL

SEQ ID NO: 80897 - protein, 9 aa, Homo Sapiens
GHSAHIVTL

SEQ ID NO: 80898 - protein, 9 aa, Homo Sapiens
GHSDIHSLL

SEQ ID NO: 80899 - protein, 9 aa, Homo Sapiens
GHSDLVRCL

SEQ ID NO: 80900 - protein, 9 aa, Homo Sapiens
GHSEAVISV

SEQ ID NO: 80901 - protein, 9 aa, Homo Sapiens
GHSEVSTAI

SEQ ID NO: 80902 - protein, 9 aa, Homo Sapiens
GHSEVVAIL

SEQ ID NO: 80903 - protein, 9 aa, Homo Sapiens
GHSGAVMEL

SEQ ID NO: 80904 - protein, 9 aa, Homo Sapiens
GHSIVVSSL

SEQ ID NO: 80905 - protein, 9 aa, Homo Sapiens
GHSKRVVAL

SEQ ID NO: 80906 - protein, 9 aa, Homo Sapiens
GHSPPSSSL

SEQ ID NO: 80907 - protein, 9 aa, Homo Sapiens
GHSPPTSSL

SEQ ID NO: 80908 - protein, 9 aa, Homo Sapiens
GHTPYSSML

SEQ ID NO: 80909 - protein, 9 aa, Homo Sapiens
GHTSRVLSL

SEQ ID NO: 80910 - protein, 9 aa, Homo Sapiens
GHVEQARAL

SEQ ID NO: 80911 - protein, 9 aa, Homo Sapiens
GHVEVARVL

SEQ ID NO: 80912 - protein, 9 aa, Homo Sapiens
GHVPGVSAL

SEQ ID NO: 80913 - protein, 9 aa, Homo Sapiens
GHVTGQAVV

SEQ ID NO: 80914 - protein, 9 aa, Homo Sapiens
GHVVKALAL

SEQ ID NO: 80915 - protein, 9 aa, Homo Sapiens
GHYAASIII

SEQ ID NO: 80916 - protein, 9 aa, Homo Sapiens
GHYEVAELL

SEQ ID NO: 80917 - protein, 9 aa, Homo Sapiens
GHYLDQKRL

SEQ ID NO: 80918 - protein, 9 aa, Homo Sapiens
GHYPEILVV

SEQ ID NO: 80919 - protein, 9 aa, Homo Sapiens
GHYPRHIVF

SEQ ID NO: 80920 - protein, 9 aa, Homo Sapiens
GHYQNALYL

SEQ ID NO: 80921 - protein, 9 aa, Homo Sapiens
GHYSTTEVL

SEQ ID NO: 80922 - protein, 9 aa, Homo Sapiens
GHYTASVKV

SEQ ID NO: 80923 - protein, 9 aa, Homo Sapiens
GHYTEGAEL

SEQ ID NO: 80924 - protein, 9 aa, Homo Sapiens
GQAPPGKAL

SEQ ID NO: 80925 - protein, 9 aa, Homo Sapiens
GQGPPGPIL

SEQ ID NO: 80926 - protein, 9 aa, Homo Sapiens
HGYDKDPVL

SEQ ID NO: 80927 - protein, 9 aa, Homo Sapiens
HHADKALTM

SEQ ID NO: 80928 - protein, 9 aa, Homo Sapiens
HHAEPPPAL

SEQ ID NO: 80929 - protein, 9 aa, Homo Sapiens
HHAFQPSKL

SEQ ID NO: 80930 - protein, 9 aa, Homo Sapiens
HHANPAIGF

SEQ ID NO: 80931 - protein, 9 aa, Homo Sapiens
HHANPILLL

SEQ ID NO: 80932 - protein, 9 aa, Homo Sapiens
HHAPLPSHL

SEQ ID NO: 80933 - protein, 9 aa, Homo Sapiens
HHAPLVNSL

SEQ ID NO: 80934 - protein, 9 aa, Homo Sapiens
HHARSICHL

SEQ ID NO: 80935 - protein, 9 aa, Homo Sapiens
HHDPFLRSM

SEQ ID NO: 80936 - protein, 9 aa, Homo Sapiens
HHDQPVKPL

SEQ ID NO: 80937 - protein, 9 aa, Homo Sapiens
HHDSRRIFV

SEQ ID NO: 80938 - protein, 9 aa, Homo Sapiens
HHEAGVTAL

SEQ ID NO: 80939 - protein, 9 aa, Homo Sapiens
HHELHAAHL

SEQ ID NO: 80940 - protein, 9 aa, Homo Sapiens
HHELVALLL

SEQ ID NO: 80941 - protein, 9 aa, Homo Sapiens
HHEPESPQL

SEQ ID NO: 80942 - protein, 9 aa, Homo Sapiens
HHFDRIAQM

SEQ ID NO: 80943 - protein, 9 aa, Homo Sapiens
HHFEGAQIL

SEQ ID NO: 80944 - protein, 9 aa, Homo Sapiens
HHFEKAVTL

SEQ ID NO: 80945 - protein, 9 aa, Homo Sapiens
HHFEQMLKL

SEQ ID NO: 80946 - protein, 9 aa, Homo Sapiens
HHFKYPCVL

SEQ ID NO: 80947 - protein, 9 aa, Homo Sapiens
HHFLELVTL

SEQ ID NO: 80948 - protein, 9 aa, Homo Sapiens
HHFPGPLLV

SEQ ID NO: 80949 - protein, 9 aa, Homo Sapiens
HHGPMAVAF

SEQ ID NO: 80950 - protein, 9 aa, Homo Sapiens
HHGPPGPTF

SEQ ID NO: 80951 - protein, 9 aa, Homo Sapiens
HHGPPRFGL

SEQ ID NO: 80952 - protein, 9 aa, Homo Sapiens
HHGPQTLYL

SEQ ID NO: 80953 - protein, 9 aa, Homo Sapiens
HHGTSILTL

SEQ ID NO: 80954 - protein, 9 aa, Homo Sapiens
HHHALQQQL

SEQ ID NO: 80955 - protein, 9 aa, Homo Sapiens
HHHDYHHIL

SEQ ID NO: 80956 - protein, 9 aa, Homo Sapiens
HHHHHPPMI

SEQ ID NO: 80957 - protein, 9 aa, Homo Sapiens
HHHLGSVIL

SEQ ID NO: 80958 - protein, 9 aa, Homo Sapiens
HHHLPTEAL

SEQ ID NO: 80959 - protein, 9 aa, Homo Sapiens
HHHLQNNEL

SEQ ID NO: 80960 - protein, 9 aa, Homo Sapiens
HHHPPMIAL

SEQ ID NO: 80961 - protein, 9 aa, Homo Sapiens
HHHVPNATL

SEQ ID NO: 80962 - protein, 9 aa, Homo Sapiens
HHIANANLM

SEQ ID NO: 80963 - protein, 9 aa, Homo Sapiens
HHIASVEKL

SEQ ID NO: 80964 - protein, 9 aa, Homo Sapiens
HHIATVEKL

SEQ ID NO: 80965 - protein, 9 aa, Homo Sapiens
HHIDSANAL

SEQ ID NO: 80966 - protein, 9 aa, Homo Sapiens
HHIEAQQRL

SEQ ID NO: 80967 - protein, 9 aa, Homo Sapiens
HHIEPFCKL

SEQ ID NO: 80968 - protein, 9 aa, Homo Sapiens
HHILADVSL

SEQ ID NO: 80969 - protein, 9 aa, Homo Sapiens
HHILKSDDL

SEQ ID NO: 80970 - protein, 9 aa, Homo Sapiens
HHIPDVITY

SEQ ID NO: 80971 - protein, 9 aa, Homo Sapiens
HHISLASCL

SEQ ID NO: 80972 - protein, 9 aa, Homo Sapiens
HHITGSQNI

SEQ ID NO: 80973 - protein, 9 aa, Homo Sapiens
HHITPLLSA

SEQ ID NO: 80974 - protein, 9 aa, Homo Sapiens
HHIYHTVAI

SEQ ID NO: 80975 - protein, 9 aa, Homo Sapiens
HHKDIALSL

SEQ ID NO: 80976 - protein, 9 aa, Homo Sapiens
HHLIQAVLL

SEQ ID NO: 80977 - protein, 9 aa, Homo Sapiens
HHLIVITSL

SEQ ID NO: 80978 - protein, 9 aa, Homo Sapiens
HHLLVTNEL

SEQ ID NO: 80979 - protein, 9 aa, Homo Sapiens
HHLPRVPAL

SEQ ID NO: 80980 - protein, 9 aa, Homo Sapiens
HHLVIPSVL

SEQ ID NO: 80981 - protein, 9 aa, Homo Sapiens
HHMGGMAGL

SEQ ID NO: 80982 - protein, 9 aa, Homo Sapiens
HHMGISHVL

SEQ ID NO: 80983 - protein, 9 aa, Homo Sapiens
HHNALGVIL

SEQ ID NO: 80984 - protein, 9 aa, Homo Sapiens
HHNEAVLHL

SEQ ID NO: 80985 - protein, 9 aa, Homo Sapiens
HHNILPKTL

SEQ ID NO: 80986 - protein, 9 aa, Homo Sapiens
HHNPPTIEL

SEQ ID NO: 80987 - protein, 9 aa, Homo Sapiens
HHNRAITHL

SEQ ID NO: 80988 - protein, 9 aa, Homo Sapiens
HHQHNPVQV

SEQ ID NO: 80989 - protein, 9 aa, Homo Sapiens
HHQSKVITL

SEQ ID NO: 80990 - protein, 9 aa, Homo Sapiens
HHQTAYNAL

SEQ ID NO: 80991 - protein, 9 aa, Homo Sapiens
HHSALLILL

SEQ ID NO: 80992 - protein, 9 aa, Homo Sapiens
HHSDGSVSL

SEQ ID NO: 80993 - protein, 9 aa, Homo Sapiens
HHSGAKVVL

SEQ ID NO: 80994 - protein, 9 aa, Homo Sapiens
HHSGILPIL

SEQ ID NO: 80995 - protein, 9 aa, Homo Sapiens
HHSLALTSF

SEQ ID NO: 80996 - protein, 9 aa, Homo Sapiens
HHSMSQPIM

SEQ ID NO: 80997 - protein, 9 aa, Homo Sapiens
HHSNIPMSL

SEQ ID NO: 80998 - protein, 9 aa, Homo Sapiens
HHSQSFQLL

SEQ ID NO: 80999 - protein, 9 aa, Homo Sapiens
HHSSVQDAV

SEQ ID NO: 81000 - protein, 9 aa, Homo Sapiens
HHSVKSPEL

SEQ ID NO: 81001 - protein, 9 aa, Homo Sapiens
HHTQQSQML

SEQ ID NO: 81002 - protein, 9 aa, Homo Sapiens
HHTQVDPAM

SEQ ID NO: 81003 - protein, 9 aa, Homo Sapiens
HHTTQQTFL

SEQ ID NO: 81004 - protein, 9 aa, Homo Sapiens
HHVARNVAL

SEQ ID NO: 81005 - protein, 9 aa, Homo Sapiens
HHVEDPASV

SEQ ID NO: 81006 - protein, 9 aa, Homo Sapiens
HHVIPMPLL

SEQ ID NO: 81007 - protein, 9 aa, Homo Sapiens
HHVLHSLLL

SEQ ID NO: 81008 - protein, 9 aa, Homo Sapiens
HHVLKNDVL

SEQ ID NO: 81009 - protein, 9 aa, Homo Sapiens
HHVLQNDVL

SEQ ID NO: 81010 - protein, 9 aa, Homo Sapiens
HHVNVNPNF

SEQ ID NO: 81011 - protein, 9 aa, Homo Sapiens
HHVSVTKQL

SEQ ID NO: 81012 - protein, 9 aa, Homo Sapiens
HHVYSGKDL

SEQ ID NO: 81013 - protein, 9 aa, Homo Sapiens
HHVYVTAAL

SEQ ID NO: 81014 - protein, 9 aa, Homo Sapiens
HHWPFQRAL

SEQ ID NO: 81015 - protein, 9 aa, Homo Sapiens
HHYEGAVVI

SEQ ID NO: 81016 - protein, 9 aa, Homo Sapiens
HHYELPAIL

SEQ ID NO: 81017 - protein, 9 aa, Homo Sapiens
HHYIPHVVL

SEQ ID NO: 81018 - protein, 9 aa, Homo Sapiens
HHYTGLLKL

SEQ ID NO: 81019 - protein, 9 aa, Homo Sapiens
HHYTTKQVI

SEQ ID NO: 81020 - protein, 9 aa, Homo Sapiens
HQAGQAPHL

SEQ ID NO: 81021 - protein, 9 aa, Homo Sapiens
HQDSRAHLL

SEQ ID NO: 81022 - protein, 9 aa, Homo Sapiens
HQFESSFEL

SEQ ID NO: 81023 - protein, 9 aa, Homo Sapiens
HQHLSKESL

SEQ ID NO: 81024 - protein, 9 aa, Homo Sapiens
HQINSSGVL

SEQ ID NO: 81025 - protein, 9 aa, Homo Sapiens
HQQSIPAVL

SEQ ID NO: 81026 - protein, 9 aa, Homo Sapiens
HRFPFSSAL

SEQ ID NO: 81027 - protein, 9 aa, Homo Sapiens
HRLSHQTVL

SEQ ID NO: 81028 - protein, 9 aa, Homo Sapiens
HRTDLNPIL

SEQ ID NO: 81029 - protein, 9 aa, Homo Sapiens
HSGSQGPLL

SEQ ID NO: 81030 - protein, 9 aa, Homo Sapiens
HTLLNSISI

SEQ ID NO: 81031 - protein, 9 aa, Homo Sapiens
IEYGKQAVL

SEQ ID NO: 81032 - protein, 9 aa, Homo Sapiens
IHAEIKNSL

SEQ ID NO: 81033 - protein, 9 aa, Homo Sapiens
IHANVAAAL

SEQ ID NO: 81034 - protein, 9 aa, Homo Sapiens
IHAVGAPSV

SEQ ID NO: 81035 - protein, 9 aa, Homo Sapiens
IHCNTPSLL

SEQ ID NO: 81036 - protein, 9 aa, Homo Sapiens
IHDFQPHVI

SEQ ID NO: 81037 - protein, 9 aa, Homo Sapiens
IHDGMNLEL

SEQ ID NO: 81038 - protein, 9 aa, Homo Sapiens
IHDGTVHTI

SEQ ID NO: 81039 - protein, 9 aa, Homo Sapiens
IHDHNIPTL

SEQ ID NO: 81040 - protein, 9 aa, Homo Sapiens
IHDSQAPSL

SEQ ID NO: 81041 - protein, 9 aa, Homo Sapiens
IHEDTRHLL

SEQ ID NO: 81042 - protein, 9 aa, Homo Sapiens
IHEPEPHIL

SEQ ID NO: 81043 - protein, 9 aa, Homo Sapiens
IHEPSAALL

SEQ ID NO: 81044 - protein, 9 aa, Homo Sapiens
IHESPQPLL

SEQ ID NO: 81045 - protein, 9 aa, Homo Sapiens
IHFKETEIL

SEQ ID NO: 81046 - protein, 9 aa, Homo Sapiens
IHHNWPSLL

SEQ ID NO: 81047 - protein, 9 aa, Homo Sapiens
IHHPTPIQI

SEQ ID NO: 81048 - protein, 9 aa, Homo Sapiens
IHHRMPAIL

SEQ ID NO: 81049 - protein, 9 aa, Homo Sapiens
IHIITGVAV

SEQ ID NO: 81050 - protein, 9 aa, Homo Sapiens
IHIKPGAKV

SEQ ID NO: 81051 - protein, 9 aa, Homo Sapiens
IHILDVLVL

SEQ ID NO: 81052 - protein, 9 aa, Homo Sapiens
IHISSGNTM

SEQ ID NO: 81053 - protein, 9 aa, Homo Sapiens
IHLGHILFL

SEQ ID NO: 81054 - protein, 9 aa, Homo Sapiens
IHLPHFISL

SEQ ID NO: 81055 - protein, 9 aa, Homo Sapiens
IHLPLSRTL

SEQ ID NO: 81056 - protein, 9 aa, Homo Sapiens
IHLPVSRLL

SEQ ID NO: 81057 - protein, 9 aa, Homo Sapiens
IHNDVKVLL

SEQ ID NO: 81058 - protein, 9 aa, Homo Sapiens
IHNEPFLTL

SEQ ID NO: 81059 - protein, 9 aa, Homo Sapiens
IHQDGIHIL

SEQ ID NO: 81060 - protein, 9 aa, Homo Sapiens
IHQETATVL

SEQ ID NO: 81061 - protein, 9 aa, Homo Sapiens
IHRSGAPVL

SEQ ID NO: 81062 - protein, 9 aa, Homo Sapiens
IHSANVRTV

SEQ ID NO: 81063 - protein, 9 aa, Homo Sapiens
IHSDKAPVL

SEQ ID NO: 81064 - protein, 9 aa, Homo Sapiens
IHSENFQTL

SEQ ID NO: 81065 - protein, 9 aa, Homo Sapiens
IHSGNSVSL

SEQ ID NO: 81066 - protein, 9 aa, Homo Sapiens
IHSLPSTSV

SEQ ID NO: 81067 - protein, 9 aa, Homo Sapiens
IHSPKSESV

SEQ ID NO: 81068 - protein, 9 aa, Homo Sapiens
IHSPVVNEL

SEQ ID NO: 81069 - protein, 9 aa, Homo Sapiens
IHSQPQPAL

SEQ ID NO: 81070 - protein, 9 aa, Homo Sapiens
IHSQVSQQL

SEQ ID NO: 81071 - protein, 9 aa, Homo Sapiens
IHSSIVSTL

SEQ ID NO: 81072 - protein, 9 aa, Homo Sapiens
IHSSQPLTL

SEQ ID NO: 81073 - protein, 9 aa, Homo Sapiens
IHSTPSTVL

SEQ ID NO: 81074 - protein, 9 aa, Homo Sapiens
IHTPAGAAV

SEQ ID NO: 81075 - protein, 9 aa, Homo Sapiens
IHTPENPVI

SEQ ID NO: 81076 - protein, 9 aa, Homo Sapiens
IHVDFPVIL

SEQ ID NO: 81077 - protein, 9 aa, Homo Sapiens
IHVDPVSQL

SEQ ID NO: 81078 - protein, 9 aa, Homo Sapiens
IHVDSQKAL

SEQ ID NO: 81079 - protein, 9 aa, Homo Sapiens
IHVEQSISL

SEQ ID NO: 81080 - protein, 9 aa, Homo Sapiens
IHVPTTPAL

SEQ ID NO: 81081 - protein, 9 aa, Homo Sapiens
IHVRDTKTV

SEQ ID NO: 81082 - protein, 9 aa, Homo Sapiens
IHYDRITSL

SEQ ID NO: 81083 - protein, 9 aa, Homo Sapiens
IHYGQTVKL

SEQ ID NO: 81084 - protein, 9 aa, Homo Sapiens
ILANPSPVL

SEQ ID NO: 81085 - protein, 9 aa, Homo Sapiens
ILDPHVVLL

SEQ ID NO: 81086 - protein, 9 aa, Homo Sapiens
IPAPPSSPL

SEQ ID NO: 81087 - protein, 9 aa, Homo Sapiens
IPIGIDKAL

SEQ ID NO: 81088 - protein, 9 aa, Homo Sapiens
IQAEPSRCL

SEQ ID NO: 81089 - protein, 9 aa, Homo Sapiens
IQAPSGTQL

SEQ ID NO: 81090 - protein, 9 aa, Homo Sapiens
IQCAKTLIL

SEQ ID NO: 81091 - protein, 9 aa, Homo Sapiens
IQSPHVAVL

SEQ ID NO: 81092 - protein, 9 aa, Homo Sapiens
IQSPVTTPL

SEQ ID NO: 81093 - protein, 9 aa, Homo Sapiens
IQYDKTNVL

SEQ ID NO: 81094 - protein, 9 aa, Homo Sapiens
IQYPDSDVL

SEQ ID NO: 81095 - protein, 9 aa, Homo Sapiens
KHIDAAMVL

SEQ ID NO: 81096 - protein, 9 aa, Homo Sapiens
KHIGVCISV

SEQ ID NO: 81097 - protein, 9 aa, Homo Sapiens
KHVNPVQAL

SEQ ID NO: 81098 - protein, 9 aa, Homo Sapiens
LHAAHQAIL

SEQ ID NO: 81099 - protein, 9 aa, Homo Sapiens
LHADPEPSV

SEQ ID NO: 81100 - protein, 9 aa, Homo Sapiens
LHAFIAQAL

SEQ ID NO: 81101 - protein, 9 aa, Homo Sapiens
LHAGVVHCL

SEQ ID NO: 81102 - protein, 9 aa, Homo Sapiens
LHANLARAL

SEQ ID NO: 81103 - protein, 9 aa, Homo Sapiens
LHANLPPTL

SEQ ID NO: 81104 - protein, 9 aa, Homo Sapiens
LHAQPIISI

SEQ ID NO: 81105 - protein, 9 aa, Homo Sapiens
LHASGSRPL

SEQ ID NO: 81106 - protein, 9 aa, Homo Sapiens
LHATATRAL

SEQ ID NO: 81107 - protein, 9 aa, Homo Sapiens
LHATSQQPL

SEQ ID NO: 81108 - protein, 9 aa, Homo Sapiens
LHATVMNTL

SEQ ID NO: 81109 - protein, 9 aa, Homo Sapiens
LHDAASKLL

SEQ ID NO: 81110 - protein, 9 aa, Homo Sapiens
LHDDRGPVL

SEQ ID NO: 81111 - protein, 9 aa, Homo Sapiens
LHDEAVRLL

SEQ ID NO: 81112 - protein, 9 aa, Homo Sapiens
LHDQFQHQL

SEQ ID NO: 81113 - protein, 9 aa, Homo Sapiens
LHDTRTHFL

SEQ ID NO: 81114 - protein, 9 aa, Homo Sapiens
LHEATVRLM

SEQ ID NO: 81115 - protein, 9 aa, Homo Sapiens
LHEDLSTVI

SEQ ID NO: 81116 - protein, 9 aa, Homo Sapiens
LHEDRGPVL

SEQ ID NO: 81117 - protein, 9 aa, Homo Sapiens
LHEEVKRTL

SEQ ID NO: 81118 - protein, 9 aa, Homo Sapiens
LHFKESSEL

SEQ ID NO: 81119 - protein, 9 aa, Homo Sapiens
LHFRNAITL

SEQ ID NO: 81120 - protein, 9 aa, Homo Sapiens
LHGPLPLCL

SEQ ID NO: 81121 - protein, 9 aa, Homo Sapiens
LHGWAGTGK

SEQ ID NO: 81122 - protein, 9 aa, Homo Sapiens
LHHDDPEVL

SEQ ID NO: 81123 - protein, 9 aa, Homo Sapiens
LHHLQVIIL

SEQ ID NO: 81124 - protein, 9 aa, Homo Sapiens
LHHPNNQTL

SEQ ID NO: 81125 - protein, 9 aa, Homo Sapiens
LHHPQPLGL

SEQ ID NO: 81126 - protein, 9 aa, Homo Sapiens
LHHSEAPEL

SEQ ID NO: 81127 - protein, 9 aa, Homo Sapiens
LHICHDLTL

SEQ ID NO: 81128 - protein, 9 aa, Homo Sapiens
LHIDQRLVF

SEQ ID NO: 81129 - protein, 9 aa, Homo Sapiens
LHIFHAIAV

SEQ ID NO: 81130 - protein, 9 aa, Homo Sapiens
LHIGKGVQL

SEQ ID NO: 81131 - protein, 9 aa, Homo Sapiens
LHIGSVITL

SEQ ID NO: 81132 - protein, 9 aa, Homo Sapiens
LHIKVIPTL

SEQ ID NO: 81133 - protein, 9 aa, Homo Sapiens
LHLAVVPVL

SEQ ID NO: 81134 - protein, 9 aa, Homo Sapiens
LHLGHTFSL

SEQ ID NO: 81135 - protein, 9 aa, Homo Sapiens
LHLPQQPLL

SEQ ID NO: 81136 - protein, 9 aa, Homo Sapiens
LHLPVSTTL

SEQ ID NO: 81137 - protein, 9 aa, Homo Sapiens
LHLYHTIIL

SEQ ID NO: 81138 - protein, 9 aa, Homo Sapiens
LHMESPTCL

SEQ ID NO: 81139 - protein, 9 aa, Homo Sapiens
LHNAHKVLL

SEQ ID NO: 81140 - protein, 9 aa, Homo Sapiens
LHNCPAISL

SEQ ID NO: 81141 - protein, 9 aa, Homo Sapiens
LHNMPPSAL

SEQ ID NO: 81142 - protein, 9 aa, Homo Sapiens
LHNPVTLKL

SEQ ID NO: 81143 - protein, 9 aa, Homo Sapiens
LHNQAKNLL

SEQ ID NO: 81144 - protein, 9 aa, Homo Sapiens
LHQAVAVIL

SEQ ID NO: 81145 - protein, 9 aa, Homo Sapiens
LHQDPGQPL

SEQ ID NO: 81146 - protein, 9 aa, Homo Sapiens
LHQHTISTL

SEQ ID NO: 81147 - protein, 9 aa, Homo Sapiens
LHSDNTAAL

SEQ ID NO: 81148 - protein, 9 aa, Homo Sapiens
LHSDVTEAM

SEQ ID NO: 81149 - protein, 9 aa, Homo Sapiens
LHSESSMSL

SEQ ID NO: 81150 - protein, 9 aa, Homo Sapiens
LHSFASRQL

SEQ ID NO: 81151 - protein, 9 aa, Homo Sapiens
LHSHVTNAM

SEQ ID NO: 81152 - protein, 9 aa, Homo Sapiens
LHSKASNLL

SEQ ID NO: 81153 - protein, 9 aa, Homo Sapiens
LHSLPIVSM

SEQ ID NO: 81154 - protein, 9 aa, Homo Sapiens
LHSMPSNSV

SEQ ID NO: 81155 - protein, 9 aa, Homo Sapiens
LHSRVKLIL

SEQ ID NO: 81156 - protein, 9 aa, Homo Sapiens
LHSSHTPSL

SEQ ID NO: 81157 - protein, 9 aa, Homo Sapiens
LHTARVLVL

SEQ ID NO: 81158 - protein, 9 aa, Homo Sapiens
LHTEEAPAL

SEQ ID NO: 81159 - protein, 9 aa, Homo Sapiens
LHTTVGSLL

SEQ ID NO: 81160 - protein, 9 aa, Homo Sapiens
LHYAVPVVL

SEQ ID NO: 81161 - protein, 9 aa, Homo Sapiens
LHYFKNVVL

SEQ ID NO: 81162 - protein, 9 aa, Homo Sapiens
LHYGLPVVV

SEQ ID NO: 81163 - protein, 9 aa, Homo Sapiens
LHYGSVLLI

SEQ ID NO: 81164 - protein, 9 aa, Homo Sapiens
LHYLRPVVV

SEQ ID NO: 81165 - protein, 9 aa, Homo Sapiens
LHYPSTTAL

SEQ ID NO: 81166 - protein, 9 aa, Homo Sapiens
LHYQPAAEL

SEQ ID NO: 81167 - protein, 9 aa, Homo Sapiens
LLAHPDAPM

SEQ ID NO: 81168 - protein, 9 aa, Homo Sapiens
LLSPHNPAL

SEQ ID NO: 81169 - protein, 9 aa, Homo Sapiens
LPALPTQAL

SEQ ID NO: 81170 - protein, 9 aa, Homo Sapiens
LPIAASSSL

SEQ ID NO: 81171 - protein, 9 aa, Homo Sapiens
LPIDCSPAL

SEQ ID NO: 81172 - protein, 9 aa, Homo Sapiens
LPYAGDVSM

SEQ ID NO: 81173 - protein, 9 aa, Homo Sapiens
LQAPPLTSL

SEQ ID NO: 81174 - protein, 9 aa, Homo Sapiens
LVFHSKPPS

SEQ ID NO: 81175 - protein, 9 aa, Homo Sapiens
LVTDIQPVL

SEQ ID NO: 81176 - protein, 9 aa, Homo Sapiens
MEEETKRQL

SEQ ID NO: 81177 - protein, 9 aa, Homo Sapiens
MHAGSSDLL

SEQ ID NO: 81178 - protein, 9 aa, Homo Sapiens
MHALLAIAL

SEQ ID NO: 81179 - protein, 9 aa, Homo Sapiens
MHAQDPQML

SEQ ID NO: 81180 - protein, 9 aa, Homo Sapiens
MHDCVVKLL

SEQ ID NO: 81181 - protein, 9 aa, Homo Sapiens
MHFESGSTL

SEQ ID NO: 81182 - protein, 9 aa, Homo Sapiens
MHGQPSPSL

SEQ ID NO: 81183 - protein, 9 aa, Homo Sapiens
MHIDSHEAL

SEQ ID NO: 81184 - protein, 9 aa, Homo Sapiens
MHKDYAVVL

SEQ ID NO: 81185 - protein, 9 aa, Homo Sapiens
MHLATSPIL

SEQ ID NO: 81186 - protein, 9 aa, Homo Sapiens
MHSALDPVL

SEQ ID NO: 81187 - protein, 9 aa, Homo Sapiens
MHSGDIMIM

SEQ ID NO: 81188 - protein, 9 aa, Homo Sapiens
MHSGPVVAM

SEQ ID NO: 81189 - protein, 9 aa, Homo Sapiens
MHSMPAVTL

SEQ ID NO: 81190 - protein, 9 aa, Homo Sapiens
MHSNAIAAM

SEQ ID NO: 81191 - protein, 9 aa, Homo Sapiens
MHSPAGRSV

SEQ ID NO: 81192 - protein, 9 aa, Homo Sapiens
MHSPNIEVV

SEQ ID NO: 81193 - protein, 9 aa, Homo Sapiens
MHSQFHAPL

SEQ ID NO: 81194 - protein, 9 aa, Homo Sapiens
MHVKSEASL

SEQ ID NO: 81195 - protein, 9 aa, Homo Sapiens
MHVLTAPLL

SEQ ID NO: 81196 - protein, 9 aa, Homo Sapiens
MHYPNGHAI

SEQ ID NO: 81197 - protein, 9 aa, Homo Sapiens
MHYPTALLF

SEQ ID NO: 81198 - protein, 9 aa, Homo Sapiens
MPEPASRCL

SEQ ID NO: 81199 - protein, 9 aa, Homo Sapiens
MQALPMGAL

SEQ ID NO: 81200 - protein, 9 aa, Homo Sapiens
MQDPNFHTM

SEQ ID NO: 81201 - protein, 9 aa, Homo Sapiens
MQEKTYRRL

SEQ ID NO: 81202 - protein, 9 aa, Homo Sapiens
NEYAYAAEL

SEQ ID NO: 81203 - protein, 9 aa, Homo Sapiens
NHADIVSCV

SEQ ID NO: 81204 - protein, 9 aa, Homo Sapiens
NHADPNSGL

SEQ ID NO: 81205 - protein, 9 aa, Homo Sapiens
NHADSRASL

SEQ ID NO: 81206 - protein, 9 aa, Homo Sapiens
NHAEKPVTL

SEQ ID NO: 81207 - protein, 9 aa, Homo Sapiens
NHAIVSTSV

SEQ ID NO: 81208 - protein, 9 aa, Homo Sapiens
NHAQSRIAL

SEQ ID NO: 81209 - protein, 9 aa, Homo Sapiens
NHASLISAL

SEQ ID NO: 81210 - protein, 9 aa, Homo Sapiens
NHCMEVIRL

SEQ ID NO: 81211 - protein, 9 aa, Homo Sapiens
NHDIWIKTL

SEQ ID NO: 81212 - protein, 9 aa, Homo Sapiens
NHDTGEYVL

SEQ ID NO: 81213 - protein, 9 aa, Homo Sapiens
NHEDKIRVV

SEQ ID NO: 81214 - protein, 9 aa, Homo Sapiens
NHEDKMRVV

SEQ ID NO: 81215 - protein, 9 aa, Homo Sapiens
NHEKALRLL

SEQ ID NO: 81216 - protein, 9 aa, Homo Sapiens
NHFDRSVVL

SEQ ID NO: 81217 - protein, 9 aa, Homo Sapiens
NHFEKARTL

SEQ ID NO: 81218 - protein, 9 aa, Homo Sapiens
NHFGSSYSV

SEQ ID NO: 81219 - protein, 9 aa, Homo Sapiens
NHFPGSFQI

SEQ ID NO: 81220 - protein, 9 aa, Homo Sapiens
NHHMPKSSL

SEQ ID NO: 81221 - protein, 9 aa, Homo Sapiens
NHIFHTSCL

SEQ ID NO: 81222 - protein, 9 aa, Homo Sapiens
NHIGHTGYL

SEQ ID NO: 81223 - protein, 9 aa, Homo Sapiens
NHIKSSCSL

SEQ ID NO: 81224 - protein, 9 aa, Homo Sapiens
NHIQLSSNL

SEQ ID NO: 81225 - protein, 9 aa, Homo Sapiens
NHISPNSLL

SEQ ID NO: 81226 - protein, 9 aa, Homo Sapiens
NHLDSHILL

SEQ ID NO: 81227 - protein, 9 aa, Homo Sapiens
NHLEKFFTL

SEQ ID NO: 81228 - protein, 9 aa, Homo Sapiens
NHLLDSPSL

SEQ ID NO: 81229 - protein, 9 aa, Homo Sapiens
NHLLHQPTL

SEQ ID NO: 81230 - protein, 9 aa, Homo Sapiens
NHMAVAFVL

SEQ ID NO: 81231 - protein, 9 aa, Homo Sapiens
NHMGSVLAV

SEQ ID NO: 81232 - protein, 9 aa, Homo Sapiens
NHNFSQQCL

SEQ ID NO: 81233 - protein, 9 aa, Homo Sapiens
NHNKITQSL

SEQ ID NO: 81234 - protein, 9 aa, Homo Sapiens
NHQGGSVQL

SEQ ID NO: 81235 - protein, 9 aa, Homo Sapiens
NHQHSPLVL

SEQ ID NO: 81236 - protein, 9 aa, Homo Sapiens
NHSEPRPGL

SEQ ID NO: 81237 - protein, 9 aa, Homo Sapiens
NHSFSSSSL

SEQ ID NO: 81238 - protein, 9 aa, Homo Sapiens
NHSHDQLVL

SEQ ID NO: 81239 - protein, 9 aa, Homo Sapiens
NHSHQTMEL

SEQ ID NO: 81240 - protein, 9 aa, Homo Sapiens
NHTERDPVL

SEQ ID NO: 81241 - protein, 9 aa, Homo Sapiens
NHTIPASSL

SEQ ID NO: 81242 - protein, 9 aa, Homo Sapiens
NHVHVARSL

SEQ ID NO: 81243 - protein, 9 aa, Homo Sapiens
NHVNSGCQL

SEQ ID NO: 81244 - protein, 9 aa, Homo Sapiens
NHVPVITTL

SEQ ID NO: 81245 - protein, 9 aa, Homo Sapiens
NHVRNNQVL

SEQ ID NO: 81246 - protein, 9 aa, Homo Sapiens
NHVSHGEVL

SEQ ID NO: 81247 - protein, 9 aa, Homo Sapiens
NHVTSSPVA

SEQ ID NO: 81248 - protein, 9 aa, Homo Sapiens
NHYNMQYAL

SEQ ID NO: 81249 - protein, 9 aa, Homo Sapiens
NHYNNIMAL

SEQ ID NO: 81250 - protein, 9 aa, Homo Sapiens
NHYQKQLEI

SEQ ID NO: 81251 - protein, 9 aa, Homo Sapiens
NHYSESTEL

SEQ ID NO: 81252 - protein, 9 aa, Homo Sapiens
NQAPSGPVA

SEQ ID NO: 81253 - protein, 9 aa, Homo Sapiens
NQARAQAAL

SEQ ID NO: 81254 - protein, 9 aa, Homo Sapiens
NQQAGAAAL

SEQ ID NO: 81255 - protein, 9 aa, Homo Sapiens
NQSISSPVL

SEQ ID NO: 81256 - protein, 9 aa, Homo Sapiens
NQSKPLIPL

SEQ ID NO: 81257 - protein, 9 aa, Homo Sapiens
NQYYNSKAL

SEQ ID NO: 81258 - protein, 9 aa, Homo Sapiens
NRAPNTAEL

SEQ ID NO: 81259 - protein, 9 aa, Homo Sapiens
NRYDGQVAV

SEQ ID NO: 81260 - protein, 9 aa, Homo Sapiens
PHCSRNPVL

SEQ ID NO: 81261 - protein, 9 aa, Homo Sapiens
QHAASILVL

SEQ ID NO: 81262 - protein, 9 aa, Homo Sapiens
QHAAVSEKL

SEQ ID NO: 81263 - protein, 9 aa, Homo Sapiens
QHADVGKEL

SEQ ID NO: 81264 - protein, 9 aa, Homo Sapiens
QHAERVAAL

SEQ ID NO: 81265 - protein, 9 aa, Homo Sapiens
QHAITGRAL

SEQ ID NO: 81266 - protein, 9 aa, Homo Sapiens
QHALLQEEL

SEQ ID NO: 81267 - protein, 9 aa, Homo Sapiens
QHANLAGTL

SEQ ID NO: 81268 - protein, 9 aa, Homo Sapiens
QHAPKLSAL

SEQ ID NO: 81269 - protein, 9 aa, Homo Sapiens
QHATRFIAL

SEQ ID NO: 81270 - protein, 9 aa, Homo Sapiens
QHAVEAISL

SEQ ID NO: 81271 - protein, 9 aa, Homo Sapiens
QHDAACRVI

SEQ ID NO: 81272 - protein, 9 aa, Homo Sapiens
QHDFQAPYL

SEQ ID NO: 81273 - protein, 9 aa, Homo Sapiens
QHDIHNAKL

SEQ ID NO: 81274 - protein, 9 aa, Homo Sapiens
QHDITGRAL

SEQ ID NO: 81275 - protein, 9 aa, Homo Sapiens
QHDPSAVAV

SEQ ID NO: 81276 - protein, 9 aa, Homo Sapiens
QHDPYITSI

SEQ ID NO: 81277 - protein, 9 aa, Homo Sapiens
QHDYGHLSV

SEQ ID NO: 81278 - protein, 9 aa, Homo Sapiens
QHEESIRKP

SEQ ID NO: 81279 - protein, 9 aa, Homo Sapiens
QHEIESRIL

SEQ ID NO: 81280 - protein, 9 aa, Homo Sapiens
QHEPRTPAL

SEQ ID NO: 81281 - protein, 9 aa, Homo Sapiens
QHETSSPAL

SEQ ID NO: 81282 - protein, 9 aa, Homo Sapiens
QHFDKSKAL

SEQ ID NO: 81283 - protein, 9 aa, Homo Sapiens
QHFDPVIQL

SEQ ID NO: 81284 - protein, 9 aa, Homo Sapiens
QHFDSVMQL

SEQ ID NO: 81285 - protein, 9 aa, Homo Sapiens
QHFNGLLEI

SEQ ID NO: 81286 - protein, 9 aa, Homo Sapiens
QHFNQRIQL

SEQ ID NO: 81287 - protein, 9 aa, Homo Sapiens
QHFPATPLL

SEQ ID NO: 81288 - protein, 9 aa, Homo Sapiens
QHFPEQMKL

SEQ ID NO: 81289 - protein, 9 aa, Homo Sapiens
QHGDVVSAI

SEQ ID NO: 81290 - protein, 9 aa, Homo Sapiens
QHGPLLLTL

SEQ ID NO: 81291 - protein, 9 aa, Homo Sapiens
QHHAKPNIF

SEQ ID NO: 81292 - protein, 9 aa, Homo Sapiens
QHHLPVRAV

SEQ ID NO: 81293 - protein, 9 aa, Homo Sapiens
QHHRPVIAV

SEQ ID NO: 81294 - protein, 9 aa, Homo Sapiens
QHIAQDSSL

SEQ ID NO: 81295 - protein, 9 aa, Homo Sapiens
QHIATVPSL

SEQ ID NO: 81296 - protein, 9 aa, Homo Sapiens
QHICTAYEL

SEQ ID NO: 81297 - protein, 9 aa, Homo Sapiens
QHIDAVARF

SEQ ID NO: 81298 - protein, 9 aa, Homo Sapiens
QHIEESRQL

SEQ ID NO: 81299 - protein, 9 aa, Homo Sapiens
QHIETFLIL

SEQ ID NO: 81300 - protein, 9 aa, Homo Sapiens
QHIGKPSTI

SEQ ID NO: 81301 - protein, 9 aa, Homo Sapiens
QHIGTSAIM

SEQ ID NO: 81302 - protein, 9 aa, Homo Sapiens
QHIIPISAV

SEQ ID NO: 81303 - protein, 9 aa, Homo Sapiens
QHIKSDVHL

SEQ ID NO: 81304 - protein, 9 aa, Homo Sapiens
QHILNPAFL

SEQ ID NO: 81305 - protein, 9 aa, Homo Sapiens
QHISDSPII

SEQ ID NO: 81306 - protein, 9 aa, Homo Sapiens
QHLACARCL

SEQ ID NO: 81307 - protein, 9 aa, Homo Sapiens
QHLACNVRM

SEQ ID NO: 81308 - protein, 9 aa, Homo Sapiens
QHLEKSAVL

SEQ ID NO: 81309 - protein, 9 aa, Homo Sapiens
QHLLSIISL

SEQ ID NO: 81310 - protein, 9 aa, Homo Sapiens
QHLPYIQIL

SEQ ID NO: 81311 - protein, 9 aa, Homo Sapiens
QHLSPLLSL

SEQ ID NO: 81312 - protein, 9 aa, Homo Sapiens
QHLVQQLVL

SEQ ID NO: 81313 - protein, 9 aa, Homo Sapiens
QHMIPENAL

SEQ ID NO: 81314 - protein, 9 aa, Homo Sapiens
QHMMPSQAF

SEQ ID NO: 81315 - protein, 9 aa, Homo Sapiens
QHNIPFPCL

SEQ ID NO: 81316 - protein, 9 aa, Homo Sapiens
QHNYPGIKL

SEQ ID NO: 81317 - protein, 9 aa, Homo Sapiens
QHQESIIQL

SEQ ID NO: 81318 - protein, 9 aa, Homo Sapiens
QHQETINTL

SEQ ID NO: 81319 - protein, 9 aa, Homo Sapiens
QHQETPVYL

SEQ ID NO: 81320 - protein, 9 aa, Homo Sapiens
QHQGVSLTM

SEQ ID NO: 81321 - protein, 9 aa, Homo Sapiens
QHQLQQQQL

SEQ ID NO: 81322 - protein, 9 aa, Homo Sapiens
QHQLSSRRL

SEQ ID NO: 81323 - protein, 9 aa, Homo Sapiens
QHQQTASVL

SEQ ID NO: 81324 - protein, 9 aa, Homo Sapiens
QHQSGIVQL

SEQ ID NO: 81325 - protein, 9 aa, Homo Sapiens
QHSAAGATI

SEQ ID NO: 81326 - protein, 9 aa, Homo Sapiens
QHSAVDPLL

SEQ ID NO: 81327 - protein, 9 aa, Homo Sapiens
QHSDKIIRL

SEQ ID NO: 81328 - protein, 9 aa, Homo Sapiens
QHSIPAVEL

SEQ ID NO: 81329 - protein, 9 aa, Homo Sapiens
QHSLLGPIL

SEQ ID NO: 81330 - protein, 9 aa, Homo Sapiens
QHSPALKAI

SEQ ID NO: 81331 - protein, 9 aa, Homo Sapiens
QHSQAMRCL

SEQ ID NO: 81332 - protein, 9 aa, Homo Sapiens
QHTPTSITL

SEQ ID NO: 81333 - protein, 9 aa, Homo Sapiens
QHVAPVTSV

SEQ ID NO: 81334 - protein, 9 aa, Homo Sapiens
QHVASSPIP

SEQ ID NO: 81335 - protein, 9 aa, Homo Sapiens
QHVFQNLIL

SEQ ID NO: 81336 - protein, 9 aa, Homo Sapiens
QHVGTHSSL

SEQ ID NO: 81337 - protein, 9 aa, Homo Sapiens
QHVSASRVF

SEQ ID NO: 81338 - protein, 9 aa, Homo Sapiens
QHVTTQLVL

SEQ ID NO: 81339 - protein, 9 aa, Homo Sapiens
QHVYPFSSL

SEQ ID NO: 81340 - protein, 9 aa, Homo Sapiens
QQFAHPPLL

SEQ ID NO: 81341 - protein, 9 aa, Homo Sapiens
QQSFTNPTL

SEQ ID NO: 81342 - protein, 9 aa, Homo Sapiens
QQVNPTKAL

SEQ ID NO: 81343 - protein, 9 aa, Homo Sapiens
RHAEPGFSL

SEQ ID NO: 81344 - protein, 9 aa, Homo Sapiens
RHCGALRVL

SEQ ID NO: 81345 - protein, 9 aa, Homo Sapiens
RHDDRPQVL

SEQ ID NO: 81346 - protein, 9 aa, Homo Sapiens
RHETQVRML

SEQ ID NO: 81347 - protein, 9 aa, Homo Sapiens
RHETRIHIL

SEQ ID NO: 81348 - protein, 9 aa, Homo Sapiens
RHFAESETL

SEQ ID NO: 81349 - protein, 9 aa, Homo Sapiens
RHHPTTLAV

SEQ ID NO: 81350 - protein, 9 aa, Homo Sapiens
RHIDPSGKL

SEQ ID NO: 81351 - protein, 9 aa, Homo Sapiens
RHIEIFTDL

SEQ ID NO: 81352 - protein, 9 aa, Homo Sapiens
RHIEWESVL

SEQ ID NO: 81353 - protein, 9 aa, Homo Sapiens
RHKSDSISL

SEQ ID NO: 81354 - protein, 9 aa, Homo Sapiens
RHLDISREL

SEQ ID NO: 81355 - protein, 9 aa, Homo Sapiens
RHMQQQPVV

SEQ ID NO: 81356 - protein, 9 aa, Homo Sapiens
RHVAPGLHL

SEQ ID NO: 81357 - protein, 9 aa, Homo Sapiens
RHVDAHATL

SEQ ID NO: 81358 - protein, 9 aa, Homo Sapiens
RHVLPTTSL

SEQ ID NO: 81359 - protein, 9 aa, Homo Sapiens
RPITDSPVL

SEQ ID NO: 81360 - protein, 9 aa, Homo Sapiens
RPSGPGPEL

SEQ ID NO: 81361 - protein, 9 aa, Homo Sapiens
SHAHEQEEF

SEQ ID NO: 81362 - protein, 9 aa, Homo Sapiens
SHAHPAPPV

SEQ ID NO: 81363 - protein, 9 aa, Homo Sapiens
SHAIEALIL

SEQ ID NO: 81364 - protein, 9 aa, Homo Sapiens
SHAISVICV

SEQ ID NO: 81365 - protein, 9 aa, Homo Sapiens
SHANSAVVL

SEQ ID NO: 81366 - protein, 9 aa, Homo Sapiens
SHAPPAETI

SEQ ID NO: 81367 - protein, 9 aa, Homo Sapiens
SHAPYQPSA

SEQ ID NO: 81368 - protein, 9 aa, Homo Sapiens
SHASPSPVA

SEQ ID NO: 81369 - protein, 9 aa, Homo Sapiens
SHAVAQSVL

SEQ ID NO: 81370 - protein, 9 aa, Homo Sapiens
SHAVFQIIL

SEQ ID NO: 81371 - protein, 9 aa, Homo Sapiens
SHAVQHPVL

SEQ ID NO: 81372 - protein, 9 aa, Homo Sapiens
SHAVSTAAM

SEQ ID NO: 81373 - protein, 9 aa, Homo Sapiens
SHCAQPLAL

SEQ ID NO: 81374 - protein, 9 aa, Homo Sapiens
SHCFTQAML

SEQ ID NO: 81375 - protein, 9 aa, Homo Sapiens
SHDARLVLL

SEQ ID NO: 81376 - protein, 9 aa, Homo Sapiens
SHDAVVREM

SEQ ID NO: 81377 - protein, 9 aa, Homo Sapiens
SHDERFIRL

SEQ ID NO: 81378 - protein, 9 aa, Homo Sapiens
SHDFYSHEL

SEQ ID NO: 81379 - protein, 9 aa, Homo Sapiens
SHDNPSNSL

SEQ ID NO: 81380 - protein, 9 aa, Homo Sapiens
SHEAREKLL

SEQ ID NO: 81381 - protein, 9 aa, Homo Sapiens
SHEEVVQTL

SEQ ID NO: 81382 - protein, 9 aa, Homo Sapiens
SHEGKPLKL

SEQ ID NO: 81383 - protein, 9 aa, Homo Sapiens
SHEINPRKV

SEQ ID NO: 81384 - protein, 9 aa, Homo Sapiens
SHEPKSPSL

SEQ ID NO: 81385 - protein, 9 aa, Homo Sapiens
SHEQAAAAL

SEQ ID NO: 81386 - protein, 9 aa, Homo Sapiens
SHFASSHAL

SEQ ID NO: 81387 - protein, 9 aa, Homo Sapiens
SHFCRSPFL

SEQ ID NO: 81388 - protein, 9 aa, Homo Sapiens
SHFDGIRAL

SEQ ID NO: 81389 - protein, 9 aa, Homo Sapiens
SHFDGVRAL

SEQ ID NO: 81390 - protein, 9 aa, Homo Sapiens
SHFGPGPTL

SEQ ID NO: 81391 - protein, 9 aa, Homo Sapiens
SHFKDYRKL

SEQ ID NO: 81392 - protein, 9 aa, Homo Sapiens
SHFQSISVL

SEQ ID NO: 81393 - protein, 9 aa, Homo Sapiens
SHFSLQPVL

SEQ ID NO: 81394 - protein, 9 aa, Homo Sapiens
SHGGPALSL

SEQ ID NO: 81395 - protein, 9 aa, Homo Sapiens
SHGLPQSTL

SEQ ID NO: 81396 - protein, 9 aa, Homo Sapiens
SHGPAIAAV

SEQ ID NO: 81397 - protein, 9 aa, Homo Sapiens
SHGPPTHRL

SEQ ID NO: 81398 - protein, 9 aa, Homo Sapiens
SHGPVTDAL

SEQ ID NO: 81399 - protein, 9 aa, Homo Sapiens
SHGYPREAL

SEQ ID NO: 81400 - protein, 9 aa, Homo Sapiens
SHHDLAPAL

SEQ ID NO: 81401 - protein, 9 aa, Homo Sapiens
SHHEACVRL

SEQ ID NO: 81402 - protein, 9 aa, Homo Sapiens
SHHLPTSPL

SEQ ID NO: 81403 - protein, 9 aa, Homo Sapiens
SHHPSLVAV

SEQ ID NO: 81404 - protein, 9 aa, Homo Sapiens
SHHSLASSL

SEQ ID NO: 81405 - protein, 9 aa, Homo Sapiens
SHHVKQVLV

SEQ ID NO: 81406 - protein, 9 aa, Homo Sapiens
SHIDKAVLL

SEQ ID NO: 81407 - protein, 9 aa, Homo Sapiens
SHIDKSAWL

SEQ ID NO: 81408 - protein, 9 aa, Homo Sapiens
SHIDRVYTL

SEQ ID NO: 81409 - protein, 9 aa, Homo Sapiens
SHIETKAAV

SEQ ID NO: 81410 - protein, 9 aa, Homo Sapiens
SHIFEVQAL

SEQ ID NO: 81411 - protein, 9 aa, Homo Sapiens
SHIGDAVVI

SEQ ID NO: 81412 - protein, 9 aa, Homo Sapiens
SHIITGNKI

SEQ ID NO: 81413 - protein, 9 aa, Homo Sapiens
SHIKASLAA

SEQ ID NO: 81414 - protein, 9 aa, Homo Sapiens
SHIKKDVTL

SEQ ID NO: 81415 - protein, 9 aa, Homo Sapiens
SHILASNTM

SEQ ID NO: 81416 - protein, 9 aa, Homo Sapiens
SHILPSAAV

SEQ ID NO: 81417 - protein, 9 aa, Homo Sapiens
SHIMAAKAV

SEQ ID NO: 81418 - protein, 9 aa, Homo Sapiens
SHINMKSVV

SEQ ID NO: 81419 - protein, 9 aa, Homo Sapiens
SHINTVFVL

SEQ ID NO: 81420 - protein, 9 aa, Homo Sapiens
SHIPEASFL

SEQ ID NO: 81421 - protein, 9 aa, Homo Sapiens
SHIQESRFL

SEQ ID NO: 81422 - protein, 9 aa, Homo Sapiens
SHISTAGTL

SEQ ID NO: 81423 - protein, 9 aa, Homo Sapiens
SHITPTQGF

SEQ ID NO: 81424 - protein, 9 aa, Homo Sapiens
SHITRAFTV

SEQ ID NO: 81425 - protein, 9 aa, Homo Sapiens
SHKPSGLVM

SEQ ID NO: 81426 - protein, 9 aa, Homo Sapiens
SHKWYAICL

SEQ ID NO: 81427 - protein, 9 aa, Homo Sapiens
SHLDKASVM

SEQ ID NO: 81428 - protein, 9 aa, Homo Sapiens
SHLDRCLLL

SEQ ID NO: 81429 - protein, 9 aa, Homo Sapiens
SHLDYDITL

SEQ ID NO: 81430 - protein, 9 aa, Homo Sapiens
SHLERGVVL

SEQ ID NO: 81431 - protein, 9 aa, Homo Sapiens
SHLPHTVTL

SEQ ID NO: 81432 - protein, 9 aa, Homo Sapiens
SHLPSSPAA

SEQ ID NO: 81433 - protein, 9 aa, Homo Sapiens
SHLSPGKSV

SEQ ID NO: 81434 - protein, 9 aa, Homo Sapiens
SHLSPRPPL

SEQ ID NO: 81435 - protein, 9 aa, Homo Sapiens
SHLTASPKL

SEQ ID NO: 81436 - protein, 9 aa, Homo Sapiens
SHMEPQVCL

SEQ ID NO: 81437 - protein, 9 aa, Homo Sapiens
SHMETTMKL

SEQ ID NO: 81438 - protein, 9 aa, Homo Sapiens
SHMLNNPEL

SEQ ID NO: 81439 - protein, 9 aa, Homo Sapiens
SHMPSRPEL

SEQ ID NO: 81440 - protein, 9 aa, Homo Sapiens
SHMTSTNSV

SEQ ID NO: 81441 - protein, 9 aa, Homo Sapiens
SHMVKSYSL

SEQ ID NO: 81442 - protein, 9 aa, Homo Sapiens
SHMYSASLL

SEQ ID NO: 81443 - protein, 9 aa, Homo Sapiens
SHNERVVAV

SEQ ID NO: 81444 - protein, 9 aa, Homo Sapiens
SHNIKNVVL

SEQ ID NO: 81445 - protein, 9 aa, Homo Sapiens
SHNISSLSM

SEQ ID NO: 81446 - protein, 9 aa, Homo Sapiens
SHNPLANIL

SEQ ID NO: 81447 - protein, 9 aa, Homo Sapiens
SHQARIATL

SEQ ID NO: 81448 - protein, 9 aa, Homo Sapiens
SHQESLSVL

SEQ ID NO: 81449 - protein, 9 aa, Homo Sapiens
SHQGDYAVL

SEQ ID NO: 81450 - protein, 9 aa, Homo Sapiens
SHQIRSLIL

SEQ ID NO: 81451 - protein, 9 aa, Homo Sapiens
SHQPYQTSL

SEQ ID NO: 81452 - protein, 9 aa, Homo Sapiens
SHQSSMTSL

SEQ ID NO: 81453 - protein, 9 aa, Homo Sapiens
SHQTGVVAL

SEQ ID NO: 81454 - protein, 9 aa, Homo Sapiens
SHRPDSPAL

SEQ ID NO: 81455 - protein, 9 aa, Homo Sapiens
SHSASSLSL

SEQ ID NO: 81456 - protein, 9 aa, Homo Sapiens
SHSEAVQEV

SEQ ID NO: 81457 - protein, 9 aa, Homo Sapiens
SHSELIHNL

SEQ ID NO: 81458 - protein, 9 aa, Homo Sapiens
SHSENAISV

SEQ ID NO: 81459 - protein, 9 aa, Homo Sapiens
SHSEWVSCV

SEQ ID NO: 81460 - protein, 9 aa, Homo Sapiens
SHSFVVNIL

SEQ ID NO: 81461 - protein, 9 aa, Homo Sapiens
SHSGPIHVL

SEQ ID NO: 81462 - protein, 9 aa, Homo Sapiens
SHSGPRPGL

SEQ ID NO: 81463 - protein, 9 aa, Homo Sapiens
SHSHEEPAM

SEQ ID NO: 81464 - protein, 9 aa, Homo Sapiens
SHSHVGYTL

SEQ ID NO: 81465 - protein, 9 aa, Homo Sapiens
SHSLAWTAL

SEQ ID NO: 81466 - protein, 9 aa, Homo Sapiens
SHSNSPTAL

SEQ ID NO: 81467 - protein, 9 aa, Homo Sapiens
SHSPAKPVL

SEQ ID NO: 81468 - protein, 9 aa, Homo Sapiens
SHSQRQPLL

SEQ ID NO: 81469 - protein, 9 aa, Homo Sapiens
SHSSFQASL

SEQ ID NO: 81470 - protein, 9 aa, Homo Sapiens
SHSSKIIIV

SEQ ID NO: 81471 - protein, 9 aa, Homo Sapiens
SHSSPSLYL

SEQ ID NO: 81472 - protein, 9 aa, Homo Sapiens
SHSSSFLSL

SEQ ID NO: 81473 - protein, 9 aa, Homo Sapiens
SHSSSVSPL

SEQ ID NO: 81474 - protein, 9 aa, Homo Sapiens
SHSSVILKM

SEQ ID NO: 81475 - protein, 9 aa, Homo Sapiens
SHSSVSSCL

SEQ ID NO: 81476 - protein, 9 aa, Homo Sapiens
SHSTPSSSI

SEQ ID NO: 81477 - protein, 9 aa, Homo Sapiens
SHSVTASAL

SEQ ID NO: 81478 - protein, 9 aa, Homo Sapiens
SHTDCILAV

SEQ ID NO: 81479 - protein, 9 aa, Homo Sapiens
SHTDVVPVF

SEQ ID NO: 81480 - protein, 9 aa, Homo Sapiens
SHTEYIIRV

SEQ ID NO: 81481 - protein, 9 aa, Homo Sapiens
SHTHVSVVI

SEQ ID NO: 81482 - protein, 9 aa, Homo Sapiens
SHTPWIVII

SEQ ID NO: 81483 - protein, 9 aa, Homo Sapiens
SHTSVGNIL

SEQ ID NO: 81484 - protein, 9 aa, Homo Sapiens
SHVAKAPSL

SEQ ID NO: 81485 - protein, 9 aa, Homo Sapiens
SHVLQNSTL

SEQ ID NO: 81486 - protein, 9 aa, Homo Sapiens
SHVNSGCQL

SEQ ID NO: 81487 - protein, 9 aa, Homo Sapiens
SHVPYPVAL

SEQ ID NO: 81488 - protein, 9 aa, Homo Sapiens
SHVRVTRAL

SEQ ID NO: 81489 - protein, 9 aa, Homo Sapiens
SHVSGTTTL

SEQ ID NO: 81490 - protein, 9 aa, Homo Sapiens
SHVTNAMVL

SEQ ID NO: 81491 - protein, 9 aa, Homo Sapiens
SHYDGIRSL

SEQ ID NO: 81492 - protein, 9 aa, Homo Sapiens
SHYEEAMGL

SEQ ID NO: 81493 - protein, 9 aa, Homo Sapiens
SHYERVQML

SEQ ID NO: 81494 - protein, 9 aa, Homo Sapiens
SHYFQSLEV

SEQ ID NO: 81495 - protein, 9 aa, Homo Sapiens
SHYIGTKSM

SEQ ID NO: 81496 - protein, 9 aa, Homo Sapiens
SHYLESRSI

SEQ ID NO: 81497 - protein, 9 aa, Homo Sapiens
SHYLFSEEI

SEQ ID NO: 81498 - protein, 9 aa, Homo Sapiens
SHYLGTLKV

SEQ ID NO: 81499 - protein, 9 aa, Homo Sapiens
SHYPPSIIL

SEQ ID NO: 81500 - protein, 9 aa, Homo Sapiens
SHYPYAEEV

SEQ ID NO: 81501 - protein, 9 aa, Homo Sapiens
SHYQYHLRL

SEQ ID NO: 81502 - protein, 9 aa, Homo Sapiens
SHYTTPMVL

SEQ ID NO: 81503 - protein, 9 aa, Homo Sapiens
SPIEKSGVL

SEQ ID NO: 81504 - protein, 9 aa, Homo Sapiens
SQAGGAPTL

SEQ ID NO: 81505 - protein, 9 aa, Homo Sapiens
SQDPGTHVV

SEQ ID NO: 81506 - protein, 9 aa, Homo Sapiens
SQDYGKHLL

SEQ ID NO: 81507 - protein, 9 aa, Homo Sapiens
SQSPPSPEL

SEQ ID NO: 81508 - protein, 9 aa, Homo Sapiens
SQTRNAPEL

SEQ ID NO: 81509 - protein, 9 aa, Homo Sapiens
SQYPFPVTL

SEQ ID NO: 81510 - protein, 9 aa, Homo Sapiens
SRISSSPTL

SEQ ID NO: 81511 - protein, 9 aa, Homo Sapiens
SRVGSDPVL

SEQ ID NO: 81512 - protein, 9 aa, Homo Sapiens
SRYDGQIAV

SEQ ID NO: 81513 - protein, 9 aa, Homo Sapiens
SRYYRAPEI

SEQ ID NO: 81514 - protein, 9 aa, Homo Sapiens
TDAHTVLAL

SEQ ID NO: 81515 - protein, 9 aa, Homo Sapiens
TEIERSPLL

SEQ ID NO: 81516 - protein, 9 aa, Homo Sapiens
THAAQQILL

SEQ ID NO: 81517 - protein, 9 aa, Homo Sapiens
THAAQQLKL

SEQ ID NO: 81518 - protein, 9 aa, Homo Sapiens
THADYVLEM

SEQ ID NO: 81519 - protein, 9 aa, Homo Sapiens
THAEAVKAL

SEQ ID NO: 81520 - protein, 9 aa, Homo Sapiens
THAEVHQSL

SEQ ID NO: 81521 - protein, 9 aa, Homo Sapiens
THAGAHLDL

SEQ ID NO: 81522 - protein, 9 aa, Homo Sapiens
THALEWPSL

SEQ ID NO: 81523 - protein, 9 aa, Homo Sapiens
THALLSVLL

SEQ ID NO: 81524 - protein, 9 aa, Homo Sapiens
THALPIPVI

SEQ ID NO: 81525 - protein, 9 aa, Homo Sapiens
THALQWPSL

SEQ ID NO: 81526 - protein, 9 aa, Homo Sapiens
THAMTFTAV

SEQ ID NO: 81527 - protein, 9 aa, Homo Sapiens
THANALTVM

SEQ ID NO: 81528 - protein, 9 aa, Homo Sapiens
THANDASAL

SEQ ID NO: 81529 - protein, 9 aa, Homo Sapiens
THANYKVTL

SEQ ID NO: 81530 - protein, 9 aa, Homo Sapiens
THAPATLEA

SEQ ID NO: 81531 - protein, 9 aa, Homo Sapiens
THAYSRVVL

SEQ ID NO: 81532 - protein, 9 aa, Homo Sapiens
THCLWTDQL

SEQ ID NO: 81533 - protein, 9 aa, Homo Sapiens
THCPDTPLL

SEQ ID NO: 81534 - protein, 9 aa, Homo Sapiens
THDGARVAM

SEQ ID NO: 81535 - protein, 9 aa, Homo Sapiens
THDGSILIV

SEQ ID NO: 81536 - protein, 9 aa, Homo Sapiens
THDIHALIL

SEQ ID NO: 81537 - protein, 9 aa, Homo Sapiens
THDLRIHQL

SEQ ID NO: 81538 - protein, 9 aa, Homo Sapiens
THDLVGPEL

SEQ ID NO: 81539 - protein, 9 aa, Homo Sapiens
THDPRTVTL

SEQ ID NO: 81540 - protein, 9 aa, Homo Sapiens
THEAGVHSV

SEQ ID NO: 81541 - protein, 9 aa, Homo Sapiens
THEDAVAAM

SEQ ID NO: 81542 - protein, 9 aa, Homo Sapiens
THEDPVIAV

SEQ ID NO: 81543 - protein, 9 aa, Homo Sapiens
THFESKTEL

SEQ ID NO: 81544 - protein, 9 aa, Homo Sapiens
THFFKVLIL

SEQ ID NO: 81545 - protein, 9 aa, Homo Sapiens
THFIQAGLL

SEQ ID NO: 81546 - protein, 9 aa, Homo Sapiens
THFLKAARL

SEQ ID NO: 81547 - protein, 9 aa, Homo Sapiens
THFLQPIYL

SEQ ID NO: 81548 - protein, 9 aa, Homo Sapiens
THFPFAIRV

SEQ ID NO: 81549 - protein, 9 aa, Homo Sapiens
THFPRVYGV

SEQ ID NO: 81550 - protein, 9 aa, Homo Sapiens
THFQLAYRL

SEQ ID NO: 81551 - protein, 9 aa, Homo Sapiens
THFSFPLRL

SEQ ID NO: 81552 - protein, 9 aa, Homo Sapiens
THFVDSEKL

SEQ ID NO: 81553 - protein, 9 aa, Homo Sapiens
THGHVGADL

SEQ ID NO: 81554 - protein, 9 aa, Homo Sapiens
THGPENPKL

SEQ ID NO: 81555 - protein, 9 aa, Homo Sapiens
THGPFEAVM

SEQ ID NO: 81556 - protein, 9 aa, Homo Sapiens
THGRVRLLL

SEQ ID NO: 81557 - protein, 9 aa, Homo Sapiens
THGTPADVL

SEQ ID NO: 81558 - protein, 9 aa, Homo Sapiens
THHAARVSL

SEQ ID NO: 81559 - protein, 9 aa, Homo Sapiens
THHLTAAAL

SEQ ID NO: 81560 - protein, 9 aa, Homo Sapiens
THIESCRQL

SEQ ID NO: 81561 - protein, 9 aa, Homo Sapiens
THILASNTM

SEQ ID NO: 81562 - protein, 9 aa, Homo Sapiens
THILRATKL

SEQ ID NO: 81563 - protein, 9 aa, Homo Sapiens
THIMKSADV

SEQ ID NO: 81564 - protein, 9 aa, Homo Sapiens
THINGESVL

SEQ ID NO: 81565 - protein, 9 aa, Homo Sapiens
THIPSGKCL

SEQ ID NO: 81566 - protein, 9 aa, Homo Sapiens
THISPNAIF

SEQ ID NO: 81567 - protein, 9 aa, Homo Sapiens
THITAQTAV

SEQ ID NO: 81568 - protein, 9 aa, Homo Sapiens
THIVVGHPL

SEQ ID NO: 81569 - protein, 9 aa, Homo Sapiens
THKFLAQIL

SEQ ID NO: 81570 - protein, 9 aa, Homo Sapiens
THLGGQPTL

SEQ ID NO: 81571 - protein, 9 aa, Homo Sapiens
THLIGSPFL

SEQ ID NO: 81572 - protein, 9 aa, Homo Sapiens
THLKQQLAL

SEQ ID NO: 81573 - protein, 9 aa, Homo Sapiens
THLLRLLVL

SEQ ID NO: 81574 - protein, 9 aa, Homo Sapiens
THLLRNPHL

SEQ ID NO: 81575 - protein, 9 aa, Homo Sapiens
THLPESPKL

SEQ ID NO: 81576 - protein, 9 aa, Homo Sapiens
THLPQTLTI

SEQ ID NO: 81577 - protein, 9 aa, Homo Sapiens
THLQTAPEL

SEQ ID NO: 81578 - protein, 9 aa, Homo Sapiens
THMELYSQL

SEQ ID NO: 81579 - protein, 9 aa, Homo Sapiens
THMENQAVV

SEQ ID NO: 81580 - protein, 9 aa, Homo Sapiens
THMNSSEKL

SEQ ID NO: 81581 - protein, 9 aa, Homo Sapiens
THMPSVVGV

SEQ ID NO: 81582 - protein, 9 aa, Homo Sapiens
THMSPSWTL

SEQ ID NO: 81583 - protein, 9 aa, Homo Sapiens
THMTAIVGM

SEQ ID NO: 81584 - protein, 9 aa, Homo Sapiens
THMVCRTAL

SEQ ID NO: 81585 - protein, 9 aa, Homo Sapiens
THNDSVVIV

SEQ ID NO: 81586 - protein, 9 aa, Homo Sapiens
THNEPGVRL

SEQ ID NO: 81587 - protein, 9 aa, Homo Sapiens
THNESVSAL

SEQ ID NO: 81588 - protein, 9 aa, Homo Sapiens
THNLGIPVL

SEQ ID NO: 81589 - protein, 9 aa, Homo Sapiens
THNPHQLHV

SEQ ID NO: 81590 - protein, 9 aa, Homo Sapiens
THNPQAPVL

SEQ ID NO: 81591 - protein, 9 aa, Homo Sapiens
THNPTNATL

SEQ ID NO: 81592 - protein, 9 aa, Homo Sapiens
THQAAHIQL

SEQ ID NO: 81593 - protein, 9 aa, Homo Sapiens
THQEAVSAL

SEQ ID NO: 81594 - protein, 9 aa, Homo Sapiens
THQKQISSL

SEQ ID NO: 81595 - protein, 9 aa, Homo Sapiens
THQPARYSL

SEQ ID NO: 81596 - protein, 9 aa, Homo Sapiens
THQPWFQVL

SEQ ID NO: 81597 - protein, 9 aa, Homo Sapiens
THQQGQPAL

SEQ ID NO: 81598 - protein, 9 aa, Homo Sapiens
THQQKVLRL

SEQ ID NO: 81599 - protein, 9 aa, Homo Sapiens
THQSGSLAL

SEQ ID NO: 81600 - protein, 9 aa, Homo Sapiens
THREDSVSL

SEQ ID NO: 81601 - protein, 9 aa, Homo Sapiens
THSDIQVKL

SEQ ID NO: 81602 - protein, 9 aa, Homo Sapiens
THSDQFLVA

SEQ ID NO: 81603 - protein, 9 aa, Homo Sapiens
THSEPLSTI

SEQ ID NO: 81604 - protein, 9 aa, Homo Sapiens
THSKAVEAL

SEQ ID NO: 81605 - protein, 9 aa, Homo Sapiens
THSLETQEL

SEQ ID NO: 81606 - protein, 9 aa, Homo Sapiens
THSLFFRSL

SEQ ID NO: 81607 - protein, 9 aa, Homo Sapiens
THSLPVVVI

SEQ ID NO: 81608 - protein, 9 aa, Homo Sapiens
THSLTTPVV

SEQ ID NO: 81609 - protein, 9 aa, Homo Sapiens
THSNMANAL

SEQ ID NO: 81610 - protein, 9 aa, Homo Sapiens
THSPAGTSV

SEQ ID NO: 81611 - protein, 9 aa, Homo Sapiens
THSPSNAQF

SEQ ID NO: 81612 - protein, 9 aa, Homo Sapiens
THSPSSSSI

SEQ ID NO: 81613 - protein, 9 aa, Homo Sapiens
THSPWFTSL

SEQ ID NO: 81614 - protein, 9 aa, Homo Sapiens
THSPYVAQI

SEQ ID NO: 81615 - protein, 9 aa, Homo Sapiens
THSSPSFNL

SEQ ID NO: 81616 - protein, 9 aa, Homo Sapiens
THSSVNRVL

SEQ ID NO: 81617 - protein, 9 aa, Homo Sapiens
THSTVRVSV

SEQ ID NO: 81618 - protein, 9 aa, Homo Sapiens
THTAQQAEL

SEQ ID NO: 81619 - protein, 9 aa, Homo Sapiens
THTDPVSQV

SEQ ID NO: 81620 - protein, 9 aa, Homo Sapiens
THTETGKVL

SEQ ID NO: 81621 - protein, 9 aa, Homo Sapiens
THTPSGLTV

SEQ ID NO: 81622 - protein, 9 aa, Homo Sapiens
THTQPGVQL

SEQ ID NO: 81623 - protein, 9 aa, Homo Sapiens
THTTVIHQL

SEQ ID NO: 81624 - protein, 9 aa, Homo Sapiens
THVERVLSL

SEQ ID NO: 81625 - protein, 9 aa, Homo Sapiens
THVFVIAEL

SEQ ID NO: 81626 - protein, 9 aa, Homo Sapiens
THVGPTPAI

SEQ ID NO: 81627 - protein, 9 aa, Homo Sapiens
THVGSAAAL

SEQ ID NO: 81628 - protein, 9 aa, Homo Sapiens
THVNTGRNL

SEQ ID NO: 81629 - protein, 9 aa, Homo Sapiens
THVSNGCQL

SEQ ID NO: 81630 - protein, 9 aa, Homo Sapiens
THYDPPRKL

SEQ ID NO: 81631 - protein, 9 aa, Homo Sapiens
THYFSCTML

SEQ ID NO: 81632 - protein, 9 aa, Homo Sapiens
THYGKVYLL

SEQ ID NO: 81633 - protein, 9 aa, Homo Sapiens
THYHLSSQV

SEQ ID NO: 81634 - protein, 9 aa, Homo Sapiens
TQAPGNPVL

SEQ ID NO: 81635 - protein, 9 aa, Homo Sapiens
TQAPPNVVL

SEQ ID NO: 81636 - protein, 9 aa, Homo Sapiens
TQAPPSVIL

SEQ ID NO: 81637 - protein, 9 aa, Homo Sapiens
TQEEKTRLL

SEQ ID NO: 81638 - protein, 9 aa, Homo Sapiens
TQMPDPKTF

SEQ ID NO: 81639 - protein, 9 aa, Homo Sapiens
TQMPHYSVL

SEQ ID NO: 81640 - protein, 9 aa, Homo Sapiens
TQYSKVLAL

SEQ ID NO: 81641 - protein, 9 aa, Homo Sapiens
TRAPPSAVA

SEQ ID NO: 81642 - protein, 9 aa, Homo Sapiens
TREAGVRSL

SEQ ID NO: 81643 - protein, 9 aa, Homo Sapiens
TRIEQNLVL

SEQ ID NO: 81644 - protein, 9 aa, Homo Sapiens
TRIGLAPVL

SEQ ID NO: 81645 - protein, 9 aa, Homo Sapiens
TRISNDLEL

SEQ ID NO: 81646 - protein, 9 aa, Homo Sapiens
TRLQHQTEL

SEQ ID NO: 81647 - protein, 9 aa, Homo Sapiens
VHAQIVSTL

SEQ ID NO: 81648 - protein, 9 aa, Homo Sapiens
VHAYIISSL

SEQ ID NO: 81649 - protein, 9 aa, Homo Sapiens
VHDLPAAVL

SEQ ID NO: 81650 - protein, 9 aa, Homo Sapiens
VHEEHVRMV

SEQ ID NO: 81651 - protein, 9 aa, Homo Sapiens
VHFEESSKL

SEQ ID NO: 81652 - protein, 9 aa, Homo Sapiens
VHFHPSVAL

SEQ ID NO: 81653 - protein, 9 aa, Homo Sapiens
VHFIDAPSL

SEQ ID NO: 81654 - protein, 9 aa, Homo Sapiens
VHFIKPLLL

SEQ ID NO: 81655 - protein, 9 aa, Homo Sapiens
VHFSGKLLL

SEQ ID NO: 81656 - protein, 9 aa, Homo Sapiens
VHFSKVRSL

SEQ ID NO: 81657 - protein, 9 aa, Homo Sapiens
VHHVQLESL

SEQ ID NO: 81658 - protein, 9 aa, Homo Sapiens
VHIHPSSAL

SEQ ID NO: 81659 - protein, 9 aa, Homo Sapiens
VHINHQPFL

SEQ ID NO: 81660 - protein, 9 aa, Homo Sapiens
VHINHQPYL

SEQ ID NO: 81661 - protein, 9 aa, Homo Sapiens
VHIPGARCL

SEQ ID NO: 81662 - protein, 9 aa, Homo Sapiens
VHISRVKSV

SEQ ID NO: 81663 - protein, 9 aa, Homo Sapiens
VHIVRSTSL

SEQ ID NO: 81664 - protein, 9 aa, Homo Sapiens
VHKPGPIVL

SEQ ID NO: 81665 - protein, 9 aa, Homo Sapiens
VHLERTPKL

SEQ ID NO: 81666 - protein, 9 aa, Homo Sapiens
VHLKFSAKL

SEQ ID NO: 81667 - protein, 9 aa, Homo Sapiens
VHMDVVELL

SEQ ID NO: 81668 - protein, 9 aa, Homo Sapiens
VHMPKHPEL

SEQ ID NO: 81669 - protein, 9 aa, Homo Sapiens
VHQPWASLL

SEQ ID NO: 81670 - protein, 9 aa, Homo Sapiens
VHSAERLAL

SEQ ID NO: 81671 - protein, 9 aa, Homo Sapiens
VHSEQVFAL

SEQ ID NO: 81672 - protein, 9 aa, Homo Sapiens
VHSPHAIVV

SEQ ID NO: 81673 - protein, 9 aa, Homo Sapiens
VHSPTFCQL

SEQ ID NO: 81674 - protein, 9 aa, Homo Sapiens
VHSPYMQCL

SEQ ID NO: 81675 - protein, 9 aa, Homo Sapiens
VHSSLSSVL

SEQ ID NO: 81676 - protein, 9 aa, Homo Sapiens
VHTDKSLTL

SEQ ID NO: 81677 - protein, 9 aa, Homo Sapiens
VHVNTSAVL

SEQ ID NO: 81678 - protein, 9 aa, Homo Sapiens
VHYGHSNQL

SEQ ID NO: 81679 - protein, 9 aa, Homo Sapiens
VHYHPSKVA

SEQ ID NO: 81680 - protein, 9 aa, Homo Sapiens
VHYKYTVVM

SEQ ID NO: 81681 - protein, 9 aa, Homo Sapiens
VHYTLPASL

SEQ ID NO: 81682 - protein, 9 aa, Homo Sapiens
WHAPPVTTY

SEQ ID NO: 81683 - protein, 9 aa, Homo Sapiens
WHDGKQVHL

SEQ ID NO: 81684 - protein, 9 aa, Homo Sapiens
WHEEVLRQL

SEQ ID NO: 81685 - protein, 9 aa, Homo Sapiens
WHHGPPAVL

SEQ ID NO: 81686 - protein, 9 aa, Homo Sapiens
WHIDTILHV

SEQ ID NO: 81687 - protein, 9 aa, Homo Sapiens
WHNHLNPEV

SEQ ID NO: 81688 - protein, 9 aa, Homo Sapiens
WHNRVGQIL

SEQ ID NO: 81689 - protein, 9 aa, Homo Sapiens
WHQLTLQVL

SEQ ID NO: 81690 - protein, 9 aa, Homo Sapiens
WHSFTQPRL

SEQ ID NO: 81691 - protein, 9 aa, Homo Sapiens
WHVPEHAVV

SEQ ID NO: 81692 - protein, 9 aa, Homo Sapiens
WHWDTTQSL

SEQ ID NO: 81693 - protein, 9 aa, Homo Sapiens
WHYSHPPLL

SEQ ID NO: 81694 - protein, 9 aa, Homo Sapiens
WPHQPIENL

SEQ ID NO: 81695 - protein, 9 aa, Homo Sapiens
WQYRQLSAL

SEQ ID NO: 81696 - protein, 9 aa, Homo Sapiens
WRDPDEPVL

SEQ ID NO: 81697 - protein, 9 aa, Homo Sapiens
YHADIYDKV

SEQ ID NO: 81698 - protein, 9 aa, Homo Sapiens
YHAETIKNV

SEQ ID NO: 81699 - protein, 9 aa, Homo Sapiens
YHAGKCLSL

SEQ ID NO: 81700 - protein, 9 aa, Homo Sapiens
YHAHFVSML

SEQ ID NO: 81701 - protein, 9 aa, Homo Sapiens
YHAIPSMSH

SEQ ID NO: 81702 - protein, 9 aa, Homo Sapiens
YHALASFVF

SEQ ID NO: 81703 - protein, 9 aa, Homo Sapiens
YHALPATVW

SEQ ID NO: 81704 - protein, 9 aa, Homo Sapiens
YHANPRLWL

SEQ ID NO: 81705 - protein, 9 aa, Homo Sapiens
YHAPPLSAI

SEQ ID NO: 81706 - protein, 9 aa, Homo Sapiens
YHASLNRAL

SEQ ID NO: 81707 - protein, 9 aa, Homo Sapiens
YHDINVYSL

SEQ ID NO: 81708 - protein, 9 aa, Homo Sapiens
YHDKNIVLL

SEQ ID NO: 81709 - protein, 9 aa, Homo Sapiens
YHDSRIHVC

SEQ ID NO: 81710 - protein, 9 aa, Homo Sapiens
YHDYGHLEL

SEQ ID NO: 81711 - protein, 9 aa, Homo Sapiens
YHEEKERLM

SEQ ID NO: 81712 - protein, 9 aa, Homo Sapiens
YHEGSAPAL

SEQ ID NO: 81713 - protein, 9 aa, Homo Sapiens
YHESGHAII

SEQ ID NO: 81714 - protein, 9 aa, Homo Sapiens
YHFIGSLAV

SEQ ID NO: 81715 - protein, 9 aa, Homo Sapiens
YHFPDQQEL

SEQ ID NO: 81716 - protein, 9 aa, Homo Sapiens
YHFQKTFTV

SEQ ID NO: 81717 - protein, 9 aa, Homo Sapiens
YHGDAGDSL

SEQ ID NO: 81718 - protein, 9 aa, Homo Sapiens
YHGDSDLQL

SEQ ID NO: 81719 - protein, 9 aa, Homo Sapiens
YHGDSVASL

SEQ ID NO: 81720 - protein, 9 aa, Homo Sapiens
YHGNTNPEL

SEQ ID NO: 81721 - protein, 9 aa, Homo Sapiens
YHGPKALKV

SEQ ID NO: 81722 - protein, 9 aa, Homo Sapiens
YHHGEQALM

SEQ ID NO: 81723 - protein, 9 aa, Homo Sapiens
YHHRFPQAL

SEQ ID NO: 81724 - protein, 9 aa, Homo Sapiens
YHIDGARFL

SEQ ID NO: 81725 - protein, 9 aa, Homo Sapiens
YHIDLDPHF

SEQ ID NO: 81726 - protein, 9 aa, Homo Sapiens
YHIGHFSLV

SEQ ID NO: 81727 - protein, 9 aa, Homo Sapiens
YHILNDPEL

SEQ ID NO: 81728 - protein, 9 aa, Homo Sapiens
YHILRDPEL

SEQ ID NO: 81729 - protein, 9 aa, Homo Sapiens
YHIPQNSSL

SEQ ID NO: 81730 - protein, 9 aa, Homo Sapiens
YHIQQNEAL

SEQ ID NO: 81731 - protein, 9 aa, Homo Sapiens
YHIQRTIHL

SEQ ID NO: 81732 - protein, 9 aa, Homo Sapiens
YHISVQNMM

SEQ ID NO: 81733 - protein, 9 aa, Homo Sapiens
YHKEQAAQL

SEQ ID NO: 81734 - protein, 9 aa, Homo Sapiens
YHLLHIIII

SEQ ID NO: 81735 - protein, 9 aa, Homo Sapiens
YHMDALIGV

SEQ ID NO: 81736 - protein, 9 aa, Homo Sapiens
YHMDHHRYL

SEQ ID NO: 81737 - protein, 9 aa, Homo Sapiens
YHMNYFLVL

SEQ ID NO: 81738 - protein, 9 aa, Homo Sapiens
YHNPKIALL

SEQ ID NO: 81739 - protein, 9 aa, Homo Sapiens
YHNQSQGLL

SEQ ID NO: 81740 - protein, 9 aa, Homo Sapiens
YHNVKPAAL

SEQ ID NO: 81741 - protein, 9 aa, Homo Sapiens
YHQDAFMQL

SEQ ID NO: 81742 - protein, 9 aa, Homo Sapiens
YHQGKISSL

SEQ ID NO: 81743 - protein, 9 aa, Homo Sapiens
YHQHFAAHL

SEQ ID NO: 81744 - protein, 9 aa, Homo Sapiens
YHQHFDSVM

SEQ ID NO: 81745 - protein, 9 aa, Homo Sapiens
YHQKSVLIM

SEQ ID NO: 81746 - protein, 9 aa, Homo Sapiens
YHQSEALAL

SEQ ID NO: 81747 - protein, 9 aa, Homo Sapiens
YHQVTRAVL

SEQ ID NO: 81748 - protein, 9 aa, Homo Sapiens
YHSENPRAL

SEQ ID NO: 81749 - protein, 9 aa, Homo Sapiens
YHSEVPVSL

SEQ ID NO: 81750 - protein, 9 aa, Homo Sapiens
YHSEYFLAL

SEQ ID NO: 81751 - protein, 9 aa, Homo Sapiens
YHSFVSSVF

SEQ ID NO: 81752 - protein, 9 aa, Homo Sapiens
YHSNQVVRM

SEQ ID NO: 81753 - protein, 9 aa, Homo Sapiens
YHSPADRVM

SEQ ID NO: 81754 - protein, 9 aa, Homo Sapiens
YHSVGDSVL

SEQ ID NO: 81755 - protein, 9 aa, Homo Sapiens
YHTFRPAVL

SEQ ID NO: 81756 - protein, 9 aa, Homo Sapiens
YHTQTTPLI

SEQ ID NO: 81757 - protein, 9 aa, Homo Sapiens
YHTVAGNDI

SEQ ID NO: 81758 - protein, 9 aa, Homo Sapiens
YHVDSLLQL

SEQ ID NO: 81759 - protein, 9 aa, Homo Sapiens
YHVPSGKIL

SEQ ID NO: 81760 - protein, 9 aa, Homo Sapiens
YHYFSKMKA

SEQ ID NO: 81761 - protein, 9 aa, Homo Sapiens
YHYGTLSLL

SEQ ID NO: 81762 - protein, 9 aa, Homo Sapiens
YHYKSKVRV

SEQ ID NO: 81763 - protein, 9 aa, Homo Sapiens
YHYLLDPKI

SEQ ID NO: 81764 - protein, 9 aa, Homo Sapiens
YHYQKVAVH

SEQ ID NO: 81765 - protein, 9 aa, Homo Sapiens
YPYPYPHTL

SEQ ID NO: 81766 - protein, 9 aa, Homo Sapiens
YQAEAREAL

SEQ ID NO: 81767 - protein, 9 aa, Homo Sapiens
YQEKGVRVL

SEQ ID NO: 81768 - protein, 9 aa, Homo Sapiens
YQSKRQPIL

SEQ ID NO: 81769 - protein, 9 aa, Homo Sapiens
YQYLLVTAL

SEQ ID NO: 81770 - protein, 9 aa, Homo Sapiens
YRAPASAAA

SEQ ID NO: 81771 - protein, 10 aa, Homo Sapiens
AHADPTELAL

SEQ ID NO: 81772 - protein, 10 aa, Homo Sapiens
AHALPAQVAF

SEQ ID NO: 81773 - protein, 10 aa, Homo Sapiens
AHAPLTNIPL

SEQ ID NO: 81774 - protein, 10 aa, Homo Sapiens
AHCAHVFTTV

SEQ ID NO: 81775 - protein, 10 aa, Homo Sapiens
AHCHQHGLVL

SEQ ID NO: 81776 - protein, 10 aa, Homo Sapiens
AHFPGLASEL

SEQ ID NO: 81777 - protein, 10 aa, Homo Sapiens
AHIDGDHLTL

SEQ ID NO: 81778 - protein, 10 aa, Homo Sapiens
AHIDSGKTTL

SEQ ID NO: 81779 - protein, 10 aa, Homo Sapiens
AHIEKDFIAF

SEQ ID NO: 81780 - protein, 10 aa, Homo Sapiens
AHISSSAVAM

SEQ ID NO: 81781 - protein, 10 aa, Homo Sapiens
AHQQSIPAVL

SEQ ID NO: 81782 - protein, 10 aa, Homo Sapiens
AHSGFPEIAF

SEQ ID NO: 81783 - protein, 10 aa, Homo Sapiens
AHYQRADFVL

SEQ ID NO: 81784 - protein, 10 aa, Homo Sapiens
APAPAEKTPV

SEQ ID NO: 81785 - protein, 10 aa, Homo Sapiens
DHIRPGPCRL

SEQ ID NO: 81786 - protein, 10 aa, Homo Sapiens
DHNKNDKILP

SEQ ID NO: 81787 - protein, 10 aa, Homo Sapiens
FHARPGLSTL

SEQ ID NO: 81788 - protein, 10 aa, Homo Sapiens
FHGPPEPVLL

SEQ ID NO: 81789 - protein, 10 aa, Homo Sapiens
FHHEASGVTV

SEQ ID NO: 81790 - protein, 10 aa, Homo Sapiens
FHIAGDNNPL

SEQ ID NO: 81791 - protein, 10 aa, Homo Sapiens
FHIQAQKLGL

SEQ ID NO: 81792 - protein, 10 aa, Homo Sapiens
FHITVGKAIP

SEQ ID NO: 81793 - protein, 10 aa, Homo Sapiens
FHMDPSGTFV

SEQ ID NO: 81794 - protein, 10 aa, Homo Sapiens
FHNPHVNPLP

SEQ ID NO: 81795 - protein, 10 aa, Homo Sapiens
FHVEPGLQRL

SEQ ID NO: 81796 - protein, 10 aa, Homo Sapiens
FHVINTGNSM

SEQ ID NO: 81797 - protein, 10 aa, Homo Sapiens
GAHHGPGVLG

SEQ ID NO: 81798 - protein, 10 aa, Homo Sapiens
GHAPFTATSL

SEQ ID NO: 81799 - protein, 10 aa, Homo Sapiens
GHDPRAQGTL

SEQ ID NO: 81800 - protein, 10 aa, Homo Sapiens
GHDPRTAVQL

SEQ ID NO: 81801 - protein, 10 aa, Homo Sapiens
GHIDSGKTAL

SEQ ID NO: 81802 - protein, 10 aa, Homo Sapiens
GHMSTTGCVL

SEQ ID NO: 81803 - protein, 10 aa, Homo Sapiens
GHVDAGKSTI

SEQ ID NO: 81804 - protein, 10 aa, Homo Sapiens
GPYGGGGQYF

SEQ ID NO: 81805 - protein, 10 aa, Homo Sapiens
GRSPSPKTSL

SEQ ID NO: 81806 - protein, 10 aa, Homo Sapiens
HHAAAPAVSL

SEQ ID NO: 81807 - protein, 10 aa, Homo Sapiens
HHADDSFLVL

SEQ ID NO: 81808 - protein, 10 aa, Homo Sapiens
HHANFPQYVM

SEQ ID NO: 81809 - protein, 10 aa, Homo Sapiens
HHASLKGHAL

SEQ ID NO: 81810 - protein, 10 aa, Homo Sapiens
HHCPDVPILL

SEQ ID NO: 81811 - protein, 10 aa, Homo Sapiens
HHCPHTPILL

SEQ ID NO: 81812 - protein, 10 aa, Homo Sapiens
HHCPNTPIIL

SEQ ID NO: 81813 - protein, 10 aa, Homo Sapiens
HHCPSTPIIL

SEQ ID NO: 81814 - protein, 10 aa, Homo Sapiens
HHDSHSSVIL

SEQ ID NO: 81815 - protein, 10 aa, Homo Sapiens
HHEDNLLRQL

SEQ ID NO: 81816 - protein, 10 aa, Homo Sapiens
HHELHAAHLL

SEQ ID NO: 81817 - protein, 10 aa, Homo Sapiens
HHFGSSGMTL

SEQ ID NO: 81818 - protein, 10 aa, Homo Sapiens
HHHHPPMIAL

SEQ ID NO: 81819 - protein, 10 aa, Homo Sapiens
HHIETGGGQL

SEQ ID NO: 81820 - protein, 10 aa, Homo Sapiens
HHIIENNHIL

SEQ ID NO: 81821 - protein, 10 aa, Homo Sapiens
HHIPDVITYL

SEQ ID NO: 81822 - protein, 10 aa, Homo Sapiens
HHIPEQTTQL

SEQ ID NO: 81823 - protein, 10 aa, Homo Sapiens
HHMPGQPPYM

SEQ ID NO: 81824 - protein, 10 aa, Homo Sapiens
HHSPGQTPTL

SEQ ID NO: 81825 - protein, 10 aa, Homo Sapiens
HHSPVGTRVM

SEQ ID NO: 81826 - protein, 10 aa, Homo Sapiens
HHVENKGATL

SEQ ID NO: 81827 - protein, 10 aa, Homo Sapiens
HHVVPTEPLP

SEQ ID NO: 81828 - protein, 10 aa, Homo Sapiens
HHYEGAVVIL

SEQ ID NO: 81829 - protein, 10 aa, Homo Sapiens
HHYKPTPLYF

SEQ ID NO: 81830 - protein, 10 aa, Homo Sapiens
HHYPGPGNHF

SEQ ID NO: 81831 - protein, 10 aa, Homo Sapiens
HHYSGNNIEL

SEQ ID NO: 81832 - protein, 10 aa, Homo Sapiens
HLTLDGLPPL

SEQ ID NO: 81833 - protein, 10 aa, Homo Sapiens
IHDPGRGAPL

SEQ ID NO: 81834 - protein, 10 aa, Homo Sapiens
IHHSGAKVVL

SEQ ID NO: 81835 - protein, 10 aa, Homo Sapiens
IHIKPGAKVL

SEQ ID NO: 81836 - protein, 10 aa, Homo Sapiens
IHINIGALEL

SEQ ID NO: 81837 - protein, 10 aa, Homo Sapiens
IHIPFISKEL

SEQ ID NO: 81838 - protein, 10 aa, Homo Sapiens
IHSPLPSAVL

SEQ ID NO: 81839 - protein, 10 aa, Homo Sapiens
IHSQHPETQL

SEQ ID NO: 81840 - protein, 10 aa, Homo Sapiens
IHVGQAGVQI

SEQ ID NO: 81841 - protein, 10 aa, Homo Sapiens
LHDPALHRTL

SEQ ID NO: 81842 - protein, 10 aa, Homo Sapiens
LHIDPNFASL

SEQ ID NO: 81843 - protein, 10 aa, Homo Sapiens
LPEEEQQRVL

SEQ ID NO: 81844 - protein, 10 aa, Homo Sapiens
LYKEAMKNLL

SEQ ID NO: 81845 - protein, 10 aa, Homo Sapiens
MHLLSVGSIL

SEQ ID NO: 81846 - protein, 10 aa, Homo Sapiens
MHQHKSITTL

SEQ ID NO: 81847 - protein, 10 aa, Homo Sapiens
MHSPAGRSVF

SEQ ID NO: 81848 - protein, 10 aa, Homo Sapiens
MHVPAPKLAL

SEQ ID NO: 81849 - protein, 10 aa, Homo Sapiens
NHAVGPSTAM

SEQ ID NO: 81850 - protein, 10 aa, Homo Sapiens
NHAVGPSTSL

SEQ ID NO: 81851 - protein, 10 aa, Homo Sapiens
NHDPNTHHCL

SEQ ID NO: 81852 - protein, 10 aa, Homo Sapiens
NHIEPLKIQL

SEQ ID NO: 81853 - protein, 10 aa, Homo Sapiens
NHIGISIAGL

SEQ ID NO: 81854 - protein, 10 aa, Homo Sapiens
NHSAASAMAL

SEQ ID NO: 81855 - protein, 10 aa, Homo Sapiens
NHVTPPNVSL

SEQ ID NO: 81856 - protein, 10 aa, Homo Sapiens
NPFGGASHAK

SEQ ID NO: 81857 - protein, 10 aa, Homo Sapiens
QHADPPVQIL

SEQ ID NO: 81858 - protein, 10 aa, Homo Sapiens
QHFEHLAPVL

SEQ ID NO: 81859 - protein, 10 aa, Homo Sapiens
QHFTGLHASL

SEQ ID NO: 81860 - protein, 10 aa, Homo Sapiens
QHIGKPSTIR

SEQ ID NO: 81861 - protein, 10 aa, Homo Sapiens
QHLQATGVSL

SEQ ID NO: 81862 - protein, 10 aa, Homo Sapiens
QQVKYPVNSL

SEQ ID NO: 81863 - protein, 10 aa, Homo Sapiens
RHSGPLRVAM

SEQ ID NO: 81864 - protein, 10 aa, Homo Sapiens
SHAGALQESL

SEQ ID NO: 81865 - protein, 10 aa, Homo Sapiens
SHCTFVIEAL

SEQ ID NO: 81866 - protein, 10 aa, Homo Sapiens
SHEKGCFRTL

SEQ ID NO: 81867 - protein, 10 aa, Homo Sapiens
SHLESVLHNT

SEQ ID NO: 81868 - protein, 10 aa, Homo Sapiens
SHYGQSGISM

SEQ ID NO: 81869 - protein, 10 aa, Homo Sapiens
SHYQPRGQLL

SEQ ID NO: 81870 - protein, 10 aa, Homo Sapiens
THALTSASTL

SEQ ID NO: 81871 - protein, 10 aa, Homo Sapiens
THDDSHLVSL

SEQ ID NO: 81872 - protein, 10 aa, Homo Sapiens
THDNREHLAM

SEQ ID NO: 81873 - protein, 10 aa, Homo Sapiens
THIQTSQQAL

SEQ ID NO: 81874 - protein, 10 aa, Homo Sapiens
THIRVGVVGL

SEQ ID NO: 81875 - protein, 10 aa, Homo Sapiens
THISSQNSEL

SEQ ID NO: 81876 - protein, 10 aa, Homo Sapiens
THISSSGQNL

SEQ ID NO: 81877 - protein, 10 aa, Homo Sapiens
THMSPSWTLL

SEQ ID NO: 81878 - protein, 10 aa, Homo Sapiens
THNPQAPVLL

SEQ ID NO: 81879 - protein, 10 aa, Homo Sapiens
THRTDLNPIL

SEQ ID NO: 81880 - protein, 10 aa, Homo Sapiens
THYDHVLIEL

SEQ ID NO: 81881 - protein, 10 aa, Homo Sapiens
TQNPYHQQAL

SEQ ID NO: 81882 - protein, 10 aa, Homo Sapiens
VHAGVPASYL

SEQ ID NO: 81883 - protein, 10 aa, Homo Sapiens
VHAPPMQLGF

SEQ ID NO: 81884 - protein, 10 aa, Homo Sapiens
VHEWHKRVAL

SEQ ID NO: 81885 - protein, 10 aa, Homo Sapiens
VHYDRSGRSL

SEQ ID NO: 81886 - protein, 10 aa, Homo Sapiens
WHAKGFGMTL

SEQ ID NO: 81887 - protein, 10 aa, Homo Sapiens
YHAETIKNVR

SEQ ID NO: 81888 - protein, 10 aa, Homo Sapiens
YHAPGKKREF

SEQ ID NO: 81889 - protein, 10 aa, Homo Sapiens
YHAPPRLHHL

SEQ ID NO: 81890 - protein, 10 aa, Homo Sapiens
YHDSRIHVCL

SEQ ID NO: 81891 - protein, 10 aa, Homo Sapiens
YHDTRIHACL

SEQ ID NO: 81892 - protein, 10 aa, Homo Sapiens
YHDTRIHVCL

SEQ ID NO: 81893 - protein, 10 aa, Homo Sapiens
YHETSKMKVL

SEQ ID NO: 81894 - protein, 10 aa, Homo Sapiens
YHFYQGLVYL

SEQ ID NO: 81895 - protein, 10 aa, Homo Sapiens
YHHEAGVTAL

SEQ ID NO: 81896 - protein, 10 aa, Homo Sapiens
YHIDVGTQTF

SEQ ID NO: 81897 - protein, 10 aa, Homo Sapiens
YHIEGSRQAL

SEQ ID NO: 81898 - protein, 10 aa, Homo Sapiens
YHISLEHEIL

SEQ ID NO: 81899 - protein, 10 aa, Homo Sapiens
YHLETRKPVL

SEQ ID NO: 81900 - protein, 10 aa, Homo Sapiens
YHQPAPIAQL

SEQ ID NO: 81901 - protein, 10 aa, Homo Sapiens
YHVDPAQRSL

SEQ ID NO: 81902 - protein, 10 aa, Homo Sapiens
YHYDMNTASL

SEQ ID NO: 81903 - protein, 10 aa, Homo Sapiens
YHYFSKMKAL

SEQ ID NO: 81904 - protein, 10 aa, Homo Sapiens
YHYPYTYSTL

SEQ ID NO: 81905 - protein, 10 aa, Homo Sapiens
YQDPSFHLSL

SEQ ID NO: 81906 - protein, 11 aa, Homo Sapiens
AHEEANAARKL

SEQ ID NO: 81907 - protein, 11 aa, Homo Sapiens
FHHESKENFAL

SEQ ID NO: 81908 - protein, 11 aa, Homo Sapiens
GGASHAKGIVL

SEQ ID NO: 81909 - protein, 11 aa, Homo Sapiens
HFDLSHGSAQV

SEQ ID NO: 81910 - protein, 11 aa, Homo Sapiens
HHAESKNGWTL

SEQ ID NO: 81911 - protein, 11 aa, Homo Sapiens
HHCPSTPIILV

SEQ ID NO: 81912 - protein, 11 aa, Homo Sapiens
HHFNSGAQSVL

SEQ ID NO: 81913 - protein, 11 aa, Homo Sapiens
HHIETGGGQLP

SEQ ID NO: 81914 - protein, 11 aa, Homo Sapiens
HHIMPTVHTVL

SEQ ID NO: 81915 - protein, 11 aa, Homo Sapiens
HHNPNLVYALL

SEQ ID NO: 81916 - protein, 11 aa, Homo Sapiens
HHQYPSRSSGL

SEQ ID NO: 81917 - protein, 11 aa, Homo Sapiens
HHYPNQSNTTL

SEQ ID NO: 81918 - protein, 11 aa, Homo Sapiens
HLALDPHHQLL

SEQ ID NO: 81919 - protein, 11 aa, Homo Sapiens
IHEDSTNRRRL

SEQ ID NO: 81920 - protein, 11 aa, Homo Sapiens
ISDHYPVEVML

SEQ ID NO: 81921 - protein, 11 aa, Homo Sapiens
ISGHYDRSKSL

SEQ ID NO: 81922 - protein, 11 aa, Homo Sapiens
LHIDPKTGVAV

SEQ ID NO: 81923 - protein, 11 aa, Homo Sapiens
LHYDPNKRISA

SEQ ID NO: 81924 - protein, 11 aa, Homo Sapiens
LPEDEGHTRTL

SEQ ID NO: 81925 - protein, 11 aa, Homo Sapiens
QHINPLLPACL

SEQ ID NO: 81926 - protein, 11 aa, Homo Sapiens
SHEYNERVRTL

SEQ ID NO: 81927 - protein, 11 aa, Homo Sapiens
SHFDSQQPAVL

SEQ ID NO: 81928 - protein, 11 aa, Homo Sapiens
SHITPSTQQHL

SEQ ID NO: 81929 - protein, 11 aa, Homo Sapiens
SHTTNPEQTLP

SEQ ID NO: 81930 - protein, 11 aa, Homo Sapiens
THAPTHSDYTM

SEQ ID NO: 81931 - protein, 11 aa, Homo Sapiens
THIKPTKIVSL

SEQ ID NO: 81932 - protein, 11 aa, Homo Sapiens
THMTAIVGMAL

SEQ ID NO: 81933 - protein, 11 aa, Homo Sapiens
THQDVHLGETL

SEQ ID NO: 81934 - protein, 11 aa, Homo Sapiens
THVDSHGHNVF

SEQ ID NO: 81935 - protein, 11 aa, Homo Sapiens
VHFSLPVLHPL

SEQ ID NO: 81936 - protein, 11 aa, Homo Sapiens
YHAPPLSAITF

SEQ ID NO: 81937 - protein, 11 aa, Homo Sapiens
YHFVPGTTAVL

SEQ ID NO: 81938 - protein, 11 aa, Homo Sapiens
YHQHFDSVMQL

SEQ ID NO: 81939 - protein, 11 aa, Homo Sapiens
YHVESTVNSEL

SEQ ID NO: 81940 - protein, 11 aa, Homo Sapiens
YHVKDSSRHVI

SEQ ID NO: 81941 - protein, 8 aa, Homo Sapiens
AAAKALRI

SEQ ID NO: 81942 - protein, 8 aa, Homo Sapiens
AIYHVLHF

SEQ ID NO: 81943 - protein, 8 aa, Homo Sapiens
ASFKPLGL

SEQ ID NO: 81944 - protein, 8 aa, Homo Sapiens
ATTEALKL

SEQ ID NO: 81945 - protein, 8 aa, Homo Sapiens
ESFKALLI

SEQ ID NO: 81946 - protein, 8 aa, Homo Sapiens
FAYPAIRY

SEQ ID NO: 81947 - protein, 8 aa, Homo Sapiens
FGYKGLKI

SEQ ID NO: 81948 - protein, 8 aa, Homo Sapiens
FSMEALEL

SEQ ID NO: 81949 - protein, 8 aa, Homo Sapiens
FSSPPLSL

SEQ ID NO: 81950 - protein, 8 aa, Homo Sapiens
FSVEPLLI

SEQ ID NO: 81951 - protein, 8 aa, Homo Sapiens
FSYKTIVM

SEQ ID NO: 81952 - protein, 8 aa, Homo Sapiens
FTADPLSL

SEQ ID NO: 81953 - protein, 8 aa, Homo Sapiens
FTANALAL

SEQ ID NO: 81954 - protein, 8 aa, Homo Sapiens
FTHEALTL

SEQ ID NO: 81955 - protein, 8 aa, Homo Sapiens
GSGKTLAY

SEQ ID NO: 81956 - protein, 8 aa, Homo Sapiens
GSGKTLSY

SEQ ID NO: 81957 - protein, 8 aa, Homo Sapiens
GTGKTLSL

SEQ ID NO: 81958 - protein, 8 aa, Homo Sapiens
HSWKALVY

SEQ ID NO: 81959 - protein, 8 aa, Homo Sapiens
HSYRVLYL

SEQ ID NO: 81960 - protein, 8 aa, Homo Sapiens
IATIALMI

SEQ ID NO: 81961 - protein, 8 aa, Homo Sapiens
ISAKPLEM

SEQ ID NO: 81962 - protein, 8 aa, Homo Sapiens
ISHTALVL

SEQ ID NO: 81963 - protein, 8 aa, Homo Sapiens
ISVHPLTL

SEQ ID NO: 81964 - protein, 8 aa, Homo Sapiens
ITFLPLLL

SEQ ID NO: 81965 - protein, 8 aa, Homo Sapiens
ITRYPLLI

SEQ ID NO: 81966 - protein, 8 aa, Homo Sapiens
KAGKALVI

SEQ ID NO: 81967 - protein, 8 aa, Homo Sapiens
KAWKALEI

SEQ ID NO: 81968 - protein, 8 aa, Homo Sapiens
KAYKALKM

SEQ ID NO: 81969 - protein, 8 aa, Homo Sapiens
KDWVLKIL

SEQ ID NO: 81970 - protein, 8 aa, Homo Sapiens
KSITPLML

SEQ ID NO: 81971 - protein, 8 aa, Homo Sapiens
KSLQAIKI

SEQ ID NO: 81972 - protein, 8 aa, Homo Sapiens
KSWTALRL

SEQ ID NO: 81973 - protein, 8 aa, Homo Sapiens
KTFEALKF

SEQ ID NO: 81974 - protein, 8 aa, Homo Sapiens
KTVKPLSL

SEQ ID NO: 81975 - protein, 8 aa, Homo Sapiens
KTYKPMGF

SEQ ID NO: 81976 - protein, 8 aa, Homo Sapiens
LSQGVIAF

SEQ ID NO: 81977 - protein, 8 aa, Homo Sapiens
LSSKALKI

SEQ ID NO: 81978 - protein, 8 aa, Homo Sapiens
LSTAIALI

SEQ ID NO: 81979 - protein, 8 aa, Homo Sapiens
LSTIALAL

SEQ ID NO: 81980 - protein, 8 aa, Homo Sapiens
LTAEVLEL

SEQ ID NO: 81981 - protein, 8 aa, Homo Sapiens
LTGKTITL

SEQ ID NO: 81982 - protein, 8 aa, Homo Sapiens
LTGPALQW

SEQ ID NO: 81983 - protein, 8 aa, Homo Sapiens
LTGPVLEL

SEQ ID NO: 81984 - protein, 8 aa, Homo Sapiens
LTLRAIKL

SEQ ID NO: 81985 - protein, 8 aa, Homo Sapiens
LTYKVLTL

SEQ ID NO: 81986 - protein, 8 aa, Homo Sapiens
LVYPALKW

SEQ ID NO: 81987 - protein, 8 aa, Homo Sapiens
MGFKPLVL

SEQ ID NO: 81988 - protein, 8 aa, Homo Sapiens
MTLSPLLL

SEQ ID NO: 81989 - protein, 8 aa, Homo Sapiens
QTFKGLKI

SEQ ID NO: 81990 - protein, 8 aa, Homo Sapiens
QTMKTLRL

SEQ ID NO: 81991 - protein, 8 aa, Homo Sapiens
QTVKPLTL

SEQ ID NO: 81992 - protein, 8 aa, Homo Sapiens
RAYHTLRL

SEQ ID NO: 81993 - protein, 8 aa, Homo Sapiens
RMWKTLTF

SEQ ID NO: 81994 - protein, 8 aa, Homo Sapiens
RSAEALAF

SEQ ID NO: 81995 - protein, 8 aa, Homo Sapiens
RSFRPLLF

SEQ ID NO: 81996 - protein, 8 aa, Homo Sapiens
RSVRPLRL

SEQ ID NO: 81997 - protein, 8 aa, Homo Sapiens
RTFHTIGF

SEQ ID NO: 81998 - protein, 8 aa, Homo Sapiens
RTSRPLKI

SEQ ID NO: 81999 - protein, 8 aa, Homo Sapiens
RTVKALEF

SEQ ID NO: 82000 - protein, 8 aa, Homo Sapiens
RTYRAAKL

SEQ ID NO: 82001 - protein, 8 aa, Homo Sapiens
RVYKSLKV

SEQ ID NO: 82002 - protein, 8 aa, Homo Sapiens
SAWKPLLL

SEQ ID NO: 82003 - protein, 8 aa, Homo Sapiens
SAYVALAL

SEQ ID NO: 82004 - protein, 8 aa, Homo Sapiens
SFKKPFKL

SEQ ID NO: 82005 - protein, 8 aa, Homo Sapiens
SLPKVLRF

SEQ ID NO: 82006 - protein, 8 aa, Homo Sapiens
SLQHKLLL

SEQ ID NO: 82007 - protein, 8 aa, Homo Sapiens
SQDKTLKI

SEQ ID NO: 82008 - protein, 8 aa, Homo Sapiens
SSLHTLKF

SEQ ID NO: 82009 - protein, 8 aa, Homo Sapiens
SSNHKLVF

SEQ ID NO: 82010 - protein, 8 aa, Homo Sapiens
STYHALGF

SEQ ID NO: 82011 - protein, 8 aa, Homo Sapiens
SVDKVLEL

SEQ ID NO: 82012 - protein, 8 aa, Homo Sapiens
SVPKPLKF

SEQ ID NO: 82013 - protein, 8 aa, Homo Sapiens
SWDGTLRL

SEQ ID NO: 82014 - protein, 8 aa, Homo Sapiens
SYQKLLKY

SEQ ID NO: 82015 - protein, 8 aa, Homo Sapiens
TAPRTVLL

SEQ ID NO: 82016 - protein, 8 aa, Homo Sapiens
THSLVLHY

SEQ ID NO: 82017 - protein, 8 aa, Homo Sapiens
TKHGTLKY

SEQ ID NO: 82018 - protein, 8 aa, Homo Sapiens
TLHLVLRL

SEQ ID NO: 82019 - protein, 8 aa, Homo Sapiens
TSWKPLWL

SEQ ID NO: 82020 - protein, 8 aa, Homo Sapiens
TTKAISRW

SEQ ID NO: 82021 - protein, 8 aa, Homo Sapiens
TTLHNLLL

SEQ ID NO: 82022 - protein, 8 aa, Homo Sapiens
TTLRALYL

SEQ ID NO: 82023 - protein, 8 aa, Homo Sapiens
TYRGPKAF

SEQ ID NO: 82024 - protein, 8 aa, Homo Sapiens
VHLTPEEK

SEQ ID NO: 82025 - protein, 8 aa, Homo Sapiens
VSGKPLLI

SEQ ID NO: 82026 - protein, 8 aa, Homo Sapiens
VSLTACKV

SEQ ID NO: 82027 - protein, 8 aa, Homo Sapiens
VTFKSILF

SEQ ID NO: 82028 - protein, 8 aa, Homo Sapiens
YFFAYHVL

SEQ ID NO: 82029 - protein, 8 aa, Homo Sapiens
YSFMPLVI

SEQ ID NO: 82030 - protein, 8 aa, Homo Sapiens
YSGIALLI

SEQ ID NO: 82031 - protein, 8 aa, Homo Sapiens
YSMCKKVL

SEQ ID NO: 82032 - protein, 8 aa, Homo Sapiens
YTVKAILI

SEQ ID NO: 82033 - protein, 9 aa, Homo Sapiens
AAAPAGTTF

SEQ ID NO: 82034 - protein, 9 aa, Homo Sapiens
AAAPAIMSY

SEQ ID NO: 82035 - protein, 9 aa, Homo Sapiens
AAAPVIKAY

SEQ ID NO: 82036 - protein, 9 aa, Homo Sapiens
AAHSVVLGY

SEQ ID NO: 82037 - protein, 9 aa, Homo Sapiens
AAIKAIKFY

SEQ ID NO: 82038 - protein, 9 aa, Homo Sapiens
AAIYHVLHF

SEQ ID NO: 82039 - protein, 9 aa, Homo Sapiens
AALEQLLKF

SEQ ID NO: 82040 - protein, 9 aa, Homo Sapiens
AALRQALTL

SEQ ID NO: 82041 - protein, 9 aa, Homo Sapiens
AASARTLQL

SEQ ID NO: 82042 - protein, 9 aa, Homo Sapiens
AAVRHVLAL

SEQ ID NO: 82043 - protein, 9 aa, Homo Sapiens
AAYAGGLVL

SEQ ID NO: 82044 - protein, 9 aa, Homo Sapiens
AAYDRYLKL

SEQ ID NO: 82045 - protein, 9 aa, Homo Sapiens
AAYLQHLCY

SEQ ID NO: 82046 - protein, 9 aa, Homo Sapiens
AAYLRALSL

SEQ ID NO: 82047 - protein, 9 aa, Homo Sapiens
AAYQLAFRY

SEQ ID NO: 82048 - protein, 9 aa, Homo Sapiens
AGLEYVLHF

SEQ ID NO: 82049 - protein, 9 aa, Homo Sapiens
AIIERTASF

SEQ ID NO: 82050 - protein, 9 aa, Homo Sapiens
AILKKVIQW

SEQ ID NO: 82051 - protein, 9 aa, Homo Sapiens
AIYKRVLKL

SEQ ID NO: 82052 - protein, 9 aa, Homo Sapiens
ALYKKILKY

SEQ ID NO: 82053 - protein, 9 aa, Homo Sapiens
ALYKRVLQL

SEQ ID NO: 82054 - protein, 9 aa, Homo Sapiens
ASCDKILVI

SEQ ID NO: 82055 - protein, 9 aa, Homo Sapiens
ASDDKTLKI

SEQ ID NO: 82056 - protein, 9 aa, Homo Sapiens
ASFDGTFLW

SEQ ID NO: 82057 - protein, 9 aa, Homo Sapiens
ASFDKSIKL

SEQ ID NO: 82058 - protein, 9 aa, Homo Sapiens
ASFLARLGY

SEQ ID NO: 82059 - protein, 9 aa, Homo Sapiens
ASGPGLSSY

SEQ ID NO: 82060 - protein, 9 aa, Homo Sapiens
ASGPPVSEL

SEQ ID NO: 82061 - protein, 9 aa, Homo Sapiens
ASHDSTLSL

SEQ ID NO: 82062 - protein, 9 aa, Homo Sapiens
ASHYLKTEY

SEQ ID NO: 82063 - protein, 9 aa, Homo Sapiens
ASIDQRLTF

SEQ ID NO: 82064 - protein, 9 aa, Homo Sapiens
ASIGNAQKL

SEQ ID NO: 82065 - protein, 9 aa, Homo Sapiens
ASINRIYGF

SEQ ID NO: 82066 - protein, 9 aa, Homo Sapiens
ASIPGILAL

SEQ ID NO: 82067 - protein, 9 aa, Homo Sapiens
ASIQQTLKL

SEQ ID NO: 82068 - protein, 9 aa, Homo Sapiens
ASISHFMQF

SEQ ID NO: 82069 - protein, 9 aa, Homo Sapiens
ASITRVPFY

SEQ ID NO: 82070 - protein, 9 aa, Homo Sapiens
ASIVAPLLL

SEQ ID NO: 82071 - protein, 9 aa, Homo Sapiens
ASKPWDISL

SEQ ID NO: 82072 - protein, 9 aa, Homo Sapiens
ASLDKEIYY

SEQ ID NO: 82073 - protein, 9 aa, Homo Sapiens
ASLDNTIKL

SEQ ID NO: 82074 - protein, 9 aa, Homo Sapiens
ASLEEQLKL

SEQ ID NO: 82075 - protein, 9 aa, Homo Sapiens
ASLENCMKL

SEQ ID NO: 82076 - protein, 9 aa, Homo Sapiens
ASLEQHLRL

SEQ ID NO: 82077 - protein, 9 aa, Homo Sapiens
ASLERFSTY

SEQ ID NO: 82078 - protein, 9 aa, Homo Sapiens
ASLISVRNL

SEQ ID NO: 82079 - protein, 9 aa, Homo Sapiens
ASLKEALKI

SEQ ID NO: 82080 - protein, 9 aa, Homo Sapiens
ASLKSTSTL

SEQ ID NO: 82081 - protein, 9 aa, Homo Sapiens
ASLMHSFIL

SEQ ID NO: 82082 - protein, 9 aa, Homo Sapiens
ASLNFQSTF

SEQ ID NO: 82083 - protein, 9 aa, Homo Sapiens
ASLPKVLRF

SEQ ID NO: 82084 - protein, 9 aa, Homo Sapiens
ASLPLERTL

SEQ ID NO: 82085 - protein, 9 aa, Homo Sapiens
ASLPSILQY

SEQ ID NO: 82086 - protein, 9 aa, Homo Sapiens
ASLSRPLNY

SEQ ID NO: 82087 - protein, 9 aa, Homo Sapiens
ASLTKILVI

SEQ ID NO: 82088 - protein, 9 aa, Homo Sapiens
ASMQCVLTF

SEQ ID NO: 82089 - protein, 9 aa, Homo Sapiens
ASMSVVLKL

SEQ ID NO: 82090 - protein, 9 aa, Homo Sapiens
ASNLQDLVY

SEQ ID NO: 82091 - protein, 9 aa, Homo Sapiens
ASNPAMLLY

SEQ ID NO: 82092 - protein, 9 aa, Homo Sapiens
ASNPKILSL

SEQ ID NO: 82093 - protein, 9 aa, Homo Sapiens
ASNPRVTRF

SEQ ID NO: 82094 - protein, 9 aa, Homo Sapiens
ASNYFRAMF

SEQ ID NO: 82095 - protein, 9 aa, Homo Sapiens
ASSLHTLKF

SEQ ID NO: 82096 - protein, 9 aa, Homo Sapiens
ASSRIILRL

SEQ ID NO: 82097 - protein, 9 aa, Homo Sapiens
ASTARHLYL

SEQ ID NO: 82098 - protein, 9 aa, Homo Sapiens
ASVDKVLEL

SEQ ID NO: 82099 - protein, 9 aa, Homo Sapiens
ASWDKTVRL

SEQ ID NO: 82100 - protein, 9 aa, Homo Sapiens
ASYARQMMF

SEQ ID NO: 82101 - protein, 9 aa, Homo Sapiens
ASYAVQAKY

SEQ ID NO: 82102 - protein, 9 aa, Homo Sapiens
ASYAVQSKY

SEQ ID NO: 82103 - protein, 9 aa, Homo Sapiens
ASYEFVQRL

SEQ ID NO: 82104 - protein, 9 aa, Homo Sapiens
ASYEKMLKL

SEQ ID NO: 82105 - protein, 9 aa, Homo Sapiens
ASYHSNQTL

SEQ ID NO: 82106 - protein, 9 aa, Homo Sapiens
ASYKHTTSI

SEQ ID NO: 82107 - protein, 9 aa, Homo Sapiens
ASYKKAIIL

SEQ ID NO: 82108 - protein, 9 aa, Homo Sapiens
ASYLQMVHI

SEQ ID NO: 82109 - protein, 9 aa, Homo Sapiens
ASYNVKTAY

SEQ ID NO: 82110 - protein, 9 aa, Homo Sapiens
ASYPHCLQF

SEQ ID NO: 82111 - protein, 9 aa, Homo Sapiens
ASYRQVASF

SEQ ID NO: 82112 - protein, 9 aa, Homo Sapiens
ASYSGLMRI

SEQ ID NO: 82113 - protein, 9 aa, Homo Sapiens
ASYSVHLLL

SEQ ID NO: 82114 - protein, 9 aa, Homo Sapiens
ASYTKALKL

SEQ ID NO: 82115 - protein, 9 aa, Homo Sapiens
ASYVASTKY

SEQ ID NO: 82116 - protein, 9 aa, Homo Sapiens
ATAKNVLKL

SEQ ID NO: 82117 - protein, 9 aa, Homo Sapiens
ATAPPAPAY

SEQ ID NO: 82118 - protein, 9 aa, Homo Sapiens
ATAPVVALF

SEQ ID NO: 82119 - protein, 9 aa, Homo Sapiens
ATAVVQLYL

SEQ ID NO: 82120 - protein, 9 aa, Homo Sapiens
ATDPHPKEI

SEQ ID NO: 82121 - protein, 9 aa, Homo Sapiens
ATFAKVMML

SEQ ID NO: 82122 - protein, 9 aa, Homo Sapiens
ATFAQALQF

SEQ ID NO: 82123 - protein, 9 aa, Homo Sapiens
ATFPVAPRY

SEQ ID NO: 82124 - protein, 9 aa, Homo Sapiens
ATFQRQFVL

SEQ ID NO: 82125 - protein, 9 aa, Homo Sapiens
ATGKRTLLI

SEQ ID NO: 82126 - protein, 9 aa, Homo Sapiens
ATHFSQLSL

SEQ ID NO: 82127 - protein, 9 aa, Homo Sapiens
ATHGRFLEI

SEQ ID NO: 82128 - protein, 9 aa, Homo Sapiens
ATIAEGLTL

SEQ ID NO: 82129 - protein, 9 aa, Homo Sapiens
ATIDKVVKI

SEQ ID NO: 82130 - protein, 9 aa, Homo Sapiens
ATIEKIIRF

SEQ ID NO: 82131 - protein, 9 aa, Homo Sapiens
ATIFHELVY

SEQ ID NO: 82132 - protein, 9 aa, Homo Sapiens
ATILTKSTL

SEQ ID NO: 82133 - protein, 9 aa, Homo Sapiens
ATIPPISSL

SEQ ID NO: 82134 - protein, 9 aa, Homo Sapiens
ATIRKALRL

SEQ ID NO: 82135 - protein, 9 aa, Homo Sapiens
ATISSPLEL

SEQ ID NO: 82136 - protein, 9 aa, Homo Sapiens
ATIVGKLMF

SEQ ID NO: 82137 - protein, 9 aa, Homo Sapiens
ATLDNTLKL

SEQ ID NO: 82138 - protein, 9 aa, Homo Sapiens
ATLEKVIEI

SEQ ID NO: 82139 - protein, 9 aa, Homo Sapiens
ATLETLLRF

SEQ ID NO: 82140 - protein, 9 aa, Homo Sapiens
ATLGATLKL

SEQ ID NO: 82141 - protein, 9 aa, Homo Sapiens
ATLHLLLTL

SEQ ID NO: 82142 - protein, 9 aa, Homo Sapiens
ATLNWFRLY

SEQ ID NO: 82143 - protein, 9 aa, Homo Sapiens
ATLQLSLKL

SEQ ID NO: 82144 - protein, 9 aa, Homo Sapiens
ATLQRLLAI

SEQ ID NO: 82145 - protein, 9 aa, Homo Sapiens
ATLTRPLAL

SEQ ID NO: 82146 - protein, 9 aa, Homo Sapiens
ATMKRMLSL

SEQ ID NO: 82147 - protein, 9 aa, Homo Sapiens
ATMPDGKLY

SEQ ID NO: 82148 - protein, 9 aa, Homo Sapiens
ATMPVTMLI

SEQ ID NO: 82149 - protein, 9 aa, Homo Sapiens
ATMYNLLAY

SEQ ID NO: 82150 - protein, 9 aa, Homo Sapiens
ATNHKVLLF

SEQ ID NO: 82151 - protein, 9 aa, Homo Sapiens
ATNHRVLLF

SEQ ID NO: 82152 - protein, 9 aa, Homo Sapiens
ATSKVALVY

SEQ ID NO: 82153 - protein, 9 aa, Homo Sapiens
ATTPPISSI

SEQ ID NO: 82154 - protein, 9 aa, Homo Sapiens
ATVAPMSVY

SEQ ID NO: 82155 - protein, 9 aa, Homo Sapiens
ATVDWFRRY

SEQ ID NO: 82156 - protein, 9 aa, Homo Sapiens
ATVKAHPKY

SEQ ID NO: 82157 - protein, 9 aa, Homo Sapiens
ATVLQKTSF

SEQ ID NO: 82158 - protein, 9 aa, Homo Sapiens
ATVNFITSY

SEQ ID NO: 82159 - protein, 9 aa, Homo Sapiens
ATVPIRLII

SEQ ID NO: 82160 - protein, 9 aa, Homo Sapiens
ATVPNALEF

SEQ ID NO: 82161 - protein, 9 aa, Homo Sapiens
ATVTSYLKL

SEQ ID NO: 82162 - protein, 9 aa, Homo Sapiens
ATYEDIVTL

SEQ ID NO: 82163 - protein, 9 aa, Homo Sapiens
ATYERMFRW

SEQ ID NO: 82164 - protein, 9 aa, Homo Sapiens
ATYHHIIRL

SEQ ID NO: 82165 - protein, 9 aa, Homo Sapiens
ATYHRAIKV

SEQ ID NO: 82166 - protein, 9 aa, Homo Sapiens
ATYIFLQTF

SEQ ID NO: 82167 - protein, 9 aa, Homo Sapiens
ATYLLKPLF

SEQ ID NO: 82168 - protein, 9 aa, Homo Sapiens
ATYLRQPTY

SEQ ID NO: 82169 - protein, 9 aa, Homo Sapiens
ATYNFSQSL

SEQ ID NO: 82170 - protein, 9 aa, Homo Sapiens
ATYTSARTL

SEQ ID NO: 82171 - protein, 9 aa, Homo Sapiens
ATYVFLHTV

SEQ ID NO: 82172 - protein, 9 aa, Homo Sapiens
AVDPKTRLL

SEQ ID NO: 82173 - protein, 9 aa, Homo Sapiens
AVISTILKY

SEQ ID NO: 82174 - protein, 9 aa, Homo Sapiens
AVLASGATF

SEQ ID NO: 82175 - protein, 9 aa, Homo Sapiens
AVLPYELRF

SEQ ID NO: 82176 - protein, 9 aa, Homo Sapiens
AVVDKTLLL

SEQ ID NO: 82177 - protein, 9 aa, Homo Sapiens
AVYARLLAL

SEQ ID NO: 82178 - protein, 9 aa, Homo Sapiens
AVYDRILDL

SEQ ID NO: 82179 - protein, 9 aa, Homo Sapiens
AVYERVTTI

SEQ ID NO: 82180 - protein, 9 aa, Homo Sapiens
AVYRKALVI

SEQ ID NO: 82181 - protein, 9 aa, Homo Sapiens
AVYSRTFTW

SEQ ID NO: 82182 - protein, 9 aa, Homo Sapiens
AVYTIALRY

SEQ ID NO: 82183 - protein, 9 aa, Homo Sapiens
CALGLVLGL

SEQ ID NO: 82184 - protein, 9 aa, Homo Sapiens
CSSPIVVKF

SEQ ID NO: 82185 - protein, 9 aa, Homo Sapiens
CTYGKPVTF

SEQ ID NO: 82186 - protein, 9 aa, Homo Sapiens
CVISKVLTF

SEQ ID NO: 82187 - protein, 9 aa, Homo Sapiens
ESCDVQLYI

SEQ ID NO: 82188 - protein, 9 aa, Homo Sapiens
ESFQKALLL

SEQ ID NO: 82189 - protein, 9 aa, Homo Sapiens
ESLGYVLMY

SEQ ID NO: 82190 - protein, 9 aa, Homo Sapiens
ESMKETLRI

SEQ ID NO: 82191 - protein, 9 aa, Homo Sapiens
ESWDKILAL

SEQ ID NO: 82192 - protein, 9 aa, Homo Sapiens
ETVRSILKI

SEQ ID NO: 82193 - protein, 9 aa, Homo Sapiens
FSAPGVMNF

SEQ ID NO: 82194 - protein, 9 aa, Homo Sapiens
FSAPGVTSW

SEQ ID NO: 82195 - protein, 9 aa, Homo Sapiens
FSCNKVLVI

SEQ ID NO: 82196 - protein, 9 aa, Homo Sapiens
FSDENVRAI

SEQ ID NO: 82197 - protein, 9 aa, Homo Sapiens
FSFHHVLSL

SEQ ID NO: 82198 - protein, 9 aa, Homo Sapiens
FSFKKPFKL

SEQ ID NO: 82199 - protein, 9 aa, Homo Sapiens
FSFKKSFKL

SEQ ID NO: 82200 - protein, 9 aa, Homo Sapiens
FSGPAISRI

SEQ ID NO: 82201 - protein, 9 aa, Homo Sapiens
FSIPDSLLI

SEQ ID NO: 82202 - protein, 9 aa, Homo Sapiens
FSITPLSEL

SEQ ID NO: 82203 - protein, 9 aa, Homo Sapiens
FSLEEVLRL

SEQ ID NO: 82204 - protein, 9 aa, Homo Sapiens
FSLPAQPLW

SEQ ID NO: 82205 - protein, 9 aa, Homo Sapiens
FSMGKTLLV

SEQ ID NO: 82206 - protein, 9 aa, Homo Sapiens
FSNPRALYL

SEQ ID NO: 82207 - protein, 9 aa, Homo Sapiens
FSSAPGATY

SEQ ID NO: 82208 - protein, 9 aa, Homo Sapiens
FSSDFTLKI

SEQ ID NO: 82209 - protein, 9 aa, Homo Sapiens
FSSNLDLRY

SEQ ID NO: 82210 - protein, 9 aa, Homo Sapiens
FSSPVCMAF

SEQ ID NO: 82211 - protein, 9 aa, Homo Sapiens
FSTDKQMGY

SEQ ID NO: 82212 - protein, 9 aa, Homo Sapiens
FSVLFLPKY

SEQ ID NO: 82213 - protein, 9 aa, Homo Sapiens
FSVVSPSSF

SEQ ID NO: 82214 - protein, 9 aa, Homo Sapiens
FSYAFPKEF

SEQ ID NO: 82215 - protein, 9 aa, Homo Sapiens
FSYEHFYVI

SEQ ID NO: 82216 - protein, 9 aa, Homo Sapiens
FSYGTKILY

SEQ ID NO: 82217 - protein, 9 aa, Homo Sapiens
FSYSSNLKL

SEQ ID NO: 82218 - protein, 9 aa, Homo Sapiens
FTAEFSSRY

SEQ ID NO: 82219 - protein, 9 aa, Homo Sapiens
FTAGAKLLF

SEQ ID NO: 82220 - protein, 9 aa, Homo Sapiens
FTCQRILFL

SEQ ID NO: 82221 - protein, 9 aa, Homo Sapiens
FTIDGPLCL

SEQ ID NO: 82222 - protein, 9 aa, Homo Sapiens
FTKEDLTEI

SEQ ID NO: 82223 - protein, 9 aa, Homo Sapiens
FTKPPIGTW

SEQ ID NO: 82224 - protein, 9 aa, Homo Sapiens
FTLKKLLLL

SEQ ID NO: 82225 - protein, 9 aa, Homo Sapiens
FTLNETLKI

SEQ ID NO: 82226 - protein, 9 aa, Homo Sapiens
FTLSHITQL

SEQ ID NO: 82227 - protein, 9 aa, Homo Sapiens
FTMKTVLML

SEQ ID NO: 82228 - protein, 9 aa, Homo Sapiens
FTSAKILQI

SEQ ID NO: 82229 - protein, 9 aa, Homo Sapiens
FTSDIALRL

SEQ ID NO: 82230 - protein, 9 aa, Homo Sapiens
FTVTFNPKY

SEQ ID NO: 82231 - protein, 9 aa, Homo Sapiens
FTYGLHMIL

SEQ ID NO: 82232 - protein, 9 aa, Homo Sapiens
FTYHHIQEI

SEQ ID NO: 82233 - protein, 9 aa, Homo Sapiens
FTYRSNFVL

SEQ ID NO: 82234 - protein, 9 aa, Homo Sapiens
FTYTAKLMI

SEQ ID NO: 82235 - protein, 9 aa, Homo Sapiens
FVCERTLKY

SEQ ID NO: 82236 - protein, 9 aa, Homo Sapiens
FVTIKKDVD

SEQ ID NO: 82237 - protein, 9 aa, Homo Sapiens
GAYAKALEI

SEQ ID NO: 82238 - protein, 9 aa, Homo Sapiens
GAYTVTIKY

SEQ ID NO: 82239 - protein, 9 aa, Homo Sapiens
GIYPHKLVF

SEQ ID NO: 82240 - protein, 9 aa, Homo Sapiens
GSATTISHY

SEQ ID NO: 82241 - protein, 9 aa, Homo Sapiens
GSCDHPLLL

SEQ ID NO: 82242 - protein, 9 aa, Homo Sapiens
GSCGIALAL

SEQ ID NO: 82243 - protein, 9 aa, Homo Sapiens
GSFPMTPSI

SEQ ID NO: 82244 - protein, 9 aa, Homo Sapiens
GSIPVTLTF

SEQ ID NO: 82245 - protein, 9 aa, Homo Sapiens
GSLDKTIRL

SEQ ID NO: 82246 - protein, 9 aa, Homo Sapiens
GSLKPTSTI

SEQ ID NO: 82247 - protein, 9 aa, Homo Sapiens
GSLSTTSHF

SEQ ID NO: 82248 - protein, 9 aa, Homo Sapiens
GSLVRILFL

SEQ ID NO: 82249 - protein, 9 aa, Homo Sapiens
GSNSKTLRV

SEQ ID NO: 82250 - protein, 9 aa, Homo Sapiens
GSRDKTIKL

SEQ ID NO: 82251 - protein, 9 aa, Homo Sapiens
GSSDGTIRL

SEQ ID NO: 82252 - protein, 9 aa, Homo Sapiens
GSSPPVKNI

SEQ ID NO: 82253 - protein, 9 aa, Homo Sapiens
GSTDRQVTI

SEQ ID NO: 82254 - protein, 9 aa, Homo Sapiens
GSVVRALLL

SEQ ID NO: 82255 - protein, 9 aa, Homo Sapiens
GSWDGTLRL

SEQ ID NO: 82256 - protein, 9 aa, Homo Sapiens
GSWDHTLRV

SEQ ID NO: 82257 - protein, 9 aa, Homo Sapiens
GSWDKMLKI

SEQ ID NO: 82258 - protein, 9 aa, Homo Sapiens
GSWDKTLKF

SEQ ID NO: 82259 - protein, 9 aa, Homo Sapiens
GSYAKVLLV

SEQ ID NO: 82260 - protein, 9 aa, Homo Sapiens
GSYDKTSRI

SEQ ID NO: 82261 - protein, 9 aa, Homo Sapiens
GSYDSKLVW

SEQ ID NO: 82262 - protein, 9 aa, Homo Sapiens
GSYGRSLGL

SEQ ID NO: 82263 - protein, 9 aa, Homo Sapiens
GSYGSLARF

SEQ ID NO: 82264 - protein, 9 aa, Homo Sapiens
GSYNQPLGL

SEQ ID NO: 82265 - protein, 9 aa, Homo Sapiens
GSYRNALKI

SEQ ID NO: 82266 - protein, 9 aa, Homo Sapiens
GSYSIKSRF

SEQ ID NO: 82267 - protein, 9 aa, Homo Sapiens
GTADITLRF

SEQ ID NO: 82268 - protein, 9 aa, Homo Sapiens
GTATKHLTY

SEQ ID NO: 82269 - protein, 9 aa, Homo Sapiens
GTCTGQLKL

SEQ ID NO: 82270 - protein, 9 aa, Homo Sapiens
GTFPKALSI

SEQ ID NO: 82271 - protein, 9 aa, Homo Sapiens
GTIKKFLSL

SEQ ID NO: 82272 - protein, 9 aa, Homo Sapiens
GTIPWFMEI

SEQ ID NO: 82273 - protein, 9 aa, Homo Sapiens
GTIYPGLMI

SEQ ID NO: 82274 - protein, 9 aa, Homo Sapiens
GTLDSVLRY

SEQ ID NO: 82275 - protein, 9 aa, Homo Sapiens
GTLEKVLCL

SEQ ID NO: 82276 - protein, 9 aa, Homo Sapiens
GTLKKILAL

SEQ ID NO: 82277 - protein, 9 aa, Homo Sapiens
GTLQPALVL

SEQ ID NO: 82278 - protein, 9 aa, Homo Sapiens
GTMNRQLKL

SEQ ID NO: 82279 - protein, 9 aa, Homo Sapiens
GTMVHTLAW

SEQ ID NO: 82280 - protein, 9 aa, Homo Sapiens
GTMYPMSVY

SEQ ID NO: 82281 - protein, 9 aa, Homo Sapiens
GTQHPTLRL

SEQ ID NO: 82282 - protein, 9 aa, Homo Sapiens
GTTKDTPKL

SEQ ID NO: 82283 - protein, 9 aa, Homo Sapiens
GTVYEDLRY

SEQ ID NO: 82284 - protein, 9 aa, Homo Sapiens
GTYIRTLCV

SEQ ID NO: 82285 - protein, 9 aa, Homo Sapiens
GTYSLNVTY

SEQ ID NO: 82286 - protein, 9 aa, Homo Sapiens
GTYYPPPRL

SEQ ID NO: 82287 - protein, 9 aa, Homo Sapiens
HAGPIVSVW

SEQ ID NO: 82288 - protein, 9 aa, Homo Sapiens
HAHEIMLKY

SEQ ID NO: 82289 - protein, 9 aa, Homo Sapiens
HAIHKVLQL

SEQ ID NO: 82290 - protein, 9 aa, Homo Sapiens
HAVSPIAKY

SEQ ID NO: 82291 - protein, 9 aa, Homo Sapiens
HGIDPTGTY

SEQ ID NO: 82292 - protein, 9 aa, Homo Sapiens
HLYARQLTL

SEQ ID NO: 82293 - protein, 9 aa, Homo Sapiens
HPTNLLATI

SEQ ID NO: 82294 - protein, 9 aa, Homo Sapiens
HSFGKVLGF

SEQ ID NO: 82295 - protein, 9 aa, Homo Sapiens
HSFLKALYY

SEQ ID NO: 82296 - protein, 9 aa, Homo Sapiens
HSFPLQFTL

SEQ ID NO: 82297 - protein, 9 aa, Homo Sapiens
HSHHPTLKL

SEQ ID NO: 82298 - protein, 9 aa, Homo Sapiens
HSLDHLLKL

SEQ ID NO: 82299 - protein, 9 aa, Homo Sapiens
HSLIKVLRL

SEQ ID NO: 82300 - protein, 9 aa, Homo Sapiens
HSLPDTLSI

SEQ ID NO: 82301 - protein, 9 aa, Homo Sapiens
HSLQQQLKL

SEQ ID NO: 82302 - protein, 9 aa, Homo Sapiens
HSVPLQLEL

SEQ ID NO: 82303 - protein, 9 aa, Homo Sapiens
HSYFWPLEW

SEQ ID NO: 82304 - protein, 9 aa, Homo Sapiens
HSYRGHLWL

SEQ ID NO: 82305 - protein, 9 aa, Homo Sapiens
HTAAVKLLL

SEQ ID NO: 82306 - protein, 9 aa, Homo Sapiens
HTAPNVPHY

SEQ ID NO: 82307 - protein, 9 aa, Homo Sapiens
HTFTNHMVF

SEQ ID NO: 82308 - protein, 9 aa, Homo Sapiens
HTFYTQLVL

SEQ ID NO: 82309 - protein, 9 aa, Homo Sapiens
HTLPDSLVY

SEQ ID NO: 82310 - protein, 9 aa, Homo Sapiens
HTMDPQLRL

SEQ ID NO: 82311 - protein, 9 aa, Homo Sapiens
HTYQSPLLY

SEQ ID NO: 82312 - protein, 9 aa, Homo Sapiens
IAAKKVLRL

SEQ ID NO: 82313 - protein, 9 aa, Homo Sapiens
IAIGKVLKL

SEQ ID NO: 82314 - protein, 9 aa, Homo Sapiens
IAISRTPVL

SEQ ID NO: 82315 - protein, 9 aa, Homo Sapiens
IANQVQLFY

SEQ ID NO: 82316 - protein, 9 aa, Homo Sapiens
IAVEPVKTY

SEQ ID NO: 82317 - protein, 9 aa, Homo Sapiens
IIYENILKY

SEQ ID NO: 82318 - protein, 9 aa, Homo Sapiens
ILGPPGSVY

SEQ ID NO: 82319 - protein, 9 aa, Homo Sapiens
ILYPKTLFL

SEQ ID NO: 82320 - protein, 9 aa, Homo Sapiens
IQDTTISFL

SEQ ID NO: 82321 - protein, 9 aa, Homo Sapiens
ISAPLVKTL

SEQ ID NO: 82322 - protein, 9 aa, Homo Sapiens
ISCKEELLL

SEQ ID NO: 82323 - protein, 9 aa, Homo Sapiens
ISCQHAALL

SEQ ID NO: 82324 - protein, 9 aa, Homo Sapiens
ISELPVRTW

SEQ ID NO: 82325 - protein, 9 aa, Homo Sapiens
ISEQFTAMF

SEQ ID NO: 82326 - protein, 9 aa, Homo Sapiens
ISFLKTLSL

SEQ ID NO: 82327 - protein, 9 aa, Homo Sapiens
ISFPDPKML

SEQ ID NO: 82328 - protein, 9 aa, Homo Sapiens
ISGVPVLGF

SEQ ID NO: 82329 - protein, 9 aa, Homo Sapiens
ISIHRPLAY

SEQ ID NO: 82330 - protein, 9 aa, Homo Sapiens
ISILQQIEL

SEQ ID NO: 82331 - protein, 9 aa, Homo Sapiens
ISKYPTLKL

SEQ ID NO: 82332 - protein, 9 aa, Homo Sapiens
ISLEHEILL

SEQ ID NO: 82333 - protein, 9 aa, Homo Sapiens
ISLPEAMQL

SEQ ID NO: 82334 - protein, 9 aa, Homo Sapiens
ISLPKAIKL

SEQ ID NO: 82335 - protein, 9 aa, Homo Sapiens
ISLPKSATI

SEQ ID NO: 82336 - protein, 9 aa, Homo Sapiens
ISLQHALYL

SEQ ID NO: 82337 - protein, 9 aa, Homo Sapiens
ISLQQRLEY

SEQ ID NO: 82338 - protein, 9 aa, Homo Sapiens
ISNFHVLLL

SEQ ID NO: 82339 - protein, 9 aa, Homo Sapiens
ISNLIVLHL

SEQ ID NO: 82340 - protein, 9 aa, Homo Sapiens
ISNPKTAEF

SEQ ID NO: 82341 - protein, 9 aa, Homo Sapiens
ISNSHPLSL

SEQ ID NO: 82342 - protein, 9 aa, Homo Sapiens
ISQPRILLY

SEQ ID NO: 82343 - protein, 9 aa, Homo Sapiens
ISREGTLMI

SEQ ID NO: 82344 - protein, 9 aa, Homo Sapiens
ISRETGEPY

SEQ ID NO: 82345 - protein, 9 aa, Homo Sapiens
ISRHQEQFI

SEQ ID NO: 82346 - protein, 9 aa, Homo Sapiens
ISSPVILQF

SEQ ID NO: 82347 - protein, 9 aa, Homo Sapiens
ISSPVVTSL

SEQ ID NO: 82348 - protein, 9 aa, Homo Sapiens
ISSSMHSLY

SEQ ID NO: 82349 - protein, 9 aa, Homo Sapiens
ISTEVNPKL

SEQ ID NO: 82350 - protein, 9 aa, Homo Sapiens
ISVLMVSKY

SEQ ID NO: 82351 - protein, 9 aa, Homo Sapiens
ISVVQKLVL

SEQ ID NO: 82352 - protein, 9 aa, Homo Sapiens
ISWLGQPKL

SEQ ID NO: 82353 - protein, 9 aa, Homo Sapiens
ISYDRTLVI

SEQ ID NO: 82354 - protein, 9 aa, Homo Sapiens
ISYEITPRI

SEQ ID NO: 82355 - protein, 9 aa, Homo Sapiens
ISYKGTPAM

SEQ ID NO: 82356 - protein, 9 aa, Homo Sapiens
ITAHVEPLL

SEQ ID NO: 82357 - protein, 9 aa, Homo Sapiens
ITAKAVLKL

SEQ ID NO: 82358 - protein, 9 aa, Homo Sapiens
ITAKGQMAY

SEQ ID NO: 82359 - protein, 9 aa, Homo Sapiens
ITALAPSTM

SEQ ID NO: 82360 - protein, 9 aa, Homo Sapiens
ITAPTVRQY

SEQ ID NO: 82361 - protein, 9 aa, Homo Sapiens
ITAVGPAHF

SEQ ID NO: 82362 - protein, 9 aa, Homo Sapiens
ITEDFIATY

SEQ ID NO: 82363 - protein, 9 aa, Homo Sapiens
ITFEGKVAF

SEQ ID NO: 82364 - protein, 9 aa, Homo Sapiens
ITHFGPTTL

SEQ ID NO: 82365 - protein, 9 aa, Homo Sapiens
ITHQSLLML

SEQ ID NO: 82366 - protein, 9 aa, Homo Sapiens
ITIKPVLSL

SEQ ID NO: 82367 - protein, 9 aa, Homo Sapiens
ITIPKDLKL

SEQ ID NO: 82368 - protein, 9 aa, Homo Sapiens
ITIVRHLQY

SEQ ID NO: 82369 - protein, 9 aa, Homo Sapiens
ITKAKSLRI

SEQ ID NO: 82370 - protein, 9 aa, Homo Sapiens
ITKEGMLHY

SEQ ID NO: 82371 - protein, 9 aa, Homo Sapiens
ITLIPTCKF

SEQ ID NO: 82372 - protein, 9 aa, Homo Sapiens
ITLWHNLNY

SEQ ID NO: 82373 - protein, 9 aa, Homo Sapiens
ITNANELKY

SEQ ID NO: 82374 - protein, 9 aa, Homo Sapiens
ITNDTVQTY

SEQ ID NO: 82375 - protein, 9 aa, Homo Sapiens
ITNELILRL

SEQ ID NO: 82376 - protein, 9 aa, Homo Sapiens
ITNEQDLKM

SEQ ID NO: 82377 - protein, 9 aa, Homo Sapiens
ITNKYQLVF

SEQ ID NO: 82378 - protein, 9 aa, Homo Sapiens
ITNLQLLKI

SEQ ID NO: 82379 - protein, 9 aa, Homo Sapiens
ITNPKSLLY

SEQ ID NO: 82380 - protein, 9 aa, Homo Sapiens
ITNTRPLSY

SEQ ID NO: 82381 - protein, 9 aa, Homo Sapiens
ITNTVGSSI

SEQ ID NO: 82382 - protein, 9 aa, Homo Sapiens
ITPPVVLRL

SEQ ID NO: 82383 - protein, 9 aa, Homo Sapiens
ITQGTPLKY

SEQ ID NO: 82384 - protein, 9 aa, Homo Sapiens
ITRPNGERY

SEQ ID NO: 82385 - protein, 9 aa, Homo Sapiens
ITRQKQLFY

SEQ ID NO: 82386 - protein, 9 aa, Homo Sapiens
ITSAKTLEL

SEQ ID NO: 82387 - protein, 9 aa, Homo Sapiens
ITSELVSKI

SEQ ID NO: 82388 - protein, 9 aa, Homo Sapiens
ITSPTGETW

SEQ ID NO: 82389 - protein, 9 aa, Homo Sapiens
ITSSNFLHY

SEQ ID NO: 82390 - protein, 9 aa, Homo Sapiens
ITSTGPSLF

SEQ ID NO: 82391 - protein, 9 aa, Homo Sapiens
ITTDVNPYY

SEQ ID NO: 82392 - protein, 9 aa, Homo Sapiens
ITTHPALVL

SEQ ID NO: 82393 - protein, 9 aa, Homo Sapiens
ITTKAISRW

SEQ ID NO: 82394 - protein, 9 aa, Homo Sapiens
ITTLHNLLL

SEQ ID NO: 82395 - protein, 9 aa, Homo Sapiens
ITTTINPRF

SEQ ID NO: 82396 - protein, 9 aa, Homo Sapiens
ITVEKALAI

SEQ ID NO: 82397 - protein, 9 aa, Homo Sapiens
ITVEKIIKI

SEQ ID NO: 82398 - protein, 9 aa, Homo Sapiens
ITVHRHLML

SEQ ID NO: 82399 - protein, 9 aa, Homo Sapiens
ITVIFHPLL

SEQ ID NO: 82400 - protein, 9 aa, Homo Sapiens
ITVKDGKTL

SEQ ID NO: 82401 - protein, 9 aa, Homo Sapiens
ITVKRPLRF

SEQ ID NO: 82402 - protein, 9 aa, Homo Sapiens
ITWNRVVLL

SEQ ID NO: 82403 - protein, 9 aa, Homo Sapiens
ITYEGRQKM

SEQ ID NO: 82404 - protein, 9 aa, Homo Sapiens
ITYGKQPHL

SEQ ID NO: 82405 - protein, 9 aa, Homo Sapiens
ITYHSWLTF

SEQ ID NO: 82406 - protein, 9 aa, Homo Sapiens
ITYNKVLHF

SEQ ID NO: 82407 - protein, 9 aa, Homo Sapiens
ITYPMLFKL

SEQ ID NO: 82408 - protein, 9 aa, Homo Sapiens
ITYPQGLAL

SEQ ID NO: 82409 - protein, 9 aa, Homo Sapiens
ITYTFHSTW

SEQ ID NO: 82410 - protein, 9 aa, Homo Sapiens
IVMPNILVL

SEQ ID NO: 82411 - protein, 9 aa, Homo Sapiens
IVNGHTLLV

SEQ ID NO: 82412 - protein, 9 aa, Homo Sapiens
KAIEVLLTL

SEQ ID NO: 82413 - protein, 9 aa, Homo Sapiens
KAINPINTF

SEQ ID NO: 82414 - protein, 9 aa, Homo Sapiens
KALEQILEY

SEQ ID NO: 82415 - protein, 9 aa, Homo Sapiens
KALEVFPEF

SEQ ID NO: 82416 - protein, 9 aa, Homo Sapiens
KALEYVFKF

SEQ ID NO: 82417 - protein, 9 aa, Homo Sapiens
KAMPITLHL

SEQ ID NO: 82418 - protein, 9 aa, Homo Sapiens
KAVSLFLCY

SEQ ID NO: 82419 - protein, 9 aa, Homo Sapiens
KAYELALYL

SEQ ID NO: 82420 - protein, 9 aa, Homo Sapiens
KAYRLTPKL

SEQ ID NO: 82421 - protein, 9 aa, Homo Sapiens
KIFPAALQL

SEQ ID NO: 82422 - protein, 9 aa, Homo Sapiens
KIIEKMATF

SEQ ID NO: 82423 - protein, 9 aa, Homo Sapiens
KIIPKTLTW

SEQ ID NO: 82424 - protein, 9 aa, Homo Sapiens
KLCDVTLKI

SEQ ID NO: 82425 - protein, 9 aa, Homo Sapiens
KLFPYALAF

SEQ ID NO: 82426 - protein, 9 aa, Homo Sapiens
KLYEKFLEF

SEQ ID NO: 82427 - protein, 9 aa, Homo Sapiens
KQYDKALEI

SEQ ID NO: 82428 - protein, 9 aa, Homo Sapiens
KSANRVLRI

SEQ ID NO: 82429 - protein, 9 aa, Homo Sapiens
KSANSTLRL

SEQ ID NO: 82430 - protein, 9 aa, Homo Sapiens
KSAVSPSTF

SEQ ID NO: 82431 - protein, 9 aa, Homo Sapiens
KSCDLLLFL

SEQ ID NO: 82432 - protein, 9 aa, Homo Sapiens
KSCVIVLRI

SEQ ID NO: 82433 - protein, 9 aa, Homo Sapiens
KSDSHVRML

SEQ ID NO: 82434 - protein, 9 aa, Homo Sapiens
KSFAHILEL

SEQ ID NO: 82435 - protein, 9 aa, Homo Sapiens
KSFDFHFGF

SEQ ID NO: 82436 - protein, 9 aa, Homo Sapiens
KSFEGLFYF

SEQ ID NO: 82437 - protein, 9 aa, Homo Sapiens
KSFEKLMKI

SEQ ID NO: 82438 - protein, 9 aa, Homo Sapiens
KSFLFSALY

SEQ ID NO: 82439 - protein, 9 aa, Homo Sapiens
KSFNRHLHF

SEQ ID NO: 82440 - protein, 9 aa, Homo Sapiens
KSFSKLLEL

SEQ ID NO: 82441 - protein, 9 aa, Homo Sapiens
KSHLLVTGF

SEQ ID NO: 82442 - protein, 9 aa, Homo Sapiens
KSIARVLTV

SEQ ID NO: 82443 - protein, 9 aa, Homo Sapiens
KSIDNKALY

SEQ ID NO: 82444 - protein, 9 aa, Homo Sapiens
KSIDRVLDI

SEQ ID NO: 82445 - protein, 9 aa, Homo Sapiens
KSIEPVSSW

SEQ ID NO: 82446 - protein, 9 aa, Homo Sapiens
KSIYPTLEI

SEQ ID NO: 82447 - protein, 9 aa, Homo Sapiens
KSLAKALMI

SEQ ID NO: 82448 - protein, 9 aa, Homo Sapiens
KSLALLLGY

SEQ ID NO: 82449 - protein, 9 aa, Homo Sapiens
KSLCLKLLL

SEQ ID NO: 82450 - protein, 9 aa, Homo Sapiens
KSLDFVLGW

SEQ ID NO: 82451 - protein, 9 aa, Homo Sapiens
KSLDTTLQF

SEQ ID NO: 82452 - protein, 9 aa, Homo Sapiens
KSLEAFFLY

SEQ ID NO: 82453 - protein, 9 aa, Homo Sapiens
KSLEDTKKL

SEQ ID NO: 82454 - protein, 9 aa, Homo Sapiens
KSLENAIEW

SEQ ID NO: 82455 - protein, 9 aa, Homo Sapiens
KSLENILTL

SEQ ID NO: 82456 - protein, 9 aa, Homo Sapiens
KSLERATQL

SEQ ID NO: 82457 - protein, 9 aa, Homo Sapiens
KSLESKLIL

SEQ ID NO: 82458 - protein, 9 aa, Homo Sapiens
KSLGVTTKF

SEQ ID NO: 82459 - protein, 9 aa, Homo Sapiens
KSLLFVNTL

SEQ ID NO: 82460 - protein, 9 aa, Homo Sapiens
KSLPASLSF

SEQ ID NO: 82461 - protein, 9 aa, Homo Sapiens
KSLPSVLVI

SEQ ID NO: 82462 - protein, 9 aa, Homo Sapiens
KSLTGTLYL

SEQ ID NO: 82463 - protein, 9 aa, Homo Sapiens
KSLWYTLHF

SEQ ID NO: 82464 - protein, 9 aa, Homo Sapiens
KSMEPSLKY

SEQ ID NO: 82465 - protein, 9 aa, Homo Sapiens
KSMFQRTTY

SEQ ID NO: 82466 - protein, 9 aa, Homo Sapiens
KSNPKPLVL

SEQ ID NO: 82467 - protein, 9 aa, Homo Sapiens
KSNTWSPKY

SEQ ID NO: 82468 - protein, 9 aa, Homo Sapiens
KSQDKTLKI

SEQ ID NO: 82469 - protein, 9 aa, Homo Sapiens
KSSAISLHY

SEQ ID NO: 82470 - protein, 9 aa, Homo Sapiens
KSSATRLLY

SEQ ID NO: 82471 - protein, 9 aa, Homo Sapiens
KSSDKQLRI

SEQ ID NO: 82472 - protein, 9 aa, Homo Sapiens
KSVDWLLVF

SEQ ID NO: 82473 - protein, 9 aa, Homo Sapiens
KSVENQMRY

SEQ ID NO: 82474 - protein, 9 aa, Homo Sapiens
KSVQRCMAL

SEQ ID NO: 82475 - protein, 9 aa, Homo Sapiens
KSVRPGASY

SEQ ID NO: 82476 - protein, 9 aa, Homo Sapiens
KSYAGYQTL

SEQ ID NO: 82477 - protein, 9 aa, Homo Sapiens
KSYDRNYRL

SEQ ID NO: 82478 - protein, 9 aa, Homo Sapiens
KSYEAKLRL

SEQ ID NO: 82479 - protein, 9 aa, Homo Sapiens
KSYEVLLSF

SEQ ID NO: 82480 - protein, 9 aa, Homo Sapiens
KSYLRCITF

SEQ ID NO: 82481 - protein, 9 aa, Homo Sapiens
KSYQSFQTF

SEQ ID NO: 82482 - protein, 9 aa, Homo Sapiens
KSYSKAFTL

SEQ ID NO: 82483 - protein, 9 aa, Homo Sapiens
KSYVQGVTW

SEQ ID NO: 82484 - protein, 9 aa, Homo Sapiens
KSYYHVYKL

SEQ ID NO: 82485 - protein, 9 aa, Homo Sapiens
KSYYLRNTF

SEQ ID NO: 82486 - protein, 9 aa, Homo Sapiens
KTAEAQLAY

SEQ ID NO: 82487 - protein, 9 aa, Homo Sapiens
KTAEFLSKL

SEQ ID NO: 82488 - protein, 9 aa, Homo Sapiens
KTAERLLRF

SEQ ID NO: 82489 - protein, 9 aa, Homo Sapiens
KTAIGALKL

SEQ ID NO: 82490 - protein, 9 aa, Homo Sapiens
KTAQNHPML

SEQ ID NO: 82491 - protein, 9 aa, Homo Sapiens
KTAVVVGTI

SEQ ID NO: 82492 - protein, 9 aa, Homo Sapiens
KTFARYLSF

SEQ ID NO: 82493 - protein, 9 aa, Homo Sapiens
KTFERAMKL

SEQ ID NO: 82494 - protein, 9 aa, Homo Sapiens
KTFIFHSSI

SEQ ID NO: 82495 - protein, 9 aa, Homo Sapiens
KTFKRILVL

SEQ ID NO: 82496 - protein, 9 aa, Homo Sapiens
KTFLFSATM

SEQ ID NO: 82497 - protein, 9 aa, Homo Sapiens
KTFNQQLTL

SEQ ID NO: 82498 - protein, 9 aa, Homo Sapiens
KTFPFHFMF

SEQ ID NO: 82499 - protein, 9 aa, Homo Sapiens
KTFVQKQTL

SEQ ID NO: 82500 - protein, 9 aa, Homo Sapiens
KTFVQKSTL

SEQ ID NO: 82501 - protein, 9 aa, Homo Sapiens
KTFVTYTVY

SEQ ID NO: 82502 - protein, 9 aa, Homo Sapiens
KTHLQHLRW

SEQ ID NO: 82503 - protein, 9 aa, Homo Sapiens
KTHLYTLIL

SEQ ID NO: 82504 - protein, 9 aa, Homo Sapiens
KTIDGILLL

SEQ ID NO: 82505 - protein, 9 aa, Homo Sapiens
KTIETSPSL

SEQ ID NO: 82506 - protein, 9 aa, Homo Sapiens
KTIIKKLFF

SEQ ID NO: 82507 - protein, 9 aa, Homo Sapiens
KTILDPLTL

SEQ ID NO: 82508 - protein, 9 aa, Homo Sapiens
KTIQKAALL

SEQ ID NO: 82509 - protein, 9 aa, Homo Sapiens
KTIQQTLIL

SEQ ID NO: 82510 - protein, 9 aa, Homo Sapiens
KTISVVLQL

SEQ ID NO: 82511 - protein, 9 aa, Homo Sapiens
KTIVMGASF

SEQ ID NO: 82512 - protein, 9 aa, Homo Sapiens
KTKEIEQVY

SEQ ID NO: 82513 - protein, 9 aa, Homo Sapiens
KTLARALGL

SEQ ID NO: 82514 - protein, 9 aa, Homo Sapiens
KTLEMELKL

SEQ ID NO: 82515 - protein, 9 aa, Homo Sapiens
KTLEQALQL

SEQ ID NO: 82516 - protein, 9 aa, Homo Sapiens
KTLERSYLL

SEQ ID NO: 82517 - protein, 9 aa, Homo Sapiens
KTLESMSSY

SEQ ID NO: 82518 - protein, 9 aa, Homo Sapiens
KTLILCLTF

SEQ ID NO: 82519 - protein, 9 aa, Homo Sapiens
KTLNYTARF

SEQ ID NO: 82520 - protein, 9 aa, Homo Sapiens
KTLPSMLIL

SEQ ID NO: 82521 - protein, 9 aa, Homo Sapiens
KTLRFVAHY

SEQ ID NO: 82522 - protein, 9 aa, Homo Sapiens
KTLSAILRI

SEQ ID NO: 82523 - protein, 9 aa, Homo Sapiens
KTMKQQLQF

SEQ ID NO: 82524 - protein, 9 aa, Homo Sapiens
KTNEMLLNF

SEQ ID NO: 82525 - protein, 9 aa, Homo Sapiens
KTNVFNATF

SEQ ID NO: 82526 - protein, 9 aa, Homo Sapiens
KTPEVHLKY

SEQ ID NO: 82527 - protein, 9 aa, Homo Sapiens
KTRQIISTI

SEQ ID NO: 82528 - protein, 9 aa, Homo Sapiens
KTSDRCLAW

SEQ ID NO: 82529 - protein, 9 aa, Homo Sapiens
KTSPKALVI

SEQ ID NO: 82530 - protein, 9 aa, Homo Sapiens
KTVDQHMKL

SEQ ID NO: 82531 - protein, 9 aa, Homo Sapiens
KTVDVLLKL

SEQ ID NO: 82532 - protein, 9 aa, Homo Sapiens
KTVEEALTI

SEQ ID NO: 82533 - protein, 9 aa, Homo Sapiens
KTVEQHLRL

SEQ ID NO: 82534 - protein, 9 aa, Homo Sapiens
KTVNKILQI

SEQ ID NO: 82535 - protein, 9 aa, Homo Sapiens
KTWDKVAVL

SEQ ID NO: 82536 - protein, 9 aa, Homo Sapiens
KTYDKTVAL

SEQ ID NO: 82537 - protein, 9 aa, Homo Sapiens
KTYDLLFKL

SEQ ID NO: 82538 - protein, 9 aa, Homo Sapiens
KTYDYLFKL

SEQ ID NO: 82539 - protein, 9 aa, Homo Sapiens
KTYGNVLVL

SEQ ID NO: 82540 - protein, 9 aa, Homo Sapiens
KTYIPILAF

SEQ ID NO: 82541 - protein, 9 aa, Homo Sapiens
KTYKQISTL

SEQ ID NO: 82542 - protein, 9 aa, Homo Sapiens
KTYQETPEI

SEQ ID NO: 82543 - protein, 9 aa, Homo Sapiens
KTYVLKSKL

SEQ ID NO: 82544 - protein, 9 aa, Homo Sapiens
KTYVTQTLL

SEQ ID NO: 82545 - protein, 9 aa, Homo Sapiens
KVADMALHY

SEQ ID NO: 82546 - protein, 9 aa, Homo Sapiens
KVADPVVTF

SEQ ID NO: 82547 - protein, 9 aa, Homo Sapiens
KVAPVVITY

SEQ ID NO: 82548 - protein, 9 aa, Homo Sapiens
KVFERQLQL

SEQ ID NO: 82549 - protein, 9 aa, Homo Sapiens
KVIEINPYL

SEQ ID NO: 82550 - protein, 9 aa, Homo Sapiens
KVISKDLVI

SEQ ID NO: 82551 - protein, 9 aa, Homo Sapiens
KVKETELEL

SEQ ID NO: 82552 - protein, 9 aa, Homo Sapiens
KVLDKLLLY

SEQ ID NO: 82553 - protein, 9 aa, Homo Sapiens
KVLEHVPLL

SEQ ID NO: 82554 - protein, 9 aa, Homo Sapiens
KVLGKALSL

SEQ ID NO: 82555 - protein, 9 aa, Homo Sapiens
KVLNKVLAI

SEQ ID NO: 82556 - protein, 9 aa, Homo Sapiens
KVLPRDLQL

SEQ ID NO: 82557 - protein, 9 aa, Homo Sapiens
KVLQNALLL

SEQ ID NO: 82558 - protein, 9 aa, Homo Sapiens
KVLSGALKL

SEQ ID NO: 82559 - protein, 9 aa, Homo Sapiens
KVMEHLLKL

SEQ ID NO: 82560 - protein, 9 aa, Homo Sapiens
KVYEKLMKI

SEQ ID NO: 82561 - protein, 9 aa, Homo Sapiens
KVYENYPTY

SEQ ID NO: 82562 - protein, 9 aa, Homo Sapiens
KVYNIQIRY

SEQ ID NO: 82563 - protein, 9 aa, Homo Sapiens
KVYTRTPTL

SEQ ID NO: 82564 - protein, 9 aa, Homo Sapiens
LAAPVISVL

SEQ ID NO: 82565 - protein, 9 aa, Homo Sapiens
LACGRNLKL

SEQ ID NO: 82566 - protein, 9 aa, Homo Sapiens
LAFSRALEL

SEQ ID NO: 82567 - protein, 9 aa, Homo Sapiens
LAIAGTLKF

SEQ ID NO: 82568 - protein, 9 aa, Homo Sapiens
LAWLRVLRL

SEQ ID NO: 82569 - protein, 9 aa, Homo Sapiens
LAYDTQLVL

SEQ ID NO: 82570 - protein, 9 aa, Homo Sapiens
LIYSGKLLL

SEQ ID NO: 82571 - protein, 9 aa, Homo Sapiens
LQMAKQLGY

SEQ ID NO: 82572 - protein, 9 aa, Homo Sapiens
LQWDKVLRL

SEQ ID NO: 82573 - protein, 9 aa, Homo Sapiens
LRLSYPLEL

SEQ ID NO: 82574 - protein, 9 aa, Homo Sapiens
LRLTALLLR

SEQ ID NO: 82575 - protein, 9 aa, Homo Sapiens
LSACKILKL

SEQ ID NO: 82576 - protein, 9 aa, Homo Sapiens
LSADPRSVY

SEQ ID NO: 82577 - protein, 9 aa, Homo Sapiens
LSAIPVSAF

SEQ ID NO: 82578 - protein, 9 aa, Homo Sapiens
LSAIYGGTY

SEQ ID NO: 82579 - protein, 9 aa, Homo Sapiens
LSALKTLSL

SEQ ID NO: 82580 - protein, 9 aa, Homo Sapiens
LSAPDALKI

SEQ ID NO: 82581 - protein, 9 aa, Homo Sapiens
LSAPIMSRF

SEQ ID NO: 82582 - protein, 9 aa, Homo Sapiens
LSAPLIGAL

SEQ ID NO: 82583 - protein, 9 aa, Homo Sapiens
LSAPNLNSW

SEQ ID NO: 82584 - protein, 9 aa, Homo Sapiens
LSAVHSPTF

SEQ ID NO: 82585 - protein, 9 aa, Homo Sapiens
LSAVPLRTY

SEQ ID NO: 82586 - protein, 9 aa, Homo Sapiens
LSDDHVLIL

SEQ ID NO: 82587 - protein, 9 aa, Homo Sapiens
LSDEYKQIL

SEQ ID NO: 82588 - protein, 9 aa, Homo Sapiens
LSEEQCREL

SEQ ID NO: 82589 - protein, 9 aa, Homo Sapiens
LSEPDLASY

SEQ ID NO: 82590 - protein, 9 aa, Homo Sapiens
LSFKDPFVI

SEQ ID NO: 82591 - protein, 9 aa, Homo Sapiens
LSFPTTKTY

SEQ ID NO: 82592 - protein, 9 aa, Homo Sapiens
LSFSQVFKL

SEQ ID NO: 82593 - protein, 9 aa, Homo Sapiens
LSFTHPISF

SEQ ID NO: 82594 - protein, 9 aa, Homo Sapiens
LSHAITLEF

SEQ ID NO: 82595 - protein, 9 aa, Homo Sapiens
LSHSLLVTL

SEQ ID NO: 82596 - protein, 9 aa, Homo Sapiens
LSIEKALDL

SEQ ID NO: 82597 - protein, 9 aa, Homo Sapiens
LSIKDPKLY

SEQ ID NO: 82598 - protein, 9 aa, Homo Sapiens
LSIPYRLIF

SEQ ID NO: 82599 - protein, 9 aa, Homo Sapiens
LSIVDRTTI

SEQ ID NO: 82600 - protein, 9 aa, Homo Sapiens
LSKDSILSL

SEQ ID NO: 82601 - protein, 9 aa, Homo Sapiens
LSLADTLRY

SEQ ID NO: 82602 - protein, 9 aa, Homo Sapiens
LSLEEILRL

SEQ ID NO: 82603 - protein, 9 aa, Homo Sapiens
LSLEFPSGY

SEQ ID NO: 82604 - protein, 9 aa, Homo Sapiens
LSLEKPLLL

SEQ ID NO: 82605 - protein, 9 aa, Homo Sapiens
LSLENVLYY

SEQ ID NO: 82606 - protein, 9 aa, Homo Sapiens
LSLISIMKY

SEQ ID NO: 82607 - protein, 9 aa, Homo Sapiens
LSLLGILKY

SEQ ID NO: 82608 - protein, 9 aa, Homo Sapiens
LSLLQKLIL

SEQ ID NO: 82609 - protein, 9 aa, Homo Sapiens
LSLPGILHF

SEQ ID NO: 82610 - protein, 9 aa, Homo Sapiens
LSLPKQLVL

SEQ ID NO: 82611 - protein, 9 aa, Homo Sapiens
LSLSRSLVL

SEQ ID NO: 82612 - protein, 9 aa, Homo Sapiens
LSNDHICYF

SEQ ID NO: 82613 - protein, 9 aa, Homo Sapiens
LSNEQVLKF

SEQ ID NO: 82614 - protein, 9 aa, Homo Sapiens
LSNISHLNY

SEQ ID NO: 82615 - protein, 9 aa, Homo Sapiens
LSNMKILTL

SEQ ID NO: 82616 - protein, 9 aa, Homo Sapiens
LSNSRQLKW

SEQ ID NO: 82617 - protein, 9 aa, Homo Sapiens
LSNTVMPRF

SEQ ID NO: 82618 - protein, 9 aa, Homo Sapiens
LSNTWNEKY

SEQ ID NO: 82619 - protein, 9 aa, Homo Sapiens
LSNVQRLTF

SEQ ID NO: 82620 - protein, 9 aa, Homo Sapiens
LSSPLNPKL

SEQ ID NO: 82621 - protein, 9 aa, Homo Sapiens
LSSPRHLKF

SEQ ID NO: 82622 - protein, 9 aa, Homo Sapiens
LSSTEILKW

SEQ ID NO: 82623 - protein, 9 aa, Homo Sapiens
LSSVTQLHL

SEQ ID NO: 82624 - protein, 9 aa, Homo Sapiens
LSTIKQLLW

SEQ ID NO: 82625 - protein, 9 aa, Homo Sapiens
LSTKPPGTF

SEQ ID NO: 82626 - protein, 9 aa, Homo Sapiens
LSTLVRPVF

SEQ ID NO: 82627 - protein, 9 aa, Homo Sapiens
LSTRLTLLL

SEQ ID NO: 82628 - protein, 9 aa, Homo Sapiens
LSVKFGATL

SEQ ID NO: 82629 - protein, 9 aa, Homo Sapiens
LSVLKVLVL

SEQ ID NO: 82630 - protein, 9 aa, Homo Sapiens
LSVPAGFLL

SEQ ID NO: 82631 - protein, 9 aa, Homo Sapiens
LSYDGRLVI

SEQ ID NO: 82632 - protein, 9 aa, Homo Sapiens
LSYGPGPSL

SEQ ID NO: 82633 - protein, 9 aa, Homo Sapiens
LSYGVASSY

SEQ ID NO: 82634 - protein, 9 aa, Homo Sapiens
LSYKSVISF

SEQ ID NO: 82635 - protein, 9 aa, Homo Sapiens
LSYLGFETY

SEQ ID NO: 82636 - protein, 9 aa, Homo Sapiens
LSYNLPLEL

SEQ ID NO: 82637 - protein, 9 aa, Homo Sapiens
LSYSEILRL

SEQ ID NO: 82638 - protein, 9 aa, Homo Sapiens
LSYTEILKI

SEQ ID NO: 82639 - protein, 9 aa, Homo Sapiens
LTADSHPSY

SEQ ID NO: 82640 - protein, 9 aa, Homo Sapiens
LTALGKLLY

SEQ ID NO: 82641 - protein, 9 aa, Homo Sapiens
LTANTGHTI

SEQ ID NO: 82642 - protein, 9 aa, Homo Sapiens
LTAPVIGYI

SEQ ID NO: 82643 - protein, 9 aa, Homo Sapiens
LTCTFNLKI

SEQ ID NO: 82644 - protein, 9 aa, Homo Sapiens
LTEPIISRF

SEQ ID NO: 82645 - protein, 9 aa, Homo Sapiens
LTFVRQLEI

SEQ ID NO: 82646 - protein, 9 aa, Homo Sapiens
LTHASSLGY

SEQ ID NO: 82647 - protein, 9 aa, Homo Sapiens
LTHDVELNL

SEQ ID NO: 82648 - protein, 9 aa, Homo Sapiens
LTHEQQLIL

SEQ ID NO: 82649 - protein, 9 aa, Homo Sapiens
LTHEVPLSL

SEQ ID NO: 82650 - protein, 9 aa, Homo Sapiens
LTHKGVKEF

SEQ ID NO: 82651 - protein, 9 aa, Homo Sapiens
LTHKRILKF

SEQ ID NO: 82652 - protein, 9 aa, Homo Sapiens
LTHSLVLHY

SEQ ID NO: 82653 - protein, 9 aa, Homo Sapiens
LTHSSRLKL

SEQ ID NO: 82654 - protein, 9 aa, Homo Sapiens
LTHWEQLDY

SEQ ID NO: 82655 - protein, 9 aa, Homo Sapiens
LTIDHVPIW

SEQ ID NO: 82656 - protein, 9 aa, Homo Sapiens
LTIKNFLEF

SEQ ID NO: 82657 - protein, 9 aa, Homo Sapiens
LTIVDTPGF

SEQ ID NO: 82658 - protein, 9 aa, Homo Sapiens
LTKAKEALI

SEQ ID NO: 82659 - protein, 9 aa, Homo Sapiens
LTKLITLQI

SEQ ID NO: 82660 - protein, 9 aa, Homo Sapiens
LTKLRTLLL

SEQ ID NO: 82661 - protein, 9 aa, Homo Sapiens
LTKQEFQTL

SEQ ID NO: 82662 - protein, 9 aa, Homo Sapiens
LTLEGIRQF

SEQ ID NO: 82663 - protein, 9 aa, Homo Sapiens
LTLEGVARY

SEQ ID NO: 82664 - protein, 9 aa, Homo Sapiens
LTLGHQFRL

SEQ ID NO: 82665 - protein, 9 aa, Homo Sapiens
LTLPRSLLL

SEQ ID NO: 82666 - protein, 9 aa, Homo Sapiens
LTLPSALHF

SEQ ID NO: 82667 - protein, 9 aa, Homo Sapiens
LTMPDTPRL

SEQ ID NO: 82668 - protein, 9 aa, Homo Sapiens
LTMTRNAVW

SEQ ID NO: 82669 - protein, 9 aa, Homo Sapiens
LTNKVQYVI

SEQ ID NO: 82670 - protein, 9 aa, Homo Sapiens
LTNPRTLKI

SEQ ID NO: 82671 - protein, 9 aa, Homo Sapiens
LTREDGLKY

SEQ ID NO: 82672 - protein, 9 aa, Homo Sapiens
LTRPGSSYF

SEQ ID NO: 82673 - protein, 9 aa, Homo Sapiens
LTRVPTSQL

SEQ ID NO: 82674 - protein, 9 aa, Homo Sapiens
LTSAKCLTY

SEQ ID NO: 82675 - protein, 9 aa, Homo Sapiens
LTSEQRLLI

SEQ ID NO: 82676 - protein, 9 aa, Homo Sapiens
LTSEWFAKY

SEQ ID NO: 82677 - protein, 9 aa, Homo Sapiens
LTSKFMTTF

SEQ ID NO: 82678 - protein, 9 aa, Homo Sapiens
LTSRGSQQY

SEQ ID NO: 82679 - protein, 9 aa, Homo Sapiens
LTSRMKITL

SEQ ID NO: 82680 - protein, 9 aa, Homo Sapiens
LTSSHTVMI

SEQ ID NO: 82681 - protein, 9 aa, Homo Sapiens
LTTEVHPEL

SEQ ID NO: 82682 - protein, 9 aa, Homo Sapiens
LTTGGTLKI

SEQ ID NO: 82683 - protein, 9 aa, Homo Sapiens
LTTLRALYL

SEQ ID NO: 82684 - protein, 9 aa, Homo Sapiens
LTTSRQLTL

SEQ ID NO: 82685 - protein, 9 aa, Homo Sapiens
LTVIDTPGF

SEQ ID NO: 82686 - protein, 9 aa, Homo Sapiens
LTVRNLPQY

SEQ ID NO: 82687 - protein, 9 aa, Homo Sapiens
LTVSNIESF

SEQ ID NO: 82688 - protein, 9 aa, Homo Sapiens
LTVVQPLTL

SEQ ID NO: 82689 - protein, 9 aa, Homo Sapiens
LTWERMLGL

SEQ ID NO: 82690 - protein, 9 aa, Homo Sapiens
LTWGGHWLY

SEQ ID NO: 82691 - protein, 9 aa, Homo Sapiens
LTWKKIIKF

SEQ ID NO: 82692 - protein, 9 aa, Homo Sapiens
LTYASPPLI

SEQ ID NO: 82693 - protein, 9 aa, Homo Sapiens
LTYDFVHVI

SEQ ID NO: 82694 - protein, 9 aa, Homo Sapiens
LTYHGHLYL

SEQ ID NO: 82695 - protein, 9 aa, Homo Sapiens
LTYISKVSI

SEQ ID NO: 82696 - protein, 9 aa, Homo Sapiens
LTYLGCMKV

SEQ ID NO: 82697 - protein, 9 aa, Homo Sapiens
LTYLLQNSL

SEQ ID NO: 82698 - protein, 9 aa, Homo Sapiens
LTYMPSVSL

SEQ ID NO: 82699 - protein, 9 aa, Homo Sapiens
LTYNVKIFY

SEQ ID NO: 82700 - protein, 9 aa, Homo Sapiens
LTYVPLLGL

SEQ ID NO: 82701 - protein, 9 aa, Homo Sapiens
LVIGRVLEL

SEQ ID NO: 82702 - protein, 9 aa, Homo Sapiens
LVNDQLLGF

SEQ ID NO: 82703 - protein, 9 aa, Homo Sapiens
LVNSETLKI

SEQ ID NO: 82704 - protein, 9 aa, Homo Sapiens
MAYARQIYI

SEQ ID NO: 82705 - protein, 9 aa, Homo Sapiens
MAYGGKLKY

SEQ ID NO: 82706 - protein, 9 aa, Homo Sapiens
MGYNKALEL

SEQ ID NO: 82707 - protein, 9 aa, Homo Sapiens
MILNKALLL

SEQ ID NO: 82708 - protein, 9 aa, Homo Sapiens
MIYRKALRL

SEQ ID NO: 82709 - protein, 9 aa, Homo Sapiens
MMYSGELKF

SEQ ID NO: 82710 - protein, 9 aa, Homo Sapiens
MSHKRIMLF

SEQ ID NO: 82711 - protein, 9 aa, Homo Sapiens
MSLKWMSVF

SEQ ID NO: 82712 - protein, 9 aa, Homo Sapiens
MSLPYRLVF

SEQ ID NO: 82713 - protein, 9 aa, Homo Sapiens
MSMVANLLY

SEQ ID NO: 82714 - protein, 9 aa, Homo Sapiens
MSNTPTHSI

SEQ ID NO: 82715 - protein, 9 aa, Homo Sapiens
MSQLNPLKI

SEQ ID NO: 82716 - protein, 9 aa, Homo Sapiens
MSVEVRQTL

SEQ ID NO: 82717 - protein, 9 aa, Homo Sapiens
MSVQPTVSL

SEQ ID NO: 82718 - protein, 9 aa, Homo Sapiens
MSYAEVMRL

SEQ ID NO: 82719 - protein, 9 aa, Homo Sapiens
MSYEQLMQL

SEQ ID NO: 82720 - protein, 9 aa, Homo Sapiens
MSYPAKVTL

SEQ ID NO: 82721 - protein, 9 aa, Homo Sapiens
MTAPLKLTY

SEQ ID NO: 82722 - protein, 9 aa, Homo Sapiens
MTHCGVLEF

SEQ ID NO: 82723 - protein, 9 aa, Homo Sapiens
MTHDGYLKL

SEQ ID NO: 82724 - protein, 9 aa, Homo Sapiens
MTHNLLLNY

SEQ ID NO: 82725 - protein, 9 aa, Homo Sapiens
MTILGSAVL

SEQ ID NO: 82726 - protein, 9 aa, Homo Sapiens
MTIRFDSSF

SEQ ID NO: 82727 - protein, 9 aa, Homo Sapiens
MTKEECLQF

SEQ ID NO: 82728 - protein, 9 aa, Homo Sapiens
MTKKKELTL

SEQ ID NO: 82729 - protein, 9 aa, Homo Sapiens
MTKKPGMFF

SEQ ID NO: 82730 - protein, 9 aa, Homo Sapiens
MTLKSALAL

SEQ ID NO: 82731 - protein, 9 aa, Homo Sapiens
MTNGFHMTW

SEQ ID NO: 82732 - protein, 9 aa, Homo Sapiens
MTNPHNHLY

SEQ ID NO: 82733 - protein, 9 aa, Homo Sapiens
MTQTPALKF

SEQ ID NO: 82734 - protein, 9 aa, Homo Sapiens
MTSDHSPVF

SEQ ID NO: 82735 - protein, 9 aa, Homo Sapiens
MTSPLNLSY

SEQ ID NO: 82736 - protein, 9 aa, Homo Sapiens
MTTLQVLTL

SEQ ID NO: 82737 - protein, 9 aa, Homo Sapiens
MTTPQVLKL

SEQ ID NO: 82738 - protein, 9 aa, Homo Sapiens
MTVPGALRL

SEQ ID NO: 82739 - protein, 9 aa, Homo Sapiens
MTVQILLKL

SEQ ID NO: 82740 - protein, 9 aa, Homo Sapiens
MTYERILYI

SEQ ID NO: 82741 - protein, 9 aa, Homo Sapiens
MVLLRVLIL

SEQ ID NO: 82742 - protein, 9 aa, Homo Sapiens
MVVDRALYL

SEQ ID NO: 82743 - protein, 9 aa, Homo Sapiens
NAIEHTLQW

SEQ ID NO: 82744 - protein, 9 aa, Homo Sapiens
NSFIHVIMY

SEQ ID NO: 82745 - protein, 9 aa, Homo Sapiens
NTYPIKLFY

SEQ ID NO: 82746 - protein, 9 aa, Homo Sapiens
QAFFLHTTY

SEQ ID NO: 82747 - protein, 9 aa, Homo Sapiens
QAHSQLLQY

SEQ ID NO: 82748 - protein, 9 aa, Homo Sapiens
QAIGPTLLL

SEQ ID NO: 82749 - protein, 9 aa, Homo Sapiens
QAIQWILHY

SEQ ID NO: 82750 - protein, 9 aa, Homo Sapiens
QALEKILQL

SEQ ID NO: 82751 - protein, 9 aa, Homo Sapiens
QSAQHALRL

SEQ ID NO: 82752 - protein, 9 aa, Homo Sapiens
QSAVMSATF

SEQ ID NO: 82753 - protein, 9 aa, Homo Sapiens
QSCNFALRF

SEQ ID NO: 82754 - protein, 9 aa, Homo Sapiens
QSFPEPLII

SEQ ID NO: 82755 - protein, 9 aa, Homo Sapiens
QSIAFISRL

SEQ ID NO: 82756 - protein, 9 aa, Homo Sapiens
QSIEWPLKF

SEQ ID NO: 82757 - protein, 9 aa, Homo Sapiens
QSIPAVLEI

SEQ ID NO: 82758 - protein, 9 aa, Homo Sapiens
QSIQQALRY

SEQ ID NO: 82759 - protein, 9 aa, Homo Sapiens
QSISPGSRL

SEQ ID NO: 82760 - protein, 9 aa, Homo Sapiens
QSIVPALEI

SEQ ID NO: 82761 - protein, 9 aa, Homo Sapiens
QSKSPGSSW

SEQ ID NO: 82762 - protein, 9 aa, Homo Sapiens
QSLEIISRY

SEQ ID NO: 82763 - protein, 9 aa, Homo Sapiens
QSLGKPLVL

SEQ ID NO: 82764 - protein, 9 aa, Homo Sapiens
QSLHPPLKI

SEQ ID NO: 82765 - protein, 9 aa, Homo Sapiens
QSLILDLKY

SEQ ID NO: 82766 - protein, 9 aa, Homo Sapiens
QSLQHYLEL

SEQ ID NO: 82767 - protein, 9 aa, Homo Sapiens
QSLSNPLSI

SEQ ID NO: 82768 - protein, 9 aa, Homo Sapiens
QSLVKSLLL

SEQ ID NO: 82769 - protein, 9 aa, Homo Sapiens
QSMIRILGL

SEQ ID NO: 82770 - protein, 9 aa, Homo Sapiens
QSQSHTLAI

SEQ ID NO: 82771 - protein, 9 aa, Homo Sapiens
QSVASVLLY

SEQ ID NO: 82772 - protein, 9 aa, Homo Sapiens
QSYIFPSSI

SEQ ID NO: 82773 - protein, 9 aa, Homo Sapiens
QSYNKSFCY

SEQ ID NO: 82774 - protein, 9 aa, Homo Sapiens
QSYQGHPAL

SEQ ID NO: 82775 - protein, 9 aa, Homo Sapiens
QSYSWRSTL

SEQ ID NO: 82776 - protein, 9 aa, Homo Sapiens
QSYWNHREL

SEQ ID NO: 82777 - protein, 9 aa, Homo Sapiens
QTAEFKEAF

SEQ ID NO: 82778 - protein, 9 aa, Homo Sapiens
QTAFPALQL

SEQ ID NO: 82779 - protein, 9 aa, Homo Sapiens
QTAIHRVTL

SEQ ID NO: 82780 - protein, 9 aa, Homo Sapiens
QTALYTLKL

SEQ ID NO: 82781 - protein, 9 aa, Homo Sapiens
QTATQLLKL

SEQ ID NO: 82782 - protein, 9 aa, Homo Sapiens
QTCRLLLSY

SEQ ID NO: 82783 - protein, 9 aa, Homo Sapiens
QTCSRVLVF

SEQ ID NO: 82784 - protein, 9 aa, Homo Sapiens
QTFLKALLF

SEQ ID NO: 82785 - protein, 9 aa, Homo Sapiens
QTHENMSQL

SEQ ID NO: 82786 - protein, 9 aa, Homo Sapiens
QTIGNHASY

SEQ ID NO: 82787 - protein, 9 aa, Homo Sapiens
QTIGYQIRL

SEQ ID NO: 82788 - protein, 9 aa, Homo Sapiens
QTIINNASY

SEQ ID NO: 82789 - protein, 9 aa, Homo Sapiens
QTISPLSTY

SEQ ID NO: 82790 - protein, 9 aa, Homo Sapiens
QTKAEGPTI

SEQ ID NO: 82791 - protein, 9 aa, Homo Sapiens
QTLARQMQL

SEQ ID NO: 82792 - protein, 9 aa, Homo Sapiens
QTLENISNI

SEQ ID NO: 82793 - protein, 9 aa, Homo Sapiens
QTLGKPLLI

SEQ ID NO: 82794 - protein, 9 aa, Homo Sapiens
QTLIKTLIF

SEQ ID NO: 82795 - protein, 9 aa, Homo Sapiens
QTLLKTLEL

SEQ ID NO: 82796 - protein, 9 aa, Homo Sapiens
QTLQRSISF

SEQ ID NO: 82797 - protein, 9 aa, Homo Sapiens
QTLRFLGLY

SEQ ID NO: 82798 - protein, 9 aa, Homo Sapiens
QTLVNLDTY

SEQ ID NO: 82799 - protein, 9 aa, Homo Sapiens
QTMDNHMQL

SEQ ID NO: 82800 - protein, 9 aa, Homo Sapiens
QTNDVLLTF

SEQ ID NO: 82801 - protein, 9 aa, Homo Sapiens
QTNIQHFLF

SEQ ID NO: 82802 - protein, 9 aa, Homo Sapiens
QTNQNQLHL

SEQ ID NO: 82803 - protein, 9 aa, Homo Sapiens
QTSSSTLKF

SEQ ID NO: 82804 - protein, 9 aa, Homo Sapiens
QTTDWRATL

SEQ ID NO: 82805 - protein, 9 aa, Homo Sapiens
QTTSHELTI

SEQ ID NO: 82806 - protein, 9 aa, Homo Sapiens
QTVAQRLKF

SEQ ID NO: 82807 - protein, 9 aa, Homo Sapiens
QTVQDGRQF

SEQ ID NO: 82808 - protein, 9 aa, Homo Sapiens
QTVQSILRF

SEQ ID NO: 82809 - protein, 9 aa, Homo Sapiens
QTVRGTLAY

SEQ ID NO: 82810 - protein, 9 aa, Homo Sapiens
QTVSPAEKW

SEQ ID NO: 82811 - protein, 9 aa, Homo Sapiens
QTYFFPIHL

SEQ ID NO: 82812 - protein, 9 aa, Homo Sapiens
QTYGSTLKV

SEQ ID NO: 82813 - protein, 9 aa, Homo Sapiens
QTYPQALTL

SEQ ID NO: 82814 - protein, 9 aa, Homo Sapiens
QTYSEELCY

SEQ ID NO: 82815 - protein, 9 aa, Homo Sapiens
QTYSGVPII

SEQ ID NO: 82816 - protein, 9 aa, Homo Sapiens
QTYYRIFTW

SEQ ID NO: 82817 - protein, 9 aa, Homo Sapiens
QVAQMQLKY

SEQ ID NO: 82818 - protein, 9 aa, Homo Sapiens
QVCKNTLRL

SEQ ID NO: 82819 - protein, 9 aa, Homo Sapiens
QVHNLLLTY

SEQ ID NO: 82820 - protein, 9 aa, Homo Sapiens
QVLEHQVKY

SEQ ID NO: 82821 - protein, 9 aa, Homo Sapiens
QVLGRVLQL

SEQ ID NO: 82822 - protein, 9 aa, Homo Sapiens
QVLQLCLRY

SEQ ID NO: 82823 - protein, 9 aa, Homo Sapiens
QVYETLLTY

SEQ ID NO: 82824 - protein, 9 aa, Homo Sapiens
QVYIRQLRL

SEQ ID NO: 82825 - protein, 9 aa, Homo Sapiens
QVYLKALLL

SEQ ID NO: 82826 - protein, 9 aa, Homo Sapiens
RAAERALQL

SEQ ID NO: 82827 - protein, 9 aa, Homo Sapiens
RAAPFSLEY

SEQ ID NO: 82828 - protein, 9 aa, Homo Sapiens
RACHNLLTF

SEQ ID NO: 82829 - protein, 9 aa, Homo Sapiens
RAEPTVTNI

SEQ ID NO: 82830 - protein, 9 aa, Homo Sapiens
RAFDQKLIF

SEQ ID NO: 82831 - protein, 9 aa, Homo Sapiens
RAFHPDLEF

SEQ ID NO: 82832 - protein, 9 aa, Homo Sapiens
RAHEVALRL

SEQ ID NO: 82833 - protein, 9 aa, Homo Sapiens
RAHNVPLKL

SEQ ID NO: 82834 - protein, 9 aa, Homo Sapiens
RAIENIDTL

SEQ ID NO: 82835 - protein, 9 aa, Homo Sapiens
RAIQFYLEF

SEQ ID NO: 82836 - protein, 9 aa, Homo Sapiens
RAIVWLAGY

SEQ ID NO: 82837 - protein, 9 aa, Homo Sapiens
RALDHYLTL

SEQ ID NO: 82838 - protein, 9 aa, Homo Sapiens
RALDYALQI

SEQ ID NO: 82839 - protein, 9 aa, Homo Sapiens
RALHWYAKY

SEQ ID NO: 82840 - protein, 9 aa, Homo Sapiens
RALQFSLML

SEQ ID NO: 82841 - protein, 9 aa, Homo Sapiens
RASPFLLQY

SEQ ID NO: 82842 - protein, 9 aa, Homo Sapiens
RASPRTLNL

SEQ ID NO: 82843 - protein, 9 aa, Homo Sapiens
RAVEPAQQY

SEQ ID NO: 82844 - protein, 9 aa, Homo Sapiens
RAVEYNALF

SEQ ID NO: 82845 - protein, 9 aa, Homo Sapiens
RAYAKALHY

SEQ ID NO: 82846 - protein, 9 aa, Homo Sapiens
RAYDGTTYL

SEQ ID NO: 82847 - protein, 9 aa, Homo Sapiens
RAYELMLGF

SEQ ID NO: 82848 - protein, 9 aa, Homo Sapiens
RAYIVQLQI

SEQ ID NO: 82849 - protein, 9 aa, Homo Sapiens
RAYPAAITI

SEQ ID NO: 82850 - protein, 9 aa, Homo Sapiens
RAYQRQLVM

SEQ ID NO: 82851 - protein, 9 aa, Homo Sapiens
RAYVPALQM

SEQ ID NO: 82852 - protein, 9 aa, Homo Sapiens
RICEILLQY

SEQ ID NO: 82853 - protein, 9 aa, Homo Sapiens
RIIPRHLQL

SEQ ID NO: 82854 - protein, 9 aa, Homo Sapiens
RITPRHLQL

SEQ ID NO: 82855 - protein, 9 aa, Homo Sapiens
RIYAGGEHY

SEQ ID NO: 82856 - protein, 9 aa, Homo Sapiens
RIYHKLKHF

SEQ ID NO: 82857 - protein, 9 aa, Homo Sapiens
RIYPHGLVL

SEQ ID NO: 82858 - protein, 9 aa, Homo Sapiens
RMVEMFLEY

SEQ ID NO: 82859 - protein, 9 aa, Homo Sapiens
RMYEKALQI

SEQ ID NO: 82860 - protein, 9 aa, Homo Sapiens
RMYPGLQVY

SEQ ID NO: 82861 - protein, 9 aa, Homo Sapiens
RPYGRRPQY

SEQ ID NO: 82862 - protein, 9 aa, Homo Sapiens
RSADHPPKL

SEQ ID NO: 82863 - protein, 9 aa, Homo Sapiens
RSADWLGLF

SEQ ID NO: 82864 - protein, 9 aa, Homo Sapiens
RSAEVTLEV

SEQ ID NO: 82865 - protein, 9 aa, Homo Sapiens
RSAKASLVY

SEQ ID NO: 82866 - protein, 9 aa, Homo Sapiens
RSATICLAY

SEQ ID NO: 82867 - protein, 9 aa, Homo Sapiens
RSAVFSVTY

SEQ ID NO: 82868 - protein, 9 aa, Homo Sapiens
RSCLLHLTL

SEQ ID NO: 82869 - protein, 9 aa, Homo Sapiens
RSDPGHYSF

SEQ ID NO: 82870 - protein, 9 aa, Homo Sapiens
RSEKPLRSI

SEQ ID NO: 82871 - protein, 9 aa, Homo Sapiens
RSFEHALML

SEQ ID NO: 82872 - protein, 9 aa, Homo Sapiens
RSFEPILRL

SEQ ID NO: 82873 - protein, 9 aa, Homo Sapiens
RSFFGSLML

SEQ ID NO: 82874 - protein, 9 aa, Homo Sapiens
RSFFHQHYL

SEQ ID NO: 82875 - protein, 9 aa, Homo Sapiens
RSFHRTLQT

SEQ ID NO: 82876 - protein, 9 aa, Homo Sapiens
RSFQRALEL

SEQ ID NO: 82877 - protein, 9 aa, Homo Sapiens
RSFTLMLRY

SEQ ID NO: 82878 - protein, 9 aa, Homo Sapiens
RSFTNQIIL

SEQ ID NO: 82879 - protein, 9 aa, Homo Sapiens
RSHPPLHEY

SEQ ID NO: 82880 - protein, 9 aa, Homo Sapiens
RSHYSPIYL

SEQ ID NO: 82881 - protein, 9 aa, Homo Sapiens
RSIDKPFRL

SEQ ID NO: 82882 - protein, 9 aa, Homo Sapiens
RSIDLTVKL

SEQ ID NO: 82883 - protein, 9 aa, Homo Sapiens
RSIEEVLRI

SEQ ID NO: 82884 - protein, 9 aa, Homo Sapiens
RSIETSSTL

SEQ ID NO: 82885 - protein, 9 aa, Homo Sapiens
RSINKLIRI

SEQ ID NO: 82886 - protein, 9 aa, Homo Sapiens
RSIPAITRY

SEQ ID NO: 82887 - protein, 9 aa, Homo Sapiens
RSIQKNMVY

SEQ ID NO: 82888 - protein, 9 aa, Homo Sapiens
RSIVFDSEY

SEQ ID NO: 82889 - protein, 9 aa, Homo Sapiens
RSLDDALKL

SEQ ID NO: 82890 - protein, 9 aa, Homo Sapiens
RSLDQQMYL

SEQ ID NO: 82891 - protein, 9 aa, Homo Sapiens
RSLDYVAQL

SEQ ID NO: 82892 - protein, 9 aa, Homo Sapiens
RSLEFSVSY

SEQ ID NO: 82893 - protein, 9 aa, Homo Sapiens
RSLEISQSY

SEQ ID NO: 82894 - protein, 9 aa, Homo Sapiens
RSLEQNIQL

SEQ ID NO: 82895 - protein, 9 aa, Homo Sapiens
RSLFRNPHL

SEQ ID NO: 82896 - protein, 9 aa, Homo Sapiens
RSLGVHLSF

SEQ ID NO: 82897 - protein, 9 aa, Homo Sapiens
RSLHDAIMI

SEQ ID NO: 82898 - protein, 9 aa, Homo Sapiens
RSLHMLLML

SEQ ID NO: 82899 - protein, 9 aa, Homo Sapiens
RSLKSVQLY

SEQ ID NO: 82900 - protein, 9 aa, Homo Sapiens
RSLLHTLEI

SEQ ID NO: 82901 - protein, 9 aa, Homo Sapiens
RSLNPPLTI

SEQ ID NO: 82902 - protein, 9 aa, Homo Sapiens
RSLNSQLVY

SEQ ID NO: 82903 - protein, 9 aa, Homo Sapiens
RSLPSSSQL

SEQ ID NO: 82904 - protein, 9 aa, Homo Sapiens
RSLQLHLVF

SEQ ID NO: 82905 - protein, 9 aa, Homo Sapiens
RSLQLSLVM

SEQ ID NO: 82906 - protein, 9 aa, Homo Sapiens
RSLSTTNVF

SEQ ID NO: 82907 - protein, 9 aa, Homo Sapiens
RSMEDFVTW

SEQ ID NO: 82908 - protein, 9 aa, Homo Sapiens
RSMGLPLQF

SEQ ID NO: 82909 - protein, 9 aa, Homo Sapiens
RSMKAILSF

SEQ ID NO: 82910 - protein, 9 aa, Homo Sapiens
RSMNGALAF

SEQ ID NO: 82911 - protein, 9 aa, Homo Sapiens
RSNILTLMY

SEQ ID NO: 82912 - protein, 9 aa, Homo Sapiens
RSNSFNSTF

SEQ ID NO: 82913 - protein, 9 aa, Homo Sapiens
RSRDTCIVI

SEQ ID NO: 82914 - protein, 9 aa, Homo Sapiens
RSRTIVHTL

SEQ ID NO: 82915 - protein, 9 aa, Homo Sapiens
RSSPCALRL

SEQ ID NO: 82916 - protein, 9 aa, Homo Sapiens
RSSPLKLEF

SEQ ID NO: 82917 - protein, 9 aa, Homo Sapiens
RSSPPGHYY

SEQ ID NO: 82918 - protein, 9 aa, Homo Sapiens
RSSSWHARY

SEQ ID NO: 82919 - protein, 9 aa, Homo Sapiens
RSSVILLTY

SEQ ID NO: 82920 - protein, 9 aa, Homo Sapiens
RSTDRVLQW

SEQ ID NO: 82921 - protein, 9 aa, Homo Sapiens
RSTDWSSQY

SEQ ID NO: 82922 - protein, 9 aa, Homo Sapiens
RSTSQTFIY

SEQ ID NO: 82923 - protein, 9 aa, Homo Sapiens
RSVDETLRL

SEQ ID NO: 82924 - protein, 9 aa, Homo Sapiens
RSVDRSLLL

SEQ ID NO: 82925 - protein, 9 aa, Homo Sapiens
RSVDRSLMY

SEQ ID NO: 82926 - protein, 9 aa, Homo Sapiens
RSVEETLRL

SEQ ID NO: 82927 - protein, 9 aa, Homo Sapiens
RSVEFSKSY

SEQ ID NO: 82928 - protein, 9 aa, Homo Sapiens
RSVQKQMKI

SEQ ID NO: 82929 - protein, 9 aa, Homo Sapiens
RSVVKVLSL

SEQ ID NO: 82930 - protein, 9 aa, Homo Sapiens
RSWDQQIKL

SEQ ID NO: 82931 - protein, 9 aa, Homo Sapiens
RSYARGLRL

SEQ ID NO: 82932 - protein, 9 aa, Homo Sapiens
RSYDEQLRL

SEQ ID NO: 82933 - protein, 9 aa, Homo Sapiens
RSYDYQFRY

SEQ ID NO: 82934 - protein, 9 aa, Homo Sapiens
RSYESQMVI

SEQ ID NO: 82935 - protein, 9 aa, Homo Sapiens
RSYETVLSF

SEQ ID NO: 82936 - protein, 9 aa, Homo Sapiens
RSYHSSLRL

SEQ ID NO: 82937 - protein, 9 aa, Homo Sapiens
RSYKARLPL

SEQ ID NO: 82938 - protein, 9 aa, Homo Sapiens
RSYSQQLFL

SEQ ID NO: 82939 - protein, 9 aa, Homo Sapiens
RSYTMESTL

SEQ ID NO: 82940 - protein, 9 aa, Homo Sapiens
RSYTYPLIF

SEQ ID NO: 82941 - protein, 9 aa, Homo Sapiens
RSYVDLLKL

SEQ ID NO: 82942 - protein, 9 aa, Homo Sapiens
RSYWKEVLL

SEQ ID NO: 82943 - protein, 9 aa, Homo Sapiens
RTAHVILRY

SEQ ID NO: 82944 - protein, 9 aa, Homo Sapiens
RTAPLLLSY

SEQ ID NO: 82945 - protein, 9 aa, Homo Sapiens
RTAPSGSEY

SEQ ID NO: 82946 - protein, 9 aa, Homo Sapiens
RTDAKQKWL

SEQ ID NO: 82947 - protein, 9 aa, Homo Sapiens
RTEDPLLSW

SEQ ID NO: 82948 - protein, 9 aa, Homo Sapiens
RTFEAFMYL

SEQ ID NO: 82949 - protein, 9 aa, Homo Sapiens
RTFGHLLRY

SEQ ID NO: 82950 - protein, 9 aa, Homo Sapiens
RTFPFSLQY

SEQ ID NO: 82951 - protein, 9 aa, Homo Sapiens
RTFPVLLRL

SEQ ID NO: 82952 - protein, 9 aa, Homo Sapiens
RTFWHKISY

SEQ ID NO: 82953 - protein, 9 aa, Homo Sapiens
RTHFVISTY

SEQ ID NO: 82954 - protein, 9 aa, Homo Sapiens
RTHLPGRTY

SEQ ID NO: 82955 - protein, 9 aa, Homo Sapiens
RTHSLLLLL

SEQ ID NO: 82956 - protein, 9 aa, Homo Sapiens
RTIAKRLVL

SEQ ID NO: 82957 - protein, 9 aa, Homo Sapiens
RTIARTIVL

SEQ ID NO: 82958 - protein, 9 aa, Homo Sapiens
RTIATALEY

SEQ ID NO: 82959 - protein, 9 aa, Homo Sapiens
RTIFPTSTI

SEQ ID NO: 82960 - protein, 9 aa, Homo Sapiens
RTIMKPLEY

SEQ ID NO: 82961 - protein, 9 aa, Homo Sapiens
RTIPQPPIL

SEQ ID NO: 82962 - protein, 9 aa, Homo Sapiens
RTIQMFLVY

SEQ ID NO: 82963 - protein, 9 aa, Homo Sapiens
RTIRMGTTL

SEQ ID NO: 82964 - protein, 9 aa, Homo Sapiens
RTIRNAMKI

SEQ ID NO: 82965 - protein, 9 aa, Homo Sapiens
RTIVNQISY

SEQ ID NO: 82966 - protein, 9 aa, Homo Sapiens
RTKDTPLSL

SEQ ID NO: 82967 - protein, 9 aa, Homo Sapiens
RTKEGELRI

SEQ ID NO: 82968 - protein, 9 aa, Homo Sapiens
RTLCRALRF

SEQ ID NO: 82969 - protein, 9 aa, Homo Sapiens
RTLDFDPLL

SEQ ID NO: 82970 - protein, 9 aa, Homo Sapiens
RTLDNQLFF

SEQ ID NO: 82971 - protein, 9 aa, Homo Sapiens
RTLDSLMQF

SEQ ID NO: 82972 - protein, 9 aa, Homo Sapiens
RTLDSVSQI

SEQ ID NO: 82973 - protein, 9 aa, Homo Sapiens
RTLETLIRL

SEQ ID NO: 82974 - protein, 9 aa, Homo Sapiens
RTLIYITLY

SEQ ID NO: 82975 - protein, 9 aa, Homo Sapiens
RTLKEILRY

SEQ ID NO: 82976 - protein, 9 aa, Homo Sapiens
RTLKHVLYY

SEQ ID NO: 82977 - protein, 9 aa, Homo Sapiens
RTLLAILRL

SEQ ID NO: 82978 - protein, 9 aa, Homo Sapiens
RTLNRILTM

SEQ ID NO: 82979 - protein, 9 aa, Homo Sapiens
RTLPEPLEL

SEQ ID NO: 82980 - protein, 9 aa, Homo Sapiens
RTLPNVLAL

SEQ ID NO: 82981 - protein, 9 aa, Homo Sapiens
RTLPQASLL

SEQ ID NO: 82982 - protein, 9 aa, Homo Sapiens
RTLPVLLLY

SEQ ID NO: 82983 - protein, 9 aa, Homo Sapiens
RTLPWASVL

SEQ ID NO: 82984 - protein, 9 aa, Homo Sapiens
RTLPWSSVL

SEQ ID NO: 82985 - protein, 9 aa, Homo Sapiens
RTLQHGLYY

SEQ ID NO: 82986 - protein, 9 aa, Homo Sapiens
RTLQNTPSL

SEQ ID NO: 82987 - protein, 9 aa, Homo Sapiens
RTLTKVLAL

SEQ ID NO: 82988 - protein, 9 aa, Homo Sapiens
RTLVNVVKY

SEQ ID NO: 82989 - protein, 9 aa, Homo Sapiens
RTMEWVQTI

SEQ ID NO: 82990 - protein, 9 aa, Homo Sapiens
RTMPRIPTL

SEQ ID NO: 82991 - protein, 9 aa, Homo Sapiens
RTMQVALGL

SEQ ID NO: 82992 - protein, 9 aa, Homo Sapiens
RTMTAISRY

SEQ ID NO: 82993 - protein, 9 aa, Homo Sapiens
RTMVKTLEY

SEQ ID NO: 82994 - protein, 9 aa, Homo Sapiens
RTNNIELHY

SEQ ID NO: 82995 - protein, 9 aa, Homo Sapiens
RTSDKELYF

SEQ ID NO: 82996 - protein, 9 aa, Homo Sapiens
RTSPFFSVY

SEQ ID NO: 82997 - protein, 9 aa, Homo Sapiens
RTSPINLGL

SEQ ID NO: 82998 - protein, 9 aa, Homo Sapiens
RTSPPVRAF

SEQ ID NO: 82999 - protein, 9 aa, Homo Sapiens
RTTAHALKY

SEQ ID NO: 83000 - protein, 9 aa, Homo Sapiens
RTTDIVIRI

SEQ ID NO: 83001 - protein, 9 aa, Homo Sapiens
RTTSHLLRY

SEQ ID NO: 83002 - protein, 9 aa, Homo Sapiens
RTVDARLKL

SEQ ID NO: 83003 - protein, 9 aa, Homo Sapiens
RTVDLFPVL

SEQ ID NO: 83004 - protein, 9 aa, Homo Sapiens
RTVEKPPKF

SEQ ID NO: 83005 - protein, 9 aa, Homo Sapiens
RTVEMHNKI

SEQ ID NO: 83006 - protein, 9 aa, Homo Sapiens
RTVIFSAMF

SEQ ID NO: 83007 - protein, 9 aa, Homo Sapiens
RTVPFCSTF

SEQ ID NO: 83008 - protein, 9 aa, Homo Sapiens
RTVTQKLGF

SEQ ID NO: 83009 - protein, 9 aa, Homo Sapiens
RTVVNISSL

SEQ ID NO: 83010 - protein, 9 aa, Homo Sapiens
RTWKPTLVI

SEQ ID NO: 83011 - protein, 9 aa, Homo Sapiens
RTWLLKTHW

SEQ ID NO: 83012 - protein, 9 aa, Homo Sapiens
RTYDKDITF

SEQ ID NO: 83013 - protein, 9 aa, Homo Sapiens
RTYDLYITY

SEQ ID NO: 83014 - protein, 9 aa, Homo Sapiens
RTYDMIQYY

SEQ ID NO: 83015 - protein, 9 aa, Homo Sapiens
RTYEGGNAL

SEQ ID NO: 83016 - protein, 9 aa, Homo Sapiens
RTYEHEAMW

SEQ ID NO: 83017 - protein, 9 aa, Homo Sapiens
RTYEKFFGL

SEQ ID NO: 83018 - protein, 9 aa, Homo Sapiens
RTYGVVAQY

SEQ ID NO: 83019 - protein, 9 aa, Homo Sapiens
RTYITFQTW

SEQ ID NO: 83020 - protein, 9 aa, Homo Sapiens
RTYKQRLLF

SEQ ID NO: 83021 - protein, 9 aa, Homo Sapiens
RTYLGMSTL

SEQ ID NO: 83022 - protein, 9 aa, Homo Sapiens
RTYNNIFQF

SEQ ID NO: 83023 - protein, 9 aa, Homo Sapiens
RTYPVEILY

SEQ ID NO: 83024 - protein, 9 aa, Homo Sapiens
RTYSLGSAL

SEQ ID NO: 83025 - protein, 9 aa, Homo Sapiens
RTYTGLSGL

SEQ ID NO: 83026 - protein, 9 aa, Homo Sapiens
RTYVSTIRI

SEQ ID NO: 83027 - protein, 9 aa, Homo Sapiens
RVATVTLML

SEQ ID NO: 83028 - protein, 9 aa, Homo Sapiens
RVEPKVTVY

SEQ ID NO: 83029 - protein, 9 aa, Homo Sapiens
RVFASPLRL

SEQ ID NO: 83030 - protein, 9 aa, Homo Sapiens
RVFQECLTY

SEQ ID NO: 83031 - protein, 9 aa, Homo Sapiens
RVFVKPLVL

SEQ ID NO: 83032 - protein, 9 aa, Homo Sapiens
RVHGLALQI

SEQ ID NO: 83033 - protein, 9 aa, Homo Sapiens
RVHQGWLQY

SEQ ID NO: 83034 - protein, 9 aa, Homo Sapiens
RVIDVGSEW

SEQ ID NO: 83035 - protein, 9 aa, Homo Sapiens
RVIDYAVKI

SEQ ID NO: 83036 - protein, 9 aa, Homo Sapiens
RVIDYILDL

SEQ ID NO: 83037 - protein, 9 aa, Homo Sapiens
RVIEFAAKF

SEQ ID NO: 83038 - protein, 9 aa, Homo Sapiens
RVIHRDLKL

SEQ ID NO: 83039 - protein, 9 aa, Homo Sapiens
RVIPVLLQL

SEQ ID NO: 83040 - protein, 9 aa, Homo Sapiens
RVKEKEAEL

SEQ ID NO: 83041 - protein, 9 aa, Homo Sapiens
RVKEKEAIL

SEQ ID NO: 83042 - protein, 9 aa, Homo Sapiens
RVLGKPLGL

SEQ ID NO: 83043 - protein, 9 aa, Homo Sapiens
RVLPASLVI

SEQ ID NO: 83044 - protein, 9 aa, Homo Sapiens
RVLQWVLVL

SEQ ID NO: 83045 - protein, 9 aa, Homo Sapiens
RVVDQPLKL

SEQ ID NO: 83046 - protein, 9 aa, Homo Sapiens
RVVEKFLKI

SEQ ID NO: 83047 - protein, 9 aa, Homo Sapiens
RVYESKAEF

SEQ ID NO: 83048 - protein, 9 aa, Homo Sapiens
RVYGGCLCY

SEQ ID NO: 83049 - protein, 9 aa, Homo Sapiens
RVYIGRLSY

SEQ ID NO: 83050 - protein, 9 aa, Homo Sapiens
RVYLGALKY

SEQ ID NO: 83051 - protein, 9 aa, Homo Sapiens
RVYPQAVYF

SEQ ID NO: 83052 - protein, 9 aa, Homo Sapiens
RVYVGSIYY

SEQ ID NO: 83053 - protein, 9 aa, Homo Sapiens
SACGHTAVL

SEQ ID NO: 83054 - protein, 9 aa, Homo Sapiens
SADEVQRFF

SEQ ID NO: 83055 - protein, 9 aa, Homo Sapiens
SAFRGVGLL

SEQ ID NO: 83056 - protein, 9 aa, Homo Sapiens
SAIGKILKF

SEQ ID NO: 83057 - protein, 9 aa, Homo Sapiens
SAISTTLKL

SEQ ID NO: 83058 - protein, 9 aa, Homo Sapiens
SALFKVLAF

SEQ ID NO: 83059 - protein, 9 aa, Homo Sapiens
SALGRVLLF

SEQ ID NO: 83060 - protein, 9 aa, Homo Sapiens
SALNRLLVL

SEQ ID NO: 83061 - protein, 9 aa, Homo Sapiens
SALVALPLL

SEQ ID NO: 83062 - protein, 9 aa, Homo Sapiens
SANHNILQI

SEQ ID NO: 83063 - protein, 9 aa, Homo Sapiens
SASTTTLRY

SEQ ID NO: 83064 - protein, 9 aa, Homo Sapiens
SAWERNLVY

SEQ ID NO: 83065 - protein, 9 aa, Homo Sapiens
SAYQHPASF

SEQ ID NO: 83066 - protein, 9 aa, Homo Sapiens
SAYQNHLIL

SEQ ID NO: 83067 - protein, 9 aa, Homo Sapiens
SGVTTCLRF

SEQ ID NO: 83068 - protein, 9 aa, Homo Sapiens
SILQKVLKL

SEQ ID NO: 83069 - protein, 9 aa, Homo Sapiens
SLLKRYLLK

SEQ ID NO: 83070 - protein, 9 aa, Homo Sapiens
SMYDKVLML

SEQ ID NO: 83071 - protein, 9 aa, Homo Sapiens
SQLPGLLEL

SEQ ID NO: 83072 - protein, 9 aa, Homo Sapiens
SSAKTILKY

SEQ ID NO: 83073 - protein, 9 aa, Homo Sapiens
SSCTHLLGF

SEQ ID NO: 83074 - protein, 9 aa, Homo Sapiens
SSFAHCLEL

SEQ ID NO: 83075 - protein, 9 aa, Homo Sapiens
SSFFKSLVI

SEQ ID NO: 83076 - protein, 9 aa, Homo Sapiens
SSFQKVLEL

SEQ ID NO: 83077 - protein, 9 aa, Homo Sapiens
SSHKGCLQL

SEQ ID NO: 83078 - protein, 9 aa, Homo Sapiens
SSHTRTLHL

SEQ ID NO: 83079 - protein, 9 aa, Homo Sapiens
SSIKDPLQF

SEQ ID NO: 83080 - protein, 9 aa, Homo Sapiens
SSISKSPLL

SEQ ID NO: 83081 - protein, 9 aa, Homo Sapiens
SSITASLRF

SEQ ID NO: 83082 - protein, 9 aa, Homo Sapiens
SSLDSTLRL

SEQ ID NO: 83083 - protein, 9 aa, Homo Sapiens
SSLHKLLTL

SEQ ID NO: 83084 - protein, 9 aa, Homo Sapiens
SSLPSALAL

SEQ ID NO: 83085 - protein, 9 aa, Homo Sapiens
SSLQRILEI

SEQ ID NO: 83086 - protein, 9 aa, Homo Sapiens
SSLSDALVL

SEQ ID NO: 83087 - protein, 9 aa, Homo Sapiens
SSLSHILQM

SEQ ID NO: 83088 - protein, 9 aa, Homo Sapiens
SSSAKTLAF

SEQ ID NO: 83089 - protein, 9 aa, Homo Sapiens
SSSPRNLGF

SEQ ID NO: 83090 - protein, 9 aa, Homo Sapiens
SSVDQPLKI

SEQ ID NO: 83091 - protein, 9 aa, Homo Sapiens
SSVLKPLLI

SEQ ID NO: 83092 - protein, 9 aa, Homo Sapiens
SSVPGVRLL

SEQ ID NO: 83093 - protein, 9 aa, Homo Sapiens
SSVRKNLKL

SEQ ID NO: 83094 - protein, 9 aa, Homo Sapiens
SSVTKVLLL

SEQ ID NO: 83095 - protein, 9 aa, Homo Sapiens
SSYDKPITF

SEQ ID NO: 83096 - protein, 9 aa, Homo Sapiens
SSYGKLLLI

SEQ ID NO: 83097 - protein, 9 aa, Homo Sapiens
SSYIRVLGI

SEQ ID NO: 83098 - protein, 9 aa, Homo Sapiens
SSYLRGLLL

SEQ ID NO: 83099 - protein, 9 aa, Homo Sapiens
SSYPIKLFY

SEQ ID NO: 83100 - protein, 9 aa, Homo Sapiens
SSYSIHLLL

SEQ ID NO: 83101 - protein, 9 aa, Homo Sapiens
SSYSRALEM

SEQ ID NO: 83102 - protein, 9 aa, Homo Sapiens
STAEKVLVL

SEQ ID NO: 83103 - protein, 9 aa, Homo Sapiens
STFEAVLKW

SEQ ID NO: 83104 - protein, 9 aa, Homo Sapiens
STFKDTFTL

SEQ ID NO: 83105 - protein, 9 aa, Homo Sapiens
STFLSQTTY

SEQ ID NO: 83106 - protein, 9 aa, Homo Sapiens
STFSPSLAL

SEQ ID NO: 83107 - protein, 9 aa, Homo Sapiens
STFTLCLHY

SEQ ID NO: 83108 - protein, 9 aa, Homo Sapiens
STHLLLTLY

SEQ ID NO: 83109 - protein, 9 aa, Homo Sapiens
STHVTISTY

SEQ ID NO: 83110 - protein, 9 aa, Homo Sapiens
STICHILNL

SEQ ID NO: 83111 - protein, 9 aa, Homo Sapiens
STIDWNKLY

SEQ ID NO: 83112 - protein, 9 aa, Homo Sapiens
STIPKVLQY

SEQ ID NO: 83113 - protein, 9 aa, Homo Sapiens
STIQFVSTL

SEQ ID NO: 83114 - protein, 9 aa, Homo Sapiens
STKVKTLLL

SEQ ID NO: 83115 - protein, 9 aa, Homo Sapiens
STLALHLRI

SEQ ID NO: 83116 - protein, 9 aa, Homo Sapiens
STLGRVLRL

SEQ ID NO: 83117 - protein, 9 aa, Homo Sapiens
STLGYDLTF

SEQ ID NO: 83118 - protein, 9 aa, Homo Sapiens
STLHLVLRL

SEQ ID NO: 83119 - protein, 9 aa, Homo Sapiens
STLKKQMKY

SEQ ID NO: 83120 - protein, 9 aa, Homo Sapiens
STLKKSLEI

SEQ ID NO: 83121 - protein, 9 aa, Homo Sapiens
STLKNHLRL

SEQ ID NO: 83122 - protein, 9 aa, Homo Sapiens
STLPKSLSL

SEQ ID NO: 83123 - protein, 9 aa, Homo Sapiens
STMWTTLKL

SEQ ID NO: 83124 - protein, 9 aa, Homo Sapiens
STNDKTIKL

SEQ ID NO: 83125 - protein, 9 aa, Homo Sapiens
STNTRVLYF

SEQ ID NO: 83126 - protein, 9 aa, Homo Sapiens
STTTGHLIY

SEQ ID NO: 83127 - protein, 9 aa, Homo Sapiens
STVSRFFLY

SEQ ID NO: 83128 - protein, 9 aa, Homo Sapiens
STWGGALRY

SEQ ID NO: 83129 - protein, 9 aa, Homo Sapiens
STYEKALGY

SEQ ID NO: 83130 - protein, 9 aa, Homo Sapiens
STYHRFLTW

SEQ ID NO: 83131 - protein, 9 aa, Homo Sapiens
STYIKKIGY

SEQ ID NO: 83132 - protein, 9 aa, Homo Sapiens
STYLHQLTL

SEQ ID NO: 83133 - protein, 9 aa, Homo Sapiens
STYPSTVEI

SEQ ID NO: 83134 - protein, 9 aa, Homo Sapiens
STYRLESTL

SEQ ID NO: 83135 - protein, 9 aa, Homo Sapiens
SVFGRVMQI

SEQ ID NO: 83136 - protein, 9 aa, Homo Sapiens
SVFKGCLTL

SEQ ID NO: 83137 - protein, 9 aa, Homo Sapiens
SVIEQILHY

SEQ ID NO: 83138 - protein, 9 aa, Homo Sapiens
SVIGRALGI

SEQ ID NO: 83139 - protein, 9 aa, Homo Sapiens
SVLKKALEI

SEQ ID NO: 83140 - protein, 9 aa, Homo Sapiens
SVLPRALSL

SEQ ID NO: 83141 - protein, 9 aa, Homo Sapiens
SVLPRALVL

SEQ ID NO: 83142 - protein, 9 aa, Homo Sapiens
SVTEVQLRF

SEQ ID NO: 83143 - protein, 9 aa, Homo Sapiens
SVYDGKLLI

SEQ ID NO: 83144 - protein, 9 aa, Homo Sapiens
SVYHPQLAY

SEQ ID NO: 83145 - protein, 9 aa, Homo Sapiens
SVYSGCLHL

SEQ ID NO: 83146 - protein, 9 aa, Homo Sapiens
SVYSIRLAY

SEQ ID NO: 83147 - protein, 9 aa, Homo Sapiens
TAAPTGTTI

SEQ ID NO: 83148 - protein, 9 aa, Homo Sapiens
TAAPTIGVL

SEQ ID NO: 83149 - protein, 9 aa, Homo Sapiens
TAFGGFLKY

SEQ ID NO: 83150 - protein, 9 aa, Homo Sapiens
TALKYTLGF

SEQ ID NO: 83151 - protein, 9 aa, Homo Sapiens
TALRKVLSL

SEQ ID NO: 83152 - protein, 9 aa, Homo Sapiens
TILRHTLQL

SEQ ID NO: 83153 - protein, 9 aa, Homo Sapiens
TLAPSTMKI

SEQ ID NO: 83154 - protein, 9 aa, Homo Sapiens
TLTKTLTLL

SEQ ID NO: 83155 - protein, 9 aa, Homo Sapiens
TMCPHILRY

SEQ ID NO: 83156 - protein, 9 aa, Homo Sapiens
TQIILKTIF

SEQ ID NO: 83157 - protein, 9 aa, Homo Sapiens
TSCTHILVF

SEQ ID NO: 83158 - protein, 9 aa, Homo Sapiens
TSFERALSL

SEQ ID NO: 83159 - protein, 9 aa, Homo Sapiens
TSFHTALEL

SEQ ID NO: 83160 - protein, 9 aa, Homo Sapiens
TSIAECLTY

SEQ ID NO: 83161 - protein, 9 aa, Homo Sapiens
TSKWVADAL

SEQ ID NO: 83162 - protein, 9 aa, Homo Sapiens
TSLEKALGI

SEQ ID NO: 83163 - protein, 9 aa, Homo Sapiens
TSLPEPLRI

SEQ ID NO: 83164 - protein, 9 aa, Homo Sapiens
TSLPRALHF

SEQ ID NO: 83165 - protein, 9 aa, Homo Sapiens
TSLVKVLEF

SEQ ID NO: 83166 - protein, 9 aa, Homo Sapiens
TSMPGTLVL

SEQ ID NO: 83167 - protein, 9 aa, Homo Sapiens
TSMVTALQL

SEQ ID NO: 83168 - protein, 9 aa, Homo Sapiens
TSSDILLCY

SEQ ID NO: 83169 - protein, 9 aa, Homo Sapiens
TSSQKALML

SEQ ID NO: 83170 - protein, 9 aa, Homo Sapiens
TSSSHTLTY

SEQ ID NO: 83171 - protein, 9 aa, Homo Sapiens
TSVPKPLKF

SEQ ID NO: 83172 - protein, 9 aa, Homo Sapiens
TSVRKTLLL

SEQ ID NO: 83173 - protein, 9 aa, Homo Sapiens
TSWDRSLLL

SEQ ID NO: 83174 - protein, 9 aa, Homo Sapiens
TSYKKSLRL

SEQ ID NO: 83175 - protein, 9 aa, Homo Sapiens
TTFVKQLKL

SEQ ID NO: 83176 - protein, 9 aa, Homo Sapiens
TTIKCMQTI

SEQ ID NO: 83177 - protein, 9 aa, Homo Sapiens
TTIQRGLVL

SEQ ID NO: 83178 - protein, 9 aa, Homo Sapiens
TTLQPTLKF

SEQ ID NO: 83179 - protein, 9 aa, Homo Sapiens
TVSDAILRY

SEQ ID NO: 83180 - protein, 9 aa, Homo Sapiens
TVTEVLLKY

SEQ ID NO: 83181 - protein, 9 aa, Homo Sapiens
TVYDKPASF

SEQ ID NO: 83182 - protein, 9 aa, Homo Sapiens
TVYHIMLQI

SEQ ID NO: 83183 - protein, 9 aa, Homo Sapiens
VAGPNIAAI

SEQ ID NO: 83184 - protein, 9 aa, Homo Sapiens
VAIESTPMI

SEQ ID NO: 83185 - protein, 9 aa, Homo Sapiens
VALARALFI

SEQ ID NO: 83186 - protein, 9 aa, Homo Sapiens
VAYPCAILY

SEQ ID NO: 83187 - protein, 9 aa, Homo Sapiens
VGGEALELR

SEQ ID NO: 83188 - protein, 9 aa, Homo Sapiens
VGLGPALEF

SEQ ID NO: 83189 - protein, 9 aa, Homo Sapiens
VIIPHVARF

SEQ ID NO: 83190 - protein, 9 aa, Homo Sapiens
VLYDRPLKI

SEQ ID NO: 83191 - protein, 9 aa, Homo Sapiens
VLYDRVLKY

SEQ ID NO: 83192 - protein, 9 aa, Homo Sapiens
VSFHPCIRF

SEQ ID NO: 83193 - protein, 9 aa, Homo Sapiens
VSFKRSMVL

SEQ ID NO: 83194 - protein, 9 aa, Homo Sapiens
VSHGRPLAL

SEQ ID NO: 83195 - protein, 9 aa, Homo Sapiens
VSHLIATEY

SEQ ID NO: 83196 - protein, 9 aa, Homo Sapiens
VSIKRQIIL

SEQ ID NO: 83197 - protein, 9 aa, Homo Sapiens
VSLEKVLGI

SEQ ID NO: 83198 - protein, 9 aa, Homo Sapiens
VSLKKPLVI

SEQ ID NO: 83199 - protein, 9 aa, Homo Sapiens
VSLPSHLNI

SEQ ID NO: 83200 - protein, 9 aa, Homo Sapiens
VSNDWYATL

SEQ ID NO: 83201 - protein, 9 aa, Homo Sapiens
VSNLQEFRY

SEQ ID NO: 83202 - protein, 9 aa, Homo Sapiens
VSQDKQMLY

SEQ ID NO: 83203 - protein, 9 aa, Homo Sapiens
VSRKQGAQF

SEQ ID NO: 83204 - protein, 9 aa, Homo Sapiens
VSTVLTSKY

SEQ ID NO: 83205 - protein, 9 aa, Homo Sapiens
VSVAHALSL

SEQ ID NO: 83206 - protein, 9 aa, Homo Sapiens
VSVAKTPVL

SEQ ID NO: 83207 - protein, 9 aa, Homo Sapiens
VSVDERLIY

SEQ ID NO: 83208 - protein, 9 aa, Homo Sapiens
VSVEDLLKF

SEQ ID NO: 83209 - protein, 9 aa, Homo Sapiens
VSWDKSLCI

SEQ ID NO: 83210 - protein, 9 aa, Homo Sapiens
VSYFIITRY

SEQ ID NO: 83211 - protein, 9 aa, Homo Sapiens
VSYGSIVTY

SEQ ID NO: 83212 - protein, 9 aa, Homo Sapiens
VSYKGSISY

SEQ ID NO: 83213 - protein, 9 aa, Homo Sapiens
VSYKYTSRY

SEQ ID NO: 83214 - protein, 9 aa, Homo Sapiens
VSYPGKNKI

SEQ ID NO: 83215 - protein, 9 aa, Homo Sapiens
VSYQKLLKY

SEQ ID NO: 83216 - protein, 9 aa, Homo Sapiens
VSYYYFLRF

SEQ ID NO: 83217 - protein, 9 aa, Homo Sapiens
VTAPRTVLL

SEQ ID NO: 83218 - protein, 9 aa, Homo Sapiens
VTASRALLL

SEQ ID NO: 83219 - protein, 9 aa, Homo Sapiens
VTATRQLLL

SEQ ID NO: 83220 - protein, 9 aa, Homo Sapiens
VTDIHQLSF

SEQ ID NO: 83221 - protein, 9 aa, Homo Sapiens
VTFEKQWFY

SEQ ID NO: 83222 - protein, 9 aa, Homo Sapiens
VTFPEFLRY

SEQ ID NO: 83223 - protein, 9 aa, Homo Sapiens
VTFSGQYNI

SEQ ID NO: 83224 - protein, 9 aa, Homo Sapiens
VTGVTRVTI

SEQ ID NO: 83225 - protein, 9 aa, Homo Sapiens
VTHDLRLRL

SEQ ID NO: 83226 - protein, 9 aa, Homo Sapiens
VTHNEQLCY

SEQ ID NO: 83227 - protein, 9 aa, Homo Sapiens
VTIARAIEL

SEQ ID NO: 83228 - protein, 9 aa, Homo Sapiens
VTIEGPSHY

SEQ ID NO: 83229 - protein, 9 aa, Homo Sapiens
VTIENHPHL

SEQ ID NO: 83230 - protein, 9 aa, Homo Sapiens
VTIGHIALL

SEQ ID NO: 83231 - protein, 9 aa, Homo Sapiens
VTIKEGSQL

SEQ ID NO: 83232 - protein, 9 aa, Homo Sapiens
VTIKKALTL

SEQ ID NO: 83233 - protein, 9 aa, Homo Sapiens
VTIPSGSTL

SEQ ID NO: 83234 - protein, 9 aa, Homo Sapiens
VTIVKPIVY

SEQ ID NO: 83235 - protein, 9 aa, Homo Sapiens
VTKPVGGNY

SEQ ID NO: 83236 - protein, 9 aa, Homo Sapiens
VTLAELLVL

SEQ ID NO: 83237 - protein, 9 aa, Homo Sapiens
VTLDEILRL

SEQ ID NO: 83238 - protein, 9 aa, Homo Sapiens
VTLEKVLGI

SEQ ID NO: 83239 - protein, 9 aa, Homo Sapiens
VTMPAILKL

SEQ ID NO: 83240 - protein, 9 aa, Homo Sapiens
VTMPWFQHY

SEQ ID NO: 83241 - protein, 9 aa, Homo Sapiens
VTNPHSSQW

SEQ ID NO: 83242 - protein, 9 aa, Homo Sapiens
VTNSQKLQL

SEQ ID NO: 83243 - protein, 9 aa, Homo Sapiens
VTRLQHVTI

SEQ ID NO: 83244 - protein, 9 aa, Homo Sapiens
VTTENQLKY

SEQ ID NO: 83245 - protein, 9 aa, Homo Sapiens
VTTVVNPKY

SEQ ID NO: 83246 - protein, 9 aa, Homo Sapiens
VTVAIPLKY

SEQ ID NO: 83247 - protein, 9 aa, Homo Sapiens
VTVEKVIKI

SEQ ID NO: 83248 - protein, 9 aa, Homo Sapiens
VTYGHELIW

SEQ ID NO: 83249 - protein, 9 aa, Homo Sapiens
VTYIFHQLL

SEQ ID NO: 83250 - protein, 9 aa, Homo Sapiens
VTYKNVPNW

SEQ ID NO: 83251 - protein, 9 aa, Homo Sapiens
VTYMNNLKL

SEQ ID NO: 83252 - protein, 9 aa, Homo Sapiens
VTYNKVLHF

SEQ ID NO: 83253 - protein, 9 aa, Homo Sapiens
VTYNYPVHY

SEQ ID NO: 83254 - protein, 9 aa, Homo Sapiens
VTYPGELLL

SEQ ID NO: 83255 - protein, 9 aa, Homo Sapiens
VTYSFRQSF

SEQ ID NO: 83256 - protein, 9 aa, Homo Sapiens
VTYVGTKQL

SEQ ID NO: 83257 - protein, 9 aa, Homo Sapiens
VTYVPVTTF

SEQ ID NO: 83258 - protein, 9 aa, Homo Sapiens
VVLAKQLLL

SEQ ID NO: 83259 - protein, 9 aa, Homo Sapiens
VVNGRVLEL

SEQ ID NO: 83260 - protein, 9 aa, Homo Sapiens
VVYEKQMLY

SEQ ID NO: 83261 - protein, 9 aa, Homo Sapiens
VVYGGKSTI

SEQ ID NO: 83262 - protein, 9 aa, Homo Sapiens
VVYPWTQRF

SEQ ID NO: 83263 - protein, 9 aa, Homo Sapiens
WSLGSPLHF

SEQ ID NO: 83264 - protein, 9 aa, Homo Sapiens
WSLPATATM

SEQ ID NO: 83265 - protein, 9 aa, Homo Sapiens
WTVVDAKTL

SEQ ID NO: 83266 - protein, 9 aa, Homo Sapiens
YAANPGQLF

SEQ ID NO: 83267 - protein, 9 aa, Homo Sapiens
YAFDFARQS

SEQ ID NO: 83268 - protein, 9 aa, Homo Sapiens
YAIDNPLHY

SEQ ID NO: 83269 - protein, 9 aa, Homo Sapiens
YAITRVLRL

SEQ ID NO: 83270 - protein, 9 aa, Homo Sapiens
YALNHTLSV

SEQ ID NO: 83271 - protein, 9 aa, Homo Sapiens
YASSPGGVY

SEQ ID NO: 83272 - protein, 9 aa, Homo Sapiens
YAYTGRLEL

SEQ ID NO: 83273 - protein, 9 aa, Homo Sapiens
YGYEHILTL

SEQ ID NO: 83274 - protein, 9 aa, Homo Sapiens
YIYPKHLKY

SEQ ID NO: 83275 - protein, 9 aa, Homo Sapiens
YQYPRPLLI

SEQ ID NO: 83276 - protein, 9 aa, Homo Sapiens
YSAEPLPEL

SEQ ID NO: 83277 - protein, 9 aa, Homo Sapiens
YSAPVIHVL

SEQ ID NO: 83278 - protein, 9 aa, Homo Sapiens
YSAVPVRHF

SEQ ID NO: 83279 - protein, 9 aa, Homo Sapiens
YSCDHNTSL

SEQ ID NO: 83280 - protein, 9 aa, Homo Sapiens
YSDAPRGTW

SEQ ID NO: 83281 - protein, 9 aa, Homo Sapiens
YSEKPPVSI

SEQ ID NO: 83282 - protein, 9 aa, Homo Sapiens
YSFDPVGSY

SEQ ID NO: 83283 - protein, 9 aa, Homo Sapiens
YSFGGCHRY

SEQ ID NO: 83284 - protein, 9 aa, Homo Sapiens
YSFSELLRL

SEQ ID NO: 83285 - protein, 9 aa, Homo Sapiens
YSFYNQQTL

SEQ ID NO: 83286 - protein, 9 aa, Homo Sapiens
YSHFQHLLY

SEQ ID NO: 83287 - protein, 9 aa, Homo Sapiens
YSHKKILQL

SEQ ID NO: 83288 - protein, 9 aa, Homo Sapiens
YSIDKPPFI

SEQ ID NO: 83289 - protein, 9 aa, Homo Sapiens
YSIDPVTRY

SEQ ID NO: 83290 - protein, 9 aa, Homo Sapiens
YSIEKPLKF

SEQ ID NO: 83291 - protein, 9 aa, Homo Sapiens
YSIRGQLSW

SEQ ID NO: 83292 - protein, 9 aa, Homo Sapiens
YSKAFTLTI

SEQ ID NO: 83293 - protein, 9 aa, Homo Sapiens
YSLAFNARF

SEQ ID NO: 83294 - protein, 9 aa, Homo Sapiens
YSLDGILVF

SEQ ID NO: 83295 - protein, 9 aa, Homo Sapiens
YSLDHISSL

SEQ ID NO: 83296 - protein, 9 aa, Homo Sapiens
YSLEHTVQF

SEQ ID NO: 83297 - protein, 9 aa, Homo Sapiens
YSLEKVFGI

SEQ ID NO: 83298 - protein, 9 aa, Homo Sapiens
YSLIFVNSY

SEQ ID NO: 83299 - protein, 9 aa, Homo Sapiens
YSLKNTSQL

SEQ ID NO: 83300 - protein, 9 aa, Homo Sapiens
YSLLKHLKL

SEQ ID NO: 83301 - protein, 9 aa, Homo Sapiens
YSLPGILHF

SEQ ID NO: 83302 - protein, 9 aa, Homo Sapiens
YSLPNAPTL

SEQ ID NO: 83303 - protein, 9 aa, Homo Sapiens
YSLPQLLHI

SEQ ID NO: 83304 - protein, 9 aa, Homo Sapiens
YSLQHKLLL

SEQ ID NO: 83305 - protein, 9 aa, Homo Sapiens
YSLQRQSLL

SEQ ID NO: 83306 - protein, 9 aa, Homo Sapiens
YSQEPIKTF

SEQ ID NO: 83307 - protein, 9 aa, Homo Sapiens
YSQKDPLIL

SEQ ID NO: 83308 - protein, 9 aa, Homo Sapiens
YSQSPALEL

SEQ ID NO: 83309 - protein, 9 aa, Homo Sapiens
YSSENISNF

SEQ ID NO: 83310 - protein, 9 aa, Homo Sapiens
YSSNHKLVF

SEQ ID NO: 83311 - protein, 9 aa, Homo Sapiens
YSSPFDPVL

SEQ ID NO: 83312 - protein, 9 aa, Homo Sapiens
YSSSRTLLF

SEQ ID NO: 83313 - protein, 9 aa, Homo Sapiens
YSTEPINTF

SEQ ID NO: 83314 - protein, 9 aa, Homo Sapiens
YSVRMNNTL

SEQ ID NO: 83315 - protein, 9 aa, Homo Sapiens
YSYFSPRTM

SEQ ID NO: 83316 - protein, 9 aa, Homo Sapiens
YSYGACVAF

SEQ ID NO: 83317 - protein, 9 aa, Homo Sapiens
YSYKEALKL

SEQ ID NO: 83318 - protein, 9 aa, Homo Sapiens
YSYLLKNHL

SEQ ID NO: 83319 - protein, 9 aa, Homo Sapiens
YSYLLTSQL

SEQ ID NO: 83320 - protein, 9 aa, Homo Sapiens
YSYNIRHSF

SEQ ID NO: 83321 - protein, 9 aa, Homo Sapiens
YSYYGPLNL

SEQ ID NO: 83322 - protein, 9 aa, Homo Sapiens
YTAQFEHTI

SEQ ID NO: 83323 - protein, 9 aa, Homo Sapiens
YTAQPTQGY

SEQ ID NO: 83324 - protein, 9 aa, Homo Sapiens
YTAVVPLVY

SEQ ID NO: 83325 - protein, 9 aa, Homo Sapiens
YTESYISTI

SEQ ID NO: 83326 - protein, 9 aa, Homo Sapiens
YTFNKVLML

SEQ ID NO: 83327 - protein, 9 aa, Homo Sapiens
YTFSEPFHL

SEQ ID NO: 83328 - protein, 9 aa, Homo Sapiens
YTHEVVTLW

SEQ ID NO: 83329 - protein, 9 aa, Homo Sapiens
YTIATILHY

SEQ ID NO: 83330 - protein, 9 aa, Homo Sapiens
YTIEFLRHL

SEQ ID NO: 83331 - protein, 9 aa, Homo Sapiens
YTIENPRHF

SEQ ID NO: 83332 - protein, 9 aa, Homo Sapiens
YTIIPLNKI

SEQ ID NO: 83333 - protein, 9 aa, Homo Sapiens
YTIPLAIKL

SEQ ID NO: 83334 - protein, 9 aa, Homo Sapiens
YTKAWEEYY

SEQ ID NO: 83335 - protein, 9 aa, Homo Sapiens
YTKENGRTL

SEQ ID NO: 83336 - protein, 9 aa, Homo Sapiens
YTKENGTIR

SEQ ID NO: 83337 - protein, 9 aa, Homo Sapiens
YTKHGTLKY

SEQ ID NO: 83338 - protein, 9 aa, Homo Sapiens
YTLPDGRII

SEQ ID NO: 83339 - protein, 9 aa, Homo Sapiens
YTLPDGSTL

SEQ ID NO: 83340 - protein, 9 aa, Homo Sapiens
YTNGKCVIL

SEQ ID NO: 83341 - protein, 9 aa, Homo Sapiens
YTSDSPGSY

SEQ ID NO: 83342 - protein, 9 aa, Homo Sapiens
YTSPGTQKY

SEQ ID NO: 83343 - protein, 9 aa, Homo Sapiens
YTVAAASTF

SEQ ID NO: 83344 - protein, 9 aa, Homo Sapiens
YTVKAILIL

SEQ ID NO: 83345 - protein, 9 aa, Homo Sapiens
YTYESKMAF

SEQ ID NO: 83346 - protein, 9 aa, Homo Sapiens
YTYKKQVKI

SEQ ID NO: 83347 - protein, 9 aa, Homo Sapiens
YTYRGPKAF

SEQ ID NO: 83348 - protein, 9 aa, Homo Sapiens
YVYPKYLKY

SEQ ID NO: 83349 - protein, 9 aa, Homo Sapiens
YVYPLQLKY

SEQ ID NO: 83350 - protein, 9 aa, Homo Sapiens
YVYSHFLQF

SEQ ID NO: 83351 - protein, 10 aa, Homo Sapiens
AISGVPVLGF

SEQ ID NO: 83352 - protein, 10 aa, Homo Sapiens
AIYAASKLSY

SEQ ID NO: 83353 - protein, 10 aa, Homo Sapiens
ASFDGRISVY

SEQ ID NO: 83354 - protein, 10 aa, Homo Sapiens
ASFNRPNLYY

SEQ ID NO: 83355 - protein, 10 aa, Homo Sapiens
ASYPGGQLVF

SEQ ID NO: 83356 - protein, 10 aa, Homo Sapiens
ASYPHCLQFY

SEQ ID NO: 83357 - protein, 10 aa, Homo Sapiens
ATLKDRELSF

SEQ ID NO: 83358 - protein, 10 aa, Homo Sapiens
ATLTHQVSSI

SEQ ID NO: 83359 - protein, 10 aa, Homo Sapiens
ATYGDAGLTY

SEQ ID NO: 83360 - protein, 10 aa, Homo Sapiens
DNITTDKILI

SEQ ID NO: 83361 - protein, 10 aa, Homo Sapiens
FSLDAPHSTY

SEQ ID NO: 83362 - protein, 10 aa, Homo Sapiens
FTEQERGVGI

SEQ ID NO: 83363 - protein, 10 aa, Homo Sapiens
FTHEALTLKY

SEQ ID NO: 83364 - protein, 10 aa, Homo Sapiens
FTYDLKGSTY

SEQ ID NO: 83365 - protein, 10 aa, Homo Sapiens
FTYDPWIGKL

SEQ ID NO: 83366 - protein, 10 aa, Homo Sapiens
GSWDKTLKFW

SEQ ID NO: 83367 - protein, 10 aa, Homo Sapiens
GSYGPRPEEY

SEQ ID NO: 83368 - protein, 10 aa, Homo Sapiens
GTFFSEKLVL

SEQ ID NO: 83369 - protein, 10 aa, Homo Sapiens
GTVTEVLLKY

SEQ ID NO: 83370 - protein, 10 aa, Homo Sapiens
HSYINFELRY

SEQ ID NO: 83371 - protein, 10 aa, Homo Sapiens
IPAKMGALLL

SEQ ID NO: 83372 - protein, 10 aa, Homo Sapiens
ISIIQKGLQY

SEQ ID NO: 83373 - protein, 10 aa, Homo Sapiens
ISIPDVGLHL

SEQ ID NO: 83374 - protein, 10 aa, Homo Sapiens
ISIPSKCLLL

SEQ ID NO: 83375 - protein, 10 aa, Homo Sapiens
ISISVDGLKF

SEQ ID NO: 83376 - protein, 10 aa, Homo Sapiens
ISKKPESTSF

SEQ ID NO: 83377 - protein, 10 aa, Homo Sapiens
ISMDETGLTI

SEQ ID NO: 83378 - protein, 10 aa, Homo Sapiens
ISQPASGNTF

SEQ ID NO: 83379 - protein, 10 aa, Homo Sapiens
ISYRNTELEL

SEQ ID NO: 83380 - protein, 10 aa, Homo Sapiens
ITADGAHFEL

SEQ ID NO: 83381 - protein, 10 aa, Homo Sapiens
ITAEDRQVSI

SEQ ID NO: 83382 - protein, 10 aa, Homo Sapiens
ITAENMKSSL

SEQ ID NO: 83383 - protein, 10 aa, Homo Sapiens
ITIMQPILRF

SEQ ID NO: 83384 - protein, 10 aa, Homo Sapiens
ITKLMEKTKY

SEQ ID NO: 83385 - protein, 10 aa, Homo Sapiens
ITSKSGEILY

SEQ ID NO: 83386 - protein, 10 aa, Homo Sapiens
ITYNKVLHFF

SEQ ID NO: 83387 - protein, 10 aa, Homo Sapiens
KAIPDTRLTI

SEQ ID NO: 83388 - protein, 10 aa, Homo Sapiens
KFLLEKLGES

SEQ ID NO: 83389 - protein, 10 aa, Homo Sapiens
KIADMGHLKY

SEQ ID NO: 83390 - protein, 10 aa, Homo Sapiens
KIFFPGVSEF

SEQ ID NO: 83391 - protein, 10 aa, Homo Sapiens
KMYDAAKLLY

SEQ ID NO: 83392 - protein, 10 aa, Homo Sapiens
KSAPSDSLTY

SEQ ID NO: 83393 - protein, 10 aa, Homo Sapiens
KSFRGETLGY

SEQ ID NO: 83394 - protein, 10 aa, Homo Sapiens
KSFYGSTLFL

SEQ ID NO: 83395 - protein, 10 aa, Homo Sapiens
KSIGDIFLKY

SEQ ID NO: 83396 - protein, 10 aa, Homo Sapiens
KSYDGRAYVI

SEQ ID NO: 83397 - protein, 10 aa, Homo Sapiens
KTINKVLLQY

SEQ ID NO: 83398 - protein, 10 aa, Homo Sapiens
KTLQETNMMY

SEQ ID NO: 83399 - protein, 10 aa, Homo Sapiens
KTLTGKTITL

SEQ ID NO: 83400 - protein, 10 aa, Homo Sapiens
KTYDRCPLEL

SEQ ID NO: 83401 - protein, 10 aa, Homo Sapiens
KTYDTSFLDF

SEQ ID NO: 83402 - protein, 10 aa, Homo Sapiens
KTYVGGILLL

SEQ ID NO: 83403 - protein, 10 aa, Homo Sapiens
KVADWTGATY

SEQ ID NO: 83404 - protein, 10 aa, Homo Sapiens
KVFDGCPLKI

SEQ ID NO: 83405 - protein, 10 aa, Homo Sapiens
LSAQDHQTFF

SEQ ID NO: 83406 - protein, 10 aa, Homo Sapiens
LSFAARSFYY

SEQ ID NO: 83407 - protein, 10 aa, Homo Sapiens
LSFKGKSLKL

SEQ ID NO: 83408 - protein, 10 aa, Homo Sapiens
LSHAITLEFY

SEQ ID NO: 83409 - protein, 10 aa, Homo Sapiens
LSKDSILSLY

SEQ ID NO: 83410 - protein, 10 aa, Homo Sapiens
LSKQETGTEF

SEQ ID NO: 83411 - protein, 10 aa, Homo Sapiens
LSLDKESGLL

SEQ ID NO: 83412 - protein, 10 aa, Homo Sapiens
LSMPASLGRM

SEQ ID NO: 83413 - protein, 10 aa, Homo Sapiens
LSTDHIPILY

SEQ ID NO: 83414 - protein, 10 aa, Homo Sapiens
LSWEGGGLKI

SEQ ID NO: 83415 - protein, 10 aa, Homo Sapiens
LSYISRTNQL

SEQ ID NO: 83416 - protein, 10 aa, Homo Sapiens
LTIAADKGHY

SEQ ID NO: 83417 - protein, 10 aa, Homo Sapiens
LTIFTARLYY

SEQ ID NO: 83418 - protein, 10 aa, Homo Sapiens
LTIPDGGVHI

SEQ ID NO: 83419 - protein, 10 aa, Homo Sapiens
LTIRTQGLEY

SEQ ID NO: 83420 - protein, 10 aa, Homo Sapiens
LTYEDTYNTL

SEQ ID NO: 83421 - protein, 10 aa, Homo Sapiens
LTYLDNGVVF

SEQ ID NO: 83422 - protein, 10 aa, Homo Sapiens
LTYPEDKLVY

SEQ ID NO: 83423 - protein, 10 aa, Homo Sapiens
LVLDPYLLKY

SEQ ID NO: 83424 - protein, 10 aa, Homo Sapiens
LVYPGDPLRF

SEQ ID NO: 83425 - protein, 10 aa, Homo Sapiens
MQYPGRSLVF

SEQ ID NO: 83426 - protein, 10 aa, Homo Sapiens
MSEMSSFLHI

SEQ ID NO: 83427 - protein, 10 aa, Homo Sapiens
MSIKERLALL

SEQ ID NO: 83428 - protein, 10 aa, Homo Sapiens
MSYDHVELTF

SEQ ID NO: 83429 - protein, 10 aa, Homo Sapiens
MSYEQLMQLY

SEQ ID NO: 83430 - protein, 10 aa, Homo Sapiens
MTLHERFTKY

SEQ ID NO: 83431 - protein, 10 aa, Homo Sapiens
MTLKGLPSTY

SEQ ID NO: 83432 - protein, 10 aa, Homo Sapiens
MTLNERFTSY

SEQ ID NO: 83433 - protein, 10 aa, Homo Sapiens
MTVSDAILRY

SEQ ID NO: 83434 - protein, 10 aa, Homo Sapiens
QSLPDFGISY

SEQ ID NO: 83435 - protein, 10 aa, Homo Sapiens
QTIEACIANF

SEQ ID NO: 83436 - protein, 10 aa, Homo Sapiens
QTLPTSVVTI

SEQ ID NO: 83437 - protein, 10 aa, Homo Sapiens
QTLRDSMLKY

SEQ ID NO: 83438 - protein, 10 aa, Homo Sapiens
QTMCPHILRY

SEQ ID NO: 83439 - protein, 10 aa, Homo Sapiens
QTMVNSENTY

SEQ ID NO: 83440 - protein, 10 aa, Homo Sapiens
QTVKDSRTVY

SEQ ID NO: 83441 - protein, 10 aa, Homo Sapiens
QTWGPGTLRL

SEQ ID NO: 83442 - protein, 10 aa, Homo Sapiens
QTWWHGVLAW

SEQ ID NO: 83443 - protein, 10 aa, Homo Sapiens
QTYVSGTLRF

SEQ ID NO: 83444 - protein, 10 aa, Homo Sapiens
RAFDGERLRL

SEQ ID NO: 83445 - protein, 10 aa, Homo Sapiens
RAIEDPILAY

SEQ ID NO: 83446 - protein, 10 aa, Homo Sapiens
RAYEPLGLQW

SEQ ID NO: 83447 - protein, 10 aa, Homo Sapiens
RAYPHNLMTF

SEQ ID NO: 83448 - protein, 10 aa, Homo Sapiens
RAYPVGGLCY

SEQ ID NO: 83449 - protein, 10 aa, Homo Sapiens
RIAIQNLLYY

SEQ ID NO: 83450 - protein, 10 aa, Homo Sapiens
RSAPSQASSF

SEQ ID NO: 83451 - protein, 10 aa, Homo Sapiens
RSATICLAYL

SEQ ID NO: 83452 - protein, 10 aa, Homo Sapiens
RSFAPGMSTF

SEQ ID NO: 83453 - protein, 10 aa, Homo Sapiens
RSFEHALMLF

SEQ ID NO: 83454 - protein, 10 aa, Homo Sapiens
RSIEEVYYLW

SEQ ID NO: 83455 - protein, 10 aa, Homo Sapiens
RSIKAQLQNF

SEQ ID NO: 83456 - protein, 10 aa, Homo Sapiens
RSIQADGLVW

SEQ ID NO: 83457 - protein, 10 aa, Homo Sapiens
RSLINSNVGF

SEQ ID NO: 83458 - protein, 10 aa, Homo Sapiens
RSLPLCLQLY

SEQ ID NO: 83459 - protein, 10 aa, Homo Sapiens
RSMDTIVGML

SEQ ID NO: 83460 - protein, 10 aa, Homo Sapiens
RSVDVTNTTF

SEQ ID NO: 83461 - protein, 10 aa, Homo Sapiens
RSYDEAILRL

SEQ ID NO: 83462 - protein, 10 aa, Homo Sapiens
RSYKNNTLKL

SEQ ID NO: 83463 - protein, 10 aa, Homo Sapiens
RSYSDPPLKF

SEQ ID NO: 83464 - protein, 10 aa, Homo Sapiens
RSYVGIATLI

SEQ ID NO: 83465 - protein, 10 aa, Homo Sapiens
RTCEWTGLKF

SEQ ID NO: 83466 - protein, 10 aa, Homo Sapiens
RTFDETVSTY

SEQ ID NO: 83467 - protein, 10 aa, Homo Sapiens
RTFSNTTLLF

SEQ ID NO: 83468 - protein, 10 aa, Homo Sapiens
RTFTDHVMLF

SEQ ID NO: 83469 - protein, 10 aa, Homo Sapiens
RTHVPKDMKL

SEQ ID NO: 83470 - protein, 10 aa, Homo Sapiens
RTIDEHDAII

SEQ ID NO: 83471 - protein, 10 aa, Homo Sapiens
RTKDIEDVFY

SEQ ID NO: 83472 - protein, 10 aa, Homo Sapiens
RTLDKIMILF

SEQ ID NO: 83473 - protein, 10 aa, Homo Sapiens
RTLDNQLFFF

SEQ ID NO: 83474 - protein, 10 aa, Homo Sapiens
RTLESKLVLF

SEQ ID NO: 83475 - protein, 10 aa, Homo Sapiens
RTSGSVYITL

SEQ ID NO: 83476 - protein, 10 aa, Homo Sapiens
RTYDETYQRY

SEQ ID NO: 83477 - protein, 10 aa, Homo Sapiens
RTYEAKLLAF

SEQ ID NO: 83478 - protein, 10 aa, Homo Sapiens
RTYGVVAQYY

SEQ ID NO: 83479 - protein, 10 aa, Homo Sapiens
RTYPAVKMKY

SEQ ID NO: 83480 - protein, 10 aa, Homo Sapiens
RTYSKKHFRI

SEQ ID NO: 83481 - protein, 10 aa, Homo Sapiens
RTYSSGHNRL

SEQ ID NO: 83482 - protein, 10 aa, Homo Sapiens
RTYTYEKLLW

SEQ ID NO: 83483 - protein, 10 aa, Homo Sapiens
SDIDDAVRKL

SEQ ID NO: 83484 - protein, 10 aa, Homo Sapiens
SSLSGPRLLF

SEQ ID NO: 83485 - protein, 10 aa, Homo Sapiens
SSYHHGEMSL

SEQ ID NO: 83486 - protein, 10 aa, Homo Sapiens
STMEGGTLKY

SEQ ID NO: 83487 - protein, 10 aa, Homo Sapiens
STYDGFGLAW

SEQ ID NO: 83488 - protein, 10 aa, Homo Sapiens
STYQRWQFTL

SEQ ID NO: 83489 - protein, 10 aa, Homo Sapiens
SVYQDTWMKY

SEQ ID NO: 83490 - protein, 10 aa, Homo Sapiens
TLFDSRHLLY

SEQ ID NO: 83491 - protein, 10 aa, Homo Sapiens
TTYEGIFKTL

SEQ ID NO: 83492 - protein, 10 aa, Homo Sapiens
VAIKDKQVKY

SEQ ID NO: 83493 - protein, 10 aa, Homo Sapiens
VSEDSSRGAF

SEQ ID NO: 83494 - protein, 10 aa, Homo Sapiens
VSHHPPISAF

SEQ ID NO: 83495 - protein, 10 aa, Homo Sapiens
VSISSPVLSL

SEQ ID NO: 83496 - protein, 10 aa, Homo Sapiens
VSVPASRLTY

SEQ ID NO: 83497 - protein, 10 aa, Homo Sapiens
VSYGGLLMRL

SEQ ID NO: 83498 - protein, 10 aa, Homo Sapiens
VSYQKLLKYY

SEQ ID NO: 83499 - protein, 10 aa, Homo Sapiens
VSYSRVYLLY

SEQ ID NO: 83500 - protein, 10 aa, Homo Sapiens
VTAPRTVLLL

SEQ ID NO: 83501 - protein, 10 aa, Homo Sapiens
VTFPGIKLIY

SEQ ID NO: 83502 - protein, 10 aa, Homo Sapiens
VTRPDSGHLY

SEQ ID NO: 83503 - protein, 10 aa, Homo Sapiens
VTVVDRAVTI

SEQ ID NO: 83504 - protein, 10 aa, Homo Sapiens
VTYGKGKLLM

SEQ ID NO: 83505 - protein, 10 aa, Homo Sapiens
VTYNKVLHFY

SEQ ID NO: 83506 - protein, 10 aa, Homo Sapiens
YALPHAILRL

SEQ ID NO: 83507 - protein, 10 aa, Homo Sapiens
YSIEKPLKFF

SEQ ID NO: 83508 - protein, 10 aa, Homo Sapiens
YSISSLKTLF

SEQ ID NO: 83509 - protein, 10 aa, Homo Sapiens
YSKPETGLTL

SEQ ID NO: 83510 - protein, 10 aa, Homo Sapiens
YSLDHISSLF

SEQ ID NO: 83511 - protein, 10 aa, Homo Sapiens
YSLEYGFLRL

SEQ ID NO: 83512 - protein, 10 aa, Homo Sapiens
YSLVDREVGY

SEQ ID NO: 83513 - protein, 10 aa, Homo Sapiens
YSYAGGRGSY

SEQ ID NO: 83514 - protein, 10 aa, Homo Sapiens
YTDFDGTRVY

SEQ ID NO: 83515 - protein, 10 aa, Homo Sapiens
YTISDTIARF

SEQ ID NO: 83516 - protein, 10 aa, Homo Sapiens
YTLKDNKVYI

SEQ ID NO: 83517 - protein, 10 aa, Homo Sapiens
YTVKVEDLTF

SEQ ID NO: 83518 - protein, 10 aa, Homo Sapiens
YTVNGDERQL

SEQ ID NO: 83519 - protein, 10 aa, Homo Sapiens
YTYESKMAFL

SEQ ID NO: 83520 - protein, 11 aa, Homo Sapiens
AEQRGELAIKD

SEQ ID NO: 83521 - protein, 11 aa, Homo Sapiens
AQFPGACGLRY

SEQ ID NO: 83522 - protein, 11 aa, Homo Sapiens
ASDEQDSVRLL

SEQ ID NO: 83523 - protein, 11 aa, Homo Sapiens
ASLPSELIVHI

SEQ ID NO: 83524 - protein, 11 aa, Homo Sapiens
ASNQREEYLLL

SEQ ID NO: 83525 - protein, 11 aa, Homo Sapiens
ASYNAQPSASY

SEQ ID NO: 83526 - protein, 11 aa, Homo Sapiens
ASYRAQPSVSL

SEQ ID NO: 83527 - protein, 11 aa, Homo Sapiens
ATHVHSRPLLL

SEQ ID NO: 83528 - protein, 11 aa, Homo Sapiens
ATNGREGLLRF

SEQ ID NO: 83529 - protein, 11 aa, Homo Sapiens
ATSKEEALMEL

SEQ ID NO: 83530 - protein, 11 aa, Homo Sapiens
ATSKTGGYLVY

SEQ ID NO: 83531 - protein, 11 aa, Homo Sapiens
ATYQSLYPLTL

SEQ ID NO: 83532 - protein, 11 aa, Homo Sapiens
AVEAKKTYVRD

SEQ ID NO: 83533 - protein, 11 aa, Homo Sapiens
FALPSELERSY

SEQ ID NO: 83534 - protein, 11 aa, Homo Sapiens
FAYDGKDYLTL

SEQ ID NO: 83535 - protein, 11 aa, Homo Sapiens
FTLKEEKPKMY

SEQ ID NO: 83536 - protein, 11 aa, Homo Sapiens
GTIAGLNVLRI

SEQ ID NO: 83537 - protein, 11 aa, Homo Sapiens
GTSSVTGLLSY

SEQ ID NO: 83538 - protein, 11 aa, Homo Sapiens
GTYHGDSDLQL

SEQ ID NO: 83539 - protein, 11 aa, Homo Sapiens
HAVSSHIASML

SEQ ID NO: 83540 - protein, 11 aa, Homo Sapiens
HSFGGGTGSGF

SEQ ID NO: 83541 - protein, 11 aa, Homo Sapiens
ISDIDDAVRKL

SEQ ID NO: 83542 - protein, 11 aa, Homo Sapiens
ISFHPKRPMHI

SEQ ID NO: 83543 - protein, 11 aa, Homo Sapiens
ISFIPHESQVY

SEQ ID NO: 83544 - protein, 11 aa, Homo Sapiens
ISLPDDVRRRL

SEQ ID NO: 83545 - protein, 11 aa, Homo Sapiens
ISNPHGCRLFY

SEQ ID NO: 83546 - protein, 11 aa, Homo Sapiens
ISSDSTGQLHL

SEQ ID NO: 83547 - protein, 11 aa, Homo Sapiens
ISYIYGSKFQL

SEQ ID NO: 83548 - protein, 11 aa, Homo Sapiens
ISYVDPQFLTY

SEQ ID NO: 83549 - protein, 11 aa, Homo Sapiens
ITDSTGTHLVL

SEQ ID NO: 83550 - protein, 11 aa, Homo Sapiens
ITFDKGGTWEF

SEQ ID NO: 83551 - protein, 11 aa, Homo Sapiens
ITLDDASAPRL

SEQ ID NO: 83552 - protein, 11 aa, Homo Sapiens
ITYEQLKRLQI

SEQ ID NO: 83553 - protein, 11 aa, Homo Sapiens
ITYPQLEGFKF

SEQ ID NO: 83554 - protein, 11 aa, Homo Sapiens
ITYQHIDRWLL

SEQ ID NO: 83555 - protein, 11 aa, Homo Sapiens
IVSERDVYLTY

SEQ ID NO: 83556 - protein, 11 aa, Homo Sapiens
KAFPHSSSLRY

SEQ ID NO: 83557 - protein, 11 aa, Homo Sapiens
KSFEGNVFMYY

SEQ ID NO: 83558 - protein, 11 aa, Homo Sapiens
KSFKGSSGLRY

SEQ ID NO: 83559 - protein, 11 aa, Homo Sapiens
KSLGVQDLLQF

SEQ ID NO: 83560 - protein, 11 aa, Homo Sapiens
KSLLGKDVLFL

SEQ ID NO: 83561 - protein, 11 aa, Homo Sapiens
KSLQWDKVLRL

SEQ ID NO: 83562 - protein, 11 aa, Homo Sapiens
KTAVETAVLLL

SEQ ID NO: 83563 - protein, 11 aa, Homo Sapiens
KTLQHDKLVRL

SEQ ID NO: 83564 - protein, 11 aa, Homo Sapiens
KTPLGGQKRSF

SEQ ID NO: 83565 - protein, 11 aa, Homo Sapiens
KTSARDAALAY

SEQ ID NO: 83566 - protein, 11 aa, Homo Sapiens
KVYDSQGLLIF

SEQ ID NO: 83567 - protein, 11 aa, Homo Sapiens
LESRIRDVHEL

SEQ ID NO: 83568 - protein, 11 aa, Homo Sapiens
LSCPHYRFSLL

SEQ ID NO: 83569 - protein, 11 aa, Homo Sapiens
LSFDAPGRLLW

SEQ ID NO: 83570 - protein, 11 aa, Homo Sapiens
LSIPTSPTSKY

SEQ ID NO: 83571 - protein, 11 aa, Homo Sapiens
LTFPSLQRLVY

SEQ ID NO: 83572 - protein, 11 aa, Homo Sapiens
LTIPSSCPRSF

SEQ ID NO: 83573 - protein, 11 aa, Homo Sapiens
LTLDEDSRRKY

SEQ ID NO: 83574 - protein, 11 aa, Homo Sapiens
LTSVVSGHLDY

SEQ ID NO: 83575 - protein, 11 aa, Homo Sapiens
LTYETPQGLRI

SEQ ID NO: 83576 - protein, 11 aa, Homo Sapiens
LTYKPDVYTYL

SEQ ID NO: 83577 - protein, 11 aa, Homo Sapiens
MTINANNRLLL

SEQ ID NO: 83578 - protein, 11 aa, Homo Sapiens
MTLEESAMLRY

SEQ ID NO: 83579 - protein, 11 aa, Homo Sapiens
MTLPGIHPPTL

SEQ ID NO: 83580 - protein, 11 aa, Homo Sapiens
MTVDASHARHI

SEQ ID NO: 83581 - protein, 11 aa, Homo Sapiens
QAIENAHVLLY

SEQ ID NO: 83582 - protein, 11 aa, Homo Sapiens
QSISKALVAYY

SEQ ID NO: 83583 - protein, 11 aa, Homo Sapiens
QSLAADQLLKL

SEQ ID NO: 83584 - protein, 11 aa, Homo Sapiens
QSLPAGTLLHL

SEQ ID NO: 83585 - protein, 11 aa, Homo Sapiens
QSMDSKLSGRY

SEQ ID NO: 83586 - protein, 11 aa, Homo Sapiens
QSSTSSTHLQL

SEQ ID NO: 83587 - protein, 11 aa, Homo Sapiens
QSYEDMRGILY

SEQ ID NO: 83588 - protein, 11 aa, Homo Sapiens
QSYGPEHLLTF

SEQ ID NO: 83589 - protein, 11 aa, Homo Sapiens
QTMSDQIIGRI

SEQ ID NO: 83590 - protein, 11 aa, Homo Sapiens
QTWAGSHSLKY

SEQ ID NO: 83591 - protein, 11 aa, Homo Sapiens
QTYLQKETSTL

SEQ ID NO: 83592 - protein, 11 aa, Homo Sapiens
RALGEEALLRY

SEQ ID NO: 83593 - protein, 11 aa, Homo Sapiens
RALSAVHSPTF

SEQ ID NO: 83594 - protein, 11 aa, Homo Sapiens
RGFGGGGYGGF

SEQ ID NO: 83595 - protein, 11 aa, Homo Sapiens
RIIEETLALKF

SEQ ID NO: 83596 - protein, 11 aa, Homo Sapiens
RILPEEKVLRL

SEQ ID NO: 83597 - protein, 11 aa, Homo Sapiens
RILPQDVILKF

SEQ ID NO: 83598 - protein, 11 aa, Homo Sapiens
RSFIPDQHMVF

SEQ ID NO: 83599 - protein, 11 aa, Homo Sapiens
RSLDHPNVLKF

SEQ ID NO: 83600 - protein, 11 aa, Homo Sapiens
RSLDPEKTLGL

SEQ ID NO: 83601 - protein, 11 aa, Homo Sapiens
RSLDVEHTTLY

SEQ ID NO: 83602 - protein, 11 aa, Homo Sapiens
RSLEVLIGSGY

SEQ ID NO: 83603 - protein, 11 aa, Homo Sapiens
RSSRESGVLVL

SEQ ID NO: 83604 - protein, 11 aa, Homo Sapiens
RSYAGKNAVAY

SEQ ID NO: 83605 - protein, 11 aa, Homo Sapiens
RTFTHPSRLTY

SEQ ID NO: 83606 - protein, 11 aa, Homo Sapiens
RTIKPEKHLRF

SEQ ID NO: 83607 - protein, 11 aa, Homo Sapiens
RTLGEIPTLVF

SEQ ID NO: 83608 - protein, 11 aa, Homo Sapiens
RTLKYSTKMTY

SEQ ID NO: 83609 - protein, 11 aa, Homo Sapiens
RTNSTFNQVVL

SEQ ID NO: 83610 - protein, 11 aa, Homo Sapiens
RVLDPSKFLKI

SEQ ID NO: 83611 - protein, 11 aa, Homo Sapiens
RVLPGSSVLFL

SEQ ID NO: 83612 - protein, 11 aa, Homo Sapiens
SALPDIKVLTL

SEQ ID NO: 83613 - protein, 11 aa, Homo Sapiens
SAVQSSIASAF

SEQ ID NO: 83614 - protein, 11 aa, Homo Sapiens
SIFSGAASLGY

SEQ ID NO: 83615 - protein, 11 aa, Homo Sapiens
STEPAHIVASF

SEQ ID NO: 83616 - protein, 11 aa, Homo Sapiens
STIASDIVSRF

SEQ ID NO: 83617 - protein, 11 aa, Homo Sapiens
TSAPGGGPGTL

SEQ ID NO: 83618 - protein, 11 aa, Homo Sapiens
TTIPTKQTQTF

SEQ ID NO: 83619 - protein, 11 aa, Homo Sapiens
TVVGPSSVLTY

SEQ ID NO: 83620 - protein, 11 aa, Homo Sapiens
VAYWRQAGLSY

SEQ ID NO: 83621 - protein, 11 aa, Homo Sapiens
VSLPSHLNISY

SEQ ID NO: 83622 - protein, 11 aa, Homo Sapiens
VSMDNRLMELF

SEQ ID NO: 83623 - protein, 11 aa, Homo Sapiens
VSSLTSGLLTI

SEQ ID NO: 83624 - protein, 11 aa, Homo Sapiens
VSSVSTAKLTL

SEQ ID NO: 83625 - protein, 11 aa, Homo Sapiens
VSYFPDKVALL

SEQ ID NO: 83626 - protein, 11 aa, Homo Sapiens
VVSSVSSFLKY

SEQ ID NO: 83627 - protein, 11 aa, Homo Sapiens
YSLDGRLLSTY

SEQ ID NO: 83628 - protein, 11 aa, Homo Sapiens
YSLPTPKGGKY

SEQ ID NO: 83629 - protein, 11 aa, Homo Sapiens
YSVNGERLGTY

SEQ ID NO: 83630 - protein, 11 aa, Homo Sapiens
YSYDLSHSLQY

SEQ ID NO: 83631 - protein, 11 aa, Homo Sapiens
YTADGKEVLEY

SEQ ID NO: 83632 - protein, 11 aa, Homo Sapiens
YTSDSSGKLVF

SEQ ID NO: 83633 - protein, 8 aa, Homo Sapiens
AEALAHAY

SEQ ID NO: 83634 - protein, 8 aa, Homo Sapiens
AEALARVY

SEQ ID NO: 83635 - protein, 8 aa, Homo Sapiens
AEEKIELL

SEQ ID NO: 83636 - protein, 8 aa, Homo Sapiens
AEHLRYVF

SEQ ID NO: 83637 - protein, 8 aa, Homo Sapiens
AEILRKAM

SEQ ID NO: 83638 - protein, 8 aa, Homo Sapiens
AEILRSEF

SEQ ID NO: 83639 - protein, 8 aa, Homo Sapiens
AEILRSEY

SEQ ID NO: 83640 - protein, 8 aa, Homo Sapiens
AELIASTF

SEQ ID NO: 83641 - protein, 8 aa, Homo Sapiens
AEMVRHAL

SEQ ID NO: 83642 - protein, 8 aa, Homo Sapiens
AEMYVAKF

SEQ ID NO: 83643 - protein, 8 aa, Homo Sapiens
AEQLIRVY

SEQ ID NO: 83644 - protein, 8 aa, Homo Sapiens
AEQLRFLF

SEQ ID NO: 83645 - protein, 8 aa, Homo Sapiens
AERVVNQY

SEQ ID NO: 83646 - protein, 8 aa, Homo Sapiens
AEYPAVKF

SEQ ID NO: 83647 - protein, 8 aa, Homo Sapiens
CEAQAKAF

SEQ ID NO: 83648 - protein, 8 aa, Homo Sapiens
CEHLQYLF

SEQ ID NO: 83649 - protein, 8 aa, Homo Sapiens
CEIKQPVF

SEQ ID NO: 83650 - protein, 8 aa, Homo Sapiens
CEIQVQAL

SEQ ID NO: 83651 - protein, 8 aa, Homo Sapiens
CEITTREY

SEQ ID NO: 83652 - protein, 8 aa, Homo Sapiens
CEKTAVEF

SEQ ID NO: 83653 - protein, 8 aa, Homo Sapiens
CELLAQQF

SEQ ID NO: 83654 - protein, 8 aa, Homo Sapiens
CEQIRAAL

SEQ ID NO: 83655 - protein, 8 aa, Homo Sapiens
CERTVFQF

SEQ ID NO: 83656 - protein, 8 aa, Homo Sapiens
CEVQVEGY

SEQ ID NO: 83657 - protein, 8 aa, Homo Sapiens
DALAKAVY

SEQ ID NO: 83658 - protein, 8 aa, Homo Sapiens
DALVITHY

SEQ ID NO: 83659 - protein, 8 aa, Homo Sapiens
DDFKAEDF

SEQ ID NO: 83660 - protein, 8 aa, Homo Sapiens
DDFRVVSL

SEQ ID NO: 83661 - protein, 8 aa, Homo Sapiens
DDIAALVV

SEQ ID NO: 83662 - protein, 8 aa, Homo Sapiens
DDIKICTL

SEQ ID NO: 83663 - protein, 8 aa, Homo Sapiens
DDILIVKL

SEQ ID NO: 83664 - protein, 8 aa, Homo Sapiens
DDIQTPKF

SEQ ID NO: 83665 - protein, 8 aa, Homo Sapiens
DDIRAITF

SEQ ID NO: 83666 - protein, 8 aa, Homo Sapiens
DDIRVSRV

SEQ ID NO: 83667 - protein, 8 aa, Homo Sapiens
DDITQEEY

SEQ ID NO: 83668 - protein, 8 aa, Homo Sapiens
DDIYDPTY

SEQ ID NO: 83669 - protein, 8 aa, Homo Sapiens
DDLEVPAY

SEQ ID NO: 83670 - protein, 8 aa, Homo Sapiens
DDRIVHEL

SEQ ID NO: 83671 - protein, 8 aa, Homo Sapiens
DDRVVVEY

SEQ ID NO: 83672 - protein, 8 aa, Homo Sapiens
DDSLVSIF

SEQ ID NO: 83673 - protein, 8 aa, Homo Sapiens
DDVAILTY

SEQ ID NO: 83674 - protein, 8 aa, Homo Sapiens
DDVAVHYY

SEQ ID NO: 83675 - protein, 8 aa, Homo Sapiens
DDVFVNTH

SEQ ID NO: 83676 - protein, 8 aa, Homo Sapiens
DDVKVERI

SEQ ID NO: 83677 - protein, 8 aa, Homo Sapiens
DDVNAVAF

SEQ ID NO: 83678 - protein, 8 aa, Homo Sapiens
DDVPVQGF

SEQ ID NO: 83679 - protein, 8 aa, Homo Sapiens
DDVRVQEV

SEQ ID NO: 83680 - protein, 8 aa, Homo Sapiens
DDVSAVEF

SEQ ID NO: 83681 - protein, 8 aa, Homo Sapiens
DDVTSVLF

SEQ ID NO: 83682 - protein, 8 aa, Homo Sapiens
DEAAAVAL

SEQ ID NO: 83683 - protein, 8 aa, Homo Sapiens
DEAELQRL

SEQ ID NO: 83684 - protein, 8 aa, Homo Sapiens
DEAIRAVL

SEQ ID NO: 83685 - protein, 8 aa, Homo Sapiens
DEAKAEVL

SEQ ID NO: 83686 - protein, 8 aa, Homo Sapiens
DEAKFPTM

SEQ ID NO: 83687 - protein, 8 aa, Homo Sapiens
DEAKRHLL

SEQ ID NO: 83688 - protein, 8 aa, Homo Sapiens
DEALAILA

SEQ ID NO: 83689 - protein, 8 aa, Homo Sapiens
DEALQHPY

SEQ ID NO: 83690 - protein, 8 aa, Homo Sapiens
DEAQAFRA

SEQ ID NO: 83691 - protein, 8 aa, Homo Sapiens
DEAQKVIY

SEQ ID NO: 83692 - protein, 8 aa, Homo Sapiens
DEARFAGH

SEQ ID NO: 83693 - protein, 8 aa, Homo Sapiens
DEARFSEF

SEQ ID NO: 83694 - protein, 8 aa, Homo Sapiens
DEATVSVL

SEQ ID NO: 83695 - protein, 8 aa, Homo Sapiens
DEAVAYGA

SEQ ID NO: 83696 - protein, 8 aa, Homo Sapiens
DEAVIASL

SEQ ID NO: 83697 - protein, 8 aa, Homo Sapiens
DEAVWRPY

SEQ ID NO: 83698 - protein, 8 aa, Homo Sapiens
DEDIKKAY

SEQ ID NO: 83699 - protein, 8 aa, Homo Sapiens
DEDQLEKI

SEQ ID NO: 83700 - protein, 8 aa, Homo Sapiens
DEEFARTL

SEQ ID NO: 83701 - protein, 8 aa, Homo Sapiens
DEEMAVKY

SEQ ID NO: 83702 - protein, 8 aa, Homo Sapiens
DEEQIAKY

SEQ ID NO: 83703 - protein, 8 aa, Homo Sapiens
DEERLLAH

SEQ ID NO: 83704 - protein, 8 aa, Homo Sapiens
DEFFTSGY

SEQ ID NO: 83705 - protein, 8 aa, Homo Sapiens
DEFHFVAD

SEQ ID NO: 83706 - protein, 8 aa, Homo Sapiens
DEFIAHRL

SEQ ID NO: 83707 - protein, 8 aa, Homo Sapiens
DEFIIKTV

SEQ ID NO: 83708 - protein, 8 aa, Homo Sapiens
DEFKELVY

SEQ ID NO: 83709 - protein, 8 aa, Homo Sapiens
DEFKIGEL

SEQ ID NO: 83710 - protein, 8 aa, Homo Sapiens
DEFKSFCH

SEQ ID NO: 83711 - protein, 8 aa, Homo Sapiens
DEFKVVVV

SEQ ID NO: 83712 - protein, 8 aa, Homo Sapiens
DEFLASGF

SEQ ID NO: 83713 - protein, 8 aa, Homo Sapiens
DEFNIKVL

SEQ ID NO: 83714 - protein, 8 aa, Homo Sapiens
DEFNIQVL

SEQ ID NO: 83715 - protein, 8 aa, Homo Sapiens
DEFNLQKM

SEQ ID NO: 83716 - protein, 8 aa, Homo Sapiens
DEFPHPPK

SEQ ID NO: 83717 - protein, 8 aa, Homo Sapiens
DEFQEYTM

SEQ ID NO: 83718 - protein, 8 aa, Homo Sapiens
DEFQIATM

SEQ ID NO: 83719 - protein, 8 aa, Homo Sapiens
DEFRMPYL

SEQ ID NO: 83720 - protein, 8 aa, Homo Sapiens
DEFTTKLL

SEQ ID NO: 83721 - protein, 8 aa, Homo Sapiens
DEFVKSVL

SEQ ID NO: 83722 - protein, 8 aa, Homo Sapiens
DEFVTHNL

SEQ ID NO: 83723 - protein, 8 aa, Homo Sapiens
DEFVVYKT

SEQ ID NO: 83724 - protein, 8 aa, Homo Sapiens
DEFYQTTY

SEQ ID NO: 83725 - protein, 8 aa, Homo Sapiens
DEFYRSGW

SEQ ID NO: 83726 - protein, 8 aa, Homo Sapiens
DEGHSFEL

SEQ ID NO: 83727 - protein, 8 aa, Homo Sapiens
DEGIAYLV

SEQ ID NO: 83728 - protein, 8 aa, Homo Sapiens
DEGKLHVL

SEQ ID NO: 83729 - protein, 8 aa, Homo Sapiens
DEGKVIRF

SEQ ID NO: 83730 - protein, 8 aa, Homo Sapiens
DEGVGLVH

SEQ ID NO: 83731 - protein, 8 aa, Homo Sapiens
DEHEGPAL

SEQ ID NO: 83732 - protein, 8 aa, Homo Sapiens
DEHHFVAV

SEQ ID NO: 83733 - protein, 8 aa, Homo Sapiens
DEHHSVNF

SEQ ID NO: 83734 - protein, 8 aa, Homo Sapiens
DEHINVAF

SEQ ID NO: 83735 - protein, 8 aa, Homo Sapiens
DEHIQVQL

SEQ ID NO: 83736 - protein, 8 aa, Homo Sapiens
DEHISYVA

SEQ ID NO: 83737 - protein, 8 aa, Homo Sapiens
DEHLITFF

SEQ ID NO: 83738 - protein, 8 aa, Homo Sapiens
DEHLLQAI

SEQ ID NO: 83739 - protein, 8 aa, Homo Sapiens
DEHLVQSV

SEQ ID NO: 83740 - protein, 8 aa, Homo Sapiens
DEHLYVAF

SEQ ID NO: 83741 - protein, 8 aa, Homo Sapiens
DEHNIQNY

SEQ ID NO: 83742 - protein, 8 aa, Homo Sapiens
DEHSVMTY

SEQ ID NO: 83743 - protein, 8 aa, Homo Sapiens
DEHYILTF

SEQ ID NO: 83744 - protein, 8 aa, Homo Sapiens
DEIAQHAL

SEQ ID NO: 83745 - protein, 8 aa, Homo Sapiens
DEIENPHY

SEQ ID NO: 83746 - protein, 8 aa, Homo Sapiens
DEIEREVL

SEQ ID NO: 83747 - protein, 8 aa, Homo Sapiens
DEIKKYTT

SEQ ID NO: 83748 - protein, 8 aa, Homo Sapiens
DEILAQAY

SEQ ID NO: 83749 - protein, 8 aa, Homo Sapiens
DEIMLPSF

SEQ ID NO: 83750 - protein, 8 aa, Homo Sapiens
DEIMRAGM

SEQ ID NO: 83751 - protein, 8 aa, Homo Sapiens
DEINKKEL

SEQ ID NO: 83752 - protein, 8 aa, Homo Sapiens
DEIQVPVL

SEQ ID NO: 83753 - protein, 8 aa, Homo Sapiens
DEIRLKIV

SEQ ID NO: 83754 - protein, 8 aa, Homo Sapiens
DEISFVNF

SEQ ID NO: 83755 - protein, 8 aa, Homo Sapiens
DEIVALGY

SEQ ID NO: 83756 - protein, 8 aa, Homo Sapiens
DEIVVSTY

SEQ ID NO: 83757 - protein, 8 aa, Homo Sapiens
DEKAIMTY

SEQ ID NO: 83758 - protein, 8 aa, Homo Sapiens
DEKAVDKL

SEQ ID NO: 83759 - protein, 8 aa, Homo Sapiens
DEKDFYLY

SEQ ID NO: 83760 - protein, 8 aa, Homo Sapiens
DEKEFIHF

SEQ ID NO: 83761 - protein, 8 aa, Homo Sapiens
DEKFQAAY

SEQ ID NO: 83762 - protein, 8 aa, Homo Sapiens
DEKIATKY

SEQ ID NO: 83763 - protein, 8 aa, Homo Sapiens
DEKIAWAL

SEQ ID NO: 83764 - protein, 8 aa, Homo Sapiens
DEKILIQH

SEQ ID NO: 83765 - protein, 8 aa, Homo Sapiens
DEKKMANF

SEQ ID NO: 83766 - protein, 8 aa, Homo Sapiens
DEKKMEKL

SEQ ID NO: 83767 - protein, 8 aa, Homo Sapiens
DEKLVEHF

SEQ ID NO: 83768 - protein, 8 aa, Homo Sapiens
DEKPISQY

SEQ ID NO: 83769 - protein, 8 aa, Homo Sapiens
DEKRVEEF

SEQ ID NO: 83770 - protein, 8 aa, Homo Sapiens
DEKSVITY

SEQ ID NO: 83771 - protein, 8 aa, Homo Sapiens
DEKTRFSL

SEQ ID NO: 83772 - protein, 8 aa, Homo Sapiens
DEKTVVRL

SEQ ID NO: 83773 - protein, 8 aa, Homo Sapiens
DEKVVITY

SEQ ID NO: 83774 - protein, 8 aa, Homo Sapiens
DEKYFISH

SEQ ID NO: 83775 - protein, 8 aa, Homo Sapiens
DELEIKAY

SEQ ID NO: 83776 - protein, 8 aa, Homo Sapiens
DELEKEML

SEQ ID NO: 83777 - protein, 8 aa, Homo Sapiens
DELGKKQF

SEQ ID NO: 83778 - protein, 8 aa, Homo Sapiens
DELHIVEA

SEQ ID NO: 83779 - protein, 8 aa, Homo Sapiens
DELIAYEL

SEQ ID NO: 83780 - protein, 8 aa, Homo Sapiens
DELIVQHY

SEQ ID NO: 83781 - protein, 8 aa, Homo Sapiens
DELKKVNL

SEQ ID NO: 83782 - protein, 8 aa, Homo Sapiens
DELKLKQL

SEQ ID NO: 83783 - protein, 8 aa, Homo Sapiens
DELKMPCL

SEQ ID NO: 83784 - protein, 8 aa, Homo Sapiens
DELKTFRL

SEQ ID NO: 83785 - protein, 8 aa, Homo Sapiens
DELLASKY

SEQ ID NO: 83786 - protein, 8 aa, Homo Sapiens
DELLKRVY

SEQ ID NO: 83787 - protein, 8 aa, Homo Sapiens
DELPHYAL

SEQ ID NO: 83788 - protein, 8 aa, Homo Sapiens
DELQRIKL

SEQ ID NO: 83789 - protein, 8 aa, Homo Sapiens
DELRAVMF

SEQ ID NO: 83790 - protein, 8 aa, Homo Sapiens
DELRHQVM

SEQ ID NO: 83791 - protein, 8 aa, Homo Sapiens
DELRVNQL

SEQ ID NO: 83792 - protein, 8 aa, Homo Sapiens
DELSLRAL

SEQ ID NO: 83793 - protein, 8 aa, Homo Sapiens
DELVKQEM

SEQ ID NO: 83794 - protein, 8 aa, Homo Sapiens
DELVKQKI

SEQ ID NO: 83795 - protein, 8 aa, Homo Sapiens
DELVLQQL

SEQ ID NO: 83796 - protein, 8 aa, Homo Sapiens
DELYRQSL

SEQ ID NO: 83797 - protein, 8 aa, Homo Sapiens
DEMIFVAK

SEQ ID NO: 83798 - protein, 8 aa, Homo Sapiens
DEMKVLVL

SEQ ID NO: 83799 - protein, 8 aa, Homo Sapiens
DEMKVSDL

SEQ ID NO: 83800 - protein, 8 aa, Homo Sapiens
DEMLSRGF

SEQ ID NO: 83801 - protein, 8 aa, Homo Sapiens
DEMNVKVL

SEQ ID NO: 83802 - protein, 8 aa, Homo Sapiens
DEMPIFKL

SEQ ID NO: 83803 - protein, 8 aa, Homo Sapiens
DEMPKTLY

SEQ ID NO: 83804 - protein, 8 aa, Homo Sapiens
DEMTGYVA

SEQ ID NO: 83805 - protein, 8 aa, Homo Sapiens
DEMVVELI

SEQ ID NO: 83806 - protein, 8 aa, Homo Sapiens
DENEIEKL

SEQ ID NO: 83807 - protein, 8 aa, Homo Sapiens
DENFILKH

SEQ ID NO: 83808 - protein, 8 aa, Homo Sapiens
DENIRIIL

SEQ ID NO: 83809 - protein, 8 aa, Homo Sapiens
DENKVPYF

SEQ ID NO: 83810 - protein, 8 aa, Homo Sapiens
DENPGVRY

SEQ ID NO: 83811 - protein, 8 aa, Homo Sapiens
DENRKVAL

SEQ ID NO: 83812 - protein, 8 aa, Homo Sapiens
DENRVPDL

SEQ ID NO: 83813 - protein, 8 aa, Homo Sapiens
DENVAHVL

SEQ ID NO: 83814 - protein, 8 aa, Homo Sapiens
DENYFVNY

SEQ ID NO: 83815 - protein, 8 aa, Homo Sapiens
DENYSAEL

SEQ ID NO: 83816 - protein, 8 aa, Homo Sapiens
DEPLIHVF

SEQ ID NO: 83817 - protein, 8 aa, Homo Sapiens
DEPLVYFY

SEQ ID NO: 83818 - protein, 8 aa, Homo Sapiens
DEPQVQKY

SEQ ID NO: 83819 - protein, 8 aa, Homo Sapiens
DEPSVKTM

SEQ ID NO: 83820 - protein, 8 aa, Homo Sapiens
DEQHGFVF

SEQ ID NO: 83821 - protein, 8 aa, Homo Sapiens
DEQKFHCL

SEQ ID NO: 83822 - protein, 8 aa, Homo Sapiens
DEQRAVKY

SEQ ID NO: 83823 - protein, 8 aa, Homo Sapiens
DERAIDAL

SEQ ID NO: 83824 - protein, 8 aa, Homo Sapiens
DERAIEAL

SEQ ID NO: 83825 - protein, 8 aa, Homo Sapiens
DERAIEMF

SEQ ID NO: 83826 - protein, 8 aa, Homo Sapiens
DERAIEMY

SEQ ID NO: 83827 - protein, 8 aa, Homo Sapiens
DEREVVRM

SEQ ID NO: 83828 - protein, 8 aa, Homo Sapiens
DERIREYF

SEQ ID NO: 83829 - protein, 8 aa, Homo Sapiens
DERIVVVA

SEQ ID NO: 83830 - protein, 8 aa, Homo Sapiens
DERIYVKM

SEQ ID NO: 83831 - protein, 8 aa, Homo Sapiens
DERKLRTF

SEQ ID NO: 83832 - protein, 8 aa, Homo Sapiens
DERKVNEL

SEQ ID NO: 83833 - protein, 8 aa, Homo Sapiens
DERLITRL

SEQ ID NO: 83834 - protein, 8 aa, Homo Sapiens
DERLKDLF

SEQ ID NO: 83835 - protein, 8 aa, Homo Sapiens
DERLQPLL

SEQ ID NO: 83836 - protein, 8 aa, Homo Sapiens
DERLVQVL

SEQ ID NO: 83837 - protein, 8 aa, Homo Sapiens
DERLVTCL

SEQ ID NO: 83838 - protein, 8 aa, Homo Sapiens
DERPTEQY

SEQ ID NO: 83839 - protein, 8 aa, Homo Sapiens
DERVLQAL

SEQ ID NO: 83840 - protein, 8 aa, Homo Sapiens
DERVLVAF

SEQ ID NO: 83841 - protein, 8 aa, Homo Sapiens
DERVREYY

SEQ ID NO: 83842 - protein, 8 aa, Homo Sapiens
DERVSPAL

SEQ ID NO: 83843 - protein, 8 aa, Homo Sapiens
DERYFNEM

SEQ ID NO: 83844 - protein, 8 aa, Homo Sapiens
DESFAVKH

SEQ ID NO: 83845 - protein, 8 aa, Homo Sapiens
DESIFSAF

SEQ ID NO: 83846 - protein, 8 aa, Homo Sapiens
DESIRTCL

SEQ ID NO: 83847 - protein, 8 aa, Homo Sapiens
DESKFCSY

SEQ ID NO: 83848 - protein, 8 aa, Homo Sapiens
DESLRSHF

SEQ ID NO: 83849 - protein, 8 aa, Homo Sapiens
DESPRSVL

SEQ ID NO: 83850 - protein, 8 aa, Homo Sapiens
DESYIEKF

SEQ ID NO: 83851 - protein, 8 aa, Homo Sapiens
DETEARKY

SEQ ID NO: 83852 - protein, 8 aa, Homo Sapiens
DETEFRNF

SEQ ID NO: 83853 - protein, 8 aa, Homo Sapiens
DETFTHHL

SEQ ID NO: 83854 - protein, 8 aa, Homo Sapiens
DETGAYLI

SEQ ID NO: 83855 - protein, 8 aa, Homo Sapiens
DETHSHIY

SEQ ID NO: 83856 - protein, 8 aa, Homo Sapiens
DETLIHSH

SEQ ID NO: 83857 - protein, 8 aa, Homo Sapiens
DETLMCSF

SEQ ID NO: 83858 - protein, 8 aa, Homo Sapiens
DETQIFSY

SEQ ID NO: 83859 - protein, 8 aa, Homo Sapiens
DETRVFRL

SEQ ID NO: 83860 - protein, 8 aa, Homo Sapiens
DETTVRKL

SEQ ID NO: 83861 - protein, 8 aa, Homo Sapiens
DETVVNRI

SEQ ID NO: 83862 - protein, 8 aa, Homo Sapiens
DEVAFRKF

SEQ ID NO: 83863 - protein, 8 aa, Homo Sapiens
DEVELARI

SEQ ID NO: 83864 - protein, 8 aa, Homo Sapiens
DEVELIHF

SEQ ID NO: 83865 - protein, 8 aa, Homo Sapiens
DEVERVIT

SEQ ID NO: 83866 - protein, 8 aa, Homo Sapiens
DEVFFHRY

SEQ ID NO: 83867 - protein, 8 aa, Homo Sapiens
DEVFSHIL

SEQ ID NO: 83868 - protein, 8 aa, Homo Sapiens
DEVFVNKL

SEQ ID NO: 83869 - protein, 8 aa, Homo Sapiens
DEVGGEAL

SEQ ID NO: 83870 - protein, 8 aa, Homo Sapiens
DEVHAVGL

SEQ ID NO: 83871 - protein, 8 aa, Homo Sapiens
DEVHIEVH

SEQ ID NO: 83872 - protein, 8 aa, Homo Sapiens
DEVHLEEL

SEQ ID NO: 83873 - protein, 8 aa, Homo Sapiens
DEVIGQVL

SEQ ID NO: 83874 - protein, 8 aa, Homo Sapiens
DEVIHGIF

SEQ ID NO: 83875 - protein, 8 aa, Homo Sapiens
DEVIIEQF

SEQ ID NO: 83876 - protein, 8 aa, Homo Sapiens
DEVIITGY

SEQ ID NO: 83877 - protein, 8 aa, Homo Sapiens
DEVKAHLL

SEQ ID NO: 83878 - protein, 8 aa, Homo Sapiens
DEVKFKSF

SEQ ID NO: 83879 - protein, 8 aa, Homo Sapiens
DEVKFKSY

SEQ ID NO: 83880 - protein, 8 aa, Homo Sapiens
DEVKISSA

SEQ ID NO: 83881 - protein, 8 aa, Homo Sapiens
DEVKKICM

SEQ ID NO: 83882 - protein, 8 aa, Homo Sapiens
DEVKVNQI

SEQ ID NO: 83883 - protein, 8 aa, Homo Sapiens
DEVLFKVY

SEQ ID NO: 83884 - protein, 8 aa, Homo Sapiens
DEVLFTGV

SEQ ID NO: 83885 - protein, 8 aa, Homo Sapiens
DEVLLQKL

SEQ ID NO: 83886 - protein, 8 aa, Homo Sapiens
DEVLNAAF

SEQ ID NO: 83887 - protein, 8 aa, Homo Sapiens
DEVLVAGF

SEQ ID NO: 83888 - protein, 8 aa, Homo Sapiens
DEVLVNHF

SEQ ID NO: 83889 - protein, 8 aa, Homo Sapiens
DEVMRAYL

SEQ ID NO: 83890 - protein, 8 aa, Homo Sapiens
DEVPVATV

SEQ ID NO: 83891 - protein, 8 aa, Homo Sapiens
DEVPVPSF

SEQ ID NO: 83892 - protein, 8 aa, Homo Sapiens
DEVQILEM

SEQ ID NO: 83893 - protein, 8 aa, Homo Sapiens
DEVRAWTI

SEQ ID NO: 83894 - protein, 8 aa, Homo Sapiens
DEVRLLKY

SEQ ID NO: 83895 - protein, 8 aa, Homo Sapiens
DEVRTGTY

SEQ ID NO: 83896 - protein, 8 aa, Homo Sapiens
DEVRTLTY

SEQ ID NO: 83897 - protein, 8 aa, Homo Sapiens
DEVTVTAL

SEQ ID NO: 83898 - protein, 8 aa, Homo Sapiens
DEVVRNAP

SEQ ID NO: 83899 - protein, 8 aa, Homo Sapiens
DEVYAPGL

SEQ ID NO: 83900 - protein, 8 aa, Homo Sapiens
DEWKAQVA

SEQ ID NO: 83901 - protein, 8 aa, Homo Sapiens
DEWKGMVL

SEQ ID NO: 83902 - protein, 8 aa, Homo Sapiens
DEWRETAW

SEQ ID NO: 83903 - protein, 8 aa, Homo Sapiens
DEWTSQAH

SEQ ID NO: 83904 - protein, 8 aa, Homo Sapiens
DEWWAQQF

SEQ ID NO: 83905 - protein, 8 aa, Homo Sapiens
DEYCVQQL

SEQ ID NO: 83906 - protein, 8 aa, Homo Sapiens
DEYKIPSS

SEQ ID NO: 83907 - protein, 8 aa, Homo Sapiens
DEYKPPKF

SEQ ID NO: 83908 - protein, 8 aa, Homo Sapiens
DEYKVTAF

SEQ ID NO: 83909 - protein, 8 aa, Homo Sapiens
DEYLVTSI

SEQ ID NO: 83910 - protein, 8 aa, Homo Sapiens
DEYQVAQL

SEQ ID NO: 83911 - protein, 8 aa, Homo Sapiens
DEYRSMTM

SEQ ID NO: 83912 - protein, 8 aa, Homo Sapiens
DEYYQVVY

SEQ ID NO: 83913 - protein, 8 aa, Homo Sapiens
DGMKIPTY

SEQ ID NO: 83914 - protein, 8 aa, Homo Sapiens
DGVVVQVM

SEQ ID NO: 83915 - protein, 8 aa, Homo Sapiens
DMAEIEKF

SEQ ID NO: 83916 - protein, 8 aa, Homo Sapiens
DMIILPEM

SEQ ID NO: 83917 - protein, 8 aa, Homo Sapiens
DQFILYLG

SEQ ID NO: 83918 - protein, 8 aa, Homo Sapiens
DQVKFNVF

SEQ ID NO: 83919 - protein, 8 aa, Homo Sapiens
DSVVVHVY

SEQ ID NO: 83920 - protein, 8 aa, Homo Sapiens
DVPLVVEY

SEQ ID NO: 83921 - protein, 8 aa, Homo Sapiens
EDIVVPVY

SEQ ID NO: 83922 - protein, 8 aa, Homo Sapiens
EDRVIEHY

SEQ ID NO: 83923 - protein, 8 aa, Homo Sapiens
EEAFVSHY

SEQ ID NO: 83924 - protein, 8 aa, Homo Sapiens
EEAIIYSY

SEQ ID NO: 83925 - protein, 8 aa, Homo Sapiens
EEAIRPQM

SEQ ID NO: 83926 - protein, 8 aa, Homo Sapiens
EEAKELLL

SEQ ID NO: 83927 - protein, 8 aa, Homo Sapiens
EEALAKKF

SEQ ID NO: 83928 - protein, 8 aa, Homo Sapiens
EEALRLVY

SEQ ID NO: 83929 - protein, 8 aa, Homo Sapiens
EEARKFSY

SEQ ID NO: 83930 - protein, 8 aa, Homo Sapiens
EEFAAALY

SEQ ID NO: 83931 - protein, 8 aa, Homo Sapiens
EEFDFKEY

SEQ ID NO: 83932 - protein, 8 aa, Homo Sapiens
EEFNGYLY

SEQ ID NO: 83933 - protein, 8 aa, Homo Sapiens
EEFQIHVF

SEQ ID NO: 83934 - protein, 8 aa, Homo Sapiens
EEFTVARL

SEQ ID NO: 83935 - protein, 8 aa, Homo Sapiens
EEGLVSQY

SEQ ID NO: 83936 - protein, 8 aa, Homo Sapiens
EEGRVFVY

SEQ ID NO: 83937 - protein, 8 aa, Homo Sapiens
EEHEVAVL

SEQ ID NO: 83938 - protein, 8 aa, Homo Sapiens
EEHGVYVY

SEQ ID NO: 83939 - protein, 8 aa, Homo Sapiens
EEIARLLM

SEQ ID NO: 83940 - protein, 8 aa, Homo Sapiens
EEIEGFRY

SEQ ID NO: 83941 - protein, 8 aa, Homo Sapiens
EEIHATGF

SEQ ID NO: 83942 - protein, 8 aa, Homo Sapiens
EEIIKYAH

SEQ ID NO: 83943 - protein, 8 aa, Homo Sapiens
EEIILVSF

SEQ ID NO: 83944 - protein, 8 aa, Homo Sapiens
EEIIVKAM

SEQ ID NO: 83945 - protein, 8 aa, Homo Sapiens
EEIKKTTL

SEQ ID NO: 83946 - protein, 8 aa, Homo Sapiens
EEILLNSY

SEQ ID NO: 83947 - protein, 8 aa, Homo Sapiens
EEILSVAY

SEQ ID NO: 83948 - protein, 8 aa, Homo Sapiens
EEIMRNQF

SEQ ID NO: 83949 - protein, 8 aa, Homo Sapiens
EEIPTHSF

SEQ ID NO: 83950 - protein, 8 aa, Homo Sapiens
EEIQKHNL

SEQ ID NO: 83951 - protein, 8 aa, Homo Sapiens
EEIQSFIY

SEQ ID NO: 83952 - protein, 8 aa, Homo Sapiens
EEIRAEVF

SEQ ID NO: 83953 - protein, 8 aa, Homo Sapiens
EEIVKVTF

SEQ ID NO: 83954 - protein, 8 aa, Homo Sapiens
EEIVRFGF

SEQ ID NO: 83955 - protein, 8 aa, Homo Sapiens
EELKFDRY

SEQ ID NO: 83956 - protein, 8 aa, Homo Sapiens
EELLLVAY

SEQ ID NO: 83957 - protein, 8 aa, Homo Sapiens
EELQVANY

SEQ ID NO: 83958 - protein, 8 aa, Homo Sapiens
EELRVDHY

SEQ ID NO: 83959 - protein, 8 aa, Homo Sapiens
EELVRMVL

SEQ ID NO: 83960 - protein, 8 aa, Homo Sapiens
EEMEAYRM

SEQ ID NO: 83961 - protein, 8 aa, Homo Sapiens
EEMEFQRF

SEQ ID NO: 83962 - protein, 8 aa, Homo Sapiens
EEMFASRF

SEQ ID NO: 83963 - protein, 8 aa, Homo Sapiens
EEMKFHEF

SEQ ID NO: 83964 - protein, 8 aa, Homo Sapiens
EEMLVEKL

SEQ ID NO: 83965 - protein, 8 aa, Homo Sapiens
EEMMVPGM

SEQ ID NO: 83966 - protein, 8 aa, Homo Sapiens
EEQIAYAM

SEQ ID NO: 83967 - protein, 8 aa, Homo Sapiens
EEQLQQIR

SEQ ID NO: 83968 - protein, 8 aa, Homo Sapiens
EERIVELF

SEQ ID NO: 83969 - protein, 8 aa, Homo Sapiens
EERQIEEL

SEQ ID NO: 83970 - protein, 8 aa, Homo Sapiens
EERYFISH

SEQ ID NO: 83971 - protein, 8 aa, Homo Sapiens
EESIAHHY

SEQ ID NO: 83972 - protein, 8 aa, Homo Sapiens
EETVFYGL

SEQ ID NO: 83973 - protein, 8 aa, Homo Sapiens
EEVETFAF

SEQ ID NO: 83974 - protein, 8 aa, Homo Sapiens
EEVLSCLY

SEQ ID NO: 83975 - protein, 8 aa, Homo Sapiens
EEWKFDTL

SEQ ID NO: 83976 - protein, 8 aa, Homo Sapiens
EEWLRPVM

SEQ ID NO: 83977 - protein, 8 aa, Homo Sapiens
EEWSVKTY

SEQ ID NO: 83978 - protein, 8 aa, Homo Sapiens
EEWVRPVM

SEQ ID NO: 83979 - protein, 8 aa, Homo Sapiens
EEYKVACL

SEQ ID NO: 83980 - protein, 8 aa, Homo Sapiens
EEYLKPVL

SEQ ID NO: 83981 - protein, 8 aa, Homo Sapiens
EEYYSSRY

SEQ ID NO: 83982 - protein, 8 aa, Homo Sapiens
EITLLQEF

SEQ ID NO: 83983 - protein, 8 aa, Homo Sapiens
ELAILDRL

SEQ ID NO: 83984 - protein, 8 aa, Homo Sapiens
ELQRVEEL

SEQ ID NO: 83985 - protein, 8 aa, Homo Sapiens
ENIAAVVF

SEQ ID NO: 83986 - protein, 8 aa, Homo Sapiens
ETAVLPKL

SEQ ID NO: 83987 - protein, 8 aa, Homo Sapiens
ETIKNGIY

SEQ ID NO: 83988 - protein, 8 aa, Homo Sapiens
ETPILARY

SEQ ID NO: 83989 - protein, 8 aa, Homo Sapiens
FEHIVTQF

SEQ ID NO: 83990 - protein, 8 aa, Homo Sapiens
FEHKASRF

SEQ ID NO: 83991 - protein, 8 aa, Homo Sapiens
FEHMATNY

SEQ ID NO: 83992 - protein, 8 aa, Homo Sapiens
FEHQFETL

SEQ ID NO: 83993 - protein, 8 aa, Homo Sapiens
FEHTFEVY

SEQ ID NO: 83994 - protein, 8 aa, Homo Sapiens
FEIIVHQY

SEQ ID NO: 83995 - protein, 8 aa, Homo Sapiens
FEIPAQRF

SEQ ID NO: 83996 - protein, 8 aa, Homo Sapiens
FEIVLNDY

SEQ ID NO: 83997 - protein, 8 aa, Homo Sapiens
FEKEAAEM

SEQ ID NO: 83998 - protein, 8 aa, Homo Sapiens
FEKLKPKY

SEQ ID NO: 83999 - protein, 8 aa, Homo Sapiens
FEKQVELY

SEQ ID NO: 84000 - protein, 8 aa, Homo Sapiens
FELVQHEY

SEQ ID NO: 84001 - protein, 8 aa, Homo Sapiens
FEMTIPQF

SEQ ID NO: 84002 - protein, 8 aa, Homo Sapiens
FENIVAVL

SEQ ID NO: 84003 - protein, 8 aa, Homo Sapiens
FEQAFYTY

SEQ ID NO: 84004 - protein, 8 aa, Homo Sapiens
FERTVEAL

SEQ ID NO: 84005 - protein, 8 aa, Homo Sapiens
FESHITSY

SEQ ID NO: 84006 - protein, 8 aa, Homo Sapiens
FETIIHSY

SEQ ID NO: 84007 - protein, 8 aa, Homo Sapiens
FEVEKELF

SEQ ID NO: 84008 - protein, 8 aa, Homo Sapiens
FEVLVEKY

SEQ ID NO: 84009 - protein, 8 aa, Homo Sapiens
GEFIFTEM

SEQ ID NO: 84010 - protein, 8 aa, Homo Sapiens
GEFYVIEY

SEQ ID NO: 84011 - protein, 8 aa, Homo Sapiens
GEIRATAF

SEQ ID NO: 84012 - protein, 8 aa, Homo Sapiens
GETFSHVF

SEQ ID NO: 84013 - protein, 8 aa, Homo Sapiens
HEAAKEVF

SEQ ID NO: 84014 - protein, 8 aa, Homo Sapiens
HEAPIPTF

SEQ ID NO: 84015 - protein, 8 aa, Homo Sapiens
HEAQIQEM

SEQ ID NO: 84016 - protein, 8 aa, Homo Sapiens
HEATLRCW

SEQ ID NO: 84017 - protein, 8 aa, Homo Sapiens
HEAVLVQY

SEQ ID NO: 84018 - protein, 8 aa, Homo Sapiens
HEAYVTVL

SEQ ID NO: 84019 - protein, 8 aa, Homo Sapiens
HECMVNKF

SEQ ID NO: 84020 - protein, 8 aa, Homo Sapiens
HEDTRHLL

SEQ ID NO: 84021 - protein, 8 aa, Homo Sapiens
HEEKVAAY

SEQ ID NO: 84022 - protein, 8 aa, Homo Sapiens
HEFGAITF

SEQ ID NO: 84023 - protein, 8 aa, Homo Sapiens
HEFIATFF

SEQ ID NO: 84024 - protein, 8 aa, Homo Sapiens
HEFLEFEF

SEQ ID NO: 84025 - protein, 8 aa, Homo Sapiens
HEFLIAAL

SEQ ID NO: 84026 - protein, 8 aa, Homo Sapiens
HEFLTSAY

SEQ ID NO: 84027 - protein, 8 aa, Homo Sapiens
HEFLTWVL

SEQ ID NO: 84028 - protein, 8 aa, Homo Sapiens
HEFLVNTL

SEQ ID NO: 84029 - protein, 8 aa, Homo Sapiens
HEFQSEVF

SEQ ID NO: 84030 - protein, 8 aa, Homo Sapiens
HEFTVYRM

SEQ ID NO: 84031 - protein, 8 aa, Homo Sapiens
HEFVMAQY

SEQ ID NO: 84032 - protein, 8 aa, Homo Sapiens
HEFVVKAV

SEQ ID NO: 84033 - protein, 8 aa, Homo Sapiens
HEGPALYY

SEQ ID NO: 84034 - protein, 8 aa, Homo Sapiens
HEHQANLL

SEQ ID NO: 84035 - protein, 8 aa, Homo Sapiens
HEHQVMLM

SEQ ID NO: 84036 - protein, 8 aa, Homo Sapiens
HEIARPQI

SEQ ID NO: 84037 - protein, 8 aa, Homo Sapiens
HEIEGTVF

SEQ ID NO: 84038 - protein, 8 aa, Homo Sapiens
HEIEVETI

SEQ ID NO: 84039 - protein, 8 aa, Homo Sapiens
HEIILAAF

SEQ ID NO: 84040 - protein, 8 aa, Homo Sapiens
HEILREAY

SEQ ID NO: 84041 - protein, 8 aa, Homo Sapiens
HEILTKSY

SEQ ID NO: 84042 - protein, 8 aa, Homo Sapiens
HEILVSDF

SEQ ID NO: 84043 - protein, 8 aa, Homo Sapiens
HEIPYYEF

SEQ ID NO: 84044 - protein, 8 aa, Homo Sapiens
HEKKAYSF

SEQ ID NO: 84045 - protein, 8 aa, Homo Sapiens
HEKLVQLY

SEQ ID NO: 84046 - protein, 8 aa, Homo Sapiens
HELFLQAF

SEQ ID NO: 84047 - protein, 8 aa, Homo Sapiens
HELIFSSF

SEQ ID NO: 84048 - protein, 8 aa, Homo Sapiens
HELIIPQW

SEQ ID NO: 84049 - protein, 8 aa, Homo Sapiens
HELKIEEY

SEQ ID NO: 84050 - protein, 8 aa, Homo Sapiens
HELLISTL

SEQ ID NO: 84051 - protein, 8 aa, Homo Sapiens
HELLLTEL

SEQ ID NO: 84052 - protein, 8 aa, Homo Sapiens
HELMQTVY

SEQ ID NO: 84053 - protein, 8 aa, Homo Sapiens
HELQANCY

SEQ ID NO: 84054 - protein, 8 aa, Homo Sapiens
HELTFQAM

SEQ ID NO: 84055 - protein, 8 aa, Homo Sapiens
HEMIILKL

SEQ ID NO: 84056 - protein, 8 aa, Homo Sapiens
HEMVIYEA

SEQ ID NO: 84057 - protein, 8 aa, Homo Sapiens
HEMVVYEA

SEQ ID NO: 84058 - protein, 8 aa, Homo Sapiens
HENIAELY

SEQ ID NO: 84059 - protein, 8 aa, Homo Sapiens
HENVVEMY

SEQ ID NO: 84060 - protein, 8 aa, Homo Sapiens
HENVVEVL

SEQ ID NO: 84061 - protein, 8 aa, Homo Sapiens
HEPIVNKF

SEQ ID NO: 84062 - protein, 8 aa, Homo Sapiens
HERPAYLY

SEQ ID NO: 84063 - protein, 8 aa, Homo Sapiens
HESLSHEL

SEQ ID NO: 84064 - protein, 8 aa, Homo Sapiens
HESVIKEY

SEQ ID NO: 84065 - protein, 8 aa, Homo Sapiens
HETIRVAV

SEQ ID NO: 84066 - protein, 8 aa, Homo Sapiens
HETVAYEF

SEQ ID NO: 84067 - protein, 8 aa, Homo Sapiens
HEVEVQYY

SEQ ID NO: 84068 - protein, 8 aa, Homo Sapiens
HEVGVVAF

SEQ ID NO: 84069 - protein, 8 aa, Homo Sapiens
HEVIRTTA

SEQ ID NO: 84070 - protein, 8 aa, Homo Sapiens
HEVIVSAA

SEQ ID NO: 84071 - protein, 8 aa, Homo Sapiens
HEVKKVTL

SEQ ID NO: 84072 - protein, 8 aa, Homo Sapiens
HEVLLPQY

SEQ ID NO: 84073 - protein, 8 aa, Homo Sapiens
HEVTICNY

SEQ ID NO: 84074 - protein, 8 aa, Homo Sapiens
HEWTIPSH

SEQ ID NO: 84075 - protein, 8 aa, Homo Sapiens
HEYIFEGF

SEQ ID NO: 84076 - protein, 8 aa, Homo Sapiens
HEYLVACI

SEQ ID NO: 84077 - protein, 8 aa, Homo Sapiens
IEAAKAVY

SEQ ID NO: 84078 - protein, 8 aa, Homo Sapiens
IEAAVATF

SEQ ID NO: 84079 - protein, 8 aa, Homo Sapiens
IEAEKAEL

SEQ ID NO: 84080 - protein, 8 aa, Homo Sapiens
IEAEVPAV

SEQ ID NO: 84081 - protein, 8 aa, Homo Sapiens
IEAFSQRY

SEQ ID NO: 84082 - protein, 8 aa, Homo Sapiens
IEAIRVEL

SEQ ID NO: 84083 - protein, 8 aa, Homo Sapiens
IEARVQEY

SEQ ID NO: 84084 - protein, 8 aa, Homo Sapiens
IEDKSTVF

SEQ ID NO: 84085 - protein, 8 aa, Homo Sapiens
IEDVAHRM

SEQ ID NO: 84086 - protein, 8 aa, Homo Sapiens
IEDYTHRF

SEQ ID NO: 84087 - protein, 8 aa, Homo Sapiens
IEERVNIL

SEQ ID NO: 84088 - protein, 8 aa, Homo Sapiens
IEFIRSEY

SEQ ID NO: 84089 - protein, 8 aa, Homo Sapiens
IEFQREAL

SEQ ID NO: 84090 - protein, 8 aa, Homo Sapiens
IEGLAPKL

SEQ ID NO: 84091 - protein, 8 aa, Homo Sapiens
IEGLTAEF

SEQ ID NO: 84092 - protein, 8 aa, Homo Sapiens
IEHAFILY

SEQ ID NO: 84093 - protein, 8 aa, Homo Sapiens
IEHLLPLF

SEQ ID NO: 84094 - protein, 8 aa, Homo Sapiens
IEIERSLY

SEQ ID NO: 84095 - protein, 8 aa, Homo Sapiens
IEIQVAVH

SEQ ID NO: 84096 - protein, 8 aa, Homo Sapiens
IEIVIREY

SEQ ID NO: 84097 - protein, 8 aa, Homo Sapiens
IEKEAEIL

SEQ ID NO: 84098 - protein, 8 aa, Homo Sapiens
IEKERPQL

SEQ ID NO: 84099 - protein, 8 aa, Homo Sapiens
IEKETEEY

SEQ ID NO: 84100 - protein, 8 aa, Homo Sapiens
IEKETKEY

SEQ ID NO: 84101 - protein, 8 aa, Homo Sapiens
IEKEVEEY

SEQ ID NO: 84102 - protein, 8 aa, Homo Sapiens
IELLLPKL

SEQ ID NO: 84103 - protein, 8 aa, Homo Sapiens
IEMELSKY

SEQ ID NO: 84104 - protein, 8 aa, Homo Sapiens
IENEIAVL

SEQ ID NO: 84105 - protein, 8 aa, Homo Sapiens
IENIVAVT

SEQ ID NO: 84106 - protein, 8 aa, Homo Sapiens
IENKTTVY

SEQ ID NO: 84107 - protein, 8 aa, Homo Sapiens
IENRVLEL

SEQ ID NO: 84108 - protein, 8 aa, Homo Sapiens
IENVKAKI

SEQ ID NO: 84109 - protein, 8 aa, Homo Sapiens
IEQIIRNY

SEQ ID NO: 84110 - protein, 8 aa, Homo Sapiens
IEQISKVY

SEQ ID NO: 84111 - protein, 8 aa, Homo Sapiens
IEQIVYVI

SEQ ID NO: 84112 - protein, 8 aa, Homo Sapiens
IEQKIKEY

SEQ ID NO: 84113 - protein, 8 aa, Homo Sapiens
IEQQIQTY

SEQ ID NO: 84114 - protein, 8 aa, Homo Sapiens
IERAVQEL

SEQ ID NO: 84115 - protein, 8 aa, Homo Sapiens
IEREVNIL

SEQ ID NO: 84116 - protein, 8 aa, Homo Sapiens
IERMVQEA

SEQ ID NO: 84117 - protein, 8 aa, Homo Sapiens
IERPFETY

SEQ ID NO: 84118 - protein, 8 aa, Homo Sapiens
IESIVHAF

SEQ ID NO: 84119 - protein, 8 aa, Homo Sapiens
IESKFYKM

SEQ ID NO: 84120 - protein, 8 aa, Homo Sapiens
IESLAHAL

SEQ ID NO: 84121 - protein, 8 aa, Homo Sapiens
IESTFHMY

SEQ ID NO: 84122 - protein, 8 aa, Homo Sapiens
IETDIAAY

SEQ ID NO: 84123 - protein, 8 aa, Homo Sapiens
IETIANEF

SEQ ID NO: 84124 - protein, 8 aa, Homo Sapiens
IETIANEY

SEQ ID NO: 84125 - protein, 8 aa, Homo Sapiens
IETIVAAM

SEQ ID NO: 84126 - protein, 8 aa, Homo Sapiens
IETLIVHY

SEQ ID NO: 84127 - protein, 8 aa, Homo Sapiens
IEVEVRKF

SEQ ID NO: 84128 - protein, 8 aa, Homo Sapiens
IEVKTDEF

SEQ ID NO: 84129 - protein, 8 aa, Homo Sapiens
IEVLIREY

SEQ ID NO: 84130 - protein, 8 aa, Homo Sapiens
IEVSVPRF

SEQ ID NO: 84131 - protein, 8 aa, Homo Sapiens
IEYTVKSH

SEQ ID NO: 84132 - protein, 8 aa, Homo Sapiens
IFESENFF

SEQ ID NO: 84133 - protein, 8 aa, Homo Sapiens
KEFKVEVY

SEQ ID NO: 84134 - protein, 8 aa, Homo Sapiens
KEILIPVF

SEQ ID NO: 84135 - protein, 8 aa, Homo Sapiens
KELEVPHF

SEQ ID NO: 84136 - protein, 8 aa, Homo Sapiens
KEVEAVVY

SEQ ID NO: 84137 - protein, 8 aa, Homo Sapiens
KTVEAIEI

SEQ ID NO: 84138 - protein, 8 aa, Homo Sapiens
LAEDLAAL

SEQ ID NO: 84139 - protein, 8 aa, Homo Sapiens
LDIERPTY

SEQ ID NO: 84140 - protein, 8 aa, Homo Sapiens
LDMEIHAY

SEQ ID NO: 84141 - protein, 8 aa, Homo Sapiens
LEAERAQL

SEQ ID NO: 84142 - protein, 8 aa, Homo Sapiens
LEAFVAKF

SEQ ID NO: 84143 - protein, 8 aa, Homo Sapiens
LEALIAHF

SEQ ID NO: 84144 - protein, 8 aa, Homo Sapiens
LEALRDIL

SEQ ID NO: 84145 - protein, 8 aa, Homo Sapiens
LEAMFTAM

SEQ ID NO: 84146 - protein, 8 aa, Homo Sapiens
LEAPARAF

SEQ ID NO: 84147 - protein, 8 aa, Homo Sapiens
LEAQIYEY

SEQ ID NO: 84148 - protein, 8 aa, Homo Sapiens
LEAQTSRY

SEQ ID NO: 84149 - protein, 8 aa, Homo Sapiens
LECIARSF

SEQ ID NO: 84150 - protein, 8 aa, Homo Sapiens
LEDLVTEY

SEQ ID NO: 84151 - protein, 8 aa, Homo Sapiens
LEFKAKAF

SEQ ID NO: 84152 - protein, 8 aa, Homo Sapiens
LEFPAQEL

SEQ ID NO: 84153 - protein, 8 aa, Homo Sapiens
LEFRALLF

SEQ ID NO: 84154 - protein, 8 aa, Homo Sapiens
LEGLTVVY

SEQ ID NO: 84155 - protein, 8 aa, Homo Sapiens
LEGLVVQY

SEQ ID NO: 84156 - protein, 8 aa, Homo Sapiens
LEHEGYKY

SEQ ID NO: 84157 - protein, 8 aa, Homo Sapiens
LEHITSEY

SEQ ID NO: 84158 - protein, 8 aa, Homo Sapiens
LEHLITEL

SEQ ID NO: 84159 - protein, 8 aa, Homo Sapiens
LEHLQSKY

SEQ ID NO: 84160 - protein, 8 aa, Homo Sapiens
LEHLVTEL

SEQ ID NO: 84161 - protein, 8 aa, Homo Sapiens
LEHRIATM

SEQ ID NO: 84162 - protein, 8 aa, Homo Sapiens
LEHTAQTY

SEQ ID NO: 84163 - protein, 8 aa, Homo Sapiens
LEHVAPQL

SEQ ID NO: 84164 - protein, 8 aa, Homo Sapiens
LEHVFWVV

SEQ ID NO: 84165 - protein, 8 aa, Homo Sapiens
LEHVVPEL

SEQ ID NO: 84166 - protein, 8 aa, Homo Sapiens
LEHYFHAV

SEQ ID NO: 84167 - protein, 8 aa, Homo Sapiens
LEIERPIL

SEQ ID NO: 84168 - protein, 8 aa, Homo Sapiens
LEIVQAIY

SEQ ID NO: 84169 - protein, 8 aa, Homo Sapiens
LEKDFSSM

SEQ ID NO: 84170 - protein, 8 aa, Homo Sapiens
LEKEGIVF

SEQ ID NO: 84171 - protein, 8 aa, Homo Sapiens
LEKESALF

SEQ ID NO: 84172 - protein, 8 aa, Homo Sapiens
LEKETTMY

SEQ ID NO: 84173 - protein, 8 aa, Homo Sapiens
LEKKVETF

SEQ ID NO: 84174 - protein, 8 aa, Homo Sapiens
LEKLQPAY

SEQ ID NO: 84175 - protein, 8 aa, Homo Sapiens
LEKQVVTF

SEQ ID NO: 84176 - protein, 8 aa, Homo Sapiens
LEKSFYQF

SEQ ID NO: 84177 - protein, 8 aa, Homo Sapiens
LELAKETF

SEQ ID NO: 84178 - protein, 8 aa, Homo Sapiens
LELEVARL

SEQ ID NO: 84179 - protein, 8 aa, Homo Sapiens
LELIMSKY

SEQ ID NO: 84180 - protein, 8 aa, Homo Sapiens
LELRAAVM

SEQ ID NO: 84181 - protein, 8 aa, Homo Sapiens
LEMIKTEF

SEQ ID NO: 84182 - protein, 8 aa, Homo Sapiens
LEMLVERL

SEQ ID NO: 84183 - protein, 8 aa, Homo Sapiens
LENGAHAY

SEQ ID NO: 84184 - protein, 8 aa, Homo Sapiens
LENIRPVL

SEQ ID NO: 84185 - protein, 8 aa, Homo Sapiens
LENLVQEY

SEQ ID NO: 84186 - protein, 8 aa, Homo Sapiens
LENRVAVL

SEQ ID NO: 84187 - protein, 8 aa, Homo Sapiens
LENRVCEY

SEQ ID NO: 84188 - protein, 8 aa, Homo Sapiens
LENVVHHF

SEQ ID NO: 84189 - protein, 8 aa, Homo Sapiens
LENVVRKY

SEQ ID NO: 84190 - protein, 8 aa, Homo Sapiens
LEQETHLF

SEQ ID NO: 84191 - protein, 8 aa, Homo Sapiens
LEQLFQEH

SEQ ID NO: 84192 - protein, 8 aa, Homo Sapiens
LEQLILKY

SEQ ID NO: 84193 - protein, 8 aa, Homo Sapiens
LEQRFESY

SEQ ID NO: 84194 - protein, 8 aa, Homo Sapiens
LEQVFSKY

SEQ ID NO: 84195 - protein, 8 aa, Homo Sapiens
LERAIESL

SEQ ID NO: 84196 - protein, 8 aa, Homo Sapiens
LERAVEAL

SEQ ID NO: 84197 - protein, 8 aa, Homo Sapiens
LEREVAQM

SEQ ID NO: 84198 - protein, 8 aa, Homo Sapiens
LERKVESL

SEQ ID NO: 84199 - protein, 8 aa, Homo Sapiens
LERLTRLF

SEQ ID NO: 84200 - protein, 8 aa, Homo Sapiens
LERQIEKL

SEQ ID NO: 84201 - protein, 8 aa, Homo Sapiens
LERQVEEL

SEQ ID NO: 84202 - protein, 8 aa, Homo Sapiens
LERQVETI

SEQ ID NO: 84203 - protein, 8 aa, Homo Sapiens
LERVIDLL

SEQ ID NO: 84204 - protein, 8 aa, Homo Sapiens
LESFVSTF

SEQ ID NO: 84205 - protein, 8 aa, Homo Sapiens
LESLGYVL

SEQ ID NO: 84206 - protein, 8 aa, Homo Sapiens
LESVFSRF

SEQ ID NO: 84207 - protein, 8 aa, Homo Sapiens
LESYAFNM

SEQ ID NO: 84208 - protein, 8 aa, Homo Sapiens
LETLITKF

SEQ ID NO: 84209 - protein, 8 aa, Homo Sapiens
LETRHLSY

SEQ ID NO: 84210 - protein, 8 aa, Homo Sapiens
LETVAAYY

SEQ ID NO: 84211 - protein, 8 aa, Homo Sapiens
LETVVRVY

SEQ ID NO: 84212 - protein, 8 aa, Homo Sapiens
LEVERQTI

SEQ ID NO: 84213 - protein, 8 aa, Homo Sapiens
LEVEVHQL

SEQ ID NO: 84214 - protein, 8 aa, Homo Sapiens
LEVTKEAF

SEQ ID NO: 84215 - protein, 8 aa, Homo Sapiens
LEWAIKEY

SEQ ID NO: 84216 - protein, 8 aa, Homo Sapiens
LEWEATEL

SEQ ID NO: 84217 - protein, 8 aa, Homo Sapiens
LEYEKTEV

SEQ ID NO: 84218 - protein, 8 aa, Homo Sapiens
LEYEKTRY

SEQ ID NO: 84219 - protein, 8 aa, Homo Sapiens
LEYFVEEY

SEQ ID NO: 84220 - protein, 8 aa, Homo Sapiens
LEYLKPQY

SEQ ID NO: 84221 - protein, 8 aa, Homo Sapiens
LNVGDVVM

SEQ ID NO: 84222 - protein, 8 aa, Homo Sapiens
MDKLVVEY

SEQ ID NO: 84223 - protein, 8 aa, Homo Sapiens
MEAFAQRY

SEQ ID NO: 84224 - protein, 8 aa, Homo Sapiens
MEAFASRY

SEQ ID NO: 84225 - protein, 8 aa, Homo Sapiens
MEAFATRY

SEQ ID NO: 84226 - protein, 8 aa, Homo Sapiens
MEAPTTAY

SEQ ID NO: 84227 - protein, 8 aa, Homo Sapiens
MEAVAVAA

SEQ ID NO: 84228 - protein, 8 aa, Homo Sapiens
MEAYVPGF

SEQ ID NO: 84229 - protein, 8 aa, Homo Sapiens
MEEFVKQY

SEQ ID NO: 84230 - protein, 8 aa, Homo Sapiens
MEFAKNMY

SEQ ID NO: 84231 - protein, 8 aa, Homo Sapiens
MEGAVQAY

SEQ ID NO: 84232 - protein, 8 aa, Homo Sapiens
MEHEVACL

SEQ ID NO: 84233 - protein, 8 aa, Homo Sapiens
MEHGVPVY

SEQ ID NO: 84234 - protein, 8 aa, Homo Sapiens
MEHLIHVL

SEQ ID NO: 84235 - protein, 8 aa, Homo Sapiens
MEHPFFTL

SEQ ID NO: 84236 - protein, 8 aa, Homo Sapiens
MEIKVKDY

SEQ ID NO: 84237 - protein, 8 aa, Homo Sapiens
MEKAAEVY

SEQ ID NO: 84238 - protein, 8 aa, Homo Sapiens
MEKFLVEY

SEQ ID NO: 84239 - protein, 8 aa, Homo Sapiens
MEKIQPAL

SEQ ID NO: 84240 - protein, 8 aa, Homo Sapiens
MELYTHVY

SEQ ID NO: 84241 - protein, 8 aa, Homo Sapiens
MENRVQSF

SEQ ID NO: 84242 - protein, 8 aa, Homo Sapiens
MENSRQVL

SEQ ID NO: 84243 - protein, 8 aa, Homo Sapiens
MEQVIFKY

SEQ ID NO: 84244 - protein, 8 aa, Homo Sapiens
MEQVVFKY

SEQ ID NO: 84245 - protein, 8 aa, Homo Sapiens
MERAAESY

SEQ ID NO: 84246 - protein, 8 aa, Homo Sapiens
MERQGDVY

SEQ ID NO: 84247 - protein, 8 aa, Homo Sapiens
MERTVQSF

SEQ ID NO: 84248 - protein, 8 aa, Homo Sapiens
MESLGYVL

SEQ ID NO: 84249 - protein, 8 aa, Homo Sapiens
MESRVKTF

SEQ ID NO: 84250 - protein, 8 aa, Homo Sapiens
MESVMVKY

SEQ ID NO: 84251 - protein, 8 aa, Homo Sapiens
METKIKNY

SEQ ID NO: 84252 - protein, 8 aa, Homo Sapiens
MEVELPAA

SEQ ID NO: 84253 - protein, 8 aa, Homo Sapiens
MEVHATVY

SEQ ID NO: 84254 - protein, 8 aa, Homo Sapiens
MEVKRESY

SEQ ID NO: 84255 - protein, 8 aa, Homo Sapiens
MEVVVITH

SEQ ID NO: 84256 - protein, 8 aa, Homo Sapiens
MEWLVETL

SEQ ID NO: 84257 - protein, 8 aa, Homo Sapiens
MPEQLFKY

SEQ ID NO: 84258 - protein, 8 aa, Homo Sapiens
MQRLIEKY

SEQ ID NO: 84259 - protein, 8 aa, Homo Sapiens
NDVTAIIF

SEQ ID NO: 84260 - protein, 8 aa, Homo Sapiens
NEAIMHQY

SEQ ID NO: 84261 - protein, 8 aa, Homo Sapiens
NEALAALL

SEQ ID NO: 84262 - protein, 8 aa, Homo Sapiens
NEALIALL

SEQ ID NO: 84263 - protein, 8 aa, Homo Sapiens
NEALIEKL

SEQ ID NO: 84264 - protein, 8 aa, Homo Sapiens
NEALKYHF

SEQ ID NO: 84265 - protein, 8 aa, Homo Sapiens
NEAQRVKL

SEQ ID NO: 84266 - protein, 8 aa, Homo Sapiens
NEAVAPEF

SEQ ID NO: 84267 - protein, 8 aa, Homo Sapiens
NEAVFIAH

SEQ ID NO: 84268 - protein, 8 aa, Homo Sapiens
NEDFSFHY

SEQ ID NO: 84269 - protein, 8 aa, Homo Sapiens
NEDLAKKY

SEQ ID NO: 84270 - protein, 8 aa, Homo Sapiens
NEFAQPAF

SEQ ID NO: 84271 - protein, 8 aa, Homo Sapiens
NEFFFSHF

SEQ ID NO: 84272 - protein, 8 aa, Homo Sapiens
NEFILYAV

SEQ ID NO: 84273 - protein, 8 aa, Homo Sapiens
NEFLAQTL

SEQ ID NO: 84274 - protein, 8 aa, Homo Sapiens
NEFLRNVF

SEQ ID NO: 84275 - protein, 8 aa, Homo Sapiens
NEFLTREL

SEQ ID NO: 84276 - protein, 8 aa, Homo Sapiens
NEFTTHIL

SEQ ID NO: 84277 - protein, 8 aa, Homo Sapiens
NEFTTHVM

SEQ ID NO: 84278 - protein, 8 aa, Homo Sapiens
NEFTVLEL

SEQ ID NO: 84279 - protein, 8 aa, Homo Sapiens
NEFVVKFY

SEQ ID NO: 84280 - protein, 8 aa, Homo Sapiens
NEGLVKEY

SEQ ID NO: 84281 - protein, 8 aa, Homo Sapiens
NEGTVFTF

SEQ ID NO: 84282 - protein, 8 aa, Homo Sapiens
NEGVSYEF

SEQ ID NO: 84283 - protein, 8 aa, Homo Sapiens
NEHFSNVF

SEQ ID NO: 84284 - protein, 8 aa, Homo Sapiens
NEHNVALF

SEQ ID NO: 84285 - protein, 8 aa, Homo Sapiens
NEHWMPVY

SEQ ID NO: 84286 - protein, 8 aa, Homo Sapiens
NEIASVAY

SEQ ID NO: 84287 - protein, 8 aa, Homo Sapiens
NEIIHARF

SEQ ID NO: 84288 - protein, 8 aa, Homo Sapiens
NEIKKWQL

SEQ ID NO: 84289 - protein, 8 aa, Homo Sapiens
NEIKSYCY

SEQ ID NO: 84290 - protein, 8 aa, Homo Sapiens
NEIKVAKA

SEQ ID NO: 84291 - protein, 8 aa, Homo Sapiens
NEILFEEY

SEQ ID NO: 84292 - protein, 8 aa, Homo Sapiens
NEILFSEF

SEQ ID NO: 84293 - protein, 8 aa, Homo Sapiens
NEILQAAY

SEQ ID NO: 84294 - protein, 8 aa, Homo Sapiens
NEILTVHY

SEQ ID NO: 84295 - protein, 8 aa, Homo Sapiens
NEISRTEY

SEQ ID NO: 84296 - protein, 8 aa, Homo Sapiens
NEITGHTY

SEQ ID NO: 84297 - protein, 8 aa, Homo Sapiens
NEIVVTDF

SEQ ID NO: 84298 - protein, 8 aa, Homo Sapiens
NEIYTVKF

SEQ ID NO: 84299 - protein, 8 aa, Homo Sapiens
NEKEIALM

SEQ ID NO: 84300 - protein, 8 aa, Homo Sapiens
NEKIVETY

SEQ ID NO: 84301 - protein, 8 aa, Homo Sapiens
NEKIVVLL

SEQ ID NO: 84302 - protein, 8 aa, Homo Sapiens
NEKLLTVF

SEQ ID NO: 84303 - protein, 8 aa, Homo Sapiens
NEKLQQIF

SEQ ID NO: 84304 - protein, 8 aa, Homo Sapiens
NEKVAQLY

SEQ ID NO: 84305 - protein, 8 aa, Homo Sapiens
NELELTKM

SEQ ID NO: 84306 - protein, 8 aa, Homo Sapiens
NELESYAY

SEQ ID NO: 84307 - protein, 8 aa, Homo Sapiens
NELILKTL

SEQ ID NO: 84308 - protein, 8 aa, Homo Sapiens
NELITNAL

SEQ ID NO: 84309 - protein, 8 aa, Homo Sapiens
NELKFHYM

SEQ ID NO: 84310 - protein, 8 aa, Homo Sapiens
NELKRSFF

SEQ ID NO: 84311 - protein, 8 aa, Homo Sapiens
NELLIASF

SEQ ID NO: 84312 - protein, 8 aa, Homo Sapiens
NELLKKTL

SEQ ID NO: 84313 - protein, 8 aa, Homo Sapiens
NELLKSKF

SEQ ID NO: 84314 - protein, 8 aa, Homo Sapiens
NELLRQQI

SEQ ID NO: 84315 - protein, 8 aa, Homo Sapiens
NELLVKAL

SEQ ID NO: 84316 - protein, 8 aa, Homo Sapiens
NELPTVAF

SEQ ID NO: 84317 - protein, 8 aa, Homo Sapiens
NELPVSKY

SEQ ID NO: 84318 - protein, 8 aa, Homo Sapiens
NELSAWKF

SEQ ID NO: 84319 - protein, 8 aa, Homo Sapiens
NELVVRAY

SEQ ID NO: 84320 - protein, 8 aa, Homo Sapiens
NEMKLNVH

SEQ ID NO: 84321 - protein, 8 aa, Homo Sapiens
NEMPKAEY

SEQ ID NO: 84322 - protein, 8 aa, Homo Sapiens
NEMTTIHY

SEQ ID NO: 84323 - protein, 8 aa, Homo Sapiens
NENARQQL

SEQ ID NO: 84324 - protein, 8 aa, Homo Sapiens
NENLAANF

SEQ ID NO: 84325 - protein, 8 aa, Homo Sapiens
NENLSAKF

SEQ ID NO: 84326 - protein, 8 aa, Homo Sapiens
NENLVERF

SEQ ID NO: 84327 - protein, 8 aa, Homo Sapiens
NENMVAKV

SEQ ID NO: 84328 - protein, 8 aa, Homo Sapiens
NENYQPKY

SEQ ID NO: 84329 - protein, 8 aa, Homo Sapiens
NEPEVVSV

SEQ ID NO: 84330 - protein, 8 aa, Homo Sapiens
NEQLKTSF

SEQ ID NO: 84331 - protein, 8 aa, Homo Sapiens
NEQVMYRF

SEQ ID NO: 84332 - protein, 8 aa, Homo Sapiens
NEQVVFSH

SEQ ID NO: 84333 - protein, 8 aa, Homo Sapiens
NERFVNLM

SEQ ID NO: 84334 - protein, 8 aa, Homo Sapiens
NERLQEEL

SEQ ID NO: 84335 - protein, 8 aa, Homo Sapiens
NERLTESL

SEQ ID NO: 84336 - protein, 8 aa, Homo Sapiens
NERMLESY

SEQ ID NO: 84337 - protein, 8 aa, Homo Sapiens
NERPVTLY

SEQ ID NO: 84338 - protein, 8 aa, Homo Sapiens
NERSIPSM

SEQ ID NO: 84339 - protein, 8 aa, Homo Sapiens
NERVQQAV

SEQ ID NO: 84340 - protein, 8 aa, Homo Sapiens
NERVVQHF

SEQ ID NO: 84341 - protein, 8 aa, Homo Sapiens
NESFGFTA

SEQ ID NO: 84342 - protein, 8 aa, Homo Sapiens
NESPAVVL

SEQ ID NO: 84343 - protein, 8 aa, Homo Sapiens
NESTRSVL

SEQ ID NO: 84344 - protein, 8 aa, Homo Sapiens
NESTSYKF

SEQ ID NO: 84345 - protein, 8 aa, Homo Sapiens
NETGAFFF

SEQ ID NO: 84346 - protein, 8 aa, Homo Sapiens
NETRAQLL

SEQ ID NO: 84347 - protein, 8 aa, Homo Sapiens
NETTAVAL

SEQ ID NO: 84348 - protein, 8 aa, Homo Sapiens
NETVFTVH

SEQ ID NO: 84349 - protein, 8 aa, Homo Sapiens
NETVLTVW

SEQ ID NO: 84350 - protein, 8 aa, Homo Sapiens
NEVDFQEY

SEQ ID NO: 84351 - protein, 8 aa, Homo Sapiens
NEVDRMVL

SEQ ID NO: 84352 - protein, 8 aa, Homo Sapiens
NEVEIEKL

SEQ ID NO: 84353 - protein, 8 aa, Homo Sapiens
NEVELLVM

SEQ ID NO: 84354 - protein, 8 aa, Homo Sapiens
NEVGANAV

SEQ ID NO: 84355 - protein, 8 aa, Homo Sapiens
NEVHLVVM

SEQ ID NO: 84356 - protein, 8 aa, Homo Sapiens
NEVIATVL

SEQ ID NO: 84357 - protein, 8 aa, Homo Sapiens
NEVISKLY

SEQ ID NO: 84358 - protein, 8 aa, Homo Sapiens
NEVKIYSL

SEQ ID NO: 84359 - protein, 8 aa, Homo Sapiens
NEVKLWTF

SEQ ID NO: 84360 - protein, 8 aa, Homo Sapiens
NEVLASKY

SEQ ID NO: 84361 - protein, 8 aa, Homo Sapiens
NEVLTKTY

SEQ ID NO: 84362 - protein, 8 aa, Homo Sapiens
NEVMVEHF

SEQ ID NO: 84363 - protein, 8 aa, Homo Sapiens
NEVQGFLF

SEQ ID NO: 84364 - protein, 8 aa, Homo Sapiens
NEVQRTML

SEQ ID NO: 84365 - protein, 8 aa, Homo Sapiens
NEVQVADF

SEQ ID NO: 84366 - protein, 8 aa, Homo Sapiens
NEVRNAVF

SEQ ID NO: 84367 - protein, 8 aa, Homo Sapiens
NEVSSATF

SEQ ID NO: 84368 - protein, 8 aa, Homo Sapiens
NEVVGLIF

SEQ ID NO: 84369 - protein, 8 aa, Homo Sapiens
NEVVRSDL

SEQ ID NO: 84370 - protein, 8 aa, Homo Sapiens
NEVVTQQY

SEQ ID NO: 84371 - protein, 8 aa, Homo Sapiens
NEVVTREY

SEQ ID NO: 84372 - protein, 8 aa, Homo Sapiens
NEWFVSAF

SEQ ID NO: 84373 - protein, 8 aa, Homo Sapiens
NEYKGWVL

SEQ ID NO: 84374 - protein, 8 aa, Homo Sapiens
NEYLNPEL

SEQ ID NO: 84375 - protein, 8 aa, Homo Sapiens
NEYRSVVY

SEQ ID NO: 84376 - protein, 8 aa, Homo Sapiens
NEYRVPEL

SEQ ID NO: 84377 - protein, 8 aa, Homo Sapiens
QDVATVLL

SEQ ID NO: 84378 - protein, 8 aa, Homo Sapiens
QEALAHAL

SEQ ID NO: 84379 - protein, 8 aa, Homo Sapiens
QEAPSNVY

SEQ ID NO: 84380 - protein, 8 aa, Homo Sapiens
QEFIRVGY

SEQ ID NO: 84381 - protein, 8 aa, Homo Sapiens
QEFPAHSL

SEQ ID NO: 84382 - protein, 8 aa, Homo Sapiens
QEGLASKF

SEQ ID NO: 84383 - protein, 8 aa, Homo Sapiens
QEHLIEKY

SEQ ID NO: 84384 - protein, 8 aa, Homo Sapiens
QEHQFEAL

SEQ ID NO: 84385 - protein, 8 aa, Homo Sapiens
QEIHRHAL

SEQ ID NO: 84386 - protein, 8 aa, Homo Sapiens
QELIIPCL

SEQ ID NO: 84387 - protein, 8 aa, Homo Sapiens
QELLAEHY

SEQ ID NO: 84388 - protein, 8 aa, Homo Sapiens
QELQVETY

SEQ ID NO: 84389 - protein, 8 aa, Homo Sapiens
QELRVNCY

SEQ ID NO: 84390 - protein, 8 aa, Homo Sapiens
QEMEFLQF

SEQ ID NO: 84391 - protein, 8 aa, Homo Sapiens
QEPVAHTV

SEQ ID NO: 84392 - protein, 8 aa, Homo Sapiens
QETEVELY

SEQ ID NO: 84393 - protein, 8 aa, Homo Sapiens
QEVDRAVF

SEQ ID NO: 84394 - protein, 8 aa, Homo Sapiens
QEVIITKF

SEQ ID NO: 84395 - protein, 8 aa, Homo Sapiens
QEVNFQEY

SEQ ID NO: 84396 - protein, 8 aa, Homo Sapiens
QEWEVKAL

SEQ ID NO: 84397 - protein, 8 aa, Homo Sapiens
QEYPAIRY

SEQ ID NO: 84398 - protein, 8 aa, Homo Sapiens
REFAFIDM

SEQ ID NO: 84399 - protein, 8 aa, Homo Sapiens
REILANVF

SEQ ID NO: 84400 - protein, 8 aa, Homo Sapiens
RELERYVL

SEQ ID NO: 84401 - protein, 8 aa, Homo Sapiens
REQIVAQY

SEQ ID NO: 84402 - protein, 8 aa, Homo Sapiens
REWEFQKY

SEQ ID NO: 84403 - protein, 8 aa, Homo Sapiens
SEAASYEF

SEQ ID NO: 84404 - protein, 8 aa, Homo Sapiens
SEAFATVV

SEQ ID NO: 84405 - protein, 8 aa, Homo Sapiens
SEALFKSF

SEQ ID NO: 84406 - protein, 8 aa, Homo Sapiens
SEAQVQKF

SEQ ID NO: 84407 - protein, 8 aa, Homo Sapiens
SEASGFCY

SEQ ID NO: 84408 - protein, 8 aa, Homo Sapiens
SEAVIAQF

SEQ ID NO: 84409 - protein, 8 aa, Homo Sapiens
SEAVLPTM

SEQ ID NO: 84410 - protein, 8 aa, Homo Sapiens
SECEFQEY

SEQ ID NO: 84411 - protein, 8 aa, Homo Sapiens
SECKVAKF

SEQ ID NO: 84412 - protein, 8 aa, Homo Sapiens
SECRLLAY

SEQ ID NO: 84413 - protein, 8 aa, Homo Sapiens
SEEFAQVY

SEQ ID NO: 84414 - protein, 8 aa, Homo Sapiens
SEELVQKY

SEQ ID NO: 84415 - protein, 8 aa, Homo Sapiens
SEERVWEY

SEQ ID NO: 84416 - protein, 8 aa, Homo Sapiens
SEFEFTDF

SEQ ID NO: 84417 - protein, 8 aa, Homo Sapiens
SEFEMKVY

SEQ ID NO: 84418 - protein, 8 aa, Homo Sapiens
SEFLINTY

SEQ ID NO: 84419 - protein, 8 aa, Homo Sapiens
SEFNRYLF

SEQ ID NO: 84420 - protein, 8 aa, Homo Sapiens
SEFVLPRF

SEQ ID NO: 84421 - protein, 8 aa, Homo Sapiens
SEGGANVF

SEQ ID NO: 84422 - protein, 8 aa, Homo Sapiens
SEHVVSEF

SEQ ID NO: 84423 - protein, 8 aa, Homo Sapiens
SEIERQHF

SEQ ID NO: 84424 - protein, 8 aa, Homo Sapiens
SEIEVAQA

SEQ ID NO: 84425 - protein, 8 aa, Homo Sapiens
SEIKHEAF

SEQ ID NO: 84426 - protein, 8 aa, Homo Sapiens
SEILLKEF

SEQ ID NO: 84427 - protein, 8 aa, Homo Sapiens
SEIQRLTY

SEQ ID NO: 84428 - protein, 8 aa, Homo Sapiens
SEIYTNTY

SEQ ID NO: 84429 - protein, 8 aa, Homo Sapiens
SEKEFKAY

SEQ ID NO: 84430 - protein, 8 aa, Homo Sapiens
SEKVSHVL

SEQ ID NO: 84431 - protein, 8 aa, Homo Sapiens
SELFMSSF

SEQ ID NO: 84432 - protein, 8 aa, Homo Sapiens
SELIVYTY

SEQ ID NO: 84433 - protein, 8 aa, Homo Sapiens
SELLIHVF

SEQ ID NO: 84434 - protein, 8 aa, Homo Sapiens
SELLKCEF

SEQ ID NO: 84435 - protein, 8 aa, Homo Sapiens
SELLVEQY

SEQ ID NO: 84436 - protein, 8 aa, Homo Sapiens
SELQAFAH

SEQ ID NO: 84437 - protein, 8 aa, Homo Sapiens
SELTRPEF

SEQ ID NO: 84438 - protein, 8 aa, Homo Sapiens
SEMASNKF

SEQ ID NO: 84439 - protein, 8 aa, Homo Sapiens
SEMELKAF

SEQ ID NO: 84440 - protein, 8 aa, Homo Sapiens
SEMLAFTL

SEQ ID NO: 84441 - protein, 8 aa, Homo Sapiens
SENLIYTY

SEQ ID NO: 84442 - protein, 8 aa, Homo Sapiens
SENPTSVF

SEQ ID NO: 84443 - protein, 8 aa, Homo Sapiens
SEPVAQVF

SEQ ID NO: 84444 - protein, 8 aa, Homo Sapiens
SERIVHDY

SEQ ID NO: 84445 - protein, 8 aa, Homo Sapiens
SERLIHTY

SEQ ID NO: 84446 - protein, 8 aa, Homo Sapiens
SERTLECY

SEQ ID NO: 84447 - protein, 8 aa, Homo Sapiens
SERVVDLL

SEQ ID NO: 84448 - protein, 8 aa, Homo Sapiens
SESIRALF

SEQ ID NO: 84449 - protein, 8 aa, Homo Sapiens
SETDFKVM

SEQ ID NO: 84450 - protein, 8 aa, Homo Sapiens
SETFLHIY

SEQ ID NO: 84451 - protein, 8 aa, Homo Sapiens
SETLLRVM

SEQ ID NO: 84452 - protein, 8 aa, Homo Sapiens
SETQFSHL

SEQ ID NO: 84453 - protein, 8 aa, Homo Sapiens
SETVQPIM

SEQ ID NO: 84454 - protein, 8 aa, Homo Sapiens
SETYKYLY

SEQ ID NO: 84455 - protein, 8 aa, Homo Sapiens
SEVAAYEF

SEQ ID NO: 84456 - protein, 8 aa, Homo Sapiens
SEVEKPLM

SEQ ID NO: 84457 - protein, 8 aa, Homo Sapiens
SEVESTEY

SEQ ID NO: 84458 - protein, 8 aa, Homo Sapiens
SEVEVFEY

SEQ ID NO: 84459 - protein, 8 aa, Homo Sapiens
SEVLAVVM

SEQ ID NO: 84460 - protein, 8 aa, Homo Sapiens
SEVLLATM

SEQ ID NO: 84461 - protein, 8 aa, Homo Sapiens
SEVLSWQF

SEQ ID NO: 84462 - protein, 8 aa, Homo Sapiens
SEVPTSVF

SEQ ID NO: 84463 - protein, 8 aa, Homo Sapiens
SEVQRTML

SEQ ID NO: 84464 - protein, 8 aa, Homo Sapiens
SEVRVYNY

SEQ ID NO: 84465 - protein, 8 aa, Homo Sapiens
SEWELPKY

SEQ ID NO: 84466 - protein, 8 aa, Homo Sapiens
SEYISNTF

SEQ ID NO: 84467 - protein, 8 aa, Homo Sapiens
TDFISHLF

SEQ ID NO: 84468 - protein, 8 aa, Homo Sapiens
TEAIKACF

SEQ ID NO: 84469 - protein, 8 aa, Homo Sapiens
TEALTQAF

SEQ ID NO: 84470 - protein, 8 aa, Homo Sapiens
TEAPPIIF

SEQ ID NO: 84471 - protein, 8 aa, Homo Sapiens
TEAVLIAH

SEQ ID NO: 84472 - protein, 8 aa, Homo Sapiens
TECMVEQY

SEQ ID NO: 84473 - protein, 8 aa, Homo Sapiens
TECSAVQF

SEQ ID NO: 84474 - protein, 8 aa, Homo Sapiens
TEELAYLK

SEQ ID NO: 84475 - protein, 8 aa, Homo Sapiens
TEELVHMF

SEQ ID NO: 84476 - protein, 8 aa, Homo Sapiens
TEEVAREY

SEQ ID NO: 84477 - protein, 8 aa, Homo Sapiens
TEFESFSF

SEQ ID NO: 84478 - protein, 8 aa, Homo Sapiens
TEFFFHAM

SEQ ID NO: 84479 - protein, 8 aa, Homo Sapiens
TEFFFHTM

SEQ ID NO: 84480 - protein, 8 aa, Homo Sapiens
TEFGGSIY

SEQ ID NO: 84481 - protein, 8 aa, Homo Sapiens
TEFGHPAA

SEQ ID NO: 84482 - protein, 8 aa, Homo Sapiens
TEFIFTTI

SEQ ID NO: 84483 - protein, 8 aa, Homo Sapiens
TEFIMNEY

SEQ ID NO: 84484 - protein, 8 aa, Homo Sapiens
TEFKATMY

SEQ ID NO: 84485 - protein, 8 aa, Homo Sapiens
TEFLFHTA

SEQ ID NO: 84486 - protein, 8 aa, Homo Sapiens
TEFLKKEF

SEQ ID NO: 84487 - protein, 8 aa, Homo Sapiens
TEFPAKAV

SEQ ID NO: 84488 - protein, 8 aa, Homo Sapiens
TEFPGVVV

SEQ ID NO: 84489 - protein, 8 aa, Homo Sapiens
TEFPNFKY

SEQ ID NO: 84490 - protein, 8 aa, Homo Sapiens
TEFQHPCF

SEQ ID NO: 84491 - protein, 8 aa, Homo Sapiens
TEFSFTDY

SEQ ID NO: 84492 - protein, 8 aa, Homo Sapiens
TEIEKLQM

SEQ ID NO: 84493 - protein, 8 aa, Homo Sapiens
TEIKGSVY

SEQ ID NO: 84494 - protein, 8 aa, Homo Sapiens
TEIKKTEV

SEQ ID NO: 84495 - protein, 8 aa, Homo Sapiens
TEILLRKL

SEQ ID NO: 84496 - protein, 8 aa, Homo Sapiens
TEILRSML

SEQ ID NO: 84497 - protein, 8 aa, Homo Sapiens
TEINKKIY

SEQ ID NO: 84498 - protein, 8 aa, Homo Sapiens
TEKMIEKY

SEQ ID NO: 84499 - protein, 8 aa, Homo Sapiens
TEKPAVCY

SEQ ID NO: 84500 - protein, 8 aa, Homo Sapiens
TELEAIMY

SEQ ID NO: 84501 - protein, 8 aa, Homo Sapiens
TELHVISY

SEQ ID NO: 84502 - protein, 8 aa, Homo Sapiens
TELLAERF

SEQ ID NO: 84503 - protein, 8 aa, Homo Sapiens
TELLAQVY

SEQ ID NO: 84504 - protein, 8 aa, Homo Sapiens
TELLRDTF

SEQ ID NO: 84505 - protein, 8 aa, Homo Sapiens
TELLRHDM

SEQ ID NO: 84506 - protein, 8 aa, Homo Sapiens
TELLVKAY

SEQ ID NO: 84507 - protein, 8 aa, Homo Sapiens
TELMFEHY

SEQ ID NO: 84508 - protein, 8 aa, Homo Sapiens
TEMEVHEL

SEQ ID NO: 84509 - protein, 8 aa, Homo Sapiens
TENIRLVF

SEQ ID NO: 84510 - protein, 8 aa, Homo Sapiens
TENIRRVF

SEQ ID NO: 84511 - protein, 8 aa, Homo Sapiens
TENKISPY

SEQ ID NO: 84512 - protein, 8 aa, Homo Sapiens
TENKRWAL

SEQ ID NO: 84513 - protein, 8 aa, Homo Sapiens
TENLVVEH

SEQ ID NO: 84514 - protein, 8 aa, Homo Sapiens
TEQFTHAF

SEQ ID NO: 84515 - protein, 8 aa, Homo Sapiens
TERIVTTY

SEQ ID NO: 84516 - protein, 8 aa, Homo Sapiens
TERLAQEL

SEQ ID NO: 84517 - protein, 8 aa, Homo Sapiens
TERLIEIA

SEQ ID NO: 84518 - protein, 8 aa, Homo Sapiens
TERLIQEL

SEQ ID NO: 84519 - protein, 8 aa, Homo Sapiens
TESEFTEF

SEQ ID NO: 84520 - protein, 8 aa, Homo Sapiens
TESEVTAF

SEQ ID NO: 84521 - protein, 8 aa, Homo Sapiens
TESKVTEF

SEQ ID NO: 84522 - protein, 8 aa, Homo Sapiens
TESSVAVY

SEQ ID NO: 84523 - protein, 8 aa, Homo Sapiens
TESVRYVY

SEQ ID NO: 84524 - protein, 8 aa, Homo Sapiens
TETKTITY

SEQ ID NO: 84525 - protein, 8 aa, Homo Sapiens
TETVFEAF

SEQ ID NO: 84526 - protein, 8 aa, Homo Sapiens
TETVLCAL

SEQ ID NO: 84527 - protein, 8 aa, Homo Sapiens
TETVRSIL

SEQ ID NO: 84528 - protein, 8 aa, Homo Sapiens
TETVVCAL

SEQ ID NO: 84529 - protein, 8 aa, Homo Sapiens
TETVVTEY

SEQ ID NO: 84530 - protein, 8 aa, Homo Sapiens
TEVEVNKF

SEQ ID NO: 84531 - protein, 8 aa, Homo Sapiens
TEVKSVEM

SEQ ID NO: 84532 - protein, 8 aa, Homo Sapiens
TEVKVEPM

SEQ ID NO: 84533 - protein, 8 aa, Homo Sapiens
TEVQAHPY

SEQ ID NO: 84534 - protein, 8 aa, Homo Sapiens
TEVVKNTL

SEQ ID NO: 84535 - protein, 8 aa, Homo Sapiens
TEWQHKAF

SEQ ID NO: 84536 - protein, 8 aa, Homo Sapiens
TEYGLSVY

SEQ ID NO: 84537 - protein, 8 aa, Homo Sapiens
TEYISTEF

SEQ ID NO: 84538 - protein, 8 aa, Homo Sapiens
TEYVHAYF

SEQ ID NO: 84539 - protein, 8 aa, Homo Sapiens
TLEQIVTY

SEQ ID NO: 84540 - protein, 8 aa, Homo Sapiens
VEAEAMNY

SEQ ID NO: 84541 - protein, 8 aa, Homo Sapiens
VEAFAATF

SEQ ID NO: 84542 - protein, 8 aa, Homo Sapiens
VEAIFSKY

SEQ ID NO: 84543 - protein, 8 aa, Homo Sapiens
VEAIRTNY

SEQ ID NO: 84544 - protein, 8 aa, Homo Sapiens
VEAKVVCF

SEQ ID NO: 84545 - protein, 8 aa, Homo Sapiens
VEAQATHF

SEQ ID NO: 84546 - protein, 8 aa, Homo Sapiens
VEAVAHIL

SEQ ID NO: 84547 - protein, 8 aa, Homo Sapiens
VEAVVRSF

SEQ ID NO: 84548 - protein, 8 aa, Homo Sapiens
VEEYVYEF

SEQ ID NO: 84549 - protein, 8 aa, Homo Sapiens
VEFLIVHY

SEQ ID NO: 84550 - protein, 8 aa, Homo Sapiens
VEFLRPSF

SEQ ID NO: 84551 - protein, 8 aa, Homo Sapiens
VEGHSNVY

SEQ ID NO: 84552 - protein, 8 aa, Homo Sapiens
VEGPNFEF

SEQ ID NO: 84553 - protein, 8 aa, Homo Sapiens
VEHDAFIF

SEQ ID NO: 84554 - protein, 8 aa, Homo Sapiens
VEHKVETF

SEQ ID NO: 84555 - protein, 8 aa, Homo Sapiens
VEHLVQKM

SEQ ID NO: 84556 - protein, 8 aa, Homo Sapiens
VEHQAISF

SEQ ID NO: 84557 - protein, 8 aa, Homo Sapiens
VEHSGRVF

SEQ ID NO: 84558 - protein, 8 aa, Homo Sapiens
VEIAAVTH

SEQ ID NO: 84559 - protein, 8 aa, Homo Sapiens
VEIAKQSV

SEQ ID NO: 84560 - protein, 8 aa, Homo Sapiens
VEIAREAL

SEQ ID NO: 84561 - protein, 8 aa, Homo Sapiens
VEIEREVL

SEQ ID NO: 84562 - protein, 8 aa, Homo Sapiens
VEIERTAF

SEQ ID NO: 84563 - protein, 8 aa, Homo Sapiens
VEIILHVV

SEQ ID NO: 84564 - protein, 8 aa, Homo Sapiens
VEIITKEF

SEQ ID NO: 84565 - protein, 8 aa, Homo Sapiens
VEIVRQSL

SEQ ID NO: 84566 - protein, 8 aa, Homo Sapiens
VEKDAPLF

SEQ ID NO: 84567 - protein, 8 aa, Homo Sapiens
VEKGVPLY

SEQ ID NO: 84568 - protein, 8 aa, Homo Sapiens
VEKIHYPH

SEQ ID NO: 84569 - protein, 8 aa, Homo Sapiens
VEKKIDKY

SEQ ID NO: 84570 - protein, 8 aa, Homo Sapiens
VEKKLAEY

SEQ ID NO: 84571 - protein, 8 aa, Homo Sapiens
VEKLRFTY

SEQ ID NO: 84572 - protein, 8 aa, Homo Sapiens
VEKTIQKY

SEQ ID NO: 84573 - protein, 8 aa, Homo Sapiens
VEKVTNEY

SEQ ID NO: 84574 - protein, 8 aa, Homo Sapiens
VELLARKF

SEQ ID NO: 84575 - protein, 8 aa, Homo Sapiens
VELTSSLF

SEQ ID NO: 84576 - protein, 8 aa, Homo Sapiens
VEMEIVSM

SEQ ID NO: 84577 - protein, 8 aa, Homo Sapiens
VEMLVAGH

SEQ ID NO: 84578 - protein, 8 aa, Homo Sapiens
VEMTVSKF

SEQ ID NO: 84579 - protein, 8 aa, Homo Sapiens
VENQFREF

SEQ ID NO: 84580 - protein, 8 aa, Homo Sapiens
VEPKVTVY

SEQ ID NO: 84581 - protein, 8 aa, Homo Sapiens
VEQHVELY

SEQ ID NO: 84582 - protein, 8 aa, Homo Sapiens
VEQILAEF

SEQ ID NO: 84583 - protein, 8 aa, Homo Sapiens
VEQILPTL

SEQ ID NO: 84584 - protein, 8 aa, Homo Sapiens
VEQIRNIL

SEQ ID NO: 84585 - protein, 8 aa, Homo Sapiens
VEQLAVRF

SEQ ID NO: 84586 - protein, 8 aa, Homo Sapiens
VEQLFQVM

SEQ ID NO: 84587 - protein, 8 aa, Homo Sapiens
VERLIEAF

SEQ ID NO: 84588 - protein, 8 aa, Homo Sapiens
VERVITIM

SEQ ID NO: 84589 - protein, 8 aa, Homo Sapiens
VERYLEEF

SEQ ID NO: 84590 - protein, 8 aa, Homo Sapiens
VESIKTVY

SEQ ID NO: 84591 - protein, 8 aa, Homo Sapiens
VETESVRY

SEQ ID NO: 84592 - protein, 8 aa, Homo Sapiens
VETFAFQA

SEQ ID NO: 84593 - protein, 8 aa, Homo Sapiens
VETIFSKY

SEQ ID NO: 84594 - protein, 8 aa, Homo Sapiens
VETYFHEF

SEQ ID NO: 84595 - protein, 8 aa, Homo Sapiens
VEVGRVAY

SEQ ID NO: 84596 - protein, 8 aa, Homo Sapiens
VEVIKPLV

SEQ ID NO: 84597 - protein, 8 aa, Homo Sapiens
VEVKRPKY

SEQ ID NO: 84598 - protein, 8 aa, Homo Sapiens
VEVYIPQF

SEQ ID NO: 84599 - protein, 8 aa, Homo Sapiens
WEVVTHGY

SEQ ID NO: 84600 - protein, 8 aa, Homo Sapiens
YDRLVDEY

SEQ ID NO: 84601 - protein, 8 aa, Homo Sapiens
YEAEKIEY

SEQ ID NO: 84602 - protein, 8 aa, Homo Sapiens
YEAIADHY

SEQ ID NO: 84603 - protein, 8 aa, Homo Sapiens
YEAKRNEF

SEQ ID NO: 84604 - protein, 8 aa, Homo Sapiens
YEALTPVH

SEQ ID NO: 84605 - protein, 8 aa, Homo Sapiens
YEAPAYHL

SEQ ID NO: 84606 - protein, 8 aa, Homo Sapiens
YEAPRCVY

SEQ ID NO: 84607 - protein, 8 aa, Homo Sapiens
YEAVREVL

SEQ ID NO: 84608 - protein, 8 aa, Homo Sapiens
YEAYVQAL

SEQ ID NO: 84609 - protein, 8 aa, Homo Sapiens
YEFEQQRY

SEQ ID NO: 84610 - protein, 8 aa, Homo Sapiens
YEFIVRHF

SEQ ID NO: 84611 - protein, 8 aa, Homo Sapiens
YEGHVNEY

SEQ ID NO: 84612 - protein, 8 aa, Homo Sapiens
YEIKMTKM

SEQ ID NO: 84613 - protein, 8 aa, Homo Sapiens
YEINAHKY

SEQ ID NO: 84614 - protein, 8 aa, Homo Sapiens
YEKDIAAY

SEQ ID NO: 84615 - protein, 8 aa, Homo Sapiens
YEKKIFEY

SEQ ID NO: 84616 - protein, 8 aa, Homo Sapiens
YEKTVEVL

SEQ ID NO: 84617 - protein, 8 aa, Homo Sapiens
YELGRPAA

SEQ ID NO: 84618 - protein, 8 aa, Homo Sapiens
YELHVFTF

SEQ ID NO: 84619 - protein, 8 aa, Homo Sapiens
YELIITRY

SEQ ID NO: 84620 - protein, 8 aa, Homo Sapiens
YEMILHEF

SEQ ID NO: 84621 - protein, 8 aa, Homo Sapiens
YEMVSRVM

SEQ ID NO: 84622 - protein, 8 aa, Homo Sapiens
YENCFHIL

SEQ ID NO: 84623 - protein, 8 aa, Homo Sapiens
YENLVVAL

SEQ ID NO: 84624 - protein, 8 aa, Homo Sapiens
YENPTYKF

SEQ ID NO: 84625 - protein, 8 aa, Homo Sapiens
YENRIRAY

SEQ ID NO: 84626 - protein, 8 aa, Homo Sapiens
YEQIVKAH

SEQ ID NO: 84627 - protein, 8 aa, Homo Sapiens
YEQLMQLY

SEQ ID NO: 84628 - protein, 8 aa, Homo Sapiens
YEQVKQVL

SEQ ID NO: 84629 - protein, 8 aa, Homo Sapiens
YERAIECY

SEQ ID NO: 84630 - protein, 8 aa, Homo Sapiens
YERAVEFF

SEQ ID NO: 84631 - protein, 8 aa, Homo Sapiens
YERLVAQF

SEQ ID NO: 84632 - protein, 8 aa, Homo Sapiens
YESLFREY

SEQ ID NO: 84633 - protein, 8 aa, Homo Sapiens
YETLTRPF

SEQ ID NO: 84634 - protein, 8 aa, Homo Sapiens
YEVEVHRL

SEQ ID NO: 84635 - protein, 8 aa, Homo Sapiens
YEVFKVLY

SEQ ID NO: 84636 - protein, 8 aa, Homo Sapiens
YEVTSTKY

SEQ ID NO: 84637 - protein, 8 aa, Homo Sapiens
YEYEFYHY

SEQ ID NO: 84638 - protein, 8 aa, Homo Sapiens
YEYRFLEF

SEQ ID NO: 84639 - protein, 8 aa, Homo Sapiens
YEYVVERF

SEQ ID NO: 84640 - protein, 8 aa, Homo Sapiens
YPVEIHEY

SEQ ID NO: 84641 - protein, 9 aa, Homo Sapiens
AEFELPKTM

SEQ ID NO: 84642 - protein, 9 aa, Homo Sapiens
AEFEVHEVY

SEQ ID NO: 84643 - protein, 9 aa, Homo Sapiens
AEMLRSISF

SEQ ID NO: 84644 - protein, 9 aa, Homo Sapiens
AENVFFVAH

SEQ ID NO: 84645 - protein, 9 aa, Homo Sapiens
AEWDQVTVY

SEQ ID NO: 84646 - protein, 9 aa, Homo Sapiens
AEYLIKEGY

SEQ ID NO: 84647 - protein, 9 aa, Homo Sapiens
AVEAKQVAL

SEQ ID NO: 84648 - protein, 9 aa, Homo Sapiens
CAPRRKVAL

SEQ ID NO: 84649 - protein, 9 aa, Homo Sapiens
CEFKIPLAI

SEQ ID NO: 84650 - protein, 9 aa, Homo Sapiens
CEHDFQMLF

SEQ ID NO: 84651 - protein, 9 aa, Homo Sapiens
CEHGGFVTY

SEQ ID NO: 84652 - protein, 9 aa, Homo Sapiens
CEISPLISY

SEQ ID NO: 84653 - protein, 9 aa, Homo Sapiens
CEISPLVSY

SEQ ID NO: 84654 - protein, 9 aa, Homo Sapiens
CENVYHLVY

SEQ ID NO: 84655 - protein, 9 aa, Homo Sapiens
CESVLKEVY

SEQ ID NO: 84656 - protein, 9 aa, Homo Sapiens
CETDTLINY

SEQ ID NO: 84657 - protein, 9 aa, Homo Sapiens
CETIMPLAL

SEQ ID NO: 84658 - protein, 9 aa, Homo Sapiens
CETQLPVSF

SEQ ID NO: 84659 - protein, 9 aa, Homo Sapiens
CEVLYNIAF

SEQ ID NO: 84660 - protein, 9 aa, Homo Sapiens
DAWKLTTQY

SEQ ID NO: 84661 - protein, 9 aa, Homo Sapiens
DCPELIEAF

SEQ ID NO: 84662 - protein, 9 aa, Homo Sapiens
DDFESKYSF

SEQ ID NO: 84663 - protein, 9 aa, Homo Sapiens
DDFLNRIAL

SEQ ID NO: 84664 - protein, 9 aa, Homo Sapiens
DDFRFKDRF

SEQ ID NO: 84665 - protein, 9 aa, Homo Sapiens
DDFRVLTAV

SEQ ID NO: 84666 - protein, 9 aa, Homo Sapiens
DDISLPKSA

SEQ ID NO: 84667 - protein, 9 aa, Homo Sapiens
DDLEWKIIY

SEQ ID NO: 84668 - protein, 9 aa, Homo Sapiens
DDVILKEEF

SEQ ID NO: 84669 - protein, 9 aa, Homo Sapiens
DDVKVVEKY

SEQ ID NO: 84670 - protein, 9 aa, Homo Sapiens
DDWRIAMTY

SEQ ID NO: 84671 - protein, 9 aa, Homo Sapiens
DDYPRDYQY

SEQ ID NO: 84672 - protein, 9 aa, Homo Sapiens
DDYQLPEIL

SEQ ID NO: 84673 - protein, 9 aa, Homo Sapiens
DDYTIPDEY

SEQ ID NO: 84674 - protein, 9 aa, Homo Sapiens
DEAAISKLY

SEQ ID NO: 84675 - protein, 9 aa, Homo Sapiens
DEAEVHLKF

SEQ ID NO: 84676 - protein, 9 aa, Homo Sapiens
DEAHLASVY

SEQ ID NO: 84677 - protein, 9 aa, Homo Sapiens
DEAKVCMVY

SEQ ID NO: 84678 - protein, 9 aa, Homo Sapiens
DEAPLYEIF

SEQ ID NO: 84679 - protein, 9 aa, Homo Sapiens
DEAPPEHSF

SEQ ID NO: 84680 - protein, 9 aa, Homo Sapiens
DEARSLKAY

SEQ ID NO: 84681 - protein, 9 aa, Homo Sapiens
DEATLLRAL

SEQ ID NO: 84682 - protein, 9 aa, Homo Sapiens
DEAVMLVNH

SEQ ID NO: 84683 - protein, 9 aa, Homo Sapiens
DECGKAFSY

SEQ ID NO: 84684 - protein, 9 aa, Homo Sapiens
DECPHLIAL

SEQ ID NO: 84685 - protein, 9 aa, Homo Sapiens
DECPVVNAY

SEQ ID NO: 84686 - protein, 9 aa, Homo Sapiens
DEDVLRYQF

SEQ ID NO: 84687 - protein, 9 aa, Homo Sapiens
DEEGLPEKL

SEQ ID NO: 84688 - protein, 9 aa, Homo Sapiens
DEEIIVKAM

SEQ ID NO: 84689 - protein, 9 aa, Homo Sapiens
DEEKFITIF

SEQ ID NO: 84690 - protein, 9 aa, Homo Sapiens
DEETVYNVF

SEQ ID NO: 84691 - protein, 9 aa, Homo Sapiens
DEFAKLQDY

SEQ ID NO: 84692 - protein, 9 aa, Homo Sapiens
DEFANLIQH

SEQ ID NO: 84693 - protein, 9 aa, Homo Sapiens
DEFDGKVTY

SEQ ID NO: 84694 - protein, 9 aa, Homo Sapiens
DEFDLFAHH

SEQ ID NO: 84695 - protein, 9 aa, Homo Sapiens
DEFDQRILY

SEQ ID NO: 84696 - protein, 9 aa, Homo Sapiens
DEFEFLEKA

SEQ ID NO: 84697 - protein, 9 aa, Homo Sapiens
DEFEKEETF

SEQ ID NO: 84698 - protein, 9 aa, Homo Sapiens
DEFGEFGGF

SEQ ID NO: 84699 - protein, 9 aa, Homo Sapiens
DEFGHTSQL

SEQ ID NO: 84700 - protein, 9 aa, Homo Sapiens
DEFHNPLAY

SEQ ID NO: 84701 - protein, 9 aa, Homo Sapiens
DEFHPFIEA

SEQ ID NO: 84702 - protein, 9 aa, Homo Sapiens
DEFIIKTVM

SEQ ID NO: 84703 - protein, 9 aa, Homo Sapiens
DEFILPTGA

SEQ ID NO: 84704 - protein, 9 aa, Homo Sapiens
DEFITVHSM

SEQ ID NO: 84705 - protein, 9 aa, Homo Sapiens
DEFKIGELF

SEQ ID NO: 84706 - protein, 9 aa, Homo Sapiens
DEFKSFCHF

SEQ ID NO: 84707 - protein, 9 aa, Homo Sapiens
DEFKSVSKF

SEQ ID NO: 84708 - protein, 9 aa, Homo Sapiens
DEFLHINDF

SEQ ID NO: 84709 - protein, 9 aa, Homo Sapiens
DEFLLLTTH

SEQ ID NO: 84710 - protein, 9 aa, Homo Sapiens
DEFLRISTA

SEQ ID NO: 84711 - protein, 9 aa, Homo Sapiens
DEFLWREQF

SEQ ID NO: 84712 - protein, 9 aa, Homo Sapiens
DEFNGVPSY

SEQ ID NO: 84713 - protein, 9 aa, Homo Sapiens
DEFQLHTNV

SEQ ID NO: 84714 - protein, 9 aa, Homo Sapiens
DEFRKAESV

SEQ ID NO: 84715 - protein, 9 aa, Homo Sapiens
DEFSNPYRY

SEQ ID NO: 84716 - protein, 9 aa, Homo Sapiens
DEFTHLYTL

SEQ ID NO: 84717 - protein, 9 aa, Homo Sapiens
DEFYKTPSL

SEQ ID NO: 84718 - protein, 9 aa, Homo Sapiens
DEGILWQMF

SEQ ID NO: 84719 - protein, 9 aa, Homo Sapiens
DEGKLLIGF

SEQ ID NO: 84720 - protein, 9 aa, Homo Sapiens
DEGRLVLEF

SEQ ID NO: 84721 - protein, 9 aa, Homo Sapiens
DEGTAFLVY

SEQ ID NO: 84722 - protein, 9 aa, Homo Sapiens
DEHAGVISV

SEQ ID NO: 84723 - protein, 9 aa, Homo Sapiens
DEHALIQQY

SEQ ID NO: 84724 - protein, 9 aa, Homo Sapiens
DEHEGPALY

SEQ ID NO: 84725 - protein, 9 aa, Homo Sapiens
DEHELLEHL

SEQ ID NO: 84726 - protein, 9 aa, Homo Sapiens
DEHGFDNCL

SEQ ID NO: 84727 - protein, 9 aa, Homo Sapiens
DEHGLHTKY

SEQ ID NO: 84728 - protein, 9 aa, Homo Sapiens
DEHIYPYMY

SEQ ID NO: 84729 - protein, 9 aa, Homo Sapiens
DEHLLIQHY

SEQ ID NO: 84730 - protein, 9 aa, Homo Sapiens
DEHLQLISL

SEQ ID NO: 84731 - protein, 9 aa, Homo Sapiens
DEHLSVVRY

SEQ ID NO: 84732 - protein, 9 aa, Homo Sapiens
DEHPNVIRY

SEQ ID NO: 84733 - protein, 9 aa, Homo Sapiens
DEHQLYNEF

SEQ ID NO: 84734 - protein, 9 aa, Homo Sapiens
DEHVQFLVY

SEQ ID NO: 84735 - protein, 9 aa, Homo Sapiens
DEIFHDVAY

SEQ ID NO: 84736 - protein, 9 aa, Homo Sapiens
DEIGIPVAL

SEQ ID NO: 84737 - protein, 9 aa, Homo Sapiens
DEIGLPKIF

SEQ ID NO: 84738 - protein, 9 aa, Homo Sapiens
DEIIKNVPL

SEQ ID NO: 84739 - protein, 9 aa, Homo Sapiens
DEIILPRGL

SEQ ID NO: 84740 - protein, 9 aa, Homo Sapiens
DEIKIGTSC

SEQ ID NO: 84741 - protein, 9 aa, Homo Sapiens
DEILIRDTF

SEQ ID NO: 84742 - protein, 9 aa, Homo Sapiens
DEINKQLIF

SEQ ID NO: 84743 - protein, 9 aa, Homo Sapiens
DEIRLLKSV

SEQ ID NO: 84744 - protein, 9 aa, Homo Sapiens
DEKAFVFSV

SEQ ID NO: 84745 - protein, 9 aa, Homo Sapiens
DEKEFQVPM

SEQ ID NO: 84746 - protein, 9 aa, Homo Sapiens
DEKEFTVQI

SEQ ID NO: 84747 - protein, 9 aa, Homo Sapiens
DEKELIEKM

SEQ ID NO: 84748 - protein, 9 aa, Homo Sapiens
DEKELRTSF

SEQ ID NO: 84749 - protein, 9 aa, Homo Sapiens
DEKFLSEVF

SEQ ID NO: 84750 - protein, 9 aa, Homo Sapiens
DEKKFDEAL

SEQ ID NO: 84751 - protein, 9 aa, Homo Sapiens
DEKLLYDTF

SEQ ID NO: 84752 - protein, 9 aa, Homo Sapiens
DEKLNNAKY

SEQ ID NO: 84753 - protein, 9 aa, Homo Sapiens
DEKNFVVVM

SEQ ID NO: 84754 - protein, 9 aa, Homo Sapiens
DEKPRIVVF

SEQ ID NO: 84755 - protein, 9 aa, Homo Sapiens
DEKQLIEKM

SEQ ID NO: 84756 - protein, 9 aa, Homo Sapiens
DEKQQHIVY

SEQ ID NO: 84757 - protein, 9 aa, Homo Sapiens
DEKRDFRTY

SEQ ID NO: 84758 - protein, 9 aa, Homo Sapiens
DEKRFLVTV

SEQ ID NO: 84759 - protein, 9 aa, Homo Sapiens
DEKVLIEAY

SEQ ID NO: 84760 - protein, 9 aa, Homo Sapiens
DELEIKAYY

SEQ ID NO: 84761 - protein, 9 aa, Homo Sapiens
DELELHQRF

SEQ ID NO: 84762 - protein, 9 aa, Homo Sapiens
DELEQKRAL

SEQ ID NO: 84763 - protein, 9 aa, Homo Sapiens
DELERITKL

SEQ ID NO: 84764 - protein, 9 aa, Homo Sapiens
DELGIILAH

SEQ ID NO: 84765 - protein, 9 aa, Homo Sapiens
DELHYLEVY

SEQ ID NO: 84766 - protein, 9 aa, Homo Sapiens
DELIFSNEY

SEQ ID NO: 84767 - protein, 9 aa, Homo Sapiens
DELIKPTSL

SEQ ID NO: 84768 - protein, 9 aa, Homo Sapiens
DELIQQSQW

SEQ ID NO: 84769 - protein, 9 aa, Homo Sapiens
DELIRNVKF

SEQ ID NO: 84770 - protein, 9 aa, Homo Sapiens
DELIRSIEL

SEQ ID NO: 84771 - protein, 9 aa, Homo Sapiens
DELKKEVSM

SEQ ID NO: 84772 - protein, 9 aa, Homo Sapiens
DELPFLHEV

SEQ ID NO: 84773 - protein, 9 aa, Homo Sapiens
DELPKFHQY

SEQ ID NO: 84774 - protein, 9 aa, Homo Sapiens
DELQFLEKI

SEQ ID NO: 84775 - protein, 9 aa, Homo Sapiens
DELQIPVKW

SEQ ID NO: 84776 - protein, 9 aa, Homo Sapiens
DELQQPLEL

SEQ ID NO: 84777 - protein, 9 aa, Homo Sapiens
DELQSVISH

SEQ ID NO: 84778 - protein, 9 aa, Homo Sapiens
DELQVLEKF

SEQ ID NO: 84779 - protein, 9 aa, Homo Sapiens
DELTKIWKI

SEQ ID NO: 84780 - protein, 9 aa, Homo Sapiens
DELVKKYSL

SEQ ID NO: 84781 - protein, 9 aa, Homo Sapiens
DELYTPHSW

SEQ ID NO: 84782 - protein, 9 aa, Homo Sapiens
DEMAAVMGF

SEQ ID NO: 84783 - protein, 9 aa, Homo Sapiens
DEMDLHLVM

SEQ ID NO: 84784 - protein, 9 aa, Homo Sapiens
DEMNILATY

SEQ ID NO: 84785 - protein, 9 aa, Homo Sapiens
DEMRSPEGY

SEQ ID NO: 84786 - protein, 9 aa, Homo Sapiens
DEMTSLSEY

SEQ ID NO: 84787 - protein, 9 aa, Homo Sapiens
DEMVSLKDY

SEQ ID NO: 84788 - protein, 9 aa, Homo Sapiens
DENCFKVMF

SEQ ID NO: 84789 - protein, 9 aa, Homo Sapiens
DENDVITCF

SEQ ID NO: 84790 - protein, 9 aa, Homo Sapiens
DENEHQLSL

SEQ ID NO: 84791 - protein, 9 aa, Homo Sapiens
DENELKEFF

SEQ ID NO: 84792 - protein, 9 aa, Homo Sapiens
DENEPNVPY

SEQ ID NO: 84793 - protein, 9 aa, Homo Sapiens
DENEVRTLF

SEQ ID NO: 84794 - protein, 9 aa, Homo Sapiens
DENFISRAF

SEQ ID NO: 84795 - protein, 9 aa, Homo Sapiens
DENGKISRL

SEQ ID NO: 84796 - protein, 9 aa, Homo Sapiens
DENKFVSRL

SEQ ID NO: 84797 - protein, 9 aa, Homo Sapiens
DENKSLSTY

SEQ ID NO: 84798 - protein, 9 aa, Homo Sapiens
DENNVLIQY

SEQ ID NO: 84799 - protein, 9 aa, Homo Sapiens
DENPQQLKL

SEQ ID NO: 84800 - protein, 9 aa, Homo Sapiens
DENRKPVSF

SEQ ID NO: 84801 - protein, 9 aa, Homo Sapiens
DENSLEYKY

SEQ ID NO: 84802 - protein, 9 aa, Homo Sapiens
DENSVIKSF

SEQ ID NO: 84803 - protein, 9 aa, Homo Sapiens
DEQALEDHF

SEQ ID NO: 84804 - protein, 9 aa, Homo Sapiens
DEQFVVKAF

SEQ ID NO: 84805 - protein, 9 aa, Homo Sapiens
DEQMFPCRF

SEQ ID NO: 84806 - protein, 9 aa, Homo Sapiens
DEQRLRDEY

SEQ ID NO: 84807 - protein, 9 aa, Homo Sapiens
DEQVLQRDF

SEQ ID NO: 84808 - protein, 9 aa, Homo Sapiens
DERCQPRSF

SEQ ID NO: 84809 - protein, 9 aa, Homo Sapiens
DERELAAEM

SEQ ID NO: 84810 - protein, 9 aa, Homo Sapiens
DEREREEFY

SEQ ID NO: 84811 - protein, 9 aa, Homo Sapiens
DERIREYFY

SEQ ID NO: 84812 - protein, 9 aa, Homo Sapiens
DERKIEETL

SEQ ID NO: 84813 - protein, 9 aa, Homo Sapiens
DERKLRTFY

SEQ ID NO: 84814 - protein, 9 aa, Homo Sapiens
DERLLQEAL

SEQ ID NO: 84815 - protein, 9 aa, Homo Sapiens
DERNRQVTF

SEQ ID NO: 84816 - protein, 9 aa, Homo Sapiens
DERQCLQKY

SEQ ID NO: 84817 - protein, 9 aa, Homo Sapiens
DERQINTEY

SEQ ID NO: 84818 - protein, 9 aa, Homo Sapiens
DERRFQDAV

SEQ ID NO: 84819 - protein, 9 aa, Homo Sapiens
DERRKLIRY

SEQ ID NO: 84820 - protein, 9 aa, Homo Sapiens
DERVFVALY

SEQ ID NO: 84821 - protein, 9 aa, Homo Sapiens
DERVITEEM

SEQ ID NO: 84822 - protein, 9 aa, Homo Sapiens
DESDYALRY

SEQ ID NO: 84823 - protein, 9 aa, Homo Sapiens
DESGPSIVH

SEQ ID NO: 84824 - protein, 9 aa, Homo Sapiens
DESPLGAPY

SEQ ID NO: 84825 - protein, 9 aa, Homo Sapiens
DESQVVTRY

SEQ ID NO: 84826 - protein, 9 aa, Homo Sapiens
DESSVSISH

SEQ ID NO: 84827 - protein, 9 aa, Homo Sapiens
DESVLTNVF

SEQ ID NO: 84828 - protein, 9 aa, Homo Sapiens
DETAKKIQY

SEQ ID NO: 84829 - protein, 9 aa, Homo Sapiens
DETIRVVSM

SEQ ID NO: 84830 - protein, 9 aa, Homo Sapiens
DETLVHSSF

SEQ ID NO: 84831 - protein, 9 aa, Homo Sapiens
DETQIFSYF

SEQ ID NO: 84832 - protein, 9 aa, Homo Sapiens
DETTVSQNY

SEQ ID NO: 84833 - protein, 9 aa, Homo Sapiens
DETVLPSSY

SEQ ID NO: 84834 - protein, 9 aa, Homo Sapiens
DETVTHFIY

SEQ ID NO: 84835 - protein, 9 aa, Homo Sapiens
DEVERTQTL

SEQ ID NO: 84836 - protein, 9 aa, Homo Sapiens
DEVERVITI

SEQ ID NO: 84837 - protein, 9 aa, Homo Sapiens
DEVFHDIAY

SEQ ID NO: 84838 - protein, 9 aa, Homo Sapiens
DEVIFPLTV

SEQ ID NO: 84839 - protein, 9 aa, Homo Sapiens
DEVIKVYRY

SEQ ID NO: 84840 - protein, 9 aa, Homo Sapiens
DEVKSTIKF

SEQ ID NO: 84841 - protein, 9 aa, Homo Sapiens
DEVLQTHSV

SEQ ID NO: 84842 - protein, 9 aa, Homo Sapiens
DEVNGLISM

SEQ ID NO: 84843 - protein, 9 aa, Homo Sapiens
DEVPRPQAL

SEQ ID NO: 84844 - protein, 9 aa, Homo Sapiens
DEVPVGVEM

SEQ ID NO: 84845 - protein, 9 aa, Homo Sapiens
DEVQLKTTY

SEQ ID NO: 84846 - protein, 9 aa, Homo Sapiens
DEVVKIQSL

SEQ ID NO: 84847 - protein, 9 aa, Homo Sapiens
DEVYQVTVY

SEQ ID NO: 84848 - protein, 9 aa, Homo Sapiens
DEWITIDKF

SEQ ID NO: 84849 - protein, 9 aa, Homo Sapiens
DEWKELKQH

SEQ ID NO: 84850 - protein, 9 aa, Homo Sapiens
DEWLKPELF

SEQ ID NO: 84851 - protein, 9 aa, Homo Sapiens
DEWLRPEDL

SEQ ID NO: 84852 - protein, 9 aa, Homo Sapiens
DEYDDIVVH

SEQ ID NO: 84853 - protein, 9 aa, Homo Sapiens
DEYDFYRSF

SEQ ID NO: 84854 - protein, 9 aa, Homo Sapiens
DEYDGHSTY

SEQ ID NO: 84855 - protein, 9 aa, Homo Sapiens
DEYEDENLY

SEQ ID NO: 84856 - protein, 9 aa, Homo Sapiens
DEYEKFKLY

SEQ ID NO: 84857 - protein, 9 aa, Homo Sapiens
DEYEKLQVL

SEQ ID NO: 84858 - protein, 9 aa, Homo Sapiens
DEYELLMPH

SEQ ID NO: 84859 - protein, 9 aa, Homo Sapiens
DEYENLFNM

SEQ ID NO: 84860 - protein, 9 aa, Homo Sapiens
DEYGVSQAL

SEQ ID NO: 84861 - protein, 9 aa, Homo Sapiens
DEYIMSKTL

SEQ ID NO: 84862 - protein, 9 aa, Homo Sapiens
DEYIQSHNF

SEQ ID NO: 84863 - protein, 9 aa, Homo Sapiens
DEYIYRHFF

SEQ ID NO: 84864 - protein, 9 aa, Homo Sapiens
DEYKIGQLY

SEQ ID NO: 84865 - protein, 9 aa, Homo Sapiens
DEYKIPSSH

SEQ ID NO: 84866 - protein, 9 aa, Homo Sapiens
DEYKYNVEA

SEQ ID NO: 84867 - protein, 9 aa, Homo Sapiens
DEYNFVRAY

SEQ ID NO: 84868 - protein, 9 aa, Homo Sapiens
DEYNFVRSY

SEQ ID NO: 84869 - protein, 9 aa, Homo Sapiens
DEYQFVERL

SEQ ID NO: 84870 - protein, 9 aa, Homo Sapiens
DEYQVAQLY

SEQ ID NO: 84871 - protein, 9 aa, Homo Sapiens
DEYQVGQLY

SEQ ID NO: 84872 - protein, 9 aa, Homo Sapiens
DEYSLVREL

SEQ ID NO: 84873 - protein, 9 aa, Homo Sapiens
DEYSMQYSA

SEQ ID NO: 84874 - protein, 9 aa, Homo Sapiens
DEYVNVKDF

SEQ ID NO: 84875 - protein, 9 aa, Homo Sapiens
DEYYQVVYY

SEQ ID NO: 84876 - protein, 9 aa, Homo Sapiens
DFLLRPRSH

SEQ ID NO: 84877 - protein, 9 aa, Homo Sapiens
DGHLFQVEY

SEQ ID NO: 84878 - protein, 9 aa, Homo Sapiens
DLFEEKITH

SEQ ID NO: 84879 - protein, 9 aa, Homo Sapiens
DLWLEREVF

SEQ ID NO: 84880 - protein, 9 aa, Homo Sapiens
DSFIRPVTF

SEQ ID NO: 84881 - protein, 9 aa, Homo Sapiens
EEAAFTCEY

SEQ ID NO: 84882 - protein, 9 aa, Homo Sapiens
EEAHLNTSF

SEQ ID NO: 84883 - protein, 9 aa, Homo Sapiens
EEAPKFLAF

SEQ ID NO: 84884 - protein, 9 aa, Homo Sapiens
EEASLLHQF

SEQ ID NO: 84885 - protein, 9 aa, Homo Sapiens
EEAVKWISY

SEQ ID NO: 84886 - protein, 9 aa, Homo Sapiens
EEEILLNSY

SEQ ID NO: 84887 - protein, 9 aa, Homo Sapiens
EEEVFPLAM

SEQ ID NO: 84888 - protein, 9 aa, Homo Sapiens
EEFDLFMRM

SEQ ID NO: 84889 - protein, 9 aa, Homo Sapiens
EEFDRFTGY

SEQ ID NO: 84890 - protein, 9 aa, Homo Sapiens
EEFDSFRIF

SEQ ID NO: 84891 - protein, 9 aa, Homo Sapiens
EEFETIERF

SEQ ID NO: 84892 - protein, 9 aa, Homo Sapiens
EEFEYQRSY

SEQ ID NO: 84893 - protein, 9 aa, Homo Sapiens
EEFEYRHVM

SEQ ID NO: 84894 - protein, 9 aa, Homo Sapiens
EEFGQAFSF

SEQ ID NO: 84895 - protein, 9 aa, Homo Sapiens
EEFGRFASF

SEQ ID NO: 84896 - protein, 9 aa, Homo Sapiens
EEFKDFNKY

SEQ ID NO: 84897 - protein, 9 aa, Homo Sapiens
EEFLAFPAY

SEQ ID NO: 84898 - protein, 9 aa, Homo Sapiens
EEFLFRTAL

SEQ ID NO: 84899 - protein, 9 aa, Homo Sapiens
EEFLSKVSI

SEQ ID NO: 84900 - protein, 9 aa, Homo Sapiens
EEFPNTCKM

SEQ ID NO: 84901 - protein, 9 aa, Homo Sapiens
EEFREFNKY

SEQ ID NO: 84902 - protein, 9 aa, Homo Sapiens
EEFRHVIAW

SEQ ID NO: 84903 - protein, 9 aa, Homo Sapiens
EEFRNFSRY

SEQ ID NO: 84904 - protein, 9 aa, Homo Sapiens
EEFTVRDGY

SEQ ID NO: 84905 - protein, 9 aa, Homo Sapiens
EEFVFIHAV

SEQ ID NO: 84906 - protein, 9 aa, Homo Sapiens
EEFVLVPQY

SEQ ID NO: 84907 - protein, 9 aa, Homo Sapiens
EEGYVPTSY

SEQ ID NO: 84908 - protein, 9 aa, Homo Sapiens
EEHEVIVSF

SEQ ID NO: 84909 - protein, 9 aa, Homo Sapiens
EEHPLVFLF

SEQ ID NO: 84910 - protein, 9 aa, Homo Sapiens
EEHRLIARY

SEQ ID NO: 84911 - protein, 9 aa, Homo Sapiens
EEIKKNYRY

SEQ ID NO: 84912 - protein, 9 aa, Homo Sapiens
EEIPFEQSF

SEQ ID NO: 84913 - protein, 9 aa, Homo Sapiens
EEIPKRETY

SEQ ID NO: 84914 - protein, 9 aa, Homo Sapiens
EEISHLISF

SEQ ID NO: 84915 - protein, 9 aa, Homo Sapiens
EEKDWKTAY

SEQ ID NO: 84916 - protein, 9 aa, Homo Sapiens
EELEQKYTY

SEQ ID NO: 84917 - protein, 9 aa, Homo Sapiens
EELERPLHY

SEQ ID NO: 84918 - protein, 9 aa, Homo Sapiens
EELEWQNRF

SEQ ID NO: 84919 - protein, 9 aa, Homo Sapiens
EELGHTETY

SEQ ID NO: 84920 - protein, 9 aa, Homo Sapiens
EELIFHCGF

SEQ ID NO: 84921 - protein, 9 aa, Homo Sapiens
EELKRVASF

SEQ ID NO: 84922 - protein, 9 aa, Homo Sapiens
EELPHIHAF

SEQ ID NO: 84923 - protein, 9 aa, Homo Sapiens
EELQQKVSY

SEQ ID NO: 84924 - protein, 9 aa, Homo Sapiens
EEMEWFNNY

SEQ ID NO: 84925 - protein, 9 aa, Homo Sapiens
EEMGLTSSF

SEQ ID NO: 84926 - protein, 9 aa, Homo Sapiens
EEMLFIYGH

SEQ ID NO: 84927 - protein, 9 aa, Homo Sapiens
EEMRRLVAY

SEQ ID NO: 84928 - protein, 9 aa, Homo Sapiens
EENPIVLEF

SEQ ID NO: 84929 - protein, 9 aa, Homo Sapiens
EENQIVSSY

SEQ ID NO: 84930 - protein, 9 aa, Homo Sapiens
EEQAFHVSY

SEQ ID NO: 84931 - protein, 9 aa, Homo Sapiens
EERADLIAY

SEQ ID NO: 84932 - protein, 9 aa, Homo Sapiens
EEREIKERI

SEQ ID NO: 84933 - protein, 9 aa, Homo Sapiens
EERVINEEY

SEQ ID NO: 84934 - protein, 9 aa, Homo Sapiens
EETDKIINY

SEQ ID NO: 84935 - protein, 9 aa, Homo Sapiens
EETVVPKTF

SEQ ID NO: 84936 - protein, 9 aa, Homo Sapiens
EEVDVTPTF

SEQ ID NO: 84937 - protein, 9 aa, Homo Sapiens
EEVIFPNNF

SEQ ID NO: 84938 - protein, 9 aa, Homo Sapiens
EEVKIAEAY

SEQ ID NO: 84939 - protein, 9 aa, Homo Sapiens
EEWLRLHTY

SEQ ID NO: 84940 - protein, 9 aa, Homo Sapiens
EEWPFKCEF

SEQ ID NO: 84941 - protein, 9 aa, Homo Sapiens
EEYEARENF

SEQ ID NO: 84942 - protein, 9 aa, Homo Sapiens
EEYEKLPAY

SEQ ID NO: 84943 - protein, 9 aa, Homo Sapiens
EEYERATRY

SEQ ID NO: 84944 - protein, 9 aa, Homo Sapiens
EEYLLRQVF

SEQ ID NO: 84945 - protein, 9 aa, Homo Sapiens
EEYMKYLAY

SEQ ID NO: 84946 - protein, 9 aa, Homo Sapiens
EEYPLTRAF

SEQ ID NO: 84947 - protein, 9 aa, Homo Sapiens
EEYQAFLVY

SEQ ID NO: 84948 - protein, 9 aa, Homo Sapiens
EEYQSLIRY

SEQ ID NO: 84949 - protein, 9 aa, Homo Sapiens
EEYSNTRAY

SEQ ID NO: 84950 - protein, 9 aa, Homo Sapiens
EEYSVPCAH

SEQ ID NO: 84951 - protein, 9 aa, Homo Sapiens
FEAPIKLVF

SEQ ID NO: 84952 - protein, 9 aa, Homo Sapiens
FEFEYQTKV

SEQ ID NO: 84953 - protein, 9 aa, Homo Sapiens
FEFIIPESY

SEQ ID NO: 84954 - protein, 9 aa, Homo Sapiens
FEFKHIKAF

SEQ ID NO: 84955 - protein, 9 aa, Homo Sapiens
FEFTPKPEY

SEQ ID NO: 84956 - protein, 9 aa, Homo Sapiens
FEFTYVNVY

SEQ ID NO: 84957 - protein, 9 aa, Homo Sapiens
FEHITPMQY

SEQ ID NO: 84958 - protein, 9 aa, Homo Sapiens
FELECPVKY

SEQ ID NO: 84959 - protein, 9 aa, Homo Sapiens
FEQALREYF

SEQ ID NO: 84960 - protein, 9 aa, Homo Sapiens
FEQILKAEY

SEQ ID NO: 84961 - protein, 9 aa, Homo Sapiens
FESGDFVSF

SEQ ID NO: 84962 - protein, 9 aa, Homo Sapiens
FESKVSASE

SEQ ID NO: 84963 - protein, 9 aa, Homo Sapiens
FESVFPLSH

SEQ ID NO: 84964 - protein, 9 aa, Homo Sapiens
FETRMNEAF

SEQ ID NO: 84965 - protein, 9 aa, Homo Sapiens
FEVMLPEKL

SEQ ID NO: 84966 - protein, 9 aa, Homo Sapiens
FEVPKLVQY

SEQ ID NO: 84967 - protein, 9 aa, Homo Sapiens
FEVTRPCSY

SEQ ID NO: 84968 - protein, 9 aa, Homo Sapiens
FEWENKVTV

SEQ ID NO: 84969 - protein, 9 aa, Homo Sapiens
FEYEFIYKH

SEQ ID NO: 84970 - protein, 9 aa, Homo Sapiens
FEYEYSQRW

SEQ ID NO: 84971 - protein, 9 aa, Homo Sapiens
FEYIRSETY

SEQ ID NO: 84972 - protein, 9 aa, Homo Sapiens
GEFEGFVAV

SEQ ID NO: 84973 - protein, 9 aa, Homo Sapiens
GEFGGFGSV

SEQ ID NO: 84974 - protein, 9 aa, Homo Sapiens
GEFRFRHGY

SEQ ID NO: 84975 - protein, 9 aa, Homo Sapiens
GIETIANEF

SEQ ID NO: 84976 - protein, 9 aa, Homo Sapiens
GIETIANEY

SEQ ID NO: 84977 - protein, 9 aa, Homo Sapiens
GVEVKRPKY

SEQ ID NO: 84978 - protein, 9 aa, Homo Sapiens
HDITVPLEV

SEQ ID NO: 84979 - protein, 9 aa, Homo Sapiens
HEAAFPIAV

SEQ ID NO: 84980 - protein, 9 aa, Homo Sapiens
HEADVDVLM

SEQ ID NO: 84981 - protein, 9 aa, Homo Sapiens
HEAERNIAL

SEQ ID NO: 84982 - protein, 9 aa, Homo Sapiens
HEAFSPVSY

SEQ ID NO: 84983 - protein, 9 aa, Homo Sapiens
HEAVPLSVF

SEQ ID NO: 84984 - protein, 9 aa, Homo Sapiens
HEESIHAAY

SEQ ID NO: 84985 - protein, 9 aa, Homo Sapiens
HEFDGDEEF

SEQ ID NO: 84986 - protein, 9 aa, Homo Sapiens
HEFDPWFNY

SEQ ID NO: 84987 - protein, 9 aa, Homo Sapiens
HEFLHEVPA

SEQ ID NO: 84988 - protein, 9 aa, Homo Sapiens
HEFLVKPSF

SEQ ID NO: 84989 - protein, 9 aa, Homo Sapiens
HEFPLILIF

SEQ ID NO: 84990 - protein, 9 aa, Homo Sapiens
HEFQQDLGY

SEQ ID NO: 84991 - protein, 9 aa, Homo Sapiens
HEFTVEQCF

SEQ ID NO: 84992 - protein, 9 aa, Homo Sapiens
HEFVLTEEL

SEQ ID NO: 84993 - protein, 9 aa, Homo Sapiens
HEFVSFEDF

SEQ ID NO: 84994 - protein, 9 aa, Homo Sapiens
HEGEILQAF

SEQ ID NO: 84995 - protein, 9 aa, Homo Sapiens
HEHIHSCQF

SEQ ID NO: 84996 - protein, 9 aa, Homo Sapiens
HEHRLPHVL

SEQ ID NO: 84997 - protein, 9 aa, Homo Sapiens
HEIAHNAAF

SEQ ID NO: 84998 - protein, 9 aa, Homo Sapiens
HEIEALKSF

SEQ ID NO: 84999 - protein, 9 aa, Homo Sapiens
HEIGEFPVF

SEQ ID NO: 85000 - protein, 9 aa, Homo Sapiens
HEIITLEQY

SEQ ID NO: 85001 - protein, 9 aa, Homo Sapiens
HEIITPEQF

SEQ ID NO: 85002 - protein, 9 aa, Homo Sapiens
HEIIWPAGF

SEQ ID NO: 85003 - protein, 9 aa, Homo Sapiens
HEIPVFIAM

SEQ ID NO: 85004 - protein, 9 aa, Homo Sapiens
HEIVLKVAY

SEQ ID NO: 85005 - protein, 9 aa, Homo Sapiens
HELIHGSSF

SEQ ID NO: 85006 - protein, 9 aa, Homo Sapiens
HEMEKAFAF

SEQ ID NO: 85007 - protein, 9 aa, Homo Sapiens
HEMPKTFTF

SEQ ID NO: 85008 - protein, 9 aa, Homo Sapiens
HENDTIAKY

SEQ ID NO: 85009 - protein, 9 aa, Homo Sapiens
HEQALLLEY

SEQ ID NO: 85010 - protein, 9 aa, Homo Sapiens
HEREMAEQF

SEQ ID NO: 85011 - protein, 9 aa, Homo Sapiens
HERPEFIAY

SEQ ID NO: 85012 - protein, 9 aa, Homo Sapiens
HEVLTRTAF

SEQ ID NO: 85013 - protein, 9 aa, Homo Sapiens
HEVPLRIGF

SEQ ID NO: 85014 - protein, 9 aa, Homo Sapiens
HEVPSLPAF

SEQ ID NO: 85015 - protein, 9 aa, Homo Sapiens
HEVPYTTSF

SEQ ID NO: 85016 - protein, 9 aa, Homo Sapiens
HEVSVPYAM

SEQ ID NO: 85017 - protein, 9 aa, Homo Sapiens
HEWHKRVAL

SEQ ID NO: 85018 - protein, 9 aa, Homo Sapiens
HEWMYTEAL

SEQ ID NO: 85019 - protein, 9 aa, Homo Sapiens
HEWTVKHRY

SEQ ID NO: 85020 - protein, 9 aa, Homo Sapiens
HEYALAVCL

SEQ ID NO: 85021 - protein, 9 aa, Homo Sapiens
HEYFNVPVY

SEQ ID NO: 85022 - protein, 9 aa, Homo Sapiens
IEAALRESL

SEQ ID NO: 85023 - protein, 9 aa, Homo Sapiens
IEALFPQKF

SEQ ID NO: 85024 - protein, 9 aa, Homo Sapiens
IEALMEKPF

SEQ ID NO: 85025 - protein, 9 aa, Homo Sapiens
IEALQKAGI

SEQ ID NO: 85026 - protein, 9 aa, Homo Sapiens
IEAVLLNSL

SEQ ID NO: 85027 - protein, 9 aa, Homo Sapiens
IECAHGIGY

SEQ ID NO: 85028 - protein, 9 aa, Homo Sapiens
IECDIVKDY

SEQ ID NO: 85029 - protein, 9 aa, Homo Sapiens
IEDEKLVRY

SEQ ID NO: 85030 - protein, 9 aa, Homo Sapiens
IEDFAHSSF

SEQ ID NO: 85031 - protein, 9 aa, Homo Sapiens
IEEMLQTAY

SEQ ID NO: 85032 - protein, 9 aa, Homo Sapiens
IEESIDRVY

SEQ ID NO: 85033 - protein, 9 aa, Homo Sapiens
IEFARKNVY

SEQ ID NO: 85034 - protein, 9 aa, Homo Sapiens
IEFDIPITY

SEQ ID NO: 85035 - protein, 9 aa, Homo Sapiens
IEFGMIPEF

SEQ ID NO: 85036 - protein, 9 aa, Homo Sapiens
IEFIFSDTH

SEQ ID NO: 85037 - protein, 9 aa, Homo Sapiens
IEFISKMSY

SEQ ID NO: 85038 - protein, 9 aa, Homo Sapiens
IEFMAPSEY

SEQ ID NO: 85039 - protein, 9 aa, Homo Sapiens
IEFSIPDSL

SEQ ID NO: 85040 - protein, 9 aa, Homo Sapiens
IEFTSIDAH

SEQ ID NO: 85041 - protein, 9 aa, Homo Sapiens
IEFVELPQY

SEQ ID NO: 85042 - protein, 9 aa, Homo Sapiens
IEHSVEVAH

SEQ ID NO: 85043 - protein, 9 aa, Homo Sapiens
IEIENFKSY

SEQ ID NO: 85044 - protein, 9 aa, Homo Sapiens
IEILQKAEF

SEQ ID NO: 85045 - protein, 9 aa, Homo Sapiens
IEINFPAEY

SEQ ID NO: 85046 - protein, 9 aa, Homo Sapiens
IEKEIKDVF

SEQ ID NO: 85047 - protein, 9 aa, Homo Sapiens
IELTFDEHY

SEQ ID NO: 85048 - protein, 9 aa, Homo Sapiens
IEMPCHHLF

SEQ ID NO: 85049 - protein, 9 aa, Homo Sapiens
IEMPSHQTY

SEQ ID NO: 85050 - protein, 9 aa, Homo Sapiens
IEMPYVIEF

SEQ ID NO: 85051 - protein, 9 aa, Homo Sapiens
IENAHVLLY

SEQ ID NO: 85052 - protein, 9 aa, Homo Sapiens
IENFLPLHY

SEQ ID NO: 85053 - protein, 9 aa, Homo Sapiens
IENPFGETF

SEQ ID NO: 85054 - protein, 9 aa, Homo Sapiens
IEQAYDNPH

SEQ ID NO: 85055 - protein, 9 aa, Homo Sapiens
IEQRLILQY

SEQ ID NO: 85056 - protein, 9 aa, Homo Sapiens
IERLVIQSY

SEQ ID NO: 85057 - protein, 9 aa, Homo Sapiens
IETELIYKY

SEQ ID NO: 85058 - protein, 9 aa, Homo Sapiens
IETIIKEQF

SEQ ID NO: 85059 - protein, 9 aa, Homo Sapiens
IEVEDLPQF

SEQ ID NO: 85060 - protein, 9 aa, Homo Sapiens
IEVEQALAH

SEQ ID NO: 85061 - protein, 9 aa, Homo Sapiens
IEVSLPEAA

SEQ ID NO: 85062 - protein, 9 aa, Homo Sapiens
IEWEKPEHY

SEQ ID NO: 85063 - protein, 9 aa, Homo Sapiens
IEWLIEHKY

SEQ ID NO: 85064 - protein, 9 aa, Homo Sapiens
IEYQFVERL

SEQ ID NO: 85065 - protein, 9 aa, Homo Sapiens
IRLENEIQT

SEQ ID NO: 85066 - protein, 9 aa, Homo Sapiens
KEYERFSKY

SEQ ID NO: 85067 - protein, 9 aa, Homo Sapiens
LEAPGVYVF

SEQ ID NO: 85068 - protein, 9 aa, Homo Sapiens
LEDVLPLAF

SEQ ID NO: 85069 - protein, 9 aa, Homo Sapiens
LEEPLASTY

SEQ ID NO: 85070 - protein, 9 aa, Homo Sapiens
LEFIKEIGY

SEQ ID NO: 85071 - protein, 9 aa, Homo Sapiens
LEFLHENEY

SEQ ID NO: 85072 - protein, 9 aa, Homo Sapiens
LEFPARDVY

SEQ ID NO: 85073 - protein, 9 aa, Homo Sapiens
LEFPQTSQY

SEQ ID NO: 85074 - protein, 9 aa, Homo Sapiens
LEFPSGYPY

SEQ ID NO: 85075 - protein, 9 aa, Homo Sapiens
LEFPTREVY

SEQ ID NO: 85076 - protein, 9 aa, Homo Sapiens
LEGPPLDAY

SEQ ID NO: 85077 - protein, 9 aa, Homo Sapiens
LEGPPLEAY

SEQ ID NO: 85078 - protein, 9 aa, Homo Sapiens
LEHEYIHNF

SEQ ID NO: 85079 - protein, 9 aa, Homo Sapiens
LEHEYIQNF

SEQ ID NO: 85080 - protein, 9 aa, Homo Sapiens
LEHGVVYEY

SEQ ID NO: 85081 - protein, 9 aa, Homo Sapiens
LEHNFSAIY

SEQ ID NO: 85082 - protein, 9 aa, Homo Sapiens
LEHPFVSSI

SEQ ID NO: 85083 - protein, 9 aa, Homo Sapiens
LEHSFIKRY

SEQ ID NO: 85084 - protein, 9 aa, Homo Sapiens
LEHVLPLMF

SEQ ID NO: 85085 - protein, 9 aa, Homo Sapiens
LEIKIPETY

SEQ ID NO: 85086 - protein, 9 aa, Homo Sapiens
LEILLRNGY

SEQ ID NO: 85087 - protein, 9 aa, Homo Sapiens
LEIYFPSQY

SEQ ID NO: 85088 - protein, 9 aa, Homo Sapiens
LELFLPEEY

SEQ ID NO: 85089 - protein, 9 aa, Homo Sapiens
LELLLPIRY

SEQ ID NO: 85090 - protein, 9 aa, Homo Sapiens
LELLQPHVF

SEQ ID NO: 85091 - protein, 9 aa, Homo Sapiens
LEMARTAVY

SEQ ID NO: 85092 - protein, 9 aa, Homo Sapiens
LEMEFKERF

SEQ ID NO: 85093 - protein, 9 aa, Homo Sapiens
LEMIQQECY

SEQ ID NO: 85094 - protein, 9 aa, Homo Sapiens
LEMRLQNAL

SEQ ID NO: 85095 - protein, 9 aa, Homo Sapiens
LENANPLIY

SEQ ID NO: 85096 - protein, 9 aa, Homo Sapiens
LENIFTKSY

SEQ ID NO: 85097 - protein, 9 aa, Homo Sapiens
LENLLLVHY

SEQ ID NO: 85098 - protein, 9 aa, Homo Sapiens
LENVFTPMF

SEQ ID NO: 85099 - protein, 9 aa, Homo Sapiens
LENVLAEKF

SEQ ID NO: 85100 - protein, 9 aa, Homo Sapiens
LEQEFTEHF

SEQ ID NO: 85101 - protein, 9 aa, Homo Sapiens
LEQEKRLPF

SEQ ID NO: 85102 - protein, 9 aa, Homo Sapiens
LEQELIERF

SEQ ID NO: 85103 - protein, 9 aa, Homo Sapiens
LEQEMPVQF

SEQ ID NO: 85104 - protein, 9 aa, Homo Sapiens
LEQKVVELY

SEQ ID NO: 85105 - protein, 9 aa, Homo Sapiens
LEQQVPENY

SEQ ID NO: 85106 - protein, 9 aa, Homo Sapiens
LERFVEECF

SEQ ID NO: 85107 - protein, 9 aa, Homo Sapiens
LERVLPASL

SEQ ID NO: 85108 - protein, 9 aa, Homo Sapiens
LESQFTDRY

SEQ ID NO: 85109 - protein, 9 aa, Homo Sapiens
LESVFKTEF

SEQ ID NO: 85110 - protein, 9 aa, Homo Sapiens
LETCHFQAF

SEQ ID NO: 85111 - protein, 9 aa, Homo Sapiens
LETLFVHRF

SEQ ID NO: 85112 - protein, 9 aa, Homo Sapiens
LEVIIPERY

SEQ ID NO: 85113 - protein, 9 aa, Homo Sapiens
LEVILPSVH

SEQ ID NO: 85114 - protein, 9 aa, Homo Sapiens
LEVLRVTAF

SEQ ID NO: 85115 - protein, 9 aa, Homo Sapiens
LEVMTAKYE

SEQ ID NO: 85116 - protein, 9 aa, Homo Sapiens
LEVSLLEKY

SEQ ID NO: 85117 - protein, 9 aa, Homo Sapiens
LEWLMPNRF

SEQ ID NO: 85118 - protein, 9 aa, Homo Sapiens
LEYDFPEKF

SEQ ID NO: 85119 - protein, 9 aa, Homo Sapiens
LEYIHEHEY

SEQ ID NO: 85120 - protein, 9 aa, Homo Sapiens
LEYIHENEY

SEQ ID NO: 85121 - protein, 9 aa, Homo Sapiens
LEYLIKHNY

SEQ ID NO: 85122 - protein, 9 aa, Homo Sapiens
LEYQYMLEH

SEQ ID NO: 85123 - protein, 9 aa, Homo Sapiens
LFAGELNPV

SEQ ID NO: 85124 - protein, 9 aa, Homo Sapiens
LIEFIRSEY

SEQ ID NO: 85125 - protein, 9 aa, Homo Sapiens
LMEALIISK

SEQ ID NO: 85126 - protein, 9 aa, Homo Sapiens
LQIDNARLA

SEQ ID NO: 85127 - protein, 9 aa, Homo Sapiens
LSGNNVVEY

SEQ ID NO: 85128 - protein, 9 aa, Homo Sapiens
MEAFHFVSY

SEQ ID NO: 85129 - protein, 9 aa, Homo Sapiens
MEAKVENEY

SEQ ID NO: 85130 - protein, 9 aa, Homo Sapiens
MEALLQTRY

SEQ ID NO: 85131 - protein, 9 aa, Homo Sapiens
MEAPAAGLF

SEQ ID NO: 85132 - protein, 9 aa, Homo Sapiens
MEDEMKEYY

SEQ ID NO: 85133 - protein, 9 aa, Homo Sapiens
MEDLIHEIY

SEQ ID NO: 85134 - protein, 9 aa, Homo Sapiens
MEELFQSSF

SEQ ID NO: 85135 - protein, 9 aa, Homo Sapiens
MEFERQAEI

SEQ ID NO: 85136 - protein, 9 aa, Homo Sapiens
MEFQNTQSY

SEQ ID NO: 85137 - protein, 9 aa, Homo Sapiens
MEFSLKDLY

SEQ ID NO: 85138 - protein, 9 aa, Homo Sapiens
MEHPYFYTV

SEQ ID NO: 85139 - protein, 9 aa, Homo Sapiens
MEIDIPHVW

SEQ ID NO: 85140 - protein, 9 aa, Homo Sapiens
MEIGKTETF

SEQ ID NO: 85141 - protein, 9 aa, Homo Sapiens
MEIGMKVAL

SEQ ID NO: 85142 - protein, 9 aa, Homo Sapiens
MEKIWHHTF

SEQ ID NO: 85143 - protein, 9 aa, Homo Sapiens
MEKSFLEYY

SEQ ID NO: 85144 - protein, 9 aa, Homo Sapiens
MEKSFSDLF

SEQ ID NO: 85145 - protein, 9 aa, Homo Sapiens
MELEAMSRY

SEQ ID NO: 85146 - protein, 9 aa, Homo Sapiens
MELQQKAEF

SEQ ID NO: 85147 - protein, 9 aa, Homo Sapiens
MEMPSFYSH

SEQ ID NO: 85148 - protein, 9 aa, Homo Sapiens
MENLFINRF

SEQ ID NO: 85149 - protein, 9 aa, Homo Sapiens
MENLPLPEY

SEQ ID NO: 85150 - protein, 9 aa, Homo Sapiens
MENPFVQSM

SEQ ID NO: 85151 - protein, 9 aa, Homo Sapiens
MENRPVETY

SEQ ID NO: 85152 - protein, 9 aa, Homo Sapiens
MENTFVNSL

SEQ ID NO: 85153 - protein, 9 aa, Homo Sapiens
MERLIEFAY

SEQ ID NO: 85154 - protein, 9 aa, Homo Sapiens
MERSLPLCL

SEQ ID NO: 85155 - protein, 9 aa, Homo Sapiens
MESMLISGY

SEQ ID NO: 85156 - protein, 9 aa, Homo Sapiens
MESNLIITY

SEQ ID NO: 85157 - protein, 9 aa, Homo Sapiens
MESVVVSEY

SEQ ID NO: 85158 - protein, 9 aa, Homo Sapiens
METAVPVYF

SEQ ID NO: 85159 - protein, 9 aa, Homo Sapiens
METPSIAAH

SEQ ID NO: 85160 - protein, 9 aa, Homo Sapiens
MEVELPAAA

SEQ ID NO: 85161 - protein, 9 aa, Homo Sapiens
MEVELPYRY

SEQ ID NO: 85162 - protein, 9 aa, Homo Sapiens
MEVETICRY

SEQ ID NO: 85163 - protein, 9 aa, Homo Sapiens
MEVFLPQSY

SEQ ID NO: 85164 - protein, 9 aa, Homo Sapiens
MEVPTYLNF

SEQ ID NO: 85165 - protein, 9 aa, Homo Sapiens
MEWDKIWAF

SEQ ID NO: 85166 - protein, 9 aa, Homo Sapiens
MEYGDFVRY

SEQ ID NO: 85167 - protein, 9 aa, Homo Sapiens
MEYPNFEET

SEQ ID NO: 85168 - protein, 9 aa, Homo Sapiens
MPYLEHESF

SEQ ID NO: 85169 - protein, 9 aa, Homo Sapiens
MTAAEISKY

SEQ ID NO: 85170 - protein, 9 aa, Homo Sapiens
NAFEELVAF

SEQ ID NO: 85171 - protein, 9 aa, Homo Sapiens
NAWDKEPVL

SEQ ID NO: 85172 - protein, 9 aa, Homo Sapiens
NDVLVPKPF

SEQ ID NO: 85173 - protein, 9 aa, Homo Sapiens
NEAAYPQSF

SEQ ID NO: 85174 - protein, 9 aa, Homo Sapiens
NEADRTLIY

SEQ ID NO: 85175 - protein, 9 aa, Homo Sapiens
NEALLGELF

SEQ ID NO: 85176 - protein, 9 aa, Homo Sapiens
NEALYDICF

SEQ ID NO: 85177 - protein, 9 aa, Homo Sapiens
NEAPVYSVY

SEQ ID NO: 85178 - protein, 9 aa, Homo Sapiens
NEAQCNTAY

SEQ ID NO: 85179 - protein, 9 aa, Homo Sapiens
NEAVLHLRF

SEQ ID NO: 85180 - protein, 9 aa, Homo Sapiens
NEAVYLVRF

SEQ ID NO: 85181 - protein, 9 aa, Homo Sapiens
NECERHVIF

SEQ ID NO: 85182 - protein, 9 aa, Homo Sapiens
NECGKAFSY

SEQ ID NO: 85183 - protein, 9 aa, Homo Sapiens
NECGKAFTY

SEQ ID NO: 85184 - protein, 9 aa, Homo Sapiens
NECGKAFVY

SEQ ID NO: 85185 - protein, 9 aa, Homo Sapiens
NEEMLCQEF

SEQ ID NO: 85186 - protein, 9 aa, Homo Sapiens
NEERLVISH

SEQ ID NO: 85187 - protein, 9 aa, Homo Sapiens
NEFDRTIAE

SEQ ID NO: 85188 - protein, 9 aa, Homo Sapiens
NEFGKALLY

SEQ ID NO: 85189 - protein, 9 aa, Homo Sapiens
NEFGLVENY

SEQ ID NO: 85190 - protein, 9 aa, Homo Sapiens
NEFIFCHDF

SEQ ID NO: 85191 - protein, 9 aa, Homo Sapiens
NEFKEWQYF

SEQ ID NO: 85192 - protein, 9 aa, Homo Sapiens
NEFKNRDKY

SEQ ID NO: 85193 - protein, 9 aa, Homo Sapiens
NEFLLKNNY

SEQ ID NO: 85194 - protein, 9 aa, Homo Sapiens
NEFLLLHAF

SEQ ID NO: 85195 - protein, 9 aa, Homo Sapiens
NEFLRELSF

SEQ ID NO: 85196 - protein, 9 aa, Homo Sapiens
NEFLSPEVF

SEQ ID NO: 85197 - protein, 9 aa, Homo Sapiens
NEFNFPDPY

SEQ ID NO: 85198 - protein, 9 aa, Homo Sapiens
NEFPNPAAH

SEQ ID NO: 85199 - protein, 9 aa, Homo Sapiens
NEFPVFDEF

SEQ ID NO: 85200 - protein, 9 aa, Homo Sapiens
NEFPVPEQF

SEQ ID NO: 85201 - protein, 9 aa, Homo Sapiens
NEFQGAEAM

SEQ ID NO: 85202 - protein, 9 aa, Homo Sapiens
NEFTAEQCF

SEQ ID NO: 85203 - protein, 9 aa, Homo Sapiens
NEFVRQLEF

SEQ ID NO: 85204 - protein, 9 aa, Homo Sapiens
NEHGMETAL

SEQ ID NO: 85205 - protein, 9 aa, Homo Sapiens
NEHVLSAGF

SEQ ID NO: 85206 - protein, 9 aa, Homo Sapiens
NEIAFINTL

SEQ ID NO: 85207 - protein, 9 aa, Homo Sapiens
NEIAQCEVF

SEQ ID NO: 85208 - protein, 9 aa, Homo Sapiens
NEIGIPMVF

SEQ ID NO: 85209 - protein, 9 aa, Homo Sapiens
NEIIFPHCA

SEQ ID NO: 85210 - protein, 9 aa, Homo Sapiens
NEIIKPAKY

SEQ ID NO: 85211 - protein, 9 aa, Homo Sapiens
NEILVADTY

SEQ ID NO: 85212 - protein, 9 aa, Homo Sapiens
NEITIPVTF

SEQ ID NO: 85213 - protein, 9 aa, Homo Sapiens
NEIVLKVNY

SEQ ID NO: 85214 - protein, 9 aa, Homo Sapiens
NEKALEAVF

SEQ ID NO: 85215 - protein, 9 aa, Homo Sapiens
NEKTTKVSY

SEQ ID NO: 85216 - protein, 9 aa, Homo Sapiens
NEKVLPLAY

SEQ ID NO: 85217 - protein, 9 aa, Homo Sapiens
NELEIPGQY

SEQ ID NO: 85218 - protein, 9 aa, Homo Sapiens
NELERNITI

SEQ ID NO: 85219 - protein, 9 aa, Homo Sapiens
NELGVVVAH

SEQ ID NO: 85220 - protein, 9 aa, Homo Sapiens
NELIIPCIH

SEQ ID NO: 85221 - protein, 9 aa, Homo Sapiens
NELLEPNSF

SEQ ID NO: 85222 - protein, 9 aa, Homo Sapiens
NELNIIHKF

SEQ ID NO: 85223 - protein, 9 aa, Homo Sapiens
NELQRKDAL

SEQ ID NO: 85224 - protein, 9 aa, Homo Sapiens
NELRIVVEH

SEQ ID NO: 85225 - protein, 9 aa, Homo Sapiens
NELVRISSM

SEQ ID NO: 85226 - protein, 9 aa, Homo Sapiens
NELVSTHGY

SEQ ID NO: 85227 - protein, 9 aa, Homo Sapiens
NEMALVQEL

SEQ ID NO: 85228 - protein, 9 aa, Homo Sapiens
NEMIVTGQY

SEQ ID NO: 85229 - protein, 9 aa, Homo Sapiens
NEMLVKSQF

SEQ ID NO: 85230 - protein, 9 aa, Homo Sapiens
NENARLLTF

SEQ ID NO: 85231 - protein, 9 aa, Homo Sapiens
NENCFLVQH

SEQ ID NO: 85232 - protein, 9 aa, Homo Sapiens
NENDIITHF

SEQ ID NO: 85233 - protein, 9 aa, Homo Sapiens
NENDIRVMF

SEQ ID NO: 85234 - protein, 9 aa, Homo Sapiens
NENGHTPLM

SEQ ID NO: 85235 - protein, 9 aa, Homo Sapiens
NENHFPVIY

SEQ ID NO: 85236 - protein, 9 aa, Homo Sapiens
NENKFYNVH

SEQ ID NO: 85237 - protein, 9 aa, Homo Sapiens
NENLKKVAF

SEQ ID NO: 85238 - protein, 9 aa, Homo Sapiens
NENPLRALY

SEQ ID NO: 85239 - protein, 9 aa, Homo Sapiens
NEPELLVAH

SEQ ID NO: 85240 - protein, 9 aa, Homo Sapiens
NEQAFEEVF

SEQ ID NO: 85241 - protein, 9 aa, Homo Sapiens
NEQDLGIQY

SEQ ID NO: 85242 - protein, 9 aa, Homo Sapiens
NEQRLSNQF

SEQ ID NO: 85243 - protein, 9 aa, Homo Sapiens
NERLELEAY

SEQ ID NO: 85244 - protein, 9 aa, Homo Sapiens
NERLFDEKY

SEQ ID NO: 85245 - protein, 9 aa, Homo Sapiens
NERLISMAY

SEQ ID NO: 85246 - protein, 9 aa, Homo Sapiens
NESAERLLY

SEQ ID NO: 85247 - protein, 9 aa, Homo Sapiens
NESEEVRQF

SEQ ID NO: 85248 - protein, 9 aa, Homo Sapiens
NESEPIVVY

SEQ ID NO: 85249 - protein, 9 aa, Homo Sapiens
NESGVLLHF

SEQ ID NO: 85250 - protein, 9 aa, Homo Sapiens
NESKQEVSY

SEQ ID NO: 85251 - protein, 9 aa, Homo Sapiens
NESLVPDAY

SEQ ID NO: 85252 - protein, 9 aa, Homo Sapiens
NESSYLISH

SEQ ID NO: 85253 - protein, 9 aa, Homo Sapiens
NETDILSQY

SEQ ID NO: 85254 - protein, 9 aa, Homo Sapiens
NETLIVSKF

SEQ ID NO: 85255 - protein, 9 aa, Homo Sapiens
NETRSIIEF

SEQ ID NO: 85256 - protein, 9 aa, Homo Sapiens
NETVMPSAL

SEQ ID NO: 85257 - protein, 9 aa, Homo Sapiens
NEVDSTLTF

SEQ ID NO: 85258 - protein, 9 aa, Homo Sapiens
NEVEALRAM

SEQ ID NO: 85259 - protein, 9 aa, Homo Sapiens
NEVEKCTKY

SEQ ID NO: 85260 - protein, 9 aa, Homo Sapiens
NEVEKQWRL

SEQ ID NO: 85261 - protein, 9 aa, Homo Sapiens
NEVEQLLYY

SEQ ID NO: 85262 - protein, 9 aa, Homo Sapiens
NEVEQRHTL

SEQ ID NO: 85263 - protein, 9 aa, Homo Sapiens
NEVERTQAL

SEQ ID NO: 85264 - protein, 9 aa, Homo Sapiens
NEVIMTIGF

SEQ ID NO: 85265 - protein, 9 aa, Homo Sapiens
NEVLSITAM

SEQ ID NO: 85266 - protein, 9 aa, Homo Sapiens
NEVPEVTVF

SEQ ID NO: 85267 - protein, 9 aa, Homo Sapiens
NEWARYLYY

SEQ ID NO: 85268 - protein, 9 aa, Homo Sapiens
NEWDKIPSM

SEQ ID NO: 85269 - protein, 9 aa, Homo Sapiens
NEWSLKAEY

SEQ ID NO: 85270 - protein, 9 aa, Homo Sapiens
NEWSVPHCF

SEQ ID NO: 85271 - protein, 9 aa, Homo Sapiens
NEYESRSLW

SEQ ID NO: 85272 - protein, 9 aa, Homo Sapiens
NEYLLPESV

SEQ ID NO: 85273 - protein, 9 aa, Homo Sapiens
NEYPSRVAF

SEQ ID NO: 85274 - protein, 9 aa, Homo Sapiens
NEYPTPRSY

SEQ ID NO: 85275 - protein, 9 aa, Homo Sapiens
NEYRSVVYY

SEQ ID NO: 85276 - protein, 9 aa, Homo Sapiens
NEYSKVLQF

SEQ ID NO: 85277 - protein, 9 aa, Homo Sapiens
NEYSNIEEF

SEQ ID NO: 85278 - protein, 9 aa, Homo Sapiens
NQVIFPVSY

SEQ ID NO: 85279 - protein, 9 aa, Homo Sapiens
NVYKDEYNS

SEQ ID NO: 85280 - protein, 9 aa, Homo Sapiens
PEFMLPVHF

SEQ ID NO: 85281 - protein, 9 aa, Homo Sapiens
QECDKAFKY

SEQ ID NO: 85282 - protein, 9 aa, Homo Sapiens
QEDPLPLAF

SEQ ID NO: 85283 - protein, 9 aa, Homo Sapiens
QEEILRVPF

SEQ ID NO: 85284 - protein, 9 aa, Homo Sapiens
QEFDFIKSY

SEQ ID NO: 85285 - protein, 9 aa, Homo Sapiens
QEFGVPHQY

SEQ ID NO: 85286 - protein, 9 aa, Homo Sapiens
QEFLTKLAF

SEQ ID NO: 85287 - protein, 9 aa, Homo Sapiens
QEFNLPVRY

SEQ ID NO: 85288 - protein, 9 aa, Homo Sapiens
QEFPGSPAF

SEQ ID NO: 85289 - protein, 9 aa, Homo Sapiens
QEFPWEEEY

SEQ ID NO: 85290 - protein, 9 aa, Homo Sapiens
QEHELIESM

SEQ ID NO: 85291 - protein, 9 aa, Homo Sapiens
QEHFLIVPF

SEQ ID NO: 85292 - protein, 9 aa, Homo Sapiens
QELEIPQAY

SEQ ID NO: 85293 - protein, 9 aa, Homo Sapiens
QELLIYEAF

SEQ ID NO: 85294 - protein, 9 aa, Homo Sapiens
QELLLGKEF

SEQ ID NO: 85295 - protein, 9 aa, Homo Sapiens
QENIFPNRY

SEQ ID NO: 85296 - protein, 9 aa, Homo Sapiens
QENSVYLSY

SEQ ID NO: 85297 - protein, 9 aa, Homo Sapiens
QETQLIHVY

SEQ ID NO: 85298 - protein, 9 aa, Homo Sapiens
QEVETSVTY

SEQ ID NO: 85299 - protein, 9 aa, Homo Sapiens
QEVPIIIVF

SEQ ID NO: 85300 - protein, 9 aa, Homo Sapiens
QEVQPITSY

SEQ ID NO: 85301 - protein, 9 aa, Homo Sapiens
QEYEFEKQF

SEQ ID NO: 85302 - protein, 9 aa, Homo Sapiens
QEYLFQEQY

SEQ ID NO: 85303 - protein, 9 aa, Homo Sapiens
QEYPAIVEF

SEQ ID NO: 85304 - protein, 9 aa, Homo Sapiens
QLAGVKQQL

SEQ ID NO: 85305 - protein, 9 aa, Homo Sapiens
REFELEESY

SEQ ID NO: 85306 - protein, 9 aa, Homo Sapiens
REFNKYLAY

SEQ ID NO: 85307 - protein, 9 aa, Homo Sapiens
REFPKFFTF

SEQ ID NO: 85308 - protein, 9 aa, Homo Sapiens
RENDTITIY

SEQ ID NO: 85309 - protein, 9 aa, Homo Sapiens
REVELGLEY

SEQ ID NO: 85310 - protein, 9 aa, Homo Sapiens
REVQLPTCH

SEQ ID NO: 85311 - protein, 9 aa, Homo Sapiens
SDVEVPASV

SEQ ID NO: 85312 - protein, 9 aa, Homo Sapiens
SEAAYKEAF

SEQ ID NO: 85313 - protein, 9 aa, Homo Sapiens
SEASVFDAY

SEQ ID NO: 85314 - protein, 9 aa, Homo Sapiens
SECSFPFKY

SEQ ID NO: 85315 - protein, 9 aa, Homo Sapiens
SEDEIKKAY

SEQ ID NO: 85316 - protein, 9 aa, Homo Sapiens
SEDLLKEHY

SEQ ID NO: 85317 - protein, 9 aa, Homo Sapiens
SEEEIREAF

SEQ ID NO: 85318 - protein, 9 aa, Homo Sapiens
SEEELKKAY

SEQ ID NO: 85319 - protein, 9 aa, Homo Sapiens
SEELLREHY

SEQ ID NO: 85320 - protein, 9 aa, Homo Sapiens
SEFALRPTF

SEQ ID NO: 85321 - protein, 9 aa, Homo Sapiens
SEFELLRSY

SEQ ID NO: 85322 - protein, 9 aa, Homo Sapiens
SEFEMKVYY

SEQ ID NO: 85323 - protein, 9 aa, Homo Sapiens
SEFESKVSA

SEQ ID NO: 85324 - protein, 9 aa, Homo Sapiens
SEFGLKISF

SEQ ID NO: 85325 - protein, 9 aa, Homo Sapiens
SEFGNHYLY

SEQ ID NO: 85326 - protein, 9 aa, Homo Sapiens
SEFICRNTF

SEQ ID NO: 85327 - protein, 9 aa, Homo Sapiens
SEFLGFTSY

SEQ ID NO: 85328 - protein, 9 aa, Homo Sapiens
SEFPGAQHY

SEQ ID NO: 85329 - protein, 9 aa, Homo Sapiens
SEFQRLLGF

SEQ ID NO: 85330 - protein, 9 aa, Homo Sapiens
SEFRAFSSF

SEQ ID NO: 85331 - protein, 9 aa, Homo Sapiens
SEFTGVWKY

SEQ ID NO: 85332 - protein, 9 aa, Homo Sapiens
SEFVIPSVY

SEQ ID NO: 85333 - protein, 9 aa, Homo Sapiens
SEFWLPDTF

SEQ ID NO: 85334 - protein, 9 aa, Homo Sapiens
SEGPPLTSF

SEQ ID NO: 85335 - protein, 9 aa, Homo Sapiens
SEHAQMVAF

SEQ ID NO: 85336 - protein, 9 aa, Homo Sapiens
SEHEHFTDF

SEQ ID NO: 85337 - protein, 9 aa, Homo Sapiens
SEHELDVAL

SEQ ID NO: 85338 - protein, 9 aa, Homo Sapiens
SEHMLPTAL

SEQ ID NO: 85339 - protein, 9 aa, Homo Sapiens
SEHSIIKDF

SEQ ID NO: 85340 - protein, 9 aa, Homo Sapiens
SEHVFDHPW

SEQ ID NO: 85341 - protein, 9 aa, Homo Sapiens
SEHVFQILF

SEQ ID NO: 85342 - protein, 9 aa, Homo Sapiens
SEIEAKVRY

SEQ ID NO: 85343 - protein, 9 aa, Homo Sapiens
SEIELFRVF

SEQ ID NO: 85344 - protein, 9 aa, Homo Sapiens
SEIFLHESY

SEQ ID NO: 85345 - protein, 9 aa, Homo Sapiens
SELHEHAAY

SEQ ID NO: 85346 - protein, 9 aa, Homo Sapiens
SELLWQVAY

SEQ ID NO: 85347 - protein, 9 aa, Homo Sapiens
SELSDLHAH

SEQ ID NO: 85348 - protein, 9 aa, Homo Sapiens
SEMEMAHLY

SEQ ID NO: 85349 - protein, 9 aa, Homo Sapiens
SEMILVLEY

SEQ ID NO: 85350 - protein, 9 aa, Homo Sapiens
SEMLQLCSY

SEQ ID NO: 85351 - protein, 9 aa, Homo Sapiens
SENDMRFVY

SEQ ID NO: 85352 - protein, 9 aa, Homo Sapiens
SENELKKAY

SEQ ID NO: 85353 - protein, 9 aa, Homo Sapiens
SENKLPAEL

SEQ ID NO: 85354 - protein, 9 aa, Homo Sapiens
SENPMTETF

SEQ ID NO: 85355 - protein, 9 aa, Homo Sapiens
SEREAIEVF

SEQ ID NO: 85356 - protein, 9 aa, Homo Sapiens
SESPIVVVL

SEQ ID NO: 85357 - protein, 9 aa, Homo Sapiens
SESTAIISY

SEQ ID NO: 85358 - protein, 9 aa, Homo Sapiens
SETALETTY

SEQ ID NO: 85359 - protein, 9 aa, Homo Sapiens
SETALPGAF

SEQ ID NO: 85360 - protein, 9 aa, Homo Sapiens
SETAMFSVY

SEQ ID NO: 85361 - protein, 9 aa, Homo Sapiens
SETELKDTY

SEQ ID NO: 85362 - protein, 9 aa, Homo Sapiens
SETTLQSTY

SEQ ID NO: 85363 - protein, 9 aa, Homo Sapiens
SETVLNLAF

SEQ ID NO: 85364 - protein, 9 aa, Homo Sapiens
SEVALQTAL

SEQ ID NO: 85365 - protein, 9 aa, Homo Sapiens
SEVILHHEY

SEQ ID NO: 85366 - protein, 9 aa, Homo Sapiens
SEVILPVPA

SEQ ID NO: 85367 - protein, 9 aa, Homo Sapiens
SEWDGIVTV

SEQ ID NO: 85368 - protein, 9 aa, Homo Sapiens
SEYFYQEEF

SEQ ID NO: 85369 - protein, 9 aa, Homo Sapiens
SEYGSIIAF

SEQ ID NO: 85370 - protein, 9 aa, Homo Sapiens
SEYLYQEQY

SEQ ID NO: 85371 - protein, 9 aa, Homo Sapiens
SEYNNFKSM

SEQ ID NO: 85372 - protein, 9 aa, Homo Sapiens
SEYQRFAVM

SEQ ID NO: 85373 - protein, 9 aa, Homo Sapiens
SEYRFPEEL

SEQ ID NO: 85374 - protein, 9 aa, Homo Sapiens
SEYRWHINF

SEQ ID NO: 85375 - protein, 9 aa, Homo Sapiens
STPTLIPAF

SEQ ID NO: 85376 - protein, 9 aa, Homo Sapiens
TEAMLYEKF

SEQ ID NO: 85377 - protein, 9 aa, Homo Sapiens
TEEAIIYSY

SEQ ID NO: 85378 - protein, 9 aa, Homo Sapiens
TEEELKVAH

SEQ ID NO: 85379 - protein, 9 aa, Homo Sapiens
TEEILEKAF

SEQ ID NO: 85380 - protein, 9 aa, Homo Sapiens
TEEPLKQSF

SEQ ID NO: 85381 - protein, 9 aa, Homo Sapiens
TEETLKESF

SEQ ID NO: 85382 - protein, 9 aa, Homo Sapiens
TEETLQEVF

SEQ ID NO: 85383 - protein, 9 aa, Homo Sapiens
TEFDSTVTH

SEQ ID NO: 85384 - protein, 9 aa, Homo Sapiens
TEFGAFVGH

SEQ ID NO: 85385 - protein, 9 aa, Homo Sapiens
TEFGGVTQH

SEQ ID NO: 85386 - protein, 9 aa, Homo Sapiens
TEFNGIRDY

SEQ ID NO: 85387 - protein, 9 aa, Homo Sapiens
TEFPIIKMY

SEQ ID NO: 85388 - protein, 9 aa, Homo Sapiens
TEFPSKQVF

SEQ ID NO: 85389 - protein, 9 aa, Homo Sapiens
TEFQFRGGF

SEQ ID NO: 85390 - protein, 9 aa, Homo Sapiens
TEFRNFIVW

SEQ ID NO: 85391 - protein, 9 aa, Homo Sapiens
TEFSLPKFY

SEQ ID NO: 85392 - protein, 9 aa, Homo Sapiens
TEHDVNVAF

SEQ ID NO: 85393 - protein, 9 aa, Homo Sapiens
TEHEIQEWY

SEQ ID NO: 85394 - protein, 9 aa, Homo Sapiens
TEHWLVRIY

SEQ ID NO: 85395 - protein, 9 aa, Homo Sapiens
TEIDPICAL

SEQ ID NO: 85396 - protein, 9 aa, Homo Sapiens
TEIEHKVAF

SEQ ID NO: 85397 - protein, 9 aa, Homo Sapiens
TEIEKGSSY

SEQ ID NO: 85398 - protein, 9 aa, Homo Sapiens
TEIERLITW

SEQ ID NO: 85399 - protein, 9 aa, Homo Sapiens
TEIKVGVAY

SEQ ID NO: 85400 - protein, 9 aa, Homo Sapiens
TEILIPEAL

SEQ ID NO: 85401 - protein, 9 aa, Homo Sapiens
TEIQLVQSL

SEQ ID NO: 85402 - protein, 9 aa, Homo Sapiens
TEIRHEVSF

SEQ ID NO: 85403 - protein, 9 aa, Homo Sapiens
TEITKGWLY

SEQ ID NO: 85404 - protein, 9 aa, Homo Sapiens
TELERKLTF

SEQ ID NO: 85405 - protein, 9 aa, Homo Sapiens
TELERSLEY

SEQ ID NO: 85406 - protein, 9 aa, Homo Sapiens
TELLLKEGF

SEQ ID NO: 85407 - protein, 9 aa, Homo Sapiens
TELPLTVSY

SEQ ID NO: 85408 - protein, 9 aa, Homo Sapiens
TELPLVEKF

SEQ ID NO: 85409 - protein, 9 aa, Homo Sapiens
TELPQFVSY

SEQ ID NO: 85410 - protein, 9 aa, Homo Sapiens
TELQLHEAF

SEQ ID NO: 85411 - protein, 9 aa, Homo Sapiens
TELSFSREY

SEQ ID NO: 85412 - protein, 9 aa, Homo Sapiens
TEMIHEAAY

SEQ ID NO: 85413 - protein, 9 aa, Homo Sapiens
TENDHVLLF

SEQ ID NO: 85414 - protein, 9 aa, Homo Sapiens
TENDIRVMF

SEQ ID NO: 85415 - protein, 9 aa, Homo Sapiens
TENKLYLVF

SEQ ID NO: 85416 - protein, 9 aa, Homo Sapiens
TENVVVCQY

SEQ ID NO: 85417 - protein, 9 aa, Homo Sapiens
TEPELLVAH

SEQ ID NO: 85418 - protein, 9 aa, Homo Sapiens
TEQDLKEYF

SEQ ID NO: 85419 - protein, 9 aa, Homo Sapiens
TEQTVKVAF

SEQ ID NO: 85420 - protein, 9 aa, Homo Sapiens
TESELQQSY

SEQ ID NO: 85421 - protein, 9 aa, Homo Sapiens
TETETIAKY

SEQ ID NO: 85422 - protein, 9 aa, Homo Sapiens
TETLIKAVY

SEQ ID NO: 85423 - protein, 9 aa, Homo Sapiens
TETQVKIWF

SEQ ID NO: 85424 - protein, 9 aa, Homo Sapiens
TEVAIVVKY

SEQ ID NO: 85425 - protein, 9 aa, Homo Sapiens
TEVEMKEIY

SEQ ID NO: 85426 - protein, 9 aa, Homo Sapiens
TEVNMARVY

SEQ ID NO: 85427 - protein, 9 aa, Homo Sapiens
TFEIIVHQY

SEQ ID NO: 85428 - protein, 9 aa, Homo Sapiens
VAPGKDLTK

SEQ ID NO: 85429 - protein, 9 aa, Homo Sapiens
VDVQIPECF

SEQ ID NO: 85430 - protein, 9 aa, Homo Sapiens
VEAETTTTF

SEQ ID NO: 85431 - protein, 9 aa, Homo Sapiens
VEAPMREEY

SEQ ID NO: 85432 - protein, 9 aa, Homo Sapiens
VEDIIHESY

SEQ ID NO: 85433 - protein, 9 aa, Homo Sapiens
VEEILSVAY

SEQ ID NO: 85434 - protein, 9 aa, Homo Sapiens
VEELERWVY

SEQ ID NO: 85435 - protein, 9 aa, Homo Sapiens
VEFESQTYY

SEQ ID NO: 85436 - protein, 9 aa, Homo Sapiens
VEFHDLVTF

SEQ ID NO: 85437 - protein, 9 aa, Homo Sapiens
VEFILEPLY

SEQ ID NO: 85438 - protein, 9 aa, Homo Sapiens
VEFNHAINY

SEQ ID NO: 85439 - protein, 9 aa, Homo Sapiens
VEFPYQYDF

SEQ ID NO: 85440 - protein, 9 aa, Homo Sapiens
VEFQEAQAY

SEQ ID NO: 85441 - protein, 9 aa, Homo Sapiens
VEFSGKPAA

SEQ ID NO: 85442 - protein, 9 aa, Homo Sapiens
VEFTCHTAF

SEQ ID NO: 85443 - protein, 9 aa, Homo Sapiens
VEHIIREDY

SEQ ID NO: 85444 - protein, 9 aa, Homo Sapiens
VEHILKIGY

SEQ ID NO: 85445 - protein, 9 aa, Homo Sapiens
VEIEFLPVY

SEQ ID NO: 85446 - protein, 9 aa, Homo Sapiens
VEIEYVEKY

SEQ ID NO: 85447 - protein, 9 aa, Homo Sapiens
VEISLGRVF

SEQ ID NO: 85448 - protein, 9 aa, Homo Sapiens
VEIYDRREY

SEQ ID NO: 85449 - protein, 9 aa, Homo Sapiens
VEKALQAAY

SEQ ID NO: 85450 - protein, 9 aa, Homo Sapiens
VELKNGETY

SEQ ID NO: 85451 - protein, 9 aa, Homo Sapiens
VELLMHNDY

SEQ ID NO: 85452 - protein, 9 aa, Homo Sapiens
VENIFHVSF

SEQ ID NO: 85453 - protein, 9 aa, Homo Sapiens
VENLLHRTY

SEQ ID NO: 85454 - protein, 9 aa, Homo Sapiens
VERIMSETY

SEQ ID NO: 85455 - protein, 9 aa, Homo Sapiens
VERKFVDKY

SEQ ID NO: 85456 - protein, 9 aa, Homo Sapiens
VERVIVVSM

SEQ ID NO: 85457 - protein, 9 aa, Homo Sapiens
VESELLHTY

SEQ ID NO: 85458 - protein, 9 aa, Homo Sapiens
VESPLSVSF

SEQ ID NO: 85459 - protein, 9 aa, Homo Sapiens
VETDGFISY

SEQ ID NO: 85460 - protein, 9 aa, Homo Sapiens
VETKIDVSY

SEQ ID NO: 85461 - protein, 9 aa, Homo Sapiens
VETNLPLAM

SEQ ID NO: 85462 - protein, 9 aa, Homo Sapiens
VEVQLPELF

SEQ ID NO: 85463 - protein, 9 aa, Homo Sapiens
VEWEGTTPY

SEQ ID NO: 85464 - protein, 9 aa, Homo Sapiens
VEYQMKSVL

SEQ ID NO: 85465 - protein, 9 aa, Homo Sapiens
WENSFVSVY

SEQ ID NO: 85466 - protein, 9 aa, Homo Sapiens
YEANLPENF

SEQ ID NO: 85467 - protein, 9 aa, Homo Sapiens
YEAVPVEAY

SEQ ID NO: 85468 - protein, 9 aa, Homo Sapiens
YEAYLPETF

SEQ ID NO: 85469 - protein, 9 aa, Homo Sapiens
YEDGSIRIF

SEQ ID NO: 85470 - protein, 9 aa, Homo Sapiens
YEEMLKEGY

SEQ ID NO: 85471 - protein, 9 aa, Homo Sapiens
YEEQFVTLF

SEQ ID NO: 85472 - protein, 9 aa, Homo Sapiens
YEFDLIDGY

SEQ ID NO: 85473 - protein, 9 aa, Homo Sapiens
YEFERTTSI

SEQ ID NO: 85474 - protein, 9 aa, Homo Sapiens
YEFFNEQKY

SEQ ID NO: 85475 - protein, 9 aa, Homo Sapiens
YEFPHLQNF

SEQ ID NO: 85476 - protein, 9 aa, Homo Sapiens
YEHAQTYYY

SEQ ID NO: 85477 - protein, 9 aa, Homo Sapiens
YEHFYEVAY

SEQ ID NO: 85478 - protein, 9 aa, Homo Sapiens
YEHLQQYSY

SEQ ID NO: 85479 - protein, 9 aa, Homo Sapiens
YEHNFQIMY

SEQ ID NO: 85480 - protein, 9 aa, Homo Sapiens
YEHRYVELF

SEQ ID NO: 85481 - protein, 9 aa, Homo Sapiens
YEKDFQSCF

SEQ ID NO: 85482 - protein, 9 aa, Homo Sapiens
YELEKLWTL

SEQ ID NO: 85483 - protein, 9 aa, Homo Sapiens
YELLMPHRI

SEQ ID NO: 85484 - protein, 9 aa, Homo Sapiens
YELPWVEKY

SEQ ID NO: 85485 - protein, 9 aa, Homo Sapiens
YENIIVHTY

SEQ ID NO: 85486 - protein, 9 aa, Homo Sapiens
YERALDVDY

SEQ ID NO: 85487 - protein, 9 aa, Homo Sapiens
YERRLIEKY

SEQ ID NO: 85488 - protein, 9 aa, Homo Sapiens
YESPRKICY

SEQ ID NO: 85489 - protein, 9 aa, Homo Sapiens
YETCYVTSH

SEQ ID NO: 85490 - protein, 9 aa, Homo Sapiens
YEWVNPAAY

SEQ ID NO: 85491 - protein, 9 aa, Homo Sapiens
YEYCIKEGY

SEQ ID NO: 85492 - protein, 10 aa, Homo Sapiens
DEAKSLIERY

SEQ ID NO: 85493 - protein, 10 aa, Homo Sapiens
DEAPVLDVRY

SEQ ID NO: 85494 - protein, 10 aa, Homo Sapiens
DEDTGTFRIY

SEQ ID NO: 85495 - protein, 10 aa, Homo Sapiens
DEEAGGRPAM

SEQ ID NO: 85496 - protein, 10 aa, Homo Sapiens
DEFEQGTYIY

SEQ ID NO: 85497 - protein, 10 aa, Homo Sapiens
DEFPGSSATY

SEQ ID NO: 85498 - protein, 10 aa, Homo Sapiens
DEFQLLQAQY

SEQ ID NO: 85499 - protein, 10 aa, Homo Sapiens
DEFQRGDQLF

SEQ ID NO: 85500 - protein, 10 aa, Homo Sapiens
DEIELTGIYH

SEQ ID NO: 85501 - protein, 10 aa, Homo Sapiens
DEIGLPKIFY

SEQ ID NO: 85502 - protein, 10 aa, Homo Sapiens
DEIQTVHSEY

SEQ ID NO: 85503 - protein, 10 aa, Homo Sapiens
DEISFADFKF

SEQ ID NO: 85504 - protein, 10 aa, Homo Sapiens
DELGVKALTY

SEQ ID NO: 85505 - protein, 10 aa, Homo Sapiens
DELQIPVKWI

SEQ ID NO: 85506 - protein, 10 aa, Homo Sapiens
DEPLLKHWEF

SEQ ID NO: 85507 - protein, 10 aa, Homo Sapiens
DEQKITEMVY

SEQ ID NO: 85508 - protein, 10 aa, Homo Sapiens
DEVQPNGKIF

SEQ ID NO: 85509 - protein, 10 aa, Homo Sapiens
DEVQVVRGHY

SEQ ID NO: 85510 - protein, 10 aa, Homo Sapiens
DEYDFKCKTL

SEQ ID NO: 85511 - protein, 10 aa, Homo Sapiens
DEYKVHKEGY

SEQ ID NO: 85512 - protein, 10 aa, Homo Sapiens
DEYKVNKEGY

SEQ ID NO: 85513 - protein, 10 aa, Homo Sapiens
DEYMYYLIEH

SEQ ID NO: 85514 - protein, 10 aa, Homo Sapiens
DEYSIFPQTY

SEQ ID NO: 85515 - protein, 10 aa, Homo Sapiens
EEALILDNKY

SEQ ID NO: 85516 - protein, 10 aa, Homo Sapiens
EEARPLVEFY

SEQ ID NO: 85517 - protein, 10 aa, Homo Sapiens
EEFDARWVTY

SEQ ID NO: 85518 - protein, 10 aa, Homo Sapiens
EEFELLGKAY

SEQ ID NO: 85519 - protein, 10 aa, Homo Sapiens
EEQLQQIRAE

SEQ ID NO: 85520 - protein, 10 aa, Homo Sapiens
EEVLIHGVSY

SEQ ID NO: 85521 - protein, 10 aa, Homo Sapiens
EEVLIPDQKY

SEQ ID NO: 85522 - protein, 10 aa, Homo Sapiens
EPRKQAGSLA

SEQ ID NO: 85523 - protein, 10 aa, Homo Sapiens
HEAFIEEGTF

SEQ ID NO: 85524 - protein, 10 aa, Homo Sapiens
HEAVIEKHVF

SEQ ID NO: 85525 - protein, 10 aa, Homo Sapiens
HECASINRIY

SEQ ID NO: 85526 - protein, 10 aa, Homo Sapiens
HESGHAIIAY

SEQ ID NO: 85527 - protein, 10 aa, Homo Sapiens
HETALQGNVF

SEQ ID NO: 85528 - protein, 10 aa, Homo Sapiens
HEVQLFSSQY

SEQ ID NO: 85529 - protein, 10 aa, Homo Sapiens
IAGDTLSKVF

SEQ ID NO: 85530 - protein, 10 aa, Homo Sapiens
IEYSFSRHLY

SEQ ID NO: 85531 - protein, 10 aa, Homo Sapiens
IRLENEIQTY

SEQ ID NO: 85532 - protein, 10 aa, Homo Sapiens
LEDFLYHEGY

SEQ ID NO: 85533 - protein, 10 aa, Homo Sapiens
MEFPCNINVF

SEQ ID NO: 85534 - protein, 10 aa, Homo Sapiens
MEVEVDGQKF

SEQ ID NO: 85535 - protein, 10 aa, Homo Sapiens
NEARLRNLTY

SEQ ID NO: 85536 - protein, 10 aa, Homo Sapiens
NEFSLKGVDF

SEQ ID NO: 85537 - protein, 10 aa, Homo Sapiens
NEHDYAKAAF

SEQ ID NO: 85538 - protein, 10 aa, Homo Sapiens
NEIEDTFRQF

SEQ ID NO: 85539 - protein, 10 aa, Homo Sapiens
NEIESGKIIF

SEQ ID NO: 85540 - protein, 10 aa, Homo Sapiens
NEIVMMNHVY

SEQ ID NO: 85541 - protein, 10 aa, Homo Sapiens
NELDLKLVSF

SEQ ID NO: 85542 - protein, 10 aa, Homo Sapiens
NELSYKTIVH

SEQ ID NO: 85543 - protein, 10 aa, Homo Sapiens
NEMEAPTTAY

SEQ ID NO: 85544 - protein, 10 aa, Homo Sapiens
NEMHSLLERY

SEQ ID NO: 85545 - protein, 10 aa, Homo Sapiens
NEVLIHSSQY

SEQ ID NO: 85546 - protein, 10 aa, Homo Sapiens
NEVSVHEQEY

SEQ ID NO: 85547 - protein, 10 aa, Homo Sapiens
NEYEAEKIEY

SEQ ID NO: 85548 - protein, 10 aa, Homo Sapiens
QAKADLQEAL

SEQ ID NO: 85549 - protein, 10 aa, Homo Sapiens
SQTEKPAVCY

SEQ ID NO: 85550 - protein, 10 aa, Homo Sapiens
TEKDYREIIH

SEQ ID NO: 85551 - protein, 10 aa, Homo Sapiens
VDAGPPTHAF

SEQ ID NO: 85552 - protein, 10 aa, Homo Sapiens
VEHDFIMATY

SEQ ID NO: 85553 - protein, 10 aa, Homo Sapiens
YEADVAQLEY

SEQ ID NO: 85554 - protein, 10 aa, Homo Sapiens
YEAPSLATGY

SEQ ID NO: 85555 - protein, 10 aa, Homo Sapiens
YEVEIDGKTY

SEQ ID NO: 85556 - protein, 10 aa, Homo Sapiens
YGPPGTGKTL

SEQ ID NO: 85557 - protein, 11 aa, Homo Sapiens
AEQRGELAIKD

SEQ ID NO: 85558 - protein, 11 aa, Homo Sapiens
DDFQLQPPVTF

SEQ ID NO: 85559 - protein, 11 aa, Homo Sapiens
DDILIKQDQTL

SEQ ID NO: 85560 - protein, 11 aa, Homo Sapiens
DEELLGDGHSY

SEQ ID NO: 85561 - protein, 11 aa, Homo Sapiens
DEFESGISQAL

SEQ ID NO: 85562 - protein, 11 aa, Homo Sapiens
DEHGIDPTGTY

SEQ ID NO: 85563 - protein, 11 aa, Homo Sapiens
DEHKFRKPTAL

SEQ ID NO: 85564 - protein, 11 aa, Homo Sapiens
DEIILPRGLEY

SEQ ID NO: 85565 - protein, 11 aa, Homo Sapiens
DEISLRPAQSF

SEQ ID NO: 85566 - protein, 11 aa, Homo Sapiens
DELEIIEGMKF

SEQ ID NO: 85567 - protein, 11 aa, Homo Sapiens
DESQVVTRYAY

SEQ ID NO: 85568 - protein, 11 aa, Homo Sapiens
DEYEMKDRVTY

SEQ ID NO: 85569 - protein, 11 aa, Homo Sapiens
DIDAFEFHEAF

SEQ ID NO: 85570 - protein, 11 aa, Homo Sapiens
EEAKVIGMSVY

SEQ ID NO: 85571 - protein, 11 aa, Homo Sapiens
FEGGEFIFTEM

SEQ ID NO: 85572 - protein, 11 aa, Homo Sapiens
IEYPTGSGNVY

SEQ ID NO: 85573 - protein, 11 aa, Homo Sapiens
ISATVVEIAGY

SEQ ID NO: 85574 - protein, 11 aa, Homo Sapiens
KKDVDNAYMIK

SEQ ID NO: 85575 - protein, 11 aa, Homo Sapiens
LEAAQRAVGVG

SEQ ID NO: 85576 - protein, 11 aa, Homo Sapiens
LEKPNGATPVF

SEQ ID NO: 85577 - protein, 11 aa, Homo Sapiens
MEVDSGKKMVF

SEQ ID NO: 85578 - protein, 11 aa, Homo Sapiens
NDIQLSRDMTM

SEQ ID NO: 85579 - protein, 11 aa, Homo Sapiens
NELFLPGRMAY

SEQ ID NO: 85580 - protein, 11 aa, Homo Sapiens
NEMIIGGGMAF

SEQ ID NO: 85581 - protein, 11 aa, Homo Sapiens
NEYQLIDCAQY

SEQ ID NO: 85582 - protein, 11 aa, Homo Sapiens
QSGAVAAGPLL

SEQ ID NO: 85583 - protein, 11 aa, Homo Sapiens
SEFLYDKALTF

SEQ ID NO: 85584 - protein, 11 aa, Homo Sapiens
TEFQLGSKLVY

SEQ ID NO: 85585 - protein, 11 aa, Homo Sapiens
TEFYLGKRCAY

SEQ ID NO: 85586 - protein, 11 aa, Homo Sapiens
TELALTMNHVY

SEQ ID NO: 85587 - protein, 11 aa, Homo Sapiens
TEYAFSLDSKY

SEQ ID NO: 85588 - protein, 11 aa, Homo Sapiens
TEYPCGSGNVY

SEQ ID NO: 85589 - protein, 11 aa, Homo Sapiens
VAPGKDLTKTL

SEQ ID NO: 85590 - protein, 11 aa, Homo Sapiens
VEANLGTAMTY

SEQ ID NO: 85591 - protein, 11 aa, Homo Sapiens
VEFSYDENTVY

SEQ ID NO: 85592 - protein, 11 aa, Homo Sapiens
VELELQQIEQK

SEQ ID NO: 85593 - protein, 11 aa, Homo Sapiens
YVDAGPPTHAF

SEQ ID NO: 85594 - protein, 8 aa, Homo Sapiens
FSPVGSVL

SEQ ID NO: 85595 - protein, 8 aa, Homo Sapiens
IVKWDRDM

SEQ ID NO: 85596 - protein, 8 aa, Homo Sapiens
RIDKPILK

SEQ ID NO: 85597 - protein, 8 aa, Homo Sapiens
RLFGIRAK

SEQ ID NO: 85598 - protein, 8 aa, Homo Sapiens
RYNGLIHR

SEQ ID NO: 85599 - protein, 9 aa, Homo Sapiens
ALRRLLLLL

SEQ ID NO: 85600 - protein, 9 aa, Homo Sapiens
ARAANMFKM

SEQ ID NO: 85601 - protein, 9 aa, Homo Sapiens
ARAELEMRL

SEQ ID NO: 85602 - protein, 9 aa, Homo Sapiens
ARAFIILSV

SEQ ID NO: 85603 - protein, 9 aa, Homo Sapiens
ARAFPMPGF

SEQ ID NO: 85604 - protein, 9 aa, Homo Sapiens
ARAGALFQL

SEQ ID NO: 85605 - protein, 9 aa, Homo Sapiens
ARAKFIPLI

SEQ ID NO: 85606 - protein, 9 aa, Homo Sapiens
ARAKIPLGF

SEQ ID NO: 85607 - protein, 9 aa, Homo Sapiens
ARALLLPLL

SEQ ID NO: 85608 - protein, 9 aa, Homo Sapiens
ARANLRLTL

SEQ ID NO: 85609 - protein, 9 aa, Homo Sapiens
ARARFALGL

SEQ ID NO: 85610 - protein, 9 aa, Homo Sapiens
ARARLLTEI

SEQ ID NO: 85611 - protein, 9 aa, Homo Sapiens
ARASLIPEF

SEQ ID NO: 85612 - protein, 9 aa, Homo Sapiens
ARFALTVVR

SEQ ID NO: 85613 - protein, 9 aa, Homo Sapiens
ARFEGDFKL

SEQ ID NO: 85614 - protein, 9 aa, Homo Sapiens
ARFEQLISR

SEQ ID NO: 85615 - protein, 9 aa, Homo Sapiens
ARFETQVRL

SEQ ID NO: 85616 - protein, 9 aa, Homo Sapiens
ARFFKLHER

SEQ ID NO: 85617 - protein, 9 aa, Homo Sapiens
ARFFKQPTF

SEQ ID NO: 85618 - protein, 9 aa, Homo Sapiens
ARFGLIQSM

SEQ ID NO: 85619 - protein, 9 aa, Homo Sapiens
ARFGSVNEL

SEQ ID NO: 85620 - protein, 9 aa, Homo Sapiens
ARFKERVGY

SEQ ID NO: 85621 - protein, 9 aa, Homo Sapiens
ARFKLWYTL

SEQ ID NO: 85622 - protein, 9 aa, Homo Sapiens
ARFLFTTGF

SEQ ID NO: 85623 - protein, 9 aa, Homo Sapiens
ARFPETPAF

SEQ ID NO: 85624 - protein, 9 aa, Homo Sapiens
ARFPSTFSI

SEQ ID NO: 85625 - protein, 9 aa, Homo Sapiens
ARFRNISRI

SEQ ID NO: 85626 - protein, 9 aa, Homo Sapiens
ARFSGNLLV

SEQ ID NO: 85627 - protein, 9 aa, Homo Sapiens
ARFSPKVSL

SEQ ID NO: 85628 - protein, 9 aa, Homo Sapiens
ARFVNVLGY

SEQ ID NO: 85629 - protein, 9 aa, Homo Sapiens
ARFYAVQKL

SEQ ID NO: 85630 - protein, 9 aa, Homo Sapiens
ARGMFVFGY

SEQ ID NO: 85631 - protein, 9 aa, Homo Sapiens
ARHDLLPHL

SEQ ID NO: 85632 - protein, 9 aa, Homo Sapiens
ARHEHQVML

SEQ ID NO: 85633 - protein, 9 aa, Homo Sapiens
ARHEYTFSI

SEQ ID NO: 85634 - protein, 9 aa, Homo Sapiens
ARHFQPFAR

SEQ ID NO: 85635 - protein, 9 aa, Homo Sapiens
ARHGEKLLL

SEQ ID NO: 85636 - protein, 9 aa, Homo Sapiens
ARHNLIINI

SEQ ID NO: 85637 - protein, 9 aa, Homo Sapiens
ARHSLLQTL

SEQ ID NO: 85638 - protein, 9 aa, Homo Sapiens
ARHVVAVVL

SEQ ID NO: 85639 - protein, 9 aa, Homo Sapiens
ARHYYFLGR

SEQ ID NO: 85640 - protein, 9 aa, Homo Sapiens
ARIAKGLRL

SEQ ID NO: 85641 - protein, 9 aa, Homo Sapiens
ARIEIGLHY

SEQ ID NO: 85642 - protein, 9 aa, Homo Sapiens
ARIFKAWAV

SEQ ID NO: 85643 - protein, 9 aa, Homo Sapiens
ARIFLEESL

SEQ ID NO: 85644 - protein, 9 aa, Homo Sapiens
ARIFQFQNF

SEQ ID NO: 85645 - protein, 9 aa, Homo Sapiens
ARIKINEEF

SEQ ID NO: 85646 - protein, 9 aa, Homo Sapiens
ARILFLLQL

SEQ ID NO: 85647 - protein, 9 aa, Homo Sapiens
ARILIQERY

SEQ ID NO: 85648 - protein, 9 aa, Homo Sapiens
ARINLLVAI

SEQ ID NO: 85649 - protein, 9 aa, Homo Sapiens
ARIPLNPVL

SEQ ID NO: 85650 - protein, 9 aa, Homo Sapiens
ARIQPMPYF

SEQ ID NO: 85651 - protein, 9 aa, Homo Sapiens
ARIWLFVGF

SEQ ID NO: 85652 - protein, 9 aa, Homo Sapiens
ARKDIVARL

SEQ ID NO: 85653 - protein, 9 aa, Homo Sapiens
ARKDNVIRL

SEQ ID NO: 85654 - protein, 9 aa, Homo Sapiens
ARKHFVLLL

SEQ ID NO: 85655 - protein, 9 aa, Homo Sapiens
ARKQIVINL

SEQ ID NO: 85656 - protein, 9 aa, Homo Sapiens
ARLAQRIDF

SEQ ID NO: 85657 - protein, 9 aa, Homo Sapiens
ARLASLMNL

SEQ ID NO: 85658 - protein, 9 aa, Homo Sapiens
ARLDFVVRY

SEQ ID NO: 85659 - protein, 9 aa, Homo Sapiens
ARLDHKFDL

SEQ ID NO: 85660 - protein, 9 aa, Homo Sapiens
ARLDLLYRL

SEQ ID NO: 85661 - protein, 9 aa, Homo Sapiens
ARLEINVLK

SEQ ID NO: 85662 - protein, 9 aa, Homo Sapiens
ARLEKAIAF

SEQ ID NO: 85663 - protein, 9 aa, Homo Sapiens
ARLFGIRAK

SEQ ID NO: 85664 - protein, 9 aa, Homo Sapiens
ARLFGLAQR

SEQ ID NO: 85665 - protein, 9 aa, Homo Sapiens
ARLFIFETF

SEQ ID NO: 85666 - protein, 9 aa, Homo Sapiens
ARLGITMKA

SEQ ID NO: 85667 - protein, 9 aa, Homo Sapiens
ARLGVISKV

SEQ ID NO: 85668 - protein, 9 aa, Homo Sapiens
ARLGVVTGL

SEQ ID NO: 85669 - protein, 9 aa, Homo Sapiens
ARLGYKIKF

SEQ ID NO: 85670 - protein, 9 aa, Homo Sapiens
ARLKDIIVM

SEQ ID NO: 85671 - protein, 9 aa, Homo Sapiens
ARLKEVLEY

SEQ ID NO: 85672 - protein, 9 aa, Homo Sapiens
ARLKILETL

SEQ ID NO: 85673 - protein, 9 aa, Homo Sapiens
ARLLLIFDY

SEQ ID NO: 85674 - protein, 9 aa, Homo Sapiens
ARLNWILHF

SEQ ID NO: 85675 - protein, 9 aa, Homo Sapiens
ARLNYLLRV

SEQ ID NO: 85676 - protein, 9 aa, Homo Sapiens
ARLPLRLFL

SEQ ID NO: 85677 - protein, 9 aa, Homo Sapiens
ARLPLVNSY

SEQ ID NO: 85678 - protein, 9 aa, Homo Sapiens
ARLPSLNKL

SEQ ID NO: 85679 - protein, 9 aa, Homo Sapiens
ARLPWAGQL

SEQ ID NO: 85680 - protein, 9 aa, Homo Sapiens
ARLQLQLAY

SEQ ID NO: 85681 - protein, 9 aa, Homo Sapiens
ARLQTALLV

SEQ ID NO: 85682 - protein, 9 aa, Homo Sapiens
ARLREFWMR

SEQ ID NO: 85683 - protein, 9 aa, Homo Sapiens
ARLSALYKL

SEQ ID NO: 85684 - protein, 9 aa, Homo Sapiens
ARLSIRPGL

SEQ ID NO: 85685 - protein, 9 aa, Homo Sapiens
ARLTDYVAF

SEQ ID NO: 85686 - protein, 9 aa, Homo Sapiens
ARLVLLKKL

SEQ ID NO: 85687 - protein, 9 aa, Homo Sapiens
ARLWFHSNF

SEQ ID NO: 85688 - protein, 9 aa, Homo Sapiens
ARLYLLQQI

SEQ ID NO: 85689 - protein, 9 aa, Homo Sapiens
ARLYYYWER

SEQ ID NO: 85690 - protein, 9 aa, Homo Sapiens
ARMNLAIAL

SEQ ID NO: 85691 - protein, 9 aa, Homo Sapiens
ARMWKTLTF

SEQ ID NO: 85692 - protein, 9 aa, Homo Sapiens
ARNALQVDL

SEQ ID NO: 85693 - protein, 9 aa, Homo Sapiens
ARNDYLLTL

SEQ ID NO: 85694 - protein, 9 aa, Homo Sapiens
ARNEYLLNL

SEQ ID NO: 85695 - protein, 9 aa, Homo Sapiens
ARNEYLLSL

SEQ ID NO: 85696 - protein, 9 aa, Homo Sapiens
ARNLISPRM

SEQ ID NO: 85697 - protein, 9 aa, Homo Sapiens
ARNLIYFGF

SEQ ID NO: 85698 - protein, 9 aa, Homo Sapiens
ARNNVVWAL

SEQ ID NO: 85699 - protein, 9 aa, Homo Sapiens
ARNQLRMYL

SEQ ID NO: 85700 - protein, 9 aa, Homo Sapiens
ARNQLTFLL

SEQ ID NO: 85701 - protein, 9 aa, Homo Sapiens
ARSELLTTV

SEQ ID NO: 85702 - protein, 9 aa, Homo Sapiens
ARSEQFINL

SEQ ID NO: 85703 - protein, 9 aa, Homo Sapiens
ARSLQKLGF

SEQ ID NO: 85704 - protein, 9 aa, Homo Sapiens
ARSVPRTLL

SEQ ID NO: 85705 - protein, 9 aa, Homo Sapiens
ARTLFNQVM

SEQ ID NO: 85706 - protein, 9 aa, Homo Sapiens
ARTLLAILR

SEQ ID NO: 85707 - protein, 9 aa, Homo Sapiens
ARTSLLLLR

SEQ ID NO: 85708 - protein, 9 aa, Homo Sapiens
ARTSVFLVR

SEQ ID NO: 85709 - protein, 9 aa, Homo Sapiens
ARTTLLPGL

SEQ ID NO: 85710 - protein, 9 aa, Homo Sapiens
ARTVMLFNL

SEQ ID NO: 85711 - protein, 9 aa, Homo Sapiens
ARVAITIYC

SEQ ID NO: 85712 - protein, 9 aa, Homo Sapiens
ARVEVKATF

SEQ ID NO: 85713 - protein, 9 aa, Homo Sapiens
ARVFLQNLL

SEQ ID NO: 85714 - protein, 9 aa, Homo Sapiens
ARVFVILSV

SEQ ID NO: 85715 - protein, 9 aa, Homo Sapiens
ARVIFITEY

SEQ ID NO: 85716 - protein, 9 aa, Homo Sapiens
ARVIIEKYY

SEQ ID NO: 85717 - protein, 9 aa, Homo Sapiens
ARVKMQVTM

SEQ ID NO: 85718 - protein, 9 aa, Homo Sapiens
ARVKVFSKF

SEQ ID NO: 85719 - protein, 9 aa, Homo Sapiens
ARVLLISKL

SEQ ID NO: 85720 - protein, 9 aa, Homo Sapiens
ARVLQDFYL

SEQ ID NO: 85721 - protein, 9 aa, Homo Sapiens
ARVSIVNQY

SEQ ID NO: 85722 - protein, 9 aa, Homo Sapiens
ARVSVEVRF

SEQ ID NO: 85723 - protein, 9 aa, Homo Sapiens
ARVTKVLGR

SEQ ID NO: 85724 - protein, 9 aa, Homo Sapiens
ARVVQKLGF

SEQ ID NO: 85725 - protein, 9 aa, Homo Sapiens
ARVWSLMRF

SEQ ID NO: 85726 - protein, 9 aa, Homo Sapiens
ARWDLISNL

SEQ ID NO: 85727 - protein, 9 aa, Homo Sapiens
ARWELPLTV

SEQ ID NO: 85728 - protein, 9 aa, Homo Sapiens
ARWLTQEEF

SEQ ID NO: 85729 - protein, 9 aa, Homo Sapiens
ARWQQVWLL

SEQ ID NO: 85730 - protein, 9 aa, Homo Sapiens
ARWTYPVLL

SEQ ID NO: 85731 - protein, 9 aa, Homo Sapiens
ARWWAVVVL

SEQ ID NO: 85732 - protein, 9 aa, Homo Sapiens
ARYFPLLAK

SEQ ID NO: 85733 - protein, 9 aa, Homo Sapiens
ARYGLHVRF

SEQ ID NO: 85734 - protein, 9 aa, Homo Sapiens
ARYLMLLVF

SEQ ID NO: 85735 - protein, 9 aa, Homo Sapiens
ARYLVNEGF

SEQ ID NO: 85736 - protein, 9 aa, Homo Sapiens
CRFEGQFSI

SEQ ID NO: 85737 - protein, 9 aa, Homo Sapiens
CRFPELPAR

SEQ ID NO: 85738 - protein, 9 aa, Homo Sapiens
CRSIIQVYL

SEQ ID NO: 85739 - protein, 9 aa, Homo Sapiens
CRTFHTIGF

SEQ ID NO: 85740 - protein, 9 aa, Homo Sapiens
CRVAIRLYL

SEQ ID NO: 85741 - protein, 9 aa, Homo Sapiens
ERADLIAYL

SEQ ID NO: 85742 - protein, 9 aa, Homo Sapiens
ERLQYVFGY

SEQ ID NO: 85743 - protein, 9 aa, Homo Sapiens
ERNPAVYNF

SEQ ID NO: 85744 - protein, 9 aa, Homo Sapiens
ERVKLQEAL

SEQ ID NO: 85745 - protein, 9 aa, Homo Sapiens
ERWEVVLHF

SEQ ID NO: 85746 - protein, 9 aa, Homo Sapiens
FIVEETLPL

SEQ ID NO: 85747 - protein, 9 aa, Homo Sapiens
FRAEINILL

SEQ ID NO: 85748 - protein, 9 aa, Homo Sapiens
FRFAGSENL

SEQ ID NO: 85749 - protein, 9 aa, Homo Sapiens
FRFDGVTSM

SEQ ID NO: 85750 - protein, 9 aa, Homo Sapiens
FRFENVNGY

SEQ ID NO: 85751 - protein, 9 aa, Homo Sapiens
FRGPLVINR

SEQ ID NO: 85752 - protein, 9 aa, Homo Sapiens
FRIEGLAPK

SEQ ID NO: 85753 - protein, 9 aa, Homo Sapiens
FRIHLRNEF

SEQ ID NO: 85754 - protein, 9 aa, Homo Sapiens
FRLDTPLYF

SEQ ID NO: 85755 - protein, 9 aa, Homo Sapiens
FRLINIIHV

SEQ ID NO: 85756 - protein, 9 aa, Homo Sapiens
FRLLWIDTK

SEQ ID NO: 85757 - protein, 9 aa, Homo Sapiens
FRLQNIIGR

SEQ ID NO: 85758 - protein, 9 aa, Homo Sapiens
FRMKLRNLF

SEQ ID NO: 85759 - protein, 9 aa, Homo Sapiens
FRSFVVSKF

SEQ ID NO: 85760 - protein, 9 aa, Homo Sapiens
FRVDYILSV

SEQ ID NO: 85761 - protein, 9 aa, Homo Sapiens
FRVLVVSAK

SEQ ID NO: 85762 - protein, 9 aa, Homo Sapiens
FRYLMGERL

SEQ ID NO: 85763 - protein, 9 aa, Homo Sapiens
FRYNGLIHR

SEQ ID NO: 85764 - protein, 9 aa, Homo Sapiens
FRYPQDYQF

SEQ ID NO: 85765 - protein, 9 aa, Homo Sapiens
FSPFHASVL

SEQ ID NO: 85766 - protein, 9 aa, Homo Sapiens
GRAFIFPSY

SEQ ID NO: 85767 - protein, 9 aa, Homo Sapiens
GRANHFFTV

SEQ ID NO: 85768 - protein, 9 aa, Homo Sapiens
GRAPVLVAL

SEQ ID NO: 85769 - protein, 9 aa, Homo Sapiens
GRDLTDYLM

SEQ ID NO: 85770 - protein, 9 aa, Homo Sapiens
GRFDMQVTV

SEQ ID NO: 85771 - protein, 9 aa, Homo Sapiens
GRFDREFLF

SEQ ID NO: 85772 - protein, 9 aa, Homo Sapiens
GRFDVKIEV

SEQ ID NO: 85773 - protein, 9 aa, Homo Sapiens
GRFDVRWIF

SEQ ID NO: 85774 - protein, 9 aa, Homo Sapiens
GRFEDVYQL

SEQ ID NO: 85775 - protein, 9 aa, Homo Sapiens
GRFFLSSGL

SEQ ID NO: 85776 - protein, 9 aa, Homo Sapiens
GRFFWIVRV

SEQ ID NO: 85777 - protein, 9 aa, Homo Sapiens
GRFHGGNLF

SEQ ID NO: 85778 - protein, 9 aa, Homo Sapiens
GRFITVMKF

SEQ ID NO: 85779 - protein, 9 aa, Homo Sapiens
GRFKDVLVL

SEQ ID NO: 85780 - protein, 9 aa, Homo Sapiens
GRFLEIGKF

SEQ ID NO: 85781 - protein, 9 aa, Homo Sapiens
GRFLIDFSY

SEQ ID NO: 85782 - protein, 9 aa, Homo Sapiens
GRFLVHESF

SEQ ID NO: 85783 - protein, 9 aa, Homo Sapiens
GRFPQVQAF

SEQ ID NO: 85784 - protein, 9 aa, Homo Sapiens
GRFSGLLGR

SEQ ID NO: 85785 - protein, 9 aa, Homo Sapiens
GRFSHRIYV

SEQ ID NO: 85786 - protein, 9 aa, Homo Sapiens
GRFVWRVNL

SEQ ID NO: 85787 - protein, 9 aa, Homo Sapiens
GRGSFMLGL

SEQ ID NO: 85788 - protein, 9 aa, Homo Sapiens
GRHGVFLEL

SEQ ID NO: 85789 - protein, 9 aa, Homo Sapiens
GRHYWEVEV

SEQ ID NO: 85790 - protein, 9 aa, Homo Sapiens
GRIASYYYL

SEQ ID NO: 85791 - protein, 9 aa, Homo Sapiens
GRIAVNICY

SEQ ID NO: 85792 - protein, 9 aa, Homo Sapiens
GRICLDIRL

SEQ ID NO: 85793 - protein, 9 aa, Homo Sapiens
GRIDILINC

SEQ ID NO: 85794 - protein, 9 aa, Homo Sapiens
GRIDKPILK

SEQ ID NO: 85795 - protein, 9 aa, Homo Sapiens
GRIFIGTFK

SEQ ID NO: 85796 - protein, 9 aa, Homo Sapiens
GRIGNFIVK

SEQ ID NO: 85797 - protein, 9 aa, Homo Sapiens
GRIGQVGKF

SEQ ID NO: 85798 - protein, 9 aa, Homo Sapiens
GRIGRLVTR

SEQ ID NO: 85799 - protein, 9 aa, Homo Sapiens
GRIGVFPSV

SEQ ID NO: 85800 - protein, 9 aa, Homo Sapiens
GRIGVITNR

SEQ ID NO: 85801 - protein, 9 aa, Homo Sapiens
GRIPGIYGR

SEQ ID NO: 85802 - protein, 9 aa, Homo Sapiens
GRIQIALKR

SEQ ID NO: 85803 - protein, 9 aa, Homo Sapiens
GRISIMQFF

SEQ ID NO: 85804 - protein, 9 aa, Homo Sapiens
GRIVAFFEF

SEQ ID NO: 85805 - protein, 9 aa, Homo Sapiens
GRIVAFFSF

SEQ ID NO: 85806 - protein, 9 aa, Homo Sapiens
GRIVTIFAF

SEQ ID NO: 85807 - protein, 9 aa, Homo Sapiens
GRIVTLISF

SEQ ID NO: 85808 - protein, 9 aa, Homo Sapiens
GRIYLYLTK

SEQ ID NO: 85809 - protein, 9 aa, Homo Sapiens
GRKGVAINF

SEQ ID NO: 85810 - protein, 9 aa, Homo Sapiens
GRLAAIVAK

SEQ ID NO: 85811 - protein, 9 aa, Homo Sapiens
GRLAPRLGL

SEQ ID NO: 85812 - protein, 9 aa, Homo Sapiens
GRLAWAQQL

SEQ ID NO: 85813 - protein, 9 aa, Homo Sapiens
GRLDAVLQR

SEQ ID NO: 85814 - protein, 9 aa, Homo Sapiens
GRLFAVVHF

SEQ ID NO: 85815 - protein, 9 aa, Homo Sapiens
GRLGISLTR

SEQ ID NO: 85816 - protein, 9 aa, Homo Sapiens
GRLGLVTSR

SEQ ID NO: 85817 - protein, 9 aa, Homo Sapiens
GRLGSFHEL

SEQ ID NO: 85818 - protein, 9 aa, Homo Sapiens
GRLGSFPVR

SEQ ID NO: 85819 - protein, 9 aa, Homo Sapiens
GRLHLGHTF

SEQ ID NO: 85820 - protein, 9 aa, Homo Sapiens
GRLLLAANV

SEQ ID NO: 85821 - protein, 9 aa, Homo Sapiens
GRLLVATTF

SEQ ID NO: 85822 - protein, 9 aa, Homo Sapiens
GRLLWEQEL

SEQ ID NO: 85823 - protein, 9 aa, Homo Sapiens
GRLNLHYAV

SEQ ID NO: 85824 - protein, 9 aa, Homo Sapiens
GRLNSHPIF

SEQ ID NO: 85825 - protein, 9 aa, Homo Sapiens
GRLPFSIRV

SEQ ID NO: 85826 - protein, 9 aa, Homo Sapiens
GRLPRTYRL

SEQ ID NO: 85827 - protein, 9 aa, Homo Sapiens
GRLPSSWAL

SEQ ID NO: 85828 - protein, 9 aa, Homo Sapiens
GRLPVGLSL

SEQ ID NO: 85829 - protein, 9 aa, Homo Sapiens
GRLQLQVTV

SEQ ID NO: 85830 - protein, 9 aa, Homo Sapiens
GRLQLVNKL

SEQ ID NO: 85831 - protein, 9 aa, Homo Sapiens
GRLQPSPLF

SEQ ID NO: 85832 - protein, 9 aa, Homo Sapiens
GRLRSVIQR

SEQ ID NO: 85833 - protein, 9 aa, Homo Sapiens
GRLRVGLRL

SEQ ID NO: 85834 - protein, 9 aa, Homo Sapiens
GRLSDVLKR

SEQ ID NO: 85835 - protein, 9 aa, Homo Sapiens
GRLSNISHL

SEQ ID NO: 85836 - protein, 9 aa, Homo Sapiens
GRLTSQLLR

SEQ ID NO: 85837 - protein, 9 aa, Homo Sapiens
GRLVKDMKI

SEQ ID NO: 85838 - protein, 9 aa, Homo Sapiens
GRLVTRAAF

SEQ ID NO: 85839 - protein, 9 aa, Homo Sapiens
GRLWISVAR

SEQ ID NO: 85840 - protein, 9 aa, Homo Sapiens
GRMESVFNH

SEQ ID NO: 85841 - protein, 9 aa, Homo Sapiens
GRMHGKFSL

SEQ ID NO: 85842 - protein, 9 aa, Homo Sapiens
GRMPFPVNH

SEQ ID NO: 85843 - protein, 9 aa, Homo Sapiens
GRMSIKAYV

SEQ ID NO: 85844 - protein, 9 aa, Homo Sapiens
GRMVQVHEL

SEQ ID NO: 85845 - protein, 9 aa, Homo Sapiens
GRNALEIVM

SEQ ID NO: 85846 - protein, 9 aa, Homo Sapiens
GRNFWVSGL

SEQ ID NO: 85847 - protein, 9 aa, Homo Sapiens
GRNSFEVRV

SEQ ID NO: 85848 - protein, 9 aa, Homo Sapiens
GRNVYRMLF

SEQ ID NO: 85849 - protein, 9 aa, Homo Sapiens
GRQEIFLQR

SEQ ID NO: 85850 - protein, 9 aa, Homo Sapiens
GRQKVSFSF

SEQ ID NO: 85851 - protein, 9 aa, Homo Sapiens
GRSDLIPTI

SEQ ID NO: 85852 - protein, 9 aa, Homo Sapiens
GRSGYNYFF

SEQ ID NO: 85853 - protein, 9 aa, Homo Sapiens
GRSLIINHL

SEQ ID NO: 85854 - protein, 9 aa, Homo Sapiens
GRSLIKLNF

SEQ ID NO: 85855 - protein, 9 aa, Homo Sapiens
GRSLPRFQV

SEQ ID NO: 85856 - protein, 9 aa, Homo Sapiens
GRTDLLRLR

SEQ ID NO: 85857 - protein, 9 aa, Homo Sapiens
GRTELAIKL

SEQ ID NO: 85858 - protein, 9 aa, Homo Sapiens
GRTEVSFTL

SEQ ID NO: 85859 - protein, 9 aa, Homo Sapiens
GRTFIQPNM

SEQ ID NO: 85860 - protein, 9 aa, Homo Sapiens
GRTIKLWVL

SEQ ID NO: 85861 - protein, 9 aa, Homo Sapiens
GRTKIFIRF

SEQ ID NO: 85862 - protein, 9 aa, Homo Sapiens
GRTLIGFLR

SEQ ID NO: 85863 - protein, 9 aa, Homo Sapiens
GRTNLIVNY

SEQ ID NO: 85864 - protein, 9 aa, Homo Sapiens
GRTQMTLTF

SEQ ID NO: 85865 - protein, 9 aa, Homo Sapiens
GRTSLTNLL

SEQ ID NO: 85866 - protein, 9 aa, Homo Sapiens
GRTVILYKV

SEQ ID NO: 85867 - protein, 9 aa, Homo Sapiens
GRTVLVIAH

SEQ ID NO: 85868 - protein, 9 aa, Homo Sapiens
GRVDFAYKF

SEQ ID NO: 85869 - protein, 9 aa, Homo Sapiens
GRVFIIKSY

SEQ ID NO: 85870 - protein, 9 aa, Homo Sapiens
GRVFVLPCI

SEQ ID NO: 85871 - protein, 9 aa, Homo Sapiens
GRVGVFPSL

SEQ ID NO: 85872 - protein, 9 aa, Homo Sapiens
GRVNLNVLR

SEQ ID NO: 85873 - protein, 9 aa, Homo Sapiens
GRVVALFYF

SEQ ID NO: 85874 - protein, 9 aa, Homo Sapiens
GRVVTLVTF

SEQ ID NO: 85875 - protein, 9 aa, Homo Sapiens
GRVYVGFTV

SEQ ID NO: 85876 - protein, 9 aa, Homo Sapiens
GRWDQQYVI

SEQ ID NO: 85877 - protein, 9 aa, Homo Sapiens
GRWPGSSLY

SEQ ID NO: 85878 - protein, 9 aa, Homo Sapiens
GRWQYPLIY

SEQ ID NO: 85879 - protein, 9 aa, Homo Sapiens
GRWRDILSH

SEQ ID NO: 85880 - protein, 9 aa, Homo Sapiens
GRWRSEWKF

SEQ ID NO: 85881 - protein, 9 aa, Homo Sapiens
GRWSGTLNL

SEQ ID NO: 85882 - protein, 9 aa, Homo Sapiens
GRYEITVKL

SEQ ID NO: 85883 - protein, 9 aa, Homo Sapiens
GRYEVAVPL

SEQ ID NO: 85884 - protein, 9 aa, Homo Sapiens
GRYLRRELL

SEQ ID NO: 85885 - protein, 9 aa, Homo Sapiens
GRYQVSWSL

SEQ ID NO: 85886 - protein, 9 aa, Homo Sapiens
GRYTIKVLF

SEQ ID NO: 85887 - protein, 9 aa, Homo Sapiens
GRYTILIKY

SEQ ID NO: 85888 - protein, 9 aa, Homo Sapiens
GSLRVLVLR

SEQ ID NO: 85889 - protein, 9 aa, Homo Sapiens
HAPLTNIPL

SEQ ID NO: 85890 - protein, 9 aa, Homo Sapiens
HRAQLQIRI

SEQ ID NO: 85891 - protein, 9 aa, Homo Sapiens
HRFFTEILR

SEQ ID NO: 85892 - protein, 9 aa, Homo Sapiens
HRFFYSKSF

SEQ ID NO: 85893 - protein, 9 aa, Homo Sapiens
HRFWKTELF

SEQ ID NO: 85894 - protein, 9 aa, Homo Sapiens
HRFYMFHSF

SEQ ID NO: 85895 - protein, 9 aa, Homo Sapiens
HRFYMIQSF

SEQ ID NO: 85896 - protein, 9 aa, Homo Sapiens
HRIDLKTKI

SEQ ID NO: 85897 - protein, 9 aa, Homo Sapiens
HRIEIPFKF

SEQ ID NO: 85898 - protein, 9 aa, Homo Sapiens
HRITIKKRF

SEQ ID NO: 85899 - protein, 9 aa, Homo Sapiens
HRIVEAFRF

SEQ ID NO: 85900 - protein, 9 aa, Homo Sapiens
HRLEELYTK

SEQ ID NO: 85901 - protein, 9 aa, Homo Sapiens
HRLFPKLQF

SEQ ID NO: 85902 - protein, 9 aa, Homo Sapiens
HRLGLIPLI

SEQ ID NO: 85903 - protein, 9 aa, Homo Sapiens
HRLLLIQAF

SEQ ID NO: 85904 - protein, 9 aa, Homo Sapiens
HRLPPVTSF

SEQ ID NO: 85905 - protein, 9 aa, Homo Sapiens
HRNSMKVFL

SEQ ID NO: 85906 - protein, 9 aa, Homo Sapiens
HRSTIITLY

SEQ ID NO: 85907 - protein, 9 aa, Homo Sapiens
HRVALSVQL

SEQ ID NO: 85908 - protein, 9 aa, Homo Sapiens
HRWTMQPRL

SEQ ID NO: 85909 - protein, 9 aa, Homo Sapiens
IPTFQPLLK

SEQ ID NO: 85910 - protein, 9 aa, Homo Sapiens
IQRTPKIQV

SEQ ID NO: 85911 - protein, 9 aa, Homo Sapiens
IRAAPPPLF

SEQ ID NO: 85912 - protein, 9 aa, Homo Sapiens
IRAGLIPKF

SEQ ID NO: 85913 - protein, 9 aa, Homo Sapiens
IRFFGTTNF

SEQ ID NO: 85914 - protein, 9 aa, Homo Sapiens
IRFILIQNR

SEQ ID NO: 85915 - protein, 9 aa, Homo Sapiens
IRGAIILAK

SEQ ID NO: 85916 - protein, 9 aa, Homo Sapiens
IRIVLFLQK

SEQ ID NO: 85917 - protein, 9 aa, Homo Sapiens
IRLPSQYNF

SEQ ID NO: 85918 - protein, 9 aa, Homo Sapiens
IRNDYYLNL

SEQ ID NO: 85919 - protein, 9 aa, Homo Sapiens
IRNIPIPTL

SEQ ID NO: 85920 - protein, 9 aa, Homo Sapiens
IRNSFQPLI

SEQ ID NO: 85921 - protein, 9 aa, Homo Sapiens
IRSAVSVHL

SEQ ID NO: 85922 - protein, 9 aa, Homo Sapiens
IRSKLKLLL

SEQ ID NO: 85923 - protein, 9 aa, Homo Sapiens
IRSSLLLGF

SEQ ID NO: 85924 - protein, 9 aa, Homo Sapiens
IRTGLVRLL

SEQ ID NO: 85925 - protein, 9 aa, Homo Sapiens
IRTITVVQR

SEQ ID NO: 85926 - protein, 9 aa, Homo Sapiens
IRTVIQIHM

SEQ ID NO: 85927 - protein, 9 aa, Homo Sapiens
IRWEKNITL

SEQ ID NO: 85928 - protein, 9 aa, Homo Sapiens
IRWGFIPLV

SEQ ID NO: 85929 - protein, 9 aa, Homo Sapiens
IRYFVSEGF

SEQ ID NO: 85930 - protein, 9 aa, Homo Sapiens
IRYPDPLIK

SEQ ID NO: 85931 - protein, 9 aa, Homo Sapiens
KIIRVTLSK

SEQ ID NO: 85932 - protein, 9 aa, Homo Sapiens
KIVKWDRDM

SEQ ID NO: 85933 - protein, 9 aa, Homo Sapiens
KRAAILTKL

SEQ ID NO: 85934 - protein, 9 aa, Homo Sapiens
KRALVILAK

SEQ ID NO: 85935 - protein, 9 aa, Homo Sapiens
KRASYILRL

SEQ ID NO: 85936 - protein, 9 aa, Homo Sapiens
KRCDIILVM

SEQ ID NO: 85937 - protein, 9 aa, Homo Sapiens
KRDGTVLRL

SEQ ID NO: 85938 - protein, 9 aa, Homo Sapiens
KRFDMAVMF

SEQ ID NO: 85939 - protein, 9 aa, Homo Sapiens
KRFEGLTAR

SEQ ID NO: 85940 - protein, 9 aa, Homo Sapiens
KRFEGLTQR

SEQ ID NO: 85941 - protein, 9 aa, Homo Sapiens
KRFGLNIDR

SEQ ID NO: 85942 - protein, 9 aa, Homo Sapiens
KRFHWTAYL

SEQ ID NO: 85943 - protein, 9 aa, Homo Sapiens
KRFMWRDSF

SEQ ID NO: 85944 - protein, 9 aa, Homo Sapiens
KRFQVAVNL

SEQ ID NO: 85945 - protein, 9 aa, Homo Sapiens
KRFSGTVRL

SEQ ID NO: 85946 - protein, 9 aa, Homo Sapiens
KRFSLDFNL

SEQ ID NO: 85947 - protein, 9 aa, Homo Sapiens
KRFSVPVQH

SEQ ID NO: 85948 - protein, 9 aa, Homo Sapiens
KRIDIIHNL

SEQ ID NO: 85949 - protein, 9 aa, Homo Sapiens
KRINWRTVL

SEQ ID NO: 85950 - protein, 9 aa, Homo Sapiens
KRIVEGILK

SEQ ID NO: 85951 - protein, 9 aa, Homo Sapiens
KRKDFGIMF

SEQ ID NO: 85952 - protein, 9 aa, Homo Sapiens
KRLASSVLR

SEQ ID NO: 85953 - protein, 9 aa, Homo Sapiens
KRLGASLAF

SEQ ID NO: 85954 - protein, 9 aa, Homo Sapiens
KRLGILVVF

SEQ ID NO: 85955 - protein, 9 aa, Homo Sapiens
KRLVVFDAR

SEQ ID NO: 85956 - protein, 9 aa, Homo Sapiens
KRMGMSFGL

SEQ ID NO: 85957 - protein, 9 aa, Homo Sapiens
KRMLEKLGV

SEQ ID NO: 85958 - protein, 9 aa, Homo Sapiens
KRMSGMIRL

SEQ ID NO: 85959 - protein, 9 aa, Homo Sapiens
KRNELVIRV

SEQ ID NO: 85960 - protein, 9 aa, Homo Sapiens
KRNLPLKLL

SEQ ID NO: 85961 - protein, 9 aa, Homo Sapiens
KRNYIRLSF

SEQ ID NO: 85962 - protein, 9 aa, Homo Sapiens
KRQEAIFEL

SEQ ID NO: 85963 - protein, 9 aa, Homo Sapiens
KRVFPKWTY

SEQ ID NO: 85964 - protein, 9 aa, Homo Sapiens
KRVTWIVEF

SEQ ID NO: 85965 - protein, 9 aa, Homo Sapiens
KRWEGLVHI

SEQ ID NO: 85966 - protein, 9 aa, Homo Sapiens
KRYDREFLL

SEQ ID NO: 85967 - protein, 9 aa, Homo Sapiens
LAPLTYISL

SEQ ID NO: 85968 - protein, 9 aa, Homo Sapiens
LPINGNGKQ

SEQ ID NO: 85969 - protein, 9 aa, Homo Sapiens
LRAQILAYK

SEQ ID NO: 85970 - protein, 9 aa, Homo Sapiens
LRFAFRASL

SEQ ID NO: 85971 - protein, 9 aa, Homo Sapiens
LRFDGALNV

SEQ ID NO: 85972 - protein, 9 aa, Homo Sapiens
LRFEVVPSK

SEQ ID NO: 85973 - protein, 9 aa, Homo Sapiens
LRFFQPWGL

SEQ ID NO: 85974 - protein, 9 aa, Homo Sapiens
LRFFWDNKF

SEQ ID NO: 85975 - protein, 9 aa, Homo Sapiens
LRFLFENKL

SEQ ID NO: 85976 - protein, 9 aa, Homo Sapiens
LRFNGRVLF

SEQ ID NO: 85977 - protein, 9 aa, Homo Sapiens
LRFPEILQK

SEQ ID NO: 85978 - protein, 9 aa, Homo Sapiens
LRFPGQLNA

SEQ ID NO: 85979 - protein, 9 aa, Homo Sapiens
LRFQSSAVM

SEQ ID NO: 85980 - protein, 9 aa, Homo Sapiens
LRHEIELRM

SEQ ID NO: 85981 - protein, 9 aa, Homo Sapiens
LRHPNILRL

SEQ ID NO: 85982 - protein, 9 aa, Homo Sapiens
LRIYISNTF

SEQ ID NO: 85983 - protein, 9 aa, Homo Sapiens
LRLDIINSL

SEQ ID NO: 85984 - protein, 9 aa, Homo Sapiens
LRLEAGLNR

SEQ ID NO: 85985 - protein, 9 aa, Homo Sapiens
LRLWLPKSL

SEQ ID NO: 85986 - protein, 9 aa, Homo Sapiens
LRNHMAVAF

SEQ ID NO: 85987 - protein, 9 aa, Homo Sapiens
LRNPLIAGK

SEQ ID NO: 85988 - protein, 9 aa, Homo Sapiens
LRNQSVFNF

SEQ ID NO: 85989 - protein, 9 aa, Homo Sapiens
LRSALQILF

SEQ ID NO: 85990 - protein, 9 aa, Homo Sapiens
LRSDLVLLY

SEQ ID NO: 85991 - protein, 9 aa, Homo Sapiens
LRSGVIVRL

SEQ ID NO: 85992 - protein, 9 aa, Homo Sapiens
LRSNVLLSF

SEQ ID NO: 85993 - protein, 9 aa, Homo Sapiens
LRSSIREFL

SEQ ID NO: 85994 - protein, 9 aa, Homo Sapiens
LRVTPFILK

SEQ ID NO: 85995 - protein, 9 aa, Homo Sapiens
LRWLGANAF

SEQ ID NO: 85996 - protein, 9 aa, Homo Sapiens
LRYLNFFTK

SEQ ID NO: 85997 - protein, 9 aa, Homo Sapiens
LRYPMAVGL

SEQ ID NO: 85998 - protein, 9 aa, Homo Sapiens
LTLPETASL

SEQ ID NO: 85999 - protein, 9 aa, Homo Sapiens
MAPLKMLAL

SEQ ID NO: 86000 - protein, 9 aa, Homo Sapiens
MRANITAIR

SEQ ID NO: 86001 - protein, 9 aa, Homo Sapiens
MRFDGLLGF

SEQ ID NO: 86002 - protein, 9 aa, Homo Sapiens
MRFDGRLGF

SEQ ID NO: 86003 - protein, 9 aa, Homo Sapiens
MRFLAATFL

SEQ ID NO: 86004 - protein, 9 aa, Homo Sapiens
MRLGSIFGL

SEQ ID NO: 86005 - protein, 9 aa, Homo Sapiens
MRLLPRLLL

SEQ ID NO: 86006 - protein, 9 aa, Homo Sapiens
MRLSLPLLL

SEQ ID NO: 86007 - protein, 9 aa, Homo Sapiens
MRMATPLLM

SEQ ID NO: 86008 - protein, 9 aa, Homo Sapiens
MRMSVGLSL

SEQ ID NO: 86009 - protein, 9 aa, Homo Sapiens
MRQKAVSLF

SEQ ID NO: 86010 - protein, 9 aa, Homo Sapiens
MRTSVKISY

SEQ ID NO: 86011 - protein, 9 aa, Homo Sapiens
MRYAVNVAL

SEQ ID NO: 86012 - protein, 9 aa, Homo Sapiens
MRYVASYLL

SEQ ID NO: 86013 - protein, 9 aa, Homo Sapiens
NRFTMEVPK

SEQ ID NO: 86014 - protein, 9 aa, Homo Sapiens
NRIKFVIKR

SEQ ID NO: 86015 - protein, 9 aa, Homo Sapiens
NRLDLLITY

SEQ ID NO: 86016 - protein, 9 aa, Homo Sapiens
NRLPLVVSF

SEQ ID NO: 86017 - protein, 9 aa, Homo Sapiens
NRLSFFFDF

SEQ ID NO: 86018 - protein, 9 aa, Homo Sapiens
NRSIVLLLK

SEQ ID NO: 86019 - protein, 9 aa, Homo Sapiens
NSIRFSIQL

SEQ ID NO: 86020 - protein, 9 aa, Homo Sapiens
PIRLLAAAA

SEQ ID NO: 86021 - protein, 9 aa, Homo Sapiens
QDHRGAFLI

SEQ ID NO: 86022 - protein, 9 aa, Homo Sapiens
QQLYWSHPR

SEQ ID NO: 86023 - protein, 9 aa, Homo Sapiens
QRAAIILGY

SEQ ID NO: 86024 - protein, 9 aa, Homo Sapiens
QRAAVIERF

SEQ ID NO: 86025 - protein, 9 aa, Homo Sapiens
QRAFILTVK

SEQ ID NO: 86026 - protein, 9 aa, Homo Sapiens
QRFASIVAK

SEQ ID NO: 86027 - protein, 9 aa, Homo Sapiens
QRFESYYNY

SEQ ID NO: 86028 - protein, 9 aa, Homo Sapiens
QRFFYTKSF

SEQ ID NO: 86029 - protein, 9 aa, Homo Sapiens
QRFGPPVSR

SEQ ID NO: 86030 - protein, 9 aa, Homo Sapiens
QRFKFLFNL

SEQ ID NO: 86031 - protein, 9 aa, Homo Sapiens
QRFPLSFGF

SEQ ID NO: 86032 - protein, 9 aa, Homo Sapiens
QRFRQFILL

SEQ ID NO: 86033 - protein, 9 aa, Homo Sapiens
QRFVFPVQF

SEQ ID NO: 86034 - protein, 9 aa, Homo Sapiens
QRGPVRVGF

SEQ ID NO: 86035 - protein, 9 aa, Homo Sapiens
QRHDGAFLI

SEQ ID NO: 86036 - protein, 9 aa, Homo Sapiens
QRHSFQISL

SEQ ID NO: 86037 - protein, 9 aa, Homo Sapiens
QRIDLAVLL

SEQ ID NO: 86038 - protein, 9 aa, Homo Sapiens
QRIHLRFMF

SEQ ID NO: 86039 - protein, 9 aa, Homo Sapiens
QRILSQPTF

SEQ ID NO: 86040 - protein, 9 aa, Homo Sapiens
QRINRIMGF

SEQ ID NO: 86041 - protein, 9 aa, Homo Sapiens
QRIQLAEKF

SEQ ID NO: 86042 - protein, 9 aa, Homo Sapiens
QRIYLVTTY

SEQ ID NO: 86043 - protein, 9 aa, Homo Sapiens
QRLDLQIKL

SEQ ID NO: 86044 - protein, 9 aa, Homo Sapiens
QRLEFDINI

SEQ ID NO: 86045 - protein, 9 aa, Homo Sapiens
QRLEMNLGL

SEQ ID NO: 86046 - protein, 9 aa, Homo Sapiens
QRLGFTPSV

SEQ ID NO: 86047 - protein, 9 aa, Homo Sapiens
QRLGIRISM

SEQ ID NO: 86048 - protein, 9 aa, Homo Sapiens
QRLKFRLNL

SEQ ID NO: 86049 - protein, 9 aa, Homo Sapiens
QRLKIMEYY

SEQ ID NO: 86050 - protein, 9 aa, Homo Sapiens
QRLLFRIGY

SEQ ID NO: 86051 - protein, 9 aa, Homo Sapiens
QRLLLVTVF

SEQ ID NO: 86052 - protein, 9 aa, Homo Sapiens
QRLSFLLEK

SEQ ID NO: 86053 - protein, 9 aa, Homo Sapiens
QRLSFSVSR

SEQ ID NO: 86054 - protein, 9 aa, Homo Sapiens
QRMDLVEAF

SEQ ID NO: 86055 - protein, 9 aa, Homo Sapiens
QRMNFLVTL

SEQ ID NO: 86056 - protein, 9 aa, Homo Sapiens
QRMSTRVLL

SEQ ID NO: 86057 - protein, 9 aa, Homo Sapiens
QRNEVVVEL

SEQ ID NO: 86058 - protein, 9 aa, Homo Sapiens
QRNLFILAY

SEQ ID NO: 86059 - protein, 9 aa, Homo Sapiens
QRNLYIAGF

SEQ ID NO: 86060 - protein, 9 aa, Homo Sapiens
QRNVNIFKF

SEQ ID NO: 86061 - protein, 9 aa, Homo Sapiens
QRQDIAFAY

SEQ ID NO: 86062 - protein, 9 aa, Homo Sapiens
QRQSILILK

SEQ ID NO: 86063 - protein, 9 aa, Homo Sapiens
QRSLVLFSV

SEQ ID NO: 86064 - protein, 9 aa, Homo Sapiens
QRTFVLEVM

SEQ ID NO: 86065 - protein, 9 aa, Homo Sapiens
QRTNLDVNL

SEQ ID NO: 86066 - protein, 9 aa, Homo Sapiens
QRTPVQMMY

SEQ ID NO: 86067 - protein, 9 aa, Homo Sapiens
QRTSILQTL

SEQ ID NO: 86068 - protein, 9 aa, Homo Sapiens
QRTSLIVHV

SEQ ID NO: 86069 - protein, 9 aa, Homo Sapiens
QRTVITEEF

SEQ ID NO: 86070 - protein, 9 aa, Homo Sapiens
QRVFPHAEF

SEQ ID NO: 86071 - protein, 9 aa, Homo Sapiens
QRVPLSVQL

SEQ ID NO: 86072 - protein, 9 aa, Homo Sapiens
QRVSIFFDY

SEQ ID NO: 86073 - protein, 9 aa, Homo Sapiens
QRWQSLLNF

SEQ ID NO: 86074 - protein, 9 aa, Homo Sapiens
QRWTVQTCL

SEQ ID NO: 86075 - protein, 9 aa, Homo Sapiens
QRYHFIMAY

SEQ ID NO: 86076 - protein, 9 aa, Homo Sapiens
RQTGIVLNR

SEQ ID NO: 86077 - protein, 9 aa, Homo Sapiens
RRAASLLRF

SEQ ID NO: 86078 - protein, 9 aa, Homo Sapiens
RRAEVELEY

SEQ ID NO: 86079 - protein, 9 aa, Homo Sapiens
RRAFVPQLR

SEQ ID NO: 86080 - protein, 9 aa, Homo Sapiens
RRAHIFPMA

SEQ ID NO: 86081 - protein, 9 aa, Homo Sapiens
RRAPVVVRL

SEQ ID NO: 86082 - protein, 9 aa, Homo Sapiens
RRAQPLVTL

SEQ ID NO: 86083 - protein, 9 aa, Homo Sapiens
RRASYEFMR

SEQ ID NO: 86084 - protein, 9 aa, Homo Sapiens
RRATVFLAM

SEQ ID NO: 86085 - protein, 9 aa, Homo Sapiens
RRDFNHINV

SEQ ID NO: 86086 - protein, 9 aa, Homo Sapiens
RRDILRVQL

SEQ ID NO: 86087 - protein, 9 aa, Homo Sapiens
RRFDLLKRI

SEQ ID NO: 86088 - protein, 9 aa, Homo Sapiens
RRFDTAFFL

SEQ ID NO: 86089 - protein, 9 aa, Homo Sapiens
RRFESFNLF

SEQ ID NO: 86090 - protein, 9 aa, Homo Sapiens
RRFFPYYVY

SEQ ID NO: 86091 - protein, 9 aa, Homo Sapiens
RRFGDKLNF

SEQ ID NO: 86092 - protein, 9 aa, Homo Sapiens
RRFHFSQSL

SEQ ID NO: 86093 - protein, 9 aa, Homo Sapiens
RRFIVVEGL

SEQ ID NO: 86094 - protein, 9 aa, Homo Sapiens
RRFKEPWFL

SEQ ID NO: 86095 - protein, 9 aa, Homo Sapiens
RRFLAARAL

SEQ ID NO: 86096 - protein, 9 aa, Homo Sapiens
RRFLAARTL

SEQ ID NO: 86097 - protein, 9 aa, Homo Sapiens
RRFLGRFGL

SEQ ID NO: 86098 - protein, 9 aa, Homo Sapiens
RRFLKLLRF

SEQ ID NO: 86099 - protein, 9 aa, Homo Sapiens
RRFLRTLRL

SEQ ID NO: 86100 - protein, 9 aa, Homo Sapiens
RRFLTQPQV

SEQ ID NO: 86101 - protein, 9 aa, Homo Sapiens
RRFLVTLRI

SEQ ID NO: 86102 - protein, 9 aa, Homo Sapiens
RRFLYIVNL

SEQ ID NO: 86103 - protein, 9 aa, Homo Sapiens
RRFMQTFVL

SEQ ID NO: 86104 - protein, 9 aa, Homo Sapiens
RRFNYVVKL

SEQ ID NO: 86105 - protein, 9 aa, Homo Sapiens
RRFPDLNRL

SEQ ID NO: 86106 - protein, 9 aa, Homo Sapiens
RRFPEQVRV

SEQ ID NO: 86107 - protein, 9 aa, Homo Sapiens
RRFQFLQKA

SEQ ID NO: 86108 - protein, 9 aa, Homo Sapiens
RRFQSMPVR

SEQ ID NO: 86109 - protein, 9 aa, Homo Sapiens
RRFREQPLL

SEQ ID NO: 86110 - protein, 9 aa, Homo Sapiens
RRFRGDVTL

SEQ ID NO: 86111 - protein, 9 aa, Homo Sapiens
RRFTEIYEF

SEQ ID NO: 86112 - protein, 9 aa, Homo Sapiens
RRFTTSVVR

SEQ ID NO: 86113 - protein, 9 aa, Homo Sapiens
RRFWNSIVM

SEQ ID NO: 86114 - protein, 9 aa, Homo Sapiens
RRGDFIHVM

SEQ ID NO: 86115 - protein, 9 aa, Homo Sapiens
RRGDITIKL

SEQ ID NO: 86116 - protein, 9 aa, Homo Sapiens
RRGEFIQEI

SEQ ID NO: 86117 - protein, 9 aa, Homo Sapiens
RRGLPRLAV

SEQ ID NO: 86118 - protein, 9 aa, Homo Sapiens
RRHEGLPGL

SEQ ID NO: 86119 - protein, 9 aa, Homo Sapiens
RRHFVQVQV

SEQ ID NO: 86120 - protein, 9 aa, Homo Sapiens
RRHIVAAGF

SEQ ID NO: 86121 - protein, 9 aa, Homo Sapiens
RRHMKVAFF

SEQ ID NO: 86122 - protein, 9 aa, Homo Sapiens
RRHNINIGI

SEQ ID NO: 86123 - protein, 9 aa, Homo Sapiens
RRHSIPTGL

SEQ ID NO: 86124 - protein, 9 aa, Homo Sapiens
RRIDFVLVY

SEQ ID NO: 86125 - protein, 9 aa, Homo Sapiens
RRIDITAKL

SEQ ID NO: 86126 - protein, 9 aa, Homo Sapiens
RRIDLNLDI

SEQ ID NO: 86127 - protein, 9 aa, Homo Sapiens
RRIEIAHTL

SEQ ID NO: 86128 - protein, 9 aa, Homo Sapiens
RRIEVNVEL

SEQ ID NO: 86129 - protein, 9 aa, Homo Sapiens
RRILVATNL

SEQ ID NO: 86130 - protein, 9 aa, Homo Sapiens
RRIQFPIEM

SEQ ID NO: 86131 - protein, 9 aa, Homo Sapiens
RRIQVVHAF

SEQ ID NO: 86132 - protein, 9 aa, Homo Sapiens
RRIYLILEY

SEQ ID NO: 86133 - protein, 9 aa, Homo Sapiens
RRKDLVLKY

SEQ ID NO: 86134 - protein, 9 aa, Homo Sapiens
RRKEFETNL

SEQ ID NO: 86135 - protein, 9 aa, Homo Sapiens
RRKEIMLGL

SEQ ID NO: 86136 - protein, 9 aa, Homo Sapiens
RRKEVVVYL

SEQ ID NO: 86137 - protein, 9 aa, Homo Sapiens
RRLDIVRSL

SEQ ID NO: 86138 - protein, 9 aa, Homo Sapiens
RRLDLPIER

SEQ ID NO: 86139 - protein, 9 aa, Homo Sapiens
RRLDLPSNL

SEQ ID NO: 86140 - protein, 9 aa, Homo Sapiens
RRLDLVHTA

SEQ ID NO: 86141 - protein, 9 aa, Homo Sapiens
RRLDPIPQL

SEQ ID NO: 86142 - protein, 9 aa, Homo Sapiens
RRLFPYSQY

SEQ ID NO: 86143 - protein, 9 aa, Homo Sapiens
RRLGLALGL

SEQ ID NO: 86144 - protein, 9 aa, Homo Sapiens
RRLGLAQKL

SEQ ID NO: 86145 - protein, 9 aa, Homo Sapiens
RRLGVQQSL

SEQ ID NO: 86146 - protein, 9 aa, Homo Sapiens
RRLHLVFEY

SEQ ID NO: 86147 - protein, 9 aa, Homo Sapiens
RRLKAELGI

SEQ ID NO: 86148 - protein, 9 aa, Homo Sapiens
RRLLLLLGF

SEQ ID NO: 86149 - protein, 9 aa, Homo Sapiens
RRLLLLPLL

SEQ ID NO: 86150 - protein, 9 aa, Homo Sapiens
RRLNFVRLL

SEQ ID NO: 86151 - protein, 9 aa, Homo Sapiens
RRLNVAITR

SEQ ID NO: 86152 - protein, 9 aa, Homo Sapiens
RRLPQAFRP

SEQ ID NO: 86153 - protein, 9 aa, Homo Sapiens
RRLQVQERL

SEQ ID NO: 86154 - protein, 9 aa, Homo Sapiens
RRLSADIRL

SEQ ID NO: 86155 - protein, 9 aa, Homo Sapiens
RRLSELLRY

SEQ ID NO: 86156 - protein, 9 aa, Homo Sapiens
RRLSFRSTI

SEQ ID NO: 86157 - protein, 9 aa, Homo Sapiens
RRLSLFLNV

SEQ ID NO: 86158 - protein, 9 aa, Homo Sapiens
RRLSVYRQI

SEQ ID NO: 86159 - protein, 9 aa, Homo Sapiens
RRLVFDNQL

SEQ ID NO: 86160 - protein, 9 aa, Homo Sapiens
RRLVGEIVR

SEQ ID NO: 86161 - protein, 9 aa, Homo Sapiens
RRMAEEFRL

SEQ ID NO: 86162 - protein, 9 aa, Homo Sapiens
RRMETIVFL

SEQ ID NO: 86163 - protein, 9 aa, Homo Sapiens
RRMEVYNEF

SEQ ID NO: 86164 - protein, 9 aa, Homo Sapiens
RRMFPFLSF

SEQ ID NO: 86165 - protein, 9 aa, Homo Sapiens
RRMPPPANL

SEQ ID NO: 86166 - protein, 9 aa, Homo Sapiens
RRMTVVGRL

SEQ ID NO: 86167 - protein, 9 aa, Homo Sapiens
RRMWPLAFG

SEQ ID NO: 86168 - protein, 9 aa, Homo Sapiens
RRMYPPPLI

SEQ ID NO: 86169 - protein, 9 aa, Homo Sapiens
RRNDKIIVF

SEQ ID NO: 86170 - protein, 9 aa, Homo Sapiens
RRNLELPRL

SEQ ID NO: 86171 - protein, 9 aa, Homo Sapiens
RRNPEPLRF

SEQ ID NO: 86172 - protein, 9 aa, Homo Sapiens
RRNQLLLEF

SEQ ID NO: 86173 - protein, 9 aa, Homo Sapiens
RRNVGRVLL

SEQ ID NO: 86174 - protein, 9 aa, Homo Sapiens
RRNYIIQNI

SEQ ID NO: 86175 - protein, 9 aa, Homo Sapiens
RRREFVMQV

SEQ ID NO: 86176 - protein, 9 aa, Homo Sapiens
RRSFIIQNI

SEQ ID NO: 86177 - protein, 9 aa, Homo Sapiens
RRSIISPNF

SEQ ID NO: 86178 - protein, 9 aa, Homo Sapiens
RRSNVLTGL

SEQ ID NO: 86179 - protein, 9 aa, Homo Sapiens
RRSPFLQVF

SEQ ID NO: 86180 - protein, 9 aa, Homo Sapiens
RRSQLLMLF

SEQ ID NO: 86181 - protein, 9 aa, Homo Sapiens
RRSQPLISL

SEQ ID NO: 86182 - protein, 9 aa, Homo Sapiens
RRSSIGLRV

SEQ ID NO: 86183 - protein, 9 aa, Homo Sapiens
RRSSINILL

SEQ ID NO: 86184 - protein, 9 aa, Homo Sapiens
RRSSIPITV

SEQ ID NO: 86185 - protein, 9 aa, Homo Sapiens
RRSVPFQML

SEQ ID NO: 86186 - protein, 9 aa, Homo Sapiens
RRSWKILLF

SEQ ID NO: 86187 - protein, 9 aa, Homo Sapiens
RRTEIIEDL

SEQ ID NO: 86188 - protein, 9 aa, Homo Sapiens
RRTGIPISM

SEQ ID NO: 86189 - protein, 9 aa, Homo Sapiens
RRVEIAHAL

SEQ ID NO: 86190 - protein, 9 aa, Homo Sapiens
RRVEKHWRL

SEQ ID NO: 86191 - protein, 9 aa, Homo Sapiens
RRVFIIETM

SEQ ID NO: 86192 - protein, 9 aa, Homo Sapiens
RRVLVQVSY

SEQ ID NO: 86193 - protein, 9 aa, Homo Sapiens
RRVNVELQL

SEQ ID NO: 86194 - protein, 9 aa, Homo Sapiens
RRVQPRVNV

SEQ ID NO: 86195 - protein, 9 aa, Homo Sapiens
RRVQVLLHF

SEQ ID NO: 86196 - protein, 9 aa, Homo Sapiens
RRVYEILRL

SEQ ID NO: 86197 - protein, 9 aa, Homo Sapiens
RRWDDDVVF

SEQ ID NO: 86198 - protein, 9 aa, Homo Sapiens
RRWEQALTF

SEQ ID NO: 86199 - protein, 9 aa, Homo Sapiens
RRWFIQQEM

SEQ ID NO: 86200 - protein, 9 aa, Homo Sapiens
RRWKGLERV

SEQ ID NO: 86201 - protein, 9 aa, Homo Sapiens
RRYEIAVNL

SEQ ID NO: 86202 - protein, 9 aa, Homo Sapiens
RRYGDFFIR

SEQ ID NO: 86203 - protein, 9 aa, Homo Sapiens
RRYNIIPVL

SEQ ID NO: 86204 - protein, 9 aa, Homo Sapiens
RRYQDAIRV

SEQ ID NO: 86205 - protein, 9 aa, Homo Sapiens
RRYVFKLGV

SEQ ID NO: 86206 - protein, 9 aa, Homo Sapiens
RRYWIFPSI

SEQ ID NO: 86207 - protein, 9 aa, Homo Sapiens
RRYWVLPYL

SEQ ID NO: 86208 - protein, 9 aa, Homo Sapiens
RSLSRIFEL

SEQ ID NO: 86209 - protein, 9 aa, Homo Sapiens
SIRFPLFNF

SEQ ID NO: 86210 - protein, 9 aa, Homo Sapiens
SLIEQTTAL

SEQ ID NO: 86211 - protein, 9 aa, Homo Sapiens
SRAKVKFNV

SEQ ID NO: 86212 - protein, 9 aa, Homo Sapiens
SRANSLFAF

SEQ ID NO: 86213 - protein, 9 aa, Homo Sapiens
SRAQFFLHL

SEQ ID NO: 86214 - protein, 9 aa, Homo Sapiens
SRAVTIFIR

SEQ ID NO: 86215 - protein, 9 aa, Homo Sapiens
SRDDNMFQI

SEQ ID NO: 86216 - protein, 9 aa, Homo Sapiens
SRFAQIVQK

SEQ ID NO: 86217 - protein, 9 aa, Homo Sapiens
SRFDIPLGL

SEQ ID NO: 86218 - protein, 9 aa, Homo Sapiens
SRFDLLWLI

SEQ ID NO: 86219 - protein, 9 aa, Homo Sapiens
SRFDMIFIV

SEQ ID NO: 86220 - protein, 9 aa, Homo Sapiens
SRFEKEFSF

SEQ ID NO: 86221 - protein, 9 aa, Homo Sapiens
SRFGKFIQV

SEQ ID NO: 86222 - protein, 9 aa, Homo Sapiens
SRFGKFIRI

SEQ ID NO: 86223 - protein, 9 aa, Homo Sapiens
SRFGKYFEI

SEQ ID NO: 86224 - protein, 9 aa, Homo Sapiens
SRFGNAFHL

SEQ ID NO: 86225 - protein, 9 aa, Homo Sapiens
SRFGSKLGL

SEQ ID NO: 86226 - protein, 9 aa, Homo Sapiens
SRFGTLVNL

SEQ ID NO: 86227 - protein, 9 aa, Homo Sapiens
SRFIFNYVY

SEQ ID NO: 86228 - protein, 9 aa, Homo Sapiens
SRFIKFQEM

SEQ ID NO: 86229 - protein, 9 aa, Homo Sapiens
SRFLIINAM

SEQ ID NO: 86230 - protein, 9 aa, Homo Sapiens
SRFLKSDLF

SEQ ID NO: 86231 - protein, 9 aa, Homo Sapiens
SRFLMPEAY

SEQ ID NO: 86232 - protein, 9 aa, Homo Sapiens
SRFLPRPVF

SEQ ID NO: 86233 - protein, 9 aa, Homo Sapiens
SRFLWVTLL

SEQ ID NO: 86234 - protein, 9 aa, Homo Sapiens
SRFPEALRL

SEQ ID NO: 86235 - protein, 9 aa, Homo Sapiens
SRFQGTLYL

SEQ ID NO: 86236 - protein, 9 aa, Homo Sapiens
SRFQTYITY

SEQ ID NO: 86237 - protein, 9 aa, Homo Sapiens
SRFSLENNF

SEQ ID NO: 86238 - protein, 9 aa, Homo Sapiens
SRFSNVYHL

SEQ ID NO: 86239 - protein, 9 aa, Homo Sapiens
SRHRLLLLL

SEQ ID NO: 86240 - protein, 9 aa, Homo Sapiens
SRHSLDMKF

SEQ ID NO: 86241 - protein, 9 aa, Homo Sapiens
SRIDICLRK

SEQ ID NO: 86242 - protein, 9 aa, Homo Sapiens
SRIDLIPSL

SEQ ID NO: 86243 - protein, 9 aa, Homo Sapiens
SRIDVMVHF

SEQ ID NO: 86244 - protein, 9 aa, Homo Sapiens
SRIFILAHF

SEQ ID NO: 86245 - protein, 9 aa, Homo Sapiens
SRIFVKIFF

SEQ ID NO: 86246 - protein, 9 aa, Homo Sapiens
SRIGLLTRI

SEQ ID NO: 86247 - protein, 9 aa, Homo Sapiens
SRIHVCLYF

SEQ ID NO: 86248 - protein, 9 aa, Homo Sapiens
SRIPFNQAL

SEQ ID NO: 86249 - protein, 9 aa, Homo Sapiens
SRIRKLFNL

SEQ ID NO: 86250 - protein, 9 aa, Homo Sapiens
SRIWPLYLR

SEQ ID NO: 86251 - protein, 9 aa, Homo Sapiens
SRKLVSFTL

SEQ ID NO: 86252 - protein, 9 aa, Homo Sapiens
SRLAIRNEF

SEQ ID NO: 86253 - protein, 9 aa, Homo Sapiens
SRLDQELKL

SEQ ID NO: 86254 - protein, 9 aa, Homo Sapiens
SRLFAVIRF

SEQ ID NO: 86255 - protein, 9 aa, Homo Sapiens
SRLFLFVAL

SEQ ID NO: 86256 - protein, 9 aa, Homo Sapiens
SRLKAAFVK

SEQ ID NO: 86257 - protein, 9 aa, Homo Sapiens
SRLKESFLV

SEQ ID NO: 86258 - protein, 9 aa, Homo Sapiens
SRLKIHFTK

SEQ ID NO: 86259 - protein, 9 aa, Homo Sapiens
SRLKSILKL

SEQ ID NO: 86260 - protein, 9 aa, Homo Sapiens
SRLLLIWQH

SEQ ID NO: 86261 - protein, 9 aa, Homo Sapiens
SRLPFLFTL

SEQ ID NO: 86262 - protein, 9 aa, Homo Sapiens
SRLPRQLFL

SEQ ID NO: 86263 - protein, 9 aa, Homo Sapiens
SRLQIDPVM

SEQ ID NO: 86264 - protein, 9 aa, Homo Sapiens
SRLQPFLQR

SEQ ID NO: 86265 - protein, 9 aa, Homo Sapiens
SRLQYYVPR

SEQ ID NO: 86266 - protein, 9 aa, Homo Sapiens
SRLYIAYQF

SEQ ID NO: 86267 - protein, 9 aa, Homo Sapiens
SRLYLIFEF

SEQ ID NO: 86268 - protein, 9 aa, Homo Sapiens
SRMQLSAEL

SEQ ID NO: 86269 - protein, 9 aa, Homo Sapiens
SRMYFTQTL

SEQ ID NO: 86270 - protein, 9 aa, Homo Sapiens
SRNALLFNL

SEQ ID NO: 86271 - protein, 9 aa, Homo Sapiens
SRNAQTFGF

SEQ ID NO: 86272 - protein, 9 aa, Homo Sapiens
SRNLFVLGF

SEQ ID NO: 86273 - protein, 9 aa, Homo Sapiens
SRNQQIFLR

SEQ ID NO: 86274 - protein, 9 aa, Homo Sapiens
SRSLLQTTF

SEQ ID NO: 86275 - protein, 9 aa, Homo Sapiens
SRSLVNIVK

SEQ ID NO: 86276 - protein, 9 aa, Homo Sapiens
SRSVIRPPF

SEQ ID NO: 86277 - protein, 9 aa, Homo Sapiens
SRTPVLMNF

SEQ ID NO: 86278 - protein, 9 aa, Homo Sapiens
SRTPYHVNL

SEQ ID NO: 86279 - protein, 9 aa, Homo Sapiens
SRVAEMFLF

SEQ ID NO: 86280 - protein, 9 aa, Homo Sapiens
SRVKFSPSL

SEQ ID NO: 86281 - protein, 9 aa, Homo Sapiens
SRVKLILEY

SEQ ID NO: 86282 - protein, 9 aa, Homo Sapiens
SRVLIFSQM

SEQ ID NO: 86283 - protein, 9 aa, Homo Sapiens
SRVLQNVAF

SEQ ID NO: 86284 - protein, 9 aa, Homo Sapiens
SRVPLFPVF

SEQ ID NO: 86285 - protein, 9 aa, Homo Sapiens
SRVWWDSSF

SEQ ID NO: 86286 - protein, 9 aa, Homo Sapiens
SRWEKVVQR

SEQ ID NO: 86287 - protein, 9 aa, Homo Sapiens
SRWLAQPYY

SEQ ID NO: 86288 - protein, 9 aa, Homo Sapiens
SRWLGLLSV

SEQ ID NO: 86289 - protein, 9 aa, Homo Sapiens
SRWPAFPAF

SEQ ID NO: 86290 - protein, 9 aa, Homo Sapiens
SRYFGVLQR

SEQ ID NO: 86291 - protein, 9 aa, Homo Sapiens
SRYLYTLVI

SEQ ID NO: 86292 - protein, 9 aa, Homo Sapiens
SRYQDILVF

SEQ ID NO: 86293 - protein, 9 aa, Homo Sapiens
SRYQGVNLY

SEQ ID NO: 86294 - protein, 9 aa, Homo Sapiens
SRYSFIQAL

SEQ ID NO: 86295 - protein, 9 aa, Homo Sapiens
SRYTGINQF

SEQ ID NO: 86296 - protein, 9 aa, Homo Sapiens
SVPAFASSL

SEQ ID NO: 86297 - protein, 9 aa, Homo Sapiens
SVPVSLQTL

SEQ ID NO: 86298 - protein, 9 aa, Homo Sapiens
TCPRTLLEL

SEQ ID NO: 86299 - protein, 9 aa, Homo Sapiens
TRADLIFTV

SEQ ID NO: 86300 - protein, 9 aa, Homo Sapiens
TRAFLPLLK

SEQ ID NO: 86301 - protein, 9 aa, Homo Sapiens
TRCQFQTKF

SEQ ID NO: 86302 - protein, 9 aa, Homo Sapiens
TRFDQVMKF

SEQ ID NO: 86303 - protein, 9 aa, Homo Sapiens
TRFFQSHYF

SEQ ID NO: 86304 - protein, 9 aa, Homo Sapiens
TRFNKQFLY

SEQ ID NO: 86305 - protein, 9 aa, Homo Sapiens
TRFTITLNY

SEQ ID NO: 86306 - protein, 9 aa, Homo Sapiens
TRISNIFVI

SEQ ID NO: 86307 - protein, 9 aa, Homo Sapiens
TRLFAPWKR

SEQ ID NO: 86308 - protein, 9 aa, Homo Sapiens
TRLFAVLRF

SEQ ID NO: 86309 - protein, 9 aa, Homo Sapiens
TRLFLILNI

SEQ ID NO: 86310 - protein, 9 aa, Homo Sapiens
TRLGFFTTY

SEQ ID NO: 86311 - protein, 9 aa, Homo Sapiens
TRLGIQLDF

SEQ ID NO: 86312 - protein, 9 aa, Homo Sapiens
TRMAIVLRF

SEQ ID NO: 86313 - protein, 9 aa, Homo Sapiens
TRMAVQFEL

SEQ ID NO: 86314 - protein, 9 aa, Homo Sapiens
TRMGPLINR

SEQ ID NO: 86315 - protein, 9 aa, Homo Sapiens
TRMRHVISY

SEQ ID NO: 86316 - protein, 9 aa, Homo Sapiens
TRSAIILHL

SEQ ID NO: 86317 - protein, 9 aa, Homo Sapiens
TRTIYQFHY

SEQ ID NO: 86318 - protein, 9 aa, Homo Sapiens
TRVDTILEF

SEQ ID NO: 86319 - protein, 9 aa, Homo Sapiens
TRVFSLVGK

SEQ ID NO: 86320 - protein, 9 aa, Homo Sapiens
TRVGLDIGK

SEQ ID NO: 86321 - protein, 9 aa, Homo Sapiens
TRVYLILEY

SEQ ID NO: 86322 - protein, 9 aa, Homo Sapiens
TRWDYLTQV

SEQ ID NO: 86323 - protein, 9 aa, Homo Sapiens
TRWNKIVLK

SEQ ID NO: 86324 - protein, 9 aa, Homo Sapiens
TRYHFLILL

SEQ ID NO: 86325 - protein, 9 aa, Homo Sapiens
TRYLIKLLL

SEQ ID NO: 86326 - protein, 9 aa, Homo Sapiens
TRYMFSRPF

SEQ ID NO: 86327 - protein, 9 aa, Homo Sapiens
TRYPTILQL

SEQ ID NO: 86328 - protein, 9 aa, Homo Sapiens
TRYQGVNLY

SEQ ID NO: 86329 - protein, 9 aa, Homo Sapiens
TRYQTFVNF

SEQ ID NO: 86330 - protein, 9 aa, Homo Sapiens
TSRTPLLSM

SEQ ID NO: 86331 - protein, 9 aa, Homo Sapiens
VGRTKLEVK

SEQ ID NO: 86332 - protein, 9 aa, Homo Sapiens
VIPTNVPEL

SEQ ID NO: 86333 - protein, 9 aa, Homo Sapiens
VRAAFQLRL

SEQ ID NO: 86334 - protein, 9 aa, Homo Sapiens
VRAQIRLQF

SEQ ID NO: 86335 - protein, 9 aa, Homo Sapiens
VRAWVVFKL

SEQ ID NO: 86336 - protein, 9 aa, Homo Sapiens
VRFLLGLRF

SEQ ID NO: 86337 - protein, 9 aa, Homo Sapiens
VRLLILILK

SEQ ID NO: 86338 - protein, 9 aa, Homo Sapiens
VRLNIISNL

SEQ ID NO: 86339 - protein, 9 aa, Homo Sapiens
VRLPPITKF

SEQ ID NO: 86340 - protein, 9 aa, Homo Sapiens
VRNDIYITL

SEQ ID NO: 86341 - protein, 9 aa, Homo Sapiens
VRNLSTILK

SEQ ID NO: 86342 - protein, 9 aa, Homo Sapiens
VRNNVIIVM

SEQ ID NO: 86343 - protein, 9 aa, Homo Sapiens
VRNPFTVTV

SEQ ID NO: 86344 - protein, 9 aa, Homo Sapiens
VRSTVRIGL

SEQ ID NO: 86345 - protein, 9 aa, Homo Sapiens
VRVSIAISR

SEQ ID NO: 86346 - protein, 9 aa, Homo Sapiens
VVPPFLQPE

SEQ ID NO: 86347 - protein, 9 aa, Homo Sapiens
WRFKPIEQL

SEQ ID NO: 86348 - protein, 9 aa, Homo Sapiens
WRSDLELQF

SEQ ID NO: 86349 - protein, 9 aa, Homo Sapiens
WRSDVLVEY

SEQ ID NO: 86350 - protein, 9 aa, Homo Sapiens
WRYMGGFAK

SEQ ID NO: 86351 - protein, 9 aa, Homo Sapiens
YIPHGYMEL

SEQ ID NO: 86352 - protein, 9 aa, Homo Sapiens
YRANVIANI

SEQ ID NO: 86353 - protein, 9 aa, Homo Sapiens
YRFETVQKL

SEQ ID NO: 86354 - protein, 9 aa, Homo Sapiens
YRFFLGNQF

SEQ ID NO: 86355 - protein, 9 aa, Homo Sapiens
YRFHEHWRF

SEQ ID NO: 86356 - protein, 9 aa, Homo Sapiens
YRHFLQITL

SEQ ID NO: 86357 - protein, 9 aa, Homo Sapiens
YRHLGRYLF

SEQ ID NO: 86358 - protein, 9 aa, Homo Sapiens
YRIESYWTY

SEQ ID NO: 86359 - protein, 9 aa, Homo Sapiens
YRIKFKESF

SEQ ID NO: 86360 - protein, 9 aa, Homo Sapiens
YRINLQMRL

SEQ ID NO: 86361 - protein, 9 aa, Homo Sapiens
YRIPLNPYL

SEQ ID NO: 86362 - protein, 9 aa, Homo Sapiens
YRKFFETKL

SEQ ID NO: 86363 - protein, 9 aa, Homo Sapiens
YRLGPLLGK

SEQ ID NO: 86364 - protein, 9 aa, Homo Sapiens
YRQPPVPQY

SEQ ID NO: 86365 - protein, 9 aa, Homo Sapiens
YRTDMIQAL

SEQ ID NO: 86366 - protein, 9 aa, Homo Sapiens
YRVTIHKTF

SEQ ID NO: 86367 - protein, 9 aa, Homo Sapiens
YRVYQPVRY

SEQ ID NO: 86368 - protein, 9 aa, Homo Sapiens
YRYPIVLGY

SEQ ID NO: 86369 - protein, 9 aa, Homo Sapiens
YRYRDIVVR

SEQ ID NO: 86370 - protein, 9 aa, Homo Sapiens
YRYYQQLKL

SEQ ID NO: 86371 - protein, 10 aa, Homo Sapiens
ARAALTGLLH

SEQ ID NO: 86372 - protein, 10 aa, Homo Sapiens
ARADLIEVVM

SEQ ID NO: 86373 - protein, 10 aa, Homo Sapiens
ARALFIRPFM

SEQ ID NO: 86374 - protein, 10 aa, Homo Sapiens
ARARLSNLAL

SEQ ID NO: 86375 - protein, 10 aa, Homo Sapiens
ARFALTVVRH

SEQ ID NO: 86376 - protein, 10 aa, Homo Sapiens
ARFAVGTAGL

SEQ ID NO: 86377 - protein, 10 aa, Homo Sapiens
ARFDAYFHQK

SEQ ID NO: 86378 - protein, 10 aa, Homo Sapiens
ARFEGDFKLF

SEQ ID NO: 86379 - protein, 10 aa, Homo Sapiens
ARFEQLISRR

SEQ ID NO: 86380 - protein, 10 aa, Homo Sapiens
ARFGEAVVAR

SEQ ID NO: 86381 - protein, 10 aa, Homo Sapiens
ARFGESIVNL

SEQ ID NO: 86382 - protein, 10 aa, Homo Sapiens
ARFKGQDLKL

SEQ ID NO: 86383 - protein, 10 aa, Homo Sapiens
ARFLLEGQVF

SEQ ID NO: 86384 - protein, 10 aa, Homo Sapiens
ARFRNISRIM

SEQ ID NO: 86385 - protein, 10 aa, Homo Sapiens
ARFSPDGQYL

SEQ ID NO: 86386 - protein, 10 aa, Homo Sapiens
ARFTGAPLKV

SEQ ID NO: 86387 - protein, 10 aa, Homo Sapiens
ARFTGIKTAI

SEQ ID NO: 86388 - protein, 10 aa, Homo Sapiens
ARFTGVGVSK

SEQ ID NO: 86389 - protein, 10 aa, Homo Sapiens
ARFYAVQKLA

SEQ ID NO: 86390 - protein, 10 aa, Homo Sapiens
ARFYGNVSRF

SEQ ID NO: 86391 - protein, 10 aa, Homo Sapiens
ARGFLPYVGM

SEQ ID NO: 86392 - protein, 10 aa, Homo Sapiens
ARHDVIKGLL

SEQ ID NO: 86393 - protein, 10 aa, Homo Sapiens
ARHFQPFARL

SEQ ID NO: 86394 - protein, 10 aa, Homo Sapiens
ARHGEKLLLF

SEQ ID NO: 86395 - protein, 10 aa, Homo Sapiens
ARIKLGDYHF

SEQ ID NO: 86396 - protein, 10 aa, Homo Sapiens
ARIKQIKPLL

SEQ ID NO: 86397 - protein, 10 aa, Homo Sapiens
ARILLDNDHY

SEQ ID NO: 86398 - protein, 10 aa, Homo Sapiens
ARIPPVAVRL

SEQ ID NO: 86399 - protein, 10 aa, Homo Sapiens
ARIRLDQDRL

SEQ ID NO: 86400 - protein, 10 aa, Homo Sapiens
ARISMADVKF

SEQ ID NO: 86401 - protein, 10 aa, Homo Sapiens
ARKQIVINLM

SEQ ID NO: 86402 - protein, 10 aa, Homo Sapiens
ARLAQLLEGY

SEQ ID NO: 86403 - protein, 10 aa, Homo Sapiens
ARLDHKFDLM

SEQ ID NO: 86404 - protein, 10 aa, Homo Sapiens
ARLDWELEQR

SEQ ID NO: 86405 - protein, 10 aa, Homo Sapiens
ARLGILPVGR

SEQ ID NO: 86406 - protein, 10 aa, Homo Sapiens
ARLKDALVRM

SEQ ID NO: 86407 - protein, 10 aa, Homo Sapiens
ARLLLPVAEY

SEQ ID NO: 86408 - protein, 10 aa, Homo Sapiens
ARLNFIWKGF

SEQ ID NO: 86409 - protein, 10 aa, Homo Sapiens
ARLPYLRTWF

SEQ ID NO: 86410 - protein, 10 aa, Homo Sapiens
ARLQIEIGKL

SEQ ID NO: 86411 - protein, 10 aa, Homo Sapiens
ARLQLQGLDL

SEQ ID NO: 86412 - protein, 10 aa, Homo Sapiens
ARLQQMSERF

SEQ ID NO: 86413 - protein, 10 aa, Homo Sapiens
ARLSLTYERL

SEQ ID NO: 86414 - protein, 10 aa, Homo Sapiens
ARLTPIPFGL

SEQ ID NO: 86415 - protein, 10 aa, Homo Sapiens
ARMAQPIVAF

SEQ ID NO: 86416 - protein, 10 aa, Homo Sapiens
ARMKIDPEAF

SEQ ID NO: 86417 - protein, 10 aa, Homo Sapiens
ARMRVLSKAF

SEQ ID NO: 86418 - protein, 10 aa, Homo Sapiens
ARNKEIVHTF

SEQ ID NO: 86419 - protein, 10 aa, Homo Sapiens
ARNSFRYNGL

SEQ ID NO: 86420 - protein, 10 aa, Homo Sapiens
ARNSVLMSGF

SEQ ID NO: 86421 - protein, 10 aa, Homo Sapiens
ARSLFNRMDF

SEQ ID NO: 86422 - protein, 10 aa, Homo Sapiens
ARTLLAILRL

SEQ ID NO: 86423 - protein, 10 aa, Homo Sapiens
ARVFFVHEGY

SEQ ID NO: 86424 - protein, 10 aa, Homo Sapiens
ARVHIGQVIM

SEQ ID NO: 86425 - protein, 10 aa, Homo Sapiens
ARVTGVPLSY

SEQ ID NO: 86426 - protein, 10 aa, Homo Sapiens
ARWLALGSLF

SEQ ID NO: 86427 - protein, 10 aa, Homo Sapiens
ARWLPLGLGL

SEQ ID NO: 86428 - protein, 10 aa, Homo Sapiens
ARWLVRPKEK

SEQ ID NO: 86429 - protein, 10 aa, Homo Sapiens
ARYQLSAIFK

SEQ ID NO: 86430 - protein, 10 aa, Homo Sapiens
ATPAGDIMEL

SEQ ID NO: 86431 - protein, 10 aa, Homo Sapiens
CRFQIVQVLK

SEQ ID NO: 86432 - protein, 10 aa, Homo Sapiens
CRHFVGILNK

SEQ ID NO: 86433 - protein, 10 aa, Homo Sapiens
CRSVAGLLPR

SEQ ID NO: 86434 - protein, 10 aa, Homo Sapiens
FMGNTIIIVM

SEQ ID NO: 86435 - protein, 10 aa, Homo Sapiens
FRFGESTTGF

SEQ ID NO: 86436 - protein, 10 aa, Homo Sapiens
FRFSGLLLGY

SEQ ID NO: 86437 - protein, 10 aa, Homo Sapiens
FRFSGRILGL

SEQ ID NO: 86438 - protein, 10 aa, Homo Sapiens
FRLRYLVGGL

SEQ ID NO: 86439 - protein, 10 aa, Homo Sapiens
FRNIPGITLL

SEQ ID NO: 86440 - protein, 10 aa, Homo Sapiens
FRQYAKDIGF

SEQ ID NO: 86441 - protein, 10 aa, Homo Sapiens
FRYNGLIHRK

SEQ ID NO: 86442 - protein, 10 aa, Homo Sapiens
GQYGNPLNKY

SEQ ID NO: 86443 - protein, 10 aa, Homo Sapiens
GRAEKVTFQF

SEQ ID NO: 86444 - protein, 10 aa, Homo Sapiens
GRALLSLQKF

SEQ ID NO: 86445 - protein, 10 aa, Homo Sapiens
GRAPISNPGM

SEQ ID NO: 86446 - protein, 10 aa, Homo Sapiens
GRDGRLRVGL

SEQ ID NO: 86447 - protein, 10 aa, Homo Sapiens
GRFAPQFSGY

SEQ ID NO: 86448 - protein, 10 aa, Homo Sapiens
GRFDEAYIYM

SEQ ID NO: 86449 - protein, 10 aa, Homo Sapiens
GRFDITIGPK

SEQ ID NO: 86450 - protein, 10 aa, Homo Sapiens
GRFDSSIIRI

SEQ ID NO: 86451 - protein, 10 aa, Homo Sapiens
GRFFSENSSL

SEQ ID NO: 86452 - protein, 10 aa, Homo Sapiens
GRFGGNPGGF

SEQ ID NO: 86453 - protein, 10 aa, Homo Sapiens
GRFGNTPFLF

SEQ ID NO: 86454 - protein, 10 aa, Homo Sapiens
GRFGPLASVK

SEQ ID NO: 86455 - protein, 10 aa, Homo Sapiens
GRFGQDFSTF

SEQ ID NO: 86456 - protein, 10 aa, Homo Sapiens
GRFIVIIPRT

SEQ ID NO: 86457 - protein, 10 aa, Homo Sapiens
GRFKDVLVLL

SEQ ID NO: 86458 - protein, 10 aa, Homo Sapiens
GRFLTGPLNL

SEQ ID NO: 86459 - protein, 10 aa, Homo Sapiens
GRFNGQFKTY

SEQ ID NO: 86460 - protein, 10 aa, Homo Sapiens
GRFPYPQIQK

SEQ ID NO: 86461 - protein, 10 aa, Homo Sapiens
GRFSQLYPER

SEQ ID NO: 86462 - protein, 10 aa, Homo Sapiens
GRFYAFGRVF

SEQ ID NO: 86463 - protein, 10 aa, Homo Sapiens
GRHDIAFVEF

SEQ ID NO: 86464 - protein, 10 aa, Homo Sapiens
GRIAHIPLYF

SEQ ID NO: 86465 - protein, 10 aa, Homo Sapiens
GRIDQVNQLL

SEQ ID NO: 86466 - protein, 10 aa, Homo Sapiens
GRIGNFIVKK

SEQ ID NO: 86467 - protein, 10 aa, Homo Sapiens
GRIKAIQLEY

SEQ ID NO: 86468 - protein, 10 aa, Homo Sapiens
GRIKEIFCPK

SEQ ID NO: 86469 - protein, 10 aa, Homo Sapiens
GRIKLQKALL

SEQ ID NO: 86470 - protein, 10 aa, Homo Sapiens
GRIKVNGIDY

SEQ ID NO: 86471 - protein, 10 aa, Homo Sapiens
GRIRDIDLKR

SEQ ID NO: 86472 - protein, 10 aa, Homo Sapiens
GRISDFHETY

SEQ ID NO: 86473 - protein, 10 aa, Homo Sapiens
GRKDVVEHLL

SEQ ID NO: 86474 - protein, 10 aa, Homo Sapiens
GRKVFVEIPK

SEQ ID NO: 86475 - protein, 10 aa, Homo Sapiens
GRLAAIVAKQ

SEQ ID NO: 86476 - protein, 10 aa, Homo Sapiens
GRLDAVLQRI

SEQ ID NO: 86477 - protein, 10 aa, Homo Sapiens
GRLDLQYAKL

SEQ ID NO: 86478 - protein, 10 aa, Homo Sapiens
GRLFGISLSY

SEQ ID NO: 86479 - protein, 10 aa, Homo Sapiens
GRLLWEQELY

SEQ ID NO: 86480 - protein, 10 aa, Homo Sapiens
GRLPLFGLGR

SEQ ID NO: 86481 - protein, 10 aa, Homo Sapiens
GRLQLFGQDF

SEQ ID NO: 86482 - protein, 10 aa, Homo Sapiens
GRLQQVLTGL

SEQ ID NO: 86483 - protein, 10 aa, Homo Sapiens
GRLSGIEERY

SEQ ID NO: 86484 - protein, 10 aa, Homo Sapiens
GRLTQIKGLF

SEQ ID NO: 86485 - protein, 10 aa, Homo Sapiens
GRMALEFNRL

SEQ ID NO: 86486 - protein, 10 aa, Homo Sapiens
GRMFKQFNKL

SEQ ID NO: 86487 - protein, 10 aa, Homo Sapiens
GRMGIEILSF

SEQ ID NO: 86488 - protein, 10 aa, Homo Sapiens
GRMKFTRPLF

SEQ ID NO: 86489 - protein, 10 aa, Homo Sapiens
GRMKIETNRL

SEQ ID NO: 86490 - protein, 10 aa, Homo Sapiens
GRSAFIGIGF

SEQ ID NO: 86491 - protein, 10 aa, Homo Sapiens
GRSQVSTPRF

SEQ ID NO: 86492 - protein, 10 aa, Homo Sapiens
GRTQLIDAVL

SEQ ID NO: 86493 - protein, 10 aa, Homo Sapiens
GRTYPVQEYF

SEQ ID NO: 86494 - protein, 10 aa, Homo Sapiens
GRVALADIAF

SEQ ID NO: 86495 - protein, 10 aa, Homo Sapiens
GRVGDVYIPR

SEQ ID NO: 86496 - protein, 10 aa, Homo Sapiens
GRVGLLGNTY

SEQ ID NO: 86497 - protein, 10 aa, Homo Sapiens
GRVKGVTIVK

SEQ ID NO: 86498 - protein, 10 aa, Homo Sapiens
GRVLFPATGY

SEQ ID NO: 86499 - protein, 10 aa, Homo Sapiens
GRVLLQNTSF

SEQ ID NO: 86500 - protein, 10 aa, Homo Sapiens
GRVPYPRIPL

SEQ ID NO: 86501 - protein, 10 aa, Homo Sapiens
GRVSLYQPKF

SEQ ID NO: 86502 - protein, 10 aa, Homo Sapiens
GRVYPQAVYF

SEQ ID NO: 86503 - protein, 10 aa, Homo Sapiens
GRWEAAEGLL

SEQ ID NO: 86504 - protein, 10 aa, Homo Sapiens
GRWPGSSLYY

SEQ ID NO: 86505 - protein, 10 aa, Homo Sapiens
GRYDGLVGMF

SEQ ID NO: 86506 - protein, 10 aa, Homo Sapiens
GRYDKTQLRF

SEQ ID NO: 86507 - protein, 10 aa, Homo Sapiens
GRYDMAQLRF

SEQ ID NO: 86508 - protein, 10 aa, Homo Sapiens
GRYFQVEVEK

SEQ ID NO: 86509 - protein, 10 aa, Homo Sapiens
GRYLGKKVQF

SEQ ID NO: 86510 - protein, 10 aa, Homo Sapiens
HPGRVLLQNL

SEQ ID NO: 86511 - protein, 10 aa, Homo Sapiens
HRFEQAFYTY

SEQ ID NO: 86512 - protein, 10 aa, Homo Sapiens
HRFFTEILRM

SEQ ID NO: 86513 - protein, 10 aa, Homo Sapiens
HRFPFSRPEL

SEQ ID NO: 86514 - protein, 10 aa, Homo Sapiens
HRFPSPLAPR

SEQ ID NO: 86515 - protein, 10 aa, Homo Sapiens
HRFYGKNSSY

SEQ ID NO: 86516 - protein, 10 aa, Homo Sapiens
HRFYPDKIDY

SEQ ID NO: 86517 - protein, 10 aa, Homo Sapiens
HRISVFRPGL

SEQ ID NO: 86518 - protein, 10 aa, Homo Sapiens
HRLEELYTKK

SEQ ID NO: 86519 - protein, 10 aa, Homo Sapiens
HRLIIKPYLR

SEQ ID NO: 86520 - protein, 10 aa, Homo Sapiens
HRMWGRLVGL

SEQ ID NO: 86521 - protein, 10 aa, Homo Sapiens
HRWLKGGVVL

SEQ ID NO: 86522 - protein, 10 aa, Homo Sapiens
IQRTPKIQVY

SEQ ID NO: 86523 - protein, 10 aa, Homo Sapiens
IRAFPNKQGY

SEQ ID NO: 86524 - protein, 10 aa, Homo Sapiens
IRFDSSFSRL

SEQ ID NO: 86525 - protein, 10 aa, Homo Sapiens
IRFSNISAAK

SEQ ID NO: 86526 - protein, 10 aa, Homo Sapiens
IRHTVNKITF

SEQ ID NO: 86527 - protein, 10 aa, Homo Sapiens
IRVMLYPSRI

SEQ ID NO: 86528 - protein, 10 aa, Homo Sapiens
IRYPDSHQLF

SEQ ID NO: 86529 - protein, 10 aa, Homo Sapiens
KRFDDPGLML

SEQ ID NO: 86530 - protein, 10 aa, Homo Sapiens
KRFEELGVKF

SEQ ID NO: 86531 - protein, 10 aa, Homo Sapiens
KRFEELTNLI

SEQ ID NO: 86532 - protein, 10 aa, Homo Sapiens
KRFEQKGFRL

SEQ ID NO: 86533 - protein, 10 aa, Homo Sapiens
KRFGLNIDRW

SEQ ID NO: 86534 - protein, 10 aa, Homo Sapiens
KRFHITENSY

SEQ ID NO: 86535 - protein, 10 aa, Homo Sapiens
KRFNADNKLL

SEQ ID NO: 86536 - protein, 10 aa, Homo Sapiens
KRFQAIISRM

SEQ ID NO: 86537 - protein, 10 aa, Homo Sapiens
KRFSVPVQHF

SEQ ID NO: 86538 - protein, 10 aa, Homo Sapiens
KRFYEFSIRL

SEQ ID NO: 86539 - protein, 10 aa, Homo Sapiens
KRFYLPGTSR

SEQ ID NO: 86540 - protein, 10 aa, Homo Sapiens
KRHDLVKLGF

SEQ ID NO: 86541 - protein, 10 aa, Homo Sapiens
KRHNLAIDLM

SEQ ID NO: 86542 - protein, 10 aa, Homo Sapiens
KRHNVFGLDL

SEQ ID NO: 86543 - protein, 10 aa, Homo Sapiens
KRHRPIGIGV

SEQ ID NO: 86544 - protein, 10 aa, Homo Sapiens
KRIDMVPELL

SEQ ID NO: 86545 - protein, 10 aa, Homo Sapiens
KRIEAIVKNY

SEQ ID NO: 86546 - protein, 10 aa, Homo Sapiens
KRIEEFLAQF

SEQ ID NO: 86547 - protein, 10 aa, Homo Sapiens
KRIKPRPERF

SEQ ID NO: 86548 - protein, 10 aa, Homo Sapiens
KRLCEIFTRM

SEQ ID NO: 86549 - protein, 10 aa, Homo Sapiens
KRLDVTVQSF

SEQ ID NO: 86550 - protein, 10 aa, Homo Sapiens
KRLDYITAEI

SEQ ID NO: 86551 - protein, 10 aa, Homo Sapiens
KRLEFLYDKL

SEQ ID NO: 86552 - protein, 10 aa, Homo Sapiens
KRLERVIIGY

SEQ ID NO: 86553 - protein, 10 aa, Homo Sapiens
KRLGYVVRRF

SEQ ID NO: 86554 - protein, 10 aa, Homo Sapiens
KRLNVTPLAR

SEQ ID NO: 86555 - protein, 10 aa, Homo Sapiens
KRLSFHDMNL

SEQ ID NO: 86556 - protein, 10 aa, Homo Sapiens
KRMEHFYLNF

SEQ ID NO: 86557 - protein, 10 aa, Homo Sapiens
KRNGVIIAGY

SEQ ID NO: 86558 - protein, 10 aa, Homo Sapiens
KRVAFNVSKM

SEQ ID NO: 86559 - protein, 10 aa, Homo Sapiens
KRVAVILNEF

SEQ ID NO: 86560 - protein, 10 aa, Homo Sapiens
KRVYLGALKY

SEQ ID NO: 86561 - protein, 10 aa, Homo Sapiens
KRVYNIPVRF

SEQ ID NO: 86562 - protein, 10 aa, Homo Sapiens
KRWGPNYNLM

SEQ ID NO: 86563 - protein, 10 aa, Homo Sapiens
KRWQAIYKQF

SEQ ID NO: 86564 - protein, 10 aa, Homo Sapiens
KRWQNEKLGL

SEQ ID NO: 86565 - protein, 10 aa, Homo Sapiens
KRYAVPSAGL

SEQ ID NO: 86566 - protein, 10 aa, Homo Sapiens
KRYDNVTILF

SEQ ID NO: 86567 - protein, 10 aa, Homo Sapiens
KRYPSLWRRL

SEQ ID NO: 86568 - protein, 10 aa, Homo Sapiens
KRYQDIIHSI

SEQ ID NO: 86569 - protein, 10 aa, Homo Sapiens
KRYWTKTIEK

SEQ ID NO: 86570 - protein, 10 aa, Homo Sapiens
KTIQDLVSLK

SEQ ID NO: 86571 - protein, 10 aa, Homo Sapiens
KVGCKLIPVI

SEQ ID NO: 86572 - protein, 10 aa, Homo Sapiens
LQLRAAALQP

SEQ ID NO: 86573 - protein, 10 aa, Homo Sapiens
LRFDKEVALF

SEQ ID NO: 86574 - protein, 10 aa, Homo Sapiens
LRFEVVPSKF

SEQ ID NO: 86575 - protein, 10 aa, Homo Sapiens
LRFSEIPMKL

SEQ ID NO: 86576 - protein, 10 aa, Homo Sapiens
LRIQINPQNK

SEQ ID NO: 86577 - protein, 10 aa, Homo Sapiens
LRLDSRLWPK

SEQ ID NO: 86578 - protein, 10 aa, Homo Sapiens
LRTALIFGGF

SEQ ID NO: 86579 - protein, 10 aa, Homo Sapiens
LRVDQIIMAK

SEQ ID NO: 86580 - protein, 10 aa, Homo Sapiens
LRVKELEVRK

SEQ ID NO: 86581 - protein, 10 aa, Homo Sapiens
LRVTSVVTGF

SEQ ID NO: 86582 - protein, 10 aa, Homo Sapiens
LSPSSLFSAL

SEQ ID NO: 86583 - protein, 10 aa, Homo Sapiens
LSSDPIALGV

SEQ ID NO: 86584 - protein, 10 aa, Homo Sapiens
MIDRKPRLLF

SEQ ID NO: 86585 - protein, 10 aa, Homo Sapiens
MRANITAIRR

SEQ ID NO: 86586 - protein, 10 aa, Homo Sapiens
MRFSYPDIHF

SEQ ID NO: 86587 - protein, 10 aa, Homo Sapiens
MRLKIGFILR

SEQ ID NO: 86588 - protein, 10 aa, Homo Sapiens
MRLPSGKVGF

SEQ ID NO: 86589 - protein, 10 aa, Homo Sapiens
MRLSLPLLLL

SEQ ID NO: 86590 - protein, 10 aa, Homo Sapiens
MRQKAVSLFL

SEQ ID NO: 86591 - protein, 10 aa, Homo Sapiens
MVLAGRAPGL

SEQ ID NO: 86592 - protein, 10 aa, Homo Sapiens
NLPINGNGKQ

SEQ ID NO: 86593 - protein, 10 aa, Homo Sapiens
NRFAGFGIGL

SEQ ID NO: 86594 - protein, 10 aa, Homo Sapiens
NRFEDILSLF

SEQ ID NO: 86595 - protein, 10 aa, Homo Sapiens
NRLFVGSIPK

SEQ ID NO: 86596 - protein, 10 aa, Homo Sapiens
NRMEPLWTGF

SEQ ID NO: 86597 - protein, 10 aa, Homo Sapiens
PKIVKWDRDM

SEQ ID NO: 86598 - protein, 10 aa, Homo Sapiens
QRFDRPLVTF

SEQ ID NO: 86599 - protein, 10 aa, Homo Sapiens
QRFGELMRKL

SEQ ID NO: 86600 - protein, 10 aa, Homo Sapiens
QRFSHQGVQL

SEQ ID NO: 86601 - protein, 10 aa, Homo Sapiens
QRLDLQIKLS

SEQ ID NO: 86602 - protein, 10 aa, Homo Sapiens
QRLEQLVEAK

SEQ ID NO: 86603 - protein, 10 aa, Homo Sapiens
QRLGTQPYFF

SEQ ID NO: 86604 - protein, 10 aa, Homo Sapiens
QRLIFAGKQL

SEQ ID NO: 86605 - protein, 10 aa, Homo Sapiens
QRMAIQVDKF

SEQ ID NO: 86606 - protein, 10 aa, Homo Sapiens
QRTGLSPLKF

SEQ ID NO: 86607 - protein, 10 aa, Homo Sapiens
QRVQLHIAMF

SEQ ID NO: 86608 - protein, 10 aa, Homo Sapiens
QRWDEAFRKF

SEQ ID NO: 86609 - protein, 10 aa, Homo Sapiens
QRYDSVINRL

SEQ ID NO: 86610 - protein, 10 aa, Homo Sapiens
RDYVVPILII

SEQ ID NO: 86611 - protein, 10 aa, Homo Sapiens
RMFLSFPTTK

SEQ ID NO: 86612 - protein, 10 aa, Homo Sapiens
RQASVIIQRF

SEQ ID NO: 86613 - protein, 10 aa, Homo Sapiens
RQLSVLFRKL

SEQ ID NO: 86614 - protein, 10 aa, Homo Sapiens
RRACYGVLRF

SEQ ID NO: 86615 - protein, 10 aa, Homo Sapiens
RRADLTYAEF

SEQ ID NO: 86616 - protein, 10 aa, Homo Sapiens
RRAKFKFPGR

SEQ ID NO: 86617 - protein, 10 aa, Homo Sapiens
RRALLHYLDF

SEQ ID NO: 86618 - protein, 10 aa, Homo Sapiens
RRAQLPKYQR

SEQ ID NO: 86619 - protein, 10 aa, Homo Sapiens
RRASYEFMRR

SEQ ID NO: 86620 - protein, 10 aa, Homo Sapiens
RRDPLGRDFL

SEQ ID NO: 86621 - protein, 10 aa, Homo Sapiens
RRDVQKVVGF

SEQ ID NO: 86622 - protein, 10 aa, Homo Sapiens
RRFDAMPFTL

SEQ ID NO: 86623 - protein, 10 aa, Homo Sapiens
RRFDLLKRIL

SEQ ID NO: 86624 - protein, 10 aa, Homo Sapiens
RRFDLRFVVI

SEQ ID NO: 86625 - protein, 10 aa, Homo Sapiens
RRFEFQADAF

SEQ ID NO: 86626 - protein, 10 aa, Homo Sapiens
RRFFLEYDRL

SEQ ID NO: 86627 - protein, 10 aa, Homo Sapiens
RRFFMGNQVL

SEQ ID NO: 86628 - protein, 10 aa, Homo Sapiens
RRFGDKLNFR

SEQ ID NO: 86629 - protein, 10 aa, Homo Sapiens
RRFKEFLRQY

SEQ ID NO: 86630 - protein, 10 aa, Homo Sapiens
RRFNIKLWKT

SEQ ID NO: 86631 - protein, 10 aa, Homo Sapiens
RRFQSMPVRL

SEQ ID NO: 86632 - protein, 10 aa, Homo Sapiens
RRFSDIQIRR

SEQ ID NO: 86633 - protein, 10 aa, Homo Sapiens
RRFSILFTMF

SEQ ID NO: 86634 - protein, 10 aa, Homo Sapiens
RRFTTSVVRR

SEQ ID NO: 86635 - protein, 10 aa, Homo Sapiens
RRFVIFPIEY

SEQ ID NO: 86636 - protein, 10 aa, Homo Sapiens
RRFVNVVPTF

SEQ ID NO: 86637 - protein, 10 aa, Homo Sapiens
RRHALIVQGF

SEQ ID NO: 86638 - protein, 10 aa, Homo Sapiens
RRHGLLFLHL

SEQ ID NO: 86639 - protein, 10 aa, Homo Sapiens
RRHVFIWISF

SEQ ID NO: 86640 - protein, 10 aa, Homo Sapiens
RRIANLIKEL

SEQ ID NO: 86641 - protein, 10 aa, Homo Sapiens
RRIAQEVQRF

SEQ ID NO: 86642 - protein, 10 aa, Homo Sapiens
RRIDEINKEL

SEQ ID NO: 86643 - protein, 10 aa, Homo Sapiens
RRIDQLNREL

SEQ ID NO: 86644 - protein, 10 aa, Homo Sapiens
RRIKLYAVEK

SEQ ID NO: 86645 - protein, 10 aa, Homo Sapiens
RRILDGSLGF

SEQ ID NO: 86646 - protein, 10 aa, Homo Sapiens
RRILGLLDAY

SEQ ID NO: 86647 - protein, 10 aa, Homo Sapiens
RRILMGSTLR

SEQ ID NO: 86648 - protein, 10 aa, Homo Sapiens
RRILVATNLF

SEQ ID NO: 86649 - protein, 10 aa, Homo Sapiens
RRINLLVKSF

SEQ ID NO: 86650 - protein, 10 aa, Homo Sapiens
RRIQDPLIEF

SEQ ID NO: 86651 - protein, 10 aa, Homo Sapiens
RRIQFPIEMS

SEQ ID NO: 86652 - protein, 10 aa, Homo Sapiens
RRISGVDRYY

SEQ ID NO: 86653 - protein, 10 aa, Homo Sapiens
RRISIVENCF

SEQ ID NO: 86654 - protein, 10 aa, Homo Sapiens
RRISIVGFGL

SEQ ID NO: 86655 - protein, 10 aa, Homo Sapiens
RRKDGVFLYF

SEQ ID NO: 86656 - protein, 10 aa, Homo Sapiens
RRKDHSFLGF

SEQ ID NO: 86657 - protein, 10 aa, Homo Sapiens
RRKDWIGIFR

SEQ ID NO: 86658 - protein, 10 aa, Homo Sapiens
RRLALFPGVA

SEQ ID NO: 86659 - protein, 10 aa, Homo Sapiens
RRLDFDYKKK

SEQ ID NO: 86660 - protein, 10 aa, Homo Sapiens
RRLDIAGRDI

SEQ ID NO: 86661 - protein, 10 aa, Homo Sapiens
RRLDIEAERL

SEQ ID NO: 86662 - protein, 10 aa, Homo Sapiens
RRLDLLHQQL

SEQ ID NO: 86663 - protein, 10 aa, Homo Sapiens
RRLDTSSLKL

SEQ ID NO: 86664 - protein, 10 aa, Homo Sapiens
RRLEDLIQGL

SEQ ID NO: 86665 - protein, 10 aa, Homo Sapiens
RRLEELITIF

SEQ ID NO: 86666 - protein, 10 aa, Homo Sapiens
RRLEELLRQM

SEQ ID NO: 86667 - protein, 10 aa, Homo Sapiens
RRLENLENLL

SEQ ID NO: 86668 - protein, 10 aa, Homo Sapiens
RRLENNRPLL

SEQ ID NO: 86669 - protein, 10 aa, Homo Sapiens
RRLENVENLL

SEQ ID NO: 86670 - protein, 10 aa, Homo Sapiens
RRLEPAIQKF

SEQ ID NO: 86671 - protein, 10 aa, Homo Sapiens
RRLFEQNVQR

SEQ ID NO: 86672 - protein, 10 aa, Homo Sapiens
RRLGELVKKL

SEQ ID NO: 86673 - protein, 10 aa, Homo Sapiens
RRLGLALGLL

SEQ ID NO: 86674 - protein, 10 aa, Homo Sapiens
RRLIDLGVGL

SEQ ID NO: 86675 - protein, 10 aa, Homo Sapiens
RRLILQGNRI

SEQ ID NO: 86676 - protein, 10 aa, Homo Sapiens
RRLLDTTITF

SEQ ID NO: 86677 - protein, 10 aa, Homo Sapiens
RRLLLLPLLL

SEQ ID NO: 86678 - protein, 10 aa, Homo Sapiens
RRLLPSLIGR

SEQ ID NO: 86679 - protein, 10 aa, Homo Sapiens
RRLLSIKEAF

SEQ ID NO: 86680 - protein, 10 aa, Homo Sapiens
RRLNFLESKF

SEQ ID NO: 86681 - protein, 10 aa, Homo Sapiens
RRLPDQFSKL

SEQ ID NO: 86682 - protein, 10 aa, Homo Sapiens
RRLPILPTLL

SEQ ID NO: 86683 - protein, 10 aa, Homo Sapiens
RRLPTVLLKL

SEQ ID NO: 86684 - protein, 10 aa, Homo Sapiens
RRLPVPRPSF

SEQ ID NO: 86685 - protein, 10 aa, Homo Sapiens
RRLQIEDFEA

SEQ ID NO: 86686 - protein, 10 aa, Homo Sapiens
RRLQYLSSKF

SEQ ID NO: 86687 - protein, 10 aa, Homo Sapiens
RRLSAIFLRL

SEQ ID NO: 86688 - protein, 10 aa, Homo Sapiens
RRLSFLVSYI

SEQ ID NO: 86689 - protein, 10 aa, Homo Sapiens
RRLSIHLNKY

SEQ ID NO: 86690 - protein, 10 aa, Homo Sapiens
RRLVGLASLR

SEQ ID NO: 86691 - protein, 10 aa, Homo Sapiens
RRLVKLVVNF

SEQ ID NO: 86692 - protein, 10 aa, Homo Sapiens
RRLYPLAIQI

SEQ ID NO: 86693 - protein, 10 aa, Homo Sapiens
RRMEIQVKDL

SEQ ID NO: 86694 - protein, 10 aa, Homo Sapiens
RRMLLAHVDL

SEQ ID NO: 86695 - protein, 10 aa, Homo Sapiens
RRMQEMIARM

SEQ ID NO: 86696 - protein, 10 aa, Homo Sapiens
RRMQSINAGF

SEQ ID NO: 86697 - protein, 10 aa, Homo Sapiens
RRMWATQGLA

SEQ ID NO: 86698 - protein, 10 aa, Homo Sapiens
RRMWPLAFGS

SEQ ID NO: 86699 - protein, 10 aa, Homo Sapiens
RRNAVLEADF

SEQ ID NO: 86700 - protein, 10 aa, Homo Sapiens
RRNDDIINFF

SEQ ID NO: 86701 - protein, 10 aa, Homo Sapiens
RRNELKRSFF

SEQ ID NO: 86702 - protein, 10 aa, Homo Sapiens
RRNGPLPLKY

SEQ ID NO: 86703 - protein, 10 aa, Homo Sapiens
RRNGTLPWLR

SEQ ID NO: 86704 - protein, 10 aa, Homo Sapiens
RRNLILNLGL

SEQ ID NO: 86705 - protein, 10 aa, Homo Sapiens
RRNSINFERL

SEQ ID NO: 86706 - protein, 10 aa, Homo Sapiens
RRNSVFQQGM

SEQ ID NO: 86707 - protein, 10 aa, Homo Sapiens
RRNVFFPKRR

SEQ ID NO: 86708 - protein, 10 aa, Homo Sapiens
RRNVNLLEKL

SEQ ID NO: 86709 - protein, 10 aa, Homo Sapiens
RRRIFDAVGF

SEQ ID NO: 86710 - protein, 10 aa, Homo Sapiens
RRSDVEILGY

SEQ ID NO: 86711 - protein, 10 aa, Homo Sapiens
RRSELVFWRW

SEQ ID NO: 86712 - protein, 10 aa, Homo Sapiens
RRSGYITIGY

SEQ ID NO: 86713 - protein, 10 aa, Homo Sapiens
RRSINQPVAF

SEQ ID NO: 86714 - protein, 10 aa, Homo Sapiens
RRSLLFRNAF

SEQ ID NO: 86715 - protein, 10 aa, Homo Sapiens
RRSSIPITVR

SEQ ID NO: 86716 - protein, 10 aa, Homo Sapiens
RRSSLWPMTF

SEQ ID NO: 86717 - protein, 10 aa, Homo Sapiens
RRVFIAGLGL

SEQ ID NO: 86718 - protein, 10 aa, Homo Sapiens
RRVLLLAGRL

SEQ ID NO: 86719 - protein, 10 aa, Homo Sapiens
RRVNQAIWLL

SEQ ID NO: 86720 - protein, 10 aa, Homo Sapiens
RRVVLVNNIL

SEQ ID NO: 86721 - protein, 10 aa, Homo Sapiens
RRWDDSQKYL

SEQ ID NO: 86722 - protein, 10 aa, Homo Sapiens
RRWEQALTFR

SEQ ID NO: 86723 - protein, 10 aa, Homo Sapiens
RRWEQSLRAL

SEQ ID NO: 86724 - protein, 10 aa, Homo Sapiens
RRWGDSVLLV

SEQ ID NO: 86725 - protein, 10 aa, Homo Sapiens
RRWLPAGDAL

SEQ ID NO: 86726 - protein, 10 aa, Homo Sapiens
RRWREPGVGA

SEQ ID NO: 86727 - protein, 10 aa, Homo Sapiens
RRWYPEEYEF

SEQ ID NO: 86728 - protein, 10 aa, Homo Sapiens
RRYDFFVSRF

SEQ ID NO: 86729 - protein, 10 aa, Homo Sapiens
RRYFTQIVGF

SEQ ID NO: 86730 - protein, 10 aa, Homo Sapiens
RRYGLPYVVR

SEQ ID NO: 86731 - protein, 10 aa, Homo Sapiens
RRYHGYIFGF

SEQ ID NO: 86732 - protein, 10 aa, Homo Sapiens
RRYHILGNEM

SEQ ID NO: 86733 - protein, 10 aa, Homo Sapiens
RRYLPKLKAF

SEQ ID NO: 86734 - protein, 10 aa, Homo Sapiens
RRYLSPKYIK

SEQ ID NO: 86735 - protein, 10 aa, Homo Sapiens
RRYNIKLWKT

SEQ ID NO: 86736 - protein, 10 aa, Homo Sapiens
RRYQDAIRVF

SEQ ID NO: 86737 - protein, 10 aa, Homo Sapiens
RRYYKPGLLM

SEQ ID NO: 86738 - protein, 10 aa, Homo Sapiens
SRFAGASIKI

SEQ ID NO: 86739 - protein, 10 aa, Homo Sapiens
SRFDASFFGV

SEQ ID NO: 86740 - protein, 10 aa, Homo Sapiens
SRFDMIFIVK

SEQ ID NO: 86741 - protein, 10 aa, Homo Sapiens
SRFEALNLSF

SEQ ID NO: 86742 - protein, 10 aa, Homo Sapiens
SRFFLQGIQL

SEQ ID NO: 86743 - protein, 10 aa, Homo Sapiens
SRFFMTPPRL

SEQ ID NO: 86744 - protein, 10 aa, Homo Sapiens
SRFGNAFLNR

SEQ ID NO: 86745 - protein, 10 aa, Homo Sapiens
SRFKDRIVSM

SEQ ID NO: 86746 - protein, 10 aa, Homo Sapiens
SRFSLENNFL

SEQ ID NO: 86747 - protein, 10 aa, Homo Sapiens
SRFVDGLTFK

SEQ ID NO: 86748 - protein, 10 aa, Homo Sapiens
SRFYGDLMEK

SEQ ID NO: 86749 - protein, 10 aa, Homo Sapiens
SRHSGPFFTF

SEQ ID NO: 86750 - protein, 10 aa, Homo Sapiens
SRIQQIIEGK

SEQ ID NO: 86751 - protein, 10 aa, Homo Sapiens
SRIWPLYLRF

SEQ ID NO: 86752 - protein, 10 aa, Homo Sapiens
SRLDLIAQQM

SEQ ID NO: 86753 - protein, 10 aa, Homo Sapiens
SRLDQPFIPR

SEQ ID NO: 86754 - protein, 10 aa, Homo Sapiens
SRLDWPVRTL

SEQ ID NO: 86755 - protein, 10 aa, Homo Sapiens
SRLGLRYNRL

SEQ ID NO: 86756 - protein, 10 aa, Homo Sapiens
SRLGNSLLLK

SEQ ID NO: 86757 - protein, 10 aa, Homo Sapiens
SRLKALNATF

SEQ ID NO: 86758 - protein, 10 aa, Homo Sapiens
SRLKYPPFAK

SEQ ID NO: 86759 - protein, 10 aa, Homo Sapiens
SRLPSLGAGF

SEQ ID NO: 86760 - protein, 10 aa, Homo Sapiens
SRLQPFLQRY

SEQ ID NO: 86761 - protein, 10 aa, Homo Sapiens
SRLRYPINGF

SEQ ID NO: 86762 - protein, 10 aa, Homo Sapiens
SRLWPKIQGL

SEQ ID NO: 86763 - protein, 10 aa, Homo Sapiens
SRLYLNVLNR

SEQ ID NO: 86764 - protein, 10 aa, Homo Sapiens
SRMLSGGFGY

SEQ ID NO: 86765 - protein, 10 aa, Homo Sapiens
SRNSFMVIPK

SEQ ID NO: 86766 - protein, 10 aa, Homo Sapiens
SRQGGLLVNF

SEQ ID NO: 86767 - protein, 10 aa, Homo Sapiens
SRTDILSLKM

SEQ ID NO: 86768 - protein, 10 aa, Homo Sapiens
SRTPYHVNLL

SEQ ID NO: 86769 - protein, 10 aa, Homo Sapiens
SRTSVTDVKF

SEQ ID NO: 86770 - protein, 10 aa, Homo Sapiens
SRVILAGNLL

SEQ ID NO: 86771 - protein, 10 aa, Homo Sapiens
SRVNIPKVLR

SEQ ID NO: 86772 - protein, 10 aa, Homo Sapiens
SRWEKVVQRL

SEQ ID NO: 86773 - protein, 10 aa, Homo Sapiens
SRWLAQPYYL

SEQ ID NO: 86774 - protein, 10 aa, Homo Sapiens
TRFFGEALEF

SEQ ID NO: 86775 - protein, 10 aa, Homo Sapiens
TRFYLVFEKL

SEQ ID NO: 86776 - protein, 10 aa, Homo Sapiens
TRIEGLLAAF

SEQ ID NO: 86777 - protein, 10 aa, Homo Sapiens
TRILFFNTPK

SEQ ID NO: 86778 - protein, 10 aa, Homo Sapiens
TRISIFGLGY

SEQ ID NO: 86779 - protein, 10 aa, Homo Sapiens
TRLKLQGAKF

SEQ ID NO: 86780 - protein, 10 aa, Homo Sapiens
TRLSLLNMTF

SEQ ID NO: 86781 - protein, 10 aa, Homo Sapiens
TRMVLVNAVY

SEQ ID NO: 86782 - protein, 10 aa, Homo Sapiens
TRTFIVGAQM

SEQ ID NO: 86783 - protein, 10 aa, Homo Sapiens
VRAIPVDIGF

SEQ ID NO: 86784 - protein, 10 aa, Homo Sapiens
VRFIGELTKF

SEQ ID NO: 86785 - protein, 10 aa, Homo Sapiens
VRFNVLKVTK

SEQ ID NO: 86786 - protein, 10 aa, Homo Sapiens
VRFSPDGNRF

SEQ ID NO: 86787 - protein, 10 aa, Homo Sapiens
VRFYIESISY

SEQ ID NO: 86788 - protein, 10 aa, Homo Sapiens
VRGGVAVPLR

SEQ ID NO: 86789 - protein, 10 aa, Homo Sapiens
VRMNVLADAL

SEQ ID NO: 86790 - protein, 10 aa, Homo Sapiens
VRNGYGFINR

SEQ ID NO: 86791 - protein, 10 aa, Homo Sapiens
VRVKLVSAGF

SEQ ID NO: 86792 - protein, 10 aa, Homo Sapiens
VRWAPNENKF

SEQ ID NO: 86793 - protein, 10 aa, Homo Sapiens
VRWFDPKSSF

SEQ ID NO: 86794 - protein, 10 aa, Homo Sapiens
WRFSGQIERV

SEQ ID NO: 86795 - protein, 10 aa, Homo Sapiens
WRVSLDVNHF

SEQ ID NO: 86796 - protein, 10 aa, Homo Sapiens
YRADIKEMGL

SEQ ID NO: 86797 - protein, 10 aa, Homo Sapiens
YRFATDRNDF

SEQ ID NO: 86798 - protein, 10 aa, Homo Sapiens
YRFDTVIARI

SEQ ID NO: 86799 - protein, 10 aa, Homo Sapiens
YRFEVPTAKF

SEQ ID NO: 86800 - protein, 10 aa, Homo Sapiens
YRFGEMQLDF

SEQ ID NO: 86801 - protein, 10 aa, Homo Sapiens
YRFLPQKIIY

SEQ ID NO: 86802 - protein, 10 aa, Homo Sapiens
YRFNGQYSSL

SEQ ID NO: 86803 - protein, 10 aa, Homo Sapiens
YRGDFETFIK

SEQ ID NO: 86804 - protein, 10 aa, Homo Sapiens
YRIQLKPEQF

SEQ ID NO: 86805 - protein, 10 aa, Homo Sapiens
YRLDLEGNEY

SEQ ID NO: 86806 - protein, 10 aa, Homo Sapiens
YRNEFTAWYR

SEQ ID NO: 86807 - protein, 10 aa, Homo Sapiens
YRNWALKESF

SEQ ID NO: 86808 - protein, 10 aa, Homo Sapiens
YRTEIRMARM

SEQ ID NO: 86809 - protein, 10 aa, Homo Sapiens
YRVLLRYEGF

SEQ ID NO: 86810 - protein, 10 aa, Homo Sapiens
YRWFPSGKVV

SEQ ID NO: 86811 - protein, 10 aa, Homo Sapiens
YRWHINFTTF

SEQ ID NO: 86812 - protein, 10 aa, Homo Sapiens
YRYGIKPEWM

SEQ ID NO: 86813 - protein, 10 aa, Homo Sapiens
YRYIGKTMDY

SEQ ID NO: 86814 - protein, 10 aa, Homo Sapiens
YRYYNKYINV

SEQ ID NO: 86815 - protein, 11 aa, Homo Sapiens
ARAALQELLSK

SEQ ID NO: 86816 - protein, 11 aa, Homo Sapiens
ARAKFIPLITV

SEQ ID NO: 86817 - protein, 11 aa, Homo Sapiens
ARALFIRPFML

SEQ ID NO: 86818 - protein, 11 aa, Homo Sapiens
ARAVVTGLLAL

SEQ ID NO: 86819 - protein, 11 aa, Homo Sapiens
ARDEIEAMIKR

SEQ ID NO: 86820 - protein, 11 aa, Homo Sapiens
ARFDGAEGSWF

SEQ ID NO: 86821 - protein, 11 aa, Homo Sapiens
ARFDPYGKNKF

SEQ ID NO: 86822 - protein, 11 aa, Homo Sapiens
ARFDSKDEILL

SEQ ID NO: 86823 - protein, 11 aa, Homo Sapiens
ARFGPGGQLIK

SEQ ID NO: 86824 - protein, 11 aa, Homo Sapiens
ARFNDLRFVGR

SEQ ID NO: 86825 - protein, 11 aa, Homo Sapiens
ARFPQLDSTSF

SEQ ID NO: 86826 - protein, 11 aa, Homo Sapiens
ARFRNISRIMR

SEQ ID NO: 86827 - protein, 11 aa, Homo Sapiens
ARFRYLMGERL

SEQ ID NO: 86828 - protein, 11 aa, Homo Sapiens
ARFSGNLLVSL

SEQ ID NO: 86829 - protein, 11 aa, Homo Sapiens
ARFSPDGQYLV

SEQ ID NO: 86830 - protein, 11 aa, Homo Sapiens
ARGGFVQILTK

SEQ ID NO: 86831 - protein, 11 aa, Homo Sapiens
ARHGHVDTLKF

SEQ ID NO: 86832 - protein, 11 aa, Homo Sapiens
ARHSNVNLTIF

SEQ ID NO: 86833 - protein, 11 aa, Homo Sapiens
ARIKQIKPLLS

SEQ ID NO: 86834 - protein, 11 aa, Homo Sapiens
ARIQILEGWKK

SEQ ID NO: 86835 - protein, 11 aa, Homo Sapiens
ARLDHKFDLMY

SEQ ID NO: 86836 - protein, 11 aa, Homo Sapiens
ARLDILKIHSR

SEQ ID NO: 86837 - protein, 11 aa, Homo Sapiens
ARLDLPYELLF

SEQ ID NO: 86838 - protein, 11 aa, Homo Sapiens
ARLDWELEQRK

SEQ ID NO: 86839 - protein, 11 aa, Homo Sapiens
ARLEALDYLQK

SEQ ID NO: 86840 - protein, 11 aa, Homo Sapiens
ARLKQQTIPLK

SEQ ID NO: 86841 - protein, 11 aa, Homo Sapiens
ARLLQDHPWLL

SEQ ID NO: 86842 - protein, 11 aa, Homo Sapiens
ARLLQTSNITK

SEQ ID NO: 86843 - protein, 11 aa, Homo Sapiens
ARLNPQYPMFR

SEQ ID NO: 86844 - protein, 11 aa, Homo Sapiens
ARLSAIYGGTY

SEQ ID NO: 86845 - protein, 11 aa, Homo Sapiens
ARLVALNSLKK

SEQ ID NO: 86846 - protein, 11 aa, Homo Sapiens
ARLVQGSILKK

SEQ ID NO: 86847 - protein, 11 aa, Homo Sapiens
ARMLELPTIYR

SEQ ID NO: 86848 - protein, 11 aa, Homo Sapiens
ARMQLSEIMER

SEQ ID NO: 86849 - protein, 11 aa, Homo Sapiens
ARNPSLKQQLF

SEQ ID NO: 86850 - protein, 11 aa, Homo Sapiens
ARSELLTTVSL

SEQ ID NO: 86851 - protein, 11 aa, Homo Sapiens
ARSMVSTIMKF

SEQ ID NO: 86852 - protein, 11 aa, Homo Sapiens
ARSSVVTAVKF

SEQ ID NO: 86853 - protein, 11 aa, Homo Sapiens
ARTTIINEIQY

SEQ ID NO: 86854 - protein, 11 aa, Homo Sapiens
ARWLGTLDKKL

SEQ ID NO: 86855 - protein, 11 aa, Homo Sapiens
ARYFIDSTNLK

SEQ ID NO: 86856 - protein, 11 aa, Homo Sapiens
ARYMPQNPHII

SEQ ID NO: 86857 - protein, 11 aa, Homo Sapiens
ARYQLSAIFKK

SEQ ID NO: 86858 - protein, 11 aa, Homo Sapiens
ARYRSDGALLL

SEQ ID NO: 86859 - protein, 11 aa, Homo Sapiens
ARYVPSTPWFL

SEQ ID NO: 86860 - protein, 11 aa, Homo Sapiens
ASFGERIKNTF

SEQ ID NO: 86861 - protein, 11 aa, Homo Sapiens
CRWAGLPRQGF

SEQ ID NO: 86862 - protein, 11 aa, Homo Sapiens
ERMNLKVPIYF

SEQ ID NO: 86863 - protein, 11 aa, Homo Sapiens
FRFSLEINVNR

SEQ ID NO: 86864 - protein, 11 aa, Homo Sapiens
FRLFPVPGSGL

SEQ ID NO: 86865 - protein, 11 aa, Homo Sapiens
FRVIFTGGVGK

SEQ ID NO: 86866 - protein, 11 aa, Homo Sapiens
FYPHVEVVLTI

SEQ ID NO: 86867 - protein, 11 aa, Homo Sapiens
GRFKIDLGIFR

SEQ ID NO: 86868 - protein, 11 aa, Homo Sapiens
GRFQKDISQGL

SEQ ID NO: 86869 - protein, 11 aa, Homo Sapiens
GRFSHRIYVAY

SEQ ID NO: 86870 - protein, 11 aa, Homo Sapiens
GRFSLPGATCL

SEQ ID NO: 86871 - protein, 11 aa, Homo Sapiens
GRFSSTTGLFY

SEQ ID NO: 86872 - protein, 11 aa, Homo Sapiens
GRFTAAELLSF

SEQ ID NO: 86873 - protein, 11 aa, Homo Sapiens
GRFTGLESIFR

SEQ ID NO: 86874 - protein, 11 aa, Homo Sapiens
GRGAFGEATLY

SEQ ID NO: 86875 - protein, 11 aa, Homo Sapiens
GRGVIPSTLAF
